United States Patent Application Publication US 2022/0098672 A1 - sequence listing, part 4

SEQ ID NO: 31092 - DNA, 880 bp, Homo sapiens
  chr13:28527202-28528082
  hyper
cgcggcttctgtgtggcagctactgagtgcacgctcgacctttgccaccctccgcgctgatggaaactggaggaggatgtggtttagacacaatgtggcccaagcgtccttgtttcctgaatataccccaaagtacaagtcccatctccagttttgaaagaattccccgaggaaaggggcttgagtggagtgggtggaggtgagaggggaagatgaggtgttggagaagcccggcgcacggggcctctattaatattaacttttattaagagttggcctttccccggggcttcacaaagcaggaagtcaagggcagtggaacagggaagggaactggcaggaagagaagaccttgagtaaattatttagctgtgacacgagattaagagtgaccccaccctcctccctgccccacacaccataaagtgggcccaggttggggagcagcgctccagctgccactaatcatggaagcccagaggcgaaatcagcttcccggggacccagaaaattgctggagtctggcgaggggcaaatcaggaagtgtctttgtcggagatgggacggaacccggcttcggggcgcaaccgggctctgggggagaccgcgtttgtccaggtggcaggccgcgccttctgatggctgtgaagagaaggagcgggggttttaagagccacagcgccaccgagagagtggaaaggagtagattagctcgcgcctgctatgcgaggcgactccccccgagacccacccgcagcccagcgcccttggccaggaggcccggaaagccaccgaggcggccgaaaggggccgcggggcacccctcagcccctcctgcggcggctccggctgcccctgctcagcctcccgctccccgccc

SEQ ID NO: 31093 - DNA, 818 bp, Homo sapiens
  chr13:28534792-28535610
  hyper
cgttagaagcgcggtggcctcacttgccggagagggtcttggttttgcgcctttttccgtggcccgggaggcttgccaggcgctcgcagcagcgagccgggtgcttgcatctcagagagcagccgagctcccttccctggccccgtacccgcgtgcaaggggaccgagccccgggaaggggaagaacttgtaatcgcttgcagcgggacaatgtcgacttttgaacctctaaccactaagcaaacaacccatgtgctcttgctccactgtccaaacagggtttattgacaggcgtttcacggcaacgcatagcaaccccggcggctagggggcgggcctgtgggcgcggccggggcgcggggagacctgcggggcaccggggctcagaccggccctgacccaggacccctgacccaggacccctcgcccagcggacccggacacggcttcctcctctgcccggcaccccccgaccccacgccccgcactcctccctctggcttcgaggccaggcgcccgcgggccgggccaccggagcccctttcccaatcctggagctgtatacgccacccggaagggccgcggaattggagaggtgctgcagagggtctatacctcttgctgtttcccggctctgctcatcttccccaactgcccttaaggcgcctccgtgggcgcgctgattaggctctcggatgttggtgggaagatcgaaacgaagggctaagcccccctcgcccgggtcctgccggaaagttcagctcggcggcctccaggatcaaaaattttaaaggctgcagcccggtccccagtggatc

SEQ ID NO: 31094 - DNA, 979 bp, Homo sapiens; identical to SEQ ID NO: 26309
  chr13:28540416-28541395
  hyper

SEQ ID NO: 31095 - DNA, 855 bp, Homo sapiens; identical to SEQ ID NO: 22789
  chr13:28673915-28674770
  binary

SEQ ID NO: 31096 - DNA, 116 bp, Homo sapiens; identical to SEQ ID NO: 13380
  chr13:32983242-32983358
  hypo

SEQ ID NO: 31097 - DNA, 155 bp, Homo sapiens; identical to SEQ ID NO: 23907
  chr13:46661291-46661446
  hypo

SEQ ID NO: 31098 - DNA, 351 bp, Homo sapiens
  chr13:50701609-50701960
  hyper
cgcgcttttcgcccctactttgttcttgcgcagtcttcccagctgcggagaggagggagcgaaagcaaaacgaaagcacccggggcgcatcagttgcaatagcttccctgagcgcggccgtgggaggccaagatctgaggtcgcgaggcgacggtgggggcccgagctgcgcagaaactgggtgggggcggtccctggagggcgcccgggagctgctagaagttgtccggagcccctcaacccccttggaaaagcgaacgcggatgttaatataccaactccgcagggaacttttggcccgggtcttgagctgaaattccagactgaatgggaccgtgctgaaagttcgac

SEQ ID NO: 31099 - DNA, 915 bp, Homo sapiens
  chr13:50704210-50705125
  hyper
cgcggctggatgggcgtggggaatgttgccagtgttcggtcccgactcaggggagaaacggggtgggggtgtggggatcccggaaagggccggaaaagccgggagcaccgggaggtgtgaggccagagtttctgctactgggggctcttccagggaagacgctggcgggaataggatggggctggcagctggggagcctcgcggtggctattgcacgtctcggcccccctggacagggttatgtcaggagagcgccctggcaccgagctctggccgctggataagatactccctcgccggctccctccgtgagcggggctgggcgggtgcggaggggcgggcggtgcgcctcgccgagcccggggcgctgaggtcggcaagtcgtcttcggaactggcggcggcgcttctccagtcgacgtggaaaaaaaaatcgtctcaaatagcacccctcggtctgcagccctttaacactggtaaagtagataacaaggaactctgctgaacgagggaaactcagtttagaacgtcccagagtttccaagtttgtcaagcgactgggaatcttggtcgccgcgtggagagctgcgcccatttccccttccagaagaaaactgaaggcgtattcctccaaaggaaggctgcagtcaggcgccacacagaacacaggcagtcctctccggccgatctcgggctcgcctctcccagggccgtagggagcatcttttctgagcagccccgggagggcagctccgggcgctctccgcgctgggccctgccgcggccggtgcgttacatcaggaaacgcttggtccggttttctgtctgctagtcaaaacaattggctgaatctcgaaataacttttttgatagtccggaaaagaaacatgacaaatagactcaccatcaggcttgc

SEQ ID NO: 31100 - DNA, 82 bp, Homo sapiens; identical to SEQ ID NO: 6873
  chr13:52493838-52493920
  hypo

SEQ ID NO: 31101 - DNA, 820 bp, Homo sapiens
  chr13:53421038-53421858
  hyper
cgggttgttctcgcgcaccgacacctcatagaccggccgcgtgaagagcggcgcgttgtcgttctcgtcgcccacacgcaccgtgtagggccgcactgtgcgcagcgggggcgcgccgcgatcctcggccaccagcgtcaagttgtactcggcgatgcgttcgcggtccagcgacgccgcggtcaccaccaggtagctgcccgcgtaggccggctgcagccggaagtgctcgtgcccatagagggcgcagcgcacttgcccgttggcgcccgagtccctgtccgaggtgctgaccagggccaccaggctctcgcgcgccgccccctccggcaccagcgaagtggcaccagcctccggcgtcccggctcccgccggcgagctagcgtccgctcccccgagtgcagcggcggcggcggcagcggcgaagggtgaggttgccggcgcgcctggggcggccagcggggtgatggcgatgtcgggtgcgttgtcattgacgtctcggatgcgcacgatgaccttgcaggtggcagcgcggggcccgggtccgcggtcctgcgcccgcacgtccagctcgtaggtgtcctgacgctcgtagtccacgggcccggccagggtgaggcggcctgatcgcgggtcaagccgaaagaggcggcgcgcctccggcggggtgcgggcgccaaatgcgaacaccacgtcgccgttaggtccctcgtcggggtcggctgcgtccaggtcgagaagcagggagcccacgggcgcgtcttccgccagctccacttcggccacggcgccctgcgggaaggccgggctgtggtcattc

SEQ ID NO: 31102 - DNA, 994 bp, Homo sapiens
  chr13:58206751-58207745
  hyper
cgtgccggaggagcaaggggccggcacggtgatcgggaacatcggcagggatgctcgactgcagcctgggcttccgcctgcagagcgcggcggcggagggcgcagcaagtcgggtagctaccgggtgctggagaactccgcaccgcacctgctggacgtggacgcagacagcgggctcctctacaccaagcagcgcatcgaccgcgagtccctgtgccgccacaatgccaagtgccagctgtccctcgaggtgttcgccaacgacaaggagatctgcatgatcaaggtagagatccaggacatcaacgacaacgcgccctccttctcctcggaccagatcgaaatggacatctcggagaacgctgctccgggcacccgcttccccctcaccagcgcacatgaccccgacgccggcgagaatgggctccgcacctacctgctcacgcgcgacgatcacggcctctttggactggacgttaagtcccgcggcgacggcaccaagttcccagaactggtcatccagaaggctctggaccgcgagcaacagaatcaccatacgctcgtgctgactgccctggacggtggcgagcctccacgttccgccaccgtacagatcaacgtgaaggtgattgactccaacgacaacagcccggtcttcgaggcgccatcctacttggtggaactgcccgagaacgctccgctgggtacagtggtcatcgatctgaacgccaccgacgccgatgaaggtcccaatggtgaagtgctctactctttcagcagctacgtgcctgaccgcgtgcgggagctcttctccatcgaccccaagaccggcctaatccgtgtgaagggcaatctggactatgaggaaaacgggatgctggagattgacgtgcaggcccgagacctggggcctaaccctatcccagcccactgcaaagtcacggtcaagctcatcgaccgcaacgacaatgcgccgtccatcggtttcgtctcc

SEQ ID NO: 31103 - DNA, 717 bp, Homo sapiens
  chr13:72438297-72439014
  hyper
cgcgcgcgcgcacatacacacacacacacacacacacacacacacacacaacatttaccccaaaatagtcgaaggttcaaagcccaaacacacccaagtcccatggaaggaagaatacctaaacacggaaaagaatttctggctaggtcaggataggacatttgctggactggaattcgaatctttttcgtttcacagccttcccgggcactaacagagaagaagtctttctccatggaaaaaagagctagcgctttttcaacccaatgtccttctggtctccttgctacacttcctttccacctaagtttccctatctctgcgggagcacacactaactccgctccttctctcaatcttcaaacttatttggagggtaccgaagtttctgcgcaaattttgcgcgcagttcccacgtgcccgcttcaggtcttcaactttccctattttctttctcccggaatctcactctgaacttttgcctctgcgcttccttgcagagaaccgtggggacaaagcggcgctgtgaaagggggtggaatgatcatctctaccccgaaactgacaagttgccccactcccgccccctcttggtagatcctcccccactgagcgttcattagcataaaactggtctggctggggaccggtcccgccgcctcctccgtgcgcgcgctttgctgggctggggaagccaaggcacagagtatcagggcc

SEQ ID NO: 31104 - DNA, 1466 bp, Homo sapiens; identical to SEQ ID NO: 27620
  chr13:79169684-79171150
  binary

SEQ ID NO: 31105 - DNA, 1293 bp, Homo sapiens; identical to SEQ ID NO: 29842
  chr13:79175610-79176903
  binary

SEQ ID NO: 31106 - DNA, 742 bp, Homo sapiens
  chr13:95357798-95358540
  hyper
cggcaaaggcctctatggacgcctccagggcagcgcagggaaccaaagggcaccccagatctctgcgggttcgcgccttgcctcgtgggggacaggaggttctctgtcccatgaggttcagtcaaggacaaggagccgggaggggaaaggggcaggagccaaggagagaaacctgaaagaggcaaactttaaatatatcgtaattctttaagggggtgggctctgtgtttctttgcaacttcacagtctcaccatcctcggctttggagtggatttggcagtgaggacaaggacggaacgccggtaggggagtagttgcttgtctcttgtttattcttctcctcttttccagcggcccagataggctgaaggcaaaactctcagcaagggggaagcgaccatcctgcgtggacctttctcccaggggtgggatgatgaaaaaagaaatcctcctggggaagcccctaggtatcccccagcccctacctttattaggaggcccgggtttcccccattaaacttatattcattcattcattcattcattcattcgttcattcattcataccacgactattcagtgagcacctaccatgtgccagacacagtattagactctcaaaaacgcggcataaatggaaactaggccctgaagccagagcctcaggactggctcccgggaatgtttgaagatcatcgcgtatcttggaattgccaggcttcctgctccacagattccagc

SEQ ID NO: 31107 - DNA, 99 bp, Homo sapiens; identical to SEQ ID NO: 23913
  chr13:95888756-95888855
  hypo

SEQ ID NO: 31108 - DNA, 124 bp, Homo sapiens; identical to SEQ ID NO: 23915
  chr13:96409593-96409717
  hypo

SEQ ID NO: 31109 - DNA, 85 bp, Homo sapiens
  chr14:100148278-100148363
  hypo
cgcacgcagacagcccgccccaagggaagaatcaggggcgaagagagatgcaaccccccgggagcatgccaacctacaaaacccc

SEQ ID NO: 31110 - DNA, 170 bp, Homo sapiens
  chr14:100613205-100613375
  binary
cggcaggtggtcgtagtactcgggcgcgatcttccgcacctgtagagaggagggcggggctcaggggctggttctcctcggggccgcacccgcgagcacacacgcagacacctgagcacacgcggtgggcatgcacatgcatattcatgtacgaacatgtttgcgcgcgc

SEQ ID NO: 31111 - DNA, 372 bp, Homo sapiens; identical to SEQ ID NO: 25080
  chr14:100749240-100749612
  hypo

SEQ ID NO: 31112 - DNA, 764 bp, Homo sapiens
  chr14:101033472-101034236
  hyper
cgcccacacaacgcctcggctcaggctccggaaggaaaacacgggaggggtgttcccaaagtaggggtcagggtgccaggggaagtcgtggaggaagtggcaaatattcaaactggctgatcccaggcctgccgcgcaggtggtcccgtgaagtctaccaaggcttaaagtttggcaccgggagggaggccgcgggggacactccccagaagctgtcgcgggattcccccaaaatggctccaagacgcggctgcctggtccagccgcgaggactccatcccccacccccgccccccagaggcggacacttaaaagctcagagccaggcaactggcagcccgggggctggggcgggtggtggttgggggtggggtggggtcgggggagagagcgccggggcagtgcggaacggcacgaacggaacccggagggtccccggggaccagcgagagtccagggcagggagccagaggggcgctgaggaccgcacaggaccaggcggccccgggtagggggcagcccggccctcagtggcgctagccccagcccccgccgcagcggcccgggccggcggaggagccccgcgcgaggctccccagcgcctcgcggcgcgcacacacgcaccacacacacgcacctggcccgcagccccgccgaggccgcccgcgggccctgggggatgcgctcgggtggagcccccttcccccgccttccccagcgccctcacccccgacccggcccccgcgagccgcggcacgggagac

SEQ ID NO: 31113 - DNA, 254 bp, Homo sapiens; identical to SEQ ID NO: 28551
  chr14:101250097-101250351
  hypo

SEQ ID NO: 31114 - DNA, 940 bp, Homo sapiens
  chr14:101923536-101924476
  hyper
cgaggcacagtgggtgcgcaaagaaaaagaggttctcagcggagcgtgtgtgaggcggggggttacgggggaggggagacggggcgggtgtgaagtctgtgccgggaaaagaaaaatatgagtgttctcttttgtgtgcgcacaaacagccgagcgcggggaggtcgggcccggggtcacgcggctccgggctgcagctgccgccgtggggcggggggtcccaggcggccaccgggcgtcgcggccgcctgcggcatcagcattccggcggcgcgggcggccgctgtcctcgcgcgaccccagcccgtccagagcgcgccccggcaccgaccctcggggcgaggcgagcgcagcccccgctggccaacaaggtaagcgcggcgcggggagcggtggccgggagcctgggcgccaggcgacccctcgacagggcgcacggaccggttctccgccgcgcgggtcgatgaccgacggggaggcccgagtctggccccgacgccctggcccggtgtccccgacgcgcctggagcccgggagggaggcgcgggcctggcctgggcccaggaggatggagcccgactcagggccgtctctccccgcttgggggtgctcaggagggcccagggtacctgcgcgggcaccttggcggcgggtcaccctccctccgagccactccgtccgtgggcagcggccttaccaggtccgagccggacgctcagcgttgccctccgcgagcccccagcctcccctcgagcgccgcgggagccccaggtgcacacacgcaggcctgggccgggcctccaggcctctgtccttcgggcgggctgggaggtggcctggcgatgcccgccgaggggtggagagggcgaagccagggcggcgtcggcgaggccatcaaaggccgggggtggcggcccgccgcgttgcccatgaccaggcc

SEQ ID NO: 31115 - DNA, 343 bp, Homo sapiens
  chr14:102467284-102467627
  hypo
cgacagcttcgacaaaatttggatgccctcctgaaccagctgaaaagcttccctgcccggttgcgacagtatgcgtcctatgagtttgttcagaggcttctgaaaggttacatgaaggtaggtggccagtatcgcacggtgatgagtgtccattagaaacgcacctgcacagatcactttgtttactttctccacagataaatatgctggtgattgaactgaaatccgaagcacttaaagaccgccattggaaacagctcatgaaaaggcttcacgttaattgggttgtttctgagctaacccttggccaaatctgggatgttgacttgcagaaaaatgaagc

SEQ ID NO: 31116 - DNA, 182 bp, Homo sapiens
  chr14:102682061-102682243
  hypo
cgtgaggttgtcctgctgtagacaccaggcccgtcgtcggtgcagagcgcttcctacacagggcagtgggggacgttccatttgggatgagaagaactcatgatttacattgtcttactatgaaataccatccctcactcttgacagacgacgtagctgatctgagcagcgccctggcaccc

SEQ ID NO: 31117 - DNA, 745 bp, Homo sapiens
  chr14:103686664-103687409
  hyper
cgcgctcccgggccgaccctctgcggcctctgctctgcgcagtccgtcctcttctcccgacctggcgtgcgtctcctgttccccggccccccatcccatgggaccgtccttcctaacggcacttcaccccgcccggcccacgaggtggtcccgggccggtgacaagatctggacgtggcgactccgggaaggggcgaccgggcgcggagagcccctgggacccaggcctcagggacgcatcggggtcggagctgggcccgggggcggggctggggtggggaggctgaggttccttcgccccttccctcccctcgccccccgcagcctcgcggcgcgtttcctgccccgcccgccaggagggagtggcccccgccaagtcccgcgcgtctctgccaagaccccgtgcgggtccgtgccggtcgcgctatccaggcgcccgcccaggcttggggagctctgcgcgcgggagccggcgactcctcggggcaccagggcgtggcgagggcgtcggcctcggcggggaggccttggctgggccgtcggggtggcgccgtgccctggaggtcgtggctggaagcgaggccgcgggggtccaggagcgctcatcggggcgccagatgcagcctgcgggacgtccagtgcccgcgcaggggccgggcgaggccgtggcctccaggcaacgcgcagccgcgttggcgcgagttttaaatcggtgccttcccagctttgcaagttcttatcaatc

SEQ ID NO: 31118 - DNA, 155 bp, Homo sapiens
  chr14:103977769-103977924
  hypo
cgggacgctcacagcccgcccccaggacctgtggggggagttcagctgcttcggctgcttctgctgctccgcgtgcacatgggcctccttaccaccctggcagtctcctcctcttggaagttttaactattcaagactcaatggccaggcgcggc

SEQ ID NO: 31119 - DNA, 668 bp, Homo sapiens
  chr14:104194172-104194840
  hypo
cggcagtgcgcggagtgcgccctcgtgtccctcaaggaggcggagttctacgacaagcagctcaaagtgctcctgagcggtaaggacgggtgtcctgcacagtcccgcgcgctccgccagccggctcctcgtgtctgtggcgatgctgtgggctgtgcacggggcgttctgcttctctgacgttctctcgccctccctcccttccccgttttcttctggattcgtttagaagcggttatagagccttcccttcttttcagaggcggaatgtcgtctaaaatgttggtgctgactccgctgggcacgtccatcaggtgggaggggaggccctgggcccaggcagcaccttcctccttcccccgggtggaacccggcgccggcgctcgggcgtttgcaaccactgtggctcctcggaggggccggagacctttgcccaatagcacgatgcagacccggttttgagccatctctggggacctggtgtgggagaagggcattctccaggggcatagggtgtgcctccctggaatctgaacaacgagcagcgccttctccccactgtccgtccacctctggccactgccgtcccagcctcctgtcccctgcctgcccgccgtggggtctgggaccacctgccttcctgcccacagctccatcctgtgtgaaac

SEQ ID NO: 31120 - DNA, 657 bp, Homo sapiens; identical to SEQ ID NO: 23929
  chr14:104641166-104641823
  hypo

SEQ ID NO: 31121 - DNA, 423 bp, Homo sapiens; identical to SEQ ID NO: 13401
  chr14:105689521-105689944
  hypo

SEQ ID NO: 31122 - DNA, 189 bp, Homo sapiens; identical to SEQ ID NO: 25089
  chr14:105739056-105739245
  hypo

SEQ ID NO: 31123 - DNA, 173 bp, Homo sapiens; identical to SEQ ID NO: 23936
  chr14:105739475-105739648
  hypo

SEQ ID NO: 31124 - DNA, 528 bp, Homo sapiens; identical to SEQ ID NO: 23066
  chr14:21100641-21101169
  hyper

SEQ ID NO: 31125 - DNA, 612 bp, Homo sapiens; identical to SEQ ID NO: 28557
  chr14:23291730-23292342
  hyper

SEQ ID NO: 31126 - DNA, 751 bp, Homo sapiens
  chr14:24803729-24804480
  hyper
cgccgcgagcgcacagagcacgatccccagcagcagcagcagcagcgggtactgctggctcaggctgtagtaggtctcgtagaagaggtcttcgctggggggcggccgggggctgaagaggcgggccatgatctccccagccccgagccccggggctggctagggccgggcgccgggttacctccttcggcccggcgggccccacctgagcttttctcacccgctcaaagccgctaccaccccgcgcccccaacctcgtggcaatcccgtctcctttttcaggccctccctgcggcctcccagcccgctcccagctggcgatgaggggatccctcagtcctttcctcctcctccctcaaacccggattgtagaggtgccctagaaaagcctcatcgccaggagggcaggatttggggttggtgcgagggagccccgggttcccctgatccccgaactcactgcccgcggcgctggcgcagcggagtgggctaggtccggggagggagccggggacctgatggcggagtcacgctcgccgctgcgctctggctcagagtcccgggcgacaggcgcttccctcccggcgccgcggccccctcccacttccccgacgggacagcccggccccttcctgtgccaaagccggactcccctggtctcctcccgcacttggttttgtctctcctaacaccatcgcctccccgcttcagccccttcagggaagggcaatgtggaccctgggagagatgc

SEQ ID NO: 31127 - DNA, 747 bp, Homo sapiens; identical to SEQ ID NO: 26338
  chr14:29225546-29226293
  hyper

SEQ ID NO: 31128 - DNA, 860 bp, Homo sapiens
  chr14:29228110-29228970
  hyper
cgtgtaatcagtagcgtgtgtatgcatataaataggaaaagagaattatttttaattaattaggaaaataatgtttcatgtgtaattccagaattctctagcgtctcccactgtccgactgttttgtgattgggacttcctctaggaaaacctgcgggccctgttttgtgtttcgagcgggagagcagacactcagctcaaatagaggcctttctctcgtctttcggggtgtttattctatggccaaaaggtaagatggccaaggcagcgatctgagcgtgatgtctggccccgcggggggcccaggaggcccaagttgggacagctccggagctaccccggtgcccctcagctgggggagggcgcgcggcagccgcctgccagccccacaggctgctctccaaaggagctgggctttttcagcgtttctgtttccttgtagcctcatctatcttatctaacaagttcacgctccgggagaaaagaagagggtgagaaaaaaaaaaaagaaagaaaaaagaaaacctcttcaccgcggtgattcatagttcataggctccggagccaaacttgccgacccagcttttttctcgaacattactttctctcctacgtgccttaggacaaacccagaaggaagacactaaaattgccgaacaagaatctaggattgttttaaaaataaaagtgaccccccacagacacctttgatgttgttgattctgacacagaggagtcgagttgttttgtttacacatgctaacggtaacttgctcctgatgccgctctacgcgcagcttagtctgtcttctcctctcctccccgcaggcgactccttccaaagagcgagagagaaatac

SEQ ID NO: 31129 - DNA, 813 bp, Homo sapiens
  chr14:29229026-29229839
  hyper
cgaattaacgtcacctgcatgcaccccagtcttttaactctgaaatgtgctttatagcaatacagacttgaaacctttaactgttttctatatccccgcgtttaccgtggcagatgacctcttagcccaaaattgatttggtgtgtatccggtcttatgtgccaaaaaaagagatacctaggctgaaaaggcaactttaaggggggacatctagagagatgacgcctagaatcaaggcctctggctcgattgcgttcggcaagcgtctgcaacaaaggagcgtcgggcaagctcgcgggtatgcgcagggagcagcggcgcgcagacctgggagccccagctccgcgaagctcctcgaagggaaccctcgcagttacagcctcaagaggcaaggcaggggagggagaaaagctggacctcttgagaaacgctcctccaacagattttccatggcctcgtgttggagaaggggcgcgggggaggagcgagggttggggtaggaagacctactggaaccgactccggagagtgagggccaggtgggtgtaagatgagcacaaagtaaaaacttgcccattggtttgtccacgcaggtttcttgaaagaagcagatagatctgattagtagatactactttccccacgcaaagggagactttggggtgaagggttctctgcgtgcttcctggcttgcttaccccactcatgaagttttctctcctctcattccttcagacctttagtgggtgcaagcatttcctataagatacttattaatctcatatacggaccttgaactgttcaatgttttcc

SEQ ID NO: 31130 - DNA, 903 bp, Homo sapiens
  chr14:29234550-29235453
  hyper
cgggatccttttaaagcccccgattcgcaatttccccattcacttcaacctccaaccgaaccttcccagttccaaagcccaagaagctgggactgtgagatccacgttcccaaggctccccggtgctttccagcagcactcagggttggcaagagctggcttcagtatactgttatttcaggaatgaggcccgcacaaaataaaagcatttgagaaacggaaaggaaaaaaaaggagtgaaaataggaaggcttaaaaaaaaaaccggaaagaaatagacgcccacccttattttccctccaatgtcaacaagcaaaacgaaaatatttccagggtgatcgctcgcagctacccgcttccaattcggattagaagctgaggctggagcggcgaggagaaaacgacatcgagtcaccccgcgcgtgagcgacgctctggagcaggagagaaggaaaaggaagagacacacgtatatagcatgtgttacctgatttatttcgagattgtttggtactgttttctctctgggcacctctcatttcggaaggccatcagaggcgcccactactgagcggccccggccgccgcagcagcacccggagccccagtcccggtttccccgcggtgccggagcccggagctcgccgccgcccaggcctcaggaatcgagtaagtaacccctgtttggccccgcgctcctctgcccacttcctcctcctcatctcatcgctcccaaagctctcccacaccctcctcccccgaagtaaaggacacccccgcacacacgccagcggtgggccttatctccccccttatccaaagctgcgctagactattacctacaaagggcacaattttcctgctggctcagaaatgccagacactggcctgcaaggccgactc

SEQ ID NO: 31131 - DNA, 616 bp, Homo sapiens; identical to SEQ ID NO: 28563
  chr14:29247112-29247728
  hyper

SEQ ID NO: 31132 - DNA, 402 bp, Homo sapiens
  chr14:35023195-35023597
  hypo
cgtccattcaacaaccgttcactgagcgcatagcctgtgcccagacactgttccaggcctctgggagcaaaaaggcctcggtgcccgtattctagttagacaacgagaagcgcggggaggtggggggcgggggtgggagagagaaaatctacaccgggctgcataggtaaattcgtaggttaggtgctaagtgctttgaaaaagcaaacaaacacagggaaagtgagataaggagttgcggcaaggggcaggtggctgtgttaaatcgagtggttggaagaagctgctatgagaaggtaccgtatgagcaaaggacttgaagcaggtgaagggagttggtcacggggcatccccagcacaaacatcagctacagcaaaggcccaggtaggactgggtttggc

SEQ ID NO: 31133 - DNA, 771 bp, Homo sapiens
  chr14:36974427-36975198
  hyper
cgtggcttcgcattcatttgaatgctagaaaaaataaacacacattaagacttttgaaggctccatttctgaattcaagagagatgaaacaaattcgcccaaaagatagaaatctttgcctcggaaattatcggagaatattaacggagagggaggggagcgcgcgggtcgccgaggaaggacgcgggtacggccccttgctttggggtggcagagccgggctcaggagccagccaagctgacttcgcgaggtggcgcctgggcctttcgggggaaagccccgacggcggagccgcggctgggcggggactcaaatgctggcggcctctgggctggggccgagcagggggtgccgaccgcgggaagtctgggcggccgccctcccacccagacgagccgatgctgggccgcggtccctctcagctacctcgcttgcccgcctcggggcccctggagaggggtctgtgcctcccaggcagggaagcgtcttgatgtgcaccccggcgttcaccaaccaaataagggcctcgctcacacagtcgatgtcatgctgggtattaaaagggttgtgctgcagctaaaatatctcacagtgtgtgtgaacctcataaaagggaggacccggattccaagcccctcgaagtccccaagcagcctggagggtgggggactcccctctccttctctccacactgagcccccgggcaagcccaggcctcctcctgcgccggggtccccgggctccgaaactgcgagagccctgcggagccc

SEQ ID NO: 31134 - DNA, 797 bp, Homo sapiens; identical to SEQ ID NO: 28564
  chr14:36993453-36994250
  hyper

SEQ ID NO: 31135 - DNA, 1395 bp, Homo sapiens
  chr14:37123351-37124746
  hyper
cgctgtggaggaggtaagaggtcagctctttcgttggtcctggtgagggtaaaatttttaggcaggaggagcactgactggcaaagggaagaggaaagggttcgccctggaccccacaaatccgcctcttggagcaaacagcctgcaggtagaggggcctattagagcctgcccagttcccgggagggccaaccccagccagtaagaagacctgaggcgtaggatccctgcgcaggaggttgcaggaatgcccccgctagccgcaaggttcctgctggcctgtagagctttcgtgatccccgccaagatgcgaacagtaaggtcctcgtatggatcgcagtttttgtccgaaacctgaaaacactaacttgggatttcgcagttctggccctcgggcccgcctcggaggcgcacccccaatccccacggaacgaattccgcggctaaaatgcattttcccaaggcagtaaaagtgacccctgcacctaacaacctttgggctttctcttctcctgactaccacctctcgcagggtgcgctgaaatctctttatcgttatcgttttttataaatgaaatgatttatttattcgctgtttgcagggaatgaaaggagttgatcctgactccaagatgcattccaaagaaagaaaacgcaactgtagcccggactccgcggaggaaggccaactgactccactacgtgcacttccgagccacttgggcccagctagctgtgttaattatgggttctaattttattgcaactcggcacctcctggtttgttcccactatagtggtcttaaaaagaaacacacacaggcataccccagaatgaatccccgggaaggcaaaggtagattttttcggtgcttgagttgatgctctgagagcgcgctgagagtctcgggcatgtcttggcactcttggaaacaaattgcagccaagagcacggttcttccggtcctctccttgctcctctgtgcgccgctcggccgcgggactcctggaacatgttgtgcaccgcccgagtggctgcggacctcacctcgacgccctggatagccggggccaggaggagacgagcaggcagtctcccgccctcacctagtcagctgcgacctccgcggcgtggactcttggccagcagtgaggaggacaaggttgcagatcctctttgctgcgggttctgggtccggccttgggcggcattctgtcttctaaagtgtggaggtgggtagaagagtgtccactttcagtgtagacacctgaggtatgggggcttctttgggggctccagcgtgagctgctcctgcagattagggaaatggagagaacaacaatggggacatggtggaattcagatttccccctgttaattaacaatatgatttc

SEQ ID NO: 31136 - DNA, 2408 bp, Homo sapiens
  chr14:37126422-37128830
  hyper
cgctgttgaaaactgaaaaatgggtgtaatttgctttcagaaagtaatgttagggtcacggcaatttctcgggccgttatttatttttactttaaagtctttaggaaagatttgcttatatgctcggaaaacttccaaatgcgcgaataccagcaatcccgctcgccttcaacgcgtggggtaagggggggtggggaacaattactgagtgacgctaatatggggaaactgaaaagaaatgtcgattgtttttattgtaatagaaggagtgagcaaacagaaaaaccaaccccgggtgatcggaaacaggcaggcggagaattaaaagcgggtttcagacagcaacaggcccctcccctgctctcgcaaggagaaagcgggcgacgagcgctcgcagcccgtggggctgatcccacctcccgcagggctccggtcgtgtcgctgtcggaccgcagaacgccgggacgcatttccgagctcgggcccgacccaacccgctgccattctagctacctagtggagccgcggagagactcttgaaccgtgaggctccttgatgagaaggtggagaggctgccgggctattctccgagcatcttccggccgagctctgctcctctccgtgcgcttgcggcttctccttgggctagcgcgtccgcagtccctccaagtccaggccgcaggtcagtgtgcgggcgcctcctgtcctcctctcccaccagaggacccctgagggctgtctccatccccaatccccgcgactgctccttttagccgccatcccctcccgcagcgcagatcctgcaggggccagcggtccagggcggaccctccctcgccctgggcgcggggcgagcttctggctgtcacttgccgctgcagtttcagggaaactcagctggccgcttaccctgcaagacggggacatagcagagggccgagttctggagaagctgggcttgtttttctctctgcaccgcgcgcaatgccccaactgaccctgaagggtcttgcctttactgcatttgcccccagacggctagaagtcaatgcactatgaaaatcccagtcccggacctcggactctggctgtcttacaatccctgcaactcctccgagtggacaagaggcgggcaccgtcgcctgggcctcgcttggggggggggggtcctgtccccagcagggggcaagttggaggaatcagctccttaatattttctgctagctctgcttgtcataactgcaactcggaatagaacaacctctctcccgtgcatacgcacccccaactctcgccctatcctcccatccacagtcatcactgacctgtagacccggaggagcaggcttccgggggtcggtccaggttggggatacagggaggggtcctcgcgttccgcacaacctgtagtgcttgggtctgacttcggcagccctcgggtacagtctgccgggctagattcccgttgcttctccgcgtctctccgcgggccgctctagcgccgggaagggggcgccgcaggtgactgcccgcggcactgggacggctgacagatttatggagacttcacagcatctggctggggtccgcgagggcagggcggagtccggtcgatccgatgctggggtctaaagcttccccagccacacgcctgggccgagtcgcccccagagtccccggcccctgctccccttgggcgggtgtacacaaggatccggccagcgccgagtgtactggttcctcccacccagtgtagccccctccttcacactctcggcccggcttccagtctcccactgagtaaatatttatccagagagcgagtcgcccctcggaggaggcctcgacgcggctagggaaaggctttttggcttctccctggcctgagccagctgcaggccttactggtgttttggttttggtcttaaatttctccttttagtcgaaattcttccgatctctttgagatcttctgagtccagagtgagcagtgtaaccaggcggcagactccagctgacccttgttcttgttctaggtcctgcatccttacattcatcgggactgaccagaccttagtgttctctcttttccttccttcatcctctttctctgcctcagatccgtcgtctctcggtcggtctcagcgggtcgctgactacctcgccctagcactcggtccgcgccccgggaaggcttcagcatcaccctcttctgctgggatcccgctgaccctgtctgcagcttcggcttctcttgctcccagagcggggtcttcggcttgccgcggatacttagtggcccaaaacacctaaaattgactcttcctgcgctcttgagaatgccaagagcacccagtacctgcaaccgccggcatgagtggggcctgcggggagccgccagagctgc

SEQ ID NO: 31137 - DNA, 252 bp, Homo sapiens
  chr14:37129095-37129347
  hyper
cgcagagtccccagaccccccgcgggacatgaggtcttgcctgttcgtatgcgaacatccttgtacccgcctagcagccctgcagactgcaaattttccctgggtgcacggaagtagagcagatttggcgcagaggtcgatactcactgcctgtctgtgaggggggaggaggattccttcctggtcaagttgccgggcatgttcattccctcccgcaagcctaaggcagagtcataagctcccctacgatgc

SEQ ID NO: 31138 - DNA, 1206 bp, Homo sapiens; identical to SEQ ID NO: 26342
  chr14:37135434-37136640
  hyper

SEQ ID NO: 31139 - DNA, 210 bp, Homo sapiens
  chr14:38072497-38072707
  hyper
cggattctggcaatcgtcagttgtaggaacaaagtctggagtagtggctggcatgagagtcagccctgacgacctcacccagggaaatgaggaacccgtgtgaacctaagaaggaaaccgctatggtggttgtggtggtgggtggctcagctccagaagtggtgaagcgactttcccgaaagggaggaagactctgggataattggcacc

SEQ ID NO: 31140 - DNA, 1549 bp, Homo sapiens
  chr14:38724165-38725714
  hyper
cgtgctctgtgatccccatcgaggaatctcaggaatagatgttactgaattgtcttgttcagggacaagtggtgtctctcccagcttctcgtcgaccctgattggccatgttctctgcggcacggggctggttgcagtggccggcgggcgcctggtgggcaccccggtccccccaagggtcggctgtccttccccactggtcacacaagagcggccgtccttccccagctcgaagcccgtagcacattcgcaggcaaagcctcccaagtcgtctaggcagttagggagctctgcgcatttgccagcacggaggtacctcccggggcagggacacaacacatcgcccgagagtttgtcccagcgagcgccgatttcgtccgcgatgcaagtaactgagatcgggagctgtccccggcagagcgcactcacctcggtcccaggtggactgaagtccagagcggcgctgtgcagctggaagggcgcgcgatagctcaagttagaggcggccccggggcgcggcgcaggacacaagacctcaaactggtacttgcacaggtagccgttggcgcgcaggtggcatcgcatctccttccagcctgcgggctcgaccccaccggtggcctggagtaccgcgcatctccgcgcggtgcaggagcgttggggctcctccacccactgcagcgtgtcgctttcgagaccgccggggtcggaggacagccaggagaaaccccgcaaaggctcgttctccagggtgcagtgggaacgcctgcgctccagtgcgacccagaacagcaggtctttggagccccctccgggccctgggcctgcccgcaggagcgcgagcacagcgcgcagctcggcgcccgcacgcacggtgctgagcgccccacctcgcaggatgcaggcctcctcggccgcctgccgcttcatggtagcgtggtgcaggctgtagcaggcccccgaggccgagcagccagcacggtcggcagtggggtgttcgccgccgcccggcccgggccagagcgcctgccagaggaggcacagggcgaacgccggcctcattctctgaggccccgcacgcagagctgctcccaacttggatctgtcccgctcgaggacgcagagctgtgtctggagcgcggtcaccgccctctacagctggcttccccaacccggttccccctcccttcccctccgccctcgctcccgacggaccccccaactgccaagaatccccccgcgggcccagcggccaacagtttcccttaggccgcgacaggaaatgtgtgcggagcgctgccaggcccggtgcagccctgagttattctggggtcaggaacacagctggcgccgggtacaggggacgcagtcgactagaaggtcaaacaccctgcttagagcaagaggagaaattcgccactgggatgaagtgtgtggtttttctccgttcagggagtttcatcaggaccgcagaacccataacacgtaagcgaacataggcaggaaggacttgagaaaggaactggcttatgattataagaccacgccc

SEQ ID NO: 31141 - DNA, 77 bp, Homo sapiens; identical to SEQ ID NO: 11102
  chr14:50511831-50511908
  hyper

SEQ ID NO: 31142 - DNA, 260 bp, Homo sapiens; identical to SEQ ID NO: 7958
  chr14:52327346-52327606
  hyper

SEQ ID NO: 31143 - DNA, 1076 bp, Homo sapiens; identical to SEQ ID NO: 23072
  chr14:52781114-52782190
  hyper

SEQ ID NO: 31144 - DNA, 839 bp, Homo sapiens; identical to SEQ ID NO: 25098
  chr14:55765300-55766139
  hypo

SEQ ID NO: 31145 - DNA, 1344 bp, Homo sapiens; identical to SEQ ID NO: 28568
  chr14:57260878-57262222
  hyper

SEQ ID NO: 31146 - DNA, 1863 bp, Homo sapiens
  chr14:57263800-57265663
  hyper
cggaaacggggcgactaggggaatcaggttttatcagagcaccctgcgctgacaggctcgggcggtttagaagagaaaatcagaggtgctcagggcacctggtcacaaacctgggcatgcagatgcctgatgggggcttggaccctttcgtggcacgaaaaggagagagactgctgttcatcttaaaagtctcgaaggaggcaaaaacccaggcggaagtcatggctgactctgatcctgcatcttctcattctggttgttttccaccgcgtctgctcccatttgcgtgggatgcgctggtctcctgcccgactcttttgtgttcctcttttgcatgattaaaaacacgtttctatatgcactaaaccatcacctagcactggcacgcctggttttgggttacagctttgtccgtataataacagcgaagttctccctgggtgtgagatgcgggttcgaacatgtggtgtgcgcgccagggctggccgcttccggttaagtggacgcggggacttgactgcgtcccctgccttgcaggtaactggaatgggttgcctggcaagttggccctgcccgggacgccgaagggaccgcttccccattccagagcctgcctctggccttcagggccgctgacaggtccgaaaagaaagagaaggcactcagttttaaaaaaaagagatctagaggactggggaaaaggggatgagccaaggcaaactgggaattgctcgggcttcccccgaaagcctcagctcagtgccgggggagaccccaacggagggccagactcccccaaatccagtggccgaagacctggatttcctgggaggatccccgggggcccgaggcaggcccagctgggccccgtctgctcgggacgcgggaggcctcagccgtggcgggagcccccgctgtggcggcctcgcccttcgaggccaggagaagcggccccctcctaagccgtcagcggctcatcctaccgggagacctggaaaaccagcagccgcgggccctgctgggcttgctttcgccgccccggccccttctccccggccagtggaccccgctcgccgtcccgtctgtcagtctcggttttagctccttcgggcgcagggcgctcgcctcccggccgggccaccccaccctccaatccccgaggccgacccgacccctgcactccgccaggccgcgaggtttcccagcgaccggcgccccggcccgcggccgacctggaggcctgactgcagggctcgggcggggccctctctcggctctggctggcggcccactcccgcgggcgtacaggcctcgccaccgggcctcggccttgccgcggcccacagcgccctgggaccggcgcccccgaggcctgagaactacgcccggggggcgcgggctgaggctcaagagaggtcctaggtgcgggccagggatggagccagcccagagagaaaggggaaaacccggcaaggcaagagcctcagtctcgcccctgcctggcccgccaggctgtgagtggggcccattgggcagcgccaacctggggagtccggcgtctgccccagctgggggccctcggggcagagatgtgagtgctgttcccaggtaactccgactgggcactggggagttagaaaagccagctctttagccagagcgcctagggcgcggcggagagcgggccgcccggcaccacgttccttctggcagttccgccccagcctcccagcgtcttgcgcctgtggcggcggcagtacgggcctggggggtcacccacaggaaaggtgagattagcagcaccatgtgggagaggggttgaggaaacccaccattatctaaaacttggaggtttccaaagcc

SEQ ID NO: 31147 - DNA, 147 bp, Homo sapiens
  chr14:57265909-57266056
  binary
cggcgtcatttcagtaccaagtatcaccattattgggcttattaacttcattaaaaccggtcttgactaggagtggagatcggaactctctggatgtctttaagccagtgttcgctccccgcctccttccctccctccgttgccttc

SEQ ID NO: 31148 - DNA, 338 bp, Homo sapiens
  chr14:57270914-57271252
  hyper
cgactcgggcaagttgattttcagtgccacctcctctcgcatgaagatgtctgggtaccgggtcttggcaaacagtgcttccagcacatctagctgcgcccgagtgaacgtcgtcctctcccggcgctgtttccggggggtggctgcgggacaagaagcccagggccctttagggtgggggagcagtttctcagtcataggcgtttccgcgggttctccgacgcccctgccctccaccccgcagcagtcccccgttcctcacagcccttcagccgggagcctaccaatgctctccccaccgtctccccagccttgctccccggggacccaggacacac

SEQ ID NO: 31149 - DNA, 372 bp, Homo sapiens; identical to SEQ ID NO: 26348
  chr14:57272024-57272396
  hyper

SEQ ID NO: 31150 - DNA, 1492 bp, Homo sapiens
  chr14:57274432-57275924
  hyper
cggcctaggtatgcactctgcatagaaggcatgggcccttcaatctaactttcaaagctcttttcctctcgaagcagggtccagaacggggaaaagaaataacttttgaaaaatccacgcctcactatgactgctcacgaggtggcctctggagaactcatacctagaagctgaccgcggtcgcgcggcgagttccggcagccggtcggcgaccgcacctccgggcgcgagtgcctgggtcccgcgttcctgcccggcagccccgcagccccgcagccccgcagccccgcagccccgcaggcctggcgcccgaggtcccgctccactgcccgcgccccccgcgcagccttatatctaacggtcaattcgtgcaatctgtcgcttctccctcccccacgccttgttttttttttcttccaagaagcccatctaccagttgctgtgtcctcgctcaacaataattacctcgtccgagaattaattataataaatgttttcttgataaactaacgagataatccgaggggcacacgtcccttaattacaggccgccatgctcctctctgcttctcgtccgggctgattaattttctgcatgatggaaaggaaacaaaactacgcggactggcgactggcctgcggctgggaagacgacgaagaggaggaaagaaagaaaaaggagacgtgtgggcaccgcggaaaacggccggcgctggcctctctccggcgaactcgagtgaaagtttctggcctcggggaatcaaataactctgccacccgcgagggagggaggaagaaacgtgccaaaagggttggccttgactattaattatcgttgggagaaagccccggtgttagcgctgaggtctgggtgtctaccttactctggggggaggagttccctctcctactcccctctgttgctaataacttttggtgcctgtaaaaagtcccgagctgagcaggagaaatcctgaccccgaagctctaggatggaggggagaatttctaggagcgacttccccgtcccctccccaagcaatccaccaccgcagggtcggcgccgctcggccttcgctccccgcgcaccagttctatctgtgaaggaagcaaaagccaactcggtggaatcctgacaggggacttgggtttccaaaaatatgtcccgaaatcgggcatcgatttcaagagtcacttgaacgcaacaacgcgaagacttcttgggagtttgcagagcgacccgtcgcccgcgcccggcgctggcagggaccttcggatggttcttactgggccgatccatggcacaggctgggcctcggcgaacccctcggcccccgcccggccccgagccacgacacctcattgtcctggagcctgggaagggggtgcgcgagcgcgcgggcgagccctgcctctccccgccagagaacagctgaggggccgcggtcccagcgggaggattccggtccctggcccggccgcggccttgggc

SEQ ID NO: 31151 - DNA, 1775 bp, Homo sapiens
  chr14:57277894-57279669
  hyper
cgcccttataaatatccttacacatataaataaatgatccccgagtgagagaccccggcttctggtaggttcctggggttttttggaattgagaagcccacgacagactgcagggaacacgaaccccggaatctaatctcagggcccatttaggagaagtagctgggaccacatcgggcctcgaggatgcgagtgtgaggtcgacaagatatcgtggaagagagcgaacgagggaggcccccgttggaaacagtttctgtgttagaacaaacgccaccaaacgaccgacactgcgaggcctggagctacctgggctggcgccgcccgagccccgggctgcgagcccagaggctgggaagtgatgggacctgggggcccgagccggagagtgcgacccccagcccaacttttttgcctggcatagaaagcagggaccggacaggtttcaaacggatccgagtccctagaaaagcaaaaacagactgggcggagtgtggggtggggggtggctagtggaactggtgagtgtgtgtgaataagctgggtgggggtgggagcagaagacagctcttgcttcacaacacccagtgcaggaaaagaaaaataaaatctcttcctaaataccccaccccccgccacccacccaccaccaactaccatcaccaccacggccagtgggcccaaagaaacagctcgctgcctttaatttggggacctatgttaatgaagttggtaattaattcgtcgctttgttgtcggttcttatactgtatgtgtactcaaatgtggccgtccttgggatttacagcaattaacgaattacgggagtgcgcacgaggcagcaagctctcggcagccgggctccggctcgggctcggcctggggctggggactccgcggcagcggcccctgtcacaggtgtccctagagctttgggccctggcggcccctcgagcccccgaggggcccggagcccgcccagctccttcccggccctctgcagcagctccagtccggagacccgctggctgtcgcgttcccaggagtcaagagtttctaggggcccgggcgggggggagggtgagtaccgaccttttttctcaccccacccccactgtactgaaacacctggcggccgcccccgaagcctttaatggggatggtggtgaggagggggtaacaaatgccccgggcgttatgaccctcgtggcgctggctgtcggaggcactggttgggtgcgcttggtcagagtcatgatgctttcgatgaaggaaaggcaaatccacctcgatcacctgaagcagagtctccttcctacccctagaaaagacaacgtttcccccagtttgatcacaatgatgtttaaagcataaaagagccgaaaaagaaaaatggacgttgtgaatctggcagaggggaaggccggaggaaggccttggggacagtgggcatggggtgggatggagaatgatcagaacatgcgcttgtgagctaaaccaagtaaaccattttggactgggagatccatctgccgtagggtccagtgtccagggtaacctttcaagcccgatgtagaggtttgcgatgtcctcccagatggcgggggcagctgaatctccctaaaaatccccctgttctattcgacaggggcagatttatgcatggtggggcgtgagagggttttgcccttccagcggccggcagcagacagctcccgcttctcctttgccctctagtctaataacttcgcagaaatacagggccaataaactac

SEQ ID NO: 31152 - DNA, 1366 bp, Homo sapiens; identical to SEQ ID NO: 28572
  chr14:57283314-57284680
  hyper

SEQ ID NO: 31153 - DNA, 146 bp, Homo sapiens
  chr14:59014429-59014575
  hypo
cgcaaagcataaagcacgtaaatactcaggttacgcatgttgagctgaatgagcttctcctttgtgcaggtgggaaagcagtgccactctccgcttcacagatgccccctgccaagatgtcagtgatgctgccgtcagtgaacctc

SEQ ID NO: 31154 - DNA, 1077 bp, Homo sapiens
  chr14:60951868-60952945
  hyper
cgtaacgaccttttcaatatagcattcttcacaggaacatgtgggcagagccagaactggaagacgagaggcccccttgagcccatggcgacattcccagccccttcccgggccaagcccaacgagcgcttcagaaatcgttgttgagtcggggcacgacttgaagttttggggatggggtgggaagcacccgcataaccgcttatgcgtgggattgcaacaagcatccggatcttccagggttcacggacacccagatttctccacaggatatgccctttaaagtaaacgctctgaatatgtcccttggtggcgtgtgtacaaccacgtgtagcaaaattctaacgaaagcccttccccaacacccgggtaaacctagagaaacagtgcgatttcgcatttacgaatttaccacgaagaataaaaaaattggaggttttcacagaacagccaattcgcattacggcatacgcctgaggcggggttcctgtctaccgtgcccctcagagcccaggaaccacagcccgtgcgcctcccgcagtgggagttcgccggccgactcccaccctcacagcctcctgtcctggcttcccctcgcccgaggctgcaacaccgcatcccccccatcccccgccgcgccctcagcctcgggccgcaccaacccaggggataaggcgactccggtcgctctgaggggcagggccagccagccccctcccacccacgcacacgctccccctcagagccgccggcccagagaaaaaccgccacatgcagctcccttccacacgcacctaaacagctcctctggacccgaacgcccacaccctccctccctggggtcccaaactccactcaggacgccacagcggatcctaactacaaacggtccccggagccctgggctggactcgctcagccccgcccccacgcccctggtaccagccctgagagaccccgcggagcacgccgcgggagccgcagatcgcgctgaagagcagcgagatcgcgctctggacgagacctgcgcggctgcaaccgctccttcttcgcgggtggaagcgcggaataagcccc

SEQ ID NO: 31155 - DNA, 1271 bp, Homo sapiens; identical to SEQ ID NO: 28575
  chr14:60973254-60974525
  binary

SEQ ID NO: 31156 - DNA, 986 bp, Homo sapiens; identical to SEQ ID NO: 26354
  chr14:60977289-60978275
  hyper

SEQ ID NO: 31157 - DNA, 1470 bp, Homo sapiens; identical to SEQ ID NO: 29860
  chr14:60981663-60983133
  binary

SEQ ID NO: 31158 - DNA, 876 bp, Homo sapiens; identical to SEQ ID NO: 23944
  chr14:61104155-61105031
  hyper

SEQ ID NO: 31159 - DNA, 965 bp, Homo sapiens
  chr14:61108567-61109532
  hyper
cgcgacagcctgacccgaagcgcgctgcagacctaggctggtgccttccccttggggccagggctgtgcgtgggggacaaggccgctgctctccctagggccgctggctaagaaggaaatacctgacctggccccaccaagaaagtggagctcctccacccccagttctgctggagacactagaagccagggcccctctctctgccgcgggaagttctagcgacaagcccagaaagtgacgtcctctctacctggcacccctcctcagagcgcgcgggtgaagagtttgggtccgaaaaccaaagccaagaccccaggaagcgaagaaggagacaggaggtgtctgaagcaagaagggcactggagaatcggcagcagggcctaggccgcctccgaaccaggatccaaggcctgcgccatctgccctgtgcgggaagcgcggggcctgggaggcagggagcgctcacacctgcggtcgggcaggaggcgcaacgcgctgccagggcggctttatcctgccgccacagggcggggaccagcccggcagccgggtgtccagcgccgctcacgtgcctcgcctggagcttagctctcagactccgaagagggcgactgagacttgggcctgggagttggcttcggggtacccaaggcgacgacagctgagttgtaccacgaagctcaggccgaggcctcctcccttgtctggccttcgaatccatactggcagcctctcctctcaggcactccgcgggccgggccactaggccccctgctcctggagctgcgctatgatccgggtcttgagatgcgcgcgattctctctgaaccggtggagaggaggctctgccccgcgcggagcgaggacagcggcgcccgagcttcccgcgcctctccagggcccaatggcaagaacagcctccgaagtgcgcggatgacaggaaaagatcttcagttcttctgcc

SEQ ID NO: 31160 - DNA, 980 bp, Homo sapiens
  chr14:61109544-61110524
  hyper
cgggatacaagcctctattggatccacaacctggagtcctgccttcggactttgccaaagacttgcaggcggtggggaggcagtaggaaatgaagccccctccagcctcagccgccgccgcgttcggtgcagcagcagcagtgccactgccacagagcagaggaaggcccgctccgcgcgagttctgtgccaggtgtcccgttggccctcagcggacaagggagagccgctaataagggtcgctgctcagcaaactcagagctcatccataagtgccaacgccactgcttctttctggaagcttccactccggcccggggtccggccccagccacgctgtcctagcccagagaacaggttcaagaacggtggtgcccagccccagcggtgcccttctccgtccctgtagctcgctgggctcttgagcccctacccactaagccaaaaattcgggaaccgggagccaaaccccttggcctctgagaatttaggaagcttcgttttcagccaagaggtcaaggcgagcagagagtggggactcgaacaatcgcgtgtttaggtttaaaacgttaaaaaataaacatcactcgagtgttttttttttttttcatttcacttggcacaatgctgtatggtttcgtcctacaaactatttataagccgttgttcattacttttggctaccgttatgacatctgtagaggagaaacgaaaagtggctttagattcagttaaactgcgacgcccagaaggtaaactggaggtcccttaacagctggttctcgaagatttcctcgagggaagaaaaaaatatggttagtttcccctaatgatctctctgaaatgattgccaaaaaaactcaaagcaatatccagctttctcgcctcctcctgctcgccccttttacccagactgagccgaggatggcggaaggaggcacattgtgcaatttcttattaaacacatctggaatatgcgc

SEQ ID NO: 31161 - DNA, 145 bp, Homo sapiens
  chr14:61943708-61943853
  hyper
cgggtgcttttccactgtgacctctttgacgtcagtaactgtttcctgtttatttgaactccctgctcaccctgtagatgactttgtctgagaaaaataataaagcaacggtacttaggagaagttcaacactgctatctgttac

SEQ ID NO: 31162 - DNA, 882 bp, Homo sapiens; identical to SEQ ID NO: 23076
  chr14:65006715-65007597
  hyper

SEQ ID NO: 31163 - DNA, 865 bp, Homo sapiens
  chr14:65008577-65009442
  hyper
cgtgctggtgggcggctccactcgtatccccaagatccagaagctgctgcaggatttcttcaacggcaaggagctgaacaagagcatcaaccccgacgaggcggtggcctatggcgccgcggtgcaggcggccatcctcatcggcgacaaatcagagaatgtgcaggacctgctgctactcgacgtgaccccgttgtcgctgggcatcgagacagctggcggtgtcatgaccccactcatcaagaggaacaccacgatccccaccaagcagacgcagaccttcaccacctactcggacaaccagagcagcgtactggtgcaggtatacgagggcgaacgggccatgaccaaggacaataacctgctgggcaagttcgacctgaccgggattccccctgcgcctcgcggggtcccccaaatcgaggttaccttcgacattgacgccaatggcatccttaacgttaccgccgccgacaagagcaccggtaaggaaaacaaaatcaccatcaccaatgacaaaggtcgtctgagcaaggacgacattgaccggatggtgcaggaggcggagcggtacaaatcggaagatgaggcgaatcgcgaccgagtcgcggccaaaaacgccctggagtcctatacctacaacatcaagcagacggtggaagacgagaaactgaggggcaagattagcgagcaggacaaaaacaagatcctcgacaagtgtcaggaggtgatcaactggctcgaccgaaaccagatggcagagaaagatgagtatgaacacaagcagaaagagctcgaaagagtttgcaaccccatcatcagcaaactttaccaaggtggtcctggcggcggcagcggcggcggc

SEQ ID NO: 31164 - DNA, 126 bp, Homo sapiens
  chr14:69245863-69245989
  hypo
cgtgggctcttagaagctatgacacctgtaccaatagaaaaatcatccattcagtaggtaagtgcctgctgagtgccaggcatcagcgttgacatgaaatagaacggtgaacaggaggctgggcgc

SEQ ID NO: 31165 - DNA, 282 bp, Homo sapiens
  chr14:73146636-73146918
  hypo
cgacgtgccttccctgcagaatcaggagcaagcctcagctggaggccactgccacagcctgctacctcggcctagcctttaatgagggctgcgggaggagggagaggcgggctggggagacaaggcgcctgcgaggagctccggcaggcccagcgtgaagcagagccaggagagggttaaaagtggcgtgatagagactgtggggaaggctggaccagagggcaaagggagcatcaaagccgggataaatggccttaattctcatgctcccactcgctggtc

SEQ ID NO: 31166 - DNA, 404 bp, Homo sapiens
  chr14:73147150-73147554
  hypo
cggggaagcagacagtagggcccgctccccacaggaccctccaatcgtcagagccctcgacggcagagaactcgctctccccacaggccatcttgccaccagctctgaggacaccgtgaatatatgggaaagtaaaggggactacgctggagcggatgcggaaggcgctgaggccagggctgctgtcatgagtcctcacatttatggatggggctgataaactgtcacactccgcaccgtcaaggacaaggtgagaagatgagctggaatggcagcacatgccacaggagagctggaaaggcaggtggctaacaacgaaagccatggccagagggcgggcttctctggagaggcctctgcacacagggaagggcccctaggcccggggttttgactgcgttgcc

SEQ ID NO: 31167 - DNA, 182 bp, Homo sapiens
  chr14:73167765-73167947
  hypo
cggcattctcactctggaaatatctgtcgtgcggaatcagcctgagccccaggagcgctgaagcagcagagagggtcatgccccatcttcccactccagtctccttccccgggggcaagcgcttttgcaccatgcacctctgaagccaccacccctgggaccagtcagccctgcctgtgcac

SEQ ID NO: 31168 - DNA, 253 bp, Homo sapiens
  chr14:73174970-73175223
  hypo
cggaacacctgcaacctgtgtccatgacacaatggcatttaaatatttaaacagacccagctttgctggaacggcgcactcagtctccagggatcaatcccatgccacaagccccgctccacaaatcaagtttctgggggcaccgagcctttcctcccctccccgatcctacccccatccaaggacctgcaagacaactgagtgatgagcccagcttcccttccgcgacaaaggcagtgagcctgaaggccgc

SEQ ID NO: 31169 - DNA, 188 bp, Homo sapiens
  chr14:73178778-73178966
  hypo
cgacggtggcccctgctccaccgagagagggagaggaggcagcacgcatgcggacagagccaagaaagcagccgctgagacttccagaaagcctgccgtcaggcctcccaggcactacagggcacacagaaggtgggagagagcctgcggggagggcatcgagagaagcaaacgtcactgagagtccc

SEQ ID NO: 31170 - DNA, 476 bp, Homo sapiens
  chr14:73195208-73195684
  hypo
cgcccaggaaggtcacgctcatccttttcgatttatttagtgggaaacaacagttttttagcagagttttgctctagaacaaaaggacagctagcaaagtaggacatgtcagagacgggaagaactggggacagggcgattcctggaatctgttccctcatgtgtccattcaacaaatatttatgttgcacctggtaagcaccaagcactgtttgggtgcttatgagatataagcaagcaaaactggcaacggatcctgccctcgaggagtttacattctactggaagaaaacagacaataaacaataacataataagtaagtaaattagaaagtacattagatgatgataagagtgatggaaaagaacaagaaaagcagagtggaatcgggaggcaggggcagtcagggcaagggtgtgagatgaagtacggcacggtcagggacatctttgagagaagaggaaggccaggcacc

SEQ ID NO: 31171 - DNA, 148 bp, Homo sapiens; identical to SEQ ID NO: 6907
  chr14:73238412-73238560
  hypo

SEQ ID NO: 31172 - DNA, 413 bp, Homo sapiens
  chr14:73302331-73302744
  hypo
cgggagacccttaaatgtcttcacacatccacagctgggggaggagacgctgatgaacaggagaagatggagcatcggcctcccctggctactcactctgtgctcgggccgcctcgcccacttgtaaaaccccaaatgccagggtggcagcaaggcatacatgcaactatgacttgacccgcagcgaggcagcaaccaggtctcacctgggcatagttaccccacaaggacaggaaaggagaaatggtttccaggcccaggacacccagaagccaccaaaaaccaacctcatggttcatcccccttatttgactcttcgacacctaaaacctgtgcgttgtgttcaagatacacccgccggagaccacattcccagacatcccgagggccagccgtcaccacacgggtgcctc

SEQ ID NO: 31173 - DNA, 561 bp, Homo sapiens; identical to SEQ ID NO: 26358
  chr14:73318400-73318961
  hypo

SEQ ID NO: 31174 - DNA, 311 bp, Homo sapiens
  chr14:74254318-74254629
  hyper
cgtttggtgttggggctaaaagggtcatgtcagaaagcagtgtgctctatgtgttcttaatgcctaaagtgggccttaaaacaagggtccctgtccccacgttctctctaaaagtctgcatgatgtccctcgtcatttctacgggttataagtgagcaagacgtttaccacgtatcacacttctgggggctatttcaacgcccaagctggggctgcagaatggtttctgttctaatcctcccccgcgatttccacctctttacactcaactcacagaaaatagagtctgatgcattctgtgtttcatcacc

SEQ ID NO: 31175 - DNA, 2455 bp, Homo sapiens
  chr14:74706335-74708790
  binary
cgccccggccaggtgcactgggttcggcatccaggagatcctgggcttgaacaaggagcccccgagctcccacccgcgggcagcgctcgacggcctggcccccgggcacttgctggcggcgcgctcagtgctcagccccgcgggggtgggcggcatggggcttctggggcccggggggctccctggcttctacacgcagcccaccttcctggaagtgctgtccgacccgcagagcgtccacttgcagccattgggcagagcatcggggccgctggacaccagccagacggccagctcgggtaggtgaggagaggttgcgctgctgcctgactggggggcgacagccgggagccccgcgccgtcggctctcgcttgctggaccaggcctccaggcggaaaagttcctgccaggccgggggtcgccgcctgggccttgggccgacgcgcctggtgatggggcccgggaggatgcttcggcgtccgcagggtttcggccccaagcgtttcgggcggccgcgcagttctccagtccccgcgtcgggcagggctcggccacggcactctgttggagccccactgaaaactgggtttggggtgtcggagcccgtggtgcagagtcgccggccgtgtcggagggccccagcaccgctgctccactgcggccccggcctggtgtaggatccgcactcctcgagcccgatgctgttccggctccggccccatccctggtgtccaaagttgtctgattcccaaatcccgcgctggtcaactggggtttatttttcacccccacgagctcagacaacccggccatcgcggcagctaaagcggccgccatcctctcccacgtaagcgccactatatactggagcccggggacgcgcgggctcggggaccctgggtgacctctccgccttctccccgcgctgctttccgggaggtgtgtcgcggcccgctcgaacctccgattcctgtttgagcttggcaattcccccgatttttcgttgcgttttactttgttttacgtggaaaggcaacgaaaaccagcgcgtcgcaggctctcgggcctcgagtagggacgcattgtgccgccttgcgaaaaggacggtgctcggcagcccccagtcttcccggagcccagctccccacgcctccgctccgctcctcgctcctcgaggccaactttccggcccggggcattggggctggccgcgcagggcagggcgcagcagggtcgcgagcgctgccggggatctctgcggccccctaaggctgcctcgctctccgtcgtcccggtcccaagcgcgccggggcctttgcctctcttacaacgaaatctgttcaaaacctccggattcgggccccggcgcgggagaggtcagcctgagctcagggatgggacggccaccggggcgcccgcaggcttcctggggagacagagcaggtccccgccgctcgcggaggcagcccggggtggggccctcgcgggtttcgggcacagcggagcgcgtcccccactctgccgcatgtccctacgcccgcttttcagattctgaagatgtttcctccagcgatcgaaaaatgtccaaatctgctttaaaccagaccaagaaacggaagaagcggcgacacaggtgaggcccccgctttctgttacctctcctgcccgcgcaccccgctgccgtcccccgttccgggatcgggtctctcggaccctattttcgccgacaacggatctgaggtccgaggccgtgccagggcgcagaccacgggttgtttggcggaatctgcccgggggccttggcgtcggcaccggttgagcaggatgagtggccgccgggaaagcggcccggttcgggctttctcctccttgttcaggagaaaggaaaggctccaacacaggccaaactgagccacagagtgggggcggtccccagatccccgcaccagtacattctgagagccacacagacccggcggcgggcagattagctcccacctcctgccagagccggttctttgccctcggcctcaaccgccgcccccatttctctcccggggtccctgtcctctctgccaactccctaagctttctgctcccaccgttctccaaagctggagcgatctctgcactgacagagcattttcttttggcttctgctcattcgtgattctgaccgagtcgcttcccttctgtgagcctcagtttcctcgtctgcaaaatggagtggtaggcgatgtagactggacggtcccaccagccgtagctggagtagggtggactgcatcggggtacagactagaaagggttttgttttgttttgttttgttttgtttttgtctttaaatggaaattacttgcacaaagttaaaactcagtagatgccgacaggtatatcttgaaaagtaacctacccttctcccacccccgccctcattcccttccgcaccagcc

SEQ ID NO: 31176 - DNA, 178 bp, Homo sapiens
  chr14:75760155-75760333
  hypo
cgcagaggtctgctcaagatcatccaactggagtggcagcgctggaattagagtccaggcagtgtggcttcaatgcctgaactcttagccattagaaaggaaaaacaaagcaaaatcagtatccgcaacaaccttgcaggcacggaggccctcagaagggacaggagaggccgggcgc

SEQ ID NO: 31177 - DNA, 187 bp, Homo sapiens
  chr14:77600216-77600403
  hyper
cggcgcaggccaggccgatggcgaaccagaggtagagcatgaggatgacgaacatttcagaacccaggacagctcctgcagggcacggggaggggaaacaccagagccgctttacacccaggccaccggcataactgcgatctaggcaggctttccaccgggagggagggagattaatgagattgac

SEQ ID NO: 31178 - DNA, 192 bp, Homo sapiens
  chr14:89657668-89657860
  hypo
cgcagcgtcccagctgccctggggcgaaattcactaatagtgcggtgatgccgcgtgacagaagctgccgcctgtgccctgtccaaataaatgaagtgtgcaattgaagtcgacatcaaaatgccttcccttgcagattactgcctctgtgtccgccaaacccaatgactaatgatgggggacaaggggctc

SEQ ID NO: 31179 - DNA, 181 bp, Homo sapiens
  chr14:89895069-89895250
  hypo
cgcagcagacgtcagagagacctcagcgcaggggtccaagcacctggccaaggcaccctgcgcaggcctccacgccccacgagtgcctgcagaggctacctgaggaccaaggtgggcatgccacggtgtcctggacttctggatggaggccagtcccagggagtgaatggcagagctctcc

SEQ ID NO: 31180 - DNA, 620 bp, Homo sapiens; identical to SEQ ID NO: 25105
  chr14:90084014-90084634
  hyper

SEQ ID NO: 31181 - DNA, 624 bp, Homo sapiens; identical to SEQ ID NO: 26368
  chr14:90085312-90085936
  binary

SEQ ID NO: 31182 - DNA, 153 bp, Homo sapiens; identical to SEQ ID NO: 13439
  chr14:90754255-90754408
  hypo

SEQ ID NO: 31183 - DNA, 136 bp, Homo sapiens; identical to SEQ ID NO: 13440
  chr14:90871545-90871681
  hypo

SEQ ID NO: 31184 - DNA, 234 bp, Homo sapiens
  chr14:91691066-91691300
  hypo
cggagtggcgtctcgggcatcgtgggcatggaggtggatgggctgcccttccacaacacccacgccgagatgatccagaagctggtggacgtcaccacggcacaggtgtaaccgtccatgttccgtgtgagcagagtccctaccaacgggcaggtctgcatccggggagaatgcagctgcttctggcgacaatcctgctagtaaacactggtcttcggtgagcaacgaacactc

SEQ ID NO: 31185 - DNA, 323 bp, Homo sapiens
  chr14:91766253-91766576
  hypo
cgggcgccggcgctcacctgtccagctcgccccgcagcctctggttctcgcccatggcgagggcgtttgtcctctgctcctgctgcagcgcctctcgctcagtggtcaagaccttctcccgctcctccagctccgccttgcgcttcagcatgtcaccgtgcctgttggagggaagcacctgccgtgagtctggccagggccttcttttccgacaggtaactcacatcccagaggatctgcgtgcctcccgtgagaaaatgggattcctctggagagtctctctgcagaagtgaggggcatggggcagggaacaggcggggagc

SEQ ID NO: 31186 - DNA, 822 bp, Homo sapiens; identical to SEQ ID NO: 23958
  chr14:93154446-93155268
  hypo

SEQ ID NO: 31187 - DNA, 183 bp, Homo sapiens
  chr14:94603557-94603740
  hypo
cgtcactggaaaattaatcccaagccccaaagccttatttacgcagattagaatagcttctgttcaagtgtttgtgatgtcgccgtgtaagccctcatcgtgatgctttaaaagtcatcgttaagtcgtgttacctgctgtccggccctggcacagtgaggctacactcccacaaataatgac

SEQ ID NO: 31188 - DNA, 146 bp, Homo sapiens; identical to SEQ ID NO: 23080
  chr14:94889871-94890017
  hyper

SEQ ID NO: 31189 - DNA, 247 bp, Homo sapiens; identical to SEQ ID NO: 6922
  chr15:101938625-101938872
  hypo

SEQ ID NO: 31190 - DNA, 418 bp, Homo sapiens; identical to SEQ ID NO: 13446
  chr15:22927774-22928192
  hypo

SEQ ID NO: 31191 - DNA, 409 bp, Homo sapiens
  chr15:31220905-31221314
  hypo
cgtggctcacgcccacctgggcaccgtgtgtccacagccagcagaaaccatctctgttacggtcctttgggtcatccacaggtcaagatgataacttattttaaaaatctgagtaatagaatttaagatgtaagtatgtgaagttttaaactttaatttagcctccaccttacatttagacctttcgtataaagtaccatcagcatcagccctcccgagcacctgccgtgtcgcaggcactgtgccaaggagctcacagacatgggcacatctgcctgttcagaggtccacccagctaagcgaaaagctgtttttgcaaattattactctaaaaaacaagtttaataaattgcttttatatcaattaacttttacttatcttttgagagaaagaatgtatcggttggcc

SEQ ID NO: 31192 - DNA, 74 bp, Homo sapiens; identical to SEQ ID NO: 13449
  chr15:31731229-31731303
  hypo

SEQ ID NO: 31193 - DNA, 741 bp, Homo sapiens
  chr15:37180043-37180784
  hyper
cgacaccccccttcctgcgttccccccagttatttactgggtgaccccgtcctttctcttcacctcctcacccagcgcctcggattatgagataatggattttgcgattgttcttgtcagggaaaaaaatctccacagaaccccacgttttcatctttcaactgttttatttaagccaatgggaaggtattgagggcagtaattgattcataatgatccataaatcgatgtcggaaagcggggggagagggtggaggtgtactaagagtatgggggggtggcgatgctgtttatttctaaagcttcaactaaagtagctttgacactgttggggctggggggggaggagctgttgggctctgccggatcatccatcattcctgtcacccagagtctgcccggaggagccgtagacgcaatctcccttctgtctctacaccgaaactattaatattaaaacctcccttcaaacactgccccgacggtctccattctcatcacaatctgaccggcctcccccatcagaccagcatttcccccgcgcggcactttctcccagccccggccccgacggagggggcccgccccggcgcgcgacgccctgagttgatgactgcaactgtaactgggacgggccccccgtgcccccatagtttgcaatacgttggtctaactctaacacacgcgcccagggaaggccaggtgagggccagggtagccctctgcacgcccctctgccgc

SEQ ID NO: 31194 - DNA, 480 bp, Homo sapiens
  chr15:37402989-37403469
  hyper
cgctgacaaactcaatctcagggcggggtgtgagagctgggggtgagctggctcgggccgggacagaggtctctctgcgtacgccccgctccgcccggcgccaagggaagccgctgtctcttccgtcgagttctgagaccttggcaaacttccctcccccaaccgccggcgtgacttctgagttgtcactaatccgaacctgatattcaccagagctccttcggtcaccgacaacgctccccgctgctgccgcggcctcccgcccgccctcctcggcgtgttttcatttctaagtctacgggcagggattgccccgacccagtgtgtgtgtgcgtgtgtgtgtgtgcgtggtttcatttacattttaaaaatcatttttgcgttcttcagcgtggatctcagcactttccctgtgtctcaggccgactaactttgcataaacaaagcaacaaccgaagctcatagtgggtgaaatcttgc

SEQ ID NO: 31195 - DNA, 1865 bp, Homo sapiens
  chr15:41786420-41788285
  hyper
cggagcgggagagggactgcctcccggcagcgggctcttcgcacctgcagcagccgcgccgcctttccacctcgtcggtctcctccactggctcctcgtcgctgctcgaggactcggaggacgacctgctgagcgacagtgagagccggagccgcggcaacgtgcagctggaagcgggcgaggacgtgggtcaggtacgggccgcgggggcggggccagcgccgggcgcgggggctgcacgggggacctggctgggtgctcccggaggacccgctcctgtccatgctccctccagcggaaggtcctgttctcgcggtttaggaggaatctgggggtcagagggaggcgcctggccgacctctcgcctgggcaactttcacctcggctccgccggcgggtcgtggcgctggccctggggcgtctaagaagcggggcgaggagcaggcgacccgccgcggggactgggcgaagcgggggtagcggaccttgttggctgtgggttaggacaggagggatcggaggggctgagccttgccgggtgaaccctcggaaggagagaggcgaaggagagtttcccttaccccccgccccctctccggtgccgcggccgcacccccgccgttgccacggtttccctctcctgagtgggagtggagcggcgctccaggctctgctcgggagccgctgccgtctgctcccagcgcccgcacgaggcgtggacgcaggggagggaggggcgtgggcctgggagctctggctgggagcggaacgcagcccacccagtgcgcgccctgcctcccatcttcccggctcgccgctcctgagcgcggcagagaggggcggtaaactgaggctgcaagggggcaggatcactctgctagtctctgcctctgatagcctgggtgttctgggaccaggtctgaccctcggaaaacacagccctgggcactgttaagtcattcctgacgcccgccacttagggatgtgcggctcccgggacaccctccttgttcccctcgttttaaccaaggccaaataccttgaataactgtccgtggtcagcgcgaaggactttctttagatccacgtttcgcaagtgtccctgaggccgaggaagaggcgaggggcgcccccggcctcgggcgtctggggcctgcccataagtccgggtcggcgcggcggggcggggagagctgtggccgcgcgcctgctccgccgcacaatcggctgggacaaggcagggaagctgtggcgacctgcaggggttcacaagcccggaggccgatggggtttgtcagtgacaccagaggggaaaagcctcacagagcaggaacaccccccgccgccaggtgctgggtgcgccggctcggtcactagcctgccgcttccccttcttccccggtggtcagagcagccccggacccaggatcgtttctggggtaacccttgcctaggtcggggggcggatgccggggcttcccaggatgtggagtgtggggcagtgagaggccccccgccccgcctcttcggaaaagcctgagcagcagctcccggggcgcggaagctctgacacctgagagccggtgcaggcgaaagggcgcgaagcgcgggcgcgtcccgcttccctcttccgcccgcagggactcggcgaagtgcctgggagagggagtgcgctaggaggaggtcctgcggcccaagcctgggtgtagagaccgccccggctaaggtcaagcctcggggacctgggcgaccccgccgccctccgagccgtcgggagccggtgcaaatcgccgctgagggcccttccagctccaaggctgcggcttccaggccttccccacccccaggcccgccggggcctcccc

SEQ ID NO: 31196 - DNA, 798 bp, Homo sapiens
  chr15:41952208-41953006
  hyper
cggagccccgtgtgggtggggctgggcgcggccggggcggagccggcgaggagccctagggaaagggtgaaaggcacagttgagaaaggcccgccgggcattggtttcacagtttccacgaaggcttcgtgtgcaagcctgaggagtttaggtgcctccctcctgcctcgcctttcttggttctagaaccttcagtaggcttttctgggttgcagggacccggaaaagcagcggcttccactcggggggcgggtcccaagggtcttgctgctgctctggggccgtttggactcctggtgttgggggaggggtcagggaggtgctgctcgcgtctccttttgcgcctgcgcggcgggctccgagcgggtaggagcgcgtgcgcggtgacgtggacgtccggtgcgcgcgcgcaggctcttcagctggagcggacacacggtgtgcgaaccgaacagaataacccgcccccagcgggatgtgaaggactccgggtgaggccggccacgccccgcacggtaactctcgggcctgggtggagggcatcgcttagtactggcccgattggagtttttcgagagtttgaagctcttgtgtatttgaacggcgtgagaaacgttccgctgagagagcttcgcacgccctcgccaggccgggccttgcgcagggccgcctttggcgcgcccctgtggtccctgagcgaggctgcgcatgtcacctcgcgcgcgtccccggcctcacttccgcgtcgctcagctacctaactgggaacatcgacgccagagagagcggccacgaggc

SEQ ID NO: 31197 - DNA, 360 bp, Homo sapiens
  chr15:43020234-43020594
  hypo
cgaaacagaactacagagtcaggggctaggggagggctgggtgcaacaaaggatgccagagtcgagcactgaccccgcccccacacaccctcccgcagcctcagactactccgtgcacctccccacaactgcctggcctgctagctgcaggcctccctcacacgtacggctgccggggtctcctctggaagcagcgcccgcacagccccagggctcttcctttgacagaacctaaaaggggacagatggggtcagtgatctctgggtatttcagcctggctgcagaagtaaatgccccgagtgcaccaagcccctgacctgggaggctgtaccttggaaggaggcaccgtttgccctccc

SEQ ID NO: 31198 - DNA, 520 bp, Homo sapiens; identical to SEQ ID NO: 23964
  chr15:45427341-45427861
  hyper

SEQ ID NO: 31199 - DNA, 261 bp, Homo sapiens
  chr15:45471660-45471921
  hypo
cgctgcccctttctcccacacaagtgggctcacggccactcctctatgcctgctgccattcatcgcacagtgaactgcaaaccacacactccgaagaggcactcaaggtgctcagggcggggcgcagctgaggacaatagaacctttctccaagctgggcttgggcttctcctgatggggcgctggctgaggcagagactgagcccggttcacccagggctgccagcaccccaggagcactgcaccactgggttgacaggc

SEQ ID NO: 31200 - DNA, 577 bp, Homo sapiens; identical to SEQ ID NO: 23965
  chr15:45479461-45480038
  binary

SEQ ID NO: 31201 - DNA, 173 bp, Homo sapiens
  chr15:48666272-48666445
  hypo
cgccatgcttgcttttcccccactacctccctcctcctccccatttctccccagacagattgtgaagtctctttgcttggtccactccctgcctgtctccaatcctctgattgcttcaccttcccccggctgccattatctgtcgcgacccaccctttcggcatccagtcctc

SEQ ID NO: 31202 - DNA, 2398 bp, Homo sapiens
  chr15:53075824-53078222
  hyper
cggtcagtttgcaggaagaggaaacaacaaaacaaaggaaccgccaatccgccgggtattatatccctcagctccaacctccgacttcggaccgccagggtcaccttctctacgctgaccccgcttttcttaaatgaaaacacgccaacaaaagcatacttcggatacaaaatccaagtacgcatcttttttggggaggttagagctgaggtgtacttcggaagatgagaattttgttttcatgaattgggtaacacccaggcattgttaggtaccccgacagaccctctagatatccttctcttcctccttcacactttcttcctatcaaaatagttattgttttgaaattcactagaacaacgacgttctaaaaacaaaggcgcagcaagcatccctttcttcgctgccgcgggctgaaccacggacgctcgcgggtcgcccagccccgacggcccgcagggggcgcgcgccgcagccgcagcacagcccggctacccccagaaagggagccgaatggagggaagcagggagcgcggagggctcgaggcttgcagataaggagaggcgcatcctgggatttgggtcctctgctgctacaacacaaccgtgctattgttggcactgtccgacccaagtgtcggtggtaagcggcgatgtcggggctgggtctctagcaaccgctgtgccctgggtcaggctggtcgccccagctaccgggatccctctccggatgcttccagggcgataggtgctgcacccattgacgggatagccgcatacctccgaacaggtagtggagttcgtctctggcaggcatcctagctgcgctgacaccaaggtcgccacacaatagccatcagccccccttaagccccagaagtaggtttcccctgccccagccatagcggttccagtcgtcgccacgagcccacttcttatccccaagcgcacctccctctcctcacccgggtttatgcccgttacacagagagaactacacagggggaactatggtcctacaccctcgaggggacagacaccggccgtgagacaggcaccacgcagagccttctggtgactgtccgcaggagcgagaccttttttggttttgcagtcggctaggtgtgtgtgtgtgagggtccccagttgactaccgggatgcactgccacttttcggcctggcgggctctgggactccttggtctccgtaggaggccatcctaggccttcggaggaggcgctcccagctggcggcgcccctcgccccgggctcagaggcggacacggtcggtcgcgccctgctggccctttgttcgcgccgcagcgggctgggagcagctgcgcgacaccagacccacagcgccaagacgcgaagcgcgaggaaaccgctgcgcttgactccttctcccccaactcttggacccaggaacgcttccagctcctgcgtcccacacgcccagtcctggcttctctcccggcccagaagtcttcaaggattgaagggctctgcctagggccccgcactcctgcctgactcccatggcccagaaaagcagggggacatttgaaatgtcaccccgggataaatattaacaaaaaagcaaatggacttgtgcaggggccagttatcaatcaaccaggccgcaaggccactcagggcaaacacagcccaggttgggctgggcgagactttctcatggccgccccccgaccgaacccctccccccttggctcaggtccttcttaggtcgttctggggcaaacaccggacgggaagggggcgccgccaactcccccgcggggtttggaggtttcctcgcctccaagtcccgcagggcagggtcggagtgcccaacacccacccccgcccgaacctcgggcctgcgcgccgccttcccctgggtccgcggtgctgcgcttgctgttgggtgtgtgtcgctgtctctttccgagccggcagctcctgctgtgtggccgaagccctctggaatctttaattggaaactaatcttggtcttgatagacgcccacgtcagaggcgcgccacccacccacaccccccgcctcatcccggaggagacgcggcgagaaccctgtcgctctgctctttaatggggcagcagcaagtagtacatggagggaacatatattgatttttaaaaggtagttaatttggtgggaatttcctcctgtcgcccttcttccaccagccgctgttatttcgtgaccggaaggcgcctccccaaacacagcgccacgtgcaagagggttttgaccctctgcaacaggctgccggcaactggaggacagaggggcgtggagaagccaccactctcccgctgcggagcgaaggaaccgagctcagtgagccctgacctcgcaaggtggttggaac

SEQ ID NO: 31203 - DNA, 1442 bp, Homo sapiens
  chr15:53078748-53080190
  hyper
cgctccttcgatagcctcctgggtgccacaagcacctgccaggcaccatgtttgcgcctccagcgtgcgggtcccagcactcaggctccctccccctccacagtgccgtcccctgagctcggctatgtagctctccacgcttggaggtcagagggcgctcctgcggccaggtttccatggctcagaggtcgtctctgaacagaacgtgtcagtctgtccttccagggggcgacagcaggcagtggggggaggagggatattgaagtccagagcaagagcctccagggggcgggggtgggggatggggaccgagttttcccggaggggtagccttctccatttctatcttcttcccacattcccccgctccactctttggcttcagcgggcactgcctgggtaagaggccctgaagcctggctctggggtggtgtgggtgtgtgaaaaggcactaccttgggctctggagagacggagcagtcaggacgaggagcagccccttcgcccactccctccggaacctcagttgctcgcgggcagcccacgggtggagatatggtgccggtagcacaagagctagagagtggaaaaccgggggccagcgattcgctggggcgcccagcgagcctcttctcccctgactggttcccgggcgcaggctgcaggaacctgcatgaggactttgcctggggcgaacgaaggcagagctgggctggaaaacctggcagggcagagtctcagccagcgcggtgctttgggaccggtggcctgcagcgcccaaacccaaagaacgctttgggtcgcttcggggcacgaatcgcaggctggtcggcacctgccacccccagcttctcattggcaggcacgagttggaggagggggctttggcctcacgctttgattttagactgtgaaacggctcagtgcccccggctcagagcggattgactgtctctcgttctccagggacgaattaatggagaacgatcagttaattaacaaaccctcattccggcttttaccttttctcttcgccaaggctcaggcctgggcgctgggctgagatggaggtggaggtggggggtgggggagtggggggggagggggcatggaccaggagtcaatcaacttggcaaccgccggccggatctcatcaaacccaggccaccctccgctgtccttagctctacctcccctcatgttctctaccctcaagggtcgccgaatcctcctgaaatccccggtggggttcgggctgggctcagctttcttctctgcctatccgcggtctcggggagccaggcgcggtgtctgcgctgcgccaaggagagcttccagctgaactcagaaacacctggggcttggggtttcgggcaggagacctctgctcctagacttgggggtcatttacacactctcatccccaaacccccctcccgcac

SEQ ID NO: 31204 - DNA, 987 bp, Homo sapiens; identical to SEQ ID NO: 23088
  chr15:53080201-53081188
  hyper

SEQ ID NO: 31205 - DNA, 774 bp, Homo sapiens
  chr15:53097902-53098676
  hyper
cggcccggcatggcgctggcgagaaggcgccgctgggcgcgtagggtaggcagcacgcgggatttagccttttcccgacctgcgcgcgggccctggcgggaaggccaggtccgggatgggcgtcttgggcttgggcgccgactgtgggcggtcttggccccagaccccgacgcgtggggacccaggatgctggaactcaggccttcggcctagaaagacagaggttttgtctcctttctgccgccttccagggccggaggccgggccaggctcccgggtggcctagctcgggcctagtctgcgtctggccctcggtctgggaattggcagggacgctaggacctggtgatctaacgcccgcgcggcctcttacgccggggtttcctccaggtgctcgttgccacgcgttcgcccgacgcccgcagatcccgtcgcgcccgcaggctaggccagctccgcaagccgcctgctacctctgccgcccgccccttgctggcagagtccgggcaggactgccggggcctggggccgcagtccccgcgccgctggccgcccgcagcttctggcgcccccgaaaatgaccatctgtcattcaattaaggtttcagggcagctgatgggggagccagggtcagcgaccccaggacaaaacggcctgctgcctcggataggagaagttcaaatgttaaatgcagaatattgtgccctctcccagtccggggccccacccggccgcaggtccggccagtggacagcagtagggtgaagggcaac

SEQ ID NO: 31206 - DNA, 900 bp, Homo sapiens; identical to SEQ ID NO: 26392
  chr15:60286819-60287719
  hyper

SEQ ID NO: 31207 - DNA, 152 bp, Homo sapiens
  chr15:60288752-60288904
  binary
cgtcgggccagtgaacgacgtcagccgcaactctaagtggcaaagttttcgaaaaacctcgccgatcctctgaagatcgggttaatgatttaccccactcgccaaccacctgatgtagcctaccgctacgccgcggaggtgtgccaggatgc

SEQ ID NO: 31208 - DNA, 129 bp, Homo sapiens; identical to SEQ ID NO: 13462
  chr15:61931851-61931980
  hypo

SEQ ID NO: 31209 - DNA, 832 bp, Homo sapiens; identical to SEQ ID NO: 22805
  chr15:63795400-63796232
  binary

SEQ ID NO: 31210 - DNA, 67 bp, Homo sapiens; identical to SEQ ID NO: 23972
  chr15:67545420-67545487
  hypo

SEQ ID NO: 31211 - DNA, 1491 bp, Homo sapiens
  chr15:68117218-68118709
  hyper
cgaatcctgcagttggcccgagtgggaaacgtatatctgaaggaggaaagctcaaggagtgggcgactggaagctaagaagtggatcccaacaaagttccttgagaacctctctgtcccacacgttgacctcggtggaaaccagctttggtctggaatacagctaaaaatgcagaaaatgtggttagaactgcaggatcctggtctcactaatagctggaaagaaaacggtttatatatccagccgaaatctttctgctcaacgaacgcgggcgccagccgtgagaggagaagctcgggtttgtggaaactggcaatgttgtcccctgaagccggctcgggcaccaagctgggtgcggtgggggccgcgctaggtccgggtgcgcaccgagcgctttggagagggtcaggttcagcaccgcgaacagcggtagcctccgcctctctccttccctggcagacacggttccctcctccttctcctcacccccctccttctcttcacccccctctaccccctgctgtctggagatgggcagtgaccgcccctcccccctccccacccctccttgcactgcccccgcccgcccgcgtgcatgcgcgactgagcagaggggcggccgatccccgaagtccgggcttcaggacccgggccggcagcaccggctgcgagggttgccgaaggcgcacggatctgggcgctgaaaaagccaggatttggcaatggctttgctgtgtggccttgggcaagtcactctgcgtatctgggtttcacttccttcccaatccgaaaacgggattgggttccttgcagcccgggcattcctgaggtctcctttaccccttctcctcccccaagccccgggggctgttgttaacggcgccaacatgggtctgagtaacaaaagacgcctgtccagggggtgaatgagtttggactccccactgccaagtatcccccgcgcgcccaactcggagcgccctgctgggcgggcccgagcctcggcggcggcgctgaaaatggctcatctgctctctgctttctctatttcgcaggagcggcggcatggaggctctcaccactcagctggggccggggcgcgagggcagttcctcgcccaactccaagcaggagctgcagccgtactcgggctccagcgctctcaaacccaaccaggtgggcgagacgtcgctgtacggggtgcccattgtgtcgctggtcatcgacggccaggagcgcctatgcctggcgcagatctccaacaccctcctcaagaactacagctataatgagatccacaaccgccgcgtggccctgggcatcacgtgcgtgcagtgcacgccggtacagctggagattctgcgtcgggccggggccatgcccatctcgtcgcgccgctgcggcatgatcactaagcgagaggccgaacgcctgtgcaagtcgttcctgggcgagcacaaaccacccaagctgcccgagaacttcgccttc

SEQ ID NO: 31212 - DNA, 1986 bp, Homo sapiens
  chr15:68119718-68121704
  hyper
cggcggcagcggcggcggcagcggcagctgctggcagcggtgccccagagcccctggacggtgccgagccagccaaagagagtggcctcggcgcggaggagcgctgcccgagcgctctgtcccgcgggcccctggacgaagacggcacggacgaggcgctgccaccgcccctggccccgttgcccccgccgcccccgccgcccgcacgcaaaggctcctacgtgtcggccttccggccggtggtcaaggacaccgagagcatcgctaagctctacgggagcgcccgggaggcgtacggcgcggggcctgctcgggggccgggacccggcgctgggagcggcggctacgtgagcccggactttctgagcgagggcagctccagctacaattccgcctcgcccgacgtggacaccgcggacgagcccgaggtggacgtggaatccaaccgcttccccgacgacgaggacgcccaagaggagaccgagcccagcgcacccagcgcagggggcggcccagacggtgaacagcccactggacccccttccgccacctcctctggcgcggacggtcccgcaaactctcccgacggcggcagcccccgcccccggcgccgcctcgggccacccccagctggccggcccgcatttggggacttggcagccgaagacttggtgcggagacctgagaggagcccgccaagcggcggcggcggctacgagctgcgagagccttgcgggcccctaggaggccccgcgccggccaaggtgagccccgcgcccgccccgccagtggcgccttcccacctaccctgtgcgcggcagggctgcggggccgggcggagaacgggaattttgttccgcgcaggcgtgggagcagcaggcctcggccactctccgcaggcccagccttgggcgcgctgcgaaactgggcccacccgcaccctccagtgagggtttcgaagggaagggaagctgggggcggcgggaggactggggaacttgtgtgctttgtttttgttgatgggaatggggaggagaccggctgagactgccagacacagagacagaaaaggggtgtggagaaagaaagaggaggtaagaaaggaacccagagccagagaaaagcgctcgcccgggtgggcatcagagccccaaggaagaggagaagagaggacagtgtggcctctccctgagtcgggccccagcagtaccgggtccccggaatctcccaccaccccaactcgcagttttccgagtctcttcgcactcccgccttgggaaccacagggttcgttgctgggaagctgtctcgggaccgcgtgcggagcgggaggggggctctcaagctggcagggccggggcttgaggggcaggatgcagccaggctggagtcgttggccattttgaaagtgagtgcgcatacctgtacattcggttcattaaaacacgaatcattaaccggatgcgaaaggcgtcatttatgccgcggacggggcactggcgggagggaaaatgcctaaaaggaggcgggtgcagagggtggaggacactttgaacgcccctcggcttgggagccgctttgtgtttagagtaattttcccgagggcgctaacaattaccctgaatctacaagggggcaagggtgcgccgcgtgcgtcactgtgcccgctcaagtccagcgggcgcaccaacctttgccactccgtcggctttccctcttggccgcggggtagggctgggcgtctttgggccgccgcagggcgccaccctaatcgcctgtcatttctcggccgtcgcaggtgttcgcgcccgagagggatgagcacgtgaagagcgcggcggtggcgctggggcccgcggcctcctacgtctgcacccccgaggcccacggtaacgcctgtcgcggccgctggccactgtaatgggggaaccgcagacagagggccggggtcaaggaaggcctgcgaaggaagacaaggagagagac

SEQ ID NO: 31213 - DNA, 939 bp, Homo sapiens
  chr15:68125183-68126122
  hyper
cgagcccagcaaacggcttgcaggcatcattacatggagtgattgaacttcttatcgcggcaatttccatggtttctaaattaaaaatcgaggcgtaaaattacctgggaagtaatgcctaagtttgctttaattttggttagatccatctgcctttaagcgccatcccaggccatttccttcctccgccagtctgcagttaggagctccggtaccccctcccccatccctggagttgtttctgcgcggagcttagccctggggagaggaggaagcccgggctgtgaccccggcctttcggagggtggtctgcgtttcctcactggcccctccccttgtcttccagataccctgtgtaacgaactcgaccaggagcggaaggcgcgctatgccatccagcagaaattgaaaggtgcggaagccgggaaacaaagataggaggggtgctgggtgccggccgtgctgtcgactgaatgaatgaatagtgggactagtgaggaaggccacgatccacgtggatcaggatctgtgagggagaaaagtgggaactgattttaacgggaagattattctaggatggtgggggtaaaaagaaagagccccttgggctttggacgtcagaaaaatctgccttctattaccaattctggctttgagcaggttgactcctctcttactgtgcctcagtttccttttctgtaaaatggggctactgaaccagagcagtggttctgaatcaccagcttttgtcctaccctcctgcctcctcctgatccgctcggttgagattccctgaccccaaagggttggtaaggccggggaggggaaagggtggactgcgcggtgaggtgagcctggagaggcgcccagagtgaccctcgcgactgtctccccagaagcccacgacgccctgcaccatttctcctgcaagatgctgac

SEQ ID NO: 31214 - DNA, 204 bp, Homo sapiens
  chr15:69136239-69136443
  hyper
cgtgtgtgtgtttcggggctgctcaggaggacaggcggctctgcgctgcggctgtggtgggctccgtgcacaccgcgctaggctcatagggcggctggcaggtccagagagcggcgtgggagcagctgctgccacggtggcagcggagatgaaggtgtcagcctgacgcgggcggctcctgagagctcgctggggcgcctcagc

SEQ ID NO: 31215 - DNA, 457 bp, Homo sapiens; identical to SEQ ID NO: 13467
  chr15:75075794-75076251
  hyper

SEQ ID NO: 31216 - DNA, 901 bp, Homo sapiens; identical to SEQ ID NO: 25117
  chr15:75250996-75251897
  hyper

SEQ ID NO: 31217 - DNA, 581 bp, Homo sapiens; identical to SEQ ID NO: 29891
  chr15:76627485-76628066
  hyper

SEQ ID NO: 31218 - DNA, 864 bp, Homo sapiens; identical to SEQ ID NO: 23092
  chr15:76628342-76629206
  hyper

SEQ ID NO: 31219 - DNA, 1501 bp, Homo sapiens
  chr15:76629494-76630995
  hyper
cggctaggatgacttcgggctgcgaaatctgcttctgttttgcgcaaaggcaattaggtttgatttagggatgtgggtttttttttttttggttgttgtttgtttgcctttcggtttttcaaagctaggaagctttctttcgcttgctctgggatatttaaactaagaaatgtctgagaggatgagcggggactgccgaaagacgatgtgtctgtgttgggataggaggcagccgctgtgagtgggagtgtgtgagcggaaatgccaggacagcaccgttaggtgttgatatccaggcgtccgcagtgcctgtgtatttactctcttcttagtttcgtgtttgcgtttagtttcaagacacgtcgacaaaacgactgtcattaatgaatgtaataacgaaatatttggggtgggggacagaagaaaccttcagcaatccacaagatactggtttttcgtttccaatgccctggacctttagagagctcatcatctttccttatggtcgcaagtcttgaaagaaagagcaagagagcgagcgggttgggttggggctggagtagccgaggccggcctgggtccgggcagtcaggcctgacgcggccccgcgcccttccccggcagagaagcccgggacggccatgtgcgtgggctgcgggagtcagatccacgaccagtttatcctgcgggtgtcgcccgacctcgagtggcacgcggcctgcctcaagtgtgccgagtgcagccagtacctggacgagacgtgcacgtgcttcgtgagagacgggaagacctactgcaagcgggactatgtcaggtgaggccggcgggaacgcgggctgggccaccgcgcgcaggggccggggccgggactggggatggcggcctgcccgcgcgccccggccctgcccagggagaaggccatccgcatcccgcacgggtgccgcagcgctcccccgggcccgggaatgcccgcaggcgggtcaccgcagtctcctggtggccacaaagtgtcctgggcgcgcgccggagccgtagcagccagggagatgagggcggccgcaggcccagcgctgacaccgccgcaccttgggcccgcaggctgttcggcatcaagtgcgccaagtgccaggtgggcttcagcagcagcgacctggtgatgagggcgcgggacagcgtgtaccacatcgagtgcttccgctgctccgtgtgcagccgccagctgctgcctggggacgagttctcgctgcgggagcacgagctgctctgccgcgccgaccacggcctcctgctcgagcgcgccgcggccggcagcccgcgcagccccggcccgcttcccggcgcccgcggcctgcatctgcccggtaagcgcgccggggcctgtgccggggtgagcggggtgtatgtgcgtgcgtgtgtgtaggggtacgcttgtgtccctaacgagaagttgtcagttgtgtgtggttccgtctgccgggatagtgtttttctgtatcagtgc

SEQ ID NO: 31220 - DNA, 962 bp, Homo sapiens
  chr15:76638250-76639212
  hyper
cggttccccgttgggaaagagcgtgtttaagttaaggcgtggtttgagagtagctaaccagagatcaggtcagctgttagggcgtgggggagggagggggcagggagcagggacgaggaagtggaagaataggggattgtgaggagtgatttctttccagattatcgagactcaagactttccagaacgtggcaaagagccctggaagaaatgtcccaggaacgccgcggtcaggaccgaggctccccggggccaggttcagggttcgaggtcccagcctcgcaactgctggcgtctggagggcgggagagtggccgggcccgaagctgcggctccgacgtacagttgcgagtctggggcggtgggccccgcagagctccgggggaagggagccgccgccgctgcggggaattggcttgggcaacgccgctgagtgttcaaacgtcgctgctcccgggccttgggcagcctctcctacctgacccaaattctgggctgcaaagcccgggcgaagttgtcgctttcactccgaatacgcccagtcgcaccgtcaacttcataggctgggcccggcagaggcctttcgcctccgcccagcggtctccgctgcggcccctcagcctctggagagccggggggcggccctcgccccggcagaaagcaacctgtggcggcactgcgtccccgcgagctacaaccagacgcggccgcgctcacctgggcgttgcgctcccccgagccccggagagtttagaagccgtaaaagcccggggagctggagcttaaatcgcccggaccgggccggggcgcccgaaagcagtgaactcgagacccccaggaaccgcgtgcgccgggaggcaccgggacgctcccgggcccgagccgcgcaggctcccggctgggtggggcctgggtttgcttcttacgcctcctcctctccgggacgagggggcaatgagacc

SEQ ID NO: 31221 - DNA, 304 bp, Homo sapiens; identical to SEQ ID NO: 29894
  chr15:76639451-76639755
  hyper

SEQ ID NO: 31222 - DNA, 211 bp, Homo sapiens
  chr15:78596062-78596273
  hypo
cgcgcccggccactgtttacactattgttgcagtagctgctgccatcaccgggctgcggcagggaggcacagctggggctgcatgctggtggatgcctcccccttctgagttggggagagctccccaggtgctgctgcagccgcccaaacagcagttgcagatccaggcctcctgctttacggagcaggcagggtcgccaccctcctgggc

SEQ ID NO: 31223 - DNA, 293 bp, Homo sapiens; identical to SEQ ID NO: 25120
  chr15:79502053-79502346
  hyper

SEQ ID NO: 31224 - DNA, 165 bp, Homo sapiens; identical to SEQ ID NO: 25122
  chr15:89908837-89909002
  hyper

SEQ ID NO: 31225 - DNA, 964 bp, Homo sapiens
  chr15:89921803-89922767
  hyper
cgcggctgcttcccgcccgcgcaggatcaggccggcccccgcgggcctggagctggatccagagctagggaaactggaaaaacaggcacaaactcggaagccgcggtacggcaagagcctaagcaaagaatcctttccaagattcacacctcgtctacaccagggcaccgcctgggcctacggccttccgaacccgaagcgcccgcagcccagagctggcatcaggccatcaggccgggaaggtcgtcgcaggccccagagtgcgggcgcggggggcgcgcgcccacaggacgcccggggttgggtaggcaggagagaagggcgccagcaggcccgcggctgtttcccctcggtccgcacagcgggcccgggaggccattttgagagcgcgaagaggggcggcaagatggctgcgtgggcacccggaaggtcgccgcgccaagggcccgctgagcccctcctcccattcgtccagccgcgcggcccacagaagcggaacgcgcgtcgagagcgccctgtccgctcgccccagacagatgcccggttattcattaccgcgaggcctagaggaaagagtggctgccgtcttcctgcccacagcccgccggaccctccgtcgcggctgcccggtccccggagccgcagccgccgagcccggctgtgcgtgtcgtggctgctggggagaaagaggcttccggtaagagcccccctgactgggctgcccaccccgggcaggggcggaaacggccttccccgcgtggggaacaatggcgttattttggagtctgcaaccgcgagcgcttcaagctctttgattattttcgaggagtgttaggtgcgtggctaactcccgcgttttcttggaaccacgaagcccaaaatggcgagcgggccgtggccgccctcctggggctgagtgtggtccggagcgctgagagtggccagggagccgtgggcctccatc

SEQ ID NO: 31226 - DNA, 112 bp, Homo sapiens
  chr15:89945179-89945291
  hyper
cgtgtgtttagattcccgatgattcatcactgacacgctgatgtcagaggagcctgggaagatgtttacatctttttaaaaaagggaaagcgaaacgtttttctgcaaaacc

SEQ ID NO: 31227 - DNA, 870 bp, Homo sapiens
  chr15:89952246-89953116
  hyper
cgcccagtccttgcatgactcatggcggtggccacacgggtttcagggataacgggatgtttagaaaatcgctgcatatcggagtttcctagcacgttccatttatactgaacgcaggcggccgctgaaaatccagcctcgactcttgctaatgactgggtaggaccctcggggtcctgcgacggtgctggagggtgttcccggctccgatgtggggaggcctgcgcggggactaggttctcgagaggcgagcgggcgcgccagagaacccgagactgctgcggggccggatgcgggatccctgggctgcggttctacgcagaaacgccaatggccatgcctccccagctcctcccagccccagtcactaggccggcgcctggcccggagatcctcccagagccctggcggtgccatcatgccggagaagacaagctcggccccgctggaattcgctccaaacacagatgctcatttttggaatattctagaaaaataacaagatcttgtttgtcgttatgattcacgggaggtaactgatgggagggccatttacatgagggcagacactgtggggcgaaggtgacttctggacgtaggctttaaagtaggaacggctccaaattcccaatatctccggccttaccggttgcaaatcggacccctgcgggaaaaccagacacttctgtttcgtggctttcgggctgcctccagcccacgcaggctcgtttagtccccgtggagtcagccccgagccttcctagtcctggaacaagggctccaggtcgcggccgcgggaagccgccaagagggcggggagtagggattccctccagctccgcagggcatctcacaagcgccttcttctgc

SEQ ID NO: 31228 - DNA, 573 bp, Homo sapiens; identical to SEQ ID NO: 25125
  chr16:12132253-12132826
  hypo

SEQ ID NO: 31229 - DNA, 324 bp, Homo sapiens
  chr16:1217837-1218161
  hypo
cgtggcctggccgtccgtccgcggggcccgggctgcccatggcagcaggtgctcagtaagcactcgccccaccagtgcgtggagcacgtggggcctcaggagccaggcctgttccccggggctgcctggaggcggccgcttgtccccaaggcctggtgaccgcacctctgtctgccctaggccttcgagttgggggacattttgtaaggagccgctgtgcctaggccagagatgttttcggaaggggtgcctgtaccccgagaggtggaccagaattcccctggggcacggtggcgggagaccagggcggcctctggtgccccc

SEQ ID NO: 31230 - DNA, 370 bp, Homo sapiens
  chr16:12530018-12530388
  hypo
cgatgcccgagacccctgctatgctctgctgcagcccccggaacagtattggcacaggtgagggccacgcctcctccctgggcccaggcatcaggcgctggctctccacaggaggccgcagcttaaggagctcacagacgtttctattcggagagaggggaaggaacgaagacaggaacacagcaccgtttttagtaccaggagacagcgacagcttggcgtcagtgcgatgcgtgacatttccgtgtgtaaggtgtgctgctgcctggtggagtggcgcgcgagcacctggctgctttcctccctgccagatgccatttcaggaaatcgcctttgttgctcaggcattcatacccctgactgctcaggc

SEQ ID NO: 31231 - DNA, 197 bp, Homo sapiens
  chr16:1407334-1407531
  hypo
cgggccagcaccccagaggtctcagtggcattagcctctgccctccgggggcgggggccaggctgagggtggccccagtgtggcatctggctcctgggctggccagattcccagggaacagtcacccagcacctcgtgtgtatttcgactttattattattattattattattattagagccgagtgtcgctgtgtc

SEQ ID NO: 31232 - DNA, 402 bp, Homo sapiens; identical to SEQ ID NO: 25127
  chr16:1417690-1418092
  hypo

SEQ ID NO: 31233 - DNA, 322 bp, Homo sapiens
  chr16:142447-142769
  hypo
cgtagcacttgcacggcaagcccccaaaaccaaggagaagcaggtggcagtgctgagggctctcagatcagaaccaacagccaggcaggtagtgcctatccactacacacctgccactctgggctccttgagcttctgtgactcacctcctgcacagcgggggccaggggattcctaaattctgacaaggagaccggcaaggagaacttggcaagaacggacggcaggtcatgagatgggaactggtgggagaactgctcggccagcggggagtacctgcaggcaggtgagcatgccagtgagtgcagcagacccccccacc

SEQ ID NO: 31234 - DNA, 765 bp, Homo sapiens; identical to SEQ ID NO: 25128
  chr16:1428128-1428893
  hypo

SEQ ID NO: 31235 - DNA, 754 bp, Homo sapiens; identical to SEQ ID NO: 25134
  chr16:1730112-1730866
  hypo

SEQ ID NO: 31236 - DNA, 114 bp, Homo sapiens; identical to SEQ ID NO: 25136
  chr16:18802552-18802666
  hypo

SEQ ID NO: 31237 - DNA, 654 bp, Homo sapiens; identical to SEQ ID NO: 26421
  chr16:2028554-2029208
  hypo

SEQ ID NO: 31238 - DNA, 1782 bp, Homo sapiens; identical to SEQ ID NO: 29917
  chr16:2041061-2042843
  binary

SEQ ID NO: 31239 - DNA, 222 bp, Homo sapiens
  chr16:2106533-2106755
  hypo
cggggagaggtggcagcgcaggctgaaggaggtgggaaggaagcctgggtgtcctctcctgtggggaggagctggggtaggacgggcgtgagccgtctccctctccaccaggtctccctgcaggtgctggacgccgtggtctgctacaactgcctgccggctgagagcctcccgctgttcatcgttaccctctgtcgcaccatcaacgtcaaggagctctgc

SEQ ID NO: 31240 - DNA, 394 bp, Homo sapiens; identical to SEQ ID NO: 23996
  chr16:21831549-21831943
  binary

SEQ ID NO: 31241 - DNA, 948 bp, Homo sapiens; identical to SEQ ID NO: 23492
  chr16:2280815-2281763
  hypo

SEQ ID NO: 31242 - DNA, 1768 bp, Homo sapiens; identical to SEQ ID NO: 22807
  chr16:23846783-23848551
  binary

SEQ ID NO: 31243 - DNA, 364 bp, Homo sapiens; identical to SEQ ID NO: 25144
  chr16:2391749-2392113
  hyper

SEQ ID NO: 31244 - DNA, 713 bp, Homo sapiens; identical to SEQ ID NO: 6438
  chr16:24837143-24837856
  hypo

SEQ ID NO: 31245 - DNA, 290 bp, Homo sapiens
  chr16:2497839-2498129
  hypo
cgctgggctctcattggccactgacatcttgtctttttggcgtctgcagcccccacgctggcaggtgtagtccctgcgcctcttgtcctcttggtcaagtgaatgacgcatgcaacctgcagagtccccaggacagagcagccaagggacttggcctcagtccaaggggaaggtgccttgcggggggccgctggagcagcgtgttccctgatagttggcgctggttgacaacagagaacagggtgaccatcgcctagagacagtcaggattcctgcggccacacagtgcc

SEQ ID NO: 31246 - DNA, 251 bp, Homo sapiens
  chr16:2531031-2531282
  hypo
cgctgtctctatcccttctgaggctaaggcttcctcacactgcaagatccagccgaggcaggccttggcgctgggaaagcaccgtgtcacagcacctgcaccttgaattggcatcgtcagtacacctgacccgggctggggtggggccatgcctctgtactcctctgcactcaggtacctggcacactggcattcgggaagcatgtcttgaatgcctattaaaatgattaggaccgggcgtggtggctcac

SEQ ID NO: 31247 - DNA, 559 bp, Homo sapiens
  chr16:2540434-2540993
  hypo
cgagcagcgattcgctcggaccccagaggccacaggaagatggcttcccccacaggaggcaccctcacagggccctgctggcactgtctgccttgggctgcctgaacccggagagagagtgggatagactgttcatggggtgtcacccttatgtcacctgcaccccaccctgtcagtccagagtgaggctcaacccacaggggttgcttgggaactgttgcccgtgaggagttgggtgttattatcggctccgctctgcagacatggcaaccgcaggttagggaagatgcacggcttgtccgcatttcaagcaaacaagtggcagagctggactttgtggccaggcctgtctaactgcaaagctgccccgtttccacagtagcccctgcctcccctctcactccctccccggccaccgcctccggctctgcacctttgtcaggggttgggggactgcagggaacagaggaggccttgtttgctgcgtaggagcaggtgcggcttatgatgtacagcagcagccagccagcagatagacaacagggaaagccactcggcc

SEQ ID NO: 31248 - DNA, 584 bp, Homo sapiens
  chr16:2764111-2764695
  hypo
cgtctcaaagatcaccgaggggtcaggcaggcacacggggaggatgtaattggtgaagggcactggtgcctccagctccaccagggccacgtcagcgctggaggccgtgccctggtacagggggttgctctccacctgcctcacccgggcatacatagcgtgtggtcccggctgcactagctgccttgcccccagcaggacctggtacagggacgtctcagaggtgctggcgggagaaacagagaggcggcgtgaggcggcccctcgtgtggggacaggcccgggaggggctggggctcctctggccaccaccgtgccccacacctctctctgcacaatgtcttcgagagtcatctctaggacagccaggtgcagcggtgatgcgtgttgacattgaagccagaccgcccgactcagatttccacctccacccctggccgctgtgtggccttgggcaagtcacttaacaagttctctgtgatgcagctttctcacctgtgctgtggggacagtcacagtgcctacctgaaaggctggctcggagagaaccaccctccaggtgcagcagggccagccccacctgc

SEQ ID NO: 31249 - DNA, 456 bp, Homo sapiens; identical to SEQ ID NO: 24000
  chr16:2770043-2770499
  hypo

SEQ ID NO: 31250 - DNA, 331 bp, Homo sapiens; identical to SEQ ID NO: 24001
  chr16:2849309-2849640
  hypo

SEQ ID NO: 31251 - DNA, 177 bp, Homo sapiens; identical to SEQ ID NO: 25149
  chr16:28878657-28878834
  hypo

SEQ ID NO: 31252 - DNA, 405 bp, Homo sapiens; identical to SEQ ID NO: 25150
  chr16:29153172-29153577
  hypo

SEQ ID NO: 31253 - DNA, 223 bp, Homo sapiens; identical to SEQ ID NO: 26432
  chr16:29830886-29831109
  hypo

SEQ ID NO: 31254 - DNA, 173 bp, Homo sapiens; identical to SEQ ID NO: 8016
  chr16:29857096-29857269
  hypo

SEQ ID NO: 31255 - DNA, 732 bp, Homo sapiens; identical to SEQ ID NO: 26433
  chr16:30017168-30017900
  hypo

SEQ ID NO: 31256 - DNA, 175 bp, Homo sapiens
  chr16:30354637-30354812
  hypo
cgatgccaccaaggcatcaggtgagtgccagctggggctcgaggactttctcctctccgctccctgttctgggagcagggtcaggggcttcgcggagaaggcggaggagagctggaaggtgctgctttccttgtgctgctggcgcgccactgcacttcagcctgggagacagagc

SEQ ID NO: 31257 - DNA, 240 bp, Homo sapiens; identical to SEQ ID NO: 13505
  chr16:30991726-30991966
  hypo

SEQ ID NO: 31258 - DNA, 384 bp, Homo sapiens; identical to SEQ ID NO: 25156
  chr16:31138407-31138791
  hypo

SEQ ID NO: 31259 - DNA, 942 bp, Homo sapiens
  chr16:3139033-3139975
  hypo
cgctgtggaggaccccgggtaggtggcgcagggcgcggctggcggaaggcgggccaagctagtacagcgtctcgcgggcgtgggtgcgcaggtggcgcagcaggtgggagttgcggctgaagctgcggccacactgcgtgcaggagtagggcctggcgcccgtgtgcaccagcaggtgtcgcagcagattgcagctgcggctgaagctcttcccgcactccacgcactcctgcgggggctcggcctgctcctgcccgggctccgcatgggtagccaggtgccgccgcagatgcgcgttgcgccggaagctgcgaccgcacgtctgacagctgtagggccgctcgcccgtgtggctgcggcgatggcgggccaggttggagctattgcggaaacggtggccgcaggtgtcgcaggcgtggggcttctcccctgtgtggatgcgctggtggcgcgccaggtgggcgctctggctgaagccctcaccgcactcgctgcagcggcagggcttctcgcccgtgtggctgcgctggtggcgggccagatcctgggtctggccgaaactcttcccgcactgggtgcagtggtggggccgagggccaccgtgggtcagcaggtggcgggcaaggctggcccggcgcacaaagcgcttcccgcactgcggacaggcgtagggcttctcgcccgtgtgcacccgttggtggctgaccagctgcgagctctgcgtgaagctgcggccgcaagcctggcaggagaagggccgctcgcccgtgtgcaccctccggtgggccaccaggtgctcgctgcgccggaaggccttgccgcagtcgctgcacacgaagggcctccggtcggagtcccggcggcggctgccggagccttcggaggaccggcggtccttgtccctggcgtggatccgcaggtggcgcttgaggctggagcggc

SEQ ID NO: 31260 - DNA, 313 bp, Homo sapiens; identical to SEQ ID NO: 25157
  chr16:318513-318826
  hypo

SEQ ID NO: 31261 - DNA, 1326 bp, Homo sapiens; identical to SEQ ID NO: 25159
  chr16:3221125-3222451
  hyper

SEQ ID NO: 31262 - DNA, 937 bp, Homo sapiens; identical to SEQ ID NO: 22810
  chr16:3233501-3234438
  binary

SEQ ID NO: 31263 - DNA, 187 bp, Homo sapiens; identical to SEQ ID NO: 24008
  chr16:323421-323608
  hypo

SEQ ID NO: 31264 - DNA, 1770 bp, Homo sapiens; identical to SEQ ID NO: 23097
  chr16:3238154-3239924
  hyper

SEQ ID NO: 31265 - DNA, 227 bp, Homo sapiens
  chr16:337575-337802
  hypo
cgggccctcagaaaggaggacccaggactgcacagccggcggctggaggcaggtgcagtgctccgtcgccgattcacacagtggcaggcaagagacaagctgtgttgaaggcactcggtggcgcgtacaattgacagaggccctgcaggcctctgcatccgggcctgggccccacccagacctgggtacgtgggcaaatcccagagggaaagtagatcccagcacac

SEQ ID NO: 31266 - DNA, 373 bp, Homo sapiens
  chr16:3696491-3696864
  hypo
cgggtgtaggggttgggtggggagaggatgtcctctgaaaaggtgacatttaagctgaaactggaatgacaagaaggccccagctctgcaggcagagcggaaggctcagagcttagaatcacgtaggtcatggaaagcattggatttcgtgttagggacaatgagaaactggtgacagattttaagtaggggaataaagagatctaattacacatttgcgagatgttctgagagctgtggggacggctgggacatgtacctggaagcagggcagccaaagggagaggcagtgatgacgggtggtatggaggctgcagaatctggaggacgtgcaggctcagggtgcatggtgcgggcggggctgagggggagc

SEQ ID NO: 31267 - DNA, 822 bp, Homo sapiens
  chr16:410895-411717
  hypo
cgcagctgcccttgcagggcctgtccctgaagtcccgagtaatgggatttggcgcttctgatccatcgggctggccgcttcccgtgtcataggtggacattttttttctttatatcgcttctgtttcttttttttttttctcctcgaaaaaatgctgcttaaacggcaccgacttgacatggcttgtctcctaaccttggagtggcggccgggacgccggcctggatcagtcgggggtctttgatgccgcctccatgtgaaacctgacgtggaagacccaccggggcggttttggggtccgaggtccgtcaggattcatcctgcctcaccctgctccctttgtctcttcccctgacccttcctcgggacacccggagagggtctgagggtgagggtgcgggcgctgcgtgtgggcttgcactcgagggtggggtgggccgagggcagggccgcagccgcgagaacaatgggcagaggaggcgcgtccacctgtccgcccggccgcctgcccggcttacctcacctgcctggctccgtgtgcctgctcacgccccaccgtcccgctgtccgccatgatgggcttggccgtccgtccgagcactttcagccactctgggaagcaggtccctgctcttggccactgtgtggctgggaggcagaagcgtgactctgggctgcagctcgggctcctgccgccgattggctgaggcagggaccagatgacgggcctcagaaccctatggtagccatggcaaccagcccctttagacaccgccacccccgagccactcctgactgctgagggagcaggcggcactgccc

SEQ ID NO: 31268 - DNA, 366 bp, Homo sapiens; identical to SEQ ID NO: 23098
  chr16:4363872-4364238
  hyper

SEQ ID NO: 31269 - DNA, 172 bp, Homo sapiens
  chr16:4395355-4395527
  hypo
cgtaacagcaggtgcctcggaggcagatcggaaacccaaggctggtgctatctgtcacagcagtcactacgcagggtcccggggtctgaaggtagggcacctgggcaagccgacaagtatcaagaacccaaccccgaggccagaggggcttgctccagattccagtggattc

SEQ ID NO: 31270 - DNA, 632 bp, Homo sapiens
  chr16:4421671-4422303
  hyper
cgcgcaggtcaggtggccgcagggtgagggccagggcaacccggcccacgagcccctcggtggggaaggggcgtgtctccacgcggctccgccccggccaatggggagaggccccgcccctgccgcggcgggcccgccccccgggactcttaaggcgcgacctgcctccagcgagccgactccggagcccgagcccggggcgggtggacgcggactcgaacgcagttgcttcgggacccaggaccccctcgggcccgacccgccaggaaagactgaggccgcggcctgccccgcccggctccctgcgccgccgccgcctcccggtgagtttctgtggggctggggggctgcgggcggggaagggggcgccacggccaggctgtgcacacgcgcggggaccgccgccgcgcgcacacacgcactctcgggcgggaccgcggccccagccccacacggtcacctgggccgcccggcgggcaggccctgtacgctccctcccccgccgtcctggggcgccgacagccccgcggccggccagggtgcgcgcctgagtgtgcggtgagcccgcgaggctgcaagcagacaaaataaacaccccgtcccatgcttcctcctcccacggctgggcctcc

SEQ ID NO: 31271 - DNA, 409 bp, Homo sapiens; identical to SEQ ID NO: 25169
  chr16:4845976-4846385
  hypo

SEQ ID NO: 31272 - DNA, 92 bp, Homo sapiens; identical to SEQ ID NO: 24014
  chr16:48642057-48642149
  hypo

SEQ ID NO: 31273 - DNA, 322 bp, Homo sapiens
  chr16:4931957-4932279
  hypo
cgtaccattgcgcgtgcagctggagcagaataccctcatttttaggaatctagtgatgcctcttgcctcagggaaacgtttctttgatggggagtttgagatttcttttccttgtttatgctttatttgtggtaatgaaagagcgaatgactgaacagccatggcaaggcagacctacaggcgaggccgcagcagagggtggggcagagcagcctcggggtctgggggctgcaggggtttccctggcgcagcgaaagtctctgagcacttaccgggcgtgaccgtttcttaggtgtgagaggggctgtggcttttgtgcagc

SEQ ID NO: 31274 - DNA, 442 bp, Homo sapiens
  chr16:53563469-53563911
  hypo
cggctcctcttatcccccaggcaactggctgcctttcacctccgcggcacagcaattatgtggtgtaatggaggcagcgcaaataagcagaaagattttattaaaccaaatgagcaaatcatctgcgtattattgcgatttgattgacactgacaagtgtcgagcagacgcggatgtgaatatgatacagaagcttgcagcaaagctcttgataatgttactcttgataaagttgcctggccaccctctctaagtaaataaaggggagaggaatatgacgcatattaattcacccagtttgcagcctactggaggacgagaggggaaaaaaaagttgcaatgggttcagcgcgtggcattttatatgaataccaaaattgcattcatgattcacatagactttacgataatatattaatattaaaactaaaggtcattccac

SEQ ID NO: 31275 - DNA, 310 bp, Homo sapiens
  chr16:54324293-54324603
  hyper
cggagaagcgacggggacacttaggggaaaactttgccaacttcgctcttggcgcggaagaggccgctggccggaatggtgcagcagcggcggcgggccgcgacgcgcagggtgggccccgggccagtgctgggcaccctggagcgcgtcgggatgcccaaagtggggcgtgaggccggtgggctctttgctcctccgcttcgcccctgcgcctcccgcgacccgtctcacttccctgcgtctctgagcggcccgagaggcgcagcgctcagagtggccttgatggaagaacctggccctcggcgggaac

SEQ ID NO: 31276 - DNA, 330 bp, Homo sapiens
  chr16:54628677-54629007
  hyper
cgggatagtctacggggagcagagttaatcgaataaactaatcttcgctgtggagattaactctcagtagctgcaggaaaccgggcaagggagaatgcaaatagcagagacctcaaggtgctggaggagttaggaatctcccctccctcactctaacgctgccgccgccgcaccccgccacctccccccctccccacccccgccgcccacccgccctcaggttttaaatttggaagatattgtggaaatggacaaactcgcctttgcctgctgaccagagcccagccccaggcatgaaactgagaaagtgagcagttgcaaggacgtgac

SEQ ID NO: 31277 - DNA, 819 bp, Homo sapiens
  chr16:55364707-55365526
  hyper
cggtgtgcaggcaaagatgcattgcggccagggattcttgcgacagcgcggcgtgggctgcatacctcagttcctttagtagctgggaaagaaactgacaaggtaacagacaaggccgtggcgcctgcagctcagcggactaaccgctgcgtaaccaatccgtggagccaagctgaccacctcgcgggtcctgcgcatgggaagtggtgggacttgtcaggatgtttatctggaaactgcatctgtttccgggttcgtatttgggttgtaagtttactgggggaggggtgacgaggaccgcgctcctccgatcgaactgaacctaatggggaggtcaggcagctttcagggtcggtgtgaggcgagagggggcattcttcccgttttatcaaaagtgtcagcaaacacttccggtacaggccaaccaatgggaactgacgggcagggaaggggtctttgtcccccttgctaggagtgtcgagcgaccgggttgggggtaagagatttaaagacgcccgcgcaatggtgggtgggggaggctgcctgcgttcgtgtcccgcgtctagtggctttggctttagccagggagtgagcgcaccgctgctcgcagggaagcagggacccggggcagtgccctagaggggagctccgaagagcaaatgaggcgggaaggcaggacgaaaggcagctggggtgtgcgcccaaggcctggattcctggggagctgcgtttccaacgccgggtcccggccaggccaggccttccaggccagcgcggaggccagactatcagtcactgaaatccaggcgagcatagtcc

SEQ ID NO: 31278 - DNA, 758 bp, Homo sapiens; identical to SEQ ID NO: 28650
  chr16:56659107-56659865
  hyper

SEQ ID NO: 31279 - DNA, 1300 bp, Homo sapiens; identical to SEQ ID NO: 13525
  chr16:58030214-58031514
  hypo

SEQ ID NO: 31280 - DNA, 603 bp, Homo sapiens; identical to SEQ ID NO: 24017
  chr16:611800-612403
  hypo

SEQ ID NO: 31281 - DNA, 855 bp, Homo sapiens
  chr16:666708-667563
  hypo
cgagacttggaaatacattcgccttggagaattcaacttcaaaatgcatacgaagtaggtcagggtggaaataaaggcactgccctttctccaggcacgctggagtccacgccctgcctttgcccaatgccctctgagggagaggccctgtgccttgcacccagcgcgggccacaggcggaggccccattccaggcaagccgtgcccatggagaggctggcctgctaggctgtggggcccgatggcctgacactgtatggaccacgctcctgccctgccctgccccgccctgcccgtggcccgtgtgcagaagtgggcaggcctgggttgctgggccagagccccgagatttccccctgccccactggctgagtgtgggggagctgcttctccacttccgcgtgggtcttggccctgggaggccagtggccgaggctggtctcgcgggcgctcgctccaggagtggcgcgtcccctcagcgccctgtgcttcctcgcagggatcgactacaagaccaccaccatcctgctggacggccggcgcgtgaagctggagctctggtgagttggggctgcggcacttcagttcctgggtgaggacacaaatgccgaagggagaacagaacccttagagaaacaggaaggcgtcctgtttgcatttcacttggaagagccacttacacagcccctgtttaaacatagaatggattttactccaacaggaaaaagacagtctgggacactgtgtccctagagatcgcggctcccctcctgccccggaaaacctgattccgtggtggctgtgagccccttccctccccttctgtcggcttcaccttaaaaagcatttcccagc

SEQ ID NO: 31282 - DNA, 400 bp, Homo sapiens
  chr16:667874-668274
  hypo
cgtcagcgttgatgagacgtgaatgtccacagggttggggttccccagcctggcaggacagtctcctggagctcccaggctcatgtgaggagcttgctcactccccaggtgggcgggggccccttctgctgcctgcctggctcagcggcacggcgccaggctgctgtgacctgtgcagacaaagccgcttagcacagcctcattggcacctgtcctggccgccccgctcccctcaggacatccaggtgggtcggcagaggagggaaggaggtgagcctctcacagggaccacagtcccggcccctcccctccccgtatgtttcagggacacgtcgggccagggccggttctgcaccatcttcaggtcctactccaggggcgctcaggtaagaccagcacc

SEQ ID NO: 31283 - DNA, 907 bp, Homo sapiens; identical to SEQ ID NO: 27685
  chr16:67197294-67198201
  hyper

SEQ ID NO: 31284 - DNA, 1416 bp, Homo sapiens
  chr16:67198214-67199630
  hyper
cggggcactcacacccttggaatgactacgtcccggggttcggcgggagggggcgtgcttccctgcccccccttcctatctgcttgccctgcctggggcttcactgtgcctctggccattaccttctaggacttgcccagcccacaccaggtcgcgcaccggcgatttctcctgtagaacaaagaaggaaatagagggaccgagaggggtgggactcgaacccaagtctcccactcatctcaccccaccccaccccactccaccccaccccacccctccactccactccactccacacatcccatccagccagccttttctgcctgctggtgcctcggccgctgtccgagccccgccccgcgggcttgcacgtggcccccgcctgacccggcgccccggggcggagtagggcggagcgggcggcaaacgcagcactttccgcggctttgacgagcccgcagcggccgggcccgagcgcagagccgggccgagactgcaccatgcaggaagcgccagctgcgctgcccacggagccaggccccagccccgtgcctgccttcctcggcaagctatgggcgctggtgggggacccaggcacagaccacctgatccgctggagcccggtgagggccggggcccctcgattccccctgtggtcccggggtccctccacgtcagtgaacacccatgcccgcccaaccccctcctgagactgggccgtggatccccggatttggccattcagagaagttcaccttggagggggtgtgcgagaggggggtttcctctgcggccgaagaagggttaggagcctgccttctgaagacctagagtccgagggaccttcgaggccatttagttcccaccctaccccatccgacagatgggaaaacagaggccgggagatgggaagggctggtctagctcagggtcacattgcggggctgggaaccccgtcagcctctcctttctgagaactgagtatggagtcagggtctggctgggggtagggactcactgtggtcgctccaggctaggcctcggagcccgttctggcctggcctcgacccatatccccgtaagcggcaggcctggacccaagagtgagcatgagtgtgtgcgcgcgctggagcgcaggactggccgtgagcgggcaccgctcaccctcctggtctccgcccgcacggtgggcgggcggcgttcttggtagagcgggaccagtttcctcgtaagcgaccagagccgtttcgccaaggaagtgctgccccagtatttcaagcatagcaacatggcgagcttcgtgcgccaactcaacatgtgtgagtccctacggccgggcggggagcggggatgggggactcggtgccggggatggggcgacccacgcccccacgccccactccccagacggttttc

SEQ ID NO: 31285 - DNA, 344 bp, Homo sapiens
  chr16:67241539-67241883
  hypo
cgaagcgggactggacacaggacacctggggcagctgggcttggaagcgtctgacggcggccatgttgatgccagggcacgtggccacatccaacacccggagctgcctgcacgcctgcccaatagcatccagtgtcctgtggggaggccacctgatgagtgcctggcccggtgtgggacccagcccagcccctgcaccgtggctccatctgcctggtgtcatcggacacacttactgctctatgagctgactgcagctggacaggttgagatgctgcagccttggccaggagctggctgcctgggcccagcccttgtcactgagtcggctgcagtgactcagc

SEQ ID NO: 31286 - DNA, 120 bp, Homo sapiens
  chr16:677367-677487
  hypo
cgggccatcgtctcctgcacccccgtgcacctcatcgacaagcttccactgcccgtcaccatcaagagccacctcaagtccttctcgatggccaacggcatgaacgcggtcatgatgcac

SEQ ID NO: 31287 - DNA, 387 bp, Homo sapiens
  chr16:677803-678190
  hypo
cgggaggagggggcgcggctgggctgctggtgcttccgggaatcttggtcggaaacaagccgggcctccccagctgcctgggcttgaccggcggggagcctggttggcctttcttatttatatagagaacacttcacttttttgtacatttttaaggggccttcagggaagcctgggtgtggcccggtggtggtgcactggtgacttcatggccacgccagctgcggggacgcacttgggactcctcgagaggggactcgcggccgcgatggcaaggcatcctgtgaattcatgcgctgcgagtggcggggctgcccagaggccgggggagcagacagggccggtgctccctctggaagcttgggtgaccggggccctggctcccac

SEQ ID NO: 31288 - DNA, 746 bp, Homo sapiens
  chr16:69352228-69352974
  hypo
cgcacctggcctgggctgctctttaagtccagctgaagcacatttcccttacggccttcaggagagggccgacccggattcccatctgctccgcgaagaaacagggcgggttataggagtgtttgctgggggggtcctgaagtgagctgctgagagcattggcccaaatgtccctgaagtacttgcttgagtcacacggcactgttaagccaggaaggcttcgttccttaaccagtgtgcaggcagcggagcctggacttgctgggagcacctctgtgctccaggctgaagggccagcttgtgactttccgtctcccttcccagcagtgacagtgacagtgaaggggataatccggagaaaaagaaactgcaagaacagctgatgggtaagtggctcgcggccctgtggcagcggcaggggatgagagtgggtccgctgctgggttggctcatgccccttggccgggcccgggcccgggccggcctccctctcgcaggtgccgtcgtgatggagaagcccaacatacggtggaacgacgtggccgggctggagggggccaaggaggccctcaaagaagctgtcattttgccaatcaaattcccacacttgttcacaggtgagagttgagccatttcaaaccccaatgtaaaaattccaggcttccgcagggctggcactccgaggcacccgggagtcagtggcgactcagcccccggggcctgcagagggccaggcctggctgctc

SEQ ID NO: 31289 - DNA, 364 bp, Homo sapiens; identical to SEQ ID NO: 13539
  chr16:70754664-70755028
  hypo

SEQ ID NO: 31290 - DNA, 749 bp, Homo sapiens
  chr16:73099891-73100640
  hyper
cgtggccccacggccggcaggagtccggcgcacactgggcctggagcgcactgactggggctctggctagccgggctacccgtggggtggcctagggcccagcctgtgtcaaggctgcgggcagggcactggtcccctgtggactcggggcgcgccctctcagccgcctccctgtttaattccagagctcagcgggctgcagggacattcgacgccagtttcctcaggcccgggcgtgagacgcgcccttctcgtgtctgctcttccgtccctctgcgctggatgttgtatagcgcaggccccttccctccccgcctctcgttcccaaaaccttatcattgagaattcgacagttgccccgagatgctgatcccagttcacggagccagcgtgcgcgtccctaatgcccggcacacccatctccatttcgggacccttttttttcctgcgggctctggactcccgggaggaagcctcgggccctccggctccccggagacaccggctgaggcgcttaggccagtgcagagtcgccgcactgggacccaggcgcccctcacaggtgcacgtagggcatggcccaacggcccctcggatgggcggggaaacaggcccgggcggagcaattcgatcaccccattatgcccctgcggatgcccagaaaagccacgaggcccgggggaccgccccagcagtggtctggaaaggagagggcgcggcgaggggcgcacctcgcgcccagggcccac

SEQ ID NO: 31291 - DNA, 1204 bp, Homo sapiens; identical to SEQ ID NO: 23502
  chr16:734744-735948
  hypo

SEQ ID NO: 31292 - DNA, 234 bp, Homo sapiens; identical to SEQ ID NO: 13541
  chr16:74908874-74909108
  hypo

SEQ ID NO: 31293 - DNA, 759 bp, Homo sapiens
  chr16:750364-751123
  hyper
cggtgacccccatcatgtgcccatgatcagaaggcgcggcctccggaggccgacatcacaacgtttgcaagggccggctggggtcggcacatgattcgacctcacggccgcccttaggggtggaggggtcgctacctcaggtttggggaaggaacacgaggctctgaggagcgaatttgccccaggtgtccggggaggcctggcgcggggctgcctcggttccctcccagagccggggagaggggatatcgcaggatgccggcgcccgaggcggcagcaccaggcccacgggcgccccagtctaaatatcctccgtgcccctagagcggggaccctcgctccccagacccggaagcgccgccttccccgccagggacgcctgggcctccgcagaccccgccggccggcgcgccacccgcgccagcaccatggacagcggccgccccagccgcgcgctcagggccaggcccgggctggcttccaccgcggacggctgcggggtcggggcagccccgcaatcccaaatcccggcagcccccgctcagcagggaggggccccgggggcgaagagtgggggagaagccgggaaggatccggaggaggcggcgggggcggcgccaggggaggaataatcccggcgcagtgccgatttaggttgaaaacgctcccagtcatgggcctgcacgtggagcgccggggctgggggaggcattcgcggggctcctttcccgccccgctcgggagctcacgtttgccggc

SEQ ID NO: 31294 - DNA, 371 bp, Homo sapiens; identical to SEQ ID NO: 26449
  chr16:77247397-77247768
  binary

SEQ ID NO: 31295 - DNA, 823 bp, Homo sapiens
  chr16:809572-810395
  hypo
cgggaaagttgtgggtgtccgtggcagcctgggccacttcacagccccgcagccaacctgcggctccttcagagcaaagctgtgtggacacaaagggaacgccactcggagctggcctctccctttacctgtgagttcccgcccaagccggctgccttctgtcccctccccagagcccttgggtaactggtttgctacaagagtgtctggaatttttcagttgttctctgcggaagggagtttttaaaaggcccttaatcccttcttgacatttgtaagttgacgcttacacctggcagccttgctgaattctgtgtgcgtgaaggtccgattccaccgcgagtcacgatagaaaacccactctgtggagagaccagagatgaccgccgcgcacacctccgttcagcacacaaacctttgcaggtgttcatagcggaggcagattccgtactggggataagagctcacgacatgctgggaggggtttcaggggcagggagggggcttctgtggccccaggtcaggaggagcagctcttccatcagcagcaggcagccagcccagatgcgtagggaagacagctcccacttcgccaggccagagagcgcccgggggcagctctgttccagtcgaccctgcgagaaaggggtgtgcgtgtgcctggagctgggccccgtcctgcctccctgacctgtgtgctcccacagccctgagacggacggctcacagccttgcgaggcccacactgcactgggggtcaggcttgtgctcccgggagtcctgtctgggctgcgtggccaccatccagagcctgctgacctgc

SEQ ID NO: 31296 - DNA, 263 bp, Homo sapiens; identical to SEQ ID NO: 25185
  chr16:81632835-81633098
  hypo

SEQ ID NO: 31297 - DNA, 108 bp, Homo sapiens; identical to SEQ ID NO: 13545
  chr16:81688971-81689079
  hypo

SEQ ID NO: 31298 - DNA, 385 bp, Homo sapiens; identical to SEQ ID NO: 13546
  chr16:81703552-81703937
  hypo

SEQ ID NO: 31299 - DNA, 377 bp, Homo sapiens
  chr16:84483346-84483723
  hypo
cgtgggtggcagctgcttttgtcatggttgatacgaccaagccattcagtagctccctgttcttgtcacatcacgcctctgctgacgaaatggctcacttaagagtggacacgttagtaagtaaacatcccacgtggcactggcctctaaatctgcacctggcacttgggccccacttgtgtgctgggcaccaggttaagtgcctgtgtgaggccacgccctgaatccccaccgggcagaggagccggcccaggtgacacagccctgcctagtgcagccagcgccttcgcccggatgtctgctgcggagcgtaatgacgcgttccagggacttgctccaggccttgcgggagagcgtaatgagaacgggtcagtggc

SEQ ID NO: 31300 - DNA, 250 bp, Homo sapiens; identical to SEQ ID NO: 27688
  chr16:85485696-85485946
  hypo

SEQ ID NO: 31301 - DNA, 588 bp, Homo sapiens
  chr16:85517169-85517757
  hypo
cgatgcccaggcccccggccactgtctccgccctcttggtaggccctgtgggatcaagtgtctccgaggcggcgggctgagacggatgggcctcctggccgcacacctgagaacatgctggcaaaagcgtttgcttaattaattgactttgagcgagggagcccgtccccgtgtaaacctagcagcaggctcggtgcttgccgccgggatgctgcgaatgcaaggctagactttaaataagggtgtgattattgtgtgaataattgaagaatgttggggagcttgcagtcctcggtgtaccgtcccctgccagcaggcctctgggccctgcccgtcacgggtacaactctgctgccatcctctcagctgggacagtgggggactttcagacctaagcgttggaggaaacctcctcagcgaccctccccgagaggtgcgtccctgttttccagatggggaaactgaggcagagctggggttaccccagaagaccctcagattcgcggtaggatgacgtcccacacttggtgactttatgtggctcccggaccagttatgccgtgcaggaatatgccccttcatagaacc

SEQ ID NO: 31302 - DNA, 122 bp, Homo sapiens
  chr16:85617682-85617804
  hypo
cgcatggggacggggacacaggctcgccagctgcacagcccgcagactggccttgggtctttgtgtgcgtgcgtgccggtgcgtgggcccctgtctgtttggagaccttcctccccctctgc

SEQ ID NO: 31303 - DNA, 143 bp, Homo sapiens; identical to SEQ ID NO: 13554
  chr16:85618063-85618206
  hypo

SEQ ID NO: 31304 - DNA, 337 bp, Homo sapiens; identical to SEQ ID NO: 23505
  chr16:85670994-85671331
  hypo

SEQ ID NO: 31305 - DNA, 992 bp, Homo sapiens; identical to SEQ ID NO: 24027
  chr16:85673482-85674474
  hypo

SEQ ID NO: 31306 - DNA, 910 bp, Homo sapiens; identical to SEQ ID NO: 22812
  chr16:85932121-85933031
  binary

SEQ ID NO: 31307 - DNA, 199 bp, Homo sapiens; identical to SEQ ID NO: 13559
  chr16:87776441-87776640
  hypo

SEQ ID NO: 31308 - DNA, 195 bp, Homo sapiens; identical to SEQ ID NO: 24031
  chr16:88476105-88476300
  hypo

SEQ ID NO: 31309 - DNA, 734 bp, Homo sapiens
  chr16:88504032-88504766
  hypo
cggggcgcacgggctgctggagcggccggagctgcagcacacgccgctgtatgcctgcgagctctgcgccacggttatgcgcatcatcaagaagtccttcgcctgcagctcctgcaactacaccttcgccaagaaggagcagttcgaccgccacatgaacaagcacctcaggggggggcggcagcccttcgcgttccgcggcgtgcggaggccgggagcgccgggacagaaggcccgggccctcgagggcacactgcccagcaaacggcgcagggtggccatgcccggcagtgcccctgggcccggcgaggacaggcctcctccccggggaagcagccccatcctgagtgagggctctctcccggccctgctccacctgtgttcggaggtggctcccagcaccaccaagggatggcccgagaccctagagaggcctgtagaccccgtgacccacccgatcagaggttgtgagctgccatccaaccaccaggagtgtcccccgccgtctctgtctcccttcccagctgccttggctgatggcagaggagactgcgcgctggacggagccctggagaggccagagaacgaggcttccccaggcagccccgggcctcttctccagcaagctctccctctgggggcatctctgccgcggccgggagccagaggccaagatgcggagggaaagagggctcctctcgtgttctcagggaaacgcagggccccgggtgccc

SEQ ID NO: 31310 - DNA, 443 bp, Homo sapiens; identical to SEQ ID NO: 24032
  chr16:88512432-88512875
  hypo

SEQ ID NO: 31311 - DNA, 1388 bp, Homo sapiens
  chr16:88792758-88794146
  hypo
cgcggcgctgcagcagcaggaagaagaagcagacgctgtcccagatgatgccagcctcctccacaggcagcaggcagtcctggtctctgtccatcatctccttggctgcaaggcaggcaccggcaagggtcaggcccagggcccaggagcagggggcttccccacgccctcccccgccaccgtcctggccactcacggtcatagtagcccttgacggtgcatacaaggctgaagagctggatgacccagcagaagccggtctgcatctgctccacgaagacgcaggccaggagctgggggagagcagggtcagcggggccagcggggccccagggcggtgggtgcgggggggccggaggctcaccgacagcatgttcttggagatgatgacggtgacgttgtacagaatgaggcagtcccacagcacgaggcgggcccgtgtgtccctctgcagcagggccgtgccgaagagcagcaggtagaagcaggccagcaggtagcccagcccgaagatgctgatgcgggtggcccccgtgacaaacaccaccaccagcaccagccagaacaggtatcggaagacggccaccttcagcatgtcaaggtaggacctgccaggccggagcgtcagggcgggcgccccggccacccctcccagaaggttccccgtggagggtgacgtggaacccacctgcagtggataaagttgggcacggggttgggctccccccgcagcggctccaggcggtcggtgttgacgccagccatgcgctgccactcctctgtgcgctcagctgagaacacctgccactgctgggaggcgcacagcagcaggagaaagtcgcctgcaggacacaggagccgccgctgtgccacacggggacccacacgaggtgggcacggcgcataaatcccacctcccaccccaggcctgtcggcgtgcagccgctgggagcggacacacgtctgcctgggtgagtggccgggtgtccctgggggagccccggtgtgagggcatctgcacaagggctgccgtgcacacaggctgaggtctgcgtgcgtgcgtgcgaggtcagggcctgcaggccgccatgtgcctgaccacacctccgcccgtgcacgcctgtgtgcacacttgtgagcagatttgggggcgtgaatgtactctgagggtcctctgcagaggcgggggtggtggggggcactcactgatgaggttggtggagttgggggcccggaagaaatcaggcaggtacagccacttgatgagtgcggagttcatggggacggcccggctccagcgccagggataatctgggggaaggggtgtcatgtcaggaagggccgggcctgcctggggcctgagacacccggtccccacccgttgaccc

SEQ ID NO: 31312 - DNA, 426 bp, Homo sapiens
  chr16:88797394-88797820
  hypo
cgcccctgagccggccacgtgcacaaatgtgactccccatctcagaccgcagggtgctgtgtgccttgagcagacctgcagcaccaggacagccacgcaaatccagtctcacggcgtcagcaacgctaccggcctccctccggaacttcccaagagacaggagaggcgggggcggcttagacccaagacaagagactagagcaaacatcagaccagatcccgtctgaaaaccaaatggccacaaagaagggtgctgaggccggggctgtttgaatgcagaggacacgtttgacgatggcactgccaggagacgggaccacgggtgtggggctgtgggctcagacaccctcacccaggagacgcatgctcgaggcagcacttgggtgtgaggcatcacggccgacccgcacggggcccggagaggac

SEQ ID NO: 31313 - DNA, 335 bp, Homo sapiens; identical to SEQ ID NO: 24039
  chr16:89072478-89072813
  hypo

SEQ ID NO: 31314 - DNA, 783 bp, Homo sapiens; identical to SEQ ID NO: 25205
  chr16:89220237-89221020
  hypo

SEQ ID NO: 31315 - DNA, 378 bp, Homo sapiens; identical to SEQ ID NO: 24040
  chr16:89254530-89254908
  hypo

SEQ ID NO: 31316 - DNA, 336 bp, Homo sapiens; identical to SEQ ID NO: 13567
  chr16:89260413-89260749
  hypo

SEQ ID NO: 31317 - DNA, 265 bp, Homo sapiens; identical to SEQ ID NO: 13568
  chr16:89357476-89357741
  hypo

SEQ ID NO: 31318 - DNA, 905 bp, Homo sapiens
  chr16:89763790-89764695
  hypo
cgctgtagccacaagcgccgctgggcgtcgccaagcagcacacgcagcgagtggcctggacggcaggcgggcagggctgcacagtgggcagcatgcagctggcgacaggtgtcgcagcagagggtgggcagggcgccaggggacaggcagctgtgtgcctggtagcctgggggctccgagacagacctataggctgaggctggtaccccctctgcccgaatacgcctcgggctggccgctgcagagctttcaggggtggccaggtccccaggcctactcagctcacggcgcagagagaggaaggagaaggcggaaggttcaggttccagcccctcctccaaggccccatatggtgggctgctggcctgcggcagctcctcagctgggggctcccaggcccggcccccagtgccccacagtttggcactctgctcccagagtggtggcctgtaggccagctccgccgggggcgagtcagggcctggtgacggctccccatacaggctggcgtcctccgacccctcgtcttcctgcaagtcccggtataagtccagtggggccctgtaagcagcaggggagcctcgggggggcaggggtggcggctcctcatcctgggccagccgctgctgcagccaggccacacaggaggccacgtccccgctggcacgccgtgcctgcagcagctcctcagctggcagcacactggtgcccagctgggccagcacctcacccaggatctcacactccagccggagggcgaagcagcccagggccacctgcaccagctggcaggcggggggcagggcggtcaccatgagccgatggctgtctctgcgtacgtagcccatcttctggaagctcttcaggaggaggtcgtctgagagcacacccttcagcacgtgcac

SEQ ID NO: 31319 - DNA, 426 bp, Homo sapiens; identical to SEQ ID NO: 25208
  chr16:89883921-89884347
  hypo

SEQ ID NO: 31320 - DNA, 1553 bp, Homo sapiens
  chr16:89971731-89973284
  hypo
cgggtgcctcgggctggagtggtgccttcgggtcttgcagtgtttccacatgagctgtgagatgatgacgagtctctcacagcagcatcttgggagtaaagaaatctggcagagacgagaaagagtctcctgtcctgtgtgtgaacacttcggaggctcatgccctaatatgctgcaactgacaggcatccccttgctgttcttgtctcgtttgtctgcgcccttggccctgtgctagttctgtgcatcagcaccgtggctctgtgcagtggtgtggccaggctcaggaccgcctgggagtggtgcccatttgcatctccacagtgaagtctgtgtgccgcggacatgaggtgtgcccgggggtgcccaagaggcgctggtgcccccagccgctggcagtcatgggcccgtccgcgtgtctgctgtccccactggactggacattctcatggacaggagcattttgttccctgtactgctctccaagagcgatttccagcagggaccagtgcctgtgcctgtagccgtagcagtgacgatggtgacacacccaggtgtcccttcatggagatgaactcagtgacttcccacaagaagccactggctacggctctcatcgttcttgttctttggatgaagaggctgagtcactggccatgtggctgggattggtccccagaggctccccagccgcaggccagggaccagccatggtgcctctgctcgagagtaaagtgtacagtttttgcagccaccagagatgcagcgagatgcctcgtgctgggtgggggtgggggccgaggctccatggcggttaccatttcatttgctgtgctttatctgctgtgccttgtttctccccggccctaggcggaaggtgctctaccagcgtgcacccaggaatatccaccgccatgtgatcctctctgagatcaaggaagccgtcgctgccctgcccccggtaagggagaaaggctgaaatgggagctctgtgtaagccggtcacatgcacgtcccttctgctccgggcggtccacatgcaggcgtgcgtggtgcgggctccctcagcagcccagccccgccacggcaggggcagggtctagtgcagagggctcctcctttcctggcagcccgggttcggatgcttgttgttttgagagagaaatcctttggggctcagagcacaagctgagtcgtcaccgtggtgagctgctccatccgtggtcttgtgagcgcgtggtgcggctgctgggggattctctgtagtcgtggggtgtagtcctgctctgacgcctcctgtgctggaggtgccgtttctgtctcaaaacctaaggagtttgtactgttgttaagggataagatagaacgagtgagaaaaccagcaagtcagagggtcgcaggaccgtggaccgtccactggggacagcttagtgcctcctggtttaacttcagctgctctgcgggcccttatgaccggcatggctggctttgtctggggctgtgagcttctgactctcctcagtagagtggcagcacgtggcactgtgcaaccc

SEQ ID NO: 31321 - DNA, 259 bp, Homo sapiens
  chr16:89992765-89993024
  hyper
cgggcgggaaccgcattcgggtcctggaggggcttggaggccccagtctcgcagccccttcatcggggacccccgctcccacctgccttggccactgccctcaaagcccggccccgctttccccaggaccccaagcgctgcgcgaggtcagcaccaaggacagcgcccgggccgagcgcctggcctcgaacgccgggttctgctttgtgtttccaggtttttgtttttggttatgagaggaggcctggctctgtcgccc

SEQ ID NO: 31322 - DNA, 198 bp, Homo sapiens
  chr16:943474-943672
  hypo
cggagggagcacccagtgcacacgcgtctcagccccgccccctgcggcacaaagggagccgaggcgcaggccccgtgtgtctcccacacactgcagctcgcctgctgtgaggactcctggggcacgggacaggcttccaggggcctgcagagggagccgccagcactggggaaggtgggacttgggcagagaggctgc

SEQ ID NO: 31323 - DNA, 906 bp, Homo sapiens
  chr16:981471-982377
  hypo
cgcacacgcggctcggatgagctgaggaacgcacgcacaaactgcattctcccaggccgtcccgaacgaggccacaggaaaggagcctccccagaggtctcagatcaggaagcctgaccttccagtgcctttggtctaggtgttctgaggcccagcacccggagtcatacctcagtaactggcagctctatgttctccaagatcagggaagggaagacagttcaaagacgcatggctgctcggaaggcagggagagcactgccgaagctactacgagtcttctgaatttctgcgcgacagtccaaagtgacgtgctgagccgctgcagggtcagacacaacatgaaactcaggctcacgagggctctcaggcggaaaacattaacattaatgagtcaacaattcgcttctgagtccctacaattaccacctgctaccgaagaatcagttagaatgtatgacgctcacctgaaaacacccagggagacacaaacgcagaagactgacttccctgggctgggagcgcaagcgcagcccccgacggcggccacacaggctcacgtcccaccccccatgcagaccccgttgcttttgcttcagcaagtggttggggacgcgggaggctggctccagagtcacccggctcctcgactgcctctgccgctccagcactgcctctgggagtccactgccccaggcacttcccccccaccctacttagagtagagcctgtgttccccaggaggcctcacaggcgggggcacggggagggtgggctccaggccctctcatcctcagcgatgggtcctgtggccctggtgctgagacacggcagcaccgtggcctcgcaggcccatctctcacagggaacacacaagcctcagccgctgccccccgagcctgcccc

SEQ ID NO: 31324 - DNA, 405 bp, Homo sapiens; identical to SEQ ID NO: 24045
  chr17:16282222-16282627
  hypo

SEQ ID NO: 31325 - DNA, 209 bp, Homo sapiens; identical to SEQ ID NO: 6999
  chr17:16923475-16923684
  hypo

SEQ ID NO: 31326 - DNA, 203 bp, Homo sapiens; identical to SEQ ID NO: 13580
  chr17:17031200-17031403
  hypo

SEQ ID NO: 31327 - DNA, 183 bp, Homo sapiens
  chr17:18163157-18163340
  hypo
cgtgtagctcgcagcatacagcaggcgctcagtgagtggcaggttattattccgttttgttttgttttgtgcgccaggttattattcccacttagtgtcagcacccctgtgctcgtacccccctacaaagggaggctccagaagagaagcatccgtcttggtccttgctgttcaagggggctc

SEQ ID NO: 31328 - DNA, 101 bp, Homo sapiens; identical to SEQ ID NO: 25215
  chr17:2207862-2207963
  hypo

SEQ ID NO: 31329 - DNA, 366 bp, Homo sapiens; identical to SEQ ID NO: 13581
  chr17:2291792-2292158
  hypo

SEQ ID NO: 31330 - DNA, 647 bp, Homo sapiens
  chr17:26578288-26578935
  hyper
cggcacctgcagcccctcgcccagggcgccctccggcggcagcagcacccacacgaggccggccacgaccagagcgcatgagcagcgcagagcccgcgtctggagggggcagggcggacagagccgcgggcggtcacgtgaccccacggctggggtcggcgcgatccctgacggtagcttgcgggtgttccgcgccgtgggcagcctggcgtgcaggggcgctcagccgagggacgtggctatttctgggacacacaccagtgcacggacgccctaagggacatcctggtgcccaggggaatggtgcacacctggacatgcccggtgatgcacgcagaaagcatcgaggtaaaaatgaacggggagacacctctaaggtgtacgcacgaggacggcataaaaccattggtcagctccctaatctcaccgacctctctcccgcaaattccttatcgccctcctttctccctgcccttccctcaaagtgtcagtcaggttgtcctcagcccagaagactcttcctccagacatcctcatggccggctctgtcgccccctggaggcattagctcaaaatccaccttttaaatgggtcttatcctgacacccctgtttaaaattgcaacccggcagcgtgcggtagatgac

SEQ ID NO: 31331 - DNA, 897 bp, Homo sapiens; identical to SEQ ID NO: 25217
  chr17:27038294-27039191
  hyper

SEQ ID NO: 31332 - DNA, 292 bp, Homo sapiens
  chr17:27419265-27419557
  hypo
cgtggagggacctgtctagggtgaagggagccacagaggcagctctattctgcctcagccccccgagctctgccccgggcaccttggcccctcaccgctgtcttggctttggcgatgtcatcaatctgcaggtgcaggtcttcgatctccacctccattgctttccgtgctttcacggctgccgcacaggtgaactctgactcctccagctggacacagaccacccccgccccagggagagatgtcagccattccttgggggcaggagggctgtacaggaaagagggagctc

SEQ ID NO: 31333 - DNA, 807 bp, Homo sapiens; identical to SEQ ID NO: 24058
  chr17:27940157-27940964
  hyper

SEQ ID NO: 31334 - DNA, 847 bp, Homo sapiens; identical to SEQ ID NO: 25220
  chr17:27949429-27950276
  hyper

SEQ ID NO: 31335 - DNA, 991 bp, Homo sapiens
  chr17:35299657-35300648
  hyper
cggaggtgggtgcgcgccgaatggcggggcacggccaggtcggggcgggcttcgttggaagcgggtggcagcgcgggggggcacgcctcgctctctgtaagccactggagagttggggcgagtagggagaaggctgggagtaaatcaaggggaggcggcgagaccgaggacccaattcacggccctgaataacgggggtagctggtaaggggcagctcccgggcttgcgcccagcctcctccctgcacccaggcccgcgagggctccccgcgatccgcgagttccccgcgtggccttcctcagcccgccgaggtcgcgtcttccctccctttcggtcccgccggcccccggccgggccctgacgtcctgcgccctccccgccgctccgcagattaccagagcgagtactacgggcccgggggcaactacgacttcttcccgcaaggccccccgtcctcgcaggcccagacaccagtggacctacccttcgtgccgtcatctgggccgtccgggacgcccctgggtggcctggagcacccgctgccgggccaccacccgtcgagcgaggcgcagcggtttaccgacatcctggcgcacccacccggggactcgcccagccccgagcccagcctgcccgggcctctgcactccatgtcggccgaggtcttcggacccagcccgcccttctcgtcgctgtcggtcaacggtggggcgagctacggaaaccacctgtcccacccccccgaaatgaacgaggcggccgtgtggtagcggggtctcgcacggtctgcggagttcgtggttgtacagaaatgaacctttatttaagaaaaatagaaaaaaaaaaaaacataaaaagcaagtccccacccccttcctccagcctcgagaaccattctccttctggggagaccggatggaaaagggggacacgaaataggatccaaatcggcctcgaggtgggactgggatccgcgcactggctgtcgac

SEQ ID NO: 31336 - DNA, 563 bp, Homo sapiens
  chr17:35303090-35303653
  hyper
cggcttgtttttacctttttagcatttatacacattaaatcctagctaacttattcattatagcctctactccctagccccctttaaagacattcatttaaatgaactgcgctcactgggaagctgcattttcctatcaaggctgctgaattatttagcagctttattgtggaatcggggtatttgataagaagcgttttcgagttgggcacacgatgtggattcgattcttctaacaacgtggttgtggcgcagtctctcccctcgtcgcgggattcagaatcctggcgaaaacccgaacaggtggcaacgctcagcagtcaaatttggagccgaaggccccaaggaggaggcctggaaatgtcagggcctgttctccttcccatcagtgctgtgccgcccacctctggccccgaggtgcggggacgtgcggcaccatacctaggcggagctcccgcaggaggcgcagcaggagggaagcgccactgcagtcccctctcgcctgggagggcagcctggtttctccctgtggccatcttaaagccaccacctctgtgcctctc

SEQ ID NO: 31337 - DNA, 987 bp, Homo sapiens; identical to SEQ ID NO: 25226
  chr17:36102841-36103828
  binary

SEQ ID NO: 31338 - DNA, 876 bp, Homo sapiens
  chr17:36104854-36105730
  hyper
cgacgtgagcttggacaccattttccaaggacggaaaaagaagggggtgagggggtgggtgggtgcgagagaggagggtggaggggagtttcacaagcaaaccccaaatccaggaacccctccacccttcagcctccagacacctgttactccccggggtcccggaggctcctccgaaaggagtcagaaaacttctaacttgccatgatcgccaccattaggccatataagatatgcaaattagtgggaagggcccagctttcggctggatgcaaatgatggtggggagggggaaacccggagagagggagagccggaggggcagacctggagagcagaagacctgggccgggagcggggctttgccagggtccattgtactcacgctggggggctagagaccttcttttactggttctgcttatcagccaaacttcacctaacctttggacttgttaagccagtgccttgcagcctaggcgcggggcttttccaccggttctcagttccgctttagtccagagagaagacactacgcttcggggttcaggtgagagccagaggaagctggggtgctcgtggaagaaggggacgcaggaggaagcgaagagtagagaccctggatgcgtcccggccgacgcaggtggtgggccaggagagcccgcagggcggaagagaaactgaccacttaggaaggggcgccgaggccacgggggaggtgaggcagcgttaggtgtggtgagcatgccctggagggactccatttatttctacctcggttactacctccaggccccagaacctccctggcctggtctggcggtttgggtttgcagaactgcccgccagagagcgtaggcgagggtgaaggagtcc

SEQ ID NO: 31339 - DNA, 727 bp, Homo sapiens; identical to SEQ ID NO: 23104
  chr17:37321167-37321894
  hyper

SEQ ID NO: 31340 - DNA, 797 bp, Homo sapiens; identical to SEQ ID NO: 25231
  chr17:37760007-37760804
  hyper

SEQ ID NO: 31341 - DNA, 444 bp, Homo sapiens; identical to SEQ ID NO: 23516
  chr17:38179119-38179563
  hypo

SEQ ID NO: 31342 - DNA, 442 bp, Homo sapiens; identical to SEQ ID NO: 25235
  chr17:40332770-40333212
  binary

SEQ ID NO: 31343 - DNA, 135 bp, Homo sapiens
  chr17:42331622-42331757
  hypo
cgtgagccaccgcgcccggccacgttttttttttcttaaaaagagctctccaaattatacaacttctggtcccacaaaacctggaactgcccctggcttttcactattcctgctagtcgggagggccacacaccc

SEQ ID NO: 31344 - DNA, 522 bp, Homo sapiens; identical to SEQ ID NO: 27715
  chr17:43047449-43047971
  hyper

SEQ ID NO: 31345 - DNA, 254 bp, Homo sapiens
  chr17:46507491-46507745
  hyper
cgggagagaggcgggacggggcgcgggccctggtcgggaggcggacgggctggaaggcgacccggctgcaccgcgaggcacctgtacctcagccgcggtcgccgcccgcccagcccggccgcggggcggggccgtgggtccccgggcgcgtcaggaagtggcgcgggcggcaggcggggaccggaacggggcgcggggcgtgggtgcacgtggcgctcacgccggagccccacggtagaaggattgggggtgcc

SEQ ID NO: 31346 - DNA, 1855 bp, Homo sapiens; identical to SEQ ID NO: 27717
  chr17:46620299-46622154
  hyper

SEQ ID NO: 31347 - DNA, 1577 bp, Homo sapiens; identical to SEQ ID NO: 28697
  chr17:46654966-46656543
  hyper

SEQ ID NO: 31348 - DNA, 802 bp, Homo sapiens; identical to SEQ ID NO: 25245
  chr17:46659093-46659895
  binary

SEQ ID NO: 31349 - DNA, 564 bp, Homo sapiens
  chr17:46663379-46663943
  hyper
cgaccaaaaccagccgctgtgctccgaagccgcaaggctcagcccggatccactaggggagaggcagtccagagggcggcctcgcagactgggaactgtttccggggaggagaagctagaggatactgcagagagtgcatttttctctccaagaggaactttagggggagaagagacaagagaggagacgcctaaatcactgagaaaaggaataagaagagagggaagagaaacgttaaaacttggggacaaggtgctttttgggatccgacaggttcccgaattgcccgaagtccaatactctccaggctcccaaatttcccctcttcctcttggagcctgcaatcagtaaattcgccaaaagaaagaacgaaagatccgcctaaacctgccggcgtgcccccacccccggtctacagaggcggaggtggctgcggcggtgtggccggcggcgcgtaatgtatgctgcagcggctcggagccccacgtaggccggcgctgctgcccccgtctgctgacctctgcatgatcccggactctatgaattattgatgagatatgagc

SEQ ID NO: 31350 - DNA, 909 bp, Homo sapiens
  chr17:46674937-46675846
  hyper
cgagagacccccggccggcgcccaatcttcttctatctcctaactgagatgcccacccagcaccctgtgggagattggggcagggggcgctcactagttctgtgtcccggggtgggcgcccaggggagccggggcgacggcgacgggaagtctcactcactgttgcacgaattcatccgctgcatccacgggtagaccggagtggagcacttctgctcttctgtctcgccgaacacgctcttgtcctgcgcgcagtccgacttccgcggctcggggtggaacgggggctgctcgtcggcgccggagagtgcgcaggccgactctttctcgcggtagaaggccggcgccggcccgtagtcgcagggcgccgctcggccgtagccaccgcccgccggcgggtaataggaggaagtggcaaagcccttgtcctggcccggccctggcccgtagggcgcggggtaatgtctcagcgggtccgcatagcccgacgaatagagcggtagctggcccaggaaggactcctgcccgctggccagagtgacggggaaggtggagttcacgaaataggaactcattgggaggggaggcgcgcgcggccgctgctgctccgccgggtttatgatttgttgtgttttatagtccgagcgccgcgcctattagtagtatatccgagattgggttttagctgaggggggatggcgaggtgccagtgagggccagaaggaaatacaaccatctgatccaacactgaccaatggcagaggcaggaattgtcaaatagcacccaggaggagcgcagcccgcacgagggacccgcgcacaaacctatcaacctttttttttttcctccttctccttcgcctttctcctctctccccccaacaacacaacgcgtcctgttccacctac

SEQ ID NO: 31351 - DNA, 1292 bp, Homo sapiens
  chr17:46687527-46688819
  binary
cggccttcctccgcaagacaaacggcctcgtctccagcccgtgccggcgctgctgataaatatttaaagctaaaaggccgagaggaagggtgggggcgggctgggggctcgcagcgccgtggtgccggcgaagagagatccgccgggaagcagagcgagcctgagagcaccgagcaaatatgggggcggggatggcctgctgggtcgcggcccagtgggtgcagccttccagggccgacctccggctgggagcactctggacgcggaaaggggcgcccagccgggaaggaggcgccttcagggtaatgtgccccggcccctggggctcaggacagctcggtgcgcggcgttacctgagcttcgcatccaggggtagatccggaagttactctcggccgccaagtccgagtccctctgctccttggcgcccgccgccttggcggagtcgccgggacacaccccggagaggttctgctcaaagggcgcgcagtgcatgttgaaggaactcggctcgagcccatagccggccgcgtagacgccggccgcgctctggcccgccatgccccccccgccggggtacaagccctgcatcgaggcggcgaaggaagcgcccgaacccgctccatagcccgggcgctgggggttggaagcaaacgcacaagaagtttgttctgggaaggctccggtagcgaaaaccgaacttgaggctggatatttagaaaataaagtattcgcataatacaatgaactcataatttggccggatgatttgtaggcagggacgttttagtgtcggttttacgagattccttgatatattacagaattagagtccagatttacaccaaaaaggaccccctttttcctctccggaccacgtgaccccgcccacgtgacgtcccctccgccaatggccgggccgtctccccacggctcccggtaatgtggaaaaaattgtgtggcgttggatttataaaatatgatcaataatgaatgggaaagccgagccctgtggattggggctgggggctcaagggccgctgccgactcccgcgggctggaggccgcttgcaggcgagatttggggaggaagagattgagtggaagggaaaataaataacctcggggcgatccgtgtcaccctccacccatcctcttcagcccgttaccgagcgagagacaaacgcagggattgaatgcacgcaactgggtgggtgggtgcttggggcaggtctgttctttattaaaccaggccaattctgcacggcaaggccttttggggaagttggtcc

SEQ ID NO: 31352 - DNA, 1053 bp, Homo sapiens; identical to SEQ ID NO: 28700
  chr17:46690001-46691054
  binary

SEQ ID NO: 31353 - DNA, 1374 bp, Homo sapiens; identical to SEQ ID NO: 28701
  chr17:46691218-46692592
  binary

SEQ ID NO: 31354 - DNA, 555 bp, Homo sapiens; identical to SEQ ID NO: 24068
  chr17:46710955-46711510
  hyper

SEQ ID NO: 31355 - DNA, 639 bp, Homo sapiens; identical to SEQ ID NO: 25246
  chr17:46723731-46724370
  binary

SEQ ID NO: 31356 - DNA, 1190 bp, Homo sapiens; identical to SEQ ID NO: 24069
  chr17:46795376-46796566
  hyper

SEQ ID NO: 31357 - DNA, 805 bp, Homo sapiens
  chr17:46796910-46797715
  hyper
cggcctcgttacgaccgactcgaacattctctaataaatcatcggccttagctagtattcgtttgtgtacgcatctgtttatcctgattattaaaataaattaaggattagactgcctagaataaggtaaacgaacatgaaatgccaaggaggaaaacagaaaaagttacaccatgtcgatcccgaccaaaacattggcctgacttgccggatggcctcaagaatccggcttttagctgcaggcccggcgggtgttccccggaaggcaaggattggaagctctttgataaagccgcgcgaggcccggtttctcgcgtttcgggtcgctccacagccccctccgcccttcccctccacccctccgcgtctcggcctggctccggaggggtgaaggaatgtttatagcctgactcaagttcaatgacaaaaacctgcctggaatgggaggtgcggcgagcttcagccatcaacatgacaaaggctggacgcaggtctcgggcgggggcgacgggctgggcccacctagagatggggagctgagggcccacaggatgggtacggaccccgcagaccaagagctgcctctctgccctcagcctggggtctgcggagtttggcgagtagtgcgggtgtgtgcccgcctggatgagggtaaggcgatcagcctctgagtgggcaaggggacgtctgattactgcccaggcttcgcctgggggtccaggaccctgtgagatgcccctgctctctgcctggccagctctagctcacccggagtaaggatccgcaccgtccttctatccaccgc

SEQ ID NO: 31358 - DNA, 735 bp, Homo sapiens
  chr17:46799303-46800038
  hyper
cgttatcaatattaattttgcttatgccaggactccatcccattggagacaaacattaagtcttatggcagaccttacagcgggtgctagttcccactcccaagcctctcccccgcctaggtcctgcaggtcccgcgtgctgcgaaacattttctttgtccctttctgcccagggcggctgccggtctctccaggaaccgcgagtaggtgctcccgccaggtggtatcggtgaaagcctgctgctcacccttcccttgtttcccaaaacttctgaaggctcccaaattcctgggagaccctctcccagggcctcctgatgcagctaccatactgagcgatccgtcgataacgcccttggcccaccgatcagtttaccttattagagagaaaagcactcttggaggtagtaagatgggccggtccttgatctgagaaatgggcgcacaacatcgctgttctctctgcaaaggtggggaccagaatccagcttgcctgaccttgcaagcaagcatcggcctaaaggtttcagcctcccagtggcgctctgtttgcacgccttaggctaggagaggaaggacgggagcacagcactgggtgcccctctccctgtagagtctggggcggggctcagtaagaaggcctgcggttggtggctccccacctcatagctgcaagtaggggcgaaagctggagtgtctcctcccagcagcctcctcgcctccccgcaaacctcc

SEQ ID NO: 31359 - DNA, 1140 bp, Homo sapiens; identical to SEQ ID NO: 28703
  chr17:46800174-46801314
  hyper

SEQ ID NO: 31360 - DNA, 951 bp, Homo sapiens; identical to SEQ ID NO: 24070
  chr17:46802321-46803272
  hyper

SEQ ID NO: 31361 - DNA, 292 bp, Homo sapiens; identical to SEQ ID NO: 28705
  chr17:46804122-46804414
  hyper

SEQ ID NO: 31362 - DNA, 943 bp, Homo sapiens
  chr17:46824739-46825682
  hyper
cgtgggttggagtctgtctcaggtcgctccagggacatcaagagcccgcgccgccgagagcccgcgccgccgtccagcgggaagcagcggacccacaggggcctccagccgcctccccgctcccgccccgtgtttctcctgggcctccagctccgtggagagagctgagagttctcggcccgcgggcttcctcaccaaatccccaaaaaccgacgcaggcacagagggctgactgtgttttgagtaatgcacgcgaggcagtccaatccggcgagatggcccgaagcggggcccagcggtcgggggtgtgggtctggagagagagggtctccccacttccttcctccggctgctcggtcacccatcgactacccgggcggaagcggggcgcagaggggcgcagagggaggcattgccctccaggagtatctattcccatcggggtatggtgaatgccatctaggcccatgctccattcccagggccccctcggttcctccaaaggcgtccacccagaagcagccccagtgtcgcgcattgactcccgccggccaagtcgccgccgaaacaggatctcctaaagcgggctccaccgggtcccagggcgaaaaggtccgaagatctacgctgtcggaaagacctggagaactcgggaagcccagcaacaacaaacaggtttcaacttggaaacaaaccattaaagtttggcttagtttttggtgtgaatggtgcaaataatttctcctcttcactcttcagtcgatctcagctgtatagagctgctctgcaagctaaaaagaaattagtatctattccccccgccaacaatttttttttaacccgggctaccagcttaagcaactggtatcattcttgttgaattaagctctgaaagctcgcctcagaaaaaaagtttttattttaaaaaacgaattattaagtc

SEQ ID NO: 31363 - DNA, 872 bp, Homo sapiens
  chr17:46829437-46830309
  hyper
cgcacctccaggcgaccctgcagactggggtcgggaaaaggacaggctgagaagtctagaaaggcaaagaagttaacgatgtttggcagtctgaggtcttatcagtgtgttggggtcaggtgggggccgaggcaacaagctcaggcagacgccagccggggctgggacggtgcaggtgaggaggggctgcctgggggacagcccgcctcactgacccaacctgggacaaggtagtggctgggttaggggctggggtgtgtcttggagcccccaggtgacaggagagggaggaagggagtgactggtgaaacattaaccccctcagggttctgaagggaaggggaacatccttagaggacacagggagaagacaaacgtcccttcatcctgagattcacttggaaatcccctgaacttccaactcctggctgatgaaacggagcaagttgtctctgccttatggcctccatcaccaagcctgaaggagagtctctcagcccggtttgggagtaaacccaaaaccgttcattcgtcagggaatgccccaggttggttcacgcgagttttaaaatgaatcggaggtgaaatggagctcattaccctctcttcagcccgaccctcaatctttggcagcgaggggcagttatgggacggggggcgggtgggaagagcgcccagggccccctccgggttctcccacggtttcccgcatctgggcctggccagcgcctttgggaggaagggcctaggcgcggtagggatgcctgggagtctagggagtggcgggggtgtttcttggcccggcagggtggggtttccaagcgtgatctcctcgccctggcagagccggggtgccgggtgggggcaggctc

SEQ ID NO: 31364 - DNA, 735 bp, Homo sapiens; identical to SEQ ID NO: 24072
  chr17:47075546-47076281
  hyper

SEQ ID NO: 31365 - DNA, 576 bp, Homo sapiens; identical to SEQ ID NO: 27721
  chr17:47987524-47988100
  hyper

SEQ ID NO: 31366 - DNA, 104 bp, Homo sapiens; identical to SEQ ID NO: 24074
  chr17:49229457-49229561
  hypo

SEQ ID NO: 31367 - DNA, 560 bp, Homo sapiens; identical to SEQ ID NO: 28714
  chr17:53341227-53341787
  hyper

SEQ ID NO: 31368 - DNA, 446 bp, Homo sapiens; identical to SEQ ID NO: 13601
  chr17:55644506-55644952
  hypo

SEQ ID NO: 31369 - DNA, 421 bp, Homo sapiens
  chr17:58228061-58228482
  hyper
cggacccgcctcaacgcacgccttcttttctcacccagcctcctccgtctgcccgtgggtttccgtccgtcccgctgggactcagcgctgggtgactgccccgcggccagagcaagggcggtctggcagggtcctggaagccgcgcttcccacacgggttccttgcccctgagggtcgcaagctcccctggcctccctaacctccagcgctgaattgggagcctggcgggggcggggggtgggggacccggagccccaaggcctctgcggagccggtctttccggacagggtgattttcgtttaaagattaatggtgaagccgagctcttaattattcctctaggtgggaggtggcaggaaaggcatgttaatatttgataagaagctaaaggcgcttcaagcggctgggcacagggatcc

SEQ ID NO: 31370 - DNA, 713 bp, Homo sapiens; identical to SEQ ID NO: 25258
  chr17:58498618-58499331
  hyper

SEQ ID NO: 31371 - DNA, 971 bp, Homo sapiens
  chr17:59477745-59478716
  binary
cggccgaggcggggctgcacgtctcggcactgggcccgcacccgcccgccgcgcatctgcgctccctcaagagcctggagcccgaggacgaggtggaggacgaccccaaggtgacgctggaggccaaggagctgtgggaccagttccacaagctaggcacggagatggtcatcaccaagtccgggaggtagggctgccggccggctggaaggcgcgcgggcgggcgggcgggctggggcacgggactgcacggatcagagcagagctggggactcccggctcccggctcccggctccaggttctggccctgacgccacgcttcgctcccacggacaaccaagttgacttttctcgtttggcaccggagcgatttttttttaaaacaaaaacgctaaaatcctccgaatgaaataaaacgaaaacatactgctaaagaatagccccaaccgttctgagtcccagcgcagaggaggccccgcggcttggccctggcggtctcctccgccccgcgctctcgctcttctgcgtccgggtccgtctccgagctcgggggaaattcagcctctctcagactctgctccgaccccgaagcccctagtgggacctgggcccagctaaccccacgctggttgctcggttcctggcagcgagccccgggtcagccgagccctccgcctcaccgggctgggagccctttctccaccgcgggcatccgagccctggacgcatccgccgccccaggccttaaagcctgaagaaagccacagccccggcccctccacccttcgactcagccaccgagaatccaggcctcgggttcaccctcttcccccgaactgcacggccaggatgtcttatcaggctctgtagcccagttcccaatacaaacaccctccagatttatttctgggagcttccgtcccaagtgggtatttcccctgaacgaatttcggggagattaaggagaagc

SEQ ID NO: 31372 - DNA, 972 bp, Homo sapiens
  chr17:59529366-59530338
  hyper
cggcagggggtggccagacccggtcgtggagcgtcctagtcttcgggcacggcggggccaggcgagccctcctggttgtcgagcctcggctgagagccgggctgctcgcccttgcttcccgcctctctaatctaaaccatgcggggctcccagcccctacccggctcgcggggcccgagggccaagaggagggcactgggccgcgcggtggaggagccggcggctcgcgtggggctcgggatcttggggaccgcgacgccggggaaccctggagcccccctccccgggggacagcgggcgcagactgattgacagcggcgacgtcagcgcggagggggggcggccccagagggagggagggaggaggagggaattgaggccccaaagtgcagccttggagatcaagggcccgctccagagccgggatgtgtccagccccgagggcacggcaggcagctggaccctgacccagcggcgcggagtcggagccccggccgtcccgcgctcctcggacccgaacctgcaggggacctcgggccgctggcgcctccgcatgcggcaccgcaattagggtgagtgtgggttccagccgagtggggacgagctgggcgtgcggggctggggccacaggggctcagggttaggctgcggggacggacaggaggatgagctggaaaggggtgagtcacgcgacccggggaagaacttcaggggcggtcaaagttgcaggaaggcggcgcgaagtgccttgggtcgggccgccgcctcggcccgacacccagtagttggggcacgagccctcctctctgagtaacgcgatgaattgggtctagagatccaagagcatagaaatatcgacagcgccagcaccctaagaacaaggccgtgacaggcggagcggtggcctggaaattggtgtttgcagaatatgcaaggccaaggaagagggccccggtactggagcgaaaatcc

SEQ ID NO: 31373 - DNA, 910 bp, Homo sapiens; identical to SEQ ID NO: 25260
  chr17:59531682-59532592
  hyper

SEQ ID NO: 31374 - DNA, 1384 bp, Homo sapiens
  chr17:59533751-59535135
  hyper
cgccccgcacgaagtcccggaatcggctggagagggccaggggtcctctggcgagtgtggacctgggcgagtgactcgttgtgtgctgtgcccgcaggagatgctgcaggataagggcctgtccgagagcgaggaggccttccgggccccgggcccagcgctcggagaggccagcgcagccaacgcccccgagcccgcgctggcagcgccgggcctcagcggagccgcgctaggcagccccccgggacccggggccgacgtcgtcgccgccgccgccgcggagcaggtagggctgcgccagccgtcgggtagaagtcgggcgtcggtctgtctgcggggccgcctgtgtccgtctttccgtccgattgtcggcaggactcgctttcaggaggacctggctgcattcaggacggtctgcccgttcgttctccactggacatggctcgctttctctgccttttgggtccttctccactttgagccctcggggctactctgggacaagcaagagctagagctagagatagaggagagggcggtaagagagagggagacccccgtagcatctgagcgagcctggaccaagtgtccagctccaacaacccgtagagggcctgggacccaacggcgagggggcaggaggaggccaccccgccggtgcgcacgggagccgctgcggggatccgaggcctctgggacgtcgccgagggcttcacagtgataatcggacgatcacagcgcacgggatgccgcctggggatctgtgtgcactatctgcaggcgcgcgcctggccgagggtgcgtgcgcctctccctgtctgtgtctgccccgggagcctgtggcgatggcccgccacagaaatgttcatgagtgagcaggagtgtcgtctaacctgcgctggccactatgtgtgtcctctgagggttcctccgtaggtgcagctttaaaggaggaagttttagccaccgattaattcttttatattcacgaatagttcaaaatcgttctgtgaaacgaaatctggagccatgggctccgggcgggcagggttccgcacagctcttcgggtctggttcttctttcctcaggctccgcgtggagccctgggcctggcagacacaagtttctctccctcccatccccagaccatcgagaacatcaaggtggggctgcatgagaaggagctctggaagaagttccacgaggcgggcaccgagatgatcatcactaaggctggcaggtcagcgctgggagatttacttccggggatggcggtggggagcaaggggggccagggaggtcccttagaagtcctctcggccccggcctggtggcctgtgggaggcctctctgcctcctcgggcgtcagtgccacctcccttc

SEQ ID NO: 31375 - DNA, 761 bp, Homo sapiens; identical to SEQ ID NO: 23107
  chr17:59539230-59539991
  hyper

SEQ ID NO: 31376 - DNA, 738 bp, Homo sapiens; identical to SEQ ID NO: 24077
  chr17:61777761-61778499
  binary

SEQ ID NO: 31377 - DNA, 450 bp, Homo sapiens
  chr17:64751169-64751619
  hypo
cgctccacagtcaccttcccgatttctgccaggatcagctagccttaccgaagagctaaaaagagattcatcccaaacaagagcttccttggaagcattccatgaagacttgaaacggtgctgcctcccaccacctgacccagtattgtcagtgcctcctctgaggatcgcagaaaatcgcaccccacgcccccccagtgcacattccagacttggagaagcgcggcatggggtggcggtggggagaacacctttctgccagatcaaaagcccagcactttattcagagttttatttatggctccttcagaaggttagtccagtcacgcctccttaataaccgcctcatcacacatgattcaggtgtcctggggccacttcacgctcctggcttcctggcccaaagcccaggagaccgctgaaccccactgcctggcattatttgcgggc

SEQ ID NO: 31378 - DNA, 319 bp, Homo sapiens
  chr17:66420425-66420744
  hypo
cgctgcgaccgacccgcagagccgatgtgggaaatcacaaaacaacagccccagccctgcatgcagggccccaccgcagctttgttttctaagccaaatgtgctcactagagggttccacggatctgcgggagaaagaagccagacctgcactccatccttttacaattggaagctcaatggacacaaaacaatgatcaggagaagtttccataacaaagcctaatggacattgtttcagtgcccaagtggcagctcctctctggctctaggagctgatgctccaagtcttggcccaaacactacttccggccgggtgc

SEQ ID NO: 31379 - DNA, 110 bp, Homo sapiens
  chr17:66434339-66434449
  binary
cgggaggaagtggctgagccccggaacctttaactgcacgttctggcagccctgccacccctttggcgatacaaggtcattcctggccccagccttagaagaggccactc

SEQ ID NO: 31380 - DNA, 999 bp, Homo sapiens; identical to SEQ ID NO: 23108
  chr17:70215682-70216681
  hyper

SEQ ID NO: 31381 - DNA, 308 bp, Homo sapiens; identical to SEQ ID NO: 13611
  chr17:71548553-71548861
  hypo

SEQ ID NO: 31382 - DNA, 398 bp, Homo sapiens; identical to SEQ ID NO: 13612
  chr17:71744668-71745066
  hypo

SEQ ID NO: 31383 - DNA, 561 bp, Homo sapiens
  chr17:73585938-73586499
  binary
cgcggctccctccttgccccgactgcacccgacgggccttccctcgacgagagcggctccagcagtgaggcggagttggagaccctcaatgacgagcccccggtgcgctgggcgcagggctcaggcccccacgagggtcctaggcttggcgccgccgtgctgctaccccgactctccttggagacccgcctgcagcaggagggagacccgggcctccgtgggtccctgagggagctgtgggaacccgaggatgaggacgaggcggtgctggagagggacctggagctgagcctccggccgggcctggaggcgccacccttccccggtgccaagggcaggagcctcggagacggcctggaagacatggaggacctggcgcggttgcggttagcgggcgcggtgccaaagctgccatccccggctcacagctcctcatatccaccctgccctcatctttatgaattgcgtgtagacccttattgaatccttagaaggatgggcttgaaccctcctggcaggaaggggcaggtaaggggcaacaggtgctacgtccccaggacc

SEQ ID NO: 31384 - DNA, 959 bp, Homo sapiens; identical to SEQ ID NO: 24082
  chr17:73615737-73616696
  hypo

SEQ ID NO: 31385 - DNA, 383 bp, Homo sapiens; identical to SEQ ID NO: 24083
  chr17:73635994-73636377
  hypo

SEQ ID NO: 31386 - DNA, 416 bp, Homo sapiens
  chr17:7368962-7369378
  hypo
cgcccttgttcctatgaccgctgagtgccagcctccagccgctcccccgccagcctggatcactcacctgcgctcccccgtgtgccacacttcatgcttcgtgcggtactccgccagagcaaacactttctcacaatagcggcaggggtacttcctccgccacgagtgtacattgctgtgtctcttcagactggacagggtcacgtaggaacgctcgcaggccgcgcacacatacagcacgtggccgcccaccaccttcaccacgtgctcggggccccctcggaagcccactggtggaggcagggctgaggcgtccacccctgcaggaccaccagggccagcgcccccagctcccagccctgtagacccccgcgtgctggcccctcgtcggcactgggcctcatgggtctgcagcc

SEQ ID NO: 31387 - DNA, 292 bp, Homo sapiens
  chr17:73749759-73750051
  hyper
cgcagagcctacggccttcccccgcctggccctgctcggcccggcgccccccggcggtgccaacgcggcccttcgttgttcccaaggctgcggctggaagttcgagcccctgctgggggaggagctggacctgcggcgcgtcacgtggcggctgcccccggagctcatcccgcgcctgtcggccagcagcgggcgctcctccgacgccgaggcgccccacgggcccccggacgacggcggcgcgggcgggaagggcggcagcctgccccgcagtgcgacacccgggcccccc

SEQ ID NO: 31388 - DNA, 396 bp, Homo sapiens
  chr17:74390245-74390641
  hypo
cgcttggctgctctcaggatcgcttggctgctctcaggatccctgctctttcttttcttactcccttccttccaggacagggccagaactggggcctcagactcagattcagagtctagcatagtgcttggctcgatgcacaggcccagtaagggactgcggagtcaacaaggtggcaggcaaacgggcttgcctgttccggaaggatgcactcagcgctgcctcagtaaacatgactcagagacactaggccccgtccacgaacagaggagtgggaaaatggaatgtggtgtggccacatgctgtcatcctattttgcaggtaaaaaggaagaaactagatcattatgaatcaacacaggttggtcttaagcaaattagagatgatgtgtacgac

SEQ ID NO: 31389 - DNA, 241 bp, Homo sapiens
  chr17:7466720-7466961
  hypo
cggccccgcccttcccgccccactcatcgaaaaacctgctcacagcgccgccgccgagccatgagagccttccggatgctgctctactcaaaaagcacctcgctgacattccactggaagctttgggggcgccaccggggccggcggcggggcctcgcacaccccaagaaccatctttcaccccagcaagggggtgcgacgccacaggtgccatccccctgttgtcgttttgactcccccc

SEQ ID NO: 31390 - DNA, 248 bp, Homo sapiens
  chr17:75733982-75734230
  hypo
cgcggcccgtacgcagagctgaagtggctctctgttatttgcagatggaaattggaatctctacagcatgacagacacttgagcagaaattctaagcttttatgggttgccacaggtccctttcaggaggatggcgaaggctatagtcatgagccgtctaaggtggaggtcacgagcggcaggtggctcttaataagcacttgacataccacttctcccaactgagatgtgctgtacgcgtcaaatcc

SEQ ID NO: 31391 - DNA, 148 bp, Homo sapiens; identical to SEQ ID NO: 5760
  chr17:76034983-76035131
  hypo

SEQ ID NO: 31392 - DNA, 304 bp, Homo sapiens; identical to SEQ ID NO: 24089
  chr17:76137872-76138176
  hypo

SEQ ID NO: 31393 - DNA, 478 bp, Homo sapiens; identical to SEQ ID NO: 11267
  chr17:76215753-76216231
  hypo

SEQ ID NO: 31394 - DNA, 228 bp, Homo sapiens
  chr17:76254688-76254916
  hyper
cgacataagccccaggtgggctgcctttcacggcgcccccggctccctggcacccgcccaggcgcaggcgctggggtgtgggcacacactcacatgctgagttcagtgtgcggattcctgtaacgctgggctgctggcaggaagtgcgcgccggggaggctgctgctgggaacccagggctggccccgctgagataaagggaggcagcagatcgcagctggagatagc

SEQ ID NO: 31395 - DNA, 251 bp, Homo sapiens
  chr17:77290660-77290911
  hyper
cgtgagccaccacgccccgctagatacctttgcttcttggagaaacaggaaagatgcggaatgggggaaggcaggagttcagcaccacggacagcgacctgcgggtgggagacgctgccagccacgcggccgaactccggactgggggccacgtggaggaggccttggttcagctctgccccatgcctcacgggacacacatttatcacctggaaacagcggccagtgctcaggaaggctcatgccattgc

SEQ ID NO: 31396 - DNA, 983 bp, Homo sapiens
  chr17:77777811-77778794
  binary
cgggccgcctaccctccgcaagagtgggccacgcgggcggcaaacccgagggcagacgtttgggagctgaccgagaaaacgcgacggtgccggcgaggttctgggcgaagcctcggcgtcctccactgtggtcgacgcctttcctcgcagccccggtacagggcttcctcggtgcacccctagccgttgccccgggaggaggcgccgtctgggacacgaaggggctcggctggcgtcgaggctccgcggccagagcgcggcggctccgcgcacgcccagaagccgtgttgccggttccggggctgccggaaagcgtggggccaagctgctgctctgtgcccgcgcaagcgcctcgctacccgggcgggaccttgctctctccggccgccctgggccgaggggtggctcagcatcgtgggggcggacgcagacggccactcggccgggacaccgtcggcccgggagccgtgatgccttttctctctgcagctgaagcctccgatcggtttccccgcccttctgtaggaaatcaaattcagggaacatggtaccgtatttacccgcacaacttcctcccttgacattttgcactctcgaagttggggcagaagtaattatgcaaacatctggggctgtcccgcgccgctaccggcaccgtcttattcatcctgagagccgcactccctcatttgcataataatggcttatctagaataacacagcaatcagaggcaaaattaattttcttcagctagtccttgagatcctaaaaacagaggaggcttatggcaagaaaagccggtttagcagagggtgtagggttcctgaccaggaccaaggagagagaaagtttaaagcagtggaaatgtgatgttcacgctgagtttctgtatttttctagtttcaacctcagagcttactttttggccaaacggatgaaggggtaagccaccgtggaagtcccagcagatacccccaccatc

SEQ ID NO: 31397 - DNA, 1367 bp, Homo sapiens
  chr17:77788305-77789672
  binary
cgatcgtatttcctggggacagctcgacccccaggggagcacgtggccaccagctctgccgccttcctcctcctgagaccgaccctaggagtcctcgtgccccagtctacctagactcccaggagcgtccggccggaagagacagtgggagatgaggaaactgagattgggagggggacgtgatggggtaaggccattcctaaggcttgtggcagagctgcctcttcaccccacccccatttctttcagatgcggagatcaaagcccaggctcactggtgggtcgggagctcactcctccaagtacacttggccaacctcggggagcccggcggcggcgggaggggcgcgggcacctgggggatgggggtggggagcggccagtctgctggtccacacctgaaaacggggtttccccgaccggatgcctgccgtccccccgcctccactctgcggggtcgcctgctagggtcgggaaaggaccctccaccgccaccctcggggttcggtcctcccccaccaacgtctgccagtccgcgtggattccgagcccggctccggaaaccagtctgaccacttcgcccatttcccaagcctccccgggcggcggccggccagcttccatggtgcggtgagccaggctcggccgccgcctcggccgccctgcgatgaatggctctgcccagaaggccggcgtccaagcgacgctcccgcccgcgcgcccggggcctccaggccgctccccgccccgtgtccccacattgcgaaacggacggtcggatgctccgctccagggccggggtcgcctgtcccctgccgacctggcgcagagccgccttctgcacccggccccgtgccgccctggggttgcttacagccgggctgtgccaccgagctgagcccggaatcgaatggcgggccgcggaaaaggcggccaggcccgcaggggcgactgctcgaggtcccagaacagcgcccggggagccccaggccggcctcgaggggaccgcgggcgggacaggaggggaacagctggcatcggcgcccggcttcagctgcccgactgcggtgggcgggtaggcacgttcccccgcagccacccgcgcacgggtttccaaggcgtcaagggcaattcacctggtcgctgcaagaaagcgactgcgcccccacgtccagccagccgccttgtccatgagaaccacctggagggcagggtccagtgcccgggtgccacccgccacgtggtgacggctctgggatggcacaggctcgtgcgtggccgccgggctgccgtctcggcccctgtgcgggtctgcgctttggcggccgccgagccgaggggagaaaatggccggtggcgcggggccc

SEQ ID NO: 31398 - DNA, 754 bp, Homo sapiens; identical to SEQ ID NO: 24092
  chr17:77825246-77826000
  hypo

SEQ ID NO: 31399 - DNA, 183 bp, Homo sapiens; identical to SEQ ID NO: 25277
  chr17:78143796-78143979
  hypo

SEQ ID NO: 31400 - DNA, 164 bp, Homo sapiens
  chr17:78587649-78587813
  hypo
cgggctgggccgcgtgttctggataagtggctgtggagcacgatgaagcgtctatcgcagcatcatctctgcacccagatgtggccgtgctgagtggattcctgccccagatcttgggaagaaggttggctttcctcctggtgttggtggaaggcctccccggc

SEQ ID NO: 31401 - DNA, 557 bp, Homo sapiens; identical to SEQ ID NO: 13628
  chr17:78611023-78611580
  hypo

SEQ ID NO: 31402 - DNA, 643 bp, Homo sapiens; identical to SEQ ID NO: 24094
  chr17:78667873-78668516
  hypo

SEQ ID NO: 31403 - DNA, 555 bp, Homo sapiens
  chr17:79093912-79094467
  hypo
cggccgccaggagccgcggccgctcccaccccttcctgcgggagcgcgacccccagccccgggcagaccccgggtggcggcggcccacctggtcaaagaggtagacggtgacgtcgtcgaagaaggacacggccttcttcttgcgttccaggtcctcgcagaaggtctcggacagcaggctgggcatcttgagcaggctgcgcaggttgcgcgcgctctggctctcagccaccaccacgggcaccgccggcgcctcctcttcgctgtcctcgctaggctcctggacgctgtagcagcggagctcctcgtcagactcgtcgctgtcctcactgtcctcctcctcctcctccggccggccctccaaggccgcagggaggccgggcagagccaggcggagtggggctctgggggtgcctgggccccccatccgcttttgtggggccggccctgacaacagtcctgggggcccctggaactcagagctgttgccttctgatctcagcggaaccggggtcagcaggaaaaactgggagcagctggggctgggcccaggcc

SEQ ID NO: 31404 - DNA, 313 bp, Homo sapiens; identical to SEQ ID NO: 24098
  chr17:79913147-79913460
  hypo

SEQ ID NO: 31405 - DNA, 553 bp, Homo sapiens; identical to SEQ ID NO: 26514
  chr17:80294440-80294993
  hypo

SEQ ID NO: 31406 - DNA, 1173 bp, Homo sapiens; identical to SEQ ID NO: 23533
  chr17:80797632-80798805
  hypo

SEQ ID NO: 31407 - DNA, 299 bp, Homo sapiens
  chr17:81008592-81008891
  hypo
cggggaaggtgttcggggcttaagggcaggtttttagggcacgtgtttggggtaagtgtgctgggcacacaggcaggtgtgtgggcacggaggaggtgtgcaggtaggtgtgtgggatgcgcaggcaggtgtgcacggcaggtgcacgggcaggtatggggcacgggcatgtatgcaggacgcagagcaggtgtgtgaagcaggtgtgcaggcacaagacgtgtgtgtggggcatgggcaagtgtgccgggaatgtgtgacggcagacgtgtggggtgcgaggttgtgtgggggcacac

SEQ ID NO: 31408 - DNA, 784 bp, Homo sapiens
  chr17:9143010-9143794
  hyper
cggtgaacatcatctccgtgtataagcagggcacgagccgcatccgccgcggtgaccagagcctgtggatccgctcgcgggacatcgcctgcaagtgtcccaaaatcaagcccctcaagaagtacctgctgctgggcaacgcggaggactctccggaccagagcggcatcgtggccgataaaagcagcctggtgatccagtggcgggacacgtgggcgcggcggctgcgcaagttccagcagcgtgagaagaagggcaagtgcaagaaggcctagcgccgaggcagcgggcgggcgggcgggcgggcgccagggcggggccgagcgagagcgggcgccttggcccggccgccgcggacttggcccgcgagggctttcccaggtggggggagggagggggcggggccgcacggcgcggggggcgggaccctcggcggcccctccccctacccccaccctgcgcgctctgggcgggagccgcgtgcacgcggggcggggtgcgccgccggccgggccctggagaaatgacgagacgtagctacctcacggggctccttccagagcagagacgcgcttccctgggcctgggcgcggccgccgtggaggggctgggggcagcctgccctggggcccgggggcgggcgcagaatcgcacaactggggccccaggcgcggggcgtggatggcgcggagacgtggacgggaggagaactgtgaattctcaagcccgtagtgtgggcggggcgcggagcacccaccaaaccaccacccgacacgcagccgac

SEQ ID NO: 31409 - DNA, 646 bp, Homo sapiens; identical to SEQ ID NO: 26527
  chr18:20911034-20911680
  hypo

SEQ ID NO: 31410 - DNA, 907 bp, Homo sapiens; identical to SEQ ID NO: 30003
  chr18:24130266-24131173
  hyper

SEQ ID NO: 31411 - DNA, 338 bp, Homo sapiens
  chr18:28620846-28621184
  hyper
cggtccgaaattgcaagtgtttgtaaactgacaattgcagatgaaatagtcattttctgtgcactttccggtatttaagtctccagatacagcatttaacctaaactcaacggaattattttaaaaaaaaaaaatcttaaacgagtatgtgctagatcaaagctgaagcttcctccgtttagatttacgcgcaccttcttccttgccacagctcgacacccccacccatgccttgccgggaaagctcctggtcttccatggcctctgggagcctcgagcgaatgcgagaaattctgagagcagcacccgtagtttcgttccccatcctcaatcccttc

SEQ ID NO: 31412 - DNA, 94 bp, Homo sapiens; identical to SEQ ID NO: 7055
  chr18:3119830-3119924
  hypo

SEQ ID NO: 31413 - DNA, 219 bp, Homo sapiens
  chr18:34823778-34823997
  hyper
cggaaagtctctggagcaagcgtggaaggcgagtgaagcggaaggtgagtgaagcgcgcgcagctcccagagggaagcgagaggcgaggatgacggcggcggcggcggcggcgacccgggcgacgcgaccgttcccgaccgacggcgtggcctccaccggcgtcggcagccaggcgcccgcaggtgtggggcgagttcggcctggcccttggggacaac

SEQ ID NO: 31414 - DNA, 846 bp, Homo sapiens
  chr18:44335955-44336801
  binary
cgatacgattttgagccctccgaccccggagtccaaacaaatggccatagaactgtgggtctggaggacaccgctccgatccatgcggtctctccgggtattaaatggatttatcgtcagcctggttgcttggaattctattctgtccttcatttttcacagcggaacaaagttgtctggaccctccagccagcgctgggcagaagcaagcaaggatgctcttggaaacgcggtggcccaagcctaagcggccatgctcggggctaggagcggaccccacggccactcaccccggggcgctgcgaccgaagctgccgcggccactgccacccgggggctcgccggccggctccgcgcatcccgccctctcaatggactttcttacctcttaatgtagttcctgccatacaggatctgttgcagcaaggtcaccaaggcaaaggcgcagatgaagatgaagagcaaagttcggctccccaacaaatcccggttggccgaggggtccgcgtagcgcatcctggctaccgggcgccgcgggcgcggggtacggggcggccaggcaatgactcgcggggttccggggccccggggggcgcgcggccgacttggcgcctcacggtgcggtcaggcaggcgggggacttcgaggggcaaagtttctggttggcgcggccggagctgggggcatccaagcgtcgcaggcgctggggcggcaagcaggacagggccggtggcagggagctctgccgcggccaggggccttccccacccccgggtacctttacctccaggcgccggtgccgggtagccgccgatttccccgcggaggggagacgccaggtgccac

SEQ ID NO: 31415 - DNA, 141 bp, Homo sapiens; identical to SEQ ID NO: 13644
  chr18:47285293-47285434
  hypo

SEQ ID NO: 31416 - DNA, 800 bp, Homo sapiens; identical to SEQ ID NO: 23121
  chr18:47339411-47340211
  hyper

SEQ ID NO: 31417 - DNA, 934 bp, Homo sapiens
  chr18:55103414-55104348
  hyper
cgctgccacccatctccaccgtgtctgacaagttccaccaccctcacccgcaccaccatccgcaccaccaccaccaccaccaccaccagcgcctgtccggcaacgtcagcggcagcttcaccctcatgcgcgacgagcgcgggctcccggccatgaacaacctctacagtccctacaaggagatgcccggcatgagccagagcctgtccccgctggccgccacgccgctgggcaacgggctaggcggcctccacaacgcgcagcagagtctgcccaactacggtccgccgggccacgacaaaatgctcagccccaacttcgacgcgcaccacactgccatgctgacccgcggtgagcaacacctgtcccgcggcctgggcaccccacctgcggccatgatgtcgcacctgaacggcctgcaccacccgggccacactcagtctcacgggccggtgctggcacccagtcgcgagcggccaccctcgtcctcatcgggctcgcaggtggccacgtcgggccagctggaagaaatcaacaccaaagaggtggcccagcgcatcacagcggagctgaagcgctacagtatcccccaggcgatctttgcgcagagggtgctgtgccggtctcaggggactctctccgacctgctccggaatccaaaaccgtggagtaaactcaaatctggcagggagaccttccgcaggatgtggaagtggcttcaggagcccgagttccagcgcatgtccgccttacgcctggcaggtaaggccggggctagccaggggccaggctgctgggaagagggctccgggtccggtgcttgtggcccaagtctgcgcgccgagtcacttctcttgattctttccttctctttcctatacacgtcctctttcttctcgtttttatttcttcttccattttctctttctcttcc

SEQ ID NO: 31418 - DNA, 937 bp, Homo sapiens
  chr18:55105210-55106147
  hyper
cgcgggttacattgttctggagccggctcggctctttgtgcctcctctagcggccaagctgcgaggtacagccctctattgttctaggagcacagaaacctcctgtgtgggcggcgggtgcgcgagctagagggaaagatgcagtagttactgcgactggcacgcagttgcgcgcttttgtgcgcacggaccccgcgcggtgtgcgtggcgactgcgctgcccctaggagcaagccacgggcccagaggggcaaaatgtccaggtcccccgctgggaaggacacactataccctatggcaagccagggtgggcgacttcccatggatcgggtggaggggggtatctttcaggatcggcgggcggtctaggggaacaattcgtggtggcgatgatttgcatagcgcgggtcttgggatgcgcgcggttccgagccagcctcgcacagctcgcttccggagctgcgagctcaggtttccacccccgatcccccgggctttcctcgcaccgctgagcccagcttgtggggtgcactcgaccaacgcccgacagggctggggaatgtgacaggcagcaggttcacccgggcttggggagggggagtttccgctttgacagcattttcctttgccgtctgctggtggattcctattcccagtcggtaatcgccccgcagtgttgatctaagaaggtaaagaaaactaggtttccctgcaaagagcctcccccaaatcggcggactccggatactttgagtggatttagaaatttatgtaatctttctcctttagtttatttttcatcctctcctacagttttctctgatttgctgttggttcggggcaagataaagcagccagtagagagcgataataatagcggcgggaaatgaactggagactggctgacagttcttaacattttgtcatagatcccccc

SEQ ID NO: 31419 - DNA, 264 bp, Homo sapiens; identical to SEQ ID NO: 25303
  chr18:55850838-55851102
  hypo

SEQ ID NO: 31420 - DNA, 796 bp, Homo sapiens
  chr18:56939067-56939863
  hyper
cgagaagtttggttggatgtgcaccagaaaaggaaaagtcagtttcttaaataaatccacccgaagtttcaactgcgaggtgccaggcccttcgcaaggaaacagggttttcgtttccaactcggtattcgcagctagtgacgagggtggcatttggggccccaatcctgtcaccctcgatcactacctgcattccatttccactcagcaacccccaaccccttcctggctatgtctaatgagctgtcggcctcttcatcttgcaagtcattcccatcttctattttgagtttagaagagggaaacccccaaaggggagctcgtactacaaactggaacagactgcttgaagggcgatgcacagggaacatcgaagatctgtgcctctcccttgagactctgggcatgccaagtcgaggaaggacagtaataaatgcatggacacccgtgaattccgagaagcattggctgcaatttgggcctcgggccctcccagatcccagttcctcaacctgggcgctttacctggacccggacctctggtaggttgaccttgccggccagctcctcgcggctgtacacgtccgggtagtgggacttctcgaacgcgcgctccagctcatgcagctggtacgtggtgaaagtcgtgcggttccgccgatgctttttcttgggctgttcctcctctgacagtttcgcttcgccggtggctggcccgacgggcagccctgggctcggccgtgcctccccgggctccttggggcagtagggtcgaggggctggggcgacgaggccc

SEQ ID NO: 31421 - DNA, 966 bp, Homo sapiens
  chr18:56939900-56940866
  hyper
cgaccccgcctcgctgtgggcactggccagcccgcctgcgggctccgagatggcccggggaggtccgtggtgagggcggcgatgggtcctaagctttctctgaatgcaaattggaagctcccgccatagacggtccccaaccccgcgcccagttgccttaataaaagttaaggaaggggcgctctcgtctggccaactcctaagctcgggcgcccgaacggcctcgcacagccaggggtgcgcactcaccttcgtactcgggggcgggcgccggggctggcggcggggagggctcggagccttcctcgggcgccttggggcaggcgggccgcgcgcccagcctcctatcccgctccttcgcgccccgggcgccccgctccgccgggaaggtgccgaggatcccgtcgtccttggtaaaccccaggatggcctcgatgctgtgaagtcgcgaggtgctcccgcccgggctgcggagcaggtggccggcaagcgagaagctcccgtcggccatggctggcgcgcagcccggcaggtgcatggggagcgccgggaggcgggagggcgctttggagacggagaggagaggctcgaagccgggtcttcccgagtgcggcggtgcaacccgacgggtcccgaccctaggtcaagctccgcgggcgaagcccgcccgggctgcgcacgctgggggtggccgagcgctcagcccgctgccgccttagtcccagaagtcggaagttcgggctcggggtagctggggctctcggcgctaaaggcggggagccaactggccctcggctcctcccctctcgccctggacccagccccttctctcggcccctccctccacagaggggcgtgtcctcacccggcccagccacagggtcctctagtggccacccctgggccggcactaggaatattccccttccacctcttgatccgttttaagctttacaaacacactcc

SEQ ID NO: 31422 - DNA, 650 bp, Homo sapiens; identical to SEQ ID NO: 24119
  chr18:60985398-60986048
  hyper

SEQ ID NO: 31423 - DNA, 333 bp, Homo sapiens
  chr18:61143917-61144250
  hypo
cggtcctgcgtgggccgagaggattgccgtacgcatgtctgtacgtatgcatgtaactcacagccccttcctgcccgaacatgttggaggccttttggaagctgtgcagacaacagtaacttcagcctgaatcatttctttcaattgtggacaagctgccaagaggcttgagtaggagaggagtgccgccgaggcggggcggggcggggcgtggagctgggctggcagtgggcgtggcggtgctgcccaggtgagccaccgctgcttctgcccagacacggtcgcctccacatccaggtctttgtgctcctcgcttgcctgttccttttccac

SEQ ID NO: 31424 - DNA, 278 bp, Homo sapiens
  chr18:72347372-72347650
  hypo
cggccacatgagaaatgagcaggccagtgtggaggagcttccggagggaggggccacctttaaatgtgtcaagtgcacagagccctttgattctgaacagaatttatttttacatattaaaggacagcatgaggaattgctgcgggaggtgaataagtatatagtggaagacactgagcaaatcaaccgcgagagggaggaaaaccagggaaacgtctgcaagtattgtgggaagatgtgtcgaagcagcaactcgatggccttcctggcacacattc

SEQ ID NO: 31425 - DNA, 418 bp, Homo sapiens; identical to SEQ ID NO: 24120
  chr18:74113780-74114198
  hypo

SEQ ID NO: 31426 - DNA, 162 bp, Homo sapiens; identical to SEQ ID NO: 13660
  chr18:77076178-77076340
  hypo

SEQ ID NO: 31427 - DNA, 349 bp, Homo sapiens
  chr18:77329654-77330003
  hypo
cgctacggtgctcagcagatttagataacatggtgtctgagtccagtagtacatgctctcaccttcactgtctcagtacaacaggacacgctctcaccttcaccatctgggtacagcaagacacgccctcacctttaccgtctcagtacagcaggacacactctcaccttcaccgtctcagcgcagcgggacacgccatcaccttcaccgtctgagtgcagcaggacacgccctcaccttcaccgtctcagtacagcaggacacactctcaccttcactgtctcagtatagcggtccacgccctcaccttcaccgtctcagtacagccaaacacgccctcaccttcacc

SEQ ID NO: 31428 - DNA, 1056 bp, Homo sapiens
  chr18:77508739-77509795
  hypo
cgacagagtcatgatcagaggcctttagagtcatcattatcatgtctgtgtgtgagccgtgactgcctgggagccgtgtctgcctgggagccgtgactgcacatgagccgtgtctgtgtgtgagccgttctgtgtgtttgccgtgtctgtgtgtttgccgtgtctgtgtgtgagccgtgtctgtgtgtgagccgtgttggtgcatgtgcacagggctctccagcgggagctgaggtggtcccttccgtgggctcggttcaggtcctgtggcaccctgccaagttatgctggcgtttctgaaggtgtgtcctgctgtcaacagcactctgggtgtttttgtcggccttgtgaggggaacatatttctaaacctcaaacagagagtcacagctggcatttcccattctttgccatcctcttgctgccattagaactctgccacggatggcttcctcgcttgattttagaaagaaaagaattgttggaactggttcttgcacctctcgccctccccctcctctccctgcttgccccagggtcccgcctggctctcgtctgccccgtcttcactttcggtcggggcccctgcccctgcccctgctctgctcagtgcccctgatacgtccaacccagcgtcgctgtgagggagtcaaccacacctgccagcacccccgagtctggccccactaggaggggccagggctcccttgagcaaggcatcagcacacaggcagggagccgggcaccagactgtgagggtcgcgccccgtgcacacgagatccaggcccgccccctcctggacttggtgaccgtcccgagctcgacctgagagggcacttcggctctcctgttcacagtcatgactgccccctccccgaggtcagcgccatgcactgctctgggggcctgaaacaccgcctctgttcgcaagggtctcctgtcccgtccacctgccagtgggttgagctcttccaggggttcgggacacccctcacggcagcaccttcacgtttacgagaactgtctctgtcttgttttgtttcaagttctcaaaac

SEQ ID NO: 31429 - DNA, 268 bp, Homo sapiens; identical to SEQ ID NO: 13664
  chr18:77535504-77535772
  hypo

SEQ ID NO: 31430 - DNA, 749 bp, Homo sapiens
  chr18:77547846-77548595
  binary
cgcgaaggagcctctcaaatattcccggagcacaggctaatttagaacgtgttatcctgacaaggcggcccagccagggaggagacgccggggtccgcgccgcggggcgggcgcttccccggacccgggggaggcgggacgcaggcgaaggccgccccgggagagcggggtcccgggagagcggggtcccggctgtgggggacgcgggccgaggctgtcgcgaagccgctgacggccgaggcgctcccggttttcgcggcgcacaagggttgcccgagcgctcagagcaggggccgccacgcgggcgcccggtccaacccgcggcctcccgggtccctcctagcggggccgcagacgcccgcgagccgcgtccccggagcgcagaagatccccgcgcacagcgcaggccccgccggcccggtggacccgcttgaggacgcggagggggcgcgtttcctctgcggcgcccgcacggcctctgcccgcctgtcccgcgctcccgcccggcaggcccagctcggacgaggctcagctgccgcccccgttgcctttgtgggtttttctgcggaagccccttttcctcgggtggatgggaccctgcgcgtggaaccccgcacagcccccgctccgccgcgggccgcaggacccattccttctccacggtggcgctggggaggggctgcttccacccaggagattcgcgagggagagaaaacatgcggctcacatccggacggcagccccgcccc

SEQ ID NO: 31431 - DNA, 441 bp, Homo sapiens
  chr18:77549975-77550416
  hypo
cgtccgtgcccctccttgtcccggggagcacggctccatggcgcccgctgtggagctgcggttctcaccatgggcaggtgcgaggccgtagactggtgtggtcagaccaggggactcctgcgttcaccctgggccccggagactagtgatcccgctccccagcagagcaccgccaaaagccccgggtgccggagctgtcctgcaagaatgaacgggcaggagacacaagagcgtggcggggccttccgaggatgcggtgcaagggcgctgttagcacccacgcgaggcggcagcgcatggaggaagcctcccatcgtaagcgcgtttctgcctgaaatgcacgtgtccttataggcagcggtcttgccactcatggacggagaggcagcatatgtttaaaagatgagcacacaaaggactgtgcacctgccgcggagtggc

SEQ ID NO: 31432 - DNA, 113 bp, Homo sapiens; identical to SEQ ID NO: 8176
  chr18:77616298-77616411
  hypo

SEQ ID NO: 31433 - DNA, 231 bp, Homo sapiens
  chr18:8608737-8608968
  hyper
cgatcagagttaaaaataactgatttcgcgcgtttccgtgcaaaatgggagacagacgtgacggagagagaccgagcagtgccacggcccggtagagggtgcgggggcttgcacccgctggtgtttgtgagagagcgctggtgtagacgcgaacgcagcgcaggcggcccggcggcgcggcctcaggtcggggcctttccagcgttccagctacaccgagcgcgcgggggc

SEQ ID NO: 31434 - DNA, 814 bp, Homo sapiens
  chr18:8659272-8660086
  hypo
cgggctggcccgagaggcagcgccccgcgcagaacgcccgtgcctgggaagaggcctgcactccagcagacttccatgttcgctggaagcctcccttcctgactgtgaattgggacaatgcgcagacttccatgttcgttggaagcctcccttcctgactgtgaattgggacgatgcgcgggattttctgaaacctcagttcctccgtctgtaagatgagattgtggggaggagggcggacctgtaagtgcccagccacgagggctgagagattcgaactcctttgctgccgcgaagaagggcctgttccccggaggccaggtgggctccaggccaagctcgcagaggggccaggtgtgctctggcggtgagagggccgcgcgtcccggcacacaccccgcccatttcagcaccctctccaccctcctcagatgaccagagaaatccaagcaggcccttggctttcaagattcagcttcagccatgcataagtccttcactgaagtggcagaggaaggacgagcggctttgttggattggggctggagccccgtgcccggctgtgggtgctcgtgggagagcctcgcccggccctgcgcttcccgagagttcgccgggagcacaagccctggagagcccatgggcagagctcaccagccccacctcacagagagggaaactccgaagtggccgtggatttgcccagggtcacccagtgacagacagctcagactcctttcccagctccggccaccgaagcttgcaggcgcgtccgttccagctcagataagcacctccgccacgctttcctcac

SEQ ID NO: 31435 - DNA, 81 bp, Homo sapiens; identical to SEQ ID NO: 7073
  chr18:9514129-9514210
  hypo

SEQ ID NO: 31436 - DNA, 271 bp, Homo sapiens
  chr18:9547721-9547992
  hypo
cgtggcgaatgcccactgaacctcggctctcatggaagcaggaaagacaccgagattcaagccttctagtaggttgaggacgctgtgctcatggcatcttcggagattttggtactggcagggtggatgcttgcaaaatacttgacatcgctgtcacggtccatctgaagagccatgatggtctgctccacagcctcctggtggcagctggcagaggccaagaaatagtctggaaatgacatgtgcataggacagatgaaaccagtccaac

SEQ ID NO: 31437 - DNA, 652 bp, Homo sapiens; identical to SEQ ID NO: 24125
  chr19:1003171-1003823
  hypo

SEQ ID NO: 31438 - DNA, 1173 bp, Homo sapiens; identical to SEQ ID NO: 25316
  chr19:1004547-1005720
  hypo

SEQ ID NO: 31439 - DNA, 330 bp, Homo sapiens; identical to SEQ ID NO: 25318
  chr19:1030023-1030353
  hypo

SEQ ID NO: 31440 - DNA, 413 bp, Homo sapiens; identical to SEQ ID NO: 28772
  chr19:10370250-10370663
  hypo

SEQ ID NO: 31441 - DNA, 830 bp, Homo sapiens
  chr19:10402631-10403461
  hyper
cgataagatagtgcatgtcaagtgcttaggacatattgagcgctcggagttagttcaaacttggttcttcgacccctagccctgtctccggatgccccgcgcctcgctgctccccggctcttggaagttggctcggaaaggcccgtgagctgcactctggacggactgtttccagcctcagaggccagggtctacctcgcactgggggaccagaatctgagtcctgatgtcaccctcgaaggggacgcattcgtggccactgccacagccacagctagcgcagagcaggagggtgccaggcagctggtctgcaacgtcaccctggggggcgaaaaccgggagacccgggagaacgtgaccatctacagtaaggaaggaggcggggtctccgcggctccgaggtgggaccagaggaatgcgaaggcggggcgaagagtgggcgggacctcagtaccggaacaggcgtggcccgaggggcggggcaggtgggggcggagacgtaatcgctggggaggaggagcctgtacagcctgagaggcggggcgccgtaccctagttcgttctcagcaccccgaggattcgggcagataaggggcgggccttgaccggagggaggggtatggtcagtatactacgaccaaatgctccgcccccaggcttcccggcaccactcctgaccctgagcgaacccagcgtctccgaggggcagatggtgacagtaacctgcgcagctggggcccaagctctggtcacactggagggagttccagccgcggtcccggggcagcccgcccagcttcagctaaatgccaccgagaacgacgacagac

SEQ ID NO: 31442 - DNA, 457 bp, Homo sapiens; identical to SEQ ID NO: 28774
  chr19:10405940-10406397
  hyper

SEQ ID NO: 31443 - DNA, 263 bp, Homo sapiens; identical to SEQ ID NO: 28775
  chr19:10406914-10407177
  hyper

SEQ ID NO: 31444 - DNA, 298 bp, Homo sapiens; identical to SEQ ID NO: 22823
  chr19:10616220-10616518
  binary

SEQ ID NO: 31445 - DNA, 1137 bp, Homo sapiens; identical to SEQ ID NO: 24128
  chr19:10624638-10625775
  binary

SEQ ID NO: 31446 - DNA, 292 bp, Homo sapiens; identical to SEQ ID NO: 22824
  chr19:10691764-10692056
  binary

SEQ ID NO: 31447 - DNA, 109 bp, Homo sapiens; identical to SEQ ID NO: 13680
  chr19:10949233-10949342
  hypo

SEQ ID NO: 31448 - DNA, 257 bp, Homo sapiens; identical to SEQ ID NO: 23542
  chr19:11003007-11003264
  hypo

SEQ ID NO: 31449 - DNA, 666 bp, Homo sapiens
  chr19:11029968-11030634
  hypo
cgctaccacggacaatctaattatacatgtaagtttgttgatgtgttcatgtatctggaggttaaactcctgtagtgccaaatcttttatgtggataaacacttgtcatttggagagctgtcacctgattgccctcggtggcgttgtgccggtcccctcctcacggcgtgtctgggaagagcaagctcgttttagctgcacagcctagaagccgtgggcagacctgggggaaggggcagggctctcccctcccatgctggccctggcgtcagatgccacgtcacacctgtggtctctcccaggacacatttgacatccggatcctgatggccaagtctgtcaagtacacggtgaacttcttagaagccaaagaaggagatttgcacaggtactggcacccacactccatcctcccaggcctggctcaggccgaaggtcagggccacccctggctcccgccggcatcctgccgtcccagggcagatggtgggcgggggccccaggcctctgcacctggcaccccctcttctctctcggcagcgcctgtctggcttccccagcagccactgccctttgccttccaggatagaaatcccattcaaattccacatgctgcattcagggctggtccacggcctggctttctggtttgacgttgctttcatc

SEQ ID NO: 31450 - DNA, 675 bp, Homo sapiens
  chr19:11128636-11129311
  hypo
cgcaaggctgctgagcctctgctccccacgcttcttcaggaactctccccagccttcaccacagccatgcgtccttctgtctattggctgtgccgcctggttggctgtggcttccagcggggctggagatgggttcatggtggacacagcacctccctcgtggagctgcttgggggcaaaccacgagtagtccctgggactccagcttcgagccctgtctttacggaccaccccgtctagactttctgagtggcttccctcccccactgaaaactccctgccccagagttcctcccagagcccgtcccctttgggactcagctttattaccgcctccaccctctcctcagtctctaggctgtcggtctcaggtgactcacccctccccactgcattctgcctgcccccatgtcctccctcattccagccctggtcatcccacaggggaacagccacgagttgccgctccctcccatccctgtcctcccgcctgccacctgagccaggccccgcctcgcccctcactgtcctcgttctctctcacagtcaggaaccttccgtggctggagggtggcagaaagactgtttggtgtctcctatatcctcaggtctccacagcactgttgctagcctggctctgggcgtgaagcctgtgctctgaagctgcattttccc

SEQ ID NO: 31451 - DNA, 114 bp, Homo sapiens
  chr19:11285217-11285331
  hypo
cgttgctgtcggcgatgttgaccacgtagtccagcagccgcgcagacatggcccggaacgtgaccaggtgccgccgcaccagctcggggtgtgcgtcgctgcggcaggccaggc

SEQ ID NO: 31452 - DNA, 1184 bp, Homo sapiens
  chr19:11491655-11492839
  hyper
cggggaggaggtcagggcggtgggcttgccccgtgattcgccctggctcctcctacacccccgcctggggcctcaccgctaggcgtcagcagcgacacaggctccgaccaggcgctccagaagccgccgaagctcggctcagccatacgcgcgcggacggcgaaggtgtagcgcgtccggccccgcaggttgctcagcacacactcggtgcggccctccaggatctccacctgggggcggaatcagggcgagggacgcgtagcagacaaaaatagatgacgtgggggcgggccctggtggaactgagccaatcaggggaaaggaaaacggtgccctagaattgcaatgggaccaataagagtagggggaggagcccaagaaagctcagggccaatcagagagagagtctctggtacgaaagggcgggacccgggcaatttaatatctgggctagcactcgtagagggacccgggcgctaaaggggtctagggttacgggccggagggagaagaagttggggttcaacaggcttgcgaggacattaggaaagggggtgtgtctgtgggcgtggaacggtcttcagcaccagggtaatgggatgtgggatgttacggaccggccctgaaagcggcaccgggcgcgacctcgagaggcgtggctgggccgtagtcagtggagctttgggggctgggccgtaggggctggcctcaccctctgtacgctccctgcgccgttgccggccgagacgtccacctcgtagcggatgtgagacgtcatgggtgtctcaggcggcgggagccagcgcaacactacgtggccgctctcgtcagccaaccgcgccaccagccccacgggggcgtctaggagcactgcaggcatgggggttggtcaggtgggcgaggactgagaccctctcctccgaccactcctccattcccagagcacttacctacttcattgatgtggatgacacggtgatatcgcggagcgccggaggctgctgtgacgcgcaactctaggggcacgaagctcgacgtgtcggctgtaggcagcgaacaccagaagcgcaccgcaccacgagccgtgggagcctggtgcaggcgacacagcttccatggctcatccctatgcgcccagggaagggagcaggttgggaggggggaccggggagttggcattgccc

SEQ ID NO: 31453 - DNA, 441 bp, Homo sapiens; identical to SEQ ID NO: 25323
  chr19:1166870-1167311
  hypo

SEQ ID NO: 31454 - DNA, 115 bp, Homo sapiens
  chr19:1357664-1357779
  hypo
cgacgccccagtcagtcctgcgtgattgtggcgagggcgcgtctggcaccgggaaggtgtagatcatctagaatgacggcgattccgacgccccggtcagtcctgcgtgattggc

SEQ ID NO: 31455 - DNA, 550 bp, Homo sapiens
  chr19:1496346-1496896
  hypo
cgcgtcgtgcgtccgctgttcctaaggcaccacggggccgtagacagaatcatgaacgacctcagcgggcgagccctggacgcggcggccggaataaccaggaacggtgggtgctcgcaggcgcctggctgcctcaggccatctcccgggtctggacctgtctctctccaccttgcctccctttctgactttggccgccccctctcactgtccgcctctctctctcacgcttccgggaaccagtcttgcaggtcctggcccgtagccgggcaggcatcaccccggtggctgtggccgggccctccactcccctggaagctgaccgtacgtaaccgctgtggggagataggagctgtgtgtgtgtgtgtgtgcgcgcgcgcgcgcgtgtgtttgagcgtatgtttgctgtgtgcacatgtattattgtgtgtgcatgttttgtcatgtgcaagagggtgcgtgtgcatgggctcaagtgtatgtttggtgtgtgagtgagcaagggagtgagcatgttttctcacgtgtgcatatgtgtgtgtgtgcccac

SEQ ID NO: 31456 - DNA, 361 bp, Homo sapiens; identical to SEQ ID NO: 27766
  chr19:15292270-15292631
  hypo

SEQ ID NO: 31457 - DNA, 474 bp, Homo sapiens; identical to SEQ ID NO: 28797
  chr19:15343944-15344418
  hyper

SEQ ID NO: 31458 - DNA, 941 bp, Homo sapiens
  chr19:1577427-1578368
  hypo
cgaggcaggggggccggctggcagtggagcattctggcagcgccgggcgaccaagtcccgactggcagcggctggagtttggttttcagaagcgaaggctggcgttggcacacagggaaggctgcccgatgacgtgcctcgactgtgttacatttactgaaggagagcggcctcctgggcatgccactcaggcacggtgaggctctgtggcaccaccagccgcatggcagggcagagagtggcgccgtcctgcatgccccccacagcagaccagagtcccgtcctcacgctgcacagtgggtgatgtgagtttcaaaactacgcctccagaccgagaaaccctcccagctgtcagcaagccgtggcgccgagctgccgggcacctgctggctgctctccagtctcaaggagctgggacagcgggcatggggaggagctggcctcgagcccaaaggtcgtagggagccaggcagggcccaggagcacccggcacttcccgaagccggactctgtagaggacgagcgtggagggtctttcgggtgggggcagccccagctgtgtgccccgaggccccgggaagtggggacgggccgaggagggagccaggagcacggccttcctcctgggtgtctccaaggctgggcttcgccgccgagcctggttcacgtggggccgaggaccgcgtctgcaggcggctccagcaggcagcacgggctctcggcagggcctctggaaaggacagggagggctggctttagcgactccacgggacggggacgcttgggctcttctagggagatgggaagctcttgggaggcacccgtcatcccaagcacatctgtgttcaccaggcagtccccactgccaggacccgactccagggagcccccgtggccccgcagcacctgccctagacgtgctccatctccgggtccgggtc

SEQ ID NO: 31459 - DNA, 723 bp, Homo sapiens; identical to SEQ ID NO: 25342
  chr19:17007056-17007779
  hyper

SEQ ID NO: 31460 - DNA, 706 bp, Homo sapiens; identical to SEQ ID NO: 25343
  chr19:17008145-17008851
  hyper

SEQ ID NO: 31461 - DNA, 201 bp, Homo sapiens
  chr19:17362421-17362622
  hypo
cggcactctgagaccgtctggctcgccccttctgagccacctgttccagctccctgcgcagagactgcagctgctcctgcaggtccagtgtcctgttgcgaaggagaagagagggggctcacagccccagccgatcctgtttcccaggtctcctcctacccacctgcccacagtattgtcatgtaaacacacctgtacacc

SEQ ID NO: 31462 - DNA, 67 bp, Homo sapiens; identical to SEQ ID NO: 13695
  chr19:17397256-17397323
  hypo

SEQ ID NO: 31463 - DNA, 1006 bp, Homo sapiens; identical to SEQ ID NO: 30049
  chr19:17716524-17717530
  binary

SEQ ID NO: 31464 - DNA, 539 bp, Homo sapiens
  chr19:17790882-17791421
  hyper
cgagagtggcgagggggttctcaggagggaagggtgttcgcggtgagggaggggattcgggaagggggatgggcgcagaggggagggtggtatcgggggagaggcttggaggaggaagggggctcagagaaggaacccagtctctctccctgtcttccccggtcagtaaatggtccctgagtcaccgtcttcgtcgtcacatcccgccacctccccgcctgcgccgggttgctgtatcagggtcagcggggcggaagcgccacccttccccagcgggcttcgggtcacacgcatgaggctatttatagcgtgggcgcgcggagggcgtgggaggcgcgccggcggacaggggggcggggatgaggggggtgcccactgctgtccccagcgacgagcgggtgaagacaccgcgtcatgcggcctcaaaggtctttggggcccccagaagcgctgactgatgaatgtagtggccgtacccggggaggctgaggcaggagttcaggctgcgggacacccctgcagcctggcttcgcgcctcc

SEQ ID NO: 31465 - DNA, 618 bp, Homo sapiens; identical to SEQ ID NO: 25345
  chr19:17958343-17958961
  hyper

SEQ ID NO: 31466 - DNA, 537 bp, Homo sapiens
  chr19:1799819-1800356
  hypo
cggttccctggttcagattcgggcggaggtgctgggcatggggccagacgtggctctggttctcaggcaccctgagccccttgaagatcgaggacccagctgggagctcaggtgtcggggccgcaccatagacgcggccgctgatgcagcacttgttgaaggtcaagatgttctgcgtgagcgtgcccgtcttgtccgagaagatgtattccacctggcccaggtggtcgttgaggctggtgctgcgggccttggcaggcacgtcctgcggcttgtagtacatctgcacgtcccagtcgatgaagacgctgttccccaggtagatgaactcggacctgcagaggcactcagggtcacggtcagccccgcctgctgtgtgccatccccatgcctccccgttccgcgtttgcaccggggacgcagccggcggagactcacaggatgaacatggacatcgggatggtgacgctgagcaggatgaggaagctccagaagacgaagaaggactctgcggccacgctgctcccatgcaccccc

SEQ ID NO: 31467 - DNA, 189 bp, Homo sapiens; identical to SEQ ID NO: 28802
  chr19:18331006-18331195
  hypo

SEQ ID NO: 31468 - DNA, 617 bp, Homo sapiens; identical to SEQ ID NO: 24142
  chr19:1856948-1857565
  hyper

SEQ ID NO: 31469 - DNA, 237 bp, Homo sapiens; identical to SEQ ID NO: 25350
  chr19:18807947-18808184
  hypo

SEQ ID NO: 31470 - DNA, 199 bp, Homo sapiens
  chr19:18811469-18811668
  hyper
cgcccggaaatctctgggaggaagtatcagcacagcctagcagggcgcctgggactggctctgtgggctggccgtccctctggctggggacacggggaggccgagcgtgtccgcaaagacacgcgagctgtccacctttctgggctgcaggggtctgcagaacctcggaacctcggaggggctctctgtctgcttcagc

SEQ ID NO: 31471 - DNA, 593 bp, Homo sapiens; identical to SEQ ID NO: 23550
  chr19:18989674-18990267
  hypo

SEQ ID NO: 31472 - DNA, 1111 bp, Homo sapiens; identical to SEQ ID NO: 22826
  chr19:1978023-1979134
  binary

SEQ ID NO: 31473 - DNA, 728 bp, Homo sapiens; identical to SEQ ID NO: 13703
  chr19:2164931-2165659
  binary

SEQ ID NO: 31474 - DNA, 163 bp, Homo sapiens
  chr19:2360648-2360811
  hypo
cgcaggtgcggcgtgtagatgcggcaggggttgtgtggacgcaggtgtggtgtgtagatgcggcgggggttatgtggacgcaggtgtggcgtgtggatgcggccggggttgtgtggactcaggtgtggtgtgtagatgcacgtagggttgtgtggacgcagcc

SEQ ID NO: 31475 - DNA, 196 bp, Homo sapiens; identical to SEQ ID NO: 13705
  chr19:29993099-29993295
  hypo

SEQ ID NO: 31476 - DNA, 305 bp, Homo sapiens
  chr19:30186010-30186315
  hypo
cgccacccagacaccgaacacccagacacctaacacacagacacctgacacccagacacctggacacctgacacccggacacccagactacctgacacccggacacctggacacccgatcacccagacacctgatacccagatacccggacacccagacacctgacacccagatactgagacacctgacacccagacacctgacacccagacatccagacacccggacacctgacacccagacacctgacacccggacacctggacacccggacaccgagacacctgacacccagacactgagac

SEQ ID NO: 31477 - DNA, 132 bp, Homo sapiens
  chr19:30252186-30252318
  hypo
cggcactgggactgcctctcaggagagtcccgcagagcagtctggggaggtgcttggcatggctgccggcacctgctcaccgtcatcacacggggacttagtcttaagaaaaggggactggaggtcgggcac

SEQ ID NO: 31478 - DNA, 219 bp, Homo sapiens
  chr19:31217770-31217989
  hypo
cgctgctgagcgcttaacgacaaccagccttctccccagaaccggctgtgagcacagctaagaatagacctgggccaggacggtggagtctctctgtgcgagagttctctgcgggaatattctaaactccgcagtggagccggctctgcctcagccttgccgagcagggggccaagcgtgtctgagtcagttcagctgctgtaacaaagcaccgtgatc

SEQ ID NO: 31479 - DNA, 184 bp, Homo sapiens; identical to SEQ ID NO: 13710
  chr19:31640397-31640581
  hypo

SEQ ID NO: 31480 - DNA, 328 bp, Homo sapiens
  chr19:32083463-32083791
  hypo
cgcttgccggggagtcctgctgccttccgaggtgtgaagggaaggcatgcactgtgcatatgctgtaccatacagttttgcctacaactgcttgtagcttcattgtagctgtgaatgctccgttcctctccttttcacccctgaagattcgcgaacatgcaggattgagctgtgcgaggcatagcattccccacatggtagacgaaggcggatgtgggtctgatggctctactgccgtccacccgggaggatggacgtgtgttccgggatatcagagcttgcggctgaccagcccacatgtccatgcagccctcccgctggctgtgtc

SEQ ID NO: 31481 - DNA, 93 bp, Homo sapiens; identical to SEQ ID NO: 13713
  chr19:32198266-32198359
  hypo

SEQ ID NO: 31482 - DNA, 506 bp, Homo sapiens
  chr19:32364178-32364684
  hypo
cgtgtgtgaaagtgcacgtggtactatgattttttgtaccccgtagtgccttctttatgcctctccgattctgttttgaggaaacagaagctctgagaaggcaaggggcttgcccgagttcacaagaatagcaacttccagacctgggacttgaacctaggtctctagattgcatgccacggttgacgcagccctatggccccgggcatgcgcttctcttcttcctacatgaaagccctccttacaagccttccttgtaccctatggctccaggatctggccccttcacctccccagagtcagagttaccacggtgcagtggcgcaccagtgggcctccggcaatgctgctcccgcttcccaccttccagtggcacttaccagagacacccagtggtaagaattaactggggaatggccctgcccctgctcaggccagctaaacagaagcatttagagcagcaaaaagggcgctttcgttctgaagaccccgcaggcccttccaac

SEQ ID NO: 31483 - DNA, 761 bp, Homo sapiens; identical to SEQ ID NO: 24156
  chr19:3360723-3361484
  binary

SEQ ID NO: 31484 - DNA, 349 bp, Homo sapiens
  chr19:35531752-35532101
  hyper
cggtggaggtgggtttggctgggcacagcgggcacgtgtgggtaagcgggtggggccggttgtgcgggtggcctatctggggcaagcagccgaggccgactgtgtccggcgtgtggttgagcacgggcaggtgtctggcggtgaccctgcacgtctggtgtttacctggccctgggtctgacgtgggccgcgcctggctgctggcgggacagtgtgttatctgcctgcggacgcttccggccacttggcctgggcctctgcccttagcgctgtgttttcccggccaagccccccatcccccctatctagtgctaggactttctggctccagaggtcaccgcggccgggc

SEQ ID NO: 31485 - DNA, 226 bp, Homo sapiens; identical to SEQ ID NO: 25361
  chr19:36222366-36222592
  hypo

SEQ ID NO: 31486 - DNA, 1065 bp, Homo sapiens; identical to SEQ ID NO: 27784
  chr19:37095634-37096699
  hyper

SEQ ID NO: 31487 - DNA, 799 bp, Homo sapiens; identical to SEQ ID NO: 23153
  chr19:37463952-37464751
  hyper

SEQ ID NO: 31488 - DNA, 286 bp, Homo sapiens
  chr19:3747832-3748118
  hypo
cggcctggccgacagctccgctgacctcagctgcgacagccgcgttaacagcgactacgagacggacggcgagggcggcgcgtacacggatggcgagggctacacagacggcgagggggggccctacacggatgtggatgatgagcccccggctccagccctggcccggtcctcggagcccgtgcaggcagatgagtcccagagcccgagggatcgtgggagaatctcggctcatcagggggcccaggtgcgtcggacatggggggcaggcctgggaagggtctcc

SEQ ID NO: 31489 - DNA, 544 bp, Homo sapiens
  chr19:3777982-3778526
  hypo
cgtctttatcgggcgatcatccttcgcaggtctggggtgtccacgggccgcccagagccccctacgtgggccagcccctgctgtgggcaccaggaggatgacttgcccgcctggaccctccttgggcctggtcagtgcccccacgccgcactctccactctctcggtcctctggggccaagggccccaccgggtggggtcagggctcctggcttcggggcgaggtggagccgtcggcgtcctgccctgagacggaggctggggcacctgcactgcgtagctcccgggccagcttctcggccagtttgcggaagggtggccggcgggcgggctctgcctcccagcagctgctcatgaggacgtgcacggggcctggacagccctcggggggttccatgcggtaccccttctccacggcctccgacacctctttcagtgactgcggacagcaggcgtgggcaggggtcagggccacagcctctggacctgcccggaacccagtgcctccctgggacccccgctcaccattttagggtacggagccc

SEQ ID NO: 31490 - DNA, 482 bp, Homo sapiens
  chr19:3778991-3779473
  hypo
cgtgtttgagagcctcgggcgccgtccacttgacgggcagccggcttgagtctagccccttccgctcggctttggccaggccaaagtcgctgaccttggccaccaggtcctctgagaccaggatgttgcgggcggccaggtcgcggtgcacaagcttcttgctctccaggtactccatgccctcggccacgtgcctgggggtagtagggggcagtgggggctcaggtgccaggatgcccacattcagggctcagaaagctcggggtgcctggggccacaagctcacaaagcctccctgccccgtgcctcagtttccccttgatggatcttggaatctgcgccccgacgaccccagtgccgcagcaccctgagagtcccacttacagagaaaactgcaggagctgagcggtgttcacgagggctcgaccccgggtccgcagaaagttcaccaggttgccctgttgggggtgggagatggccgc

SEQ ID NO: 31491 - DNA, 740 bp, Homo sapiens; identical to SEQ ID NO: 22835
  chr19:38182720-38183460
  binary

SEQ ID NO: 31492 - DNA, 259 bp, Homo sapiens
  chr19:38828044-38828303
  hypo
cgagagtggtgtgagcgacagcttctttgagcaagagcccgtggacacagtgagcagcttgtttcacatgctggtggactcacccatcgacccgagcgaggtgaggggaccagggtcaagtgaaccagagggattttgaacccgcactccactcatttctggacgtgtggcctaacctctctttgcagaaatacctgggcttcccttactacctgaagatcaactactcctgcgaggaaaaggtgagtgggtgcagcac

SEQ ID NO: 31493 - DNA, 202 bp, Homo sapiens; identical to SEQ ID NO: 28857
  chr19:38905516-38905718
  hypo

SEQ ID NO: 31494 - DNA, 116 bp, Homo sapiens; identical to SEQ ID NO: 23558
  chr19:39329516-39329632
  hypo

SEQ ID NO: 31495 - DNA, 481 bp, Homo sapiens; identical to SEQ ID NO: 25370
  chr19:403382-403863
  hypo

SEQ ID NO: 31496 - DNA, 423 bp, Homo sapiens; identical to SEQ ID NO: 13728
  chr19:40948768-40949191
  hyper

SEQ ID NO: 31497 - DNA, 207 bp, Homo sapiens; identical to SEQ ID NO: 13729
  chr19:41921100-41921307
  hypo

SEQ ID NO: 31498 - DNA, 441 bp, Homo sapiens; identical to SEQ ID NO: 22838
  chr19:42028298-42028739
  binary

SEQ ID NO: 31499 - DNA, 899 bp, Homo sapiens; identical to SEQ ID NO: 27796
  chr19:42408218-42409117
  hypo

SEQ ID NO: 31500 - DNA, 274 bp, Homo sapiens
  chr19:42906796-42907070
  hypo
cgggtgccagcagcggcgacatgaaggggttcttgactatgggtgaggagtagaggggcatctgtgtggcaccctggctggagcgtcgggggtggaaaccctcggggaaggcggcacggacgcccaggcctctgtccatggggctcagctcatttttggcctcagcctcttcccctgcatcctcaggtggtaataagaagttgacatcggagggtgtggaggggctaagtgtctcagctgacagcgacatctcgggggtgtccgacgacgtctc

SEQ ID NO: 31501 - DNA, 793 bp, Homo sapiens; identical to SEQ ID NO: 30074
  chr19:42927599-42928392
  binary

SEQ ID NO: 31502 - DNA, 500 bp, Homo sapiens
  chr19:44030452-44030952
  hyper
cggagcagccccgagcctgtaatgtggtccgcgtggcagtgggtattcactgggagagagaggagggacaggtccggagggtacagaaaggacctgggagtcccagcccagatccttctccctcagactcaggagttctgggccccagcttcccattccactgacgctgcagcccagccccgctgggatccatgagtttggtccccggactgaccagcatagagcagccgcagccccagctccttgatcagctgggcatcccgaggcgctgtttccaggactgggtcgatcagaacggcctcccgggactctctgtcacccagcaggtacgtgaaggtgcagctcacaggctcgaacatctgggaacgggggacccaggtgagggcgcagaaccggacttccacccactggaggccaagtagtccagactgaccctatcctcttcctaagatccagaagcagaaaccccagcccactctttccccgggagtcgggagtcc

SEQ ID NO: 31503 - DNA, 501 bp, Homo sapiens; identical to SEQ ID NO: 23159
  chr19:44711530-44712031
  hyper

SEQ ID NO: 31504 - DNA, 369 bp, Homo sapiens; identical to SEQ ID NO: 24170
  chr19:4548007-4548376
  hypo

SEQ ID NO: 31505 - DNA, 772 bp, Homo sapiens; identical to SEQ ID NO: 25382
  chr19:45655296-45656068
  hyper

SEQ ID NO: 31506 - DNA, 338 bp, Homo sapiens
  chr19:45810004-45810342
  hypo
cgcctacttctgggcggggatcatgtcgtcaatggactggcctttctccaacttcttctccatttccaccatgagcttcacaccatccaccaccagctgcacctgttctacttcggacgagcccagccgatcagcgttggacacgtcaaatactgagcccacggcagctgtgtccacgccacctgtgggagcaagggacaggggcgtgaagaggcagcgaaggtgcagaggggctgggacgtggcccccgtgccaaatgcaacagccgcatgtagtgagtgcctactgtgtaacaggttacctgcacacaggtaatgcctgttcattcgtgagctcac

SEQ ID NO: 31507 - DNA, 602 bp, Homo sapiens; identical to SEQ ID NO: 25385
  chr19:46379840-46380442
  hyper

SEQ ID NO: 31508 - DNA, 158 bp, Homo sapiens
  chr19:46404499-46404657
  hypo
cgcaggcacacagcctactctgaagacactcacctgcacgtcggtcctcccggcggtcttccgacaacacgtagcgctgagggcaggcgcttgggggcggcggctgtgaagagggggccgcagggggctcctccgccccagcacctgcccccggcgcc

SEQ ID NO: 31509 - DNA, 575 bp, Homo sapiens; identical to SEQ ID NO: 25387
  chr19:46916506-46917081
  hyper

SEQ ID NO: 31510 - DNA, 826 bp, Homo sapiens
  chr19:46996430-46997256
  hyper
cgcaggccccgagagcgccacgaagagccctgctcgcctctgcaggtgcccggcgtccacacacacaccccctccgggggcaacccgggcccccaatcctggtccacttggcgcgtccccatctcggccctgcgctgctgcctcgggcgcccacttctctttcctcctcccatccgggcttcctccgtcgggatcgctggcgcccccggcctgcgagggcccgagaggggaacgtgacgctggcaaaacgcggcccgggcgcgctgtgaagcgaggagattgcgtctgcggaggacaggaagaggggaggggagggcgggggccacaggcgggcgggtgccctgcggggcctgctcgcagcctgggcggcttcttggggggccactagcggcatttagggggcagcctccggccccgacgggccttcttcccgcgcgcggccttggatccagtgggcgcctggcccttggcctcgcctgccctggcatgggccccggcgcccgcgctccccttcttcttcctgcttcctgcggcgtcgtcctgggccgagccccggctcccggctttcttctcgggagtgacgccccggcctcggcctcggccgcccgcgcgggttttgcgggccccggaagcggtgggaggcgcgccggccggagtcaggcccctgggggccgtgcgcgccctcttggcccggggcttcctggatgccctgtcctccggctccgacgcctcgctctcggtgtcctccgactcctcctcggactgttcgtccgaagcctcctccgacccctcgttggaccccatgttctcccgggcggccaggagc

SEQ ID NO: 31511 - DNA, 242 bp, Homo sapiens; identical to SEQ ID NO: 7124
  chr19:48229040-48229282
  binary

SEQ ID NO: 31512 - DNA, 246 bp, Homo sapiens; identical to SEQ ID NO: 24181
  chr19:485134-485380
  hypo

SEQ ID NO: 31513 - DNA, 103 bp, Homo sapiens
  chr19:49244884-49244987
  hyper
cggggccagaggccacgcccccggcaggaagccacaccccgtgccccgaaaccacacccaacaggaagtcacgcccccatcgccaaggccacgcccccgccgc

SEQ ID NO: 31514 - DNA, 210 bp, Homo sapiens
  chr19:50129561-50129771
  hypo
cgttctcgcccccgccccaccccctgctcccactaccctttgtctcttgctctttcttgggcttctgtacaactcaacttgtatacactgtgtacacacaaccagccaaacgaaaacccaacggcaaacactttaccggcaggctggagtgcctctgtcctgcggcgctggagtgggtggcagtggtagcaggggcagaggttctggaac

SEQ ID NO: 31515 - DNA, 116 bp, Homo sapiens
  chr19:50297019-50297135
  hypo
cgaaggcttcctgggggcggcgatcccagaattgagacttagaatacacatgcgcatctcctgggcagtcaggaagaggcctggattcgcaggcaaagagaagaacacaccagctc

SEQ ID NO: 31516 - DNA, 181 bp, Homo sapiens; identical to SEQ ID NO: 24184
  chr19:50320022-50320203
  hypo

SEQ ID NO: 31517 - DNA, 576 bp, Homo sapiens
  chr19:50352994-50353570
  hypo
cgggagcccctgggcaggaaaacatggacaggcctacgggttcttctgccatttcactggccactcctccgtgtcctttgctggttgcttctcattgtcgtgactgctaaagggatgagtgtcccagtctctttgtgagctcatccagtctccattcaaacactgatgactcccgaatttctctctccaggctatgacatcaatatctatctacattgtttagtcaacatccgaaacagaagtagggactccgtctctaacctcctacagctgtgtctatttctcctctctaccttcactcgactccgcccacactggctcccttttattccttctactttcaggatttgtctttgctgttctgtcctctttgcacacttttccagccatctggaatggcaggttgctcacaggtcgttttcttgacttcccttgcttgctaactttacctcgctatggtcatatcccatcgccctgtggatgtgcgctagttaacacttagcacagcctgtgattatgtctctccccagtggaccgtggggcctgtgagggacgtggtctgattcggtcgtcgcc

SEQ ID NO: 31518 - DNA, 441 bp, Homo sapiens; identical to SEQ ID NO: 25405
  chr19:50364788-50365229
  hypo

SEQ ID NO: 31519 - DNA, 419 bp, Homo sapiens; identical to SEQ ID NO: 25406
  chr19:5037576-5037995
  hypo

SEQ ID NO: 31520 - DNA, 77 bp, Homo sapiens; identical to SEQ ID NO: 11402
  chr19:51111319-51111396
  binary

SEQ ID NO: 31521 - DNA, 837 bp, Homo sapiens; identical to SEQ ID NO: 24189
  chr19:549193-550030
  hypo

SEQ ID NO: 31522 - DNA, 108 bp, Homo sapiens; identical to SEQ ID NO: 13750
  chr19:55976235-55976343
  hypo

SEQ ID NO: 31523 - DNA, 269 bp, Homo sapiens; identical to SEQ ID NO: 24192
  chr19:56688223-56688492
  hypo

SEQ ID NO: 31524 - DNA, 828 bp, Homo sapiens; identical to SEQ ID NO: 22847
  chr19:56904526-56905354
  binary

SEQ ID NO: 31525 - DNA, 461 bp, Homo sapiens; identical to SEQ ID NO: 13752
  chr19:57181884-57182345
  hypo

SEQ ID NO: 31526 - DNA, 194 bp, Homo sapiens
  chr19:5759620-5759814
  hypo
cgggcgcctataatcccagctactcagggagatatttgcacacctgtgctcacagcagcgtgattcacaacagtcaaaaggcaaaaatcaacccaccggtccatcaccagatgaaaggatgaacacagcgtggtccatccgcacatcgcaatatgactcagacttaagaaggaagggagtcccgggccgggcgc

SEQ ID NO: 31527 - DNA, 846 bp, Homo sapiens; identical to SEQ ID NO: 24194
  chr19:58219927-58220773
  hyper

SEQ ID NO: 31528 - DNA, 881 bp, Homo sapiens; identical to SEQ ID NO: 22852
  chr19:58238341-58239222
  binary

SEQ ID NO: 31529 - DNA, 702 bp, Homo sapiens
  chr19:58661628-58662330
  binary
cgagactcaaggggaagcggctcagcccactggctcacggccgccaattcagccggaggccgacccaagcctacactgcccctcacacctgacagaaaagctgcagactcgggggttacccccggagacggaccaggacacccagcaggcgtggcaaaacagtctctatgggagggcgggctagagatgcgagcgcggaactcacgggtgacgctaaggaaagagcgggggcgtccagaccagccccggagcgacctcgtcctcagaggagtgaccccaatcgccacggagcgtccccacccaccaggagaactacgcccctggccagaccctcgccctagcgggcccgacatgcccaccacccaggtgaaacccacccgcggacgcgcccctcgccgccccacaaggacccggcggacctccacccgccaagacttccctccgcaggaaacggaggcagcgcagggctcagggatgcgtcggcacttacggttggcggccggcggcagccatgttccgggcgattgcgcttgcgcggctgccgggacaaggatgtgcgcgtgcgcggagtccccgagcttcccccgcccaacgctggggcggccgcgggtaccgggttattcattaccctggcgtggacttgcctcggggcggacgcgcaggcatttactttctcctatggtctcctctgatttttaaccc

SEQ ID NO: 31530 - DNA, 102 bp, Homo sapiens; identical to SEQ ID NO: 25416
  chr19:58874823-58874925
  hypo

SEQ ID NO: 31531 - DNA, 777 bp, Homo sapiens
  chr19:58951364-58952141
  binary
cgggaacaccttggctcataaaagcagagtaattagccgggcactatggtgcgtgtgaaggcgcggtgacggtccctgcacccactcccgtgccctggtgtggctccagaggcctgctgtagcccaacccaccagcagcaaaatgaggaccgcaatggcggcgccggaagtcccgcctctcaatgacagctcggacttgccactggtccgagctttcattggctcaaggatccccgccgtctatgacgctatttccctatgcccgtcacgctactgctaggtcgttgccaaggtgattgaggaatggcgtttattgcgtcgctgctcaggcaacgcaaactacattatccagaaggaccctcgcggtgcctcagggctggccattggcagccgaggagacaggcacttccgggcggagtgtaagacgctggccaatcacagcctggcagcgggacttccgtcgtcgtcctcggaccatcactttggcatttctcgattttgtctgcttctgaagggaccgcgttgtcaggcgagggacggaatcttggaggctccctgggcccatggaaacaggagcgaggaaggcacgagagtcggggaagttccgccttcttgacatacaagcgcccccaccgcggcgaatatcgcccctgagcccagtgttcgccccccacaacaccgcaccccccttccccaccctgtgccttagataaagccggcccagtgggaccctcaggttgcaccgcgcggaggtgtccgcggctctcgggagtcgtc

SEQ ID NO: 31532 - DNA, 134 bp, Homo sapiens; identical to SEQ ID NO: 25417
  chr19:58964127-58964261
  hypo

SEQ ID NO: 31533 - DNA, 200 bp, Homo sapiens
  chr19:5960640-5960840
  hypo
cgaagacacttggtgccaggctagtaaggaagggctagaagagagagaaccatttggatgggagaggagtgcgcgctggtgttgagaaccgtgtcggtggatctgcaggtgcacggaagggactgcagctatttgagtaactatgggaggcctgggcaggctgtggtgccaaggtgctgcccggagccttctggacacac

SEQ ID NO: 31534 - DNA, 269 bp, Homo sapiens
  chr19:660994-661263
  hyper
cgtccatgattaaatatttgtcaatcactgttccatgctggctccctggccagcctgtaaattctgtgagggcaaagaccacagcggcctgtcaccacagagttcctttcactacaggaaggccctccccaggcccagtgacagtcggaggaggtcaaggtcctccgtgtccaaggccacggggcgaggaagtggctccaccacaccaggatccagtcctgtgcgggctctaggagcagctaaatgtgcagccgagtcaaggcagtgtc

SEQ ID NO: 31535 - DNA, 585 bp, Homo sapiens
  chr19:661431-662016
  hyper
cgagacccctgggagacagaggagtaaggcaaggctcagtctcagctccccaaccttcgccccacacccgagatttcactttatttgttcctcctgctggggaggggaagccctgtggcttcagtagagaggaaaccacacctctctctttccactcctgggcctggccccgctctcccgccatgccccaactctagcactcgctcctcctctgtgacccagagacaggcggcttctcctgactccctccagccccttcctgggtctctactcccggggaactgcactgcttctggggggcttggacttctcttacgggtcaaagcgtagcaacagccgggcggctacgtacacagcacagtaaatcctcaatgcctgcagcctcttcccctgggcacagggtggggagtccagacccctccacctcctgcggctgctcccctcaagctggccaagcggctcccgactgagccggctctgccactttcccgctgagccaccacgcgcctcagtttccccatctataaagcacgggtggctcgactaaatcaccactttgcacgtcagcctggcgaagggcaacac

SEQ ID NO: 31536 - DNA, 798 bp, Homo sapiens; identical to SEQ ID NO: 28923
  chr19:8576026-8576824
  hypo

SEQ ID NO: 31537 - DNA, 459 bp, Homo sapiens
  chr19:870957-871416
  hypo
cgtgtggattcgggggtcccggggcaggacacggaggaaggagtcctgtgtttggggaccaatgcagggacacacgcacctggcgaggccgtcgagctgcagggtggcagcactgccaggcagcgtgggcgcccggccaaactgcagacgaaggggctgcttgggctgcaggcggctaaccaggccgtcgctggctggcagccagtccaggctggggataagcagctggctgggcagcaggcagcattcatccaccagcgcctcgtccggctcgctcgctgggccctcatcgcgacctgcggagagaggtggcggaagtctcagcacccctgactggggcaccgcccggccacccgggacgtgctgggagcccctccagttcaggagcaccaggtcagggccccagctctgtctgcctggctgggtgaccccggggttctctcaccaggtcggggcccc

SEQ ID NO: 31538 - DNA, 1431 bp, Homo sapiens; identical to SEQ ID NO: 24205
  chr19:883424-884855
  hypo

SEQ ID NO: 31539 - DNA, 161 bp, Homo sapiens
  chr19:891455-891616
  hypo
cgggagacgcagcggagggtctgcgctggcccaggtgagtgatgatgggggcagcaagtggacactagctctctcccgaaggaagagcccgcagacaggcaagcggtggggcggctccctgtagccgaggcggggctgagtgacagggaacacctgtggcc

SEQ ID NO: 31540 - DNA, 645 bp, Homo sapiens; identical to SEQ ID NO: 24214
  chr2:10153562-10154207
  hypo

SEQ ID NO: 31541 - DNA, 384 bp, Homo sapiens; identical to SEQ ID NO: 24217
  chr2:10156251-10156635
  hypo

SEQ ID NO: 31542 - DNA, 255 bp, Homo sapiens; identical to SEQ ID NO: 24218
  chr2:10306818-10307073
  hypo

SEQ ID NO: 31543 - DNA, 188 bp, Homo sapiens; identical to SEQ ID NO: 24219
  chr2:10344656-10344844
  hypo

SEQ ID NO: 31544 - DNA, 737 bp, Homo sapiens
  chr2:105468467-105469204
  binary
cggcaggaaaggaaaacacggggtgctggcaccgactattcaaacgtctgcacctggagatctcagattgattcaatgaaatctgtgttccatcttttatatatacatatacgcatacgtaaatataaaaagcaacctttgggggccgcagaggaaaaaaatccgttctgtttggggtttggttaccaccgcctttggtatctataccttggcaataatggctttgctaaaacctacctacgatggtatctcacccggcaagcaggagctggacaagagcctacataaattctacgcgtctagtgttaatcttgagatcacgcgggggctgcctggctgcggctgggcaggagaactcctgctttcactgagttcacttaactgcgctcggcagaggcacgatacagcgggagagaagggcaggcccgttcacattttaatcggagcgcaccggcggccgctcctcggctgcgtcctgggctgccgctcgggctcgggactgccagatgcaggctctggctgggggcggcgggcgcaagcgggcgcacccgcagctaggggtgcggggtgcacgcacacgcacgctcattaagagccatgtatttattgaatgtccgagttgggttagttcattggaaatccccgaggagggctcaatttgcccttgttttcgttgccactttctcttttttcttggttcgctgaggttcctctgtgcagcgtttccgcttggccgc

SEQ ID NO: 31545 - DNA, 619 bp, Homo sapiens; identical to SEQ ID NO: 25427
  chr2:10588876-10589495
  binary

SEQ ID NO: 31546 - DNA, 758 bp, Homo sapiens
  chr2:107459644-107460402
  hypo
cgtccgcacgcgcgcgcggctccgcagctggcacagcagctgtgccctgctcagcccggcctcccgcttcccgcggaagcgcaccccgtgcttgttggcggtcaggtaatccttcatcgccttctgcaggcgcgggttcagcattttggaagagacgttccccttccagagccggtacaggaaggccctggacatggaggagtacagcctgtcgccgtcgtcgccctcctccaacacgtggctccttctctgcctccggtgcctcttcttcacccgcctcctctggacctgtgcagccggaaaagccccctcccgtgggcctggctccccgggggaagggaatcccaatgtcccctgagtgtggctgtgccaccctggctgaccagcagcaaaaaagtagtcgtcatcctccgggtagaaagcactttgagattttctccccacctgggatgaaaaaaactctttatgttcaaacccatcttgggactgggcccatttctgcaggtctccaggccccgcatgaaaggaaccggctgggtgggcgcggggcagcgcctggcgtgcgtccaggcccccaggcggggagggctcatgtgcggcgcccatgatggcccgctgcttcccctgcaccggcaggagcctcctggtctccaggaaggagagggagctgggtacaggctcagcggggttgctgtcggtgaagtagatgaaaatcagcaaaaagaggagcccccaagcgaatattccgaaaagcattc

SEQ ID NO: 31547 - DNA, 197 bp, Homo sapiens
  chr2:10924942-10925139
  hypo
cgggtgcaccagggctgaggtctgatgggaaggacttgactccaggtgcagagatgcacaggctcaagagagtaaaccaggactgctgcccgcacagcttccctcccgggcactcacctcgccatccctgccgtcccaaggctctctctcaacgatggtagggaaagccccgcctcctacaggtgccgtggagccac

SEQ ID NO: 31548 - DNA, 1127 bp, Homo sapiens; identical to SEQ ID NO: 24222
  chr2:111874622-111875749
  hyper

SEQ ID NO: 31549 - DNA, 639 bp, Homo sapiens; identical to SEQ ID NO: 30109
  chr2:111876426-111877065
  hyper

SEQ ID NO: 31550 - DNA, 900 bp, Homo sapiens; identical to SEQ ID NO: 28932
  chr2:114034594-114035494
  hyper

SEQ ID NO: 31551 - DNA, 88 bp, Homo sapiens; identical to SEQ ID NO: 13773
  chr2:114035830-114035918
  hyper

SEQ ID NO: 31552 - DNA, 1446 bp, Homo sapiens; identical to SEQ ID NO: 23182
  chr2:118981062-118982508
  hyper

SEQ ID NO: 31553 - DNA, 341 bp, Homo sapiens
  chr2:119605278-119605619
  hyper
cgcgtctccgccagcgccgggctgtttttttttttttttttttttttttttttttcaaatctctgacagctcggatctttgcacaaactctctcgcttaaaaaaaaaatcacccaggcacactttttgccttcaaaccggaagcacgtgagtcagggccgcacgtgtgcggagccaatggcgagccgggactcgcgctgacactcgggcctcggcccaatgggcgcgcgcgggactttgcggataaataatccgggggcgtcaaccgctggcggagagggggcgcctcggcgctggccctgtgcgtcgggtccgccctcccccacccgcgcccgcacccgc

SEQ ID NO: 31554 - DNA, 870 bp, Homo sapiens
  chr2:119913874-119914744
  hyper
cggtgtggagaggtgaattttctgtttgctggaattctgctgtgggtggggttttggctgatggacagggaaatctgcacaagtatttcgggtcacaaagaaggacgccccaggaagcccgcgctccctctggcctacctccctggccagggcccggagccctccgcttctaggcactgggaggaggctgtctgaggagggcaggctcccggccctgcctgtccagtctaatcaggtttgcaaagtctgtgccgccgcctcaagggctcgggcgtcccttcctcccttgccgggatggggatggagaccaggagcacagccctgagcgtggtgggtcgcagacgcactgaggccaggagcggggcagggaggacgcagggatttgtcttttccaaaggagatgtcaggaagtgttatgaatcgagagtggcctttgccaaggagccgcgcccgggcggagaccgggcggcctgcagccaccccgcctcgcaccccccgcgcccctaatccgggtacagaagaaagcccgagaacgtgctgtacttgttattattgcctccgtgagccttcccgccatccagcttcacatacacttcgtcccctgaatccaagtgcagcaccacgctgttactggcgtagtcgtagttctggtcggcgtcctgtgcaatggcgctggcccggacctggggacaagcggtgggagcaggtgagccggggcacctcttcccgcgcctttgctcagcccacaccaggcgcgccactcacgggcctcccgcctgctgcttcagggtccacactcccaccccagctccatgttctctctccaacttagtcaactccttccaggtcccccctcctcctcgcgccgac

SEQ ID NO: 31555 - DNA, 590 bp, Homo sapiens; identical to SEQ ID NO: 23568
  chr2:120979888-120980478
  hypo

SEQ ID NO: 31556 - DNA, 215 bp, Homo sapiens
  chr2:121344852-121345067
  hyper
cgaggcttcaggcgcctggaggcagggtgggagggcagggcgcgggggctttgtctgcgcggaaacgccctgcccggcgcccgcacaaaggccgctttgtgcccgcggccggcggaggtgggggccgcgcgtccccggatccccctgccccggcccggcccgcggccccgagggggcgcccgccacttcgccgccgccagcccgtggccccgggc

SEQ ID NO: 31557 - DNA, 271 bp, Homo sapiens
  chr2:121412043-121412314
  hyper
cggggcagcggagggcgcagaggtcaggcagctgcgggagggctcgtgagagccaatgagagcgcggaaggcggcgagcgagccaatggacgcggcggtggggcagggggcggggcctgggcgaggccgggggcggaatgggctgagtgccctgtctgaatgcggggaacgtctgggcctccccgcctggcccgctcttttaccgtcgcgcaggccccgctccaggccagccactggccccaccaagccccgcttcgcagcccgagagagc

SEQ ID NO: 31558 - DNA, 286 bp, Homo sapiens; identical to SEQ ID NO: 26732
  chr2:122104584-122104870
  hypo

SEQ ID NO: 31559 - DNA, 1016 bp, Homo sapiens; identical to SEQ ID NO: 27844
  chr2:127413347-127414363
  binary

SEQ ID NO: 31560 - DNA, 318 bp, Homo sapiens
  chr2:127423018-127423336
  hypo
cgctgggggtcttggaaagcatcccccataggtaagggggaaccaccgattcatgggacagatagatgatcacccagtggcagctcgaagggagattagggcacagataaggctggaggacatcagtgtaaagaggccaccctgtgaggggcccagaagggagccctggagaccctctgggtgcattgatcacctcagatgggggcccaagggatgccgacgcagggcaaagcactacagcagactcggcacaggtgcctggggctgtgcacgccctggcaagcgcccactctgccctgctccgcacctagtgaggac

SEQ ID NO: 31561 - DNA, 291 bp, Homo sapiens; identical to SEQ ID NO: 24226
  chr2:127428888-127429179
  hypo

SEQ ID NO: 31562 - DNA, 321 bp, Homo sapiens; identical to SEQ ID NO: 30113
  chr2:127435214-127435535
  hypo

SEQ ID NO: 31563 - DNA, 355 bp, Homo sapiens
  chr2:127438526-127438881
  hypo
cgggcaggtcagggcggcgggaagggaccttaacagaccttctagtcggcgactttgaagattcttcaagacaatagccagttctgaagattcatccccgtttcttcactgtaaaaataacacgttttttgtagatgacttggaaaatacagacagccatatgttagaagtaaacaaaaccactcctaacccgtctacttcttaaaagccggtacttaacatttgaagcgtatttcttttcatcgctttgttttaaggtttttgtggaatatttttcatcatttctatttagagggtcccgttttcttcacttaacatcaataccctaagcatttcttcctgttgctaagttcac

SEQ ID NO: 31564 - DNA, 199 bp, Homo sapiens; identical to SEQ ID NO: 13786
  chr2:128583664-128583863
  hypo

SEQ ID NO: 31565 - DNA, 190 bp, Homo sapiens
  chr2:130947973-130948163
  hypo
cgagtacagcaggtgctgcagttacggggcacgcccattcctaatcattgtgctttgtgtctcctcagggagaaacaaaggcagcgctgccctcgggggagcattggccctggcggaacgcagcagccgcgaaggatccagccagaggatgccacgccagcccagcgctaccaggctgcccaaggggggc

SEQ ID NO: 31566 - DNA, 1595 bp, Homo sapiens
  chr2:131720732-131722327
  binary
cggtcactgaactcttccacacgctttctaaaatcgtttggcatggactttcctcggccccttaatcaccacagggtgtgtcctgcccgggctgtcaggagggtcgcaggcgcccggtggtccacgctcaccgtgcgcctggctgagcgcagatgagggtcgtgtcccgtctgagcgcgctccccccgccggcgcgcacgcctgcccgccgggtctctgccctgggccgagcggggccacctgcttgcgtcctcgccctggatggcgtgggaggcgccgccaaccgtctgagctggaatccttgcggtgaaaaagtgggcgcccaccagccctcctcaccaccgcggctgcgacgagcctgggcgtcgcctcctaaggatggccctgtcctaacacacgcgtgcggacacaggtggcggcggcgcggccctgcggcaccgaggacgacccggagccccgcgcccgcgcccgccgccgcagccgctccaggcctgcgtgcgcgcgtgcgtgagcgcgtgccgaccgggcccgcgacccgcactggggtcgccgttgaggctcagcgcccgccgggcggccggtagtgggcagcgagctgacgcgctgcgctctgccgggagggcgcctggcctcgctccgagccgcgcgcgccccgcgcctgccaagggtcccagctgccgcggccacagagcccgagcggggggtcggctgagagcctccttaacggagccccatgatgtcagccggcccgcacgcccctcgccctccgactgcgaccccggcccgggctcgcgcgccccgtcccccggcagccccgcggccgccgcaccgccgcccccggcccagccttccccgagcctgtggctggagctcgggcccgcctgcgtgcgggcgcagcaatgccccagcgagtcaagcgggcagacgagtggcgatctcggcactagcagcagcagcagcgccgggctgtccccgggctccgactcggacagcagcggcgtggtgtgtggcggccgcggaggcaacgggggcatgcgcggcgccgtgtcccgctcctggagcctggagagcctgcgctcggccaccgccggtaaggacgccgccatccccgcgccgcacgcgccctccgcgcccgggtctgtgctcttgggaccccccgcccccctcctgcctttccttctcctccctcactttctgcctgtcgtttccatctcctggtcccttccttcccattgcttcgccctgctattccttttctttttctggtttccttctgattcccactgcctgtctctctgatccacgtctaccggtgggccacctgttacagccgggaccttgttggcccccataccagagcgcgctgtcaactgggaaactgattaaggtgagactagaatttggtgcccgatgcgctgtgttcctttccccaaactgttcttgaccagttgcacctgtctggctttacctaccgcagctgcttagcctctgtaaagccaggaggatggaagggggccgctggccgagggtggaacggattgcgccacctggctgtgagtgcgcttggtcctgaccgcaggactgcagctcccagc

SEQ ID NO: 31567 - DNA, 1293 bp, Homo sapiens; identical to SEQ ID NO: 26741
  chr2:145273332-145274625
  binary

SEQ ID NO: 31568 - DNA, 428 bp, Homo sapiens; identical to SEQ ID NO: 30119
  chr2:145277508-145277936
  hyper

SEQ ID NO: 31569 - DNA, 1051 bp, Homo sapiens; identical to SEQ ID NO: 25433
  chr2:145281217-145282268
  binary

SEQ ID NO: 31570 - DNA, 793 bp, Homo sapiens; identical to SEQ ID NO: 22864
  chr2:149632592-149633385
  binary

SEQ ID NO: 31571 - DNA, 1492 bp, Homo sapiens
  chr2:157176852-157178344
  hyper
cgggggggtgtagaacagctgaggaagacgcagggagcagctggggaggaaagggagggacaccgaggaaacaaagttcacccaagtgaatgcgtcctaattgctccaaggctctctccgcaaagtctacgactgcaagccgcaaagtcaaactacgtctccaaaacgcagtgggcagagcaggagggcttgtgtctccattttcgccgcagggcggatcgcggacacaagtcctctccagtaattccgaagcctcgaaataagactatgctgggaggaggggttggggggtgactaataagaaggcgtgggggtgggggtggggagtacgcggcaagaaccctgctttctggaattctcccgccactgtctgcagggcccagagcgcacttcgcggctagggaacaaaattgccgctctcttcgagcgcccccagcgtggggtggggccctgctttcccgcgtcaggaccgccccaccaggcgccctccgacggaagctggacttttcctaaggaaaggcaaagtcaaagtcggaggaaagatctttcttgcggccccagctgtcgctcctaatggtctcggggaacatactaaaggaaaatgactttaaatcacagtcttgccatcctaaatagttatgtgcaatattttggtttctagcaaaatttaaaagtaaaatggggatttccatatgttcattttattattaaaaacgaattactaaaaagtgatgacctgtttggaattcatatcttgctttacgagcagtcagccagtatcgactgaacacaataaatgcaggggtgcgaaacgtgattgctcgggttcgagttctgtcggatgcaccgatctaagcagaacctttcccgaagacttggaattgggtgcgcttttttttttaagttgtggctgagccctatggggaagaagggttaactgggcgtcggctgagaccccaaaccctcttcctcctccatgagactccaaaattgagtcagtcccagcccatagttgcctgggaagcttggaatcctgagaaattccggggtgcggccactatgcaagcattcctattctgacagcggggacaaatggagaggggaccttacaacctcctttggagaagaatatatgagaaactcacttccagacctctattcaatagtgaaaataatactgagaaaaagttttaaaatctccaagaatagatactctcctttccccttccaccttgagggaaacggtctccatttttgacctggatttgagagcatcggggcttgagacaagcgcgtcttccacagagagaggcgaggcccaggcagggagccccccagcctttactctcggcacctcggcgctgccgcgcggcggatacaaaaggaaacggacgagcgtgcgacgcgaggcggggaactggtggctcgaagacgcgcaacacgcgcgatgcctagaagtgctctggtgtcactcccctgtataggacctggc

SEQ ID NO: 31572 - DNA, 741 bp, Homo sapiens; identical to SEQ ID NO: 30125
  chr2:160760627-160761368
  binary

SEQ ID NO: 31573 - DNA, 1024 bp, Homo sapiens
  chr2:162274764-162275788
  binary
cgccaagaaatctcttttggaaaattaaaacttacgaacaacaaaggagcttcaaataacaatgggcaggtcagtggctcaagcgctcgtgttttctctctctctcaccccttcctccctgacatccagttcgtcagtgtaaagcagcatatggaactggatacacgtttctttgcttcattaaaaagacttaaaaattgtatttccaccctccaaatttatattaaatctgtaaagttgttctcattggcaacacctccgtcggcccaattttggagtgcccgaccttcccaagtactaatactgattgattttgagaagaaaccccacaagatctgcaggttgtggaaatctttgttcctccttacaggaggactaggagaagggccctgaggatcgggcggtcggcttcccccttttttccggtgccccggcttatcttcgctcccagaggtgcgaaagccggtctgccccagccagccagccgccagccaggcgagtcccgcggtcagttagcctggaaggcgggctgcaggctgcctccgccggcccgggcgcgcagccgggcgcacacagccacgcgcacagcgaccgcgttaacacgccacccggcgctcccctttcttcccgccggacagatggtggttttacagtccttgcacaagtaccagccccgcctgcatgtggtggaagtgaacgaggacggcacggaggacactagccagcccggccgcgtgcagacgttcactttccctgagactcagttcatcgccgtcaccgcctaccagaacacggatgtaaggagacctaggggctgggggcgaggcgggcggcacagacatctctcccaccctctcacattctcccgccatgcaaggctagggtactagcagcgctaacatcagcaacagctggctccgctgtgcgttttaaggcttagggctcggggcctgcccacggcacctttcctaaataccaagccggtgggaaaaagctttctatttgttttcgtcgctggtcaccc

SEQ ID NO: 31574 - DNA, 846 bp, Homo sapiens
  chr2:162280181-162281027
  binary
cggcctatgacacggccacggacttcgcgggcaacgcggccacgctgctctcttacgcggcggcgggcgtgaaggcgctgccgctgcaggctgcaggctgcactggccgcccgctcggctactacgccgacccgtcgggctggggcgcccgcagtcccccgcagtactgcggcaccaagtcgggctcggtgctgccctgctggcccaacagcgccgcggccgccgcgcgcatggccggcgccaatccctacctgggcgaggaggccgagggcctggccgccgagcgctcgccgctgccgcccggcgccgccgaggacgccaagcccaaggacctgtccgattccagctggatcgagacgccctcctcgatcaagtccatcgactccagcgactcggggatttacgagcaggccaagcggaggcggatctcgccggccgacacgcccgtgtccgagagttcgtccccgctcaagagcgaggtgctggcccagcgggactgcgagaagaactgcgccaaggacattagcggctactatggcttctactcgcacagctaggccgcccctgcccgcccggccccgccgcggcccggacccccagccagcccctcacagctcttccccagctccgcctccccacactcctccttgcgcacccactcattttatttgaccctcgatggccgtctgcagcgaataagtgcaggtctccgagcgtgattttaaccttttttgcacagcagtctctgcaattagctcaccgaccttcaactttgctgtaaaccttttggttttcctacttactcttcttctgtggagttatcctcctacaattcccctccccctc

SEQ ID NO: 31575 - DNA, 709 bp, Homo sapiens; identical to SEQ ID NO: 25435
  chr2:162283380-162284089
  hyper

SEQ ID NO: 31576 - DNA, 384 bp, Homo sapiens
  chr2:162284276-162284660
  hyper
cggcgattcctctccgtaaactcagatttcctcagtttttaacagtgtattttcaaaaagaggacgaaagaagaagacgagcgtgcggctagcactgtattctggctcgtgtcttcccgccactcgcaatccgcgccatcttaactaactttcaatgtccctcggggctgagcgtgccggcggcgggtgctgctcgggctgggagatgctgcggcctgggttctcaaccttccgggtggacgccgcccgtcggggtagacagaggcgggaacaaagcgcgttgcggcggcgggaggcaggccggtcttgcccccacaggctaggctgcagcttggccctggtgcacccgagcccagagcagcggggacgggcgtccgggagctc

SEQ ID NO: 31577 - DNA, 1014 bp, Homo sapiens
  chr2:171567970-171568984
  hyper
cgattcagtgccgcattagcaccggggaaattctgtccccaccctcccagaacctttagtatagcaacgatttaactaggcagatatgggcaactgcaaaattgagtctccttggcaaggagtggggagatccagccgattaagcaacatcttactgtgaaaggccaaagcattaagaatttgctgaaatgatctaaataatatctagatttttaaaaaatctagcttgagaggggtgactctctggttggatttatgccagaggcatgcgtcccttctagctgcaagaaaatgcccgaggcgaggtaccaagcttgggctggaagtagcaacccctgacttaatcccagagcgcgcagagctggtccgtcccctgcgcaagtgtcactgcgggttcacctaccggcctcttcctctcgcaggtggcatgcagtcggcgctcgccgcccgcccgcaaagaaacggcaatgcaaacttcccagcctgggaaccccgctgcttggagagcagctccgctgtgccagccgccgccaggagactggtattcaacctccccgccccccgccacggttaaagtttgctccacattcgcagctcccaccccacccccatctccgccccgaggcaggaggaccacataggagttcctgggtccaccgtgcgcaaacacacccaccaacaaaagaaagcccattaaatcttccctcctgtgaactcgcgccccaacggatacctctttgaactgacccccgcccccgcagcccccgcgctgtctggggcgcgcctggccctcccgggcttactctctcccccacagctgcgcacttttgcagcgcgctcggtctttgatgtctctttacattatggcagagcagccacacgctcttcccgggcgcggggctttgtgtaatggaactgacatttggccttgatacctgtatctcttggtgattacaacaaatttctaaaataaatattgtactttgatctcccagcattgcatttttaatggac

SEQ ID NO: 31578 - DNA, 370 bp, Homo sapiens; identical to SEQ ID NO: 28945
  chr2:171678004-171678374
  hyper

SEQ ID NO: 31579 - DNA, 238 bp, Homo sapiens
  chr2:171678799-171679037
  hyper
cgaccacgctcccctacaggccctgaccctcctctgcccgccccagacctggtccccaggggtcttttcctctggagtccccaatccccaacacccagtggagcgaacgccgggtgccctgcctgggcgcagaagcgggaggaaagcgcccccgcgcggcaaccccgccttcctagccctgcgcgcaagcagctcccacccggtgccgtgcactctgcctgcgcgtcccaaaggtcgc

SEQ ID NO: 31580 - DNA, 77 bp, Homo sapiens
  chr2:172411075-172411152
  hypo
cgtaaatacgcttggccttctgatcctggtgttcggggccctcattttttggatagtcaccagaccgcaatggaaac

SEQ ID NO: 31581 - DNA, 889 bp, Homo sapiens
  chr2:172947590-172948479
  hyper
cgccagcggctcggcatcagagggcccgcgctcagtgctcctccctagacctttctgagctaagaaataattccggagtgtagccatctcttgctcacacacaacccgcttctaaattaagcaaggctctgaaacagtatcccgaggggctcatgccggacttttgttccaagaaggcaaccaggtcccctgtgctaccgcaaaagtctttgatccttttccagctgtggacacagagcacccaagagactgtcgcgatgtgcggccgtctctccccttcccccaccttgcaagtctctggaatacactgtccctaggcggcccggccgtcgggtttcctcacgccttgccctgagctccgggaattaccaattccgctttccccggtcccaaccccgaccccgcgcccgccgcggcgatcacttacttgggcaaggccctcagggcacgcgcgagagacctggggcccggcagtatccgagcgactgtgctgggcacacggcgtggcactccataccctaaaacaggcactaggaaggagcaattaaaaccacaagtgcgacacagaaatcaggacgagccgagcggctcccggagttgcctggtggcggaatcattagctggctgttgctacaaagcctcaccgtgtggttcggtgattaagaaaaaaaaaatcttttaaacgttggcaaacccgttattggtttggcgtattgggttttttttgcttttgcttttctttttgctccaaccactctgcctgaaatatttctgcccccagcattgtgcccttaaaccaaaggagaggaattctgcgggcagcagcagctggtacagaagttaaaaaaaaagagaaaccccctctactaatatctgtaacgacagcacc

SEQ ID NO: 31582 - DNA, 1969 bp, Homo sapiens
  chr2:172964958-172966927
  hyper
cgccagacaggctcacccggaggggagggaaggcaagtccgaggcggggctcgaaacagccgagacccggggctcaggtcagaaatgcggccttttagggaggcctttgccaagctgctgtccggttcccccgagagaggggcccgtttggtggccccgggagtgagcagggcctgagacgggccactgcaggtcgcagcctgcaggagaggtgggtggcggcagcgggccgggaggagggaaccccggctcggggtaagcaatgaggataagtggtctctgctctcagtctctggcgagttctccctggggttagaaaatcgtccccgcgctcaccggggcgcccccgccgccgtgatggtggtggtggtgatgcggctgcggggtctgagtggggtgcagcagcggcgccgtggcctgcaggtgtgaggcggatcccgaggtctggtggtaccaggggtagttgcccagaaaagccgaggccgcgctgctcgggctggagcccgagctgccggcgccgctgccgccactgcccggaccaccgccgcccgccatccgctgcggcacaccaaagtcccaggaggccggcgctgagactggcggcgaagcacaaggtggagaagcgctggccccagggtgctgctccgaggggatctcaccacttttccacatcttcttgaacttggaccggcggttctggaaccagattttgacctttgaggaaaaagacctgagcattagtggaggaacctagtcttggggcagtaggggttcgaagaggagaaaaaagaaggcagagaaaaaccgctggctagcggtgggcagcgagcgccctggggagataagaggatcacgggcggcggccttcgaggctctgccggttcctgctccctggggaggtaattgccaaaaggccaggactgctggtgtacgtgcactgtgatgatggtgacagcgggagggtgaggagggccagttatttcacccgcttaatcagtagcgagaggtacgggatttctgtccacccggtccctttccttccctcccacggcggccccttgggggtttccagctttgggcctagaagcttacttagggccgctcgaggcgcaggcctggaaatccttaaaagtacttaaaatgaactttaaaaagcattgtcctaaacccgcctgcttcccagccatctcaggcccgcgctctcctcgcccctgcagggcgcgagccccacctgagtctgggtgaggcccagagaggccgccagctcggctcgctccggcaaggccaagtattgagtcttttggaaacgccgctgaagagccgccagctggaaactggagtagatggtgcggggtttccggactttctttggcttcccgttcactatccgaatttcaggctcaaggtcctccttctctgcaacgataaagaatcgtaagaacagcgcaacccaggggtcctggagttcccgccctcctagagggcccggcgggggggacttggcttgagcaaagaggtgggtgcactgaactgtggcgccacgggcaggcgcaacttcgcagcgtgcgatcggagccgccaccgaccccgggagctgtaccctccagggaagggggagacaagtgcacacccaagagaaagaagctggtggcaaggagatgcccttatgaggcaggcagagcacgcccacttggctcttgaggccaccaggtcctaccaaaggagagagggacgtaaccggcgacctgcggcagattggaggctggggagggtaaagggcacaagcgggcggtgagcaggcagcgtgaaaatccagagctttcgaaggccccccgccccaaacacgtttacccatccatcccattaactagaccgactcggcactcttgacttcagcgttatgcataccaggctcgttgttggctggggacgaactggttccatagggagcgtaggaggtgtaggcggc

SEQ ID NO: 31583 - DNA, 820 bp, Homo sapiens; identical to SEQ ID NO: 23189
  chr2:173099596-173100416
  hyper

SEQ ID NO: 31584 - DNA, 1724 bp, Homo sapiens
  chr2:175190730-175192454
  hyper
cgtccgacttgtccgggaatggagcagagaaagaggaaccagaagaaagagaaactcgcgacaacagagttgccgaaagagaagtgttggcgcctcaaacttgaggatcagcttcttgggccccactccagggtgtcgcgggggtcgggttctttccgccgccccccgaaagattctcagctaaccctttccccgccgagaccaagaggccctcactctgacaccactccgggagccaagctactgtaaggagctgataccacccctcgccggcgcgaaccgcccatctccccagacccgcccaccccctgctgcgaatccctgacgttctagcccggcgaaggtcctcttaaattaggaaacaatagctatttaagaagaagcgcaaataacccgcgctctgcgcgcccaatcgtgggattcttgggagttccccgcgggcaaggaagtctgctgctccccgcagctgcggaggagaggagggagcctgcgtgctggggcagggtgtcgcgaacttggggcaacccacctccagagccccgcccccgctttcccgcctgccggggacctgccgaacgcggaaccaccctccttcctgaggcaaatttgggaggggagaggtccagaagctgtagagtcggggcgccaagcgccagattctgccgctcggaagttgggggcagtccccagtcccgcctcaggcccccgcgctcacagggcgctccgccgagggcgcgggccaggcgcgcggtgtcacctccacgaagtcatttacttgccctgaaggagctggccctcgaccccttggaggatggagattcctcccattccctcctccgcctcccccaggtcggcgaagagacgtggaattgagctggaccgatgattccgcgagctctgtaattatgcacacactgaaatcttcaccgttgacttaagttacttggcgctgcgagggctggggccctgcatattgattaaatgcagcctctatttacctaaacaataaatgtagagattagcaacgttcacttgatcacaataatgggattgacaattaaggggcaatgcatcccagatgtagcggaacctatgggctgcgtgcagcaggcagagggcttctcagagaggggcgctgggcagttgcggcggcggaggtagtgcagagcaggaagcagcgcggaagcacagcgggaggcggagggggacgcccagcctcgtcaaggtcttcggccaccccgcccgggaggctcgaaactggctttggggtacctgaatgcctcgactcccagggagacatcgggagctcggagccactctccctgtggcgatggcacctgcctcaaggccgtctcgcttgctgatgcctggccgggaaggaggatggacgccgctggcatgtgccctggtaagtgtgtctgtttgtcatcagtgtacattctgcatgtggcagcagggcgagggggaggcgcacgtgtctaaagtgcacggagccttcctctacccctatgtatatacccttcagtcaatgttccaagaagcgggtcagggcggagggtatccatctggactctggaagggcgtgggtttgacatcggtaggtgtgacaggaaagtccagcctgtcagagttgggctctacagtggccgaaatcaagaaaggatggacgtgtcggcccagggctggcctgtttccggatatgtcacgggggtgcctcgttcctc

SEQ ID NO: 31585 - DNA, 844 bp, Homo sapiens; identical to SEQ ID NO: 26756
  chr2:175193104-175193948
  hyper

SEQ ID NO: 31586 - DNA, 4831 bp, Homo sapiens
  chr2:175197866-175202697
  binary
cgacccacatagccctccccacccacggagtgcgccaagacgcacccaggctccatcacagggccgagagcagcgccactctggtcgtacttttgggtcaagagatcttgcaaaagaggagagaaaacacgggaggcacagttccacatccttgtcacttgcaccggctccgcgacaactcgtcgtttgcacccgagggtttggggttggtagtttaattttttttttttcctaagaagcagggtgtgggtttagtggggagtgtgctatattaaaaccagtgcccaggtctgcccgagggcgctggtatttctggttcaaaaacagcttctggctaccctggagaagaaagagaaagcggggcccagaaagagaaaaacaagcaggtcagcggttgctgggggactcgaagacgcaccctggtctgcttgaggacgcctcttttcacactgacaaggtccagggaggacttcaggatgcttccagcctgcaaaatgtggaagcgcccacgtgtggcctggtcctccgccctcccgggtgaaagtcctggagagatttctcgggcgcgtccgtgaaagcagggcactaatggggagcctacctcttaaaacagcgcacttgccctacggacgagcctctaggccctggtggtctggaatgggagtgggttggagctgggacaagaaaactccactccaggatgaaacgcgacatgcaaatcttcaccgggttaaacaaacagccgagcaagctgcagcttcagcggaggtggaggtgggggcggacgccgctcgcgccggtctctgtttccaaagttgttacagtgagaaaataagcggcttcgtgcagcgtgttgtatgggctgatgcctcccacccccatgccagcccacagcaaaacccggcagataatcagcacatcccactgtttagtcatatttgacaactgggttaacctggtatctaagcgctggcgaaaccgtacaaagggtgccctcaattaccaccagaagcctctagcgtgagtggcacttgtattaccccccgggtcagaggccagagcgacaattaggaagtcacttacaccgctggggggaaatggcgggatgcagcaggctccaggccctcccaacaaatctgtggatgtagatctgtacagagaggcctatttcgctcctctcggaggagctgtcccttcgcgccccctccccagtataactgtgagagtgaaattgaatctagtggaataaggaattgggtagaagacacacgaaaatgataaaaatcacaagcaagaatgatagatacaagctgaagttgtgttctgtaggcaaaagcctggacacacaaagtgagggctcacatttccgtctccacttgggccctgctggtgcgggctgtgtctgggtgtctcctcccctcctgcctcctttcctacaagtggggagtcgagtaggactgtcagccctaacttgcaacatctcggggtggtttgtgtgtgggggggtgcttgtggctcggtttcattggtacttaaacctggcttggtgcgtgagtgtaaatttttaattgcactgtaatttcttcagtccccagcccgccctcgccccccccccgcaagtatcccccactactcccccccacccccgcggccctagctagctgacttgactggcacgcgccgggagcccgggctcgggcccctcggagcgtctgattggctgcggggcagctccggtctgctctgcctgcgccctcattgggcgagaggcgcagccagcggcacttcaaagcgggtgctcctcgcacttaggctgagtttagccggcgggagcctggagtccgctcggcacgagcgcggggacgcgggagccgcgcgggacccaagcagtttttccgagcagccgccaggctcagccccgctcccagcctcgctgcgcagccagagacctgctatggccacgtctatactcggggtaagtcgcaagcgcggcaacgcatttgcttgttttaaccggagtaatttttcgttatggcttctggggtctgcggctccggagaaactgttgctgctagactgcagcttcagcttctattagcactttccacatttctgggactgatttttccccaagtttttggaacccagaaagatgcctttgcaagaaaaggccttcttaatcaagtcctttttcatttggtttcaaaaaaaagctagaggtttcttttcttcccctcgtgatttataccccatcccccgcattgctttggggattttgttgcaattatgcgacaatggtgtttccagaaaacagtcttaatcgttttgcagtccatctagtcacgctaataaacatttacatttccgcggctccccaattcgcccatgactttgaaatctgtctctggccgcttatcctcggattattgttttcataatcgctgtttttgtgtgtatgtaaactttaaaaccaaacgttttctattaaaaaagaaaagtcaagtcgtagccaccctgggagagctgcaagtttcgcccgtccctggcagctgtttcggccgcctccgccctcacccggtgtttgttgtctctggtctctgtgtttaccttcgcgcttcaccccgaagggcgacttggggtcttctgggagatgagccggtttacggcgacaacccaagtccggttgtaggcagggttgcagcggggaacacggaggcatctttgatttatagcctcagcgaagtgcaactttccggcgcctggaccttcgcccgggtgatcgcccctgctccgcgcccggtgcggcgactcctccgcgggcgcgtggggaggaggcgcgaggcggggagccaggaccccccgggagcagccgcaggggacgaggctgctcacgggtgcactttgtttcttcccccacttcctcttgccctcctccttcttgctccctcccccatcccacccactctaggaagagccgcgcttcggaacgaccccgttggccatgctggcggcgacctgcaacaagatcggcaacacgagcccgctgacgacgctgccagagtcgagcgccttcgccaaaggcggctttcacccctggaagcgctcctcgtccagctgcaacctcggctccagcctctcgggcttcgcggtggccaccgggggccgtggctcgggcggcctggcgggcggctcgggcgccgccaacagcgccttctgcctggcctccacgtcgcccacgtcgtccgccttcagcagcgactacggcggcctcttctccaactcggcggctgccgcggcggcagcggccggggtgtccccgcaggaggcgggtggccagtcggccttcatttccaaggtgcacacgacggcagccgacgggctgtacccgcgcgtgggcatggcgcacccgtacgagtcctggtacaagtcgggcttccattcgacgctggcggccggcgaggtgaccaacggcgcggcgtcgtcgtggtgggacgtgcacagcagcccgggctcgtggctggaagtgcagaaccccgctggggggctccagagctcgctgcactcgggcgccccccaggcctcgctgcactcgcagctgggcacctacaaccccgacttcagctcgctcacgcactccgccttcagctccacgggcctcggctcctccgccgccgccgcctcccacctgctctccaccagccagcacctgctggcccaggacggcttcaagccggtgttgccctcctattcggactccagcgccgccgtggcagccgccgccgccagcgccatgatatcgggcgccgcggctgccgccgccggggggagctcggcacgctctgcccgccgctactcgggccgcgccacctgcgactgccccaactgccaggaggcggagcggctgggcccggccggggcgagcctgcggcgcaagggcctgcacagctgccacattccgggctgcggcaaggtgtacgggaagacgtcgcacctgaaggcgcacctgcgctggcacacgggcgagcggcccttcgtgtgcaactggctcttctgcggcaagcgcttcacgcgctcggacgagctgcagcggcatctgcggactcacacgggcgagaagcgcttcgcctgtccggtgtgcaacaagcgcttcatgcgcagcgaccacctgagcaaacacattaagacgcacaacgggggcggcgggggcaaaaagggcagcgacagtgacacggacgccagcaacctggagacgccccgttccgaatcccccgacctcatcctgcatgactccggcgtcagtgccgcccgggcggcggcagcggcggcggcggcagcggcggcggcggcggcggcggcctccgcgggaggcaaggaagcagcgtctggccccaacgactcttagaggccgggcgagaggcgcgagcacacaagcgagtagagacaccgagaacgaacgagaggttcggagggcgagcgagcgggaggcgggagggcaggggcttcagtgacgcccccagggcccgggctgggcgcgaggtggagccgctcagggctcccgggctgcggttcgcccgctgtgcgaggagctcccctctgccttccgcgcccggataagaatcgaacgcgtggtccggaaacaaaagcgaaccatcctccgacacaaacactttaaaaactgtactcccagacgtacacatacaccggagacctacaaccacaagcacgcacactcgcgcgcgcacacacataccactcgcccaaacttctcgagcgaagagcaatacatagaaaggctccctctttgcccactctccacctccctccaacaccc

SEQ ID NO: 31587 - DNA, 1394 bp, Homo sapiens; identical to SEQ ID NO: 28948
  chr2:175204500-175205894
  hyper

SEQ ID NO: 31588 - DNA, 858 bp, Homo sapiens
  chr2:175206781-175207639
  hyper
cgcagacccctctgactctgcatccgtggctcccggcccgcgaggcccgcgtggactacccggggcccggctggaaccaggccgattcaaacaggccaccaaaccatcccacccccctaccccctcgtgggcaatcagggaggcaagggacccgccgctttcgcagccccaacccgaggcgggccggagcagccttctgcattgccttcgtcctccggcggacaccccagcccgagtggggcgcggggggcggctgggcaggcaggagccgggccggtcgcgcagggcccccgagggcggcgagaagcccccaaattccccgctcgaggcctccccaaagggtgcgcacaccctcctggagcaaaccgaccccttttgtcctctccttttccctttgaaacccaaatctgaaatcgggtaacagttgggggcgttggccgattttctctcctctcagcgtatcgtcctccccctgccgcccctttccctcctcttccagtccactatctccccgaccccagcccgtcttcatactgcgtggagtgacttcctcctcctccatttttgtgccccccacccccagcgcgtatttattgtattttaatttaaaaagcgacaccttcaaaccctgcgcccgaggcggcggaggcgccgtcacccgcagccgcgagagcccggccaaggcgcctgggtgccgggctccctgaactcgcgccggggagaagcagtgcgtttccggggactcgcagccacctttgcggcgggtaactcggctgggtttgtatttgctgttttaatacaaaccccgccgcactgcctatttcaaagatgtgctaattactacttggatagcagggc

SEQ ID NO: 31589 - DNA, 1125 bp, Homo sapiens; identical to SEQ ID NO: 28949
  chr2:175207996-175209121
  hyper

SEQ ID NO: 31590 - DNA, 445 bp, Homo sapiens
  chr2:176940182-176940627
  hyper
cgattgtttcatcaaatgtttcatatttctgagtttggagggcggggatgccagggtaagcttcctccgagcgactaaggagcagcaacaagctctggaatttcctctcggggtggtccgttccaccttaaataacttgggctttttggtcccaaacgcgccctgtagttcaggtttttttgtcctccctgcagcagctgtcaccctgcattactcgcagtcagctaaatgaaacattattctaaacatatgcatcgtaatcagttcggtcacacttacaagaacacgcgttaataaggcaatcaatcaccctggaacaagcaagttgttctgtaacagctcataaacagtgtgtaatgaagaattggaggttaccgtgacatgcgttgatcagataatcaatgtcaaagatgcgatgaatgtcagtaaatgtagttttcatgtc

SEQ ID NO: 31591 - DNA, 1478 bp, Homo sapiens; identical to SEQ ID NO: 30139
  chr2:176944646-176946124
  binary

SEQ ID NO: 31592 - DNA, 899 bp, Homo sapiens
  chr2:176946645-176947544
  hyper
cgttgggcacaatggagcaggggcgagtgctttcagcattggagtcaccattcgggggccttcttagatccgtcaggccggacaaccgttcggattcggtggccgggaaataaataagccaattcctttggtgactaccccccgcggatttccagacccttagctaaatctagccacccagaaaggggaaaggggaaaaagaaacaatcaacccagatgcccccggggaggccagagcaggcatgcactggaattgataccttgatggtggtttcgggcaggttgagtgccgcggccagctcgcaccggcggggccgcgacacatagttctcccggtagaactccttctccaggcgcgcgatctgctcgcgggtgaacgccgtacggtagcgccgcacttgatccgcgccagagccggagccacccagcgccgcgctcccgccgctgcctccgctgcctccatgcaggcttccgaggcctgagcccgacgccgacgtcgtggtgccggcagccgagccgctctctgcgtaccctggcaaacaaacgaccaacagcgcatgagtggctgtaggaccaacagcccggcgctggcgctgcgcgcggatcggggaagccccgtcaggaaggagagtcgctgccggaattgatggggtctgtcatgcttacaaattgctgccgttaatggaatcaataaagtttggggagcccttcataagcaaataatagaaacggaattaggagatttcttttttaataattagaaattttcaaccaaggaggaaaagtggccgagggaaaatgcctacctctgggcgcagtttgggaagctctgggtttcccatggtctggagaccgcagggcagctttttatacggcctctaacctttatctgagtcttc

SEQ ID NO: 31593 - DNA, 988 bp, Homo sapiens
  chr2:176947633-176948621
  hyper
cgctgacctaaacagagacgccggcgaggcttcctccgacttacccagaagaatgccccctccagccctgagggcacaggggcaggggagttcagagtagttgcccagggtacctttcccaaaagcaactcggctgctgactaggggtctaccggctcgctcgggctcttagacacgagcgcagaaacattttctcggactcaggagcgagggcgggtgggcctggtgttccaggctccgcaggcctgagcctggcgggaaagctcaaggagcagaactggaaggcacggtcccagacatgcgtcccgcccccgcccgtgctagctcggtgtagcttgcctgtggagggtctgagaggggaaaaggcaccgggaaaggctggcgggggccgcggaggagcaaagaggatgggactggagagcgcggtgcggccggcgcggttacctttgccattgttttccttaagctgagcggcgccgaggcccccgggggagcgaagcgcggagcagcccacctccacgtcgctgctcatgtcggcctcagcggccgcctctgaataatggcccggcttcttgcggctctcggcggcggaggagatttcggaggagacggtgctttcgctgcccgtgtgctgcaggttgaacaaagtgtctatttcgaatttgcccttggcggggagttctcccagagcgctgtgcaggggggcagacggcaggcgcgggcttaggcgagccgggtgctgcgaattttccagggcctcgagcacagcattgccagccgagttggacaaattggagaatctcttgcccgccgtagggctgtgcagccctctctccatcagaatcatctcttttcttattctttccatcatctcagctttcttaaaaatgtcacagtggccctgctgtcccgtcctaatgataggctgcgcctagggctaattctcattcagccccagcgaacgcctctaaatattattatcgctttc

SEQ ID NO: 31594 - DNA, 965 bp, Homo sapiens
  chr2:176956760-176957725
  binary
cgccgatgcctgtctttcatctgtttaagtctctgccgccagccccaagggcgcttcatgggcattttccgaacggacagcgtgtgtgtataggaagggtctgctccaatgcctcttacctgtgtgaaatgcctttgccgggtaccagtgcacaaggtagggcaaattagctcactcggatttggggtctagaagtcgactaactgagggattcagcaacaggataaaaaaatgggcctgttttcacatcattctgatcatctctgtccttcgtcttcattttgctgtgcaactcggggagccgaggagaggtggcaaaaacagcggttgccgagacaaggcgcaggccttggcgcccgcctcagtcgcagacagggcctgggatgggccgtcgcgcaatcaactcgtgggggtggctgcagcgcgtacgcctgggtcgggggggagggcgggaatgggaggtggaccctgcaaggggcaggagaggggtgggggccggagtgggtgggtccagccaggcctgggccgggagccaggctcccccgcgttcctacccccacgtggccgcgcgcagccaatggcacgcccccggcgggggccctcggggcgggaggcggccccccgaccggcccaggccccctcccaacctgaacttcgtttttataaacgtcccgcgatgagctaacctgttggagggcaggcgggccggaggcgggaggctcacagagggagagagggctagaggaagagggcgggagcgagcgaaccagagagaaaggagaggagggaggaggcgcgccgcgccatggtgtcctgcgcggggccagggccagggccggggccgggccaggccgggccatgagccgcgccgggagctgggacatggacgggctgcgggcagacggcgggggcgccggtggcgccccggcctcttcctcctcctcatcggtggcggcggcggcggc

SEQ ID NO: 31595 - DNA, 536 bp, Homo sapiens
  chr2:176958961-176959497
  hyper
cggtttgagaaactatgataatcaatcaaattaaccattgttgttaagtgcaaataatccttctttaataacaggtaagtgttatgtctatgtacataataaagaccaaacagcatggcattttttaaaaatttcctgcacccctgcaaacgcacacacacacacacacacacacacacacacaatcctcagctaggtgctccgaatatcccagcctaatttttcttgtgcttttgtttgtatcaggggatgtggctctaaatcagccggacatgtgcgtctaccgaagagggaggaagaagagagtgccttacaccaaactgcagcttaaagaactggagaacgagtatgccattaacaaattcattaacaaggacaagcggcggcgtatctcggctgctacgaacctatctgagagacaagtgaccatttggtttcagaaccgaagagtgaaggacaagaaaattgtctccaagctcaaagatactgtctcctgatgtggtccaggttggccacagacagcttagaagccattc

SEQ ID NO: 31596 - DNA, 1667 bp, Homo sapiens
  chr2:176964062-176965729
  hyper
cgccggaccgcgccctctccggataagtcgagaggcgccggttaatggaaaatgcctccgctgcaacttaaagccggtagaagcaagccgggcccagaaagcctgcggaaaacgaatcgcaaagccaatcacgaccaagaagagtcccaggggacacttgggcagagtcaccctcttgcccgatgtccccagctgctgaagccgggcctggaaacccgcagacagttagtcttcgctcaacctgatttggctctgctggcagcctcgtccttcgccatcgaacattgcgggtgttatcataatactctgaagggggggaaaacgggtcggggggatgtaggcggtgctgaaatgaccggctttgaagaacctgcaggcaaagtttcgtccaatcgtctgagcctgtcctcttattcccggttgtaactaaatactgttgcgagcgcagccgaagccctttgttggagatgtgtgagcgcagtctctacagagcgggctatgtgggctcgcttctgaatctgcagtcgccagactctttctacttctccaacctgaggccgaatggcggccagttggccgcgcttccccctatctcctacccgcgcggcgcgctgccctgggccgccacgcccgcctcctgcgcccccgcgcagcctgcgggcgccactgccttcggcggcttctcgcagccctacctggctggctccgggcctctcggcctgcagcccccaacagccaaagacggacccgaagagcaggctaagttctatgcgcccgaagcggccgctgggccagaggagcgcggtcgtacccggccgtccttcgcccccgagtctagcctggctcctgcagtggctgctctcaaagcggccaagtatgactacgctggtgtgggtcgtgccacgccgggctccacgaccctgctccagggggctccctgcgcccctggcttcaaggacgacaccaagggcccgctcaacttgaacatgacagtgcaggcggcgggcgttgcctcttgcctgcgaccttcactgcccgacggtaaacggtgcccatgctccccgggccggtttgggccgggatgggaggtggggttcaagggagagtgtaaggggaggtgaaccgcctgggggcgggcaatagacagagtacgggctgggttgacgtgggttggggctgtgttgcaggcctgccgtggggggcggccccggggagggcccgcaagaagcggaaaccctacacgaagcagcagattgcggagttggagaacgaattcctcgtcaacgaattcatcaacaggcagaaacgcaaggaattgtccaataggctgaacctcagcgaccagcaagtcaaaatctggttccagaacaggcgtatgaagaagaagcgcgtggtgcttcgggagcaggcgctggcgctctactagccgcgcgcgtggccagggccgggttggatctgcccttttggacagaggccttgtttggggagggggatctggggctaaggctaaggcttttccttcggttccttctctgctggccccagaagccaccaagagatttacagaccaggccagttgggcctccttgctttcctcagtccctgagaagcccgtgagaaacgtgcggaagtaccagtgcaactctggctggccttaaggcttccac

SEQ ID NO: 31597 - DNA, 967 bp, Homo sapiens
  chr2:176969114-176970081
  hyper
cgagagctgccagacagtgtctgttcacgttctccagataccaggggcgccctgacaaagttaaggtcaagttagtgtcttatcttgggtgactcaaaatcaccgcatcgcgtcctggcgctgtgcggaaagctctttctcgcggagcggctggctgcgccccgaaggcctggtgcgctccctgcgtttcgggtggggccgcgcaggcaaggacaaggccacagagtcggggtcttcacggtaggttctcgagcgggacgcgcgggtccggaggctgcggttttccctgggtttggggaatgggggtaggaactaggagggagctggggccaaagagccaagcgggctgggactggaatgaaagcgctctgggttgtggagtgggtcggggggcaagggtccgcgctaaggagccgaaaggggccggccgcccccttcccctatgcaccggcgcgccactgcagatggctcaccctcccccgccaaatcgctgctcccgccggagctgccgtcgccatgtcgttgaacttgaatggttcgtcctccccttttccctcttcggcggtcagcaggctccatactgggggcgccgggctgcctgcaccccaccccgtgccgccagtagagagaaggtgcgagaattttgcgaatccccagacacataaagacccgggttgaagtcctcgcagctgccctgggtcctgagctaccgcagggccagtgtgcagcgtccagggagccattttaggagagagatccaggggcgtcgaccacgagcccgaaagggagaggcttgggcctgggatggagatggggaggcagataagtgtgctgggggtctgggttgaggagaagaatgtcagctggaatctgggcgggggtgccagctgcggggagggagcacacaagatgggcagttctagttgggggaggctcgatgccctccagtcgccacagacctatttgc

SEQ ID NO: 31598 - DNA, 835 bp, Homo sapiens
  chr2:176980657-176981492
  hyper
cgagggacgctttcgcggatagtgaactgctggcaaagaattgtctctgggctgaaagctcccagaggtccggccccgcagaggtcagggtgtggttcctctgagagccgaagcctcgtgtagccctccggggcgcataggaacccggagccaggcaggaggaccgagcgggaggacaacgcagggaccaacccatccatggggatccgggcccggccagctgcttggcctcccggccctcgcggccctttttgcctccgccctcctagagacaccttggccgcttcttagccccaagggatctttcctttggacccctggggtgggatgtctcagggcccgcggaatccgactcaccttcccgctgggctgcccgggactaaattaaccagcctgcgcccccacccgcttgtcctggacccggccctcttaagcgcgttctgcctggttgtgtgtggggggaatgcttctgtgcgctggcgccagggcactctggcttccctccccgtccgtgcgtgtccacttggaggcccctagagctgagactttccttccgccggttgggcccaggggccgaagcgggggacgcgagtggggcgggctggccgagcgagccctggagaggcggacaggagggcggcggagagcgctgggccggttgtctccagcgcgcactatcgcgggcgcgtagtagatgtcgctgttgtccgtgcttacccggccggccggccaggctctggagcacgtgacccgagaggaggctgcggctcaaggccattttcaaatctcattggcttggttgtcatgtggtcggcagaggcatccacaattacac

SEQ ID NO: 31599 - DNA, 1457 bp, Homo sapiens
  chr2:176986955-176988412
  hyper
cgtgtgtgtggggatgtgtggggaggggtgggtgtgagtagggagagaggcgaggggagaacagctcccctcgggcgctaggggccgccccgagggcccgcctgcctcgggcgacaccggcctggcgcccccgcggccgctccgtgtgccctggactcgccgcccgcggctcggaagctggagagtcagcgacggggcccgactgcgggaccgagggctgcaagaagaagcgaacaaatagtccccagcgcctcctctggatgcggtcgcgtctgtggtcctggcagccgctgggcgggccaggccaggtcgggccgggccgagccgggcacatggacctgggcctgcgggctctaattgcggcgcttatgttgatgattttttttttaatcacagcagcccccagtttagcggactgatttactcccggtattggtaaatatgatcacgtgggccgcgcgaccaatggtggaggctgcagcctgcgaactagtcggtggctcgggcgccggcggggagctgctcggcggcggacagtgtaatgttgggtgggagtgcgggacgcctcaaaatgtcttccagtggcaccctcagcaactactacgtggactcgcttataggccatgagggcgacgaggtgttcgcggcgcgcttcgggccgccggggccaggcgcgcagggccggcctgcaggtgtggctgatggcccggccgccaccgccgccgagttcgcctcgtgtagttttgcccccagatcggccgtgttctctgcctcgtggtccgcggtgccctcccagcccccggcagcggcggcgatgagcggcctctaccacccgtacgttcccccgccgcccctggccgcctctgcctccgagcccggccgctacgtgcgctcctggatggagccgctgcccggcttcccgggcggtgcgggcggtggcggtggtggtggaggcggcggtccgggccgcggtcccagccctggccccagcggcccagccaacgggcgccactacgggattaagcctgaaacccgagcggccccggcccccgccacggccgcctccaccacctcctcctcctccacttccttatcctcctcctccaaacggactgagtgctccgtggcccgggagtcccaggggagcagcggccccgagttctcgtgcaactcgttcctgcaggagaaggcggcagcggcgacggggggaaccgggcctggggcagggatcggggccgcgactgggacgggcggctcgtcggagccctcagcttgcagcgaccacccgatcccaggctgttcgctgaaggaggaggagaagcagcattcgcagccgcagcagcagcaacttgacccaagtaagtgcaaaagaaattgccccctgatttattgctgaaacctgtaaggctcgaatgtgcaaaactgatagttttactaacctataaaaacgtctagac

SEQ ID NO: 31600 - DNA, 1754 bp, Homo sapiens
  chr2:176993210-176994964
  hyper
cgagaaaggccgagcaggagaggggaaaacacacacacacaacagagaaccattgcatttattggacattgaaacgggagcagagagggaaaggaagtgtgtggggaggcggttggtagggtaaagccagacagctttggagagagctgctaaaatcgggaatattttgtcgattcacactcgactgggccacatgactcgggcaacttttcttcatctctgctcacaaactaggctgagccttctctttctctgctttgggaaaaattcgtaactttgaggcctgcgcgctctctcggcagtaatttcacaggcttggcggaggaagtaggatcgttagcataagatgggccgcctgcagctgcctggaaccggcgcgatctgaacgccggctgggaggctcctggggggaacttgcggtcgtctgccctccgcactcctccgggaaccgcagccggccctggttcgctgcgcgccggggctgagacccgggagccgcgtcctgcccgaggaaatgtcaccctccccagcgcgagccctttttcccgcctcagaacgtttctgtccgctcttctatttactctctcagcaagcctaatgccccctcctgcattcttcagcctccccctgcgcccagggctgacgtctatcaagggtgaaatgatggaaactatattcatgggcatgatttccattaaatatcaattaacctgagagcctcggccaggcttgcggtgcgtcaagggtaaatgtacatctcatttccacagggcccgctcggctggaaaagaaaggctttgatttgctttgataacgccaggatctggggccacactcgcggcttttaattaaaccacttcgatatgccccaactcaaatgcacggtccggtccgtcaacacctcttgtccacgttccctgggctgcacccgcgtgtccagagctgcaaaagccacgggcaacctctgcttttgcagccaggggctcggggaggcagtcatttgctccgcagcctcctgggagtggcctccttggctcccccaagtctaaggctccgccgcggcccctccctgccggctgcgatccgcattcccgcggccccggggcacacggagcccttggcagtgcgtctttatgggccccctttaaggccggcggaggcatctcgggccgggcgcggcgctccgtccgtcggccgtagcgactgaactgcgcgcggatccctccgcggggctcctcgtccccgtcacgctgactttccgtgcagtgctgtggtgcgaaaatgcctcgccggtgcgcaccgggtcggcagcctcggcggcgggggcgagattggcgggaggggggcgcggggggggcgcggtaagaggtggcggcgggcagagggtgttttttttcttttccctccagagccggggtttgtaaaccgaggccagagtgtccccgtgggccgagcgcacttttttcttgtccgggtgcgctcagtcactggtgcctgagaggaaacagtggaggcagcggggcaggtcgcctggggcgtcggcgattatattgcggccgagccggggcgcgccgggaaaggccgggagggcggcggcgcgcgggggctgggcgaggccccgcgacccgcgagggaggcggcgcgaagccgaggcggcgggcgcaagagccgggcatgagcgcccagtagctgagcgcccgcggctgcctggcctcagaagcgacgcgcgagcgcgggcgggcggcagcagcgac

SEQ ID NO: 31601 - DNA, 759 bp, Homo sapiens
  chr2:176994970-176995729
  hyper
cggcggtcccggcggcgagagcagccgccccacaggcccccgcggcagtgcggccgagtcgaggctcgctctctggctgcttagcgccgcccgcccgcccggggccgccgccgctgacgccccaatgagttcgtacttcgtgaacccgctgtactccaagtacaaggcggcggctgcggcggcggcggcggcgggcgaggccatcaatcccacttactacgactgtcacttcgcgcccgaggtcggcggccgtcacgccgccgccgcagcagccctgcagctctatggcaacagcgccgccggcttcccgcacgcgcccccgcaggcgcacgcgcacccgcacccgtccccgccgccctccgggactgggtgcggcggtagggaaggccggggccaggagtacttccaccccggcgggggcagcccggccgctgcctaccaggccgccccccctcctcctccgcatcctccgcctccgccgccacctcccccctgcggcgggattgcctgtcacggggagcccgcgaagttttacggatacgataacttacagagacagccgatttttacgacccagcaagaggccgagctggtacaatatcctgactgtaaatcgtccagtggtaatattggcgaggacccagaccacttaaatcagagctcgtctccttctcaaatgtttccgtggatgagaccacaaggttgggatgcattttttttttaagaagggagagggggagaaatctgctttcatctcac

SEQ ID NO: 31602 - DNA, 953 bp, Homo sapiens; identical to SEQ ID NO: 25441
  chr2:177001081-177002034
  hyper

SEQ ID NO: 31603 - DNA, 240 bp, Homo sapiens
  chr2:177004452-177004692
  hyper
cgtagaagcagtgcgcggtaccttatccgcactgcgcggtgcaagccggccgcacagctcacggtcccgcagcgcccgccacacacccgcgccagaggtccagcgcatgtgcagtgaaatggcctagcccgggaattcgatcggcaaagcacgggtgtgggggcgggggggtgggggggggcgagtggactcgagcaggaagatacacccgatctttccattctccctccgtcaaggctc

SEQ ID NO: 31604 - DNA, 773 bp, Homo sapiens
  chr2:177042769-177043542
  binary
cgtggaccccgtttcagggcgccccgggcccctgcggggaacaatagccgccgcctcctgggcggtctggcgggcgcgcggcacaaacgtccgcgccgccacgtgatgcgcgcgctcgttccgcgctctccgcgcctcagcgagcggccaggctgcgggcggggtgggctggcgctcctgatccacctggaacacttttgcaaagacagacggtgagttaatcaccctaccggctggcggccgcgtcccctctcgcccgcgaggaggactggagaaggggctggggtggaggttttctctgtgtgtgtctagggttgggggcaggagaggttagttctattaagagttcatcaatcacccggtgtgcacttttcgctcgacagcggttcctcctacttcagagcaagtctgggccagctgggatccgaccagaaatcgcaagcggaggagacgcagtagcgcaggctgagcgctaactgaaggcgcgacctgagcccggcgcctgctggggagctgcgcagccaggacagcggtcggcagcacagggcctgggcgcagggcccgccgtcaccacctcacgtcggaagccagcactgctgcccgccagccctgccgcctgccctcggacttcccagggcgcccagggtcctcccaacgcgcctgcacccacacccgcccctgagccacagtgaccttgcattccccgccccctgccacacctcctgcgtgcccgagtgtcacccttaaataccgctctacacccagagagggac

SEQ ID NO: 31605 - DNA, 1368 bp, Homo sapiens
  chr2:182321761-182323129
  binary
cgaaagaactggacggctccccgccgcagtcccactccccgagtttgtggctggcatttgggccacgccgggctgggcggtcacagcgaggggcgcgcagtttggggtcacacagctccgcttctaggccccaaccaccgttaaaaggggaagcccgtgccccatcaggtccgctcttgctgagcccagagccatcccgcgctctgcgggctgggaggcccgggccaggacgcgagtcctgcgcagccgaggttccccagcgccccctgcagccgcgcgtaggcagagacggagcccggccctgcgcctccgcaccacgcccgggaccccacccagcggcccgtacccggagaagcagcgcgagcacccgaagctcccggctggcggcagaaaccgggagtggggccgggcgagtgcgcggcatcccaggccggcccgaacgctccgcccgcggtgggccgacttcccctcctcttccctctctccttcctttagcccgctggcgccggacacgctgcgcctcatctcttggggcgttcttccccgttggccaaccgtcgcatcccgtgcaactttggggtagtggccgtttagtgttgaatgttccccaccgagagcgcatggcttgggaagcgaggcgcgaacccggcccccgaagggccgccgtccgggagacggtgatgctgttgctgtgcctgggggtcccgaccggccgcccctacaacgtggacactgagagcgcgctgctttaccagggcccccacaacacgctgttcggctactcggtcgtgctgcacagccacggggcgaaccgatggtgagtagagttggactgatgcgccctcagcagctcagagcggcgtgagaatggcgccctagggattccctgcccgattcaaactttcctccctcccaaggaggcaggagggaaacgctgcgagagccagctcgctggaaatctgccagggaaactaacttatcttggggcggcagcgccccgggtgcgttatggtgcaaggtcttggagcttcgagtcgggggtggtgggcggaggaggaggtggggaagctgccctgctgcggactgcacatctgtggcgacagggagctcagtgggcagcacagctcacgtctgagcgcacgtgcacgtgtctcgctttaggctcctagtgggtgcgcccactgccaactggctcgccaacgcttcagtgatcaatcccggggcgatttacagatgcaggatcggaaagaatcccggccagacgtgcgaacagctccagctgggtgagttgggtatgggaccaggagttagtgacctcccgaccccccatgtggaccccaccatagggcaagtcctggaaagattcac

SEQ ID NO: 31606 - DNA, 899 bp, Homo sapiens
  chr2:182547214-182548113
  hyper
cgcataggggaggataaaataattcacccaggagcctgggcccaggatttacccctgtactgtctgtatcttcagtgttgggctaaaactcgagggcgtcggagtactagcccttagaagatagtacacagcccgacgtttgcggcagggccaggttaagtactgcccctcacccggcagctgccccgactggcagcacactatgccgcaggcatatgcaactcgtgcctaggctctcatttttccaactttggggagttccggaggagaactggggacggagtgggagaaaggactccagctagcttcgaggtcaggggtagcctagaggtccctctgctaaatccttgtcctcacccccagaaagcagaaacctccagttcgcgacatcctgtgcaatacaggagaattatggtggagtcagatgttcttgagcaagagggacgcccgagtgttttgccagacggagactcaaatgcgtaaagtgcgggaattactagtctgtttcctccctctacccttgataaattcatctctaatcccactgcgcgttgttcgctcaggcctggagatttgtacaaaggaaaggccactccaggatgtttcagagacagggctgaggttgggtctcacggtagctgtccttgggcttcccatcccgcagcgctccgatgtgaccctcctctgcgcggaaaatttcgacccggggcgccggcatcgcgacgctcagccagtgcccgcgaggctcccaggagatgcggggtagtaaggccctaaaaagaggagcctggacacggcctggattgaggtgcgttttgtttggggttgaaggcgcgagaaattggggcgagagaagagagtcagccggatcccggagaggacagagctgaaggcgcggc

SEQ ID NO: 31607 - DNA, 862 bp, Homo sapiens; identical to SEQ ID NO: 23194
  chr2:19550023-19550885
  hyper

SEQ ID NO: 31608 - DNA, 818 bp, Homo sapiens
  chr2:19551135-19551953
  hyper
cggggtggtaggagggggacacgctggcgtccagcagagaaacctggtcctctcaaagagaggacccaaccggtttcctgcgtttaggagggaaattacccatcctgcaatgcctgtaaaataaccgtttatttaatagttaaaaaaaaaaaaaactccagtgataaatgtccgttaccgatggtcagcataaagtgccaatcgcaatataacgcccggctcttggctggctgctccctcgcagtgtcgcggcagcggaggccgggccccctgcagaccccaggcccgaggtccccgtcccgctctcctagtcccggagcccacggccgccagctgagctgcaagagctgggagggggctgccccgcggtccctagggcaggaggctgaagcagatacagggattacacttttgcaggctccgggggtgggggcaggggcgggaggaggaggtgggagctgccagtgctaaggacttcgttgcctctcctctctccactcactctccgcagtcagagttacaagcttatatggtcaaagacaaaaataaaaaagaaaacgtataaaataacaatagaaaaagtaatacttctgggagaggcgccgctgcggctccgcggagctttcgttctttttttaatgcagtttcccttccgccacgtgagtaccgccttttggccaagagtttagccgcgtcctaggggagcagcagggacggtcggggtcgcggccccgggcggggctctgaagtgccgcgtgcgccagggacccaggggacaatgttggagaggtggaaggtcccgagcgagcgcctctccc

SEQ ID NO: 31609 - DNA, 806 bp, Homo sapiens
  chr2:19556333-19557139
  hyper
cggctcctccggctccggtttcccagaccgcggaaccccagggcgaatactttcgatctttaaacacaggatggaaaacccttccccaggctaggcacccattcctcaaacagcttgggcctcaggacctgcgggaaagaataaggggacccgaccacgcacagcagacgcaattcgcgctcgggatcccgagtccctgcgcagtgcgggcactcgcgtccctcgcgcggtggagcgccaatcccaggtctgcggccagtcctatgctgggcattaatgaagtgtgcagagtctattaaagtggtttattcggggctaattgagcgtgagcaagttaactgcttgcattaatgagaacgggagcgaactccacgagtttgcgcctgggggagcccagcagcaacccaagaaaatcagccttgacatcgaatctccaacgagtggtgacaggcgtccggacccccgtgaagaggactgaccggcaccggatacttctatagcattctcccaacaaacgagatctaacgaacccattggcaaggcggtcatccggctgcacttaaatgtccgctgcgtcctcggtgatccattccccaatcttaataaaacagcaattacctcgaggagcctgggatggaacatctacacgccgccggtcgctgctagtcccctccagcgcttctcttccctagggggttgtgaacctgggacacctagccttgcacgtggttttgttccgcagagccaatgcgcagctcttagcctgggtgaaatttaccaaattgtggcaacaaagaaacccttgc

SEQ ID NO: 31610 - DNA, 907 bp, Homo sapiens
  chr2:19561086-19561993
  hyper
cgcaggacacctaagagcaacaagggtactttttaagcgaggttacatgtgtttaggactcgcgaggacgtcacgtttcgaatttggtaaaagtcctcggtagctaggacccaacagttctgccctcctggaaacccaatgaaggtgacaaaactcccatctcattactgggagtccagcgcactccgccaccgcggctgcagcttctgctagctcggagcctgcggactccagccggcgcgaactccgccgcgactctttctggctctctcgctcactgccttcggggcggaaccgcgggcgccggagtggtcccagactcggctgggaccgggcagcctagaagaagggtcccctcagtagagaccaggcctccagctctccgtccggcgctccgctccacaacccgccagtcgatgtgaggtccgtcaagggagcgatccctccgtctgcccgggcttccgggctgtggaccgcactgaacccagtcccgcagcaagccctgctgccgccttttcctgggcacgcctgcggtggtgacggcccgctgctcatgtctccacgccaaaccccagcccctctcccgattcctgctccttggtaaagcgccccagcctgtcttcggagtgaaaattgagcagcttccagaaaattaactagaatgtggtctatattgctttgagttgttttggattcaaaaaaaaatgaaccccacctctccgcaccccatagcctaaaaaaaaaaaaaaaagtcctcattttttcaaatgaagtttgctcagcacttgcgaatttttgcttccaacgcaactacttcctgtaactactttgcagacaattgggggtctgctcgttagaaacccccttacgcatgtacagggctttcaaataacctggagatttaggc

SEQ ID NO: 31611 - DNA, 507 bp, Homo sapiens
  chr2:200331873-200332380
  hyper
cggccagactcaggcctttctaatacaggcgtgaagggcgggacgcccagagccctcttgttggccggtggctaaggagccaggtggataacttctgcggattcggctttcaggctgctggagctctccccagcccgaggccttagcccagcgcaatcccttgtccagaccggccagtttccgcgtggcgaaaaagggggaggcaagtgtgtcttttccaaggagcttttatccaacagcctcccctccccccaactctcagccttaggtgccgggcttcagccgaagcgtttttcaaatttgtcatcattggaaacctcggacaagtggagtgtaaaattttgagggtttccaggtaggctctgacttcaggcattcaatgaaaggggaagagggctgagggcgggggagagagacaagcacagagggctccctgtagtcggcaggaattccctccctctgcagcccagctgcacccactagcacacactagtcttgccttctccc

SEQ ID NO: 31612 - DNA, 173 bp, Homo sapiens; identical to SEQ ID NO: 13812
  chr2:206750391-206750564
  hyper

SEQ ID NO: 31613 - DNA, 670 bp, Homo sapiens; identical to SEQ ID NO: 22872
  chr2:219232221-219232891
  binary

SEQ ID NO: 31614 - DNA, 116 bp, Homo sapiens; identical to SEQ ID NO: 13815
  chr2:2193566-2193682
  hypo

SEQ ID NO: 31615 - DNA, 196 bp, Homo sapiens
  chr2:223104742-223104938
  hyper
cgtctcacagcacgaggtcattagaaggaaaataagctcctgccaggttggggctaatcaaaatagcacaaataaaccctgacactcaacaactccccgagtgcctgctgccctgggaggagagtacagattggttatgaatatggccggccacgggggcagtacaggagggcctggccgtgtgctccgttgctcc

SEQ ID NO: 31616 - DNA, 1329 bp, Homo sapiens
  chr2:223159081-223160410
  hyper
cgggaaggaccccccacccccaaacaccagccagggccctagagccgctgccctgcactgctcgcgggtgtctcctcctgcatctctggacatcctcatccttctccagccctctcatcctgccactcaaacccccctccctattatctgtatctcggtactgaaagacggaggctgggaaaaccgtgcctccaagttagggccggatgccatctttgtccctcgattctgggcaggaagcatttcccttcctggactccgaagaccgggctctaggtctgcaatctaagagaattctcccaccagcccaccgggtaccctccttcctccccacctgaatgcatggatcctgcggttcgccttaagggaggaagaaccaaagccgacttgtccgcgcccccccccacccccccgtaaatcaagtttcttttttttcctttcttcccttttttttttttttttaaggctataaagggtttaaatttcaactgcagaatcgtttcctattgtaaaaatcaaaagaaaatgcactctctcccacttattttttccagattccagtctggtaaacaaatccatgctctgaaatatgtttctcacagagggaaaaagggagtttccttttaattaaaaacaaaccctcccgtgcgccctctcgctggccccgtgcttgcccctcttctccctccgcctcccccaggctgccgtggcggggggctccggaccgtccctgagactctcggaggaaatcggggccgttgtggaagcctccacggctttgcgcacacggcaaagtccctcccggcgcgggccccatctcccttcggttggggttaccaaaacatttgtttctctttaaaagggaacatcaatattaataaacgctctgcctccgcctcacgtttcctgccctgcctcctcgacagaaatcttctttggggcgtcctcagcggtggtctcgccaccctccgtccccaggacaagcagctcacccctccctccataaagtgccaagaacaccgggttggcaaatattgcagggcctcgggagaggccacctcccaatagctgagatcgataattggggtgattacgtctgggtcgacgtgccggggtaatagcgactgactgtcgcgcctcggggagaggttaatgggcctagtacctgacggcacggtgtttcgatcacagaccgcgtccttgagtaatttgtctcggatttcccagctgaacatgcccgggttctctcttttgtattcctcaattttcttctccacgtcaggcgttgtcacctgctttaagagaacaggcgggcaggcgttggtaccc

SEQ ID NO: 31617 - DNA, 791 bp, Homo sapiens
  chr2:223161531-223162322
  hyper
cgcgtgcacacgtacacacacacacgcgcgcctttacgcaccttcacaaacctcagaaataactcattggagagccccagatgtcagccgttaccccccgcccggtcttccccaacacaggggaccacagtctgggagccaggagggcaaggcccgcccgctcaccttgggcttgctgccgccgatggcaccaggacgtatggagccagtctcctggtacctgcacaggatcttggagacgcagccgtgggacacgcgcagctggcgcgagatgacgcagggccggatgccgtggtgggccatctccacgatcttgtggcggatgtggttgggcagcggcctgccgttgataaaaacaccgccgagctggttgacgcggccctggccgaggggagtggacactgtgggaaggtgaaaaagagaagcaagggaaaagtcactggaggaaaataaaaagcaaagaacagcagcacgtaatttcgcagtcttctgtcctatcctcatgttacagcaccgacgctgaaactgctcgacatcggactcccagacccagacctcctttcaatcacatttgttcaaattattcagcaatatagcgcatgtaatcttgtgtaaagacagcaaatggggcaaaataattctccccagagaaagcgtcttccccttcgggcccggggagtggcaacttaggagaccctgcagctggtagagagtctagcttgctctagaaacagcctcctggcgaagagaagttcacccaggagctggccttgatgaactctgctcccacc

SEQ ID NO: 31618 - DNA, 1409 bp, Homo sapiens
  chr2:223162580-223163989
  hyper
cgggggcgatgagcatctctgctggggcgccctaacctggaaaaccattgaaaacggctcaggcttgcaagacttcctgcctccccgggattcccagaatcttcaagtggacggaaaggcgattcctaaacaagttatagaaacttctagatgctatttgagatacatagaattctaatttatttaattattctaaaaattccaatcacaatggcgcggcgttagccaccacaactttgcagggcaaaaaaaaaaaaatacttcctgaactaacatatgtttcacaagtgtgggcgcagccgggacaatttcgagacaacttcgagacaatttcgaatggacaaattgcggagaagttgcttctgccgctcagaagccggttcacctccttctccaccgcggcatttccaaaacaacagggacaagtctccccggctcgccgcaggcctgaccgcccagctccgccaggatttgcagagagcagcgcgctccatttgcagaaaggaaatcgagtaggtcctcgcccccgactggtgcttcttggggtgtggggtgcccagggaatgggcttcctggaagcaccaaaggagcctgcggagcctggggatggggtgaggcagccggtcccaggccctgggatccaggcggcgcgctgaggccctcccttaccttccagcgggaacccgctacgcgggtagttctgccccgggcccggccgcatcatcctgggcacagcgccggccagcgtggtcatcctgggggcagcttcgctcggaaattatatccaggtgaaggcgaaacggaaaggcgagtgcggcgcggatgaccctcgggaactatccggagcgtggagagcccctccccaaaacggctggagagagagggagggacgcggggaggggggctgtcggttcctagtccagaggccggagctggaacccgggaaaggggaggacggggaggccccggagtccaggatcccgagcccagggcggaaaagtttggtacgagtctgggcaaatgttccagcgactggggtccctgaaaagggggctcagagagccacggcgagccggggagcctggtgaggctggagcgcggcctgcctgagtctcctcctgtggtgacaccgagtgcggggatccgggctcgggagcatttattagttcttttacccaaagcttggtcaggagccctgagctgcgattggccgacgggtagaccgtcccgggtggcggagacacgcgctgattgggcaacagcgaccactttctcttcccatctctggtggtgccgaggcctctgctggccccgagggggacccgcgctgcgccccttgcccaggagagaaggttggcccggtggaaactgagagagacagccccagggagatggcagttgctgagggc

SEQ ID NO: 31619 - DNA, 1820 bp, Homo sapiens
  chr2:223165797-223167617
  hyper
cggcagatgctggagggaagcgcttgctgcaagattccttctcccggtcccgtagattgcagagtccgcgggaccgttgaacggaggtactgccggctgagctgggtcttaagtgcccatgggttcataaactagctgtcacttgctataaacatgtacaaatggaggccacaaggatgtgggggtgctggggacctaaagctccggaatcaggaggcgactcattttctctcctttccggcctctttcttttctgccgagcgctctgagattcatatgtacccagatgatcagcccggcccttctcaccggccagtggccagaggtccctggacacccggagaggggtgggagggcacccttaggctctggacagctgggccacatccaaagacttaatgaatctaaatttcttgtggcctgtgtccccgaagtccgacctgggatggccaggacagcaaagttggctgaggctgcctggcctagggcgcccgcacgccgccaaacctaacccggctcagagccgtgactccgcagaacagggcgcaacaggtctcaggaatgccgggtgattccagccactctttctctgtctccgagtcttgggcctcccctttatttctttctgaagtctctccggagcccaagccaccccacacccaaaccccgcagctggatgggagtccaggccacttccctatccgcagccggtgggccaaggagtcctggtgccaaatttggccgcggtacaggcgctaattggtaaagggatgacccagcggtggggcttggaaggcgagggcccgcgccctgcatccttgaaccctggtttgggaggcagtgacttttacctgggctaacaaattacccagaaagcatcagtgggactctccacaacggtgttgtgaacgagtgtagggtccactcacgctctgtgcacgttcgaaatgaaacgggagccttgaagacgatatttggataatttgacaaaaaaaaaaaaaaggtgggcgggggagatagcttctattgtcccctctgcgcctctgcccccagtttcagagacactacaggtgaaaataacagcgggctggctgtccaggcctgagtggagcgtgcccttgttagcttgaaagttctccctcgcagcccgtttggatgcgtgcgtctacagcccagtcgcactttggtgaccggcctgggctgtgaagcaccctttagcgaacagcctccgcacttggggacactggcacaagggtttcatggcccgtggacttctcagggcctctgagggttgacttcatactcagccagacacaggtcttaagaggaaattatgatctatgcaaaataatgtccctgacctagtggggagcgggggtggtgtctgccacccagacctttttcctcccgtctgaagggccgagctctggcaggctgacacggtcgagcagagaagttcctggccacccgcccggccccaggcgtgattctcaggatgcagtaaaagttgggcaaacgccgagaaaccctcaatcccacagaaaggctgccgggggctcacggggaggacatcaaaacgccaggttcgtgatcatgagcttccggtccggatgtgatgatacaggattggtgaatgcccgggttaaacccgtggtccttcgcagccgctgcctcagtgacagtcattaggccccccgcagttatttgtcaaaagcattggcgccgctcttctccccatcgaaaaatcagtcgggatgagttcggattaagggactagatgaggatgtggacatcccattgaaacatggtgtaggccagcc

SEQ ID NO: 31620 - DNA, 2898 bp, Homo sapiens
  chr2:223168452-223171350
  binary
cgctcggatcaggactggactccttctgactccacgcggccccagctcctgaaccagcgcagtgagcctcagccgcttctcaaactgggtctcagaaaatttctcctcgagatggatttcagcggcaggaaagaggggccagtgacgcgaggagcaagaaaagagtaacatgggagatgaatgttcaaacccagatctcctcgctgagcctggaagctcgccaccgtgggatcacgggaaccagaggcaagaggctgcgaatgagtccaacacccgcgttcctcgagttttaaaagcacacctggggccagagactgcacagccaactaaacggagtaaacgcaacaggtggaggaggcagagttgtcaggggccaagcccggcgcgatctggccagttcttggggagcgcggacctgggactgcagagaggcgttttgaagagtgctgcgcgcacctgcctctcggagatatccaactccacccgggcgtctcctgagagcgcacagtccacagaccccgggagggctgcccgccctaggacacgtactctcccgacccctcactctttcaaaattggggaagaggcggaggagatgaaaaagaagaaagagagaaagagaagaaaagagagaaagaaggaaagaaattttaaaaaataataaaaggagggaagaatggaggtaaaacgcgggggagagaagaggggagaaactctcctcaccacaaccaaagcaggaggcctaagcttcctgaatttctacacatgacttgcattaagttccttcctagaacttaaactttttcatctcccgtcacccaagaaaacacccatttcctcttttaaataaagtttctttttctggagatgaacctttaaataagtcgtacgtttgggagcgagggacaggagaataattttgatccagaaccttggagattggagaagcaggtggaaaaattctaaaaagatgaaaactgaccatctccgacacagaaacccatcgaaaggggccaccgagacccgttgattagctggagggagcatgcggcagaagtgcagacccctcgctaacccgccaacctccaagagccctcttgcagaaagctgcccggctccccacggtggccctgcgcgcgcaccatcctcgcggtctcgcttcttcgccccggaaaactctatgaggggcaccccagcctcagccgggttaagacaagtagccccaagaggaaggagcctcagagagcctttcttcctgttcttcttcgtcttcttttttttctaaacgaaatctaatactatctggctgcaaaaatatattatcaccggctctcagcctaagagactaacatttggatatgtaggaaatgtaatctgcatggctaattgattctcagcgtatcagtttaaaggataaagatcgatatctacatgatggatattgtattaataggggcataaataaaggtcgaagagtcgttaccaaaacctttgaagccgcttttcggctctcgggccctccacgcggccagtgggtctctcccacctccccgcccccagctgctgctgggcagggagcatttgcttccccctccaacccgggaccagggtggaggagtctatggttaaagcgaaagtgtttcactgcggcaacgctggggaaaggaggttcttttttcctgggctgcagcaggtggacagtaaggcccgagaaaatgtaatattttaacaaaacgcaccactccccgaaacacacgtatacgacccacacagggacacaaacaaccacacatgtacacacacacacacacacacacactcacacacacacaatcacgcagggcggggagggttctcagcgttccctgagcgccctttggccttagagacagggaataaattcttctttccatccctcggccccctcccagagggcagcgacgaaagccctggccgagcacaaggatcggtgatctgggctcctggaggtaccctctagatggggtaaggacggggaaggatcaagaggttctgcgggaagtgtgcggggctggggggcgggggtgcccgccaatgtccgcagaaggcaaggaggcccactcgaggagggctggatggagacagacttgagtcgggccctgagccccagggagtgcggcccggtagatctcggggcgaggggaacaggatcgggtacacttgatccggaacaagaacgcctcggcctggcggttgcccgttagtcccggatcccagcggccgcttcaccactgagcccgagccgccgagggaattttccaaatgcaaatcaaacacccttggcgccccgcttcttcattaattaagaggaacgtttcgacaaaaccggcgtaatctttattaattacgcagcccttagcgcgccgttcgcatcaatcacgcccaaagcgaaagtgcagggggcgcctaatcccttcccagagcgcgtttggagaaggagccgcgtggccggcgtttccaccgtgacttccacctttctgggctcgcctggcactggctgctcagccggcgcgcagggaggcctttccggaaacaccggctggctgcgcgctagcaggaccgctctagatcccctgacaggccggaaaataacccccactcactatttgggcacgcgctcgtacgcagaaactcgcacagggactcgcgtggacactttatggcccatttcctccgtcccctcacccttaggctcagtggggaccacgcggttctcagtcctcctcttccctaggaccctctaaaaaggagcctggggcgaaatgacagagggaggcagaaaacctcctgttgccccaggacgccccgaaaaactgctctgggggatggggcggggaagaccttagaagttgtcagggc

SEQ ID NO: 31621 - DNA, 1408 bp, Homo sapiens
  chr2:223175977-223177385
  hyper
cggggaacatttattagcctatattgccatgagaaaacaacttgagacacttcagcctcaaccctcctcctctaagtcggtcgggacaatggcaggcggaagatgaagatataaagtaagaattctaagcttctcgccttcctgttacagccgatctgctctgcatttggaatgcggcgtctttgcgggcgttctgagtcattcctactccgctgcaagccccgcagagaacctcgccttcttcccgaccgccaagtctgattgtacagacttcatagaaggtctggaataaggactgtgttgctgcagaggccgggtcttgggcccctgggcgtgaggacgcaggctcggcccctgggaagaaatgtactaacgcacctcaagactcctaaggtgtttccaagtcccccctccaactttcgtgtccaggtcacgctgccccgccctcggacaatgagagggtgtgtcaagatgctctttgcatctttggaagccgagggggaaataggagactttcgacggggagcaggttttccggagccgtttggggctgagattctcgaacccctgctgggggccgaaagcgccggagaaacctgggactaaacgaaggcgactccccgcagggcgcaggcaccgcacccggcgtttgttttattcttaatttacttttttgggcacctctgctattgttacaaataaatgcgaacgcggagctttcgggcgggctctgggagcggcccgtgggcatcttggaatattaaaaacgtcatccggttgtaaataacctactccccagcccttgaaatccgggacgtcacaggtgaggctgaataccaggttcgcacaaaggcaaaccaaactcagccgggatgccgagtgatggggttggcaagatagtgtggcctctggttccctccacgcgtgataagtgggatcatgacagcgtccttgtgccttcgatttgtccccaagccctcctctgcctttccgatctcaaactaacccgtaatggagctggcaagtgggacgaacgggacagcctaaagcgtcgttggcccggccaagaggggctcaacgcctgtcaccccgggcggccttgggtcctttgcagtcggagaggctgcaggggaggaggaagacccagccagctccagggtgcaggattctgcccttccacccgagagcctcccccggtgtcccagtggcagtggctgccccgggctgcggtcgcagagtaagcaggggctccagtcctcggtccgcgcgccctgccccttgggctcagctgcgagccaccgccggcgtgcgcacccacaaggagagaaatggaggtaatcccccgcttcccaccgactgccggaagctcggcctctgtgcaaaccgaagtatacctgcacccaagagc

SEQ ID NO: 31622 - DNA, 337 bp, Homo sapiens; identical to SEQ ID NO: 13819
  chr2:227841945-227842282
  hypo

SEQ ID NO: 31623 - DNA, 177 bp, Homo sapiens
  chr2:230795444-230795621
  hypo
cgacagtgagatgccgtctcaaaacaaaaacaaaagagagatgctttaccccttcgccactgcacctgagaacctcagcccagctcagctgtgctggagccctcctcgaggtgtgctgtggttttccctcctgctgtcatttaccccctcactgctcctcctgatggcagcaagtgc

SEQ ID NO: 31624 - DNA, 321 bp, Homo sapiens
  chr2:231902837-231903158
  hyper
cggcctcccggcctcctgcctggccgtccaggcggccgcctgcagggccctgcaagccgccggagccgggcaaccaggtgagactgcgcggggcccggctgggcgcgggcgggcggtggctcgggcacgtcccccaagttggacccctttggccattcccttattgagcaccgaggtaaactgaggctcagagcagggaggtgcctagagccaggcctcgcagctagcggagagcgggccgtgcgtagcggatcgagtctgtcccggaagggtccggagtgcacgggagatgcctagggggcgtgggaaagctgaggggcc

SEQ ID NO: 31625 - DNA, 500 bp, Homo sapiens
  chr2:232479181-232479681
  binary
cgagccgcctccccgcccccagcctcccctgccccggctgcccccgagtcctgtttcagggatcctagccctctctccagacgcgctgctctgtccactgtccccgcctccaggacctgcgtcctcccagccccacatttgtgcgcaaagttgacggtcaccgggcccgcgcgcttcggcatctcgcgaaggcgctgcccgcgccctgagtccttccctggggctgtacgttggaaaggacagaggtctcctctgcttcgcagttgcaaaaggcttcacgttttcaccaaggggcagatggggcagtaggggccctgggaggcctggtccaccaaggagggggaacccgcgcgcgcgcgcgcacgcacgtggcccggcgcgcccgggagacctccgtgtgatcaccgcgcgcagcagctcccgggcggaaacacctcccccctccacgggaaagtgggctcaaccgggggcggaaagcgacacggctgggggacgactac

SEQ ID NO: 31626 - DNA, 411 bp, Homo sapiens
  chr2:23546914-23547325
  hypo
cgaggtggccaccagtcaccaggcgttctcaggattctctttcagtttgagaggccacccttatttggataaacatgcgtaccgaattcaagaggcactaataccacggtgcgatgaagtgaaaaggcaaacacgcggagtgccagatctcccaacacaaacatggtcccaagcctggcgcacctggattgggcttgggatttttaagccaacaaatggggtgggagacagggaaagagagggccgggaagaaaaaccacaggctcccagaatccaaaggaaagtggcatcctcacccgatgagcagggtctggcacagggctgagcacatgacagccagtaagtctctgctgaaggatgcctgaaatctgcgcggttctaccaccgaaactaatcccgactatgtctccc

SEQ ID NO: 31627 - DNA, 216 bp, Homo sapiens; identical to SEQ ID NO: 8324
  chr2:236452983-236453199
  hypo

SEQ ID NO: 31628 - DNA, 252 bp, Homo sapiens; identical to SEQ ID NO: 28969
  chr2:239957248-239957500
  hypo

SEQ ID NO: 31629 - DNA, 383 bp, Homo sapiens
  chr2:240168801-240169184
  hypo
cggcaatggctggagactagctctgcggtctgctcgtggataaccgcgctccctcgctgccgggccacccgcacagccgggcaaaccaaaaggcccactttttcatgctgtacccaccacttctgtttccccgcaggcatcctactttctaaactaacaccttttcactcccgagaattctaacaaatattatacaattcctacccgcatctaccctccacctggacgtagaacccgtgtgggaggcagtcctgcagggtttggggtggaatatcccccctgtcgagtggagacgaggctgacatgaggagtgaataaacgaacacagataaagaacgaggcacacagtacgtgcggggcgagagactccctttgctcctccc

SEQ ID NO: 31630 - DNA, 288 bp, Homo sapiens
  chr2:240213554-240213842
  hypo
cgggagccgccgattacatttgcatgaaaatagaacctttgtttgcaagagttcccgctccagtggatccctcctttgtctgcagcacagcaactgatggggcaggatgctggtgtgtgcacacagcccagctcaggacagccacgccaggggctgcgcgcacggcccagctcggcccagctcagcccagctcagggcggccacaccaggggctgcgcgcacagcccagctcaggacggccacgccaggggctgtgcttgcccatcgtggcaaggcaggcaaggggac

SEQ ID NO: 31631 - DNA, 224 bp, Homo sapiens; identical to SEQ ID NO: 27870
  chr2:241157285-241157509
  hypo

SEQ ID NO: 31632 - DNA, 131 bp, Homo sapiens; identical to SEQ ID NO: 6539
  chr2:242277184-242277315
  hypo

SEQ ID NO: 31633 - DNA, 373 bp, Homo sapiens; identical to SEQ ID NO: 27874
  chr2:242436371-242436744
  hypo

SEQ ID NO: 31634 - DNA, 644 bp, Homo sapiens
  chr2:242523762-242524406
  hypo
cgctttggaaaacaaacatcagcagataaaaaaaaaatgtacagcctacgcaagtgataatattcaaaatcctcagccataaaaataaaggccttttatttggtttttctatgccagtacagaaacatctggacaacactcttgagcctgcagaggctcacggccacacccacttctgccgcagggactgtctgttgaggagccgaaccgttgaggcacagtagccaggccctcccgagggctccagaagctctaggtttacggggtcaccttcttgtaggtgacgtgaagatgctgagtcattggctgtgtcgtggttgccatggagaccgtctgctcaagtttgccttcagaattcagcctgaacttccgggtgatctgagcaggagaatggaacaaagatagcttagttttatcttcaaaagattcaatcaatgcctgtgcgcccactgcatgccacacactcatcacgggctgtgagccaggcagtggccctgccagaggagggtagacacacagcccagggcccctgggcatgtcacaatccaggtgcccttcagctgcctccagaagaccaccaggggaacacagggattgtttatttagaagtcaccttttttgtcgacggccataccaccctgaac

SEQ ID NO: 31635 - DNA, 175 bp, Homo sapiens; identical to SEQ ID NO: 28972
  chr2:242554503-242554678
  hypo

SEQ ID NO: 31636 - DNA, 373 bp, Homo sapiens; identical to SEQ ID NO: 13836
  chr2:242572260-242572633
  hypo

SEQ ID NO: 31637 - DNA, 159 bp, Homo sapiens
  chr2:242713983-242714142
  hypo
cgcccgcctgcagtgtcggctgaagagggtaacgtgcgtgcgccccggctgctcccggctgctcccggctgctccccggctgctccccgctgctcccggctgctccccggctgctccccggctgctccccgctgctcccggctgctctcggctgctccc

SEQ ID NO: 31638 - DNA, 368 bp, Homo sapiens
  chr2:242832886-242833254
  hypo
cgtcccagccgaaatgttcaccgtgaatccggcaacctgtggagctgatttccatttctaaggaatgaggggggatggggaagaaccccccaggacagcaccaacagtccctgcggggacctttcccggacacccggccttctcggcggtgaggcaggtggcggcaccgacaggcccgggggggacctttcccggacacccagcctcctcggtggcgaggcaggtggcggcaccgacaggcccggcggggacctttcccggacacctggcctccttggcaaggcaggtggcggcaccaacaggcccgggggggacctttcccggacacctggcctcctcggcgaggcaggtggcagaactggttccac

SEQ ID NO: 31639 - DNA, 540 bp, Homo sapiens; identical to SEQ ID NO: 25465
  chr2:25354461-25355001
  hyper

SEQ ID NO: 31640 - DNA, 517 bp, Homo sapiens; identical to SEQ ID NO: 25467
  chr2:26401695-26402212
  hyper

SEQ ID NO: 31641 - DNA, 732 bp, Homo sapiens; identical to SEQ ID NO: 25468
  chr2:26407466-26408198
  hyper

SEQ ID NO: 31642 - DNA, 725 bp, Homo sapiens
  chr2:26521776-26522501
  hyper
cgtttcgtccaatgaggagtcctggggtaggagtggtgtgtgtatgtgtgtgaatgtgggagcctaactaggctcacccggcacatggagaggcctgtttcatccgatgaggagtcctggggtaggggaggtgtgtgaaagtgtgtgaaagagatggtctcgggagaggccaacgcggggagtgacgaggggaggcacagatcccttagtgcgggttgtgttccgaggccagtgtgggggaaaccagacctagaacgttgtatacggctgataggaccaggtccaccgctgcagcaggctgtgagaggggaaggcacgttcctggctaagcagcgtccaaaactcccgtaataggacccagtctggtggacccgagagtaaaagtgagagtgaaagtgcgccgcaagggaggaaatgggaggaaaagcgtcgaaaccaactcctttggagtgcatgataaaaaaatttttaaaaaggatttagaggtgattatgggatgaaactggatgctcaaaatttaaggacatactgtgaattagaatagccctcttttagtgttggacgactggccgaaggcactacagagaaattggccgtgtgttttaaggtggtgactagggttggaggaccaccagggcattcagacctagtctttgtattgattcatggctaaatgaatgcagccctgcctagcagtttattgtagaacgctcgcagctcatggc

SEQ ID NO: 31643 - DNA, 379 bp, Homo sapiens; identical to SEQ ID NO: 30175
  chr2:2854244-2854623
  hypo

SEQ ID NO: 31644 - DNA, 1380 bp, Homo sapiens; identical to SEQ ID NO: 25474
  chr2:30453530-30454910
  binary

SEQ ID NO: 31645 - DNA, 93 bp, Homo sapiens; identical to SEQ ID NO: 13846
  chr2:3372645-3372738
  hypo

SEQ ID NO: 31646 - DNA, 295 bp, Homo sapiens; identical to SEQ ID NO: 12622
  chr2:364121-364416
  hypo

SEQ ID NO: 31647 - DNA, 548 bp, Homo sapiens
  chr2:39187172-39187720
  hyper
cggagatggacttcgagtcctctccggcggagccgctgggcaacgtggagcgctccctgcgcgccccggccgagctcctgcccgatgcccgcggcttcgtgcccgcggcctacgaagagttcgagtacggcggcgagatcttcgcgctgcccgcgccctacgacgaggagccgttccaggctccggccctcttcgagaactgctcgcctgcctcctccgagtccagcctggacatctgcttcctgcggcccgtcagcttcgccatggaggccgagcggccggagcacccgctgcagccgctgcccaagagcgctacgtcgccggcgggcagcagcagcgcctacaaactggaggcggcggcgcaggcgcacggcaaggccaagccgctgagccgctctctcaaagagttcccgcgtgcgccgccagccgacggcgtggccccacgcctctacagcacgcgcagcagcagcggcggccgcgcgcccatcaaggccgagcgcgccgcgcaggcgcacggcccggccgccgccgccgtcgccgcccgcggc

SEQ ID NO: 31648 - DNA, 745 bp, Homo sapiens; identical to SEQ ID NO: 24266
  chr2:43019535-43020280
  hyper

SEQ ID NO: 31649 - DNA, 372 bp, Homo sapiens
  chr2:43448410-43448782
  hyper
cgctccagttaacaccagtgcaatcatcgttaacgtgaaacagctgcccgaggcctggcgtatccaccagaccgccccctcccctccatgctcagctgtgagtcaccagagaccccggctaaggcagggcccgggagggagcggggatgcgaggattgttgatggagcccagctgttgtatatgagaaagcaaactattgctaaatctcttacctaccttggaaaaagtgtctgaactgtgtgcatgagggacggcggtggaggagaagaaacatgaattgatttatgaacccgatttaagttcctaaagtgattgttttaaagttagaaacagccagagtcactatagtaagattttgttcaaccgtttgc

SEQ ID NO: 31650 - DNA, 1874 bp, Homo sapiens
  chr2:43450964-43452838
  binary
cggtctgagacacaattaggaacttcttccaagagaagggttcccacatctggacttaactaatgctgttcaagtgaagagatggaatggtggttggtagctgctggtgctgggttgatttttcctgaagtcccaaactcatcggagtcctaacaaagtttaagtgttttttttttttttttgttctattcgtatcacaactgccctgttgtgaatattttgttcaacagaaaaagttcgacttttttgctcaaaaagaatgaaacttcgtaataaaaataaaaaaaaaaagacaagaggaaaccgaaaaaggaggggtgggggcccctcccggcacagagttcgagtccaagtgctcggtcgggcttgcagtctgcctagggcccatgtcaccccccccactcccgtgcccccagcaagggcgagatggcgaggggtgtcctccaacatctctgaaccgccttcccttcctcctcactggcgccctcttgcctcagtcgtcggagatggagaggcggctgaagattggcaggcggcggccagggtcgaggctgggagactcagagccgctgaggctgccggagctcagggagccgcttaggtagctgtcgcggtccgacagcgagtccggggggctggggggcgcgtcgaacacgggcgagtcggacaggcggcgcggcagctggaagctgaagggcggcgagggaggtgcggcggccccggcggggagggtcgcgctgggcggcgccggcggctgcgcggggggcgccaggccctgctgctgctgctgctgctgactgcggtagtaggcggcggcggccacggcggcaaagttgtgggtctggatggcgagcggcgtgatgaggctgctgagctccggaccgaaggcgaaggcgttgttggcgcacgaggccgacgagcaggccgcgcacggggcccccggcgccagcaggtcctcggcgcccccggtgccgtacagcagagcggccgcagccgcggccgccgcggaggcgcagcatgtcggggcgcccgagggcgtggaggccgcggaggccgaggaacaggaggaggcggaggaggagcaggacgaggccgaagagcaggagggcggcggcggcgtgcgcgacgtggggctgtcgagcagcagcggcgactcgaggccgcccgggggctgatggtggcccgacgggaagcccgagaagctgaggctgtggtgcaacttgggccgcggctcccgcgggaagcccaggtgcaacgcatcgcgcgtgccaaaggcacgcaggtccccggaggcgccccccgacggcgcgggccgccgctcgtccgcgttgtggatgaagtggcagcgcggcccataggggcagaagccgatggtatgaaaggtgcggcacagctcggtcttgtacttcggatggcgagtcaggctgcgcagctcgtggaagccatgcgcgaactggcacttttcgccgtacttgcacgtgccgctctcctcgaagggccggcacagctcggtcttgtagcgcgtggagttgatctgggagccgccgccccccttctgctgctgctgcaggtgcaggaggtgctggctgcgatcgccgttctcgctaaacgagcggtcccggaatttgttctccttgttgagcagggctgtgccgccgccccccgacggctccttaagggtgccgtaggaggtcggaccgccggccgccgcgctgccgcagctgctgccgttagcggcgcccgggaacttgggcgagcagctgccggggctgggcgcggggtgggcgagtgcatgcaggttgctggccgagtgccgtcggaggaatcccggcgcgaagcccgagctgggggcggcggccacaggcgtccccacc

SEQ ID NO: 31651 - DNA, 402 bp, Homo sapiens; identical to SEQ ID NO: 25481
  chr2:45028955-45029357
  hyper

SEQ ID NO: 31652 - DNA, 417 bp, Homo sapiens
  chr2:45029728-45030145
  binary
cgctcagccgcggtggcggggcccgcgcggtccctccgcagactcgcgggccgggggaggccctgctgcggcgccgcggcgtaccaagggttaagcggcgcggctcgcggccctcccggctcccctcccctgcgtgttgattttcaggcccaccgagccgcccgagaaagttttcaattcgatggggctgcagcgtctcaggggctgagctccttagaaagcttcgggggcccccgagggccgccttgcggggagggggcggctgccccgtccgggacccgctaattacagggattcggtttccccgctctgaaggaatgcattacctgcagcaaaggaggcgcggcctctcaggaaggccccgagaggaagctgaatgccccagtgcattccagccccatccctaggtttataccc

SEQ ID NO: 31653 - DNA, 2332 bp, Homo sapiens
  chr2:45155140-45157472
  hyper
cggcaacttttggttgttgctgctgttgccagtgcgcttagcagagtaggaagctcgaagcgcaaagcaaccggaccgaggcagctctgccttcttgcagcccaagggtcctgcaagccgctctttctctctgcgcagcttcagcgatccaggcgcgcagggcccggctgaatgctaatttgggatacacaggagcgcaagttcaccgagttttccgcagttttgcaaatccttttccctctccccatgcctcgcggtttaagaccacgcgatttcccaaaaagaaaaactcaaaagatgccaggcgccgggctggagtcacttagagccagctctggctgctcctccgcctccccgacccccggccgccgctccgccctgcccctcgcgcctcgaccccttctcccgaaactccgtcctctccgccgaggggctgccttgcccccaacccaccccccgcgtggagaataaacacagttgacatcactcttataatctttatttaaaactgtttccaaggttacaaattgccgagcctcgtatgcaacaggttcctccaaagcggtatcattacagattaactgtaatgtgtaggattagaataaaagcataagggattaggtaaaagggcgacgctccagacataacgcccgagcgcatctcgactgagtcagcctagggagactgcgaaggcgcagggtgtcggggcgccacggggccgcaaagccggactcggttcctccgctcccggccctggccccggccccagagcggtcgggacagcggcgccggaaggccaacgcggccgaaggtttcggagccaggcttcccgggcgtcaggggctagggacgggtccccggagctggggaagatgaggggccgagaggccgtggaggcggaggacgcgggcaagccacggcccggctgggagcttcgggaagcgccgcgcccgggacgcggtctccgggcggggcgaagcgcagggaaggcggcgagggggtccccacacccgcacggggcaccgggtttgtccatgtgggtgacactgccttcaaggcccaggcccgatggggcccttcctggcgtcctcctcacccccactccgccgcgcctcccctgtccagctggggctggggacagcggcaggggctgggcagccgcgcaggccgcccgcacccttccgagcccaggcctcgggccttcgccgcccgcccaggccgtgcgccctattggaccaccttccccccggccttcgcctgcccctctcgcgccaggaaggccctggagctccctctccccctcacaccgcttcctgcggggccagggctcgccgtgctggccccatttggactcaggcctgacctgggccacggcctcaggccgctgacgcagccccgagggctgtttgcgtgttggggtggagggcgcggggctggaaaaacaaacagggcgggggcgcggaggtttggggtgggggccgcagggggctggaaggaagtgcgcagtgtggcgagagcgcgaacaaagccctctccggagccccgtcacccctcggtgaccccaggcccgccccgctgagccgcggggctcccgggcctcgcctccgagcaggccgcaccgcccggtgggcgcacgtcaggcctccgcggccgcccgggccagtgctcccctcggtccccgcaggccgagcccgcggccggccccgaaggcgcgagggacagcgcggccggcggtggagcctcactcaggcacggagcccacagagcgaggctgaggaggactccatgctgttgtccgtcgggaaaccggactactctggggcgcgctggagccaccattctgccagcagccggggaggggccgcgagggctcccaagtggacggaagtaggcgaccaacttcgccgcgactcctgcttcctagagaagggccttggctgaggaggcggcgggaggggactgttgcaaacagctgttcctcatacatatttcattacacaatcagataatgcgtcccaccaccttctcaattattcacagataaacattttcaagacgttttgacatctgtcttagtgcctgctattaatttagtaatcactgtagttaaaaatgtatgggatttttgccgtcggagcacctcgtatccggcgcgcgggcccagtgtgggactgcggctgggagcccgggccctccgggagtgaagatacctttggaggtgagacggcctctctagcgcgttgacactgttgatggaagggattaaaggggtatcaggttattttaatttattgttgaagatgatgactgccccctccccgatccgcatacc

SEQ ID NO: 31654 - DNA, 999 bp, Homo sapiens; identical to SEQ ID NO: 30182
  chr2:45159503-45160502
  hyper

SEQ ID NO: 31655 - DNA, 913 bp, Homo sapiens; identical to SEQ ID NO: 30183
  chr2:45169299-45170212
  hyper

SEQ ID NO: 31656 - DNA, 649 bp, Homo sapiens
  chr2:45171261-45171910
  hyper
cgccagctttcctattttctctaccctcggtcctgcgctctgcgctggcatccagagagcaaagtatgcagttctacccggagactggccgggcggtggggaacccgcagctcccggtgtgtgtttgagggagcagggacggggttactaggggaactcgaccggtcgcggggcagccggctcagtttgaagagccccagggactgcggagggaagaagcgcccggctcctctccgacttctgcttctccagggcttggcgtactttgtcgcttgcacccaggcctccccaagcggccgggctcgggttctgcctctcctccgaggccagcctctatctgagaagacttgggatgctcccgaaagcggaatggggagcggcggcgcgggggagccgggtggcgggcctctgtgtcagggcgggcgcggatctctttctcccgcaggctccagcaccaggccattggaccgagcggcatgcgctcgctggccgagcccggctgccccacgcacggctcggcagagtcgccgtccacggcggccagcccgaccaccagcgtgtccagcctgacggagcgcgcagacaccggcacctccatcctctcggtaacctccagcgactcggaatgtgatgtatgatagccaaggcc

SEQ ID NO: 31657 - DNA, 967 bp, Homo sapiens; identical to SEQ ID NO: 28982
  chr2:45181466-45182433
  hyper

SEQ ID NO: 31658 - DNA, 982 bp, Homo sapiens
  chr2:45240827-45241809
  binary
cgcggcgtcgcccgcgccgcacgtggctggggcagtcacaggccccgagagctggagcaacggggtcaccgccacccctctgccctccaggccttcaccttgagacccacgcggcagcctggagggcccacaagagcaaacggtttagaggccgcgggctcacgagggatcttgttcaaacgaaaagaacgagcacaggggctcggggccagcctggaggccggcacagaggcgagtcggcccgggtggcgccgggaccaggcgggatttggggcgggtatccgggcccgggcgctggcagcctccctgcgacccccggccctgcgtccccgcccgcggtcccgccttagtcctggagtcccttcctgggccccttcgcctgggtgcggaggggcgcgggcgcggcgggcagggccacggggcgaggggacgggctcgcggctttgggttcagggagccgcggagctccaccgccgggttgttttgcaatggggctttggagaggttgcgcgtcccgggccccatggctccgccgggtctgcacgccagcgcccccacgcggcgggcccagagttcaggccggcggggctgcgcgctcggctccccgcaggcctgtagcccaggagggagaggagggagaggacgcggagagggcccgctggttcttccctcctcaccccagcactgacccgcctgtgcgctggcacggagggctcgaaaatcggggcgcgtccgcgaagagcgagacctcggagacagacacacaacccagaggtgcactaggttgccagacggtctgatcacaggattcttggggggatagacgctggcttttctccatcacacgtttcccctgcaacgtctgggtgcccaggaaatgtttgaatggatgcctgaatgaccaatcgggtttgactgacagcaacagctgggaagtgacccggccaataggagaatggccctcttcctcctctttcctccc

SEQ ID NO: 31659 - DNA, 156 bp, Homo sapiens
  chr2:47598322-47598478
  hypo
cgttattcaaatgttagacatgtagtttgatttcagtttctcttaactgtggaataaacaacttggctgccgtctctctctctctcttttttttggaaacagtgtctccgtctgtcgttcagcctggagtgcagtggcacatttacatgtcactgc

SEQ ID NO: 31660 - DNA, 229 bp, Homo sapiens
  chr2:55289053-55289282
  hypo
cgagaccctagcaaggcaaacacacaaaaacggctggacgttgagagaagcacattggcggaggaacacacaagcggttggatttcgagaggacatcaagagcacgtcaagagcacgtcaagagcacacggacaggcactggcacgccggcaggtcattgaccggcagaacagagtttggccagggctgtcagagaagagtcgggccgccaagcagcccgacttccagc

SEQ ID NO: 31661 - DNA, 421 bp, Homo sapiens; identical to SEQ ID NO: 28986
  chr2:60796211-60796632
  hyper

SEQ ID NO: 31662 - DNA, 605 bp, Homo sapiens; identical to SEQ ID NO: 23199
  chr2:60796723-60797328
  hyper

SEQ ID NO: 31663 - DNA, 1493 bp, Homo sapiens; identical to SEQ ID NO: 24272
  chr2:63274985-63276478
  hyper

SEQ ID NO: 31664 - DNA, 670 bp, Homo sapiens; identical to SEQ ID NO: 24273
  chr2:63280967-63281637
  hyper

SEQ ID NO: 31665 - DNA, 371 bp, Homo sapiens; identical to SEQ ID NO: 30191
  chr2:63283794-63284165
  hyper

SEQ ID NO: 31666 - DNA, 2953 bp, Homo sapiens
  chr2:63284469-63287422
  hyper
cgcgggatatccgaagtgtggaggaaacagacaagtcagggtacagaggtgggggttgggcaggggcgcagggctgaccccctcacccggtctaagcacagggtcgcagttccagtttacaaacctaaaacaagaaaaccaaaaccagggaacaaaacaacaaaacaaaacaaaatccgtaaaagtacagcattagggaaaaacaaacaaacccaggccccaaacccagttccaactcctctgtcggcttctctctttcaacacccttgttttgtctagtgagtttttagtgcaccttcgttctccgaaatctgcggagagcccgcgcgcctgtgtatcaattttggctttggccgcttcgtccagtaggtgggaaagtaatttgtaaatttgatttgtctgatgtgaagatcacaaattacttgttgaaatgtaaggcagtccccctcctcctctttatctacattacttcccgaaaataaatgcaaattaatgaacggcttgtcagtgttgctcttctgattccagcccgaggtcctggtctcggggggctaaaagcgagggaaactccgtgttaataacccgcgtgttaatgacctgcgtgaagctggaggccaaaggatgaggcgggaggacttggcaagagaagtccccagaaactttcgcttagggagtgtctccccccacccccaccacgcccctccgcgtcagcctggcctcttcccccaggcgttttgaccccgcatcccccctcgccatccaggacagagacaggtgtcaggactcaattcccgaagcaattcctttctcttcagaggcaggagcctggcactgatttcttcaccctaattgcctgcaccagaaagaagagggggaggggaagagggtcgggaggcgggaaaggatagctctgtaatgctctcagagctgagccaaaaaggaaaagaaagcaaaacgacaaaaaactgatccgtgtcctgcatgttggcagcagacaaccttccttgctgctgagctgtcccgggtggcttcaccgcggctggggaatccgagccattccttccacgtgctaagatgtccctctaagccctcagctcctgccagaagtagccaaattacctttcttcgtactgtaaacttcctttaaaacatacaaactcataacctggaaaagtcgacaaggacgcctttcactttggcaggggaagaagacgactggcttgcatctgggggtcaggaaggacagttccatctccctctgagggaagacggggttgaggggtaatcctcccccagaaaatgcagagcctggaactgtccagactctggcctgaaacctcctgggtgtaaggccatgaatctgctcgacttgctcacgggcgggaaggaaacaaggaaacaacgaaaagtttcctgcgaagtgaccaacatcccctattttttaaaaattccgtgtgagacctgagaacacactgtgaagcggggttcggagaacgacccctcccgcgttccgcgcccagcggggtcgcagggctgcgagcccggctgtagcaaagctttctcggccgcgtcctccctccggattcggtaggccaggctcgggcgcgcccttcccacaccaacaaaccatctttcccgactcagcagaggcccacaggggcgcagccgctgtccctccgcccttggcccagcggcgccgccctggtacgccaggcctgaaggcagggccggcccgcgccacgcagggtctcccttaggcggcgccttagggtgaaatgcggggccaagcctgacctgccggggtgccccgtggcatctctggtgcggaccccgcacgtgccggggagaactggcaggcggccagggcgaggaggcttccagcttgcgccgcactggcctgggcacccgggctgcagggccttttgggccctcccctcagtgaccctgcctgtagcggccccagggccgctttggctcaggcagcagctgccaatgccgctcgaggcccgcggctccctgaggcgagctctgcggggcccagcagtcctcttggctgctaaatggaacgaaaccaggagacccggctttgcactcgtttggacaactgtgtggcctccggagcaaggtacccaaacccttgggcctcagtttcgtcgcagttgttatttgaacccactcggcctgggacgtgccagagcttcacactttaggtcgcggctgcgggcgggaggggcagatgcgacccctgggccggcccctcgggggcgtctagaagcttcggcacctgcatactaaggccggagggggctggcagccaggcacaccgaggcccggccggagttcccgcccggggaacgaggcttcgaaaagaggcacgtgcttctcccagggcctcccgccaggtgctgaaaccccacggcactgagtggaaaccggaagagggaaggcgcccagggcctgccgggccgcggcgccacctgaggctgccgggacgctggagcgtgggggagtggggtgagtgcgctgccgggccgggggcggcgggggacggcgggaggtggccaggcccggcagggtgagggcgctggcgttggccgagagtccctgggcagcggcggcgggaacgcggaaggttccctccacccccaccccaacccccacccccacccccgggccggccacctgttgacaggcaggttctctgagaaccgacttcagctcgcccttctgtccaggaagtttgttcggtttgggtttgggtgttcgtgacacaatcggagcaattagaattgaagcaacttcaggagatttagcaacccgcgaaaatttagcaacgttcagacgtcaacagttttctttctttgagtggtcaacgaaaacttgacgttttctactcataccttgtattctctgcttatactgtaggggcaaaaaagtctactcttagacaaac

SEQ ID NO: 31667 - DNA, 711 bp, Homo sapiens; identical to SEQ ID NO: 28992
  chr2:64836206-64836917
  binary

SEQ ID NO: 31668 - DNA, 354 bp, Homo sapiens; identical to SEQ ID NO: 13853
  chr2:64994400-64994754
  hyper

SEQ ID NO: 31669 - DNA, 1013 bp, Homo sapiens; identical to SEQ ID NO: 28994
  chr2:66808540-66809553
  hyper

SEQ ID NO: 31670 - DNA, 1230 bp, Homo sapiens; identical to SEQ ID NO: 24279
  chr2:73147029-73148259
  hyper

SEQ ID NO: 31671 - DNA, 133 bp, Homo sapiens
  chr2:73493622-73493755
  hypo
cgcccccacctccacggcccaggctggcgctgggcgtgctgccacagctgctgctgatgacctgcagctgccgctcggcacggtcagcccgctcaaggagctcctcaatgaactgctgcagccgcagcttggc

SEQ ID NO: 31672 - DNA, 990 bp, Homo sapiens
  chr2:74741799-74742789
  binary
cggcgccctgccttggccagccccgcgggcccctgaggccactctccggagcgcgccgccgctgggcttctggcgctgcctgaggcatcctccccaaccaccgaacctccggcggttctcctcggcccagaccgatggagccggggatgctgggtccacacaacctcccacaccacgagccaatcagcttcggcatcgatcagatcctgagcggccccgaaaccccagggggcggtctaggcctgggtcgcgggggccagggtcatggggagaatggggcgttctcgggtggataccacggagcctcgggctacggtcccgccggctcacttgccccgctgcccggcagctccggagtgggcccaggcggcgtgatccgcgtccctgcgcaccgcccgctgcctgtgccgccgcccgctgggggggcgcctgcagtgcctgggccctcgggtttgggcggcgccggaggcctagcgggactcaccttcccctggatggacagcggccgccgctttgccaaggaccggctcacgggtgaggttgtctgacccctccagcgtcacgcccgactctgaccccgtctcctcatttcttagctttctgctccaactcaaggacccctttcacacctcccactagatcctcccaggggatcctcccccaactcaaatctctgggtcctgcctccgagaggtgatggggagggagctgccgtcggtgcccgcgccctcctctgtagtcccactgtccacgcgtggggaggggagggtgaagttacaggggacgtctccctcgcatcccaggggaagggcctttcttggctatagggctcggctgatgcttagggcccgggtaaggacagggcgcgggagttctgcggcctggacagccgcgcggccttctcagtggcacctcgggccaccctgcaaatcctgccctggtctttcttcctcccggtagctgcgctctcgcccttctctgggacgcgcc

SEQ ID NO: 31673 - DNA, 955 bp, Homo sapiens; identical to SEQ ID NO: 24283
  chr2:74742812-74743767
  hyper

SEQ ID NO: 31674 - DNA, 788 bp, Homo sapiens; identical to SEQ ID NO: 22878
  chr2:74781700-74782488
  binary

SEQ ID NO: 31675 - DNA, 161 bp, Homo sapiens; identical to SEQ ID NO: 12639
  chr2:817641-817802
  hypo

SEQ ID NO: 31676 - DNA, 75 bp, Homo sapiens; identical to SEQ ID NO: 7227
  chr2:85819578-85819653
  hypo

SEQ ID NO: 31677 - DNA, 257 bp, Homo sapiens
  chr2:8870193-8870450
  hypo
cgcatctactctcctaacagctcaggacagccccgtcacactactgccagccctggtgactcactttgttggcaatttttaaagccctcttcattatgtacttcctactcttcagaacctctgtgataagcaatacccctgccatacagaacgctggatctcggtttactcagcctctccctgtagcgtcacaggctgtgcactcacctaggtgagcccctaagagcagggtttgcttctgcttcacctaacgccac

SEQ ID NO: 31678 - DNA, 947 bp, Homo sapiens; identical to SEQ ID NO: 27897
  chr2:89064565-89065512
  binary

SEQ ID NO: 31679 - DNA, 317 bp, Homo sapiens; identical to SEQ ID NO: 26809
  chr2:8978041-8978358
  hypo

SEQ ID NO: 31680 - DNA, 486 bp, Homo sapiens; identical to SEQ ID NO: 24290
  chr2:96990889-96991375
  hyper

SEQ ID NO: 31681 - DNA, 608 bp, Homo sapiens; identical to SEQ ID NO: 25497
  chr2:97193030-97193638
  hyper

SEQ ID NO: 31682 - DNA, 275 bp, Homo sapiens; identical to SEQ ID NO: 13863
  chr2:99136317-99136592
  hypo

SEQ ID NO: 31683 - DNA, 836 bp, Homo sapiens; identical to SEQ ID NO: 25503
  chr20:1783711-1784547
  binary

SEQ ID NO: 31684 - DNA, 1486 bp, Homo sapiens
  chr20:20348541-20350027
  binary
cgcgcgcgggggccccgcgccctcaggtacatctgccgcacctaccgggcgacccccgagtcccggcccccttttggccgccccatcgccctcccaccctgccaggctgaggagctgcggacgcgctgattggctccaggggaagcgggaggcgagaacaatggccccctccccccgttaaaagggagcggctgccgggcccggggacagggacgcgcgtgcagggcgcagagctgggccgagccgtcgccggcgccacgcgagtcccgcagccgccgcgcccgggcaatgggccgggggcactgagggccgccggggccgagcgcggaggggggaccgagccagtgccgtgccctcgggccgcgccaacatgccccgcggcttcctggtgaagcgcagcaagaagtccacgcccgtttcctaccgggtccgcggcggcgaggacggcgaccgcgcactgctgctctcgcccagctgcgggggcgcccgcgccgagcccccggcgccgagcccggtccccgggccgctgccgccgccgccgcccgcggagcgcgcccatgcagcgctcgccgccgcgcttgcctgcgcgcctgggccgcagccacccccgcagggcccgcgggccgcgcacttcggcaaccccgaggctgcgcaccccgcgccgctctacagtcccacgcggcccgtgagccgcgagcacgagaagcacaagtacttcgaacgcagcttcaacctgggctcgccggtctcggccgagtccttccccacgcccgccgcgctgctcggagggggcggcggcggcggcgcgagcggagctggcggaggcggcacctgcggcggcgacccgctgctcttcgcgcccgccgagctcaagatgggcacggcgttctcggctggcgccgaggcggcccgcggcccgggccccggccccccactgccccctgccgccgccctgcggcccccgggaaagcggcccccgccccctaccgccgcggagccgcccgccaaggcagtcaaggccccgggcgccaagaagcccaaggccatccgcaagctgcacttcgaggacgaggtgaccacgtcgcccgtgctggggctcaagatcaaggagggcccggtggaggcgccgcggggccgcgcggggggcgcggcgcggccgctgggcgagttcatctgccagctgtgcaaggaggagtacgccgacccgttcgcgctggcgcagcacaaatgctcgcgcatcgtgcgtgtggagtaccgctgtcccgagtgcgccaaggtcttcagctgcccggccaacctggcctcgcaccgccgctggcacaaaccgcggcccgcgcccgccgccgcccgcgcgccggagccagaagcagcagccagggctgaggcgcgggaggcacccggcggcggcagcgaccgggacacgccgagccccggcggcgtgtccgagtcgggctccgaggacgggctctacgagtgccatcactgc

SEQ ID NO: 31685 - DNA, 762 bp, Homo sapiens; identical to SEQ ID NO: 23576
  chr20:20376606-20377368
  hypo

SEQ ID NO: 31686 - DNA, 2331 bp, Homo sapiens; identical to SEQ ID NO: 25505
  chr20:21080357-21082688
  hyper

SEQ ID NO: 31687 - DNA, 852 bp, Homo sapiens
  chr20:21083736-21084588
  hyper
cgcgaagctggagggcgcactccccggcctcagagccccaaaccggaggcgctgtccaaacgcgccaacgctgcaagcaatgtggcagggcacaccgaaatgcgtgtctcgcacacctgcccatctttccctgctcaacacgaaagcgccttgtggctctaagcgcttccttggggtggctggggctgtgcattttaattccaaagtcaagaggttgaaccatctcaaagttggcgggtggagggggcggtggcagggaactagatggctggatgcctttgcctgcggggtggcagggctgtccctaccaatagccacggctcggggctggctttgtagttatttttccaagttctgcccggtgcccatcatattgccctgaaaagcaaaagaggccgatgcaatttattccaatgggcggtttttaagaagctggcaatttgaaccggctgggtgttatttagtgcaatatgaaatcaaatgatcctatttctcaaataacagtgtctgtgaggagaagtgaatcctctgaaagggtaattgtctgctgatggtgtttcccattatacccgatcttggcctaaatggtgttcggcagcggggcggagagcgaggggtgaaatcaatgtgcgccaactcgcgctctggagacaggaaaaggtagcaccgctggcgtcctggcacgtcgagcgaacaatgccaccccacgcgtcactgatcgactcatcttgcaggtgtccgaaatcattagacttgagtgatcttgtggacgggggtataagactaactgtttttcctttcgcaactttgggaattgttagtctcctggcatcagtcacgcagcagactgac

SEQ ID NO: 31688 - DNA, 794 bp, Homo sapiens; identical to SEQ ID NO: 27902
  chr20:21086501-21087295
  binary

SEQ ID NO: 31689 - DNA, 635 bp, Homo sapiens; identical to SEQ ID NO: 24296
  chr20:21372082-21372717
  hyper

SEQ ID NO: 31690 - DNA, 994 bp, Homo sapiens
  chr20:21490458-21491452
  hyper
cgtctgcagcacccgctgggctctgagctagagtcccaagtatttttagaaacccgcgagatagaggagaaaggctcatcctccagttggccaggcttcctaagacgctcccccgcgtggccaagtgtgcgccagcatctgccaaggagatcttcctccagcaacaagggtgggacggaatccgttccccgccggaaagatggatgcgcccttcccgggcgtgcccggggctgtgtgcccacttcccatccggggagctcaccccacccccaaacctctacttcctagcaatccacccagttccacgctcaagggctgacctggggggaccgcacaccctggttcggaccgccgaacgctggagggaaggaggcccgggatccagtccccggagagaggcctggaagcccggaaaggatgggagcgtaagggaagggagaggcatggtttgctgggattgccaaagattctcgctccctggcttcctggggccaaagatcctagggagggctgcagtatcccctccctcccccgagcccagaaccccgcgtacttcccccaagccccctaagccaaagcctcgcgcgccctgaccgttcccacccccagccttagcggtctcctaggtcagcaccagcccgcagattttgaaaaggagtggggagtggggagaaggcagccagtcttaacctcagacccccacccacccactttcttagcgtgaggtaagtcaaatgtaacaaagtgaaagtcatcgagtgtagtggcttcaacagcttctcaggctgaaggagccactcatagatttgggccagcgaggggggtttgctctcctcgcctttgcggctcccgaagtcacttttcctcccgtagccggacgctgccgcccggggttcagacagcgcgcgagaccaggggagatgcgggggagggtgggcggccctgggcttccggccgaccgctcgcaggccggaggccgagcgttctcctcccc

SEQ ID NO: 31691 - DNA, 1493 bp, Homo sapiens
  chr20:21495687-21497180
  hyper
cggggagggcggggtaagagtgaggagctccaacttcgtctggggtcggaccctggccctgctgcctctgggctctgcgggcctctttccccgggtggaggaaagggcagacggccctgctctttcctgccctctattatccctccctctccggccccctccctctccagcctctggctagaggtggagcagcgggaaggcggcggggcgggattgcgggggtgggggtgggggttgtgtctccagcctgggtgaagacccagaaagctgcgggggaggggggtcgctgggtggcccgacgatgcctcgttttctccccagttttcttctcccacgcgagttctttagtgtggtctctttttggacgccttgggtgcgttcggagtacgcgctccacgtttccaggttaagtcaggttagtgtgaagtttccagccactctcggctctgggaactgaactttcccgggacttgcacttcctcctcggcgctggggttggaaaagaccacgccgcatttgccaccccttcttctagttaaaacttttttggggggggggtgcaggggtgtagattggctacctgatgctcgttcgccccagaggagtgtcaggaaggagctttgtctgggggcggggaggggcacagaaggccacccctgcggggtccaggtctagtcttcccacaacctgggctcctccgcgcgggccaagctgagcgcgcgggcaccgggtcctcctcgcgcgcagctgcagcggacgccgccgcgccccagctgcccccgggttgccagcgctgggtgagggcacctctccccgagccgctcggcggctttctgcagccctagctgcctcgcccccagtatgtgacgtgggtgacaatggcccaggttagagcaagcccctcgtcggcgcgtcctgggtggtcggacccgggcaaacacaaatacaaaccgattgctaagctgcggacaatgagcgaaatgtagacaaatgtcccgctcccgttggaagcctttgtcccggctcggtttttgcatttatttcagtggcgaaataatacatgattgacgctctctttcaatgtgtcctaactgtttggaataaatctaaggttgttcctagttgtcatggcattcaacccttttcaatggactatctcttcattcatttctgaatccgtccacaatattaaggaaaccccttcatgtcgacgctccccgattcctctttctcctcctactttttcttttctcctttctccccctccttccccccttttttcccctggaagaattagaaacttgtttgaatcgtcttcctcgaacccattacttttcgtgctttttttttttttttgctcgctttccgtctctgtctttctcagcgccccccctcctccgccctttcacgtgggagctcgtcgctctgccccgtcggaggagggaagttggttctccaggagtcggggaagcgtcgagtttggatccaggggc

SEQ ID NO: 31692 - DNA, 750 bp, Homo sapiens
  chr20:25061761-25062511
  hyper
cgctgcgccggcagaggagcgcggtacccgggactcccttttcagcaccccaaggggcggacagttccagggctcgaggccccgtactcttccaggacccgtcaatcattcgatcatttccgcccgcgtttccacctggtaccttgttcggtgctgctggtgaccaccacaggcccgggccttcccgacccacgcagctgccagaggcggagactggcgcctggcgctggggggaaaaatggccctctggagatggttgttgaagaccccagggtctcatcaaaaggttccacccggaaccaggtggtggcggtctcacatcgctgagggaacaggaccccggatgagaggcagggatttaggatgcagcaaggggcaggcggcgcagctccgcgaatgcccctcccgcgacggggcctcgctctgggctccccgcctagatctgggccgctggggccaggggtgcggtggggcgatggtctgtgacccctgcgcggctcagagcctaggggacaggggcaggagcggaaagcgcgggcctgattaccggacgtggagacgctgtcgctgcgcttctggcggccgagcgcaggcggcggacggctgggagccagcggggcagcgggctcggggcccctgggcggcaggaacggcacgtccgctaggagcaggcagggtgctcgagcggccgccggcggctgcgtgccgaagccacagaggaggccgagtcccagcggtagggccccacgc

SEQ ID NO: 31693 - DNA, 189 bp, Homo sapiens
  chr20:25223074-25223263
  hypo
cgaaattgaccagcacagatctgccagtggcgttgctgggatcccagagagattttccctccgcacctgcggtctcaagggccggcggtgcttctgagtcactcatttcaccagcgatcaatgagacactcttcaggtcctcaagaagcttaagcctagccgaccaaaaatgtctgttttccacacccc

SEQ ID NO: 31694 - DNA, 160 bp, Homo sapiens; identical to SEQ ID NO: 25508
  chr20:2668754-2668914
  hyper

SEQ ID NO: 31695 - DNA, 131 bp, Homo sapiens; identical to SEQ ID NO: 30223
  chr20:29873920-29874051
  hypo

SEQ ID NO: 31696 - DNA, 110 bp, Homo sapiens; identical to SEQ ID NO: 23577
  chr20:30153955-30154065
  hypo

SEQ ID NO: 31697 - DNA, 650 bp, Homo sapiens; identical to SEQ ID NO: 26823
  chr20:3052452-3053102
  hyper

SEQ ID NO: 31698 - DNA, 1356 bp, Homo sapiens; identical to SEQ ID NO: 27909
  chr20:30639044-30640400
  binary

SEQ ID NO: 31699 - DNA, 184 bp, Homo sapiens
  chr20:31115632-31115816
  hypo
cgagtagatgatgtcaaagaaatcttccaccacagcgacccgcttcagagagatgccctctggctccgacaggccatctgccccctgcgacagggtggacaagctgtgttagtgtcaggaatgatggcggggtgagaactgggccctgaggccggggcaaggggtcaggacgggcaatgcctcc

SEQ ID NO: 31700 - DNA, 305 bp, Homo sapiens
  chr20:3218632-3218937
  hyper
cggatgccaaggcgggggatctctctgcacatccctcttctcactctcagaccggtcctgggggccataaacgcccattgcaggcgcagttcccccgacccccgtcacgcgccccgggtcacacgggggccgacaggcaacggtctccagtcctgggaccgcgtcccggccgcctggaagccagagccgttggtccaaaagggagaacaattgggggtgggaggagtatctgagggacacatgggtcgggggaggctgcgccctccctgggccggtccccggatggtcccggctgtttgtgcctc

SEQ ID NO: 31701 - DNA, 178 bp, Homo sapiens
  chr20:32450366-32450544
  hypo
cgagccaccgcgcccggctggcttgtgtttatttaaggaatggaagcgttcactcaagccagacttcaggggcaaatgtacattgggaatctccaagggacatctcccaaactacctgaccagggtgtgggttccgccgaatatcttttgggaaacgctgtgcgggggtccctagagc

SEQ ID NO: 31702 - DNA, 266 bp, Homo sapiens
  chr20:32677630-32677896
  hypo
cgcactgtaggaaatagagtcgtgtgtccttctgcaggattgtgtccggtgatcggcatgtgtgacaagtgacatattcctctgcaaataaagcaacacacagaattacctggtggctgcagtgaggtagagaagtttctgccttcttaaatacatctacaaagaactccacaagcccaggctgagaatttagctgggcacccagaccagggaagcgcagctattcgaggggtaagaaaacacaagctgtctgctgtggcgcttcc

SEQ ID NO: 31703 - DNA, 1291 bp, Homo sapiens
  chr20:34188561-34189852
  hyper
cgtccaagtgctgcggaaccgcctttggggtctgatcccttctggctttctttttcttctttcgggtgagccgggacaacgtggacccctgctgggcctggggaggctcaggttcagctctcccttccaacacctgcatggacacagccagcagaaggcggccgcggaaccaaatgccttggccaacgccttcgttgagaccttgaagactatcccggagccccgcgccggggggcgagccatagaggggcacccaggccgggccgaaggtagggttaaaccccgctgtggggaacaagagaagcgtgttggaggggagcgtggggagggcgagtgctggtaaatctctgcacctcaccctgatctcctccaagtattcgggggtgagggcaggggaggggggctaagccgctctgaaacggaagaagttggccagcagctgcggacgcgccgctgtggaacacgacctggggcgcctccaaaacagctcagcgccccaaggagctggaaatcgcgggagcccggcctcgggggacgcagcctgagccctgggggcggggtcgggattggggcggagctacgggcgatcggccaggcctgggggtcggggaaaggagtggaccggcagtgtcagcgtgtgcacagctgtagaagggtgggactgggctggttactggacaggcggttgtggtcagaattttgccaacggagccaaaccgatggtggggttcacagtctgggggcggcttgaagcagtttgttttgcgggcggaccagccctcctaggcggagcggggtcgcgaggatggggcttgcggttgggaatgggccctatggagccctatggaccgaggcgagtgaggccagatttgccgcggccagaagcgctcacccgcgcggcccggatgggagatccgcctcaggtccggcacgtgcgtagcgagtgccgcgtcgaccaggggcgcgtcgtcccgcagctgcaggcggaggctgcgcgtcagcggcgggaagagctccacgaagctcagctgctcgttccattcgggcgccgccgcctcggcgctcaccgacgtctcgccctgaaggtggcgttaaagacaggagaagggagatcagcgcggagtcggggccggagccgcggcgccgtgggccccggagggacttacctcctgccccaggaaagacacccgcacatagggctccaccaggacgcgctggtcgtgcagggcgcggaccaggctgcccagcagccccaggcgcagcgcgggaagcccctcggcgcggtacaggc

SEQ ID NO: 31704 - DNA, 444 bp, Homo sapiens
  chr20:35201323-35201767
  hyper
cgaggatgagacgggatgacacacacgaagtgccccgcacagcgtcgttgtaaagcgttggctgttttcacctctggccgccccctgtgagcccgatcatgtgctttttgggcttaggtcggaggcggcctcccagattctacaggccattgaggtcgtaacaagcgtctccatcagagcctagtccttaactagctgcgggtaagtgcccggactaagtggcctcagtttcccctcgaagcaacgggaccaatcgcaccgccggcaggacatcttgtgcggggcgcgaagtgacaaaagtcaggatttgcagaagttcccactcggtaacgacccccaccccggcaaggagcacagtaggcgctccggaaacgccctccacgaggagggccgggccacttcctgcccccgagcgggctctccccggcggaggctcccaccgcc

SEQ ID NO: 31705 - DNA, 790 bp, Homo sapiens
  chr20:37302711-37303501
  binary
cgggatccggggcctctggggacccgagagggacgttaagttcagggcttcagggtgcagccctggggtcggtacccccagcctccaacccagagctggcagcgctcgcccccttctccgcgcgggccctcagctcagctccctcttcgctccccgtgtccccgcgagcgggagggaggggatgctaggacgccctgtcggcgtcgtcgccgctttccgccattgtttagtcgtgatgctctcattttctctgaatcaacaattttctgctcggctccgcgccgaccggcgaacgcggggcttttcctcgcccgcctgatgacagcagagcggcgcggagcagctggtccggaaggaagcgccaggcgcctgcccggtcccaggcgtccgctgccgcccacccacaccagaccccgcccccgcgcgtcaagccccgcccatccataccaagtcccgcccccacaccctcacccacacaccaggccgtccccaccccgcccccagagccccggggcgccccgcccgctagccgcgcacgcgcagtgagcacggcgacccccggtggtcgggtgtctccgcaggccgaacacgctgctcgcccagctgcggatcattaccgcccttttgttctccgtcgcgcgctcgccccacgctaggaatgcaaactgtaggcgccgccagcccccccttcctgtttccctgggtgggagtgggaagggagttttaaactgaattgtgctcagactcccagcccagtcttcccggagccatccgttccttcatccaatgc

SEQ ID NO: 31706 - DNA, 970 bp, Homo sapiens
  chr20:37354384-37355354
  hyper
cgaatattcgtttgaacatatgcacacacacatgcacagatgcatgcagacaggaaccagcctgctcccttgggtgcggccctgttggagacatacaggtatacacacacgaaagcacacacatgctcccacacaaacacatttagtccgcaataatccagcattacctgtgcacagactcgcccctctcgcccgaaatcccggctgcaccgcaaagaggcggccagctcctccccgtgtgaccctggcgaagccctctccagaggctaagaatggcccctgctctctaggccctctccccttattcctaaccccccactccccaccaggcggcgcaggactcctacatagggagcaggtttggagtcttggcaacgacctccgagctagcaggggctggcaggccgcagctttctgggccgaaggagacttcagctctaggcaaccccggtcccttacagcttggccccgcggcgtccctggagcgcactatcactggggccacggaaggcaggttttctgggagcagaggcctcccaggggttgttccatgtatcggggtaagcaggactccaccgggccccgaacaccagatggcccgacccaaggcgctttccgctccggggcccggcgagacggccttgctggatcacggacccggggctgctcccgccttcgctgtgccccgcgacttcccggggcgtctttcaaggctccgtttgataggccccaagggaggccagggcaggaggctggaggctcgtaggcctccgggaccctggatttcgttagctcttagtccccgtgtggattctaaaccctacagccctgtccgcctgaccctgaagcttctggttctagactcttgctcggttcggctttctggcctccctggcgccttcccgccaagctcctcctcctgcttgcctccccagcctccacttagtccccttccttaggtctcgccctc

SEQ ID NO: 31707 - DNA, 328 bp, Homo sapiens; identical to SEQ ID NO: 27922
  chr20:399954-400282
  hypo

SEQ ID NO: 31708 - DNA, 1242 bp, Homo sapiens
  chr20:400915-402157
  hypo
cgccttagccctaccccgcccccatcgtgacacacgcactaatgacacagacattgatccccgagtgctccccattctgatctcacccctggccccacctgcattccccttggacccggtgctgcccctggccaccccactcctgttcccgtctcagctcctcggcttcgtcacttccccacccctgacgttgagtggctccaccagccctggcccgggccctgccctgctacctgactcaccactcagaccccggcccccttccttaccttgctgccattgctgtctcacctggcgccttccgtggctacctggccggcctcccctcccttggcttccccacctccacctggcctcactcccagccccgcccctcccaacctgcctgctcctgcccatcccccaccccccaccccccatcccccagccccacccccatcccccacccccgtcccccatcccccatccctactggctcccagctttgcctgtggctggtctgacccagccctgaccacgccccctggcccttcccccttcggggtctgacccgcccccgaggccctgacccgccccgtggccccgccccgtgtgcccagcggaagcagcagcagcaggaggggaactacctgcagcacgtccagctggaccagaggagcctggtgctgaacacggagcccgccgagtgccccgtgtgctactcggtgctggcgcccggcgaggccgtggtgctgcgtgagtgtctgcacaccttctgcaggtgcggcccccagtcccacccccggcaatgcagcttaatcaaagccgccaattacgcagggctggacgtgggtggggccctgtgctctgatacctcattggacgcccgcgaaaacctacgaggtaggctccgtctccccatgttgcggacgaggaacctgagggaaagagaggcccagcgccttaccccaggcccacggctcatgagagaagcagcctagacgtgagcgcaggcgtggggggagactcccttcccctctacctttcgccgcccgggctcctgcagccacgctgctctcagcctcgctgtgggcatctgccagtttctgagtctcctgtcatggcccccccacccctgaatgtggggaacacagacccgctcaccacagcggacccttgtggagccgcccctgggtgacaggctccgtgcctgcctcctgcagcttacattccagcagagaggctgatgagaatcggataatc

SEQ ID NO: 31709 - DNA, 55 bp, Homo sapiens; identical to SEQ ID NO: 7245
  chr20:42833281-42833336
  hypo

SEQ ID NO: 31710 - DNA, 262 bp, Homo sapiens; identical to SEQ ID NO: 29025
  chr20:43729515-43729777
  hyper

SEQ ID NO: 31711 - DNA, 491 bp, Homo sapiens
  chr20:44452643-44453134
  hyper
cggccgtcgttgttcttgtcgccgtctttcatcagagattcgatctcctcgtccgtcacgtgctccccggaggccctgaaaatctcagccagctcctccgggtcgatgtagccgtctgcattccttcaggtccgagggacagggcagggctcagggccggggcgagctgccctggccaccacactcgacgccccgcttccgcactcccaacacggggaagcttccagcgctgccggccgggttctgactgctaagcccctccctcggctcccgggcccccagcgcacctgtcgaagatgcggaagcactcggccagctcctcctcgctcttccctttcgcgtcctctttcatctggcgcaccatcatgaccaagaactcctcgaagtcgatggtgccgctgcctgcgggcagcaggtggcagactgagcctgagcccagccgctgccgcctctccccaccatcccctgcctccgagggacacccgctcacc

SEQ ID NO: 31712 - DNA, 455 bp, Homo sapiens; identical to SEQ ID NO: 13887
  chr20:46234984-46235439
  hypo

SEQ ID NO: 31713 - DNA, 327 bp, Homo sapiens; identical to SEQ ID NO: 24310
  chr20:46365433-46365760
  hypo

SEQ ID NO: 31714 - DNA, 314 bp, Homo sapiens; identical to SEQ ID NO: 25525
  chr20:46823362-46823676
  hypo

SEQ ID NO: 31715 - DNA, 234 bp, Homo sapiens
  chr20:47252934-47253168
  hypo
cgacccggcctgggcgggcaccagtgggtgggccagcggggccgccctcccgccccactcactcaccactgtggctggcgagagcagggactggcagtgcagcaggacgcccgtggccgccacctgctccagccacttgcggctggcgtcgcggctgctctcctcgtactcgccattgttgttgtagcggtagcccagggccgccagcagctgcttggagaaggtgcacacggc

SEQ ID NO: 31716 - DNA, 313 bp, Homo sapiens; identical to SEQ ID NO: 24311
  chr20:47296037-47296350
  hypo

SEQ ID NO: 31717 - DNA, 1508 bp, Homo sapiens; identical to SEQ ID NO: 27931
  chr20:47443693-47445201
  binary

SEQ ID NO: 31718 - DNA, 224 bp, Homo sapiens; identical to SEQ ID NO: 24313
  chr20:47905365-47905589
  hypo

SEQ ID NO: 31719 - DNA, 158 bp, Homo sapiens; identical to SEQ ID NO: 13891
  chr20:49178954-49179112
  hypo

SEQ ID NO: 31720 - DNA, 242 bp, Homo sapiens; identical to SEQ ID NO: 13892
  chr20:49206898-49207140
  hypo

SEQ ID NO: 31721 - DNA, 117 bp, Homo sapiens
  chr20:49836905-49837022
  hyper
cgccatgctccatccgtcctgcaggtggcgcgcctgagcccgtgcacggcagcctctccggaaggtgaagcacgctgccgcactgggggcctgcctggggctctgaaagcccattac

SEQ ID NO: 31722 - DNA, 174 bp, Homo sapiens; identical to SEQ ID NO: 7251
  chr20:52374073-52374247
  hypo

SEQ ID NO: 31723 - DNA, 3459 bp, Homo sapiens
  chr20:55199913-55203372
  hyper
cgtaccgcttgtcatatacatatgtaaagataatttaaaaccctagggtatacccttttcaaatgcagagtttatagtttccaaggggaggagggcaggggaggagtaaccaggacctttcctgccagtcttccaatcgcgatagctcgttttggctgtgaatttccccccttcccctccccctcccgttaattaaataaacgctggaagcgtgtgtttaccgcacacgactcggccctcggggaactctttttctacgtctctcctactcttaaactcctcaactcacagagggttggagagctggcaccatgagcttccagttcctacgggtgagaaaagaggtgtctgtgtggagggcaggtgcgaccccgggggctagcagagaggagaggctgcgggaggactcgctgcgaagggcgaggggtggcgctgggtgggacgggcgcctggggccgtgcagggtggctcctgggtgctgcccgggctgcctgtcgcccagtactggcgcaggaagacgggtccgcgcagcgtctggcaacagtggcctgctccacgcctggaggcgaccaagttctgagttaaaggcgccgggcttagccgggaagtgtatggcgacccagaacacggagcggagaaggcctcaggggacacgaggctaccgccttagtcctcgggcctgcgctccgagcggttagggtgcgtacggatgggctccgggatgttagtggagaggtgacaggagtctaccatcccacggccaagcgtgtgaggcctccggcgggcgggggtcccccccggggcagggcagggggagagtcaggcatgtctctaacgggctccctagtagaaccgctaggaaagtggccttcaaccctaggcacctttgtggctttcaggtagttgggcgactaaaaattcacttttgcctgctgtgaaatgggacaggtggttgtcaggttagagactgtgcccacgaagtctcgtttggcgggccgggactgacgtggacccgggccctcctcggaagcttgggaacctgtgagcccctcagctcctcgcctcactttgcctgtttgaaaaaaggagttgtttgagaggaagagttaaggctcaaaaggttctaaacgaagagcatgcggcctgacgcggagcgcaaagaagcgagcagtgaactgaatctggtgggactgagaccagaggcgtctgtatgcggcggccgcttcgcgccctattaaagcaatctgttatttacgataatcatttttgtaattattttggagtggctgtgacttgatgtctgtggtgccccagggcatgcccttactggacatagatacttcagggtgccctttgacgccagtgtcggtccagtgggtgccagtgccgcgaagggagggtggcgggcgtgaatgccccctcctcctgggtttgccgcaggccccggcctttccaccttgcttgatcctggcgggtctgccacttactgaggtccctaccggcgctcacgttgtcccgagaggcgggacaaacgtccggcgcgtggcgcggagtctgcgaaagcgctcgggggcctccatcttctgctcgggagtcccctccctggggcgggaagaggagtcgcagatctgcccgaatcttgctctacccgcctggccgccttcttccgtctggggtgggggcaggggtggcggatgactcaggcctggggccgggagccctgtttccaaaggcaccacctcgcgcctctttggaagtggcgcgctgttggggcgctcccgctgttgcagaggcctggtttgcggtttcataggggcgtgggtccagggcttccagggagtaagtgagtttaggctccctagggggcggtagaggggaacccccgacaaccttccatcctcttctccaggcggctgcgaggcctccggggttccagaggggtccccttctgccggtgccggctgtcttgagcgcggccacgcagtccgcgtcttcacgtgggcaaggggcggggacgttggagggaggctgtcttggatgctggagccttcggttcccggctctgctgagcagaaaagttgaagtcaaggaagggttgaggcttcctcacaagggcgcgcgcgtgcctgggtgccggcccagaagccgagaatgtgcgtattggggaagggtctcccgtgccgagaagacagaggatttgttctagctgccttccgtacagagggcgcggaggttgcgctccagttcgaacgcttacccattggaaagagggcagcgccggggtccagggaagctccttgggaatgaatggcctttgccaagcggttccggatcctctgggtcctttgggcccacggcacggtgctgcgcgagccctcagtgcccatcggctcccttcgcctcctgcgtagacgctcccaggcggggaggcatatcggttcctccgggcagctttggctagtgttgctgtgggaaaggagagccagggcctgggatgggggatgagcaccttcttgcccattccgggccccagcgtgcaggaggtaaacttgccagcacagacaagacagcttgttcaagctgcacctcaggccgggtcagagaataaaaccgagggctagaaggcccagaatgtcggacagcccagcggcacccgtcagggagtcccaggcgcccgaaagaggcgccgcacctctggcgagtctaggacccatcttcctggacctgtgctctggagtgcctgcgggcctgggtctaatttctgcttctggcaggtgtccccctcccccgccgctaataccaggagcgctgcttctgcggtaacttattttacccccagaagcctgttttgggaccgaagtgtcagggtcctgtgtgtctttttatgcactgttctccttagtgcaaagccctgcagatatgcttggccgaaaagtctcagtggtttcaacttccagattttgttcccgcgtccggtcggaaaatcacctgggatttggctgctgtctaaggccgggggaaagtttcccttggaggacgcctattattattattttcttttaggcccacctgggtctaaataaatgctaaagttcaaacgaacccgagaaggaacagcgaggcagtggatgccgccattccgtggatgggagagtcatgtctactgcaggtgcggacaccgtactgataggcattgattattgcaaaatcgtattcagtatcaaatagaaatagtcttgtcctctaatccccacagaatgtttaaatccagcccagggagccagttggggcgtcccaacaaatacgccctcgagaattagcgatgttccccttacaatgaaagtcaattgctgcataataactgggccaaagaatttcgttagtttaaattttaaaaattagtattgcactttgctttcaagtttgggtggcaagtaccgaaggggagagggaagcagc

SEQ ID NO: 31724 - DNA, 226 bp, Homo sapiens; identical to SEQ ID NO: 13894
  chr20:56001391-56001617
  hypo

SEQ ID NO: 31725 - DNA, 381 bp, Homo sapiens; identical to SEQ ID NO: 26847
  chr20:56772009-56772390
  hypo

SEQ ID NO: 31726 - DNA, 244 bp, Homo sapiens; identical to SEQ ID NO: 27946
  chr20:60477321-60477565
  hypo

SEQ ID NO: 31727 - DNA, 653 bp, Homo sapiens; identical to SEQ ID NO: 30250
  chr20:60485014-60485667
  hypo

SEQ ID NO: 31728 - DNA, 152 bp, Homo sapiens
  chr20:60756194-60756346
  hypo
cggatgtcacgcacaaatggggagagaagtgtttattttgtaggcactaagggtttctaaaacccttaacactggtaagggctcaaaaataaacgtatgtgttcatattcgatcaccgaaatgagagttcttaattgctaattgacaaacgc

SEQ ID NO: 31729 - DNA, 1247 bp, Homo sapiens
  chr20:60855793-60857040
  hypo
cgtgtgtgtttcgtgaggtggcctttcttttgacgacttcacaggaaagccatttgtctttgttcagtcttctttgattgcttattaacttgtcttgacatttaagtagaaagctttgtagatgctacaaaggaaagaagaagtacatttcaaacgcatgctaaatacacagcctccgtcgcaggggcttcaaagcagcgtgctgctctcccgcgggtgccggttgctgtgacccagccccgcctggtcgttgcgtcttgggtcacgtcgtgtcttggcttttctggactctcactgcttgttttctggtgtcttcacagacataatgaagcctacacctggaccaaccccacctgctgcgtccacaacgtcatcatcgggaagctgtggatagagcagtatgggacagtggagattttaaaccacaggtgacagcaccccaccgttgggtgagagcgcgaggctccgggtggggatgggcgagccggggagcgtgagcatccgtgctcctggtgggttttagctcagcctcacgagctgctgccgtgtccccgccagcccaggcatagcagctgcctagacttgactctgaccggtgttggccatgaatgctcctcgttcaagacctcgtttttcgtcacggttgttactttaaggctttgagctatgctgaagagctgtgtcattgccaggtgcagcgcagtggccgtccacggccgttggccactgtctaggcttgaatgccctattcctggaagctcatgactggtgggctttgccttttcaccactttagtgaggtataatcgatgcatcataagactcgcccattctgaatggacacttaagtgatttttagtaaattgaccgaatcatggagccgtccccacagcccatttcaaacacttccatcgccccaaaggcccaccacacccatttgcagtcaccccccgcctgccccaggggcctccaccgcgcttctcctgttacagagttaccctttccggctgtttgctgtcttgcagcagaaacctgtgtttgtttttctcacagaactggacataagtgtgtgcttcactttaaaccgtgtggattatttggaaaagaacttcacaaggtggaaggacacattcaagacaaaaagtaggtccttgccaagtgttcatggggcaccactacagcctgtgtgtccacgttagaagggctcaggtgctcctgggcctgcgtgtgcctacgtgcatgagacgc

SEQ ID NO: 31730 - DNA, 331 bp, Homo sapiens
  chr20:60976568-60976899
  hypo
cgccccgggccccacagagaggtgtcggtgtgtccggcagacatggagaggatcacgcatgtgcagatgtaccaccttacgcctagctggaagcagcacacacgccggtcagcaggaggcgggacatgcgcaatcaggggacggcatgcacagcatgctgcaggtgcacacagacgccacacgggttgagaggctcgtcatgtggtgacacaggtcccctcagtgtgggggaggggctgaggaggggcaccagggagctgggggattggcctgtgtctccgcaggggagtggctccgtggggtgtgcccaggcaaatgcactgagctgcac

SEQ ID NO: 31731 - DNA, 514 bp, Homo sapiens; identical to SEQ ID NO: 25544
  chr20:60983874-60984388
  hypo

SEQ ID NO: 31732 - DNA, 691 bp, Homo sapiens
  chr20:61505866-61506557
  hypo
cgaccctgtggggctggtccctacaggggcatgtgggaagatcccagtgaagctgaggaccacgagccctgcaagtccattgggatctgccggtgaactccgcaggtcgtctttgaaggcacatgtggctcttctgccactgcctggggagctgagacccctttgcccaaagaccctcaagtgccttccctagggagctgccctgtaaggtgccgccgtcctgcccgggactcaccaccacctctgtgttccttctagacctagatccagactggagttccagcaggccccaaaagagaaagtgtgaggtgtggcctacaaatatgtttccctacgaaaacctgcggaaaatgtgtggaaatcgatgttgagagtgcgggatctgggtgggaggaatataagcttgcgtaagtggacagggactcagatacgagattctggatttgatgcgttggagggaacggctgggagtgacccaccccccacccccattttcttcatcagtcaccgaaactttcgccccacaggtagctgaccctaaattcagtgaaatccagaactttcctggcacactggagaggacggcagaacgctgggatggatttatcgtgcaagaccagcttgatgtccttagggcttggaggtcaccccttcacgaggattgtgaggagtgaattcatcggggagcccc

SEQ ID NO: 31733 - DNA, 145 bp, Homo sapiens
  chr20:61527423-61527568
  hypo
cgccagtgcaacaatacgtgggcggcagaaggatcacagaggagaaagaaacgtcttagctttcctggaaaggacacgaacatctcaaaatattggttgatccctttagcacccagcgaacagaacaggaatactccaatgcacc

SEQ ID NO: 31734 - DNA, 299 bp, Homo sapiens
  chr20:61527972-61528271
  hypo
cgtcctggggctggcgaggccattggaacagaaggtaccactggcttccttacggctcccaccaaagcagcggagccagggaacttcttggaggcagccgttgccgctgcaggtgccggtccggcctgcctggcagctgaagcaccactcgatggggtagcggagagccatggcctcttggggatggtgcccttgaaacctgagggtggctttttaatggctggtgtggctgctgccacattagcaaaagaagacttctttggcacgaggtttctaggtgcaggctgcttgcccaccgc

SEQ ID NO: 31735 - DNA, 990 bp, Homo sapiens
  chr20:61809102-61810092
  binary
cggggttcccgcgcccttctccgcccagggcagcagcgcgcggggcccccgggagccgaagagcaggcgggaactggcggcggcgcgggaggcgcagggagcggaggcggcagcagcggctcccgccgggactggtaattacgctcggggccgggccggggcgagccgggcaagcggcctctctgggtctccccgtctttctctccacgaacagctcgagcgccttctcgcgggcccgctgcgcgcggagaggacgagctcgctgggttgtaaaaagagacgagttttcatctttgagcatcgagattcgttcttttaaccgcattcggtgcgcgctcctgggtcggcacgggcagggcgacggcaggggaaggcagctgcggaggagctcgcgccgcccagtcggagcggttctgcgcccctcggagccccgcgggaggcggccgggtgcgcacgcgctcaccacccccacccccggaatccgtcttcgcgattcccgggcgccccagctccaggaacgcccggagggacgcacttgggggcccactctctgccgcggaaaggggagaagtgtgggctcctccgagtcgggggcggactgggacagcacagtcggctgagcgcagcgcccccgccctgcccgccacgcggcgaagacgcctgagcgttcgcgcccctcgggcgaggaccccacgcaagcccgagccggtcccgaccctggccccgacgctcgccgcccgccccagccctgagggcccctctgcgtgttcacagcggaccttgatttaatgtctatacaattaaggcacgcggtgaatgccaagagaggcgcctccgccgctcctttctcatggaaatggcccgcgagcccgtccggcccagcgcccctcccgcgggaggaaggcgagcccggcccccggcggccattcgcgccgcggacaaatccggcgaacaatgcgcccgcccagagtgcggcccagctgccgggcc

SEQ ID NO: 31736 - DNA, 615 bp, Homo sapiens; identical to SEQ ID NO: 25548
  chr20:61973840-61974455
  hypo

SEQ ID NO: 31737 - DNA, 612 bp, Homo sapiens; identical to SEQ ID NO: 25549
  chr20:62031127-62031739
  hypo

SEQ ID NO: 31738 - DNA, 453 bp, Homo sapiens; identical to SEQ ID NO: 24329
  chr20:62031988-62032441
  hypo

SEQ ID NO: 31739 - DNA, 387 bp, Homo sapiens; identical to SEQ ID NO: 24330
  chr20:62046195-62046582
  hypo

SEQ ID NO: 31740 - DNA, 1055 bp, Homo sapiens
  chr20:62383146-62384201
  binary
cgcccccggtgggtctccccatgaagccccgccccccggtgggtctcccatgaagccccgccccccggtgggtctcccggtggagctcggctcctgcaggtccgctccggaacctgctgactctcctgcgattcctaaactggcagcgatgctccagagcctcttccgccccgacagcagccccacctctgcccggagcccggggcgcctccactgcctctcctcacacagctgcccgccgcgagctccccctgcaccctgcgcctcggggtgggcgttccaggactccccgaacccttggggccgccccgctctgggctgcctgtgccccacccgcctcactggttgatctcacccacttgagatgccctcgccaggccttttttggcaaatctgcctccctgttcccaggctgcctttttctattatttcctccccaagcaaatccatccactccacacctgctacctgacaacgacctgccagtgctgagctccagggtgggcgcggtgggtgcagacaggtcggcaggcacaaggacagggttctccctcccgaggcagggcgggggcgggggggcgcagaggtggctgagggttgggggctccaagcagagcgagctgagtttgccgaggcctggctgccttggcggccagcaggtgagcagggtgggccgaagcctctgcaggggccatgtggcccagccacacccaggaggccggggcagagcagacaggggcccggggcggatctccctgccctgctgtcgtcccccctgtgcagagtggacccggtgtggggtccggggcggtctgcgccctcatcaggacccgcctgcccggacatcgtggccacgcgcagcgcgcggcacgcggaccctccccgcactcaccagcgtgtggcgcttcatgtgctcgcgccgcgtgaacttcttcccgcagatctcgcaggggtagggccgctctcccgtgtgcgagcgcatgtgtcgcttgaggatgcactggtgcatggccgagaagctgcagtacggacacttgaacttcttcctgatcacc

SEQ ID NO: 31741 - DNA, 751 bp, Homo sapiens; identical to SEQ ID NO: 23211
  chr20:9496745-9497496
  hyper

SEQ ID NO: 31742 - DNA, 139 bp, Homo sapiens; identical to SEQ ID NO: 24334
  chr21:19274771-19274910
  hypo

SEQ ID NO: 31743 - DNA, 153 bp, Homo sapiens
  chr21:34508391-34508544
  hypo
cgtttccaagaagctgagctgggctgaagcacgcagcgtgtccgttgctgctccactgaacctccagctggatttccatgtggtggtgcaggcgaggggccgtgccgattcattatgacaaaatgacatatcaaaaaggttttgctggcctgc

SEQ ID NO: 31744 - DNA, 950 bp, Homo sapiens
  chr21:36041402-36042352
  binary
cggtgggaagcagacgcgcaatcggggagaagctccagcagtggaggaagagtccagggagtttcagctgggcagaaggggcgcagaggcttggggccaagcggagtttgccctgcgggtcctgcgcaaggccccagtgccccggctaaacctttgccgcaggatcccggagccggcgtccttcaaggagcacagagggccccgtagcacgccccttgcccagcgccaccgacccttaagcagcgtcaaggaaggagtcccgatcaaggacagggatctgcggccatggccgaggccgcggagccggagggggttgccccgggtccccaggggccgccggaggtccccgcgcctctggctgagagacccggagagccaggagccgcgggcggggaggcagaagggccggaggggagcgagggcgcagaggaggcgccgaggggcgccgccgctgtgaaggaggcaggaggcggcgggccagacaggggcccggaggccgaggcgcggggcacgaggggggcgcacggcgagactgaggccgaggagggagccccggagggtgccgaggtgccccaaggaggggaggagacaagcggcgcgcagcaggtggagggggcgagcccgggacgcggcgcgcagggcgagccccgcggggaggctcagagggagcccgaggactctgcggcccccgagaggcaggaggaggcggagcagaggcctgaggtcccggaaggtagcgcgtccggggaggcgggggacagcgtagacgcggagggcccgctgggggacaacatagaagcggagggcccggcgggcgacagcgtagaggcggagggccgggtgggggacagcgtagacgcggaaggtccggcgggggacagcgtagacgcggagggcccgctgggggacaacatacaagccgagggcccggcgggggacagcgtagacgc

SEQ ID NO: 31745 - DNA, 836 bp, Homo sapiens
  chr21:38073275-38074111
  hyper
cggccaggcacctccgagcagcaggtctgagcgtttttggcgtcccaagcgttccgggccgcgtcttccagagcctctgctcccagcggggtcgctgcggcctggcccgaaggatttgactctttgctgggaggcgcgctgctcagggttctggtgggtcctctgggcccaggagctgggagggctgcgccggcctctggagccccgggagccagtgccgaggtagggagacaacttccgccgcagggcgccggacggtcggggcagagcaggcgacaggtgtccctaggccgcagggcgcttccatagcgccatccccaccaggcactctactcgaaatcggaaagctcgaccttttgcgttcgcctctgccaagcctgttatttgtgctggccgctgggtctggagctgcgcttctcggcccctccccggtggagcgcagagggctggtctgcaagcgcggcctccagccccgcggctccccggcccaggagccaggcgcgggctgacccgggagcacccggcagcggagggggctggaagcggaccctaggcctctcctgtgccacccggccctaccgcgcggccgcggggcgctctcctctcgggcgcagcggtccttcagcccagggcaggttcctccctttcctactcggaacgtggcaaagataccccagtcccagcccctccagctgagagctgttgcccaaggtcgtcgctacttgtccgctcaatggtgaccccttggcagagaactagggatgattccactccggttgatgttttaggggaaattaaaagaacattcggttttctgagtctccttccggggaggc

SEQ ID NO: 31746 - DNA, 763 bp, Homo sapiens
  chr21:38076972-38077735
  hyper
cggcgtccgaactccccaggtctgcgcacggcaatgggggcaccgggccttctgtctgtcctcagaatacgtaggatacccgcgggcgacaagccgggccaggctaggagcctccttccctgcccctccccatcggccgcgggaggctttcttggggcgtccccacgaccacccccttctcacccggtccccagtttggaaaaaggcgcaagaagcgggcttttcagggaccccggggagaacacgagggctccgacgcgggagaaggattgaagcgtgcagaggcgccccaaattgcgacaatttactgggatccttttgtggggaaaggaggcttagaggctcaagctataggctgtcctagagcaactaggcgagaacctggccccaaactccctccttacgccctggcacaggttcccggcgactggtgttcccaagggagccccctgagcctaccgcccttgcagggggtcgtgctgcggcttctgggtcataaacgccgaggtcgggggtggcggagctgtagaggctgcccgcgcagaaagctccaggatcccaatatgtgcttgcgtggagcagggagcggaagaggcagccggtcctcaccctcctctcccgccacgcacatatccttcttgacttcgaagtggtttgcaatccgaaagtgagaccttgagtcctcagatggccggcaacgcgccgaggtcacgctccccagaaacacccctctcccctcccctaccccagctccccctggggc

SEQ ID NO: 31747 - DNA, 976 bp, Homo sapiens
  chr21:38079923-38080899
  hyper
cgaatagggaagggtttgcgaagccgctgccctgggccgaggtgcattttacgcttccagaggtcgaggcctccagagaccgcgatgcccagggcgttcccggggaggctgagagacccagggtgctctgggtgactgcacggcgactcctcgggaacccactcgtggctgcccgcttggaagggctttgcggccccgggaacgatctccaggatctccacggctggtcaggttccccgtccctcgtatcccgcgctgcccgggggctcctgcctttggttcagtgctcgcggcaccaccgcactcaggacggcagtggggggctggggctggggctgggcctggcccagcgtgggttggggcgggggacgcgccagcagcgcccgcagctcgctccgcaggggtcgcagccaggggtcgggagctaggctcgtgggccgggagacgccgggcgcgttgtcctccggggaggttggggtgcaggcggtgcaccgaccctcgccatctggcgctgcagccaccagccacggcgcttagtggagggtctgcggccaggctcccggcggaaagattccggggagggctcgggggttgtcccagcccgcgctaagcgccgcagcctcgcccggctttcctgcttcctcggactgtgcaggggaagcctggggtctcgcggggcgcagcagtcaggtcgagggtgcagcaggaggggagtcctgacgggcaggtccctctttcccctggtgcgcaacactggttggtagcttttgcggaggtggtgaagaagggcaggaggcctgttgagcggaggagtccggggatccctaattatgtgacaggagaccctttccagttcggcctgtggcccatccctctctcaccgccggcagattggagtctgctctcggggagcccccaggtaaacccctcacagggagaaggtttcggattggaaggaggaccgcgctcgtggggc

SEQ ID NO: 31748 - DNA, 192 bp, Homo sapiens; identical to SEQ ID NO: 25561
  chr21:38638497-38638689
  hypo

SEQ ID NO: 31749 - DNA, 113 bp, Homo sapiens
  chr21:38935395-38935508
  hypo
cgcctggccggctctgtgcttaagtggccccatcgcagccagagtagcctcattacagctgaagtccctggtaggtctcctccttcctctgagcccagcgcagtgccaaggcc

SEQ ID NO: 31750 - DNA, 214 bp, Homo sapiens; identical to SEQ ID NO: 13916
  chr21:43546440-43546654
  hypo

SEQ ID NO: 31751 - DNA, 824 bp, Homo sapiens
  chr21:44836746-44837570
  hypo
cggggagggcggtggggccggtgccaatgtgcaggtgtgtgtccaggagctgcgccgctgaggccaccggggacgcgccggtctgcaggagtgggggcggcagcagcgggagccccgacgtgaggagggtgctggggagcggggcagccccagggccatcacagggggcgatcacaaacggggcaggggccggctggggggcctgggagcagccgggtgcagcggccgggtggtgctgtaactggagcagcctgtgggaacagaggacaggtggtcactgcgccggctcgcagggttctcgggtttccgagtgcccgtgtggcagggcccgcccgaggagctgccagccgcggctgccgagggcaggtgcgtggctgatccctgaccgcgccccacctttcattctccacccggtttctcagcagctcagagatgcggccacaaggcgccctcgctccccgccaccctcacccacccagggactttaaaggacacgcccgcctgctgcacccccatggctcagcacctaggacctacgccccacacatctccctggctgggagcgggggtgtgcactgggctacagagaggagggaaccacttagcagatgaggttcctcgaggagataacctgccgtgtgcccacccggggtcccagggcgggggcaggccctacctctgctgctctagcacctcctccagcaggctccagccctcccggctgccggctgcgccgccgtgcaggcctgggctctgtgcaggggcgtggaaggggctcaggccgcccctgctggcccggctggcgggggcctggcacacctggc

SEQ ID NO: 31752 - DNA, 378 bp, Homo sapiens
  chr21:44866567-44866945
  hypo
cggtgtgaagccacccccctgccatgaaaaatggctcttccctgccacagccggcccagcgggagccaggtcagggcctggagacacagcgccccccaccggagccactgcccggcccagcagcacctgcggagaatcccaccagctcccacgcctcccgccgcgccaccgccccggctttctgcaaatccaccttatggaagccggataaggtgaagtccacatataactaaaagcgagttactgagggttactttctttgcagagtggttcccctaaaggattcctttaaacatgatccggtcagccagtgctcacttacgttcaccaagtcacgtcggtttgtggcggcaggagcccagcgtgccaggcacctgc

SEQ ID NO: 31753 - DNA, 754 bp, Homo sapiens
  chr21:45352895-45353649
  hypo
cgctctctctccctcacagcgtgccaggtgccttttctctgcgttctcgtcaacacctgttacattcgtctttttgataatagccaactgaacggcatgaaatgacacctccctgtggcttcgatttgcttctccctgatggttaataatgccgaacagctcttcgttaacctgctggctgtcggtgtggctccttctgaggcacagccgttcgggtcctttgctgtttgctttcttgctattgagtctgagcccctttaccctgtggatgctgggcctgcatcgggcatgtggtctgcagggttttctctcccttgcgggtcgtctctttaccctgtcgttccctttgtcatgcagaagctgtttagtttgccgtaatcccagtggtctatgtttgcttttgtcgtgtatcttttttaaagctctgccatctgttttctccatggggaaaggtttgggaatatcgatgatgtcatcatactcctggctgcttcttgacattttccatgcccagcattgttctcagtgcgccccgggggtctttggttctccatagcctgctggcgtccatgtgtttttattctttctttatggttgaggaaactgaggcacagcttggaagcggttggcactggggttaggctccagtagtctcggcatgtagcagcaaatgtgggaggggcagcacaggggaaaggtgaggggagagtcaggagagaaggacgccgcataccagatgcccagaggccccggc

SEQ ID NO: 31754 - DNA, 105 bp, Homo sapiens; identical to SEQ ID NO: 13921
  chr21:45499846-45499951
  hypo

SEQ ID NO: 31755 - DNA, 147 bp, Homo sapiens
  chr21:45516465-45516612
  hypo
cgatgctttcctccctgcagggtggccctggcccccttgccagattccagctggccgtcagtgctcgcgtgtctctctgaagaggctctgcggttctggtccctgtgcctgagctccaggtgccgccaggtgaggcccctgctgctc

SEQ ID NO: 31756 - DNA, 285 bp, Homo sapiens
  chr21:45712882-45713167
  hypo
cggggcttaggtcggcgggagaggaggtaagaggtccacctggggaacccctagccggcatggacacgactcttgtctacaagcacctgccggctccgccttctgcagccccgctgccagggctggactcctcggccctgcaccccctactgtgtgtgggtcctgagggtcagcaggtgagcggggagtgggggtcagggtgggctcttcaaggagcccaggacctacggggcggatgaattcacctgaaacaggaggagagggaggccaggcgagaaaggctcc

SEQ ID NO: 31757 - DNA, 255 bp, Homo sapiens; identical to SEQ ID NO: 24348
  chr21:46036558-46036813
  hypo

SEQ ID NO: 31758 - DNA, 271 bp, Homo sapiens; identical to SEQ ID NO: 25568
  chr21:46206052-46206323
  hypo

SEQ ID NO: 31759 - DNA, 411 bp, Homo sapiens
  chr21:46256922-46257333
  hypo
cgcgaggctccgaggcagcaggtttcaggggcacctccgtgcagtccccggcacccagggtgcagcccccagcacctccgtgtagcccccgacacccagggtgcagcccccggcacctccgtgtagcccccggcacccaggcagtccccggcacctccgtgtagctcccggcacccagggtgcagctcctggcccggcctctgctttgccggttgcttccagtcctagcagcaaagatcgcagagcctctgtcctcttggggtgcggggcagagcacgggcaccatctcctcagggctgggcccccgttcttgccctacgactctgcagagacaatcgtgtgactcgcagctcatgaattagcctggtagacaggaggccggagaagcccggatgcctggcctgggtgccc

SEQ ID NO: 31760 - DNA, 738 bp, Homo sapiens; identical to SEQ ID NO: 24349
  chr21:46308440-46309178
  hypo

SEQ ID NO: 31761 - DNA, 308 bp, Homo sapiens; identical to SEQ ID NO: 25571
  chr21:46359034-46359342
  hypo

SEQ ID NO: 31762 - DNA, 323 bp, Homo sapiens; identical to SEQ ID NO: 24365
  chr21:47425511-47425834
  hypo

SEQ ID NO: 31763 - DNA, 648 bp, Homo sapiens; identical to SEQ ID NO: 24368
  chr21:47602441-47603089
  hypo

SEQ ID NO: 31764 - DNA, 276 bp, Homo sapiens; identical to SEQ ID NO: 13924
  chr21:47640150-47640426
  hypo

SEQ ID NO: 31765 - DNA, 271 bp, Homo sapiens; identical to SEQ ID NO: 24369
  chr21:47746193-47746464
  hypo

SEQ ID NO: 31766 - DNA, 293 bp, Homo sapiens; identical to SEQ ID NO: 29060
  chr22:18328049-18328342
  hypo

SEQ ID NO: 31767 - DNA, 426 bp, Homo sapiens; identical to SEQ ID NO: 13926
  chr22:18619428-18619854
  hypo

SEQ ID NO: 31768 - DNA, 651 bp, Homo sapiens; identical to SEQ ID NO: 24371
  chr22:19706042-19706693
  binary

SEQ ID NO: 31769 - DNA, 946 bp, Homo sapiens; identical to SEQ ID NO: 25575
  chr22:19711088-19712034
  hyper

SEQ ID NO: 31770 - DNA, 612 bp, Homo sapiens; identical to SEQ ID NO: 29061
  chr22:19771495-19772107
  hypo

SEQ ID NO: 31771 - DNA, 151 bp, Homo sapiens; identical to SEQ ID NO: 25577
  chr22:21153882-21154033
  hypo

SEQ ID NO: 31772 - DNA, 416 bp, Homo sapiens
  chr22:22057979-22058395
  hypo
cgcgtttcagaaactcccggcggggggatggtgggttctttcaggacccctaaagacccaggtgattctacacagggcactgtgtaggtgccatccaggccgtcccagggcccgtgccgctccccccgggctgaaccagggtactcacacggaattgaagaggtaggcgcgtccctggctcccctgaaaggactgaaagaagaaggtcccgtgagattggctgcgagtgctttctggaacgaagcggtgctgcccagaaccaggggagtccagccccgcggctgttagctgcgccgggacgcgtcaccgggagcagacaccggcgtcccccctccagaactccacttctaataacagccacttaacggagctgcaagctgtttttcattgtagacaggagtggctgattctgctgc

SEQ ID NO: 31773 - DNA, 245 bp, Homo sapiens
  chr22:23437460-23437705
  hypo
cggaggcggggggctgcagggagcacaccagcgaccggccctccaaccctccagccactcagcaacatcgccacagcaaccagcaaccagacggcagcagccgaggcaaacacaagcggacggcttcccaccgtcgccgaggacagggaatgactacggcaaatcaggccactttgccaactagggaggtggagtgtcactagtggggaggggcggccaccgcccgctgcacagagcgccatgcc

SEQ ID NO: 31774 - DNA, 141 bp, Homo sapiens
  chr22:23453146-23453287
  hypo
cgacgattccatctaggtgctgggtgaaccaagcacaggggtgctgcctcagagccacttcgaatgagggggtaggatagcactgggattccagcaggcgatcatcatttgctggggggcctgcgcgccttccctgtgagc

SEQ ID NO: 31775 - DNA, 90 bp, Homo sapiens; identical to SEQ ID NO: 13933
  chr22:23453477-23453567
  hypo

SEQ ID NO: 31776 - DNA, 1336 bp, Homo sapiens; identical to SEQ ID NO: 23214
  chr22:28838056-28839392
  hyper

SEQ ID NO: 31777 - DNA, 1044 bp, Homo sapiens; identical to SEQ ID NO: 23589
  chr22:29445607-29446651
  hypo

SEQ ID NO: 31778 - DNA, 199 bp, Homo sapiens; identical to SEQ ID NO: 13939
  chr22:29876679-29876878
  binary

SEQ ID NO: 31779 - DNA, 66 bp, Homo sapiens
  chr22:29977676-29977742
  hypo
cgggatgtgcagcagagggtcagtgtaaccaccccatgggttcattttgcccgtttcccagacagc

SEQ ID NO: 31780 - DNA, 291 bp, Homo sapiens
  chr22:30642437-30642728
  hyper
cggcgccccctccctcgccgccaacctgccgcggggcgtgcggtgcttgggaccatgtgcccgcgctcgctccgggccgccacccagcgcctccggtggctgcgcgggcgccccaagtgttcgtgtgtctgcggcgggtgggcgtccggctcgcgctgccaagcgccccaagttgccgccgcgccccgcagcggggacgcgaagccggcgcggggcgggtgtatttacctgccgccaagaccttcattatgggctgcacttcagagggccttggaggaaacctcagatgcc

SEQ ID NO: 31781 - DNA, 851 bp, Homo sapiens; identical to SEQ ID NO: 24378
  chr22:31480666-31481517
  hyper

SEQ ID NO: 31782 - DNA, 224 bp, Homo sapiens; identical to SEQ ID NO: 9607
  chr22:33192959-33193183
  hyper

SEQ ID NO: 31783 - DNA, 600 bp, Homo sapiens
  chr22:35848339-35848939
  hypo
cgtgtggtgtttctgttgtctgcctacagtaggacgtaggctccacgccacagggactctggcttcctggtcggccactttgtgtctggagcatggagccgggcaggtgcccggcagatgtgtgttgaataaacaggtgggtggccgcctcacgttcctccacggtaaagtgacgctaaggatcatagtcacctctgggctacatgaaataccatgcggaaacgtctggcagcgggcagggcagggcagggcacttcactttctgtactagctgtaaagtgagaaagaagcccttggcactggaagcctggcttttcgttgactctgcagctcctggttagccctgtgtgtgagtttgtgttaaataatcagtccgactcctccgctggggtggtggtgccagtgtggccagttcttgtgcaaatagaacattttcaagatagttctgccacttgtacagcactctacgtgctgtagagttcagccctgagagagagggacaggatcctgtgtgtcccgtccgccttgcatgtgggtctcaccagcggcttccttcatgtcactctggagcactctcacccaccccgagaggaaagtgcc

SEQ ID NO: 31784 - DNA, 127 bp, Homo sapiens; identical to SEQ ID NO: 13944
  chr22:36519474-36519601
  hypo

SEQ ID NO: 31785 - DNA, 181 bp, Homo sapiens; identical to SEQ ID NO: 24381
  chr22:39877241-39877422
  hypo

SEQ ID NO: 31786 - DNA, 180 bp, Homo sapiens; identical to SEQ ID NO: 13945
  chr22:39941870-39942050
  hyper

SEQ ID NO: 31787 - DNA, 59 bp, Homo sapiens; identical to SEQ ID NO: 13946
  chr22:42033751-42033810
  hypo

SEQ ID NO: 31788 - DNA, 450 bp, Homo sapiens; identical to SEQ ID NO: 23217
  chr22:42353588-42354038
  hyper

SEQ ID NO: 31789 - DNA, 794 bp, Homo sapiens; identical to SEQ ID NO: 23218
  chr22:42679388-42680182
  hyper

SEQ ID NO: 31790 - DNA, 243 bp, Homo sapiens
  chr22:42896458-42896701
  hyper
cggcggccctcgggatgggtcctgccagggcgcagagatggcggtggaaaggcggggcgaaggcggggcgtgaggcgtggaggtgtggcctgactggggcggggcggggcggggcggaacagcctagaagcagggcctggaactgcaggatacactcccctcctgctacctaggcaggcgtgagggtgtgacggccgcgcattcgccagacgagagcgatggctgagaacgccgcaccaggtc

SEQ ID NO: 31791 - DNA, 122 bp, Homo sapiens; identical to SEQ ID NO: 26901
  chr22:42995599-42995721
  hypo

SEQ ID NO: 31792 - DNA, 151 bp, Homo sapiens; identical to SEQ ID NO: 13949
  chr22:43000061-43000212
  hypo

SEQ ID NO: 31793 - DNA, 193 bp, Homo sapiens; identical to SEQ ID NO: 24385
  chr22:43434424-43434617
  hypo

SEQ ID NO: 31794 - DNA, 1063 bp, Homo sapiens; identical to SEQ ID NO: 25606
  chr22:45592910-45593973
  hypo

SEQ ID NO: 31795 - DNA, 971 bp, Homo sapiens; identical to SEQ ID NO: 27979
  chr22:46262409-46263380
  hyper

SEQ ID NO: 31796 - DNA, 1451 bp, Homo sapiens
  chr22:46367044-46368495
  hyper
cgcagggagcgggaaggcagcggctgccccctctggccgcgtcaggcgaccccggacgtggcccgcgtgtaaaggagggggagggggaagggaagagaaggggagggagagcaggctctgaggtttaatcagtagcatccagcttaaattcccccaaacggcggttccataaatgaaacttctttttaagtcagaggccagagcatatgcgtcccattaggaattcggcgaagccaccactgcgcgccccctgggctcactgggctggactcggccctgcccggagcttctcagagccccgtgggctctgccttgccgggcacacacacgcgcgcccacgctccgcgctctcccttggccgagacaactgggcgaacgcggccgccagcacgcaatgcgcgtcctcctcgcccccaggtgaggactcggcaggggcagggatcaggctacccagcgcggcaggaaggcgcgagaagccgcagcgacttcggggtacagtccgggcgctgtccggtgaagcgcggcgtgcacgtgcatgccggtgtttgcacgagggagcgggtgtgtgagtgcggctctcccaagtgtggcatggtattgcgcgccgcgtgggttaatatggggaggggtcccccgctggtccaggactctgctgggacgcgcagggaatctcggcgccgctcgcgtgcccgcgggccctcgcgctgggcgtgcacagcctgctctactcccgcagtcgagccgctctcaggccatcctttctttgaccccagagccaggacttctcactgccgtagctgcccgccaagtgctccacctcggcagcttaggctggcgaggcgacctaaagtcccccggctcccgcgcgcgacggtcacccggtgccccgcccaggggcctcgctgccgcgttccctgcccgcccggttccagcgctggaggcccggggggagcccacccgcccaccccgcacgccgcccgcggcactcacaagtagctgccgctggacaggaggagaaagatctgcgggcaatagacggagacgagcgcgctgcgcggcgacagtagaagcatggtgggccggcgtgcctggcggggctgaacaggctccgcgggccgggcgcctgggccagctgaggccggggtccccgcggagctccccgatgcagggcggcggcgctgggcgctaggggccgggtctcgtgggcccgggcgcagttgtcgcccgtgccccgccgctagggccgcgcatggcgctgggtctggggcagcggcgggagctggggctggagtgcggggcggggacccggccgggggcagcgggcgcgccttggctgcggtctggacctccgtccgtctgtcggtgcgaaccggctctgtcgctcgctctggctcacttctccaagtctcccgaggcgcgcagctgccattggacgggccgcccctacatcc

SEQ ID NO: 31797 - DNA, 750 bp, Homo sapiens
  chr22:46929512-46930262
  hypo
cggccactcaccagacacagacacctccatgagcgcctccagcggccggttgttgtccaggtcgcggctgagctgcagttcgcccgtggcggggtccagcagcaacaggcgcagctcgttgccctgcacgaaggtgtagttgaggctgtctgacacgtcggggtcatgggccgggatgcagccgatcacgccggtggggaaactgttggacttgttggtgacatagttgttgaagaggatctggaagtcgggcagcacaggcgggttgtcattctggtccacgagaaggatgtgcaccgtggctcggctcaccagcggagccgacgtggcctgcaccaccagcacatactcccgccggacctcaaagtccagctccaccatggcacgcaggtccccgttgagcaggtccagctggaagaaatgccgcatgtccccttccacaatctgatacatgatctgggcattagggccttcatcagggtcgttagcacgaatctttgccaccaccgaccccactgggttgttctcctcaacaaacagctccagttcgtccttctcaaacatgggggcattgtcattaatgtccaagatggtcacctggatttctaccgaggcgctaaggggagtgggactgccccgatccacagccagagcccaaaggttgtacacggccacattctcccggtccagccggcgctgggtgcgaatcacaccggacgtgggctcgatgtagaagtccccatcgccgtc

SEQ ID NO: 31798 - DNA, 850 bp, Homo sapiens; identical to SEQ ID NO: 13958
  chr22:47197347-47198197
  hypo

SEQ ID NO: 31799 - DNA, 387 bp, Homo sapiens
  chr22:47525720-47526107
  hypo
cgtcactgccgctgagtcaccacgtgcactgtgcctgtcatccctttctgggacagcatgtcactttccttggtgtcaccaatcatctcccttaggagtctgtgaaccacccactccctccctccccaccagacaggttaccggagcgggcgtgtctggaggagcaggcagagcaggtgctgtacacctcgtgtcctctgggacccatcccttctaggcccctcctcaggacaccccctcctgccgggctccccccaagcgcagcccccttcccaaacccacgtttgcctcactgtcttccttgtccggtagagcacacccctcagcacttctctgtgtgaatgagcctggcagggacctaccttgagatctacatgtctggatacc

SEQ ID NO: 31800 - DNA, 435 bp, Homo sapiens; identical to SEQ ID NO: 25611
  chr22:48027392-48027827
  hypo

SEQ ID NO: 31801 - DNA, 425 bp, Homo sapiens; identical to SEQ ID NO: 22892
  chr22:50170525-50170950
  binary

SEQ ID NO: 31802 - DNA, 256 bp, Homo sapiens; identical to SEQ ID NO: 25615
  chr22:50466785-50467041
  hypo

SEQ ID NO: 31803 - DNA, 828 bp, Homo sapiens; identical to SEQ ID NO: 24389
  chr22:50899033-50899861
  hypo

SEQ ID NO: 31804 - DNA, 663 bp, Homo sapiens
  chr22:50944156-50944819
  hypo
cgtccagcagcgcagtggtaagcaccagcgtcatcaggttgaagaagttgtagttgccggtgatgataatcaggacctgcagcagcacctgggggcggcccgctctcagtgctcccggagactgacgcctggccccgtggcaggcacccacctccaccctgcagggtgcatccctctgctacaaggccttcccaacagcggttgccagctgtccccgggagccacgctgtccccaacagggcacgctgagcagcgctgaaggccgagccctgtctgcctctctctgacagctgcggccctcacccacctgcgagtagaaagcagccaagcgcaggcgtcgaatgggggcgaagaacaggggcggcacagcgatctcaattaggaaggtggccaccacgctgagcttgtgcagccagaccggcaggtggtgtgcgaaccaggcggcgggcgtgggcaggcactgggtctcgtagtggtaggtgagggctgcaggcgagggcaggagtcagggctggccgagcccccagactaccccaggtccagaccgggcccctcaccagtgagcccccaccacgcagggcagcggctggtcagcttgaccacgcctgaggcgaacatgaggcggaacagcagccatcgcaccagccagaaggggaggtcttc

SEQ ID NO: 31805 - DNA, 652 bp, Homo sapiens; identical to SEQ ID NO: 30293
  chr22:51042115-51042767
  hyper

SEQ ID NO: 31806 - DNA, 58 bp, Homo sapiens; identical to SEQ ID NO: 8478
  chr3:10011425-10011483
  hypo

SEQ ID NO: 31807 - DNA, 858 bp, Homo sapiens; identical to SEQ ID NO: 25619
  chr3:10206343-10207201
  hyper

SEQ ID NO: 31808 - DNA, 250 bp, Homo sapiens; identical to SEQ ID NO: 24393
  chr3:11581157-11581407
  hypo

SEQ ID NO: 31809 - DNA, 735 bp, Homo sapiens; identical to SEQ ID NO: 25620
  chr3:124773635-124774370
  binary

SEQ ID NO: 31810 - DNA, 216 bp, Homo sapiens; identical to SEQ ID NO: 7334
  chr3:130424529-130424745
  hypo

SEQ ID NO: 31811 - DNA, 400 bp, Homo sapiens
  chr3:132756116-132756516
  binary
cgctgaacgacaaaggttctagctggccagtccgaaaacactgagtccttaggtcaaatttgagaaatgacagggccagtgggagtcctaacttctagactctggaattactgacagaagaatatttggacagtttttaagaccctcaaggcatattattttacaacctctttagcttatgcctgaatttgtgctgtgactgttagcttcccggatgttttctccacatgcttctttctgaactagcctgtatagttctacaacaaattgttacgttttgagaagcagggaccacttataccacttctctggccaagtgtctggcaccgcgccactcagacacacacgcccaaccctttaggattaacgtagacacagtgttctcttccatggccattcc

SEQ ID NO: 31812 - DNA, 382 bp, Homo sapiens
  chr3:134032175-134032557
  hyper
cgggctgggagcggagtggggcagccgccggggggcgcccgcaagggctagggctcggggccgggtttgggggcgggtaggggcgggcaggggcggggcaggagccggggctgcgagctggccgcggcgcaaggaatgcggcctttggctggtcccgggccggcattccggccggcgcaggaatgtgagcagggtgttcactgcgcgctctgagcgcacaagtttgttctcctctccttggagaacgccggcccgctctgtgccaccctctccccaagcccccggtacgtccgtctgtccgggtggaggacagggccccgagggccgcgaccaggagggactcgcaggaggcaccggacaggggtgcggcgagaccagtcgc

SEQ ID NO: 31813 - DNA, 1000 bp, Homo sapiens
  chr3:138657617-138658617
  hyper
cgattccatttctggggatcgggtccggtggggagccactgtccctaacgcctccagagactttaagtaggacaatataatgctggtaggagcaaggtgcaaggaatttagcggcagaagcctttcgggggggtggggaaaggcagatccgtgcctcgtctgagcctgggggtggggacagcccctggccttgtagcccctgttccggggatcagctgggcccacctaacccccctacatggggttgaaaggggccaatgggacggccccgccgcccctccctcgggattccacagggccctgacccggcctttatctctgcacggtcagcagtcgcgggggcttcaggaaggaggacaaaggcccggtgtcaccgcgggcgggggctcggtttcctggctctctgctcacactcacagcctttagcggttgttgggggaagatttttaaaaatatgtgtcgaatttcctttttttctcttctagaaacaaacaaacaaaaaaggcaaaaggcgaattccccttcactcctcgtccatagagattaaagtttcctgggatcctgccctttttttttctttgactgcctagaaatacttgttctcccttgtacatagaggaaaatgcggggaaaggttttttaaaactcggtttcatactattattattactaaggacaaccgggcaggctgaggtcccaacgtggatgatccgagttggcctcgcgccggggctctgcagccactgccctgtgcgctcagcacctctgggggcgatcagggcccctgcgcttccgcccgccgcccggcagtcgagagcaccctgtgcccagactggccgactcattctcccccgaattttgtttagagctggcaagggggacttagctcgcgccccaagacctgggcttgcagcgccgccaacaggcccggggacacgaggcgctccaggccggggtcttcccggctgctggcccctctcgctccccacccgctggcggc

SEQ ID NO: 31814 - DNA, 415 bp, Homo sapiens; identical to SEQ ID NO: 25630
  chr3:138679163-138679578
  binary

SEQ ID NO: 31815 - DNA, 650 bp, Homo sapiens; identical to SEQ ID NO: 29115
  chr3:141516080-141516730
  hyper

SEQ ID NO: 31816 - DNA, 264 bp, Homo sapiens
  chr3:15123770-15124034
  hypo
cgaacaacttcccaaagcattctccagaatctgcaggagtgtacataacaaacagccaaatctgcctaagaaattagacccaagaccagacagcgcgaatcacctcgtagagcttcacgatgtcaggtgtgtgctccttctcatcaatctgctgctctctcttgagcagcgtgtccttgcagtgtgtacagcagcggatccggtcatcgtccttctcatccaggaccgagctgacactgctcatgctgctgatgctgcctcggc

SEQ ID NO: 31817 - DNA, 1337 bp, Homo sapiens
  chr3:157812151-157813488
  hyper
cgcaagaggaggcaagggcgccgcgagctccccggatgcactggtcccacaggccgtgcccgagtggagcactgcgaatggggccaagaaattttggcctttctcgccggacctggctgcctccgcgggcctctccgcctaccgcgctcccgccgcggcccgactcccgcgggtctccgcgccgaacccacctggctcctatcgcacgggacattcccgacccacccacgccgcgtcactgagcctctgtaccgatacccggcgcctccgccagcagggcctggacgcaccgcctcctttgacctcgggcttcccccgcgctccgctgcttggggcagactggccccgagagggagccaccatctcccctgctccagggtctccagggtccgaacccgtgttgggatctgggttaggattagggtttggagcttggagcctgcctgttaggacccccggccccggcgccgactggagctcgctggaggccacaggaccacggcggatggcctggctgcttcagggcgtaccatgcccgcaggcagatgtttattattaaaaactaccgacgttcatcaaccaggagacccgcaaggcctgcgcactgaatacggcccaaatcctgttcagtggtctttgaaagttaaaagaaagaaacctatcgcccacgtctatgctgaggaacagctttgaatacgagctaagacctgggagagggccaagtgggggtggtggggaacactgctggaggatgtggggctttggcaggggttttacgcaccctccagcacgagggtggggggtcccaggggacgctcaggactctttcagtctttgcggaaggtcccgtcatcacaagagcccgcgcgggaaggaaagttcctgccttggacatggtcagggccgagtcttcaaagtctccaactatccccacacaggcagcacctttgggctttactagtgggatttcttccagaagggggccacgacatggggagagagagctcctcattattttcaaggccaggcttttcctaaacccgattctggcttccaccttctaaatttaaccaatgaagaagctgcttcagccaaccctaaacaggagtgtcagatggggaatcctccctccacagtgccctggcctgcccgcctttgcggctcttttcccgctccgaagtcagcacctgccccgctccagagagggtcaacgaactgggactgattgtcgattatgccataccaaacccaggttgatttcgctccgcaggatccctccttccttcctcccaaaagtgtccccagataaagactggaattatagcaaaacgaataac

SEQ ID NO: 31818 - DNA, 1599 bp, Homo sapiens; identical to SEQ ID NO: 29123
  chr3:157820473-157822072
  hyper

SEQ ID NO: 31819 - DNA, 146 bp, Homo sapiens
  chr3:158176224-158176370
  hypo
cgcaattacttttgcactaacttaatagcaacagcttagcaaaacaacagaggaagtaggatgtctataagcatggaatagaaatgactttcttggcgtccagggtgggtagtgaaggaagcgaagcctagaggggacagttagcc

SEQ ID NO: 31820 - DNA, 554 bp, Homo sapiens
  chr3:160167477-160168031
  binary
cgcatccgtaaaggtccttagactcaccgcggggaggaagcggaccaggcaactccacagcacggaaacacagcgccacgagctccaggcggatgctgagagccgccccgagtccccgccctcctctgccccgaagggcttcaggtgcccagaccgggcggggcctcgcggagcctcgcagcgcaggcgcagtctgcaggcaacattcaactgcaaggcatcggccaatgggaactattgctgggctcgttcgaaagtaaacggtggacggcgcggcccgaggcaggtggcgggagtcagtttaaggctggcgcccagctttccgcgcctgcgtgctaggcgcaggccgcctctcggaagcttggcctcgcaggagcggctctctatcctgtggggagcttcggccagtgggcctcgtgagctggggtcccgcctggggaatccgcatggcaccggtggtctgggggagaggctgggcctggcgcgggacgaggcgaagcgccggtggccgacggcttctgaggaattatcttttacttggcgccacacggggc

SEQ ID NO: 31821 - DNA, 225 bp, Homo sapiens; identical to SEQ ID NO: 26957
  chr3:168960241-168960466
  hyper

SEQ ID NO: 31822 - DNA, 1376 bp, Homo sapiens; identical to SEQ ID NO: 26958
  chr3:169378540-169379916
  hyper

SEQ ID NO: 31823 - DNA, 820 bp, Homo sapiens; identical to SEQ ID NO: 24414
  chr3:169539913-169540733
  hypo

SEQ ID NO: 31824 - DNA, 195 bp, Homo sapiens
  chr3:172727281-172727476
  hypo
cggaggcaccactcaagcccatgtgaagcccaatggatcttggatcccagagcaccctagagccagctacagtagccccaccaacaggggaggctaggctctttcgcatgcccttaggatagctgcagcagccgcagtgctcaggagcagactacagaccgcacctctgctgctgctcgccaggcaagtcccacc

SEQ ID NO: 31825 - DNA, 2009 bp, Homo sapiens; identical to SEQ ID NO: 29132
  chr3:181421152-181423161
  hyper

SEQ ID NO: 31826 - DNA, 481 bp, Homo sapiens; identical to SEQ ID NO: 24417
  chr3:181437081-181437562
  hyper

SEQ ID NO: 31827 - DNA, 241 bp, Homo sapiens
  chr3:181438182-181438423
  hyper
cggtgaattcttcccaagggttcttatcgctggcggccaggccagaagcgggactgcgcccccacccccacctcgtgacgtcagggcctgcagggctccggggatgaaatgattcgtttgagtgttccagaaagggcaatccgaacgcttacagggcgaggccagtgcagcccagctccatcaccactaccaagccccagtttgggaggctcccgaggcccctggccgccccccagacccc

SEQ ID NO: 31828 - DNA, 3813 bp, Homo sapiens
  chr3:181440800-181444613
  binary
cgttttacatttgttgaagcccaggccttggtgcctcaagttttaaatggaattactcaaggggggcacactactagacaaactattctagccaattccttcatccccgacccagtccctactcctctctgcccccgcccacttcgccacttcttagtcccggatctgaacattttagctgaaagagggaggggtgaggaaagggccaggacagttccctcagtgccaccactgcgggcaaggacagttccctcagtgccaccactgcgcctggagagatccccgcggccctgccgctggctgattctcccctgtgccttgacttgctgaaacatctctctggggaaaattactccctacttgcttacatgtgtgtattaaaaaacacatgtagccatacacatgtttcatcacggcaacaaaaaatatcaacattctagccccaggagcaaaacgtatcaatcattcgcctaaatattgttcagtagatgggggcgggaataggtagacctcctaggagagcggtcacaagtcccctctcctccgcatggacaccaggaatgcggggtctggcggtgctgggcgcagggcgagaagatttgatgtgcagggtaagtaaaggacaagttatttaaaacctcaacacaggaaaagatggtaagagtgctgtgtagccctttgcttgcttgtgactacgagtcgctaggtggcccgcgtttagagtatgcctacggcgcctactaacgtctagacctaggagaggcgtctcccgcccctcgacccacagccagccgccacttgatagctaacgcgtcttccggccggtacacacccacaattaatctttcttattaaagcctccattctgtacccatggggcgactcaaacctatttagatttccgtggttggctgcacaaatttaagtgggcaacgagttataaacctaataacagaggacgagagagggtgatttgagtagagaagacgcaagattcactagggtcgtgaagatgctgcgggccttgcccaccacggcatctacctcggggtgcacgccaggctctgagaaaggtagtgaacctcacaatcacactcaccacacacaacatgcgtacacacacttgcactcctaccccctttgctcacaggtacacttgtgtggaaattgcctcttccgtagttcttataaactcctcccagacaggcagaattctcagagcatcggaaccagggaacttgcagggaaccagggaaggtttgcactgtttgggattaattgagaataattaacactggagccgttaatcaccactttgctgctctctccctcctttcgggtctgcggcgtctgcctttttcgctcccgctgccggcgcgggtgtactggtgaaagtgaagacgtcgcggtagctgtcacccagttcggctgtacttttttaaacgctcgcatattgtttgattactaattcgagttaatatgatctttatggcaacataacagtggataattggcctttttttctgaacaacaatgtaaatcacaatcgctttattatttaataacgtcaaacgcttcgttggattggccccgaccgagaagaccttttctttctagacagtgttgtggaggaagaacaatgaagatctaattgtggagatttcataagttggctcccgtaaatgaacagcttagatatggaagttccagcagatgtgggtactattcgcctctacaagctctaccccccacccccatatacgcagtccaaacactctattggagggttttttttttttttttttttttgtggtggtggtggtcctcagatcctagcaaccacctaaagtttccagtagtaattagagcttttatcgggcttgctcttcagccctttatattgccgatttagcgttaaggcattaagtccacacaccaaattagcgcgactcccaaatagccacaaccacttattctccccttccctcattttggtggttggacaccaagagcatgggcctgggacttttttttttttttttttttttggttttactttgttttgatttgatttttaaaacctattcgctaccgcactgtcttggaatatacttgtttcaggcagagttttgcaagggacctgagccattattttgcaaacgcctggaagagcacatgaaactcagagaactacaatgcagacgacaacgcctagaaggaatgggtccccgctgctcgaatgaaagattaattacatttgccccaaaagccccaattctaacggtctctatcgcggcttttgccgtcactgaaggaccgctgtctctggggtcttcagacatcggagtcctttgcaaatgaagagcccccaccatttggaattcgggtcaaggagaaagactctgagcctgcagcagtttttgtttttgcgtgtgcccgcctctccattttattcaacttcttctgcctgtcgggaagcagaacaatcgctccccacccacccccctccgccccgtttctaagataaacaggaggtgcaaaatgctttgcctgcacacgcgccctcgtggcccagtcttcctgcaacccccagcgcaccggccatgcatctgtctcccaaccagacgtgggagaagacatccccccttcactcttcccacctgcatttaaaaaccatcacattgactgctctagagtcaggttcacatttttggccctccatgccaccttccagtttcttcccggtccactctctttctcaggacctaaaaagtgacggggagagggtgaagaattggagaaagcagcggattttcaaaacgtatcccccccgcccccccatcttttaaagtagtatgttaccacaaggagtgcatttgggaaactttccctaacaggagctgggcgcagtgttattcttctccatgggtctgctggcctccccgcccccgctggacaatgcgtgctttgagactcggtggcctgcaggcagcgggagacgaggggactgggcagccttcctccaaggggcccgcagctgggggagcgccaggcagggagcagggacaaggaggcgagccacgcaggaaggaaaaccataaaagtgccattttttcccttagccctgcacagaggcaggctttgaggacctaggggcagggcagctggggcggggtggggtgggggtgttgagaggttttgcgtgttctttttaccccctttccccccactgaaacattttatttcggcacataattatgcactgcagattctccagcctcctcgccctcaatcttggtaacctggtctttggttaataatatcgcaactcgggacttcaacgctcagaccccctccaggccccagcctccgtattctcggagccctccactactgatacctctcgcggagtgcggcgccccgggaaaagcctcttggccagggactctgggacattactttctagtttgttttgttttttgtttttctcccagagaccaccaccaccctcatcctcttcaggcagcatttaggagaggacctctgagatcagcagaaggcctcagacggtcaccatattggtggaagcgtttgtctgatgttttaaaacgtataccaaacggggcgtcagggccacgtgctgtgccttcgaaacgccgccgcgggccctgcctttcagagctgcggcagccggggctggcgtggagggggcgctgaaacaccggcgggcgtcaggggccagcgctgagctgcagatctggccgcagcgctgagtgaagcgaattatctggagcgtgtttgatctgggactgc

SEQ ID NO: 31829 - DNA, 819 bp, Homo sapiens
  chr3:181445155-181445974
  hyper
cgagggcacagtccgcacaaaaagggggaaaataatcgcaaaccaaggaaccaaaagtgaaagtttcaaactagataccaaccctgatggaggttgggtgctgacccgactgtgggtacttaagagaaggaaggagggaaactgaggtggtgagattatgtccacagtatgggtcggttaaaagttgtagtaaagaagttttgggagggccctcactagaaactcaaggcgggtttcagctgatttaacctggtttcctacacatttttgcggtgattctgctctggaaattggcgaaagagacagacctttgcaattgctcacccctccctgcccccaaccaccctgcttactttcgcgaagcgcattaggatgtgggctctggcttgagctccaaaatagcttgcttgtcaattgcgagctgcagcaatatcaaagtgaactgtcccaagtaactcttgtctagaagctgggaagaagcttaagcagctcgctttaatgatgatttgtagctcggcgaggggcacggacagcaaacaccccgcaggtgtgtgccgtaacaccatcatccggacttgaatgtagattactctggcgatcgtttgatcggccctttgaaaccctttacaattgcctgtgacgaacggccagtctcagtttttctctgaataatccctgagggtaagtcctccgggcttttaaagagctctagtattttttttttaaagaataaaaagaaaaacgttcgattttagtttagacctcgtcaacttttagtcgctaacaggcatcactcaagccagtcaatacttaatgacc

SEQ ID NO: 31830 - DNA, 130 bp, Homo sapiens; identical to SEQ ID NO: 24419
  chr3:182815985-182816115
  hypo

SEQ ID NO: 31831 - DNA, 140 bp, Homo sapiens; identical to SEQ ID NO: 9688
  chr3:183419820-183419960
  hypo

SEQ ID NO: 31832 - DNA, 146 bp, Homo sapiens
  chr3:184059878-184060024
  hypo
cgtgaccaagcctaccgccatggcccagggccgagtggctcacctcattgagtggaagggctggagcaagccgagtgactcacctgctgccctggaatcagccttttcctcctattcagacctcagcgagggcgaacaagaggctc

SEQ ID NO: 31833 - DNA, 393 bp, Homo sapiens; identical to SEQ ID NO: 11631
  chr3:185360808-185361201
  hypo

SEQ ID NO: 31834 - DNA, 1430 bp, Homo sapiens
  chr3:187456733-187458163
  binary
cgtggttccgggagctcaaaccgaatggtgtttttaccgctgcctaacgctagagagagccctccatcaaggtttgaaaccgtcaacccctttctcgcccctcccctccttcccattgacctagtttggccagagcctcccgatttggagaatgccttccgcccttcccccctcctctccagccagagaggctacagaggctgttggattattggtaatctaataactccaataacccgctgaaaaatccaaagggaaatctgaaagtgtaaagcactgtttagggacaaggacaaggaattttaataaggctgcaactgccgtagtgaaccccgcatcaggggccctgccgtggggctcccggtctcagcagtgtttcagccaactagctgcacggctgcagacaccaccgtggtccggcggcagggggtgaggtcaaatcgcggagctgtttttattcttgggggaaaacactcttcgccctcttggctggggaacgggagggtgcaggagacgacagtaaataaaagcgaatttgataacgcgatggcctcgacagccgctttggataaccgaggtgttcggggacattgtgtcctgactttcatttctatcacgtttcctgccaacagtgctcttgcaagcctgcaagcttctaggaaatgcaataaaacagagggatgtgttttatcatcaagatctgaagaggagttgcagaagggacgttccccatacgctcagcgcgagacagccttccagaagggcccgaagacaatgccagcaaatcgcgtcccggagcagagatccctcggccgtcctggctggactgggctcagcctttgcaaaaaggctggcgggggaggggagaagcatgatctcctcaagcaaacaatgcctttaaaaatccgatctggaaagaagtcagccaaggtccttattcacgttaatgaagatggaaggcactaactgtccttggaaagcgatgagtcaaacttgaccgcgcttcaaactcgttcccagattcgtttccagtccgaacagaggcgcgtttctccgacgcggcctccgacggctcccgcagtgggaggggccgaactcgatccccgccgacccgggcgggggcgacggcgctgtctccccctgcagagcgcgcctgctgccgctaggggccgccagcatgcggacgcgcgtttgccatcttaagtcacgagctcggagaaagaaaactttacggaggaactgttgtggcacaaattctggcctatccacatgacccccaccccctcacacacacacacccggtttctcgccaggctactatgcagaggatgttaggaaggggaagagagcgatttcagaatcgaggctcgccctgcaagtctttggtccaggccttaacccccctcttaacacgcaaacccccgagctcc

SEQ ID NO: 31835 - DNA, 175 bp, Homo sapiens; identical to SEQ ID NO: 24426
  chr3:193922622-193922797
  hypo

SEQ ID NO: 31836 - DNA, 506 bp, Homo sapiens
  chr3:194048766-194049272
  hypo
cggtgtggctgaagccagcagaaatgaaaagtcctctggtacctccccttcaaacagctcacactcatgcgggtcactgtggcacggcgccctcacacgcgcatccgcagagcgcacctgtcccagcgtggccaagaccgcctctttcacccagggccctctgtggacgttagtctgctctgagtcacccctggataactgaggacttgcctgtcaagtatgaaacatttagcacgtacagtcctttgagtggaattagagtggaagagtgtaactcagcgtgtaagagttgcctgctgctgctttgaacagagggtaattgcagcagatgccttcagcccctgctcttttcagcagccactgtacagggcggttccaccccatctcccacctcccggcccagctctctgatgtctctgcccggtggcgttccccgatgcccctttgcctgagcgccgaagcgtggggagtggaagctggcggtgggagccggtggaggcatgcgc

SEQ ID NO: 31837 - DNA, 485 bp, Homo sapiens; identical to SEQ ID NO: 22904
  chr3:194208086-194208571
  binary

SEQ ID NO: 31838 - DNA, 85 bp, Homo sapiens; identical to SEQ ID NO: 29147
  chr3:194374282-194374367
  hypo

SEQ ID NO: 31839 - DNA, 526 bp, Homo sapiens
  chr3:195536308-195536834
  hypo
cgcccttggtgactgcttttcctgccaaggccctggtcatgcccggtcagatgtgtgggtgccatctcccagccacgaccatctcctctcctggcccagctccacttggtccccttagcgacgcaaaggactcagcgctccacgacatgcctagcttcttcgggtcgtcatggagacgcccttgcacaccaacagtccttcactccttctccgggtcacgcccccgtgcttttccacgcccaccccaggtcttgcccctctgcgctcctctccacagaccccacttcctggctccacatggagctgagtgtccagctggtacccagcacatttgggctcagctttaaatcacagatttggaaactcaagaacttgggcgtcaggaggtccaaccgttcaccactgctttttacacaggggaccggggccctggggagacacggggcagggcctggtcacaggggccagaacagttcacggcaaagacttggccctggggctcctaaatccaagctgcctccccggc

SEQ ID NO: 31840 - DNA, 295 bp, Homo sapiens; identical to SEQ ID NO: 25655
  chr3:196069909-196070204
  hypo

SEQ ID NO: 31841 - DNA, 411 bp, Homo sapiens; identical to SEQ ID NO: 25656
  chr3:196388348-196388759
  hypo

SEQ ID NO: 31842 - DNA, 299 bp, Homo sapiens; identical to SEQ ID NO: 23610
  chr3:196728433-196728732
  hypo

SEQ ID NO: 31843 - DNA, 636 bp, Homo sapiens; identical to SEQ ID NO: 28006
  chr3:25469368-25470004
  hyper

SEQ ID NO: 31844 - DNA, 243 bp, Homo sapiens; identical to SEQ ID NO: 13992
  chr3:30648808-30649051
  binary

SEQ ID NO: 31845 - DNA, 352 bp, Homo sapiens
  chr3:38032105-38032457
  hypo
cgctggtcccgacggcttgctcgatatttgttgactggctgactaagtgaatgcctagcccgctgagcactgtgtggtggggtgtgtcctgcagggcaggagctaggattgagttacagtggtggggaccaggagtagggaggcagagactggccccgtgccaggcctagcactgcccacaggcagggcgaaggcgcgggagcagtttccagcaggtaggcctgggcagagagttggggggcgggggtttccagggaaccagtggggcagagtgggctattcaagtcaagggcatagagcatagggtcccagggctcagggccacagagcctccgcggcagaattgggaggc

SEQ ID NO: 31846 - DNA, 419 bp, Homo sapiens; identical to SEQ ID NO: 24436
  chr3:38035641-38036060
  hyper

SEQ ID NO: 31847 - DNA, 857 bp, Homo sapiens
  chr3:44063232-44064089
  hyper
cgtaatgccacttgcaggttacagctttcaaagcaaagccagactccggccctgcccggggtaggaagtctttgtctgcctgcgcgcccgagcgctcccggcttgggattgatttttggcccccgctgcagcaagttgggggctggtgaggagtgtagcggtgactgggggcggagtgcggactcgcatccgctgtaccaggagcccactgccacctcgggattttttttttaacttggaatttccatatgacaaaaaagaaagaggtttctcctcaatctaacggagccattaacatctattaataacgccgacagggtaagtaacggagccgcgctcctcggggtggtcaccgggctgcgtggtcctcggccggcctcctgcatccgctgcccctgtgcgctccgggccggatgcgcaagggcggcgcggggaccaagcctggctgccggccgcctactcctccccttccctaaggtaaggggtcgttttcacactcaccagagctcctgcgggctgagctcgccccctcccccgacttctttgcggggcattttctcttgctggtgtattacgtgtcatttctcacggggcattgccggccgcttttctgcaactgtcctttcggatttggtgatctggtccggcacagaggctctcctaggaggtggtgcccatgcatattcattctgtgtagtaaccgactggccgtcttgccattgcaggctgatttattgatttatgtaggaagtgtgttttattttagtaattagggaaccctgaattcacgggaaccgtctgcacttcgcaggcatgttcattgctgggcatgaaagacaaaggttgtcgtgcacccc

SEQ ID NO: 31848 - DNA, 972 bp, Homo sapiens; identical to SEQ ID NO: 24439
  chr3:48693261-48694233
  binary

SEQ ID NO: 31849 - DNA, 187 bp, Homo sapiens
  chr3:49851252-49851439
  hyper
cgctcagagatagggtctttgtgtaggtggcggtgacagtaggggccagtgccctgctgtagccagtgcaaacaggaaccaaggccaagcgaataagggacgctgctggtcacagctctcttcctggagaaaagaaaagtgaaagttaaactatgctctgagctggctcctgatcctgcctccagac

SEQ ID NO: 31850 - DNA, 277 bp, Homo sapiens; identical to SEQ ID NO: 24441
  chr3:50377892-50378169
  hyper

SEQ ID NO: 31851 - DNA, 924 bp, Homo sapiens; identical to SEQ ID NO: 25664
  chr3:50402119-50403043
  hyper

SEQ ID NO: 31852 - DNA, 686 bp, Homo sapiens
  chr3:51989952-51990638
  binary
cgccgctctgctgccggcctgcacgctcggggtggccgcacttggcctggcacgctaccgcctcatcgtgcacccgctgcggccaggctcgcggccgccgcctgtgctcgtgctcaccgccgtgtgggccgcggcgggactgctgggcgcgctctccctgctcggcacgccgcccgcaccgccccctgctcctgctcgctgctcggtcctggctgggggcctcgggcccttccggccgctctgggccctgctggccttcgcgctgcccgccctcctgctgctcggcgcctacggcggcatcttcgtggtggcgcgtcgcgctgccctgaggcccccacggccggcgcgcgggtcccgactccactcggactctctggatagccgcctttccatcttgccgccgctccggcctcgcctgcccgggggcaaggcggccctggccccagcgctggccgtgggccaatttgcagcctgctggctgccttatggctgcgcgtgcctggcgcccgcagcgcgggccgcggaagccgaagcggctgtcacctgggtcgcctactcggccttcgcggctcaccccttcctgtacgggctgctgcagcgccccgtgcgcttggcactgggccgcctctctcgccgtgcactgcctggacctgtgcgggcctgcactccgcaagcctggcacccgc

SEQ ID NO: 31853 - DNA, 917 bp, Homo sapiens
  chr3:52899918-52900835
  hypo
cggtggggggacacaaaccgtcacatgctttacacgttgtctaaccttcctgctctcacctactgtacacatggctccattttctttcattagaggctacatggcatcccacagtgtggctgtgccatctcatttactctatgagctgctgccgcgaatgtccctgccatgtgctacctctgcctgtgtgggcccatatctgaggggcagattcctagaggcacacttgctacatcaaaagctatgtgcggcttattctgtggcgccgctctccacagaggctgtgccaactcacactcccactaatagcacgagtacccattcccacattcttgccagcatggtgtactagcaaaccttctcactctgacaatttgatcgctgaagaggctgtctcagcacggctgcggcgtgcacccatcaggccacttgggtgccagggcacctgcggggcttgccaccgtctaccgccttgaggggcctggcagggctcccagtcccaccccatctcacctgctctctcctctcggacatgagcccagagcccctccttttccccatgctcacgccctcccctgaggataccagggtgtggtggtgctcactctcccagaagtttgggcagtgctactggtgccacacaataggacagcaattatggatgactcaactctacctgtcgacttcacacagcacccaggtcaccgactgctcacttaacgctatgttgtttggttttccacacgccactctcacttggcatgtggagggcggggaccaggcacccagctcgactgtcctcctcagagcccgatctgggctggcgctccacgtggacccactgactagcagaaggaagttggaattttacacttgatgtcacagagtggtagagtaacaagtcaaaaaacacaggc

SEQ ID NO: 31854 - DNA, 959 bp, Homo sapiens
  chr3:62353707-62354666
  hyper
cgcgttcctatttctgaatcggaggtactaaaaatacccccgcgacagcctgaggaagctgtcgccgtcctctgtgcaaacaaaatcgacaattctccttccccgcgcaatgggtctgcgaattgggcggcgggcggggacagaaccgttggctgaccaggacacaacctccatcctgccccagagcgtctttctccgagccccaaccccgagattcttcctccactgaagcgcaggcctcctaaaacccccggagttcgaattcctgctctaccaagcctggtgaccccaggcatgtcacatagttcatctctgcctctatttctccgtctgtagagtgggaataatcatgcccagcttgagggttgtagtcaccgttcgagaggatgtgtgttaagttcctggcatagagcaagccctcgggagatgacagggttttcgctagtggaaaccactggcactctcagcactgagcgcctactgtataccaggtgttgggcaaacccgcactccagtcactttctgagttacttggcggagtgagggggtgccctttgcgttaagcatctttcccttcaaatagtcgcctcccgccgtggaaatacgcgtggggtcagctcccagccacactcgccccctcaatggggaggttgcgtggaagcgcactcccgggccccgcgccgcacttcctcctggcgctggggaacattgttccaagagacgtgggctgaatcgccgcgcggatattaaaagtgtgtgtggggggaggcccggagcgacgcgccagtaatccgagctcttgattatccagattcggatcaaacggggcggcggcggccggccccctcctgggaatgattagatgattaatgtaatgctgtttgaagggtctctgttttctctcttaatttgggtcattacttagaaagcaagcgtgagatcatttcatcagcgtgctc

SEQ ID NO: 31855 - DNA, 2421 bp, Homo sapiens
  chr3:62355315-62357736
  hyper
cgccgcgaggggagagggggaaaaaaacgcgcactaatgattctgtttattgagttatatatgtatatattccgtgttcgcttgtacaggaggatttacatggctgtataaagatggctaggggcgccgcgctcttctggggcgctcacggtgacaggctggggttaaaactggctgccccaggagaagcggaggcctggaattaaatacgtttcggcgcactggatttaaataagtttcctgaatatacaaaggtgggggccacgagtttgctgccagtcatcgaggaaacatttagctttccaaaaatatgctggtttcgataaatagattttagcctctctgctatagtttttttttcttttaattttagaaataagtttatatgtgtgatctgttttcaggtggtacagggagggaaggaagggcaaggcagtagctctcagctctgcactgtcctagtcaggtcctttgcggagggggcagcagggcccacgctgtcgtggagtttgcgcacatgtttctttaagtcaaagtttctgcaaaaccctttgccgcaagtggcgcacgtgaaaggcttcttgtcgttgtgggtgtgcatatggaaggttaggttgtagacctggtggaaggccttgttgcagatggtacatttgtactgcttctcgccgctgtgggtcagcttgtggttcttgtagttccctacaacagatcaagaacaaaaaacgtgggggtatggagtagaatggtggggaggaagaggcgggcgtcccaggggcagcccaggtgcctgctcaaaaaaggcgacgcttggctaggcgggcgcgacctcttcgagtgaagaagttgtcaaacttcgtaagcgtcaagccgggtgctctcccgacaagaccgagactgagtcccgcggagccgctctgcgctcctgctctgcccgccacagaggctggtgcagcttccctcccgccgcgctccgcgggccgggaaacttttgcgtagcccagagacgcaccgagtccttctcctggctgatgcctcgctagaagaaattcgcacgaacccgggcttcatcctttttcttttcccccttctcatttttaaagttacttctttctcgccccccaactaccaactgaagatccaaaagtgccttggaaaatccgatccaggggccaaggatcataccggtttcccccaatcttagattgttcccgggagggttattttgcctccaatatttttcatttgaaagggaagttccggatacaaaaggaacctttttctatagggcaataccctctccttttcctacatcctttccttctgtccccgtgcttccttcgacctctcgaattcggagtctctcagtgcacccagcctgcatacagcgtggtctactaaccccgctaggagagcttccccctacaccaggcacaacccgattctaaagaaatgctgcgcccgcgcctgcagatttcgccttctctctccagatccctctttgccttcctgccagccagccgcgacccgagtcctgaggtgaggtgagaagagaaggcctcgcctggcacgttacctttttggtgaaagcctttgccgcaaaattcgcagacgaagggcttgtagcccgcgtggatgcggatatgcgtgttgagcgtggagctgcggttgaacgctttgccgcactggttgcatttatgtggcttttcctgaggaaaggggcgagtgcacagtaaggagaggccacctcgggaacacctggaagggacatcccccccacccccactcaaccctagagggtaagggataatctttggccatcgtatccccggtgttatcactaagattctgggggttgcgcgcgggctaggcccgacccgggggccacgtacctgggtgtggataattttgtgcctgcagagcgtgctggcctggcgaaagcctttgccgcagactttgcacacgaacggtctggctccggtgtggaccggcatgtggcgggtgagattatagtgagcgttaaacacctatggaaagacatggggggccttgtggtgcgtctgtccgagggcctacaatcagccccgggggggccacagcctacctcccccaaccaacacccccttcagaaaccagagcctttttcagtttgtaaagtgctgcccaaactcctgcttacaccaatactgtgtggccgctgacaagggcatccccattttacagaataggaaactgaggcccaacgaggctcccagtttgggtagtcaactactggggagctcctcagcttgaaaaaggggcattccaggctgccccaaggaagccgccgccgccgatcgcccctcccggcccccctcgccgaaccctgggcctcaccttgccgcacacctcgcaggtgaagtttttgggcttgccatctgc

SEQ ID NO: 31856 - DNA, 386 bp, Homo sapiens
  chr3:62362713-62363099
  hyper
cgggcgcccaggcccgtggccttccgattcgctccatggcgtgggttgcagcccgtcacgcacggccgccgggcccgaatccaccttggcgccttccctagcccgaggcctcagccccaggcctatttcacttggagcgcctcagcctagagccggacgctttggcttcttcgccatctggccctaggttgggcctcaaactcccggcggcggtagggaaacagacgatcacagttaggcctgaggcccctcggcggcctgtgtccttcccacgccgaagaacaaggcgccaaggccgggcgcgtccgctgctctgcggggcctgaccggggcggcgacctctgggatccgcggcggtgcgacgccgcgccctggccaagcaaccc

SEQ ID NO: 31857 - DNA, 478 bp, Homo sapiens; identical to SEQ ID NO: 25670
  chr3:9904234-9904712
  hyper

SEQ ID NO: 31858 - DNA, 198 bp, Homo sapiens; identical to SEQ ID NO: 27013
  chr4:100729543-100729741
  hyper

SEQ ID NO: 31859 - DNA, 733 bp, Homo sapiens; identical to SEQ ID NO: 24451
  chr4:10462790-10463523
  hyper

SEQ ID NO: 31860 - DNA, 1315 bp, Homo sapiens; identical to SEQ ID NO: 29170
  chr4:111543378-111544693
  binary

SEQ ID NO: 31861 - DNA, 918 bp, Homo sapiens
  chr4:113431738-113432656
  hyper
cgagaaaggggggtattggagccctcacgttttattggtctaacctaatttcactaattctcttttcacacatttcttttgcagattcggaggccgggactttcacgctcccgggagcgcactgcattggcgcgattcaagagctgcccgctttatttaattaatacattcaaagctcgcttgggagcccgagggggctcggggaagaccgaggctggcggtgaggaggaggcgcttttaaccggttccaggtgtcggtgcccagaagtcacaaccagctcaagggtgtgcaatgcaggggggtgtacccagcgggtgggggcgccgcagctcccagcctcgccctcaagcccggccctttagcagcctgtgacccagactggcgggtgggcagctgaagccggccttgggtctaaacgcccttcctgggccatcggactaggctttgggaagtgccgaatgggtccttcctccctcctggccaaagccgcccagggccttcgcctcagctgggacaccaggagcgcccatccggctctggtccaggtgctgcgggcccgggaagcctcagcccctcctcctgcctccggctgagcctaggtccggctcccgtggcgggcccagcggttggcagtccgcctctctactttttttttcctccttcttggcactcagatggatgtatttaaaatctagtgaaggaaaaatgagccgtaacaaggcctgagcactttagaacaaataaatacagccagtcccggaacgccggccgcgctaaagcgacgctccaatgagaacaggacccaccttcgcgcctctccgcacttaggaaaacgcgccgcagcgcgctagctggcgttggaaagatctagcaacactgagagtctgtgtctgtcaccggaagaaaatctccacagc

SEQ ID NO: 31862 - DNA, 776 bp, Homo sapiens
  chr4:113437914-113438690
  binary
cgccttcgtcctcgctgccgccgaggctccccccgcccggcgcgcgcgcaggcaccgcacccggcgctgccggccctcctaactcccgggtgatgggaactaggaattagttaatgggggtcagaatcccggggaaagcagttagccctgtggtgctgccgggcgtctcttggcaaagcctcttaggggttgtatcaaatagtaaacgattttaaaatggattcatttggttaggggaggagaatggcgtggatggagagatgtggacacctcgtgaacaagtgtgtttggggtccgtcgaaactggcgtgggagagtgaagggagaggacactggggattcaaacaggcgtctcttgggaggggaggtcggataggggagcagttgatgagcttttagaggatgtgagaatgaaatcactcacatgttagagctgaaaggatccccctcattttacatacaggaaactgaggctccgggcactgatgcaggttttgctggggttaacccagtttatagcctggagggacagcaaggaggcttcctgcgtgggtggcagcgaaccgagcgggaggagcggcagagctgctgctcctgcaagcaaatgcgctgcgctgacatttctgtgacctctgctccgcgctggggggcgttgtagggacaaggggcccatcttcccaattctgcttttcaatgagaaaaaagagctgaagggctactggacctcgggggaaacttgttctcaattgctcgttagccctccccactttccccac

SEQ ID NO: 31863 - DNA, 1170 bp, Homo sapiens
  chr4:113441539-113442709
  hyper
cgacctcacaagttgcgaaagaggacaaatggtcgccgcgctagtcccttgctgttgcaggtgactgtcgggggcgcgaaagagggcgcccttccctgagaggacaaaagccaaggtttggctatccagcgagcctgtcccccaattcacagtaaaccaccgtcggccaaaggagatggcgtgtctactctctgctaaaataacaagatgaagtacctgacaagggggctttgtaacccaaatcctaatcctccgagtgagttctcagaaagatggaaagatggcgggaaaaagttggtaaatcctaaacatcttttacatcaacggtctctagttcttcgctgcaggctagaaacgcagcttccagagcaggagagcctggtatggaaacaattagctttctccgcagagcaccccttgcaacgctaggattcgttattgatagtggtgagcgctgggaatgagtgtgaattcggagtttctgacggtcccctatccgggagccaaggaagccaaggagaaaacaatgtaaattcgccccgatccccagttactgcatcccacatggtattctcggtctcccccacgttttccccttgaatcctgtccggggaggattcggcttgaacctagccctggagaggtcccggccaggtcactgaactgcgcttcactgcgccagcccctccccttcagtattttcatcgcgtccgaggaatcggcatccaccacagcagacagaaggcagggaagatcatcccccaggccccaagccccactctagagaccctggccccaagcccgcacgacgtgctctggtgcctccaagccaaacattccgggattcggcttgacacacaaggtcagtcagcttgctagcgcggaatcggccccgcaggtgctaggaggctcacttccttcttcgcagacgctataccctatccccacctgctctggggaaggcaaagctccgcagacttcttatccctgaggcaacccgctacccaaatgtccctcttctttcccacgaaggaaagaaattaccgtaggagattttgccaatccatgccagctttctgattgttttcttcaggtaaggggaaaagaacagccagcgcgtgaatggagagctgagggcccactagggagagaacctcttccccacccttc

SEQ ID NO: 31864 - DNA, 442 bp, Homo sapiens; identical to SEQ ID NO: 23257
  chr4:113443992-113444434
  hyper

SEQ ID NO: 31865 - DNA, 550 bp, Homo sapiens; identical to SEQ ID NO: 28031
  chr4:1299071-1299621
  hypo

SEQ ID NO: 31866 - DNA, 132 bp, Homo sapiens; identical to SEQ ID NO: 14005
  chr4:130168471-130168603
  hypo

SEQ ID NO: 31867 - DNA, 360 bp, Homo sapiens; identical to SEQ ID NO: 25676
  chr4:1338505-1338865
  hypo

SEQ ID NO: 31868 - DNA, 1376 bp, Homo sapiens; identical to SEQ ID NO: 30345
  chr4:13548517-13549893
  hyper

SEQ ID NO: 31869 - DNA, 385 bp, Homo sapiens
  chr4:141488831-141489216
  hyper
cgccaatttgttatgaaaaccactcctctgtgtgttacactttttggaacagagcggagcccaaggcttttctgcccctcccaggaacgctcacggcttactttctttccctgcggtgaggaactcctggaccgtgtcgtagaggccgatcctgagagaggcggagctgatttgccgctgaagccccgcaggcagcccgctgtagagtttcatccgcccttctgtttttaccacagcggtgattgttcccaggacacctttatacctaataacactggacgtcgggcattcaccttggacctggaaataagaaaggtgcagaacagaagggagcgaaattgagttcactcttaagccaagatttccccctgtgttcctattttcc

SEQ ID NO: 31870 - DNA, 199 bp, Homo sapiens; identical to SEQ ID NO: 25678
  chr4:153918932-153919131
  hypo

SEQ ID NO: 31871 - DNA, 388 bp, Homo sapiens
  chr4:153943319-153943707
  hypo
cgaggtaggtccaggtgactgggacacgggagggctccagacagccgctatttgccacacggaaccaaagcatttcactgttttaacaagcggttcagctggtccggagtatccctgctggctctcagccctaaagtggcgtgagggctgggcacgtcgacagcacttgatccgctccttccctctggaaatgcatttccttccattaccagaacagcctctcacagtttggcctgcctcttctcatgctatgtcgaaacaaagccacctgcctcccatgaaagacggcattgtttttccacctgagccacccacacctgggcaggtagaacagcgggtccccactccagggagctctcccactcgggcctgtcatggctcacacccc

SEQ ID NO: 31872 - DNA, 1249 bp, Homo sapiens
  chr4:155663065-155664314
  hyper
cgccttagtgaccaccagggacggaaaccgttaattatcacgtttcctttcatctccaggggccctttggcccgtgacacaagaggcttcggtattggcgctttcccagaactggcccagaggagccagttcagagtgtgaggtcgggtctgcattgaacgtacacaccgaggtctatcagactcccccgattttagcgaagggtgctgactgctgtgctgctagaggctagcaagctccctgtgcgcagctgatgagtttcagcaactcgccacctgggcgcttttctttaaattttgggagtaaactgggaaaataaaaaaatctccacgtccactggctctctccccttctccaacttcctctttcgactcgtttgtgggagttttctcctctttgctgggactataatgtgatgcgcaatcgtttgtgaatgaacaaaagtcaccggcaagcagggagacggggacagatcgctgacggcagattgagggtggcagcaaaggcccggcctccaaggataatggggagccgttttccctcacgcctggtctctatggcccccttcgtcttccaggtaaaatgaatgttccttcatccatcatccgcagagtaccctcaggcgtgcgtagaatctgctgatgaaacctattagcgccgactgggcagctttgtggagccacccgaggctctccattgtggcctttgtctgcagaatttaagcatttacataatgcattagcacggaactcagcacccggtggggacatcgcgtgccaagcctggcgcggccaacgcttcagcggctccctcacccggcagctccctaggaccaccctcgaggaggcattggagtcgggctgcaggcgcacgggcaaagaacttagcatctcatccaagtacttcgccttccttggccgtctccgggaggttatgcttaaaaacataaaaataaaaataaaaataaaaataaagggaggcggacaaagtttcggtgggtgaactgaagctgggtccatgtgaccctgaagccggagaaataaacttaacatgaatcttgctttcctggcgggcgttgggaccccgccgtttttcatgccaaccgttggaagcttcgtactcaacggccacaggtgcctaggagcgcagagaggcctcgggttcaaatcaccggcgcgcagggactggactcgcgggtagcgacccccccaacccccccccccccgccctacacacacaccctcgcgcc

SEQ ID NO: 31873 - DNA, 522 bp, Homo sapiens
  chr4:1556798-1557320
  hypo
cgctcagaactagacctgccacagagtcaacaagcgtggaccgcctgcgggctccgagctgagggagaagcacacgccgcccctgccctgtgagctggcgttccaggacagaatcggatatcaaacgagcacacggataccaagtaaaggccccaccgtcacacagcagccgccgctggaaactgagtttggtgggggaggggcctctctgcccagggactgagaccctgggatggtgacaaaggccagcaccgggtcccacacggagatgacgccatttaaccctccccaagacgccagggaagaggcgtccttgttcgtccattttacagaagagtacactgaggcctccagacgctggtggggacctcccaagccaggctccccatgtctctttctgggcctccgaccaccgttgatcagagaagcaaatctgttgggagaaatctcggagccacagagccctggcagggtgctcctggtggggaccagtccgggctggcccgacacttcctgcacgcc

SEQ ID NO: 31874 - DNA, 382 bp, Homo sapiens
  chr4:166414525-166414907
  hyper
cgtatctctacagcgtttctcagctttgatctggtgaagtttcctttgtgggctcaggtcaggcggagtgagtggagcccagggcggctgctgcgttagaaatccgggtgcagcagatggcgccctttcctcagctatctcgccccagagctgggaggtggtgccacaggctgccgattcttcgcggttcttcaggcaaaggaaaaggagctgctggagttaaaataccagtgactttctagtctctgttaagaagtgctaacgagctgcgaatggggagaccgaaggagggagcggaaagaggaggaaggaagaaaactgctgcgggttgtgtgtctaaaaattctcacacagtttttcatttaatccgtataataaatcc

SEQ ID NO: 31875 - DNA, 888 bp, Homo sapiens; identical to SEQ ID NO: 25680
  chr4:174430248-174431136
  hyper

SEQ ID NO: 31876 - DNA, 991 bp, Homo sapiens
  chr4:174439755-174440746
  hyper
cgcagtcccccttctccccattccagaacctgccgagcccctgctgcatctgggacccgccttcaccgtttcccaatcccagcggttagcccctgcgccccctttttggtctccactttgccgttcgaaaatgcctaggttggtggatcgaccctccgcggagcaaagacggatggctggcaggagcaggttcaggagctgggccaaggtattctctgcttccgcctttgtgtccgcccccccgccccctgctccccgcttcccgccagcatctctccttttctgctcaggagtgtttggcccggcggtccaccccggcttcccgagatacgctagagttgcccccacgtcctgtccgccgcgcccctacccaccgggttgccttcggggcccttcggtgctgtgtagtcggcgtggcgctgtgagctaggcgaacaggaacccccaggcccgccacgtctacgctattagcagccaggtagccctgcgggtcgaagatgctcagaggaggagtaaatgcagagaaaaaatagaggaaggaataaaaaaaaaaacaaaacaaaaacacgtaacatacacgcactcaaaaccaactttgggattggactttttcagtttcacacgaagagacttggagtatctggagaaggtttttgaagacgtttaggagggagggtgagttttctgctgagaaactcaatctgccatacagtagcggccccatctgggatctgtcactgctgacagcaccagagggcacagccgtgatcttctgcacagcctgcactccccgaaataccctccttaatcaaaggatgtctgcgcgcctgagctcagctgaccgcgccgggagcaccagggccgttggattccaccccagcccgccccctccccacgcacacagccacggcccctcgcgtcttcgcggcacgttaattaaatgcggaaaacagacagaggctgatgtcattgctctcacaagatcataaac

SEQ ID NO: 31877 - DNA, 1807 bp, Homo sapiens
  chr4:175138136-175139943
  hyper
cgtgcaatgtcactttaacctggatagcgtcaggtttcctcacgcataaaataagatcagatgatgccctcttggattctttgactgcaggacaatcattaggccatagtgaacagatgcgcttggttgccagaccgcgccctttgcgggtctatcaaaagggcaagcgcatattctggagctgtctcggagacttggacagaaagattcgaggcaaatattctaggctgggaaatttcgcgccgagcccccccctcagttagcctgtctaaaggctggtgtggccagagcgaggcagagagctctgcacctactgtcggggctgacaatgatttatgcgcttgtgacccacgtagaccataaacctagtttgctagacgtacagggaactgcgccgcagttaatgcagaggacttatcctctgacctgcaatgtctccccacctggtgctctacagctccagagagcagggatttcagcttttcctccctcattggatccaatttcaatcccctcggttaactgaaagtgtgttgacttccacccagccggcaggaccctaagggcgcctggagcagtctggtgcgggtcctggctgcagcatgcccagcagagctccgggtgcaggaggctgcaaagccaccgccgcgtccaggccccttgagcggaggtgggaacgatccgccttagagttcaaggtgaattgctgtgacagtggcgggtggaggaggggagttcgagccgttcgcctcggggaagaattatccccgatcatttatttttagatctgaattcctccagaacccagcagaggctgtggccagagccccagggccaggcaagcggccaagctgcgctctcgataaaggagccagaatggttccatctggttacaaacatatctttttattaaaaagcaatcagatcctgaagcgcttcccttgcggtttaccgctctccgcaggctgcttctccgaagccagcggtggtagcgcccactcggttgagcccacgcctccgccaggcagcgcctccgccaggcagacctcctgcgggacattttgtggccaggggggttcctgcccagggacctctaatagggtcggtggaagctaatttgaatcttcccagttccttccctgtttatttctcaacccagcagttcaaaaattcactttataacggtcccctaacaaaaacacgagtaagaaagatagcaaagaattaagctggacaggcacccatgttgcgaaaaaggttttgcttggagactgcaggagagggctatccctctttacaattcacgacgttactaccaactttgccattgagtggttcctctccctgcccgaattcctggccatcttcgttccagagagcgatgcaatcatggccttgaaaccgaacggggcgtaacgtgccattcctctccagctcccgagccccactcccacccttgccgttgaaactgtgaaaaagccgccaaagtttgggcacccagcctggcagtcggaagacagtgagataaagaatgcgatagtaagtccttaagtgcttcctagagataaggtcccggaatcctggaaaaattcagtctggcctccctacttcagcaagtcgcctcctgcttctgtcagccccctccccacacacacctggagggagaggcggtggccacaggggtagctggggcagaccctccgctcctccactcccggtggccaggggtcctaaggccacgcggctggctttcttctctgggaatcaggagatgataatgagaaaatccctcaaccattggcgcgac

SEQ ID NO: 31878 - DNA, 561 bp, Homo sapiens; identical to SEQ ID NO: 25681
  chr4:1807117-1807678
  hypo

SEQ ID NO: 31879 - DNA, 118 bp, Homo sapiens; identical to SEQ ID NO: 25683
  chr4:1827219-1827337
  hypo

SEQ ID NO: 31880 - DNA, 155 bp, Homo sapiens; identical to SEQ ID NO: 14015
  chr4:184278181-184278336
  hypo

SEQ ID NO: 31881 - DNA, 262 bp, Homo sapiens
  chr4:1960102-1960364
  hypo
cggccagggctcagtgactgagccccaaacacgtagatcctgtacctcagagagcaagatggcggggcggcaggggagcttgccagttctgtgtttattccagtgagctcgagagccccagcaggaggaagtgcagccagggcagggctctgtgagagctccaggcccctcagggctgcctgcgctcagagctggtgcggcaagccgcatccccaggagcctcgtggccgttcctgacgagtgtttgtgataagtgtgtgcc

SEQ ID NO: 31882 - DNA, 63 bp, Homo sapiens; identical to SEQ ID NO: 14016
  chr4:1960880-1960943
  hypo

SEQ ID NO: 31883 - DNA, 627 bp, Homo sapiens
  chr4:1976954-1977581
  hypo
cgccccttagcttttgaagagaaaggcaggtgtttccaatttggtgtctgtctcctcttctcccagggacggagctgacttttaactacaacctcgattgtctgggcaatgaaaaaacggtctgccggtgtggagcctccaattgcagtggattcctcggggatagaccaaaggtaaggctgtggcgccctccttccccccaggctctgtgttggcattttgcactcctggagacctgtgtcccccgtgaacagcggcttcctccaggctggcttgttgccgggacaggtgggagcaagttccctgctgtgggctggggaggatggctctcaacaaaggccagtggttaagagttcctcactgaacgtgtttcctggggctgccagaacaatgcctcacagacgcgtggtttcgcagttctgggtgtgggcagggccgtgcgccctctgaaggttccttgggaggctctttcccaggcctgtctcccgttcctggtggcggccacagtccttgctgctccttggcttgtagcagcaccgcccaaccattctccctgcgaacatgactgttgacttgcccttcttataagagcactggtcctgttgacttagcgcctgccctgctacc

SEQ ID NO: 31884 - DNA, 215 bp, Homo sapiens
  chr4:2459766-2459981
  hypo
cgttcccaaagagccaggaggcaccgccgccctcttctgcactcccggcctgaggcgcccagccgtctccctgtgccatggtctgacgctgtggctgcgcggggagggccggtgtggacgcctcttttctctctttgctcattgtctggttgactgagacgggaatcttggtattttttggtgcccactttcttcacctcatatttctacacaac

SEQ ID NO: 31885 - DNA, 518 bp, Homo sapiens
  chr4:24801473-24801991
  hyper
cgcgccatccacgtgcaccagttcggggacctgagccagggctgcgagtccaccgggccccactacaacccgctggccgtgccgcacccgcagcacccgggcgacttcggcaacttcgcggtccgcgacggcagcctctggaggtaccgcgccggcctggccgcctcgctcgcgggcccgcactccatcgtgggccgggccgtggtcgtccacgctggcgaggacgacctgggccgcggcggcaaccaggccagcgtggagaacgggaacgcgggccggcggctggcctgctgcgtggtgggcgtgtgcgggcccgggctctgggagcgccaggcgcgggagcactcagagcgcaagaagcggcggcgcgagagcgagtgcaaggccgcctgagcgcggcccccacccggcggcggccagggacccccgaggcccccctctgcctttgagcttctcctctgctccaacagacaccctccactctgaggtctcaccttcgcctttgctgaagtctcccc

SEQ ID NO: 31886 - DNA, 154 bp, Homo sapiens; identical to SEQ ID NO: 25689
  chr4:2926297-2926451
  hypo

SEQ ID NO: 31887 - DNA, 235 bp, Homo sapiens; identical to SEQ ID NO: 25690
  chr4:2932837-2933072
  hypo

SEQ ID NO: 31888 - DNA, 812 bp, Homo sapiens; identical to SEQ ID NO: 25691
  chr4:30723837-30724649
  hyper

SEQ ID NO: 31889 - DNA, 205 bp, Homo sapiens; identical to SEQ ID NO: 25692
  chr4:3217005-3217210
  hypo

SEQ ID NO: 31890 - DNA, 1337 bp, Homo sapiens; identical to SEQ ID NO: 24474
  chr4:3445901-3447238
  hypo

SEQ ID NO: 31891 - DNA, 284 bp, Homo sapiens
  chr4:39047105-39047389
  hyper
cggattttttttttcctctccttattacttgcaggcaattttgacctaagtttttaagcttttcttttaaataataccctcgcccccggagtgtggagaataagacggggacttcattttcccgagacccggcgtgcctggtgaaacttttgcatttaggcatttatttcagtgcatgctctgggatcagaagctggcggtaaaagtttgctatgtcagagagtaaagcgttactgtcgttttttatcgcttcatttcattttcaaaaatattcttcagtagtc

SEQ ID NO: 31892 - DNA, 272 bp, Homo sapiens
  chr4:40910295-40910567
  hypo
cgtttctgtagttgaagccacctcgtctgtggtattttgttatggcagccccagccaacaaacacacggtggtgtatacacttcaggtaaccatgagcatatggcagagctggcagtgaagcctgagtttgtgtcctgacacattcctgtcaccgcgccttgctgcctcctaggtgcggcaacaatgctggctttcctgacggagagagggaggccggcatccccaggccacacctataatgcctctcaccccatacacgtgtgcacaacac

SEQ ID NO: 31893 - DNA, 459 bp, Homo sapiens
  chr4:41746763-41747222
  hyper
cgtggactgcaattgaccccaatccaaagcagtgccaaaaagttcagtaaaagctggtggaagaagaaaatgccgacggggtaggcgggagcgagggggaaaaaaagagttgcgaaacatgagacacattttgcagagtttgcagatgaaaaggcatctcatggatagggcatctttcagggccgaacggctgcaaagattcggggttgggagttgcaactgtgtggggttccgatgcgctaatggcgggatggtgttcagcgaggtgggacaggcaagggggtgcgagaaagtcactccggccgccgggacagtctgagcaagtcgtcgccgcagtgacccgaacccaaggacacgataggaaggggggctggaacggcgtccctactcttccctgaagaagagccccaagagaatccgtgctgttaggagggagcggatttaggggttcacaagatc

SEQ ID NO: 31894 - DNA, 468 bp, Homo sapiens
  chr4:41750117-41750585
  hyper
cgtctcatcgcaaagtaaataaattatgcctatcattttggcagcttaagataattttgttggcggttcgggtgtgactaggatagtgtaaccctgtaagtgaattacccctccctgcaatcgcttctaacgtgataaattctttcatttgtgtaagcaaatttcgtttggtaaatactaaacacatttccattttcaaatgcaatcaaggcttcctatatacgggcggaaaggcggcttcctccgctgagaaagctgaaggtccttacctgcggcgtacggactgctctggtggtccctgagggtgcccaggctgcaggatcccggcgtgagggaagggcagccggacgtggccccaaaagtggtccttatcgggttatactggaagccactggcctggctgcaggaactgaagtcagcataggctgaagccaggctcgaggtgtccatcccagccatacaggactc

SEQ ID NO: 31895 - DNA, 1912 bp, Homo sapiens
  chr4:41752247-41754159
  hyper
cgttcagtgtttgccaaactaagtggtttaattcgatgctagtgccggggagtggatgggctcccgctctcccctgccaccgtgttttattgcgcactaaactgccgcggacgcagtaatggattaaacggggacagcggtcccccagccttgtgcttctttgcagggtgagtttcaggctcgtttcaggtggttgcaaatcctcggggcgtgaggaagcgctaaagtcgggagtgcagggagccggacctaccgaggatcctggtgatagttttatggggagggctgatagttttattgcagttgtatgttgtacaatgcgtatttgataaagaagggcccttggtgaccagtgtgcacttttttgtgcacgggggtgaaatgaaaataaatgtatacaaggttttactgcggcgggaaacaaattgcaacgctctaaatggtttttctttatggtcaccagacaagaggagaaaagggatgcaaacatctgtcttcagtcccctaaacctaaaggccagcaaagacggatgcgaatccaagtgctattacagcggagatttgtctttatttatcccgctctcatgaatatgaatttgcatttgggccgggaggtggctgtatccctttggactccacacatggaatttcccccacgctcatccccctccccaaccacttaagggaggtgggggataggttgtcaagcacaaggctgagatcgtccaagtttcttcgttccctcggatttcgggttgggggatgtgcttgctggttttctgaacgcaactctgccgccgaggcctgcactcaggagatgtggatgtagggagcacaggccggggtgtccaccgccagcccgctcctctgctgtagggtttaagcgcgtttccctgcagaagagagtgaccaggggtggtcaggaggtgatgaatttcggctccaaggcctatttttgacagtaaccaggttcacaccccgcttggcactagagccttactgcacctggggtgtgtctccgcgtggtgcagagcgcgcgctctactccggaagctacggccgggtgccgcgccaccgctgtgcgccctgggcctgatccctacgccctagtcgagtgcagggcagggcaatttcgccgtgggtcctagtttgctgacagttcccaggcccctttagcttttggggaggaggcgagactaggacctaaaaagtgctgggagctcggagtagaggggttcatgttgccagtttctgaggattgctcttaggtgaagatgtggaacttggaaatttaggtggtgcacagaggcacttcctgagcgaaagggagtgttggggtggggagttcagtgggcacctcaggggacctggatgctgacggggcatcagagggtgtcaaaaggagaagctaagggatctgggcgaggtctcagccgaagggcgctggcaagggaagtgcttggccggggagggtgcccggggggcggtcaaggggcaggcccggggctctgtccctcccggtcctggggtcccttcccgtcccgcggttccggaacgcctcgccagccctctctgggcgccccctgctgccgggcgccccctgctgccggccgccccgggtcggggtgccgtgagccttctcgcctttgtaccaggagacctttcagcgccgggcccacacggtcggatgagcaaatgcgcttgacttcattttcccctttgtagaccttgtaggtttattttgttcagtgtcaccatccctcccccaccacccctggcctatcgtccctctgcccgtcttttgtggcccggggtcctgcttctgcttggagatgaaaggcgtgcggggctgggccaggccagagccccagccccagcgccctgttttgttccagttgtgctttctacacgc

SEQ ID NO: 31896 - DNA, 415 bp, Homo sapiens; identical to SEQ ID NO: 29198
  chr4:41875378-41875793
  hyper

SEQ ID NO: 31897 - DNA, 147 bp, Homo sapiens
  chr4:41882113-41882260
  hyper
cgccctactgatcacgcggagaggattccttcttcccctctttactccgcgccctgccgcggaaacccttcccgtggcctcgaactggtccccgacgactgcggggtacgcggggcccaaagccagactctactcccgcgcagatgc

SEQ ID NO: 31898 - DNA, 926 bp, Homo sapiens; identical to SEQ ID NO: 29199
  chr4:42152717-42153643
  binary

SEQ ID NO: 31899 - DNA, 939 bp, Homo sapiens; identical to SEQ ID NO: 25695
  chr4:42154161-42155100
  binary

SEQ ID NO: 31900 - DNA, 809 bp, Homo sapiens
  chr4:48492454-48493263
  hyper
cgcctcctccccctgctcggcgggcgcggcctcgttgtccttcccgggctgcgggcggctgacggccgccgagtacttcgacagctaccagcgggagcggctcatggctctcctggcgcaggtggggccgggtctcgggccgcgcgcccgcagggccggcagctgcgacgtggcggtgcaggtgagcccgcgcatcgacgccgcggtacagtgctcgctggggaggcgcacgctgcagcgccgggcccgcgaccccgagtccccggccggccccggggccgagggcaccacgggtggcggctctttctcccagcagccatcccgtcgaggcctggagcagggcagcccccagaacggcgccccgcggcccatgcgcttcccgcgcaccgtcgccgtgtactcgcccctggccttgcgccgtctcaccgccttcctggaggggcccgggcccgcggcgggcgagcagaggtccggggcgtcggacggagagagggggccgccgcccgcgcggcttcaaggcccagaggagggggaggtgtggacgaagaaggcgccccggcggccgcagtccgacgacgacggcgaggcccaggccgcagtccgagcgagctgggagcagccggccgacggtcccgagctgccgccgcgagaggcccaggagggcgaggcggctccgcggtcggcgctaaggagcccggggcaacctccgtcggcggggagggcccgagacggcggcgacggacgggaggcggccgtcgcgggagaggggccgtcgccacggagcccggagctgggcaaggagcggctgc

SEQ ID NO: 31901 - DNA, 451 bp, Homo sapiens; identical to SEQ ID NO: 30366
  chr4:54975783-54976234
  hyper

SEQ ID NO: 31902 - DNA, 68 bp, Homo sapiens
  chr4:56503489-56503557
  hyper
cgcaccgcccctccccgccccctctcccccgcgccataggccccagtgtgtgaaaaccggcgaaaacc

SEQ ID NO: 31903 - DNA, 1425 bp, Homo sapiens; identical to SEQ ID NO: 24481
  chr4:57521376-57522801
  binary

SEQ ID NO: 31904 - DNA, 1287 bp, Homo sapiens
  chr4:628147-629434
  hypo
cgacgtggccggagggcggcaggtgcgtgaggtgccaggcagggcggggccccccatgaggcctgtccaagtctgctggactgagcactggggggcaccagcatcctccgcacaggggtgcatggagccaggctggagccacagggacaggcccagctttcaccgcccggtggccacatcccagtgcccagcagggcccctgggcacctcacacctggagggcagcagcccccacagagcttgacgacaaccccagtggtgcgggctccaggcccacggtgcgacagcctctttagcctctttcctctcttgcggcagtgccctcacttcagctcatttgctgacgagctcactgactacaagacaaagaatatgctggccacacccatcatgaatggcaaagacgtcgtggcggtgatcatggcagtgaacaagctcaacggcccattcttcaccagcgaagacgaagatgtgagtgtggggggcacctgggcagccgcgcgtctgcctccctgcctgcctgcccgcccgcctgttctgtgctgcgcatccacctctttacctgcctgcccgcctgcccgtgtgttctctgctgcgtgtctgcctccttacctgcctgcccgcgtgttctgtgctgcgtgtctgcctccttacctgcctgcccgcgtgttctgtgctgcgcgtccacctccttacctgcctgcccgcctgcccgtgtgttctctgctgcgtgtctgcctccttacctgcctgcccgcgtgttctgtgctgcgtgtctgcctccttacctgcctgcccgcgtgttctgtgctgcgcgtccacctccttacctgcctgcccgcctgcccgcgtgttctgtgctgcgtgtccacctccttacctgcctgcccgcctgcctgcgtgttctgtgctgcgcgtctgcctccctgcctgcctccctgcccgcctgcccgcgtgttctgtgctgtgcgtccacctccttacctgcctgcctgcctgcccgcgtgttctgtgccacgcgtctgcctccctgcctgcctgcccgtgtgttctgtgctgtgcgtccacctccttacctgcctgcctgcctgcctgcgtgttctgtgccacgcgtctgcctccctgcctgcctgcccgtgtgttctgtgctgtgcgtccacctccttacctgcctgcctgcctgcccgcgtgttctgtgccacgcgtctgcctccctgcctgcctgcccgcgtgttctgtgctgcgcgtctgctgggctgctgggctccacgtgctcatctgcacatc

SEQ ID NO: 31905 - DNA, 533 bp, Homo sapiens; identical to SEQ ID NO: 27051
  chr4:650837-651370
  hypo

SEQ ID NO: 31906 - DNA, 236 bp, Homo sapiens; identical to SEQ ID NO: 25700
  chr4:6748324-6748560
  hypo

SEQ ID NO: 31907 - DNA, 117 bp, Homo sapiens
  chr4:7035963-7036080
  hypo
cgcagggaaggatgtgcgtagacgcggacagtggtcagaactgggtttcagactccagccttgtgaatgactcccaagcccttgtcagaaacaccctctaggggagggggcctttgc

SEQ ID NO: 31908 - DNA, 571 bp, Homo sapiens
  chr4:81189434-81190005
  hyper
cgctcttccagcgcgggttggtccaccaggcagagccccagccagggcctgtcaggtacccagggagaccggaaatgtagccaggagacagcagcgctcacagtcacctggtttcagtgtcagcctggttgctcctagatgttcctaacttgctccatctcagaccaaagactccacgggccattgggctccttcttacacaggctccagaggagcgtggacaccaccggcggtctgaagatttggcagccagcagtctccagaggggggtcggaggcgcgcaagtgggtaaggcggtaggctggctagcctcctccggtgggttaagggggcctaatgcggaagacctgatggttcatgctgagagaaaagcaggtctatgcccgcccctctgcgcctgtctagtctatctgatcgcgctgattcagcagcctgcggcgcacgtggtgagggcgcctggagcgcccagctggagagagggccctccgcacacgcaccagcgagtcccagggcctccctcacactcccgagaggaatctatttccatattttagagtttatttcactcatc

SEQ ID NO: 31909 - DNA, 883 bp, Homo sapiens
  chr4:8200632-8201515
  hyper
cgtgtgtgtgtgcatgcatgtatgtgtgcaggcatgcgtgtgtgtgtgtgtgcagtaaatggaagaggaacagagatcagagctgaggctggcagggctgaggcagccggtggctggtggacttccccaatcccagcctggcgggggactgggtgcccctagcctctactacagagcctgggggctgggcagcgggcaggcaggacagggcctggacctcgtccaggaaagagctaatgatcaaccggctgcggtgtctgtgcagccgccctgggcctgcctctccgtcaccggccctcaggcgcagggaggaagtagggcaggaagcagggggcggaggccgctgtgcagtcagcctggctgtgggcggcccctgcctgctccgtccagctggagacagccccgtggggccagccagcgctgggccaggagcggccacctggttcctgcgtgctacggccctgtgggcctgggagctgcctctgaggaacacgccgcaggtatggggggctccggggcaggcggggcgtggactggccgagcaggctgctgtctgccagtcttgccatggttggatctttacactttcttgaggacttttctgacctgtttgggatgggggtggagcgaaactgcgagctgggggcctcggggaggtcgtcggcaccctcagcagaccccactcagagctcacaggtgctggcagtgccaatccgcagtgattgagggcaatgatttcagctttgaccaagcacccttgcttctgggacctggcctgaccccgtgctggcccttggcatgagcggccctgggggtctgggagcagagccagcctgtcgctggattccaagtccagcggatctcaggtgtgaccccagcgccc

SEQ ID NO: 31910 - DNA, 309 bp, Homo sapiens
  chr4:83323427-83323736
  hypo
cgagcccgctgcaaatgatctagacgcttgctggagttgacttgtttcatggtgagggctccttgaaacactggcaccaccaggtacttcaggtcggtggaagcaatctcttccaaatcttcatttcggctgaacaactcgagctgcgataacatttcggcagccttctcaaggagatccatccaggcccttgaacaccttctcctggactatccgggaatcggcaggttcagtcgctacttctacttcgtccagaatctgtttgccggtttccagcagctcggcggggggcagcgggagcagtagttc

SEQ ID NO: 31911 - DNA, 738 bp, Homo sapiens
  chr4:85402736-85403474
  hyper
cggctctgcctcccctctgtctaccttgcggagactattcaaacgccctcgcttgcggggtttcggagccagaagtctcgagctccgcgcctccgcgcccccgcgccgcgcccttccacctgcacccgttaggcgcgctgcgggacaacagcgcagatgcaaacagctttctcgcaaggaaaaagggaattgaggagaaagtttcctctctgagccgagggaagcggaaaaagatcaaaggtcgggggcgggtagagtgggggtggggggaaccgcgggacgccctagctgtgtgcgtttcgggaggcctcgcagtgccattctgcaagagtacctgctatctcgaaaatcttttgccaccgccgaccgcagcgggagggggcaaggggctctctctgactcagctccggatttgtgcatccccgcagtgcggcacccgcagtcttgacttccccagtctctgactgaacagatgtttttgtccctcgcggagatttgtaaccgatgttgggaacagctagtggacggtgctagcaacctgtatctgttctagaacacacctagtgggagctgcggggtagagtggagaggtaggaatgcagcgggactggggcaggggacaaatcaaggtgtgtgggtaaatgtgaacatatgaacacacgtgtgtacgcacgtctctaaatgtgtcattcataacattttaaaaatggtcaagtccggccgggcgcggtggctcac

SEQ ID NO: 31912 - DNA, 270 bp, Homo sapiens
  chr4:85404934-85405204
  hyper
cggccacggctgccttttcctgccctgaagtggtggagcttctgggaagatccggggcctgtagcgccctttccactgcgagtaggcgcagccgctttacaggttgtgcgatggatacaggtatcgtgtggcagacgtggtgccgtctgggcttaaagccatcgataagcaaactacacaagccagccaatcccgagcgttctaattgccttagtcctgggatcacccacgcagcaagtccagccatgaagcccgcccccacagacacac

SEQ ID NO: 31913 - DNA, 477 bp, Homo sapiens; identical to SEQ ID NO: 23278
  chr4:87281183-87281660
  hyper

SEQ ID NO: 31914 - DNA, 348 bp, Homo sapiens
  chr4:94753232-94753580
  hyper
cgccaaaaagaaaaggaaagcgccacaaactgggtttgcagaaagagtaatgcactagggagcgcaggttctggtctccttaagtaagaaactgcagaaccagctttttactgaccacctgggtatctgtggctttcagcggaagccgaccaagagatgcagagaacgtccgccagctctctgggagaagcgagcaggcggctggtgacactttccagggcagaaataatgcacctgtcccttagataaccttttgcacccatcgagtttgccgtgctcacgataaacatcaggaatcttcgggctgctgaataaatcaagcgattgcttctaacacatttccatttc

SEQ ID NO: 31915 - DNA, 1739 bp, Homo sapiens
  chr4:955057-956796
  hypo
cgggagaggccagccgagcagggaccagggacgcccaccctggacctggccctggggcgggagaggccagccgggctcagcggggaccggggacgcccaccctggacctggccctggggcgggagaggccagctgggctcagcggggaccggggacgcccaccctgggctcgcccgcccactcggccggcggctcaccatgtgcacgacgcccgtcacgcccacaacctccagcagcccgtcgtccatgcgtggcttctcaaacctggtgtcgctgtcggagccccacaggtcggcccccgagccccagctgccgcataagagagcgggcacagaggtgtaggtgcaggcaggacgagggctgagcctgcccatggccccgccgggcagagcctctggggagccccgcccgcgagcacctggggatgttgatgaagatgaggccttcaatactgggcagctccacctcctgccgctccacctgcagccggatctgcttgtgcaggctccgagagtgactgatcttctgcagccccacccgcacgtacacacccttgttgtgcagcctgcaggacggggcaggtcacccatcaccaggggaagccctaccccgccttaggcagcctccgggttccggcccctctgcctgttcctgctgggggacctgagggaggtatgccgttgacaggtggtagcccctgcggctccggtacctgcttgtgaacttgccaggctcctcttcccgtgcctggtggaagtccaggctcagctccgcgtcgatgccaatgccacagtagttactcatctgcacgatctggggacagggcgttcatctcccaggacccggccgccctcaccaggccccctgagctccccaacagctctgccggcaggcagagacaagagcaaggaccaccctggcaccaagccgagcacccaggagagggcagcatgggcaggtcctggccaggctctgtcgccagctggctcagcacaatccccagcagtggctactttctgtgtctccctcaactgcccgctttgcagaggggatgatgcgggcgcgtacacccgagtgtggctgggaagaggacgcccgttgtgacgcgtgtagcggggtcatatgcaggagcctggaaggcaccccacgccgggctgccctgtaccttggggggctctgcgtctgccgtgtcgttctctgcactgccagcctcgtgggcatccagcaggatggtccagcggtccatgagcacggcgtcggcctcgtccacagacagcagtacggagaacgggtcctcgccgctgtagcccgccccccagcggaggactcgaccaaggtcattccctgggacacaagcagacacagagcatctgtccacacccacccgcccatcagctgggtgcagaccccaccacgaggacagccagcccaggcctcggcaaaagctgcacaggaaggggtagaccctgaggccccctcctcggctgcacggctgagcccacctgtgcccaggggcaggatggccacagaaggctccgggcaggccagtcggtaccgtgtctcctccagggcgccaagcacccagcccacagtgccatcgccaccacacaccagcacccggaagcagggcacctgggagaacaggtggagcctagcgggagacaggaagtgtcctctaccagctgcgggcgcagcccatcccccacccaggctgcctcttccaagtgcccgtcctggcc

SEQ ID NO: 31916 - DNA, 383 bp, Homo sapiens
  chr5:10307529-10307912
  hyper
cggacgcatgggatcgtggaggctgctgttctgcaaggacaacgtatcacttttatgaaagtcagcttctgaaaacggactatgggaagttccttacccgtgcacgcggcaaagaccttctttgccatagtcagaacacacgcgggagttcagaggagcggggcccgggcttgtgtgggcttgtgtgccccggggacgcgcacgtaccttgtcccgcggcctgagactgcgctgcaccgcgcggaggccgaacccagaggaggcggcgtggcgccgggcggggacgcgagagggacgtggacgcggcgaccgaggacgcggggatcctgcgggaccagtggctccagtcgtagcctcctgggagagccaagcccggagggggc

SEQ ID NO: 31917 - DNA, 706 bp, Homo sapiens
  chr5:10333412-10334118
  hyper
cgctcttagcgccagagcaccccagccgtcctgggagcccccgaagccaagcatattcgaactccgaatccgctcgatcgccggggacctgccatctgggttcggttccccaaggtcgctgccgaccttagaccgcgggggtgtggggcgccggggaaggagacagaaggacaggcgccgcccagggccgcggggacacttggggctgcgtcctgggtgggcgcgatgctcccccagaacgactggagatggagagtgtcggggagggaaacgggacccacgaattcagggcgctgagtcggcggaatgcgccctgactccccctggccgagagccggctcagaatgaaagagcgcggagtgggaggtctgggaaatggcagtatttgtattagggagagaaggaaacaggagtgggagccgcacggcttggggaacgcgggagatcgcggattgcggggatagcgcagcgcggctgcccggggctgctgggaggggccggacgaggccagggcgagcggggtaactgcggccggccggacggcggcggtaaccggctgcaccgaggtggttccaccaccgcgctgggcgcttgcggttcgtctgctccaacgaaagccgcgtcccacgctccctgccgccgcgtggttttgcctcctcagaggggcagcggcgacccaggggctggcggtggatgtcaggagtgc

SEQ ID NO: 31918 - DNA, 125 bp, Homo sapiens; identical to SEQ ID NO: 14043
  chr5:10479713-10479838
  hypo

SEQ ID NO: 31919 - DNA, 1429 bp, Homo sapiens; identical to SEQ ID NO: 25707
  chr5:10564301-10565730
  binary

SEQ ID NO: 31920 - DNA, 1351 bp, Homo sapiens; identical to SEQ ID NO: 23619
  chr5:1073469-1074820
  hypo

SEQ ID NO: 31921 - DNA, 939 bp, Homo sapiens; identical to SEQ ID NO: 28054
  chr5:112629411-112630350
  hyper

SEQ ID NO: 31922 - DNA, 939 bp, Homo sapiens
  chr5:114514898-114515837
  hyper
cggcaatttctcggatgcagcgcggagcccagcctcccgcactgactcaggcccggcaccaccccgcctgctgagggcgtcgtcgcgggcgccaccgacggcgccagcctgcgttcctaaaggctccaggacaggtgtggggctgaaatcccgctcctccagcatcttcccctccctaccaaaagaaggctgctttaaatattcccggcctggagcagcagcagctaaggacctggaaagaggcccgaaaaggccagggcagggcgaacgaacgtgctgtccctatttaccggccacacgctctgactgcgggctgaccctgatcgcacacttcgagcctgttcactcgctgggcggaccctccctccacgctccgcgcccaggcaggcgaggtcacccactcgaagtcaccacgtttgagtagccctggttggtggggcagcgcccccttggccaacgccccgccctcctctccatcttccgacgctgggctctcgcccttcggcgtccgagagcccctattgctgcccagctggccccaaaagcgtccgaaagtcccctcttggcttatttcagagatgccacgcaataaagaaaaggcggctactttgcattccgcagctgctgggacgcccgggctgcgagcgcggctcctggattccagcctcccgcccttcccaggcgctggaatggacacggacgcccacagtggcgggccaggtagtgccggagtcgggggcccaggccgcggcgccccgcgcctcatcacttaccttgcctttagctatcaattccatgatgtagccaaattcactcatctccccagactccgacatgtttacaccccttcacaaactctggaggaccgacgcgggtgtatcgaatttgtcctttcttttctctttttctgtttttagtctgagttttgccgagctcccc

SEQ ID NO: 31923 - DNA, 1335 bp, Homo sapiens; identical to SEQ ID NO: 23286
  chr5:115151516-115152851
  hyper

SEQ ID NO: 31924 - DNA, 228 bp, Homo sapiens; identical to SEQ ID NO: 23288
  chr5:115911467-115911695
  hyper

SEQ ID NO: 31925 - DNA, 740 bp, Homo sapiens; identical to SEQ ID NO: 23293
  chr5:125930492-125931232
  hyper

SEQ ID NO: 31926 - DNA, 1157 bp, Homo sapiens; identical to SEQ ID NO: 24491
  chr5:1294558-1295715
  binary

SEQ ID NO: 31927 - DNA, 709 bp, Homo sapiens; identical to SEQ ID NO: 24492
  chr5:132082800-132083509
  hyper

SEQ ID NO: 31928 - DNA, 418 bp, Homo sapiens
  chr5:134363127-134363545
  hyper
cgtagagtcccgcagccgcggagggagggggttctcgctaaggcgtcccgcggacaacgccgagaggcacagcttagcgggtgcgcaccggacaggctcgcaacgcaggacggtgccctcatgggagccaggctgagcaggtcaagaatggtggtggggaagcggggtaggcagacctcggcgggggctgcctcggcgctctgctcctacccaaggggcccggttccctttctacccacagttccctttctatccgcctccctcctcagcccaatgaagcagtcggggctcagcagtgcttagcacgctcggactatggttttaatagacgtacatggacaagtcgatatagacagatttattacagtcagtccaacatacacagggacgctgtaaacaggggcgcgggccggagagc

SEQ ID NO: 31929 - DNA, 859 bp, Homo sapiens
  chr5:134363807-134364666
  hyper
cgaggctctaccaggcgcgccggggccgtgtgcggctccactgagtgcccgatcctgggctgggggcaccgtccccccaaacccaacgcccgccccaacacggatccgactcgagctaaggcgctctcggccgggcctagctcggagagggcaacttggtttgtacggggtcgggaaatcctaggcaagtccaggccccgcacatccagtccgcaggcccggccactcagtccggatccagcgcggcggggacgcgggatacgaggtcgtcctcccccggccgctgggcctcggcgctcgcctaccgcgccgcgtgccctccgcggagtgggcctccggggcccgtgggaacacacacaccacccgcgccatcccgagagaaattgcaactcatccattttttcgcggcacttttctccgacgtctttttgcttttttttttttttttttttttttgtctttttggagggcagagtggggtccggaaaagcaaacacaaaaccaacccggagtgggaagtgggaggagggggctgcgcaggtgtgaggtccgcggcgcggtgagctggggcttgcgagccggggccccgcgtgcgtcctccgcgcccgcgcccgcgcccttccccgctccggccgccggcccgcgtggtgcggcggggcggtcagctgttgtactggcacgcgttgaggcccgaggccgggccctgcaggccgccgtagccaaacgacgagtgctgtttggacttgagccgcaggctggctaggctcgagttgcacgtgtcccggtagacgctgtagggcgaggcgggagtgccgtacgggcaagcgcccggcgacatggccgagttgagcgaggagcc

SEQ ID NO: 31930 - DNA, 272 bp, Homo sapiens
  chr5:134364991-134365263
  hyper
cgccggttcttgaaccagacctgggggaggggacgggagaagggtcagggccgctgcgggccgggagggaccccacccccttccccaccgcctggagccttccgtcggcccgctgccctccgaacgtcgtttctctccttcgaccgatatttccgctcctgcattccctccacaatggttcctttcctgtccccagaaaatactaatttctttttccgatctttatcctctcccgaaattatatccgttttcttctccgaatacggattctc

SEQ ID NO: 31931 - DNA, 896 bp, Homo sapiens; identical to SEQ ID NO: 30383
  chr5:134366533-134367429
  hyper

SEQ ID NO: 31932 - DNA, 772 bp, Homo sapiens
  chr5:134374385-134375157
  hyper
cgatcccggctttggggccctgcctttgccgcgggagaataggctccaatttacgaagctggtcaatttcagaaatccgagacccggttcttgagaagcgactgcgtgctccgggaccctgcgtcaacaaccaaacctgggagaagccgcgggaatgtctttattggacgttacgaagggaattggggtttctctcctgggaagaaaaagcccgacctgtgccggcgagagcaggctgccttgggctgggggcacctccgagcgctgcggcgggacgtcggggtccggggcgaagagagccagggcgcggaccgacgtctgctgcttttctgcggcattgctgcccgaacgaacgaacgaacgaacgaacgaagcggtttcgtttaggaaaaataccctcttgacgcgaagccacggctgaagtcccgggccacgcagaggggccagcaattccatgggtggtggggccctccatccctggacgcagcggggagcagcgggcggccctctctcctgcccacttctcctgggggtgggggagccctgtgtcacccgacgctgcgaggggctgccacgggcttctcaggttgtgcccttcgcggggccgtggcccgtgcccccgaggctgctaccctcttgaggtgcccggagccaaagcagagggttgatcccgccggttgggtgaggtagcacccggtgacggcggctatgactgtgccctgggcgcaggaacgagctcctcgcgctgcctcgaaggctcctgaccttccgc

SEQ ID NO: 31933 - DNA, 772 bp, Homo sapiens
  chr5:134375163-134375935
  hyper
cgctgtcccgcgccgccgggtggacccacacacgccaggagcaaactgcgcaggactcggccgccacctccctgcgcccctccaccgcggagaccctgcgcccctagcccagcgtctcttaccccacctgggcagcgctgcgtctgcggctcgtgggctccgggctcgcccgccgcggactctggctcaggtttcggctccggctggggccccggatccagctctggctctggcactgcacggttcttcggcccctgctggttcgctacatcccagcgcgcgaggccggggcttcctcggctcggcccgctcctcccgccgccgccgcccgtcgcccgcggggaaggcggggacactggccgggaggcgggaagggtggggggaggggaagctaggtgttcgccgggacctgcggggagaggggcggcgcgcagtcccgccggctaggggtcctggcctccctcggggcgtaggctggggtccgcgcggctggcggccgggcctcgaggccggggagcgcgccctgggacctccgtggaggggccctgccgcatgcggacgaagccagagcgggtcccagcctggccctggggcactttctctccctgggcccagtttcccacctgactcgtgaggggctggccctacttccgtttagacgggggctggtggtcgagtttggggttttgagattggacctttcttctttctgctcagcctgcgggagggagctggtcttgcgtgttggcagggagagtccgctgcccagagc

SEQ ID NO: 31934 - DNA, 803 bp, Homo sapiens
  chr5:134879182-134879985
  hyper
cgagttaaagggggaggaaagcgcctcattttctatgcccccaagggacggaccgagcgggcagcctctaaacaatgtatttatcactttgcatctctttgggacgccggccgcgcccccacccttgccgccgccgtcgccgccgccacttcggttttgctctggctggggagacccggcgtttctggatttcttttatgcagccacaaataaaggctcctaggctggaagaaggggatttccccccaagtcttgagcaaacgaccctagcgccgtggctcttcctacggcgggggcctcggagaacccggcggggcgcgcggggggacgcgtgggcactgccgcgtgggcgccctgaccccgcgcccgcgtggagcgagagccgggactctgggccagcaagttccagttccccgatggggccggctcgcccggagccgcgtgaggggattagggccgcacgagaggcgaccgcgccgcggcctccagccacgtgagcacagacacggcttcaaacgtccccaacgcactaatccttgttatccggcaggataaccgcggccgcgccagcacccggcctgcctcctccgtctggctgcgggcggggagtgcgcctggctcccgagcccctgacacggatttggggcctgcaatgacgatctaccccacaccatccacattcctgggaccctcggggcaaggtcctacagtccttggtgaccaccacgcctgcaaaaagcggtgggaaagttgttacgcttagaaaactaccaacacgcgcatgcctgtaatcccagttactc

SEQ ID NO: 31935 - DNA, 541 bp, Homo sapiens; identical to SEQ ID NO: 24493
  chr5:134880146-134880687
  hyper

SEQ ID NO: 31936 - DNA, 796 bp, Homo sapiens
  chr5:140800452-140801248
  hyper
cgtttttaagctctacaaatacgtgtgattcacaaaggtgagcgtaatcatttcttctggaatttcttagtcgttgcaataataagaatgggctctaggcgccgctgctcaccaatcagggaatgggaagctgcgcgccattgagtccctccctcccccgcctctaccacacaaagcggaatgagatggatactcacagatcctgacactggagacttagaagtattttccttcgctttctgatatattttggatgtagtcggcctaggacttcatagatacataagccgattcacaaccaaccagctcgagaaaccgcggaatatcggcttagagcctgccatggcgaatcggctacagcgcggggaccgcagtcggctgctgctgctgctgtgcattttcctggggacgctgcgggggttccgggccaggcagatccgatattcggtgccagaagagaccgaaaagggctccttcgtgggcaatatctccaaggacctggggctggagccccgggagctggcgaagcgcggagtccgcatcgtctccagagggaagacacagcttttcgctgtgaatccgcgaagcggcagcttgatcacggcaggcaggatagaccgggaggagctctgtgagacggtgtcctcctgttttttaaatatggaacttctcgtggaagacaccttgaagatttacggagtggaggtggaaataatagatattaatgataacgcccccagcttccaggaggacgaagtggagataaaagtcagtgagcacgcaattcctggggcgc

SEQ ID NO: 31937 - DNA, 399 bp, Homo sapiens; identical to SEQ ID NO: 24497
  chr5:141931151-141931550
  hyper

SEQ ID NO: 31938 - DNA, 175 bp, Homo sapiens
  chr5:142625544-142625719
  hypo
cggtcatgccaagtctcagtgccccctccgcttcaggggcttagaccgccacttggaatgcgtgcattctggcaggtgcggtgcatgcaggggtcagacccctatggtttgatgagataagagcctcctgcacagaatctcattttttctccatctgcaccgccatttgggcctc

SEQ ID NO: 31939 - DNA, 210 bp, Homo sapiens; identical to SEQ ID NO: 24499
  chr5:149810718-149810928
  hypo

SEQ ID NO: 31940 - DNA, 372 bp, Homo sapiens; identical to SEQ ID NO: 25716
  chr5:152870120-152870492
  hyper

SEQ ID NO: 31941 - DNA, 985 bp, Homo sapiens
  chr5:153855941-153856926
  hyper
cggggagtcgagctggcctagcgtcctccttcccgctctttcagcaggaaccaagcggtgctacttgaaggaggcggcgacgcgtgggggccgggatccgcccaataacaacttctttcgaggcgccgcacctcgaaagaagccggcctgcaccatccccagtccggggcagccgtttagagactcgatgcctatttatctttccctcgtccctggatgagctttcgtcagtttaccacaggcccccgcaggttggataaaccaggtggggcgcttcagctggctccactccgctacggccttaagccccccaacctagagaaactgattggccagcctgaaaacccagcgctcagaagcccccagccccggacagccagaccgagtgccaggaagtgtcaccctaaccggagaggatcaagaaggccaagacgagactgcgctctccaaagctaaaagaagtggctcttatttacatgcaaagccactgaagtcgtcctcagaaccagtccatggggagaaccagaactggccctggactgagtagaagacccgatctgttttacctcacctccaccctggactcctcagataggtgcttttcctgccccgacccactctgggccctcagtttccctatttatacaatgatggaagtagactagccggtccagcaaaggccctttgaaaacaggaaccgagcccgggcacataaattcaaactcaaagtaaagaactttaacacatattcttaacctggcttccaggagagcccaggaatgaatcaggacttctccaaattggaagcaaaacctgtggtgtgtgcatttttggagggtccgaggctccaaacagattattcactcagtattacaaacactctcccgtattacaaatgaattctatgacgaatctgcctccctccatgcacaggatcgcacgctgtgaccaaccatctcagaactcttcccaacctttccaaatc

SEQ ID NO: 31942 - DNA, 924 bp, Homo sapiens; identical to SEQ ID NO: 27083
  chr5:153859078-153860002
  hyper

SEQ ID NO: 31943 - DNA, 225 bp, Homo sapiens; identical to SEQ ID NO: 23621
  chr5:154209748-154209973
  hypo

SEQ ID NO: 31944 - DNA, 707 bp, Homo sapiens; identical to SEQ ID NO: 30391
  chr5:157098032-157098739
  hyper

SEQ ID NO: 31945 - DNA, 750 bp, Homo sapiens; identical to SEQ ID NO: 22920
  chr5:158527374-158528124
  binary

SEQ ID NO: 31946 - DNA, 795 bp, Homo sapiens; identical to SEQ ID NO: 22921
  chr5:169063996-169064791
  binary

SEQ ID NO: 31947 - DNA, 584 bp, Homo sapiens; identical to SEQ ID NO: 29248
  chr5:170740470-170741054
  hyper

SEQ ID NO: 31948 - DNA, 924 bp, Homo sapiens
  chr5:170741917-170742841
  hyper
cgcccccagcgggtgggagcgattgccgagcggcgcaagggcgtttaacgcctaaccccctcctcctgggttgccaagccgctaggtcgccgtttccaacgtggctgcgcgggactgaagtccgacgactcctcgtcctcagtaggagacacacctcccactgcccccagccacgcgagctatgggcagaatcggggcaacggtaatatctggatggggcaggctcccctgaggctgtgcttaagaaaaaaggaatctggagtagcctgaggggccccacgagggggcctcctttgcgatcgtctcccagccttaggccaaggctacggaggcaggcggccgagtgttggcgcccagcccggccgaggactggatggaggacgagaagcagcctgcctctgggcgacagctgcggacgcagcctcgccgcctcgccgcctcagcctcggtcccagcgtctctaaagccgcgcccattttacagatgcagggcagggagacaagaggcatctccgggggccgagtagaatgatggcgcgggttctcccggcgccctgatttcgaggctgcgcccggggccctacatgcaggcggggaggcctgggccgaaggcgtctgcaaggaggggcgagtctgcccggtccgggcagggagtgaggccacagtcagttctccctaggaggccgcgcagcgggtagggtatgggactgggggacgcaacggggacctggccgaatcagagccctcagcagagaacgccgaaaactctggggccggccgctcgcttcccgctagtgggaatggtttccggtcatccgttcccagtccagccccgggtagggagctctgatttgcaatgcacagcacttgcgaggttcgaatgcccccgcaatttgcagatggaaatactaagcctaggccgggc

SEQ ID NO: 31949 - DNA, 936 bp, Homo sapiens; identical to SEQ ID NO: 29249
  chr5:170743178-170744114
  hyper

SEQ ID NO: 31950 - DNA, 940 bp, Homo sapiens
  chr5:172665306-172666246
  binary
cgagcgcattctccgtgaataaattattattaattgaaaagcgatcggcgcagccggagccggcccccctttcgtgcaatcagcagggctggtcgcaaaaggtatatatgattaattgaaagataagctggaactatcaccgggaatgtcattaatgcgctggggagacgtccattggagacaggcggcgttatccgcggctttatcttcaacaacgcctcgctctcggcccgcgcgggggaaacagatgggagtttctgtctgggacgctcgccccatgtttatattttgggaagaatcgcaactcgtgggagtccccggctggccccctgataaatgaacattagcactttttcggactactgtatcaacaaaggggctgcggcgctgcaataattggcgagaaagcaaacagagggccgagagcgcgactctgctcttcgtccggctgatggatgagcagctccggctgcgcgccggactcccggcctcggcctccgcctccgcctccgcctccgcctccgcgctgggcccctccgccgcccggcttccttcctggccgggagttgggggcggggggcgactctgagggccgccgacctcgcccttggctccggaagagtccaggcggcctccgcggcaccggatttttcctgcctcgggactcgcctcattcaggtggctcagctggcaccaaatccttctcatttccacgcttgttcagtgcccacggggtgtgccaggcgctctcacggatctcgtcacggatcctcttattccgactgcaggcctgaggagaatgaggttcagagacgtggagtaagttgctcagggtcacacagatgggaaaggacagtgtcagggtgttaggattcgaacacacagctgactgcacagctgagactgttttcttttattacacgtcgctgcgcccaagacc

SEQ ID NO: 31951 - DNA, 769 bp, Homo sapiens; identical to SEQ ID NO: 11733
  chr5:174151999-174152768
  hyper

SEQ ID NO: 31952 - DNA, 153 bp, Homo sapiens
  chr5:176038454-176038607
  hyper
cgtgggactggcgtctccaggcagcacgccaggcaaggagaaaacctcagcgtgtcggaccggtttcagaaccacggacagcaccacaccagggctgcttcctcacatttccggtcctgaaaattgctcattcactgcccacaaggccatttc

SEQ ID NO: 31953 - DNA, 504 bp, Homo sapiens
  chr5:176107068-176107572
  hyper
cgctctgctccggccttagcgcctccccgcagctcagaggatgggactggggtccagctccctgcccgccccgcaccccgtaccccgcagcctgtccgtccatccgccccgcttcacttcgctgtcccctgtcggggttcgagtcgcagcctccagcctcaacccgcacctcccgccctgcagctcaactctcgcctccgctgcaatttattactggaggccgcagaaccagcggcgtggagtgcgcctcccgggagccgccgctgtcggagaaaggcacccacccgcctgggccggctcccgggcgcggggcggtgtctcagggaggcgtctcagccgagctgcagggcgaggggagcgagccgggtcccgggggaaggcatccggtcagggcctcgcccacccggatggctcctgcgccacggggcctgagctccgcctttgggatccgcgaggattggagactggggacccggcagcagagggtccaggcagaaaagctcc

SEQ ID NO: 31954 - DNA, 409 bp, Homo sapiens
  chr5:178957523-178957932
  hyper
cgccgcctcttccccggacgcccggtctgtctgaggtcgccgggtctgtggacgcggatccgaatcggagcttccgagggtgatctgagatccaaagtcaggagtcttctgcatcctgccctttgtcagcgctggtcctcatttcacctgcccagggccttcaggaggggcgacactctccggctgcgggcggcccagcgctcgcccccctcggccccacgtactcttcctgcctcgcccccatcgccctcctccggcttcccgcgcctcccggggctctgcgcttgcgtccagggcgccctctccggggacaatgggcgggtgcttcgcaggctgcagtcagggccgacttcacccggcgaggacagggcgaggcgctgggcccagaggtatgtttgaaacgattcgc

SEQ ID NO: 31955 - DNA, 121 bp, Homo sapiens; identical to SEQ ID NO: 14070
  chr5:179023553-179023674
  hypo

SEQ ID NO: 31956 - DNA, 149 bp, Homo sapiens
  chr5:179867501-179867650
  hyper
cgcattaaacaacacctcaaggcagcccagatcgggagggagggtccctctgcaggacagaaaccagctcgtgccgcaagccaaccgcgagaagggaagagggggcgctctaggttacaagagaattaagaagcacaacacccagatac

SEQ ID NO: 31957 - DNA, 346 bp, Homo sapiens; identical to SEQ ID NO: 25730
  chr5:1879488-1879834
  hyper

SEQ ID NO: 31958 - DNA, 718 bp, Homo sapiens; identical to SEQ ID NO: 29262
  chr5:1884998-1885716
  hyper

SEQ ID NO: 31959 - DNA, 224 bp, Homo sapiens
  chr5:2225378-2225602
  hypo
cgcaggtgcacagcaagggagccgagtttcctccagcgcttgaaaaaaaagtgtttactttgccagcggaccttgtcgcaggagtggaggaacggcctggaagcgcacttgtgatctcagcaaactgctgaaatctgtactgattgaggaaaagtatccctgttaaaggacgcgtgttcatgtatgaaagaagtggcttgaaatggaagatcgttcttgttccc

SEQ ID NO: 31960 - DNA, 537 bp, Homo sapiens; identical to SEQ ID NO: 30420
  chr5:2261209-2261746
  hypo

SEQ ID NO: 31961 - DNA, 155 bp, Homo sapiens; identical to SEQ ID NO: 14075
  chr5:2524957-2525112
  hypo

SEQ ID NO: 31962 - DNA, 205 bp, Homo sapiens
  chr5:2547115-2547320
  hypo
cggtgttagtgcccaccagcctccccggtcaccctgttagcccagactttaattagctctggcgtcctcttcataatgataaatgcagagatgatgaatcgaaatgcaaatgacggtgaagtgcctcagccatcagcgctgaatatcattaataccttcccactgttaaatcgatcactgtcatccccggatgccggcgtgcggc

SEQ ID NO: 31963 - DNA, 312 bp, Homo sapiens; identical to SEQ ID NO: 30424
  chr5:3221011-3221323
  hypo

SEQ ID NO: 31964 - DNA, 914 bp, Homo sapiens
  chr5:3324702-3325616
  hypo
cggcgcggtggggctgggtcccaggctggctccccgccctccctcctactgtgatcccaggaccctcggccaccgcccttcctgcccaggcccgtcctgggacccgggtggccctcgtcatagaaggctgtgttgcccccagcaagagcaaagccaccgctccacgcctgcccggggaattggtggccgagcttatctgggaccactggtccacgcgatgccccgtgacgggccaggaagggttcaggcttggaaatgtcggacggggacgactctgggccttgctggttggtggagctgggagcagcttcattctcctctgactgtgtggacacagccctcaaggggagagggccgcatccctgttccccgccttcctcgccatgactggacgcagcggggcgccctgtccctgcctggagctcttccagctcagggccccatcagcgccaccaccttggactgccgccatccagggcgcagggcccgctgccccacacctgagggacacagccaggctttctgcttggcctgctgttctctacgtctcacaggcgtcttgctttccaccatgcaacttcacaatctgcccaaatgtccttttattaaaactagtcgacaaagtcccaaagccctagctgttcggcgtgtgtgtgtgtgtgtgtgagcgcgcgcgtgcgtggggttaagtgtttccataattgcatctctcttgaaaatcaaaacagaacaaaccgtgctttatgtacgagtaagagtcatgattcaacaatggggcctgcctgaaggagctgcctatttagtcacataccacagcaacctactggcttgtcattttatgatctggcacggagccgacggcgcacacggtgtcttgggcagccttgggagcccgtgacagtgctgtgaccagc

SEQ ID NO: 31965 - DNA, 748 bp, Homo sapiens
  chr5:3599379-3600127
  hyper
cgccaccttcgcagcccacacggcgccggcttattacccctacggccagttccaatacggggaccccgggcggcccaagaacgccacccgcgagagcaccagcacgctcaaggcctggctcaacgagcaccgcaagaatccctaccccaccaagggcgagaagatcatgctggccatcatcaccaagatgaccctcacgcaggtctccacctggttcgccaacgcgcgccggcgcctcaagaaggagaacaaggtgacatggggagcgcgcagcaaggaccaggaagatggagcgctcttcggcagcgacaccgagggcgacccggagaaggccgaggacgacgaggagatcgacctggaaagcatcgacattgacaagatcgacgagcacgatggcgaccagagcaacgaggatgacgaggacaaggccgaggctccgcacgcgcccgcagccccttctgctcttgcccgggaccaaggctcgccgctggcagcagccgacgttctcaagccccaggactcgcccttgggcctggcaaaggaggccccagagccgggcagcacgcgcctgctgagccccggcgctgcagcgggcggcctgcagggtgcgccgcacggcaagcccaagatctggtcgctggcggagacagccacgagccccgacggtgcgcccaaggcttcgccaccaccacccgcgggccaccccggcgcgcacgggccctccgccggggcgccgctgcaacacccc

SEQ ID NO: 31966 - DNA, 981 bp, Homo sapiens
  chr5:3600144-3601125
  hyper
cggactgtacacctgccacatcggcaagttctccaactggaccaacagcgcattcctcgcacagggctccctgctcaacatgcgctccttcctgggcgttggcgctccccacgccgcgccccatggccctcaccttcctgcacctccaccaccgcagccgccggtcgctattgccccgggggcactcaatggagacaaggcctcggtccgcagcagccccacgctcccaggtacagctccaggccgcgtccacctgtcccctagctgggaatgcagaggcctggctaggtgtggtagcgtggggtgcagcatgagccgggagggtaccaggcagtggccgctgagccctggggctgcgcttaatccctgcttcaatttagaaagccagacaaggccctagggctctcccaagagagctttgccctaccggcgggcctgctacggggtggtggtggggtgaggggtgacgtttttcggcgaatctgcctgggcagccggcagaagttggtgggaaggaggcctgggacctctcccgcccgtctctccgtcctaactctgcctcttccgatctctcgcagagagagacctcgtccccaggccagattcgccggcacagcagttaaagtcgcccttccagccggtacgcgacaagtgagtgctgtttgcttttgctatgggagaaggcggtggggaggggggaggaggagtggtcgggacccgggcggagctggctgggtggcggtgggggtcgcgcagtcctagttgaaggagcgctccccgccagccctgggcgccgggcgagccgaggagactggagtttctccccagccgggagccgcgctggctgtcgaccccgcccccagggctccgctactggaaccggcgtcgcccggcgctgcgtcccccactcacagtgcccctgtcttcttgtctcgctgtgtttcccatgcagctctctggccccgcaggagggaacgccgc

SEQ ID NO: 31967 - DNA, 772 bp, Homo sapiens
  chr5:3602671-3603443
  hyper
cgaagtcagagccgagtcccgaggtcagagcggccgtcctccgctcgcacccccagcctgtgacccgcccttcccggcttgctcgagacccactggcgccagtgctgcgcgtggggactccgtgcatggccgaagcgagggggaaagtcggggcgctggtgtcttttcagaggttccaggaaagagggaggctcgcgttaggactaggaggtgccagtccacggctcctacccgctcccgacgcccgcatccttctacagccctccaccccgttcctggtccctgtagaggggaaggtcctctccctgccccgaggcgggaggaaaagcggcgaagaggaggctcgaagggcgccgcgtagggcaagtgggccgaggacaccgggggcgcgtcggggagcggggagtgggcggggtgggatgaggcagggaggagccgggccggagcggagtggagtggaccgcgggcggacggactcgggccgggccccggggagcagctccgcagtcggaatggacgtgctccaggcgccctctatggtccgaaagcggaatgcggccttgagcagcgcccatctcgctcctggggtgtgggggcaactctgggggcgctgggccttggggctccgtgggcacgagcctgcatttgtagtgatgggaaccaatttgtgttccaaggctgcacccactggttctttttgtgtgttttgggggagtgccgggcctgcaggttaggctactggcatttggagggagtgggcactgggctctac

SEQ ID NO: 31968 - DNA, 208 bp, Homo sapiens; identical to SEQ ID NO: 12843
  chr5:3932149-3932357
  hypo

SEQ ID NO: 31969 - DNA, 1567 bp, Homo sapiens; identical to SEQ ID NO: 25731
  chr5:40680513-40682080
  hyper

SEQ ID NO: 31970 - DNA, 1687 bp, Homo sapiens; identical to SEQ ID NO: 23300
  chr5:42950747-42952434
  hyper

SEQ ID NO: 31971 - DNA, 1260 bp, Homo sapiens; identical to SEQ ID NO: 25734
  chr5:42991800-42993060
  hyper

SEQ ID NO: 31972 - DNA, 229 bp, Homo sapiens; identical to SEQ ID NO: 25735
  chr5:42993305-42993534
  hyper

SEQ ID NO: 31973 - DNA, 1290 bp, Homo sapiens; identical to SEQ ID NO: 24515
  chr5:42994313-42995603
  hyper

SEQ ID NO: 31974 - DNA, 1396 bp, Homo sapiens; identical to SEQ ID NO: 25739
  chr5:43017299-43018695
  hyper

SEQ ID NO: 31975 - DNA, 1298 bp, Homo sapiens; identical to SEQ ID NO: 25740
  chr5:43019005-43020303
  hyper

SEQ ID NO: 31976 - DNA, 368 bp, Homo sapiens; identical to SEQ ID NO: 9813
  chr5:476496-476864
  hypo

SEQ ID NO: 31977 - DNA, 768 bp, Homo sapiens
  chr5:490615-491383
  binary
cggggaccattgtgacgtggccacagagccacggagtgtgcccggctctcaaaggagcggccctgacggccagactgatcacaggctactccatcccacactcgacacagctgggaggaagctgggatctcatgggcgaggggccatctggcaaggtaggtgtgagcctcgaggggccgcgggtccaggagtctctgctacaacccctgaggctttcccttgggtgcggtggctagggcggctgccccatccgaggtgtgtcctgaccacctatggcatcgcccacgtgacgggcctgccatccatgagcctgtctgtgccctcggcagctttccctgggctgcacctggtgggtgatgctggacggcagggactacagggaggggtgagaaggcgccaaggaaccacgtgctgggtgaggcggccccaacccgggagctcctctttctccatgcgtctccttggtctcaggtttcagccccttgattcccatggagaggccgggccgtgctctctcttgaaccagacggaaaatcgccaattcttgtgagtctggttcagctggtggatttgtttgaggctgagttctcagaccggtgagggcggcaggtgccggaggcctgcgctcagccgtggggcccagctggtcaaagctaggctctgcctgaggtccctggacccacctggtcaaagctgtagcatccccggcagcagcggcgggcatcagggctgcaccgcacctggcatgttgagaggcgccagccacgc

SEQ ID NO: 31978 - DNA, 999 bp, Homo sapiens
  chr5:50264532-50265531
  hyper
cgggaaaagatcaaggacaaggagagttaagaaactgaccgtgggccagggaagaccggagagagagaaagtaaagtgtccaggactggaactcacgtccctgaggcaggggacagtaagtttgcttgtaacacagacagttttccttgactgcaggaaacaagaaaaatagtaatcataaaacaagcacaaatcccccaaacatcaggggggtaaaacccccattattagccatcacaaaccaaaacccaaaccgagtcttttctgctgaattgctgcaagatcacaagagaccaagagatccggagtcaggctgtgaacttgggaaagataagttgcccggcgaggttggaggtagactgaggaacgcctttttttgtgaaggacacaaatatttgcagagtttaaagctgcaggaatacaaaagcaggagtgagattatctgattacggatacaggatgtccgagttgttgcctcccaaaaacgactgcgtaaaaaaaaataaataaaaggccagttcgaaaagtgaaattttaatatcagtgaaagcatcggagggactcggattgaacgcggcagctccggaactggacaacagctgcgtggtgcagccaatcccggggcctgtgggaacgagcgaccgatctcaggaccacgcgggcgagagcaaggagcctcccggccacacagccacaggcgctgcggaacccagcccggactctccccggctggagtgtgcgaagggcttcccgcccaggggcccagggtggtcttagtgaaaaagggatggcgctgcagcactgaccacgttgccctggtttctccatttctccttcccaagtctctgcctctgtttccccatgacccggaggacgcgcctacggaagagacgtctggtcgagggggtgccggggagcggaagggggaggggaaggtctcatccctgggacgctgacacccccctccccgcggcactccagctccgaagagcgagcttc

SEQ ID NO: 31979 - DNA, 811 bp, Homo sapiens; identical to SEQ ID NO: 24516
  chr5:54516349-54517160
  hyper

SEQ ID NO: 31980 - DNA, 1069 bp, Homo sapiens; identical to SEQ ID NO: 24517
  chr5:54518558-54519627
  hyper

SEQ ID NO: 31981 - DNA, 833 bp, Homo sapiens
  chr5:59189303-59190136
  hyper
cggaactggggctgccggagcgggtactggtggtgctgctcgtgcctccagagatgcttgggggctttgagcgtggccccgccggcgctgtcgctgccctctccgctgcccgcccgggccggcgcgctgctgccctctgcctccatcctggctcgcggctccgcgacctgctgcccagcccgggttcaccgcgctggcccgagcgccttcctgatgctgctgctgctgctgccgccgccgccgcttctgcagcccagcagaggctggtgcttagcttctcacttgaaggcgccagagcctcagggctaccgagagggggccctgccagcgggaggggtcacagaacgcggcagggctccttccaccgaggctatggcagagacacgctcccgggctccccaagtcaccaagactagggtgcgcggtgcccggtttcgccagaggttggtccttcttcctccctttcttcttcccttcctttgggcgccggcggcgagagcagggattgtcagcaactcgggctgcagaagcagcagcaacggcggcggcggcagtggtagccgcctccagggcaccggaaccctgatcccggagctgctgaaaagttggacagctccaggctggcacgcccgagctgtgactttcaccaaaaccactccagccagtcaggagtcagacctgtcctcttgatccttcccctcgccgtgcccgcgcctccctcctccacactgctccccactgccccggagccttcctcttcacctccgcttgcctcagtgctcttagagaaatggagtttggcgattcctggctggttctcagagcttgttgac

SEQ ID NO: 31982 - DNA, 490 bp, Homo sapiens; identical to SEQ ID NO: 29277
  chr5:67583960-67584450
  hyper

SEQ ID NO: 31983 - DNA, 1003 bp, Homo sapiens
  chr5:72415762-72416765
  hyper
cgcacgtcgtcccgtgacctggtggctccatattcgatggggagctcgcagcgagtcgcttccctctgtaaccccactccaggtctccagagcagtaggagggccacagggctgctgggtgtagtcgccccggacctcgcggtggccaaggccaaggcggccggggcacggtaccctgttcggcctgggccgcaaccacgaaggaggcggtggaggcgggggccggcgcttcctccgcgccccccacgccgccgctctctcgcgcccctatagaactgggcctcaggcctcgagggggagcgggcctcggcgggcggggcgcacagttccgccagccggcgggggcatctcaactcgccggccccgccaggtgtgcgggccaggcagccgtggaaggtgcccatttctcccagattcctcgcgcgcacggccacgagcgcggaggctgccaaacccgccagccctgggttccgaagccgcccctggctctccattccctcgcgggcgcgccccgggcccccagtggcggccagctcccaccggtcgctcctgcactgccctgccctgccctccccgggccgccgcgcccgcgcagcaccgcctccttctctaaatactgccgggtccgccctccgcaccaggacgcgcggtgggtagggtgcagggcggccggcgcagccgaggccgcgtgcggaggcggacgccgcgcccagccagtgcccacagcagcgcggtcagccaggcgccggacccagcttcaggtaagctgccccggcccgcgcgcctgcgccggcggcggcgggtcgggcgctgagctgtgcggccaggctgggcgcggggagccgcggcagcgcggaggcgctgggtatccgagcccaacctgcgtccctgcgagcccctccggctgttgcttgcgctcgggctccctaaaagccgcaaaccgatttcgcacagaaggcatttgcctctcgtttcgttccccaaacgcaccatagctttggac

SEQ ID NO: 31984 - DNA, 394 bp, Homo sapiens
  chr5:72497779-72498173
  hyper
cgtctgcagaagttcgccctttgctggcccctgtccaggctctcctctcgctggcccacgtgatcctttcctgccagtctcccctggctccagcttcctccacgcccagggctctgccctccgccgggccgacttcccgcgaaactgcagcggctccccctacaggacaaaggaggaaacgctagcggggccccagagccctctccaatgggacccaaagggacacatcccggcacagaccctccccactctaaggcagagcctttcgcagggcctatcacagggcggagggagggagggagggcggcaggaggactgctggcctgaaactctgctttcacaaagaggttacacttcgaagttagacctcatctgcaaatgaggttatggacac

SEQ ID NO: 31985 - DNA, 1614 bp, Homo sapiens
  chr5:72529008-72530622
  hyper
cggaaagccctggccccaaaccccaacatcaagccactctcaggattgcggggcagtgggcaagacctgatccagagggtgtgcattaagccgttgccctcgttgcgtttaattctcccgtcactccccagtcactaagggaggcctcctactcgcgcctcagcttcaagggcggatgtggctgggaccaccctgggactcgggtgtctccaaatgtggctcaggccgccccacgccgaacgaggtgggatcagatattcccgcttgtgagtgttggtggggctgaagagatcacacgcggcggggtgtggaacttcgaggggtgtcacggccagggctttgcggccccagacgtcccagcggctcgcagggggcgccaggtccgcgcttccccttgggtcttcgagaggcgtgtgcgcaggacgctgccctctgttgcccaaagcccgcaccaggctcctgggcttccgcgggcttccgcaggcctcaggcgaggggcggggacgccacccgcacgctcccgagcgcagggagggctgtcgccgaagcggtgacccacgcgtggaccccgcccgcgctgggccgggccggtcccctgcccacccgcagccctgctcggccgcgttcccagcagccgggaaagcttcctccctcggtcaccgatccaggccgctggtccagctgtcaaaacagggggtgtctctttcattctggctcacaaagtcccaaaggggaacagggggccttaatgcttgtgtttggacacaagcaattatccctaattattctttttcttttgagcctgcccgtcccgccggcgagcccgccgcggaacaggccccgtaatcctccctggtcggcggatctcagtgggctctgtgcggcccgaggctcgggcgctttcatgtcactgcgggtttagagctgattcaaactcattgcgatgggggaattaaccccggggcccgggctttcaggggcctctgataagagattatacgtgttgatggcaagcttttcttggcaaaatgttttcaaagggcttggagttgttaaatcaaagcgccattgaattgctcgggaccaccccctcccccgcctcttgcccttcccccacctccatctttttcccttcatccctcctcccccatcaccgcccaggactgcccaaggcgagcggcccagcctccgggagtggcgagtcaccttccttggtacgattttcccccggtgcctcgcccgggaaggattgtttttgtaggtgctcctgctgctgggcactttggtaccccttcccttccccgcccctccccgccccttcacacacacttgctctggtaaagaaaacatgtcccagatgaaagacgtttttttcaaacgtacatgtgttttgcagaaaacggaggtgacagggtgggataacgaggagaaaggaagggtggctttcctgcctcccccacccccgaaaggtcatcggagtcagaggggtaaccatcgggttaaaaagtattgtgggcagagttcagatgtccggtgaatcgcacggttctgccctgggggagatctgccttccacccccacccccgcggaatgacagaaagagttgggaggacc

SEQ ID NO: 31986 - DNA, 876 bp, Homo sapiens
  chr5:72594171-72595047
  hyper
cgagagctgggacaaaacgccggagcggcccggcgggggacgcacaggcgagtctcagggccccgccctctcccgtgtccccctgttctgcgcgggcgggctgtgcgggcctggccaggagccgggtcggaactccgtgcagcgatggcagctcgggcgcgcgccttgaggagccggtggggtgctgggggacggagaaggtcccaaggtccggggcgcgcgctttgctgccgctggaagcgcgccccaattgtcgcgccgcgtggttcgctcggttaaagccccgacccgagggttatcgagctgcttccgcccagtggatacgaacccggactgtcctgagtgcatttttttcctcccttatagtctgttaaattgactaataaacccaacgcagcgttctctgtgcagcttcaaaaaactcagtaatttcgttagaaaacgttgaaatccgaccccaaagtattcagcccaaatgtttagttaaagtaaccccgtgggttaataaactaaacaaaggcaacccatgcaaaaccggagcaatgaaaaccaggctacataaacgaagggaagtttataagaactctttgggaggaaaaaaagagaaaaggcaccgggcacggaggtttaatgtgaagcatgtgagcggggctcagtttacaggtacgcgggccgatggcgaagagcgctgtcaagcggcctcgaggatttcggggggtttgcgccgccgaggaaaccctacccggacgaggcgagcagcctggtggccctggcggccgcgagctcccggctgccaccgctaggcgcccccgcccggcccgccggcgctccgagggcaaacccgggcggcacagccgtgcgccctgggctccgcgc

SEQ ID NO: 31987 - DNA, 881 bp, Homo sapiens
  chr5:72595077-72595958
  hyper
cggcgacgcttctccctcccgggaatgacaccttcgctcgctttcacacagccaagccgttggagaggcagaaacagtgggtcccgagcccgcaggagaagttcccatcccgcccctctagccctcgggcgttggcagtggagtaacaaagacgctgccgcgccgttgaccccgaagaagctctgatgaaaaggagggcgggccgcgggataggagtttctacaattagttttttctgcctttacgttcccaagaagaagccgaggaagtagaaaggagagagatctgggaaaggcaagatccagaaatcaggagccattatgtttctcattttggagaaaaactgtaaaacagctcggcctcttgtccaccttgccccgaaggcaagtctggatatgaaaagaaaaaggcgggcaacggaggagatttatttttcattttaactttcctctcccaggcttcctcaccccctgcccccttcgattcctaggaggggcggccccagccctcggagccgattctcggcgctgcgctaggacatcagaggcgatacaggttcgatgttaaatgaaccttcaggccgccggacaatggcgcagacctcacacgggggcaccgcgccttcccccagccgtgctcggctcccgccgcttctttatttcacgtggtggaatcctccgcgtctcctacagccgccgaaccaatgggcagaccggggagagcgggacgcgcaggagagggtttgaaaggaggtgtgggttttaatttttaaagagcataattgggctgaggagggttattttttccttggccacgggaaaaaaaagaggaagaaggggaaaaaaaagtcaggcgaaacacaacacatttatctatcaacc

SEQ ID NO: 31988 - DNA, 877 bp, Homo sapiens
  chr5:72677160-72678037
  hyper
cgctgggccacttgcagaaagcagaaccacctcccgcccccacctcgcctccagccgccggggttcaggcgtttgtgaaagacagaacctttgggctagggacccgggcactggtgcttcgaagtccgaatccgccggccgagaaaacgacaagagaaagaaaatccagcgggcgctctctccagcgccaggccggtgtaggagggcgctggggctcggcctgccacccctacccgacattgggaagcagcccctgcgctcccgcggcgcctcagcctccggtccccgccccgaggtgcgcgttcctcctcccgcatgcccgtctcgggccccacggagcaagaagatagacgatgacgaggcgcgcccatccatccgggccgacgaggtcaggcccgcgccacaggcaaaaattgcgcaagcccggccgcagggatttcgcgggcgcctgggtcccaggtgcgcggccgaaatcctcagggaaaatcccgaggggccaacggtctaggccacagggctgctgggcccgggcctggctcagagcgcattcgggcggggaggccgcacgccgcacccgggcctctcctccgagcccgaggcaggcactgagctccgggccagccaggtgcctcccggctggtgcgagaccccgggcctgctgggaggcgtgggcagggcagggcagggctgaaccccagcgactgaatctcgaaggcaggaggcctcggaggtcatcggcccagctcgcctgaaactgtccctgctcgtgccagggcgcgggcagaggagaaaggacagggcggagcaagcccactgcagaactgcggtcggtggctgcgaagggtccgggtcaccgcgctcccggacgccggaagcc

SEQ ID NO: 31989 - DNA, 886 bp, Homo sapiens
  chr5:72732470-72733356
  binary
cggtctttgaccccccgcgcctcccgcccacagccggagcccggcagctggaagcacccgctaccccggggagcgtctccaggccgcggtctccggccttcgccgagcgaggcgggcgggaaggtagggccgcggtggagcgggcacggcctcccgccccagcccggagcctctccgccccgccgggccccgcggccgccccttcctcacccggaaaatcgtggggaggcgcggcgtagcggccggacccctggcctccgcgtcgggctgcgccacgtggcagctcccagcgccctcccgtcccggcctcgcatgctgtcgggggagcgcctcgtcccactcaggccgaaaccccaggaaggaaatcactctgggctggggacgcggcctttctgctcgcggctgttgggtgatgtgcccgaggtttctctgcccttctccgggcgcaggccgttcattcgcgccgccgctcctgagggtcgctgggcgcagaaccgcctcggccgcggcccggccttaggcgcggcctcgcgcattcctgcgctcgccacagccggcgggaggcggggaagggagcagcccgggtggcttggagaacactgaacctttaattgggctataaatcagacaggggagtgcggtggagtttatgcaggtgtaaaaacagaggggaaagcccgggccgagcagccaaagcgcccgggcaggtcagaacctccagcaaactaacatcttgataagtccgctgacaacaaaataaacagtggagaaggctggagggcggggggcgccgtggcccgcggctggttcgcagcagctcggcggccttctgcgaggggaaggcgggccgctctcggctttgtgcttggggctttaggaggggggc

SEQ ID NO: 31990 - DNA, 998 bp, Homo sapiens
  chr5:75698192-75699190
  binary
cgtgagccgccgcgcccggctctaaataatttcttatcgccctccctcagtttgtttttcctgttatcgggtcacccacacattccacaattgtcaaataggtgagggcacaggtacggaagcgtcccgcattccctccagattttatcacgctgagacacaaagagaaaaatagctcctggcgaccgcatgaaaaccccgatttcaaaacagccacatgcagtttaatttccttaaaagcttagccggaaaaggtttctgtggcttgcgaccccagctgggcttgagagaaggctctgcacactggggcgggggcgggcacaaggtgatcggagggagggggatgactcgcagttgtgttttgagtggttgccttgggttatcttgttcctccagcacacacacactcagtttcttgtcataaggggaaccctgttattttgtagacaaaaagtgacagaagcaactttcgaagcaaaaaaaaaaaaaaaacaaaaaaaaacaaaaccaaaaagacgaagaagaagaacaaaagtcaacgtgaaatctccccagaggaaaaggaaccgcgctgtttgtccctcagtaactgagcaacaccccggacacgaagggctccctgtgacttctgcggtttttcttgcacttctccgcgttggttcacttccaccctcgaaactctccagaagcgagaaataaggcggggtggccgccacccccaggccaccagctgtgcgggggccccagctgcagggggtcccggcccagcgtccctctcggccccttccctctcccccgggggagaaggggcgggtccacgcggcctgggcgctgcgcccgacacgcggtaggggtcgctgcgtctcggcgcgcgctcccaccgcggtgaataacggggcctggctggaggagaaaggaaacctgctgcgggaggcggcggcgaccggccagggagcgagggaggagagttcacttttacttcagtgtcagcgcgcggc

SEQ ID NO: 31991 - DNA, 999 bp, Homo sapiens
  chr5:75699193-75700192
  binary
cgtggctggctctggcgagagagcaccgagggagtgggtcgcagatcttcgggcggctaggggaaatcggcgagaggcgggatccgagcgcgccggcggggcgcagagcccgcgagcctggccagcgagggtagccgcggggggcgcgccccgggcgggcccccggagacgcgcaggatgccacacgaagagctgccgtcgctgcagagaccccgctatggctgtaagtgcgccgggcgcgcggggttcctgctggccttggggagctccctccccgaggacggcgttggagaagccgagggagccggttgcgcggcgcagaggaaattggaaggcagcaactgcgcggctggcaaagttgggagctggagttgcaaagggcagtgaatcgcgtccccccgctcctcccgccccccaattcctaatatccagctggcaacccagaccctccactccgcatacccaaacggggtgcgcgggcagtgcggggattgcgctctgggacagaccaggttgggattttaggggtatcaggtgaggagtccgcggagctccgggtcgccgccggcttgggccagggggtggcgtaaggcaccggattcttccaacccagaaggggaggaaagtttgtttgctgtggctacaggtgggcaccgcaagtagggcgccggcgcactctgctagtgcaaagccggcttgactggaagggcgggagtctcctcctgtcccgcgccctcgaacttcacctgacccgctagagccattggcctcacaggtgtaagtccctcccctctgaaaccccccaacccctttcccccccgctcccctcgcgcgggaggattgctgtgtggagaggacgcggcactaggctccggggaatccggcgggagcccgcgtgacttgaacgagatggtgtcgattacccagccaggggctgccctcggaaataggttgctttggccgatcgtgagtggatggagccagattaacaccaaccac

SEQ ID NO: 31992 - DNA, 807 bp, Homo sapiens; identical to SEQ ID NO: 29283
  chr5:76923694-76924501
  hyper

SEQ ID NO: 31993 - DNA, 835 bp, Homo sapiens
  chr5:76934460-76935295
  hyper
cgatatagatatatatagatcacctaaatgaaagaaaattcggtttgtggttaaaaagggggcttcttgcattataatgtcctttagagagacggggaggtgcttaacagttgaatgaacccgtgagcagctcggcgaggggaccaatcaggagggcagcctgcaaatgtcagcgcccggagagtcccccactccgcccgcccgctcgcctgcgcccgcctgaaggaggcggcggcggcagccctggcagctccagcccggagcaggagctaaagcagcctcagccgcctcggcctcgccctgagcttctgggcccggctccctctagttcttccctgcgattttctccaggctcccctttccttccccttggccggcgctgcgcgcttcgaaggcgtagctctgtgcctctgagctaacatcttcctagggcaggggcagagcaggggtcagagcgggccatgaccctggcgtgacctgagggtcgcccccacctgcgctctctgggcctgccgctcatattggcccgccagcccagggcgcgacgagggcacaccgcggccttcagacaacgcctggacttcgccgcggctcagtaggcctgcgcctagggtccaggcgccctggctgtgccctggggtctatacgagccccaaccccacagtgggcctagagcgcaaagaggagtcggcttccctggcaccgccagcgcccgctgtctgctttggggaccctcgcggagtgtgggttcgagcgctctgcactcttctcaccgggcttcttcccggctcctgctcttccgcttggcccacgcccgcatcctcgcccctaactc

SEQ ID NO: 31994 - DNA, 983 bp, Homo sapiens
  chr5:76936031-76937014
  hyper
cgagaggaattgtgtgtgtgtgtgtgtgtgtgtgtgtgtgtgtgtgtgtcctcagctgtatgtgtgacagggaccgagcaaggagacaaaggaggcggcaaagcgaactctcgggcagttttgtttcctccttccctcctgcagcccgttcgcctcctctcctgcacacacacgtgcgcgcgcacacatatgcacacacgtgtgaatgcagggtattggccacaccagtttcttctgagctgcggagaccgcttcccgggaagctccgggccggactgggtttcagcggctgctgcagctgctaccaacgcggcctatgtgggactgggcgccggggtcgtggactcaggctcgcggcgtgtctgggagccgctagggtttttggcaagcggccgcagcccttctgagaaacgctttgcctgggaggagaattccgagacctaaagcaaacaaagtctccccaataaaagctttctttgcccccaaacaaaacctcaaatctagaagctagagcgctgggagcgcacagcaaaaggaggccagacagcagcccagggaggggcggcgtgagctcaggacggtgactcgggagtacgcaccggcccgcgcacgtccagggactcgcaggaggtttctgcccacctgggtggggcttgcagggtgtccacaccggaacgcagggtcagaagtggggggaaagtggctaaggaagagacagggagacctggctccagaaccctgctcccagaaataggcaggtccgccaggccgcacagcctggctccacacgctgtctggagggagggagaaggggccgcgacctggggagacaaggataagggcgcggggccgcgcgtctccacgtgcgtgcacacaagcgctagtgtccccatcccacagtcgcccccggaacggcgccggctgtgcagcgatctcccacacgcactcgctcgtatattctgttttgttgtatctttcaggtc

SEQ ID NO: 31995 - DNA, 570 bp, Homo sapiens
  chr5:76939332-76939902
  hyper
cgcagggactccgggaggctctcagccagctgttcgattgatgtcgctgagggggccctctggccgcaacaattctgcctacaggacccaggatccccagcctcggagccaaatgccaagcaacgttcaggatccacacttggggctttctttctgttttttaaacgccggtagcaggctgcgtgtgcatgacacgtgtacttgtgtgtgcttgtgcgagcagtgcgtgttccttgcctgttcactcacacggagggggcatgccaggcgctgcggaggggcagaaacctgccccaaagagtctcatttcctatcccacccagaagcctttcgcaatacacgagctcgacatatacacttttttcttttctgcagtaaacagtttcccacacattcgagtttgcaaacttcaaccagacagtccacccgcctgacttttcgtgggtgcaagggccggtcccttgctcgttttttctcccatctttcccttctaactactggcgctcacggccctccacacagaaagctcgacacaaaacaatgacggattagtatccgccccctgactgc

SEQ ID NO: 31996 - DNA, 316 bp, Homo sapiens; identical to SEQ ID NO: 25747
  chr5:77140518-77140834
  hyper

SEQ ID NO: 31997 - DNA, 1172 bp, Homo sapiens; identical to SEQ ID NO: 27111
  chr5:77147514-77148686
  hyper

SEQ ID NO: 31998 - DNA, 1132 bp, Homo sapiens; identical to SEQ ID NO: 25748
  chr5:77268330-77269462
  binary

SEQ ID NO: 31999 - DNA, 78 bp, Homo sapiens; identical to SEQ ID NO: 14107
  chr5:79097441-79097519
  hypo

SEQ ID NO: 32000 - DNA, 418 bp, Homo sapiens; identical to SEQ ID NO: 14108
  chr5:79551984-79552402
  hyper

SEQ ID NO: 32001 - DNA, 561 bp, Homo sapiens
  chr5:87955365-87955926
  hyper
cgaaagtagttgaggaagcctatgacaggaagttgttaataatatccttcgaaatttacctgtgaaatacagagcttgactacttttgtaaaagtggaattgaaagtaaacggcctctgtaatgcaaatcgaccagcagcaagaaagccactacctttggagtcccacgacttcacctgagcttgcaatagaccttgtgcgccctttggttcatggaatcaaaactgttttgacatgttggccagtgcccttcggtgtcactgaagctcagcccgcggacggcggtgtgtcagtgtgcaccgggaggcctgggcctcagtccctgggctcgtgcctacgcaacagcaggaccgcccgcggcctcccaggaccagtgaccgtcacccgcagtaaggatcggggcggctccgccagtttcggccctctttccaagacctctttccaaggcgctctttcctagcctcacccgagggccgcagagccggacctgtgccgggcgagttggatttagcccagttagagttaagatggtatcattagctgcgcacagcgtgacttccc

SEQ ID NO: 32002 - DNA, 1072 bp, Homo sapiens
  chr5:87962630-87963702
  hyper
cggctgtagtctttcattctcacacgctccccggcgatcttgaaggagtttttactttcggttatctagctttatgaagaccaatacactcatacagctagataaccaaagataacaactcgcttcccacacaggcctctgtcttcctcttgccagactccaggtcctgatcctttctggcagtaccgaagagtggtcgtccaggatacttgccgcgcttaagattcctccttttatgtaaatatgacctggtttctgtttgtgtgtgtgcgcggctaaaacatccaaacgagatctgttgccttcagagtttattccgaacttttctttttcctttcagcaagtaatctccggcagcgttagccaacaattcatctattaatatcagaaaataaaaccagctattaaggtgcagcaagctgttacgagtgagcagcagcatccgtcccttcacaggcctctatttgcattgtaaattgcttctttctcacgcaagactctttagcctctctctatagagatgtataaagccaacggcaatttccagcgcaggttaaggaggaaggaaaaaaaaatcccattctatagaagtgacagctgattcaaggatctgttcctgatcctttttggttaggcaccatggctttttaccaagcggtggcagcttgattgcacatatcttgtgtgtatgtgttttagggggaagatcctcgatttcacagggcttctaggctgggaaggagaagatgccgtcttgctggcctgctgctgcccccggtctgaaagaaggagaaaagggccatcattggaggggctttcactgccaaattgtggaccagcccggcaaggtcaaaggttcgagaccgcgggagaccaaggtaatgatgatgtcatgagaaatctcaagtacatggttattgatatgcatcagtgatcagccaactgccccacgcctgctgcccgagcagcggcagcgacagcagcagtagcggcagcattgcaacaatccctattttctcaatcaacatctcttccgctagcactaccgactgctcctggaaaagcaacccgc

SEQ ID NO: 32003 - DNA, 870 bp, Homo sapiens; identical to SEQ ID NO: 30454
  chr5:87969885-87970755
  hyper

SEQ ID NO: 32004 - DNA, 460 bp, Homo sapiens; identical to SEQ ID NO: 29295
  chr5:92906252-92906712
  hyper

SEQ ID NO: 32005 - DNA, 158 bp, Homo sapiens; identical to SEQ ID NO: 14114
  chr5:9497496-9497654
  hypo

SEQ ID NO: 32006 - DNA, 916 bp, Homo sapiens; identical to SEQ ID NO: 27123
  chr6:100038655-100039571
  hyper

SEQ ID NO: 32007 - DNA, 978 bp, Homo sapiens
  chr6:100050769-100051747
  hyper
cgaattgagtgcgggctcattcggcagcggccggcagagaagcgctgaatgtggaggtgccccgagacattgcaattcagcaacacgctcgctgacttttctttgcaccatgtcaaccgaaagaaccaagaaataagttggagaactccggttaaaaggcaacttgagagggattctgaatacttttattgagccgtttccaacggaggacttaaaaaacaacaaaaaaggcaccacaaaacccaccagcggcgtccgggctgcgtcctggctgccactttggagcctcccggccgccgcgcatccaccggccatgcaattaaggggaaaatggcctcatcgccggcgtgtcatctggtggcgttcccagagcccatcgccgccgccctattcagacccggccttaatgtcccacccgcgcctcgggggccgcgcagctggtccaagctgacccgcccgcccggccagcgcggacaccctcggggggtgcagcccaggccacctcaggccaaaattcggctactgaaagcggggcttgcaggactctctctgctttccctaacctccttcgcctcgggtctctgaccccgcgcggctctctgcatccccgggttcaggactcctccggccccagttttgggattccgcgttgacctaggagggaggggtgtttggtgagtcaccagcaccagggtctccaaggctgagcccgcctccccaacccccgggacaactccctcggtccccgtggggacctgaaactcaaggcctttgagcgacggtgacgagcagccccggagaagtgtggtctgaaagaagccgctcatctcagcctcaaagtcttaaggggctcctttcctctaggcggagccgagtcaggtcacacgtgctcggcgccggccgcattcccagctcttcgctcattcgcgactatgcgccaggcggggccgccccctaacgctgccgggttcgaaagcc

SEQ ID NO: 32008 - DNA, 324 bp, Homo sapiens; identical to SEQ ID NO: 29296
  chr6:100729507-100729831
  hyper

SEQ ID NO: 32009 - DNA, 834 bp, Homo sapiens
  chr6:100903633-100904467
  hyper
cgcgcggttcccgaagggtgcgaagactgcgctgagcattttgaaggcctcccaaagcggctggaagacaccccgaagcggcctcccaaccagaatgatctgaaaatcccccaggctgggctcgggataaatactagttctgaactcccggcgccagcctaggccatttgttgtttcgggtttcggcctcattagtatgcgcctacgagggaaaatgagacttccccacaggttaataaacaacctgtccggcacaggttaacaggagcctctctcgccctctcctgccccacccccgccaccttttaaggaagcttttgccttcccggaggtttgccttctctttctgttccccgtagaaatcttacgattgtgtctgggttaatgttttataagggactggctactctcgtctacctgccgggctttcccgatctaatatcgaaggaacctccccaagtcctagtaaggggtcccccctccctaaagtctcgaagtggggtagagaccttctccctggagcccctcgcctcctgccttcggtgacgcgctctagcacacccaatttcagttggcgagggggtaagctgagatttcgtttctgcacttgacctaccgcagaaaattcgcaaatcctttgattgtctgtttaaaatgaggaggaaaccagctccctttgcggcgggattacagtgggaacaagatctaaagattctcttgcaattcggcgaggccgagggaacggggttttgcaaaagagaaaaggagctctgtgagggaggcgataactaaatcgggttttagacaaaaggattttcctcagctaaagtggcc

SEQ ID NO: 32010 - DNA, 1241 bp, Homo sapiens
  chr6:100912071-100913312
  hyper
cgcaagggatcttccgccgcggatccccgagtccgcgcccaggccgggcgcacgtcccaggaaagcaggtttccgcaaatcagaattcctccaaggcgaggcaggggcctttcagctccctaccttggcagatctggaccttggctacctctttaacttgggtctcaagtctgagggattcctcaaaaagtgacacttacacaccaagtctctcgggactcccaaggcgacccagcgctctggctgcccagcaggggctgcaacaagcggggcccagcagcgccaggttaacaggtggcgcgctcgcgacagcccctcgcaggctcccccgggggtgggaggcgccgcggcctctcccacaccaccgcggagctgcggggctgctgggcgggcgcggggcgtcttctgcttcacctaccttcagtccccacaagcggcagaggtttcgggggcgcccatctcttaactgttctcatgcctaccgtccaacccagcgacaccgccggcctctccgcttcccaccggcagagaggagcagagcattcccggctcccttttctggatcatgaattggaggaggggtgcgtggcagaaagaggaggatgcaagctttgggacgagtgaggtgattttagaatcctggtcctccgtagttgctacgaagccagttcactattattcctaattggaagccgaaaactgccccccgtaacttctttatagcttaagggtttagcttcaacttcactccggggccgcctctctcccgccctccctcaatgccactcacaagccccctcgcctcccattggcctggcgcggccaggggcgaggcgctcattggccaatagggctgagtgacacgagtcggccccgagccgccctccgcgcgcccaggctccgggctctgaatcttactacccgcgggaccgctggactcctaatgagctcagggtgccgggtcggcgctgtccggttgccgccgctgctcgcggcctcctgggccttcccgacgtcgtgcgcgacccgcgctcctcgagctccctggggtcgggtggttgagcgctcagtccagcgcggcggcccagcagaaccgggaacgtccggaggcagcggaggtcgggcctgcgggttaggtctaccggcggaggaggcagggttcgcccaaaggcccatcccgctggcagtcgctggccgacggcgtgcgcgaggccggtttggggagttattttctctttctc

SEQ ID NO: 32011 - DNA, 929 bp, Homo sapiens
  chr6:100914838-100915767
  hyper
cgcttaaggctgacgtcctggggggctgggcgggctgttccaatgtcccagtgaagctcagttgtcaatgagccaagtagatgtcgtttaataaacaaagtgaatgcacgaccacgaggtgacggcctctcgctaagtcctcagcacacaactgtctgagccgcgtttaccgagagagtgaattagcatgacgacgtaacacctgtttttctaatctttgaacctaggttggagccggaacgctgctccttcactccccctcccgggcccagggacctggctttgcaccctccccacgaccccgcctgccagccccccacgcgccctgtagccggaggcgtgaaccgtgaaccggaacctcaggtgcctcccacgtgttctgcgaatttacgttcgcctctagcacgggaaattttaaatgaatttcttgaagctcagagactaatcgttttgccaatataaggagaaaagccccagaaaggaagagacggtcacgggcgacccactaaccccaaatagagatccttatagagtctaggccgccacctccttgagccggtggccttaaaacctagcctctggccctcaggcacccagaatgcgatcctgatgtgggagaaaacccatgcggggctgcaaaaaagtgtctccctccttcccccaccaagcagggcgaacagcctagtgtgatggcgacactgttcccccaagagtccctgccacttctggggcaacccaggatgctgccctcatggagcctgccccggaccccggaggccaggacatgcaggcgtccgtgactctaccccaggggagccaggccgggtagattctggaaccaacgcgcctttgtgagcaatgtctagcatgccgcgcgcacccagaaagaagggggagcgggcacctcaagggccttctgacccctcccc

SEQ ID NO: 32012 - DNA, 831 bp, Homo sapiens; identical to SEQ ID NO: 29297
  chr6:10381522-10382353
  hyper

SEQ ID NO: 32013 - DNA, 575 bp, Homo sapiens
  chr6:10383584-10384159
  hyper
cgcccgacggagcgtcccctcgcacctccccagagttgcctaactcctaggccctgaaagtgccagaacaaaggccgactcccccggcgcctccctcggggactgagcaccctgggccctgctgacgaagcaaaccccagactcagctcagctacccacgctcccagccacgtcgcgggtggatattcccgcctgggctgggcaccgcggaatcagcaccgcctgctgcgcaggccccgcccagaggctgcaccacccaggccctgcccgccgccctctgcagcctaggcggggtgtgtggcgtcgcggtcagccttaccgagggacacgccgccccgggccgggacggggtggggctgtgggggatcctgggccgaggaaagcgatccattttctctaaccgtttgctccagagctgtcaggttagcgtggcctcctcggccgcccagagaagaatgtgttaaaattctttgcacgggagcctttcccagcccaaatataccacactgtggcgttcctcgtgccgaccgtgggtctctaacctagccaccttctcccgttgaaatatgcacatc

SEQ ID NO: 32014 - DNA, 792 bp, Homo sapiens
  chr6:10389924-10390716
  hyper
cgatttctgtggtttcaaagaaaaaaaaaaaaaagatgaaacatgtcttctctttgagggtgacctttgacctttctttccaatacacctgacacaaagggcttagaaaagacccgtttcgggtgcggggtgctgatgctgcttttttgttgttcgtttgcgctcgcgctcgctctcgctctctctctgcatccccctcaccccctttctcggagactgaactaagtgaaaagttgtttcaataatcgcagctctctgctccgccagggccgagggaggcgggcggaacacggagggtgttttgttaaatgctcccgtcgttcgcaggggctgggacttgataaaaggagacagttttctgaaaagatttgattgaaatggcgtgtgccagggctgatgggagccagcgagggacaaagcgccgagaatccatggacactcgagcaattatgcctccacgctgaaggtggattagcgcgctggaaagaagcatatgtttggcccggggcgacacttccccccggctgagcttagagaatgggagcgcggagagcggctggacccggaatatcaactatctgcgaagcccccccttctagcccaactccgccagcctccccgcccccgccggggaaaagtcggagtgcatttttacaaagatgagaggagaagagagggctaggggaggagcgggcagggaggggagtaggtgcctagaggtgcaaatggccctgggatcccccaggagcggccctccaggctctcctctctggcgatcccgagggcgcgtcc

SEQ ID NO: 32015 - DNA, 148 bp, Homo sapiens; identical to SEQ ID NO: 14118
  chr6:10392129-10392277
  hyper

SEQ ID NO: 32016 - DNA, 1418 bp, Homo sapiens
  chr6:10409954-10411372
  hyper
cgcaactactttgtgtggttcctcaaaacgtccctcactctccgcctccgaataaaatgtttttataaggaaatactagggagaacccgggcccaccgactgtatgttccaggtatcctttctggggtaggtaagtagggggctgtgttccctcccgcgctggttgcgcggcctcttaccgggacctcctcgatggcgtgaggtaaggagtggatcgagaggtctccgagtcctgagctgagcgcgtgtgggccgtgcaggaggtcctcgtgccgcctgtagtccctgcgaggatccaggcccgacagctggtgaggcagcccccggtgcgtgtgcaggagcccagactcctggctctgcctctggccgggccagcctgggtgctgcggctgcggctgggcgtgcagggggttcaggctgtaggggtcgttgacgtgggagtaaggatcttgcgactgggggtagataggctggtagggtggggggaagtatgggggctggaagtcggcattgggggtgtgggacagcggcggggcgctcgtgtagggagattgacctacagtgcccagctggggcaaccgtgccgtcccgttgctggtgccgtcgtgacggtcctagaagagagcgagaggaaaggtaaagaacaaggaatcaggcgtcgagctacaactatccacacaaaatccacttgacaagtctgcgtgggaaatcgcccgttcccgttggctggccgccgggaaaaaatcagctctaagttcttttcaggaaataccctcaagtgaaacagaccgaacaacgcagagaaactgtatatggagggggcacaagagactatttaggggtttctttcaaagagaggaaaagatagaaaagggtctcctggaacacagcccattaaactgcagcgtgaaatctctcttaagcaaaattaaaattcctcctaaatactaaacagcagaagcggccttttcttttcccccgatttgaacctgtctgccactgcgttattgtttattctcttccatttatttggagagaaaaaaatcataaacgttcaaagactgttaccgtttcatgactacttaaatagaaacatatttcgcagaggggctgtaacaaaaacacacgtttaaattaccagcttaaagaaggttttaactgcaggatcggggtctgtctttttcgcttcctctgttaggagcctttttctcgacagagtcgatttatggtttggatagggaaagggggacgtcaagtcaaggtttaaaatagaaagattcagccttattgggtttaaaagagagaggtgcaccccggggctgtggccccccccccccgccccttccaccccagccccaaagggcagaagaaacgcctgactttaggtttctctattgcaattcccttgcaaaacaagc

SEQ ID NO: 32017 - DNA, 1347 bp, Homo sapiens
  chr6:10415184-10416531
  hyper
cgtacttgatattatccgtcaatttccaaagcattttcatggatcggcgtgaacggatatgcccctctcggtctcgcacccaagtggagctactctctgggtgagcgcaaagtgctggctgccggcggtgagcgcaggaggaggaggaggagggagaggaggtggaggaggagaaggaggagggagaggaggagggcaaggaggaggaggaggaagaggagggcgaggaggaggaggagggcgaggagaagggcgaggaggaggagagaagggaaagagctcccgtgtgcgctcggagatctccctctaatggtagaaacttttcccttttccagctctttaccaacagcctaatcgcctcattagcatatcaacaatagtccaattgctcgccagtaccacaatctgccgccggccgctccgacacaggtataaaggcctctctacgccgcgaacttgcttctagagcgcactccagcctgcgaactgataaaaccttcctcgagctccgccgcgaggccctgccccaacaccccctctcttaccccaattccgccacattccccttcctttctttctccgcttccttttctccagagatgccttctgcaaagcccggcactgctcaaggtccaagcgccacgcctggggcccagcttctagcacttctcccttaaccctgctaccacgatccgagctgcccttttggccccgtgcaattttattagaaatcattatccctttcgcaattaaacataaccaccaaaccaagaccggcgaagtcactccaggattttttcccaacaagggatcgcctccgctcgaggcagccaccccctcgggccgcagcgccttgggagttttattggctttgagctttcccccaggttggagattctgccaagcggctccggtggctctgctggggtttgcaatcccttaattgcagcgtgtaaaataaaagttgtaccctgaagaggttacttgacagctccaggggttaaacaatttttctcctgtttgtgtgaagctagggccaactgacagttcaaattggtgttcaggctaaggtttcctgggtgcaacgtggacacgaatacagaactcctatggaactgcacacccgcttctgaagttgagcctaaaaacagacgtgtgtgtgcctgcaagtctagataccgtctcgtgcgtgcatcaaaataaatcaccgggaaccgacttttagctgtgttaatctgctctagttttcccaagattcccctttttaattaaagcagggagagttccttcatgatttggtgatgctactaacgcgggcgtgctcgcgaggcagagcccggctgccgc

SEQ ID NO: 32018 - DNA, 896 bp, Homo sapiens; identical to SEQ ID NO: 24524
  chr6:10417173-10418069
  hyper

SEQ ID NO: 32019 - DNA, 948 bp, Homo sapiens; identical to SEQ ID NO: 29298
  chr6:10418940-10419888
  hyper

SEQ ID NO: 32020 - DNA, 411 bp, Homo sapiens; identical to SEQ ID NO: 29299
  chr6:10420695-10421106
  hyper

SEQ ID NO: 32021 - DNA, 1260 bp, Homo sapiens
  chr6:10425397-10426657
  hyper
cgatctgtagcagagttttgggattgactttctaaactgcagccactcctcatctttggccttgtgaaaaacttgagaccccggctttatcagtcccccttttgaaaaacagggcgtgtctcagccctaggtatgcaaagctaaacgtctcaaaccgctctgcattcgaattagccaacttaagaacaagtccaacagcactgctaagcaagagcctaataactcagcgtttcgcgacatctcttggcggcgttgaccgtttgcccgggacactggtttagaagcacggcatagggtgtctctacatcttagaaatcaagacagcctctaggttagaataaagtttactctggactgggcataactccactccacctctgcgattcttcttctcgtttcccgtcttctgtcttttctttcctcccttcccaactcctagcgcgctactttaacgtctcagtctcgttcgctaagcccatgcgcctgggacttgttctttgaatctcaagtccgaaaagccaggaatcctcgatcatggacttcctcctgctaaattagagggagtgaaatttcgctctcctctccatcctacttccccatcccaaactcgctagattaagttcgctgaccaggcgcgcacccaatggcagcaccctctccaacattttccccaccagagaggcaagtgtcctacatttgtacgtaaaggtccctgagtggctaggtggagaggctcggatgtcttttcctggagcgggcctcggggagctgcagcagccccagcctcaggcaccacagccaagcgagcgcgccttgggctcgctgctctgcacgcagctggaggtctgggccgctgaccctctggccacgtagtcaacccgaggatgtgtgccccggggctcggccttgcctcgggtgagaaggctagtcaccattcagggtgcaggtgtcatggcctggaaatggcaatatctgagcaaacaggtgggcgtcgcttcccggcggtgcggtggccgctggctcgcagcgcgctccagctttcggcgccgccgccgcccctttgctctgcggactcagccagttcccgggtggcccagctgggtggctccgaggcctgcccccttgggctgcggcgggaggcggggactgcagtgccgagtgtagggcgccccagccgggctggcggttcacgctgcgctcgggcctctgccgggagggcgccctggcgccaaacccgggcgggcaggggggtggagagcc

SEQ ID NO: 32022 - DNA, 884 bp, Homo sapiens
  chr6:105405567-105406451
  hyper
cgatttctctttcctcctcgtgcccgccggagagaatagtttcgctgaaaatttctctttgtcaatgggatcagtattaaatcagcaatatacaagtaaagtatcgcatgctgtaatgtaaaatgtggctgaaaaatggagttaaatgaataagtacacgtatgtatagaaacgtggaagttggtgtgatcgatagaacagtgtggcttccccctcccccgctttccttttaacccttttcattttaagtattttctgtggagaaaagaaatcaaaccattaaaaaaaattttttttttctgttacccttcccccccaaccccaggcaggcaattttttttttttaatctttgaatgcacattgaatgggaatacagactgacttttttgtcctgttccttctcaggcggggctagcaaaggtggtggagaagagcccgggaagctgccggagccggcagaggaggaatcccaggttttgcgcggaactggccactgtaagtggttcaatgtgcgcatgggatttggattcatctccatgataaaccgagagggaagccccttggatattccagtcgatgtatttgtacaccaagtaagccaaacttttttgtccccctcttcatctttttccatgtggaggagctgatcggtagttatgccaatagacgtacgataagatgtccttcggtatattgaaagacaaaatcttccctgaaatcactaggtagtccaacgtttagggtacgtgtatgggccttttcctgggttttctgtctaaagagaaaagaaaatatttgaaatttcactatatatattaaggttgacgttattagcatttccccctgcttcattctacagcgaaatagtgttcttgttgtttcc

SEQ ID NO: 32023 - DNA, 1353 bp, Homo sapiens
  chr6:106441828-106443181
  hyper
cggatacagctaatttgggggaatgtaagctggatgtcttttcctaatttatgaaacgtgaacgggggtaaggtatttatttgtacgctagttgaagtggggcaggagcactgattcctggacagtcactcaaaagctgcgcccaaagttttaaaaagcgcggggacggtggagagggaggcgaagagcccgcgctgctgggctgggctcgggtgccgcgctggggacgccgcatctactgagcggtcgccgaagacgccgggaggcgaggggcgaggtaagacgccgcctaaagaggcccgggctctcccccggggtcgttgttggaaaagcaaattccacggtgaactctaccaagctcagcgcgtacacagctagcggctctggattggactgcattcgcctaaattgcgtaattaaaaaaaaaaaatacaccactgccaccctacagcgacgcttccgctggaagacgagcggggacgcgtgacagcgcggggatagcttttctattacgtttcttgttctccgagctcgagcccccttttaaaaagtcgctcaccaaaaacggggtgggggatggaggtggggacgagaagtttccgaatgctgagttcatttggacgaggtgaggagaactagggtcctaacagcaggtccagaggactctcgagataggtttagagcccgtccttttgtctggagtgtcgcgggactccagaagtgggttgtgcaagacaaacttccagataaatctttgcccggatcctcctgcggtcaaagcatcagtcctgcccgtaacttcctaacgacatcttcttggagcagattccgcggcggggatggctgggtgtgcaaaccgaaaacagtttgtcagccctccagtcccgccgcgtcgggaatgcgagcccggccacgcggtccgaccgggtccggggacggcgcgcttgtcgcgggagcctcccggcttgcggagggcttgagttttttggcggagacagaggaaagcctctggtcgagaggattagagcgcgcgttttctccgccgagcacgctgcccgacgccgtcgcagccgcgcacttcccggttttgaaagccagagagatgagtcaagcgcaaaagctccggagtgacaatgcgagcttttggccagcctcatcctcctccccattcccttgccttcttttaggtcttcggttcgtgacaagtgcataggttaggcttgcacggaagagggtcggggcaggtgccagctcagggcacctacccggcgttgtcacgttccctttgggatcaatgatctttcataactaggctgggcatgttcgtgcagccctctgggcactctgggggac

SEQ ID NO: 32024 - DNA, 1650 bp, Homo sapiens; identical to SEQ ID NO: 24529
  chr6:108439510-108441160
  hyper

SEQ ID NO: 32025 - DNA, 915 bp, Homo sapiens; identical to SEQ ID NO: 24530
  chr6:108478767-108479682
  hyper

SEQ ID NO: 32026 - DNA, 354 bp, Homo sapiens
  chr6:108484828-108485182
  hyper
cgccttaaatccgaggtcccccgtggcctgcagcagctttgcctgagtagaaggcagcccgcactaaggctccaggcttatttgggacctggtgggcgacggggcctcagcccctcccgcctaccctggagcttgttgccgccgttaccactgaaccagtcatgccagaaagtcatcacgatgatttcagaactgtattgtgatttatgcaaagcgcgccgataattacagccgggcgcacagaacacaggatgcatatgctgcgggtgtgtgcgcgcagtgttgtgcctttcgccagggctgaatggggtgtgtgtgtattccgtaggcatcttcttgacaccatgcttgatc

SEQ ID NO: 32027 - DNA, 1495 bp, Homo sapiens
  chr6:108489635-108491130
  hyper
cggggagctctgcccgcctgcggctgcgcccccgctgtggactaggaggcaggccaaccctccggactttgggggaaaaaccacagcgggctccttgcggaaactttggccgttctaacttgccaagagcctgagtgaggccttggaagcctccagccccggctcaggtcgggacgcggctgctgagctttctcaggcccgcaggacagcggcccccgccggtggcgccgctgcatttaggccctttccagaccggtggcggcagccaacccgagacttgcgtccctcgggcccggggcagctaggaggtcggcgcgcagcgggccgggtcaggactgggtcgagcagacagagctgcagcccccgccttgcccggcttctcgcggctggagagcagagcgatgtcacccggagccccgcctgggtggtaacgagaccctggccagtcacccctgcagcccagactaacttctttcaacagcctctgatggtaattacagtaatcgaagctgccatatatctttaggcaattatgacacacaaaaagccccgaggggaccccctggcgagggaagttaagaacggttttccagcttcaggaaactccggctcgcctcacgtcggagctcgctcggcttgctaaatgagaggagctttgcaacggggtcaaccagcttgtctcgtgaccccaagtcaccttaacgtggctgggtggcggagtctgaggcacaggcccgctatgccccggaattttcgcgtccctccctcctgggccccgccccagcccggttgcctgtttctaatctgccccgggagccgcggctcagaggtctgctcagaggcaggactcgcactggtggtggcctagagggcaacagtccggaagctcgggcgggggaatccgaggaggggcccccaccctgcactggtcttccctccaccctcatcgggttctccagagatgttgtcatgggcctcctgtccggatgggaagtggggaaaaagagaccccaccactgctcctcccactcactcatcttggcatcttcaacagtgccacagggaagaggacagctggggtgacagtactgctgggccccaaacgtggaccctggagcggtcagagggcgcgtgttaagcagaggatggttgtaagatatggaaaccaagtttaccgcttccagagtgagtgcagtgcagcggagctccagacccggttcctgagcgaccaggaactcccttgggcgcagtgacaggcccgaaggagtggaggacaagacccgctgtgcccttgcctggccctctccagcccctccctcccacagcacaatctcccctcccgccctgtgggaggggggcgccgagccggtggccgccgcgccgcgcgcctcccctgcccgcctttgtcgccgtccgaattcccatgctactctttttgacgggtcactggtggctctataggcaggtgctgccgcggggttgtaattacccggcc

SEQ ID NO: 32028 - DNA, 895 bp, Homo sapiens
  chr6:108495654-108496549
  hyper
cgctgtcttcggtcctgaagtctcgtccctgttccaccactccgcgactggcggaagttcccctagcgagagccccgcaggcctgcggggtctgccaaacccggctctctaagcttcacctgcttggagaaggacgtttcccccttgtccgctttcttggggtccgggactggccctcttgaagtagcctgggacgtcccagccccttctcgatctggccctgctcatgcccaaggccctcgcgttttgcaggcccaggctcggggctccagggcctgcggccgggcaaggtcgcgcctccacaccgtttccccgcccgggtgccggctccgggtctccagcctaaaggccctggggaccgctgacctcctgctctctgttccagggaggctgtccggtggacaagacgcacagaaaccagtgcagggcgtgtcggctgaagaagtgtttggaagtcaacatgaacaaagacggtaatcagtgcatccctttattccaatgttgattgagtagtaagtaaattatatgtacagaaaatacatggcactcctatgcatgtaaatcaaccccggagcgcttctttccagatgctgggaattggcctcgggctttcagtcgtatccttcccgtctttcagcaggagccgctggcgacccctagaattccccagggcaagacccatgcccacatcaggaacttgcgccccacagtcatctccacacaggcagcgcttggggggaccccactctccaggggaccggcgcgcattttctgcctccggtcctaatccctctttgcagcccttcgtggccacccttaagcctgctagcctgccccaggatcttaaaatctggatagtctcacggggaggagatcatacaggctggaagttcgc

SEQ ID NO: 32029 - DNA, 144 bp, Homo sapiens; identical to SEQ ID NO: 14129
  chr6:13386531-13386675
  hypo

SEQ ID NO: 32030 - DNA, 1150 bp, Homo sapiens
  chr6:134210203-134211353
  hyper
cgcccctctattccccagataaattcctagtgtccaccaaattcctcagcgctcgctcaccctcctctacggccacgactctgggagtggggaaacagagagccggttcctctgctgcagaagtcctcggggttccttctcacaactctgcgaaggggaaagggttgtgagacccaaccagaccccaactccagctcccagcaggaggtggctgcgccacactcgggaggcctcttggtttcagggtctctctgtctctctctcaccctcttcctcgctttctctgtctctctgtctctctctctctctctccctcgtccactcccccaaacatgtccaccggctccctcagcgatgtggaggaccttcaagaggtggagatgttggaatgtgacgggttgaaaatggattcgaacaaggaatttgtgacttccaacgagagcaccgaggagagctccaactgcgagaatgggtctccccagaagggccgcggcggcctgggcaagaggaggaaggcgcccaccaagaagagccccctgagcggggtcagccaggaggggaagcaggtccagcgcaacgccgccaacgcgcgagagcgggcccgcatgcgagtgctgagcaaggccttctccagactcaagaccaccctgccctgggtgccccccgacaccaagctctccaagctggacacgctcaggctggcgtccagctacatcgcccacttgaggcagatcctggctaacgacaaatacgagaacgggtacattcacccggtcaacctggtgagtgctcccggggctgcagctgcagtccaggcgcgcccgcactcccgcctgcggtgggcgcgagtgcgcgcggggctgggagtgggggtgtgggcgcggcggtgacttacacatctcgaccaccgcgggcctagagcctccagggaccggaggcgggcggtctagacacggccctcgctctctgccctaccagcccccggagcgggagtgatttatgcgagggtttgacgtggcagcccaattaaaagtttgcaagtgtgttgagctggcacagaggagggatcccccgctcccgctccatcgccatcctccctggggtgcagtggctgctgcggaactgagaacactgacaagacgctgcgagc

SEQ ID NO: 32031 - DNA, 471 bp, Homo sapiens; identical to SEQ ID NO: 27134
  chr6:134213931-134214402
  hyper

SEQ ID NO: 32032 - DNA, 147 bp, Homo sapiens
  chr6:136556316-136556463
  hypo
cgcacctggcctgattcctagatcttaagcaaccgggtgatcgtgttgccatttgctaatatgcaaaagacgtgggaaagaacaggttttcaaggtggcggaaaagaacaggtaggaaggaaaagtcctgttttggacctgtgaaac

SEQ ID NO: 32033 - DNA, 2281 bp, Homo sapiens
  chr6:137809033-137811314
  hyper
cggacagaactccaaaacttacgaggacagctatccaacactgcctcacagacccttaggcgctgccccctctttgcccctgtcctcctgcggtgcgagaaacccgaccactctgcttctacccgaaccccaggacgcaacagtaaaatcaaggcccgtcgttgaactcccaggtctgcgcatccctccctcctggctccctggggtcttggccccagcaggtccagtacccatccccagagggacccactaccctgggcgtcccagggtgccaggcacgatggcctgcaatgggggctgcaatttaaccgaggcgagttaaattccttttgccggtgcctggctgcgaggacaaacgtccgtactttcgttcgggagccacgggcagtccaggggcttgggttagaagcaacggctctcttccaggggctgtgatccgggtcggccagggagagcgaggccccggggtcctctgtgaggtccccagcgaagagacgcagctggggaaggcgccgcccccgggccccctgcgccaccctaaccgggcctctccttagcaaagttgacaaattcttgagagtgtcagcccagggctgcgcgtgagggcgctgggaccggggaggaaagagcacctgccgcgctcagcccgactttgaatttgtttgttgttaccgtttttgtttttcctcccagtttccataaacgcttagtatttcgaggcactttgcaggtgttggcgcaggtgatgatgggcctcgttggactctgcctcccacgcatccttttgttttctgcgcgccagcctgtctgactgtgtcctgcggggaccccgagacagtccggggtcagggcgtagagactcatgcttgccacttgacccatccgcaacccggggaccccctagcccgtcgcggagctggagtttgggcttccggctcccagctctccgccctggatacaggaagagggcgggagaggtcgcgcacccgcgccgctcggcggggatcgctcacaggggctccggggccaccgcgagcgcggactgcggctgctggcgggctccttcgtcgtccaacgcaccccatcctctcccgccccgcagtgtcccagggaaggcttcactgaaaacagacgctcgacggaaaactgactctgcaggcccgagctttcggagtttgatttctgtgggccccttaaacgggcactgggtacaggagaggccccaactctctgcagggacggggagggaagggcactcactctcccgcaagttttcctagaggcgagctgaagatgcaggccacctccctcccgcacggcccctcccttggcctagttctgtccaaagacacttcccagccctcgagcggcggctcctccactcgattcctgcctacacgtgaagagcttggacccagcggggctgcactcgggaggacaggcccagatcctgcacggccgggaggacacctggccccgctgtcttctcttcacagctcccctttctcggcttcggcctggagcggtgcagggaggggtggacctggggtggccttaagatatctagcctgggtgcggagacttgggagcccacccttagcagtcactcctcctccccagtggagggtgagaaaaggggaacagagggccccggagtctctggaagggacgtggaacgcgaagttaaatgttggtgtctgagcgatgtgctggtggggcagagggggttccagcgtcctcccagagtgaggaggcttttgcaatttctgctgaatgcgtcagtggaggcacaaaaccttgcttgacctagcagctgggaaaaaaagaagttcgaggggacacaaggccccctgctgctggagcgaggaaaccctgggcttggccagctcgggccgcttctccctgcccgtttgcgggctgtcggcctcagcggtcccagaaacaaagatctagtgagcccagccgacgccggcctcattttccctttctaagggtcactttcttccgccctctaaattaggtcatcgcctgggaaagcgccgagaggtttctagtgtgggcttctcaaggtgtctccgcccaggaggatttcgccatccatttaaacgtaaggcggggtttaatctggaatgaaaggatcgtcgtggtgtttccagattgaatgaaaaactaaacttgcaaaatttcgagaaagtgacaagtttacaacgaaaaaaaatcccggccgaaacccattttcacctttgcggtcatgaaatcttttttctggcgtcgataattc

SEQ ID NO: 32034 - DNA, 1003 bp, Homo sapiens; identical to SEQ ID NO: 25768
  chr6:143247656-143248659
  hyper

SEQ ID NO: 32035 - DNA, 42 bp, Homo sapiens; identical to SEQ ID NO: 14133
  chr6:150962790-150962832
  hyper

SEQ ID NO: 32036 - DNA, 776 bp, Homo sapiens
  chr6:152622733-152623509
  binary
cgaaattataaacaaatacagggtagacctctgacatgttaagtaattcagctgtctcgagcacatagtttcattttaactgtcattgtttacagtgtcaaagattggcccggcccaacggtagtcaaagagacttaaggaatctgttcctccctctgaatctgcaagatcgaaggctggtccctgaaatcagccacggagagggaacatggagccactcgccaggctccagtcaaagagcaaagccgcggggacccactggatccttaccatgaccacagaggggtgggccgaaggcgtggggaggagctccccatccaggtcctctgtcccttccgccagcccctcgacctcggtcaccgtcagcagcatggtggcgtgcttggctttcatcgtcagcatcttgcacttggaattcaaagaagcgatctgctcctggtagcccttaattttctgcgccagctcctgaggaaacatttcccccaccggggtgtcagagcagcatcaaaaggaaacagaagtagtagcgttcatcttcctgcagggcgagccaatgagcgcgcagagccgcgcgggcccgggaggcaggatgtgtaggcggcgagtcctcctgcatctcgctaccgagccagaccgcaggctgcgcggcgcggcgcaggcacagccaaagtgcccgagcccgcgtccccgcgtcggtacaaaaggagaaatgaggggatgaggccgaatgagtggtttctaatcgcgagaggccccatatggaatcatgaacttcc

SEQ ID NO: 32037 - DNA, 233 bp, Homo sapiens
  chr6:157478300-157478533
  hypo
cggagatggctcaccgtgactcgcgcaccactgtctatgccacctgtcttcacttccagcttcatggctctgttaacatcccgcccccatagatacacacttacaccagatgtcctgggatcgtcacagcgagaaccagcattaaagcgcacccatcactaggcgtcattagcagcccagcccagcaacccccacggttctgagttacgaaaggcagggatctttggaattac

SEQ ID NO: 32038 - DNA, 844 bp, Homo sapiens; identical to SEQ ID NO: 25773
  chr6:157557124-157557968
  hyper

SEQ ID NO: 32039 - DNA, 693 bp, Homo sapiens; identical to SEQ ID NO: 14136
  chr6:158024060-158024753
  hypo

SEQ ID NO: 32040 - DNA, 617 bp, Homo sapiens; identical to SEQ ID NO: 24541
  chr6:158093637-158094254
  hypo

SEQ ID NO: 32041 - DNA, 125 bp, Homo sapiens
  chr6:158430551-158430676
  hyper
cgaggaagggggctgaggaggtagaagggagggctttcctcaaaaggccagaaattcgtggccagccaaaggggaagcaaagacattctcgtgtaggaaaacttacaggaaatgcaactaaaagc

SEQ ID NO: 32042 - DNA, 156 bp, Homo sapiens
  chr6:15843761-15843917
  hypo
cgtccattgggcagaaaggacgttagagtttttctggtgacataggccacagagtcaagtgacttccctaaagccacacagctagttatgggcaaagccgggaagaccactcaggtattcttgttttcacgacaagtcaatatctacagataacgc

SEQ ID NO: 32043 - DNA, 175 bp, Homo sapiens; identical to SEQ ID NO: 14139
  chr6:159076962-159077137
  hypo

SEQ ID NO: 32044 - DNA, 432 bp, Homo sapiens
  chr6:164322329-164322761
  hypo
cgctacggaggagaagattttggaaagaagtagaagtcctcacgggcaactccctgccatccacaccaacctccccttcttgttctctccttctcatcttaaactttcgagaggaagaagggttggtcaagggtgaacgttcctgggcatggtgagaggctgctctgtggtgcccactcacactgagagggaccagctggggacgcctgatggtgccactgaggctttggggtcccctttcagaggggggcatcttaacgcgagtcttacggtctttcctgggttcccatgctcggcggcggctcctccacaggcctgtcttccctttgttctggagaatgttctgcctgggcggagcattcggtgcggttacgtgggtgcggttctccagggagagcgcgggggtctcttcagggtaatgccaacctcacc

SEQ ID NO: 32045 - DNA, 728 bp, Homo sapiens
  chr6:166267509-166268237
  hyper
cgtgatgcggggcgtggtggtgagcaggctgcgctggacccagacagacgcgcggggtcctagggaagagcccaggcagggggaagcccgtgggcggtgagaccctcccgtgccacgggcgcagcgcagcgctggctggggccgacggggcgcaccggcggacggtgatgaacccggagacccggcagccaggctgggctgcagcagcctttgcctggacgtcagggtggagcccgggaatcgcccctgcgccgggtgacggaggagaaaggggcccgcaggaggcaggagggagcgcctggcacagggacccagggactcgagcaggtggtccctggggaacggggagtgaggccggaaggagagaaagccaagaccaggtgcgttttggaaattgctgctgtgagccgcaagacgttcgcaggctctgctgcgagcccccaggacgtcccccggtgtccacctccgggcggctctcgcggccagacaaggagccctgaggggcggcctcaaggagcgcccaggccgctgagctcccagggcggcacagagggagcccgggggtccccagctctggcctcgccgtcttgtcttgctggaggtgaggggagcgggtggcgaaggtgcaggagcgggcttggctccagccatctctgaggagcgtaggccaagccgagcccgcagaagccccagaggcctggcctgagcccgggagggacgcggggtcc

SEQ ID NO: 32046 - DNA, 855 bp, Homo sapiens; identical to SEQ ID NO: 27146
  chr6:166579711-166580566
  hyper

SEQ ID NO: 32047 - DNA, 319 bp, Homo sapiens
  chr6:1726588-1726907
  hypo
cgcatttgcccagccagccagccaaatgtggccacgcactgggtggccagagagtccttaccacttcagttggccggtagtacttgagatccacagtcacgtgaactttgccggtctctttacatctgcccacttcattttcattctttccttcccacctgtaaggaagataaacactgaatcagctcctaattgcttgggaacatttggccatgctgtagcaccttgggatgccccagccctctccccgcaggagcgcttaagctcattaaccacagcagcacaggctgatgctccagctgattattaaagcaacggc

SEQ ID NO: 32048 - DNA, 180 bp, Homo sapiens
  chr6:18035840-18036020
  hypo
cgctgtccctgtcctcaccactctccgtggagaacactggtacgttctgtcgtctcttaagagcttttgtagttgactctgaatcctaaggccttagtgaatgtcgagtacataccaggtactcgataaatctcaagtaatatgtgaatgaacaaataaacgtttacttatttcatgagc

SEQ ID NO: 32049 - DNA, 155 bp, Homo sapiens; identical to SEQ ID NO: 14143
  chr6:2108917-2109072
  hypo

SEQ ID NO: 32050 - DNA, 162 bp, Homo sapiens; identical to SEQ ID NO: 14144
  chr6:21202340-21202502
  hypo

SEQ ID NO: 32051 - DNA, 194 bp, Homo sapiens; identical to SEQ ID NO: 25781
  chr6:24494664-24494858
  hyper

SEQ ID NO: 32052 - DNA, 783 bp, Homo sapiens
  chr6:25726863-25727646
  hypo
cgtctacccaatcagaaagtcgtactagaatcgcctcatttgcattcacgccacttcccattgtccaatcagattttggataccgaacgcggcgtttgagggccgtgcctataaataccgcatctttcatcctccagttctgtttgtttacttggcgagacttggagctgaggtcatttggagctgtttaatactgaagagctgttgagcactggaaagtgctgtgtaaccctggaaaagaaccgtgtaacgctgcagaagtgtgtggtagctatgccggaggtgtcatctaaaggtgctaccatttccaagaagggctttaagaaagctgtcgttaagacccagaaaaaggaaggcaaaaagcgcaagaggacccgtaaggagagttattctatttacatctacaaagtgctaaagcaggtccatccggacactggcatctcttcgaaagctatgagcattatgaattccttcgtcactgatatctttgagcgtatagcgagcgaggcatcacgtttggctcactacagcaagcgctccaccatttcttccagagagattcagacagcagtgcgcttgctactgccgggagagctggctaaacatgctgtgtctgagggcaccaaggctgtcactaagtacaccagctccaagtaagcctgctaagtaaacgtcatttctaacccaaaggctcttttcagagccacttaaacatactgaaacagctgtgggcttcgtttttgtgtagtttctaaccgtaagggttttttttttttttgaggc

SEQ ID NO: 32053 - DNA, 1042 bp, Homo sapiens
  chr6:26198838-26199880
  binary
cgtaaggaaccgcgccccgccaatttgcttatgtatttttatggcatctttaaaatggacggttagtttcacgattcagtgttaagaacacccacttataaatggaaaaattattaaagaaaactgcaaaatagctatttacacagaaaatgtgagcccttttaaggaatacatgggtggctctgaaaagagcctttgttaagactgcttccttaaaaagccaatataagagttctcgttttacttgcccttggccttgtggtgactctcagtcttcttggggagcagtacagcctggatgttgggcagaacaccgccctgagcaattgtgactttacccagcaacttgtttagctcctcgtcgttgcggatggccagctgcaggtgtcgggggatgatgcgggtcttcttgttgtcgcgggcggcgttgcccgccagctccaggatctcggcggtcaggtactccaacaccgccgccagatacactggcgcgccggccccgactcgctcggagtagttgcccttgcggagcaagcggtgtacgcggcccacagggaactggagtccggcccgcgaagagcgggtcttagccttagctcgggcctttccgccttgcttgccgcgtccggacattttgaattcttaaaaacgatgttaagcaatgaagacaaaaatgtaaaagtgaattttgttagcaagtgagaaactattatacttggaggtcgaattgtaaataacgctatttgattggctagaacaaccaaccaattgcaaagaaacgctagaatcacctaatttgcataccacagggcacacagagacaattcatccaatcaatgtgtaagcttttaaatgccagtttacgataggagctctacaaatattaccagctgcagagtgaggacacttgcatttctctttaggttgtggacgaagtgtttatttatcatgcctgaacctgctaagtccgctcctgctccaaaaaagggctccaaaaaggcggtgaccaaggcgcagaagaaggatggtaagaagcgcaagc

SEQ ID NO: 32054 - DNA, 1449 bp, Homo sapiens
  chr6:26204318-26205767
  hyper
cgtgtttttctcttcgggaggaaaatccttttggtcagatttcccttggcttggtggtggagagggtgagatcttgcagttttcaaacacttcctaagggggttccgtccccaagagagcaagcagcagaaatgccagaggaaccgtgcctatggggacaaagctgaactcctcatggaaggagattactgcagttccggtcttgtgagccaaagctcctgttcaatcgtcctagagcatcccaagcagcaaatgattttaaacatgttaatgtatttaatctcatttagttgttaaaatatgcctaaatttcctctttgggaacgcaagacttgcagagatgactccatggagagcggactctgccggcgggaactggagtcgttggtgacgtcatcccagtctgatctgtgaagggtagggccagcaggcagcaccaaagttcccgtatgcgcgttttcagtcttcatttaggtccgaattcccggcatataagaatactaccgtcgcttgtttttcagatttttgcggctattttcgttggtgtgttggtcatgtctggtcgcggcaaaggcggaaagggactgggtaaaggaggcgctaagcgtcaccgtaaggtcctgcgagataacatccagggcattaccaagcctgccatccggcgccttgctcgtcgcgggggtgtcaagcgcatttctggtctcatctacgaggagactcgcggggttctgaaggtgtttctggaaaacgtgattcgtgatgctgtgacttacacggagcacgccaaacgcaagacagtgacagcgatggatgtggtctacgcgctgaagagacagggacgcactctttacggcttcggcggctaatgctaccgcttaaacgactcagcatctcgacttcccaaatcaaaggcccttttcagggccgcccacagttttccgcaaaagagctcatgacttgttagacgattggttggtctctttataagttaattgttcctgtcaacaggtacgtatatttttcagccgttttttttttttcgttccaaattacatttggggtttcggcatacgattttttaggctacgatccttttatgtttattgtagtagggccttagattgcactgaaaaggctagggtaatagtgtctgtttaccttaccacttttattttgagtacctaaaaatgcatggttttcgacataagtgggaaaaccgcaagacactgcgtaaccgctcaaaatggcggagagcgaagaacaaagccggtgcctggcaatgggccggacccgcgaattagcgcaaccaatcatcttcctggaaaggagtgtgggccttaaattctagcggcctgttttctattacttaacctaacgaccgagtttaggtgtgtagaagttcctggggtagataagctcacgcaaggagaggttgcaagcattcatttc

SEQ ID NO: 32055 - DNA, 293 bp, Homo sapiens
  chr6:26216380-26216673
  hyper
cggaaaaattattccctagaaaacggtgaaattcaatattaaagctctttatgtgagacttgagtggctctgaaaagagcctttgagttttaaagcacctaagcacacatttacttggagcttgtatacttggtgacagccttggtaccttcggacactgcgtgcttggccagctctccgggaagcagcagacgcacggcggtctggatctccctggaggtaatggtcgagcgcttgttgtagtgggccagacgggaagcctcgcctgcgatgcgttcgaagatgtcgttaac

SEQ ID NO: 32056 - DNA, 1085 bp, Homo sapiens; identical to SEQ ID NO: 23319
  chr6:26216805-26217890
  hyper

SEQ ID NO: 32057 - DNA, 1299 bp, Homo sapiens
  chr6:26234163-26235462
  hyper
cgcgctttaacagaaatcggccggccaatcacacaccaccgcgggaatttgaagaaaaagtaggacctggtggctcaagtagccttagctatccggtgactgtggctgagactgagacggaaggatccttgcgcccaggctgctgggagctgttaataactgacccccaaccagcacgactaggatagaccgtggccgcacaacaccgcagcacccgcacccctctccaccccactcccccctccaaaaagcttcagctcttttgactgagacctgtgggtggctctgaaaagagccgtttaaaattttcaaaggggaacgtcccgccagtttcactttttcttcggagctgccttctttgcctttgtaaccttcggcttccccgacttaggcttggccgccttgggcttaggggctttggccttagctggactcttggcagctttttttggctgaggtgttttcacctttttcgcactcttggccactttcttggtcccagcagcggttgctggcttctttaccttcttaggagtctttttgatgcttttcttcggggtagcggcgccagccaccttcttgggcttcttggctgccccagcaggcttcctaggcttggctgcgccagcctttttggccttgggtttgccttccccggaagccgctttcttgttgagtttgaaggagccagaagcaccggtacctttggtctgcaccagagtacctttgctcaccaagctcttgaggccaagcttgatacggctgttgtttttttctacatcgtagccagcagccgcaagcgctttcttaagcgcggccagagaaacgccgctgcgctccttagaagctgccactgccttggtgataagctcagatactgggggtccggatgctttgcgtttcccagcagttgcgcctgccttcttcgcctttttcttcacaggtgttttttctgcgggtgcaggaatggtaggagcaagtggagcagtctccgacatgtttttgtcttcccagaaaagacaataagtaatctcaaactgtcagaacagcatgtcctctacgagggaggctgagggtttatatagagagacgctgagtgatgattggttccttgctccatgcgcggcgctgctggaaaaggactcctcgtatctaccgcgctgctgtgtttgttgccccttaaaaaagagtaaaaatataagaaatctgggcatgaaataattagagacttgggggaaactgatccgagagagttcgggcttcattcctgcctttgtttctatgcatagttttaaaacc

SEQ ID NO: 32058 - DNA, 747 bp, Homo sapiens
  chr6:26240648-26241395
  binary
cgatcatgtctggtagaggcaaaggtggtaaaggtttaggaaagggaggcgccaagcgccatcgcaaagtgctgcgtgacaacatacagggcatcacgaagcccgccatccgtcgcttggcccgacgcggcggcgtgaaacgcatttcgggcctcatttatgaggagacccgcggtgttcttaaggtgttcctggagaatgtgatacgggacgccgtaacctacacggagcacgccaagcgtaagacagtcactgcaatggatgttgtctacgcgctcaagcgccagggacgcactctgtacggctttggtggctgagcctcaccccggctttttatttaacagctcacccataaaaggcccttttcagggccacctccttcgtcacacgaagggctgtaactgatgacgacttgggtttcgttttgtaaatttgggattctaactgagttaaaccgagccgtttttagcgatcttcctaagatggcggatgtgctaaggagaaagggaaggcgaaacattagaaacttgttcaggtatttcgatcgcaaacattcacaggaaaagatggtggaaatggtttgggaataccagcagccttttatgacgtatgtgatgtgttttattcccacgtttctgaaatttactcctatgttaggtggctgggacttaactacactagcattacatgtttagtttttgagatggagttgctcttgtccaggctgtagtgcaatgacgcaatctc

SEQ ID NO: 32059 - DNA, 987 bp, Homo sapiens; identical to SEQ ID NO: 30481
  chr6:26250181-26251168
  hyper

SEQ ID NO: 32060 - DNA, 428 bp, Homo sapiens; identical to SEQ ID NO: 30482
  chr6:26251515-26251943
  hyper

SEQ ID NO: 32061 - DNA, 95 bp, Homo sapiens; identical to SEQ ID NO: 30483
  chr6:26252081-26252176
  hyper

SEQ ID NO: 32062 - DNA, 1263 bp, Homo sapiens; identical to SEQ ID NO: 24548
  chr6:26271217-26272480
  hyper

SEQ ID NO: 32063 - DNA, 322 bp, Homo sapiens; identical to SEQ ID NO: 23321
  chr6:26322359-26322681
  hyper

SEQ ID NO: 32064 - DNA, 147 bp, Homo sapiens; identical to SEQ ID NO: 23322
  chr6:26327821-26327968
  hyper

SEQ ID NO: 32065 - DNA, 134 bp, Homo sapiens; identical to SEQ ID NO: 23323
  chr6:26328309-26328443
  hyper

SEQ ID NO: 32066 - DNA, 893 bp, Homo sapiens; identical to SEQ ID NO: 23324
  chr6:26331633-26332526
  hyper

SEQ ID NO: 32067 - DNA, 494 bp, Homo sapiens
  chr6:26501725-26502219
  hyper
cgcggggcactgcgctttggcgggaatctggtcggtgtctgtccgtagttcccatctccacatcccgtctgatcccgctcgtttttcggcagctccctttgacgtgattggacccccggagcccatcctggccgttgtgggtgaggacgccgagctgccctgtcgcctgtctccgaacgcgagcgccgagcacttggagctacgctggttccgaaagaaggtttcgccggccgtgctggtgcatagggacgggcgcgagcaggaagccgagcagatgcccgagtaccgcgggcgggcgacgctggtccaggacggcatcgccaaggggcgcgtggccttgaggatccgtggcgtcagagtctctgacgacggggagtacacgtgctttttcagggaggatggaagctacgaagaagccctggtgcatctgaaggtggctggtgagtagacgggttttgactttctccgacgactcccctgctgtatacactttc

SEQ ID NO: 32068 - DNA, 730 bp, Homo sapiens; identical to SEQ ID NO: 23325
  chr6:26577146-26577876
  hyper

SEQ ID NO: 32069 - DNA, 314 bp, Homo sapiens
  chr6:27094883-27095197
  hyper
cgaaatcataaaacgaaacaaagttttggctacattagcctatccgttattgccataagatggcgacagcccttctcaactcataaaactaaacaaagttttagctacattatcccatccattatcgccacaagatggcgatagcgcttctcaactcgcctgcgggacggaggcagggtgcggcccggagaactcctccctgttccaacagcagctctccagcccgcagcgcttcctgacgttccgttagttcagtctcctgaacttctctgcatgtagattcctctcagggtagccctttgttgaccaaaaac

SEQ ID NO: 32070 - DNA, 1003 bp, Homo sapiens; identical to SEQ ID NO: 30490
  chr6:27100290-27101293
  hyper

SEQ ID NO: 32071 - DNA, 258 bp, Homo sapiens
  chr6:27228187-27228445
  hyper
cgggcgagcgtctccaagagtgaaaaggaatccgcaccccgcgcgagggagccgggtcctgtgaactctgcggtggcttcgtggttgcttccctgatccattcgctgcagtctcagagttggagcagcttggcgtttactcccgggcctttcccggatgggagaaggaacctgcgcgggaacttgaattttttcgagtcagaatcagcaagttgttgttgtttgagaccaagtgagccaccgcacccagccaagaatc

SEQ ID NO: 32072 - DNA, 216 bp, Homo sapiens; identical to SEQ ID NO: 29318
  chr6:27242893-27243109
  hyper

SEQ ID NO: 32073 - DNA, 629 bp, Homo sapiens; identical to SEQ ID NO: 23328
  chr6:27463044-27463673
  hyper

SEQ ID NO: 32074 - DNA, 850 bp, Homo sapiens; identical to SEQ ID NO: 23330
  chr6:27512842-27513692
  hyper

SEQ ID NO: 32075 - DNA, 365 bp, Homo sapiens; identical to SEQ ID NO: 23332
  chr6:27560506-27560871
  hyper

SEQ ID NO: 32076 - DNA, 615 bp, Homo sapiens; identical to SEQ ID NO: 24554
  chr6:27774739-27775354
  hyper

SEQ ID NO: 32077 - DNA, 513 bp, Homo sapiens; identical to SEQ ID NO: 24558
  chr6:27858278-27858791
  hyper

SEQ ID NO: 32078 - DNA, 1121 bp, Homo sapiens; identical to SEQ ID NO: 25787
  chr6:28175204-28176325
  hyper

SEQ ID NO: 32079 - DNA, 1190 bp, Homo sapiens
  chr6:28303261-28304451
  hyper
cggcaggcgctctactttcctttattaggactataagcccagcttctgtgaatcatcacctcagcccctgattggtccggggccaaactttcacttcggcttctgataggtcctgggccaagctaagcagcagctatgaatcatcatttcagctcctgattggtcccggaccaagctgagtcaagcgttcgccaggacagcccgcagactaagcgcattccctctcctttccagtccataaaaaccccagaacgggccccataatgggtactcccggtcgggaccccttctctgctggcagagagctttttcctttcgcttattaaactttcgctctaacctcacctttgtgtctgcgctcctttatcgtcttggaggcaggacaaagaactccgggcgttatctcagacaaagaaaggctgtttaatcttcaggataaggggcgggacctccacctactccacgggggcttcaggccagtgaatgtgtaggggcgggggtcacgcctgcgcagacgttccctccccgcctactccaaggcacagacctgaaatcttctgggaacctggcgggtcgcgacaaggggccaagactcaccttcggggcaccggcaagctacggaacaggtggcggggctgcagcaccccaatgaccgatcaaccgcaaaggccggaaatgcgtcagccgttctgagcccactggctgaagccaggcaactctttcctttctaggaattccagaggtggctgctgcttggtgactcccttattgcaaaccccggggccaaaaatcccagtcccactgggtgcgaggcggagaaatccggcgaggcatttctatggggagcggcccccagcatttaggagttagatggtcatcgagacccaaaacattagagccggaaggtgttaggaagatataaacgtagagagcgagtaacaggaggcaattccacggccaaacaggtttatttacaggaaaagcctgcgaagagttccagttaggaatctggctgagatcctgatcgcttacaagctgaggcttttataataaagtttctgttggggaggggttggggaagtgctggctagttggaactgtttggacactttccaactggggacagatgtggttagggccgttaggctctgttgcggttagagctgttatgctctgttgaagctatggac

SEQ ID NO: 32080 - DNA, 274 bp, Homo sapiens
  chr6:3307207-3307481
  hypo
cgtcagcgtctgcagcgcggtatggatacagcaatggaggggcacaaggattcctcctctagggtaagtaggatgcttgccaacttggaggattttagagcagatgtttgctgatgggccatgaacatgctgagcagacggcatacggcagcgctacgacatgcacaggtggcacttggttactgacaagctgagggtaggcacaaaacctgcactctcagtggcatgtccaggcaggtgtcctcactggctccgggtctcagttcatctcgac

SEQ ID NO: 32081 - DNA, 772 bp, Homo sapiens
  chr6:35454062-35454834
  hypo
cgagcccggcttgtttatgaggaggagcgcggaggaggatccagacacacaggcttgcgcgcccagactcgcccggccagcggctggcggcctccgacgtcaccaaaccggttgggtgagagggcagagagcagggggaagggccgcagtcccgcccgcgccccccggcacgcaccgtacatcttgccctcgtctgacaggatgatcttccgccggccgcagggcgggtagatggccagggcctcctggaagctctgctcgatgtccgggctccacacgccctccgcatcgttgtccagccccttgtccaggccctcgggcccatcctcccgggcctccccggggctgctgctggcgttccagctgttggacgctattgtgctggttgctctgggctctgggcctgagcccactgggcggctgagcctgggggacagacagacaggaactgggaccagggtcctcctcgaccacagcaatctcctatcccacagccgctggctctggagctccgcccccagccccaagcccaccctaggagcaggtgctccaggtggaacggaggtaaccagaggaacaaccacagcttgttcagagctgtgtgacctgggatgcacgcgctacttcacctctctaggcctcagtcctgtaaaacgagaaaagggtctccttgaggagacctccttgaggttgtgagggttaaaatgtaaatgagctcatgacaaagtaccaaccacatgcccagctcataatactcaagaaataggtaatc

SEQ ID NO: 32082 - DNA, 809 bp, Homo sapiens; identical to SEQ ID NO: 24568
  chr6:37023826-37024635
  hypo

SEQ ID NO: 32083 - DNA, 126 bp, Homo sapiens; identical to SEQ ID NO: 25794
  chr6:37275447-37275573
  hypo

SEQ ID NO: 32084 - DNA, 1350 bp, Homo sapiens; identical to SEQ ID NO: 25796
  chr6:391113-392463
  binary

SEQ ID NO: 32085 - DNA, 823 bp, Homo sapiens
  chr6:41339068-41339891
  binary
cgggacagcctcctctatgcactgcttcctcttccccagccctgctccctgcatccttccctctggtcctagtgtcctggtgtcttgaagatgctgggtagttagaccgacatccctctccctctctcaccctgggctctgggacgctggccctgcttccccagagagcgatcgccccggacttgtgcctgtgttccggcctagggcagccggaacctcccgatatccccagaggagtctcaggacagcgcacagggaagtactggcttggagctgcgtgttccttgggcggccggcggagggcgaagagcaggaagagcccgggggacgacggtagcagagtgttggggaggccacagacgcggactgcgtggagaaagcacgcacccgggccgcagtagccgggcagggggacggcggaaagcagccctctctggaacattttattctgatccccgcaggactcccccgcgagccccggcttgagcagtcgtgtaacaagtgtgcgattgcgcgtgcgactggtgtgtgcgcgtgggcacttacacgttcccggggaggctgggggcaggagcttcactgttcacacaaagagcgcttagaggaggaacatttaagtttgggggcaaagaaagaaaaaagagttaaaggtttaggagatgggggaggaggatggggcttaaggacgcggtgttgccgcggctcagccatcggggcgggaagctcggggagggagagcgcctgggcccgcttctcgcctattctacgcagaacttttctctcctccttcttccctcgctctgcctctctcggggcggtctcc

SEQ ID NO: 32086 - DNA, 312 bp, Homo sapiens; identical to SEQ ID NO: 8633
  chr6:41620850-41621162
  hypo

SEQ ID NO: 32087 - DNA, 149 bp, Homo sapiens
  chr6:42145871-42146020
  hyper
cgctgcatctccgagggtccgggtctcccctcagcgtctcttggggcttgccgagatgggcggagccttgggttatgatgggcggggcctgaggctggagtgagcggggcccggatgggctcacggcggccgcgcccctcgcccaggac

SEQ ID NO: 32088 - DNA, 755 bp, Homo sapiens
  chr6:43243254-43244009
  hyper
cggctaagcctccaggctcggagggccctgtcgccccacccctgactcccgttacctcactgcccgtcgggctgccccccaccccgccccaataattggccttgcaattggatgccaaagagcccagagttgagggggagcagagctttgagcccaggtctctcagagcaacccaacagccccctttttgcccacgccccaatccgcgtcccctgccccaccccaccactgagggccctgggggtcaccaaacatgcccccccatttccagctcttcccacacccccacccccgaaaataaaactcagggaccaacatctgcttcctttgcacttgctccgtcgaccccgctccccgctcggaggggcttccgtgggggagggggcggggctccgggccctcagagttctcagtgtcgagcgaggagaggggctggcccctgcccccggagaagcgggactggtaggagagagaaactcagcaccggggcccagctgagccccttcctgcgtaaggagacgccttctaattgcggggtgggggcggagtaggggagggataggaaggggattagcgagaggaccctcgcggaggtcctgagtcccagtcggtttattcctgagccttcccctcccatcgtaagtccttccctcgaccccccattttgtactgcaataatactgtattatacgcttgcactatttcccgaccctggccagcggaagcatgcacgaaaaactcaaaaccacacacac

SEQ ID NO: 32089 - DNA, 262 bp, Homo sapiens
  chr6:43478540-43478802
  hypo
cgccaagatggcggcctcatcagggaggccccaggggccacggctgggcagagccagcttgagctgctggggagaagggtaccccatagggtccctagggcaggggagcctcagatagatgcaaggtcctggtgccacaccttctcaggtacgcagggcactgttgacatctgagggtgtgtccgtgccgcgagactggggcagccaatacaaagaaggtgccagggccagggccctggagcactggtgaggacgtgaaggc

SEQ ID NO: 32090 - DNA, 105 bp, Homo sapiens
  chr6:4910879-4910984
  hypo
cgagcatgtctggttgaggtctgcagaaactatgaagagggaaaaggtgtctccgtgggcctggaaggattagtcgggtttttataaagcagcagtgttggaagc

SEQ ID NO: 32091 - DNA, 176 bp, Homo sapiens; identical to SEQ ID NO: 23629
  chr6:4951262-4951438
  hypo

SEQ ID NO: 32092 - DNA, 450 bp, Homo sapiens; identical to SEQ ID NO: 25803
  chr6:50674341-50674791
  hyper

SEQ ID NO: 32093 - DNA, 645 bp, Homo sapiens
  chr6:50690534-50691179
  hyper
cgggggatgggagaggaaaaaatgaaaaaagtgaagaggggaagcgcccttgtttcgctttgtgatcattctgccttgcagccccaggctaatttcagaagcttaaacactgcggtagcctctgggccacgcgaagagggagcggacccggccatgggcaggcaggagcgctttcctgattgcccgtggctacacaaaatacaaactactttgaatcaaaacattttggaggaattaatatgatctgaactctgcacgttttaagagagtttgagtttgtcagagcgcttagaggtgactggcacgccaaggcaaaggcatttacgccgcggtacaaacattgtcagatctgatttaatttctttaaaaaaaaaattccttgaaatggaaccttagcttcaattgctcagtctgcccataacagagtagaaggacctgatcgcttttccctttagccggcctcaaggccggcagcaggctgcttggcaggaggaagcgatttcctctgcttctctgggtttcaggaaggcccagagccttggaatccgggatggagaaagccgtggattctttcagcagctcctgaaggagtacaattggaggagcgtgggaagccttgctcttcttcctttgtcagtactcttc

SEQ ID NO: 32094 - DNA, 1235 bp, Homo sapiens
  chr6:50787179-50788414
  hyper
cgggaaagaagtagatggctggagatatggatggatagagcaaaatagaagtcgtagcagtttattagtttctgttttcttgtgttttgcttccttgagggtcactgcgtccgaacagaaatcgcagccgcctcctgtgtgggcatctttcacggaaatttctgcccacgttcaatgcgtacgggtctctagcactgaggctagctcaactcttcggggcaggagaagttgcgcccagccaggaggacgccagccgcctccggggcccggaccgcgctcgccaaagcccttttccggctcgggcgagggctgacgcggccagacggctccgctactcgcgggcgaggcggactaggcggacgaggcggccgaggcgggcgaggtgggagaggcgggcgaggtgggagaggcggccgaggcgggcgaggcgcggggcgcgcggcgggccaggctggggaccgggaagcccgcggagcctcgcttttaagcggaatggtctgggacagccccaggtggttgccaggggaagggaggaagggaaggttctgctgagacgtcgaggttggaaataaaaacttcggaaaggcgaagcggatttagaaaaggagggaagtcgaggcgggcgaagcgggccatggagattgctaagaggaaaagttggagagaaaaggaaggaagagaagcagactcccgggtggcgggcgcgggccgctaggtcagacgaaaggtggagggatgcagaggctccccaaagagccgagaaagacacgcgacccctccggatcgggacagctcctgaaagcccggcgcagagccgcctcgaagatcctaagagtgggcgactcacaggcgcggccggcaagctcctgggggactcgggctcggacgagcgcccacaggcagcgcctggcgcccacacctcctgcccccccccgaatcctaatgttggggtgtgtgtatgtgtggaggtatgtaggagagaggaggaggagataagagaggagagggagaaaagcaggagagagcgcgagagagcagagaggagagagattggtcttgttgctgaatgatgcttggggttttccttttctctttgtggttgtgtatcgactgtaacgaagagccgcgcctacgcgcctggtggggattgtttcggttcggcctccttttctttccttaacaggcgggataatggtaaagtccaaggcgctagaactgtcctaaagaatattagc

SEQ ID NO: 32095 - DNA, 248 bp, Homo sapiens; identical to SEQ ID NO: 29343
  chr6:50789353-50789601
  hyper

SEQ ID NO: 32096 - DNA, 496 bp, Homo sapiens; identical to SEQ ID NO: 29344
  chr6:50791122-50791618
  hyper

SEQ ID NO: 32097 - DNA, 211 bp, Homo sapiens
  chr6:50794602-50794813
  hyper
cgagtctgagttgtttttctgcgcttccgcatgcagtcctaattaaatctttacgatcctccctgtgacgattaagcgccagcatgctgcgtgaatatcctgtacaaaaacccagcaggcggccgtaattagatagaaaatcagacaagagccttctcattaactaccacaactaccccacgtcgctgatgaggcgtttatacatatttac

SEQ ID NO: 32098 - DNA, 563 bp, Homo sapiens; identical to SEQ ID NO: 25804
  chr6:50803791-50804354
  hyper

SEQ ID NO: 32099 - DNA, 159 bp, Homo sapiens; identical to SEQ ID NO: 25805
  chr6:50805695-50805854
  hyper

SEQ ID NO: 32100 - DNA, 375 bp, Homo sapiens; identical to SEQ ID NO: 25806
  chr6:50808438-50808813
  hyper

SEQ ID NO: 32101 - DNA, 1678 bp, Homo sapiens
  chr6:50810509-50812187
  hyper
cgaatgtcccaaagcgagtccaggcggtcctggaatggaggggagaaaggctgaagtcgggggaaggcaaggctttggggtggaaggggtgcattacctccccacccccgctttcctttcagtcccagctgctcgagaagggagggcgctgggaaaggaaacagagcggaatcgcccacattagcctcgctcttcggtgacccggcgcctctgggcttgtgtgagcgtctcctttctaatgccaatgacaacgacactgagggtgattttctgtgcctcgcccacccctttgcaggcaactttgtaaagaatttacggatctactggcgcaggaccggacaccgatagggaacagccgacccagccccatcctggagccggggatccagagctgcctcacgcacttcagcctcatcacgcacggcttcggcgccccggccatttgcgccgcgctcacggccctgcagaactatctcaccgaggcgctcaaaggcatggacaagatgttcttgaacaacaccaccactaacaggcacacgtctggggaaggcccaggtagtaaaactggcgacaaggaggagaaacacaggaaatgaaaaatttttaaaaaaagaaggaaaaatgttttaaatacaaaaggaaaaacagacaaaaatttaattttagctttaaaatattggattggctttggaagaattatattaggtagaatacacatacaatcaaaattttaaaaaaaaaagctaaataacttaaaaaaaaactgaggcgtacaacggagcaacaatatcggttctcagtgtctatttcaagatacatttggagacaaccgtccggattttccacttcggttctttcgagtttagtaatactgataataaaagaaaaccatgatttccccttccctttggaaaataaacataagactaaacatgagaaaaacgctaacttattggaagaaaatcggagaaacgttggtgtcaatgctttgagagctggttgactgagacgcacgaactttttaattttaaatatatttttaggaaactctcgcagtccccgccctccatctcacctcacccgtctcccaaccacccttttccatgttaccctcccttcctcacattgttacgggaatcttctgggatgaaaatgagtgtggttggcccttttgcgttgtttcagtcctctcggtacctccccgcccagccctgcgatcttaactcaccgggcccggctccccggccgcttgcataattagggagggcgagggcggggcgggaggcctgtggagaccaggcggaggctgcaatttttggtgccggccggcagagcaggttctggcggctgaggaaaatccggaccaataagttgattcaaacatcatcagttcctttcagaaatgttactagctcccagccttgccagcatctgcatagagagaatctcacatttattatatttgtgtcatctactaattttatgaactatagtaaaaaaaaaaaaacacacacacacacaatatgaatacgttgattagtatgtaattccttcggaggggtatgtaccatttcattctcttctgttttccaaagctttgcccgcatggtttatgagcttcttcaaagaggacttgggcttcctacacaatctataaggtacagagaaaaaaaaatcc

SEQ ID NO: 32102 - DNA, 938 bp, Homo sapiens
  chr6:50813314-50814252
  hyper
cgccttcgtccgagagctcggccgatcgcattagatgtgttctgattgcacaaggccaggagagaccacactgaaaacgatcgtctcctttccttgcagggcaacgcgccccacgcgtgtgacgtgcgagagacgcgatggacgcgccttgctcttactgtgcaggtcctgagagcgtgtgggccacaggcgcccagtcgtgttgaggacatagaatcagccgctggaggggctgccgactgcgcgggcccttcccgctctcggtctcaccctaagggctaaggcgaccgagaaagccccattctccagtaggtaatggggcggcgcccggtgggctgcaggtggggagggctcccagcgccgccagcggccacccggggcgccggctcctggagggagagtggcctagaaatatccaaggaatccgaagcttcccctcctccacctctgccagtacggaaacaccccaccgtcacaatcctaaagcggggagatgggatgggaattgtcttacttggcaaggcagggtaccttcattgccagacgccctcatttgtgtgttcctccttgctccagcgagatagaaccttttgcgcccccaaccccgtttcgtggagtgagcccactaccccttctccctccctcacttctcctttcatgtaggacccccgcccccttgctttccttagccaggcccgctacatttatctgataattgagttattaaaagatttggtttccttgggcctataaatcaataaacagtaggattaacgcaatagtttgccttttaagtcaagggagacgtttaaggcaagcccctttgagctttgttttcaaaccaaacaggtgagttgcagctctccccccggcccctgcactcttcagacatttggtccctgcccactcctaaacgctcagtcccaaaacaaaatagc

SEQ ID NO: 32103 - DNA, 412 bp, Homo sapiens; identical to SEQ ID NO: 29348
  chr6:50817038-50817450
  hyper

SEQ ID NO: 32104 - DNA, 682 bp, Homo sapiens; identical to SEQ ID NO: 29349
  chr6:56716202-56716884
  hyper

SEQ ID NO: 32105 - DNA, 193 bp, Homo sapiens
  chr6:58147769-58147962
  hyper
cggcggcggagccctgctcccctcccttatcagtaccgcggttagtgctctgctttatggccgcagcaatctcagacactttcggagcgtgttttttttttcttgtcctttcgctccccttttcgggcgccagctttcaaaccagaccaaaggtgtgctttcccccattatctcccagccttctttccttttc

SEQ ID NO: 32106 - DNA, 1475 bp, Homo sapiens; identical to SEQ ID NO: 23341
  chr6:5996316-5997791
  hyper

SEQ ID NO: 32107 - DNA, 1253 bp, Homo sapiens
  chr6:6003284-6004537
  hyper
cgctctgtccttggtgggcgctcagcaaacactgctgaatgaatgaacgaatatagtccctggaagccaccagcagttaccgaaatggattgtttcattataaaaccgattgcctaccgtggactctgtattccgagtgagaccctcggatgcaccctctcccgccccgctggaaagagggcagcctggacgtcctgagacctggcgcggatgatgagtggtctggagaggagaaggccagaggccgggcggggtcacggatgagtctgcctgggtcacctccgcaaaggccaaatccacgaacctcgggcctctttctctcctcctcccctgtccgccactcggctccccagacacccttaacaacccacccgcccgccaaaaagcccgcctacactccggacggcagcggggagaggctgttcttctccaggtgccagccctgctgctgaaagtgagctcgccgcggcccggggctcctggccccagctcaggactccctgcagagagcaggcagggataaaagctgagcggcgggaggaggaggaggaggaggaaacacaggccgcacgaaggtccaagccccaagcccccaagcccccggcctctggacggccaaaccccgaggcgcgggactggaaggacaggtaccaggctgcgggcgcgcggctgtggccatctctttccgccctgaggccgacgaacccggctggaagctgagtgcctagcggcccaaagcagcccgggcgccgggagggcgccagagaagcacagcgttagggcggggaagaaagggtgaatctcagaatcgaaatccgcactggcgcccacgaccctgggcgccggcctggtcctcggcagctttctggcggctgcgcttgtgtgtgaatgtgtcccgggaggaccggacacctcaatcccccggcccccaacgcgggcgcctgtccgcgagcgccgggccagacgccgaagaggaaggtgaccgaacccgtagcagcttccgagagcgtacccgtttgcaaattgctgcaggaagagcgaggcgggccttgcgctttttaatccggaacgggaagcactggggaagggaccgaggttaacttcgacctccgctggggcagatacgtaaaccttctcaaacctccgagttcaccttacagcgaacattaaatacccttgcgactacaatactaacaaatcgaacactgacgtaaaatcttaagaataaacgaatctttgttctgatagagctc

SEQ ID NO: 32108 - DNA, 1356 bp, Homo sapiens; identical to SEQ ID NO: 23342
  chr6:6007079-6008435
  hyper

SEQ ID NO: 32109 - DNA, 587 bp, Homo sapiens; identical to SEQ ID NO: 25814
  chr6:73329621-73330208
  hyper

SEQ ID NO: 32110 - DNA, 748 bp, Homo sapiens
  chr6:91320244-91320992
  binary
cgtgtttgtgtagtaagccgagttctttcttgactgtctgtttatttgggatagcccggcgagggggcgctggagattatgggggtgggggcggtttcttggggaggcctgggtctatggagtggaaaccaatctttgatgaatttggtcacaataacgaacacgggagaaaaaggagaattgaaaggaaatggattctgcgagagactggggagacaaaaccaagaggaaaaacacagaatcaaaaacgacaggaaacactagagaagagtaggcagaaaatagagaagaggaagaaacgagtcggacggagacggggccgggcactgggagcttgaggctgggtctccatccttcctttcatcctctcgggagcccgcagagacggcggcttcagtctcgctttacgggtgggaaagcagcgaccttgagaggttaggtgactgctcaaggtcaccgagctaagtgccagagccaggattctcaccgctcctcaccccagatcggggctccggccagaccacgctggccgccgggggagaggacgcgcggggcgggcagagcgcggccgggggccgggaaggagccggcgccaggcgcgcgcggaggaggcggccgggcggggagccatttcctccccaagcaacggcgcttttcaggggcgcgaccgggaagcctctcttggcgtcccttccccagccgcagtttgggcaggggagcgagggccgggaggcgtctaggctgtggc

SEQ ID NO: 32111 - DNA, 647 bp, Homo sapiens
  chr6:99291279-99291926
  hyper
cgggagaccctctgggcaccccggcatctcaagccagagctgagggcccggaaagtgaggggccgcgcctcagtactggaggcctagagtccatctccgcgaactgggggctctcagggcccgcagaaatcccccttagccctccgaggcccctggaaggagtcgccccgggagaggaaatcactcagctctgaaaagcgtcgcaaacgggcggtgggagagttctaaagcggcctttcgcctctcggaggaggtgaggccgagctggggatgtgcgggtttggggcccagaactgcaccgcagggccgcagaggcgggaagctggccggagaggagtgggaaggcgaccaagggcagcagcaggggctcctgcggggcgcaggtctgtgctggcgccgggcctggcctctgcaggctcggcggagcctcccgattgctcccgccgcacccgcccgcggccactcacccggccccgcggccagcccgggcggggtcgcacgcaaacaaggatgcttctatttactcgcctctgcctgtagatttctaagacattcagcaggcacaatcattaaactaatttgtgtttgattgtttgggcggacggagggtagttttattgcgctaagcattcaagcaggcacgcatc

SEQ ID NO: 32112 - DNA, 487 bp, Homo sapiens
  chr6:99292143-99292630
  hyper
cgctgacccaaatgcagtgaactgcacggcccttgtggggccccaactttgatgtgggcctcggcttggaagaggcgtctgttatttattatttccctcccaccagcgtagcctggtctcccagcgccgtgcccgccgcccccgccccatcctgcgccccagatgcgcgccccgcttggaccagtccgagcagaggggggttccgaaatctgctcggacgcagcatcgctggccgcctgccccgctagttccccgagtgcgattactttttaaaggctcctttaagcatatttccgtgaatctgtttcttgtgctttaatgttactattaattgataagatcagctcatcaaacatactatttcgatagggaattgtaattaaaaccttaatcctgtttgagactttcttctctctctaaattcctttttcttatgaaaggggtgcaaagttcactacaaaaagtactataacagggagattaattc

SEQ ID NO: 32113 - DNA, 75 bp, Homo sapiens; identical to SEQ ID NO: 14200
  chr7:100838060-100838135
  hypo

SEQ ID NO: 32114 - DNA, 415 bp, Homo sapiens; identical to SEQ ID NO: 29359
  chr7:1029909-1030324
  hypo

SEQ ID NO: 32115 - DNA, 465 bp, Homo sapiens; identical to SEQ ID NO: 14202
  chr7:105254063-105254528
  hypo

SEQ ID NO: 32116 - DNA, 313 bp, Homo sapiens; identical to SEQ ID NO: 28149
  chr7:105279344-105279657
  hypo

SEQ ID NO: 32117 - DNA, 75 bp, Homo sapiens; identical to SEQ ID NO: 14204
  chr7:105280248-105280323
  hypo

SEQ ID NO: 32118 - DNA, 1075 bp, Homo sapiens; identical to SEQ ID NO: 29360
  chr7:113722711-113723786
  hyper

SEQ ID NO: 32119 - DNA, 584 bp, Homo sapiens
  chr7:115117321-115117905
  hyper
cgagccgccagacgtgagctaaagaaggtgctggggggcagaacgggtactggggcgcctggaggagagttgaggggcctgaaagactctgggggcccagctcggtcggtgggtttattccaagtgccccgtcccaggcttgcactccccaaaaaggagccgagacgggagggttgaggcgtctcggctgcctccgtggagatcccgagaaaagctcctgcgctccaagttaacttctctctgggccgcgcggcgcagtggagtctcggtgcagcccgcgtccctggaggcgcgcagcgaagcccagcgggcgtggacagggaaggggcgggaaggcaggggacaaggcggggtcctaagggttggtggggttgagctgggggggggggggcggaaaaagagatctgcggagaagccttcggagaggctaaggagggctagcctggggctgacgaaggcaatgctctttagaagggcactgggggcaaagagggtcccccaaagcagctcatctgggcgcccttgactaacagtgctctgagctttttgccttgagactctaaagatcaaaattcgatgtcctc

SEQ ID NO: 32120 - DNA, 847 bp, Homo sapiens; identical to SEQ ID NO: 23347
  chr7:117119463-117120310
  hyper

SEQ ID NO: 32121 - DNA, 66 bp, Homo sapiens; identical to SEQ ID NO: 14206
  chr7:11870605-11870671
  hyper

SEQ ID NO: 32122 - DNA, 939 bp, Homo sapiens
  chr7:121939692-121940631
  hyper
cgcatagattcggaatccagccaactatggaattccaagaccctcgctccctcgctttccgaagtcaaatctaacatggatttggccccaacagtgggcaaggtcggggcatgaggtcaggaaaggagaaacatcggttttcgatctaataatggctgggctggagcttgttccctgtgtccaaagggcgtgcgtactagcacaagcgttgagaaaggtctggacccgatgtctgcaggaagtgtcaggacctccctgttctggggaccttcccagcccacaccaggtccgtgctctctagattcccccaacctcgctccacaacccggaaggagctcaggccggacttggcgtgagggtccctgcggggctgggtcacctacccgtccgcgatcaccccacaggggctgttagtaatctccctgcttcctaggccgttgagaagcactcaggtcacccactctcggtgaccagagcggtcagtctttccccgccatgaaatgtgagttcgggtggcagccgccgcgcccctgcagtgtcccctgcacatctccggtctcggtctcgcctttctcagctccgcgccgccttttcctgggcgccgcaggactcatagaagtgaggcggggccacagatttaagtttattccccgcaactgtcggggcggtcccggagctggtgaggacgcgctacggtgggtgcagaaaggagatccctggactctgtagaacctgggcccgcggtgtggaccgatggtggattctccgcgacaacagccctggagggagagagtgggccgggggaggggccacggggcccctgaggcctgcggggctggccgcactggccccgggcctggcggggtggtggagtccgaagcggcgaggcgaggaccccggggcccgctccccccagtcgccctcccgggatgtggcccc

SEQ ID NO: 32123 - DNA, 614 bp, Homo sapiens
  chr7:121941896-121942510
  hyper
cgaaaggccaggggatgcagaggcttctggtcggccctgaagtgtggggcccaacatgccctggggtctgcagacgaactcggaccaggagctctagtctgccgctgcctcagcgtgggggcacggctgaggctgggaggacccttagcctcgatcactggtggccctggtggagcccgggctgcaggggccccggggttggcagcggcggctgcagaggaggcagcgtcatcggcggctgctgcggtagcgggggcggcggttcagtgcctggttcgccagctggcgtgcgggccagccccaggctgctgtcgtgcagcttgcggacatgcttcttgaggtcaaagttcctgcagaaacccttgccgcacgtggggcaggtgaaaggcttcttgtcgttgtgggtgtgcatgtggaaggtgaggttgtaaacctggtggaaagccttgttgcagatattgcacttgaactgcttctccccgctgtgggtcaacttgtggtttttgtaattccctgaaacacacaaatgacaggaatatggttctgaaaaaaaaaatagcttaaaaagggaggagcagacacgtggaaggtagcgccaggcaagcagaagagcc

SEQ ID NO: 32124 - DNA, 1392 bp, Homo sapiens; identical to SEQ ID NO: 29361
  chr7:121946043-121947435
  hyper

SEQ ID NO: 32125 - DNA, 1031 bp, Homo sapiens
  chr7:121950024-121951055
  hyper
cggttcgactgtttccttgacactacccacgaagtttaaagcattttttatgttattttcaaactttcttaagtgatcccatgaaataaaagtcgataatagaaattaaaacaacacagagcaaagaacgagcttagtgaaatggagaagcagtagaggtaaataaaaatcctcgagctagaaagctctaagaaccgcttataaattcagttacctcctgaactccggccgatggccactccggcccgggagtgccccgcgccgacccgctggccttggccgtctcagccttcattatcgccacggccttggcgccccctgcccccggctgcccaggggaaccaagttcccgctgctggagttggggcagaggagccccgcctcattcaggattcggtggccagcgcagagccatttgaatagaagaagcccgaagtgaaacagaaaagctgaaaactccccggctgggctctccacttctcggttcttgctcacgagttccaaacagttaaagtgacgttggcaaggccgagggccaccgagctctgtgagactcccttggaggggtcaggaaacttagctcgagaagcttggaggcggctgggagttggggcgcaacttcagtgaccgggcgccgctgccgggctggggctcccaagcgtccggctcccggggtggtcgacgcggcgctgccttcgatcaggtcccgccgacctcgggcctctggaccaccaccgccccagctggtctggcaacccatcccgggcgcaatcgcgctcctccccttctcctctgcattcccgcaggtcctggggcggctccatccccccaaggctgagagatggcgagggaggctccaaagagtttcgggagggggcgccggatctggtttaagagaccgcggaacagatggtggagagctcctggatgaaagtttttgaacaggcactcgctaatagacttgctttgacgactcagggtgtaattgaagggtcatttaatctagacgcaaggtgaaagaaaacaggccc

SEQ ID NO: 32126 - DNA, 277 bp, Homo sapiens; identical to SEQ ID NO: 23349
  chr7:121951878-121952155
  hyper

SEQ ID NO: 32127 - DNA, 1029 bp, Homo sapiens
  chr7:121956311-121957340
  hyper
cgcactccggtgactactccctgaaagccaatgagcggttgaccctctggtgacatctggaacccaggttcagagtttcgctctcgcctctactcccttaatattttactcaatgtcacagaggagaacagcttaaggcagccctgctccccatcttcaatccgaagctggggtatcccagagaaagtctcgctctgagctcctgctggggcacctgcccagccatgcccctcgagggcgtcgctgctctcaacccctctccgctactgcccggccgcccaggcctgtggacgcgactccatctgtagcaaagttcgggggccaaatgggtcgcggctcttcctcgaaggttactgcgagcgggacttgaagggaaaaggaggcgcattagcgacttcgttttcttgcatagtactggtacagagtaccggtgatggtcgtaggggaactctatgtaaagactggatgaccaccggcctcccggaaaccccacacgccaggcctccaacttcttcacaaaagtggggtgggtggcggagggctgtggcgggggcttggagctgctgagagccgagaggcgcagagcgcaagctggcaggctgggctgctatcccggcgcgcagatgccccgccgccagtcgagcgcgaacatctctccggaacatcgatctatcacctccctttaaggacccggaccgggaaatttccattttctgttttgggaataagaaataaaagcgaccaagctcttgccctaatttccccccgcgggcccttccacgcgggctggcgggatcagaaggacgggtccgagctcgggggcgcggggttcctgtgaactccgggcttgctcggtccggtccccgcgcctgctgtccccaggccctctcgggaggcagaccgcggcagcgcaaaggggcttcgaggatctctgagcaacgacggctgagtgacctctttccctctcaagcacaccttcaaggagccggtggaccctctcaccgccggtagctgcaggctgagggcggc

SEQ ID NO: 32128 - DNA, 285 bp, Homo sapiens; identical to SEQ ID NO: 29363
  chr7:123172945-123173230
  hyper

SEQ ID NO: 32129 - DNA, 1238 bp, Homo sapiens
  chr7:126891155-126892393
  binary
cggggtgggacttgcttaggggacttaagggtttctgcaaccggcgagggggtctgttttcacccccgctatcttgggtgcgcagacactctctgacaccaggcttcacagtttgggccacgggggaagtaattccccagggaaccgcgggggtgcggttttgcgcaactgggtgactcgcgtgtccctccgcatttcatttgcaccaagggagcgcgtgtcagacgaagggaatttttttttcttttttggtgattctgttattttttcaccaactgtacgaagctcaagggatatccgagctttctggctgggcggatgggcttcgcgcttggcatggctgagcggtccatctctacctctccgtttctatctctaccataacagcgaccactcagcccgccaggagcccctgtttcccagcgcaggttcctttttcttctcagttccttgggctgttgaagccgggttctgggtagatagagactggggccgtggggagagcgccaggctgcttttgcctttcccgcgccccggggcattccggcgcgctggggatgcagcctccgcccccgccgcacctggccgcccgagcgcccgcgcccacgccccgcgcggggccgcccgaaactggggccgcgccagccgcgggagctaccgaggagctgttggggtgcgtttgcctttgctttttaaacaagatccccgagaccttttctccatccccccaacccccagcaggacacggaactccggcgtttctcgaaagccacaaaagaggggcacggaaatcccaagctcgccgtgctaactcggagaacgcaaactcgaggcagagcgtgcgccgtgcggggatgtgggtgtcgaggaccccgaagcgcccggcttcccccgcgacccccatcctccctagatcctggttagacatccatccagcccacgctcagagggcgggggttaccccgactcatcccggaagccgctaacttcagaaatccctcctgttaggttcgcgaaacgaaggtacctcgtcatctcggcggggcaagtccggattccaccagggcaggtccgggaggtcacccagggcagacgatccgaggcagagcgctttaaaatcctgccgccgcacgcccagtcagagcgccgagcgcgcctgcccccttcccgtcacccttcagtctcccattcgccgactaaacttttgggggatcacatctccaagccttgggagttcc

SEQ ID NO: 32130 - DNA, 747 bp, Homo sapiens
  chr7:127808033-127808780
  hyper
cggggtgtccccagtttgggagggagacacgcacagtcgctcccgtccacactcctctcgtgtcctggctccatgactgggagtctggggaaagaagaatgggtgtctgagacctacccctccgccggtgtcgccccgctctttctgggcgtaggagcgggctgcctgcccctctcccgcaccttcctggtctcgggctagaactggggcttcccatcggccgcgcttcccttaggggcgccatctgaggtcggaagcaaagctggaggggcgtccaggccagaggacgcgggctggggcgggagcctcggcagcctggtgggagctggtgcccactgcagggtgcgtgtacggggctgcctgcgtgtgcttggtgtgtgtcacttctgggagcgtaccccgtgtgtccacggggtgtgtatgcgcccacggaagtcctctgtgcatgcgtgtctgtgccataggcgtgggaacacctcgtgcacccatggtacttgcccggagagtaggaagccagcgagggagcggccctgctccagggtctcttccctgctcatccctccagctggcccagattacaccctactcacacccgggtcgcggcccactttccccatagccgcagcttccggcggctgcacacttcttagtgctcatcctgccttctcgccccaactcgttgtgcccttccctccttggagagtgagtagaagaggggatggggaggaatccgtttccatcccccgc

SEQ ID NO: 32131 - DNA, 648 bp, Homo sapiens
  chr7:127841217-127841865
  hyper
cgttagcgctggcctttgagacagactcactgagccacccaaggtcacccgggcagcgggcacagttgggactgaacgcaggggctctacctgtgccaggtgtccacacctcggtggcgctcggccgcctgacctcctcttggagttcccggctcagggcagggggtcgcgtccctgcggtctctggaggccacgccccacccgggcccaccggggtgggcgtggctacgtggctccctggcgctgaggcgcctccttcccaggtgggcggggctcctgccgggtcggttcccgcaggctgcccgcggaccccagccacttggccaggctgcagggacagtgcgaggaggcgctcagcctggaccacagcggaggtgtgcaggactcagcgaggcccccaagcttgtacgcctccttcctccgccggcttctctgtctgcctcccactgtccctattctgcccttcacagatcgttgtcattatcaagtcctacactttgagagcagaaaacgaccccgtacgtggtgggtctccgacatctgtttattacgttggaccgcatgctgcatatgatccagccacctcgctctactcctgtggctgcccttcgtcctcgtcgccgggacccctctccctgcctcccagac

SEQ ID NO: 32132 - DNA, 117 bp, Homo sapiens; identical to SEQ ID NO: 25830
  chr7:128337420-128337537
  hyper

SEQ ID NO: 32133 - DNA, 287 bp, Homo sapiens; identical to SEQ ID NO: 25831
  chr7:128337620-128337907
  hyper

SEQ ID NO: 32134 - DNA, 192 bp, Homo sapiens; identical to SEQ ID NO: 25833
  chr7:129330248-129330440
  hypo

SEQ ID NO: 32135 - DNA, 1887 bp, Homo sapiens
  chr7:129421614-129423501
  binary
cgcctcgagcctccctggctgtctctgcacccgcgccctacctggtcctcagacccatgcgatgctgggcaacccgggccgggtgtgcccaggaccgcaaagcgggaagcgcaggccttgcggactgcgagtggcccccgcggcctgctgctcccctttataacgcgcgccccgccccccgcgctccgggcgccccgccctggcccattcacctgctgtcgagaaccagacaccgcgcagcagaaagctagccgctgggccgcgaggtccggccgtcggagcgggcggggctggggcgccgccgagacagatccgatttccaccttttcttaaatgcgctgctgaaagtcgagaaggccccggccggggagctcgcgtcgcttcctcccccctcagctcccctcgcaccctgagtcccccagccccactccgggaggggccgcgaaactgcacccgcaagggcctcatacatattttaaggagcaggccaggcaggtaaccggagctggactcggacggtgagggggcggcccccggggacctgataccctggatcccttacggctcagggctcaggcgggggaagaggtggctcaggacgacctggggtcctcactttgctggcctgtccagcgcatcctaagcccgcgtgtatcctaccccctccttctgcagatccaatgtccgtctggcaattgccccattccctctcgctggagagatcccttccgcctcgccacaggcgtcccacgctgcccggagtcgtgcgccccgggacgggtagttttgggttcctcgacgcttggccaggtttaggaaagacccgctgtcttccttgctgcccccacctaggagactcggcgccttgcgctccgtcctttttaatggtgtcgcggcttgtccctctggcttgctccctcctagtccctaccccacacggctcccttcgccagctccatgacaatcccactcgtgctgaagaccttgggcaaagaagtaaccatcggtcttcccctcccttcccattcctccggcggcaggactagggggaaaggtgcccgggatacaagcccctcacgcagacccactgatgcggccgtggttctgccattggcccctctccgaatggtgaggttctcctgctaaccctggccccatggcataactagtataaccccagtgagaggaacccagagttccagtcctcccctgctccagtccctctgtgatctcgatctcgagggattcacttcacctctctaagcctcagtttcccatttgcaaaatgggcagaatgactcgcacctctggggatgaagaaaatgcacatgtgagcacgtgggtacttggcgacccggagatctctgcaaactgcaggcccagcgagatggcctcagcacgccctgcaccctcgtccgcgcgactgccgccgggtgcccgccccagccgctgtgtccctggtgcttcctccgccagggccacgtgccggggaagccaaagcgggagtctttcgatcttggcccagcccttagccctcggtcctttgctctagcatctagattctcgtgggtcaacaaagtcactggaaacccaacgaacttcccgacatttttcgaaaaccgtatgcgtgtgcttctgtgcgtttttcctctgatcgaggtagggccctgtagggttctgtttggacgggaggctggagtggttccttcccggctgcggggtcggaggatgcagagattcgaaagaaggagaaacacagagactgtcaaatgaaaggagattctgtcttcggaatcgacccagctctttaaaagaatgaggaaaacatggggtctttatatatcctggaaagtcgcctaggcgttcagtgaaaaacgcaaaaggcac

SEQ ID NO: 32136 - DNA, 1554 bp, Homo sapiens; identical to SEQ ID NO: 25836
  chr7:129424378-129425932
  hyper

SEQ ID NO: 32137 - DNA, 255 bp, Homo sapiens; identical to SEQ ID NO: 23631
  chr7:129483371-129483626
  hypo

SEQ ID NO: 32138 - DNA, 357 bp, Homo sapiens; identical to SEQ ID NO: 24586
  chr7:1308164-1308521
  hypo

SEQ ID NO: 32139 - DNA, 487 bp, Homo sapiens
  chr7:131242600-131243087
  hyper
cgtaaactgagtttatccggtgaaagaacaaagaagttcctttcccctcccccgctcccctccttttttccacccccaaagctgcctgggagacgcagaccccaggcccgcctgaagaggaggcacatcggcggagccgggaagcggagggggcgaggggtgattaaccttggaacccgggtacggcgtaaatttggctcacgtgactccggggttgctaatctggagtctatctgccagatggggctgggtggaggggttttctccaggatctagccgcgtcccgggcacaggggactccgtgagcccctcaagtcggctgcaagcaggcgatgcctgcagggcactgcgtccctggagccgcgaaggaagcgctggagccctggctggggttccgtggcagccggcctcaagcttgggaagggctgacggggttgttttcatcaggaagtttctgcaggatcgttctggccccgttttccacacc

SEQ ID NO: 32140 - DNA, 171 bp, Homo sapiens; identical to SEQ ID NO: 28160
  chr7:140156493-140156664
  hypo

SEQ ID NO: 32141 - DNA, 577 bp, Homo sapiens; identical to SEQ ID NO: 25846
  chr7:149111880-149112457
  hyper

SEQ ID NO: 32142 - DNA, 390 bp, Homo sapiens
  chr7:150655182-150655572
  hyper
cggcgcgcatggcctcgatgtcgtcggccgacgaggcgcggcgcacgctggcgcagctttctcgggagcgcgtccgggccaggctgcagctggagcccgaggcgtcggggttgaggctgtgcgcccggggcgatgggagctggccgggcgcgctgcggggcggagagccgggacccaccagcgcacgccgctcctccgcgggcccgagccctgccacgtggttgtccatggctgtcacttcgtccagggccagcgactcgctgctgggtgccgcgggcgtcaggtccacgtccaccaccacggcccccggggcgcccgcgccgcccgcgccgcccgaccgcaccgacgactcccgggccgtcagcgccagcagcgcgggcagcttcaggc

SEQ ID NO: 32143 - DNA, 138 bp, Homo sapiens; identical to SEQ ID NO: 25848
  chr7:150753916-150754054
  hypo

SEQ ID NO: 32144 - DNA, 593 bp, Homo sapiens
  chr7:150758626-150759219
  hypo
cgaggctccgttgtctgcctgggccttcactcccctctttccccagctcattatcactccctccctcatctttgttgctttctctccgggcctgggccttgactcctttctccctcatttttcttgcggcctttcccacctcctctctcctcctccctctactcagcctctcggcccttttcggcccccctcgcctcagtcctctcctgtctccttgttcttctcttttcttcctataaataactctcctctgtgctgtggctgccgctaagggccactctgaggcccttcatactccaggaggatccccagcagcgcagcctgcgcgtggtggctcctgccctcccagggctctcgatggtgatcaggcctctcccccatccaggttatgcctccgcctcgttgccctgaaagccgcagcgacagcgaaaagggctaagattcggccatgagcagcgcccctcggcgccccgccaagggcgcagattctttctgtacggtgagtgtggcccccaggtcgccagcccaaccttccctccctgggcagccttgggtgctccggccaagggtcctcgccaaccaggggtgtgagc

SEQ ID NO: 32145 - DNA, 304 bp, Homo sapiens; identical to SEQ ID NO: 25849
  chr7:150773909-150774213
  hypo

SEQ ID NO: 32146 - DNA, 571 bp, Homo sapiens; identical to SEQ ID NO: 25850
  chr7:150774308-150774879
  hypo

SEQ ID NO: 32147 - DNA, 1956 bp, Homo sapiens; identical to SEQ ID NO: 24597
  chr7:155164423-155166379
  hyper

SEQ ID NO: 32148 - DNA, 1470 bp, Homo sapiens
  chr7:155166425-155167895
  binary
cgcgtgtttcggcagcagtgattctaacaggcgttttatgttaaattacagcagaacccagaacaaaagcaggcggcggacttgcagtcccagcggcctcggccggtccgcgctgccggtgtgagccccgaaggaaagcaccccaagctggctgaccccgcgcacccccggccacacccgcccatcctggcttcgagattaagaagcccagtttggcaccccaattatgtttggcaatgtccccggtgccccagacccgcactccgctgcctcctggcttctcatgcccgcgaagcacggcctcgccctgggcgcggggcatcaccggcgcggaggcccgagggcgggtcacttcggatccctttcttcccttcctcgtctctgcctcttttcctttcttttctccctccgcctctctgtcagctcttcccgtcgtttcctcggcacccagctccagtccaggcgctgtcccagggtaggaagaagggcgatgccccttcttccccttctctggtcccctccccagcctccggctccccaaggtgcagggctccggcgggggctgggccgggcgggtgggtttctgagccgcagcgcttggagctgggggagcgggagcaggggcggcccggcgggcgggccgggacccggcttttccggctacccgtgggccaggtgcgggtttcagcacgcggggcgcgtgtgggcggaggcgccggggcccgcggctccgcttgttcgcgcgttgtcgctggcgaggcgtttcttgtccccggcgcccgctcggtgccgtctcagtgagtttgattgaaacgcggctgcgggaaggggtcgacagaggcaagctgcgagcaaggcgggggtgggggcgaggaaggggacccggagagctcccggagggcttggccggccaccgccgcgcggcgctgctcggggactgctactttgcaaggcggcggctgcccctgcggggttcgggttgcagggtcaagtgtcacgtcctccgcaatctccaatattcctgtaatgtatttaaatggacgaattcattacgcggggccgtgtgaatggggcgaggccgcgagcgcggcgcgatcagtagcgcccactaacagttcgttctgcacggcggagcgcgagaccgcggacccacggaagccccctcaatggtgtttgcgtcctcgccgccaccggcttggtagggtcctttagggaaggaggaagagttcaggcacccggacagatcctaatggtctttctgatttttctttcccttcggtccgctttccccgcgacctcctccaccctcagtccgcctttcaaacgtcgtccgcggggatggctgcgcgatggagaaattggtctcgtccagagacgcgcgcacagccgtccccgcgcacacgcgacacgcccagggccggcgtccacgtgagggcagcaccctaggtcgggtcagtcaaaccccacagc

SEQ ID NO: 32149 - DNA, 1026 bp, Homo sapiens; identical to SEQ ID NO: 25853
  chr7:155302323-155303349
  hyper

SEQ ID NO: 32150 - DNA, 777 bp, Homo sapiens; identical to SEQ ID NO: 23633
  chr7:155581242-155582019
  hypo

SEQ ID NO: 32151 - DNA, 691 bp, Homo sapiens; identical to SEQ ID NO: 25854
  chr7:156409159-156409850
  hyper

SEQ ID NO: 32152 - DNA, 1169 bp, Homo sapiens
  chr7:156794976-156796145
  hyper
cggatgagggaagggacaggtccacctcctctcccttcgagctgtttctttactccctgacaccagggattaaccggggtctcctggctgcctctcacctggcagccggagctccaggaggggctggaaaggagccccctgggcctccgtctggggggcgtgtgtgaactgttttctcccgtcacaaaaaaggcttcctccacatgcgtttgcacgcccggcagaattcgcccacagcaaggcccccctttctaagaagggaggagaacccacattggagcaaagaaaacggtggccaagaggtgggggcctcggtagggcaaggaggcaaggctgggttccaggggacagggtcagctttgggtggggcccagagccccgggtcgcagtgacggccgccgcaggggtctccccccgcgtaccttcgcttctgttgaaggcagtgagatccgcaggcctccgggacagctagaggacagcagacatgtcccgtgggggaagcctgggcctgtctgaaaacaccgcctcagctccctccggggtccccctgcgtagacctggcttcaggtccggagaaccggattcttgagggctgcaaagactttctcccccatgcgcggggtcagctggcggctcaggtgcgattggaggcctgggccccgagggaccaccgccccaggccgagccgagtcagcgaccccgagcgcggcgcccaggggtgggggtcgcgcccgcaaggcgggcagagccgggcctcgagaccgttcattaggcagaatgaattgttcaccgtgcccggagtggatgaggacgagccagtgattatatttaaatttgctataattgatttggggaagagctactgtgacaagaacgaattgatcattaaatttattagcgagataaattccgcggcgactgagcggcctgctggaggcgcaggggccggcgcaggtccggggcctggctctgctggaggacgggggaggggcggccctattaacagcgtcttcctttgatgtcgctcttccccgcgtcccagaggaagcgcctgtcccctgggggtagagggacagaccctccgcggaggcctggggcaccccagctccaggccgagcccccactcttccctggctgcccagtgttggtgagggcgctgaggctgggcc

SEQ ID NO: 32153 - DNA, 1834 bp, Homo sapiens
  chr7:156796431-156798265
  hyper
cgcccagcagctgcttctgcccggactcccagcagccgcgccccggccttggatgaggttgattttatggaaggggcccggggtgataatgagttgccagagaggatattaatctccccgcgccctgaggcagaggagtggctgcgctcgccccgcggtaatcacccaaatgaaacgccaggcccttctgaactcattttatccgctgggaggaggggaggggaggagggaggagaagggcacacgcaggtgctgctgagaaagtgacaaacagaaggaaggaggaaggcccgggagaagggataggagcggcgtccccgtcgcccgtctcctccggggccaggagaggccactgggtcatcgatgggggaagggggccgggagtcgcgccgggctgggtgggccgcgggcctgcgctcctgggcggacgagagcgcgggctgagcccgcatgtgtgcagcacatggcgctgggcctggctgcggtgattgatggcgcgcgctgcagaggctgattaacccggagccgctgcagccgcggtgtggagcgctgctgcagtccgccgctgtcctcgcggacttgtttgcacagagccaagaagaccgatcctggccagccaaggaaggttctgctaacagagagggccggggtcgaggagagagagaagcaccgcgcaattcggtgcgttccgggaaatgtgcctcagtagcgcctgaggtcacagggaccccacatgctactaacgcctagtcgttttaagcttattttctgaaacgtccaaatagcgtatttccacttctggagtgccaacgaagcaacagctagcaaggaaataggaaaataaatagagtccacagctccgcttccgagggacacgtgtcccgggacaggtgtgcaccaggcagccgggcatgcgctgacacctggccacaggtatttttgccaacacttcacattgcgactccccagtagcaggcgcggaggtggtcctgacacccacttgagactccgattttcaccctcagctgccaaccgccgagtagacaccctccccatcatttctacaagcaaattgtaatgccgcgggcataatcccccaaaactcgtgcacgctgatccagtacaaaaccaatttattttacattccatcgtgggcgatgggagaagctaaataataatttagcatgcatacgtagacgtttctttttatatataaatacaatatacaaaaataaagacagtacagttttgagatttccagcagtttgaacgctcgtgacataatccccccgaccccagagacgtaagcataaacccttttttctttttccaaatactctgcagaatggcggctccagaggcggtttcaagtttcataagtcaggtaacactgtgggtttccgccttctcggacgcggggaaaggggagacaggaggcttccccttgcgcggggtgggtcggttcttctcacacgcactcgcgcctcccccaacaccaaccaaaattaattttaaaagaaccagagttcaagtttcagccccctgggtctccctctcgctgtttcttgaagagcaggtgaggcgcccttgcttaaaagggaagcgcccaggaccggagccgcggccgaatccctccagccccggcctgggcgaggggtccatggggcggcggtcgagcctgctctcggggccgggccgggtgggtgcgggcgccggggcctccgggagaagccgccggccggggcgctccgtgcgcgccgcacctgctgggccgcggggctcctactggggcgcgggctggtggctgggccgcgggggcggcgagtcgtcctcc

SEQ ID NO: 32154 - DNA, 1331 bp, Homo sapiens
  chr7:156798275-156799606
  hyper
cggaggaggcggcgtggacgctggcgccgttgctgtaggggaaatggtcctcgtcgtcctcgtcctcgtcctcctcggggtcactgtccctcaagtcccgcaggcggcgtccgctgcccttgtctccgggcgctggcggccccagcagctcctcggctcccggctcctccgcgccgcccttccccgcgcccccgccgccgcccttctgtttctccgcttcctgcgccgcctgctctttggcctttttgctgcgtttccatttcatccgccggttctggaaccaaatcttcacctgcgggcacaagcgggcgtgagaaaccggccaccgccaccccagggcttcctgtccccggagtcccccggccgcgtgcgcctgggccccattgggtcggccctggaatggcctcagggtgagacgacttagaagcagaatggggagggggctcgtagcttcctcctccccgcaaccccccactcagcagcaaaccccagagctgggctggagctccgtgggagctaggactatgtccccaacgacccaggccggggacttttctacccgcgccctccgtctgcggaggaagggtcagggcagctggctacgtcgcggtaaatctcaggatgttccctcctctctttctggaacaaaatttctcgaatgcggcctggggatcaccttcttcagaatgaaaggaggggtggttaagtgctgattcttgggccccacccgaagctactgaatcggcgctctgggcaccttagatgaacccgtgcgcccgccgtctgaaccgtcgaggcgcagcgctagatgcctcagaccgcccgtgggtcacaagtgcaaaggtaacagtgtcccctgggaggccgggatgcgtcgggggcggggagggcgcgcacctgggtctcggtgagcatgagcgaggtggccacctcgaagcgcttgggccgcgacaggtacttgttgagcttgaactggtgctccagctccagcagctgctggctggtgaaggcggtgcgcggccggcggcacttccccaggaggttcgactgcgcctgggctggggaccaaagggcagtgaggcccacagccggctccggtcctcgccccagcccctcccgttgctgcttgtaccactacactcaaggccccagcgccaaggcctggccctgcagagggcggggctgttccctcactatcagtgcccactccccaaggaatgcggactcaggaccaccaagtggaaatggatagtttggagttaatgagaccaatttttttttttttttttgtctaggagacgtctgagtgtccctgttaaacagggcccatc

SEQ ID NO: 32155 - DNA, 196 bp, Homo sapiens
  chr7:156800868-156801064
  hyper
cgaagctccagaaagcacccctaggaggcctaggaccacgggcccccggggctggccagccccctccgtgggcaacttagcgtccttggctctgggaaatgcaggtcatattggtggctttctatcagaagggatgggccctgggtcggcaccctgggtttaagcccaggctggcaggggattcgcagacgcagac

SEQ ID NO: 32156 - DNA, 1332 bp, Homo sapiens
  chr7:156801418-156802750
  binary
cggcggctgaaagcgttgagccatatacatctgctcggcccgactcataagtagctgaccccgatggggcgagcggggagagccagagccccagagagccagagccccggagccccagcccggagagtccgcgtgtgccaggaaagcctgaggggcccaggcctctggcgaggtgtcccgcccggatggagaggaagctgcccgaagcccagcggctctggggtggggagaacaggggctccctcggccccaccttggaggggcattcgttaccttgttgggcgcccaggattccagggcaggcacctactgttgagagtccccccatagctggttcaagccaggccacctgcctcggccatcgcaccccggatccaacgcccttccagaggagggcagcgccctggtaagagccgggggttccctgggccttggccttgcctccccgggcctccgaagcccatttctcttgtttgctgctcctgaagcactccctctccctggaggggccgcgggtctctctaacgccccagtgggggacctggcccaagttcctttccccggtgataagccctgacccccattcccgggcctgcctaattcagggcgctctcggctcgccttcccccggcgacttccttctcctgcagccttcgggttaatcattagatctcagtctcacacctccaactgccccttcccgttaagagaggaagagaaggcaaggcctgcgcatggccattttaataattcgctgcccgtctcatgcctgggggtccgggcgagtcctcgcaggccccgggcagagccgaggcggcttcgcagctcttcccccgctcgctgggagccaagcgcagagaggggcaggcggtgccggtggaggatgcgcgaggccctcccgccacgcgcatccacgggggccgcagggtactcacagttgaagtcgggcatcttaggcaggatcatgcccgcggtggacgcgcgcagccactggtccagctggaaggtgccggcgcccagcttgatggggtcggcggggtgcgcggggtgcgcgccttgcacctgcgggtacgagtaggagagcgccgggtgctggcccgccagcgcagccgccgccgccgccgcggagtagccgtagaccgggtggccgtagagcgccgcctgcgccgggaggcccgcgccgccctgcgcgcccccagggtgcagccccagcgccaggcccccagcggcggcggcggcggcggcggcggcggcagcggccgctgcgcccggatgcgcgtggtggtggggccccccgtgcccgccgcccgtgccgccgccgccgccgcccgc

SEQ ID NO: 32157 - DNA, 1200 bp, Homo sapiens; identical to SEQ ID NO: 24608
  chr7:157262486-157263686
  hypo

SEQ ID NO: 32158 - DNA, 141 bp, Homo sapiens; identical to SEQ ID NO: 14231
  chr7:157281193-157281334
  hypo

SEQ ID NO: 32159 - DNA, 237 bp, Homo sapiens
  chr7:157448328-157448565
  hypo
cgtctccagtgcgggaaacagcacagccaggcacggtcacccaccaggacgacgcctacggcctggagatccaggaggcagccagcaggacgtgctgcgctattgacagctgtcctaataacacccggacattcattatgtatggagtggcaatgcacggccacacacgcgtgatcactccagcgaggaccctggaaaaggccgctgaagccgcgtcgccgtgagcctctggccggc

SEQ ID NO: 32160 - DNA, 203 bp, Homo sapiens; identical to SEQ ID NO: 8687
  chr7:157642963-157643166
  hypo

SEQ ID NO: 32161 - DNA, 145 bp, Homo sapiens; identical to SEQ ID NO: 12948
  chr7:157744287-157744432
  hypo

SEQ ID NO: 32162 - DNA, 258 bp, Homo sapiens
  chr7:157877353-157877611
  hypo
cgcccatccacacccacgacgcccatccacacccaccacgcccatccacacccacgacactcatccacacccacgatgcccatccacacagatgcccatacactccgacactcatccacacccacgatgcccatccacacggatgcccatacactcctacaatgcccatccacacccacgatgcccatccacatccttgatgcccatccacacccatgatgcccatccacatcctcgatgcccatccacacccaccac

SEQ ID NO: 32163 - DNA, 241 bp, Homo sapiens; identical to SEQ ID NO: 12952
  chr7:157919964-157920205
  hypo

SEQ ID NO: 32164 - DNA, 394 bp, Homo sapiens; identical to SEQ ID NO: 30566
  chr7:158039908-158040302
  hypo

SEQ ID NO: 32165 - DNA, 809 bp, Homo sapiens
  chr7:158066479-158067288
  hypo
cggggagccgcagacacagggggagccgcaggcatgggggagccgcagacacagggggagccgcagacacaggaggagacacacgaggagccgcagacgcaggaggagccgcagacagacgcgggaggagccgcagacacagggggagccgcagacacagggggagctgcagacagacatgggaggagccgcagacacagggagccgcagacacagggagccgcagacacagggggagccgcagacacaggaggagacacacgaggagccgcaggcacagggggagccgcagacacagggggagctgcagacagacatgggaggagccgcagacacggggagccgcagacacagggagccgcagacacagggggagccgcagacacaggaggagacacacgaggagccgcagacacagggggagccgcagacagacatgggaggagccacagacacgggagccgcagacacggggagccgcagacacagggggagacgcagacacaggaggagacacacaaggagccgcagccacagggggagccgcagacgcgggagagccacagacacagggggagccgcagacacagggggagccgcaggcacagggggagccacaggcacagggggagccgcagacagacatgggaggagccgcagacacggggagccgcagacacaggaggagacacacgaggagccgcaggcacagggggagccacaggcacgggggagccgcaggcacagggggagccacagacaccctcacactccgggatctagcgtgtgtggacgagcccgaggcgctc

SEQ ID NO: 32166 - DNA, 407 bp, Homo sapiens; identical to SEQ ID NO: 28171
  chr7:158301266-158301673
  hypo

SEQ ID NO: 32167 - DNA, 340 bp, Homo sapiens; identical to SEQ ID NO: 14241
  chr7:158552753-158553093
  hypo

SEQ ID NO: 32168 - DNA, 527 bp, Homo sapiens
  chr7:1615030-1615557
  hypo
cgtttaacaccacacagtaaacacaaaggaaacccaccgttgctgggccgccttccatcatggcgcagaattgagagtcgagcacgtcgctttgttttctgccaaacttagccaagctccggtcttaaaatcttttcgttcctagcgtgaggctttctgtctttgttgcaaatattgaaacctgccacgtcacctcttgcactatttgtttagttctttaagaaatgaaaccttaatccatgtacaatttctaaaagcctttatttcaatattttaagaagttatttcccctggcaaagaagccgccctgttgcccggtgtggagctcgatgacaaagctcatcagcctgagtggaagctcattcattattgctgcgttttcgctcttccaggagagaacggagagccagtgtgctgtgtgtcacggtccctggatgaacgtttgtggaactggattgaattaaacaagacgtgcaaagcaagtggttcacgaggtagtgtgggggtgtagggatggggactgaccc

SEQ ID NO: 32169 - DNA, 714 bp, Homo sapiens; identical to SEQ ID NO: 24612
  chr7:1641685-1642399
  hypo

SEQ ID NO: 32170 - DNA, 509 bp, Homo sapiens
  chr7:1714474-1714983
  hypo
cgggcgggaaacatccttcggcccgggccagcccagccatcaccaggtccactgtgtttgctagagcccccaattcaatctctgaattttaaagatagggacactgaggcgcagacagggcagtggccgcaagccactgaggcttgcaggcagtggtatctgggctcagccctgctcccatgctgggctccccacacctcatatccgggctcagctgggagagtgccctggccttaccgacggggacccggcagcccacggcgtggaggtgaaccagcttgtctgggaagccacattccacccctgtgcacccccaggccctctgtggcccactaccccctctaggaccccaccccacagaagcgcatctctctgctgtccgccccactccagtggtaacttctgtcagagggcttgtcacagagtgctgaccgcgctgagagcttctcaccagcgctggacatgtggccaggtggcggccgagggctcgggggcgggggtctgtccac

SEQ ID NO: 32171 - DNA, 306 bp, Homo sapiens
  chr7:1733131-1733437
  hypo
cgatgtgtggtgtggggcgtgacccacttcctggtgcaagaacacatacacgcctgtggacgtagccttgctgggtgtgtgcacatctgcagaggggtcggtgtacaccgctgtgtgaacacctccggcggtgcccagtccgtgtgaacacatgcaggtgagcacagacacatgcgtgcatgccctctgtgtgtctacagacagctgtgtgcgccacactcaccctcccgctcgtccccatggcaaccccagagcaggtgtctgggagaccctgatcagtgctgacagacacggggtgcgggacac

SEQ ID NO: 32172 - DNA, 1036 bp, Homo sapiens; identical to SEQ ID NO: 27226
  chr7:19146849-19147885
  hyper

SEQ ID NO: 32173 - DNA, 989 bp, Homo sapiens; identical to SEQ ID NO: 30579
  chr7:19156850-19157839
  binary

SEQ ID NO: 32174 - DNA, 171 bp, Homo sapiens; identical to SEQ ID NO: 14248
  chr7:2006407-2006578
  hypo

SEQ ID NO: 32175 - DNA, 323 bp, Homo sapiens
  chr7:20816239-20816562
  hyper
cgcggcattccagcgcttcccagctttccggaccccggagagagggggtgggggtgtgggctcacatcgccggctggcttgagggaggagagtggtggcggctccggaggtggacgtgtcaattatatcctggagctccgggaagccagattgcttctaccggcggctgcaggggcttgcaagcgaagataggcggccctccttccttccccactgtgggggattggggtcagtggagcccgtggatttagccacgaggggacatgactggagccctgtcacgcgcaggtgtgcgtctccgagagctctttcaatataagtgc

SEQ ID NO: 32176 - DNA, 824 bp, Homo sapiens
  chr7:20823201-20824025
  hyper
cggttccacctcagggaacaaagaaaaagaggcagactgacattgggagatctaaactctacaaactctgggtctcgggctgccaaaagtcacccccaccaagccccgacagcctgagtaggacgtccggcgatgcccaggggcctggcagggtgctccgaagccgaggtgctcagtacagcggctctggaaccaagcagccgtctgcccgggcggcgctgttctgcccaggcctccagcctctccctctccaccgctccgctcaggcttgtcagccgagccgctcctgcccgcgcgaggcccgctgtctaccaggcactggattagtccagctctacctccagtggccgttccctctaaaagttacgcccttcacaacctggggggtggaggaggggaggacaaggaagagagaacgagaaataaaggcccgacgaggcgcgggttccggctgcaacgggttcaggcagcgttacccgtggaaagggaaagccagggcccgggacagcgatgcgtgttacttacttgtccatatcccctttacaaagttaagtcacagaaggaagaaggaagaggggcagaaacagaaagagacagagagcgagtcggatgcaatagggaaaggctggagttgaagtccggacagacagggcccaagaggacttggtgggaggaggtcggggagaggggcgggcgcagggtgggcgtcactctaggccgttgcggtgcccgggctcggggggctgcagcagctctggggagtggcagggcgggctgcccgcggcgctgtgctcgctgtcggtgtcgctgcccttcttgccgcc

SEQ ID NO: 32177 - DNA, 806 bp, Homo sapiens
  chr7:20830567-20831373
  hyper
cgcgtacctctgcagggtacgtttaaacccggctcttagcatctcggtttctagagcgttggcagggacatgcagctctggaagctgaccggcgggtgcccgcgggagacagagcgaacgcagtgctggcactgcgtccctggcctgcgcctctcccagaatgggaagacgacccccaaccccttgactagtgtgcggggtcctcgcacgcggacgtgttggctactaaataaagcgtgaagagggatcgctgggtagctgagcgccgccggcggccgccgggagcagcgagctgagccaggttgggtgggggtgtttcctcgtcgagagctctctggtcaaagtttccttcccgctggaaaacaaaaacaaaaacaaaaaacaaaccaaaaccaaaacaaacaaaaaaaaaaaacctggctaggcgtggacctgtgaattcctgaggggtgccccttagcagtccatttctctttcgtgtggttttactaagaagttacctaacatttcctgggaagagaggtaatacaagcccctcgctggtggcagattgttgagccgtaggtgggaagagatcagtcggccagagcccagagagggctgtattttcctgattggaaaatgggaacttccacgctgaacaatagcctctattagtgaggttatttggttccaaactgtccggccacatttatagccgagtccttacttttctggtagtgcttaattggatgcatttgttgaccacaacgaagcaatagtgactcttgatctactggcacaggagcttcttggtgatgaaaagc

SEQ ID NO: 32178 - DNA, 842 bp, Homo sapiens
  chr7:2163000-2163842
  hypo
cgctacagcttggagacattgcgggagggctcccagcaagcgaaactgggctggggtgcaggacggagagagggcgctggtgaggccctggtcctgtgtgtgagggcggctgacacccggtgggctctgtttgcgcttgagctggtgacggtagggtttccttccctgtcaagcaggagagcaccccagtccacccagggagcacccaggaggagccagccccgccaagggcacgcatgggaggcgtcaatccgctggagggcagcagccctcaagcgaggactcacggggacatgcgataccaggaagcgagtcggaggcaattaagcctgtttcagagtgcacttcgcaggcggcgctgaatcgatagatcctccggcggcgtggtgctgcaggtgaggaatcagtcaggtaaatgcctcccaatctgttcctgctgtgcaaagaatcagcgctgtttaccactcaagccagaaataaataaataaagctgccaattagccagcgcccttttccgctctggcaagggctttttagcttctccaaatacaccagagtcctgcaaggctgcacacaagcaaaggcagcccaggcagcaaggggcgggggcttaggccccgggggcaagaactctgcttcctgggaagccccctgtagccaggtcaggctcctcctctagacggggaagccgggcaaacacctccaggagcaaggcgaaggctctcagtacccccagtacagatgcagccgggagcccccagctctccacaggtcagaggccacgccacgcccctgctcaactcgcagagcagcaaggcaggaggggcaggccatcgggcagc

SEQ ID NO: 32179 - DNA, 419 bp, Homo sapiens
  chr7:2196807-2197226
  hypo
cgtcttcaaaagagtgctaagtaatacaatattttaagaatagaaatcaatagtaagaaggcgatgggaacactgttgtggggaggcctggctccactgaccactccagcagtgcaggtcaccgtgatcaggaagcggtaatgatggaacaaatcacagcactcagagggctcctccccttcatgttaccatttgagctccccaccatgcaagtccacacctcacatgcgtaagaacccgcaaaaactaagagactgagaagagaaaagcagcacagcatgctcccgacacggaagacgctgcccatctgggaggagtgggagagccggtcccctacagtctctgctcagtgcagcacaggcccagggccctgggacacagggcagagggtgtctgaaagaggagggcagacacctccc

SEQ ID NO: 32180 - DNA, 592 bp, Homo sapiens; identical to SEQ ID NO: 25860
  chr7:2232864-2233456
  hypo

SEQ ID NO: 32181 - DNA, 311 bp, Homo sapiens
  chr7:2237982-2238293
  hypo
cgcctttgcttctgccagccactcacgctctccacaggctgcagccaggtacacaccccccttcaagcaacaaaaccactgcctgagcacctggcctgctctaagcccagggctgagacaagggggagccagccacacacaacaccaggagcgctggcatcgccggagcaaggagcccgtgatggccgtccacccgggacagcaatcgcgctctgcggcacgaggctttcaacagaggcgagtgcttcctgggggtcaagagcatggaacacacacttcaggccccctctccaggctgcaggccaacaggc

SEQ ID NO: 32182 - DNA, 540 bp, Homo sapiens; identical to SEQ ID NO: 30580
  chr7:23287221-23287761
  hyper

SEQ ID NO: 32183 - DNA, 242 bp, Homo sapiens; identical to SEQ ID NO: 11853
  chr7:2448743-2448985
  hypo

SEQ ID NO: 32184 - DNA, 1296 bp, Homo sapiens; identical to SEQ ID NO: 25866
  chr7:2472811-2474107
  hypo

SEQ ID NO: 32185 - DNA, 773 bp, Homo sapiens
  chr7:2566056-2566829
  hypo
cgggccccgccaggactccgagagcacaggaagggacgtgtggctgccgagaggggcgcagtggggtggggcactgttctaaacagggaggccaggcagcactccactgtcagccagggggggtcactcctgccatgagctcaaagctgtttatggcgggttgttttcctgccgtctcttctcttcactgtgatgcgcctactgtgcgtattttgtccacgctggcaatgcagccagccccagctggtccccagtttgggaccttattcctggggtgtgcagggcaggtgtccttccaggtccaagggaggccagggcagggccgttgcctcactcagggctgtgtggccagcctggggcggggcccagggatgtcgggcccctcccggcatcactccgcccgctccccacaggtgacgctgagctacggtatgtttgaaaacaagcggaacgccgtccacgtgaaggggcccttctcggtggaggccgacccatccaggtaaggaaaccccggcccagatgggcttgcgtagggtggcctaggggcgtcagggggcctcgtggagctgcagcagggtctctctaagcggcatgactctacatagaggtgtcccccggagtcctgcttgctcggggtggggccgccagtgttgtgggactgcaaatgggagctcagcacctgcctgccacccacgcagaccagcccctgctctgttcccacaggttccgctccatccactgccacctgtacccggacacaccctggtgtcccc

SEQ ID NO: 32186 - DNA, 444 bp, Homo sapiens; identical to SEQ ID NO: 25871
  chr7:26192423-26192867
  hyper

SEQ ID NO: 32187 - DNA, 1756 bp, Homo sapiens; identical to SEQ ID NO: 25873
  chr7:27135176-27136932
  binary

SEQ ID NO: 32188 - DNA, 1116 bp, Homo sapiens; identical to SEQ ID NO: 29388
  chr7:27190160-27191276
  hyper

SEQ ID NO: 32189 - DNA, 1383 bp, Homo sapiens; identical to SEQ ID NO: 29389
  chr7:27195477-27196860
  hyper

SEQ ID NO: 32190 - DNA, 2174 bp, Homo sapiens; identical to SEQ ID NO: 29390
  chr7:27203938-27206112
  hyper

SEQ ID NO: 32191 - DNA, 2039 bp, Homo sapiens; identical to SEQ ID NO: 30588
  chr7:27212356-27214395
  binary

SEQ ID NO: 32192 - DNA, 514 bp, Homo sapiens; identical to SEQ ID NO: 25875
  chr7:27219316-27219830
  hyper

SEQ ID NO: 32193 - DNA, 1785 bp, Homo sapiens
  chr7:27223010-27224795
  binary
cgcctgcggacatttcaccttccagcacctgggctgccccttcccaaggcagtaaaggcggctccagtcccagtctttcccggctgcggccaagactgggcagtccttaacatctggggcggctgccgggtctttgtcagcctgagtcctggccaccagcttctgcctccccggccagccttccggctccgccgaggtggggaggtggcggcggaagccccctaccctaggccttcgctgagcaccacggccacacggccatcctgcacacggcagagcagcggctctatcttaggtagggtgaagggaaagggggcttcccgaagctgcgggcaggctctacttgctccccctttaaaaaaaaaaaaaaaaaaaaaaaaaagacccacaagacaaaaaaaaaatcgcttttgacagattgaataacaattgtgaataacatgcagttgggcagaaggaggcacgtaattgccaccacgccagaggaaaatggcttcctttggacaaaaaggccaactttgggttaatttgttcttttaatatattgctagagctaagcgggctactttatctgttaaacgcgctcctagcgccgtcgttaaacagcgacgcctttgaatcccggccgggactggagtcccggcgcaacacatggcttttataaaaatctccggattacctcgctatcaaaagctcccgaagcccttgcagggggaatttacaggcgcccacctccggctccccagcctggagctggccccgagcggggtcgagctgctgggcttgggagctgagaagggaaaaaagggaaaaggggagttgtttttttttgcaggcatgccttggccggtgggtatttcacggccaatttcagcactcgccacgtgatcccgccttttataacaaagttttgttgggggaaacctaaaggcccttcataaaccttatatgcttataaaacagcatataaaaatttaacagcggtgctgcgctagatttccaactcccctttcataaagcgcagggcgctgcctttatacgtactggagccgccggccttgtcctcagtgtggccggaagacgactcggggctgctgctgctctcggggcgccgccgccgctctttctcctctgctgccgccgccgtctcccggcagccgccgccgccgccgctgtccgaacttgaagttgccggcgcgcccgttgcagccgccgccgccgccgcggaggtcgccgtggccgccgggggccccttctcggcgctcttgtccccggggtagtcggaggaggcgaggttttccggggtgccgtaggctgtctcgaaaaactggtcgaaagcctgtggcaggacgccgttcctgcccacggtgctatagaaattggacgagactgcgggggtggggtggtggtagacgttggccgagctcttggccagcacgtcgccaggcacgccggccgcgctgggcgcctgcaggcagtctctgtgcacgagctcctccgcggagtagcagtgggccagattgccgcgggggtgccatttagtggcgggctcaatggcgtactctctgaaggtcacttcgcgcacgggttggacctggggcaggttggaggagtaggagtatgtcattgggcgcgaagacggggtctggggcagaaaagaagggaggctggagaaatctggacccgagacgtagtaagtacaacttggcaaatacatgttagaggagcagggaccacgctcatcaaaatccattattgggctaccttgggctctccgcagtagcc

SEQ ID NO: 32194 - DNA, 583 bp, Homo sapiens
  chr7:27237765-27238348
  hyper
cgagttctgaagcgtttcttcaagttgccttcttgctctatttttaatccattaactagtggttttcagtttgttgatgacttttttctctttaaccctcctgttctggaaccagattgtgacctgccgctcagagagattcgtcgtggctgatatccgcctccgtttgtccttagtaatgaatttattcgtggcgtattcccgttcaagttcttttaattgcaccttggtataaggcacgcgcttctttctccccctcctataggagctggcatccgagggatgggagaccacgtctagaagacaagggagaaggcaagttacacagggatcggaccccagccagggcataggcgacagctcgatctgagccacccgccttgcagcgcccggctgctctttgccacccgctgtacaatcctgtcttctgctaaagcctagagggtcagtggggaaggtagttagttctgaactgaaatgaaatcacccagggctccagtgacttccccaacccggccatcctgcaggagcagcgcgtaggcagcctcgagtgatagcctggtccaacggcccacaccttagc

SEQ ID NO: 32195 - DNA, 959 bp, Homo sapiens
  chr7:27238984-27239943
  hyper
cggctgcgtagccctggtggtagaaggcgaactccttagcgcgggagctgaactcctcggcagctgggccggcggtatccatgtacttgtccgcgaaggcggcggcggcggcggccgaggcgggctgcgcgcacgacttgatggcgttggggtgcgggcccatgcgggcgcacgggtagtagccgctgccgaagtagccatagggcagcgccgcgggccccgacgagctctgcgccgctgccgagcaggggctgcattgcttggcggcctctgcgcccgccgggcccgccgggccgggacctcccgaggacgacgcggcggcggcggcggcggctgcagcggcagccgcggcagcagcggcggcagccgacgggggcgcctccccgggggcgctgctgtaggcggacgcggctcctggcgccaagggcgccgggtgcgccatcaggttgcggcactggttggccgcggccgccgccgcagccgcggccgccgccgccaccgagaagttgccccctgccgccgcagccgccgggtgggggaagcccccgcccccggccccggcagccgccgccgctgcagccgctgctgcagccgccgccgccccttccatgttcttgttgagctcgtcggccaccaggccgccgccgttgtcgtagagaaacatgacggtgggctcgatccagcgggggtggaggagcacggaggctgtcatagcccgagccgcatggagaagaccccagtggcgctgttttaaaaagcccccaagaagtgaagagcgcgcggcgcggggccggggcccgagcgaggggggcggatcgcgccccgcggggtcgcgccaggcggccgcccattggcccggcccccccgctccgcccacggcgtatgcaaagcgggcggctccgactccagctctgcacggtgcacccgtcgtccccgccgcggcccgcgccgtccccagc

SEQ ID NO: 32196 - DNA, 845 bp, Homo sapiens; identical to SEQ ID NO: 30591
  chr7:27244536-27245381
  hyper

SEQ ID NO: 32197 - DNA, 984 bp, Homo sapiens; identical to SEQ ID NO: 30593
  chr7:27264586-27265570
  hyper

SEQ ID NO: 32198 - DNA, 126 bp, Homo sapiens; identical to SEQ ID NO: 7538
  chr7:27831654-27831780
  hypo

SEQ ID NO: 32199 - DNA, 156 bp, Homo sapiens; identical to SEQ ID NO: 14273
  chr7:29847067-29847223
  hyper

SEQ ID NO: 32200 - DNA, 94 bp, Homo sapiens; identical to SEQ ID NO: 14274
  chr7:30205901-30205995
  hypo

SEQ ID NO: 32201 - DNA, 123 bp, Homo sapiens; identical to SEQ ID NO: 14275
  chr7:30675617-30675740
  hypo

SEQ ID NO: 32202 - DNA, 176 bp, Homo sapiens
  chr7:31528326-31528502
  hyper
cgaaccgtgaaaggatgtgggctggacatactaactccaaggagcccgggtatcattgtagtccatgtcaatggcgccccctggtgttcgggggcgcagcagccctgtgcgagtcctgcagcaggccctcctggcccatccactcggtataccccacttaacttttttgcgggggc

SEQ ID NO: 32203 - DNA, 425 bp, Homo sapiens; identical to SEQ ID NO: 30596
  chr7:3283455-3283880
  hypo

SEQ ID NO: 32204 - DNA, 1809 bp, Homo sapiens; identical to SEQ ID NO: 22945
  chr7:37487365-37489174
  binary

SEQ ID NO: 32205 - DNA, 259 bp, Homo sapiens; identical to SEQ ID NO: 14278
  chr7:42237185-42237444
  hypo

SEQ ID NO: 32206 - DNA, 415 bp, Homo sapiens
  chr7:42267546-42267961
  hyper
cgctctttctctgcgctttcctgtcgagttcccttcaggttctggtttcctccgacggtggcaagggatgtttttcacgcctttcaccacttttgcccgcgcctgcgtcccctgcccgaggtcccaggccgcggcggcggcgcggtgggttcattagcgggcgcgccgggcccgcgcagcgctgtctgcagccgcgtcgccgcatccatcatcattacatcagcgcggggaagtccacgccgagttctcccggccccggcgcgccccagtcagcgcgccagcaaacagaacatgctggattgctcagagacggctctgggtgtctgggggcagaaggggtgctcccaggcccggctttgatccgcatttctgaagctggctttgggagacaatgcatctccgccagccaggccgc

SEQ ID NO: 32207 - DNA, 228 bp, Homo sapiens
  chr7:44430996-44431224
  hypo
cgatgtattaatacgtgctgtaccggaaggtaagactaagacaatccagatacaccacaaggtaaggttcctccaagagacaaaatgagaagaaaatatcgatcagcgatcttcagggggaggaggcggtccgtgtttacagaacaaaaataaggagactgtgcccagcagatgacccctccccactgactcaaggctgcactgcgtccgcgtgccctgctgtactgc

SEQ ID NO: 32208 - DNA, 668 bp, Homo sapiens
  chr7:4751238-4751906
  hypo
cggcattgtgtggatgggcggtagtgagaataattactaagggcgtcataccctctcgtatctgcatcacccataaggggtgggcagtggtgctgccgtgtcttgtcaggaggccagctctgtgtcacccaccaggctgggctcagccacaagtcggcaacgtagtgcctccagggcagatgccacggaccgtagagaagcaacgcaaggtcagagagaaaagattgcggccggccggtgtcaaggcgggggacctgtgagctgggcctggagctgaggcagaacttgatggactatgactcaaggttgagatggggcagggactccgggggaggggcagagggcaggtgccgccgagcaggagggaggacgcggcaggtcacagagcccaccaagtccgaagctggaagttcagattctttgatattcagaggtggatcatctgtgcttttttttttttatcagtctctcactttttatccatcatctaattgtgacagcttatttgcctttataccataagatggggagtagggttgagatgaaatccaagcatcgtttcccttccccgatggtcgcctccctggggtgagacgttcgacgtgtcagacttcaccaagagcatctcccgcctcggtgcagtaatggacttggaaacgatttactcc

SEQ ID NO: 32209 - DNA, 154 bp, Homo sapiens
  chr7:497757-497911
  hypo
cgacaactgttcctattcataccgcctggcctcaggtccacggctgcggccacagagcccatccaggaattctgctgctctcagtttacatttaaaataaatgtttccttaactcgcatctcatggccggcggtgaacggcaggaattgtgagc

SEQ ID NO: 32210 - DNA, 335 bp, Homo sapiens; identical to SEQ ID NO: 29400
  chr7:50251388-50251723
  hypo

SEQ ID NO: 32211 - DNA, 813 bp, Homo sapiens; identical to SEQ ID NO: 27246
  chr7:50344027-50344840
  binary

SEQ ID NO: 32212 - DNA, 561 bp, Homo sapiens
  chr7:5262406-5262967
  hypo
cgagcatttctagcccggctgggtcaccgggtaagatctgggcgtcggtcttgtcatgggaattgaagagcactttcagaaaagcaaattgggtttttgtttgcgatcccaccagctagcgtgagagttgtgaagagctcacgcaaccaggtgggccctccagtgcccggcagctcccagcctgctgtaagggacggggcggcgacgtcatgggtagcacaccctcccctttaaaggccacgctctgagaacctgttccagctctccagctccgcctccaccctcagcaaatggcattggccccttcttttaacccagaagccgcagcctggagttctcttgtcttcctccctccaggctgcaaagcttccctcatcggtgcttacatgcctcctgtggcgcctgctttggaggcaggactgtccctccctcgtcggacagtagagcgggggaggcctcgggctctggagcccgtgcctcagattggagccctagggagcactttcagtcgcatggccgtggtcggcgggaccccacctcaggtctgtggctccacgtctc

SEQ ID NO: 32213 - DNA, 133 bp, Homo sapiens
  chr7:55506201-55506334
  hypo
cggtaaccatgacaccaaagtcaacactcggagaaagtgaagaggctggcaggtgaataagtgtggacagggcgcctcacagagcaggacaggcaaaggccccggggaagcacttctcactcgctgcagaatc

SEQ ID NO: 32214 - DNA, 427 bp, Homo sapiens
  chr7:57247618-57248045
  hypo
cgtcggttgtccaaatcggcagggaagctccagaggccacccagctccttgggctcccgcgacggactctccttggggtacagcatcccgccttgcagtgccagcacacagcaacagcggcccaaacgccgtgcaggccacacctgtccactaggtcacgctttccactccactgcttggccaccgtctgcagggctaagagcagtgcaggaggaggctgcggacaggtcgcatcaggtacctgagacgatccgcgccatctttgctgagggcgagtgccaggcctagaggggcgggatgggcctggcgctgcccagtggggcctgtggctggaaccccgggctaggcctttggggaagcgggaccctcactctcagccccagccaagaagggcaaggtcggttccccaccccagcacagtctggac

SEQ ID NO: 32215 - DNA, 122 bp, Homo sapiens; identical to SEQ ID NO: 14290
  chr7:6034958-6035080
  hypo

SEQ ID NO: 32216 - DNA, 320 bp, Homo sapiens
  chr7:6060523-6060843
  hypo
cgagctcttacctataaaactgctaacacctgagacttaacgggaaaagataaacacagctgctgatcttttggttgtacaacgtctggacaagaacgctttttctggattaattccattgatgccttgtccttgaagtcaggatgtaccttgccagtaaggtacacctttttaaagttcttcaatgctgcaggcactcagagccccacgagttaacaccaagggcgtcaaagtcgtctacttgcccccaggctcattacacacagtactctatgaaattgtcagtgctatgaaagagaaccctggctgggcatggtggc

SEQ ID NO: 32217 - DNA, 82 bp, Homo sapiens
  chr7:6124618-6124700
  hypo
cgattacaggtgcgagccaccgcacccagccaaggactcttaagtgtaactgatccaccctacttttctccctggcatgaac

SEQ ID NO: 32218 - DNA, 521 bp, Homo sapiens; identical to SEQ ID NO: 11869
  chr7:6207763-6208284
  hypo

SEQ ID NO: 32219 - DNA, 331 bp, Homo sapiens; identical to SEQ ID NO: 30614
  chr7:63652630-63652961
  hypo

SEQ ID NO: 32220 - DNA, 167 bp, Homo sapiens; identical to SEQ ID NO: 23643
  chr7:6443294-6443461
  hypo

SEQ ID NO: 32221 - DNA, 425 bp, Homo sapiens; identical to SEQ ID NO: 24649
  chr7:6443704-6444129
  hypo

SEQ ID NO: 32222 - DNA, 102 bp, Homo sapiens; identical to SEQ ID NO: 25897
  chr7:64458273-64458375
  hypo

SEQ ID NO: 32223 - DNA, 138 bp, Homo sapiens
  chr7:65037624-65037762
  binary
cgcagcgggcgaaaagccgcggcagcggggggccaaaagccggacgggcagaaagccgtggcagcggcgggcaaaaagccgcggcggcaaaaaggcgcggcggcgggggcaaaaagccgcggcggcggggaccaaaac

SEQ ID NO: 32224 - DNA, 170 bp, Homo sapiens; identical to SEQ ID NO: 24650
  chr7:6524924-6525094
  hypo

SEQ ID NO: 32225 - DNA, 253 bp, Homo sapiens; identical to SEQ ID NO: 25900
  chr7:7605160-7605413
  hypo

SEQ ID NO: 32226 - DNA, 445 bp, Homo sapiens; identical to SEQ ID NO: 25901
  chr7:7605666-7606111
  binary

SEQ ID NO: 32227 - DNA, 207 bp, Homo sapiens; identical to SEQ ID NO: 30619
  chr7:77324199-77324406
  hypo

SEQ ID NO: 32228 - DNA, 783 bp, Homo sapiens
  chr7:79083344-79084127
  binary
cggcgtggggaggccggcaggaagggcctcgagcccagtgcggacctttcttcagcctctgtgcgaccgagccgcgcgccaggctcctgtgcgaggaggacgcgctgactccctccgacctgggctccgatggagcagaaatagcgggacctggacttgtggcgcgcctggtgccacatctcgggctctgcgagcgtcctggcgcgggatcctgccgtgagaaggagttggggcgggggacccggcggggcattgcgggagaaggcctgggatccctgggagccttgtagcgtgggggagttcactgtgtagagaggtttcatgtcttcatctatatagtcacttatttgtcttaaagttctcgaaattccctcttagagaaggagaaagttagagaactggaggctgcgtaccctgattacgcagaagggaagcagcctcgcattccccggggcaggcccccgcccgcgcgtcccgccagtaggggaatttagcggacggctgcggttgtctggtgaaaggctatccaaggataaggggcttcacttttcccaagtaggggaaagagaaggggtctacagggctaggggtggagggagcggatgcagtgagcagcctccgcagagaaattgacaatttaaccagggacctgcggcagagacaaggcggagacactcccttgcccaggaaagccgccagagtccggcttgtacctggggaagaatccttaagacggtctggcccaacactcctttgctcacagagaaaggggagaagactccc

SEQ ID NO: 32229 - DNA, 245 bp, Homo sapiens; identical to SEQ ID NO: 14304
  chr7:818254-818499
  hypo

SEQ ID NO: 32230 - DNA, 314 bp, Homo sapiens; identical to SEQ ID NO: 14305
  chr7:8480006-8480320
  hyper

SEQ ID NO: 32231 - DNA, 926 bp, Homo sapiens; identical to SEQ ID NO: 25902
  chr7:8483083-8484009
  binary

SEQ ID NO: 32232 - DNA, 1117 bp, Homo sapiens; identical to SEQ ID NO: 23367
  chr7:87229392-87230509
  hyper

SEQ ID NO: 32233 - DNA, 300 bp, Homo sapiens; identical to SEQ ID NO: 29424
  chr7:915072-915372
  hypo

SEQ ID NO: 32234 - DNA, 747 bp, Homo sapiens
  chr7:97361020-97361767
  hyper
cgtctcgagggacggaaaagttaccgaagtccaaggaatgagtcactttgctcaaatttgatgagtaatatcaggtgtcatgaaacccagtttcgaaggagaggggagggggcgtcagatctgcagacggaagcaggccgctccggattggatggcgagacctcgattttcctaaaattgcgtcatttagaacccaattgggtccagatgttatgggcatcgacgagttaccgtctcggaaactctcaatcacgcaagcgaaaggagaggaggcggctaattaaatattgagcagaaagtcgcgtggggagaatgtcacgtgggtctggaggctcaaggaggctgggataaataccgcaaggcactgagcaggcgaaagagcgcgctcggacctccttcccggcggcagctaccgagagtgcggagcgaccagcgtgcgctcggaggaaccagagaaactcagcaccccgcgggactgtccgtcgcagtaagtgcccgcgcggtgctggccgcggctgcccgggtcaccccgccccgcatctgtccgaggtggccgcgctgggggcgccgctgcggcgagggacagtggggagactggcttcccaaacgccaacgcccctctttgtcttccacctgcagagtttcctggtttgaaggtgtgggttggtgggttagggggctgggggagttgggattcagggagaagagggttggagaatctttgggacgcgattctctcgcctaacc

SEQ ID NO: 32235 - DNA, 129 bp, Homo sapiens; identical to SEQ ID NO: 29430
  chr7:97680605-97680734
  hyper

SEQ ID NO: 32236 - DNA, 88 bp, Homo sapiens
  chr7:97797696-97797784
  hypo
cgaggccccgggcttcgcggaggcgtggcggcgtcagctgccccagtctgcatgtcttctatttcattagcagaagcgggggtgttgc

SEQ ID NO: 32237 - DNA, 62 bp, Homo sapiens
  chr7:98966395-98966457
  hypo
cgcagccagaagccctcagtgctttatttcaacgctggggccttttgagtttgtgacgctcc

SEQ ID NO: 32238 - DNA, 287 bp, Homo sapiens
  chr7:98991481-98991768
  hypo
cgcatgccactgtccccaaggcagaactgacttctaagcccactacaccccctcggtacttctcactaaagcccgctccccaagaagtctgggagcgcctggtggacagggtgggcctgagcccagcgccagcacaggttgaattcataagctcctcttcctctttgcagccagatctcggtgctcagcggcggcaaggccaagtgctcgcagttctgcaccactggcatggatggcggcatgagtatctgggatgtgaaggtgaggcttgcccctcctggcttccc

SEQ ID NO: 32239 - DNA, 448 bp, Homo sapiens; identical to SEQ ID NO: 8738
  chr8:100796506-100796954
  hypo

SEQ ID NO: 32240 - DNA, 144 bp, Homo sapiens; identical to SEQ ID NO: 30627
  chr8:101821988-101822132
  hyper

SEQ ID NO: 32241 - DNA, 216 bp, Homo sapiens
  chr8:102039330-102039546
  hypo
cgcttgctacatgcacagatctccttgaccctgcagccaatgcctcggtcagccagtgcacctgtactgtctctcctcttgggatagggtccctctccatcaggtacaatatatgggaaatcgaggggtggcctttgtcccagctgtcttagtcaccgcattcttcaggtcactaaccgccccattggagagggttcacgcagctcacgtgtaaac

SEQ ID NO: 32242 - DNA, 233 bp, Homo sapiens; identical to SEQ ID NO: 13025
  chr8:1078113-1078346
  hypo

SEQ ID NO: 32243 - DNA, 403 bp, Homo sapiens
  chr8:108509353-108509756
  hyper
cgtcttgcaattgcaaacactgcccccctggagcaaaaggtaaatacacaaatgctcccctaaggaactttaagttagctgcagtgcaagaaaggaaaaaggtccgtgctattagaaactgaaagcaatcacttactttttgcagccactgagtataattttccatcacatgttccagatgttgaagtttctgggaagagaaatccggttccacgtgtggagcatctctctgcagagcgtttgtgttgtactggtctgtcgtactctcacgacagttgccatcgtgttctggaagaatgaaagtgtaggcacattgcccatgttgaatccggttatatcttctcccactgttttctggacttcggcgctgattgctgcaccctatgtgagtcagaatggcagc

SEQ ID NO: 32244 - DNA, 467 bp, Homo sapiens; identical to SEQ ID NO: 30632
  chr8:1132651-1133118
  hypo

SEQ ID NO: 32245 - DNA, 759 bp, Homo sapiens
  chr8:11537483-11538242
  hyper
cgcatgatgagaagaaagaaagattgggagaagttaatcagctcaaagtcacatcgccggggtctcctgccagggggcttggaccagttgctaaaggacttcccgccggagaaggtcttcccaagagagattcccacccagagcgcgcagcccgcggggaaaacataacgcgcgcctgtaaatgacgccgctcccacctaggccgctctggggccgcttaacgtccggaatgtcccgacccccggctcaatctttggtgcaaagcctgagtgggcaggcgggagaccaggcggtgccggtggagcaggctacttcagcagcgcgaggctcggaagatccccgcggacaggcgcgacaacgggccctggagccggggaatctctgcaagtaactaaccaggcccctcggattcattgccactttcccgccctcggcccacgaggctgaggagctccctctcatcgcctctccgttcctggcaaggccgaagccggtttgctttggatgcatttcgatcaatctggcgccacatgggccaggtcacctcggacgggtgtcgcgccgacgtccttcgtggtcgcacgctggtgggccaggaagcccaggctatgcccagccgggtccgagcggcggtcggtggcgtgacctcttgccacgcctggcgctgctgggaacgtgtctcgggtcgccctttgcgtcagagaccccccccttggggagaccggaatcctccagccgctgcgcacggataccctgggc

SEQ ID NO: 32246 - DNA, 875 bp, Homo sapiens; identical to SEQ ID NO: 28215
  chr8:11561282-11562157
  hyper

SEQ ID NO: 32247 - DNA, 638 bp, Homo sapiens; identical to SEQ ID NO: 23377
  chr8:124172800-124173438
  hyper

SEQ ID NO: 32248 - DNA, 340 bp, Homo sapiens; identical to SEQ ID NO: 23645
  chr8:126044399-126044739
  hypo

SEQ ID NO: 32249 - DNA, 997 bp, Homo sapiens; identical to SEQ ID NO: 24662
  chr8:128871653-128872650
  hypo

SEQ ID NO: 32250 - DNA, 617 bp, Homo sapiens; identical to SEQ ID NO: 25915
  chr8:128888848-128889465
  hypo

SEQ ID NO: 32251 - DNA, 355 bp, Homo sapiens
  chr8:128931048-128931403
  hypo
cgctgcattcttttctaaccacccaagagataagttgaacccccactcgtagcaacctggccacttgtctgtttagtcagccctggaatacctccactgacggggcactcactaccactgaaagatggtgtgcagaattctaatgttcttcctctcgcggggtcgtgggggctttcttccagttctctgggttctgatcgttggggctgtcctgacacccttcttcagatgaccgctgtcaggttggtgaaggcagtgcgcgttgggccttccctccctagagatgtgattgcacgtcgggtaccaggagcctggccagccctcagcttctgctaaccagggagcagtgaagccc

SEQ ID NO: 32252 - DNA, 447 bp, Homo sapiens
  chr8:140963096-140963543
  hypo
cggactgatgtagtggttgcacaccaaccagtaagtgaacaccggctccgaaggcctctttggtatgcaccaaaacacatggcatgcggcaagaggaggcgcggcagggagggagccgcacccgccttacagccaaacaaatgaactataaaagggtgaggtgagtcaaccgaggacaatgccctgccaaacagagtgcctcacctgctcacggcttggagtcagccagacccaggcgcgcacatccccaccgccacctccccacctgtgacacaggcctggttacgccacctctctgagctccatttcttcctcctaagaagttggagaatcaccctgacacctcacagaattggtatgggaaggaacaaagcctctgccaacgctcctcacacaaagccctactcctataggggcttgatgcctgcaggccccaccgttctcttc

SEQ ID NO: 32253 - DNA, 244 bp, Homo sapiens
  chr8:141159751-141159995
  hypo
cgattagtgacggcttcaattcctcatttgtgaaatgaggataaaatctctaccacatggggctgctgtctgactcgaatgtacgtgagtcatcatccacggttccaggcaaatatttactaatccccttctcatctccttgaaaggtctgctcgccttgacgcagcacatgaagtacgagtgcgagcagtggagcctacatgaggtggctctctgtatatcatgcatacatacatgcatgtac

SEQ ID NO: 32254 - DNA, 366 bp, Homo sapiens
  chr8:142242748-142243114
  hypo
cgggaacacagacattcagtggctcccaggtgagcgctcaccagctgcaacgggaacacagacattcagtggctcaacacagacattcagtggctcccaggtgagcactcacaagctgcaacgggaacacacacactcagtggctcccaggtgagcgctcgcgagctgcaacgggaacacacgcactcaatggctcccgggtgaacgctcacgaccagcttgggctggactggcgtctcctttcagtggttgccactttccatggtgtagatgctaccaccccgcccaatctcaagctgctgaggtgacgtcgctgaacaggagtggagaggagcagcagccagcgctgagcggcacctctgcccc

SEQ ID NO: 32255 - DNA, 420 bp, Homo sapiens; identical to SEQ ID NO: 28220
  chr8:142243860-142244280
  hypo

SEQ ID NO: 32256 - DNA, 204 bp, Homo sapiens; identical to SEQ ID NO: 14326
  chr8:142248320-142248524
  hypo

SEQ ID NO: 32257 - DNA, 152 bp, Homo sapiens
  chr8:142292567-142292719
  hypo
cgctgccctccctccaggccgccgctcagggcacgccgcctccatcgctgccctctctccaggccaccactcagggcgcgctgcgctcagctcacaccaccccgtgcacagctcgtggatgcggtcctcccttttccatgaactctgcactc

SEQ ID NO: 32258 - DNA, 295 bp, Homo sapiens
  chr8:143405662-143405957
  hypo
cggctacagggtccaggaaacctgacccaagcatccctctcccagcactcctgtgcgaggtctgcacagctgccagctcggcggctcctgtactaccagccaggtggtgccgttgctgccagcagtcaggtgactgaggagtctgcgaggcctgcctggggggtgtgtcacctgaggcccatttgccctagcgccctgccctagtctgccggggccagaaccgacctgagtacggaggctctcgcatttgcttgtcattacttaagatgccgtttagaagcacctcatgtcccgc

SEQ ID NO: 32259 - DNA, 307 bp, Homo sapiens
  chr8:143558404-143558711
  hypo
cggggtctggccccggtctgactgcagccccatgggcggcaggcctgtgacgctgtagtggggcctgcaggtgacccagcagccgaggagtggtccccgtggagcgtgtgctccagcacctgcggcgagggctggcagacccgcacgcgcttctgcgtgtcctcctcctacagcacgcagtgcagcggacccctgcgcgagcagcggctgtgcaacaactctgccgtgtgcccaggtgggtgggaccttgggctggggcagcggacagccagggcagcggggggccagggcagcgggggcggtggcc

SEQ ID NO: 32260 - DNA, 277 bp, Homo sapiens
  chr8:143595530-143595807
  hypo
cgggggttcagagtggcctacaggggctgctgaccaggacaggggcctgagatggtggtagaggcgggtacgtgggcaccccgggagccagggtgggatgagatccgggcagggtggtagagcgaggggaggtgagacccacgagtcctcctctagagctggcctggagccagggtgtcggcgcagatgcgggctgcgcagatgccggctctgcggctgcagcaggcctacgacggccggaaggttgagtaaccgctctgagtcacacctgtgaggc

SEQ ID NO: 32261 - DNA, 420 bp, Homo sapiens
  chr8:144292304-144292724
  hypo
cgcaccatcccaggtggcaccttctgtaggggctggaccagacccactagcctttccggggcgggacagagggaacagcctctcagtggcgagcactaaatttaattcaatctgcgaatcaaatgtgctctgattgtccctaggtgattctcgcaataagcacttgcctgggctgggcagtttgcacctgggctgaagaggagctgggcccagagggaggcaacgtgcaagggcctgggcccctgtggaggggaggcggcaggtggaggccccttgagaatcccagtagcgcccttcctaggagcagctcctgcagcactagattcaagggcctgtagcggtagccggggcggggcgcgggggaggtagggcagcaggaaagcggggcaccagggaagcggggcgacagggaggcggggc

SEQ ID NO: 32262 - DNA, 218 bp, Homo sapiens; identical to SEQ ID NO: 25926
  chr8:144675988-144676206
  hypo

SEQ ID NO: 32263 - DNA, 163 bp, Homo sapiens
  chr8:145745116-145745279
  hypo
cgcttgtgttcttgagcacacggcaggtgctgcagtgccagccagctgcctgccaggccctgcccttgctgccacgcgaactcttccccctgctgttcaaggtggccttcatggacaagaagacagtggtactgcgcgagttggtacacacgtggcccttccc

SEQ ID NO: 32264 - DNA, 243 bp, Homo sapiens
  chr8:145758485-145758728
  hypo
cggcgcccggggttgccgtggcacctgaagatgccctctgtctggtcaccgttgagcgccagcacctcctcagagagccgtgtctgcacccagggcagctggcgctcggggtagcgctctctctgcatgcccatgacctcctgcagtgcgctgccgaacatggacgggctgaacacggcgttcttggcatgccggatctcctccacgttgggcttcttcagcccctgtgaagacagaggctcc

SEQ ID NO: 32265 - DNA, 334 bp, Homo sapiens; identical to SEQ ID NO: 23651
  chr8:23423722-23424056
  hypo

SEQ ID NO: 32266 - DNA, 995 bp, Homo sapiens; identical to SEQ ID NO: 23381
  chr8:23559353-23560348
  hyper

SEQ ID NO: 32267 - DNA, 106 bp, Homo sapiens; identical to SEQ ID NO: 9980
  chr8:26267649-26267755
  hypo

SEQ ID NO: 32268 - DNA, 304 bp, Homo sapiens
  chr8:28938419-28938723
  hypo
cgcactcgaatagcgtcttctaactccattctcttcaaatccactttccaaactacagctggagggagctttccgaaaaacaaaagtgaccatgtcccatgtcgctcgccaccttgcagctgccagggtttcccactgcagcagacagggaaacgctggcaggtcctgcatggtgtatttctgcggctcgatccgtccctcctgcaaacgctctactgattgattcattccacaaatacaatgacttggttactcttaatcactgtcagtgaaatctcttacagtcacacgtgagcatttaacc

SEQ ID NO: 32269 - DNA, 660 bp, Homo sapiens; identical to SEQ ID NO: 29465
  chr8:29387050-29387710
  hyper

SEQ ID NO: 32270 - DNA, 824 bp, Homo sapiens; identical to SEQ ID NO: 23382
  chr8:38323132-38323956
  hyper

SEQ ID NO: 32271 - DNA, 132 bp, Homo sapiens; identical to SEQ ID NO: 25935
  chr8:42147407-42147539
  hypo

SEQ ID NO: 32272 - DNA, 410 bp, Homo sapiens; identical to SEQ ID NO: 14340
  chr8:48292766-48293176
  hypo

SEQ ID NO: 32273 - DNA, 494 bp, Homo sapiens; identical to SEQ ID NO: 24686
  chr8:49468683-49469177
  binary

SEQ ID NO: 32274 - DNA, 273 bp, Homo sapiens; identical to SEQ ID NO: 29472
  chr8:49608956-49609229
  hypo

SEQ ID NO: 32275 - DNA, 256 bp, Homo sapiens; identical to SEQ ID NO: 14341
  chr8:50313987-50314243
  hypo

SEQ ID NO: 32276 - DNA, 1727 bp, Homo sapiens
  chr8:54789114-54790841
  hyper
cgggcagctgaaggtctttctgcagataacttttctcagatcgaattttttggctacattgatactcttcggctctgtccttgccagaagttcggaaggattccagcgccccacaccttgcttgattcaccctcatcccctcccctaactggagaagccgctgggtcccgcgccaggctcgcggtggcttcagagtagcaggggagcaggcggctgatccggaggccagtgtggggccggcaagcggtgactgtctccagaggagcaaaggagccgagtcttgtttttcttggatcaggtttgggacttttattctgtctgaccatttccaccacttgcctcacaagagtctctgtctcgaagcacaggaccgaagcaaaatgcctaatgaagcgtgcctgaggaaggggcaggggcttgcaagtgacttgggaagaaggactggggcgaagggagaaaggaggttacgagttcgcacgttctcacaaaaccatttgaaaacatgagctggagacgccaaattctgggacccacgaaaggctttggagctcgctcgggctcctcgaagttgggcgtgcgtcgcagaacagtgctgggcgctctctttcagcattttcggcttttttcaagcccttgcgtagggtcgggaaggccgtgggtgggctcagtcaggctttaggtcgccaggaacccggctggtcctctctcgacttcttagcgtggggtcccgccggccctgccgcccgtggccgccgaagttcccgccctcgccgagggccctcgctccggagtggggcgcagacgcggccgccggcccgcagtcccccgcaggtgccgcccaggactagctgcccggcggaggccgagcacgcttggcggcagctgagcctccaccccaagccccagccggaggggcgcgtcccctgtcctcctcccgagcgagacgaacgctcagcagctcgttccctgggcgccaagaccgatttccaagtcgcccactttccccctcgagggagctgttggcgcttctccagaagcctcctcggctcccagctccagcccctaaaataaaagcaccttgccagagagcgggggaggggagcagctgaacgaggagaatgaaaatactgggagaacgaccccattctccaggaaaaggtaatgaggggaagtgaaacagtgtgaacttactcggaaatgcaaaccgagttcaactcacccaggagcaaacaaacgacagcaagacaaatcagccaccgcactcgcggcttcccagaaagggcctcatgaatgagaatgggttgctaggtttccttccctctctcctgacaatcgcttcccacaagacttccaccgccgaaagaatacaggccgggcctggtgactgcggagtgagggaaccgcgccaggcccacgaggccgctcgcgaccgctcccgccttcaggaccctggagagcggccgccgcgcccctgggacccacgcccaacccagaacacccgcgctcgcctcccgcgcctcaccaccccagcactttattcgctgcttcccgcctccaccttcattttttttggcaaccaccgctcttgtttttcacagacagattaaattgttttttgtttggcatgagggggtgtttggattggccgagctacattccggtttgtaactacactaaacgttagtgtaccaagaaactaagagcgtctcaaagatgacagtctgaac

SEQ ID NO: 32277 - DNA, 1518 bp, Homo sapiens
  chr8:55366109-55367627
  binary
cggggccacagttggaggtggggagatctaagaaacactccacggatgagtttctgaagagggaagtggaccgggaacagcgcatttcctgcttcgcctgtgcaaatcccaggcggggccaagcgggaacggggacacggtctaagagtcgcccgctgccagggaggggttggggggcagcctcgaggggacaccgcggaaccagggagggatgcgcatggagggagtgggagaaggcgtccaagtaaaatgcatgctccggtcatcgggggtaacgcgcgtccccaaatcccctctcgctgtcgccctttttttcagtcctcacggggagaggccggcgcagcagtggagcaccgcaggggctggatcggacccgcactgcagcatctgcagggctccgacctggtgcgggcctccaaggcagggggcgcgcggcggcacagccggtggccgcgattttccgggccactccttccccccttacactcccctcccgcccgcgaccttcgacctccatcctggacccacggggtactggcccggggacaaggaggagacgttaaaggtatcaaggggcgcggcaccgccgcctagacggcgccgggacgcgaggtgcgaatcggcggcgtccggctgcgctgccctacctgggaggtgcgggaccctcggccgcgctccaccgccgcgcgccacctcgtgctggcctccgggaggcagccgcccgcgcacgatttataaatgcaaaggccttattgttgttctttgttcagggataccattgtctagtcatccacgggcagcctggagttttcccagggtttgcggcgcgcactcccctcccccgcccccacagacttgctctccagcgccaacccggatctgcctaggtgcccacgggtccttcccgatcgacttgagtgtccttcctccagcccctgctttcccagcatcgaaaacacaaaagcctgccggaaatcacccagcctttgcctggtcactcaggggcccacggataagcgtggctctgattcctccaggtcagccccacggttcgccacctacccgagttaatttctgcgcccgctgaccaaaggccccaactggcaacgggcacagcttcttggtgcgctagtcgcttccttgcccagcctttagagcctcgggtccggcccaaggacccggggacgtgagcgcaattagtagccaggagccctgcgaccctggaccgtgcagtgctaacgcacccgaacggctatgcgagcggtgtactcggctcttacttgtgaaagttgtttcccccaaccccctgcgtaaatctcttgtgttgagaaaagcaaggcttgcaggaagccactccggatgtttgctgctttacatgtggcatctgtggctggctctgataacgtcccggggcaccacgtattaaagtgaagagactgaaatagaaggctccacacaccgcgcgcgggtcagcgacgtcgccgccctccacactgccccccgaaatataagacaagc

SEQ ID NO: 32278 - DNA, 2441 bp, Homo sapiens
  chr8:55370128-55372569
  binary
cggcttctgcaaaaagatgtgctttaaagagaatagaatggacgctcggtatgttcatctaaacgaccttgggcaagtacgtcgattccaaggtacaatcagccctcccagacggcttttcgagtctccctaaccccggtgggagaggacgcggcgccagagcccagctccggctagttttcccgggggcaggtgtagccttgggcgcggggccgggggaggggcaaggggcgggcgtggggttggactgggacgtgggactcggaccacggcctgggcgtgggcctaacgacgcgggaccggcccgccctcgccgctccattggccacatctgtgcagaaaaggccccgcggcccaggggcgcccgcagtgtcactaggccggctgggggccctgggtacgctgtagaccagaccgcgacaggccagaacacgggcggcggcttcgggccgggagacccgcgcagccctcggggcatctcagtgcctcactccccaccccctcccccgggtcgggggaggcggcgcgtccggcggagggttgaggggagcggggcaggcctggagcgccatgagcagcccggatgcgggatacgccagtgacgaccagagccagacccagagcgcgctgcccgcggtgatggccgggctgggcccctgcccctgggccgagtcgctgagccccatcggggacatgaaggtgaagggcgaggcgccggcgaacagcggagcaccggccggggccgcgggccgagccaagggcgagtcccgtatccggcggccgatgaacgctttcatggtgtgggctaaggacgagcgcaagcggctggcgcagcagaatccagacctgcacaacgccgagttgagcaagatgctgggtgagtccgagtcgcagacccaggcggccgggcgcgctggcgcgaatcgctaggccgatttcttaaaccccaaactgttctttgcgagcctgacgcccaaaaccaggggtgtgtagcggccacgtcctttcttaaggctctgggttcccttcccgcttcccgccctccgaccctccaaagcagctttccgccttgctctccggctcccggattccccaggtggccgggggcgcgggtccaacggctctgggaaggcgacttcccggcacctccgggcggcgcgagagcacccttggccctgaactgggccggttgtgtccatccctcgaccccttccctagttaggtgtccttttctgtttttcgaacgaccgggtgatgggtgagcggaaagccgcttccaggagaccaaaagaaaggggtgcctttagaggacgggtgttccccaagggctcggactcaggagtcccagatctccctctttaacttcaccccggttgcgcaattcaaagtctgaggggggaggtgcgtccaggtggggccaggtggggcctggagcgggagcgcagccgataagccctgcgcccctctcccccttccttccactgtgcaggcaagtcgtggaaggcgctgacgctggcggagaagcggcccttcgtggaggaggcagagcggctgcgcgtgcagcacatgcaggaccaccccaactacaagtaccggccgcggcggcgcaagcaggtgaagcggctgaagcgggtggagggcggcttcctgcacggcctggctgagccgcaggcggccgcgctgggccccgagggcggccgcgtggccatggacggcctgggcctccagttccccgagcagggcttccccgccggcccgccgctgctgcctccgcacatgggcggccactaccgcgactgccagagtctgggcgcgcctccgctcgacggctacccgttgcccacgcccgacacgtccccgctggacggcgtggaccccgacccggctttcttcgccgccccgatgcccggggactgcccggcggccggcacctacagctacgcgcaggtctcggactacgctggccccccggagcctcccgccggtcccatgcacccccgactcggcccagagcccgcgggtccctcgattccgggcctcctggcgccacccagcgcccttcacgtgtactacggcgcgatgggctcgcccggggcgggcggcgggcgcggcttccagatgcagccgcaacaccagcaccagcaccagcaccagcaccaccccccgggccccggacagccgtcgccccctccggaggcactgccctgccgggacggcacggaccccagtcagcccgccgagctcctcggggaggtggaccgcacggaatttgaacagtatctgcacttcgtgtgcaagcctgagatgggcctcccctaccaggggcatgactccggtgtgaatctccccgacagccacggggccatttcctcggtggtgtccgacgccagctccgcggtatattactgcaactatcctgacgtgtgacaggtccctgatcc

SEQ ID NO: 32279 - DNA, 1227 bp, Homo sapiens
  chr8:55379013-55380240
  hyper
cgctagaggtcaccggagcgcgctcccctcgccagggacctacactcttcccgctgctacattaggccgcattaacaaggatctggattcactttaatttaaaaggtaaaagatcttaggtctgatgggggagtgcggcgaggagagctcggaccgcgacgtcgcgcgcccgcttcgaggagttttgagctcttagcttggtgccggggcccgcccggcgctagatgaagtgctcgtttactcggcctaagccacggtgactcgaaggtgagaatgcaacttcgcggtgcaccggctcaggggcctgcctgccgcgccaaggcttcggaagttctcagcgggaccgctgggacaggctttcctctgagggaagaggaggggatttgtgcctctgcacgttctttcctgtggaggggaaaatcaaaccctgtagccgtccgctgccgggtagggatcgggcgatgctcggcgcccgagttctccgccgttgaggtggagcccggcggcgggagcttagattctctgtgggccacatggtctcagaagaggccccgcggcccgggggcgcccgcagtgtcgctggaccggcggcagcgctggccacgccgtgggctgggactggcccggaacgcgggtggcggttcggcctcggagacccgcgcagccgtcggagcatctccgtgcctcgctcaccaccttcttttcctccgcgtccggcggagggtttcggcgcgcggggcaggcctggagcgccgtgagcaggccggatgcgggatacgccagtgactaccagagccagacccggagcgcgctgccggcggtgacggctaggctgggcccctgtccttgggccgagttgccgagctccctcggggacttgaaggtgaagggcgaggcgccggccggggccgcgggccgagccaagggcgagtctcgcatccggcgccttccaggtggggcgaaggtcgagcgccagaggctggcgagggacccccgcccagcttgacgcccagctgcgcccgacgccgggggaggcggagcgcggggaacccgggcgccgggaaccccggacgtgggagggctgggcttctgcgcggggagacgccgggcttggcgaacatcctcaagaaccggtcggtggctctacctccgaaaactctttcgtgtttagcgattctcatatttagtgtttccctttagggagacttgaccggcaattgcagactc

SEQ ID NO: 32280 - DNA, 514 bp, Homo sapiens
  chr8:58130300-58130814
  hypo
cggaagacacatctgacgagatcgaatgttttgcagaagagccatgtgaccagatccctggtttggcagaggagacatgcgagaagacggaacgttttggccgaggagacatctggcagggtggaacggagggaacaggtgtggcagagagaatatctgagaagctcgcaggattcccagaaggagcactgggagtagattgcctgttttcccgaaggaacggcaagttccaaaggtcagaggctcatgtgaactctgtcgggttcaggagcagctcagtgttgctggtggcaagagtgtggtacgagagtggttgggcgtggtttgaatatctagaaaaggcgagctgagggtagatttttgaacagtccggagtaggaggggtagagacatattctatgggccacagccacattctcaggatgctcgtggctgtaaatagtagatgacccaagtaagagcggctgaagccataggcaccagaattgtgttggcatcgtcgtgtcacgctcac

SEQ ID NO: 32281 - DNA, 553 bp, Homo sapiens
  chr8:644615-645168
  hypo
cgacagtcacaggcaccacgcagacaggagcaccacgaggggcctcacggcttgctcgtctgtgaatcacggtgaccatgtaacccataataccttctggttctaactttttatattcttttgggtaatgtatggtttactgtgaggacacttacgccttgcacaagttgaacgttacatgtcttgatcaggtgcaaggaagagaccggttacactttatggggtgggcggcagcgagagttccccgtcccatcatctcctccgccggacgcacagagaatgcagcgtctgtgagcacagctgccctggacctggcatctaagagtcagggtcagagaggggcagtcagaaacccacctccctgctggacaagtcacaagcaccagcatccctcgggaaaggcagaggggcgtggtggctcggagccctagggtgataggcggttggctgccctgtgggtttcaccagtgtcacctcttcgcaggtgtcattgacctggctcctttctccccgtcaggttcccctcagctcctctgggctgctcctggcagcc

SEQ ID NO: 32282 - DNA, 992 bp, Homo sapiens
  chr8:65289998-65290990
  hyper
cgcgctgagcagcgattgaaaacgttttggtcctctgcaggtttgaacagggctagcaggtctctctccggatttctagggctatgggtatatgtaattctttctctcatcgatcgtttcgattctcttgccggtcttgcagtttgcagggtcctaaacgaagaggggtggagattcgagagtgcgggtctggcgtgtggtccaagggagggggtgaggctgggaaagggggtgcagaatgcgggaacggctgggactgcacagaaggaccatctgcggactcgttttcactgctccagctcccgaaatcgtttctctggacgcggcagtatccgcagcgcatgcaccctcctctggacttccgcagcccagacctgcgcttacagtcatcgcgccaccccctccccccgggctgcgggccccgcgctccgtgggctcagggtcccctccgcgtccccctgaagcctggggacggaggtcgcgaccggccgactggggtcctgtcctcttgtcaccttgtatccctcgcatgctccctcccgcctcgtgtccctctccccaccctccccctcctctctcccgcctccctaacactgcgctttgattctgtttttcaggggcgcattctggggtctctgcgcaagaccagctctcagctctctctcctttcctcggactctggagcgggagcgggcctttccctcgggtcgaccacgccgtaggggacgccgtgaaaagagccgtcgcgcccgctgcctcctgcccgctgcgcagagggctccgcccgtagaggtcaacttccctcacccttttctctctcctgcttgccctccctccgcccggcccaggcgcttccagccccagactgtggccactggctgaggagtgcgagtcggctgcgctgccctgagcctaatccctcttccgggcccagacccgaggtccgcgctcctgggcagtggggaagctttagtgagcaggcttttctctcc

SEQ ID NO: 32283 - DNA, 438 bp, Homo sapiens; identical to SEQ ID NO: 29478
  chr8:65499649-65500087
  hyper

SEQ ID NO: 32284 - DNA, 913 bp, Homo sapiens; identical to SEQ ID NO: 24696
  chr8:67874755-67875668
  binary

SEQ ID NO: 32285 - DNA, 943 bp, Homo sapiens; identical to SEQ ID NO: 29481
  chr8:70946701-70947644
  hyper

SEQ ID NO: 32286 - DNA, 860 bp, Homo sapiens; identical to SEQ ID NO: 29482
  chr8:70981729-70982589
  hyper

SEQ ID NO: 32287 - DNA, 850 bp, Homo sapiens; identical to SEQ ID NO: 25946
  chr8:70984130-70984980
  hyper

SEQ ID NO: 32288 - DNA, 814 bp, Homo sapiens; identical to SEQ ID NO: 30667
  chr8:72755373-72756187
  binary

SEQ ID NO: 32289 - DNA, 1309 bp, Homo sapiens
  chr8:77585088-77586397
  hyper
cgcccagcccactcctgcctgcagtgttgctgctgtcacgccagccggtgatttgataggcttgtcgggttgccatggtgttgacttcttgcctctgaggagctgcccaatgactggaggtctgggattaaagcgggaagaggcagcggccacagcgaatttcagcggcagctgcagcagctagaaacaagaagcaagagtacgaggtctttaggctgcgtccccctcccgcagtcagggctgccagtgagggaaagagaagaaagggtggacggttgaaatggtgatcactcgaagtcagaagatacaagtgagggctttgagacccgctcaggaataactcatgagcaatcagcacgcgctgagaggaaacgtcttccagaattcgttattattcacattagacattactggagtgggtggtgggactgagagtaaaaaggtgttaaaagggacctaaatggttgatacatttccccccacaccctactgttcatttgggcaacgaaataatttcacagatgcaaaggcgctgtacggtgaactttatatcgtggaaactaacttaactccgagaagagaaagtgcaattagacggcaaccgagtataagaaaatagttgccttggacggaggctggcggggcggggggagcgggggcggggaagtcagagagtgcatgtgcaatgcacaaccccagacggaaattgtaaactaggaaatgaaagggaaagaaaccgcttctgttataaattagtaggtaggtgaaggttatgcaaagaagaaaagggaaagtaaagctgttaaaagaatagaataaaacccctgggagttcaactcgaaatccccctttactccccaatccaaagggagtaggaggaggagaaaaaaaagtgcattctggtgtgatgagaactctctggaatgtctggaggagaggatagaagtgcgagggtaagaagacccgggtgctaaataaatggcaggagagagaaatgggggaggggcaaggtaggaaagaaatagtccgcgattcacccaagggactgggagattcagagagattccaggagaaggaaaggaacataagttcaggctcccagcgtaaggaaaggaggaaacgacaagaatccctaagagaaaaagaggaaaaagctgtgtgctgctgaggcggggcgtgggaagacaaccacagtcaattggaaggagcccgagtcagggagcaattgctaggacttcggacagagagggcagaagattgtgtagacaggcggtcaaccagagcagcgcggggcaggacccacgagcgc

SEQ ID NO: 32290 - DNA, 369 bp, Homo sapiens; identical to SEQ ID NO: 23388
  chr8:81478144-81478513
  hyper

SEQ ID NO: 32291 - DNA, 124 bp, Homo sapiens
  chr8:82903010-82903134
  hypo
cgctttacgtattcaagcctcagcaatggcagacgctcctccctcagccaggcttgcagcctcaccgttggatctcagactagcagtgagcaaggctcactgggcgtgcgacccacgggcatgc

SEQ ID NO: 32292 - DNA, 202 bp, Homo sapiens
  chr8:8639884-8640086
  binary
cggataagagctcaggatttgggtgcgtgggctgaagcatgcgcattaagaggcaaaaggacggcgcttgactggtataggaccttctaggaacattcaactagtaagggaagaacacctcaagtgagcatgcgcacaactccagtaatacactgcgcatgcgccccctcccaagcgctggcaggcctctgcgtatgtggac

SEQ ID NO: 32293 - DNA, 1395 bp, Homo sapiens
  chr8:8748226-8749621
  hypo
cggagcagttcctggctgggggtggaccgcgccatgggcggggagctttccccctccgccttgccctctccactggtccctaggagcagcttatgcagcagcaaagagggatccctctggaagaagacattgaggatgtcgatgaggcgggtgaggttgtggaagacgtgctccttgagagccggactgtcctcaaagtagagtagcttgccgctctcatgcaggtaggagagggcactctgcagtcggtcctcggtcagacccgcctgcaggcccaagcgcgccgagtcccaccagcttagccacagtcgctgggcctgaggtggctggaaatgcagttcctccagcacctgccaggatcgaggcagtactctgtgtaagttggggaagatctctcggtgctcagcaactgacagcaacttgtcccgaaggcgtcgtaagtggcgcgggtccctgcagctaacaggcaacacgggggagaggatctgcagccggtggttgagcaggtattgaaaatgggccttgcgccgtcgaaggttcttgtccgaaacgccatagtaggctgcgtgggggctggcagagcgcagctcgaagtcccgggccagtgcctcgtccaccaccttggccaagcggctcagtccctccgcgtcgtgcttctcctgcagggcgatctggcggtgaatgtccagacatttctcctccagctcacgctctccgcacaggtctgcgtgggtgcccacgatgcacaccaccgcgtggggcactctcgccccgacccgatgcaagaaggagcccacggtggtaggaaagtggcgaggctcataggtggccaagttgaccaccagcacgtatagggcccctggggacaggaagaagggctggatcacctcataactttcatccccagctaagtcatacacgatgaaccgcaggccccgggaggcatcggccgtccagctggtcacctcgatgcccttgctcacagggggaggtgacggtgggtagcacttctccttgtcccctcctcctgggcatccctccactctctcctcggtgaggcagtggcgcagcaaagtctttcctgcagccttatgccccatcaggagcagcttgagccggggctgcaccgccggctgggaatgagccagttccttctggtaggctgcgatgtaggggatccccttcatgcagacctcgtaggggggctggatcagtgggttgtctttgatcttccacaaacccacccgggagagctggccaaagtggtcgggcagcaccgcgatctggttcccctgcagcacgagctcctccaggccggtcagctccacgatggagtccggcaggtagcggatgcggttattatccagccacaaggtgagaagccggcccaggccc

SEQ ID NO: 32294 - DNA, 124 bp, Homo sapiens; identical to SEQ ID NO: 24705
  chr8:90913515-90913639
  hypo

SEQ ID NO: 32295 - DNA, 140 bp, Homo sapiens; identical to SEQ ID NO: 8779
  chr8:91014317-91014457
  hyper

SEQ ID NO: 32296 - DNA, 498 bp, Homo sapiens
  chr8:95246496-95246994
  hyper
cgcacagctcccccatccgccctctggcgcttcagagtctggaggaatcccgagctgcgcctccctctccctgcatccctggcagagaatttcccctcccagcgcgggggagcccatccctgaggactcgggcaggtcagatgagaattggtagaaagtgaagcgccttttcctcgcgctgagggcaaagccagtgtgcagccgcctgtgggtgaggagcttttatgacaatgaatcccgtgttttatgggagggcagtgtggagacagcgcgggccgagtccctgggttccggggcaagactgtgggcgtctcccgcggtgactcagagatgctgccctgcctcacaccatctcgcaccatctctgtggaggccgtgaccttcattcactgccgtctgtcactggggggtgacctcgcagttgtcagagccccctctcctggggctcaggactgggatcacccccgcaacccggcgcttccagcttcatctcggggc

SEQ ID NO: 32297 - DNA, 468 bp, Homo sapiens
  chr8:97339757-97340225
  hypo
cgaacattattcaataagagagcttcaagttacaccatgccttctgccccactcagaaaagcaaagcccctaattactcccctggcctggtaagagagcgcacacggagcttgagattaatgcagaagcaaagatcccgggtgctggttaataagcttttccaggagcgtggttgtctgctcggccgtcattaatttgaatgctcattaccataatgtagaagccaagctggggtcctgcgccctccttgccgccagccccgtggtcctggacagcctggctctcatcccacgtagtttcttctcgcccccccgccctttctttaaacgaagtgtgcaattgctattttaaatctgagccttgacattttcagtgggtacgtgcctagatttccacaggtgtgattgcaaacctgtaaattaccggcttccgtttgctgggacaagtgtaaaatgggcctctttgtac

SEQ ID NO: 32298 - DNA, 893 bp, Homo sapiens
  chr8:99956867-99957760
  binary
cgaagacgtggatctgctctcgctttagctgctcgcggtcctccagatcatgtccgcgactcctgcgactccgcgcggaaaaaaaagtttgccaggcgtggactcaatgacctttccaagctgtgcgcctcgctgcctggaccgggtctgagcgcggctgcccaggttgacctttctgcgggaggtgagtgttcgctctgggaaggggctgtagctgccctttggaaggaagggtttgggggtgtaagaggcgttcagattctcggtctggtgtgccccaaattcagatgtgaaaatagatcatggggatgcaatcccagggcactgtatttctcacttccttgggtccctggcacgcgactcccagctaacacccaaccacacacatttctacatactgtttcttaattttgttttgggatatttaatctaagcggtcagcaagacttcttataaaagctggtctacgtacactgagatcaaaccccacaatcccatggtgtttctgctcctgccctagcaagcctgggtcgacttgtcccggggcagccgcggcagcgcagcgtggacgggcccggacacccggtgcctgcccagccagcgacgctgaaggcacatttcaagagggaaatagttcagtcctcggtaatttgtcaacctcgtgctggctttaaaattctcctcccaccttctagtcctgactgagggggcccaaaagcaaactccccgggggcttaaacgctcggattcctgagaaacggcaagtgagaaaggagttgcagttgtacgaagaaggagcgaggaaaaggtgtttgtggagggagccccggatctgtcttcctacctgttagccgagaacaaaagggggctggcgtttcccgaagcgaaagggc

SEQ ID NO: 32299 - DNA, 1313 bp, Homo sapiens
  chr8:99960063-99961376
  hyper
cggagcgctctcctctctcctctcccctctcttctctctcctctctcgtctcctggggcatcccgggtggagggatgtaggggtcgctcctcggtgccaggccgggaagcagctcaggcctcccaagagcttggcgctcagtctgggaaaaggggttcctctggcctcagggacgttctccgcccccaccccaccccctgggagcctgaaccatctggaagggatcttagtcgggggttgggaggagagcccgtggataggaggagggggcgattctaggccgaatccagcccctgaggtgtcacttttctttcctgcggcccgtcaccgctgatagatggggctgagggcagaggaaggaaaaagaaaacctccgaggtcagtgcggggcgaggtgagcccctcccagggccctctggcccaggaggatgaagcgcgccggcttcgctcttgcacgccggcttgccatccgggtaagcgcgggaaaggcggccacagggcgcggcggcagcgcagcgcgtgggatctcacgacccatccgttaacccaccgttcccaggagctccgaggcgcagcggcgacagaggttcgccccggcctgctagcattggcattgcggttgactgagcttcgcctaacaggcttggggagggtgggctgggctgggctgggctgggctgggtgctgcccggctgtccgcctttcgttttcctgggaccgaggagtcttccgctccgtatctgcctagagtctgaatccgactttctttcctttgggcacgcgctcgccagtggagcacttcttgttctggccccgggctgatctgcacgcggacttgagcaggtgccaaggtgccacgcagtcccctcacggctttcggggggtcttggagtcgggtggggagggagacttaggtgtggtaacctgcgcaggtgccaaagggcagaaggagcagccttggattatagtcacggtctctccctctcttccctgccatttttagggctttctctacgtgctgttgtctcactgggtttttgtcggagccccacgccctccggcctctgattcctggaagaaagggttggtcccctcagcacccccagcatcccggaaaatggggagcaaggctctgccagcgcccatcccgctccacccgtcgctgcagctcaccaattactccttcctgcaggccgtgaacaccttcccggccacggtggaccacctgcagggcctgtacggtctcagcgcggtacagaccatgcacatgaaccactggacgctggggtatcccaatgtgcacgagatcaccc

SEQ ID NO: 32300 - DNA, 349 bp, Homo sapiens
  chr8:99963508-99963857
  hyper
cgaggtggctgcgggtctgcctccgaagttatcagtgtaatcgggcctctgtgtatgcctgcacgtgtattttcatgattggaagattaggagcacggatttgttcctgcaagtctcctcttttgttgtcatgagagtgttatgttaacgcttgtgataacgataagacagaaactattgaaaagggtgcagtggtggtgtgaaggattaatcctttgcttgcttcacatctgaacaggaatctccacacaaatgtcccacatgtggaagaacctttaatcagagaagtaatctgaaaactcaccttctcacccatacagacatcaagccctacagctgcgagcagtgc

SEQ ID NO: 32301 - DNA, 1140 bp, Homo sapiens; identical to SEQ ID NO: 25960
  chr8:99985860-99987000
  hyper

SEQ ID NO: 32302 - DNA, 1595 bp, Homo sapiens; identical to SEQ ID NO: 27316
  chr9:100610054-100611649
  binary

SEQ ID NO: 32303 - DNA, 1416 bp, Homo sapiens
  chr9:100616625-100618041
  binary
cgccgccgcaagcgcttcaagcgctcggacctctccacctacccggcttacatgcacgacgcggcggctgccgcagccgccgccgccgccgccgccgccgccgccgccatcttcccaggcgcggtgcccgccgcgcgccccccctacccgggcgccgtctatgcaggctacgcgccgccgtcgctggccgcgccgcctccagtctactaccccgcggcgtcgcccggcccttgccgcgtcttcggcctggttcctgagcggccgctcagcccagagctggggcccgcaccgtcggggcccggcggctcttgcgcctttgcctccgccggcgcccccgctaccaccaccggctaccagcccgcaggctgcaccggggcccggccggccaacccctccgcctatgcggctgcctacgcgggccccgacggcgcgtacccgcagggcgccggcagtgcgatctttgccgctgctggccgcctggcgggacccgcttcgcccccagcgggcggcagcagtggcggcgtggagaccacggtggacttctacgggcgcacgtcgcccggccagttcggagcgctgggagcctgctacaaccctggcgggcagctcggaggggccagtgcaggcgcctaccatgctcgccatgctgccgcttatcccggtgggatagatcggttcgtgtccgccatgtgagccagcgtagggacgaaaactcatagacacatcggctgttcacacgttccccgcaatctgagaacgaacaggaatggagagaggactcaactgggacccacgtggaaaagaccgagcaggccacagaggctcggtctccccgcgcacagcgtaggcacccggtgtactctgtaaacgggaggaggtggggcgaggcagccagagcccttggactggcacagggaccctcgatggagcgaagccctcaaacgggatgctttctggtattctatcggggagggtccttggcggtaaccagagggcagcgtagtgtcaacaccagagaccaggatccaaattgtggggaatcagtttcagccttccatgtgctgccggaactcgggcctttttacgcggttcgtcctctagtgcctttaactgcgttactacaataaaaggctgcggcagcgcctttcttcttaaagtgaggaggacaaatttgcaaaagaaataggcttttcttcttttttaaattggagaaatctctgctctggttgacctgggctggttttccctgtctctgagaacttgagacctagctccgagttgaactgtgcgtcagcactccagtcccatcacctgaaccttcagtctcccccatctgttacactagagggctgcaggactctatccaccgcccccgggttatcattcagggccccatcatcttggatgctgccctgc

SEQ ID NO: 32304 - DNA, 809 bp, Homo sapiens; identical to SEQ ID NO: 27317
  chr9:100619635-100620444
  hyper

SEQ ID NO: 32305 - DNA, 299 bp, Homo sapiens; identical to SEQ ID NO: 14355
  chr9:110187439-110187738
  hyper

SEQ ID NO: 32306 - DNA, 638 bp, Homo sapiens; identical to SEQ ID NO: 29493
  chr9:110399862-110400500
  hyper

SEQ ID NO: 32307 - DNA, 934 bp, Homo sapiens
  chr9:116059825-116060759
  hypo
cgtagtcaccatacccagcagcaaccgaaaaaggtttggtttcttgtctgggaacagcactcaccccacaccccaaaggaactgcttggtccaaaagatggagaatatgagcaacagagtgacactgaggatgacggccatcaggtaggcaaagatgcggaactgagggttgcggaaacactccctcaaagagtggtggctggggatgaggatgggcgtagacacggtggcagaggccgtgtctgggggcggcccagtctggcccccaggctgggggccaaggtccagcgtgtagacttgaggctggcgcaggaagtagcggctcttgggctggtccttgaggcacagctgatggccttccaggatgacatggtggggctccaggcggagcagggcgagcatggcagtgtccgtgggcaagtcagtgacaggctgccctgaggccagcactgtgggctggcgacagagtgggcacagcaggcggcgccgggctggagtcacaaggctgaggtgggccagacattccacgcagaaggagtggcagcaatccagcattttgggggtatggaacgtgttgttgaaggggttccagcagacggggcactcagcctcaagctcccggccctgctgctcagccatcctcagccacacacggggaggcttcgcgggagacgtcctggcagaagggggaaaggagcaaaggaacagccatgaagtcccatccttgtgcttggcctggggcaaagtgttctgtgggtgttgaaaggtgtaatcaccacgttttacttaggttcaaaagcgttttgttcttgatcaccagttcctaacccatcgagttgagtcaaatgctcctacagcctcccctctgtcaaggtgaaggcctgggccacccctaccaagagcccccaagagagccggcattggagcagatgtc

SEQ ID NO: 32308 - DNA, 289 bp, Homo sapiens; identical to SEQ ID NO: 30678
  chr9:117887-118176
  hyper

SEQ ID NO: 32309 - DNA, 126 bp, Homo sapiens; identical to SEQ ID NO: 6637
  chr9:123176142-123176268
  hypo

SEQ ID NO: 32310 - DNA, 259 bp, Homo sapiens; identical to SEQ ID NO: 23655
  chr9:126348901-126349160
  hypo

SEQ ID NO: 32311 - DNA, 215 bp, Homo sapiens; identical to SEQ ID NO: 14362
  chr9:126759147-126759362
  hyper

SEQ ID NO: 32312 - DNA, 188 bp, Homo sapiens
  chr9:126760274-126760462
  hyper
cgggactcatgtggttgagggttcatgagagcagtttctgtgcgctgaggccgggacttcccagcacagcctacaagacactgcctgcccacgcctggccccgcccacctctgcagcctcatcccgctccccaccccacaccggccactccggctttcgcgctggccttgctccctcgtgccaggaac

SEQ ID NO: 32313 - DNA, 979 bp, Homo sapiens
  chr9:126779973-126780952
  binary
cgcggcggcaccttactgaagggcggcgagctgggggccgagtggggagggggcgccgtcggggcgccgggcgctgggcttacagcagagccgcgggccgcggggtcggaaagtccttccggggcggggccgcagcggcctcttcccgcagcccctcgggcccgggccccggtggaacggaaacctccccctaccccgggaggggctgccagcgggctgggggtgcgaaaacggcggcaggagcgggcgaggggcccgggccgcgcactttgcgcctgggtttgcgcgccgcggccgcgggagtcccgcgcggaccggccggacgcccggcctcccccagccccagctttttgtgtgtgtgtgcctggcggcgtaattactgatttgattccaatccattatttagacaattgaacctacaatctcgtctttagtaaaatgaggcgaagtcagatttgattacaggttcagtcccagcgacaagagctcgaaacccgatgggttaataacagatcacgagtaaattattcatgattttacgagctctttagctccattgaatcggcctaattgagaggaaaaaaaaaaaaaaggagagagaaagcccgggtcctccccctcccctcggcccctcgctcctccccggatccgatcctggggaatctcgacccgcccccgggcactgggggcgggagtgagggggttcggggcgccggccaaacctgggccccacggctgcctcccccgccgccgccccctgcccttgcctctggccggcctcggcctcgctacttagggccggctcctttccctttttctccactccccttctttccccttttctctactcccccgccaataacggcttcggaaaaggcctcccccgcagggaccgggtctcccggagccccgggattcagctcggccaccggaccctcgccacaagctgcgcctgtttccgggactcgctttcccctcc

SEQ ID NO: 32314 - DNA, 542 bp, Homo sapiens
  chr9:126784854-126785396
  hyper
cgagtccaggccagtctgacccaccctccagccccaggtctctgggattgagggctgggaggtgacacagagggatgacggagacggagggctgcgcagctgccctgagaaagttcttgtgagtttgtcagaaacaaaaaacaaacaaaaaaatgccctctgtggggcgggtggaggctgtgacgcggcgcaactgcagctgcagctgcggggggagccgggagttggggcccctaggctcccgaggcgcccccttgagcagcgctgcccacggggagcgggcgaggggctgcgggagagggaggactgggtgacgtagccgagggagggagcgtcggccaatgggatgccgatgcgcccctctgggcccgcccctccctcatggtctgttttgctttggagtcccagtggcctgagctcctggtggatggagaacgtgactacactggctggggtagcaggtccctctcgtctgtttccttcgttgtttgccttcttggggttaggtcaaggaccctctttggcgtcccctcccttcagcc

SEQ ID NO: 32315 - DNA, 233 bp, Homo sapiens
  chr9:128759727-128759960
  hypo
cgggctcagctgccttccctgccatgtgtcgtgtagttgttttcagcacataagctgtcaacgagcgttctttggagatacttgaactggagtggcccaggggcttttcgcctttccgtaagcctgctctgccagggaggcgctgccccaaaggtggcctggccaccgtccagaatggaggcccccggtgctggcctgcccagcagcacctgcggctcagtccctccaggatc

SEQ ID NO: 32316 - DNA, 249 bp, Homo sapiens
  chr9:131504885-131505134
  hypo
cggcgatccgctggatagactcgtcctgccgcgtggggttgaggatgctgagcaggagctcgttgacccggcggtactggaattccagctcctcggggatgctgaagttgcagagcgtcaggcagcagttccgctgcacctgggccgggacaggacacaagtggggcacattcagggtcagactcaggagcagggctctaggaactatctagaggtatgagctcatccagagttgtggcagtccagccc

SEQ ID NO: 32317 - DNA, 83 bp, Homo sapiens; identical to SEQ ID NO: 14367
  chr9:131675071-131675154
  hypo

SEQ ID NO: 32318 - DNA, 802 bp, Homo sapiens
  chr9:133534580-133535382
  binary
cgagtctttgtacccctgcgtctccgactcggcctttcatctgctccctccacctcggcatcgccttgcctcagtctcccccgacccctgtctcgccccctctgcttccagaagcctgcgcctctgtctctcccaccgcccggtctcctggtgtccccggcgtctctcccgtcgttcccgccgccttgatcagcctgggctgtggcgctggcatcgctggcctggggaccggggtgtgggcgatggaagggggttcgagaggcgcaggggaggggcttcccctcctccgcccctgggcgcctggggagactcgcgtgccagtcacctgccggtcggggcgccgacttcgcgcctacgcactccacgtgggcgccccggggcgcgcctttgtctctcccgagccttgaaagctaattacattgggaggggacaggggtggggtgggagagggggccgctgtccccattcactgagccgaggccgccactccgccggcagccccgcgcaggcctggccccgagtcacgtctgttgaaaccgtttttttcggcctcgcccccacccgccttggcagccagccgcgcctttgtacgcgccggcgggggcgccctggaaccctgaaccgtcttacggggaacgggggtggggggaggggagcggcgcgggccccacgcgaggaaggaatttcctgggccactgcgaaagattgaggctcagaaagccagagagagacgtgcgaggaggaagcggagagggtgtgcgaagctggagagggagtcggagcgccagcgaaagaggggagc

SEQ ID NO: 32319 - DNA, 742 bp, Homo sapiens
  chr9:135512925-135513667
  hypo
cgtctctctgagaagggacgcagcacactcgcctctgacgccttcccggcctgccaaaagtcattactgccgtgtgtggaaagccatcagcagggtccaggcccccgttgtccgggtgacagattgggctgcgtaatcagaggaggaaggagagagtgcagaagctgtcagaggcgagagatcttggctggagccgccaaaaaactggcaacatgagttagcgtaactgagtaaacagcaaacaatctccaaatgatctttccattaacgaaacaaaataaaacgaaaaagatacactttacctaaaaagcataccccagagaaaagcacgaaagtctacatttatttgggacacagaactgacattgtgactcttcacagccgtatctcctttgtctcctagcctcctggcacggtggaaattccccaggaggagaggaaattaagaactgcacagacagaacagtatgcttcaagcggaaaaaaatacggagaaggtggaggaaagcagcacaggtgatttaggtgcatcttctgaaaaagaaatgcacgcgccggacagccaaggaggatgccaagggacagttggcgcccagggcgggctgcaggtatctttcctttctgggaaaaaggtgactgcactccatccagggacaatcaaggacagccaccggagaccaacagaaaacctaatgtcagccttaaaatcaggtggcttagaaactccattttccggccattc

SEQ ID NO: 32320 - DNA, 155 bp, Homo sapiens
  chr9:135767923-135768078
  hypo
cgcaggaggtgggcggcaccccatctcaccaaggtcctggccgggtcttcgctctgcccaaaccctcctccagcctgtgcaggcctcctcccacctcttagtgctttcagcgagaaaaggtgagtctcattacgcagaacttttgtttgctcttc

SEQ ID NO: 32321 - DNA, 206 bp, Homo sapiens
  chr9:135865057-135865263
  hypo
cgcaggggatcccggccgggtccagtcctgagcctgcacctgaccccccggggcctcatttcctccggcaggagcgcagcttcgagtgccgcatgtgcggcaaggccttcaagcgctcgtccacgctgtccacccacctgctcatccactcagacacgcggccctacccctgccagttctgcggcaagcgtttccaccagaagtcc

SEQ ID NO: 32322 - DNA, 733 bp, Homo sapiens
  chr9:138661280-138662013
  hypo
cggcagacccccatcctcaccgcatccgagaagggacctagggggtccaaactcttcagatgaagtcttatgctgggatcctggggtcagtgaaggcagggtcagaggtcaggtgggggcaggagcaccgtctgatgagcacctctatgggcagggaccatgccgggtgcccggggaacggggggcaggccccatgccaggtgcccaggggacaggggtcagggcccacatggagtgcccaaggcacaggggccagggcctgccccgccctggaactcctcgctgagctgggagagaagcacaggagcgatggaaggtccaccgaggctcagaccaagtagggggttgaggtccacagactctcggggcagagatgctgaagccggacagcagacacgggggtgccaggcaagggtgcatctgcatagcaccttcaggaagtgagcaggtactgtgggggaggagagagccggcagagcggcaggtggaccggcctcccccactgcccgcagaccacgtggtgtgtgaggaggagtgcaagtacgccatgctggcgctgaactgcatctgcccggcgacctccaccctcatcaccctgctggtgcacacgtcccgcggccagtgagtgccccgtgccccgggggaccgacctccatggcggggccggcgcagggagacaacgcagggcctgcttgggggcggggatgggcttcccagaggaggggcacatggc

SEQ ID NO: 32323 - DNA, 463 bp, Homo sapiens; identical to SEQ ID NO: 29504
  chr9:138780573-138781036
  hypo

SEQ ID NO: 32324 - DNA, 246 bp, Homo sapiens; identical to SEQ ID NO: 24717
  chr9:139000411-139000657
  hypo

SEQ ID NO: 32325 - DNA, 608 bp, Homo sapiens
  chr9:139096573-139097181
  binary
cgctgtcccgcactcttgcaggccagcgtcaggccctccccgccaccctgggatctggaaactcactctctgcagtttccatctctgtgtcccgcctgcagagcggcgggactttctttgcctggccgctggccctgcacgcacccccttcctcgcgcctctgccgcccttgccgtttctgtcctcagtgtcctgctggggcttaccccgagtcccgcccaaggtgcagacggcggcggccccgggcctcgctcggtcgcgctcgagccccgtttccagcagcatcgcggccaccaggccgagtggcgcgagacgcgctcctcctaggtcagcgtcccctggagggttcggggctcccaagtcccgccgcgtcgtgcggggcagggagcccgggagccactgggcctggcgctgtccgcggtgctgaaggaggcgcccgctgcccgccccgcccgcgcgcccgcccacctcccggggcccctctcgtcgccccggtccccacccccgcctctgccccgtgtcgggcgcgcctccctccctggctgggttgggccgcactcaaggcagcccccgccctcacccctctgagacccagggtggccgtgccc

SEQ ID NO: 32326 - DNA, 568 bp, Homo sapiens; identical to SEQ ID NO: 23658
  chr9:139110897-139111465
  hypo

SEQ ID NO: 32327 - DNA, 738 bp, Homo sapiens
  chr9:139902492-139903230
  hypo
cgccccggccctcctgcaggctgggcctggacgcagggtctccccacgagctccctctgtgtctgggctctcccgggcctccgtctgccgagtctgggggccactgagtctacatcggtcccctgttccccggctctggtcccctctgccccacccttgctctgtgcccctcaaagactctagcaagtctggaccatgcagttacgtctctccaggcctatctgcaagtgtccctcgcccactctgcccccttgacctctggacagcaagcatcctggggccagttctcccccgaccccacccgcggctggagccaccaggcagcctgggtccagtgggcagagccctggacagccatgagagcagcctgctcacccgctcctcctcgaagctgatgaggccctcgtcctccgtgtccaggtcctcgggctcgtctgccacaagtgcccggagctccgtgggggcagaccggggccggagcaggctgagcaagcagccgagaggggactgcagtgcggatggcggctccgtctcctgctgctccaggttgtcactctgcttcttggcaaagttcacgaacacctggtgggtggcgcaggcgtgtggggagggggctggtctggggtgaggaggggcagggcgggtgaggggaggggcaggtgtggtgcgcagtgcccttggggcgctcacattgtccagtgtggtctggctgaccgagtagtcctcgatgcccagcac

SEQ ID NO: 32328 - DNA, 439 bp, Homo sapiens
  chr9:139904252-139904691
  hypo
cgatggccgtggagagcttccgcttgttgccgccgctgtaggtgccagccggcttgtctgcgtacttggtcagctccagcttctccagagcccacttcaccacctggccagggaacgcaggtgtcagtggaggcagggccacccagcgtgctgactccctgccccgccccacagatcctcacccgggcctcgtccttccaggagatcccacgcagccgcgtgtacagctgcaggtgctcccgggccgtgagctcgtcgaacagcgcgtcacactgcgggcagtagccgaggctctgctgcacctggagcagctccttcagcacgctggggacacggcagctgtcagcgcgtgaggacgcggcggccccgcccacccagggctcccgccccacctgtgtccattgacgaaggcctcgccccccgtcgtgctctcgtcgcc

SEQ ID NO: 32329 - DNA, 175 bp, Homo sapiens
  chr9:140041698-140041873
  hypo
cgccacacacacacctggacacgtactcaggtgcgctcctcacacacacacctggacacgcacaggtgcgctcctcacacacacacctggacacacgctcaggtgcgctcctcatgtgcatgctcacccttacttgcgccagccagcacagacacacatgcacacacgcacacac

SEQ ID NO: 32330 - DNA, 522 bp, Homo sapiens
  chr9:140127651-140128173
  hypo
cggccacagggctttcagcggctcggcggtgcacgggatcttcaactggctcacagtgctggtcctgctgccactggagagcgccacggccctgctggagaggctaagtgagctagccctgggtgccgccagcctgacacccagggcgcaggcgcccgacatcctcaaggtgctgacgaagccgctcacacacctcatcgtgcaggtgaggacggccaccgcccccgcccagagagcctgagcaggccggatgggaggaggggaggcccgccctgccctgatggagggtcagcggagggtctgggccctgtcctgggacaggggaggagagggcagcagtgggcagggctgggctggaccccgcgggcgccagagccccgggtgagtcctgagagagggtgcagcacaccgtcacgacccctctggcccccagttggactccgacatgatcatgagcagtgccacaggcaacgccactaacagcagtctcattaagcactggtgcggcaccacggggcagcc

SEQ ID NO: 32331 - DNA, 657 bp, Homo sapiens
  chr9:140388986-140389643
  hypo
cgcaccaccctcacccgcgccctcacctgctctgcgccctcacctgctccgcaccctcacctgcgccctgccctcacctgctccgtgacctcatccactccgcaccctcacctgctccgcgccctcacctgtgccctgccctcacctgctccatgacctcatccactctgtgccttcacctgctctgcgccctcaccagctccgcaccctcacctgcgccctgccctcacctgctccgtgacctcatccactccgcaccctcacctgcgccctgccctcacctgctccgtgacctcatccactctgcaccctcacctgcgccctgccctcacctgctccgtgacctcatccactccgcgccttcacctgctctgcgctctcacctgctccgcgccctcacctgctctgtgccctcacccgctccgccctcacctgttccatgccctcatccactccacaccctcatccgctccgcatcctcacccacgccatgctcacctgtgggtacctgcgcttgatggacgtgagggctcctgccggcagcttggccaattctgagtcccgaacggcatgcaccgtggtcgcccgggcctggtgggtcagtgtctccacctgaggacaggagccggctgctggggccgcgggcttgggagggcc

SEQ ID NO: 32332 - DNA, 829 bp, Homo sapiens
  chr9:140396575-140397404
  hypo
cgaggactctggaatctgggagctcccagaggtgacccgggagtgcccaacacactggaacccagaaggcagaggttgcagtggacccggagcctgtggagaggccctggggcaaaccaagggtgagggagcgtctgcgggcaccacacccacgaaggtttgaaacatcaggtgtgtaaacccccagtccacagtgatgatgaaataaaaataagaagccccacccagcatctttggaaaatgatcgaaaaacaaaccattaaacttcccaaaccctgacggtgaagggggtgaaggcagctcccccccaaaagagaaatgacatcacatgtcgccaaaagtttgtcaaacaggagggagaaagagatggaggaggatgagaagaatctgagcagccacatatccagctctcaggcagaggacggccgctgacggagaggccgcatcgccccagggcgcgttgtcagcccgaggaggagccgtgggaggttcttcaggagaagaaagcggcctccctgaggaaagcagctgcactaagaaagtcagagccttcgggagatgagggggacgggggggacgcgggggacgcgggggacgcgggggacgggggggacgagagggatgtgggagccggccacggtgacatggacgaggccgctggacaggggggcactgaacgcacggctgaagtcatttggccattttaaggattactgttaagtattcagaaatgataagagtattgtggttagagatgaatcctgaaatatccaccagtgacgtgctatgatgatgggatttgcttcaagggggggcacccgaacggtac

SEQ ID NO: 32333 - DNA, 900 bp, Homo sapiens
  chr9:140400692-140401592
  hypo
cggcatctgcctcaatggctctgtgacccaccagctacaggttttctccgcagcttaaacccacacggtgccttcaacatttctgggcactgataaaggtagcccggtcggtacctaaaacacggaaggaaaccagccctggtcctgagccaaattcctcaaaccttgccatgcgtgccacaccctgacggctcgctgcggccaaccctgggtagagcaccctttctcttgctgtccatctcagggatgctgccgccctctgtatgtgagctcccctaacgggtgccctgggccgtcacgctggtgctttgggcttggctctttgcagtcccagccccatctcagaggttcgctcttcgcagtccagccccatcttggagggagggggttgaggcaccccctccaaagagctcccctgttgctgcttttgggcggcctcgggctgagcgggatgaagcagtgtgcacccttttacagcctgccctcagcattacacatcactacacacacagcgtatctgacctctggaccagctgctgtggattctgaggaagggtgcacgctttgcacgacggggtcacgcacttccaggcacagatccagcccttcgtgtgcagctgcgcatgcgagcgagtcatctgcactgcggtttcccatccatactggaattcgcaacacccatttctcagcggaatacagaggaaccgcgcagacactaaccgcagacacatgccacacagatgccgcagccacatggcgctgcgggaaggaaccaggcccaggagcacagccatgtgcccctccctgggaagccagacacagagagccaggagcgctgggccttggaaaggggcgcatgtctccgaggcttacgctgagggtgcgctggtcgggtttcac

SEQ ID NO: 32334 - DNA, 306 bp, Homo sapiens; identical to SEQ ID NO: 14385
  chr9:140692095-140692401
  hypo

SEQ ID NO: 32335 - DNA, 581 bp, Homo sapiens; identical to SEQ ID NO: 29517
  chr9:140707377-140707958
  hypo

SEQ ID NO: 32336 - DNA, 947 bp, Homo sapiens; identical to SEQ ID NO: 23663
  chr9:140708213-140709160
  hypo

SEQ ID NO: 32337 - DNA, 1287 bp, Homo sapiens
  chr9:14347752-14349039
  hyper
cgcggttttttttccgtgcagaaatcactacccggcgacggctcagggcggtagagggcaagtcttatctgccaaggcgggattagattctctcgccgagggtcccagtatcccgccgcccagcaagggccgagcgcgcgcgcgcgccagggagctttggagcgacgcgcgtagtttcgcgtcgcacgcggtgtctggtctccgcgcaccacgtgcgctcgcggtccttggcggggacgttggtgctagcgatccgacagagcacccaggactaggtttttgtgatgccctaacctgggcatttatgctgggggcggaacgaagtcgcccaacccaagttctccctgcaccctgggaaggaaatgtggtgcgccctctggggcgtgaggccgccgcggcccattctacacacctactggcattccgcttttccttactgtgcgccaggggaaggcataattcaattatatcatacaactgcagcgcacccttttccttttttgctttgaggggaattttccaattcccaaataaatacctatggctctaaagccgagttgggttctgtagtaactaccgggggtgaaaaaaaaaaaagaccccaaattggctgtgagtttacagcctgaagcagcttatttaggctcgctgagcgccgttccaaacggcagggctcacgctatttcgggagaagttggagggtggagagaaaacaaggttatttaaagtgactcccagaacgcagctttcgttcctagactctttaggtgtcagtgcttcggctccagtttagcacggcacaggcggcccagcctttgatatttaagccaggccagcgcccgggtgaaactacctgttgggggattctgccgcctggaacccttcttcttctgcgcaatactggcagcagtgggatggctctgggggtgccacgcgaagagagagggcggaagagccgggagcagcggacagtcagctgcatgtggcagtgcctagcgagctgctcccgcgcctctgctcgctctttgaaaactggaaacagccccctgtgctctgtgctgggcccctggctgcggagatgggcccaaactcggcacgattctctaagttcggaaaccacgaagcttgcgccttcatgcgtgtctaacattaaaaacaaaaaaacctcctggcggcttcctgggctcccgcccccaccttgcgctccaacacccggcacttttccctgtaccgaaattcactttactacttcttgaaattcggaaaactccaccgacgcttggactc

SEQ ID NO: 32338 - DNA, 686 bp, Homo sapiens
  chr9:21402446-21403132
  hyper
cgacactggcgtctgaagctgaaagcttagctcctggcacaccctggggcaggcacgggcgcctctctgctcctggcccggtgcgcggcgtccccagccccgggcgctcccaggacccgtccgctcgccccagggtccagcgtgtccccttccccaagacgtccccgccctgcgcccccacacaaacggaatccccaagattaaacccgtgcgatctcgagccctcaagtcccggaatcaacgggtccctctgtaaaaacaagtctcgctgaagtctctatgggaaataaaagccccaaacccaggggaaaatcccgaaaataaaaggtgccctgctggctacctgaggaagatgtctcaagggagaccacggcggagctgcctcctgagcagcaaaagagatttttttactcaggtcgaagctgcacaaagttggcgcgataagccgcgacgacgtttccctggggctgcgggacgccccgaaactcaaacccgcggttcccaaatcctgggcatcaggaaaacccattctggcgccttgctgcggccgtggtgcgcagcgctgggagctttgcgctctttgcgcagcgggcccgcgccccttcgaggccggctagtgaatctctgaaatcacagtggcctacacctccctggtaatggcgggagtcatcatgctcatctccagc

SEQ ID NO: 32339 - DNA, 864 bp, Homo sapiens
  chr9:21964937-21965801
  hyper
cgtaaatgagacacgtgagatctggaaggaggtggaggtgaagaccctcccacctggcctgcatccagagtacttggggtgtggcactggcgtgggccccaggaaggatcccagccagttttggtgctggaggcccggccaaaggaagggctgctctcccgtcccgcgggctccgaggtcgccgcacccgggcgcgcctgggcctcgtcacccgcgctcgtgacgcgtgcttacaaaggaaacttttacaggtttcggtgggcagggccttttattgcccttctgctccacagcccccgtgcttaatcggttggttgggaggtttctttcgtccgtggttttggaaagtccccgcctccaaaccgcagtcccgcagtcagttctgcagcctcagggcctcgaacagccatgcttagaatccgtccttctttcctgctccatctacccttcccctctggcttcttttttttcactggagaaagcccacccgagtctctcagcctgcttcggaggttactgcggcctcctccacgggtagttctgggacccgggtctagtccgcggttccggagcaggtccctccctggagtcgtcaggcccagtatgcgtgtgctcagtgtgctcgggaaacacgcgtgggctttaacagcagatctccataaaagggtcccggagatagcctctgcctggcccgaggcccagtgcctcaaagcggacgcctttgcgctcccggaggtgctcacaccacagcggagcctgctggcgagtggagcgtaggactgcgaaccagcaatctcccgagaagcggcgagggggaggggaatgtctgtgaatcggttatccctcccacccccagcagaagtc

SEQ ID NO: 32340 - DNA, 1371 bp, Homo sapiens
  chr9:27528536-27529907
  binary
cggcctcgctggggtcgggctcctccactttcccagctgggatcccctgccggagctggcgtgggggccggggagggggaccagaggggcttccttctctccccaagccccgccagatgttggaaaggcaaacaataggggaaacgcggagaaacaaaaggccattcgccacgatctcagtcggctgcgtagagagatctctgtggggagggttaggggagagggtcaggaaagagcgcgaggggggggatcccgagagatttagagtctctggtacttgccaggcaccaggggtcggcgctttaccctcccagcaggggtctgaaggtgggaaggggcaatcaaagaaaacttgaagggttttcaccttcttccccagttcagggaaagggaggggctgggattccagatgtttgacagttgttggccccaaagttaagcgcgatttgtacggcctttacacgctccccacctccgtgaggcatcgtcagccccgggggcgacctggctgacggtgcggacttcccctacgctgccccaagccgagactcctccctcaggatcaggacgcccaagcgttgtcccccagcccaggcgcacttttgtaaaagtttgtcttcccgccacccacagcccaacacgcaccctgcaggcgtccgcggctggggatgggctcggagtcttgcaccccgaaagaaggacgatcttattgatttatatcttttcaaatcaaggacaaatcaagatcccggggtggaaagtgggcgacccttgttcctgccgggaagtgcacacgaggagccggccagaaacccaggcgccggcaggggtctgaagaggactccagccccggaagcccgtggccggcgggcagaagaccggtccgccgcctcccgcaccttcttgcacccgcgcccaggtgcgccccaaacctcgccgcccgcccgggcgagatcgggagcgagcagccaccgggctgcgccgcctcccctagcttggagcgggttcttactcaccgtggggttttacctccagcccagggcccggtcggctcccttcgccgggtcagctgcagccagcgcgaaagaaaatggtgagctcggggcaggtggggcgtcgcttgccaatccacgcaagggactctgccgccggtgcgcgaggtcccggcgagccaaccggcggacgggcgagcgcctggctccagctgcagccgccgtcgctccggagcagccccctcatgcacccagcgcgccgcgcagccggccggggctcgactgtctcgcggggacgccgagcggggacccctggcggccgcctgcggtatggcagcaccgtggagagaaaagtcgtctttgggatcatcttccctcc

SEQ ID NO: 32341 - DNA, 573 bp, Homo sapiens
  chr9:36739454-36740027
  hyper
cgctacagcgaatccaagaaaataattaaagctttaatttatttatacgtcttctctatagatattatagatctcacaatcgccgcctcctaatttatgcacgcagagcctgcggcagctcggagccgccagggttggggggtccgggcccctcggagcgggacggctgtcagcccccgcggtggccgcacaaaggctggggtcccggcgggcgcacctgggtgatgggcacctcccgagactccccgggacggaggcctgacagcgcgcggcggccgccttaatagactgcgggatgttctccgggagaaggctgcgccggtccccgaggacagatcatcaggcagagtggtccccggagcaggatttattagcagacaggatggggaagttgattagcctccgcggctgaacggacatcctgtcagacaggcctcttaatccaatcacttacctgtggaggggagccggctgcctcctcctggcccccttcctcctcccatggcacctgcggggccacgcggggtgctccggagccagggtacacaggccaggccttccgtgcctggcctc

SEQ ID NO: 32342 - DNA, 862 bp, Homo sapiens
  chr9:37025300-37026162
  hyper
cgtggcagacacggacatgctcgccccgggaagctcaccttcactccagccgggtctctgctgcctttgttaaataggggacctgcggctaggaaagctggatcccaggctgttgggatgggggggagcggggtgggaggaccaggcatggggacggctcctagcccgggagcaactccctgacctgaagcccgcagagaccccgagcggcacccgagccgaggctgccgaagcctgtcaccttcctccagcctggctctgcagcaaacagaaaggaaacgcgattcgttccacttggaatttccttgaaatctccgaatctaatccggcgttaactcaccgtgagaggagcgctcatctcacaggaggctgtggtaatgggtgaattggcaggatccctgcgggccaggcagccaggccggccttgccctcgccctaaatgacccttcccgtctcctacacacgctgcgtctttcagaggcgggggtgcctgcgtggtaactaattggcttcctctttctttctttctttttcgtttcttatcctctttttttaaaggggagaagccatgagaaaaggcgtcctgcagagaaggacccaatggggtctttaagggtctctgtatgaactggccggctcctaagcagaagctgaactcagaaaccgctacttccttgatttttcaaagccccctcctcaactccaggacgcctttggagccctagccccggtgtcctcgcttagctctcaacctcttcctccacacatacagacacgggtcagggccccactatccctccaagcgccagtctggatcagccccatggctgaaaaaggcgccatcggagtaggggtgtggggc

SEQ ID NO: 32343 - DNA, 983 bp, Homo sapiens
  chr9:37026705-37027688
  binary
cggggtctctctcagagcctccctgctggagaccgcccggagctgcgcggagaggcgggaaatggtgctagcgcacccgggctaggagcgggtgcccaactccggctggcttccctccctggctggctcaagcagcagctccgggcccagcccggggtagctgcggccaaggcgcccgcggcttcgggggcatagcgtaggggcccgcctccgggacagccagcagcccccggccccaggaaggagcagctttgaggaggccgccggaacaatcggcccttgacttcactcagggggcggagagacccgggggctgccaggctggttccgcggcctcgatgcttctgaggtccctcctcgacccctcggtctccgccagatcctttctttctctgcttctccgagtctctggggctcggacttgccccctccgcctctctccaactggctctccgacgtctcggacgaagttgcaaagaacttcctctccggcagcgcggggtcctggcgggtttggagatgcttccgcccctgacgctggggccgcgactccggagtccccgggagcgtgcagccctccaacactgagacccgctgccttcaaagttcccgcggcccccgctgctcgcccatcgctgggaccaggaacggggacaccagcgacggactcttcctcgccggggtgtctacctcgtgccaaccaactcttcgagccccgccgccctccctcgtgggtctgattccactgtctttccgctgcctcttccgggacggccgccgtgcctgccccaggcgtggagtgaggaacagaggagagagcagagggtcccagccaccaaggccgccggggctgccggggctgagatggagccgcagtcggctctgactgcctgcgttgccgccgccgccgccgtcgctagccctccgcctgctcggcgcgcacagtgcgccaccgcgccgccccggagccgctttcaggaccc

SEQ ID NO: 32344 - DNA, 798 bp, Homo sapiens; identical to SEQ ID NO: 25994
  chr9:37034135-37034933
  hyper

SEQ ID NO: 32345 - DNA, 2937 bp, Homo sapiens
  chr9:37035403-37038340
  binary
cgggggagcgctccgtaggaggactcctggcccgccggacaatggcagttttggagagtgaatcgtcctcagcaagagtgttgtttgttttttggagggggtggtcacgaggctgggtcgcaacctagggggaagagcctagagctcgaggaaaggggggcccccggcggcaactggacatcacatatccactgagcagatttcgccacaatcggaaatgtggctgtggattcccgggcggcccccccaccaagtggtctgcgcagttccccagcgccgcctcctccctgcagcctgcgggcccgtgtccctaccccgagatttgatttttggccatctccgagtgctcgactctttccctccgcagcccagccccagcccaggcttcccgccctcccgcctcgcccgcgccgggaggcagcgcctgggaggagcggcctgtccgcgcctggagatcaaaagccctcccggaattgacatttcaccccgggctgggggcggggggtgttggtgttttgttgttgttgttgtttccatttagagggcttgttttgtttttgtttgttttctgtgagttttcatttttccatgggatattcttttgtttcgggtgttttgcgtgttgttttttcgtgggattgattttagcgggttttgctctgtaagtcctggtctttggggtgagttttgattttgtgtaattttgtactttgtccttgtaggctgtctttttgtgtgtcgtttgtaaggcttttccttctccgcggtgtttagatgtgttttgatttggtgtgagtgggtgtcgtctgtgtgtgtgttgccttagggaatttcgtgttgtgtgtgttttgtttccttcgatttgaattttatttttttgaactgtacgttttggtgggggatcgggttatattttcatgtgttgtctttagtttttgtgtttgtgagatgcgctggtgagagtttgcgtgtgtattttggcttttgtggggctttgggattagggaggggacatcagccgctactccgttcctgcccgcacccatgaagggcagaggattaggccaagcatcacgaatcgtaggttcgccgtgctccgccgcttcgcgctctggacgctcgagaccagcgggaaacaaatgtggttcccgagggggcgcccgctggtcgtcaaaacctcgcgggcccggaggcgccgctgctgggtcagaatcgcagagcccccctcgcggggtaccgaggcccagccgccgtccccttgcccaccctctcccctgtgagtcggtctccccttgcgcctggccagcatgcttcggaccgtccggactcccgcagcgttggcccaaggggcggctcccctcggcggagcaggtgacgaaccacttcggaggacacggaattgacactgcggccctagagatacgggacaaggggccagaacgcggggagtctaggctcagatcggagtcgggatcccgggaaaatcccccatctcccttgcccgcagccctagaatcccagaaacccaactccgcgcagctttcggtttggagagcccgccctggtttgcaagcacagatacatgtgcccacacccgaacacacgcagacaccgccagagagcgagacagcgagcgggcgcctccgtagcagcggcctgcggggcggaaccggagctggcgccgcctcaaggggaaaccgaactgtagtgaccggaaatgtccccaggacagaataagccattccttctgtccacgttgccaggacttctccagctcaacacaccttggtttgtttaatgttacacgagggagaagatttagaggcagagacacatgctggctcaatcggcgaggaaatacgagcagagtctaaacagaaagaaatatggaacggggggagactagactgtggggaaggcaaattggaggcccagaaaaggggctggtgcggaagctcctccaggcccctgggcgctctggcattctgtgagaaggagaaagcagaagccgagaacagagagtgacaggaaaagaaaagagacgcagaaggggttggcctaggcacgctgcgagctgccctccagctaagacgctgcgggcaagggagggggaggccgacatcgccaggcgaggggccaaggtcgggctctttaactcagccaggaaacatcgttgggggctccagggctcgtggagcccgaactggggctcatttccggcccgatgcccctcttccccagacccctagcccggaatccagcaaaggctgggccatcgccgtccgccactgggcctccctctgtgcgagccctgggagaagcctcagggaacgactctggcactggggctcggccccggagctagcgcagagcgtgggtgggagtcgacatccaggcaggaggcaaagaagaggccccgccctaaagccgagggcccagttcttcgaaagcctgtggccggagctggactcacaggattcggggtccgtacagcgcgcacgtggtaccgcatcttcggcaggcggcgcccctaatgcccagccccgccctgcttcgtttgccgggcctgaactgtgtcagcattgagggtggacgccgagtcgcggcgagttggtcccttgcggtataaacttggggcttccctaggggcggtgccgggatggatgggggcgcctctccacctgcaactcccccagcgcagagcgcaaaaagtgcacatcgcgggccagccgtcgcctcggggtttcaggcggcgcccggggcaaaaaggagctgaggattggtttgggtcaaaacacccatttcagttggcagtggggtcctctgcgcctacagggcttcgagctccgggtgcgggctcactggggcaccatgtgccagcgactcgccacccggaaatacttgggttgcgctagaatacgcaatgggtctgtgttc

SEQ ID NO: 32346 - DNA, 1232 bp, Homo sapiens; identical to SEQ ID NO: 24723
  chr9:71788570-71789802
  binary

SEQ ID NO: 32347 - DNA, 512 bp, Homo sapiens; identical to SEQ ID NO: 23404
  chr9:79626891-79627403
  hyper

SEQ ID NO: 32348 - DNA, 334 bp, Homo sapiens; identical to SEQ ID NO: 23405
  chr9:79636205-79636539
  hyper

SEQ ID NO: 32349 - DNA, 635 bp, Homo sapiens
  chr9:79636822-79637457
  hyper
cgggattttgtttccctaacttacgaatgcaggaaaaactcggcacatcactcgacaatattgctcttaacgcttgcagaaacgttccatggctgttcccttccagtctcctcggacggaagcaaggggaccacccagtcacctttgcacgctgcggctgtttttgtattccgtgtgctgtttgagcgcttatgtctttcaggcgaattaattcttcagtttcaattcgtgaatgggaaagaaacttgccttgtcgctcttgcccttcccccctcttgagccccagggaatagcactttactcgcgacacaattttgggaatggaggggggcagagtggggagaaatccgctttgccctttggctctaagtcacctccgcctcttgtccgcgccgcgttcgggttgtgactttgtttatgtctgctggtgttgtacgcggtgttctctattaaagcttctctctggatatctatgctagccccgtgtgaaggtgtttcagttctccaaggatgaggccgtggtttgagtgcccacagttaggttagggtactttgcaaatccttcccctccctcttatttcttaacttcagaacttcaaaggggtgagtacacgggcgagccaccagtaagcacc

SEQ ID NO: 32350 - DNA, 600 bp, Homo sapiens; identical to SEQ ID NO: 27350
  chr9:79637630-79638230
  hyper

SEQ ID NO: 32351 - DNA, 295 bp, Homo sapiens; identical to SEQ ID NO: 24726
  chr9:80833898-80834193
  hypo

SEQ ID NO: 32352 - DNA, 42 bp, Homo sapiens; identical to SEQ ID NO: 14400
  chr9:82275758-82275800
  hypo

SEQ ID NO: 32353 - DNA, 521 bp, Homo sapiens
  chr9:94183460-94183981
  binary
cgcggagacgcaggcgctccgggtcgcccgcgctgcccctgtctgccccgtgcgggagccggggtccctggctccctggctccctggctcccgcggcccgggcgaacccagagcgcacccgtacgccggccccggccggtccctagcgcccgggctccacgggccgcgcccccacgcggcgcctcccagagaccctcctccctccgggtgggcggcgcagcggggcctcggcgccgcgaggaccccccgcgccagaacaaaggaatgtggggagggggcagggaggagctcaggccactgagcagccccagtataactgccgttcggaggcgcttctcggtcccgacccgaggtccccgcccgccactaccagacccgcccccagccccggattctcgcagaccccaccggcccgcaggagggagcggcgcactgggggccgcacggactcgccattggagatcgcgatcggaaggtggcgccacgcggcccctacaggcctgggactcccacccgagctc

SEQ ID NO: 32354 - DNA, 789 bp, Homo sapiens
  chr9:95569691-95570480
  hyper
cgcggcgggccttggctcccctgagcctggtgggcctgcaaagagctgcgtccaggagccgcccccagggaacaagctgccagcgggcctggggagaaccgcccgtccgatgagctcggctgagcgtgcacgcagtgccgaaatcaaggacgcctggatgcttttcgttgcagagtgacaaaggttcaacaacaggaagaggatcaggggccaagacaagaagctgaagttcggcctgccaggaaccccgggccccagcatcccacccaaggcgctgctgcaggagttccagctgctgctgaaaggtgcggtgccgcagggccagagtgcgggatcctgagccctgcatgccagtccttgcgggggccgatcgctgtgagccttactcaggtccagccgcctccagggaggacaatgtagacgaggtgcggggcgtgagggcggtgctggccgcacccctggtcctgaggccacgggagccgcgcgaggaggccgccttccactgacgcctgcaccgggaccggttgctgcagcggtgccagctgcaggagctccgcgtctgctgcttctccgacgccagggcgccgccaggatgacaggtgcaggagactgtggctgtgggcagatgtggtttccagccccaggtccccgcggcccctggcttcccagcgcgctgtcctgtgagcaagaagatgaaaaaagccacccgatcaacaggtcagctgccccgcctggcagcccagccagacaaggcaaccgaagttcatcctctctgagttgacttcgtgc

SEQ ID NO: 32355 - DNA, 304 bp, Homo sapiens
  chr9:96573430-96573734
  hypo
cgtggtacagtcactccctgctttgtaaagcgctgctgggtctcctgggaaacagcagcgtgcctggcactacgcaaggcccgcacagctgcgccgttgttgtcaccagccgcagttcccaggttgcacatgcctagagaaggtgttggcgggacgcggttgcgcctctgacttcctttaattccgacttctacttgcgtcgttgtgtaggcgtctgagggccacctgacgtcgtctagtgtctccacgccttgacacttgtctattgaaatgcatcttttttttttttttgagacggagtctc

SEQ ID NO: 32356 - DNA, 360 bp, Homo sapiens
  chr9:96588598-96588958
  hyper
cgccgccgccaccattcccgttccggttggagaacacaatgcaccgcgcacaggctgtgccaaagtccacaggcacccttcggcctccatcatcgcgccctcttcacagatgagcaaacggaggccagacgtcaccggcaggcggcgctgcggtgcgcgaggcctcgcacctgcacgggaagcagcggagaggacgcaggtaaggtaaagccaggcagacccgaacctggacgcgcacctgcgggggagggggtatgcgcggggcgggttgccgcccctcccgggagtacgggcggaggcaggggcgggcgggggctttcagcagctcgtccgcggaacatttgcatgtaatttgggagc

SEQ ID NO: 32357 - DNA, 1346 bp, Homo sapiens
  chr9:96710662-96712008
  hyper
cgacttgggctgggacccgcgcttcttcttttttttttttctttcttagtccccacaagtgaccctctaggggaatccagaacagggaagggagcaagccagaggaactttttttttttttaggtgaaaagccagggggagggatggggcgcccccgctcgcgactacgcctgcgactgtcctcgcgctgcgggggctgtgcgtggagcccgcggtaagctggaatatccaagccagctgcaagtggccttccgttccccacacgcctcctgcgtgctgggcccagctgggcgccgcccaaatcttctctctcccgagactctccagctccccttctactgaccaggagaacgtcttgctccggccaggatcacaccagtggagaagcgaccccctcccccatcccgggccggggcccttctgacaagcctccccaaggactccctcattccccaggccaccttgaacaaagcacactgagcgcaaacttcgcgcctctgggggaacgctgcggccaggctaatcccagccctctctcctcccccagcccttcgcgtccccagggtccaggcggtcgcaggcgctccccactcccgcagggccacagctctcgcgagactcctgagccctctccctcccctggctgcggcccccgggctccgggaagctcagccacctgggcccacgccatatctgggtttttttcccaggactttggggatgagaagagacttgtgcatagagcggaagaggaatgggatccaagggacctttccttcaagtcccgggcctgaaatgaaggatgcgactgctgcctgcaggcagagagacaacctcagcgctcggtggctggggcgcagtggcacgcagggcgggcgccaggtagctccggtcgggcacgcgcagtccgacagactgtgtcaccttggaagacaggatgcggccctttacctagagtggcagctttgtgggctaggtcagcacggggtctccgggccggcgggcaatcgtctgcctctgcgccttagctccctggagcgggcctggagcttccgttgggtctcaagggttccaccaagcaaggaagccctgagctgcccaaacacaatggcgtgcagccctctcctcttccccagtctcggggactcggtctgcctctgcgttccctgtcccggcaaggagcacagaggtgaaggcagtgacaacaactccacccctcccgcactgcagggcctggaatctggtctccctcatttgaggcccaacttccccactgacccacaggtgacccccggaccggagttcccgcatcaagttcccctctgtgccgggaggtggctgttctc

SEQ ID NO: 32358 - DNA, 728 bp, Homo sapiens
  chr9:96714959-96715687
  hyper
cggggcatggcccaggaagctgaggggtgggaagccaccaggcacactcactattttcttccacttcatcctccgattctggtaccacgtcttcacctgcaactggctcaggcccagggactcagcaagatctattctggaaagagcagggcgcaccctcagcaaggcaagtgaccacactcccacagcccgctggccccagccttgtaccgccctacctgtccggcgtggaaaggtacttctgcttctcgaagcgtttctccaggcccatcagctgcagctcggtgaacacagtgcggctccgacgccccttcttggctttggtgcctggctccccagggcctgccgcctccagcttcccgcggagctgcaactcgagcggcaggtgtggcgcacccgcggcgccgggcagcccgggccctgccgccagcaacgcagagctcagccctgaacagcccagcggcgccagtgggaacttgaacaccgccgcctgctcggccttcagcacggctgcgaagaaagagaatgaggacccgggtgagctacggccgcgctcctctgccccagggactgccgcaccacgtgccgcgggggtgctcgcgcttggccagtgcctcccagcgcaaaacctccacgccctgccggtcggcgccggtggcgcagatggagaccctcctcaacgttgccgttccccagatttgggagggagtatctcctcgaccctgtcc

SEQ ID NO: 32359 - DNA, 1379 bp, Homo sapiens; identical to SEQ ID NO: 29539
  chr9:96720648-96722027
  hyper

SEQ ID NO: 32360 - DNA, 813 bp, Homo sapiens
  chr9:96722524-96723337
  binary
cgctcctgtgacccggagatgacccggttcttagtggtccaggaacctgaggcgatgctcctggactcgcggagccgccagcccgccgctcccagccctccaggccctggacgggtcccgcctccatttcacacccaccgctcgccagccccggcggctcccgcagagaccttgcatccgagtccagttacgcgaaccagcggcgcctgaggccacacccagagccaggaagtagccgtctgggtgccggggctctgtgggcacggccgcgctgctgggcgcggactgcaaggccgggcggggatggtgtttgcgacccgcacaggcgctctccccccggcgagtgtggacccttcgagaatgctcccttggcccaggactgatccccacgagcatacagcttcggccttccgaggagagtcagggtcggtgcggaccgactccgcaggccctcccttgccccatctgggctggtgccaggccgcagctcgagacctggtttccaccccgggctcccacagagcccatgaagcgctggtcacagcccctggaagctgcagacccggcttttcgaggagcctccccgacgtgcagagcctgagaccccagagagcggccggctcgtgcgggccagaacgcggcgaggcgcccgcggaaacgactcggcttttctttcttttccccttttctttctttatttgcttttttttttcctctcttcccttcttccacccatttccccctcctctttcttttgtttttttttagtcctccccccacccctcttctttcttttgttgctcgttcactctc

SEQ ID NO: 32361 - DNA, 1642 bp, Homo sapiens
  chr9:969529-971171
  hyper
cgtgtgcccttcggcgggcggctgtagctgtagctgttgtgacggctacggcggaggctgcggccgcgcggggaatggagccggaccgcggagtcgtcacctccaaggtgtttctagtggcctcctggaagatgatcccgcgcccaccttgccggcgtgttcgcgggcccctgcccactgccccccctctttctttaggtctggcttttgaggatcccggagtcttgcagctcccgccattccgcagataacctccgcacacttaattgtgacccgcggggtggtcggagaagctccgcacgcgtcctcagtgggaaagtgtcccctctcagcactgcccccttcagtccccctgcatttctggaaagtcaggcaaggcccaggtaggctgccagtgcactctcagccttgactgagcacctttcgggcctctggtgagccccgagagccaggtttggctcggcagagcgggcttgggctgcgcaagcaatgcgcatcgtggccgcctgcaccctgggaactaggcctgtccagtgggcagcatcctcatttttgaaaaggcccttctaaacccaccggcctcgcctaacgccgtttggtgctgcatccgagcggcctcacgcggtcccctggaagggccactcccagcgggagggcggggcccgggacctgcgctggccacgcagggtctcaagctgaccggaagacccggcttttggcctgtgtccaatagccccagaagagaggggtctggagccttcctcccacgcgtagtgacgctcaggtgtcctcgggttgttagtcttgacccaggagagtgcaagacaggcccaaggcctggggggattgcgttatgaatgtccaattctaaacacaaggtagagcacagacagtacatcctcacggctggattttaaccgtattttaataaacacattcgagggggtgtcagtttccccaagctctgcccccttccgcgggcgggatccatggtgtgtgcagtgtaagagtgcgcagaacgcgtgtgttcaagtgtgggcgtggcaggcgtcgtgtgctcgccccgcgcactgtgcggatcgcccagacagccttgacaggtttttgcagatgtttgggtgctacggtgtggggaaacccaggcaggagcgccaggcctaattctcctggactcttggtgagcggccgctactccacgaggggctagaagcaaagggggcacgcgcttttccccaggccgcctcttgctgccgcagtggctgagggcgctgatgacccctccccgcttccagcggacttgacccgcgggctgacaacccaccgcgacaagcaggcggctgggttcgcgccgccgccccggggcccttggctcaaatttcacctcgagtcctgcagaccctgcgccactgaattggggcccaggacgcccttggtgacactcgccttcttgctgccacaaccaccgtcatacccgcagccggggctccctccgctaaccacgcttggagaccccaatcggggacagaggtgggagtcagaccccccctggcctgcactgccgtttccctcgattcttgcggaaacaagactcccgcccacacataaaaatgcagctcccggccaccgggcgccggtggctcac

SEQ ID NO: 32362 - DNA, 489 bp, Homo sapiens
  chr9:99639589-99640078
  hyper
cgcgggcgaaggaacacccccagatgccgctgcgcagggacaggggacgcgcccagacgtagaggccctgacctctgaatcttggcggggcacccaggagcccggcttcggggtgcttagcggggcgaagccgcccccggacccgcgtggctccagcctcctgggggtacctggcagagggggctgcagcgagcgccctgccgcgccgcttcctccgcgcgtctcccgcctggctccgccaagactgggggcttccccataggcccgcgtccgagcgcgtcctcaggcttcgctccgcgagatctgggggccccgtgggctggggttcgggcggggtccgttccttgcggtccgcggtcttgaagcaatttcccggcaaagtcccgggacagcgggaaagaaactggtctccctgcctggggtcgttcccggtggatgtgcctcttcatcagacggaattttccgtctgtgcaaaaatgaagcttactc

SEQ ID NO: 32363 - DNA, 1398 bp, Homo sapiens; identical to SEQ ID NO: 24730
  chrY:16635744-16637142
  binary

SEQ ID NO: 32364 - DNA, 281 bp, Homo sapiens
  chrY:22918423-22918704
  hypo
cgctgtcttgacagacgccagagagactcgtgaggttgtcaaaggtctgggagttttgcggggtttgttctggagtctggcaggaagtaatatttgctcaaaactgggcgtgaaatagcctggactgtcctttctcctccgatccggtattacccgttagcagttgttacagctgaagataaagacattttactgttaactgagacgagtttctctgaaaaagtttggtgtctttttcaggcccggggccccaagaagcacttgaagcgtgttgcagcgcc

SEQ ID NO: 32365 - DNA, 715 bp, Homo sapiens; identical to SEQ ID NO: 24731
  chrY:2655227-2655942
  hyper

SEQ ID NO: 32366 - DNA, 167 bp, Homo sapiens; identical to SEQ ID NO: 29548
  chrY:4869596-4869763
  hyper

SEQ ID NO: 32367 - DNA, 200 bp, Homo sapiens; identical to SEQ ID NO: 24732
  JH636052.4:5118715-5118915
  hyper

SEQ ID NO: 32368 - DNA, 126 bp, Homo sapiens; identical to SEQ ID NO: 14412
  NW_001839646.1_1-5206:1401-1527
  hypo

SEQ ID NO: 32369 - DNA, 32 bp, Homo sapiens
  AC211344.3_7702-13588:3835-3867
  hyper
cggagctcttgatgtgcgggaaatgcagaccc

SEQ ID NO: 32370 - DNA, 584 bp, Homo sapiens; identical to SEQ ID NO: 14413
  AC211344.3_7702-13588:3943-4527
  hyper

SEQ ID NO: 32371 - DNA, 1536 bp, Homo sapiens
  chr1:101701717-101703253
  binary
cgcccaacaccaaaaccggcgctggttcatttctctgtgcactctgggaaagccactgcccctcagaccgcagttgcgagtagcacgaggatctggggtggcggggggagtacaggaacctcccggttcattctccctcccgggctgcttgtctcctccgtacctctcgcagccccttcccagcctctcctccccagagcgccgccgacactcgccgggccgcggctcaggttttctgctgctcgcgcgaaagtggctcggggagctcctggccacaagctcagcacaccgatcctcctagggctgcggggggtgtgggaccagggcggtgcgctacgagactccgggccgtcctctgcctcctcagacttttcgagagaaaagttttcaaagtctctccaccttttttttttttcaggggctcgggagaatcctctccacagccagggatcagcgtctatctgggcgagggcagtgatttatacagtagaatccaggggttaccgggctccgccccttctctctctctctttttttctttcatttgttgtttggggaggaggggttcttttttttttttttttttttttttttgcttctgccccagatctttcctggacagtgcgtctcagcagttcagatccgggggcccccagctgacagagggcgtggggggttaaggcattaacccctcccagcctcttcctgaagaaaccacccagccttggcgcggcgctgggtgacttcgcgtagcaggcagggaactggccgcggcgagcgggactggccattggagtgctccgctgcggagggaggggaccccgactcgagtaagtttgcgagagcactacgcagtcagtcgggggcagcagcaagatgcgaagcgagccgtacagatcccgggctctccgaacgcaacttcgccctgcttgagcgaggtagggggcggcgaatggcgggggtcgcgggcgcggggagcccggttgtggtagggcttaggtgtcagaaacgaatttttaagtcgaacgaggcaaacaaaaacttagaaaacatgcatctccgggcgctgaaaatttgcatctctgggctactaaggagcccatctcgatcagattgttcttgggcacttgtgatttatggagttcagaaaaaaggttaattcccaactgtggaacctacgggtgtaggggcagtgaaaattgcagttggtcggaggaataggagggaaggcgttaaattttggaaatcctatagacaaagaatatggtgggtggtgtggagcgtgggtaatggcttaaattagtactgcccaggagcagggtataaaattagttgggggaaaatgcggagcttcttggcttgagcagcctctgctgttcgcggagttgctgggattgttctcatctctattacctcattttattgcattgctgcattaccttgaaatatttaagcaacttagaagtagacttctgctgaccagtgccgtcttagaaagtttctttgtaactttctagtcctaggagaggagtcaac

SEQ ID NO: 32372 - DNA, 59 bp, Homo sapiens; identical to SEQ ID NO: 29553
  chr1:101703569-101703628
  hyper

SEQ ID NO: 32373 - DNA, 603 bp, Homo sapiens; identical to SEQ ID NO: 24737
  chr1:101774910-101775513
  hyper

SEQ ID NO: 32374 - DNA, 993 bp, Homo sapiens; identical to SEQ ID NO: 22981
  chr1:103573419-103574412
  hyper

SEQ ID NO: 32375 - DNA, 859 bp, Homo sapiens
  chr1:108506290-108507149
  binary
cgtcatagaggattagtgctgaaatgtgtcagggagagggctctgtcctctcccttttaagttgaaagcagtttggttttttgttttgttttaacattctgaaagagaaagaggctctgaaccgagtttaacatccttctgtacaaaaattttccgacaggacaaataaactactcttccactgaactgtgacttttgagctgactctagggtgcacccaaccttccagaggtgtctggcttaaccctcaaagaggcagctccagccccaggagccgaccggcaccacagcacctgagcagggcactgcaggaaggaaagcggaatctctagtgaaacttctcatttcctgtcgctgctgagagaggctggactcgctccttctcacatggcttaggaagagctgtaaacgggagcttgccggctggccaccagctcaggggccctgggggcggcctccgggttctgctccctgttcttccctttgaccaatgtcactcctggacagataacgggaccaaacgcccttcacttcctcgagtcctcatgtatgtcatggttcctcttttaggaaaacatgagtacaagacgcaaagcaaaagaagagactaaaggcaaattaccccatcacctcgtttcgtccctccccttcgttattatagaagagcttgatcaaattccctttgtcgcgccacacacacgcagagtaggtgaagggcaccctaagacaacttatttctttcccgcctcacagaaagcctttacgaaatcctcacaccatctccggacgcaaagctttcgcattcagcttgaggagctaaaccatttcaagccaaggtaggaaacgccaaagtggtgcc

SEQ ID NO: 32376 - DNA, 1087 bp, Homo sapiens; identical to SEQ ID NO: 29557
  chr1:109656099-109657186
  hyper

SEQ ID NO: 32377 - DNA, 208 bp, Homo sapiens
  chr1:110186004-110186212
  hyper
cgtgccccttgcaggtgggtagcgctgagagcagagcagcgcccgcgggactggcctgaggatcccgcaggcaggagggaccccgcgggcctttccctacctgggaggtgcacggttggccaccagggcgcgctgctggactctccccagaaatcgggcggaggtttaggcctcagagtcacttaaacttgtaaccctaccggtagcc

SEQ ID NO: 32378 - DNA, 994 bp, Homo sapiens
  chr1:110610659-110611653
  hyper
cgcgagagtggctggcagcgccagcacgcagcctgggttcagagcaaggctgggcgctctcagcaaagggcggcctggggctgcgcgggcggcggactgcaggcgggagaagagcgaggtgcgccaggctctggggcgcgcaactgcccagcctcgtgaaagatcgcgccgcagatggggcgcagctgcgcgctcactcgtgtggactggaaacgctccgagccggttattttaaaaaccgggaaataaggcgggttccctcttcgcccgccacttcccaccaagtaggctgtgcggccctgggggctgactgtcctcaagcagccaggctccaccgcgcgccgcgctgcgccgaggtccgctctgccgcagggacgctggcagcccgttgaacaccggcaagagcgccagaggctagcggccgccaggatctctaccaggctctgctcgcacccgcctgcctccctttcgtttggcctgtcctccgttcaactgaaatcgttaattttcttacccccttgttctcattttgatatattctacgctttaaacatgctccgttttcttttgtttagtctgctccctccctctttgtcctttcccccttctctagttatccgtttcgttcgatcttgctcctgctttttttattcgttcgttcctcatttattcattttagttcatcccagctcgccgactgccatttaccctctcgttctcgccgcgctctccgttgttttgttcaatttcccttccccttttcttggttgtcgctcgctttctttggttttctttctcggtatttcgttgtcaaggccacccttgccgtcggatcccggggtgctgggtttctcccggccgctcgttccgcaccagcgctctctgcagttcgcgcggcaccggtgtggtccgggggcccgagctgtcggtgccggatgcggcgcgcctagcagggacgcgggcctgggggggtggctcctgcccgacgcggagc

SEQ ID NO: 32379 - DNA, 1278 bp, Homo sapiens; identical to SEQ ID NO: 30715
  chr1:110626374-110627652
  binary

SEQ ID NO: 32380 - DNA, 736 bp, Homo sapiens; identical to SEQ ID NO: 14424
  chr1:111746588-111747324
  hyper

SEQ ID NO: 32381 - DNA, 637 bp, Homo sapiens; identical to SEQ ID NO: 14425
  chr1:113256965-113257602
  hyper

SEQ ID NO: 32382 - DNA, 810 bp, Homo sapiens
  chr1:116710529-116711339
  hyper
cgaagggcgtaggctcggggtctcccagccaggacacacaaggcaggctggggagccagggtcagccagggcacgccgctgagatgtctttcctgctccttctccccgggaagcaagggaagcaaaaggccagaggggtgctgggatcgctgtccgcagcaccagccttctcctgggacgtgttcagaaagagggaggctacagtgggcggggagagaagaaggaagagaaggtgggcagaaagggggcaagatgaagcggcaaggaggaaggaaaggagaagctaaggagggaggatggggaggcggcgacaatggccgcgctaccggtcgcccactgtgctgcggtgggtcggggcccactgcccctcgctggggcacctggggagggggcgctggggcacctggagagggcgcgcaggagcagcgggccgagccttctgcggggatggggtgggaagagaagaaatgaagacacagaggagtagaacaaagaggcgggagcaccccgccaggggaccgggaagggtcgaggaaaactgctgccgcgccccactgggttttaacaacgcccgggatgggggaagggctcccacttgcgccccaagcgcatgcggagaaggttcggcagcgcctcctgccggccgcccggagggtccgcggtggcgccagccccgatcgcagccgcgcaggcccgagggcccctacccgcacggtgaattgtcttccacgcactagtattttctcctcgctttcaactgaatggcggcattggtttcactatttccttcctggagctgtggttgaggcc

SEQ ID NO: 32383 - DNA, 287 bp, Homo sapiens; identical to SEQ ID NO: 14427
  chr1:118149482-118149769
  hyper

SEQ ID NO: 32384 - DNA, 1035 bp, Homo sapiens; identical to SEQ ID NO: 24751
  chr1:12226892-12227927
  binary

SEQ ID NO: 32385 - DNA, 1749 bp, Homo sapiens; identical to SEQ ID NO: 14430
  chr1:12677012-12678761
  hyper

SEQ ID NO: 32386 - DNA, 922 bp, Homo sapiens
  chr1:14924519-14925441
  binary
cgccaatattcagcccggctaagaagcttaggagctggctaaggctgctcctccacctggatgcacacacagggctagggctgtggagaggcgggagcaccagcggcccacgccgaggaagataggcgctccctcctggggtgggcagcgcaggtctggcctgcgggtggggggtggagagtgagaggcacgcggggcaccagctcagctcccctctggggatttcgtactcgcagtttaaggaaccggtggagcacgaactccactcctgagctggcgcaagcgtctcccttccatggagatccaccccggctcccctctgaggccccctttccaagcaccctctcttccgagcacccagcacctccccaaccttagcacggctcggggcaccagttctccagggcgggggctgccccaccgctcaagggaggggacagagggccggcctcggtccaggcgacccctgcccctcgccaggggcgccaccttggccccctcccgactgccgtccgccgcctccgcccccccggggggtgtgtctccgaagtacgggggcgcgggaggccaagggtgcccccagcctccgaccgagaccccctcccgagccggcggcgaatggtaggctccatttaaagagtgcctggtggcgcgcggtgtccttcttggagcagctctcggcgcccgcccgccggggtctcggcgatcgctgctcctcctcctccttctcctcctcttttttctcctccgcctcctccccccgccgcctcgccaccgccgcggctagggctggaggcgccgctgtcattcctgtgccggaggaaccggcgctgccggtgcctgggggtcggggcgcgggcgaagccgggccgcggaggacacaacaggtagagccgggggtgcccggccgcgcgccccccgc

SEQ ID NO: 32387 - DNA, 279 bp, Homo sapiens; identical to SEQ ID NO: 24756
  chr1:1502406-1502685
  hypo

SEQ ID NO: 32388 - DNA, 430 bp, Homo sapiens; identical to SEQ ID NO: 14433
  chr1:150669495-150669925
  hyper

SEQ ID NO: 32389 - DNA, 68 bp, Homo sapiens; identical to SEQ ID NO: 7652
  chr1:151373761-151373829
  hypo

SEQ ID NO: 32390 - DNA, 271 bp, Homo sapiens; identical to SEQ ID NO: 14435
  chr1:151378250-151378521
  hypo

SEQ ID NO: 32391 - DNA, 154 bp, Homo sapiens; identical to SEQ ID NO: 14436
  chr1:151566699-151566853
  hyper

SEQ ID NO: 32392 - DNA, 976 bp, Homo sapiens; identical to SEQ ID NO: 24762
  chr1:153651442-153652418
  binary

SEQ ID NO: 32393 - DNA, 229 bp, Homo sapiens; identical to SEQ ID NO: 14437
  chr1:156326789-156327018
  hyper

SEQ ID NO: 32394 - DNA, 1256 bp, Homo sapiens; identical to SEQ ID NO: 24767
  chr1:156390054-156391310
  binary

SEQ ID NO: 32395 - DNA, 746 bp, Homo sapiens; identical to SEQ ID NO: 24775
  chr1:161275470-161276216
  hyper

SEQ ID NO: 32396 - DNA, 556 bp, Homo sapiens
  chr1:162792057-162792613
  hyper
cgccagtgcctcgatttttgcatttaaaatgaggcgaaagaacaaatggaataattatagaaaattttagcctctagcaaaacactgtgaagcagctccagcctgtggtggaagatgtgcgaaagggatgggggaacgctgtggaccggtgtggagtctaggacgacaggtggtgggctctgtccccacgcgcctcgcggccagcagaggccccctcactgcggccgccgggcgggactggcgcgggcggcgctgggctgggcccgggaggctggcatccctgggtgctccggtgcggtactagggggcgacggctgagccgtgggtggagccgctgggtcagtctcggatagaaataaactgggaaactgctgtggtctctgttgcttgcgtgctcggttttcgtgcttatcacgctgatgatgaggaaggtggttttggttacggagtgagcaggtgaacgcctccccgtggaccccaccggactgggtggggaactcacaactctgacgccccgtgactgcatcccctagctgggcagagacgcatttggctc

SEQ ID NO: 32397 - DNA, 759 bp, Homo sapiens
  chr1:17445328-17446087
  hyper
cggcaagtctccgcggaagctccgctgaactgggagtgggaagcaggagaggggctgggttgaggtgggtccgaggggaagtgaggtgcggaggggaagtgaaaggggagaggacggcagggaagctgaaggggtgtgaggtcccccgggaggagaactggagagggccagacggagggttacgggtgaaagggagggtctgtgagggagctggggctgaggctgtgttagggggtctgggagagtctcagggtttctggaaggtggacacaaggttcgggggttgtcaggtttctggatgagattcttaggatttctgggctcgggggctcgggatgagggacaactcgggctggacaaaggctgtccacgtccccgagtctgagcgcgtctcaggatttctgggctcgagatctcggcccgggcatcacggtgggccggctcacctgtagacatcggtccagaggtaggtgcccagcacgtacaccgcctccacgcggctcccgtactgcagccgcacggtccgctcgcgcagcatcctccccgccgcagtgcccgcgctcgctggtccggggcggccgggagcacctgcagcaggtgcgccttctccagcagcctgcgccccacggccccgcgcgcagccttatccagcggccggtgggcggggcggcccgccccagtcctctcgcagtgggctgcgggcctgtccgtcaagcgtggtcccgcccctaactcgtcccgccccgctgaggtcgtggc

SEQ ID NO: 32398 - DNA, 227 bp, Homo sapiens; identical to SEQ ID NO: 14443
  chr1:175161560-175161787
  hyper

SEQ ID NO: 32399 - DNA, 403 bp, Homo sapiens; identical to SEQ ID NO: 23690
  chr1:175372314-175372717
  hypo

SEQ ID NO: 32400 - DNA, 384 bp, Homo sapiens; identical to SEQ ID NO: 23691
  chr1:175375048-175375432
  hypo

SEQ ID NO: 32401 - DNA, 110 bp, Homo sapiens; identical to SEQ ID NO: 14447
  chr1:182361452-182361562
  binary

SEQ ID NO: 32402 - DNA, 697 bp, Homo sapiens
  chr1:200271204-200271901
  hyper
cgcgtaccaaacaacgaagctcctgcccttgggagtttatacacaggctatgttaatatttgcaaagggccccgagtgtctaagcggctaatgaacgtcttgggtcggtttcctcaaaatccagcccattgtttccccggtgagcacgatccgaagccttatcccataacgcactgtagcccgaatctttctgccaacaaccgctgaaactaccagaggttaaagcaattaacatgagatgcaacctcaccgtggcgcagctccgcgcgcccccggctgctgcgacccgggaggggggagccccggagcggctgcgcccggccccgcacccccggcagagcaggttagctccccctgggtggcaagcctttgcaaaacaaaaccgaaaatgagcgttcgctctcctgacagtcttgcctaaaagaacctcgtctatactgcaaaatcccattaggtacacaagtccggtcggcattgtcacttttagcgtgacttcaatttacacattcaaagaatacctgtccggagcatgggacctggtagaaaggttaggctctctccgaaggaagttcaactcaggatttccctcccccggtgctgcacacaccatcaacggcaaaacctcccctcccagttgcagatctagacttgctgagaaaggtgctggagatgtttccaaggtcatccccagcaccgc

SEQ ID NO: 32403 - DNA, 498 bp, Homo sapiens
  chr1:201252452-201252950
  hyper
cgagcaggaaggcgcccagcgtcccacacaggggactcgcagccctgcccccaagagcgctggctccgcagcagcagtgccctgcagctccgcgtctgagcagcagcagcgcgcggcccggtggagtgggtggtgcagggcaggggtggtatatcctgtctgacggagggcgggcctcgccagtgccagagagggacgaaccagggtggaagcgccaggagcagctgcagggagccctcacgcggaccacgcactctatggccgtagggagccgctgagagcgagaagagcacgctcctgcccgcccgctgcaccgcacctcgcctcgcctctctgctctcctaggccccggccgcgcgccacccgcctcccgccaccatgaaccactcgccgctcaagaccgccttggcgtacgaatgcttccaggaccaggacaactccacgttggctttgccgtcggaccaaaagatgaaaacaggcacgtctggcaggcagcgc

SEQ ID NO: 32404 - DNA, 494 bp, Homo sapiens; identical to SEQ ID NO: 14452
  chr1:204347108-204347602
  binary

SEQ ID NO: 32405 - DNA, 1485 bp, Homo sapiens
  chr1:20810336-20811821
  hyper
cgcggtgaaacagctccatcctccgtccctgccaggggtcccttccctgctttcctctgaaccacccaccaccctctatcctccagcctgcgtcccagctccattctgagaaaaggaaacagagggcgccaacccagccgctcctgctgcagccagggcgcgcactggcccgcgtcctccccgcaccaggcgcactaatttagacagaaatgtctggagctgggataggagagggagccaaagtctttgggtctcgggaccccaggtaagtcccgagcgcagctccggtgggcaaggctaggtgcggagatgagcggaaccaggaggggacgccaaaaccggttcccacgacgcgcagcgggtgggggttagggcctggcctgggcgggcgccccctcctgcgcgccctctcccagccgctggccgactgactcggccgccccgcgctccccgctgccgcagaggtcagagcctcccttcgctgcctgccagggacacatgccgtaacctcggcctctcttaccgtctcgacttagcctcgcctttctcagtccctccatcgtccctcggcgcgacggccggcagccgatcgaggtctctgtctctccctgtctaaggtgtcggtcgcccttattgtttcggcggcttctgcgtcctccccaaacgcgcgtcctcggctctgtctctcccgcttcagctcccctctcgggagctttgtctcggtctctgccaccctcggtctcccgcgtaccccctcccctccatccctgcgtctcagtctctctctgcagccgtcggtccccctcattgtccccgcgtctctggagctcctctcggagcctctctgcgtctccgcctctctggggcttttccagctctcgcgcggatcgcccaggcctggcaaaccccctcccaagccaagtaacaatgaaaagcccgtgcgacccgaacaccctagccttccccgcaggaatgggatcctccccacgcaggtccccacgccgtcccctgggggtccctgggaccccctccccacagggttatggagcgagtgcagctgtgactacactgcgcaaaaggcgggggtggggggcgcaaatcaaaaagcaaactttgccgcgcgggtggagacccccagctgctgctagaagccgccacgcccccagggtgacccagccggggatccggcttagggggacgcgttcctgcgacccgcttcagccggacccgcagtgcgggatcccccaattctgcaagaagggattccgtcaggtctgaacgggctccagcgggtgggagacctccgcaacccttgttcaggccgcggcgcgggaaaaagggggtgtcagacaagggggccgcgaactcaccccgcttgctccggccgatctggcccagcttgggcggccgcttgttctgcccggcgccgaagaagttgttggtgtcctgcaggcggcaggagaagatctggcccacgtcgccgcc

SEQ ID NO: 32406 - DNA, 179 bp, Homo sapiens; identical to SEQ ID NO: 14457
  chr1:212838662-212838841
  hyper

SEQ ID NO: 32407 - DNA, 1447 bp, Homo sapiens
  chr1:215255075-215256522
  hyper
cgctgagaaagtgggaaggaagagagtttagaaacggattgaagttccactacatcacgtgtgttgttagagaattcgcctattacgacgacagcaacgtctgatctcctggctttcttcccctccttggtgggttccgttccgtccccctgtcgctgcgagtttggctgtccctacgccggggtcttggagtttgggcggggtctggtacctgccaaatacggatcctgatggggaggaggtcggggagcgctaagttcaggctggagtctgagttctcccaccctgctgctcccacccaccgcgcttagaaacctatgtttccagcaaaggggtcttgctctgagagaacctaaccgggttttcttccattccctttgcatctctagatgtcttcgccctggctccaggtgcgttccccatccttttcggtcccggacgttctgcagattatagcgcccagctcatgtccagcaccgccggaggtgaagtggggcgagctggtgactccttaacccttcccgaaggtgtagactggaagaagccagggtcttcattacctcccctactccagggctctcaaggcgccaacggggacacttccctgtacaggtctggggggccacgagggcgaggaggacgccctagtgcaggggtccaaggactcgcgtcccagagcttggtcccacacccggtcccacaccccgaacgctggtcgggaaggagataggatgcagcgcagtgtgatgtggatgccagacagcgagagtgaggattttgcggggtggggatgggggttagtggaaggggctgagaggggaggaggcagcaggtgagccaaggggttgtgcccccaggaagagggaagagaggatctttagaagggagcatcttgcaggggcgacgcaggcaagggtagggctaggaggaggtgcggggaagcaagccctggcggtgagacaggagggggaggaggcgaagaggagggagttccgaaaggagggaaacgagccggcaaggggcgacaggagcgagccgggaagggagagcagcggagggctgcagagctgcgggcgcccggaccgtgccacacaccccccgcggggcacggagggcattgcggggggagacacacaaagacatgcgaagaggggctgaacgaggctcgcgcacaaagacgccggggcgcacggcagctggggctgcacccaccgcccccgcgccgcgccgtgccggggccgggccagcgagcagcccggggctgagcgcgtggcggcggcggcggcggcggcggcggcgggcaggcgcgggacccgggtcgcccgcgctctccgggtgacccgggcccggcagcaggcgcgcgcgggggcggcggcgcccaagcccaacttggcctccgcctcgccctctgcccagcccgccggtgtcccctccttcccgcgatttc

SEQ ID NO: 32408 - DNA, 472 bp, Homo sapiens
  chr1:218519313-218519785
  hyper
cggcacccgaccgagtaccgagcgccctgcgaagcgcaccctcctccccgcggtgcgctgggctcgcccccagcgcgcgcacacgcacacacacacacacacacacacacgcacgcacacacgtgtgcgcttctctgctccggagctgctgctgctcctgctctcagcgccgcagtggaaggcaggaccgaaccgctccttctttaaatatataaatttcagcccaggtcagcctcggcggcccccctcaccgcgctcccggcgcccctcccgtcagttcgccagctgccagccccgggaccttttcatctcttcccttttggccggaggagccgagttcagatccgccactccgcacccgagactgacacactgaactccacttcctcctcttaaatttatttctacttaatagccactcgtctctttttttccccatctcattgctccaagaatttttttcttcttactc

SEQ ID NO: 32409 - DNA, 574 bp, Homo sapiens; identical to SEQ ID NO: 27417
  chr1:218520063-218520637
  hyper

SEQ ID NO: 32410 - DNA, 87 bp, Homo sapiens
  chr1:218520772-218520859
  hyper
cgattggcgtggagcgcgccgaactggtgcacgaagggttaaaaaaagtgtctcaaaactagcctctccggaaggcgccccctttcc

SEQ ID NO: 32411 - DNA, 189 bp, Homo sapiens; identical to SEQ ID NO: 14460
  chr1:22023693-22023882
  hypo

SEQ ID NO: 32412 - DNA, 936 bp, Homo sapiens; identical to SEQ ID NO: 7688
  chr1:225614356-225615292
  binary

SEQ ID NO: 32413 - DNA, 773 bp, Homo sapiens
  chr1:228871482-228872255
  hyper
cggatcgatgcccccgcagcagggggaccccgcgttccccgaccgctgcgaggcgcctccggtgccgccgcgtcgggagcgcggtggacgcgggggacgcgggcctggggagccggggggccgggggcgtgcggggggtgccgaggggcgcggcgtcaagtgcgtgctggtcggcgacggcgcggtgggcaagacgagcctggtggtgagctacaccaccaacggctaccccaccgagtacatccctactgccttcgacaacttctccggtgagctggccggggggccggggccgggggcgcgtggccgcggtccacccaggggaaggaaggtggcgcgagggtcgcgaggttcccaagggggctgcagggccccgggcgcggctccagctgggaagccggacaaatgaggagtgcaggacgtttcctgagtctcagggaccgggcaagcgcggagctaacacgaaaggaccacggcggagtgggcttggagagaggagggcggagcggcagtcagagccttgccaaaaaaaaaaaaaaaaaaaatctcacaatttaagcaacagataagtaggagtgaaacaggttgagttcagggtgcccggtcagtttgttgcatagagcaaagtttcctgagggcgacgtcgctggcgccgctgcagagtttcaatcagaaggtgacgcgcaggtgcctttacctgagcgtcgctcctttgcttttaggcggctcagctcacaaggggcgtctccgctttaaagagccgcggagacgcc

SEQ ID NO: 32414 - DNA, 895 bp, Homo sapiens
  chr1:231296732-231297627
  hyper
cgcaggctgcagcttccccctgcctgaccccgccagcctgcgcctcctcacccggggactagcagaagcctgggcccgcgcctggcgctacgactccggtctttagtctttgtttggagcacgggagaacctgggacggagggaggcatgacttcaatattcatatcgttgttaaataaacgatttcctaatttgtatctgtttcatgccagcgtgaaacttctgtaggcagagccggctgcgctgccagcactttcttctgctcgtccccacccacctctgcctcccccacccagccttccctcggcagcagcggggaagaacagccgagcagaccaaacagccggggccgcgggtgggaggctgttcccgcagctcgtggctggcgttggagaatgtggagattttcccattcataaaaggaacgtctccgcttgccgccttcccgtccgccgcacaccgccacatccgcagcggggtagggctgggtctgggggcgctgggttcccaggggtctacccgggcgcgctctcgcctttctcaggaaaccccattttgtgagcggcaccgcgtgtcctctctcagtccgtgcacacagttgacctggagcgcggatgagcacccttggttgaaaggaagagacaaaatggcttgtggttcaattcataaataaaacctcacccttggacttcaggctgcccgacattttgggacttggatttttttgctttatcgtagttttaggaagcgactgtcaggccatgttgcctatccatttctaaacgactggctttttaggatcccgttttcacccttctatggcggtgggttgggggtggggtgtggaactggagtggcccagggagacgatggcaggggcggggcggggcaggtc

SEQ ID NO: 32415 - DNA, 554 bp, Homo sapiens
  chr1:232941054-232941608
  hyper
cgcccgagacccgctggagcgcttccgcaaatctcgcgagatagcaggcagcgatgccttttgctccggtttctcgtgagaccccggggcttcagcttctcgtttgcggagcccgcggcggcgtttcctggggcaacagcaatggcggcctcgctgtccgagcggctcttctcgctggagctgctggtggactgggtgcgtttggaagcccggctgctgccgtcccccgctgccgcagtggagcaggaggaggaagaggaggaaaaggagcagggggaggcctcgtcgccgcgcggtctgtgccccgccgtggccttccgcctgctggacttccccacgctgttggtttaccctcctgacggccccggcgctcccgccgccgaaccgtggcccggtgtcatccgcttcggtcgcggcaagtcctgcctcttccgcctgcagcctgctaccctgcactgccggctcctgcggaccccgcttgccaccttgctgctgcagctgccccctgggcgcccgacgcccaccccacagctcctgggggcctgcgacatttc

SEQ ID NO: 32416 - DNA, 1411 bp, Homo sapiens
  chr1:235811934-235813345
  binary
cggcacacctcactcatgagcagacgacaggactggcacgttttaatggagcacacgggcgcagcctaggcggccttttgctccggctgagaggcacgggcccggtgccagcatttgacagtcctgggaggcgacgggtagaggagagacgcggcagccgcggggccggggagacggtgggaggcccggcgtccatcatccactttattacttgatcaaactttaacattttcgggtttcctaacaccttagccccaaatactcgaaatgaagcaaatcttaaattaaggagtctttccccaccacgctctgtcctcctccccacttcaccctcccgccgtttcgcgttatttccaaggcaatttaaaaaatcaagccaaacaaagctccccggttgctgccgggcgcgcgcggcgaacgaagcacatttcagttcagcaccagcctcggggacagacgccatcaaggaggtgaggaaaaccaccctcagctgcggtggctccagcgtcaccccgagtgctcccgaggcggcgtctgggctgctggggagccaggagggcttcctcaggcactcgccagaaacatttccccaaagaaaacgcccaaccagccacgccatctcctgccactgaggtccttttccacgggggacgtccccgctgggaaaacagcaaacgctctgtgacctacaaatggaagaggggacccccgagcccccgcctgcctcatgccggagggaccgggcgcccccagccccggaagcccctggacgcgctccgagggggctgtccacacccgcgcgcgggcttccccggggcccggcgggaggtcccgggagaggaggccgagggaaccacaggtctttgtgtcgcgtgcagcagcagctggcggcgtgaggaccacaccggcgccagagccgtctccctaggtccggagactttcaccccgagtttcccttccgcgtctggctgcaccgggctgggctctccccgcggacacccggggctccggccgggcgcccacttacccggagcgggatcacgcgcgggcttcgtctgcagcgcggtgctcgcggggggcggccaggccgagcggcatcgctccgcatcggggcgcgggccgggctcgggtgcaaacgcgcgcctcgtgcccctcccgccgcccgcggggtctccgcgtcccgtcaccggccccgccccgcgccgcgcctcccgccctgcagggcccgaccacgcgggcctgggggcgcaggcggaccctcccccggccctggacgctgggggcttctgctcggccccctgtgccgtgggggcccagactggggaagggagagccggcgactctgcgaccctcgcccccgttccacgctggccgcgcccactccgccgcggggtctcgcccgggaaatccc

SEQ ID NO: 32417 - DNA, 1819 bp, Homo sapiens
  chr1:2460612-2462431
  binary
cgggcggccggggacttcccagaagtcacttgcttaaatgcaaacacagaacaaccccatggggtcagacacttggcagaagatgggccctgattgtcctaaaacggcagggactctgcacacacattctctgagaatggggctcctgcgggccggccagcttggggccagagccttccggagaagggcgcgtccaagcccggggcggacgacggcgggaaggcgcttccctacaggcgagaggagcaggctcgccctctggtcgtcgggccgcgcgcccgcaggtcccgccgggtcaccagggccgccagaggccgcaggcgggctggtgcgcggcggcggcggcggcggtggccttggcggagagcgcgggcgggggcgcggcgcccggcgccttgggctccttggcgggcgcggcgggcgcggccgggggccgctggaagtggtacagcagcttcatctgcgtgtcgctggcggcgtggagcgtcaggaactgcacggcctcctgcaggcaccacgagtagccttcgctgtagtcctggtgcaggctcttggggccggcggcggcgacgaaggctgcggggagacgcggcggcggtgagcgggcggcggggcgcgggggagccggggcgcggtgggaactcggggcgcggggggcccgggcgcgctcacctttgctgtgcttcaggtagctgacagccatctccaggatgtcggccttctccagcttggagttgggctggtgccgcgcgaactcctgctccagcagcagcttcagctgctcgatgctgctgttgatgcggtcgcggcgcatcttctccaccaccggcttccgcagctgcgggaggagggggtgtcaggctggcccggcacggcgcagggacccccgaggaccggaggccgcggggacagcgcgccgggcgagtctggtacttactcggtttttctctttggggctgagcagctccacggccacagtgctgggggccatgcctggcgcggaacaggcgacgaggcgacgcggggaggccgggcgagacgaggcgagcgggcgcgggcaaggccaagcgcgtcccgggctggcgcggacaccggccccgcgcgccgacgccctatataggcgcgggcggcggcctggcgcctggagtccgggcgccgcggccgttcccacactccgcggccaatggccgggcgggccgcacaaaggcgccggcccattagcgcacgctaaattgcctgtgaattggcgcgggcacaatgggcgctccccaaggagcaggtgggccgcgcggcacaatgtccgggctgtgggaacgcgctcgccctcattagcatcccggggcctgatgccgggagccccgcgcctcaatatgctgccttttcccaggccgccaaacgggaggggggcaggaaggagggccccctcccccgccctcccctccgctcccctcccctgcctctccccagcggcttcccactgctggctggcagaggccgtaggagcagataagggaaaaactgtagaatgaacaagtgccacggcttcctgggggatgggcaccttccctgactgggacctgctgcccctccaggggagggggacagagggggcgacgctcttaggatcagtcctacgtgcctatattacaagccccctgactgtcacctgggactcctgacttctccagacctagaaaatgggccttgtgccttcctggctgggctccgggcagctccaggaagctggggcccgtgctccacgtggagcccggcacccggcagctctccccgcggagccgggcacccggcagctctcccc

SEQ ID NO: 32418 - DNA, 234 bp, Homo sapiens; identical to SEQ ID NO: 14471
  chr1:24742017-24742251
  hyper

SEQ ID NO: 32419 - DNA, 796 bp, Homo sapiens; identical to SEQ ID NO: 14472
  chr1:24882115-24882911
  hyper

SEQ ID NO: 32420 - DNA, 719 bp, Homo sapiens
  chr1:2716559-2717278
  hypo
cgggggcagctttcaccctggctctgcaggggccatgccgtcctcctaccttggggttcgctgccggtgggatgggcctcgagggcccggctgcatgctgccaggcagtcctcaaacctgccgctgtggagcagagcttcaggtgacagggtgtcactccgggtgcccctggggtccagagccgccaggagtcgctggccaccggtctcctgctggccggcactgtgcccagcctccgggtgccccgagaggtagtcctggagggcactgagcagcgcggggaggtggggccgctggtgggtgcgaatgaaagctaccgtccggtcggcgctggaggcgaaggcctggagataggcggccacaccatccgctgcctgcaccccggacaggacccaggcgagggcgcgggtcagccgcagctccaggacttgctgtgcatgagagtccagcagggcgctgcagcgttgcaccacttcttcgtgacgcccgcgggccagcagacctgccagcaggtgcaggatggcggcggggtggtccgggcagagggcgccgaggaaggcagaggccagcgaccctgtcagggagaccactgccatgccgtcccagtggatggcggggatctggctgtccccgcggcaccaggactccagggtggccaccaccgccgccccccgagcctgggccagggcagtgcgcacactctgcagggctgagggggc

SEQ ID NO: 32421 - DNA, 738 bp, Homo sapiens; identical to SEQ ID NO: 14475
  chr1:28286184-28286922
  hyper

SEQ ID NO: 32422 - DNA, 441 bp, Homo sapiens
  chr1:2918283-2918724
  hypo
cgaccccggtggaaatgtacccttctggcagccacagagtcacagggtgagggcggcaaacccatgttcccacagtaagccacgtggaacgacgacgaggggaccccctatgtgtccactccgtagctcccagatccatgcattctgcctgtcatggacacggcaccgtgtcatcgtcactggctcaagaaatagcctgcaaactaaaggacagcgcccaccttctcggacgtccacattctcggacgcccacattctcggacgcccacattctcgggggcgcccacattctcggacgcccacactctcggacgcccacactctcgggcgcccacactctcgggcacccacactctcgggcgcccacactcttggacgtccacactcttggatgcccacactctcgggcgcccacactctcgggcgcccacactcttggac

SEQ ID NO: 32423 - DNA, 356 bp, Homo sapiens
  chr1:32226178-32226534
  hyper
cgctgggtggcgggggaggggcgggccgggggaaggggcgcggcgacgcgcacatccgtcgcgtttatccacctggcagctccaattcgcccgcccgtcactcaccctccgcctccccggcgctcgccgcccgacctgcccaggccgccacgcaggcggtgacccccactcggtggctttgggtcctctgccagcgctcggacccaaggacagggtcctcaggagccgctctcctagagctctgtcgccctgggggacgcacaccctccatcctgcctccggagctggggactgggccgaggggagggagcgaccccctctgtgcagtcctcccgctccgactgccagagagggtc

SEQ ID NO: 32424 - DNA, 1246 bp, Homo sapiens; identical to SEQ ID NO: 24846
  chr1:36042458-36043704
  hyper

SEQ ID NO: 32425 - DNA, 813 bp, Homo sapiens
  chr1:39956640-39957453
  binary
cggagcctcctccgcaaagctggatcagtaccggggacgcagggcgcacagctagggctggcgggggcggcccgactggggcgctgcctgggctcacgcgggagccaggtgggggacgcagggagaagcagccgagcaggtgccgagaaggaggcgcccgcagaagcgcatgcaggggccacggggaaggcgccaggaggcggtgaggggccgcggtggccggaacccgggccggctgctgcgggcagaggaacaggccccacccgcggggcttggctggcaccgcccggctctccagacggggctacggccgcgtgtcgggcccggtggcgaccacggcacaccacggcgaggcagccgggtggcaccactggcgggaccgggacggcgccgcggccttaggatctctgcgccgaggcccgcggcgggagccacgacggccctgaccacgctgacgcccaggctgcgggctcctcgcccggaccaaccgccagccacgccgaggtcgcacctcggggtcgccccacccgcaacacctgccgccgcccggggctcctagcgggcgcggcctccgcgcccaggccccgcccccgcgcccccattggtcagtcccgggggtgggcgggcggcacagacggctgagccggggcaaggactcgcgggaatcgcgccgcccgggtcgctgccggagctcgccggtcgcccctgcgctgcgcggaccgcagccacagccggactggtgggaacggcggcgacagacggattggctgacagtcccagccctcagaacagccccggcctcgaagcgttggc

SEQ ID NO: 32426 - DNA, 637 bp, Homo sapiens
  chr1:40782323-40782960
  hyper
cgcgcgcccgcagcccccggcggccctcggaagggagacgtgggtaggcgggcagggccgagaggccgcctcggggcgacagcggcgtctggttggagccggcgccccctgggaggcggcgggggcggaggctgcgcagcgggtgaatgagcaccattgtatgccccgccacctgggctccccgggctgccaggaccgggcgccagctcctgccccacgctgcctgtcccgggccgggccgcgcgtctggggacgggtcccgtttgactctccggctcagccacctccattcacggtgccgcgatgggcaccatgtatgcacccaccgaggggacctgcccgcggcgctgtcctcaggtggcctctcgggctaggggtgtcagtaggcgcgggacacaggcagagctcctccatcccggactccagaccccgcaccctggaccctggcagcggaggggctgcgaaacttacaatctgcgccagagcgagcactaccacctggaggagaacaaggaggctgcggggggaggccgtagcggcggccatggctggcggcgagaccaagggggacgggtgcgtgtccgcgcacgcaccgacggcagagtctcccggcgctcctccagcgctggctgttcgc

SEQ ID NO: 32427 - DNA, 130 bp, Homo sapiens; identical to SEQ ID NO: 24854
  chr1:42128212-42128342
  hyper

SEQ ID NO: 32428 - DNA, 418 bp, Homo sapiens
  chr1:45251852-45252270
  hyper
cggatttcaggctctcaaactttttcctctcttcctgggacatgaaacctgagggggtaaagcaggtggggtgcagttgcaccctctgccgccaggggaggctgctgttccgccgtctggctcccctccctcgcgtccaccggctgtcccaggactcgcggttccgcgttcctgtcgcagtccagacccttccctggaggcccctgctcccaggactctcccaggcgccacctgcatccggctgtgggccggacccccagaggctcccggcgggcggcgcacctgcgtccaccacgtgctccatggtggggaagcgcttaagcacgcgggtgctgaccgagcgcagcaccagcacggacgccaggttcgcgtagcggatgagggtgcggcgcagcaggcggccccgctggtccacgcc

SEQ ID NO: 32429 - DNA, 620 bp, Homo sapiens
  chr1:46954676-46955296
  hyper
cgagcctctgcctgattgagagccggccccagaacgtcctcttcctatgagccggttcccgcctggagggagcagagcgctggtaagagcaggaccatctcaggcccaggattttcccgaagtggaccggtcgccgagtgtgtttgttcccccagtcccggcgacaggtgcctgtgctgtgtgtgaagccgcgagttccagcccgcggcctcccggcccagaggccaacatccaggtgctagacaggtgagcggctgctaggagcgcaaaccagcgcacccgcggggtgtgtgggcggcgagttcagagtactggctgtggcgctgcatggtggcgcgggggtggcagtgttgttgcaggtggtgtggaactgatgggaagaggtatgtgtgcgcgcgtgtgtgtgcgcacaaccttgaagggacagtggggacgggagtccgtcggggctcccccaggtcacctctacggactccagctgccaagcgtcggggtgggaccggcgagggggaggtttctcaagacctttcaacaccccagggatcggcctgcggcttccgcggacccaagagaggcagagatccctggaccgggagccagagctcgaggagcagagattc

SEQ ID NO: 32430 - DNA, 464 bp, Homo sapiens; identical to SEQ ID NO: 27445
  chr1:48058828-48059292
  hyper

SEQ ID NO: 32431 - DNA, 490 bp, Homo sapiens; identical to SEQ ID NO: 23004
  chr1:53168691-53169181
  hyper

SEQ ID NO: 32432 - DNA, 164 bp, Homo sapiens; identical to SEQ ID NO: 14483
  chr1:55620065-55620229
  hypo

SEQ ID NO: 32433 - DNA, 165 bp, Homo sapiens; identical to SEQ ID NO: 14484
  chr1:6265347-6265512
  hyper

SEQ ID NO: 32434 - DNA, 988 bp, Homo sapiens
  chr1:6265789-6266777
  hyper
cgtgagccaccgcgcccggcctacccttgaagaccccgcagccaaggtcctccggccccgctctgcgcggcgctctggtcttggggctccggactctgtcatgccgggcaggggccagtccgatccttgcacccttgcctggcaccgtccctggagccttggcgtcctggcctctcctccccgcgggctggaggtggagtggccgggccggaaccagtgcgcaaagcagatggcgagcgcggaggtcggttcggccccgccgcgcctcaaggcagcagccaccctggggaaggtggatgccggaagaggcgtcgcctgcgggtcacccagaggacacccggcggggaattccgagggtgggagtgaggagaggtaggagaggccacggcagagggaggccccgcgcagagtgggaaccatcgcccggtgcgggcctgaacttccagggccggctactcctcggcagagcgaccgcgcggtgtctcagagcgcggcccggagccgcactaagagcgctggacggcgggagagaggctcggaggaccggtagctcccagcaaagcggcccagcgggtaggtacaaggccccgcccctcgccagtcctcactgcctgttctccctgcgccggggagctccaggccccagccctaacctgggccctagcggctccccactccatgacctctggacgcccagtcgggtccaggcgcgatagggagggcgcgggcgcccgggcagaggggccgcgggagctcaagcggggctccgtgcgtgccccagccgcccgcttgcgctgtcgctgcagatgtcgggagctatcttcgggcccctggagggcccgagctccctggatgccccgagcatccacccgctggtgtgcccgctgtgccacgtgcagtacgagcgcccgtgtcttctggactgtttccacgacttctgtgccggctgcctgcgtggccgcgcgaccgacggccgcctcacctgccc

SEQ ID NO: 32435 - DNA, 913 bp, Homo sapiens
  chr1:6309178-6310091
  hyper
cgggacatgcggtgcccagcgcagtcgtccggggcagccgtcgcccctgggacaaggccagctgggaggagccggaagacaaacgctgaggccaacgccccctcacccctgggaggggtggcgcatgtctgcgcgcggggcggaggcgggcgtctttggtgctgcggccccggagagcggcctggcctgcctggcgtccgtggggaggcgccggcggtcctaggacgcggagcccagcgagtccgagtgcagcgtggcgtagcccgaggactcggagggggaactcaggaagctgctggtgctgccgccgccgcccgccgcgcgcagccccccgggctcgccccacgacgcgctcaggccggggcgcagagagccggcgtgcgagtgcgcagaggggcgtggccctgggctccgctgggcgctgcttgggggcgtcggggcctctccgggatctgcgccgtcgggggcggcgggcgcagcggggaagggcccgggcgggcggcgcagggcctgtggctcgcactcgaaggcggtcagggcgaaggcgtcgggcagcagcgaggccgaggcggagcgggggccgggcccggggcggcggcgcgggctgccggggggcgagtcgcgggctccccgcgggccgctatccagggccgagggccgcagcgacagcaggctctcggccgagcggcggcgcgcgcgggacggtggtgcgtcctccgcgaaggccaggaggctggcgcggcgccgctcgggcccggcaggcagcaccaggtgcgccagggcggccaggtcctcgccggagccccagcgcggcaggaaggcgggcagcgggacggcggcccacacgtccgcatcgtcgtgggagaagcgccgcgtgggcgggacctgtcaggacgcggctggcttttacccc

SEQ ID NO: 32436 - DNA, 524 bp, Homo sapiens
  chr1:63539443-63539967
  binary
cgcggaagagtgggggagggggtagatttgaggtgtgcaattcttaccacatctggggaaaaaaacaaaaacaaagccaagcgaagtgggcctgccagagttaactatgttcacagagtgcaattaagtgtttggaaggttctgtgccgtgtgctctgatttacggccgcgttcctgggacgcccctttagccgggcgaacgtggagggggccaggcccggccgtgcgcaccctgggagcggagccgggccgctggcgctccgggtcttgggcttggcaccgcggcgcaccgggtggcaagcacagcgcttagcggaggccacacctgcacctcatttgcttctgagcagtgccatgacccgcctgctgatggggcgccttccctttcatcctcgggattatgacaagttattaattgccaccattagccgcagcagcctgcccgagatctctgctgctctctggaggtgagaaaccgcgcatctgaatgccgagggaagaggcgctgagcagccagggcaaac

SEQ ID NO: 32437 - DNA, 925 bp, Homo sapiens
  chr1:63785456-63786381
  hyper
cggcggccggttcctgagccgagagcggccgcggaaaaatcctctgcctccgctggaaatcgatattaggccggcgcgggcgcgggacgtcggggccgcagccagtaggttgtgcacgtctcatcatttagctaatcgagtcgaaaagtttctgtaagggccggacccagcatcagatggtaacactgattgaacaagagattagcacaatagatctctaaccgaggggaagcgttgcttttcacgctacgcgccgtaattaatggtatgaatcaattaatttgacttttattgtgtcgaaggaaaaaagcgcaacaaatggaaccggcagctgggagttgttcgtcctccacccccttccccagggaggttccaaggagacaccggggaatggacggatcaggctgggccgtggcagagggagggtaggaggcagcgaccagcagcgtggagggagtccagagagctagcctctgcggacggcggaatcgaaattaggctcatttggagactacttcgagaccggtgaggggagccctgtagccaccatcctccggcgcgcatccacacatactagtccacgcgggcccagccaccaaggccgcggcagggccagcgctgcgccccgggcccctgcctttagggctgggcaacccaagcagagcaaaggaggttcctgaatgtgtaaatttccgctttttagctttttttttttttttttttggaccttccgacacttcggttgctgaggcagttgcagacgcgacctctgcagtcctgggcgatggccagccagctcagctcgggtcggtttcgcggaaagctgtctagacggcattgtaaacggttcggagcctgcgggccacaaagctgtggagctacggaaatcaactctgagatgcgttttagggccgtgtgcaacctc

SEQ ID NO: 32438 - DNA, 1393 bp, Homo sapiens; identical to SEQ ID NO: 30846
  chr1:63786671-63788064
  hyper

SEQ ID NO: 32439 - DNA, 1123 bp, Homo sapiens; identical to SEQ ID NO: 24868
  chr1:63795363-63796486
  hyper

SEQ ID NO: 32440 - DNA, 734 bp, Homo sapiens
  chr1:65468262-65468996
  hyper
cgctcagtaacgcagcgctgaggagtaggccaccccggagggctccaggtttcagcgcaggcttccgcggagccagctggatgcgtcaccatccgaaagtgcgagcctggccggcggcggcggaggcgggggcaccgcgcagttggaagcccgggcgctcttaccgaaagcgcgagcccggacttccccgccacgatcgatgtggccagtctgcgcctgccgcagttcccgctcgcaccccggcccctcgcagagtcccaggaaagcgctgtggcgggcgggcagtctctgcccccgggaggggacgcacgcacgcgctgctccttccaggtcccggcggggaagcgatgctttcttggcccgggcttggggccagcgggaaccgggctgtccggccgcgccgtcgcgcctcgcacggcgtgagacaacctagctttttttttttttttttttttaagaaaagcattggcaccgcagcagcctcccccgcttcttccctactaggacgcccgcctgactcgccccattgcacaattcttaccgtggaacagccgcgtgactcggcgggagcccaaaagtttcccaggtttcctcagcctagaaaagcgtgggtgggtgtcccggcctggctccaggcgccctttaagttgtatttcttcgggtaactgggttgccctttaaaatgtggagattgtcctttagaaagaaagaaaatctcacgagctcgctggccc

SEQ ID NO: 32441 - DNA, 904 bp, Homo sapiens; identical to SEQ ID NO: 24872
  chr1:66998805-66999709
  hyper

SEQ ID NO: 32442 - DNA, 349 bp, Homo sapiens; identical to SEQ ID NO: 23007
  chr1:67217980-67218329
  hyper

SEQ ID NO: 32443 - DNA, 585 bp, Homo sapiens
  chr1:70035044-70035629
  hyper
cgagaagctggtgaacctgcctattcccaatccagcgctgggtccccttgaggatcttgcgtcctcctctccgagttattaaggatgcaggacgtgtttcggattcgacgtggaaagagggagggaagcacattagcattaaggtaatcatggcaccctggctcgtggactattagattggctaccagtggtctctaatcttactgtttgcagagtcaagaatgggggcgggggttgggggactgtatagattgccttttaaaatagtgtgacttcataataacggagatggctgaaagattgcttccttacactacttctcggccatcagggctgaataaaggacccgcctccgccctctactccggctcttctctggctgtctcttccccatcaagtcataaagcgagcgggttgggcgagagggcacagctcgaggcagagaagagacggggtcactttcacaactcccaggaatcggcttcagaaaggaaccatctgcgactcccacgttcctttcgaagttctccttcaaaaggaattacaaaaaaaaaaaaaaaaaaaaaagcgatgggggtggggatc

SEQ ID NO: 32444 - DNA, 207 bp, Homo sapiens; identical to SEQ ID NO: 23750
  chr1:86860814-86861021
  hypo

SEQ ID NO: 32445 - DNA, 1325 bp, Homo sapiens; identical to SEQ ID NO: 24879
  chr1:91184657-91185982
  hyper

SEQ ID NO: 32446 - DNA, 963 bp, Homo sapiens
  chr1:91189928-91190891
  hyper
cgcagctccacctgcctggcagcctctgttgaaaccaaacacactcggagcgcccagtgcaacattcttggggtgccgagtagaagcgcagtaaagagagaccctagcggactcctgtctggtttgctttttaccgactcttacagaaaaaaagagaatgccattggaagaagctcttttgcgtggtgggcgatgtgtgggtgggggacttgtggcatggcccacggtgttgtttctgtgcctgcgatgacacacgtatgtcttgagctgtgggctcgccttcctggaggtgcgcccgaccgcatctgctggtgggtctgagcgtgcttggggtgtcccaggagaactgagagaacggctcccacgtgcaaagttccaaagcattaatattttcatcatattatcattattcaatataataatatttgttcggttagcggcactaattaggccacattaaaaccgtagtgtgtccctaatggtgcgtaatgtgctcacactcacatttttctctctgaggatgggcggctgcaggctggtaggggaggagagacaggcaagcggcgggctggattagggcgtgacgccccccaccacgcacacaaacatacacagcccactggatgtctgccgggtgggagccgcaatctccgcgcggtcgatggggccctccgctgcgcactcggccctgcgccgagcaccctgcagcctcctcccgcgacacggcgctttgaactcggcggattgattttgcttcccttcccccttttgtgtgtgtttgcgttcaattggttaggtttttaagatttgggagggctggtgtgaaagaattaaaatactcttaactggagcccctccgccgagaactggaggtcccgcctcctagttcggcgctttcaggaccctcttcccagagggaatttctttcagaaattccagggtgggcttgtaaaagacgcttcc

SEQ ID NO: 32447 - DNA, 612 bp, Homo sapiens; identical to SEQ ID NO: 30864
  chr1:91195894-91196506
  hyper

SEQ ID NO: 32448 - DNA, 1971 bp, Homo sapiens
  chr1:92948154-92950125
  hyper
cgtcactggccagctccgcgcaaacgaatctaagcgacaagcagctagggtcctgccgcctgggatggaggcagcagccccagcgggcaagctgtccaagtcccagagaagccggatgcctccttcccctacgaatcagctcccttctcccggaaagactctccaactccccgttagcatttctacgcccaaggtcgcgccaattcccccccagcactgccgggtccctgcagctcccgcccaagaggttcccagtgggttcctacctggagacgcggagggtgacgggggcctccagaagtcctcaaactccgagctccgttcgcagacgctgccttcgcagctgtctggggatgcggaggctctgtctggggcttcggtcagctgcgattcgggggacaaacggtcccggggctccgccttcgccccgcctgcatttgaagtgctgtctgcaaagaggaggcaggtgaggggctcaggctgggaccggttgagtctgagggtgctgaaggctcccccaatcccccgaccagggcagccgagcgtcttcccctctccacccagaccccggccgggaaccctctcggatccgagggcaggcgcagagaggccatggcacctaggagacaaacccggaggaaccaggacagtaggaaacaaaaacagcagcaaaagggacgttggggcagcccctcccagctccggactaatggtgtgccgaggtgcagtaggcatccgggggagcagccccgcctggcccgcgcgcgcctcgcacctgctcggctaggcgccggtacattctctaaacggagggaatagtctggtcctggggagcgcggctggtggtagctgtgagccttcttgcttttgacgagaaatgagcgcggcatggtggtccggcactttccccactgcgccccaagagtccctggagccgctgtcacccacggtcactccgagggcttgctcagccccagcccggaggagacctgagagggaaagaaaaccaggtggagacgtgggtcagtactctccggtgcggcggactgggcacccaggcggagggagagcgcgggccagggaggcgcgcagagggcccacgggaggaggggcttgaccctgctgcgccgcgcttaccaggtggcacttggacaggtggcgcgaacccgccgtcgttgccgccgccgccactgacacagctcagcggtaaaacctgtcccggggccctgtctcaggcccctttcctcctccctgcccacgccccccagctcctcccctttcctagcgaagctcgctccggcaatcaaactccctggagagctgtagttcccatcgggtgggttaccccaactcagctactcatcgcctgcctggctgtgctttacggctggcgagggagggcggggacacgcggatcggtttaggggccggggatgcccagtggtcgaggacccggaaggggcaaggagccaagacctccaagagccagctaccaactggagtgaaaggaccggggggaggggggaacagaacacaagataaaactgtggggcggcgggaggacagcagcagagggattggggacagcagaggccagagaaaggaggtgggagagcaaagggacaggaaagtgaggggaacaacagacgaccaacccccgccccaggagaaactcgcatctgggtgatcccactcgcccctcactagtgccccacgtaggagaaactttgcccttggactcccggctgcggcgggcaccggtcgaggctgcggcgagccatcccagaccatggagacctaacctcgggaatcaggtcccgggaaaaaagcactttccgttctgctcaccaaaaaatcttgtcctagggaggtggagcccgatccacgaacgttgactgggaaatgctaggtgtcccgagtcggtagtgcaccgacaatttagcagacaaaaaagacaggacgccagagcgc

SEQ ID NO: 32449 - DNA, 911 bp, Homo sapiens; identical to SEQ ID NO: 28389
  chr1:9712089-9713000
  binary

SEQ ID NO: 32450 - DNA, 569 bp, Homo sapiens; identical to SEQ ID NO: 14496
  chr10:102822304-102822873
  binary

SEQ ID NO: 32451 - DNA, 738 bp, Homo sapiens; identical to SEQ ID NO: 28396
  chr10:102995986-102996724
  hyper

SEQ ID NO: 32452 - DNA, 174 bp, Homo sapiens; identical to SEQ ID NO: 14498
  chr10:111987876-111988050
  hypo

SEQ ID NO: 32453 - DNA, 457 bp, Homo sapiens; identical to SEQ ID NO: 14499
  chr10:114135846-114136303
  hyper

SEQ ID NO: 32454 - DNA, 778 bp, Homo sapiens
  chr10:118890928-118891706
  hyper
cggctgctgtgatctcagcaaaaagcggagctcaaggctcagggactccgccgcccacactgtgccccgccttattttggatgcctccaacttcagcttcaggcacagtacacgagtaggggcagtaaggcctggctagggccggtgccgcacgggagctgcgggtccctgcaacacccaggtgtgcaggcgctacaagaaggagccggggccgctgcccccgcagcgcggacttcgccccgtgctgcacacgctttagaagagcgtgtccggaagtgtcctccccggccctcctcgcttcccaagatttgtttgcaacgtctacacccgtcaccaccgcataagcaccagggtgaggaggtctctttgcaggaattaatatcgatttcagtctcctgctccttcaaagtttctctttgacgatggcgagacttatattctaagtcagaagaaaataaaaccttgcctattctgggcccatgattgcacaaaatccaaaatgctgccggcatgaagatgcagctggaagactctagaaacctagcattaggaggcagagactttatagtgcccagagatgagttcctaaataaactaagaattacgcagtgggaaattaaggaggagggtctgaggggccgacctcagagggacagatagagaaatcgagagcgaaacactcaaggaagtggaacaaatcgtcgtagccaggcgtctctgcctctccggaaacccgaaatccgcccaaacctcatcccaggcgctcacggtaccagtc

SEQ ID NO: 32455 - DNA, 43 bp, Homo sapiens; identical to SEQ ID NO: 14500
  chr10:121591491-121591534
  hypo

SEQ ID NO: 32456 - DNA, 405 bp, Homo sapiens; identical to SEQ ID NO: 14501
  chr10:134116378-134116783
  hypo

SEQ ID NO: 32457 - DNA, 504 bp, Homo sapiens
  chr10:134734534-134735038
  hypo
cggcagccccttcccgctccaagagtcgccaaccttcccttgcagggcgcgacccaccctgcgtctgcccatctcctcgtctcagacccgagacatgacccagcagctccactcccgaccaccatctccacaggctgcagtctgggtgacacctggttcgtcgtgctgggtgaaagccgccggctgctgggcactgagctggagggaggcctggcagcagcccccagcaggaccctcaggggaccagcgggaagggctcccaagccaggcccagcctggcccctgcactgggctggagagagtggggccgcctgcgttcccagagccactggcgagtgcccagagaagctcgggcagtgaggatgcaacacacctgccgaaccctggctcagtccccgcacatgggccgtacggccccgtgtcccattacccaaagccagctcagggtctccctgggacagatgtgatggcttcagctttgacccccgtgatccagggagcccc

SEQ ID NO: 32458 - DNA, 1377 bp, Homo sapiens
  chr10:13933020-13934397
  binary
cgtgcaccaacatttgagcagctgcctccaatatagaagcactgcatttagccaattttaaatgagcacgtactaaagggggttcccttctgttctcctccccttccgagcgtccgttttctctgcatcaaacttgctgcagccatttggaacgtaaaaagcagtccatcttagcagccccgggcaccggcgatcggctgctggcccccgccacccttgtctgaaacgccctgtcctgcacccaaaggaaagggctcccctggcactctcagaaaatggttttaaaaaaagcctacacagctctgcctaaagccatgtcctttcctatctccccgggtagattcagacagcgtgggactgaggtgcccaaggaaagtaggtgtgtgtgtgccgaggggagggttgcagaagaaagcacagtatgtgccccacgtgggatttgcatttaaaaactgtaacatacgcgaaataaacgactccaggcccccagtaaagaagcagcggcgcgtcccttttccccggcccagcgtgaaaacacggaaggcgaagggctgccgtcagtcgcctccctgccaccgcgaccgggaaacaaagacacattaccttttattttttgcgcttccaagggatccgaggaacttctggctgcaagcggctggtaccccggaacgggcgtcccattcgcccgggcgaaggcccttggcctactaggcggccttggcgcccgcagctggcgagcccccgccccgtccccgccgccgcccccgccgcgggccctcggcgtcagcccatagcccgctcgcgcctctcgcgccgagcctggcccggcgccagtgagccccgccgccggcccgcccctcgcccgcgcccggcccgccgcatggtgcgcccagcgcgccccgagccagtccccggcgcgctgctaggtcgggtgctaggcggccaccgcgcgccaccgccgccgccaccgcccgccgcccgatcctggacaacaatgcgcgcccccgcccccccagaaagccagggacgcccccagtcgccgccagagctggctcggcttcccagcccctctccgtggcacccgcaggcgagacaaagttcgctcccggtgaggctgcgcgcgtccaaagcgtgcgggatgcccagcacggaggtccccaagcgggggacccctggctcccccacaaaacccacccaaagccaccgctcgaggccctctcctaccctgagagcccggagacagcagctcccttggctgaaggcacagctcttacccctcgatctagtccaattgtattgaattttaatctcccctcaactcttcaatggaagttgctgcaggataaccgaggcatgtggctattgtcaaggcttcgc

SEQ ID NO: 32459 - DNA, 139 bp, Homo sapiens; identical to SEQ ID NO: 14505
  chr10:14979037-14979176
  hypo

SEQ ID NO: 32460 - DNA, 193 bp, Homo sapiens; identical to SEQ ID NO: 14506
  chr10:24497856-24498049
  hyper

SEQ ID NO: 32461 - DNA, 731 bp, Homo sapiens
  chr10:25241259-25241990
  hyper
cgggactcagagtttcgtcagattgggggcggggagaggaggcccgggtccgaggatggaagcgatccccgccgggagggagaacaaagcggtggccctctctctcccccgacgcacggcaagcatttaatctacaagcagggtgccagggagggaggggagcgggccgagccccaaaatagggagtttgcatttaccacgacgcctcgcccgtagtctggcgcctcctcgctgctcccggccatgtttctcccggggaacgcgggaagggaagacggcgcgggaaggagcagggagggcgaaggctgcgtgggggatgggacgtggggatggggacggggacggggacggggacggggacggggacgggtccgccccgccccgggcccgccggcgggaagcagcggcctgacgcggatccatggccccggcgctgcgccccctcccctggctaggccgcgggggcgcggggagcagctgccaagccgctaccgctccccctgagcgcgggccccggacgcgtcccttgcggccgccgctgtcgccgccgccccctgccggatggtcgcgtgcagcccccggccccgccgccaagccccgcggggactctggagcaggaagcccgcggcaggaagagaacgtgtcccccaggcccctgattcccagatccaccgtcccagccctcgggctaacaatctccttgactcctccctgccagatttcatgcacgc

SEQ ID NO: 32462 - DNA, 623 bp, Homo sapiens
  chr10:29011000-29011623
  hyper
cgtggggctgtctccctgtaatgagaaccaccgctgagagctgtttagacaaacgggctcagcgctccggagccgcgcgggcctccaaatgcaagggtttgttctgctggggcagcgtctgtcgcgaaagcagcggcggggaggaagcgcagagctgtgttttgaattaatgggttcagcttcatgttgagcacaagtgggaggctattttagagaaaccttcccaggccagccgtcactgatgtggcaaactcagcctctgggcagaccggctggaaatagaaacgtctccgcttcacgatggcgcacgcccggacgtccccttccgagagcgggtcccctttgtcccccgaggccccgccgccctgtgtcacgtccccacctcgctctgggtccactgatctcttgatgcacgcgtcccatcagcagcagccgaaagagggtgctcgggcgggagtgaaatccctgtgaaatgtgatcaagaacacaaaatgctgaggcagctccagctaacatcagcgctcagtctccccgcccaggtgggatcctccaagcgcctcaacgcaccgcccatcccggtgccaggtgtaaatgcgccccagcaacacgtggctctaggagcc

SEQ ID NO: 32463 - DNA, 157 bp, Homo sapiens; identical to SEQ ID NO: 14509
  chr10:31607149-31607306
  hyper

SEQ ID NO: 32464 - DNA, 815 bp, Homo sapiens
  chr10:31607954-31608769
  binary
cggttgccgcaaaccgcccggtccctagcaacaaggttccggccgtagagcgagagcctctaggtgtaaggaaggtgatgtcgtaaagccgggagtgtcgtaaaccaggtgcggtggggaggggggaggggtggaggcggaggggtgggggggaagggggagggagggggaggaggtgactcgagcatttagacacaagcgagaggatcatggcggatggccccaggtgtaagcgcagaaagcaggcgaacccgcggcgcaataacggtgagtggcggaggggaccggggagcggcggagtcagggggagctgggcagccggggcgcccccgggggtgaggggggcgagccgggctgggggcagccggggcagggacggcaaagtggagtgggaaagtagaaagtagtgctctctgcccccctccgctgccgccgctgccggagccgcgccgcggccgctcgctctccctgaaccgttatgtctcttacctggtctctctccgcctagcggctcccgccgcccctgccgcctccctggaccgttagccggcgccgacgccgccgcatccccggcgcagggcgggcggccgggacgcactggccacttttctggtcccgggtggagcggctgttgcttctttccgcacttttccccactcttgtgcccttcggcgcctccctctccccctcctcctggccccctcagcgcgattctccctcagcgcccaggcccccgggagccgcggaacaaacttgtgcccggcgctgaccgtgcaaagtggcttccgcgcgccgcggccccggccggcgccgtc

SEQ ID NO: 32465 - DNA, 355 bp, Homo sapiens; identical to SEQ ID NO: 24923
  chr10:6018609-6018964
  hyper

SEQ ID NO: 32466 - DNA, 256 bp, Homo sapiens; identical to SEQ ID NO: 14512
  chr10:62492589-62492845
  hyper

SEQ ID NO: 32467 - DNA, 1251 bp, Homo sapiens
  chr10:73846836-73848087
  binary
cggcgtcgcctctggcgcatccgggcccatcccccacagcacccccaacgatctcggggtccagccacaccctccgcccgccctgcctcacccctgcttccccagcccccaacccggcccggccgagaggaaggagccagccccgccgggccgccgcctgcgacttcccctctgatccacaggtgccggtaaacaaaagtgccgcagctacccccccgcccccaccccgcggagttcggcccaaggttacgccggggttcgggcggcgcccgccgggggcccccaaacccagcttctggactctccccggcttctcaagcccaccgggccgggagccttcctctggctccgagctgctcccctcgctccaggctggattcccccctgaaatgttggtccgggaaaaccagcctgggtcctcgcgcgcccttctgcacggggaccccagcccacccccgtacggacacgccttccaccatctcgcctagaaggctgctgggaccccagacccagagccccggtcacactcccgtcccatgctgtccccctcccgcaaagcccacggtgggaacagagggcaccgcgcgagccgatgccaccctcactgccggccccacccagacctgccggtgctgcagtgccccgtatgtgcagcctgcagcatcccagcggctggggcaggcccgggggcggctcgcacaacgcagctggggaccgggtcggggtccagcggcagccggggtccgggtccccccggccccgcaccccttcccactcccggcccgcaggggagaccccggagcgcgcgaccccggagcgtcgggcaggtgtggagctgggggtcccggggctggggggtcccagggccgccggcccgggccgcagggacaggggaggggcgctgggctgtgacccccagtactgtttactttccgtgtaattagccggccaggctgcggagcctcgggctgcgacgtgcggcggccgctcccgcagaccccggagctcaatccccgaacccgcaaccccgggtctctgccttggcagccctgcggactcacgtctcggaagcggttccagtgcttgatcttgccgctgtactgcgagatggacgacagccattgctcgtcctccatgaaattgccgggggtctcgccctccttgagccccttggcgtcgccttcggccagggctgccgcggccaggagcagcagcggcagcaccagccgcccgcagcccggggcgcgcatc

SEQ ID NO: 32468 - DNA, 650 bp, Homo sapiens
  chr10:74079281-74079931
  binary
cgtttgtccgctcagaccagacggggcaaagggcagccatcaaaggtgtctgggacgagcccggcggggtaatgggccgctagggactcagtctggcccgggtctcagccggggcagaaggcagccgggcgagggccgcgggtggggggcagggggccggggacaagcagccccgcccaggccggcgcgctgtgtgcacaacgtgcagggctgcgaaagcggatgcggcctgatggggcaatcgctggcaacgcgccgcgggttgtcagcgggcgctggggggtgggagcccggcgccggcgggccctgcctccagcattggccccgcccccagttccgcagtcgtggctgggtttcggggagggcgcccggtgcggggggcgcccagggcctgcgcacacgggtaggcccgcgtgcccaagcccccttgcagcccaggcgccctggctcattatccatcccggccactggcgttcggttccgctcctgtcgcaccaccccctcactgctctgacagataccaggagctggtgccaacccgcagacacacctgggcagccccacgtgggtatcgcacgcgcaggggcacatctgccctgccgggtttggagagcagttgcaagtcagcccctggaatgtggtcccgtgcc

SEQ ID NO: 32469 - DNA, 148 bp, Homo sapiens; identical to SEQ ID NO: 24928
  chr10:75670652-75670800
  hyper

SEQ ID NO: 32470 - DNA, 1496 bp, Homo sapiens
  chr10:89621342-89622838
  hyper
cgaatcagctctctcacggtgacaggtcagcccaatcggggctgtaaacagacttgacaggtttgttctgggctgacggccattgactaggttctcagaccagataagtcacttggctgagtccacagtaggtggggcgcgctcaccagctcaggggtagtgactggacgtttgttgcaacatcggagaatgcacgctctgggctgcagcaggagataccctcaagcacagaaccaaaagggttcaccctaagcggcagggcatcagcgatggagaggcccgagagccctagcgcccagctccttttcccacgtttgggaaggcgcagaataggtcgatgtagagcaaggagtgagtctcaggtctcagtcctttggcttgctcttagggtagcaggcgaggagtggcaccagtttggggactctctccccgcgttctgtaagaatcggcggcagccagcaggcggggaggcgggggcacgtgtttggatgtgggtgcttgtgtaaccagttccccaagcgccagccccgacagcgctccttcgggaggctggtccgagcccctgtttccgccgcggcgcaggaagggttggggttccgctgcctgcaccaggcaagagcaccccgagcaaaggaagaagacgacttgcctccggagctatcactggggagtgggaatttggaaagttccccaactagggacacacgtgacctccttcggaaagtagttccgactgtggcccgtgtatccttccacctccttttgaaccctcctaggtctcctcgccccgcccactcgctgggctgcagcttcctaccgttccgtactttccactcaacccggtaaccccaaacgtgcacggtccggccggggcgcgcggagcctggccccgggcgatccatcctgccgggttttcacggcggccaagggggggcggggctaggtggtctctgagaaccgagcttgactccgacgccgcgaaccgacctggagcccgaggggaaagatgctcgactctcttgggggcaccggagcgggcgcaggagaggcctgcggggtgcgtcccactcacagggatcctctttcagttcatttagataggtgccctttgggcccttgaaattcaacggctatgtgttcacgttcagcacgctcggctgagagctttcatttttagggcaaacgagccgagttaccggggaagcgagaggtggggcgctgcaagggagccggatgaggtgatacacgctggcgacacaatagcaggttgctctttgtgctaagactgacaccatgaggacacagatttgggggaagggggaatctctaggcaaaggctgttacagtcaaatctctgcgaacgattgtgatccgacagcggtgcaaaaggaaagagcgaatgcagtccacgccgcggaaatctaggggtagaggcaaggggggagggtattccccttgcagggaccgtccctgcatttccctctacactgagcagc

SEQ ID NO: 32471 - DNA, 571 bp, Homo sapiens; identical to SEQ ID NO: 22764
  chr10:94448826-94449397
  binary

SEQ ID NO: 32472 - DNA, 173 bp, Homo sapiens; identical to SEQ ID NO: 14522
  chr10:97051022-97051195
  binary

SEQ ID NO: 32473 - DNA, 1068 bp, Homo sapiens; identical to SEQ ID NO: 29725
  chr10:98272415-98273483
  hyper

SEQ ID NO: 32474 - DNA, 761 bp, Homo sapiens; identical to SEQ ID NO: 8961
  chr10:98479725-98480486
  hyper

SEQ ID NO: 32475 - DNA, 174 bp, Homo sapiens
  chr10:99798264-99798438
  hyper
cggggcggggctgggaggagagagcaggccccagggaggccagaggtcagaggggcagacagcacgaggagtcgcaacaggctgtcgagttcccggttcctggtggagagcccggcaggctgtttgttctcggacgtgtgcaaccgctgccggcggggctgtgggcgccgcagc

SEQ ID NO: 32476 - DNA, 353 bp, Homo sapiens
  chr11:101918139-101918492
  hyper
cgacacgacggccgccgcgtctccatggaaacggcccaggcatccacccagccgagagcacgatggctactggggagctcggggacttgggtggctactacttcaggttcttgcctcagaaaaccttccagtctctgagctctaaggagatcaccagccggctccgccagtggtgaggaaccgaggcacagggagagaagaggcccttggtcttcgcggctgtggaggcgcaggccgggcgtcgaggggcccgcgcgggtcggcgccattctgagtgaaccctgaggcttcctgagtgaaccccgaaccacccgggaagggcggatgctgtgggtgggatcggttatcggtgc

SEQ ID NO: 32477 - DNA, 680 bp, Homo sapiens
  chr11:10326048-10326728
  hyper
cgaaacgccggggtcttggtcctctgggggactagtgagtcctgctcctctcggctttgctccgtccctgccccggcccctccgcgggagtctggggtcgcggcccggtcaggcgccaagccggcaggggggcgcggtccacttgaggccacagctccccaggtccagggctcgggccatccgcgctgtcccttccgcgggctcttgctgttcttcgccaggaggctttgcactccgggccgcatgggtcctggataaggacctcaagaggttgtagtggcgccccttcgctccggcgtactgtctgaaccctgtgcccaaagagggctgtggcagttcctgcaccaaccgcctggagcccatacctaagccctctgggcacgagggacctcctctcccccgctcccccctccccccatcccaactccagccccaaaggaagcaatgcgcgcgtccgagagcaggagcgcgcgtggctgaggaaagaaagggaaggcaaccgggcagcccaggccccgccccgccgctcccccacccgtgcgcttataaagcacaggaaccagagctggccactcagtggtttcttggtgacactggatagaacagctcaagccttgccacttcgggcttctcactgcagctgggcttggacttcggagttttgccattgccagtgggac

SEQ ID NO: 32478 - DNA, 1051 bp, Homo sapiens
  chr11:1103476-1104527
  hypo
cgcccacggcatcgtgggaaggtgctctcatccccaggaatgtccgggggtcccgggctcattctcctttccctctagggctccatcacattcatgcccaatggatgctgcaagacctgtgagtacagggcacagcctggggggtaggcagggtgggggcacaagggctggtgccctcagccccgcctggggtggctggaggctggacaacggcctctgggtgggcagtgagggctgggggctgaggccgagcctggggaggggacgcagcgagggagagcctcctcgaagatgtggaggccctgccctaagccgctgcccgctctccccaggcacccctcgcaatgagaccagggtgccctgctccaccgtccccgtcaccacggaggtttcgtacgccggctgcaccaagaccgtcctcatgaatcattgctccgggtcctgcgggacatttgtcatgtgagtcccaggctgggagtgtgcctggagggggtggtggagaccccagggaggcgagaggccagcgctggccccggaaggtcacccctcactccgccctccccccaggtactcggccaaggcccaggccctggaccacagctgctcctgctgcaaagaggagaaaaccagccagcgtgaggtggtcctgagctgccccaatggcggctcgctgacacacacctacacccacatcgagagctgccagtgccaggacaccgtctgcgggctccccaccggcacctcccgccgggcccggcgctcccctaggcatctggggagcgggtgagcggggtgggcacagcccccttcactgccctcgacagctttacctcccccggaccctctgagcctcctaagctcggcttcctctcttcagatatttattgtctgagtctttgttcagtccttgctttccaataataaactcagggggacatgctgtactgtgtggtttaggttggtgctgcaggggtgcggcttggccactgtgcatggcggaggccaccaggctctgcgtgcaggacacgggggcaccacacacacgccacgc

SEQ ID NO: 32479 - DNA, 942 bp, Homo sapiens
  chr11:110583219-110584161
  binary
cgggcgccctgcgccggggcccgcccccgcagccctcctcagccctcctccagcctgggccctcctagcctcgtcccagcctgcggcgcgcctggcgggcgtctctctatatatgttagcacaccggccaccggctgaccttttcggtctgtgactccgcgtgggtgcagcccgcaggagctcatcggcctgtgtcacgcacgggggcctctagtgcacggacacgcgcctctcccgccacctgcccactcccaccagaccccatcccttcccgcgccgtgcccgcggcggaaggcgcccctgcagcgcgtgcatccgcggagcggtggcgacctcagcctgagcagaggagttgcagtgattcctgcctcgctttcagcggactgcggagggaatcccccaccccaccccactggggatagggtggcacgtcgcagagtgtcgcagctgtacaaatttggaagcccacagcatcgcctgacctcttgtgcaatcccgaacgctagcctgttcgggtaaccctgagtgggcttctgcagccggtcatgtcagcggcccctgcacatttgcacccgcggtttccgctgtctgcaggctgcagagacgggggcattccaaacgtgaaagagcaatgaaggaaaatgcagacagagcgaggacgccgaaatttggctaagctattgagaaggctacaatatgtggaagtgtttatcagatatctgcgccgagagcataacttcctgtcagcccaaatagaggcaaaaatattttaaaggccaaagaataatcagagggagaggatttggagctgacccgcgttgagctgagtgttgctgcactttgcggggctggttgactggtacggatgattcggtagatggcattcttcccttggagtcaggactagagaagcagtggcggattagtgaggaaggacaccac

SEQ ID NO: 32480 - DNA, 205 bp, Homo sapiens
  chr11:111385261-111385466
  hyper
cgacaggacacaacccaaagttgacgttttgactctcccatatccaagatttggactggtcctaaaacctgatcaccgcaggggtgggcttccgacggcccccacgcgcgtggcggatcccaacacctacctaggaaaccgagggcagccggcaggggctggtaccaacttggcggttctcggaggggcggggcaggggcggggc

SEQ ID NO: 32481 - DNA, 249 bp, Homo sapiens
  chr11:114115480-114115729
  hypo
cggatcaaacaaactcctctgtcttaaccctttgttttttaaattgttagggacccctctggaggggaaaggcacaggcagccgcccccttcccccccaccgccgccttcacccccacccggctgggtggctgccgatgtacgttttaattaccggctccagctgaagtctcacgtggccttggctttatttatttatttataccttaatgaggatactgaatctttgattaaagtcgtaatcgttgcc

SEQ ID NO: 32482 - DNA, 1596 bp, Homo sapiens; identical to SEQ ID NO: 14532
  chr11:17034991-17036587
  binary

SEQ ID NO: 32483 - DNA, 739 bp, Homo sapiens
  chr11:17373019-17373758
  hyper
cgcgccaacggtaagatgtcgctctggacgcgtgcacctgctctcgcaatcaccgactgcggtcagcatcttccttagagcagcgccccgggccacttggatcccggtctcaatttactaagcgaacccagaggatgccccgagtcctggaccgcagagccgctcgcgagaggcaccggggctgtaaccgcgcaacctcgtgccgcgggcggaggcgagggaggattccccggccggtgcccgcccccgggctaaagtgcggcgcgggtggggctggtcacgcgcctggcttcctgcagtgcgaacctgggaaatccaggcgacttcgcagttgccgaagggatctgaagaagtgggatgtgcaaaagcgccggctggaaatcccggctgtgtctccgtcaactctttacgcaacagaggtctccccctgcccttggtttctaccgggccgcctgctcccactcggcgaaaaaaattacacaacagcagccgcggcgatgacgtggagggctgccgcctccacgtgcgcggcgctcctgattctgctgtgggcgctgacgaccgaaggtagggggcggctggggtgggctggggcgggggctcctggcgccagagggtcctcgcgggtcggctccctagcatcccgccaggggacctcaacttcctgggggctgagagctctattttcttttctatttcttctcctttttttttttttttttttttgagacggagtctc

SEQ ID NO: 32484 - DNA, 689 bp, Homo sapiens; identical to SEQ ID NO: 30955
  chr11:19263432-19264121
  hyper

SEQ ID NO: 32485 - DNA, 125 bp, Homo sapiens
  chr11:1975930-1976055
  hypo
cgcgcaggaatgaagggcgcacgacatgagaggcaactccagaacaaaccgctgccgccagctgggccgagctccgtgctcggggctccggcctccaggtccaggcaggcggcagcccccagggc

SEQ ID NO: 32486 - DNA, 917 bp, Homo sapiens; identical to SEQ ID NO: 14537
  chr11:19798519-19799436
  hyper

SEQ ID NO: 32487 - DNA, 725 bp, Homo sapiens
  chr11:20153468-20154193
  hyper
cgtgcagcaatactcgcagcgtggagagttccagtcccgaaatggcagcgtcaggcaagctgcttccaatacccctccctccgacaaccagaaacaaatacccagcgcccagatccacaccagcagcaacccagagctccagtctgaggatgagactgttccagggccacagaaaagaggaaaacctcgggcagatggtgagggaagggaacctccgtgttcaggacacctccgcccatccacattcggcctggcaccgatcctgcggaatctctccccaacgcacggtttctacactggaacgattgaaactaagggggtgcgccaactcccccaccttcgcgggtcccctggcaggagacctggtccttgccttaccgcagtaggtgtggctgtgactgaagggagcggcatccctgagcacagtcggagacaaagggaggcgagggccaaccccagcccggaaactctgccctgtaactcggccaaaggagacgccgcattggagcggctgttccgcagcaccatgctgtagaaggtacgttcctctgatgccctgtgcgcaaacccctagccagccttcccacactgccaggataacccttttgaaacctcccctgtttgggacaggccgtgctcccaccttttattggagacgaggcgaacctgggcttagggcgccacctagagccaaaaaagaggaagcgacctggccgcgaagcttc

SEQ ID NO: 32488 - DNA, 682 bp, Homo sapiens
  chr11:20385084-20385766
  hyper
cgcctgggtgagctgagcccagcaggtgagggaaaacgcgggaagagggtcttgcagattccaaacttaggaagggtcgcggctccgcgcacgtgctctcggggtcaccttccccgcgcctgtgagggtgccaggagttcgtctccaggtcccgcccctgtgggcggggcgaggcagcgtcgccgcgaggccacccggaagaccaagccgggtaggcgctgtctccgtcgcctccaacccccccggtccgaccagggaaggtgggatgctctgatggccgggcctgcggcgctgagcgcggcggcggcggctgctctggcggccgccctgctcctgctgcgtcgtgaggacccggggccgggggctggccccaggtaacccctccgcgtatgggaccgagctgggccaggtctcctggccgggccggggataccgtggggtatgcccagtgatgccagcagcttgtggcacctgggcgcaccctccagctcgggccccttccgatgggtctgctggctcaggtgcgggcgatggccggggagccgcgccccgcacgtgactcagcactttccccagagcccggactgcggagaacaatatcctcctccctaacagataaacagcccttgttcctcgggataaggactggcagtcccctgacaccctaagaccggcatctgtc

SEQ ID NO: 32489 - DNA, 261 bp, Homo sapiens
  chr11:2753765-2754026
  hypo
cgggcagtgaggagcgcaggcgaatgttacagcaggcgcgagcgaaggggcccgaggcaccggtgcttccgacggggcccgagggccgtctgacctttccggccacggggcagcagttgcgtgagcaggaacaatcgccccagtgtgcaaggcacaagcggccttttcttcctcaccgggccggcgcacacagctcccagcctggcttcccttgaacaaacatatttattgtggccgccaccgaggcctcgccttgcagcc

SEQ ID NO: 32490 - DNA, 970 bp, Homo sapiens; identical to SEQ ID NO: 22772
  chr11:31819792-31820762
  binary

SEQ ID NO: 32491 - DNA, 819 bp, Homo sapiens
  chr11:31832604-31833423
  hyper
cggctggagagtgagagataaagagtgtgggtgagggaagtggctgcagccagcacacctatgctgattggtgatggctcaagtgtgttaatgtgtgtgtgccggcgcccggcctcgcctccaccgctcctcactggcccattagcgaagcctgacctctgtcatcatcctccagcaaaacacttcctcctgcgcctgaaccagagcgggaaatgaggccgagccacggttcccttttcaaacccactaatcactccgcaacatgcaaatgcaccgctcgctctcacacaaaatattgctttatgcaaagcagcgccggggcctcgcgccagccgattggatgctccctctccccgcctggtgcaattggtccgtttgtttgaatatgaatacacttgttttcggctccgccggtgggtcccggctcctctccccggcgcagggcccccgagcccgggctctggcgctcgcctgcatctccccgctccgcgcacgccgagattcggcgcggcccgccctgctgccgcgaacttgagcggtcaagtgaaggtttctgggttgggggtcgcgcccccactccccctaagctggactcgggactcccagtcctcggagggtgcaagtttctgtgctgtcctttcttgccaactccaggacagcgtggcctgccgccccgcccccgcccgcccccaccccatcccagccggggccccaagacacagagcacagcggcggccgcaccccagcccacctggccccttggaagaagaggaaaggggcgggagcgtcactgggtcctggcagctccattccagctgc

SEQ ID NO: 32492 - DNA, 384 bp, Homo sapiens; identical to SEQ ID NO: 14542
  chr11:32851566-32851950
  binary

SEQ ID NO: 32493 - DNA, 552 bp, Homo sapiens; identical to SEQ ID NO: 24956
  chr11:35547041-35547593
  hyper

SEQ ID NO: 32494 - DNA, 117 bp, Homo sapiens; identical to SEQ ID NO: 14545
  chr11:441960-442077
  hyper

SEQ ID NO: 32495 - DNA, 771 bp, Homo sapiens; identical to SEQ ID NO: 23810
  chr11:47208495-47209266
  hyper

SEQ ID NO: 32496 - DNA, 93 bp, Homo sapiens; identical to SEQ ID NO: 14547
  chr11:57580261-57580354
  hypo

SEQ ID NO: 32497 - DNA, 686 bp, Homo sapiens
  chr11:61062458-61063144
  binary
cggcagcaggagcgcgacacaggcggcccgaaggagcagtccggcccacatgaccggcggcggcgggtcccccgggctgggctcggctcctgcgccgcgcgcgggagagggggctgccggccctcgcccctcctcctggcgccgtggggagcgaaccagcgatccccgaaatggcacgcagagctgagcaggggggcttgggacgccgagaggaggggccgagggccgcgaggggacgcggcggacgattgtggggagggtctctggcacctcgaagcgaaacacacaaaggcaacgccgcccgcctgctgatgcctctccgagaggcgcggagcccggggcgggggcaaagatcagggacccctgggggcggggtttcgccctcggcccacaccccctgccccggtttgggagtcggcttcctgcgaagcgctgactgaaggcgtcagaccgaggccccgggaggaaacagacttcgggaacaaggctagcaccagaggctgcgcgccccgggcatggcccctgtcggtgggacccgagacgccttgttgtgacgaggtgggaaccgtggaaattcgaacccacgacgccaggtcgctgtgccgctgagcagttctaggcctgcccccagcctgccagaaggtctgcaccctaacgccggagtgcgttgatctgtgggtccaacc

SEQ ID NO: 32498 - DNA, 856 bp, Homo sapiens
  chr11:61594996-61595852
  binary
cgccagaatgtggatggcgcggacaatgtgggatactggagtctcgactgccgcgcgccaaggaagggcgtcacctagccaagccggccctggagttgagtgccccgcagcccgccggtccacccgcccggccgcttgctggcaccctggtggccgcgccggctttgtgtcggcatcaggtgcaaacccccagagcgccgggcgtgcgcgcacgcgccccggagcgcgcggagcccattcgttgcccccaccgggatctcctctaggatctcctccggcgcccggggccggagagtgggggagggaggaggtcggacacgtagcctgcctcgcagcagggctcgactccacgcgggagggcgggggagccggggacccgccgctccagcccgctggccttcgaaagatcctcctgggccaatggcaggcggggcgacgcgaccggattggtgcaggcgctctgctgatcgctgtggaaactcgggcggcggggaacgcgggaggatgtggaacccgaggcggggggagccggaggggcgggcagaggaggtgtcgaggccctgagctcccggggagtttttactggaggcaaaagtccatagcgggagggctgagggaggggcggaggaaggggaccgcttgggggcactgggaagccagggatcctccgccaggaaggcagggacactcccgagcgcaggcgagaaggctgggggagggggcgcggtgggaggagtaggagaagacaaaagccgaaagcgaagagggcccgggctgcacacaccggctgggaggcagccgtctgtgcagcgagcagccggcgcggggaggccgcagtgcacggggcgtcacagtc

SEQ ID NO: 32499 - DNA, 844 bp, Homo sapiens
  chr11:61595885-61596729
  binary
cgagggggccgccgagcgcgaggtgtcggtgcccaccttcagctgggaggagattcagaagcataacctgcgcaccgacaggtggctggtcattgaccgcaaggtttacaacatcaccaaatggtccatccagcacccggggggccagcgggtcatcgggcactacgctggagaagatgcaacggtaagggtctgggggcgccccagccacccttctctgctgcaggcggagtcaggatccctggctccccgtgggccaaacagacctccggcgctgaatggagcttgggacgtcctgtagggaaggaaagtgcatctattgcactcgtaccccctccccaatcctcctcctcctctgggccgactggggtggagaccggatctgggacccggggaggcggcgctgcggtgaaagtcccagcggtggagaacagggcaagcatctaccgcgcgcgccgggacccacgcgtcctccccttcctcggggtttgtctggaggcagggactccccaagaggggcgctcgggccagacggctttggcgcccccagcggggaagatggccgcccctgcgcgccgctgaaaggagcgggagcgcaggcagccaggtgtgggactccgcgcttgtcccgcactctccatccagactgggtggcgagaaggaaagctcgtccccggccggagatcgctcctgctgggactcttgtctaagaagttcctcaatggccacctgggaaaaaccgcccagcagctcgggttcccacgctccagggattatctagactcaccccaagctcgagccggccttcttggggaccggcgtccgggattggtggaaggagaac

SEQ ID NO: 32500 - DNA, 459 bp, Homo sapiens; identical to SEQ ID NO: 24965
  chr11:61664527-61664986
  hypo

SEQ ID NO: 32501 - DNA, 631 bp, Homo sapiens
  chr11:61722665-61723296
  hyper
cgtgctgggtgagttcccccttctggctgttccgggtccctgtggccgcccaggctccagacaggccaggggaggatcacgaggagctgcggcaaggggctggggagggggcgggggaacgccagcggcaggtcggcgcctctctgtagggaaaggtgcggactgcagccagtgaaactgaagttagacgttaggtaagacgtcctgccgttagcaatgaaaaccccattttctgagggaagcgctgacatcatggtccctggagcccctgcgcgggaggggagggggtctggcggatttctgggaccagcagggggacccccgggtgacagaacccttggggctctcgcgcctccatgcgaggctctgcctgcctctcgctcccgagcgccttccaggagggctgggggctaggcccgctcgcagcagaaagctggaggagccgaggcatcgccgggcgctgggccctgggctctggccgcagcctggcccctcgcccctcgccccccgcccctcctgcccaggcttctacgtgacgctggtcgtgacccgctggtggaaccagtacgagaacctgccgtggcccgaccgcctcatgagcctggtgtcgggcttcgtcgaaggcaaggac

SEQ ID NO: 32502 - DNA, 672 bp, Homo sapiens; identical to SEQ ID NO: 14551
  chr11:705963-706635
  binary

SEQ ID NO: 32503 - DNA, 293 bp, Homo sapiens; identical to SEQ ID NO: 24983
  chr11:72432852-72433145
  hyper

SEQ ID NO: 32504 - DNA, 96 bp, Homo sapiens; identical to SEQ ID NO: 14552
  chr11:73358566-73358662
  hyper

SEQ ID NO: 32505 - DNA, 534 bp, Homo sapiens
  chr11:7694738-7695272
  binary
cggaatccgagccggcccgccccactccccgcccttcgcggtcccgcccacgacctctccccacgcctcccgctccggcccccaacctcccggtcggacgttcgttcccggctctagccggcctccgcgcctctggcctctttccttccggccgtcccgacggagatatttcttcaatactccataaatacaccccgccgcggaacccacccggagtgagacgcccaacacgtcgtcgaactggggttggccgggggccgctccccgccgcgggcccgcagactcgtggcgtcgccccgcagctccgcctggccgacggggaaccggccgagacccggacacgcacgcccgggaggacaaaagcgcgggcggaccccgcaggctgggaccccggcggctggcccgctccccgagaagggccgtggtcggggggctctcactcacgagccgctggctctgggtcagccctgcccccagggcagcgctccatcatgaggctggcggggcgctgagccgtggcgtcctcgctcctgc

SEQ ID NO: 32506 - DNA, 978 bp, Homo sapiens; identical to SEQ ID NO: 28479
  chr11:86382607-86383585
  hyper

SEQ ID NO: 32507 - DNA, 774 bp, Homo sapiens
  chr12:104322593-104323367
  binary
cgcacactaaatacgggaagttgtaaaagactgtgacagactgtcactaaaaaacttgtcttcaggaattcggacgattatctgaaaagatattcaaagttcaattttgttggaggaagcaataaggaagtggggtgtctatgtcagagacgggcgcgggtatgcgagggggtaacgtatagagtaggttaaagagacgtagaaaatatttccaaaggcacaagtttagcatgagggacttccctcacaggaaagacacctggtgttttatatgtccttctgagcacagacagggtatttctatgaagttacaaagctgcaatcccgttctcatgtgcagcaccacaggttttgctttcaaatatctgcaggtgcatcctcctgcactcgttaaactaagggttttccttttctgtgctagacccgcttttacgaccacgctctccacctgattcacagaaagggttctacgaccgtcaggtcaccgccgcctttgtactttattggggagtcgaaggcctcagcgctgctcgcgatttccctaaggtggtcgggaaggtcccaaccacgttcttctgtaaaccagataaggaaggcctggggattccggccgcggaaaggcacagaggaggtgaacgctccggctgcccaagtgacgcacttgtaggcggattcggaaactcgtgctcttgagccggaggcggagcccccagactcagaccgaccccccagaaccgggcggccttgcccgaggcatgaaggctttctaggccc

SEQ ID NO: 32508 - DNA, 807 bp, Homo sapiens; identical to SEQ ID NO: 23835
  chr12:104609351-104610158
  hyper

SEQ ID NO: 32509 - DNA, 799 bp, Homo sapiens; identical to SEQ ID NO: 23840
  chr12:112204379-112205178
  hyper

SEQ ID NO: 32510 - DNA, 528 bp, Homo sapiens; identical to SEQ ID NO: 25003
  chr12:116946078-116946606
  hyper

SEQ ID NO: 32511 - DNA, 180 bp, Homo sapiens; identical to SEQ ID NO: 29768
  chr12:117316485-117316665
  hyper

SEQ ID NO: 32512 - DNA, 342 bp, Homo sapiens
  chr12:117319773-117320115
  hyper
cgtgcccccagcgcctggctagaaacctgaccctaaagtgcccccagcgcccggtgggaggctggatgggcccacctgagctcgcgtggggcgcggacggaggcattctcgctgcccggcacccgcacccaaaagaccctcgcaaggggctttctaaagggaaacttcttgtctgctttctttgtgaacattattttcctgatggcgttacagttttctgcgatgaccccgatttaatgcgcagtggagaccctaaggggtcggcgagaggaggggcgcgggggactttaattcccccttttccaatccgacagccactcctgtgcacctccagactggagc

SEQ ID NO: 32513 - DNA, 551 bp, Homo sapiens; identical to SEQ ID NO: 14563
  chr12:123258823-123259374
  binary

SEQ ID NO: 32514 - DNA, 90 bp, Homo sapiens; identical to SEQ ID NO: 14564
  chr12:123321244-123321334
  hyper

SEQ ID NO: 32515 - DNA, 723 bp, Homo sapiens; identical to SEQ ID NO: 14565
  chr12:124850157-124850880
  hypo

SEQ ID NO: 32516 - DNA, 565 bp, Homo sapiens; identical to SEQ ID NO: 14566
  chr12:12502899-12503464
  binary

SEQ ID NO: 32517 - DNA, 133 bp, Homo sapiens; identical to SEQ ID NO: 14567
  chr12:125477548-125477681
  hyper

SEQ ID NO: 32518 - DNA, 150 bp, Homo sapiens; identical to SEQ ID NO: 14568
  chr12:125500633-125500783
  hypo

SEQ ID NO: 32519 - DNA, 557 bp, Homo sapiens; identical to SEQ ID NO: 29773
  chr12:129189650-129190207
  hypo

SEQ ID NO: 32520 - DNA, 267 bp, Homo sapiens; identical to SEQ ID NO: 14572
  chr12:132241778-132242045
  hypo

SEQ ID NO: 32521 - DNA, 325 bp, Homo sapiens; identical to SEQ ID NO: 14573
  chr12:132247422-132247747
  hypo

SEQ ID NO: 32522 - DNA, 311 bp, Homo sapiens; identical to SEQ ID NO: 14574
  chr12:132270193-132270504
  hypo

SEQ ID NO: 32523 - DNA, 851 bp, Homo sapiens
  chr12:1639898-1640749
  binary
cgcgccccggccgcggatgaagagtcggaggcggcggcccgagcggcccgcgcgctgagaggagcgggcagggtctgccccgggccccgccggccgccccctgcgcccccgcgggccgcgcctcgcccgccgacccagcgcagccgggcgcaggaagagccgggccgggccgagcggcgcccggagcccgcgggcctgacacgcggcgggacatgcaggtaagcgccggccctcgcccccggggacggccccgccgccgccgccgccgccccggctgccgaacctcgcgcggctcctccgccttcccggccccgcggccgcgctgggtgtccgccgggtgggtctgcgcgccgcgggcgtcgggtcggggcgggccggggtcaggtcgggggaagggagtcgccccgggccggggcggcgaacaaagctggggaccgccgggccctcgcgcgggcaggcataggaggctccggggtcggcggcgcaggcggggcggcctctgagcttcgcgctcactctcccgggtctggtcgggcccagccccgaccctccgccgaggtctgcgccggcatcgaggaccccatctgggttactttacccgccggacgcgggtgggagcctgcgtttctgcccggaccgcgcaggtagagcccgagcgccgctcggctttgtgcttctccggtcgctccggcgctccacgtccccgccgtgggagaggcgggacgagacctcctccttcactttcttggagcctcggtggacgcgtagcccgcgctccagtcggagccgaacccccgggtatttgctgcagaccgctgggagaggcagttcggtttgcggggagcctgccc

SEQ ID NO: 32524 - DNA, 137 bp, Homo sapiens
  chr12:2040494-2040631
  hypo
cgtccatccccgcggagctggtggcagagtggcggatgccgtggtggagcactgcatggagcactgacggatgacacgtgcacatggcgatgaggacgacacctaaacgtggcagtcagtggagggaaagccagaac

SEQ ID NO: 32525 - DNA, 921 bp, Homo sapiens; identical to SEQ ID NO: 22782
  chr12:25101390-25102311
  binary

SEQ ID NO: 32526 - DNA, 112 bp, Homo sapiens
  chr12:26348176-26348288
  hyper
cgatttcaacattcatcaccttgcattgcacttcacagaaagcaaaaccaaaacaatcctggagttttgagtgaggaaaacagacgccccgcactcgcacacgcgcgcactc

SEQ ID NO: 32527 - DNA, 600 bp, Homo sapiens; identical to SEQ ID NO: 28513
  chr12:30975325-30975925
  hyper

SEQ ID NO: 32528 - DNA, 530 bp, Homo sapiens
  chr12:46766939-46767469
  hyper
cgggggacacatcaaggcttttgggggacaccaccctcccaccaaacactttcttgattgttatttttgtgatttacagtgaagttttgtctcacaaacttgggccaaggcagcaaggttgtcctgatggtttgttgttctttcttttccacctagacctgctttcactcttcaaaactagccggaggtcggcgagcagctccttttcgggatgtgctttttgtacggccatggaaactggactagcggaaaggctaccttttggccagcaagccaggccccttagaaagaggccccagtggggagcccggcgctcctaaggccgtttgggagtccccagttttccactcgctgacacgttgcttctcttatcccaccaccgccgccccgggcaaaggcactgccttgtctgaatgcgggtctgaggcgctttctgcggagcctggtcctttcccttcaatggtgatgtgtgtggtcttgctgagccaggcaactagggggacccttcgctgtggaaaaattggtgctgc

SEQ ID NO: 32529 - DNA, 302 bp, Homo sapiens
  chr12:48299205-48299507
  binary
cgtcgtccgcgggacgctggggggcgcctgccgactggcaccggcggctagctccgcacgaatgggaaatcccgggctccgctcgccaacctgttactgctgcagaacgccaggaagctcagcctgatcccacagattagggtaaaatatcccggggggccgaagtggaaaccggagttgcgtcattgctcccacccgatatcaccttggcagcgaccgcggctgaccacgttcccggcctgtcgcgaatctcacccaagggagctgagtctcagcttccctggtccctggtcccgagttcc

SEQ ID NO: 32530 - DNA, 1353 bp, Homo sapiens
  chr12:48397567-48398920
  binary
cgtttgcttgctccctcgctcgcgctctctctttcctacttcacctaagttcgatgagttgagatctgtttttgctgaactcgaagtgcttcgaagaggcgagctgtgtgcatgtgcgcctaattatcaaagctggtggaaaagagcccatttatatctgtgcgcaaacttctccgagccaacactttgcaagttcagtattctagcgcaacgtagggacctgcaaatacttgcaactgcgatgggcaccgaggaccctgggacagagtccttgattggcagaactcttcttggtgaacttctgcgtgtcctgtgcctaagtcggcgcgctacgaccccgggagccgttttagcccggagccgcgggctccagagctggagcgggccggggagaaggatgctgagggacgcatggaaagcaggcaggcaggcaggggcgggggaagacttacggacatcctggccctgacaccgaaggacagcggcgacgagcagcgtcagcagcaccagcgtctggggagccccgaggcgaatcatggctcaccgcggggcctggctgagccgggcccgggcggagcgcagcgaaacggcaggagcacggcgcgggtccgggtctctaccgcgccctcatgcaggaggcccttggagcaggagggggaagcgggagacccggcagcccagcagcgctctgcgtcttctccccgccgcggcgcccgttatatgcgcccggcccctttcgaggctggcgaactcgcccaaaccgcgggccgccccctgccccccgctgggctgtaacctgaaccgcccgcccccggagcccgcctgggccctgccagtgcccgcacctgcccaagccggacccccctctctgggagtcacgcttcccgccctccacccctagtgcgccgagtggcctgatcgggcggggcgcagagatggcccctgccccccaaacccggggctgcggcgctgcccccctctgaccacaggcgggaagggtggcctccggcccctcccctcggagttctgccggagttggaggggagggggtgtttgcagaggcgcaggccgagagccctagaccaaggacggaaaagacatgggagggaggagggaaagcggtagaaaggagcagcggagggcgagggggcaccgcgtcaggcgtttgggagtggggacagggaggagcccacagagattcagagtcctaaatcttggagacaggctagctgagccagatctgaagggttaccccgacctatcttttagcccttccctgcagtacctggtccccagactcccacctggacgttcacagcgactgccctccacccctcccccatccagctctgc

SEQ ID NO: 32531 - DNA, 1811 bp, Homo sapiens
  chr12:49391120-49392931
  hyper
cgcttttgacaaggggaaggaaagaccgtggccccttcaccctcctccttgccgggcttcgattggctgggggaatcccccaccacgcgtgtcaccccagagggcaaaagctgcacctgctgggttcggggggttggaacatattgggatcgtatcactacgcacgtggcgtcaatgacaaagacgccttccccacgggacaggccctgggaactgcggggcaaggtgtgggcacggcgggtcgccttccaaccctccagggtctccggtcctgccccctctccaagacccagagattctctccatccggtgcctccgggagcccagggtctggggagtgtctggctatggcggggcggctgctttttaggggagggaatccagcatttgggaaaccagatctgttctccttctttcccttccctcgagcccttgaggtggtgcctggatctgggagcgggatgcggggcacagggagccgcagttgcagaccccgcaggagctatctcggtgcctgcgctccctgtagctttggcttggggatggctgtcgctaccactgttcaggtcagcagcagccagccccaggcttttctccacgacccccttgccgggctctggccttgctctggccgctccacagcctggggatccccccaagagaccttgcccctgtcggagaccccaagccccgaggacgtcccggtagatccgaggatccagcctcttctttgtgcgccctccgtctgtcctggctggagtcgcagctggggctgatgaagtgggcacctgagagttcccggggcctctcttagtccccaaggtcctatgggggccttcgtaagaaggtggagccacgtagggtggcggccggtcccagcggcgtcgtggggcggtcccggcagaacctctcagcagcaggtgagcctcgtagcttgggggcccgggccgccgacctccccagggccccgcccacgccgaccctgggtcgctctgcggctgcgcggatggacggggcgctcgccccacaggcgccaggcgctccggccgcaagggagcagggagccctgccagctgggccacccgaggggcgttgcggggctccgggcggggtcgacccggggggctccgtcgggccccaccagccttgcgcctttttcgctcggtctccttggcctcccgctcctgcgacgccgctttccttttctcttgctcccgagctcggacctcggccaggggccccgcccgccagttggtcgcctcctgcagcaccctggaggcccagggccggcggggcggcggctgtggggatcccgggcgcggcccacacctgggacaatgagcaggaacccaggtgagcagtttgtgggggaagggagccgaggtccggggagctgggagcactggagaccacttggggcagccatgtgaaggggtgtgtgtgagtgtgtgcgcgtgtgcacgtgcgtatatgttaggactgaagtcgaagcgggactcctcgccatctctccatgcacactttaacagcgtctgccccatctcacctcctgccctttctcacacccacttctgttcccccaaacaacgggatgagtcaggccccagccctcgggagcgggcagaggtggaaggcgtgggaaagagaagggggaccagcagtgctcgctggtgcctgcggggaggtccggaccccactccccgccccaccactctcttcccctcacccctgcttcactcacgtgcggttctggaacccgcgagcccagtggctggcctggaagtccatgggctgtcgagaaggggcgcggc

SEQ ID NO: 32532 - DNA, 215 bp, Homo sapiens
  chr12:49487994-49488209
  binary
cggtcatcaggcggtcggctccactgttctcctcatccttgaagatgatgtcggggttgtagttgggcacgaggtcccggaagcgctcggagccccttgccaccctcccctccgctggcccactggcgcccagggtccgctctggcacgccgggcacaaattgcttgtagagtagcggcacgagctgcttgcgcgcatagcggcgccggccaacc

SEQ ID NO: 32533 - DNA, 1359 bp, Homo sapiens; identical to SEQ ID NO: 25034
  chr12:49735805-49737164
  hyper

SEQ ID NO: 32534 - DNA, 1388 bp, Homo sapiens; identical to SEQ ID NO: 14588
  chr12:49738834-49740222
  hyper

SEQ ID NO: 32535 - DNA, 598 bp, Homo sapiens; identical to SEQ ID NO: 25035
  chr12:50297476-50298074
  hyper

SEQ ID NO: 32536 - DNA, 660 bp, Homo sapiens; identical to SEQ ID NO: 14589
  chr12:51785160-51785820
  hyper

SEQ ID NO: 32537 - DNA, 771 bp, Homo sapiens; identical to SEQ ID NO: 25042
  chr12:54088889-54089660
  hyper

SEQ ID NO: 32538 - DNA, 813 bp, Homo sapiens; identical to SEQ ID NO: 23874
  chr12:54145145-54145958
  hyper

SEQ ID NO: 32539 - DNA, 900 bp, Homo sapiens
  chr12:54389206-54390106
  hyper
cggctctggccccttaattgtacttcgggctcgtattgtctctcctttcgccacctccgcttcctcagtctgggctccaaagtcactgcaaatttccttgcgacacatacatcacacaaaagatcaggtaacaaggcgctcagggccactggggctccgggcagggcagggagcggctctagctctggggcggctccccctccagccactcccaggctggaaaaccagaccgcgttgggggagccggaaatagccccgcttgctgcggagcgtcagggcgggggcgccggcgggaatgcaggcccggcaggccgtggctttgagagagccacgttcacaggccctggggatttcactcctgctgggcctcgggacctgactcctggtgtgtagggatcccagatacccaccttgggtgggggcaggacgcgggtttcctcgcggcaggccaagagaactcagtttctgcttccagcgcaggccttagctaggaggagttgtgtgtgggtgtgtttttcccaacaaagagggatcaggagagagaaggggggaaagtagaggggaaccagggagggggcggggaggggaagagggcagtggagaggtgaaatgagcccatttcagggggagaaggaaaatgaaagcaaatggagtacggccttctccgcgcagggcgggtgctgacgagccgggagcgggctccctgcctgcggcagccgggatggcccgctggggacaccggagaaagcctgttttaaatttaatccgaacttgacggtgtggattgaaccggagggaatttaaatcactaaaaggaaggcgcggggcagggggaggggacgactctaacctgtctatctttctgtctgtccttcccacggtgctagtttggttgtggcc

SEQ ID NO: 32540 - DNA, 1020 bp, Homo sapiens
  chr12:58025595-58026615
  hyper
cgttaggagaatgcaggcatctgagcccagcagtggagaaaacaaaagcccccagaccacccccagcgagcgctgcgctgcgccgccgcggtcggcactcaccccactacttgctccttgatcctgaccgggatgtgtgcgtagcggggctcaggagcaagatctggcagctcgggcctgcgggggctttgcgggggcgcccacggcgcaagaggtagccggaggccgggcgcgtcccgggtgctcgcgtacaggagccccagcgaggcgcaggcgagcagaaggaccagagcgcacagggcccggcggcccagccacatcctaggtgggggtagggtggggagtgagaaagggagggaagaagggagggcaagggatggggcccttggcccccgcgtcctcagaggctcctgccggctcccaagagcgctctccactccacacatcgcgctagggtttgcactgccagccgcggttttcccggtacccctcccctcacttcccaggccccagggtctcccggcctcctttcttctcgccctctcctgcatctcggtttcctcacacacccgaggcctggcatcttaatgctgaagacatttggatgccgcggtttcgacgcggccgtgcgtaagcggaaaagccccgctctatcagggcagtggcagtccccaagcccgccgcccgccctggccggcgcgcccccgactcctcagtctgagcatcacctgggccggggtgggctgcggagggcggctccacacctagcctgtcaggaaaaaatgcagaatcatgcccgtgctggcgggcgcccccggcggaggtgacccgatgagtggcctcggcaagcggcgcgggggacagagtggaccgggaagcgcgcctcctcccgcctcctcccgcctcctcctcctcccctcaccaaccaatcccacccccacccacccccgggcactgacctgtctaacgctctaaggcagcggcaaaatttcggtccgggctgtgccgggctctcgcccc

SEQ ID NO: 32541 - DNA, 950 bp, Homo sapiens
  chr12:59989999-59990949
  binary
cgccagagaccagataaagtaagtacagctggggagggaggggagaggaggaggaggaggaggaggtgccggctaagaggagggcgagcctgcgtctgcgacccgagctgcccgcggagccgcacgcgtgtgtgcaaataatggccagcctgtgacaaacgtgccaacgcagagttggccagcgagcccttatatagacaaaaaaatcccgaagcggccgcgggagcagagctcgcgtcagccagtgcgcgccgacagctgcccgggaactgagggggcgcgcggggtcctgggcaaggagcgcctcgcgtgctttcggccaggaggtgctcacgctctcggcttttacaccgagactcagcgtggcgcggtgcaccccagtctccctggctcacgggactccgagggctgcttccagtgcggcgtgtctctagtgcgcgccccgccagcatccggcccccgagccccctagggtggcgtggcttcattgccgcagaaggtggaggcgggggtggagtgtgtggagagaacgtcttctctttgagcagatgatcaggacaggaagaggctgtgaggggaagacgaaataccgggggatgggggggttgtctttcttcatttttggtccccaggaaggatggcaggggtggaagcagatggaaaactatatgcgggcgaggcctgagcccaggcagaaagggacctctgacttggcaagggttcaggagggcctgagccttctggtcttgctgggccactgcaccacattgggggcgccaggcccggtcaggtggcgccacaggctgcgagcccgctcacgtgcgaactgcctgttttctcagcggatgctgcatcgcggcgcccttctccacccccttttctcctctacttccgcgaaaaggattgcagactgccttggaaagggcggtcgtgcccagtgccactttccc

SEQ ID NO: 32542 - DNA, 526 bp, Homo sapiens; identical to SEQ ID NO: 14595
  chr12:6419603-6420129
  hyper

SEQ ID NO: 32543 - DNA, 406 bp, Homo sapiens; identical to SEQ ID NO: 25055
  chr12:75728083-75728489
  hyper

SEQ ID NO: 32544 - DNA, 1303 bp, Homo sapiens
  chr12:93966037-93967340
  binary
cgggctgcgccaggtgtgagaccggaatgccaatttggggaatctctcctgttctttcctttttaattttttctacttgtccttgacaagggcctattcccactggatctgcaggtgactatttgctcttcctaggtcgccagtctttgatttcagctagtgaccctgggcgggaagacaccctgttcaccctcctcctgacctccgccccccacctcttcagccaactttatcttggatctctgctctctttatcttttctctagagctgggccagggcgctaactggaagcttggggttaaatggtgcaggaacgtagaggcggaggagtccctgggattttccacgtctatttccccacccccaccccagccgcaggggtccagtttggactgacccaacctcccgctttctctttgtaggcgatcagtgggtgaccgcggctgcgagggactttgtcatccgtcctccaggatctggggagaaagagccccatcccttctctctctgccaccatttcggacaccccgcagggactcgttttgggattcgcactgacttcaaggaaggacgcgaacccttctctgaccccagctcgggcggccacctgtctttgccgcggtgacccttctctcatgaccctgcggtgccttgagccctccgggaatggcggggaagggacgcggagccagtgggggaccgcggggtcggcggaggagccatccccgcaggcggcgcgtctggcgaaggccctgcgggagctcggtcagacaggtagggagccgatcggccgcgacgcgtgcgggagggagcgcctccccaaggaagcagctaggaagcggggtcgaggtgggaagcaaagaataagatggaaatacgtcccttgcttccaagggaccgcggagagcacgctcgcagggtcctgggtccttgggaatgcgtaaggaaagtggttctccagggactcaggcctggcggagcgcagagcgcgggaagagcttcttggaaatagcttcttagcacgctggaagatttactgttttccgcagctgctcagggttaggctcccgggctcgaaccccggccggggaaagcgtcgggcgcctccctttgcacggggtgcaatcagcaagtcggtgccgcgggccccgcaggcccagcagcatctggctcccgggcggagctgcggctgcagcccaggatcttggcggccaagttcagggactgacactgccgcgagggcggctgcccgggcgtcgagagtaggctgcgaagcccccgccgagcgcggcttccatggtc

SEQ ID NO: 32545 - DNA, 379 bp, Homo sapiens
  chr12:96184964-96185343
  binary
cgcgaaacaggctagcgcctacttcccacatcccccagcgaaacaagccctccctcctcctccagccaccccctctcggggagtcccacgacccggggacggaacaccccaacccagccccgcgtcacccgcactgagagcgcgccaactgctaagcggcgttcgccgcttctctgctgccttttgcgggggtagggggatgtctcggctaaacaatcgctgcctacatgatccgaaggtgtgcccactttggtgtaagaggtattgcctaactcaaactcaaggtgctgaaagaaaagggtcacaggattagctagtcggcagtgtaagaacatcgttgtccagaggcagggcaagggcacgacaaagggaactcttc

SEQ ID NO: 32546 - DNA, 887 bp, Homo sapiens
  chr13:20702234-20703121
  hyper
cggggtggccaggccttgtttagagtagctccagcgtttgaatcgcgcaggcacaagaaggccgtctcctcaccgcgggccagcggggccggccagggcccgggcggagggggagcccgggttccgcggtcgggttgtggggccggcgctgacctcaccgcatgggcccctgcggccgccgtggcttctcacgcggcctgactttggactcgagtgcaggctcttagctgaatctctgtgtagacagggtgggtgggactccgccctggggtggcgctgggggctcgggtctcccgccgcaggcctgtcagcggggcgcttcccgtcgattccaggagcgcccgcgtctctgctcagcgccacgagtccaagcgtgggggaggacgagactttcaaggcggggggtgacagtgccatccagcccagaatacccacccccagtggcgggctgccgtgcccaggccctgatccctgcccctgcaaacatcactttctatcgcccacggggctctgcagatgtggccaggctaagggtccagagttagggagattgtcctggatgatccgggcggaccctaaatgtcatcaaagtgtcctcgtaggagagggagaggaggcgaccgtgggggcagaggctggaggaccgcggcgcccgggacctgcccgcacctgactgcagccaggtggcgccgattccggacgcccagaactctgtgggaatgcagctgtactgtgcggcgtgtaaaccaccgcatctgtgggattttgttaaagcagccacgggaccactccaccccctccagctgtggtcctttacccggcggcggccacctggcagcagcccggttccccatcctgcggggttcctcccgcccgcagaccggctc

SEQ ID NO: 32547 - DNA, 821 bp, Homo sapiens
  chr13:20767087-20767908
  hyper
cgccgtggcgccttttaaccgcaccccacaccccgcctcttccctcggagactgggaaagttacggagggggcggcgccgcgggcggagcgcgcccggcctctgggtcctcagagcttcccgggtccgcgaacccccgaccgcccccgaaagccccgaaccccccaagtccccttcgaggtcccgatctcctagttcctttgagcccccatgagttccccaagtgcccccagcgccctgagtctcccccggttaccccgagcgccgcctcccccagccccttggcggcccgggtgaagcgggggcggctgagagtcgggaccccccaggaagcggcgccccagaccccggctccggcgctgtgccgtgggcggggttcagggatggctgtggtcgttgtcctctgtactccgcatagtgcgagaggacttggcatttatgagcgcttctttaattttttattgttagagaaacaggcattcctccaaggactgaagatctgttcgagtcgcggaggctgcgcgggcccgcgaggctctcgcagggggacctaggctgggtggcggggcagtgccctctggaatgggggttaacggtggccgaggagggggcgccgctggtgccggcgaagtccccgcttctttctcccctcaaaatctcaccaatccgaacgaacgccttctcgaatttccgattttattcaattactttcaacaatgtgccaaggactaaggttgggggcggtgggagagacaagcctcgtttttgccatggccggcaggggggtcccgccatctgcggagggtgccccccgcggccccc

SEQ ID NO: 32548 - DNA, 664 bp, Homo sapiens
  chr13:24040375-24041039
  binary
cgggaacaccctgcacgtgagaggggccctgaaattcacgaggggctggggctttgcgtttattcctccagttccgcctgcagcaaccctgacgatcgagcagggcccgcgggggagcgagcggaagcgggcagcgtgcgctgctgtcccgctacccagcccgctaggctgcgcagctgcgtctgcgggcggggagccggggcggccgtgggcttcctccgggcgcgggctgacggctgccgcctgtgggcgccccagccctgcagccgagcgggaggggcggaccagcgggtgtcgggagcaggctgcagcggccaggcctctgcggcttctcggagtactgggtccactggagagcgaagagccgcggccgccaggattcccagcagcggccgcgtgttgagagcctagaagtggccccgaagccgtgcctttcccgatagccaagcagaagtaggacttgaagcaccgaggctgggatgcccatgctggtgacgccttggggctcgcagttatacttggtgaccggtctacacggcgattcggtgctttccggagtagcagattcatctatctttagacccaccttcgtccttcggcggtttagcacggcctgcgctttcctgcgagccctgctgtcacccgaacagcctgatgacttcac

SEQ ID NO: 32549 - DNA, 40 bp, Homo sapiens; identical to SEQ ID NO: 14605
  chr13:28152529-28152569
  hypo

SEQ ID NO: 32550 - DNA, 541 bp, Homo sapiens
  chr13:33000891-33001432
  binary
cgtgccagacaatgtgcttggcagggtaagacatggctcctaccttcaagaaacttacagaaggataagaaaaaccatgtgcaaaaaagtaagcacagtcacgtaggtataaacaggaagccaaggagcccagaagaggggcatatactggcggggtgggatagctgcccggtcttaaaaggcaaaagaaggcgggagggcaagccaggcaggaaggccagcgtcaaggagagaagcggcttggtttacaggagataaaaacagttcgaagttgctggaacatcaagcgcaaggcagggagcggtgggagttcaggctggagcggtggggcctagcaaggtggccacaggcacaagcccgcgtaattcccagaggttgggtaccggagggccgcttacgcaattcgcaagtgaacgaatttgggcgcccatggcgaggctctgtcagtgacggtcggtggtggcgccgccagccagccccccgcccccgtgcacctgtgcgccttcgcagctgccaaagcaaacgcaggctccccgacttc

SEQ ID NO: 32551 - DNA, 947 bp, Homo sapiens
  chr13:39261351-39262298
  hyper
cggctacaggaggaccccgcgggcaacgcgcggagttcctggcacttcccggcggtgtctcttgttgtctgcccggggaccgacttcgcatgctctcaggctgacctgtccaagcccgaacaccgggaccatgcactcagccgggactcccgggttatcctcgcgccggacaggcaactccaccagctttcaaccaggaccgccaccgccgccccggctgctgctgctgctgctgcttctcctgtcactggtaagccgcgtcccggcacagcccgctgccttcggcagggcgttgctgtcccctggtctcgcgggggctgcaggggtccctgctgaggaggccatagtgctggcgaaccgcggactccgggtgcctttcggccgtgaagtctggctggatcccctgcatgacctggtgttgcaggtgcagcccggggaccgctgcgcggtttcggtactagacaacgacgcactggcccagcgaccgggccgcctgagtcccaagcgcttcccgtgcgactttggccctggcgaggtgcgctactctcacctgggcgcgcgcagcccgtctcgggaccgcgtccggctgcagctgcgctatgacgcgcccggaggggcagtagtgctaccactggtactggaggtggaggtggtcttcacccagctggaggttgtgactcggaacttgcctctggtcgtggaagagctgctggggaccagcaatgccctggacgcgcggagcctggagttcgccttccagcccgagacagaggagtgccgcgtgggcatcctgtccggcttgggcgcgctgcctcgctatggagaactcctccactacccgcaggtccctggaggagccagagagggaggcgccccggagactctcctgatggactgcaaagctttccaggaactaggcgtgcgctatcgccacacagccgccagtc

SEQ ID NO: 32552 - DNA, 741 bp, Homo sapiens
  chr13:42032017-42032758
  binary
cggtcttcccgcgcgggcggctgcagcctcctttccggcccgggctggcccccatgtcccaccttccctccaccaccagctccgcgcgcgcccggggttggggggagcggcggggacaggtaaccggcagcgcctggggaggaatctggccgcgccaagtcgctgggtgaccctgggcctggcgaaggctcagttttcttgtctgtaaaacggacttggtaatagaacgcacttcgggggtggtggagaagattacaaggtaacagcgactgcgtggctgtcacttggcagaggcgccaagtgtcagttatcttcgggaaccgtggcggcccctcctggccctgggaggtggtcccgctgcccccctgacttccgtgcactgagcccctggccctgcccgcagccccggccctggactcggcggccgcggaggacctgtcggacgcgctgtgcgagtttgacgcggtgctggccgacttcgcgtcgcccttccacgagcgccacttccactacgaggagcacctggagcgcatgaagcggcgcagcagcgccagtgtcagcgacagcagcggcttcagcgactcggagagtaagtgcggcccccgctaggatggcgccgggatctcccagctcccaggacctgccccgcgaaggctgcggcctcagttttcttatcagtaaactgaggaatggtttcctgaagctcaacgcagtaggccgagtggtggcggggcccctgac

SEQ ID NO: 32553 - DNA, 83 bp, Homo sapiens; identical to SEQ ID NO: 14611
  chr13:45953018-45953101
  hypo

SEQ ID NO: 32554 - DNA, 139 bp, Homo sapiens; identical to SEQ ID NO: 14612
  chr13:50265737-50265876
  hyper

SEQ ID NO: 32555 - DNA, 61 bp, Homo sapiens; identical to SEQ ID NO: 14613
  chr13:73809567-73809628
  hypo

SEQ ID NO: 32556 - DNA, 807 bp, Homo sapiens; identical to SEQ ID NO: 23912
  chr13:95201113-95201920
  binary

SEQ ID NO: 32557 - DNA, 639 bp, Homo sapiens
  chr13:95201972-95202611
  hyper
cggcacgttctgggttgtctcctgagtaaactatcactgagcgctttgcgtccaactggcttgcttgtcttttcctggtgatcatgtacagcatttcttccttgtcctgttaaacggtgtcgtcggaattcttccacctccctccttctacgctgccactgggcgctgcacacgcgccttactttcttagattgctctcggcgcgcgcagcccgcacggtccaggagctgggtccaggcccccgatggcggctcctcgggatgctggttccgtcctcccagggccggtccccgcgagatccgaagcagcggggtcgcctcggggagctcctgcccaggcctggtagccccttcccttcgatctgcccctgcctgtgactatccacattcgtcaccttgctccccgaaaagttccaggccccaggtgaggagccgtgtaggcccaatacgattggatgaaggagtgtacggggcaggaatcgtcagactggcctctggagaggagtttgcagcctctccgtgctccgggcccgggaaatgtccaccttaatcatcacctctttgcatggagcctgactggcaaataaatgctgggtgagctcactaacgatgattattcagtcaatgctatttcccacac

SEQ ID NO: 32558 - DNA, 131 bp, Homo sapiens; identical to SEQ ID NO: 14619
  chr14:102375780-102375911
  hypo

SEQ ID NO: 32559 - DNA, 962 bp, Homo sapiens
  chr14:103394621-103395583
  binary
cgaggaccccgggcctgagctcgcccgggctccttccgtgcacagggtctcggcttctcgtcccaggggactgggggcggggtgggcgcggagcaggcccggacccccgcgtggcgccgcctcagcccgtgtctcttgcagctcctgccgctggatggggaactcgtcctggcttcaggagccggattcggcgtctcagacgtgggctcgcacctggactgtggcgcgggtgaggcggtcgggcaggggcggggctctggaaaggcatgttcaggggcggggactggagggaaggcgcgtcgaggggggcgaggaccggagggagggcgcctccgggggcgtggtttagggagtggcggaagtgtcccgaagcggggcttgggaggtcgtgctcagacgcgtggcgtggcgtggcgtggcgtggtgtggcgcggcgcttgttccgtggagctcagggatgtgctccggctcaggcgaacctgccgtcttccgcgactctgaccgcttctcctggcatgacccgcacctgtggcgctctggggacgaggcacctggcctcttcttcgtggacgccgagcgcgtgccctgccgccacgacgacgtcttctttccgcctagtgcctccttccgcgtggggctcggccctggcgctagccccgtgcgtgtccgcagcatctcggctctgggccgggtgagcactgaggggagggaggctcgggtcccctctccccacctcggcccgaccccgcccctcctggtctgcacacgttgggtctgagcactcaggtgaagtctcttcctcgggctggctccggtggggacccggctgcccgcagacgttcacgcgcgacgaggacctggctgttttcctggcgtcccgcgcgggccgcctacgcttccacgggccgggcgcgctgagcgtgggccccgaggactgcgcggacccgtcgggctgcgtctgc

SEQ ID NO: 32560 - DNA, 239 bp, Homo sapiens; identical to SEQ ID NO: 14621
  chr14:103433869-103434108
  hypo

SEQ ID NO: 32561 - DNA, 796 bp, Homo sapiens
  chr14:105309703-105310499
  hyper
cgggatgcccgcccagcgcgccaagccccccacgctcacctgtaagtgcaggtggtgctggaggccaggccggggccctgcaggggcaggcacacagtggggctccgtcgccgcagcgccccggcggcctcctcctggccgctggccctcccctaaggcttcctcatcctaaacagcaagtgaagccaaacgaaaaccctgtctctcccgccgttccctccctcctggcctccgtcccccgggctcgcctgccccgccgcccggcggaccggtcccttcctgctttccctggcgggtgctttccgctgctctgttacccggagccaggacgcgcatatattcccagaatccgcgctcagtgcgttcggtcccccgggacacctgttctctgcacaggcgcgtctgggcgcagcgggggcagacacgcgttcccgggcagcgactccggaaggcccgagggagtaaatctggccctcccggttcagcacaaagctcccctggccgcctttcaaaaccgaccgcctcccaactctccgcggacacgagtggcggctgcctcccctcccctcccctagggccgcgcacgcctcccgcagggtctcagtgcctcctgggcgggggataattcctgtccccaccggtgtcctgtactcgcggggtcccgggtgtaagttctgggtcccgggctggctccctggtgagcaaagccgcatcgctcgaattccagaaacccttctcgccgagcgcctgcctggctgctgaaagcctggagactgcgctctcggaggtggatttc

SEQ ID NO: 32562 - DNA, 959 bp, Homo sapiens
  chr14:105330476-105331435
  binary
cgccatactcaagggcgcctcttgactccctctgaactcgcaatcccgccccagggtccggcacaagggctctgctggggctgagatccgtgaaggcagatgcggagaggcgccgctggattgcgagcaggcccaggtgcggggccaggtgggcgttgtcgcagccgggaacgcccagccgctccagctgcccacaggacaaagcccagggttccccggccgggcgcacgccttccacattctccctcacctccacgccttcgctcactgcgttccccaacacctggaatgcagcaatgcccttcgggcacgctgccccgcccccacgttgatcccgtcccctagcttggctccagggacaccggatacgcctattgtagcacccggcaaggagcgagcagtccgcgggaacttacccaggaaccccgagcgcctccgtagttcccaaccccacccccacccctcggccaggtcaggtccactgtgggcgtccaggtaagacggcgtcgatgcccaccaccatcgcccccagctcagcccagagcgcccggggtcagaggtggagatgtcggacatacgcccagtctggccaggctcgggagggaaaatctgggagcggcctctggaactcaccctgactccttcaccgtccgctcctctttttggcttccggggccaaaggttggggactcgaggcgcggctggagcctacagctcctggagcgtagttaagcgttaacccgctggccctgggccagggcgcggggctgctgtgcgcacccggttccgcccgtcgagctggggccggaccgggaggcgaagcggggggcgctgccgagacgggagggcatggggtctgcgccgggtgcgagatgagccggggaggccagcggggcctgggcggtgggggaaggtgggcctggggcaggggcgggatggcggctcgccaagcctctgcc

SEQ ID NO: 32563 - DNA, 387 bp, Homo sapiens
  chr14:105433911-105434298
  hyper
cgcgggacagtccccagccccaccctcagccaccgcactgggagcggctgttcctacactgcctgtagtggggatggagtgcagaggctcagcgagcggcagacctgcctctggccacagagctgcgcagtggggacccctccagtcactgggctggcaggagcctggcccaggaacacaaacaggaagggggaaatcctgcccgcctcgggataaggctgcgcagccaggctaccggcctcggacccgcgccagtcgggagagagaggaaggcccccagtatcccagtcccccgccaagagcaccgcctcccaggcccgagctcctgaggaagccccgcctcggccgcagagcgcaggggaggccgcctttgcccgcccggcctcc

SEQ ID NO: 32564 - DNA, 771 bp, Homo sapiens; identical to SEQ ID NO: 31133
  chr14:36974427-36975198
  hyper

SEQ ID NO: 32565 - DNA, 586 bp, Homo sapiens; identical to SEQ ID NO: 14624
  chr14:50469917-50470503
  hyper

SEQ ID NO: 32566 - DNA, 889 bp, Homo sapiens
  chr14:51026680-51027569
  hyper
cgttgaaaatgttgcggtacgtggtctatcactgtcttcacggtctgggggtggactgaggtagggagggtgtgacgctggtatctgtgtgaactcgggcttgtgatgctgagcttggttcatctgctttctcctcccttttcctccccactccttcccaccagcgccacagcaacatcctcagagtctgagcgaactgcgcccagcgcgggcacggagcctcccaccgccagcaacctgcggccccggagaaggcagcgagcgcagtgacagcgcctcaccgccaccagctcctggaccaccatggccaagaaccgcagggacagaaacagttggggtgagtagcaaatgagaacttctgcagcctgcacggggtcttctggccctccactttctgcttctgtggagacagggagggccaagggctgctaggtgcctgcgtccacggctgggagacgggccgtagccgagccgctccctgtttgggcggaggaaccatggccgagcggtacccgcgtcaccgaatcgcgctgtcggggtgagggctgcagcttcgcgcaggccgggcctccagctccttcttccccacccccctcccgcctcctcccagcatttggacagcacccaccaggcgcctccggggacttgtgggttccgccttagcgatcggttgggaggaaggctatgggggtgggcagggggctgttgttactcggccccagaggggcgaggggtcggggatctagagcaggccaagccccaacccccctccccgggagccgccaactcgctggctctgcagggcgcgggctcccggcggcgggcggcgggcggcgcgctggaacaatgaggcggagcgcgccgggtcccggacggacggtagcagacc

SEQ ID NO: 32567 - DNA, 1180 bp, Homo sapiens
  chr14:59931109-59932289
  binary
cgctgaaggccgcgcccagctgcgcggggtccggggaggtccggtagaggcagccgtggaagctctgcgccgccgcgagttcccggggcgccccgagcagctcccagggcaaggagaagcccagggccgtcagccaggcgcccgccagcagctgcagcgcgcggcggcggccgatcttctcccgcggcggccgcacgatagcgcagtaacggtccaacgagatgagcgccacgctgagcgtggacacgatgccgaagcacgagctgaagaagcggctggcggcgcagaagccgcgccagggccccgcggcggcggcaggcgccgaacccccgggcggagtgaagaggtccaggaaggcggcgggcaggcagagcagcgccgtgagcagatccgatagggacagcgacaggatgaaggcgttggtgacggtgcggagctgccggtgcttcacaatcacccccatcaccgcgcagttgccaaggctagacagcaggaagatgagcaggaggacgagcgcctgggccgccactgcagctccgtgcgacagcagcggcgccgcctccgggcctagcggccgcctcaccgccgcccccgcctcccgcgctgccccggacccgccaaggccgccgccaccgggagcggcagctgtgccgcctccgcttgcgtcgctcaggttccccagcgccgcggtcgccacggtgctgaaggagagcacggccgccgtggccgcggaggaagtcccgccaggtgggccggccgcggagggggcgccggagtgctggctgcccagtaaggccatgctcgctggtgggcggggcggctgcggctcctccatggggcccagtggcggccgcggatctcctcatcccgcaccgggggcggcggccgctaggtcggagtggtggctcggggccgggggctagcggccgccgcggggagctgggctcggccggaggggtggcggtcgctggggacctggcggagcctttgacgtgggttccagcgttgccgagggaaccgcgtgtttacgcaggagcgcggggcgggacggcagcccagtacccgctgcaaagccgacccgcgacaccgccactccggaggttaccggcccgggtgttcgggtttccgagagtgccaggtcgacctcctgagggaccaatgtccggccagataaagtgcc

SEQ ID NO: 32568 - DNA, 454 bp, Homo sapiens; identical to SEQ ID NO: 25100
  chr14:60794412-60794866
  hyper

SEQ ID NO: 32569 - DNA, 478 bp, Homo sapiens; identical to SEQ ID NO: 28578
  chr14:61116736-61117214
  hyper

SEQ ID NO: 32570 - DNA, 955 bp, Homo sapiens
  chr14:61123186-61124141
  binary
cggtgcatacccaagccgtgggatctgtttttgcattctcacacgagcatattgctcgggttctaaaggatccagattttcgcagacagaagctcgaccgcctctgttcccaaaagggccgagcggcgtttgtctgaatcaccagtcctctgagcagtgggaaaagagatactgggtagagggtgctgggaaggtgcccactcatccatgcccctctgcgcgtctcgcccactcgcttaggcttggactttgcaacaaggtttccaacaccgctgcagtgcttgacaaagccctcctggaagccagcagggtgaggctgccagcaagcaggcgggctgcgagggacgcttttaggactaggaagaaggccgtaagatctttccttacctctactcaagttcacccgccaccctcacccatcaaccctcgtgcaggcccgggtccacgtttcgcggactgatcctgagcctcagtataactcgctgtgccaggtgcgcgcgcgcagccaagtatccgcgcgcggacgccggggaggcttcaccgcccggtgtgctggcggccccgcccgctggctcgcagagcggggtctcgcagagctgggcctcacccgtcgccccgccgcctgcaccagaaactccctccccgggctgtgcgggagctcttgggcgccgcgtctgcgccggggccgactccgcccaggcttgtagccagaggtcgcgctatctcgccgggctggcccggcgctctctggggttgttccctcgggcggtgcatggggcccacaggcgtcggggcttgagggaagaggggccggggcctgaagggcggggaccacaacgaggcgcggggaggtcagtggagcggagagccggcgcaggccggcggcggcgcggccggaggagaaagagggcgctgtcttcctggcaaaggagttttcgcctggccggcaggaacc

SEQ ID NO: 32571 - DNA, 1166 bp, Homo sapiens
  chr14:61188116-61189282
  hyper
cgacatccccgcagtgccccgcggtcggttcgctttcatgccgaggggaggggattacccgggctttgggctgcggggccaggagcgcagaaagcgctttgatttacaagctgaggctgagccgccgtcgccgtctgcgagggtgactcaccgggggtgcgggtgggaggtagatccggagaggggcctaaaccaggcaactgggccggcggcggggtgggtgtggagtttatggggtggggcgggggggacgaagaagccagcagtggagcgtgggggagtcccagggagcgtgcccggctcgcgagcggaggcggcggagcagctggcctgctcgcggtgcccccttgccaccctctgccccggccctgcggattccgttggtttccgagcgcgggatccgcggcctctagtgggcgcagggcaggtggctcggcgtaaccaaagcgccttctctggacctctccgcatatctgcggaaggcgcacgcacatcccggtgcaccttttgttttggttaccgcgagggccggatagggcaccaagcctccctcccagccttgggcgaggaacgccggagcccgagccgtcggacccccacaggggcccagaagcggcaagggcgggctgagaccggctctggaatgcgctggtgatcaccttcacctggcgcaggcgggctggatccccggctcccagtttgcttccccgagaagaaccttcgagctgcttttggattctttctctcctatccccgcggggctggagacaccaggtctttaggcgaccttctccttactttgtttcgtccaacaaaacacacagacgcacacaccaagtgtctgactcgggaggacgcacaaaagaggtggaaaatccggtattttttttaccagagggggaaagcagtctgccaggcaaaaagctcaaacccagtggggtgggagcgcccccactcctttgctgccgcccgccgtaagccggcctgccccccacccataactaccgtaccaggagggagccaagcagcgttcgggggccgagggaggaagcagcccttcagccctgctaccccggctgcgctgaaacccgatcctaaggagttcagaatcaggtttcaaaacatgacagagccgagctgcaccagcaccccacgttgccgcggcc

SEQ ID NO: 32572 - DNA, 417 bp, Homo sapiens
  chr14:65016491-65016908
  hyper
cggctttacaatggataggccaatacgtcgccacggcttttaagactgggaaacggggcaccaggctgggctttagaaatcgctggagaagcctgggtgcggccgcagcccgcgcggcctaggacggaagcgacgccccgccccgctccgcgccccgggcagccgtgtgcaggcgcctgcgggcggtatcctcggcgacgccgtatggcttccagggcgaggccatgtaccgggtgcccgagttttatgcgaggaggaagcggttaggtgggcagaccccttacttgatggatgtaagtgcagccttggtcgcccccatacccgggctgggcgcaaggcgggccctgctgcccccaaccggcgccgcgcccctcgccctcctccagaggcgggtcgtcgccttcgccccgggctggc

SEQ ID NO: 32573 - DNA, 493 bp, Homo sapiens; identical to SEQ ID NO: 14633
  chr14:75517730-75518223
  hyper

SEQ ID NO: 32574 - DNA, 192 bp, Homo sapiens; identical to SEQ ID NO: 31178
  chr14:89657668-89657860
  hypo

SEQ ID NO: 32575 - DNA, 1142 bp, Homo sapiens; identical to SEQ ID NO: 23955
  chr14:90849401-90850543
  binary

SEQ ID NO: 32576 - DNA, 574 bp, Homo sapiens
  chr14:91883361-91883935
  binary
cgcgcggggcaacagacacgagacaggaggaaaaacttcctcgccacttttctcccgcgttccagagcggaagaaataaaaataaaaaggacttttcaataaatgtctcacgtctcaaatccattgtaaatcagtgcgcccaccccagtctgttcgctttcccattcggcgccccccattccccacccgtcaccgccatccaccggctggtctcagggattcagaaaaactacatgagatatttggttgggaagaatggggtccttttcgggagtggctaaaccccagggacaggagtgaccactgggacccggtccgccccgaggcagccagcctagagccccagcgggaacaggtgtacccgcccggctcctggcccggccgaaagcgcggcggggtcccgcgccggacgcacaacgggggcgccggctccagagttacaaagctccggactccaggacgcggccccaaccccggccgggagccacttgctgcgtccctcgcgccccggagccacccggggccccggccgtgtcgggtctgcggcgtcccgtcgccgggctagagagaagcc

SEQ ID NO: 32577 - DNA, 896 bp, Homo sapiens; identical to SEQ ID NO: 25108
  chr15:101459489-101460385
  binary

SEQ ID NO: 32578 - DNA, 945 bp, Homo sapiens
  chr15:102028780-102029725
  hyper
cgacaacccagcggtgtagacattgccactgactgcaaaggagcttgtcaggggagcgacttgccaaaggtcacaccgctcggccatcagaaccgcggcagaagcccccacacaaagcgccctccctccgctcctggagaggttttaaacccaggacccccggccctgcgctgtcccaaggcctctccgacggcggccgggctccagggtgcaggctcccggccatctacccccgggagccgcggacaccgagggagcgcgagtccccgagacgccgggccacgctcatgtcacccaagcagcggccgcggccgccttggcgcgcgcaccgggtccggagctcgcgccgcccgtcgagggcagaggggccgctcccccgcgggggagagccgggtgggcgcccaggacccagcggcggacggcgcgcgacgcctgaggcagcccagactcccccggagcccggcaggtgtccgcgccgccccggcttctgaggccacacttccgagcgcggggttgggcggcactgccgggggacttgcggtcggcgcgccggacctgcgtgggcgcccacgcgggaccccagtcccccccaccccgccgagtgtcccgcgcgcgcccccccgggcgacacccccccccgcagggcgccccggccgcccgccgtccccaagcggtcccggagccttcccacgcgcgcgcggggccggggccgggcggacaggactgcggaggcgcccccctcgcgcgcgccggaggccgccgggaaagttttgggcgcgcggggccggccgcactcacctggcccaagttgaggtacccgtgcgccgccgccacgcggtccgcctcggccgggccgcccagcacttgcaccgcccagtggttggtgtagacggggcgcggcgggggcggagcaggcggcaggcagcgccagcagcagcagccagc

SEQ ID NO: 32579 - DNA, 847 bp, Homo sapiens
  chr15:28339737-28340584
  hyper
cggtggaaccttccagtcctcacactcaaccccaaatcgttcgtgtgggctactgccggccctctctccggctctgcgctctttctgcctgcaaccgtgcccccgaactcgggccctgcgaggtgggggtgggcccgggcccctcctgccgcccctgctgccagcaccgttctctccgaggccctcaacgccccgccgtgccgtggccttcagagcgcgccagacgctcaccaagcctgcccgagccccgcctcccgcagccgtgcccagggcggagtggggcgacggcaccggtgccaggaccgacagaggccagggcgcggcgccgggcgtggtcctgacacctgccctgccgggaaggggacggcgttccacgcctgggcccttctccactgcgtacaggagcctgggtcacctgctcggcccaagaaaaggctccaggcctgcgggtgtgaatgagcagcagccaagagagcggtgctgccggcgctcaagctaggccgggtcaccgcctcctgcccaggtccaggcagccccggcctttcccgctggtactggcacgcccgtggccgcacggctgagtgctccgggcatggtgggtctgcgggactcggagcagagctcgagctggcggatccccggttggcgcccggcgggagggcaggagtggcccagccaggccgccctgcgcactccccgcccgggtgcgcccgggggaccgcggccctcccaccccgcccctgtgaaacgacagccggcagcaggcgccgcacgccgacttcacagtggcggcgatcaacagcgtgtggaaaacagcttcttcgtaaatcttaagaacattgtggcc

SEQ ID NO: 32580 - DNA, 357 bp, Homo sapiens; identical to SEQ ID NO: 14646
  chr15:33445914-33446271
  hypo

SEQ ID NO: 32581 - DNA, 480 bp, Homo sapiens; identical to SEQ ID NO: 31194
  chr15:37402989-37403469
  hyper

SEQ ID NO: 32582 - DNA, 111 bp, Homo sapiens; identical to SEQ ID NO: 14648
  chr15:38857279-38857390
  binary

SEQ ID NO: 32583 - DNA, 490 bp, Homo sapiens
  chr15:41136701-41137191
  binary
cggaacccagaggcccgcgctctgaaggtgacccccctggggaggaaggcgatggcccctgcgaggacgatggcccgcgcccgcctcgccccggccggcatccctgccgtcgccttgtggcttctgtgcacgctcggcctccagggcacccaggccgggccaccgcccgcgccccctgggctgcccgcgggagccgactgcctgaacagctttaccgccggggtgcctggcttcgtgctggacaccaacgcctcggtcagcaacggagctaccttcctggagtcccccaccgtgcgccggggctgggactgcgtgcgcgcctgctgcaccacccagaactgcaacttggcgctagtggagctgcagcccgaccgcggggaggacgccatcgccgcctgcttcctcatcaactgcctctacgagcagaacttcgtgtgcaagttcgcgcccagggagggcttcatcaactacctcacgagggaagtgtacc

SEQ ID NO: 32584 - DNA, 1430 bp, Homo sapiens; identical to SEQ ID NO: 28593
  chr15:41786420-41787850
  hyper

SEQ ID NO: 32585 - DNA, 764 bp, Homo sapiens
  chr15:41804056-41804820
  hyper
cgcccagcgccgcgaccccgggaccccttcgctcccatccatcgccgcgtgctcttcaacggctcgagactccccgaggcagacgagctggctctccgggctaccctgcgggcagcgggggagggaatcggcggggcccgggagcctcccctcgctgtgctggtgacccggcaccgaggaaagcacgctcccccggcccccaggcagccctcgcccccggcgccggcgccgccccatccccactggctgcgctcactccgggacaggcgtcctctccctgctgccccaccaggatgtacagcgactccccgagaccgagggagaagattgctgagacgaagacgccatgcgcccgcgacaggtggttcttggcgcctttgccgcccgcggctccgtaggctgagatcctgcggggaacggacggtgagtccccggccttcggtgctcaggccggccgctccgggcagaagttggcgacagaggaggctccagaattattttttatctgagggacttggaggctgcaatcgactctgacgggatgggaagggtaggtttgcacaccgaaaaatcagatattacacttatttcaggagggttcgtggaaatgtggggaggctcaagcaccccttggcgccgccctggttgggggccttccgctcggtgtaagaggttccgggtaagggctaactcggtggcgactactgccaccttgaagggcactcaaggtggacctccccgcggaatagtccaagacgcaagtc

SEQ ID NO: 32586 - DNA, 974 bp, Homo sapiens
  chr15:41804824-41805798
  hyper
cgcacgtggacttcgttaccctgagggtgaaacctccaactagcaggtcactgtccaccctacctccgccgtgcacttacagatactggccagggcccggcacgcgccacagctgcacgcctctcagctgcccggcggcccccacggtcaccaccacgctggtccccgcgtacgccccgtcacattgtgtctgtgtgggcccatgccggccgctggccccgcaggtagaaaacagccaagacccctcggtgcctgagagcaaggagcgaggcaagggtcgtcgagcccctggctgggccagaggggtctggtatggtgagcgaaagaggaaggaggcgtctaaagctcacccggagaattcagcggggaggctggctccaagatactaggcggggcgctgactttcgggtcccgggggctgggacttgccagcggcaggggcgaggaccgcagaaaagtctcctgggaccccgggctagagcagagaatggcgcctgaaaggtgttgggagaaggcgcaggacgttaaggcgggtggaaataggatatgaaagaaagagagaaccccgcaacagctgcccttgcggtcgcggccacacccgtcacccggcccagccgcgctctcagcctggaagccactacccgactccggtcgcagaagccccgcgggtgcgcgctgataggtctgccagtttctctcctcgagcgcctttcccagtgaataacttaggggccgcaatgaatttggtcctgcagcctccccaatgctttcctcaacttagattggtggccccgccccaaggcggtgctgagaccccaaagaatgttcctccttcccaagctgcgtgatccagactctgggattcgcacgcacttggcgcttctcggcccgcactccagaagcacggaccggagaaatttggctgtgagagttcgaggcctctggaggaaccactgacacctggcctgttgacc

SEQ ID NO: 32587 - DNA, 1101 bp, Homo sapiens; identical to SEQ ID NO: 29881
  chr15:41952208-41953309
  hyper

SEQ ID NO: 32588 - DNA, 447 bp, Homo sapiens; identical to SEQ ID NO: 14654
  chr15:42873450-42873897
  hyper

SEQ ID NO: 32589 - DNA, 171 bp, Homo sapiens; identical to SEQ ID NO: 14655
  chr15:43809685-43809856
  hyper

SEQ ID NO: 32590 - DNA, 234 bp, Homo sapiens; identical to SEQ ID NO: 14656
  chr15:49268662-49268896
  hypo

SEQ ID NO: 32591 - DNA, 350 bp, Homo sapiens; identical to SEQ ID NO: 14657
  chr15:50474768-50475118
  binary

SEQ ID NO: 32592 - DNA, 815 bp, Homo sapiens; identical to SEQ ID NO: 14658
  chr15:52587420-52588235
  binary

SEQ ID NO: 32593 - DNA, 1442 bp, Homo sapiens; identical to SEQ ID NO: 31203
  chr15:53078748-53080190
  hyper

SEQ ID NO: 32594 - DNA, 770 bp, Homo sapiens
  chr15:53095580-53096350
  hyper
cgtaaaagacgagaaaaacatcccgggtgctctgcataaaccacacgcaacgaaaaagctcaccgccagacagcttccagcactcgaaccaatacaagtaaagcacatttgcaaatgtgtttgactgtttttgtaggtttaagaagactacgtttttctgaccacttcaaaaaaacaaacacgaattcagccgctgctttaataacctctgaccagaggagctgattttgccaccgagttatcggtcagtgctgcgaggtcagtggcctgtgatcatgtttatagcaggtttggcttggatttggtgacacagccagcaaacctgggagattatgaaaccgtgaaccagcccagggaagtgtagtcaagtttcagtttgggcatttctccgggtgagggaatccggtgggctccatttctacaaggctcacaaacgcaggtgcagttcggccgccgcacgctgcctggcgggagaaacgcgcacaaaccgcagacgcgtgctcctgtagttgccactagctcggggcacgcccgtgttatttacaccctgctcgggggcccccctctcatttgttactttaaactcatggggaggaactgttagctgccgtggcgggactggcaggctgggaggggggcgcccccgctcggctcccgggccgtgacgcggccgctgccctccgcccctggcttccaccctgtttgcatggccacaagctcagcggtggaccagcgtggccaggcccccggagcccttgccccggcctacc

SEQ ID NO: 32595 - DNA, 94 bp, Homo sapiens; identical to SEQ ID NO: 14662
  chr15:58028020-58028114
  hypo

SEQ ID NO: 32596 - DNA, 354 bp, Homo sapiens; identical to SEQ ID NO: 29885
  chr15:59729552-59729906
  hyper

SEQ ID NO: 32597 - DNA, 292 bp, Homo sapiens
  chr15:60883298-60883590
  hyper
cgtttaacaggcgcttggcacccgcaccggtggctaggacccgcaggacagtctgggtctgcacaattgctgcgcattagggaagccgcgtccgccgcaaacagatggggctctaaatccccaagcctggcggccgggcctgcgaagcagctcgggcagattatccacggcgaggaacctgcgggcgcacaagcgggcggcgggcggcgggcggcgtgctgcgggctgagtttctccggagctgtttgcaaccgtcccaagagcgagtctcggtttctccggcagcacgggc

SEQ ID NO: 32598 - DNA, 479 bp, Homo sapiens; identical to SEQ ID NO: 14665
  chr15:62359006-62359485
  hyper

SEQ ID NO: 32599 - DNA, 352 bp, Homo sapiens
  chr15:62359741-62360093
  hyper
cgggactcgctctgacgatccttgtgcctttgtgcactgcaggtagacaagctccagcagagagtggccagatgtggtgcctggagcgactccgcttgggtcctgagtgccttcggcggagcggagactggcttctcccgggtcgggcccgcggagccaagtctcgcaccaccgccgcgtgcgcaaatgtgctcactccggaccgcatccctgagttctgcatcccgccacggctcatgccccgcctggccttggctgcgctccggaattcttgggtcgaagaagcagggatggacgagggcgccggccgcacagactgggacccgcgctcgcaggccgcgctgtcactgcc

SEQ ID NO: 32600 - DNA, 472 bp, Homo sapiens
  chr15:63673786-63674258
  hyper
cggctgagcgctcaggagtgttaggaaagaagcaggcggaaactttaccgttcactggggccgggctggaaggctgttcctttaagatcaccagcaggagcacggccgccgcgtgcaggctgcgccggggcatcttcgcgggctcctgcggggcgggcgcgggctgtgccgggggctcccggtggccgctcgctctccagctgcacaccgggaccgcgtgcgcgcagcctgggtgccgtggcgagtacgtccgcccttcgctctcctggcttccccgggcagcttttatggagcaactcaacgccaaacacttgatgtcatcgtgcggggagggggtgggggaggagaacgccctgcccaccggagggctggcgccccagatcctaggtgagttgtagccttgacttcagcagcactctgcgggtccccggcgctcctctgggccagggctgacccaggaacacagttctcc

SEQ ID NO: 32601 - DNA, 832 bp, Homo sapiens; identical to SEQ ID NO: 22805
  chr15:63795400-63796232
  binary

SEQ ID NO: 32602 - DNA, 390 bp, Homo sapiens; identical to SEQ ID NO: 14670
  chr15:64439389-64439779
  hypo

SEQ ID NO: 32603 - DNA, 137 bp, Homo sapiens; identical to SEQ ID NO: 14671
  chr15:64443636-64443773
  hyper

SEQ ID NO: 32604 - DNA, 287 bp, Homo sapiens; identical to SEQ ID NO: 14672
  chr15:68347714-68348001
  hyper

SEQ ID NO: 32605 - DNA, 234 bp, Homo sapiens; identical to SEQ ID NO: 14673
  chr15:69109452-69109686
  hyper

SEQ ID NO: 32606 - DNA, 204 bp, Homo sapiens; identical to SEQ ID NO: 31214
  chr15:69136239-69136443
  hyper

SEQ ID NO: 32607 - DNA, 159 bp, Homo sapiens
  chr15:74911460-74911619
  hypo
cgggaagccccagcagccccatggctggaggtggctggctgtgtgtttagcagggctctctgttcctcgtggcctagatgcatcactgtaagcgataccgctcccctgaaccagacccgtacctgagctaccgatggaagaggaggaggtcctacagtc

SEQ ID NO: 32608 - DNA, 460 bp, Homo sapiens
  chr15:75470758-75471218
  hyper
cgtgtggctcggccactgcgccaggtcttggaacatctaaggcagaaacaggaccaacacccgcaagcctccaacagcccctggggctccgtccagccgttggggtggaggggttggggggaggtgcaggggcgggcactgtggggggtggggcggggccggtggccgcgactccaccccgcgcccctagtcgagtaaacaagccacgggcggcgcctgggggccgctcctgcaagccggggcgctgggttacatcacggttccctggagactcccgccccagcggccgggtccctgaggcccgcgcccgcccgccgcctgtgtccgagaagcagagagctggcaagggcccgccagggcgggaaggctcccacgttttctccggaggcccctgggactttgttgcaattgggttcagcccgggcatgggctgaacgtggacgcgcgggaaccgcgcctc

SEQ ID NO: 32609 - DNA, 191 bp, Homo sapiens; identical to SEQ ID NO: 14675
  chr15:75976190-75976381
  binary

SEQ ID NO: 32610 - DNA, 864 bp, Homo sapiens; identical to SEQ ID NO: 23092
  chr15:76628342-76629206
  hyper

SEQ ID NO: 32611 - DNA, 962 bp, Homo sapiens; identical to SEQ ID NO: 31220
  chr15:76638250-76639212
  hyper

SEQ ID NO: 32612 - DNA, 935 bp, Homo sapiens
  chr15:81072326-81073261
  hyper
cgccgaggagggagtaccacaagggtcaggtctcggtgtcctgccgactgggagccagctcacgccgagctctagcgggcgtgcgcctagcaacaggtctgcgccctgctgctcctgcctcagcacgctcttcctcccagtttccctcgcctcccagtgcctccgggacagcgctaggcacccagcgacgcgctggcgcggggccgagctgaggcaattgcaatgttagatgaacccggggggctctgctgatgtttagactgagactccaaacgtggcatcgctggaagaaggtctggtggtccctggcaaaggacgtcggctccaagaaaggtcgcgttaggttgtgaggaaaggcagagagtcctggcagaacgctggccaggtctccagctcgccgctctgggaacgaaggccagtgacattctggaatggaccccaagggatgcgtgtgctcatgagagaggagcgctgtgcgccctgggtcctcagccgcagacactctctgcgacagccgctgttccccaagggtcggacgctacggcagtcccaggagttccgccagctgccgggtttgaggtcctgagtccttctccaagcagccaacgctacccacaggtgagagctccctttaaaaactaatcttctgatgtgtgagccagtgcctggctgcagccccataccagggacggtgagccggggagcgcgtctctccatccctgcggtctggaaagtgatccagggcgcgcccgagggcggggagccggcggctctgcgtgcccaggcgcgacgccaccatggacagctcccagccacttcctccactcggggtctgtggccctgggtctccggggaagtcgtgcgctttcttcccagacccaaggcgttggggcgctgggaaagaggaaagggactgagagtccgctggggccctc

SEQ ID NO: 32613 - DNA, 915 bp, Homo sapiens
  chr15:89437634-89438549
  hyper
cgcactgggccttccgtgagtacaagtcccccaggtaccagcaggaggcagcatcgcccgcgaggtctgcacgagcgctgctcccagcgagaaatttgacatccctgtccctgtttgcacaaggcttgatctccgcctttgaaacctgcagcccccaggagaatgaaaaccggaggtgtttcccaatccgctggcccgggcggcgtcgagggagagaagccagggcccctctcaatcgctgccccctactccagggagcacaggcactcccgcgggtcagcgctggacaccaaggtcccaacaggtttacaggctgcctgtggcctgtggctgccaacgagctggtggcaggactgggtccaagtgccgtgctgtttccatactggctgcgcacaagcctacgtttctccctgagggtcgccatctcccacccagggctctgccctccaccctccctacccttctggcctcgctgtccctggggcaagaaccccggtgagcgaggtctggaacccataggcatcagttgcctttgccccaggcgcccagagccggccagctgcggtccagaggcgcaggtccgccagccgcctcgcaggttgccctcagcccctcccaggactcccggggcccccggagcatccaacagatacccaggggcagggcctggggcgccgcggacggcactggaggcagccgaccctggacagacgacaggggagagagccaagcggaccctggcaggaagggggctggaggcggacggtggtctcggaggccacggggtccgctcgggctctgctccctcacggtgggcacgagggtccggcgcccgcatccccgcgccgctccctccccacttgtgccccgggcgcccctcgcccgcgatcacagcccatctcagcccgggcctcc

SEQ ID NO: 32614 - DNA, 865 bp, Homo sapiens
  chr15:93198374-93199239
  hyper
cgagcacaccccggccccccacccactctcccgggcagggcaggaggcacacggctggctggggcgcaccagggcacctgtgcgtgcaggtggggcgggcgcgcggcgacagcaggttggcgatgccgccctgtcggccggcgggggaaggaagagggcgggagggcccacctgaagacgcgcagcagcaggcaggcgatgaggagggtggtaaaggcgaacgccacgatcacggctgccttgagggtgggtaggtcgcggaggaggatggaaatgcgggtcaccaaggcgtcgccactgctgttggagctggagctgccgctgccgcccgccgccccagacccaaaccgggtggtgttcccgggccccgggccgggcggtggccgcgactcgcgctcgggttcgggccacggcgcggagacggactcggctctgctggcgcgggcggcgggagcggccaggagcgcgagcagcagcagcggcaggagcggggcgggcagcggcacggcgcgcatagtgcggtgggtcggcacaggatcgggcagggcgcgcgcggctgagctccaggatccgcaccagcacggaggcctgcaccgggggatcctgcggcggaggcggctgcgcggtgcttggcaggaagctgcggcgcccggaagagcccgcgccaccgccgccgccaccaccaacacgttgcaaggagtcattcgacgggccgcggccccacgtgggcggggcaggccacccggcctgggtcccggctgcgctccgctcgcccgcgaccccaattcctcgggacttgagaccccgtggtgaagcagcaactgccacgatgacacttgggctggccctgtgttacacgtttcac

SEQ ID NO: 32615 - DNA, 351 bp, Homo sapiens; identical to SEQ ID NO: 12343
  chr15:94048797-94049148
  hypo

SEQ ID NO: 32616 - DNA, 394 bp, Homo sapiens; identical to SEQ ID NO: 23996
  chr16:21831549-21831943
  binary

SEQ ID NO: 32617 - DNA, 150 bp, Homo sapiens; identical to SEQ ID NO: 14684
  chr16:2245386-2245536
  hyper

SEQ ID NO: 32618 - DNA, 591 bp, Homo sapiens
  chr16:31227785-31228376
  hyper
cgcccaaccttgcccgtctttatctgcgaagaaagcacagaacccatgaaacggaacagggcccaggcagcccaggagcctggaagggggcagtggggcgagatgcagcccaccagggttcgcggcagcccagcccttcgcccccgggaggggctggccggaggtctgagggaggaccccaggagggaccctgaaggaggggaacaggaaggctctgggcgggacctgacgcgtgggtccttggcgaggaagcggggttgggtcccgagatcacgtaccagctcagagtggccctcacgcagcccgctgcagccgtgcggcctcctccaacatgcgcatgtcgcgcagcacggccacgacgagctcggctgcgtagtcctcgtagtaggaggcgaccagcttgtcggtgaggtccacgatatctagctgcccgagcgcgccccgcgggatgcgctcaaagccctcgcgcagcggcaccgtccccagcttcatcttgaacttcttgagctcctccggtgtcaggttctccagcaccttcaggatggcctcgcgcttcgttcccatggctcagccctgcgcctctgagcctcc

SEQ ID NO: 32619 - DNA, 179 bp, Homo sapiens; identical to SEQ ID NO: 8027
  chr16:3811586-3811765
  hypo

SEQ ID NO: 32620 - DNA, 366 bp, Homo sapiens; identical to SEQ ID NO: 23098
  chr16:4363872-4364238
  hyper

SEQ ID NO: 32621 - DNA, 890 bp, Homo sapiens; identical to SEQ ID NO: 14689
  chr16:4986642-4987532
  hyper

SEQ ID NO: 32622 - DNA, 438 bp, Homo sapiens
  chr16:55404823-55405261
  hyper
cgcagcctcacctacgggaagatctacatcccctcctccagggctctaccgagggagaaccaaggtagaaaagcatgcctttccggctgctgcttttgcatcttatacggatagccggctcatggcaatgtgactcaagctggcaggggtctttgagcatcaaacgtgtcctccttccctctacctacttcggctccggtttctctcccgaagcctaaataaagaaggtaacagacaacacctctattggcagaggcttctgccttttccgtcaggctggctgcagcacatccgtaatccttatgtcagcctgcactctagcgttgccggcccggtccagcatctgacagccgcgaatccaaagctgccggcctctcgtttctaagcagcagctcacagcgccagccgccctcccgcagaaggggaacaaagcccggc

SEQ ID NO: 32623 - DNA, 364 bp, Homo sapiens; identical to SEQ ID NO: 27682
  chr16:56228284-56228648
  binary

SEQ ID NO: 32624 - DNA, 573 bp, Homo sapiens; identical to SEQ ID NO: 14693
  chr16:56390323-56390896
  hyper

SEQ ID NO: 32625 - DNA, 477 bp, Homo sapiens; identical to SEQ ID NO: 25174
  chr16:56677120-56677597
  hyper

SEQ ID NO: 32626 - DNA, 101 bp, Homo sapiens; identical to SEQ ID NO: 14694
  chr16:56857042-56857143
  hypo

SEQ ID NO: 32627 - DNA, 462 bp, Homo sapiens
  chr16:68269820-68270282
  binary
cgtcccagcgcacccgccgtagccccgaagaggacgaccagtgatccgggccaggggcaggggtccgcggcggggtcggccgcggggtcagggcccgggggagggggcggcggcggcggcggagtcatggccgcagaggaagggggctctcggccagacacgcggaccgacgaggcgcacgcacgcaccgaccgaccgcagacgcggatcagcttgggcgggacaccgtgtatcgggggcggcacctgcggcccggctggctcagtgggcgctgccaagacccgcccgtggcgccccgcggggcggggcggctaccggcccacgccctctccaggcgagttacctgccggccccgccggccacgtgaccggggcggctccgggaaccttgggggagggccgccagaactcaacccaggacgcaagagctcacgctcccggcctgggcgcacgcttaggatcc

SEQ ID NO: 32628 - DNA, 411 bp, Homo sapiens; identical to SEQ ID NO: 14699
  chr16:69833676-69834087
  hypo

SEQ ID NO: 32629 - DNA, 749 bp, Homo sapiens; identical to SEQ ID NO: 31290
  chr16:73099891-73100640
  hyper

SEQ ID NO: 32630 - DNA, 419 bp, Homo sapiens; identical to SEQ ID NO: 14701
  chr16:74782393-74782812
  hypo

SEQ ID NO: 32631 - DNA, 150 bp, Homo sapiens
  chr16:75469089-75469239
  hypo
cgtgagccaccgcgccgggcaccttcaaggttttgttaattttggataatgctacaatccattgctgcaaagaactcgaaaatgcacacgccaacataggagttctttttatgcccccaaacactaagtctctcatccaacccctcaatc

SEQ ID NO: 32632 - DNA, 368 bp, Homo sapiens; identical to SEQ ID NO: 14703
  chr16:80646305-80646673
  hypo

SEQ ID NO: 32633 - DNA, 453 bp, Homo sapiens; identical to SEQ ID NO: 14704
  chr16:88091522-88091975
  hypo

SEQ ID NO: 32634 - DNA, 559 bp, Homo sapiens; identical to SEQ ID NO: 25203
  chr16:88994153-88994712
  hypo

SEQ ID NO: 32635 - DNA, 1263 bp, Homo sapiens
  chr16:89972021-89973284
  hypo
cgcctgggagtggtgcccatttgcatctccacagtgaagtctgtgtgccgcggacatgaggtgtgcccgggggtgcccaagaggcgctggtgcccccagccgctggcagtcatgggcccgtccgcgtgtctgctgtccccactggactggacattctcatggacaggagcattttgttccctgtactgctctccaagagcgatttccagcagggaccagtgcctgtgcctgtagccgtagcagtgacgatggtgacacacccaggtgtcccttcatggagatgaactcagtgacttcccacaagaagccactggctacggctctcatcgttcttgttctttggatgaagaggctgagtcactggccatgtggctgggattggtccccagaggctccccagccgcaggccagggaccagccatggtgcctctgctcgagagtaaagtgtacagtttttgcagccaccagagatgcagcgagatgcctcgtgctgggtgggggtgggggccgaggctccatggcggttaccatttcatttgctgtgctttatctgctgtgccttgtttctccccggccctaggcggaaggtgctctaccagcgtgcacccaggaatatccaccgccatgtgatcctctctgagatcaaggaagccgtcgctgccctgcccccggtaagggagaaaggctgaaatgggagctctgtgtaagccggtcacatgcacgtcccttctgctccgggcggtccacatgcaggcgtgcgtggtgcgggctccctcagcagcccagccccgccacggcaggggcagggtctagtgcagagggctcctcctttcctggcagcccgggttcggatgcttgttgttttgagagagaaatcctttggggctcagagcacaagctgagtcgtcaccgtggtgagctgctccatccgtggtcttgtgagcgcgtggtgcggctgctgggggattctctgtagtcgtggggtgtagtcctgctctgacgcctcctgtgctggaggtgccgtttctgtctcaaaacctaaggagtttgtactgttgttaagggataagatagaacgagtgagaaaaccagcaagtcagagggtcgcaggaccgtggaccgtccactggggacagcttagtgcctcctggtttaacttcagctgctctgcgggcccttatgaccggcatggctggctttgtctggggctgtgagcttctgactctcctcagtagagtggcagcacgtggcactgtgcaaccc

SEQ ID NO: 32636 - DNA, 259 bp, Homo sapiens; identical to SEQ ID NO: 31321
  chr16:89992765-89993024
  hyper

SEQ ID NO: 32637 - DNA, 362 bp, Homo sapiens; identical to SEQ ID NO: 5994
  chr17:16290077-16290439
  hyper

SEQ ID NO: 32638 - DNA, 981 bp, Homo sapiens
  chr17:17398686-17399667
  binary
cgctgggcagcttggccatggcgaagagcgcgcggaacatctggtccaggctgctgttcttcttggccgagatctcgaagtaggcgcagcgctgggggtcgtcgcccaccagctgctcgatctcgcgctggtccacctcgcggtagaagtcgcggtcacccttgttgccgcagatgaccaggggcacgtccacgttctccttggttttgttcttgaggcaagacttggtgtcgaggatctgctgcctgagccgctgcacctcctcgaaggagtcgcggttgtccagactgaacaccaggatgaaaacgtctcctagagggggcacagagagcagaaaaggagaaggtgagggtggccgcccaggggacaagtcgggctgactttgaggccgcgcggggcgcgctagcctctctaagcgcgaagcgcactactcggcgcgcggcagccggaccggcgctcgcggggcgccctggccgagggttccccgcccttccctcccgcacctgcccggcccccggctcacctgtgaggatggagaggcgccgcatggcggggaacgggtggttgccggacgtgtcgaggatgtcgagctggtagacctcgccgcggatggagtagaacttgcggtggaagtcctcgatggtaggcgtgtaggcgtcctcgaagcggccggtgaggaagcgcgacacgatggccgtcttgcccaccttggacgagccgaggatgaccatgcgatagcagttcttggccgggatactcagctccgagtcgctcgggcacatcttcttgatcatcgcggccagtttcattgggcagaggggccgcgagggcgggcgcggggccgagagaagggcagagagcggctgagggtcgctggggtggcacgcggggtgagcggctggagggctctgctcgggctgggcgcggctcgggcttggggctccggctccgctcgggctgggctcgggctaggctgggctc

SEQ ID NO: 32639 - DNA, 1795 bp, Homo sapiens
  chr17:17685627-17687422
  hyper
cggctgggaagctcgcgcgcgctctctcgcctcgttcggtgccagaggactccaggggaggtggcgttggggagggcagagcgggattccccctcctccgccgggcggggtgcccgcctgcgcgccgcggttgcacgtgtgcggggccgcgcgcccgggccccctctgcacccggtcggtgggtgccccctccccaggaccgggcgcatctggcagtggccccccgcccgcagccttgcgcggctggagggaagcgctccattattcattatttacgagcgttaataggtttgagccacgggggcggggggttgggggggcgacgaggacccagtggggaccgaagcattagaagaagggatagggagggagggggaagggcgggggcggggctgtgccgcggcctggaggaagaggtctcggcctggggcccggcgagccgggcgcacctctccgtcaggtttctccacaccgccggccgtcgaggctgctcagggcgccaagagggcagcacgggccttagattttgctctcggcctctgtccttcgcgtcctcgcccttaccgaggcgtggggagggagctgcggaggccgtacgccccgccctgcgcgccccttgccgccgccgcgtccccgcggcagccccggcctcatttatcatcatctttggtcaagtggagtgtgcaaggaacagctgcttcactcggctgacttcgagggcggctacgggagaatcagggagatgaatgatgggggctggtggcagccccccgcggtccccgcgcaggcgagagggaggcggggacgtccagggccgcctccgcctcatggcgagtgcagcgcccccttcctctctcctggcgcctgcagcgaccggggaccgggggaccggggcaccgaggaccgggcccgccccgggaggggactgggcgcggggacgggggggcgcccttcgccggcggagaactggcgggcgcgctgccggcagagcccgaggttgccgtgaccttgctggggtcagcgggctgggctgcggaggcggcggcgcggcgtctttggtgcgctttccggattggcgcagaggccgggaaacaaggcgggggcgggcgggggaacacaaatagaaggtgaaattttacctgcccctgagggagtcctgcggattttctccggcagcagcaggcgctctgcctttgtcttacacggctgaaacatctgttgcagaggggcggagaggccgcaacaacccccacacaccctgcgctgctccccgtccccctctgccccagccgggctgcaggactccaggcgccgcgttaaccctgctcgcgctggggcgcgcgcccgcactcgctgccgcagtccagcgcctcgcgtggggctcctcgcccccgccccggatctggtcctggccggggcgcccggtgacccccctccacctcgatggggtgctgaggtgtaggcggggggcgggggcggaaagggttaatggcctagtcgcagaccctaattgtcagagccggccccgcttcgtttcaattaccctaagtagagactgaatgcgcaattaacgaagtcagcttgccaactggaaagccggccccgctttcacgttgagcagaatactccaccagctgacttggacgaagcaatttcctcctctctctctccccttttttctctccttctctcttccaatccccctccctctttttctctctccttaataataaaattataccaagcagtttgcggtgtggcaggcggccagaaaagcgtttctttaaacgccgcc

SEQ ID NO: 32640 - DNA, 402 bp, Homo sapiens; identical to SEQ ID NO: 14714
  chr17:1783887-1784289
  hypo

SEQ ID NO: 32641 - DNA, 109 bp, Homo sapiens; identical to SEQ ID NO: 14715
  chr17:1784817-1784926
  hypo

SEQ ID NO: 32642 - DNA, 705 bp, Homo sapiens; identical to SEQ ID NO: 25213
  chr17:1958915-1959620
  binary

SEQ ID NO: 32643 - DNA, 489 bp, Homo sapiens
  chr17:20755763-20756252
  hyper
cgatcaccgagcgcacctcgcaatctctgatcttcgaacccactgaaaaagcacaaggcatggggagtcctgttggttcacgccccgggtgcgaataccaaaagcaactcccgctggaaagcctgcaggaaactcgagacaaagacagaggcaaacgcaacgctgggaagagccaggggtgctgccgtctgcaaaagcagagacgcgtctcccttcgggcaaagtgactgctacaaagtctgttccctcctgcgcagggacagagacatttaaaggcctgaacggacgtcagcaccagtagagctcgctgggtgagcgccaggcctccccgccccaaggatagcgcgcacagggcgatctgctgctcgcgaggtagaaagtggcttacttggggagaaaacagagctggtggcgctgctgagtgtcaaaccctggagcccatcgtcaagacgttatattggtggcagttctgctgtgagtgcacttgcc

SEQ ID NO: 32644 - DNA, 592 bp, Homo sapiens; identical to SEQ ID NO: 25218
  chr17:27893139-27893731
  binary

SEQ ID NO: 32645 - DNA, 176 bp, Homo sapiens
  chr17:29020880-29021056
  hyper
cgggtgggcgcccccactttcccgcaagctcgcagagagcatcctccgcccacccggcaagcaccacttcatcacgccaccgccagggtgtcaggcggggctgagcggttgtcatttctctctaacccgtcagaactctgcacttccttgacagttcgctggctggcctccgaccc

SEQ ID NO: 32646 - DNA, 500 bp, Homo sapiens; identical to SEQ ID NO: 25221
  chr17:29335357-29335857
  hyper

SEQ ID NO: 32647 - DNA, 531 bp, Homo sapiens; identical to SEQ ID NO: 25224
  chr17:35078547-35079078
  hyper

SEQ ID NO: 32648 - DNA, 536 bp, Homo sapiens
  chr17:36829818-36830354
  hyper
cgtggtggggagcgtcggtgcagggcggcggggctgcgcggtgcgcggagggggcgccggcagccggcgtttcttggcggctccccgagccggccctttcgcaggcggccgctctggcccccggcgcaaactcggagtgtccaaggcgaagcccttcgcgtaacaccaaagtttcgaccggcggatcagacgatcgaaatgttcctggcggagatctccgggtgcggccggagccgggctggccgtcgaggggctggccgctggagcctcgggggcggccggcggggggtttccatcgacttcggcaggctggccgggcaggaacggccgcggcgccgtcccgggacccgcgggctcggtggagaggcccgcaggtggcgacggaggccgggaactgggttcctgaggcgggctggcggctgggccacgctgaggctcgagacccggggccgggcgaggcggggccgaggcgaagctggtcgtagattcccgagggtgcgggggcgcagggcagcggcccggaggtgcacaggagc

SEQ ID NO: 32649 - DNA, 814 bp, Homo sapiens; identical to SEQ ID NO: 25230
  chr17:37380796-37381610
  binary

SEQ ID NO: 32650 - DNA, 297 bp, Homo sapiens; identical to SEQ ID NO: 14722
  chr17:38020387-38020684
  hyper

SEQ ID NO: 32651 - DNA, 190 bp, Homo sapiens; identical to SEQ ID NO: 26478
  chr17:40558083-40558273
  hyper

SEQ ID NO: 32652 - DNA, 502 bp, Homo sapiens; identical to SEQ ID NO: 25240
  chr17:42988603-42989105
  hyper

SEQ ID NO: 32653 - DNA, 309 bp, Homo sapiens
  chr17:43298587-43298896
  binary
cgtccgcgccccccaccctgtttaggagttcctgtttggagatggctccccctcgtcctcagctcgtctctgggctaagcaggggaggagagaaataaaaggtggggggcctggaagggggttcccaccttctcagtccgggacgcgagacgggaacgcagccctggcgccccaacgctgcaccaccgtgggtctccgagccgtgctcgcagtcgctgagatcctcggtgcggagaagatgtgcccctccaatccccaggccgtgatccccttcacccagacccggccaatccctcgcccgaggcgagc

SEQ ID NO: 32654 - DNA, 476 bp, Homo sapiens
  chr17:45500788-45501264
  hyper
cgtcggctgcgcccgcggcccggggcggagttggccaccgcgcctggctgcgggcggccgggcgaacgggctcggcgcgcaggtggctcctccttcgcttctcccgatccccggccgtgccaggcacggtgccggctgccgagggaacgcctttgtgcccggtcctgggaacccgcgacggccgccgcgcgccccggtccattgtttcgcttctctgggttccaggtaggtgcgggcggcgcgcggggtccgcacgacgtgtcaccccggcggttggggcgccgggacccgcgggcgccggcaggggcgttcccgggcgcacggcggcggtgcagcacctgaagcggtggtggtcggccagcggcggcctcctgcacctcaccctcctgcaccttaccctcctgctgagctttgctgggctccgtgtagacctagacctttacctgctactgccgccgcccaccctgctccgggac

SEQ ID NO: 32655 - DNA, 619 bp, Homo sapiens; identical to SEQ ID NO: 14731
  chr17:45928211-45928830
  binary

SEQ ID NO: 32656 - DNA, 871 bp, Homo sapiens
  chr17:46089217-46090088
  binary
cgtttcctgggccattcctctccaggcagccctcgggagttcccgccgcaccgaccccagccaggctccagcggtcccctctcttccatcccgccatctctctgaggggcttgcgtctccctgatgcgctctggtgtctgtctgagccatccatcaaggatggcaggctgggggaaacatgaaaaagagcctatttggctattaacatcccctcccgctttgttgtctctctcctccccagtcccctaccagcccctcacccaacccctcccttttccccttttgcaggagacaaaaccagactgacaagctgaagactcaaacattaatcaaactgcgctccggaacaacctttccctcgcattaataaatacatttgcggcccctcattggacagttggcctaatttgtttctttttcgcggggtggggggagcagccgcgcccgcgccccctggctcccagcagccctgtgcaaagcagatgttccgccgcagacgcggagctgcgcctagccgcgcgccccggaggccgcggttgccatggcgacggcggggccgcctgctgtcgccgagcacgctgtctcgcccgctcagtgattacctccatctccgcagtgttcgccatacggcccggattctaatcagatcccctcccccctcccccctccctcctccgcccggcccactaccccttcagctcccacagccttgggactcattgagaactgcccgcgcatccctgacggtgcccaggaaggcagagtgggggagagacgacccgcactcagcctgtgtttagggaggactggacccagtgcggttcgcaagaggttctgtgtccccaggccatctttggtgacattgaacccc

SEQ ID NO: 32657 - DNA, 254 bp, Homo sapiens; identical to SEQ ID NO: 31345
  chr17:46507491-46507745
  hyper

SEQ ID NO: 32658 - DNA, 784 bp, Homo sapiens
  chr17:53342984-53343768
  hyper
cgggaagggacgacgctccgggggtccccctccgcggccgggcacgcccgctggagcatcccccaaccccgctcccgccctgtcccgcggcgccccggccccgcgctgatgaaattgaggagctcacccagcacccttcctccccttcctcctcctccatgaaaggggagggacccctcctgagctacatttaaaagagcttcgggcacccggcctccctgggtcccgctcctgcggcgcgggtgggaggtgtaacttgacaggtcaggatcgttccctagaacgaggcacacccgcacgcagagcgagcccgcctgcggagggcagagcctcccgggctggggaggagaaaccctggggcctggttctgtgcggggcagggggcgggggtcggcttgagggagggggtttcactgcgtagcctgggttttggggttgtgttacagcttctgttactggttagtatttggaactcacgaggtgtgagagaagactcgttttcttctggtgaagggtagctgagaaagcggggtgggggctggggccggtggggggagtggtctctcggcgggaagccgtgcacgcctccagcgttgacactttcccggtgcactttttctggtgggaggggagagcggagcaggctcacgtgtaaccgcgcaggagcctcctctggcttgagccctttcttggtaagtcccaaaccttcccaagacaaccttggccttagcagtagaggaggggtacgtgtgatgaggccccaaacccggctaagtgatgccac

SEQ ID NO: 32659 - DNA, 907 bp, Homo sapiens
  chr17:54911482-54912389
  binary
cggatcggcgtgcgtgcggctggagccttaagcgtttcccccgcccggcttcatccctgctggcggcccagcgtcgttctcctcctgcgcgaggcggccaaggcctgctggcccggagccgcgcctccacccgcgcgaggtagggcttcgaggaccggcgcggcgcaggtctccggaggcctcccgagaggggctagggtcgccgggccgcgcgtgggagcgggtggggcccgggaggagacggcgccccggaggggagtgcgaggcctgggccgacggttacgggcgccgaccggcgttgcctggcctgaacgcccggcctttcggtggagggcagcttgcccctgtatgttgcgcccttccgtgggtcagaccggcggcaaggtgaggcggcggcggcagcagcagccgccttgggctcctggacgcgctcccgaggtggggcgggttggggagtggggattggagcgtgatggctggacgtcgccttctcggcgcggcaggtcccgggagacggggggacgaggcgcagtcccgccctcgggagagcggagccaccttcactgagggcgcccggtttggccccggaaaggcaggaagggggcggggaagggatggcgagctcggggtgcaccgcctgtttcttttctggttaggtatcgtccttggagaagatggaagcggagaggcggccggcgccgggctcgccctccgagggcctgtttgcggacgggcacctgatcttgtggacgctgtgctcggtcctgctgccggtgttcatcaccttctggtgtagcctccagcggtcgcgccggcagctgcaccgcagggacatcttccgcaagagcaagcacgggtggcgcgacacggacctgttcagccagcccacctactgctgcgtgtgcgc

SEQ ID NO: 32660 - DNA, 713 bp, Homo sapiens; identical to SEQ ID NO: 25258
  chr17:58498618-58499331
  hyper

SEQ ID NO: 32661 - DNA, 140 bp, Homo sapiens; identical to SEQ ID NO: 28715
  chr17:59467400-59467540
  hyper

SEQ ID NO: 32662 - DNA, 749 bp, Homo sapiens
  chr17:59473671-59474420
  hyper
cgcgaccaggagggagtcgagccgcccgctctccccgcgtcccccgccccatcccagccagttggccccaccctgcgcgggataattgggacgggagggaggcgacgggagggcggcggctccagagagactgcgcgcctgtcagcggcaatttgtttaagtggacgggacgggccgggccgctgcgggctggggtcaccgaggccgcggcccccaccccaaccagacctgggaccgcgggggagcccggtccggccgctaaaccgggctggctggcgccagggctccgggaggtgcggtccggcggggaagccgtgatgggaagcgactctgtccagggagtgtccttcaccaccacactcctcacgtccaggcagtgatcgacggcctggcggcaccctcacagcgggcccatagcacggggccacacacgtcccctgagcttagcctgggcacattcgtctgccaccgagggcttaagccagtctgcagcccgcgccccgtcactcggacgcaagtccgtcgtccgctctgccacgcggccgcacagcccgagcttcctgctgcccactgcccgcggggtcacgcaaccccggccctgcacacagaggaggaagcggcggggaccccctgccacctggaggctcaacccggggaaggtcccagcagtgccccttaaccctgcgagaggtgacggggccggaggacggaagggcagccacgccaggctcaggaccgcggccccaccc

SEQ ID NO: 32663 - DNA, 754 bp, Homo sapiens
  chr17:59474429-59475183
  hyper
cgtccccgctcccgccccatttcactgttgcgggaagcgcggggcgcacagaccgcgcgccaccagcccaagcccgcccgacgccctggccggagaccgcctgcgagagggaggggcggccgagcgcgcgtcccccgcctgtctgcgggacctggccgatgcgaagtgacaggggccggagctttgttgtggagcctcggccgcctggcgccagccgcccccgcccgcgccctccccctccagccccgggcggcccgcgaggcgccccccggggcctcttaaaggaacacgcacactcggcccccggggctccgccaggggagggggttcctgggaagggggagggggccggcctaggtgggggaggggcccagcggaggcctcacggcgccgctccagggcctcccaggcctccccagcgccagctttcggtgagcctcgggcattcctagctggagagtttggctgggggtcgctacagactcttcagagcggctgcagcaggacctcagggtgatcgcgggaccgcggggcggggcgagtggtgggatcctggcccggacagagccccggaaagccagagggaaggtcggtgccactgtaggtggggtcgccgtccccagatgcagccgctgcactgtcgccgccaggtttctcggtcaaataacccaggcctgagtgtttcaaactcttcaggcctcggacccctggaccagctatggatggactaatgaaatggactaatgtctaaaac

SEQ ID NO: 32664 - DNA, 981 bp, Homo sapiens
  chr17:59488510-59489491
  hyper
cgagatcccccacaccactttcgccgccacctcccgccgcacatgtcccctccgagtcgcccacccggcgctccgcggggccccagctggtagcctgagtgcgactgcgggaacccgcggccggcggctgggccttgtcccagacaaaggctaggccactcccatgtccaattaagccaccctcctccccggcctcccagccctcattgtccccggggtcgccaattagcctaggcgcccggcgtacccgccgctccggtgccgcaaggcctccttaacccttcagggcctggcccggggtccttggacggcagagccgccggcacacgcgtggcaggagggccagtgctgggacgatggcgatacctgctggcggcctagcctgtcgcctcgggctctcgcgtgtggggcgtgtgaggtctaagagggaattgtgcgtgtcggtgtggggtggcgcgtgcgattcccggaggaactcggagatggagggtgtgagtgcaggggctccgagagacccctagcggctaagccgcccggatcccaaggcccaggggacctcatttcctctcgggttaatcggaatcttccgagccctcaagcccttcctcctccactcccccgccgctgctgtggagaaccggagccaccggtatggcctggccctgccctcccgaaggccgcagctcccgggcccgcctccccagctgaccgcgaactcctgcgtggggtgctcctggggcgggaggggcgcgctcagcctcgctctccccgggactctcacgctcaagcgccccggcttgaggccgggaccccctatttcccggttatgggacggccccttgagggacagcctctacgagccctggatttataccccgagcctgccttcctccgctctgggaaggacccaaaatccagtcccgcttcctccccctccttcgctgtccttggccccgaggtgcggagcaccggcggtcaggc

SEQ ID NO: 32665 - DNA, 448 bp, Homo sapiens
  chr17:60885408-60885856
  binary
cggagcggcgggggcgagggggccgttacctgtgggtctgcccttcctcccctgccggggctacaggggtcgaggggctgggcgggcgggccggtccagggcgcaggagccgcccattaattgcgcggggacggccctgagctcctcttcctcctcctctttttgcttcttcactccctacacctgcccctcttcctcctccttccccgaggctgctttccgcggcgccggccggccttgcctggggcggaggcggtgggggcggctaccgggcgtcctccggtttccctagcaaccgcgcctccccgcccccgcgcgaccaggtgcagccgccgagagcacggggcggggcggggcggggctgtggccccggggtcccaagccagtcgtgggcgcccgccggttgccgtgggaacgaggcgggctgcagtcggggagtcagagccac

SEQ ID NO: 32666 - DNA, 367 bp, Homo sapiens; identical to SEQ ID NO: 14741
  chr17:64716166-64716533
  hypo

SEQ ID NO: 32667 - DNA, 409 bp, Homo sapiens; identical to SEQ ID NO: 14742
  chr17:6939640-6940049
  hyper

SEQ ID NO: 32668 - DNA, 1383 bp, Homo sapiens
  chr17:70113240-70114623
  hyper
cggagtcgggattccacagccctgagtggcacatgccggtcaacttcccaaagtcgggctcccgtgtggggagaaatacacacgcaggaatgcacaagcatcgcgtgttcgcaactgtcgctgggaggtctggcggctgtgatgggacatgcactcactcgggcaacacgtccacaggtgacatctattcgatcagtcaacagatatttattgcgcacctacgacgctatctggtactttccttttccccttagctgttgctgtccagcccagcgccagtccagagacgggcttaccggccgctcccttccacaagaaactcgtgtccggcgtgaagagcggacgataaacactctccaagcccagcgaaatgtactaattacaggagcggctgggagcccgcgacacggggacctgtccctccagggataggagtcttctacctgcaagggacccggcctggggaactggaatagacaaggggtaaccccttctcccatcacctctaatgagaacattgtccggggctgagatatttgggggacgccgctgctcaccccaccaaactttccctagggacagaaaagcgtccctaccgaaaacggatttaaacaccgtccccacttttgctaaggaagtttggatagggaggttgtggtccttaattcgccaggtaaaaggaaccccatcagctcgcatccctcacccccatcctgagcactgagtgtttgcgagaaactcgccctgcgccagcaactctgggctccggtctcagctcccgcgtagacgcggaggagagattggcggcccccgctggggaaattgagcccggcgccggtccgggacgtgcaagagggggaaagggggagatcccagacctcggtttcccgagggcttccctggggagccactcgcacctctgtgtctccgctcccggcggcagacctcgcggcgcttgctcaagagcgggtatccgaaagcacgtcccgaacacggagaagcgccctccgtctcctgcctcgtgacctgcgccctttccctccctcaccgcatcagatggaggaccctggctcctttcgcccctggcaaaatgctctagccaacactgggtcaacagccttagtttccagatctgtaacctgaacatcaggagcgggttcctttccttctacctgtgtctgaggtcctctggtcggggactgcgcgcgtcttcccaggtcagggaggaggggtcggggcgacctgagaaagacacaacgaagcgaatggagcccctgaatggggaaaggggagtggacaccaggaggcccctgcagaaatgcaggaccgatccactcgcgagctgacaatgccacgcgctagacttggcctgacggtggcaac

SEQ ID NO: 32669 - DNA, 988 bp, Homo sapiens
  chr17:7165743-7166731
  hyper
cgaggctgcggtgcgcagcagaggtggctcggaggtgagccagcaggtgcgggcggacaggtggggcgcacctgagtatatgtagggcgtcgggggcgcggcccgcgcgccccgggagcgcgggagggggaggcgggaccggaggggcggccgaggatgacctgacgtcaccgaagggacactcacctgaaccggaagtcgtggcccccacccctccttgcccaggtgaggaggaagaaacctgagcaccagggtcacgccccttcgcttgcccggttttgaccgccgctggggaggaggcggtggctccccaggagtcccaagctccgagtcagcccctccggactggatttccctcgaacaccgggaagccccttcctttcttcccaacaggtgcgcctgggacgctgcggggcgcccctgacaagcctcggcgccgccctttccccgccgggttctgtccaaagtgctctctcctcggccctgctttcgcccccacccgctgctctccttttttttcctgtctcctaccctggtcgatcccaccttcgggggccctggctcgatccctgagagtcgcccccttcagcaccctcttcagtgtcccggttctctggctctgctacagacacccggcttagcgtggctccccaacagccccaccttcctgtgcccccattccaacccaacatgacttacagcctgaaccctttgcactcaacctccccacctaccactgtcccctccggcatcaaggctcctaactggaggaagaaaccactgggacctaaagccggccgagggtggggagcagggtgagggctaggtcagagtcttggccacacccatcgttcccctcccttagagtcttttcagacctatcctccacctttcccacccctcccccacactcgcccgtttctctttccctcccgggcctgggcttggactgccaattgctgtgcactctgtcacgcctcactgttcc

SEQ ID NO: 32670 - DNA, 70 bp, Homo sapiens; identical to SEQ ID NO: 14745
  chr17:7198346-7198416
  hyper

SEQ ID NO: 32671 - DNA, 162 bp, Homo sapiens; identical to SEQ ID NO: 14746
  chr17:74571597-74571759
  hypo

SEQ ID NO: 32672 - DNA, 830 bp, Homo sapiens
  chr17:74865491-74866321
  hyper
cgcgccccttcccagcccctcagggtccttcctcaccccgcggacggtcccatccgggtggcaaagttagtgtgcggcgccttggagctccccctccggtccctcccgtcccgcccgtctgcccctaggtcggctaccccccaacccctccgcctgtgccaccctctccccagcctttggtggcactgctctcctccccgcggggctcgggcctggctccgacgagagggtcccgagattagagcgaggactcgctcatcccaggattcgcccccgatcgcaggcgtcggagaggcgggggcaggggcggcgctgcagggctacggggcggctggagccgaggctgcggcggagcgtggtgggcgggcggtggcgaaggcgacacgcttcgggcggccaacacctgggggcccaggccaggcagggctggggccgcgcgggactcactggacccagccaggggcccccagggcccagcggtgccggggcagccccctctcctcccaggcatccgcggaaccggcccgcagcggggtggggagggggcgctgcccagtggacgcccggcggggcccgagtgtcaccccgtgggtagctgggcagcgaggaagctgggggagtgaccgccccggcgcgggggccggactcgggacgtggccacaggtgggctccgggcgcgggaaggagcccgagaaggcggagcttgcaggggccctgaactcttgccctccaggtctcggcccagccccactgtggtccccctgccggctccagacggggatgggggcggggagacggtggctcacctggagcccgcctcccagcacacc

SEQ ID NO: 32673 - DNA, 668 bp, Homo sapiens; identical to SEQ ID NO: 29992
  chr17:77126804-77127472
  hypo

SEQ ID NO: 32674 - DNA, 357 bp, Homo sapiens
  chr17:77773671-77774028
  hyper
cgcttgcgaaaagtctgagtttgcaaacgtcggggaatcctgcaaagcttgtggcaaaggtggaactcgattcagaaggaaggaagaggtatagaatgatctgagggcagggagcctggctcttgtcagtagcagacgcgctcagtcccgccaaggaaggcaatccccaacggggcagagtgtgtctcatccctgcctggcgcaacccctgccccccaacccgtgagagagcagcgttgcagggggtgtgaaaacaggtcaccgggcaacctcattcctcgacagtttggagacaaagcgggaggtggcggtctgagaaatgggagcccacctcccgggctctggctgggtgggcgc

SEQ ID NO: 32675 - DNA, 749 bp, Homo sapiens
  chr17:77778310-77779059
  binary
cgatcggtttccccgcccttctgtaggaaatcaaattcagggaacatggtaccgtatttacccgcacaacttcctcccttgacattttgcactctcgaagttggggcagaagtaattatgcaaacatctggggctgtcccgcgccgctaccggcaccgtcttattcatcctgagagccgcactccctcatttgcataataatggcttatctagaataacacagcaatcagaggcaaaattaattttcttcagctagtccttgagatcctaaaaacagaggaggcttatggcaagaaaagccggtttagcagagggtgtagggttcctgaccaggaccaaggagagagaaagtttaaagcagtggaaatgtgatgttcacgctgagtttctgtatttttctagtttcaacctcagagcttactttttggccaaacggatgaaggggtaagccaccgtggaagtcccagcagatacccccaccatcgccccatccatcctgggaggttcggtggccctcgaggcagagacatggactgtggctggggtattgggggcagatgttcaatgtgttggggtgtggagagggtagattggcagcctactgaggattaaaggggtgtcctgcaaaccagctccggggtctgggtccggaccttccagggactcagttccgcaccctttgaacagatcaagacagagcacttccttgctctgggatggtcgcctcagccaccgagacagcagaagtc

SEQ ID NO: 32676 - DNA, 2164 bp, Homo sapiens
  chr17:77814056-77816220
  hyper
cgagaggcgtaggaggcagagagagcgggcgcgggaggccagggtccgcctgggggcctgaggggacttcgtggggtcccgggagtggcctagaaacagggagctgggagggccgggaagagcttgaggctgagcgggggacgaacgggcagcgcaaaggggagatgaacggaatggccgaggagccacgcattcgccttgtgtccgcggacccttgttcccgacaggcgaccaagccaaggccctccggactgacgcggcctgagcagcagcgagtgtgaagtttggcacctccggcggcgagacggcgcgttctggcgcgcggctcctgcgtccggctggtggagctgctgcgccctatgcggcctgccgagggcgccgccgagggcccgcgagctccgtggggtcggggtggggggacccgggagcggacagcgcggcccgaggggcaggggcaggggcgcgcctggcctggggtgtgtctgggccccggctccgggctcttgaaggaccgcgagcaggaggcttgcgcaatcccttggctgagcgtccacggagaaagaaaaagagcaaaagcagagcgagagtggagcgagggatgggggcgggcaaagagccatccgggtctccaccaccgccctgacacgcgacccggctgtctgttggggaccgcacgggggctcgggcgagcaggggagggaggagcctgcgcggggctcgtgttcgcccaggaatcccggagaagctcgaagacggtctggtgttgaacgcacacgtggactccatttcattaccaccttgcagctcttgcgccacggaggctgctgctgcccggcggctgctacccaccgagacccacgtggcccctccccaggggtgtaggggtgacggttgtcttctggtgacagcagaggtgttgggtttgcgactgatctctaacgagcttgaggcgcaaacctaggattccctgagtgttggggtgcggcgggggggcaagcaaggtgggacgacgcctgcctggtttccctgactagttgcggggggtgggggccggctctcaggggccaccagaagctgggtgggtgtacaggaaaatatttttctcctgccgtgtttggctttttcctggcatttttgcccagggcgaagaactgtcgcgcggggcagctccaccgcggagggagaggggtcgcgaggctggcgcgggaagcgctgtaggtggcagtcatccgtccacgccgcacaggccgtctgcgccgtcggaccatcgggaggtctgcagcaactttgtcccggccagtccccttgtccgggaaggggctgagcttcccgacactctaccctccccctcttgaaaatcccctggaaaatctgtttgcaatgggtgtttccgcggcgtccaggtctgggctgccgggggaggccgagcggctgctgcagcctccctgctgccaggggcgtcggactccgcttcgctcactacgcccaggcccctcaggggcccacgctcaggacttcggggccacacagcaggacccggtgccccgacgacgagtttgcgcaggacccgggctgggccagccgcggagctggggaggaaggggcgggggtcggtgcagcggatcttttctgttgctgcctgtgcggcggcaggaagcgtcttgaggctccccaagactacctgaggggccgcccaagcacttcagaagcccaaggagcccccggccacccccgctcctggcctttttgccaacgactttgaaagtgaaatgcacaagcaccagcaattgacttcccttccgtggttatttattttgtctttgtggatggtgggcagatggggagagaggcccctacctaacctcggtggctggtccctagaccacccctgccagccggtgtggggaggagctcaggtccgcgggagagcgaatgggcgccaggaggtgggacagaatcctgggaaggtacagcggacgccctggaagctcccctgatgccccagagggcccttcctgggaaacctcccgggggggtgccccataccatcccacccggctgtcttggcccctcccagggagccgcaggagaaactagccctacacctgggattcccagagccttctgctggggctcctgcccccgacttcggataaccagctcc

SEQ ID NO: 32677 - DNA, 397 bp, Homo sapiens; identical to SEQ ID NO: 14756
  chr17:77817078-77817475
  hyper

SEQ ID NO: 32678 - DNA, 369 bp, Homo sapiens; identical to SEQ ID NO: 14757
  chr17:77923306-77923675
  hypo

SEQ ID NO: 32679 - DNA, 800 bp, Homo sapiens; identical to SEQ ID NO: 25281
  chr17:80186335-80187135
  binary

SEQ ID NO: 32680 - DNA, 33 bp, Homo sapiens; identical to SEQ ID NO: 14760
  chr17:9719665-9719698
  hypo

SEQ ID NO: 32681 - DNA, 240 bp, Homo sapiens
  chr18:12375127-12375367
  hypo
cgaaaaaggacctaccacacggcagcgtggcgtgaccatggcgaagaaattgatttaagactggcaagggagcctcaaggagtaaaaatcatgaatgcaggcactattattccccctccccacccccgctctttttttttttaggagacagagtccgtcacccacgctggagtacagcaatgcaatcaaaactcactggagcctcaacctcccgcgccaagcaacccgccttggcccccc

SEQ ID NO: 32682 - DNA, 313 bp, Homo sapiens
  chr18:19748134-19748447
  hyper
cgaaaatagaaacaaaacaaaaaaccagagcctaaacgctttctaggagaccgaccttcagaaaatcatttacttggatttacctgggcggggggtagggggtggggtcggggtaaagtataaaaattcattctcacaaaaacaacgcctcttgtcctaaagtctccctcggcagccttctggggtcacgtctgtcggaagaaatcctttctgtaagcgaaagggagcgagacatatatcacggctcctgcagcggacgagcctgcggccgcgcgagttgccgctgacagatcggcgctgataaccccgcgac

SEQ ID NO: 32683 - DNA, 862 bp, Homo sapiens
  chr18:21269447-21270309
  hyper
cgcggcaggttccagagctgagaggccacccccacgccgcgggcttccagcgcgtggagcaaggggagcggccccggcgccgcccatatccccggctgcgctagtcctggcgctgcaggtccgggaggcgcaggcggagagcggcggtgcccccgagcccctctgcggacggctcaggcgggaggaccccgcgcggctggatggcggcggccgcgcggcctcggggtcgggcactggggccagtactgccgccgacgccgctgctcctgctggtactgcgggtgctgccagcctgcggggcgaccgctcgggatcccggggccgcggccgggctcagccttcacccgacttacttcaacctggccgaggcggcgaggatttgggccaccgccacctgcggggagaggggacccggcgaggggaggccccagcccgagctctactgcaagttggtcgggggccccaccgccccaggcagcggccacaccatccaggtgagggcctcggagagagccggggtgggcgcgccttttccttcccgcgccggccagacacccggagaagggatcgggccctttcctcacgcgcgctagtggctccgggcgactgggaagggcagcccccatccccgcgcgcgagggcccacgacccaggagcgatctcgtggaagcaccgcaccggcaccaccggcccgaggcgaggagggggagcacgcgaggtgacatgaggctgtggtcaggttcgggctggtggaggggaaagtgtgaggctgcgctctaagagatgcaggcgcctcggcccttcccgcctccgtcacccacggagcgtcccgccaggcttgagtcctcgagggttcaggggc

SEQ ID NO: 32684 - DNA, 907 bp, Homo sapiens; identical to SEQ ID NO: 30003
  chr18:24130266-24131173
  hyper

SEQ ID NO: 32685 - DNA, 169 bp, Homo sapiens; identical to SEQ ID NO: 14768
  chr18:24235701-24235870
  hyper

SEQ ID NO: 32686 - DNA, 310 bp, Homo sapiens; identical to SEQ ID NO: 14769
  chr18:3360395-3360705
  hypo

SEQ ID NO: 32687 - DNA, 593 bp, Homo sapiens
  chr18:55470607-55471200
  hyper
cgggctcggccttctcccctccctttttccctccctagggcggagaggggctggactgcaagccccggggcggcccgaggcggcccaggtccagctcctgccccacgccctccgtgcgtcctggagtcaggtgggcacccctttcagtcttccgagcccagcctacgagcccttgcctcgcccagcctgagacccagttgctgcggctgctcttagctccccgggggccgcactcgccaccacacctctccagcccagcgtcactttcccgctgcccttggctggcttggccgtcaccccgggtcgaggactgagccagcctggaaagctggcggggccgcggcgcgcccgggacctgagctccctcggtaaggggagctgtgtcctcttgatgccaagtcatgtttggggaccggtcaccgaatgcgcgtcaaagttcgccgcgtggagggtgaagaaagaggctgcgcctcaagacttccagaaacgtatcctgtgattgcagccagcaggctttctgccgagtccaaacgctatcgagtttttttgggtttggagtcaaaaggagttaaggtgcggcccgtgaaccacgc

SEQ ID NO: 32688 - DNA, 789 bp, Homo sapiens
  chr18:59560432-59561221
  hyper
cggagcaggtggggaataacatcttggggcaaagacacactggcaaaatctaccaggtaacccggtcatatgggaatgcggggcgcctagtcagccgcgcagacaggcacacagcgcggcaatcccgagcatctttctttcgtttgcccctgtccgccacctcatcaagtcaccgccacctcatcaagtcaccgtcacctcatcaagtcaccgtcactctgctttggcgatttctctactctctccagacccaggcagcgctccccaagccatgccccgaccccaggcgggattggggaccgccgcttcccgagcagcgccccacgagtccagctggctttgtcctgccgctgtccttccaggagcaagcgccccaggcgcgtgtgtctgcacaaaagacccccaacatctggcccttcacagcgctctctaatcccgggaggggccctggggcaacttctagggctggagaaggcgcgagacaaggggaccgggagaagatgagccggggtgtgtgcgggccgggggcgcaactggggcgggcgcgcgcgcacgtgcacacccaggggcgcgcgcggcgcgggcacgaggaaagctccctcggaccggagctccagggggcatccgaggactcggccgagcagccgacagcgccgctccccgccgcggccgcccgcccaactccgccagctctcaggagacacgcaactcccgggaccacctcccccgtgccccgccagaccccgcgctcccctccccgggaccctgcggccccgccaccccctccgc

SEQ ID NO: 32689 - DNA, 704 bp, Homo sapiens; identical to SEQ ID NO: 14773
  chr18:74728317-74729021
  hypo

SEQ ID NO: 32690 - DNA, 284 bp, Homo sapiens; identical to SEQ ID NO: 14774
  chr18:77126115-77126399
  hypo

SEQ ID NO: 32691 - DNA, 420 bp, Homo sapiens
  chr18:77156459-77156879
  hyper
cgaggtcggccgggtctgtgcgcccagggaggggcgcggcgcggaccgggaacggcgtcccccagctcccagcagcccggttccgagcgcgccttctgccaataggtgtctcctctgccccagcgctgagggcgcgaggcgaggccgccgcgggtcccgccgaggaagcggctcgcaggccggcgatttggggacgggcgaggctgggccgtcaggaccacagagggcacgtgggagggaggaagggaggcttccttgggagtgaaggatgccccgtgtcttcctgagcgaggcagagccaccctctggcgccaagatcgcggtttgggggttctgcgccccccacccccaccccgagctcgtggcggcgtctccctcgcgccgcgcccctgaattccccagggccgagcccgtcacgcc

SEQ ID NO: 32692 - DNA, 273 bp, Homo sapiens
  chr18:77313826-77314099
  hypo
cgggacttcagcagcacgcggagcctgaggctaaatgctgcaaaacacagcaccggcctcccgctcccgttcccgcaccctgaggacgcgctggctgattgtggcacgcgtgccttccgagcccagatgtcccttcctgacacgccggcagcagccaccgcggattgttggcctctttgccgttctgccttaagctgacgttttggcgatgttggtgctggaacttcaaacctcggtgtggaaggaagggacgccgaggcccctggcctgccc

SEQ ID NO: 32693 - DNA, 411 bp, Homo sapiens; identical to SEQ ID NO: 14779
  chr18:77497998-77498409
  hypo

SEQ ID NO: 32694 - DNA, 177 bp, Homo sapiens; identical to SEQ ID NO: 14780
  chr19:11199850-11200027
  binary

SEQ ID NO: 32695 - DNA, 109 bp, Homo sapiens; identical to SEQ ID NO: 14781
  chr19:12912808-12912917
  hyper

SEQ ID NO: 32696 - DNA, 144 bp, Homo sapiens
  chr19:14630505-14630649
  hypo
cgcagtgagaacctcataaatattccccgttcttacacacgtgcttctttttcttccccaactacctttataatttggggggacataggtgtgtcacacacctttcaaggcctctgtttcctcaattgtaggcaacacgatcgc

SEQ ID NO: 32697 - DNA, 59 bp, Homo sapiens
  chr19:14886822-14886881
  hyper
cgggcgcccctcccacaggaaaacgctgtggccgcctgttggggtgcatgtggcgctgc

SEQ ID NO: 32698 - DNA, 118 bp, Homo sapiens; identical to SEQ ID NO: 14782
  chr19:16756119-16756237
  hypo

SEQ ID NO: 32699 - DNA, 661 bp, Homo sapiens; identical to SEQ ID NO: 14783
  chr19:16772102-16772763
  hyper

SEQ ID NO: 32700 - DNA, 618 bp, Homo sapiens; identical to SEQ ID NO: 25345
  chr19:17958343-17958961
  hyper

SEQ ID NO: 32701 - DNA, 785 bp, Homo sapiens
  chr19:19738572-19739357
  binary
cgagggggcggtgccgaggcgtggaggtgatcggagtggacagagaggcggccccagaagttagtcggcgggatttgggcgcgagtgcttcccaagcgggcggggcaataggctgttccgggtgggacggaggacactggcggtctccgggacaaagacagcggttggggaagggatggatggccgggcctccaggcgtctccagactggggaaggggtagggggttaagggatcagagggcggcgtcctggccccgcaggcacgtgccgcgcccttcccccgggcccaggcccgcacccgcccgcctcccgtccgtgcaggcctcacctgggcctccagtcacgccgcagacaaggcgggctcgcgggggttcggggcgggctcgaggcccatggcccggcgactgcggcgggagcggtagagcgtccgggtgcgccctgtgcgggttgctgagagggcgcgggaggcggggtctccccggcgccccgcccccaccacctgggggagccctgccccgccccgccacctgggggagccccgcctccacggccgcgtcgggggcggtgtcgcccggaaccgcagcccccctgtttcctccccgcctcgcggcccctcagtcgcccctatttccggcgcgggacccccaccccggtacctgcacacctcatgcgcccgcagtttcgagcctgcggggctgagtcactcggcgacccgaaaattcccgccgtgaccccgcgctgcccgggcggagctccaggtggtcttgggtccgcgcccccgctcc

SEQ ID NO: 32702 - DNA, 300 bp, Homo sapiens
  chr19:35581628-35581928
  hyper
cgctgtcccaaccacttaatttattttaacttgcttaaccctcaaagtcagtttgaggtcagtactcttttcggagagatgggtacggagtcctggagaggttaagcaccacgacagagccgagattttaagcactcggtcagggagttgggcaaatgtggcctgcagatcatgtttccttacccgcgctttttctcctccctgcatagccgccacgtgtcctaagcacagcagctaccagcaacgcttggacccgcgccgggtgcagctctgcgtccccgcggccgccctgcctgctcc

SEQ ID NO: 32703 - DNA, 250 bp, Homo sapiens
  chr19:3565322-3565572
  hypo
cgtgactcagtctttgccaggaccctcctggcctcaggtcctgttcagtatctggtctaccattgccagaaggagcgcattctgtgagtcttgtgatttacgttttaacgttgatgctggtcagtccttgcgctgagagcaaaacggggaggagctgtaacgaagcgcggtgacctcctggcacggcagggcctggaactcggagctttttgttgttgtgttgtgttttgagacggagagtcgctctgtc

SEQ ID NO: 32704 - DNA, 636 bp, Homo sapiens; identical to SEQ ID NO: 30070
  chr19:38754883-38755519
  binary

SEQ ID NO: 32705 - DNA, 513 bp, Homo sapiens
  chr19:39522492-39523005
  hyper
cgagatcccaccttggccgcaggggttgcgaataaggttgcgtccgatgggtctgcgcgcgcagaagcggcccagggggcaaggcctggcgttacgggcgggagactggcagctgcgggcgaggtgcagcagcgcgcggccggtggcgccgtggtcgcgggccaggatcagcagccacagggcctggccgtccaccagggctcgccagccccggcacacttggcggcagcgcccgagcagcgtgcgcggggggacgtggctcagcaccaccagaagcagctctgggggtagttggctcaggtccagcgcctcttcgggttccggctccggcgcggggacccgggcggcccggcccctggagaccgaggcgcccatggtccccccgccaggcccggctgtggctgcgggagaggaagggtcaaggcgtcagggaccagcagcctccgcggcgcgcagcctctgcctgccctgattctgccagccgcacccccgtcttcaccatccctgggcccc

SEQ ID NO: 32706 - DNA, 967 bp, Homo sapiens
  chr19:39574122-39575089
  binary
cgactggaaatccgggcccccccagttcttccctgcttctctttttgtggcagccgctcctcacgttcaaacagattgcaaaggtttacaggggagaaccctaacttgttccctagacgtcagtttctggagttcctgcattaatacgattaaaaagaacagctgattcttatccagcccttactctgggccgggccctgttatcggcatgaaatttcatgcagcaactcgtttactcctcacaacagcccacggggtatatacgagcatcacctcctttttacaggtgaaaaaacccaaggtccagcgaggttgaataactcacctaggtcgcacagctcagaaagcccactgcaattccgggattctggttttgttttgaggttgccccgggcttctgaggaggggtcagtgggctcagcatggaaaggaaggaagccggaaggctggaggaagatgcagcgaggctggaaaggttggggatcccccggtcctgcacacctgggtacctggggatcgggcagggccaggataggggccggtgtccgtgccctggggctccccagctgatgagtgggcgcctgagggacgagcgcagggttacctgcctgggctctcacctggtggccggctcagaggtggcgcgccggagacgtatcataaccttcctgggtcccccttcccgcgccacgccctggtggggtgggcgggtgggtgtggggcgcccaggcaggaccggccggacctgtgggacccggggccctggctgtctagggaggctgtcaccccgaggcgaccggctcttccggggctgggacggctgtaggcggcaagaggcctcggcacccgcgaactcataaataccggggcggcgctggtggcgggagaggcgcgtgcgggcagccggcgcccccgagggtgagccggggtccgggagggcgtcccctttcccggatggtcccgaccc

SEQ ID NO: 32707 - DNA, 624 bp, Homo sapiens
  chr19:39989541-39990165
  hyper
cggggccattctctcagatataaggcttggaagccagcagctgcgactcccgagacccccccaccagaaggccatggtctccccacggatgtccgggctcctctcccagactgtgatcctagcgctcattttcctcccccaggtcagagccaggtgggaggtggcgtggaaagggatgaatgcggaggggaggggtgagtgcgacctgaaggtcctggggaaggagcgtggggcggacgggaagcctgggtcctcccggccgcctcaccctgcgcccgtctccgtcccagacacggcccgctggcgtcttcgagctgcagatccactctttcgggccgggtccaggccctggggccccgcggtccccctgcagcgcccggctcccctgccgcctcttcttcagagtctgcctgaagcctgggctctcagaggaggccgccgagtccccgtgcgccctgggcgcggcgctgagtgcgcgcggaccggtctacaccgagcagcccggagcgcccgcgcctgatctcccactgcccgacggcctcttgcaggtgcccttccgggacgcctggcctgtaagtgctgcccccgggggactcccggtgctggaggcctaaccctgccagc

SEQ ID NO: 32708 - DNA, 746 bp, Homo sapiens; identical to SEQ ID NO: 27793
  chr19:407139-407885
  hypo

SEQ ID NO: 32709 - DNA, 459 bp, Homo sapiens
  chr19:44302742-44303201
  hyper
cgggtcgggtgctggcaagagagcgtagatgcacactcaggcagtggtaccctggcacagtcgtgcgggctgcgcactgcgccagagcccgcgcctagcacgtctcgggggttgggatcctagcgcgccaagagcaggcgcccagcggaggccacgccttccccgaggctgccaggcctctcatcgtccctcccggagcccagccccgctctcccgcgcaccttggctcaggttggggagggcgtcatgagtcatgaggtgggcgttgcatttgtcagttgtgcagccgcgcaccaccgagtagtctggcggcagcgcgtccgcgttcgattgcgtctggcccgcaggaggcccggtccagcagcccttccgcaccagggtcaccggcgcgcgataccctgggggcgggatcggggctcgtgctctgcttcccgaaacccttctccctccagtctcagc

SEQ ID NO: 32710 - DNA, 555 bp, Homo sapiens; identical to SEQ ID NO: 14798
  chr19:45579321-45579876
  hyper

SEQ ID NO: 32711 - DNA, 987 bp, Homo sapiens
  chr19:45656090-45657077
  hyper
cggcggcccataatgggcacagagaagggcagcgtgacagtgcggttgaggaagaggtagccgttatcggccgtgcccttcatgttgcccgcgctctctaggcacgcggccaggatgctggggtccacgaccaggatgaagatgaagggcgcgtggctgtcggacagcagcgtgttgatggcgttgagcacgcccaccacgcgctccgggtagcacgtgtccagcccggtgacctccagcaccacgcgcagcctgcgccgctggtagatctccaggaagcacaggaagtcggtgagcagctccacctccttcttcacctcgcacatgaaacccagctggctgccgaacttttcacgcgacaccagccgctcgatcttcttgcgctggcttacgaacaggtgcttgcccaccgagtacacggccatgagcagccccgagcccgacagtgtggtggccgcgccgccaaacaccttgagcaggctgccgctcgggctgccgtggcccagcgcgtggccgcccagtgacaagtagagcagccccacacccaggcccagcgccgccagcagcgccagcagccccaggcacacgcggcgccgacaatgccactcgctctggcagcagtcctgcctggtggccggcttgttgcccagcaccgagtacacgctgaagggcagtgcgccatagtggcggcggatgccctcgcacaacgtggtcaccaggccggcccacagcttgtcggtgcccgcgtactgccaggcgctaaagcggatgaaaaggaactgcacgttcctgcgccgcaggtgcacctcggtgatgatgggctgcaggaacaccaggtaccacagtagctgcgggacgccccagccgctcacggcacgcggccgccactgcacgtgctgcagctcctcgctctcgcgctgcgcggcctcctgctgcatcagcgctgcgggaagggagcccgggagccgcgtgagccgcagacccgcc

SEQ ID NO: 32712 - DNA, 62 bp, Homo sapiens; identical to SEQ ID NO: 14800
  chr19:45907705-45907767
  hyper

SEQ ID NO: 32713 - DNA, 451 bp, Homo sapiens; identical to SEQ ID NO: 25383
  chr19:46180187-46180638
  hyper

SEQ ID NO: 32714 - DNA, 363 bp, Homo sapiens; identical to SEQ ID NO: 14803
  chr19:47501985-47502348
  hypo

SEQ ID NO: 32715 - DNA, 480 bp, Homo sapiens; identical to SEQ ID NO: 14804
  chr19:49199703-49200183
  hyper

SEQ ID NO: 32716 - DNA, 573 bp, Homo sapiens; identical to SEQ ID NO: 27805
  chr19:49242357-49242930
  binary

SEQ ID NO: 32717 - DNA, 675 bp, Homo sapiens
  chr19:49255778-49256453
  hyper
cgcttttcgtggccggagcgcaccctccgcaaaggcaggccacatccggccgcccctggaacgccaggcgtccggctatccggcccggcagccctcccctccgcgcagcctgtccggactggcagcgagggcttggggaggagaggaaggagagggcgcggccgggagtctcgcagcgtccgccctcccgggccgggcggatggctggaaggtggagccccgcccgtcacttggcgccgagccccagcgccaggggctaaggcgatggcccctgggcccaccgctccccagatcggggatgcaggggaccgcgccctgcccctccgccccgtcattgacctgcgcgaaggcttcacccagggcaggctacctggcttctgagcagccgcagcatcattgcgtggaccaggagacggagcgcccagttgcaatgctggagccgggaggtccaatccgccgccctctctcttccggtgccagggcttagagtcggcccccgacacctgggtgcttcgagcctggccacgccccagcggctgggcagggcccccgcacctggtcccggcgagtggagcgatcgtccgccctctgccgcgtcctcctgggggatggagaacctgtttgccaggctgccgccggagcgcgcgagggcctccagcctgcaggtgctcccgc

SEQ ID NO: 32718 - DNA, 378 bp, Homo sapiens; identical to SEQ ID NO: 14808
  chr19:50708476-50708854
  hyper

SEQ ID NO: 32719 - DNA, 193 bp, Homo sapiens; identical to SEQ ID NO: 14809
  chr19:56981677-56981870
  hypo

SEQ ID NO: 32720 - DNA, 162 bp, Homo sapiens; identical to SEQ ID NO: 14810
  chr19:59003731-59003893
  hypo

SEQ ID NO: 32721 - DNA, 553 bp, Homo sapiens; identical to SEQ ID NO: 25419
  chr19:59049750-59050303
  hyper

SEQ ID NO: 32722 - DNA, 150 bp, Homo sapiens; identical to SEQ ID NO: 14812
  chr19:6768009-6768159
  hyper

SEQ ID NO: 32723 - DNA, 510 bp, Homo sapiens; identical to SEQ ID NO: 14813
  chr2:10512203-10512713
  hypo

SEQ ID NO: 32724 - DNA, 619 bp, Homo sapiens; identical to SEQ ID NO: 25427
  chr2:10588876-10589495
  binary

SEQ ID NO: 32725 - DNA, 813 bp, Homo sapiens
  chr2:111874622-111875435
  hyper
cgccgtctcactgtactgaatttcaagaatcatggcctactgccagccaggtcaggaccgaaggcgctagtctggggagactggagcaggtctctagtggttcacctgttcggaggctcttcctgttcagttccctctgcgcgccagagggtggcaccccaggcactccagaggtggagaggaggggacgacaggggaggcaaagagagaggagcggagggaaggaccagggaggaaggaccaaggagggagctttaataaattctcagaccttggtctcgagttcccggctaatttgggggcaaagccgaccgaccccacgtccacgcccacccccttacgggaaaagccggggtttccactgggctaggtgtcagagttgggaatgtctaaaacaaaaaaggcttccgagggttattcatggccaacagtttccacaggagaatccaaagggaaactagtttccggggccgctgtgtgtgcgggtgcttggtgggctgaaagctgctgtcactagatggctgtaagtgtgccaacatctgacctgtcccattgtgttgtgttttgcagttgctggatttgtgcgactcggtgaaggatgatgcccggagggtgatctcgacctttaacattccacacacctacctccacgcaccaatcgccggaatctccaacccgcgggccgcgtgggctttctaccctgcaccgctgcagccgcggccacgggaagaggcgcgctcccggcggcccaagctgggagccaagctctaacgggtgtggcgggaagtgtggtggcccgccagcagctgccac

SEQ ID NO: 32726 - DNA, 618 bp, Homo sapiens
  chr2:112656507-112657125
  binary
cggtgccagaggagggggcgtaggcgaacctaccgtccactgaccgcggcgcctcaagcgtcccgagggcacccagcctggcttgcgggtgcgcatcgtggtgaagccgggtcggggtcggcgttgcaggctcccctcttcaccgcagaggaggaaatcgagctcggccgggcgcgctgcaagtcctgaagttccgacgagtggaacgtaggtagcaggtctggtctgggatgcgacgagaactttccactagagttgcatggtggggccccgctctggccggagtcccgggggccacagatccggtctcccgagggaccggcgcggggcgaacgaacgggctgcgggagtcggagccgcagtccgggagccgcgatagactgaggccgagcgacgggccagggggggacggcagtcctggctgctcccaatgggcccttacgggcattattagtatccctttttaggggcacccagagagtgtgggaaaaggggagcgttcttttcactcctgttatggcagaacagaacttacagtgctcggcagcgtttacgtttatctggattcagcgaagtgttgttacaggcttttttttttttaatttgagaccgagtctc

SEQ ID NO: 32727 - DNA, 183 bp, Homo sapiens
  chr2:134325872-134326055
  hyper
cgcggttggttatcctctgtttatttttgaagcattcaaaggccacgctaacagaacagactcggttttcctgaacatccacagcggctgggaagtcctgccgtgaatgcggagcaagtttgcggagacttgctccctgggctgcggctccgtagttgcttcgagcttgtaaatacaagctcc

SEQ ID NO: 32728 - DNA, 230 bp, Homo sapiens; identical to SEQ ID NO: 12567
  chr2:1488408-1488638
  hypo

SEQ ID NO: 32729 - DNA, 782 bp, Homo sapiens
  chr2:149633908-149634690
  binary
cggtgtcccctggaggcctggtgtgtctcccgcttcctctcacgcctggctgccctggatgtggagtcccggcttgatccctcccctctgggatgacctccctcccatgtctgcagaccctctgatgcgcctcacgctgggtggagaggaggctgtgtccacatctgtggggcgagggggctcagagcgcagtagccccctgtgccaagagcagaagttacttcgtgcggctcggacccccctccctctctatctcccttccccaccttttctcccccaccccctccccctacttagctccctctctgcagctggggctgctggtagggggagggaacaccaatggattgtagttcttaaaggaatctgtcagatgaaacaaaccagctcggtcccccgccccttccccgcccgctgtccgtagcgtgtgtggctgatggtgccccctttgtatgcgagccgcgtggggagggaccgagttaatgggagcctcccggtccccgctgacacgttcctggcagcctgctccaggctgctgatgcagccttcccgtccccagcattgattaagtgatgtcatcctgatcactgagcatgctccgactaaccccctcctccccttcctccagtggctggtgtatttaggtcaagtgattgacaggtgacagtttaccgagggtattgcaggagtccgcctggcctttctcaagcgccagaggccgacgttttccagcccgggcggtccccagcatctttgccaaggttgtctgccgcagtcgcagc

SEQ ID NO: 32730 - DNA, 856 bp, Homo sapiens
  chr2:152954365-152955221
  hyper
cggagcttgacgatctctcccaagatccagacagataagagtattcaaattaggacaaaacagaagaaaccactaaatctcaactcgaatcaaaccaggtccccggccccgaggggtctggttactctaggtcgagttatacgaattaaagacatttctccacgcaccaaagatacaaccagacatatttccagctcttaaattcaacgtccctgacttaagccaggtccccaccgaactgtccacacacatgcacaaactaacttcccggggcggtgcggagacgccgggacgcgaagacgtcaagagcccaggctagagggagagggactgagcccgagcaccggccgaggccgggaagagacgcgcgcgggcttgacccgcagctcccgcacgtgtgggccacggccggctccaggacccccgcgccgcgcgctcggcctcctccccatcctggtctcccgcctccttctcatacctgtctgaggatgaagctggtcgaagtggtgctgccatcggatcttttcaacctgctcctccgggttgtggtgcctcgggccacctggactcgacacacgggggccagagagaagccggtgaggaccgcagcgcagagcggggcgaccacccccggctggagtccgcctccggacccgctccctggggtcccctagagcccgcacccaagtctcctccgcgactcccaaatacagcccccacccccacccacccactgcaagcctcgactgctgaaaagatgctcgagaagagcagcccgcaagcacccaccacatccattaacaaagactctcagggtgcggggtccgagtccccggcatccgctgggggaggctgc

SEQ ID NO: 32731 - DNA, 703 bp, Homo sapiens
  chr2:153192142-153192845
  binary
cgcagcagaccgatttcagggcgcacaacgtgcctttgaagctgccgatgccagagccaggtgaactggaggagcgatttgccatcgtgctggtaagtgcgcggcggcggtcgggcgcggggacccggggccccgggccgggcggcgcagctgacccccgcccctccccttcaccccgtgccgggagcgagcctccattcccgagggggaggctcccgctttcccctttgtggccccccagcactcctcttcacccccctggcagtcccccgcgctcagtctctcggggtcccgggatggggatgggggctcagggccggctgcccaaccagcctcgaacccattgtctggctggagaggcacctcacggcgcgtgtgcccgggaggtgcggcgtgggcgtgaagagaaggtggcgcgggctgggaggaggaggtggcgagccgcttaggctttttttttaaaaaaaacaaaacaaaacaaaacaaaacaaaacaccctgagcccctgcggaccatccctcgggcggccagcccgggacctgcgaagtccccggcagatggggcgcatgtggccggccgcgggcgccgcgccgggcggtgagcggaggcgaacttggagggctcacgtcgcggcttggccaaggggagcttccccgaaagggaaagcggagacccacagcagtgcggcgccccggcccttggc

SEQ ID NO: 32732 - DNA, 741 bp, Homo sapiens; identical to SEQ ID NO: 30125
  chr2:160760627-160761368
  binary

SEQ ID NO: 32733 - DNA, 655 bp, Homo sapiens
  chr2:162094194-162094849
  hyper
cgggagggcccccccggtgcagctttccccggaggctgaggctgctgccagcggggacatctgctttcttacactccagcctggctcaccccgccccctcagccccgggttgcgtggttattttaccaacacggggggagggagagctcgaggaggtagaaaaggggtggatagaagcttagaagattttcttcccactccccccacgtcccctcctttcgtcacatcttttaaccttcaaggtaaagacttaaggaaacaataagcgtgtccgctggctcgcaggcccgccggggttctcgggcgcggggccttgcccctctccatcctccctgagtccttccccgagtcgggccgtgcttcggcggttcggctgggcgcaggggccggccgggcgcgcccagcctgtggcgcctcctctcccgggctgctgcctcgacagctgcttgtagctacagtaattagactgtcagtgcttgttagaggagagaggggaaaacacgcttctgacagcagattccaagactccccagtttgttaatttctaagagatctttaaagcattaattgaggtctccccaactctcccctcccgtccctctctgcaactcctcccttcccaaaaatatctttaggagaagcgagttctctcggc

SEQ ID NO: 32734 - DNA, 748 bp, Homo sapiens
  chr2:162271677-162272425
  binary
cgtacacacacacacacgttttcagtagcgattactgtgttgacaccacttccactctgtctccccagatcagcgcttctgacgagcccatttgcacggggactcggccctctcttttcctggcgaggcttttgaacctgtcgccaagccagtacctcagagagaaggaaatgcagagggacgagaaggatgcatggcgcctgcccccagttagatgttcttcagataatctgcaaccaagtgcgctgataaaatatttaataaagagccggtaaacatcactgcaaatacattaaggcatttcagcccgacagcttatgattatttcaaaacttaaaaaggagatcatagattgtcactgtttctgtactcaaccaagaaaccgaaccttcctgaggtgggtggattggtgggtgagttgctgcttttcgccccctctcctccccccttctgcttgtcgctgtggctctcagcagcagggatttatttatttatgtttgcagtttaaaaggtgggggtgggggcgccgaggacatgtaggatctgctcacaaagcaccagctcaggtgttgtgtgcttttgtattagctggaaaagacagactctggaacttttacagggcgagaagaggccaccggctcgcgctttgtatactttgcacttgaaatcgttacattcaactgaatatttggctcattcagatccgaaaagtctcctagcatcgtcgaattccctcctccgcccctcc

SEQ ID NO: 32735 - DNA, 854 bp, Homo sapiens; identical to SEQ ID NO: 26747
  chr2:162930102-162930956
  binary

SEQ ID NO: 32736 - DNA, 1300 bp, Homo sapiens
  chr2:166649931-166651231
  binary
cgaaacagagagagaggggtgtccgcgtcccggccacagagccctttccaaaccactcggaaaccatttaaatggctcggcggccgcggtttgcagcctagaactgtttggggtccccggctaggaaagttgcctggcaaagccatgtctttcgctgtcgcgggatgtcctctcgggcagagaggctggaggagacaggcaacctgctagccggagtggaagcgcgcccgcctcccgccgggccctccctctcagggtccccacgctgcgaccctcccaagggcaagtccggggccaccaggtctttggtctccgtccagctcctcaggggccgccccatagggactggcgggggcaccgtgggcgagagggtgtgaccgggctcccccccgaggcgccacctgccccttggcccagggcgcccctttcgggatctctccaggggcaaccgacacactgctctcgagaccgtctccaaccggccacctggaccgtagccctgtccccaacacgtgaacccctgcggccgtcctcccgcctgctctaacgcagcccaggggtaccgcgtctccctccgcctgccgccggcttacctggcgggtgggcagggcagggtggcgggaagcggcggccgggcaggcgctggacgtgggctaggcgccaggtgcaggtggcggcggctgcgactccggttgctgtcgccacagttgcggctcagtagagctcctcctccgccgccgcctcctgccttcccgctgggcctcccgcgttgcctggagaggcagaaccgaggctcggcttccacttggagtctcccaggtgagctccagcctgcgacgtcggcaggggcgaggccccacttccgcgcctgcgcgccagcctcccgccccgccccagccctacctgagcgctccaggtgagaaccttggatcgcgcgcgcagggtgggggcgccgtccgggccaagcctggctgtcgcgcggcttctctctgagtggtcggcgaggctgctgctccgcgcaagttgtggctcccggcccatctacattggaggaatcctgcactgacctggtggcagtgatcaccttgtagccagaacacagtctgctgggtccttggggaaccagaagttctagatttcccccacacggttcctcccttcctcctcggttcgccaaaatgaaggggtgcgctgcctccgaggaccacttcgggagggcagcaactgctggctcatgtggtttcttcgggcagggttcagcagcttctgtcaccagttaggtttcgtgagcttccttccc

SEQ ID NO: 32737 - DNA, 889 bp, Homo sapiens; identical to SEQ ID NO: 31581
  chr2:172947590-172948479
  hyper

SEQ ID NO: 32738 - DNA, 892 bp, Homo sapiens
  chr2:172951266-172952158
  hyper
cgttctctccctggtgctgcctccgccacccttcggtagccactcgctctcggctgttcgcactaaaggcggcccctcgtattaacaacgggccctacttctgctgtccctccaggggcggactcggagaagagcacggtggtggaaggcggtgaagtgcgcttcaatggcaagggaaaaaagatccgtaaacccaggacgatttattccagtttgcagttgcaggctttgaaccggaggttccagcaaactcagtacctagctctgccggagagggcggagctcgcggcctctttgggactcacacagactcaggtacctcgccgctgccgctccgttctgccacgcaggctttccgcggccggcctgcgcccgggtcttcatttgttgctcgctgggactcagggtcggggtgtcactgtgtgtatgtgtttgtgtccacccctggctctcagcgtgtctccttcctccctcattccctctgccctagctctgtcactgctctcggtatcccgagctgcctgccgtccggccctctgtccctggacaatctgattagggcgcaggaaggatttccccagacgatttgtttgggaactcagaggtcacacgtgcctaaacaactggaacaatagactccgggcttaatccctcctttgcctttaaattgtgtgactaatcactcggggcctgggtccgcgcctcagcctccctcctcctcctccttcttaccggttgggggtggggggagatcctttcctccgccctctcacctctcaagtcccagaccttagagaagaaacgggaccttccttcccggctttctgtaagactccggggagcccgtgagcgttcctgacggcggcgggcgcgggtttccgacgtccggtcc

SEQ ID NO: 32739 - DNA, 969 bp, Homo sapiens
  chr2:172965958-172966927
  hyper
cgagaggtacgggatttctgtccacccggtccctttccttccctcccacggcggccccttgggggtttccagctttgggcctagaagcttacttagggccgctcgaggcgcaggcctggaaatccttaaaagtacttaaaatgaactttaaaaagcattgtcctaaacccgcctgcttcccagccatctcaggcccgcgctctcctcgcccctgcagggcgcgagccccacctgagtctgggtgaggcccagagaggccgccagctcggctcgctccggcaaggccaagtattgagtcttttggaaacgccgctgaagagccgccagctggaaactggagtagatggtgcggggtttccggactttctttggcttcccgttcactatccgaatttcaggctcaaggtcctccttctctgcaacgataaagaatcgtaagaacagcgcaacccaggggtcctggagttcccgccctcctagagggcccggcgggggggacttggcttgagcaaagaggtgggtgcactgaactgtggcgccacgggcaggcgcaacttcgcagcgtgcgatcggagccgccaccgaccccgggagctgtaccctccagggaagggggagacaagtgcacacccaagagaaagaagctggtggcaaggagatgcccttatgaggcaggcagagcacgcccacttggctcttgaggccaccaggtcctaccaaaggagagagggacgtaaccggcgacctgcggcagattggaggctggggagggtaaagggcacaagcgggcggtgagcaggcagcgtgaaaatccagagctttcgaaggccccccgccccaaacacgtttacccatccatcccattaactagaccgactcggcactcttgacttcagcgttatgcataccaggctcgttgttggctggggacgaactggttccatagggagcgtaggaggtgtaggcggc

SEQ ID NO: 32740 - DNA, 820 bp, Homo sapiens; identical to SEQ ID NO: 23189
  chr2:173099596-173100416
  hyper

SEQ ID NO: 32741 - DNA, 1045 bp, Homo sapiens
  chr2:173600371-173601416
  hyper
cggccaccggggtcgccacccccagtgtcccccagcagcgggaccgcggggtccccaccccggggcggaatccccacccacgggcgccgcagtgcagcggcgggcgggcgggcgactcggccctccccgcacccgcgtcccgccccccgggtcccctccctctccccaccgccccaggccgcgggagcccgcggggagggcgggcctgtcgcagccgcgctggtcgccaggcgtccgggaggagcggggtccgcgcggcggacgaggcgggggcggaggcgcaggcagagcgagcgcgggaggtcgccgcagccagggacaccgcgcgccgccgctcaacatggtcgctgcgcacgctgcccattcttcctcctctgccgagtggatcgcctgcctggataaaaggtagctcgccgggggccgcagccgggggccgagctctgcggtgctgcccgggccctgagaccgccgcagctccgcacctgggcgcagcgcggccgggctgcgggtggccggggtccccgagcgggggaaggggttgaggtcctcgtccgggagacaggaggacaaggatccccgcctctcgtggggtgccagcggcatgagattattacacgtggtggagaaaatgcagcgcagtaaggggagagagcacccacctctccaaccccctgccctgccgcgactccaggctccgctcctgggtgggggtttattttctcttggcatcacgggacagaagaatcgatgcataccctttccggctattcagaccttgcggggtatgaagttttaaagaggggtgggggcaccggcaggtgcagagtaacattctttttttgttcttgaaagcaaagtgtgagggacccggtggagctgtcgaatcccttgctgaaattcacagctctctgcccccgcagtcgctcgctcaaggtctgtgttagagaaggtcatttgggaggctgctttcgtcttaatacctgcttctcgggaaaagatctttacgctaaaaataattaaaaccataaagcatgtaactcccgac

SEQ ID NO: 32742 - DNA, 1355 bp, Homo sapiens; identical to SEQ ID NO: 25439
  chr2:175190730-175192085
  hyper

SEQ ID NO: 32743 - DNA, 985 bp, Homo sapiens
  chr2:183731188-183732173
  hyper
cgagccccgggcacccggagcaggcagagagcagccagggcaagcagcccggcccgcagcagcagcatccctcccgggctgccgcagaccatgatcccggcaggatggggcagggtgcagccgcgcagtggacgccaaaaggcccgctccgccgtctccgcctcccccgctgcaagtggacacaaggatctgggagcttctcctcccccggcaatcaccgcttccttggatcaaattcccccaatggggtcccacgagctttaccgagctccagccaccgcccctgccgcccaggctgctctttcccaacgtctaagccttcggaagcagcaacatctatttattcctctccctctggcagaagcatcagacttcgcagatcagtcagataagagggacacgagaggaggcgaggaagacataaaaacaaaagtagaattcagctgagagctagttggagctctggggtgtctcctcccctagatcacgcacacaaaaagatgctaaagaaagcattaaattccccaaagtgaggaggacagaggggttggggggaaggagggaggaaaagctcctaatgggagagaagggtgcagtaagagtttacaagtcctgtgtgggctaagagctgcggccgccgctgcggctgcgaccctggctggcaggagggacgctcaggaggagccccgcagggacgtctgtgcctctgcccgggcggctctgcactttcctacctcccgcctgagagggagctccgcccctggggcagtctctgccctccagtgccggctgctcttcccgagaatggagtgggcgcccggggaagagaaggcctgggagtcgcaggcggtggggtgcgaagccgtgcgagtgcgagaccccaagacagcgccgagtcgagcgcgccctcacactagggaacccgtctttggccccagaaacgagcccctagcccctcactgaagagcccaccccaattccctac

SEQ ID NO: 32744 - DNA, 892 bp, Homo sapiens
  chr2:190445496-190446388
  hyper
cgccgccgccgccgccgccgtgggccgggcccagctcttataccgagtcgggggcggagctccctgcgacctccgactggggccgccccgtccccttcagggccgcccgggcgtccccgcggcgcgagacgagctcccgtcaaccttgcgcgccgggccgtccccgcgcccttgcccggaggagtcgcccaccccgggcgcaagcgtccaaccggccgcagacaccctgcgcggcttgcggggaccttcgcctcgacgcgttccactccccgggttttcctgctctccgggaagccgcgagggcaacctcggggggcggccgtggggctgggaaaaggaggaaggcgcgtggagccggcggggcggcgtagggagattctgcgcgaaactaagcgtcaggtgctggaagaaagcgctgcgcaccggctaccccgcagttcagggaaagggcggccgccggacggtcgcagtgcaaagctccagcgcgagcttggtgggtggggattccttttttaacgaaaataatttttaatacaggtatctaaataaatataattcatgccacagaggccgctttcctggccgtcccattccggcccgcctgcagcagagaatgcctttccttccccggactgcatagcagggcttccctcaaagaaccagaatcaaagggcaggaagggggcgcaaagatcagagtccatccctcttgagaggagcaaacggaggcttgcaaaggtgaagtcccgcagcgagttacagacctacccgtatccccaaactggggcctccaaatccgtcctggagacagaatgaggatgctgcagccccagcaaacccttcaccatcattccttctccctctgtaccctctcaccccgcccccacgcgcgc

SEQ ID NO: 32745 - DNA, 834 bp, Homo sapiens
  chr2:192015084-192015918
  hyper
cgttgcttctgaaaactcagtgcctgtctgtcctttttgcgtgcatttcctagaagatcccactaaaggggcattttgtcccaccgtctgtgagctggtggtgccgctttggctctgtggcctgtagcttgcaaaaggagatgacctgccctaaaatgtcactcgcgcccatcaaagccacagtcaccggctgccgtagctgcaagcttttttctgaaatccaggtacgctaatctaaagtcagacatcacagctctagagaagctggctaagaaagtgaagaggggctcactttcagcctccgcgaggacacacctccgcagccgccgcagctcccctggcccccgcagggagattcgcccgggcaccgtggcgcgggcctgcggagcggtttccgcggagaacccgtgccagggcgcatctgtgggtcgtggagtcgggcgcttccttctataataagcctcctcaggaaggttaaaatgaagcaattgtcaaaacgccaagggaaagcaaagcttcagagtatcctgcataataagcatgtcctccttacaagaggcagccagaaggtgtggtctggccacttacctagcgctctctcagcacaggtcccaggcagtgctcaagtccaaagtcagaagcgcccctcacagtccctaggagaaagccgctgacgccatcatcagtaggggatttgcatttctcctcccacttgaggctttcctgtgcgtcagtgttcgagtctctgggactttacttgggtcagttcccacccactctattctagaaatgctaacacgcagaaactgccaggctggagccccttcaccgggc

SEQ ID NO: 32746 - DNA, 897 bp, Homo sapiens; identical to SEQ ID NO: 14845
  chr2:200320451-200321348
  binary

SEQ ID NO: 32747 - DNA, 754 bp, Homo sapiens
  chr2:202897429-202898183
  hyper
cgagaacaaaagaacgtttgccaatcagaaaacgctacccgagaacgaggataaccccgctttgtgttttgaaaactctttaattagcctggtttctaagacgcattaaaacattcctacgcagattctaaatggaggatcaaatggttgcttctgcaacgaagatgggatcccgaaagggcacacgccgcagaaccaaggcacacggggccactgagacgcccggcgcgtcgtacagagtgttcctgggcgctcggtctcaggttacttctagaaccagtctccccaacgccgtcttcgtttccttaaaacctcgctagagtcaccccagttccccagactccaggccgtgcgcgcgggcggggtggcctgagcccgggttccccgctctccctgcttcgggcccttcctccgaggggtccttcctcccgccgtcactcggccccctccgcccgactcgggtttctcctcggaggcggcccctcctcctttttataactcgggggaggggagaggggactgtggcctcgcgtggactctttgggtccggggggaaagaggcgatccgcaaggcgcacccccttctcgtcccgtcccaaaccccacattgaggacccggcgacccgaaagccccgccagagccagcctttgcagtcctaacgcgactcctggtcacgtctctccccgaaggggcgctgcgcggtcctcgctcccctcaaacgccgctggcgaaggcgcccctgctcaggaatgc

SEQ ID NO: 32748 - DNA, 901 bp, Homo sapiens
  chr2:207307406-207308307
  binary
cgtggttgacaaacaacggatttcccaagatagctgccacacacttggtttctaatctctgtattgcttccccgccagaatgtcgaagtccttcccgaatatgcccagtcatactttctgaacttttgagcaaacaccgtccggcttcttgtgctttcctcaaagaccccaggcaccggcagggaggacacaggccggggcagagcgcccctgcgcgggggattcctgccactccgcgccagcctgcggcgcaaacgctcttctcagccgcagtcccacccgctgctggcaatctgaatgaggagccgcgctatttttacctccccggctgcaatcctttatatttacatgcaggaagcaaatatataagggattaagaaggagatgcgtggccttagtttatccagagcaggaagaggttggaataggagagggtatgtgaagtctggggtggtggaaaaggcaggtggacttcggctggttgttttctcccgatcatccctgtctctggcctggaaacccccgtactctctttcttctggcttatccgtgactgccggctccccctccaccgcccccatcttttgaggtaccacccgtcacctccgatgctgcttgggctgctgcatcactctgctgctttacccccttccccgccccccaacaaagcatgcgcagtgcgttccgggccaggcaacagcagcagcacagcatccagcaacagcatcagcacccgaagccccgctcgggcgcgctctcggggggcggggcgcacgcccgctccgcgcgtccccgcgccgctcgctcccgcgcgtccccgcgccgctcgctcccgcgcgccgcctcagcatcctcaggcccggcggcagcccccgcagtcgctgaagcggccgcgcccgcc

SEQ ID NO: 32749 - DNA, 973 bp, Homo sapiens
  chr2:217556802-217557775
  hyper
cgcccagtggttgtccggctaaaacgccctttccaggagcgcccactcccatcccatctgttcgggaagaagatgtcggcaccagcagcggtggagcgccgccaacccgcaacagcagccggccgggcacctgccttcggcggggtggagtcggagaggagtgctggggagggggcgggtagaagaggcggcttcgggttggcccaaaggcactcagaaggtgggggttgagcaaggggcggcagggaattctacaggggatcttgcttgggactgaagtgtcgtgtgtgtgtgtgtgtgtgtgtgtgtgtgtgtgtgtgtgtgatgcgccctccgtgctcgcctagcaattgcgcgcgcgtgcgctctgcgtgtacacccttcacactagccacatcacactacacgcttggtaaataataagtggagccaggatgcggctgagtgacaccttacgttctttcggtgtgactggattgttacccagggcggtggctcccaagccgggaaatcaattaatgttttccttctccgctaggcttttccaaatccacatcccccaagatgaaggcgggcaggaccgcctttgaaaagtggatcttaataaaaataatctcacaagccggtctctggggttcccagagcctgcacatcctccccttttcctctttttgcaggctgcaacctgcaaaaagatcgactttttgcaggtttggagatcgactacctcttgcaaagctagaggggctggcccctgcgccactcaaaccctgcagggtttgcggggactgaggctgaacacaggaagctctccggcctcctggcaagcgcggacgcactcctctcctgcactatagtgactgaaatttgcacttcagaaaactcatgttagggtgctcgtgagtaacggaaagggacagggagggagaaggggattgcccccgtaactaaactgtctccgtaactaaactac

SEQ ID NO: 32750 - DNA, 86 bp, Homo sapiens; identical to SEQ ID NO: 14852
  chr2:217558012-217558098
  hyper

SEQ ID NO: 32751 - DNA, 1116 bp, Homo sapiens
  chr2:217558872-217559988
  binary
cgaataagagctcagaatcagtattcggacagagtagggggagggggcgggcaacgtgtgggtaggaggaaggagaaagagcgaaagctgggatagactcggctagacagttcccccgggtagcaggatcctccagggctccaattccggggtgcaaggaccctccccgactactcccgagctgcaccccagctcgaagccacttgctgcgcaaagcgcgcgggcccagccggtctcgtgtcccccgcccgtgcgccgcgtaactgactggcacactgagcgcgctcaccgatcttgacttgctcgcggtagctcttttcgttgaggcaaaccccgcggccgtgcagcagggcgtgcagcggcttctcctcgtcctgccgggggaggcagcgcagcccctgggcgcagcgctcggtgtagacgccgcacgactgcccctcggccagggcgcaggtcatgcagcagccgcagcccggctccttgaccagctcgcagcccagggggctgggggggcacatggagagggctttctcgtcgcagggctcgcagtgcacgaaggagcccaggctctgggccggccccgcataggcggccagcagcaggaggaccgcggtgagcaacaccatcttctcttagtcgccccctttacctcggggtggggcaggagagcgagagtgcagggataaaggggccaagagggcccccggagatttttttgtttttgtttttgttttaaaatttctggcaggtagagcaggtgccctcccccagacacttgcaaaaatgtagagagaggtggagggctggggtgcctgcgagcaggtcccagttgcaagaattaaagccttgcaacaggttgggggaagcagggcagcgccaggtgcacgcagtgagcggaggccggagaaaccctcaagcctgagcgggtcagaattataggggaaaaaaagccacaaaattgttcacccccaagcaaccaccgaaataatgagatcggatgcagtggagatggcgttgggggtgggagagaaaaatggatttatctttaaaatttttgcttaaaatctaaaatacaccccgctttctaaccctcagctgccagcggtgcgcggcgcc

SEQ ID NO: 32752 - DNA, 1346 bp, Homo sapiens
  chr2:219866306-219867652
  binary
cggcaggtgcctgcgtggcgatcaggccggcccccgggctggtgctgagaggccgcccctgcctcacgcgagccgaacgaacaaaacgctcaggtccggtttgtgcgaggggctcgtcgcggggcgggagcggagggcccggggcctggcggtcgccctcggtgatctcctggtcctggtcttccgcgagctcagtgctgcacagcgccccgctagcctccgccctcacctgaacgcatctgcggctgacacgtcggcggccgcggcggccaccgcaggtgcgcacctggcccgcccctcctttcccagccaccctccgcccggctttcctggcccctccgcccggcccagcctagcttggcttcgtccccagcccacgccttggagcttgtcccggagcccgggctccgtgtgctcttatactgcctgttcagtccccgcccccagacacacacactcacacctgtccaggcgcccgtttgctcggggcaaatattgactcatggaggcggagcgctcccccctcccccgcccgggctctgagaccggagcttctccgaggccttggtggcgggggcggaggggagggtgctggggaccctgggcgcctctggaacaacaccagatgtcacttttccacccacctgcctctgggagggaggagccgagaagcagaggacagaagctcccgggcgggggttaggaggaaccgagaggtgggtatccatcctcgtctgaggactgattcacagtgggagtcgcttagcagggtctgtggcccgaaatccagtggtgacctcgacccgccccagcctagttcctggccctccgcggcgtgcctcagttcttcctccccagcctcttgggcactcggagctcggcaaatgctaaggggctggccctgggggtgctaagcctccgagcaggcgcggcgcggaaaggtgaggggtggccgccctgcccagtggacacctgcttcgctggccaggcctggcactcagttactgtgcaccaaggtgcgctggggcaaaggccagccaggccccgtccggagcgccctccactggccagacccggtccagcggccggcagctagcggccaggtctcagtccagctgcagtgtgggcggagaggtgcatcctcccgggccctaagttcccgccgcgcctctgcagtccgcccgggctgctccctgccatccttccctctcagagctcgcgcgcgcgttccccctcgtcggggaaataaagtcaaggtagatacagaaaaaagactagatgcttttactggcggtggagagggggccaggcgtgacccctagcggcatgtcggagaggctgggcgc

SEQ ID NO: 32753 - DNA, 464 bp, Homo sapiens
  chr2:219922768-219923232
  hyper
cgcccggtccctctgtgcctccaaggcaggagggccagccagcggccgggagggaggagtggcagcagagccgactgcctgcggccggcctgcgaggcgtgcaaggcccgaggtgcccagtaggtgtcaccgcagcctcagggctgaggcctggggacgacaggctctggaggcgcggcaggtgcagagcgtctcggtagcttcagggggtgtgttggaggggaatcgccggcctgcctggatccctcgagcaccaccgaggattcccgccgggaccctcttataatcttaaaccggcccacaaccccgccagagatgacagggccagggaaccagaaaccggcggattagcgccagggccgcccaatggggggccacatgcaacgtcttcctctgcaaggcgcaaaaggggctgacaatcccagacctccaggacctctgcaccggtgccccgcccctatacc

SEQ ID NO: 32754 - DNA, 948 bp, Homo sapiens
  chr2:219924173-219925121
  hyper
cgtccccaccaccaagcccaggaatcccctaagctcagtcccagagcccgaaggccccaataacccacccttccaccgcagtagcacccctcagctctccggacagacacgtgggctcgctgggcaggttccttttcccacctccgcctcccgattcaactcttcctcgctgttcttaaccccagacccagccgggacgctgctcctggaaggggcagcccgtagaaccaagagcgcacagggaggaaaggccgtggtgaccctacgcacccagagattctttgcctcaggggtgccgaaaagtttcaaaatgaaaggggcacagctgtgcagaaggttaggccgggagggactgcgtgggtcctggaggcgcaggaggcagccgggtagaggtacctccgggtgcagcgtctggctgagctgccagtactttggggcagaggagccgccgccaacctgctgggctgtggggcttggcagcggggagctcttctagcagtctcctccgggcttggggatgccgacactcctgcctggacccctggccagcccatcttgggcaggaggcagcggggcttggcgagaggggcaggtgccagggagcgtgccagccagtcgagaaaatgtgccagggggtgggtagggccgggcaggtggccgtgcttcggtggcggcgcgctggtagggcggatcgcgctcacctgggtcatgaggcggtcggcgcctgtgttctcctcgtccttgaagatgatgtctggattgtaattgggggtgagctccttgaagcgctcggagctgcgagcgatcttgccttcatagcgtccgctggcgcccagggtcttctcgggcacattggggctgaactgcttgtaggcgagcggcacgagtttgcgtggcggtcgccggcggctgcccaccacccgacccggcccgcagccccatgccgcc

SEQ ID NO: 32755 - DNA, 785 bp, Homo sapiens
  chr2:223165449-223166234
  hyper
cgttggggccaccaaagcctgtgtccgtacgttttaagccacttctcagcgatagcattttgagagctagactttttccaagttttcttcttcccaaaggttaagcagagtcgacagagcactttctggggtcagcggtaattgctgtgtgaaggaggtaccagaagtgtaatttcaagaaggcaaaagtaggctcaactctcagctaaaataaactcttggaccccgcgagcagttaaagaacatctagagctgagtctcatttgtttttgagccggaggcttggtctccaagccctcccagcgtccacccgtctctctcctgccgggagttttctctcctaagagccggcagatgctggagggaagcgcttgctgcaagattccttctcccggtcccgtagattgcagagtccgcgggaccgttgaacggaggtactgccggctgagctgggtcttaagtgcccatgggttcataaactagctgtcacttgctataaacatgtacaaatggaggccacaaggatgtgggggtgctggggacctaaagctccggaatcaggaggcgactcattttctctcctttccggcctctttcttttctgccgagcgctctgagattcatatgtacccagatgatcagcccggcccttctcaccggccagtggccagaggtccctggacacccggagaggggtgggagggcacccttaggctctggacagctgggccacatccaaagacttaatgaatctaaatttcttgtggcctgtgtccccgaagtcc

SEQ ID NO: 32756 - DNA, 812 bp, Homo sapiens
  chr2:223166805-223167617
  hyper
cgggggagatagcttctattgtcccctctgcgcctctgcccccagtttcagagacactacaggtgaaaataacagcgggctggctgtccaggcctgagtggagcgtgcccttgttagcttgaaagttctccctcgcagcccgtttggatgcgtgcgtctacagcccagtcgcactttggtgaccggcctgggctgtgaagcaccctttagcgaacagcctccgcacttggggacactggcacaagggtttcatggcccgtggacttctcagggcctctgagggttgacttcatactcagccagacacaggtcttaagaggaaattatgatctatgcaaaataatgtccctgacctagtggggagcgggggtggtgtctgccacccagacctttttcctcccgtctgaagggccgagctctggcaggctgacacggtcgagcagagaagttcctggccacccgcccggccccaggcgtgattctcaggatgcagtaaaagttgggcaaacgccgagaaaccctcaatcccacagaaaggctgccgggggctcacggggaggacatcaaaacgccaggttcgtgatcatgagcttccggtccggatgtgatgatacaggattggtgaatgcccgggttaaacccgtggtccttcgcagccgctgcctcagtgacagtcattaggccccccgcagttatttgtcaaaagcattggcgccgctcttctccccatcgaaaaatcagtcgggatgagttcggattaagggactagatgaggatgtggacatcccattgaaacatggtgtaggccagcc

SEQ ID NO: 32757 - DNA, 980 bp, Homo sapiens; identical to SEQ ID NO: 26776
  chr2:223169440-223170420
  hyper

SEQ ID NO: 32758 - DNA, 1894 bp, Homo sapiens
  chr2:223170463-223172357
  binary
cggggaaggatcaagaggttctgcgggaagtgtgcggggctggggggcgggggtgcccgccaatgtccgcagaaggcaaggaggcccactcgaggagggctggatggagacagacttgagtcgggccctgagccccagggagtgcggcccggtagatctcggggcgaggggaacaggatcgggtacacttgatccggaacaagaacgcctcggcctggcggttgcccgttagtcccggatcccagcggccgcttcaccactgagcccgagccgccgagggaattttccaaatgcaaatcaaacacccttggcgccccgcttcttcattaattaagaggaacgtttcgacaaaaccggcgtaatctttattaattacgcagcccttagcgcgccgttcgcatcaatcacgcccaaagcgaaagtgcagggggcgcctaatcccttcccagagcgcgtttggagaaggagccgcgtggccggcgtttccaccgtgacttccacctttctgggctcgcctggcactggctgctcagccggcgcgcagggaggcctttccggaaacaccggctggctgcgcgctagcaggaccgctctagatcccctgacaggccggaaaataacccccactcactatttgggcacgcgctcgtacgcagaaactcgcacagggactcgcgtggacactttatggcccatttcctccgtcccctcacccttaggctcagtggggaccacgcggttctcagtcctcctcttccctaggaccctctaaaaaggagcctggggcgaaatgacagagggaggcagaaaacctcctgttgccccaggacgccccgaaaaactgctctgggggatggggcggggaagaccttagaagttgtcagggcgaccaactcctcccaggtgaccaggttgccataggaccagcacactgctcaggagtgagttttggggagagagagggatcctccagttattgccatagagaaccaggaaagttcgcagcctccgggtcgcaagtgggaaagttgactggagattgcggttagagggggtgggtgcaaactcagggtatttccgggtagccccgcagcagtcttgtccgctgaaggcaggttaccctgggctttcaagggaaaacgccttggggcggggtgtcctgtgcgaccacctctctcagcaaagcagggtttgacctcttggcctgaccttgctccctagtcccaccctatactagtaggtcctaacctttctgcgctttgagcctggaccatcgtcccttcaagagattctactggataaaaaaaaattataaaagctggatcaagcttggcgtcggaggtctggccctcagctggttcccaccctaaaggactggcctgcccaccctcacgtcctcgggcgcccttggctcgagggcctttcggagcctccgcgggaagcagaaagtcgcacctcacactgagcctttccttcgagcgctctgccgggagctactgagccccagcacgcagccttgggcacccggtggcgggcgaaggaacctgccccattgtgctgctgggctgcactagcggagacgagagtgcgtgtgggagtggcccactagcaccacccgccagggtttagcagcgcctggagcacctccctcttccctgctgtttccttaatgctggagctgggcacactccgatgtcccgcattctcacattcaatcattcattctccctctgaaagttctcaggctcctttgctcacgggtcgtctctggacctgagacacctgcgaaccttgcggatcaccagattgttttattgttcctctcttcccccactgaatcgtcggccgggctagtcttccagtttcgcctggagtcgattgcactctggcgcac

SEQ ID NO: 32759 - DNA, 877 bp, Homo sapiens
  chr2:223175977-223176854
  hyper
cggggaacatttattagcctatattgccatgagaaaacaacttgagacacttcagcctcaaccctcctcctctaagtcggtcgggacaatggcaggcggaagatgaagatataaagtaagaattctaagcttctcgccttcctgttacagccgatctgctctgcatttggaatgcggcgtctttgcgggcgttctgagtcattcctactccgctgcaagccccgcagagaacctcgccttcttcccgaccgccaagtctgattgtacagacttcatagaaggtctggaataaggactgtgttgctgcagaggccgggtcttgggcccctgggcgtgaggacgcaggctcggcccctgggaagaaatgtactaacgcacctcaagactcctaaggtgtttccaagtcccccctccaactttcgtgtccaggtcacgctgccccgccctcggacaatgagagggtgtgtcaagatgctctttgcatctttggaagccgagggggaaataggagactttcgacggggagcaggttttccggagccgtttggggctgagattctcgaacccctgctgggggccgaaagcgccggagaaacctgggactaaacgaaggcgactccccgcagggcgcaggcaccgcacccggcgtttgttttattcttaatttacttttttgggcacctctgctattgttacaaataaatgcgaacgcggagctttcgggcgggctctgggagcggcccgtgggcatcttggaatattaaaaacgtcatccggttgtaaataacctactccccagcccttgaaatccgggacgtcacaggtgaggctgaataccaggttcgcacaaaggcaaaccaaactcagccgggatgcc

SEQ ID NO: 32760 - DNA, 421 bp, Homo sapiens
  chr2:223185036-223185457
  binary
cggccttctcaacgcagctttcccagcagcttaggatatcggtttttgttggacttgaaattgggagttgagggcggcctggaggcgctcgggaaggagatttggggtgcggctgcttataaagatgttgccttttaccccagcagtcccccgccccctacgcggggtggtggcaggaaaccggttcctgagttttccttctttctcttcctcgacacgacctccccaccagtgtgtttctgtttatcctcctcgcccgggggctgggtccctggcgaagcctcgttttcacccacccacccccaagccagagctcaccagtgatgtaatgcgggacccgcgcggggaggggaaacggcagcctcaaccgcctggcagcggcggtttcttctcttcgtgaaaatcgtgatctcatctctcc

SEQ ID NO: 32761 - DNA, 1340 bp, Homo sapiens; identical to SEQ ID NO: 14864
  chr2:223288948-223290288
  hyper

SEQ ID NO: 32762 - DNA, 163 bp, Homo sapiens; identical to SEQ ID NO: 14865
  chr2:224702626-224702789
  hyper

SEQ ID NO: 32763 - DNA, 321 bp, Homo sapiens; identical to SEQ ID NO: 31624
  chr2:231902837-231903158
  hyper

SEQ ID NO: 32764 - DNA, 1262 bp, Homo sapiens
  chr2:232790830-232792092
  hyper
cgcctctcccaggctcggcgtccccacgacagcacccaccttcggcggcgccccgggcttggcttcggagggccggagggagagcagcgtgagcagcagggcgcaggccagcagctgggagagatgcatggtgccgctggggtcgaggggcgcacacgggcggcagcgagggcgcgcaggtcggcgggcagaccagcagggggatgcggagcaggctggctgggctgcagggcgagcagggtcccagtgctgcgcggcgccggctgggtgcgctctgagcccgtgactctgctcgcgcctttataatccaacctgccgctgatgtcatcctcccgcccaccgggccgcccgggccaatgacaccacgcacgcggccgcgccgagggccgggagggggccgcgggggctcccctcccttatcccaccccggagggatcccgcggctcggcgggctcgctccaggctgcacttggagctgcagagctgagcgcacaggggaactccatttgcagcgagcgcgcgccctggcctgccgagcatcggtgcgcctggtgccctgtgcacccactaggtcctcatcgcactcactctacctggaagggatacgtagccctctttgcaggtgcaaagacaggctcagaggaatgaagtcacttgcccaaagtcatacaggcataaagttggcgctgcccgaaatccacgcagccctgcttgtcgccaaactcttccctgggcacctgacagccgcgggatggcattgcagctccgcctttcacctgccggtcagggcgggagcgcagaccacagcgacgtcgttaggttggggaggcagaggatggggttggaggactggggtgggaggcgcagggagagcggggttcgcctgggccgcaggggggagcgcaagtcttccacactggagagtgcaggggtgtcgccagcctgagtgtttgagcgcaaggcgggaacgaggggactgcgagcgcggaaccaagatattcatgctcatgcgtgtgctccgcggcatcgtatgctcgccagttactgctctaggttcacgttcagccggtttcggccacacagaacgtcccggggtctgactccgctggtgaactccctctgtgggaacaatgcgcacctgaccttgcctgcacccacgcgaggatccgctgctgggggaagcccgctccagtatcctgtgcactttcacaggctggggagagagcttcctagccagcggcccagtccagcctctgccagcc

SEQ ID NO: 32765 - DNA, 1198 bp, Homo sapiens; identical to SEQ ID NO: 25454
  chr2:233740556-233741754
  hyper

SEQ ID NO: 32766 - DNA, 967 bp, Homo sapiens
  chr2:23609309-23610276
  hyper
cgcacacttcccttgacaccttgtgggtgccagcgtgttgtggggggacgcggaaaggagagctcacggggacggcgaagcggccaggaggtggtgtcgttggggaggggttgttgatgtgtgggacagggtggacctggagatgtgtagtgtgggagtgtgaacgcgcgccccgatggcctcggggggccgggggagcccagggctcgcgtcccggtctccgtggcctggagcgggctgagagcgctagggttatctgcggtcgccgcgcgggtgcccgcgctgggcagcgtcggccccgggccccaagggagggacgtgctcgcctggggccggagcgcggggctgggagccggggtaggtcggaggtggctcttagggcaggtcgcctctgcgttgcctggggaaggcggggacgcgctgcctgcctgcggccagccgtctcggaggagggggtggcggccacgcgcgagtctcggatgcctgggtccacccgctgagaagccagttgtcgtccctgggctgtggaaccaagcggcagacgcggtccgttggcgggccctcgcgcgggcccccagagatgctgatgggtaaggagctgccgccgccgccgctgccatccccgccgctctgcaaacgttctcctccctccctcccgtgcttgcgccgcggcgcgccccgggcgaatcgtggacgcaggtatttatgtagcattaggcgagacctcggcgctggagggaccagaccgtggaggacgccgagctgctgctgcctgcgaaacttccacttcggcagctcagcggcatcccggcccgctgctgcaggttccagcctctctccagtccagcaacgctgggattcggactcctcttgcaatgacagatctgtcctggttacggctgtatttatactagtttcagtctctttaaagtcatctgtctagtcactacagagtttcttcctcgcc

SEQ ID NO: 32767 - DNA, 1241 bp, Homo sapiens
  chr2:237081197-237082438
  hyper
cgcaaaatagaaatgtgaaggggaggggcttttcttcttcttcatttcctcctgggagttgaaaaatgttatccgcaggcctgaaggctgggaaacgtgacccttcacacctgcgccgccctctccactccagcgacgaggaacaggaggagccacagccgctcggcccgcgaggcgagccctcgtggcatctgggaatgggagggtgggggtggaatgctacacagccccggagcccctggggcggcgggcgctgtcgcgccgacggcgcacccggcgagcgttgcgtgcgcttggagcccgggactaccccaactccacgcggaactcggctcccccggccgggatccagatgtccgagggcgcttgcgggtgtcctagttctttttcagagcagccgtaacgattgaggctggggagttcaagaccactgggggtaactgatcgcccatcgcccttcgtcctggaagcccagcgcccgcgctcaccgcgcgtctctccgggagcacctagccaggcaaagggggattctccgtggggactgaggcgtacgcccgccccggggctcccggcttgggaagagggagcaccaggcgaaggccaggctgggggctcgggtccaagggctgcagctgtgcgggcggaggccgggggtgcgggcgggagtggtgtccccttgtgtcctgcccgggtctggctccggccggggttctggaggccgcgtccgtcggcgaaccccagcccttggagtgttggggagggagacgccggccgccaggcgcttctcacctgggtttatctcctcccatctgctccctcggattcccgaggccccacctttcggggacttcaaacgcgccctgccacccggtgcccggctttcatctcccgcacagcaggcattgtttgcgggacttcacagagatgctaatccccgggccgcgtgaaccgcggcctgggaaccgggcagagggcacggaggggtgagggggtgcgctttggcctgggctggggaccttcgggatggcctctcgggcagccctcctgaggagcccgggtctgctaccgtgcgggcgccgcatcccgcctgcctcgtcctggaaggctgcgggcacgtcgcaatgggcctgggctggacgcagccagcgtccaacacacggagaaggaagaagcagaggccagagacgatggccggcgcttagctgtgagccccatgagcttccaatgctcgccaggagacc

SEQ ID NO: 32768 - DNA, 825 bp, Homo sapiens
  chr2:237087637-237088462
  hyper
cgagcaatctcctggctttaaattccgaataaaagtctcaaatattcccgggtcatgggggcactgtctcattaaaaccactctcgtcctgaaactgcaatgcagacattaaagtgcagtatttttcaattagagctgacgaattcaatcaaaattccatagattaggatgaaatgaggcatgggtcatttacaggggaatttaattgccgagccattagacaaatagtatatttgccattcccgcgttatccatcattttcgacatcaataccggggccgcatctccccgtcccgcggccgcccggcgtcggctgtaaacactcccttccctgtatcttctgattatatctgatttcatttagggccatgggggattataaatgttcacgcaatcaagttcattaggacttcaaatcgcatttctgattgggatcgctctgccgccgtcctcccagcgcctttcaaaccccagcgcttggctttcaaaacatctttttgaatttaaagcctcacatccttttgtcttccgacgccccctcccgccccacccctcccggcggctgcaagctcttcgggcctccttcccggggcaacagccctgaacccctcttgctgccagcgggtctggggagggtggggctgggctccgcaggctgtcggaaccccctcccacgccgcgcagccgcggggcgctcgtgtccctgaagcctgagctgggcgtggaggacaggccccgcgtgttcgcggatcgcgagtgggggccagccccgcacctcccgtcccggccgggcgctgcgggtagggggagcggagcggagggggc

SEQ ID NO: 32769 - DNA, 137 bp, Homo sapiens; identical to SEQ ID NO: 14875
  chr2:237999682-237999819
  hypo

SEQ ID NO: 32770 - DNA, 477 bp, Homo sapiens; identical to SEQ ID NO: 14876
  chr2:242350123-242350600
  hypo

SEQ ID NO: 32771 - DNA, 101 bp, Homo sapiens; identical to SEQ ID NO: 14877
  chr2:242618731-242618832
  hypo

SEQ ID NO: 32772 - DNA, 835 bp, Homo sapiens; identical to SEQ ID NO: 27882
  chr2:31456697-31457532
  hyper

SEQ ID NO: 32773 - DNA, 295 bp, Homo sapiens; identical to SEQ ID NO: 12622
  chr2:364121-364416
  hypo

SEQ ID NO: 32774 - DNA, 1338 bp, Homo sapiens
  chr2:38302506-38303844
  hyper
cgttcgggctgaggctggtgcccatgctggggacagagaggagaaggcgtgacactcaggggtgcagagacaggagcgggcgccccacgcccctaccccagcctctggggactgagtgccgttgggtggagaggtcggagctgactctctggagaaatggccgaagacgccccttcccatccccaacccactctcccttggagaagagaaggggcgtgtttccacctcgctgtaacccagcgccaaacccttcccctccccgcaaggcgcgtaacggttcctgcaatctggggacaacgctgcgggcatcgaggcggtggcgcttgatttcctttaaagtacctaccacgccacccgctacctgtaataatccatctgaagaggtcgccgggcagcgcctcggcagacagactgacctgcggggaggtgcggtttccagtggcgcgggacagccggctccgagaaggaactgggacctttgcctagggcaagacgtcaacaggaacccgcagcccggcctggacacctgctgccctcactggaagctttaactcccactcgagtctcttggcgtcgtcagtgccaggagcgcttggattgggatggggacggagaagggtgcctcgctcgccgagccccgctgcccttggggacctggcaaagtcgaggtttcctcacagcgttgagattgagactgggggtcggtgagtggcgtcaattcccatgcccttgcggctctcacaactggagtcgcagaagcgctcgctcccactcccactccagagtcaaagcgcgccatcccgctcctccgggttttaaggactgggtagaaggagggcagcgcgacctggcagggcggggcctgcggggggcggggcgcgccgcacaccaggccgctttgacccggactcccgtccaggcgcaccggccggcctcggagctctaccagcaggctttcatgggagcggaggtgcccacgtttccattgtgcggtaaccgcgcttcatcacagccacctccaatcgaggccgcacggtgtccccagaaccacgctcggtacaacctgccccggccgctgcgctcgacttgggagcgcgccccgccccgagcgcacgacctcccttccctctccgcgacttgagcttgcttcccggaaagccagtgtagtggcagcggtttgcctcacagcgcccctggttggttgtttaaattttatcttaggttctcgcaaacaaattgccacctcagtggaggctctttggcatgctaaattttttccagttcttgcggcgagatcaggaatccctaaaagtagccgctcccccgccccggggcccc

SEQ ID NO: 32775 - DNA, 1038 bp, Homo sapiens
  chr2:43019535-43020573
  hyper
cgcagatggaggagggggaggaggcgagggcagggggcggccatgggggtgctggactcacatgagcttgttgcagaccgggggctggaaggagccccggttctccttcacccaggccctcactcccaggcggcgctccatgactgtcccgggcgcctcctcgcagcgctgtcctcccgccgtcggaggcccgcagctccgcccagccgcctttttaaccagaatcccaagctcacgaggcggagcaaacccccgcgaccccgtggtgggggcttggggcccgcggactttgccccctggtggactttggtctgagcccgccgccctccgcgccactccaggccctggcgagcgcggcggcggcagcgctggggaacggcgtcccgcgccctctgcttctccgcggggcaggggctcggtccccgccaccgtctccggggcgccccacacactggcgcctgcggtggggcctgctcccggcggaggacaaagaatccagacccttcctggacgcttgtccccagacgttccttccctctacgccccgaggggaatcccagggaaggttcccagaaatactacagtgaggagatcgcgggttggaagtcccagcacctgagaacacggtgctggcgctgggctcaagatttggctttcccatctggaaaaggggaatgactgccccgccactcagggctgcggcgctcacccagcgggaagccgcacggcggtccccgcaggtcccgattcaaggtgagccccagacctgctgcgtgcggccggcagactccgccgcgggctcggcgaggggagcggtgcaggcgccgagctgcggagcccgggctcagggcaggaccgcgagccctccccacctgaggcccagccgagcggccgctgtccgcgcagtgtcgcagtggaccccgagccccgtgctgaactccttaggcgtcttaggaacatactcagttcgcacgcagctatgggaggaatttggcagatgtggacaccggcctcagtgtcctagccctcgggaatctc

SEQ ID NO: 32776 - DNA, 1286 bp, Homo sapiens
  chr2:54784837-54786123
  hyper
cggtgctcccataaatcttccttgcgtcgaattcctatcataggcccgtgttattccaggaaaccaccgccttcatatcccctgatggcagcgtaagtcagccgagattcttcactgagcccgaacttacacctcccctggctgtggcgctgcacagcgccctgagagtgactttgtctgacttcttcccggtggctcgccgggccgccgccgcgtggttggcgccagcgcactggggcagtcgcgcgcgcccaggtgcgggccgcgttacctcagcagacgctagagagtgaatgagccgcgcgggcccgggacccttggggctcttcactctccaggccgtcccgtgggcgcgctagccttttcaagtgatagtaatcggagacttttccgttacatgaggctcaacaaaagattgtaattccagcagctctgtttgggaaggcactaccgcggcgagtccagggcccggccgggggtcggcggctgccgggcggctggggcgaccgcggaccgtgcgggaccggtagggggtcgcgggccggctaggctcccccgcgcccctcctcgtggtatagcctgcatttctaatacaatgctgttatgctaatcaggtgacatcaccgcccagcacacggcgagtggctcctgataaaattacaaaccggcggccgccgcgggcagctgggaggaggtgtgcgcgctgcgcccgcgagctcccgggctcggcaaccgtggcatgcttaggattggccatatttaaaagttctgaagtagaacctgcgcctcctctctgcttctccctcctcctcagtaatttatttcgagcttccaggcaagggccacggaagaagggaaagcaagaaattagatgcctgtgtggtaactcctcgcggagctaaggtggactctcttgcagccaacttcccatcagatcaccctgctggacttgcagaccggaatggggctcgcctaaggagccgagcgctgcggaggctgctgcgtgttggatgggagtgggagggggctggagcgagatttccagggcgcagtcctccggggcgttacgccgggcataatggaattgcagaggacgtctagtatctccgggccgctgtcgccggcgtacacggggcaggtgccttacaactacaaccagctggaaggcagattcaagcagctgcaaggtaagccccctcccaaaggccgggcctgtcctgggtgccaacgggggttcttggaggctttatttgtgaccctaatgaagacgggcggcttcacagctc

SEQ ID NO: 32777 - DNA, 546 bp, Homo sapiens; identical to SEQ ID NO: 14884
  chr2:55509233-55509779
  hyper

SEQ ID NO: 32778 - DNA, 670 bp, Homo sapiens; identical to SEQ ID NO: 24273
  chr2:63280967-63281637
  hyper

SEQ ID NO: 32779 - DNA, 992 bp, Homo sapiens; identical to SEQ ID NO: 30192
  chr2:63285949-63286941
  hyper

SEQ ID NO: 32780 - DNA, 560 bp, Homo sapiens
  chr2:69533498-69534058
  hyper
cgtgccagcttcctgaattctctcctcaatgtcggctgcgtggggatttaaactcatttaaactggtgggcctgggaccggctgtatccatcaaaaaccaggaaggggagccggcgcggggcgtgcacagctgtaggagggctctctgtgtgcgaatccaggccctgagttcgcacgcccacctggggcggtggtccagccgccaggaacccgcttcccagccgctccccctcacgcaggaagccgggactctgggcgcagctctcccggaccacggccacgtcctggctccagctacggaggcagaaagaagccacagaaacctaaaggacaggaggggaaactgagctttccgcgtgggtgcggctgcccttgacacccgcttgggggctccggagggggaggcagggcggccccgcgctgagggtggaagcgtgaacatccgagcagagagagcggggaggggccgtccggagagatgccccgctggcccgactgtggcccccgggaaagacgccggtcccgtgagcaccgccccttctgttgtctccagacgcccc

SEQ ID NO: 32781 - DNA, 1034 bp, Homo sapiens
  chr2:7005163-7006197
  binary
cggcccgggcggcttcccggtccgggaagaccacggaactgggcaagtctggcaccaccgggtgcagcgggggctccgggacgggcacgacctgtgcgcagcccacctgcagccgcctgccgtcttgcacctcccagaggcgctgccacagctggccgcgcgggtcggcctcgaactcgcccaagtgcgggcgtggtgcctcctgacaggcgcccagcagctcgagcagcgcttgccgggtgtcagggtcatccagggggtcgcgcagcaggaagccttgctgtgcgccgccggcctggccgcccgggcagtagcagagcagcctgagcagctggcaccgctggaaggggccgcggcgcagctggtgcagcaggcgctggtgcagccgcgccgcccggacccgggccccgcagccggcgtccggggtcacgggcacgcacagcgagtagctgcgctccgggggccccagcagcgccgccaggcgggggtcgggggcgtctgcgtcgccgggggcgtcggcgcctagggcgaagtgagccagggtgcagtcgggaagctccaggacgaagcggcgcggcggagccatggccccagcgcagaccccgcgccgcccgagcagcggccccgacagtggcccgcgcaggagccggcgggcgaaggccatgggcgcctcagcgacgccgccctcggccccgcctcggaaacgaaacctggcgggagccaggcgccggcgggaaacgaaacccggagggagccaggcgccagcgggaaacgaaagcgaagcgttgcggggaaacgaaagccggaggcccaggcggggcaggagccctggggctggggcgcccttccggcctctcctcctcgccgcgagatgtgcgcgataaacggccggcgctcgggagcagacgcttggccccggggccccaggtgcgcggctccgcgggcctgcgcggtccccaggcgccggctcccggggctgacaccgaatgaggccccgcgccgtcggccccaaggtagctccgtgtgcgttctgc

SEQ ID NO: 32782 - DNA, 247 bp, Homo sapiens; identical to SEQ ID NO: 14888
  chr2:7073094-7073341
  hypo

SEQ ID NO: 32783 - DNA, 684 bp, Homo sapiens
  chr2:71680558-71681242
  hyper
cgtcctaccccgggcggtcgggttgagttctggagagactgctccaatccccgaggcggaaggaggcaaccgatttggcgcagcactcagccagggggtagaagctcaggggaggagccgagcctttctcctgtccaagagcgagatctgggctacgccgggcgcccggagccctagtccagcccccggccatcgcggccgccgcccagccaggtgcaaaatgccgtgtcattgggagactccgcagccggagcattagattacagctcgacggagctcgggaagggcggcgggggtggaagatgagcagaagcccctgttctcggaacgccggctgacaagcggggtgagcgcagccggggcggggacccagcctagcccactggagcagccgggggtggcccgttcccctttaagagcaactgctctaagccaggagccagagattcgagccggcctcgcccagccagccctctccagcgaggggacccacaagcggcgcctcggccctcccgacctttccgagccctctttgcgccctgggcgcacggggccctacacgcgccaagcatgctgagggtcttcatcctctatgccgagaacgtccacacacccgacaccgacatcagcgatgcctactgctccgcggtgtttgcaggtaggaggggccgaccaccctcgccc

SEQ ID NO: 32784 - DNA, 788 bp, Homo sapiens; identical to SEQ ID NO: 22878
  chr2:74781700-74782488
  binary

SEQ ID NO: 32785 - DNA, 260 bp, Homo sapiens; identical to SEQ ID NO: 23201
  chr2:75146970-75147230
  hyper

SEQ ID NO: 32786 - DNA, 727 bp, Homo sapiens
  chr2:87034584-87035311
  hyper
cggtgcttccccacgctgctgtgcaatggataggagctatgtgaagctggcgtatgggtggggtttgcaggcttcgtccggcttcatcgccggctgctgacccggcaccaattcctgttctgcaggtctcaccgcagaggggcacgccagccatgaggacagatgagggaacacgtgatgccacgatgggggtgccaggatgaggtgggtgcggtcgcggacaggcgcacgaggagcccagcggagcgccacccggagcaggcgcggaggagggctggggagggccaccaaggcgacgagagccggtgtgcctgaatcagcctaaaggagacggaggaggagtgtggtgggcgcaggggcagggagctgggggaagggcggggggctagcccaggctgaaggcaggcaggagcagggccgcgatgtcagacaagaaacggcagcagtgtgtttgggaacctagcaccaaccgcaccggtggagacagggtctgctgtagaggaggtggggccgggtcccagctaagtaaggcggtggatcttgcagcccttccatcctcagccgctcattctgcgcaaatctcggggccagccttggtggagccgtaaagcgtccaccagaacctggatccctccgccacctttcccatgaattcacctttctgtacacagcaagcgcctgagcggagacggccgacacgtttcccactgttaccccaggaaaccgc

SEQ ID NO: 32787 - DNA, 895 bp, Homo sapiens; identical to SEQ ID NO: 14895
  chr2:88315911-88316806
  hyper

SEQ ID NO: 32788 - DNA, 608 bp, Homo sapiens; identical to SEQ ID NO: 25497
  chr2:97193030-97193638
  hyper

SEQ ID NO: 32789 - DNA, 725 bp, Homo sapiens
  chr2:97651764-97652489
  hypo
cggccgcgcagtggcctgtggagaggagggcccggctcacgtcggaacccgaaccacgcggggtcgcaggaacctgaaaagcgccagagtagcccggcggccgcaccggggctgacctgcaaggcctggaccagccaggagtcccagggaagtcgagtgctctctgagcgctaaccacgcgcccctgcggttcctcggcctcagtttccttacctgtaaaatggagccgctgatcctgcctcctgagttgtggagcgaggcccgcacctggaagccttggccacatagggcgggaagggcagggctccggggtgagggagggtggcgggaattcgcacggcctcagaggacggggccagctagccgggaaaggaagcaggagcaggctccccaggcggcgcagtgggaggaccccaagagttgcgtccctagatccagggccgccaacgtggaacctaaagatccagttctggggattgagttccgactccaaaccaagcggccagctcacagccgccgccgccgccagctggggagctcgccggccaagtgcgcaccctcttcctgttagccctccacgtgcgcgccctcttcctgctcgccctccacgtgcgcatccacgtgcgcgggaattggctggcggaagctcctgcccccaggcagtcctgggtcacgcgcacttgtagtagcttgcatttaccaagacagtgagacagtggcctggc

SEQ ID NO: 32790 - DNA, 148 bp, Homo sapiens; identical to SEQ ID NO: 11506
  chr20:20343543-20343691
  hyper

SEQ ID NO: 32791 - DNA, 1296 bp, Homo sapiens
  chr20:20349533-20350829
  binary
cggagccgcccgccaaggcagtcaaggccccgggcgccaagaagcccaaggccatccgcaagctgcacttcgaggacgaggtgaccacgtcgcccgtgctggggctcaagatcaaggagggcccggtggaggcgccgcggggccgcgcggggggcgcggcgcggccgctgggcgagttcatctgccagctgtgcaaggaggagtacgccgacccgttcgcgctggcgcagcacaaatgctcgcgcatcgtgcgtgtggagtaccgctgtcccgagtgcgccaaggtcttcagctgcccggccaacctggcctcgcaccgccgctggcacaaaccgcggcccgcgcccgccgccgcccgcgcgccggagccagaagcagcagccagggctgaggcgcgggaggcacccggcggcggcagcgaccgggacacgccgagccccggcggcgtgtccgagtcgggctccgaggacgggctctacgagtgccatcactgcgccaagaagttccgccgccaggcctacctacgcaagcacctgctggcgcaccaccaggcgctgcaggccaagggcgcgccgctagcgcccccggccgaggacctactggccttgtaccccgggcccgacgagaaggcgccccaggaggcggccggcgacggcgagggggccggcgtgctgggcctgagtgcgtccgccgagtgccacctgtgcccagtgtgcggagagtcgttcgccagcaagggcgctcaggagcgccacctgcgcctgctgcacgccgcccaggtgttcccctgcaagtactgcccggccaccttctacagctcgcccggccttacgcggcacatcaacaagtgccacccatccgaaaacagacaggtgatcctcctgcaggtgcccgtgcgcccggcctgctagagcgcgccctccaccccggcccccgaactgtgccttcgcttggagacccacaaagagagtgcgccctgcactccccgaacccgagtccgcgctgggggagcctcgcccccgcccccaccgggtgaaagtgtcgtctccgcttctctcggtgtggcgtgacggtaaccccatactctccttttgactccttttggaacccccacttttacgttgtgtccctccgcctcccccatggcgcaacaggagtcagtctctttctgtacaagggagaaaagctgtacgcgtttgtctcgtggttggaagcctccccttggcggggagaagctttttttcttgctagtattcgctgtgttcatggtctagaaatgcggtctggtctcgcctc

SEQ ID NO: 32792 - DNA, 1359 bp, Homo sapiens
  chr20:21080357-21081716
  hyper
cgttgtcgtctgctgatgtttaaaagataagaagacatttgtcagggcgggtgcttgaggctctcagaggactccgggagacactgccaaaacgtttccaaactgaatagtcattgggctgccagataattcagaaactatctgtatgagctgtttatcaaattattaaccgcacagatgttgtttggctgaagagcagctgaatcccctctctggcagccgcggagacaaaggtctccaggaataattggagatgtgcatggaatattaaattaatttactgctcttaattcttatgcaaattctgacctccgatggcgcctatcaattaccccgcccgcagtgaaagcgaaagcgacagtttcttctcttcgcttttttttcttttttaagaactcgaaaaaggaaatatttgcaataagcaggcggtagtagcacttcgtagctggaattatttaattgaatcttcaagtttttagggatgcccgtagaggataaaaccccagtgctcagcggagagggtgggaggggtacagggggcggaggaatctgttggtttgactgtacacctgcgggcggcggcaaaatacagccacgagccgggaccagtaatgtcaaataaaacattggcttgtagacggacgcgggccttgggaatcgcgcgagcccagcgttagcccggggtttcaccgaagccggcgattcgaagggagtggcgtttccgcaaactgcatcgctaggggcccggcgtggaagcgcctctgcgcaactttcctccaccgctgcctacaagggaggctctggcttccgtttacttattttttaggagttttaacctttggttcctgcttttacaaccgctaaccccaaaaacattttttttttctttttgttctttgtaaaaccaaaccactatgctgtgcgttcatgttcaactctgttgaaatcccgggtgggccgaaataagatttaattgtctcctgcgtggagaagtgacacccactttttcccctgaattgagcaaacaccagggctttgtctgagcttgtggcttaaacgccgggcggtttctgcacccagttggtgggttgtaagacaggaggtttccaagtctttcatcatgtttctaacaaggaaaaccaaatcgggcccataatgtcatcagccccggcccgacctcgccgggacctcggcagcccgatgatgtcgctagcggccccggcgcagccacgacgcgccgcctttcagctcctcgcagtccccacaaaagccagacaacaatatcaattaatcatgcagcgggcaaacaaggagatttatcccgcgacaaacagccccaccgagagccgctgaatgggc

SEQ ID NO: 32793 - DNA, 439 bp, Homo sapiens; identical to SEQ ID NO: 14901
  chr20:25012790-25013229
  hypo

SEQ ID NO: 32794 - DNA, 1327 bp, Homo sapiens
  chr20:30192854-30194181
  binary
cggccctcgcctctacccgctgccctgcccggtgccctgccaccgacccacccttgctgttctgaaacccgggtcgtctttccacactgcgagcaggcactagacgagcaggaggctggacctaggagcgcgggtcacgcccccatgccgcccattggctgcttttgaacgttctgagcccgcccctccgggggccgtggcgtgtttataaaagacaagctgtggctccgcactctcattccacgttcttaactgttccattttccgtatctgcttcgggcttccacctcatttttttcgctttgcccattctgtttcagccagtcgccaagaatcatgaaagtcgccagtggcagcaccgccaccgccgccgcgggccccagctgcgcgctgaaggccggcaagacagcgagcggtgcgggcgaggtggtgcgctgtctgtctgagcagagcgtggccatctcgcgctgcgccgggggcgccggggcgcgcctgcctgccctgctggacgagcagcaggtaaacgtgctgctctacgacatgaacggctgttactcacgcctcaaggagctggtgcccaccctgccccagaaccgcaaggtgagcaaggtggagattctccagcacgtcatcgactacatcagggaccttcagttggagctgaactcggaatccgaagttggaacccccgggggccgagggctgccggtccgggctccgctcagcaccctcaacggcgagatcagcgccctgacggccgaggtgagatccagatccgaccactagatcatccttataccgacggggaaacggaggccagagagggcgtgggcgcttgcaccacttccgtcccatccttgcgggtacctggctatgcgggggtgcctaaggagcctggaaaaagcgctcccccgtcgtgcttcctggggaagggggcgttcgctgcgctcggagcggcgtcccttccaacccgccggtctcatttcttctcgttttcacaggcggcatgcgttcctgcggacgatcgcatcttgtgtcgctgaagcgcctcccccagggaccggcggaccccagccatccagggggcaagaggaattacgtgctctgtgggtctcccccaacgcgcctcgccggatctgagggagaacaagaccgatcggcggccactgcgcccttaactgcatccagcctggggctgaggctgaggcactggcgaggagagggcgctcctctctgcacacctactagtcaccagagactttagggggtgggattccactcgtgtgtttctattttttgaaaagcagacattttaaaaaatggtcac

SEQ ID NO: 32795 - DNA, 517 bp, Homo sapiens
  chr20:32899337-32899854
  hyper
cggagagggggcggagggcgcacaagcctgccctttggccgcggggctttagcctgccctagcttcagcatccccgctcgcctcccggcggtcctgcgtctcactctggattaactggaggcttcgagatgggatagagaggggtgcaggcgctgagaaagcccgctgatggggatggagccggattaagcagttctgtggagttcctcccttcttgtccaccccgctaggggtctctcctttcccgctgtatccacgcccctccctccaggccccctgggcccacctcgaagtcaccgctgggctggggagtacagaggtgggggacttcttagagaccctgggacagggcccccctctctccctcaatccttctcatcccacgcggctccgctgtgagtcgggcgtcccaggagctgccggcccacccatccgcgggtttcttccgttgggggagccctccagactcgtagaatataagagagcgcccctccctagccgcgggccatctctaagc

SEQ ID NO: 32796 - DNA, 1347 bp, Homo sapiens
  chr20:37433723-37435070
  binary
cgtcagacgtcagcagaggtacgaccacttccttcctccagcgcttcacctcccttctttccagaaagaggaaatgatgcgagtccacaccgcaggccacagcccccatgtctcggccccagcagctgggggacctggccccacagatctgtccccagcgcaaggccagggccggcccctggacctcctgggaagccttcagactcaggccgcgcaggccttcaagctaggaaccctgagttcctggccctggcattcattctgtgtgaccttgagcaggttaccactcctctctgggcttcaggattcccgtctgtcaaatgggagcagggataccgtccttggcttccctctttccatggtcggggtgggggttaggaaaactattttggaggagggggcagcgttaggaaaactattccgaagcctggccacgtcccaaccggtttcaacttcctgcagctcagaagaggggtccccacccgagagcgccgggaccctgtcccgcgctgcctcccaagccggatggggttgagcgcgcccaccccagtcccaggagctcaggccccgccttgggggaggagccgagaggcggcgcggaggctcgcggccgagcagagccagctctgtcgccgctggagcagctgcggctcggggacccacagacacagccggggtcgggagccgcccggggcagggctcgggagagcgggtgagttccccggcggcgccaccaccctccttgcgctctgcggcttcgcagggcgggggatgaggatggggcggggaggtggtcccagcctgctatcacctagctgggggccggggcgctttggccaagggacgatagcttgagataaatgggagtgtggggactctggaaagacgggtaccgagagcgctaggtccgggagtcgggctggaatgggggcgttctccccggcctcgcaattccttgacgaggccaggggagggggcgcattggcaggttgttggctgcggccgtcgtagaccgatcttggggcggggaggtggggtcctcggtctgttctggactcatggggccgccgtctgccgggggtgcaatgccgggcggcgggagccacagcggacaccaaacaacccccccccgcgcactctcccggccgggcatggtggtgccgccccctcgcgtggcggggcttggtcctggcgggcagcggcagggcgcagagagcgctcctgcccgggcgggaaagatccccaaggcaggcgcctccacctgcagacccgccccgcctcaggatccggctgacagcaccagccagcccggggagaccccgcgagtggtagttccccgggaggggc

SEQ ID NO: 32797 - DNA, 491 bp, Homo sapiens; identical to SEQ ID NO: 31711
  chr20:44452643-44453134
  hyper

SEQ ID NO: 32798 - DNA, 544 bp, Homo sapiens; identical to SEQ ID NO: 25524
  chr20:45279829-45280373
  hyper

SEQ ID NO: 32799 - DNA, 343 bp, Homo sapiens; identical to SEQ ID NO: 14908
  chr20:48504339-48504682
  hypo

SEQ ID NO: 32800 - DNA, 415 bp, Homo sapiens; identical to SEQ ID NO: 25528
  chr20:48788897-48789312
  hyper

SEQ ID NO: 32801 - DNA, 952 bp, Homo sapiens; identical to SEQ ID NO: 14910
  chr20:50158723-50159675
  hyper

SEQ ID NO: 32802 - DNA, 815 bp, Homo sapiens
  chr20:50721218-50722033
  hyper
cgggtcttcgctcgaacgtccgctcctcggtgaggccttccctggacaacgcatttgaaacgtaaccccaaggcaagaagccaccttccaggcgcgcagccgaagcccagtgccaaggaggccggagactcgggtgcccgcgcatcccgaaaacagcctctgaggggtcctctgagcatccttccagcgtgtttgggaggcaaactcgttgactagctcttgagaggagtggctagaggaatccaggcggggaaggggacggtggactccaggagagtgtaatttacaaaggcggggggcggggacgcccaggtccgagtcccaggactctgcgccggacgcttcgcccgccctttcaggtcccctgcccggtcctcgtacccgcgcgggtccggagaacctctgagcaccggcccccagcccccgggcggggctccagcggcgctactcacccggctcccccgccacctgcggggccacctccgcacactcccggcgcgcaggccgcggctcctcggagttgaggtgctggggcttggcctgcttgcgccgcgacatggcgcgaggaccgggctccccgcgcgtccctaggagtggcctacttcacacaacgaattcccggagttcggaaattaccccccttcggccggaacgcgcatgtcccggcaattctgctcatcagccgagcagggcgatttatcaagagtcctgacggctgattggcctggagccaagaccccaggagtcccgcggacttgcggtccgctcccgggcagcccgcgccacctgggagctcgttagaaatgcagactctc

SEQ ID NO: 32803 - DNA, 976 bp, Homo sapiens
  chr20:52789230-52790206
  hyper
cgcaggtgctgggtgcacagcacggcttttccgtggaccgactctaatctgtacaagagctcagggttgcgatggcacgggagaggggctttggtatccgccctacgtaagaagcttccaaccccagggaactctaactccgcctcttcacaatttccaggcgccgtcaggctcatcaggtctggccgcatgcccaggtccctcggattggactcacaggatcagcagcccgtagccttctttgcggtagtcgcgataggccttccacggtttgatctccagccgctgcgggtacgcgctctcggtgcggtacagcgcttccagcaggcatggcgagcccaggtgcaccgactcaaaggaacccaacttcatgcggaaaatcttgccatacttcttgtggtactccacctgcagccggccgggcacagcgcggtgtcagcgcgcatcctccgccgtgcccgaagcgctttccctcctcccgcctccttcctcctaggggaccggggaccctccctgcccagacgccgaagcgcaccatgcgcccgaggcgcgcatgtcggggagggtttggagcgccactgggagggcggaagagggaggagagagtcaggggcgcgaaaaggggtttaccagggtgtcgtgctgtttcttgagaccccctttccagagaatctgcagcaggctgcccagcagtggccagctggtggggcccggcagggcggccgcgttctgagtctcgccaccagctgtcagcgggcagactggcacctctcgcggctgaggggacgtgtacgccgtagatgtcaccagtctcgggggctgcctcggactgcgcagctgctgcaggaaggcggcaagcgagcggctcttgctgatgggggagctcatggcagcgggggacaccggagcgcgggaaggcaggaggatggggtggggcgaggttggtacgaggtgctagtgggagtcggggcttaac

SEQ ID NO: 32804 - DNA, 1974 bp, Homo sapiens
  chr20:55199913-55201887
  hyper
cgtaccgcttgtcatatacatatgtaaagataatttaaaaccctagggtatacccttttcaaatgcagagtttatagtttccaaggggaggagggcaggggaggagtaaccaggacctttcctgccagtcttccaatcgcgatagctcgttttggctgtgaatttccccccttcccctccccctcccgttaattaaataaacgctggaagcgtgtgtttaccgcacacgactcggccctcggggaactctttttctacgtctctcctactcttaaactcctcaactcacagagggttggagagctggcaccatgagcttccagttcctacgggtgagaaaagaggtgtctgtgtggagggcaggtgcgaccccgggggctagcagagaggagaggctgcgggaggactcgctgcgaagggcgaggggtggcgctgggtgggacgggcgcctggggccgtgcagggtggctcctgggtgctgcccgggctgcctgtcgcccagtactggcgcaggaagacgggtccgcgcagcgtctggcaacagtggcctgctccacgcctggaggcgaccaagttctgagttaaaggcgccgggcttagccgggaagtgtatggcgacccagaacacggagcggagaaggcctcaggggacacgaggctaccgccttagtcctcgggcctgcgctccgagcggttagggtgcgtacggatgggctccgggatgttagtggagaggtgacaggagtctaccatcccacggccaagcgtgtgaggcctccggcgggcgggggtcccccccggggcagggcagggggagagtcaggcatgtctctaacgggctccctagtagaaccgctaggaaagtggccttcaaccctaggcacctttgtggctttcaggtagttgggcgactaaaaattcacttttgcctgctgtgaaatgggacaggtggttgtcaggttagagactgtgcccacgaagtctcgtttggcgggccgggactgacgtggacccgggccctcctcggaagcttgggaacctgtgagcccctcagctcctcgcctcactttgcctgtttgaaaaaaggagttgtttgagaggaagagttaaggctcaaaaggttctaaacgaagagcatgcggcctgacgcggagcgcaaagaagcgagcagtgaactgaatctggtgggactgagaccagaggcgtctgtatgcggcggccgcttcgcgccctattaaagcaatctgttatttacgataatcatttttgtaattattttggagtggctgtgacttgatgtctgtggtgccccagggcatgcccttactggacatagatacttcagggtgccctttgacgccagtgtcggtccagtgggtgccagtgccgcgaagggagggtggcgggcgtgaatgccccctcctcctgggtttgccgcaggccccggcctttccaccttgcttgatcctggcgggtctgccacttactgaggtccctaccggcgctcacgttgtcccgagaggcgggacaaacgtccggcgcgtggcgcggagtctgcgaaagcgctcgggggcctccatcttctgctcgggagtcccctccctggggcgggaagaggagtcgcagatctgcccgaatcttgctctacccgcctggccgccttcttccgtctggggtgggggcaggggtggcggatgactcaggcctggggccgggagccctgtttccaaaggcaccacctcgcgcctctttggaagtggcgcgctgttggggcgctcccgctgttgcagaggcctggtttgcggtttcataggggcgtgggtccagggcttccagggagtaagtgagtttaggctccctagggggcggtagaggggaacccccgacaaccttccatcctcttctccaggcggctgcgaggcctccggggttccagaggggtccccttctgccggtgccggctgtcttgagcgc

SEQ ID NO: 32805 - DNA, 1465 bp, Homo sapiens
  chr20:55202926-55204391
  hyper
cgggggaaagtttcccttggaggacgcctattattattattttcttttaggcccacctgggtctaaataaatgctaaagttcaaacgaacccgagaaggaacagcgaggcagtggatgccgccattccgtggatgggagagtcatgtctactgcaggtgcggacaccgtactgataggcattgattattgcaaaatcgtattcagtatcaaatagaaatagtcttgtcctctaatccccacagaatgtttaaatccagcccagggagccagttggggcgtcccaacaaatacgccctcgagaattagcgatgttccccttacaatgaaagtcaattgctgcataataactgggccaaagaatttcgttagtttaaattttaaaaattagtattgcactttgctttcaagtttgggtggcaagtaccgaaggggagagggaagcagcgtttgtgtggaaggaagtttcgttttctgtctaaacatgtgggacctgggtgtctacctctccagtcgagagctctctgcaggctctctcccaacttcctgcacctcctcaccctcaccttacccgtggcgctcgggttttattcctgcccggcgcttctttcccagggcgagtagaggcttctgagtgaccggcccgccagaggcagctgcagagccggcgttccgcagggcagggcagggccgggccgctgggctggtccagtgcgcgcgggttccccctggcctcagccagccgcgggagatgccacttcgggcgacagcggcgagacgccgctgtccgcaactcctgggcgggtaggaccgtctgctgcctctgcggcccttggggcagactccccaggagtcccttcctctctcctcccgcccgggggccgggaccgcgctgtgcccacggagggaactgggcgtctctggcgcactggggctccagctgcatgatcccagctcagaccttaagcctcagtggggtgtaggtgggatgggatgtgtttttaggagatgaggagaccccggttgttgagtcgctccccaaatgcgcagtttcttaactccaggtgacatccgtcttttggaggaacgagtgaaggccgtttaggcgaaagaggggtgggtttcagtatttggatcccttcccccagctctgccaatctcaggtgtgtttacggtggaggtgacagaaggaaggcgcgtcgggggacccaggcctcgcaggtcttcggctgtcaacgaggcaccgcccactgactccgcgcttcgtccctcacagcgtggggctcggcgctgcgccaggcccgggtgcggggcggagctaggctgggactggctgggggccgccccgcccggcgcctgggcctccgcgccggcccccggggaggagttatgataatttccttctcattaaggcgctcgggtcccccggctatcgccaggacacactgttcgggcgcggctttcccc

SEQ ID NO: 32806 - DNA, 193 bp, Homo sapiens
  chr20:55588904-55589097
  hyper
cgaaagtgcctgcctcgacaagcaagccaccggcccgcgcagtccggggctacagagcgctcaagacctttccctcgggtgctgagggaaggatcccctatcagagatctccaaggaaggccccgcctccacctgcccctcccgcaggagagcgctgctgcagaatctgccgcctggccggtgttcacccagc

SEQ ID NO: 32807 - DNA, 483 bp, Homo sapiens
  chr20:55839319-55839802
  hyper
cgccccaggtgcccagcgtggggcttcagtatcattatttccatgttgacacagcgcccgtgggcgtgagtttgctgtcttgacttggttcgggttttcgcagcaagttacacaagtagaatgaaagcggctcaggaaacagcgctatcggggtgtgttatctcggaaaccaaatatttgatcatcagtcccgcagcgcgctggcgctgccggggggttagtttgagcaagtctggagaatgtgcgcgcacatatggagggggagctccccggccctcgctgcagccccaggctcgcgtcgccggggtcgtcgcggctccagtcggaaaccgggacccccagccgcccccgcggcgtcagctctgagatcccgcgcaacccaatcgccaaaacctgtggtttgcgcgccacacgtggtaaatgctgaaaatagattctgccggcccgggacctaccactaaatacttaaaatagaagactagc

SEQ ID NO: 32808 - DNA, 535 bp, Homo sapiens; identical to SEQ ID NO: 9559
  chr20:55964187-55964722
  hyper

SEQ ID NO: 32809 - DNA, 982 bp, Homo sapiens; identical to SEQ ID NO: 25536
  chr20:57224597-57225579
  binary

SEQ ID NO: 32810 - DNA, 868 bp, Homo sapiens; identical to SEQ ID NO: 25541
  chr20:60544922-60545790
  hypo

SEQ ID NO: 32811 - DNA, 930 bp, Homo sapiens
  chr20:60772868-60773798
  hypo
cgtaacacaaagggactgagattcttgttcttgctttagttgaccagcaagtcaagtccctgtcgtcggtcctgtcgcggtaccagggtttcagtggagaagatggagggagtaaaaactgcttcgggcgcagtggcgccgtcctctacatccgggtgagccgagactgccggacctggccctgtccccgttgttctggatcatccagctcctgggggccaccgtgtgacccacggggcccctgtggcttgatgcccacagctaggaaacagcacaatggaaacggaggctggcagacagcgggaaagcagccccacccctcaaagcaaacccagacgggcatttgtaccagggtctcacaccatgtgcatgtctagtgaaaaagtcatgaaacgattctcttttaaaaagagggagcccacggcacggacgcttcctccgtctctgaccccatgagccgacctctgactgagggaggccactggcacccagcgggcctgcgtctccttcgcgagctgaattcactcgtctcttagatgttttttctggtgcttcagttcacactaacgttttagaaacactatttgaaaaagccctttgtgcagtcagaagggtgtgtacgcagccccgtgaaagccctggagcactgggaccttttccttgtgctccggagctgttggcagaggtgagtggggcgggcagctgcccggggcacagtccgctcttgtcttctttccttagcgcttgcttcaggaatgggttaaggcctcctttcctcactgctggtagagctcagctgatgagtgcctgctgttccccaggtccccgtgggcacgctggtgaaggagggaggcagagttgtggccgacctgtcttgcgtgggagatgagtacattgccgcgctgggcggggcaggagggaaaggcaacc

SEQ ID NO: 32812 - DNA, 187 bp, Homo sapiens; identical to SEQ ID NO: 14920
  chr20:60868207-60868394
  hypo

SEQ ID NO: 32813 - DNA, 286 bp, Homo sapiens; identical to SEQ ID NO: 25554
  chr20:62314830-62315116
  hypo

SEQ ID NO: 32814 - DNA, 904 bp, Homo sapiens
  chr20:9048369-9049273
  binary
cggaccggctcaggcggctgagcatgcctagtgcagctgcgagcatggccccagtccccaatgcgcaggtgccacgtctccgggttttggtggccgccggccgggagaaggaggaggcggagtggggaggagggagccctccggagttcgggagcagcacgttgtgagggtccacacaagggtgatgccagaccgaacaccattagggcctgggtgtgagtgtgactcggaggcacctgggggccgttgtagggccgggaaaagccaggaactggctggagcagcaccccagcatcccagggaccaaagtctgggggatttgcatgtctgaggttgcacttgtgggaagactttttggaaccacttaatctctgtggctctgtgtaagacccgcgaaataaaaagaggcagtagtactctttggaagattgttttagggattaaatgaataaaaagcgtttagaacactgcaggacgcattgtaggcgctgtatgggtttatgaaaccgaatataaacaaataagcacgtcccccacccagccaacggctttgggggccccgttctggccagtcctgagcccctccacacggcccacggcgggctgcgggtctcccatccgaggagggtgccgcttttctgcccccgctccctgggttctgcgcccagcgccatcccgtgcgcccccgacccttgggcatggggcacatgccgcggggagccgccagggagaccccagaggagcgcgccgcgggccggcttccccggatgccccacccacctcctcttggcgctgcccaccacctgcctcggctgctcggcccccggctcgcgaggctgcgcccccgacccagtcggcgcccactcctcgccctgcgggctcgcggcaactgggcggccggccc

SEQ ID NO: 32815 - DNA, 660 bp, Homo sapiens; identical to SEQ ID NO: 30260
  chr21:26934174-26934834
  hyper

SEQ ID NO: 32816 - DNA, 868 bp, Homo sapiens
  chr21:34395008-34395876
  hyper
cgccatttgtttgcagagttctgacttctgaggggtcatgtagcacatgtttggtagccaaacgctgtcattcacgaccaggagcgatggctgcaatgcctttttctttgctttgctttccggtgccgggagccttgcctcccgccgccacccctggtcagctctgcgcaagaacgtcgttctgtttggcagccaggccgagacgcagcctgaatgtgagcaggaactcggagaagggaagggagagaatcagaaagaaggcccgggagggacccgggaagcagtgggaggtctgcgccctggagccccgcgagagcccgccggtttggcacgggctcctcccgggccgcccggcggtccaacaaaggccggccccgacacgcacccggtcttttgtgggagagaaacacaaagaagagggaaaaacacggaggaggccaacagcaccaggacgcgggggccaaccaggaactcccggagccggggcccattagcctctgcaaatgagcactccattccccaggaaggggccccagctgcgcgcgctggtgggaaccgcagtgcctgggacccgcccaggtcgcccaccccgggcgccgggcgcaggacccggacaagtcctggggacgcctccaggacgcaccagggcaagcttgggcaccgggatctaatttctagttattcctgggacggggtggggaggcataggagacacaccgagaggtactcagcatccgattggcaccagggccaagggagcccaggggcgacacagacctccccgacctcccaagctactccggcgacgggaggatgttgagggaagcctgccaggtgaagaaggggccagcagcagcacagagcttcc

SEQ ID NO: 32817 - DNA, 421 bp, Homo sapiens
  chr21:34401159-34401580
  hyper
cgcaatgctaagctgtttgctcacgtgactgccagccccatcggagtctaagccggctttcctctattttggtttatttttgccacgtttaacacaaatggtaaactcctccacgtgcttcctgcgttccgtgcaagccgcctcggcgctgcctgcgttgcaaactgggctttgtagcgtctgccgtgtaacacccttcctctgatcgcaccgcccctcgcagagagtgtatcatctgttttatttttgtaaaaacaaagtgctaaataatatttattacttgtttggttgcaaaaacggaataaatgactgagtgttgagattttaaataaaatttaaagtaaagtcgggggatttccatccgtgtgccaccccgaaaaggggttcaggacgcgataccttgggaccggatttggggatc

SEQ ID NO: 32818 - DNA, 954 bp, Homo sapiens; identical to SEQ ID NO: 26866
  chr21:34443630-34444584
  binary

SEQ ID NO: 32819 - DNA, 408 bp, Homo sapiens
  chr21:34481844-34482252
  hyper
cgtctacaaaacacacgagggacctagaaaccaacagacccatcccatctctctcaggttcagcaattctttccttcctcggagggcgtttctgataggacaagctgggcccgggcggattctcaccccaccaccccaactccaggcttgggtccatctgccgccagtggtgacttgggtggcgccctccgcagcagacagccgtgcgccctcggcgacccggtccctgcgctccggcgcccgcaggtcctcgctcccggcttctgcacctcccgctccgggacatctggctgagccgcgcctccctctccccgcagcctccgccggccccgcctcccctcaccacccttcccttgtttggggcggtaaggtcagaagcgttcaacaattcaacgtgggaagtctctc

SEQ ID NO: 32820 - DNA, 671 bp, Homo sapiens
  chr21:42688559-42689230
  hyper
cgccagcgacctcagagctcccgggcacagcccggggcacagccccgcgcacctgccccgcccacgcccgccccgcgcacctgccgggtccgcacctgccatttgcccgactggccgcgcacccagctggcccgcccctgcccgacacgaccgctgcccgccccttgccttcctgacccaggggctccgctggctgcggtcgcctgggagctgccgccagggccaggaggggagcggcacctggaagatgcgcccattggctggtggtgagtgcgcccccgcctcggggcgagggtaggggcggggaaggaggaccccaggggaagcgtcgctccccaaccctgcctgggacccgccacgcttagcaaaagcgggagggctggttcttggcgccgaggctggtcttagacctgggatcaggaatgcgggaagcgattccagagggggcgaacagcgggggtttccagcagggttccccgaccctgtttccccgcgctcgccaggcctgttcccgccgccccagccggggtgcatgggattagggaggaacctggaatgtaacactgtaacattttacttggaaagtagattggtggggagcgcaggcacagccccgcacccccaccccccacccgggctctccacgcttctccttccggggaagggtacgc

SEQ ID NO: 32821 - DNA, 1420 bp, Homo sapiens
  chr21:42878725-42880145
  hyper
cgtagcctttgtaattttccatgattcgggaggttctcgcggctgggagctccgtgaggtcaggcattgccttgggcgcgatgcgctcatctttcccgcgggaccactgcacaggttcgcacggagggaagggctgcgcagcctcgaaggcgagccctgggtgctccctgcccacagggctcacctcgggccgccgtgctatcctttccttcccaaacaagccaccaggattcctcgtgattagggctgccaccagggcgttctgaacaggattcagggccaccgcgctgtgctctacggcggagcgggcgaaggccctcctctgccacaagcgctcagggctctcggcgcacaaactttctggacatggggcagtttttcagctggacccgtgctcgagcagagcgcccactgccagactggagcacttgaccactcagggtgccactgtgccgagccgggcaggacaggatgaggtggaccgaagcgcccaggtgccccgccttccccccaacccggcacggagcgcaagcggaggagccagaccggctcctcccgggcgggttcctgccggtgccgggtgtccaggaggccccggccctgatcgccgccagcgggtcgccgcaacggggcctgagtcgcgagcagtccctccccgagactgactggccgttcgcacctcgcccgggggccctccagcagcctggcccagcggtccccgccgcgccggccgtatcgttcccggcatctcagcgagtttccagtttctccctacctcagtagggaaccaagaagcagaaggagttcaggtaacactgcgggactgcagagatttcccccaaacaaagaagccaaccgacagcactcccagtcctcctccccaaagagaaaaggcgcaccggtgctcccaggcgggggccgtggagggcaggcggactaggagccagctttggggaccccgggggactctcttccaccaactggctagggactcgcaggaccacctgccccaacctcgcgatgccaagccaacaggggcggcgagggctctcggccgtgcgcaaggggtcccaggcgcccagcactctcccagcaccccgggaggcgccctgcccggctggccccagcgctcgaccctcgggcgcactcacctgccgcgccgcgctcctcacacccgctttcacctccgggcggggcagggggcatcggcgggtcccaggcgcccaggttcccctccccagcccggaccccgagccgggaccctggtaccggcgccgctcacctgccgcgctccaggcggcgctccccgcccctcgccctccgcctccgcctccgcctcctgcttagctcgcgcctactcggcccggcccgccctggctctcgctttaatctcaggaggcggtgtcccagggtccagggc

SEQ ID NO: 32822 - DNA, 312 bp, Homo sapiens
  chr21:43188170-43188482
  hyper
cgcaacggtgagtgaaggcttatttttggccacaggagattaataatgaagacaggagggcggagctaaaggagagggtattttaacgacattaactgtgtttttgtgttagtaactcggaaagagagaggctgccccaagtcagcgcattgaaagccgcagacctagtgtctccaggctcccccttccaaacgggcgcggaccttctttcatagcctgtagcggggagccgcgtctccccactgcctccccactcccatccggccgctctttggagggaactcacacatcccaacatgacgatgcttgctc

SEQ ID NO: 32823 - DNA, 603 bp, Homo sapiens; identical to SEQ ID NO: 14930
  chr21:43188777-43189380
  hyper

SEQ ID NO: 32824 - DNA, 983 bp, Homo sapiens
  chr21:46351619-46352602
  binary
cgcccagccggggcgatcctttggtcggacagtgaggttgggagcccaccgcacccaagtgccgccgcatccacccggcgcaggcgacccccgacgggcagccgctcaccttctcctggccccgggcttcaggaaaactgcctggaggtggccggggtctccctagcggaggctgggcggcgggcttcgcgcctgcctcagtctcccaatccgtggcccgggggatggagcccgctgcgcgcagaggctgcggcaggtcccagccaggtgccctggaacgtggctcctccttccctgaggcgctcccctgggcacgaggatgggtctcgaagcaggaggaagccgccttccctcacccgctgtccggagctgctcagccggtgcgcggagcctcccccgccgcggacaccacgatccgacccccaccctgaccccgacccagacccccaccgcccgaccccggccgtattccgttgcgtttgctccctgccagctccggggccaccactgagcacgcgctgtgagtaggcgcttcctggagcttttcctgggggtcctcagaaaaacccctgccgtccccattatagagatggggaaactgaggctcaggaaggccagagcttgcccaaaacctgcggtccgcggcgggcagggattccacgctccgagcctggccgcctccctggggcgcgtgaagggagctttccttccccgggaaaggccggggccagagacccgcactcggaccaggcgggggctgcggggccagagtgggctggggagggctgggagggcgtctggggccggctcctccaggctgggggccgccagctccgggaaggcagtcctggcctgcggatggggccgcgcgtggggcccggcggggcggcctcgggaggcgtccaggctgcgggagcgggaggagcggccgtgcgggcgccagcgccgtgggtggaggtcgccgtccctcctgaggggcagcc

SEQ ID NO: 32825 - DNA, 831 bp, Homo sapiens; identical to SEQ ID NO: 30266
  chr21:48087442-48088273
  binary

SEQ ID NO: 32826 - DNA, 289 bp, Homo sapiens; identical to SEQ ID NO: 14933
  chr22:18348544-18348833
  hypo

SEQ ID NO: 32827 - DNA, 530 bp, Homo sapiens
  chr22:22899582-22900112
  hypo
cggtcttgcagcgacatttctgcctctgctcccgccttcctaggacgcctacgccactgcctgggccgtccccaacccccagcaccttcagaggggccgagtcccagagcatccaccgcattacaaatgcgcacccaccctggagagctccaaccacgagcaccgccgcctcggttcaaggcatccttacagccacaactcctcaactggggccaattttccggggcaggcggcccggggtgacccaagtggcgcacattattttctttggtcttcaacccatttccagagagaaaacagggacccgggacaggggtggtgccgggggcacaagcccaaggtcaccctgcggggaagcggaggaatcagggctcgaacttacgtttttcctcagagagttcaccacaccgcgaagttgctggaaggaaagaacgagacaatggctcagctaagcgccctagccgctgcgtggggcggggggggcggcggtgggggccggggggctgggcagcctggtctgaccaatcccc

SEQ ID NO: 32828 - DNA, 730 bp, Homo sapiens; identical to SEQ ID NO: 14935
  chr22:25959837-25960567
  hyper

SEQ ID NO: 32829 - DNA, 253 bp, Homo sapiens; identical to SEQ ID NO: 14936
  chr22:28200773-28201026
  hyper

SEQ ID NO: 32830 - DNA, 913 bp, Homo sapiens
  chr22:28838056-28838969
  hyper
cgttatttctgggaccaatagcaatttattttgatagaaccgctggatttttttttttcttgagttctcaacaaaggagccatattaggaaataatctcgcaaaaagcaaagtgccccctcccccttttccccatgatcgattcacacacgctggtgcacgctgacacgcacagacacacgcccgtgcacaatggccagcgcaggcaatcgcacgggcccacgaggcctcaggagccccgcaggctgaaggcccggctatggccagccccaggcgctcaggcaggaggcctctcggcccgccgccccggaaccagctgctgggctggtgtgctggggctgctcgccccccagcggggccctggggaaacggctgccagcggctcagagccttttaaccccttggggaaataggtgttataacaccacctgcggggcctgtgtcaggggtgcagcctcaaatccactcccgccccacgccccgccatggggcaacacctagtaggtcttggctggctcctgcaaagctaatcgtgtcgctgtctgcacaggacttctaaagcaaacgggtgcttccgagctgtcacccctggggctccaggcatatcatgaaggaaaaacttaaagggcagtggatgcagaccagatttggtaactcgtccctaagggactgatgcaagtcccaaaggaaccagggctgtttggaccagctggcccagcaaactacggaaggggtggagagacctgaaggtaaccgccccgtgttacccttccccgggttgggctttggggccccattcccctctccaggacacttaccttcttccggggctgccatttcatcatatttgtaaagccgatacgtggaacatcaagatgttggctgggggctgggggcagatgcagggcagcgac

SEQ ID NO: 32831 - DNA, 485 bp, Homo sapiens; identical to SEQ ID NO: 25586
  chr22:29467406-29467891
  hyper

SEQ ID NO: 32832 - DNA, 770 bp, Homo sapiens; identical to SEQ ID NO: 14943
  chr22:31090200-31090970
  hyper

SEQ ID NO: 32833 - DNA, 196 bp, Homo sapiens
  chr22:36847902-36848098
  hyper
cgtcgtaagcctttgttccccaacagggggaagtgaaccagcacacaaggcccttccgtcctgcggagctcactgccttcctcagctcctggcccgcacttccgaccacacactggggacacaccctcgggggggccccaccccagcagctgcccatgttcacacctcttcagttatttcaaactccgcctctctc

SEQ ID NO: 32834 - DNA, 850 bp, Homo sapiens; identical to SEQ ID NO: 22891
  chr22:36901811-36902661
  binary

SEQ ID NO: 32835 - DNA, 290 bp, Homo sapiens; identical to SEQ ID NO: 14946
  chr22:38061005-38061295
  hypo

SEQ ID NO: 32836 - DNA, 237 bp, Homo sapiens; identical to SEQ ID NO: 14947
  chr22:38363635-38363872
  hypo

SEQ ID NO: 32837 - DNA, 54 bp, Homo sapiens; identical to SEQ ID NO: 14948
  chr22:38365003-38365057
  hypo

SEQ ID NO: 32838 - DNA, 316 bp, Homo sapiens; identical to SEQ ID NO: 14949
  chr22:38369819-38370135
  hypo

SEQ ID NO: 32839 - DNA, 271 bp, Homo sapiens; identical to SEQ ID NO: 14950
  chr22:38378835-38379106
  hypo

SEQ ID NO: 32840 - DNA, 305 bp, Homo sapiens
  chr22:38380268-38380573
  hypo
cggggtgtcgcctctctccacctcacagcagggtcccaggcctgggcgggccagggaggagcaggctgcgcactcacctcctcggacctctcctccagtctggggctcgtccttaggaagtggaaaaccgtgtcccaaggtgtgcggtccagctcggggctgggaggtgacgctggtgggctgggagggaggggcggggggccctgagcctcaggccacggcctcgttaggacggagcctgaatccttaccaccaaccaccctggccggacagcccgagactgactgagcgactgagcctgagcc

SEQ ID NO: 32841 - DNA, 230 bp, Homo sapiens; identical to SEQ ID NO: 14953
  chr22:38381994-38382224
  hypo

SEQ ID NO: 32842 - DNA, 767 bp, Homo sapiens; identical to SEQ ID NO: 25593
  chr22:38434385-38435152
  hypo

SEQ ID NO: 32843 - DNA, 246 bp, Homo sapiens
  chr22:38965923-38966169
  binary
cggagcggaacgctcaaagtcactagcccagggaccccaaaaaaggagcgagaaagggaagcgcgccttctcaaaacgagcgtcccctcagagtcttcgcacgctgttcgtttttgccacttacccccctcgtacccacagtctccccgagattttcaaggtgaagcccctctgccccgcccgacctcctcagctgacaggattctaactcgggcctagaacacggagcctggagacccgcgcgcc

SEQ ID NO: 32844 - DNA, 105 bp, Homo sapiens; identical to SEQ ID NO: 26896
  chr22:41839279-41839384
  hypo

SEQ ID NO: 32845 - DNA, 450 bp, Homo sapiens; identical to SEQ ID NO: 23217
  chr22:42353588-42354038
  hyper

SEQ ID NO: 32846 - DNA, 524 bp, Homo sapiens; identical to SEQ ID NO: 30276
  chr22:43115852-43116376
  hyper

SEQ ID NO: 32847 - DNA, 173 bp, Homo sapiens; identical to SEQ ID NO: 14959
  chr22:43529312-43529485
  hypo

SEQ ID NO: 32848 - DNA, 812 bp, Homo sapiens
  chr22:45148213-45149025
  hyper
cgtgcgggacggggacgcggcccagccgggaatcggggtgcccagggtgcgatgtgcgaggggctcctgagcgcgtgtgctccgcccgaccccgccctgtccccccgacacacaggtggacccagggtcagctcgtgcacctgggaaatggctcccgccgggtagcaggggcggaggggcggggctgggcggaggggcgggggggcggggcctgcccgggagccacgtccggggaggggccaggtgagcggcagacccggcacgcaggtgggggccggcggggtccgtggccaggtaaggcgggcggcggcgggagggagcgcgcagggaggaggccgtgctcggggtgggggggtgcgccgcgggggctcccagggcgtgtacggggacaaggggccgctggccgggtagggacgcccaggcgggcgcgacgccacgtgcggccggggggagaccctccggccggcgcgcagcctccgggtcccctgtgggttctagactccctctcccttcacctcctttctttcccgcccccccacactcccctcctctgctttttcccctgtcctgttccttctcaccccgcaccgccttccccgccctcgcctctctcagcctgcgttttggtctggtctggccggacggtgtcagctcaaatgttccttttttgcttccgtcctggggtctcaggttaggtcgggtcagcgcctgggggaggcacctcccccgcccccacacaccccaaacctacaaggtgggtgaggtcattcccgtttcatagatgagaaaacggaggccggggcaggtgctgc

SEQ ID NO: 32849 - DNA, 189 bp, Homo sapiens
  chr22:45680605-45680794
  hyper
cgctgtggaagggctgccctggcctgggcacacagtaggcgctttgatgcgggctggagaaggtcctgcccggtgggattgcgccctggggcaccgcgcacgggtcggggaagcccggggcagggccgtatgcaaatagcgcgcgaggaggccgcggattggccagcccaggcgggggcggggcgcgcc

SEQ ID NO: 32850 - DNA, 348 bp, Homo sapiens
  chr22:50982557-50982905
  hyper
cggcctcccacctcgaggcgatccgacacctcggcccaggtcgcacttttttgcccgttttgatcccatcctccaactgcggccacagccggaaatgtagagaaattcgcgctcctggggccggcggggctggcgctggctcacccgctccccgggccctcccagtcgccaggtttgcgctcggagcccaggggctgcgggttcacagttcgcccgcgagtcgctgtcaaccctccaggcgcggcccgggggcgctcgcgcgcgctgccaacggagccatccctgacgcgttctcagtctacggcagaaaacgccagtcggcgccggaccgtgactccagggtttcgc

SEQ ID NO: 32851 - DNA, 1081 bp, Homo sapiens
  chr3:105087465-105088546
  binary
cggcaagctcaggtcacagaagaggtttgaaagcctctgaatctctcccaggaactggcggggagaggggtttgggggccagagcctgaggaagagattacaagtgtttgcgagctgctgctgctgctgccgttgctgtgtgtgtgggcgggaggagtgccctctccagatctctttattaaagttacatttctgggtgaggtaatgagctcacctgatgtttctgaggctgagggaaaaaaaaggcgtctgcgttctctgacaaatctcgggctctggggcggggactgtgaaaccatagttcaaccggatttaaagcaggtgtcctagtgtaacaacgctggggaggtaggtggaaaggcgagacccccttgggcctggcacagtgtggatttcactttttcgagattccactgtccgatggaggaaaggacactttggagccagggaatgagccaagaagggaggacaagggtgatgtcggtttgtaacatgcaaacgtccacacgcccacagttggttttccgattaaccccctcgagacttggagaatgtaatctcaccctcgtccacacccctgacacaggcacataaccagtttccttttcggtgccgtcacaggcgggccacgtcgcaggataggtttttctacacatttaactgctaaaagggggaaagttccgctttcagacctccttcacggtggttcttttggcgccacaggctcgtgtgtccagggggcaccgagctgcgcgctttcggcgagcggctagccccggctcaccgcaaccagccaccgtgaatctgaggatccgatatcggccctggaccctcagatccgtggtttcggtgaattaccgagctggcattgccgaaattctcattgcagtatcagtgtgttttgaaaggaaaggttacagcactaaaggcgccgtgtctacactgaggaagcaagtcttggacagtaagtgcgccttcttcggagccctctgcatagcagagcccggtgggggcgcggtgccaaaggccggcttcatttgagcggggtaactgccttccctgccggccactcttcatttcc

SEQ ID NO: 32852 - DNA, 208 bp, Homo sapiens; identical to SEQ ID NO: 14965
  chr3:10541012-10541220
  hypo

SEQ ID NO: 32853 - DNA, 69 bp, Homo sapiens; identical to SEQ ID NO: 14966
  chr3:107520023-107520092
  hypo

SEQ ID NO: 32854 - DNA, 1176 bp, Homo sapiens; identical to SEQ ID NO: 14967
  chr3:113251180-113252356
  binary

SEQ ID NO: 32855 - DNA, 1308 bp, Homo sapiens
  chr3:12329055-12330363
  hyper
cggtctccccagaccggccctggccgggggcatccccctaaacttcggatccctcctcggaaatgggaccctctctgggccgcctcccagcggtggtggcgaggagcaaacgacaccaggtagcctgccgcggggcagagagtggacgcgggaaagccggtggctcccgccgtgggccctactgtgcgcgggcggcggccgagcccgggccgctccctcccagtcgcgcgccgccgcccccgcccccgcccccgcccccgcccccacccccacccccacccccacccccagccggcgcccgcgcccgcccccgcgccgggcccggctcggcccgacccggctccgccgcgggcaggcggggcccagcgcactcggagcccgagcccgagccgcagccgccgcctggggcgcttgggtcggcctcgaggacaccggagaggggcgccacgccgccgtggccgcaggtcagagtacgggtgcccgcggcgctcgggaaccggctgctggctgggcggggagtgctcagggagggggcgcggagggctggggccgagggtctgggggctagggccgaggaaacgggaactgacggggtcccagacggatgagagctggggagaagggggtctcggctgaggggtccggggctgaggcagggtcatggtccggcaggacccggactgacgggtcgcgggcgggcggctcacgggtgaccgggtgaaggggtcttgggctgagggcacccgggctgagggtcgcgtctaccggagcgcgcactaggggcggagggcgcgggcacagagagccgcggccggtgccgactcgagtggacgcgagccggtgcgtcccggcttccaggacagcccccctcgggagagcgccgggtgggcgcggagccggggacacggggacctccgcgtccccggcggaggtgcgcaagcgtcgggagccgctccgggggaactttggagcagggtgtctggacccggggaagcgaagatccgcgtgcgtccgtcctgaggccgcgcggcacccctgctgaggaggaggtcccgttcgctgtccagagcccaggggcgaccgccgcttggggaccgggggaccgttcagcgaggggcgcgcttgtagctggccaggccctgtgccctgacgcgttgtgctggccctacgcccggcggaggggctggggacggggactgggtgcctccgtgcctccgcggatggagcgcgcagccaggacccccagccgcaccccggggggctggaaaggcgaagtcgctgctttgtgggctcctgcaagtgccaggc

SEQ ID NO: 32856 - DNA, 94 bp, Homo sapiens; identical to SEQ ID NO: 14971
  chr3:12626586-12626680
  hypo

SEQ ID NO: 32857 - DNA, 1002 bp, Homo sapiens; identical to SEQ ID NO: 25623
  chr3:127794271-127795273
  binary

SEQ ID NO: 32858 - DNA, 1542 bp, Homo sapiens; identical to SEQ ID NO: 25625
  chr3:129693123-129694665
  binary

SEQ ID NO: 32859 - DNA, 382 bp, Homo sapiens; identical to SEQ ID NO: 31812
  chr3:134032175-134032557
  hyper

SEQ ID NO: 32860 - DNA, 1305 bp, Homo sapiens; identical to SEQ ID NO: 14976
  chr3:13460995-13462300
  hyper

SEQ ID NO: 32861 - DNA, 894 bp, Homo sapiens; identical to SEQ ID NO: 25629
  chr3:136537591-136538485
  hyper

SEQ ID NO: 32862 - DNA, 794 bp, Homo sapiens
  chr3:147086665-147087459
  hyper
cggtagcatgctctcttgtcaagaccgattgtgttttaggcaaacatttgcgcaaacataaaggcaaaggtcaaggactgttcagtcccagtatgtgctaattcacctagcgaaccaatggggcaaaagttgcattttatatgctcgcccccgccagacccaaagcaggagtcgctcctgctaatgaacaaaatcgcctctgatcagctcccttgtcaatttctcttcggctctctgatccatttctctgggcttcctcagaaatacaactggtaaagacgtgtttgccaacatctggatcagctccgcccaatttctggggcagcacatgtttattccacgtttctggtagcagaaagctaataataataaataaaatctagcttgctgcagacgcttgcaggtactcaaatgaaggattgctcattgctggcgtctgaatatccatgccatgcagaaaaacaatattatttaaacctcagaatcgaatctcaaagctgcaggttagtggcaggaaagtgcatttgtaacacacgtttgtggaaatgtggtatgcgcgcgcactgggagccgcgtttctttgggacacttccctacgttcagcgaatacagggcatcactttccagtgaaatatgcctcccccaccaatatatctacaccgtctcccacagataatgccagttatttttccagcccctaaaaaaaaatacaaatgatttcaagtggatgtcaacttgagcaactcggaagtggaatatttttagggttaaacaaacgtgcgcacgcaccaacc

SEQ ID NO: 32863 - DNA, 705 bp, Homo sapiens
  chr3:156533976-156534681
  hyper
cgacggctgtggttactcaaactgatctcatcgcaggtcgtcacgacacgcgcttcccctcgcctgcacgcggcgtggcgtgagaggggccctggcagccggcgcgcccacccctgatccttcgaggcccacgatgaagcccatcctacttgcaataacggccccgttctcattcttcaaaagacggctcccagacgtcaacaaagaatctaacctacacagcgccggccctcgctcctttcagcctcagcgagcgctgcccttcattaccccccagcgcacttctggacactgcgccgggtcgccggggtcagccgcccggccacgaaagtcgcccccagcgtgccccaggcgtcagtgcacgccgggctcccggctccaggcaggcggggtgaggcagctccgcgaaggccactcgctggcgaccccttcccgggtctcctagccctggccgggctgcccccgcgcccgcccccgccctcgaaatccaggcagtgcgggaggccgccttgctgctctctccgcccgcacagggccgcccgacggagcgggcagggagcaggcgccaaggaggccgagaggggcccaggggcgaggtcgactctcagcccgctgtccccttatcccacgtttcgcagcctgaggtgtttgttgtatatcgggaactgacacttttcggcgttaaaatgagggcgtcacctgctc

SEQ ID NO: 32864 - DNA, 598 bp, Homo sapiens
  chr3:157217126-157217724
  hyper
cgcaaaacgtggcacatttcagggagtcacagctgtcccgcgcaaactcgactttacctgcgtgctactcctcaaaggcgcccttgcagttactcagctgcatggtttgagactgggcgggagattcaggcaggctccgagggcacagcgagtggaatccgctcagctcagtgaacctgaagttgttcattgcggagccggtgccgggtggaagaattcaaggaatgcagcctgatgccaccggcagccccagagaccggtcaggtgacaggctgcacctcacccagcggagttacctcccagtgcaacgctctgtttcctgaggtgaaacacaaagcctgctccagtaaaggagagttgtttttaacagagaaaacagaactccctgtgttcgtgaaaatctatactttcccagggaagaatggggggcgggggcgagccacgcaggaaacaattttcaacagaactcaagcaggtgaacggaatggctgtagggagccacctctcagagctccaggggaggagaagagaactgcagcttcattaacacttccctctccctgagatctcacaaacgttttggaaacactgagtgttc

SEQ ID NO: 32865 - DNA, 1092 bp, Homo sapiens
  chr3:157815399-157816491
  hyper
cgtttgtctttcgatttttttgtttgctcattttttcattgttaacaagatttttttttctatgcaagagtccatcgttgcagctttgcggtgagccaaactccgcggttccagcactcccctgtccagtctctctccagactcccccaaacccgctcctacaaaacccaattctaggccctcgagtaggaaaacgggcaggagccacggagcctgcgtgcctcgtgagatccctggtcctgcgtggagtctggctttccgagtccaagatgcgataggggacgagggatggtcagtgaggcgggaagagggccggctcccgaggtctcaaaggggtaacggagaagcagcggggcgcggagggcgtgcaggctgagtgccgcgggacaggcgcgacattggtgctggcgttggcgtcacagacccagggctgcggcgtgctttttggctttcagtctgagatcggcgatgctggagttcttgctggtggtcttggcggctgctgcggccgccactaccgaggcggcggaagccgaatccgcggccagcgtggcgagcggcagtccgaagggcggtgctgggaacatcatgtagggcgcgtgcgcggccaggtgcggatgcaggtggtggtgcgcgtgcgccacagcgctgtccagctgcagctgcgcctgaacctgaaaggacaagggcgtcacgttgcaatgactatcctagggtgacaacagaatagaaacagagcattaacggcgtccagcttggccagagagagagttgggttgtgtttgggcacggggagagggcatttggctgtgcatcttgttccgacagtgaccttctcagcctgttgctgaatctggggttccacatggatactccagtgtcccctgggtctccgaaactcgcttagggtaggcttatttccccggaccccgggaacccccttctgcaggaatgtggccgtctcccctgggaactgggctgaaatggtatattggaaagactgcgggtgaggacccttaccctcttctcttgatgctgccatgcatctcttaccccactaccaaaacaacggagtatcaacaagcaaactac

SEQ ID NO: 32866 - DNA, 1115 bp, Homo sapiens; identical to SEQ ID NO: 23237
  chr3:157824433-157825548
  hyper

SEQ ID NO: 32867 - DNA, 1066 bp, Homo sapiens
  chr3:159480852-159481918
  hyper
cgctgaggtcatcctcagcgtgcagcccggaggggaagggaaacgtgagctaaagcaacaggttccacccacagcctgaacttggaaggggatgcggcggcggcaaggcggctggagctgcgcggtggagggagaggaagcggcgaggaggaaggtggaagggaaatgatggtgcatgaccaccgagcacacgtcactcgggctcccacatgggcttgtgtatgtgcgtgtgtgaggggagggaggtccttcacagggtcactcgggcacttccgcgtggaataggaggcgccaggctcgtgctttgggatgccgggtggcttcggcggggtaacgagtcacgcagagacggcttgaggcaagccaagaaaatacgggtgtcggcgtgaaaatacaccactcttcccagcgcgccgcccttgctaactggctggacctgcgcccctaacgcccagtgcccccttcttttgggcctatcttggcccctccaaccccatcccagcctgcctcctgctccagcctgccgccgcgaaaaccgggactgcggactgcgccgcgcccggcagcctctgggcatgctcggtggcgggaccggctccaccgccaggagggcgcgtcctccctcccctagggcggtgacggcgcctgcagcgacttgccgccgcgccccggccaggcacaccttttggggaggcgggggaccaccctgcccggcgtgggccgagagcgccccccaccccgagccttccggcgggtgggaggaggggccggccagggagacgcggaggcgggagtgagacctccgactgccagcggttccttacaaagtaaagctcagctcgcgcgcggacccgggctcccagccgcgggcggggaaggggcggggcggggcggggccgggccgggccgggccggggcggggggtggtctcagcgcctagagcgagatgcgaaattagtagccgcccacccccttctcagttcccgcccccagggaattataatttcctgggaaagtgtctggttctcggagaatccttggggcggggtaaaggggcgcgcctggc

SEQ ID NO: 32868 - DNA, 554 bp, Homo sapiens; identical to SEQ ID NO: 31820
  chr3:160167477-160168031
  binary

SEQ ID NO: 32869 - DNA, 1895 bp, Homo sapiens; identical to SEQ ID NO: 26955
  chr3:16553609-16555504
  binary

SEQ ID NO: 32870 - DNA, 929 bp, Homo sapiens; identical to SEQ ID NO: 24413
  chr3:16925425-16926354
  binary

SEQ ID NO: 32871 - DNA, 434 bp, Homo sapiens; identical to SEQ ID NO: 14995
  chr3:182880277-182880711
  hyper

SEQ ID NO: 32872 - DNA, 915 bp, Homo sapiens
  chr3:182896562-182897477
  hyper
cgaagcaatcttggcactaacacgaacaccccatgaacgctcgcagggatgctgggaggcggaccgggagctcccagtctgcggcccccgccgggttggagcggctccggctcctccaaggctcgggctaagcggctctcaaccgattcccaccccgccctggagaaatgcgggcgtgtctgcaggcatttttgattgtcacgatttgggggcggggtggaggatggggtggcgcattcctggcacctagtgggtagaggccaggggtgctactaaacatcctaccgtgggagcacagagaagcccacgcagcaaagaattgcccggctccgaatatcgaagtgcgcggtcgagaaggcgtgggctgcgggctctgctcgcctctgcaggcgccttagagcagctccgaggtcccccgtgcggagctaggcgcgcacccaggacacccctcgggctcctcggaggaggccctggttgtcccctttctgccgccgccgaggctccggctgctttctgcgtagctgggcagggcccgggcccccacaccgcctctcccgggaatgcgggcgctctggagccgaggagcgggggcgtccgcagggaggtcagctctcctgggcggaggtcctcgggcgcagcgccctcgcctggaaaccagccgtcgcccccgcaggagccagccggcccgtggacgccccagcgcgctcctcctcggtgctgcgggtcgccctgcaattccgagaagaaagtcagagacgccgtggcccaaagaggcgcttagtctttcctcgctcacactcacgtttcctcctcatcgcgttcttctttttctccctggctgctttctcccctctccaggaaagcagatttggaggaacaggtttcgtgactgtcgtccgactggaaaaggcccgc

SEQ ID NO: 32873 - DNA, 801 bp, Homo sapiens; identical to SEQ ID NO: 26975
  chr3:184321783-184322584
  binary

SEQ ID NO: 32874 - DNA, 292 bp, Homo sapiens; identical to SEQ ID NO: 14998
  chr3:184626085-184626377
  hypo

SEQ ID NO: 32875 - DNA, 482 bp, Homo sapiens; identical to SEQ ID NO: 25652
  chr3:193775965-193776447
  hyper

SEQ ID NO: 32876 - DNA, 1816 bp, Homo sapiens
  chr3:194407289-194409105
  hyper
cgcgcgtgtctcccccgcaccaaccttttttgcacactcgaagctgaatattttcttttttagagaatttacccgcacctcctgcggggttcctaagcactctctctgctcccctccccccaactccctaccacagggccgctcccagtagttttattcttcgatcttgcccgggccgagcctggcaggggccggtggctcagcgggcctcgcacccggcgctccgccgccgccgccgcccagctgcgccggggcgccctccggagatgctgccgtggaagaagcacaagttcgagctgctggccgaggcgccgccgcggcaggcgtccaagcccaagggctacgctgtgagcctgcactactcggcgctcagctcgctggcgcgggcgtgccccgaaggcgcgcttagccgggtgggcagcatgttccgctccaagcgcaagaagctgcacatcactagcgaggacccaacttacaccgtgctctacctgggcaatgccaccaccatccaggcgcgcggcgacggctgcaccgaccttgctgtgggcaagatctggagcaagagcgaggcgggccgtcagggcaccaagatgaagctgacggtgagtgcgcagggtatccgcatggtgcacgccgaggagcgcgcgctgcgccgcccgggccacctctacctgctgcaccgcgtcacctactgcgtggccgacgcgcggctgcccaaggtcttcgcctgggtgtaccggcacgagctgaagcacaaggccgtgatgctgcgctgccacgccgtgctggtgtccaagcccgaaaaggcgcaggccatggccctgctgctctaccagacgtcggccaacgcgctggcggaatttaaacgcctcaagcggcgggacgacgcgcgtcaccagcagcaggagctggtgggcgcacacaccatcccgctagtgccgctgcgcaagctgctcctacacggaccctgctgctataaaccgccggtggagcgcagccgcagcgcgcccaagcttggctccatcaccgaggacctgctcggcgaacagctggagcaggagctgcaggaggaagaggaagaggagcaacccgagggctgcccggaggaggaggagaaccgtgcggcagagggagatccagcagaggaggaggccgaggcgcagcgtgcgctagtggtcgccatgcactttgagtgcggggacttgttggatactctggagaatggccgtggggaggcgctaggaggcggcgggggctccctgggcccgggggccgggccgccgcctctgctgctgggcagcgcctccgacatgaaggctgagctgtcgcaacttattagcgacctgggcgagctcagcttcggcaacgacgtgcgcaccctgcaggccgacttgcgggtgacgcgcctgctgtcaggcgacagcacgggcagcgagagctccatcgagggcgggggccctgacgccacctccgccaccgccggggactcgtcccgccaggccgacggcgccagtgcagacgagccccactcgggctgagctcctccgcgcgtcgccggcgctccaccgtggctacccatccgtggtcccgacaacctccctgtcccttgcccgcccccaggaagggggaaatggggcatttggggcccagacctacacttggagcccaggtccagcgttcccccgaccgctttcccctacctcccggcccccgctcccgccccagcacttttggctctgttgcgcgtggggatgcggggagatttgagaggggaaaaccccgccaggagggagagagaggcacccctctgggatgc

SEQ ID NO: 32877 - DNA, 464 bp, Homo sapiens; identical to SEQ ID NO: 24432
  chr3:196754412-196754876
  hypo

SEQ ID NO: 32878 - DNA, 643 bp, Homo sapiens; identical to SEQ ID NO: 15005
  chr3:197025639-197026282
  hyper

SEQ ID NO: 32879 - DNA, 989 bp, Homo sapiens; identical to SEQ ID NO: 15006
  chr3:24536360-24537349
  binary

SEQ ID NO: 32880 - DNA, 636 bp, Homo sapiens; identical to SEQ ID NO: 28006
  chr3:25469368-25470004
  hyper

SEQ ID NO: 32881 - DNA, 1318 bp, Homo sapiens
  chr3:27754023-27755341
  hyper
cggcggcggtcagagatccatgtgacgcgggggcactttagggaccattgctgagggcctggttagcatttgggcagctgaatccttcccttggcgaactccatacgtgccctcggcgacacacagaggactcccagagttgaagaagggggtggatgtgtgtgtgcgcactcgcccacgtctcgtgttttacttttcatttaagtcgtaataaggagaaattcgatgaccagcaaggctggagtcccatcgtcttgttgggggagaggggggagaagaaaaaggtgcctgtaacttcagactgtccaagatatcgcttagctcctgcgcccggaagaaaatccagcgcaggtcgggttccggcgcgcggaagccctgcgaaccccaaatgtgtgcgctgagccgaggcctctaagcggtaggagagaatctgacctccgacattcttttcaagacacgcgccggtggaccgggtcctgggattggcttactcccgggctggaccttggggttcgcatatttgaaagcgtaaacttgaggaatgacggcggggtgatgggtattttatagagtgggactcaatcgtgctcagcaacagatttctccaaattcccttttaaaaagagcctcccagagctgtcgaaatctccgcggggtgaaagctaaacttttggagtcgctgtgtagccgggtagaggacacggcggcgcgagccggaaagataagtgtccaggcgaatgggaaaggaaagatcttaatttttgttcctactgttagctgaatgtccataaaaatcaaagggaatgcggggaagtttttattccagagcgtttccatgacacccgcagagatttaaaaaattacattcctccccctacgcaggtttaattcggaaagaagagactgcagaggagagggaagaccgtgagtctgctttcacctaggtttaaagcgaatcaaagacggctgtaaaaagggaaaccgggaccaaaaacagatttggagcctcgaaactctccattgaaggtttggaagatacgttgctgcagacttgaaaccggctccaaatccggcccaaacatgggctgaaaatatggcgcgctaatctgctgcttcccctcctcctcaagttctttctgactcttcccacctttcccagtttcccttccagacgtctgcggctccccactccacccccaggatagctactctacatcccgacaattcccagcttctacacccaggaggaggaattctggaaccacccagagcgaactcgtgccggggcggggtggggaccggaggaaggtcctgctcc

SEQ ID NO: 32882 - DNA, 904 bp, Homo sapiens
  chr3:27764913-27765817
  hyper
cgagctaacaccaacttcatactcacgccaacacaactgctttcggggagacagtcacttttattccccacaatttaaaatcctttctgctcagttttcctgatcccggattccgtcccttcaccaccatcttcagttaggcctgacaccaagaaacaaagcttccctaacagccccacagttaggattccctgcgcctctgctctgcggcaaatacagaaggtagaataattagtgaaataatcagtttgatattgaattaaactccagctgcttgtttcttcgctgcgtttcctcagatagattcaagagcggggccgtcatattttatcgtttcattattacggaagcggggggcacgtttcgttgcggataaggagaagcctgaatattcgctgttaataagcaattacagacgccgccagtaatcgctccgggagcgcattttccggctgagatgtcgggactctgcttccccaaccgaacgcgatcacacgggaaactcttcgcccacaacagatgagatggccaaaggattgctgagtgcgcacacgcaagtgtagaacagtgcgaagctttccaacccagttttccaaccacagcagcaccaacatcggcatgtctggggtctccgagaacgaggtccttaatgcacttagactctccagggcatttatcacggttttttttttcttttttgatgtgtgtgttcgcgcgctcgcgcgctcgcgtgtgtgtggtggtgaaacccaggagtgcgcgaagattttcagggtcaaggcacagccacaggggagggggcaagttgagactagtgggctggggcggtggccttgtaggtcctgggacagagtggccaggagcagatcgccagaaagctggtactgagcgcgttctgccctgc

SEQ ID NO: 32883 - DNA, 239 bp, Homo sapiens
  chr3:32279487-32279726
  binary
cggcccaggcgccgtcacccaggctccaccggtccgcgggacagagccgcggagagcgcctggaagcgtcgcgccctcaaagccaagcgattaagttggttcctcaaattgttcccgacaggaggggcaggaaataacaccgggctctggcggcggccgcagcaggagggggagaagagcgggccgtctcccgggcagtgctggcggcctctcatcgatctcgggtctaaggtccggcc

SEQ ID NO: 32884 - DNA, 916 bp, Homo sapiens; identical to SEQ ID NO: 30327
  chr3:37493509-37494425
  binary

SEQ ID NO: 32885 - DNA, 711 bp, Homo sapiens; identical to SEQ ID NO: 30329
  chr3:38080628-38081339
  binary

SEQ ID NO: 32886 - DNA, 804 bp, Homo sapiens
  chr3:39851218-39852022
  hyper
cgagcccccgcggtgctgcagcccagctttagcgcgcagaccgacccgcgccccttcttcgccgccggcagcctctaatccacgcggcgcgttgcggcaggtgccctgggcgtactgaggcgcggtggcctgagcccggccgccatcgatgaccccggtcgcggacttgcttcaggctggccaccccccgtgagtaccgtccgcctccctcttctcccctctggcagctttgcgccactctcccctcaacgttgccgcaacttcgggggtgggtgtgtgaaggtgtggaggtgtctctcacgctcccccgcaccctgtgcgcgtccggagccaggaaccctaggcgcggccagtcagcctctgcggaggggcgaggggcgcgggtacttgaacttgctcagggatcatcgcggagccagaatcgcctctttctctcgctgctggggtgggagctcgcctctgcgtttccctcgcgttttccgatcccggatggccacgtagtgcttgggctgcggttcaccgcgtacctactgtgctgcgggcgcaccggcgggacgcctcaaaccatccgttaagcgccccgcaagcagcccagcgcgacggacctgactcaaactcttaattctgtaaaacgggggtaatcagggactctctcaaggtcacagctggtgctcagagttagaacacaggtggattgcgtctggccctcgcccgcgggctgcctggggaggggagagctgttggcggggcggtcacttcagcttcatcccgggttcctcctcatactccctttccgccacagcc

SEQ ID NO: 32887 - DNA, 217 bp, Homo sapiens; identical to SEQ ID NO: 15012
  chr3:40547367-40547584
  hyper

SEQ ID NO: 32888 - DNA, 502 bp, Homo sapiens
  chr3:43935666-43936168
  hyper
cgtccggaaattgaagctaataagagcactgacttccctgggcggcggttgaaggctacctgtgtggatctgggcacagcgaagagcggagccttaacagggtgagcacgccggttgcgcgctctccagagcagcccagcatctcccgccagcctcgctgcccgctccgccccggcgcaggggccccaagcccacaggcaacgccagcgcgctcccaaccgctggagacagaaacaatgtgcgcgcgcacacggcccacgtgcacgcgcgcacgcccacgcggcatacaggcgcgcacgtgcacacgcgcgcctgcacagctctgcggctctgctccggccccacaggcccatcttaaagtgtttcgtgctctaacttaccaaacacgtggcagccggcagaacgaaaaggaaaataaatgaactgcgacgaaataaagcaggcctttccgcagtcggccacgtccaacagccacttggttcctagcgctttctcgttaccc

SEQ ID NO: 32889 - DNA, 2936 bp, Homo sapiens
  chr3:44037719-44040655
  binary
cgctcccacaacctccagggtcctagcggagtcatttaagcgctcagtactaccagcttcattttaggtaaaaatcaagactaattctgcactttattaacctcctcgtacccaagtcaccacggggcagcttttcacagccctaaggcgtggtcacttcaagcccacagcgagttgctcgtgtcctcggcttctgctccgcaaatctcggacgatgccaccggaggacgctgaaggcaaaggctggtggggccaggcgccggcgagactgccgcgctagcacagcttccgcgggagccgagtgctgacgggcctcgcgaccccctcccgagggcaaacggctcggccctccagggacacttggtcagtgtcactctctccctaccgggtgtcgcgcattttctcaacagaacgtgaccccgtagacggatgaactcggaatcggcaaaacccgcctgcccttgtctagtctctctgccccaccacaccactgcccttcactgcggactgcgccgtgtgcgctccgggaccgcccctgcacctttgcccacagcttcccattaccaaggcagccggaggaagacctttccgagttacctgtctcacgtcagcagccacaccgaggcggtccccctcgcaccactccccaagtgcagagcccctgaaagtccgaggctcctgtgccacgcaccctcccccctgcggggcgaccccgcgtatgcgtgtgtgtgtcacgcgtttaatcgcacagagtaattcccagacgtgcaagacaaagcatttcaagcaaagatggtccagagttcaaattggaaagcacatctcgaggcgctgaatctgttctcgccgtctgcctcggtctctggggcgtcgcatccaggagaagggttttaactccctgccagatccgctcggaattagctcttctggcggtgcagcaacaagtggccccgccgcctcccttgtgcactcggagggactacatcctcctcctctcccagcccctagtccaaacgggagtaggtaatggcggggaaagggggaggtgacgagagcggggagaaggaagtacatattttttaattgtgaaattgtctgtctgcgtgctgtgctctgggattctcttgtctcaatcaacttcaattttaacgtggccgtaacgttaagattaagacctagaaatgaaaacgtacccacctttcttattacaaaggtcgtttgttgttgttgtttttttaaaacaccaagtaaccccccccccccccccccacggacttatactttgtttatgagatttctccaaccttggtggtttggagaaatgaggtgggggaggggaggaccaagggcagcaagacgtccactacgaaaataagatacttactaatttaatagggccgttcctttttacataagatgctcccccaccccccaccaatttacaataggtaaactttgagcttcctcaaagtttcgctatctagcgtttatgcccgaagctttacgaataaactccctttccaggtaaacctgcccaacccttgtcctatgcccagcgaagcccaggtacgatgggtcaaggacccctggcttccacattgtctgagtcacgttccagttggaaaggccatcttgggcgagggacgtgttgcccgactggtctaaataaggaaagaaagtggagtaccaaagaatcaagggcctctgttcctccccatcccgccaccaccaccaccggtccccgggctctgctgagcgctgcggcggtcttggctgaaaactgcgtccccgcccaaatcgagcgcaaaactcccttggacagaagtttgaaagaatccagtgtagaaacagacttctccgtccaatttggttttaatcagtaatcatataagtatacccacataaccacctaagtggagagcagacgcccagattcacggtccccacgtgttgctggagttggcgcagacgcgtgtgcgggcatagcggcggacgtgacaccgcattttctccgaattcctgccatctagggtggtgccgccccaagagggggccgtggggaggtggggtaataggctgcgcaatccacttgctctgggggagcttagggttcagagcagagcgcaactccggggggctgtcgcacagccccattctcccacaccagaagagcaatgctccttatggatgattaatagccgggcttctcctgaccatgcggcgcgtccctgccggcaccacttagttgttttaatttgacctttattagcaacgtgctcccagaggctgcgagttggattcgcaccacgataacggccctctccccttccacccggccggcttcctgggaaggatcggggactgcagctcccgcgacgcctcctcctcctgcgcagggagcaggcctgagttcctccacgtaatgacctgggagacctcaggcatcccggggcctggtcggagggtcttcgggccctggagctgggcggtgtctgcagtgcaccgccgtgagtttctctcgggtacaatgtgctggtgtgcagagaggaggaaaggaaaaaaaaaaaacccaacaccactcttaagtggcactggcatctatgaagtggcagtggtctacactgagcgtgcccttgcctggaggtgtagggggcggttactgcagccgaggggagggtactgcggccaagggcagggcgagaggacagtcaaggccggctggccgcgtgggagcctttcctctccgggttcagcggccggaatcaccagcactgcggctaaaggggctggtaggctctcctgcaccccgcgtgctcctccgccttctctgtgtcccccggcttttccaggaggaagatggggtgcccatcgcgaatggggcgcgccgggccgcctggccgggcggtcacgtgtcccccctcccccgccactgcggc

SEQ ID NO: 32890 - DNA, 857 bp, Homo sapiens; identical to SEQ ID NO: 31847
  chr3:44063232-44064089
  hyper

SEQ ID NO: 32891 - DNA, 1217 bp, Homo sapiens
  chr3:45186931-45188148
  binary
cgtgttggtcccttcccccaaccgaaacaactcgaaattcacacatatccccggaacaacagcctcctgccctcaaagtccactgccaaaaagtgcgaggggcgcgggaatgtccagtctctgcggtggcgcagatgcctggcggctttctctgggaccccctaaaagaaatccgggcgctttcatttttgcaccaacgctcttcaactttaggagagggggaatgcagcgtgcggacgggaaaaaggggatctagtgggaaatgcggacgtgaaagcactttttttgcaccttctctctggaccaggcgaggaggtagagggcgagcctggagaggaaagatctcttcccacaccctgcctgggtgctttcaagaatcccggcaaagaccctggggcgcacggcgcgccaccttggacatgtcgcctgggatcggctaccgggagctccttttcccgccttctcggccagcaccgggctcatcctcccggaccgggaggctccccgatcggggacactctcacgtgccgagggcaaggttgactccaggagggcaaggcccacgcgcccgacgcggcgcgcgcaggaaccgaacagtccgggggtcccggagccacccgcgcattttgactacgccgtccccgccctctctccgcaccctccgcaccctccgcaccctgcgtccctcggccgcatctccgccgggcgtccgctggctggctagctcaccactccacgccatccgcctccaaagcccggcactcacctgccccgcgcggcaggcgcgccgcacccagcagcagaacccctagcagtgcgatagagaccccgcagttcaggccggccatgactccgggacgcctcggcctcggtggggaaaacgacggtggggagcggcggccccaggcgcccaagcccggcgcagctgcgctccgccctggctcactcacctgcgcgcgggcggaccggcccgagccccgccctgcgcagcaggatcgcgagctgacccggtgcgtccctcctctctctcctcctcctcttcctgcctcagcgaccgcctctccctcccagggtgcagggctcccggcaccgggttgctgggtccctactactccccattgcggcgttggagcggacttgtccccacctttccgggcttagtcttccttcccaagtctgagaatgatgaggtctttttctccagagtcgcgaaggtc

SEQ ID NO: 32892 - DNA, 485 bp, Homo sapiens; identical to SEQ ID NO: 15017
  chr3:49027062-49027547
  hyper

SEQ ID NO: 32893 - DNA, 395 bp, Homo sapiens; identical to SEQ ID NO: 15018
  chr3:49027805-49028200
  hyper

SEQ ID NO: 32894 - DNA, 938 bp, Homo sapiens
  chr3:50242718-50243656
  hyper
cgggagcagagcgaaccgcaccggcccgagcggagcgccgcacgttcccaaccgcgaggccaggtaccgcttcgggagttcatcccacccgcacaggggaatcgggtgggccgagccctactgtccaccctcctgtccgtagccgggctctgggcagctctcctctaccgtcctgacccgggcaggcgccccagcctccggcgagccaaagccccgcgcgctccaggcgctggtcttggggacctgccagtcgggactcagcgccgagcttaagcagggccctgggggtaccgggagggacacgtcgtcgccttagggcctctcggcggggctgcgaggtacagcaggaggtcggcggcacccggggctgggaccacaggacgccttgttgggggctcgggcggcacaccacaggcttcctgaggcagggcccatggggcaggctggagagggcccgaggggaggacccaagaggggcctggagcagtccctggagcgctgccccgacgggcgcctgacaggcagagcagcccggctggcacgatgggaatccgggtatatttatctcggctgctccggacaagggcttgagggcagatcgggccgggccgcctgaggggccgcggggtacatgctggtcccagagccggtgccatttgcagaggagccagcgggcacagcgggcgcagggcgcgagtggctccctgacctgaggccggggcgccgtgcgagctcctccccacctggcgctgggtagggtgtaagttagagcccgcgcagcgcacggcggagagaaggaaccaagacttggtttgcaagagcccgcccccgcccggttggccccttcgattggccacagcaaatgcgtgcgtttgtttacacccaggcagggggaggccaggggagggacctgcggggacccgcccttttccccccac

SEQ ID NO: 32895 - DNA, 461 bp, Homo sapiens; identical to SEQ ID NO: 25665
  chr3:50604957-50605418
  binary

SEQ ID NO: 32896 - DNA, 211 bp, Homo sapiens
  chr3:52415754-52415965
  hypo
cgcatcagccgcaccctacgccaggcgctgggcaatgcactcctgctgggcgtgggtggcagcggccgcagctccctcacaaggctcgcctcgcacatgtgagcgcctccagggcgtgctgggcagtgggcggccagggctggctggtcggtttgactgacccatgcttttgcacagtggtagaggcctcgggcaaccctgaagtaggccc

SEQ ID NO: 32897 - DNA, 572 bp, Homo sapiens; identical to SEQ ID NO: 15021
  chr3:53527829-53528401
  binary

SEQ ID NO: 32898 - DNA, 395 bp, Homo sapiens
  chr3:53879638-53880033
  hyper
cgaattacgggggcgtgggtggaggctcgttaaatgcagatcccgggcctgacccggacctgccgtctggatctcattttaggcggcgctagagatcccgggccagggaaacttgagaaccgcagctccaaatcgccagtgctgacggcttccgctttgggagccccaggtgttgctgtccgaactcacttggtggaaacagacatttaccagaaagcctggggtcgggcagcgggcactcctaccgctctaaccccgcgtagctgaaagaattcgctccctcaaaggagtcagtgagcttcggcagtctgcgttccacccgtttcgcttcgcgcggcggggcgattgtgtaaagcgggcccgggtctcggcgtccagcccggccccaaacctcc

SEQ ID NO: 32899 - DNA, 625 bp, Homo sapiens; identical to SEQ ID NO: 15023
  chr3:57994555-57995180
  hyper

SEQ ID NO: 32900 - DNA, 783 bp, Homo sapiens; identical to SEQ ID NO: 15024
  chr3:66550318-66551101
  binary

SEQ ID NO: 32901 - DNA, 718 bp, Homo sapiens
  chr3:69434926-69435644
  binary
cgagtgcccggcatcctgctggggccctcgggtgccgcgcgctccagctcacctggtacacgtcctgcagcccgcaccacgtccgcagcacctggtggcaagcccgcagcctctccgtgtaccatctccgcagcgtggacacggtcaagttccatacgaagcggctgccgctgaacagcaggtcctccacgccacacatgaacaccgaagccatgcctcctccttcgctctgaacccgggcgtcccggctctcgtacgtgcagccccgaccccagcggcctgcccgcctgggctcccgacgccggcttctgctggcagccggggggtcaagcctgccaccaaactcgtctttcaccgtgcgtcctggccaggctccggcggcatgccctgggattgggtgcccgccagccaacggctgcgactggcacacagaagcccagtgtccacccccgcccgctcgcagcgccgagcaagctgtgctaagctccaccaagctggccctcgatgctcccggggcacgggaagccctggccggcgaggactccccctggcgcttccccagggcgcggggcagggacggaagcggagcaactctttgcaggcagagaggggagctgcatttcagcacacttggcttccacgtcttgcgcgcgcgcgaacacacacacacacagacacacaccccccacaccggacgagtggtctcctaatctgcctc

SEQ ID NO: 32902 - DNA, 1710 bp, Homo sapiens; identical to SEQ ID NO: 15026
  chr3:71113110-71114820
  binary

SEQ ID NO: 32903 - DNA, 229 bp, Homo sapiens
  chr3:71187313-71187542
  hypo
cgcagaatggtgacgctgtctggagaacacacgtggaggaagaagcgaatgcttctaattgcctcaaaatgggatttttaatatttaggaacgtaatgggatcgggaaataagaacacttccaacatcctttataaataagcctttacaaaatattgttagctgttaataatacatcattatcaaaaatggaaagtcatgaatacagtgcatgtaacctttgtattcac

SEQ ID NO: 32904 - DNA, 1327 bp, Homo sapiens; identical to SEQ ID NO: 15029
  chr3:71630573-71631900
  binary

SEQ ID NO: 32905 - DNA, 478 bp, Homo sapiens; identical to SEQ ID NO: 25670
  chr3:9904234-9904712
  hyper

SEQ ID NO: 32906 - DNA, 510 bp, Homo sapiens; identical to SEQ ID NO: 25671
  chr3:99594790-99595300
  binary

SEQ ID NO: 32907 - DNA, 443 bp, Homo sapiens
  chr4:106067046-106067489
  binary
cggggcggggagaaacagaactcggtcaatttcccagtttgtcgggtctttaaaaatacaggcccctaaagcactaagggcatgccctcggtgaaacaggggagcgcttctgctgaatgagattaaagcgacagaaaagggaaaggagagcgcgggcaacgggatctaaagggagatagagacgcgggcctctgagggtaaggtgggcgcaagcggaggtgtggtgcggggagaggtgccagtgggtggaggcgggggccagagcgagggcacgtgcgggtacactccggaggaggtgggtgcgcgcgggggcgtgtgcgcgggacctcgaagtggtggtggagtgcagaccagcaaaaagtttcaaagggaaatcttagatgtcacgtctttgtccaggcacccgtgccatcccaacctcccacctcgcccccaaccttcgc

SEQ ID NO: 32908 - DNA, 810 bp, Homo sapiens; identical to SEQ ID NO: 27018
  chr4:113441539-113442349
  hyper

SEQ ID NO: 32909 - DNA, 153 bp, Homo sapiens; identical to SEQ ID NO: 15032
  chr4:119809913-119810066
  hyper

SEQ ID NO: 32910 - DNA, 1537 bp, Homo sapiens; identical to SEQ ID NO: 15033
  chr4:124317751-124319288
  binary

SEQ ID NO: 32911 - DNA, 931 bp, Homo sapiens
  chr4:13548517-13549448
  hyper
cgactttgagttgtcgggtatttttgtgtcccaggagtgtgagaaaggggctacgttccgcgtcttccggaggcgcacagcaagggagtctcctggtgtcatctcgggccattacggcgcttagtcgatcattaggtctgtgggtgactgtaggcagagccgggagttgggtgcttggcgcggagggtgaactcgcgggtcttgagctgcaactagaagctgctcctagcaaggggtcgggtggagatgaaaagactgtggggaaggggaggtggttgtatgcccagagatatcccggcgtaactacggagtccaggcccagagtggcggtgtgtggcgaaggcgcagcaggcctgcgcctgtcggaggacggcagatctggacgcgaccgcgcgggcgtgcctgggtcccgcttcctgcccatcgagggcgacttccttcgggctcagctgtgagctccaggaactctgcaacctcccgacgggcgccacgctccggcttgggccggcccgggagttggcggagctgcgcggcccggccgggcggccggtgaggctttcgagaggcaccgggctcgctcagcgtccgcgcctctctaccccgccgcgccccctccgcgcccacgggcccattttttcctagtcttctgcctctcttccttcttcctccctcccctcctcctccacacctttgtcttcttcctcctccctcctcctgcttctcctccgcagtttggatcctacgggccccctacgtgccgcgcccttcggtccccggaaccgcccgggctgggggtgctgctgcgcggtgagacttccgcgggcggcgggcggagagcgggatttgactgcgaaagccaagggggcggggaaggggaagccccggccctcgggggcgcgcagtaaactgctgcacacgtgcccgcgctccc

SEQ ID NO: 32912 - DNA, 378 bp, Homo sapiens
  chr4:140970253-140970631
  hyper
cgcatctgctgctctgtgattgcacaagagaagctaccactccttttcttcacaaagaaaaaaaaatggcatttatcgcaagtacagcaaggcatattaggattcacctcccccattctttcttccctcttcctcctaccatctccctcgccgcctccctttcctgttggaaaagaaaaggtgggagggagaggaggacccaccggtcacagacaacgctgtgggattctctttcttcagcttttaccagcctatgggggtcaggatgctattggttcagctttatgtgtgatatggtgcctctcacttagcaacagcgagcaggagaggcaggaagcaacgccacctggctcagcaagtgtgcggatggtttaaaac

SEQ ID NO: 32913 - DNA, 824 bp, Homo sapiens; identical to SEQ ID NO: 15036
  chr4:142557243-142558067
  binary

SEQ ID NO: 32914 - DNA, 865 bp, Homo sapiens
  chr4:143767745-143768610
  hyper
cgctcctcttcctcctcctctgctctctccaagcggtctcctcccaatgtcaccagcgaccgagtagaggcggccgtggcagcgacagtcgcgcaactggcgctgctcgcttcccgctactgatagagcggagatggtggcccggctgcccaccccgaaattaccacgctggctccgtgtgctcacaccccgtaccccgacccctttctgcggcccctctgcccgctgggtcgcccacccagactgggctgtgggatcaccgctaccgcgacgaggggggacccgaggccgccacgctgctgcgggggcaggagaaaccacagagaaagaacccgcgggaggaagaaagcgccccagaccccggcctatggcagcgcagtccctagaccgagggtttttggaaggggcttgggatccctgctgtcactgcctgcgtctaggcatccattcacgcctgctggaccccagtctgcagccgcgctgggacccctgtctcttgcccctcctcccccttgccccgggcagaggtcgggctgaggagaccagcttagagcagccctcggccacccaccgccagttcccacgtcgcggcgggtgactgaggccgagatgctcccaactagcgtatgacatgcctttgatatcccgggtgcgtggggacaaatccgccctgaatgtgttggggtatcaggaaaacggggtatgtaagcaagcagtctggacggagactaaaactcccccacttcctagcccctaacaagcccacaggggaaagcacgcaccctggttattccgggctgtgtagggtgtggggcaaatgactctccccatctgcgctttacaggtgccacctggcggctctctc

SEQ ID NO: 32915 - DNA, 177 bp, Homo sapiens; identical to SEQ ID NO: 15038
  chr4:153856957-153857134
  hyper

SEQ ID NO: 32916 - DNA, 692 bp, Homo sapiens; identical to SEQ ID NO: 28034
  chr4:154143770-154144462
  hyper

SEQ ID NO: 32917 - DNA, 260 bp, Homo sapiens
  chr4:155548061-155548321
  hyper
cggcccccagcccagcccagccgccgcaggagcgctcggccagtaggtgtctctgctcctcgggcggccttgagcagtgcctaacgttgagcgtgaggctcgtgctccgggtctcgcgggcggccgcctcgggcgtcgagtcccggagattggacagacaccagagcctggggaccgcggagtgaccgggtggggctggagggcggcgccgcgccttctggggagacgcggaggtatcaggtaatcccccggcggcctgc

SEQ ID NO: 32918 - DNA, 748 bp, Homo sapiens
  chr4:156587883-156588631
  hyper
cgattgggcggctgcagagaccaggactcagttcccctgccctagtctgagcctagtgggtgggactcagctcagagtcagttttccagaagcaggtttcagtgcagagttttcctacacttttcctgcgctagagcagcgagcagcctggaacagacccaggcggaggacacctgtgggggagggagcgcctggaggagcttagagaccccagccgggcgtgatctcaccatggtgcgttttggctgctactttctttttcagtctttcggtgcggagaaggggaggaggcgggcagaggtctgaaaaaatcgaatgccttatggaaaggaactgcaagggttcctttggggtgatcaaagagggagacacagacacagagagacaaaggcaaggaggactgtctgggagccacgcgggcgatacagtttccgaggcacgccgcgtcccgcctagcctgttgaacaggtagacatgagcgacccaagcgtaagtgccgctgccgcgagtgcccagggtgcactcgcgcggggaccgacaggtgccactgcagggtcccctctcccgctcactgcctgccacccctgacgcctgctctctttctccattcgcagtgcggatttgcgaggcgcgccctggagctgctagagatccggaagcacagccccgaggtgtgcgaagccaccaagtaagtggtcgctgcatccccacgcgggtcggggttcttcagacaggcggtccctcttcc

SEQ ID NO: 32919 - DNA, 1047 bp, Homo sapiens; identical to SEQ ID NO: 24465
  chr4:15780048-15781095
  hyper

SEQ ID NO: 32920 - DNA, 937 bp, Homo sapiens
  chr4:16084779-16085716
  hyper
cgcctcacgtccccggggccatccctagagtttcctttaccgcagactcgttcccaagaccctggcgagtctcacctcggtcaccgttctccccgagagcgagtccgaagtctctggggccccggtccagttcgcacactcacctccgactcccgctccggaaccacggccgccggctacccccacccccgcccccatccccagtggatggaaagaagacccaagcggggcgtcgcgggccaccactcagactaaaaagtttgggttggacgggcaccggcaccaccacgctctccccgcagttcctctggcccccagccgctgtccgggcccgcaccacctgctgaggggccagggaggcggcgcagatggctagggtaaggggggcgcagagcgaacccgtccactcctcactgtacacccccagtacagtggaaggagtgcgctcagccccgcgcctggtcagcagatgcctctctcgctccgggatgaggacccagctactcaccgtgcacccggctcccgctcctgctcccgccctagtcaccgctgccgccgcccttcccttagctcgccagaccctggctcgtgaattatttatgacccggcttctgggaccaccgcgacggctttcggagagcccgcctcccactgccggccgcggaggggctcaggcggcgctgcggccggaccctcggacgtggcgggaggcaggagaaaggcccgggtgcccggggggacccgttgcggcttcctctgtcccggacggggacctaggtatggggccgccgtaatggaaaggattccttaaacatactcaccgcggcgggagagctgagagcatggccaggtgccgcgtggggatctgcctcagtcacttaaagatcgcgaaacccgagccctggacgcactctgattggaccggctgagctgcttc

SEQ ID NO: 32921 - DNA, 268 bp, Homo sapiens; identical to SEQ ID NO: 15045
  chr4:183839058-183839326
  hyper

SEQ ID NO: 32922 - DNA, 619 bp, Homo sapiens
  chr4:186049498-186050117
  hyper
cgtgagccccgcgccctccccttgcggagattcggcctggaaagctccgcggctctggccggcaccggtttccttcccgcctccccgcactcccacccccgctcctagttcagagcgctggtggcgttacccacagccgcggaatcccctttactgttcccggaggagctgcgaggtggaactggccgcgcggtgggggctttccccggccccgggacgagcactcagcgtcccctccccgcgacgctccctcggaatcccggggaagagcgcagcagaggcggggaggaggcgcgagcggaggggaccgacttccaccgcacctgggtgtcgccagccccgcctggccctcggcgccgggaccccgacgcaccccgcgcatagcgactggtggcctggtgggggactgcgcctgcgaggccttcttcgcgcagagatatcggggttctctgaaccccagaaatgggcctggcaggggaaggaagctgcaagaaaggagttaatctgcaggatgctcaattctttctatgacaaatcgcttcactccccgctcggcaggtcagagctaggggtgaccgagttacgccgcgggcgctgcctgagcaacgctttctaccgc

SEQ ID NO: 32923 - DNA, 397 bp, Homo sapiens; identical to SEQ ID NO: 25685
  chr4:187026475-187026872
  binary

SEQ ID NO: 32924 - DNA, 609 bp, Homo sapiens; identical to SEQ ID NO: 15048
  chr4:25863681-25864290
  binary

SEQ ID NO: 32925 - DNA, 232 bp, Homo sapiens; identical to SEQ ID NO: 29192
  chr4:26030420-26030652
  hyper

SEQ ID NO: 32926 - DNA, 767 bp, Homo sapiens
  chr4:41363050-41363817
  binary
cgcccccactttcttttgccagctgctccaggtcacccccccgggcctcggcgagccgcgaaaccttagcgctttggcattggaatcccgggcgagggtgggcgtgaaaggggacactgcagtctagctgcgcgcgtgagggcaggaagggatcccctgcgcgtccatccttcctgcccgctggcctcgcaaatctcagctagcgccgcttccaggcgctgccaagggaagcgcagtgctagcaaagcgttgcaaaggcgcaggaagcgcgagcccccagagacttcaccggtgctcgcatttcggggtatcttgcttctggtcccacatttcgccccttgtccccctaccccgcacccttccggagcagagttggcagtgtcttcacggaggcgcatacccaccggagcctcttgctgtattcctggcaccgggtcaggtgtgaggctggcacagtgcgcagggcgggggtagcttgcaagacccacctgcgagcacgcatccgcatagacgctgcccagcctttggcaacccccgcccctctccatcccaaggactgcagggtcggttccgaagtacgggctacccggtctggttggcatatttcacttcttaaataactcgttggcaggccagggaaatcactggagctctcggctctcagtcccggaagcgctcactgggtgatcctgattcacgatgtctatcagtagatgcagcttggtagccccgagctcccgaaatgaactgtctgcggggttcaggac

SEQ ID NO: 32927 - DNA, 1067 bp, Homo sapiens; identical to SEQ ID NO: 15050
  chr4:42657902-42658969
  binary

SEQ ID NO: 32928 - DNA, 528 bp, Homo sapiens
  chr4:4417408-4417936
  hypo
cgtttctgagccatctcgtatgccagccctgagcggggccgccactccacaggtgttggccgcatcaggtcttgcaggactctgctgggtgccgaggtgggagggaagaggggaacccttggtccgtttccctgagggatgacgagcagcagatggagaggacagcgtgaaggggcgtggcggtgaggctggaggggagtttgtctggcctgcagagcctccttcctgatgcacgcgctgctggtctgaatgggctgtttgttctgtagcgtgtcaggtgcttcccgacgtcctggtgggactgagatcaagacgctgttgataaaagggctgtacttcagtggtgtcttttggctttcttttctgtccacactgtgacctggggcacatcctggcttctttacttgagccactgtgcattgacttgagtcctcagcaacacggtggtgtgactcattggccgcattttataggtgagggacctgagattgagagagaaaacactccgcacgtgaactcagctggtac

SEQ ID NO: 32929 - DNA, 768 bp, Homo sapiens
  chr4:47839282-47840050
  hyper
cgggcgagtgatccccaggcaccaactgggggccggggaaccaagcgcgagcccgggctgtggagggaccgacacccaggcgctcgcagctggggaagggggcttacgtctggggcaggcaagactgctgcacagtccctccagccacccggcgcccgagacgccggcgcagacaggaagctgtagatccccgaggggctggctccgacagctccacctgcagcctcccctgccgccagtgtgcagccaagtccactagatgcttggagggcaccgtgcggaggagggactctgcaggaaaggtggcatcacccccggcatggagaccggggtctccggatcgagccgactcgaacactgaaggaaaccctgcccatgaccctgggagggtctcggacgccgggcgaccggggtggtggtcgggaccagggccgtgcgcctgggaactgggtgcagggcgctgagcgcggaactgtcagagcgggagctcaccggcggctggggaaggaggtggcatcgggcggaggagaggacgggggcgggaggggctgaccctgaattcaccgggactaagaggccatcacacctggctgcggtaggacagcgaatcatcgatcttaccggctttggggacccggctctgcggcagcgctcttccggagcgagggcaggagactgtttcatggataaaaagtctcgcttattcttctgtccacttttatcttggtcgcttttctctcctctacgtgtcccccggggaggcactac

SEQ ID NO: 32930 - DNA, 1235 bp, Homo sapiens
  chr4:4854484-4855719
  hyper
cgtgttctaggacggcagggatgaatcactataggctggctctctctagctcagcccggcctgctgcggcctggggccactgctcctgggtcctcaggactgcctgggggaaggtagtgcattgtgcagcgcgcggtccagaagtgaaaagggaggcgcggagataagctgccggcggaagttccctctcctgcctgggccgacccggcgctttactgcttctcacgaaggtgcgccggctgctccagaaatcgcagactgcctccaggaagaacttgctggagtcacagcagcttctcagcgacttgacagcagtgattcagacttcaacttgggcggaggggcgggggaggagaaagagatttccagagaaaacgactgagcggtagggaggggaagagagaccgagccacgcgcctcgagaagcagtgcagagagcggaagagacagaggctgcgagacctacccacagagaccaagagagacgctcggaggggagaccgccttaggcgcagagattcagaggcagacagacaggcagacagaaggatacaggaaaggaatgtcgccgaaaggcagggacaaacctgagtcccagaaaaataagagacaactcccacacaccaggctgtccgcgggccgccttgtcacagaaaggcagctccccagccccgcagagtcccgacagctgcccccgcgaaggtggggcgaggggcggcttttccgggggaaactctctccctggacgcccctcctttccagcctcagctctggcctttctcggcatccccagcttgccttcagtttcactccatatctgggtctctcagaggcctcgggaggtcttccgttctctctgtcgccgtgtccacggaaggagcctccccaaccctctgtggctccgcgcctcttgggccggagcatctctgtcttccggagtctcttgatcattgctcctgcccgtcctcgcccatttcaaagacgaccaacagaggcttagaaaaattggccctccaccctcggctggttacctggctcgtagccctgggtctgttttcttctcagagagacctgagatcctcgacatttcctaaattcatggaaaacctcgacagtgttcaggactcccaaagaaggtggtgggcgggagggggaggagcataagagaaaagtagtgagtacgggcccaaagacccatttcgtggattgggggagggacggggaggctgttccac

SEQ ID NO: 32931 - DNA, 960 bp, Homo sapiens
  chr4:57521376-57522336
  binary
cggggaattttttaaaaaatcggaaccaaatctccgtggcttcgtgcagcgtgagttctgcagctcgggggacgctgcagtgtgatgtggtggagagagcatgcttcaccgctcctgccatcctgacagcgccctccctcccggcctcagcctcctggttcgccaaaccggaggactgaatttatggctagctggtctctggggcgccttccagctctgacattcccgcctagaatagatcttcccgaaggtttcgcagacagaccagaggggaccgagccgggaaggcgagacagggacaggcgagagacgctgctcccaactcgcagagggagaaagcgtgtatcccgggctgccggggagagtggaaaagaaaggactggtgaccgaggggtttctgcgcagctcccggggaaccacggctggatgggggtggcggggagaccgggcgcccatgggagcggggaagcggggaggcggcggcgggagccatgcagggtctgggcccctgggatgcgggcagaagcgatgggagatcatggggagggcagcccggcgggaggcgcggacgaacaggaccgcccagccgcgagaaggctcagcccaggcaggggtcggggcgcgctgggcgcgtgtggggacgcacctgggtctcctcctcggaaaggcctgcctcggccgcgatgaggcacagcgtggtggaatccgggtgcttgtcgaccttgttgaagttgtactccaggatttccacctggtcctctgtggggccgctcgcggtctccgccgacatggtccctgcgcgctgcggggcagggagaagcggcggcggtgagcgaggcgtggagcgggcgggacgcagcgaaggaaggcggtcgcggcgccgccgggcagccccagccccaggccgccccctccagcggtgccacggccgcgcaagtccccggtggctgcacgctgagc

SEQ ID NO: 32932 - DNA, 230 bp, Homo sapiens; identical to SEQ ID NO: 15055
  chr4:6058789-6059019
  hypo

SEQ ID NO: 32933 - DNA, 692 bp, Homo sapiens; identical to SEQ ID NO: 23277
  chr4:76555346-76556038
  hyper

SEQ ID NO: 32934 - DNA, 448 bp, Homo sapiens; identical to SEQ ID NO: 15057
  chr4:77610260-77610708
  hyper

SEQ ID NO: 32935 - DNA, 51 bp, Homo sapiens; identical to SEQ ID NO: 15058
  chr4:83839357-83839408
  hypo

SEQ ID NO: 32936 - DNA, 306 bp, Homo sapiens
  chr4:84030839-84031145
  hyper
cgggcttcaggaggcggggagtgggtgggtgggcttcttaccttctctgcccgctctgcactcgggaaggggctgtgagcggcagctgcgcgcggggctcttcgatcaaccctcaccccgccggattacgcctcccgccagcccagctctgggacccctgggtctcctctgctgggaccagacctgcctgccggtaaattcttaagagcagcccgcgcagaatctatcccaaggagaccgcccatttttgctggggcaatcagggaactgcgtctgcggatggctgccctcgggggaccattcgcc

SEQ ID NO: 32937 - DNA, 215 bp, Homo sapiens; identical to SEQ ID NO: 15061
  chr4:84457821-84458036
  hyper

SEQ ID NO: 32938 - DNA, 1429 bp, Homo sapiens; identical to SEQ ID NO: 25707
  chr5:10564301-10565730
  binary

SEQ ID NO: 32939 - DNA, 738 bp, Homo sapiens; identical to SEQ ID NO: 15063
  chr5:110847638-110848376
  binary

SEQ ID NO: 32940 - DNA, 1420 bp, Homo sapiens; identical to SEQ ID NO: 24489
  chr5:114514898-114516318
  hyper

SEQ ID NO: 32941 - DNA, 709 bp, Homo sapiens; identical to SEQ ID NO: 24492
  chr5:132082800-132083509
  hyper

SEQ ID NO: 32942 - DNA, 219 bp, Homo sapiens; identical to SEQ ID NO: 15068
  chr5:134527185-134527404
  hyper

SEQ ID NO: 32943 - DNA, 211 bp, Homo sapiens; identical to SEQ ID NO: 15069
  chr5:139113843-139114054
  hypo

SEQ ID NO: 32944 - DNA, 335 bp, Homo sapiens; identical to SEQ ID NO: 15070
  chr5:139135589-139135924
  hyper

SEQ ID NO: 32945 - DNA, 590 bp, Homo sapiens
  chr5:139525386-139525976
  hyper
cgtctctccccatgccttcaaaggcggcctgccttcccagttcccagcctcccgccagattcttgcgtgacctcgggcggcacccagtgctgctgtggacagctcattccgccgcggcggcggctgcggctgcggcggctacaacggctcccggcgtgtccccggcgccgccagggggcgaatggggtgcccgccggctcctcggactccgggcgcgccggcactgcgctccggagaggcccggccagggaagaagcaacttccctccgccgccgcagaccagccgggcagagacttccagccccaccctcaagccctctcggtggctctgtgcgcccaggcctaggggtggggggccgtaggtgctgcgcgcccgcacaggtggtcaggccgtcagcatgcctggctcgtcgcgcacagaacactgcccaggggttcacccagctcccctccctcccctccgctgccctcctggcagctccagctctgctctcgcggctttccaggttttggggtgggtgattgagtaggccgcacctgggacactgtgactggaggacgccggaatttaaggaggggacgagggagac

SEQ ID NO: 32946 - DNA, 801 bp, Homo sapiens
  chr5:140011830-140012631
  hyper
cgccgccagtgcggcgcacacgcctgtgggcgtctccattcctgtgttgcgcagcgctagattctggatggccgggaacttgtggggacagagagccgccatcagtccgcgttcgcccagtccaggattgtcagacaggtctaggctggtaagggccgggaaggcgcgaacctgttcgcaggaaaaggcaggcgagtgtgcttgggcaatgctcagtaccttgaggcctggcttgagccactgctgcagctcggcgagccaagaacgccctgtcgcccacgacacgttgcgtaggcgcaagctggaaagtgcaagtcctgtggcttccagaggcagcggaggcatggtgccggttatctttaggtcctcgagcgtcagttccttgaggcgggagtacgctagcacacgcagggcgcctaccagtagctgagcaggaacctgtgcggctcccactgtgagccgccgcacgcggagagccttgaccgtgtcagcatactgccgcgggtcggcgtccgcatcgacgcgctttagaaacggctctaggttgagaccgccggcatggatctccacctctactgcagacacacactggaaggcttcggaccagtcgggctgaggttcggagaagttgcagacgcagcggaaatcttcatcgtccagctcacaaggttctggcgtggtcgcagagacgtgcaccagcggcagcagcagcagcaacaagcaggacgcgcgctcctggggagagagcagaggtctaggaggccccatccaacccctgtggctcccgagtggcacgcgttc

SEQ ID NO: 32947 - DNA, 766 bp, Homo sapiens
  chr5:149682102-149682868
  hyper
cggatctgctcggccgcagcggggcgctctggggaggtcaggcccgcgccgagctgcctcccgctgcctaagcgcaggccctgcgccgcctttgctccctcttccccagctcagcccggccagcctgagacgcggcgtggcagcttccaaaaagtgctctctaccatcctctgactcccctcttccttcttgccctggatttctcccgcctcctaatttctctctcctctgctttcccggcctctcgccccacccggagtccttaaaacagcccagctccctgcagggaggtgggcaggaccccagaggggaaggggagggaggcacaagttgggcgggtcgaggggacacggcgggagagaattcgaaaaagttgtaacatctgccgggccgggccgagccccaggtggaggggcgggacgcagagcagcggctccacctcccgggcgggaagccccggccctctcggcctgctggctccagcgcccgcccctgaccgggatggggaaaggagggagtggggctgcttggaattcgatggaacagctccagaatggctgggtcagacattcctcgatcatggagtcttagcctctctgagtgccagccctggaaggaaagcccatcatttcctagtccaaccgggtcattctacagatggagaaactgaggcccggagatgagcctcaacgcgtctaagtcacagaacaagtcagtggctatgtctctaaggctcaccgtggctgttggagtggcggctcccttc

SEQ ID NO: 32948 - DNA, 434 bp, Homo sapiens; identical to SEQ ID NO: 15076
  chr5:150004280-150004714
  hyper

SEQ ID NO: 32949 - DNA, 694 bp, Homo sapiens
  chr5:150603058-150603752
  hyper
cgagtctgtggaacactcttcgagcagccctgagattatcagcctttaacccccggggggaggaagccgaaggcccagagaggtcaagtcacttgtccatggccacacagcgaacagccccagaccgaaagcagagggcacctgccacagacacacgacatctccccacccgaggcagcgggaatcagctgcctttccctggcccgggtgccgtgtttgtaaactcggctgcttggtgcggctcgggccggggtaaagggcgcctcccagcagagcctccctcgtctctgagctggcctctccaggttctccgtccggtatcccgggccgaccagagagagcccggggcgccgagtcctctgcggcggagcgattccgcactcccctctcctctgaaagcaaacttctccgccggcgccctttacctttttcgggggtttgcagctgctcagcctgctgtgtctgcagcccatcctcctccgggggctcccggacgccgcttcccaactccggggcccccagaggagcctgcgatccgggccccgctgcccgctccgcgcccgccggctggggctgccggcgagaccctgaaactgaacctggaagcgctgtcttgagcctgagctggggcggccgcccgccgtaaatacccgaagagcggggcctcagtgtagcccgcagggccagcggcgcc

SEQ ID NO: 32950 - DNA, 546 bp, Homo sapiens
  chr5:179243862-179244408
  hyper
cgggtctccggccacccggtgacggagggagggagaggctggcgagggggcggcgccttaggtcccagcgcgacccgcctctcagcccctcccgccggctacagccgcgcgggacggggcagggacctcgagaacaccggggacttgcgggccggtggccccgggcaggccacttctgacgcgggtgcgaggccttccgcgggcgtgcacggttgggccggagccgcgccgggggccgggacacgcctggggtcagcgctggcgtcgccgctcgggtggggtgggccgggttcgggtccagtctcctccccacgggcggcccgcgccccgtcttccagtgacccccacatcccttgcgccccgagctggaacttcggcaggttctgccccgggccgcgcgcgctttctggggaccagggctgtggttcctgctccgcgtcgtgcctttagacaccgccgggcgttcgtcctccatccctccccccttttccccactccgcggttgacgagggccgcccccaagtggccatgtcccccggcatggac

SEQ ID NO: 32951 - DNA, 901 bp, Homo sapiens; identical to SEQ ID NO: 15080
  chr5:1800443-1801344
  hyper

SEQ ID NO: 32952 - DNA, 71 bp, Homo sapiens; identical to SEQ ID NO: 15081
  chr5:31410355-31410426
  hypo

SEQ ID NO: 32953 - DNA, 747 bp, Homo sapiens; identical to SEQ ID NO: 15082
  chr5:36744888-36745635
  hyper

SEQ ID NO: 32954 - DNA, 1567 bp, Homo sapiens; identical to SEQ ID NO: 25731
  chr5:40680513-40682080
  hyper

SEQ ID NO: 32955 - DNA, 842 bp, Homo sapiens
  chr5:42950747-42951589
  hyper
cgcattcgctggtacccagatttctacaggagttaaacgtctcctgagcagctaaagcagagcttactagtaagaaacttgcaatgactaaggaacttgaggcagggctaacccggggttgttaggattagaattccgaggctacaggaaacccggaattgctgagatgtgagtcacagggtgactcagcctcgttacgatgaaacagtaacttcctactacctagaaatcgcagccagggccagaccggtgtttgtcctaagtcggaacttgattgggctgagaaatcacattgtgactattccacgacttgaacaaggggtagaaatcgcaggcaccgcgaaatagaaacttcctaggaccaagaagccaacgacgcccgaaaccgtggggtcctgtcacagaaaccccagcagcgcagccaccggactgggttctggaggccgagccgcagtccgtgcggcggcgctgggaagagaaggcgccccggcagctcccctgccaccggccccgaggagcggctggctcccccagcccagcgccgccgccgcccggtaactccaggcgcaactgggcgcaactggggcagctgcgacaccgaatccctcacatctgcaacctgggtgctgcggccactgagaaaatggaggcgcagaccaacgagcggtgccgcgaccgagagacctcggctggcgaaatggtggtgccgggagcctgcgagtgacgccagccggcggggttgtcaaggacaacattcgttttgacgcagccaatggcgccgtcaccaagaaaccatcgactctgagaaaaaagagaggttcggccaccgagaaactccgtac

SEQ ID NO: 32956 - DNA, 1260 bp, Homo sapiens; identical to SEQ ID NO: 25734
  chr5:42991800-42993060
  hyper

SEQ ID NO: 32957 - DNA, 229 bp, Homo sapiens; identical to SEQ ID NO: 25735
  chr5:42993305-42993534
  hyper

SEQ ID NO: 32958 - DNA, 1660 bp, Homo sapiens; identical to SEQ ID NO: 15085
  chr5:472600-474260
  binary

SEQ ID NO: 32959 - DNA, 592 bp, Homo sapiens
  chr5:52778284-52778876
  hyper
cgtcgcatcctgtttttgtcaggttctttaatctgctcttcgagtctctgcaggttatgaaatgggacgaataaaagtaaacagtctagtaaaagtcaatgcaagctgcacgtgttgtgtctgggtcactggtaactgacattgatatggctggggcgccctgtcttctccctctctccctccctccctctcgcccacctcccatctctgtgatcagggcttccccctccactgccttctttttccacccctccacccctttcgatttatttcctacttttctcccgcgtctctctcacttcccctcctccacgctcaccccctccccatccccgccgggtctccttcgctagccacctcgctctccctgccctgccaccgctcactgctcactcacccacctccccacccttgtctcttcacagctgggaactgctggctccgtcaagcgaagaacggccgctgccaggtcctgtacaagaccgaactgagcaaggaggagtgctgcagcaccggccggctgagcacctcgtggaccgaggaggacgtgaatgacaacacactcttcaagtggatgattttcaacgggggc

SEQ ID NO: 32960 - DNA, 887 bp, Homo sapiens; identical to SEQ ID NO: 29274
  chr5:54526958-54527845
  hyper

SEQ ID NO: 32961 - DNA, 308 bp, Homo sapiens; identical to SEQ ID NO: 15089
  chr5:56110226-56110534
  hyper

SEQ ID NO: 32962 - DNA, 779 bp, Homo sapiens
  chr5:58335175-58335954
  hyper
cgagcgcgcttgggtgcccgccccgcagaggagcgtctggtccacagccggatctcctcggtccccaacccggagccgcggccccacgcccgccccgcctgccgagccttctgcacggcacttgaagtgaatgaatcagccgcggccgggtgcgcggccaccacgtttcctgttttctttctcaactcctcgggcggcaggcgcagcgcggctccaacgccgcagctttccgggaacactccccctcacgcccctctcggccctcggcgctgcctggctcctcctcaacccccttacgaaaagattccgaattgcaaaagcctgtccctgtccgtgccacccgccgcgtccttcccctcgagctctgccccgggggccccgccacctcgcagtgccatccccccggcgcagccgggcgccactcgctttgaagtgcagacgaggaggcgcgggcgcgagcgtgtgtgtctgtggggctgctgtgggactgtctgtgctaggagagcggcggaaaacccggcgtggagcgcctgcagtccgccgtccggggtcgcgcccgccgcggggctcaggagggaccggcacgcaggcgcgcacggccgcgcacctgtctcgctagaaccccgcgcgccccgccgagccactgccctccaggttgcccagaccgctggagcctctgcgactccacgaccggctgcttcctgcgaagtttcacaaacaaggttatttaggaccctcaaggtttctgagggtttaagttttagggtttctgggggttc

SEQ ID NO: 32963 - DNA, 267 bp, Homo sapiens
  chr5:60921444-60921711
  hyper
cgttctctgagatgtcgctgctattactgtctcaaatttccttttaaattttgctgtttgagtaaattagtgctggcctttcctgagctccgcagctccgaggtggcccgactgccgggcctccaccccttttccccggtcccgggtcggtttctccgggcgcaaccagcagcgccacaagccggttgggtcccctggctccctctccaaggccagcgcggtcatgcgggcgggcgggcggtgttccccagagaccgcccatcccgc

SEQ ID NO: 32964 - DNA, 436 bp, Homo sapiens
  chr5:65220759-65221195
  hyper
cgcaataaacgcgaaccctgccaggctgaattattagggccagcgcaattcaacgactgcaccaccaccgaaccgctggggttggaagcctgcgtcgcatcggagcgtacccatgtttcttctaacaaaggcacgatcttgaggccatttcgcgggcccttttcccactcccagcgccagctttgtctccccgccggtatgaggctgagacttggaggaggctgagctgcgccgctggggaacaagctcgaagggcgggcgtgggaagctgcaccgcgctgccgctgtggtttcctgcgacctgaccgtgccattagaggaagttggagtgctgcagctgcaagagatacctgctgccttcaaatcagggctggactccaacaacccctgtgcaccgattactgtcgtacaaagaaactccatcggccggcgcggc

SEQ ID NO: 32965 - DNA, 835 bp, Homo sapiens; identical to SEQ ID NO: 31993
  chr5:76934460-76935295
  hyper

SEQ ID NO: 32966 - DNA, 570 bp, Homo sapiens; identical to SEQ ID NO: 31995
  chr5:76939332-76939902
  hyper

SEQ ID NO: 32967 - DNA, 316 bp, Homo sapiens; identical to SEQ ID NO: 25747
  chr5:77140518-77140834
  hyper

SEQ ID NO: 32968 - DNA, 835 bp, Homo sapiens; identical to SEQ ID NO: 23307
  chr5:77147851-77148686
  hyper

SEQ ID NO: 32969 - DNA, 1132 bp, Homo sapiens; identical to SEQ ID NO: 25748
  chr5:77268330-77269462
  binary

SEQ ID NO: 32970 - DNA, 342 bp, Homo sapiens; identical to SEQ ID NO: 15098
  chr5:77591388-77591730
  hyper

SEQ ID NO: 32971 - DNA, 423 bp, Homo sapiens
  chr5:79911142-79911565
  hypo
cgcggggctacagaggaagacagcagccacgcctgcatatgggcttctgcactgctagcctcaaggctgccagagtgcaaagaatgccaggataatggctttatccacgtgtggccttttgacacataagctaatgactatattccaggtacaaatagttctttcccacgagctgtttctgcaggtctccaaacagacaattacccggttccacttaacagagtgactcaaggacggatctgagggctgggtcttgtgaacgcgggctgttgtcctgccctctcccagctctaacattgtgctgaaaagttaaaatacaaaacgccaaagctccccaatcccatcccacgcccctgcctgcgcagcctttcatgcattgaatgggcagcttcatgatgctgctgcgacaatagcgacaatagc

SEQ ID NO: 32972 - DNA, 776 bp, Homo sapiens
  chr5:87962630-87963406
  hyper
cggctgtagtctttcattctcacacgctccccggcgatcttgaaggagtttttactttcggttatctagctttatgaagaccaatacactcatacagctagataaccaaagataacaactcgcttcccacacaggcctctgtcttcctcttgccagactccaggtcctgatcctttctggcagtaccgaagagtggtcgtccaggatacttgccgcgcttaagattcctccttttatgtaaatatgacctggtttctgtttgtgtgtgtgcgcggctaaaacatccaaacgagatctgttgccttcagagtttattccgaacttttctttttcctttcagcaagtaatctccggcagcgttagccaacaattcatctattaatatcagaaaataaaaccagctattaaggtgcagcaagctgttacgagtgagcagcagcatccgtcccttcacaggcctctatttgcattgtaaattgcttctttctcacgcaagactctttagcctctctctatagagatgtataaagccaacggcaatttccagcgcaggttaaggaggaaggaaaaaaaaatcccattctatagaagtgacagctgattcaaggatctgttcctgatcctttttggttaggcaccatggctttttaccaagcggtggcagcttgattgcacatatcttgtgtgtatgtgttttagggggaagatcctcgatttcacagggcttctaggctgggaaggagaagatgccgtcttgctggcctgctgctgccccc

SEQ ID NO: 32973 - DNA, 742 bp, Homo sapiens; identical to SEQ ID NO: 23314
  chr5:89854237-89854979
  hyper

SEQ ID NO: 32974 - DNA, 847 bp, Homo sapiens; identical to SEQ ID NO: 25749
  chr5:94955574-94956421
  binary

SEQ ID NO: 32975 - DNA, 652 bp, Homo sapiens
  chr6:100036494-100037146
  hyper
cgactacactgcgcttcctttggagagagacactggagaactaaaaccgacccaagcgctaagcgatctgcctaatagagggaacgccagctgagaccagcgcaaggcgggcgctgggtggcgtgcgcgactgcaaagtctggcatgcccaggttctgctccttgggctcctgctgcgtgagccgatctgcagatccagcaaaagacccgagagcggcttgaacgccagatgattcctccctgaggatgcgccccaggcgttctgccctggctcccagccgcctcccggtgctccggggttcggcctcacacacctgtcgaccgcgtcggcccagctgcggcccaagcctgtgggactccggggagcgaggcgccccctgctccaggctgggaaccagaaatgcagcagggcctcaaaaagaaacaaaattctttccctcggggttgctgctgccgcacaaccttacccagcccgctctgcggatgggtcgtagattccggctggaagccggaggaagtgcatagagggcagcttcaaaagccaaggctgcgctgctttgcgcggggcttcttccctcgcgtgcccgcgccgggtgccggagcagcctccgcaagctgctttcatctcggtctgccggggcagggtcgaacc

SEQ ID NO: 32976 - DNA, 792 bp, Homo sapiens; identical to SEQ ID NO: 32014
  chr6:10389924-10390716
  hyper

SEQ ID NO: 32977 - DNA, 896 bp, Homo sapiens; identical to SEQ ID NO: 24524
  chr6:10417173-10418069
  hyper

SEQ ID NO: 32978 - DNA, 1422 bp, Homo sapiens
  chr6:10418940-10420362
  hyper
cgttggttttggcaaattcaccacccccctgcctcctcacccaccattctcacactccctcatccgtagcccaggcggcaaaaacccatttcaggaagtggagtgagttgctagctaaacttcgggcaaactttgtatctcctacagaaacacgctgcctccgcgacccagccatctggacccctttccattcttcacacatcctagatctcccgaaatctgggggtaccaagagagacaggtgcaccagaacctgtccaacactcaaccctggggtctagggcgaggccgcaggcgcagcaggctgaaaaccttcaccgccgcgcaccacaaccccaggccttctccctccccccttccgaattagtcatcctcccaagtttctacttgaggtgggaggggggtgggggaaacggccacagcacaaaccacaagtgacccaccaggccacctgtggagcgtgcgccggacttccccggcgccgggccccgcgggctgcgcgctttgcgcccagcaccgcagtcgctgcctgcgcccgtttttcctgtcttcgctgtctcctgggagctctcctgggcgctgccaggcgcgcctcacctacgactcccctgccctgggccacggcgcttcctctcctcctccccgctccggccccctcccctactccacccctgcccacctcaaccccagccaaggcaaaccccccgtacctgccagtcccccattttggcaagtatggacatcgcggctctgcgctcctggcgactggtccccgccgggcatgggctggagggctcggtcgggccagctccctggaatcgcttaggcaaatcctccttttttacctgctcaccaacatctcacctggtcataaagagctgggttgctacctgccgacgcatgcgcgctggcccaggaattcactccgccagctgcagtcccagcgccgcacagagctgacctgggaagtgatggatttatagccgcggcaatcttgccatcagctccagcttttcccaacagccccaacccgctttcccggtcagtccctggcccgggaaccgaagctgactgactgctggatgtgctgggtgcgatgcgagtgtgagtgtgttttcgcactccagtggtggggcatcgacaagctcgacccatggctagcctcccctcggaactttcgaactgggggagtctccactcccgggtgggggtcgggggttggggaagggctagactgctagaagcgtccagaccccatgatccccgcgcacctggacacagtggggacaggtcgccgtccccgcctccccacccgcccacgaggtgcagggcacggctggccttagcggatctgactctgccaaccccggggccacttcagcgttagattccacatgaaactgttgctcaataggtgaagac

SEQ ID NO: 32979 - DNA, 411 bp, Homo sapiens; identical to SEQ ID NO: 29299
  chr6:10420695-10421106
  hyper

SEQ ID NO: 32980 - DNA, 770 bp, Homo sapiens; identical to SEQ ID NO: 30465
  chr6:106533693-106534463
  binary

SEQ ID NO: 32981 - DNA, 605 bp, Homo sapiens; identical to SEQ ID NO: 24526
  chr6:106958136-106958741
  hyper

SEQ ID NO: 32982 - DNA, 1654 bp, Homo sapiens; identical to SEQ ID NO: 24527
  chr6:106959524-106961178
  binary

SEQ ID NO: 32983 - DNA, 1650 bp, Homo sapiens; identical to SEQ ID NO: 24529
  chr6:108439510-108441160
  hyper

SEQ ID NO: 32984 - DNA, 163 bp, Homo sapiens; identical to SEQ ID NO: 15115
  chr6:108455187-108455350
  binary

SEQ ID NO: 32985 - DNA, 919 bp, Homo sapiens
  chr6:108478324-108479243
  hyper
cgccccatactgaccgcggtccctcacctgctgactgattgacttataaatctgccccccacccacttgtctgtccattgaaggcaaattcgccatcgggaacacagtagtttctcaataactatctaatgcatggccacccttcccaggatttagaatatcaaagggacgtgttctttcctcccaaatcacctgcctgcgcttcccccagccgggtgccccagccttcacctcggtccggccaccacctcatcccgcttcttcgcggcttccaggcctcgggctgggatctcagcccctgcctgtaggtgcggcccagagggtgcgacacgcgtcggagcggggcagcggaggaggggacagggacgcggcagccacacccgcatctctttcccctctcgggcatccccgagggcccttctgcctccagttccttgagcccccgaagccccccatgcggcaagagcgagtcgcaggaacaagtggggaatcttggccgcggccccctcccccgccttataaaaaagaaattgacttttgtttggagtttgtgaaaagtggggctcggggcccagtcaatggggcgccccgcggcgcgggctgagtggagctagcgcgaaccgctcagccgcggccccaattaatccgccctttgtgcggcccgcccggccgcccccgccgcagccgcaccagcggcccattgttcggcctcgccgggccgcgggatttacccttttcaaacagccggttttgtccagggcagttcgagcggaagtttctcactgacaatttgccccaaatagatagatttgtcagaagcgaccttcgggaaggaagcaaaaagccaccggcccgaaggttgggcccaaaacagggactctgcgtcccacccgcggccgcgccgcccccccgcgccccc

SEQ ID NO: 32986 - DNA, 354 bp, Homo sapiens; identical to SEQ ID NO: 32026
  chr6:108484828-108485182
  hyper

SEQ ID NO: 32987 - DNA, 1803 bp, Homo sapiens; identical to SEQ ID NO: 24531
  chr6:108489327-108491130
  hyper

SEQ ID NO: 32988 - DNA, 960 bp, Homo sapiens
  chr6:108496576-108497536
  hyper
cgcgaaaacgcggaatttccagcccgtgtgcaaattctccaagatgccaaaatcagtacggccattgggccgatgtgagtccagggccttctctctgttctacagaaaagagggaaagggggctggagaggcagggtaacgcccgtgggtgcctcggacacccagctctcccaaggctcttaagcgcgcaacagcaagaaccaggacgtcagagtgcttcctgggcctggagcacggtccgagctgcgtcccccgctgcagcctgtcgagggcgccccaggcccaggcagggggcgagggtaatgggctggaggacaccgtggggcctgggaacagggtgcgagtgggttttgctgtgaggcggcccgggccgggtggcagctccaggaggagagagagccccttcctctgcggcgcaggaagccggagggagcgtccaacctgttgaacttgtgtattgacaagttgtcaagctcggcaggccgaagattgccctgaattaatttgtttgtttaaactgttggtggtaattgtcacatctcccctgcctttctccagcatactcggagacgggttctccctcgttccattccctagcaatcccggggctcgggtcctttcctcctgcggccctcggaggccaaaagctatttctgtgggggcggggcctgcgggtagggaggcttgttcttggacggagctggaaaagtctgcgcagaaacgaggtgtctggcgtgcgcgacgctccctctcttttggatgggggcgaggatacctggctactccagcccagagggtctctggtttccctgcgaacccccttccctggtggggaggagccctggaccgaaggagaacacacctggtcttacttgaggctctgccattatcgtggcactttgagcacgggcccctcttctaagcctcagcttccgaatctattcagtgtagtggttagac

SEQ ID NO: 32989 - DNA, 737 bp, Homo sapiens; identical to SEQ ID NO: 15120
  chr6:114176491-114177228
  hyper

SEQ ID NO: 32990 - DNA, 72 bp, Homo sapiens; identical to SEQ ID NO: 15121
  chr6:116691827-116691899
  hyper

SEQ ID NO: 32991 - DNA, 910 bp, Homo sapiens
  chr6:127441826-127442736
  hyper
cggccagacaaggtttgattcacctgaaaattgccttttaaaaaggtggcagtgccagagcgacaggggccctggccgggcctcaccgcctttaggatcacctagcagggggcaggagagcccaaactaaatatgtcagggcatccgatttattattcttggcctccgaatggtgtgtactctggtaactccccacccactctttcattccggcccggacgcggaaggggaggcctggggttcagcggtgtccacgcgcctggcggtccccgcctcctctcctcccagggtctggcctggggaattgagtctcagggtcagtgggcatagggagcccgggctggagcgcaacccactctgctttccatccgctcttccagcccgtgcccattgggcgtcccagagcacgctctctcctttacccccaccgaggacccccgggctgggagccacacacttgtcaaggagggacagggtactgagtgtcagaggcgtctcgctttgcagttttggggcccctgattctgaaggaagacacaggaaagaaagcttgtagtccttttgtgcccacctcccccagcgaggaccacggcgcaggaagctttccccgggcgctgcctcagggagctgtgggatgatgcacctctaggttgggccgagaggagtcaaaaggcaaactgcttttcgacctgccttaatcatctcaaggccaagtcaaaggagacctctgtttgtgttgaggggatgaaagaaggaatagtggaactgggttgcaattccaatttttctgtgggagtgggactgggagacagcacccacagcgatgctcttgctccttcgcacttgagtctgcgtttgcggcttggtttgctggtgcaatcctggtagaggggcgaccccttgcgtcctc

SEQ ID NO: 32992 - DNA, 1825 bp, Homo sapiens
  chr6:1311068-1312893
  hyper
cggctccgtcgctttttgtgcaacaaaggcaggaaaaaggaggaaactcggcgtggcagggcagcgggctggaagtgcaccttcccggggccgaggcgcccgctccctggactaatgacgccgcgtggggatcacgccccgggcgccctggggtgaggaacggtcccccctttcgagattgtccgacactggtgccagtgaggtcacagcaaaagtcccaaaggaatattggaaagaaatggccgtgaaccggtttgttcttgcccccgcccccgggaacacgccctctccgtcgttcctgttgactgtcagatcccgggaaccaagcggcggagctcggcggcatctgaggcttccgcagggacacaagtgcaggcacagcccagcaccctgcgccagacacagccgccccaggggaagaggaggacgctgctgtcctcccgcaggagtcaccagccaggtaaagaaaaaggtaaagtaagacaaagaaaagtgaaagtcggagcccatttagtgagcaagagtaaaggtcatccaaaaaggcgcatacaatttcaagcccaggagtgcattcattaaaacaagaggaaaagacaagatggtccttgaaaggagctcataggaaggggcacagcacaaggctcccgaaagaggtcactgcaagtgtcctgcgcaatttctgttcagcacctctgcagtgacgacaggggtttgctttcgtaagcagcatcgttttcactactacagaagcacatacgccgcgtgcagcttaggcccgagcaaagtccctgctcccctagacccagtcccttcaggtgtccccctaggggaactgtggcgtgtccccccaaccaggcgcactcgcctaaactgcgtccccgaactccagggcgcagggagccctcgcgggctgcccggggctggggcccacacctgaacggaggagccggctggcggagcggccccgcgcgcgcacacacgcacactcacagacacgcgcaaacccacagcggcgcgcgcgctccccattggcgggaggaggaaggcggggccggccgacccaaaacaaacaacctgcgccagcgactttgccgccgcgctgcagtgtggcctccgcctggtgcgcgcccgttggggagctggggaactggggagccgccaccacctcggccacctcgttcccccaccccttgccgtccgcgctcaggccccgcccccgcggagccgccgcagggttatattgggccggcccgaaggtggaggcgagacgcagccgcggcaggccagcggggagatgctgccccggaggctgggagcgggaaggcggctgcgggcgcagcggcctcggggactcgcctccgcgggtgctcaaggctgaaggcgccggaccttcccccacggtggcacgcacatcatccggcaccatttccgtgccccgaagacgcccgcgcgggacctgggaccgccagtgaagaacccctcctgggctctttaacgagcagcagatgcgcatgctgcttctctccggcaggaaagccttctaagcccggcgtgctcgggcacccgagggtggaaccgcggcccctgcacacactcaccccaaagtctcaacgtcgaaccgaaggcgacacccacccaactcctccctctccgccccatagtccacccaacacttgcagcccctccagagaaaaagcccagcggaagaggactccggaaaagtgactatctcggaagaccagggtagagctcccgggagaaaaaggcgaagatccccggccccggatcgccatccccttccctggcaccagcttctctaggctgc

SEQ ID NO: 32993 - DNA, 458 bp, Homo sapiens; identical to SEQ ID NO: 27136
  chr6:134638705-134639163
  hyper

SEQ ID NO: 32994 - DNA, 392 bp, Homo sapiens; identical to SEQ ID NO: 15129
  chr6:137112609-137113001
  hyper

SEQ ID NO: 32995 - DNA, 259 bp, Homo sapiens; identical to SEQ ID NO: 15130
  chr6:137365631-137365890
  hyper

SEQ ID NO: 32996 - DNA, 499 bp, Homo sapiens; identical to SEQ ID NO: 15131
  chr6:138428812-138429311
  hyper

SEQ ID NO: 32997 - DNA, 256 bp, Homo sapiens; identical to SEQ ID NO: 15132
  chr6:139694249-139694505
  hyper

SEQ ID NO: 32998 - DNA, 504 bp, Homo sapiens
  chr6:150246752-150247256
  hyper
cgcccgctgtccccgagctccgggcctgagtgctggctggcggagacccacagtgggtgccccgctcccggacgatgcccctgggcttccagatccagagcctcgggacgaaactgtttcaggaagacccggaaggactcgccggtcgcggcaagggacaggcggttcctgagacaggaggagccaggaaatgcggggcctggtggggtgaggagcacggggttcctccttcatcctcgcggggactttgccaccggctcagtgtggaggcctcaccgtcccgcccggatccgtggggctccgacagtgtggcccctgcgaggaccccccccatcctcctcgccctggggctgctgcgggagggcgcccgggcagcactaggtcctgagtgtccagggtccggcaggggcttcccgttgtcgcctccctgaccccgccgcttgcggtccagggctgctggtttctccgctggtctgggaggccctagcatggacgtcgtgaggc

SEQ ID NO: 32999 - DNA, 767 bp, Homo sapiens
  chr6:150284566-150285333
  hyper
cggtagccctctagggctttctttcttttctttttttttttttccagaagtcataaagggatatagaatatactcaaagaccacctcatgcttttagtggagaggcaaaaaaggttcgctccggaatggggaagcggctgcgccctggacggagaggggcggggacttcgcgactgcaggcggagggagggcgggtgtcgctggcgcaggcggtgacagggagacaccgccgccactgagtattcctatgcaagtttcttcatcttcctgtgcatcagtgtttacactggggtaatgataaatgctgtgttgaaaaattatttgatggggccatggaaggaacggaaggaacggcgtcctggcccgctcggggcccgcgcacgccgccaccaagccgcgggggcgggtcggaggggagagttgcgtcagccaggccgctgtcagatgacgagcccggggcgtgacggggtggagcatccccaaaaaagtgcatgcctaggatcccgcccagtgtatccctgcgcgcggcgggccgggctgggcagctttataaacagccgtggtgtgagcctcgaagggaaccatcagcgcctcctgtccacggagctccaggtctacaatggcagcggccgccagccccgcgttccttctgtgcctcccgcttctgcacctgctgtctggctggtcccgggcaggatgggtcggtgagttcggggatgtagcctaagcagggcgggggccaaacctgggaggttgtggactgcagc

SEQ ID NO: 33000 - DNA, 147 bp, Homo sapiens; identical to SEQ ID NO: 15135
  chr6:157430380-157430527
  hypo

SEQ ID NO: 33001 - DNA, 711 bp, Homo sapiens
  chr6:17101827-17102538
  hyper
cgtgttggtttctgttcgtgcgaccgtctttctgaggtcgcttttgtgccactgccttctggtgctgtcggggccgcctccacaccgtcctccggccctcaacagccgtctctgcgactggacacctgcctcgcatgccacacgatcaccttcactacagacagtgtctaaaaacaaggatgtggtccaggcaccaggggtaggggcgtgtcacacacaccgtgtcttacaaagaggaaaaataagaggttcccgcaagatgcttgcgactctggtacttttcaaagtaacgcagccaggcagcgggctttcccccggcccctcgctctggatagggctgccatttgcatcctagctgtgatttagacacctccaaccttctagttttcagttacaagagtcccatctccgcccaggtcccaggtctgcatgacgtaatttattgtggcaaccattcctggcgactgcccagaaactcagtgcgtcctgcccggggtttaagcgcgggaagtgggagaggcgggtggcgcccgagcgcagtagcaggggcgtagggcgcagggcgcaggagcgcgggaccaccggcgccggagcgcggcagggagcgctcgcgggggcgcacagcagccaagcccgcggaggaggagcgcgcgcgcgcagcatgggctgtggaccttcccaacctgctgaagaccggagacgtgtacgcgc

SEQ ID NO: 33002 - DNA, 394 bp, Homo sapiens
  chr6:18122674-18123068
  hyper
cgcaggccaggcagaccacgtggccgcaggacaggttgcgcgggcgccgctgctgccggtggccaaacttctcaaagcacaccttgcactcgagcaggctgatctccgcctcgcgcatgagctcatgcagcgctggcccgctctccgaggcttcggccgccatggcgcgtcctgtgcactcccgccgcgccgcctggccgtgccccagcgacgctctcggtcacggtcacagtcatggtcacggggtgggacgtgcgccctgacgtcgagcgccgcgggcctctgcactgcgatctgctgccccttggtgggcacgcgcggcactgtttcctgagggcctgatggtggacgtttgcaagacaaatccacatgcgcgttgtgtagacctgtaatc

SEQ ID NO: 33003 - DNA, 74 bp, Homo sapiens; identical to SEQ ID NO: 15138
  chr6:20640178-20640252
  hypo

SEQ ID NO: 33004 - DNA, 1899 bp, Homo sapiens
  chr6:21665040-21666939
  hyper
cgagtgaagcgcggggcgggggaggcgaggacagaagctctcctcgcggcgtctttgttctgctctggaggagagaccttggcaaggagtcgccgggcgggtgcagggacctaccgccaccacattccggacccagcgggagccctcctcttaatgcccctccccccgcaagccaacccaggacatagcccccaggtccccaaggttccgtctacctcatccttctacccccaaacttcaccaacccgaaaggattccaagtctgggatggggagaaaggaaagagggtggaggcaaaggtgcgcgacgggctggataccaactggagggtgggtgttcgcattgaaatgtttttttcttttgccctagaaattgcttccccatgcgggcccctactctctcccatttcccccacctccctgctttctttttcttcaattctagtggatctagaaggaaaacgagtgctgctctgagtcactcagcgagctaatgctatggcccgaagttgggatcagggtcgaggggtgggggaccatgtggatggggtcccaattctggaggttgagaatgactggaagggacctggggaagggtcgggagctgttcctggtccgagacacctgatttgtcccggacaaggcagtgggggaggggaaggaaagaggggatgctcggctgggacgtgtcgcggcagggggtggaggatgaggaggcggcctgggaccccgagtcagatctttggggtgagcacgaggacgtggtgtagggaagaggacgagtgagcagcgcctggctgtagggtcagagggcgcctggtcatcctgagagccttgccttcgcagtttgagattaggggaagttcggggcctgagaaggtgggcgcgatgctggagctgggaattcttcctcggagcccctggaccgagttgcgctgcgcctgcagcaacaggtagccccgagggatgggcggaggccccggccgaacccggagctggcctttgtcctgccaattagagggctctccagagggacagcgtgggtgggggtaggtggggaagggcgggagaggagtttcctaacacttggagcccctttgagttgttctgtgtattgggtggaggagggtgaatccgagaggagggaggagggtgaatccgagaggaggaaggaggatgaagagcctagcctgcgccccacctctgattgtgtaagcgcctttatctagggttgaccccctaccctttgcattttgtctcttgggatgacgaaaaatggacagaaactcgacgcccaagtgaatgtttcacattgattggcagggaaagtgcaaacaaagaggtgcatctccgggaaacaatgattttggagatcccctgcccaccaccccagacttgtgcgcggtgcggagggggccagggctggcatctcccggggaaagtttcgagcctggcagtgggaggagaccgtctgggcagagttgtgatgaactggggaccgagcagccccagctcgcctcggaggttcccgagccgggcgggagatgcggggagagggagggggcggggagggaggggagggagagaggaagaaggggtgagagggagaaacctgccgccgctcgccgcctctttgtctgctccgggacttggaacaaaagggggaactctgatgaactctctttcctcccctctcccccggacgccggggtatctccctctcgcaactttgccgccccgactttctctgctgtcaggccgggaaaaagtgtccgaacgcctcgtggactgcagcgggggaaatgtcccttaaaagtgcgacgaagtggggaagaaggtgagtggggactgttgtcttgtttacctctctcccctcaactcgccccgctccccgcccttc

SEQ ID NO: 33005 - DNA, 194 bp, Homo sapiens; identical to SEQ ID NO: 25781
  chr6:24494664-24494858
  hyper

SEQ ID NO: 33006 - DNA, 387 bp, Homo sapiens
  chr6:26215876-26216263
  hyper
cgtattcacatgttcctgcagtctctagcccgagagtttaagctatcctaccacctcagcctaccgagtaaatgatagtacagacgcaagccgtcacacctggttagcttcatttttttgcagagacgagttctatgttgcccaggcaaatctgttaactcctgagctgaagaaagcctcatgcatcgacctcccaaagtgctaggattacaggatcttgccaacacagaacaggagtatctcctgatcaattttttttgagacgaagcctcgcctttgtcgcccaggctagaatgcaaaagcgccatgtcttttcactgcaacctttgcttgctgggtttaagtgattctcctgcggcagcctcccgagtctctgggatgacacgc

SEQ ID NO: 33007 - DNA, 293 bp, Homo sapiens; identical to SEQ ID NO: 32055
  chr6:26216380-26216673
  hyper

SEQ ID NO: 33008 - DNA, 1085 bp, Homo sapiens; identical to SEQ ID NO: 23319
  chr6:26216805-26217890
  hyper

SEQ ID NO: 33009 - DNA, 1598 bp, Homo sapiens; identical to SEQ ID NO: 30479
  chr6:26233864-26235462
  hyper

SEQ ID NO: 33010 - DNA, 1263 bp, Homo sapiens; identical to SEQ ID NO: 24548
  chr6:26271217-26272480
  hyper

SEQ ID NO: 33011 - DNA, 408 bp, Homo sapiens; identical to SEQ ID NO: 30485
  chr6:26273355-26273763
  hyper

SEQ ID NO: 33012 - DNA, 147 bp, Homo sapiens; identical to SEQ ID NO: 23322
  chr6:26327821-26327968
  hyper

SEQ ID NO: 33013 - DNA, 134 bp, Homo sapiens; identical to SEQ ID NO: 23323
  chr6:26328309-26328443
  hyper

SEQ ID NO: 33014 - DNA, 893 bp, Homo sapiens; identical to SEQ ID NO: 23324
  chr6:26331633-26332526
  hyper

SEQ ID NO: 33015 - DNA, 224 bp, Homo sapiens; identical to SEQ ID NO: 15152
  chr6:27125333-27125557
  hyper

SEQ ID NO: 33016 - DNA, 217 bp, Homo sapiens; identical to SEQ ID NO: 15153
  chr6:27125812-27126029
  hyper

SEQ ID NO: 33017 - DNA, 836 bp, Homo sapiens
  chr6:27218591-27219427
  hyper
cgactcctccgggtgggctggggggagggaactcggactccagggccccagtctcagataataggaataccctcccaccacgcccctaccttcctcccgcgcccaaagaattttgcacaagctgtcctcacaagagcccgagattacacagcgagtaagtgacacagaggcagaaagatatgcgattccaacccctcagcccgcaggctgacggcgtctcctcccttagttcccccatctcattttcgcgtcggtcgcctcctccgccccggtgcgggccgtgctggatttctccgagtataatgacgtaaggatggcgggcagcaggtgcgggacggggaggggtcccagcgggcggagtcccttgacacttccggataccttcctctgcggtccgcccacaggtggtatcccgaagcctaatgagcaccgcgatcggcgggtccctggaggtaggaggtggggcctagtccgagggggactgggagggaaaagaggcctcggatgccagggaagaggaggccagagaagggcgaaacctgcaacgtggcggggtctaaggaaggtcggagctcgggggaatacgcaggttttggaagaaggcgggagctgacgaagaggaggggcaccaggaaaagaggcgctccccagagagggcggggtttgggcagggacaatcctatccggaggtgaggctcaaggtggggcggggccacaatggaggacggggcctgcagggaagacccgagaaggagggctgcgaggcaggggattgggggcgggggcctgggggcgggggcctgggccaagagctaggtctgcaccctctgagtccc

SEQ ID NO: 33018 - DNA, 838 bp, Homo sapiens
  chr6:27840558-27841396
  hyper
cgtacttaatgttttagaagttggccgactttttctgtaaagggcgatattaaaacattttgggcgttgcggaccacagtgtcatagttacacagccctcgcattggtagcggtaaagtaatcgatacaagataaatgagaccggctgtttcattatgacttttgcaaaaaccagagaggcgttatagatttggccgtgtatcagagaagccggcacttttaaccactaagtaatgctgaaaggggcaccgaacctcaaacttcagcgactgcttatgtggaatcgctaatttgccaaaactgccatacgtttaagtgttcttaagaaattaactatctttagtctacagctctttcacagacttcatgggtggccctgagaagggcctttgaggaaccgtgtaagtaagtaaaacactcagccgccaaagccatacagggtgcggccctggcgcttgagcgcgtaaaccacgtccatggctgtgactgtcttgcgtttggcgtgctccgtgtaggtaactgcatcgcggattacattctccaaaaacactttaagaactccgcgtgtctcctcgtatataaggcctgagatgcgcttaacgcctccacgccgtgccaggcgtcggatggcgggcttggtgatgccctgaatgttgtcgcgcagaactttgcggtggcgcttagcgcctcctttgcccagacccttcccgcctttgccgcgcccagacatgtcttgtactaaacaaaatgcaacacggcaagcctcgcagcagtactttatatagtaataaatcggacctgattgggaactctccacaccagctgcatccggtcggcc

SEQ ID NO: 33019 - DNA, 513 bp, Homo sapiens; identical to SEQ ID NO: 24558
  chr6:27858278-27858791
  hyper

SEQ ID NO: 33020 - DNA, 683 bp, Homo sapiens; identical to SEQ ID NO: 23339
  chr6:2903030-2903713
  hyper

SEQ ID NO: 33021 - DNA, 895 bp, Homo sapiens
  chr6:3229296-3230191
  hyper
cgtgcgtttgagggcgggaggggaaagggtgtcagaaacgttcactgcacaacctgttccctgcaattcgatgactgaagcgcgccgccccacacttcggaagggccgttggcgaggtgacgtgacctctttcatcccctggcgagaaaggccgaatgacccgggcgcacgcggcggagctcagcctgcagctgttgagcgagaccctcccagaactatcagcaagctgtcatcgcctccctttcccgctgtggggtggagggtggggggttcaagtcgattccaatgtacaaagagaagtagcgagaacaaaagcccaggcgcccccaaacatccagggcgcccagactggagctcgccggccggtattccagacccggccggcgtgcccgggtgagggtggggtctaccgagaggcagagagcagcggagggtctgtccacatgccctgctctcccggtaccaaggtctcggggcctgacctccgagtttctaatccagatcctgcagatgccgaaacgtcgagggctagcaattcccaaggtcatacagcaagttgaggacagggctcggactggaatctcgtcttttgggcacaccagacctcagggaaagtgaccgcatctcggccaaaagggctgtggcaggtgtcagcctcgaggtggcggctctggtgggaccaagctgcgccggaaggaacagagctagggcggcacccgcgcggcgagtgtagacacactcggagcggtcaccccctcgctgcgagctcccaggagcaaccctgatgctcagcgctggggggtggggttgggggccgctcagctccatgctgagtaacttgagctggccgcctgcctccttcatctaaccaattcatttctcagcttctgtttcc

SEQ ID NO: 33022 - DNA, 644 bp, Homo sapiens
  chr6:34433449-34434093
  hyper
cgcaccaagggacgccgaggctcgggagaggaggaaaggccaaggcgatggggagatggggagagaggcagggagcaacatcccgggctccgagcgcgccagctgggagggctggggaggagggcgcaccggagggctcccggcacgcgcggggccgcgggcagcccccagaagagggagccaggcaagactgctggggcaggggtcggctgaagcagcggggagccggaccccacccgccacccgccacccgccacccccggcgcctgccaaactggttgctgcctccccggcagccgcggcgcgtccacctgcgcagccaccgcgccgccctgcccgcgctaccattggctcgctaaaaatgcctctctaatctgctctgctcggtgcacgcctcctcctcatccttcccccctctccgcctcagctctgaccttcctccttcccgcagccccggcgagatcccagagcgacgcggtggcggcggcagcgccagccccctcctcccccgggaagtcggccgggcttgaggccgggccccagacgtcccgcttcgccccgagtcgccgccgatggtccccggagctcctgcccccaggtaggaggtctggcccttgaatagagggcgggggggttgtgtgtgc

SEQ ID NO: 33023 - DNA, 537 bp, Homo sapiens
  chr6:36098070-36098607
  hyper
cggggtcccgctgggcagccccgaccccgtgcctgggccgcacctgccgcagtggctccgtcgggccgggcggaagcgcgggagcgcagggctggacaggcccgggcgtggcggccccggcgcacctgggcgagccggcaggtgggagcgtagcagcccggggcccccgccctcgcgcgggggaggagcgggcggcgcggggcgggcgcagcgggggtcggggcgctgggagcccgttgggccgcgaacgcagccgccacgctggggccgccgagatcgggtgcccgggatgagcctcatccggaaaaagggcttctacaagcaggacgtcaacaagacagcctgggagctgcccaagacctacgtgtccccgacgcacgtcggcagcggggcctatggctccgtgtggtgagacccctgggccgctggggggcggggggcgggcgccaggctctcccctttccgcccagcccgccctgggctggcccctcgccagcgccaccttgaccgcggacctcaaggcccagcgccctcccc

SEQ ID NO: 33024 - DNA, 1014 bp, Homo sapiens
  chr6:36354750-36355764
  hyper
cgccagccacggagctgctgaggatcagactcctgggtttcagcatggaggccagggaagggtctgataatgggtatgggtcctggcgagaggggagtggagaaaggccttggagtgggacggggcgccagctctgggggcagtctcgaggcacctagaaaaccggcgagtggggagaggctgctaaagaggggctccctgcgagaatgcgttcaccagctgtgaggacctggctggcgcacgaacttccaaagacctcacatctggttggtgtaggggcgaccagtggtaagggggctgcggaaagggcccgcaggggctgtgcgtgatgccttcagagctgtgtatgacaccgagagagtcaggggcggtgacccgcgtctggaggtggaaggggaagtgagtgagggatggatgtgaggtttaggaatgtgttggaaagagagattcccgccaggtaaaaggtctgataaaataggtttggaaatctaggtggtgaggaaaggatgcgggagcaggtggctctgcgtgcgcgctgcgtgttcagccgccaggctcttacctgcattacaggtggaggtgaggaagccaccggctttctgtcttgagcgctcccctggctgtggctgctggggccctaggcccgcgccccgcagtcctcctccgccaaacccctaacctggctccgagaactggaaggtcgcgtgggaggaaatctctttcgagaagcgccaaggcgtgtgcgcccgggtcctccgcaggcgggcaggcgcgcgaggcgctccggtaatcgctatccttccgggaaacgaaaacgaaagagcgggatgcggttccacttgcgccgctgcgggctaggagcagggcagggcagggcaggggccggccccgtgggagcgcagcaccggggcgctgcccgctcgctagcctgggaggcgtgggtcctgcacacagcctccagccggcggacagtccctctggcgacctggccttggctcccactggggcagagcc

SEQ ID NO: 33025 - DNA, 577 bp, Homo sapiens
  chr6:36807979-36808556
  hyper
cgcgcgcatcttcatttgcgcccgccccctctcaccacccctatctcccatcaggggtctccatcctgggggagggggagggttatgggaaccaacgggcgcctttttgagaaaggtctatgcagggttgagagggggcataagtgggagggaggtgtgcaaaaaagatcccctcccaggggcttgggtgtggagggtctctgctgagtgtgcgccctactcgggggcgggtctcagttcagaaacagaccctacatctccttctggggaggtgtgtgggggcgaccccagtgccaggagggactacctcggtttcccagtggcccaggtggggtcggtgcatgggcgcctcccccatccgtggttcccgccagccgcggcctcgccaagtcggctgccgaaaccacgcgccagcgcccttccactcccccgcccgtcgtgaccacacgactgagccagcctccaggtctagaagctcctgccacccagtctggtggcaaccagactgggagatcggcccgagctccctgggcttctatgcagccagcaccgagtaggcgcgtgctgtgtgcctggc

SEQ ID NO: 33026 - DNA, 609 bp, Homo sapiens
  chr6:37666475-37667084
  binary
cgcgcgagacgggccgcggctgtgggtctgcaaggctgtctgcccggctcgagaggcccccgcccctttccaggcgtctggtgctggggccgggccggagcagctggcggagaggtcgcgctgagagctcctgcccttgccgcggcccacaggttgccaacaggtttgctcgcacgacccctccgccagagcttccctaagtcaccccacattttcctcggctagccactcttcccatcttgcctcccctcgggacctcaggcgcccccaagcgccccgggggcacacctccttccggctgccgaacccgagccccgctccagcggcgggagtccggcactcgggtctcagccgcctcgaaggggccctcgcggagcaggagtgcggagaacgctcctcccaaacgcccgcggggaggggcgtaggctggcaagcgaggctggtggcctcccccgcgcctccgatcccgccccgcgcccaacccgggtcctgctaatctcacctgctccacctgtcgccgttatttatctcagcgtgtgcgcaagaattgttttaggtcggcccgtgggagcgcagacaatcgcagcagctaacaagcggggagactac

SEQ ID NO: 33027 - DNA, 693 bp, Homo sapiens
  chr6:42109904-42110597
  hyper
cggcggctgctctcggccagtccgcaggttccaacgtgtccctcccctccgcgcctccaggagacagcaccgccggccctgccccagcgccctccgtccccgccccagcgccctccgtccccggagtactcaccgaagcccccggtcccctcctccggggcctcctgggtgaagatccagggcggattggtggcgtagagggaggtgctgggggtcgtggtgtgcttcttcccgaagagtttgctgaaggtgccctgcaccgtctgcttctttttcatgctgccgcagcccgcgcgggcgccagggaaggaccttccctccctcgccctgccctgccccggactgaactcagcacggtttccccaggggactctaccaggccatgtcccccgccgtcctccccgcccgcgcaccgggcaacaggtgctgcgggcgccgccgcttgccgggaaatgcgagctacctggccaggtaaaaggcagccgcttggccgggccccgccccgccgccgcccagctccccaggccgcattccttcccgcctccttctacaacaggccattgttggcacggcccggtgggctggggacctcgcccggcccacgcccagcctgggagacgggccaccccctcccccaggttcctccctgcacgcctccttcaccccacttccccctagtccgggaaaggaggc

SEQ ID NO: 33028 - DNA, 1533 bp, Homo sapiens
  chr6:45387325-45388858
  hyper
cgaaagcctggcttcccttcccggatcggccgcctgtgggactcgagagacctgtgcacgcaggggacgcggcggtgcccggggttagagctctcccctgtgaccgaaaagataattaaaaatcgcacgcgcaggagccagctcagctcctggctgcgcttccagttggtccggtctggctaaatgggttctcgcaccctggcggcgcccgggctgggaggccagtaggccgggcgcgaagagtaggttggggaccaggtgtcatagccggtggcgcagaatcgcttctcggagtcaccgagggtggcagtggcaggcggcggctgtggggcgggaggggcgcggcttggggctagtgtctgtggagggatttggggaagaggcaggaacgtggagagaaacgtgggaaagggaaagaccgacgagggaggcgtggagcagtgcatggaggaagggcaggtaaaaataaagccccaattaggaaggacagagtagtatcccctgaactccatccttacccctcgagagcgcacacctggctaccccgcacccccacctctgctcccgcggtctggcagaccctcagtcccccgcgcatctcttcagcggggcgatcccgagtcacgcaaccacagccccccaagctcatcttgtactcgaaagggctccagagtccgcgactggcaccaggcccccatcttccgtgcccctcatgctctcagagcccttccaggccccttctagggcgcagacccgggcgtgggctcagcgagtgggagcaaagctctaaaaccagacagggagggtcgtggcaggtcgctacgagggtgagggaggcgtttgcactgagcaataaaaacacccagtaatgggtatgtgaattgctttaaataagatgggagggcgtgagagatgacccaaccatctttcttccttgatgcttcgagggggaggcattctaattcttcatttattttataaaatcacttgttactgtgtcagctactccactaggaatctttgaaactttggcaactgatgatttttttcgcaaacacgttttcaagctttggaaggctttaaagagtttggtaataagcaagaaacgtagtagtacacaacgccgagggtaaaacggccctgtgcccccttcttggggtgtaatagcctcaagcggatttcccggcttctgcgggcgcagcacattgttttatttgttttgaaggctcagagtttgaggctggtcgtagacacccacgtgctctgactctcatcagcgtaatgatcgacttagccagagtcgtgtctatataaaccacaaaaacctaatcattagaaatcccagcctccaaaaaccacattttaggtaaaaagtgccgctttttttccgcgctccttcatcctctcgaccacaactttttgggggatccaaagtcgctttttaaacccacactaggaaataaatacataaataaacagccacggaagcattttgaattttttagttcgtatttttaatttttccccgtgagc

SEQ ID NO: 33029 - DNA, 965 bp, Homo sapiens; identical to SEQ ID NO: 22935
  chr6:46097250-46098215
  binary

SEQ ID NO: 33030 - DNA, 1132 bp, Homo sapiens
  chr6:4775131-4776263
  binary
cggtggggaccgcaggtagaagcaccgcttaaggggaacggcgattcgactcgcagtgacttaagggttggcgtggtgcttgttcctgggcgtggggaggacaggaaaccgcggggtctgtgagacgccccgtggttgttgaaacgctgttggggggcacaaacgaatagggctttaggaagaaaactggtgggaggagccttgtggctccaaggtaggttaggaactggagcgagatggagcacggaggagtgaggcggcccgaaggatgcccggggagacatggaggaactggcgagggcttcccgatgcagggcctgggggagagggtgaactaatgcctctgcagtgccccgtggggaagttccgcatactcggccagagtgatcggagttggcggctgtctgggggagttgggtcaggaagccccttctttcgccaccgatggggcacgtccagggcccggcaggtgtgccctggcagtagatcttccctgggaagtggagcgcgggccagccctcgctgttctgagcgagggcctgtcgtgtagtccacaccgttccgcgaaaggaaccaccattgacagcctcgttcgattagaacccggacctccctggaatccagactcggtcccttcccagctgcgcttcggaggaggcggacgctccgagaggaacccagaggcctggcgtggggggagctgcgggcagagcggaggcagccgcgccctcgcgccgccctccgccgcgcccggctcccgccccccggatcccacccccggcctgccgcggagccagcgtgccagccggagctcgccgggccaccccgcggggcgcgcggcccgggctccgggtcttggcggcggccggtggggcgggcatggggtggggtgggtgctccacctggccacgccgccggcccttcgcgggctggcccggccccggacgggcgggcgcacggaggccgcctcttgggctcctcctggagggaggcgcgcggtagacggcgcggccgctgccgtcggggcggtgggctccagacgcgggccggctcgctcgcatggttccctgccccatctcgggtccgtcgctgcccgtcctggtgtgcacaaccgcgctgcgcctcgaacctc

SEQ ID NO: 33031 - DNA, 924 bp, Homo sapiens; identical to SEQ ID NO: 25807
  chr6:5084683-5085607
  hyper

SEQ ID NO: 33032 - DNA, 746 bp, Homo sapiens; identical to SEQ ID NO: 25811
  chr6:56818408-56819154
  binary

SEQ ID NO: 33033 - DNA, 791 bp, Homo sapiens
  chr6:710660-711451
  binary
cgtgctgacggggactggcttttcttcttcttcttgtagtttgaaatggaaacgctgcactgctgagaaaataccacggaaatagaacccactgcattccaggaaaataaataagcaaggccacccaaattttcaatgagtgctcctgcagaatgcaggaaatggcaggagatccgtccgaggcaccccaggccgggtcgtgggtagagagcagggacgagggctgggaggggacgcaggcacagggtgagggtggcccgtctccagggagaactgcgcgctcacaggcggggccggcttcccgcatcagcccggccgggctgcaggttctgagcgagggggcggccgtgcctcactctgggcgggacgcggcctggtgcagggacgctcacttccagtggcatttcccgtcttacacgatgagcttcatccacgttctccataaccccctccccgccacgggaagcgtcagccacctggaacagccctattctgctcggttgtaaaaagcgtcaggcgcttttgatttgaaaagcgttaggcctgggaatcgctgttgctccctcggtgggcacgccctgctgacacgccctagcccaccggggaagccactggccacgagggagcgaggcgcacgggtgtcttccctccccagagtgagtgtcagggaggaagccaggtcttccagggcgctgacaaggcagggccgggctccttccctccgttgtgtttctctgaaatgttcgaatcactggtgtgacgggagcacttaaagccgaaaaaggaaagac

SEQ ID NO: 33034 - DNA, 587 bp, Homo sapiens; identical to SEQ ID NO: 25814
  chr6:73329621-73330208
  hyper

SEQ ID NO: 33035 - DNA, 757 bp, Homo sapiens
  chr6:7542700-7543457
  hyper
cgtaatcaaagtaaaagaggaaaggagcggggccccggtcctgtctggtggccgagtggtgctcggggctccgcagtctctaccggctcacccccaatccccagtaaccccgagaccacgactgcaacgactcctggactcctcggccacccaaggacgtttgtatcaaggctgcgcgtcccggcggcgcggggtcctgtcccgaggaggcgcttcggcttcccctgtccgggaaacgaaacttccccgccggggcggctgccgggcccgggtctcgaagttcggccgggacgtgcctgttaccttcggtcgtccgcgccgcagcccccgcgggcgagcgcacctggggccctgcctctgagccttttgtttcctcctttttaaaaacaccggatgaaagaccccagtgtgccttggatcgcagagcgccggccgcatgtctgctttgatccagaatgtgtgggcaggggagtgggggggtgggagaggacgacgctgggggcccgccctggcctaggcgccccgggaagaccccccggtgagagggtcagcttctccggatcccagcggaaacagaccgagggcgtcatttgggtgggtggggaagagatcctgtccctgctttgaccgggtctcgggagctggactctagatgcccacgtgagccgtgcgcgttttgcagcccgccccacctccccgccccctgctagttgttcccacgtcgggcttttgggaaagaggccctgagcgccgggac

SEQ ID NO: 33036 - DNA, 789 bp, Homo sapiens
  chr6:87861506-87862295
  hyper
cgaaatcaggcagcagtgcccgcgccacggcctctgcaggacagactccagcatccccggggtgggtttccggaggccccgctccccgccgcgccctggaaaggctccagaatctctcggcctggaggcccctggcggcctctgctcccaagcggggagtcgcagccaggctacagcgggcttgatcctcagtgctgggtggaaaaaccgcggcggcaaacgccgggcctgcaactgctgggtgtcggcgttgctggttcgcgggcggcggcggcggcggctccgcgacaacagaggacgcgagcaaccggcgcagcgcccagcagggccttggcggggtggaggggcgcaggctgggttagcggagcagagcggaccgatctggtgccctccgtggcccgaggcctgcggaccttctccgttctccggcccagggcgagagcggggcaagagacagcgccccgatagtggcgcacgctctccgccatccccgggcctcgcgctttcacctcgcgtgctggggcgagggcggggctgcggggtgtactgggtcgggggtaggaaggacctgccaggccttagccctgagctatccgtcatccgctaacgccgcgctccctgcatccctggcttggcccccaggctctgcgccgcttgtctgtagcagacacaactcagctcccttactgtcctcaggcccggctatttcaagaattccagaaaaagagtgcaccggcgtgtgcgggccggtgctgcccggaaaacccgtgaagcaggcacgcacggccc

SEQ ID NO: 33037 - DNA, 736 bp, Homo sapiens
  chr6:99276279-99277015
  hyper
cgaactgagctccgtgcctattcattattctctccctctgacctagggcgttaatatgatcaggcctatgactcggccgtgttctgttttcctattttgcatttaatgctgggacccggctgccctagattaccatcgaaaactctcagaaaagacaagaggagccaggaggtctccctgctccaatctgcctaaggcttcctcttcctgcctcctcttccggccaacgtctgcccctatgttcccaggacccaaattctggaaacctgtctttaaaaatacaatcatctctaactttatgatgtccaaaagctgtctagaatgacagattcgaaactctgagacctagcagaagattttggcccacagttattacgactgtggttaactgctctccagaaaagcatctctcccgcccgtgcaccacctgctcccctccccgcccacccccccatccccccccaaccgccgtcctcccggacactaacgacacaattgttaagtgcacttgtacacttcagaaggatttgcattcgtgctgtgtgcaggcagaataagagaactgaagtccaacttcaaccaaatacgcctgtttatcccagggctggagcaacagccctagcccttgaaaatggcttcagtgaaatagctgagtacaccctcctcccacttccccagtccgcctctgtgcgcaggtgtatgttagtgcactcgtccctagcttgccttcctcttc

SEQ ID NO: 33038 - DNA, 455 bp, Homo sapiens; identical to SEQ ID NO: 25820
  chr7:100091142-100091597
  hyper

SEQ ID NO: 33039 - DNA, 737 bp, Homo sapiens
  chr7:100823053-100823790
  binary
cgatctgcttggcgggggttcccctgggcgccggaccctggggacaggtgggagcgacatggcaacagaggggggcgggggagcgcttctggacacctgaagcgcagcctctgactcagttttctgggtcttcggactgggaggggctgggcagaagggggcgcagccgcttggtccccctgaggggcggtggccttctgctgccccattctgcggtggaggagcacgctagccccctccccagtccccaggcccggccgcccccctacctcgccggagccggagctggagccagggccgagatgccgcaaagccaagcggggcgggcggcgggcgcagacacccccggtgccaagagagaggtccctttggagcccccaagagtcaaaggaggatgacgcgcggggactcggccgcgctgtcggagcccgactctaacgtcggtcagcgctggggcagcgccgcagctccgttggcgacgcgggccggggcgcccatcggttcaggggttcgggtggcacgcgtggctcccccggcgacgctccggcggcagcttcgaggggcggagaccccggcgacgcggaagaaacccgggacggatccggagcggactcgtgccctgctggcggggccgggggtcggggtgcgccctgggcagctgggtggcctcaagccctactggcgagactccgccctgtgtcccggctggggagtgggactgaggatggtggtgtctc

SEQ ID NO: 33040 - DNA, 502 bp, Homo sapiens
  chr7:100845050-100845552
  hyper
cggacaggcgaggccaggcggtggggcgcgcctccgtgaggaccaggtgtctgtcggcggggacaccatagcgcgcctggtgctcctcgaagagctgcgtgagtcgccccacgtagcgcgcttgcagcgtgtccacctgggccggactgggcggggggctctgctgcacgggaatcgccgaccccactgcgggcgggacgggaggcgatctgggctgggatccccggttctcctcctcttttcctccttggggataggcgggaacagagttcagggctggcgcggtggccaaaggccagtctgggtggccccaacccgggacggggagggagcgggccctgggccaggatcgcggggcggaggccggggctcacctacggtgcggatgggcgcgcggaagggcagcgggaggccccggcggcccaggaacagctgcagggccacgcttagcagcggacgcagagcctcctgcgtcctctgcacccacgagctctgcgggttc

SEQ ID NO: 33041 - DNA, 487 bp, Homo sapiens; identical to SEQ ID NO: 15192
  chr7:101460542-101461029
  binary

SEQ ID NO: 33042 - DNA, 1228 bp, Homo sapiens; identical to SEQ ID NO: 27193
  chr7:107300997-107302225
  hyper

SEQ ID NO: 33043 - DNA, 785 bp, Homo sapiens
  chr7:107641955-107642740
  hyper
cgggaggaggcgctagcagagcctcgaaccccgctctcagccctcacctgcaagtggctgacgatacagtagggttcgggcttgtgcagcccgcacgtcgaggtcaccgaaagcttctgtgctcggccgatgagaaggtcgcccgtggcgggatagcagctgccttctgcgcagccgtagctgaactcgggttcctgagcgcgcactcgggctctgcacagggctgcgggaaggacaggcaacagagttggggggacacaagcagggagtggagcccgaaaaaaacgaacaagcgggggcgggggagtgggtgcggagagaggacagtccattcggaagaaagcaaaatgcacagaaaagacaatggagagatgagcgcaggagaggctgggaaggcagggactccgaaaggagaaggacacggaaagaaacccacacacgtcatcaggtctgtccagcagcgagagcctccctcccgggaaacccaccgacgctcgcgcccaccctgatcagccccggggagcagctcccccaacaaagggtggatgtgtagaccctccacttcgacgtgtccggagcccggcgcagggaggctgacccccaaagggccacacacccacgcacgtgaacccgcgtgcacgcggcagcccgcgcatcctcggtgtgagtgtgcgcgtggagatctgtgagcttgggaagcgagagtgcgtgtgcgtgcacgcgcgagggtcaccggcgcttcgctggggacgaggcgccggggctcgcggtggacgccgctttcc

SEQ ID NO: 33044 - DNA, 216 bp, Homo sapiens
  chr7:128509984-128510200
  binary
cgaggagcccctgctgcccggatacctcggcgcgcagggtcgctggcatctcggctccggctccgcgacctgggagccgccgccgggccgggggcttcgggcgggtaagcgcagcccacgccccctcccgggcggcccccagctttgccaccgccggtgccgacctttgtggctcgcctttgatcatgctctgcgtcagcgtggtagtccttctcc

SEQ ID NO: 33045 - DNA, 866 bp, Homo sapiens
  chr7:129418286-129419152
  hyper
cgtaaggccgactccagaggtcccgctaactcccccgcaggagcatgaaggggcggccttgagcggtaaagaaacgagcagtggtggaggctgccgctccgagcccaggtccgaaccgagagccgcgcggggaatgtgggggtcgaggctgagagctgggcttggggcaggttcctttgcgttcgctcaggccacgatgaggccactaggacagatttctccgaaggctcggcctcggatcagagatccgccgactcggtgcccatcggtcgggctcactgggtgacaggtagagggtgatgcgcacccgtagagctgagtgacccggcccgagaatccgccacctggctcgcaggattttcgccctcaggagctttgcgaagacgggcgcaaacctgggaggcgccgccgcaccttgcctgtgggggtggggaggtcgattacggcaccgcccgccctcggccctaatcgctcagagccggcctcagtgcccctgcccccggcgggtattactgtacacggtgtccgggagcccgggttggaagagcaaacgaatggctcagcctggaggacaccgtggaatcgggcgacccctgaccccgggtgacaccctcactgcccatagtcctgggatgcgctgaccggtgaggcgccagaggcaagccgtccagccgccgatcttggggaagggctgggaacctgggtgccactagcgctattaacaggaatggggcagttgagggcggggaacggtgtctcattcgcgtgcgccggggttcccgggatgagtggccgcgaagtggaggcacacgggaggtctgagagccgctttcccccagagactgggcggggcggctccgggccac

SEQ ID NO: 33046 - DNA, 762 bp, Homo sapiens
  chr7:129425170-129425932
  hyper
cgctcttatttccgtttggggattcttcggagttgggatttttctgtctcaaattagaataatctgcattattaaccacttaacagttatttgttggttggctgcctgacctttctgagcctcagtttcttcgtctgtaaattgggagcttacccaggtcggaggactgttggaattggaaatattcgaataaggaagtgtttttgcaagtgctttgtaagcagcaaagcgcttcttcaggggtcaatttttttttagctctgcagtcaccacccaaattcggaagatcgttgtgcctttcttggatgagaatgcccggctccagcccggggatgggacggtcttttccttgctaggagtccgctgtggagggggcgatgcgctctgtccaggacctaggagtccctttctccctccaccctcggctcacagcgggcagctcccccgacgcgtaccgcctctttgcccccagcctgaggtgcgctcttccccaggacgcctcctctgtcctctgcacgccgccggccctgctggggttgctttctgccgcggcgtcttcgcgaatatcccctcttgctgtctgcctgggcgtccctccgggttaccgcacaccgcctccgaccctcccagggcgcgggaggaggggcagggcatccgcgttcgtgtctgggccctggcggggagtcgcgtggtccaacccctcgtttttaagaggagggatctgaagcccagctaggcttctaattccagacagagccctac

SEQ ID NO: 33047 - DNA, 439 bp, Homo sapiens
  chr7:129913007-129913446
  hyper
cgtgctcaaggtacacggtgcagggacggttcttcctctcgatgtttctagaatctccctcctcccaggctagccggcagtcccagcttgtgctacagagaggctcctttttattactttttttttcttttcctcctaaccggtccttgctggttttgagtatccactcccccacccccgcccccttctttttctttctctctgttcctgagcaagctgacgcaggtctgcaggagtgaattaatgctcacgtcctgagagatgagctcctggggaaccggggcaaatgcgccaataggagccgaggaagggggaggtgcgggccgggggaggttgggggctgggggctgtaattcaagctgggagttctctgcctcccctccccttctcttttttttctttcctctttaaacacacacacacacacacacatacacgc

SEQ ID NO: 33048 - DNA, 854 bp, Homo sapiens; identical to SEQ ID NO: 30527
  chr7:139929854-139930708
  binary

SEQ ID NO: 33049 - DNA, 209 bp, Homo sapiens; identical to SEQ ID NO: 15200
  chr7:140103670-140103879
  hyper

SEQ ID NO: 33050 - DNA, 956 bp, Homo sapiens
  chr7:140773774-140774730
  binary
cgaggcggctgcttcggggcagtcgcttcctgcggggcggggagggggcgggaggcggccgcgctgggttcgccgccgccggaggctgcacctgcctcagaggatgcccaggagcccgcgggagcctctccggatcagaactttttaggccgcccgcccccatccccgcagtccccgggccgtgctccggtaggcgggggccgagggggcgccgcggcgcgagtccctctcctgccccctcccccagctcggccgcccgccgctttgttccgggtgcggcgagggaaggcgaggctgcggcggatcatgcccatggtgtagccgccaagcggaggcatggctgccggaaggttactgctctacactggcctctcgctagcgctctgcgccctcggcatgctggccgtggccatctgctcggaccactggtacgagacggacgccaggaagcacagggacaggtgcaaggccttcaacacccgccgggtcgaccccggcttcatttacaacaataacaacaacttgccgctccgggcgagccgctcgcgcctggaccgctgggagggcaaactcctccgggcccggaatcgccggcagctgttcgccatgagccccgcggacgagtgcagccggcagtacaactccaccaacatgggcctctggaggaagtgccaccggcagggcttcgaccccgagatcgccgccctcattcggaaaggtaagcgccgggcgcaaggcgtggcgctgcggagagcccggcgcctttaggccccgcagcccctcgcgtctccttcccaggccacaggctatcaggtctctgggttccaggcggtccggttatccaggcctggctgagcctcggggccaggacttgcctcccaatagctgttaatgaagcttggtgcaggcttaactctctcccctgcctctcctttcgcgcgtctctgtcgggattc

SEQ ID NO: 33051 - DNA, 134 bp, Homo sapiens; identical to SEQ ID NO: 15202
  chr7:147354952-147355086
  hypo

SEQ ID NO: 33052 - DNA, 339 bp, Homo sapiens; identical to SEQ ID NO: 28165
  chr7:150081096-150081435
  hypo

SEQ ID NO: 33053 - DNA, 271 bp, Homo sapiens; identical to SEQ ID NO: 15204
  chr7:151165408-151165679
  hypo

SEQ ID NO: 33054 - DNA, 982 bp, Homo sapiens
  chr7:155164915-155165897
  hyper
cgcccggctttgggcttggccgagagtttagggcaggagcgccggcggggagctccccgggtgctggagaatgcgtgtccggaaagaagtagggcgcgcttcgtggatgcaaccagggccgtctcgcgcactttcttcctaccctgggacagcgcctgaactggagctgggcgcacacactttacggagccagctcgggttcttacgccctggctcacccccgcccgccgccccaggatgcaggtgctgcggcgctccctggtagcctcccgcgctccctgggggcgcgctttcctccatttcagggaagtccccggacaggtgcccacgttttacgctgtccggtagaagcccgcgggctcaggccgacttgcgcggccgcttctccccagggagagaagctggagcttcccccacgcggccctaaggcggggccggctgggccggagtgggcgcggccagggtgtcccagcgcgccccctgccgaccgcgcgctgcggggggcaactccacctcccctggggaggcctcgtccccgctgcagggagactaaagcgtgggtccgcgaccagccggtttaggaacgaaaactctggaactaaaaacaaaaaataaaactggtgagtgcgcagcgtggtcagtgtttccctctgggtaatgcttggccaagggggaagatcgagtactcccgcccacatccgcctcccccaggagggaggattccctctctgctcacccaccctgacccacgcctcccgccaggtccactgctcagacaaatctgtaggtttctgagtatccgtatctcgaaaagcttcaatgcacaaacgaggttttaagcccatcgcggcttcgcaaggggaaggggctgcttccctaaaaacaaaacacaacaaaaaaggcaagggggtactcttgcagatggactggaattagtaatttagccagggtctcttccaaactcactgcaaaattcgccagc

SEQ ID NO: 33055 - DNA, 1796 bp, Homo sapiens
  chr7:155242619-155244415
  hyper
cgcagcctctgatctgtgagctgcaaagagctccgaggttcattcacaaatctgcgcccccagccgtccctccacgcacccgagccacgtcccgggacccggagagcccggggcgttgggcgctgcggaggaggcccggcttctgtcgctcccttcacctcccagcccgcgagggacttgggggaagggggagcaagctttcgctccggaagaaacgttcggaaccaaggagtctgactcctggatccgggtgcctgttggatccaggctcccactcccgggccctccggtcgaaccaagggtcccgacagggcccgaggcacccgcattcctaggagacaggagctcggccagggcgcatcaccgggtcctgctccgagccagaggatgtagtgtagacacccacccccacaccgcccctccacagagctcctctccccttggggcgtcgctgggcacagggcaggtcgctaggaatccccagtaaaaccacgctcgctcagaggttcgcggcttcctcagagggcgctggggaaagagaggggacctgatttcttcgaccctcggaggaaaagtgctcggggcctcctagggacacagccctggaagctcacctcatcttagcttaggccgcggcgaggtggggaggagagttaggagagggggagaggggctctgcgccctgcagaggcctttaattctggaggaaaaagactgggacacacccaagcgagccaaggcccgagccccacgcacctccacccacccggggcggcgcacagccagctcctgccgggcgtgagcactcgatcaagggagcaagtggaatgaaaatccagctgggggggtccccatcgacacaactgtcccgcagtcgagcttctggattcctgggagatgtggagagcctggggccggctcccgctccgcagagcagactggactgccctaggtgcctggaatgcgcctgcaccctgtccctcggacccgcgggagacccgtgttccgcaagtcccccttctcaccctagtctgcccctacctacatcccgccggcgagtgtgccaccgcgaggcgcctccttccccgggaagggagctcccttccgcgcagacccgcattgcccttcttttcgctcggttttgttttccaggggtagtttctgcagaaaggagattctcctccgggccgaagggctaccagcctgcagtcagttcagccccggaccctgggagatgctcaccactctgcggatcttgatccgaaatcctttctggccgcccactgcggagagtgtcctcgtagagaggttttcaatcgaaggagcctgggctccacattttgtcttcaagcctgagctttcagggctgctttgcacgaggtgcagatgaacttgtgtctgcaaacaagacagaaaaccctaagtgccgcccgaccttcctcttttggggaacccgcactttgtcctgggagcgtgcccagcgccttagtaccaaactttctggccggggctggcagagctcagagtcccgcttccccctaggcgcggccccctaacatctgtaacccaaatgttgcgccgcggccaaaattagccctggcagtgcgaacagagaactaaaagcaggcagtgaatgagaacagctcgcatttctccttcctggtagacggggaggtgtaaatcccgaggaattctagggcattcgctccaaacgtgggaaatcttcgcgcgtatcccgtttcttcctcccagcctgtgttaatgctccaaatggtgtcgagttgctcaactttgcc

SEQ ID NO: 33056 - DNA, 988 bp, Homo sapiens
  chr7:155246744-155247732
  binary
cgcagacacgcaatgtccgcccgttggccccgcccgccccacccctgctccccgcgccccttcgtttcggcctttgtctacaggccgggtcggaacgtcagccccaggagccgacggtggctctctgctcgccccggggaaggtgttgctctcctatcggccccaattccccgcccggcgcctggggcttggctgcggggctcggctcccagccgagggcgcagggctggccaggcctgctttggctgaggtggagatctcgctctcagggattgttgggcgtctctgccccgcgagtaacgagaccgccgcgagcgaacggctttcattgagtccatttttccaagtgtcaccacgtcaagctagagaagcgaggcgagtggaggggacgcagaggggccggaaaagtcacccttctctggcctcgttttcagataaaaacgggagcctggctcggcatccgggcgcccggtgtctccggggcgcttcactgaggttttgtttgcaaaactagcgtccgtgtcctgaagcgcacggcgtctggaagctgctttcctgctcgccctctccgaggcccctctttgtgcagcgagcctgagaaatatggaggaccgtcctccgcaagcgggtggtcgcgggcgctctccgattcctgggtgaagctagagggaaaacggggttcccgggtcagtgccccactttccatcccgggagaaactaatgtccggagagggctcgtctgatccgcacagaaaggccgaccttgagggcggcggtcgttcgggggagaaagcggaggctctgggctcgcgggagcgcggcagccggggctggcatcgcagaggagagacacgccactgccccgcatccccagaaagcgcgaggcgccgtcccagctggggcaggcggccgaggccggtcctcatgcgcgcttctcgaagcttcctgaaacaccttgcggagttccgtgtgtatagaactcagcacc

SEQ ID NO: 33057 - DNA, 2925 bp, Homo sapiens
  chr7:155257774-155260699
  binary
cggtgctattccagtgactacatttttttaaattttgcgaagttcaacaggtctccctccggctgggtgctcactggccctgccacccgtgctggaccgaggcgctttcccctggggacaggaactttttactccactgagacaaagagactctccttttcaaagtgtcatttttgtttaccttttgttgtttcccccccaaaacaaaagactttgtacaacttcctaagcaggattgggggagggatcagcttcgcctgtgctgaccgcgcctctggattccgctcatcaggaagtgtttggggtctttgagcgagtgatctacgcgttgaattgctgtttttccaaactttcatggcttaaaaattttttttcttctccctgtaaaagaaactcagagactggtgatctgttaccgaagacgactttttaggcgttttctgtttccccaggcagctgggccgttggcgttcccaggcggaagcggggcctctgggctgggcctctgccctgccaggaagcggtctgggggctgcccctcgggattttcagaaccctggaaggagagagctggggtctcaccgcggagactcccgagttctcgttgcctgggcccgagctgcgccccagggtcatcgctgatggcgcgagaccacgcattccccgcgaaccccgacttctgaacagttcagaaagttcgtagattaaaaaccaaacaaaaaatactggcacaacttctattgccgtattggcctctctcttattttaataaaaatacggtaacatgaagcgatcatttttttaaaaatctgttttcaaagtataacactgaaaaggggcaaggcacagctttgtaaggtaatgagttccccgtcctcagaggtgttcaagcagacgctaggcttacagtggcatggagagtgttctttctctttggaactggatgagtcctcagacccttgaaacgctgagtttttttttttttttttactcctatgtttattacattttaatccaacagcatataatctaagctgctccctcatggagagccgcggctgtgccacctgcctgctttcgccatggagaccggagtcaggcctgcagggaagtcggtgcgcctttcccaagtcctctgcccgctggttcctctcgggcctcccgggctctgcgtgccgcggatctggacccggactgcagacaccgccccacgactgggcccccggccagactgttaccccacaggaggagggttccctaagtgtgcagaagaggaaagctcatttataaagtccttgctccttcgagctgaacgacccccgcgcccgaggcctagctgtgtccccgccgggcccaggctgagcttactccacactgctccatagccgggcagagactccgcgagggtctgggagtcctggcctcggaggacccgccgccctgcaggcctgcccaagcaggcgcccccgcgagagtgcgggacagagagggcctggcggggctccttggcgctgagagccctccttctccgctgcacccagctctgccaacggggctggatgagtgggggctggagtcagaatcccagggtctacacccgccgacagcagcaatgccgacccgccctgcctttctcctaaggagcggagggaaggagccatgtgaatgaccccagcctgaccaccaagagggcgccagcatttctgttttcctagagtgaaaaggtcaaatcgatgggggctcctacaccgctggacacaggtgcgcccgggcgtccagtgcgcgcaacacacgcccagacactctatatgcaaatatgcctgccgccgcggagccggccgggaggcagcgtttgttcgctggggttctgctagaagtcattctgtctcccgctggtttaatatccgccctctgcggtctccgctcgcctcggcggctcccgaagcgcccccgggagggtcccggctccgccgaaaactgcagcctgccaggctgagccgccgcgcgctgggaggttaatagcgactgacgacaaagggccaaggtgcaattcctaaagcggggattcgccgggtgaggcagaaatcagcctccggggagatgggtccccccttcccgacgcgcccctgcacacactgctgccccggcgccgggcctccgggcggggacccctcttccgggcatcgcggccccattcggcggagagctaggccctctccaggcctccaagtagggagcggacgtgggtggtggggaagggaagccgccggcgggacggagagtggggtcccccggaccctgggtcgggcaggcctggcgctggcagctctgttgcacagatttgtgagcgatgctggtggccgcattgccgcgcggcgcgaaccccaagtagaccattcatgtttttattaataatctcaaacacttcattatatttatgctgcctgcccagagaaaataaaaggccattcttgaaatcgcctgaaatgtaataatattcattaaagcgcctcctaattatgtgatttaatcaagcgtggtgcgcccgcgctctcggctctcgctggaaaggctggcgatgacggttattattactgctgttgttagtggcctcgtgatagcagccggccagctcttcagtccaggcccagtttcctcagagagactcggggagccccactttgagggatggggttccccggaacgactccgaagtcccggagaccaggcgcggcccaggccctctgcccttctccagccccagccccagccccagccccagccccgggcaaactcttccaggccgagggcaggactttctccagacccttggggccctctgtgtcccctggggacgcccgacccggctttctaggagggggaactccgggtcctgagcccgggccccgccccgttggctgttcc

SEQ ID NO: 33058 - DNA, 832 bp, Homo sapiens
  chr7:157262486-157263318
  hypo
cggcggcgcctaattccaccttgtgtgccagtgcagttcatagcccagcagtcacccggggtggggtcaactctggaaggcccctgtgtgttgactccagggtgaacccgggactcctgagtgggcgcccaggcccctctagtgctggccgcctctgcttccctctccaggcccacctgccggccaccacagtggcccccagcgcccagcccaggtcccccacgccggcttctctcggcccaggtcactctcttcacactgtcatctgccagtcacttgcacactctgattcccaaggcgactctgctgcaggcacacgccctcagcaagacctggctgagtgccgtctgtgcccgtggatgcacgcgcagctctcctggggacactggccctggctccactccctggacagatctgtgcccggcactgggtctgctccctgcacagacccacacctggtgctggcgccactccccggacacacctgcccctggcgctggcctgggttgggtgtgtccgtgtgtccagcgctggcctggattgggtgtgtccgtgtgtccggcactggcctgcgttgggtgtgtccgtgtgtccggcgctggcctgggttgggtgtgtccgtgtgtccggcgctggcctgggttgggtgtgtccatgtgtccggcgctggcctgggttgggtgtgtccgtgtgtccggcgctggcctgggttgggtgtgtccgtgtgtccggcgctggcctgggttgggtgtgtccgtgtgtccggcgctggcctgggttgggtgtgtccgtgtgtccggcgctggcctgggttgggtgtgtccgtgtgtcc

SEQ ID NO: 33059 - DNA, 137 bp, Homo sapiens; identical to SEQ ID NO: 30536
  chr7:157352977-157353114
  hypo

SEQ ID NO: 33060 - DNA, 592 bp, Homo sapiens
  chr7:157370313-157370905
  hypo
cggaccccacttaaaggcttgttatatgggaccgggaccacgctgtgaggcgaatgttttttctactctgttatcatttggatttagaaaaatctaaaagataaaaaccacaccacactcccagggtctggttcatgagcacacagccgtgtgaaccatccacacgggcatgcggccctcgggggtgactcagcctccgtcccctgaacatggggtgcgctgagcctccctgcatgcggccctcgggggtggctcagcctccatcccctgaacatggggtgcgctgagcctccctgcatgcggccctggggggccctaacgaatcccattcggaggaggagcagggcccgtcctcgtccggctggtgggtcctgccctgggtggctctggtcggagtacctcatagatgtggtagagattggagccttcatccggccagtagtggtagcactgccggacgccgttctccgcgaggggtgtcagcatgacgatcaccacgcagccgctctcccacaccatctgcggacaaagaaggcccgtggccgcggtgtgactgtctcatcaccgcgtgacatgtgtaattactgcactc

SEQ ID NO: 33061 - DNA, 267 bp, Homo sapiens; identical to SEQ ID NO: 15210
  chr7:157446450-157446717
  hypo

SEQ ID NO: 33062 - DNA, 203 bp, Homo sapiens; identical to SEQ ID NO: 8687
  chr7:157642963-157643166
  hypo

SEQ ID NO: 33063 - DNA, 279 bp, Homo sapiens
  chr7:157659219-157659498
  hypo
cgcatgtgcctctcagcccttgccatgacaaccatgaggtctgcaggaaacacgtccatagaggtggagctgaggctggtgtgcattctcccaggcacccagcatgagtgcccagctcagggtctgcaccgaggctgtctggcccgagtcccaggctcgccccagtgcttgccacacacaccctggggtctcctcagaagcagtgcctgtgccccgagatgcacggccaccaccccgcccctgaggccctggatacacggccactaccccgcccccgac

SEQ ID NO: 33064 - DNA, 273 bp, Homo sapiens; identical to SEQ ID NO: 12947
  chr7:157738113-157738386
  hypo

SEQ ID NO: 33065 - DNA, 145 bp, Homo sapiens; identical to SEQ ID NO: 12948
  chr7:157744287-157744432
  hypo

SEQ ID NO: 33066 - DNA, 234 bp, Homo sapiens; identical to SEQ ID NO: 12953
  chr7:157929571-157929805
  hypo

SEQ ID NO: 33067 - DNA, 748 bp, Homo sapiens; identical to SEQ ID NO: 24614
  chr7:19147137-19147885
  hyper

SEQ ID NO: 33068 - DNA, 350 bp, Homo sapiens
  chr7:20836794-20837144
  hyper
cgatgctgattgacttttgaaaggcctggcacgtcccagtctatataataactcagttggaggaagaacctcgaggaccgagtgtctccagatcacttaatgcatcggcatccaccacgctcggctcatgggcagggcccccgaggctgccaccaacccacggagccttgaggagctgcgcttccccgcgatggtccaacgaacttcggaagtgctcctgcttccggtttcacgtatacctgggatgcgttgccatacaggtttgtcccgttttaatgctttgacccatctaagatacgaggacaggagactggagaagtaaacgaaaggcaatggccgaggggtaaggc

SEQ ID NO: 33069 - DNA, 1258 bp, Homo sapiens; identical to SEQ ID NO: 25861
  chr7:22893437-22894695
  binary

SEQ ID NO: 33070 - DNA, 1363 bp, Homo sapiens
  chr7:23507580-23508943
  binary
cgtttacgcacgcgttccaatacccctggcgagctcacagggcagaggcaaattcctctccactcggccgcgcccacggcctcccaaccccggacagagaaggaaaggagggacccccgcgtgtccgcagctgctttcgcctctcctgctcctggaggggtgggggaatcatccgctgcttcccaagccctgcaaaccccccaaactgcttgttgggacccatttcccgtaggagcaatttgacccgctcggaccgaggacattcagctgtgagctttcgagagattttgtaaccaataaccataatcccgcggcagaggccacagaaaagctttcaattcctgcccagcatcatcaacacacacacccccgccataaacttaaaagcaaggattaaagaccggaacaccacgccacacggcagggggtaagcaccagaggacaagaagttctcagctgagtctctccacccaataacggagtgagaacagaatcggggcaaacagaagcagcagctcacctttgcctttttgggaccgagtgctcaacttctatgggtttcccgtgcagttctattttacctgcggacacacaagaagtgagacggtcggccgagttcagcggctctccctgcccgaagacccgcacagcccaagcggcgacacaaatggcctcctgaggccctcgaagggcccccgaggcccggacgcggctccaggcggagggagaagccgaccccctcgagcggcgtgggcatttaactcgcagatggttggggagcagggtccgctggcgggcccactacttgggtatcagtccagtctccaagcctcccccacccacccctgggggccaccaacaccacgaggcccgcaagagggacgcggcccaccctctcaccgccctggacacgctccacagggcagactcggggcagggggctcccctggctttcttcaggagggggcgccctggccctgccctctgcttcagcccagacccgccgggaacactcagcggtgggcttgaggaagacagggagtggcgagaaagggtcggggacggcaggggagaccacgaacgggagaactggcagaggcgcagctcggcacaggctgaaccaggcgcgaaggacggcgaggcgcccgcaccacgtctgaattgattaaaagggaagccgaaaggcacggggctcccatggggaccccaacgcagccttccccctgggcgtcctgctccgcccggcaccgtccctcgccctggcggagccatacccggaggccgcagccccgcgccagggcccggagagcggcgggcggccggtgcgtggcggcgactcccttccaggcgaccagccgccccc

SEQ ID NO: 33071 - DNA, 770 bp, Homo sapiens
  chr7:23513246-23514016
  binary
cgcccggcttgggaccagcctggagtctcaagccgaaacccctcacgcgggtgggcacacaatgcccggcgtgtcgcctgggcctcctcggaggtgctttaacaggctcttgcgcttttgaacggccctcctggactctgatctgtttaaactagaggcgttaataagtgataacctggatctgccctccttggaagctgcctgcctatattttattgtttaaaataaataaaaatggtgccccgggagagaagatggggttgtttcctttttcctctggctctgccccgagaaagagggcgggatcctcacggctcacagtggggagggtctttcgtcggccgccggctcgcctcggagggcctggaccactggaccgcccttccccggggccctgccgcgggaccgcgggcttctggctcctcctggggctgcgtccgtatgcgcggagcgtgtggccgggccgtcgccgcgccaccccacctgagtccgccggccagcgcggggacgcaccgggcagcgtgtgtttggcgaccctcccgcacctctggtctcagttgcgtgtgtgcacgaggggttccatagggcccagggatgcttggtacccacgggggagaatccctcgccgaaccctgcgggtctgcggggcgggccgcgagactggcgcgcaaaagcggctccaaggcggggctcccgcgctccccggggccggcttgccgagtccaagttgagcaaccggcgtcgagagagacaccgcccctgctgcgggc

SEQ ID NO: 33072 - DNA, 221 bp, Homo sapiens; identical to SEQ ID NO: 15221
  chr7:23570157-23570378
  binary

SEQ ID NO: 33073 - DNA, 285 bp, Homo sapiens; identical to SEQ ID NO: 15222
  chr7:23570662-23570947
  hyper

SEQ ID NO: 33074 - DNA, 901 bp, Homo sapiens
  chr7:25989912-25990813
  binary
cgaaccctcacctccctcggtagttatttaaacttttgccagcagctaactcactctaacttgtggcaactttttaccttcccatctggaaagctgggggcgggggcgctgcacgaggacgaatattcggagctgaaagagttaaacggtggggaacaaatacaggcccgggaaaagcccctaagatgggacgacccaagaaagacccgctttgcggggcctcccctgagacccccttccccagccattcccagtactctattcccggtcttccagccgcccgcgcccagccccgggaactcgggtcgaagtcgtcccatcccctccgttccacccacccactctttgggattctccctgccccattaggcagtgcttcccgcggaccccgttcgcgcacaaccttgcacacagtccccaagactgctcttctccccctcccggcacccccttttccctgcagcataagcgaccactctgtcccccatcctagcagaccccctccccccacataccgcacctgaacagctgttgcgcgcgtgcaacaggtctggaaagtgctttcccatcttcccccaaacccctcgccaccgttccatcccccgccacccctaagagacaaggccggaggggcagtgggctgcgtcccccgggccggggtgcacgggcggctggcggagtgcggggcgcccagaggctcccggggttgggggcggtggtcgcgctgggccgggacaccttcgcgagtggcccctcgtgcgcccgccgcaggctccccagcctgcccctccagcgccggccgccaggcattcccgggccggctcccccctcgcgctccgctccgctcccttccatcttgacttttgccgacgtggaaattttgggtttggagacgacctgc

SEQ ID NO: 33075 - DNA, 444 bp, Homo sapiens; identical to SEQ ID NO: 25871
  chr7:26192423-26192867
  hyper

SEQ ID NO: 33076 - DNA, 812 bp, Homo sapiens
  chr7:26415746-26416558
  hyper
cggtggcgctcccgcggctgcaccctcggccgcctgttggttgcggcgcctccgcggcccgcgcgcatcccccgcgctgcgtcccgcacacgcgcgctcccgccgcgtcccgcccgggccgctccgctggcggcggcgactgggctgcaggtagcgagccagccggcctcggtccggtaacccatggcaaccgccctggtaacccatggcaactgcgcggcggaaagaaaaaaaagaaccgtggtggggcggggggcggcgggcggtgaatgggaacaacgaccgcaaagagacagcgatttaccgcgcgggcctgcggctcccggccgcacctgctgcagacggcccgcgaggccccttcccgcgctacggtgacgattctggctgctggggaaaagagcaataagcagaaagccctcgtgcagaggggatccgggcggtgcacttggtgtgggaggctgccttaaacgccgatgaccctcccggcctccgcgtgtcccggcttccagggccccgccaggctggagagcgcgcgtggagagggccttgccgcctgggggttggttgaggggcggccgcgccggggccggggctggactccaggctttgttctgcagacgctcgcgcccggccggaggaggggctacaccgtgctgccccggccccatggggcccggcccccgagggtccccgcgagcggacgcggtggggccgggcaaactctacgtgccctaaattttgtcatctgcacacgcatcgcacacattagttaacccctttcccttctaggcccccgagaacctaacctgccc

SEQ ID NO: 33077 - DNA, 791 bp, Homo sapiens; identical to SEQ ID NO: 25874
  chr7:27190485-27191276
  hyper

SEQ ID NO: 33078 - DNA, 941 bp, Homo sapiens; identical to SEQ ID NO: 24623
  chr7:27195477-27196418
  hyper

SEQ ID NO: 33079 - DNA, 833 bp, Homo sapiens; identical to SEQ ID NO: 24625
  chr7:27205279-27206112
  hyper

SEQ ID NO: 33080 - DNA, 1264 bp, Homo sapiens
  chr7:27213131-27214395
  binary
cgggccgcatcggccgagccggaggctagcgcgggcgggagatcgaaaccgcgccccgggggctgcgcggggaacgggccagccccgagttgctgcgcgccgccgccgccgctgccatagcccttggcggtgccgtaggcctgagaaaggcggaagtagccaggcactggcaccccgctggaggtgcccagggcgcagccgtcgggcggcgggccccgcgggaagggagccagttcggcggcggtggccgagactttggggcatttgtccgccgagtcgtagaggcagtaggagctctcttctttgatgttctgcgcgaaagagcacgaggtggcctgcggcgctggctggggtggttgcggcgggggcggcggctgctgctggggcggcggcggcggcccgtcaggcggctccatccggcaagaccggggcgcgtctagccacaggtctatgggcgagggcccgtagccgtgcgccccgggacctagacccccgccaccgccaccgctgcccggcgacgctgcctcattgcgcttgccgcccagcgtggggaagagcccgcagctctgcagcccgtagggcaggtcggcggcgggcggcaggtagaccccgccgtgggcgtagtaaccgccaccgccgccgccccccgcgccaccaccaccgccgcctgcctcgcctctgcccgagctgatgagcgagtcgaccaaaaaagagttcgcggcggggctctccgagcatgacattgttgtgggataatttggcgaagggagcagatagccctttctggctgacatttcttgtgcaaaacatgctgaatacgattagcaatccccccgcaccgcggcgggcgcccgcagccaatcccgagccagagtttccgcgcgaccactcccagtttggtttcgtaggcgcggggccgctctccgagggcgccctcagagcccgcgattgatataaatatgtaatctgtattgatgggccaggagacgcaccccgacaccttggcccgaaggccgggagctgtgggggctgccccaacgtggctggtggggggcctggccattgggctcgccccgcccctacccggacgtgagccccataccggggtcccttagaagggcccttgggccccgcgcagttaacaagtggggtgtttatggtgcgcgcccagtctgccttgggtgctcaccatccctgtcgcagaagctgccactagtccccggtgtactctaaccactgaagcggccgtgtcggggactcacgc

SEQ ID NO: 33081 - DNA, 514 bp, Homo sapiens; identical to SEQ ID NO: 25875
  chr7:27219316-27219830
  hyper

SEQ ID NO: 33082 - DNA, 941 bp, Homo sapiens; identical to SEQ ID NO: 24627
  chr7:27232216-27233157
  hyper

SEQ ID NO: 33083 - DNA, 912 bp, Homo sapiens
  chr7:27238522-27239434
  hyper
cggggcgcagagggagagggaagctagccgaggtctccacaagccacccctcacccagggagagccagggaccagctcaactcgaggcagtgcaggcagacccagccagccatgctcgggctcccaggggtgcagagccgctagggcagaccaggaagagaacagaaacgcacccgggatcgcccgggtgcgagcggagaagaagctggagcagagccggaagaccagggctgggaataggtcgtcatttaccgggcagagtggacttccagaggtggggaggctgcgcctgctctttggggcagtacatttggccgttccagccgttgggcagcgcccagggctggtagctttccatgggaagacccaagggttcgtggcgcgactcgccggggcccccgaggcccggcaccactggcatatccaggtagccaggcatgggctgatggtggtggtaaggcccggctgcgtagccctggtggtagaaggcgaactccttagcgcgggagctgaactcctcggcagctgggccggcggtatccatgtacttgtccgcgaaggcggcggcggcggcggccgaggcgggctgcgcgcacgacttgatggcgttggggtgcgggcccatgcgggcgcacgggtagtagccgctgccgaagtagccatagggcagcgccgcgggccccgacgagctctgcgccgctgccgagcaggggctgcattgcttggcggcctctgcgcccgccgggcccgccgggccgggacctcccgaggacgacgcggcggcggcggcggcggctgcagcggcagccgcggcagcagcggcggcagccgacgggggcgcctccccgggggcgctgctgtaggcggacgcggctcctggcgccaagggcgccgggtgcgccatcaggttgc

SEQ ID NO: 33084 - DNA, 413 bp, Homo sapiens
  chr7:27250081-27250494
  hyper
cgctgtgggcggcggcggaggatgctcgcaggacaccgctgcagttgcgacctcttcccactagatgtcttcccagttaatcggaactcaagggcgctgtctctgctcctcgggccgagactcggtttcccctgccgctttttgaagtctagcattcctctgtgaaagctggcttttccctttttttcctatactccccttcccgccctgcgctctaaatcctggctctggaaatccaccagaatcaaatgctggctccctgcgggcccgcgtcggagcggctcacgccattggaatctttttatgacctttgatgtgtttaaataacatggcaagtctgagcacacacctcggattaaactttaatcggctgcagtcaaggtcgcccaggtggtaaaagcgtttcctccgac

SEQ ID NO: 33085 - DNA, 984 bp, Homo sapiens; identical to SEQ ID NO: 30593
  chr7:27264586-27265570
  hyper

SEQ ID NO: 33086 - DNA, 2075 bp, Homo sapiens
  chr7:29602717-29604792
  hyper
cggttcacttcctgcagtggctcagggctggatttacactgccctcgttgggtggctgtccatggacttccaggcctgaaagaaggaaattcacatcctcactgagtcgtgttaagagtctcagactggcaggttgtggtggttaagaccgtagaagctagagtcaggccccctgggttccaaccctgctctgccacgtaccagacaggcaaacctgagcaaccattttcccgtgctagggtttcctcgcctgtcgagtgagaataataataataacaatacctacctcctagggttgctgtgagaaataaatgacaatccacagaaagcgcctgcaacggcgcctggctggcaaacagcggacttgttaattacagcctttcaactaagggcgcctgaaactcgcaaacattttgctcgggtgtggattcgctcccgttagttacaaacttgggatcccgggacccggaaagcaagggggaaaaataaatcgcgatggggccaagggacagctgctgcggcaacttttacccagcggagcccacctacagcctcagcctccgggtctcaggtctccgccgtttcttctcaaggagtcggtcgggggagcggcactgcacagcttttctccaatcagacacctcaaggctggcgcctgatccaatctcctcccctggagggtgggaacgcgaagttcctacctgcacctgtggcagcggtgaccgcctcctgggttattttcttttctcccccagctgccccagggttctggtttcccgaatcacttggcaaataaccagcaggtgggcagatgtcttttttgcgttcctacggacgcgtaggcaagttcgatgcgccggagtgaacagccagggtcccatctctcagccggctcccgggcggtgctagcagggaagagggacgcgccggcgaatgaaacactactagcccggaaagccgccctggaccttccacccgggcagcgagtctggcggcccctcgccgccgccccctccgaccagaacagactgcgctgcgagccccgggcttccgccgcagcgcgcagcaattggaggtgccagaggagaccagcagcagcacttgatttagctgggctgcgggaattccgacctgtacactttccagaagcctgatctctccaagtccgcgcccagggactcgagccccggcttccaggttgacccgagcgcgcccccttcgtgctctcggccgcgttcaccgcgcgaggcctccgggtcctgttaagcccgagcaggtgagcgactgggggtggttcggcgtccgccgagacagagcctggccccgggggtcaccctggggtgctgcctggtacctcccaggtacccgcctcccggagccctaagagaggctgaaaaccacggacgctccaggactccgttttctgtacttttgagtaatttgccatcttttccttgcgcaattcgtacaaagcccttccgtgctcacaaagttgatgattgtgaagaagaaaatgtaggttagaggagaggaagcagcatcaggacaccttaccaccactgttagtaaatgacttgggggtacgggttgcttttccgatctgcaaagtaggagggaatgggatgtttgcagacgcagttgctaattgtgcctgagggcgtgggtgccttttgtaccgaaagaacttttggccgttttttcttgtattgttttcaagtcgctgcccgagtgtgtcctcagggcatcctggggaggagccggtgttgcggtttcggggcgcagccgaggccgccccgccgcctcccgtaggcgatcagacttcctctccctggcggttccgggaggagaacctcctacaacaaacaccgccgaagtttccctctccagcgcgatcgccaatcccaggagcgcccggcgcgtgggctgggaaggagccgagcggaaacctggaagtgagccgcggcgcaggcgaatcctgccgttgctggtggcagcgcccaagagaccccgcacagaaagtgggctgggagtctcgcttgctgtacccgcacctaagtgctcagaagcggcctttc

SEQ ID NO: 33087 - DNA, 208 bp, Homo sapiens; identical to SEQ ID NO: 25883
  chr7:30603338-30603546
  hypo

SEQ ID NO: 33088 - DNA, 249 bp, Homo sapiens; identical to SEQ ID NO: 15234
  chr7:373783-374032
  hypo

SEQ ID NO: 33089 - DNA, 415 bp, Homo sapiens; identical to SEQ ID NO: 32206
  chr7:42267546-42267961
  hyper

SEQ ID NO: 33090 - DNA, 848 bp, Homo sapiens; identical to SEQ ID NO: 23361
  chr7:42927739-42928587
  hyper

SEQ ID NO: 33091 - DNA, 873 bp, Homo sapiens
  chr7:45959983-45960856
  hyper
cgtgtgcacccccgtgcggggcgaggagaatctcctgtgtccaggatctttccaacagctaaacatcggtaccgctcccctcagctccggaaacctttaacccattttcactgaaagcgctttgcaatttacaagtactctgcacttagagaatcgagcaagtagagggccggctggggagggtccctccggcgaccgccttcacctttcccggagcgccttcagtttccccacatattatctccagtgagaagaaaagcggagtctcccgcagcggcacccagcaacccccaggcccttcggcgccagtgcgccgggtgctgcacgcagcgcacctggcgcgggcggctcacctggagctggcggcgctggcagcaggtaggcgcgcaggcggctgacggcactagcgttgacgcagagcccgcggccgtccagcagcgcctgcagcggtcgcgcctcgtcgggcgacggctggcagcgaaggccggagccacagcgctcggtgtagatgccgcacggctggccctcgctcagtgcgcacgtcaggcagcagccgcagcccggctcgcgcaccagctccgcgcacacggcgggcggaggcgcgcactgggccagtgcacgcgcgtcgcacggctcgcagcgcaccacgggacccaagcccgccgagctcgcgccagcccgcgccaccggcggcccgcggagcagcaccagcagagtcagcgcagcggcccagagcgtgggtcgcgcccgctgcatgacgcctgcaaccggggcacgctgcttggcaggctgggcgcgcagggatggggcgacagtacacggcgcgaagctgtggaatccaggcaggaagcggctgatcctcagcgcccagcc

SEQ ID NO: 33092 - DNA, 111 bp, Homo sapiens; identical to SEQ ID NO: 30608
  chr7:50441160-50441271
  hypo

SEQ ID NO: 33093 - DNA, 883 bp, Homo sapiens
  chr7:51383335-51384218
  hyper
cggcgcgccgcgctgaaaactacaaagtccaccgggactgcgcgctaccccgcggcccagcctgcaccgctggccgggatgagcacggcgcacctggctcggggtctgaataatgagcagggctgctcgtcctgtttgagggaaattactctttctgagagtcaaatcctgaatgtgacgtgtaatccctgcacgcaaggtgtggggatagcaaacagaaaccgggagaggtttgggcaaaagcggaatcgcgaagacagggatgggccgccagactcgcgggtccgctacggatgtctgcgcctcaggcctggccccactaggacgccccttccactgccaggggagaccctggaataaaggcagggagggagagctgctgccatgaaaccctccgggcaatccgaacaccttccgagaacgcggggcccgggcggctgcgaagccggggagccctcccctccacgctgccgggagagccgatcctggggctgccgccgaggccgggagagggaagacttgatgggaaccggccaggggcaagcccgcagggaagaggccggagtcaaaggccgggcgtcccctcgctccccgctccacccctacggcaaacacttggggggcctgaggaaagctcggagctgagtgggggctgtgctggcggggacccccataaggacgcctgcatacaaaccaccccgcgcgaaaagtgcgctccggccccggcccgacacggttacctgggcaacgacccgggtgcccaaagtacacagcacgcaccaccacccaacaccagcacccaacaccagcaccgcaccacctgctccaccactaccaccagcacccgctggggcggcagagagggcgccctgcccgggagcgc

SEQ ID NO: 33094 - DNA, 925 bp, Homo sapiens
  chr7:5458503-5459428
  hyper
cgggcttggctctgggcgttggcctggggtccgaggtctccttgcggctactcgaagtgggggagggggacagccagaaccagcaccggcccccacctttccctcccgggtgagcacggggttcaagggggcggcagctgtcctcctgctgtttcctccccgacctcagcctcggcgtgcagaagtcaggcagctcccagcgagcgcagaaggtgcgcagaggcagggctccgaggctacctcccgctgggcttccgaggctggtggcttggccttccctccacctcagcctcaccatccagcaaatgggcattaggccgtctgactgctgcgtcagattaggcgcggccctggcactgtgcatgcatgcatgagtagtagcttgttttcaccgcttcgcattagggcactttgccttgccaggccggagccagatcgcaggcggggagtgcgcgacgccccttcccagcctcgaaaaagccaagcgcaggcccagccagccagagagacccgggtaccgattcccaggcttggggggggcccccctgccaccactccgggctggaccaaatgacccaaaagacacacgcatgcacacacacacacatcacggtggacttgtggggagcgcaaaaggggacagctcagatggtctctgtaccccagggccgccccccaagttcttcctcgggggtcccccgcgcccctccctcgccacaacacgccactagagaacaaacccttgccccggtcacagaccccgggcggaatacgcccccagctccggagggacacaagcaggtccgggggccaagacctggttcttgcgccccggctggcggggatctccgagctcccggcccccgggcgcgcgcccctcccccgcccggcgcctcacaaaggccctttgtcccgccgagccccc

SEQ ID NO: 33095 - DNA, 1413 bp, Homo sapiens
  chr7:5466599-5468012
  hyper
cgccctccccagtatggcgggccacattgaaatgtaaaaaccaggcctgggcgctgtggccatagggcacaggccataggccaccaggtccagccgccatcttccgcgccccacccccattccatcccctccccctccccaccccctcatacttttgtttacccagcgggataggtggccaaaaactgtggacgcaattgagtgaaagtgcgtgtgtgtgtgtgtgtgtgtgtgtgtgcgcgcgcgcgcgcgcgtgtctgtgtgtgtgtgtgtttgactgggtagaaaatcggctgggggctgggggggtcttccttgtagccctaagccgcagctgcgggagaagctgccctggctagccgaggcccggcccagcgtgcttctccgcggccagcctgggccaccggagccgaggccttccctgtgttcctaggccgctggctccggcctccgctccctggacgcctcccgactgacaaaattctccgtctttgttttaaaaccaaaggacaggccaaccttgagcccggccgtcacccctgtcgcgcttttgttggcgcaggctcggccccctacaccgggctggtgcagctcccgcgatcagacggtctctctcaattcggcgttgaacccggttcttcccaaattctggtattgctggccgcttggacacgttctccccttatccctcccccagcggggaaagaaaaagccaggatcctttccttggcgcggccacccgagccactccacccgtcgcgccaaccgcctttccaggtggggaccaaagcccccactctccgctggcatctcattgaagggcacccccccgagggattgccagcttctgctgccagctgagaggccgtgtggctgggcgtcttaagcgccggtttccgcaggtcccgtgtctggcgggcgcggctaaaacccggagaggctgtgcccgggaaagccacgttcgccgtcccctcgctgcgacaggcccagccgcgatacagcgccaagtctaggtcgggccaacccagccaggagctgcccggacctgcctgaaagaccagggacgcggcgccagcgccccacaccccaccgagaccagggcgcaaggcgggcagaattcggactgatgcgccaggcccagccccgatggattccagctcctctcggccccgcctccggccctggcctcttcctccagccggggtcgggtcctccactccactgtttggctgggaaaggaccgagacgcgctcagtgcacagggggccggctgcggccataaatctccgggcgggccctccttcccgctgctcacgccggggtgctccgggccggtctcgtgtcccgggccacgccgcgcaccctgctcaccccatcacggcctggggacccggagactgcgcagggaaccac

SEQ ID NO: 33096 - DNA, 750 bp, Homo sapiens
  chr7:55087310-55088060
  hyper
cggccgccgggacctccggcgccccgaaccgctcccaactttcttccctcactttccccgcccagctgcgcaggatcggcgtcagtgggcgaaagccgggtgctggtgggcgcctggggccggggtcccgcacgtgcgccccgcgctgtcttcccagggcgcgacggggtcctggcgcgcacccgaggggcgggcgctgcccacccgccgagactgcactgtttagggaagctgaggaaggaacccaaaaatacagcctcccctcggaccccgcgggacaggcggctttctgagaggacctccccgcctccgccctccgcgcaggtctcaaactgaagccggcgcccgccagcctggccccggcccctctccaggtccccgcgatcctcgttccccagtgtggagtcgcagcctcgacctgggagctgggagaactcgtctaccaccacctgcggctcccggggaggggtggtgctggcggcggttagtttcctcgttggcaaaaggcaggtggggtccgacccgccccttgggcgcagaccccggccgctcgcctcgcccggtgcgccctcgtcttgcctatccaagagtgccccccacctcccggggaccccagctccctcctgggcgcccgcgccgaaagccccaggctctccttcgatggccgcctcgcggagacgtccgggtctgctccacctgcagcccttcggtcgcgcctgggcttcgcggtggagcgggacgcggctgtcc

SEQ ID NO: 33097 - DNA, 158 bp, Homo sapiens; identical to SEQ ID NO: 15246
  chr7:55571348-55571506
  hypo

SEQ ID NO: 33098 - DNA, 392 bp, Homo sapiens; identical to SEQ ID NO: 15247
  chr7:55640395-55640787
  hyper

SEQ ID NO: 33099 - DNA, 56 bp, Homo sapiens; identical to SEQ ID NO: 15248
  chr7:56075649-56075705
  hypo

SEQ ID NO: 33100 - DNA, 674 bp, Homo sapiens
  chr7:65508919-65509593
  hyper
cgtctctcctccacctactttcagggcggacagactcaggcctttacagcctgctaagtcccgggtcggataccaggctgggctccacccccgcactgtgacccagaaacgctggtaaatgaatgagagaaggagggggcacattgaaaggcagccggacacggaggtgctcggccccgcaccccagacacaggttgtggaggttcggaggggcttgagtcccgttcgtccctgtccctatcccggggccctcccggacagggccagccagccccctgccctcacttccgtacgagggtcgcccagtccccacggctctcggctctcagaggtccaactgttaggctcctcgcgtaccaaaagggacgcgtccagactagagtctggacttccatgaggtccagactcgtcgcctctggctgccagcagacaaggaacttcacactctacagctctccccaccgtcgccaacagcgccaaagtgccagctccgcacgccaaggtgcaagccaggagcgccgcgcttcatgccgggagcttggcggactcggaacctcgcgccgcaggttctcctttctcgggggtgggggtgttggggggggtgggggcgtgttcctgtatccttcgcccaggccgacttcagactgctgagcgtttgcggacaggattatctc

SEQ ID NO: 33101 - DNA, 427 bp, Homo sapiens
  chr7:83277846-83278273
  hyper
cgcggatgccatgctgccgtgttcaccgtccaagccctcgctcctcactttaaggagggtctgagttttacttaggacttccctccaggggcagcgtgcgagaggctttgtcagaaatcgaacgcgttgtcatcagaaagcacagttccgaagtgccatttgtcaggctgtatttggctatgtaaaacctttctttcctcgggacagttgtttataagccgggagcaagaggacattccaaagagtgagtcttcagagccatgtcctgtctagagcgctcttcagcaactacgccggtagattcaggaagaagctgtatttttcagtcacttgggcaaagctgttcattcagaaaaaaaaaaaaaaaagagagaaaaaaacaaaaccgagcacacgcactcccttctcccgtggaggtcctctcttc

SEQ ID NO: 33102 - DNA, 400 bp, Homo sapiens
  chr7:87936014-87936414
  hyper
cgatgggctggggagtggggtcctagcagcagggactggaggtgagctgaagcagataagggacgggagccttgtggcgaaaagtgacccacctgagggagaggcgcttccaaggaggaagcgtccagcgccaacggtgcgcgccgcgggccgggcgggtagagggaagtttcgccgcgcctgcagctcagcgctgtggcttgtggctctcgctgctataagaagccagagaagggcgggacggtctgctggatttcgcaagagaagcggaaaagaacttgtttcctggaagagttcaagctgagaatcccagcagctggaaggaccggaacttctatactgcggtgctgctgatggtgccgctgacccccgggaagcggggattttaagggttacaccc

SEQ ID NO: 33103 - DNA, 471 bp, Homo sapiens
  chr7:95225837-95226308
  hyper
cgccgccgcccgaggttttatttgtctccccgcactctccccccgagtcccaaacaggaggagtcactggaacttggaaacgcgtcctgaactccaggtcgcgccaatcagatcagagaaagaactatgggctccgcccctccagccgcggtcatcacagaatggcctggcacggtgaccacggagtgccctggcaccggtgcccgcggctgtgacggaaaaagggtgggaagaacagggaagaggaagcagaaacaggtatctggggcaacgtgggcttaagattagcctcttgggacggggctccgagtcgcgtgggctggggtcccgcccaggctcgcccttgtttacaactcggaggctgtctcaatgtcaagtactcctggccacaaactgtttccaagagtttggactccgcgtgctcattggtccttgctcagagcagggcttttacagtagccaacaagctgc

SEQ ID NO: 33104 - DNA, 216 bp, Homo sapiens; identical to SEQ ID NO: 15256
  chr7:98955444-98955660
  hypo

SEQ ID NO: 33105 - DNA, 215 bp, Homo sapiens; identical to SEQ ID NO: 15257
  chr7:99084631-99084846
  hypo

SEQ ID NO: 33106 - DNA, 154 bp, Homo sapiens; identical to SEQ ID NO: 15258
  chr7:99680237-99680391
  hyper

SEQ ID NO: 33107 - DNA, 457 bp, Homo sapiens
  chr8:101661596-101662053
  hyper
cgtccctggtgagccgagggataagtgagcattgccaccggccccctccctgcccaccctgaccccagccctgggcgcaccacgtagcggccccccagcgcgtcggaccgctgctgggacaccgggatacagaaatgcatcttcatggctgagcggtgtcttgggagtagcgctgggaacccgacctgcggcggcgggcggtgcgcggctctgaactcggcagcggtggacgcagcgcggcctgccacgcgactcagagcgaaccccggcgcccgctctcgccggccggggacatctacaggtggggccggggccgggccgcgccgcctcccagtccccgccccatccagccccgccgctctggtcccgggataggtggcgcctggggctggggcgcatccacggccacccccaccccggacatcggccactgttggcattttctccaagaaggccc

SEQ ID NO: 33108 - DNA, 342 bp, Homo sapiens
  chr8:102092936-102093278
  hyper
cgggaggcttccctgcccgcctcggcctcgcttacaccgcaggtgctgtgagtcacccacctgcgtggtgagtcaggggaggaggccgagaaggcaggtgggcggcgcggcagggcgccgggcttcgcggggaggggagcgctgtctccccacgcgcccctcccccacgagcggcttccagaaacccgtttgcccatccccggcaggaggcctccgcccggcttctcgctccctcttccctctccccgaccccctcccgggctgtcagccgactgccaccgtcaccatggctacgcggctcccgctcagttccacagtcagcaggagtcgagcaggggaggc

SEQ ID NO: 33109 - DNA, 284 bp, Homo sapiens; identical to SEQ ID NO: 15263
  chr8:110552612-110552896
  hyper

SEQ ID NO: 33110 - DNA, 885 bp, Homo sapiens; identical to SEQ ID NO: 29437
  chr8:121136702-121137587
  hyper

SEQ ID NO: 33111 - DNA, 107 bp, Homo sapiens; identical to SEQ ID NO: 8747
  chr8:128957492-128957599
  hypo

SEQ ID NO: 33112 - DNA, 804 bp, Homo sapiens; identical to SEQ ID NO: 25920
  chr8:142427489-142428293
  binary

SEQ ID NO: 33113 - DNA, 218 bp, Homo sapiens; identical to SEQ ID NO: 25923
  chr8:143993982-143994200
  hypo

SEQ ID NO: 33114 - DNA, 945 bp, Homo sapiens; identical to SEQ ID NO: 24676
  chr8:145697806-145698751
  binary

SEQ ID NO: 33115 - DNA, 1070 bp, Homo sapiens; identical to SEQ ID NO: 15269
  chr8:18870226-18871296
  binary

SEQ ID NO: 33116 - DNA, 520 bp, Homo sapiens
  chr8:18871439-18871959
  hyper
cggggcctccgggggaggctggaggcgatccagaccctcgcagtgcagccctcgagcggcccggaccgtccgctgcctcccgcagccgcgcgcccgccctgggcccagcctccagcccgcgagcgaaaacctgcctgttgctttgtcttcttccttcacagttttcccaccctgagaaaagtgagaggtgctttccctggtgtttcctctcaggaagggccgtgtgactggagccgcgagttgggcgccgtctcgccggggctggaggtacgcgggcttcgggacacgcacctaggcgtccctcggggtcccggcctctctgaccgggctcccccggcaccgatccgcggccggagcgtttagtcccggggacccgtcgagccctgaaagggccatttccccctgaggcgagtccccccaggcgccccgcagcctggcctcgggactgcccccaccgacagtgcgtgcgcggggagaggtcacttaaaactgcattttcgaacattagtgccccggaccc

SEQ ID NO: 33117 - DNA, 998 bp, Homo sapiens; identical to SEQ ID NO: 15271
  chr8:19171057-19172055
  hyper

SEQ ID NO: 33118 - DNA, 837 bp, Homo sapiens
  chr8:21881708-21882545
  hyper
cgctgcggctctccgcgggagatctcaccgttctggagacagggctcgctcgctctcacggtaggctggaagaacgggctgtctgggccttaggaaaggcccatgctgtataaggcatggggaaaggaaaggaagaaaggcaacgaacaagaaggagggcttccaactgcagcttcctgccggctgcaggcctcccttcctaagctgagctgaggcttcctctccatgggctggggagggggcgccaggaggcctcggcgggtccgcaattggccgggacagcttctcacgaaaggtcctgggccggcatcatcagcctcacctgggaactggttagaactacaaattccctcggccccacccagaccgacgccaagggcagctgtggagtggggcgcggcaatgcgccccttaacagccctccaggtgattctgccgcgcagaggaggaaagaatgggagaagggaaggggagagggaggcggcttctttgcgactaattggacacctgcccttccccttcccaggcttcttagcccgggcttggacagccgccttccggccagaggggatgaggttgcgctgcgctccgggagcgccgatggcgtgactggccccgcgcggagcagcgacagtaaggctgtgtggggggagctgggacctaagccgcgcgcacacccctttctctgcgtctggtggaggtgcacagaggcttttgagtcaggcccaagcgcagccaggtgacctccccgcggcctttcaagcctgagctcggtggacagctccctctcccgtgagtcccgctgtcctgtacgcgcccggtcgagccccgggctgc

SEQ ID NO: 33119 - DNA, 271 bp, Homo sapiens
  chr8:22722238-22722509
  hyper
cggcagagctcaggaaagggcggaaggggtgagaaaataggtagccagaggtggaagtagctgaccaagtcctagcgggtagtacgcaccacagtaaaacaccacgggggccgctgggcaccgccgagcgccaggctggtgaactgacccgcagcgcaccccatctgtgtgggaaggtcggggcaggggacccagggcgggatggcggtgctggaccccgatgaggccccttcacggccactagggggcaggagtgcggggcgggcagcac

SEQ ID NO: 33120 - DNA, 794 bp, Homo sapiens; identical to SEQ ID NO: 25930
  chr8:23020923-23021717
  binary

SEQ ID NO: 33121 - DNA, 330 bp, Homo sapiens
  chr8:23082568-23082898
  hyper
cgccatcctgccaggtcaatccaagaagcagcgtgcttggctatgacaagacagaacttcgcattcggagttcagggcacccctgaccccgcccccttttcggggcacctgcggctcctgttggctaaccctgaacttccttcctctgtgaccgcccttgccgctctcagcttctgttcctcaaccacggccgccgcgtggatgccgctgcattcggagtcgttttgccacttggtcccagcgccaggcttctcggtcgggagttgacctcagcctttctgtgacccagttcctggcacccagcaggcgctcggtggacggatgggtggc

SEQ ID NO: 33122 - DNA, 1161 bp, Homo sapiens
  chr8:38323132-38324293
  hyper
cggcaaagacggccggcaatagcagaggctgctgaacctcggtcaccgagaggaaggtggatgacccgggcgtgggggtgattacccagaccaaggcgcgtcccacggggccctgctacttcgcttttaaacaagcctcagggaggaaaccgggagcccgggccaagggaggaaaatggccactttctgctaaacagtctcaaggctagatagtattccaaaaaaagcgctggtccggaggtgcaaagggtagggcacatctgcggaggaaacagtcaccttaattaccacgtctagagaaagtgcgatttcattacagcctccaaaactaccgcccaaagaaggaaaccagagaagtgttttcaatttgaaagaggctggaaagaagcgggtaagacaccgactctccccaccctcccggcaactttggaccacaaggcgctttcctgcctcaaagactattaccaaacacaactcgaaaatccaaccccgctttcaaacctgtagccgttatttaaacggtaaaacaccccactttagtttccgggggatgcggcccaaatcagtccttaaaaacacacagagagcgcctctggcagcagccgcccacgcccccggccctgcgcaccgggcttgctccgggaggggcgcgtgacgccaccgcggggcagccgagaggggaccgcgggctccgggcagggcaggcgctcccgcagctccagctataacacaagggagagaaagcaacgctttggttccagaaacttccatcgtcaaggccagttctggccagacgcacagccaaagagcccccctagtctagcggatgaaccgttcgcgagtggcaccccctaaaaccttggccccatctcccaagatgcctctttactgcgcaatccagaaagcacccggaccgccgccacccaccagcggcggcgaataacttggtgagatcttaaataactcgggatccaagggaactttcttttctcccccgaatctcaacgccgcatctccaagtctccagaaatgttaaggagggaggtggtcaagacaggctgaagaatctgagttttaatttgggggagggggaggggaggaagagggaagttaataatgcggctgcggtgtacccgtgtggggtgaaacggaaccagatgc

SEQ ID NO: 33123 - DNA, 494 bp, Homo sapiens; identical to SEQ ID NO: 24686
  chr8:49468683-49469177
  binary

SEQ ID NO: 33124 - DNA, 491 bp, Homo sapiens
  chr8:49782687-49783178
  hyper
cgcccccggctaaacacccccttggcgtccgcctgggggtccccatgaaagtccccgcacgccctccccggccccgccctcctcagagcgtgggccccgcgcgccgccaccgcccggccgggaggcgcggggctccctagaaggctcgggcatgtcggagggagccgcggtgcagagacttgccacgcggctgcccgggcggcgcgcgctggagcagctttgtttcctctgctcccgacgggcatcctgccctgcggaacacccacccgagccctgcgcgggaggggcggccgggaggcgcgcgggcatgcggaggggaaacagggctgcagcttcaagcccaggcaggacgcccttagtcaccttatcggaaagtgggcagcgccgcgtctccggttagtcagagccccaggtaaataaagagctcggtgtctgcggggctctggcctcagtggctcgctctgtcactccgctttccaatacacgcaccc

SEQ ID NO: 33125 - DNA, 1727 bp, Homo sapiens; identical to SEQ ID NO: 32276
  chr8:54789114-54790841
  hyper

SEQ ID NO: 33126 - DNA, 1389 bp, Homo sapiens; identical to SEQ ID NO: 25940
  chr8:56791852-56793241
  binary

SEQ ID NO: 33127 - DNA, 1319 bp, Homo sapiens
  chr8:60030067-60031386
  binary
cgaggagcttctccacggggaagtgtgtgtgtgagagcctgcctgtgtgtcaacactgtccaagactcggagctgcgactcggtcgcgtggtgcggagtccagggctgagaaggcagcgcactaaatatctctgtatcaggtaaaaaagccgtttggtgatgactcgccaccaggcaaatgttgggagtcccaacgatttttcccgtggaatgcaccgagggtcgccatggatgtgcctgcaggggctgtgagtatcaggcagatttatcaccaagcgagagttgggcgtctaaaaggcccgcccagcgttttagagaactcaattctctctgccaacgttcatccaacgggactgcttagacacgtccaactagccctaggcgtgggcagtcgtgcccctgcgaccactctgggggaccggtccctgcgtgtcctccctctctgggatgagagagttcgagaagccgggagagtaaccccctccctcgtaccccctgactgtcctataggtggacccagccgaactccgcagcagcccaggccagcgccccacctccgggtcaccggcatgatccgcctctccccgggcccccgcggccctggcacccgaggtcagcgggccgtgggtacagctcagccgcggaccctgctccgcgagtgcgggagctttggacttgaacgcgacgtgctcgcccggctcccaacaaacttgcaatttccgcgcgcaccccttaaacaggaactgttccccaaaccttgacccagctaccccgctgtgctctggcccgcggacctgtgtccgaacccgggctcggctgccggaaccggtttgagaaaacaaaagagttgtggggcagttttccctgtggggggcaggggcgcctcccaggtccctgcaccccgactcccggctgctcccctggcaactaatccggagaagggaagtggtgccacgagcccccactgcccggggagggagggagagagaagggggaactgggaaataaactgaattctcttactctgcctccgttcctggaccccagacacacccccaaagtattccacggttttctcttattatttttttaaacgccccccggcaaacctaggcagggatccttagccgcgaacagcaggaaggaaagaatccgagcaaatcgtgtcactttccgcacaatcgcggtgtttggcaagcccccggagctactccacaatatttactacccaagcgcacgcaggctgcagcgggctgcgagccgagcgcgcccgggaccggcctccgccaagccggccccgccgcggcccggccaccgcc

SEQ ID NO: 33128 - DNA, 768 bp, Homo sapiens; identical to SEQ ID NO: 30662
  chr8:61822259-61823027
  binary

SEQ ID NO: 33129 - DNA, 442 bp, Homo sapiens
  chr8:70404779-70405221
  hyper
cgggtgctcagggagccggaaccacatgcctggaaaccctgagcccctgcccgccgccgtccaagccggccggctgcagcgcagtttgtttgccgaggtttgcatgcacatattcagttgcccttttttttcccccagtcctttcagccgtgtcccgaaattcacccttagtgtaacttctgcctctgctcctcctcttcttggaactgccttttgtttgtctggcagcgttggttctatgggggtgtgtgatgataataatacgcgggcttatataaccgtcttcatcttgcgagcacttcgcagaccgtcgctaatgaatcttggggccggtgtcgggccggggcggcttgatcggcaactaggaaaccccaggcgcagaggccaggagcgagggcagcgaggatcagaggccaggccttcccggctgccggcgctcctc

SEQ ID NO: 33130 - DNA, 672 bp, Homo sapiens; identical to SEQ ID NO: 23387
  chr8:80695898-80696570
  hyper

SEQ ID NO: 33131 - DNA, 812 bp, Homo sapiens; identical to SEQ ID NO: 28242
  chr8:80803343-80804155
  binary

SEQ ID NO: 33132 - DNA, 261 bp, Homo sapiens; identical to SEQ ID NO: 6313
  chr8:95003763-95004024
  hyper

SEQ ID NO: 33133 - DNA, 764 bp, Homo sapiens
  chr8:95651257-95652021
  hyper
cgcacggggttccgcgtccctgtgaggcggcacctcctgggcccagcagagctgagcacctgggaaccgcgcaccgagagccccacggggaggtggttagggggaaccggctcctccaggcggcctcgcccactgcaatgcaatctgggtggtttttccaggtccctccctgcctcgttccgcgcccagtccctgcccccgcgacgcccgagggcctggacgggtagctcggagttaccggggctggggaggagcgaggctactgcagtaagccagccggaacccatttatgactccgcactctgaagttcaggacagggaagcacccacctctggaactcaagcagtggacgagggaggtcccgagcgccgtcgcagcgctgcgagtgtgggaccctggccttcgcccgctctcaggggacgagagctgccacctgtatcacgggaggccccgcctccgcctgcaccttctcctaccaggaaacgagacggcgcgggcctcgggctcctctcccccctcccgggagctgaacccccactgggaaagccaggtctccagcttcccttgacacgcgtcttgaaaggttaccggatttgtacccggagtgggttctgcagggataggtgcatggttgcccgtttcacatcatgaatatgaacggggctggacacctagagccgaattattaatacttcagacagaattctgttcccaagaacaaatcgctttgagatataaaacccgagaaaacttcacctctggc

SEQ ID NO: 33134 - DNA, 1126 bp, Homo sapiens
  chr8:95652434-95653560
  hyper
cggggtcccccagctgctttgcgcgcgataactgcgtcctggggagtgactaggtggttgggcgtccagcccctggcgtccggctctgccgcgcgcggggttcctctccggaaggtgggcagcgcggcgggtttgggacgagcgtgcacccgggctccggcccggagaagggggggctcgcaggatttctcctgctgtttgcactgaaagttgtgttggctcaggagctgcttttccggggatctgcagttgcccccgccacctcctggctgcggttggcaggtccctccctcagcagttcgtcctccgcctgcgccgcgccctgggcagctccgcgccccgggcctcacctctggcctcctttcgcctccctgcacctggccttttcgcttgaccgttcagaaccttcggcttcgttccctgcagccggtattctccgagcccccctgcacctctcagttacctccagtgggaacccctccccccagcgactccgagccctttacctctctgagccctttccccgtctggcctcgtctaccctctgggtgtcaaccgcctcttccctgcccctcacgtctccccctcctcctcccctgccctcgcctctccattcatccagccattgtctcccgccccttcctccccctcccgaagcggcctcctcccccaccgctgccacgtcgtggtttgaaggagccaatgggccggcgccgccaggtgtctcttacctgcaccacgtgggggagggggaaggggcgggcaggtaaagccacatcccaaaacagaaaagctttcagccattgcgtgcctcccggggggggcagccttgctccaggctttttgcatagacgcccgggcaactgaatacaaaaagggcaggcctcctgcgccctccttcccaccccccttcctgccctgggcgtggagcaccgaccaggtgtgggcttgggtggttggttaccgccttttgcactagcagtagcaaggaaggggggtgggcgctctttctttttctcttagaagagggtttagcacaggttttttcgttctcacttccacaccaccttaccgcctcccgaccccccctctccccctccccacctatcgtcatgacggcctctcc

SEQ ID NO: 33135 - DNA, 735 bp, Homo sapiens; identical to SEQ ID NO: 25958
  chr8:99076604-99077339
  hyper

SEQ ID NO: 33136 - DNA, 99 bp, Homo sapiens; identical to SEQ ID NO: 15295
  chr9:100263437-100263536
  hyper

SEQ ID NO: 33137 - DNA, 390 bp, Homo sapiens
  chr9:100264589-100264979
  hyper
cgtggatcccaggttcgcgctgagagtgtttggggcaggtgaagtttcccaaactgggagagacaaggtttaaagcaccacgacacgcgctacgcggccaagtggagctggaaagagcttggaggcgggagccccaggttgtcgccggctctcggcatggccttggcaatccccctcttgtttctggatctcagtctcccatttgtaggggcgaggtttggtagccgcgatggagctgggagcccaagccctgagagctgcagggcgcgctcttggccgcctgcgctccccacacctgttcaccctctccgggcctgggacgctggggtcccagccgcgcacatgcggagacgctgcagaaatcggagactgactgccccagactcgatc

SEQ ID NO: 33138 - DNA, 395 bp, Homo sapiens; identical to SEQ ID NO: 15298
  chr9:116111663-116112058
  binary

SEQ ID NO: 33139 - DNA, 168 bp, Homo sapiens; identical to SEQ ID NO: 15299
  chr9:124062292-124062460
  hyper

SEQ ID NO: 33140 - DNA, 253 bp, Homo sapiens; identical to SEQ ID NO: 15300
  chr9:126165468-126165721
  hypo

SEQ ID NO: 33141 - DNA, 484 bp, Homo sapiens; identical to SEQ ID NO: 30681
  chr9:128651916-128652400
  binary

SEQ ID NO: 33142 - DNA, 836 bp, Homo sapiens
  chr9:130689378-130690214
  hyper
cgggccgcgagtttcggctgggatgggggcccaaacctgcttaggccactcacctctcggagatgcggccggcggggtagaagacgctctgcatgacgatgaagtacgtctgggggccgggacagggagtgagggaggccggctgtcgccctccagccgcccgctccgcccagccacctcgcctcggcttcacccaccttctttccccggtccacccgcagactgtgcactcctggaaggggagagggcgccggatgaggatccccaaactccacaacccggggtgcatccggcgccaatcccagcgccaggccacgcctccttctcaagatccgcggcacctggacccttccttggctggtccggatcccgacccgatcccacccctaaacacagccccagtggtgccccgcccccacgtatggccccacccccatgccctacaaccccaaatccgcccatttgggccccgcccacataccccgccctccccaggtatatgatgacctaggacccgcccccaccgagccccgcccccagccaagtacccagcaaccgcgccagcagcgagtgcgggtgccgctgcaggtgctgcacgtagcggggcaggtgggcgagcagagcctgcacctctcggcgcccctgggtcttcaggaagaagcgctggtcgtggctggggggcaagagaaagaggtcactgcccaggcctggctggagcggctcccacccggcccccttccccgacctgtgcacgtggatctcgctcccaggtctcggcaccgcctctctcgccttcggccctcgccctcctctcctccccgatctgtccaccatcc

SEQ ID NO: 33143 - DNA, 280 bp, Homo sapiens; identical to SEQ ID NO: 15303
  chr9:132145475-132145755
  binary

SEQ ID NO: 33144 - DNA, 1318 bp, Homo sapiens
  chr9:135285636-135286954
  binary
cggctccccggcgacctcaaggatgccagaggccaggagctccggcccggacctcacgcgatggaggaagcagcagcagcctgtgcgccgcacggtcagccaggtctgcccgcccccgcggcggcccctgaccgtggcggacatccgttccggcatggagaacgagcggctgggggtcgtgcgggactccatgtttcagaaccctctcatcgtcaaggtgagcaccccacgcccaccgcgctttcgctgtcgccggctccgggcacctgcgccgccgggggtccccacccgcagcgccctggccccgcggcccggggtccgagcgcagcgtgggaagctccagctctggtccagacaggcctggacccccatgcaggtcgcgtcgcctctctcagcctcggtttccccatcctcacagtgggatgataatggcaccactaaagggactgattgggaagattgaatagggtaatttctgcgggacctcgggacagcgcctgacatggggtaaggctgcaatgggtgctgctgtggtttcccacagagtgaacccacagggtgacagataggtcgcacacgcccagtctaagtcgtggctgccagccctcccagggtaaaggccgcctctccggttccgctgcacgcctggggtacgtctatgcagcggtggctccgtgtctgtcctggaagcatcacgtcgaatgttcatttccgttcgatcatactaatttcttacccaaattacaaccctaagagaaaaaaagcataatctttggcctaggaggctccgcagacaagaatgagggagctgcggtttcgggctggatcactttcccttccattacacttccctcctccccacctttagcctcgcttcccgctgatgggaaaccaacactgctgtggcggccacaccttcccgggggccactggagaagtcaggctgaggcttgggggtcagggagcaagcctcgaggcgaatttatcttgcgccgctggagggcagtgcgcctttaaaaatgcgccccgcgtcccaggtgcgggagtggaaggcgcaggtggtaaccgtggattcaacaacaattatttgtgtgaccgccaggcgctgagtagagcccagaggtggtggtggcggtttgtttttgttttggggaaaagggaacccgtgctagaattaactgagttaattggctcctggcaaaacattgactccctcctcttgccttccctaaactcggtcctgagaggaggaaggatactgcctaggcgcaggctgcacctgggggaggctggcttcccacactcgtgcctttccatc

SEQ ID NO: 33145 - DNA, 697 bp, Homo sapiens; identical to SEQ ID NO: 24715
  chr9:135645005-135645702
  hyper

SEQ ID NO: 33146 - DNA, 362 bp, Homo sapiens; identical to SEQ ID NO: 25984
  chr9:139704054-139704416
  hypo

SEQ ID NO: 33147 - DNA, 520 bp, Homo sapiens; identical to SEQ ID NO: 15307
  chr9:139948370-139948890
  binary

SEQ ID NO: 33148 - DNA, 128 bp, Homo sapiens; identical to SEQ ID NO: 25986
  chr9:2115839-2115967
  hypo

SEQ ID NO: 33149 - DNA, 686 bp, Homo sapiens; identical to SEQ ID NO: 32338
  chr9:21402446-21403132
  hyper

SEQ ID NO: 33150 - DNA, 476 bp, Homo sapiens
  chr9:34380737-34381213
  hyper
cgagggcgggacacggcagggcctcgagagcgtgcagcgcggggctagagcaggctgggggcctgcacggaagctggccgggctggaagggggcggggttctggggcggggcttgtgtggggtggagcccggctgaggcgggcggagccctgcgaaccttacagtcggttgctcccggcaccaaggccgcaggcggcggtcggtgcagggcgccccgctggcgtagtagtccatcccgcgcagacagtagtggcggcccgagcaagcactttcgtaaccatggaagggcaggcggccgggcagcgggtccacgcacccgcatcggggcgtgatccgcggcagctgctggttccgcgacagtgagttcagcatgttcaccatcacttcgcgctctgctcccgcgggtccccagcgcaggagacccaaagacagatgcacagggatgggaagaggccgagtcacggacagagtgaggc

SEQ ID NO: 33151 - DNA, 798 bp, Homo sapiens; identical to SEQ ID NO: 25994
  chr9:37034135-37034933
  hyper

SEQ ID NO: 33152 - DNA, 1424 bp, Homo sapiens
  chr9:6644312-6645736
  hyper
cggtgagagggtgcctgggaagtggggaatctgctacaaaacgcaggggaagctcgcgggggccctaggataaagaccaagaaccgcacaacaccgactctctcctaacacaaaactgtctgctccgagaaccaaatatcccaccttcccgcggctccggaggtacccgccactgttttattttaatccacacattcccagtcctgagcaatccttaccccagagctcgattttcagggaaccacaaaagacaaataggccagaataatctaagtccaagggagccctcccggccacttacaaacagggtcttccattttcaagggtcttttcaaacggatgttggcagggaccgtcttctcgatcaattcatcaatgctctaaaattaaaacgcaaggcagaggaaagtgcctctgagttaaaagagtcacctctgtgttttgcgactacaaagccttgtgggaacctcattgaaatcgcctaattagggttctttttaaaagaaaaggaaaactctgagcaagccagaatgatttggaggaaagaaaatcgtgaagtggggtggagattccgccactcggggttggatttcagttgcaaccggagctaaccggtaagcccactcttaatcagggggtcttcctcctcttgcaaagtttaggtccatccacagggccacttgggctgggggtggtttaaaaatgtacacttttgaggcacgaagactgggtgcaggagaaagtaagctgttaagaagtaagaaggcacgaggaccaaaggcacgaatttgcttccacgccacggcccgggacccagggtgcggggaccacgcggagcgcagcagagctcagggtaggagccgggaggccgcgcaggcagagcccgggcagggcggaggggaggccgcggagggccgggtggaggtccttaccgccagccccaaggtctgcagcatctctctctggtctttgtccccagggccgatgtgcctccgagcgaagtcgtcgtgtctgggcagaaggcgctccaggaggcgcgaggccccagccgcggcgctgtccccgccgccactgctgctgtcccggctccgcggcgcccagcacggccccgatcccccagccaggcggcggccgcccccgaccccgcggcccaggcgcagcccccacgccctggcacaggactgcatggccgcggccaccgtcccctgccccggcccgcaagggtcagccgcgctcttggcccctctcctggcctcggtcccccgggtggcggctgcgcccggcctggagcccctttcgctggacagtcggccggacagatggatggacgctcgcgggcaatgaatgggcgctgcgctcaaccaagacactcgcgcaaagttgtggctccacccaaggcacctgctccgcacactttaagcggc

SEQ ID NO: 33153 - DNA, 64 bp, Homo sapiens; identical to SEQ ID NO: 15311
  chr9:82188495-82188559
  binary

SEQ ID NO: 33154 - DNA, 747 bp, Homo sapiens
  chr9:87285083-87285830
  hyper
cgaagagagagtgggcacactggtggctccagcggcgtcagtgccatcgcggggcaagttgattcctgggccggagctgggcactcatccatccacagtctccgggctggggtcggggtggggatgacgcgagcagagagggagagtgccccaattagtggtgttgggggtcctacgctcagtcttacgcgtgtctgtttgtcctcagcctcgaggtgcataccggacccccattcgcatctaacaaggaatctgcgccccagagagtcccgggagcgccgccggtcggtgcccggcgcgccgggccatgcagcgacggccgccgcggagctccgagcagcggtagcgcccccctgtaaagcggttcgctatgccggggccactgtgaaccctgccgcctgccggaacactcttcgctccggaccagctcagcctctgataagctggactcggcacgcccgcaacaagcaccgaggagttaagagagccgcaagcgcagggaaggcctccccgcacgggtgggggaaagcggccggtgcagcgcggggacaggcactcgggctggcactggctgctagggatgtcgtcctggataaggtggcatggacccgccatggcgcggctctggggcttctgctggctggttgtgggcttctggagggccgctttcgcctgtcccacgtcctgcaaatgcagtgcctctcggatctggtgcagcgacccttctcctggcatcgtggcatttcc

SEQ ID NO: 33155 - DNA, 1264 bp, Homo sapiens; identical to SEQ ID NO: 29536
  chr9:93955385-93956649
  binary

SEQ ID NO: 33156 - DNA, 178 bp, Homo sapiens; identical to SEQ ID NO: 15315
  chr9:99637706-99637884
  hyper

SEQ ID NO: 33157 - DNA, 316 bp, Homo sapiens; identical to SEQ ID NO: 15316
  chr9:99638097-99638413
  hyper

SEQ ID NO: 33158 - DNA, 622 bp, Homo sapiens; identical to SEQ ID NO: 15317
  chrX:2815904-2816526
  hyper

SEQ ID NO: 33159 - DNA, 553 bp, Homo sapiens; identical to SEQ ID NO: 27379
  chrX:40017447-40018000
  hyper

SEQ ID NO: 33160 - DNA, 125 bp, Homo sapiens
  chr1:10091859-10091984
  hypo
cgtcagcggcaaaatctggaatttcatggtactgttactttgatcgctcaacttagatttatattttataaatatatatatacatacatatatatatattttttgagatggagtcgcgctctgtc

SEQ ID NO: 33161 - DNA, 795 bp, Homo sapiens
  chr1:110610350-110611145
  hyper
cgacctgcagaactcgctgaggcccaggctcctgcagctcccgccgaagactcaaagccagagtggacataaacgccgtgggcaggaccccggtgaggcctcggtgcccttcttgggggttctcagcgttggcccagaagcctcagcccgggtctaagaacttgggactctcctcgactttggcgatcggccgggtcatccggctcagggcctcagcggcagcgggcaaaactctagtaggagtctcttgccgagggcgtgtttcgacgtcagagccaaactcgggacagactagccaagcgcggacggcgcgagagtggctggcagcgccagcacgcagcctgggttcagagcaaggctgggcgctctcagcaaagggcggcctggggctgcgcgggcggcggactgcaggcgggagaagagcgaggtgcgccaggctctggggcgcgcaactgcccagcctcgtgaaagatcgcgccgcagatggggcgcagctgcgcgctcactcgtgtggactggaaacgctccgagccggttattttaaaaaccgggaaataaggcgggttccctcttcgcccgccacttcccaccaagtaggctgtgcggccctgggggctgactgtcctcaagcagccaggctccaccgcgcgccgcgctgcgccgaggtccgctctgccgcagggacgctggcagcccgttgaacaccggcaagagcgccagaggctagcggccgccaggatctctaccaggctctgctcgcacccgcctgcctccctttcgtttggcctgtcctcc

SEQ ID NO: 33162 - DNA, 139 bp, Homo sapiens
  chr1:110726624-110726763
  hypo
cgccaacacttccgcaactccaagatagacagtttttcacatttgaacatctctgaaagcacgctgtttccgacgatcagtgaggcaattatacaagcctgttttttctgtttttgttggttttttttgacggagtctc

SEQ ID NO: 33163 - DNA, 135 bp, Homo sapiens
  chr1:11091195-11091330
  hypo
cgtccatgtggaggaagaggtgtgctgcctttcctagagaaagggaatttgaaaccacccagagctccttagcaccctcatgtcaaatataagaaagatctgcggccgggcgcgatggctcatgcctgtaatccc

SEQ ID NO: 33164 - DNA, 32 bp, Homo sapiens; identical to SEQ ID NO: 15322
  chr1:1206802-1206834
  hypo

SEQ ID NO: 33165 - DNA, 717 bp, Homo sapiens; identical to SEQ ID NO: 30726
  chr1:12251334-12252051
  hypo

SEQ ID NO: 33166 - DNA, 483 bp, Homo sapiens
  chr1:1234784-1235267
  hypo
cggctgccaactcctggtgactggtggacccgtccccaactcctggtgactggtggacccgtccccaactcctggggggctctcccctatcccaaaatagccactcctgcctgcagccaacctctgcccgggatggtggccggggctgctgtcccacaggcaagcaaaggccccgcaaggagccagtgactgaggccacagaggtgaccaccgcctcaaaaggagatcccagcagcggccccacccacacgtgcccctccactgcacacatcaaagggagcagccttggtcccctagagagggtgtgggcagggcaggtgggagacaggcaggaggaaggggcggggagggtgtgccgggcatggggtgaggacgcaggggcctcccaggcgcctggtgtgcagggagccggctgcgcggcctcacccgctgctggatggcggcgtgctttcgctccatctcacgcttttccaccgcagagtc

SEQ ID NO: 33167 - DNA, 174 bp, Homo sapiens
  chr1:12460147-12460321
  hypo
cgcattatgaggccccactcaagcgtaaaaatgaaaactgagccactggtctgtttttgtttttgctttgctacctttccatggccgtaggtggacaatcagctcattggtaccacgcagcccttcatgctctatgtgactcccctgagcaatgagaatgaggtcatcgagacc

SEQ ID NO: 33168 - DNA, 607 bp, Homo sapiens; identical to SEQ ID NO: 15326
  chr1:1247740-1248347
  hypo

SEQ ID NO: 33169 - DNA, 146 bp, Homo sapiens
  chr1:1253130-1253276
  hypo
cgttgtttgcaaagtgcagagacaaaatactgtcaacctaaaatcttacacacctaagggaaaaaaagtcctttaagaacgaggataaagtaaatccatttgcaggcaaataaattttttttttttgagccggagtctcgcgtctc

SEQ ID NO: 33170 - DNA, 84 bp, Homo sapiens; identical to SEQ ID NO: 7651
  chr1:150586185-150586269
  hyper

SEQ ID NO: 33171 - DNA, 286 bp, Homo sapiens
  chr1:154685569-154685855
  hypo
cgttaccgtctggtccttgctagcatgcttcacagccgtgcaaactcaagcccaacctcaggagtccctcaatgtgcagctcataaaatgacacggaaaaggtttagtcagctcattaatttcacgcagagacacacctgagcgatttcacttaagaaacaaacaccaagtttcaaaagcccacaagacataccggtagattgcaaatgaaacaaacttgagcctaggtatttttgaaccaagcagaaatttttctttgcttgcctggtcccgcgctgtccagtgc

SEQ ID NO: 33172 - DNA, 107 bp, Homo sapiens; identical to SEQ ID NO: 30735
  chr1:155160940-155161047
  hypo

SEQ ID NO: 33173 - DNA, 333 bp, Homo sapiens
  chr1:155161748-155162081
  binary
cggggctggcttgttgtccggggctgaggtgacatcgtgggctggcggggtggtggagcccagggctggcctggtgactgggaccgaggtgacatcctgtccccaggtggcagctgaacctgaagctggttccgtggccggggccagagtgacatcctgtccctgagtggtggaggagcctgaaccggggctgtggctggagagtacgctgctggtcatactcacagcattcttctcagtagagctgggcactgaacttctctgggtagccgaagtctccttttctccacctggggtagagcttgcatgaccagaacccgtaacaactgttgc

SEQ ID NO: 33174 - DNA, 187 bp, Homo sapiens; identical to SEQ ID NO: 15332
  chr1:156553606-156553793
  hypo

SEQ ID NO: 33175 - DNA, 391 bp, Homo sapiens; identical to SEQ ID NO: 30740
  chr1:1566262-1566653
  hyper

SEQ ID NO: 33176 - DNA, 407 bp, Homo sapiens; identical to SEQ ID NO: 23678
  chr1:1566669-1567076
  hyper

SEQ ID NO: 33177 - DNA, 287 bp, Homo sapiens; identical to SEQ ID NO: 15335
  chr1:160953524-160953811
  hypo

SEQ ID NO: 33178 - DNA, 181 bp, Homo sapiens; identical to SEQ ID NO: 15336
  chr1:171570080-171570261
  hypo

SEQ ID NO: 33179 - DNA, 265 bp, Homo sapiens
  chr1:178994079-178994344
  hypo
cgccttactgattaaatgaactatgtggcctgaagaaaaagtgtcagctcagtctttccccatcacgcatcttattccatggagtaacctgcattatatttcagggtcaggcacactaagtttgcgctttagtatatggtgaataaatggatggacacagtggcggctctgtataagtcagctgaaagcaaacaaagggaaggcagaatctttcattcacacgatttatccgcgcccactgggtgcactacggtcgggcattggc

SEQ ID NO: 33180 - DNA, 399 bp, Homo sapiens
  chr1:180235527-180235926
  hypo
cgcttcggcacaaaatgcacggcctgccagcagggtatccccccaacccaggtggtccgcaaggcccaggactttgtctaccacctgcactgctttgcttgcatcatctgcaaccggcagctggccacgggggacgaattctacctcatggaggacgggcggctggtgtgcaaggaagactacgagacagccaagcagaacggtaagcagcatggccccgcatggtcccctctccaggcctttgtttgggccacgccctctgcctgaggtgcccttctcatggcgtcccacctgcccatccctcagagccctactcatgcaccgccacctctgagaagcgtcccagatctccacactgagagtaaatgctgaacacctccccggccgttagcactcgcc

SEQ ID NO: 33181 - DNA, 336 bp, Homo sapiens; identical to SEQ ID NO: 29592
  chr1:181767556-181767892
  hypo

SEQ ID NO: 33182 - DNA, 261 bp, Homo sapiens
  chr1:184633170-184633431
  hyper
cggctcctctacactctgcagagctgttttcccccttcagagctcctctcctccgggagggcttgcctcgccccggtccaggatctctgccttcggttgaagcgcagcgcccccagccgtccgcaggagggatcgacgcctctgtctccccgaagtgagggcgctcgctgcggagctgggggtggtctcctcttccccccatcgcggcccagcaacctgggggtccgcgtgacttctccctggccgggggatggaggatgc

SEQ ID NO: 33183 - DNA, 388 bp, Homo sapiens; identical to SEQ ID NO: 15342
  chr1:193149436-193149824
  hypo

SEQ ID NO: 33184 - DNA, 310 bp, Homo sapiens; identical to SEQ ID NO: 30763
  chr1:1974777-1975087
  hypo

SEQ ID NO: 33185 - DNA, 329 bp, Homo sapiens; identical to SEQ ID NO: 15345
  chr1:201194921-201195250
  hypo

SEQ ID NO: 33186 - DNA, 292 bp, Homo sapiens; identical to SEQ ID NO: 15346
  chr1:205273331-205273623
  hypo

SEQ ID NO: 33187 - DNA, 530 bp, Homo sapiens; identical to SEQ ID NO: 28324
  chr1:205399667-205400197
  binary

SEQ ID NO: 33188 - DNA, 221 bp, Homo sapiens; identical to SEQ ID NO: 15348
  chr1:212330215-212330436
  hypo

SEQ ID NO: 33189 - DNA, 311 bp, Homo sapiens
  chr1:214637813-214638124
  hypo
cgtgctaagaataacaggattcttataaacacatcgtcgcttaggccaaaaaacacaacagatgccaaaaaacagatggctggtcccttcggtgagttctccttcacatacccaacacgcatgcacgcgcacatgcgcacacagacacacccctcttacctctcgcagctccagcctctgggccacagcctccaggcattcttgccctgtgctttccaccgacagcgtgcactcgataacattgctgtccagcaggcgaatccgtgtgacaaagcagttcttgctcaggacgttgtagcgccgtgtccggc

SEQ ID NO: 33190 - DNA, 953 bp, Homo sapiens; identical to SEQ ID NO: 26061
  chr1:215255075-215256028
  hyper

SEQ ID NO: 33191 - DNA, 564 bp, Homo sapiens
  chr1:219347007-219347571
  binary
cgaggctgacacacgtagaataccattattagcaaaactaaactcagtacagttacaactgcctcaaacttgaccccaaagtattgaaagctcctcagagagcgggccagcagcgctgcgcatgcgcgctcccgggcgtgctcccgcgcgtgcctgcgtatttgcgtgcgcggccccgcgcggcaacgcaggggcggaaccgcatgactggcagtggcatcagcgatggcggctgcgtcggggtcggttctgcagcgctgtatcgtgtcgccggcagggaggcatagcgcctctctgatcttcctgcatggctcaggtggatttcaattttacgtcctggttttctacagctcgggaaacatcctcccctcggttaccccagtattgcccaagtggaggtgtcgccgggcccaaatagggcccagtgggtggctcccccgtcgccagccccggctgtagatgcacgggcagcgccacctgcccccagcctcccccgttagtcttcctctttctatcgggcggtcactggtccaccaccctcgctttggggccttgtgtcccgcc

SEQ ID NO: 33192 - DNA, 174 bp, Homo sapiens
  chr1:227750844-227751018
  hypo
cgcaccggaatgcgcctcccctttccacccgccagcattcccaagcacgcctcggcttctgactgttctgtgctttgggaggaaaactcatcttcaggtttttctccaacagaagatgatgatgacgttgtttagacactcaggaacagagattgcagattggcttaagagtgc

SEQ ID NO: 33193 - DNA, 689 bp, Homo sapiens
  chr1:228463167-228463856
  hyper
cgaggcacaagggcctggcgtcttgttcagagcaggggagctggaggtgggagcggggcttaaggaagcttcctggtttcctcgcttaaagtcgcacccgggagggtgcgcagctgcggcccgcgtgtggccagggccgcgctgtttggattgggatcccggggcgcggtgccggcagctctgcctgggcccggctcagggcaggcgccggggctgtgcgggccctctgtaccttggcttgtccgtggaggagggcgagggccgccgtgacctcccctctcctgcgaccccagaggcgcctgtgctgttcaaaaagaagctggagccgcagacggtggaggagcggagctcggtgaccctggaggtggagctgacgcggccgtggccggagctgaggtggacacggaacgcgacggccctggcgccgggaaagaacgtggagatccacgccgagggcgcccgccaccgcctggttctgcacaacgtaggttttgccgaccgtggcttctttggctgcgagacgccggatgacaagacacaggccaaactcaccgtggagagtgagccgcgggcgggaagggcggggcatcgaggaggagtgaggagggaggcggggcattgaggattagtgaggacgtaggcggggtgctgaggggaggagggaggaggggcactgaggaagagggagc

SEQ ID NO: 33194 - DNA, 836 bp, Homo sapiens; identical to SEQ ID NO: 30782
  chr1:228558714-228559550
  hypo

SEQ ID NO: 33195 - DNA, 206 bp, Homo sapiens
  chr1:22927361-22927567
  hypo
cggctgagcccagcgctgatcccctgcaggtcatcagctctgtggaggaggggtaccgcctgcccgcacccatgggctgcccccacgccctgcaccagctcatgctcgactgttggcacaaggaccgggcgcagcggcctcgcttctcccagattgtcagtgtcctcgatgcgctcatccgcagccctgagagtctcagggccacc

SEQ ID NO: 33196 - DNA, 273 bp, Homo sapiens; identical to SEQ ID NO: 15353
  chr1:230256241-230256514
  hypo

SEQ ID NO: 33197 - DNA, 262 bp, Homo sapiens; identical to SEQ ID NO: 15354
  chr1:230266303-230266565
  hypo

SEQ ID NO: 33198 - DNA, 537 bp, Homo sapiens; identical to SEQ ID NO: 27427
  chr1:230404024-230404561
  hypo

SEQ ID NO: 33199 - DNA, 175 bp, Homo sapiens; identical to SEQ ID NO: 15357
  chr1:233085208-233085383
  hypo

SEQ ID NO: 33200 - DNA, 304 bp, Homo sapiens; identical to SEQ ID NO: 28340
  chr1:2331316-2331620
  hypo

SEQ ID NO: 33201 - DNA, 128 bp, Homo sapiens; identical to SEQ ID NO: 15360
  chr1:237052581-237052709
  hypo

SEQ ID NO: 33202 - DNA, 177 bp, Homo sapiens
  chr1:24119126-24119303
  hypo
cgccgccccgatgtatgcaggcccccgccgtggagccgtgtggtgtatgtgtggtaacaccatgtctgtgcccctgctcaccgatgctgccaccgtgtctggagctgagcgggaaacggccgcggtaagggtcccctttcacccacggccagacactgtgggagcagctggaggacc

SEQ ID NO: 33203 - DNA, 45 bp, Homo sapiens; identical to SEQ ID NO: 15361
  chr1:244815271-244815316
  hypo

SEQ ID NO: 33204 - DNA, 753 bp, Homo sapiens
  chr1:245499151-245499904
  hypo
cgaagggaaaggagggtcccacgaagggaaaggagggtcccacgcagggaaagaagagtcccacgcggggagagccccatgcagggaaagagggtcccacgcagggaaaggagagtcccacgcagggaaaggagggtcccacgcagggaaaggagagtcccacgcagggagagtcccacgcagggaaaggagggtcccacgcagggaaaggagagtcccacgcagggaaaggagggtcccacgcagggaaaggagggtcccacgcagggaaagaagagtcccacgcagggagagtcccatgcagggaaagaaggtcccacgcagggaaaggagagtcccacgcagggattgctgttccactctgcatagccgctgggctttctgctgcacggatgccatctagaagaagcaccatccactgttctcagaaagaagagagaggaaggagacaggagtgcgtagagtgagtgggccatcagaaaaaggactgctctggggatgcaggagacccgcttgtaggatttaggggcaccgtgcaagacaggggtcatggtatgcgggtgcctccgactggcggctgcgtggtggatctggccacttggtgaaggtcgcagtgaccttgatctgctctggggagggatgctgttttgcctttcttcacgcacgtggaatcaggactagctggactggcaggaaaaggttctctctggaataatggtttgcttctctgcaggctcgtgcggcggctcgtgc

SEQ ID NO: 33205 - DNA, 105 bp, Homo sapiens; identical to SEQ ID NO: 15364
  chr1:246160284-246160389
  hypo

SEQ ID NO: 33206 - DNA, 252 bp, Homo sapiens
  chr1:25919205-25919457
  hypo
cgctctatatccagcacctagaacagcgcctggcacctaagcaggcatttggtaaaactgtgccaaatgagtgagtgcggacagcgtcctagtccttcaccagccccctctcagcagcgcaggcaactggcccagctgtgtctcccgcacgggccggcgggcgctgtgatggaggcagtgcaggatgccgtgtgagcccgaggaaggacttgcagccctgctgaggggacgaggcgaggcttcttggatgac

SEQ ID NO: 33207 - DNA, 312 bp, Homo sapiens
  chr1:27628257-27628569
  hypo
cgctaggcattcacacctgcttagacagggccctggtggttccacttgggcatctgagaggcagaagctggtcattgtgtttgttccgagtgtacaagtgcagcagagacaatagcgcagagcagtagaaatgcctcaggcttggaatgtggggcctcggttccaaatgcagctccaccacctgactgtgtggccttgaagaaagcacagcctctctacctacctgcacaaagagcacgaagccctgcccagctcccctcagtgtgctggagaatgaactgggccatcggagtgtggtctgtaaacgtgaac

SEQ ID NO: 33208 - DNA, 202 bp, Homo sapiens; identical to SEQ ID NO: 15368
  chr1:27921349-27921551
  hypo

SEQ ID NO: 33209 - DNA, 873 bp, Homo sapiens
  chr1:3182342-3183215
  hypo
cgctctgtcctcaccgcccagaccctaggagcccccagaccctgcctcagtgggtcgtgcccaggtccttcgctctctatgatccctttacggtcgtgcagtgctccccagggctccgcactgctccccagggttccttggtgcgtgtctcataaagcccaggagggcgaggccaggcccagcccccaactcaagggccgccctccagcctagcgacgccacctggcccctctttccattaagtctccgtcgtcttgagtccatccagggcggtgtgcggccggtcgcttagtcagcaagaaccctgtgagctgcagtcatcataaatgcatatttaataactattttcttcctggggaaaatgtgctgcttcagaagttcagaaatgggcttcgctcttcagctggtaatgagaagttaataaaagtgggattttgtgcaacgctggccctctgacatcttaatctttattaaagagacgtaaacttccacggatcgggcgggcctgcctggcacagccggacgccaggagagccgggcaggggtggcccaaggccggccgagcacccgtaatccaccagagaacaatgcgcgccggagccttttcgccccgagagcccctcgcacttacctcagtagacgcgaattaattctctccccctgagagccccagagagactggggaggaccgagcggttcgcatttgcaaagctcttaatcagtgaactgcgttggaggcattgctgctccgctcctccgacgaggagagggccccaggggcaggagccactccctggatctcagacccgcttgtctcgcaggcgggaggcacgggcctgcaccctccgccgctcccacgctccagcagaccac

SEQ ID NO: 33210 - DNA, 473 bp, Homo sapiens; identical to SEQ ID NO: 15373
  chr1:3195292-3195765
  hypo

SEQ ID NO: 33211 - DNA, 405 bp, Homo sapiens; identical to SEQ ID NO: 15374
  chr1:32742000-32742405
  hypo

SEQ ID NO: 33212 - DNA, 1246 bp, Homo sapiens; identical to SEQ ID NO: 24846
  chr1:36042458-36043704
  hyper

SEQ ID NO: 33213 - DNA, 207 bp, Homo sapiens; identical to SEQ ID NO: 15375
  chr1:3646542-3646749
  hypo

SEQ ID NO: 33214 - DNA, 441 bp, Homo sapiens
  chr1:3680047-3680488
  hypo
cggcggggggcactgggctttggccactcagtggttcccggcccaggagctgggacgcccagacgctgcctgctctggtcagtgagctggagcaggggcaggtgtcggcagcctcacccaggctggcagagccctcccagctgccgcagtggcccggccctctccttctgtccctcactgcccctgcttgctcctgctcaccgcctctgcctctgtgcccaggagtgattgcgtctttacaacaacaagtggatttccaagaaacccagctgcgaaagatcaatacggaaaatgagacgctgcagaaggagctccgagagcggaggcagcagctacaagccatgaccgacaaggtggccgtgcgctcagtaccggcctccgctccatgagcatgggccccaggcttcattaacccccggcagctcggggcaggcgctgccc

SEQ ID NO: 33215 - DNA, 668 bp, Homo sapiens
  chr1:3683701-3684369
  hypo
cgccggccatcttttaggaaaaagtggatgggtgccacacatactcaggttgggcgaaatgaccccacctcttttttctccccggctgtccccagcaagtgtcggaactggagagaaagctcaccaagcgggactgtgtcatctcagagttggacaccaaggtcagccagctgcaggagcaggtggaactggaccagaaccacctgcagaggtggaagcagctgcaggaggatttgcagagcaagaaggagatgattcagcaggcagagcagcacacccgcgtggccctggagagctcccagtccagggtatgcccagcccttcctcctgagggtctgtcccagcagctggcggccgagcacccaggcctctgcccaccgcccaccgaggtagaaccggggtctgtgtacgctggggctcgggctggttctgccgtgtacaccagcatccacacagagttgacactcaagaaatgtgggtagaggacggagtgagagtgcaacagagtagcccggaaatgttcgtcaatggcagtggtgggcggagccccatgggcagggctgcgggtcttgggttgcattgtgaaggggttggatcactggctggaaaggaggagggcacctggatagggaggcatggtgttgcccccctcatctctgagtcatagc

SEQ ID NO: 33216 - DNA, 877 bp, Homo sapiens
  chr1:3700211-3701088
  hypo
cgcacggtatggataaaatgctgtgggttgggctggcatttatgtctgtttcctaatggctagtttatatcctgtcctgtcccatcctgagggccacccgccccctgtggaatggccaatacctccgctcctaacaccttccacttccctcacgtcagggccatctagatgacagactggttccacaacgtctcctttggaaagagaatgctttctttgtaccctgttaagaagcttctgggttctggtagcattaggcggttcctgaggagcacagactaactcagctgaggccagcatgcggcactcccccgggcccggccccaccccaccaggcacgctgcccacctgtgcaggcccgacacactctgccgcttcttctgcttcctctgctcctcggcctccagctgcagctgccgcaccagctccttggccttggcttctttccgccccaaggggacaatctatcgggcagaaacccacaaactccactagggtcacagccacagaactcgcccatcgtgtcgattacggccttaagcctcaatgagccctcccgactcccgccctcattcatctctacagcaggcagggagcatcccacgggaccacgcagcaagaagctgcatgtgggctgccactgcagcgtcccggggagacctgacgcccaaacacaccgatcctactgaggcagggcttaaccttaaagccagctcatgcacaactgtttccagaggtctgccatcctcagaaggccaaaagaggagagaaaggctgagcagccgggacctcgtgcactccacagattcaacagcccaggacagcacgacacagcaactcaccctactgccaaccccacgcaaacggttttactatc

SEQ ID NO: 33217 - DNA, 738 bp, Homo sapiens; identical to SEQ ID NO: 24853
  chr1:41284015-41284753
  hyper

SEQ ID NO: 33218 - DNA, 120 bp, Homo sapiens
  chr1:41451907-41452027
  hypo
cggggagtctcccaagagaggccatttgagctgagaggccagtcacagcgagagtggaatgagaagtgcggaggcgcagggctacgaaggcgtggttggtccgggaatggaggggaggcc

SEQ ID NO: 33219 - DNA, 370 bp, Homo sapiens; identical to SEQ ID NO: 27443
  chr1:44717932-44718302
  hypo

SEQ ID NO: 33220 - DNA, 335 bp, Homo sapiens; identical to SEQ ID NO: 15384
  chr1:45087586-45087921
  hypo

SEQ ID NO: 33221 - DNA, 1865 bp, Homo sapiens; identical to SEQ ID NO: 15385
  chr1:46767970-46769835
  hyper

SEQ ID NO: 33222 - DNA, 209 bp, Homo sapiens; identical to SEQ ID NO: 15386
  chr1:46963465-46963674
  hypo

SEQ ID NO: 33223 - DNA, 360 bp, Homo sapiens
  chr1:47035276-47035636
  hypo
cgattcccgactagaaggcaaaagcctggcccaggccacgggaggcacttcactaaagaagaaaaacctgagctccagcaagctcagtaacttcatcagtcacctaattgaacgagaacccagagcaactcagtccaggctgcacaaattgagtagcactgctctgcagctcgctgcactaaaagtggaagatattttccattacagcaagtgctcccacagaaggatcacgagccacacacggagccttactctccaaataggcgcccatggcccagtcgtcccttagcctaagaactcagagagccaggctgtaataatggggctgccgtgtgagcacagcagccatcgagctgctcc

SEQ ID NO: 33224 - DNA, 148 bp, Homo sapiens; identical to SEQ ID NO: 15389
  chr1:55066953-55067101
  hypo

SEQ ID NO: 33225 - DNA, 696 bp, Homo sapiens
  chr1:6148944-6149640
  hypo
cgactccacacggcatttgctgaccctgtttttgcgtctaacattgcatcgtaaacgttttttgggaggggccagggtgccaaaaccgctggtgacatcacacgcggtcggcctgttttccagggcggagacggagcggggcctgtccaggaagcacataatcgaaggtgaggacgcgctcgggcacctcagggcccccatacctgtgggatcatcctcggaggccaaagtgatggcagcacagggcccgacccccccagttaacccactgagggcccaatcccggggcacccggtgctctggcctgaccttctccttccacccaggtagcacagcgggacgctgcagagaacgagggcagcccggtggctgagcacagaccacagaccagcctgggtttcaatccaggtttggccccacactggctgagtgggtcttcagcaggggcaccctgccccatgcctctgccacagtatctgtgcaatagggacagtaagagcgcacccggcgagggtggctgggatgcctgcagcgcccaggagaaggtgccacacagcccggggctcagcactcgcaggcaccggagcaaggcaccggggtgtctggctcttgctgtatctttattgtcttcatgcctttcctgtccgtgttcattttcttcgaggtaatagatcattccattgaaaatcacctggc

SEQ ID NO: 33226 - DNA, 304 bp, Homo sapiens; identical to SEQ ID NO: 15392
  chr1:6345513-6345817
  hypo

SEQ ID NO: 33227 - DNA, 261 bp, Homo sapiens
  chr1:6391374-6391635
  hypo
cgggccctgagcccagtgacccgtactccggtaagcaggccgtgcgaagatggaggcagaagcttcagtgacgcagcctcagccaagggacgcctggagccacccggcgctggagacgccaggagggatcctcgcctggggccaatggagggcgcagggccttgcccatacctttgcacttctggcctccagaactgtgacagaatcaacttctattgtttgagagctacccagtcagtggcactttgtcacagcagcccc

SEQ ID NO: 33228 - DNA, 418 bp, Homo sapiens; identical to SEQ ID NO: 24870
  chr1:6500747-6501165
  hyper

SEQ ID NO: 33229 - DNA, 556 bp, Homo sapiens
  chr1:6713808-6714364
  hypo
cggctgggaatgaagcgctttcttttttaagtggctaattgcatcctttcataaataaagatgagaaaaaccctgggcagactctcattccagctgcttggtgtgctgtgcctcattaactcgagcccttgctgtactcggagaggtggttgtgtgctttacctcaatggactgggatatgtgcattttattaatttcaatctgcggaaagctactgccggacacatcttcatactcctcatcatagcgatcaaaaaggtcggtggcatctactccaacgctgatcgttccctggggcagaaaaacaagccgtcagcagaacgggtggtatttgtggaatgaaagacaatgctacacttcaacagccagctcgctttaattgaacaagtcatttgacttcagggttcactgggtttaggtaggacactccaccaggaagcccacaaagcatgaatgtcacagtccgaaccaaactgcagagcaccacagacgtccagagctagaaaacatcatttgaccaggagagccggtccgcatgtctgcagagcaatgacac

SEQ ID NO: 33230 - DNA, 207 bp, Homo sapiens; identical to SEQ ID NO: 23750
  chr1:86860814-86861021
  hypo

SEQ ID NO: 33231 - DNA, 750 bp, Homo sapiens; identical to SEQ ID NO: 30857
  chr1:90308855-90309605
  binary

SEQ ID NO: 33232 - DNA, 223 bp, Homo sapiens
  chr1:9795925-9796148
  hypo
cgagcgctcggtgttacctgcacgcctctgccactgtcttcgaggacctgcaggtccagcccctccttgcaggtatacagacagtcgatcaccttcttatccgcgagtttcccggaacggagagttaagccagccagattgcctcggaaaaactgggtcatgtgcaggtcgccacctttgggtcaggggagaaaaggcgaagtcaggcgtgcaacccagcatc

SEQ ID NO: 33233 - DNA, 107 bp, Homo sapiens; identical to SEQ ID NO: 15400
  chr10:100171106-100171213
  hypo

SEQ ID NO: 33234 - DNA, 2751 bp, Homo sapiens
  chr10:102585763-102588514
  binary
cgcagagagctcgtggtgtcgaggggggagtcgttaaacagaatctagtgctgatgaggaaattacacttgtttcattagcgatggggaaggagatagctcagttcctcttggtcacagttgagctcagaagctcattatcctgctgcacgcatgctttccctcctcgtcaataaacaggctttccagtggctgcatcccccacccccaccccagctccctctcagagaggggccccttctcctctacttaacccgcggttagggatcactgtaaacagtctggggtcatcacacaggagaaagggcgagggggaaacctggaggcctggcctttctcccgcagagggagggaggtagcttccgacgacggctcccaacccacgggccctccgctcaccgctagcggaccagcgggcagtccacctgcgccgcctccatcccctgccgcgtagcccacgcatccaacctcttgagggaaaggcgggagggcggtgtctcccaaaagagctcccacctcttgtgttggcactgcacattgatgccattcttaggactttctgggagaaaaatgtcccgaaggcctttcttcgccaccgccccccactcccatttccacccattaggggccatgcctcctagaaccggagtggcatctataaaggccctggcccccagcgcgacagggtggacgcgccccaatacaaacccttcgtgggtggccgcgagcgcctccgctgggaagccctgggcgggcaccggcccacaggtcccgcccgtgggtgtgcgagcgcgtcggtgcctcccgcctccccgggctctctccacgcggacgcggtgatcgccccacctccgcccggcccgcccgccacggccattaccctgcccgcgacacctgcgcctgagacccggcgggaggagcgggcggagaagccaccggccggactcgtggggtccgccctggcttgcaggcgtctgatccccactccccgaccctcccgcagggagcgagttctccggcaacccgtacagccacccccagtacacggcctacaacgaggcttggagattcagcaaccccgccttactaagtgagtacgccacctggctggccggcggctcagcgcggccgcgcggcttctgggcacggtcccactcccggcgacccgacctctggggacccggccgggccagggggacaggcttgttagtgcagcactgaggcccggggacccctcgaggacgcccgcacctcctgccctcccgtgccctccctggtcgctcgaaggctctgcgccgccctcgccctcggatcccctggagggtgcgcagccgggcgtcaccagatcgggtccctctcatgccccgtgaacgcaactattctccggggcaactggctccactgcccagccaaggtctcccagtccggatcccgctggaccccagccaggggaggtcttttctgtgcttttctttccttttttgttctcctgtttgtcctctcacccagcccattcttctcctgtgttaacttccaggttccccttattattatagtgccgccccccggggctccgcccctgccgctgctgccgctgcctatgaccgccactagttaccgcggggaccacatcaagcttcaggccgacagcttcggcctccacatcgtccccgtctgaccccaccccggagggagggaggaccgacgcgacgcgatgcctcccggccaccgccccagcctcaccccatcccacgacccccgcaacccttcacatcacccccctcgaaggtcggacaggacgggtggagccgtgggcgggaccctcaggcccgggcccgccgcccccagccccgcctgccgcccctccccgcctgcctggactgcgcggcgccgtgagggggattcggcccagctcgtcccggcctccaccaagccagccccgaagcccgccagccaccctgccggactcgggcgcgacctgctggcgcgcgccggatgtttctgtgacacacaatcagcgcggaccgcagcgcggcccagccccgggcacccgcctcggacgctcgggcgccaggaggcttcgctggaggggctgggccaaggagattaagaagaaaacgactttctgcaggaggaagagcccgctgccgaatccctgggaaaaattcttttcccccagtgccagccggactgccctcgccttccgggtgtgccctgtcccagaagatggaatgggggtgtgggggtccggctctaggaacgggctttgggggcgtcaggtctttccaaggttgggacccaaggatcggggggcccagcagcccgcaccgatcgagccggactctcggctcttcactgctcctcctggcctgcctagttccccagggcccggcacctcctgctgcgagacccggctctcagccctgccttgcccctacctcagcgtctcttccacctgctggcctcccagtttcccctcctgccagtccttcgcctgtcccttgacgccctgcatcctcctccctgactcgcagccccatcggacgctctcccgggaccgccgcaggaccagtttccatagactgcggactggggtcttcctccagcagttacttgatgccccctcccccgacacagactctcaatctgccggtggtaagaaccggttctgagctggcgtctgagctgctgcggggtggaagtggggggctgcccactccactcctcccatcccctcccagcctcctcctcc

SEQ ID NO: 33235 - DNA, 829 bp, Homo sapiens; identical to SEQ ID NO: 24888
  chr10:102589614-102590443
  hyper

SEQ ID NO: 33236 - DNA, 601 bp, Homo sapiens; identical to SEQ ID NO: 23018
  chr10:102998293-102998894
  hyper

SEQ ID NO: 33237 - DNA, 252 bp, Homo sapiens
  chr10:103425908-103426160
  hypo
cgctcccacacacttagcctctccactccctgctggtctttccttccctctttcctacgattgctagaatgatttgttttgaacagcgacaggtttataggttagccgacacctctgctctgtggaattttaattaacttctctcatcgtcaatatgctaaggaatggggtctccattctccggggtcagcaatgtgtttcaggtcctgctatatcagccgtcaaattgaagaattaatgacgtggctaatc

SEQ ID NO: 33238 - DNA, 357 bp, Homo sapiens; identical to SEQ ID NO: 15406
  chr10:1167479-1167836
  hypo

SEQ ID NO: 33239 - DNA, 1603 bp, Homo sapiens
  chr10:119293799-119295402
  hyper
cgagaaggggaacctcaacatcaagtgtctggcagatgggagtgtgtgttaagcgagggctgttttcgttgggaacgcacagcacagctcccttcctcagagccacctccagacccctcggccctcccacgacccccagttcccgggtccgaggttctgggcgccagcggcggccaccgcgccgcgcgagcagcttttattcgcactctctttaactcgccctttctggttctcttcccttcgagcgccctgcagcggagtgttagacaagccctgttgtctgtgggctctcacctcagagtcaatattatctcagatgggcacaatagactggaatgaaaagctaatattgaatcaatgctgtccctgtccgcgccgctgcgatgccaccctttgttgcgcacgccgcccccggcaagctgctggcggccggggctaagcggagggcggccgcggtcgggcctctccgggtccacgccaggggtgggaggacacttcgggcccagcgtagaggaggcctccgaggcccaagcgggcttcggctgctgcgagtccccagaggctccctcgggcctcactcgcggtgtctcctccagacgccaggggcaggccacgaagccgagggctccgcgtggccgtgggagaagcggggtgcacggagccttcccgcgcccagacgccgaggggatgcaaacaggggagccgggcctggtatggccaacctccaggatcgaggggccccagaatgtgcgtgtggccgggggcgggggcagctgcgggggccagaactagagtattccttcgctctcccctgggggccgggcccccacgagttgcagcagagcccgtctgtaattagggcctcctggtccggcaaagctgcggctgctcccagagagagttggggtcttctcagggcccgcgatgggggagtggtcgtggtcagacccccgtgagccccttcggaaggtcccagtccctgtccattcttctgtcccgcagctctctccgcgcaggcggggcagagccggggaagaagacgctggacgaggggtcttggggccgcctcgctggctgcggttggaagcacccgttttcccgcccgcccgcgcaggcgctgctctgtggccaccagcagaggtttcccggccgctgtgagtcgcccacgcgagcgacgtggggatacggggcgcacggagtctcagctgccgccacgcagcgcttgccctgcccgagcttcggctcactggcagcggcgaggccaccgaccaccctccgccttccagtcctaaactcggggctggagaccgcaggagctaaaccaggaagaagaaagagggcagggcctgaggccgggaagagcggcccgggggtcaacggtgagcgggtgcatacgaggcaagagccagagtgacattaagtggggccgcccgggcaaaccttgcgcgtgcaccccggcccacctgcagggcattctcccctgccttttctccttggcttgagtgcgggcggctgactcctgtgggcggggaggagagggtggtcttcccagggctccaagtggagtgatcactgcacccatggccaggaggtgggggtgcgc

SEQ ID NO: 33240 - DNA, 736 bp, Homo sapiens
  chr10:119494306-119495042
  hyper
cgactctccccgggtcccccaccccagccaagagggaacctgccaatcaggctgcgccaccaccaggctaggaagcctagggtcgccgatgttccaggatggaatgttctggtgtcaccgtgcgggggggtggggggtgtcacagagctgggaactcgctcagagccagggtctctgctggggtcagcgtctgtacgctaaagccagggcgcaaagtgcgtgggcactgcggacactagaggcttatggcgctggaaatacaaggccgagttgccggcgcaaagagttccccgggcgggttggtgatgcggcgcgctttgataacaggttaatccggccaacattcgctccgcgagagagccatcggagggctccgggagactgcggcgccacggagggagaggcggcgagaggcccctctgcgagcaccctctgggcgcagtgcggtgggctatgctctgcgcagccccgggcgcgcctgggttctcagagcccaagacctgagccgctccgagcgcagggcgccagttctctttcagaagcgggagaagttcaggtgggacaggagacacgggggtgaggagatctttgagagggccggccgggaaagtgggggtcgcctgtggctgagagggccgcatgccgaaggtcccgaccccaggctcacgacaggcagcctggcacgcaggaaggggctttgggatagaacgtagcacctggctgagtgcttaacaac

SEQ ID NO: 33241 - DNA, 75 bp, Homo sapiens
  chr10:127475478-127475553
  hypo
cgttctcaggaatctccagcccaattgccaaagcaagcccaggctcccgactcacgcaatcgtcgaggacactgc

SEQ ID NO: 33242 - DNA, 499 bp, Homo sapiens
  chr10:131647424-131647923
  hypo
cggccgggactccgtccgactgcacacactgtgtttaacaagctttataaggagccatcgggctttattatggctctgcctgactccaacaaaaactgagcctggaggcccggggacacgagttaagatgaaaatacttattggagtacattacttcttgatgtagatggcgttttccgtggagtcactccacggtgcgtggcacaacataaatcagaggtttttcggagactaataagacctgccaccatctattcattactctgcctgcaatttgggccatcactcattagtaatttgatgattaacacgccccacctcagcaggtgtgcaaggtgcgggggcggacacaaagactgcggcttccggagaggacggctagggggccgcctttgcaagtgctctccaaaataattggtcaccgttctcgagtgcttgggcgtcggcgcatcttgtaagcaacgcaggaagcctcgcacgtacactcaataatgcgccc

SEQ ID NO: 33243 - DNA, 1228 bp, Homo sapiens
  chr10:131843994-131845222
  hypo
cgtcccgccacgcgggcgggaaaacgtggaagcaaatgcgattgcctcgactcgaggctcagctaaggagcagtcaggtccgtgtcacctgtggcttccactcccaggaagtctgatggctccggtcgtggctgttgtggggaatccgtcgtgtggagaacgtgcctgccacgtgcgggggagaaaggagccaccttccgagtacgcgacctcacctgccgggcgtgaggtgctggactgagaccagggtggggctctgggcatgggaggtggggctgggcgtggggcacgtggcacagagggatgcgcgtggtagggctcagggcagacggaacgtggaacagggagtggctcagggcatggggatggggcggggcgtgggacggggcgtggcgtggggcacaggaaggggcagggcacgaggagtggggcgagaggtgctaagtggggcctgagtggggcgcggggcgtggcgcggagtggggtggagcgggtggggcgaggctcggcgtgggacacgagggacgggacgcgggggcacggcaatgggtggcgcagggcgcactctcgggctccctgcaggtgggcagccccacctgtgcacgccgctcccccgcccagcgcctcccccgggacctgctccagaagcgccagttgcgggaccccacacggaaggcagtcttcggtggttctcactgcaattcctcttaattatgtgtgacataaaaagaccacctacagacgagacaatgctgccgtaagagtctcggggttactgcagggaattcttcataaccgaagtgtgttttccccgaggagttatgctaccatttgatttaatttttaatttttacattttaatcaaaaatagatcaaatggtggtggtctctccggggaaacacacttcagataggaagccggccatgctcctttaaatatggaaactgccgtctccgcgctgcgggctgggcgtgtcctttctgggaggggccttgggccatgcacctgaggccaccagctcgcccacgccgcccgctcacctgcacgcggaggttcatttaatccgtgcgtctatgcagcgcctaggcctaactctcccaggaggcgccagtcacgttccccagggggagctccctgacctttctgggggtgacagagtggggaagtgggcagtgtgagcccacccctgaggcgtgtgtgtgtaagcgtgcacacttgctttttaac

SEQ ID NO: 33244 - DNA, 992 bp, Homo sapiens
  chr10:133982448-133983440
  hypo
cgggcgcaagaagggaaccgcggggacggcctttcccctcccgccctgtgtggggacgctgcacgagccgtggaccaagaggctgacaggtaagggctgccatctgtccgcggggagggcctttgcaccctccctgcgaggtgagctccagcttcttcacacctctgtgtccccgtctgcacatgcgtgacgctgccaccccgtccactgctgacccgtcaagatcacctctcccgccactgacgggacagggcctgggggctggtgtggagcgtggcgtgagctgtcgctggggcagggtctgcagacatggtgctccacggggacctggcgtctggcagagctggtcctcctcccacttgcaggaggaggcttgcgggaaaagggagaaaccccgtaggtgcaatgaggccgctctccgagtgcgcctccctccgctgctcccgtgcacttgaacgtggacgccgccccacactcggccccggcacctgaggtgtccgctctggggaggcgactctgggtgctcccagcagggagggagggaggtcaggactctgggcatgctccaccgtggagctttcctcgccagcggggttccctatgggagggtttgtggatccgttgtgtctgtgggactcagcggggccctggggcagggtgagccggttcttggggaggcagtggcagccccatggggggccgcccagggagcgctccatctcccccacctccgacccacaccgtgtctgagagccacctgtgtctcctgcagtgggcagcggctgtgggccacgggcactgttgttcccgggagatgctccctgcgtagaaaatgggagggggaggaggaggtgcgaccaccaccctggactcaggagagggcggcagctccatcttcacccttgactcaggaggggtccgcagcgaggaggaggtgcgaagggggcggcggctccgtcttgcaggtcccctggggcgcgttcttcaggtgc

SEQ ID NO: 33245 - DNA, 163 bp, Homo sapiens; identical to SEQ ID NO: 23761
  chr10:13405100-13405263
  hypo

SEQ ID NO: 33246 - DNA, 356 bp, Homo sapiens
  chr10:134095578-134095934
  hypo
cgctccgggggtgggggcgacaggtgctgggcggggaggcgctacattgtgtaacactcagcagccacgctacacttgggaagagcggatgtgctgaaaatgcccagtgcaggaccaaggtgcgccaaccagcccgcaccacgcccgagaggcttcgcagccgcccaccccggctctcacagcgcccatccctgccacacgccctgccagctgcgccagcttccccaggccgtccagagtcgctgctggaactggaataaagtcctctctgagacagctcctgggtggtttcctgcagttttctggtggctgatgaagagggcagtgccaggcgtcagctacccacctgtgcctgc

SEQ ID NO: 33247 - DNA, 199 bp, Homo sapiens; identical to SEQ ID NO: 15413
  chr10:134477298-134477497
  hypo

SEQ ID NO: 33248 - DNA, 345 bp, Homo sapiens
  chr10:134491036-134491381
  hypo
cgagaagccaggactgctggtcaccttgccgccctcagatgtaccccctttggagaagcctgccgcaggctgttttacaggccatctcgttccatttcagttgctcctcaccgtggtaatcggaaatgttaacgggcgcactcgtctggtggaatttatcgtggccagcgagggcgattaagcggctggtatgtggcgtgtttaccctcgtgtcagcatgactggtgttccaccctggcagatgaaggcccggtccttcctgggctcctaattggggacactacatccaagagccgtgacagggttcagcaacccgcgtgcagaatgccggcttccacggggcac

SEQ ID NO: 33249 - DNA, 1169 bp, Homo sapiens
  chr10:134527015-134528184
  hypo
cgggtatatggccttggctctcctctgcatctggcccttgctgagggccctgaggcgtggccccttatcccctctgaccgcccctgacctccgtctccagagtgatggagccctggtcccctgccactagcctggtcccggggagggtggcaactgcgaggcctgggtgctgctgtgctcgtggccacacactgaggccggccctcagccctgtgcacggccacaccctctgcaggggacctgtccggcctcccggatatctctggagctggcactgacaccgaggcagggatcggtctgagcctggggactgtgctctcaactgcccaccgtagggaagcagcacaggtgggggatgggggcctggggctttgtcagcgacaaagtgactgatgaccgcctgtgccctgggcgccctccctggacagcatgtcagtcgcccagggagaagggcctcacccacaggagcggcgcggttcttcctgcctgatcagccctcggcttgcaggcaccaagcgtctcggggacctcccacggagcccaggagcagggagggccctgccgtgtctgctgttgggtcttggtgacagcggttaggttgtcagcatggcatggcattaaaatgtgtcattgcccctcgctgccatggctccgcggcctcaagaaagcagcctttgggcttttgggccacttttctgcgtctctgcattcccatgaatggctcctgcggcgcgctcagccagccgcagatccggacctccgcggcgtggggcgggccgcgcaacacaaagggcggctctgtcggagtctggaacaatgggtcgccctttcaccgcggctgctaacctcttggcagccaccagcagaccacattctgctgtgcggatcgggcaggacaatgccgcgcggcctctgaatggacgctgccaccaacggggccccattcacggcgttgggaaccgggcgcacattgtctgccccgcagggagacagcgaggaggctcctgcagcctcttcctggtttaatctccccgcgcggcttcccaggtccatgtcccgtatcagctgcggggccggcagcaccaggcccaggagggagggcaggtcccagccctggaggaggatgcaggccaggttaaaacccagaggcaccgtaggaccttcgcacc

SEQ ID NO: 33250 - DNA, 638 bp, Homo sapiens
  chr10:134592912-134593550
  hypo
cgtcggaggtcacgcgagtgcagattggtgagcagcgcccaagggcagaaggctggcagggctgtggcctccccacattgtgctgccgctgccagggctccaccagctcagagcagggcagcgttgcagcccgttttccattcactcacagcctctcgggttctctggatccgggacttgacactttatgctcagggtgggggacagagcctcacaacacacacctggcggcctttgacagcccctgccttctggggctggagtttggacaggctctccccatggggccacccagtgggcagcgggtgtgcaggacaagcagacgggcgccgggcgcgctccgcagcctcatccatcatgacacgcgccgtcacctcgtcaccaagctccgttctgcctccggagccctaaaacaccaaaaggggctcgggacgcgggcggtgctgcttggggagcctcggtgacaagtgttcagtgaggtgtgccgcacgctgcctgtgcccgccgtaatttgtttatctgtccaaagattatgcagttgaaaatccacaattttatgctgcctttgtaaattaccacgctgcgtttgatgaatgtttctccacttctgcggaggcgccgcttcacccgcgagaggc

SEQ ID NO: 33251 - DNA, 467 bp, Homo sapiens
  chr10:134607715-134608182
  hypo
cgccccctgctgatgggcacctcccgacaatggcgcctcccagtgatggacgcctccacaggtcctcggggccccttcccgtccaggtcttcacagaggccccggcactgggtgcccagtggcctcggcagccgtgtctgcgtgacagaagccgagcgtgggacggctccagctcaggactgtctgagccccaccctgcgagggtgctctgagctctcagggcgttgcttctttgcccatttatcccgggtcttgggtgagttccagtggcggacagagctcagacaagagcagtgctcgcagcagcgccagcagggacagtggcaatacgagggtcacaggtgtgatcggaggccgccagcctgtgctgggtcaccgtgcggtgccagtgaaggtgccctctgcccaggagctgtgggggagccgggggtgccgccaggacgcagtgtgggtcgctgggaagaccc

SEQ ID NO: 33252 - DNA, 413 bp, Homo sapiens
  chr10:134610534-134610947
  hypo
cgtcaagcatgaacctggatgtgcctggcctggtcccgggccctcagcctcccaacgcccctgcgcccgttctcactggcacggctcagtgtccacaccgggccagcagcgcaggaactggaggctctgcttcgtgatttccgcagtggcagatgacaggaatcaggttcctgcgggtggcagcggatgggggtgcagaactgcctttttgctgtttgcctgtttaccctctttgtgcccgcgccaaggtgggagccgctacacccagggaggcgctggagcgtgtgcggaggtcagagcctgatgccgcctcggtctctgggtgccggggcagccattccttcaaacaatggggtgcttccaaaccggtgcctcgtgaggaattgggaaagacaggagattgtcatcatcac

SEQ ID NO: 33253 - DNA, 774 bp, Homo sapiens
  chr10:134664625-134665399
  hypo
cgacggaagtgtagtcactggtgttctgcagatagtccgccagcagcttctccagggacccctgctcactctgctgcccgtgggcctcctcccagatgaactggagcatgtccagagccatttccacgaggccgagcttgaggcgcgccagcttcctcatcaggggcgtgttgacgttctgcaactgagggggtcaggcatgcctctgaagcatggaagcttctggtaagcctgaatctacatccccacaacttggatgaggcataaccgacgtaagaaactcataacaaactgcgcagatctacagtggaaaactgacacactttgatcacgaatacacccgtgaaaccatcaccaccttcgagataatgcagtagcccttatccccaaatctcttcgcgtcccctcatgttccctcccggtcacctagctgcctgccggcaccctgcattccttggcattttccagaaccgtacctaagtggaggcgcacagagtgctgtctttccgtctggttcattttcctcggtaaagtcaccgtgagactcccccacgcggctgcacgcatgctccttccctctcacagccggcgtcggtgcaccgtgtgcacgcgccacaccctgcttatctattcaaatattttatttccagttctggggctactaccaataaagctgctgccaacattcatgtgcaaggtatccacagatcctgatccacagacgtggtatgttcctccatttacttaggaattctcagatcctgatccacagac

SEQ ID NO: 33254 - DNA, 223 bp, Homo sapiens
  chr10:134729798-134730021
  hypo
cgtttcctcgtagtaacagcaaactacgcctggggtcttgcgaggaacgacggctaaaaacaggagaggccacgtcaccccattttctctttcatggtctcagtcatttacgtgacgatggacacgtcccccacgcaagaagccggtgtccttacgaatgcaaagggtgtccctccccacgccagcctgagtgcaggggacactctgacccacggccccgggc

SEQ ID NO: 33255 - DNA, 1457 bp, Homo sapiens; identical to SEQ ID NO: 23762
  chr10:134732799-134734256
  hypo

SEQ ID NO: 33256 - DNA, 294 bp, Homo sapiens
  chr10:134795881-134796175
  hypo
cgtgggcagtcccacgagcaacacgccagcgccccaaggctggccacgggcaggacgcagagacagacgcgtcattagagcatgggcgcggcgtgtccgtggcacgtgaggccccgggccctgcctttgctttcggtctctgtgcacgctgcctcctgacctgatggtccagttgcctgcggaagtaggtctgtgcacagtggaccttttaaaagagacacgaaacctgggagggcctggccttccctctgtgcgctgctgctgtttgtctttttcctcagcttcccgttgttc

SEQ ID NO: 33257 - DNA, 449 bp, Homo sapiens; identical to SEQ ID NO: 29686
  chr10:134875690-134876139
  hypo

SEQ ID NO: 33258 - DNA, 1463 bp, Homo sapiens; identical to SEQ ID NO: 30907
  chr10:134941662-134943125
  hypo

SEQ ID NO: 33259 - DNA, 680 bp, Homo sapiens
  chr10:134996273-134996953
  hypo
cgcagaggggcggggccatggccagcacagatctaggcccaactgcgcgggcggcgagggcgcgggcagtgtgggcgcaggtggtgtgggcgtgggtggcatgggcgcaggcggcaagggcatgggtggcgtgggtgcgagcaatgtgggcacggacggtgtgggcacaggcggtgtgggcacaggcggtgtgggcacaggcggtgtgggcacaggcggcgtgggcacaggcggcaagggcatgggtggcatgggtgcgagcagcatgggcggcgtgggtacaagtgaggagggtgtgggcggcgtgggcacgggcagtgtggacgtgggtggcggcaggggcggcaaaagtgtgggcggtatgggtgtgagcagcgtgggcgcgggcggcgagggtgccagcggcgtgggcgcgggcggcaagggtgtgggcagcgtgggcacgggtgctgcttcccctcaggggaatctcacgattcctgaaacttgagctcctggcccggagaagtgctggccgcggtcggggtggcgcacacgcagagactctggagctgacagcctgtcgtgcccacaggcgcacatctactctctgggggccacgctgaaggccgccctcgagtacgtggcagagcccacactggaacccaggctgagccaagacctcgaggcgctgctgagcc

SEQ ID NO: 33260 - DNA, 451 bp, Homo sapiens
  chr10:135001969-135002420
  hypo
cggacatgcctctccaggcggcgggccctggcaaggggtgtccacactgacctcgccgctctcctgcccacagtgggtgtccctgcaggacctcctgtcccagctgggccggcccttccgggagtacgagctgtgggccctgtgcctggcctgcctccgcgcactgcagacacgccctgagcacccaggtgacgcacgcaccatcccatcccccccgccgtccccaccccccactgctgttccaccccccaccgccgtcccacacccccgccgtcccaccccccacaccgtcccacgcccccccactgtcccatcacccctgccgtcccatgcgtaactggcccccacctgaaccaagggacccaggggcagccaggacagtgtctccggtgaacggaacaggcggctcccgtctggagcaccttgtgggtgcctgctgggttgcagcacc

SEQ ID NO: 33261 - DNA, 313 bp, Homo sapiens
  chr10:135153722-135154035
  hypo
cgtcccctccgcctttgtgctgggtcagacccagctgggtttggctctcactcaccctgaggatggccctggcgcccgcatggtgcccagcacacagaaggcgctccataggcatttgcctgagtgcggctcccagctgtgggtggtcagcaatgacaggagcatgcgttggtgatgccttcgttttcattgctaaaccgtaacccattgttcccgctgttaactcatggacatgccgcgtttcatccacgctgaacggtaacccgttgttactactgtctttttgttttgttttgttttgtttttttgagac

SEQ ID NO: 33262 - DNA, 596 bp, Homo sapiens; identical to SEQ ID NO: 15431
  chr10:135269764-135270360
  hypo

SEQ ID NO: 33263 - DNA, 443 bp, Homo sapiens
  chr10:13771131-13771574
  hypo
cgcatggaaagcgttcaggtccactcagactgtgctgcgatctgaaagaatgataacatacgagaaggccctttggtcctacactgtgaatgagtaaggggcagctgcaaaatgctaagaatgctgagtgcattaagtgaagtgtttctcccaggtgtgcacagggtgtggcttccaaggggaatgtggatgctggaatgagggaggcagccacctaggccggtcaagtcagaggcccagcaaggagaaagcgagccaaggcaaacgccgacagaagagaacgataaatccgcggcgcactcggcagaacgtacaccgcaccgcataatttagcggggcaatgccgccgggagtccacgccaagttaatggaatatttcctgtaaatattattttcccttcctgtctcatcatctcatttcattcaaaaatctttactaatcc

SEQ ID NO: 33264 - DNA, 462 bp, Homo sapiens; identical to SEQ ID NO: 30911
  chr10:1506151-1506613
  hypo

SEQ ID NO: 33265 - DNA, 341 bp, Homo sapiens; identical to SEQ ID NO: 30912
  chr10:1558541-1558882
  hypo

SEQ ID NO: 33266 - DNA, 277 bp, Homo sapiens; identical to SEQ ID NO: 15437
  chr10:22042735-22043012
  hypo

SEQ ID NO: 33267 - DNA, 73 bp, Homo sapiens
  chr10:22567321-22567394
  hypo
cgacagagcgagactccatctcaaacaaacaaacaaaaaagaacgtacactccacagtgttcgagcgggcagc

SEQ ID NO: 33268 - DNA, 300 bp, Homo sapiens
  chr10:24841764-24842064
  hypo
cgccttgtttcaaaaataaaatacaatgtcctagtggcactataacaaaggtataattattaccgtgccatgcacgcacccatcagcagaattcacattcagagacgagtcgtaccggggactcgaacgctgtgaatggctggtaatgtgacttttcccaaatagcgaatgacttggttgaaagctttgaacaaagcagaatacgactctccctcactttacacgttcctgaaaaattttattgcacattttgaggctgcaaaagtgtttaaatataaaataaaattggcctctacactc

SEQ ID NO: 33269 - DNA, 223 bp, Homo sapiens; identical to SEQ ID NO: 6743
  chr10:24863037-24863260
  hypo

SEQ ID NO: 33270 - DNA, 100 bp, Homo sapiens
  chr10:24908428-24908528
  hypo
cgccaggcggactggtactcgaggcttttctttcctccattctttttatgtggacctctcgacgtgcatcattgggcagccagcaggtagtgtctgaccc

SEQ ID NO: 33271 - DNA, 543 bp, Homo sapiens; identical to SEQ ID NO: 15441
  chr10:3121888-3122431
  hypo

SEQ ID NO: 33272 - DNA, 227 bp, Homo sapiens; identical to SEQ ID NO: 15442
  chr10:3194438-3194665
  hypo

SEQ ID NO: 33273 - DNA, 517 bp, Homo sapiens
  chr10:3196890-3197407
  hypo
cgtttttcgtatattctgaatacaggcctttatcagacaccatttttgcaaatgttttttcccagaggccaaactacctttgagaatccatttgggtccccttctctcccgtggcctcctcccttccttcgttccacccggctgctcccccagcggctgccaatccccgtctcacttttcttttcactcccaccatcctggcctaggtcgtcatgtcatgcttaggtgtctaattgcctctcagcagttttctccatccaatttctctatttttctgcaaaactatcctgaatgaggctgcagctacactgctcactgacccgacagttctcctgccttaatacatgaagcacccgtgtgctccccatcttccatacaggccctccccagagccacagggcacacctgtctcccccacacacgctgtcctccctccatgcccaccgctccaccatccctgtgtgcctcacgcctgtcccacagaatcctggtgctgctctgtggctggcacacaccc

SEQ ID NO: 33274 - DNA, 547 bp, Homo sapiens; identical to SEQ ID NO: 30920
  chr10:3678612-3679159
  hypo

SEQ ID NO: 33275 - DNA, 1067 bp, Homo sapiens
  chr10:43892074-43893141
  hyper
cgcaaggtgggaggcccgggcgcgcggtaaacgtgttttggcgggaagcagcgccgaggccccgagacaaggtgacggcgacgttcccgcggcctgctcacggcactccagcagcctcggaccgcccggcccggcaggaaggtcggccccagggcctgcgcgggctcgggcgggagcttccgggcggggggcggagcgagcggcgcagcggggagagtgggggcagggacgggagggttcccggagggaagggcgcctcgcgggagggggaggggaggggaggggaggggagggggcccctggcgggcttccggggccctgagggcgagagcgagggcgacggcaaggtggggtgggggctgctccccggcccgccaagctagcgctgcctaggcgggagctcggggacccgcgggccgagcgcggctgaagggagggaagggaagaggcgctcgtaggtctgcgtccgtctccgagcgaccggggcggcggaaagggacctggggggggcggccgggactggagtggcggggccggggcgcccgcgcggcggctcaccacgccagggactggcccgtcggccccgaggaggcgcggggtccggagtccgggaagcggaggcctcgtgatccaagaccggcagccggacgtgggtcacggggtgcagaggaggaagtgccattgccgggcccgccaagatgtcaccaatgggaaacgcgtgcctgcaggtgcggccccgtggcccgcgcgctgggcccaggcaggaagtgggggaaggagagagtcagggcggcgggaagacatttctccgagttctcccgaagggagccaggcgcgagcgcgacctggggaaagtccagagtgccagccacggggaagggcgggcagtgcagagtggaagagaagccagcaagttagacacagcccctctctgggaggccgcctctaaaatggaactagcggacgtaccttggtttgtacatttgaccatggacacacgtaaagattttgaaaaaaaatctttgaaaaaaaatttttttaacgcaattcctaaacttttaactaac

SEQ ID NO: 33276 - DNA, 217 bp, Homo sapiens; identical to SEQ ID NO: 15448
  chr10:44163386-44163603
  hypo

SEQ ID NO: 33277 - DNA, 125 bp, Homo sapiens
  chr10:49652955-49653080
  hypo
cggctggctcgcgtgtcagtggccgagcaaagacagacgccactctccccagcccctcctgagctccggcatccagaccttgatgctgctgagggccctgagcaggtgcccgcctcctggtggac

SEQ ID NO: 33278 - DNA, 424 bp, Homo sapiens; identical to SEQ ID NO: 23449
  chr10:5538706-5539130
  hypo

SEQ ID NO: 33279 - DNA, 218 bp, Homo sapiens
  chr10:6161993-6162211
  hypo
cgcctccacctccttgcttcttactgcctcttccactcagcccacacttgcagaatgaggactgcgtcgactacaaattagacctctgcttccaccaggcctccttgatagttcagctaagagccgtgcggtgagtctcctgacgttttatggcacttgacgctggtaaccactcccttcccgaggacggagaccgcggccctgccagtatcgctcac

SEQ ID NO: 33280 - DNA, 285 bp, Homo sapiens; identical to SEQ ID NO: 29717
  chr10:7215989-7216274
  hypo

SEQ ID NO: 33281 - DNA, 217 bp, Homo sapiens; identical to SEQ ID NO: 12153
  chr10:72765340-72765557
  hypo

SEQ ID NO: 33282 - DNA, 238 bp, Homo sapiens; identical to SEQ ID NO: 15453
  chr10:73514960-73515198
  hypo

SEQ ID NO: 33283 - DNA, 157 bp, Homo sapiens
  chr10:75384244-75384401
  hypo
cgtgagtcaccgcgcccagccaaaaagccattattctaattaatgcatttgtgaacctcaacataaaaaaatccagttatataatcacaagagagttatccctttcaaatgtatacctacaaaagatagaaaaatgatcagaaaacttgtatctgtc

SEQ ID NO: 33284 - DNA, 297 bp, Homo sapiens; identical to SEQ ID NO: 15454
  chr10:7618377-7618674
  hypo

SEQ ID NO: 33285 - DNA, 404 bp, Homo sapiens; identical to SEQ ID NO: 15455
  chr10:76998426-76998830
  hypo

SEQ ID NO: 33286 - DNA, 185 bp, Homo sapiens
  chr10:77892406-77892591
  hypo
cgtgtatgtttacatgtgtaggtgagcgcatgagtacgagtatcggagtacgagtatcggaggaacaatgagctggagtccactagagagtgaaacttacagagtcttgaccattcatcattctgattctcagatttcaccagctgacaagcaccttcttttttggcggggggggtcagagtttc

SEQ ID NO: 33287 - DNA, 258 bp, Homo sapiens; identical to SEQ ID NO: 15458
  chr10:851928-852186
  hypo

SEQ ID NO: 33288 - DNA, 401 bp, Homo sapiens
  chr10:978663-979064
  hypo
cgaactcccgccccacacctgagacgaaggtcccggccccgaagtcccaaccccacacccgggaccaaggccccggcactgccccgaacccccgccccacacccctaaccaaggcctcggctcagccccggaatccccaaccccacacctgggatcaaggccccggcccttccccaaacccccaacccacacccgggaccaaaaggccccggccccacgtttcctagaggcgctgggttcgggcccacgttgcaacgagtcagatgctcttggtagctcagggaggtgttcacactcctgccgtttccgtgaggatggtgacgactccgaactatagcagcatactctacctacccctgatcagtttatggaagaaaaggaaaccaaacaaagtatgttgc

SEQ ID NO: 33289 - DNA, 332 bp, Homo sapiens
  chr11:1082528-1082860
  hypo
cgccgggccacactctgcctccctgcctcactgcccgtccaccttgctctgtcgcccagaggtgcaaatatgacacgtgtaactgtcagaacaatgaggactgcctgtgcgccgccctgtcctcctacgcgcgcgcctgcaccgccaagggcgtcatgctgtggggctggcgggagcatgtctgcagtgagtgccgtccccgtgggctgcatcctggggatggggtccgggctttgagctcctgggacggggctgggggccctgagcacgggtggtccagggagaggggtcggccccctgcagccacggaccaggctccagcttcgtcagcc

SEQ ID NO: 33290 - DNA, 171 bp, Homo sapiens; identical to SEQ ID NO: 15462
  chr11:110144196-110144367
  hypo

SEQ ID NO: 33291 - DNA, 253 bp, Homo sapiens
  chr11:112370531-112370784
  hypo
cggaggcggccaccgcgtgcaggaagggtctcccaggtggccggagaacccacaggcgtgtacggacaaggtgccctgggtgccctggctgacccctggtcagcccggccaggggtagagaccttcccggaaggcgaagatcgcataggtaactgggaaagtgtgttttttgaggtgggggaaccccatgcagccaggtcagggctgcagggtaggccgcctgccccacaatcagagcactgcctcgttaccc

SEQ ID NO: 33292 - DNA, 236 bp, Homo sapiens
  chr11:113552734-113552970
  hypo
cgtacgggcggcaggcccttctcttcctcctcctgagtgggctcaaccactcgaagccagcacctataacatgctgagcccgcaccgggctctaggaaccagaaatcagagtgaccaggggaaactgggacatcgatatgcatggcttgccggagtaacactacacctgactcaccttcctagcctcccgcaaattgccagagaagttctgggcctaggagggccaggctgtttgc

SEQ ID NO: 33293 - DNA, 233 bp, Homo sapiens
  chr11:113560972-113561205
  hypo
cgtccaggtagccagcgcaaagcatgcggggggtgagggctccgctgtacacgcaagagctgttgcagagctgagtgctgaacaagggcaccaccgtgtcctggagcatatccgagctgtaagctatgagagacaccgagaaaaactgcagggcacaaagcaaggcccaggcaggcagagcagcaagaggggaggtaattcgaagtcccagagacagggagacccaaagaggc

SEQ ID NO: 33294 - DNA, 591 bp, Homo sapiens
  chr11:120998452-120999043
  hypo
cgcgtcagtgtccacagtgcagtgcccgagcttcagccactactccgtgtgcacaagcagctgccccgacacatgctccgacctgacggcctcgcggaactgcgccacgccgtgcacagagggctgcgagtgcaaccagggcttcgtcctcagcaccagccagtgcgtccctctgcacaagtgcggctgcgacttcgacggccactactacaccatgggggagttcttctgggccacggccaactgcactgtgcaatgcctgtgcgaggagggcggggacgtctactgcttcaacaagacctgcggcagcggggaggtgtgcgccgtggaggacggctaccagggctgcttccccaagcgggagaccgtgtgcctgctcagccagaaccaggtgctgcacacctttgacggcgcctcctacgccttcccctccgagttctcctacaccctcctgaagacctgccctgagcgcccagagtacttggaaatcgacatcaacaagaagaagcccgatgcaggacctgcttggctgcggggacttcggatcctggtggccgaccaggaggtcaagataggaggcatcggggcttc

SEQ ID NO: 33295 - DNA, 340 bp, Homo sapiens
  chr11:130781427-130781767
  hypo
cggcattctcctccccgatccctcccataaaccaacaggccaatcagcgtggctcgacgtgggaagcaagcgggcagtaggggttggggaaactcctgacttttgatgaactttcgtagatctggtttctcctccagacgggtctgcagattcaagaactcccgatagcgacgattcacagtgtggtaggccagctgctgcaggccgctgctgttttcaccgtcaagggctgtctcgtactgttcaacgaacaaattgattgactcaatcagccgggtttcagcaatcttctattctggctttactgactacttggtcaatggccacatagcaagagtac

SEQ ID NO: 33296 - DNA, 353 bp, Homo sapiens
  chr11:133703500-133703853
  hypo
cgcggccgcgcggcgccctgatcgcgcgtctcaggccccgctggaacccggggcctccctgcccgctccactccttcccgcggcgcacccccgccctccgcctgcccctgccctgctggccccccgccaggcagcctctcccgcatcggagaccacccgcccggttttcatgtcccggtttggctgggtgtctaaactccgcctctcgggatgggacagagccccaccccacctcgcagtggacaccccaggacagtggcttggtcttcacaacactgggtgcggttcatggagcagcacctcgcattgctccctgcagtgacccacgcaggaggccgcctgccctggtggac

SEQ ID NO: 33297 - DNA, 879 bp, Homo sapiens
  chr11:1466353-1467232
  hypo
cgtggcctgcgctgggtgcggggtgcgggcaggacgcaggaggcctccccgggctgggcacagggagagtggcaggatgaagggccccaggtgagggcgggcgtcccaccctcgcagccgcccaggcccggccggagctgatgagcgggtggcccgtcctgtgtccacagagggggcaagaatgagcccgaaccagagcagcccattcctcgcaaggtgcagatccgctcgctgcccagcctggaggacatcgaccccgacgtgctggacagcatgcactcactgggctgcttccgagaccgcaacaagctgctgcaggacctgctgtccgaggagtgcgtctggggctgctcccgggtggggcacggggcctgaggtgggagcgctgccccggaggagccggcggccccgtgtgccagcgcgtctcgcgcctctcgcccgctgtagggagaaccaggagaagatgatttacttcctcctcctggaccggaaagaaaggtacccgagccaggaggatgaggacctgcccccccggaacgagataggtatgggtccaggggtggcctccagcccggcctgcactgccccaccggggtccgggggctgtctggcctgaccttcgtctgtactcagaccctccccggaagcgtgtggactccccgatgctgaaccggcacggcaagcggcggccagaacgcaaatccatggaggtgctcagcgtgacggacggcggctccccggtgcctgcgcggcgggccattgagatggcccagcacggccagaggtgtgtgtgccccgaggctgctgggcctccctccctgggccctggctgcgcggcactgccgcctggctcatcgctacccattggcctggggtctc

SEQ ID NO: 33298 - DNA, 591 bp, Homo sapiens; identical to SEQ ID NO: 28450
  chr11:2209823-2210414
  hypo

SEQ ID NO: 33299 - DNA, 302 bp, Homo sapiens; identical to SEQ ID NO: 15470
  chr11:30445742-30446044
  hypo

SEQ ID NO: 33300 - DNA, 559 bp, Homo sapiens
  chr11:32354840-32355399
  hyper
cgccccccacccccacccccggccgtatttctccctaggctcttattaaaaccaggtgcacggaaggcggcccattctggacagaaaagctttcgtttgacccaaagctcccccttccggcgtgttttctagagggaattcgtgagctgagccgaggagcgagcaggcggcttctcctgaccggggagacgcgggaggtttgcaaacagaccttggcctgggctgcgcagggacaaagtgttcaagggcagcaggggaggctgagggagtacacggctgggaacaagggacactgccgcccccagccacgcaggagcggtgtctgcaccactgaaagtcccccggggcccacagctctatccaggcggaagggaagcagccaggccgccgcggatctgaacttgaatcccgggtggaccggacgccccggccggcgctcctgacgcgcggaggagctggcgagaacctgcagatctcagggctcgcccgcggtccggcgctcggttcaggacgtccgggaaccccgcagcgcttaccctctgcagcaggcgtcgctggc

SEQ ID NO: 33301 - DNA, 261 bp, Homo sapiens; identical to SEQ ID NO: 26213
  chr11:35684937-35685198
  hypo

SEQ ID NO: 33302 - DNA, 155 bp, Homo sapiens; identical to SEQ ID NO: 10205
  chr11:36476175-36476330
  hypo

SEQ ID NO: 33303 - DNA, 79 bp, Homo sapiens
  chr11:4095798-4095877
  hypo
cgcgatgagatcaaccttgctaagcaggaagcccagcggctgaaggagctgcgggagggtactgagaatgagcggagcc

SEQ ID NO: 33304 - DNA, 1645 bp, Homo sapiens
  chr11:487212-488857
  hypo
cgtctggatggtgctcatggtgggcagggggcccctgctctctaggctgtcgtggacgtggtctccacaggccacggcagcacctgtgagtccctggccttcttcccggggtctggcaggtgctgctcaggtgtgggctgatctgccggtgtggggagtgggggtggctgtgccccagggtcaagggtcataccctgtcgcccacaggacaagttggatggctttgttcccgcgcactttcttggctggtacctgaaggtacggcacctcctcttcccggcctccccgccccggttctgaggcctgccgtgggctctggaccgtttctgtccatggagttgagctcagggtgctctgagtgtggtgggagggtgtcgcactgcagccacccagaggttcgagaagccgtggggctcccggacctcccagaagccctgatcctggtcgggtccccgctccgtcctcagggtcggggcggtggaaagaggcggcagggcaggaagtcccgcccctgcctgggcttgggcactgccccatcccacttctgagggaccctgtgctacctatggggctaagagcagtgcctgcttgaccctgcagcccaccctggcagagtttggtgtcaggccccgggcacggggatgctgccttgtttgctgacagtcgtacatcgaggctgctggaggggcagccacccaccccacgctcaccctgagacctcactgggggccctgccagtgctgtcgactccaagaatgctgccagccggggtgggggctgcacgcacccgtgggcagggccgggcgtggcctgcgtcccatactctggctgccagccgggtgggggctgcacgcacccgtgggcagggccgggcgtggccggcgtcccatactctggctgccagccggggtgggggctgcacgcacccgtgggcagggccgggtgtggccggcgtcccatactctggctgaccctggcgcccacagaccctgatgatccgagactggtggatgtgcatgatcatcagcgtgatgttcgagttcctggagtacagcctggagcaccagctgcccaacttcagcgagtgctggtgggatcacgtaggtgccagcacagcccccggggcagtcggtgcaggctgaggggcattctcggaacccctgtgcccagcgcggcccctggaccccctcattctccccggggggcagtgggtgcaggctgaggggcattctcggttcccctgtgctcttccggggtcctcctcggggggctcgttacccctcacccctgcaacgagtgctggcccctccctgcagtggatcatggacgtgctcgtctgcaacgggctgggcatctactgcggcatgaagacccttgagtggctgtccctgaagacgtacaagtggcagggcctctggaacattccgacctacaagtacgtcgtgggggctgcgagggcagggccgggtgggggttacctggaggcagcctcagcgtccgtgctccagcagaccccgagcaccaggcccgtccagtgtgcggctcaggaggggtgaccgtggggctttgcctcctggaacctccctctgacctggtgtcactcaagcccggccgcccctcacagtggccatggcgtctgacccac

SEQ ID NO: 33305 - DNA, 1608 bp, Homo sapiens
  chr11:561903-563511
  hypo
cggggtcaggcaggccgggcaggtagagctgaagtgggacctggtggtccagctccatggtctcccccaaggagagtggggctggttgctgatcctttttgttcttcccaactcttcaagccaggtggacagagagtcggggggacataggctgaccttctcctcttcttcccaggccagactggccgctttgtgcttgtgcagcggcttcgggagaaggagcggcagttgctgccacaagagtgtccagtgggcgcccaggccacctgcggacagtttgccagcgatgtccagtttgtcctgaggcgcacagggcccagcctagctgggaggccctcctcagacagctgtccacccccggaacgctgcctaattcgtgccagcctccctgtaaagccacgggctgcgctgggctgtgagccccgcaaaacactgacccccgagccagcccccagcctctcacgccctgggcctgcggcccctgtgacacccacaccaggctgctgcacagacctgcggggcctggagctcagggtgcagaggaatgctgaggagctgggccatgaggccttctgggagcaagagctgcgccgggagcaggcccgggagcgagagggacaggcacgcctgcaggcactaagtgcggccactgctgagcatgccgcccggctgcaggccctggacgctcaggcccgtgccctggaggctgagctgcagctggcagcggaggcccctgggcccccctcacctatggcatctgccactgagcgcctgcaccaggacctggctgttcaggagcggcagagtgcggaggtgcagggcagcctggctctggtgagccgggccctggaggcagcagagcgagccttgcaggtgagcccggggacctgatcccctgtcactcccccacccctgatatgggcagatacggggatcacagggtcccactcgggaggcaggtgagcccggggacctgatcccctgtcactcccccacccctgacgtgggcagatatgggggtcacagggtctgactcgggaggcaggtgagcccgcggacctgatcccctgtcactcccccacccctgacgtgggcagatacgggggtcacagggtcccactcgggaggcaggtgagcccggggacctgatcccctgtcactccccaacccctgacgtgggcagatatgggggtcacagggcccgaccagggaaagtgctccctccggagcacaagggctgtggagcccagtggctgtgcctcctaaggatctcatgtgtccccaggctcaggctcaggagctggaggagctgaaccgagagctccgtcagtgcaacctgcagcagttcatccagcagaccggggctgcgctgccaccgcccccacggcctgacaggggccctcctggcactcaggtcggagtggttctggggggaggctgggaggtgaggacctggcccagccccactccaagctgacttcccaacccacagggccctctgcctccagccagagaggagtccctcctgggcgctccctctgagtcccatgctggtgcccagcctaggccccgagggtatgtctgtgccccacctccccctggggcacc

SEQ ID NO: 33306 - DNA, 171 bp, Homo sapiens; identical to SEQ ID NO: 15477
  chr11:591108-591279
  hypo

SEQ ID NO: 33307 - DNA, 156 bp, Homo sapiens; identical to SEQ ID NO: 15478
  chr11:5950927-5951083
  hypo

SEQ ID NO: 33308 - DNA, 197 bp, Homo sapiens; identical to SEQ ID NO: 15479
  chr11:63675233-63675430
  hypo

SEQ ID NO: 33309 - DNA, 95 bp, Homo sapiens; identical to SEQ ID NO: 15480
  chr11:63675675-63675770
  hypo

SEQ ID NO: 33310 - DNA, 738 bp, Homo sapiens; identical to SEQ ID NO: 23456
  chr11:64951346-64952084
  hypo

SEQ ID NO: 33311 - DNA, 443 bp, Homo sapiens; identical to SEQ ID NO: 15483
  chr11:65123957-65124400
  hypo

SEQ ID NO: 33312 - DNA, 559 bp, Homo sapiens; identical to SEQ ID NO: 15484
  chr11:65386927-65387486
  hypo

SEQ ID NO: 33313 - DNA, 893 bp, Homo sapiens; identical to SEQ ID NO: 15485
  chr11:65397153-65398046
  hypo

SEQ ID NO: 33314 - DNA, 136 bp, Homo sapiens
  chr11:65511334-65511470
  hypo
cggcagcccgtcgggagctgcagctgccaagatgcaggctgcagcgtgggagtcgcagaggaggaggcacagccggggctgtgtggcccaaggggccagcgggagctgggaacaggtgaaagcctcaccccctgcc

SEQ ID NO: 33315 - DNA, 168 bp, Homo sapiens; identical to SEQ ID NO: 15487
  chr11:65761126-65761294
  hypo

SEQ ID NO: 33316 - DNA, 563 bp, Homo sapiens; identical to SEQ ID NO: 30985
  chr11:66633455-66634018
  hypo

SEQ ID NO: 33317 - DNA, 499 bp, Homo sapiens
  chr11:69206214-69206713
  hypo
cgggcgagctgaggaaaaggctcaggggctgacagatacagggactgagcgcggctaggatagccctactgagggagccagaggggccctggggagatgcctggcgggcccgtctcctagcgactgacgtcccgccaccccacgggccccttgtgctgggcactgcccacccctgacactggctgcgagcacttttcactgctgttctgcatgaataagcgccaggcctcttgccaattgtccccctcttaaaaggcagccccggcgaaaggccttttcaagtgggatcgcacagtgccacccaggccgggcgggcattgttttggggagccagggtcctgcttggccgccggggtcggggggcccacaaagcatggtgatggcggctccacgcactcagcgcagcagccctgcttattaatctgcaaaactcacaccgatgcctttggaggggagattgagtgaaaacgatgtccttaggggagtggcctttgcaggc

SEQ ID NO: 33318 - DNA, 731 bp, Homo sapiens; identical to SEQ ID NO: 15492
  chr11:71725587-71726318
  hypo

SEQ ID NO: 33319 - DNA, 866 bp, Homo sapiens; identical to SEQ ID NO: 30989
  chr11:71955497-71956363
  binary

SEQ ID NO: 33320 - DNA, 250 bp, Homo sapiens
  chr11:72109417-72109667
  hypo
cgaatcaagtcgcccgagagcggatactcagccattgtgtccagttttaatcctgtgttttcccaagtaattaagccttcttgcttatgaacttgtgactaagtaaagcatcaccgagaggttgtaacatcaaagtgccttccaccgtctgtccgtgtttggtaaaattggatttcttttccttcttaaagaaaaactaattgaatttagctgaaggctgtgtatatttgcacaagccggtgaaggctac

SEQ ID NO: 33321 - DNA, 120 bp, Homo sapiens
  chr11:73310307-73310427
  hypo
cgccaaaatattagcaatgattatcttgggggaaagggtgtcagattgcacgtaggttttttttgttttttgagacggagtctggatctatagccaggctggagtaaagtgggggcgatc

SEQ ID NO: 33322 - DNA, 416 bp, Homo sapiens
  chr11:73685713-73686129
  hypo
cgccaaggttgagcttgctttatggatgacaagtgggctaggctgggctgtcgggggcaggacgaagattctggctgaactttccaagggacgggacgcttgggatcctggctggtacgaggcctcccacactgtcaaatgtcaactccaccagcactgagacaatgagtagatgagaatgtagaaagagggaaggtggtaggtaaaggagcggaaggaagaggtggggaaagagggaaggagagaagggaaggagggaagagaaagaaggaagaaaaggaaagcatggcccggctagagacaaagccagaggtgatcaggtcagcagcaggagaggctcagaagggagcctctcgggaagtgcaggcagccatgagggctcgtttcagctgctcataggtgacgaacatcaccac

SEQ ID NO: 33323 - DNA, 888 bp, Homo sapiens; identical to SEQ ID NO: 30993
  chr11:763192-764080
  hypo

SEQ ID NO: 33324 - DNA, 782 bp, Homo sapiens; identical to SEQ ID NO: 22775
  chr11:76381512-76382294
  binary

SEQ ID NO: 33325 - DNA, 68 bp, Homo sapiens; identical to SEQ ID NO: 15497
  chr11:9548334-9548402
  hypo

SEQ ID NO: 33326 - DNA, 496 bp, Homo sapiens
  chr12:108926063-108926559
  hypo
cggcccggtgcagagccttccggcagtgctgggtgtcaccatgagctctaaggcagaaaacaaaaagttgctgccaccaggacacaaagtggaaggcactcgaagggagaggccgtcttctcccaggtagaaactcactcttcagtaactctagcttctgagaagaccttagctttcagatctatccatgatgctttctccttccagagtctctacagtcacctacgaagtatttccctgaagcactctctccctcagccatgtaggggctactggaaagtgtacctgatattgtgatctgcaaccagcattctgcctttacagcattcacatgtgcggcacatggcgggggagtccaacagctctctgtaacctgatacagtccccagggaaattttactatggcgtcctactgacaggagagttatgaatccagggtagtgtcaaatttcatacccagagtcagatcttttttttttttttgaaagggagtctc

SEQ ID NO: 33327 - DNA, 323 bp, Homo sapiens
  chr12:111369084-111369407
  hypo
cggatccagcctcaacgacccagatagccctgcagtggctttcttgtccctggtatttttagccctcggtcatctatcttgcctgcactggggacagcggcactcagacaagcccatttttactggtgcccttcagatgcccgcgggctcagctgtctcggtgcctggcattccgggggtattgttcctctctacgagtcccagattccagcaacagctgctgccccaggctcccccgccagcttccccctgcgctccccctgcccgcctgccagagcccccttgctgaagaacgtggcacagtgacagccgaacctggtccc

SEQ ID NO: 33328 - DNA, 101 bp, Homo sapiens
  chr12:112591875-112591976
  hypo
cgggaaccatgcggccagttctttgcagaggcaggtctctgaaaagaattatcctgagagaaaaaagcttcgtctgcatgcactcgcgcacacacacaaac

SEQ ID NO: 33329 - DNA, 603 bp, Homo sapiens
  chr12:113541518-113542121
  hyper
cgtcgcatacgccaagcagcgtcctatgctctttgtgtaaatcaagtcatttaattatcacaactccacgagataggcactgttatcaacctcatttcacagttgaggagactgaggcatagagaggttgagtaacttgcccaaggttgcacagccagcccaggcggaagtgggacacccgctgattgacgggtggggagggcggagcctgcagtccgccctgccccctcacctgagcgctcagcctggaggcagcaggtccagcgcgcgctgcggaaggcaccggggtggcaggcggccagcttgttcgggttgggggcgctggccttgcgcaaggccgagagccactggttgagctcattcacattctgcagcgggtgggaggcgatcagggggcgggtgggaacagagggacgccccccgctccccatcgcggtggggtctcaccttgcactggaggtaggtggtgtgcagcgcccccgtgccgtcctgcgtcaccacctgcatcacgtggggcagttggaaggcgccctcgtctacgcgctccacggcgcggatgtgagacacggggatggagtgacacatctggggaagaggattgtc

SEQ ID NO: 33330 - DNA, 772 bp, Homo sapiens; identical to SEQ ID NO: 31007
  chr12:114273212-114273984
  hypo

SEQ ID NO: 33331 - DNA, 491 bp, Homo sapiens
  chr12:116755893-116756384
  hypo
cgtatgggaaacaggggtagtgctttgcctacctcgggagatagggggatgattcattagctatgcctggtatgtacctggcatgcagaaattgtttcatgaacgtctgctgtgatggcaaacctttcgggtagatccatctagtttctcacgcgtgcggcaagcggctgccgtgtttaccgaccgtcctgtgactgtggggactggcaaagctaaatggcctgagtgggttgaactgtggccgcacctggttagcaccgttctttttcttcttctgaaggaaaggcgtggctgttccgaggtgccttgtgaaatagccagccgtcctgggctgccctttcactgttcctgctgaagccaaaggtgccagaaaagcctagacattgagctccgcgctccccagtcgtgactctgtgtctacgacgaactttctaaaggcagtggcttataaacgagcagtactgactccatggcggttccatctacttccc

SEQ ID NO: 33332 - DNA, 352 bp, Homo sapiens
  chr12:117407834-117408186
  hypo
cgaaggttctgagtaatgagcagatgctgctaatgcagggacggcggagaccttgccaggactccatctgctccgtgcttgcctgcctttggcctcgtgccacagcattagggaatggcagtgtgcttcgaaacccgctccctggtcaccgagtttgtcttgaaatctcgctctttggtgagaaatgagattacacacttcttaggtgcaaagaagtttttatttgtccccctcagtagagagaggagagacgcgatctggtgcatattagcatgaggaagcctggacgggacagccagcagtcctctttatatggtgccatcaagcacggcaaagtggcttatccacctcc

SEQ ID NO: 33333 - DNA, 129 bp, Homo sapiens; identical to SEQ ID NO: 15506
  chr12:117408233-117408362
  hypo

SEQ ID NO: 33334 - DNA, 293 bp, Homo sapiens; identical to SEQ ID NO: 15507
  chr12:117599154-117599447
  hypo

SEQ ID NO: 33335 - DNA, 328 bp, Homo sapiens; identical to SEQ ID NO: 15508
  chr12:117600052-117600380
  hypo

SEQ ID NO: 33336 - DNA, 1351 bp, Homo sapiens; identical to SEQ ID NO: 31013
  chr12:120147746-120149097
  hypo

SEQ ID NO: 33337 - DNA, 70 bp, Homo sapiens; identical to SEQ ID NO: 15511
  chr12:120165264-120165334
  hypo

SEQ ID NO: 33338 - DNA, 553 bp, Homo sapiens
  chr12:122208750-122209303
  hypo
cgagacacatgcctgcgttgctctcccctcctgagcactttccgttctctccctctcccgagaattaaaggctggtgggtgtctcaccactacgtctccacattcctgtccggagtgatgctgacctggtgagtagcccctcgctgggcccctccagcctcccagggagtagagcctggggcccgggaatggggagggggctgatccagacagcggtggggggtgtgctccagggccaacttgggaaagaaagtatgagcctgcagctgcgccgggctgcgcgggccccacccagcccgtgaggggttctccagggaatggtttcgggtgtccctggccagggcagaggtagcggggctgcaaggctggagggagcgagtgaggctgggcactgaaggagactgcggaggacagaggggtcacagggagttagcgcttctgcacggccatgtggacccctgtgcttctagaaaggaagatgggatgacctcgcccagccccagggatagaagggcggaagtctggacctcagtttgactttatacaccttttc

SEQ ID NO: 33339 - DNA, 178 bp, Homo sapiens
  chr12:122213623-122213801
  hypo
cgtgagcctcgggctcctgtgccctcggcccggacttcagactgcagggggctcccgggctccttcccagcagccctctcaggcccgtggcatcgctgggagagggcccaggccctggtcccccagtggaccccagtggtctagaggaatgtgagccccgcctgtccgcacagtgtcc

SEQ ID NO: 33340 - DNA, 407 bp, Homo sapiens; identical to SEQ ID NO: 15514
  chr12:122480960-122481367
  hypo

SEQ ID NO: 33341 - DNA, 142 bp, Homo sapiens
  chr12:122602792-122602934
  hypo
cggtttaggatttatagattgtttatttctgcaactttccatgtaatattttcagacagcggttgatcatgggtaaagcacaataccgcagaaaagggaggaatgccgtacattccagtgttatatttcaacaatacaaaac

SEQ ID NO: 33342 - DNA, 220 bp, Homo sapiens; identical to SEQ ID NO: 15516
  chr12:124886252-124886472
  hypo

SEQ ID NO: 33343 - DNA, 178 bp, Homo sapiens; identical to SEQ ID NO: 15517
  chr12:124970986-124971164
  hypo

SEQ ID NO: 33344 - DNA, 177 bp, Homo sapiens
  chr12:125092427-125092604
  hypo
cgaaagccaagctccgtgtccatcgcgaaggcactgggcatgtggctatgcagccgtgacaaaggatgaagccatcccgtggccagggcgcagagtgacctcccagatctacgtttcatgtggcgtttctgccgtgtatttttaaacccggggacaaatgtatgcgtagtaaaggtc

SEQ ID NO: 33345 - DNA, 1333 bp, Homo sapiens
  chr12:131272094-131273427
  hypo
cggacatgacgcttaggaccttaccttgctctccagctcagagcccggcccccatggccgggccagacctgccccggcctctcccctccgcctgagccacgccccggcttcctgctcaccaggcctgcgttagcatctgcagctgtgcttcttcaggccgccgcaacaccagccttcccgcactgctccaagacactgagcctggtgcatgctcaggaaattcaacaatttcaaaacattgtcactctccccgcctgacgaccagccttgtactctactcacagggcaacctgctttagcaaactcaacgacacattaaaaagtacaatttgcaaaggagagctaccacctggctgggtgttctgcgcctagagactgggccccgggagagcgctccacagtgaacttgcgaaggatggaatttacataaagaaggcaccgtctttagtcctggaaaggcaccctgggattctctacctccgtccgtctttttcacaggcagggaactgaggtcccaggaggcccaggtcaccccacccaaggaggcagggcctcccctgcactctctggaacctctccctgccaagaagccagaggccctgttttctcaggcttaggaatctgcactctcttgttcaaagactgtgagtcagaagaggagggccaagtgccgccttgaatttctcttactgctcaaatggaaaacaatgaaacagggctgtccacatcacagcctgccacctgccagtcatttagagcctggcgcgcatttccatagctcctctgacgccaggacaatcagacccgtctccggagggctcctgcctctggatgtctaaatgttcttgccttaaacccggtgtgacgctccacccctcccacaccgcacacatacgaattttaacaaaatcttcaaagcagaacttaacaaaaggttgcgtggtaccaggtccatttggttccatgtgaaaccaactaggaagatccgcattaggctcttcctcagctgcgccgagggcctggtttctattcatttgagaagctgtgtgcgcccctgtatggtctgttctttcctttagggctcgcttttaacagtgagtgttgttgtggcaactaaaataaggagccggccagtgctcctagggaggaaaacctcggcaactccgcaggtgcaggcaccggccacagacccacgcctggggcactcgcgtttgcattagcagagcgcaggagtcagggagcgcgggcaggggcgggaggaggggtctgcgcactggccacggtgtgggggacccagccctaccccttcccggggctgagtgggactcgccac

SEQ ID NO: 33346 - DNA, 221 bp, Homo sapiens; identical to SEQ ID NO: 15521
  chr12:131314814-131315035
  hypo

SEQ ID NO: 33347 - DNA, 285 bp, Homo sapiens
  chr12:132687990-132688275
  hypo
cgtggcattgaccccgaccctggggcatggccccggctcccggcctgtgggggactcaccgacatggggatgttccaggccatgtacacgtgggacttgaagtcatccatccacacctcggcggcgcgcagggcgttgcgcttggcatagtagtcaatgtcgttgttgtagggcttcctggtgcgctcgatgtgggccacgcgggagcagggcagcacctccatgctgccgccacactgccacacctgcggggagacggcgctgggtgccggcgtccttcccaac

SEQ ID NO: 33348 - DNA, 175 bp, Homo sapiens
  chr12:133280443-133280618
  hypo
cgggaatttagagaaggaagcagagacaactgagaagacagactggccgggaacacggaggatctgggatggaagaggggagagctgggaagccgcgcctctgagtagcgtgggggcagagtcgccatcctaggtgggtgcaggtgtatgcggaagcagcattcattcagcaagc

SEQ ID NO: 33349 - DNA, 30 bp, Homo sapiens
  chr12:16034082-16034112
  hypo
cgtatttcaagttctcacgttgtttgactc

SEQ ID NO: 33350 - DNA, 477 bp, Homo sapiens
  chr12:2017667-2018144
  hypo
cggcctctcccacgcggtgttggagggcgtgctaggattgcctccggtggagccccggccccgtttcctccacacgaccgggttcacacctgaacaccccccaggactgcgtcacggacatccccacgccaactcccacgccggactgcctcacggacatccccacgccaactcccacgccggactgcgtcacggacatccccacgccaactcccacgccggactgcgtcacggacatccccacgccaactcccacgccggactgcctcacggacatccccacgccaactcccacgccggacagcgttatggacatccccacgccaactcccacgccggactgcgtcacggacatccccacgccaactcccacgccggactgcgtcacggacatccccacgccaactcccacgccaggttcctgcaccccacacccggctcctcctcacgacactgtggcccgcgctggccttccac

SEQ ID NO: 33351 - DNA, 791 bp, Homo sapiens
  chr12:30322763-30323554
  hyper
cgcgacacgtcccagccaaggcgcggcggggagccttggacaggagtgcacttgaaggtgagggtgcagagtggccggtgggacttgtggctggtgttctcggccatgccctggccccagaagtcgttggtgaagatgccccagcagagcgaggcgctgggccgcacgtcggggttgttcacggtcgcccacgaactcgccctgcagggaacggccttagcacaggcagctcgcgcctgccagcagcgccgcggccccggctatcaacacctcctcctccccactgcgaatgccccgatcgtgctccccaaaacccaatacatccacgcccccaaaaaactgggaacccacgcgggtgccttctgtttaccgcagcgctctcactgcaggcgcttgagtaccagatggcgagagttcgcgcgcaggtggagtggggatcctggcgctaggctacccaggagaggaggggaagggcaacccgcggtcccgcctgtggtgcccggctgtgctcatccccacgccccagaccccaaaaggggctggggaggggcacatctggcggacccctcgcgggggaccaagcgggtttagcaggtgcgccgcctggaacccctacgcccaccttccagggagaaaagtgcctctgcttctcgggaagttcccggcttttcagcacccgggacaacagcagcggcacctggggagaggctctccaccccgccccgcgctcgcttccagtcgccagcttcgtgatcttctgcccggactttctctcacccgccgggcgctgc

SEQ ID NO: 33352 - DNA, 600 bp, Homo sapiens; identical to SEQ ID NO: 28513
  chr12:30975325-30975925
  hyper

SEQ ID NO: 33353 - DNA, 1379 bp, Homo sapiens
  chr12:39298514-39299893
  hyper
cgccttggcctcccaaagtgctgggaatacaggcgtataaactgtactgagccactgcgcccggccgagagtcagtttttacaagcactcagatgtgggcccgaaaacaaatcaaaacaaaagtcgtgacttcccagatcttaggtaaggcatagattcgtctgcaaggagggccgaaatctctacctatcaggcaaaaggcaaaaagcccggaagggtcggggagaagcaagctggaaggctccaggaagtgggtggggaggaagctgccggggttggagccaaccctagcaacagcaggtttgcacacgcctagcagaggaagtcccgggcctaagcgtgcagcggtcacaagagcttttggcagtgctgtccccttcgattccggtcatcacccaaccatccagcccgggtttggggcggaaaaccggcttgtaaagtgggcggcggccggtgttcccacagctgagtcacagcccagccaacttttacagcgtttcccagaaagaaaatacaaagtctcagtcccggagcccaccgcttctaattcccgctcccctgtgtcacctgacccggggtaactccagccccactactgagatatttcccactcatggcgcaacttcttgcctgcgcaaagcctcgtggtaccccgagcgctctccaagtgctaccaaccccacagatgagagggcaggagagaggggaagggctgcgtcctcacctgcaggacacggacacctccacccgcgtggccgggatggcagcgctcagctggttcaagtccccgatgcccgcagtgctgttgtagcggctgtccatattgggaggaggcgccttggacttgtccggcgcccacaaccacagctcgggcggactgagggctagctcccgtcaggcggggatgggggttgagggtggaggcagaagaaggaggcggaggcagcgcgcgggatgggggagggaagggaggaggcggacctccgcgcagagccacgagggaaccgctagccagtcctgggtgaaactgacgctgccaggcaagtggcgcgcggggatcccggtttcccagcccccttccggcaggcagcagcccgggcgggggacacactccgtgatcccctcctggctggaggggtcaggcttggtggacccagcaagcagcctgatggagaaggtggcaccagacgcagacccctaccgtccaggaccgcaagccctcgccggctctgcgtgcttttaggttttgtctccacctctgcacacccacactcgcctcctgggccgcgacagcttccttctgtcaatcaggtgtggacgggaaggtctcgaagtttcctcgcctgagttgaaagctggaggtgggggcacctctgccc

SEQ ID NO: 33354 - DNA, 816 bp, Homo sapiens
  chr12:49390799-49391615
  hyper
cggcggatacgggacacggcttctcgcagggccccggcgtagggccctggggtccgcgcccagccccggccggcgcgccgctggaccaccgccacttccgacccctcggctctgccctgggctcccgaagctgctgggcctaaggcttggtgctctgggctacctggctgcgtgggggcgtcccgcaggtttacttcgggggccgggagccccaagatgcggaaagtgcgctcctccagtgtggagtcccccggcctcccgccctcagcttcgcccccgcggcccccgccgggctggtgtaaaaggcgactgctcgacagccgcttttgacaaggggaaggaaagaccgtggccccttcaccctcctccttgccgggcttcgattggctgggggaatcccccaccacgcgtgtcaccccagagggcaaaagctgcacctgctgggttcggggggttggaacatattgggatcgtatcactacgcacgtggcgtcaatgacaaagacgccttccccacgggacaggccctgggaactgcggggcaaggtgtgggcacggcgggtcgccttccaaccctccagggtctccggtcctgccccctctccaagacccagagattctctccatccggtgcctccgggagcccagggtctggggagtgtctggctatggcggggcggctgctttttaggggagggaatccagcatttgggaaaccagatctgttctccttctttcccttccctcgagcccttgaggtggtgcctggatctgggagcgggatgcggggcacagggagccgcagttgcagacccc

SEQ ID NO: 33355 - DNA, 221 bp, Homo sapiens; identical to SEQ ID NO: 15527
  chr12:49422776-49422997
  hypo

SEQ ID NO: 33356 - DNA, 650 bp, Homo sapiens
  chr12:49729728-49730378
  hyper
cgttcttcatgaggtcggcccacatgctggtgccgtcgccgccgcgcatgagcacgtggtaagcgaagaagtagacgcctggcatggggcaagtaaacttgccgctggctgcctcgtaggcgttgcccacgttggtcaccacgtcgtcgaagcgcagcacctcgtaaccctcgtggggccgccgcaggcccgcgtagaaagcaatgcgaggcacgtagccggcagcgggcgccaccccgcccggacctggaccgggagggcccggggggcctggcctgccgggttctcctgggggccctcttggacctggtggtccagggggcccccgcaggcctgctttcccgcgccggcccacctctcccttggcgcctggcgggaaggggggcacggaagcaggcgcgccgtcgggaccagggccacggggcccatgcgggtcgcacaccatgcggcagcgacccagcatctcgtagtgcgctggcccgcgggagctgtgcaccagcagcgggatggccaccagcagcagcagcaccatggccactccgacggccgcgcccgccaccctcttgcggcggctcagccgcgacgctgccagggccagcaaatcttcctcactcttgggcgcaatggctgccggggccggggctctccgc

SEQ ID NO: 33357 - DNA, 104 bp, Homo sapiens; identical to SEQ ID NO: 15528
  chr12:50484317-50484421
  hypo

SEQ ID NO: 33358 - DNA, 525 bp, Homo sapiens; identical to SEQ ID NO: 23869
  chr12:51421158-51421683
  hypo

SEQ ID NO: 33359 - DNA, 95 bp, Homo sapiens
  chr12:51565439-51565534
  hypo
cgtgagccaccgcacccggccgaaaggagatttttcatctgttatcaacaactggcttgatacataaagatccagaagcatcttaagttttcttc

SEQ ID NO: 33360 - DNA, 70 bp, Homo sapiens; identical to SEQ ID NO: 15530
  chr12:51844685-51844755
  hypo

SEQ ID NO: 33361 - DNA, 501 bp, Homo sapiens; identical to SEQ ID NO: 25039
  chr12:52652140-52652641
  hyper

SEQ ID NO: 33362 - DNA, 211 bp, Homo sapiens; identical to SEQ ID NO: 23468
  chr12:53662999-53663210
  hypo

SEQ ID NO: 33363 - DNA, 136 bp, Homo sapiens; identical to SEQ ID NO: 15531
  chr12:56183329-56183465
  hypo

SEQ ID NO: 33364 - DNA, 428 bp, Homo sapiens
  chr12:56558022-56558450
  hypo
cgctcaccctccctccaggtggacccctctccctcacccttctcccctcttggccccttctcacctggcagtgggctggcactgggcaggaggttgccctgaacagctgccacaatggcagggctttgggctgcggcggatccgagccccggcccgagaggcaaggaagatggcatggtggtggtcgccggcaggttaggatgtagagggttcgccatggacacaggcaggttaggtggggggagagtgcccggggcgaacgggagatggtggtgatgcccatgcaggttaggaggagcggggaggttaatactgatggagtcagctagactaccaaatgggatgatggatggagcaggaggaggaggaggaggcggcatgccaaaaggcaaacccaaaggagcattacccgccacgcctgggtgccc

SEQ ID NO: 33365 - DNA, 322 bp, Homo sapiens
  chr12:57881047-57881369
  hypo
cgcgcccggcctatgtacatttttgttgttgttgttgataggatggatatgtacactaacttccactttgtcactaattccgcacatggtaactccgaactctaaaactctgaccgttaagagcttgcatcgagagccactgcgagtagctgctgttatgacatggccatttcattctccacaacaagagaagcagccgcggcttcagtcaccgccctccagcagcgtaagaggataaaagtgcgacttgccctaaaacctaaacgtctcttctggatctccagaaaaaaagtgctgctctaggccgggcgcagtggctcac

SEQ ID NO: 33366 - DNA, 218 bp, Homo sapiens; identical to SEQ ID NO: 15533
  chr12:6391196-6391414
  hypo

SEQ ID NO: 33367 - DNA, 520 bp, Homo sapiens; identical to SEQ ID NO: 31060
  chr12:6483496-6484016
  hypo

SEQ ID NO: 33368 - DNA, 350 bp, Homo sapiens; identical to SEQ ID NO: 25054
  chr12:708894-709244
  binary

SEQ ID NO: 33369 - DNA, 267 bp, Homo sapiens; identical to SEQ ID NO: 15537
  chr12:7858581-7858848
  hypo

SEQ ID NO: 33370 - DNA, 474 bp, Homo sapiens; identical to SEQ ID NO: 29819
  chr12:81102174-81102648
  hyper

SEQ ID NO: 33371 - DNA, 1291 bp, Homo sapiens
  chr13:110434394-110435685
  binary
cgatggtggcctccttcaagtggtgggacaagaagtcaatgctggcgtaggtgttggcagggggcagggcaccgggacccggccccccgcacccgccgccggtgctgccgacgcccacagcgctgatgagacccccgaggcttcgggtccggccccaggagctcttgtctcccggctgaggaagcggcggcggcggcggctgcggctggggtggcagcccgggctcctccctcacgtcgatggcgatgtagttgagaccattctggaagccggcagaggtctctctgcgcatgggcgatccaccgctcccaggacaaccgaccaagcccccgggctgacccggggtccacggccggccctgcggtgccaaagggggcgccggctgcaactgtcgtggggaggtgggcggctcgtcgccccctccagggccgacacccacgccgccctcgctgcttttcctgagagagacattttccacggaggccgagttgtggcgcttggggttgtgggcgaaggacggggacacgggggtgaccgtcgtggtggaggagaaggtctcggaactgtggcggcggcggcccccctgcgggtctgcgcggatgaccttggcgccgcggtgggggtccgggggctggctggcctgcaggaaggcctcgactcccgacacctgctccatgaggctcagcctcttcacgcccgacgtcgggctggccacgcgggcagcttctggcttcgggggggccgcgataggttgcggcggggtggcggccacaccaaaagccatctcggtgtagtcaccattgtccccggtgtccgaggacaacgatgaggcggcgcccgggccctgggcggtggcaacggccgaggcggggggcaggcggtacagctcccccggggccggcggcggtggcggcggctgcagagacgacgacggggacgcggacggacgcgggggcaacggcggatacggggaggaggcctcgggggacaggaggccgtccaaggagcccacggggtggccgctcggggcgcccggcttaggagacttgggggagctgaagtcgaggttcatgtagtcggagagcggagaccgctgccggctgtcgctgctggtgcccggggtgcctgagcccagcgacgaggccgggctgctggcggacaagagcgaggaggacgaggccgccgacgccagcaggggaggcgcgggcggcgacaggcgggccccgggctcgccaaagtcgatgttgatgtactcgccggggctcttgggctccggtggcagtgggtactc

SEQ ID NO: 33372 - DNA, 119 bp, Homo sapiens; identical to SEQ ID NO: 27599
  chr13:111363839-111363958
  hypo

SEQ ID NO: 33373 - DNA, 95 bp, Homo sapiens; identical to SEQ ID NO: 15540
  chr13:111978023-111978118
  hypo

SEQ ID NO: 33374 - DNA, 283 bp, Homo sapiens
  chr13:113107708-113107991
  hypo
cggagccccgcctgacgccgcggtcgcttgacttcacaatcacaggagcgtgacgcctacagcctaatgttgccgtgtagggcacagacttcttaaaaagaatcttcaggggatgtcgccaggtgatggcgggaatcctcagtgagagggtgaggccaccggggctgctgtgtccgcagatgtggtgccacctccgagggcctccaagggtgcatgtgagccacagtcaccaccacagtgcgccgacgaccgccacagaaacagccacggcaccgcgaggacc

SEQ ID NO: 33375 - DNA, 193 bp, Homo sapiens; identical to SEQ ID NO: 15541
  chr13:113233687-113233880
  hypo

SEQ ID NO: 33376 - DNA, 282 bp, Homo sapiens; identical to SEQ ID NO: 15542
  chr13:113291506-113291788
  hypo

SEQ ID NO: 33377 - DNA, 183 bp, Homo sapiens; identical to SEQ ID NO: 15543
  chr13:113461159-113461342
  hypo

SEQ ID NO: 33378 - DNA, 313 bp, Homo sapiens
  chr13:113598557-113598870
  hypo
cgggccatgaagggagggtcccgggtgaagagcaagctcatgaccctcatttactgggaatccattgctctggccccgtcatgagtggggttcgcagactgggccaatccctacagcgtatgtgtgctctggtgtctcggggcagcacagacgttgttactgctccatctggcctgggtgaacacctgggtctctctgtggagttgggggatgccgcctgctcaagggtcgcgttcctagtatgcgttccaggaatgctatgcaccaccagtgctaagccgcagaagagctgtcaatctgtcagtcctgtccc

SEQ ID NO: 33379 - DNA, 319 bp, Homo sapiens; identical to SEQ ID NO: 15544
  chr13:113627865-113628184
  hypo

SEQ ID NO: 33380 - DNA, 241 bp, Homo sapiens; identical to SEQ ID NO: 15545
  chr13:113796043-113796284
  hypo

SEQ ID NO: 33381 - DNA, 319 bp, Homo sapiens
  chr13:113797753-113798072
  hypo
cgcacacgcccagcacttgggttctcctgttggcatcctccggccagatgcattcatcccatttcgcccggcccgtttgtctctgtccatccgtcaagctttcttgacttcttggtgcattttcaggcaaaccgcagacgccaacactcccctcgctgcctgggttgctgcctggcgtccattgttcacaggcggtcacctgaggggaggccaacgctcggacagctgcgctcacctgcagatccgacccctgccgacgacgtggggcctcgccctgcaagcccgctgcccctccgggtgcccctgcgctctgcctccc

SEQ ID NO: 33382 - DNA, 915 bp, Homo sapiens
  chr13:114055661-114056576
  hypo
cgtgtgcttcgtgagagaggggaccctgtcctcctagcaggggtccagcggcaccacagcaagacttctgtggccaagtacacgccatgctcagctctgcccccacccgcacccccggaccatcctgtgtgcagctgggctgccccgggacccacacgcgcgaggggcacccggtgctcaggagcctccacacacagcagctcgcacttagaacccacacgccaagcagaaacccctcgaagcgggctgggagcacggacccctgatttatagaggaggccccgggggccctgtcgggggagctgtggggaccggccccccagagctcagcacagcccggccctccttccagacaccagcactcgcatgtcccagcaggtgagggtgggtcaaacctgctggatctgaagttaattgttcgactggaaggaaacctgtgcgctccccggagcatgacgccacgccgcctccttggcgctgcagagccaaagccactggcgtctgccgggatggaccttccctggaaggagagacctcagccccgcgtgggtaggacgcgcctgctgaacgccctctcagggccgacactggaaaacaccttcctctaaaggaacatccgagtcagaaaacaggtgctcgcagcaggcaccaaagcgcctttgcgaacgcttagggctgtttcaggaaaccgctcagtagcaaaggcagaagatgccaagacaccttcaaaaagcaggaattaactttccacagggagggcaccaccaaaaacaagggtgcggggctgtagggcgacaggctgcatcggttcacgctgaaaatccagctgctccggggccactcaggcagccgtgtggcctcacgggtccgggtttcagaggccaccgagtggcctgggacgatggatcgcgacac

SEQ ID NO: 33383 - DNA, 552 bp, Homo sapiens; identical to SEQ ID NO: 25064
  chr13:114122902-114123454
  hypo

SEQ ID NO: 33384 - DNA, 225 bp, Homo sapiens; identical to SEQ ID NO: 31079
  chr13:114271763-114271988
  hypo

SEQ ID NO: 33385 - DNA, 222 bp, Homo sapiens
  chr13:114502726-114502948
  hypo
cgagaaacttctggatttccctgagccaccgacagcggcagtgtgacctcatttctctttccaggtgagtgagatgcggggagtaatgacccgcgggcggccgccgccttcgccaggaccgtcggagggcacagctctgtgacggcgctctctgtgtgtctcgcacctgccctgtgtggattcctggctttaactaaacgcagcctctcatcctcagcacgc

SEQ ID NO: 33386 - DNA, 74 bp, Homo sapiens; identical to SEQ ID NO: 15554
  chr13:114747445-114747519
  hypo

SEQ ID NO: 33387 - DNA, 936 bp, Homo sapiens; identical to SEQ ID NO: 23895
  chr13:114748186-114749122
  hypo

SEQ ID NO: 33388 - DNA, 209 bp, Homo sapiens
  chr13:114766173-114766382
  hypo
cgcggccccgggctctgcccgcagcactgaatccttcctcccctcagctctccccctgaaaaagcagactcagtcccagggcccagcacgctccagcaagagccagggaaagcgaccttgctccttacctttgcttttgtggtaggtaaattcatggttggtcaagcgaaaccatctcttcttaaaattcttcatcccaaagcgcttcc

SEQ ID NO: 33389 - DNA, 400 bp, Homo sapiens; identical to SEQ ID NO: 31090
  chr13:20875608-20876008
  hyper

SEQ ID NO: 33390 - DNA, 126 bp, Homo sapiens; identical to SEQ ID NO: 15558
  chr13:28745545-28745671
  hypo

SEQ ID NO: 33391 - DNA, 229 bp, Homo sapiens
  chr13:30123252-30123481
  hypo
cgtggagcggacgtgctagtgggcactaagagaatagcctctatcagagaggagaatgcaattcaatttacctgaaattcctttcaggtatctggaaacaaatggccaattgcccgcatgctcacctgaatgatcaaagaccaggagaaaaccgtacccgtggaccaggaggaagccagcgaagaacaaggcagcccaggatgcgggaccagtgccattccttcccacc

SEQ ID NO: 33392 - DNA, 92 bp, Homo sapiens; identical to SEQ ID NO: 23905
  chr13:33113933-33114025
  hypo

SEQ ID NO: 33393 - DNA, 532 bp, Homo sapiens
  chr13:37643604-37644136
  hypo
cggctgcagtggggaggtgcgaggggtggcagcaggaacggctgtgggagcagcagtggcggtggtgggtcccctgtgccccacgtcccggaagcaacctcctgtgctgcccccaaactcatgcagccaggtgggacccgaccctaggcccggagctttcatcactcgggactctggccccacactgctgctctcacccacgcactgctgctgtggggagggcgtggggaggaggcggagctgggcccggggctgtgccacgcttcacgcttcacggaaccagcgggagccaaggacaagcaggagccgccccgcagccccttgggggccgccgctatgaggccaggccaagtcgcccagcccagagggggagtgatggagccacgcgattgggcacagaggagtgggcagagaggcacccagcaaggacctggagcccccgccccaggctgtgaggaggcatggcccgggctgcctgcacattccacagagcaggcaggagccccaccttcccaggtgcaggacccaggcc

SEQ ID NO: 33394 - DNA, 155 bp, Homo sapiens; identical to SEQ ID NO: 23907
  chr13:46661291-46661446
  hypo

SEQ ID NO: 33395 - DNA, 124 bp, Homo sapiens; identical to SEQ ID NO: 23915
  chr13:96409593-96409717
  hypo

SEQ ID NO: 33396 - DNA, 82 bp, Homo sapiens; identical to SEQ ID NO: 15562
  chr13:99115936-99116018
  hypo

SEQ ID NO: 33397 - DNA, 165 bp, Homo sapiens
  chr14:100843925-100844090
  hypo
cgtgagccaccgcgcccggtcgttttatttaaactctggctttgcgtgtggaagttgttacctgcctggaatgggctgcgaacgggggcggcattactagaggaggctgactacagacatttatggaatgatgacctgacttgtagaccagtggaaccctcaggc

SEQ ID NO: 33398 - DNA, 119 bp, Homo sapiens; identical to SEQ ID NO: 15563
  chr14:102691860-102691979
  hypo

SEQ ID NO: 33399 - DNA, 140 bp, Homo sapiens
  chr14:103216371-103216511
  hypo
cggtccccgcggcctcggtccctgcagccgcagtggcgcctgcatggagggggccccctaatcatggtgcctcggctgtggaatgttctgggagctagtcagaacggacatggctgccgcagctgaccctcccgcctggc

SEQ ID NO: 33400 - DNA, 365 bp, Homo sapiens; identical to SEQ ID NO: 15564
  chr14:103409913-103410278
  hypo

SEQ ID NO: 33401 - DNA, 129 bp, Homo sapiens; identical to SEQ ID NO: 15565
  chr14:103417432-103417561
  hypo

SEQ ID NO: 33402 - DNA, 657 bp, Homo sapiens; identical to SEQ ID NO: 23929
  chr14:104641166-104641823
  hypo

SEQ ID NO: 33403 - DNA, 805 bp, Homo sapiens
  chr14:104642056-104642861
  hypo
cggacccctcccgtgggcatgagtgggcaggtggctgggtccccgatgcttcctggggccacctgcccccgcctggctgctggcagtcgctgtccggagcggggcctgctcaccaccacagtgaccctgcagcggccagtggagctcaacggcgaggacgagctggtgttcacggtggtggaggagctgtccctgggggcgcttgccggagctgggcggcccaccagcctggctagcttcgacagtgactgctccctgcgggccctggcctcggggtcccggccagtcagcatcatcagcagcatcaatgatgagtttgacgcctacacctctcaggcccctgagggggggcccctggagggggcagcctgggccggcagcagtcacggctcctccatcagctcctggctcagcgaggtcagcgtctgcactgccgacagccgtgaccccacgccgcagccccgcttcagccccgactcgctggcagggcttgaccctgggggcccccctgccctggatggttccctgggggatggaagctctgggttcctggggccagacagacctgacagtcctgggccaacctggggtccgtgccctggggaagtggctgcagtggccccatcccgacccggcagggagccccaggccgggccctcgcggtgggcatccgcagcccagaccatccactccagcctcccccggaaaccgaggactgcctctgccaccacccgtgtgggctgtgctcgcctgggccagagcccacctggccgtggaggcctgtttgaggacccatggctgctcc

SEQ ID NO: 33404 - DNA, 1242 bp, Homo sapiens
  chr14:104643028-104644270
  hypo
cggatcccaccgctgcggaggggtgccaccacgctgggtgtgacaacgccagctgtgtcctggggagatgctcccacggaggtggtggcctgctcggggagcctgaaggcctcccccaccagcaagaagggtctggctcccaaggcgggcttcctcccgaggcccagtggggcggcccccccggccccacccacgcggaagtccagcctggagcagaggagcagcccggcctcggcccctccgcatgctgtgaacccggcgcgggtcggggctgctgctgtccttcgaggggaggaggagcccagacccagcagccgggctgaccactctgtccccagggccacgtccagcctgaaggcccgggccagcaaggtagaagcagcacaccgtcttgccggacacgcgtctctggagcggtacgaaggcctggcgcacagcagcagcaagggccgggaagcccctgggcggcctccccgggctgtacccaagctgggtgtgccaccctccagccccacacacggtccagctcccgcctgtaggagcggcgcagccaaggctgtgggggcccccaagccccctgttggtggaggcaagggccgtggcctagtggctggtgggtcgcgggctctggggccttcggtgaagctgtctacggcctctgtgacgggcaggagccctggcggccctgtggccggtcccagagcagccccacgggccgggcccagtgtcggggcgaaggctggccggggtaccgtcatgggcacaaagcaggcgctccgggctgctcacagccgcgtccatgagctgtcagccagtggagccccgggccgaggtggctcctcgtggggctcggcggactcagacagcggccatgacagcggcgtgaacgtgggggaggagcggccacccacgggcccggccctgccctccccctacagcaaggtgaccgccccacggcggccccagcgctacagcagcggccatggcagcgacaacagcagcgtgctgagtggagagctgccgcccgccatgggccgcaccgcccttttccaccacagcggtggcagcagtggctatgagagcctgcggcgcgacagcgaggccaccggcagcgcctcctccgcccctgactccatgagcgagagtggggctgcctccccaggcgcccgcacccgcagcctcaagtcccccaagaagagggccacaggtgggtgcagaggtgcacagccctctacagtttac

SEQ ID NO: 33405 - DNA, 447 bp, Homo sapiens
  chr14:104645047-104645494
  hypo
cgccttcagcggccccgccccaccccgagggaggcccccacccaggtagggcctttggtgggctggggtctatgacccctggtggggagcctgccgcggatggcagagtgagccatttgatgggctcgccaggcctctgggggtgtggctgggcagcccctgacctcactttctgtccacgttcctcccaggacgcaaaggtaggagcggccctgcccagcccaagcctgttgcagctccgacactccccttgggcagtgggtgggtggctggggggtcctgaggccactgctgctgtccgctggaattctcccctgtcgtggggagggtggtcctagagccgagccaggacccagacgggcatgggtgggctgccccaggtccgccccctgcccgcccttggagccccactgtgtgcctgccaaggcctggcaggtgaagggaggc

SEQ ID NO: 33406 - DNA, 1156 bp, Homo sapiens
  chr14:104645553-104646709
  hypo
cgcccgccctgcctcccagggtctggcgtgcgtcagtacaaggctgcggctggcggagcgcaggcagcagcggctgcgggaggtgcaggccaagcacaagcacctgtgtgaggagctggccgagacccagggccggctgatgctggagcctggccgctggctggagcagtgtgagtcccgcccgcccacggacccagcccggcccaccgtgtgccctgacagctgccctcccctcccagagccctgttgctctcctgtacctcgtggtgggaaggctggaaggcagggtcggccgggccaagatgcctttcctggggcctctggggggccaggtggctgcccccagcctcgggcctgacgcaggtgcccctcccctctcctcccctccccagttgaggtggacccggagctggagcccgagtcggccgagtacctggcggccctggagcgagccacggcggccctggagcagtgcgtgaacctgtgcaaggcgcacgtcatgatggtcacctgcttcgacatcagcgttgcagccagtgctgccatcccggggccgcaggaggtggacgtctgaggctgggcgccggacaagaggagggggcgtgcagcgggctggaggacgggacgtgggacggagcgaggatgtggtgggggctgcggggggaggatgcggaggggtttctgtgcaggacgggagtctcagagaggagacggagtgtgggggagggagggccggccacgcggtggacagagcgagggtgccagggtgaccagaagaccgtcaccacccgacagcaacgcaagtgcctttgaccttgatttggacttttctcccttttgcatttggtgctacagacttgagacaccagcagaagttgtgttcagcccggccccgctgcgcctgtccgggccggggctggcgccggttgtgtttgtgtccaccttgccttctttgcagccaagcagtttttgtggagtggagtgggacttacctgcacgccccaggggtctttcaggattcaggatgacttttcttttacaatggtttcctctcggcagagcccgggttgtgggggatctgtgtggggttctcaacgcagatccatcctggggtctcccgggcagggatggctgacctcgagtcccctcccttccc

SEQ ID NO: 33407 - DNA, 259 bp, Homo sapiens; identical to SEQ ID NO: 23931
  chr14:105103493-105103752
  hypo

SEQ ID NO: 33408 - DNA, 193 bp, Homo sapiens
  chr14:105268589-105268782
  hypo
cgagcggacacactcgggtgagaagccctatacgtgtgtgcagtgtggcaaaagttttcagtactcccacaacctgagccggcacaccgtagtgcacactcgagagaagccgcatgcctgccggtggtgtgagcgccgtttcacgcagtccggggacctctaccgccacgtccgcaagtttcactgtggcctc

SEQ ID NO: 33409 - DNA, 492 bp, Homo sapiens; identical to SEQ ID NO: 23934
  chr14:105511981-105512473
  binary

SEQ ID NO: 33410 - DNA, 640 bp, Homo sapiens; identical to SEQ ID NO: 15574
  chr14:105687735-105688375
  hypo

SEQ ID NO: 33411 - DNA, 423 bp, Homo sapiens; identical to SEQ ID NO: 13401
  chr14:105689521-105689944
  hypo

SEQ ID NO: 33412 - DNA, 235 bp, Homo sapiens; identical to SEQ ID NO: 26339
  chr14:32597635-32597870
  hypo

SEQ ID NO: 33413 - DNA, 101 bp, Homo sapiens
  chr14:53259056-53259157
  hypo
cgggaatactgcttcacgccttacagtgcgcaggacagcgccgcacaacaaagaattacctggcctgaaatgtctggagtgctgaggtttagaaacctttc

SEQ ID NO: 33414 - DNA, 839 bp, Homo sapiens; identical to SEQ ID NO: 25098
  chr14:55765300-55766139
  hypo

SEQ ID NO: 33415 - DNA, 238 bp, Homo sapiens
  chr14:57045535-57045773
  hypo
cgtcaaggtaggtatatgttactctatagtttagtcactgtgtctctatcaaattgcgcgtaacacgtttgagattgtcactggttttcagtgtgtctttgagatacattttatgcgggttgctctcctccccgcccactccaggataattgctttaataataaaacataagcttaaaaagcttaactgcgctgttatgtagttgtccttattaacggctccgattctttttttttgc

SEQ ID NO: 33416 - DNA, 211 bp, Homo sapiens; identical to SEQ ID NO: 15580
  chr14:69354686-69354897
  hypo

SEQ ID NO: 33417 - DNA, 82 bp, Homo sapiens; identical to SEQ ID NO: 15581
  chr14:89291884-89291966
  hypo

SEQ ID NO: 33418 - DNA, 857 bp, Homo sapiens; identical to SEQ ID NO: 6919
  chr14:91805557-91806414
  hypo

SEQ ID NO: 33419 - DNA, 523 bp, Homo sapiens; identical to SEQ ID NO: 15583
  chr14:93454179-93454702
  hypo

SEQ ID NO: 33420 - DNA, 81 bp, Homo sapiens; identical to SEQ ID NO: 15584
  chr14:96054940-96055021
  hypo

SEQ ID NO: 33421 - DNA, 148 bp, Homo sapiens; identical to SEQ ID NO: 15585
  chr15:101464778-101464926
  hypo

SEQ ID NO: 33422 - DNA, 511 bp, Homo sapiens
  chr15:102042970-102043481
  hypo
cgccgggagcaggcagagtcaggaattccatgtccgtgacctgagagccgcaccactccacctcctgggcctcactccgccctatacacgcgcacacttaatgacatctctgatcatgtcttcaggacgcataccctctttgacttgaaaaagtaacaactgtttgtggccttctcacaggccgaaaagaacaagcggggtccagtggagaaaggtgaggcatgggaaggcctggcccgagcactgtgacttcagcgaggcaccctccacccctctcagctttcctggtctgaaagtagaatttcgccagagggtgagccgacaggtagagctgtttccacctgcgtgtgctgcctgtgagctggggaactgcccacactgggaggggttgggaagcgtaggagggcacctgtcgcagacgttgaggaggggctgcctttcccctccaggggctgacctcccaggtgattcccagagccagaccacaattccagaattcagtgaaaacagc

SEQ ID NO: 33423 - DNA, 414 bp, Homo sapiens
  chr15:28516961-28517375
  hypo
cgcacgcctgctcctccctcagcttgttgtccacacctgttaaggcgggagctggtaccaaacagagtgacagctcaggtgacgtgccctgcacagagcccagtacataggaaggaccaacaaagcaggccgctattttcgttgttcttttctggtatttatttaaaagtgaatgtttcaagcttggttttgtgctgacaaggaagtcagtgctcactgatccgagtcttctccacaaacaagtgacctcccacacctgtctcatctgactcgctgctattaccaccaaacacacacacgccagagaaaaacactgccgttgacatgcatgctagtcttgctttaaaagtaactagactcgagtgccacctaaacacaaagttccatcatgacactcacgtgcatgtcgccctc

SEQ ID NO: 33424 - DNA, 136 bp, Homo sapiens; identical to SEQ ID NO: 7975
  chr15:31571220-31571356
  hypo

SEQ ID NO: 33425 - DNA, 103 bp, Homo sapiens; identical to SEQ ID NO: 26382
  chr15:41091052-41091155
  hypo

SEQ ID NO: 33426 - DNA, 360 bp, Homo sapiens; identical to SEQ ID NO: 31197
  chr15:43020234-43020594
  hypo

SEQ ID NO: 33427 - DNA, 598 bp, Homo sapiens
  chr15:45444106-45444704
  hypo
cgcaccgagagaagttccaacgcagctgtctccaccagacggtgcaacagttcaagcgcttcattgagaactaccggcgccacatcggctgcgtggccgtgttctacgccatcgctggggggcttttcctggagagggcctactgtgagtgactttacttaccacgagccctgtccctaggcttgcaatgagtgatcgccctgggggtggggcctgcgataagtgccagccctgggtagggtaagtggagcctgtctgagtgaagactgtgcgggggaggcctgttgtgagtggcagccggccagggcctaccgcccctaaccagctctctgtcctctgcactgaccctcgcttgcctgcctgggccccctccacagactacgcctttgccgcacatcacacgggcatcacagacaccacccgcgtgggaatcatcctgtcgcggggcacagcagccagcatctctttcatgttctcctacatcttgctcaccatgtgccgcaacctcatcaccttcctgcgagaaaccttcctcaaccgctacgtgcccttcgacgccgccgtggacttccatcgcctcattgcctccaccgccatc

SEQ ID NO: 33428 - DNA, 290 bp, Homo sapiens; identical to SEQ ID NO: 15593
  chr15:49698682-49698972
  hypo

SEQ ID NO: 33429 - DNA, 153 bp, Homo sapiens; identical to SEQ ID NO: 15594
  chr15:63066085-63066238
  hypo

SEQ ID NO: 33430 - DNA, 102 bp, Homo sapiens; identical to SEQ ID NO: 15595
  chr15:68908928-68909030
  hypo

SEQ ID NO: 33431 - DNA, 347 bp, Homo sapiens
  chr15:72462436-72462783
  hypo
cgcaggcagaggttctgggatggctgacggagtaggcgggtctcacacagcgtctttcccgaaagccagaagttctgcttatgcctaggctgggaggaaaatcaacctgtctacctcatctccagtgccaggcagctcgtaggccaggctgagtgaggcctctagccccacccttgaggaggcacactgagagggaggaccctgagactcgcttatgccgagaacaaaagtgtccaaagtacccgcgcagcatgactgtaaaccatcaggttccgggaaagtaggctgagcacaggaggccttatcaaagctcaggagctgatgcgctgaaggtgtgggaggtggac

SEQ ID NO: 33432 - DNA, 235 bp, Homo sapiens; identical to SEQ ID NO: 15598
  chr15:93179848-93180083
  hypo

SEQ ID NO: 33433 - DNA, 351 bp, Homo sapiens; identical to SEQ ID NO: 12343
  chr15:94048797-94049148
  hypo

SEQ ID NO: 33434 - DNA, 353 bp, Homo sapiens; identical to SEQ ID NO: 15600
  chr15:94881658-94882011
  hypo

SEQ ID NO: 33435 - DNA, 136 bp, Homo sapiens; identical to SEQ ID NO: 29915
  chr15:99506062-99506198
  hypo

SEQ ID NO: 33436 - DNA, 80 bp, Homo sapiens
  chr16:1019655-1019735
  hypo
cgcgtgggcaacgcccggggccagcagctccggagccctctgggacggtgactgcccacgcgccccgctggctgcatctc

SEQ ID NO: 33437 - DNA, 226 bp, Homo sapiens; identical to SEQ ID NO: 15603
  chr16:1036850-1037076
  hypo

SEQ ID NO: 33438 - DNA, 42 bp, Homo sapiens; identical to SEQ ID NO: 15604
  chr16:11037121-11037163
  hypo

SEQ ID NO: 33439 - DNA, 265 bp, Homo sapiens; identical to SEQ ID NO: 28610
  chr16:1154990-1155255
  hypo

SEQ ID NO: 33440 - DNA, 789 bp, Homo sapiens
  chr16:1248221-1249010
  hypo
cgagcccgagatgccacgtggtcagacctgccgcagccagttccctgcctcggccagtcccctgcctccactcctgcccctccacaccccagccctccaaaagcagcagacctgctgccctgggatggttggaggtggagacctggcgccccgctggatgcacgtcagaccccagggtgtcagtgtccctggaggccggtggtggtaggaggggagtcccgatcacactaggggtgcgggaaaatcaccagggggtggcccgagtcagtgtgcagtgggcgtggacacccactgtgaacagtggacggggctcgggggtcccgggaggggctgcagccccgaggacactcctgcagggcttagcagtgccaatcctggccctgctgcccacaggcatgcggatcctggtcactctgctgctggatacgctgcccatgctcgggaacgtccttctgctgtgcttcttcgtcttcttcattttcggcatcgttggcgtccagctctgggctggcctcctgcggaaccgctgcttcctggacagtgcctttgtcaggtgcccaggccccacccccgtgaggcccctgcccagatggccctgcccaccatgcagataacgcaccatgtggctccaccgccccacgtggctctgcccaccgtgcagtcacccgccccgccactgctgtccccgtcatggctccgtccaccatgctgtctcccgcccccaccccccatcatggctccgcccagctggcagtcaccgccccacatggctccgcccacggtgcagtc

SEQ ID NO: 33441 - DNA, 370 bp, Homo sapiens; identical to SEQ ID NO: 31230
  chr16:12530018-12530388
  hypo

SEQ ID NO: 33442 - DNA, 564 bp, Homo sapiens
  chr16:1271094-1271658
  hypo
cgtcgtgagcagaaaggcccggggaggatgacggcccaggccctggttctctgcccagcgaagcaggagtagctgccgggccccacgagcctccgtccgttctggttcgggtttctccgagttttgctaccagccgaggctgtgcgggcaactgggtcagcctcccgtcaggagagaagccgcgtctgtgggacgaagaccgggcacccgccagagaggggaaggtaccaggttgcgtcctttcaggccccgcgttgttacaggacactcgctgggggccctgtgcccttgccggcggcaggttgcagccaccgcggcccaatgtcaccttcactcacagtctgagttcttgtccgcctgtcacgccctcaccaccctccccttccagccaccaccctttccgttccgctcgggccttcccagaagcgtcctgtgactctgggagaggtgacacctcactaaggggccgaccccatggagtaacgcgcccggccccgatgcgaatcaggcctcccctacatctgggggcgttggccgcgagattcccattgacacctttgtttc

SEQ ID NO: 33443 - DNA, 53 bp, Homo sapiens; identical to SEQ ID NO: 6945
  chr16:1472227-1472280
  hypo

SEQ ID NO: 33444 - DNA, 754 bp, Homo sapiens; identical to SEQ ID NO: 25134
  chr16:1730112-1730866
  hypo

SEQ ID NO: 33445 - DNA, 346 bp, Homo sapiens; identical to SEQ ID NO: 15612
  chr16:1812272-1812618
  hypo

SEQ ID NO: 33446 - DNA, 53 bp, Homo sapiens; identical to SEQ ID NO: 15613
  chr16:1812929-1812982
  hypo

SEQ ID NO: 33447 - DNA, 654 bp, Homo sapiens; identical to SEQ ID NO: 26421
  chr16:2028554-2029208
  hypo

SEQ ID NO: 33448 - DNA, 222 bp, Homo sapiens; identical to SEQ ID NO: 31239
  chr16:2106533-2106755
  hypo

SEQ ID NO: 33449 - DNA, 495 bp, Homo sapiens
  chr16:2106988-2107483
  hypo
cgagctggccggaccttgggtggctatagggcagcagccaggcggggccagcagcgggactggggctgggggcagggcttatgcctgccagcccctgacacgcattgtgtctcgcagctgatgcggaacctccttggcacccacctgggccacagcgccatctacaacatgtgccacctcatggaggacaggtgagtgtggtgggtggggcgcagggcagtggaggccagcacagccctcggggcagctccagtgtcccttgccaagcacacactggcttagagagtccttgtcctctcgggcagctgttccagaggctgccactagagcgaggcccatgacttctaggatccagcccctgtcctctccttcctctgtcagttcaacagaatatccacacccagctcagtgcctgccccatgctcggacgtcctccagcggtgctccccaactacttagcctgttacaaggcgaggctcggggtcttggcttgac

SEQ ID NO: 33450 - DNA, 440 bp, Homo sapiens; identical to SEQ ID NO: 15617
  chr16:2108531-2108971
  hypo

SEQ ID NO: 33451 - DNA, 324 bp, Homo sapiens
  chr16:2131440-2131764
  hypo
cgtcagagcagcgctggctccgacatcgtggtcctgaggattgtgggagggagcatgagggcaaaaccagggcccaggccaggaggcccctggggggccagagatgggtaaggggaggtactggcctcaggccaaaggtgctgccgcctccgcagggaacaccagctggctgatgagcctggagaacccgctcagccctttctcctcggacatcaacaacatgcccctgcaggagctgtctaacgccctcatggcggctgagcgcttcaaggagcaccgggacacagccctgtacaagtcactgtcggtgccggcagccagcac

SEQ ID NO: 33452 - DNA, 253 bp, Homo sapiens
  chr16:2146195-2146448
  hypo
cgtagttacccaaacccagacaccgcagcccctgtgcatgcaggccctgtggtgtggcctgtggctccggggcaccgcacctgcactgcatgccactgcactgaatcctgcaggcagctgcagtgcaacggcagggccgtgtggacctcagcacacctgagcataggagggcatggcagagcccggggtcacacgcgtgggaacacgccgtgggtgcgctccgccgccggctgccatgtgcgtgactatgtgc

SEQ ID NO: 33453 - DNA, 41 bp, Homo sapiens; identical to SEQ ID NO: 15620
  chr16:21515452-21515493
  hypo

SEQ ID NO: 33454 - DNA, 460 bp, Homo sapiens; identical to SEQ ID NO: 23997
  chr16:2278311-2278771
  hypo

SEQ ID NO: 33455 - DNA, 198 bp, Homo sapiens; identical to SEQ ID NO: 15622
  chr16:2477175-2477373
  hypo

SEQ ID NO: 33456 - DNA, 559 bp, Homo sapiens; identical to SEQ ID NO: 31247
  chr16:2540434-2540993
  hypo

SEQ ID NO: 33457 - DNA, 383 bp, Homo sapiens; identical to SEQ ID NO: 15625
  chr16:2642765-2643148
  hypo

SEQ ID NO: 33458 - DNA, 241 bp, Homo sapiens
  chr16:27523030-27523271
  hypo
cgggatccatatccaagctggcatgggaacaagacttactgaggtcgtaggtctgtgtgagcatatcccgctcgaacacaatgtccactggaggcactgtcttggagatgacctcctcgtcctcgtcatcatcatggtcattccgtttaaattccttcagcagcttgaggcaccgaaccatgacgtcggtccctggcaacacaagcacgggtttgccagcaatgagtgaaagcagtgctgc

SEQ ID NO: 33459 - DNA, 368 bp, Homo sapiens; identical to SEQ ID NO: 24003
  chr16:30124512-30124880
  hypo

SEQ ID NO: 33460 - DNA, 832 bp, Homo sapiens
  chr16:3016808-3017640
  hyper
cggggaccaggggcctgggcgggcctcgaggtggggcctggccgggcaggggagccgccgtgtcctggtcctcaggatgctgactgccggccccgcccgcagtgtcggtgggctcctgccaggggaactggacagcgcctcagggcgtcatctactccccggacttcccggacgagtacgggccggaccggaactgcagctgggccctgggcccgccaggcgccgcgctggagctcaccttccgcctcttcgagctggccgacccgcgcgaccggctggagctgcgcgacgcggcttcgggcagcctgctccgcgccttcgatggcgcccgcccaccgccgtccgggccgctgcgcctgggcactgccgcgctgctgctcaccttccgaagcgacgcgcgcggccacgcgcaaggcttcgcgctcacctaccgcggtgagcctcagctcggcgcgccctgcccgctgttcccaccccgctctccccaccccgcctcacgcccctctccgcagggctgcaggacgccgctgaggacccagaggcccccgagggctcggcccagacccccgcggcgcccctcgacggggccaacgtgagctgcagccccaggcctggggctccgccggccgcgattgggggtgaggcgggcgcgcgggacgggagtgagtcagggagccgccccctcgcgcccatcctcaccgcagccgtgtgcccgcagcccgggtcttctcgacggtgacggctgtctcggtgctgctgctgctgctcctggggctgctgcgtccgctgcgccgacggtgcggggcgctggggcagggcctgagggcggacc

SEQ ID NO: 33461 - DNA, 104 bp, Homo sapiens
  chr16:30833291-30833395
  hypo
cgtggcctgccgcaaagcagatactcctccggactctgggcttgttgccgttgttggctgcagccatggatgccctccctgccacacagcgcctgctggacacc

SEQ ID NO: 33462 - DNA, 201 bp, Homo sapiens; identical to SEQ ID NO: 15628
  chr16:31487152-31487353
  hypo

SEQ ID NO: 33463 - DNA, 1326 bp, Homo sapiens; identical to SEQ ID NO: 25159
  chr16:3221125-3222451
  hyper

SEQ ID NO: 33464 - DNA, 187 bp, Homo sapiens; identical to SEQ ID NO: 24008
  chr16:323421-323608
  hypo

SEQ ID NO: 33465 - DNA, 822 bp, Homo sapiens; identical to SEQ ID NO: 31267
  chr16:410895-411717
  hypo

SEQ ID NO: 33466 - DNA, 279 bp, Homo sapiens
  chr16:4203909-4204188
  hypo
cgagactccgtctcaaaaaaaaaaaaaaaaaaagaactgatcaatgagccgccagatgccgagcaccacaccggcaagggctgcggatcgtgaacactggagattcaaacagcagagagaccacctcacaccattctgtcaacccgtgccaagtgcccaggcctgtgccaacgcttggcacacaatgattcaacagaggcagcctcatgcttcacggcccgatgctcgcttgttgtctatggccgtaggctaacctgcaaataaagaactggactgcac

SEQ ID NO: 33467 - DNA, 72 bp, Homo sapiens; identical to SEQ ID NO: 11186
  chr16:440413-440485
  hypo

SEQ ID NO: 33468 - DNA, 831 bp, Homo sapiens
  chr16:4430998-4431829
  hypo
cgccaggggaccacggtgccccgagacgtgccacccgacacggtggggctgtacgtctttgagaacggcatcaccatgctcgacgcaggcagctttgccggcctgccgggcctgcagctcctggacctgtcacagaaccagatcgccagcctgcccagcggggtcttccagccactcgccaacctcagcaacctggacctgacagccaacaggctgcatgaaatcaccaatgagaccttccgtggcctgcggcgcctcgagcgcctctacctgggcaagaaccgcatccgccacatccagcctggtgccttcgacacgctcgaccgcctcctggagctcaagctgcaggacaacgagctgcgggcactgcccccgctgcgcctgccccgcctgctgctgctggacctcagccacaacagcctcctggccctggagcccggcatcctggacactgccaacgtggaggcgctgcggctggctggtctggggctgcagcagctggacgaggggctcttcagccgcttgcgcaacctccacgacctggatgtgtccgacaaccagctggagcgagtgccacctgtgatccgaggcctccggggcctgacgcgcctgcggctggccggcaacacccgcattgcccagctgcggcccgaggacctggccggcctggctgccctgcaggagctggatgtgagcaacctaagcctgcaggccctgcctggcgacctctcgggcctcttcccccgcctgcggctgctggcagctgcccgcaaccccttcaactgcgtgtgccccctgagctggtttggcccctgggtgcgcgagagccac

SEQ ID NO: 33469 - DNA, 847 bp, Homo sapiens; identical to SEQ ID NO: 15637
  chr16:4431854-4432701
  hypo

SEQ ID NO: 33470 - DNA, 507 bp, Homo sapiens; identical to SEQ ID NO: 15638
  chr16:46683305-46683812
  hypo

SEQ ID NO: 33471 - DNA, 409 bp, Homo sapiens; identical to SEQ ID NO: 25169
  chr16:4845976-4846385
  hypo

SEQ ID NO: 33472 - DNA, 121 bp, Homo sapiens; identical to SEQ ID NO: 15640
  chr16:48663537-48663658
  hypo

SEQ ID NO: 33473 - DNA, 246 bp, Homo sapiens; identical to SEQ ID NO: 15641
  chr16:57559728-57559974
  hypo

SEQ ID NO: 33474 - DNA, 148 bp, Homo sapiens
  chr16:58192178-58192326
  hypo
cgtgatctctctatacgcgttaagacgtttgatttggttcttgttctgcttatggaaaagtgggagaaccgcaacagacctggggaaagagacgggaggagggaaagacgtcattaatcaacctgagcgggcgaggggaggcctccac

SEQ ID NO: 33475 - DNA, 603 bp, Homo sapiens; identical to SEQ ID NO: 24017
  chr16:611800-612403
  hypo

SEQ ID NO: 33476 - DNA, 374 bp, Homo sapiens
  chr16:68504020-68504394
  hyper
cgttctgtgcagttagtggtagcgtttgccagaaaaaaataatagattgtaaaggaagcaacacggaacaaccacgtttttgttattcgaaatgcagctacacgtgtttacagtccttaaccatttcatctgacagcctggggagacagacttctaatttgtgttttgataaactgagagtgacagagcggttgttggccctgcttggaggtggagtgatggtgtggtcagaagggaagccggagggaagttacactcgtggggtgtgtgttatgtgacctttgtttaatacacgttcttatttgatcttcacaaccatgccacttggcaggtggggaaactgaggtgcagggcagggtagtcatttggccatc

SEQ ID NO: 33477 - DNA, 574 bp, Homo sapiens; identical to SEQ ID NO: 15646
  chr16:69354730-69355304
  hypo

SEQ ID NO: 33478 - DNA, 1204 bp, Homo sapiens; identical to SEQ ID NO: 23502
  chr16:734744-735948
  hypo

SEQ ID NO: 33479 - DNA, 86 bp, Homo sapiens; identical to SEQ ID NO: 15647
  chr16:74984568-74984654
  hypo

SEQ ID NO: 33480 - DNA, 794 bp, Homo sapiens; identical to SEQ ID NO: 23503
  chr16:75148493-75149287
  hypo

SEQ ID NO: 33481 - DNA, 823 bp, Homo sapiens; identical to SEQ ID NO: 31295
  chr16:809572-810395
  hypo

SEQ ID NO: 33482 - DNA, 109 bp, Homo sapiens; identical to SEQ ID NO: 15651
  chr16:84170884-84170993
  hypo

SEQ ID NO: 33483 - DNA, 766 bp, Homo sapiens; identical to SEQ ID NO: 25187
  chr16:845724-846490
  hypo

SEQ ID NO: 33484 - DNA, 175 bp, Homo sapiens; identical to SEQ ID NO: 15653
  chr16:85465108-85465283
  hypo

SEQ ID NO: 33485 - DNA, 588 bp, Homo sapiens; identical to SEQ ID NO: 31301
  chr16:85517169-85517757
  hypo

SEQ ID NO: 33486 - DNA, 105 bp, Homo sapiens; identical to SEQ ID NO: 15656
  chr16:87471750-87471855
  hypo

SEQ ID NO: 33487 - DNA, 88 bp, Homo sapiens; identical to SEQ ID NO: 15657
  chr16:88458615-88458703
  hypo

SEQ ID NO: 33488 - DNA, 54 bp, Homo sapiens
  chr16:88534616-88534670
  hypo
cgcgagcccaccgcccctcaagcacccgcgagcccaccgtcccgacgcacccgc

SEQ ID NO: 33489 - DNA, 416 bp, Homo sapiens
  chr16:88948339-88948755
  hypo
cgggccgtccccgaacacgtcctgcctcaaagaggcctcggcactgcttttgcccacacttcttgcaagactcaggatagactctgggaagagccagtgagcagaaagtaagtggagggaagcaaggcccgccatgagggttttaggaatcctcctccctgggcctctcgagatgcctgggctgcgctgacagctgggaggaggggggctcaggtgaaggacccagccgctgcgcagggacggcgcaggccacacaggagggcactgagctcaggggcgcccacacagccctgctgtctccagcagccccaggccccatggggcagagccatggccgtgtttatgcataggcatacaggtgtggctgtgtggggacatggctgtgtgggtgtagctgtgtgtgggcatggctgtgc

SEQ ID NO: 33490 - DNA, 595 bp, Homo sapiens
  chr16:88952189-88952784
  hypo
cgcccgtgcagccaccaagcctgctggccctagtacacctcgccacgctccctcagcccgagagagccggccgggctggctgcagccccagaggaggttccctctcttacccagaggggagcagggtgagccgcgtgtccacggcacccccagcccagatccccggagcccacaggtacctgtcgggcgtcctcctcttgccgttctcgttgacttccagtagcagctctgaggagtcgatgggggaggaggcgctggcgtccagcaggagctgctcatgctgggccaagtactgggcgggcgtctgcttggccaggcgtgcacagtgcaggagctcccgctgcagcaagggcaggtttgcctgtggggtggggaaggagggcctgggtagcatgcaggggtgcacagccctgctcaggtccgagcagagggggcctgggctgggtggccgaaagctcaacttgacctcgggcctcaaaggtcaaggtgctcgacctctctgggcctcaagttccttcctagcagtgccatgggagggtggcgtgggagggtgggcacagagcttcgcaggagtgcctcacctgggccacacggc

SEQ ID NO: 33491 - DNA, 335 bp, Homo sapiens; identical to SEQ ID NO: 24039
  chr16:89072478-89072813
  hypo

SEQ ID NO: 33492 - DNA, 380 bp, Homo sapiens; identical to SEQ ID NO: 29944
  chr16:89109400-89109780
  hypo

SEQ ID NO: 33493 - DNA, 929 bp, Homo sapiens; identical to SEQ ID NO: 27691
  chr16:89119921-89120850
  hypo

SEQ ID NO: 33494 - DNA, 391 bp, Homo sapiens
  chr16:89141710-89142101
  hypo
cgggtacctgccgtagctatgtccagcccaggtcactgagtgtgtaaacacacctcacgtccgcgtcgagaaggcgtcaccagtgcctgctgaacaaagaaggtctggcccagtgtggctgcagccaggaggccaaggagaccagtgagagcaccgccctcgccactgacgctcttgctgggctcattgttgtgctgggcccagtggagcaaaagacaggcctccagccggggcacctcccaacaactctgcacccttgattgaaatgcaatgtctgcggctgacggccacgtgactgcaacccaccctcccggctgccgattaattttaccttttgtgctgccagctgcagtgggttcatggtgagagctgagttgatgcatgcgagtgc

SEQ ID NO: 33495 - DNA, 364 bp, Homo sapiens
  chr16:89219313-89219677
  hypo
cgatttggaaatgtggaggtcgaggttgacagcgacaccgaggtcgaagccagttgcccctggagagcgagagactgggctgggccgactcccacctctgtcgcgagaggcctacgggcaggggcaggtgggcagggggactgtgctgggtctctggccgcgtctggacggcaggcgacactttctccacaaaaagcgtcaagaaaccacgacacttggtttctggacttttccgcggaacagtaaccagaacaatcgccatgaaggttcgtttctgtcatggctcagtgcagcctggacgccctggaccagcccctcctgcgcctgggccacggccgctgccttcagggcatcactggtgggc

SEQ ID NO: 33496 - DNA, 382 bp, Homo sapiens
  chr16:89702614-89702996
  hypo
cggggggtgggctgagacctggctgcatcagctcctggcaccccctgcggcccacagttctggtccgtgtacacgccctgcgacacccagaacaaagacgccgtgcggaggacgctggagcagatggacgtggtccaccgcatgtgccggatgtacccggagaccttcctgtatgtcaccagcagtgcaggtggggtcctgacctgggtcctccaggtcctgcgtcttctcacccagccctcatcctgagcagcaggtgccggtcaggacacctcaccctccagataccaggtgcccactcccctgcaccctgactctccccgcaggcattcggcaggccttccgggaagggaaggtggccagcctgatcggcgtggagggc

SEQ ID NO: 33497 - DNA, 310 bp, Homo sapiens; identical to SEQ ID NO: 15663
  chr17:1028640-1028950
  hypo

SEQ ID NO: 33498 - DNA, 194 bp, Homo sapiens; identical to SEQ ID NO: 15664
  chr17:1462644-1462838
  hypo

SEQ ID NO: 33499 - DNA, 1225 bp, Homo sapiens
  chr17:16283879-16285104
  binary
cgaaactccgtctcaagaaaaaaaaggaaagaccccccctccttctcccgccggaaataccctctttcaggacggcgcgcctgtgcggcgcacgcgcgctcagttacttagcaacctcggcgctaagccaccccaggtggagcccagcaacaacagagccaccgcgtcccccaccaatcagcgccgacctcgccttcgcaggcctaaccaatcagtgccggcgctgcaaggaagtttccagagctttcgaggaaggtttcttcaactcaaattcatccgcctgataattttcttatattttcctaaagaaggaagagaagcgcatagaggagaagggaaataattttttaggagcctttcttacggctatgaggaatttggggctcagttgaaaagcctaaactgcctctcgggaggttgggcgcggcgaactactttcagcggcgcacggagacggcgtctacgtgaggggtgataagtgacgcaacactcgttgcataaatttgcgctccgccagcccggagcatttaggggcggttggctttgttgggtgagcttgtttgtgtccctgtgggtggacgtggttggtgattggcaggatcctggtatccgctaacaggtactggcccgcagccgtaacgaccttgggggggtgtgagaggggggaatgggtgaggtcaaggtggaggcttcttggggttgggtgggccgctgaggggagggcgtgggggaggggagggcgaggtgacgcggcgctgggcctttccgggacagtgggccttgttgacctgaggggggcgagggcggttggcgcgcgcgcgcgttgacggaaactaacggacgcctaaccgatcggcgattctgtcgagtttacttcgcggggaaggcggaaaagaggtagtttgtgtggtttctggaagcctttactttggaatcccagtgtgagaaaggtgccccttcttgtgtttcaatgggatttttatttcgcgagtcttgtgggtttggttttgttttcagtttgcctaacaccgtgcttaggtttgaggcagattggagttcggtcgggggagtttgaatatccggaacagttagtggggaaagctgtggacgcttggtaagagagcgctctggattttccgctgttgacgttgaaaccttgaatgacgaatttcgtattaagtgacttagccttgtaaaattgaggggaggcttgcggaatattaac

SEQ ID NO: 33500 - DNA, 208 bp, Homo sapiens; identical to SEQ ID NO: 9229
  chr17:17224346-17224554
  hypo

SEQ ID NO: 33501 - DNA, 256 bp, Homo sapiens
  chr17:17717893-17718149
  hypo
cgggaccaggcaggaggaacctgccgtgcactcactcagactcctgcagcacccggggcaggtgctccaccagcgggcacagccgctcagccgcctcctcatcccgccgcagccagtggatcaccacagctgtcagagaggcccaccacttggccaccgggtctacgcctgcagaagagggagggtcccctgaaccctcagtcacgctgcacgggggagctgagaagggagccaggacaggggccggggactcacc

SEQ ID NO: 33502 - DNA, 142 bp, Homo sapiens; identical to SEQ ID NO: 15670
  chr17:18083378-18083520
  hypo

SEQ ID NO: 33503 - DNA, 101 bp, Homo sapiens; identical to SEQ ID NO: 25215
  chr17:2207862-2207963
  hypo

SEQ ID NO: 33504 - DNA, 121 bp, Homo sapiens; identical to SEQ ID NO: 15671
  chr17:29773391-29773512
  hypo

SEQ ID NO: 33505 - DNA, 563 bp, Homo sapiens; identical to SEQ ID NO: 31336
  chr17:35303090-35303653
  hyper

SEQ ID NO: 33506 - DNA, 236 bp, Homo sapiens
  chr17:36204375-36204611
  hyper
cgggtgtcagtaaccaggggggccgcctgaggcgtcgcatccaacccccgcccaggtttccgccccgggccagcagtagccagtccccgagggcccatcttccagccctgaagcggtaaacgcctcacctctagtggcgagtgcgaggaaccgcaccctagcccgcctgactgtccagccccgggtggtgcccatcctgcctgttgttccctctcaaaccaaataaacctcccgac

SEQ ID NO: 33507 - DNA, 93 bp, Homo sapiens; identical to SEQ ID NO: 15674
  chr17:36864049-36864142
  hypo

SEQ ID NO: 33508 - DNA, 593 bp, Homo sapiens; identical to SEQ ID NO: 15675
  chr17:3716199-3716792
  hypo

SEQ ID NO: 33509 - DNA, 179 bp, Homo sapiens; identical to SEQ ID NO: 15676
  chr17:37819059-37819238
  hypo

SEQ ID NO: 33510 - DNA, 230 bp, Homo sapiens; identical to SEQ ID NO: 15677
  chr17:43180339-43180569
  hypo

SEQ ID NO: 33511 - DNA, 336 bp, Homo sapiens; identical to SEQ ID NO: 15678
  chr17:4392128-4392464
  hypo

SEQ ID NO: 33512 - DNA, 242 bp, Homo sapiens; identical to SEQ ID NO: 25241
  chr17:4446272-4446514
  hypo

SEQ ID NO: 33513 - DNA, 507 bp, Homo sapiens; identical to SEQ ID NO: 15681
  chr17:4795549-4796056
  hypo

SEQ ID NO: 33514 - DNA, 104 bp, Homo sapiens; identical to SEQ ID NO: 24074
  chr17:49229457-49229561
  hypo

SEQ ID NO: 33515 - DNA, 144 bp, Homo sapiens; identical to SEQ ID NO: 24075
  chr17:57297033-57297177
  hypo

SEQ ID NO: 33516 - DNA, 713 bp, Homo sapiens; identical to SEQ ID NO: 25258
  chr17:58498618-58499331
  hyper

SEQ ID NO: 33517 - DNA, 235 bp, Homo sapiens; identical to SEQ ID NO: 15684
  chr17:59239030-59239265
  hypo

SEQ ID NO: 33518 - DNA, 738 bp, Homo sapiens; identical to SEQ ID NO: 24077
  chr17:61777761-61778499
  binary

SEQ ID NO: 33519 - DNA, 707 bp, Homo sapiens; identical to SEQ ID NO: 15687
  chr17:6474321-6475028
  hypo

SEQ ID NO: 33520 - DNA, 206 bp, Homo sapiens; identical to SEQ ID NO: 15688
  chr17:66416586-66416792
  hypo

SEQ ID NO: 33521 - DNA, 110 bp, Homo sapiens; identical to SEQ ID NO: 31379
  chr17:66434339-66434449
  binary

SEQ ID NO: 33522 - DNA, 462 bp, Homo sapiens
  chr17:73090991-73091453
  hypo
cgttgggagcagggcagagggagggttctctgcagtcgccgtggacacagggacctgccctcagctcctgggagctctccagggagactgcagagaccccggcctcggaggggcccggtggacagcagcccgagctgatggcccacaggcctctgcaggcgtgtgtctgctggccgcagctgcccatctccccggctacctcctggctactccctccacttgccaccagcagcctgcctattattccaggtcctgccctcaaactgggagggaggtgaggctcggagaaagcgccaccctcctgggtgagctctgaatctgccacatggcctctggcctgcagggttggggcagggagtgggaatcccagagggctgcttctcacacaggcagagcagggttcctgggccaggggctaggaaccgggcacccggcggggaacctactccccagctgacttgc

SEQ ID NO: 33523 - DNA, 130 bp, Homo sapiens
  chr17:73215304-73215434
  hypo
cggcccggcacggtggctcacaggaagtagtgggccaaatgtttgagtctctgattgattcgctaaggtttgttgttgtcgtttagagacagggtttcgctttgcggcctgggcgggagtgcagtgatgc

SEQ ID NO: 33524 - DNA, 230 bp, Homo sapiens
  chr17:73236176-73236406
  hypo
cggactgttccctctatgaacaacagaaagggtggtgagccgagggcgggtggggagggcctgccgctggaacggggcgcagccctccaaggactgcacggaagacagccccggaggcactcattgttccccgctgcagctggcacgctctggagggaaggacagctaactgcagcccaggagacatgacgctggaaagtggaggtccttggcacagtagtgctgtcacc

SEQ ID NO: 33525 - DNA, 416 bp, Homo sapiens; identical to SEQ ID NO: 31386
  chr17:7368962-7369378
  hypo

SEQ ID NO: 33526 - DNA, 396 bp, Homo sapiens; identical to SEQ ID NO: 31388
  chr17:74390245-74390641
  hypo

SEQ ID NO: 33527 - DNA, 176 bp, Homo sapiens; identical to SEQ ID NO: 15696
  chr17:74858667-74858843
  hypo

SEQ ID NO: 33528 - DNA, 689 bp, Homo sapiens; identical to SEQ ID NO: 10387
  chr17:75213347-75214036
  hypo

SEQ ID NO: 33529 - DNA, 281 bp, Homo sapiens; identical to SEQ ID NO: 15698
  chr17:75848787-75849068
  hypo

SEQ ID NO: 33530 - DNA, 417 bp, Homo sapiens
  chr17:76187077-76187494
  hypo
cgatgggttgtccgactgggagcagaggaagccttgaggacctactcacagataggaattgaaggtactagtgtgacctctccgtggccgcattgggtgtccttaagcatgtggcagtgattcagaatgctgggggttgggggggctgtgctgcaccacctgggcctcgaggggcatttcccaaacaccaggcactttataaacctccctgctcaggggcaggtgcccaggaccccttgctgcagggactactggaggcaggagaggtccgggggaggtccacggctcagtcgaccatgcctggcctttcttgctcagccatccatacccaggcccgtaaggctgcgggctgtggttggcatagggaggtgaagtgaacagaggaacgttccccatccgctgctgaatgtggaatgc

SEQ ID NO: 33531 - DNA, 443 bp, Homo sapiens; identical to SEQ ID NO: 15700
  chr17:76818622-76819065
  hypo

SEQ ID NO: 33532 - DNA, 195 bp, Homo sapiens
  chr17:77084533-77084728
  hypo
cgtggcgtgtggcagaatcgcaccgccccggctccccagcccaccgccatgcagggctcgcgtgcgggaaaactaatatgccggcgtttaagcctgtgcccctctgctgggtgtaactgcgctgaaataaatgatctgacaatgtgaagcgtgcagtcgagtcctggtgtgatggggcgcgggcagcaccagccc

SEQ ID NO: 33533 - DNA, 250 bp, Homo sapiens
  chr17:78078886-78079136
  hypo
cggctggacgtgatgatggagactgagaaccgcctccacttcacggtgggcagggcaggggcgggggcggcggccagggcagagggtgcgcgtggacatcgacacccacgcacctcacaagggtggggtgcatgttgcaccactgtgtgctgggcccttgctgggagcggaggtgtgagcagacaatggcagcgcccctcggggagcagtggggacaccacggtgacaggtactccagaaggcagggctc

SEQ ID NO: 33534 - DNA, 399 bp, Homo sapiens; identical to SEQ ID NO: 15701
  chr17:78163400-78163799
  hypo

SEQ ID NO: 33535 - DNA, 317 bp, Homo sapiens
  chr17:78599441-78599758
  hypo
cgagttccatattgaaatatttatttatttttttctgttgtgttttcagatgaagacagtcagtgttgccttagttttgtgcctgaatgttggtgtggaccctcccgatgtggtgaagaccacgccctgtgcacgcttggaatgctggatcggtgagtatgcctccctcacgcgctgccacaaaggccgtctggccggctctggcctgggcggggctcgccaagcctgtggtctggtccaggggcccgtctccagctgtgcaaatctgaggggtttttctttctggagtcacatcacctttgagtaatttccgatgc

SEQ ID NO: 33536 - DNA, 195 bp, Homo sapiens; identical to SEQ ID NO: 15702
  chr17:79045500-79045695
  hypo

SEQ ID NO: 33537 - DNA, 415 bp, Homo sapiens; identical to SEQ ID NO: 15703
  chr17:79175952-79176367
  hypo

SEQ ID NO: 33538 - DNA, 483 bp, Homo sapiens
  chr17:79887422-79887905
  hypo
cggctcctggccagctccccacggagagcccaggacacttgtccctggacacagtggtgcagccatgcttgggccaaaccatgaggccaccagaaccgcgaaaggctactgtactgagagggatactgcgagagaggcccacaggtttccaagcatccctctcactccgcacactcatctccacgaccggctttaagtgcggccttgaggcctggctccctgtttggacttctctgcacctccaggagctcacttcccgtcacagctggatgcctcctcccgcaggcacctcccgggcatcctcccgccccaggctgcaccttctgtgggactggcccccgcaggcacctcccgggcaccctcccgccccaggctgcagcttctgtgggactgagccccgcaggcacctccccggcatcctcccgccccaggctgcaccttctgtgggactgagccccgcaggcacttccccggcatcctccc

SEQ ID NO: 33539 - DNA, 542 bp, Homo sapiens
  chr17:80654614-80655156
  hypo
cgctcaatctccagccctgtcctccaggcgctcaatctccagccctgtcctccaggcgctcaatctccagggcagcgctggccctcggactttgccacagcgacatccgaactatctagaaatgtgacgaatggaagctttttgttttctttccttctaattacacttccacagccacacgtggctcatggcatcctactggacaccacggtcctagagacctgccaccgagcggggaggggggtaggacatgcgggggcagcggcgcctggggacaggtagagacgcaggctcccctcctgccccacggagcacactctgcacccaccagctgccagagactcccccgcatgctgcagtttcaggaggcctctgggtgctggtcgtgagcccaagcccatctcagctgctcccccaaactctgcccattcctcaccccgtcccctaagctgaggtgtggccgggcacctgagtcccaccccacgctccacagtctcaggccaccccctccagccgtgccacactcccttggtgctcacgcc

SEQ ID NO: 33540 - DNA, 330 bp, Homo sapiens; identical to SEQ ID NO: 15707
  chr17:80712024-80712354
  hypo

SEQ ID NO: 33541 - DNA, 121 bp, Homo sapiens; identical to SEQ ID NO: 15708
  chr17:80749629-80749750
  hypo

SEQ ID NO: 33542 - DNA, 804 bp, Homo sapiens
  chr17:80797632-80798436
  hypo
cgtggtctgcatcccagccatgcacctgctgggtcctgagtaatcctcggagcccagagcaaggcagagcagacacggagcaaacgctgcgttcagctgggtattttagatacgtctgagaagagttttaaaataaaacttgaatttgaaaagaaatagtgagtacttaccagaggtgggcagtgctgggatgtggccggtcttggtgccggtggctggcggtgctcaggaagcagtacctgttctcacgcttgctgggtgaaactggagcctgctgttccagtgggagggatttaagtgtaggagttgagccctcggggcgtagagatgcacctgatattcctcctgcccgcagctacgattcatgtgtttgcacccaccgagctgctgcgggcagcctccccagcactggacccagcaagcaagttatctcgccgactcccagcgctgtctccagactcaactgtctgtgagtgcggcgtcggtgctgcctggacggccatatgtcagagggctttcgatgtgtccgcagttagaatagagattactatattcatcagaatcacacccgatgaatatttggcgtcatgataaagacatgtgagactttcctttagaacttgagcatgtgtacgcaggaggcaaacacttggattgattctcaagcgcgcataccctgggaggcacagtattcatggcgtccttgccatgaggtccagtgaggcctttgaggatctgtggaccttccaccctctaccctgctcctgagagtctctgtccctggtcctcctcaggagctgagcc

SEQ ID NO: 33543 - DNA, 514 bp, Homo sapiens; identical to SEQ ID NO: 25289
  chr18:10589052-10589566
  hypo

SEQ ID NO: 33544 - DNA, 240 bp, Homo sapiens; identical to SEQ ID NO: 32681
  chr18:12375127-12375367
  hypo

SEQ ID NO: 33545 - DNA, 115 bp, Homo sapiens; identical to SEQ ID NO: 15712
  chr18:12375778-12375893
  hypo

SEQ ID NO: 33546 - DNA, 125 bp, Homo sapiens; identical to SEQ ID NO: 26521
  chr18:12375948-12376073
  hypo

SEQ ID NO: 33547 - DNA, 433 bp, Homo sapiens
  chr18:13131747-13132180
  hypo
cgacggtgcctaattgatacatacaaatcaatagtcttcctatacataaggaaataatgaacgaccagaaaacagcggaagacaaaacagcagaaataagtttagaaatgtgtgaagtgtatacaaaggaaactgtcaggttcctctggagcacatcggagacttgagtaggagtaacttaccggactgcactgggggccttcttccgtagcatgaacagcacccatgagtggggatggggctggggccgcaccagtccaggcagcatttcccccagtggagggggagctctgcaggtgcccagcctcccacgctgtttcagtagcttgttaggaactctcccagacacggatagtggcccagctgcccatccctgccgtcactgggtctgagcgtggcctgtcctttgtttaaatcctacatttagctggcc

SEQ ID NO: 33548 - DNA, 340 bp, Homo sapiens; identical to SEQ ID NO: 15714
  chr18:13442504-13442844
  hypo

SEQ ID NO: 33549 - DNA, 365 bp, Homo sapiens
  chr18:3498992-3499357
  hyper
cgggtacgggaagtggggggctgaggggggcccggggggcggctcctgcgaggtggacaactacaccgcgacagtggaagtcaccgagctcgggagcggacgggctcggagggggagaggcagccggcagaggagcggccgggggaggaggggacagatgcttggcggcggcggccgggctgcggggcgctcagagccgggtctgcgcctcggggatgtagatctcgatgctctcggcgctctcggtggccgagttctggcggacggacgcggcgcgcttggcggccatcaggcgcttgcgggcctcctggcgctgcgagctctccagcgagcgctcccggatcagcggcgcggggcccttcgcc

SEQ ID NO: 33550 - DNA, 69 bp, Homo sapiens; identical to SEQ ID NO: 15716
  chr18:3580264-3580333
  hypo

SEQ ID NO: 33551 - DNA, 185 bp, Homo sapiens; identical to SEQ ID NO: 15717
  chr18:3580794-3580979
  hypo

SEQ ID NO: 33552 - DNA, 241 bp, Homo sapiens; identical to SEQ ID NO: 15718
  chr18:3581880-3582121
  hypo

SEQ ID NO: 33553 - DNA, 141 bp, Homo sapiens; identical to SEQ ID NO: 13644
  chr18:47285293-47285434
  hypo

SEQ ID NO: 33554 - DNA, 133 bp, Homo sapiens; identical to SEQ ID NO: 15720
  chr18:59500732-59500865
  hyper

SEQ ID NO: 33555 - DNA, 278 bp, Homo sapiens; identical to SEQ ID NO: 31424
  chr18:72347372-72347650
  hypo

SEQ ID NO: 33556 - DNA, 1056 bp, Homo sapiens; identical to SEQ ID NO: 31428
  chr18:77508739-77509795
  hypo

SEQ ID NO: 33557 - DNA, 42 bp, Homo sapiens; identical to SEQ ID NO: 15726
  chr18:77510442-77510484
  hypo

SEQ ID NO: 33558 - DNA, 268 bp, Homo sapiens; identical to SEQ ID NO: 13664
  chr18:77535504-77535772
  hypo

SEQ ID NO: 33559 - DNA, 738 bp, Homo sapiens; identical to SEQ ID NO: 23538
  chr18:77542640-77543378
  hypo

SEQ ID NO: 33560 - DNA, 620 bp, Homo sapiens
  chr18:77627972-77628592
  hypo
cggctgctgcctgcagtctgggtgtctggcggccaggctgccttcccccgtcgtccccatgaggtccaggtcctgatcgtgcttccaaaaggtgctggagtgtttggctgtcctcggtcgaatatccaggagggaaaattcatttgtgtcacgttagagaataggagaagtttgggctgccccagctacagaagtcaccccaggaacaccagccctaacccttactgtggaccccaaaaccccagatcctctcagggacaaccctgggctccgtggcacccagcccttcacactcctggcacgcacccctaaattgcttgtccagttaagaagcagtcgccctccgcgtggggcctggtgacccgtgtccgagcgtccggttaagaagcagtcgccctccgcgtggggcctggtgacccgtgtccaagcgtccggttaagaagcagtcgccctctgcatggggcctggtgacccgtgtccgagcgttgcagctgctgctgactgaccgaaggtctttttcggaagcgattcagttgtgtgggtgaagagccaagaaaaggtggttctcactcctgtcctaagagaatatttcaaagcatgagaattggcgtgttggtgac

SEQ ID NO: 33561 - DNA, 400 bp, Homo sapiens; identical to SEQ ID NO: 28768
  chr18:77644520-77644920
  hypo

SEQ ID NO: 33562 - DNA, 224 bp, Homo sapiens; identical to SEQ ID NO: 25315
  chr18:9912782-9913006
  hypo

SEQ ID NO: 33563 - DNA, 652 bp, Homo sapiens; identical to SEQ ID NO: 24125
  chr19:1003171-1003823
  hypo

SEQ ID NO: 33564 - DNA, 74 bp, Homo sapiens; identical to SEQ ID NO: 15734
  chr19:10687853-10687927
  hypo

SEQ ID NO: 33565 - DNA, 292 bp, Homo sapiens; identical to SEQ ID NO: 22824
  chr19:10691764-10692056
  binary

SEQ ID NO: 33566 - DNA, 637 bp, Homo sapiens; identical to SEQ ID NO: 27760
  chr19:10823276-10823913
  hypo

SEQ ID NO: 33567 - DNA, 522 bp, Homo sapiens; identical to SEQ ID NO: 15739
  chr19:11001603-11002125
  hypo

SEQ ID NO: 33568 - DNA, 257 bp, Homo sapiens; identical to SEQ ID NO: 23542
  chr19:11003007-11003264
  hypo

SEQ ID NO: 33569 - DNA, 444 bp, Homo sapiens; identical to SEQ ID NO: 15741
  chr19:11004773-11005217
  hypo

SEQ ID NO: 33570 - DNA, 125 bp, Homo sapiens
  chr19:11658618-11658743
  hypo
cgaaaggaaacaaggtgaacgtgggagtgaagtacgcagagaagcaggagcggaaattcgagccggggaagctaagagaagggcggaacatcattgggctgcaggtaccgccctgtcctcactgc

SEQ ID NO: 33571 - DNA, 397 bp, Homo sapiens; identical to SEQ ID NO: 15742
  chr19:1312697-1313094
  hypo

SEQ ID NO: 33572 - DNA, 526 bp, Homo sapiens; identical to SEQ ID NO: 25324
  chr19:13209965-13210491
  hyper

SEQ ID NO: 33573 - DNA, 576 bp, Homo sapiens; identical to SEQ ID NO: 7077
  chr19:1333769-1334345
  hypo

SEQ ID NO: 33574 - DNA, 97 bp, Homo sapiens; identical to SEQ ID NO: 15744
  chr19:15382528-15382625
  hypo

SEQ ID NO: 33575 - DNA, 120 bp, Homo sapiens; identical to SEQ ID NO: 25340
  chr19:16638602-16638722
  hypo

SEQ ID NO: 33576 - DNA, 301 bp, Homo sapiens
  chr19:17757928-17758229
  hypo
cgtgcacacacggagatgagatggaatgcacccgaccgagtgagtgcgcgctgcaaaggagagggaccaggccatgggacagggcatgagacaggtctcagagggtggagaaggaggggccctatggcggcccacgccccctcaccggtgatgctgatcttggcggaccacttggacgtgccgtccagcacgctctgcttgaccgccttcatctgctgcgtgtgcgccgtcttggtcaccgcgaagatctcctggatgagctcgaagatctcgggcttgttgcgctcccggatcttcatgc

SEQ ID NO: 33577 - DNA, 666 bp, Homo sapiens; identical to SEQ ID NO: 24136
  chr19:17759152-17759818
  hypo

SEQ ID NO: 33578 - DNA, 1191 bp, Homo sapiens; identical to SEQ ID NO: 15748
  chr19:17837853-17839044
  hypo

SEQ ID NO: 33579 - DNA, 537 bp, Homo sapiens; identical to SEQ ID NO: 31466
  chr19:1799819-1800356
  hypo

SEQ ID NO: 33580 - DNA, 118 bp, Homo sapiens
  chr19:18126529-18126647
  hypo
cgcggatggacatctgggttgtttccacggcttggctatagtgaatcttgctgctaagaacacgtgtgttcaaggattactttgaaaacccacggagctgttaggtggccctagtggc

SEQ ID NO: 33581 - DNA, 189 bp, Homo sapiens; identical to SEQ ID NO: 28802
  chr19:18331006-18331195
  hypo

SEQ ID NO: 33582 - DNA, 727 bp, Homo sapiens
  chr19:18856011-18856738
  hypo
cggaaggcgcctgtacttggctctggtggtgcctggagtgcctggaggaggctgcgggggagggtgtgtgggggccgcgtctcaatcaagagcagccctgggctccacaaggaagcctcccaggaactcgcgcttggccaggtgggccccgaaacagtcctgggctggaagcccctgggctgtctcttggcaggcccctccagggatgacgtaggtgggggtaggaggccgtccaggcccggagagagagggcggaggcctgtctgcacctggtgagactggggaggagggctgcctaggccggctacatccctggcacccggcgggcgctggccccgagcttgtgccgctctgcctggcctgtgcatgccagctgcactgcacgcccctgccaccctggctcccgggaccccagctcacaccccctccctaccccccagtgcttggagagccagggagctggggctgaaggaagaagcccatcccaggctgtggagcgatggccgagggtgctccagagtggggggccctgcgatcagactctggggccagcgctggggccacagctggtaaccattgtttggatttctctctctctgtttccatctcctcctcccccagacccccttccaatcctcgggcctggacaccagccggaccacccggcaccatgggctggtggacagggtgtaccgggagcgtggccggctcggctccccacaccgcc

SEQ ID NO: 33583 - DNA, 183 bp, Homo sapiens; identical to SEQ ID NO: 26576
  chr19:18880002-18880185
  binary

SEQ ID NO: 33584 - DNA, 555 bp, Homo sapiens
  chr19:18994695-18995250
  hypo
cgggcccacatcccctcctcagccttcctgcctctggtctgtcccctcgtcggacccctgagcactctgaccttggaaccctgagcactccgacctgatgtgatcccctccacggcctcctctgtgccccgccgcaacatcagcctccgcactctgtgtgggctgtgcctcggccccctgccacccgatcctgtccttaccggaaggcgtaggaggagacgatgaggatgagagtgaccacgtggtggagcagcatgaccaccgagtccttgcgccaggtgtccatgtatagcgtagcgtagatggagtggccatagaagcttccctggagcaggtaggcggctgcaatgtcccgtggcactgccatgcccggcgtccagtctggggagagccaaatctcacagtcagggccctgcgaagcctctagacgatcgcctccatgacccggtgacaccctccaagccacacgtgtcctcccagtacccaggtaaccatgcgtgtctgactgctggctttccattcccaattctatttttttttttttttctttgagac

SEQ ID NO: 33585 - DNA, 1260 bp, Homo sapiens; identical to SEQ ID NO: 23551
  chr19:1911845-1913105
  hypo

SEQ ID NO: 33586 - DNA, 270 bp, Homo sapiens; identical to SEQ ID NO: 15755
  chr19:19576172-19576442
  hypo

SEQ ID NO: 33587 - DNA, 149 bp, Homo sapiens; identical to SEQ ID NO: 15756
  chr19:19719325-19719474
  hypo

SEQ ID NO: 33588 - DNA, 164 bp, Homo sapiens; identical to SEQ ID NO: 15757
  chr19:32374316-32374480
  hypo

SEQ ID NO: 33589 - DNA, 517 bp, Homo sapiens
  chr19:32898192-32898709
  hypo
cgacgctccctgggatagcagctgccctgattggcacacccccgcagtcatcaccactgaggcgtattcctgaagctgccagtgtgaattgttttatagaacactggtgttaaaattcaggtacctgagacaaaacaatattttaattcttcaaaatccggttgtcaacacatttactatggagtatctcccacgtggccacttctgtgggaggtactgaagacctactaccgcctatggaagtagaaaataatatacaactgtgtagttacgtgacgcattgcgtggtaactgctatggctcagggagggagaagatcagccggaactggaatgtcccaagatgttctggaagaaaagcagtggctcgtttgtgttgcttacctgtattcctgactcctggcagggcctgctgtagagcacatgcttcatgaataaatatgattgagttgaataaatatttgaattgtgttttgagtgtagctttgaaggccagcaacgatttagatggcaagatc

SEQ ID NO: 33590 - DNA, 302 bp, Homo sapiens
  chr19:33996103-33996405
  hypo
cgcggcccggcctgccttcagctacaaacaatgctgcctcgccgactctcactctgctctccacagaaggcagcggcatttgctctgcggtggaagccggcagccatctgaggatgttagctggtcagagacaaaagcagacctcgccacagtgacgcaggtgcctatgcccaaagaccactcccggagcaagcttcctcacaggggccacagagggaacagcgctgcccgggaggctggagaccaggtccagtgaccaggcctgcccagggtcagtgcctcaaaccacccgggcagcagcc

SEQ ID NO: 33591 - DNA, 407 bp, Homo sapiens; identical to SEQ ID NO: 15761
  chr19:3770610-3771017
  hypo

SEQ ID NO: 33592 - DNA, 259 bp, Homo sapiens; identical to SEQ ID NO: 31492
  chr19:38828044-38828303
  hypo

SEQ ID NO: 33593 - DNA, 148 bp, Homo sapiens
  chr19:38901796-38901944
  hypo
cggggggtcctgcatcgcccttggcccctggcctcttcttacattctaccttcacctggtctctgcagtgtttgtggcaacacagcccgcactctgggggaaggcagcggcaggggtccgatctgtgtcatccattcttccagcctgc

SEQ ID NO: 33594 - DNA, 584 bp, Homo sapiens
  chr19:3907689-3908273
  hypo
cggactctggcgtccatgcgactctccgccacctgcttctagacgacacccccgtggccaccgccaagaacatgcccggggacagcgcggatctatttggggacggcacgacggaggacggcagcgccgccaacgggcgcctgtggcggacagtgatcatcggggagcaagagcaccgtatagacctgcacatgatccggccttacatgaaagtggtcacccacggaggtgagacccgccccccggtgcccccttggggctccagcccggcccactgggcaacagggggttcgtcagtgcccctctctgatgcacggggatgttaagccgtcaactcgcttcgggtggacggactgtgggcaaggcgtgcatggtcagggaggcgcactgggggcccctgatggtcgctgtcactcctcagcgaaggcagagactggctaaggggtcgccggctgctgtggctcggagccatgccctcccgagcgtgtgggcaccgggacgtggtgggtggtgcgcgggaggcagctcagggctgggagaggactctgacgttgccgatcggctgcctctcctcagggtactac

SEQ ID NO: 33595 - DNA, 481 bp, Homo sapiens; identical to SEQ ID NO: 25370
  chr19:403382-403863
  hypo

SEQ ID NO: 33596 - DNA, 746 bp, Homo sapiens; identical to SEQ ID NO: 27793
  chr19:407139-407885
  hypo

SEQ ID NO: 33597 - DNA, 829 bp, Homo sapiens; identical to SEQ ID NO: 28862
  chr19:418231-419060
  hypo

SEQ ID NO: 33598 - DNA, 144 bp, Homo sapiens
  chr19:4550229-4550373
  hypo
cggcaaggcgctggaggcattgtactgcatcccgggggctgcgcagcacccgggcctgggggtgacaagggtgtggtcaggacgaacgtaaaggttctcataaaggggcctgattcaccagaggtacccattgctttgcccaac

SEQ ID NO: 33599 - DNA, 283 bp, Homo sapiens; identical to SEQ ID NO: 26650
  chr19:4555911-4556194
  hypo

SEQ ID NO: 33600 - DNA, 445 bp, Homo sapiens
  chr19:4556928-4557373
  hypo
cgcaggggccgggaccgagccagggccaactcacctcctgtttgcccttcatccgacacacgtttatgtcgctggggttagatctccaggtcagcttctgcagacagagagagctggtgagggggtaacgggtcccagcagccctgagtgaccccgccgtgctgggccgaatccacccagctccccggcgcagtgccgcgtccccctggccctacccctccactcccacctgcaccccttcctcaccctctggtaccgcagctccgtggacgtggggggctccagctctacgcggtagaggttgtccctgggggaggggcatagttagtgagaactgggggctccgccaccctctcccgttccatccttcccactgccaatgtggtgtgcacacgggggcatgcagggccatgccaatgcctctgacacgagcaactctagcgcc

SEQ ID NO: 33601 - DNA, 338 bp, Homo sapiens; identical to SEQ ID NO: 31506
  chr19:45810004-45810342
  hypo

SEQ ID NO: 33602 - DNA, 412 bp, Homo sapiens; identical to SEQ ID NO: 25384
  chr19:46321120-46321532
  hypo

SEQ ID NO: 33603 - DNA, 369 bp, Homo sapiens; identical to SEQ ID NO: 15772
  chr19:46885301-46885670
  hypo

SEQ ID NO: 33604 - DNA, 705 bp, Homo sapiens
  chr19:4816460-4817165
  hypo
cggtgggggggtgccagcctgccatgcgtgcaggggtggcggctgcgggcaccccggccaagtgggaaagggtggcggggctcccaggggcacctggcccccaaagggcattcgagccccatagggcgccccagtcccaaatgacatgtggctcccaaaagccacctggagctgctccatctgtgcctggtaggacaagtagctctggaggtaggctgagtaggctgcgttcagtgccgccgcctgcatccgctcaccgtccaggtgttggctctgttcccgcagggctcgggtgtcctgttccttcctccacatggcctttcgggcctgaagcctgtggggcttgaaggtgttggccaccttcctggcgaagatctgggagtgttcgtccagccgcaccagcccggagagcaggctggccgtgtcggagctgagctgggccggggagctctccaggggcaggaaggggatgacacagtctggcgacccctgtcgcgtgaggttgctcatcatggcttggttcacctggtgcaggctcaggcgacagtcgaagttggaggtgagaagtaggatgatgaaagctgagtggtctatggcgtcctgcaggcagctcagctccccgcgccccggcacctggaaatcctcgcagaaggtggccccgtcgggcacgccaagggcctccagcttctcccgaacccgcagggc

SEQ ID NO: 33605 - DNA, 586 bp, Homo sapiens; identical to SEQ ID NO: 15774
  chr19:4817473-4818059
  hypo

SEQ ID NO: 33606 - DNA, 127 bp, Homo sapiens
  chr19:49012390-49012517
  hypo
cgggcccagaatccgatggacgcagggacggatggaaggatggacagacggacggacgcgtggagagccgggtggcgcggcggagtggtcaatggagtgaggagggaggcgctgactgacagatgtc

SEQ ID NO: 33607 - DNA, 262 bp, Homo sapiens
  chr19:53507240-53507502
  hypo
cgtccggacttccccgatcccagccttctctcctttgaaaacactaagaatgacatcactgcatcagtttttactagagccaatcacctgtcgtgcctggaacagggatcgtacccagattgccctcagtcctgataatcaggaagcgcacatctataagaagcatgggagccagcgagtgaaagctcgtgaactcagtgagcacaatggacatatcacaggcattcactgggctcccaagagcgaccgcatcgtcacttgc

SEQ ID NO: 33608 - DNA, 837 bp, Homo sapiens; identical to SEQ ID NO: 24189
  chr19:549193-550030
  hypo

SEQ ID NO: 33609 - DNA, 386 bp, Homo sapiens; identical to SEQ ID NO: 15778
  chr19:55990556-55990942
  hypo

SEQ ID NO: 33610 - DNA, 430 bp, Homo sapiens
  chr19:56201494-56201924
  hypo
cggtgactgaccaggctgccctgcggccacctcctgtggtcagcgctggccatcccccttcgggctgagcaccgtgagggccaccaccggccgccacagctgaatggggaggcccagaataggccaacagcctggcatggccacagggaggagggtgcagggctcgccccatctgtcacactttgtcgggcacctccttggtgccaggccgtgtgctgcacacccagggcctgttggtgagcgaggaggcatggtcccgccctcgcgaacactgtttctgtggcgtccccatgctctgcagctgagtagcaaaccctcccacaaccttgtgcttccaggtcacgcttcagtacttccctgtgacgggcccgctggctggttgtttcgtgtcatggctgaggtcactcatgcctctgggcccggggtgtcc

SEQ ID NO: 33611 - DNA, 846 bp, Homo sapiens; identical to SEQ ID NO: 24194
  chr19:58219927-58220773
  hyper

SEQ ID NO: 33612 - DNA, 134 bp, Homo sapiens; identical to SEQ ID NO: 25417
  chr19:58964127-58964261
  hypo

SEQ ID NO: 33613 - DNA, 1275 bp, Homo sapiens; identical to SEQ ID NO: 25420
  chr19:5915018-5916293
  hypo

SEQ ID NO: 33614 - DNA, 92 bp, Homo sapiens; identical to SEQ ID NO: 15784
  chr19:7682222-7682314
  hypo

SEQ ID NO: 33615 - DNA, 354 bp, Homo sapiens; identical to SEQ ID NO: 15785
  chr19:7991824-7992178
  hypo

SEQ ID NO: 33616 - DNA, 932 bp, Homo sapiens; identical to SEQ ID NO: 23565
  chr19:883424-884356
  hypo

SEQ ID NO: 33617 - DNA, 425 bp, Homo sapiens
  chr19:900808-901233
  hypo
cgccccagccaggcccgcacctctcctccggtcctccccacggccagggcccctcctccgcgccttgctcctgccctcatcctccaggtagcgaagaacccgctcctgctcctccccggagcggttcatgaaatcgttccagacctggaagagaggcagggaggcaggcttgccatgaaacactggggctgcgctgacatccccgggcaaatgggcacggtaaggccgccaagcacgtggacgcgctcctgcggtcacctctgtccactgaggggccgctgcttgtgtcgggccctgagctgagcgcagggaagcggggaaccggggtgggcccagctgtctcggggtgggggggattgaggtgaaacactcctgcaatcgttggagggttcccaaacgtgttgggcaggtgaatccaggagctc

SEQ ID NO: 33618 - DNA, 314 bp, Homo sapiens; identical to SEQ ID NO: 24206
  chr19:9129007-9129321
  hypo

SEQ ID NO: 33619 - DNA, 743 bp, Homo sapiens; identical to SEQ ID NO: 15791
  chr19:941824-942567
  binary

SEQ ID NO: 33620 - DNA, 972 bp, Homo sapiens; identical to SEQ ID NO: 24208
  chr19:955734-956706
  hypo

SEQ ID NO: 33621 - DNA, 215 bp, Homo sapiens; identical to SEQ ID NO: 15793
  chr19:9960959-9961174
  hypo

SEQ ID NO: 33622 - DNA, 384 bp, Homo sapiens; identical to SEQ ID NO: 24217
  chr2:10156251-10156635
  hypo

SEQ ID NO: 33623 - DNA, 614 bp, Homo sapiens; identical to SEQ ID NO: 15795
  chr2:10334473-10335087
  hypo

SEQ ID NO: 33624 - DNA, 473 bp, Homo sapiens; identical to SEQ ID NO: 15796
  chr2:10566948-10567421
  hypo

SEQ ID NO: 33625 - DNA, 80 bp, Homo sapiens; identical to SEQ ID NO: 15797
  chr2:10580386-10580466
  hypo

SEQ ID NO: 33626 - DNA, 212 bp, Homo sapiens; identical to SEQ ID NO: 24220
  chr2:10600656-10600868
  hypo

SEQ ID NO: 33627 - DNA, 73 bp, Homo sapiens; identical to SEQ ID NO: 15799
  chr2:109260013-109260086
  hypo

SEQ ID NO: 33628 - DNA, 342 bp, Homo sapiens
  chr2:110015134-110015476
  hypo
cggcgctgtggccagcgtggccccaagtcccactttaagcagctcaggggcggtcagtgcctttcagcggcgtgtggatggcaagaagaacaccaagaaacgccactccttcaccgcgctcagtgtgacgcacagatcctcccaggctgccagccacaggcattccatggaaattagtgctccagtgttgatcagctccagcgatccccgagccgcggccaggattggagaccttgctcatctgtcgtgcgctgctcccacccaggtaacatcccgcgggccagggcaggcatccctgggttctctggggttctatcctcagctccgtgttcagtgtccccc

SEQ ID NO: 33629 - DNA, 121 bp, Homo sapiens; identical to SEQ ID NO: 15802
  chr2:111929192-111929313
  hypo

SEQ ID NO: 33630 - DNA, 682 bp, Homo sapiens; identical to SEQ ID NO: 15803
  chr2:114736479-114737161
  hypo

SEQ ID NO: 33631 - DNA, 590 bp, Homo sapiens; identical to SEQ ID NO: 23568
  chr2:120979888-120980478
  hypo

SEQ ID NO: 33632 - DNA, 213 bp, Homo sapiens; identical to SEQ ID NO: 15804
  chr2:121549381-121549594
  hypo

SEQ ID NO: 33633 - DNA, 286 bp, Homo sapiens; identical to SEQ ID NO: 26732
  chr2:122104584-122104870
  hypo

SEQ ID NO: 33634 - DNA, 174 bp, Homo sapiens; identical to SEQ ID NO: 15805
  chr2:132269055-132269229
  hypo

SEQ ID NO: 33635 - DNA, 183 bp, Homo sapiens; identical to SEQ ID NO: 32727
  chr2:134325872-134326055
  hyper

SEQ ID NO: 33636 - DNA, 426 bp, Homo sapiens; identical to SEQ ID NO: 15807
  chr2:15307089-15307515
  hypo

SEQ ID NO: 33637 - DNA, 101 bp, Homo sapiens; identical to SEQ ID NO: 15808
  chr2:15783084-15783185
  hypo

SEQ ID NO: 33638 - DNA, 126 bp, Homo sapiens; identical to SEQ ID NO: 15809
  chr2:159994731-159994857
  hypo

SEQ ID NO: 33639 - DNA, 431 bp, Homo sapiens; identical to SEQ ID NO: 15810
  chr2:16124561-16124992
  hypo

SEQ ID NO: 33640 - DNA, 205 bp, Homo sapiens
  chr2:170282893-170283098
  hypo
cgaacctgaagttgccagtgtgaagcccgtgagtgtgcagtgaaccgcagagaaagcttcttggtgagttgagtttgtggagtggcccagagccaggcgggagcgtcagtaccgcgcactgttaacagcggcccgacaaacccagcaaatgcagaattggccaggggatccccgaaagaaccaatccttccccagccctctcacc

SEQ ID NO: 33641 - DNA, 133 bp, Homo sapiens; identical to SEQ ID NO: 15812
  chr2:171730981-171731114
  hypo

SEQ ID NO: 33642 - DNA, 296 bp, Homo sapiens
  chr2:208635464-208635760
  hyper
cgcgcccggcccgtttacatcttaagacaagatctcactccttacaacaattctgaggcaggtacttcctacaggtgaagaaaccgagactgagacttggccaaggcaaccgagctaatcatagttcccccaagaaagggcgacctcggcaagcaagttcacctccgtattccgatcacctggcacatagtagccgcccaaatggcaaccctgggattcgaacccaggtagttggtcagcggcactcaccatcgtagccgcccctccccccatactatcgcagcctccctggcttc

SEQ ID NO: 33643 - DNA, 900 bp, Homo sapiens
  chr2:209224972-209225872
  hypo
cgccccacttgttctcccgccttctgcgtgagcagcccctacggggtctcctactggtccctaggaactttcgccacacccggagcggcggcctccccgagcccctcggggccccttccctggcagctgggatgagggcagcgtgctcctcgcaggttacttggtcctgaggtcctccctcaggcgctgggcatgcctggggcgcagaaccgcagctctgggccagacccggctgagactgtgcttgtgcggcgagtggaggccgctcccggggccctgccgccctctcgctcgctcggggctctggagtctggcgggccgcaagccgcgctgccggctctacctggctttgtccatccagccacccaccaagcgccagggtaaaacagcacccggaagcagtcgtcgcctgctgccaccaggctgccttctgtggtgaaggtgggggccagggttgcaaggccctcctcttgttggcatcagccaggcacgcagtgctgtcgtggctgacccaggccgtgaggcacccgctgactgagaagccaacctgagcacccagccgcacctaccgctggcctcagacatcagcaccccaaagggtatgttggagtcccatggtggaggtgccggccgctcctccacgcacttgatgtataccgaggatcccatgcttgacgtcgcagggggcattagccaggagcacgttgctgggatgccagtccaggctgaggatggtggagccaatgggcttcttgatgtacttgcacacccaccagttattctcccgctggaaataacagatggcgatgacacacagctgccgcccacagcaaacttgtcctgtgggcccagcacacacagcaggcagtgggtgcgggcttaccctcctggcccgtcagc

SEQ ID NO: 33644 - DNA, 1020 bp, Homo sapiens; identical to SEQ ID NO: 25448
  chr2:219735657-219736677
  binary

SEQ ID NO: 33645 - DNA, 333 bp, Homo sapiens
  chr2:220080617-220080950
  hypo
cggcagcttctcaggcggggtctgttctcttcctcccacgggcccctatccctgcttctccggctccaccctcccacatgccctttccactggggcggcacctgagcagccctgtgacactggatgtgccccgatccgcgatccgcagcacctcccctgtgcggcgccccaggtgccagcgcagtgagagctcgtgcaggtgggagaagatgagcagctccacccgccgagacgtgaactgctgcacccggatccacaggaaggtgcgcaggttgctcacgaagcctgcagggagccgggggacgcctcagtagggcctgggagctgagggac

SEQ ID NO: 33646 - DNA, 400 bp, Homo sapiens
  chr2:228736169-228736569
  hyper
cgcccttagtgaggacacgaggtgccctcacctctttcactctagacacctccagaacactcgccccccgcgcgccggagccccgggtcgccaccaaccgcccgcggagccagacctcccagctctgcgccccaggaccgcgcggtgcaacctgcgcatgcgcacccgcgtcccgctgctgtttagccgtttccaaggctacgaagcccatcggccggggataagagagcaagaaaatgaagctcaagagcctcctgctccggtattacccgccaggtacgcaccagcccggccccgtcatccccacgtgggaccctgggctcccagactgggagggtttggggcggaggagggcgcagccactgaaaggcggcggggtccccaggtggggcaggaagtc

SEQ ID NO: 33647 - DNA, 173 bp, Homo sapiens; identical to SEQ ID NO: 15817
  chr2:237542540-237542713
  hypo

SEQ ID NO: 33648 - DNA, 67 bp, Homo sapiens; identical to SEQ ID NO: 15818
  chr2:239082208-239082275
  hypo

SEQ ID NO: 33649 - DNA, 34 bp, Homo sapiens; identical to SEQ ID NO: 15819
  chr2:239096420-239096454
  hypo

SEQ ID NO: 33650 - DNA, 448 bp, Homo sapiens; identical to SEQ ID NO: 15820
  chr2:239800534-239800982
  hypo

SEQ ID NO: 33651 - DNA, 252 bp, Homo sapiens; identical to SEQ ID NO: 28969
  chr2:239957248-239957500
  hypo

SEQ ID NO: 33652 - DNA, 460 bp, Homo sapiens
  chr2:240167455-240167915
  hypo
cgagcctgcccccaccttctattcaatatgtctttcctgagcatctgctgggtgatctacctaacttgttccttcacgaatatcccaacagtcttcagttcatccccagcccctatgtgttcaagcagacacacacgtctggttcacagctcagcgagcaggccctgagcgtctgggaacgtgagagtgagcaacgcagaggcctggccccggcccagcagaaccggcaacccacactggctgcctgcgtccagtcccgccatggggtctgcctggtgccagcacctgcccagacacagggcagaggagactgcaggggggtgtccagctgctctcacgtgccaggccaggcttgctaacacctgtggcttagtcgggtgatagggacaaaacgtgcaaactgagcccgctggacacgcagactcagcaggcaggcagagcccggtggggaggcaaacgc

SEQ ID NO: 33653 - DNA, 471 bp, Homo sapiens; identical to SEQ ID NO: 25457
  chr2:240226690-240227161
  hypo

SEQ ID NO: 33654 - DNA, 80 bp, Homo sapiens; identical to SEQ ID NO: 15825
  chr2:240319796-240319876
  hypo

SEQ ID NO: 33655 - DNA, 765 bp, Homo sapiens
  chr2:240658158-240658923
  hypo
cgtctccttggtgaggtcgcgtggaggcagtgatgtctgtcggtaccccaaggcctgtgtggaggcagcaaagtgtctgggggacggactggtttcccggctttgctcaagctccgatgcccacgggaggagggtaggaggcagtcgctggtctcggtaggacacgggatgccacgcatggctggttggccaatctgtgtttgggtcaacgcgcccctgtgtgctcggacctggaactgcacctttgtcgggcaccctgagataggaagggctcacaccctgacaggtgcgatcagtcagggcagggaggcgggcagcaggactggccactggccccgataggtgctggtgagctgggcagacactcggggtcttcctcccaccctccaccctgaggacaaggcaggacccccaggagcccccaacccaacgccccccaacccagcgcctcgcttcttccctctcccctccggcctccggaatgtggcgcccagcgacacagacaagcccatcctcaaaagcaccgggtctttcaaggcaggagctctgacgtcatcggagtcacgtgaacctggttccttcacaggttctgaaaaatggacgcaacaaaactagcggtggaaaaagcctttgactcccgccctcaaattcttgccagtgaaatacccggaaaaggagacatggcttttcccttgcaggcaagtcaggctcctgagtgcttctctccaggtcgcagcagggcacggggggcagggagtggagccc

SEQ ID NO: 33656 - DNA, 755 bp, Homo sapiens; identical to SEQ ID NO: 24252
  chr2:242004407-242005162
  hypo

SEQ ID NO: 33657 - DNA, 339 bp, Homo sapiens; identical to SEQ ID NO: 15827
  chr2:242169887-242170226
  hypo

SEQ ID NO: 33658 - DNA, 175 bp, Homo sapiens; identical to SEQ ID NO: 28972
  chr2:242554503-242554678
  hypo

SEQ ID NO: 33659 - DNA, 382 bp, Homo sapiens
  chr2:242925474-242925856
  hypo
cgtccacaatctagtggatgaatctcaaaagatacttcgagcaaaaacaccggacagaagcgtccgtgccagccccgcaggctgcctgtgtgccaggctatcccgtgccatctgatccgggagaagcaggactttcttgcacaggtactcagcgctgtggctgtgggaggagccgggagggccctggcgtgggtgggcttggggaaactgtaggagctggaaatatttcatatcttatttggggtgttgtttacaggggaacttgacaaactcatctaatggtacaatcgagacatctgtgtaaataaagtgtcaaaaatcatcctgctgacatccatgctccccgccccacggcacttcccggccctcagccctcccgtgc

SEQ ID NO: 33660 - DNA, 251 bp, Homo sapiens
  chr2:242933420-242933671
  hypo
cggtttggatcgtatccctgcccacgtcccacgtggacgtggaatctccagcgttgaaggcggggcctggtgggaggtgattggatcacggccggcgttcccacaaatggcttcgcaccgtcgcctccgtgacgccctcgtgacactgagtgagcaagttattgtgagacctggtcgtttgaaactgagttggggcccagctcagcgggcacgaccctgctctgggccacgcttacgcgcttgttcctaac

SEQ ID NO: 33661 - DNA, 570 bp, Homo sapiens; identical to SEQ ID NO: 25466
  chr2:25438799-25439369
  binary

SEQ ID NO: 33662 - DNA, 150 bp, Homo sapiens
  chr2:27304246-27304396
  hyper
cgtggcctctggagaccgcaggtcccagcatgcagcagttcctgtggcttgccttccctcctgcgtgctgcacaccggatgtgctgtttccctgccccgagatagccttactataattatgcaaacaggaactcctggccaactctcacc

SEQ ID NO: 33663 - DNA, 228 bp, Homo sapiens; identical to SEQ ID NO: 15833
  chr2:2769802-2770030
  hypo

SEQ ID NO: 33664 - DNA, 225 bp, Homo sapiens; identical to SEQ ID NO: 15834
  chr2:28065720-28065945
  hypo

SEQ ID NO: 33665 - DNA, 995 bp, Homo sapiens
  chr2:38302005-38303000
  hyper
cgcgcgcctcgctcagcacgtggccctcgaggacttggcggctgcgcggctggcgcgtgaagaagttgcgcatcatgctgtgggctgcgcgccgctgcaccttccagtgctccgagtagtggccgaaagccatgctgcggccgccggacaccacacggaaggaggcgaaggccggccggtcggcgaaggccgagccctgctgcaccagggcctggtggatggcgcgctcgccattcagcaccactatggggcagctgcccaggcggatctggaaaacgtcgccgtagcgccgcgccaggcgagcgaacgagaggtgagccgcctggcccaccgccgccgcgtttccgatcagtggccacgcaaacgggcccgggggcgcggaccggagctgccgcctccgttgcctcagcagccgctggcccacatgcacagtggccagcaccgacaggagtagcaggagcgtggtctgctggatggacagcgggtttagcggccaagggtcgttcgggctgaggctggtgcccatgctggggacagagaggagaaggcgtgacactcaggggtgcagagacaggagcgggcgccccacgcccctaccccagcctctggggactgagtgccgttgggtggagaggtcggagctgactctctggagaaatggccgaagacgccccttcccatccccaacccactctcccttggagaagagaaggggcgtgtttccacctcgctgtaacccagcgccaaacccttcccctccccgcaaggcgcgtaacggttcctgcaatctggggacaacgctgcgggcatcgaggcggtggcgcttgatttcctttaaagtacctaccacgccacccgctacctgtaataatccatctgaagaggtcgccgggcagcgcctcggcagacagactgacctgcggggaggtgcggtttccagtggcgcgggacagccggctccgagaaggaactgggacctttgcctagggcaagac

SEQ ID NO: 33666 - DNA, 1038 bp, Homo sapiens; identical to SEQ ID NO: 32775
  chr2:43019535-43020573
  hyper

SEQ ID NO: 33667 - DNA, 211 bp, Homo sapiens
  chr2:47200517-47200728
  hypo
cgagagccttccagccaccgcatggtgcagggaaacccttgctaccctcatttatcccccgtcagggagggcctcagtgccgagtgcggcggaggatggatccctcccactgccgcaggttgccggttgaggtgaactgtttccacctggagggagctaaggaaagaaagaagcctgtacacaaagtcatacattcacacaaacaaatggc

SEQ ID NO: 33668 - DNA, 397 bp, Homo sapiens; identical to SEQ ID NO: 15838
  chr2:54798152-54798549
  hyper

SEQ ID NO: 33669 - DNA, 122 bp, Homo sapiens
  chr2:62497691-62497813
  hypo
cgacagagcgagactccgtctcaaaaaaaaaaagaaaagaaatagtgaataggaatagcaaagtacataaacatttctaagtaggctcctgtgtgtgtgttgaaaaatatacgcatatatac

SEQ ID NO: 33670 - DNA, 123 bp, Homo sapiens; identical to SEQ ID NO: 7218
  chr2:69928507-69928630
  hypo

SEQ ID NO: 33671 - DNA, 346 bp, Homo sapiens; identical to SEQ ID NO: 7221
  chr2:72359340-72359686
  hypo

SEQ ID NO: 33672 - DNA, 288 bp, Homo sapiens
  chr2:74454017-74454305
  hypo
cgctgcacctctgggttgcccaggccaacctgccaggcaggagggggaagcccgtgcccactttaccatgaccgggaagatgatggcagccaccgtggatttgaggatccagagcaccgccaggcagaggatctgcaccagggtgaagaggtggatccggcgcagcggcacgtgccgcaggaaggcatggtccggctggtgcttggctggcatcaggaagagcttgcagcgttcccagaactagggggacagcgggggctcagccaggcagccagaccccgagggccc

SEQ ID NO: 33673 - DNA, 333 bp, Homo sapiens
  chr2:80549578-80549911
  hyper
cgggcccacgtagacttaatcccgagaggcaattgttcccttgcttgggcggctacgctccccgcggggctgcctgcagcccccgggcccttgcagctccgggacggcgcgcggcggcggaggccgcggggccccaagcgccagcctggccccggcgcagatgcgctgccccggccgcagcccagccgccgcgtgtgttgtcaggacgatcggaaacgcgtgtgtggggagatgggtgccagtgtcgccttgtccattatccaaaacccagtcgcttttgctggttcctcactcagcatgtgagagagattgtcttctcactcggtgccactc

SEQ ID NO: 33674 - DNA, 111 bp, Homo sapiens; identical to SEQ ID NO: 25492
  chr2:85280296-85280407
  hypo

SEQ ID NO: 33675 - DNA, 453 bp, Homo sapiens
  chr2:85890530-85890983
  hypo
cgctgctgttcccggcctgggtggtcacggacatgcagaggtggcactcagagtctcgcggcagccattctcctgtcggcgaccctggagatgtgagcattagggggaaagcaggcaaggccaccctacagaggtgtttggtttctgtcctccttggtgcattgcagtgggaccacagagggagagggtcatgcagtggcagggtagggggaggaggagagcaggcattgggctaaggagtgggcagtgggctcacttgggccagcgctgtcatccatggagcaccggaggacgaggcggcagaccagctggggcagcatgcggcccagcagcgtgtcgagcaggatgacggagtagcgctcagccaggcactggcagatgccgcccgccaccagaggtaccacgcggcacacctgggccactgccacagctagcgcaccctggggcgggggc

SEQ ID NO: 33676 - DNA, 225 bp, Homo sapiens
  chr2:8735939-8736164
  hypo
cggcagcccgaatgctcatgcgttccagagcattctccaggaactttctcattcatccctccacacttttctgcttttcaaaataatgctggtacagggccagacacacacgcatgccacacacatgcactagactccctacaggctcacagacacacaccagtgcacacactgcgcgttcctctctgctgacatctgagcgaggcaggttcacaagcagccagc

SEQ ID NO: 33677 - DNA, 317 bp, Homo sapiens; identical to SEQ ID NO: 26809
  chr2:8978041-8978358
  hypo

SEQ ID NO: 33678 - DNA, 372 bp, Homo sapiens; identical to SEQ ID NO: 15848
  chr2:9609477-9609849
  hypo

SEQ ID NO: 33679 - DNA, 185 bp, Homo sapiens; identical to SEQ ID NO: 8363
  chr2:97437985-97438170
  hypo

SEQ ID NO: 33680 - DNA, 662 bp, Homo sapiens; identical to SEQ ID NO: 24291
  chr2:99438949-99439611
  hyper

SEQ ID NO: 33681 - DNA, 83 bp, Homo sapiens
  chr2:99798661-99798744
  hypo
cgtaattgtttcagggtccaggagttacgtgcctaattattaacagtaacttttactttattaaaacgtattccttgccgggc

SEQ ID NO: 33682 - DNA, 197 bp, Homo sapiens; identical to SEQ ID NO: 25504
  chr20:18489643-18489840
  hypo

SEQ ID NO: 33683 - DNA, 635 bp, Homo sapiens; identical to SEQ ID NO: 24296
  chr20:21372082-21372717
  hyper

SEQ ID NO: 33684 - DNA, 113 bp, Homo sapiens; identical to SEQ ID NO: 15850
  chr20:30139516-30139629
  hypo

SEQ ID NO: 33685 - DNA, 833 bp, Homo sapiens; identical to SEQ ID NO: 22882
  chr20:30639044-30639877
  binary

SEQ ID NO: 33686 - DNA, 158 bp, Homo sapiens
  chr20:30864847-30865005
  hypo
cgggagccaccgcacctggccgcatgatctgttttaaataattactctggccaccttatggaaaatggattgttcggacagagctggacaaaagaatggaaacagaccagatatttcaggcaggctagagatgagcgtggcctggccttgcctggggc

SEQ ID NO: 33687 - DNA, 427 bp, Homo sapiens; identical to SEQ ID NO: 26827
  chr20:3202068-3202495
  hypo

SEQ ID NO: 33688 - DNA, 178 bp, Homo sapiens; identical to SEQ ID NO: 31701
  chr20:32450366-32450544
  hypo

SEQ ID NO: 33689 - DNA, 71 bp, Homo sapiens; identical to SEQ ID NO: 15855
  chr20:32669113-32669184
  hypo

SEQ ID NO: 33690 - DNA, 157 bp, Homo sapiens
  chr20:35089017-35089174
  hypo
cgtctggcagacctaccacaggtgcggcctggagagatgaggcccacaaggcagcgacaggacctggattcagtgaggagaggggactcgcggggtagaagccaggaactgggaaggcgaggaggcgtgaaggcaccacctactgccaacccggctc

SEQ ID NO: 33691 - DNA, 87 bp, Homo sapiens; identical to SEQ ID NO: 15856
  chr20:35441137-35441224
  hypo

SEQ ID NO: 33692 - DNA, 846 bp, Homo sapiens
  chr20:35443740-35444586
  hypo
cgctgttgtcgggggcctcatgcagccggaagtcagcacactcgttgtccagacacagccggaggccagccgtgaagccattggcatcagccaccaggacatcgatggccttactgaccagggcggcctgctctctcagcccaggcagcacctcggcctccctggctctgcagagtcggaccgcatgggactcgtgtgtctcgcccaggggagcaggcacacactgggcagagtccccggcctcggcgtccgtctccagcatgggccgcgtactctggcaggaggcgaggtcacagcgctggaggttggagaggagcacgcggttctcgtactgcagcttcttgaccttgccgctgagctcgccgatctgcagcttggcggccgccagctcctcctgtgaaggttcgctgagcacagaacaactgtcctccgacagcgccacgtccagctcgtgctccgagcggaacttggccagctcgttcagcagcagcttgttctggtcctcgagctcggcagaggagcgccgcagcagctcggcctcctcttcgacaaactgcaggtgtcgccgcagctctgccaagctctccccgcactctccgccacccagcgcggagaaggccaggcgtgcctcaggacccccacagccacctccatgatccttcatgtcgtccatctcagcccgcaggcctcggttctccacctccagctccacgatgcggcggctcagcaggttggcttcctcctccaccagcttcaggtgcaccttcagctcggtctcccgcgagtggggggcatcggccagctcctcggctgacagcgcgctgtccaggtccccatagagcgagc

SEQ ID NO: 33693 - DNA, 138 bp, Homo sapiens; identical to SEQ ID NO: 15859
  chr20:37673303-37673441
  hypo

SEQ ID NO: 33694 - DNA, 523 bp, Homo sapiens; identical to SEQ ID NO: 15860
  chr20:39990769-39991292
  hypo

SEQ ID NO: 33695 - DNA, 328 bp, Homo sapiens; identical to SEQ ID NO: 27922
  chr20:399954-400282
  hypo

SEQ ID NO: 33696 - DNA, 1242 bp, Homo sapiens; identical to SEQ ID NO: 31708
  chr20:400915-402157
  hypo

SEQ ID NO: 33697 - DNA, 88 bp, Homo sapiens; identical to SEQ ID NO: 24306
  chr20:42218592-42218680
  hypo

SEQ ID NO: 33698 - DNA, 55 bp, Homo sapiens; identical to SEQ ID NO: 7245
  chr20:42833281-42833336
  hypo

SEQ ID NO: 33699 - DNA, 314 bp, Homo sapiens; identical to SEQ ID NO: 25525
  chr20:46823362-46823676
  hypo

SEQ ID NO: 33700 - DNA, 50 bp, Homo sapiens; identical to SEQ ID NO: 15865
  chr20:47766299-47766349
  hypo

SEQ ID NO: 33701 - DNA, 260 bp, Homo sapiens
  chr20:47836982-47837242
  hypo
cgcttagcagcagagggatctctgcgatacagtcacgttagagacctcccttgcttaaaactctccagcctgctggtagagacccccgggcctgtccaccttgcaaagactcctcaggcagcgtctgggtcccgtacactgtcgccatttccccgatgtcccctgtgggcgcgggcggccacccaggcctgctggctgcggccccctctcggacaggccttggctcagcccgctgcgtgggaggtcatgggccagtcccc

SEQ ID NO: 33702 - DNA, 186 bp, Homo sapiens
  chr20:48771177-48771363
  binary
cgtgccaggatcggggctggaacatggtagaagctcaataaatgcttgatgaatgaattaaggctcagccagatgcgtctaatacttcggcagataaatgacagcagcagggatttaccccaggtctaaccgacaacaaagtatgcaataatttctcatagaaattccatacaggcagccgggcgc

SEQ ID NO: 33703 - DNA, 377 bp, Homo sapiens
  chr20:49261776-49262153
  hypo
cggccaaaagctcgctacccctgcccaggaaggcaggagcaccgttgtgtcccgttcctatccctcaaaaataaatcacagccagctcatgtcataggacagagcctgttcgcaatccatcctgtgtctgcggattctcccaggtctgtaaggcagcagggagatgcggcctctcccactccacccaacacgtagccagggcgaggtggggccgggggagaggctgacattcaaaggcatctgagtggtaagaggtgagcgagtgaggtgaatggggactacgttagaaggaccctacgttagaagggtgaggcgctagggccatagcctaagggcactgggaaccctgtgggcatgcgcagttcaagcccatcccc

SEQ ID NO: 33704 - DNA, 155 bp, Homo sapiens; identical to SEQ ID NO: 25529
  chr20:49286725-49286880
  hypo

SEQ ID NO: 33705 - DNA, 162 bp, Homo sapiens; identical to SEQ ID NO: 7250
  chr20:52214819-52214981
  hypo

SEQ ID NO: 33706 - DNA, 209 bp, Homo sapiens; identical to SEQ ID NO: 15869
  chr20:52234410-52234619
  hypo

SEQ ID NO: 33707 - DNA, 1974 bp, Homo sapiens; identical to SEQ ID NO: 32804
  chr20:55199913-55201887
  hyper

SEQ ID NO: 33708 - DNA, 999 bp, Homo sapiens; identical to SEQ ID NO: 26845
  chr20:55201892-55202891
  hyper

SEQ ID NO: 33709 - DNA, 363 bp, Homo sapiens; identical to SEQ ID NO: 15870
  chr20:56126192-56126555
  hypo

SEQ ID NO: 33710 - DNA, 381 bp, Homo sapiens; identical to SEQ ID NO: 26847
  chr20:56772009-56772390
  hypo

SEQ ID NO: 33711 - DNA, 990 bp, Homo sapiens
  chr20:56780210-56781200
  hypo
cggcctctgtgggattaagacgtcggttccaattcttcagcctctctgcctctgcccctcgccgtggcctcatcggagggaggcatcgctccctgaccctcgactttcagcttggccactcgactcgcttggcttcccacctacagccaggagtgacggcataacaggtctgcgcccgcccctgaagacgcctcccacgtccccgctccccacgtccgcgcccacacctgaagacgcctcccacgtccccacgtctgcgtccgcacctgaagacgcctcccacgtccccgcaccccacgtctgcacccacacctgaagacacctcccacgtccccgcaccccacgtccccacgtctgcgcccgcacctgaagacgcctcccacgtccccgcaccccaagtccccacgtctgcgcccacacctgaagacgcctcccacgtcccgtctgcgtccgcacctgaagacgcctcccacgtccccactccccacatctgcgcccacacctgaagacgcctcccacgtctgcacccacacctgaagacacctcccacgtccccgcaccccacgtctgcgcccacacctgaagacgcctcccacgtcccgtctgcgccgcacctgaagacgcctcccacgtccccactccccacatctgcgcccacacctgaagacgcctcccacgtctgcacccacacctgaagacacctcccacgtccccgcaccccacgtccccacgtctgcgcccgcacctgaagacgcctcccacgtccccacgtctgcgcccgcacctgaagacgcctcccacgtccccgctccccacgtctgcacccacacctgaagacgcctcccacatccccgcaccccacatccccgcgtctgtgcccgcacctgaagacgcctcccacgtcgacgcctcctaggtctccacttcccacgtccctgcttgtggagcctgtgccccggccgacctgctggtgccaggacagtgagagac

SEQ ID NO: 33712 - DNA, 200 bp, Homo sapiens; identical to SEQ ID NO: 15875
  chr20:57154974-57155174
  hypo

SEQ ID NO: 33713 - DNA, 105 bp, Homo sapiens
  chr20:57615397-57615502
  hypo
cgccaaagtagaatcaggaggacctggctatggctcactgaccggtccaacttcttcacctttgaaacgaggtgaggacattattaactccactggcgcagcatc

SEQ ID NO: 33714 - DNA, 428 bp, Homo sapiens; identical to SEQ ID NO: 12671
  chr20:60226081-60226509
  hypo

SEQ ID NO: 33715 - DNA, 205 bp, Homo sapiens; identical to SEQ ID NO: 24321
  chr20:60470129-60470334
  hypo

SEQ ID NO: 33716 - DNA, 496 bp, Homo sapiens; identical to SEQ ID NO: 24322
  chr20:60502550-60503046
  hypo

SEQ ID NO: 33717 - DNA, 352 bp, Homo sapiens; identical to SEQ ID NO: 15880
  chr20:60511742-60512094
  hypo

SEQ ID NO: 33718 - DNA, 271 bp, Homo sapiens; identical to SEQ ID NO: 15881
  chr20:60952110-60952381
  hypo

SEQ ID NO: 33719 - DNA, 691 bp, Homo sapiens; identical to SEQ ID NO: 31732
  chr20:61505866-61506557
  hypo

SEQ ID NO: 33720 - DNA, 247 bp, Homo sapiens; identical to SEQ ID NO: 25547
  chr20:61838301-61838548
  hypo

SEQ ID NO: 33721 - DNA, 242 bp, Homo sapiens
  chr20:61990858-61991100
  hypo
cgacctcagtcacagtgcacgatggccacgccctcacctaccacgtcaatgagctgagcgatggacaggccgaagcggacgaggaccacgtccgagatgttggccacgggtcgggaccacttgttgtaaccggagaagagtttcttcaggagccgctcctcggcgtgggcccgggtctccacatggctgctggctgcggggagaggcaggccagtggctcaggtgcaggcgggacaggagcc

SEQ ID NO: 33722 - DNA, 453 bp, Homo sapiens; identical to SEQ ID NO: 24329
  chr20:62031988-62032441
  hypo

SEQ ID NO: 33723 - DNA, 497 bp, Homo sapiens; identical to SEQ ID NO: 27952
  chr20:62126053-62126550
  hypo

SEQ ID NO: 33724 - DNA, 154 bp, Homo sapiens; identical to SEQ ID NO: 15884
  chr20:62137323-62137477
  hypo

SEQ ID NO: 33725 - DNA, 495 bp, Homo sapiens; identical to SEQ ID NO: 15885
  chr20:62248627-62249122
  hypo

SEQ ID NO: 33726 - DNA, 130 bp, Homo sapiens; identical to SEQ ID NO: 15886
  chr20:62309958-62310088
  hypo

SEQ ID NO: 33727 - DNA, 1401 bp, Homo sapiens; identical to SEQ ID NO: 27953
  chr20:62320890-62322291
  hypo

SEQ ID NO: 33728 - DNA, 142 bp, Homo sapiens; identical to SEQ ID NO: 15888
  chr20:62630932-62631074
  hypo

SEQ ID NO: 33729 - DNA, 104 bp, Homo sapiens
  chr20:62631475-62631579
  hypo
cgcctgaatccaccactggtttgacggcaggctaagcttcattataaagagctcagttggtcagctcttcacccgcctaatggtggccagtcacggtggctcac

SEQ ID NO: 33730 - DNA, 172 bp, Homo sapiens; identical to SEQ ID NO: 15889
  chr20:926459-926631
  hypo

SEQ ID NO: 33731 - DNA, 774 bp, Homo sapiens
  chr20:9489008-9489782
  hyper
cggatactgtgctggcggtttagaaaagaaaaagaaaaagaagcgaagcctctgtaacctggtctcctccctctcctcggtttaataccctgcctcccctactagtctccaggcttttctctggacaggggagggacccgagaagcccgcggccagtgatcgccagggtctgtctcgtcgcccatcctccccgccccagagcaaggtcggcagaggcttcccggggcataagaacttcaaagaaagtctcagaggagccacgctaccaggaactttcgtcgccctttaaaattgtcagatagacaagtaaaaacagtaactaactaagggaacaatggactcttgtgacatgtgtaactcttccaggtaccccaacactaaagaccccgtggttcctgtcgccatggcctgaacgtactcaactccagccccggggctgacctctctccctgagctttggagcgggtttggacctagccgttgcaagtaggcatgacttttatcacccatcgctatacccagagcagctgctcgaatgtgccaaggagcccaactcgggtgcaaagcgccgacgtctttcccaggttgaggacatcgcgagccagaggtgcaggcagcgaggcgcccaacagtagaatgcatcttccttcccgcgggcagaagccgtcaagtctggagtccgcagcgggcgcgcgggccagcccagggatactgagccatgagcaaccaggcccacctaccgccgcgccatccaaaggtaacaccacagaccac

SEQ ID NO: 33732 - DNA, 55 bp, Homo sapiens; identical to SEQ ID NO: 15892
  chr21:30294975-30295030
  hypo

SEQ ID NO: 33733 - DNA, 153 bp, Homo sapiens; identical to SEQ ID NO: 31743
  chr21:34508391-34508544
  hypo

SEQ ID NO: 33734 - DNA, 130 bp, Homo sapiens; identical to SEQ ID NO: 15893
  chr21:36206762-36206892
  binary

SEQ ID NO: 33735 - DNA, 316 bp, Homo sapiens; identical to SEQ ID NO: 15894
  chr21:37405019-37405335
  hypo

SEQ ID NO: 33736 - DNA, 174 bp, Homo sapiens; identical to SEQ ID NO: 15895
  chr21:38176483-38176657
  hypo

SEQ ID NO: 33737 - DNA, 349 bp, Homo sapiens; identical to SEQ ID NO: 26868
  chr21:38918381-38918730
  hypo

SEQ ID NO: 33738 - DNA, 113 bp, Homo sapiens; identical to SEQ ID NO: 31749
  chr21:38935395-38935508
  hypo

SEQ ID NO: 33739 - DNA, 212 bp, Homo sapiens; identical to SEQ ID NO: 15898
  chr21:40891441-40891653
  hypo

SEQ ID NO: 33740 - DNA, 235 bp, Homo sapiens
  chr21:42613666-42613901
  hypo
cgcgtggcgtctacactgggtgacccatgtctacactgtgagtcctaagcgggtgcccctctctgtcgccctcccgcagccatcaagttctctggagaccttcttcgactccctggtgacacaagcaaacatccccaacgttttctccatgcagatgtgtggagccggcttgcccgttgctggatctgggaccaacggaggtagtcttgtgggtatcttttagtcttaaaggggc

SEQ ID NO: 33741 - DNA, 648 bp, Homo sapiens
  chr21:43239707-43240355
  hypo
cgctcacatcccctcccagcgccctgcagcagctgagcggcctggctgagcctggcccgtggccctggcgcctgtacccacctttcccacactcggcccgtggccccggcccccgcccccgccacacccaccttccccacactcccagttctcgctcatgtccccttccagcaccctgcagcagggtggcctggctgagcctggcccatgtccccagcacccgtacccacctttcccacactcggcacacaggtactcgcggacattgtcgtgcacacgcatgtgctccttcagcatgtccttcctggcaaaggacttcccacactgctcgcaggcgtggctcttcacacctgagaacacaggcatctgccactcagagccgagcagctccgacctgcagtggctgcaaagaggatgcaccaaggagaggggcccagcctccccagcagctagaagcgcagtaacaggggtggggtcgcctcttcagcggcctccacagagccctcccggggatcctgtgactccagtagatccctgaggacctggaggggtgagggggctgggggcgctgggctgtgagtggcagggctgataaggacgggaaaagctggagaaacagaggaaggcatgggggaggcaaggtgcgac

SEQ ID NO: 33742 - DNA, 219 bp, Homo sapiens; identical to SEQ ID NO: 15903
  chr21:43273205-43273424
  hypo

SEQ ID NO: 33743 - DNA, 396 bp, Homo sapiens; identical to SEQ ID NO: 15904
  chr21:43547667-43548063
  hypo

SEQ ID NO: 33744 - DNA, 637 bp, Homo sapiens
  chr21:43991061-43991698
  hypo
cgcggagctgccgcgcccaccttgatggctgctgcgttacaccagaggcaggaccaggacctgactcctccaggctccactgcccatcagtgcctgctgcctgctcagtgaatggtcaccatggaaacggcgctcaggcctacccacccccaccaccacgccttggtcattgttccttccatgagtgagtgctgcccagcaagacaaagtacaggctccagtgggaaggccaccatgtcagccaagtcccttcccgaaggaggtgcccgcatgcttattcagtgtcactgtccactccttggcagtgactcgggtggaggcgaaacatgactaatcgtaaatcacccctgccttctcccaagtgccacacggtttgttgacacggtgtgcgcctggggcgttcacagtgcttagaatcgcagaggttgccgtttctgtacatttcatgcagagcaattaaatagggcactgcatttttcttcaagttaatttttatttattaaagtaaaacataatgtaccttagaagctagacagtcctacaagcttattatgttgtacagcggcgttccgtccccctccccagccctctctttctagaggcagccaatttcagctgcctctctctgcttacctac

SEQ ID NO: 33745 - DNA, 509 bp, Homo sapiens; identical to SEQ ID NO: 25563
  chr21:44338162-44338671
  hypo

SEQ ID NO: 33746 - DNA, 209 bp, Homo sapiens; identical to SEQ ID NO: 15908
  chr21:44444714-44444923
  hypo

SEQ ID NO: 33747 - DNA, 378 bp, Homo sapiens; identical to SEQ ID NO: 31752
  chr21:44866567-44866945
  hypo

SEQ ID NO: 33748 - DNA, 950 bp, Homo sapiens
  chr21:45400182-45401132
  hypo
cgagagagttgatggtgcccttcactacttcccaagcatcctagagtcccacgggctgccccgcccacgggcagtggctgcggagtgtctgctctatcaggcatggtgatttcctgccagcctgtgcctttgacattcccaccagaggcagaaccttctgcaggtggccctggccaggctcctctctcctcccagctcctcattagcctcctttgccaggctaggaaaccgaggtatgcgaggttaaggaactttccttgggccgtgcagctgagagtgcgctttgcagggatttgcatccaggccgcgggactcacacaggccacacctgccacccccactgcctctggctcgtgggaggtgtgggatgtggcgggtggccggggcagtgctgggcaggcaggtgttggtattcacaacgttgctttcttgaccgattattttcctgggagacttcctcagtcaaagggttgatatgcttgcgagctctcgatgcacgctatcagattctccaaaaacgtacagccagcttcgcctgcacctgcagcttctgtgatttgtgctcttaattgacgtggcgctttttttaggttgagtcgtttttcattgccaacaatcttctcctgcattgaaataatagcttgtaaagaagcctcacgcttcctttttctctgttgactcttctaggacgcgctccaggagatatataatcagaagggcatgtttccaggggagcagtttaagcctgcccggaggccgtggaccctcctgaacttcctgtcctgggccaccattctcctgtctcccctcttcagttttgtcttgggcgtctttgccagcggatcacctctcctgatcctgactttcttggggtttgtgggagcaggtaatggacactgtcgctaacagctcacactctgacgggcctcacagtatcagccacagggtcc

SEQ ID NO: 33749 - DNA, 604 bp, Homo sapiens
  chr21:45790621-45791225
  hypo
cggcggggtcggactggaccagctgttgggctttgtttgctctttttacgaattgaaaaactgaagccaggagcggctgggtgacgtcccaggtcactccttactttcctccccacgctgagctcagacgacttcccgtgacaccactgttggtggcggaatgggactgtggctgcttccgctcagccacgctccctctctgtggacggcggagggtgtgtgtcccagcccggctgccgccctcccttaggtctgtctcccggggctgctgtaacccaggctcacaaacctggtggcttaaagcagcagaaacttagtctatcagatctggaatccgcgtcgattggccatcatccagccatcggtgttggcggggccacctccctctagggcctaggggaagagcattccttgctgcctccagcgtctgggtgctgatggcattccctggccagtggccacctccctccagtcgctgcctccgtgtcccatggccgcctccctccagtctctgcctccgtgtcccgtggccgcctccctccagtgtctgcctccgtgtcccgtggccgcctccctccagtgtctgcctccgtgtcccgtggcc

SEQ ID NO: 33750 - DNA, 210 bp, Homo sapiens; identical to SEQ ID NO: 30263
  chr21:46035068-46035278
  hypo

SEQ ID NO: 33751 - DNA, 308 bp, Homo sapiens; identical to SEQ ID NO: 25571
  chr21:46359034-46359342
  hypo

SEQ ID NO: 33752 - DNA, 410 bp, Homo sapiens; identical to SEQ ID NO: 15914
  chr21:46841015-46841425
  hypo

SEQ ID NO: 33753 - DNA, 539 bp, Homo sapiens; identical to SEQ ID NO: 15915
  chr21:47369859-47370398
  hypo

SEQ ID NO: 33754 - DNA, 426 bp, Homo sapiens; identical to SEQ ID NO: 13926
  chr22:18619428-18619854
  hypo

SEQ ID NO: 33755 - DNA, 232 bp, Homo sapiens; identical to SEQ ID NO: 15917
  chr22:20050754-20050986
  hypo

SEQ ID NO: 33756 - DNA, 151 bp, Homo sapiens; identical to SEQ ID NO: 25577
  chr22:21153882-21154033
  hypo

SEQ ID NO: 33757 - DNA, 286 bp, Homo sapiens
  chr22:27007834-27008120
  hypo
cgagcctcagtttcctcatccgtaaaatgagattgagaacaattcctccctcttcagtttgatatgaggattggacataatgtatgtgccaggagtacgaacggccgcaggcacagagcagatgctggagaaatggcagctactgttgtgtggtcattttactgtggcagagagtgtgcccctccgccgcccagtactcacggtcccgcggagacaatgatgctgcgcacacggtcgaagccacggtctgccagatttgagcactcccccgagaattctgctcgac

SEQ ID NO: 33758 - DNA, 164 bp, Homo sapiens
  chr22:27019127-27019291
  hypo
cgagcccccaacctctcacccttcacgggactctgatgcggatctccaccttttttttttcctggcacagatggtggtgtgggatgaggacggcttccagggccggcggcacgagttcacggccgagtgccccagcgtgctggagcttggcttcgagactgtgc

SEQ ID NO: 33759 - DNA, 112 bp, Homo sapiens; identical to SEQ ID NO: 6562
  chr22:36907702-36907814
  hypo

SEQ ID NO: 33760 - DNA, 302 bp, Homo sapiens
  chr22:38199688-38199990
  hypo
cgggatgcgttcatcattttgaccagcaacaaactcccactcccagggtattgtttaagtgaacagtgaccggcctctatgcttagggaataaaagcggggttgtgggagaggggcccagggagcaaacgtcgcagaatctcagcccagggccgctgccaagcggacccggcacgtgagtaggaggtcggccgcagacaaggggtcctagggtctctgaggtctctcctgctggcctctgggcccctaaagcccctcgagcttcagaactccctacagacagtggcgccccgtgtccgcctc

SEQ ID NO: 33761 - DNA, 450 bp, Homo sapiens; identical to SEQ ID NO: 23217
  chr22:42353588-42354038
  hyper

SEQ ID NO: 33762 - DNA, 135 bp, Homo sapiens; identical to SEQ ID NO: 25604
  chr22:45088617-45088752
  hypo

SEQ ID NO: 33763 - DNA, 176 bp, Homo sapiens; identical to SEQ ID NO: 15921
  chr22:45613836-45614012
  hypo

SEQ ID NO: 33764 - DNA, 154 bp, Homo sapiens; identical to SEQ ID NO: 15922
  chr22:45975280-45975434
  hypo

SEQ ID NO: 33765 - DNA, 745 bp, Homo sapiens; identical to SEQ ID NO: 26907
  chr22:46929258-46930003
  hypo

SEQ ID NO: 33766 - DNA, 758 bp, Homo sapiens; identical to SEQ ID NO: 26908
  chr22:46931438-46932196
  hypo

SEQ ID NO: 33767 - DNA, 832 bp, Homo sapiens; identical to SEQ ID NO: 23600
  chr22:47022417-47023249
  hypo

SEQ ID NO: 33768 - DNA, 99 bp, Homo sapiens; identical to SEQ ID NO: 15930
  chr22:47441200-47441299
  hypo

SEQ ID NO: 33769 - DNA, 210 bp, Homo sapiens
  chr22:50695341-50695551
  hypo
cggcttctccaccgggactcactctgtggatgatgccggcagcgtggatatactgcggggggcagaggatttggcaggcttcagcgcaccctctcagagccacagggccctcctctgcccagccccgaggccctgcctgcctccctgcagcctcccccggggcccgtaccctcagccccttcagcatctggtacacgaggaactggatcc

SEQ ID NO: 33770 - DNA, 109 bp, Homo sapiens; identical to SEQ ID NO: 15931
  chr22:50864117-50864226
  hypo

SEQ ID NO: 33771 - DNA, 148 bp, Homo sapiens; identical to SEQ ID NO: 24390
  chr3:101230942-101231090
  hypo

SEQ ID NO: 33772 - DNA, 858 bp, Homo sapiens; identical to SEQ ID NO: 25619
  chr3:10206343-10207201
  hyper

SEQ ID NO: 33773 - DNA, 159 bp, Homo sapiens
  chr3:126261836-126261995
  hypo
cgcccaccctggcaaggacagctgcggccaaggacgaaagccctcccttggctggcctcacgatggggccgtcccgggagccaggtgggagctgccttccactgccatcgggtctcctctcctctcccacgcggctggccctacccaggcgccaccttc

SEQ ID NO: 33774 - DNA, 755 bp, Homo sapiens
  chr3:129693123-129693878
  binary
cgcccgtctgcgttctacattggttctgcggccgtgtccctttcgtgtgtgtctgccctgtgtttctccgtcgtctccgtgtggatctcggtctttgtctcgccctctagctctctcgtgcgcctgtgtttaatcgtgcgcttctctcaatctctctgtccctccctttgccccctacacgcgtgttctcgtcaacagatctccagaggtggtgcagaaacgaccccgcgccggcgccccatcctgcggccagtgcctccgcgccccggctccggtccccaccgtccccgccccagatttccggaggagcaggcgggcggggtcccgcggggccggctgccgtcagcgccccttcccggcggccgcgacccctccccgctgacctcactcgagccgccgcctggcgcagatataagcggcggcccatctgaagagggctcggcaggcgcccggggtcctcagcgctgcagactcctgacctgccgactgcggatcccgagtccccggatcccggacccatcctgtggagcccactcctggcaggtaaccgccccaacccctctccttccgcagacggtgtccgggagcactggaaagggagccctctcggcccgccctcaccttcggttctctgagagcttcctggagaacagggccggtgcacaggcgggcgctgtgctcgcacccccgggtcctccccgagcgcaggccggggacccgacgggaggcacggcgcgggcacatcggaggctctc

SEQ ID NO: 33775 - DNA, 415 bp, Homo sapiens; identical to SEQ ID NO: 25630
  chr3:138679163-138679578
  binary

SEQ ID NO: 33776 - DNA, 650 bp, Homo sapiens; identical to SEQ ID NO: 29115
  chr3:141516080-141516730
  hyper

SEQ ID NO: 33777 - DNA, 33 bp, Homo sapiens; identical to SEQ ID NO: 15934
  chr3:141664320-141664353
  hypo

SEQ ID NO: 33778 - DNA, 43 bp, Homo sapiens; identical to SEQ ID NO: 15935
  chr3:142683691-142683734
  hypo

SEQ ID NO: 33779 - DNA, 322 bp, Homo sapiens; identical to SEQ ID NO: 7339
  chr3:143316169-143316491
  hypo

SEQ ID NO: 33780 - DNA, 796 bp, Homo sapiens; identical to SEQ ID NO: 25637
  chr3:147138422-147139218
  hyper

SEQ ID NO: 33781 - DNA, 844 bp, Homo sapiens
  chr3:153839633-153840477
  hyper
cgcagcagcagggggaccgccggtctgggagcacgcgagtcggccaggcgtccccggttgtccagaggcacagtttcctaacttctttcctctttaggcaagactaactcggtgttgctcctcccggcgctgacttcgaggcccggctatggacggcgagagcgaggtggatttttctagcaacagcataacccctttgtggcggaggcggtcgattcctcagccccaccaggttctgggccggagcaagccgaggccccagtcctaccagagccccaacgggttactaattacggatttcccggtggaggacggagggacgctcctcgcagcgcagattcccgcccaggtgcccaccgcctcggacagcaggacggtacataggagccccctgcttctgggcgcccagcggagagcggtggccaatggtgggacggcatccccggagtacagggctgcctctcctcgacttcgacggcccaagtcacccaagctccccaaagcggtgcctggcggctccccgaaatccccagcaaatggcgcggtgaccttgcctgcgccgccgccgccgccggttctgcgccccccgcggactcctaacgcgcccgccccctgcacccccgaggaggaccttactgggttgactgccagcccggtgccttcgcccactgcaaatggccttgccgctaataacgactctcctgggtcaggttcgcagtccggccggaaggcaaaggaccccgaacgggggctctttcctgggccccagaaaagttcttcggaacaaaaactccccctccaaaggctgccctcccaggagaacgagctcctcgagaatccttcc

SEQ ID NO: 33782 - DNA, 554 bp, Homo sapiens; identical to SEQ ID NO: 31820
  chr3:160167477-160168031
  binary

SEQ ID NO: 33783 - DNA, 820 bp, Homo sapiens; identical to SEQ ID NO: 24414
  chr3:169539913-169540733
  hypo

SEQ ID NO: 33784 - DNA, 217 bp, Homo sapiens; identical to SEQ ID NO: 15940
  chr3:183217407-183217624
  hypo

SEQ ID NO: 33785 - DNA, 334 bp, Homo sapiens; identical to SEQ ID NO: 6585
  chr3:187443068-187443402
  hypo

SEQ ID NO: 33786 - DNA, 1915 bp, Homo sapiens
  chr3:187455297-187457212
  binary
cgctcacacataagagcacaaacaccagccctgcgcgccggggcaagcctaggcagacttcgctaccccaccccgaccactccgtacctgtcttccagggactgcccgcccctgggcgatccacctcgaagccccccgcaaggcgcgacggaggctttgtggtatgaccgtggcggcccttaatttagttacattcaaataaaacttttggtgcacctcggtagctaacattgtgtgtatgcctttttttttttttttttttttttcctgttacgccgtcaatgcagcaggcaatgaggggaatgacacagccctctcattcccggaacgtagtcaatctcggctctgcggatttcacagaacacactttgcctattgccggctccaacaagaagtaactttccaggaagctgccggccccggcagccgccaggatcgctgcctgcgctgcgctggccgccggggattcacccagggaggcggggccgctggggaaggctcgcggggaatacagcacactttcccctaaatccctcgtccgcgccgagtgcagggctctcagagttcacctagtcccacctctcacccacaacagtttataaatggggaaggtcagacaagttagtagcagagctgggtctagaacccaggagttcgaatacaatccgaggctcatatcgagactttaagttgtccgattccgaagtttatttgcttttttccctctttttgccttccattctccctcacccccgttcttttaggggaatgtttgagcgagacttcaaggtcaaaagatggagtccctaggggctgagggtctccatcataggcgccccaggcaaggttggagaaaaactaaacagaaagccccttccgcctacgttggcaagaacgggaacccagctccacttggtttccgcccaaagtctttagaacaggagctgccaagccgtaaggatttccgaatccgatttccccgaaaccgtagagacacagcttggactcggcaaaggccggggccccgacccctgcgcgcgcactggcactctccaaagttgcctcgccttcctgtggccctcccgggaattataacccccgggtgccatgtcctaattggtctcggtagcaggctccggggtgcgctttcgggggctaggggacagcgaaagactcagccacaaaggccgcagtctggtcctaaaactagccagtggcgtcacactgcgccgctcatcccttctgcggcaagcggaagggtcagagtcggtctgcaaagaacgagcctttggcctcaaaatcctacattgaggctttctcaccccttcgcccggtgggataaaggtgaaagagacggttgggatttaataaggggtagggatgagaatctgggaagttaaaatgaagtaagtgcatttattggaaattaggagtcccgtggttccgggagctcaaaccgaatggtgtttttaccgctgcctaacgctagagagagccctccatcaaggtttgaaaccgtcaacccctttctcgcccctcccctccttcccattgacctagtttggccagagcctcccgatttggagaatgccttccgcccttcccccctcctctccagccagagaggctacagaggctgttggattattggtaatctaataactccaataacccgctgaaaaatccaaagggaaatctgaaagtgtaaagcactgtttagggacaaggacaaggaattttaataaggctgcaactgccgtagtgaaccccgcatcaggggccctgccgtggggctcccggtctcagcagtgtttcagccaactagctgcacggctgcagacaccaccgtggtccggcggcagggggtgaggtcaaatcgcggagctgtttttattcttgggggaaaacactcttc

SEQ ID NO: 33787 - DNA, 383 bp, Homo sapiens
  chr3:193419624-193420007
  hypo
cgcgtcaaaagcattgttttcttatcctgttggtggagtgaggcatttggacctggatgctctccccattgggcgccccccgttggtacgtttcgccagctgtgtactctatgattggctggccttttgatgtgcaggtactacaagttggtcacaaacttgtgtacaatgggcctgttctggttcatgtgaaaatcaacatccttttttgtgttaccgggtgacaggatgctacaatactattagcatttgcaaagagtgtgctctgtccaagggtgtaaccacaggtcgtgtgctgctcactttgtgtttctctattatgtgagagacacaaagaagctgagggctcgcaaaggcctgtcaaatcttgtaatgtggcgctc

SEQ ID NO: 33788 - DNA, 506 bp, Homo sapiens; identical to SEQ ID NO: 31836
  chr3:194048766-194049272
  hypo

SEQ ID NO: 33789 - DNA, 526 bp, Homo sapiens; identical to SEQ ID NO: 31839
  chr3:195536308-195536834
  hypo

SEQ ID NO: 33790 - DNA, 2308 bp, Homo sapiens
  chr3:195599104-195601412
  binary
cgagcggggccaggtcagcatccatccccgcccagtactcactcgtcaatcctgtccgggaagccccagcagtggcgggggtcactgtcgccatgccctgtgtggatgaagctgttctgcaggggctggctgatgtcctgggccgacaggccggccacggaggtcaccacgttgcgagggaagggccccacacacagcgtccgtgtgttctggccacgccaccagtagttctcggccctgcgcgacagagatggcacggtgaacgccaggcgtggcggggcagccccggcactgggaccctcctcacaccctggccactgtggcagaagggggatggagctcaggcctcaggaccaggctgtgtgccaccggccctcctccccaacagcccccgtgacccaccatgccccgtacaggcctgtttgcacacggccttacccacaactctctaggtgggtcaggcagctttccctatggtttgcaaataaggaggcacgctggaagctgctgcagcaggcaacatgacctgtccacggttaccagaaagatcccagcagacctgggacccaacgccagctttcaggtctgtggggccagcgccccgcccacacctcctcctcacccctcagttccctggcaaggccggggccccagtcctcttctggccacttgatttcactcctcggctgggttccaggagttctgagaggtgcgggggtgccgggggacacctagggccttgcactaggctgggggccaggcctccagctacaacctgcctcccgaatgcagacgcgggagagtctaggagcactcgggcaactcagtccctccctccaccgcttcacctgcttccggagctttccaccacctcccggaaggcctgcgggagcctccccgtctcctcaggaggggctctacctgtgtccaaaagggaactcagctctcccacagtgaccagacagtagggctgccagtccccctctgacctcagacacgaaacctctgctgatgtggcctaagccggggcctgggcaggggcaggggcaggggcaggggcaggcaggccaggaagcacagggctcccgcaagacactcctgactcccgaaggctctcacaggttgtgaggctcccgcgtctgctgctggacttgtcatacgtgatgccgtgagcagagtctgggcaggcgggggcggtgagagccccgtgggcagtgtctgggcaggcgggggcggtgagagccccgtgggcagtgtctgggcaggcgggggcggtgacagccccgtgggcagagtctgggcacgcgggggcggtgacagcccagagctgctagggtggacacgtgtggcaccacactgcacgccctccccaccaacccccacttctcctgtcccagggccaaagcgtgaagaagggctcctctgaaacccagccaggccggggagagaggacggaggaggtggcgacgcctgggcacccagacccacagccttgtaaggtgacgaggcctggctggagcggggtgactccggaacagcccatcccagagaccaaagtcaaacccgagagcaccacggtcggcggggaggcggggggcgcggggcgcggggagacggggctgtgctccccctgcccagcctcctcatacacagggccactggcctggccccaccacacacagccaccctgtgattcccaccctgcctgcagggagggaaggaaggagagaggacagtaccccgagacgagacgagtcccatctgaaaaatagcagggccactcgaaggagcagagccccggctccccagcacgcacacagcctcccacggcggcccgtagaggaggaaccccggcaccggctgggctgcggctctcccgctacacccacgggctccccggtggctgccgcgggccagacgccggactctgctctccacacctcttcagaggcgctcagtaactgggtgagaatgccgctgaggccgagaccttgctcagagcagcgtgactcgtgcccaaggcaggtcactccgtctggcctctcccttccgccaacactgcccagctccaggcacagaagcctcctttgggacccacttctgagagggaaaggagacatcaagcccacctcccttagtgcaggtatggccgaggcaagagcccccatggctgctgggagtcctgacaccactcgagaaaacatgcttgctcctgggggaaggagagtaagagtgcggaggacgtgtgcaagaagctcccctcgggatggcgcccacgcacactccgaggcacaagaaactccccctc

SEQ ID NO: 33791 - DNA, 188 bp, Homo sapiens; identical to SEQ ID NO: 26983
  chr3:195648737-195648925
  hypo

SEQ ID NO: 33792 - DNA, 139 bp, Homo sapiens; identical to SEQ ID NO: 23608
  chr3:195834909-195835048
  hypo

SEQ ID NO: 33793 - DNA, 764 bp, Homo sapiens; identical to SEQ ID NO: 29155
  chr3:196387095-196387859
  hypo

SEQ ID NO: 33794 - DNA, 411 bp, Homo sapiens; identical to SEQ ID NO: 25656
  chr3:196388348-196388759
  hypo

SEQ ID NO: 33795 - DNA, 293 bp, Homo sapiens
  chr3:197685522-197685815
  hypo
cgggggaaaacaaacggttgagactttaactcgagtaacttacatgtgcaatggcaaatgagactcaaaagcaaatacatgctcttccttactgagatgatgcagcatttgtaaataataaatgtatgtttttatgtttttctcctcccatatggaaattaagtcaaaagtactcaagtcaccgttgccaaaggaggagtcctgtggtttacaggaaagggcttgcgtggctggtaacttgtccactacaccattgaaacagctttgcctcctggctgggcgcggtggctcac

SEQ ID NO: 33796 - DNA, 400 bp, Homo sapiens; identical to SEQ ID NO: 15953
  chr3:24160995-24161395
  hypo

SEQ ID NO: 33797 - DNA, 352 bp, Homo sapiens; identical to SEQ ID NO: 31845
  chr3:38032105-38032457
  hypo

SEQ ID NO: 33798 - DNA, 173 bp, Homo sapiens
  chr3:41289162-41289335
  hypo
cgttccatgcattcctgctctgcgcatcaaagcccctgtgtgacagaaggaatgcgtttgaacttggcccacccctggctgagtctaggctagactagtggggccatgctgcgcccccgcacacagcaggcccagtgaggctggaaaggacaaactactggcagagcagcatc

SEQ ID NO: 33799 - DNA, 242 bp, Homo sapiens; identical to SEQ ID NO: 15955
  chr3:42190950-42191192
  hypo

SEQ ID NO: 33800 - DNA, 81 bp, Homo sapiens; identical to SEQ ID NO: 15956
  chr3:47239328-47239409
  hypo

SEQ ID NO: 33801 - DNA, 190 bp, Homo sapiens
  chr3:48698266-48698456
  hypo
cgccagtgaggctgtcgatggcaaagtgtccacggctattgccactgatgatgttgtagtgcaccaatccgttggcgtccttgtcccggtcagtggccgtgacgcgcagcacgactgtgtgggggcgcacatcctcgcgcacctgcgccacgtagcgcttctcgctgaactgaggagcattgtcgttctc

SEQ ID NO: 33802 - DNA, 118 bp, Homo sapiens; identical to SEQ ID NO: 15957
  chr3:48731393-48731511
  hypo

SEQ ID NO: 33803 - DNA, 557 bp, Homo sapiens; identical to SEQ ID NO: 15958
  chr3:49720262-49720819
  hypo

SEQ ID NO: 33804 - DNA, 1220 bp, Homo sapiens; identical to SEQ ID NO: 24443
  chr3:53032401-53033621
  hypo

SEQ ID NO: 33805 - DNA, 435 bp, Homo sapiens; identical to SEQ ID NO: 15960
  chr3:66452230-66452665
  hypo

SEQ ID NO: 33806 - DNA, 1017 bp, Homo sapiens; identical to SEQ ID NO: 15961
  chr4:100573606-100574623
  hypo

SEQ ID NO: 33807 - DNA, 339 bp, Homo sapiens
  chr4:1008588-1008927
  hypo
cgggccagccgccccgtttccatctcggggccccactcctggaagggaaaataaatcactgtccccttggggggagggagggagccgtgaacaaagtcgcctttggctgggcctggaaacgccgaccgcagactcctttatccattgtgcgggaatcaatgggcctccgggctccctttcagccgcaggccccgcgctgcggccctgtcaggggaaatgttggtttttccccagtcgtggcctccagcccctggcttgcccagccctggcttgcccagccctggctcaggaactgcggccgtgctgggagaggcgggctgtgcccgcagactggacccc

SEQ ID NO: 33808 - DNA, 168 bp, Homo sapiens; identical to SEQ ID NO: 15962
  chr4:103421142-103421310
  hypo

SEQ ID NO: 33809 - DNA, 381 bp, Homo sapiens
  chr4:1036227-1036608
  binary
cgcacatctacacatgcacacccacacacacaccgacacacacaccgacacacacacctccacatacacccccgcacactgacacacccacacacacaccgacacacacacctccacaaacacaccccccgcacactgacacacacccacccccacacactgacacatccaccccccacaccgacacacacctacagtgacacccgcacactgacacacacccactcctgcacactgacacccactcctgcacactgacacacacccccgcacagacacacacccacccccgcacaccgatacacacacctacccacacacccaccccacacaccaacacacacccacccatccccgcacaccgacacacaacccaccccc

SEQ ID NO: 33810 - DNA, 144 bp, Homo sapiens
  chr4:1214821-1214965
  hypo
cggcctgagatattcgtaaacaagaaaaaacaaaaattttgaaattatgaaaatatccacaatgcatgtcgatctgacaagaacctgacgcagaccacgtgagggcttcgtaaccaacacgaaaaagacggccggaggtgctcc

SEQ ID NO: 33811 - DNA, 413 bp, Homo sapiens
  chr4:1215111-1215524
  hypo
cgcgcccctgcctgaagaacagcgactccttccaggcgaaacaatgtcctgctctgggactcagaaattccactcctaggtacaaacccaagagacgtgagtctatgtgcacaaaaaagacgggcagaaatgtgttcacacaagttttgtttgtaatattagccaaaaacttacaaaatgcatcaccaagagtctggagaagcaaatcgtgctgtgttcacgtgatggaaccgttatcagaaactgctgggtcgtatgaaaacacaggtgagacccagaggcatcaccccgactgacgggaggcggacacagaaggctgcgtgcccgtgatcccacctcggcacagctggggaaggccctctgctctaggaagcgggacccgggtcctcgcagggtcgtcgcggggccgccac

SEQ ID NO: 33812 - DNA, 128 bp, Homo sapiens
  chr4:1282403-1282531
  hypo
cggagagtggcagacacgatgcgaaccgtgaaaggacgcaaagagtacagagtgcatgcttccatctctataggaaggtcaggaacgctgttacggggagcagggttagaatgatggggatatagccc

SEQ ID NO: 33813 - DNA, 550 bp, Homo sapiens; identical to SEQ ID NO: 28031
  chr4:1299071-1299621
  hypo

SEQ ID NO: 33814 - DNA, 268 bp, Homo sapiens
  chr4:1336770-1337038
  hypo
cgcacgttgtaaaatcaactcatcagtgtctgctgaacactgtaaaaagtgtgctgggattgtcactggaactgcagtgaacctatcatccctatttggggacggtattagtttgctcggctgccgtaacagaagaccacggactagcgggtttaaacaatggacatttatttcttcacggttctagaggagatgctggcagggttggctcccggtgaggcctctcttcccggcttgcagacggcccccttctcactgtgtacctctc

SEQ ID NO: 33815 - DNA, 153 bp, Homo sapiens
  chr4:1512231-1512384
  hypo
cgactttactccccaccgcgatgcacgcacactcccccgtgtcctcacctgcacttggcaaggttggtctttgtaatttcagctgctccaataggtgcacagtggcagctttgtgcggttttaacctgcgttttcctgataattagcaatgtc

SEQ ID NO: 33816 - DNA, 276 bp, Homo sapiens; identical to SEQ ID NO: 15969
  chr4:1541591-1541867
  hypo

SEQ ID NO: 33817 - DNA, 370 bp, Homo sapiens
  chr4:1687095-1687465
  hypo
cgggagaaagagctacctgtgtcccctggccaccgtggggctcggtggccacgtcccacagtggacactgtgggcagacagatgcatggaggccggctggttccgggaataggctatgggtgaggccatgcagcacccctggggctggatgctgggggaggcatcggggctcccaggggtcaggctggggcctcccaacaggttctgggcctggtaaggctagtccggtgcaggctgcgaagccaggccagctgacaccaggactggctggagtcagcctcacctgtctggaagagtgggagtcccagcggggctggggaggggagaagggctggagcaggcgtccaggccattctcttcgctggggtcc

SEQ ID NO: 33818 - DNA, 888 bp, Homo sapiens; identical to SEQ ID NO: 25680
  chr4:174430248-174431136
  hyper

SEQ ID NO: 33819 - DNA, 132 bp, Homo sapiens; identical to SEQ ID NO: 15970
  chr4:183808118-183808250
  hypo

SEQ ID NO: 33820 - DNA, 1377 bp, Homo sapiens
  chr4:1993659-1995036
  hypo
cggcatccggtgccctcccagcagcctcccacctcccagcagcacccagtccactgggcctactcttccaccggtgcgcagatgcaagaaaacctgaagggtgagaagccggggccaccactgctcccgcagaaagcctgcgggtgggaaatcctggggatgaggggcgtagagcaggcaggtgcccggcacagcagagcgcaggagcagggtggagtcacctgccgcgggggtgtgtgcctgggcagcagggggtggggcctgggacctggggcagcacccgtgacagctgagctggtgcctagtcaccatctaggcagggacggctgcctctgggtctggacggcgctgggagttggcgctcgtggagcctggaggtggccccgggatctggagtgaggccagggccttggggaggccatgggcgacgtgcgtggaggaagcaggcgcaccccgtgctccctcaatacctgggaggccagatccatccacaccagggcctgcttcggccacataaaccccctcccacgaggaaacgcagagagccaggccatggcgtgcctgtgcctctgccatgcgcccactgggctgctcacagtgtgagacagctgggctggctggcgctgggggtgaacaacagcgccctgccctgtccagacgccggggctgaaaccccagccccaggccttcctgacacccactccctgcgtcaggcgccagagacccgtcctacgagggctgcggccatcacgtccccgcgagcgccgcctcctggtggcctctgagtgggaggaccttccagcgcttccctcactgtcctcatgggcttcctgccctgagggaagttggctcgaagggcagagatcagaggtcgtgccaggggagcctgcctgctgccaagcccctctgcatctgccctgcaggacacccagctgccctcaggagtcaagaaccccccgcgtggcccagccccttctgttccttgggcaaccagggagggtgtcgccccggccgctgaccctgcgccccgggccctcactcccgacgcccgcccgagctgagtgcgcgatgcggcagaagatgctacgtggctgcaggaagcgctgcgcacacgctgcctctggcagccgcacagcccggctgtttccagccagtgcggcctctccacagcagccccagggaaaccctacgcctgccaagaggcaagcgcgcggcattttataaaaatggtaaggataaaaaaagtcggggatgttaatttaaaacaaaaaggaccactgttgtggagtcaatgttttctctccagaacgcgcatgttgaagcctggctcgctctactggggcttcttgtaggaaaacgcttggctttcccgggcgc

SEQ ID NO: 33821 - DNA, 108 bp, Homo sapiens; identical to SEQ ID NO: 15974
  chr4:24534559-24534667
  hypo

SEQ ID NO: 33822 - DNA, 175 bp, Homo sapiens
  chr4:25013897-25014072
  hypo
cgcgggcttgccgcaatgctgaaattagttcaacacatctgatcaaagccacaacacacctgtaatgttgtcatagctccggaaattcatttcaatgtggtcccactccagcaccatgcagttctccatgctgggctgcgcgatggccacgtacacatcgttcttggagttgaac

SEQ ID NO: 33823 - DNA, 81 bp, Homo sapiens; identical to SEQ ID NO: 15976
  chr4:2672891-2672972
  hypo

SEQ ID NO: 33824 - DNA, 242 bp, Homo sapiens; identical to SEQ ID NO: 15977
  chr4:3245192-3245434
  hypo

SEQ ID NO: 33825 - DNA, 781 bp, Homo sapiens
  chr4:3252217-3252998
  hypo
cggtgagggtcttgcagggtgtgaaggtcataggtgtgcggtgaaggtcacaggtgtggggtgatggttttgggtgtggggagggtcttgcacggagcgagggtggcagcaagagctggaagctgcagggggagaatggcagcagagagcacccggccctgtgggcggcctggacagggctgggcctggggctgccggagagcctgtcagcttccaggatgggagtggcctcactcagctgctccacctccgggtcaggcaggtgagcctggggcagagaggctgagagcacctgagccacttgtgggagaggccacccccactgcccccctcaggcgaggagccggcctccagcacagcagaagggaacccccagtccccagccctagtgggagtggggaagaggcccagcaaggccccggacagaccgccagcctgtgaggtctccgctttcagttgcgttgatttgattttttctgagccttgaaggaggggtccggggcctggccctgcccaaaggcccctaggcaggccccaaagccgggacctagggtgctgagcatgacggatgttgggtttgagcggctggcttgcgacgtgagggctgaggtgtgagcctgggtatcttcagaggttcggtggacacaggcagctgcccgcggccccactgttcccgtggcctcctagtcctgctcaggcacctggtgaggaagggacgcagagggcagtgggaggtggccacgactgttccagcaggctcccctctgactcaggaattcac

SEQ ID NO: 33826 - DNA, 219 bp, Homo sapiens
  chr4:57777264-57777483
  hypo
cgaagaccaaaccctttcgctgtaagccatgccaatatgaagcagaatctgaagaacagtttgtgcatcacatcagagttcacagtgctaagaaattttttgtggaagagagtgcagagaagcaggcaaaagccagggaatctggctcttccactgcagaagagggagatttctccaagggccccattcgctgtgaccgctgcggctacaatactaatc

SEQ ID NO: 33827 - DNA, 398 bp, Homo sapiens
  chr4:619513-619911
  hypo
cgcggcctgcgaggacgggtgcccgccggactgcgacagcctccgggacctctgccaggtggaggagagcacggcgctgctggagctggtgcaggatatgcaggagagcatcaacatggagcgcgtggtcttcaaggtcctgcggcgcctctgcaccctcctgcaggccgaccgctgcagcctcttcatgtaccgccagcgcaacggcgtggccgagctggccaccaggcttttcagcgtgcagccggacagcgtcctggaggactgcctggtgccccccgactccgagatcgtcttcccactggacatcggggtcgtgggccacgtggctcagaccaaaaagatggtgaacgtcgaggacgtggccgaggtgggtctgtgcggagcctcagggaggc

SEQ ID NO: 33828 - DNA, 1287 bp, Homo sapiens; identical to SEQ ID NO: 31904
  chr4:628147-629434
  hypo

SEQ ID NO: 33829 - DNA, 533 bp, Homo sapiens; identical to SEQ ID NO: 27051
  chr4:650837-651370
  hypo

SEQ ID NO: 33830 - DNA, 236 bp, Homo sapiens; identical to SEQ ID NO: 25700
  chr4:6748324-6748560
  hypo

SEQ ID NO: 33831 - DNA, 353 bp, Homo sapiens
  chr4:738129-738482
  hypo
cgccggctccggctgccccgtctctgtctcctgtgctccccacgcctgcaccccacaggcccacacgcccgttctgcatcctggggagacccctgcagacactttgcggacggctttcctttgacgcttactccgctccgggggtccagagtctcttaatggagtgaatttttgacggcatttggagtacagtgtagttttttaaatggcttgacagtttggatttcatggtgcgctatgttctgtttgtgctaaaaggtgaaaccaaagcagacgacagttcaaacaaagaggccgcggaggagaagccggaggaggacaacgactaccaccgcagcgacgagcaggtgggc

SEQ ID NO: 33832 - DNA, 473 bp, Homo sapiens
  chr4:829536-830009
  hypo
cgggggcccctcaggacattcaggggccaagacagctttggcagctcccactcctctcccagtggcctctgggctcagacacccggactgcgtcctcaggagtggagctccccgaggaaagagtgcctttgcttcccttgacgtgtcctgcactttgtgtcagccagcgcggcagcaagaacgagcacacggggacagaagctcatctgaacctgccggcccgtgtcggtgtccagcgcggaggcgctgtgtccgcagggcacctgcatcctcataagctggactgactgccgtggggcccggtgccccatgtccagtgcatcccagactagaacaaagacttgcacacggcgtccaccacagcacaagccacagcagccacgggggaggcagccacgggggaggccgcccagcgccatcggcagagcacagacacgcaaactgtggtcccgccacacgtggaccttgattcc

SEQ ID NO: 33833 - DNA, 298 bp, Homo sapiens; identical to SEQ ID NO: 15985
  chr4:8372577-8372875
  hypo

SEQ ID NO: 33834 - DNA, 76 bp, Homo sapiens; identical to SEQ ID NO: 24488
  chr4:95127605-95127681
  hypo

SEQ ID NO: 33835 - DNA, 383 bp, Homo sapiens; identical to SEQ ID NO: 31916
  chr5:10307529-10307912
  hyper

SEQ ID NO: 33836 - DNA, 252 bp, Homo sapiens; identical to SEQ ID NO: 15986
  chr5:132607933-132608185
  hypo

SEQ ID NO: 33837 - DNA, 981 bp, Homo sapiens; identical to SEQ ID NO: 25711
  chr5:142781722-142782703
  binary

SEQ ID NO: 33838 - DNA, 453 bp, Homo sapiens; identical to SEQ ID NO: 11727
  chr5:14328256-14328709
  hypo

SEQ ID NO: 33839 - DNA, 373 bp, Homo sapiens; identical to SEQ ID NO: 15990
  chr5:1476334-1476707
  hypo

SEQ ID NO: 33840 - DNA, 135 bp, Homo sapiens; identical to SEQ ID NO: 15991
  chr5:158139227-158139362
  hypo

SEQ ID NO: 33841 - DNA, 131 bp, Homo sapiens; identical to SEQ ID NO: 11728
  chr5:1641261-1641392
  hypo

SEQ ID NO: 33842 - DNA, 293 bp, Homo sapiens; identical to SEQ ID NO: 15993
  chr5:171478667-171478960
  hypo

SEQ ID NO: 33843 - DNA, 266 bp, Homo sapiens; identical to SEQ ID NO: 15994
  chr5:171523258-171523524
  hypo

SEQ ID NO: 33844 - DNA, 210 bp, Homo sapiens
  chr5:171533446-171533656
  hypo
cgaagggcccgggggggctcagaaacgcctgaagacccccaggccccaacctctcctttggagctagcagcaccaggagaacgctaccactgcacctccccagccccgtccaccacatattccagccctaatcccggcgcaggcaccccggcaggtggccctgcccctgcccctcaccacttagagggcgtgagcagcgtgggagggtcc

SEQ ID NO: 33845 - DNA, 417 bp, Homo sapiens
  chr5:172353785-172354202
  hypo
cggggcacagcagacgcacgcacgcagtggataccagctattaccattattgttgctctcatcacagccacatcatcatccttagttgaactaattacctaagatcccacagggagctatggcagaaccaggatctgttctgcctccaggtcgcaccgtgagaacaggtctgtgggtggcccagtcagctgtgaccacatggctgcctcccccacacctcactctcctcctgctcagactcctcccatcgatagtggctcctcctagagtcctcgccctccttagctccctggcaccttggcccagatcaaagagaaccgcacatctccacacgcagacaggagagcacgcatacctttcgtgcacaccaacacacatgagctcacatggccccagacacgtgcacagaatgggccc

SEQ ID NO: 33846 - DNA, 534 bp, Homo sapiens; identical to SEQ ID NO: 24507
  chr5:1729774-1730308
  hypo

SEQ ID NO: 33847 - DNA, 274 bp, Homo sapiens
  chr5:176225713-176225987
  hypo
cggggagccgcgcggggcaggagccaggcccacagacagcaagcagcgttctgcttggctgatccacgatgtcggggctgcggcatctccgcttccgcccggagagtgacggcgtccgcaagctcatgcgaggggggttattttactaaccagatagattaagcatctctccttctaattaccggtttaattaaccttggcacacagtatgtaccagacccgagggacagagtcagaatggctgctctgggtgaacatcgcccatctgctctgc

SEQ ID NO: 33848 - DNA, 30 bp, Homo sapiens; identical to SEQ ID NO: 25726
  chr5:178987428-178987458
  hypo

SEQ ID NO: 33849 - DNA, 188 bp, Homo sapiens
  chr5:27523835-27524023
  hypo
cgcacctgctgaggatgagcccctcgaggagcggcgcggggtgtgtgggagaacaatcacgggctccggccaccgtgcacagccacgcacaccggctagcacagtggggagggcagctccaggtgcctgcacacgtgccggctgcgtgcaaggctcctgctgaaccggatgtactgcacacggcttcc

SEQ ID NO: 33850 - DNA, 914 bp, Homo sapiens; identical to SEQ ID NO: 31964
  chr5:3324702-3325616
  hypo

SEQ ID NO: 33851 - DNA, 449 bp, Homo sapiens; identical to SEQ ID NO: 30428
  chr5:3740590-3741039
  hypo

SEQ ID NO: 33852 - DNA, 1205 bp, Homo sapiens
  chr5:40680875-40682080
  hyper
cgtatcgcgagcctggagattttggtggccgcagttggtaagtggctacaatccagaaagtaggatcgagttgctccccttgtcttatcagtgtatcgtttctcgggcgcgggtctaacaccttacaagtggtaatttccgctcacggcagctttgtctctcttctaccatccccagacccagccttgcactccaaggctgcgcaccgccagccactatcatgtccactcccggggtcaattcgtccgcctccttgagccccgaccggctgaacagcccagtgaccatcccggcggtgatgttcatcttcggggtggtgggcaacctggtggccatcgtggtgctgtgcaagtcgcgcaaggagcagaaggagacgaccttctacacgctggtatgtgggctggctgtcaccgacctgttgggcactttgttggtgagcccggtgaccatcgccacgtacatgaagggccaatggcccgggggccagccgctgtgcgagtacagcaccttcattctgctcttcttcagcctgtccggcctcagcatcatctgcgccatgagtgtcgagcgctacctggccatcaaccatgcctatttctacagccactacgtggacaagcgattggcgggcctcacgctctttgcagtctatgcgtccaacgtgctcttttgcgcgctgcccaacatgggtctcggtagctcgcggctgcagtacccagacacctggtgcttcatcgactggaccaccaacgtgacggcgcacgccgcctactcctacatgtacgcgggcttcagctccttcctcattctcgccaccgtcctctgcaacgtgcttgtgtgcggcgcgctgctccgcatgcaccgccagttcatgcgccgcacctcgctgggcaccgagcagcaccacgcggccgcggccgcctcggttgcctcccggggccaccccgctgcctccccagccttgccgcgcctcagcgactttcggcgccgccggagcttccgccgcatcgcgggcgccgagatccagatggtcatcttactcattgccacctccctggtggtgctcatctgctccatcccgctcgtggtgagtgaccggggctggggccctactcggcctttttctcgcatccacctcccgcgtccattccccgctccctgctttccctctgagtccttggcagtgaacgtgtcgcctttaggtc

SEQ ID NO: 33853 - DNA, 461 bp, Homo sapiens
  chr5:488144-488605
  hypo
cgctctggggaccaggagggcgggatttcaacagcgccatcattaaccctgaagctatggagtgggcgggcagggcctgggaactgtggaagatacaaagaagcctcgcgaaagctgccagtcgttctgagctgggaggaaggaggtggagggacgggacgcccccgggaggggagtttgaggacagggtttcacgccctcctttgctgactgaccgatggggggtgagacggggcccaggcctcccacggctcgcccgctctggagcggtggctccgttgctcaccacggtgactgcgtcgttcagcagcgactccccgaagacgatgatgaacaggacctcgttgacatggacctcctcaaacacggccaggacggccaccgggtccacagccgccatgaggctgccaaacaggaggaagtccagcagcccaatctgcaggtcgcctggaagacaagcc

SEQ ID NO: 33854 - DNA, 386 bp, Homo sapiens; identical to SEQ ID NO: 8590
  chr5:510026-510412
  hypo

SEQ ID NO: 33855 - DNA, 1069 bp, Homo sapiens; identical to SEQ ID NO: 24517
  chr5:54518558-54519627
  hyper

SEQ ID NO: 33856 - DNA, 757 bp, Homo sapiens
  chr5:554314-555071
  hypo
cgagccgttacctttcaccaaatcgcactgtattttattcatttagggtgtacacacctatctgctcttcaaaggaattttgggcagattgtaaaattacgctcaacatacagcaaggcgactataaatacaaaagcagcactgaggtgctggtgctgcgggtgggtcacgggataaaccaggcgtggggtctgggtcacgggatgacccgagggtgggtcacgggataaaccaggggtggggtctgggtcacaggatgacccgggggtgggtcacgggataaaccaggggtggggggctgggtcacgggatgaacggggggcgggtcacaggatgaaccgtgggcgggtcatgggataaaccagggtggggtctgggtcacaggatgacccgggggtgggtcacgggataaaccaggggtggggggtgggtcacgggatgaacggggggcgggtcacaggatgaaccgtgggtgggtcatgggataaaccagggtggggtctgggtcacgggatgaacggggttgggggctgggtcacgggatgaaccggggggtgggtcacgggatgaacggggggggggtgggtcacgggctaaaccggggttgggggtgggtcacgggatgaacggggttgggggctgggtcacgggatgaacggggggtgggtcacgggatgaacagggggtgggtcacgggataaaccggggtggggggctgggtcatgggatgaacggggggtgggtcacgggatgaacc

SEQ ID NO: 33857 - DNA, 508 bp, Homo sapiens
  chr5:600977-601485
  hypo
cgcccaccatggcgttagggccacagcctcctgccccatgtgccaggcccggctctgcccagctccctgcagctgcgccagtgtgtgctgtgactcgtgctcctggtttgtcatctgcctctcagtagacaccacggccttcaagctttctccgctccgtgaccagcagctgggacgggaccagcagtgcatgcggctctggattcatgtttgttgaatgactgactgaacggaggctcccttacagaagtgaacggcgcggccctccctgagttccggcctggctctggataccaaggagcaaggtggtcaggggtcaggggctggagtggggagattgcctgggagggggctggagggtgtggtggaactgcaggttctctccttgacatgcctgtgggggagcctttcccggccctctctccgctggttttcaccctttctccggtgcagccacactgggcatcccaccccagggatccaggaagggggcgtgtcggccgagtgc

SEQ ID NO: 33858 - DNA, 150 bp, Homo sapiens
  chr5:66511687-66511837
  hyper
cgtgcccttgccctgcttcagccccacagccccgcctgggttgctggtctgacccggctgggcagggtggctgtgagctgccggtgtggccccaggcacctcaaagggtcctcggtgttcaacaacaggaagtgctggcaggcttccctc

SEQ ID NO: 33859 - DNA, 423 bp, Homo sapiens; identical to SEQ ID NO: 32971
  chr5:79911142-79911565
  hypo

SEQ ID NO: 33860 - DNA, 561 bp, Homo sapiens; identical to SEQ ID NO: 32001
  chr5:87955365-87955926
  hyper

SEQ ID NO: 33861 - DNA, 460 bp, Homo sapiens; identical to SEQ ID NO: 29295
  chr5:92906252-92906712
  hyper

SEQ ID NO: 33862 - DNA, 132 bp, Homo sapiens; identical to SEQ ID NO: 16019
  chr5:96121466-96121598
  hypo

SEQ ID NO: 33863 - DNA, 140 bp, Homo sapiens; identical to SEQ ID NO: 25752
  chr5:98200950-98201090
  hypo

SEQ ID NO: 33864 - DNA, 792 bp, Homo sapiens; identical to SEQ ID NO: 32014
  chr6:10389924-10390716
  hyper

SEQ ID NO: 33865 - DNA, 896 bp, Homo sapiens; identical to SEQ ID NO: 24524
  chr6:10417173-10418069
  hyper

SEQ ID NO: 33866 - DNA, 142 bp, Homo sapiens; identical to SEQ ID NO: 16022
  chr6:106456830-106456972
  hypo

SEQ ID NO: 33867 - DNA, 1654 bp, Homo sapiens; identical to SEQ ID NO: 24527
  chr6:106959524-106961178
  binary

SEQ ID NO: 33868 - DNA, 85 bp, Homo sapiens; identical to SEQ ID NO: 16026
  chr6:109053387-109053472
  hypo

SEQ ID NO: 33869 - DNA, 93 bp, Homo sapiens; identical to SEQ ID NO: 16027
  chr6:110842285-110842378
  hypo

SEQ ID NO: 33870 - DNA, 306 bp, Homo sapiens; identical to SEQ ID NO: 16028
  chr6:1523653-1523959
  hypo

SEQ ID NO: 33871 - DNA, 643 bp, Homo sapiens
  chr6:15513386-15514029
  hypo
cggtgtggggtgcgtgtgtcccctctgctggtgagcatggcaggccgtcactaaaggtgcgggccgtctcccgtgtctggcagggatacagagctgcggcagcgcaggcagctgttcgaggctggcctccactcctccgcacgctatggcagccacgatggcagcagcacggtggcggacgggaagaaaaagcctcgaaagtggctgcagttggagacgtcagagaggaggtgtcagatctgccagcacctgtgctacctgtccatggtgagcccgcctggccctgccggcgccctcgcatgtagtgcttggcctgagagctccggggttgcccccagaagagggagggcgctctctgcccaggagacctgctgtgctcccatctctggagccggctgtgggacctcggcggagcttctggccgccggaggtggctgcctcacccacagtgaccaggccacacagaggctgtccctctgttctgcccacgcgtggccctccctcggtcctgcagtgcgtccttcctccctggggagcaggtggcctccctctccgccctactttgtcactccagcccccacgcactctgctcttacccattctttctgaggcagtgaggggcgggtttccagtactgggcagc

SEQ ID NO: 33872 - DNA, 844 bp, Homo sapiens; identical to SEQ ID NO: 25773
  chr6:157557124-157557968
  hyper

SEQ ID NO: 33873 - DNA, 62 bp, Homo sapiens; identical to SEQ ID NO: 16031
  chr6:158057907-158057969
  hypo

SEQ ID NO: 33874 - DNA, 460 bp, Homo sapiens
  chr6:167836474-167836934
  hypo
cggctccctcatacactgcggcttcccccccaacacatgacggctcacccacatctggcggctccccctctacacggctcccgtctccaaccctccacacggcggctcctccacaaatacggcggctccccctcccacggcggctcccccacacacagcagttcccacacacacactgcggctcccccgcacatggtggcttccccccaccacactggggttcccccccagggcagctcccacacacacgacggctccccccatactgtggcttccctgcacacgacagctccccccccacacaccatggttccccccacacggtggctccccctcacacagcagctcccccgctacacggcggctcccccgacacggtggctccccacacgtaagcagcagctccccccacacacggccctccccacacacacacacccggcggctccccccaccacac

SEQ ID NO: 33875 - DNA, 644 bp, Homo sapiens; identical to SEQ ID NO: 16034
  chr6:168378621-168379265
  hypo

SEQ ID NO: 33876 - DNA, 765 bp, Homo sapiens; identical to SEQ ID NO: 25780
  chr6:170474845-170475610
  hypo

SEQ ID NO: 33877 - DNA, 301 bp, Homo sapiens
  chr6:1708438-1708739
  hypo
cgtgaaacaaaatgcggcatctgggtatatctcaaaggtagggaaggaaacaactcgaaggctgtaactttcccgacacttgagacgtcactcctttgcaaggcagcattcccagcaggcagcgaagcgtgtttggagaagctggagggcagatgaggagtggagggaaggcgggtagggggcttgcactcgaaaccacctctgaaggcgttgtcaatacagcaacagcaacgaggacaaacatgccacacggtgggtccaagtctgaactgcccggggctaagtcagtcaccgcacaatc

SEQ ID NO: 33878 - DNA, 551 bp, Homo sapiens; identical to SEQ ID NO: 16037
  chr6:2434643-2435194
  hypo

SEQ ID NO: 33879 - DNA, 786 bp, Homo sapiens
  chr6:27173381-27174167
  hyper
cgaggtccttgtcagttcttaaggacaggtgctttgcattatcctccagcactctcccacccactgcaacattcccctctcaccatgcaggtggtaagtaaattttggttgaaaatatttatccagcaagagatgaattgcccggctaatgtcactgccggacgcccgggtagtcgccacttggtttaaaggcggagctgttcttgcatttcaaagaaatccagattccgaaagtaagtaacaaccatgcccgtggcccggttcctttctcttacactcttccaaggaccccttttagacctagaggaaaccccgcagaagtgacagggagagggggaaagctcttttacagtggcgaaaccacgtggctgcgagagcttctcagggagagctcctgttttcaaagtctggcaaatttatcagtttgatttttcttaaacatttatatttttatggagtagaaaatctaccaaacgagtaaagaatgtttccgcctggtttcaaaccggggacctttcgcgtgtgaggcgaacgtgataaccactccactacggaaacaactgtgggaaagggttacccacatcccccccgcccccatccccaccccgccgcttaactaagagggctttgcctgaagggcctggactgccttatacgtctgtttagaaaatgatcgttgtggtgcagttctctccttttactgttttcgaaaagaaaagcaattcataaccaagcttccccagggctccaattcccgcacaaatttcaaacatggaaagctagaac

SEQ ID NO: 33880 - DNA, 258 bp, Homo sapiens; identical to SEQ ID NO: 32071
  chr6:27228187-27228445
  hyper

SEQ ID NO: 33881 - DNA, 104 bp, Homo sapiens; identical to SEQ ID NO: 16039
  chr6:27428748-27428852
  hypo

SEQ ID NO: 33882 - DNA, 119 bp, Homo sapiens
  chr6:3065529-3065648
  hypo
cggctttctgaggtgccgtgcggctgtggcgggggtggctgggggtgcgggttgtgttcattgtccaaggctctccagtgctttgcgtggcgttttggggagcacagatgaggtgtccc

SEQ ID NO: 33883 - DNA, 647 bp, Homo sapiens; identical to SEQ ID NO: 25791
  chr6:3285154-3285801
  hypo

SEQ ID NO: 33884 - DNA, 114 bp, Homo sapiens; identical to SEQ ID NO: 16041
  chr6:3654816-3654930
  hypo

SEQ ID NO: 33885 - DNA, 809 bp, Homo sapiens; identical to SEQ ID NO: 24568
  chr6:37023826-37024635
  hypo

SEQ ID NO: 33886 - DNA, 70 bp, Homo sapiens; identical to SEQ ID NO: 16043
  chr6:37450290-37450360
  hypo

SEQ ID NO: 33887 - DNA, 171 bp, Homo sapiens
  chr6:43639563-43639734
  hypo
cgggcatgcgcaccctgttccagcgggggccttttttgtagatgggcttgacggagccaggagcccagcgcgtcaggtacctgtggagggagaacaaagaggtgcctgtgagggctgggggcccaagctggacgtgggagagtggagcactacctcctcaggccaggccac

SEQ ID NO: 33888 - DNA, 116 bp, Homo sapiens; identical to SEQ ID NO: 16044
  chr6:44077041-44077157
  hypo

SEQ ID NO: 33889 - DNA, 1129 bp, Homo sapiens
  chr6:70991978-70993107
  hyper
cgaccaaacaggttacaatggggtctttgtaagtgaaacctcaaacctcagctgggcttatgcgcccccgccgggtcctccctcgcgcaggaggcgggaggcgctggagcctttgggaaactgctgaaatgctgatggaagccagggccgccaagttccgtcccggagccgccagcaccgctagctggactcggggttagtgcagctacggcgggctggaggagcgggagagggagcgtgcctggattcccgccttttccagcaaggcctgctgttgacagtgaccaggaggtggggcgggggagggggtgaggtgcgggaagtaagaagcaataacaggctaagaattaaacctcggtctccagtcacctattaccttcagcgccagagcctgcagtagggaggacccagattggggaggagccccccttcctagaccaaggggtcatctacggctctggacttcgataggactcgcggcaggtgctcgaggctggaggaagcgcgggtctgagagccctggggatgctccgcgcctttctcacagctccctcgaccgctgcgccccgacctgtcctcgtgtgcgcttgaaaaatgcaaacactccctgcccccaacttacctcgtcggtggtctggctgggctggagaagaaaagatggggagaaagtgagaaaagcacccctcaaactcgatcgcaacttacttgagccgcgcacaagcagagccccaacagcagcagccccagggccccgcggtcccgcgcagtccaggccatgcccgccgcccgccgctaatcccttggcccggctctgcagcctggttcccctctaggcttccagacccgccactagcataggtggcacttcgtccctgcagaaaaagcacccccgggagtagcggttgccaaagcgtccaggcccgggaggcgcgcgttccccctgtttatgaatggccccggagagggtcctgggattggaggagagctagggggcaggggaggacggatagaatgacaacagtcgcccttaaccccttccctgccgccgcacaggcgaggactgagcacgcagctctgcctccatcccatccaccccagtgcagcttctggctgtcctcggagacttccc

SEQ ID NO: 33890 - DNA, 302 bp, Homo sapiens
  chr6:7204219-7204521
  hypo
cggtgcatttcaccaggagcatcctgcgagccctgggagctgcctggctgacggcattcccacagcgagcctacagactgtgggtttacacttcatgccaggctgactttagatttttctaagggctggctttggaggtcagcacaggtgcttacgcattgtctaaccttcctccacaccctgggagagctggtgtgacctgccttccggacaagcatgactgaacccatacaacacctgaattactagaaggtgcctctgtactttacaggtggggccacaccaggaattgctcagttgcc

SEQ ID NO: 33891 - DNA, 183 bp, Homo sapiens
  chr6:7920003-7920186
  hypo
cgaatgaataagaaggcagtacagaatgagaacactggcttttacgaatgagaagggaagtcatcggagggttttcagaagaaacacgacaggatctggcttccaattatttctacagcatggctctgagagctgtagcgaggaatgcgaagggggcaaggatagaagggaggcgaccactcc

SEQ ID NO: 33892 - DNA, 414 bp, Homo sapiens
  chr7:100034752-100035166
  hypo
cgcacctggccataaatggggcagctttaaggtaacggtccagtgtgccctgacctcccactcagacctgcacagcatttccggtgttccgttgcctccaaactcggaccggagttggcctgtatgagtgcgggcgagggtcgccgaccccatcccggactcccttctgggacacagcaactcttgcagctttttgtgactacttttaccttcgagagttccctgaaatattaatttgtataaaaagtagatatctggcacgggtgcggtagcgcatacctgcaattccaactctgggaggccaaggcgggaagatgtcttgaaaccctgagctggagacaagcatgggcaacataccgagactccacaccaccattcccaatctctaccaaaagaatttaattttagccgggc

SEQ ID NO: 33893 - DNA, 236 bp, Homo sapiens; identical to SEQ ID NO: 16049
  chr7:100064586-100064822
  hypo

SEQ ID NO: 33894 - DNA, 333 bp, Homo sapiens; identical to SEQ ID NO: 16050
  chr7:1001822-1002155
  binary

SEQ ID NO: 33895 - DNA, 313 bp, Homo sapiens; identical to SEQ ID NO: 28149
  chr7:105279344-105279657
  hypo

SEQ ID NO: 33896 - DNA, 847 bp, Homo sapiens; identical to SEQ ID NO: 23347
  chr7:117119463-117120310
  hyper

SEQ ID NO: 33897 - DNA, 944 bp, Homo sapiens
  chr7:127991593-127992537
  hyper
cgcgtccccgcgagcgatggcgctccccaggggctccttgtctgggggcccagtgacccagcctcccggcagcagcggagccgcgtggcccggggacaagcggaagagcttggcccagcagcgcggcggcacgcgaggactgcagagcgccgggtagaggcccagcagcgccaacgggagcgcgacgcccacctcgcccaggcgcaggcctagctggaaggcccaccagggccagggcccttccaggccggattggccgccgtagcccagggcgtgcagcacctcatagccctgcagggctccgctcagcagcccgaaggtgcccgccaccggggccgtgcgcgccgcgcgccgccaggactcccgaggggcgaaggggctgcgcccctgcggcaggggtgtggcgcccttgaagcccgaccctcccaggggcgccccggcccgccgccgccgcccgccccagcaggagagcgccagcagcagcccggaaaggaaagcggcgagaaaggcgtgcagcccgcgcgaggcgagccgcaggggccgcagcgggcgatgcgcggcgctcccgagggcggcggcggccgccagccccagccccaggagcagcagcgcagccaggccggtggggcaccgcggcgggcgcggccgggccagcagcaggcaggccagccccaggccggcagccaagcagggcagcggaaggtcctgcagcagcagccaggcgagcgcgggcagtcgatccctgtgcccataggcgtcgtagaagagcgggaaggcccgcgtggtcccggccgacagcagcagcaggtccagcagcgccaggcagggggcgccgggcgggcaccgccagggcaagagggccagagccagcagcgccagcaaggcaaccaggccgaagagcgcgcctaccccgtacacgtgggcctcccaggccagcccccagc

SEQ ID NO: 33898 - DNA, 194 bp, Homo sapiens; identical to SEQ ID NO: 16053
  chr7:129470923-129471117
  hypo

SEQ ID NO: 33899 - DNA, 268 bp, Homo sapiens; identical to SEQ ID NO: 24587
  chr7:1315705-1315973
  hypo

SEQ ID NO: 33900 - DNA, 128 bp, Homo sapiens; identical to SEQ ID NO: 16055
  chr7:134862682-134862810
  hypo

SEQ ID NO: 33901 - DNA, 398 bp, Homo sapiens
  chr7:134880754-134881152
  hypo
cgactcccatgactctactgccatgactgtggccctcgtccaagcccccattctccgccatctcctgctggccacacctccacgtgtactgcctgaaaatctgagcttcccagggtttccttggccccaggcccaacccacctgcagtgcatgatggatgagtggtgttccccgtactcctcctgtcccagcacaataaagggctgctcggggcggactcctccaccctcagggcctgccgaggatgcccgagtcagtggctccactggctccgtgtggagctctgggcagggctcagcctctgggccactggcttctggtttcttctctgcacactgtcacaagcagggtggggacaagtcagccaggaaagggtcccccacaccagggtgtacacc

SEQ ID NO: 33902 - DNA, 312 bp, Homo sapiens
  chr7:138042035-138042347
  hypo
cggccaggtttttttttttaacaaaagaatcaaccgatgcctcacaagaaacaaacgcagcgcctgcttcagtaccagtccaaggagtggtcctgtttacctttttgcccctccctgcctccctgcctgtgtctgctttttttgcaaggaaaaaaaaaatcaagacaaatgaaggtgggagatccgccagctctgtacaaacgcaggcattagaggctggccagagcaggcgggagggcgagaaacaccctactttgcatctcattcatgatatgggttttttttttctttgagacggagtctcgctctgtc

SEQ ID NO: 33903 - DNA, 112 bp, Homo sapiens; identical to SEQ ID NO: 16059
  chr7:150006790-150006902
  hypo

SEQ ID NO: 33904 - DNA, 138 bp, Homo sapiens; identical to SEQ ID NO: 25848
  chr7:150753916-150754054
  hypo

SEQ ID NO: 33905 - DNA, 211 bp, Homo sapiens; identical to SEQ ID NO: 16060
  chr7:151411325-151411536
  hypo

SEQ ID NO: 33906 - DNA, 532 bp, Homo sapiens; identical to SEQ ID NO: 16061
  chr7:1533923-1534455
  hypo

SEQ ID NO: 33907 - DNA, 180 bp, Homo sapiens; identical to SEQ ID NO: 24600
  chr7:155580730-155580910
  binary

SEQ ID NO: 33908 - DNA, 777 bp, Homo sapiens; identical to SEQ ID NO: 23633
  chr7:155581242-155582019
  hypo

SEQ ID NO: 33909 - DNA, 695 bp, Homo sapiens
  chr7:156832501-156833196
  hypo
cgcgggaccatcttataaggacacagtcacatcgaattgggggcccatcctactcctgcacagctaatcactaaccacatcttgttccgcagtaaagtcccattccgagacactggggctaggacttccacctgtctcttggacacatttcaacccgcagcaccaccactgaggaaacgcaagtgtgctgaagacgcaaacctaacacgcaggaggcaggaaccgtctgaggcagcccccggcaaacgtcaggctgtgtggctcagacccggcacagcctccgcgatgggagctccggggggggctggctggggacaaggacaagcggacttgggagcgacggggtttgggcatctgggagacgggaactccttcccgggaggaagaccgtgagggaggcgtggaagtggatgtgagccggtgtgcactgggctgcagtgcgcgctgctgggccggtccgggagcccacactgttgggtgctggctgctagaagcccacagcaggggcccgaggcccaccccctagcctcagggcacagcttcccctgtccagccaaggctgccttacccaagccctggtcctgcctgttccgtgccttctcccgcaaggcttcttcaacagcacaccgcgaaaacgtgcaggcatcgcccccagcacaagggtcgctgctagggaagctgcccttcgacagggc

SEQ ID NO: 33910 - DNA, 141 bp, Homo sapiens; identical to SEQ ID NO: 14231
  chr7:157281193-157281334
  hypo

SEQ ID NO: 33911 - DNA, 196 bp, Homo sapiens
  chr7:157527554-157527750
  hypo
cgctcggccatgtgcctgcgttttccaatattgatgtcgacgtgggaggcaagttgctatggaggaaacgcgcacacacatctgagattattaaatagcagccgctaactgcctcgatgcaggagtcccatctccccaaacaaattctggctgtgatgccaactgcagcaggacggttagtggtgccgctggcacc

SEQ ID NO: 33912 - DNA, 657 bp, Homo sapiens
  chr7:158075395-158076052
  hypo
cggctgatccctcctcgtgctcccacatgcagcagccagacacagacggctcatccctcctcgtgctcccacacacagcagccggacagacagctgatccctcctcgtgctcccacacacacagcagccggacacagatggcttgtccctccctgtgctcccacacacagcagcgggacacagagggctcatccctcctcatgctcccacacagcagcgggatatagacggtggtccctcctcgtgctcccacgcagcagcaggacatagacggctcgtccctcctcatgctcccacacgcacagcagccggacacagatggctgatccctcctcgtgctcccacatgcaggggcctcagctctcaggaggaaaacactcttgagagaagagaactgaggaaaggtagcgctgatgtcaggggaagacgcattcgacaacacgcatgaaaaaaaacacttcttgttacgttcatgccatgcttttgtattcgccacaataagaaaaccaagcaagtacttcagtcaggcggcagccgtcacaggtaaacaaactcctatgtgggaaatgaaccgaggctgtgagcctcaggcagctccccagacccccaagaggagagggagcagtgaccgagcaggccccgtctgcagttcacacc

SEQ ID NO: 33913 - DNA, 479 bp, Homo sapiens; identical to SEQ ID NO: 12966
  chr7:158270795-158271274
  hypo

SEQ ID NO: 33914 - DNA, 911 bp, Homo sapiens; identical to SEQ ID NO: 30571
  chr7:158282124-158283035
  hypo

SEQ ID NO: 33915 - DNA, 721 bp, Homo sapiens; identical to SEQ ID NO: 24610
  chr7:158349387-158350108
  hypo

SEQ ID NO: 33916 - DNA, 306 bp, Homo sapiens; identical to SEQ ID NO: 32171
  chr7:1733131-1733437
  hypo

SEQ ID NO: 33917 - DNA, 364 bp, Homo sapiens
  chr7:1734701-1735065
  hypo
cgctgcagacggctccggatgcacgtggctgtgccaggcagcagacgtggccgacaggcacatggtgggacctgctctgtggctccagagctcatgcgcagcccgctggggctgtgagggttctgtccatccaccaggaaggccaccaggaccctgctcctgcctgagaaccccaggaagtagtagcgtgccaggtgcgtggccggcctcccagcccttcccagcaccagctgcgtcctcctcctccagggctgcagctcagggctcaggtgtccgcgtcgagggcactccctaaagggcaggagcaggaccattggcacaagcctgggcgagtctcgctgggaggcaggagcagactcagccc

SEQ ID NO: 33918 - DNA, 324 bp, Homo sapiens; identical to SEQ ID NO: 16073
  chr7:2019121-2019445
  hypo

SEQ ID NO: 33919 - DNA, 522 bp, Homo sapiens
  chr7:2024704-2025226
  hypo
cggttcattccatgtgtccactggacaggacctggggtactcagatcaaaacactttctgggtgtgtctgggagggtttgtggatgagatcagcatttgaatcggggactcagcagacggccccgggcagcatgggtaggcctcctccaaccccttgaggccggaatgaaatgaaaactggaggaggcgaccgttcctcccttgcctgcctggtggcctgagcggggcagctcccgttttccgcccaggactggggctttcaccacaggctccgctggttctcaggcctgcagagcggactgggcacagcacaggctcttccaggtctgctgtgcacagatgcagaccacgggatcctggctccatggccaagagcgagggcctcacagtcactctctcgggatagaccagtctaccgcacctggtgctctagggagcctaacatgcagctcgatctgctctccccacctgatactacctttagatggtgtgtctgtgtcttcggctctcaacagcgaagcc

SEQ ID NO: 33920 - DNA, 147 bp, Homo sapiens; identical to SEQ ID NO: 16076
  chr7:2068947-2069094
  hypo

SEQ ID NO: 33921 - DNA, 109 bp, Homo sapiens; identical to SEQ ID NO: 16077
  chr7:2069789-2069898
  hypo

SEQ ID NO: 33922 - DNA, 142 bp, Homo sapiens; identical to SEQ ID NO: 16078
  chr7:2070150-2070292
  hypo

SEQ ID NO: 33923 - DNA, 253 bp, Homo sapiens; identical to SEQ ID NO: 16079
  chr7:2071776-2072029
  hypo

SEQ ID NO: 33924 - DNA, 309 bp, Homo sapiens; identical to SEQ ID NO: 16080
  chr7:2102525-2102834
  hypo

SEQ ID NO: 33925 - DNA, 591 bp, Homo sapiens; identical to SEQ ID NO: 23637
  chr7:2208344-2208935
  hypo

SEQ ID NO: 33926 - DNA, 199 bp, Homo sapiens; identical to SEQ ID NO: 16083
  chr7:2222256-2222455
  hypo

SEQ ID NO: 33927 - DNA, 619 bp, Homo sapiens
  chr7:2264982-2265601
  hypo
cgtgcacagcccccttgcttcctggggctgtctgggccgaccctcgccccgcctgaacccacctcgtagttcctggcactggtgctggctgctctctccagctccactcgagccctcttgtgactcagctccatctgcattttctcccgctccacctggatgaggtgggacttcgaacggatctgctctgctctttcctccagctgagcaggtcgcacccaaagaaaaacagaatcctcagtgacggcatcaaaccaggtgagtgactcagtgcagcagacacactccctgaggacccattcccgcaggtcccgtgctaagtcttgatgtggcccagccactgggctccaggctggggaacaggggaggggcaggaaacgggaaggtgaaaaagcctgggaagaggaagacgtcttttgagatgacattaagcatattagtgaaggcaacggcctcgaatgccacccatttatttaccagccaacggctccgtgggtcggaagtccagacgtaggtggctgcattctctgaccagggtctcccagactaaaaatcaatgcagtcggccaggacatgttctcacgtggagctcagagatggagaatgaggtctccttccc

SEQ ID NO: 33928 - DNA, 361 bp, Homo sapiens; identical to SEQ ID NO: 16085
  chr7:2751985-2752346
  hypo

SEQ ID NO: 33929 - DNA, 62 bp, Homo sapiens; identical to SEQ ID NO: 16086
  chr7:29390389-29390451
  hypo

SEQ ID NO: 33930 - DNA, 505 bp, Homo sapiens
  chr7:345250-345755
  hypo
cgctgtttgtacagagaaaggggtgcacagagccgtggacctgcagctcctggagcttcccggagctggtcctccagtagaggtgctggggatggggggacgcagccacggccttcatgcaccaacctggggtctccacgagcaaactctgtgttcaaggaggcactcggcctggggacgcggtgggaagagctatcggaggagcccctcggagctgcctcagcacagctgatgaaagcaatcagcgcccgcctgagctggatgtaaaggttaatacataaatcaaagggaaatgtcaggtgccttttaacactgattgagatgtaattgggcagggaccgtgcgccaggcacccgcgctcacggaaccacggcaggacgtggaagaaattatgtggcttgtttgtgtgtctgcaatcgcgtcaagaccgatggtccctcggctctggacagacgcccccccagccagctgaggatgcgaatattcatggcctggtgccgggtcc

SEQ ID NO: 33931 - DNA, 254 bp, Homo sapiens; identical to SEQ ID NO: 16089
  chr7:36124398-36124652
  hypo

SEQ ID NO: 33932 - DNA, 335 bp, Homo sapiens; identical to SEQ ID NO: 16090
  chr7:36352569-36352904
  hypo

SEQ ID NO: 33933 - DNA, 259 bp, Homo sapiens; identical to SEQ ID NO: 14278
  chr7:42237185-42237444
  hypo

SEQ ID NO: 33934 - DNA, 66 bp, Homo sapiens
  chr7:44740657-44740723
  hypo
cgagggagtgccctgctgccctgggataccgcgggggtgggagtatggggtggaggcttgcagctc

SEQ ID NO: 33935 - DNA, 265 bp, Homo sapiens; identical to SEQ ID NO: 25887
  chr7:44835105-44835370
  hypo

SEQ ID NO: 33936 - DNA, 777 bp, Homo sapiens
  chr7:4856619-4857396
  hypo
cgtttcaaggcgagggaaagggagctgggatggttctagggcttctgtgcgacctgaggaggagcgggtgtggggggtgcagctgggcctgtgcagaacctgcagccactgctccctgatgaagtggagcttgtcacggtcccctccctcagccccccagaaggctccttaggagagccacaggcacaagcttgagccccacttgatcccaggagctgcctgagtgcagaagcagagcccgtccgtgcaccttggagacatagtagacgcactgctggaaggcgtacagcaccacctcctccagcaccgccatggcctcctcgctggccgtcagcgtgcaggagaacagcgattccttcgagcctgccgggagacagccacgccaatggtcacaacgggcacagcgctcaggaacgcagcaactcagccagccgccagctctttccctggcgcgggcaccacccaacgcgcccatctggggtccagatgcgataaactggccgagggactctgggccctggctgggacgagcgcagcaaacctgccgccactcttacctggggaggggaatgccgggaggggcaggaggggtccagacacccaacatctcaatgcccagcccagcccagcccaagcgctcattcactcccacgttctggatacgttttctgttacaaccaactgcacccaacatagcaggtcctaactgcctccccacaggtcacctctcactcgcgacacgggtcacaggactctggcagcagcccctgagtggcc

SEQ ID NO: 33937 - DNA, 452 bp, Homo sapiens
  chr7:4857860-4858312
  hypo
cggcgcctggtgagccaggccaacactcaccccagcgcgggcctcccaggagcacaggcccccagctgcccctctgccgggcagactgcaccggaggccggcccactcatggccaggacaatggtgcgccaagcccttggacaagcccctgtcactttcgctctgccgctcctggtgctcctccttcaggggcttggggctgcctggcccccacccaccaagcccgctccccaagaacctgtgaagccccccagtgcctgccccacagggtcacatctgggaaccaggcagggcagctggagggaccccggggtccggggcagtaaggggctctcgggctctgccaacctcaacactgtgcccagaagcctccaggcctgtggagacacacaaggtggcccgacggcgcccacagcgagtgccggcaaaggatattcacagccacggcaggc

SEQ ID NO: 33938 - DNA, 237 bp, Homo sapiens; identical to SEQ ID NO: 16096
  chr7:5230941-5231178
  hypo

SEQ ID NO: 33939 - DNA, 183 bp, Homo sapiens; identical to SEQ ID NO: 16097
  chr7:6222712-6222895
  hypo

SEQ ID NO: 33940 - DNA, 265 bp, Homo sapiens
  chr7:65877884-65878149
  hypo
cgtctcgggggggaaaaaaatacaccaagcgtgcaccacgcctggctaatttttgaaacttttctacagacggggttgcgtcacgttgcccagggcagtctcgaactccttagaccaagccatcctccccctcggcctcccaaagtgctgggattatagagtccagccagcctcatgttttctttaagcagtccctccctgttgcacagttggatagtttatttttttatttttttagacatggtttacctcagtctcgcaggac

SEQ ID NO: 33941 - DNA, 445 bp, Homo sapiens; identical to SEQ ID NO: 25901
  chr7:7605666-7606111
  binary

SEQ ID NO: 33942 - DNA, 594 bp, Homo sapiens; identical to SEQ ID NO: 16100
  chr7:943355-943949
  hypo

SEQ ID NO: 33943 - DNA, 513 bp, Homo sapiens
  chr7:95025593-95026106
  hyper
cgccaggaacatctccccgactaaggacaggccgacccccagcaggaccagcgccacgagcttccccatggtctcggggtgcccagcggcgactgcgcggcgccgagagctctcgggggcgcggcgggcggttcctgcctcgcgtacggattggggcccgctcggccccgcccgcacacgcctcctacttacctgagcggcccgggtgccgcagcagggcgctgacgagtcccgccgagccccgccgcccgggttcaaggccgccttcacgcccacgattccttgttttttgggcagaggtcaaggctcaacggagagggagcccgggaccgagttgtggtgggagtttgctcctaacacccgcgaaatcctacctcaattcctcagatggcctgagggagaaaccggagggcccgggaatggcggggagctccagttcagagccggaactccggacttctgcaaggccagacgtgaggcgacactgaattgctcccgagacgcgggaagggc

SEQ ID NO: 33944 - DNA, 88 bp, Homo sapiens; identical to SEQ ID NO: 32236
  chr7:97797696-97797784
  hypo

SEQ ID NO: 33945 - DNA, 131 bp, Homo sapiens
  chr8:11708345-11708476
  hypo
cgcttccccgccagccagcagggccttacccagcaggagccacaggagccctggtctctgatctctttgatggtgggacactgtggccattgttcccgtgcatcgaagcttgcaggcagcttcaggtcctc

SEQ ID NO: 33946 - DNA, 120 bp, Homo sapiens; identical to SEQ ID NO: 16103
  chr8:117631330-117631450
  hypo

SEQ ID NO: 33947 - DNA, 149 bp, Homo sapiens; identical to SEQ ID NO: 16104
  chr8:123865814-123865963
  hypo

SEQ ID NO: 33948 - DNA, 617 bp, Homo sapiens; identical to SEQ ID NO: 25915
  chr8:128888848-128889465
  hypo

SEQ ID NO: 33949 - DNA, 440 bp, Homo sapiens; identical to SEQ ID NO: 16107
  chr8:128893135-128893575
  hypo

SEQ ID NO: 33950 - DNA, 208 bp, Homo sapiens
  chr8:129069818-129070026
  hypo
cgtgggaggtacagaatgaggtgtccgtccctccaaggcacggtgacctagaatcccactgctcactgcctgtctctgttcagcctttcagttcataaacatgctttcctccctgcattttgacatccatcatcgtttaaattccaggtcgtcatccttgtagaacgaggttcggatctcggcattaaatctcccccacggtgtgtgc

SEQ ID NO: 33951 - DNA, 130 bp, Homo sapiens; identical to SEQ ID NO: 16108
  chr8:12959279-12959409
  hypo

SEQ ID NO: 33952 - DNA, 641 bp, Homo sapiens; identical to SEQ ID NO: 16109
  chr8:140937017-140937658
  hypo

SEQ ID NO: 33953 - DNA, 447 bp, Homo sapiens; identical to SEQ ID NO: 32252
  chr8:140963096-140963543
  hypo

SEQ ID NO: 33954 - DNA, 165 bp, Homo sapiens
  chr8:141106975-141107140
  hypo
cgtggactggacgtgagacattcctatgctgagaagtcaagaagaatgtgtcctcgcagctcctcctgcagcacctcacagtgcacaaccggctgggccagcccatccagcatagagatgtgaaaacctgtccaggtcgctggtgtatagccagaacaatggcac

SEQ ID NO: 33955 - DNA, 195 bp, Homo sapiens
  chr8:141249566-141249761
  hypo
cgctaggaacaaaaaacaagtaagactccggccctgcccgcgagatgagggtggtggagtgagaaggaccaaagtgcaggtgtgcttccctttgctcgggactcactggcacggaggccgcatccacctcctcacggccgtggaggggatgcgtgggaggcgcctggacacctacaccaacacaccgtgcactcc

SEQ ID NO: 33956 - DNA, 261 bp, Homo sapiens; identical to SEQ ID NO: 16113
  chr8:141458771-141459032
  hypo

SEQ ID NO: 33957 - DNA, 401 bp, Homo sapiens
  chr8:141596808-141597209
  hypo
cgactgagcttctctctacgccacaccggagtagaacaaagcacttgccaacacgtggccctgttctcaggtggctccaaccacccagtgagacggctcccaggaaacgtctaggacagagcccgggaatctggccctgtggccaatctcgatttcagggtcgggcacgctcctctcggggaggagagtcactgtccttcggtgactcccagcttacaaggtgctcatgcagttacttaaccgagcctcacaaccataccacaaaggggcacaccgctggctgcaagaaggttttgggctggaacacgagctacttgcaggtgaagcaaagctgctgggccggctccaaaccaggcccctccaccgggcccccaagcagagtccaggcacagacgcagctc

SEQ ID NO: 33958 - DNA, 307 bp, Homo sapiens; identical to SEQ ID NO: 32259
  chr8:143558404-143558711
  hypo

SEQ ID NO: 33959 - DNA, 420 bp, Homo sapiens; identical to SEQ ID NO: 32261
  chr8:144292304-144292724
  hypo

SEQ ID NO: 33960 - DNA, 520 bp, Homo sapiens
  chr8:144293575-144294095
  hypo
cgtgggggaggcgggccgagggcgagagggcgcagggaggcgggtgggggtggggccacgcgcggaggggcagggaagggcggggcggggcggggcgggacggggctgggggggacaggcatcaggtatgaagagtttggggctggcggggcgtgtccggctgtggcgtgggcaccactatgggagaccctggcttggcaagtgaccttgcagccttggctggggaagggctagatgctgggtgggtgccggtagagtggaaagaatgacaggttcaggtgaattaaggaaggatggttgactcggtggctgggacattagagacaggtattcccagcctcaggcgctgtcctaagcccagcaggtactgacccttgatggtcacctcaccctatgagggagctgaggcctggggaacccaaggggctagtccagaacccacagccgggggaaggaggaaccgggtcttaaacccaggtagctcactccagaaccaactcaacctctgttacaggtggcc

SEQ ID NO: 33961 - DNA, 486 bp, Homo sapiens; identical to SEQ ID NO: 30648
  chr8:144328118-144328604
  hyper

SEQ ID NO: 33962 - DNA, 943 bp, Homo sapiens; identical to SEQ ID NO: 24670
  chr8:144343416-144344359
  hypo

SEQ ID NO: 33963 - DNA, 551 bp, Homo sapiens
  chr8:144380308-144380859
  hypo
cggttgcaggattcgcccatcctggtctgggtgtggcttgtgaccacctcctgcagttctctgcccaggtaaggactaattgggaagaattctgggtcctgagctggctgccgcttccaagacagtcgctttgagggctcttggcaccgattttgttaaaatgcatgagcttagggttgtgcagcctgtaggggcaggggtggtctcagaatggatttggtggccccaccgttaattaagctcctgacccctgggccggtggtgaggtgggaagatgagcctgtgtctcccatgctgagccaagatcctcaggtaccagtagcggtcaaagcacctgctccctgaaggaagcttacctggcttagcctcattcctgctcgtaagtcaggcattcagcttgcaaagatccccaagcacacaaggagagtcagctgactgagggccaacagaaacagcaggcagccgctgtcagccacaaagaaacgcagatcctgaaactgtcatcatacaggtgagaggatagttatgtgtgaggtgttcaaagaagtcgc

SEQ ID NO: 33964 - DNA, 206 bp, Homo sapiens
  chr8:144383330-144383536
  hypo
cgagaaacatgaatctccagagtaaaagcacctaccgatatctcgcacaaagatggaaggaacgacctacatccaggcatgacgtgaaacatcagacagtccaggacatagagacgatctgaaagcgcagatcacacacacaggctgaggaataaatcccttcccaagggcagactggaagttagaaaatgacagaacaatgcttc

SEQ ID NO: 33965 - DNA, 83 bp, Homo sapiens
  chr8:144617124-144617207
  hypo
cgcggcagcccccacacggctcttgggtctgcccaggcccagctccttccagagccgtctgaagcctccctagatgacggtac

SEQ ID NO: 33966 - DNA, 97 bp, Homo sapiens
  chr8:145223917-145224014
  hypo
cgaaccctaggacagacgtggcccggctggctctcacctcccaggatttcggcctcgcctgatcttggttcagtggttctctgtcaccgctgacagc

SEQ ID NO: 33967 - DNA, 167 bp, Homo sapiens; identical to SEQ ID NO: 16124
  chr8:26193961-26194128
  hypo

SEQ ID NO: 33968 - DNA, 304 bp, Homo sapiens; identical to SEQ ID NO: 32268
  chr8:28938419-28938723
  hypo

SEQ ID NO: 33969 - DNA, 118 bp, Homo sapiens
  chr8:48044665-48044783
  hypo
cgacgaacgccaagccaagccgttacatacgcatgcgcagaacaccaagccaagctgctgcggcgtgcgcgtgcggcgtacctcagatggcaagttactgcacgtggcagtgtccgac

SEQ ID NO: 33970 - DNA, 360 bp, Homo sapiens; identical to SEQ ID NO: 25936
  chr8:49334914-49335274
  hypo

SEQ ID NO: 33971 - DNA, 195 bp, Homo sapiens
  chr8:49496368-49496563
  hypo
cgtggaaagcggtgccatcaaccgacactcgtcctcccgcccttccctgcccagtcctcgcctgactggcctcttccctacatgctgttctccacgttgccttcccgtgagctttcctttttgcctaaacacatttttcagctccatgtttctgacagactggttactaaaatccaacccaacaacgtgtaggac

SEQ ID NO: 33972 - DNA, 290 bp, Homo sapiens
  chr8:59059039-59059329
  hypo
cggtgtgcccggctgccaagcgcgcactgggcagccccacgctcaaagtgttcggcaaccacgccaagaccgagagcggcgtgcagagggagaacctgaagctggagatcctgaagaacatcatcaatagctccgagggctctagctcgggctcggggcacaagcacagctcccgcaactggccgccccaccggtcggaagccactgacctgcaccgtcactccttcgcggagtccctgaaggtctaccccacgcagggccgcaggagcccgcaggagggcggctcccac

SEQ ID NO: 33973 - DNA, 110 bp, Homo sapiens; identical to SEQ ID NO: 16130
  chr8:70246389-70246499
  hypo

SEQ ID NO: 33974 - DNA, 1395 bp, Homo sapiens; identical to SEQ ID NO: 32293
  chr8:8748226-8749621
  hypo

SEQ ID NO: 33975 - DNA, 84 bp, Homo sapiens; identical to SEQ ID NO: 24704
  chr8:90768494-90768578
  hypo

SEQ ID NO: 33976 - DNA, 816 bp, Homo sapiens; identical to SEQ ID NO: 29488
  chr8:99985860-99986676
  hyper

SEQ ID NO: 33977 - DNA, 139 bp, Homo sapiens
  chr9:100267700-100267839
  hypo
cgtttctagcgatgattctggagggtgatgagttgtgaccactgcgttgttgctctccatgcccaaaggaatgaaggaaagcagaactgcctctgggcatccttcagcctccttcatagactcatcgctgctgcccatc

SEQ ID NO: 33978 - DNA, 321 bp, Homo sapiens; identical to SEQ ID NO: 16134
  chr9:110390680-110391001
  hypo

SEQ ID NO: 33979 - DNA, 153 bp, Homo sapiens; identical to SEQ ID NO: 16135
  chr9:114860736-114860889
  hypo

SEQ ID NO: 33980 - DNA, 646 bp, Homo sapiens
  chr9:116800647-116801293
  hypo
cggagtggagccgtgggctgctttgttctggttcagcgcagccagagaatgcctggccggccatccagcgcaaagccaggctgaatcccagccacactgaatcgggattaaaggcttggctccatagagagaaattaagcatcatgagctgcgcagttcacagcgccgacgataaggaggatcagccttgaataacaccaatctcattatggagctgctgaatggcacagggtaattcccgctaataaacttcctttctgtgctgtaggaaaacctggcgtgccttggtgacgttggagaagcatgctttggcagtaataataccaaagatagctacaattttgtgagtgctttctatgcgtcacttgtggcactgagagctttacgcaggttatttcatcagatcttcctgattaggtagttgacgttttcatccccattatgcagatgatgaaaccgaggctcagagaacataatcactggcccaaagttgcacagctcctaaaaaaagtatccaatagcatttgagcttttacgtggcgccaggccttgttctaagacttttacatatattcacttatttaattctcggaacaaccctcagagttaagtgcccataacagttccacttcatagctaacgaaac

SEQ ID NO: 33981 - DNA, 213 bp, Homo sapiens; identical to SEQ ID NO: 16138
  chr9:123146246-123146459
  hypo

SEQ ID NO: 33982 - DNA, 99 bp, Homo sapiens; identical to SEQ ID NO: 16139
  chr9:124816011-124816110
  hypo

SEQ ID NO: 33983 - DNA, 256 bp, Homo sapiens
  chr9:126158025-126158281
  hypo
cgcacgtcctaatcacacctggcacacagtaggtgctctttacctgtttgtggttgttaccggacgcccctaccccgcctcccaggtgcttgactgcaagccgcactctgccttcagattcctttgttcattcacccaggaaacatctcagagcagaggtctgggctcggatgtggtccaggagttggagagtcaaagctgaggaagagctcacagactactggtgtgcctggtgtgtgtgtgtgtgtgtgcacgc

SEQ ID NO: 33984 - DNA, 203 bp, Homo sapiens; identical to SEQ ID NO: 16141
  chr9:126180763-126180966
  hypo

SEQ ID NO: 33985 - DNA, 196 bp, Homo sapiens; identical to SEQ ID NO: 16142
  chr9:130496563-130496759
  hypo

SEQ ID NO: 33986 - DNA, 498 bp, Homo sapiens
  chr9:132402759-132403257
  hypo
cgcccacccagcgtcgggccgcgtttaagccacctgcccacccccggggctctcgctgaccttcaaagttgagattggccccatgccgcaagagaacgtcggccgcccgcgtcagccccagctcagccatcttgagcagggcgttgctcacgccttcctggtaaaagggagagtgggctttcctctccagcagctcagtgagaacaaggattcggctctcctcgctggcgacataactgggcctgggacaggagagaggctgagggtaggcacagctgtgggaccgggtgaccgcgcagcctgtgggttggtgggctttagtcctgctatcatcatcagcaagcagggccctggctctgtgggtcacaggggcttgggggaagctctgaagtagagagagggccacgctgcatctcttaatacgggagcagactgggatttgcggagaatgggctgggtctgtctgcgctctcctcccgcgttgcccagagtccggtc

SEQ ID NO: 33987 - DNA, 277 bp, Homo sapiens; identical to SEQ ID NO: 16143
  chr9:132633604-132633881
  hypo

SEQ ID NO: 33988 - DNA, 478 bp, Homo sapiens
  chr9:132881052-132881530
  hypo
cgatgattctgttgctcacccccattaagaaccattgctataaaggaattctcctccacatgaggaggtcgatgcctggagacagaggcagcaggccaagggcaggcacacccagctgagatggggcagggctggaaggcaggcctcctggatcctgcctggggccttgtctctctccccacactcattctttcaccgtatttgctgctcctcatggtgaggtcagaaatagcccgcccagccttggtgagccttcgctcccacaggagcccaacacccagcccgccacagtccggtgagcagcaggctgtcggtgttcctaagtcagggaaatctttggaagaacaatggagggagtcgtgggaccccaggctgcgacctgctgcctggctgctcactgcatcatgctggtttcaccctgctcagagcgggctccacccctgctcggcatcctgactcatcctatgcatatggcagc

SEQ ID NO: 33989 - DNA, 176 bp, Homo sapiens
  chr9:134131738-134131914
  hyper
cgactccacaccgagaagccaaaccacgacagtgaactgcaccacccaggagccatctgcgtggagctcggccagcaatgcctgttatgcaatttcctgctttggtgtctcagccccaggaggcaggatgtgagcgccgttggtttgctgcaacgtggagaacccacagaagaccc

SEQ ID NO: 33990 - DNA, 640 bp, Homo sapiens
  chr9:138562692-138563332
  hypo
cgcctgcagtgtggactcggccacccacctgcctctgccagccatgcccggcttgtgtggcccctcaccatagcccgcccagggtctctcgggcatcgaaaggacaagcttaagggtcgtgcaaatgcaccgcgtgtacaggacggctgtgtgcacacgtgcaccggggcgaggggctgtcgatgccacttcccttcgcagtgttctcttagttaccgacagcgtggcagcctgcagttaccagggaagccggagctaggagcagaggcaggcgaagccccaggaggggaggcatgtccactccccacagcccctcccataccagaggcccttgacaatgcgcctgcaggtcaggcgaccagctaggtgtggggtgagcccccgcctctgtttccccaaatgactggtatgttcctgggcacacatccgatggctgccagcctgcacgtcacgcccagctgccggagctactgcgggattccagaacaaggaacgtgacatgctcggcctggagcggaacaaggcacctggctcccgcaccctcgacggggccctgcccagtggacacgaccacgtggaagcctcttcctcctggcactgcagagcggatggcggatgcagatcccactttggggatggc

SEQ ID NO: 33991 - DNA, 733 bp, Homo sapiens; identical to SEQ ID NO: 32322
  chr9:138661280-138662013
  hypo

SEQ ID NO: 33992 - DNA, 318 bp, Homo sapiens; identical to SEQ ID NO: 29513
  chr9:139818341-139818659
  hypo

SEQ ID NO: 33993 - DNA, 216 bp, Homo sapiens; identical to SEQ ID NO: 16150
  chr9:139901954-139902170
  hypo

SEQ ID NO: 33994 - DNA, 369 bp, Homo sapiens
  chr9:140030217-140030586
  hypo
cgcgcccggctgggaggtgttctttctagacctcacctgggagtcacgcaccattacctctaccacgttccatttgtaagtgcaggccatgtatgcctggagggaaatcaatcttctgccgaacagggtggtgttcaaagcaccaccggctccaccacactctgccttttattctgcattctgtttcttgagaccacgcgccgctacgtggaatggtctcaggagctcatgtgtttgtgctccatgaagtcagaaagtccagcctttgcactgccacatacccacccttagaacagcgtctggtacacggtaggtgctcagtgaatgtgcctagtggagtaaacgtgcggtgcggtgctgcctgcggtc

SEQ ID NO: 33995 - DNA, 613 bp, Homo sapiens; identical to SEQ ID NO: 16152
  chr9:140110575-140111188
  hypo

SEQ ID NO: 33996 - DNA, 724 bp, Homo sapiens
  chr9:140265361-140266085
  hypo
cgctgccctcgacatgaaatatcgcagcacattgagtcgtgagtcccagctaatccgagcggacaggcctgaatgcggcctctttcggccgggcgcggcggtgagcagtggagcatgcatcgcctgccgggcggccccgctcggggacaatggctttcttcgcagaaggggcctgtgcgggacaagaccccctttgtgtggggattcctgcctcggagcgcgagggaggcgcattcagccggccccagacagtctttgaaaggctctgtaacagaagacggcccgaaacactagcctgccttctgcctccctgcactctccgcaggcacggccgccattcagcgtcgcgccacatgagggggaccctccatcctgcattgtcctgtgccgggacatggtggcttctcagcgccatgcacccgccgcgagacgacggccccgggcgtggcaggtgacagcgccaggggtggggcccgcgcggcccacacaggggacactcctgtgagggcccggccagggcagcccccgatgcccgtgcccaggttccaatgcacctcctcacggtgaggggtcttgctgggaagaggaacccagggtgccatcgggacggcgtctcagcagcagggtcccacgtgggcaggcagcggggtggtggccttcacgctcggccctgaagtaagggggccctaatggggcggggagtggaccagtgcccctgagtgcc

SEQ ID NO: 33997 - DNA, 900 bp, Homo sapiens; identical to SEQ ID NO: 32333
  chr9:140400692-140401592
  hypo

SEQ ID NO: 33998 - DNA, 232 bp, Homo sapiens; identical to SEQ ID NO: 16157
  chr9:140645189-140645421
  hypo

SEQ ID NO: 33999 - DNA, 600 bp, Homo sapiens
  chr9:140703858-140704458
  binary
cggcggccctgcgccctcggagggaggcggggcagagctcaaatggaagcagagcctgcggggtggagaccgcacccctgcaggggtctgccttgggccccgagcctcctcagccgccgcagcaaagcggtcagtcaggcggggcttggtttatggcatctgggaagatcgctgaccattcccgaggggaaggaggctgcagccggcgctcccagacaccagcagagcagaacacacttcaggaacgtgaaacgctcacgtgcttttaatccagcaatcctgcctctgaggatgcatccttgagaaataatgtagaaaatgaaaagcactaaaatatttgctggcattgtattccagaaatataccaacagacataaaccaagtgttcagtaaaggaaaggtccggaagctgagtgactgtgggggaagggtccggaggcggttccgatgccgccctgtgtggaccgtcggtgatgggtccggaggcggttccgatgccgccctgtgtggaccgtcggtgatgggtccggaggtggttccgatgccgccctgtgtggaccgtcggtgatgggtccggaggcggttccgatgctgcccctc

SEQ ID NO: 34000 - DNA, 310 bp, Homo sapiens; identical to SEQ ID NO: 25992
  chr9:35711931-35712241
  hypo

SEQ ID NO: 34001 - DNA, 41 bp, Homo sapiens; identical to SEQ ID NO: 16161
  chr9:35712966-35713007
  hypo

SEQ ID NO: 34002 - DNA, 809 bp, Homo sapiens
  chr9:36258195-36259004
  binary
cggggcgcggtggggtggaaagcggccggggaggggaggcctggggcaggaggccgggggaggcggccctgggggtgggcaggatgctctcccggagtcccacgccgccgcgcggctctcaccagacgccgtcagaggctccctcccacgccgccaccgcgctcctcgggcgagggacgaaccaagcgccacgaagcaggcagagcgcgagcctgcccctcggtttccgcgctcgggcgcgcgggtagacgactcgtcgctcgaccttgtccccactcctcgctcgcccagccacgcccacccggagtgccgaatccgcgatcgcgccctgacgccacccgagagagctcgcgtgattggctgctcccgtccccgtcccccaccttcccggcggtattttgaggcgcaggcagggtgctgaccagcggaccatcttccatggcctctgccgcgctggagctgctgcggggctgtcctgccagcttgtgctcccgccccgaagcgtcctcctccactggcgacacacgcactgaagcccgagtcttcccgctgggtagttgttttggtcttgcacccaaggagggatttcttgcgcctcttgttccctcagttatttcataaaccaggaccgcaactatactgtcgtgtagcgcggccaccccacagcggtccctgacgttaacccttgccgtgactgctagaagacactggtggagtgtgaattgatgaccaaggcatggcagagcctctctcatctttataatcagttcagcggcggcctccactacagggaactcccagccagtccc

SEQ ID NO: 34003 - DNA, 201 bp, Homo sapiens; identical to SEQ ID NO: 16162
  chr9:6868324-6868525
  hypo

SEQ ID NO: 34004 - DNA, 512 bp, Homo sapiens; identical to SEQ ID NO: 23404
  chr9:79626891-79627403
  hyper

SEQ ID NO: 34005 - DNA, 685 bp, Homo sapiens
  chr9:79628707-79629392
  hyper
cggagtctttgttattagtcgtcggagggagcgcaagaaagttatttaatttttaatcgttggttatttatttggtggttatggttgtcagtggccgctacctaaacagacacggcccgtaggaaagcttctggatgttggccaagaggtgtgaggcgcgggtggactgtaaaggggaaattgctctgctagggtgacacaaacgcttcccatctccacgctgattgcgcgccccgggccacaggcagtgtacacagccgcggtgttcgagacgaatctcgcctcgaagagtggagatttaaaagtcaggtttctgactctgggcagcacgtagggtctttgcggagtgagtttcggtcagacgagagcctggggtcaatgtcgaggtggagcgacgctggcacggcaaccctgagcctgcgcggcccggcgctatcccctggctctccgctgctggctggacccccttgtatcctccttccctcaaactcgcacacctacggctcagacaacccagccagtctcgcccgcgagcggaggtgctagaaactttgggggacgaaagctgggctgtctttcttggccggtggcactgcgagagaaagccgtgtgcaccccgcggctgaccactccaacgccagatacatccacccgctcatgtaccgccgtcgggcttcattttgtc

SEQ ID NO: 34006 - DNA, 2743 bp, Homo sapiens
  chr9:79629667-79632410
  binary
cgcacagccagtaggtggcgaagctggagctcgagtatcgtctcctaaattcaaggccagtgctttttttctccaagaaataaatgcccctgacctcaggcttttcccttctgccctccaccctcgggcattccgaaaagtcaaatcgagcttatgcactcaaatccaagtagggcggagccaaacctgtgtcctgggcgcctgccgggcaaggcgcggggactggacgggtcggaaacggggcagggatgcacttcgcagagatgtcaggtcgggttggtgacgctggaggcgacggattcctaaaacgttataaggggttgacgggtggcgctgctgccctgcagcgtccccagctgcgcagctcctgagctccccgctccgagcgcccagacccccagcgccactccaccgtcgagatcacagcttcaaacctcaactccttggagccttcgaaggcgcagttctgactactgagtatttcctggaaagaaaaagaagcccaaagcggtgaaatgatgcctccagggtcatccaggcctggactcgagctggaagccacgtttccgagtcctggggctggctttctcctaccctcttcaaatccactttaggagtttcgtctgggaaaagtatgcgccgagaagtcagccgaaggtcaggcaagtgccaggctagcgtgaccaggaaggctcctgggaggaccccaaacgtaactaacccaggcaaccttccgcacgtcagctaagtcagtgcgtaaagggagaacccatggaaattgagatgtgcgcctaaacctttgccttttttctagcgctgtacgtcgtcctagccctatcggtaacttgtgttcctcctcgccctgggcacagctgtccgcagaagccgtgggaaggcctggcctagatccagcccaaggagcgcgtgagaccctccaggggctgggggcatggaggagaaagaatgaataaataaccgctcctaaagttccacatctttttttactcccctccatagagccaattaaacgcaataaaagcttgcatggaacccctcttcctagcatagcgtcgccaacaattgcctaaggggtaaaccaaatacgcctgagataattacactaagcccggggcaatgatttgcctgccagcgtcctgagcgccagccaatatttggatagtgcagtagttgtttaaaaacaacaaaaaaaaattactcgcggaaacttgaaaccgactggttggtgccagggtggttacacgatctgtttttcttgagagggggtctgcaggcagctggagcgcgcgcgttccggcccccgccggtgccactgagcgcctgcaaaacttgtcggaattaacctccggggaagtaggggaagaggagagcgcgcccccctccccaccgcggccccagctctgcaccccggcccagtgccgcgcttggaatcccccaggatcctccgcggcggccgcagcccgccactctccaaaacagacacgcgacccgagctccctgtctgcgctctaggcagcaattgcggcctgggccgccgcgtccggctgtggcctaggtggtgggaagtactttctaccctcgccaagcacaacctgaatgcggaagcgtgaggctcggggcgcttcgctcagcctccgagactgttttgtcccaggttgcgtggaacctggctcgccgaggccgaagacactggccaagcccctggcgtcccctggcgctgaacctgaggttgtggcggcgggtctgcgggctgtagcgagctcacccagtgagggcctggctcattttttgtgctcagggttcgcgttatgcgcccaagatttgtcccgggagtccctgaagggcccctcccctcgatcggttcccaggagccgcaagtgcccaacgggcacggtcccagagctgctccccaaaaggagactctgctgttccagcaacccgcggaagggatgctatccgaggtatcaacaaaagatccctttgctcgagctgcgtgtggggtcgaagtccggagagcccttaagtgtgcggcacgcagagctcctcagcagcggcctgacagcggtgcaggagaccccagcttcctgggctgggacagggctgttgtctcacggtcttgttccaaggaaaaggagccacctggctccagcaggctcttgtcaaactgtgagcgtccttggaattctgtggcttcccgaggccaagaggctgtccgctgctcggctctctcaagtgtctcagcggacaaaaatcgcgcagaaactcctatggcaggaggaaagcttccgacatacagtgaaagagaaaacatcttactttgaaaagggcttaggaccaagaagctgctcttttccccgggccttcttgcaagcttcagtcgtaacatctattctcagacgtcttctggcctaggacaaactggccacatagagctagccagaaatctagctcctgactaaagatggaaattacgggcctgacccgctcacggcactcctgcgacctggctaagccaccccacggacagacgtgctcccaccgtccagctcaccaaaagccagaagctgaaaacacccgatctggtgtcaccaaggttgctagttagggggcagccccccaagcagctgggccgatggctttcttccaggttaggcgtgggaaaaccgagggagccatagtgtccaaatgctcctttctcctcaaatcgcctaacgggaaaggaccc

SEQ ID NO: 34007 - DNA, 2337 bp, Homo sapiens
  chr9:79632838-79635175
  binary
cgccatcccagagaaacctcatcttgtccaactcactcgctccaggaaagtgtggtggagcctccattcgccaagccctttagtgcctattctattaatttcttggttactgttcgtctcaccctctataccgcgatggtggagctcggatactgtctcctgtctccctgcacctggtgcctcacatgcagttggcgcgcaataaaactgagatgaatttggcatttggtgaaaacaccccatgctttcttccccatgagtttttccctccagccctctaatcatcggggtttcttgcagagaagaggccttgaggacacgatactctgaacttgacccagagtgtctagcccaggaaaaagggtttgtaaggagagagaagctcacagcgagtagatgaaaacagggaagggtaaaaggaagggggcggaagagggagatgccagagagaagagaagcaagaaggcagtgtcctgttccccctccaccgtgcttggtggcccgggtggggcgcagctgcgggaaatgcacccggagctgtgccccctcccggcgaacagcctgcgccacccgccgcaccgggaggtggctgggggctgccgagcgagtggtgaacgcgatgggtggagagcgcccgaaacgaggtggaaaagggggcgggggcgaggcacggcgccttcttgccccttcttcagctacagacgcggcggcggcggctgagtccctcagcctcggtcatgtgatagtctcgaagcgctagctgcgggggtctcggcgtctcggggaccattacaaaacgcagccaggagagcgcgtcgctgccactgccgtcgcctctcctcctcaagacaagcccgggagaaaggcggcagctgcggcgcggacggctgagcctccccggccagcactcacccagcattcgcagacgccctctccagcccgccgctcgctcccagagtcctgcgccccacactcctcagcagaacctgcgggcgctgccgcttcagaaaccaccaaagttttttctcctcagcgacagcctagggctgcgcgtctcttctaaccccggcgacgctgcgagcctcggagaaaagagaggcgccctagaagccaatcttctctctccttaccctgatttttcactccaggaaaaggagaactccagcgcggtctggctaagtgcctggccaggggcctgcgtccagggcactggaagtcctgctgtcactggcctccaggacagcaggcgcaaactcagatttaaagggccagagtctctactgcccagaccttcctcccagccatcttggtctgggtttccctcggacctagaaaaagcaaagaggccgggaggaaacacggccccttgccactctcctctgcagccagctccagcactcagtctttggccacccgggggaagacgcagagaaggcggcggtaaacctggtgcactccgcccgcgactgtgcgcgccagtcggcaaccgtcggggccagaagttgccagcttccgagagctgagtaggcccgaaaggccaaggtcggagacaccaggcaattcggagaaggcaggagagagaagcagagagggcctggagggcgagagggcaaagtggcgggactggaggggccgagtgggaattagtgggggcagccaggccccaggaacggagtgcggagagattctgtggtccagtgcgggccggagggcggtggaggagccgggggcgatgccgcggccggggaagagctcgtacagcgaccaaaaaccgccctactcttacatctcgctgaccgccatggcaatccagcactcggccgagaagatgctgccgctgagcgacatctacaagttcatcatggagcgcttcccctactaccgcgagcacacacagcgctggcagaacagcctgcgccacaacctctccttcaacgactgcttcatcaagattccgcggaggcccgaccagcctggcaagggtagcttctgggcgctgcaccccgactgcggggacatgttcgagaacggcagcttcctgcggcgtcgcaagcgcttcaaggtgctgcgcgccgaccatactcacttgcacgcgggaagcaccaagagcgcgccgggcgccggtccgggagggcaccttcacccccatcaccaccaccacccccaccaccaccatcatcaccacgctgccgcacaccaccaccatcaccaccacccaccccagccgccgccgccgccgcccccgccgccgccgcacatggtacactatttccatcagcaaccgcctactgctccgcagccgcctccgcacctcccgtcacagcccccgcagcaacc

SEQ ID NO: 34008 - DNA, 843 bp, Homo sapiens
  chr9:79635186-79636029
  hyper
cgcagcctcagcagccgtctcaccccggcaagatgcaggaggcggcggccgtggcggcggcggcggcggcggccgcggcagccgcggtgggcagcgtgggacgcctgtctcagttcccaccctacgggctgggctcggccgccgccgctgccgccgcggccgcggcgtccacgtcaggcttcaagcacccctttgccattgagaacattattggccgggactacaagggcgtgctgcaggctggagggctgcccttggcgtccgtcatgcaccacctgggctaccccgtgcccggccagcttggcaacgtcgtcagctccgtgtggccgcacgttggcgtcatggattcggtggccgccgccgcggccgccgcagccgcagccggagtccctgtaggcccggagtatggggccttcggggtcccggtcaagtccctgtgccactcggcaagccagagcctgcctgccatgccggtgcccatcaagcccacgcctgcgctgccgcccgtgtccgcgctgcagccggggctcactgtccccgcggcttcgcagcagcctccggcgccatccaccgtgtgctccgcggccgcggcctcgcccgttgcctctctgctggagcccacagcccctacctcggccgaaagcaagggcggctccttgcactcggtgctagtgcactcctaggggacccggcgggcgtggggagaccagcggggtgagagacgccgggcccggaaccgcccaaaccacccgacggggagagggcgccctggtcaggccgggcagagctggcgagtctcagcctttgctggaacggaaggtatttaaatagacgaacaacccc

SEQ ID NO: 34009 - DNA, 334 bp, Homo sapiens; identical to SEQ ID NO: 23405
  chr9:79636205-79636539
  hyper

SEQ ID NO: 34010 - DNA, 635 bp, Homo sapiens; identical to SEQ ID NO: 32349
  chr9:79636822-79637457
  hyper

SEQ ID NO: 34011 - DNA, 600 bp, Homo sapiens; identical to SEQ ID NO: 27350
  chr9:79637630-79638230
  hyper

SEQ ID NO: 34012 - DNA, 330 bp, Homo sapiens; identical to SEQ ID NO: 16168
  chr9:81892891-81893221
  hypo

SEQ ID NO: 34013 - DNA, 280 bp, Homo sapiens; identical to SEQ ID NO: 16169
  chr9:96348822-96349102
  hypo

SEQ ID NO: 34014 - DNA, 262 bp, Homo sapiens; identical to SEQ ID NO: 16170
  chr9:99139238-99139500
  hypo

SEQ ID NO: 34015 - DNA, 1017 bp, Homo sapiens
  chr9:99258639-99259656
  hypo
cgctggaaaagggaggagatggacagcgctgtacttaccaccaccaccaccaccacagggcctgtctcagggcttgagtttgtgtggacggcaaggactagcttcctgggccgctaactctcaaccgcaaggcaaacttgggttggggcccagaacggccgtcagccgttaccctccagcctggccagtgagtgctgagtggacactccgcggctacttaaggacacgccaaccgcggtcctgccggggcgctccgtgcgtctccctccggctgggtcccggctgaccccgcaatccaggcgcaggcaagggagaccccgctggctccaccgcccaggccaccctgaagtccccgctggaggaggtgcagcggacccgctcccggggagcccgtcccgcgccctccctccgagaagccccttcctccagctccttcctctgcccgccggcccgagagcaccgaggcggcttctctgtcctgtgtactgcccaggacaagcggcattggaagcgagtgagccgttcccagctgggggcagcaacagcccggggccagggaaacgcatgggggcctggaccgtccggtggcaccgagtaggcgggtgccaggacgccagacacgctgcattccccggagtcccacgccagggagaacggccccgcctgaaaagacgtcgtttaacacagagaaacacacccagggccaggagaaaccattgtcctccccgagtcccacaacgcacaaagcacacggtggccctcccacgcggagtcgtctacccctttagaaacagacttggcccattagagcctccgcggccaggccggggcctccttacctggggatttaggtgtggacccagcacgcgtcgtccagaagcgtgtcaaagccatgcagacttgctgccaaagagtcaggcggggttagaggcggggaggcaggggcggggaggcagaggcgggaggccccccactcccacacaggccagggacccccgaggcgctggggaggaatcc

SEQ ID NO: 34016 - DNA, 163 bp, Homo sapiens
  chrX:44729859-44730022
  hypo
cgcacagcctgtgtagagcaaggattcgaatccaggtctgcctcactccaactcccacccattgcatccactccttgctgttctgctattacatagtaatagcgggaagaaaagtgttgaggtgtggagagtgggtagccttttttttctgagacggagtctc

SEQ ID NO: 34017 - DNA, 200 bp, Homo sapiens; identical to SEQ ID NO: 24732
  JH636052.4:5118715-5118915
  hyper

SEQ ID NO: 34018 - DNA, 924 bp, Homo sapiens; identical to SEQ ID NO: 27390
  chr1:101004471-101005395
  binary

SEQ ID NO: 34019 - DNA, 1247 bp, Homo sapiens; identical to SEQ ID NO: 22735
  chr1:101702006-101703253
  binary

SEQ ID NO: 34020 - DNA, 59 bp, Homo sapiens; identical to SEQ ID NO: 29553
  chr1:101703569-101703628
  hyper

SEQ ID NO: 34021 - DNA, 2283 bp, Homo sapiens; identical to SEQ ID NO: 22736
  chr1:108506290-108508573
  binary

SEQ ID NO: 34022 - DNA, 993 bp, Homo sapiens
  chr1:110611158-110612151
  hyper
cgttaattttcttacccccttgttctcattttgatatattctacgctttaaacatgctccgttttcttttgtttagtctgctccctccctctttgtcctttcccccttctctagttatccgtttcgttcgatcttgctcctgctttttttattcgttcgttcctcatttattcattttagttcatcccagctcgccgactgccatttaccctctcgttctcgccgcgctctccgttgttttgttcaatttcccttccccttttcttggttgtcgctcgctttctttggttttctttctcggtatttcgttgtcaaggccacccttgccgtcggatcccggggtgctgggtttctcccggccgctcgttccgcaccagcgctctctgcagttcgcgcggcaccggtgtggtccgggggcccgagctgtcggtgccggatgcggcgcgcctagcagggacgcgggcctgggggggtggctcctgcccgacgcggagcgctgagccaggccgggtacctgtctctggcggtgctcaccgcactgcgcggcctctgccgtctggctgggatcagaggagccaggccaactgcttctcattaagtcccaactgtggtttttatcaggaaagcctctttcaaagggcacagacacgaagctccgcggactcgttcatttcctccgttgacccacacacacctccccgccctcccctacacattcccaccgccccggctgggcgaaagccggagatgcccggccactccgtggaggcccgcgaggcgccagccgggcggcggcagggggttgaggcggatcttggaggatccagttctgggcctaggctgcgggatatggcagcgcagataaggtgggtgcagtgcggaagccgagacgccttacaggtcatagggtgcggcggacggccgcagagctgccgatcagcctgccaggcccctgccttcaggcgcattctcggatgccggcgcggtccagcc

SEQ ID NO: 34023 - DNA, 1344 bp, Homo sapiens; identical to SEQ ID NO: 22737
  chr1:111216710-111218054
  binary

SEQ ID NO: 34024 - DNA, 1333 bp, Homo sapiens
  chr1:11538713-11540046
  binary
cggagggcgcccggggatgcccgcgagtgtccaggaggctggtgacctgccaaggctgggcgggctggctggagaggagcgggagcgcgggcccgggagagacttgggtatcaggaaactcggaggcggggctggggggtggtgcctggcccggaccgtctgcaggggcggggaccgacccccaggggtcgctgcgccttgcgcttcccccgcccgcgggcgccagggccgggctgaaccaccgcgcggatcggcagggggagcggcggcgaagacagcgccagacagcgggtcccagagaccgcagcgcgcggcgtggcgcagggtctcgccggccactgattcaaggcgcggcggcgcggagcccgagaggcgccagggattgggcggcagcgcggctccggagcctggctcggacacccccgcgacccgtggtaggagcccggacccaaacaaaggcgggcggcgaataaaaggcggcggcggagcggagtgctcgggttgcgagctgaggactgggattcgcgcgcagcttcccgcggtctgcttgccctggagcggagggggagccccagcctcctgcggctccgagaagcttccccctgcgacttccgcgaggagacgagtctgcgcagcgtggtggccgccgccccccgaccctctgcgcactctctcccgcgccggcggctcagcctagccccgttcggccggccgaggtgagtgcacggccgcggggcgccatccgggcttggtctcggggctgggggatgcattgctaggaggagggggaagtcctccgcgccgtccgcaccccgacctgcttggcgccgcgcgcgaagttctctcgctctccagccagcccgggatgcgggcctcggagccccccgggaaagacggtcaggggtggacagaacccaagcttgccctctacgaccgggccccagctccgcaccatctccccgcgggactgcagcattcttggtcggccaaggggagttggatgttggatgtccaggaacggcaaggcttccgacctctggcccctgcttgtcccctctgagggatatctgggtccataaaagttgagcgtcagtctgaagccgcccttggatcgggctctcgcccatgctagagcggagggaggggacagagtaaggctaatgaccccctccacccactccctacctagcgtactcgtgctctcggagggacatttccccgattaacctggctgcaggtccggccggggagggcgcgtgggggcttggggcgggccgggccagcgatggatccgcgcgcgcgagggtccccaggctctgccgagaacgcgaac

SEQ ID NO: 34025 - DNA, 877 bp, Homo sapiens; identical to SEQ ID NO: 29562
  chr1:115631850-115632727
  hyper

SEQ ID NO: 34026 - DNA, 1169 bp, Homo sapiens
  chr1:115880045-115881214
  binary
cgctccccgccctaaccttccacgcccgcttctcccacacctggcagcagacagctggagatgaagcgtgtgacccaagtggcagggctgaaccttggcgacctctacctgaggttgtccaacgcggctccgtggagggccccggtacgccggacggaccccggcgttggctcgcagacttcctgcgttaacccccggggccctcagtcacgactcccagcccttccgagacgcgctgagggaactgccccaggtctagcgcgccccgttccgctcctccccctacctgggggccgcgcagcactttccctactcggcgctcacctcagccagcgcgctctgcgctccccccgcggtgctggccgccactcctcccgccctggcgcgccagctgccggcgcatccctctccgcgcccattcgctctccctcacttgcgcgttatccacttctagccctcgagctagaccctggcatggccgtgggcttctgcaggcgccagggctgctccctggactgcaggccatcctgggactagggactccacgaccagaactaacgctgttccctcggtccgactcgtcctcccgcgagggtcccgcgcccccacacccactcgggacatttctcagggctgctcttcggcctgcgggagcctcgggggtaaccagagagctcgccagaccggtatccttgcaaactctcccgcgaagcccagccacccctgcccgcgcccgcgctgcgcccctctcgggatcggctcggggcagcctgactcaccgctgcgctcccctccggctcccagcgctctctgctgtgccggagcgccgagctgctctcacacaggcttcttgaattcttagcccctcctcccgtactcctgagtcacacgctccaaatcctggcccccatccctcccctccccaccaccagccccgcacctgctgtggctgggctgtggtgcccggctggagggggtcctggggactacagacggatcgctcctggagggctggccagacccagccagagaaggactttaaaccttcagaggtcaaagggaaacccactggggtctgaggggccgcgcgcgcaaagccgggagggggagtttctggggcaccggcaggggtcgttgggccgactggctggggctgggcggagttgctc

SEQ ID NO: 34027 - DNA, 544 bp, Homo sapiens
  chr1:116213926-116214470
  hypo
cggtgtgaaagtggaggggcgcgagcactcaggtgggtgaacagcctgcggcctcctttccctggctgcaaagccgccactcaactctgctccagcccaggtttcggggagccgggatccacttgggcaggccgggagcctcagactccagacttttcatggtgcgctccttcctgcttactcaggaggaaggcgaggcagtccagcatcctgggtggagtggaggtgtttcgagtccatatctaaatctttttcttagagcaccctaagcaggctgctgtctttgatccccatgcctctgctgtttatcttggtgtgattcatcactgtaatttaagacgtggagagagcaaagttcccatcccaggcaggggaggcgcagtgcaggttggactgtgtaaggaaatggcagcatggcgaggtttgtgccgcggcctacaagcagggctgcatgctccccaggcagactgtggcagagccaagcccctcacttgtagggaagcgtgtctcctaggtgccccagtaggggaggtctgccagcatc

SEQ ID NO: 34028 - DNA, 877 bp, Homo sapiens; identical to SEQ ID NO: 22738
  chr1:12123137-12124014
  binary

SEQ ID NO: 34029 - DNA, 1240 bp, Homo sapiens
  chr1:13839444-13840684
  binary
cggctcggctcacctttgggcagtttggatgcgttctcctggatccaggagaagaggtgggcgaagtcacagtcgcacagccaggggttcccgtccagacgcagggagcgcagcgcgggcagcgcggccagggcggccacgctgaggctgcgcaggttgttgtcgttgagctccagcacctgcagcgactccagggtctcgaaggcgtcctcgtgcacgcccaccaggttgttgttagccaggctaagcttcaccagcctcccggccgagcggaaggcgccggcgcccagctgggtcaagttgttgtagctgaggtcgaggaacacgagcttggccgagccgctgaacgtgccctcctccagcgagcgcagcgagttgttcctgaagtccaggtagaccaggtcgccgtagaagatgaagaagtcctcggggatccgctggatgcggttgccggccaccagcagcttgcgcacgtccagggggaaagggtctggcacgctgggcagcccgcggtcgcggcagtccacggtgtgcgggtcggtgcaggcgcagcccgcggggcacgcgtgcccgggcgcgagcagcagcagaaggctgcagagcccgagcgccgcggcggcgcaggctggggctcgggggcgcatggccggggggcccgcgccggccgcggcgagaaggaagcggctctcggagcgagccctggcgcgggacggcgcggtgaggcactggctgccgggcgcggggagccagagggcggcccgggcggggagggcgtgcgcccgggcgtgcgggggcgatggagcgcggcgcggacggactggggagccgggacagcagggatggagaggggaggggcggggagggaggggcgagggactcaccaaagggtttacccggacaggaaattaacccgctagaaaaatctcttgggagaggcgggagcggcaggggtggccgagtggccgtcgccaaaacgcggccccaccctggcagctgatttccgagatctggcagtaagacgccgcgcgcaccgggcgggctgcactcgacgtctaagttcagctaccaagcccaggagcggtttccctaaggcgtgtcccgggcgtgcgccctgccccctcgcgcccgcctggtgccaaagcacgctccctgcacgccaccctatgtcgccaaagggagtgggacctgggtcactctgactctgctccgggggcaatccctgcaggttctcgggtgccgc

SEQ ID NO: 34030 - DNA, 944 bp, Homo sapiens; identical to SEQ ID NO: 27400
  chr1:13910070-13911014
  hyper

SEQ ID NO: 34031 - DNA, 184 bp, Homo sapiens; identical to SEQ ID NO: 23675
  chr1:14125492-14125676
  hypo

SEQ ID NO: 34032 - DNA, 1409 bp, Homo sapiens
  chr1:14924964-14926373
  binary
cggcctcggtccaggcgacccctgcccctcgccaggggcgccaccttggccccctcccgactgccgtccgccgcctccgcccccccggggggtgtgtctccgaagtacgggggcgcgggaggccaagggtgcccccagcctccgaccgagaccccctcccgagccggcggcgaatggtaggctccatttaaagagtgcctggtggcgcgcggtgtccttcttggagcagctctcggcgcccgcccgccggggtctcggcgatcgctgctcctcctcctccttctcctcctcttttttctcctccgcctcctccccccgccgcctcgccaccgccgcggctagggctggaggcgccgctgtcattcctgtgccggaggaaccggcgctgccggtgcctgggggtcggggcgcgggcgaagccgggccgcggaggacacaacaggtagagccgggggtgcccggccgcgcgccccccgcgcatcatgcagctctttgtcacctctctcgcccccaggccaaaatcctgagcatgatggaagacaataagcagctcgcgctccgcatcgatggggcggtccagtcggccagccaggaggtgaccaacctgcgagccgaactcacggccaccaaccggagactggcggaactgagcggcggcggcggccccggcccgggcccgggagccgcggccagcgcctcggcggcgggggactcggcggcgacgaacatggagaacccccagcttggagcgcaaggtaggatcgccccggcgcccagggcggaggaaggcgagcagagcacgcccggcctcggaggtggccggggacccggggtcccccacacccggggcgaaatcgctttgcattctggcttgtaaccctttccgcccggcggtggccaccgctgctctccggctgggagttgcaggctgctgtcattcacgaaaacccgagcgcagtgtgcacggggtcacacggtcacaccggccccggccagcctgagcgaggcgcagccggcgggtcccttccggcatcagaaagtgccctttccgtggcaccagccccctagctccgtgcaaacttttcatgccggggccttttccccaccccccgcaggggtgaatggcacagttccccccacttccttaggctccttcccagagagagctccgggctctgccgccgtggttgggatagaggattgcactgctgtgcacttttctccgcggatgccaaatcccttggctcagttgcatctggactttattttcttctcatttgaggtctctcaggcattggaatctatagatgcaacagtagatgctcagctcagcagggagtttaaatttccgcaaatataaacaccgagagcactttccagggggatactgtagacctcaaaggttgagc

SEQ ID NO: 34033 - DNA, 457 bp, Homo sapiens; identical to SEQ ID NO: 23677
  chr1:153540038-153540495
  hypo

SEQ ID NO: 34034 - DNA, 107 bp, Homo sapiens; identical to SEQ ID NO: 30735
  chr1:155160940-155161047
  hypo

SEQ ID NO: 34035 - DNA, 186 bp, Homo sapiens; identical to SEQ ID NO: 30737
  chr1:156030658-156030844
  hypo

SEQ ID NO: 34036 - DNA, 282 bp, Homo sapiens; identical to SEQ ID NO: 16186
  chr1:156047227-156047509
  hypo

SEQ ID NO: 34037 - DNA, 1526 bp, Homo sapiens; identical to SEQ ID NO: 29574
  chr1:156390054-156391580
  binary

SEQ ID NO: 34038 - DNA, 265 bp, Homo sapiens; identical to SEQ ID NO: 24768
  chr1:156432033-156432298
  hypo

SEQ ID NO: 34039 - DNA, 391 bp, Homo sapiens; identical to SEQ ID NO: 30740
  chr1:1566262-1566653
  hyper

SEQ ID NO: 34040 - DNA, 484 bp, Homo sapiens; identical to SEQ ID NO: 29575
  chr1:156818577-156819061
  hyper

SEQ ID NO: 34041 - DNA, 619 bp, Homo sapiens; identical to SEQ ID NO: 24770
  chr1:158083079-158083698
  hyper

SEQ ID NO: 34042 - DNA, 571 bp, Homo sapiens; identical to SEQ ID NO: 26029
  chr1:158150571-158151142
  binary

SEQ ID NO: 34043 - DNA, 837 bp, Homo sapiens; identical to SEQ ID NO: 23683
  chr1:161409866-161410703
  binary

SEQ ID NO: 34044 - DNA, 456 bp, Homo sapiens; identical to SEQ ID NO: 29579
  chr1:161591298-161591754
  hyper

SEQ ID NO: 34045 - DNA, 645 bp, Homo sapiens
  chr1:16474862-16475507
  hypo
cgtcactcaccctggcaggcatcctccaccttctcgtagcctgcctggcacaggcactgcccaatgggcaccagccactcgccatccactgcacagtgcatacggggctcttcaccccccggtggcaccacggcatggtccacacaggtgccggccacagtggccagggaaggtgcatcagagccggcgatggtctcagggaagtgggccaggccctgcagcagctcggggcacttcttgtagtagacacggacggagagcagcgccacacaggcaccgatatcctggaaggccaggtagaagcctttgcgggtgagcggccccacggagcgctcctccacgttcagcttcacgtggcgtgcctcgaagtcgctgctgacggtgatctcatcgggcgcaatggtgtcaatcttggtgaacaggcgcttctggaagttggtgccgtagtccaggtccgactcggcatagtagaggttgaaagtctccttgcaggagctggcgccaccagggaagctgttgcagtcacgtacagtaaacttgagctcaatgaagatacgctcagcctctcctcggtacacccagttggtgcggagccagttgtcctggtcgccagacatcacgttgcacacggagtacatgtagatc

SEQ ID NO: 34046 - DNA, 418 bp, Homo sapiens
  chr1:16534331-16534749
  hypo
cggcccaggcaccctgacggcctcaggcggccggtgagtgggcatcgcccacccccacccccacccggcatctggctgccctcagggcccatgggaggagctggtaccttcccgggctgctccggtgcctgacccagagatgagtgcccgggctgctgaattccgccccaggcgcagagaagagtgcagccgggtcatcagctccgatgccgagaagcgcctccgctcaggaccttcgaggctcactcgggtggacccagacaactccaccctgggctcctctgtgctcagggcctgctcttgcactacctggccaggctctaggaagacagcgtgggcctcggggcagccggggacctcttcacgctggtacacccgcatcttgcgccctagggttgggggcaaggagtgagagcac

SEQ ID NO: 34047 - DNA, 375 bp, Homo sapiens; identical to SEQ ID NO: 29581
  chr1:166916749-166917124
  hyper

SEQ ID NO: 34048 - DNA, 759 bp, Homo sapiens; identical to SEQ ID NO: 32397
  chr1:17445328-17446087
  hyper

SEQ ID NO: 34049 - DNA, 854 bp, Homo sapiens; identical to SEQ ID NO: 23694
  chr1:182583799-182584653
  binary

SEQ ID NO: 34050 - DNA, 212 bp, Homo sapiens; identical to SEQ ID NO: 30759
  chr1:18960805-18961017
  hyper

SEQ ID NO: 34051 - DNA, 263 bp, Homo sapiens; identical to SEQ ID NO: 16202
  chr1:19711526-19711789
  hypo

SEQ ID NO: 34052 - DNA, 310 bp, Homo sapiens; identical to SEQ ID NO: 30763
  chr1:1974777-1975087
  hypo

SEQ ID NO: 34053 - DNA, 817 bp, Homo sapiens; identical to SEQ ID NO: 16205
  chr1:205631783-205632600
  hypo

SEQ ID NO: 34054 - DNA, 829 bp, Homo sapiens; identical to SEQ ID NO: 22742
  chr1:207669273-207670102
  binary

SEQ ID NO: 34055 - DNA, 1329 bp, Homo sapiens
  chr1:214155737-214157066
  hyper
cgtccttctcttttcgctgcgtcaggcaggcacctacttatttctagcccactcctcaccctgaataaaagcttctggtaagatggacaatatggaaaacttcagtcctatcaccaaagcccctgaaaatggagcacccccgaattcacatccttgacgtgaaagaccaaagagagggaagctgggagtaacggccaaacatccttagagtaattgacaaaagaaagggggtgggcagaaagggagatttccatcccttcaaacgtgcacgcccctcccgcggtcccgggagggagtcccccctcccaggtcgagcgcgtccaccggctgtccccacagcaacaggcgggcggcgggggaggagaggccgcgggggcagcgcaggcctggcggcggccgaaatcccccggccaccacgacgttccccggctctgcggcgcgccgggagcaggtggttgccctctgcgtccagggcgtgtactgagcccaggctagctgagcgaggctgcagcccctgcgatggcccgggaagaggcaagtgccgcggggccagagcgaggagggaccagcagggcggcctggacccccacttggccgcgcaggcaggaggggcgcgccctctgcggagcgcggcgccgcggcagccgcagcatctggcgctcgctctctctggccggagaggccgcgacacctagcgcggggccgaggctaggaagggcgggccggggagggaggagggcactgggaggaagccgcgggcgaggaagccccgctcctgccgagtgcctggagaggagattcccagccttcctgcccaacccgaaacttttccaacacacgcaggcgtattcctcgcaggattcggcggtcccgagtcgcagtcagggaggaggctcgggaagcacacgtgccctggcacactggaggaggtacacaggcacaccaggagggacagggcctcttgggaggcggctgagggcgtgaaggcagcaggcggccacacatccgaaagggactccctgcgagcgggatcgagcgcttaaaaccctgccacagcttggaagtgtagcggtgcccagaggctttgcgtaactttgcccactgcgcccccgcgtgcaaaggtgtccccttcacactcacaccctcaccccatctcactccccttgagttgcggcccgagactgcctttgtacttaagcgacagcaaaagatatgtggatttgaaccaaagatggtgggcaagagtgttgtaaattgtgtaaattccactcgcgggaacccccagatacgtagggagagcacccctttctcgccgaaggcatcccctcc

SEQ ID NO: 34056 - DNA, 909 bp, Homo sapiens
  chr1:214159503-214160412
  hyper
cggttagaacacctgatacaacagtcaatagttggaggtgtgagtggtgcgtgtgcgctcctctgtgttgcttccgtgatagacgcgtggggggagtgtgtgggggcggcaaaaggggaaagaagaaggctggggatgctcccgcaatctcttttcttatcgccgacacctaacctgaccgacctaattttttttctccttttcactgtttgaaattcgtgccaaaagtttcctgccgggatagactcggacatactaacatcgctattcttattcaaagggagggcttaatatcctctttacggtttggtgaatttgaggctgaaattgtaaattccctaggaaggagtgtgtgtgtgtgtgtgtcgcagaagacattggtagtgtttggccagtgtacttgtaacacacctcataaataccctgttgtcacgacacagcatgattcaacctttgatctgattaaatttgagggacacacgaagactacttgtcctcctcctacttacaaaaatgagtgtctaatagactatgtatgaatgtttctgcttcgcagctcttgcaagtcccagcttttataggatctttaggtcataaacgcggctgctttattaaaagccgtttactgtgcccggtgaaagggacgttctagctgcggctgaggctcgcttgcatttgtaacttgcaaagcccaaggagatctttaagagccacattatctaaagaaattttgctggttatttttcaagcaagaaatgtcaaaccaaagtaaattttctagggctttattttagagcctgcgatttatgcgtttgaaatttcttgcctaataaactttaaagtttgttgcccaggcgtcaaaactgtgtaaatcctgtattgaacagctatctttggtctttctggggc

SEQ ID NO: 34057 - DNA, 554 bp, Homo sapiens; identical to SEQ ID NO: 26059
  chr1:214162300-214162854
  hyper

SEQ ID NO: 34058 - DNA, 948 bp, Homo sapiens
  chr1:220701523-220702471
  binary
cgctgctccgcgcgcagccggctcgggccgctcctcctgactgaggcgcggcggcggcggtggctgtgaccgcgcggaccgagccgagacattcgcgccgggggatcgggcgccgccgccgctgggccccgggcgcgtggatgcggctgggtcgggcggcgccgtacacctgaggcggagaacggggcgcggcgcgggtgacgctgtcagggccgcggttcctgacgcccaggcgctcgccaggacgagccaggcagtgatttgaggcaccggcttcaccttcacccatggtccggagagcctagcggggctcgccaccgcctcccggctccccttccacgcctcatcctgccagcctcgccgccccgccagcgccgggcaaccgcctcgcccgaagccctccctcgttactgtccgcataccccggcggcgccgccgcgggaagcggctccccctcctcttcctccgcgtcctcttccctctttcccccgccggggccgcttgttgcaccgccccgcggcctgcgggagccgctcgccccggccttgtgctcgcgtccgcacccctttcctgtcgccccccggggcccgcaccacagcccggccggcgagaccccggccagaccccgctgcccgcacaaaatgtcggcccggacgccattgccgacggtgaacgagcgggacacggaaaatgtgagtaaccggagcctccctcgggagcagtgggggcgagaccctcctctgatccccacttcacccgcgcttgggccgtcccccgtgcctcggcgcggccacccgcggcagggtctccacctggagcccggcgtgaccctcacccactgctcagccctattcttcattccaaccccatttcgcttgtttcccctcaagggtgagggtagggaaccgtaagtggcgccctctcgctcggaggtggtcctccaggggc

SEQ ID NO: 34059 - DNA, 984 bp, Homo sapiens; identical to SEQ ID NO: 24808
  chr1:224804868-224805852
  hyper

SEQ ID NO: 34060 - DNA, 54 bp, Homo sapiens; identical to SEQ ID NO: 16211
  chr1:226311830-226311884
  hypo

SEQ ID NO: 34061 - DNA, 862 bp, Homo sapiens
  chr1:226924738-226925600
  hyper
cgttctgcaactcgcgctgcaagatccgcagcttcctcttggcctcctccggccctggcggggagagggtaccggctgccaccacctgctgccggtcccctcgcaggcgaccagcccaacttgggctgctcacgctactgccgctgctgccgctgccactgccgctgctactattcagcctgcgccggccgctccgccagcccccggggctccggggctcctcgggggacagcgactcggctggggggaagaggaaagaggcgcctctcccggggctgaaaacgctgccggggctcagcactgccctcctcgggggcgggggcgtctcgctgccactgggccccgggccgccgccgctcttcatctcgttggcgctattcatgatcaccaggctattgagcgcatagcagtacacagccatagtactgggtcccgcgctgcccgccgccgcggctcccgctcctgctccgccgccggcgcctcctcctcccggcgctcccggctcagccccggaggcccggcagccgcggctccgcgcgcagatggggcggcatggcctgggcagcgggctgggggcacgaccgcgggctcagcccccgcccaaagctccataaacaaccgtgcggctgtggagatacaaggagaaaagtcaggaccctggagggcgcgcggggggagttgggggtcgcctgcagaacccagagagagccccgggaacacaatctatccgggacccagcgccaccggacatctcacctatggggacggcgaggctcggcgagggcatgccccggctgcctcggtcgccagcgcggtttcgggtgtgcttccccgccccccacctcgccccaggctgcgatgc

SEQ ID NO: 34062 - DNA, 999 bp, Homo sapiens; identical to SEQ ID NO: 23709
  chr1:228528433-228529432
  hypo

SEQ ID NO: 34063 - DNA, 248 bp, Homo sapiens; identical to SEQ ID NO: 16215
  chr1:230346868-230347116
  hypo

SEQ ID NO: 34064 - DNA, 223 bp, Homo sapiens; identical to SEQ ID NO: 16216
  chr1:230379488-230379711
  hypo

SEQ ID NO: 34065 - DNA, 537 bp, Homo sapiens; identical to SEQ ID NO: 27427
  chr1:230404024-230404561
  hypo

SEQ ID NO: 34066 - DNA, 929 bp, Homo sapiens
  chr1:236227908-236228837
  hyper
cggggtcacggcccggggcgcgcggagccacccagaccccgcgacccgctcttcggatagcagggaccgggtcgggaagaccttcgcggaccctgcagaggcgggagaccctgcgccgtgcccggtgccccggcggccagcgggtccgggtccccgcctgctacgcccaagtccgtccggctccacgggcgcccccggcccgccgcgccctgcagcccctcgcccgccctcccggggctcactcacgtagactgcgtcgatgtcggatctgtcgtagaagcggagcgccccactcagctccagggcaggagagacgaagtcatccccgtcctccagctccaggtccccctgtccggggccgaagggaaagagctcctggcggctcaggcagcccacaggccccgccagcagcagcggcagcagcagcgcccgcgtccacgcagcccggatccggctgctcgaggccaacatgttcccgaactgcggtcccgcaaacccggtcccgcggccaggacagaggaaggcggggatgtaaccggacgcccctggcagccccctctcctcccgcctcccggcgttcccaccccgggaaataggggaggggagcggaggggagagcggagggccccgccccgtccagcgggcgcgccgcggggcagcccaatggccgcgagggggagggcgaggggcgaagccgaacctcccgccttgggcgccggtgcctgcgattctcgaaaccagcccgactcccagcgaacggcgcctccgggagggggagcagagcgcgggacccgcaccgtggtcctctgattagggttgggtcgtggagagccggcgacgtggaaacgctccggattcaggaacggcgcccaccccattgccgctcggccgcgtccggggtccaattcgcttgaccctggtaggaagac

SEQ ID NO: 34067 - DNA, 1565 bp, Homo sapiens
  chr1:237205156-237206721
  binary
cgtgcgatccgaagtgccgtggaagttagtgccctagcccagtccaggaggaaggggcgtcgtgccggcggttttaagctcggaaggggcaggggaatgagcccagggaccccagcggggcgcaggtaggaggctgtgcgctcgccgggtgcgctccggccccgattcccagcgcagccagtaagtggcgctgggcctcgggtttggcggcccggaggagcgggctgcggattacctgcagcagcggggagccgccgagctcctccccgcccgcccccacaccccacccccaccgctgcactaaccccggctcagctggctccgcgcacttgctcggaggagccggggccgagcggaccgccggctgcaggcagcgagcgcggctgggctgcggggctgcttccccgcgtcctccgggcccgggccgccctcctcccgcacagtgcggagcagggaggccccgcgcctcgaccacccgcgcccgagcgtccgcgcctcctcctccgctctgcaggcggggaccgcccggcgctcggcacccggcagcgcggccccctccagcccccggctcccggcagcagaagcagaaggcagcgccaggggccgccgccgccgccgagctccgcggggctcgggagccggccccggcgaggaggcgcggaaccatggccgatgggggcgagggcgaagacgagatccagttcctgcgaactgtaagcgccgtgcgtcgcgtgtgctgtcaggggaagggggcgtcagggcatccactagcggggtccgggcagagtgacagcgggcagcggggactcgcgggcggggcgagggggtgccccctgaggatgcgggaggagcgggcatcaccaagtgtgtgcaggtgtgcgtgttggggcgagggaaggcaagggcgcgtgtctgtgcgcgcgtgtggaaagctagaggatggagcgcggctagccggcggcaggcgcccgggctcggacccggggcaccggggacaggagcgtcggagctgcgggaaccgggagaggaggggacggccggtccggcctgcctggtggcacggctgggacctcccgggcggccgggggcagggtgcagagcagggtggcccgtgggggcgcggggagcggcgggaactcgggctgtttctgggaataccgccgccgggaggtttcttgggctttcgggctggacccgcgcgttgtcacggagcgaagacgttggttcgcttactccgtgtagcgtgcggcgcagctgaccgggggcgggggtgatggtgcaggacgctgcgcggaggtttcccccaagtcaaggtgctgcgaaagcggaggaggagtcgcctccgtggtccccgcggttcccggggctggtgccatccgtggtggtgctgtgaccgcttgcaaagcgtggaaggcatgggaagcgagcgtgtgtttgcgtgtgtgcgcgcgcgcgggtggtggtggggagaacatcgtgaacgtgtcgttctctaaatgctggcttattgcatgccaagtgaagcaaagtgtgtgtgtgtaagtgtaagggcagggtggctgccc

SEQ ID NO: 34068 - DNA, 1346 bp, Homo sapiens; identical to SEQ ID NO: 26083
  chr1:240254834-240256180
  binary

SEQ ID NO: 34069 - DNA, 1492 bp, Homo sapiens
  chr1:242687211-242688703
  binary
cggtcattaaggcaagaaactgcaggcagagaagcccccgaatccgacctaggacgtcggcgcctgccaggatcccctcgcctgccccccgcgccccgcgcgcgctcatgccaccaccacggggagggtgcatgcggcaggtgcctggccgaggcccccgggagcgagtcgcccttacgtgctccagcttgtctttcctccgaagccagacgctggcgctgtagtcctgctgcttgacgctgctgtagaagttcgcgcccactcgggtcaggcttggggagggctccttggggcggcttttgagcctcatctgctcgaagccctcatggggggaggccgagagccactcgtgctgccggatctccatcctgacatgaccgggcggccgccggcgagcagcggactcgggacgggcgcgcggggagccgggcgcggagggcgagcgggaggcccagcgggagccggaggtggagctggagactgagctggaggagctggaggagcgagcgggcgcggggagcgcggggtgctgagcgccagctgggagcgcggccgggcgggagggggcgatcgcgggaggcgcggggcggaaggagggagggcgaggtgcgggcgggggcgggggcgggggcggagggggacggacggggagaagggggacgagaggggacagggagggaaaggaacctgctccggggagacagaagtgcccggtgcggcggcgacgtcgcccggcggctgcggtcccgagcgggcgctccgctcgccggctccttgcggcacctactgggacccgggccggctcccggggcggcggcggcggcgggggtggggtgcggtgggaggggccgcggctggcccagccagcccgcgcctgcaggttggtgcagtgaggagccgccgccgcccctcccgccgcgcccaggcccgggcggccgcgctcccgctccgcacccgcctttcccgagcaggctacacctctccctggcgcatctttactggaaagccggcaggcgaggggagaagtgagcgccgtctccgcgcctcctcggtcctgctggctgagcgcggggatggctccggagggagacactcaggaaaccacctccgcccttcccccatctctatccagcggcgccccctcaccctgcccccggctcgcttgggctgcgccttcccccattctgaaagttcactaacttcccaccccaagggacttagagcagagggtgcccagcattcccccctgaaaatagccgagagacatgtgttttctggagccgtacacgctactttcatccgatggtgtggcgatgcaaatacgcccgggggcagtagcccctcgggcaggcacgcgggaccggttgctccccagccctcggtgtccacctagaaccgggctccccgggccgcacccattccgatcctgggagggtgatccagggctcctctgcaacgctccgcttgtgcggtgactgttccttaggtggac

SEQ ID NO: 34070 - DNA, 1005 bp, Homo sapiens; identical to SEQ ID NO: 28352
  chr1:248020330-248021335
  binary

SEQ ID NO: 34071 - DNA, 177 bp, Homo sapiens; identical to SEQ ID NO: 8895
  chr1:248406552-248406729
  hyper

SEQ ID NO: 34072 - DNA, 1775 bp, Homo sapiens; identical to SEQ ID NO: 23718
  chr1:25255579-25257354
  binary

SEQ ID NO: 34073 - DNA, 592 bp, Homo sapiens
  chr1:27875852-27876444
  hypo
cgtcctggtgggaaggtctggcgcgcggacaggacaggctgaaaggaggggtccgccccagccccgctgctacccactgccactgggctggccttggctccccggctagggaaggtggccaggccccgctgggcaggcagggcactggtgggtggccctgcataggtgcccgatgccttccgggactctgggcgagaggctgagagggcaaagtccaagagatcggaggagtcatccgaatcgagcagcgagcgaaagtagccggtgaagaggttttggcgctcctggctgagctcggtctggcctgagggtgcacccgtgctgtagtagctgccacggcctgaggctccactctccagcccagtggaggcaaaggcccgggcctcggtcccctgaaacccacagtttcggccagcttgtccgcctgggtgcccatggtgaggggcccagccaccacccttatccccggcccactcagcacctgcctccccaaagcctgggccactgggcacctgctctgggaacagagtcccattcttccgggaccgtctcttgcgctttggcttcccagtcacagcgtctacctcccccc

SEQ ID NO: 34074 - DNA, 315 bp, Homo sapiens
  chr1:28293280-28293595
  hypo
cggaccccagctccgagtggctgtaccgggtgacggtggccaccatcctctatttctcctggttcaacgtggctgagggccgcacccgaggccgggccatcatccacttcgccttcctcctgagtgacagcattctcctggtggccacctgggtgactcatagctcctggctgcccagcgggattccactgcagctgtggctgcctgtgggatgcggctgcttctttctgggcctggctctgcggcttgtgtactaccactggctgcaccctagctgctgctggaagcccgaccctgaccaggtagacggggccc

SEQ ID NO: 34075 - DNA, 589 bp, Homo sapiens; identical to SEQ ID NO: 23726
  chr1:32410105-32410694
  hyper

SEQ ID NO: 34076 - DNA, 918 bp, Homo sapiens; identical to SEQ ID NO: 30810
  chr1:3309969-3310887
  hyper

SEQ ID NO: 34077 - DNA, 87 bp, Homo sapiens; identical to SEQ ID NO: 16226
  chr1:3377848-3377935
  hypo

SEQ ID NO: 34078 - DNA, 1492 bp, Homo sapiens
  chr1:34629078-34630570
  binary
cggtgggcgacacggtctgcgaggacagactcacaagacgctgaaggccagagtgggccagagagctcgccactcactgacctgccagaggagaggcgcactttcccaagaaggggaactggggtggtccaggccaagccttcagaggttcaatcggtggtttcaaaacaaaacaaaacaaaacaaaaacaaaaacaaaaaagaaaacacggctccaggtcgaaggtgccctaggtctaggcctggccagcaggtgtttcggtttctcccccagtgggtgtcagcctcgcgggctaaatgaaaatgcggttccaggcatcccggtttggacccgtctccacccgggcacacggaactttctagcttgtagctagaactgagcttcggaggggtgctgtgggtaaagcgggagggcaccagtcgcggccagtagcctccacaggggaccgggttccctcgaaggttcgcgtacctcccccgcgcgctgcaagctgcagccagacacccgcgaagttccgggactctccgcacccgctagatctgccccttcccggactcggtcgtcgggagctggtcccgccgcccgcgccgccgctgccgctgccgcagccgaggcgctcggctgcagcagggcgcgggaaagggcactttggcgcggagtgagcaccgaggggaatgtggcagcgcgaagcctggcggcggcactccctcccccgcctcgggctacaacccccaccccctccttcccatccctcaacaccctccagcccccacctgcaccctcctgcaaggaatgcgcgggacccccaccgtgggcacgcgtccacctgaaccccctcctagctccgagcgccgagggaggggtagcatttgaggagggggatggcggccgcagtctgcagtcggttccagagggggcaccggtttcaattggagaaaatgggcgggggcagggaagggcagaccttgcagacgcagaaatggggagggggcgcacggttcctctccagcccccaggaccagcgtgcctggcagaatcaggagccgggggagtagggctcccggaaagtttatcgggaaaaagcctagcaccgtgggggctgggaggctggagaaactgaagccacagaccaggtgccccgcaaccccgggcggggatgtctgtctcccaggcccccacaccggccgcatccgtccaagttgcggctggggttggggcagcagtgagggtgagggtggaggtgaggacgtggctgagggtggggtgggagacggaggcagggatgagaatgagagtaggcaactgggagggtgggagattcaggcagggatagaggcggggggagggactgggaccgggtcgaggatgggtgggctcggggctcgggtggggcgcgcggcggccgctggctcctcggcgcggctggactcacccgcggcggccgagacgctgagcaacccacagcccagcaacagcagcagaggcggcggc

SEQ ID NO: 34079 - DNA, 1322 bp, Homo sapiens
  chr1:35394922-35396244
  binary
cggggccgggagccgagcgccggagcccggggcgtgggcggcgccggggccgcagccgggccgtgcctggggggcgctgcagagggagccgcgagcgcggccccgtccccactcctccccgcggcttacctggcccggctcgggctccggccgggttacatggtgccggcggcccgggccgggggcgctgcggcgttgggcaggcgggcagggaccggggcccggcactgcggagcccccagctgaggggccgcgccggctgcggagccccaagcgagcgccgagcggcagcgggcgcgggagcgggaggcggccaagccacggaggctggatttcccggggaccgggaaggggaggcggggggatcccgcccgcgcgctccgcccccgcccccgcccccgcgcagggcagccgagcagggagagggagagggagaggaagagggagggggaccgagctccccgcccccgcgcggacccaggagggccgaggtcgccgcccgcgggcggccgccggggtcccggaggagcgcccacctcgctgagcgacggtgctgggggcgcccagcgtaggggcaggaatgagatccccctccccggggacccaggaacaggcacccgaagtgtcacggccacgcacagccgacctgggtacagggacccaagcccggcggcgggcgggcggtcggggaccagctcagcctcacggaccgggtctcgccccccgccgaggggcagtcacgccctgaatgtcacacacagcccccaggcccgtccgcttaggagactctccttcgggctttcccggtcggccgcctgacctcagctcctggcttggggtcagggagcccccctcttcggccccagcccctgccaggatggggcgctgtgcccggcctcggagccgctggcaggcgtcccccacccacagtccgcacagccgaggcatccccagtgtggagggagagccccgctgtacctgccgcctgtgctgggcccccgcccgtgcccactgtgcccgcccgcctctgggccctgagcctgggattgtgccatggcggggtcggggtggggggaaagggactgtccgaagcacagctggaggctgcggagcccggacacaggctgcgggagccgagaggcggagagcggactgcagcagtcccctggcttgaatccgtcttggcgcccagagcgatgctgtaatgggggggagggggccacggtggggaagccgcagggggaggggctgaagacgtgggggaaggggtggctccggattccggctttccagggtaggtgtgaggaaacactgcctccggc

SEQ ID NO: 34080 - DNA, 863 bp, Homo sapiens
  chr1:36042458-36043321
  hyper
cgggacgcggccgcgcggactcacgtgcacaaccgcgcgggacggggccacgcggactcacgtgcacaaccgcgggaccccagcgccagcgggaccccagcgccagcgggaccccagcgccagcgggaccccagcgccagcgggaccccagcgccagcgggaccccagcgccagcgggaccccagcgccagcgggtctgtggcccagtggagcgagtggagcgctggcgacctgagcggagactgcgccctggacgccccagcctagacgtcaagttacagcccgcgcagcagcagcaaaggggaaggggcaggagccgggcacagttggatccggaggtcgtgacccaggggaaagcgtgggcggtcgacccagggcagctgcggcggcgaggcaggtgggctccttgctccctggagccgcccctccccacacctgccctcggcgcccccagcagttttcaccttggccctccgcggtcactgcgggattcggcgttgccgccagcccagtggggagtgaattagcgccctccttcgtcctcggcccttccgacggcacgaggaactcctgtcctgccccacagaccttcggcctccgccgagtgcggtactggagcctgccccgccagggccctggaatcagagaaagtcgctctttggccacctgaagcgtcggatccctacagtgcctcccagcctgggcgggagcggcggctgcgtcgctgaaggttggggtccttggtgcgaaagggaggcagctgcagcctcagccccaccccagaagcggccttcgcatcgctgcggtgggcgttctcgggcttcgacttcgccagcgccgcggggcagaggcacctggagctc

SEQ ID NO: 34081 - DNA, 979 bp, Homo sapiens
  chr1:37499288-37500267
  binary
cgcgaaatgcgccctcgactcgggatcgcactggaaaccttcgccacactgtgccaggtctgacctcccaggagcgcgccaagggcccctcgcccactgcggcccggcggcctcctccccaataagtaaggcccgtgaccccgactctggaactttgtcctcacagggaggagctcctggtggtcaccgatcggctcagcagctcggagagaggttaggaaaatctctccggaacgcgttgggaggccccctcattcccgccccctcccgggcgcacggagacccccggctccagggagcgcttaccgatccggatgacgtggggcatcccgcgcgagtccgggatccagaaggcgcacacgaggagcccggcccagtattcccaaaccagactccggaggcgccgccagggagcggtcatcgttgggcgccgccgagcgtgcccggggcgcggccgtggcgggctccctggggcggcagctctaggcgcgggcgcgcagcagccccgaaggcgccgcctggcccagccgcccggctcccgagcgccgctgcaagtggggggcgccccgcggcgccgcgcacatcttactggggggccgccccgccggcgcccgccccgcctggctgccgcccacgggctgcccgcgagcgaggctcctgggctccgcccggactccgctcggactcggctccggctccgactcgcgtcggctcggctcccgcgcgggctcccacctgccccggctgccgggctctggcgggcgggctgcacgcgtctccggccgctcctcctccagccgccgccgatgctatcgcccgggctcgcacaaagccccggagtggagttgcacgcgcgcacactctccctcccagccccctcccctgcgccctgcctcccgcctcccgcgccgcccgccgcccgcgctccctccgcgcactcccccgcgcacacacacttcacactcacacttgccgaggc

SEQ ID NO: 34082 - DNA, 1454 bp, Homo sapiens; identical to SEQ ID NO: 27439
  chr1:38510073-38511527
  binary

SEQ ID NO: 34083 - DNA, 949 bp, Homo sapiens
  chr1:38511531-38512480
  binary
cggcagatggtggtctgcgagaacacgttaccgtagagcgtgcccagcgccagccccacgtcggcctgcgtaaagcccagcttgatgcgccgctgcttgaactgcttggcgaactgctccaggtcgtccgagctgggcgcatcctcgtccgagtgctcgcccaccgatgagccgccgccgcccgcgcccgggtgcaggtgcgccgccgccgcgtgcaggccgcccgcgtgtgcatgtccgtgtgcgtgtccgtgggcgcccagatgcggcggcggcgacggctccagctgcgcctcgtggccatcctcgtgcagcgcgtggtgcaggcccggccccgcgccgccaccgcccgccgccagcatcccggccaggccgccgccgccgccccccgggtaggccgcctgcgcgtacagcccgagcggctggggctggtggcccccgctggccccgggcgagggcgacatggccgggcccaagtggtgcgctgtgctgccctgcgcccatgccgcgcccgcgtgggccgccccctggtgcaccaggcgcgcgtggaaacctccgccgccgccgccgtcgtcggctcggccggtgccgccgccgcctgccttgccgtgttctaggtgcgggccgccggcccaatcgccgccgccgcctcctcccgtgggtagccactgggggtgcgctaggcccacggggtggcccgcgcccgcgcccagccactcgtggtgcatcagcttctgcacttcgcggtacgcggcccctgcatgcaatcgctccgcggccgccgccgccgccgccgccgccgcggcgtccgggtgcataagcggcccggtgcccccggctccgccaccggggccccgcggcaggtactgcgcggtggtggccatgccgccccgcgccctgcgccgcgccgccgccgccgctccgctccgtctgcgggccccgccgcctc

SEQ ID NO: 34084 - DNA, 856 bp, Homo sapiens; identical to SEQ ID NO: 16230
  chr1:43888937-43889793
  hypo

SEQ ID NO: 34085 - DNA, 542 bp, Homo sapiens; identical to SEQ ID NO: 26104
  chr1:44726788-44727330
  hypo

SEQ ID NO: 34086 - DNA, 593 bp, Homo sapiens; identical to SEQ ID NO: 24857
  chr1:46951168-46951761
  hyper

SEQ ID NO: 34087 - DNA, 957 bp, Homo sapiens; identical to SEQ ID NO: 24858
  chr1:46956469-46957426
  hyper

SEQ ID NO: 34088 - DNA, 326 bp, Homo sapiens
  chr1:4712686-4713012
  hyper
cgacacggtccggtccggagcccctccctgccctgctggctcctagtgtgcgaagccggccccttccaggcccactccggttgcaggaagggcctccctggtgcagcaccgcctcctcacaccgctaggtggcagcactgccggcgcctccttccccgccggccgccataggccccgctggttccaggacctccctgcctccttcgcctcttaatgggatccgctccctcacacccctcagggagaggctctaggggacgatgacccaggggcggcccggcagggaaactgctgagtcaccctgctgcctctcgggtcctctgacc

SEQ ID NO: 34089 - DNA, 2352 bp, Homo sapiens
  chr1:4714352-4716704
  binary
cggcggcgcccggcggtccaatcctagcctgcggcctctctcgagcctttcgcaaggtggggaccgggacgcgaccggggatggggaagggggctgcaggaggccccgcctgcgctgtcgcccctgctgggcacagcgccccccaccacccgcggcgaccccggcccccgcaaggtggggcggcgagcaggagccggggccaggccaggggctcgagctcccgttcgaggggcggggaaggcgggtgacgtgagccgggccgggcgggcggagttgggaccggctccgggaggcgggggcgagcgcgcggagaggcagacgcgaggagggaggcggctgagcagcgcgggcggctctgcggcgggcgcggtgggcgcgggcggcggggccccgggatccccgcgcgcctcctccgcgcggcgccgccgccgcgcgtccccacgccccgcgctccacggcgccctcgccccgcgcgcctctcgtgcccgcctcctgccagtctccgggccgcggccgtctgcagagcgagcgctcagacggagcccccgggcaacttgagtggcgccgatcggcggcggagcctctggcagagccccccgacccggcagcgcggaggggactcgcgtccgtccgcgtcgcgtcaccccaaaccctaagcagcgccgccccatcggcgcggagctccggctggaggcaagagccgcgcgccgggagacacgcaccgtgagcggcagcgccgccggcctccctcctcgccgccccggagggcgaagccgcggctccccagccctttgctgcgccgcgacagcgccggaacacgccccgcctcgctgccgccttcgctgtgccgccggcggagggggccgcgagccccgcgccccggccggaggatgtgcgcccccgcgggccgcccagcctgagccatgcgccccaacggcggcggcgcgccggccggcatggagccccgcgcggccgcgctctgactcgctgtgcgccccgcggccggcgggcggcgggaggcggcggaccgagagccggagaccggcgccgcgggacggaagcgagcgggcgcgggcgccgcgcagatggcctgggcgagccaggtctgaggccccgctccccgaaacgtgaccatgtggattcaacagcttttaggactcaggtgagcgacccggccggcgccgggtgcgtgtgggcgcgtgggtgccaggctgggcggaagcggcgctttcctctatgttgcaaatcaagggacccctcttcgcttcccgcaagcgggcaacggggtgcaccggtagccggaaaggggcgcccgcccggagcctggagcagcaccgcggccctggcggggagcggccgggtctccagggttccgcgcgtccggggtcggggcagcggcgcccgccccagcaacccgggaagtggggccggccaggcgcgcccgcagctctaggagccagcagcgcagtgtcctggccggctgccccggcgcgcctcctccccggggcccggggcgaggcgccggccgctgggcgcggcgggcgcgggggccggggctgccggggaaagctaaagctccgggctcccagcgagagcttcgcaggcggagttggaggaaaccacagccaaacagccactccgctcccccttctcctttctcggggccccggggctgagcaggggcctcccaggctcccagctgccgacccagctgtttgcgggtgacctccgggcccgacgggcgctcacagctggcgggcagctggggcgggagagctggggttcttggggagctccggcggccaccccgctgtaaacacacacgcacatacgcccgccggcgcgcccggggcttgtctgtgtctgggactccagggccagatggaagagggggttcgagcctagagcccgtggtgggggtgtccagaaagacccttctcggcaaactttgccagcccgccggggttctcgggcttctctggcttctgcctggggtggcccagggcccaccagagcacagctgtcgtttttgctgggcaggctgcctctgagccctcgccctcctgccggggcattcaccgagctcgtgcatttgggtcccgggttggaaccgcgagcggggaggacagaggtggaggcggagagcagcgtgcggttctcgagtttgtccactgggatgcactgcgctcccgcgttggggacgaaaaggccagtagttgttagcccgctgcttgagccgcccccactcagggatgaagctgcggggggagtgaggcgaagggagggaggatctagtgcgtgtcctgattttgagaaatcggaaggggactgggacgccaagtgttttctagc

SEQ ID NO: 34090 - DNA, 1494 bp, Homo sapiens
  chr1:50889097-50890591
  hyper
cgctgccagactctcaatgagccgctcgcccgctctattgttggtccttagggctccattagacagaattggacaacaatgtggcgcctgccattggccaggggaggcagacggcgctctgattggccgggcccgcgcccggggagccccgcattctgcagtgtccgaaagattcgaaactccaaaagctccactgcgtgcctctgggaggggagggggcgcgccaggaaaggagtggaaaaaagtgggcgaggaggagcgttgaaaatttcctgacaagtagtttccgtgcgcccgagagcgtgtgaattgctcctaattaccgtgtccggtgcgcctctctgcgtagacttgtgtaacctctcggcttctggggcgccggctcggctgcaccgctcttactggcctggggcgcttggcaaagccgagcttcccaagtggctctggagccctgaggcgggatggggggcaggtgacaattcaattactgcggtcggggtaggggcgggacaagggtgcgggggtggggaagggagggtgttcaaggcataaatgccaggacgatttttcctgccttcttcctgctatgtttcggcgcgctcccaaatccgacgagtttggggtagttgggggctgctttggttttttcctcctgtctccttaaagctcagttactttattttaaaagtcctgatacgatagtcatcctggagggtaagtgtggtttatgaagattttcgtgtttaaagagaagctcagcgaagagaaatgagattgcacttcctgtcggtgcccgccacgtccctcgcgccctgagcctttcctctccccgcccctcttttcgcgtccctcagccccttttgagctctcttttcctcacttttcagcatctcgatttcttttccgtggtggtgggattctttttgtcgttattgcaaatgaacaaatagcccccccccctttttttttcttttctaaacgaaagtaaaaagtggcctctgtgtctccgcagattctcttaaactcaggacgcgcatcggtctgtccgaccttcccggcaagagacaaagtcactgctgggaggccccctcggacagttttcagttttaactttcgccttattctcgtcttgtcttgatgtcacggccctgaggaacagctcgttctgcagaagaggtaacaggtttcagattttgtttcctttttgaaaggctgttgcctttcaaacatctggaattaatgccgcggccctcgggcgagtcgccctcggtttctgtagctctgattttatctctgtgtcttttcccctctaatttctaaagttctgtttttccctctaattctgtttttccctctaatttctaatgttctgtcactctcgtttttgttctctacttttctctctctccttcagaataaagaaaattcgtttaaataatgaggaaaatgagcgttcctgtcgttctccctccactcttgaccgtgcgtctctgc

SEQ ID NO: 34091 - DNA, 678 bp, Homo sapiens; identical to SEQ ID NO: 27450
  chr1:53098674-53099352
  binary

SEQ ID NO: 34092 - DNA, 978 bp, Homo sapiens; identical to SEQ ID NO: 27451
  chr1:53308283-53309261
  binary

SEQ ID NO: 34093 - DNA, 362 bp, Homo sapiens; identical to SEQ ID NO: 16233
  chr1:6333795-6334157
  hypo

SEQ ID NO: 34094 - DNA, 995 bp, Homo sapiens; identical to SEQ ID NO: 26120
  chr1:63788576-63789571
  binary

SEQ ID NO: 34095 - DNA, 776 bp, Homo sapiens; identical to SEQ ID NO: 23006
  chr1:63795363-63796139
  hyper

SEQ ID NO: 34096 - DNA, 349 bp, Homo sapiens; identical to SEQ ID NO: 23007
  chr1:67217980-67218329
  hyper

SEQ ID NO: 34097 - DNA, 1291 bp, Homo sapiens; identical to SEQ ID NO: 23009
  chr1:75600123-75601414
  hyper

SEQ ID NO: 34098 - DNA, 912 bp, Homo sapiens; identical to SEQ ID NO: 23012
  chr1:77333644-77334556
  hyper

SEQ ID NO: 34099 - DNA, 993 bp, Homo sapiens
  chr1:91182654-91183647
  binary
cggaaatctccattcatcatgcctgggctgcctgaactggcactggacaaaatcgtgtctattccaaaactcgacccgctggccccttccattgtcattgctacatgaggtccacgccactccgccgttcagcagccgccccgaaccagcgaagaaagctatcgatcgtaaaacaaaataaacaccaaacaatgttgccgccgcttaaaaaaaaaaaagtggggcggggagagaaggaagggtaattgggaagtggcaatctgtggatactttcgacacaactttttttcttttatgcaaaaagtaggggtggaaagaaaaaagatgcggggggcggggggagttaaaaaaatttctgagaaaactcggaacttgcgctccaggaacgactgcgcacgtggcgcggcggtggcggcgcggaggacccaggcgaaggcgaaggcgaaggcgaaggcgcaggcgaaggcgaaggcgcaggcggcgggaagctacgccaaagccgccgccgccgccgctgccggggtctgcccacagcctggcaccgggcggcagcggtggcggcggcggacgcggcaggtgcagcgaccgcgaagcccgggcggccgcgcgccctcggaactcccccgcggctcccgaggtggcagccgcgcgccactcggcagccccgtagccgagtttctgaactttcttggaaagttgcggggcagacacggccgcagcggttgcggcaacccgaggaggaggaggaagaggaggacgacgagaaggagcaggcacagaaggaggaagcggcggagacgcgatgccgggcgactccggccgctgccgggcgcgttcgcttgtaatccggctgctggcgggcggcgccgaccccctcccgtgacgtcacggccactaccgccgctccccgcgccgcgccgcgccgggcccgcgcccccgccaccgaggccgcgcgtccggccccgcgcccctattggccgcgcccgcgcgagc

SEQ ID NO: 34100 - DNA, 826 bp, Homo sapiens
  chr1:91185156-91185982
  hyper
cgagagaacagcggggattgaagggacggaggcaaggagatgcacaatccgggcagctctcgctcttctcggaaggcgaagggagtttggcggagaagacggggttggtgagccgaggcggggactccggacgtgctccatcccggcaggggccgacagtggccagaggggtgcggggaggccctcgggaacgggtgactgggccccgccgggtggggtcgggccactgtaggctggagcggggttggatcaaatgcctttggcgcgggaactgagtgctggcccgggagaccctccggagagctcgcgggctcggcctcggcctcggcctcggccttcggccgcggttaccgaaacacagacggtagacttgtggaggtggcttatccgaggccgcagggcccgacgctgcacagcttcgcagcctaaatatcctgcgcctctgtcacagttgaccgctgtggggaggacaggaagggctctagggctgcccgagactgcaggctgaccctacctactctaccctcttcaaatatcgattagggttcttcccattccaacatcatcatccaccaacttcccgaatatggtgcgttttctcctagccctgggaggttccaactcgaactcccctcgctgcatattcagggtgggaagtagggagggggagaaaacaaatttaaaatccagaactgacggcactgcacaaatcaattattctcgaccttgataaataattcatttaagcctgtttttgttttgttccgacgcctaaaatgactcaagagctcaaaaggctgatcgcacagcttgtgttgggcggttc

SEQ ID NO: 34101 - DNA, 967 bp, Homo sapiens; identical to SEQ ID NO: 30865
  chr1:92948641-92949608
  hyper

SEQ ID NO: 34102 - DNA, 1351 bp, Homo sapiens; identical to SEQ ID NO: 26139
  chr1:9711649-9713000
  binary

SEQ ID NO: 34103 - DNA, 1351 bp, Homo sapiens; identical to SEQ ID NO: 23016
  chr10:100993468-100994819
  hyper

SEQ ID NO: 34104 - DNA, 1327 bp, Homo sapiens; identical to SEQ ID NO: 30873
  chr10:101292301-101293628
  hyper

SEQ ID NO: 34105 - DNA, 439 bp, Homo sapiens; identical to SEQ ID NO: 22754
  chr10:102430697-102431136
  binary

SEQ ID NO: 34106 - DNA, 768 bp, Homo sapiens
  chr10:102475189-102475957
  hyper
cgtggagaagggcagagacagagaccaacgaagtggggtcgggtagaaagaggcggatataaaggcaggccagagagagtgaatggccgcgtcagccgcaaagaggcccagacagatggacgcaggcaggaagacggacaggagagagagagagacaacgtgcgcccgaggctgaagagctgggtcaagaagagattcggcttccgggagcaggggcgtccgggagggactgcccagggcgccccgctgcccgaagcccagccccgccccagccgccgccggcgccgtctgtcggcagccgccctgggcctaggccgcagggtccacaggcggccctgacaggcggcggcggcggtgagggaagccggagcgagaggcagcggagccgcgtgtgtgtttttattattattatttctgattaaagaggaattcatctcgtatctgcctcctgccaggggccgaggctccgccattggggttaacggtgcggaagaatacaaaaaaatttcattgaggaggattataaaagttactagctggaacattaacagaagagtaacttgtaaaaaatgcaatattacaatattcacaaggacggcagagcgtggtaaagctataaaattcaacattaaaaccttccacagcctagataacctagttaacaaacatgggattggaactacttttctgtggagacaggaatacgcgccggggctggtcacacctcttccgcgggaggggcggggtcggcggccacggcctagccgc

SEQ ID NO: 34107 - DNA, 641 bp, Homo sapiens; identical to SEQ ID NO: 29663
  chr10:102497154-102497795
  hyper

SEQ ID NO: 34108 - DNA, 1261 bp, Homo sapiens; identical to SEQ ID NO: 23752
  chr10:102899421-102900682
  hyper

SEQ ID NO: 34109 - DNA, 738 bp, Homo sapiens; identical to SEQ ID NO: 28396
  chr10:102995986-102996724
  hyper

SEQ ID NO: 34110 - DNA, 773 bp, Homo sapiens; identical to SEQ ID NO: 26144
  chr10:102996797-102997570
  hyper

SEQ ID NO: 34111 - DNA, 570 bp, Homo sapiens; identical to SEQ ID NO: 24893
  chr10:103043865-103044435
  hyper

SEQ ID NO: 34112 - DNA, 273 bp, Homo sapiens; identical to SEQ ID NO: 29669
  chr10:105344345-105344618
  hyper

SEQ ID NO: 34113 - DNA, 991 bp, Homo sapiens; identical to SEQ ID NO: 23020
  chr10:106401820-106402811
  hyper

SEQ ID NO: 34114 - DNA, 417 bp, Homo sapiens
  chr10:110225927-110226344
  hyper
cgcggtggcgcgcccccatctcccgctgaaacccagaactttcggttcagcagggctgggaagcagccgccggcgcccacttttcccaccgcgggggcggagaacagcagagaggggtcccagaccgaaggtggcagcgcgtggctctgcgctggcggctgtggggggcaggcgctcaggaccccaattccctccaagttgggccgcggtgggggcgggtggaggtggcgccgggcagctggcggccgctcgctggggctgggtttgtgccgagcgcgagtctggaaggagcgagccgcagccgcgcgggggtggagccgaactgaagtcactggctgagcaggcacgggcgctggcgggcacgcgggaaggagggcggccgatgccaggtctccgggcgctggaggcgccgccggc

SEQ ID NO: 34115 - DNA, 1451 bp, Homo sapiens
  chr10:11059337-11060788
  binary
cgtgcagagacaggtttgtcttccttagggcactgcgataagtccctaaatgtcacttgggtcatagatctgatctttattttgcctaaacctcctatatcctttcggtgatcgcccttagttcctgcccgggcaagcacaccacaccgaggagcatcgaagcgaaccctcgggctgctcgcctcccgcggctgggctctgggagcgcggctcgggtatggaagtggagcgggctttggcgcctgggtggccctaaacctactccgagcggccacggcggcctcttgccagggacccccgggcgggggagcagagccaggcggggagcgggtttgccttcgggggcccaggggaccctgagaagtctggccgtgcccgggcggtgagcgcggaggcggcccgccctgtgtccccgcggggcggagccgggttcggggccgcgctctgggccggcgggcccgcaggggttaagcggcggcgggcgccccgcgagctccgcccccgcccgccgcacctggcgctcggcagccggccgccccggcgctggatttcggaggggattggcggagcgcgaggagagaatgtgacaagtgccggctcggcggccgccgggggaggccgcgcgcacctgtccctgcccgtctcgcgccgcccgcggccgctcggacgcgcgcagagccgccccccgccgctgccgccgcgtgcgcccgcgaacatgacttctgccttcaagctggatttcctcccggacatgatggtcgagggccgcctgctcgttcctgacagaatgtgagtggcgccgcgtcccgaggccgggcgagcgggcgtcctcctcccagagtcggcggcgcgaaggggacgggcgtcgcccgcagctcccgggcgcgactcggccgcttcggatccgtcgcctccctcggccttcggaggccggcacgggacgcgggaggagggagcgggtgcggacgagcagcgccggcggtgcagggcgcggggcttcccggagggacgagcggagcgcggcgtcccggggaccgggcggggtccgcgagtccgggtgaggaccagcgggccgagcgcggcgtcccgggtccccgcggggtgagtgggggacgggcggggtccaccgaccggcgcgaggacccgcgagcagggtgagcggggcgcggcgtcccggggtccgggcggggtccatgagtccaagtgggaccggcgagccgggcgcggagtcccggggtccggtggggcgggcggggaccgggcggggtctgggggtccgggtgaggactgagcggagcgcggcgtgacggggaccgggcggggaccggcgagcgggcacggggtccgggcggggtgcgcgcgtgcgagtgtgcacgcttgtgtcatttgaaatgcggggctgacggagctctggtggccggggggaaagagctcttcttaccaaattaccc

SEQ ID NO: 34116 - DNA, 811 bp, Homo sapiens
  chr10:110671608-110672419
  hyper
cgcttcagctactccgttaggaggcgggcagttttgtctgtgtcttactccttccgtccagggcattccgcagactcctgctcccttcttcctctccacttgctctcaatagagggcgcgctgggcgaagtaggggcgtggcaggagccccgctccgcggatccaggttgaaattcctccctcctggaatccgaccgtgagcatttctgagcggtggtgaggaggaggccaccaagacacctccctcccgctgtgcaaaggaacgcaggagcccggcgcaggtggtgggcttaccgcgcgcacgcctggctggagaggtgacgccgctgtctgccaacctttcccagcttttcccacgattggagccaagagaggtccccggggatctcagttgggcaattgtaagggaaggagctcaggacactgacttcaagatgaagggggaggtcagcgaagacagttctagggtgggcggcggccgctgacagagcaggagccacagccaccggggcttggagataggagcaagtcgcaggcggagggggctgcgggctggctgcctgggcagcacaggacttgagggagctgcggggactcctggagtctcatcaggccttccagtcgctgtggggaccccggctgcgcgcggatcgcctgcgccactgtccccactgacccgcccgccgggtttgccaattaccagcgccacctggtcccgcacccaaccccacattttctctgtcaagggcttgtttccagggctccaggaactttcaaaatgttattggtgtgtgtcgggggggtggggggc

SEQ ID NO: 34117 - DNA, 792 bp, Homo sapiens; identical to SEQ ID NO: 27462
  chr10:11207098-11207890
  hyper

SEQ ID NO: 34118 - DNA, 1260 bp, Homo sapiens; identical to SEQ ID NO: 24898
  chr10:118890928-118892188
  hyper

SEQ ID NO: 34119 - DNA, 1263 bp, Homo sapiens
  chr10:118893223-118894486
  hyper
cggggtcagggcatcaggttgactaactcgggcatttttcccaattctttggatcgctcctggattcagaaggaagttgggggttggggaggaatctcagaggaaaggtagtagaaaaaaaaaatagcccgaatgagatgaaattggtagcagagtctagtgggaaaggagagctgtcagaggcctggtgggagccaggagcccagcgcaggagctctgggcacctaatgcgcgtgagtccataaatatcaccacaatagatactataaatataaatacagggaaacacttaaaatcagtccagcgcttttttctcggccccttctttattgttggtccgggagtaaggctcgaaggccgaggagctcagatatcgggcggagagttcttgcaaattcccagctagcgaaccagccattgttaacggggcggaggacaggcggctggcgacggagccgagcagcgagggcaccggcaggctgaagaggctgtggcccgcggccggggcgcctgcgtgcaatccccccggcccggcgggcccgggacctggagcaccgcccacagccggcgggtgcggggatgcagcgcccgctgggcccggggcggcggcggcggctgcggcggccgagcctgcagcggcgcccgcgcccagggccggcaagctgggcccgcgcagcgctgagccgagagcgcccgtggcgcaaggcggcagcagcgcaggcaggccgggcggcgacaacaggcggccctgctccagcagccgtagcacgctgcacgtggccgcggtctccgacaccaccgagcgtagctccgagtccttgccctggtccttcttctgcttggtgcgccggttctggaaccagaccttcacctgcgcgccggggtgcggggagagttggagagaggggcagggaagaccagcgtcaaaggaagcgagctcccggggcgcgcggctccggggctctccccaagtcccagccctatccgcagccccacccagcagccggaggggtccgggccggggcgctgctgggggagctggcgccgccacgagggggacacagctgctccaccgggctgcgcttccgggtcagggaagcaggcccaggcaggcgccgcttacacagaacaaagtaataaaatgcccacggcaggaactcgaaggaagaccggaaagggtttcactggcttccgcgctaccccgcagcggtgtttggggctcacagatgtgtgaatcagtgcagtcccaaagccggaatttcc

SEQ ID NO: 34120 - DNA, 751 bp, Homo sapiens; identical to SEQ ID NO: 30889
  chr10:119300904-119301655
  hyper

SEQ ID NO: 34121 - DNA, 259 bp, Homo sapiens; identical to SEQ ID NO: 30890
  chr10:119806965-119807224
  hypo

SEQ ID NO: 34122 - DNA, 998 bp, Homo sapiens; identical to SEQ ID NO: 30895
  chr10:124910216-124911214
  hyper

SEQ ID NO: 34123 - DNA, 229 bp, Homo sapiens; identical to SEQ ID NO: 16246
  chr10:126696804-126697033
  hypo

SEQ ID NO: 34124 - DNA, 1439 bp, Homo sapiens
  chr10:128076009-128077448
  hyper
cgactgacagctagggagtgacctggaagccaggaagaggggcagagaggaaactaaagaagtaggtaagagagtcagtttatgaaaatagagcctgctgtggagagcagcaggcacacctgcggaggagggggctgcctcacctgcggggccgctgcgcgcccccctaagtgtgttagcgggggaggcggggctggaaaggaaacctggtgaagggctggcccggagcctggggtggggatattcactgcgggatagggccagcaagaggacccgacacgcatcgtcccgagtgacacgtgtaaatgtcaagatacagagacatctgcaaatgtcacccaagagggtgaggacgggggagcggtcccgaggctgtgccctccggggcaggtactggctcctgtggggctgcgggccaagtgtcgcccttccccaaggaattggcacctggggggggggggtcggtctcgccgcgctggaagcgcaagccccggggctccggagatgcgccggggcgcgtcgcccctcggggcagccctggacctcggcgcgcccaggcgcagcgtgcggtgccctcggcggggcgggcagcgagccgccctagttcggcgacttacctcgggcctcgcagggcgcgagcagagcaccggccagggcgagcaggagggcgcgggcgggggacacgggcagcgggcgcgctgccatcgtcgccggccttcagtgcagcagctctcgggcccggcggcgagcgctgcaccatcccacgcgggcgccgagccggggccgggcgtcgcgaccggagggatttcctgcctcggcgagtcagctccggagccctcgcgcagcgcccgcgccgccgctgagctcttctagcctttcatttttaaaaaagtttccccccgtgtgtgtgcgtgcgtgcgcgcgcgcgcgccgttctggcacaagccagccttgaccgttgcaataaatgagcaaactgtccgagttggcccggggactaggaagagcgttagtgagagaaggcaggcctgtgaaatggatccacggccagcagtcaccgttcttattaccgcggaacaaattattgtctcccccgcacccccgccagttggcggcgtcccgcgggtcctagagaccgctcgggtccccccgccagggtcccgccccgagccgcggctcgctcacccccgagggtgggcggctcagacgtggctcagtggcgtccgggcgcccggagcgcacacgtccccgccccaggatgatgtggccgcagggcccggggcgcccggctgccaagcgcacatgcggcggcacggtccagcttttcaggctgaagctggaaacgatgactctgctactcgctccccggctctctgggaaccctcggagtgcgggtcaggtctccaccgcggcccacagcccggcgcgcgaccccgccc

SEQ ID NO: 34125 - DNA, 256 bp, Homo sapiens
  chr10:131348408-131348664
  hypo
cgtacagttgagcgacattagttggtgccatctgtgagtgcacagtgcagcaactttagggggttcacaatgttccgcagccatcaccgccgcccagcactggcatgtttcacagtgttccgcagccatcaccgccacccagcaccggcatgtttcacagtgttccgcagccaccaccgccgcccagcaccggcatgtttcacagtgttccgcagccaccaccgccacccagcaccggaatgtttcacagtgttcc

SEQ ID NO: 34126 - DNA, 992 bp, Homo sapiens
  chr10:131769014-131770006
  binary
cgctcttggacagaaatgtgtcaagctctcctcccttccagcctgcataaaccctttcgcgcacattcgcgcgacttctaagggatccaagccagcggactgggtccagcagcgcgcggcggcgggacgcacccctcctctccccccaggaaggcgggtgcacgccggggctggaagggggagggtgcacctctggctacaaattcggccgcgaagagattctttaccaactctaagggtttgctgaatgtacagaccagaatgagtcccgttaaaaggaagctattcccacattaaacatgtgtgttttccatactaatggagtcacttaaagctgttgctaatttaactttttaaaaaggccacactgtggaaatttgcattttctttaggacattgaaatgaagagaaaactgctgggcggcaaggcggcccagggcatagctaggggccatgtagaaataaaaacagataaagaaaagaagaaagaaagaaaccggcttctcttctagactattaataagcaatttgtcccgctgaaatttacattgcaaagcggagggcgccggcagccgtggcggcgggcctggcgcgggctccgggggtgcgtcggcgcgggggcggggggggtcctccggccatccgggccgccctcgggggcgatccaccggcggctttgaactcggtgtccttgccgccgtgccgccgaccctcgcccgcacacgcgcgcatctgcacgccagggccccgcctgggctgcgcacccggaggccgggactggcgctgcgctagcgccacccgggctgagctgcagccttttgtggggggggcgggaatccctccgctcccagtgacgccttggactcgcggacccccatccgccccaaacgactgcccaggccttaaattaaaaatggcaacaataagcttaatttttttttcctccttagccgcgccgccccggtccaagtctaccgcaagcgtggagcccc

SEQ ID NO: 34127 - DNA, 956 bp, Homo sapiens
  chr10:133110114-133111070
  binary
cgccggaccccgccccgccctcgcgctccccggccctggccggggtctcctccccgctgcgcccctggacccgggcggccgcggaggacgtgggtgggagagggccgagggcgcgcccggctgggctcccgccgatgccggccccctggtggcctctggccctctgggacccagcgcaccgcgagggaggctccgggctccgcactcaagggcaagcggaagccgaggtggcggcgccggagccaggcatgtcccgctgcccagcgcggggctgagggcgcagacggggaccgcgcgagccgctctctacctggcctcctcggagtccagggcgcggagggtactgggctgcggatccggcgcaggcggccccggacgctgctaggcgcgggcggatttctgttgcacaaatgggccaaacaggttcgtaaggcccccgcgggtcccctggcccggaagttgagccgcgggtgcctggtctgaagttccgcgccccacagtggcccgcgggcctcggcggctcctgccctacgccctccaaggcaccaggcaggtggccccagggcctttgcccacgacaccccctgggtggggcaggaccacccctctgtgaattcgtcctggatgcccccaggcacagtctgtactcctccctcccccagcacacgcggcctctgacgctgcacgccgagcttcctgggacccaggacgaaccgggctccaaggaccctcgctccgcccggaccacacgcaggcagcgccggccgagccgagcctgggtccgcactggccacgcgcagccaccgccagacggcgctagccctcccccgctgtagaccctgcttcggaggccgccagcctcctccccatcccgggtccacagcttcagtgcagcccctggcgacgcgcgctgacagctgggcagagacttccgtgcgctgtaaaccccttaggtc

SEQ ID NO: 34128 - DNA, 1559 bp, Homo sapiens
  chr10:133794742-133796301
  binary
cgctgtaaccccctcccatctccgcgttcacccttgaggaaatcctaacagtcaccatggatataaacattaataacaaaattaaagctcataacaggccacttgccacgccttggtgtttggtcattaaaaccaatactggtctgaactacagaccgcggagggcaacgtggactttgaggctgttcggtccaactgcgagacgcagattcacctccaggtggaattctagctcgcgcggagctggagaatcggggctttcccgtgcggtccgacccgggtccaagccaacccccgcccgagtggcgaggccgcgaaccccgggcagtacgcggggtccccacgccccgggctccgcatgcccgcaggaggggtgggtacggaaggggaggatggcgcagcctcgcccggcccgcgatgccccctaggcctccccggcaacctccccttggcgccctcttggccttccccaggcttcccccccgcgccccctcggctcccgcgccgcctcctccgcctcaccctgcaggctctcctcctgcatcccgggcgctccgttctgcgacatggcgccagagggcaactgcggcgatcggagtccgcgccgggctgcgggatgtgcttcagctgcgggcggtgggaaagcggaggtcggagcgccgcggcccagctgcgctcccggactgagcggagccccgcagcccggccggaggaactcacagggcagggcggggccgggcggatctgcggccgcgtcgcccattggccgcgacttggggcctgcgcgtgcgcaggggcgtggggtgcgtgtggcacgtgcggcgcgtgcgcggggcgggtcctgcggtgggcgaggggcagaggcctgcggtgcgcgggacgcgggcggggagaggggcggggcgaggggcgcgcaggcgcgagggcggcagcgaccgcctgaggtgagccggcccgggctggacgccgcgggccgcgtgacgagtgggctgcgcggtcgccgccgcggcgggcggtgggccgggttctcctttgaaggggcggtgggaccggcggactctctgggcactggctaccacggagacgccgctacgcttcggggcggggcccgtctttccatcctgctagtggggaaactgaggcgcggggctggcggcgtccgtgcggggggcgtgaggacgtgcagggaagcggccgctgcggctccgagacggcccgtggggtcgggacctgcgcccggggcgggagctgcgagcggtgggccggagctgagcgtctcgggacgggaccgcgtccccgggtctttgcccgccccgccggggcgcccctgcgtgaacagcggggcccgttgtgtccggggcgtccgcccgcaggaagaagcggaggctcgagcagagtcgaaagagtctgcccgagggaggcgcggaccccaggggcccgggagaggcgcgccgtccgcctctgcggcaaggggcctccggggtgcaaacgcggtgtggggcgggcgtccccggggtgggacgccccgtccacggggcggagtggcgcttggtcgggcc

SEQ ID NO: 34129 - DNA, 527 bp, Homo sapiens; identical to SEQ ID NO: 23760
  chr10:133951484-133952011
  hypo

SEQ ID NO: 34130 - DNA, 381 bp, Homo sapiens; identical to SEQ ID NO: 16250
  chr10:134212590-134212971
  hypo

SEQ ID NO: 34131 - DNA, 1377 bp, Homo sapiens; identical to SEQ ID NO: 32458
  chr10:13933020-13934397
  binary

SEQ ID NO: 34132 - DNA, 1978 bp, Homo sapiens; identical to SEQ ID NO: 22756
  chr10:17270371-17272349
  binary

SEQ ID NO: 34133 - DNA, 842 bp, Homo sapiens
  chr10:17495988-17496830
  binary
cgaccccctcccccactccactctcaggccgtcgccgcccgtgggctgctccccgccgcggccaaaagtctccgcgcccgaggggaagcgatgggcggcttgggggtccgggggcgccaggcggggcgcgcggcgcggggcgcggccggcgggtgggtgggttacctggcgcggccgggcgcgtctgccgggcaccagagcaggcgcagcagcagcagcagcagcaggctggcgagcagggcgagcagtgcgccccccggccgcatcctgagccacaggcgccgccgccaccgctgctgccggggcgaagcacagcccgggcggccccgactcgcggctcccgccgccgccgccaccgccgccgtggccgcagccccgcgcacccacagcgttcacaggcggcagcgaggggcgcccgcagcccacccggcagagtctccgcggcgggcggagaagaagccgcgttcgggctcgccccgggctcccggccccggcccgcggagcgccgcgatcggctggcagatgacgattcgccgagctcgccgcctgtcctcccggaggcgctcggagctgctgcgggctccggtcgccgctgccactgctgctgccgccgccgccgcgcggggtcacctgaaggttggggcgcggaagctcaactccgtgctgattgggctccaagttttctgcgccctcgcctcgtcccgagtgcccgcgaatcccccggacgcccacgcagaccacccagccacaccacaactctgcctgcggagagaggagaggagaaaaaggggccgcttcaaaaactttcaaaactgtgcagtcgcttggctggatcctcccac

SEQ ID NO: 34134 - DNA, 1569 bp, Homo sapiens; identical to SEQ ID NO: 26159
  chr10:1778583-1780152
  hyper

SEQ ID NO: 34135 - DNA, 1263 bp, Homo sapiens; identical to SEQ ID NO: 22757
  chr10:18429033-18430296
  binary

SEQ ID NO: 34136 - DNA, 605 bp, Homo sapiens; identical to SEQ ID NO: 23767
  chr10:22517909-22518514
  hyper

SEQ ID NO: 34137 - DNA, 1786 bp, Homo sapiens; identical to SEQ ID NO: 23769
  chr10:22624349-22626135
  hyper

SEQ ID NO: 34138 - DNA, 773 bp, Homo sapiens; identical to SEQ ID NO: 22758
  chr10:22634000-22634773
  binary

SEQ ID NO: 34139 - DNA, 1368 bp, Homo sapiens; identical to SEQ ID NO: 23771
  chr10:22764575-22765943
  hyper

SEQ ID NO: 34140 - DNA, 1457 bp, Homo sapiens; identical to SEQ ID NO: 22759
  chr10:23461640-23463097
  binary

SEQ ID NO: 34141 - DNA, 818 bp, Homo sapiens
  chr10:26223265-26224083
  hyper
cgggacagcgcaggggactggcttggggcggcggtgggtagcggcgcccgcgcggcgctggaaacggccccgcttccttggaccccggggcttgcagggcgggcccggggctctctgagcgcgaggctgccgcgaccgcccgcccgcccaggtcagatccggaggacctgtgtgtttgtcggggcctggggtgagagaggggactcgaggggagaagtagagcgggaaaccaagagggggaatgtgaggcttgaacgagctggatgggagagctcgaggggaggagagggatgaacttgagggggaaacgggggcgggggtgaactcgagggggagccaggaggagggaacgggaagggtgaacctgaggggtggacttgagggaagatcttgtgggtgaacccgaggagggaacgcgaggggatagtgaggggggatctcgaggagggaacgtgaggaatgaacttgaggagggaacgggaggggtgaacgtgaagtggaaacaggaggagggaacgggaagggtggcgtaaggggtgaaggaagatctttaggggtgaacttgggaaggaaacgtaaggggaggacctcgaagagtaacgaggggcgagaactgagggggccctgcagggagactggagggaggaggcgccgagtctggcgggtgtcgcctcggagacctgtggcgcgcgcgggctttgcggcgccgcccacaggtggcgctgggtcggcccgtccctgagggaactgcgttccgggtgatttctcagaacaagcaggtcggtggagctgggctccctgcaaccccaaatgcatcc

SEQ ID NO: 34142 - DNA, 1310 bp, Homo sapiens; identical to SEQ ID NO: 26163
  chr10:31607954-31609264
  binary

SEQ ID NO: 34143 - DNA, 469 bp, Homo sapiens; identical to SEQ ID NO: 27485
  chr10:3160827-3161296
  hypo

SEQ ID NO: 34144 - DNA, 843 bp, Homo sapiens; identical to SEQ ID NO: 26166
  chr10:50606013-50606856
  binary

SEQ ID NO: 34145 - DNA, 989 bp, Homo sapiens; identical to SEQ ID NO: 29708
  chr10:50817510-50818499
  binary

SEQ ID NO: 34146 - DNA, 738 bp, Homo sapiens
  chr10:52177724-52178462
  binary
cgccgtagtagaattggcactgattgcggtattttaatcggttcacaccgtctgttagtgtattctaatgaaccacagcatctccggagcaacacttacggtctctcgtccccggaggcagtgtctcctggaaagttcctggggcaccaagtttgcgcgcggctcctcgcgctcagggtgcgcgcagccagccctggcgcgggcggaaaggcgagcgcgctgagcggcgcgcagaccccgggcgcggctcttgctgggcgcccgcgccttgatcggtcccggcggtcccgttcccctgcttgccgggccctggtgctaggacagcggcgctgcggagcccggcgtctggagctggcgggcggccggatgcgccgatcctctcccggggggtcaactgcgagctagacgcccagccggacctcagaggctccaagagcggggttggcgggtgtggcccggcagcagagggtttttggaatgcagggtgtggccctctaccacggcaaaaaagaaatgagtcagcccgttcagtcctaaccaataagcatgttcagtgtcggttaaggcggaactttcctttcttgatttataccaagcttagaagcctttcacagccttttctttacgcctttgacaacttcgacacaacttctagaaaagggtaggttgcctttgaaaacgcttgggaaacaaggattaatcttacgaaagatacttcagtggatgtacattagtttc

SEQ ID NO: 34147 - DNA, 277 bp, Homo sapiens; identical to SEQ ID NO: 16265
  chr10:5638918-5639195
  hypo

SEQ ID NO: 34148 - DNA, 552 bp, Homo sapiens; identical to SEQ ID NO: 23777
  chr10:5874790-5875342
  hypo

SEQ ID NO: 34149 - DNA, 1262 bp, Homo sapiens
  chr10:60935827-60937089
  hyper
cgcctcaggtaatccgctcatttctcacacagacgcagctgtttccgaggaatgtccggccgagcccgcagggtgcgggcagcgagtatcctgggaccttcaggggaggaggtggctcccacaccccaataccgtacagagagtccgaagagtccgggcccttatttttccaattcttggtaaacaacaaacatgctcgccctcgcctccccgtgcagacgcctcagggccaactcgggcttcgccaggcaccgagagcagacagaagacgccaaatggctatcaccaggagagagggcgaggcagccgcgcggcgtatagcgctcgcccttcccgcgcgctcggtcgcccgacgcctcacgcgcgaggttgccttggcagtggctggagggcaggtgggggcgcgtgcgcgcagaagggcgggggagggaccaccgcgcgccagcaggtgggcgcgttctcccgcgcgcgtgcgcgcgtcgaagccctatacatcacgttccccgagagcagcgtcccctccccgccgggagcgcgcgcctcccatcctcgcgccgggtcctgctcggtctctcagagccgcacactccgcggagctcctgccacagccgtcgccttcgcggcggctctccagccccgcgcctcagcctcggcgccgcatcaccgcgtcccaggcctccttccctccctctgccactccccctccctttcccgctcttcttgcccacccggccggcagagagagcctggatacgaagcaggcgggcttcagagtgggttggaaaaatggaggtgccgcgcctggatcatgccctcaacagccccaccagcccctgtgaggaggtgatcaaaaacctcagcctggaggccattcagctgtgcgaccgggacggtaagagcggccgggaccgcgaggaaagggacagagttcgcgccgaggcgccggggccactctggctccgccgacgccgctcgccagggcggcagggtcttttgttgtcccctctgtgcaaataaatgcagatgtgggttaccctccgcccaccgccctcccctcaccccagaaacaaaaggaccccggggctcgcgccttggcgcggaaagtagccgtccacaaccgtggcgcccttcgccgccttcgcccgcctggcccggacgagggcgacgttcccgctcgcggctcctgccccgacgaggcgtttccgatctttgccgcagtccggatttcctgggtctctgggcactgaaggggaaatgccctc

SEQ ID NO: 34150 - DNA, 470 bp, Homo sapiens; identical to SEQ ID NO: 27491
  chr10:64578291-64578761
  hyper

SEQ ID NO: 34151 - DNA, 134 bp, Homo sapiens; identical to SEQ ID NO: 16268
  chr10:73591528-73591662
  hypo

SEQ ID NO: 34152 - DNA, 773 bp, Homo sapiens
  chr10:7449896-7450669
  binary
cggtggtcggccgggctcctgcccagtctcggctcctccctcctccccaccagaaggaaaaacttgggcccttcgagaaccctgtggaatgttctttgtaatcaactgtacatccgcttccacggcacggcctcgtgcaaaatcgcgggtttcggggccttggagcaaattgcgcttgtcagcggcgacgtcaggaggacaaggggaggggttcgcggctgaaactgcagcttcgcagcacagagccattttaggctgctccccacctcgcggggcccatgggaaagccggccccgggagggcgcgcccaaacgcaggctggaggagccacggacgcgtcctggccggcgtgtcgccatcgttcagcctcgctgcccaggtgggaggggtcacctgccgcggggtctccaagccagtgccgcttgctcccggcccccacccactgacagcacggcgtccgagtgaccctgtctagcctcgttctgcgctcctgcaaaccacgttgctgcgctaactacaaacctggccaacatgtctttgtaaccctatcatttaaaaacgcttccaggcacctggccgctgccagatcaggttcgcgggcccggaggaggtcctcccacctgcccccgccagccccggggaccgtgcgcggcctccgtgtggcccccgcccacgaggtccctcgggcaggaaccgccgcgcgacctctgttcagcggccgcgtcctggccacgggcgacccctgtcgggaaccctgttcccggctaagctgc

SEQ ID NO: 34153 - DNA, 3982 bp, Homo sapiens
  chr10:7450674-7454656
  binary
cgcattccggtggctctcacccgagctcgcgtttgctggctttccctctggctcctctgcctgaccccgattttgtctccgaactccactcccagatcctccccgccctggaacgccgacctttcccccgcacttcgccgcccactcacatcccccggcgactgcccggcctccatgcccgccaagacaagaagatgcccctctccgatgcgccgagagggttcctaagccgagcaagggacaatttcttccccaaacgctgtccccatcccccaccttccctagagcgcgaaacccaaaagtaaggaaggcaacccctcgcctcgaccctacgtgcttgtctcccagagccgcgcgctcccgcccttctgccccaccccaccaccaccaccaccactttggtcttctccaagcttcggtcccggtcccccacctcccaccccagagcggcgtggaggaaagcaggagcccactattaagtgcagcgcgccccctgcacacacgaaatccggctggcgtctgcagcccgattgcacccaatacccgggacagttagtccttttaataagcacctcctcgccccacctactcggggatctacccgcgcaggatccagcacacacaaggcgagagctagctcgtctcctagaaagacaaaataaatcactccctctgccctcatgtactttacaccacgtgtccgcagtttgtcacgtcaaatcatggcagggtctggttccaagacgcacacacacattcggggtggttctctttgacacacacacccaaaaaaactgcgcacacgcaggcctgcacactaatccacaggcacacacgacagttgcgtttcggtgccctggtccgggccaggggcacttctccatccctttcccccctagcaatggacttgacacacagactctaaccacggaaaaaaaaaaccggacagcccattccttctttttttccccacttaattcgctaaagcgcttcctggggtagccaaagagagtcgaaactaaggggtggaaacttcagctgggttttttcccacctcaaaacctttattttcagtttttaaaagccaccttagcccgccatattgaaactggcacggtttctaaagactccttccccgcagttgtggcgcttccaagaaaacacgagtacggatcaggctctggatgagtgtccggccaccgagaatcagccacttcccaccctccaggatcccccagctccctccagccccttcccaccgcccctggtcaaaatcaataaatacatctcgcagttcctacagttgcattttggcggatttctgcaaaacatacacacacatacacatacccacgcacgcatattaaaaaataaactccagaaccagctcaagtcagcaattttgaaagggggtcgaataagaggagacaaccggaaagcccctaagtgacaggatattactttaaagagaaaataatgaacaaaaagaccatcctcgctggagcacgctccaaaactactactgccaattttatttcagttgctcaggcaaatgtttccaagggagcgattccgaatgtctgcacgatttttacccccatgccggtctccgattccccgtcctcaccatctttttctcccacccaaaccaaaagaaaggggagaccccagcgcggaggagacgcgggagcgcggggtaggtagcagcggcggctgcgtcgctaaaatgagtgcagaaacgaggaaggtgggcggcgggaggggacaggctgcgcccggggaaggaggacactttgcaactccggacggactcccgcacggctcggcttttccgagcccggagacgcaggcgaaggggacccgggaagcaaaaatgacaacctggagcgcacagaggagtttgaagcttcgctcaagtgcagtcgctttcttctcctgcccttctctttcgctcccctgcaccctccccagccttcccccacccgccacctccaaccccagctccctcaggcttccttcctttttttttttttccttttttttcctaggctggaaaaagcccctgaccagcgcactcaacctgcgggccgaagggctgctctccggccagcctgggcgccggggacagcagccggcgcggcgtcctacctggtgaagttcgtcctgccctcggcgtggacccaggccccggtcgccgcccgggagggcaccggcctcgctcgcttgctcgctcgcccgcccttgcccgctcgctccccgcccgccgcctccctcgcgcgcccgctccggtcctccggctcccactacagctcattccaatatggcatcctctctgtgcgcatgctcggcgctcttttttttttttttttttttttttttttaagattttgtgtgtgtgtgtatgtgtgtgcgtgcgcgtgcagcgaactccttcaacgaccttttccagcgcttgcaaaatttcttaagccaattagcctgcgggacgtgatcggctccttccccagccagctccgcgccattccctgcgcctaagcaggcgggcacccccaggaccctgggaccttccacgcccacgcggcctcctccccaccgcgctccccttcctcctttttgtgagctccctccatacatgatctgcagaaagttcccatcgcgggcgtttccgcacacccctccgcaaggacaactgggcaaactcccgtttccctggctgcggttcgtgagctgggtttccaatggctcagtcgaccgtgtgcacaaacttgcgctttatccgccggggatcgctgggagcggagataaattcaatccccagggcaatcttggccccgcccgccccaccccatcctgtgcttaaatagagcctttcttgaagctgcgaacatttccaggccccttgggcagggctggaggggccgaggagagctattcgagggaaaggtgccccgaggggcaggaaattaagttggggctgcccgggcgagctgccaggtagccgtgctcgccacggcgtctcatggggcacctagctagtggcgggcctcatagggcgggaaaagaatcgtcgctcacaccccagcaaaacgtggccctcgacggtccgttggagagccccggcggccgtgagccccgggcagggctggacgtctgcggagccctcgggcactttgtcccgggcgcctggggaggaacgcggagctcccagggccttaggtgcaacggctgcgcagagcccaaacgaaatgtccccagtgcggaaaagccggtgacgccctggtagcaagaccaagagcttccgaagaacgctgcgcccttaactagggggcctcgcagagatgcctgtgtgggcctgcattgtatatttctgcgaaatagcgaatggacacgtttgctcagggtttttatggttgccaaagggggtaaaattacccagtcccccaaatctgtgtcccatgaatccctctcatagtacccctctccagggggccaagaggtcctccaggtccccgtgggttcgcagctccacccgcccttcctcgccctgcatccctaaggagaggtgtccgctctgaagggctaggggccagccatggagtgaggggaccggggctgaccacgcgcggcacagacagaggtcctcaggcgggccctctcctggacggtggggccggagctgatctagaagaaatacggagggacgtgccgagaagccgctctccttcgccgcgaccctggagagcgcctctccacccaaaggatctgccgagctgagagatccagggcgggcgtccgcagccgtgaggccccctgcgccgccagtatgggaagatcctgcctccttacaccttggagaacgctgggcgacgactaaagcgccttccgccggcctgtcactccatgtgacacaggagccacgtgagacccagaagagtccagcgactcgccgcgcggcgcactttaaactctagcctgagtctgc

SEQ ID NO: 34154 - DNA, 1297 bp, Homo sapiens
  chr10:79396547-79397844
  binary
cgaactcatctccccaacaggttcctaaagtatgggcggatgtgctccctctcgcccaccgccaggagccgagccccggcaggtgagcggtgcaaaacacgcacccagctgcccccagcttcctccgtccccgctgagttggctgtccccaccccgcaccacggcacccgagcctgtgagtccccgaccccggccccagccgcagccgccaacaaccctacaataaacaagaggacaggattgagcgtccgcgtcccggagcgcactggctgggggcaactcctcacccccggcgcgccgcccgctgccccgatccgagagcaccgggagagccgagggaagggaaggcggcgaggggaaggcaggcggggatggagggaggcacggcgcggcgcggagcgaggaggtgggctgcaggggacgccgagaagcggtggggctggcgcagagggcgggcgcccggggcgcgcgttaccttcgtcttgcccccgcagtggcagcacacggtccacaggtacttgagcgtccgccagagcaagatgatgaagaggcccccgaagaaagtcaccatggaggaggccaggaaagcccaccacatgcgttggccccggctgtcgcacggcacctccatggtcaccgggatgatgagcgcatccatcttgggctcgtggaccgaggacgaggaggaagaggaggaggaagaagaagaagaggaagaggaggaggaggaggaggaggacgcgtctaggctgagatggttcgcgtggatattgctactcattctaagactgctgcctccgccgccgccgccgccgccgctgctgccgccgccgccgccgccaccatttgccatagctagcaacgggcagccggcgcaggggctcgggggagctcctcccgccgccagcgccaccccaaacacccatcaacagccatattgctgctactgctgccgccgccgccgccgccgcggagcgcgggaggggggcggggaggcgcctgggctcggggcgctgtgcgcgacctggcggggtgcgccgagatatatacagcgagccgccgccgcccgcccgggggggagggggatggagtgcgcgggcagctccccctccccggcccgcgccccgctcgccccgggctgcgctggccccgagcgccgagagccagggggcgccgcgggccgcccgcgcccggggtctgcgccgcccccgggcccgccccggctccgcgcgcggtcccgggtgtcctcggcgccgcgccgcccgccgtgcgccacgggtgtgcgctgcgctcggcc

SEQ ID NO: 34155 - DNA, 973 bp, Homo sapiens; identical to SEQ ID NO: 28431
  chr10:8095120-8096093
  hyper

SEQ ID NO: 34156 - DNA, 597 bp, Homo sapiens
  chr10:82116595-82117192
  hyper
cgcggtgggcagcgaagggggaacgcgcagcagagaggagagggcgtgcaggagtaggagcaggcggcagagtagagggggcgcggcagagtagagggggcgcggcagagtggagggggcgtgcaggagtaggagcccgccgcagagtagagggggcgcggcagagaggagggggcgtgcaggcgcggggcgcccggcagagagaaggggtcgtgcggaagggggcgcgcgccaggggagggggccagagaggagggggcgttcaggagtcgggcctgcggcagagatgaggcggtgtgcaggagggagagcgcgcacgagggggcaacgggcagagaggagagggaatgaaagaaggggagcgtggcagagagaagcgggcgcgctccagggggcggggtccagggaggagggggagcgtaggatcggggcgggaggcagagaggagcgggcacgcgggacgggcgtgtgctcgtgaggggtcgaggaaaggcgtatgtggaggcgcgcggggtgggtgagccgaggagacttgctacacagaaacctggaggagtaggggcacacaaaagagcaagggaccctgactggcagccc

SEQ ID NO: 34157 - DNA, 910 bp, Homo sapiens
  chr10:85954199-85955109
  hyper
cgccggcaaagggggcgtggcgggcggggagtcctcttgtcacgccctcctgcccccgcccgcggctgggagcctgtcgctccgctctgcgccgctaattggtctcgtcaggcggccggcaggagcagatccgagccgtgtcatcctcttagcgccctcacgccacccgccgctcccgccccgtgccccctcccgccgcggctgcagtcgccgctacccccattgtggtctctgccctccccgcgggcccagggcatgctccgtgcccctgcgcccggtctcggcggcggcaggcgacactccgcgccggcggagacatgaggcgctgccggtgggccgccctggccctggggctgctgcgcctctgcttgggtgagtggccgctgggccgcgctggccgcgtggatggcgagggagatgggcgctggcgtcacccaggtggccagagggacatggtcctggaccacttccagagtgggactcgggctggtggacgggagcggagaagtccttccatcttcctggcccattcggtagtggggagtggggtagcggagtagtggggagctccggggcgcttctccagagctggcatcctagggccccagggtttggcgcccggacccccgctgctctccgcttgctgggaaccagagctgtaggcttggtggcagctccgatgctgcgtggggcaggagatagtgccctgactcgcggcttgaccttggctgggctggggcactgcccctctccgagcgcgggtgcaatctgcccattgatgaaggaggggttggattgctacctgggttctaagcgcccacatgctacgtgtccctgacaagcccgagcccaccgggggcggagtgggggtcaggggcatcctctgggcggcgccccagtggggtccctc

SEQ ID NO: 34158 - DNA, 1305 bp, Homo sapiens
  chr10:90966883-90968188
  hyper
cgaagggcaggcaaaagcccacgtatgtggtgatggagaagatgaccgggaagaagggcgactgtaggagggcctcccagctcctcaggtggtcccagaggggctgcaggaacagctgcccggagctgcaaaggacctgggggtcggagcagttgtggcagctcattgcgaggctgtgcaaggcagctgaggctgctgctcgagtcccatcgacttttcacaggactcacggccccgccccgagtgatgtcagctgcctttccatccctttcccggcgatgcgaagcttgaataagctagcaacccggcagagtggcccttcattgctgtaaatgtgctcatctatagccgcatcttaccggcttttagatatgcgtgtatgcagtggcacttcgtacttttcatgtaagttctgatttttcagttgacgtacaattaacacgggacacaatgtacagatctaccgtgtggagtttctatgagtttggcaactcagttcacgtgtgtcatcacgggtctcaaactagaccgtttacattgccaccagaaagcgctcctttgcaatcaatgcagaattgtttgtgttttttaatgcatacgtataactgcatccatgtgctttcataaagacgcaagcataatcgcattttaaaaactgtttaaagctacatgcggtctgtagctcgggtgttttctgagaacccggttgcggtctatccagcggcgatcgagaaacgagccctttgcacagggaaccgctggtccccgaacgccggcggtgaccgtcagctcaggaaatcagacgggaagggtggccggatgggaacctccgccagctccagcttgtccccagagttttcctggccggcgggcagcaagctagagagaccacgcacgcaggctctccgggagaggccgcagcccggccgcgtagctaccctcggcggcgcgtcccggggcgccgggcccgcgatcggagccggaggcaccgcacagcggaaagagggctccgcggcggccaggctcagctttgccgggaaaatgctggatttaactcccagtctgcgccaatctggctaaaaagcccgttgtatctcaatttggggcgggaacacttaattcagcaaaccacctgcgttgttcgtcaagggaaagagatgtgagttcctgaagcctcccgggaggctattgaaggaccaggtgatgtcgtcactaccctacccttccccttgttggctttgcggggccaacttgcagtcgccctctgccaccggtccttgaatccactccgggcccacggagccc

SEQ ID NO: 34159 - DNA, 822 bp, Homo sapiens; identical to SEQ ID NO: 27494
  chr10:92616995-92617817
  binary

SEQ ID NO: 34160 - DNA, 976 bp, Homo sapiens
  chr11:100998184-100999160
  binary
cgggtagacctgcggcaggccctccttgagcacggcggcctggtagccgagctgcgggagcccgttgaggccgagtgcagggtagagcgcgggggccgccccggcggcggcggcagaggcggaggtggagggcaggccgtcccgcgggagcaggcagccgctcgcgcccggcgccttgcagggcggcggcgcgaacgggccctgctggggcggcgcgccctccgctttgtacaggatgcactccagggtcgaccccgaggaggacgcagacgagactgaggcactggcgggtgcggccgtcaccgccgcttccccgggtctggatggggtcgctcgcggcggcagcgggggcggtggccccaacgggaaatccgggaaggctgcggggttggcaccggccacaaggtaggaacgcggggagcgcgcggaggcctccgcgccttcctcctcctcctttatctttagagcgggcggctggaagtcgctatagagagggtacgcgtcgtccttgggctcggcgtcgggcgggtacgcgcagtcggggaagtcgcctacagcgaccggggtggacgaggcacagggtgaactccgcggcggggcaaaggcgctggcagccccggccccgccgtcgtaactttcgtcttccagcagctgccgagtgcgggctgccaataaggcgtgattgagaggcaggataggcacgtggatgaaatccatcaccgtggtggccagcggggagcgcccgggcgccatcggcgcgtcctgctccaccagggcgaccctgggcgctgagaagcgggaatcttccttggggaccagggcgacgcctcctgctgccgcccccggcgggacagccgcggctcctcctccagccgccgcgccacccagagcccgaggtttgcccttcagaagcggacccgcagactcctcggactcagagccatcctcctcctcaacctccaccgcagcggcctgc

SEQ ID NO: 34161 - DNA, 986 bp, Homo sapiens
  chr11:102962175-102963161
  hyper
cgatacgggagtaggggatcgagggtcggttgtggggtgggggtgggggtggggggaagcgcaatttacatatgcatctgttccccaccctgcagggcacgtagactcttaacgtgggcggctcttctagtctctccataaacgccagcgtgcacacactcgaacacgaggtcgggtcgggcgcggagactcgcggtgttcggcacctacagcctagctcgatcaaaggggcctcacctgtctccagccccagcccggcaggccgggcccgactccttttcctccagttgtccagcaaaggagggaggagggaagcttgaagggtggggggagatggtacctggagattttacactttttgaggcctccgtcttccgctactgctgctgccaccccaggggattttctcttcttcttcaccggcatcttccgccctccccggcagggtgggcaggggagccggggaagggggtccctgtccgctggaagcccctcagcgctggcacccagttcccagagacagcagcaagcggaggagcagagtcgccagcccgcaccggcgcggcccagcccggccgccgcccgctcccaggtatcctcgtcgtctttctctgaccgggacagggctggctcctcgccggtggacactgcggttcgttctcaccgggaggagataacgcggacagcgcggcagctccaccagtcacagcaagcaagaggctcagcctaacccggaggcgaatcgctgaggcccggaagtgacgcaatcgcggagccggtcccgggaaggggcgtggttccggttagcctctgccactcgtaggtaggccaggcagagcgaagctgtctgacccgtcgactgcggcagtccgcggaattcttgtatcctgtccagggtatcctgacctttctcatgaagcttctaccgcgctctgatgctggcagtcaccgccaaaaagtgaaactactaatactttgcagttgac

SEQ ID NO: 34162 - DNA, 185 bp, Homo sapiens
  chr11:10509608-10509793
  hypo
cgggatcatgtggatttaaagaaaagcctctgatatgctcagatctctgcctctcttctcccaccaaggggatggcagccttgtccggggctcctggcagtctccgcctgcaggggccgcaactgcggtaggagcgaaggttaaatgatcatggccctagcctttccattctcttttgctgaagc

SEQ ID NO: 34163 - DNA, 1408 bp, Homo sapiens; identical to SEQ ID NO: 29727
  chr11:106888298-106889706
  binary

SEQ ID NO: 34164 - DNA, 1240 bp, Homo sapiens; identical to SEQ ID NO: 26185
  chr11:107461663-107462903
  hyper

SEQ ID NO: 34165 - DNA, 1221 bp, Homo sapiens; identical to SEQ ID NO: 26186
  chr11:107798868-107800089
  binary

SEQ ID NO: 34166 - DNA, 233 bp, Homo sapiens; identical to SEQ ID NO: 33293
  chr11:113560972-113561205
  hypo

SEQ ID NO: 34167 - DNA, 961 bp, Homo sapiens; identical to SEQ ID NO: 22766
  chr11:115373363-115374324
  binary

SEQ ID NO: 34168 - DNA, 986 bp, Homo sapiens
  chr11:115630408-115631394
  binary
cgtccccttctccagcctcgcctccccaatgcgcttcccgcctctgcatcgccgccggccccttcacgcctctaccttgggcgggtttggggtaagggccgcgcagaccctaagggaaggcccgaggtcgccggagctcctcctctcgcggctgagtgagggtctgggaggccagatgaagggagctgctcggctgagctgcggaccagcgcgagagcagcgggcagtggcggaccagcgccagggcagggcaggggtggacagagggctctccccacccttccctcctccagtgaaagtaccagaagagatggcggccgctccgccgagtgtcattaccgcggaagcagcagaagccggcggcaggagcgggcccgagagcccgcggccagtggcctgcgcaccccgcgcccagcgcccccgccgcgggtcatcagtgtcagcgttgaggggtcccggggagcggttgcagggcggcggcggcggccgggtcatcagaagcacagtggagccgccccctgctttgggaggagcaaaagagcctctcgcttgcctcccgctcgagctccttctcctcttccttttcctagcgcttctctccctccctcggcggggtccgcagagacagctgggcaggcggaggctgcgcgcctctcgcacctccacgcccaccctcccgccgcccccccctcggcctgaaagatctgcgtccacaccaccctgcacccagggcccgtcaggttttgcagaagtttgctgagggtcctcacagggggtctcccaggggaaggggtggagggctggaggggccgcggtgggaagaggtggcagacgccgcctggcaacggagaccctaccctttctagaaattcagaacgcagagaaaccagtgcccagccctgctcttcagcaaacggtgtatttcagcccgagtttccttccgggggtttggctgtgagtgtgtgtgacctcccagatggcggcac

SEQ ID NO: 34169 - DNA, 125 bp, Homo sapiens
  chr11:119227104-119227229
  binary
cgtgcgggtggagatgggcgccggctcctccgcggcgcgggcgtccaggcggtgatgctcccagcgagctccagagggcgctgtcccctcggaggcgcgggcgctgcggcgggaagcggcgcagc

SEQ ID NO: 34170 - DNA, 79 bp, Homo sapiens; identical to SEQ ID NO: 16282
  chr11:119993701-119993780
  hypo

SEQ ID NO: 34171 - DNA, 150 bp, Homo sapiens; identical to SEQ ID NO: 23797
  chr11:120384000-120384150
  hypo

SEQ ID NO: 34172 - DNA, 939 bp, Homo sapiens; identical to SEQ ID NO: 22768
  chr11:123228638-123229577
  binary

SEQ ID NO: 34173 - DNA, 418 bp, Homo sapiens
  chr11:124630133-124630551
  hyper
cggaagtcaccaactggtccgtttttttcggtcccagggtccacggagccactgggagagaaaaggagtctggttgggtctgatcgaaggacactgggacagcccaagaaagggacccttccggcccacagccctctccgaggccagagtgagggagccggcaggggccgaaggagagcgaaatgggcccgctccccggggctatttttagtctccctctttctctgagaaactccccccgcgggcttctcacgccccaggggcagcagcactgagccgccgaggagcctactgagccggagagcctcctccagagcccagaagagcggagccgggcgcctgcacgttgcaccggggtcaccagtgccatttaaccctcgagtggctggcgggaactgggcaaccccccagggggacc

SEQ ID NO: 34174 - DNA, 355 bp, Homo sapiens; identical to SEQ ID NO: 30941
  chr11:124790854-124791209
  hyper

SEQ ID NO: 34175 - DNA, 1201 bp, Homo sapiens; identical to SEQ ID NO: 27504
  chr11:128562635-128563836
  binary

SEQ ID NO: 34176 - DNA, 1617 bp, Homo sapiens; identical to SEQ ID NO: 23804
  chr11:128563902-128565519
  binary

SEQ ID NO: 34177 - DNA, 997 bp, Homo sapiens
  chr11:13030308-13031305
  hyper
cgagaaggactgggaggccttccgctttagaggcagcgcttatagcgctagctggtcgtggaatgcgattacagcgtctccattggagaccgctgagtgcctcggtttccctgtctgtgcaaagtgcactccccagacgccgctgcctcgagggaccaggaaatgcgtctgggggcgccaggaaagatgagaagataaagtcacgatgcgtccagctagctatagacacaagcagaggagccagtaggccaaaggagacgcacagctgatccgtgccgaggcgcgggctccactccctgaagtggagggacccttgaatctttccttgcgtaggcgcgcggcagagcagcgatttggcgaaaagggccgagactcaggatgcctgcaatgcgagcgaggggcggacagggcgcacggggcgcggcaaggctgcgaggggcgggcctgggccctgagcctcctgcacttccagccacagctctgggccttgggggcgggaaggggtggagccacgtggggaggagcaaaacccggaggtcccgggcaccttgggcagagccagagcggcgggagccggtcctgggcgcgttgccccgggagcgcccgtcgtccgggcagagcgcagccgcaaccgcgaccacagccgcagtcgctttccagcctgccttcggtgcgcagcgggggaacagggctagtgcagccgccggaggggggcacgggctcctctcccatcccagagctactgggctgcccttgctgtcctcgccgccccagcagaccccggccggacctgccacctgcgccctggttgcgccatggatccttcggaaaagaagatatcggtgtggatctgccaggaagagaagctggtgtccggcctctcccgccgcaccacttgctccgacgttgtgcgagtgcttttggaggacggctgccggcggcgacggagacagcggcggagccggcggctggggtcggccggcgacccgcatggccc

SEQ ID NO: 34178 - DNA, 774 bp, Homo sapiens
  chr11:132813620-132814394
  hyper
cggtcggcgactcgcggccagccgggggagcgccgcccggcgcaggctccgggcgcacggggagctgggcggacggcggcccccgcctcctccggggacgcggcacgagacgcggggacgcgcggacgccacgctcagcggccgcccccggcctccgcgccgccttcctcccgggagcagccccgacgcgcgcgggcccggaccgccggggttgtcatggcagcagctccatccctgaccgccactttctcccggtgccgcctcggagcgagcgggctggcgggcggcgcggactgcgcgctcatcccgacgggcgggcgcccaccttaacctccgccgcgcccaccgggctggggatgcctgcggggatgagcccgcaccgcgcccacttcgctccgtcccgacacccgcgccagcggagagaacgcggcgcccctcgcagcggcttcccctacagaggggcggggtggggggagcggggagggagaggggagggcgggagagggagttctggggaaagcagcaaactgaaaactgacactggcaccttccctcgccgatgccagcgcagaagttgacaaaccccgccctggagagctgaactaccctgcccacgccagatggggcaccggtgtgcgtgtccatcgcgctgcgaacggctccccgcccagccaagtccagccctgacggcgcgctgtcctgggcccgcgcagaggtggagtgcacccacctccgaggacccacctcggaaacgcccgtgcccctccactggac

SEQ ID NO: 34179 - DNA, 997 bp, Homo sapiens
  chr11:134145792-134146789
  binary
cgcctacctgagaggacgcctgttctcatccagcctccaccctgcagccgagcaatctccgtaaaacgaacacctggcttagtttctgctggaaaccgttgaatagtccccactgtcttctggaagggtctgggcagctcggcgtggcgtccacggccccaccaggcctctgcctcctgcaggtcccgctacttcgtcaccaaagcgcccgccgcgctcgcatctgctgtgaggctgtgctcgggccgctcccgccgagggaacggccctcccaaggctctgcgccccaattctcgctcgtttgccaagaggtagccgtgtcggggagctagagttctccggggactctctcctgcccctcgtggccctctgtggaaccctcgttttaggatctgcacgccgtttccagtcgcgcgcgcggcacggagaccgcccgctgtgccccgcgctgcgctctctccgcccctctcccgcgcaggcctccctgtgccagccggctgtcgacccaggttaggaagcccgaggtcggggcgttaccccaagggccctcccgcttcccctccgagggcagagaggcgtccgcgcccggacgcactgcgggaacacctggagcgccggcggagctcggctgtccccgcgggagggagcccgacgcgcatccttgggacccggacccggcgcccgcgcctcgggacggatttctgcctcggctgcaggcgcagcgcgcagacctgagcctgccccgcggaaccggggctcgagtcccggcccgagcgcggcgtcggggccagcggagaggggcggaagccgcaagggaccctcggcgcctcggcctggccgcgatgaagtccccgcccctcctcaggtgacggatcgccgctgccgtcccgggctgcccaccaccccggcgcgtgcccgggagcctccaccctccccgggttctgtggccggccacgcgccccaggcacgcgccgcgccgggccgcgccaccaagccc

SEQ ID NO: 34180 - DNA, 836 bp, Homo sapiens
  chr11:1535842-1536678
  hypo
cgggagcacccagggaacacaagtgcaccatgacgcggagcccttcatcaccgcaggccacggcgcttgtccttcccagaggcccccaaccacagctgctgagcgacacccacaccgcttctctcttcacacagcggactgatgaggagtcccgccaagcaggagctctgagccacagcacagagtgtgctggcccaagtccacgcctgcatgcaagctcagccatgcgtctaatggcaataaccgtggaatgagctcgtgaggttcggagagtcccaccccgacggggagagccacagggagccccaatctcggcagtgaccggctccaggtccccacgtaccgtgagagtggggacagcggtggacagcagcccttgagcagggcacaaccttcagagagacctcgacaagtgaacacttaaaccaaggtcgaccctgggggaaacgcagacctcctcccagtgcccccttcagaaaaggtactcaaacactggctcccatcatgagctgggcacggaaccaggcatgggtactacctgcctccagggcttggagctcgggaggggaaccaatcccgggccctcgacctgggaggtgccagaaggccctcacacaagactccagcactagggtggggaggttaaagtaaacaggacagaggggttcaactaagacaatacctttgctcacggtcagaggcgaaggcactgatgccagccggcgccgactcaggtgagcacacaagctctcccgccgcggctgcaccacatgcctgataaagggacagccctggatgtctagttcctcaggcacgtgtgcacacatgtgtgctgc

SEQ ID NO: 34181 - DNA, 121 bp, Homo sapiens; identical to SEQ ID NO: 30954
  chr11:18512388-18512509
  hypo

SEQ ID NO: 34182 - DNA, 984 bp, Homo sapiens
  chr11:20178096-20179080
  binary
cggttctggaaccagattttcacctggaatgtcccggccggcgagaagaagggagaagcagaggtcagatcaggggctccgggggacgcacgggggcggggagtggagtcgggtgcaggctctgtccttcgggctgtgtcctctccccacccccagaaatgagttccggtggattcccgcattgactccgcccccgcctcagctcgcggttccgtttgcctcatccgctgccaccctgccccgaagggcggggttgggggccggtgaggccgggagagaaggcggggagtcggggtggggagagaagagggctatcctgcggagcttcgagggtagtggcccgtgtactcactccctctctaggcctcggttttcccatctgtacagtgggacctaagccgtttccgaacccttgcaattgacgggtgcgccggggaggggtgaagggcgggggcggggggggtgctgtggaggaaatgcgctcacctgcgagtctttcaggcccagcttggccgccagcttcttgcggtcgggcttgctgatgtacttctgcttctggaacatcttctccagcgccttccgctgcacgtcggagaagactgctcgacgcagcatgccccgccgaggcttcccgcgcgcggccagcggccaggagaaggtcccggggatgggcaccacgctggaggaagctgcagggtggggggaggtggcgagtgagtgggcgtacgccccccagtcccaacacggctctccctggctttttgctctgatcccttcatctctttaaaacgctcctttttctccccctggagaataggccacgaacctacaaacctgcgagagtgaaaggcgctttccgcccaaacaactttccctttcaaccgtgcaaacccggattaggtaaaaccacggaaacagagaaaacagcccccacaatagcctgtttcgtttttccattcagtggacttagggaaacaaacctgc

SEQ ID NO: 34183 - DNA, 896 bp, Homo sapiens; identical to SEQ ID NO: 27512
  chr11:20619116-20620012
  hyper

SEQ ID NO: 34184 - DNA, 1920 bp, Homo sapiens
  chr11:2290844-2292764
  binary
cgctcgggcctggcgctcggctccgcgggctcctgggggcgcgacccgccgggcctgcccaccccgtccctccaccccggcccccggccctccctcctccctgcctcccggctgttacctcataggtcgagggcgctcagtagccccctaaccagctggagaagtcgagtagctcgcgctccgcaggactcagcgcgccttcgcagccgctgtcgtccgacgagtaggcggaacgcggggagccgggctccgagctgcccccgcggcccggggacgaagaagcgcgggagggcgaggcggcgaccggggtggtccctggcggcccgcggggcgcagacggccgcacggcctgcggcctcagccctcccgccagcgcgttgcgcacggcgtcgtgctcggccagcaggcgctgcagcgcgcggatgtactccacggctgagcgcagcgtctccaccttgctcagcttcttgctggcgccgccgtgcggcacgtgctgccgcagcgcctggaagcccaagttcaccagcttcacgcggttgcgctcgcgctcattgcgccgcgctacggccgctgcgccgcctccggtctctgcggtggccggtcgccgccgccggctgcagcgcaacagttccggggacgcgggtctccgccgggcagcgcagccgacagggacggggggcgcagggggcgcggacctgggcagtgtgccgccgtccatcgcgcctgcatccacccgcccgctccaggtcccggcgcgccgcaggaaggtgcaggcagaggaaccggaggcgacggggaaaactgtggcgccccaagggggcttctggcacggcgccgccaggcaactccccagggcacgcgtcctaggtcgtctggagcccggggataggaggcctagtggtggcaggccgtacgcgccagggagcgtgggacgctcgtgtcccgcgcgtgcggccggactctcccaggtctccgcaggcgcggcgcaggcggctggtttttaaatgtatagataaccctcctccgcgccgccgccgtcgcctttctcacgccctccttccttcgcctcgccctcccgccacgcttcgccctccccctcgcgcgatcacattctgtaaggcccaaagcgtgcgcatgtccccctagcccatcccccggacgcagtccacagatccccagtgcgcccaactggcgaaatctgcgagttcccggtgcgccccctgctcccggcaggtgcttagtgcgcccccaaagcaaggtacgcaggtcctgggttgagccttcccgtacccccaccctaaccccgcgcgcagccccgccagtcccaagagccgccagaccttcgcacgcgcagcgcgcgctgtgggagggaaggcgcggccctggcgacaacacggctgttcgggaggcgcgcaagatccccgggggcagcacgcgccgcgcagcccacacccacgccccaccctcctggggccgaggaggcgggggccagggtctcagccaatcgtgggccacccgtttggccaatcgcgcagggcgcggctccacgcccggccccattgaggaagcgcgtacgcgtggcgcgtggctcacggggagcatcgctaacaaagctgggttcctgctgggccccgccctgctcctcgcccccgcgactgggctgggcgcgctgtcccctagcgcagctatgtcccgagcgcgcccccacctgtgcgttaatctactgggaatgggggtggactgcgccttacctggggcggggtggggcttaaggagtggtcgagactgaggcggggtgggaggttcaggttcccggggcgccttccccaacccgccccgctttccccgtccctccacgcgcaccctgcctgtggtttccgtgcgcccccggcctgagggctctgggcggcaccttaaccc

SEQ ID NO: 34185 - DNA, 34 bp, Homo sapiens; identical to SEQ ID NO: 16293
  chr11:2398443-2398477
  hyper

SEQ ID NO: 34186 - DNA, 1041 bp, Homo sapiens; identical to SEQ ID NO: 26207
  chr11:2398759-2399800
  binary

SEQ ID NO: 34187 - DNA, 312 bp, Homo sapiens; identical to SEQ ID NO: 16296
  chr11:2569208-2569520
  hypo

SEQ ID NO: 34188 - DNA, 1938 bp, Homo sapiens; identical to SEQ ID NO: 28453
  chr11:31819317-31821255
  binary

SEQ ID NO: 34189 - DNA, 1443 bp, Homo sapiens; identical to SEQ ID NO: 23807
  chr11:31825604-31827047
  hyper

SEQ ID NO: 34190 - DNA, 540 bp, Homo sapiens; identical to SEQ ID NO: 30963
  chr11:31840426-31840966
  hyper

SEQ ID NO: 34191 - DNA, 112 bp, Homo sapiens; identical to SEQ ID NO: 27514
  chr11:33202694-33202806
  hypo

SEQ ID NO: 34192 - DNA, 1622 bp, Homo sapiens; identical to SEQ ID NO: 22773
  chr11:43599961-43601583
  binary

SEQ ID NO: 34193 - DNA, 1390 bp, Homo sapiens; identical to SEQ ID NO: 23809
  chr11:43602408-43603798
  binary

SEQ ID NO: 34194 - DNA, 881 bp, Homo sapiens; identical to SEQ ID NO: 27520
  chr11:46316833-46317714
  hyper

SEQ ID NO: 34195 - DNA, 64 bp, Homo sapiens
  chr11:46777035-46777099
  hypo
cgtgagccaccgcacctggccccatttaaatataaataactagtccttagggattcagtcattc

SEQ ID NO: 34196 - DNA, 433 bp, Homo sapiens; identical to SEQ ID NO: 23455
  chr11:47358910-47359343
  hypo

SEQ ID NO: 34197 - DNA, 1225 bp, Homo sapiens
  chr11:561903-563128
  hypo
cggggtcaggcaggccgggcaggtagagctgaagtgggacctggtggtccagctccatggtctcccccaaggagagtggggctggttgctgatcctttttgttcttcccaactcttcaagccaggtggacagagagtcggggggacataggctgaccttctcctcttcttcccaggccagactggccgctttgtgcttgtgcagcggcttcgggagaaggagcggcagttgctgccacaagagtgtccagtgggcgcccaggccacctgcggacagtttgccagcgatgtccagtttgtcctgaggcgcacagggcccagcctagctgggaggccctcctcagacagctgtccacccccggaacgctgcctaattcgtgccagcctccctgtaaagccacgggctgcgctgggctgtgagccccgcaaaacactgacccccgagccagcccccagcctctcacgccctgggcctgcggcccctgtgacacccacaccaggctgctgcacagacctgcggggcctggagctcagggtgcagaggaatgctgaggagctgggccatgaggccttctgggagcaagagctgcgccgggagcaggcccgggagcgagagggacaggcacgcctgcaggcactaagtgcggccactgctgagcatgccgcccggctgcaggccctggacgctcaggcccgtgccctggaggctgagctgcagctggcagcggaggcccctgggcccccctcacctatggcatctgccactgagcgcctgcaccaggacctggctgttcaggagcggcagagtgcggaggtgcagggcagcctggctctggtgagccgggccctggaggcagcagagcgagccttgcaggtgagcccggggacctgatcccctgtcactcccccacccctgatatgggcagatacggggatcacagggtcccactcgggaggcaggtgagcccggggacctgatcccctgtcactcccccacccctgacgtgggcagatatgggggtcacagggtctgactcgggaggcaggtgagcccgcggacctgatcccctgtcactcccccacccctgacgtgggcagatacgggggtcacagggtcccactcgggaggcaggtgagcccggggacctgatcccctgtcactccccaacccctgacgtgggcagatatgggggtcacagggcccgaccagggaaagtgctccctcc

SEQ ID NO: 34198 - DNA, 239 bp, Homo sapiens
  chr11:57071417-57071656
  hypo
cgccctgtccagcggccactccccaaaatgacacattcacattcatcaccatcacacacactcaggcagagagcttgtgcgctgtttgtcactcccccagatggacctcgcacccaccacatctacaggcacggcacagagccacacctgacacaaacacacgcatccccgcatccccacacccccaccccacacacacacactcatactacgcacagaggtgtgggaaagcctggcac

SEQ ID NO: 34199 - DNA, 614 bp, Homo sapiens; identical to SEQ ID NO: 23814
  chr11:60718609-60719223
  hyper

SEQ ID NO: 34200 - DNA, 1503 bp, Homo sapiens
  chr11:61275825-61277328
  binary
cggccgcacgccgctggacgtgaatggctcgcagtgaccgcgcccctcagcccctccttgtgagcctctagtccagagtctttgatccaccgccagcgtttccttcgccttcttggacccgcggctctggggcgcacacaaccgcacaccaaacagcgtcgggcgtcgggtctcagtgccaggcttggccggggcggggaatctctcggcttgtgcttgctccgcggtgggctggatgggcaggtagggggcgggctccggcgctgggaccccactagggtggcgccttggccccgccccgccccgccctccctccgcctcattggcagccgcacgcgcgtcggggttgccagggcgacgggtcgctaagctgcgagtcagcgcgaaccctagccagtcggcctccggcggaggcaacgggggaggcccgagggcgggcggtggagcgcggcgcgcggcggcggtgccccaagtgggtgcctcctcccggccccgcacggcccccctcccggcgcgggggaaggccggggcggggggcccgggggccggcgcggctccggcaccgtcggggcggctggggggcggccggggcggggcgatgcctggcggtggcagtggcggcggccccggccggggcccgtgaccatgggcatcgccgagtccacgccggatgagctgccgtcggacgcagaggagcagctgcgcagcggcgaccagcagctggagctgagcgggcggcggttgcggcggctgcccagcgcagtgtgcgcgctgagccgcctgcagaagctgtatgtgagcggcacggggctgcgcgagctgccggaggagatcgaggagctgcgcgagctgcgcatcctggcgctggacttcaacaagctcgagcgactgcctgacggcctgtgccgcctgccgcgcctcacgcgcctctatctgggcggcaaccggctgctggcgctgcccgccgacttcgcgcagttgcagagcctgcgctgcctctggatcgagggcaacttcttgcggcgcttcccgcggccgctgctgcgcctggtggcgctgcagtcgctccagatgggcgacaaccggctgcgcgcgctgccggccgagctgccgcgcatgacgggcttgcgcggcctctggctctacggcaaccgcttcgaggagttcccgcccgcgctgctgcgcatgggccgcctgcacatcctcgacctcgaccgcaaccgcctgggcggcttccccgacctgcacccgctgcgcgcgctgcgcgtcttctcctacgaccacaaccccgtcaccgggcccccgcgcgtcgcggacaccgtgttcctcgtgggcgagggcgccgtcgagcgcatggcggagcgcgacgagcccacgccccggcctccgccccggcgcccagcgcgggcctttgaggatgaggaggaggaagacctgctcataggcggcgctggttcccgggctctgggcgcccccgggggcagcttccgcgccctggaagcc

SEQ ID NO: 34201 - DNA, 240 bp, Homo sapiens
  chr11:63779104-63779344
  hypo
cgcaagcagggaatcagggctgcgggacgaagacatggagcagggcagtgcatcagggttctgggcagagtggccagggcaggcaggatggcccttgtgcgtgttcgaacaatgggtggctggtcatgggaggggcgcgggtagaggcctgaactcctgtaggagggatgtccagggaccccacgggaagatgggtgtgtctgggcagagtcagatggggtctaacttgggcaggtaggc

SEQ ID NO: 34202 - DNA, 416 bp, Homo sapiens
  chr11:64124362-64124778
  hypo
cgctgagggaacagcaggcgtggtgcagctggaagcggggggtattggcaggtcgggggtgggcagaaggtgctcgagcctgtgggcctcctgggactctgggagtcctcctgagggaagcagatctcagctgagcctttccctctaggccctgaggtacaggaaccggagaaacgtcccctcaccccatccctcagccagtgacaccgtgggaacagcaggcttgggagtgcagccttctcggcactggagtgtcagcggaggccccaggcagcccaagagctcagggagccagggaccccaaggggagtccttggacaaggaggcctgggccctgagatcctccacggtcagcgccggggcccggagatggagctgggacgagtgtgtggacaggggggatggctggcccccac

SEQ ID NO: 34203 - DNA, 381 bp, Homo sapiens; identical to SEQ ID NO: 16308
  chr11:64621795-64622176
  hypo

SEQ ID NO: 34204 - DNA, 421 bp, Homo sapiens; identical to SEQ ID NO: 30981
  chr11:64977165-64977586
  hypo

SEQ ID NO: 34205 - DNA, 706 bp, Homo sapiens; identical to SEQ ID NO: 27528
  chr11:66631185-66631891
  hypo

SEQ ID NO: 34206 - DNA, 299 bp, Homo sapiens
  chr11:68132992-68133291
  hypo
cggtcctcttctggaaccttctctcactctgtcctggttttctcagtccacactcgctgtgaggaggacaatggcggctgctcccacctgtgcctgctgtccccaagcgagcctttctacacatgcgcctgccccacgggtgtgcagctgcaggacaacggcaggacgtgtaaggcaggtgaggcggtgggacgggacggggcgggcgggcggggcggggcctggcgggaatgggttgcggccgccgggggtgccccagaaggaacctcggcaaacccgttcgaaatgatccacttggc

SEQ ID NO: 34207 - DNA, 501 bp, Homo sapiens; identical to SEQ ID NO: 30992
  chr11:72475539-72476040
  hypo

SEQ ID NO: 34208 - DNA, 993 bp, Homo sapiens; identical to SEQ ID NO: 26229
  chr11:75378820-75379813
  binary

SEQ ID NO: 34209 - DNA, 888 bp, Homo sapiens; identical to SEQ ID NO: 30993
  chr11:763192-764080
  hypo

SEQ ID NO: 34210 - DNA, 1674 bp, Homo sapiens; identical to SEQ ID NO: 22777
  chr12:103351149-103352823
  binary

SEQ ID NO: 34211 - DNA, 935 bp, Homo sapiens
  chr12:103889148-103890083
  hyper
cggggcgtgccctccaccgcccccaaccgctccgcccggcccctcccccgctccctcccccacccctcccccttcctgtattagcatgcgggcggcggcgagccggccgggtggggagggcggcggtggcatcgctgcgcggggcgcattgtgggccgcgctcgcctccgcgggggaccatctgctcgctgtcaatgcatcacctgctcgtctgggccgtcgccggggcaacggggggcgggggattaaggagcgtgtgcgtctcggtccgggccgaggcggcgaggtgggggttggggcgggggaggagagctccttggccccccacccccctgccccgagacgggtcgacccgctcgggggccggcgaccaccgcgacgggttccgccgcttgcctccgctccttggcctttgctgccgtgctgcctcttctcacgggcgcggctggagtcccggggagcagcagagagcaaacggtccggctctacctcaccctgccagggggcgagtcccgcgctccctgcgtctacctggagctgcagggtccctatcccggggcgccgcccgcagcctcctccgcgggagctggagcactctgctgggtcctggggacgcggcgcagcgtggttccaagcgctccgcagtcgccgggcaaccacaatggggctgccttgccgtgagaccctcccccgcgactgccaccaaagtcacagaaaactttcacacctctcatctgacactgtggcctgtgcacgactccaagcactggggaagccttcgacatcagaatatgaatggcacctgttcttccgggggcggcaagggggatcccgatgtttatcaaaatgggttgattttccacggagggggtacttctggaggtagtaatccccagaaatcctgaaattcccccttccacctactcatctgcctc

SEQ ID NO: 34212 - DNA, 404 bp, Homo sapiens; identical to SEQ ID NO: 29767
  chr12:108297338-108297742
  binary

SEQ ID NO: 34213 - DNA, 603 bp, Homo sapiens; identical to SEQ ID NO: 33329
  chr12:113541518-113542121
  hyper

SEQ ID NO: 34214 - DNA, 432 bp, Homo sapiens; identical to SEQ ID NO: 23461
  chr12:113725566-113725998
  hypo

SEQ ID NO: 34215 - DNA, 839 bp, Homo sapiens
  chr12:115106003-115106842
  hyper
cgggaggcgctggggtgccgagccagctgcggcgacctggacgcattcgtagacgagacagataggtggcactcgaagcccagaaaaaaggcgaaggcgcctgccctgagtggcctctggggcggccgcagccaccataaagcctgcggcgagattgcgaccggcgccaggtgagtaataggcagcaaaatccagagagactgcgagccgttcatcccctccaccccccgcccatcagcgctacaggagttactcattaacatcacaatatacaaatgagatacacaggagattaaaaaaaaaaaaaaaaaaaaaagaggaacgccagtaagagaggctggacacaagtctgagcagggtccccaaatcgggggcggggggagagaagggaggaggtaagcaaatttggactgagaaagaagagaaaagcaaagcatttcttcccttttggaggctgagttcttttttccccaattcgggagagcgcaaccagccaactaccaccttctcagaggcgcggacaccgcgcgttgtcgctggatccagagctgcccccttcaggctgtagccgctgcgcagaaggagcgcgccctggaaatctcccagtcctcgggggagccccagcctcaaaggtccccagggcccgtctcagctcaggccctgccacccccgcagcgcaccccgcccctccccccccccgcgactccgcaccaacatactctggttgtctgtcttccctcccacccccggagacatcgcagaggaggctgtaggggtccccacgtgcctggccagagatggaaggggctttgccccgctctccaaaaggtctcgacctc

SEQ ID NO: 34216 - DNA, 2243 bp, Homo sapiens
  chr12:115120701-115122944
  hyper
cgtcctccacctcttcttcgggctccatggtcttcaaaggcctcagatgcgcctggggccccagggaggagaacgggatgccggtctcggccgcccccaccaattgatccatgatcggcttggccagggcgcccggcagcgagagcgccgccgcgccgttgggaggcagcgtcagcgcggggaagaacggcggctggtgacccagcaccgcgctcatggcgaagtccggcgcccggtgaggtaggaacggatggtaggccatgcttgtcccaggaatgaccggatctctcatggagaggctcatccactccaggcggggcgctgggctccagccggggacaagtccgcagctgctgtgttttgttgtttttttgttgttgtttaacagcagcacataattcaaaaggggggaaaaagcaaaacaaaaaagaaagaaaaaagaaaaggaggcagaaatcacaactaatgcacttcaaagggaggaggggaagtgtcttttggagaatgggaggccgcttttaaagagggcaaggcgaaaaatcagcaaacatagtcgcgcgggtgaccgtccttgtgccttgcgtttttaaaaagccgctcctgaacgtcggtttcagaagcgagaggagcgagcagggtctcgactcgcgcccgagccctgccgctgagctcgaaatagacactccagccctgcgtcccaggaatctctctccagcccctaggtcttttgttgcaaatgtgaaaggttctcctagaagactttttacctttctttttcttcttcccccgccccctatctgtcttcctctccctctttctcgctggtggcgtctgcagctgtgctagacccggctttaacagggagcgagagagcggaaaaagtctctctcctttaaaaaaaaaaaaatctgatttaaacccccttctaccagcgctatcaaaacttgaattgcaaactggcttccgttcgccgccctcctcctccttcctctgctccgagcctccggagggtgtctcggtttcaatccaaatcttgctgggctcttctcccgtgcctctctctcttccttgtcctaaaacgtgagcgaattcgcttcctaaatctgtgtccaggcgcgcagggcagggaggatttagagggggaaaaaatggaacagagggaaagagagggaggggagagagagagagagagagagagacggagtcggagagggagggagcgagagaaagcgagagctcctcgccaccctccgccgcctctagaattcaccgggcgtctgctcggcggctctagaaggtcgggctgcgctgtgggctgcggggagccggaggcctcttgattggctctttgacgctttcggaccaattgtgttgctgcataggcgtggttttcacaggtcgagtgctgggggatagagctgagttataaaaagaaggtgtcggaaactgtaacgtcgcagcgccgcatcggtactactgcctgtcctgtgaatatgtcaacatgatcagagggcgggcgggagccactggggagcgcgcgcgcacagagtcgcctctaggtggcttatcgagagatcgctgcagcccctgagctcgctcgctcgctctggttcagcccacgtctgaaatgcctcagtcatccagccggggatcgagggaggaggcagggccaaggaggaagggggagggagagagggagggagccagcgagcaggcgagccgggcggggaaggcggagagcgcgcccgggcgccgggcaggggcgctcgcctctcttgcactccgctcgcctctccgaccgccgcggccggttctctctccagctctccttcttctccccgccccgggcgagccgggcgggtggccgagcctccccgcgagctgccatccggccactcggttctacaaaagccggcggcagccgagaagcgagcgccgagactccaggcttgcgtgctctccagccccacgtggagccaagctccgcccggccgccgctgaagggctcccgagctcgggtgtctcggtgctggtctcccctgcgtctgggctgggggagcacaaggatgcggccatatctcagcacacgcatgtgtgggcttcctctccactgcgccccacccgcagccatgtgcgggtacccaaacacccccggtgtatctgtactcgaacacgcgccaacacactgggactgaaacacacaccgaaaaacacgtacacacaaacacgtacacagcctgcgc

SEQ ID NO: 34217 - DNA, 285 bp, Homo sapiens
  chr12:115889561-115889846
  hyper
cgtcgtgacagtgccaatagccagcagtctcctgtccgcgtgggttgcgagccccgggcgtggacggagttgggagcggagggcggcaggtgccagcggggcccgcctctccctgcaggcggccccggcaagttcacggccggcccggggcgaggggcgagcggcgcgcggccgtgcggctcattctaccgccctgcgtgcgaaggggaggccgcgcccccgcgcccctcgctcgcgccgtgcctgccgccgccacccgcccggccgccgggccggccactgagc

SEQ ID NO: 34218 - DNA, 501 bp, Homo sapiens
  chr12:117529744-117530245
  hypo
cggcatgcgggagaggcggtttctcccggcactgcacttggcaaatcccactagaaggcctggttttgagtctggattccctacccagcaactaagtgatcttgggcagtcatttcctctgtccaaacctcagtttgcccatctataaactggcagcaatagtcccaccctcaaagggcttttcggcagatcagatgattgacaagtgctcaagaaagagcagctgtcacctcattcacagctggctgcgttttttaaggagcggaactggtggctcaaagaaggacacagcctggatgagacatctgagcgaagtggcacaggacggctccagcaccgagctcagtgcacatggaacgccatcctccagggtcccgctctgtggctgcgacagatggtgagatgatggggcccaggtgaacagaatgaaaaataccagcatgggctagagcaggcaggtgcctttggttgatccccagccctgtgggaagcttccacagc

SEQ ID NO: 34219 - DNA, 1501 bp, Homo sapiens
  chr12:117798076-117799577
  binary
cgagcgtctggcgtcctctggggcgcagtcccgagagagccccttccgggacctcggacgcaaggcccctgagtggccctggaagttggatcccccggggaccctgctccgaaccctggccacctggaagcaacctcatcgagcgctccttccactgcccagccccgaaccgtggcggaacgcgcccctcggcctccctagagcctcctttgcgggagaagcacaactttcccaggttttggagacggcgctcttacaccccaatctcgcccagacggaagaagtgagaggtgcgggcggccccgccatgaccgcgggaggagagcgcaaggaggctcctcgcaaagttggaggccaggccggagcgatgttccgggagcggagccctcccagcctcgggcccccagccgcggacagctggcagtgccaaagactccgccattacctgcggctcgcagttgcgattcggccgcagagtcgggcaccgaggaaggcgtaaagttgagcttgggcaggtacaacggtccccagggactggcatcccccagcccgggctgcccgcgggagggtagcgagctgtgccaagggctccgccattaccgccagcgcacagctcggagccaagcgcgcggctgaggaacgactagggtcttgcaaagttggagcctgggcgcgtagacccccggaccggagcccccggcctgaggccgcccgctaggaggaaaatgaggccgcccgaaccaagttgggacgcgcagcaaagcccgagccttccgcgcacaccaggggctcgggcgggagcggggagccctggggacggagaaggggcgcgggacgcctggatcaggaactcacctgacgccgagccgggcagcgccgaggctgcctcttcgcgctgcgcacccgcccgcccgcctcgtactcctcctcttcctcccgggcgcccgcggccgccgcgctccgggttctgaatcctccgagtccgccgccccgcgcggctggagggcgccggttgcacccactcgcctcctggtaggagccgcgcgcgtccctccccttcccctccgctttgtgcctccaagatccctccccaccccctctcccctagcccccactcctcccttctcttcttccctccccttgcgtcccctccctcagcctcagcgaacccaagttcgggacggaggctgcgggcttccccggcgcagtgctgggcgccccgcgcgcgcccctggctcaccccgtccgctcggccgctgctcgctgcccggccgcccctcggaggagccgcggcgctaagtagctcctcacccagcggctggaaacgcggcataaatatgtagggactgagccgtgagctcagcgagggtcgtgagggggaatttatttcttaatgtccctcctttatcctatcatcactgaaacgaattagcagtgacgtccaacccgactggtttatgggtgtggggagggagacgtcgcaaccctcattaaaagagcc

SEQ ID NO: 34220 - DNA, 75 bp, Homo sapiens
  chr12:119417742-119417817
  hyper
cgttgttgaccagaaggggtcactgcagagcaagtagcgctctcaggcactcaaataagcggacgcaggcgtgtc

SEQ ID NO: 34221 - DNA, 925 bp, Homo sapiens
  chr12:120148172-120149097
  hypo
cggtgcccaccaacaccacctgcaagggcagaagtccgaaggcagaacataagcacggtcacgtcaccagaacaatctctagtaagagcaacaaggcctccacagccctttctttcttgatggggtgtggctgtaaccagacaccagctggccgtgcccatgcaagcattacctggtcactgaagggcagcgtgcagttcatgtctagacggtcatcaccttccagtttcagcagggagtttccaagcagtttcttttcataggtgaaagaaaagaaaaacagaagacatcgtgaggctgatctgtttatgaccaaaccatccagagaaaccaagagaaggttaaggccaagttattcctggaaatgctcagaaacgcacatatgctcttagctcagcccgtattttgatctgagctccaaatgcaaaatgcgagtgctattggtatctctggggcagctgttaattagcatctgagttataatttggctgggatgcagaaataagggagggtagtagacatggaaagctattctgtaataagaaataagctgaagctaaggagatttcacctgcgcagggttaataagacacatgaaagactccttcccccataaggctgcagcagaagtgcaaaggcgccgtgttagcagcgagccagcacgcctctgcatctctttacctgaacccaggcaggcagaagctcgtaagaaacacagtcgcgggcctattgtacacatattaacaaggatttcagtaaaagctcacgtgtgaaacgaccaacaagtcatccaaacaggtctaaccactgagtaaagcccttttcaggaggcttgtggttaagaatctgccaattgctaacacataaagtgtttattaggagtgaagagtctgaaaagagctgtttggtcttcgctggagcaaac

SEQ ID NO: 34222 - DNA, 96 bp, Homo sapiens; identical to SEQ ID NO: 16331
  chr12:120543024-120543120
  hypo

SEQ ID NO: 34223 - DNA, 214 bp, Homo sapiens
  chr12:120580310-120580524
  hypo
cgttctcttatctgcacacgtgctggccaggaaacccagcaggagcccaaagagagtgggtaggatctcacgcaaggtgcggggggtattggagacaacaatcttccagacatgcagggacgcctgccgcaccaccagctgggtgtctgagcggcccatgtacagccctgccaacacccggttccgccgctctacccccagggcagtgatgatc

SEQ ID NO: 34224 - DNA, 972 bp, Homo sapiens; identical to SEQ ID NO: 23463
  chr12:121687598-121688570
  hypo

SEQ ID NO: 34225 - DNA, 458 bp, Homo sapiens; identical to SEQ ID NO: 16335
  chr12:122614584-122615042
  hypo

SEQ ID NO: 34226 - DNA, 255 bp, Homo sapiens; identical to SEQ ID NO: 16336
  chr12:123434339-123434594
  hypo

SEQ ID NO: 34227 - DNA, 203 bp, Homo sapiens; identical to SEQ ID NO: 16337
  chr12:123434957-123435160
  hypo

SEQ ID NO: 34228 - DNA, 772 bp, Homo sapiens
  chr12:124869706-124870478
  hypo
cgctggcgaggcgagcctgcaccttctgtgcttgtggaggagggaagggtctcagcctcccgtggcctgcctcaagccctccaggatgctggggctgagacgtccgcccccgcccccccagacctgtccctccccaaccacggcagccctaaagctgtgaggtcaaatggggcaggggagccactcgctcaggacccatttgcctccgggtcctcattccaacgcgctgacagcccgaattcctggctgagtcagtctggtccaccgcgctccttcccccacaccgtgagacagggctgagggcccccagaggtgtctgtctgagaggagtggggtgcagggtgggggtggagggcagcctggcccggcccgtctccaaggcagggacactcatagcagcattgccgcctgcagccatctcggggtactcccgggcttgaacccccagaagctgagttctaacaaggcggcataatagcccctccctggcccatgcctcctggggtgcagagacatctcctgaggcagtctgggctcctctcccagcttcccagaggcgcggtgcagcgtgactgggggctcaccatcttcagcttgtgctgctgcaagatctcatcgaggttctgcctcttcttgtagttgaagtagaagttcttacactgcgacacagtcttggagcccaccatccgggcgatggccgaccagttgcggccgtgttccaggagacctgtctcaggagaggagggcagtgagaagaggccaggcccggcac

SEQ ID NO: 34229 - DNA, 756 bp, Homo sapiens; identical to SEQ ID NO: 28494
  chr12:128750713-128751469
  binary

SEQ ID NO: 34230 - DNA, 1490 bp, Homo sapiens
  chr12:130646597-130648087
  binary
cggcgtcctcggggtgccggggaccatcccggggaccgccgggaaagggggcgccggcggagaggatagcgagaggcaaagttggaggccaggcagagagagggcgaggagaggcgggcgggactgccggggagggtcgcagcgcgcagagccccgcgcgccaggcgggctgtcccggggctggcgggcgacgcgggcgggactaggcgctgcgccccccgcaggctgggctgcaggccgggggggatcggcccccgcggggcccgggagcccgcggcggggcggcggggaggaggctgccccgggccgctgcgctttctcatgcaaagcagcggcggggcggggcgcgcggcccgggggcggggcctgtcagcgctcggcttttctgcccccctttgcctttttgcgagtcttctcatcccgggacgcaaacctcgaaacagctgccggctggtcccggccgaggccggcgcagggagggaggagccgcccgggctgtgggggcgccgcgagctgggccggcctcggtgtgcccgcgccgccagcccgctccagacgcgccacctgggcgctccaagaagaggccgaagtttgccgcggccgtgagttggagctcgcgccgggccgctgcgccgggagctccgggggcttccctcgcttcccggtattgtttgcaaactttgctgctctccgccgcggcccccaactcggcggacgccgggcgcggagagccgagccgggggcgctgtgcgcagcgctcgggccaggccgggcgggcatgggcgggggcccgagcaggggtggagagccggggccagcagcagcccgtgcccgggagcggcggcgctgaggggcgcggagctccccgcgaggacacgtccaacgccagcatgcagcgcccgggcccccgcctgtggctggtcctgcaggtgatgggctcgtgcgccgccatcagctccatggacatggagcgcccgggcgacggcaaatgccagcccatcgagatcccgatgtgcaaggacatcggctacaacatgactcgtatgcccaacctgatgggccacgagaaccagcgcgaggcagccatccagttgcacgagttcgcgccgctggtggagtacggctgccacggccacctccgcttcttcctgtgctcgctgtacgcgccgatgtgcaccgagcaggtctctacccccatccccgcctgccgggtcatgtgcgagcaggcccggctcaagtgctccccgattatggagcagttcaacttcaagtggcccgactccctggactgccggaaactccccaacaagaacgaccccaactacctgtgcatggaggcgcccaacaacggctcggacgagcccacccggggctcgggcctgttcccgccgctgttccggccgcagcggccccacagcgcgcaggagcacccgctgaaggacgggggccccgggcgcggcggctgcgacaacccgggcaagttccaccac

SEQ ID NO: 34231 - DNA, 187 bp, Homo sapiens; identical to SEQ ID NO: 23048
  chr12:131400786-131400973
  hyper

SEQ ID NO: 34232 - DNA, 742 bp, Homo sapiens; identical to SEQ ID NO: 23854
  chr12:132221511-132222253
  hypo

SEQ ID NO: 34233 - DNA, 500 bp, Homo sapiens; identical to SEQ ID NO: 16344
  chr12:133121644-133122144
  hypo

SEQ ID NO: 34234 - DNA, 1071 bp, Homo sapiens; identical to SEQ ID NO: 16345
  chr12:133353501-133354572
  hypo

SEQ ID NO: 34235 - DNA, 1272 bp, Homo sapiens; identical to SEQ ID NO: 28504
  chr12:133484584-133485856
  binary

SEQ ID NO: 34236 - DNA, 766 bp, Homo sapiens
  chr12:14134475-14135241
  binary
cgagcactctcgatagagcgaagccccgagatttcctagaggtgaagaagccggaggaagtggtttttgaaagggggtggggggaaccttcctttctcaaaaagaggtggggggtggagaggcaggagcccagattccagttggtgaggatcggagccgggggaagggaagcgggcgggggcaggctgtgcaagtcaaccgcgcggcagccggagagggagagcaggaggggaggaggggagcgtcagaaaaatgggtattaatcaccggggacggggggaggcgcggggaacgcaggttgcctggtctggatttgggtctcacactcaaaaacgtgccgcgcacacacacacagacacacacacaccccctacctcgcacaccctgactccggggggaggagaaacccacgaagctggggaagatactgcttctgctcccaggggcgggtgtgagcgcgcgtgtcctctttctccacaccccccaccccaccccacccccaagcccctgcaccccctcactcctcttgctaagactctggcggaggcagcttcccacgtcatgtgctggggaagtggggtggtaaggtggatggaagggggacggaagggggaagaagcttagcccgagtccgtggcgcctcctcccggccgcagcggggaacagcaccgacggagagcggctgaggggcgaggggagctagacagtgccccccgtgggcggcccgcgggctgcggaaagcatctccaaggcggagctgtagttc

SEQ ID NO: 34237 - DNA, 758 bp, Homo sapiens; identical to SEQ ID NO: 22781
  chr12:21680379-21681137
  binary

SEQ ID NO: 34238 - DNA, 621 bp, Homo sapiens
  chr12:21810339-21810960
  hyper
cgggcacgtgtcccgactcccgccagcaggccgtgggggtgatgtggccgccatgaacccaccaaggacaagtagggcctggttttagctgcaaatgcaacaagtctctccgctgagccgcagctgctaccctctgccttctgctcctccgccagggcacggccccccctgcgccccaaactgagcggcaaagtcagggcccgcggccggatgctcagagctaaaggccgcggaggacagatgtgcttcttcctccttcccgcgtctccccatacaagtactaccccgcacgtcccatcaggcttgcctgtgggccaggattcagggtcctgagccgaaacctaccaggagagagaaggctctggagacctctgtaacagtcgtgcggagaagacaaagtcagctgcgtgcgtctcctccggcgccggctctgcaaggagggaggagggggcggggccccacaaccaccgcagcctcttaggtttctccattgtgattggaaatccgagtaccgcctacccctcccctcggctcgctcaatccccttcaaggacaagggctcaagtatgcacactccctcccccaccctccagatgaggaggtctccttccagaggcttcc

SEQ ID NO: 34239 - DNA, 1454 bp, Homo sapiens; identical to SEQ ID NO: 29789
  chr12:22486814-22488268
  binary

SEQ ID NO: 34240 - DNA, 502 bp, Homo sapiens; identical to SEQ ID NO: 26256
  chr12:22488321-22488823
  binary

SEQ ID NO: 34241 - DNA, 1913 bp, Homo sapiens; identical to SEQ ID NO: 27560
  chr12:24714490-24716403
  binary

SEQ ID NO: 34242 - DNA, 921 bp, Homo sapiens; identical to SEQ ID NO: 22782
  chr12:25101390-25102311
  binary

SEQ ID NO: 34243 - DNA, 519 bp, Homo sapiens; identical to SEQ ID NO: 27564
  chr12:2964279-2964798
  hypo

SEQ ID NO: 34244 - DNA, 914 bp, Homo sapiens
  chr12:29935696-29936610
  hyper
cggctggggccccagggtccctggagaagcctaggctctgcgttacctctctctgcaccttctaaagtctagatccagagaagtctggcagattggagagcctctgggagcagccaagggtgcaaggcgggggctggggggctcgggagagttttctgctccctctcctgaacccacgcagccctgtcagctcaaggctcccgcctcgtctcatctgaacgaaacccttaaggggctgatacacttctcatctgcaaagctgcccaacagcctccgagaaattctctacttggaagcatcgccaccaccgccacccctccggaaccctctgggtccgcgctagtcccacttggtcacgatccggcaggcgaaggggtgcggaggcggtttcaccagcccgctcccagccctgcctcgagagagaagcccgctgagagggcagacagttgagaaactcgatcccaactccccagccggcgcctcccgaaccgccccgagagcccagattagccgggcagtggatcccggagcaaagtgccatgcacatcctggagaggagggaggcgtggagggaaagggcggcaaaaatgaaatgcccccaagtcagtcccgcaacttctcccggtccgagggacgggcggagggtagaggaggcagcggcggctagcgcgaggtgagggactcacttgaaggtgaggacgcagagcggccggtaggacttgtggctggtgttctcggccatgcccttgccccagaagtcgttggtgaagatgccccagcggagcggggcgccgggccgcacgtcggggttgttcacgatcgcccacacgtcgtcgtgcacgaactcgccctgcagggagcggccgtagcacaggcagcttgccccggccagcagcgccgcggccccggccggc

SEQ ID NO: 34245 - DNA, 274 bp, Homo sapiens; identical to SEQ ID NO: 23863
  chr12:32831303-32831577
  hypo

SEQ ID NO: 34246 - DNA, 910 bp, Homo sapiens
  chr12:3602092-3603002
  binary
cgcggggattgtccctctgtcttgccggaatgcaaaaaggtagagagacccttcctggtcttcttccctcgagttcttaactctgcgctaaaacccctaccccacggcgtaggcagcaaagctttataaatcccccttctctgagagactagaagcagcatgcatctgacaattgtcaatttcaaaacaaacacgctccgggacttgaacgcagcggggcattcagtagcgaatgctgtctccttgagttagggcaaagcctgcgtgcccgccgtcccctcaccacttcctcttccccagcccccacctgagagcagacattcggaatgatgtgtagtgcgaggcggctagcctcccagcagaaagccatccttaccattcccctcaccctccgccctctgatcgcccacccgccgaaagggtttctaaaaatagcccagggcttcaaggccgcgcttctgtgaagtgtggagcgagcgggcacgtagcggtctctgccaggtggctggagccctggaagcgagaaggcgcttcctccctgcatttccacctcaccccacccccggctcatttttctaagaaaaagtttttgcggttccctttgcctcctacccccgctgccgcgcggggtctgggtgcagacccctgccaggttccgcagtgtgcagcggcggctgctgcgctctcccagcctcggcgagggttaaaggcgtccggagcaggcagagcgccgcgcgccagtctatttttacttgcttcccccgccgctccgcgctcccccttctcagcagttgcacatgccagctctgctgaaggcatcaatgaaaacagcagtaggggcggccgggctcctgcgaacaacaacaaaacaaacaaacaaaaaaccacgtcgcgtgcggggcaccaaggc

SEQ ID NO: 34247 - DNA, 819 bp, Homo sapiens; identical to SEQ ID NO: 22784
  chr12:40618264-40619083
  binary

SEQ ID NO: 34248 - DNA, 766 bp, Homo sapiens; identical to SEQ ID NO: 27569
  chr12:41086129-41086895
  hyper

SEQ ID NO: 34249 - DNA, 744 bp, Homo sapiens
  chr12:4273746-4274490
  hyper
cgtgagccgtccccttcgctaacccccaaccccgccttctcctgctcctcctctcttcactcttcctgcctctcggctccggggtctcctcgcttccccgcagtccccgccccccagttcccaaagcggcacccgggcctcgcctccttccagcggagccgcgcgccctgcgtcctggcctccccgccccgagtccccttccctggagcctgggggaccgacagtcgcgggccacgcacgcggtcccagcctcgccgtccgccccggggagagctggaaggtgggcccggatctcccacatcactatgagctcattccagccccggccaagcaaagcctggccctactcgctccacatgcatttcagtctcctctcgcctttcatgcgcggaggagccgggagggagaggatgtgacctcatctgcgcggcatctgagcccaggggtgccccagctcttccacccaggccgctccccgagcccagctccccgcgcccctctctctatccaggagagacgcattggacagccaggagggctcgacgtggaaggaaaggaagctgcaattctgggacaggggcagacgggagaggaagtgaacgtggctaaacgctcactttatgtaaaacgtcccccagactagaatctcgtccacagagctgcacacatacactcgcacgggcccggcttgtactcaggcaggcacactcgccccccgccgtccccaccgcatcccccataccc

SEQ ID NO: 34250 - DNA, 4797 bp, Homo sapiens; identical to SEQ ID NO: 26261
  chr12:4377809-4382606
  binary

SEQ ID NO: 34251 - DNA, 1697 bp, Homo sapiens; identical to SEQ ID NO: 26262
  chr12:4382915-4384612
  hyper

SEQ ID NO: 34252 - DNA, 958 bp, Homo sapiens
  chr12:48577061-48578019
  binary
cgccatcctctgagaaaggaatgcgggctggaaaaatctttccagggcagtctcgctgggtctcataccccggctaggggagggacgatctctcccggacttggaggtttctgcagcagacggctctctcatacttccctattaaacattgcgaccacacgctctttccagccttggccgaagccactgtagcgtcccctctcctccccccaccccgctagtccagactccagagccccactgcagcttccagccatcctccctttttcttcgccacttcctggttaccatggagacacacgtcatttacgtgccgtgcgtcgccttggaaacagaggagcatccgcgacacccccgggagacccaccccagctgctgctgccacactcgcgggcgctgcccggtaatggcctgggggagtcccgagtccgacgcgccgctggcctcagcctggacgcggacccctccgcgagcgcgtctgtgacccacggaaccggcaggcgctctctgcttgtggcgcccagagggcggcgctgacacgggcgcgatccgggaggcgaggcagggcagggcactttcgtcccggggcgatcccaagagacgccggctctgggaccctcgccgggtcctcgtcccgcagcctcttctcggcctcccgcgatcctgcctgcgccctctgcccaggactcgtctctcacgtcggctccccgccagtctcgggagcctccgcttccctcggctcccgctagcccctcccgggacctctccccctccaccccctcccccaccccggaggccgggctggacgcgacccagagcctccgccacccgcttctgccactcaatggaggacggtctgctggagatcatgaccaaggacggcggcgacatgccggcgcccctggaggtgtccaccgtgccggcagtgggggacgtgatctccggggagtacaacggc

SEQ ID NO: 34253 - DNA, 717 bp, Homo sapiens
  chr12:49363675-49364392
  binary
cgcaggtggaagttaggcgcgcaggggcccagacgagtggccagacctggctcagagcggctccggggggggcggggaattccaggagaggcccctcccggagccgcgaaaccatcccttcccgcctccgcgcgcctcgccctgccgcccaccccctagcctccgcggcagcgccgacccgcccagccaggctcaccgcgcttgaggatggcgctgtggtgcggcaggcggccgccgccctcaagcgcggagcagttccagcgctggtcgcgcagctggtgctgacactcgtggaccgcgatgtgcagaccctgaagcgcggacgccgtcacgtcggggttgcgcaggcacaggcctagctgccgcttgctcaggccggacagcgtcaagcacacggtgttggccgtcagcggcggctcgccaggcaacttcaggcccagaatctcattgcttagagccctgggaaccaagaaggcgtctggggtctgcggtccagacccctccaactctccccaccccgggtcggtgtttctatggcctgggagacaaggggaactgctcaccgactgcacaacgccaggaacaggagacccgcgaggcccgagggcggaggccgcggccggggctcctccagcatgtcgaagcccggaggctccggtgggcagatcgatcaggacctgcgggacgggagacttgatgcgggttcaggaatagggc

SEQ ID NO: 34254 - DNA, 317 bp, Homo sapiens
  chr12:49942891-49943208
  hyper
cggcaacgtgtccgccaacacggacaccgagaagatcttctccatctgcaccatgctcatcggcggtgagcccggccgcgcgcgtcttcccggggccactcccagacttctgcccgcaggcggcgccgtcccactccccggagggcctgaggccgggggctcttccgctttaggtggccgcggaacccgaggccgggggtgggggagacttcgcccgcacagcggccttcaggccttgcctaggagcgtgcgggccgaggacagatgagcccagcgtggtgtcaggccgggccaggtcccctaggtgaccccctctc

SEQ ID NO: 34255 - DNA, 1984 bp, Homo sapiens
  chr12:5018337-5020321
  binary
cgacttgcttctcagattattcccaattagcaccaagttggcagacaaccccacaaacccacgaagccttcggtcccccacaagtcacattccctgtatttcagaataatcggatcgtaagaaaacttcaagtcccatcgtaggttaaagagggacaggctcttagtaccgccgccgcccagtaaaactacatggaacaaacccagggatcctcatctgcacagctctgcccaaagtctgcagctctgcgagtccagccggcgggggaagctgggtgggccccgcagagagcaagggccttcttgggggaggagcgggatggggcgcagagcagtgcgatcgaagagggttactgtgggactgcacaaaagcaaacccgtcggaggagttttgccagaaacaccaccgcctgcattgcgtcggacctgaccatttccaatgtgaaattcccggggaaggtcgcgagccgctaggggccgttcgtgggcggggcggcgggccacaggggaagtagagttagcggtcggcttttctggtaggagaggaaaaagctgtgctggcaagggtgggaactgaatgacaaccccgctctcttccaaaccaccccctcatattttccatccacctcctcgctcctgccctcccccgccctccccaacccacgcccgggtgggccaatcgctgctcggtattccaggcgctttctcaggtttctgctgatcttgcagcgcccagaaatggaccgagcggacccgccgccgcacgcaccctgctccactccaagctcctaagggctcctggcgcgccgcgtagccttggcgaggtccgcgctggggtgcggagagcgaagggaactggagagccatgtagatccaggctctcgcccgcccgcctccttcgggatcgaatcaagggctcccatagtgttaggagggggcgagagtgctgtttatcgtcatttgcctcggagcttcgagagagggtggtattttgcttttccgccccgcatcctccggaactccctgcaccggagagaggacggcgtctccaggttgctggcaaccggtgagaatgggggtagggaaggaacattttcgccgtagctgctccgtaaagcgattgtccaactgagaggggcgtcggacgagtggaccagggcggcgagtttgcccggcgcgtctcggatgctgctgcggcggccgccgcggctcccgccagggcactgcaaagacgacctgccgcattcccactcgggctctccgctgactcagcaccgcccctgcgccaagccagccggccaggtagggggttccccagctcggggatgcagaagcgggggttggggggaccgggtgggggaggccgggggtgcggggatgctgtccgggaccctgagcttcccccggcgtctctcggcgcttttccgatctctagtttaacgaagttgtaaacagatcggctgttgggcattggggaaagtgggatggaagagccccaaacttggatttccgggtgtctgcgtgtcgtctgtccgtgtgtgtgtgatagccctagcaaacgtccagtgctttctcaagctagaggtctgtgttcttcggtgtctgtaggtccgtcccatctgaatgcttctgattttctacccccgtatcactttctatttctctgcagcgtgcatcgatcgccctggtgggagcttagaaggcggcaggcgaagaggggtaggaggggggagagccgaggagaagcagagagggtggcaggcgtggggatctgccgagccggcactgcaccgggtcctaggaaggctctcggaggggaggggaggccagggcgacccccgaagcaatggcccagtccgctagaacggcactgcgttaaggcacctgggatcaggaagaaatatctaaacaacaacaacagaaaaccaacaaacccccaaacccaaacccaaccctctgcaaaaagctgcacccggcccgcaggc

SEQ ID NO: 34256 - DNA, 598 bp, Homo sapiens; identical to SEQ ID NO: 25035
  chr12:50297476-50298074
  hyper

SEQ ID NO: 34257 - DNA, 1389 bp, Homo sapiens; identical to SEQ ID NO: 23870
  chr12:52400270-52401659
  binary

SEQ ID NO: 34258 - DNA, 501 bp, Homo sapiens; identical to SEQ ID NO: 25039
  chr12:52652140-52652641
  hyper

SEQ ID NO: 34259 - DNA, 822 bp, Homo sapiens
  chr12:54366668-54367490
  hyper
cgcccatcccaccgcccaccccaccccaaccctctctctcctcctttgctcgtgctgtggtatggagagaaggggagtgacgagagaaaaacgaatacaaatctgcaattgattttcataatgtttctgcggtgtttgcaaaccaatcgcctgaacgtccccgatcttacctaagagagaacccctcctacgtctgcgaagtgctccgaactgatatatgacaatatctactttggatcacgtgctcagagagagagagactaagacggataacgcgtcatctcgccttcccaaattttcccccctcgctagaccgggtccaaaacctccatccggagccggcaggagaggagaacgatgtttaactcggtcaacctgggcaacttctgctctccgtcgcgcaaggagaggggcgcagatttcggcgagcgagggagctgcgcctccaacctctatctgcccagttgcacttactacatgcccgagttctccacggtctcctccttcctgccccaggccccctctcgtcagatctcctatccctactcggcccaagtgcccccggtccgggaggtctcctacggcctggagccatccggcaagtggcaccatcggaacagctactcctcctgctatgcggcggccgacgagcttatgcaccgggagtgcctgcctccttccaccgtcaccgagatcctcatgaaaaacgaaggctcctacggcggccaccaccaccccagcgccccgcacgcaacccccgccggcttctactcctcagtcaacaagaacagcgtcctgcctcaagccttcgaccgtttcttc

SEQ ID NO: 34260 - DNA, 2389 bp, Homo sapiens
  chr12:54378056-54380445
  hyper
cgcccaccctgccaggcccaggccacagctctcgggtcggggatcgggtgcctctggtctctggcttcctctttcccctaccccgcgtccattcggaacctccttttccgagcagccatgaagtgaccgtgaccccctccctggcccaccctagaggctggagattcccagtcaacccccacaggaaacttgcaactccagcgccgcggcccccaagcttccagccccgagggccaagcccggggaaaagaggaggcgggagagcagaaactttagtcctgtttggtattccttaactttttttcccctttctctgctcatcagatccccccaaacccccccccccacaaacctcaccccactcccatccccaaggtaagaagtgggagtcgggtccggggatatggaaaggggagatgaagagtggggagaagtacctgattcgtgtctcgaccttttaatttgaatttgactgttttgagccccgggttgcctcgctctctccctctctcccgcatttcccccctctccgcccccttctccccaggagttacaggctggttactggataaacaaaccccactcttcctagaacccccacccccacccccacccccctccacccctctacctcccctgccgcccggggggcgcttcctttgttcgcggggaagggctccggtgcccctaccccgaggcagctgctagatggcgctgttactccactctgcgcgctccgcctgccgacaacttgaccccgctgacgtcacggccgtctgaatcatcaaggccattttcaaatcccattggtctagccgtcacatggtgagaaccgaatgcgcggataattacggagctgatatttccccccctccccttctttttcctccctcccctccaaccgcgccccccctcccggatggggaaaaaaaaagatgtcagctcctccgctgtagtattgctccttaaaaacccctctctctgaaaatgacatgccctcgcaatgtaactccgaactcgtacgcggagcccttggctgcgcccggcggaggagagcgctatagccggagcgcaggcatgtatatgcagtctgggagtgacttcaattgcggggtgatgaggggctgcgggctcgcgccctcgctctccaagagggacgagggcagcagccccagcctcgccctcaacacctatccgtcctacctctcgcagctggactcctggggcgaccccaaagccgcctatcgcctggaacaacctgttggcaggccgctgtcctcctgctcctacccacctagtgtcaaggaggagaatgtctgctgcatgtacagcgcagagaagcgggcgaaaagtggccccgaggcagctctctactcccaccccttgccggagtcctgccttggggagcacgaggtacccgtgcccagctactaccgcgccagcccgagctactccgcgctggacaagacgccccactgttctggggccaacgacttcgaagcccctttcgagcagcgggccagtctcaacccgcgcgccgaacatctggaatcgcctcagctggggggcaaagtgagtttccctgagacccccaagtccgacagccagacccccagccccaatgaaatcaagacggagcagagcctggcgggccctaaagggagcccctcggagagcgaaaaggagagggccaaagctgccgactccagcccagacacctcggataacgaagcgaaaggtaaggccgcctgggccgcgggcgccactgggacgttccggcacttggtcttcgcggccggggaggggggcaggggagagggttgggcccaggaggccccagaccatttcgggaatgcgaccctggctttcgactagcgtccgctgagctccaggctggtggcgcgtcacttagctggggaaggtaagcggcgacgtggaggtgtcggccctgccccggccatgggtgctaaggcgggggcggtgcgcaccgcgggccgcctgcaggcgcagtgtgctgcaccggacgggtggctgctcccaggcgcgtgctggctgtggtttgctttctcaatgctggtgtcctggggagctgacgtcccccagctcaggtcaggggcttgcaaaaagcctaaaatggcgatcttgggccagggactagggaaggctggggagatggggggagttctctttactgcgttttcccagttgaaaattgtttcctgcgaaacgcgatttgttgtttgtgggtctgatttgtgcgtgcggcttgggctcctgcggcttttggctcggccgggggccttgggcagcgaggctggagccggaagaggtggaggtgaagggctgcccgccacgtccctccctcctccagatgcctggcttggatggc

SEQ ID NO: 34261 - DNA, 1464 bp, Homo sapiens; identical to SEQ ID NO: 31051
  chr12:54393256-54394720
  binary

SEQ ID NO: 34262 - DNA, 1781 bp, Homo sapiens
  chr12:5540947-5542728
  binary
cgatacatttaacgtttcgttttttcctggatctctaaaagggaactcaagggtgggggttactgaagaatactacagatttggaagtttttgttgctgttgttgtttggtttggttttgtttttcaagaggggccaggagaaatgaccccttccccgccacgggtcccgaagtgagggcggggggggggctctggggcgcgggcgcgcgcggcgcggcgcgggccggcgggggagggcggcgcggcgcggaaggggttaaggcgctgagcgcggagccatctggccgggttggctggttataaccgcgcagattctgttcacgggactcagagttgaagctcctctcccttccgaacagctccgcgcaccgccccgcgacgcagcccggcgcaactactttcttctctctcctttctttcttcctctcctttttcccctgctgggtagtggctgcggcggggtgggggagactttgaatgaccgagctcgcgtccacctttctcttcatgtcgacgtccctggaaacggccacacggatgccatggttacttttgccacggtaaggggaggcggcgggcaccttgggtgggcaggtttggggatgggggtccacgtggggagggattttccagtggactggtgcggggggccccagatccgcatcccgccccacccccatcgcgccgcgctcactcactttcccgggcttgtgtcttccccaaagtttgcgctgggatctgctcaggccgaagcgcaaccgcagccaccccgctacacacacacacacacacacacacacacacacacacacacacacacacacagacacggacacccttctccacctcctcccctcttgtccctcggctgcccaagaagcttccctcaatctgggaaagtgatcaggtttaagggacctggattggaaagggtgggggcagaagaggggaaatggggacgacgaaagagcaggaaagagattcaacagaatcaaccacccaccactcccaaccgacccgcctgctcctccgagaaagctcctagcgcatcctataacaaaagggggtggcagacagaactccgggcggggaggtgccgcggcagctcccctgcacacgccctgcactctgccggccgctgagcctgattctcagctcgccccagcaccactctggcccgggcgtgggctggggggaggggacgcgcagctcaggacccggaacctcgcgttccagttttgggagttgggactcactgccacgcgccgcgtacctgcgttggagttccccgaaagggttttttcagaaaagacctcgcgccccgggctcctcttggccagcgcccacccggtggccaccccaccctgggcctttgcgcagatgttggagctccgtacgcagcccgcacatctgggacccctccggggagcggcgggcacccgggcccggccatcccaggggatctccttgcggtatcgtccagcctgttctcggactttgagcggtggcgtgggaggccgggagacctgggcacccgcgcagccagccaggtcggagtttaaaggtcccacgacggaccgaactgtcccattgccccagagctttactcagtggtggatgctcctgatgaaatttgggacgcttgggagttgaaggttagggacaggaggggcgagggccgagggcatgggatgggggagtaggattctgcttgttgctctccgcgggagtgggtgcgcgtccaggaggcgctgcttctttgcgggagtttggctgctgc

SEQ ID NO: 34263 - DNA, 1867 bp, Homo sapiens
  chr12:62584265-62586132
  binary
cgggagacatctaaccggaaagaaataaaaaaccattagtttcccgaagccattcttattctgaacgctgttcgttaagagaatcatttactaaagctctcttgtagtagcctttacaaaagctttatttcattcagtaagaaagcgccccgtcccaaatctaaataaaccttacatagatgaggctccggaaattatcagcttgattctttatgaagatagttagaggtggataaatcaatagactcgctgaaacacccaccttctgcaaacaggcctgagaattaactaatcagaagtggacaaaaagtagggatttcagaaagatgacctgacacatcccattgatcttccctggaatgcgacccccaactccttattaagagtccaaaatggttaccagccaggatgggtctgggtgaggaatcgaattacaacccacttcaatcctcgacctggtcgtttgctgttattaggagaaatggggcagagagggagggcaccgctcacggagcctcatttcgcatgctccgatcccctctcggcgtccctctactccgcccctaccctgaccgcccgcgagggagacgccggccgatggacccgcatctgccctcacctctcgccttccccgggcgatccctctacagtcccggacccccgagaaaggggaagggagacgtgtgcacacgggggcttccgggaccgcggtcctgcagttgccgctccggtccccagcgctggccggcgacccgaggcgcggctcgcacctacctgcagccccgcttcccggtggcggcaacacctagcgatgctcctgcagcttttgcgggccggcgccagccttatcgctctcgcatcgcttccaagatgccaatccgccgtcaccatccaggggcatagggaaccgaagtctggtgctgtgtgatcgtggagggcggcgtgtgagtgtggccctgagcgtgcgagtgtgcgcgcgcgtgtgtggatgtgtttcctcctccgatggcaaagacggttcaggaatctgacatccaagctggaatccccctgaagcgggtgaaggtgagcctgatccttctccccgcttctttattccacagtgtcaaagtaatcaaaagatttgtttactgaggaaaagccaaagtcccgcagcccttggcagcgcccgcggtcgcctcctgtcctcgccggatgcgcgcggtgcgctcagctccctggactgcaagaatcaaggcggtcttgctgcaattaccgctcttattccatctctgatttgtttgcttttaaggccgactaaagacttttcctctcgcctcacgtcgtctctccctctcacacacacacacactcacacatcctccgttccctctctcccgccctccctcttgttctctggggaaaggcaattggacagaatgattcaccttcaggaaagcagcctcggccacgcacttctcgagttccctggctctcgcaggtaccgggtctccaacgtggcggagttgctgggaagctcgggacaggaaggaggagaggctctgagctcagccgatgtcccccctccagacgcccgcgttcctccgtccaggtgcccctgttcccactgctcgcagataggtccccgctggtgccctcgcggagacttggcgccttccactcgaatccacttagcagcaactcctggccagcttcagcccctcaatcccgcctcgaagtgctgcgggcagagccccacgcagcccacccgctgcccttctaggcatcgtgggctggaaggaagggaaacccgccgatgtccccctggtagcagtgccctggcaccgtcaccaccgaggaggtgcgagttccaacatcgaacacaagc

SEQ ID NO: 34264 - DNA, 1861 bp, Homo sapiens
  chr12:65218018-65219879
  hyper
cgcgcctctctaatctgccaggaaataattcaacgcaattcgggctgaagcgtgtgcctcgccgcctgcggttgggtcatggccccttctgagactgctcggaagtgggagaggatgcttgcccttacgggtgttctgcccctgagactggcgccccttggtgctccctctgttccctcccagatcttgggagaagcacggacatctctgtttctgcttttggtccccgaacgcagttacgcgcccactggctccctgtctctggcgcttctgggcacgggggagctggggcggccccgcctgcgcacggcggtgccgggattgggggcgggcacgccgcctccgtctcccacgcgctcgctcgctcgctcgctcccgccctccccgcctcgagcgatctcctgcctcagccttgcaggctccgcactgcagatgcctgctggcttccctgcgctcggcggctcccgcggtgccccgtaagtccccgtgaccctccagcaccagccggctgtgcgctccctgctcccacgggccggtcagccgcagacactcacccagctccgcgagctcagccgctcagcgagtggggtagcggggaccgagacggacggtagccgtgccagagcccggggcgctctcggatgcggcaggacaagctgaccgggtctctgaggcgcggggggagatgcctgaagcggcagggcggcggcgtgggcaccatcctgagcaatgtgctcaagaagcgcagctgcatttcccggaccgcgccccggctgctgtgcaccctggagccgggtgaggaccccagggctgcagatggggcgctgtaaagtagcgccggggctgcccgcgcttctgccttagcctgactccgtctaggccggggagctctggggaaagtccgcgtgccacctggtgcggggcaccgcgttggcacctgcagggagcgattggtctggaagggtagagggcagacgggggcctgggtggggcagcggccaccccaggcgcggagaacccgctgcttccaccctctccccgcggacccccaccctgcggcctgtgtgctcggctttctccgcgtggcggggaagtgcgggtggctgcccgggccctcagaggccgcaccacctattgtgttccaggctcgcaggaagccagaccttgcgagaggtgtgtgggggcggagagtggcacaggtttgacactgcaggtcggaggaggaagacagtggctgcaaaggcaaaatcgggtgttattttcccaagagtcccttcagcgtgagtgccggggtcagctcgaactggagcctgtaatttgtgagtgcgagtggggagcagcaggagatccttttcataggtgaggtccaggaacgagcctggtcgtgctaggcaaggcccttcccactgtcagcctgtgtttacccatccctgcttctccagactgcataactccgtgtcggctccatcacccggcatccctccccgggattttaagagcctggccctagcgcgggctcctgggcacggaggtttctggcaaggagtggctgcagagggagttggctgtactctcactggtgcttggcgctcacctgttccctggagtggcaccggctgcgttccaggcgggttcacggtccccggcccccgccccccagcgccagcgccttggggacctgctgtagagccgcaggagaatcgagctgcagagtcccaaagggtgggatgcggcactgcctttcccaacctcgtggtttctttgttgttctcccctaggaagtgtctagttgcagaggctgtagtatttattcaccatcttcctttacctcttttttttttcttttaaatctccttcccac

SEQ ID NO: 34265 - DNA, 326 bp, Homo sapiens; identical to SEQ ID NO: 31061
  chr12:65220127-65220453
  hyper

SEQ ID NO: 34266 - DNA, 210 bp, Homo sapiens
  chr12:69964066-69964276
  hypo
cgaattggtgacatatttgcatgactgtcaccttctttttttaggtcattaatgtggatgatgatgggaatgagttaggttctggcataatggaacttacagacacagaactgattttatacacccgcaaacgtgactcagtaaaatggcactacctctgcctgcgacgctatggctatgactcgaatctcttttcttttgaaagtggtc

SEQ ID NO: 34267 - DNA, 1471 bp, Homo sapiens
  chr12:79257495-79258966
  hyper
cggttcagctgggaagagaggaagcagggagagaatctatgctttagtcgtcactgctctggcaaggggtcgagagagatgggggagggaggtggcaaaaaataaaaatgaaaaaataaaaaagcatctccaacaatgttgcacttgacccaagtgtacaaacttattggtcgctgcaatggaaactcccagtgcactctccacggcctggcagccgccgctgatgggtggagtcgcgctcccggccccacctatgggacggagctgcttctcccgcatctcggctccaccgcacccttcgcgggaagtccccaggcttccagcaaagctcagcttatcccgcccccgcttccaacccggaaccccagaagaacagcatgatgagcctccggcagccaggtgggccacctccccgcggctcagtttgaggacacttgtgcggaaccctttcacatccccaccctacccagctttcacaactccgccgggttaaatggccaaagacaaacttctacctctcctgtccccggtcccagcttttcaaaaacccacagctggcgaacccacacacatcgaaactcctaggtcgctgttgcagtctgggcatgctcagtatcagggtaggttttgattgagagtaaaaaaaaaaaaaaaaaagctttgtattatgctctctttctcctgtgcatactgcttgctgaacagcttgtggggcattcctgagtctacctagaggttttatcagacgcccttgattgtgtctccttgggatctgttcccctcttacttcaccccctcccccaacccgcctccaccccgcttcccaggtccctgtccgctgtggggatggagagacactaacagaactgggatgggcgatgttggctgaacggatccacctattattagtgcgcggggattggctccttggcgcagcgtacccgaggtggagccaatcaggatgctggggctcggagatgatgggcggccgcctcctcactggagggattcctggagaagctgcagtgtggggatgctctagaccgagtactgcccccagtgtctttccacctcctcctgcagcagcggcagcggcagcagcagttagcagcggcaacttgaggctgcaccccgggcaagtccccagggtggtgctcagccgagaggggggcttggcgccccgaaggggtgtgtgtagggtgggggcgaccacgtgggaccagctggtggccctggaaaacctcccacacacccacacccacacaccccttttgtgttgcaggctgcccctccaagagcggaggcagcgagagtacgcgtgtgcctcgcgccggtccacgcggggagagcactggggaccgagacccggcaccacctcccggtccgccctccaggtaaggaagcgggactggcggcgcggccacctcggcggtgcctatctgctcgaatccatcccaaagattttcttctc

SEQ ID NO: 34268 - DNA, 963 bp, Homo sapiens; identical to SEQ ID NO: 26290
  chr12:85305601-85306564
  hyper

SEQ ID NO: 34269 - DNA, 1303 bp, Homo sapiens; identical to SEQ ID NO: 32544
  chr12:93966037-93967340
  binary

SEQ ID NO: 34270 - DNA, 1422 bp, Homo sapiens
  chr12:94542716-94544138
  binary
cgccctgcccgggggcggcccccccagccccatggaggtctcccggaggaaggcgccgccgcgccccccgcgccccgcagcgccactgcccctgctcgcctatctgctggcactggcggctcccggccggggcgcggacgagcccgtgtggcggtcggagcaagccatcggagccatcgcggcgagccaggaggacggcgtgtttgtggcgagcggcagctgcctggaccagctggactacagcctggagcacagcctctcgcgcctgtaccgggaccaagcgggcaactgcacagagccggtctcgctggcgccccccgcgcggccccggcccgggagcagcttcagcaagctgctgctgccctaccgcgagggggcggccggcctcggggggctgctgctcaccggctggaccttcgaccggggcgcctgcgaggtgcggcccctgggcaacctgagccgcaactccctgcgcaacggcaccgaggtggtgtcgtgccacccgcagggctcgacggccggcgtggtgtaccgcgcgggccggaacaaccgctggtacctggcggtggccgccacctacgtgctgcctgagccggagacggcgagccgctgcaaccccgcggcatccgaccacgacacggccatcgcgctcaaggacacggaggggcgcagcctggccacgcaggagctggggcgcctcaagctgtgcgagggcgcgggcagcctgcacttcgtggacgcctttctctggaacggcagcatctacttcccctactacccctacaactacacgagcggcgctgccaccggctggcccagcatggcgcgcatcgcgcagagcaccgaggtgctgttccagggccaggcatccctcgactgcggccacggccaccccgacggccgccgcctgctcctctcctccagcctagtggaggccctggacgtctgggcgggagtgttcagcgcggccgctggagagggccaggagcggcgctcccccaccaccacggcgctctgcctcttcagaatgagtgagatccaggcgcgcgccaagagggtcagctgggacttcaagacggccgagagccactgcgtaagtcctgcccccggggcgccgcggagagcgctgctgccggggagccgccgccgccgccgaggcagaacgagctgggggcgagcggcggggcgggggtacagccgggtgacatttaccaggtctcaggttcacaccgcgggcggccgtccgaaggctcctctcggacggtccccgagacctggagcacggcctgaggtccccaaagggagagtgtaaaaaggggggcggggagggttggagttagactcaaaactctagtggctgcatcccattgccatccttccctgtccaaacggggacgcttgtttggggctgagtctcctcgc

SEQ ID NO: 34271 - DNA, 738 bp, Homo sapiens; identical to SEQ ID NO: 27590
  chr12:96883072-96883810
  hyper

SEQ ID NO: 34272 - DNA, 775 bp, Homo sapiens; identical to SEQ ID NO: 27591
  chr13:102068457-102069232
  binary

SEQ ID NO: 34273 - DNA, 975 bp, Homo sapiens
  chr13:109147893-109148868
  binary
cgtcctgggcgccgcaggaaagtgacccgcagagcgaggcgcggcgccccgggagctggagctcagccccacgacccgcgctgcggcgggcaccacgcggggggcgcgcggggaggggagaggcggggccggcggggactgtgtcgccgccgacgccgcggctgcgggtcgcagaggcgggcagagagagccgccgccgagcgggtggcggagcagtccccagcctccagccggcctggctgcgcgcaaccgcgccggccccgggcacaggggcaactgccgacccctctcacccgccgcgcggggctggtttccgagccgagtcccggccatcgccgcgtcgcctggcgcccggctccggcggacccttctccggcaggtaggggcgtcggcggggcgctgcgcgcggtccaagcgcggggaacgcggcggggcagcctctccgagtctggaggtacgcggggcgcagaggctgttctgcaccgccgggctggggacgccgggagggtgccccgggtcggacttgcggcgctgggtccccacccagagttcccgcacggtgagggttggacgcgtctggggggcgtggagaggaggcttgtcggtcccttcctgggaaaggaatcgcggggacttcccaaccgctaggacgcgtaagccgaggctgggagtagaagccttctgaactctggacctaccccagaaggagggggcgaaactggccatttcgagggacgcggaagccccgttgctaggggagatgggggaagcggcgtggtcacctacacaaccgctcccaggcgcgatgggggctctgcttcctcctcctctgtttctttggggatggaaaagagagcagaacaaagatgtagagtgaaggagggctccccagctgttgcctcttgcgcggattctgctgacccctctgcgcgaccccagctgggcagtgtcagctccattgtctcagaggccggc

SEQ ID NO: 34274 - DNA, 990 bp, Homo sapiens
  chr13:110959704-110960694
  binary
cgcgcccgcgcgttcgcggatccaggccgaggaccgaaaggggccgcccgagcccccggggccggcgcccagagagcccagcaaggccggccgccctgccggtgtgccgccggcgggtgcttctggaagggccaatgcgttcgggcagcagcccctgaagccgagcccgaggtgagagcgacccccgagcggcgcccagaccctggcccgagagcaccgacttggagcgccttgtgcaggctagggctgcacgctctcctgcttgggagtagaaagggggagggtgggagagcgaagaccgagctcctcggccaaggagcacccacaggggcctaacgggaggctctccttctttccgggtcgtgggggggacggccctccggtcacccctgcatgcgggccgcgcaccgcgctgtccccgcgtctcgcggaccgagaccggcggtgaggatgggctgcctccctcatcctgcgctaaactcgctttgtctgtcgcctctaggctaagtgggactgaccggggcccagagtggacgaaccgccagcatggggagagaccagcgcgcggtggccggccctgccctacggcggtaagcgactttctgcctggtccccgtgggtcacgcgcgcatggacccttcggtgtaactctcggggactgacaagccgggcccgcacgttcacgtctctcttcctccctttcccatgcaggtggctgctgctggggacagtgaccgtggggttcctcgcccagagcgtcttggcggtaagtcctggctcccgcgcttggacttgcgcgcccgagagtggttgggacgtttgagtggccttggagaaggcagctcgtccgtgcgctcccgagtgtgtgtgtgcgtgtggatgttcgccaggctgcccaccaaggttctgagaaagcttgctcttccctcatcatgctttccacctttccttccccttgggttcccagcgtcaatcctgtgttttgcaagc

SEQ ID NO: 34275 - DNA, 849 bp, Homo sapiens; identical to SEQ ID NO: 27598
  chr13:111277855-111278704
  hypo

SEQ ID NO: 34276 - DNA, 519 bp, Homo sapiens
  chr13:111330283-111330802
  hypo
cggccaccccggtggaagcccctccagccgccagtgggcagcacgccccaggctgtgtctcttcgaaggagccttggcttctcgttcactcctgtttcacccacgtgagggacaggagcaccggcaacgctttcacctcagatgcaccagcgcacagggagagctgggcggccgggaacccacagaggctcatttctcaggaatgtactgtggaccaggtggggttttcccatttttccttattctgtcttacgagaaatactctgcttatcagtaactgagtttcagggttgttttttccaaaaagatactaatcacacagagtgaaaggcgcgtgatcgtgtcaggtaacgcggcttatggacccgagactctgagcaaggtgcccatcaccgtgcggtgaggctgccagtggcgcatgctcaccaaaacctgctgtcccatctgcccaggacaggcacaccccatgtgcacaacgtcccaatatcaccctttccacccgggagcactgacacaggc

SEQ ID NO: 34277 - DNA, 831 bp, Homo sapiens
  chr13:112722879-112723710
  binary
cggcggccgcgtcgtcgggcgccctgggcgcgctgggctctctggtgaagtcggagcccagcggcagcccgcccgccccagcgcactcgcgggcgccgtgccccggggacctgcgcgagatgatcagcatgtacttgcccgccggcgaggggggcgacccggcggcggcagcagcggccgcggcgcagagccggctgcactcgctgccgcagcactaccagggcgcgggcgcgggcgtgaacggcacggtgcccctgacgcacatctagcgccttcgggacgccggggactctgcggcggcgacccacgagctcgcggcccgcgcccggctcccgccccgccccggcgcggcgtggcttttgtacagacgttcccacattcttgtcaaaaggaaaatactggagacgaacgccgggtgacgcgtgtcccccactcaccttccccggagaccctggcgaccgccgggcgctgacaccagacttgggttttagactgaacttcggtgttttcttgagactttttgtacagtatttatcacctacggaggaagcggaaagcgttttctttgctcgaggggacaaaaaagtcaaaacgaggcgagaggcgaagcccacttttgtataccggccggcgcgctcactttcctccgcgttgcttccggacggcgccgaccgccggagcccaagtgacgcggagctcgtcgcatttgttataaatgtagtaaggcaggtccaagcacttacaagttttttgtagttgttaccgctcttttgggttggtttgttaatttatacaaagagattaccaccaccaccccctccttcagacggc

SEQ ID NO: 34278 - DNA, 123 bp, Homo sapiens; identical to SEQ ID NO: 16387
  chr13:113244578-113244701
  hypo

SEQ ID NO: 34279 - DNA, 137 bp, Homo sapiens; identical to SEQ ID NO: 16388
  chr13:113369414-113369551
  hypo

SEQ ID NO: 34280 - DNA, 251 bp, Homo sapiens; identical to SEQ ID NO: 16389
  chr13:113379254-113379505
  hypo

SEQ ID NO: 34281 - DNA, 778 bp, Homo sapiens
  chr13:113648343-113649121
  hypo
cgaccctccgccttcgtctttttcctgattaaaaaaaagcaccttcatgcggggtgcggcgcttgggaccccccaagctgacgtcactgtctgtgccggtgtctcgggcaggggcaggtgtggatgccaagctgacgtcactgtgccagtgtctcgggcaggggcgtggctgccaacggggcacggtgcgtgggatgccaagctgacatcactatgcaggtgtctcgggcaggggctggcgtggctgtcggcgtgacggggcgcggcgcgtgggacgccaagctgacgtcactgtctgtgccggtgtctcgggcgggggccagtgtggctgccaatggggcaaggtgcgtgggacgtcaagctgacgtcactgtctgtgccagtgtctcgggcaggggctggcagggctgcccaggaggctgtcggtggggcagttcctcatgaatctctgagctgagtttgtaaaagtgtgtgagagtggggaaaatatgggtgaaaatattttcagacatttggattcccctttggtgagctgtctcgtttcttcccgctggtcagggatgtggctgcttgaacagctgggcgcggtgaccaatgtgtggagagccgggaagcctgcggtgaggccgcgcgatgtccttcatcccgggcagtaaatccagccccgagggtggggcatcctcccgggcacaggctctcctgcctggggtcgccgctgcgggcaggacatatgggcctcccaagcggtcccatctacacaggtcgggtagagtgagtc

SEQ ID NO: 34282 - DNA, 484 bp, Homo sapiens; identical to SEQ ID NO: 23887
  chr13:113985425-113985909
  hypo

SEQ ID NO: 34283 - DNA, 294 bp, Homo sapiens; identical to SEQ ID NO: 29831
  chr13:114769900-114770194
  hypo

SEQ ID NO: 34284 - DNA, 341 bp, Homo sapiens; identical to SEQ ID NO: 31087
  chr13:114961716-114962057
  hypo

SEQ ID NO: 34285 - DNA, 839 bp, Homo sapiens; identical to SEQ ID NO: 29832
  chr13:20735265-20736104
  binary

SEQ ID NO: 34286 - DNA, 705 bp, Homo sapiens; identical to SEQ ID NO: 26311
  chr13:28544184-28544889
  hyper

SEQ ID NO: 34287 - DNA, 1026 bp, Homo sapiens
  chr13:28549512-28550538
  hyper
cgtatcccagttaagttacacaggtgagtgacaagcccgggtcggctcctgagttctcatccggagctgcgctctcccgtctctttactgggagcgttctcctgccggggcttggacatttccaagggaagtgaaaatccacaaagctgcccccacttcgtaagggcctgtgcctggagggtcgtcgggttacagaaattgaaatcagctctttgccttccaactcttcttggccttgccaccgcgattggttttgttttctttgtttttaacgaattggtaagtaaaatattagttgttcaccctgaaatctgccctaaccacttccgtaccccctgaagctcgctgggcgcgccctgggctgtccttccctgagcagccgggcctagagtcaaggcgcgatgattgccgcgcaagctagggtccacgcggccggggctcctctcccgcctcgggcgcaccagaggccagaaagcggaaagcggctctgccaggccaaggccgacagaaaccgagagcatgtcgctatttgccggagagaactgccctgccaggctgccacaggtgacttgcccgcgcgagccacggcctctgcgcagagctcctcccgaaggggagagtcagagccacccgcgggtttggtcggggctcttcccagcccggcgtccacgccccgcgtcctgcgctcgcccttgcggctgcttatgctcaggtgtttcggaagaggcgccgcgcagccagctctctgtcccttcagctccagctccttctaaagggacagactcagcgtctgcccccatctgcaccccttcccgcaggaataaaatcattttccggacaagcttggaactgttgaaatgtaactatgtaattggagacaccggggtcgtgtctgggagattctgagctcatctacactcttgctaaactgcggggaacccagccctggtgggatctgtgcatctcacatgagcttttttacataaagagcacagacgctgcatttggggcctggtttatctaagc

SEQ ID NO: 34288 - DNA, 1254 bp, Homo sapiens; identical to SEQ ID NO: 23903
  chr13:28673915-28675169
  binary

SEQ ID NO: 34289 - DNA, 1799 bp, Homo sapiens
  chr13:29067770-29069569
  binary
cgatgcttaaaagaaaggcgctccgaaatctggctctctgcgcccaggggaacgaggcacaaatctccgccactcagccccactgagcagagactgcgagtccgaaccctcaagttcctcggggctttgacccctcaatggcggcggtctaactgctggtaaaacccccggcccctgactgttccaccgcccgtctcccaaacgcccagcgaaggctgacttaggtggcgggcggacctcatcgattcctcaaaccacatcgtttggtcaaaatcgcccgccctctcttcgctcggattttaaaggctaggcttgtaagtcagtaagttaacggtatttgggccctgggctgcccttgtgggtcagggtcactgatgtccgcgacacggactggaccgcgcaccacgcctgctcccggcagaggccccacccgggtggctgagcgcagcgcactggggccccgcggtccgagagcggcggggaggagcgggcgctcgccgagcgttccccgggacagtccggcttggggactcaagcgggtcatgggatgccggcgctggccctctcctgagatcctcctgctcccccgcaggcacgagtcccctccaaatcggctcccctcctacactctcgtgacgcgaggtcgcggccagtgcccaatatcaccaaagtcccggcctcagcccagccccgggcagcctggcaggctttcaggagcctctgctcccggctccgggggaccctgcgtacctgccccaggtcctctgggaatgggctctgggtgccaggcaggtcccggtgcgtgctgctcctagtgcccagggcctcggcagtgagaccccaacccgacagctggataagggatcagcgatcctgtcgcaaacggacagccccagcgcggacccggtctgagcgctgatgctcgcgggtccaggccagccactcctcgaggcgctccctcggagaaagggcgcagcggccccaagcgtgcccgctgcaactagtgtcccaggttctcgccgtagccagcttctccgggctacagcctcgtctccccgcgtgcaccccgccctggcctcggaggctctgccctccggccgccccatcgcagcccgcctcaggccccggcccccagccgcgcctcacctgtgagaagcagacagctgagcagcgcgcacagcaggaccccggtgtcccagtagctgaccatggtgagcgcgacgcggcctgctcgcccggtgcccgcgctccccgcggccaacgacccggccgccagagtccgtcctctcgttcgccgccgccggccccgcgccctgagcgcccgtctcgcggctccagccaggagacaaccacttccccgggtaatcctcgccgccaggcgcccgctggccgctgcacccgagccccggagcccgctccgagccgccgccgctgccggggaggagccgagaggagtgtccgcctggcgcgctccgagcctcccgcggacctcgatgaagagcagccgagggcgggggcgatttataacctttccccagcccacttcctaccccggcacctccttctggtgacgtcaaggggtcccccacccctcatccgcctccccacctaccctcttcttcctcccaggctcgcttccctgcggctacggagaggggcgggggccgacgagggcgggtggcccggggccgagcgcgcgtggggaggtgctggcgacgcgggcccgggagcgcggccccggcaggttcagggtctttgctccgcgccctcttgcccttgcccctcctcctgcccatcgc

SEQ ID NO: 34290 - DNA, 886 bp, Homo sapiens
  chr13:30707193-30708079
  hypo
cgacggggacccggaggcaggaccgagagcccagagagttggtggcgctgccgtccctgcactgggtgggccgtgctgggagaaggtcccggggatcactcctcctaggccgccggggcagtctctccagccaccctctttccccagagccagcgggctggggttcttggtttagactctcttctctcctgtcctggaggaccagccatttgacgcccttgtccactgggaggatgttttccatgattccacttcttcccttcctcggccacctaaggcaggccggcttatgcgtgactgtcaaccgaggcaggccacagcgctgtgggcaggcggttttgcacgtatccttagtgaccctgaaggcccagcctctgctggctgcctgagccgagggttttacttcttttcatttaatcactttattggtccttgccgggagggagcccatgggtcctggtaaaagtgcatctccctgtggttctggggctgatcctccttctggagcagaagacagagctcagtgaggaccgcctgtgctgcctgcctgggacgccccagccgcagggccgcgcaggcgtgtttctttgagagccctcccctggaagctccctttcactccaccctgttgataaggcccaggacaaaaagcaagcaaccgctggaaacacacctgctggaaacacgcctccagtgccagcccaggaggtggtggccctgtcctgacgccccgtctagccaccgggccagagctgggagccccatagtggagtctgtgtccggcaggtgtctctggacagctgaggttcttgtaaccaaagaggttcgtttacctccttagatcacccagggacaagtgatgtgttttgtggcctcggatcgttcc

SEQ ID NO: 34291 - DNA, 903 bp, Homo sapiens
  chr13:32605049-32605952
  hyper
cgttcgggctccgatgccccttgaaaagactgcatttctgggagggaaaagtaaaaatgcagataccaccatgcgtgtggaaggcagggaagaaaaagcccagacaagcgtcctcttgttgagtctctttactgcaacgaggctgacggatggggtttttcaaaacgtcgctgcaaccagatgcaaggctgcagctttgcttaccgcagcgtgctgcagttgtgtttatttcagggacagacacaaggggaagcagcagccagagcacacccgggccgctcacgggaagccttgctgaagagagaggatccgcagaagctgggaaattcctcccgcagcctaggcggagactgagccgcggctcaggttgagacagtgggcaggggcagggggcggcgctcccggcccatcccttagccccgcggcggccgtgtgggccggaggctgcctgcaccgcgtcagggaggccggcctagaaaccctccctcccagaagaaagccgatcccagttcaggtggggtcttcctcggttgcgtacctggctggagccgagctggtgggcggccggcagccggcgtttctggtgatgacagccccgaaatgaaagcagcgcggccgccgcctccgagggctgcagggagatcagcgtccagcaaataagaagcaagtcctggacccggaggaggaggagcggccgagcatctctctctgctccgccgtgtcctttagatgagcactcccggccggagccggaggtggatccgcagagctgcctctgggcgcctgaccccgcgctgacatcacaacctgtgacaggcgcatcacgcccggtacctgctcccggccgctgcccgtcctcccagcctctttgtatgccgcagacatggccagccagcaggattc

SEQ ID NO: 34292 - DNA, 888 bp, Homo sapiens
  chr13:36920286-36921174
  hyper
cgagtccgcggggcctggggcgcccaccccgcccacccaagggaccgcgcaggggtgaactcccccgcgccccacctgcgccttccagacctcgggcgccccggcgttgcctcgagagctccctgcgcggccgccgcggcacggaccagctcccactcccttacactgggcgccgctgcgctcgccgggggccggtcccgaggttcccaaggcctcgcgcgcgcgcttgccgtggcaaccaagacgttccacgacgcgcgctctcgaacgcttcgcgtcacgcggccgcgcggccccgcccgtcggcctcgctcccgccacagagcccgcagcacgccgccgccgcagcctaggtcacgtgagtacccacgcgcgcgtcttgccagcggattcatcaccggcctgctcagactaggttctgcccactctgaccttctaaatggtacgtgggaggacgtccgtccccttcggacccaagagtcaccgtaacactctagaaggggagaaaaggagcgagggcggcaggcgacagagaacctcgcgagtcagcggccccgcgcagacccccccaggcacggtcccctgcggccacgtcggctgctcggcgcctgcgcaatctctttctctccagcgaaaccgaggcctccggagagcctagtagagagtgtgggcagtgagcgcttgtagccgctagagggagcgctgggcacagtgcacgagagacaataaaggctgattatcccctcaatgtctctgcagcctgagctttgtgacttctgtatccagagcacagttaatttccaaaagcccgcctgcaccacgtgttttaagtcttggtgtgtgtgtaaagtctatatcactatcataaaactgttagttcctgattcc

SEQ ID NO: 34293 - DNA, 1420 bp, Homo sapiens; identical to SEQ ID NO: 22793
  chr13:37005451-37006871
  binary

SEQ ID NO: 34294 - DNA, 148 bp, Homo sapiens
  chr13:43543191-43543339
  hypo
cgccctccctcattccggcagcggctgtgcttgcttacctagccgtctgggcaccaggtgaaccggtttagctctgttctgctccttccacttctccaggttggccagctcctgctccgcaactaagccaggcgagaaatatcaaatc

SEQ ID NO: 34295 - DNA, 165 bp, Homo sapiens; identical to SEQ ID NO: 23906
  chr13:45926327-45926492
  hypo

SEQ ID NO: 34296 - DNA, 866 bp, Homo sapiens; identical to SEQ ID NO: 23058
  chr13:46960952-46961818
  hyper

SEQ ID NO: 34297 - DNA, 1110 bp, Homo sapiens; identical to SEQ ID NO: 25074
  chr13:53312858-53313968
  hyper

SEQ ID NO: 34298 - DNA, 708 bp, Homo sapiens
  chr13:53422554-53423262
  hyper
cgcctcacaggactcatgcctccagcctcaagtgcgatccgaaaggctaaggaagtcttctctggtttccaggtcgggcgtcagtctcaggctctcggaatcacgctctttgcgagccctgtgcgggagaagtctgcgggtagcagctccgagcctccagcgggctctgaggacgcgcggacccgccctcactctgcgcctctccgtctcttacagaagctgcgccgcctcgcgccgcctttgcctttatagccgccgatatgctaatcacccgagccgggtagccaatggccgcctccccctcgcgtcgcccctccgcctgcctctgacaatccctttaatgtggaaaggcttagaggggaaaacaagaaaggaaaattagggaatctttcttttgtttaactccttttgctttttcccccttttcttgtcagcaccctgcatgtagaggagttggcacagggctccaggagtaaaaggagcggatggttttgttaattgtcgcctgcctccctccgtgccgcggctagaactaagtgcgaacacgctggggtttcaccccagtggctcctgattccgccttcccccagcccctgccaacacacacactctgcattttgcacctctgacgcttccaaacccttgcagccccctacccacagacttgctctgctgaatgaggctctgctttccttctctcctagctac

SEQ ID NO: 34299 - DNA, 1466 bp, Homo sapiens; identical to SEQ ID NO: 27620
  chr13:79169684-79171150
  binary

SEQ ID NO: 34300 - DNA, 1783 bp, Homo sapiens
  chr13:79175610-79177393
  binary
cgcaccacgttctttttgaggtccagtttctcggcgatggcggcgatcttctcggacgagggccggggctgcacggcgaagtaggcctcgagggagcgcttctcgggcgcggcgatggaagtccgcttgcgcttcttctcgccgccgttgaagagctcaggcttgttcattttctcgcgctgggcgccctcggcctcctcgagccacgcctgcaggatgggcttgagcgcgatcatgttgttgtgcgagagcgtgagcgactcgaacctgcagatggtgctctggctgagtgagcccacgcccgggatcttgaggttggccagcgccgagcccacgtcggcctgcgtcacgcccagcttgatgcgccgctgcttgaagcgctccgcgaacgcctcgagctcgcgcgggtccgtgtccgagtcgcagatggacgccaggcccgctgcgcccaccacggccgccgccgccgatgccgctgccacctgcccggccgccgccgccgccgctgccgctgccgcgccgtggtgcgccgccgccgccaccagcccggggtgcggcagcccggacggcatgttcatggcggccgccgccgcggggtgcgacaggtggcccaggctgtgcatatgcgggtgagggtgcgcggagccgcccaggagcccgccgcccgggccgccgccgccgccccccgggccgccaccgccgcctcccccggggccgccgcccgggccgccgccgccgcccgggccgccaccgccccccgggccgtcgtgggcgccgccgccgccggccgccgcgcccgcgccgcccgcgccggccatgagcgcgagcgacggcgaggagatgtggtccagcagatcgccgggttcgagcgcctggtggtggtggtggtggtggtggtggtgcgccagaggcaccgtggaagtggacgtgcacggcacgctgttcatcgtgtggtacgtggcgtccggcttgaaaggatggctcttgccctgggacacggcgatgtccacggccgccagcgcctcggcccgcgccagcagcgtctcgtccaggctggcgaagaggttgctctgcagctgcaggcgacacaaaccaaaccaaaaaaaccacaaaaccaaaagagcaaaacaaaacaacagaagaaacacacacacaggccggaaagcacagcatgcgaagggcaaacacaaagcaaccaaaataacaacgggtttgggggcagtggagagcgggaaagacggagagggggcacattgacgaccagggagggggcagacgagaagggatgggagcgtggagagggggacagaagtagggagaaagggggacacaagaacacattccggaaacgggcgtgggagacgaaaaagagggaaaagaagaaatggaaatgtaactcgcagctggggacccgtgtcacacacccgagcacgcacagagactgcctttctgaggcgtgaaattaacagagaaagtagagggaagtcgagagtcctggccccagcgctccctactccgatcgcaggcgcctgacgcggaggcagaggcagacaggaacacgacattaagggccgccggacaaaacgtgcctcgctgcgggactgctctacaccccctgcccgcagttccccgcaccgggacctgcacacaccagcccccgacatgcagcgtttcggagacggggaggggcgggcgcgcgggccggggccgcgggcgtggggcgcttaccggcggcgtgggcaggcaggcccgccggatggcctcggagctggagtgcagcgac

SEQ ID NO: 34301 - DNA, 1613 bp, Homo sapiens; identical to SEQ ID NO: 22794
  chr13:88323357-88324970
  binary

SEQ ID NO: 34302 - DNA, 829 bp, Homo sapiens
  chr13:95359971-95360800
  binary
cgcgcgacagcgtccccagcaccagttcttactgcttacacagcgcaattccacctgtttgcacaaagcccgaagcaacatgcctggccccttggatacgaggcttgcttcaagttttgggacaacggtgaataccaaagaaattgcatcatggctttaaaaaaaaccttgaaaagaaacgaaaatagaagaataaaaggaagggaaagaagaaagatggaaggaaggaaggagagagaaggaaagaaagaaaaatggagaaacagggagagagacggagatagataaagagatggagatagagatcgcgagccagcagcagctctctgcccaatcacagcgctgcatttgtgggccactttcagacgcttacaccacccacccccgggcctttctctacgccctcttgccccggagccgctccccccgctccaaccccttacttctgcacagtctaacttggcaggaggctctctgcaggcgcaaaacccgccaacttgttagcaagaccattggagtcagaatgggtgataaacgagtctgtggggcctgtggaggtcctcaaacagccgcacaatctgttggcgatatgacctcggtgctccccctcggcatcctcacccctcctcttacccatctttccagtcctcttctcattcatcaacaactccggagcgtttctcccagaaaacgctgatctttgggaaaaggggagggggcgggaggaggcggggagtcttcaggccgaggaggcggccgagctggaaggctcagggtggtaactaagatttagggctggggtgatttccagcgagccgcaggaagttcc

SEQ ID NO: 34303 - DNA, 986 bp, Homo sapiens
  chr14:100437737-100438723
  binary
cgccccgcccctcgcagcctcaagctcagcgctcccggaggcgcggacggtggggccccgcgccttttgtgtcgggctttgaccgccgcgcgcgctcattcacctcagcggccgcgggcggaggggcgcacgcgcgcgcagtcccctcggagggcggtggggcgaacagcaacgcgcgtaccctagctcttggctgctgtgctgagactagcccgcgcgcccgcgcgcctctccctcgaggactcggagccgcccgcgcactcgccaggggccgccgccccgagtctcaggcggacgcgcacgcgttcccgccgcccggaccccagccggctcgccccccgcccccccatcccccggcggcggcccccaggcacgcgcccgcgcacacgccggcccgggcacgcgcccgccaagatggcaggggccggggcccagctgtcagtcgccgccgccgcggcccttccccgcagctagcggccccgacgcccacccggagaagatgagcccccgctgccccccgcagcccagtcagacgcggagccgccgcgcccggggccggctcccccgctagcgcccgcgtcccgcgccccgccgccgccgccgccgccgccgggtcgcccctggcccggcgcgcccgtccccggcagcgacaatgaggtgagtcggggccggcgcctcgtgggaggtggcagcggccagcgtcggaggggctgggctgggggcccgcggtgcccccgagggcgggaggggggctccacgggcgcgggggcttccagagaaccgcgggggctctgcagagattcgggggcattcagagcgcgggaatggcttcgcgagagccgtgggggcgtctggagagccgggagggtctgcagggcttgtggggggcagtgttctgcaaggggcaggcggcgctggctttggctgcttgtggggtcctcttaggctccggggggcctgcggcggcctgggaggcagacccccgc

SEQ ID NO: 34304 - DNA, 411 bp, Homo sapiens; identical to SEQ ID NO: 27628
  chr14:100644271-100644682
  hypo

SEQ ID NO: 34305 - DNA, 426 bp, Homo sapiens
  chr14:101543843-101544269
  hyper
cggtgtttttcaggcccagagctattgaataaatgaagtgcgcgccggcggagtcagtaactcactgcgcggctcccggcaggcgggggcggagtgggggccgcagaaccggacgtgcctggcgaggttcagaggcgctagcggtgtggtgggtgggcagcgccgggatggctggagggaggggctacggggggaggcgctgccgatcccacactgatctggcggggaggagggaggggcggatggggtttgctggagaacttgaccttgcttcgctcccctcaaggggcagctgctgggagaccaagtgtcaccggctggcaatcagggccccaagcctggagacttctggacaagcggaggcaagccgaccatgacggcttgggtgcagggagcaggtgtctgagcctttgacgtagacttccc

SEQ ID NO: 34306 - DNA, 609 bp, Homo sapiens
  chr14:102500433-102501042
  hypo
cgttcattgcctacgcgggttactttgaccagcagatgcgtcagaacttgttcactacctggtcccatcacctacagcaagccaacatccaggtgagaatcacggggagttcaaaaaggatgtgcgagcagtgtgaggcaagctggtgtttagtgcacagttagagtcttgagaacagtcccatctgtggctgtgaagaggaggaaaggtaacggccttgcctttcagttccgtacagatattgccaggacggaatacctttccaatgctgatgagcgtcttcgctggcaggccagctccttgcctgctgatgacctttgcacagaaaatgccatcatgctgaaacgattcaataggtatgagctcgggtgccaaggagaggcatgggaggaatgtgggtggtgatcttgaatttttttcaaaatacacccttgtttgaagagaggaatagaaaatggggcgtgggcatacagtgctggcagcttggtgctcctctgatggtggggcgtgtgctgttctcgttattgtcaagtgtctgagttattctgcagtgaatgcttcttgtaaccttctaaaatcgattggcaggggccaggcacagtggatcac

SEQ ID NO: 34307 - DNA, 174 bp, Homo sapiens
  chr14:103674105-103674279
  hyper
cgcgggctgtgggaacccggggccgtcctgctggtgctggtgggcacccaggccgaccgggactccgagcgccaggtgctgatggcgcgggcccgcgaggggccctgcccgttcccgggggtcacggccaagatccagcggaggatggaccaggtgttcacgctggcggtgcgc

SEQ ID NO: 34308 - DNA, 889 bp, Homo sapiens
  chr14:103988832-103989721
  binary
cggcggcgggctgcggggagacgcggggtcagaggggaccggcacgccggggttcccgggctcccgcgtaccactcaggcccccgccgccgggccccccggcgccccccgggacgcggccaaggtcagcggggtccgcagcgcgcgcggggagcgccatcatcgccggggacccccggccggtccggcgcgcgctccaggcgacgcgccccctttgcacgcagcgcccctagcccgggcgcggacgcccccggcccccgggcccactcaccgggcggccgggcgggggcgggggcgctccgtccgtcggcagctcccggagcgacgcaggcgaacagcggccgctccgcgctcccgcggctcttaaggggcacaacgcgggccgcccattggcggctatttatagcccattcattccattggcccgcgccgcggggtggtgccgccgctttgtccgccgcccgcagcccccaacaccctggccgcccacccgagctgtcccctcgctgggaccccgcgcagcctgcccagtcccccgcccaagacctcgaggccgaaacctcaggtccttggatatctggatcccctcgcacgcccttgcctctgggcgggaaactgaggcggagagcctccgggcactcgaggacgcttgggttcatccgcatcctcgagcctgcccgcctagtccagccagcccccgcggcggcggcgaggggccgggcgaaagctttcggggcttccgcagcaggtacggcccccgccccacccccggccagtgcgagctggcccggagccgccgaccttcctcaaggtgcccgcaggcgtttcctgggcgatcctggtgcaaagcgaaggcgcgcgggaagcgcagtctggctgcggcccagccc

SEQ ID NO: 34309 - DNA, 346 bp, Homo sapiens; identical to SEQ ID NO: 25083
  chr14:104159197-104159543
  hypo

SEQ ID NO: 34310 - DNA, 365 bp, Homo sapiens; identical to SEQ ID NO: 25084
  chr14:104159892-104160257
  hypo

SEQ ID NO: 34311 - DNA, 85 bp, Homo sapiens; identical to SEQ ID NO: 6896
  chr14:105472075-105472160
  hypo

SEQ ID NO: 34312 - DNA, 1084 bp, Homo sapiens
  chr14:105714491-105715575
  binary
cgcgctctctgcaagcgctggctgctggcgtccgtagcaagctaaatcgcgaagcatctgaacgaacgaggaagcccaacgaccatcccacaggccgcggccagaggcagactccggaatgcaaatggccaaacaagcaggtccacctgcgttcctaaccaaaagatcgctaactgaagaacgggcgcaagcacctgcgcatggcactgcgggtctgggggcggccgcctgccagcgccgggagccgccttccacggctacctctgcacagcgcgcggctcgcgccggttgctgggcagaagctcgagcagcttcgaggatgtcgggcctgggggcggggccgcgaggcagcgacgtcgcgcggggcgcggccctgacgcagcgtgacgcaccggcgccgcggcgggtacgggctcgggcgggcgggcgggcgggacggcgccccccgcggccgggcctggccgggctgcgctaggctgggctcgggcagggtcgcaggggcgggggtggcaggggagcgggtggcagccccgcgggtcacagcgccgccgccgcccatgctgctgcccctagcctgcctgcacggccgcgtcgctcagtgcctgacctccttgcttttgcttgcagagccgctcccgaggccccggcgcggcgcgagggcgcggggcgcggcgtccacaggcgccgaggctgcccccgccgccccgcccgcgaagatggcggcggaactctacgctcccgccagcgccgcggccgcggacctagccaacagcaacgccggcgccgccgtgggcaggaaggccgggccgcgcagcccgcccagcgcccccgcgccagcgccgccgccgcccgcgcccgcgccgcccacactcggcaacaaccaccaggagagccccggctggcggtgctgccgccccacgctgcgcgagaggtgagcccgtgccccgcggcccccgcgcccgcgcgcgcccacgcccccagcccgtgcctctacctttgcaggaacgcgctcatgttcaacaacgagctcatggccgacgtgcacttcgtcgtggggcccccgggggcgaccaggacggtgccc

SEQ ID NO: 34313 - DNA, 528 bp, Homo sapiens; identical to SEQ ID NO: 23066
  chr14:21100641-21101169
  hyper

SEQ ID NO: 34314 - DNA, 1221 bp, Homo sapiens
  chr14:23834171-23835392
  binary
cgtggaggtctctccccggcagcctccactccctggtggactcaccgacgtggcaatggccatggctttggcctcccgcgcagcctgcctcaggccaggctcggttttgctgacttcagcggtggctgccccgcaccatggtccgcggcctctagcccccagctgtggcgcctgagtcgtggcctccgccaaggttggaggaggagaaagaaaacccacaaaacttcccaaatgagaggcaggctagccaggcaggaggaggagcggggcgggccggggcgtcgctgcgggacggcatccaagggcgcgcgctgcgtgctgtccccgcggcctcccgggcgccaccggctcggccaggccccgggagctgcccgccctaggccgcgggggcgccccgggctcgcaggatccgaaaattcccttcccgggccggggcgggtgagcaggcgggcgctgggctgcgctcgacgcctctccaggccgctcaggagagcctcgagggctgggagaagccgccggggcggttgggctggacgagcgagtttaggggccaaccgtctccacccgccggccgcgctgcagagcggtgctcccagggctggggtctgcggcgaccccgctgggaggaagggagagcgagaactgagacgcttgccccaagttgcctggagccaaaggcccccgagagcgtggccgtggggctgggtcgctggagtggccgcttcggcccagacactcgcacccccggcggtgcggcggttttcacgcgcgcactcactcagcgcgcccgggggtctgaggtcgccgctacggcgcctcgccccgggcagcagcaaccagcacgcaggcacccctggaacaggcgggactgccttcccgacgcgcggcctgcgcccaggcggcggaggggcccagcccccttccagtcctcggctccagggcgcagggccacgagctcccgctcccaccctcggcccctggcacccggcgccggctccgccgccctctctcacacgcacccttggcagggccccgcggggcgccccaaagcttgggggcagctcccaggtgtctctgggaagggaaagaaaggccacaaagcaaaagaaggagcaaagagaaggcgagggaggagcaggggcccgggtcctgtggactcgcctgggctgggagtggggacactgagagggctgcgaaggctccgggggtcgcgcgtggccc

SEQ ID NO: 34315 - DNA, 235 bp, Homo sapiens; identical to SEQ ID NO: 26339
  chr14:32597635-32597870
  hypo

SEQ ID NO: 34316 - DNA, 981 bp, Homo sapiens
  chr14:36003293-36004274
  binary
cgggccagcccggggaggcccggcgggaccccggcccgcgtctcagctataaagatagccccggcatgacagccgcggcgaagctcttctagttcatctgctggccggctctcagtccccgtggcgccccctttcctcttgtcccagagcgctctcgactccaccatgccaaggggattcctggtgaagcgaactaaacggacaggcggcttgtaccgagttcgccttgcggagcgtgtcttccctctgctggggccccagggggcgccgcccttcttggaggaggctcccagcgcctccttgcccggcgcggagcgggcgacaccccccacccgagaggaaccaggaaaggggttgacggcggaggcggcccgggaacagtcggggtcgccatgtcgggcggctggggtgagcccggggacgggcgggcgggaaggcgcggagtggcgggcgggtggcagggaaggtcccgggcccagccccagccccagccccagtccagcgaagccggcaggcgcagagctgcgtcgggcgttcctggagcgctgcctcagctcgcccgtctccgccgagtctttccccgggggcgccgccgccgtggccgctttctcctgctccgtggcgccagcagccgcaccgaccccgggggagcagtttctgctgccgcttcgggcgccgttcccagagcccgcgcttcagccggaccctgcgcccctctcggccgcccttcagagtctgaagcgggcggccggcggcgagcgccgcggcaaggcacccacggactgcgcgtctggacccgcggccgcgggaatcaagaagccaaaggccatgaggaagttgagctttgccgatgaggtgaccacatcccctgtcctgggcctgaagatcaaggaggaggagcccggagcgccgtcccggggcttggggggcagccgcacgccactgggggagttcatctgccagctgtgcaaggagcagtac

SEQ ID NO: 34317 - DNA, 1091 bp, Homo sapiens; identical to SEQ ID NO: 23940
  chr14:36974427-36975518
  hyper

SEQ ID NO: 34318 - DNA, 2412 bp, Homo sapiens
  chr14:37130956-37133368
  binary
cgctgtcgctcaccgacccgcaccaatcaccatgcagcttgccctcggacccgccccttttagggcgtgtccccagtgagtgatagacggagccgccctgccctgctcagcccagcccacgttgctgcttagattgaaatgcagaactcaagcctctttcatcggggcacagacttccttttacttcttccttttgccctctcgcctcctcctcctgggaagaagcggaggcgccggcggtcggccgggatagcaacaggccgggccactgaggcggtgcggaaagtttctgtctgggagtgcggaactggggccgggttggtgtactgctcggagcaatgggtgagtggcggcgggggactctgtcagagccgggaagggagggagggagcgagcgggcaagggagggagggagggagggagcgcgagggcgcgcgccactaggcgctcacattctctattgactttgctcgtgttcctacaagttgtaggaacacgctaagggtcagcggcgcacagcagttcaatgtgaacgctggctactgggtggctgttgatgccattttctgattttaagagaagggagctgtggcatcagcgagcccctcagcccgagtagcaaaccaagttttgtttcacacgcgcgcacacatgcaaacaaaacaggaaaagaaaagaaaagaaaacaaacaacaacaaataaaacaccctctagcttcccctagactttgtttaactggccgggtctccagaaggaacgctggggatgggatgggtggagagagggagcggctcaaggactttagtgaggagcaggcgagaaggagcacgttcaggcgtcaagaccgatttctccccctgcttcgggagacttttgaacgctcggagaggcccggcatctcaccactttacttggccgtaggggcctccggcacggcaggaatgagggagggggtccgattggacagtgacggtttggggccgttcggctatgttcagggaccatatggtttggggacagccccagtagttagtaggggacgggtgcgttcgcccagtccccggatgcgtagggaggcccagtggcaggcagctgtcccaagcagcgggtgcgcgtccctgcgcgctgtgtgttcattttgcagagccagccttcggggaggtgaaccagctgggaggagtgttcgtgaacgggaggccgctgcccaacgccatccggcttcgcatcgtggaactggcccaactgggcatccgaccgtgtgacatcagccgccagctacgggtctcgcacggctgcgtcagcaagatcctggcgcgatacaacgagacgggctcgatcttgccaggagccatcgggggcagcaagccccgggtcactacccccaccgtggtgaaacacatccggacctacaagcagagagaccccggcatcttcgcctgggagatccgggaccgcctgctggcggacggcgtgtgcgacaagtacaatgtgccctccgtgagctccatcagccgcattctgcgcaacaagatcggcaacttggcccagcagggtcattacgactcatacaagcagcaccagccgacgccgcagccagcgctgccctacaaccacatctactcgtaccccagccctatcacggcggcggccgccaaggtgcccacgccacccggggtgcctgccatccccggttcggtggccatgccgcgcacctggccctcctcgcactccgtcaccgacatcctgggcatccgctccatcaccgaccaaggtaggggctcagaggctgggcgtgtggatgtgcagcgtctgcccccgcactctcgcggaggtcccagtatctgcagcctcagggacactgtctttcccaccacctgaggctttttcctttggaaacgtaaggagtcttcctagggggtgttctgatctcattaacttgaaactcatgcccctggtttccttgccacacacagtcttctgcctcatctcaaactaccagacccataacatccccccatccccaacacatggttcgcattttccaccctcccccgcctctcgcgccgaggcagcctcagcccggcttgctcacttggagagtgcggccggggctggacttggggcgcagcccgggaggcccgagcctgcttggggctgccggctgcagactccgctgtgggcagagcagcttgcttggggatcactacggccgggagaagtctggccgggaggagtccagcacgccttggaaattgaagtattctccgattctggtaatcaggccaaatttgctcaggcaggaagttcaaatgtcacctaattggtttcgttcttatgcttcacttcattttcctcggaaatggaggtcccgaagttactactagtaacttgcatgtaactcattcccagac

SEQ ID NO: 34319 - DNA, 841 bp, Homo sapiens
  chr14:37135799-37136640
  hyper
cggtcaggtgaggaggcgagggtcaggccaggtgggccgcgtggcggcggggatttaggcgatggaacactttgtgatgggtccctttctgagcttcccgcgagagaagcccaggctggcgtccctttgctgctacgagccagatccttcgtggactggggcgaagcagaggcctgagccttggaaggcggagctggggcctcgacccccgccaggggccgggagcgctcgtcagggcgctgggggtctggggcggcagctccccggggcgaggctctgggaagcgcctccaggcctgtcggcctccgggagcttggggaggcggctcccgaagccctttcggcggctctcgttgggggtagagttaaccaaagaaggcgcttctgaagggccgagcggagcagccctggggcctcagagccgcgccttcacgcccgcgaaacgcgcgccccgggtctcggccccacggtgcgactgcggctgcggggtcctcacgttcggactttctctccggtggctctcggacaaacacgcttggccaatcctgcggagaggggcacccagataaacgtaacaaagctaccattttctcgactaaaggtcacattgtaatctcccaaggaagttagtgagaaaacctcaaattatacggactggctgtggaccgtttaatttttctttccctccgtccctccctcatgtctccaaaggaaaatttaaaacactcgtgtttttattttccccccgagaaaagctaaacaaccaccacaacaaaagccccagatttaagtctaaattcatcaccgtcctggagtcaagagttcaaaactctcaaaaaacc

SEQ ID NO: 34320 - DNA, 968 bp, Homo sapiens
  chr14:38057019-38057987
  hyper
cggtagcgttggtgggtccgagcgccaccggagctgtacacttgggtcaggaggaaggctttccctcctcgcccctcttcgccccctccctcccctccccggggacccctcccccatctcgggcgaaattcctaagaccagcgagcaggagcaccgcggcgggacggtcagcagcccctttccggccctggtcttcgggagctggcgaggtgaagaaatgtggaaacacccagacgaaaaggggatggggtgggggtcgcaggaaggcggcgccctcaggcagggtctccgcactccctcggaaccacagatgttttcttcctgacccaggggcgcggcgccccagcccgggcgcccgggtgtttgtgtgtccgggtttccgaggaagggattacgcagcgggagcagccgcggcaacgcgggccgccggggccgcaggagccgtaacgaggcggctggccttctttgttgacttttaggtcccgggctcaacaggagatttattcgctaggaagggaaaatgcccaaacaatgaagaactatctgcacttgtcacctcgagacgcttgctgtcctgctctgtccgccttccctggcaaccagctgtcctggccgccaacccgcgcgcgtcctaacgcgcgggtggcaggtcgcatcacccagaggtggcggagtgtgcggtctgagaactgcgagaagcccacaaagcaggggctgggcctgcaggctccccgcggtccagctcccgaggcaggtctccaaagtgcccccgtcccccgcataactagaaaatgtctccggcaagtaacagagcgagagctaaggccaacttaagcttggtggggtgaaggcaaggcgctgatgtttctaatacgttgaaaaggagaaagggaacatcacagagaggacagcacagaagttaaacatcttagattcagtgggggcgggattccgaggcccaagcccac

SEQ ID NO: 34321 - DNA, 1737 bp, Homo sapiens
  chr14:38060563-38062300
  hyper
cgggagctaggaagtgtttaggacgggtctggaatacacaccttggtagtacgccggctccagggctgagggctcgatggggctcctggtggtcaccgaggcgctgcctagaggcaggctggcgggcaacgtagagccgtaaggcgagtattgcagtgcctgttcgtatgccttgaagtccagcttatgctgctgctccgaggaggacatgaggttgttgatggagaacgggtggttgaaggagtagtgggggtcccctttcaggtgcagctgggactcgtggggtgccaagccgtgtgccgggtgagaggcgggcacagaggccagcgccccgggcccggagcttatggggggcgcagttgaggaggctggagtcttcaactccgaggcgccccctgtcgccgtcgccccactgtggtccagagtctgggggctggcggcgggcccgggggccggcgcgccctctagctggccggtcttcccgtgcacaccccgatggaggggcgagtcggcgctggggttagaggcgccagaggggtccttgcggctctcagggccgcccttggcgccgctgcccccgcttccgctcccgcccccgccgccggcccccggctgcttctcgcacttgaagcgcttctggcggcgcaagtagcagccgttctcgaacatgttgccggagtccgggtgcagcgtccagtaggagcccttgcccggcttgtccggggagcgtgccaccttgacgaagcagtcattgaaggacagcgagtggcggatggagttctgccagcgctgctggttctgccggtaataggggaagaggtccatgatccactggtagatctcgctcagcgtgagcatcttgctgggcgcctgctggatggccatggtgatgagcgagatgtacgagtagggcggcttggcgtgcgggtagctgcgcttgaacgtcttggcgtcgccgccgccgcccgcgcggctgcggcccaggttggacggcgcgtacgccatggggctcatgcacgggttcatggcggccgcgtaggggcccaggccattcatggaggccgcctgctgcgcacccatggcgcccatgccgctcgggctcagcgccgtacccatggccgtcacgccggccgcagtcatgctgttcatggcgcccgccgagccccccggcatgccggctactgcgccgggactcaggccggcccctaggcccgggttggcataggacatgttgaaggacgccggggtcatgttgccgctcgtagtcatggtgttcatggtcatgtaggtgttcatggagttcatggagcccaggcctgagttcatgttgctgaccgggacggaggagtaggcctggagtggagacagcgagtgaagaagccccggagggcggggttagtggtgggcactggagggcggccgtccgggacctaacccgggggcaagtgcagagcactttgcagaacacgggacgcccccacccggggcaaatggctaagcgccctccccagaccgagcaaagatgtcttgcacggcagggggaaaatcctagcgcggcaggcatgaaagataaacgctcacagaaaatatgaccccaggaagatgtgtaatcgccttacacgccaggctcaggggctggcttccagggccccctcatcgcctcctccatccacgccaggcggtatcccaagtctccaccccaaccagcctcggcaaagcgccctttggggggaaatc

SEQ ID NO: 34322 - DNA, 971 bp, Homo sapiens
  chr14:42075958-42076929
  binary
cgagggctgacagcagcggagcggccccggccggggtctcacggactctcggggtctggccgacacggccgctcccgtcactgcagcgcgggctgagctcacggccgcgcgcccgccgccgccgccgccgccgccttcatgctgcagcgcagggctcagttccacgcggccaggaggccgccgttgcccacacgcgacgctttgggaagcccagctcccgggtccgccccggccgcggccgcagccccggacctcggctgcttgcctcgcgcctgaactgcggactcgccccagcgcggtggccagcgggcggggcgctgtgttccgcggcgcgcagggaggcggtgagcgtgtgcagagctgcccgaacggaggactatgtatgtgtgtgcgcgtgtttgcgtgtgtttgagcgtgtttttccttcttcccttgaggatgtgaattgtttagcagctggctgctcccttaggatccttgactttggggagctctggctgtgaacacagcccacccatataatccattttgcacggtccgttatatcagaaaaaaaaagcgcaactggacgggggtggggcagaccaacgaaacctagacagacacacacacactcagaggagagaggaagaattgaaagacttgagaagactttgataacctccctgctggcccttctgtgttccggaaagatcctggatgttggctaccttttcaagtcatcttggcatgtctctagtgttttgtaagccgctttccagctagctgcgtgtgtgtgtgcgcgcgcgtgtgtacgcgcgcgcctatctgatgcatttgactgtcttttatccaactgcccagaagcaaatgtgttaactcggcgatgccccttcatgcccgggttcttgcagagctctgaggacgcccagacccattttcctggctggatttggagcggctgctgggctgtggacccaggtgtgtggatc

SEQ ID NO: 34323 - DNA, 1925 bp, Homo sapiens
  chr14:51560302-51562227
  binary
cgggctcatcagtattccgcctgcggcgtctccccgaccctccgccgtgcctcaccaggtccgcctatccagcagcgacagactcccgccgtccgcgcgaccccaccgcccccatcccagtccctccccgagggttcgcagcccgccctgccctcgagcgtgcctagcggccctgggcactggcgcggctctacccagctatgcagtgctttcccacacactggccgcggccactggctgcagacccgccgcggaaagggggcgccctgagtcccgctcgcaggcagcgcgccccgagagacccgctctaaggcatccccgcaacaactctgtgggggcattcaactcccccgtgcgccggttaagattcccccatgcctcctgcaatgcaccagaccagggaggtaaacatcgaaggcacctgcattgcgcccccactgggatgcgctgtgcgcaagagacggggaccgtctgctgcaaaaccggatgatcggagacgcagggagttaggagtgggttttcttaggactcaccttatgtagtttccacatggcccccagagccttgacttcgtggctggagtgtttgccctcctccaagcactggtagcacacgggcatcttgcattgcacgcagtacatgctgtggttctccagctcgtggtctgtgcaggtggagaccttgcgtgggctcagcctccggctcacacgaccctgggccgggggcaccaggcggtgcttggctaggggcccccggggcgggtggcagcgcaggcggcacggatcgcagtagaagacatcgcactgttcgcacatgacggtggcttccttgggcgccttctcgcagagctggcacttgagggccgcggctttgctctgctggtagcggtcaattaccccttccagtacgcgattcttggggaagccgcggagcccccggtcatccaggatgaggctgcggtgacactgggggcaggtgatacaggagttgcggggcaccggggccagggccggtgacaagtgggtggccggtggcggcatagccgggggaaacacgcggacgccgttgggggacttctggcacggggtagtgggggcgctggcgaaccccccgtaggagccatagccgctgtccgcctcgctgtataggctcatcttgtccaggtccagatagtcatagtcggagaccccggagcccgcggcccgatggctctggggggattcagactctggggtctgcaccaggatgttgcgggcgcacgcctgacacaaattgtgagagcagggcaggatgatgggctcccgatagaaggagccgcacacggggcatttcaactcctcttccatctcctccatggggaccggtctgggaggagacagcgacggctgcagcgggtgcctgagctggcgaggtggccgacgggcccgtcttgtccagcaccctggccagcggcggcggctgtggtggtggtgccttcccgcgcagcactggcacggacacccagagaggcgctagctctgtgagccgcagccgcgtagccgccgcgccgcgcgccagcccggaccgcccctacctgccctcctagtcccgccccggcccatgagcagcggcccattgggcggggggcaagagatcgaagctctcattggccaccagacccgtccgtctcctcgtctccgcaggccacagggggttcggtagagtctgaggatagggcagtcttcgctcgcggctgcaagatctctgaagggggccggcgtgcggaggctaggggaccgggaaggaggagttaggcgggatgattcatcctcgcccggcttacttccgacctccggtgcagtctcccaggagctgggggcgtgagaaacccctccccgcagcgagtgggctgccggagggggctggggcttctcgccagcgtttgc

SEQ ID NO: 34324 - DNA, 788 bp, Homo sapiens
  chr14:60952157-60952945
  hyper
cgctctgaatatgtcccttggtggcgtgtgtacaaccacgtgtagcaaaattctaacgaaagcccttccccaacacccgggtaaacctagagaaacagtgcgatttcgcatttacgaatttaccacgaagaataaaaaaattggaggttttcacagaacagccaattcgcattacggcatacgcctgaggcggggttcctgtctaccgtgcccctcagagcccaggaaccacagcccgtgcgcctcccgcagtgggagttcgccggccgactcccaccctcacagcctcctgtcctggcttcccctcgcccgaggctgcaacaccgcatcccccccatcccccgccgcgccctcagcctcgggccgcaccaacccaggggataaggcgactccggtcgctctgaggggcagggccagccagccccctcccacccacgcacacgctccccctcagagccgccggcccagagaaaaaccgccacatgcagctcccttccacacgcacctaaacagctcctctggacccgaacgcccacaccctccctccctggggtcccaaactccactcaggacgccacagcggatcctaactacaaacggtccccggagccctgggctggactcgctcagccccgcccccacgcccctggtaccagccctgagagaccccgcggagcacgccgcgggagccgcagatcgcgctgaagagcagcgagatcgcgctctggacgagacctgcgcggctgcaaccgctccttcttcgcgggtggaagcgcggaataagcccc

SEQ ID NO: 34325 - DNA, 876 bp, Homo sapiens; identical to SEQ ID NO: 23944
  chr14:61104155-61105031
  hyper

SEQ ID NO: 34326 - DNA, 822 bp, Homo sapiens
  chr14:61113933-61114755
  hyper
cggccctcgggcctggcttataggacggccgttttgtaactaaaggctaactgcaaccatacaatccctgttcctgtgttacttgctaactcttcagcccctcgtgtccccctctcaaacttcctaccaacacccaccccaacccatcctttctgggcaggggaaacttcgccgccccgcacaggctgccagcgggcgcggcgcgctggggcgtcagtccgggcactcggtaccggttaacttcaggatttcgcttccctcgccgcttccgccttccgagtgctcgtcagtcctcccgactcctagcgcctgtctgtctcctttctttccccttatcctcacagtctctgtctcccgacaagcccatttcagcagaatttatcctggctctggttttccaccaagacaagaaagggagcaagatcttcggcccctagtcttggaagcgaacaaaggaaaacctaaccggcccctgcgctcaggttttcccccaaactctttggcttcgcggagcgctctccccgccacagccacctccccaccgtccttctgaatctctgtccgaaacgctatagagaacagaaggagcctgcccaggtggccgaaggtgttgccccgaggtgggggaaagtagagaccaatttttaaaatattgccttgtgagctccagtgcgagagagggctgcgactggagaccctttcctcgtctgggcatgcggcgcggtcagccagaccgacgggctgcagtgccgggccacgcgcgagcgagcacggcgaggatcaaccctttcttaatttggggcgccggggagtaaatgcagc

SEQ ID NO: 34327 - DNA, 437 bp, Homo sapiens
  chr14:65233333-65233770
  hypo
cggggctgcgccagctcatctcgcctccacctgggctgagcctagtaggggtgagagggctctggctgcagtgactcccaggaactagacaaacgagaccagagactgaccggggacgttctctcggtggccgcatggtgggaaactggagcctcccctgctgtctcgccttcctcctcttgaggcctaaggaagacacagtctctctttagaaacaagcacccctctgaggccagtgcctcctgcgaggcctggcttttcacctgcgcccacagggaggagcaccaaatagctccccctccagtcagccggcagcctggatggtgcttggcaaggagccgcccagcgacttcttcggaaaagccaaggcagattcttcagaagggagccaggttccaggcagaacggcctgtggggccccgtgttcaggtggctcc

SEQ ID NO: 34328 - DNA, 583 bp, Homo sapiens
  chr14:70345943-70346526
  binary
cggggcctactcccgcggagctcctcggcggggggttgaccacgagtggctcctcttgcccctctcccattggctttcacctgccagagggtcggcttcaacaggcctcttggcccgtcaatcaggcccgccgtgctccgccccgcccctcccgggggtttataacgggaattcccatggcccgggctcaggcgtccaacctgctgccgcctgggccccgccgagcggagctagcgccgcgcgcagagcacacgctcgcgctccagctcccctcctgcgcggttcatgactgtgtcccctgaccgcagcctctgcgagcccccgccgcaggaccacggcccgctccccgccgccgcgagggccccgagcgaaggaaggaagggaggcgcgctgtgcgccccgcggagcccgcgaaccccgctcgctgccggctgcccagcctggctggcaccatgctgcccgcgcgctgcgcccgcctgctcacgccccacttgctgctggtgttggtgcagctgtcccctgctcgcggccaccgcaccacaggccccagggtaagtgcgcccccagctttgcgcccacctgc

SEQ ID NO: 34329 - DNA, 593 bp, Homo sapiens
  chr14:70653697-70654290
  hyper
cgccgctgcaagtcaccgggtcgccaggggccgaggaggcttcccttttggtgccccaccggaaggccggatgtgttcctatcacgtacccacattccacccccgctcaactccctcctccccccacccccttcgggtgtttcttgaccacccaggagcttggctgcgcctgctgcagtctgcgtttctgataaattgaaaccagttttaattcttctgcccgggagacctaaccgccgaatgcgttcggaggtatgttttttaatcgccaggaaagggggagagagagagaaagagagagagagagagagaggaaaggaggagagaagagaagagaagcggggggcggggggagagagagagagagagagaaggaagctgcgatgagcgggtaaatttatggtactgcattaaaggcatttcttctatttaaccccaccccgccaccaccaccactaccacaccgttaaaaataaaatacaatgaattaagacgaagaactgcttttttccccggagcaaattgctttcatcatctttcccagtggctcgggtcctctgggcaggtcagccagggcctgtaggagcagcagc

SEQ ID NO: 34330 - DNA, 875 bp, Homo sapiens; identical to SEQ ID NO: 23947
  chr14:70654358-70655233
  binary

SEQ ID NO: 34331 - DNA, 103 bp, Homo sapiens; identical to SEQ ID NO: 16432
  chr14:73967299-73967402
  hypo

SEQ ID NO: 34332 - DNA, 966 bp, Homo sapiens
  chr14:75077897-75078863
  hyper
cgaaaggatttaacgtcggggctccgggagagttggtaagaaaggatgaggatgatgatctatctgccttcaactcttcgaaagcggatcaaatcttccaatcccgattttggaacctcggggctgtttcccgaagtactaaagacagagggacgagggtatgagagcggcgccctctcctctcgcctgcacgcccctccacaaatgagccctggctcccctctgtaccctccaaacttccctctcccatgctcaccccgtgagccgccctcgcggcggggttgggggcgcagccccagaccgctgtggggtccccaggcgtgggagagccggcgcggcccgggtccggggtgctggttgctgctggcccaggggagtgcttctccgggtctgcgcaggtggctggacacgccgcgactgctgcgcgcgggacggcctcctggcctccgcctcggtgggcctcctggggctcccccagcccggctgggcccgctccacgggctgcaagcccgcgacaggcgcgtcctgctcccggaacagactgtacaccttggctgcagccgctgccgggtagctgcccccagggcgccgcagtcgattcgcgtctccaccagccggctcgtatctccctacggggtccctttgggcatgacccgcgcccacgaagagagccagggtgagcggcaggaagcctctccaggggttccgcagggcgcgccccgggctgcgggctttggtccgcggcctcatggcgcggggcggctggagagtggtgcgcgcgggcaccgcgaagagctttgtggtcggcacgctggacgcccgcgggctgttctcccggccccgcccggcggccagcttctctgagtctagggggccctgaagcggccgactgggggcccggctctcggcggaacgagggctgcgcgccccgagcctcgagtccgcgctcctactccagctgggctc

SEQ ID NO: 34333 - DNA, 495 bp, Homo sapiens
  chr14:92040380-92040875
  hyper
cggcttgcagatgagaaggctggcaggcaagcgctgcgggcgaccgtgggtggtgggcgggttttcccctcaggcaggtgcaggtcctaagggggcgggccccgttgggtgctcatgacgcaaaggtccctaggatttgctcctcacagcgggagcgccctcgagaggaaccgcgtctgcgcctcccgagacggaccactcgggcgcctccgccccgcgccctgcctcgggggccgccccgcgcagtgagctcagcgtggaggcggcagcgccctcgcccttccgcgccctcccagcgcggtctctcctcgtccgcgcgccccgctccccaggcgtttctgggatgctggttggccgggcacttacgtgtttcaaagcgggtgacagccgccgctcgggtgtactgttcgctctctcccgccaggatccgagttcttgttccccgacaactcgtgggagtgcccgctccagcgtggtttctccttctccgggaac

SEQ ID NO: 34334 - DNA, 1383 bp, Homo sapiens
  chr14:92789091-92790474
  binary
cgaccaattaattttctcctgcatcttccccccgtggtgggtggcggggtggggagggggtgtgtggcggggcctcgggtcggctcgggggtcggagagcccggacaggagcgactacactgcagaaaccctttttctaagagtccccagcggtgccataacctgtttctctctgcagcagcctcagagggtaaaggaagggctcgttgcagctccatatggaagaaaggagagaaaaagggagaaggaaggggattatattggtcagtagaggtccaactactgaagagaagagtgcacgggggagtgcgccctacgggacgagtacacgtgctgggaagggcggggggtgagaggcgggcaggaggggaggagtagggaggcgagagcagcgggcgggaggcgccacggcctctcagacgctggcgcccgcagccgagaagccagagagaaagttcccggggagagctcgcccctgggagggccgacgtcgagcctgctcgccgcgagggtctcaggtaccgcgcgtccagccagccttcccgcggcgcgcactcggccgcccgggctcggctcgtcgggaagcaggggaacatcgccggctggcagccggggcggccgccgccaaacttggaggaggaggatgctgcgagtgggcgcggcggcgcggggcgcgggggcgcactgagtgctccctacggcgctgctgccagggctgtggccgggcgagccggccgaagcggagcgggcaggtagcggctctagcgccgggactgcgccagccctgcgagcccgggccgccagcgccaccgtgccggcgtcgcctcctcgccacggagccatggtgcgcgcagcgcgcacgcggcgcgcgggactctgagctccggccgcgtcgcgcgtccccaccttcccaaggggctcccccgccgacctcgccctcgggccatgaggctttggcccggagctcctcgcctctgagtcgcgcaccgcctgctccagccccagcgccgctcggccactgattgcactctggccgctgaagctccccatcctctcccagagacggcacccaggcgctccgggatggcgctccgcgggaccctccggccgctcaaagttcgcaggaggcgagagatgctgccgcagcaagtcggcttcgtgtgcgcggtgctggccctggtgtgctgtgcgtccggcctcttcggcagcttgggtgggtgctggtacgggtcccctcttcctggggagttgggggctttggctggggagtctcggggcggctgcgagatgttttcccctccttcctcatcaggttggtcccaagggttcatccagtcccctccccgccgggcaggtagagcgcgcccagaagagctgatggac

SEQ ID NO: 34335 - DNA, 822 bp, Homo sapiens; identical to SEQ ID NO: 23958
  chr14:93154446-93155268
  hypo

SEQ ID NO: 34336 - DNA, 381 bp, Homo sapiens; identical to SEQ ID NO: 23959
  chr14:93706483-93706864
  hypo

SEQ ID NO: 34337 - DNA, 754 bp, Homo sapiens
  chr14:97684931-97685685
  binary
cgaaaggaaaggctggtgggggggtggggggaagggccccagtgacgactggattcggaattttcctctcacttcgtggtagtgaagaatttaactacaacagtaacaacactaataattctaaaagccgtgggaggtcagagcgggcgctgcccggcgtcacccctgcagcgtccggatcgctccgcataggcaggggtggtgccccctccccggggcacagaaacgccacatcccgggggcgccgcccagaggctgtctctgtttctgtgtcccttcatgaggctctgtcccacaaaggcagcctgagccaggaccctaaagaggcctggtcatcgggaccggagggagttccgcttcccaggccggctctgcaaacgcgagcctgcgccaaggcgccctgcgggtttgctggtggcatcgaggggcagcgcggggccagcgctgggagctccgaacccacacgctccggccagctgcccgggaagcgcccaagcacacgtcccgagtcccagattggattaagttgcccaactacctactttttctctctttaaggagaagcctaattggagaagattcggttttcttcgccatggcaggtccctttctcctgacccgcagttgcaggggctgagggtaggcgcaggtccgccctggggtcgaagccaccatcgggcctcgaggttgcccccctaacatccggcctgcacgcctggcgggggcgcaacagtgtctcacggctcgggagctc

SEQ ID NO: 34338 - DNA, 585 bp, Homo sapiens
  chr14:99849764-99850349
  hypo
cgaaggcaggggaagggacgacgcatttggaggaagcaccatccgagccacaccccgcacagaaaaaggacccaggcccacggcaaggcgcttcttggtcctttcggaagggccgctcctaaaccaccagggctgatccgctgcttgggtggagcacaggcgggaagccctgccccgtctctttgtgagctgtgggtgcgcttggcgagtcacaagcctctctgggcccagttctttctatggaagtcatgggttgcagtgttgttgagggagccggtggtgcacgtggtgaagacctggctctgtagccggccagctgggtccccgtcacacactcacacgtgcacacatgcatgcatgcacacatcctcacacacattcatacgtgtgctctcacgctcacatgcacacattcacacacacgttcacacacccatgcgctcacatgcccatgcacgcacacgtttgcacatgtacgcgcacacacactaaacccgttgggcctcagcttactcatctgtcaagcggagaccatggcagtggctccgacaggtgcttggcacatggtaaatgcccaatacatac

SEQ ID NO: 34339 - DNA, 627 bp, Homo sapiens; identical to SEQ ID NO: 27641
  chr15:100913438-100914065
  hyper

SEQ ID NO: 34340 - DNA, 1025 bp, Homo sapiens
  chr15:28341522-28342547
  hyper
cgtagccgtgtctcgggagcctggcggtgtccgcaggagcgatgctgtgaccgttgcatttgaagcattccttctagttcccggatcccagggagggggcaggagaagccctgcggccaagaaggcctgaagaagcccgtccaggggtcagcctcctcctcagccggtcctgggctgagacaggggtgtcccgctgagggcagtgtagggtgcggtgcccccaccccacttcgggcctggaccgagaccgcgagtgtgaccgtatatcccttcaggtggatttttcaacatgtgaacttggttaaaagcttctagaacgttaagccaaacatcgtggctttccatccgttttctgttcttgtttgaaagagtacgcctccttccagcctgggaggaggggcggggcccgggagagggcctcgggaggccgcgggtgggctctgccgagggccgcgttcgcagggccccccgggactggcggccccgcggcaggccaggcgcacctctcggggagaaacgagcagcgccagcaaacgcgcagccgggcacgcggccgcccagccccgctcccagcccggggccaggacccctccccgcggcgccgctgccgcaagcctcctctgctaccccagctgcgggcagtttggcccggcgctgtgccgctgtagttcggtgtcccttcgcccatcctgcaggccagcttggaaactgtgtcccatgctcctcgaaacaccggacctgctccccgccgccctgcggaatgcgcctcctggcgcctcagtgggtggccgggccgagagcacaggcgcgccagccacacctccccacgggtcggacccacacggaccccgccgcgctccgccgaaactgcgcgggtcccgcgggtggccggcgcaagagccacagcccgcgacaagccggctgcctgcaggtcagtgacagaaccccaaatggaaactgcggaaacccaacaaccagcgagtgagctggtagagccagcggccccaaggagctgagggagctcc

SEQ ID NO: 34341 - DNA, 930 bp, Homo sapiens
  chr15:28352121-28353051
  hyper
cggccccagcctcggtgatgcgcttcgctgccgcgcggggagggagagtccggcagggtcacgaggcgccggccccggggccgcttgaaacccgaagagaccccgctcgctcgcgcgcccgccggacgaatcctcgcggaggtcccggggcgcagccggcgtgagggtggggtctcatcgcaggggcgccgggagcctccccgctccgctagctcaaccaaggaccgctcagaggggctctcaccctgaacctcggcttttctaaaggaagggcagaccccagatttcccccttctcttctcgaacgtgctttgggtgtttttctgctttcttttttggcaagtcaggacagcgcacagtgcacggagctccgaagctctctcagctactcccggatttctggttaaacctgagggtgagcccgaaagaccgctgccgccggcggccaccccagcgcgggtccgctgagaatggaaacagcaagtgcgcgccggccaggccgccacctctccctcctccaacagcccgggcagccgcaggggccagccccgggccagccagggcccagcacaaaatgccttccagcgacagcagcgccggaagccccttctgaggtcgtggataagcctccgcgcaggggccccgcgctcagcccaccccgcatgcctccgcgccagggcctgctggtgggtggccgcctgccccgggctatcccgggctgggcactggcgccgatcccgcctcgcttgtggagctgcatttggggggaaagatggaccggcagcgtgggacgcagagccaggccaggccgcacgggctgtgcacaaagatatgcccgacaggcggggagaaggcatggcccaccggctcaggagaaagtcctggaggggaggcagtccgcccctggggacaacgcggggggccgtattc

SEQ ID NO: 34342 - DNA, 874 bp, Homo sapiens; identical to SEQ ID NO: 29877
  chr15:34728787-34729661
  binary

SEQ ID NO: 34343 - DNA, 217 bp, Homo sapiens; identical to SEQ ID NO: 29878
  chr15:34729898-34730115
  binary

SEQ ID NO: 34344 - DNA, 875 bp, Homo sapiens
  chr15:35046519-35047394
  binary
cggactggggattggagcgggagactcagtccaggtgtgagaagggactcccgggggccgcccgacggggccccctgaccgccggcttggcgcccttacctcccgatcatagtggagtgctgctgcaccgcggcttctagcagcctctccaagatggtccattcccccatcgctgtgcatccggaggcagcagacaaagactgggcagcaccgggcacgttcccgctcctggcccctccccgggccgcacttccagaatgggagtgaattgcctcccaattaaagaagcaattttttaaaaaatcctcgaatccccctttccttttattgtacttaaaagagaagaaatggggaaagaaatccaagcgcgtcccgaccgatggggcagttggcgcggtctagagagagggcacgaacctcgggcgccgtccggggttcgggtctggatcccgcggacgccgggacgaggggcggggcggggtggcagcctgcaggtcctccagcgctcgcccgcccaggagaagtctcagcgccgctctccgccgcaggttgggggccaggggagggtccgaacaccggctctgttcctgctacttcagcgggcacctggcgctccggcgcggcagcctgcgaggccagggccgagcgcgcggagccgaatgctgggctcggggatccgcggccgccgcctctaatccgcccttaagtagtctccgcctgcgtcacgccaggtcggcggaggggagcagagcgcgccgtgcggctgtcgctgcgcgtcggagcccgaggggccggggacgcgcgcggggggagaggggcaagagtcctggaggcccggcggggagcggggcgatttcgaaaggaaggactgcagc

SEQ ID NO: 34345 - DNA, 518 bp, Homo sapiens; identical to SEQ ID NO: 16442
  chr15:40631683-40632201
  hypo

SEQ ID NO: 34346 - DNA, 103 bp, Homo sapiens; identical to SEQ ID NO: 26382
  chr15:41091052-41091155
  hypo

SEQ ID NO: 34347 - DNA, 89 bp, Homo sapiens; identical to SEQ ID NO: 16444
  chr15:45440539-45440628
  hypo

SEQ ID NO: 34348 - DNA, 946 bp, Homo sapiens; identical to SEQ ID NO: 22803
  chr15:48936649-48937595
  binary

SEQ ID NO: 34349 - DNA, 519 bp, Homo sapiens
  chr15:52404388-52404907
  binary
cggctgcccgtcccgccccgtgtcccggtgtccgccgcgtgctcacccagccgccctgagcctgcagccaggcgcggtgctgccccatgagccgcgagctcagcaaggccaccaggcgctggcagtcccgggcgacgtcgccctcctgctcctttagccgcggctggaagccccacttcttccaccgggcggtcaccagcggccctctctccagcagcgtccctgcgaaggtcacgagcgtcaccactctgccccaggtggggccggggctgtcggagagcacggaatccgccatcagcgccaccagctcgaagcggttcccggggtagccgaggtaggcggagaaaaaggaccggtgaatctgccgtaacctggcggccgcggagcgcagcacggcggcctcgggcgtggatggcgccggctcgggggtgccgggttcccgggcgcagtaccccaggtagtcggccagcaacagctcggtgcgctcccgcagcgggtcggccatggtggtgcgctccc

SEQ ID NO: 34350 - DNA, 55 bp, Homo sapiens
  chr15:55699095-55699150
  hypo
cgccctcagcgtaaaaggttaaaaattatgaattaacgcccgcgcggtgggtcac

SEQ ID NO: 34351 - DNA, 987 bp, Homo sapiens
  chr15:60297227-60298214
  hyper
cgctatggccatccagagctctcccgagaagatgctgccgctgagcgagatctacaagttcatcatggaccgcttcccctactacagggagaacacgcagcgctggcagaacagtctgcgccacaacctctccttcaacgactgcttcatcaagatcccgcggcggccggaccagccaggcaagggcagcttctgggcgctgcacccaagctgcggggacatgttcgagaacggcagcttcctgcggcgccgcaagcgcttcaaggtgcttaagtccgaccacctggcgcccagcaagccagccgacgcggcgcagtacctgcagcagcaggccaagctgcggctcagcgcgctggcggcctcgggcacgcacctgccacagatgcccgccgccgcctacaacttgggcggcgtggcgcagccctcgggcttcaagcaccccttcgccatcgagaacatcatcgcgcgggaatacaagatgcctggggggctggccttctccgccatgcagccggtgcccgctgcctacccgctccccaaccagttgactaccatgggcagctcgctgggcaccggctggccacacgtgtatggctccgccggcatgatcgactcggccacccccatctccatggcgagtggcgactacagcgcctacggcgtgccgttgaagccgctgtgccacgcggcgggccaaacgctgcccgccatccccgtgcccattaagcccacgccggccgccgtgcccgcgctgcctgcgctgccagcgcccatccccaccttgctctcgaactcgccgccctcgctcagccccacgtcctcgcaaacagccaccagccaaagcagccccgccacccccagcgaaacgctcaccagcccggcctccgccttgcactcggtggcggtgcactgacccgcaggagcccacgccccctctcgttctcctccccaccacctcactcgccttccctggctcccagtcctgcc

SEQ ID NO: 34352 - DNA, 201 bp, Homo sapiens; identical to SEQ ID NO: 16448
  chr15:62747468-62747669
  hypo

SEQ ID NO: 34353 - DNA, 67 bp, Homo sapiens; identical to SEQ ID NO: 23972
  chr15:67545420-67545487
  hypo

SEQ ID NO: 34354 - DNA, 939 bp, Homo sapiens; identical to SEQ ID NO: 31213
  chr15:68125183-68126122
  hyper

SEQ ID NO: 34355 - DNA, 1773 bp, Homo sapiens
  chr15:68126860-68128633
  hyper
cgtgactttcgtttttaataataataataataataataaaagatgtcacttctggggctacggaggtgggagtgcaccggcggagcggggcggcggaacaccgtgcaacaggtgggggtgggagccgccccgcgggttctggggctcccagggtcagaatcgggcctgctcaagtgggcagcagcgagcactcaacctctccactgtgccctccagacacactcagttttcccccacagggcactccctctccgcgtttaggaccctcccttgggcccggaatggaggaggggcattacgtcacggtccttagcgcagcggtcccgggctctttcctcaagagctcgaaggcgccgagggttcatccatgcccatttccacgcctgccacaccggggaagttacctccggggcgctcacagacagggcgccctgccgggaatcccaggttcaaccagaattgtccctttagatggcgcgggcaccgccggcctggcctggcctgggagcgctgcggcagggcggaggtctcagggagtaaggtggtctccgccgggcaggcttggaaaggaaggcgggacttggagagctcggtcacagacggcctcccgtctgccccgccgctacccgaaaggagggagccccgtccgcattttctgttcggtccattttagttcgagaggggctaaggactcgccgggcctcggctggggcgtccgacgtccgggtcacggttggcaaggcctcccagcggcctcagtttccacagcgcacctcctgcttgggctacagacgacgctgcaaattgcagaacactctttgcagggaggagagtgtggatggagtgggagagagctcacggcacagggaatcattcagccttggctttcatttctcgccctcggctggctagtgggggtcccgggttgagcccttcttttatctttcctgggtctccgtttcggcctctatgaaataacacgcaggcctccgtccatgcggctcgtagaaggcgggcggcaggccccgcgccaccggccagcagctcgggaccgggagccctgggctgagggggccgggaagtttcgtggcgggttgtcttggtgggccttggacggagccggctagtaggggcgtgctctgggcctccccgaagctgtgcagacgaggagtcccgctgcgcggtacagccaggaagccagtccctagagtcctttgcgctgggggtcggagccttggagtcccaggatgttccgacggctaagaccagagcggacacaaaggagataacaatgaagagggcgccggcaaatggcgaagcatcgcctccggacaggccatctccgggcagggcccctctagggagcgggaacgtttcatatgcatgggacccaccagatccgctttccgctggaccggtggcgaaactgaggtccagagaggaagagactggagtctccaggccgcgccagggcccgcggaactgcgacggggcgggacagcgcgggtgtgggagtttgccggcccctttccccaccgcggattgcacctttggaagctgcacttttcttctctgtaaaatgggcatcaccattaccacccaggcaggaagttccgtggctgcggctcgacagaggagccaggcaaatgctccttcccacccttccttcccaactccccccaaagtggaaaagctcctaggcagctggggccctccggaagggacgccccatctgggcaggaatctctgcggactggagtcgtaggcggatcc

SEQ ID NO: 34356 - DNA, 848 bp, Homo sapiens
  chr15:68723471-68724319
  hyper
cggggagcccggtgtgggacggccggggccagggtaccctagggcggagagctcagggctggcttcccgctcccagccgcgcgcccctcgggccggaggttcctgccgcgccccgacacctggagtgcattaggcggcggcgcgcgtctaggcgacggcggctttccccagattattgaataattgcataattccgagcgcgggttgggaggcaatgccgggtccctaccccgggtgtcaggtaacgtttcgggggtcctgcgctgcgcgactgtgtcccgccgctgctggccgggcagacgagagctagcccccgcctaccggccatcgccccggggctttgctctgtctttggccggaggcactctgcgcagccctcacccccacccttcagccctccggggccgccgcgcccggctctccaaactttgagatgcttccccggagccaggcaggagggcagccagggcacactctcttggcgctgattcccttccccagccggggccgtgcgccctcggcgctcccgggacacccgagtgcccctggcagccgtgcgggaaccccggcatgggccttggaggcacctaaggcgcccaggagggccaccagatctgggagcttttcaactcaagcctcttcaactcttcccaaacacaccaaagagtcccggctttcaatagccttcgcacctccctctttagcgaaacttgactgaaccgctagactggggccagtccctgggggacccacgtccccaagagcagctgaggtctgaccctgggaggagggtcgcgtcccgatcctggccgctggatccaagccccgagggcccagggagggactcc

SEQ ID NO: 34357 - DNA, 864 bp, Homo sapiens; identical to SEQ ID NO: 23092
  chr15:76628342-76629206
  hyper

SEQ ID NO: 34358 - DNA, 304 bp, Homo sapiens; identical to SEQ ID NO: 29894
  chr15:76639451-76639755
  hyper

SEQ ID NO: 34359 - DNA, 1470 bp, Homo sapiens; identical to SEQ ID NO: 28601
  chr15:79382738-79384208
  binary

SEQ ID NO: 34360 - DNA, 530 bp, Homo sapiens; identical to SEQ ID NO: 29895
  chr15:82339684-82340214
  binary

SEQ ID NO: 34361 - DNA, 466 bp, Homo sapiens
  chr15:83314970-83315436
  hyper
cgctagcaagggaccgcaccgtcacctgaggggcagccaagaggcgggcggtgcacctgtgccttccagaataggaaccccacccacttgcccctcttccccaccaacgacacagcccagtagttgactcaggtgccaggagagagcgcggggaggctgggcggtagccagggagaccaagggaagcggttgccagagaaatgcggcgtcagtcagggccggggctgcaggcgcggggcgggggaggagagacgcggcctcctcccaggcgggcctggcgggaggcaccccggcttctaagagcgaattcggctcccgactctcttcccccagctgagagcacggtgcaaggggccagggctgcagggagcaaagtgcccccgaaaaataagcgcgcgcccacgaaagcgcccaagagcccaggcgtctgcctggcttttctcggtcacggggtcaacgcggggcc

SEQ ID NO: 34362 - DNA, 1083 bp, Homo sapiens
  chr15:83315990-83317073
  binary
cggcgccaagcgaaggtgtgaagccacgtgacctgcccaggattgggaagccgcacgaggggcttgagccctccaccttaaaggtgccgcgaccgccgccgtcgtggggctctccacagagcacggggtctacgccgtcagcagccccgccccgtcccgcccgggcgcccccaccgcgcgccgggtgctaaagagacccgcagggggcgtgagcttccagcgccagcggcttcgggtctcccgtgcgacggcagtgtgagaaagaaacgttccgggcgccggtgctcctttatgtccggtcagctcccgtctggacagacgctcgaggccgcctggaggccgcagtgcggctcggaggccccaccggccgcccccgcagggctgcggcgcctttaagcccaaaggccctgagtcacgaggaggctccctgcccccctcgccctccacccctccacgaggccccacgcccgcgggcacgtgaccgcgccccgcccgggactcgcccgcacggggcgggggatgggggtaccgcggcgccggacccggctgcgcgcggaccgttagctactgcggccgggacgcggccccgcccaggcgagcggcgggtggctcttaccagcgggaacgccatggggccggtgtggccctgcggggctgacgggctgaccggccagccggcgggcgagagacgcgcacgcacgtgggcactatttttgcagcgggccgcgcgcagccccgcaccccggcagcttatgaagctcctacgagccgctcctcggagccgccccccggccggatgcggagcacctgtgtcggccccgcccgggccctcgcctccgccccctcgcgccccgcccctcctagcaggccgagccgaggagggctccgccgcccacccggaacccggcggggactgccgccgctgctagccacagctgccccctggggggccagagacctaagcctgagcgcgccatcacctaagtgacccttgccgagtcactgtctgccctgggcctcagtttccctcttaacgaaagagggcacgatttacaagcccctgcgagcggcggcgatcgcttc

SEQ ID NO: 34363 - DNA, 1105 bp, Homo sapiens; identical to SEQ ID NO: 27657
  chr15:83775836-83776941
  binary

SEQ ID NO: 34364 - DNA, 2282 bp, Homo sapiens
  chr15:83951722-83954004
  binary
cgtctgggccgctttaaatgccctggccttcagaggactgaggcgagcacagccataaaaccaggggacgttaccgaacccccgagcgtctgatgccccccgccccccaaccacacacaacttcactcacacaattaaggctgggagatggcattccacttaactgtcagactcggagcggtggcagccccgcagccacaaagagatgccttaaatgagaagaacatgtttctacaccgcatttgtgaaagtttggctcggagctacgcgctgattaatatcagatctccttcactcgcctcgccacaatcttgtcacatctggctgacaaatcccgaggaactccggcaaagccaggcggcggcggggctccgggtctgggcggcggctccggaggagcagcgggagaccccgcagcggcctcctccttctccgcccgcggcccccagcctcgccgccgccgcccggctcccagcacggaaccgacggggcgctcccgagacgggcgagccacgcgctcgcaggtcccaaggccaggctgggcgggactgttaagggagctcgaagtcgggggccgggggcttcccgtcccggcgcttcccatgcaaacccctgaaggaagcggcaggcgcagccgcgggctccgcagcccaggcccacttcctgtcactccaggaaaacctcggagcggcggacgcggctcggcccggcttccagcccagagcccaagcgccttagccccgtcccagcgctttctgaaagacgggccacctcgcgcggagccgcgacaaggactccagggtccgcagtgaagctggtcaaatctgccccgcacacggtcaacgctcggtctgtgtcccggaagctttcggaccggacctgtctaaatagcgactttcagtcgtgggttttttgttcttgtgggtttgttttgttttttgttgttgttgttgctctacaaaagatttgtcccgcagtggacgggagcctcctcacggccgcccgcccgtctccgcagttctcctcagtgaccggaggctgccgcgcgccccgttctccagagaaacaatccccggagagaaagacggccagtgtgaaatatcagctgtttcacaaattctgaggtaaaagaaaaaaaaaaaaagaaggggtcgacccccacaggtggaaacagcaagtcctaacgtcctgggctgaagcctggggtgcgggcggcagagagtggcgtgtagggtacccgccgagtgccgccgccgatttccacaggctggcccgccggcacctccgacgcgcccgcagatccggcgcggagaccgtttgccagctccgggacgtcgggcagggacgggtcccagagccccaacccccccgccgccgcctcccggccggagaccacggtccctcccgccgcgcctcggggccgcgctgccgcgcaggtagccagctggccctcgggaggtggccctcgggtacccacgggagccggagcccagcggcgtcccgggccgcctgctccgcgcacagagaatccccgcgcccgcggagggcgccgcgcttacctcggccatcctgcgaccgctgcggtgccggggctgccggcgcgtctcccgggcccgggccgccccgcgtccgccccggctcggcgggcgccgccgcatccacgctccggccgtcggggcgcgacccggcgaagtgggcggctccccaagcgcccaggctgcgcagcacgatggccgcccccgccgcgcaccgcgtgtgcccgcacgcccgccccctgcgccccggggacgcctctccgcccctccccctgcccctccgcccaccgcgcggtcgccccacgccgcgggcgctgcttcgccgcccgggaggccgcctcccgccccgggaccggataacgccctaaatcagcgcagctgaggcgaggccgtggcccccgcagaccgcggagacctcgccggcggccggcgcggaggtgtctgcccccgccgggcttgaaggcacttgttggtaaaagacacagacgtgtcggtgtttgcctctcccggggaagggcgaaacgctctgaagttctctggcgctcttctcaggagatgattcggcctcccctcctaccctggggcgccctcggggtctcactgccgcggaggaagaaggcagcgccgccctcgcctgcagaaacctcattcccgagaaagtgcgggacgagcgtcttgggatgtggaagaagggggtcgccaggaggttttcttaagaactcaaaacaagcgccccccaccgcacac

SEQ ID NO: 34365 - DNA, 2446 bp, Homo sapiens
  chr15:88798893-88801339
  binary
cggggtcctctccggggagaggcacacacacgcatagccggatcgcgcctcgccagggccggagtcacctggaatgcgcagccggagagcatctcccgagccagagcgagcctgacgcgcgcccagcgggcggcgggcagcggcgagctggggcgggcggagggccggctcccggccgcgggtgggcaggagggagacgcagagcgcgggggaggcaggctggggagcggccgcctgacttacatggaagtgatattccttgagatgtccgtgatgttgatactggcgttcccattgctgttccctgaatcctgcccttccaggagggggaagaggttcccatcgtccggccgccggcaattgatctcagtcttgctgcagacacaatttgcagggcaagccagcacggagcccacatagtccagccagacgcttcccagcaagaaaatccgccagaaactacacttggctgggcaaagagagacatccatctccgatcgctgcttctaaaaaagaggaggaggagaggagaggggggtggggtggggggagtggggagagcagggggggaaggaaacaaagacggcgagggaggggggaagggggagggggggcctctgcctttgaaacgccgagcgatcagatgcaaaatccttcagcgtctgaaaccatcgcggacgccgccgccgccgccgccgccgccgggtgggagccgcgaggagcgcctagtggcgcggtctgccgggcatggtggccggctcggcgatcgctgactcgccgggtccgggggctctggaagcgaggcgcgctctccgactccgagactttgcagggttgcaacagacggtggggaggcaaaaaaaaaaaaggaaaaggaaaaaatggtgctaaagtcaccaagtcccacctactgggcagaattaaaacggacacaccacgcacctgcaaaacacacacactcactctcacacatacacacacccggagcccgaggaaaggaagagaaggaagatgcagtaggagctgcagcagccgccgcgaatggctcgccgcgcggctgcagaaatgtacaagtgctccgagccttacgaaacgcacgggttatcggagcgtcttcctcggctccctccctcccttcctccctccctcctcccctccctcgtcgcggcctcctccccccgccccccgcccgggctgggagcggcaggagagcggaatctccccctccctcccctccccacacccgtctctctccccgcctgtcctctccctcctccccacccacccacccacccactcgccggctcgcggctgtagccggcaccgccacccgcagcctcgcggcagcccgcccgctccacgcctcgcagcgcggcgcccgctagccgcagcccgggggaaaccgagaccgaagggaaaaagttgcatttgagattgcgagggtcggggctggggagggagagttggcgagctggctgcacgacacggaaaggcgctctcctttccactttttggccctcgcgctacccggttttgctgcaatccggaccgcggtaggaagtgaaatgaacgtggcggaggtgattggggagtgctcccaagccttgggtggggggcgctcccaagcctgggtgggtggggggcgcaggctcacggacggcgacggggggtgccggagcgcacagacaccccagagaagcacccagagccggggaccgggaccgcagacgcgcagtccttggtctgaatgacactcatttccgtaatctagagtctggggctctggtcttggctgggaggggactgcgggacatggcacgctaggtgccccccgtgcccgctgcgctttcttggaggtgggttttgcattcggccttgagcaggcatggatcggggaaggaagaaacaggggtcgaaagggctgcgctggagagccgaggtggccccgggcgagctgtgcgtgcaagagaaatggccgggggaaattgagatgcaaggggcatattttggcaagcgccacgccagcaccgtcagaggccggcttctcgggctcagctctcgggtgagctgagctggctgccgggtgagggggcgggcgggctgctttctccggattcgggggcgcagaacctcctccttccctcccacacaagcaccccttcctggtagggacgcaaagcaggtgcagctttcgacgagagctcagatctcatccgggaaagaagtgtgtgtggggggggccccgcttttgcgctggtagggatttttttcttaataaaacataaagatgccaagtgtgagctgtttgctgaaaaaaaaaaaaacgagcattcgctgtgggaaaggagaagaaagggttaggggagtccgagcaggcagacacactacagcattcacacgcagaagaaagcagggttctccttcccgagcttggaggagggcaggc

SEQ ID NO: 34366 - DNA, 876 bp, Homo sapiens; identical to SEQ ID NO: 27660
  chr15:89346018-89346894
  binary

SEQ ID NO: 34367 - DNA, 964 bp, Homo sapiens; identical to SEQ ID NO: 31225
  chr15:89921803-89922767
  hyper

SEQ ID NO: 34368 - DNA, 1283 bp, Homo sapiens
  chr15:89942592-89943875
  hyper
cgggcccacgaccccaaatgaaacatctttcactcgccccccagcagcccgggccgcgtttgaccactagtagggcagaaccactgaccggcaggcggcgctccccggggctcccggctcgagccccagggcaccgggaggagtaaggaccccgagcgggagggagacgactggggggcgcgcggcacaaagagctttttattcaaatttgtttagagtttcgcgaatttgcatgaaaaatgtgtgagaaaagccagctccggtgacctcatccgcacctgccattaacgttcaattagcggctgaatagcggccgccgacgcgacgtgcagagaatccggcctgccccgcgcagcgagggcggcgggccaggcccgggatagggtgggaccgagggagggggacgcggcgtagggccccggcctactcctctggcccggagacccaggacctcgtccgcactccaactctccgagggaacgcggggatctcaggactcacgagcccaagattgtttggagcgcgccgggagccttaggatgcctggctccctctgggcgcagaaaagggcgggcttgcctcctccccaggacggaaggtggccggaagagccccgtcccagctcagatgggcttccccgccatcttccggacaaagtgtcaagtacaagttcaagttcagggccaggcccgggggggggcgctgagccttacccggccgcctttgttctctggcataatcgctcccacgtccccctcccgggcggggcccagcagagacccccgccccgccccgccccgccgcgccccgcaggagcctcctcctcccgccggcgcggcgcctgtgccctggtcccggtgtccccgctcggtgccaccgaaggatctaggggctcgggccggggagggggtggaggggggagtggaggcgcgatacgaacccgtgggagcctccccaaccccgcagtcccagcggcaaactgtgcttggtcggacggatgcccgcgcggaggtaagagccctttgcgggattcgcccgtatccctgtgccccgccccccgcctgggactacgcgggccccaaggagcggggcggaggatggtgtgctgaaaaccggctgggcagccccgctgggcctccggtggggtggggggcgcactgtcgctccagggctctggggagtacgaggcctgggcggtgggtatggagggcaagtgcgcccagccgaggcccagtaagatcgccggcctttcccaaaggcgtttggctcacccatctctcctc

SEQ ID NO: 34369 - DNA, 548 bp, Homo sapiens; identical to SEQ ID NO: 23480
  chr15:90755573-90756121
  hypo

SEQ ID NO: 34370 - DNA, 873 bp, Homo sapiens
  chr15:96960242-96961115
  hyper
cgtactatttgagtggcaggcgacgcctttccccactctcggtatttatgttgcaccgacggcacttaggagagcttagttttagatgcggcattaatcttcacttgttaagagatagtctgtcagcctttaccaggctctcccactcccgacgtgcaaggccctcccccagcgcgcggccacccccaagctggtcctcgcaaaggcgcgcggagccgcactgccgaggagaggagcccggggttaaactggggcaaggcgagcgagccgcggacgccaggcgcgagcgcaaggttaaagtcaaaagctctgcctgggccagcactcaagacggtcctggcaccaacgcctttcatttttgcctgtttgcaagcggggaaagtggagtcctcaatcatagcgaggagcttttcttaagccacaaagcacacgggcgcaaacatcctcgctgctaactcagggcaattgtcttcctattttctcgttcctgacccccaagtttcaccggtgggaagtcatcgaagatctcccttttaccaccagctctacggggtcgcttttctcttaagcgccctgtgagggtcctcccttttaaattatttcctgcccagttatttttcccccaattaatccagaatagttttctcatctgctccagatgcacgcaaactgcagagctgaaatgaactgaactaagagcggaattgaaatacaccaggggtttccctgcaggaattgttccaacgaggtatccacgggtttcaagatccgttgaaatgcttcaggtgtggtttgcattctcaccgaccctcgggccagttccctcgcccccaaccgccgttatttgttccccccacctacttcaatagttgc

SEQ ID NO: 34371 - DNA, 584 bp, Homo sapiens
  chr16:1030271-1030855
  hyper
cggggtctgcggacgggggcgggcggccgctgggggcaccagctctcggccgggccagaacagggggtaggaggcgcgtcctgtgcggtcggtggcggccccaggtgggtgcggtgcgctggcaggaagcggcagcacgacccccgactttgcatctggacttttctagtaacggaccagctccttctgccgaccgggccggggagaccgcgtggctcagtggctgcagcggccaccggcccgggcgtgggggctttgagggcaccggcgcggtaggtcacccgggtttcgcgggccgcaagctcggagacgcgcgtgtcccgcgttggctgcctgacccggaatggcgcagccccttcgcctccagcgcgctggttgaaaggatccgagccaccctcggggacggccgggccgaggccacctcgcggggcggccttgggcggggacccggacccgcggttggacgttcgcctcggggggggcaatgtcccctctccgaccccgcggtccccaccagggcggcacaccccgccctctccccgcctccgcaggcgcccagggctcacaggctcggagcggcctcc

SEQ ID NO: 34372 - DNA, 143 bp, Homo sapiens
  chr16:1202445-1202588
  binary
cgcggaaactgcccgtgcgtgtcggggagagatgcgagtgcaggagcgcccagccgtaaagcacacccccgcccgcccccgcgccccatcacacacgcgcgcgcgggcacacccgggacacacacgcggcggggaaggggcac

SEQ ID NO: 34373 - DNA, 866 bp, Homo sapiens
  chr16:1203442-1204308
  binary
cggggacgccgccggccagcagagcgaggtgagacgcggcgaggacgcgcgcccgggaccctcttcaacttgcgcgaagcgggccggggagcccctcggggtgggggtggggccgctggagggagggagggggcgggcgggggcggggggcgcgtttgtctctaataagaaaagacaaagacatcccggcggccgcggctgttcccgcagctccgcgccgcgggaggcagggcgggggcgtcgccaccggccccgggtcaccccctgtcctctgcaggtgctgccggccgccaccatgaccgagggcgcacgggccgccgacgaggtccgggtgcccctgggcgcgccgccccctggccctgcggcgttggtgggggcgtccccggagagccccggggcgccgggacgcgaggcggagcgggggtccgagctcggcgtgtcaccctccgagagcccggcggccgagcgcggcgcggagctgggtgccgacgaggagcagcgcgtcccgtacccggccttggcggccacggtcttcttctgcctcggtcagaccacgcggccgcgcagctggtgcctccggctggtctgcaacccatatccttcccggccggcggggggcggggggcggggggcgtggggagggtgggggcccggggcgcgggactccctcggcatgcgcccccgcgcgcccctgttggtgggacctggcgtgggccgggcgcgcgggggtgcagggcaggggctggaggaccgcgctctaatttctgagagtggcgggcttggggggccaccgggcgcctccggactcccttccccagggccggctccggacggagaaggtggaagcgaagcggtgaggcccccgc

SEQ ID NO: 34374 - DNA, 1484 bp, Homo sapiens
  chr16:12995318-12996802
  binary
cgccccccagctagctcccgctctagtcacctcttccccgcgcccccgcccctctagagctcgcgcccgcccccccccacccgcgcctcctctgcccgccctcctccccctcccccttccctcctgccctcccttcattccacaagtgtcgcttcgctctcttcagcgcacttggcgagctggtgaggtgagagggatactgcgagagggctaggggcggccagtccggggctgccggccaaggctaggcgctgccagcccgattctcctctgctctccacccccgcctcacccagtggccggccggacctgcaccccgcgcttgaccccgctcatcctccccccgcccggccgggcgcgctcctccccggccggcccctcggcgcgcggcgcgctggaggcgaacgcgggctgaggcgaacgcgggctgagccgagcgcagtggccgccgaccaccgagcgccccgcgccgctccctgcatgtgcggcccgcggcggctcgcagctcccggcagcagcctcggcagcttcggccgcgcctcgagaggcggccgcagaggctccagcggcggccgagcggccgagcccgggctgggagacaccatgcgccgcgtccttcggctgctcctcggttgcttcctcaccgagctgtgcgcccgcgtgtgccgggcgcaggagcgagcgggacacgggcagctggcgcaactgggcggcgtgttgctgctggcggggggcaaccgctccggggccgcctccggagaggccagcgagggcgctgaggcatcggacgcgcccccgacccgggcgcccacgccggacttctgccggggctacttcgatgtcatgggccagtgggacccgccgttcaactgcagctcgggcgacttcatcttctgctgcgggacttgtggcttccggttctgctgcacgtttaagaagcggcgactgaaccaaagcacctgcaccaactacgacacgccgctctggctcaacaccggcaagccccccgcccgcaaggacgaccccttgcacgaccccaccaaggacaagaccaacctgatcgtctacatcatctgcggggtggtggccgtcatggtgctcgtgggcatcttcaccaagctggggctggagaaagcgcaccggccccaaagggagcacatgtccaggtgggctgcctccccttcgccctcccctcggggcttcgctctccctgctctctcctccccaccttcccccaggcaatggcgctccccacggtccccgctccccgcatcccagcctctccgctgggggatgtcaccgggaagccaacttcggcttggaacacggagaaggggcgctgggctcagcacaggtgtgggtctgagcgtgttcgtgtgtgtgtgagcgtgtgtgtgtgtgtgtgtgactctgctccctcaccctctggccgcctcctcccgctggtgactgaggcggacttgagacacgtagcctgggagccc

SEQ ID NO: 34375 - DNA, 912 bp, Homo sapiens
  chr16:1493342-1494254
  hypo
cgggtctggcacctgcccctggagtccacccagctccggcaccactggcccctgggagctctgggcctgggcagcaggggtgagctgggctccaggcccagaagcagctgcccccaacacccaggaaaggggcagctcgacctgtgggtgggggagccgctcacctccggcgcctccttttcgggggcctgggctgccggccgcgcctcctgctgcaactgcctcagctctgagccctgcagctgcacgcgggcccgcacctggagcagctcccgcagcaggctccgcgtggcgcgctcacagcgctgcttgtgctcccgcaggcaggccacctcggcctgcagctccaccaccctggccggggcgagagtgggcgagtctggcggtgcccgccgtggaggcggaggcggcggcgacgtggtcctcccccgccagcaccccctgcagggctcaccactgctccagctggttccagtgcttggcggtgtcctgctcggggacagaggccgtggatgtcggatggctggactcatacctctccgagagctcctccaggctcaagggctcggggctggccaggcctcctgccaggaggagccccaggtcttccagggtgacggctctcagctgggaaggggccgatgcccctgagggtccactgtcagccaactctacaaggaggcatcttgggagcttgccccttggggcccggcccccactggagcttacgggaacaaggccccaaacccccgcaggaccctcgcccaccacccagagctcaacgcgtctccttgggtcacacaggatccagacgggcttggctcagacaagtccagggccctgcctgaagacacacagcactgggcggcaggaacaagcgagctggagggagcccggggtcagaagcagagc

SEQ ID NO: 34376 - DNA, 353 bp, Homo sapiens; identical to SEQ ID NO: 27664
  chr16:15820563-15820916
  hypo

SEQ ID NO: 34377 - DNA, 502 bp, Homo sapiens
  chr16:1724902-1725404
  hypo
cgctaatatgattacagcgaagactttcctgataagttctcaaactcgatgtgtgactgtttggcacttgagacaaacctgcctttgcagggaaagtgtctctcacgggcattggtgtgggcgtgcctgacatacgtgttcagtcccttgcatacctttgccttgagacttctgtgtctccttcccatttgggacacccaggtgagggcccagacatctggatgtggtcagacctcaccaaatatatgccttcgtggtggtctccctccttgcgccctcttgggtggccagcgttcctactgcagacggcccaacatccagtctttccccaggacagagctaacaagggcccctttgccttctcatcctcaggagttccaggcacatgagtcaccgtccatccacatccagtgtggcctggagctgctacagaggtgttgggcaggccatgcctgtgccgccatctctcccttcctgcctcatttcatcccccgcagcagcc

SEQ ID NO: 34378 - DNA, 357 bp, Homo sapiens; identical to SEQ ID NO: 26416
  chr16:1741741-1742098
  hypo

SEQ ID NO: 34379 - DNA, 868 bp, Homo sapiens; identical to SEQ ID NO: 16474
  chr16:1796052-1796920
  hypo

SEQ ID NO: 34380 - DNA, 208 bp, Homo sapiens; identical to SEQ ID NO: 26420
  chr16:18804320-18804528
  hypo

SEQ ID NO: 34381 - DNA, 654 bp, Homo sapiens; identical to SEQ ID NO: 26421
  chr16:2028554-2029208
  hypo

SEQ ID NO: 34382 - DNA, 1490 bp, Homo sapiens
  chr16:2041061-2042551
  binary
cgggaaaggagcgaagggatgaggttgaggctggaggtcgtttcttggaaacacagggctgccccgtgcagcgctggttaaaatgactgcggtccccctcatgcctgtctcccggaactggtgggcaggaggcattgaggtttgacggaacctcagaggtcaacggtgtcatcttttcagcccaaacacttacaggtgatattaataatcagtcacgtgggggctgtcatccctcgggtacccaccacgtgcaggaagctgggtggacatgtctgtcccagcactgcatgagctgtgcccgtcaccctatttgcatgctagaaaacaggccagacagttcccaaccgcgcaggaagcaacagctccgctgcctccataccctccctcccgccccgctctgcctgctgcactctcacctccccttcgccgttccggctccagcctgggaatcgcgggcccaggtgaaggctcctgttcccacactcttgagtgggctctgaggggactccacgggcccacgcggtgcagagtacctggcttgaatcaaccccggcttttgtcagccatgtgatcccggacaagtcacttcacctgttggggtcccaatgtcccccgcatttataaagagaataagaacaatggcgatcccacggggactttctgaggatttggtgaggggacgcatgtaaagtggctgtttaacacaatgtctgggcatagtagatgctcactaaacggcccgtgttgtcaataattactaaatacgcgagggttcgggaaagaaagaggtgacaccgccccccacccagatacgggcctgggaacgcagggacaggcccaggggcgtgggcgctcgaggcgggctcgcagaggtcgggtcgccgcagggccctgagcgccgcgccgcacgcaggtgttctccatcgccgtcttcgggcccatcgtcaacgagggctacgtgaacaccgacagcggccccgagctgcgctgcgtgttcaacgggaacgcgggcgcctgccgcttcggcgtcgcgctgggcctcggagccttcctcgcctgcgccgccttcctgctgctcgatgtgcgcttccagcaaatcagcagcgtccgcgaccgccggcgcgcggtgttgctggacctgggcttctcaggtgggcggggccggggcggtgagcgcggagagccttccgggtgggcggggagggggcggggcctgggcggggaacaccgctggagtttccagctgggcgtggccgtgacgaggggcggggactgaggcagggagtgtcaatgggcctcccgggtgggcggggagggggcggagcctggacggggagcgccgcgggactttctaggtaggcggggcccgggtctgggcggagcctgggcgcggaacgggtctggcgctcccgggtgggcggggtcagcgcaggagagggaggcgggacctcgcgccacgcggcgagcccaggcgaggcgccccaagcctc

SEQ ID NO: 34383 - DNA, 1159 bp, Homo sapiens; identical to SEQ ID NO: 27668
  chr16:2141860-2143019
  hypo

SEQ ID NO: 34384 - DNA, 872 bp, Homo sapiens
  chr16:2234319-2235191
  hypo
cgggctggaccggaaggtgggctctgtgcccacaggcaggggcaccttgcctcctccaccgtgcaggactcagccagcagcttacagctctccggcacacgagtgcactcacacaccatacgccgtgcccatgcacacgctgcaccatctcatacccatccccttccacctgtacacagacacgcgtgcccagctcgcagtcccaccatcacacacacacacgcacacacagaggcacaggttggcccacacgcacagcctgcacaatgacgacacccgtacacacaggcagacacacacacaacacacagactgacagacagaggagagggtctggcctggcaatgcccccgaccccgccgctgccaggccaggcaggccgtgtaagcacccatcagcccatcggccttacagcctctccccggagcccacgctgagaacacccccaagccctgtaccttgccctccgatgctggctccagcttcttgggcggctgctccccatagacctgcccggcgtgggccactggaggctgggaccgggccacacctgaggacgagagtgggtgggggacaagggctgtcgggctgctttcctccatcgggctgcgtggcagcacccttgctcttacctgcagagccttccggaggcttggcggggctgtcccccgggccggactcagagacggacttctgggaaagcaccgttgccaggagctgcaacccagaaaccccggcttgtcacctgctcccagccctggccaccctggccctggccactaccccacctaccttgacgccttcagagcccgcgtgtagggcgtgacccccgctgccccggccgccagccatgccgctaatgctgccgcttc

SEQ ID NO: 34385 - DNA, 970 bp, Homo sapiens; identical to SEQ ID NO: 26426
  chr16:22824947-22825917
  binary

SEQ ID NO: 34386 - DNA, 1768 bp, Homo sapiens; identical to SEQ ID NO: 22807
  chr16:23846783-23848551
  binary

SEQ ID NO: 34387 - DNA, 711 bp, Homo sapiens
  chr16:24266904-24267615
  hyper
cgtctccagagctgccggtgcctttaagaagactcggtctttcgggtcttctttttccccaatgggctccagtggtgcccgcagcaaaaggcaaacttgcctggctcatggggtgaaagggaggattgaagaatgccgcgttgggtgggtgctgagggagcgccagagtgcgctacgggcttcgctccccttcccctttccttaacccttcctagagcggaggaaccgggtcgtgctgcagcgcccaggagccagggcgctgactgtcctcggctccagaaactttgcgcggagagtgggcttgactgggcagagccgagccggctggctgacccgggaaggaacgggggaagggcggggtgagggaagaaagaccctttagcaccccgggtttctagcccgggcggcggtgtgcagctgcatgagggagctgtcccttcggcaccacggaccttaaagcctaggcgttaagacgacggaggcggggcaacaggcggggagctgtcccttcagcaccacggaccttggcgcccccagggaaaccagccggcccccgccccaggactctgtcttttctccagtttgagcgggggtgtcgggagcaggcggagagctttcctgcgaggctgtggaagcagtgaacactcttctcagcggctcgcctcccagcagtgctattttttgccatccgccctcacccccagcacacgc

SEQ ID NO: 34388 - DNA, 223 bp, Homo sapiens; identical to SEQ ID NO: 26432
  chr16:29830886-29831109
  hypo

SEQ ID NO: 34389 - DNA, 368 bp, Homo sapiens; identical to SEQ ID NO: 24003
  chr16:30124512-30124880
  hypo

SEQ ID NO: 34390 - DNA, 640 bp, Homo sapiens; identical to SEQ ID NO: 22808
  chr16:3208795-3209435
  binary

SEQ ID NO: 34391 - DNA, 917 bp, Homo sapiens; identical to SEQ ID NO: 22809
  chr16:3232535-3233452
  binary

SEQ ID NO: 34392 - DNA, 937 bp, Homo sapiens; identical to SEQ ID NO: 22810
  chr16:3233501-3234438
  binary

SEQ ID NO: 34393 - DNA, 187 bp, Homo sapiens; identical to SEQ ID NO: 24008
  chr16:323421-323608
  hypo

SEQ ID NO: 34394 - DNA, 370 bp, Homo sapiens; identical to SEQ ID NO: 23096
  chr16:3237723-3238093
  hyper

SEQ ID NO: 34395 - DNA, 1770 bp, Homo sapiens; identical to SEQ ID NO: 23097
  chr16:3238154-3239924
  hyper

SEQ ID NO: 34396 - DNA, 226 bp, Homo sapiens; identical to SEQ ID NO: 16483
  chr16:4513533-4513759
  hypo

SEQ ID NO: 34397 - DNA, 1292 bp, Homo sapiens; identical to SEQ ID NO: 29928
  chr16:47176468-47177760
  binary

SEQ ID NO: 34398 - DNA, 409 bp, Homo sapiens; identical to SEQ ID NO: 25169
  chr16:4845976-4846385
  hypo

SEQ ID NO: 34399 - DNA, 979 bp, Homo sapiens
  chr16:49311070-49312049
  hyper
cgccaaagcgtacaggggcagcttccttgagcggtggctctccaaccttcgcggccctacagcctcaagcttacacgcaccctactgactatagggtctccacaagcccggagggctggccctgcaacggcagagctgctgggtggagctagtttcgctgccaaaggctccaactgtctccgacctctccttcccaaccaggagacttcggagaaagcgcgtctctttattaaaagcagtttttctttaaatccctttaaggccccttatttcttctcattcacacttccctggggcctaacagagtagaagggaaactgttgggcagaaacagaaaagtactcgggtccactcctcactcgcgaagtccctatctatctctgtgggtcccggaggcacagggctgcaagggcgcccgctagagctgctccacggcttaccggattgcatgcggagaagaaacgggcccgggtttcaacagaggccccgtgctccgtgaatttctaactcgaaccagccgctgggataaatccgagaaacgttgtttattgtgctattattaactttcccttctccccacgcccctagaggaaataaaattcattcctgaatattgggccaggaaaacgtttctctgaaaggaaccacaactgcaggggaccacccggctgcagctcccagctcccggcccttcgccctaggctgcccactcgctccggctcccgacctccccgctgccgaagcaactgggtcagcctttcagacttaaaacgaagtcgtttatttcatttttgctttcacattatgttccgatacaatcaaaactcctggacgaacctcttgaataaagtcctgtgaatgagcggaatcataggtcctgggcgcccgagtatgcggcgggtggactccggattcagaggcggtgtataaaacatacgctgcttcgggaactgcgagggggacgcggtgggagacatcc

SEQ ID NO: 34400 - DNA, 640 bp, Homo sapiens
  chr16:50335368-50336008
  hypo
cgagcgaggccttcacagtgcgcctggcacgtcacagcattctatgtattctcgtcactcttggtttattttccatgaggtggttattaatctcccagatttccgagagacacactttcaaaacaagctttggatgaaactcaggaaagcagggagtggcctgggagccactgggcaggagcctctgagtgtcctgggtgctgactgcaggtcccctggtggctccaggaccccacggtggaggaggcagttccactgccctggccaggtggggcccgccttggcctgtctgctgcccgaccctggcctgcttcagggagtccggcacgtctggccacttctctgtgaatcatccatgaggcttgctcaagaatgtcggcccagccagcgagtggctcctttcactctggtcctcgctatgccttggggctggcccgactgccagaccctgggggaccaagggctggcctgtgagcctccctacacatctgctggcctcactctgcccccagcacccccagtgctgcaccatccatactgagccagcatctgggaaaacccctgccggtacctgtgtcccattccaccaccctcctagaatagggccctgatcctcgccctgtaccccggccctggcccc

SEQ ID NO: 34401 - DNA, 974 bp, Homo sapiens
  chr16:51184597-51185571
  binary
cgcccgaagtaaacttccttaccgctggcagcaaggccgggcggcggaggccgggccgggtgccctggggccggcgccgggagcgctaggggccccgtgcggtcaggccggggcgacctccacccgcacccacgcctcatggggctcccgggtcttggccgcggctgggatccccggaaaagcagggacggagaagccaggccggcatgcccgccctccttcccccgggaggacccaacaactccggaaagatcctgccgggagatgtgctcgctttccccggggcagcgggggaaagcccagcaaaggcacattgaaaattaaaaagaaaaaaaaaattacgccgagtggaagaagcaatcggggccgcggcggcggtgaggtagggggcgcgggggccagccgcgtgtgagtgggtccgagtgtgcgtgagtgtgagtgcgtgtgtgtgtgtccacggcgcgggccggagcactcaccatctcgccgggggagcgaggccacttcggggtcggattggaaatgttgaggcttcgcttgcttcctccgcgacatgctggctcaaacatcagctggggcagaataaaaaattactaaaaaaaaatcttctcaaaattacggaaatcgagcggcggcggcggcggcggctccccccgcccgccggcccgcccgccccctccccggctccccggccccgggcgcagcgcgcatgtgtcctgctataattatgattatcaataatgcattgcgattaatcatagaggggctctttgaaaggcgattggcaccgggccagcgctattcaaacccgctcgccttaatcaattagttcgtgatttgctgcagacccctgtctctccgcgcgctggcccaataagccggccgcggggctggctctgcgcgccgcgccgcccgacactgggttaaccctctttgcgaccgcccgggactccgcggcccggccgccgggggcc

SEQ ID NO: 34402 - DNA, 1966 bp, Homo sapiens
  chr16:51185587-51187553
  binary
cgggcccggcgccccggcaggcgccccccgctctctccctctcccctccctcttccctccctccttcgcccccccccacaatcccgggctgggccgacccaaattagcatgccctccccggaattgagccgccccgggtggggggtggggccgggcggcgagggctggggacccgggctgccggcgcgctgcgaacttcccaactcgggggcgaggcgcgccggcccgcggggggagggagtcccgcggcgggatcaggggggagggcgtcccgtttcgtgagtgtttcttcgtttctttaagagctaccagaaagcagcccacccccacccccattaaaaaaaaaaataagcgagtggggaagagccagccccacgccggtccgcctcccgcccacggctcggcctccctcccgcctggctcggcgctcctccgccccgagttctccatcccctggatcccgggctcgcgggggcgcggagaagaggatccaggaaaggtttgggaacctgatgggtttgtggctggggggaggggcagttctcccgccaccccatcccctccccgccaggggcactgatcctccagcttcttgcttgctccctcgctccctttctctacctcggacattcccaggacaattagggctgaagttttcgggagaagcagccccgagcccgtgggataagggggcggcccggctccgcccaggacccctcccggacctcccccccggctgccccggttggctgcagggcgcgtcactccgcggggaggcggcggcagcggtggcgccgcagagccccgggcgggcggagagcggggaccggcctgggctccgagttcagctccggccggggggaggggaggggctgcggctcacactgagcgcagcagcgagcaccggcctagggagacacagcccgggcggacccggcactggactgggccagtccctgggacccctgggcaccccgccctggggagggggccgcgccccagccttccgggacgaggtggcggcgcagagccggaaagcggggtggggggagggcggtggggaggtgttctgtccgaggctgcctggcggcgccgaagctcgcctccactttttgggcacttgccgagcgcggcgcccgaacttttcgctctatcaccatctccctcaagctgagatgcaacctccctaccctcgccccagagcccagagccaggagcccgatccctctgccgggctcaggcgcccgcgaacctgagactcggtacgcggctcagcctagctctttcccctcgcgcctcggggtctcctcgctccaaggttctcgaagtcttgcgcccgaaggactaaactaaactaaacttcggctgagtaatgggggaggaggggggtgcagatacacaatccctgccctatctcacgatcaggaaaggagagggctcataaggacgccccaattcgcgagcgcccttgagtctggccggtgccacggtcggttcgcgcgaagtgggcaccggtctcccgagccgacttcgtgtactccggacctgtactgcgctccggtagaggacccttccctttctcttagcttcttaaatcttttcttttaaggtgtaaatgtgtgtgtgtgccgatgaatgtttctgtttttcatctgctgactttatttttttttattggtataacttctcccttctctctccctgctcgtccgttttccaccttttctcttacttatcttctgccctcgctcactccctaacacacacattcacaccctctccgcctcgctctcccgttctcgccaggtcctgatgggtacagtagattttgataaaaagacaaacgaagctatcagtggggctgatgttgaagaatgaagataataatgtttccataggtggtgcttcaaatgccattatttctcactgaatatttaaagagatccctcggcaaagatggatctgc

SEQ ID NO: 34403 - DNA, 1626 bp, Homo sapiens
  chr16:54965796-54967422
  hyper
cgtaatcctatcttcgcaatccgatttgggagtattaaatttctgaaaagtcggtcgagctgcggtgcatccgggatttttcggccgggttgtaacttcggtctggggtagtatttttggagggtgggagtgcgtgggcatggctcagctttttgtttgcatttcttagctgttgaaaaaagaaaaaaagagccttgacttcccttgttttccccccttgcgcccaacgtgcgtccgctcccccgccgagcgcggagtcgcctcagttgcccaggcctctatctgcatggagggccgggccgccgtggccagatctgcgcacggggtacggacgtgcccgggcagatgggggcctacggggtgacaccgaggccgggacagcttcaggggccccagaaggacctgacccagaaattgaggtccccgctgccttctgaggagggggaggagttgctcctaggtctgaaccccgccagccttgccccgtaggaagctggagtgcgggcctcgtccacccacagaccccggggagcgcagggaaaagggtgcttcggtcgttccgatggcagtggagaccacggtccacactcacctctctgcgtctccaccgcagggctctccctacgaccacacacccggcatggcgggctccttggggtaccatccttacgcggcgcccctgggatcgtacccttacggggacccagcgtaccggaagaacgccacaagggacgccacggctaccctcaaggcctggctcaacgagcaccgcaagaacccctaccccaccaagggcgagaagatcatgctggccatcatcaccaagatgaccctcacccaggtgtccacctggttcgccaacgcgcgccggcgcctcaagaaagagaataaaatgacgtggacgccgcggaaccgcagcgaggacgaggaagaggaggagaacattgacctggagaagaacgacgaggacgagccccagaagcccgaggacaagggcgaccccgagggccccgaagcaggttggtggacatgggaaagggcgtgttgggcgggagtaaaaaggaaaagagaggcctggagggggcgcgcacggggcctggaggttgggggcaggggtccctgcctttgcgggcgggaaccgggtcccgccgcgcggcctctgcgcccctgacagcctgggtttcgcccgcaggaggagctgagcagaaggcggcttcgggctgcgaacggcttcagggaccacccacccctgcaggcaaggagacggagggcagcctcagcgactcggattttaaggagccgccctcggagggccgcctcgacgcgctgcagggccccccccgcaccggcgggccctccccggctgggccagcggcggcgcggctggcggaggacccggcccctcactaccccgccggagcgccggcgcccggcccgcatccagccgcgggcgaggtgcctccgggtcccggcgggccctcggttatccattcgccgcctccgccgccgcctcctgcggtgctcgccaagcccaaactgtggtctttggcagagatcgccacatcgtcggacaaggtcaaggacgggggcggcgggaacgagggctctccatgcccaccgtgtccc

SEQ ID NO: 34404 - DNA, 1780 bp, Homo sapiens
  chr16:55357459-55359239
  binary
cgccgcccacccatcagtgcccctttgaagacccctgggatggagtgagggggtggtcagaccgctgggcccagccgggcgtccaggaggagcgcagggaatgggccgccctcccggagcgctccactgcggctctccagcgccacccccagcggagcgcaggggctgcagcccggaccgggagccttcttcaggctccctggctgccccgcggccactgcgggaggcgcgcgcgcgaggcagccaagccttgccttcggaggagatgcccagggatcttagcaagcagcctgcggctgccagggatcggacctggcgagtttcccgacggaatctgagggatcccgaacctcggcctcgagggggcgctatccggcctactcgaggaccaggcagctgcagagaagctccaaggtcaaggccctgggccaggccagggcttggagagccggaatctagcccgagtcctggggaggctgaggcggggaaccagatccccgaggacaaagatgggcgggccagtgggatccaccgacgctgcccggagctgctccaacgagagccgggcctgtggcgtgaacaaactttacttcagcgcaggggcggaggaaccgggctggaggcttctcccccgggcctctgctctcctccacctgccagtgctcagcctccgcccagccttcgcccaccccagctccctccccctcccccacgcgcctctgttcactcagactcctgtctcccctctcccctcctccttctccctcttgcctttctcccccacttttctcctgtctcttcttttgtattctctcctccctcgccgccccggttgcctctcgcctcctccgggccgcaggggaggaggtgagcgcgctgcgcccggggcctgcgcggctcagagggaggcgtttctcctacttctcccgggtaatttggagaggttgtgtgtgtgtgcgcgcgcgcgtgagctccaggcgaaaaggggtaggattcagcgccgagcagagagggtcagggtttttgacgttcctcgccagctgcacaaacctcccggagcaagtgtgagtgtgggtgagagtgcgcgcgcgcgcacgggctggctgcgcttggcacgcttggtggcccagggtcccggggcccggggtcccgtctggcggcccgggattaccgtgacgtcacattgagcctctggccaccttggactgggacacctccggagcctcacagccccgcgccgcgccgcgcctcacctcgccaccacgcgcctttgggaacccgcatcttcttccttcccctgcccatccatgggcccttctgtcttccggaccccacgggccggaggggcgccttccggagcgcagggctcggcagccgggctgccctcggctctgcctccactggggccaaccaggcgaaggaaccggcgctgggcatccgcagcggtgtaaggaactgagacacctcactgctgggggcgcggaacagctgggctgagacgggaactcgacagggaagagagagacgggccagggacagccaccatgtccttcccacactttggacacccgtaccgcggcgcttcccaggtaagaggcgcctctatgggggataggggacagactgggtggagggagtgcctagtgcacggcgcctgcctctgatcatcctcctcttgtgttctgggggaagccagaaggagcaaggaccagggtaatgtgtcacagcctcctctgacatccccagtccctaaatgagaacgtttcaccccggagtgcac

SEQ ID NO: 34405 - DNA, 1971 bp, Homo sapiens
  chr16:56224379-56226350
  binary
cgtttcgaagggggaggacaggagaatttagtgcaaagacggcctccaccaaacgaaaccgtccaacatttgcaaaagcttttaaaataaactgctcagggatcaggggtttgctggaaactcccggtcgcttgaagccctgtccctccactccgggcaccctggcctccccagggtgggcacccctcctgcacggagagcggcggctgggatctcggagcagggtcggctatggccctggaggcagcggctcacagagaaaaagctctggcttttctccgcccgctgcgttcctcttcttacagcctcgggtgtcacatattaggtgctcaataaatgtggacataggaaacgaaaagtccgaatctgtccttacgcccccaaggcgaattctggggcgcgcgggtttattccgacccactaccacatcgcgtttcctgaggtaacccggcctcggctctgcggccccagcggctggagagccacggagaaggcgggctacgggcgacaagatggagagccggcccgagagggacagaggccgcgctggcagcgagctggggggcccacctgaccgtcctgcgggcagcccggccccgcgctcccattgacaaggaggtccgcgccgccggcgcgtggggcgggggcggaggcggggtggggcgccccggcgcgcgcccggccccactccccgcccccgccagtcccgcaagcacccaccccgggggagccgcgggccgggagggcgctggggggaggggcaggccgctccgcgagcgcgtgtgcgcgccgccgccggctgacgcgaactccggcgcgcgcctcccccgccccgcgccctccccgtcccgggggcccggcgcgcggccctgctgacgtcagctggcggcccgcggagccgggtgcgcagagccgctggcgcactcgcgcgctgcgctggcctcctccccgccccgggcccaggcgcgcgcgcgcttgttcgctctcccattttttttttcccctccctccctgcctctctctctctccctctccctcgagctcccggctggctgcggctccctggcgctctccctctctctccggtaggctcaccgagcgatgcgagctctgggagacagcgacgccgcctcccgctagagacctgcccctcggcccggccccctgcccaaccctgcccagcgcgcgggggtcggcgaaggcgccgcggacgcaccgacggctgaagagcggcgatgcacatgcactagcagcaccccctaactcactccctccacatcccgcgccgccgccgccgcctcctccacctcctcctccgccgccgccgcctcctcctcctccggcagccgcggcagcaggacccaccctgccccccaccccaccctctgtcggctccggctgcggctccagcctcgactattattttatttattttgggtcgtgcacaagcctcagtgcctgcagtccgcgcctcctcggcccgcgggcgcctcctcccttggctccggagccccagaccccggccaccctcgattcgacaaccccagacccctgccagctgccgcgagtctccgctgctggaatcttgttagcggctgtctttttggagggttctggtttcccgacatttttgtttccagcccaggagaggatatcgtgattttccccccttgagcccaggctctgctctctgggggggtggggggcgctccaagccggggagccgtgccagccgagtcgtgcgggctgtggcagggaaggggccaccatgggatgtactctgagcgcagaggagagagccgccctcgagcggagcaaggcgattgagaaaaacctcaaagaggatggcatcagcgccgccaaagacgtgaaattactcctgctcggtaaggaccgccgctgctacccccatcccccgaccccggccactccgcaccccctgccaccagctcccccaccccactcgcgccc

SEQ ID NO: 34406 - DNA, 364 bp, Homo sapiens; identical to SEQ ID NO: 27682
  chr16:56228284-56228648
  binary

SEQ ID NO: 34407 - DNA, 281 bp, Homo sapiens; identical to SEQ ID NO: 25176
  chr16:56709754-56710035
  hyper

SEQ ID NO: 34408 - DNA, 1249 bp, Homo sapiens
  chr16:58497229-58498478
  binary
cggcagcgccgtcccctcccccgggaacccgacgccgcgcggccacagggggcctggaggggcgggcagggcctcgcagcgcacccagcacagtccgcgcggcggagcgggtgagaagtcggcgggggcgcggatcgaccggggtgtcccccaggctccgcgtcgcggtccccgctcgccctcccgcccgcccaccgggcaccccagccgcgcagaaggcggaagccacgcgcgagggaccgcggtccgtccgggactagccccaggcccggcaccgccccgcgggccgagcgcccacacccgccaaacccacgcgggcacgcccccgcggcgcaccgcccccagcccggcctccgcccctgcagccgcgggcacgcggaggggctcctggctgcccgcacctgcacccgcgcgtcggcggcgccgaagccccgctccccgcctgcgcgtctgtctcgtccgcatctccgcggtgagtcggcggcgccctcgcccctgagcccagggccagcttctctcgccgccgcggctgctgcgcgcgtccccgcccagcccagcccagccccgagcacgaccccagccccacgcacgaccctagccccgcgagtcccgcaccgactcgctcccgccccatttcgcctccgcgggggcggcgccccctcctccccgcggctcccgctctccttcctcgccttcccggccgcgctggggacccccagccgccgtccgcgaccccccaccgcgacgcccggaggcggcggggtctctttgttcgggcggcgggcacgggggaccacctcccacggtgtcaccgcacccaccccgcgcccttcctccgcctcctggagttcaccgggaccaggtggcggcgggtgcctttttgggggtgcgcggccatgcaattggtggatttttttaaaccgttttggaggggggagcgcggcgttgggggcgggagagcgctcctggctgtgagctgctcctgccgcttcgctccgcgctctcctgccgctccgctccgggtctcccgcgctcctctccccggctcggccgagcgcgctgccccgacgccgccacccagagccgggccgcgccgggcgccgagatgaaggtgctgggacaccggctggagctgctcacaggtaccgcccgcctgccccgcagccggccgccactttccgagttggagcggactccgggcgcggcggccggggactggggcggctcgggtctgagcaggaaggggtgc

SEQ ID NO: 34409 - DNA, 529 bp, Homo sapiens
  chr16:66612749-66613278
  hyper
cggtaatcgtgtgttgcatcgatgcgtttgtggtcaccacgaagatgaggaccaacttgaaaagattcctgggagtcgaagttgaaaggaagctttcccccgccaaggacgcctaccccgaaaccggccccgacgccccgcagaggcccgcctgaagccagcccggcgccctagcagatgcacgtgtctgtcgaatcgctgcctccgagcccacccccgagctcgcatgctgtcacccattccagcctaaatgtgaccataaaattagggctgctgcttttatcgagaacacctgcttcctctcgttgccttgtgtgaaagtcgcgttgtattttcctgcgcttggcgctgcgcccgcggagctcagggccgtgacccggtgctcgcagccccccgaccccgcagcggagcggcggcttacagacctggggccacctggagacgccgggatgggaccgcgagggcagctccgcgcggaggtgggaccggcgggttgggaacggagttggggcccgtcgggggccggcgc

SEQ ID NO: 34410 - DNA, 907 bp, Homo sapiens; identical to SEQ ID NO: 27685
  chr16:67197294-67198201
  hyper

SEQ ID NO: 34411 - DNA, 827 bp, Homo sapiens; identical to SEQ ID NO: 25180
  chr16:68118222-68119049
  binary

SEQ ID NO: 34412 - DNA, 274 bp, Homo sapiens
  chr16:68386080-68386354
  hypo
cgtgttcctgttaacactcctggaccgagccctactgacacctgggccctgcttctcgcccattcaccaggtctctctcctcctgggcgagccgttcttcactaccagcctgctgccgtggcacaacctctacttctggtacgtgcggaccgctgtggaccagcacctggggccaggtgccatggtgatgccccaggcagcctcgctgcacgctgtggttgtggagttcagggtaggccacccaggggatgttggagaaaaaagcagaggaggc

SEQ ID NO: 34413 - DNA, 1038 bp, Homo sapiens
  chr16:77245974-77247012
  binary
cgtgtagccaagaggacggccaaacggggaggcctcctctttgtcctcgcagatgctggagcagcgactggcccgggagatccgtgccctggagagaagcaaggagcagctgctctcggagagtgagcctcccgcgccaggtgggcggggggagggggatgtgcccgggcctcggccctgcccctgacgcccgcccaccgacagggaggctggtgcgcgccaagctgcgggaggtggagcggcggctgcactcgccgcctgaggtcgagggcgccatggcggtgaatgacgggtgagaggggaagggaggagtgggcgaggagggcaggggcagggcggaggggaacccgcccaggtcccccgctccgcccccgactgccgcttccccggcctgtgcctccctcggcgtcgtcgggtctccgcgtctcggtggcttcctcctcgtcccctggactctcgctctcttcctcctgtctcctcggccccttctccgcaggctgaaggcggagctggagatattcggggagcaggtccggagcgcccccgaggtcggggccggcgagggagaggtagggagcccgaggaagggaggcggggcgggcagggaccgagtcaggagagagcgggcgggggtcctgggagcggcccccgagagtggggtctgtggggagcagggcggccccggggacagaggaagccgcggtggaggcctagggcagacgcgggcggacgcgaggagcgtaggaacctggtccgcagcctcacccagcccccggcaggccggacctgagctcccccgcgctcgcgacgaggaggatcccgagccgccggtggctgcccctgacgccctctaggccagcaggacccgcccgttcccgaccttccctcgagacccgccaagaaataaaggcgatgatttccgaccatgctcgcgttctccgcggagtctgtgctacaccgtggagcggggcggggcgtgctgggatctcgaggcggggcctctgccggacccctcccaccagtcgagccccgggcgcc

SEQ ID NO: 34414 - DNA, 371 bp, Homo sapiens; identical to SEQ ID NO: 26449
  chr16:77247397-77247768
  binary

SEQ ID NO: 34415 - DNA, 925 bp, Homo sapiens
  chr16:77468276-77469201
  binary
cgaaaggcccttcttggggatggggggcaaatacgaaccatcatttaatccgctggcgccgctgctgctgtcactggctaaggccgcggcgaccgacgcacagcagaggcagcacagctggagcgcctgcaagagaaaaggtgacatcgcgcgtgaggggcgcggcggggctggcgtcgggcgccccctgccacccgctctcggagctccgctcggcggcacctgccttggccacgcgccccagtcccgccaggcccctcggcgggcccgaacccgcagccgggaaggcacacgcgagcaggagggcgcactccatggtcaggtgcggacgcggcggctgcgggtggccagacgcggcaggcggagcgcacgggcggcgcgcattctttccgcggccccggagctcggcgccccaggtgcggctccaggtgagagccgccgccgttcacatcgcagcgggggcgcgctgggacctcccctcctccggccgcctgcgcgccctcccttctcccggcgcgggcctgccgagctgcagtttgcggcaccccagagggtacggggggctccctgggccgggactggagcgcaaacggttgggagactgtcggtgtctgcccgcccgtctgtgcgtctgtctgtgtcggtgtgagcgtctgaggcgatggggaagacagcgccagctggctcccccagcgcgccggagccgagcgcccgcctctccaccgcgcggtgattggcgaccagcggctcccgggctcgtccgagcccccgggctggtgcaagggcgtgggattcccggctccagctctgagggagggggcgaagggggcggggaggctgggtgggagtgatagggagggagggaccgaccgccatgagaaggaggggagcgcccagggtcaggcttggaaaacgtaatttaagc

SEQ ID NO: 34416 - DNA, 1237 bp, Homo sapiens; identical to SEQ ID NO: 22811
  chr16:77822069-77823306
  binary

SEQ ID NO: 34417 - DNA, 583 bp, Homo sapiens; identical to SEQ ID NO: 26452
  chr16:80574541-80575124
  hyper

SEQ ID NO: 34418 - DNA, 842 bp, Homo sapiens; identical to SEQ ID NO: 23504
  chr16:81563939-81564781
  hypo

SEQ ID NO: 34419 - DNA, 987 bp, Homo sapiens
  chr16:82660825-82661812
  hyper
cggggggtcggggcctccggtcgcggcggcgaagacagatcggggctcggtagggaggtcattccgagcccagagatcctaggcaccccccacacacaggctcccactctggcgtgcgtgtgtgtgtgtgtgtgtgtgtgtgtgtgtgtgtgtgtgtgtgtacgttcgttaacgggaggaggagagagctcccagtccttttttgctagcaggggcgacattctcgcccacatcaagtggggtaactttggttccctcctccggaggctcggtgcattggagaaagactcagttagaggcgactccaacgagccgcggttttccccagcccaacgcccagcggccgaagcgctgctcgggtccggattgcgggatgcggggctggagaggccgagcaggcaccaccgacttcccagggcgcccgggccccctggtacagcccggctgcccgctggaaggcgcctcggggcagcagagagcctcagcccggctgctgctgtcgctcaaaggcgccggcgccggccgcacccgcatcggggtccttttgctcccagaccccgggcccgaaagggccggagcgtgtcccccgccagggcgcaggccccagccccccgcacccctattgtccagccagctggagctccggccagatcccgggctgccgcctctgctgccttccctgagcgggagcggagcgcagagaaaagttcaagccttgcccacccgggctgcagctgcttgttaaccctcagagcgccacggcgcgagggaagggcacgccaaccaggagagggggcgagggagatgcggtccgcctgcagtcacctctgcacctcagagatttcgggaagtttgagtgcaggaaagcagcgctccgaggccaggcctggggtgctggccgctgcggggggcacgccctgcgctgctcaggggcctgtggtttcggagagcaccccgatccagtcccccatcgcctctctggcaggc

SEQ ID NO: 34420 - DNA, 144 bp, Homo sapiens
  chr16:85028179-85028323
  hypo
cgccttcctggttcaggtcctggtaagacctccacggagtgcaggatgctgctgtggctccatgcctgacctgggggtgcggatggcaggcacagctgtgtaaggagagcgcccacagacaccaaacactggccatggcaggac

SEQ ID NO: 34421 - DNA, 152 bp, Homo sapiens; identical to SEQ ID NO: 24025
  chr16:85033842-85033994
  hypo

SEQ ID NO: 34422 - DNA, 132 bp, Homo sapiens
  chr16:85464235-85464367
  hypo
cggggacgcctggtgccacccccagaggctctggcttgatagtccccaggtacgggctgggcacagggcggcggcagtctagggcattcgtctgaagggcaccgctggggaaatcctgacgtaggcacacac

SEQ ID NO: 34423 - DNA, 408 bp, Homo sapiens; identical to SEQ ID NO: 24028
  chr16:85679161-85679569
  hypo

SEQ ID NO: 34424 - DNA, 829 bp, Homo sapiens
  chr16:86599204-86600033
  hyper
cgtttgcaatcaaccgctcacccagtcttcccacggagcgcgctccctaactcaccctacccacccaacaaaacaaaaaaaaggctgaaatatagaaaagcaacttggaggctcccagggggacgttgccaggagcaggaggcagggacagcgccctagggtcggtgttagcggccggcgccggcctgggccacgggaaacgtccacgcttggtgcccgcggtgcgcggcgctcattgcgcgcgccttcgagccaagcccccgcggaaaacaggctcgggtttctcctcgcagggcccaggaactcggctctgcctggcccgggtgggtcgctgcattgtcccggtcttctgggagtgcggggtcagcttgttagagggaatttctacctgggaaaagggagacgagtttcgaagctgaagttggtaggctgcgagtgtccacgcgggagacgaaagggggaaatagcagagtcacttcacccttttccccaaaccccacaaaactgctcgcagcgacgcggatgatctaccgaattccccgcgaattcggaggattaagttgtcagtcagcacgttgctaccttcccctctatgcactccgctgcctggctcctcggcggggagcgagggaaactcagtttgtagggtttacctctaaaacctcgataggttatccttgacgaccccgagcctggaaactccctgttgatgattaattatttgattaaataagtataacatccaggagaggccctgccattccaatccagcgcgtttgctttgaatccattacacctgggcccccataattaggaaatctaattattc

SEQ ID NO: 34425 - DNA, 303 bp, Homo sapiens; identical to SEQ ID NO: 16513
  chr16:86665890-86666193
  hypo

SEQ ID NO: 34426 - DNA, 1491 bp, Homo sapiens
  chr16:87635912-87637403
  binary
cggggagcgcggggctgggggcgcggagggcggggcgcccggggtccccgcccgcgcgccgcgccctagcctgctgggccgcgcccctcttgggaccgccgcgctccgggggcgggggcgggggcgggggcggggggcggggggcggggggcgggcgggggcgcgcgggcgggcggggtgcgggcgcgcgccgcgcggcccgagcgcgcgagccgggcccggagcgcacgccgccgccgccaccgccgccgccgccgcccgagccgccgcattgctgctgctgctgccgccgccgccccgcgcccggcccgcggcccccaatatggtgcagccgccagcgccgccgcccgtgccgccgccgccgcccgcgggccccgccgccgccctcgggcgcccgcagcgcggcagccgcaggtggggggccgcggcccgggcctgagctgccccccgcccggcctcggcgcggcgccctccccgcggggctgccggcgaggggccctctcgccgctgaggtggagccgcgggccccgccgccgccgctcctgccccctccctccctcctcccctccccctcccctccggtcctgtctccagcgggagcgcgagacgctggtcaggctccgcggcgcagctcgaaaaggaataatcgcccccgattgactgaaattcctccggagccggcgccgcggccgcccgcgcccgagaccgcgctccggggccgcgtcctcctctcctccggaaaacgctcgcgacccagggccgccggcggccgcgactctgctgtgtcgatcgcctgagtccgttttcaccgtttgcgggatctggaaccgagttacatgcatgtccagtgggggcaggtttaattttgacgacggagggtcctactgtggaggctgggaggacggcaaggcgcacggccatggcgtctgcaccggccccaagggccaaggcgaatacaccggctcgtggagccacggcttcgaggtgctgggcgtctacacctggcccagcggcaacacgtaccagggcacctgggcgcagggcaagcgccacggcatcggcctggagagcaaggggaagtgggtgtacaagggcgagtggacgcacggattcaaggggcgctacggggtgcgggagtgcgcgggcaacggggccaaatacgaagggacctggagcaacgggctgcaggacggctacgggaccgagacctactcggacggaggtaggtgccgcgggccgggccgggccggggcgggagggacgtgcttccgatcgcgccccttctgtggatctctggggaagttgagctgcgtcctccggttgggccgtgggcaccaggggcctttcccgggcttccctggaagccacggcggctcctggctacaggttgccccgctgcctggtggggacagtgcccctgtgccagctgaagggtgttgggggctttccaggggcagagccaggcggggcccagcagagcctccgtgcgtc

SEQ ID NO: 34427 - DNA, 491 bp, Homo sapiens; identical to SEQ ID NO: 12372
  chr16:87902835-87903326
  binary

SEQ ID NO: 34428 - DNA, 126 bp, Homo sapiens; identical to SEQ ID NO: 16518
  chr16:87934247-87934373
  hypo

SEQ ID NO: 34429 - DNA, 136 bp, Homo sapiens; identical to SEQ ID NO: 16519
  chr16:88048979-88049115
  hypo

SEQ ID NO: 34430 - DNA, 369 bp, Homo sapiens; identical to SEQ ID NO: 29939
  chr16:88700843-88701212
  binary

SEQ ID NO: 34431 - DNA, 219 bp, Homo sapiens; identical to SEQ ID NO: 16520
  chr16:88892602-88892821
  hypo

SEQ ID NO: 34432 - DNA, 883 bp, Homo sapiens
  chr16:89006834-89007717
  binary
cggggcctgcccaacacagatggacgcttcccaaaggctgtgcgcgccatcgctgccacccggctgtgccgaggcccgcggccgtcaggaccccagggaccgcatgccaggcagggtccaggacccccagcgcggaccacctttagcctgcggggcagcgccggggacccgggcaggagggagaggagcaggagggagctctggacccccctccccagaccggccgccgccacctctgcctctcccagggccgccctcggcctccccactcccgggtctccgtcacgcgggccgcggggcctttgttaggaaaaccgggcggccccaggggagcccgcgagactcccagcgcccgggcgcgtcgttcccctcgaagtttcgccgcagcccccgcaggtcaggctctgctcacggggggctgcgctcagcccggatgggtgggcgctgggcgggttggctccaccctgccgtgggcaccaactttgaaaacggcccgtgcgctcggcgcggctgcggcgcagatccgggaacggcagccgcgggcggagtcggggtagagcggcggcggcgcgcggggcggacacggcacttacggtcggggggtccgggggatccggcgggcggcggacggcgcacactcgcgactcggtccgggagtcgctgctccttccagcttggtccccgcctccacgactcaggggcggctgcgcgctgtcttctggcgccgcaccgggctcaggcgcgcggcggggctggggcgcgcggggcggccgcctgggccatgccggggactcggctccggccaccccgcgcgggaacaaagcgcgcaccccgcccggggcggtctccggcctccgcggcccgcgccgggtccagccgccgc

SEQ ID NO: 34433 - DNA, 868 bp, Homo sapiens
  chr16:89007731-89008599
  binary
cgccgcgcgctcgcccgagagtctcacggggccccgcggcccccgccccgcgcgctccgcctccgcctcctgccccccgccgccgccgctgcgccacctgcctcccgcccggcgcccatggcgctcagctccgccccggggcgccggcctggagaggggctccccgccgccgagagccgcccccaacgcctccgccaccggggcggcgccctaagaactggccgtgggggccggggctgtgcggagcgccgggagcagggagaggggagaggggcgcggggagggggcgacgggcgcgccgcctcctgcggggggcggcgcggggaggcgcaggcgggggcgagcgaagaggttgaggggtgcgggcgccgtggagggggcgcggctctggggggcggcccccgcctgcgcccaccctctccccctccgcaggccgcgcacacccacctcgcagcagtcggcggccgcgggcctcgcagctttagaaccgcggcttctggcggccgcgcgggaggctgaacgggagttggggggtgtggggggggtggggaggtggggagttgggggggaggtcgctccttcggccgccgcccccgccccctgccccgcgctcgcccccagcgcggcgcctggcccggcccggggccacctccgtgcgtggccggcaggggtcgcgctccccccgctcagcctcccgggcgggtccgatgcgaagccctcgcttcccgcgggtcccggggccaggtcatttgcatacactttgcattcatttgcatatcgtgcgtttcatgtccacctgcagaaacgccccgagccgctgctctgccctctccgcactttctctgccggcaggccccctcccccgccc

SEQ ID NO: 34434 - DNA, 542 bp, Homo sapiens; identical to SEQ ID NO: 10347
  chr16:89169538-89170080
  hypo

SEQ ID NO: 34435 - DNA, 149 bp, Homo sapiens
  chr16:89558602-89558751
  hypo
cgggctccacccacaactagtcacgccattggatgaggggtgagcgcctgataaaaacagccggcgtatgcgctgatgtgcgttcacgaagaggtgatccaagtgtttccatatttgcctcactggacgaagtatttggtaaaattgac

SEQ ID NO: 34436 - DNA, 310 bp, Homo sapiens
  chr16:89713336-89713646
  hypo
cgcgggtggacatctttccacacctctgcatgcttgtctgccatccgagcctccccacaaggagccaggtgcctgcaggaggcccccgccgccctgcccaccctacctgtcagggtcctggcagggacccagcacagaggatgcttggtgacgtcagggagcaaccacaggtatgcagagacagcacgtcagcctgtgagccacccctcccgatgagctgcccacacacgctccttgtccccaggccacagccccaagggtaggggccacataccgatgtatggacgtccaggttctgcacctgctgctc

SEQ ID NO: 34437 - DNA, 1365 bp, Homo sapiens; identical to SEQ ID NO: 25209
  chr16:89899939-89901304
  hypo

SEQ ID NO: 34438 - DNA, 513 bp, Homo sapiens; identical to SEQ ID NO: 27699
  chr16:9005277-9005790
  hypo

SEQ ID NO: 34439 - DNA, 132 bp, Homo sapiens
  chr16:9062089-9062221
  hypo
cgtgagccaccacgcccagcccaaccttttctaattctggattcttatcagggaaatgggaaaacagtctacctgaaaccataaaatatcaaacgcttcaaaatccacaggttggccagtgcattcgctcac

SEQ ID NO: 34440 - DNA, 776 bp, Homo sapiens
  chr17:10101067-10101843
  binary
cgaccgtccacgggtcatcaggctctagactccggggtggagacgcggggctgcgggaccgagtcggtgccactttctcgcacccctgatcctccgtgcctcttcccaagaccgccagacccttcaccggcccctgccactgccgggaacgctcccgcctgctccttaactcacacaggcaacaagttctcgcttcctcagagcagccacggtgtgctccggaggcccggcgcaaggtggaagctccccgcgagtccgcgttgcccacgccccgaggggcgcccgctgccgtcgctgccccccaggagcgtggagctacaggtagcgccggcaagggctgccccccggggcgcccctccgaccgggacgctgcggcatccccggaacgggcaacaggtacgcgagcgcaccgaggaccgcagccccggctcctacagccccggccctcgccccttacctccagcaactgcacgtagctcgccgggaaccagccacggagcccgtcctccttctcgccttcccaccagccgccgtccgggacctgcagcagcgtgatcagctcgcccgcggcgaagcgcagcccctggccgtgccgctccccggagaaggggtacagggtccggcagcgagcgccggacatggccttggcgcccgggttcacagcgcagcctgcattcccgccgagccccacgggctgggcagcggctccgcggggtcccaggcgcccggcgctccgggctcccgcgctctgggcgcgcgccgtctctggggtgcgc

SEQ ID NO: 34441 - DNA, 791 bp, Homo sapiens
  chr17:10101860-10102651
  binary
cgggggacgcgcgctccgcgccgggaagcagagactcgttggcttcgcagagcgagcggcgacgcccccgggccgggcagctcgcggatcctagctctgggctggggggcggggctcagggggaggagacccaggcgccgcgggctccggagacaacttcccgggaacgcggaacgcgggctgccgccgcgagggctggccggggccggggccgggaccggggccggggccgccctggcgcgcggaaatgcgcagctcccccgggaggtgggacccggagcatcccccgcggcaggactccgcggcgggcggccgtggagaggagctggcggccgggtggccgggcgggggttagctcactggcgagggggcgggccggggcggggccagggcggccacgcccgcggagggctgcgcgctccctcgcagaggggcctgtcactggggagaggggctcccactcgcgcccccaccgccggggaccgcgggaatggaaacgcccctctgttctgtgcctgctttgtaggcctggcggcccgtggcgtgcgggcggcttcttcgaggtgtctgcgagggatcgtttgtggttgtcattgtagtggttgaacctggggttgaacttgtctcaccggaaactgaacaatgggtgaaagacaggtttgaagcctggcgcctgagcccagcagcctggtggcagcgtggcacgctggagggacggaatggagagaagacggggtcggagttgatagaattggaaacagtcgatggggataaatggaggaaaggcgaac

SEQ ID NO: 34442 - DNA, 209 bp, Homo sapiens; identical to SEQ ID NO: 6999
  chr17:16923475-16923684
  hypo

SEQ ID NO: 34443 - DNA, 437 bp, Homo sapiens; identical to SEQ ID NO: 24052
  chr17:25620264-25620701
  hypo

SEQ ID NO: 34444 - DNA, 248 bp, Homo sapiens; identical to SEQ ID NO: 24054
  chr17:25931573-25931821
  hypo

SEQ ID NO: 34445 - DNA, 632 bp, Homo sapiens; identical to SEQ ID NO: 27704
  chr17:28088027-28088659
  hyper

SEQ ID NO: 34446 - DNA, 1615 bp, Homo sapiens; identical to SEQ ID NO: 27707
  chr17:33700165-33701780
  hyper

SEQ ID NO: 34447 - DNA, 531 bp, Homo sapiens; identical to SEQ ID NO: 25224
  chr17:35078547-35079078
  hyper

SEQ ID NO: 34448 - DNA, 1468 bp, Homo sapiens
  chr17:35293885-35295353
  hyper
cggtgctgcccgccgtccgcgccgcgcggggccgcgggtgccgccgccactgatcctctaaacgcggtctccccgcactctcccgggccgggggatgcagaatggtttacagagggaccgcgaggcgctgattggtcgcaggccgcagtgacgtcggcgggcgctgcattaaggcgagggggcttccagagctcagccaacagccaggagcagtgaccaagccgccggagctggggagagacgcaccggggcggcgactgggccaggagaccagggactgagggacgcgcccggggagggccagcaacaagccgcggcccgggcgcgacagcggcggtccgcgccgagccgttccagccgccggcctactgtagccgctgcgccaggacatttttttttaaagctctccaagctgcccccctcctccccgactcctcccgctgcaaaagaaaaacaaaaaaaaaaaaggaaggaggctagaaaggaaacccagatttgccaccacaacgaaaaaaagaaggggaaaaggaaaaggagagaaagtcgagcgactgtggggttagacggaggcagacagagcgtgggccgagcgatgcggggctgtgcgcccaggcggccgcgagttgtgactggagccacgatgcacggccaggcgcggtgagaagccagcccgtagtgcctcccgaaggagcccgggcgcagggagggtcgccctgaggacacggaggccgccaggcaggccaagggccgaggtgactgggctggggcggtagggaaggagcgagtgcgcctggctgcctccgcacggagttgtccctctctgttttcgattgacacaaacacttctccaaaagcggggaaacctaagcaacaacagcaatcaacaccaagatcttcctcctaccctcccctctttcccttctcccgcggtcggccctcgccccctcccccaggcccagcgcgggcgctcggcgcgtccagacccgcggcgcgatgccggcagtttaggatccaaagcttctctgctccttttgttctttccttcccttttttaaaaaaagaggggggaaatcccagtggtgggcagcctggcacgcacacagtcgccctcataccccgacaaaagcagatgcactttgacttctgacagctctacctcaagccccggagaactcagcggcgctttcctcgcaacccgagctcggcgagtcgtcgtcttcttcttctccgtttttatttatttatttccgttcccgccgccgttctcgctgaccttcactcctccgcgggctctgagcagaagggtcgcattctctcccgcctgagacttcttttcctcgccccgggagctcaggcggcgccgctccagcccggggccccgggactccccggctgcacacttcactgagacgcccccccaggccccgatcagcctcgtttcctccaccctactttgatttcctggtgc

SEQ ID NO: 34449 - DNA, 990 bp, Homo sapiens
  chr17:37381126-37382116
  binary
cggggaatgcaggactgcggaggggcagggagagacgccctgagacgcggagataaacacccggagacgccgggagagacggggagagacgcacacagagacaccaagacacagacacgcaggttgtagagacaaattcagagacacgagcgaggatagaggcgcggactgagcccgggactgggacccggcggccgctggagggtgcgcctcgcacgcacagccgggcgcgtaccccgcccgcaccgctccacgcgcgccctccggcctcgctgcgcccatctctccaacgaagaccagtggccgcctccccagaaggtcgcgatggcgcgcgcgggcgtgcggtgccggtgtgatcgggggctccttgtggcccctcgtcgccaacccactcctacccccgggagcggcgcggagcctcagtggtcacgcgggcctcgcgaccgcgaccctaggacgcccgggcccacaggaggaccccgccgggaagagggcgcccgggcccggggcgcggacaggccttgcgccccccaagttaccttggtttcctggagggcggagacggtccctggggggctgtgggtggccgcgtcatccggttcgttctccttctcgctcatctcggtcatggttcggggagaggggaggagagggtgccgagatccgacggcaggcccaccgcgggcaggctgcgggtggcgggcgtctccgggactctgaagccgttctccagaggctgcccccagttagcccccggcacggcagcccccaacccgcgggagcgggcagagaaagttgccggggtggcgggcgaggggaggccaccacgctgagccgcaggagcgggacgaccccgggcgcgaggaccgagggtctgcagaggatgctgctcgcagcgcggggaggagggaagtggggccgcggggatgagccgagggagggagccaaggagctgtccgtgtccagccggctccgccgtccgctgcgccc

SEQ ID NO: 34450 - DNA, 215 bp, Homo sapiens; identical to SEQ ID NO: 24064
  chr17:39682514-39682729
  hypo

SEQ ID NO: 34451 - DNA, 42 bp, Homo sapiens
  chr17:40427473-40427515
  binary
cgcctcttgctccgtgtgagttctttcctctttgttcacccc

SEQ ID NO: 34452 - DNA, 1337 bp, Homo sapiens
  chr17:42906461-42907798
  binary
cgatttcacatcgtcttgatgctaacaaaattaagcatgagcataatgaaatcggtatcactgccagttctcaatgaacaaaaagaaaaccaaattcgcccatttcgcaaaggaaaagtactcccaatcagacaatcgcaaaaaaaagaacaaaatctaaaccatacattcacgtacatcttttcaactcagagctccaaacgcagccgccaaccacacaactgcccacaatcacagcggtagcgcctactcttaattttgaagctagagacttaaggaaacacacacacacacaaaacagttctcaagtttgacaaagtgggggaaaagtcattttaagtaaagacaacgagttaatcaggaggcgatgagcccagtccttccgccccgctttcccgcttccagccctcgaacgaaccctcctctaacccccgggaggcaggagttccagcggggagatgcgggaagcctcagacgagcccgcacgccgccggagacgcagggatcgaggtcggggagacaaagagcagcccgcgaagagcccgggcggcgaggggcggcccggctccgccctgcgcccctaaccgcccgggtagttgtcggcaccgccggggcgccgccgagtgcgcgccgcttctgtccgggctccccgaccgtcgcccgacacctccgcggcccaggacacccccgagccgtttccctcccgatttgggagccgcgcgcctggggacaaagagggagggtgcgccggggacagtggcaggacgcgggccggcgacgcccctccggactcggcgggaacccctcggcggcgcccccctccttctcccgctctggccgcgctcctccccggacctccggaggttctcctcggcccctccccgggctccccaagagttctcccgcctccccctgggaccccgcccctggcccgcttctcctcagccggccctgcggccgcccctcacccggcggcgggttcccccggagccgcctcctccgccgggcctcggcccgtcccgccggtcgcggcctcatgtgccccgcgtcgccatcgccttcaccctcgcctctcctccacctcctccgccgctgccgccttcgcctcagtctccagccgaggcagaagccgctcccgccgctgccgccgccgccgccgcctcccgctcccgccgccgcgacccgcgggaaggcgcctgcgcactgcgcgctgcggtgggggcgggggcgtcccgccgcggcccgggagcggggggcgcgcggcacgtggcgctcgagtgggaggggggcgccccagaacgcgcgggaagcgacgcgagcgccaactttccgcggtc

SEQ ID NO: 34453 - DNA, 522 bp, Homo sapiens; identical to SEQ ID NO: 27715
  chr17:43047449-43047971
  hyper

SEQ ID NO: 34454 - DNA, 1077 bp, Homo sapiens; identical to SEQ ID NO: 26484
  chr17:45810409-45811486
  binary

SEQ ID NO: 34455 - DNA, 990 bp, Homo sapiens
  chr17:46620728-46621718
  hyper
cgcttaaggcccccggcaccacctccggcgggtgacagcaggcttcccacgccgcccgcgaggcggaggggccgcccgggctggccgcgggttcctcggcagggtcgcagatgtcctccagggctcccgggcaggcaggctccccatccggcggctctcggtgctgcgtctgccgcttgtgcttcatgcgccggttctgaaaccagactttgacctgcctttcggtgaggtccagcaaggccgcgatctcgacgcggcgtggccggcacaggtacttattaaagtggaattccttctccagttccagcagctgcgtgttggtgtaagccgtgcgcagcctgcgcgccccgccgccaccagcctccggcagtcccaggccatctgcagggaaaacaggctcggcgtcatagcgggccgtgtactcagcccaacctcagttcggactaccccatcctccaaaaccagtatcacctctccccttcctcgccaccccacccccgcccccaccccaaagccgctcgctttactgcttttgggttttcttctctccctctctagtctacagccccggcccgggtcagggcaaagcattcagagccgcccacgggccacgcagggggcggagagcggctcccttcggcgccggaacctcagatccccctcccaagccctcccagtggacccctcaattcggaactttccaactcaaccggagcgagggtcagaaagattgttcttcacccctcttcctccctagctctgaattcttcctcttctcctagagttggggcagaaaggaccgaatcttttctgcttctagggtctatcccagcaacaacatactcattcccctacacagatacgggtgaaaacctcaatcaaatcattttcttctagcagaaaaaaaggcgtttccccaaccagcttccaaaatcagccatagggagagaaagagagagagagacagaaaaaaaaaaagacgctgttagc

SEQ ID NO: 34456 - DNA, 1577 bp, Homo sapiens; identical to SEQ ID NO: 28697
  chr17:46654966-46656543
  hyper

SEQ ID NO: 34457 - DNA, 802 bp, Homo sapiens; identical to SEQ ID NO: 25245
  chr17:46659093-46659895
  binary

SEQ ID NO: 34458 - DNA, 1600 bp, Homo sapiens; identical to SEQ ID NO: 28699
  chr17:46687527-46689127
  binary

SEQ ID NO: 34459 - DNA, 1053 bp, Homo sapiens; identical to SEQ ID NO: 28700
  chr17:46690001-46691054
  binary

SEQ ID NO: 34460 - DNA, 1374 bp, Homo sapiens; identical to SEQ ID NO: 28701
  chr17:46691218-46692592
  binary

SEQ ID NO: 34461 - DNA, 555 bp, Homo sapiens; identical to SEQ ID NO: 24068
  chr17:46710955-46711510
  hyper

SEQ ID NO: 34462 - DNA, 1190 bp, Homo sapiens; identical to SEQ ID NO: 24069
  chr17:46795376-46796566
  hyper

SEQ ID NO: 34463 - DNA, 1278 bp, Homo sapiens
  chr17:47072691-47073969
  binary
cgacaaacacgtggctgggtagaacaaaacgctcattggggagggtgggctctaaggtggtggaggatatagagaaaccgagttggaagccctcccccgcccctaagtcccagccccatttcttttcagcgcgccgggaaaacggggagggggacaaaggtgctgcgtgctgtctttcaactcccgactttttgaatggcatacaatcgtccggccgcagagcggtgagccaaagtcggagtcagctcagactctgcaaacgaaaaataataacaataaaaaaaattcaaggcattcatatcggtgtagtcaacacgtgttgcggagtcggcccgggccgcaggcgactgagacaatggggtcggggactggggaaggggagtgacccccttcctcacctgccctcccagcacgcgtgcccccgctagaattatcctccctcccacagagtccggagtaacaccccagttttcgccctgttcaaggggattccagaatttctgggggtcgacccctcctttttccccgttccctgggcgagggggttccagggtctccgggccgcgctctcggccacccctggcgccatcccagcctccgccgctagaaactcgttggcctcgctcgccgctccgccgtggagccggggcttgcccgtggaccgcgcgtcccgctctccgccgcgtatccgggactccgaaacgcgcggcgagcagccccctcccccaccgcccagacggggtgcgaccgcccacgtgtcgccccttgcccagtcgggtccttccctcgggctccgggagccggaggatccggaatgagttggtcaaagccgagggaagggacccaggcggatccgcttccccctccccaggaacggcgggaggaggaggggagtggccgccgccccctcccctaagctcccgcccctcgcttccccgtgcgcggagcggaaattaccccctccccccgcgggtctgacctggggacgtgggcggggcttcccgcttagccccccgccctccgtccctctcccgccttcccgccaggatcggaatcctgcaccccaaacaaagttccgagacccgaacctagggcctagagagctgccagcagtgtcccgggtggtgcaggctctggaaactccacctgtctgtccccgactctgggagggaaaaggggaccattcaaatctccacccggtcactccctccctaagacctcccccttcagttcgctccggttagccctagctatcactcctcttccttgtctcccacc

SEQ ID NO: 34464 - DNA, 973 bp, Homo sapiens
  chr17:47073993-47074966
  binary
cggccagttccgcgtgttcccctcaggaccccgaaacgttatcatttaacagccggaccccgggtgcgaaccaccctttctcccgtggggatctcaaaacattatttcctgcggcttcctcgttctccactgggataccccgttcccagctttccagtcccgcgctcgcagggtcccccggtcctgcatccccggaggcgggggagtttcgtggggctggcgtggggaaggcggagaccccccccatttaaacatctagggaaaaggttcctttctttttaaatcaccagctcgtgcgaccctctcctgaagaccccagagtcttcggcttctctttgtctgtctcggccgtcccccgcctgtcagtcgctagcagttaaccggggaggggtgagcaaccccgccccccaaaacgaatgaaaaataaccgtacattttaccctttaagacatgtgagatctgggctggaccatcctcccccagtttgggctggggtagggggatgggtgggggcggggcgcttccctaggggccaggttcttgcaaagggggaaggggcctgtagagcttcagggacgctgccgcaccgccccagtttaccccgggggtgagttgagttccccaccctcaggcgggagattatcgggtttggccggagggccgaggggccctgtggcgtcgggggtctttccctgcagggtgggtgggggctgtcaccacgtggcttctcctttttttttttttttttttttccgctccattttttttcaagtcgattttatttagaggcggcgccagggcggccgcggagaaacgtgacacaccagccctctcggaggggtttcggaccgaagggaagaagctgcgccgtgtcgtccgtctccctgcgcgccgcgggcacttctcctgggctctccccgaactctcccgcgacctctgcgcgccctcaggccgccttccccgccctgggctc

SEQ ID NO: 34465 - DNA, 967 bp, Homo sapiens; identical to SEQ ID NO: 26489
  chr17:47572986-47573953
  binary

SEQ ID NO: 34466 - DNA, 197 bp, Homo sapiens; identical to SEQ ID NO: 16545
  chr17:48776811-48777008
  hypo

SEQ ID NO: 34467 - DNA, 104 bp, Homo sapiens; identical to SEQ ID NO: 24074
  chr17:49229457-49229561
  hypo

SEQ ID NO: 34468 - DNA, 465 bp, Homo sapiens; identical to SEQ ID NO: 26496
  chr17:56326822-56327287
  binary

SEQ ID NO: 34469 - DNA, 1406 bp, Homo sapiens; identical to SEQ ID NO: 26498
  chr17:56832961-56834367
  binary

SEQ ID NO: 34470 - DNA, 144 bp, Homo sapiens; identical to SEQ ID NO: 24075
  chr17:57297033-57297177
  hypo

SEQ ID NO: 34471 - DNA, 910 bp, Homo sapiens; identical to SEQ ID NO: 25260
  chr17:59531682-59532592
  hyper

SEQ ID NO: 34472 - DNA, 738 bp, Homo sapiens; identical to SEQ ID NO: 24077
  chr17:61777761-61778499
  binary

SEQ ID NO: 34473 - DNA, 243 bp, Homo sapiens; identical to SEQ ID NO: 16551
  chr17:62783342-62783585
  hypo

SEQ ID NO: 34474 - DNA, 999 bp, Homo sapiens; identical to SEQ ID NO: 23108
  chr17:70215682-70216681
  hyper

SEQ ID NO: 34475 - DNA, 335 bp, Homo sapiens; identical to SEQ ID NO: 16552
  chr17:70713689-70714024
  hypo

SEQ ID NO: 34476 - DNA, 93 bp, Homo sapiens; identical to SEQ ID NO: 16553
  chr17:7188345-7188438
  hypo

SEQ ID NO: 34477 - DNA, 968 bp, Homo sapiens; identical to SEQ ID NO: 24081
  chr17:73584153-73585121
  binary

SEQ ID NO: 34478 - DNA, 561 bp, Homo sapiens; identical to SEQ ID NO: 31383
  chr17:73585938-73586499
  binary

SEQ ID NO: 34479 - DNA, 365 bp, Homo sapiens; identical to SEQ ID NO: 27735
  chr17:73607997-73608362
  hypo

SEQ ID NO: 34480 - DNA, 800 bp, Homo sapiens
  chr17:73613151-73613951
  hypo
cgtatccccccagatgctgtcccccagcccaggaaagggccccccgccagctgtggctcctcgacccaaggccccgctacagcttgggccctctagctccatcaaggaaaagcaggggccccttctggacctgtttggccagaagctgcctattgcccacacacccccacctccaccagcgccaccactgcctctgcccgaggacccagggaccctttcagcagagcgtcgttgtaaggaaccacatttctcctgcgccgtgggcttcactggggcagaggcagggttcgcacagactctcggtgcccagggctgaaggcatttctgcgtggctgaggccagctgttcgggcttctggactttggagccatacgtagctggggagtcccagcttccgcgttcccacccagggcagggcctgggcatctttggggctgtcatcgagaggctgtcacacacagggtgttgtccctgacacatacccgacagctctgtgaggaagttagtggccctggctgacatggtcatagaagacccacgagcctcacggacgccagggaaagtttagggcccaaaatggaggcaggagatggtgccatggaaggagtaaggcagctggaggttgggagagccgggcccttggaaggctcgtggggatgaaggtcttccctcccgtgcccccatcactctggctctgcagcccctcactgaggctcctcaccccctcctctctgccaggcttgacacagcccgtggaggaccagggggtctccacccagctactcgcgccctctggcagc

SEQ ID NO: 34481 - DNA, 383 bp, Homo sapiens; identical to SEQ ID NO: 24083
  chr17:73635994-73636377
  hypo

SEQ ID NO: 34482 - DNA, 104 bp, Homo sapiens; identical to SEQ ID NO: 16559
  chr17:74072105-74072209
  binary

SEQ ID NO: 34483 - DNA, 150 bp, Homo sapiens; identical to SEQ ID NO: 16560
  chr17:74391567-74391717
  hypo

SEQ ID NO: 34484 - DNA, 346 bp, Homo sapiens; identical to SEQ ID NO: 16561
  chr17:74392164-74392510
  hypo

SEQ ID NO: 34485 - DNA, 241 bp, Homo sapiens; identical to SEQ ID NO: 31389
  chr17:7466720-7466961
  hypo

SEQ ID NO: 34486 - DNA, 687 bp, Homo sapiens; identical to SEQ ID NO: 27740
  chr17:76991011-76991698
  hypo

SEQ ID NO: 34487 - DNA, 1170 bp, Homo sapiens
  chr17:76992727-76993897
  hypo
cgtggtcttgagaacctttgaaggtgtaaaaagggcgtgttcccagaggctccgagagcagcagcggatacagccgaaaacatcttggagagattccccacgtctcccacaggcctctagcgataagctcttcctcctagaaactgctcagtgtgaagtgacagtaggctatgctcctggctaagggtaagggggccgcaggtcagagcaagagggagacgtgctccctcaccacatccctggcttctaggtgtgtgaattctttaccatgtgcctgtgtttgccagccaggccctgagctcccactccccacccacacctccataaaacctcagggtccagttacctttctccacggtgccgtcgccgtcggacagaatcacccagggcacggctttgctgccttcgatctggtagacgacccccgtccggtcatccacggagtagagtttcccattgaaaacaatcaggtcggatagctccatgcctctccccttctccgccaggtgggactccaggaccccatggtctttgtcccattccacggccaccttgtccccactgtctgacagggtcaggtagccctttttcaggtaactgaaccaggtgttttcctcttgggcccttgactctgtgtccaggtctgcgataactgcgattcgataccgaatcccagccggtgtcctttgtgggggagacagggggtaggtgtcattgtaccagttggcgggcgcctggccgagcctccagttgtgtgcattgtgggtggggggcctgccgggggccgggcggtgggagcagagcagccagaggatggcagcacccacaaagaacgtcaggatcaccttccagcgggggcggaagcgggggtccgcggccttggtcatggacgccagcacaggaaggccccccacactgatccggagggagtgcatagactcattccattccgggtgctcagacagctgcacgggcatcagcgtgacagacaggcgggacctgcacagccagggagggaggagaggagtcagcgcctccgcaagcccagtcacatcttagttccggaagctgcaggcgctggaggctgacttttccagaagaaacagtatttcactactctgtggccattcttactcccttggcttaatgaattcccgactctagattccc

SEQ ID NO: 34488 - DNA, 261 bp, Homo sapiens; identical to SEQ ID NO: 16565
  chr17:76998502-76998763
  hypo

SEQ ID NO: 34489 - DNA, 811 bp, Homo sapiens
  chr17:77918873-77919684
  hypo
cgcgcaggtacagctgggggtgaggccgtcacgcgttagttagctccggtcccatgcggcctgctgcccaggaagcccactcccactggggcccttccctgggccaccccagcctggaaaagcacacccaggggcctctacctgctgcatgtgcctgcccccccaacgctccattccgccgctggaatcggctcacacctgcctctgccagttcctcccagatctgactgttccggaggctgtggtgtggtccagggtgaggcagagtgttgtgcccgggcgtggcaggacgctggcagccgctccatggccaggaaggctccccaccctcagtgcacacttgggggctgtttcccacgtccactcctcctggtgaggtgagtggatcatccagggagcccccccacccctcttcggctacgctcacccagatctatcatcttccagagctgttttagggcaggaaggggacgtatctgagccccaggatgctcgattcctgccattaaggtcatctcccaatgatgtgggacaagatcggggctatttctggcagcactcgggcccaggccgctgacttcatcaatgccgctggaaaatcaatctccagcattcagtgagtcacccagccatgcgctgccatgagccgtcagaggcgaatggcgttggacactgtaactgcctccccaagcaatgtggacacccgacgtcacacacacccgttgatgcagagtgagcaggcttggctgggttcagccccccggcccaggtggagttagatcacagctggggggatcctggggcagagctc

SEQ ID NO: 34490 - DNA, 452 bp, Homo sapiens
  chr17:77923970-77924422
  hypo
cggtatccccccaaaccctcgagggaggtgttgtgttttgtttttttttttcaacgcagcagctttgattgctttatcggtgtgttcacagagagcctcacacaagaaaacggggccctcacgaggaggtggcccgtgggtgcgggcgggcggccaggccccggccctccttccctctcgctcgttcccggttcccggccggctctccgcggggccagctgggcggacccggacctcaccttccgcagcttgtactcctcctccacctggcccagctcattcaggtggttgagccaggcggagacgccgagcctcttgtacatgctctcctcggggtgcgtctcggaggacggcagcttggggcggcggatggagaactgcatgcatgtcttatcgggggcgacctgctggacgggaggaaaactgggcaaaggtcaggatctcagccgcgc

SEQ ID NO: 34491 - DNA, 140 bp, Homo sapiens; identical to SEQ ID NO: 16569
  chr17:77976585-77976725
  hypo

SEQ ID NO: 34492 - DNA, 582 bp, Homo sapiens
  chr17:78041114-78041696
  hypo
cggcccgcagtcactagaaccccctcccaagacaagcaaaggcacctggttttctgggatcccctgcctaacttgtgtgcaattgcaagaaagcatatgcgttcacccggagtcttccttccctctcttgctccgtgggagcacaccacactcactgttctgcacctctttgctttttccatttaacagcgtgtccctagagcgcttcccaagtcaaaatataaacaccgctcgttcccgcctttctaccacatggcattccgctgggatacttctacggggaagcttcctgcccggggcatcgagggcgttcgcgtccgtctgttatggcggtgctgctgtagataaccggatccgcgaatgctaacgctcaccaggatgctatatagccttttttatattgcctatcaagcccggaatgtctgggtctagcgggtattgctaagtaggattgtgacagtcacgcccccggcagcggtgtttcaaagtcccctgacagctcagcatgttgtcacacttcaggactgtgccaatccgattgatgaagaaaatagataatcttgttttataaaacgtgcatgc

SEQ ID NO: 34493 - DNA, 183 bp, Homo sapiens; identical to SEQ ID NO: 25277
  chr17:78143796-78143979
  hypo

SEQ ID NO: 34494 - DNA, 317 bp, Homo sapiens; identical to SEQ ID NO: 33535
  chr17:78599441-78599758
  hypo

SEQ ID NO: 34495 - DNA, 472 bp, Homo sapiens; identical to SEQ ID NO: 16573
  chr17:79046033-79046505
  hypo

SEQ ID NO: 34496 - DNA, 196 bp, Homo sapiens; identical to SEQ ID NO: 11268
  chr17:79060680-79060876
  hypo

SEQ ID NO: 34497 - DNA, 757 bp, Homo sapiens
  chr17:79166330-79167087
  hypo
cgggtcagtgcagagctgctctcctccagctgctgcctcagctcttccagctccgcccgctgcctgcggccagggaggagtcagcaggtgaggggtcatcgagtaaggagtcagggatgggagaggtcagcgggtgagggggcgggggggaggggtcagccagcgaggggtccctgggagagggcgtggtgcccccgggcggcacctggctgcctgctggcccagccgctccctctcctcagccacctcactgtacagccgctgccgttgctgctgcagcgcccactgctcctgctccaggtgctgctggaacctgcgggacggtcaggactggctctcgggggccgggacgggcggtcccaggacccacccaccgcaggggcacgggccgaccacaggcctgactcacagctggagagcagccctccggggccctgcccctccccctcggcagtcaaggcccctcaaagccaccgcccgggggcaggcaaggccacgaggaacttgcccatcagccaagcgcagcaattccctgagctccaggccctcgtggcactttgggaagtggctgtggagccgcgtccaggcccccttttccctcagcccgtgtgccggcctcaccctgttcagcattgccccacgggcatggagggcgggaggcaggtgcctcgtggggccttatccacctcccctgcctccggcctgagggtgccaggtgcctggctccgtgacctgagcaagctcgcgccagggcctc

SEQ ID NO: 34498 - DNA, 441 bp, Homo sapiens
  chr17:79870417-79870858
  hypo
cgacttccgactgtggctgccttcttcaccagcacgcaggggagtcgccagtgagaaaatgggatcctgccacctgccaaaaagggaaagcggcatcaggcgggcctgggagcctctcgcagtcacacctgccccagctcgggaaagctgtctgcggtccctgccttcccatccccttccctcccgtgtcaactgcggcggggctctggttggcggcagcttcattgttaccaagctgcagaacggatgtgggagaggtcacctcttaggtggtgactcaaaggtcggcacccacactagctcggtctcctcaaaactccgtgtccttgtccaccactgagcggcgtgcacacacagggtggggcagcagtggccccagggctgcctccgtctccagggatgagtcactagcaactctgggccccaccttccacttgtacc

SEQ ID NO: 34499 - DNA, 210 bp, Homo sapiens; identical to SEQ ID NO: 28734
  chr17:80333059-80333269
  hyper

SEQ ID NO: 34500 - DNA, 748 bp, Homo sapiens; identical to SEQ ID NO: 24105
  chr17:80832134-80832882
  hypo

SEQ ID NO: 34501 - DNA, 99 bp, Homo sapiens; identical to SEQ ID NO: 16579
  chr17:80867234-80867333
  hypo

SEQ ID NO: 34502 - DNA, 308 bp, Homo sapiens; identical to SEQ ID NO: 16580
  chr17:80879354-80879662
  hypo

SEQ ID NO: 34503 - DNA, 410 bp, Homo sapiens; identical to SEQ ID NO: 29995
  chr17:81050575-81050985
  hypo

SEQ ID NO: 34504 - DNA, 870 bp, Homo sapiens; identical to SEQ ID NO: 22816
  chr17:8868587-8869457
  binary

SEQ ID NO: 34505 - DNA, 1421 bp, Homo sapiens
  chr18:22928980-22930401
  binary
cgagtgaacaaaactgccaatcgtgcaaactttaataaacttttttttttttgaaaagaaaaatccctcccaaattccttcacggggtttcagaagcttcttggagccctttccaccggacaggcactaaccgctatcctacttcaactcggaaagttcttctttccaagtgactaggaagaggtttgtcctggtacttcgctcagcgttactttcaagaaagccggggtctcgggcaagtctcgccggcgcgagcctggtccaccgttaccctgacacccgcgcacgcccgtggcgtttcttttttcactgtcgacacttggatctttcaggccctgggtctaggtttcccccagaaaaatgaggggcccatgtgacggaaaccaccagacacactgtgtggagacacatgccaatgattcacctcgttcccgaactaaaacttctgcgctttaggaaaaaagcaagcgttccaatctgcgaggccctcccccaccccgtcccttcccaggagaagaaagaaagggctttgtgtgtgcggtgagggctccgttcatcgagttcaaaaatgcacagcggccgggggccgggaggcgtggggcgccgggccctgcccaccccttttccccgggccggcggcgagtcgggaagctggtgcgggaaccggggccacggggcgccgcggcccggcagccaggaggaagaggatgctgcgccgccggggaccagagggcggggccgggccgcgcggacctcggcgggacccagcgggcccgggcgggcgcaccagccgccctttgtcctccgcctccgggtcgcgggggccgcggccgcctccagcgctggccccctggccctcgccccggttccccgtcctgcccgcgcgcccctcctccggccctcgcgctccgccgcccgccctccccgctctccgcctcggagcgccggacctcgcggctcccctcggccgcccgcccccgatttcctcggaaggaggctcgcgaaggtggaggaggcggccgaggaggaggaggaggccgccacgtgactctcctcgccacattccaacacagccatcagatcgataacttcagggacccccgcccccgccgcagccagctagtgcgcccccaaaatcccgcacgcacgccccgcaacttccctctccaacagggacgacggagagctggaccccaccgcgaaacgcaaaggactccaggggcggcggggagaagtaggggcgaggggcggtcaacttctgggaatggccaagaggggtgctctgaggcccgagccggggtccggtgcccgcggccggcggccggggtctgtttactccggcgacgtgcggagaggacccaagcaggacgcgggcgggcgggaggcggcggccgggaccccgggccacgtttgtcacgagc

SEQ ID NO: 34506 - DNA, 920 bp, Homo sapiens; identical to SEQ ID NO: 24109
  chr18:22930420-22931340
  binary

SEQ ID NO: 34507 - DNA, 907 bp, Homo sapiens; identical to SEQ ID NO: 30003
  chr18:24130266-24131173
  hyper

SEQ ID NO: 34508 - DNA, 944 bp, Homo sapiens
  chr18:25755624-25756568
  hyper
cgtgaagaccacggagcggggtaatccacaccacctgtctccacccccggagcaggcacttccgagctgcgtccgcacttttcggggctgccagctggcagtagagcacctctccccttgccccgagggcgacaggcagggggaccctccgtggattttcctgccccgcggcgagggtgggcacgcccctttcccgcaaccttcgagggaccccacggcaggcggagaccgacttgggaccagggcactgcacccgcccagctagagggtcccggccgaggctgtgtgaagtggcctccaggcctgggctggctggtcgggaggagcctgggggcatcctcgggttggaggcggcggaaagttgggctgcccccgggctgggaacccgcagcgtgcagtggcgagggaacctgcgcccggactggagcaggtgcttcctgccgcggaggagcctcttagtagagattaaatgaaaaggctcgctggctctctcccgagggtatgaaaagtacggaaggctccaggcaaaggcgcccccggggcgcatatagggcacaggcagccggacagagaaaggagcagccgcgtaacggaacttctcgcccgggggagatactaggcgtgagaggccagactcgttctacaggcaggcgctgaccggcagagactcctccgggcaagagggccagattttctttccaggtgggacgaacacagaatattgtgagggcaagagaagaagaaaaggaggcaactccagactgggataaagacaataggacagtagagcccttgagcaccgggaggcgcacgggtgcagggtggggtaaggtggaggcaagtcccgtaactaagacaccagagtgagaattcctactgtaaactcgcgacccatccctgcagaaataaacaaaaaaattggagcaaagtactatgcgaggggc

SEQ ID NO: 34509 - DNA, 1466 bp, Homo sapiens; identical to SEQ ID NO: 25295
  chr18:2846938-2848404
  binary

SEQ ID NO: 34510 - DNA, 338 bp, Homo sapiens; identical to SEQ ID NO: 31411
  chr18:28620846-28621184
  hyper

SEQ ID NO: 34511 - DNA, 556 bp, Homo sapiens
  chr18:3214837-3215393
  hypo
cgaaccgaaacaaagcgagaagtaactgggagggttactcagagcacacgcctcttcctgaggttggaaggttggaggagggcgtccgacatacccatgggaggagccataatcgtaggctgaggctgccttccgactgacttcagagctcagggcgtgctgcgaggcctgctgctgggaggaggaggcggacgcccgacggaaggcctcggactcccggcggtgcgcggcggaggagcggctgctgtaggccgtggagccctgggtgtagacggcggagcgtttcttctcccgctggtagtgactcacggtgctgcgcacgtccttgttgcggtagctgagatcatagtgctggtggcacctctgataaaaaggcaaagacatcctgtgccccttgaaggaaccgggccacctgaaggaaaacaacactttttgagtgacttattaaggaacaaattccatagaccaagtcatctaaatcaatgtgtaaaaatcaatactcttggctgggtgcggtggttcatgcttgaaatcccaacgaggatctctcgaggcc

SEQ ID NO: 34512 - DNA, 1197 bp, Homo sapiens; identical to SEQ ID NO: 22822
  chr18:44335955-44337152
  binary

SEQ ID NO: 34513 - DNA, 975 bp, Homo sapiens
  chr18:4454471-4455446
  binary
cgcacgggggagttggtccttttccacaatgccaaaatgtcacccaaaaagctagtgcaacaacttgctttgcaaacgacccaggagcctgccgagaaagccctgcggggagcagccccctcctcccctgcaaggtgcatcgggggtggggtgggggtgcgaatttgaccggtggacatgaccgggacaggggaccggtgttctcctcccctcccccttccgggaccctgtcgcaattagaaatccttcccctgcctgggtccccgtggggagccgcgaggaccgcatggccggagaggacgcgctcgcccccgagatcccaggttacccggagggcccgggagtgcaccccgggcggctgaaagggtaaggagcgcggactctcgagccagcggccgggggagcccagcccgcagcccctccgcgggcgagggaagcggcgaccgcgcggcaggcagcagccaggagccacccagcgcgccgcgaccgccgccgccgcgcacgccccagccccgcggcgcagcccggcgttacctggccgcgtcccgcagtccggccctcgctggctgcgtccgtccgttggtcccacgagcctcggaggaaggagagagatgtccccgcgaccaggaccggctctcagcgaggtgacgggaaggactcgagagaggagccgaggcggcggcggccgttcgcgccgcctatgctgccgattccccgaggcggaaggtgtccgcgaggccgtgtcctggagattgcggcgcccgaagcgcagcgctcgcctctggagcggaggctgagcgccgggacgcggcgggctggggctgcaaggctgggctggtgacccgcccctgggtgcatgttaatacggtggggaggaggagtcccgcgcttcctccgcccaaccaccggagccggcgggcgggcggcggccgcggcccggagccagccgctcccacccgccccagctactacggc

SEQ ID NO: 34514 - DNA, 382 bp, Homo sapiens; identical to SEQ ID NO: 25298
  chr18:46142413-46142795
  hypo

SEQ ID NO: 34515 - DNA, 426 bp, Homo sapiens
  chr18:52988851-52989277
  hyper
cgacaataaaacttgtcaaaaatccccctcgcagcccgcattcgcttaccgctttcccattatagtagtacatcaaagagttgccgcccatgcccgggattgtgtatgcgcagtacatggtctcggattcttttttctcctcagtaccactctaacaacttttatttcaaactcgctgtcccttttttcacaacaattccttcagttgcattttcccatatggccgggccaagcgtggtgaatatgcaaagcaggaagagaccattcctggcgggcgggggaggccgcggcgctgctgtcagacgctcaactttgcgcagcggagctggaaggcagcccggccctgatggagctcgaaatcctaatgcatacgcgagatcgattcaacttttccgaggggtttttattagttcctcgaataatgcc

SEQ ID NO: 34516 - DNA, 351 bp, Homo sapiens
  chr18:52989603-52989954
  hyper
cgcagctgcctgagaactcgactcggagaaaggggagggaaaggggagggaagaaaaaaaaaaaaaaaaaaaaaaaaacaccacgtctctgacctcgctcaaaaggagagagggggcagtgttttctgactgcttggtcaacaacctacaaaacggggttgcggaatgaaacagagtagcagtgcggcccgccccgggctccgcgggccccggcctccccggagctggtgggaagcgcggccgcccatgaacttcacctcgccccgccgcagacagccgcatgggcccagagcctacggaggggctggggcgctgctcccctcgctggcgctgggcgccccaagggcgcac

SEQ ID NO: 34517 - DNA, 1837 bp, Homo sapiens
  chr18:53254628-53256465
  binary
cgatcaaactggtaacatccactataaaaccaaatcagggaaagaaaaaaaaaaagccgctcttcagcgcatcattttatgcaacaggaggtagagcgagaaatgaatggatcacagagaaaagagaaactactgagaacgatccgatctcaactttccccccaccctgcaccccacccccctcgcacactcacactcgcacacgcacacacactcgcacacaccactcccctccgcttttcaaagtagctatcaagaaattaaagatgagcgtctctggagtgaaaacacgtccaaagggggaggggtggggtgacagggttggggggagcggagtggagggtcgggtcctctaattgtccagcaccctaatttgtgaaagaaaggggttataaaaattaaagtcaggcccctggcaaagtcctcggtccctccgagggggcatcaaggggaggggcgggggggctggcggcgagggggagggaagcggcgggaggggaaggggtgtctcttctgggagcgccgggcgccgggagcccgcggcgcgggaggcgcggagccgcgtgcggggccgccgagcccgaaccccgcgccgccgggcgcctccgccccgccgagccccgcaggcgccggtacctaccgcccgcgcgcgagaaggggctctccgtgcaccgccggcgccgaggcggcgttcatgtctaaccgccgccgccaccgccgccgcctgctcctgcgcccgctcccgcgcctgctgcctccccgccgccgccgccgccgccgccactacagatccgcagacacacagccaagatccctgactcttaacaccaactctcttctccggggaggggaggggacggagggaaggggggagggggaaacacgccgaggcgcacggaattgcaagttcagcaaagaaatgggtgggggggctccggcggggagacgcgacttgctccgggtcgggcaggctaggatgcatccccctcgcacccaccccgaggggaaaaaaaaaaaatctcaacacctcccccgcctcgccaaaaaatacaaacgaaaattcatcgagcacctcatttttcctcagatcgtcagttacaatctgaagcctgaacagttcagtttttgcccgttgcatccctcggaggcactttgaaatttattcgagtttacatcccctcacttctttctttctcttactctcgttccctctcactcacacatccacacacggcaaagcaagtttatactaggctgcaaatacacgtgatgcaaaaagactttgccaagaggaacaatatttttctttttcgtctataaatcaagccacattttcctggggagattttcgtttcggtagttttgcgttgggggcgaaatctgaattgcatactttctttcccctcccttttaagtcacagaatagtataactgcaaacttcgaaaaaaaaaaagggcaatttttgggggtggatgttgttttgtttttgcacttgagttcctaggcacgctaagtccctgttcgccagcactgtaagtttttaattcaacatttaccattataggccctgcatgctcttaaaacatactttttcacatcactttttaggataaaatttaagcttcataattctatcgtttcgtaataacaagcgtgctttatccggtatatgcaacataagctattttaacgtgtgtttgaaaaaaaaaacacacattctacaaatcctggtattgctagatgtgcgagtacatacacaaaatgcatgcacacactttttcccattggcaattatttaataggttgtcccttttgttttaataaaacatcgggatc

SEQ ID NO: 34518 - DNA, 418 bp, Homo sapiens; identical to SEQ ID NO: 25300
  chr18:53256957-53257375
  binary

SEQ ID NO: 34519 - DNA, 1113 bp, Homo sapiens; identical to SEQ ID NO: 25301
  chr18:53446783-53447896
  hyper

SEQ ID NO: 34520 - DNA, 650 bp, Homo sapiens; identical to SEQ ID NO: 24119
  chr18:60985398-60986048
  hyper

SEQ ID NO: 34521 - DNA, 122 bp, Homo sapiens; identical to SEQ ID NO: 16599
  chr18:74163260-74163382
  hyper

SEQ ID NO: 34522 - DNA, 283 bp, Homo sapiens; identical to SEQ ID NO: 23126
  chr18:75362799-75363082
  hyper

SEQ ID NO: 34523 - DNA, 655 bp, Homo sapiens
  chr18:75611984-75612639
  binary
cgaggaggccgctgctccgtgtcctggactctgagcaaagccgcgggccttagaccctccccagcctcaggcgagccccagtgccgacacctgctaagagacggtgcattgcgggctaaacccgcagacactgagcggggacgccacttccgacggcgtaaggcacctaaagtagccacagaggaaactgggggtgcaggagctgcaggagccccggcggcctgcaggggcggtggcgcggcgctgggcgcgcggccgctagatggcagcgcagccccggcccggcccgcgggaggcggccacgcgcgggggacgcggggcgcggcgcgctgagcgcgggtgccgaggctggagggcgcggccgggctcccgagtcctccctccgcggcatccttgtctccaccctcaaatgtcctgcaagccaggagcctccgtaggaaccgctgcatttttattttcctctaaatttcacacaggtgaagcctgtgtttgaatcactgagaggagattcaaatgaggttcctgacggggtagctgctccaaagaataccagtttcctctgcgaggagaatcgcgccccttggcaggaagccacagcccggccctgggacccgggttccaggtgcagacggcgctggctggggtgcgggatttc

SEQ ID NO: 34524 - DNA, 1413 bp, Homo sapiens; identical to SEQ ID NO: 27756
  chr18:7567478-7568891
  binary

SEQ ID NO: 34525 - DNA, 217 bp, Homo sapiens; identical to SEQ ID NO: 25313
  chr18:8612051-8612268
  hypo

SEQ ID NO: 34526 - DNA, 81 bp, Homo sapiens; identical to SEQ ID NO: 7073
  chr18:9514129-9514210
  hypo

SEQ ID NO: 34527 - DNA, 169 bp, Homo sapiens; identical to SEQ ID NO: 16604
  chr19:10207022-10207191
  hyper

SEQ ID NO: 34528 - DNA, 330 bp, Homo sapiens; identical to SEQ ID NO: 25318
  chr19:1030023-1030353
  hypo

SEQ ID NO: 34529 - DNA, 413 bp, Homo sapiens; identical to SEQ ID NO: 28772
  chr19:10370250-10370663
  hypo

SEQ ID NO: 34530 - DNA, 1317 bp, Homo sapiens; identical to SEQ ID NO: 30038
  chr19:10400300-10401617
  binary

SEQ ID NO: 34531 - DNA, 988 bp, Homo sapiens; identical to SEQ ID NO: 30039
  chr19:10529649-10530637
  binary

SEQ ID NO: 34532 - DNA, 1478 bp, Homo sapiens; identical to SEQ ID NO: 26548
  chr19:10530654-10532132
  binary

SEQ ID NO: 34533 - DNA, 675 bp, Homo sapiens; identical to SEQ ID NO: 31450
  chr19:11128636-11129311
  hypo

SEQ ID NO: 34534 - DNA, 404 bp, Homo sapiens
  chr19:11129453-11129857
  hypo
cgtcctcgccagtctctcttcctccctccctccctcagctgccctaaacacagtttctctgcccactcggagggctgtggccatgttggcctcgcccctgacagccagtggctatgggtttgcacagtgagccattgatgagagaccggcacttgactctcatttccttgttccatcagaacgctgtccaactgggcgtacgagtttgacaagtgggccccctccgtggtgaaggtgtcttacaaggtaggtcacagccactgaggtttcctctcttgctacggaggtgcaggcggtggtgggcaggacgtccacacatacctctggacagtgaacctgagaatgctgggtctccagtcgcatggagtctccaggacagcctggaactccagtcacatggatcc

SEQ ID NO: 34535 - DNA, 143 bp, Homo sapiens; identical to SEQ ID NO: 16616
  chr19:11152817-11152960
  hypo

SEQ ID NO: 34536 - DNA, 1184 bp, Homo sapiens; identical to SEQ ID NO: 31452
  chr19:11491655-11492839
  hyper

SEQ ID NO: 34537 - DNA, 664 bp, Homo sapiens
  chr19:11531278-11531942
  hyper
cggtaacatttattgcgcaactctgaggccggggcggacccagctggggagatttactgtgggaacgtctggcccggccccttcctcccctccgggcgccgctggccgcctccgttcccggtccgggccgcgttcagcccctgaaggggccccgtggggcctgcgctagacccggagggatcgggggctccgaagggggccgcctggtgggtgtcaggacgagtctaggacctccgagagcgacggtgcttcttgtgactttcgattaatttctgggaacggatcttgagtgatgcgcgggtcactacctcgttgtcctcctcctcactctcttcgtctaaggggggtggggggatgagcagggagcgatgtgggatccaggtccccatccctggctccccttccctttaccaccccactccacccccaccttggccctgaacagggtatctgacaacctcctgctacccagcttggggccccaaccgcaccccttcatccccccacccatactgaccaaaaaacttgtccttggaagtggcaaggggcagggcgatgcgggtgttgtattcgggcagccttccctctaagctggcgaggaactaagcggggatgggaagcgagagaggaaggtgggcggggccaggggccaccgagaagtcac

SEQ ID NO: 34538 - DNA, 1038 bp, Homo sapiens; identical to SEQ ID NO: 30042
  chr19:11592604-11593642
  binary

SEQ ID NO: 34539 - DNA, 655 bp, Homo sapiens; identical to SEQ ID NO: 23543
  chr19:1226490-1227145
  hypo

SEQ ID NO: 34540 - DNA, 790 bp, Homo sapiens; identical to SEQ ID NO: 16625
  chr19:1254919-1255709
  hypo

SEQ ID NO: 34541 - DNA, 1052 bp, Homo sapiens; identical to SEQ ID NO: 24130
  chr19:12995814-12996866
  binary

SEQ ID NO: 34542 - DNA, 572 bp, Homo sapiens; identical to SEQ ID NO: 27765
  chr19:1449921-1450493
  binary

SEQ ID NO: 34543 - DNA, 1472 bp, Homo sapiens; identical to SEQ ID NO: 24134
  chr19:16186802-16188274
  binary

SEQ ID NO: 34544 - DNA, 719 bp, Homo sapiens; identical to SEQ ID NO: 27768
  chr19:17392397-17393116
  binary

SEQ ID NO: 34545 - DNA, 417 bp, Homo sapiens
  chr19:1751192-1751609
  hyper
cggagtccctgaccctcgtcttctctttcaaaatggatgctttccctgctagaaaagccacacacgcttgctattaaaatgaacacgatcatcaagctgtaaaaaatatatttaaaaggaagcctgcaaaatcccagctccctaggagctcccccacattggcatttgggggaacttccttccaccttgttatcctcccacccgtagagacccccagcccccacctggtctgcgcttcttgagcctgggatgctagcgttttatggcggctgattgatttttagatctcacgattatttttaattatctgtgattgttggagggtgagaatgaggagcgcaggctggggctctgtgcagccacatcccccccgccgagattcagcatctgcacggggagtggggtacgcgactgttc

SEQ ID NO: 34546 - DNA, 1088 bp, Homo sapiens
  chr19:1761779-1762867
  hyper
cggcctcagttttccctctgccaagtaggtgctaatgtgagaggggctgagaaaccggcacccctcctgagtcccgagtgtgggcagatgtggggggcgatgggggacccctccgagctaccaagtcatgacctcagagccacagattcacagaagagagaaacaaagactggaagatgtgcctggcacaggctgctggagaggcgtgcccgggtcacaagtgtagacgcacccggagacacgtgtgtagacgcctccgttcacactgggacgagtgcagactgacccaggacccccatccgccctctggcagtcttgagccagcaactcccctaagtggggtgcggggacatctggaagacgccccatctccccctggacgcagtggctgcgccatctggagaccctcgtgctggctgctgggggtcctgcgtgccttccgcgcgcccccagctgcgcccgccagccctccaaccctcctgccctcctgccctcctgccctcctctctgggagtcgggacagaagctgctgggctctcctccctggagctggggctttgggaaggtcgagtagaccctcagtgagtgggatgcgcgagttggggacgctagttgcggggcagcaggggtccacgcatttccaagcgccctttcccgtccaaggacctgctggggggatgactgtgcctcagtttccatcacccagcaaacgccgtcccgcagcacccgggaagctgcggagtcgggctggggccgccgcgttgcgcacatcggtccttggcgggtgtgtggatcccagagcgcgcccggcccccaacagcctgacaggacctggacgcacgtgccccggcgccaggagacccgggacccgggaccacgcgcccgcggccttggagcctcagggtcactggtgcgggctccgcaggaaagcgcagcccccagcaggcacccaccatcccacccccgcatcccaccccaggggaaaccgcgccgcaccaggcgcgagtgttcttcttccttgtctggcgccccagaaccgcggccgtcctgggtgcgctcagctccagcgcagtgggaggacaagacac

SEQ ID NO: 34547 - DNA, 838 bp, Homo sapiens
  chr19:1765525-1766363
  hyper
cgccgcttcacgctgtcctgtgactgtgagtggaggccagctcctggagctgcctctctctggcctcacgcagcagctgctccctgaatggtgaatggatgagtcggttgcaggtccgtgcttcggcgttcattccttcgtgactctcgggactgcggcccggtggggacacagggctctgggtcactgcgtccacttgataaaccaggaacctgatgtccagagaggccagggtgcgcgttcaaggccactcggcccgcagagcccacccgcgtccccatggctgcagtggtgaggggagcagggggaggcagagaggagcccaccctggggctgggcggacatggatgcgtaacccacaccgcaggcttctgcggggtgacacccagactcaccccaagaccctgcacaccctacagctctcacgtctcacgtccacaccgcgagccagctgcatcccacacagggatgtcacaccaagatccgttgcctcatccaccgcccgtccaaggccccacaagctgatgccggttttcccgcccagaactggaacagctttcctaacggtcacaggtttcttagcttctcacttgggtggggtttggatgtgcaaggctgccgacccccatcgtggttgagcgcccgtgcaggcgccacccacccacccacagcacctcgctcagacttcgccctccaccccgccgggacatttgggaagcctcaggcagccccacgcgggcacacccgatggtggacggaggctggcaccctcagcccgcacgcggccaacgtcaggcgcgcgcagaggcacccacgggcccgccttcaggggcgaggc

SEQ ID NO: 34548 - DNA, 113 bp, Homo sapiens
  chr19:1768357-1768470
  hyper
cgggggaggccagacagagaggcggctggtggtggatggggagagggaagcggctggaagagctcaggagcccaggaaggactggcctgcaccgggacatgcctgaagggggc

SEQ ID NO: 34549 - DNA, 284 bp, Homo sapiens
  chr19:1769669-1769953
  hyper
cggcccccctactccaactcacacctctgtcagcggctgtgggggatgggagcaatgacaaagctgctcgcggtaaacagctccgactggatcgatctgggctgtgaggagctgtaattagattgaacgccgggaaggggggcagcagagcctctttttgctgcaatcgacaaaacgggaagttttttcagactctgcctggcccggcccctcccccagcctctgcctctggggtccccattaggcaccagattggagcctgggaggtggggtgggaaagggac

SEQ ID NO: 34550 - DNA, 1006 bp, Homo sapiens; identical to SEQ ID NO: 30049
  chr19:17716524-17717530
  binary

SEQ ID NO: 34551 - DNA, 1277 bp, Homo sapiens
  chr19:1775741-1777018
  hyper
cgcccagagggcctcgagaaaaaccagggctcactgtgttgtcccctaaagcgggtcaagaagcacatactagaaatataaaccgggtatttaaaaatggaattttaaagaataacccctcctccgtcagatcccctgccccaccgagggaggtagtagaaaacttccttcctccccacccgccccggccccctccccagggacctcagccctttccaaagtcgccaaaaacccacatcaagccggatccttacggtcccccaccctctccaaaaccaaccccacccgctggcaggacggcccctgcggccgagaactgagctgcccctctctgcggccaggattcctcgtgccaagaatcgcctgccttaaagtctggggaggggcctgcggcgggcgcccagcacctacgggcgagcacccttcccaccccatcccaggccgcaggggacggggggctcccacgtgcgggtaaattccagacgcccccgccccgccccgtctgttgagttcactttacctttaggcaccttcgtggagcgcaaggaaggacgcagctccggacacgggagaccacgcccaggctcccaggagaaggggacccggccggagaaggcgccgctggggccgcccggaggagcccctctgcacgggcccgtggagacgcttcctgcgtggaaccttctggaatccaccgcccccctttccgcccgcgtcagggtctgaactgggcttgcaggggggcagcggggttgaacgtggtgttggtttccactctcgccaaagagagaagacgccgaggaaggtggattccgcttgctccattttttgccaaaaatatttacaaatgggaagggtcggaaatgaagatgagcgcccccctcccaccccgcgctctcccccgctcctctcatctggtctgggtgacctccgagactggccggccgcgggatcccaggagcccgcctcctccgggggttcaagatccgagtctagaaggaacctcctccctgaaatccccccactcatcggctgcctcccagggaggaggcggcccccctaccccccttgaaaatgcaaaagacatttctagtgaaatgcccctcccctcccccaggtaaaggctacctcactcaagctcatgtctgtgattggaaaatcacgcctgataccaaagatttctcccaaggatttgtgctggatgacaggattccctggcctgggacccggctcggggccccgcctgccgagtgccaccccttcccgaacctgagagc

SEQ ID NO: 34552 - DNA, 470 bp, Homo sapiens
  chr19:17984603-17985073
  hyper
cggccaacaccattggcccggggcactgtctacactgtgcgcttgcgggccacgtcggtgtctgctgagcggtggctgctccaggagcccgcgcccgtcaggcgcaagtgggagggcgcgtgcacacgcatggaccagtcctccaggtccacggggtacgcacaggcacgggatggcacctgtgcacgggtgtgtgcgtgcggcggggcccccacgtgcaagaatctggcgggcgcggttggcttccggagggaggggcccacctagagagcagaccagggacccgagaggcctcggctcctgggtaaggactgtccaggtgacctcgagtccctccttgcagtacctggagatgcgcttcagccgcgcagtgcggctctgcgggactttgcagtacattgtagccacggtgagtggcctcggccccgccctccgctcagggccccgagagcgtcagccttcactagccc

SEQ ID NO: 34553 - DNA, 593 bp, Homo sapiens; identical to SEQ ID NO: 23550
  chr19:18989674-18990267
  hypo

SEQ ID NO: 34554 - DNA, 1260 bp, Homo sapiens; identical to SEQ ID NO: 23551
  chr19:1911845-1913105
  hypo

SEQ ID NO: 34555 - DNA, 1106 bp, Homo sapiens; identical to SEQ ID NO: 27774
  chr19:1969650-1970756
  hypo

SEQ ID NO: 34556 - DNA, 630 bp, Homo sapiens; identical to SEQ ID NO: 26596
  chr19:22034394-22035024
  hyper

SEQ ID NO: 34557 - DNA, 803 bp, Homo sapiens; identical to SEQ ID NO: 28830
  chr19:23257778-23258581
  binary

SEQ ID NO: 34558 - DNA, 2813 bp, Homo sapiens
  chr19:30015920-30018733
  binary
cgggggaaggagataggagagacccaaggcgagccttaggactcgcccctatgactatgactacgcgctgcgtccgaaccacatgtccaccccgcatttgccttcggggaccagaccgcgctccctcagatggctggggagggagcagactccgggtgaaggctgggggaggtaccgggatgccgagtacgccagagcaggcgggggatgggttccggcttcctgccgcctcggcatctcgctttgcaccgggcaaagaaggggccacgaccggcgaagagcgcgtggagacacagggacccgcgatccaggggcaggaaccccgccccctcccggaaacctcccgggccctgagtcgtgcccggcgctccccaccccaccccacccccgccgcccctgccgtcactcacggccgctgcgggctggctagcgtgtgcgctctccgcgccgcaggcacctgctcgctgggcgctgtgcgctcacttctccctcgcgcactgcagactcccggcgctgccgccgccacccagcgtagtctccggctgggcacagcgttccgcccttctcgcggccccgggcgcccacccatccgtcatggcccaggcctgggccaaacagcggggcagctggttgcccaaactggggtaaggagttgagggctgggagctgcagagaggaccgagggacacacggggagcagggatgagcggccgtctcgagccgtgcagactgggaagaagccagggagagtttgggtgggaggactcccaacccaagcgggtgcggggcggggctgtactccaaccagaaagacggtggtccctccgagcgacccccgaggagagagggggagcgctctggggcgggggcggggcgggctgtggcaggagaggggagggcgggggcgatgcagcggtggaggcggcttggcgcccagccactgaccgccccctcccttcccctcccctccccctctccccgcctctctccggctccgggtccgccacgccggacccgctctccccgcgctgcgctgggtcggacgccaggtctgcgcgccgcggctgagcgcccactcgccctgcggaaagagccgcggaggaaccggcgggggcggctgcgggagccgaaggaggtggcaatcgggagcagaaccagaaggagacagggaggcagaagctcgcggctccgtggcacgcactccctcggccagggatgggtcccggcgcggcccagcccctgcccggcccgccgggcagagactgaaccgcggatccccaccgtcctgtggacgaccggacagagagaggcactgaccgatcgccagcagcctcccggtgggaccgcgtctcctgcacaccccgcgcagcgccccccgccggagccgcaccgggcaagccggcgagggagcggggctgattggcggccgccggcggccaggggagggggcgccgcgcggggccatggcaggctcggaggcgtcctagcccgagccggagccgatccgagcccacgcggccgccgcctctccgctcccgggcccccgccgccaccgcgccccccgcgggagatggaacagcggaaccggctcggtgccctcggatacctgccgcctctgctgctgcatgccctgctgctcttcgtggccgacggtgagcgcgggaactttgctgccgctgtggactcgggggggtctttgctggggccgccaccgagaagaagaagaaagagaacgaaccgggaagcttcgcggtctccagcaatcccgctgtgcagcctgggcccggaggggtagggagaggcgagcggcgaagggtcgccgcagcagcagcgccgcgcccgagtcgttcccagtcccgccggggccccggctgcggaaaggatgcctgcggggagcgggagtaggcgcgccccagccaggctctggcggtgcggccaggggcgggggagaagcacgagtcgcccctgccgccccgccccatccggagggaagcagtaggcagccgatggccggtccctgcctcggccctgcagccgcttccccgaactttgctagcccctccggccgtgcgccagggagcagctgcggggtggggggcacaaggccagccagccagagaccgactgcctcgctttaggttgccccaggcccccgacctacagctggtcacgcctctctctctctccccacccccagctgcattcacagaagtccccaaagatgtgacagtacgggagggagacgacatcgaaatgccctgcgcgttccgggccagcggagccacctcgtattcgctggagattcagtggtggtacctcaaggagccaccccgggagctgctgcacgagctggcgctcagcgtgccgggcgcccggagcaaggtaacccgccgcccacgcggtaccggcgcgcgcccggctcgcgcccggggcggcgaaggctaacccagggagggaagcagcgggcttcactcgcgcagggcgccgccctgtggcgcagcccatcttccaccttcgcatcccaaagcatcttcaaagtcagcagtggttacccccaaacctgtcaattattttgacagcatcgctgttcccaccacctcccagaactccattcacgcccagcccctaaagagccacacctcagcctggtcgcttgctcgtgctcgctggctgcggccctctgatgggtgctgggtagtgaaggaagcccccttggtcccatcaggctctccccgccctctgccactttgaggaccccagggctcccacggctgcgttccagaggccaccagaaaaccgagtaccggaaagcc

SEQ ID NO: 34559 - DNA, 1378 bp, Homo sapiens; identical to SEQ ID NO: 26612
  chr19:30019101-30020479
  binary

SEQ ID NO: 34560 - DNA, 653 bp, Homo sapiens; identical to SEQ ID NO: 26614
  chr19:30713408-30714061
  hyper

SEQ ID NO: 34561 - DNA, 959 bp, Homo sapiens
  chr19:30716607-30717566
  binary
cggggcgcggcgcggtgcggggggcgcggcgcgggggggcggcggcgggtgggggggcagcttcggcgtccgggaggtggcaaagtgagtttggactcttggcgcggcccccccgtcccctccccctccccatctcggcgaggcctgccgcccggttccttctcgccccatcgcgattaaaaaatacggtctaattaaatatccgtggctgtgacgttggcgagagaagctgtcagcgggtggggggtggggggaaagaagaggaaaaccgagccggcggctgcggccgggcatcgtatggcgctagagaacttcggcggcgagcgggacctgcgcctgggccgccgcctccccgcccgcggtcccgggaccgttactttgaaaaggagtcccgaggcctggcgcccggcgcgcgatcgggaccccgcgtccagctccggggacccggccggcgccccccacccgcgagcggcccgcgagccactctcaggccccgggaaactttcaagagggtctggggggtggggggagtaaaaaggggagggggtaggctggggccgcggaaacttctgctcaagtgactttccccattttctcctctgcctgggacgggggttcgccttgcgctctttctctggtccgcgctcactgcggggttccggcccctccgcccgtggagagagggtaatttgcaaccttttttttttttcaattaaagttagctgatgcttacaatgtgtcaaacttgcgggcgccgagagccgctgagatctgccattttgtgattgcatcggcctcctgtgccccgggagcctggccaggctgaggccggagagttggtttcagggctgaggtgccagggtccgaacccgcgaccccaggaaaggccgtggcgcctgcaagcgcaggcggcgcccgcagcacctgccccagccgggcctcggcctgggggcccagcc

SEQ ID NO: 34562 - DNA, 1425 bp, Homo sapiens
  chr19:30718606-30720031
  binary
cggtacggccctccggttcctcctgcgccttctcccggcagccgccgccgccgccgccgccgctgtgcaatttagcagaaatccgacaggggccgcgtttgctgagcgcatccggcggccgggcagcccgagcgggccgccgggcctggtcggccggtgtagaggcgcggagggggccggcggaggggaccggcggggatgggcgcgggaagcacgcctgaccagagcacgcgccgttccccaaccctggtgtccccggcgagttgggcagccccgcgcgccctgaccttgacgccccagtctccagccagggcttaggtgaacttggggtggggtgtgcgtgcgtgcgtgtgtatgtgcgtgcgtgtgtgtgtgtggaaggggtggtgagactgggaacgcgctgttttctttcccagtttgatactagcaactggatttttactttaagaccggctttgctctctgctggggttgggagggggggcgatcttttcccatcactcacatctttgttcattgttcactgagtggaaggcaggcgacttaaagagacgaaagagaggaaaaaggggtgagagacggagagaggaaaaagaggggggcggccagaagagggaaggagaggcgtggggacagggcccccgcccccgccggggtcgggtttgatggtgaaatagtaaacccacgcacggagggtcgccaggaaagtggacattaccgctttaattaacttcgagatgctccggcggcgggacctggcgtagccgtgacgcgcccccataaatctgcccggcccggggctgctccgagaactcgtacagtagcggcgtcagatccatcccgcgcctcccagtccggagtccatttgcataattggattttttttttttgcctccttctttctccctgaaacttgtttgaaaacccaagtgaaaaccgcgacgatctgcacactcaaaagcaagtgccaagtaagtgccctgcggtggcctcggcgcgccccggggtgagcgcgcaaagccgggagcgaggtgccgcgagctgcgcgccgccccgggccggcctcgcgtgtgggcggctgggcggctgggcggcgggaggacggcctccgcgggctccgggactgcccggctggctgctcgcacaactttttttttttcccccgtctgctgacttttcgggccaggtgaagtgtttgggccacgcgtgtacctgtggcgagactcgggaggcgatcttggggggcgcgcggtcgcagttgggcatcttgcctgggtcgggggcgggcagtcggtcccagtggccgccgctgagggcagagctgcgagcgagcggggccggctgctggtcgcgccgcgccgtaaatgcaagcctgtagccaaatgcttcccccattattctaaggtttgtgtctgcgtgtgc

SEQ ID NO: 34563 - DNA, 522 bp, Homo sapiens; identical to SEQ ID NO: 24157
  chr19:35615970-35616492
  hypo

SEQ ID NO: 34564 - DNA, 378 bp, Homo sapiens; identical to SEQ ID NO: 16650
  chr19:35758216-35758594
  hyper

SEQ ID NO: 34565 - DNA, 226 bp, Homo sapiens; identical to SEQ ID NO: 25361
  chr19:36222366-36222592
  hypo

SEQ ID NO: 34566 - DNA, 453 bp, Homo sapiens
  chr19:36334924-36335377
  hyper
cggagctcccacaatgaggagactccacaatgggcaaggttccttgggtgggtgtggtttccatggtgggcggggctcacagtgcacgtccagccgcagccgcgcttccgcggtgccctcagagttctggcagtgcagctgatagaggccgtcgtccgcgcgggtcacattccacagatgcagagccccgctggacaggatgcgatgccgggggccgcccgctggggaaggccagaataagggacctggcaggacctcccatccccgggacccctccccatgaccacttccctcacctggactgaggcgatagccgcggaaggtccagttgaaggcctcgggggcggggttagcggacacggacacgggcagcaacgcctcgccctgctccaccgcggtcaccaccagcacctgctcccccaggaactctggacggtcttcagagggggcgcc

SEQ ID NO: 34567 - DNA, 795 bp, Homo sapiens
  chr19:36351581-36352376
  hyper
cggcctgtgggtgtggtcaaaggtggccgtggctttcagggctgttgagggtcggggcctggaggggcggggccgggagagcgagcgtggggtattaggaggaggagagtgtggagctggggcatattcttgcgccctagagggtgtggtgtttctgtggggctggctgatcccaggtcagtggctgcattccgccccggccatgtgacccctagtctctttcgtccagttgggccgattctgcaggcaaagccggagcccgtgtccgtggacgtgggggaagacgcttccttcagctgcgcctggcgcgggaacccgcttccacgggtaacctggacccgccgcggtggcgcgcaggtacagccctaaatctgaggcggtggctggagggggaccaggcttccttacaaatccggcttctgacgccccttccctgtcgcaggtgctgggctctggagccacactgcgtcttccgtcggtggggcccgaggacgcaggcgactatgtgtgcagagctgaggctgggctatcgggcctgcggggcggcgccgcggaggctcggctgactgtgaacggtgagaaggcggggcttcctaggggacctggcccgtcctgggatagggagcggacagagggggcaagggctaatgcagtgggagtggcctggaaggagctttacacccagcgggggctggagaccggacctattgaaggcgaggcttttaggagaatcggagtttggaggcggcgtggcctgattgattgaggttagcggagagtgcgctggacagaccc

SEQ ID NO: 34568 - DNA, 856 bp, Homo sapiens; identical to SEQ ID NO: 22832
  chr19:36909065-36909921
  binary

SEQ ID NO: 34569 - DNA, 1065 bp, Homo sapiens; identical to SEQ ID NO: 27784
  chr19:37095634-37096699
  hyper

SEQ ID NO: 34570 - DNA, 1161 bp, Homo sapiens; identical to SEQ ID NO: 30066
  chr19:3785511-3786672
  binary

SEQ ID NO: 34571 - DNA, 740 bp, Homo sapiens; identical to SEQ ID NO: 22835
  chr19:38182720-38183460
  binary

SEQ ID NO: 34572 - DNA, 202 bp, Homo sapiens; identical to SEQ ID NO: 28857
  chr19:38905516-38905718
  hypo

SEQ ID NO: 34573 - DNA, 87 bp, Homo sapiens; identical to SEQ ID NO: 16657
  chr19:39210557-39210644
  hypo

SEQ ID NO: 34574 - DNA, 270 bp, Homo sapiens
  chr19:39221989-39222259
  hypo
cggcagggtgagtacaggctgatcccttcaatcctctgggcctgtttcctcatccatcaaacggactaagacagccccgaccccatagggtgtgtgaagacagaacgctcaggacagcgtctgacacgtgactcgatgtgtgggtactgttactccttaaatcctgtggggctttctccttgccagtgggcactggaggatatttctgtgcagcaaaaaatatagtcaatcccatatggagtcagtttccttacagtctacctcagaggc

SEQ ID NO: 34575 - DNA, 116 bp, Homo sapiens; identical to SEQ ID NO: 23558
  chr19:39329516-39329632
  hypo

SEQ ID NO: 34576 - DNA, 351 bp, Homo sapiens; identical to SEQ ID NO: 27792
  chr19:3966587-3966938
  hypo

SEQ ID NO: 34577 - DNA, 375 bp, Homo sapiens
  chr19:39993380-39993755
  binary
cggccggggcgctccgtatgcatccatgttcggccgggcccaccccagcacccctcctttgcctgtcctcgcagggcccgcctggagcctgctggcgcgcgtggctggcaggcggcgcttggcagccggaggcccgtgggcccgggacattcagcgcgcaggcgcctgggagctgcgcttctcgtaccgcgcgcgctgcgagccgcctgccgtcgggaccgcgtgcacgcgcctctgccgtccgcgcagcgccccctcgcggtgcggtccgggactgcgcccctgcgcaccgctcgaggacgaatgtgaggcgccgcgtgagtcctgcgttcgaccccaccccgtcccagccggggaccccggcccctcctgagc

SEQ ID NO: 34578 - DNA, 516 bp, Homo sapiens
  chr19:39997621-39998137
  binary
cgggcaggtgggtccccggctcccggactgcgccctctgatgctcccttccccacaggcggactctgcctggacctgggccacgccctgcgctgccgctgccgcgccggcttcgcgggtcctcgctgcgagcacgacctggacgactgcgcgggccgcgcctgcgctaacggcggcacgtgtgtggagggcggcggcgcgcaccgctgctcctgcgcgctgggcttcggcggccgcgactgccgcgagcgcgcggacccgtgcgccgcgcgcccctgtgctcacggcggccgctgctacgcccacttctccggcctcgtctgcgcttgcgctcccggctacatgggagcgcggtgtgagttcccagtgcaccccgacggcgcaagcgccttgcccgcggccccgccgggcctcaggcccggggaccctcagcgctaccttttgcctccggctctgggactgctcgtggccgcgggcgtggccggcgctgcgctcttgctggtccacgtgcgccgcc

SEQ ID NO: 34579 - DNA, 854 bp, Homo sapiens
  chr19:40005958-40006812
  binary
cggtccggactcggacccccatccggaccctgactccagtcctgactccgtctccagccgggacttcccctctggtcctgactcctgctccagcccagattcccactctggtccccactcccgctctggcccggatcccccgtctggttccgcctcctgctccggcctggatccctactccggtgccgactcccgttcccgtccggaacccaactccggtcccgactccggctcggaccctgactcctccagtccgggtcccagccccagccccagcccagctcctggcagggattcgggccgcgctccccgtcttggactcctacctggccccggccctacctttggatccgcccccggaacctgctccggagctgcctttgttgcccgaggaggaccctgagccggcgccgagcctgaagctcatcccgtcggtctccagcgaggccgggcccgccccggggccccttcccacgcgcaccccgctggccgcgaactcacccgggcccaccctggacttcaccttcagggcagacccgtcggccatcgggctggcggatccccccattcccagtcctgtcccctcgcccatcctggggaccatcccgtcggccatctccttacagaattgtacggaaaccttcccctcctccagcgagaacttcgcgctggacaagagggtcctgattcgagtgacctactggtgaggacctcacacatgcctctcccaacccccggggacagggccggcagtgggggctgggtctccggggacgtggaggtcagggttggggtagggcgaggggagggattcaggaagagccccagagttccagttcccagattggaaaccc

SEQ ID NO: 34580 - DNA, 1632 bp, Homo sapiens
  chr19:4053805-4055437
  binary
cgtgcatgtgtctgtgcgtgtacgtgtctgtgtgcacgtgcgtgtatgtgtgcgtctgcgtgcatgtgtgcgtgcggtgcagggagagaggcgggaggggtcgtgagcggcggatgctggggcagagagcaggacggcgcctcccccgcggcgggcagctcacctggtgaagcggaccttgcagatgttgcactcgtagggcttctcgcccgtgtgggtgcggatgtgtcgcggcagcttgccggcgccctggatgaccttctcgcagatggggcacttctggaaggccttggctcggatcttcttctccaccttctgcgaccaggccgggtagacgtcgccgtcgtgggcgccgctgaagtacttcaggtagtagtccatgacgcccttgtcgtcggcccgcgactcctcgtcgctgtcccccgccgcggcccccgcccggcccaccgatgacatcatctgctgcagcagcgtgctggccgccagcccgtccacgtcgggcccgtccccgtcctcgccctcggccgctcccgacaggaagcccggagagtcgcccggctcgggggccgcctccgacagcgaggcggcctcctcctctccgccgcggccgtagtggccgttctgcgtggcggccggcggggccaccggcggcggaaagagacccccggtgggggcgtcctcatcccgctctggccacagacccgggttgctgtcgccctcgtccccgtcccccgtcgggggccgctcggccggggggcccggcccatagaagtctaagccgttgcagtcgcccgcggccacggcggccacagcggcggccacggcctccttggtggcatccaggtcatcatcggacgccccaaaggcggaccacgggaagctggcagcggcggcggcggccgcggggggcaggctgttcatggggttgctctggaagaactcgaggtactccttggcgcggaggaggttgcgctgatcaatttgatctacaaggtccagctgcccggcgtcggcgcccgcgtcggccgccaggatctgccggtccaggaggtcggcgcacacgtggctcacggcggggatctccagcaggcgggcggcgctgaggatgtcacccacgttggctgtgctgacggtgagcgtggccgtgtaggcgaagtccatgagcgcggtgagcgcctcggcgctgacgaagtcgatctcgtacacgttctgctggtccaccacggcgcccgacgtgaacagcttcttgaagtactggctgcaggcggccagcaccgagcggtgcgtggggaactcgcggccctccaccaggatcaccacgtcgcacagcaggccctgcgtccgctgctcgttcagcccactcaggatgtcgctgctgtggtcggggaacgggatcccgatggggccgtccacgccgccggccatcttccgcgccgagacctgcagcagtggggaaggagagggcgctcgtgagtgggggtgcgggggttcctgtgcccactgacaagggcccgaggcccttgagaagcagcgttccaccctgctcccccagcctcacattcccacctgcacgtgaaggcggtcagatgtcgcgcctttccagccccagcttccccagctgtgcaccaaagc

SEQ ID NO: 34581 - DNA, 629 bp, Homo sapiens
  chr19:4096061-4096690
  hypo
cgtgcccggccaaactgggtccacagttttaagcccaagcactggggagcctggcctgacacacgtccccggagcgggagtggccgtgtaagcggtgccagcagggcaggggcaggcctttcccgcgcaggggcaggggcgggaagaggcgggggagaggtcgggggatgtgctcactgggcatgggtgtggctgctaggtgcagggagagctgggtcaccagggccaccccacctggctccgtcatcatctcgccacccaaccccaggcctagcccagtctgcaggcagctcaaatgcccgtttctctgccccagctccaaagggccaccaaagacacagaaacccacagaaggcccagggaggtggcccggcctggtcacgtggccaacaggaccttggggtgcagtcctgtgcctccctgacagctgcaggcctggaaggaggccgcgtccctccttgtgccttgttttactcatctgggcggtggaaaccctcatactgtggctcactgggttgttatggggactgacggagcaggagccaccccgggacctacaggtccttctaggctctctgggcctccttccaagaggcaagggccattcctgtacctttctccgtggaagc

SEQ ID NO: 34582 - DNA, 841 bp, Homo sapiens; identical to SEQ ID NO: 27794
  chr19:41119120-41119961
  hyper

SEQ ID NO: 34583 - DNA, 441 bp, Homo sapiens; identical to SEQ ID NO: 22838
  chr19:42028298-42028739
  binary

SEQ ID NO: 34584 - DNA, 899 bp, Homo sapiens; identical to SEQ ID NO: 27796
  chr19:42408218-42409117
  hypo

SEQ ID NO: 34585 - DNA, 288 bp, Homo sapiens; identical to SEQ ID NO: 30075
  chr19:4304429-4304717
  binary

SEQ ID NO: 34586 - DNA, 712 bp, Homo sapiens
  chr19:4361167-4361879
  hypo
cgatcccatcctgttaaggctgcgggactcgagggtaggcagtgggccgggcccccgtcgggtcaggacggaggtgggggctgccccagaggaacattagtgtttctaagagcaccttagtgttgccccgcctcggccagctgggcgagaagttggggagcgggggaggaggctggcgccatggagtggggaagggagccgtcaccgttgggagtcagcgctagtgtaaacaggcatccccacccacccagataagcccccccacccaagtgtggggtcctgctcagggagtacctcaagggccggggcccaggtggcgccggcaggctcagacaccgccctggcagcaggggctccgtggaatgcaggagacccagcagggggtgccggccagtgtggacggaggggcggggcggggacacgggtgagtcactgcggcaggggcacaagcacctccacgtagctgagcgggaagaagcccgactggccgtccagcatgccctcgtaccagttctcatcgatctggttggtcagcgtgatgacgtcgccctcatggaagcccagctccccgtcgttctcgggctcgaagtcgtacagcgccttgcagctcggctggtccaggggcgctgggggcgggagcgggctgtggggctggggctgctacgcctcaccccgcccagtctggggtctcagacctgctgtgacctggagc

SEQ ID NO: 34587 - DNA, 1283 bp, Homo sapiens; identical to SEQ ID NO: 27799
  chr19:45655296-45656579
  hyper

SEQ ID NO: 34588 - DNA, 262 bp, Homo sapiens
  chr19:4714200-4714462
  hypo
cgtggatgatgctccggagcccgtcccacgagtgcttctgcacctggaagcgggcggccgggtcatctgtggcggctgcgtcgcctcggtcggccgttggggtcccggtggtggccatcctctcagccccctcggaattcagcgagaagctgcggggaggaagcaaagactatgagaaaggagaactgttttacctacgagctgccccaatgctgccccttgcgaggcactcaggttcttccagacgagccccacccctgcc

SEQ ID NO: 34589 - DNA, 391 bp, Homo sapiens
  chr19:47960586-47960977
  hyper
cgcggcggctggcgtccagctcgcgcgcctcggcggggcccgggcccaggccgcccagctcacctggggcctcggcgcccacgaacgtgccgtccagctcgatgctcttcggggggtcgccctcggcgcctatgatgatgccgctgcgtgggtcggtgcggtagcgcttgtacacgtacttgtagaagagcagccgcttgtcggccatccaggcgaataccacgcacaccgggaagaagaccagggtcagcagcgcctcccacacctgcgggcggcgggcgtcagggcgaggccgggcgggccgccttctccctccccgcctctctgtctcagtctctgtccgcctctgccactcctcatctctctccccaacccccaaccccgccccgtc

SEQ ID NO: 34590 - DNA, 350 bp, Homo sapiens
  chr19:48857800-48858150
  hypo
cgtgagtcactgtgcccggccaaatttcacttctgtaccttgttgctggtctcttcctcagtagaacagagcctgtgaggtacatctctcatgctgtccactgtctcccagagcctcaagccattccagagacacagtaggtgctcaataaatatttactgagcgaactcaatgaatgaatgaatcagcgaaaaaagatcagagagaggtcacccgccaaggtcacccgcaccactagtgaacaaccaagctattgtttgaaccgaggctatgctgcttctttccctgcccaggccacatcttcaaaggacttaagtcatcagcaaatggtcacccagcgggcctcaccc

SEQ ID NO: 34591 - DNA, 315 bp, Homo sapiens; identical to SEQ ID NO: 16679
  chr19:49179997-49180312
  hypo

SEQ ID NO: 34592 - DNA, 702 bp, Homo sapiens; identical to SEQ ID NO: 30084
  chr19:50393295-50393997
  hyper

SEQ ID NO: 34593 - DNA, 712 bp, Homo sapiens; identical to SEQ ID NO: 22840
  chr19:50553779-50554491
  binary

SEQ ID NO: 34594 - DNA, 603 bp, Homo sapiens; identical to SEQ ID NO: 25409
  chr19:50833813-50834416
  binary

SEQ ID NO: 34595 - DNA, 77 bp, Homo sapiens; identical to SEQ ID NO: 11402
  chr19:51111319-51111396
  binary

SEQ ID NO: 34596 - DNA, 716 bp, Homo sapiens
  chr19:51142491-51143207
  hyper
cgacccactgggagcccggccaccccctcccacctccgggcccccagctcccgttgagggcttagagactacaattcccggcaggtctcgcgctcgcgctgctgcggcttcatagacccggcgctgcaggatctgctgggagttgaagtccttaatgcctccgggctgcagagaggatgggattttttttttttttttaaggttttggggggttaagatgctggggtcccaagacgcttcaggggaggggaacgatgtccgggacttcgaaaagccacggagccctaagtccttaggggccacggaatgaggaaacgatccccccgcgctggggatcggtgggcgaggggtgggatacacccaggtgtttcgggacccccttccagggccacgtgcccctcccccggggtggccagagagcgctgcagcgctcccactccccggcccgagatccacgcgcctctgcatctaccccgcccccatgcgccggggccgaccccagggatttgactggggctggggctgtggcaggaggagggggaggagcggactcacccggagccgccgctgccgccgctgccgccgccgccgccgccgcagccccgcgcgccagccgcggtgccggctcggctcctcccctcgccactgtcgcaggtccgcggctcctccccctgcaccccctccttcccccactccgaacccgcggcaagaaagcc

SEQ ID NO: 34597 - DNA, 1762 bp, Homo sapiens
  chr19:51161233-51162995
  hyper
cgacacccgcagcccgaggaggattttacccacctggaggtgctgcaagccctggaggcccagttaccaggggccatggagagcgggcgcgtgagcagcatccgctttgagaacatgaacgtcatctgtgggactgctgggcgccggaaccggtgagtaagcggcgggggcggggcctggagcgagcgggaggggcggggcccggggcgaccgggtaagagcgtggttggttttagagcgctgagggacgtggccaagagtgaaagcatgaatgggcggggcccggggcgactagataagagcgtggttggtgtaagggtgctgaggggcgggccccggagccactagataagagcgtggttggtgtaagggtgttgtgaggcggggcgacagtggagtgacagcttgggggggcggggccaggagggactagataagagcgagattggtgcagagccactgaggggcggggccaagagtgagcgcggttggaggtaaggtccggtgagatcagagagaaggagggatctcgagtgagtaggggcccgagtttgagtgacccagtagtgaccgggatagaggtctgagcctggaaaggcagctgtgagggggtggaagagactgagcacatagtaggtgtggggccaggggtgatagggtggggacaggcctggagtgcctagggtagagcgcagcctgcagtcgccagtggagggtcgggcctttgggcggtttgagatggagcctcgacagacagtgattaggacgcagaaccaggctaagagagcgtaaggagcctagagcgacccaggcgagagggcagggctggaggggagtttagggacggagcgatggtccgctggaccagggcctgtaaacgactccagggaccaggcagggactcttcgacgatcaaagccagggctgaaacgacctgcgagttccttttccgtccccaccccccttacaggtggctcatcgcggtcacggacttccagacgcgctcgcgcttgctgcgctccgggctcagtccccgcgggcttgcgcaccagatcgtgcgccacgacgacctcctgctgggcgactaccgcctgcacctgcgccgctccctggtccggcggcgcatgctcgaggccctgggggcggagccgaacgaggaggcctgacgcccgggcgggccccggcagcgcttgcgcaccgccccgcgggctggggccacccacccggagccccggaggacagggggcgttgccttcccaggaaggaggcggggccggctcgagggggtggatactgtgagtttaattataaagaatgacctggtacaaaagccatttctctctgcaaaatcttggtggggagtcaggggaagggaggtgatggggggtaggaatgaacccccatgttataatcccgcgtccctaatcttcctccagtccctgtacgtggacgcctgggtcccaatcccttgagggatgaactgaagcccgcgaaagggaagacctgggcaccggggctttcagcgcgtgccgagccctgtctcagcgagaatcagacgtcctcatccgcccccctcctcttcccctcccacccccccttggaagacaattctcgggcttttatttcaggttttttttctggatttttttgtgtgttctaggggttttgtgttttttttttctgttttttatattttcttcttttgttattgttcctctttttgctttttctctcctctccaccccgcgctgtccccgcattc

SEQ ID NO: 34598 - DNA, 225 bp, Homo sapiens
  chr19:51198097-51198322
  hyper
cgccaccgcgggccggggcctgccggccggcccgcaaagcaggaggcggcgcgctccgttacctgtagatgtaccagacgctgcgccgccggggccccagggctggccagctggaggacagcgcggggggcggctgcggcagggagctcccaccggggccgcccccgagacccccgccgccgaccgcagacaaagccatcgccgccgcggccccagccccggccc

SEQ ID NO: 34599 - DNA, 1265 bp, Homo sapiens; identical to SEQ ID NO: 30087
  chr19:51227617-51228882
  binary

SEQ ID NO: 34600 - DNA, 867 bp, Homo sapiens
  chr19:52551831-52552698
  hyper
cgcccccgcctcccccaacccccgcgctacctccaccatatagcgccaccaacaacgcagacgccctcagaaagctccctcccaccacgtttccacgccctgacccacacactgacctgactctccttggaatcgccgcgacctcttaaaagctgaacttacttccctaaacttcttccacttctgggcccctcgcccaactccctccccctctaaacctccagagacggtcagccgcgtttccatggagagcggaatgcggccttccggcttttcctcaggaggagacgcgtccgcgccggcgtcgcctcgccgctctgggggcggccatctttgagtacgtgacgtacagaaggcacagcggccgggagacgcggtggacggaggcctcttaaactgtccgatttccagacacctcagccctggcagaaaatggagagcttatcagaggcttgagttcacacaggcagacacggcgtgggggtaaagtcctctgaacagacacggaacagaaataagttagtcttctcctcgcaggggacagtgaacggcgcaaacttctcaaaggccagaacccattattaccacaaaggcgcggcatcccttcttagcggttatgatggctgtgacgtctcagctcaatggaaaattaaagtcacctctgggcacctcagtcactattgtaaatgcgaagcgttttagaagccgtataaaaactgaagcaagagagactagaacaaaaaataagcgagcggtgcgttgcaggtaacggagccagagcccttaggggagagcatcatgggggcggccatcttaggggacgttcggtgtccgtacggcagaacatattctctctgagaagcttgc

SEQ ID NO: 34601 - DNA, 1693 bp, Homo sapiens
  chr19:5292628-5294321
  hyper
cgtggggtccacaggcccgagaggagcggaaacaaatggatggaggtaaacttcctgcgattttcgggggtggctaagagcagggattcctgccatgcaccccccaccgctacctgccccctctgcggtcctgttgcctcctccgccttctgcgaagtccccagtcacagctcccccgggctggcagcgaaggctgccccgcgcctggctccgcccccgggaggtgggggaggagagggggtggggggaggaggtcgggctgggggccaggcgggggaggggaccctgcggagcataacggtctggagttttccaaagtgcaagcgacgggcctgaatgggggggcgccaggcagcagcaggcccaagctggccctggagggcggccggcacggtcaggcccgcgctgggctgtggggacccccgtggtccccagcctcggagcctggagggggcgcgacaagagagacaaagcccggggcggcccgggcctcggggtggaagggggtcccgggcgcactcaccccgcggctcggagatcgggcccaggccccgcgaggcctccacagggcccgccgcagccgctccccgcgtccctcggtccgcccggagcgcggcgcgcagcgaagactcgggagaggcctcggcctggggagctcggcctgggggcggggcaaggggcggggctgtagggggcggggttgcagtgggcggggctgcaggggacgggccccgaggagggggattggggggcagggcggggccccggccggaagtggggcggggggaccagaggggagccccatctggaggcgcggagagcctccgcaggagtccatgaaacactgagcgaaggggcgccccagggagggcacgacccaagacccctccctcccgaagacgtctcacggggagcctctacactgctcctcgcttccccagctctgatcgtagccatggcaacgcatgaggaggctggatgccggacagggcggcggagggctccccaaacacacccaactacaggaggtcggagaaggggcagagttcccctcccagtctgggtgggaccggaggcacggtgatgggggcggggggcgtcccctcttccccctcttagaccagagggtaggggagaggtgcgggcgcagaggcttccctcccgctgggggtccaggggaatgaatggggggacaccgtggcagaggcccccaccctcgccacaagcctgaggagggggcggagagcacagggccagattggaaacagatggggccgccgtgccaggcccgcgacaccggagcagagggagaggaggagggagagggaggggcagacctgtccgggcggccaatccgagccagcgttgcgcccggggtgcgggtttgaaaactccaccggaggggcccggaatgtagaagcccagcgggacctgggggtctggggacgggacaggggcagaggccgggatggagacccaagggctcccgcgtctgctcccatccctggaaaaaacgcctctcttcccagcattcgcgctgaggacgaagcccgaacgccaacgccaacgggatgtcctgggcgctcagctgccatcagctgtgcttcctcaggccaccggccacggctctaggaggcagaccccaccatcacccccattctgcaaagaacggagccgagaaagagagagaaac

SEQ ID NO: 34602 - DNA, 746 bp, Homo sapiens; identical to SEQ ID NO: 27812
  chr19:56199006-56199752
  hypo

SEQ ID NO: 34603 - DNA, 641 bp, Homo sapiens; identical to SEQ ID NO: 27815
  chr19:56728484-56729125
  binary

SEQ ID NO: 34604 - DNA, 885 bp, Homo sapiens
  chr19:56988132-56989017
  binary
cgcaaagccactgacgctaagtggcagacagacgcccaggcaagtcacacagtaacccaaggctacaataaacgcccacatcagcctgacactgacacacgcacacactccagaaacacaaatcttcacagtcagcgtcacacacccactcccggcttcccaatggctccattgtttccttcgcgtgggtcacgcagcgatacacatccgcggtcccgacatagctccctcacacacaggcacacacggctcgcctcacacgcggcgccaacttcacacttgggcgcacaagccccgagaaccacagcagcgaagggcgcaaaccccacgccgtggcgggccgagaacccacgcaggcgcgagcccaccgcccacgcaagcacccgcgcagacgcccacgccatcgtggatgcgcaaacccacgcgcgccttggcaggaacgtccacgcagtggcgggcgcgccgcccacgccctcagacacacccacactctcgccagcccccttacctcggtcttcccgggctcagaccccggcggcgaccaccgagacagccgagcagggactcagcgcctgcgcactcccctccgggaccccgggaccgcgcgctgcaccccccttcacacacgcaccacgcatgcgggcgcgtggccccgcccccaaacaaggccacgcggcgtgcgctcacccgcctctcggggacagtaccaccagccccggcctgaggccccgacccctcagcgccacacgcacaagcgcgttcgcacgattggtgcaggcggacgcgcgaggtcccgcgcctgcgcacacccccgaggctggcacgcacaccggtctcctaggggactggcgcctggccctgcttttcatcctctcaggagatcac

SEQ ID NO: 34605 - DNA, 339 bp, Homo sapiens; identical to SEQ ID NO: 28904
  chr19:57610688-57611027
  hyper

SEQ ID NO: 34606 - DNA, 881 bp, Homo sapiens; identical to SEQ ID NO: 22852
  chr19:58238341-58239222
  binary

SEQ ID NO: 34607 - DNA, 894 bp, Homo sapiens
  chr19:617561-618455
  hypo
cgccttactcagagcagaaccgcttgaccaggaatctggacaggtcctgcaggatgggctcgctgtgcaagcggacaaactgctcccggcacacctgggcaggagtcagaggatccccaggggtgatcaggcaggctctgggcaccacccctacccaacgccccagtgtgggggccccacccatgggtggactgaggctcagactacgggggcacctggttcatgacggagacatcagctgcgtgagtccagtaacagtcgtgcacagagacgaaggtcaggcccttcctgtggcagagcggaggactcctgaagggaggggagctcacagggccacccagtgaccagcatcctggccctgcgctcagccccctccacttgaggtccagggaagcccaccctcctgcaggcctcgccccacccctcgccccgcccctccccaaacatcctgggttaggtatcagtacagggggaggaaatgttcccagaagcctcctcgccccacccctgccgccccccacgctgctgtgggagcctcagctccgagggcggctacgaggtcccctcctgccagggccaccaccccgcatcctgagcattcccagctcccgtggccggtagattctgctggaacgacctccacgtgctccagatctaaccacacatcgcggtgccaagaaatgcccagcaggaaggggcagcgcccatgctcggctctccctgtcgggccacaggaggggagctgccaggaccacctacattcggggcacacagcctcagggcctctacacaggccccacagacacagcagatccactctgcccagtccctgcccccagctagacccagccttgccagctgtgccctgctagccagaagacgcccctgggaggc

SEQ ID NO: 34608 - DNA, 944 bp, Homo sapiens; identical to SEQ ID NO: 27829
  chr19:6590260-6591204
  binary

SEQ ID NO: 34609 - DNA, 424 bp, Homo sapiens; identical to SEQ ID NO: 30102
  chr19:8115163-8115587
  binary

SEQ ID NO: 34610 - DNA, 685 bp, Homo sapiens; identical to SEQ ID NO: 10475
  chr19:8274278-8274963
  binary

SEQ ID NO: 34611 - DNA, 1431 bp, Homo sapiens; identical to SEQ ID NO: 24205
  chr19:883424-884855
  hypo

SEQ ID NO: 34612 - DNA, 314 bp, Homo sapiens; identical to SEQ ID NO: 24206
  chr19:9129007-9129321
  hypo

SEQ ID NO: 34613 - DNA, 270 bp, Homo sapiens
  chr19:939405-939675
  hypo
cgcgcccggcctctcgatacacttttggttccagaagtaacacttgacactcttcttgcagagaggaagaaaatggaacgtttacagggagccccgagtccctcccttgacctctagggcatgagccgcatgttctccaggcctttctctgcccactcacacccaggaatgtgacctgggaggtatctaacgtgtgatcttccgggcaggtcgggaggttcctcccgccgctgccttcgaggagctgtttatcttgggtgcgttcgcgtc

SEQ ID NO: 34614 - DNA, 384 bp, Homo sapiens; identical to SEQ ID NO: 24217
  chr2:10156251-10156635
  hypo

SEQ ID NO: 34615 - DNA, 751 bp, Homo sapiens; identical to SEQ ID NO: 28928
  chr2:105458972-105459723
  binary

SEQ ID NO: 34616 - DNA, 1981 bp, Homo sapiens; identical to SEQ ID NO: 28929
  chr2:105469232-105471213
  binary

SEQ ID NO: 34617 - DNA, 1472 bp, Homo sapiens
  chr2:105472225-105473697
  hyper
cggcggccatatgctgagccacgcgcaccagtgggtcacagccctgccccacgccgccgccgccgccgccgctgccgccgccgccgccgtggaggcgagctcgccgtggtcgggcagcgccgtgggcatggctggcagcccccagcagccaccgcagccgccgccgccaccgccgcagggccccgacgtgaagggcggcgccgggcgcgacgacctgcacgcgggcacagcgctgcaccaccgcgggccgccgcacctcggacccccgccgccgcccccacaccagggccaccctgggggctggggggcggccgccgctgccgcagccgcagccgccgccgccgccgccgccgcgcacctcccgtccatggccgggggccagcagccgccgccgcagagtctgctctactcgcagcccggaggcttcacggtgaacggcatgctgagcgcgccaccggggcccggcggcggcggcggcggcgcgggcggtggagcccagagcttggtgcacccggggctggtgcgcggggacacgccagagctggccgagcaccaccaccaccaccaccaccacgcgcatcctcacccgccgcacccgcaccacgcgcagggacccccgcaccacggcggcggcggcggcggcgcggggcctggactcaacagccacgacccgcactcggacgaggacacgccgacgtcggacgacctggagcagttcgccaagcagttcaagcagcggcgcatcaagctgggcttcacgcaggccgacgtggggttggcgctgggcacactctacggcaacgtgttctcgcagaccaccatctgccgcttcgaggccctgcagctgagcttcaagaacatgtgcaagctcaagccgctgctgaacaagtggctggaggaggcggactcaagcaccggcagccccacaagcatcgacaagatcgcggcgcagggccgcaagcgcaagaagcggacctctatcgaggtgagcgtcaagggcgcgctggagagccacttcctcaagtgccccaagccctccgcgcaggagatcaccaacctggccgacagcctgcagctcgagaaggaggtggtgcgggtctggttctgcaatcggcgccaaaaggagaagcgcatgacgccgcccgggatccaacagcagacgcccgacgacgtctactcgcaggtgggcaccgtgagcgccgacacgccgccgcctcaccacgggctgcagacgagcgttcagtgaagccagggcgcagagcgaagagggccgccgccgccgccgcctccgcagccgccgtcagcaccgccgccgcccctgccgccgccgccgccgccgccgccgccgctgccgccgccgcgccgaccctgcacctgggccgctccgggctccagcccaggcccatccgccgccctcccctccacccagagacaggcatgcccgcccttggaggagaaaacgcgggagaaac

SEQ ID NO: 34618 - DNA, 924 bp, Homo sapiens
  chr2:105488296-105489220
  hyper
cgaacgcagaaagaactcaacaactgaaccgccagtggaatccagtatctgggcaagttcactttattccttcgcaggaagagggtcagcgacggccagcgaaagtttcccccgctctttgaagagggaggtgacaagacctgccagaccttcccacgcgcgggccgcctgggttctggggctttcgtgacgtcttccctcatcgcgctccccacccccgaacacacacacacagacacacacacacacacactcttccttgctcgggaaacttggcttcaacctggctccccctttcaaaaccccctggagaacttcccctgcagggatgccctgcgcccgccggctgcgccctccctctcctcagccctgctcctcctgtccgctccccggcgttctggactcacccggcacggtccttccattccacatacagacaggaaaccggcctcttcgggacaacatttgaaaccacattttatcaacatcatcaaagaccagagcacacacttcgggctctgagctctggagcccgcttcttgcagaaaaccgggtatgggggaagggctgcaggggcgagaaatcctgcttccaactgcgatttcagctttcttatggaaatgaacgcgacggcccgttcgccccgagcctccctcccgttcccagcccctcttcagcttaccctttcctcccgctaacccccgccctcccggtccccgagttcccgcggcggccaggctggtggggacgcactcgctctgcgcccgggtctcggcgcgcgcggaaacccaggccgcgggctcccctccgccccgccggcccgcgtgcagcattaaatattcatagggatgctactttcttaaaggagaacctaccgcgcgggaaagttcacagccaaggagaggcacaaaagaaggtctccgc

SEQ ID NO: 34619 - DNA, 414 bp, Homo sapiens
  chr2:105719504-105719918
  hypo
cgatagctgattggctgcaggagagctgggggcgggtattcggtatgagatccacaggctgctgggaatgcaaagagccaggaagacaggaagaaaagttgatgggaggaggaggagacaccagaggggtcggctcgggtttcaggtgttcggggccacctcatatgagatgcttgaaataattggactgtgactcaggcgacgggtcagcctgctgacagatttgggaggctgctgcgtggaaggggaatttgaaacgtgggctggatcagcacggaggattgggcagggagaaggccaaggctcaagtggagaaacagccatcaagtttaaagtaggaaggagggaagagccagcaaagggggtggtgagcggtgataggaagacagcaagccaggcacagcggtcagggac

SEQ ID NO: 34620 - DNA, 888 bp, Homo sapiens
  chr2:105760109-105760997
  binary
cgaaagcgaggtgtgcgggcgggtggaaggaggaaggtgagggttcttcctagaggtgaccaggtgaggccgggagtcgagcattttcataagattgctcgcggacgcgggggtgggtggagagcatcacgattaagaaggaacacacgcacgcacacacacacctccttcctccttcccctcctcttcctctcaccccgccccccggggggcggtaccctagtctcccgggggaggttttggggcggaggaccgcggaggactgcgcccaggagggtggccggccgcgggaggaggacttggggtcgggctgctgcagctgggtggccagcgccgcggcggcccctcccccgctctccctggccgccgccccctcctcctcccgtcctcctcctcctctccctcctcccggtcccccatcctcctcccggcccccggcagctgcggctcggggagcagccggcggcgccgcggccgcgcagcctttgtctcgggccgccgggcgcgcggggcccagcgcaggcgtaagtgaccggtggccgggccgcggggggtcggcggggagcgggctgggggtcgcgggcgctccctgcagtggggaggccgggccggccagatcctcccgccacgcgtgtcccgggatgctcgggcggtgccggcgcgcgggggcgcgaggagagccgagcggggccaccgcccgggagggcgcgggacgcagagaggggctcggggcccgccgggccgcggggtcgggggagggggtgcaggctcgcggggcgccgcagcttggcgcccacagacgtgcggcttgggtgcaaatcctgtttctctgggcagaggccacgcggggacggaggaggcagagaggacgggctgtgatggagaaac

SEQ ID NO: 34621 - DNA, 200 bp, Homo sapiens; identical to SEQ ID NO: 16709
  chr2:105987680-105987880
  hypo

SEQ ID NO: 34622 - DNA, 900 bp, Homo sapiens; identical to SEQ ID NO: 28932
  chr2:114034594-114035494
  hyper

SEQ ID NO: 34623 - DNA, 1446 bp, Homo sapiens; identical to SEQ ID NO: 23182
  chr2:118981062-118982508
  hyper

SEQ ID NO: 34624 - DNA, 823 bp, Homo sapiens
  chr2:121199964-121200787
  hyper
cggccagggctgcttggcagggagcgccgggatctggggggaaagaaatcaagccccgaagctgaaggcttaattaggctgatatcatcccgcacaaatgttcctccgagaggaaggcttctgggcaccaaaattattttgtgattaaaagcgaaaaggaaggagaaatgattcggcctttggaggagttcggagggctgggggtggcagcaggaggctggggcgcagcgcagcgccaggggcgcgggacccagccaagctccccactctgcccccactgggacagagaggcgcaagagtccaccaacccctgccacttgtggcctttcctgactgcccagggcttccaacaatgtagaagagtgacagtaaatgtccaggtccctgcatataggtgtttctttaatctgcacaccaggccggaaaggccatgcacgtcgtcgtcatcccatttcgtagatggggaaaattagctcggagaggtgacatcttgcccgaagtcccacggctggtcagtggcaagtggacagtggcaactgcgcctggaaaacgccgtccgtggcgcggtcgcggcgccaggggcatgcctgacagccaccttctctcccgtgaccgccgggctccgcatcagggcgagccactcggctcgggagagcaggaaactggggagggccgagcctccggccacgccttgtcagccccggagcctccaccaatcccgggcccggaaagaccaggcccactgccggccccgcccagcacctgcgcaggtagcgcgcgcaggcgaaccgcaggcccgggcttctggggcctcacgctgcgc

SEQ ID NO: 34625 - DNA, 213 bp, Homo sapiens; identical to SEQ ID NO: 15804
  chr2:121549381-121549594
  hypo

SEQ ID NO: 34626 - DNA, 317 bp, Homo sapiens; identical to SEQ ID NO: 16716
  chr2:122187647-122187964
  hypo

SEQ ID NO: 34627 - DNA, 1016 bp, Homo sapiens; identical to SEQ ID NO: 27844
  chr2:127413347-127414363
  binary

SEQ ID NO: 34628 - DNA, 776 bp, Homo sapiens; identical to SEQ ID NO: 26734
  chr2:127534409-127535185
  binary

SEQ ID NO: 34629 - DNA, 572 bp, Homo sapiens; identical to SEQ ID NO: 23183
  chr2:127782995-127783567
  hyper

SEQ ID NO: 34630 - DNA, 350 bp, Homo sapiens
  chr2:130763483-130763833
  hyper
cgcagtcccagcgctccgaacgacggtgcctccggttgacagcaacctgagcggacccgcgcctaggccctccgccaggcctgcgctgcctcgccccgggagaggaagactgagcccggctcaggcggctggagcgcgcgggcccgtttcctttcagcgatcagtcccctggcgtcccagcagcgccttccccgcgatcgcgcgtccccagcgcacgtcgcggctgccagctgctgccctgaccgccggcccagacgtgcccgcggacgccgctgacagcgcctgtgccatggggctgcctactctggagttcagcgattcctacttggacagcccggatttcagggagc

SEQ ID NO: 34631 - DNA, 935 bp, Homo sapiens; identical to SEQ ID NO: 28937
  chr2:131721036-131721971
  hyper

SEQ ID NO: 34632 - DNA, 987 bp, Homo sapiens
  chr2:136874839-136875826
  binary
cgctgacctctgcacgaccccaaactctcgaactgcaggacccactcgcggccgtggggaagaggcgcgcttcggacggcgggaaggttttccccctcaaacccaaagcgcgcgggcggatcaactcctagctgctgccaccactcgatcccctcagaggatcggcgcggtgggtccacccgcctctcccgccctctgcctactgtgctgggagactggcacagctccgtcggccgcacagagtttaacaaacacgcacccagtgtcaagaacagtcaccaggcgcttaaccccgaagttaaagcgggcgcaatctcctcctgggaactcagcccaggcacgccgccctccgcctctaaattcagacaatgtaactcgctccaagacatccccgcttccccaaggaagagaccggtggtctgagtcccgaggcagcgcgcacgccttctctgcacttgtgcacagaatgttcttacgtttgcaaacagcgtgcaagccgccgcgcgcggcgggactcaagggggagacacatgcagccactggaacgctctttccagtcgtttctcctcgactcacagagaaaaagattccaatcctgctccccccccacccacccgcactatataggcatggtcaagaaaactcctttcggtgacccttttttggagtacgggtacctccaatgtcctggccgcttctgcccgctcggagaggggctgcgctctaagttcaaacgtttgtacatttatgacaaagcaggttgaaactggacttacactgatcccctccatggtaaccgctggttctccagatgcggtggctactggagcactcaggccctcggcgtcactttgctacctgctgccgcagccaacaaactgaagtttctggccgcggccggacttttataaaaacacgctccgagcgcggcgcatgcgccgctggggcggggagggagaaggcggggtgggggagaggggcagacgc

SEQ ID NO: 34633 - DNA, 930 bp, Homo sapiens
  chr2:137522848-137523778
  binary
cgagggtcgtgcgggtgcgcggcagaggcggtaggaggcggaggagaggggggagaaagagggggcggtggggaacagctgccggggtaggcgaggcgcaaggtggctccccgcggccccgcgccccgcggctctcggacgcaccaggcagccaatggctgcgcagaggtgtacagcagatggcgtctgactgcgccgttccttcctcctcctcctcctcctccttctcttcctcctcctccttctcttcctcctcctcctccttcagtgctgaggagccagagtcgccgccgggttgccagacgctggaatgggtggtcttccgacacacaccaccatctttcttgcgctcgggaagctcggggctcagcggctcccagaggttacggcggcggctctggcgagacgggtgagtgcaagcacgcggagccccgagtcggggatgccgggccccctggccggccgactggggcgcggggtggcagcgccggggaagggggcgcgctgccggcgcagactttgctctttcctcgccggacagccatcgtcgccccttctcccagccagacgcgggaacttggaagcggatcttctcggacgcctctggcttggggctgcgggaagcgtgggctgcccggggcgcagtgtgcggagaccctctaggcgggcggggacgccccacgcggcgacctgagcaccgacctcatgcaacgggaccgaaccttgggacccgggcagcaggagctctgttcccttcacctccagcttggtttgagggatactgatgaaggaaaccgggggtttcccgtcctgcgcggagagcctcggcgcccaaaatcgaaaggccgggagttgttctgcaggctttgcaaacaggttgactgagggtttcctttcccgtagcgctgactgcgaaatctgtgcataggc

SEQ ID NO: 34634 - DNA, 2594 bp, Homo sapiens; identical to SEQ ID NO: 22862
  chr2:145273332-145275926
  binary

SEQ ID NO: 34635 - DNA, 428 bp, Homo sapiens; identical to SEQ ID NO: 30119
  chr2:145277508-145277936
  hyper

SEQ ID NO: 34636 - DNA, 1051 bp, Homo sapiens; identical to SEQ ID NO: 25433
  chr2:145281217-145282268
  binary

SEQ ID NO: 34637 - DNA, 1792 bp, Homo sapiens; identical to SEQ ID NO: 27851
  chr2:149632592-149634384
  binary

SEQ ID NO: 34638 - DNA, 967 bp, Homo sapiens; identical to SEQ ID NO: 23187
  chr2:154334805-154335772
  hyper

SEQ ID NO: 34639 - DNA, 709 bp, Homo sapiens; identical to SEQ ID NO: 25435
  chr2:162283380-162284089
  hyper

SEQ ID NO: 34640 - DNA, 889 bp, Homo sapiens; identical to SEQ ID NO: 31581
  chr2:172947590-172948479
  hyper

SEQ ID NO: 34641 - DNA, 1821 bp, Homo sapiens; identical to SEQ ID NO: 30130
  chr2:172948905-172950726
  hyper

SEQ ID NO: 34642 - DNA, 845 bp, Homo sapiens
  chr2:1746460-1747305
  hyper
cggctccattctaaaagtccactgctgttgagtgagatgcccccgagtcgtccggcctgggctgaccattcacgggctctggaaagaaagccttggtctctctgcggaggaggagaggaactcgggcccccgccccgccccagggcctccaggaagcagcctgcaaactcggcgacccctgggagccgtggtctgtcccagcactttgtttcggaggtaggcgcactggccgcccacttcctgaattgttcactcaatttttttacaacttttgcagactctttgctggtgccaaaaagtcctctggctcagctaagaaacgtgaaaactatttttggcatgcagaaaagtcgctacaggactaaattagagtcggcgcctgaaacgcagcccgcgttcacagatcccgaaaatgttgaatccgactcgcttcagaacacaggaggcctgcagcgaactctggcggcatctcggtacctggagccgcggggcggagggatggggattcctgctgtggagaccgtgacgcgggacggcccgcaggacagggtgtcaaccccaacgcaacgcatccggttaaacgtatagcgcaactgcgaacacgctcgcgtggattagaagcgaaagaagagaaatgcccgaggcagaaacccgctctgagtcccggctccatctagacccgggctgccccgagactaccgcgcggcccctctcgggaaccccggccgcccggctcgctccgggcgcaggaaaagcccctgagaagcgcggggcccccaggacaccccaggagaggacgctccgggcagatgcgggggcactgggagcgggggcgccgcggctgc

SEQ ID NO: 34643 - DNA, 1216 bp, Homo sapiens
  chr2:1747628-1748844
  binary
cggaggaggggccgcgaaccagggggaagcgggaggccggcggagcatgagagggggcggcgggaggcgagcggggggagccccggaggctccaacaacttcccagtcctgcggggattccgagttccgaacaaaggcggctacgaaggccgcgcgcacagcgctctgttccgcccctcggcgtctcccgcagggcgaacaaaggcccagcgggtccccgcgcccaggtccccccacgtcccccttcggaggttcccttctgcgtcccaagtccccaggccccccgcgcgcccgatgccccctccaccctccgcgccccccacctccgatcacccctgcgctcccggatctccacgaagccccggaccccgcgcccccggcgtcccccgcggcactcacaggatggaggtctgcggcgccacggcgggcacggcctccagcagcagatgcatgcagcgcacggtggtgcggaagcacaggcagcggctcggacaccctgcgcccggcttctgggccaccacggccagcgtcccccaggcgcagaacagcacgagcgccaacaggcagcggcgcccggggcccctggagcgcttggccatggccgacggcgcggacggacgctcggacgcacggagccaccacggccggctcccgactgcgcccgcccggccgcggcccacgtcccagctgtgcgcggggggcggggggcgccagctgtgcacatgcgcgaggctcctcccggcccctctgaatccccgagggcggggcggggcgagaacccggggccccagcgtccggcctgagcgccctcatcccggtggggcggcccgcatggccaaggcgagcgctcgggggcgcggaggagagcattggcacccctgattctgcgctcgagactcggggctcgggaccctggggcctacgcgaagcttctccacttctcttacccgtggtttctgcctgcgctcactacgggttttttagttggcgccttaatgtttgtaacacttttagagcgcttgctctgatccgggcacgattccaggcgcgcaggcgcgctcctctctttctccttctccctacccgcaaccacgtaggaaattatttaacgttccaaaaaagcccctcattccttttgaggaaactgaggcccaagccccaaagcgcacagcaagggagtctgcgggaagattagacccaggcggtccggctcccc

SEQ ID NO: 34644 - DNA, 1355 bp, Homo sapiens; identical to SEQ ID NO: 25439
  chr2:175190730-175192085
  hyper

SEQ ID NO: 34645 - DNA, 993 bp, Homo sapiens; identical to SEQ ID NO: 24234
  chr2:175198845-175199838
  hyper

SEQ ID NO: 34646 - DNA, 2850 bp, Homo sapiens
  chr2:175199847-175202697
  binary
cgcaagcgcggcaacgcatttgcttgttttaaccggagtaatttttcgttatggcttctggggtctgcggctccggagaaactgttgctgctagactgcagcttcagcttctattagcactttccacatttctgggactgatttttccccaagtttttggaacccagaaagatgcctttgcaagaaaaggccttcttaatcaagtcctttttcatttggtttcaaaaaaaagctagaggtttcttttcttcccctcgtgatttataccccatcccccgcattgctttggggattttgttgcaattatgcgacaatggtgtttccagaaaacagtcttaatcgttttgcagtccatctagtcacgctaataaacatttacatttccgcggctccccaattcgcccatgactttgaaatctgtctctggccgcttatcctcggattattgttttcataatcgctgtttttgtgtgtatgtaaactttaaaaccaaacgttttctattaaaaaagaaaagtcaagtcgtagccaccctgggagagctgcaagtttcgcccgtccctggcagctgtttcggccgcctccgccctcacccggtgtttgttgtctctggtctctgtgtttaccttcgcgcttcaccccgaagggcgacttggggtcttctgggagatgagccggtttacggcgacaacccaagtccggttgtaggcagggttgcagcggggaacacggaggcatctttgatttatagcctcagcgaagtgcaactttccggcgcctggaccttcgcccgggtgatcgcccctgctccgcgcccggtgcggcgactcctccgcgggcgcgtggggaggaggcgcgaggcggggagccaggaccccccgggagcagccgcaggggacgaggctgctcacgggtgcactttgtttcttcccccacttcctcttgccctcctccttcttgctccctcccccatcccacccactctaggaagagccgcgcttcggaacgaccccgttggccatgctggcggcgacctgcaacaagatcggcaacacgagcccgctgacgacgctgccagagtcgagcgccttcgccaaaggcggctttcacccctggaagcgctcctcgtccagctgcaacctcggctccagcctctcgggcttcgcggtggccaccgggggccgtggctcgggcggcctggcgggcggctcgggcgccgccaacagcgccttctgcctggcctccacgtcgcccacgtcgtccgccttcagcagcgactacggcggcctcttctccaactcggcggctgccgcggcggcagcggccggggtgtccccgcaggaggcgggtggccagtcggccttcatttccaaggtgcacacgacggcagccgacgggctgtacccgcgcgtgggcatggcgcacccgtacgagtcctggtacaagtcgggcttccattcgacgctggcggccggcgaggtgaccaacggcgcggcgtcgtcgtggtgggacgtgcacagcagcccgggctcgtggctggaagtgcagaaccccgctggggggctccagagctcgctgcactcgggcgccccccaggcctcgctgcactcgcagctgggcacctacaaccccgacttcagctcgctcacgcactccgccttcagctccacgggcctcggctcctccgccgccgccgcctcccacctgctctccaccagccagcacctgctggcccaggacggcttcaagccggtgttgccctcctattcggactccagcgccgccgtggcagccgccgccgccagcgccatgatatcgggcgccgcggctgccgccgccggggggagctcggcacgctctgcccgccgctactcgggccgcgccacctgcgactgccccaactgccaggaggcggagcggctgggcccggccggggcgagcctgcggcgcaagggcctgcacagctgccacattccgggctgcggcaaggtgtacgggaagacgtcgcacctgaaggcgcacctgcgctggcacacgggcgagcggcccttcgtgtgcaactggctcttctgcggcaagcgcttcacgcgctcggacgagctgcagcggcatctgcggactcacacgggcgagaagcgcttcgcctgtccggtgtgcaacaagcgcttcatgcgcagcgaccacctgagcaaacacattaagacgcacaacgggggcggcgggggcaaaaagggcagcgacagtgacacggacgccagcaacctggagacgccccgttccgaatcccccgacctcatcctgcatgactccggcgtcagtgccgcccgggcggcggcagcggcggcggcggcagcggcggcggcggcggcggcggcctccgcgggaggcaaggaagcagcgtctggccccaacgactcttagaggccgggcgagaggcgcgagcacacaagcgagtagagacaccgagaacgaacgagaggttcggagggcgagcgagcgggaggcgggagggcaggggcttcagtgacgcccccagggcccgggctgggcgcgaggtggagccgctcagggctcccgggctgcggttcgcccgctgtgcgaggagctcccctctgccttccgcgcccggataagaatcgaacgcgtggtccggaaacaaaagcgaaccatcctccgacacaaacactttaaaaactgtactcccagacgtacacatacaccggagacctacaaccacaagcacgcacactcgcgcgcgcacacacataccactcgcccaaacttctcgagcgaagagcaatacatagaaaggctccctctttgcccactctccacctccctccaacaccc

SEQ ID NO: 34647 - DNA, 1997 bp, Homo sapiens
  chr2:176944127-176946124
  binary
cggctttgtccttcccggggaaggcggccacatccctacccgccttgctcctgaacgtagtaaacaatctcacaaacaaccaccgctgcccacgctctccatccgtcctcccggccttatcagacctccgttctcccgcactcttcgggcagggtccctaataagctcaggctgaaagaacgtttgccacctcccccaccctcgttgaaagaaaaggaagaaaaacagcagcagcgagaaacctccggggcgactcctcccccgcccccaagcaccagcgcacagcatccccctctgtctttgttgtggttctccgttgcttcgggccacgccgttcagccaagcaacccggacctgagagtgcacagccaggactagcttagggggcgaggggttggtctttgggaaaccaagcgctcaggacagaggtggaaagtgggtcccgggagccagaaaagagagagaagggcagacggctgggtggcaaatacaaaaatagaaataatttagggggatgcccgccaggcttttgcgcctgctccttctcccccaattcggagcaggttcccttcggcctcccgcgccccggggcgccccctggcggcagcggcagcagcgggcaacgcgcggagggctcagggggcgcacaggggactcccgggcacactcagagaggcgggcgcggccccctggcggtggcgacgtagttatctggtgagcggagcctcgtccctctggtccggcgggctcacggccgtcttactaagcaccgcggccgagtagggcaggaagccgctctcggaacgcggcgccgccgcgctgcagccgaagtccgagcctcccccggccccggcgcccccgccgccgccgccaccaccaccaccgccgccgccaccgccaccccgggaacccagggctgcggcagctgctgccgcggctgccgccgccgactgactgctgtggcaactgaggcacgagcagggtgcagagccgccgctggggggcgcgccggccgccgccgccgaggaggccgcagccgctgcggctgccgcggctgccgcggcagaggccgcgctgttgagccccgcggcggccgcgggagcctggtagagaccagggtggcggaagctacacagcagctccggccgagagtaggggtgcgagagggcgcggaaggtgtccagtggccggatggaagtagcgaagggcgacgaagccgcggccgccgcgcctgaggctgcagccgcggccgccgccgccgtgacgcccacgtgcgggtagtagtgcagcggcacgtgcgagtggaaggggtagggcaggcttccggtggcggccgcgtgcgtcatcatgtaggtgtagaagctggggtcggctgggtgcggccaggacatggccaggcgctgccgcttgtccttcatgcgccggttctggaaccacacctgcggggagagacgcgccgcagcctgggttagggagcgccccgtgttcccagctcctgtcccaggacctctgccccttccggacctctgaatggcttggtctacttctctccgaccaagcccaaccccgagtaccctgtggtctcccagctgggaaagtgtggacggcagtgtgtggaccgccgtgggcacaccgtcctcaacgaagagggtcctctcccccgcgtccggctgctgctgctcctcaggcttttattcccttacttcttgctgcacttttttgtcccaatccaacctttcctctccctcccgccacccaccagtgccggtctcgctgagcacccgtctctcaatcccaggatttgtacggggattctgggcagcctttgaagagaggctgccgctcagcttttctgagaggtcgccgcgcgaagtcttgagccctccgaactgcaaggacctgcccctaggggcacgggtccgattttgatattgaagggatgattttgttggaatcgtttgccttaaatgagtgggtagagcaatgtctccataaac

SEQ ID NO: 34648 - DNA, 1375 bp, Homo sapiens; identical to SEQ ID NO: 30140
  chr2:176957256-176958631
  binary

SEQ ID NO: 34649 - DNA, 871 bp, Homo sapiens
  chr2:176972103-176972974
  hyper
cggccagagcgcagccagcatgtacctgccgggctgcgcctactatgtggccccgtctgacttcgctagcaagccttcgttcctttcccaaccgtcgtcctgccagatgactttcccctactcttccaacctggctccgcacgtccagcccgtgcgcgaagtggccttccgcgactacggcctggagcgcgccaagtggccgtaccgcggcggcggcggcggcggcagcgcggggggcggcagcagcgggggcggccccggcgggggcggcggcggcgcggggggctacgctccctactacgcggcggcggcggcggcggctgcggcggccgcggcggccgaggaggcggccatgcaacgcgagcttctcccgcccgcgggccgccggccggacgtgctcttcaaggcgcctgagccggtgtgcgctgcgccggggccgccgcacggccccgcgggcgccgcctccaacttctacagcgcggtgggccgcaatggcatcttgccacagggcttcgaccagttctacgaggcagcgcccgggcccccgttcgccgggccgcagcccccgccgccacccgcgccgccacagcccgagggcgcagccgacaagggcgaccccaggaccggggctggtggcggcgggggcagtccctgcaccaaggcgacccctggctcggagcccaagggggcagcagaaggcagcggtggcgacggcgagggccccccgggagaggcgggggccgagaagagcagcagcgcaggtaggcaccgggtactgggcaagcggtgggcccgggggccgcgggggagggggggggggcggaggcctccctctgcttgcgcctttttatgtgctactttataagcattc

SEQ ID NO: 34650 - DNA, 2250 bp, Homo sapiens
  chr2:176993479-176995729
  hyper
cgtaactttgaggcctgcgcgctctctcggcagtaatttcacaggcttggcggaggaagtaggatcgttagcataagatgggccgcctgcagctgcctggaaccggcgcgatctgaacgccggctgggaggctcctggggggaacttgcggtcgtctgccctccgcactcctccgggaaccgcagccggccctggttcgctgcgcgccggggctgagacccgggagccgcgtcctgcccgaggaaatgtcaccctccccagcgcgagccctttttcccgcctcagaacgtttctgtccgctcttctatttactctctcagcaagcctaatgccccctcctgcattcttcagcctccccctgcgcccagggctgacgtctatcaagggtgaaatgatggaaactatattcatgggcatgatttccattaaatatcaattaacctgagagcctcggccaggcttgcggtgcgtcaagggtaaatgtacatctcatttccacagggcccgctcggctggaaaagaaaggctttgatttgctttgataacgccaggatctggggccacactcgcggcttttaattaaaccacttcgatatgccccaactcaaatgcacggtccggtccgtcaacacctcttgtccacgttccctgggctgcacccgcgtgtccagagctgcaaaagccacgggcaacctctgcttttgcagccaggggctcggggaggcagtcatttgctccgcagcctcctgggagtggcctccttggctcccccaagtctaaggctccgccgcggcccctccctgccggctgcgatccgcattcccgcggccccggggcacacggagcccttggcagtgcgtctttatgggccccctttaaggccggcggaggcatctcgggccgggcgcggcgctccgtccgtcggccgtagcgactgaactgcgcgcggatccctccgcggggctcctcgtccccgtcacgctgactttccgtgcagtgctgtggtgcgaaaatgcctcgccggtgcgcaccgggtcggcagcctcggcggcgggggcgagattggcgggaggggggcgcggggggggcgcggtaagaggtggcggcgggcagagggtgttttttttcttttccctccagagccggggtttgtaaaccgaggccagagtgtccccgtgggccgagcgcacttttttcttgtccgggtgcgctcagtcactggtgcctgagaggaaacagtggaggcagcggggcaggtcgcctggggcgtcggcgattatattgcggccgagccggggcgcgccgggaaaggccgggagggcggcggcgcgcgggggctgggcgaggccccgcgacccgcgagggaggcggcgcgaagccgaggcggcgggcgcaagagccgggcatgagcgcccagtagctgagcgcccgcggctgcctggcctcagaagcgacgcgcgagcgcgggcgggcggcagcagcgacgtagcccggcggtcccggcggcgagagcagccgccccacaggcccccgcggcagtgcggccgagtcgaggctcgctctctggctgcttagcgccgcccgcccgcccggggccgccgccgctgacgccccaatgagttcgtacttcgtgaacccgctgtactccaagtacaaggcggcggctgcggcggcggcggcggcgggcgaggccatcaatcccacttactacgactgtcacttcgcgcccgaggtcggcggccgtcacgccgccgccgcagcagccctgcagctctatggcaacagcgccgccggcttcccgcacgcgcccccgcaggcgcacgcgcacccgcacccgtccccgccgccctccgggactgggtgcggcggtagggaaggccggggccaggagtacttccaccccggcgggggcagcccggccgctgcctaccaggccgccccccctcctcctccgcatcctccgcctccgccgccacctcccccctgcggcgggattgcctgtcacggggagcccgcgaagttttacggatacgataacttacagagacagccgatttttacgacccagcaagaggccgagctggtacaatatcctgactgtaaatcgtccagtggtaatattggcgaggacccagaccacttaaatcagagctcgtctccttctcaaatgtttccgtggatgagaccacaaggttgggatgcattttttttttaagaagggagagggggagaaatctgctttcatctcac

SEQ ID NO: 34651 - DNA, 953 bp, Homo sapiens; identical to SEQ ID NO: 25441
  chr2:177001081-177002034
  hyper

SEQ ID NO: 34652 - DNA, 1050 bp, Homo sapiens; identical to SEQ ID NO: 30143
  chr2:177042492-177043542
  binary

SEQ ID NO: 34653 - DNA, 1742 bp, Homo sapiens
  chr2:177052607-177054349
  binary
cggaggggaaaatctgctaaaccaccccacaaggcagaaactttatcaaaatctggcactacaacactggccctcatcacgccgccacaaattgcgagggatagaagaaagctgcaaagtcacgttaaaaggaagcctagtcaaaaagtgaaaattttgtcccgccctaggcacacagcactcacagcataagatgtagttccatgagtcctaggaaagggggaagaaaggaaaaaaccaaacatctgctctaggtttagaagagggataacatcagcgccaagcaaaccgaaagcgcagaggactcagaagaggggaagaggaataactttatctgtcctggaggtgggcgaagagcagtctccaccggccgcgcgtcacgctcccatttaaccttttccatgccgcgacgcccacactccgccctcgagggactagccccccccacgatccagagcagaagcggctcgccccgctgcatccacgggccctcacccaagcgtccagtcctgcctttctccccccacctcgcccaatacctgtccgagagcaggcgttctgccctctcgccccgcccttgcccaggcagcccccggtcgcgacggctctcctcggggctcgggggcgctgggcggcggccctgggctgctttggctaacttggctgcggggcaggcgcgaggagcggcgcgccgaccgggccgagcggagaggccgcccattggccggccagcgccacgtggccgcccccgccggtatattaggccactatttacctccggctcactcgccatgggttggagagggcagctcgggtagagagggctggcggagcggcgcagacggcggcagtcctgctcagcctctgcccggctccgtactccggccccggcctgcgccctcagaaaggtggggcccgaaccatgagctcctacctggagtacgtgtcatgcagcagcagcggcggggtcggcggcgacgtgctcagcttggcacccaagttctgccgctccgacgcccggcccgtggctctgcagcccgccttccctctgggcaacggcgacggcgccttcgtcagctgtctgcccctggccgccgcccgaccctcgccttcgcccccggccgcccccgcgcggccgtccgtaccgcctccggccgcgccccagtacgcgcagtgcaccctggagggggcctacgaacctggtgccgcacctgccgcggcagctgggggcgcggactacggcttcctggggtccgggccggcgtacgacttcccgggcgtgctggggcgggcggccgacgacggcgggtctcacgtccactacgccacctcggccgtcttctcgggcggcggctctttcctcctcagcggccaggtggattacgcggccttcggcgaacccggcccttttccggcttgtctcaaagcgtcagccgacggccaccctggtgctttccagaccgcatccccggccccaggcacctaccccaagtccgtctctcccgcctccggcctccctgccgccttcagcacgttcgagtggatgaaagtgaagaggaatgcctctaagaaaggtaagtccgcgggccttggatggggccacctggggttggggacggagcctcccccgcggaaatgcgctgggagcgtggtgtcgctgcctttccagacagcggtttgggttttgtggaggagacgcgttcccgggcgaattccatggagtctgcctcgagtacagattc

SEQ ID NO: 34654 - DNA, 724 bp, Homo sapiens; identical to SEQ ID NO: 26765
  chr2:17719692-17720416
  binary

SEQ ID NO: 34655 - DNA, 1763 bp, Homo sapiens
  chr2:18058929-18060692
  hyper
cgtatgctgcgggtaggaacccagggaacactgggcgccttagcttggagcagctggctccgaggaattgttccacgtctgcacaacttaaaaatctgcagtttgggggcgggagggggagcgcgggggtgggtcccgaagcgtcccatttctcctcctggctgttaactgagcgctctcgctcagtgcagcgaggccagcgatgccttctggaccacacgctgtcctcgccgaggtcctggtttgttcctcaacgtcggctgaaggcatcgtcccctgacttcctcttccattcgtccttccgaaaggggacccgactggttcctcttctacatatgaggcgcatctgcttggtgcaaatgtccaagcacctcttctgactcggtgagtggaggaataagacaaagcatcttgttctgcactgtgcctgagtcttcaggcagcgggaccgatggcaaacattggcaggaactggagctatatgtactctccttcgcactttgttttaaaacaagtttgggcctcgcgatttcctgaggaaatccaggcaaattagcaaagtgtcgcttgggccgcgactttagaaaggcggttgccccagccgccggggccgcgggggaggtcatctttttcccgcagggccacggcgcttccggcccaggagggcgcgcaggtgggaggcgcggggcgcgctcctggtcccacccggacagcgcctgccgctccggggtgactctgcacttgggcctgggcgggggcgcgcggccggcagggcagcatctaggtctatgggtctgtccgcctgtctggcggtcggagccccgcagtcctcagccgcccgcgccctcggcccggggcgcccggctgcgggcccgaagcgaggggctggcggagctgcgaccaatggggcggcggccgagcggcgggccccgccccgtcccgtccggccccgccccgcccgcagctcccgggagcctcgctctagcggggcgggaccgacggacagaccggccgacgcgggccaccccgctctcctcgccgccgcggcggcaggcgcggggccgcgccgcgaggcctgatccctgcagcgcgggcaggcggcgtcgcagagcggagctagctggatgcgtccggactcctgcaggtacctggctggcgtccccacctccctgcgcgctccggagacttctccgggcgaccctgcaactttaccgcgccttcccccaccttttgctgccccagtctcctgtggtccaggtcgcgggtgcacgaccccgagggtctacggccgcagagcactttccgtccttctgggcgtctggcccgcggcgcccgcatcctctggtccccagagcccgccgtcgctggagccctaaggctccgcctgttgcgtgaactgcgggctgttgaagcggtggctgggttgatttgaaagcctcggggaaggtatttaggatcagctttcggggagtggggtgggctatggtcagggggaggaccacctggaggcgggagaatcgatgagccgaagaaaggcggcacctcgcgtaggggcatccccggggcgtttccttggccgggaagccgttccttcccttcctcgagaggaggcgctttcctggcgcttgtaaatgcttcccgggccgtctgctccgccttctttgtcattcctcccctcccctttgccctgcagctgtgctaggcgccccgcgacagttgcagggaagagcgaacccagggcccttgctctcgtgcagcgctgc

SEQ ID NO: 34656 - DNA, 1776 bp, Homo sapiens; identical to SEQ ID NO: 22868
  chr2:182321353-182323129
  binary

SEQ ID NO: 34657 - DNA, 1173 bp, Homo sapiens
  chr2:185462630-185463803
  binary
cgcatcgccacaactaccctcccccgaaactatcatcaacacaagcacttacggtatctacaaatgtgtgggagcaggggtgggtggggggcatattttctttcctcgcctttccctaagactgaacagggtaccagcctccataccaaacacacattaaataacaaaatcaaataagccaaacccagtggatagcaattatcttgagaaagaagccgctgctggcaccggcctggattcgctgcagtcggaagcgggtggctttcggtattgaattattaatttatttatccccctcgcccccacccccacgccgactgccaggcaagaaatcgcggcctcttcgcttcctctccgcccccaccttccaggagtctcccacttggcggtggccgtcgcgtccccggccctctgcggcagcggcgccgcgcggggcgctcccactcgcgctcgggctggcgcggccgcgggtcccggcggcggggtgggcgggggaggcagcgggtgacagatgtactcctctgacagctctcagtatcagcccagtggctccctgccattggctcagtgcaatggaccggcaacgccgctcactataataacactcatgcctgccagcagcagcaactccgagtgcaggcgccgagcgcgggggatgctgccgccgccgccgcttctgctgccgcgcgggcggctcccgcagccccgctccgcccggccaccgcgcgggcactgactcccgctcggttccgtttcgccggcccggccccctcctaggctggaatcctcccgcggggctcgtcgtcccgacgcgaatctgaggagaaacaggagcgagagactgaggggagagcgcggcgagcatgcggaggcgggggagcctcggcgctcaccacagaggggtgcagtgagccagtctccagaggacgtgccgggggtggctgcgtgccctcgtggcgggttcccagcccaccgtcgccggccccggcgcgctgcggctgtgggcgcggggtgcgtggaagcggcggctgcggcggaggaggcggcggctgccccatggagtgttactacattgtcatcagctccacgcatctcagcaacggacactttcgcaacatcaagggagttttccggggccctctcagcaagaacgggaacaaaactctggtaatc

SEQ ID NO: 34658 - DNA, 110 bp, Homo sapiens; identical to SEQ ID NO: 16740
  chr2:206896324-206896434
  hypo

SEQ ID NO: 34659 - DNA, 1281 bp, Homo sapiens; identical to SEQ ID NO: 24240
  chr2:207139040-207140321
  binary

SEQ ID NO: 34660 - DNA, 1355 bp, Homo sapiens
  chr2:207307880-207309235
  binary
cggctggttgttttctcccgatcatccctgtctctggcctggaaacccccgtactctctttcttctggcttatccgtgactgccggctccccctccaccgcccccatcttttgaggtaccacccgtcacctccgatgctgcttgggctgctgcatcactctgctgctttacccccttccccgccccccaacaaagcatgcgcagtgcgttccgggccaggcaacagcagcagcacagcatccagcaacagcatcagcacccgaagccccgctcgggcgcgctctcggggggcggggcgcacgcccgctccgcgcgtccccgcgccgctcgctcccgcgcgtccccgcgccgctcgctcccgcgcgccgcctcagcatcctcaggcccggcggcagcccccgcagtcgctgaagcggccgcgcccgccgggggagggagtagccgctggggaggctccaagttggcggagcggcgaggacccctggactcctctgcgtcccgccccgggagtggctgcgaggctaggcgagccgggaaagggggcgccgcccagccccgagccccgcgccccgtgccccgagcccggagccccctgcccgccgcggcaccatgcgcgccgagccggcgtgaccggctccgcccgcggccgccccgcagctagcccggcgctctcgccggccacacggagcggcgcccgggagctatgagccatgaagccgcccggcagcagctcgcggcagccgcccctggcgggctgcagccttgccggcgcttcctgcggcccccaacgcggccccgccggctcggtgcctgccagcgccccggcccgcacgccgccctgccgcctgcttctcgtccttctcctgctgcctccgctcgccgcctcgtcccggccccgcgcctggggggctgctgcgcccagcggtgggtatggccccgtgccctttgcgttggctttcccgcggggccctgcagaggaaagcgaagggcgcgcgggtccgtgtgctccgggcttgtccccggctcggcctttccttccctccctgcctgtctttccacccttctcgttcccaaacccccattcatcccagttcacttttggaagtccatttctgttgcattcgcgaaaaacccattccaattcttgttggttccactgggaggtgtttagtggatcctgggtccctcagcgatctctgtgcaacttgcggaggggcaaccagtggatgggaaatacagcgagggagcaagttgctacttgcgtggtggaaccttaatgtgaatgcggggaggatgtagtgataatagtggtaatgggctgtttcctcaaatttcgtatccggcgcattcagtgc

SEQ ID NO: 34661 - DNA, 185 bp, Homo sapiens; identical to SEQ ID NO: 16742
  chr2:216274340-216274525
  hypo

SEQ ID NO: 34662 - DNA, 705 bp, Homo sapiens
  chr2:217558872-217559577
  binary
cgaataagagctcagaatcagtattcggacagagtagggggagggggcgggcaacgtgtgggtaggaggaaggagaaagagcgaaagctgggatagactcggctagacagttcccccgggtagcaggatcctccagggctccaattccggggtgcaaggaccctccccgactactcccgagctgcaccccagctcgaagccacttgctgcgcaaagcgcgcgggcccagccggtctcgtgtcccccgcccgtgcgccgcgtaactgactggcacactgagcgcgctcaccgatcttgacttgctcgcggtagctcttttcgttgaggcaaaccccgcggccgtgcagcagggcgtgcagcggcttctcctcgtcctgccgggggaggcagcgcagcccctgggcgcagcgctcggtgtagacgccgcacgactgcccctcggccagggcgcaggtcatgcagcagccgcagcccggctccttgaccagctcgcagcccagggggctgggggggcacatggagagggctttctcgtcgcagggctcgcagtgcacgaaggagcccaggctctgggccggccccgcataggcggccagcagcaggaggaccgcggtgagcaacaccatcttctcttagtcgccccctttacctcggggtggggcaggagagcgagagtgcagggataaaggggccaagagggccccc

SEQ ID NO: 34663 - DNA, 1600 bp, Homo sapiens; identical to SEQ ID NO: 27862
  chr2:225906006-225907606
  binary

SEQ ID NO: 34664 - DNA, 1255 bp, Homo sapiens; identical to SEQ ID NO: 27864
  chr2:232790030-232791285
  binary

SEQ ID NO: 34665 - DNA, 798 bp, Homo sapiens
  chr2:233367692-233368490
  hyper
cgggagggaggtttatccgtaggagtcagcccagttgggtcaaactaaggacccagtgcagaccccgaggcccagagacacaggtgtgcgcacaaacacgcactctgcggaaggccggggcgggcctggccgctgcgggactcctggcccggcgcccttgacgtcagcggctgggccgtgacgtcacctcaccgcccccgccgcgctcccgcccccgcccgcgggcactcagtctccgctaatggcaggcgacggggaatggcacatctgtcttgccgggaattagttcattgaatcaggcggcccgagctgcggcagcgaccttagccctggccccagggaggggtctgggcgggcggcgtgggggaggttcaggctggagggctgagtgcggggacgggaggaggggactcacctggactcgcgagggggactgagcgctctccaaatataggtcaatgtcccgctcagcctccctcccccagcaccgtgaggaccgaggcctggggcctggcgcccgcctggtggacctcgggggcaggctggggaccgggcccctgcgggacgcggcgcggcaggacgctccccgcgcctttctttctgcacctgcccctcggggtgggtccccctctttaccctcgcttccccccgcgggtgccgataaaggcggctaattcccgagcccggggagggagggggcgactgttccagtcaacacttccccgcgctcttccccgaccctcccagagcgttcccgctgctcagggcgaggagcagctgcggccagtttgtcctagc

SEQ ID NO: 34666 - DNA, 995 bp, Homo sapiens
  chr2:234372729-234373724
  hypo
cggacctcacccccctgggcctcgcgctgatcagcagtgcacactctccatttctctctccctccctccgcctggagcagcagctggatccgcctcagaaggagcagctggggagtgctcttgccgagatggaccgacagctcaggaggctggcagacaccccgtggctctgccagtccgcagagcccggcgacgaagaggtatgtggctcatagggctgtgcctgggtctcccggacatggtggctctcgcctgaagtgcctgtgttccttgtgacccgtgtggctctgggatcaagatcgtgtcgctccggcagcccctgaggggccttctccagacttcgctattaaaatgctctttaaggcagggagggacagcaggtaggaaggagttctgggctgggattaagagtgccccttgaggaccagggacctgttgtcctctgaaacagaactgcagggcttcctggacagtgggtagaaggaaggctgagcccagccccacagcctcccccgagggtggagatgtatcatgggataaatggcagccttttgggatcccgctgtggacagggcgcagttggtgtgcgccactccccactcacactctcttcctgtgtgaacagaaagactccagctcgtcgcaggtctgggagggacccgaggacgcagggcatagcggaccctggggtggagtcacattcttctgcagggagtgctggctgaaggagccctggagagggccgtgtctggacaaggacaaaccccagcctgtctcttggcttccctgcttcagagatagaacacagaggggccctgaggaaagctcatcttgggcagtacagttgcagaaggcaaataactgcaagacgccaaacctgggcacccctgcccagtggggtttgtgagacctgtgggcagcagtaaggcgaggggacagaggtgggcagctgcacaacagcaccctctttccggggccctggggcgttttttgac

SEQ ID NO: 34667 - DNA, 52 bp, Homo sapiens; identical to SEQ ID NO: 16751
  chr2:239006881-239006933
  hypo

SEQ ID NO: 34668 - DNA, 76 bp, Homo sapiens
  chr2:239265697-239265773
  hypo
cgtgagccaccgcgcctggccgggaatgtttttaagtcttttttttaaatacatgttctattgtacctggttcccc

SEQ ID NO: 34669 - DNA, 460 bp, Homo sapiens; identical to SEQ ID NO: 33652
  chr2:240167455-240167915
  hypo

SEQ ID NO: 34670 - DNA, 383 bp, Homo sapiens; identical to SEQ ID NO: 31629
  chr2:240168801-240169184
  hypo

SEQ ID NO: 34671 - DNA, 172 bp, Homo sapiens; identical to SEQ ID NO: 16755
  chr2:241373330-241373502
  hypo

SEQ ID NO: 34672 - DNA, 781 bp, Homo sapiens; identical to SEQ ID NO: 23571
  chr2:241541936-241542717
  hypo

SEQ ID NO: 34673 - DNA, 373 bp, Homo sapiens; identical to SEQ ID NO: 27874
  chr2:242436371-242436744
  hypo

SEQ ID NO: 34674 - DNA, 644 bp, Homo sapiens; identical to SEQ ID NO: 31634
  chr2:242523762-242524406
  hypo

SEQ ID NO: 34675 - DNA, 368 bp, Homo sapiens; identical to SEQ ID NO: 31638
  chr2:242832886-242833254
  hypo

SEQ ID NO: 34676 - DNA, 747 bp, Homo sapiens; identical to SEQ ID NO: 30165
  chr2:25391009-25391756
  binary

SEQ ID NO: 34677 - DNA, 570 bp, Homo sapiens; identical to SEQ ID NO: 25466
  chr2:25438799-25439369
  binary

SEQ ID NO: 34678 - DNA, 855 bp, Homo sapiens; identical to SEQ ID NO: 24259
  chr2:30453530-30454385
  binary

SEQ ID NO: 34679 - DNA, 761 bp, Homo sapiens; identical to SEQ ID NO: 22874
  chr2:40678936-40679697
  binary

SEQ ID NO: 34680 - DNA, 914 bp, Homo sapiens; identical to SEQ ID NO: 24265
  chr2:42720186-42721100
  binary

SEQ ID NO: 34681 - DNA, 160 bp, Homo sapiens; identical to SEQ ID NO: 24267
  chr2:43408183-43408343
  hypo

SEQ ID NO: 34682 - DNA, 982 bp, Homo sapiens; identical to SEQ ID NO: 31658
  chr2:45240827-45241809
  binary

SEQ ID NO: 34683 - DNA, 974 bp, Homo sapiens; identical to SEQ ID NO: 27888
  chr2:47796765-47797739
  binary

SEQ ID NO: 34684 - DNA, 1479 bp, Homo sapiens
  chr2:47797745-47799224
  binary
cgcggctccttacccgccgctctcgggcgcggggctccgcagctaggcccctgccgcccggtggccggcgtccgcggggccccgggcctcatactcctctccagacaggccgcgggctgcgggcggggtgggccgtggatcccgggcgcctaggaccgggacgcggcagcaaggcgtggagagagcccccgggggcgtcccatgaggcgttcgggatcggcgcctcctaggtgcgggctgtgcgggcagtcctgctcccgcccccggggctgagctggcggcgtcggcttcagagcctcggagccgagccgagtccggggaagcgctcctttctcagctccagccgaagagccgcccggcagggagaggcggagtcactggcgcccggggcggggtgttggggaggggtgagtagggacaggagggagggggtggagagttgggctgctgcgacgcctcccggtggctctggcggcaccaatgcggggcaccggagcaggtgtccgactgcggtgcgggctaccactccgccggggaacctcgtcttgctcctccctgcgcttcgcctctggaatctctcccttatctcatgccgcggtgaaactttgctcaagttggtggtgctctgaggtctccagggctggaggccgcgcgacgcgaatcgccgacactggattctcgggcgttagtccgaagtttaagttcccttcgttcactcctttgccctggatcgaaccgcagccccaggacgcagcgggttccactggaaacggggaatcggggagaggcggtcgctgggctccgggcgacctgggaacgagggcgtttgctccccctcccgaccgagcgggcggccggcgtcagcaccgcggacagcgcatcggtgccgcagccgcgggcgggcgccgctagggctgccaggggtccgaggcgcgggcaaggctgctcaccccgctgtgctgtgcaccccaaaccttccctgttttcctttctacctcccgtgtgcacccccctacccgccacccgaggcaggtgcggtcgctgaagcaggctgctgacagggcggggacgctgcggaatagagacgggggaggagtcaagcgcgggtagggggccaaggtgccacagggagaaagagcccaggcccggcggactgccgggctcctcgcgccaccccagctcaccgacccctctagcccggggcggggaataacaccctgggtgcggtagagagtagaggaatagaggaggtgtaggggaagctcactggcagctcccctgaggccggcgcggggaacggtgtgctatggaacgcccctgggaaatggtcgcccccctacgccccaccgcggcaggaaaagacgacggatgccccgcgcggctgcgggtgctcctctgctggacacaagccggctttgccggggccacaaaagttctggcgtggaacaccctcagtacaggcggaaaatcatcctcttc

SEQ ID NO: 34685 - DNA, 194 bp, Homo sapiens; identical to SEQ ID NO: 16762
  chr2:60777883-60778077
  hyper

SEQ ID NO: 34686 - DNA, 134 bp, Homo sapiens
  chr2:60780349-60780483
  hyper
cgcgagaattcccgtttgcttaagtgctggggtttgccttgcttgcggcgagacatggtgggctgcggggcgggcggcggcggcggcggcggcggcggcgggcggacgacggctcggttcacatcgggagagcc

SEQ ID NO: 34687 - DNA, 970 bp, Homo sapiens
  chr2:63275508-63276478
  hyper
cgtgctacttgatacctcccaacttccccgagaatggtggcagcatctggaaccgagagcgccggcctcccgcgaggcgtaccccggggaccgcgctggcacattccagagcgcactgccgtcccacctcgctgcgccggacccaggtcaggtgctgaggctgcaggcgaaacagggcctggtggagggaggaatgagttaaggtggaggaatggggcaaggtcacgcgccccggcactggagggccaaccccggcacacagcggactggccgggactagggcagcgccgggctatggacgcggacgccggcgaagcgcaccccgggacgtccgcatattctttcccccaaaactagtgcgctccagccggcgcctttcctcggaacctaaggaaggggtatatttcgttgctttctttaaacctcagcacgatcacagtggctccgagccgcgggcggctgaccgcgggcctcgcgggctactcctggtaggggcctgcgcgagcctaaggtgtgtccccgcctgggttagcgctgcgctctgcactgtttcttttcctcttaaagcttctttctcactcactctctccctccttctctctctcattttttccccatttctctcgttcttttattcagctttctctctttctctcccttttgtgaatgggccgcggtgtctttgttctgtagagaagcgcccgtgtcgctgacttttgtgaaccagagaaggatcttgtaaaacctccttttctccttcgtacgcccccactcccacccctcctcccctgcctctttgattagatgttccctcatcgtcaaaaaaaaaatgtaatttcgttggtctggcggccactttctttgaacattagctcgctttcagctccaacttcaattagaaggagttgattttgagagatcaacaaaagaaccgaccaaagccttattaaaggtcctaagaagatctccc

SEQ ID NO: 34688 - DNA, 670 bp, Homo sapiens; identical to SEQ ID NO: 24273
  chr2:63280967-63281637
  hyper

SEQ ID NO: 34689 - DNA, 1473 bp, Homo sapiens
  chr2:63285949-63287422
  hyper
cggggttcggagaacgacccctcccgcgttccgcgcccagcggggtcgcagggctgcgagcccggctgtagcaaagctttctcggccgcgtcctccctccggattcggtaggccaggctcgggcgcgcccttcccacaccaacaaaccatctttcccgactcagcagaggcccacaggggcgcagccgctgtccctccgcccttggcccagcggcgccgccctggtacgccaggcctgaaggcagggccggcccgcgccacgcagggtctcccttaggcggcgccttagggtgaaatgcggggccaagcctgacctgccggggtgccccgtggcatctctggtgcggaccccgcacgtgccggggagaactggcaggcggccagggcgaggaggcttccagcttgcgccgcactggcctgggcacccgggctgcagggccttttgggccctcccctcagtgaccctgcctgtagcggccccagggccgctttggctcaggcagcagctgccaatgccgctcgaggcccgcggctccctgaggcgagctctgcggggcccagcagtcctcttggctgctaaatggaacgaaaccaggagacccggctttgcactcgtttggacaactgtgtggcctccggagcaaggtacccaaacccttgggcctcagtttcgtcgcagttgttatttgaacccactcggcctgggacgtgccagagcttcacactttaggtcgcggctgcgggcgggaggggcagatgcgacccctgggccggcccctcgggggcgtctagaagcttcggcacctgcatactaaggccggagggggctggcagccaggcacaccgaggcccggccggagttcccgcccggggaacgaggcttcgaaaagaggcacgtgcttctcccagggcctcccgccaggtgctgaaaccccacggcactgagtggaaaccggaagagggaaggcgcccagggcctgccgggccgcggcgccacctgaggctgccgggacgctggagcgtgggggagtggggtgagtgcgctgccgggccgggggcggcgggggacggcgggaggtggccaggcccggcagggtgagggcgctggcgttggccgagagtccctgggcagcggcggcgggaacgcggaaggttccctccacccccaccccaacccccacccccacccccgggccggccacctgttgacaggcaggttctctgagaaccgacttcagctcgcccttctgtccaggaagtttgttcggtttgggtttgggtgttcgtgacacaatcggagcaattagaattgaagcaacttcaggagatttagcaacccgcgaaaatttagcaacgttcagacgtcaacagttttctttctttgagtggtcaacgaaaacttgacgttttctactcataccttgtattctctgcttatactgtaggggcaaaaaagtctactcttagacaaac

SEQ ID NO: 34690 - DNA, 126 bp, Homo sapiens; identical to SEQ ID NO: 24274
  chr2:67626117-67626243
  hypo

SEQ ID NO: 34691 - DNA, 1118 bp, Homo sapiens; identical to SEQ ID NO: 27891
  chr2:68546231-68547349
  binary

SEQ ID NO: 34692 - DNA, 1109 bp, Homo sapiens
  chr2:71453505-71454614
  hyper
cgaacgtctcccaggcaaatgaggcatgaagaatgagggctggagtcaagggggagatggagcaagtataaaaaggcagaggacgcgcaggggccgcgaataggggaagggcacgacgcgcaatccctcccgctccagcccggggagaggggcgggggatgccgcgcgggtcaatttgcctagcattgttgcacctgggtagaaatgggactcaggccaagaattcggttcgagtgttaggaggacgctgaggggagtcaggaacttgggtgggagtcggggggaaacagagcacctgtgcgggggggaaagggacgaaaaccccctattgctcccgaggggcaggggctgaccccagcggacgccccttttcgccgatggccgcgacgtgggaccccgcgcgctttccctccctacaggagctcgggcaggcgcgtgccgcccttcacagccccgacggcggcagaaagggaggcgcagggcgcccccagagccgggagaacggcgtttccctcgagtcctttccccagcagcccgggcacccgagcccacctgggctaaccagaagcccctccttcagatcgtactctgccactcctccgagagcttaagccgttgccgtagaggtcgccgtcgccacaacagtctcggcctttagtaccaaaacgtgaagcacagcacccgagaagcgccactaccacttgccaggttatctcttactgcacactgcctcctcgccccgcccccgaacccaagccattggttgccgggcaccgccccattcgtctattgggccaaagaagatgccgttcggtcacctagaatggcatatgtggtttttattggtctaaatgtgaagcagtgcccgcccactccctcagaagtttcagcttctgattggttttaatgtctgtcttttctcttccttcattttttttttcctgtggtggaacacctccttgagggagatgccggctctgattggctgaaaggacgctacgctagcctgggataggcattgggccaaggatgcgcccggcccactcgtgggggaggagaccaaggcgccgcactctgggtttgtttacacaggctcttgctcccgcttc

SEQ ID NO: 34693 - DNA, 257 bp, Homo sapiens
  chr2:7164418-7164675
  hypo
cgatgcttccagcatagccagtgctcctgggtctcccgtgggatccgtttgtgcagagtcctcacggcgtttctcccacagtgctgctttcaaaatggaagaagatgacgcgcccatcaagcgctgccccaagtgcaaagtctacatcgagcgagacgaaggctgcgcgcagatgatgtgcaagaactgcaagcacgccttctgctggtactgcctggagtctctggacgtgagtacggccttcagcttcaccttgc

SEQ ID NO: 34694 - DNA, 1230 bp, Homo sapiens; identical to SEQ ID NO: 24279
  chr2:73147029-73148259
  hyper

SEQ ID NO: 34695 - DNA, 814 bp, Homo sapiens; identical to SEQ ID NO: 26803
  chr2:73518220-73519034
  hyper

SEQ ID NO: 34696 - DNA, 955 bp, Homo sapiens; identical to SEQ ID NO: 24283
  chr2:74742812-74743767
  hyper

SEQ ID NO: 34697 - DNA, 607 bp, Homo sapiens
  chr2:7571105-7571712
  binary
cgagtggcaggcgcagcccggctgcaggagcgcggctggggctggccgctctcgctgccctctctccggaactgtttttttctgtcctggtctctgaaagccttattgattgctcaaagtgaacttctcagcccacggtttcctcacccccggggcagcttgcatttcctctgccgcggcctctgtcgcctcccctcccgcgcgcctcggccttttacatttcaaatgctcgacagctgggccaacttctgcttccgcccaaagaagggctctttgccgctcacaatggccggccagtggcgcgggggctcttttctctccagctgtgagagaggctttttcaaaggccggggggaagctgccgtccagctgcgcgcctggccgcgggggccctgcatgctaatcagcggcgcgcagagccgggctccgtggggccgcgcagatgcgccctctccgcccgcagagccttccgggcaggtgaggccaggccggccgggcgtcaccgcaggtgtgcactccgcgcgcgcactcagctcgctttggtgtttctccaggccctcagggcccaccactcctagtcccagcccacaggtctgcccgagtctcc

SEQ ID NO: 34698 - DNA, 75 bp, Homo sapiens; identical to SEQ ID NO: 7227
  chr2:85819578-85819653
  hypo

SEQ ID NO: 34699 - DNA, 142 bp, Homo sapiens; identical to SEQ ID NO: 29002
  chr2:8833988-8834130
  hypo

SEQ ID NO: 34700 - DNA, 549 bp, Homo sapiens; identical to SEQ ID NO: 24287
  chr2:8834468-8835017
  hypo

SEQ ID NO: 34701 - DNA, 228 bp, Homo sapiens; identical to SEQ ID NO: 27896
  chr2:8849838-8850066
  hypo

SEQ ID NO: 34702 - DNA, 257 bp, Homo sapiens; identical to SEQ ID NO: 31677
  chr2:8870193-8870450
  hypo

SEQ ID NO: 34703 - DNA, 1347 bp, Homo sapiens; identical to SEQ ID NO: 30203
  chr2:88751675-88753022
  binary

SEQ ID NO: 34704 - DNA, 947 bp, Homo sapiens; identical to SEQ ID NO: 27897
  chr2:89064565-89065512
  binary

SEQ ID NO: 34705 - DNA, 854 bp, Homo sapiens
  chr2:945447-946301
  binary
cgtggcctccgcgatgggcgctcgtgcctgggtcgaaggactggggggcggaggatttggaaagggagaaaaatacgggctggcttctttttaaaaaatgtgggtagccttgcctgcccccgccgcactggaatttatcctaaacttactttcatttacattaaaacaagacgatttgagtctaccaaacccaatactgcatctgtgaggctccttttggcacaaacctgaatgaacagcgggaaacgccgtctcccctggcgtctgagatctggggtcccctccccacctggtctcctcgctcccgccccagccccgtgcgccccaggagggcaccgccgagcgccgggtccccgcagggttcgggagactccgcggaccggaggagggataggacccccgagctttgggggcgggaagggagggtggaaggaggaggggagcggggttggggaaagttggagcttcggtatcttttctccgggccaggccgtcctcggggccctgcgctgcgtctccaagtgctgggaagactccgcggggaaaggtctgaggacgcggccggctggcacaggtgtggcggcttcagagggccggggagaacccatggcttcgaggctgtggactagaaatgtccctgattagaagctgagaacctttggccagggaggtggggcggcggggaggggtcgtcaagccggtccagagcgcgcccacctgcgccacaagggagaagaggtgccccccgcccccctccgcccaccgccgccacgatgcgccgcggacctcggcgacccagcccgggtagaagcgcgcgctcccctcctccagcctcgtgcgccggcccctgcccc

SEQ ID NO: 34706 - DNA, 608 bp, Homo sapiens; identical to SEQ ID NO: 25497
  chr2:97193030-97193638
  hyper

SEQ ID NO: 34707 - DNA, 701 bp, Homo sapiens; identical to SEQ ID NO: 25498
  chr2:97427378-97428079
  hypo

SEQ ID NO: 34708 - DNA, 662 bp, Homo sapiens; identical to SEQ ID NO: 24291
  chr2:99438949-99439611
  hyper

SEQ ID NO: 34709 - DNA, 836 bp, Homo sapiens; identical to SEQ ID NO: 25503
  chr20:1783711-1784547
  binary

SEQ ID NO: 34710 - DNA, 1975 bp, Homo sapiens; identical to SEQ ID NO: 30215
  chr20:20348052-20350027
  binary

SEQ ID NO: 34711 - DNA, 859 bp, Homo sapiens; identical to SEQ ID NO: 23203
  chr20:21080357-21081216
  hyper

SEQ ID NO: 34712 - DNA, 1941 bp, Homo sapiens
  chr20:21081279-21083220
  hyper
cgttcatgttcaactctgttgaaatcccgggtgggccgaaataagatttaattgtctcctgcgtggagaagtgacacccactttttcccctgaattgagcaaacaccagggctttgtctgagcttgtggcttaaacgccgggcggtttctgcacccagttggtgggttgtaagacaggaggtttccaagtctttcatcatgtttctaacaaggaaaaccaaatcgggcccataatgtcatcagccccggcccgacctcgccgggacctcggcagcccgatgatgtcgctagcggccccggcgcagccacgacgcgccgcctttcagctcctcgcagtccccacaaaagccagacaacaatatcaattaatcatgcagcgggcaaacaaggagatttatcccgcgacaaacagccccaccgagagccgctgaatgggcgtgattagcatgtgaaaaggcgagcaaaactccgcggttcaacagctaaagagcaatttgatggggctgggatggggaaattacttgattagcgtccatcggaggagaacacggttacagcccctcggccgggaatccgacaggggaacaaaacgcgctggtaaacgcggcgacgtacagggagcgcgagcgagggagggagcgccggcgagggagggagcgcgggggccgacatcgagaggcaatcggggtgggggcagaaataggggctgacccgctagcccccgccaaaccgcgaccaccctcacctagggctcccgggcggactcaagacttcacccagcgctggaggtcgaccttaatttagagcgctgccccggctctggcccggaaagagagtgacagaggcgcgtgcgggggaaaggcccacccacgctgtccctggagtcccctccagtgtccccagggacgcagtccgcggccgccagctccaggggctcgggccccaggttggagtagccacgctagcggctaggccgttccaccgggtagctccgcccttccttttgctcaggcagctaactttggagccgggcaagacgtgttttcccgctccttcgaatttaaccgcccagtgcctgcctcctggaaaagctgtcacgattgggcttgggcttgggcttggccttggtcaagaaaggtttcctcggctgcgccaccgtggggatggaggtgggagttggaacacagccccctagctgagtgcaggggccagaggctggcgggggcacgcgggggtggttgggggcggagtgcggcgaggggtgagggcgcgaccgccttggggcaggggcggcgatggagtagctccgggctctccacggactcgattggacagccccaggccggctttggatccttggaggcggatacgcaaggccagacctggtggcgtggccagttgggcatcgcggtatcttccccaggcctggagggcagtgctgaaggcccgcggccgaggttttgctttaagtatacttgggcctcgcaactcagctgtttgcgaacagagacctggcgaatcgccgaggagcggcgcggctccgcgtccccacttcaaggccaagtggagagtgaggacacgctgaggccccctgctacctatcatgccatcttaagcgggcaccgactccttacccagaaaagatcctggagctaaagcctgcgcctacaccagagaggggaatttaagtttcccactctcgacgtgtctggaaccttccctctagccgcatacccacaaccccctgctccctggctcctcccagtgtcaaggaaggagaaagactcccaccctgtccccaaagtctcagactaactcgctccaggtcacaggacccactaagagggcctttccagctcatgcccggaacaggggtgcagcggcgaccctctgggatctggagagagagaatttaacacggccttcctgaagtacattcac

SEQ ID NO: 34713 - DNA, 794 bp, Homo sapiens; identical to SEQ ID NO: 27902
  chr20:21086501-21087295
  binary

SEQ ID NO: 34714 - DNA, 635 bp, Homo sapiens; identical to SEQ ID NO: 24296
  chr20:21372082-21372717
  hyper

SEQ ID NO: 34715 - DNA, 976 bp, Homo sapiens; identical to SEQ ID NO: 24297
  chr20:21377197-21378173
  hyper

SEQ ID NO: 34716 - DNA, 852 bp, Homo sapiens
  chr20:21486808-21487660
  hyper
cgatggaaaccggggctgggacgggcggtggtacgcacgtggaggagaagaggcatggcgggaaaaccacagccgaacacaggtcgactcgcacctcccaggcacccgccgccgtctgactcgcggctctccccaaggttccgactcgccgccacctcttggcaccactcaccgggctccgacccgggccgcgagtccgctgatgcgcagctgcctccggcggctcccgggctctgcccggacccgcgcgcagagacgctcgggaacgctgggctcgggcgcctcctggcggcggcagcacgcggcacacgctcggttctccggcccgagggggcgcgtggagcgtacgcgggatccgcgcgcgggcctgggctgctggcccacatttccccgcttgctcggatggcggcgctgaggcctattcgcctctttattaataacgatgcctcgggagggaaaaaatagagcctttaaaaatcagagtgcgagagaggagtgtgtgtgtgtgtgtgtgtgtgtgtgtgtgtgtgtgtctcggggcgttggtgaaagcaataaaactcagatcgcttccttggcgagatagcggcggctataatgcgccggggggatcaggggtttatttgcagatcctggataaaagatgatatatcgacacggtttagagtgtcactgcgcttggcctctcagggagccacaagtacatatttcctgaaataccgcccagcacagtatctaatccgcccgccacttaacaccgggaggggaacttcagcagcgcacaagcgcgctcccggtttcctggttctgggtggggagagcccaaatgagaaggatctggtatgcctagac

SEQ ID NO: 34717 - DNA, 756 bp, Homo sapiens
  chr20:21490990-21491746
  hyper
cgagcccagaaccccgcgtacttcccccaagccccctaagccaaagcctcgcgcgccctgaccgttcccacccccagccttagcggtctcctaggtcagcaccagcccgcagattttgaaaaggagtggggagtggggagaaggcagccagtcttaacctcagacccccacccacccactttcttagcgtgaggtaagtcaaatgtaacaaagtgaaagtcatcgagtgtagtggcttcaacagcttctcaggctgaaggagccactcatagatttgggccagcgaggggggtttgctctcctcgcctttgcggctcccgaagtcacttttcctcccgtagccggacgctgccgcccggggttcagacagcgcgcgagaccaggggagatgcgggggagggtgggcggccctgggcttccggccgaccgctcgcaggccggaggccgagcgttctcctccccgccccaatcctaggcgcggggtgcagcctgtggtcggaggggcctgcaccgggagccccgcccgccccagggccccggtacccccggcctccccgcccgagaggaaccgcctgtgggagccccgcgggcggccgggcccggctcccaggcccaggcctccggcccggcgcagtaggacaaacgggagggcagggattttttctttttttcttttttaaacacaggatttttattaaaattcttatttaaaaaatcgaaagctttctgcgcccggcgctgttggggaaccgcgcc

SEQ ID NO: 34718 - DNA, 989 bp, Homo sapiens
  chr20:21492692-21493681
  hyper
cgcctggaaggtggcggctgccaggtcctgggctttgagcgcgtgacatggtttgccgtccctgaccaagacgggcacggccacccggcgcggcgagggcaggggcgtcacctccatacctttctcggcccgggcgcgcttcatcttgtagcggtggttctggaaccagatcttgacctgcgtgggcgtgaggcggatgaggctggccaggtgttcgcgctcgggcgccgacaggtaccgctgctgccgaaagcgccgctccagctcgtaggtctgcgccttggagaaaagcactcgccgctttcgcttcttgccggcgtcccccccgccgcccggggtctccttgtcattgtccggtgactcgtcggccgagggctccggggacttggagcttgagtcctgagggggcgccccggcagccagaccgtgcactggggggagggggagagagaagcgcgtcaggcgtctggaggccgcgcgcagcctgcaccagactcggagcaccctggatcctccgtgcgaccctggacctccgcgcctggcagcccagccccgctgcctttgccatgacccctgccttcctctacgcctgacgaagacgtcgggacctcccagggtaaagagggaaatccgtaggagtgggggctaggggctcgcctttcaaggggctcacatagtgtgggtgagaatttggggggggaagtggcactgaagatcatcgcgggttaagggctccggcgcccttaagcggtttcctctccggcgagacgtgggcagatttttaaaagaaataccccacaatcccagcattgatcggctcggccatttaaggcaggtttttgggggctttcgtttctgctttcgggccttctagacaccccctgcactgcacaaagcgtcctctatgatcgcgcagggggcagggtgagctatttatacccgggccacccgaagcctccccaccctccacccgtacccggacgaggctc

SEQ ID NO: 34719 - DNA, 1493 bp, Homo sapiens; identical to SEQ ID NO: 31691
  chr20:21495687-21497180
  hyper

SEQ ID NO: 34720 - DNA, 1428 bp, Homo sapiens
  chr20:21497258-21498686
  hyper
cgttgcagcaaagaccctccttttgttcctcctcttattcctcagtcctaagggggtggaggctgtcttggggtccagggcagccactaggttggggacccagaataggatctggttgggccaggcaaattcttgggtcaggtggcaaaggggtctttggcagcaagtgtcgtttctcgcatatccccagagccctcttaggtgggggagtgcccgcagaggcctcccaaagcgtgttcatttcttcagctgggaaccacctcgctgaagttccatgtagttcccaacttctctcccccttccccagcatagtgaccctttcttctcaggatctaaatcagcaccgctgctattgatcaagtcccctcccctcacccgtgggagcctgcaaggtccgcagagcgcctgagagaggattgctttcctaggggaatcctggctcctggaattaatcacggggagggagtgctgccataggcgcctagagaaggaggccctcagcccagttctcaaaggtcgggtttgcctttgcgcctgccccttagcctcaatgaccagccgaatccttctgggtctcagcttgcggtgtcctcttgtcggagcacctgaggcgcccacttcccctgccctcgcaggacgcctcctggactccggcccctcctacactttcaccccagcgagtcttccagtttttatttcccctggcctgggggcagctgggcagggagggagagaattggagagagcttcggccttgcctcctccgcgatcggtgcttccgggtccacagcactcagcctctcccgggacctcgagactcatttccccatcacttctcgtccgtgtggttcccgcgtccatttccagagcgttaacatttgcaattgaaaaggcgctgggagaccgctgggaggtccgtaattgaaggggagaaactgggcttgttagtggaagatcataaaatgcaagtcccccaggagcggcctgtggacgccgggaggcctgcgcaggcccagctggcggccagggcaagtccggtgcccagagcacagtccagtgtctcctcaatttcttgggcccggcttgcgcccaaagagcctaggggccaggcgccaaacgcaccttttctgtcccaattaaacaggtgattgcatcctgaggactccccaagaggcctccccgagagtaccacagctaggccttctagagcccaggagctttggttctctgcgatcccgcacacccgcaggctgagaggccctgccccgctcccttccccctccggagggttcttcagtaagggcccaccactcccaccctgtcagcgtctgcctgcaccagtttcagctcctggtctcccccactcggcattctttagtaaattctttccaggtaccgtcttgcacccaagcgagttcaatgtcctcc

SEQ ID NO: 34721 - DNA, 361 bp, Homo sapiens
  chr20:21499976-21500337
  hyper
cgccaaggtgcaagcgtttgtcttcattcactccggaaacaaagcgcgttgcaccttcctgctccagcaaggattaacggcgcggacacaaaggttttgtcggagggggaaggtttattttatcttgggttggagactcagagcgtggcatgcacttgaaatcaatggggaaggaaaatgtcacccaatctggtccctgagtgtggcgataaagacgttcaccttaaggatggcatctccaaaacagccccactttggcttcgacttccaatgcgggagcaggggctgcaggaagcagaggtgtcagctctcacgtcctggatgaaagaaataggggaatgcaccccaggagtactacccc

SEQ ID NO: 34722 - DNA, 1095 bp, Homo sapiens; identical to SEQ ID NO: 25509
  chr20:2780877-2781972
  hyper

SEQ ID NO: 34723 - DNA, 872 bp, Homo sapiens
  chr20:30555779-30556651
  binary
cgggggctgcccccccttcggccgcagctcaggcgggtgggggcggggcggggcggcgccgaggagaatgaataattgaagtggaggggaggaggaagaagaggagaaggaggaagaggagccgcccgcgcagggtcctccccacgccgcacccccctccgccgcccggaagtcgctccccgcctccctctccgccaacatggccgcgaagtcggatggagcggcggcctcggccagcccggacccggagggggctgccggtggagcccggggcagtgccggcgggcgcggggaggcggcggcggcggccgggcccccgggggtcgtcggggcgggcggcccggggccgcgctacgagctgcgggactgctgctgggtgctgtgcgcgctgctcgtgttcttctccgacggtgccacggacctgtggctggcggcctcctactacctgcagaatcaacacacctacttcagcctcaccttgctgttcgtgctcctgccctcgctggtcgtgcagttactgagcttccgctggttcgtctacgactactcggagcccgcagggtccccgggacccgccgtcagcaccaaggacagcgtagccggcggagccgccatcagcaccaaggacagcgccggcgccttccggaccaaagaaggcagccccgagccgggtccccagcctgcgccctcctcggccagcgcctaccgccgccgctgctgccgcctctgcatctggctgctgcagaccctcgtccacctcctgcagctcggccaggtctggaggtaggagaagcgcaggtggagggacctgagcccgaggagtgggggtggcgaagggctacctgacgtcccagccctgatctgacctttcc

SEQ ID NO: 34724 - DNA, 975 bp, Homo sapiens
  chr20:30639425-30640400
  binary
cggcggtatagacccctgggtattaaaactcttaggcggcgggaggttagatcgcgcaggagcaggagcggtattggaaccctggggtttgtgttctaaatcttagggcagggttagaatccactgaagtgagagttcggatccttccactgggcagattagaatctttgggggcaagttgagtttaaaaatccttcagaggtgggattaaaaatcctttggcggggcggggttagtatcttgggagccttggagcgggtgctggggttcttagacgggcgggttcgaatccctaggagtgggatttgggatcctttggagactggggtaggacgctgggcggtgggatggggaggtgttagggaaagtggagcggaagggatgggggttcgcatccttggtggacgcgttagaagcctcctatggatggtgctaatattttttttctcttcgtggagggtttgggatccttcttgcaggagacggaggttatgaccctcggggagccggttaggatcctggggtggcgtctgaatcttcggggaggtgttaggacacttggggcggagttagcctcgctcagggcgcggctaaggcgcccagatggcctgcgggcgccaccacgtccctggtcccagctcgggagcacatcagaggcttagaggcgagtgggaagggactcagacagtgcaggacgagaaacgcccgcggcaccaaagcccctcagagcgtcgcccccgcctctagttctagaaagtcagtttcccggcactggcaccccggaacctcaggggctgccgagctgggggggcgctcaagctgcgaggatccgggctgcccgcgagacgaggagcgggcgcccaggtgagtgccgcgcacaggggaccgggaatacccggcccgcgaggggtcccaggaggcggagggagcccaggagcctggggagggctggctacgggtgcggctgggggcagc

SEQ ID NO: 34725 - DNA, 427 bp, Homo sapiens; identical to SEQ ID NO: 26827
  chr20:3202068-3202495
  hypo

SEQ ID NO: 34726 - DNA, 1585 bp, Homo sapiens; identical to SEQ ID NO: 24301
  chr20:34188561-34190146
  hyper

SEQ ID NO: 34727 - DNA, 1084 bp, Homo sapiens; identical to SEQ ID NO: 27917
  chr20:37302417-37303501
  binary

SEQ ID NO: 34728 - DNA, 982 bp, Homo sapiens
  chr20:37355862-37356844
  hyper
cgtccatacatccctccctctccatctctggctcgacacccgggctcactattagttcccctacatccaccccgcagcctgctcttaacctctcctccccggcggctcagacccaattctcagtgtccttagcgcccccttcgggccacagcgttaagccacgccccccgggcccctcatccgttgccaagttcgctgagcgtccgcgtctggttgcctctccgccccacagggcatgttcgtgctgggcctaccctacgccatcctgcacggcggctacctggggttgtttctcatcatcttcgccgccgttgtgtgctgctacaccggcaagatcctcatcgcgtgcctgtacgaggagaatgaagacggcgaggtggtgcgcgtgcgggactcgtacgtggccatagccaacgcctgctgcgccccgcgcttcccaacgctgggcggccgagtggtgaacgtagcgcagatcatcgagctggtgatgacgtgcatcctgtacgtggtggtgagtggcaacctcatgtacaacagcttcccggggctgcccgtgtcgcagaagtcctggtccattatcgccacggccgtgctgctgccttgcgccttccttaagaacctcaaggccgtgtccaagttcagtctgctgtgcactctggcccacttcgtcatcaatatcctggtcatagcctactgtctatcgcgggcgcgcgactgggcctgggagaaggtcaagttctacatcgacgtcaagaagttccccatctccattggcatcatcgtgttcagctacacgtctcagatcttcctgccttcgctggagggcaatatgcagcagcccagcgagttccactgcatgatgaactggacgcacatcgcagcctgcgtgctcaagggcctcttcgcgctcgtcgcctacctcacctgggccgacgagaccaaggaggtcatcacggataacctgcccggctccatccgcgcc

SEQ ID NO: 34729 - DNA, 914 bp, Homo sapiens; identical to SEQ ID NO: 27919
  chr20:37357365-37358279
  hyper

SEQ ID NO: 34730 - DNA, 2195 bp, Homo sapiens; identical to SEQ ID NO: 25521
  chr20:37433723-37435918
  binary

SEQ ID NO: 34731 - DNA, 1242 bp, Homo sapiens; identical to SEQ ID NO: 31708
  chr20:400915-402157
  hypo

SEQ ID NO: 34732 - DNA, 1442 bp, Homo sapiens
  chr20:42543097-42544539
  hyper
cgcacccacgccgcggggcggggactagcgccgcctcaaatatttagggcaagggagtgtcccacttctggggaggggtgccgttcgggcttctctcctcaccgtgggtggcgaaaggcgggacggaaaagcgccgtctggacaggcgcgcccccctcagggatgcagggccgggcgggggacccggcggcggcccagcccggaggaaggacctccacgccccggcccgggcccccgggcccccggccctaggcagcgcccgaggccggaacaatagcgcgcgcgggcggggcgggggcgggggcggggcgctcctctgggcaccgcccccggcccgccccccgcgctcgcagtcccgctcgcacactggctcccacccgccgcccgcccaggcactgcccgcgggagccgccgccgccgccgccgcgcccgccatggacgtccgcctgtacccctcggcgcccgcggtgggcgcgcggcccggggccgagccggccggcctggcgcacctggactattaccacggcggcaaggtaggcgggggcgggcgggggtccccggcgggcggggccggagtcacctggcagctcgggactcaggcgctcccggggtcacacggggccgcgcacatcagccccgccgacgggcacgggcggctcacatcgatcccctcgcggccacgctcacgccctgagttgttgggatcgcgggcagaagtcatcccgacagccacccgtgcgacgacacagtggcccctcactcgcgtccccctgacagcctcgcagtcattcacaagccgtcacagtgacccacagccacacgcaggcggccaggcactgcttacacggtcccgccgtcccacgcaagtcaccctgacagtcacttatacacaacgacacgcaaccactcacccgcaaacagcctcaccgccacagacgagtcacccacagacgctccgatgccccacacaccgtgacatgcccccacccgctgtcacacccaggcacaacgggggacagtcacacaaagaagtcgcccgacagtcacactctcgcagccacaacgcctcacccaggcgcacgctgtcacacacagccacccccctggacggtgagcctcagacacagatcgtcctgacggccacacagtcacacgcggtcacacccagggacggccacacctcggtcatccacactcgcgcgtcgaggtttaacttctcagcgccgcagcacactaattgggcagtttactaattggccgtcactgcctggcggggcctcggattccgagtaggctgcggccaatcgaggcctgtgtcctcccgggagcggtgagccggcgtccctccaggctggggctgtagtgccggacaccctccctcctccatgtttccaggatctatccccccaccccagccaggtcccagctgcgctgcgccgggc

SEQ ID NO: 34733 - DNA, 55 bp, Homo sapiens; identical to SEQ ID NO: 7245
  chr20:42833281-42833336
  hypo

SEQ ID NO: 34734 - DNA, 321 bp, Homo sapiens; identical to SEQ ID NO: 26837
  chr20:44650187-44650508
  hyper

SEQ ID NO: 34735 - DNA, 544 bp, Homo sapiens; identical to SEQ ID NO: 25524
  chr20:45279829-45280373
  hyper

SEQ ID NO: 34736 - DNA, 387 bp, Homo sapiens; identical to SEQ ID NO: 24308
  chr20:45337620-45338007
  hypo

SEQ ID NO: 34737 - DNA, 243 bp, Homo sapiens; identical to SEQ ID NO: 24309
  chr20:45833348-45833591
  hypo

SEQ ID NO: 34738 - DNA, 1252 bp, Homo sapiens; identical to SEQ ID NO: 24312
  chr20:47443693-47444945
  binary

SEQ ID NO: 34739 - DNA, 876 bp, Homo sapiens; identical to SEQ ID NO: 26839
  chr20:47934774-47935650
  binary

SEQ ID NO: 34740 - DNA, 1409 bp, Homo sapiens; identical to SEQ ID NO: 27933
  chr20:4803013-4804422
  binary

SEQ ID NO: 34741 - DNA, 391 bp, Homo sapiens; identical to SEQ ID NO: 27935
  chr20:49218479-49218870
  hypo

SEQ ID NO: 34742 - DNA, 377 bp, Homo sapiens; identical to SEQ ID NO: 33703
  chr20:49261776-49262153
  hypo

SEQ ID NO: 34743 - DNA, 155 bp, Homo sapiens; identical to SEQ ID NO: 25529
  chr20:49286725-49286880
  hypo

SEQ ID NO: 34744 - DNA, 1327 bp, Homo sapiens; identical to SEQ ID NO: 27937
  chr20:50720375-50721702
  hyper

SEQ ID NO: 34745 - DNA, 1973 bp, Homo sapiens
  chr20:55204896-55206869
  binary
cgggcgctttcctaagcggcaaacagccctgcttcccgttttctcggaaaagtgccccgtctgcaaccctcagacgtggcttttacgcacgaagtctctgtccaaaggggtcagatgaggctacctgctagcgacaccttggcggacactcctccaaggccggcttgtcacctgccccgctacctcctcggggaagcacgaaaacaaccgaagtttggctttcaaaagaagtgggggctggggagtggtggtgggggtgcccgaggccagatggggccgtaagagctcgcgagtgctccagcctgtcggacaggttgagctagagtttcggagagtgggagggaagaaggaggcggcgagcgggaagaggaagaagacgcaggcagcgctaggcgagctcaggggcgccgggagcgcggagctcgggctacggactcgcgggagttcactgcgcctccgggccctggagggctgcccctgcccgcaggcccgggcgcttccgccaggaggcgacagcgccatgttcctccaggttcccggcgccccgagacccctgggcagatggggacgcatcctttagaaactgagtcgggccgcccaggggcgagggaacgtgcgcgggcaaggctgcccaatttccagggttcttcatgccccctctgcgccccgacgtgcgagaacactgcccttggcagtgcagggcgcccccacttattactcccctcggctgggcccggccagcagggagggccgccctgtgcgcgcgctccctcttcacttcccagggcggcgcagggtggcgggccctgctttccgagcgccgcccgctcggaggtctttgtcccgagggcgtggaagggagggtcccgggggcgggggaggtgcgcatttcccgcgccgcgcactctatccgcgcctgccgcgctgccacctccagcagtccctgcgtcatgggcgggctccacgagatagctctgcaccgggcgtccggctccttcgccccgggctctggctccttcgccccgggctccggccacggacttttctggcccaagacccagggttcggacttggcgcctccaagcgcctcgggcttgggagcagcgcctagaccttcgccgccgggctttgagaactcgttcccccaggtctttcaccagactctcctccctccccgcactctttgcttacaacgaaatcctcggggcgcattgcccccgggtaccttccgaccctgggcaagccccgccgggcggggtgcggttggtcccccggggccctctgcgtagcccggcgatgccggccagttcgcagtagcggggtttcgcactaacggggtctcctgtttttttttttccctccaggatcgccacgacgggagcagcaatgggaatccgcgggtcccccacctctcctccgccgggcagcacctctacagccccgcgccacccctctcccacactggagtcgccgaatatcagccgccaccctactttccccctccctaccagcagctggcctactcccagtcggccgacccctactcgcatctgggggaagcgtacgccgccgccatcaaccccctgcaccagccggcgcccacaggcagccagcagcaggcctggcccggccgccagagccaggagggagcggggctgccctcgcaccacgggcgcccggccggcctactgccccacctctccgggctggaggcgggcgcggtgagcgcccgcagggatgcctaccgccgctccgacctgctgctgccccacgcacacgccctggatgccgcgggcctggccgagaacctggggctccacgacatgcctcaccagatggacgaggtgcaggtgagcggcgctgcggctcctgaccggacctgttcaccctacggccttctgcccccaccccgcactcctctaggctcccccgaacttaagggaattttgtcctctctcccccagaatgtcgac

SEQ ID NO: 34746 - DNA, 962 bp, Homo sapiens
  chr20:55499806-55500768
  hyper
cgattagttccaaataagcgtctcttaatcacccttatgaaggcgtaatttgcaaaacactcctaggaagtaacatctttttcatttcaggggaaaaaaaaagtgcattgataaaaaataagtagaacattttaattaaaactcataaagttgtggacatctggttgggattgttcgccgcggcggtgattagcggatccgtgcacctagataatgaagcctggtcgcggttattggcagaagggcccgggcgcgctgtgagaacgctgcaggctcactttgtagtgcggggcctacgcctattagattccaatcagtttcgcctaaaaaggggaggagggcggagtgggaggggggcccagagttaaacacaggaaacaagcgttgagtgtgtgccaataaaaatggtcacaaatcagggctgctgatgtcataaccctgggggtcgggggtcagggggagtgaatgcgcctgaaagggaccgcctgtctgcggccggagcggcggcgggcgcggggggcgacggcgcgcacaatgggcccggagcgcctcattagagacgcgtttgatgcgctcccgtgccccacgggggccctgggcgatgtcaatgggataattacgatgatctaatggccggctcttttgcatgcaggcccgcctgaatggggcgcctggaggctgcattgaggccgggctgtgtaaactgtagggtgcctcgccgactcggagccgcagagactggcggcgggtcaacttggaccactttgcattcacgctttgaataggcggagcgggaggcgtcctttcccgcggccgcctttcagccgagagagtgacagattggaggtcagcggctggcgggacggaagccctcgccgggcagatggacccgctccgggccgcgccggggacccccgccccgcgcacaggcgtgtctacgcggacgggctccgagcgcaccc

SEQ ID NO: 34747 - DNA, 193 bp, Homo sapiens; identical to SEQ ID NO: 32806
  chr20:55588904-55589097
  hyper

SEQ ID NO: 34748 - DNA, 547 bp, Homo sapiens
  chr20:55841887-55842434
  hyper
cgggacgtcgcggggatgcggctggaggaatcggagccggccctgccctctcggcactcgcggtccggaccaggaaggcggcccgagcaggacgggtgggctgcggaccgcggtgggaaaagttgggggagcgcggaggtggcgcggaaatagaaggcttcctggaagcggtgacccttgagccggtcttgcccctcagtccctgtatccttttaagccagccacgctgacccctccgcgcctccctgaagccgttgccagcctgtctctgcgctcgccattccctccgcctggacctctccccactcaccacctcccgcccccatcagacgctgctttctcctcccagagacctccaagacctgccaagctgaggttgtttcctcgcctcgcccctcgcacgtttgttttctttcctgtagtttctcttgctgtctggaattgctgtttgagttactccgtgccttctttattgccttcttacccccgctagacacccagagcactggggcccggatcagcgatcttctccgcacctctggtaccc

SEQ ID NO: 34749 - DNA, 991 bp, Homo sapiens
  chr20:59827828-59828819
  binary
cggcggagcagggtgggagtggggctcggtggaggacccggggagctccgcctgcaccggacccgccgagcctccctcgaacgcccaaagcccgtagccgctacccggagctcggcttgcctgcatggggcaggcttccactggcggagccggcgcgccctccatcgcccgggagccgcgcgccgcgggagttgccgagcccagccccggccgtggctgaaggcgtggggcgcccggcggctgcgggccagggatccgcgagtgcggggcgcctgcccgacctctcctgcccaaggcctgggggtccgtctagcggcgccgctcagttctgtgggtgccggcaggacccgcgctgcgggtgggcggcggggtaggactgcggggcactctcacccccgagccctcggcggggctggagcctgcgtgtccggcggggccccgggggctgggagctgggccgggcttgggccgggaagccggacgccgggcgggcgcggcgcgggagggcgccccgggagggcgagcgggtctcccgctgcctctgcagagccccgcgggccggattgccagctttgctctgcgcctggcgaggtgcgcggcccgcgggggcagagagcgcggcggctccgggggcgcccctgggcggaggcggaggggcggcgggagttgcaggaaccccctctcgtggccgatcggcctcgctgccttctcccgggcagcgctgttgtaacctcggaaataaacaagtgccagcggcgggaggcccgctccgaggccgcggggcgctgggggacgcgctgggcacacgcttcgggcgggcggaaactttcctgggcgagttgagcctcccaccgggctgcgggtgcgatttggagcttcgtggccgatgaagaaagccgcggtttagagcttttcgtaaggaatgaccctgcgtcccgctctcctccctcggtgctgggggtagaggggcgccctccgcggtgccggcgtc

SEQ ID NO: 34750 - DNA, 864 bp, Homo sapiens
  chr20:60925296-60926160
  hypo
cgagctgcgtccccacttggcacttaatttcccaggacaagttagctctgctggagctcagcacctgaagctgtgctggcagcaacaagtgcctgggtgggtccccagggcccacagctcctggcaaacagcccaagtcctccggctcaggtgactgtgccactcctcccctcagacccaccagccacatccgaaggggcccagggctcccgcctctgctcggcactggccgtgagaatgggagtgaacctttgtcctgtctgagctccacccgcctccccacctcccctgtaaactggagcgtggacagagcagtaaggccccacagaaggcaagggcgggtcccaaatccaagcgcatgaaagttgggctgctcggttgcaggcactagatgagccctgccagctccctgctgggggtccaggagcctcgtcacacactcagcctcagctgcaccactctgagtggcttctgtccagccccatgcctgcactgccaccctagggtgttacaccctccgggcaccacgctgagtactggtttgcgtgtttcccagctgcctcccccggaacaggtgctcctgaggccgggctggggtcccaccctgtgttcccattcccaggaaaacggcccagcgtgtgttaggcgctcaacatacagctgctggctgaaagaaccaacgaagggagggaggaaaggacggacgtgccctggggttgcttctccgcagaatgagcccggccctaccttactgaggactctgggtgaggcccaggaatgtgccggtgccagcaccagggctgctgcccatcctgtgaggggctcccgggaggtggatgctctgcagtgccctcggctgccccc

SEQ ID NO: 34751 - DNA, 691 bp, Homo sapiens; identical to SEQ ID NO: 31732
  chr20:61505866-61506557
  hypo

SEQ ID NO: 34752 - DNA, 1401 bp, Homo sapiens; identical to SEQ ID NO: 27953
  chr20:62320890-62322291
  hypo

SEQ ID NO: 34753 - DNA, 1443 bp, Homo sapiens; identical to SEQ ID NO: 26865
  chr21:27011435-27012878
  binary

SEQ ID NO: 34754 - DNA, 1883 bp, Homo sapiens
  chr21:38064301-38066184
  hyper
cggcgctcctcccacggcgacacctccgtgctctttttgcttgtatttattcaaaaattagatttgtcaataacgcagggcctggcaaataggaggacctctccaaaattaaatgcaagattgaacataggtctctcacatcataataaagcggtttaatttggcttccaccgggggagcggaatagcacttgcccagcccctttgagccctgcgcacactcgcaccaccgccgcctctcccacaaagagaaaagccacgagaagggtcccgactgtgcaaatctgtgtgccctcccgaggaaggcgcccgagggctcactctgcctggttcaaaagcttgtgggagagaagcacccaaaagaattccgttgtcaggttaaagtctttgtctatactcgcaggatgggaaggacgatggtgcaatcaccgagattattttgttttcgtcctctaaaaaatgaagaggggactggagtcgggaccaaaattattggcagaccgcacggtttgcagtcaccctgaagttaccagcagccgatgctgtgtccagggaaaatattcttgagctggaaaacgtgctaatttaaagtctttcgtttcacacgaaaatgtgctgcactctttgactgctcaggaatttgctctagcacctagaaggaattctggcttagggcaggggcgagggacagtggagggcgttggaccttcttccgcaatcgggaccactccaggtctccccggagaaggctgagtctccagcgcgtggattcagatcaggactctgtctaagtaggcgagagctggggataccgctgggggctttggcgaagctaagaaagcactggcttcttattctcaccagacatctcaacacccacgtgcgctgggtcccgcagtctctcgcccgccccacgcgggtcccagccctggtccttactccccgcgcgggaagaatctggggagggtgggggcggagaggcggctgatcggagagtgggagggaggatgggagatgggcagaggctgcccgcatcagggccaggacagacgtccgcgcggccccaggcactcacttgagtgtcacgcaagtcaccccaacaccgcacaagacagtggcggggtgcgcaccgaggcccctacctggggggtgtgcgcgcactgaacgaccccttctccaggtgcgcgagccgctccggcggccgtgcacactgcgcccccttccgcccacctgcctggcctgcgtttctaaccacgcgggcggtcccgagacttcgcgcaaaaggcaggaccgcgactcccaataatgatatcttcgaaataaccccctgctgagccggcgcccagggccgggggtagagtcccgagtcccttttgcggaattaaggagacctctggcgaccggggagcctgcccctgtgaccgctccagcagcccctgccgcgtgcgtgcccgagtgtggcccgcagctcccaaagcccaggtgtgtgtggcctagggcggggagagttggcgacccgggcccatcaccgccccagtgccaccgccccagtgcctgaccagatggggtgcggtccctacgcccggcgtggccccgccgccgctcagatctgaagtccggctttcgctcgccctgcgcggcggaacctctgacccggagcagctctaggccgtgggcttcgtctcctcctcctggaaggaatgaatgggctccccgacacacacctctcagaaaactcacctttcacgctgaccttcaaaagaaaagaaagaaagaaaaagaaaaatccgctcgaagcgggaaaatgtccacgcccggatttggggtggacacgcgccccggcctggctggaggggccaacccagcggggcccgcctgcccgcc

SEQ ID NO: 34755 - DNA, 630 bp, Homo sapiens
  chr21:40032283-40032913
  binary
cgagccgtccctcccggcgctggacgccccacctgtcccggcgccgtcggaagagccctgcagagtgagcccctagggccaccccgctgccttcctccccgtccccgcagccgctgtagccagcgtgggagccgggcaggtcgcgtggggcgctggacttaccgagaggttagcgccgccgtcgggggagggcgtgtcccgcacgtgtgtgtccgcgcgtgtccgcgcccgcgtgtgccagcgcgcgtgccttggccgtgcgcgccgagccgggtcgcactaactccctcggcgccgacgggctcagcccatggtgtgggcgccgggttcagggaggctccggctcccgccaatcgcggagcagggcggccgccccgacgcgcgacttgcgaacccggagtgcgcgccgggggcggggcagggacgcgtgggcgggaatgcacgcgcgtggccaggtgcgcgtgggtgcgagcgcgcgggagtcttcgagtgcgcgcgtgtccgtgtgcgcgtgggtgtgggtgtgctcgcgtgtccgtgcgcgcgccctcggggccaagagcgcgggccgcgcgggcaggtttggacactacgcgccctgctcgggtttaggacgcggctggcggctcc

SEQ ID NO: 34756 - DNA, 442 bp, Homo sapiens; identical to SEQ ID NO: 27967
  chr21:44847478-44847920
  binary

SEQ ID NO: 34757 - DNA, 259 bp, Homo sapiens
  chr21:45140801-45141060
  hypo
cgggatcccccagcaatgtcctttgttctcgaactcccagtgactcgaggggtgtcctctgattgctcacctcaggtggagcctcgaaaggatggcgctgctgttcctacctcgggtctccccagtgcacggcatccttacctgtgggctccacagggttccatgcaggcattttgctcccataccccgatgtccaagcccggctggacaaggagaagcaatgtgatgaccgaggggctgagatggctggagacccagc

SEQ ID NO: 34758 - DNA, 805 bp, Homo sapiens; identical to SEQ ID NO: 22887
  chr21:47062148-47062953
  binary

SEQ ID NO: 34759 - DNA, 1174 bp, Homo sapiens; identical to SEQ ID NO: 22888
  chr21:47063290-47064464
  binary

SEQ ID NO: 34760 - DNA, 526 bp, Homo sapiens; identical to SEQ ID NO: 24367
  chr21:47565081-47565607
  hypo

SEQ ID NO: 34761 - DNA, 271 bp, Homo sapiens; identical to SEQ ID NO: 24369
  chr21:47746193-47746464
  hypo

SEQ ID NO: 34762 - DNA, 1712 bp, Homo sapiens
  chr22:17849427-17851139
  binary
cgcgctacagcagttagcatttctaaagcacacactccaacacccttcggccgtagcacattcaatccctccgccggggcgtgggggtctcctcccctccgagcacagtccccggcttcccgatttcctctgccccatccccccgccttccaagcacattgtgctcactcttccaggcagctctttcagcggccgggcagtagcagggttccgagcccgtcttctccggggcggtcacacgtgtccattccctggggttggggatcgctcttcccgcttggctgctgattggtgcctccccctaccccacccttcccgccgctctccagcctccatcctacttcgttccagctcaatcagccccaccgccttcttccctcggagaaaaaagccacttcagagctccttgggcgccgttctcggctggaataaaagcgttaagaaacaggtggaaagcacttcacttctctaggcttcatatttctagggtggacagcccgctcctgctccggctctgccctcggcatcaataataactgaactcccacacgtgcacgtttctgtctctagcccgaccgaaaggaccaccccgcgggccctttaaaaggacgcgaccactcaggccaagtgggggtgggagagctcctggccgtcctcccttgggaaagtgcttcaactccccagtcccaaagtcctggagggcggagggcgcctcgtgagagttctcgggggtgcggcccgcgccccctgggtcctgcggatctgggcccgggggcgcgcgccccgcccctccccctccctggcggtgcagctgtccgggcgggggtggggcgggggccggggcccgcgtgggattaactaggaccggggcgggagtcgaccgcggccggcggggagggctagccccgctctggcgggcgggcgcgtggcaggggctcccggaggccccgagctcccgggaggcgctccggccaacttcgggccggtggggaccgggcctgggcgcggggctctgaaggtgtggaaggaaagtttgggactccgttattcttccacagcgtccttcctcccgtaatatccagcctctttatcgcggggctcgggagcccttggagttgatctcgccaccattatccccccgggcgagcgcggaggacgggctggccattctggccaggccggaggtgttttccagcccggggctttgtgataactgggccgaaacccgagggtcctggagcgcggcgggtggcgggagcttgcggagcgcggcgcactcggcggccaggcatcggccagcccagcggcagccccctttctcctatttttatttttatttttggaaggagctgagaattagtcgattggttggcaggttgaattgccttctcttctatggcaatatgtgtcgtgacttttcaccttttgcctttggacaaaggtgaatggcaactgcgttggtcagtttttgttttctgttctgcggatgggttcgccgacgcagtaatcaaaattagagccactcttttggaagagcaaatcgttgttgttgcctccccagccccacggatcttactttgtgccattttcgggttgattttaactcgtttatttcagagctctttgcctcacctttatttttagatttagtcgtgtttgctgaaatatcagttgcttcttctgtgaatgaagtgtgggaacttgctctcgtc

SEQ ID NO: 34763 - DNA, 361 bp, Homo sapiens
  chr22:18265358-18265719
  hypo
cgatctgaccccgtggcatccttcctttcctacaaactgcactgagacccaggtgtcatcgtgaagttcatgccagccagaggagccactgtggcgtttccggccataggcctgggcaggagccgctcccaggcgtgccgtgggcagggccgggtcagccttcagggaagagatgcctgtatgggaccaactcaggcagccacagagggatggcccagcaccccacaaaacccaaagtgctcagcgtctaggatctgtttacggggcagagaagtggatgttcttttcctggttcaaaggtagaaacaggcttggagagccgcacccggcatcagccagccaggcagacgcctggtctagc

SEQ ID NO: 34764 - DNA, 433 bp, Homo sapiens
  chr22:20228961-20229394
  hypo
cgtcgtccgatatttttacacaagtaaaataaaatgcatatctctatataccgcgatctgggtgggaggcggcgttctggaacaaacgctgccgccgaaccctgtaaacatgatggggtggagatgggggtggcgggcggcaggcgtccatcagggaggacctggcctggcctgccccacgggtcggccgcccggctggcttggcggcgtggagagagaccccgtatgtacacacacctggctgctgagcacgctcttgtgtccgctgggggtcagcagggcccaagcactgtccacagcaccagcgccaggcccaggggggtgaggctgcaggtgaggctgggtagggcacctgagccttctgagtcaccagtcccgccacccccgctgcctgcctggcccagacggcagtggctgcgggtgcggttcttgc

SEQ ID NO: 34765 - DNA, 1146 bp, Homo sapiens
  chr22:22005779-22006925
  binary
cgaagggtaggcgcttaatgaatgcttctccgcaaagtggatcacaatcacgaagaaaccaaagcttacacttccgttccccatatctcccacagatccaaaagaccacggggcccaggacccggtctccatagcccagccatacccgggggttttcaggaaagcctcactcgcgtcctgccgggcgatccggggtggttgagttgggaggggggctaccccagtttgtaagcccaccacgtccaaatatcccatccaggaggcgcagagagcaacctcagcatgcataacaaagcagcccgcggccgcgttcacagcaggcttggcgggggttcgggaatttccacagggtctcggcctcccccactgtgggctcgcgcctggcgcccctcaccgggcttccaagcgctcttgtcggtgtcgctagaaaactcgcagagattggagctgagaaaaggcgggcaaagttccttttgataagttatgaatggggaaaaagtgtttgtagaactcattgttaaaaccacggagcccgagactcggccggcgccgggccaatcggaacccggaggctattttgaaatctctcccgtctcagccaacaggcatgcaggaggcgaatccccgcgccagcgccggccaatgagcgcagcgctatgctaaggagtcgggggcccggcccctccgactgtcagcgggttaaagatggagccggcaggcgaggggccgccacgaggtgcagggtcgtctggacggggacccgggggcagacgatggccgggatcctcttccgtctaaccctccgcgtcctgaccgggccctgggcggaagggatgtctgcgtgagtcagctgtgtctgaggaggggatcctgggctgggctgggcggccctactcggcgggtcaggcggaggggcgcggccgggatcccgggggccctctttggagcagggaactctagaagggcggggagcccccatcctctgctccactctgggcctccaggcagaagaatatgttagaaaagaatccagagtgtatctagtgcagggcaaggggccagggatggagtcgtcagctagaaggggcgcgtcgtcccggggtggggccgccctttttctcctggagccgcgggccgagtcagggc

SEQ ID NO: 34766 - DNA, 821 bp, Homo sapiens; identical to SEQ ID NO: 22889
  chr22:22862472-22863293
  binary

SEQ ID NO: 34767 - DNA, 875 bp, Homo sapiens
  chr22:25678576-25679451
  binary
cgtagagacttggtcgagaggcgcgggacaagcctggccgctgggactgtgcgctgaggtgcaccgaccgtcgggccgcgagctccccgcagaccctcgcggaatgagctggggggcggcgcgcgaggcggcggagcggaaggcgcactgcgaccccggcgggctacagcctgcggcgcttgcagggcgctggtggggcgcgccgagcaggggctgccctggggctgccccagtcccaccaggtcggggctcagctggcggcggcggcggcggtggcggcagcgcgtcccatccgggtccgagtaaccgccgccgccgccaaaactcgccaacgtggcggacccggaggctgtgctggcagatgccagttacctgatggccatggagaagagcaaggcgactccggccgcccgcgccagcaagaggaccgtcctgcccgatcccaggtaccagctgccccggcccgcgctggtccccacgccgccgtccccaagcggccgtcagcgacctcctgcgtccgggagggtcgggcattgagtcgtcgctgtcctgggtgcgggtgacaccgcggaactggcgatgcggggccggcctccccgttccagtctctgaaatggggcatcggatggccggtgggggggactccgggagagagcgctccaaagtgcccagcgcggcgccctgcgcgcagcgagcgccccagggaggggctggttatgacttggctggaccagctccatccctgtcgccccctccccccggccctgtcctgtcctgtcccatccccgtggttcttcctgttgcattggtgtggtccctgtgggctcgttgcctgtcactcctttgcgctccttcttggtcgctgcttcttcccc

SEQ ID NO: 34768 - DNA, 1163 bp, Homo sapiens
  chr22:26565120-26566283
  binary
cgtctggaaaatggtccgggtgctctccagcctggcctggccaggcagagctgctgggagcgtcagcagggagagaaaacgctcggctcccaggacgcaaggggaattggcgttaaactttgcagggccgacgggccggcggccagaggaggcggctggcacccccggcgccgccgcggcccctccagctcactgcccgctcgcccgccccctccctccctgcactcgctcggcacagactcggccccagccccctccctcctcccgctcgctccacgctcgttcgctcgctcgccggctcctcctcactcgcccgcccgcgcccggcgcagctcggccagagcgaccgcggggctgagcgcgcgtccgcccagggggctccggaagctgccccggcccgcggcctcctccctcgctcccgcttcccctttctcgctcaccgccgccctccttccccagctccctcgccgtccgcccgccccacagccagcggctccgcgccccctgcagccacgatgcccgcggcccggccgcccgccgcgggactccgcgggatctcgctgttcctcgctctgctcctggggagcccggcggcagcgctggagcgaggtaagcgccccgaggggcggggcgggcagggggcaaagttgccgggagagcggggcagccaggggtcggggctgaccagggcgactcaggcaccacccgccgggatgggaagcggtggtggctgtccaaaatcggggctaggaaccgcacgtccccttggcccgggctgatgggagtgtggaggcggggatgtgttgaaggactcgggcgcttccctgcttcggctgcgggctccctttcggtcttccccggctgcggggctgattctcctttgcagccaaagaggttctccttggagtggggtcgcctccaaaccccaaattcccggcgcttctctgcaaccgcacccggggctaggtgccagataattatcttcctctccgggagaggacaggaaggggggtgagaagctgacccaccctgcaactgaggactagactcaaacagtgcatttgccgctccccccgacaccacagaaacccttgactcctttggttcaggctaccccgagggtctgtgttcctggatcgatctcagccaagcgtcaggatacc

SEQ ID NO: 34769 - DNA, 316 bp, Homo sapiens; identical to SEQ ID NO: 26889
  chr22:35420072-35420388
  hyper

SEQ ID NO: 34770 - DNA, 102 bp, Homo sapiens; identical to SEQ ID NO: 16829
  chr22:35821646-35821748
  hypo

SEQ ID NO: 34771 - DNA, 600 bp, Homo sapiens; identical to SEQ ID NO: 31783
  chr22:35848339-35848939
  hypo

SEQ ID NO: 34772 - DNA, 208 bp, Homo sapiens; identical to SEQ ID NO: 16831
  chr22:38146528-38146736
  hypo

SEQ ID NO: 34773 - DNA, 772 bp, Homo sapiens; identical to SEQ ID NO: 25592
  chr22:38220591-38221363
  hyper

SEQ ID NO: 34774 - DNA, 524 bp, Homo sapiens; identical to SEQ ID NO: 26891
  chr22:38694460-38694984
  hypo

SEQ ID NO: 34775 - DNA, 553 bp, Homo sapiens; identical to SEQ ID NO: 24382
  chr22:41634408-41634961
  hypo

SEQ ID NO: 34776 - DNA, 137 bp, Homo sapiens; identical to SEQ ID NO: 16834
  chr22:41973298-41973435
  hypo

SEQ ID NO: 34777 - DNA, 998 bp, Homo sapiens
  chr22:45404684-45405682
  binary
cgcctcatcggggcagctcgcggggcggggcgggggccgaggccacccggcggcgcgccccgagccgtgcaagtttgcaggccggggtgcgtgtgcgagtgagtgtgagtgtgagtgtgtgccgggggaggggggaggaacaaagagccaagtaaacacggcgagtccgtgtcgagcaaagctcataaatattcaagtcgcgtcctaatctccccaacacacacacgcgcacgccgagccccgctcaggctccggccgccacgccgccgctcgccagcagcgatcgccaaaactacttctgcacaccgggcaggttcgcccggggcgcgggggcccgaggggaggccggaagggggcctattcgcactcccctccccgggaccggctcacgaaggggccccctccaggcaccctcccagtcatgcagaccctacatcgcttaagagaagactccaggctcgggtcccacgcgtcctcgatcccgcaaactgtgcaggacagcgccaggggcaggcggaggggagcccagaagggggtccgcgcgtgtgctcactccctcgccccccgcccccgggcaggctccagcctggaagacccagagacccggaagagaggatgctgggctcgggtcccccgaccccctcaccccgcaacacactccccggccccgggcccggcccccggccacctacctggtggcgcgcgagttccacggcgagcgcctcgggccggctctgcagctccatcccggcaacttgggcagcactttgcgctcactttggcccgggctcccgggaagttgcgcggctccgcgggggccagagcgggcgcgggcggacgcggcctccgggctgggttgggggggacacgagccccctcccccacggccgaaagggaagggggctggcgaaggggaagacaggcttccgggcgccgcggcgccgagccctcggctgccccaactcctcaggctgcccggcaagttgcgccgggtcccc

SEQ ID NO: 34778 - DNA, 1451 bp, Homo sapiens; identical to SEQ ID NO: 31796
  chr22:46367044-46368495
  hyper

SEQ ID NO: 34779 - DNA, 994 bp, Homo sapiens
  chr22:48885701-48886695
  binary
cgggcgctcgagcacttcggggtcggacgccccggcccgagcctcccttccctgactccccggcagggcccgggctccaggccccgggtggcgcggcccgtccctgcccggcggtcggagcccagccagcggcttcccggccgagatgcgcgctcaggaggcagccgcaggtcgcggagggcgggcggcgctgccggggtgtctgcggagcgccctccccgtgcctcagcccgggacaaggggggaggcggcggccgagcccggagaggagctcttcaggcaggagcccagcctgggctcggaggagcagctggagcttccgctttcccgggaaacgggctcgtcaggcgccttctggaaagagaagcgaagtgagggatgggatgcccggagggggctcgccgcggccgcggacgtttctcgggtcgtgtctggggcccgagctggtgaccggcgggactggcgcgggcgcgggctggggtggtgcgggccagtgggcgcccgggcgtgagctgagggctggggtagggggtgaccgccgcgggctccctgttgcctggagtgaagggtggggggtggcctgtgcccctgccgaggctccaggcgggtggaatgaggggtggttggagtcccgggtgcagactccagcctcggcgctggggagggtgctcagcatcccggggcacgttcgcggctggtggggtaagtgggggccgctcagcgtcccgggcacaggctctggccccagatggcgcgggctggtcggcttcagctccgggagctccgggcttcttgtcttcagcgggagaataggacgggtgctggggagcacctgtcatggagaattgccatgggcgcgggaggtgatggaaaaatatggattctttacaaaaaaaaaaaaaaaaggccagcaccgaacctccctccacagacaccacctcctccagagccccgggcctccaagctcccagtccgatctgatccttccgctgtc

SEQ ID NO: 34780 - DNA, 1272 bp, Homo sapiens; identical to SEQ ID NO: 16837
  chr22:50718718-50719990
  hypo

SEQ ID NO: 34781 - DNA, 517 bp, Homo sapiens; identical to SEQ ID NO: 16838
  chr22:50885403-50885920
  hypo

SEQ ID NO: 34782 - DNA, 828 bp, Homo sapiens; identical to SEQ ID NO: 24389
  chr22:50899033-50899861
  hypo

SEQ ID NO: 34783 - DNA, 110 bp, Homo sapiens; identical to SEQ ID NO: 16840
  chr3:10131952-10132062
  hypo

SEQ ID NO: 34784 - DNA, 187 bp, Homo sapiens; identical to SEQ ID NO: 16841
  chr3:126472179-126472366
  hypo

SEQ ID NO: 34785 - DNA, 775 bp, Homo sapiens; identical to SEQ ID NO: 24396
  chr3:127394412-127395187
  hypo

SEQ ID NO: 34786 - DNA, 283 bp, Homo sapiens; identical to SEQ ID NO: 27986
  chr3:127534744-127535027
  hypo

SEQ ID NO: 34787 - DNA, 1011 bp, Homo sapiens; identical to SEQ ID NO: 26932
  chr3:132756962-132757973
  binary

SEQ ID NO: 34788 - DNA, 623 bp, Homo sapiens
  chr3:13590414-13591037
  binary
cgggcgcagggagggtgcgggctccgcagcgagcgcgccgggcggcctctaggagccgggtcagcgagtctgggctctgagcgagcggcgccggcccggccccctctccggcgggcggccgagaccccgccccggaggcggaggcggagtcaggggagggggccgggggccggctggtcccgcctctcgcgcctccgccccgccccgcgcgcacacagccaggggccgcccgggctctcgacgcgccgacggccgggcggacggacggacggacgccgagcgcagtgccccgcggtgagtgcacgcggcccctcccgcccggactcatccccgtcggtccgcgcctcgcagctcaggactcgggggcgctcggacgcaccgacggctcggcggaccctcggacgcgcctcgcgggctgcccgcgcctccacccgcgccgccggtccgaccgggtctcgctctcccggtcccagcgcggggacggcccgcgagcgccgcgacccagtgtacagatgcgggcacagaggccggcgcggggtgggggccaggggtccgcgggcgggttcccccaccccaggtccgcagcttcctccgctctgggtttcacttctcccccctgggcc

SEQ ID NO: 34789 - DNA, 464 bp, Homo sapiens
  chr3:137717579-137718043
  hypo
cgcctccattacatggtccgttcctgacgtgtacaccagcctctcagagaaaactccatccctacactcggtagtctcagaattgcgctgtccacttgtcgtgtggctctgtgtcgacactgtgcgccaccatggccgtgactgcctgtcagggcttggggttcgtggtttcactgattgggattgcgggcatcattgctgccacctgcatggaccagtggagcacccaagacttgtacaacaaccccgtaacagctgttttcaactaccaggggctgtggcgctcctgtgtccgagagagctctggcttcaccgagtgccggggctacttcaccctgctggggctgccaggtaagggccaggtgtctggctggctggagggagagattggaggtggagaggaaactgcaggctctgtctgggcaccacgacagggactgctggggagggaggaactgcgattc

SEQ ID NO: 34790 - DNA, 415 bp, Homo sapiens; identical to SEQ ID NO: 25630
  chr3:138679163-138679578
  binary

SEQ ID NO: 34791 - DNA, 1358 bp, Homo sapiens; identical to SEQ ID NO: 26942
  chr3:139653822-139655180
  binary

SEQ ID NO: 34792 - DNA, 1733 bp, Homo sapiens
  chr3:140769451-140771184
  binary
cgtaatggacctaaagtcaattctgggagcacagacgagggccaccaaaccaagaactttcaatttccccaaggaagcgcagataccagaagcaccctcgaggcttctgttttggccacgccctttaccccatcgctcagttcaggctcccaatgaggcggcccaccatcagcgctggtagagcaaagagaccgacttcctgcgcctcgggtgggcggggaacgctccttgagcaggtgcggtatgaaattggactttaagagatgagttggagcctgatctcaaaaataaagtgtggacgtgtgtgtctgaggaagggggataataaaccacccttttttcctcctggctgctatttcccacgtgcgttgagtaaaggcaccaaagctgcctagtgactgggtgtctcctccccgtcaggggcacccaccctggcgctccaggagcgcttgaatgaatccgggaggacccgcgcgcaggaatgaatgcgagagctagggagtgagcgggcgagtgggcgggtgagtgaatggcgaccgcgccgccgccttggcacaggggcgcgggcgcgggctccacttccctctcccgccagctggtggcctcgagaaggtggcggcgccggcagcggcccgagctgggacggccggggcgcgggatggtgggggaaggggcgttcccggcgaccgcgccttccgcggctattggattagtggccttcagggatgagctcagccagatcggctttcagctgcagcctccgggccggccgggaaggcggggagcgggcggcggcggcggaggagggggaggcggcggcggctgcagcatccagagctggccgtggcggccggcgcgccccgcgcacaaaagcacccagccccaggggagggcgatgaacacaccacatcccgggcccgggccccagctgctgctaccgctgcgtgcgctcagggcgctggggaagacgcccggcgcgccgggggccagcggccgaggcgcggcccgtgcgccctgagcgcgggactcgtcgccctccgggtcaggcgccaagcttccaagcggctagagcgcgggccttggagcgcccccaggatcgcttcagtaaggcgcttccccactccaggcccgacccccggcgcctgagcgccaacttcgccaagaacgctcctaactccaggccatcctgcagcgcagagggggcgctgctgccgggcatcagccgtgaggacgcgcccctggccgtgcggagagagccggcatttgcgggtcactcgggcgcccctgagtgggcggcggcggcagcagacccctctccagggagtccaggacctgccagcgctggggattcttcccgaacaggcgcttgccctctcttttatggtaagtactctccagctcctggtgaggggcgcgcgggggccgggagccgagatccggctgcacggactttgtgcgggccagcactcgacacagctggcgctcctgacgtcccagtccctgagaattcctctctgcaggttgtggcagttcgagatggttgatttgcgcgcagccctggggcgtttggggcccggcctttggtatcatgggttctaagccctttgcttctctgcgtagcggacaacgcacaaaaaactgccatccgattcacccgctttggtttggatccaggatccgtcactcactggctgagtgaccttggacagggcgccaaacctgtttcctcatcc

SEQ ID NO: 34793 - DNA, 506 bp, Homo sapiens; identical to SEQ ID NO: 24405
  chr3:141174173-141174679
  hypo

SEQ ID NO: 34794 - DNA, 983 bp, Homo sapiens
  chr3:142839302-142840285
  binary
cgaaatcgaggaacgagtgacagccggacagtccgccgggcggtgatccggggccgctcccgggcgcgccctcggctccaggtgagcggaggaaccgggcagaaccgagggtgggcgttacttaggaggaggaggctgggagggagattggggcgcatccgctcactccgcttcccctcgcaggtcctacccggagccgctgccatgggagagccagccttgggcgctggggaccagccgccgcgcccgcctcggagtcgcggcccgagtcccggcgccagcagccagcccgctgcgtccccttcccgggctgcagggctgcctccgccgcgccgccggcccggattgtgcctgtgatgagccgcagcccgcagcgagctctgcccccgggcgcgctccctcggctgctccaggctgcgcctgcagccgcgccgcgtgccctgctcccgcagtggccccggcgcccaggacgccgctggcccgcgtcccctctcggaatgaaggtgttccgtaggaaggcgctggtgttgtgcgcgggctatgcactgctgctggtgctcactatgctcaacctcctggactacaagtggcacaaggagccgctgcagcagtgcaaccccgatgggccgctgggtgccgcagcgggggcagccggaggcagctgggggcgcccagggccgcctccggccgggccgccccgtgctcatgcccgtttggacctccgcactccttaccgccctcccgctgccgccgtcggggcggctcctgcagccgcggcagggatggcgggggttgcggcccctccaggcaatggcactcggggcaccgggggcgtcggggacaagcggcagctggtgtacgtgttcaccacgtggcgctctggctcgtcgttcttcggcgagctattcaaccagaatcccgaggtgttctttctctacgagccagtgtggcatgtatggcaaaaactgtatccgggggacgcc

SEQ ID NO: 34795 - DNA, 124 bp, Homo sapiens
  chr3:156543180-156543304
  hypo
cgatactgctctgcgtcatttaatcacttctctaaatctataggttcaattaattttctttgtatttacttaatcttattttattcaatagcaaaccagtctctttgcctgctacagagccatc

SEQ ID NO: 34796 - DNA, 838 bp, Homo sapiens; identical to SEQ ID NO: 24412
  chr3:157812151-157812989
  hyper

SEQ ID NO: 34797 - DNA, 1895 bp, Homo sapiens; identical to SEQ ID NO: 26955
  chr3:16553609-16555504
  binary

SEQ ID NO: 34798 - DNA, 820 bp, Homo sapiens; identical to SEQ ID NO: 24414
  chr3:169539913-169540733
  hypo

SEQ ID NO: 34799 - DNA, 1102 bp, Homo sapiens; identical to SEQ ID NO: 27999
  chr3:179168676-179169778
  binary

SEQ ID NO: 34800 - DNA, 1801 bp, Homo sapiens
  chr3:181429601-181431402
  binary
cgccccctttcatgcaaaacccggcagcgaggctgggctcgagtggaggagccgccgcgcgctgattggtcgctagaaacccatttattccctgacagcccccgtcacatggatggttgtctattaacttgttcaaaaaagtatcaggagttgtcaaggcagagaagagagtgtttgcaaaagggggaaagtagtttgctgcctctttaagactaggactgagagaaagaagaggagagagaaagaaagggagagaagtttgagccccaggcttaagcctttccaaaaaataataataacaatcatcggcggcggcaggatcggccagaggaggagggaagcgctttttttgatcctgattccagtttgcctctctctttttttcccccaaattattcttcgcctgattttcctcgcggagccctgcgctcccgacacccccgcccgcctcccctcctcctctccccccgcccgcgggccccccaaagtcccggccgggccgagggtcggcggccgccggcgggccgggcccgcgcacagcgcccgcatgtacaacatgatggagacggagctgaagccgccgggcccgcagcaaacttcggggggcggcggcggcaactccaccgcggcggcggccggcggcaaccagaaaaacagcccggaccgcgtcaagcggcccatgaatgccttcatggtgtggtcccgcgggcagcggcgcaagatggcccaggagaaccccaagatgcacaactcggagatcagcaagcgcctgggcgccgagtggaaacttttgtcggagacggagaagcggccgttcatcgacgaggctaagcggctgcgagcgctgcacatgaaggagcacccggattataaataccggccccggcggaaaaccaagacgctcatgaagaaggataagtacacgctgcccggcgggctgctggcccccggcggcaatagcatggcgagcggggtcggggtgggcgccggcctgggcgcgggcgtgaaccagcgcatggacagttacgcgcacatgaacggctggagcaacggcagctacagcatgatgcaggaccagctgggctacccgcagcacccgggcctcaatgcgcacggcgcagcgcagatgcagcccatgcaccgctacgacgtgagcgccctgcagtacaactccatgaccagctcgcagacctacatgaacggctcgcccacctacagcatgtcctactcgcagcagggcacccctggcatggctcttggctccatgggttcggtggtcaagtccgaggccagctccagcccccctgtggttacctcttcctcccactccagggcgccctgccaggccggggacctccgggacatgatcagcatgtatctccccggcgccgaggtgccggaacccgccgcccccagcagacttcacatgtcccagcactaccagagcggcccggtgcccggcacggccattaacggcacactgcccctctcacacatgtgagggccggacagcgaactggaggggggagaaattttcaaagaaaaacgagggaaatgggaggggtgcaaaagaggagagtaagaaacagcatggagaaaacccggtacgctcaaaaagaaaaaggaaaaaaaaaaatcccatcacccacagcaaatgacagctgcaaaagagaacaccaatcccatccacactcacgcaaaaaccgcgatgccgacaagaaaacttttatgagagagatcctggacttctttttgggggactatttttgtacagagaaaacctggggagggtggggagggc

SEQ ID NO: 34801 - DNA, 481 bp, Homo sapiens; identical to SEQ ID NO: 24417
  chr3:181437081-181437562
  hyper

SEQ ID NO: 34802 - DNA, 2269 bp, Homo sapiens
  chr3:181443705-181445974
  binary
cgcagtgttattcttctccatgggtctgctggcctccccgcccccgctggacaatgcgtgctttgagactcggtggcctgcaggcagcgggagacgaggggactgggcagccttcctccaaggggcccgcagctgggggagcgccaggcagggagcagggacaaggaggcgagccacgcaggaaggaaaaccataaaagtgccattttttcccttagccctgcacagaggcaggctttgaggacctaggggcagggcagctggggcggggtggggtgggggtgttgagaggttttgcgtgttctttttaccccctttccccccactgaaacattttatttcggcacataattatgcactgcagattctccagcctcctcgccctcaatcttggtaacctggtctttggttaataatatcgcaactcgggacttcaacgctcagaccccctccaggccccagcctccgtattctcggagccctccactactgatacctctcgcggagtgcggcgccccgggaaaagcctcttggccagggactctgggacattactttctagtttgttttgttttttgtttttctcccagagaccaccaccaccctcatcctcttcaggcagcatttaggagaggacctctgagatcagcagaaggcctcagacggtcaccatattggtggaagcgtttgtctgatgttttaaaacgtataccaaacggggcgtcagggccacgtgctgtgccttcgaaacgccgccgcgggccctgcctttcagagctgcggcagccggggctggcgtggagggggcgctgaaacaccggcgggcgtcaggggccagcgctgagctgcagatctggccgcagcgctgagtgaagcgaattatctggagcgtgtttgatctgggactgcgtagtcagcttctgctttatttgtttgtttgtaatctcatatttagcaagccgggacggtggcagcaagggagaaaggacgggatggaggagggggcttcgcggtaaccacaccccttcctaatgagttaatttccatatttgcgcctcccgcatctagcgccctctttttttttttttttttttttttttttttgcctgacgccactgtgctgttgcgtcttgcgcagcgcagacacctccactctggattgaaacgaaaaagctcgcggtaagagcagaaaattggtctattgatacattcgctccgagtgttgatcttggcatcaccgatagccggttaattcccccaccccgcccccgccagtgggtcgcacgcggattgccgagggcttgcaggcactcaggcagacgcagacagaaacccacatcgaccccccccctttccccgcctccagctgtccgaccctcaagtctctttctttttcttttttacccaactccggattattttccccctcaaggtgagggcagtgagagcagcgagggcacagtccgcacaaaaagggggaaaataatcgcaaaccaaggaaccaaaagtgaaagtttcaaactagataccaaccctgatggaggttgggtgctgacccgactgtgggtacttaagagaaggaaggagggaaactgaggtggtgagattatgtccacagtatgggtcggttaaaagttgtagtaaagaagttttgggagggccctcactagaaactcaaggcgggtttcagctgatttaacctggtttcctacacatttttgcggtgattctgctctggaaattggcgaaagagacagacctttgcaattgctcacccctccctgcccccaaccaccctgcttactttcgcgaagcgcattaggatgtgggctctggcttgagctccaaaatagcttgcttgtcaattgcgagctgcagcaatatcaaagtgaactgtcccaagtaactcttgtctagaagctgggaagaagcttaagcagctcgctttaatgatgatttgtagctcggcgaggggcacggacagcaaacaccccgcaggtgtgtgccgtaacaccatcatccggacttgaatgtagattactctggcgatcgtttgatcggccctttgaaaccctttacaattgcctgtgacgaacggccagtctcagtttttctctgaataatccctgagggtaagtcctccgggcttttaaagagctctagtattttttttttaaagaataaaaagaaaaacgttcgattttagtttagacctcgtcaacttttagtcgctaacaggcatcactcaagccagtcaatacttaatgacc

SEQ ID NO: 34803 - DNA, 146 bp, Homo sapiens; identical to SEQ ID NO: 31832
  chr3:184059878-184060024
  hypo

SEQ ID NO: 34804 - DNA, 180 bp, Homo sapiens
  chr3:184459063-184459243
  hypo
cgggagctgagaaagaagcagaggcctctttggtggaggaatcccggcaggccggcaagtcccaacaggccgatgttgggctgctgcaggcagacagtgagtcacctgggtccccgctgcttacaggacagagccagaataatgacaataataatagaggtccacggtgctgttattaac

SEQ ID NO: 34805 - DNA, 1258 bp, Homo sapiens
  chr3:186078710-186079968
  binary
cgtatgctaatgaagtccgaggaggcagcggcgcagcgcgggagagcgcgcccacgggttcacagcgctcccgggcaccactgcggcgcagccacagatcgcttcgcgctgcagcagacgctcccgccgcggggggcgactgggggaggggtctcgaccgccaccctgagttccgcagctcatccctcccatctgggaggtggttctagctctagtcccaagctttccactgcagtgatggtggggatgggggcagcacgtcaaatcacctgtagggctttttagaactccacagccccctcccctaattctattccactagttcaaacgaagaaaatctcagactaggcaaggggaggtggaccggtggagtctgcgaaagcaccacaggtgactccgggtacgcactcctcaggacacaagcacacacacggacacatcttgtgactctgagactacacagatcaacctcagattcgacccttccctcctttattctctgaggtgtccgtgttcgcttcagcttccctttaagtcgccctgcgcaggggctttgtggagtgcccccaaagtcctagaaccccgcgggacggtcggaggctttggcggccagacattaggaaaagcatctcctgcttctcggactgcctggagcgcgaactggatatcaaggagccaaggttaagtccagaagaagaaggaaatccgaccagttgctttagcaaactgcctggagcaaggccgcctcccacccgcacagctttgaggcttgagggggcctctcagtcgcagagagagccgagccccaccctgtgcgttccccaagcctgcacccctcgagcggggcatcccttcctgcagggctttgtggcaggtggaactgtcggggtgggcgccgtggctttggctgcagccccttccctggccgcgggaccggctcccgctttgccctcctttaccaagttgctgcaccgggtgctccctgagccggggaccccctccgccgcgccggccgccgtcttacctcaccaggcaacacttggttgcgcggtggcccggggcgctccttcttcgcggtttattcccttacttgggaggaaagaggaaccgagagacagaagggggaccgaagctggcctctgggcgtcttcccgcctgcgcagccctctcgggggagggggatgcagccccagtgggtgccgcggagaccaggctgccaggctgtggttggtagcgccggggtcttcaccctgtgctc

SEQ ID NO: 34806 - DNA, 635 bp, Homo sapiens; identical to SEQ ID NO: 24423
  chr3:186857065-186857700
  hyper

SEQ ID NO: 34807 - DNA, 1442 bp, Homo sapiens; identical to SEQ ID NO: 26979
  chr3:192126754-192128196
  binary

SEQ ID NO: 34808 - DNA, 370 bp, Homo sapiens; identical to SEQ ID NO: 16861
  chr3:193586985-193587355
  hypo

SEQ ID NO: 34809 - DNA, 223 bp, Homo sapiens
  chr3:193588113-193588336
  hypo
cgtttcacagatggggaaatggaggccgagacgtgggaatgctttatgccaggtcccgcatgaacagtggtagatctagaactcaggtgctacgctgtcggcctgctgttggtctgcggagctactatatagctgttgcgtgactcagggaacacctggggcgtgactgacaggtggagaagggtcaaggtggttggagcccaagcgtggataagacagcccc

SEQ ID NO: 34810 - DNA, 54 bp, Homo sapiens; identical to SEQ ID NO: 16862
  chr3:195597381-195597435
  hypo

SEQ ID NO: 34811 - DNA, 393 bp, Homo sapiens; identical to SEQ ID NO: 16863
  chr3:195597835-195598228
  hypo

SEQ ID NO: 34812 - DNA, 2308 bp, Homo sapiens; identical to SEQ ID NO: 33790
  chr3:195599104-195601412
  binary

SEQ ID NO: 34813 - DNA, 928 bp, Homo sapiens
  chr3:195602314-195603242
  hypo
cgcacgctcggaggcacaggaagctccccctcgggatggcgcccacgcacactccaaggcagcttcatcccaaggctccagtgggacttccaagaggaccgtgtcacttctcgcagcccacacgcacccgtgtgaggctcagtgtggccgaggcaccagcagtccagaggggactgaggccagcccttccttccaggcccgccctgtccgcgccctctctctcccgccatgaacaggccggagtccccgtggccatgggagggccagggctgctacccggccgtgactgaagcaggggcggatgaggacttcctgggggagcaggaaaagggcccaacacctccgcatgaaccttctacctcctgctgcccccgggcctctggtcaacatctctggggtagacaagatggaaaacagaggccggtgctgagaactgcctaaggctgccccagctctggaaatctcagcaccacgttcccgtccgggccgaaggtagtccagaaatggctcaactaatgccggacattctgttcaaaacgcccgcccgctcttctccctaggggtcccaggcgcccaggcctggagggataacccggatgcctggctcccacccaccacaggaagccgaggctccagggccagaccaggccaaggacccgcaatggattccaacacccgctctgtatgcggaacaaaagtgctgccagccaccccttcctccaaacgagcccctgggaaagaccagtcatcatttgtgtctccaaatctagacacagcacgaaacatctaggtgtctcccctctgcccacagcctggtaccctgagaaggactgagcctagactcagtcagagctgcggcaggtggcctcccagactccgcaccaggaaacaaatactggacacagcttcgcaagtgggaagccacggc

SEQ ID NO: 34814 - DNA, 685 bp, Homo sapiens; identical to SEQ ID NO: 29152
  chr3:195603862-195604547
  hypo

SEQ ID NO: 34815 - DNA, 464 bp, Homo sapiens; identical to SEQ ID NO: 24432
  chr3:196754412-196754876
  hypo

SEQ ID NO: 34816 - DNA, 977 bp, Homo sapiens
  chr3:2139959-2140936
  hyper
cgcccacccacattccccggttcagcaattttcagcccagacgcagaagcatctgtttccctggccagggcgccttaacgatcccccgaattccgcgtctcccggaggccagaggtttgggtacccaggaaggtcgcgcctcctcgtgccccgatactcgggttgtaaagggaggagacatcgcctcggcgcatccctggccgctgaacaacgcaacccctacgtccccgcacgggaatccggctgataatctcctcttgcctgagaatcgggccaggcgccctttactaatttcgcgcgctggggacctggggctgccgcctctcggccgcgcggggcaggtgctgcgtccccagcgctcgcctcctccggccgcgcactgagcatgcgcgggctccgggcctccggcgcgtctccccgtccccgctcgtctcccgcccgttcccacccgcccgcgcctctccccttccccgagcgtctcccccgccccgcggctaaggagccggcagcccgaactccggcgcgccaggtttttccagccgccgcgagcgccgggagggagggcagcgccgcgccagacggagcccggggttcgacgccaggattggctgcaagtagggagctttcgccgccgccccgggcccctcggactgtgccggcgccgcacccgaggctctcgccagcccggcgccccggtgctgaggtaagtgaggcggcagctgtgcgggtccggctcctgcgtgggcgcgcgatgccccggggacgcggtcgcgggtgtgggggggaaagggcagggtccgcgcgggttgcccgaaggacaggggcgcttcccggggctctgactcccgcggggccgggcagcgtctgcggggccgtccagctcagagcccggaagccctgcagggtcggggagcgggagctgaacgcctgagcgcggaggactcagggccccgacgacgccaccgtcaccccacagc

SEQ ID NO: 34817 - DNA, 1275 bp, Homo sapiens
  chr3:238973-240248
  hyper
cggacagctcggggtcagtcgacggagcacaccgggcgcccgaatccgccgggtcccactcacgcccgccggccgccggtaggttggccctcccgcttccagcctccgccaccccatccctcgctgctctctgaggaggattccagacccccccgtagatctccgccctctctcgggtggggctccgaggtctagctggtctgggggtcagtcccggcctctgtctcccaccgcgcccctcgctcccctggacaccgcctggtgtgtggggctcagacccccccagtccactgcccctgtgtggctcctcctctcaggagaggattctagatcccagcccggggggggttccgaaaatgccgccagcctggagcggggaatccatggaccgtggggttgtggggttggggagcacgaaaacccagagaggggctagagctccacctccccagaccgccgaggggcgagagggcgcgccgggggccgtggttgccatggctcctggtagcggagcccggggggctggagatgccggtcgcggatggtcccttcttcctctttgtgcctctctctttctctcgctttttttttttttttggagtgtgagtgtgcgtggggaggcagcacggagaaagtgattaatttggggagcagggattggagccgggaggctggggaaagccagcccctccgttcccactctccgggctcgctgcgagccacagtgtctcagccaggggcagggccggggaactcctgcgaaaaaccacgggccggaggagcagcagccgcgcgggcccaggtacccccgccccagacggccagcagggtggagcgcagggtgggcgtttgggctgctgggcgggaaggcgggcggggaaggggtgggaggccggcggcggagggcaggtgtgcgtcggcagggctgggtggcccggcagagagggcgccccaggttcagcccctcctcgaagggcgccggcgtccagtcccgctcgtgggagccgcggagcagccccagggccggcgagcggctgccctgccaggcgcgtgcgcgagggcgcgctcccgcgggaacgcgccgtgcgcggggagatttgcgcgtgcgcgtggcgatggtaactggtgggccccccgggctcgctctaggcggaggctcccgggacgcccacgtggcttcgaattccagctccaccatcactgtgatgcgtcactctggactaggcatttaactacgtgcctcagtttccctttctcaataatacggagattatc

SEQ ID NO: 34818 - DNA, 983 bp, Homo sapiens
  chr3:32858067-32859050
  hyper
cggaagtgagtttgctcctttggagattaaaaggattccgaattccgatcagtcccaataaccggcgtactgaagagaagaggaggaggaggaggaggcagaggcggcaaagcagagaaagagggggcgcgcgcgcgcgcacgcaacccgaactgggggagttgtgcaaagccccaggaggccggggcacggcgggagcaaagctcggtaggcgcagcgcggccgaggccacccgcgtccggatcggcgactcctttcagaaagaagatgacgcgggcgcgagccggcggcgttggccacgcggctcccgagctcgccgcgcggggctgttgccggttccactgattccagcgcgcccgagaggagcctccatccccgaggctcgggatcggaggggggaccaaggcgagggcgaaatggcccgatgacaaaggaaatgtgatcccccttctctgccaaggtttcagagaggacggacgtgaggaggaggaggggcgcagggcgcgcgcggagctcggatagcattgcacgacggcccgcgcggagcgggtacatctaatatcttcctgccgatgaataattcagggcggcccgcggggacctgcggccccgcgcgctaagccgaaggggaaggagcgtgcgtgaggcgcccaggccaggcgaggcgggggcacgagggctccgggccgcgtggggcgcgcgtgcgtgttaagcgcgggcagccgcggcccggctgggcaggcgcgcggaagactcgaggcgcgtgggacgcgcgtgcgtactgcacgcgtgcggccgcggctgggccaccacgagctgcagctgctgcggggcccaccgccctgcaggggaggccgtgcctggctgtgcgcaagccccaagcgcagcacgccgggccacccaggagcccctggccgccgcgtcatgcggcggggcagccgacgtcgcgcggggagacaccggcttggcgacgcaccgctccc

SEQ ID NO: 34819 - DNA, 676 bp, Homo sapiens
  chr3:36805537-36806213
  hyper
cgtacacccacgcggggtctggcactgctgctacatcccgcacggagcggggtccagagttagggcgaatgagtcctcccgcccccgccaaggtggcgcccagaacgggtcggtgccggagcgcacggtactcacccggggcaggccgcgccgggcaggctggggctggccgggccgggggcggcggcggctgcggggctggagtggcggcgggcatggcgcggcggcgggctcggggagagcctggagcagaggtggcagcgcggggacgcggctcgacggtcgagcaggcgcgggaaggcggggcgagacgagcagccacgagcccgcgccgactctccctcttctctccctcccgccgcccgccgcccgcctgccagccccgcgccgcgcagcgcccggcgacagccaccgggaacgtctccgggggcgcgggacttagcaaccgcgcaccagctgcagccgccctctctgcgccggtcccgccatgcgcgccgctcctggccctggaggccgggcggggccgggctttgaacttgctcccacaccccctgcttctccagtgagcgcccaaaggcggtcccgcctctccccggtcagcggagtccagcctttctgctctccttccccgcgcagttccgcggtggaacctggctgcgctgggttttgaacgtgc

SEQ ID NO: 34820 - DNA, 711 bp, Homo sapiens; identical to SEQ ID NO: 30329
  chr3:38080628-38081339
  binary

SEQ ID NO: 34821 - DNA, 140 bp, Homo sapiens
  chr3:42222621-42222761
  hypo
cgtttgtgtgctggaagccttccgcatccttcaggtgctctggcagtcccttgccatgcctgagccatcttcattattatgctgtgtgcttgatttgtttgcattgaaatgtgcgtacaaaatgcggctaaaggccgggc

SEQ ID NO: 34822 - DNA, 977 bp, Homo sapiens
  chr3:44036183-44037160
  binary
cgacgtgatgtgctctgcagtgctggaattgagagttcaagagagagataccggtcctggcctctcggtgttcaggtgtgtgtataggtgggcgttggtgtgagaacgagcgagagaaagcgggagcaagagcgagagctatgcctcccttagtgtcagggagggtggccggctgatgaaggtgctgtgcagaaagccggggaagggcttaaagagggtgctggcgcctcgggaacgccctcccgctgcaccctacaggaggtcgtgggcggtggcttaacagccccagtgcagagcttgaaccccaccgtccagaaggaaaggtgagtgggggacccgggcgggaggtgaggcctgccggcagcggccctcaggcgtgctgggcagcacggctagcagaggcggcgcctggtcttggatgctgcagcggagacgccaaggagactgaatgcagggagcgaggcgtagcggccgcggagggtggggccgcccggaaatccaggcggcgccagccttgtagcatctgcaggccgggggcgcgcacacgaggggcacgtgggtgtggaggaaccggcgcggcggggcctccttcctgcagcgccgcggcggtcgagtgcccgtgctggaggaacggcgagtggggtgcctgccccgcgcaggcggtacccgccgccccagctccgcacacagcaggcacggccagggaccgggaccgtggcccagcgcctggaggcgctctccacgcgcatctttcccgatgccggggcgggaagccgagtggctttgtccggagatgccaggggatgtgggcaggggacgaagaggtttcccaactggccaaaccctggcttgaggaaagactgaggtggtcattgacccgtgggagcgccctggggcttcgagggaacggcagccgagcccgggagactggtgttgggtacccgcgggggccggcgggttccacgtgggtggacccc

SEQ ID NO: 34823 - DNA, 1399 bp, Homo sapiens
  chr3:44037719-44039118
  binary
cgctcccacaacctccagggtcctagcggagtcatttaagcgctcagtactaccagcttcattttaggtaaaaatcaagactaattctgcactttattaacctcctcgtacccaagtcaccacggggcagcttttcacagccctaaggcgtggtcacttcaagcccacagcgagttgctcgtgtcctcggcttctgctccgcaaatctcggacgatgccaccggaggacgctgaaggcaaaggctggtggggccaggcgccggcgagactgccgcgctagcacagcttccgcgggagccgagtgctgacgggcctcgcgaccccctcccgagggcaaacggctcggccctccagggacacttggtcagtgtcactctctccctaccgggtgtcgcgcattttctcaacagaacgtgaccccgtagacggatgaactcggaatcggcaaaacccgcctgcccttgtctagtctctctgccccaccacaccactgcccttcactgcggactgcgccgtgtgcgctccgggaccgcccctgcacctttgcccacagcttcccattaccaaggcagccggaggaagacctttccgagttacctgtctcacgtcagcagccacaccgaggcggtccccctcgcaccactccccaagtgcagagcccctgaaagtccgaggctcctgtgccacgcaccctcccccctgcggggcgaccccgcgtatgcgtgtgtgtgtcacgcgtttaatcgcacagagtaattcccagacgtgcaagacaaagcatttcaagcaaagatggtccagagttcaaattggaaagcacatctcgaggcgctgaatctgttctcgccgtctgcctcggtctctggggcgtcgcatccaggagaagggttttaactccctgccagatccgctcggaattagctcttctggcggtgcagcaacaagtggccccgccgcctcccttgtgcactcggagggactacatcctcctcctctcccagcccctagtccaaacgggagtaggtaatggcggggaaagggggaggtgacgagagcggggagaaggaagtacatattttttaattgtgaaattgtctgtctgcgtgctgtgctctgggattctcttgtctcaatcaacttcaattttaacgtggccgtaacgttaagattaagacctagaaatgaaaacgtacccacctttcttattacaaaggtcgtttgttgttgttgtttttttaaaacaccaagtaaccccccccccccccccccacggacttatactttgtttatgagatttctccaaccttggtggtttggagaaatgaggtgggggaggggaggaccaagggcagcaagacgtccactacgaaaataagatacttactaatttaatagggcc

SEQ ID NO: 34824 - DNA, 1943 bp, Homo sapiens
  chr3:44039193-44041136
  hyper
cgctatctagcgtttatgcccgaagctttacgaataaactccctttccaggtaaacctgcccaacccttgtcctatgcccagcgaagcccaggtacgatgggtcaaggacccctggcttccacattgtctgagtcacgttccagttggaaaggccatcttgggcgagggacgtgttgcccgactggtctaaataaggaaagaaagtggagtaccaaagaatcaagggcctctgttcctccccatcccgccaccaccaccaccggtccccgggctctgctgagcgctgcggcggtcttggctgaaaactgcgtccccgcccaaatcgagcgcaaaactcccttggacagaagtttgaaagaatccagtgtagaaacagacttctccgtccaatttggttttaatcagtaatcatataagtatacccacataaccacctaagtggagagcagacgcccagattcacggtccccacgtgttgctggagttggcgcagacgcgtgtgcgggcatagcggcggacgtgacaccgcattttctccgaattcctgccatctagggtggtgccgccccaagagggggccgtggggaggtggggtaataggctgcgcaatccacttgctctgggggagcttagggttcagagcagagcgcaactccggggggctgtcgcacagccccattctcccacaccagaagagcaatgctccttatggatgattaatagccgggcttctcctgaccatgcggcgcgtccctgccggcaccacttagttgttttaatttgacctttattagcaacgtgctcccagaggctgcgagttggattcgcaccacgataacggccctctccccttccacccggccggcttcctgggaaggatcggggactgcagctcccgcgacgcctcctcctcctgcgcagggagcaggcctgagttcctccacgtaatgacctgggagacctcaggcatcccggggcctggtcggagggtcttcgggccctggagctgggcggtgtctgcagtgcaccgccgtgagtttctctcgggtacaatgtgctggtgtgcagagaggaggaaaggaaaaaaaaaaaacccaacaccactcttaagtggcactggcatctatgaagtggcagtggtctacactgagcgtgcccttgcctggaggtgtagggggcggttactgcagccgaggggagggtactgcggccaagggcagggcgagaggacagtcaaggccggctggccgcgtgggagcctttcctctccgggttcagcggccggaatcaccagcactgcggctaaaggggctggtaggctctcctgcaccccgcgtgctcctccgccttctctgtgtcccccggcttttccaggaggaagatggggtgcccatcgcgaatggggcgcgccgggccgcctggccgggcggtcacgtgtcccccctcccccgccactgcggcgggagttccaatcagagcgcgccagggggctcctcccgggcaggaaccacccggctcggcggcggagggtgggccgccgtcacctgaccgcccgcccccgccccccgcgagtaaggggcggtggtagcgtctgctcggttacaaatggcccctcccgcccggctcgcccgctcgctcgggctcggcgcggacccgcctgggcgtgctcctcccgccggctccaggcgtcccaccgccctgcccggcgccagcccgcggtcccagccactcctgagggcgcgccgggcacccagcgcgtaggctcgcccacggaggtcgacacggaagtctggaccgccgaggcgtgtggctcgtctaccggcaggtgagcgtgcaccgcgggcgtgggatgctgtggggacagtgcgggggacgtgtggggtcttcggatgcgaacgcgagtccgtgcgatgcccaggtcaagtttgcagagagagtctgc

SEQ ID NO: 34825 - DNA, 922 bp, Homo sapiens
  chr3:48698806-48699728
  binary
cggccaccatcgtggtggccgagaggcgcggcgacccgtggtcctgcgcggtcacacgcaggtagtgacgctccatgctctcgcggtccagagctgccgccgtacggataaggccgctctgcgggtcgatgctgaacagctccagcgagcggctgttcatgagtgccgccagcgagtagactaggcgcccggcctcgccggcgtccgggtcctgagcaaccacgcgtagcaccgcggtgcctgctgcctcattctccggcaccagcgtctggtagttgtactgcggaaactgcgggtggcggtttgcggcgcgacgaaagcgtgcccggttcgccgaggttactttcctggcttcaggacgggccgggagtcccgggggacgcggcccggggcgctgcgggaggaagcggcagcggaagagaccccgggagcgcatgcgcttgggcgccggctcgggagctgtccgagactcgcggggtgctgaacctgatgcaggagctgtcctcgccgtgcgtggtgctgaatccagctcggggccagatcccgaggcccctggaagacagttccgccggggggctgtcctttctgctccggatgtcgtggctctctcgccctgacccttgctccctgttgcccataattccccacagcagcgcgcggtgcccactcttttgcgggagcctgtcccagcgttccgctgggaggacaccggcttgggaccgtggtgccgaatcaaaaagtctgaagggaggggcgagctgttccccgagcccgggacccctgaggacagagcccctggtgacagactacctctttgcaaaggtcctgtccgcccgcaagaggagacctctgggcgccagtataacacagaccctggtccctgtcctgtctctcgttcgcggctgcccaatggctggacgcc

SEQ ID NO: 34826 - DNA, 277 bp, Homo sapiens; identical to SEQ ID NO: 24441
  chr3:50377892-50378169
  hyper

SEQ ID NO: 34827 - DNA, 1220 bp, Homo sapiens; identical to SEQ ID NO: 24443
  chr3:53032401-53033621
  hypo

SEQ ID NO: 34828 - DNA, 1326 bp, Homo sapiens; identical to SEQ ID NO: 28019
  chr3:54155239-54156565
  hyper

SEQ ID NO: 34829 - DNA, 1291 bp, Homo sapiens; identical to SEQ ID NO: 28022
  chr3:69590903-69592194
  binary

SEQ ID NO: 34830 - DNA, 1023 bp, Homo sapiens; identical to SEQ ID NO: 28027
  chr4:10458329-10459352
  binary

SEQ ID NO: 34831 - DNA, 733 bp, Homo sapiens; identical to SEQ ID NO: 24451
  chr4:10462790-10463523
  hyper

SEQ ID NO: 34832 - DNA, 258 bp, Homo sapiens
  chr4:1093389-1093647
  hypo
cgcacaatccccaggaaaatcacaaacgaatgttttcttttcgtatttaatttttaaaaggggggtgtgtgcgccacaatggtacagtaacgaggatacatagttaaatctcacagcgtgactgaaggcctttgctgcgtctgacgtcatcatggcagagggcgtaaggaatggaggaaatcaaccctggtgcagagcaatcgagtccacaaggtccgacggcgcaagcggacacgggtacccctgtgcgggatccac

SEQ ID NO: 34833 - DNA, 1127 bp, Homo sapiens
  chr4:111532260-111533387
  hyper
cgcttcctgcggctgaacggtccttgataagtggcctccagaagattcggtactttgggccaggggcaaggctggggctgctctaggtgcagaactctctataggtcctctctcccaggaccggatagatgattcatttttatacgtaacgttttaccccagtctattcccgcagctggttaatgttcaacccccgggcctcgagaggcagctccaaggaggcaggcaggcatgacccattcaaggtatatggctgctcgggagtgaaggcgcggaggcccgagaaagggtgagaagggatgtggcggggggctcctccggccctggactccctgggtggactagaaaagggcaaagaagtggtcacatctgtgggccagactggtgcgcgatctttggaggcgcagcagcaaggccgcgccagggctgagcccagaccgcccacgaggaggcccgccaggcccggagcagcggcgcgtgcgggggcgtgccgagcgcaggctctagggcccctgcttcgccccagctggaccccgcgggcggtcggtgcagctcgagcgtgtgggctgcgatgccctgcctgagacttcgggctagggatgcgggcgggaagtgggggtgcggcggcagctgcagattagattccttttttttttggccggagggacgtgcaaacttctagtgcccgggccaagagggcgaccccggaggtgcgtaggtggccctccgggttcccgcttctcctagtgcctctgaaaataccgtcagggtaaagggagacaggcagtaagtcttaccaccaccgccctttccccatgtcattggccaaaaactgaacattaagataaagcagctgtttcagtcaatggaaagcggtagggcgaggttgtacccaaaacccggtttagacggccaatgaagtcctaggaaaagccgccccgggggcacgttcaggtggagcggctgcacctcgggtcgttctaagggatgggctgcgtggtacccacggaattcatgggtccaaaaggtcctggtcacctgtccaaacatccatcccctggcgcatggcggttgacaagatggcccggccacccagaggaaggaggatccgggacggggaacttcgc

SEQ ID NO: 34834 - DNA, 1806 bp, Homo sapiens
  chr4:111542887-111544693
  binary
cgcagaaagctcagatttccatgcggtttgggaaggctaggaaaagatgtggggattcggttgggcaccgaagttcgccggccctttcccaaaaaaaaaaaaaaaatgcctcttcgcgaagggcatttctgagtggtttcaggcaatttcctaacgagtggagctcctcgggagctgaaagccgagaggaaaacagggacagaggtcggcggcctctgaaggtcctcgaatcaagatgctgggatttttgtgacccaggaaacagaagggaggccagggtacgaatagagagggcggcagaattgctcgcgcccttagcgccccaggagccgggccggtcgagggagaactaaagggatgcggggtagtcaaaattccggctcccggaagttctgcggggagccaggcgaacgaccactcccaccacgcctccccccggaggggctgacttccttggggcgagagggagcgggtggcgcagagcagctgagcgggaatgtctgcagggcggcgcggcgccttacctgcggcctccgggctggaggtgtcggagatggtgtgcacctccagcctgtgcttggaggagtccagcgaccggggctgaccgggagccagaaccgaagccatggctaacggctggggatggtgacaggaagatgaggagacggccgacagcttggtccccgctgctcggtgctccaagtgaagcgggcctttcatgcagttcatggacgagggagcgcgacgctctactagtccttggctactgccccgccgagcccccgtagccgccgctgcccgctccgggtcgcgctctaggcgcggagtttccccgctgcggggagagccaggggacgcaacccccgccgagttctcaagccaagctgcccccgtctcctccggaaggctcaagcgaaaaagtccggagacggaaagtcagcgggcaaacgaagacatgggatgtgggcagaagggcaccactcagagcgtctttagggagcaggcttccaagctccaaagcgaaacaagagtgggcaaagacccccttcttctctccctccctcccccaagaacccctccaataaggaaagctaacgccgaccgcgctctgcccgccccccccccacgcggcagccctgacagagaagtgtcaagagtgacagggacaggtaggtgatattagatcccctgcggcggcagcagccgctgcagccacgacgcggccctctgagcgcaccctccgcaacgcgcacacgcacacccctcgggcggtcgaacaggagccgggccttgccgcagctcagctccaggcacccaggcgagcgacggaccagatctgcggctccgcgcttccctgttggcctaacatcttaaaaccagaggcgggcttcctggtgccgagacgtcactccgccgcggccctccccagccctctccgcctccgcctcctcccagacccttctccgggtgcgactgacgtggctccgcaccaatcaggacgccccgagccgcggtggagggactgtcctgcctgcacctatcagcagtgcggggccgggctactgcctcgccgtgcgcactgggtctacacaggcaagctcccgggaattcagctcctgcccagcccaaggcgatccggcttttagtacgaacccaaaggtgaagagatgaggctaggagtcgaaggcttgggagaagagagtggaatggtcaagaagagaaaggtacaaggatcaacaagacacccactctttgtgtctcactacatccatttccaatcccccaccccatataaaaaggagacac

SEQ ID NO: 34835 - DNA, 1226 bp, Homo sapiens
  chr4:111557643-111558869
  hyper
cgaggatttgttcctgcagtgttggcaccgagatttaagggaagatacctcgttttaaatgccagccacggtctggcttccctctcgacttcagcaccctgtagattgttagtgtctgtggcgggggacgaaaggaacagggctttgcaaggtctgtttgccgactgcgttaccttgggcgaaacttagccccaaaagccacaaatcacctacggtgaagattctccgaagtggaacaaatttccagactcgcattatctcacatccctgcgggatagatggcctccacttaccggctaccgggagagagctgctgtctccgcgtcccactgcttcccggggcgatttccagcgagccgagcctccggctgcacggcaagcgcccgaaagccgggcctgagaggactgcagggctcctgagggtgccaagttccgaaggagtccacgggtgcactggggcctccgaaatctagccgccactggcagtttctttctgctcctctccagctttctcgctcggtctcgcactctctctcctctccctccctctcatccctctctcttccctctgctcctactccgtgtggggagtgacgtgacgtcagcagagattccaccaaactccactgcacagtggcgcgcgggcggccggccgagcccggctgcgcggctggcgatccaggagcgagcacagcgcccgggcgagcgccggggggagcgagcaggggcgacgagaaacgaggcaggggagggaagcagatgccagcgggccgaagagtcgggagccggagccgggagagcgaaaggagaggggacctggcggggcacttaggagccaaccgaggagcaggagcacggactcccactgtggaaaggaggaccagaagggaggatgggatggaagagaagaaaaagcaatctgcgccaacccggcagccctaataaatcaaagggggagcgccagggcagcggggagacagaaacgtacttttggggagcaaatcaggacgggctgggaggaagcgacagggaaagtggcccaagagacggaacaaaggacaatgttcatggggttgtttgggacgaggcgtgtggagtgtgggtgtgagcgtgcgtgtgtgaccttctttcaggcctgcagagttgaggaaagaggtcacagcaaagagggactgcggagggaggaaagtgagagaccggtagagggcgggagtggaggtgggcgc

SEQ ID NO: 34836 - DNA, 989 bp, Homo sapiens
  chr4:113430521-113431510
  hyper
cggtgagatgcggggccgaggaggagaaggagtgggaccgtgggcgtgcaggtgtttcaaggatcctcctcctttcccccttccatctctgattccatctccaatttggatcccgggaggccgagcatctctcacgcggttgacacctctccaggctggagcgcgaagccggcgcctgcccgggtaatcagggaggcctggcctttcacgcggtgttctcagtcagtaatccaagttggcatttcccccttcgcgctctgagcagctggagaagcagagaatgctagcgaaagcagacagaaccacccctgtctcccctcccccgaccctggcaccgagagggggaaaaaagtcgtttgttgtaacgcacacaccatcaggattcttccccattccatcctcccgactcacgccaccttgcagggaaataataggtccggccacactggctttcgcgttctgctttccggatgactgaatttctttgctcgcctctcctgtcggggaccatctgaaactgcctccaagctgcgttcccagggaaccccccaacccccactcattccactcggggactaaagagcgactcacttcaacgtcctccataagatgaaccccatcccggctggaaaaatcaaactggggaaggaaaaacgcgttgggggcaaggagaaccgctcctgcagacctggcccctccttggccctaggggacccctgccgatgcccactcggtgccacgtggggcggccccaagggagatgcaccatcccccaaaccaagcgctttggaaaagaaactgcagagaataataagaagcatgggggggggggcggggggcggggtgtgtccgtggagtgatgagaaagctggtctttcatccctccttttttggacattccttaagtttaatcattaaagtggtccttaaaaaagaaggcagcagcttaacgctgctatttctgacaatctgccccacacactgtcagc

SEQ ID NO: 34837 - DNA, 1444 bp, Homo sapiens
  chr4:113435438-113436882
  binary
cgaactgcaccaagtccttcggcgttaaagagaaaggggaggagcgtcagtccgctctgcaaactctttagatatgccaccatcatctcttcccagggtctttttcgtctcaagaagcgcccccaaaacgccacccttggctttgacaataagctccatcacaccttcagtaaatcagagcccgtctgaatgaaggatacccaaagccaagaaatgcaagaaacaaccgaggaatcagaaaggctacacctgccctgtgaagtgagatggtttccagggcgtggaaaggaggggcaggggaagggaggagggctcgactggggacaggaaagggaacccactaaggcctggcgtgggtagcagaaatggcagctctagatacaatccctggctatggggaggtgaggtgcatagcggtgcttgtcgggaggtgggggctgccaatagtccatgtctgacccggccgggctggcgggcgataaagtgcagctgtagggggaggtggaattggaggacacggaggaggacggcgcggggctgttggtgcaactccacgtggaggcgggcgaggggctgtctccgctgctgctcagggcggcgctggctcctcccgggctcagcaacactgcctcggagaagagcgcccccggcaggcccccgccgccgcccccgcagtgatccgccaggcgcagggtctcggtgagtgcccagatgtagttgtgggcgaagcgcagggtctcgatcttggtgagcttggcgtcctcggggaacgtggggagcacctcgcgcagcgcgtccagtgccgcgttgaggttgtgcatgcggtttcgctcgcggttgttggccttcagtctacgggtcttcttgatgcgctgcaccgtctcggccgtcttggcgcctcgggagacggcccgcgcccgggaagggcgccgtttgcaatcgtgtaccagacccagcagccgtgcgggccggcagccctccgcacccgcagccacgccgccccgcgccccctgcccggcctcagccccgcgctgccgacgcgccccgcctgacgcgcccggctcctcctcctcttcttcgtcggcgctggatgacagcggggtcagggccgccaaggcgggggaggccgatccgagcagcactaacacgtcctcttcctccttcaactccaaggtctcggatttgacgaacatcctaccgaagagagaaaggggaaaaaggcagtgaggtgtaaggaaagaaacagaggcgcgatcttcgtgtcacaggggcgtgctccggcgcgcacccgagaagaccagctccgaatggcgcggagcaggaaggcgaaggaagaaacccaggcagtgctaaccaaggtcaggagcgccgctagcgctcgctgtgaccctgctgccagtcagccgggtcctgccctccgcgggcggtcctgcgttccctcccc

SEQ ID NO: 34838 - DNA, 1053 bp, Homo sapiens
  chr4:113437637-113438690
  binary
cgggctgcggccggagctggcgaagccgcagcggccgcagaggctcaagctgcggctgttgtcgccgccgctgtccattgtgattggtggctcgcgctcggctggagcgtgccgctaatttattaatgaatggaggtcgcgaggcgcagctggccaatcagggcgccctggactccgggaggcctgcgagccacgcgcaccggagcccgctccctttcagcagctcattaggggcccgagcgctgggggcggatggggggacccgtgctaccgcccccgccttcgtcctcgctgccgccgaggctccccccgcccggcgcgcgcgcaggcaccgcacccggcgctgccggccctcctaactcccgggtgatgggaactaggaattagttaatgggggtcagaatcccggggaaagcagttagccctgtggtgctgccgggcgtctcttggcaaagcctcttaggggttgtatcaaatagtaaacgattttaaaatggattcatttggttaggggaggagaatggcgtggatggagagatgtggacacctcgtgaacaagtgtgtttggggtccgtcgaaactggcgtgggagagtgaagggagaggacactggggattcaaacaggcgtctcttgggaggggaggtcggataggggagcagttgatgagcttttagaggatgtgagaatgaaatcactcacatgttagagctgaaaggatccccctcattttacatacaggaaactgaggctccgggcactgatgcaggttttgctggggttaacccagtttatagcctggagggacagcaaggaggcttcctgcgtgggtggcagcgaaccgagcgggaggagcggcagagctgctgctcctgcaagcaaatgcgctgcgctgacatttctgtgacctctgctccgcgctggggggcgttgtagggacaaggggcccatcttcccaattctgcttttcaatgagaaaaaagagctgaagggctactggacctcgggggaaacttgttctcaattgctcgttagccctccccactttccccac

SEQ ID NO: 34839 - DNA, 1170 bp, Homo sapiens; identical to SEQ ID NO: 31863
  chr4:113441539-113442709
  hyper

SEQ ID NO: 34840 - DNA, 442 bp, Homo sapiens; identical to SEQ ID NO: 23257
  chr4:113443992-113444434
  hyper

SEQ ID NO: 34841 - DNA, 695 bp, Homo sapiens; identical to SEQ ID NO: 24454
  chr4:113444864-113445559
  hyper

SEQ ID NO: 34842 - DNA, 1219 bp, Homo sapiens
  chr4:1165362-1166581
  hyper
cgccgcccgcagggaaccatggcccccagtcacgtcggaccgtgacaccctgtggctgcccctgccgcgacccacctgcgccctccccgtgagcgccccctgcccccaccgcatccccggaaccgcacaccgcaggcgctcggcaaacattctggtgttagagtctcccgacgtcagcacgccccagactgggaagcgccgccgtgcagctgtgcggggggctccggcgccgcagccctcctggtggagcaggaggcgaggagggggctgtacttacccagcagcgaagaccactgcgcaggggggcggaacagggggtactgcttggggaaggccgtctggctccacttgcccgtgaaggtgatgctgtatttggccagggctctggcggaacagatggactctcccccaagaggctggccggcggcgccgagagtggccaggaggagagcgcagagggccttgcccagggcggcggccgggctggggttttccatcacctgggagcacagaggggagcagccgcgcgctggcaccgtcgtggcagcctcggggtggaaagccgagagggctgcggcactttgggctctgaggacggccccgagcacccgcgaccccctccctgctccgcaaagctctcctgcggtgcttccgagacccccatcagcggaatggacggcgcggggttagatcgcccgtgcgcctgcgagcgaccaggggtaacgggcaggttttcagtccgagtccctgcagcttgccgggccggtctgggtgcggcctccgggatgccttcgccgtcgcagggacccggggccttggccgactggctgcccccgggactagacccttaaagctcggtcgcagccagtcctgggggtccctctggaggtgccacaaggttctgggccgcggggaaagtgcaggaggcccgggccctctctgggtgtcccgggggcacgcagtactcacccggcaggagcagcgggagcgcggccggcagcggtcgggtcccagccagagcccggagctcctatttaagcccgaggccggcgccccgggccggccaatgaggctccagttcctcctgtcttcgatgctgcacggcctggcctccagcgagaggcagataggacgtgggagaaaggaggagaaggggctgcgggggcggcgggggctgccgctttcccaactcgccctgcccagcgaccttccccgggtc

SEQ ID NO: 34843 - DNA, 978 bp, Homo sapiens; identical to SEQ ID NO: 24456
  chr4:122871204-122872182
  binary

SEQ ID NO: 34844 - DNA, 550 bp, Homo sapiens; identical to SEQ ID NO: 28031
  chr4:1299071-1299621
  hypo

SEQ ID NO: 34845 - DNA, 55 bp, Homo sapiens; identical to SEQ ID NO: 16892
  chr4:1323674-1323729
  hypo

SEQ ID NO: 34846 - DNA, 129 bp, Homo sapiens; identical to SEQ ID NO: 16893
  chr4:1326104-1326233
  hypo

SEQ ID NO: 34847 - DNA, 167 bp, Homo sapiens; identical to SEQ ID NO: 7385
  chr4:1326509-1326676
  hypo

SEQ ID NO: 34848 - DNA, 249 bp, Homo sapiens
  chr4:1330895-1331144
  hypo
cgagctcccgtgtgctgcacttgcgtggtgtctggatggtcggggtggggccgtgttgaggggcctcggatgcgtcgtgcagccttcactctgggaagtggcgcgcttcctctctcatcatctcagaggccgccatgggcattgatctaaaagcccgattttgatgtgttctggcagccggcagattaccattcagaatagttttcccgtgtgattaccaagaaccttgcctgtgactgactctgtccc

SEQ ID NO: 34849 - DNA, 2013 bp, Homo sapiens
  chr4:1331690-1333703
  binary
cgcctatgaatgtctttcatgtgacctgcctcaggcccagagggcagtgagtgtttcgcgattgctgctggtacctggctgtgccggggtatgaatgagactcaggccccctcccttgtcccctctttgtggaactctgggcgagagggctggcgtgcttgcccactgcctgttcctaggtgccagcagaacgtccctgctgggtggctcttgtcctgcctggagaggttgcgtggccggggagagggcggcgggcgacggagccactctgtgcctgtggtcctggtgctggaggccggggtgagaaggcgcaggcttcttgtctccaccgaggcctcagtggggctgtttagctgtcgagtgcagcacttcctgtgcctcgaaagacagccccgtgtagtcagcatggcgcccacatagccagaagggcacgcagcccagggcagagtggccacagggggctgggctcaccccggctgccctgagtggcccccaacccttccttgacccgatgctcagacagtgctacaaggaggacggcagctccaagagccctgactgccctgtgtgcagccgctccctgaacaagctggcgcagcccctgcccatggcccactgtgccaactcccgcctggtctgcaagatttctggcgacgtgatgaacgagaacaatccgcccatgatgctgcccaacggctacgtctacggctacaatgtgaggggggcagggcaggggggccaggctggcacgcatcgccatcgggacagggctgtgtgggacgggcagggcaggggggccaggctggcacgcatcgccatcgggacagggctgtgtgggacgggcagggcggggggccaggctggcacgcgtcgccatcgggacagggctgtgtggggcgggcagggcagcggggccaggctggcacacgtcgccattgggacagggctgtcctctcgccccaccctgccttagcttcgttcgaaatggatgaaggggtgggaaggacaggcgaggtggccccgggatttctttggcaggtgtgccttcgggaaggaactttgcctgagaggatgagtcattccctggtggttcattgtggggattttccatggaaatccgtgtgtacgttgtagtcgcttgccttaatgcattcccggttttatttttcagtctctgctttctatccgtcaagatgataaagtcgtgtgcccgagaaccaaagaagtcttccacttctcacaagccgagaaggtgtacatcatgtaggccccacgtcgtgaagcgcacgcctcggggacgggctgcagtgggcggggaggccacgccttcctcctgtcccacgctccagcctgccgcggcgtttctgtttcttgcgaccaaagatccgtgagcaacgataaatactcttaggaagagagaaaataaggtttcataagtttgtacttgaaaacatttggattggtaggattttgtaacacgtcaaccatttgatgcttctgaaaagtactttcaacttgcgaaggaaactcttctttaaagactgacctaaacaccgagggaaacttaagaacgtttaaaatataggagtccgtgatttccctgtgttttcagtttctttccttctgtgaacgatgagacttggagaacgggctggtccttcaccacttcctgttggccctggcctggccggggaaggtggcagcggcaccggactgacctgcagtgacccgcgatgccgcgccacgagggacacttatggcttcattcgagagctgctgccaaaacgcctggcgccgccaccgtcgggggctggcttcgaggacgcccgcctgcctcgcgggtcgtgtccgcgggactgtgttcgtacgtgcatagtttcgatatcacatcgcggggctgtgttcgtagctgcgtcgtttcgatatcacaccctctgtgtgccgccttacttcctgcttcgagaatgtataacgtggaaatccacgggaccaaatttctgcagaggccttgcc

SEQ ID NO: 34850 - DNA, 1376 bp, Homo sapiens; identical to SEQ ID NO: 30345
  chr4:13548517-13549893
  hyper

SEQ ID NO: 34851 - DNA, 1363 bp, Homo sapiens; identical to SEQ ID NO: 27027
  chr4:141293964-141295327
  hyper

SEQ ID NO: 34852 - DNA, 837 bp, Homo sapiens
  chr4:142053208-142054045
  binary
cggaaaagttagcccgccacgttgaacccctgtccaagcggcgctatgccaagctctccggcagcctctcccctacccaatacagttaatcttctcctctttgtaaaccccccaagtgacgcggagcaaaacttaatcggtccagggaacccagacacgtcttccgcgccgcacggacttcccagaaggagcctggaggcaggcgctggatccctctaggcacctccgtccccgccggctcccctcccccgcgcccgctgggccactcacccgcgtggggcatggtgatggtctcgttggtgttggagcccacgttgaagatgaccacggctgaggcgttctgcaggaacgcgttccggatcttatccctgtacgtgcagttgcccttggggatgagggctatccagttcttgccgcgggtcggggcggcgaacttggtgttggggtcgcaggccaggcggtcgtgggccgagctggccatgaccacctccccgcgggcgtcctgcttgggcgagtgctctccgtagcgcccgcactccgtcttctccgtgtgcagctccgcgccgccgccgcccgccgccccggccccggggtccggcgcgggctcggcgtaggtgatgttcacgaaggcggtgtaccattcctccttctcggccacggtaaagtccaggcagagcagatgcacgaaacaaaaggaaagcagccatgttgagagagccagactgcagcacgcttggatgagagacattgccatctttatccgccggggccccctccccgcccccgcgccctccctccgtcccgtccctcctccccagccccggccaaccccgggcc

SEQ ID NO: 34853 - DNA, 751 bp, Homo sapiens
  chr4:15780048-15780799
  hyper
cgagttcagcccggtgtccggggacaaaccctgctgccggctctctaggagagcccaactctgtcttggcgtcagtatcctggtcctgatcctcgtcgtggtgctcgcggtggtcgtcccgaggtggcgccagcagtggagcggtccgggcaccaccaagcgctttcccgagaccgtcctggcgcgatgcgtcaagtacactgaaattcatcctgagatgaggtgggttggcgactaaggcgcaccggtgggcactgcggggacagcagggccccgcgcgcagggaagccgcccggatcgcccggaaccgggcatcttccgtggcgggtcagccgagagcccgccgggtggtgctgagtagggagtcccgggctcggggctccgcgggccgctttcaggagcagctggccttggcaccgagcgtgcccgcgggaggcgggggggggcgctgctcggtggctctgctgcgtagccggtgaacacttggcaccgatgcccgccttctgggcaaggtgccctgagcccagcccctcgccgggctgcagcccaccctcggcgcgctcagcccgcttcaccgcttcagggacggaatagaactcgcagatgcagggtgtcgctgacattttcaactttttctgcggtttccgcccgctgtctctgacccgaaagtgcccccggacggttacagaggacacttaagtggtttgcaaagcctgtggtaggggaggagggtgtagaagggccaaaccac

SEQ ID NO: 34854 - DNA, 767 bp, Homo sapiens
  chr4:165304258-165305025
  hyper
cgtctctctgcctcgactggtcactccacttcctggagctccagaaactccctcagcacctggataactgcgacactcacccgtgagcgcaggaccctcctggcgtcttaagtcccagctctcagtcccgctggccgcaggaacacaatgacatctctcgcccaggagggcggttgcagggaaccgaaatcggacacaacagttgcagtgaacccgactcagggttgagcgcatcagcgctaaacccaagacaaaggctgccctgtgtcttccgtactcagcgctctcctttggtaatcggtccccgtccccttcaagcccacactaggagcgcgtgagcctgtgaagtggctgtcatcgactccgcgctttccgaggggtgcggctccgtgactagtaccacgccggtgtaaacagcgcgccgcgcactggggatccgccagaaacggcgcgcgcgcagagcgggcgctgggggccaatagtagcaactaccccaggctgcgggctggagccgcctcctctcaccagagaggcgcctactgggcgagcccgccgcccgcaggttgggtggcagcacccgccgcgaaccccagccacgctccccagtggacccaccaggcaaaggcacctgctgcctgccctccagggctgatgctgtgccaagccccgctcgggatcagggacaagccgcccaggactaccagccggagagaaggggctcccagtgaggctgattgaatgaatgatgtttgcagtcacttaccggc

SEQ ID NO: 34855 - DNA, 211 bp, Homo sapiens; identical to SEQ ID NO: 16905
  chr4:1791547-1791758
  hypo

SEQ ID NO: 34856 - DNA, 873 bp, Homo sapiens; identical to SEQ ID NO: 25686
  chr4:1993659-1994532
  hypo

SEQ ID NO: 34857 - DNA, 1390 bp, Homo sapiens
  chr4:20253129-20254519
  hyper
cgcgtggcaaaagctgcaggagaggcactggcagggctgtttatttatgagccgcgttcaaagccgacctcttcccattctcccactgcaaacgactatctccgagcccaggtcacctctggggccaaggagttgggggctggggctcgggtggctccttcttcgggccaagtttgcccgcgcgtgggagcgagggggcgagccagggcgcacgggaacgcgcgccgccagccgccgcctccgcccagcgctggcagccccggcctcacctctcccctctccccagcgaggtgcgggctcccagagcggagccagggggcgggcctgggcctcgaggggcggggtcagggggcggaggctcgggcggctatataaggcccgcgccggctcaacttcggacttggtgttatttatttgggaagcgcccggacggcggagcttggcggcggcggtggtggtggctgccgcagactgtggttaaaaaaaagaaggcggcggcggcggcggcggcggaggcggaggcagctgcgaggcatgggagcgccgaagcgcccaggcgcaggccgaagctgccgcgctttctgggcacggcgggagtgctgagcagaaaggggagcgccgggggcccgcagccggctccggaggcgcgggccgggtttttgtttggctacgctgagcgccagtcagccccagcgaacaactccagttacgacaacaacccaccttccttccagacaagcgagacttgggctgctgcgtccgtcctattgtttagacacttgccaggggctccggagtcggcagagccaccgagtccccgctctgagtcgtcgccctccctctccccgacctcgctccctggagcgggaggccaggaaagcagcgggagaggggaaggggctagaaggagaaggactacccgggactgcggccgccgcgtcaggtgcagcgccaggagccgggcggcgtcgccacgccggcaggggtaccgccactgtggccttgggggacggaattcaaagcctgggaaaagttgctgcactttgagaaggacgaaccactagtgggagaccgccgggggccggccgtggctctgcgccctccggaacccggctcttgtttcttctacctttgccatcaggtgtctgccgcggagctgcggcttatctgggagacgagcggggttgacacgcgcgcacacactactgccattcagctgccgcctggctctgcctggagtagtggatcccacccgcccacctgccaccgagccattctccagtacgccccagcaggacgctgacacctccaaccttggcctttgcctttccactccttccggtctgcctggtttttaagtccgcccccagtcagtccccactcagtcttc

SEQ ID NO: 34858 - DNA, 1393 bp, Homo sapiens
  chr4:20255523-20256916
  hyper
cggcgcagtgctcttgctcgggcagcacagtggactgtcacgggctggcgctgcgcagcgtgcccaggaatatcccccgcaacaccgagagactgtgagtatgcgctcttcgtcttcccctctccccatccgggccgcgcacccctgcctccactggaggaacctgtcagctcagggtcctgtgcctggggcagccctcgctagctctcccccatgcacatcctggggttgagctctccgggagggcactggccagggaagggcctctgtccaaggaggggcgggtccgctggcagctgcgctagttctccctcccctgctctcgtcccgccactcgcagctccttgctggctagttctctggggctggggagcgggtagataggggacaagtactggaggatgcccggggcaagtgagacgccactttgttctccagagtccataaacggagtcaccttgcgattgccagcatccaggtcggtttcagagcccagtcctcgctcttgtcgcaggctggcgcggaggggatagcagggagactcaaaagagagaaacttgccttccccgattttttgtcaccctcctgggggcgaaggttaggaagaaggggtcatggagtgcctgggggtgcttctcacaggtcgcggggagaagggtgccccaggacggcgacacctcgcatagtagcctcgcgcagccccccgccccccacttctccggggaggggaagacggcgtcaggcccctagggacttgtctcagcgggcgactgcgagggaggaccgtgtcccatccgttaagcgaagttagcactggttctccagcgcaaaccagcccaaccaggtcttaccactgcggcgacccggcggtgcccggctgccccctccggcccttcctgctgaacccctgcgtccccatccacctttctggcagtttctgcgccccttcacgtggcagcagttcccctgccttcccctcttcgcgctccgttgctcgcagacgtccccgcctccctgtctttgcgagtctctaatgaagaagtaaatgcagacccggtgttgacggcccacgcgctcctgatgaggcgcttccagagttcagcgaagtggagcatggaggccgttctctttgtgaacgccgaggccgccgccccgcgccagtccggccgccctaggcacgttccgctctcgcggttgcgtgtgggccgggagtaagcgaagggcgcggggctaggccggcaggggccagcgcgtctggattcgtcccgcggcctctttgcccccggggtgtaagggtttcgggccgtggagaggaggcgctctgacccgcacgtctccacccgcgcagcccattgcacttcaagtcgcccttcttatccaacccatttctctc

SEQ ID NO: 34859 - DNA, 215 bp, Homo sapiens; identical to SEQ ID NO: 31884
  chr4:2459766-2459981
  hypo

SEQ ID NO: 34860 - DNA, 143 bp, Homo sapiens
  chr4:3313493-3313636
  hypo
cgtatatacagatgttccgaatcagaaaaaatccacagcccttctggtcccaaaaatctcttctaagggacactcagcctgtgtgacgtggtcggtgactcctgatgggaggtggcagtgctgtgcggcgagtggggaccttc

SEQ ID NO: 34861 - DNA, 206 bp, Homo sapiens
  chr4:3447795-3448001
  hypo
cggatctcctggcgaccctgcctgagccagcctccccggggcgccaggcctgcggcaggaggcacaagaagaggacgttcctgcggccacgtatcatcggcggctcctcctcgctgcccggctcgcacccctggctggccgccatctacatcggggacagcttctgcgccgggagcctggtccacacctgctgggtggtgtcggcc

SEQ ID NO: 34862 - DNA, 1135 bp, Homo sapiens
  chr4:41258731-41259866
  binary
cgtctccacaaccaccagattatctcaccggcgagtgagactgcaaggtttgggggcccggccgtaccactccgcgctgcgcacggggggttcgtacccatctggccgcgaccgtccgtttccccctcgcttggttctgcccctgctccccctgcacaggcctcacagtgcgtctggccggcgctttatagctgcagcctgggcggctccgctagctgtttttcgtcttccctaggctatttctgccgggcgctccgcgaagatgcagctcaagccgatggagatcaaccccgaggtgagcgccaggtgcaccgctacccggagagcgcgaggccgagggagggggagccgagtcgctgatcggttcggttttgcctttttctttgcatttgcctttcagatgctgaacaaagtgagtggcgtctcgcgccgtctctggccccctcccccgcgagcgccgaggcgggggcgcccaccggttccggctgctggcagggaccaagccgcccgctgcgagcaccggagacggccgggctggggcgtgggctgggcgcctttcctgggcccctgcatttagcgggtgactctacgaaaccggtcacggggagacggagggggctgcgccccgtggcgagcgagcgccaggcggagctcccgagggcgtggcgcgggcagcacagactcggctgcacgggcttcgcgggcgccacgtgtgggccgcgctttgtgctgtgtcattgcgccggcccgggtgggggtggcagggcgggactggggctcctcccaggctcgggtgcgggcgcggagggcgcgcgcctcctggccccgccccctggcaggtgcccgcgacccgcgtgtccccgtgcgcctggccgccttgtctcctctccgcaggtgctgtcccggctgggggtcgccggccagtggcgcttcgtggacgtgctggggctggaagaggagtctctgggctcggtgccagcgcctgcctgcgcgctgctgctgctgtttcccctcacggcccaggtagggcgtggggcccaggatgcgccggccgccggcagtgcacgccgctccccagcttgagtcctcgggggctccccgccccgccccctcccctgtaggtgatgcggggcgc

SEQ ID NO: 34863 - DNA, 2383 bp, Homo sapiens; identical to SEQ ID NO: 27041
  chr4:42152717-42155100
  binary

SEQ ID NO: 34864 - DNA, 971 bp, Homo sapiens
  chr4:54966507-54967478
  hyper
cgacatgtcgcgctccttctatgtcgactcgctcatcatcaaggacacctcacggcctgcgccctcgctgcctgaaccgcaccccgggccggatttcttcatcccgcttggcatgccgcccccattggtgatgtccgtgtccggccccggctgcccgtcccgcaagagcggcgcgttctgcgtgtgccctctctgcgtcacttcgcacctgcactcctctcgggggtctgtgggcgccggcagcgggggcgcaggggccggggttaccggggccggaggcagtggggtggcaggggccgcaggggcactgcctctgcttaagggccagttctcttcggctcctggggacgcgcagttttgcccgcgggtgaaccatgcgcatcatcaccaccacccgccgcagcaccaccatcaccatcatcagccccagcagcctggctcggccgcggcggcggcagcagcagcagcggcggcggcggccgcggcggccttggggcacccgcagcaccacgcacctgtctgcaccgccaccacctacaacgtggcggacccgcggagattccactgcctcaccatgggtagggcggggtcttggggcacctgcgctccgcgcctttcgcgctcctggagcaaactttccacctccagtggaggaagtgggagcccggggacagggtgaagagagaggacgggcttttagtgtaaccgtagagtcagccacagaagttccacgaaagtggaagttagtttgccagcttctccactcagcctggtgcgttttactcctagtagtaggtgctcgagtattgccttattaatactggggccttagggacctcgaacgtcacggcggataaaccagaggttaactgcttgggatttggggtgggtgtgtttgaacctgtgtggcatccccgcgtcggggcggctaaagcgtcttgacgtttttggctaagcctgcgcgcttctcc

SEQ ID NO: 34865 - DNA, 774 bp, Homo sapiens
  chr4:5709740-5710514
  hyper
cgaagctcgtaaaatggagagcaggattcgaaccagggtcgctggtgaagtccaagccggcagctgccacaccccgaggaaggtctccagtttccctcgaagctttctggccgtgagcgggatacacctaagggccgcgaagcaccctattcagatcctgccctcccttcctcattctttgcgaaatactaagggtcctccctgccaccgccggtgtagacaaagtcaaaccactacagtcagaccggagcctggggtcgggccctccttacctgcgtgctgctctcgggccccgccccgctccgccccggagggatcctcaggccgggcccagacctaggagccacctggggatcccggggtggctgcgcgccgagggggcgccagcggggacgtgagctggcgccgagacagcctcggccccccagcgccagggccactgccaggagacccccggccagcacccacgtggggcgcccccgggagcccgaggggtccatcgcctgtcgggacccgctacctcaaagcggcgggtgccgccgagtcgctggagcttccggaccccaggcccgccccgccgccgagcatgctcagtgcgagccgccgccgaaagttttctggaacaaacacccgcatctggggcttggcgggccaggaggtgccggacgggcgtgggagggggagagcgagttggcgcggcccaggcgcccggcggccaggcctgggtttgcttgcgcccaaaccgaatcagagcgggtcactcccctgctcccc

SEQ ID NO: 34866 - DNA, 646 bp, Homo sapiens; identical to SEQ ID NO: 28044
  chr4:5712804-5713450
  hyper

SEQ ID NO: 34867 - DNA, 1425 bp, Homo sapiens; identical to SEQ ID NO: 24481
  chr4:57521376-57522801
  binary

SEQ ID NO: 34868 - DNA, 547 bp, Homo sapiens; identical to SEQ ID NO: 27048
  chr4:57687545-57688092
  binary

SEQ ID NO: 34869 - DNA, 979 bp, Homo sapiens
  chr4:57976114-57977093
  binary
cgcgcagctggcagccgctcgggtaggtggtgccgtcgctgccgcacaccgggtagcggctcttgcacacgcacacgccgcttacacccggaccgccggctgctgccccggctttacccttccgcctcttgcggctcttcacgcactccatgcccggcgcgcagtaccccctgccggcgccgccacccccgcacggctcgccctcgccgcgggcgcacatagggcagcagccgcacgcgtcgcgggtctcgcccagcaggcagcccagcgggggcaggggcgggcaggaggccggctcgcaggggccgcaggtgtccgaagaggaggaagaggagaggggcaggagcaggagcagcagcccagcggcgccgaggagcagggcgcgcagcgacggccgctccatggcggggtgcggtggcagcggcaagggcgcgagtgagccgtgtcgggccggccggcgccttaaacccgccgccccgcccggcctgtccgcgggaaccacaccccggggcggtgagagcacgggggccccgcccgtgccgccctcccggccccgcggggcctgcgcgcgcgctcctgctggcgtcggggggtgagcgggcacccggcgtgaccggcccatgggcgctcggtctcacgcccgcttcgcagagctcaccccgccagctcctgctcggtccccagtcccctgccccgagccctcagggatcgcaccgcagtgcgagcggctcttccaccctctggtttctccccgtttccggtcaatatatttaaacttcttaacaaccacggcttcgagacgatccagggtttcatctattaaatcctccgtgggcctgagacacctgagtgctcattactctgtggtttgggaagctctcttaagaacaagctgttaaaaacccccacttgtggactgtgtccccgctggccacaggcctgctgtggtcttgggtgtcaagcactaaaaggacaaacc

SEQ ID NO: 34870 - DNA, 1435 bp, Homo sapiens
  chr4:6201288-6202723
  hyper
cgcgccggcccggcaggagggtgggtgccagcctttcttcccatctctcgagcctcctccccggcgcccacgtgggcggagcagcgcgagggtgtgcgtggcaggggccgcggcggcgtgtgccgtgcgtggggtggggtgcgggctgggcggcctcgccttcgggccccgcgccgccggggcgcggcccccagctccatcttctttgccacctgggcggagatctgggggactgtgacctaccctgcggaagacacggaggggacgggccggccacaccccccgcgccactccggcaggcaccgggtgggtccccctcccgctccttggcttgagggcggaatccggagaagagtggaaataggggtggcgtgaaggagagctgggggctgggggcgggaccgggagggggtgttgggggaagcgacgcagcggctgggagattttgcaagggggtctgaagaggagtgggggatgggtatggaagggtgggggaccactgaggtgggatgcgagagtggaagggggacccagagggggcgcgatggccggaggagggggagatggacgatggggcggggcggcaccggtcgccgcgtcccttgccgccaggtccgcccctcggtcgccgggtccacgggttccctctggccagcgctcgcctcccgccccccggcgcacctgtacccacctgctcggcgctcaggcccgagccgggcagcagcagcggacgtagcgagcgcagccccgcgccgcatcctccggccgccccctccccgctgcgagcttacgccgctgtcgccgccgccaccgccttaaaaaggacaaaacggaacagaaaatgaatgcatgcacaaaaaaaatcgtaaaaagcaattgaggaggatggcagtcgcgcgcgcggctcggcggggcgggagtcgagaggccgcggcactggtggccgcgatccgggcaggcggccggcgcgtgccgcacgcgggtggctgcagctccctcggtcgcccgcgcccggctcaggcacggcaccgcccctccccccggggagcccctccgattggtctgtcttcctgccagtcaggcaggagggcgcggcgcccgccccgccccgcccccgcccccgccccgggcagatgccgggagctctcctgccgccgtgggagggggagctgagctgccggagcgtgcgcactgggccagcgggcggccggggcagggctggggtcccggcgctgagcgcccccagccgcgccgggcagcctggcgcctcgctgagtcggagcaacccccggcaggagctttcaggctctggtcaagcctcgggacccgggaagctatccctgccctcgggggctcgagcctggagtggggcttgcaggtaaagcggggctggggccgtcctggccgtcagtggtcaggaagacgcagcgacccc

SEQ ID NO: 34871 - DNA, 501 bp, Homo sapiens
  chr4:657350-657851
  binary
cgtcccaagccgacgatggagccgctggtggagagctgggcaccctgaggagggccctgagcagcaggcggattaggggtcccgcccaccgagggcccgagggcgggggcgtgagaggcacaggcagccgaggcggaaggggcggggtccccgggcaccctgagaggtggccgcagggcgcctgacgcgctgggcataacctccgcagaccctgaacatctaccagaacctgaaccggcggcagcacgagcacgtgatccacctgatggacatcgccatcatcgccacggacctggccctgtacttcaagtgcgcgccttccgggagggggcgcctcgcggggcgggcgggtagcctgggacccccggcagacacgggggcgcagcggcggcacagcccgggggacgcagccccggattccgtccctgcccgccggccccgcgcaccccggatggggcctcgctcgggctccgcgcctccctgcagacgggcgcttggggc

SEQ ID NO: 34872 - DNA, 131 bp, Homo sapiens
  chr4:75241334-75241465
  hypo
cgcgcccggcctgaccagcgattcttaaggttaacaggatagtggatgtaatatttctctggagatagattttttattcattggatcgcattcactcttctaccctagtttgcaagtgtttgggagcagac

SEQ ID NO: 34873 - DNA, 178 bp, Homo sapiens; identical to SEQ ID NO: 16921
  chr4:7844888-7845066
  hypo

SEQ ID NO: 34874 - DNA, 1412 bp, Homo sapiens
  chr4:81123470-81124882
  binary
cggtagcggcagcggcggcggcggcggccaccaggaggcggagctgagtcccgacggcatcgccacgggcggcggcaaaggaaagaggaaattcccggaggaggcggcggagggcggcggtggcgctggtctggtagggggccggggccgcttcgtagagcggcccctcccggcctccaaggaggatctggtgtgcacaccgcagcagtaccgagcctcgggcagctacttcggcctggaagagaacggccgcctcttcgcgccgccaagtcccgagacgggcgaggcgaagcgcagcgccttcgtggaggtgaagaaggctgcccgcgcggccagcctgcaggaggaggggacagccgacggcgcgggagtcgcctccgaggaccaggacgctggcggcggcggcggctcctccacgcccgcggccgcgtcaccggtgggcgccgagaagctgctggccccgcggcctgggggcccgctgcccagccggctcgagggcggcagtcctgcgaggggcagcgccttcacttcggtgccgcagctgggcagcgcgggcagcaccagcggtgggggcggaacgggcgccggggccgcaggcggcgcgggcgggggccagggcgccgcgtcggacgagcgcaaaagcgccttctcgcagccagcacgctctttctcgcagctgtccccgctggtgctgggccagaagctgggcgcgctcgagccatgccaccccgccgacggcgtgggccccaccagactctatcccgccgccgcggaccctctagcggtgaagctccagggggccgcggacctgaacggaggttgcgggtccctgccgagcggcggcggcggcctgcctaagcagagccccttcctgtacgccaccgccttctggcccaagagctccgctgccgctgcagccgcggctgcggcggcggccgcggggcccttgcagctgcagctgccctcggcgctcacgctgctgccgccctccttcacctcgctgtgtctgcccgcgcagaactggtgcgccaagtgcaatgcctccttccgcatgacctccgacctggtgtaccatatgaggtcgcaccacaaaaaggagtatgcgatggagcccttggtgaagcggcggcgagaggagaaactcaagtgccccatctgcaatgagtccttcagggagcgccaccacctctccaggcacatgacctcgcataattgactcggaaaggaccccagctttccacgcgcgcgcaagcacagttaagccacctgcaggaataaacacgcgagaacatccaccgcttccttgcaccccgaaaccctgcacaaagacacatacattcaccgcccccccgcccccccaacgcgcacacacacgtcctctcctcccaggaacctcattcaaatatttaccc

SEQ ID NO: 34875 - DNA, 162 bp, Homo sapiens
  chr4:81951325-81951487
  hyper
cgcacatatttctcacctcgagagaagatgatgcgggagagaggggcgttatgatgggtatgctctcagaaagacaggaagctatgatgacgggctgcaggtgcaggggcccgcagtgtccgtcagaagaggctcgggaaagtaagcgagaatggtgttcac

SEQ ID NO: 34876 - DNA, 997 bp, Homo sapiens
  chr4:81951925-81952922
  hyper
cgtacactaaaaaactcggaccagccgcgccgcagctgctccaatccctggaaaaggcaatcgagcgccctccggaccgctgcgcacagccccggctccgacctggcgcccaaaacagagctagtcctagtccctcgcgcggccagtttggccgggtgttcccaaaaataaagcgaggagggaaggtacagacagatcttgaaaacacccgggccacacacgccgcgacctacagctctttctcagcgttggagtggagacggcgcccgcagcgccctgcgcgggtgaggtccgcgcagctgctggggaagagcccacctgtcaggctgcgctgggtcagcgcagcaagtggggctggccgctatctcgctgcacccggccgcgtcccgggctccgtgcgccctcgccccagctggtttggagttcaaccctcggctccgccgccggctccttgcgccttcggagtgtcccgcagcgacgccgggagccgacgcgccgcgcgggtacctagccatggctggggcgagcaggctgctctttctgtggctgggctgcttctgcgtgagcctggcgcagggagagagaccgaagccacctttcccggagctccgcaaagctgtgccaggtgaccgcacggcaggtggtggcccggactccgagctgcagccgcaagacaaggtctctgaacacatgctgcggctctatgacaggtacagcacggtccaggcggcccggacaccgggctccctggagggaggctcgcagccctggcgccctcggctcctgcgcgaaggcaacacggttcgcagctttcgggcggcagcagcaggtgagtgcgcgaggtgagactcccttcccgcggtcccgccccagctttctcccgggaccccccacagcttccttgtctgccccttgcttggtggcgctgcctagggacctttctccgccctcctcagctgccctctggattcctccgtccagtcacaccccgcgtgtc

SEQ ID NO: 34877 - DNA, 866 bp, Homo sapiens
  chr4:82136097-82136963
  binary
cgggtaactttccaggtgcgcagcttgtcacctcggcgcggccgcccctgcgtctcagcgtcctctcccacgccgccctccccagccgcctgcggcgccggagcccagcgcaggtcagctcagccagccccgccgtgcacacggtgcgcagcgtgggcccggggctgccggctcagtcgctccggctacgtgtgagccgggggcgcgggttagcgcgatgcgggcaggagctgcggcggcgtcggtgctgccgcctggctccgcggcgggggccggtgcagaggagacacgcagggagggagggaagagaggagggaaggaggagggagggggtcagccggggctactgcctggatagttgggcgccggcttccctaaaggtggggtcacccgcgcccgcacgcacactagcccgaacctttactcccgacacagccgcagtctgcactttataccccataccctccatagtgaggcaacttaagtagggcgataacatcgtggttgtaagcatttttgttcatgttattatttctatttcaagtgtgtgggacgaggggagaggaaagttcagggaggtgttcattttttccttcccctccctttcctccatccttccagtctgttttcactgcaggctctctccacttcgccttccctcccagagctcaaacaggcgcacgtaccctggacatgccctcctctgtcacaccaatgcctttctacgaagacatgtgaccccgaagcagctcgtcgacgcgcccctcccggactctggggccataacttacatctagtttgccagttcacgtgatgctgggggcaggggttgaatcgagtttcgagggacagagattataccttcc

SEQ ID NO: 34878 - DNA, 220 bp, Homo sapiens
  chr4:8386124-8386344
  hypo
cgctgaaacaaactaggcaggaaaacgggcactgacgggcagtgaattctcttgctcggaatgcggctgctggcggcctgaggacacacccagcgtcaacaacctctgtcctcaagactctcccagaatcctgggtcaccacggcctttccatgtgcctcacaccagaaggactctcgaaggtgcccccagccgccctgtgcacccaatgactgcccctc

SEQ ID NO: 34879 - DNA, 943 bp, Homo sapiens
  chr4:85403791-85404734
  hyper
cggtttcaaagtaataaccaagcaaggaagagagaagaccgaaaactaccccgcggaaactagcacagtgtgcctggatgtctgtgtcccgggacctcggggaagagggcccgcaccggtctgcgaattgcaaggcccggccttccccagcgacgctctggtatccgctgtcccctccctgtacctccgcgacccaggggacgcccagtgcaccaggcccttccccggggtcagcggaggcgcagggcgttagccacatcagaggtgcaaatttaccccgggcccaggggaaaatggcgacagcgttcgcggctccacccggggcgcgtgtcagcgttggagagcctgcccggcctgcagagggcgtaacaggcaccgctggggagagccaagcacccctgcgtccaggatccgtagcgccgagctgcaggcccgacctgcagggggcgtgcccggcatgggaagctcaggctacgtctccgaagcttgcgctgaaaacaccagaggtagggaaaacggggagagcgtactgtgctgggctctaccctggacaccccagtttcattctctgcgaagccacgcgctggcagggctctcgggacggcgatacccagggatgatggtacccctggtctcggcgggacctcccgggaacttgtcctgggggagggagcccaactggccacgtactggtagcagcagtgggtggagcgcacaaactccgaggcccgcgtatgcccagcaccccaggctgaggctgcagggccccggacccgggtcccagggacggagcctgcccccagcactagggaactgggccaggtatggtgaccaacgtcctaaatcccaaacagacttcgttcggccgggctcagtaaagaatttgccgaaaggtagaaactggaccagagaagggaacacagtgccgggcacatcctagctc

SEQ ID NO: 34880 - DNA, 343 bp, Homo sapiens
  chr4:85424150-85424493
  hyper
cgagggggagaacgtgtctgtctttctttgcttcctataaacgccgtagagtggaaactgcacctttgccacaacttctgctgcccagcacttaaggtagagatttgggaagaattgaagcagacagcgtggaaaagcgccgtaggatcttgcgttcggcgctctcccagtggaggccaacaccaaacaagtggggaagcgaccagtgtaaacagccccatccattctaccacagaaaagatctcgaagtccaggacctccctcagcgatatcgtcagtgagagagaggattacagctctccatagagtcgcagaatacgtacctgggagttaagtgcgctcc

SEQ ID NO: 34881 - DNA, 477 bp, Homo sapiens; identical to SEQ ID NO: 23278
  chr4:87281183-87281660
  hyper

SEQ ID NO: 34882 - DNA, 268 bp, Homo sapiens; identical to SEQ ID NO: 28049
  chr4:905682-905950
  hypo

SEQ ID NO: 34883 - DNA, 1830 bp, Homo sapiens; identical to SEQ ID NO: 23281
  chr5:100236036-100237866
  hyper

SEQ ID NO: 34884 - DNA, 1887 bp, Homo sapiens; identical to SEQ ID NO: 22915
  chr5:100238197-100240084
  binary

SEQ ID NO: 34885 - DNA, 1429 bp, Homo sapiens; identical to SEQ ID NO: 25707
  chr5:10564301-10565730
  binary

SEQ ID NO: 34886 - DNA, 862 bp, Homo sapiens
  chr5:11384873-11385735
  hyper
cgacagggtggcgtacgtgccgatggtggagctcagctggtggatgggcgaggaggagatggtggactgcacggtggggggcgaggtcacgcggatcggggacaggccggccgaggacacgacgatgttgatgggcgagctggtgctgtaggacttggccaggcggctgggcgactgcttgggcgaggagccgcgcggcgcggcgtaggtggcgccctcgggggccgagccgccgcgctgcagcttggtgggcgaaccgccctggggcgcggccagcggggagcccccgcgcggcggcgcgggcagcgtggagctggagtagtagagcgcggcggcggcggcggcgggcggcgcgtcgggcaggtggaaggcgctgcccaggctgggcgcgaacggctcccgcggcggcggcggcggcggcggcgcgggctcgggccccgccaggtggccggcgcggctggtcgtgccctgtgcccgggagaggagagaacacgcgcacttagcgagggagaagcacacggcccacccggcccagcccggccccgagagcagaggcacaccggggatgccgcgggcgcccggcggctctgcgatcccagctgcgctcggggcagtacgcgaacctgcgccccgaactctcctggggcggatttcttgtcctgacactggcacaggccagctgactactggagggaagtcacgtttgacaaatgagacctgtgtttgcttacatgtagatgttatttcggaaatagcagaagcatcgcattagtcacataaagatttttaaagccccaccccgacagggcaatcatgatctccctggtcgcaatcacaatctgtttgttttaatgagaaattc

SEQ ID NO: 34887 - DNA, 1335 bp, Homo sapiens; identical to SEQ ID NO: 23286
  chr5:115151516-115152851
  hyper

SEQ ID NO: 34888 - DNA, 293 bp, Homo sapiens
  chr5:127537002-127537295
  hyper
cgataagagggaagcgaagaaaaaagcacgtgacttgaaaatgtttttctctttttaaagccacatctttctgcttcattttgatttcagtgtaactcgccgagtgaggactcttggcccacgctgggagcccgcagccggcatccgccaccgccgggcaggtgtgcgctgggcgggcgcgcggactcgcctttgcccggcccgcggctcccccgtgtggcctgagtaggtagtgatgcgaataacatgctttgagaagtcagaaggctggcgtctcttcctccggagctcac

SEQ ID NO: 34889 - DNA, 952 bp, Homo sapiens
  chr5:127872759-127873711
  binary
cgcagcgcgagctctgcacacgctctgcgatcggcacccctggaccccctaaccacccgccgcccaacccccggagagagggctttccgcccgctgagctgcggggttgggaaggaaaagggggacgcgctcctgggggtctttggatattctggcaaagggggctgcagctctaggctccagctaaagggtctgggacggagtgggccagaaagccgccaaactgaggattcccccctcccccaagccggagccctaggtgcggagccgcttgcccacttaccctcggagcacgtcctgctgtcctcgccggcggacgcggctggccactgcggcaccctcctcgcgatactcgggcgctagaaacccgccttcagagcctgctgtagcggaccgaacctgttgcggcggcggctggggccggggcggcttgggcggaggaggctgaggctggccggccgtgccctgcgcccagagcaccacacagcccagccacaggaagtagagctggagacacagcctccgtcttctccccatcgccggcgccgaaagcgcgcggccgtagacccgcggagagggagtgatcaaagacaaaatctgcgcgcctcagaaaagagtcagggtctaataagcccttcgtcggctccggggactccctcgggctcgggctccctgctctagctggagacctcgacagagcgccggccccctgactgcccgcgaagcgagacgcggggcgccgggtctagcgcagtgagcggcgaggcgcggcggaggtgcagccggcagccccgagcggtacacgttgcataaccggcctaaagccccgagcgactccaggaccgtcagcgggcgggggaggaaattacaaaagccctggcgtaaaatttcaaaaaatgtgaacctcaaaagaaaaaagggcctgcacgcagagctcggcggattcccgtgc

SEQ ID NO: 34890 - DNA, 947 bp, Homo sapiens; identical to SEQ ID NO: 28057
  chr5:127874216-127875163
  hyper

SEQ ID NO: 34891 - DNA, 391 bp, Homo sapiens; identical to SEQ ID NO: 7416
  chr5:135091190-135091581
  hypo

SEQ ID NO: 34892 - DNA, 975 bp, Homo sapiens
  chr5:135265716-135266691
  binary
cgcccttcatcgggagtaagtcccagaaaccacaagcgttggctcatgcctgtgtggagtcacaggcaggtggccacggggaattagctgaagaccagcaggcaggaagcctcccacatgccacctaaggggcgctcccggaaccgccgcccctgcgggaggagcggctggggtctcagatcgccgtgcgtgacttggtgctgcgccaggtgggcgccatcgccgcggcctgctgggggaggcggcctttgaggagcgggcgcgaggcggggccaggcggggcggggccttgggcggctgcggtctgcgcggacccccgtgcctaggcgctcctgtgcctccagtgcgcggagccggcctcgctcgggcgtgttcctgcgccgaccggacggccggactccagcaccttggcccggcccgcgaacgctgagcacgcgcggaaaccctttaaaggtagcacatttttcgggtgtcgcgggggcaccgccggcggtggcgacgtggggcggaatgggctcgctctttgggcccgggaggcgtgcgctcgcgccctgggccacgtcggggcggtctcgggcggctgagcgccccctggagcgacccctcccgcggcccgggcccggccgcccccgaagccggggtgagcggggcctggctcgggccgccagtgaggactcgcagcccccgggcgtccgctttctcgctgggctgggtttctgcagtgccgggcgcccacccggccaccccatgagccgcgcgtctggctcttcggtggagtgagcctagaaagggcggcgttcgtccagtgatcagtgctacccgaggttgctttttgcatgactgcttgcagttaagttcaccggagtttatagttgccacaaatgtcaaaaagtagccttctggcgagctgaaagcgctcacctgtgcgctttaaggtgtaccgtctttgtctttggcgagtgtgccttttaagac

SEQ ID NO: 34893 - DNA, 881 bp, Homo sapiens; identical to SEQ ID NO: 27081
  chr5:140855795-140856676
  hyper

SEQ ID NO: 34894 - DNA, 399 bp, Homo sapiens; identical to SEQ ID NO: 24497
  chr5:141931151-141931550
  hyper

SEQ ID NO: 34895 - DNA, 175 bp, Homo sapiens; identical to SEQ ID NO: 31938
  chr5:142625544-142625719
  hypo

SEQ ID NO: 34896 - DNA, 293 bp, Homo sapiens; identical to SEQ ID NO: 25713
  chr5:145713606-145713899
  hyper

SEQ ID NO: 34897 - DNA, 772 bp, Homo sapiens
  chr5:145719578-145720350
  hyper
cggcgcatcaagctgggggtgacccaggcggacgtgggcgcggctctggctaatctcaagatccccggcgtgggctcgctgagccaaagcaccatctgcaggttcgagtctctcactctctcgcacaacaacatgatcgctctcaagccggtgctccaggcctggttggaggaggccgaggccgcctaccgagagaagaacagcaagccagagctcttcaacggcagcgaacggaagcgcaaacgcacgtccatcgcggcgccggagaagcgttcactcgaggcctatttcgctatccagccacgtccttcatctgagaagatcgcggccatcgctgagaaactggaccttaaaaagaacgtggtgagagtctggttctgcaaccagagacagaaacagaaacgaatgaagtattcggctgtccactgattgcggcagggcgcagcgtcgggagccgggagagcctagtgctcatccctcccgggttcgggggatggttatcgggaactccaaggcgtttcctaggcaggttaggctctctcctccgaagccacagactttccccctttgtcccgcctggttgcctccggccttctctctctttcctttctattcccaccaaaaaaattttggcgctgggaaaatattgcagaagggcgggcctgagtgtacttgtgctgtccgtggtgctgaaatttgccctcgcgcaggggccgcacgacttcagagcaggagccccaaagcagaggacagtcaattggcccaaccgccc

SEQ ID NO: 34898 - DNA, 1204 bp, Homo sapiens
  chr5:15500076-15501280
  binary
cgttgcttcgctccgaagggttcgcgcgtagcgcgctgagccggtgcccaggctggggcctggagccgcagccccgaaaaggcgcgctgcccctttaaaaggccgcgcatctccgggccggccttcctccccggggctccagctgtgattgacgctgggcggcgagaggaggcgcctggcgctaacaaaagtccggcccgcgggcgagctgcgccgggtcgctagtcttcactcgctccggggacccgcaacaagtggccgccgcgccctccccggggaagccgcgggcgcgcaggggcagccgaaggaggcggtcgagccgcggagcccaggggcctgcccggctcagcgcccaccggaggggatcggggcgggcggatggggacccggcggcggcggcgcggtgagcctctgggcggccccggggcgcgggctgtgcgcggcgctgcgcccgccggcccccagcgcggattgtaagtgctgcagctgtgcccggccccgcctggagccaccgggggtgccaggaggggacgcagcaccccctcccactggagtgcggggacctctccaggccggaggtcggccccggagcttgggggggatgtgcagctaacggtcccgtcgggcgggctttcctcgggccgagcgcgcaggacgtgcgccgcagctatggagtgtcccgggagacggcgggcatgacggctacaggatgggcgcgaacaatggcaaacagtacggcagtgagggtgagtgggccgcccgtcctcagactcccggatcgcgtccctcctcccctttccctcgccctcccgactgggaagggaggttctcgcccgcggccgtgacgcaccccatttggcaccctgtctgggtcaccaccttctcctttggcagtgagtgaccagtgagtaggtcaggcgccccgaggatgcttttccactgtgggggtctctttaagcaacttcccagtttgtctttgggaaggctcaagttgcatctctgctgtgtttctgagcacatatgccttaaccttccttccctgggcatctggggtttaggagatgatggtttggcagatggcggaagacgtttttgaaaaataactcagtgaaaactttcccgggcctttgtgctccagccccctggactctactgtagcagaaaaaacttctggaaggagaagttaagtttccattctttgctc

SEQ ID NO: 34899 - DNA, 951 bp, Homo sapiens
  chr5:155107689-155108640
  hyper
cggcggcttcccctctaacgcgcgactgtgcagcctctccccgccgcccccacccgcggctcgccctcgctccctccctccagccccgccagccggagcgcgcacaccgggactccggcacgtgggcgcgcgggaggtggcggccgctgctgccgctgctgccgctgccggagcccgaacccaagccccagctggagccggagtcggagccggcgagatcgccctccatgctgcgggagctgcggccgccttccgctcagcctctggtcccaggcgagcctggcgagccggcgaagcaccggcggggaggaggactagaacaggaggaggggcacggcggattgaagcgagctgggctgtgagcaagggacacccacagcctggagaaacagccccgctctcttgcgcgctgtctgctccagccgctactgggggctctaagcagcgcgatgctgcttcgcttcttctaggcggcggccggcggaggctttccgcagccgcttggccggcgccggcccctattccgttggcaagtcccttgtctatcccggagggcgcacccggacgctcgagccggagcgagcgcgaagtccgaagtccgcccccagagccgccaacttccctgtgagcccctctccccgccgcagcctgcgccagacctgggagcgatgcgcccccacccgggcggcgcgccctctgccaactcgccacccatgggatcgactgccctcagctgcccggcttggagtgcgtagccttcgccgcgtggcccaggagaggagcgagacaccaaggcgtttcgcggactccgcgcgcaccagtcggcttggtggccctgcgggatagcgtttatacccaggggtgagtaggccgctaatggaggccccctttacccccagctagcggcttgcatggacggcaaagagacgggagaaagttgggtctccttgc

SEQ ID NO: 34900 - DNA, 231 bp, Homo sapiens; identical to SEQ ID NO: 16936
  chr5:159414348-159414579
  hyper

SEQ ID NO: 34901 - DNA, 988 bp, Homo sapiens
  chr5:16179393-16180381
  binary
cgccacttcctggccggcgggctgcaggggcaggggcggaggcggcagctcgtccgctcccctgcaccgcggggccacctcccctagcggctcgcttggccccgcggcgcgctcgggggtctcgggggacgcgggcagcggcggcaggtagcgcggggccgcggggaccggggccggctctcccggcggcggcgtcggcggcggcggcgggggaggttgcgggggaggctcggcgtccccgctctccgccccgcgacaccgactgccgccgtggccgccctcaaagctcatggttgtgccgccgccgccctcctgccggcccggctggcgggccgggctctggctgcagggaaagagagcgcggagggggcgggagggagaggggaaaaggagggagggggcccggacgcctggggctagggggcgggacggggaggggatgcggaaggttctgcagctgcggcggcggcaggcgcggccgttcggtggagccgccggctcggctctgatggaggcggcgccgaattcggctgcgcgtgagagccgcgccgcggaagggggggccggagaagcgagggggcgggagggaggagcggcgcggcgggggtgacggggcgcgggcgcggggtgggctgggggcgcggatcagtgggacggagttcggggttcggctccgagcgggcgggctggaagtgggggatccctcagccgcctccacgggccggccccgcgctcacgtcggttccggggcggatgacccctctccaaacggcgcagcgctgcggctctcgtgagctgggaagtagggggcaggggagaggccgcgggtccagaaaccgttactggatgggccggtgggatgtggcgcgggccgggtggggcgcgacagtctgagccgagacccgcgtgggcttaagggtgcgcgaggcgggtgccctgggcgcgcccgaactggctgagcagtggagcgggaaagggcgcgggaccc

SEQ ID NO: 34902 - DNA, 784 bp, Homo sapiens
  chr5:168727259-168728043
  hyper
cgggccctgcgtctggaaccctcacccctggagaggcactgctctttgcccatcgctgggggtttcgagacctctctttccagatctgaccaagcctacagacccccagctcggagagtgagggatcgtatccaggaagggatgagaatagagactgcatccagggaggccgaggggaaaggacggatctggcgcctggggccccctcggtgggacccaggtgggtggcccgcgtggggtggggcaggggtactcacaggcgctcagcgttgcgggggatgccccgaggaaccgcgcggaggcccagcccgtggcagtccacgctggcagcggagcaggtacacttggtggggcaggcgacggctggaggcccactcaggacgctcgccagcgccaaggccagcgccaggcgggcgcgcacggcggcgccgacccctgcccacccgggggccatggtgtgcagggccccgctcctggaggaggctgcctctgcggggcaagacgcgtggagcccgaggaggcgcgcggggagcgcgggcggcctggggagcgggcggcggagttagcgcggaggaggggcgagctcggtgctcaggcgcacggggcgcgggcggagcggggcgctccgggcggcggcggcggcagcaacagcagctccatcggcggggccggcgctgccccgctgcgcatcgctgggagtgcccaggtgcggagcgccccctggccccgctggcccgcgggccgggttggggacctggggcgagcgcaatggggcgtggcgccc

SEQ ID NO: 34903 - DNA, 795 bp, Homo sapiens; identical to SEQ ID NO: 22921
  chr5:169063996-169064791
  binary

SEQ ID NO: 34904 - DNA, 70 bp, Homo sapiens; identical to SEQ ID NO: 24506
  chr5:171382146-171382216
  hypo

SEQ ID NO: 34905 - DNA, 781 bp, Homo sapiens; identical to SEQ ID NO: 30398
  chr5:17216361-17217142
  hyper

SEQ ID NO: 34906 - DNA, 1284 bp, Homo sapiens
  chr5:17217629-17218913
  binary
cgggaggagggaggctgggcgggcggacgcgcggggggagggcactgggcaggaaggggagggggagcgagcgcgagaaatgcagaggctgcagcggcggcggcggcggcagtagcggcagcggcgacgacggcggcggcagcgctccaactggctcctcgctccgggctccgccgtcgagccgggagagagcctccgccagcggccaggcaccagccagacgacgccagcgaccccggcctctcggcggcaccgcgctaactcaggggctgcataggcacccagagccggtaaggaggcgcgcccggtggccccgcgccgccgcggacccgggggcctccgtcccccaccgcgccgcgccccgccccgcagcccccgggctctcccttcatgcagcgggcagcagggatgtgggcccggattggacggcaagggcctggggtccctctgtgagggctccgtcgcacttcggggatcccgggtgatggggggcccagaagtgggaggcttcagccgctcgcatggtggaggggtgaggggggcggcgaggttggtaaacggagctggggggagggggctgtcggggagaggagctgcgggtgacgggaggaattgccgaatgcgaaaccccctcagtgcgttgagtcccggggagacggttctgtgggctgaagggagcgcttccgtcatcggagcccttaccagcctgggagaaagcgctcggggcgaggggcgcagcagccaaagatggagggtgggggtggggtggggcgggagtccggggagaaagaagatggggaatctggcccgatcagaaggaagtgggtggctttttgctttggcaaacgggttttctcgacccatgggactcctggatcttggttctggggccaaggaatacgaggttcacacggcgacgtgcactcagaagcacctcccgagcagatcggagccccagcctcgtcagtggcggaattgccttcctacgaacccgtgggctgcctcggagcagtttgttttttcgagcctttggttccaagaatgcgccaggcgcctccgccctgggtcccggccccggcccgggcccggggggtgtgggcttgaacctgacagcgcgcggccctaactgggctcagccccgctgggagcgtagggttggggttgagcagcttttgcccaaagcgctaaagctgaaacccggcgcccggttcctgctccccccgcccccgtcccccctccatttccagaaaaataaaaattgcggaatcctggatccgatcgcac

SEQ ID NO: 34907 - DNA, 948 bp, Homo sapiens
  chr5:172754473-172755421
  hyper
cgcggaggtacgctttgcgctgccctcacgctcccttccgaaagcagtgcccccagggggaaagttcgcaatgccatttgtctcgccggcaaagttctgggatgtcgggcatcttttgaggagggggaagacgcggcacccttactgaggccggcaggccaggaagagaagttctccgggcgcagggcgcagcccagctccggggaccctctgggcctcccgcgtgccggccgggatgaagcgcgctttgcaccggacccgggattcgggggcgggggctggcgctggcagcgtcagacgctgcttcatttcccctcgaccctggggaggacagcaacaagtcctgccccagccatttcatcaccctgctagcacgtgcagattccgggccctcggagcccggcgcggacctcgccttgcctcgcgcttccctttgcacgtcccgtgccatcccaagagtttgcgtggccctgggtgggcgcctggctcccggcgaaacgcctggggcgcgccgcgtgggtgcacggtgtcctctcccagtagctcccggctgcgggggcacatgcacttacctgtattctgcagggacaggcggcctttctgctgggagctcctgtcttggggaccctcgggtgggttggtggcgtcggtcccccgcgccgggtcaaaggtggccaacaccaaagccagggtcatgaactggcccagccgctcggcacacatggttcttggtattaacctcccgtcgggagacctggatcctttgtgctcccctcttcctcctcctcctcttcctccttcgccgcttcccctcctcctcccactcttcctttttgctcgccttttccctcctcctcgcggccgcggctcggatagaggttacccagcgccctcccgtagctctccggagagcatgtgaccaggccgttagcagcgccgcgagtgccc

SEQ ID NO: 34908 - DNA, 892 bp, Homo sapiens; identical to SEQ ID NO: 27092
  chr5:176056921-176057813
  binary

SEQ ID NO: 34909 - DNA, 842 bp, Homo sapiens; identical to SEQ ID NO: 16941
  chr5:176918897-176919739
  hypo

SEQ ID NO: 34910 - DNA, 503 bp, Homo sapiens; identical to SEQ ID NO: 28073
  chr5:177031080-177031583
  hypo

SEQ ID NO: 34911 - DNA, 122 bp, Homo sapiens
  chr5:177680780-177680902
  hypo
cgtgtttttatttttttaacatcatgccctgcatggactatggctgcccgctgcccatcaaactgagtcggcatctcagtctggcatccaaagtccatctctggctgggcgtggtggctcac

SEQ ID NO: 34912 - DNA, 1494 bp, Homo sapiens; identical to SEQ ID NO: 30402
  chr5:178016455-178017949
  hyper

SEQ ID NO: 34913 - DNA, 572 bp, Homo sapiens; identical to SEQ ID NO: 27095
  chr5:178594083-178594655
  binary

SEQ ID NO: 34914 - DNA, 1930 bp, Homo sapiens
  chr5:178770455-178772385
  binary
cggacccacccccggatgcaagccagagacctgttcaggcaggcaaaagagagaggcgcacgctcctgcctgctgagccttttggagacccgggcgctccccatgcataaatggccccctgctcagaccagtcaaaacaacctgctttccagccaagcccttcagttggagcacgaggctcactaaagcacgggaagggcgcggaaagtcctcagcgcaggccttgccctcccaagggactcccaggtaacccttttccaaaacccaggcgagagcagcggagagaaaggagctagagaagtgcgtactcaccagcccatcgcagttgctgagcgccacagaggaggcttcggctaggccggccacgtctccgacgtagagacagctcccgagcaggggctccacgcgggtggtgcccttctcgccctgccactccatagtggccccgggcgccacgaggcgggcgttgggccgcagccgcaggtgcaggtctcggccaaagaccgtgacattgtagaagaggtgactgccaggctcctcctcgttgcctccggggaagctcggggtccggaccggggcggccctgcgggctcgtacccctgctctggacgtagctgccgacaccacgtgggacaccaagcggccctgggcgtcagtgcgcacgggcaccgccaggatgcgctccgctccgtgccccaggggcccgcctgcaacgggaaggggcgttagatcggcggagaccacggagccccagtgcctcagagacccgccggcaagccacgcccccccagaccccgccccactgcgaagggaaggggcattccgccaggcgaccccagaagccagcctgcacctccccggctttcctgcaaccgggaaggggcgttaacagggccaccactccggggctccgccactccccagccgttccctcctccggagaccttgcctgccaagagctctgccccctgccccgttcagggttggggctcggtgggaacctccccgtgcccgaagggacgaccccgtcagagagtcccccgacccttgcacctaccgtccttggcaggacgtggagctgctcggaagccattccgggttggcccccttacccgtgtgccacgacccctcggcgggcccctgccgcccgagtgccctcaccgccagcctccggagcggcggagtctcggcttccccgagcacgagcggcctgtcctgcctgtccagctcccgctcagcccgctgccggccccgtctccccgagcgcccgaggactgggaggggtggaacagggtccctccgatctccggggattccctgcggggcgccccaaccaatccttagggcccaaggctacgcgctcggcagccggctcctccggagcgtccccggacgcgagccccggcgccgcctcgccctggctcccccctcggacccgctggggctgactctgcgctcttggccgcggggcttttcccggccctccgtccccaccctccgcgactcaggagccgccagtgctccgaggctcccccggcccaaggcgctcgggggcggtgcggggcgccccctgcgcgaccaacccggccccgaagttggccaacttggccccgggcggggcgcgcggagtttgcccaagtcaggctggacgacgcctggggagggggcggcggggcacgcgggacagggccaggccggcgggggtcccggggagtaggggccgggccgcacctacctggggggtcggcggcggcggcgagcctggcgttcgcgggcggcggcggcggcggcaggagcggcggcggcagcagcagcagcagcagcagcagcgcggggcagagcaggcggcgagcggctcccgccggcggatccatggcagccggactgcagccggggccccgcactcgcagccggcgcgaaagttccccgc

SEQ ID NO: 34915 - DNA, 973 bp, Homo sapiens
  chr5:179779452-179780425
  binary
cgctccgggccgcggccgccctccccacggtcccgcagccacgcgggacagcgcgggagcgccgcgggaatcggacgcccggccccgctccccgccccggactccctctcgtggcttcgggccgaggttcgggcagtgactgcctcttccccgcgcaaagaggcggtaacgcggcagcgacccttctagggaccagacgttcctttggggtcgcgaggaggacgcgcaggccctgcctgaggcactgacgcagcgggggcgaccgggcgggctgcggggacggcggggcggggtcgcctctcctctcctcggtgggcgcggcgggctgagtcgggatgggcgccccgcactcgggatgcgccggcctgcgcgtggccgcctttgtgggcgactgggagacgtggaggagagcgacctcggtcggcatggggtggggacccctctgttacggggtccaggccggaccggaccaggtccctcccctccgtggggaccgggcctcggtccccctcactgtgtccgagaccaggagtcgggttgggcatcccccacccacacctccgagacggccactcggggaacgcgggtgaggggcagccaggcccggccgacgacagcccctcggtaggggcccggggcagatcggcgcccccagccaggtcctcggcgcctgcttgcgggcggaggcgcggagaggctgcggcgccgggacccgcggacggcgtggaggaggcggctcgggcgggcgcggcactcaccgcacatcgtggctgcttctcgggctccttcgcggctcgagggggtctgcccgttcggacgctggggctcctccgtgggctcctccgtgggctccgtgggctccgtgggctccgcgggctccagctcccgtccgctcggcctccagcccttataacccggagccctccgagagggcggggaagggggcggggaaggggcggggcttcccccgccc

SEQ ID NO: 34916 - DNA, 149 bp, Homo sapiens; identical to SEQ ID NO: 31956
  chr5:179867501-179867650
  hyper

SEQ ID NO: 34917 - DNA, 985 bp, Homo sapiens
  chr5:1874970-1875955
  binary
cggctaagagttgttaatggagcttaaggaattatcttaggccgggcggccgggagagccgtatatctcccgcgcctgttcccttgtcgagcctgaatatgctgctgtcagactcgcttaatgaaaagtaacgcaccgctgattacagttttatttgggctctatgtaaagagcgccgttaatttgcatcccctccttggtgtgtttgaattcgccacgcctgaataaccgagcgcgccggccctgccggcctcccggcgccttcccagcccttctctgacaatctccctgggagcccagtcgcccgccccgacccttccccgtcacgcccccgccccactgacatcgacctccctggcgcgtccactcagacacctaaaattcaccccctccgtgtcacctctttgcaaacgccccctccccaccccgctccgacttcggaattgtcctgcctgacacctccccaccccacaagatcagccagagggtgtttgggggcgcctaaggcaaaccggctggactgtgccccaagggaagggtgtgggggaagcgcccagcgaggggatgccatttcctgcgcgtccccttagaatgtggctgaatccgcctccccacccgacgtctttatttaacacaatctcgcagcttattcaaataagccagctttgtcagccagttccaccaagatccgggggctccagcgagatggaattcctatggccagggccacggggaggggctggggtcccgagggcagcaagcttggctggcggcaggagccctgggtcctccccaggagagggacccagagcccagaccaagtccaacccgccaacctgcgccacccatgcgcgcactgggggctgcagagccccgccaggctgcccgcggccgggagcgtaaggccggggtccacgcctcgattttcagtgtccgcagcccctaccccgcctatctgcgacgcaaggcgaaaccttgtttttgc

SEQ ID NO: 34918 - DNA, 966 bp, Homo sapiens; identical to SEQ ID NO: 27097
  chr5:1875992-1876958
  binary

SEQ ID NO: 34919 - DNA, 841 bp, Homo sapiens; identical to SEQ ID NO: 27098
  chr5:1931173-1932014
  binary

SEQ ID NO: 34920 - DNA, 550 bp, Homo sapiens; identical to SEQ ID NO: 22922
  chr5:2038439-2038989
  binary

SEQ ID NO: 34921 - DNA, 283 bp, Homo sapiens
  chr5:2743466-2743749
  hyper
cgggcgcgggaggcagcgcccgcgccggccgccgggcaagcgccccggtgctctcggcagcccccggcccccggggcccacctgagattaaagcgcgaattccgataaatcagctctaaggaaaccctgggccgcggagagcagaagggctgtcgcggatccaccacgcgggcgccgggccgcggagccgggagcgcgcccaggcctgcacccgcagcaaagccaaggccaccgccccaaagcccatctgctcctggtcgccccgttttgccgacgtctcccc

SEQ ID NO: 34922 - DNA, 798 bp, Homo sapiens
  chr5:2750507-2751305
  hyper
cgccgagggccggcagtcgcgacaaccccgtaatggcctcaatcgcccgtaacgtgcttcgccgcggcccgggcctggcccagctcagtaacctcgagactcgcgagccgcccccaggtcgccggagcaggagctgcgctcgggccacggaggactcaggcggcccttagcgggtcacgcgcccgcaagcacgatatttgaaagcatggtccgctggacagagtaaggccgaaacctgggcgcctcgggccggactccggagccgcagctgaatgctcggctcctgggcctaactcggtgacccccaccgccctgagccccgcgagtgaatgcgaaccgcccggccgtcggctcagaggccgcagtgacgcggaccctcgcgccccacgccaatgcaggcgagcacacagcccgctccgaacgcctccccaggctgcggtgcggaaaccagggacaaacggcgccagaccccggccccggcggagacgcacttcccaggctctcagagaaaatcagccggcgagccgaggggacgcgcggggggcgcgcgggtcccggccgggctcagggacgtccccgcctgccgcgctgccctccccacccggggcccggctcagcctgcggggcggccaaccgagccggcgactcctgagtcgccagccgcgccacattcccggcggcccccgcccgccgaacccgagccccgctccgcctgagccccgtctgggtcccggcgcccaggagtcccgcgtcccgcccgcgcccggttaccatgtaggacgggaagccggcggcggc

SEQ ID NO: 34923 - DNA, 2439 bp, Homo sapiens
  chr5:2751307-2753746
  hyper
cggcggcgtcggccgagtactgcagcgggctcccgaagccggtggccgcctgcgccgtgaaggccgccgagcccgggtaggggctgaacgccgagcccgacgccgagcgcgccagctcctcgctgcgcggagccgccaaagccgacgcgccgtaggccgggcacgagtagagcgccagcgagccgggcgcctggtacaggtagccctgcgggtaggacatggtgggcgcggggcgcggggcccgcgtcacgccgagcagcgggcagggcgcgcggcgccctccatccacgcccggccggggcgcggcgcggcggcgggcacccggacggccggcggaggcaggccggcccgggtactagcctgggcggcccgcgggccggggcggcggcggggtggcggtggcggcggcagcagcgcggagccggtgggcgcagccgcgcgccaggccggcggtcggggtttgggggagtctggagtcgggagtgaggagttgaggaaggagcgctcgagtttccgagggacattggaacgcgcagctgtccatcacgcgctcatctgcatattcgggggcccgcccctcccctgctccgcccgctgcagcctccgggccgcggccgggggaggggcagagagacgggagggaggcgggggagggcggaggcgacggaggcgggcggcgggagggaccggcaggcttttgtggcgcagccgcctctctagcagctccggccccagcccgcggctcgcggacctgcagcccagcccggccgcgctgcgtgccccggcgcgcacccctcccactcccatccactcggagccacgtcccctgcccggctccggccggctcccaccgtccccggccaccgtcttcgcccctgcccggcccccgccccttccagccactaccccgcccccacccccttctccaccctcacggactaggcagaggccgcccgcggtcaggccaggccgggtccaattaggggactcacagcctgccccgctgtgcaccccgaggaggcccggcccctgtgtccaatccggaagtcgcagggaagtggggaggtcaggatggtggcgcccgcggctcgggtcttcctccgggcagtgcgcgcggctctcacttccacggtcccggacctgctctgcctcctggcccgaggctccccgcgtggcctcgcgtctggtcgcctacccctcgcggtccactccgcccagcatggacctggatccggggcgccttggttgcgaattgccaggagggccctgaggtgagctttctgcccccaaatccgcagcgcaacccccggggccctgaacgttacgactttccactgttgggaatgacgccagggcttcagctaagaagacgccgtcccctaaagagttttattttattttgtttttctaagttgactcctctttcagatttgtgttgtcaaaacactggggggatgattgttacctgacaaaccgcctctggcaggacctgaagcctcccagtcacgtcgagaacgggcaggagctcaggttggcgccgccggtgcagtgggcattacaggtagctcaggtgacgcgcggctggagtaggggggcggttgccttgcggggctcagaagcgaggcggttggcgagggttcctaggaccccagcttcctagaaccctctccccatcacgcttctccaacccttttccactcggggatggccgaagagggcgtctggctgcccactccgaagggtcacctatggggggcgctcagggggatggaagagtgtcaggtctgtgctggcctattgggagcacccacccagcaggtgcctctatcctcggaagccgtctcgggtgggtgcggtggagaagagagagcgcagtggcctggggcgggcctcagctcaggcctgcagccgactcctgcacccctgctggccctgcagcctgcggagcagccttagtgatctcaggacgcagggcatgttgcggcctccctgtggtgcggctgcagcggcgcggagggagcggagcccgggttgccagtctggtccagggcgcaagagaaacactcacggcatcaggctgtctttccccaggtgcaagggaaccagttgcaaactgcagtgctgtgcttgaggatggctcctcctgagccggcaggctcccggtaggcgcggtccaggcacgttacccctcccgccaggagctcccgagccgagccactcgccccctaccagttatcccacccaccccttcgcccacactgctcccccaccactcttcctacaaaccacacccccatcctgcacacatcctcttcaggccatctcaacacacgcacacgcacacacacccacgaccacctctccctccacccacagacaccccgttcccacaggctgggccccctgcaacgacccagcggggggtttcaaccttgttgc

SEQ ID NO: 34924 - DNA, 964 bp, Homo sapiens
  chr5:32711841-32712805
  binary
cgagtcggcggcggcgagggcaagctctttcttgcggcacgatgccgtctctgctggtgctcactttctccccgtgcgtactactcggctgggcgttgctggccggcggcaccggtggcggtggcgttggcggcggcggcggtggcgcgggcataggcggcggacgccaggagagagaggcgctgccgccacagaagatcgaggtgctggtgttactgccccaggatgactcgtacttgttttcactcacccgggtgcggccggccatcgagtatgctctgcgcagcgtggagggcaacgggactgggaggcggcttctgccgccgggcactcgcttccaggtggcttacgaggattcagactgtgggaaccgtgcgctcttcagcttggtggaccgcgtggcggcggcgcggggcgccaagccagaccttatcctggggccagtgtgcgagtatgcagcagcgccagtggcccggcttgcatcgcactgggacctgcccatgctgtcggctggggcgctggccgctggcttccagcacaaggactctgagtactcgcacctcacgcgcgtggcgcccgcctacgccaagatgggcgagatgatgctcgccctgttccgccaccaccactggagccgcgctgcactggtctacagcgacgacaagctggagcggaactgctacttcaccctcgagggggtccacgaggtcttccaggaggagggtttgcacacgtccatctacagtttcgacgagaccaaagacttggatctggaagacatcgtgcgcaatatccaggccagtgagagaggtgagcaggggcgcgtcccgggccccgggccctaacccaaccgctctccgcggctctccctgcacactcgtccactctgcagaccccactccccactgcggcgctgaggtcgggtgcgcgcgggcactcgttcaggtatgcgccgtgtggctgc

SEQ ID NO: 34925 - DNA, 1833 bp, Homo sapiens; identical to SEQ ID NO: 28084
  chr5:37836623-37838456
  hyper

SEQ ID NO: 34926 - DNA, 1296 bp, Homo sapiens
  chr5:37839492-37840788
  binary
cgtttgctctggggtccagacgcacccctctgactagggcgcccttcagccggccgcacccacccgcgacgcaggcaccacccgctccctgctccccggcccgctccctcacttacctcggatcgggtctccgcagaccctaggttggacattaactccaggtgccccaagtcccagccaggagacccatccgggctgatggctggagcgcggagccccgcccaacaggtcaggggcaagagttcgcaatcctggggtcgcgcggggcagcaagggcgcgctggaggcggcggccaagactcccgccgccgccgccgccaacagggcgagggctgccggcaactctcccgccgggcccccgcacccccagaagccgaggtccgagcagccgccgctgctttgggtggggggctgacagggctgcgcgcgtcgcgctcttggctggggctgcgcgggcccggggcgctgcgggcggctcagcggcagctgccgcgctctgcgcctcctctgggcgcactgcctgggagcacgagactggtttgtctgatgctgctgccggagctgaggtcttgcctggagatccgaacgagacaccacgtcaaccggcgcggggagtcccgtgaagacatgagggcgccaggagcgcaggctggtcttctagagcccgggctgggggtccggggtccggggtgggggaggggaggcgcggggccccgggagggaggggtcgggaggcgtcggctgggcctggcggtgggggaggagaggagagcagcgaggaggccctggagttcccgaggcggggggccggggtgcgagtgggcgacgcgaggcgcccctccctgggctgcagggagagcgctgagagcgcggagacgccgcggggctagcgccttctcctctccgggtggatcaaaaatcgagaggaatgtgcggcgctctgcgcgggccagccgaaaggggcaatccgaacttgaccgcggcgcccgcgccgggctttgcccccgcgcgccgcactgggagggtggcgctctgccggtgcagggcagcgccgggctttcctcgcgcctgtcgaaggccggccttcccgctcgggtgtctcgccctctcgcttctccgcagggcaggaggcagtggcgagaaaaggagctgccggccggagttctagcaccgagaaggagaggtgcggagcggccgggtgagggaagccgagtatttgccaggggacgctgcgagtggggatgaatttatagggctctcactccgtgacgtgccctccagtggcttttctgattc

SEQ ID NO: 34927 - DNA, 1687 bp, Homo sapiens; identical to SEQ ID NO: 23300
  chr5:42950747-42952434
  hyper

SEQ ID NO: 34928 - DNA, 1260 bp, Homo sapiens; identical to SEQ ID NO: 25734
  chr5:42991800-42993060
  hyper

SEQ ID NO: 34929 - DNA, 229 bp, Homo sapiens; identical to SEQ ID NO: 25735
  chr5:42993305-42993534
  hyper

SEQ ID NO: 34930 - DNA, 890 bp, Homo sapiens; identical to SEQ ID NO: 23301
  chr5:42994313-42995203
  hyper

SEQ ID NO: 34931 - DNA, 1012 bp, Homo sapiens; identical to SEQ ID NO: 25737
  chr5:43007481-43008493
  hyper

SEQ ID NO: 34932 - DNA, 186 bp, Homo sapiens; identical to SEQ ID NO: 25738
  chr5:43008736-43008922
  hyper

SEQ ID NO: 34933 - DNA, 1396 bp, Homo sapiens; identical to SEQ ID NO: 25739
  chr5:43017299-43018695
  hyper

SEQ ID NO: 34934 - DNA, 1298 bp, Homo sapiens; identical to SEQ ID NO: 25740
  chr5:43019005-43020303
  hyper

SEQ ID NO: 34935 - DNA, 811 bp, Homo sapiens; identical to SEQ ID NO: 24516
  chr5:54516349-54517160
  hyper

SEQ ID NO: 34936 - DNA, 1069 bp, Homo sapiens; identical to SEQ ID NO: 24517
  chr5:54518558-54519627
  hyper

SEQ ID NO: 34937 - DNA, 508 bp, Homo sapiens; identical to SEQ ID NO: 33857
  chr5:600977-601485
  hypo

SEQ ID NO: 34938 - DNA, 875 bp, Homo sapiens
  chr5:6448753-6449628
  binary
cgggggcgcgggcgacgccagcccgggacccggcaagggaaagggcaagcgcgcggcggagctggccccgcgcgacaaggcgccggcggctgcggcggcggcggcggcggctgcggcgggggccgggggcccccgcgagagggcagcgggcgccagggcggggccgggcccggcggtggcggcggcggcgggcggcagcctggtccccgcggcgcgccagcaacactgcacgcaggtgcgcagccggcggctcatgaaggagctgcaggacatcgcgcgccttagcgaccgcttcatctccgtggagctggtggacgagagcctgttcgactggaacgtgaagctgcaccaggtggacaaggactcggtgctgtggcaggacatgaaggagaccaacaccgagttcatcctgctcaacctcaccttccccgacaacttccccttctcgccgcccttcatgcgggtgctcagcccgcgcctggagaacggctacgtgctggacggcggcgccatctgcatggagctgctcacgccgcgcggctggtccagcgcctacaccgtggaggccgtcatgcgccagttcgcagccagcctggtcaagggccaggtaaggcgagcgcgccggggctgggggcgcggggccgagatcgggtctgcagcgccgccgggcgcccgggccccgtggtgagggccagcgccggcccctccggccatctcgctccctgctctgactacaccagcgccccacggggatgctccgagcgcctccacctcttttccctgagcgttttcttcctgcccctgctttccgtcccgtctctcccgtccccgtctggtctcagtctctgcccgtctctctggtatcggtctctgcc

SEQ ID NO: 34939 - DNA, 635 bp, Homo sapiens; identical to SEQ ID NO: 25745
  chr5:6583144-6583779
  hyper

SEQ ID NO: 34940 - DNA, 838 bp, Homo sapiens
  chr5:71014672-71015510
  hyper
cgaggcaaggcagggctggcgaggtggatgttgcagctgtcaccactgctaggtgttgggaaacgactctcctgcctgtgcattgacccgaaggcattttccatttcctaggcccctcccgcttcccgtccctcacctctagcccctcggcttcagctcaggcccctcggggagcatcccttgccgtgagactgacagcctttgggggcgcagggtcctgttctctgcgctctagcccatctgtgcgcagagcctcgttcccaggcgcctggaacccggcgggcattgacgtcaagcgccggcggagcgctgcctacagacggttgacccgggccctcctccacacccccttccttcttcgcctcctccctctttcctgcacgggggctcgggctcactataaaaggtgggagcgcgtggtgccccagcaacgacgagtttcagaacgatggagagctcccgcgtgaggctgctgcccctcctgggcgccgccctgctgctgatgctacctctgttgggtacccgtgcccaggaggacgccgagctccagccccgagccctggacatctactctgccgtggatgatgcctcccacgagaaggagctggtcggtattcccctcgctctcgacccccttgagctgtcgccttgtctcttctcttgcacgcctccctcctccccccacccccactcctattcccagagtcagggcgcggggagctgagcgcaacgcccaggcacccactgccatccgaagagcgtctcgagctcacgggctcctggcagtctgttgagcgaatccctcatcccggcccctctgagcaacagggaccccagc

SEQ ID NO: 34941 - DNA, 876 bp, Homo sapiens; identical to SEQ ID NO: 31986
  chr5:72594171-72595047
  hyper

SEQ ID NO: 34942 - DNA, 983 bp, Homo sapiens; identical to SEQ ID NO: 31994
  chr5:76936031-76937014
  hyper

SEQ ID NO: 34943 - DNA, 85 bp, Homo sapiens
  chr5:76937347-76937432
  hyper
cgccgccagcaggcagagcgagaaaaacgacaatagcctggatgtaaaaagctcccccctgctcccggttccctctcggtagctc

SEQ ID NO: 34944 - DNA, 1026 bp, Homo sapiens; identical to SEQ ID NO: 23306
  chr5:76940861-76941887
  hyper

SEQ ID NO: 34945 - DNA, 1172 bp, Homo sapiens; identical to SEQ ID NO: 27111
  chr5:77147514-77148686
  hyper

SEQ ID NO: 34946 - DNA, 1132 bp, Homo sapiens; identical to SEQ ID NO: 25748
  chr5:77268330-77269462
  binary

SEQ ID NO: 34947 - DNA, 859 bp, Homo sapiens
  chr5:78407588-78408447
  hyper
cgcccaactgcgggtataaagaggcaggctgcggactcggagcagctcggggctgcgcagcgggaaggctcgcctagtcggtccgcatccgtgtcgaccacctgtctggacaccacgaagatgccacccgttgggggcaaaaaggccaagaaggtgagtctccaggggacccgagggcgctctccttcccctcccacctgctctgtatcccagcctctgggagcgcagaggggccctcggaccctgcctggtacccatcatcctcctactccctcccctccctcagcctcagaccagaatgtgcttccagaacttctccagcaggaccccaaggcgcctctgagcctccccactcctgccccacgttcagagcgcgcccccagagcgcctctgtcccctccagccccagcccagcttggaccagagtgcgccccagatctatgtgatccttgcctctcagacccaaaggcaccctctgagccctccctgacggctgggtgtccccagaactccgagccttccaatatcttctgaatctggcaccccaagaccagaaaactccctagagatactgctcctagccccgcaggcgcgatatcccgtccccacggagcccctccgcatctgtgtccgaggccgccgcgagcgccctctgcacccggcgcgcccagaacagggaggagtgcacggcgctggctccgacatttcccgcctggatctgcaccgcgggtgtcggggccgcctccccgccgggttctcgctgcacccaaggcccaggcgctggttgggtgattgcagattttcacaggcaatttgatgtccgtgatgacagaaaaatgtcatccgaaatgtcagcctc

SEQ ID NO: 34948 - DNA, 997 bp, Homo sapiens
  chr5:83679447-83680444
  hyper
cgcagctaagctccaggcccctggggtcagactaggagaggcgggttcctggggtttgctgtaatcgatgctgctcctctgggatggggaggcaggagaaagctgaagtgacctgtgagactcctctccacctcacccgcggccaaaacgcccagcgccgggtctgggtttgcgaacggctcagcccaggccctgcgccagagcaccgcacccgggggcggacggccctgcagctccccagcctcttcccgcatcaactagctgacgcccgggcgcactggcttcccccgctcccgcccgcacgaaagccctgcccgacgtctgcagtcagcatcgcccgcactgcctagggagggtttgcgccgagacccagtggccgagtgagccacagagtcgctggtcctggggacgctgtcttctaccgctccccaccgtcctcctctttcctgtatctcaccccggtaccccgcacccttctccccgctcggccccgcgcactctgctcagactttacaagcactttctcggggcacccaggactcgacgcctcctccgcgccgccagcggcgctcgccacccttggcacgccggagggaccgcctccggccccctgcgcggcgtttctcaggggactcccagcccatccctcacccagctgtccgggtcccgacgccttacctttgccgaactgggggacaccgaggctgagcccgaccaagagccagacggctaccgagcgcttcatgatcccgtctcccggacgtgaccccggctggtcaggggtcgtcgcggagggcagtgtagccgaggtggcagcgcagggcagcagcagactccgcccctactaaagaattcaagaagacgttctctttcctcagcgctttgttaaacaaattcttggagagggcgagagtggtgactaaagagaggagcctttcctccccttttgcctgcgctccggcgcgcggaggtgggtgagctccggggagccgccggc

SEQ ID NO: 34949 - DNA, 1107 bp, Homo sapiens; identical to SEQ ID NO: 23309
  chr5:87956173-87957280
  hyper

SEQ ID NO: 34950 - DNA, 1866 bp, Homo sapiens; identical to SEQ ID NO: 24521
  chr5:87969885-87971751
  hyper

SEQ ID NO: 34951 - DNA, 460 bp, Homo sapiens; identical to SEQ ID NO: 29295
  chr5:92906252-92906712
  hyper

SEQ ID NO: 34952 - DNA, 980 bp, Homo sapiens
  chr5:9544956-9545936
  hyper
cgaccgttcccacgcacatcttgggagaaaccattccctctggagcccgatctgcccgaaaccctggggtctgaaaccctgagccgcggtgtgcaaaatccgtggagcagcggagggatgcctggtgaaaggggctcgcctagctgcagcgcacctggctggtggttccccaggcctctgcatcccccgccttagtgtctttcattaaccaaggcgcttggcggagttgagcccaagtcccattgcctcccggttcccctgtaaggaaagcaggaaaacctgcccaagccggtggggctgcgaggtggccgctcccgaaccgccaagtcccgacctccgtgtcccctgcccccggctcgcggcagtgcgagcctggaggcgcgccgggggcgggcacagaccagtgtgcgcacctttccgggtgttgggcaggggtcccgtctcgcccaccgcgacactccggctccttacctctccatgctcagacctcggcacaggcgggtacacaaacttccagcccgtgcactagctcaactgtgggcgcccccggactgacggtcgtcctaatcctgtacgcgcaacccccgcccaggtgcctgctgatggatcccacccgagatcggcaccacccaccagccgaccgctgcagtccccgggtcccggccagcggcgcggcgcggcgcggcgcggtcaggggctcctgccaaggccacgcaggaatcgggcgggggtcgctcaccaggtgcgaggagcgctggtgccagtcatccagcgcctgggggccagagcggctccgaggatcctcttcagcacctggctagggaagtggaggcagcagctgcagccgccccctgccacttccccagagccgccccctactcgctgagttccagaatgggggcaccggcttgggggccacgagcacggtccccgagcgcgcggccaaccggtgggtgggcaggttcgcgcccagcagagac

SEQ ID NO: 34953 - DNA, 91 bp, Homo sapiens; identical to SEQ ID NO: 16970
  chr5:98239940-98240031
  hypo

SEQ ID NO: 34954 - DNA, 896 bp, Homo sapiens; identical to SEQ ID NO: 24524
  chr6:10417173-10418069
  hyper

SEQ ID NO: 34955 - DNA, 816 bp, Homo sapiens
  chr6:105388953-105389769
  hyper
cgctcgcggtcccgagtctggcacgtgagcaacgtcgaggggagctccgtgctgaggagcaggaagaaaagaggaggcgcgagcgccagggaggggcgaggactgggcaccgcggggaagtgacaggtctcgcagcaagttgcggttcggaagccggcgcgccgcgtctttccttcgccggccctgatttattgccccggtgctgccgctaagacgcgggcagtcgatgtacttccgggttcacacctttctctccccgctcggtgctgctgggtcggcgcccggtgtgggcactgcgttgccacagcggccgcccaggctcgccgctgcggttgctgccgggcggccaaagccggcttggagcgggagggcggggcggggcagggcgggggcgcaggccacgcgggggcgcagggcgcgagggtgcggcgcaggctggggtcccggcggcgggtcctcgcggccggtgccggctcgtctgggacgcacggggccgcgccgccagagggcgtgcgcacctccctttcgcgctccgcaagccgaactgctttgtaccgggcaggcgtcggggatcgtttttgctttggtatcggtgatgtaaattcatgaattaaaattaaggattttgaaaagaacggggaagaacgcacttggatttaggttgtttttgaaaaggaaaaaccaaagaggaaatgatacgtttgcaggagcattaactgactactgactggaacattggatgcgggtgctttgtgaagatttgtactccaaaaactttttttaaaaattgcacgttggtaaatattgagtgttttc

SEQ ID NO: 34956 - DNA, 543 bp, Homo sapiens; identical to SEQ ID NO: 7448
  chr6:1080648-1081191
  hypo

SEQ ID NO: 34957 - DNA, 85 bp, Homo sapiens; identical to SEQ ID NO: 16026
  chr6:109053387-109053472
  hypo

SEQ ID NO: 34958 - DNA, 763 bp, Homo sapiens
  chr6:117586513-117587276
  hyper
cgcatagtctccggcacccttggccgcatgcttgtcagaggtgggccccgggaaacacactcgctgcccctccaacaagcgtccctcgctccccattggccccccggtccccgccccccaccgccccctcccgctccgcagcccccgagtggcgtcagcacgcccgccgggcatgggctttaaatgcccactagcgggagctcaggcgcttctgccctggagcgcggtcgggagtaaaatcgcaggagtgggagggtagcgagccagctggattccgagccgcggagcgcgctggctttgctccgcctgatgactccagagcgcgggtccaagcgccgcccatgcagcacccctgagctccggggaaggagagttaatgaaaaaacacttaaccgtctccgctgcggagagtcatgagctgtctggatgttatgtaccaagtctatggtcctccgcagccctacttcgcagccgcctacaccccctaccaccaggtacgtgtctcctctggggactttgggaaggagtgcgcgccccccgtttgcggcggcatggcctgtacgccaaggtctgctgtgcctccgcgcgtctcgggcgtccgaccacgaccggcgcagccgggatgcggggattgccggagccgcccccagttggtagtgcaattagctaacccctttagctcgcctgtttgctctcgggaagcagctaagccctgctaatgtgagcctaggtcttccctggaataatcagaggaagatggcac

SEQ ID NO: 34959 - DNA, 1961 bp, Homo sapiens; identical to SEQ ID NO: 28097
  chr6:127439798-127441759
  binary

SEQ ID NO: 34960 - DNA, 1766 bp, Homo sapiens; identical to SEQ ID NO: 22930
  chr6:127836014-127837780
  binary

SEQ ID NO: 34961 - DNA, 1525 bp, Homo sapiens
  chr6:130686392-130687917
  binary
cgttggctttgatgtttggagtcgaacatccgcactgctcatcgaagacccccgtgcttcagttccctctgtcttccatttcccccgcccatggttctcgcccccccaagccgttctccggaaccccttgccgggccggcgggaagcgtggaccgagcgggccttggccgcgtcttttccggccaggtttggtttagctcgcgcagcgcccgcgcagcccgccagggggaccccggcccgccgggcggcatctgaggagaaagcgtccgaggggcgtggagccagggtcctgcggtgcctgctccgggaatactgcgagtcggctggagctccccagccgctccggagaactgggggagccgggtccctggctcggtaaccggtggtcccgcggtagctagaggcgggccccacgggtgggtgtgtccgtttccgcacgccagccttccagcccgggaagagcgcctgcaagcgggtactttgttcccaaagatgggttttgtctgcgggtgatttgggctctcgaagtgcaactttgtggccgggacgcggatcggccggcctgggctcctgcagagcagatcctgtctgcgtcctccaggaggagtgggtggcaggactggggtttcccacaggttttggggcggcggcgagattggcacggtccggggtcgcaggcgcgcagccacgcccctggaagtccgccccggcccccgcccccaacccgcctcttcggggctttatggcgtgaggtttggggctgggatccatctggagccgagcagaaaacttttcccctcccgttcccggtcccttttgtctttcttggacgcggtggcggcgccgcctgagcggcgactccctctcccctgcccggcttgctgcgcccggtgccctccgagggcaggcgcgcctggactctgcgcccggatggcggcggccctctgtgagcaccggcagcggcgcatcccctgccccgaggcctccggtgcccccccggcgcgggcataggggcgcccccaccctccgtccgcttgcaccccttgccacccgccccctcgcctgactcatccgcccgcggtggccgcccgagccctgggatggggagggagaccgcggctgcccgcggcggccgagattcccgctgacgcccccgaccctgccgccttcttcgtccgcctccagaggcgcccgacgtcccgacagctcctggagtgagaccaggactgagaacagggagaggcgacccgacccccagggcccggtgctcaggacaggtgaggggaaggaaagggtgctgacgggagtggggaggtgggtgggcggccaccgcagccgaaaccgggcacttcttcagccctctgccctcccctcccctccgctacagcctccagagttaggtaaacgctgtctctcctaaagtttgggaaataaaccaagtccgccatcaggtccagactccccagtcccgggagcgcgagagaagccgtgcggggcagcctccaagaacccggagtactggagc

SEQ ID NO: 34962 - DNA, 984 bp, Homo sapiens
  chr6:133562445-133563429
  binary
cgaggctgccggcagcgcggcgcacgctccggccgttcccggcttccgcgcaaaacttccatcctgtccacgtgaagttgtcgctgccttagagagggggaaagagctgcgggaaaagccggggagtgacgactgcggcggctgggcgcgctctctcattttcttttcttctcctttcccccctgtcgcagtccggagttttggctcctctcctttcctcctccccctcggagccggcttctccctccgccccgcttctcccccgcttgtgtacgctatttgttgtggggtggccgaaggggatgtcctgttttcaccagaggcacagcgcgaaggggaaacttcgacactggaaggaacgagaataaatacttaattacggacgcactgaaccgcggctgggacagacacttcgggaacccgaggcggaccgggcgacgaggtgagtgaccccttcttccaacccccgccccagggctcccgggggagcctgagttgagagaacccccaaactttccgggaaagtgcgcgaggctccgccggggacgccgagcgctgggtactgaggacgcgcagctggacggtgcgtgggcgcctgcgtccccggggggcgcttggaggccgggtgccccacgcctgagggcccgggccgctcggaccgcagcggtgctctctgccctagaagacgtccccaagccccaagggtcccttccgagcctgcctgtcccttccggggtcggcgcggagcctgcgcgtaacggagttcatccagcagtccagcgcgcggcttctacctgcaccccgcctccacctggcagaggcgcgagcatcggggtctcccccacatctttcttatgacgtgtattactttctgatgaccccctagatggtccaggcgcgaggatgctgacccagagtccttcggagggtcacaggcgcctgggctttcccggtgccgggtgcgtgtgtactttaaaggctcgc

SEQ ID NO: 34963 - DNA, 1460 bp, Homo sapiens; identical to SEQ ID NO: 25767
  chr6:137809033-137810493
  hyper

SEQ ID NO: 34964 - DNA, 974 bp, Homo sapiens; identical to SEQ ID NO: 24539
  chr6:150285366-150286340
  hyper

SEQ ID NO: 34965 - DNA, 739 bp, Homo sapiens
  chr6:155568750-155569489
  hypo
cgcacctggccacgcttcatggcttttaatgaattgtttgaaactcactttttaggccacctataacaatatttctcatgggtatgcatgaaatgtgtctttaaagtcagacattcctgcattttgagtcagtgttagtctttggggcgcagcctgcattccatcctcggaagctcccagcactccagggctctgtcagggctgtgaggcggaatcccacgctgacagctgggtgcctgacccactgatgtgttggggttttcattaaagaatggcattaggaggactatagaaatagatgatctataaatgttaaaagagaaatgaagaatttaattcaccccactgtgctcttctgaggtcttttatccatctgcttgtagctaaaactgacaaagccttcaaggcttttctggacgcccggaaccccaccaagcagcattcctccacgctggagtcctacctcatcaagccggttcagagagtgctcaagtacccgctgctgctcaaggagctggtgtccctgacggaccaggagagcgaggagcactaccacctgacgggtgaggcggcggcggcacctccgggcgagggcctgcacagggcggcgaggggctgccagccgtgccctgggcctgacagctcacctcttccccgcctagtggcacgtcctaagtcacttttcagttctgcgatggttaatcttaggtttcacgtgaatatgtgaaactagctaggc

SEQ ID NO: 34966 - DNA, 1315 bp, Homo sapiens
  chr6:159590003-159591318
  binary
cgcgccgggtgcgggtagggacgtggaaggactgggctagccacaggaactacagcgctgcggaccgggtgaggggtcccggcccgagtccccacttggggcgcagaggtgtttctgtaaggggacaaagggcactcctcggcgcgatgggcgacttccccagccagaaaatgagagggttagacgaggggaggaacttcctcagccacttggcccggcacagcgaccgccccaagttcagaaccgctaagtcagtccggggcgctccggccccttcgtcccgcgccccgcccgcctccagcccgggccccgccgcccccgtcgcccctgtcgcccgggtcgcccccgccggccctggccccggccccgcacaccggcagggggcgcccgagcgcagctaaaaggctcggcgggaggtcggcggcctcagtggcggagcgcggctgccggtgtgcggccgggagcgatcgccgcggggcaggggcgcggcgggcaccgcgcagagcgcgcagaacagacggacggcggcggggacccgacggcggcgcctcggcactccccagactccggccagcgcccccctgccagccgcaagcacccagccccggcccaccccgggctctcgatggcccccgaggccggggcgaccctgcgcgcgccgcgccggctgtcctgggcggcgctgctgctcttggccgcgctgctccccgtcgcctcctcggcggcggcctcaggtacgcgccgcgcccgggcccccggcgctcctcagctccccgcgcaccctcctgcgctcgggccccgtcgtcccgctcagtgctggctacgggtcgtgtcactagcctgtgcgtcctcgtcactcgcgggtcggggcacttggcgccctgtgtgggtggcgggagcggggacgcctcggtgcccggggaccgcagcgcgctggcgtttaactttgccgtcgcccgccttggagtcgggaggctccagccgtctaagtgtcccgggagattcaggcacagcggggaaaaaaggaaaagaaaggcgactttcagcgtgcggactggggtaatgcctttctttgcccagaatttctcgggagcgtaggtggtcatcctactttctccgcgttcacctctcgcgaggcaggatgacgggcgcactcgggagaccggagggaggcagagcagggctgttctagaaggtcgtgggggaaaggctgcgagctgccgcagggcgtcgggtgcctctgcgctccagaggagaagcgctccagtgccagctcggctccaggcggcaggaggcccgcgcgcccggggggaac

SEQ ID NO: 34967 - DNA, 1048 bp, Homo sapiens; identical to SEQ ID NO: 30476
  chr6:1624708-1625756
  hyper

SEQ ID NO: 34968 - DNA, 415 bp, Homo sapiens; identical to SEQ ID NO: 28114
  chr6:167834910-167835325
  hypo

SEQ ID NO: 34969 - DNA, 979 bp, Homo sapiens
  chr6:19838191-19839170
  hyper
cgactgctatagccgcctgcggaggctggtgcccaccatcccgcccaacaagaaagtcagcaaagtggagatcctgcagcacgttatcgactacatcctggacctgcagctggcgctggagacgcacccggccctgctgaggcagccaccaccgcccgcgccgccacaccacccggccgggacctgtccagccgcgccgccgcggaccccgctcactgcgctcaacaccgacccggtgagaggccgggcgccggccgtgggcggacgccgcgggggatgggaggttggtggcgtggtggcgggacgcgggcgctcaccgtcctccgggcaggggcgggccaggaatgacagccccctccccctgctcctccgggctcccccgggccgccagcagccggccgggctcggcgagcgcgggtccgggagaacgcgcagggcgggactcggggctgtgggcgccctgggctgtcaagtcccgcctgagcccggaggggcccccccggctacaggctggggtgggggcgtcggcgcgccagcctgatttccgaggacaatccaggaccgtgtcgagcgcgttgtttgcgcctgctaacctttcccttggtgttcggttgctgttccaggccggcgcggtgaacaagcagggcgacagcattctgtgccgctgagccgcgctgtccaggtgagcgcgcatttcccgtctcgggtggccggtcaccagagacgcccgtccccgagggcttccggggccaggcaccgcggtgttctttgcccccagcgtttctgagagcaaactcccaaggaagtaaatcccctctctccctgccacctaagtagcaagtaaacccgtacttagccttagaactcgaggttcagtctcggtggagacgggtcagcccttgtccccgccgtccccgtgttttttctggtggtcagcgggctcttctgccttccctagttcccgagggagggcaccctc

SEQ ID NO: 34970 - DNA, 719 bp, Homo sapiens
  chr6:26188711-26189430
  binary
cgtttgaacccgggaggcggagactgcagattgccgagatcgcgccattgattactccagcatgggcgacacagcaagagtgaaaataaactttaatacactatcctcaccggccagtaagatatgaagccaaggcgtaataagaccatttaacttgaaaaccggagctactaaacacgtgaaactacacttttagcagtgactactactctttctcctgagtggataggtggccctgaaaagggccgttggttttgcggtagtgtactgtagaggtaagctcagccgccgaagccataaagagtgcgtccctggcgcttgagcgcgtacaccacgtccatggctgtgactgtcttgcgtttggcgtgttccgtgtaggtgacagcatcgcggattacattttccaggaaaactttcagcactccgcgagtttcctcataaatgaggccagaaatacgcttgacgccgccgcggcgagccaggcggcggatagcgggcttggtgattccttggatattgtcacgcaataccttacggtgacgcttggcgccacccttacctagaccctttccgcccttaccgcggccagacatcttgaaaccacagctgttaaatctgtaacgcaatacgtctggcagagccacgcagcacttttataatagcatgacggacctgtttgaaaacctcatgagaaggggcgggaaccacagtcagttccc

SEQ ID NO: 34971 - DNA, 578 bp, Homo sapiens
  chr6:26197269-26197847
  hyper
cgctggaatggcagtttgcgaatcagcagctcggtcgacttctggtagcggcggatctcgcgcagagccaccgtgccgggccggtaacggtggggcttcttcacgccgccggtggctggagcgctctttcgagcagccttggtggccagctgcttgcgtggcgctttcccacccgtggacttgcgagcagtctgcttggtacgagccattgcgaacttctaaaccctgctaaatgacgaaaaaacgaaagtctagcctttcgtacccgtatatataaagacacccctgttctgattggacaaggcagcctttcccctgcagctcgattggtggagacgcccactccctgacagaacatctcctgcatgtagaccaaatattaaaactttcctccgtccatctttaactgctggtgttttcaaccctttcccctctgtgccatgtttctagcttttatttaaaacgtactttggttttccttggcaaaattgtgtctagctactaggatgacgtgtcttaatttttttttaaatgttggcgctgaaactggctttgatcaacgttttaaaaagacgcgc

SEQ ID NO: 34972 - DNA, 113 bp, Homo sapiens
  chr6:26198488-26198601
  hyper
cgagccgctgcattgatcgatttaaattacatgtgacataaagtctctttgcattttaattagtttgcttttttgggtttttgtttgttttgagacagtctcgctctgtcgcc

SEQ ID NO: 34973 - DNA, 1042 bp, Homo sapiens; identical to SEQ ID NO: 32053
  chr6:26198838-26199880
  binary

SEQ ID NO: 34974 - DNA, 1449 bp, Homo sapiens; identical to SEQ ID NO: 32054
  chr6:26204318-26205767
  hyper

SEQ ID NO: 34975 - DNA, 42 bp, Homo sapiens; identical to SEQ ID NO: 16989
  chr6:26206006-26206048
  hyper

SEQ ID NO: 34976 - DNA, 387 bp, Homo sapiens; identical to SEQ ID NO: 33006
  chr6:26215876-26216263
  hyper

SEQ ID NO: 34977 - DNA, 293 bp, Homo sapiens; identical to SEQ ID NO: 32055
  chr6:26216380-26216673
  hyper

SEQ ID NO: 34978 - DNA, 1085 bp, Homo sapiens; identical to SEQ ID NO: 23319
  chr6:26216805-26217890
  hyper

SEQ ID NO: 34979 - DNA, 167 bp, Homo sapiens; identical to SEQ ID NO: 30480
  chr6:26249947-26250114
  hyper

SEQ ID NO: 34980 - DNA, 987 bp, Homo sapiens; identical to SEQ ID NO: 30481
  chr6:26250181-26251168
  hyper

SEQ ID NO: 34981 - DNA, 428 bp, Homo sapiens; identical to SEQ ID NO: 30482
  chr6:26251515-26251943
  hyper

SEQ ID NO: 34982 - DNA, 95 bp, Homo sapiens; identical to SEQ ID NO: 30483
  chr6:26252081-26252176
  hyper

SEQ ID NO: 34983 - DNA, 2039 bp, Homo sapiens; identical to SEQ ID NO: 30484
  chr6:26271217-26273256
  hyper

SEQ ID NO: 34984 - DNA, 408 bp, Homo sapiens; identical to SEQ ID NO: 30485
  chr6:26273355-26273763
  hyper

SEQ ID NO: 34985 - DNA, 322 bp, Homo sapiens; identical to SEQ ID NO: 23321
  chr6:26322359-26322681
  hyper

SEQ ID NO: 34986 - DNA, 134 bp, Homo sapiens; identical to SEQ ID NO: 23323
  chr6:26328309-26328443
  hyper

SEQ ID NO: 34987 - DNA, 850 bp, Homo sapiens; identical to SEQ ID NO: 23330
  chr6:27512842-27513692
  hyper

SEQ ID NO: 34988 - DNA, 365 bp, Homo sapiens; identical to SEQ ID NO: 23332
  chr6:27560506-27560871
  hyper

SEQ ID NO: 34989 - DNA, 229 bp, Homo sapiens
  chr6:27635260-27635489
  hyper
cgaagctcctggtggtacttcggtctttaaccgttgaatacattaagagtaacactggaattccaacacttcctcgcgccagcgtcagttttagaatcaacaaaatcgttacttgctgattcatttaactgctaatatattcgttaaaagtttattaggcgtcagtgatcttgaaagttccaaaaacacgaaggaaaccccaggcacatgtagagagatagttcctgac

SEQ ID NO: 34990 - DNA, 257 bp, Homo sapiens
  chr6:27635798-27636055
  hyper
cgccgattacatcagtgcttatgtttgtgacttcagagacactgagaaggcgcggctctttccctcaaccccattcgccttcctttcggcggcgttgtcttgaaccaacctgaaaataataagtccttaagttacaagtcactaaagggaagtttgcaacttgcgatccagtacactgacatgactctaaaaagagaaggctgccgactctgggcgtactgcctttgaattagccatactccgcaaggagcagtgcc

SEQ ID NO: 34991 - DNA, 307 bp, Homo sapiens; identical to SEQ ID NO: 23333
  chr6:27636317-27636624
  hyper

SEQ ID NO: 34992 - DNA, 705 bp, Homo sapiens
  chr6:27647528-27648233
  hyper
cgatcgaccatcaggagagcccagtctttgccacttgcggggagtcacttattgcaggcagggtgttaactgagtttaacactaggagacaaaatgaggaaataatctctcagaatgtaggttaggaaagtagaaacgccctccgagtgtatgtctatcccagaagaaaacctgtcttaaagttcgcgatttttaccaaaataggccacgaaacacacaaagtcgctaaactttttaaccctttcctctttttctttcttatttccgagaaatctcgcaaacggcgtgaacactacgctgattccagaaatggtcgggttcccttccttcactcaggatggtcgcctgctgggagctcatttcgaaccgagctgaacgctcattgctgagtcctgggagaaggtcgcgtttgtacagaaggctcctggcagcgagcaaggccgggagtgggcccagtgcgcacgaagtcgcgccccgaattcccactgggaggaacgcactggaattgaaatgtctgagatcaagccccgctgagaatcaagtcccagaggatcttctcggctggtggaaacgtggaggggaaaggcggtcacgaaaattgaagtctcctagtccaatacagattatccaggccgttgacggcaggaatatatttttatttattcctttacccttctctcctcacagctcttccttctcgtccac

SEQ ID NO: 34993 - DNA, 438 bp, Homo sapiens
  chr6:27798618-27799056
  hyper
cgaaactagcctgggaaacacacggagacccggtctttggaaaaataattagccttgcgtggtggtgggcgcgaggttccggctaatcgggaggctacagtgagccatgatgacactgcactacagtctgcgcgacggcccatgtcagtaagctctggagcacctgaaacaagttgtgttgggtattttatttactggagagcgattagtgactgatgcctacttacagcgactagagacgcatgctccgatagcagcacaaactcagcaggcgcgaacaaatggtaaagagaaactgggcaaacaagcatcacggctcctcagctgagaaagtgggggccctaaaaagggccttttgttgatagaaagggacgctcaaccaccgaaaccgtagagggtgcggccctggcgcttgagcgcgtagaccacatccatggc

SEQ ID NO: 34994 - DNA, 1121 bp, Homo sapiens; identical to SEQ ID NO: 25787
  chr6:28175204-28176325
  hyper

SEQ ID NO: 34995 - DNA, 926 bp, Homo sapiens; identical to SEQ ID NO: 23338
  chr6:28456978-28457904
  hyper

SEQ ID NO: 34996 - DNA, 176 bp, Homo sapiens
  chr6:35309539-35309715
  hypo
cggcctacggaaggtgtggccgaaggagaggggaggggtcatctttaatgatgatggaggggaggcattggtcatatacctgagagtcaagctttgttcatcgtcagatgaaagccaacttcttccaccagattgcctcccagctgctaggtagtttcctgtggtacatcttaagc

SEQ ID NO: 34997 - DNA, 809 bp, Homo sapiens; identical to SEQ ID NO: 24568
  chr6:37023826-37024635
  hypo

SEQ ID NO: 34998 - DNA, 2706 bp, Homo sapiens; identical to SEQ ID NO: 22934
  chr6:391113-393819
  binary

SEQ ID NO: 34999 - DNA, 262 bp, Homo sapiens; identical to SEQ ID NO: 32089
  chr6:43478540-43478802
  hypo

SEQ ID NO: 35000 - DNA, 605 bp, Homo sapiens; identical to SEQ ID NO: 24573
  chr6:47202003-47202608
  hypo

SEQ ID NO: 35001 - DNA, 176 bp, Homo sapiens; identical to SEQ ID NO: 23629
  chr6:4951262-4951438
  hypo

SEQ ID NO: 35002 - DNA, 375 bp, Homo sapiens; identical to SEQ ID NO: 25806
  chr6:50808438-50808813
  hyper

SEQ ID NO: 35003 - DNA, 261 bp, Homo sapiens; identical to SEQ ID NO: 24574
  chr6:52344303-52344564
  hypo

SEQ ID NO: 35004 - DNA, 1223 bp, Homo sapiens
  chr6:56818408-56819631
  binary
cgttcgctgggcactaatatgaaatcacttaaaaggaaacatgccactttcggctaggggacagcatgttcgtcattcagtgtcctactggtttcttaacacgcatataattaatattggtactcaggaaagagaacttcttctgaccttgagcgtgcgcgctaaataaattacctcagaacgaaagtggtgcgatctcaaaacagcatctggggagaaaagagataaatgagacttcatttaactccttgttcttcacctaccgagtgactcatgacttacctgggagaccagggttgggaaagcacatcgcagactcctggaattcggtgggacatcctgggggagggaggaggagtcctggggccatcggtctctacgtgatttctccgcgagaagtttgcatgaaagttctgggggagttggggagccccgaagtttccatgccttactttcttacccctacgctccagcgaaggatgcgtgaaggcgaggctggcgcagccccggactacgctcaaattacccttaaggctttagcaaactgactaaaaatttgagttctttcctcccctccctgccctcggcatcgccgtggttattcaaacctgggagactggagggcggaggtgacggcaaaaagggcaaggggcgttaaagaaacgcactcagcctggggagtgggcaatgatggggctaggggcagccgaggagaagggagcgagccgcgcttcactctccaaatcggcttaattgttcctggtagcccgcagaaacccgtcgcggcgtgtcttacctcggcttcttgaacgacccgagaagaccgatttcatcggatgcctccctttctggagcttgcggtgccagcagcagaagaagacgatggtggcgatggtgcccagcagaagcaacaagaggaagagggcacattggatgctgtagggtctcagcaagacgaggaaagccgcggcgatcatggtgcgggcgaggcgagggcgactcgacggcggggctggagggcggcggcacaggcacccgcgctgggcgcacgccgggacggcgggcacgggtgagcgcggctcagcgcgtcatgcctggcgctcgcggccccgcgcccagcccaatggctgcgcaccccgcgccagccgcgctacgcgagtgatccagggctgcggggagcgcttgccatgactcagcagacagcgacgaggctgcgactcggc

SEQ ID NO: 35005 - DNA, 620 bp, Homo sapiens; identical to SEQ ID NO: 17015
  chr6:57036954-57037574
  hyper

SEQ ID NO: 35006 - DNA, 954 bp, Homo sapiens
  chr6:6003583-6004537
  hyper
cgaacctcgggcctctttctctcctcctcccctgtccgccactcggctccccagacacccttaacaacccacccgcccgccaaaaagcccgcctacactccggacggcagcggggagaggctgttcttctccaggtgccagccctgctgctgaaagtgagctcgccgcggcccggggctcctggccccagctcaggactccctgcagagagcaggcagggataaaagctgagcggcgggaggaggaggaggaggaggaaacacaggccgcacgaaggtccaagccccaagcccccaagcccccggcctctggacggccaaaccccgaggcgcgggactggaaggacaggtaccaggctgcgggcgcgcggctgtggccatctctttccgccctgaggccgacgaacccggctggaagctgagtgcctagcggcccaaagcagcccgggcgccgggagggcgccagagaagcacagcgttagggcggggaagaaagggtgaatctcagaatcgaaatccgcactggcgcccacgaccctgggcgccggcctggtcctcggcagctttctggcggctgcgcttgtgtgtgaatgtgtcccgggaggaccggacacctcaatcccccggcccccaacgcgggcgcctgtccgcgagcgccgggccagacgccgaagaggaaggtgaccgaacccgtagcagcttccgagagcgtacccgtttgcaaattgctgcaggaagagcgaggcgggccttgcgctttttaatccggaacgggaagcactggggaagggaccgaggttaacttcgacctccgctggggcagatacgtaaaccttctcaaacctccgagttcaccttacagcgaacattaaatacccttgcgactacaatactaacaaatcgaacactgacgtaaaatcttaagaataaacgaatctttgttctgatagagctc

SEQ ID NO: 35007 - DNA, 827 bp, Homo sapiens
  chr6:6007608-6008435
  hyper
cgctctctacgatgcaggggggtttaaaggagcgggagagggaaaaacagctaagctagctcgattaattcgaaagcgctcctcggccgcccgccccctgcgcttgcctaccctctttttctccaacccagcagctgagctctgggcgcagcctggagcgcgtgagcacgcagcccggccccccgcacgagcacacacacacacacacacacacacacacacaaacgcgcgcgcgcacgcccgccagccgcgccgagcgcccccatgcccgcccgcacacaaggcacgcgagcgcgcgcacacgcccaggccccgggggtttggtttgcacacgtggggccccagaaataaacaccgaatgtcctctgaattttacccacctgcgatgccccagcgggccaaaggccgcttcaagggacacagcgacacctgttttagggggcgagtagggcaccggggaaggagcctctgataagacagttttcggatactagtgatttaccaaccaactctcagcgctttaggaaatttccaaggcaagcgctggtgtgcggacttctttctaatcttgatgcgcctcttgggcttatttgttgggctacacacacacgtacccacacgcacacacgtacatcacgtacgcacacgcacacccggacccacacacacctgcactgtcttttgatgctcaggcacagaccctgtgtaggtgtagcctaccctgcaacaaaatacttctgcagctggctttgtgctaggtgcaagctgctatcgacgacagcttgagtcaaaaccgaaaaactaacagggctatttcctttctaaac

SEQ ID NO: 35008 - DNA, 928 bp, Homo sapiens; identical to SEQ ID NO: 22937
  chr6:6008704-6009632
  binary

SEQ ID NO: 35009 - DNA, 915 bp, Homo sapiens; identical to SEQ ID NO: 22938
  chr6:62995371-62996286
  binary

SEQ ID NO: 35010 - DNA, 791 bp, Homo sapiens; identical to SEQ ID NO: 33033
  chr6:710660-711451
  binary

SEQ ID NO: 35011 - DNA, 1034 bp, Homo sapiens; identical to SEQ ID NO: 23344
  chr6:72596036-72597070
  hyper

SEQ ID NO: 35012 - DNA, 2473 bp, Homo sapiens; identical to SEQ ID NO: 28135
  chr6:73330635-73333108
  binary

SEQ ID NO: 35013 - DNA, 806 bp, Homo sapiens; identical to SEQ ID NO: 28139
  chr6:80656537-80657343
  binary

SEQ ID NO: 35014 - DNA, 2130 bp, Homo sapiens
  chr6:88875397-88877527
  binary
cgacgcacgattcgctcacacggaataagaactccacgaaggacacttggggaccacactggtcgtacccgagggggcgggaggcggaaaaagtatttccaaacgcaactctgccaggtcttacccttcgcatcccctggtcctcgggacagaagctcccttggcacctctcgcccagctcaggggctggttgtccgctagaacgaaatatcccccactgactacggagagctctgcagggagccgaggcccccgcccgggccaagggaaggcgctggcgccgcgggagacaagaagaggcggaggcggaaaagaagtggagaaggaaggggtggcagagggagtagcgtgcgggaggcggcgccggcgccgggctgctggcgaggcggggtggggtggagtggggtgtgcctccggcgggcggtcagcaagtcagtccgtccgagcgccggcgtcccggtctccagcgcccgcccgcgacagcgaccgggactggcgccccgctgctccgaccgccggcgagcctcgccccttcccaggctcttcactgggtcctcccgcgagccccgcctggcccggcgtggggccgcccgtctccgccagcccgggcgcccgtcgcctcgtcccgctcgcgcagtccctgccgctccctccgctcgcgctgtctctggctccctctcgctccagtcccatttatgaagcgcggtcccatcacgtgttaatgagcctttgtcctgccctggcagcggcggcggcacagaccccgccgagggaactgcgcggggagggacctgagcgcagcgcccgtagccccaaactttgcttggggcgggggacccgccgcggcgccagccctggggccagaggggacaagcctcttcggcccgcgtcacctacttctcctcttcctcctcctcctccgccgccgcgctcccggaggcccccgctgccatgacctcgctgtgctcccggataccctcacaccctgaccaggccaagaaggggctggtgcatgcgccgcccacgacctcggggccattaatcacacgctcccgggcagcgcgcatcgccaacaccttccgcgggggtcacgtctggggcagcgggctgagccggaaggggaaggggagcgggagcccagaggccgaggcgcgccgggcccgggggtgcggtctcgcgccccctccctccgcgcaaggccgctcccgtggcaggcggcagcgagctgggcccggggccgggctgagctttgggaccgcgctgcgcagcccccgagccgttcgctacctggctgcggtcgcgcggccacctgtcctccgccctcggggcgccgcccagcttcgcgccaggcgccttctccagcgcccgccgccctttcccggcgagaccactcgggcgcgccccgcccgccggtccccgatgcaaacagttgggctccgtaggcggctggctccgcgcctcccggcccggcgcgccccctccccggccacccggggccccgctcctcgcaccttttcgctggaggaggacgccccactccagggccggactgggggctctgggactcgggggcggcagcggcgggcgcctggggagccgcggtgtgctcagcagccgcggcaggaattaggggacatgctcgttaattgtttccactatcagccgccgtctgcctcctgtgtgcacggatcaaaccttaattggtctttacatttatcatggtgaattgcgaacctccaaacaagcctgggccgccgcttctgccgaggaggcgctcccctcccctccgcccccggggccctgcagggtgtgcggcggcggtcgtggttatttagacatctttatctctcgtgagttggatcgggagaggatcgcacggtttccacctgacggagccacgtcacgtcggccacaagggccccgtgctgggcgctgggttcggttcccggccgtcctcttgtggccgccttggcgttcattttatgacaccttgccggtgttcccagacatcatcccgcaccgctccgttttaccgacctccaggtcttcccgcccctgatcagaccccaacagcaaccgtactatatctggaccctatatttgaactacgtggtgagaatctgtgaaagc

SEQ ID NO: 35015 - DNA, 1298 bp, Homo sapiens; identical to SEQ ID NO: 28142
  chr6:91004776-91006074
  binary

SEQ ID NO: 35016 - DNA, 1037 bp, Homo sapiens; identical to SEQ ID NO: 28143
  chr6:91320244-91321281
  binary

SEQ ID NO: 35017 - DNA, 468 bp, Homo sapiens; identical to SEQ ID NO: 28144
  chr7:100253722-100254190
  hyper

SEQ ID NO: 35018 - DNA, 420 bp, Homo sapiens; identical to SEQ ID NO: 23630
  chr7:101475674-101476094
  hypo

SEQ ID NO: 35019 - DNA, 468 bp, Homo sapiens; identical to SEQ ID NO: 28146
  chr7:101627660-101628128
  hypo

SEQ ID NO: 35020 - DNA, 1328 bp, Homo sapiens; identical to SEQ ID NO: 30517
  chr7:106684813-106686141
  binary

SEQ ID NO: 35021 - DNA, 969 bp, Homo sapiens; identical to SEQ ID NO: 30519
  chr7:108095249-108096218
  binary

SEQ ID NO: 35022 - DNA, 130 bp, Homo sapiens
  chr7:1115608-1115738
  hypo
cggggctgccactctccagggcgccccactcccagctccagcggctgagtccaccaagccaggacaggcccaaggaccagagggcgaggtgattcacagtggagctcggaaagacccatccatgcccagc

SEQ ID NO: 35023 - DNA, 702 bp, Homo sapiens
  chr7:112429912-112430614
  hyper
cggcctccttctagcgagatgtgggaggtccgacaaggagcttggctgttctccaccatcctctgcctcggagaacgcgaccacaacgtggcgcccagttgagggggaacccttgcgaaatacggagaggcgctcccacaccctccaatctccaaccaccactgtcaactcctccagaggcaggtatcctaccccggccctgggaggccgactgggcggagcttggggtccggaccacgcggagccctggcagtgtctatgcctagatctcgccgccctgccgtccacccatttctccctacctgactcggccgtcgccaccaacgcgctctcccaaccctcggagtcagttccaaaaccaaaccaaaaaggaggagagcagacaaggcttcagcctgcgactgagaacagggaggcggcacgccttggggaacgagggcccgaggccatacgcgctaatacaggccagtgtcggcgtaaactttctccgttaccggcccggccgcgaccgccatgtttccgccgccgaaatccgcgacggtacggaacgccgccggggtcaaactgcgcggcgcgcctccttcccgaggcccggccccctccccgcccaaacccgcgcgccgccacacactcaggtgagcaaggcgctgcgcgagtgtcaactgccccacctaaggcgcctgccttcctcaagccaaagtc

SEQ ID NO: 35024 - DNA, 786 bp, Homo sapiens
  chr7:113722711-113723497
  hyper
cgcgtgcgtcgctttccttcatcttggctatacttcctctcatctgcggtgttttatttcgcgcaagatgcgctgacagaggccatttcaaacgaatttatctttcactaggaccgtactagagcagtgtctcgaattttgttgatttgtggtttcgtcgtaaaataaacttgaaatcaaataaactttcgtgaggaagctttgatgtccacttggtgaaactcctcattcacccagttgagccgttgaactttcttctggaacctctttaaatgacttttgccgatccacgtgctgcaaagaagacctgaaccgtgcctatgaccctgcgcggcgactacagggacagaatttggctttccttctctttccaatatgcagcgtttcgtttaaaggctgcctcgatccagtgggctgaccagtgacttgtgcaaaagaaaactattcgatcgctgtttgccctttcagcgttttcctcggctgcggaaacccggttttcctattattatacttcaactttttttggagtcagctagcacagagcgctaaaccccggccagttccagcagcagccgaggcgaacaaagcctgcagtgttcggggccatgctggggcgggagtggtggacgagttcaaggaattgcaaataaatatattttatgaccacccatcaacaaactacgtgccaccgtggcggcccctggtagccgggccgtgtctgcagtgtggccaggggcgggggctgaaaaggaggcggccggagaggcgaagcgagctgcgagcccc

SEQ ID NO: 35025 - DNA, 832 bp, Homo sapiens
  chr7:113726962-113727794
  binary
cggatgatttttagtttggataatgcaaaatgttgcttcgtccggagagacctcggctggaggagaatgtgtgtcgaaacaccagatgtgtgtttgtttactctcttctttttaattgtttgttgtcttttccccttcctccccgcacccccacccccaacctcgggaggagaaacaacagtaaaaacatctggcggttagaagcacacactttattgatccaactgctgacctttatttactcagttgggcaagtgcacgcttctcgcgtctaagttgggcacttcagcgttcatctcagaagtacttctccaggaaggagagagatggaaaggggacactcctgtttctggagtcaagaaactcctgggccctactgacgcttcgggataaccgtgcacagggatgactgctgccttgatcgcgttcctttccctgtccacgcgttagcacgaccggcttcccccggtgtctggcctggttttacttttattccgctttagagaggtcgcctggctgtttgtgggtgggtttggggtgaaatcgcacctcgcggcacttggtgaggggacgtgggaggagcgcagacacctttcggtgatagggagggcttctcacttggctgttacctggaagtccacagtggccccggcgggcaggcgggcgggcagagcgcgggtccgaacgcccttcgcgctcgcggcggcgcacgtgcggcggcggcggcggcgccggcggcgcgggcgggacccactgggtggccgcgcgcgccacccgcgcgttttctgcgcgcctctgcccacccgcgaggccgcaacgcgccctgacaccc

SEQ ID NO: 35026 - DNA, 939 bp, Homo sapiens; identical to SEQ ID NO: 32122
  chr7:121939692-121940631
  hyper

SEQ ID NO: 35027 - DNA, 614 bp, Homo sapiens; identical to SEQ ID NO: 32123
  chr7:121941896-121942510
  hyper

SEQ ID NO: 35028 - DNA, 856 bp, Homo sapiens; identical to SEQ ID NO: 27199
  chr7:121946579-121947435
  hyper

SEQ ID NO: 35029 - DNA, 658 bp, Homo sapiens
  chr7:127671335-127671993
  binary
cgccaaagtgcgctccggcggccccggcccgctctgcgggccgccgccggagggagtgcgggggcgccccgaagccgcccaggccgcactcgctggatgctgcgctccctctcccggcgtcggccgctccgggccggcggcagctgattgcggtcgtgagctcgcggagcggcgagagttaagaggaggtgttcgcggcgccttcgccctccccagacacacaccccctttctcctcgcctcttctcggagggtggaagagacaaaaacggggggtcagttctccagtccgccggctgccggcacgcggggcggcgctccgtccggcccccgaggaccagcggcgtggcggctgcgctcggacccggtccgccggccggaggagcgcgcggcgcccgcggtcgcgcccgcaccgcaggccccttcagagagtccgggggcgggcgcgggtccggcggcggcggcggccgcagcccccggcggcgcgcaaccgcccgtcgccgcccgccgctgcccggcccccggcgcgccgccggctccggctttgtgcggagggagcgagttcgcggcttcggctcccggcgccctcagtggccgcgccgccagcggactgctgcagcggcgtgagcagcgggggtcgcggctgcgggaaacgctcc

SEQ ID NO: 35030 - DNA, 624 bp, Homo sapiens; identical to SEQ ID NO: 28155
  chr7:127744072-127744696
  binary

SEQ ID NO: 35031 - DNA, 1387 bp, Homo sapiens; identical to SEQ ID NO: 25835
  chr7:129422114-129423501
  hyper

SEQ ID NO: 35032 - DNA, 1262 bp, Homo sapiens
  chr7:129424670-129425932
  hyper
cgagtccagcctcggtttcctcatctgtaaaataagccgagaacatccgcgcctctttctggagaaggctgggaggatgccagagagaaactgcgcgcaggccctggcgaggagcccctccggcccatgcggaactctgcacaggctgggtccctccagggttagaaacccagcttccccacccctacccagcagggacccgcgctgcatcccctaacgccccccaaccctctgcacccagacccaagagccggccttcgacgcaccacatgcgtggagcccgggtcccagccctgaggaccaggtttcagggctcagaagactccagcgaggttccctcgcagattgtgtctgcggtcgttgggggaggggccccgcagccttcagcagattatccaaaggtcagtgacccagatatggttttggccacgggccatgtttcacttcctgtgccccaagcagaatttagctgaataattcggaccccaaaccaaacaaaacgctcttatttccgtttggggattcttcggagttgggatttttctgtctcaaattagaataatctgcattattaaccacttaacagttatttgttggttggctgcctgacctttctgagcctcagtttcttcgtctgtaaattgggagcttacccaggtcggaggactgttggaattggaaatattcgaataaggaagtgtttttgcaagtgctttgtaagcagcaaagcgcttcttcaggggtcaatttttttttagctctgcagtcaccacccaaattcggaagatcgttgtgcctttcttggatgagaatgcccggctccagcccggggatgggacggtcttttccttgctaggagtccgctgtggagggggcgatgcgctctgtccaggacctaggagtccctttctccctccaccctcggctcacagcgggcagctcccccgacgcgtaccgcctctttgcccccagcctgaggtgcgctcttccccaggacgcctcctctgtcctctgcacgccgccggccctgctggggttgctttctgccgcggcgtcttcgcgaatatcccctcttgctgtctgcctgggcgtccctccgggttaccgcacaccgcctccgaccctcccagggcgcgggaggaggggcagggcatccgcgttcgtgtctgggccctggcggggagtcgcgtggtccaacccctcgtttttaagaggagggatctgaagcccagctaggcttctaattccagacagagccctac

SEQ ID NO: 35033 - DNA, 1463 bp, Homo sapiens
  chr7:139167531-139168994
  binary
cggtcagctgcccagcggtccagggctgggcgggtgtgggggtttcggctacgtccacccgacctggcggcgtcggctgccggcgcaggtgagcactcacccgtaagcgttacggcccggggcagcttctcgtcgccgtccaaccccgcgcggggcaacagcgccgcatcctccttctccagccccagctccttgcagcggcagcacgtgggggagcccggggagccggcgcttccttccgcggggctggcccggccctctgcgtcgcagccgctctccgtccgggctgcagccagcggcgagcggcggccccacgtgccgccctgggatggtgcgcgcagcaggagctggtgcgccgggtccgcgtggcgggagaaggcaggggactcgggcaccggcaccttgaggaagcgcgtggagggcctgggcgatggcgtgctgctgccaccggccgcgcccacgggcttcacgcgcacatctacctgcagctccatgggcgcccaggcgctgggcgcaggctcagccccgggcgcctcgccattccggggcagcttgaccaaggcagggcccggtgacggcggctcggggcagaccccgtagcccaggctgagcggcggcacgcgcggggacccggggcgaggcgaaggcggctttttcttgctcgagggctccaggcctgcgcccgccgccttctccacggccccggccggacttgggctgctttcgggaccttcaggttgtcgcaccttcgcgggcacctgcggctgctccagcgtggggaccaggcttcccacgggctccattgggagctctgccccggcttggcctccgggcgcagcctcccaagactcctccatcccgcgcgccccgccacccggagacgctgaggagcgcacctgggcccagtgcagaggagcttcgctctcctccgtccggattggtccagccgcgtcgccgaagttgtcaggccacgcccctccccgaaggaccccgctgtgattggctgtggctgaggttctgctgccccgacccccttcgggacacagccccggcctccaccaggcactgggagggagctgagaacggcagcggggccaggcgagggttgcagggtgggcgggagctctcgggagaaaagcagaacaccagcggaggcttgtggcagggaacccggagccccgcctgacccttccctcttctttgtctctgacctcacccattttcccctccagccctatgccggggtgttggttttgagagttacagtttgggcggggaaggattggccaagcctgtctggatcctgggacctcagagaaatcagaatccaaaggaattggggcgacctgtggaaaagtagcccagttggttgtcctgacaatccagcagggtttcgaaaggactctccatcatacttgggaggactcccccactgagtaacgctaagagaaaagaaacagggc

SEQ ID NO: 35034 - DNA, 966 bp, Homo sapiens; identical to SEQ ID NO: 27206
  chr7:140772296-140773262
  binary

SEQ ID NO: 35035 - DNA, 610 bp, Homo sapiens
  chr7:1408460-1409070
  binary
cgggctctcagccaaccagctgaaccccgggctgcgctctccccgcccctgcctggcgagtgcagattcccgcctattttccgacacccgcctgcagaggagtcgggcgccagatgggatcgaacccagcaaggtgagaaatccgggcggggtggcagatggggaggccttccccggggaactccaggagaggggaggacagcgagggccccgggcgcggcctctcgtgtgcccccagccgcggggcgcaggcccgcagccccccaggggcgccgcagctgtcactccgcggtgagtggcgccatccggatcggagatgggcgcggctgcatcgccccagggtaggaagctcatcttcggagaccgcgcggctccgagcgaccaggaacgccccctgcgggctgcgggcgggagcgcggaccccggcccatcccggaccccgcccaccgcggacctcacccatcctaggccccgcccatcccagacaccggcccatccctgaccccgcccgtccctagccccgcccaccaccgaccccacccctccagaccacgcctatcccaggccctgcccaccgcggaccccgcccatcctgcaccccgcccaccac

SEQ ID NO: 35036 - DNA, 256 bp, Homo sapiens; identical to SEQ ID NO: 28162
  chr7:149917125-149917381
  hyper

SEQ ID NO: 35037 - DNA, 138 bp, Homo sapiens; identical to SEQ ID NO: 25848
  chr7:150753916-150754054
  hypo

SEQ ID NO: 35038 - DNA, 1956 bp, Homo sapiens; identical to SEQ ID NO: 24597
  chr7:155164423-155166379
  hyper

SEQ ID NO: 35039 - DNA, 1470 bp, Homo sapiens; identical to SEQ ID NO: 32148
  chr7:155166425-155167895
  binary

SEQ ID NO: 35040 - DNA, 943 bp, Homo sapiens; identical to SEQ ID NO: 29375
  chr7:155259210-155260153
  binary

SEQ ID NO: 35041 - DNA, 123 bp, Homo sapiens; identical to SEQ ID NO: 27217
  chr7:155299564-155299687
  hyper

SEQ ID NO: 35042 - DNA, 320 bp, Homo sapiens
  chr7:155301671-155301991
  hyper
cgaatctcttgaaagttctctccttcgtcacagggtcttcctcaagcttgtagtcgttcattcgctcacagactttctccaaaagatccgttaggaacgcctccgactgagctagggggatctaagaagaaagacagggcgaggaaacttgtcttaatgttaatgttacttcaaagaccttccggcgagtccacatggaaacgccacactctccctgaatgcaaacgtgtgccacttccctagcacgggcccagaagacggtaccgcagattgttattacaatgtaacaacgacctgctttacatcattacggggctagc

SEQ ID NO: 35043 - DNA, 738 bp, Homo sapiens; identical to SEQ ID NO: 23353
  chr7:155302323-155303061
  hyper

SEQ ID NO: 35044 - DNA, 777 bp, Homo sapiens; identical to SEQ ID NO: 23633
  chr7:155581242-155582019
  hypo

SEQ ID NO: 35045 - DNA, 691 bp, Homo sapiens; identical to SEQ ID NO: 25854
  chr7:156409159-156409850
  hyper

SEQ ID NO: 35046 - DNA, 1169 bp, Homo sapiens; identical to SEQ ID NO: 32152
  chr7:156794976-156796145
  hyper

SEQ ID NO: 35047 - DNA, 1834 bp, Homo sapiens; identical to SEQ ID NO: 32153
  chr7:156796431-156798265
  hyper

SEQ ID NO: 35048 - DNA, 1331 bp, Homo sapiens; identical to SEQ ID NO: 32154
  chr7:156798275-156799606
  hyper

SEQ ID NO: 35049 - DNA, 782 bp, Homo sapiens
  chr7:156808873-156809655
  hyper
cgcccaggcactcctttagaacccacctgttccccccacccaccctagtgggaggaggagagggttacactgacagataccggcagctctgcaacccgggaacaacgcagacaacatacaactcgacagagtcacagaaggtggcgtccatcgcgcctggatggtgactactgccctgcgggctgctgggtgggtgaaacacacagggaagaagcacaaatacacacacagatgtggctcagggacatttgaatgcttcagtgtgtgaattttttagcgcattctgactcgaaattatggctgaatagtggcgcactaatgtccaagtccatgttcgataatggcaggaagtctgcactaattggtctatttagtagttgctgaggtggcaaaagctgcagctgctggtggctgaaagagagagagagagagagagacctcctcttaggccacttcccagagctgtggcagtgggggagggggaattccccaggatggtgtttgtggtcaagttcacctctggcaaccctgcctaagctcttctcacaggtgcacgcattcaagtcctgaagagccctccccgcccccaacagtgttcatgtcccgggctgggggcccgcctgggaggggctctatatgccggtgggacctggctgctttgcctcgcattctccccactcttccccttcccagggcagcttttctccccgcaccccatctctctcccctttgctttctaactgggttgggaagctaatctgccaagagcccgctgcttagcc

SEQ ID NO: 35050 - DNA, 1850 bp, Homo sapiens
  chr7:156810052-156811902
  hyper
cgccctctgcctcaccgaggggcaaaccggctgaggacccaggcacgaagagtgtcaccagctctgaccacaagccccgtagaccagggctgcgtccataatcggggttgatggcattagttattatattataacctccttgttgcgtgattctagtaatttattttcccacttggcctttgactgggctgggctcctcccagtggaacaacagggggtgtcgtgtttgcagcagaaacgcacactgggatcctttcttgcaacagctgggccggctgggtcttttctcttgtcttctgtacacaggcccctctccgctgtttctgcagagaccgaggtgggagggagaaagaccctccagccctctgctcccaccctccccgcagtctccggggccctgtgctgcaggcaagataatttggctaatgaactcgttaaagggcccctggtgacccgccccggcttcccctcggcccatctgggaaattccattgaaaggctggagaaggttcctcagccccgccgccttctgtcgctgctagaggcgcgaacccggtgactctgggccccttacattaaaataattacccggcggaacaggtggcccactcccggcgcctgggtgcatctgggcccccggagccgcagcccgggaggaggggagcggcacgcccaggggagggaaggtcaggcccgctgagccgggagccgggagggtagagaggggctttcctagggacagacggtcccggggcacccaggcctccgcggccgagcgggctgaggcctaagcagggaggccgtcgccttcaggcacaggtaagcgcagcccgcgcaccgcttgggacgcacctggccacctgcgctgccacccaagcttggggtatgcgggtgcccgagcagaaccccgaactcgcaccgggctccgaggttggagcaactcctaacactgggctcggagctaggggcttgctggaggggcgcttgccgcgccggccctcggggctcacagccgggcacgccggactgcggcgagcgcgtgggcgagcgtgtcaggagcgtgcgccctgggtgcgcgcgtgcgagagcgcacgtgtagggtggcttccagtcctcccttcccgcctgagaagcgtccacgcggagttccaggccgggcgctggggaaggaggtcccggggacgctgctgaaaagagagcggccagcccaggcgcggggccaagcctattgccaaaaacatattaccctgcgacattctgtaaatgagataatgatccataaacccggatgatagatgtggcgtgcctgcgatgtcttctctaaatgagctgctcgcatcgactgctaataatggtgagtttatggaagcgatttcagcgcaaactgcgagagggtcttcttactctaatcagcctgcctgagctaatggacgagggggtcaggctgagagttattgacacgcccgtgcccttaacctgtttcccaataaagctgattagtttttgtcaattcatcagctaaccactcttgctggaactgcatcaaagccttatttgctcaggggaaatcaacaagtcacagatcagctccattaaggggcccggcccggcaaggacagtcctggagccgagggacgccccgacggacctcgggcctcccccgaggttcgcagaggggctgacagcgtggccccccttaactccgagcaccacgacccggatgcacataactgtgtccggaaacttctctttctctgcaggtggagcagcgcctgtgcggctccgcgctatggctccaaggctccggccctggcgtctgggctcggtcggggacagtttccacgcgaggc

SEQ ID NO: 35051 - DNA, 1385 bp, Homo sapiens
  chr7:156812803-156814188
  binary
cgcggggggtatgctttattgacaatttcattttccaattagtaattttgttgtaatatatctgcgaaccggggactcccgggcagggaggcaggattctcccggctggggcggtctgagtagctgggtctgagcctcgggctgagaagagtaaattctgcagaaagggccgcgtccgatcggcgcaaacgttcggttcgtagcaggagcttctccaggcggccaccgaacccaggtccaggactcggcactcctggagccctcctccccacgcagaccgcgggggctgatttaatagaatgtcgatagaatcattcgatgccttttagcttgtgatctttataaatgtccctctattaaattagaaaatgattctcttctcgtttaattgtattctttcgtttcttatttccaattaattagtcctatcgacgttgcaatattttaagtgacttgagtccgtttccagttagaatatatgggtcagcacatgcaattttatacccgacaggactatataatgtgggttttaactactcgttcctcatctgtcttaaacatctggccaggatgcgccacccggcctcctcgcagatccttcctggggcaggtgggcaccacgcgggaccctcccgggggctcccgcaggcgcctcttgctgcccggggccaagggtcgggcagcccatagcgtccggcctgggcctttacttggaattctttctgttgaagacttggtcccagcccagtggttctgggataagaagaccccgcagaggggcccagcgccgcgttcctacgagacacctgagctgcactgtgtttccacgggctaggagagcggtgactccccagcctccccgtaggcctcgctcgcaccgcagagggatggctggcccgtgccgctccgcggttcccctccccgggcggatccgcgcagggagagcccggcgggcctgggcttgggcctgggcctggttcgggggtgcaggccaagaggggcgccaggccgggctcccctacccgagcacgtcagttccaccccctcccttcttgctgccctacaaaactttaaaatcactttttaaaagaccgtgtctcctctcggcagcccccctcgacctcttcgcaggcgcctgagcagccccgcaccgaggggcgcacctttgcttttgcgagctgcgcggcgcggacacccgggctgcgctcagcccccacccccacaggcttcccagccgtctgcccgagttcggcttcaacgggagcggggctccacttttccttaattgacgaagtcacggattcctcccgggcggatttatggggctgcgcgttgtgccggcgcccgctgcttcgcatctgcgcgcccgcccggtgccgggcccc

SEQ ID NO: 35052 - DNA, 884 bp, Homo sapiens
  chr7:156814194-156815078
  binary
cgcctcagccccaagctcggcccgcgggcccggccacaggtgccccggcggccccgcctggcccgagggaagagggcagctgggaggggccccggccgccgcccgttcctgctgcgggtgagcaccaggtccccgcgggccttgcgcggtgccccccagctcagcgtggcgctcggcggcccaaggtctggggcgtggagggcgtcagcacctggccgactcgccggttcccataggctgcctcgccccgcgttttcctagcgggggatggcggctccccgtgtccgcatcgctgccgggccctgccaccccaaccccggccgcagtggctggaagccgtggccttttccgggctccgagagccggcggggcggttttcctccgggtttcctcccgccggggtcttgggagcccctcagcctcgccctccctgcagggagaaacctgtctactgcgtgaatttctaagcagctgatccttcaggcccaagactcctagagtggaaagggttccccggaatagtaagcgcgccgtcaccttgggtttcttcttcccagagcaaggagacccccgttttcctcatgacccgcgtcctaaaaggtggggaggtgagattcactgggaatcgtgaacctgcccccggcttctcccggggcagcctcccccggtcaggggaggagggagcccttcccttcaaccccgaaaggttccttcctggtccctagctttgctctttgcaggcagggatggggctggcacgccttgcggagaattttaccgttttaaatatggacctagaggccaggtcggaaaggggaaagaagctgcgccttgccgagggtcctgtggccggagcagggcctgactcctgactcccatccagc

SEQ ID NO: 35053 - DNA, 359 bp, Homo sapiens
  chr7:156870979-156871338
  hyper
cgggaagcgaacccacgaggtgcagagagcagagggctcccctaaatccgaagctatcccctgccctcccttcctcgcgtggcttcccgggcgcgctctgcctgtctgcggggactccaggcgtccttgtgttttcagctcccggctcttgcccgcgcgtgtggcccggctgggcgctcgggcttcctcctcccaggcccgcggcggcttcccgtcctcgcaggcgcgatcttaccccggccggacagttaggacgcggttgtgctgacctgaggcttggccctgactcccgtgcacagcgcccgagctccagaggcgggggatctgaacactggcctgtgaaccccgagaaaaccccc

SEQ ID NO: 35054 - DNA, 1200 bp, Homo sapiens; identical to SEQ ID NO: 24608
  chr7:157262486-157263686
  hypo

SEQ ID NO: 35055 - DNA, 89 bp, Homo sapiens; identical to SEQ ID NO: 27222
  chr7:157346655-157346744
  hypo

SEQ ID NO: 35056 - DNA, 531 bp, Homo sapiens; identical to SEQ ID NO: 30535
  chr7:157347322-157347853
  hypo

SEQ ID NO: 35057 - DNA, 409 bp, Homo sapiens
  chr7:157361395-157361804
  hyper
cggcacgcagaggcaggtaacaaacgaccagcctcagaagcagatgtgcttgctgcaaaccaccttcctacggcccagcagaggcacaacaagcagcgaattttttccagggcctcccgtgaacacggcaccctacgttgccatagcgacgccatcccagctctgagccgcaacaaagcggcagtgtctgtgtctcacctttggccatcttgttgagaaccatgtcgatcaggacgtaggtgccgctccggcctgcaccgtcactgccaacagaaggagagaaatgaaagtgctgccgtccacacggaagcccgacccacaacaaagctagtgacagttcatttccttcctgcttacgggggccggcgagaggaaaggatggcggatgtgagagggggaggaaggacgc

SEQ ID NO: 35058 - DNA, 851 bp, Homo sapiens; identical to SEQ ID NO: 27223
  chr7:157476570-157477421
  binary

SEQ ID NO: 35059 - DNA, 998 bp, Homo sapiens; identical to SEQ ID NO: 30575
  chr7:158936973-158937971
  binary

SEQ ID NO: 35060 - DNA, 1486 bp, Homo sapiens
  chr7:1704756-1706242
  binary
cggccgaaaggcggggggcgacgcgcaacggggagggaagggagggaggggtcggcgaccttaggggagggcgagtctctggggacgcggggccgccaggggcccgacgaccctctcgctccacctccccgcccccaagtgccccgctctccccccgccccgcaaacgcgcgtcctgcgggctgtgctttggccctcgcggacgcgcgcgctcacagagggtctgacttggggtcaacttccacgaggttgccgggcgcctgtgagcacagccgtgtccccacccaggggcccacctcccagcgccaccagggtcccgacccccagaccttcggacgcttctcttccaaaccgaagcctgggagcctctgggtggcctggggcgggggcagggggcgagcggggcgggccaggaggagggggcgaggccgccactcggcttcccacgccgcccccgcggctggctccaacttcccctccggagcccccctccggccaccccccagcccaccgacgtgcgggcagcgaccccgccccccgcccctccggtcgcccccgccgcggcccccgccccctccccatccctccccgcgcgctctcccacatgaaaccttccatcacgctcagaaagaatgtgctacaacctcggcgctgccgcggccgccaccactgcgcccgcgcccgagcccgagtcggagccggagccgccgctcccccgcctgcccggccagccccgggctccgagcgcgcggtccccgccgccgccgccccgcgctcgccccgcgcttgacgcagtgagcgccgcagcctggctcccgccggctccgctgggctccgggtcgcaggccgagtccagccgggcgggctccgggaggggccggcagggcgggagggggaggagggctgtctggagccagcgagcccggaggaggaagaggaggaggaaggaggggaagccgccgccgccgccgccgcgctcggggaaccggggtgcgcgcgctctgctcgcccgcgacagtgcctccagcccggggcccgcaccccggcccaggtaagaaggggcctgaggggcagggggctgtccggggccgggggacccctctgtcgccgctgcgggatcggagggtccccgcccctaggggaggcagggaagaggatgctctctggggggggcggcggggggcagcgcagggtccccagcggctctcgcagcccgggccaccccatccctggtgccctgacctcggcgtccgcgccagggccgagtctccccgcccgcggggctctggatgcggcgctcggggcccgcggctcccgggcgtccccatccacccacccaggttcggaggcgggcgcacccgaagttagcggccgccgagcctgggccggacaaacttccctccccgacgccgcggctggaagggccaggactccggacccctagggctagggaggcgccgcggggaccccgaaactttccggagcgc

SEQ ID NO: 35061 - DNA, 748 bp, Homo sapiens; identical to SEQ ID NO: 24614
  chr7:19147137-19147885
  hyper

SEQ ID NO: 35062 - DNA, 2232 bp, Homo sapiens; identical to SEQ ID NO: 28176
  chr7:19155978-19158210
  binary

SEQ ID NO: 35063 - DNA, 212 bp, Homo sapiens
  chr7:1970797-1971009
  hypo
cgcacggtcacaggagcgagggcgcgtcgtggggtccacgtcaagggtctgctgacaccacgggaacacccccaactcctcaccccacgcacggtcacaggagcgagggcgcgtcgtggggtccacgtcaagggtctgctgacactgcgggcacacccttgctcctcatctggagaatggggaggggacagccctctctggcagcaagcggc

SEQ ID NO: 35064 - DNA, 307 bp, Homo sapiens; identical to SEQ ID NO: 17053
  chr7:1997037-1997344
  hypo

SEQ ID NO: 35065 - DNA, 1969 bp, Homo sapiens
  chr7:20823549-20825518
  hyper
cgttccctctaaaagttacgcccttcacaacctggggggtggaggaggggaggacaaggaagagagaacgagaaataaaggcccgacgaggcgcgggttccggctgcaacgggttcaggcagcgttacccgtggaaagggaaagccagggcccgggacagcgatgcgtgttacttacttgtccatatcccctttacaaagttaagtcacagaaggaagaaggaagaggggcagaaacagaaagagacagagagcgagtcggatgcaatagggaaaggctggagttgaagtccggacagacagggcccaagaggacttggtgggaggaggtcggggagaggggcgggcgcagggtgggcgtcactctaggccgttgcggtgcccgggctcggggggctgcagcagctctggggagtggcagggcgggctgcccgcggcgctgtgctcgctgtcggtgtcgctgcccttcttgccgccgctgcccgagcccgccgagccgccgccgccgccgccgccactgtgcgtcttcacgtgcttgctgaggtggtcgctgcgcatgaagcgcttgttgcaaactggacaggcgaagcgcttctcgccggtgtgggtccgcaggtgccgctgcagctcgtcggagcgcgtgaagcgcttgccgcagaaaagccagttgcacacgaagggccgctcgcccgtgtgccagcgcaggtgcgccttgaggtgcgaagtcttgccgtacaccttgccgcagcccgggatgtggcagctgtgcaggcccttgcgccgcaagctcgccccggcagggcccagccgctctgcctcctggcagttggggcagtcgcaggtggcgcggccggagtagcggcgagctgaggagcgcggggagccccccagcggcgccgaaggcccagcgctcaacatggagccccccgcgccggccagcggcgacggggccgagtccgggtaggagccgggtagcactggcttgaagccgtccatgaggtgctgcccggcggggctgagcaggtgcgaggaggcgccgctgctgaaggccgagtgactcaggcccgagtaatccgagttgtagcctccgagcggcgagtgcagcgaggtttggagccccccggcggcagggtgcagcgagccgggcagcgcagccgcgctgttcgggttctgcacgtcgatccagccggcccccacgtcccaccagctggaggcgccggccgagcccacctcgcccgcagcacccaggcccgggtgcgagggcttaaaccacgactcgtacgggtgcgccatgcccacccgcgggtagatgccctgcagcccgtccacagaggtgtgcaccttggagatgaacaccggctggtgggagccgtcctgcgagtgcgcggaggagccgccgccgccgcccccgccgccgccgccgctgcccccggaaactccgggggcctggaaaacagagtagtcgttggcgaagggcgagctggaggcggcggctgcggcggcggcggcggcggctgcggcgctgctggaggtgagggagaaggcgctggagccaggcgagccgccgcagctgaacgagtcggacaccagggccgcggcagccgcggctgctgccgcggccgccgcagccgccgaggacgagccgccgttcctggaggccccggacacgccgaagcttgagagactggaacccactacgttgcagctggcggaagaagaggacgaggagcgtttccaggggtggaagcctttgccgaaggaagaagagctgtccgagagggaggagggagacgggctggggctgcctatcttattacaggtagcggcaagcatggccagaggagtcgatcccaacctcggttcttcctgcgaggaggagaggagaaggagtgggggaggggaggtgggcaaagggccggtgggggaggaaaggaagaaatgtgcatcagtccttcggtagcctccaaagc

SEQ ID NO: 35066 - DNA, 751 bp, Homo sapiens
  chr7:20826098-20826849
  binary
cgaaatcggtgcctgtaaaatgggctggacgcaggtctcccgggcagggagcagcgaggcgctgcgcggtggcttgtctaaatgcccttcgaaccttttcctgcgctgaaaaaaagtgactctgcccccttctccccctttttcttttctccaaactcacttgtatttaaagaaaaaaaaaaaaagctctcaatagagagactgatagcccgtggcctggccggggcgactttaaccccctccaatcggcaataaaaggaaactaattaaaccagcaagagaaaatcctgagactcacccctagaagtgaagttgccatcacacaaaagtgccctcctcctctcagaggatcttttttatattgataaatcagaggcagtgttttttttagaggtgtgcaatacaatgatcagttccgcccattccaccacaattgtagctccctctccggctttgaagtgccgcggaggcgcggccagccaatctgcggcctcgccgggccgcgcggcgcgcgcgccgtgaggtcatcggcgccgccgcctgccgccgtggtggaagggggagtgggagcggagggggcgggggcggctgcgtgtgttacaaagcgcaaagcgcgcgctcgcgtgtatgagtgtgtgtgtaacaatgtaactgtgtgcgagtgtgaccaggcgtaggagaggacagtgcggagactggagggaggggggatgggggtgtgacaccgtaacagtgacagtgtggtaaaggc

SEQ ID NO: 35067 - DNA, 313 bp, Homo sapiens; identical to SEQ ID NO: 23358
  chr7:20827323-20827636
  hyper

SEQ ID NO: 35068 - DNA, 806 bp, Homo sapiens; identical to SEQ ID NO: 32177
  chr7:20830567-20831373
  hyper

SEQ ID NO: 35069 - DNA, 350 bp, Homo sapiens; identical to SEQ ID NO: 33068
  chr7:20836794-20837144
  hyper

SEQ ID NO: 35070 - DNA, 475 bp, Homo sapiens; identical to SEQ ID NO: 17060
  chr7:2264018-2264493
  hypo

SEQ ID NO: 35071 - DNA, 619 bp, Homo sapiens; identical to SEQ ID NO: 33927
  chr7:2264982-2265601
  hypo

SEQ ID NO: 35072 - DNA, 540 bp, Homo sapiens; identical to SEQ ID NO: 30580
  chr7:23287221-23287761
  hyper

SEQ ID NO: 35073 - DNA, 254 bp, Homo sapiens; identical to SEQ ID NO: 17063
  chr7:2477361-2477615
  hypo

SEQ ID NO: 35074 - DNA, 1078 bp, Homo sapiens
  chr7:2566056-2567134
  hypo
cgggccccgccaggactccgagagcacaggaagggacgtgtggctgccgagaggggcgcagtggggtggggcactgttctaaacagggaggccaggcagcactccactgtcagccagggggggtcactcctgccatgagctcaaagctgtttatggcgggttgttttcctgccgtctcttctcttcactgtgatgcgcctactgtgcgtattttgtccacgctggcaatgcagccagccccagctggtccccagtttgggaccttattcctggggtgtgcagggcaggtgtccttccaggtccaagggaggccagggcagggccgttgcctcactcagggctgtgtggccagcctggggcggggcccagggatgtcgggcccctcccggcatcactccgcccgctccccacaggtgacgctgagctacggtatgtttgaaaacaagcggaacgccgtccacgtgaaggggcccttctcggtggaggccgacccatccaggtaaggaaaccccggcccagatgggcttgcgtagggtggcctaggggcgtcagggggcctcgtggagctgcagcagggtctctctaagcggcatgactctacatagaggtgtcccccggagtcctgcttgctcggggtggggccgccagtgttgtgggactgcaaatgggagctcagcacctgcctgccacccacgcagaccagcccctgctctgttcccacaggttccgctccatccactgccacctgtacccggacacaccctggtgtccccgcactgccatcttctagtggccatggctgagacccaatccctgggcgcccctggtatccaaagggcccagggaccctgttgcgctgccctggcctcggcattcgaggctcccctagggccgtgcctgtgcgtgtgcgtgtgcgtgtgtgtgtgtgtgtactgcatgcccacccgggtagcaggctgctgggcagttctgctctgtggaggggcgggcaccagcgccacttatgtgcctctgctccgagggccagtgggctgcagggcctgcttggaggaaggatttgtgtgtcggaggccactcc

SEQ ID NO: 35075 - DNA, 352 bp, Homo sapiens; identical to SEQ ID NO: 25869
  chr7:25896245-25896597
  hyper

SEQ ID NO: 35076 - DNA, 684 bp, Homo sapiens; identical to SEQ ID NO: 25870
  chr7:25896671-25897355
  hyper

SEQ ID NO: 35077 - DNA, 824 bp, Homo sapiens; identical to SEQ ID NO: 27231
  chr7:25901811-25902635
  hyper

SEQ ID NO: 35078 - DNA, 1756 bp, Homo sapiens; identical to SEQ ID NO: 25873
  chr7:27135176-27136932
  binary

SEQ ID NO: 35079 - DNA, 1116 bp, Homo sapiens; identical to SEQ ID NO: 29388
  chr7:27190160-27191276
  hyper

SEQ ID NO: 35080 - DNA, 1383 bp, Homo sapiens; identical to SEQ ID NO: 29389
  chr7:27195477-27196860
  hyper

SEQ ID NO: 35081 - DNA, 1831 bp, Homo sapiens
  chr7:27204281-27206112
  hyper
cgcctcctctcccgtagccctgcgggccgctcttcactgctctccagacttggggccctatctgaggcgtcccaaacaccaacttctggctcctggccccaactcgagaggcttccagcgaggacgaaggcaggctcgagagaaacctggcgggccagcagatccgggaggccggcgtggaggcggcggcggatttgaagggaggagacacttactgggatcgatggggggcttgtctccgccgctctcattctcagcattgttttcagagaaggcgccttcgctgggttgtttttctctatcaactggaggagaaccacaagcatagtcagtcagggacaaagtgtgagtgtcaagcgtgggacagtcaccccttctggccgacagcggttcaggtttaatgccataaggccggctggagggcaagcccgcgaaggagagcgcaccgggcgtgggctccagccaggagcgcatgtacctgccgtccggcgccgccgccgccacgggcgcctgggggtgcacgtaggggtggtggtgatggtggtggtacaccgcagcgggtacagcgttggcgcccgccgcgtgcactgggttccacgaggcgccaaacaccgtcgccttggactggaagctgcacgggctgaagtcggggtgctcggccagcgtcgccgcctgccggggaggctggcccagggtccccggcgcatagcggccaacgctcagctcatccgcggcgtcggcgcccagcaggaacgagtccacgtagtagttgcccagggccccagtggtggccatcaccgtgcccagcgcctggcccgcccggcccgacccacggaaattatgaaactgcagatttcatgtaacaacttggtggcaccgggggggaagtacagtcacctaataagttgccggcgcccgcgcccccattggccgtgcgcgtcacgtgcccgtccagcagaacaataacgcgtaaatcactccgcacgctattaatggtccgatgttttgcagtcataatttttatagcaaaagccatatgtttttatgtaaagggatcgtgccgctctacgatggggtttgttttaattgtggccaacgacgattaaaagatcaaatctagccttgtctctgtactctcccgtctccccccccatacacacacttcttaagcggactattttatatcacaattaatcacgccatcaagaaggcgcgggtcccgcgtgcgagtgcggccagcggagcccctcacataaaattagacaataattgaagccataaaaaagcagccaaatcgcattgtcgctctactgtatttaaatctatatttatgatatttcataaggagttattgtttcagaagccacacaggctggcgggaagtcggaaacgaccaacagattcgtttgcctcgccgtggctcccagctgtaaaaatttacgaggacttggaaaggttagactgttgtgtttggttggcgagctccctgtaaataatccctgcggtccccgggagaggcgagtttacccgcggccgccctcgaaaagtcaaattcaacgcaggatccgtcccaaacggagccgccgccggccctaccagggcactccaggcagggaccggccgctcagggagtaccgcgggtgtaggtccccacagctacccgcctggagcgaggggcgcccgggcaacccttaaattcgcctttgctacgaggaccccacggaggagctggccaggagggagcggccagccgccaccagggcgaaggttttgagggcctggttggttgtgcggcgcgctcggtccccggccctcgaccccacgcacacgc

SEQ ID NO: 35082 - DNA, 2039 bp, Homo sapiens; identical to SEQ ID NO: 30588
  chr7:27212356-27214395
  binary

SEQ ID NO: 35083 - DNA, 2286 bp, Homo sapiens
  chr7:27223010-27225296
  binary
cgcctgcggacatttcaccttccagcacctgggctgccccttcccaaggcagtaaaggcggctccagtcccagtctttcccggctgcggccaagactgggcagtccttaacatctggggcggctgccgggtctttgtcagcctgagtcctggccaccagcttctgcctccccggccagccttccggctccgccgaggtggggaggtggcggcggaagccccctaccctaggccttcgctgagcaccacggccacacggccatcctgcacacggcagagcagcggctctatcttaggtagggtgaagggaaagggggcttcccgaagctgcgggcaggctctacttgctccccctttaaaaaaaaaaaaaaaaaaaaaaaaaagacccacaagacaaaaaaaaaatcgcttttgacagattgaataacaattgtgaataacatgcagttgggcagaaggaggcacgtaattgccaccacgccagaggaaaatggcttcctttggacaaaaaggccaactttgggttaatttgttcttttaatatattgctagagctaagcgggctactttatctgttaaacgcgctcctagcgccgtcgttaaacagcgacgcctttgaatcccggccgggactggagtcccggcgcaacacatggcttttataaaaatctccggattacctcgctatcaaaagctcccgaagcccttgcagggggaatttacaggcgcccacctccggctccccagcctggagctggccccgagcggggtcgagctgctgggcttgggagctgagaagggaaaaaagggaaaaggggagttgtttttttttgcaggcatgccttggccggtgggtatttcacggccaatttcagcactcgccacgtgatcccgccttttataacaaagttttgttgggggaaacctaaaggcccttcataaaccttatatgcttataaaacagcatataaaaatttaacagcggtgctgcgctagatttccaactcccctttcataaagcgcagggcgctgcctttatacgtactggagccgccggccttgtcctcagtgtggccggaagacgactcggggctgctgctgctctcggggcgccgccgccgctctttctcctctgctgccgccgccgtctcccggcagccgccgccgccgccgctgtccgaacttgaagttgccggcgcgcccgttgcagccgccgccgccgccgcggaggtcgccgtggccgccgggggccccttctcggcgctcttgtccccggggtagtcggaggaggcgaggttttccggggtgccgtaggctgtctcgaaaaactggtcgaaagcctgtggcaggacgccgttcctgcccacggtgctatagaaattggacgagactgcgggggtggggtggtggtagacgttggccgagctcttggccagcacgtcgccaggcacgccggccgcgctgggcgcctgcaggcagtctctgtgcacgagctcctccgcggagtagcagtgggccagattgccgcgggggtgccatttagtggcgggctcaatggcgtactctctgaaggtcacttcgcgcacgggttggacctggggcaggttggaggagtaggagtatgtcattgggcgcgaagacggggtctggggcagaaaagaagggaggctggagaaatctggacccgagacgtagtaagtacaacttggcaaatacatgttagaggagcagggaccacgctcatcaaaatccattattgggctaccttgggctctccgcagtagccgagcttaacatgattctccactgcagctgcctctttgaagcggatccgtgaagtagaaatttggagacgtaagctgacgtggaaatctatccccatccttagcagggaggtgctggtcatgtgacccgatgttgaaattgacaagctgctagctagtccgggccttttccccccccctttccttttttttttttcctcctctcccctccctcccggcttcctttctttgtagccacctcaggggaagcaacagatcgtcactcggtgttctcaccgaaagcacgtaatcgccggtgtaactcatgttggctggggggcctcccggcgcgcgcggagaggctggggtgcgcccccatgcagcatgcttgtgctcaattgcagggtcctcgttctcgagtgtgcagagggcggtgagagctcaactctcgtccccacctcccacccgcagctccccgggtgggtgagggatgccctggactggggatagccaggtgggagtcc

SEQ ID NO: 35084 - DNA, 1845 bp, Homo sapiens
  chr7:27238522-27240367
  hyper
cggggcgcagagggagagggaagctagccgaggtctccacaagccacccctcacccagggagagccagggaccagctcaactcgaggcagtgcaggcagacccagccagccatgctcgggctcccaggggtgcagagccgctagggcagaccaggaagagaacagaaacgcacccgggatcgcccgggtgcgagcggagaagaagctggagcagagccggaagaccagggctgggaataggtcgtcatttaccgggcagagtggacttccagaggtggggaggctgcgcctgctctttggggcagtacatttggccgttccagccgttgggcagcgcccagggctggtagctttccatgggaagacccaagggttcgtggcgcgactcgccggggcccccgaggcccggcaccactggcatatccaggtagccaggcatgggctgatggtggtggtaaggcccggctgcgtagccctggtggtagaaggcgaactccttagcgcgggagctgaactcctcggcagctgggccggcggtatccatgtacttgtccgcgaaggcggcggcggcggcggccgaggcgggctgcgcgcacgacttgatggcgttggggtgcgggcccatgcgggcgcacgggtagtagccgctgccgaagtagccatagggcagcgccgcgggccccgacgagctctgcgccgctgccgagcaggggctgcattgcttggcggcctctgcgcccgccgggcccgccgggccgggacctcccgaggacgacgcggcggcggcggcggcggctgcagcggcagccgcggcagcagcggcggcagccgacgggggcgcctccccgggggcgctgctgtaggcggacgcggctcctggcgccaagggcgccgggtgcgccatcaggttgcggcactggttggccgcggccgccgccgcagccgcggccgccgccgccaccgagaagttgccccctgccgccgcagccgccgggtgggggaagcccccgcccccggccccggcagccgccgccgctgcagccgctgctgcagccgccgccgccccttccatgttcttgttgagctcgtcggccaccaggccgccgccgttgtcgtagagaaacatgacggtgggctcgatccagcgggggtggaggagcacggaggctgtcatagcccgagccgcatggagaagaccccagtggcgctgttttaaaaagcccccaagaagtgaagagcgcgcggcgcggggccggggcccgagcgaggggggcggatcgcgccccgcggggtcgcgccaggcggccgcccattggcccggcccccccgctccgcccacggcgtatgcaaagcgggcggctccgactccagctctgcacggtgcacccgtcgtccccgccgcggcccgcgccgtccccagcgccagccgcgcggccgcgcaccattcacccgggggagaggcggaggaacgtgcgggtggggcagggaaggaaggcggccccatctccgccccccttcccttcctttatcccagtggggcccagacccgcgcaaccaggcggggaggggaggtgggcgcgcgattgggttgcgatctggagcagtggggacaggtcaggtaattctgccggcggtcagggatgggagagtggggaggacgggaccagcctagctcagaatgggtgtttcttggagcctctgggactgttttctttccaggaaccggcgcgtatttctgcagtgagaccacaggacggacatcggcgccttcggcttcgatggagttgcgattttgctctttccagggaaacagtggcagggtgtttgctgcttatcggttcctgc

SEQ ID NO: 35085 - DNA, 845 bp, Homo sapiens; identical to SEQ ID NO: 30591
  chr7:27244536-27245381
  hyper

SEQ ID NO: 35086 - DNA, 1804 bp, Homo sapiens
  chr7:27281871-27283675
  hyper
cgtagcttgtaaaaagacttttcagccagtttgaggttagctgccaggggcagacagttgtaataatgccgacagaattgaggcttgtaagccgggcttcacacttctaaaatgcagttatggattctttcatcggtgttagatcaaggcaccaagttaagaaaacaaaagtcaaaacaacaataaaagaaaaaatcaaaagcttatttaattaccgagtcccgctgcccctgcggaactcgccgcgcgcgttaagctctcttttctttctgcggaattccatttgcatcccctctgcctgggtgtctccctctctcagtgtgtgtgtctctctgtctgttttcacactctcctccccaatcgagcgaggcccacacctggcgcatcactgccgagccattagctgcgggtttcctttcatcttcgctgtggcagacgtttctatttatccacttgcgctcgccgagtggcgtcaccagcggtactgtaatgacgattgcagcaggaggatgacagcttagaaagaagagggcaatggggcttcctcccagaggcggtgcggcacagaggagcgctcgcttcacaaggtgaccctagctcccaccgccaccgccgcggtcgcggtccagaccgcgctccagcagctccgcgccctcccaggcacccggcctttctttctccctcttgcaaccaagatccgtccggccgctggagacccagggagccggggttaggaactcacttggggctttcccctcccccaccggagagccccgggatggagagccgaaaggacatggttgtgtttctggatgggggtcagcttggcactctggttggcaagagagtctcaaatttgtccgaagccgtgggcagcccgctgccggagccgcccgagaaaatggtgccccgtggttgcctgagccctcgggccgtccctccggccacccgggagcgcggcgggggaggcccggaggaggagccggtagatggactcgcaggcagcgcggcggggccgggcgccgagccccaggtagctggggcggccatgctcggcccaggacccccggccccctcagtcgacagcctctccggacaggggcaacccagtagctcggacaccgagtcggatttctatgaagaaatcgaggtgagctgcaccccggactgcgccaccgggaacgccgagtaccagcacagcaaaggtagccaccgtgcccctccgctccccgggcctcccactgcgcccacccttcacttcggcgcaggccaggaggaagacactcccttcccctagggcaggatggctggggggacccacctgagcaactctctctgctatctgcgttctggcgggggtctcctactgtgttctggcattggcgggactgagggtgacagcagtgccttgagtgcggggtgctgagggggcggatgcaagtcctggacttgggggattcgaagctcaccccaagcacccagtgtttcaactgctcggggaatgcttcaattgctcggggaagacactttccccaggcgagggcaagatcaaacgccgatccgggcagtttgtggctggcagggtgtaagaggcatggaggcgcggaagccaggagtccataaaggaccgtaaaattgcggcccacttgggcagcccgggtgctgcagccctccgaccagtttgcacgtcggtcagaggtccaaattaccttgtcacttcccgggcttcgcggcgccaggtcggaaatggtcccaatggtctaattgcctttggtctccggttgcatttgaaaaggcagagatc

SEQ ID NO: 35087 - DNA, 125 bp, Homo sapiens; identical to SEQ ID NO: 24631
  chr7:27686735-27686860
  hypo

SEQ ID NO: 35088 - DNA, 208 bp, Homo sapiens; identical to SEQ ID NO: 25883
  chr7:30603338-30603546
  hypo

SEQ ID NO: 35089 - DNA, 986 bp, Homo sapiens
  chr7:35296740-35297726
  hyper
cgtttaaactttggcgcctaagaatgtaaaattttgttatacatctgagtttgtttatatggaatttgattatatggaagactggaagatgtctccttatatacaccactctttcaaattctcatttgtagctcccggaactcagaagacagtcgacccccaaaactgtccaggaagtaatcggtttccggcttttggacaatggtccctcgcttaacgaatgctaacgaatgctcccttagctgggagctgcagggaccggtcccggcaggtctaaccaaccgtccgcaggcgccgtggtcgagagcagagccgagacggcggggcagggtgccaagcggagggcacagcctggcagccaccgttggcggcaggagagaatgggagaagggagacccgcttctcagcacaagggcatctgtctactcccgaacatggccggagattcctgtccacagcctccctccagctctttctggtagacactttaaaagcgacattaacgggcttcggtgcctttggattcctaaattaggtttacggaaaaggaaagacttcccaagaacagtgagaagaggaactgcagcccctccaaggccgctgcggcgcgttcccggggcgcgccgagagcagcgcgcggctccgtgccccgtggggagcgcgcggcgcggccttggatttcaccgcgagtcgggagggcgggtctgagccttgcctcccaggatccttccgacgaacaccccgcgggttttagtttatcgagccaaagtggtcccggagaagcgctccctcgcagccaagctgcaagaagtggccgggaacctacaggcctcgggccgacccaggaagcctccgcaccagaaagctcgaggagcccttacccaagtcttgctcgaagggcaaagcaaagagccagcacccctgagtgtcactgaagttcctggatggggtgtgagtgcgcgcgttccgtccgagacctcagtctc

SEQ ID NO: 35090 - DNA, 1809 bp, Homo sapiens; identical to SEQ ID NO: 22945
  chr7:37487365-37489174
  binary

SEQ ID NO: 35091 - DNA, 929 bp, Homo sapiens; identical to SEQ ID NO: 24642
  chr7:409502-410431
  hypo

SEQ ID NO: 35092 - DNA, 1775 bp, Homo sapiens
  chr7:45613422-45615197
  binary
cgcccacagggtctccgcgaccctagagcttagggaagaattgccgaggggcggggggtccctcatgcgcatggaagggacgtacgccccaggcctccaccttcctcctgaccccggggattcttggacgtcgattctccgtctcgtaggggcgagggccctgggttcgcagtcagacgcgggcccctctcaaatctagtggcctggttttattgagtgggggaaggcacatattttccaagattaactgccccgcaacagggaatttcgcaggatttcagtattttcgactccccaggtgacgccaagagggtgggttccactgtgcacggtggggaaactgaggctcggaggggacaaggaaggtactcgaggtcacgcggctcctccggcgggcgggaacgcaggacgcggagttggggcgcgggctgtgcgcgcccaggttcgcggctcccggggctcggctgtcgcagcgcggtcgccgccgaggaccacggtcggggcgcgggcgggctccagtgcgcaggcgcggcgggcgggaggggacgcgctccgggcgcgcgcgcggggcagccggcgccccaactccgcccgccccgcgccccgcgccccggcgcctcgccgcccgccgcccgcccgccccggcgccgccgcccgcgccccggcgccccgggccggcgaggggcgcgcccgcggccgcggccgctgcatggcgctgagatggcgggggcgccgcgcggcggaggcggcggcggaggcggcgcgggcgagcccgggggcgccgagcgggcggccgggacaagccgccggcgcgggctccgggcgtgcgacgaggagttcgcttgcccagagctggaggcgctgttccgcggctacacgctgcggctggagcaggcggccacgctgaaggcgctggccgttctcagcctgctggcgggcgcgctggcgctggccgagctgctgggcgcgccggggcccgcgcccggcctggccaagggctcacacccggtgcactgcgtcctcttcctggcgctgctcgtggtaaccaacgtccggtccctgcaggtgccccagctgcagcaggtcggccagctggcgctgctcttcagcctcaccttcgcgctgctctgctgtcctttcgcgctgggcggccccgcccggggttccgccggggccgctggggggccagcgaccgccgaacaaggggtttggcagctccttttggtcaccttcgtgtcctatgccttgctgcccgtgcgcagcctgctggccataggctttgggctcgtggtggctgcgtcgcacttgctggtcacagccaccttggtccccgccaagcgcccacgtctctggaggacggtaagtgcagccgcgcacccctcatctggtctcggacacacttgctgggacgatgctgggaatgcccggagtcgggcgcgctttttcctatgcggcgggtggggacactgaggctccgagtgggggtgtgttcaaggtcactcctacgagttggggacgcagtcggggctggcaccctccggccagggctctcttcagagttacaatccacgaagcgcccctggcgtgaagtgtggagaggggagacaggtgtggagagagaaaggtttggccaaggtcagggagctgatgagcggccagacggcggccagaggggtccgccggtcttttgccgcacccatccccacagagggactgaaagtgggcgaggagagcagacccccagggcaagctccaaggccggctctgcgcgcagc

SEQ ID NO: 35093 - DNA, 769 bp, Homo sapiens
  chr7:49812706-49813475
  binary
cggggagagattggcagagattcagaaagttcgcgcttgagatttttacgtttcttactcgtaaacgtctatttctctgggtttctgaatgcaaagacgagaaagtctcaacagtctgctaaactaacacggccttcgaatcccaatctgaacacagtagctgaaacaagctgtccacaaagaggaaagccagagggggccaattaggaaggaagaaattaaagaaaagagaaaagccaagatgaaaggtccagcgcaaagtgaatgactcgactggagaatggcagccctggcagggtctgcggccggctgcggaggtggggacgcggccgcgcggacgagtgacaggttggtccggcgcagcaaagggagcgggtgcggcggtagggcctctccgggggcagcgcgagggcctcccccggggcagcgcgggccaaggcggggcctccagagcgggggcagcagaggagggagcggaacgggagccgggcggaggcggctgcggcagggggaggcgggaggcgggcgcgctagctcccatgctggcctcggtgccactcgcgcgccggccgcgctccgggcttctcttttccctccgacgcgccacggctgcccagacattccggctgccgggtctggagagctccccgaacccctccgcggagaggagcgaggcggcgccagggtggcccccggggcgcgcttggtctcggagaagcggggacgaggccggaggatgagcgactgagggcgacgcgggcactgacgc

SEQ ID NO: 35094 - DNA, 2266 bp, Homo sapiens
  chr7:49813485-49815751
  binary
cgcgactaccggcagctgacagcgcgatgagcgactccccagagacgccctagcccggtgtgcgcgccaggcggagcgcgcaggtggggctgggctgttagtggtccgccccacgcgggtcgccggccggcccaggatgggcgctggcaacccgggcccgcgcccgccgctgctacccctgcgcccgctgcgagcccggcgtccggcccgcgccctgcgctcatgtatgtaggtttggcgccggtcttcagggctgagggtgcatgctgggtgtccccgcgcggccggacgcgctccagctgggttcagccgctcagctgctccggaggaaccccctcccccgcccaagtttgtgaatatgggcgcttcgcccagtgttgaggtcggcagggaccgggcagggggtcagcagggccgggcacgtccggagccctcagggaggagggctgagggggaggggacagacgcaccggagtgcgcagagtgggggcgttcggggagtgaggcggagagaggctggattgccggtgtcctgcggcgtctcgggctctcccagcccctttgggcggcagaaactttggaatccagaaaggctggccgggatccagcgagtaggagggtctcgcgcccactctgcgccctggggccccagcctcccgcactgcacaccttggtgctgcccgggcgcttctgctccgcagccaggacactacaagactgagcgctgcggccggcgacctggctcccaaggctcggaggggcgggccggcagaggagctgaagccccgggaatccccgacccggccctctggcaaggggccgagggcatcctttcatgcagcggggcttagagagcggggagggggcgtctgctcccgagacgggagtcttttaagaagttgttagaaatgaatcgtggagtcctaggagaagctttgtttaacctccccgcattttcccagcacaaccccctaaagcaaatgaggaagagtttccctcttatcttcctgtacattcgtccgtctctaactccactgctgaattctccatttaataaccttcgggaaatgtggccaggacctagggagggacaccctgggtgcctgaattacgtggttcaaggcagagctttgcaggggggcgcgggcctggctcgctgcgttccctgggctccgcaagccgcccttggccatctccaacactaatcacgactacatcagaaacacgccggccggtgtcgttcttggatttcgcttccaatgtatcgctccacagtttgtgatgtctaagaaccccggccgtgcaccgacgctgggcatgctgcccccgcccccgtcgcccagctcgttaatctagagctatgccggagcccgggtgggggccgcggcgggccggggcgcgcgcgggccgcggggctcagttgtgctgctgttctctccgcagggacggcggctcccggctggcggcggcgcgcccccgggctgtgaatgcgactcgcccctcggccgcgctccccgcccgcccgcccgccgggacgtggtaggggatgcccagctccactgcgatggcagttggcgcgctctccagttccctcctggtcacctgctgcctgatggtggctctgtgcagtccgagcatcccgctggagaagctggcccaggcaccagagcagccgggccaggagaagcgtgagcacgcctctcgggacggcccggggcgggtgaacgagctcgggcgcccggcgagggacgagggcggcagcggccgggactggaagagcaagagcggccgtgggctcgccggccgtgagccgtggagcaagctgaagcaggcctgggtctcccagggcgggggcgccaaggccggggatctgcaggtccggccccgcggggacaccccgcaggcggaagccctggccgcagccgcccaggacgcgattggcccggaactcgcgcccacgcccgagccacccgaggagtacgtgtacccggactaccgtggcaagggctgcgtggacgagagcggcttcgtgtacgcgatcggggagaagttcgcgccgggcccctcggcctgcccgtgcctgtgcaccgaggaggggccgctgtgcgcgcagcccgagtgcccgaggctgcacccgcgctgcatccacgtcgacacgagccagtgctgcccgcagtgcaaggagaggaagaactactgcgagttccggggcaagacctatcagactttggaggagttcgtggtaagatgcgaacgcccgccgggc

SEQ ID NO: 35095 - DNA, 1629 bp, Homo sapiens; identical to SEQ ID NO: 24645
  chr7:50343211-50344840
  binary

SEQ ID NO: 35096 - DNA, 111 bp, Homo sapiens; identical to SEQ ID NO: 30608
  chr7:50441160-50441271
  hypo

SEQ ID NO: 35097 - DNA, 382 bp, Homo sapiens; identical to SEQ ID NO: 25892
  chr7:50560501-50560883
  hypo

SEQ ID NO: 35098 - DNA, 777 bp, Homo sapiens; identical to SEQ ID NO: 28197
  chr7:55145822-55146599
  hypo

SEQ ID NO: 35099 - DNA, 552 bp, Homo sapiens; identical to SEQ ID NO: 24646
  chr7:5647853-5648405
  hypo

SEQ ID NO: 35100 - DNA, 82 bp, Homo sapiens; identical to SEQ ID NO: 32217
  chr7:6124618-6124700
  hypo

SEQ ID NO: 35101 - DNA, 729 bp, Homo sapiens; identical to SEQ ID NO: 27252
  chr7:64974264-64974993
  binary

SEQ ID NO: 35102 - DNA, 170 bp, Homo sapiens; identical to SEQ ID NO: 24650
  chr7:6524924-6525094
  hypo

SEQ ID NO: 35103 - DNA, 802 bp, Homo sapiens; identical to SEQ ID NO: 30617
  chr7:6570393-6571195
  binary

SEQ ID NO: 35104 - DNA, 1308 bp, Homo sapiens; identical to SEQ ID NO: 28201
  chr7:69064053-69065361
  binary

SEQ ID NO: 35105 - DNA, 253 bp, Homo sapiens; identical to SEQ ID NO: 25900
  chr7:7605160-7605413
  hypo

SEQ ID NO: 35106 - DNA, 445 bp, Homo sapiens; identical to SEQ ID NO: 25901
  chr7:7605666-7606111
  binary

SEQ ID NO: 35107 - DNA, 207 bp, Homo sapiens; identical to SEQ ID NO: 30619
  chr7:77324199-77324406
  hypo

SEQ ID NO: 35108 - DNA, 838 bp, Homo sapiens
  chr7:808392-809230
  hypo
cgtcagcgtgcttctttttcccatcccaggagttggacttgacctgtggacatttggctgttttctttttgtttttaagccagaaacactgtcttgtttccagtttaagatgtagagagggtgaaacagtcagaaactgggtcagaagcagcgtggttctcgtggcagggcggcacttggcccaagactcgtgctctggcgggaggctcaagtcaggcgtcccagcagcttcggtgcaacgcctcctgcccggctgcgtggggaggccctccaagacaccagctggtctcaccgcgaggcctgacttcgagccagagcagcgagtacattgcgtctccgtgtggcaagggcaggtgcgggggtctcagtccactaccgagcagcctgctctgatgactggcggcgccagggagaaggctcacatcgcgaggtccccagcaacggctcaaggtgactcacagttgcttggataagccagtggacgctccctctacactggcccggggccagagcgcctccttctgcggccccaacccagtccccaccctgagccttcagctcctgggcctgcaggctgagcctggcaggagacgctgcagggactctcagagctgtccttgccctgtcattcatggagacttacagggaggcggggcggccctactgcagtggggaccccttggggcgtaggatgcacagtgcaggcgcccaagcctcgcgcccaccggagagcagccacggtgcaggagcttggccctgagtgtgggcggggtgagggctgcaacgctgagaagcagatattaaagaagttctttcactgaaacaattgattttggtc

SEQ ID NO: 35109 - DNA, 945 bp, Homo sapiens; identical to SEQ ID NO: 28203
  chr7:834245-835190
  hypo

SEQ ID NO: 35110 - DNA, 1117 bp, Homo sapiens; identical to SEQ ID NO: 23367
  chr7:87229392-87230509
  hyper

SEQ ID NO: 35111 - DNA, 969 bp, Homo sapiens; identical to SEQ ID NO: 22951
  chr7:87256927-87257896
  binary

SEQ ID NO: 35112 - DNA, 484 bp, Homo sapiens
  chr7:87257959-87258443
  binary
cgagccgtcagtccccgggtgcgagtccctgctgtcttccacacccttcctccctccaggctcctttcctacatccttcccgcgcccccacggttgcggaccgagcgagaacccccttaagcaggtgtggggggcgtgcggggtggcacgagacaaaaggggcacgggggtaagcccgccatggcctcccggagcctggggggcctgagcgggatccgcggcggtggcggcggaggcggcaagaaaagcctgagcgcccgcaatgctgcggtggagaggaggaacctgatcaccgtgtgcaggtacggcagcgcagggcgaggggaaccagcctcccgccggggctgagagctctgggcttccgcgcgggtccttgggggtcccgggcatgatgggctgccgcccagtgcccccgcctatgttgcgccagccaaatctgtgagcgcgcagctccttggacaggggcccgggtctggacaccgtc

SEQ ID NO: 35113 - DNA, 1233 bp, Homo sapiens; identical to SEQ ID NO: 28206
  chr7:93519219-93520452
  hyper

SEQ ID NO: 35114 - DNA, 708 bp, Homo sapiens; identical to SEQ ID NO: 28207
  chr7:965802-966510
  hypo

SEQ ID NO: 35115 - DNA, 315 bp, Homo sapiens
  chr7:97869406-97869721
  hypo
cgacactccgtctcaaaaaaaacaaacaaaagaaaaaccctgtgagtaatcggaaatcggctggttttattggacttgccgctgataagatgcaaaagacaagcagtgactagaggatggggaggcgcttggttaatcaagggcttcaggaaattcgcttccgattcttcgaaatgttgcagcctattaggtgatacttgcagttgctgcatttgggtaccagcgtgtgggtggaagaggattttacggcacaaaacgtcctggagattggcaacaatttcagcaacaaacaatgcatggtgctcagctggtgcc

SEQ ID NO: 35116 - DNA, 943 bp, Homo sapiens
  chr7:99155672-99156615
  binary
cgcaactgtcagtttcctccgtctctctcggttctattccaatctgctcatctcccctcccgtccccgctttccccaaggacctactgagatttcgatcccacaacttagtgggtcccatctcacccaggccccgcaatcctcgccttctacttgtcagcgttgtactacactctgagcaggcacccctgtgctactcacggaagcgggaccattaggtcggccattcctcctcaccccacgacacgcacccactgggtcgggccgcctccttgcagggagtctcaaggatgggctggcgtcagggaggggcccagggggcgctttcccaacactggtcgcagtcattgttggtataacggctagagacgcccagtgagttagcatggagggcagtgggaccggaaaaagacgtggaaaagctgcgaaaacgagccttcgaatcatggacgcgcgggcccagctcctcctccgagttcctcatccggggccgtcactcacatccggggccctcactcacatccgggaccctcatccggggctctcacccacatccgggaccctcatgcctgggcggaggagggggggccctcattcgggaccctgcactccgtcgccggaagtgccaccgagaagcgccggcctcggggctgtctacagcggcccgggagaggctgtggtggccccgagcgcgagtgtgtaggtgacaggacagcggccaggcccgcccctcccctcggtgagtacccggaagccgttttggggtcgcagcggggtggcagcttgttttgccttcacgggagtagaaggaggcggcgtccggccgcggccgacggtagttcgcttccccgagagtgcgcggaggcccgggtgcgaggagggcctgtttctcttcagccctggttcattcacctcgcggaccgagggccccgccgtcaggagcc

SEQ ID NO: 35117 - DNA, 211 bp, Homo sapiens
  chr7:99723099-99723310
  hypo
cgctattaaacttttttctttttttctaaaaactagctgggcccaaagtttcaaacaacagccgggcacacatagctagctggtcgatgaggcagcacccagaatggccgctgtcttgttaagctcaagctccagcctgagcaacatagtgaaaccccaattctacacacacacacacacacaaagaagactgcagggctggtggtgcagc

SEQ ID NO: 35118 - DNA, 144 bp, Homo sapiens; identical to SEQ ID NO: 30627
  chr8:101821988-101822132
  hyper

SEQ ID NO: 35119 - DNA, 2446 bp, Homo sapiens
  chr8:104511466-104513912
  binary
cgccccgctcccctcgccctgtccccgccctcgacaccacctgcgttccccactcgctccaacctccctcccccgctatccccacttgtgggcctccagctctctgcccctttcctggcccccatccctgacaccccagggacccttcctccctcctcacgttctccctccttccaggatcccgccccgacacttcggggccctcccgctacgcgcactctttctcctcaggtcctgacacctgggcgccccctccctgtcacccaccttcagctccagccctgactctcgggcgccttgccacccttacgctccccgccccgccccggtccctcgggcgcccccactcgccgcctctacctccctacctgctacacctggcacccctgcccccacccctgctcatactcttcccccgcccccgacacctcgggcgccccctcacacgctcctattctccacacttccgtccccgaaaactcgggcgccctctcccttcacgctcagtctctcctccctccccgcccggccccggacccagcctggagatcgcgctcgggaggggcggctgccgcccgcggggcgcccgcggtgcccgggcctgggcagcgaggaggtgacgccgcccccgcgggatgagcccgggaggcggaggggcggaggaggtgctggcggcggcactgagcggcggcggcgcagggcgcgcgggccttccgcgccgactccatcgacccaaggggcggcggcggtggcggcggctgagcgaccctgggccgggcgcgtgatgaggaggggccggcgccagaccccgctgcacgtcggagctcgcctggatccgggcgttggcagccgaagggccctggccccgggactctccgccgctagcccccgtcatatcttctccgctttcgcttctccactctagccgggggtggggtgggtggggttggggtctccgcgggggtttccggccccgcggcccgctcccgggtgtgcctggaggagttctccctctgtggcgcgcgggagccctgtgatgcgtcagccggcgggacggatgagttgcttctccgggaaaccgtcctcgcttcctcacgaccctctcggctcccgcctgggtgcccctcgggccggcagtactccgcctccgggcgctcgaagcgagttccccgggggcttgttcgcaggcaccccttcccctccgaggcggcgcgcgcgctcccggccctgaccgcggccggacacactcgcgccccggtccgcctgtcgccctcccgcctgctccctccagtcaccccacccttagctgtccccgccaccttactccaccaccctcccccgcctctccgcgcactccgcgtcccggcctccagttcccctttcccttgaaccgctcacttcacagcccttcgcccccgggaagaagaaacatttcccgaagcgcactcctcagccctccttccccacgcgctcgccctcccctccccctgcttttcttgggggaggggggctgtcgccttggattgaaggccattgatttgtatgtatttgtcccagcgctggaggctgccccagccgccgcgccggtgccgccgctgccagtggagttgcctccccgcttccctagggtggttcggctccaccaaacatgtcggctcctgtcgggccccggggccgcctggctcccatcccggcggcctctcagccgcctctgcagcccgagatgcctgacctcagccacctcacggaggaggagaggaaaatcatcctggccgtcatggataggcagaagaaagaagaggagaaggagcagtccgtgctcaagtaaggacctggctccatattcccgcctctctccctgccctccgccccctcgcccactgccctgcggccgcctgcgcgccccagttcgccgccctccctcccgctggcggcgcccaggccacgagggctgcggccagcgccggccgcccgggctgttttaggggtgtctgagagcaggggtgtgtgtcggggagggagggcgccaaggccggctgaggtgagggtggcgagccttaggcggtgtgattttccttggcgcctttccggatttcctcgctggtcatcttggctccggggccccagcgggactggggctgaacccaggctctgtgcgtaccctctcctttcccgccgcgctgaggcagtgactggggcacagaatccaatatggccgtgcacaggtgctccctggacggacccgggcgaaggcgcgctggcaggggatgcggacgccaccctggtcccacgcctccgcggggcggctctaccagcaacgcgggacagagcagggctgcccacagtggctgcgagcagcgggcggcggcgcgggctaggggcctaagctctgtcgcggtcgggtgggtgtgcgtccgccgccatcttccagcccctccccctcggc

SEQ ID NO: 35120 - DNA, 907 bp, Homo sapiens; identical to SEQ ID NO: 23370
  chr8:105235264-105236171
  hyper

SEQ ID NO: 35121 - DNA, 756 bp, Homo sapiens
  chr8:109799189-109799945
  binary
cgatttcctttgcagctccctaatccggggtttccattctcagtggagaatggataatcccaggggaccagctaaagactcttttcttccgtcctctccctctttttcctctgatctgcttaaaagcccagttaacgacattgcaccttaaagcgaggggacacgcactttccctcgtccatctgtcatcaattaaaagcattaatatttgctttaaactgacacaggcaaggctgatctcggggaggcgacctctggatgcgccctgtgcgagcaaagccgggagagcgagccccaagcacctggcagcggtgcccccagcaggcgccgaggaatccggctatccatttctggtgaactctgcgcccactgaggcattcgaggtacggatgtgtccgcctagtactcggagacgaaggagagagagcggggatatgcgctccagctctgctaggctccagggctctcacccttgcattcaaagcctccaccccatcccactccccgccactcaccttctgcttcggccacccggtgcggctccagcaccgcgcgctctcccggcacggttcccggagaaagtcccccaatcaccagctacggcacttgtagcctctgcacgccgctcggctccgccgggtgggcagcgcccgccacggcgggcggggtggggcggggcggggcgctcccggagcatcccgggagttgtaggccaggggcggtccctgcatccctcctgtctctgtctcctcccac

SEQ ID NO: 35122 - DNA, 1283 bp, Homo sapiens; identical to SEQ ID NO: 23371
  chr8:110986113-110987396
  hyper

SEQ ID NO: 35123 - DNA, 846 bp, Homo sapiens
  chr8:11540276-11541122
  hyper
cgtagtagtccccgtttgtgcaaaaacacctcttggccgtggcgatgtggggagggagtgtggtccaatagtccttctcacttctcagaggttgacacagaatctaacagttaccctcttagaactactccggagaattcggtaggtagtagctagtttccacaccggggacctgctttgttaaatgctatgggtgtggggacaagatactgggttcagagaaagttctgggaagagtcttgaggtggaaacagcctcggtgcgcgggggtttctcgacagctctctggtgtctcttaccccctaggttttcccagccttctcgccggattgccttggaaagctcttggtgtggtggccactggggtttgctccagcagagataatggaggggctcgctatctaatctggacagcagcaggaacaatccattagacctcagcatttatccggagcgggggaggacggagggacggggctggcgtgctccacctggccctgggaggcgcagagctgccccacaggtggcagggggattaatcagagagttttgtgctaaatcaaaactcaccactgcgtattatgcttgctgatgccggtaaatagtaattctacccattgtgactgttaggaagtagcagaatccttttgggttggaggtatcgttttttttcttttaagaagttcaatgagctttacattgtctcattcaaactcacccatcaaggggcgcggttcgattccaactttcaccgtattccttgagactaggtagactaaatccatccccccattctttcattcattcattcggcaaacatttaccaagctttcctctgcgctgggc

SEQ ID NO: 35124 - DNA, 931 bp, Homo sapiens; identical to SEQ ID NO: 30633
  chr8:11554731-11555662
  hyper

SEQ ID NO: 35125 - DNA, 209 bp, Homo sapiens
  chr8:11705932-11706141
  hypo
cgagtgcccttccgggtagaacactgattctcaactgagcagacgctaaacttccctaaggtacttaaaaacaccaccagttctctgaaatgagaatcgccagtgattcccatttaactagttaggggagaagcccatgcatttttttaagccctcaggcatttcggatctgcagccgccagtgaacaccgctactgcggaaccaaggc

SEQ ID NO: 35126 - DNA, 624 bp, Homo sapiens; identical to SEQ ID NO: 23376
  chr8:117950334-117950958
  hyper

SEQ ID NO: 35127 - DNA, 596 bp, Homo sapiens; identical to SEQ ID NO: 24658
  chr8:121823361-121823957
  binary

SEQ ID NO: 35128 - DNA, 340 bp, Homo sapiens; identical to SEQ ID NO: 23645
  chr8:126044399-126044739
  hypo

SEQ ID NO: 35129 - DNA, 1491 bp, Homo sapiens
  chr8:132052356-132053847
  binary
cgccgcccgcagggtccgaggctttgcccgagcctccactcccgctgccgctgcctccccggtgcccgtgaatgaagcgctgctccgtgatgtgtcgcaccgccgtctgccacagcagccgctgcggccgggaggcgctcctgccgtcgccggccgggggcgtcgggtggatggtgtagagttcctcgctgcctgtaaggcagcgcacatcggagagctccatggctctgggccgcagggaaggaggcccagaaccttggggaggcagccggaggaggggttcctaaagactcaaaggcggcctggtaggagcttggcaaggatcctttttatcctaggctgccccgttgcaggagccctgcgctagggctccctgtaggtcgggtcatactgtgcccaggggcaaagggcacctggaagatcgcggcggacctcggcgtccttgcgtgctgctctcccgccagccggcgcagcttgggtacgcagcggcagtggctatttgtcctcaggagccgcagcgctgtgagccacgcagccccttcctgggctcaggctccttggttgattctaggctcagcgttttggcgcagcctttgctctccaagagacgcctaagcgcctgggcgccgtgcttctgctgcgcgtcgggcgggtcctggctgctgcactgggctttggacgcccactgctccgcggctgcagggggcctggccggcggtgaccggcggcagcgatgggtgcgaagttagcagatgtggctggaatcatcgcccttcggagaactccattgcgccgggatggggagcaggggcggagctgggggcgggggcaaagaaggaggaggagggggtcacggtgaggtggcggggcgccccgcgacagggttggagaggtggtagcctcggcgctaacaattcaccaaatagttaatttggaggaaggggtatgctgaggctccctcctaggctctttcctagttcgggagcaaggactgacagcgcagcgctggctctggccagaagcatccctcccggagggggtgtggggactctcgctccagggtcccagcctgagctataagacgaggtcaacgctttcagctgtgctttcgaagggtcgcagcacacagttctcatcccctttatttcgttctttggagtccatttggctcggagctaggaggatcaggagaggcgggggaaggaaaaagtggtgagggctccaaagccaagagctccgagaacgaagagaagccgccggtgcggatatctgaggctgagaaccgaagcttggcggatgaggcgaaggtttggaggagaagggaggcccgaggccgcgtggaagtcgacagagacgcctctggatctagggaagcgccgccgcgtgccaccctggagctctgaaacgcaccgcgggcgccaggcgactgggagaaatttggagacctgtcagagtggtcagacacccgcggtgacttaaacccgcccccgc

SEQ ID NO: 35130 - DNA, 1262 bp, Homo sapiens
  chr8:133492249-133493511
  binary
cgcgtgctgaggacgggctggtctccccttcagcgggaaagcatccatgggtcttaaagccccagagacttctcagctccagccccgaccccaagtccccaagcgcgccgccgccgagggcgccccgagcggccgggtactcacaccaacgcgtggtaaagcagcgcccagccccgcggtctctccagggcgtcgtagatcaaagtttggatgcgccggtacttggcgttgtttctcttgactgggcggctcagcggggtcttggccaggagcccgatgccctgcggggtcctccgctgcccctcgtcgcggccgccgccctccagcagcagggtcccgtctttgtcggctccggccccgagcgccaaggtgacttgctccacgtcgccgggcgccagccccactttccgctcctcgtcgccggccgccgccgcgtcccctccggctgggttagccgccccgccgcctccgccgcccccgtcgccgccgccgccagccgcccccgccgccctgcgcgccttgagccccatctgcctcgcccccgccggccgcttcgccttctccgctgctgctctgggaagaaggggcgctcggggtgcgtgaacgaggcggcggcggcggctgcaagcccgggaactccaatgccatgatccgcgcgcccctccccacccccccccaaaagcaggcaaaggcgggccccctggggggcaggggaggccaggcagggggtcagggggtcacatcccgcgcgggtcagccgcaggaccccgagggtcgcgggccgggggctgcggagaagctgggagggcgcgcgaggctggcgcggaggcgctagggcgcgcggcggcgggagcctggaaccggcgctccggggcggcggcggcggcggcggcacccaggccggcgagcccaagacagcatcgcagtttatttacaagcccggtgccagccgccctcccgcccgccagccacacgcgccgccgccgccgcctcctccctcctccgcgctcccacccgcgcccctccccgcccgttccagcctcagcctgtcagcagcagcagcagcgagcgcgccgcgggccgagagcacgccgcgtccctccctccctccttccccggggtggggccccattgtcccgccccgtcgcggcgggaggcccgggcggcggcgccccgcctcttcccgccgacccccaccgctgattgtctggggacccaggatcgcctgggctaccgccgcccccgttgcaaccaggcagtgc

SEQ ID NO: 35131 - DNA, 1444 bp, Homo sapiens; identical to SEQ ID NO: 28219
  chr8:140714896-140716340
  binary

SEQ ID NO: 35132 - DNA, 840 bp, Homo sapiens; identical to SEQ ID NO: 17122
  chr8:142240180-142241020
  hypo

SEQ ID NO: 35133 - DNA, 997 bp, Homo sapiens
  chr8:143531858-143532855
  binary
cgctggcgggggtctaagggagccccccatggcccccaacagccacacatagacgcagcaggctccggagagcccccgagcgtgtccccctcctgctaatcacgtccagggccccctacagacattgtaagggcccgagacgtcctccccccacgcacagagctcggggcaggcaggagaaaaccccagactccttctcgaagccctcgctcgtagaagccctcgcctgtagacctggcattggcagtggagactccctggaggtactctcccccacttcgggcggagggctatttttgcgccccccacccccacgcgaacgcctggctcttccctccttgtctacctttccactgggtcggacaggccgcgcggataagccgctctcaactttgggccggccctatgccgtctccgctccaagcgccgagcactcccgggcgccgagcactcccgggtccgcgtcgccggtgagcagaggccgccggccctccaccgtcgccgcgctagcttggagccgcgcggagctgcctcgaggaacgagcacggcccccgccccctcctggggaggctgggagctctggacccggccaggagccctctccctaggtccccgcggccccctgggcgaggtagagagctcctccggcctcgggagggggcggcggagctgagaatcaccgcgaagcgatgcgaccgggagggcttgacggaggctgcggctccgagcccgcgtccctcctcctggccgcggcggctcctgcttggccactccccggcagcctgaagagaacgcctaatctggcaccccagccccaggccgctgggcaccttacccctttccacttttattttgggcttctaagtttcttggagcgcaggcgcctaggctgggacccgaagagccctaagccagccctctttcagcacccgtccccgccgcgacctccccgttcttcctccgggtctggggcgcagattcctgggctgcaactcc

SEQ ID NO: 35134 - DNA, 982 bp, Homo sapiens
  chr8:144511528-144512510
  binary
cggccgtgcccttggccccgccgggaccggcctgcggcggcgaaggctcccgcgggaaaccggccccgcccgcgctcccggggccgccccggcccgccagcttctcgtatttctccttgtacaggtcccgctctttggccaggcgccccacctccagcttcagctgctccacctggctctggagttggcacttctcgctctccagaatgtgccgctgctgcacccgcttgaagcggcaggactgcgcgtagccgcggttcttgagcgtgcgccgcttctgcttgagccggatgacctcctccttgctgaagccgcggagctgccggttcagctcgcgcaccgacatggacaccagctggtcgtcggagaagcgctcctccaggcgcacgtggtggcccgcgccaccgccgtgtcccgcgccgccatggtggtggtggtggtggtggtggtggtgggcggcgtggtgatggtgggcggcgtggtgcgcgccgtggtggtggccggcgcccatgtcgtccgctccgccgccgcccgcgaagcccgggccgcggaaagcctcgtaggctgcggcggccgccgggtggtgcgcgccgtggtgcgcgccgtggtggccgctgccgatgagcgcctccaccgcgtcctcgggcgtcaggttgagcgcctcggggttgaggtgatgctggtagccgctcatccagtacagatcctccagcgccggcttccccgaggtgcccccgacggcgccggggcccccgctcggcggcccgggggcgcccccggcctgagacgagccgccgccgccccccgcgccgccgccgccgccggtgcccgggctgggcgcgcagaagctgggcgaggagggcacggaggagcagggcgtgctgagcggcgtcgaggacagcgagcctggcggcaggcggtggcagaagcgctcggcctcgggaggctccttcttcacctcgaacttcatcaggtcgaagtc

SEQ ID NO: 35135 - DNA, 333 bp, Homo sapiens
  chr8:144656785-144657118
  hypo
cgggcttcagcacagggctgtctcccacgccggcagggcctgtgctttcactgggatgcaaatcttcctgctacctcgagctcagattcccgactccagcccagccgcagcccgggaggcgcagcccgtgggctgggtgaacaaacgacacaaacaacacaggacaagctgtggggaaaagtgagtgattcgtgttgtttccagtcagccccgctccgagtctcagggggactgccccgcacacagactgttcaccagggcctgcagcctctcggacagcaccacctgcagggagcagaggacaggagcggtgggcagggtgagggcgggggc

SEQ ID NO: 35136 - DNA, 282 bp, Homo sapiens
  chr8:144658223-144658505
  hypo
cgcctacccactcatccaccccacctcctgggccagtcgggccagcgcctcctcgtcaatgttgttgctgactacgatgaggactgactccagccagggcacctggaacctgccgcgtgggtggagaaagggtgggggccacccctcgggtcttcctgattcaccctggtgtccccctgctccccgccccgcctcagtcaaggacacctgtgctcaccttctgcttgggagctcctagggagccccaccacttacttccctgccacggcctgcagtatcacc

SEQ ID NO: 35137 - DNA, 225 bp, Homo sapiens
  chr8:23290419-23290644
  hypo
cgtggagctgtgagctggatcacaaggtccccggggcattctgggcgggaaggccctcctccatccagagggcggcggccgagctgctccggggagtgcgcctgtggatgcgccgcagccgcagcaggtacagcaggatggccagcagcaccaccaggaagcagccagagaacaggtagtggttgtagacaaaggaaacgccccgccagtgggtgtgactggctc

SEQ ID NO: 35138 - DNA, 115 bp, Homo sapiens
  chr8:23399609-23399724
  hypo
cgatgtttcggtcaactatggactccatatgtgatgagacagtgatcccatagattatagtggagctgaaaaattcctattacctaggggcatcacaacgcattgcatttcgccc

SEQ ID NO: 35139 - DNA, 896 bp, Homo sapiens
  chr8:24770908-24771804
  hyper
cggggaagcgctgcctgaacggcgggacagtgacaaagaaagggcgctggcgatattcgcaccaagggtgcgaaacgcaatcgggaggtgagaaatggaaagaaggcgaatgcccggctacaagtagcctgggactgaaaggggacctgggggaggggctgggcccagggcagaaaagtccaggttcccatgcggcctgggcccacgtggagcgggcgctgaatcaccgttcagccgcccccctcccctcctccccgaccggtgcccgcagtccccgcctcctcggccgccgcctccacggggcggggccctggcccgggaccagcgccgcggctataaatgggctgcggcgaggccggcagaacgctgtgacagccacacgccccaaggcctccaagatgagctacacgttggactcgctgggcaacccgtccgcctaccggcgggtaaccgagacccgctcgagcttcagccgcgtcagcggctccccgtccagtggcttccgctcgcagtcgtggtcccgcggctcgcccagcaccgtgtcctcctcctataagcgcagcatgctcgccccgcgcctcgcttacagctcggccatgctcagctccgccgagagcagccttgacttcagccagtcctcgtccctgctcaacggcggctccggacccggcggcgactacaagctgtcccgctccaacgagaaggagcagctgcaggggctgaacgaccgctttgccggctacatagagaaggtgcactacctggagcagcagaataaggagattgaggcggagatccaggcgctgcggcagaagcaggcctcgcacgcccagctgggcgacgcgtacgaccaggagatccgcgagctgcgcgccaccctggagatggtgaaccac

SEQ ID NO: 35140 - DNA, 798 bp, Homo sapiens; identical to SEQ ID NO: 27287
  chr8:25903657-25904455
  hyper

SEQ ID NO: 35141 - DNA, 106 bp, Homo sapiens; identical to SEQ ID NO: 9980
  chr8:26267649-26267755
  hypo

SEQ ID NO: 35142 - DNA, 980 bp, Homo sapiens
  chr8:38325500-38326480
  binary
cgctcggcgtggaggttccgcctcgggagagtccgccgtggcttgtgcgagcgggcgtgtgcccgcgtccccggctccggcccgccgcccccgggctctgttcgggtcctggcggggtcgcaagagctccgcggccggcgctcgactcccggcggcgctcggtgctcggcgcctccagcccgggcgggaacaatggagccggagctggtgccccggaggcggggcggggggagggctcccgtccgccacccggggtctccagaccttgtgcccccctcctccagaacgcagcggcggcgcctcactttccttgcagaccgggctccatcgccctgcggaggccccggcgccgcggcgtgcccgactgcagcacgggtaccgtgcgccctgcggggcgccccgagctcggaccggagaaaagtccttgggttccgcggcttttcaagcagcggcgcgctcgcggccggggaaggcgaggtcgccgcaatgcgctacgaggggtctcggtcccgtccggacgtggccgcccagctcccggcacacccgggttcctccgcgcgctgcggctgcaccggcgtcccggctcccgctagctgccgcccgccgccgaggacgccgcgcctgtggccgcaagagcgctccgagcgctatgcgccggcggggcgcgagggctcgctctctcactcccacccgcgctggtccctcctccgcctccgccccctgcagctgcctgctgggccttgtagttccccagccgcggccccaaaggacggggagcgggccgagctgtccggcgctctgcccttctcttcctacagcctggtctcctttggcgtttgcgcccctgcatctgagcacgtcccagagggcgccggaatgtcaggccctagacatagcagcggtttgggggctagggggcaggtgaagagacgccgcagccttgaggttgtacctggtagcgtgggctttggagtctgtgc

SEQ ID NO: 35143 - DNA, 332 bp, Homo sapiens
  chr8:42333256-42333588
  hypo
cgaccacattggatacaaggcaagcagaaacatggaggatgagtcaggagcccgctgcatggcttaggcatgagatgaggcatccgggaccaggctgtggacggtggtgggtgggagggaatacgatgatttaagagaactgcagcggcaaaatccaacaggaccagatggtggattaaacatgggggtggagagaggatacatggtttatggaaccgaagtgaaaaataaccgagtgggtttttcttctcttttgcattgtttttagttttgctttttggggctaggatggggtctgaccacaggtgcgcttttgattgggtgaagtagcc

SEQ ID NO: 35144 - DNA, 127 bp, Homo sapiens
  chr8:42333909-42334036
  hypo
cgtgcccggccggtttactgtgtctcaatggaggactcccttgctgtgcaccttgaatatggcagtggctgtactactgtacatgctgtcaaaactcatgaaattcacacaggtgaaccacaggagc

SEQ ID NO: 35145 - DNA, 410 bp, Homo sapiens; identical to SEQ ID NO: 14340
  chr8:48292766-48293176
  hypo

SEQ ID NO: 35146 - DNA, 494 bp, Homo sapiens; identical to SEQ ID NO: 24686
  chr8:49468683-49469177
  binary

SEQ ID NO: 35147 - DNA, 538 bp, Homo sapiens
  chr8:495481-496019
  binary
cgtggccacgtccgctcgggtcaccaaggcaacggccgggagcgcagtgcgcatgcgcgccgctggcgctcaggccgcggcaaggctgaggggaaggtggagggggcacagtccgcggagcggcgcctgtaccccagcgcttcagggcatccctcggggcctgggcgccgggcatccgggactcatcccctccggcgcccgaggtcgcgggatagtgggggcgccgggaggaagcctcgcccagccctggtgggcggtggggccgctggggcctggggcgccgcgggctcggcccggactgacggcggtggggggcggggatggggccgtggtgccgggccgcgcagaacccttgggacccccgcggcgcccaggttggggctcagggcccggagaacgttttcccgcgtggctatggctttgtcagaatcaggagcgggagaggcgcccacagattcctgagggcagaaccgcctggttcccaggccgaaaggagccggcgaggcgacccccgatcccgggacggagccgcgggaac

SEQ ID NO: 35148 - DNA, 1358 bp, Homo sapiens
  chr8:54789114-54790472
  hyper
cgggcagctgaaggtctttctgcagataacttttctcagatcgaattttttggctacattgatactcttcggctctgtccttgccagaagttcggaaggattccagcgccccacaccttgcttgattcaccctcatcccctcccctaactggagaagccgctgggtcccgcgccaggctcgcggtggcttcagagtagcaggggagcaggcggctgatccggaggccagtgtggggccggcaagcggtgactgtctccagaggagcaaaggagccgagtcttgtttttcttggatcaggtttgggacttttattctgtctgaccatttccaccacttgcctcacaagagtctctgtctcgaagcacaggaccgaagcaaaatgcctaatgaagcgtgcctgaggaaggggcaggggcttgcaagtgacttgggaagaaggactggggcgaagggagaaaggaggttacgagttcgcacgttctcacaaaaccatttgaaaacatgagctggagacgccaaattctgggacccacgaaaggctttggagctcgctcgggctcctcgaagttgggcgtgcgtcgcagaacagtgctgggcgctctctttcagcattttcggcttttttcaagcccttgcgtagggtcgggaaggccgtgggtgggctcagtcaggctttaggtcgccaggaacccggctggtcctctctcgacttcttagcgtggggtcccgccggccctgccgcccgtggccgccgaagttcccgccctcgccgagggccctcgctccggagtggggcgcagacgcggccgccggcccgcagtcccccgcaggtgccgcccaggactagctgcccggcggaggccgagcacgcttggcggcagctgagcctccaccccaagccccagccggaggggcgcgtcccctgtcctcctcccgagcgagacgaacgctcagcagctcgttccctgggcgccaagaccgatttccaagtcgcccactttccccctcgagggagctgttggcgcttctccagaagcctcctcggctcccagctccagcccctaaaataaaagcaccttgccagagagcgggggaggggagcagctgaacgaggagaatgaaaatactgggagaacgaccccattctccaggaaaaggtaatgaggggaagtgaaacagtgtgaacttactcggaaatgcaaaccgagttcaactcacccaggagcaaacaaacgacagcaagacaaatcagccaccgcactcgcggcttcccagaaagggcctcatgaatgagaatgggttgctaggtttccttccctctctcctgacaatcgcttcccacaagacttccaccgcc

SEQ ID NO: 35149 - DNA, 786 bp, Homo sapiens
  chr8:54794561-54795347
  hyper
cgctgggggagcggacgggccaggggcctctagggaagcggcgctccgggaccggggtggctttcccgtctctgtgtgcgcggcgatccccacacccagctcgggcggaggagccctgagagaagcggctagctgagagtggggtgggcgttttggggaaaggtttgcgtgcgctgcggccctaccgctgctagagaagtggaagagagagagtgggcgccgggagggggtctataggcgccgcgacctaccccatctccctccacgcttgtgggggagtgagtggggaaggggctttgggagaggcggcgcgcgggcactgaggtgcatcgtgagcttcccggacttgacagcatcaaaggaaaatcctggcgagcagccagggccagcgagcgaccccagcagcagggacgcggccgtgcgagagctcgcggacaggcgagggggatcccaggggagcagctgctgcccacgggccacgggcgatgcacggagtggagaagtgaacgtggtctacaggatttctgtccggaaggtggagagcgctacaggggaatctcctcgattcctgtccgtctcgtaacttggcaaaagctcgcgccactgccctccggcctgggcgacagagcaagactccgtctcaaaaaaaaaaaaaaaaaatggcaaaagcctatcgctctttgtcgaactccccacgttccccagtcacctggctggggttcgttggtgtcaaaaccccagccttggtgccctcggtgccagcaggaccctcgcccactggctagc

SEQ ID NO: 35150 - DNA, 1259 bp, Homo sapiens; identical to SEQ ID NO: 22956
  chr8:55366368-55367627
  binary

SEQ ID NO: 35151 - DNA, 1448 bp, Homo sapiens; identical to SEQ ID NO: 25939
  chr8:55371121-55372569
  binary

SEQ ID NO: 35152 - DNA, 2250 bp, Homo sapiens; identical to SEQ ID NO: 22959
  chr8:56013535-56015785
  binary

SEQ ID NO: 35153 - DNA, 674 bp, Homo sapiens; identical to SEQ ID NO: 25941
  chr8:57069543-57070217
  hyper

SEQ ID NO: 35154 - DNA, 866 bp, Homo sapiens
  chr8:65281846-65282712
  binary
cgggagctgcctctagggagaaaggggaggggggaggggagaagaaaaaggaaagagcgcgtttcctcgccggggttaccggggtggcgcgggcttcgcggccgaggggctgccggcccggcccgcagctcctcgcggccggctgggaagtggcgggtccggctagtccgcgggcgggcggagcgcgccgtcgctgccagtgtccccctttaacattccttccccgagcctttccctgctcctccgctctccgagcccggggcggccccgcagacaccagcgcctctatcctgcgctccttggcgtacgcagccgggcgaggtcgcggcgggaatgggcgccgaggccctgcccgccagggccgcatctgcggcccgagacttacttctgctttgctttcctgcacctggcccggggcaggctttctagtttctgcctcggccagaggagccgacttccgcaggacgggcttggggcagggggtgccggtgggggcagcggggcgaggcgaggtcgcagggagacgaccaggcctgcttgggcctgggccgctccagccgcctcgcctcttcagggacctcgccccgggaccacccgagcggacccacagcttctgaggaaacagctgcctcgggcctaagggtctttgctttcccccaacgcatgcaagcgtgggtcgccagcccagcatgtctggcgtggaggccggaggagggtggggagctggcggtgccctatggccagacgagtaaaagtcggttagtgttttatgcgcctgggggaggcgaagggcgcgggcttgcggggcccgggctgcgagtattgggagggggcgcctcgtgaggccgtgcgaggccgccctcccc

SEQ ID NO: 35155 - DNA, 1431 bp, Homo sapiens; identical to SEQ ID NO: 28234
  chr8:65289998-65291429
  hyper

SEQ ID NO: 35156 - DNA, 2224 bp, Homo sapiens
  chr8:65492354-65494578
  binary
cggaaagtcccatccccaaatccagaccagtcatcctacgaacaggggtggagtataattctcgcccggaagggtaatttagcacaagctgagacagcagtggcgagggaagggcagtggggggtggggtgcggtgggtgggggcgtctgctttccacaggactcccaggcttcgccgccgatctacaatttgctgaaggagcaaagaacatcctcggctctaagtagggcttttagtgtgctcattgatgagtgaaagtcgccacacatgtcaagctaaaggcagttgttgggttactaacaggacccagcgccttgcaaacatatgcgctaagctgtgtatacagatggcaggcagaataatggagcaggcgccttttataaagctctagctgctgcctgtcttcagacctgggaaatgaaactattcagacttgcggccagatagcgcctgcgattgtttgttaccgttttaatcctattaattaaaacgttaacctgattgggtagaaagcgctgtcccaacaggcgagtcttcttcataataacctactcagagataatgatgtaaaagactcccccgtctgtggcggcggctgtttgatgggtccggaaatctcttgaaggtgaatccaagcaagataaacggtgcggagaggaggcgcggggctgggctcagagcggcggcggcggcggctccactccctccgcgcccaccctcccaccatgcggggccgcggcccatggtgagccccagcagccagcaccatcggctggagacgaagaagaagaagaagaggaggcggcgagcgcgggggaaggcgaaaaagaaaaagaaagaaggggagagggctcccggcagcaccaggaccgacgcgcgcaccagctccggagcccagctcgcgcgcgtctgtggggccgcctgactccggggccgaggcggcggcggcggcagcgggcgcggcggcccgggctgcgcgccggcgcgggaccatggagcgcgggatgcacctcggtgcagcggccgccggcgaggacgacctcttcctgcacaagagcctgagcgcctccacctccaagcgcttggaagcggctttccgctccacgcccccgggcatggacctgtccctggcgccgccgcctcgggaacgcccggcgtcctcctcctcgtcgcccctgggctgcttcgagccggctgaccccgagggggcagggctgctgttgccgccgcctggaggaggcggcggcggcagcgcgggaagtggcggcggcggcggcggcggggtgggtgtccccgggctgctagtaggttcagccggcgttgggggcgaccctagcctaagcagcctgccggccggggccgccctttgcctcaagtacggcgaaagcgcgagccggggctcggtggccgagagcagcggcggcgagcagagccccgacgacgacagcgacggtcgctgcgagctcgtgctgcgggccggagtagccgacccgcgggcctccccgggagcgggaggtggtggcgcgaaggcagccgagggctgctccaatgcccacctccacggcggcgccagcgtccccccggggggcctgggcggcggcggcggcgggggtagcagcagcggtagcagtggcggcggtggcggtagcggtagcggcagcggcggcagcagcagcagcagcagcagcagcagcaagaaatccaaagagcaaaaggcgctgcggcttaacatcaatgcccgagagcgccggcggatgcacgacctgaacgacgcgctggacgagctgcgcgcggtgatcccctacgcgcacagcccctcggtgcgaaagctctccaagatcgccacgctgctgctcgccaagaactacatcctcatgcaggcgcaggccctggaggagatgcggcgcctagtcgcctacctcaaccagggccaggccatctcggctgcctccctgcccagctcggcggctgcagcggcagcagctgctgccctgcacccggcgctcggcgcctacgagcaggcagccggctacccgttcagcgccggactgcccccggctgcctcctgcccggagaagtgcgccctgtttaacagcgtctcctccagcctctgcaaacagtgcacggagaagccttaaacacacccccgaaaaacacaagaccgacccaaaatctagaggaaagcgaaaagctgctccccaccccctttattttggtcctctc

SEQ ID NO: 35157 - DNA, 1373 bp, Homo sapiens
  chr8:67874295-67875668
  binary
cgggaagaaagatctcggaagcacagctcaggatcagcactcgttcgcgcttgggtgactttatccaacccggcacgcacgagaggtggcgcggctccttctcgccgacgccgcggaaaaccacggctcaccagccgccctcggcctttcacgccaggggggatttctgcccgaggagcgggggacccttagcctcacctcggggtacggcacccgccaccgttccgagcccgagagctgcgcagtacgcgtctgacgggcccctcacctttcctggagcggctgagtggagctccgctccgtcgtgagggcgggcgaggggcgtggagcagggcctgtgtggccagggccgcgctggtcactccatcctcgtccggccgatgcccaagtcgacggctgtttccaacctccgctggctgtgacttttatgcgggcgccccgcggccaggcgtgtgtgctccgaccggctaaggcaggtcgggcggaggacctggcccaccggagaggctacgccgggggctgaggcggcttagagggtcattaatcaaaccctccggcggggcgggctcgggggcggggcgtcctcctggccccgcccctcggctcactgcctcacgctgctttccccgaggcgcctcgctgagggcggcgtgtggagagtttggggtgtctgccgccggctgcggtggggccgggctggaggccgcgggtgaggcctgtggttaacctcgcgctgccgaggtcttacctcctcgagtccagtctgattccaggccgcttccaggccggtgcccagctgaggcgggaacgctgcagtttggttgagcgtgacttttaggctctgtgaggaaaagtcgagcgcgccacatcgaggcgctagccgtttattctaccacaaggtaaaagattcatgctgtcctagttaccctaaagctgggagatacactgcacttcctaccagaccccgaatgctctcagtgtctgtaattctttaagaagttcctagagcagacagcccttggatcgtgggcacttctccccggggacggggaccctgctgaccgcctccgctgcccccgcgggggccaccgctctttaattatttgggcgaaacattcttttctggttttgcacttgtggactcacgggaagcgtgacttgcagcgaggcaggacccgatcccaggcttctttagaaagcggacgctgcgccccaaggcctgttcagagccgccccaggaagccgtgggtccccgaccgccccaaaccgcagcggtttctgcaggtcctggacccgtcgccttcgtaggtgaaatctaagtacttttcagcaacataattagaacacactcgaaacaatgcctgcagttctcc

SEQ ID NO: 35158 - DNA, 919 bp, Homo sapiens
  chr8:69243150-69244069
  binary
cgcccagaggagaaaggaacctctgcctcgaatttccccactgcgccgggcgctgcggagagcggcgagggtgggcgcgaggcggagaacgcgatgaatgagttctcccctcgcctcggagttgtctgagttggcggcgctgcgcccaggcttccggctctcagcgccccacgcgcgcgtggctccccgggctgccacccacgcccgcggccggggccgagccagccacgcagggcagccgaggctccggagctcctgtcccggccccagtccgggtaaaaggagggttgtccccagcggaggcgcacagccgcgcgttctccctgcactctcttcgcggtcccatctgttccccatggcgtctcatccgcaaacccggatccaggcttacctggagaagaacaagatcggtcccctgtttgaggtaaggcgctgtggaggagggcagtcccgttgtctttaggggaaggggtgcagtaatgaaaacagaacactcccaatcccacccctcccagggaaggagggctagagaaccaacgcgcgggagagggcgccctgggattcactggcattcgctctgtcccggccaggtgtcctggaacgcggccgggcgggcacttagccagttacctgaacgcggacaggtgagctcgggagggcccagcctcagcctggcaggggaagttttggccctctgactgtcctgcacctctcagctacatgttcaggacccgggcaggctgaggcaggcgacgcatacggatgcacacactcagactgtgttgcacacgcacactttcttttttgaattcacgctatcttgagtgttcgtgttggattttcttttttcttttcttttctttccttctttttttttttttttttttttttttttttaatgagggcggtaatagaaccc

SEQ ID NO: 35159 - DNA, 943 bp, Homo sapiens; identical to SEQ ID NO: 29481
  chr8:70946701-70947644
  hyper

SEQ ID NO: 35160 - DNA, 850 bp, Homo sapiens; identical to SEQ ID NO: 25946
  chr8:70984130-70984980
  hyper

SEQ ID NO: 35161 - DNA, 266 bp, Homo sapiens
  chr8:71017208-71017474
  hypo
cgtgagccaccgcgcccagatgatttggcttcttaatcacgcatccagaggtgctggctggctcctgagccgggagacatctgtgggaaacttcgcttgcttcttgacgttactcactgcttgccattcagctttccaggggctacaaaatgagtcaccacccttttatcagctttcaacttacattttgttgctgttgtttcatctcctattatccttgtccttgtgggtttatgcctttataaaaaggcatttgggccaggcgc

SEQ ID NO: 35162 - DNA, 1631 bp, Homo sapiens; identical to SEQ ID NO: 22967
  chr8:72755373-72757004
  binary

SEQ ID NO: 35163 - DNA, 984 bp, Homo sapiens; identical to SEQ ID NO: 28239
  chr8:73449197-73450181
  binary

SEQ ID NO: 35164 - DNA, 943 bp, Homo sapiens; identical to SEQ ID NO: 22968
  chr8:75896528-75897471
  binary

SEQ ID NO: 35165 - DNA, 868 bp, Homo sapiens
  chr8:76316299-76317167
  hyper
cggggtcccagttgcagtccgctattgctccaggcccagcgggggcggacctcgttggaggctacggtgcaggtcggagaagatgaaatggcctagcatcccccttcccaggggctcgagtcggcagctttagagctccgacaatctgtgccctcgctttgggctgcgccagggagcaaaaaacctctgcttttttgaaagaggccggggcaacaaggtagagagccgcggccagaagcagccccgggccataaacccgaggcctggatggcttaaggctgaaaccgcctccgcccccaccctcaccctgctggccgagccctcccccctcctagccacagtgaccggaatcccagacttcccttctgatgcataaaacattcagtggcctccagggagtttttgaaattctggcggaggctgctttatccgttgtttcgccccctgggtcaaacactggtccactgggtgagttggaggagcgagtagctcagctatagattaaatttaacctgagccccggtggccgcgtcccgcccgcggtcctttctatacgagtagctttgaaggtgtcaccgagctgtgcccaaatctagaaaagaatgggaggagaactgcatgagcttttaattttcttccctttttccccccttcctgcgtgtaaactggggtaagggtgggcggtaatccccactgattgagcccgcgcggggaggtaaggactccggcgtgggtgccaccgcggttgcgaaaaatcgggttctgaacccggtcagcaggagtggcagcgccccagcagcacctaggcaggaagaggacacttcccgttcgcgtttggtgatggtttcatgtaccaggacatgggtgc

SEQ ID NO: 35166 - DNA, 939 bp, Homo sapiens
  chr8:77594109-77595048
  hyper
cgctgagggagggagggggcactgagggacctgattttccactttctttaggggggctgcgtttttccggatttaacttttggattaagtggcggaggatcatctacgtttgcttgggcagttttctctccttttccctgtcttttcgggttttgccttccccgcgagccccgggcattctagtggctgggggaagctgtcagctccgcaacggcgcgggcactgccaggggtctccgctcgccccgcgcccctgcaccccgatcgggatgactggtcctccgcactcatcctctgaaagtttggacgttggtcggtggggctgggagcccctctctccctgctctttccctgctttaccctccaccccccaccccaccttattcagcctcgtttttcttcctccttttaccacccgcccctcttccccttctcaagttccccgaaggtcgcttagtgtgcggggctggcggaggcccgggggttcgtgagctctggggaggggattccaagaggctggggtgaacgctggggctggggctgcaggtagacacccgcccaccggagcgggcgcggcaggcactaccgagggctgctctcggcggcgcgggcgcgggcgccgcggaggaaaggcaggtccgttaggaggcgggatcgcccggcctctgggccagggacccgcgaggcggcggctgcttgctccgaacggaacgccgccgggtgtgcgttagaccagcggatagacgcccgcggcttggggtcaagaatcttttcctttttagcaaagggcaaggggtgtgtgcgtgtgcgtgtgcgtgtgtgtgtgtgtattgagtggctgtgttcggctgtgagaaccgattcattcttcggcccccctaaaagggttccatgcctacaaatgaacttcacctccttcgtttctccaagcatcaagtgc

SEQ ID NO: 35167 - DNA, 730 bp, Homo sapiens; identical to SEQ ID NO: 25948
  chr8:79428304-79429034
  hyper

SEQ ID NO: 35168 - DNA, 934 bp, Homo sapiens; identical to SEQ ID NO: 30669
  chr8:82192863-82193797
  binary

SEQ ID NO: 35169 - DNA, 388 bp, Homo sapiens
  chr8:8560686-8561074
  hypo
cggtggacgtcctcgacggggaggggtgggagtcccaggacgctccctcgtgcagcacccacccctgcgacagctcgctgccctgcgactccgacctctagacgcttgtagagcctggggggcgccgggtggcaaaggactcacccccgcacaggcccgcctggcttcgagttggaacccggacacttgcccctcactggtgtggatggaaatctgcctttcgtgggaccaaacaggactccttggacgattagttcaggttgggtttggttttcttcttaaagagtttagttttcctctccagagggatcagggtcctcttagggagtgacgggcttttcatatatttttgctgaagaatatatggaaagggtggcatttgcgtcac

SEQ ID NO: 35170 - DNA, 864 bp, Homo sapiens; identical to SEQ ID NO: 29485
  chr8:97157277-97158141
  hyper

SEQ ID NO: 35171 - DNA, 426 bp, Homo sapiens
  chr8:97167794-97168220
  hyper
cgtgcccgcgctcatgcaggcgcaccctcatacgcacacacttgaacgcttagcaagtcttttccaaggctgttccctctttccggggaaataaagcctagattggaaccttctgcccagcttcctcatttggccgtctggtctgcattagtgtttttataagggactcaaacaaatcgaatacaaggtcaccaaataattaacagttgtgaattccctccgtccccattaaaatacttccctgcttatatttcattttcggtttgccaacgacaacagggtaccggcaaaagcactgctgagttgattacaccactctgcggctcaggtccacccagaaacccgctgttttgcataacatgaggtaccagatgaacttcaatcgcgaggggactatgcaactctctgaatgccctccccgcagcc

SEQ ID NO: 35172 - DNA, 969 bp, Homo sapiens
  chr8:97171019-97171988
  hyper
cgaagaagccacatgtctttgcaaaggtgactttagtagccctaaaatcatcataaaatacctggcgttaatttgccctctggacctttcagcagctcatgaacctcgctgacctcgggctgcagcggcgagaccctcgagcaaggaacgcgactatgagtgagaggcggggactggagccggggaagagctcggggctgggggcgggggggccgttagcctgctctaaaaagcttaagagatgtgcgagcacccagggtagcagtggctgaagcagcttccgaatcccgaaccccagcgctgcaaggtttccgggcaaccccacttaactgggagcaggtcaaagtcatggagctaagtctagggaggatggaggagtggatatctgcctaaatcgcttttatcccgtcattttcttccttccttctctttactcttcctttcctttttctcccttcctttcctgtctccttccacattattgtctctctcctttaggagcttagtttccgatgcctgtggatccttccctgatttctgggaccagaggtggtgcgaggttttcttgagggcactggccacgctgcagatcaacgccggtggcaagaaggggccgcaagggtttccgcagacacccacacatgcaggcgttcccacagagggtaccagggatttcccagacccccaccagccctcaggaatagcgtagagagaggaacgtcgcctggctgagaaaggtggatgggcatacccatgtacctttgtgtattaagtacccacaacctccgaacttagccgtccctgtcccggcccgcccaactgctgccgccgcatctgcagaaaccactcgtgttgaggcctcggagcagccgggagcaccacgctggagcaaaaaagccggagggcgcagggctccagcccggctgaccatcccacccagcgcagggaccaacggaaaacccgcgcggc

SEQ ID NO: 35173 - DNA, 1914 bp, Homo sapiens; identical to SEQ ID NO: 27314
  chr8:9763158-9765072
  binary

SEQ ID NO: 35174 - DNA, 786 bp, Homo sapiens
  chr9:100610863-100611649
  hyper
cgcccgcccgcctgggtcggatcagacgcgggtagtggcttgcgcttcgtggtcctcgggtccggaacgcagggaaagcgcgtggagccaacctagagcgggagcagggtctggcttgactctgtccccgattcgttgtgcgcagtgggacaagtccgcgccgtccggagccgacttccccttctcgttgtggccgtaaagctgctggacctccaagccggctcctgcgctccccgctgctctgagaacactgagtgtcccgggcccgcgcagactgggttgggagagggctctgtgggagggcttgcggggagcggggtaagaaaggctaggtgcttcttacctacgtaagaaacgttggtggcgggatctaagcaaacggggaggtgggaagcagaaggttccccttcctgggccccagttcctccatcctgtcccctgggtgacagtgattcgctgttcatagtgtttaagtggaccaacttaaagggagagagcgcttgccgagctctgggaaaccgaaagggtccacgcccgcgggagcctcggagactcaaaatcccccgctagaccgcagaaaatgttacactttaatcaaccgctacttcttccgtggagaggggcggtgggtgggggtgtgcgcatctcatcgcggcctgtgagtggaacaggctagaattatccccagcgtcttttttccatgtccaagtttcgccttaaaacaatttaaaagaggaagaagaggaccgcgcgtctgtaaggcgctccactttatcaccttgactc

SEQ ID NO: 35175 - DNA, 913 bp, Homo sapiens
  chr9:100613687-100614600
  hyper
cgttaggacaacggtcgtccagaatttaaaatctagatatctgaatctcagaatcttgaaagttactgagagccacgaaatcccgtattaaaaggtgcctataatataatccagttaaaaattttaaaatttgaagtttttcctcctttgtaaaaacgaaacaggacgaaatctgggttttttgcttctccattacttgggaagaaggaaaccaggagttttgtttagcgagtgtaaagcccctctcccttcgttcgaccaaccctctgccgcagaaggttgtcaagcaaacgctttgagcgtttccacacaccgggtcgacggagcaaggatctgggctttgcctcgctcttccgaaggcagctgcccaacgcttggccgggcttagcctgccctcagctcaccgccacgaagaacgcgactaaaaccctggaaggcatgccacccgttactggccagaactctcgtcttgggatctcccacactcacctggcaccaccatccgcgcggctctgcacccacagccccggcccgccccccccccccaccccggaaagctgcgtccgggctggagccactggaacccgcgccaaggcccggaatcctatacgtagcaggggcctcggagatcagcacacgccctccagctgctatttaacagagtagaacactgaggccctgcgaggggacaaggacaggccctggatctcccagtgaatggccagggaacgaacccgggccagaggggccgcgccgcgaggatctcaggttaggaccaagttccggctcagggacagcaggaaaggaactcagaaattggacacccatgaagcaaacgtgtcccgactgcccgccccttcccccggagacgcgcccacccggccaccgctctcttcccactcccccattaccc

SEQ ID NO: 35176 - DNA, 1992 bp, Homo sapiens
  chr9:100615615-100617607
  binary
cgacctcgctgcccccgcctcgcctctctgcccgtggcgcttacggccaccttggcctcgggggcagggcatgggcggcccccgccagatcgcccagcgccagtactaactgccctcgctctggccttcgagcccgaagcctcttctgcgcgcacaacctaggcagtaatcctaaactagcgggcaccacagaccagctgcagccaccccaacccagggatcacttccggacccctcgaccgcccggcaccagcgcgcaagggacccttcagccggagaccagagtccagtcccggtcacgaggccaccgccgctgcccgcctcgagaagcaccacgcgggctgagccgtcggctagcgggtcactcccgagcctctgtctgcaccgcgccagccccagaccacggacgctgagcctccagcgcgtgccagcctgggccgctgggctctcggggccagcccgcgacgatcccctgagctctccgcagaagggccgagcgtccgttccggggacgccaggcccgcccccgccccccgacagccgcggggatccagagcccgggggtgcgggacgcccgcgccatgactgccgagagcgggccgccgccgccgcagccggaggtgctggctaccgtgaaggaagagcgcggcgagacggcagcaggggccggggtcccaggggaggccacgggccgcggggcgggcgggcggcgccgcaagcgccccctgcagcgcgggaagccgccctacagctacatcgcgctcatcgccatggccatcgcgcacgcgcccgagcgccgcctcacgctgggcggcatctacaagttcatcaccgagcgcttccccttctaccgcgacaaccccaaaaagtggcagaacagcatccgccacaacctcacactcaacgactgcttcctcaagatcccgcgcgaggccggccgcccgggtaagggcaactactgggcgcttgaccccaacgcggaggacatgttcgagagcggcagcttcctgcgccgccgcaagcgcttcaagcgctcggacctctccacctacccggcttacatgcacgacgcggcggctgccgcagccgccgccgccgccgccgccgccgccgccgccatcttcccaggcgcggtgcccgccgcgcgccccccctacccgggcgccgtctatgcaggctacgcgccgccgtcgctggccgcgccgcctccagtctactaccccgcggcgtcgcccggcccttgccgcgtcttcggcctggttcctgagcggccgctcagcccagagctggggcccgcaccgtcggggcccggcggctcttgcgcctttgcctccgccggcgcccccgctaccaccaccggctaccagcccgcaggctgcaccggggcccggccggccaacccctccgcctatgcggctgcctacgcgggccccgacggcgcgtacccgcagggcgccggcagtgcgatctttgccgctgctggccgcctggcgggacccgcttcgcccccagcgggcggcagcagtggcggcgtggagaccacggtggacttctacgggcgcacgtcgcccggccagttcggagcgctgggagcctgctacaaccctggcgggcagctcggaggggccagtgcaggcgcctaccatgctcgccatgctgccgcttatcccggtgggatagatcggttcgtgtccgccatgtgagccagcgtagggacgaaaactcatagacacatcggctgttcacacgttccccgcaatctgagaacgaacaggaatggagagaggactcaactgggacccacgtggaaaagaccgagcaggccacagaggctcggtctccccgcgcacagcgtaggcacccggtgtactctgtaaacgggaggaggtggggcgaggcagccagagcccttggactggcacagggaccctcgatggagcgaagccctcaaacgggatgctttctggtattctatcggggagggtccttggc

SEQ ID NO: 35177 - DNA, 778 bp, Homo sapiens; identical to SEQ ID NO: 28253
  chr9:101705883-101706661
  binary

SEQ ID NO: 35178 - DNA, 776 bp, Homo sapiens; identical to SEQ ID NO: 29491
  chr9:1051528-1052304
  hyper

SEQ ID NO: 35179 - DNA, 968 bp, Homo sapiens
  chr9:126771200-126772168
  binary
cgttgccactttctgggggagggggaggtcgaggggccgccgtttccggcgcctgcgaaggttccgtacctgtcggtgcccgctccccccaccccttgcctttcccttggctgcagcttctcgcaccgcgtaaatgtcactcacgtgtcaggatgtgtgtttacagcctgttcctctgcttgtttagtctcggcggacagggctcagcggttgcgcgacgttccccgccgctgggggagattagcaaagttacccgcctctggaccccggggcctgggcccctagatcccgccccgcggcgggagatgcgtttgagccttttacagacggagcgcgtcccagcctgacgcagagggatgaatagacaagcgcaccgggcgggaatcccgactgcctgtgtatctggggtcggcccagcgttggacgtgggctgctggtccgagaggtggcgacggaatcgcgtgcctatatgtatgggggagtggaaagtcgcagggtgtgtttccacgtttcttgagcagcccgcggcaagagttgctgagtaccccaccccccgcccccagatcctaaggcagcccctcgagctttccaaacgtattgtatccagccctcccgagagtggagttgcaccaaggacaaacactctagcgtcattacaaattttttctgccccttgggcgacctccagatgaaccctggtgactctcagattggattttcattccttactttctttgaaagaaagtgccccagatgcgtcaataaaacatgcctatgtattcgtgtaggcgtccgcatgcctgcgcgccggccgtgtgcaggcgccgaagcacacgtctgtgtgaacacacgggcacgcgcgtctttgggtttagtggtccttccctcgcgttggggcatctgtacacatgcagaatatacacatatgattgtaacttcaagttttttcaattatgcaaaacgacctc

SEQ ID NO: 35180 - DNA, 511 bp, Homo sapiens; identical to SEQ ID NO: 28259
  chr9:129485513-129486024
  hyper

SEQ ID NO: 35181 - DNA, 241 bp, Homo sapiens
  chr9:131821444-131821685
  hypo
cggaaggagtttgcagagaagctggagtccctgctgcaccgtgcctaccacctgcaggaggagttcggctccaccttccccgcagacagcatgctgctagacctcggtgagctgggcccagtgcaggtggggtgggcgtggagggtggcagggatggaggtgaggagaagttgcgagaaccgggtcgtggttctctcagtgcgtccaatgaatcagaatccccagggctctccgacctcgc

SEQ ID NO: 35182 - DNA, 814 bp, Homo sapiens; identical to SEQ ID NO: 28262
  chr9:132382203-132383017
  binary

SEQ ID NO: 35183 - DNA, 724 bp, Homo sapiens; identical to SEQ ID NO: 30683
  chr9:134151944-134152668
  binary

SEQ ID NO: 35184 - DNA, 571 bp, Homo sapiens
  chr9:136474214-136474785
  hyper
cgcgctgccccggccgcgaggacttgggcgcacgtgacggggcgggcgggcgtccgacccgggcagggcgcagctagcggcggccgctcatgcccaggccacggcggtggcgcctggtgtggctgggcgggcgaggcgggcgctgagaagcccgggaggcccccggggaggcgactgcgtgcccaggcgggcacccctgccagctccgcgctgcggccgcgactccggacgccccggctggctccctgcgagctgcacgcgcggctccagcctggtcccgagcgcagggcgcgcgctggcggggagggcgcgcgcccgagcctggcggggagcgcgcgtcaccggcccgcgcgcgcagtcgtcgggggatgccgggagcggcctggggagctgtccctggtgctgacggctcgtccgctctcgcccgggacgcgcgacctcctggaggcctgggggtgcccccaccctggccggcgccctgcggtgctccctccgctctccgcctgttctcggggcgttccggcttccacaacgttgggatctggagtcaggccgaagctgctgcttatcc

SEQ ID NO: 35185 - DNA, 426 bp, Homo sapiens; identical to SEQ ID NO: 17155
  chr9:137017050-137017476
  hypo

SEQ ID NO: 35186 - DNA, 277 bp, Homo sapiens; identical to SEQ ID NO: 23657
  chr9:138743599-138743876
  hypo

SEQ ID NO: 35187 - DNA, 142 bp, Homo sapiens; identical to SEQ ID NO: 17157
  chr9:138774077-138774219
  hypo

SEQ ID NO: 35188 - DNA, 246 bp, Homo sapiens; identical to SEQ ID NO: 24717
  chr9:139000411-139000657
  hypo

SEQ ID NO: 35189 - DNA, 397 bp, Homo sapiens; identical to SEQ ID NO: 28272
  chr9:139506149-139506546
  hypo

SEQ ID NO: 35190 - DNA, 454 bp, Homo sapiens; identical to SEQ ID NO: 30689
  chr9:139739050-139739504
  hyper

SEQ ID NO: 35191 - DNA, 1240 bp, Homo sapiens
  chr9:139740563-139741803
  hyper
cgacggccccacctctggccgccagcggagcctagagcagctggacgagctcatcacggacctggtcatcgactcgcgacccaccgccggccaggcctcagagcccgcggccgactgcctgggcccccaactgcgccgactgctggactcgcggcccgcgggctccggggcccccgcgctggcgccgccacgctcgccccccgcctcggccggcagcgccgaggagcccgcggccccgggagaggcggccgacgcgtcccccgaacccagcgccgacgaggacgacctgatgacctgctccaatgcgcgctgccggcgcaccgagaccatgttcaacgcctgcctctacttcaagtcctgccacagctgctacacctactactgctcgcgcctgtgccgccgcgaggactgggacgcccacaaggcgcgctgcgtgtacggccgcgtgggcagcgtgtgccgccacgtactgcagttttgccgcgacagcggcccggtgcaccgcgctttctcgcgcatcgcgcgtgtcggcttcctgtcgcgcggccgcggcgtgctcttcctgggcttcccaagtccaggctcggccgacaacttcctgcgctttggcctggaggggctgctgctatcccccacctacctatcgctgcgtgagctggccacacacgcggcgcccctgggcagctacgcgcgcgagctggcggccgctgggcgcctctacgaaccggcagagtgcttcctgctcagcgtgtccgtggccgtgggacccggcaccgcgccaccggggacaccggccctgcccgcgcccgcgccacgcagccacgggccaacagtgcgcaagttcgccaaggtagcgctggcggccggcagccccgcgcggccgcccccggcgcggagccgcgagcccgacatggagacgctgatcctgacgccaccgccgggcacggcgggcctggatcaggacggcgaggcgggccggcgcgcgcgcgaggtggccttcatccacatccagcgcgagctgcggctgcgcggcgtcttcctgcgccacgagttcccgcgcgtctacgagcagctttgcgagttcgtcgaggccaacaggcgcttcacgcccaccaccatctaccccacggaccggcgcaccggccgccccttcatgtgcatgatcatggccgcctccgagccgcgcgcgctcgactgggtggccagcgccaacctgctggacgacatcatgtgaggcgcc

SEQ ID NO: 35192 - DNA, 485 bp, Homo sapiens; identical to SEQ ID NO: 29512
  chr9:139809677-139810162
  hypo

SEQ ID NO: 35193 - DNA, 686 bp, Homo sapiens
  chr9:140107955-140108641
  hypo
cgaggccgcctgctcccacccacacaggctcattctctgcgagcagaggacctgctgcttggcaccctggcagctgccctggtctcggcagcccctggcgtgtggaggccctgccccctcctagggtgcggccagcgtggagtgtgttttccacccgagggaggccctccccaggctccactcttcgcccgggctccactctcccgggttccactctgcctgggcaccactctccgcccgggctccagcccaggaccagcctcactgtctccacaggttcaacttcgtggccaagaagctgcaccgacggctactgcagcttgggggcagcgccctcctgcccgtgtgcctgggcgatgaccagcatgagctggggtgagtctgcgggcgtggtacccgcctccacagtctggtctggccacacgcagggtccgctcaggccagcgcacgtgctccctcccaggcccgacgctgctgtggacccctggctgcgagacttgtgggacagggttctggggctgtacccgccgcctccgggcctcactgagatccctcccggagtcccgtgagtgtgggccccgggtcacccacaggcgcagcagacccaacctggcctggggacctcgccctgggtccctcccgtgtgggtgggcggcccctggggagtgggtcctggtctgaccagc

SEQ ID NO: 35194 - DNA, 900 bp, Homo sapiens; identical to SEQ ID NO: 32333
  chr9:140400692-140401592
  hypo

SEQ ID NO: 35195 - DNA, 370 bp, Homo sapiens; identical to SEQ ID NO: 28277
  chr9:140682727-140683097
  hypo

SEQ ID NO: 35196 - DNA, 857 bp, Homo sapiens; identical to SEQ ID NO: 23401
  chr9:36036762-36037619
  hyper

SEQ ID NO: 35197 - DNA, 2374 bp, Homo sapiens; identical to SEQ ID NO: 27341
  chr9:37025701-37028075
  binary

SEQ ID NO: 35198 - DNA, 798 bp, Homo sapiens; identical to SEQ ID NO: 25994
  chr9:37034135-37034933
  hyper

SEQ ID NO: 35199 - DNA, 968 bp, Homo sapiens
  chr9:37035403-37036371
  binary
cgggggagcgctccgtaggaggactcctggcccgccggacaatggcagttttggagagtgaatcgtcctcagcaagagtgttgtttgttttttggagggggtggtcacgaggctgggtcgcaacctagggggaagagcctagagctcgaggaaaggggggcccccggcggcaactggacatcacatatccactgagcagatttcgccacaatcggaaatgtggctgtggattcccgggcggcccccccaccaagtggtctgcgcagttccccagcgccgcctcctccctgcagcctgcgggcccgtgtccctaccccgagatttgatttttggccatctccgagtgctcgactctttccctccgcagcccagccccagcccaggcttcccgccctcccgcctcgcccgcgccgggaggcagcgcctgggaggagcggcctgtccgcgcctggagatcaaaagccctcccggaattgacatttcaccccgggctgggggcggggggtgttggtgttttgttgttgttgttgtttccatttagagggcttgttttgtttttgtttgttttctgtgagttttcatttttccatgggatattcttttgtttcgggtgttttgcgtgttgttttttcgtgggattgattttagcgggttttgctctgtaagtcctggtctttggggtgagttttgattttgtgtaattttgtactttgtccttgtaggctgtctttttgtgtgtcgtttgtaaggcttttccttctccgcggtgtttagatgtgttttgatttggtgtgagtgggtgtcgtctgtgtgtgtgttgccttagggaatttcgtgttgtgtgtgttttgtttccttcgatttgaattttatttttttgaactgtacgttttggtgggggatcgggttatattttcatgtgttgtctttagtttttgtgtttgtgagatgcgctggtgagagtttgc

SEQ ID NO: 35200 - DNA, 1848 bp, Homo sapiens; identical to SEQ ID NO: 23402
  chr9:6644312-6646160
  hyper

SEQ ID NO: 35201 - DNA, 183 bp, Homo sapiens; identical to SEQ ID NO: 28284
  chr9:66494093-66494276
  binary

SEQ ID NO: 35202 - DNA, 716 bp, Homo sapiens; identical to SEQ ID NO: 27347
  chr9:77111662-77112378
  hyper

SEQ ID NO: 35203 - DNA, 916 bp, Homo sapiens
  chr9:77113192-77114108
  binary
cgctctcgggtgcggaagcggacgcgggatggagaaagccgaaagagggatgcctctggacaggagcagtttggaagcgcccggcgcgcagtggtcgccggccgggtttgggcgcgcggggcgcaccggccgggggcagggtggacacgcgcgggcacacactcgccaggttacgaggcccactaagcgtcctggccagcaggcatgtcccttcgctggagtagcaagcagaagagcagtgctgcgaggctggacgcggctgaggaaacagttagttccccggcacgcggctgaggaaacagttctgcggcgcgcgccttcgtgccggcgctgcgccctggccaggtcctcgtgcccgagcccgcgcggcccagggagtagtgcgaccccggaaaagttgtaatgagaaagttctggaggcttggaaaggccacactgctcacagtcggagagtcatgggctccggctcttttgtcagataaagggccggtagtggaaggaggtgctggtgcaccctcgggccaggaccctcgcagtcgcaggcggtggcggcggcggcggcgggaccccggggcgagctggggtctgcagggatgcgcgccagggactgtagcgttacgcttgctccggctggactctgggcctctcgaagggctggagggtgggtttcggggagtcacttggtctcctctcctgccttgccggagacctcaggtttccttcgcgctgtgctcggcctttcttcactcttttactgaagagccaggcgggtgtccgcttgacatggggatctgtgcaagctctgggcacccacccccactcccagtccctcttcctggccacacagcggttaatcgggggctcttctctatccttcgcacgtacccctgggtcttgacaacagaaagttagtaac

SEQ ID NO: 35204 - DNA, 512 bp, Homo sapiens; identical to SEQ ID NO: 23404
  chr9:79626891-79627403
  hyper

SEQ ID NO: 35205 - DNA, 756 bp, Homo sapiens
  chr9:80911724-80912480
  hyper
cggccagattgcgggctcaaggggcgaaggcaggttggcaggggcagcctcttcccgccgcccacaatcctcgggcgggcgcgcagccgagccggctcggctggctggcgcaatctcgcgcgctccttgcattgatcaaaaatgggggttgaaacagtaaacgcgaggaggagcaactgcttcgactcggctcagaagcgcgaccaatggggatgtgagctccttcgcgcgaaccaattagcgcagggcctgcgacagcacgggccaatggggcgccgactcggcgcaggaacaaggcgggggttcggggccggctgcagactctcaccgcagcggccaggaacgccagccgttcacgcgttcggtcctccttggctgactcaccgccctggccgccgcaccatggacgcccccaggcaggtggtcaactttgggcctggtcccgccaagctgccgcactcagtaagtccccgcgagcgggcgccgggagtgaggttcaggcgggagcacgcacgcgggtgggtttgcatccctgcgtgtggcagtcggattcccgctccctgccttgagtcccctaggcgctttgcatcagcgtgcacagcgggatcagcagctccggcaagcgggcttcgggaagaatgcagttggtgaggaagctcggcgaggcgtgcccgtgcagctgcccctggccctgactgctggtgcgaggcagtgcacgactcagctggccggggcctgctgtcccgccggtgccac

SEQ ID NO: 35206 - DNA, 877 bp, Homo sapiens; identical to SEQ ID NO: 28289
  chr9:841339-842216
  binary

SEQ ID NO: 35207 - DNA, 920 bp, Homo sapiens; identical to SEQ ID NO: 27351
  chr9:87283136-87284056
  hyper

SEQ ID NO: 35208 - DNA, 949 bp, Homo sapiens; identical to SEQ ID NO: 17175
  chrY:16636193-16637142
  binary

SEQ ID NO: 35209 - DNA, 168 bp, Homo sapiens; identical to SEQ ID NO: 23420
  chr1:100928315-100928483
  hypo

SEQ ID NO: 35210 - DNA, 1389 bp, Homo sapiens
  chr1:108506290-108507679
  binary
cgtcatagaggattagtgctgaaatgtgtcagggagagggctctgtcctctcccttttaagttgaaagcagtttggttttttgttttgttttaacattctgaaagagaaagaggctctgaaccgagtttaacatccttctgtacaaaaattttccgacaggacaaataaactactcttccactgaactgtgacttttgagctgactctagggtgcacccaaccttccagaggtgtctggcttaaccctcaaagaggcagctccagccccaggagccgaccggcaccacagcacctgagcagggcactgcaggaaggaaagcggaatctctagtgaaacttctcatttcctgtcgctgctgagagaggctggactcgctccttctcacatggcttaggaagagctgtaaacgggagcttgccggctggccaccagctcaggggccctgggggcggcctccgggttctgctccctgttcttccctttgaccaatgtcactcctggacagataacgggaccaaacgcccttcacttcctcgagtcctcatgtatgtcatggttcctcttttaggaaaacatgagtacaagacgcaaagcaaaagaagagactaaaggcaaattaccccatcacctcgtttcgtccctccccttcgttattatagaagagcttgatcaaattccctttgtcgcgccacacacacgcagagtaggtgaagggcaccctaagacaacttatttctttcccgcctcacagaaagcctttacgaaatcctcacaccatctccggacgcaaagctttcgcattcagcttgaggagctaaaccatttcaagccaaggtaggaaacgccaaagtggtgccgaagtggtcccaaagcagaaggctgggaagcagggcaagctcagcgcacctagacgtttgcatttacacaaagaaattagccgcatgattaatgggagctgccggctggaggcggggcgcccgtgccggcctcctcacctgggacatctgcggcctcaggttgatctccttcaggttgatggagtgcgcccggaggttgttaagcagctggcagagcaggactccatcgcggagggtctgcgcaaggtcgaacacctgagccgagtcccaggtcacccggtggttggtgggcagcaccttgcaatggatgagccactgcgcgcactgcttccacggctccatgcccgacggctccgggacgcggctgggccggggcgggcggcaaggatgcggccgccgccgccgccgccgcggttcctccgcgccccgccgacgccaacagccgccggccctttccccgcgcgggatcgagggagcaggagccgcggctgacgggtcgcgggcgccgcgctaggctcggctccggtccc

SEQ ID NO: 35211 - DNA, 882 bp, Homo sapiens; identical to SEQ ID NO: 24744
  chr1:110626770-110627652
  binary

SEQ ID NO: 35212 - DNA, 570 bp, Homo sapiens; identical to SEQ ID NO: 24745
  chr1:110672768-110673338
  hyper

SEQ ID NO: 35213 - DNA, 818 bp, Homo sapiens; identical to SEQ ID NO: 6654
  chr1:113498720-113499538
  binary

SEQ ID NO: 35214 - DNA, 810 bp, Homo sapiens; identical to SEQ ID NO: 32382
  chr1:116710529-116711339
  hyper

SEQ ID NO: 35215 - DNA, 1171 bp, Homo sapiens; identical to SEQ ID NO: 23421
  chr1:1168275-1169446
  hypo

SEQ ID NO: 35216 - DNA, 1035 bp, Homo sapiens; identical to SEQ ID NO: 24751
  chr1:12226892-12227927
  binary

SEQ ID NO: 35217 - DNA, 648 bp, Homo sapiens; identical to SEQ ID NO: 24761
  chr1:151693837-151694485
  binary

SEQ ID NO: 35218 - DNA, 760 bp, Homo sapiens
  chr1:154971620-154972380
  hyper
cgtacccgttcctccagccattcttcggcctcagttcctttccatcattcgccctcaggccttcgcctaccccagcttcaaagaagcgaccgtaacctcctagctggctgggttcgagaagccggggacctgcgcctcctggtggctgatcggaaggaggctgagtgcagaggggttgtcttgccttctctgggacgtggagttttggaaactgttcccctgagcttcctgaagctaaatttgcctcccccggccttggggggcgcagagatcccggcggcgattagcgctgcgcggcagccggctccaacccagaggcccggaataggcgcggagttataaatagtgccacccgcaggtgttggggggagtcggcgggaggggggtacccctggcggccacggccccttcaggtgggttgggcggtcgcggtgggagcgctggggggcggggggcgtggggggtctgcggtctgagcgcccccagcggtttcctgggcggcgggtttttcgagggaagcggaggcagcggaggatgggggggagcagcggagaagaggtgggcgcctggcgcatgctgacgctccgcttgcagctcagccccccacattccgaaacaggcccccagacccactcacgcaggaccccgcccaggcaaagcctcgcctttcttaacacctgaaggcctcattcccccaggttctgcaagcatctaacttctatgcttctacccttcggcgcacgtggcccggccagtccgc

SEQ ID NO: 35219 - DNA, 80 bp, Homo sapiens
  chr1:155311726-155311806
  hypo
cgagaaatcttttttgggagtgagcttcttggggaagtgatcaaaagcatagggtttggtgcagacaggatagcggttcc

SEQ ID NO: 35220 - DNA, 467 bp, Homo sapiens; identical to SEQ ID NO: 17189
  chr1:156255276-156255743
  hypo

SEQ ID NO: 35221 - DNA, 916 bp, Homo sapiens; identical to SEQ ID NO: 17190
  chr1:159894399-159895315
  hyper

SEQ ID NO: 35222 - DNA, 266 bp, Homo sapiens
  chr1:161697064-161697330
  hyper
cgccccagctccatgggccgcagccttggctcctggtaataggccgctttccttcagaaagcccccggtgtccagatcggtcccgttggtcacctccgtccggaacaccacctccaccgggctgcagttcccggcgagcggcgccccgactgcggggccacccgcctgcgctccgccgacgcccttggaacaatcggctggagccctgaaacccgacgtggaccttctgctccgagaaatgcagctgctcaaaggccttctgagcc

SEQ ID NO: 35223 - DNA, 293 bp, Homo sapiens
  chr1:164637890-164638183
  hypo
cgccttaccttccccaggcgcagccaacacttgacatctttttatcagatgagcttggcactgccaggaccggctcctcgcgccaatgtggcagcagccacagcccctcagcttgttagactgaaagaatgtgccgttttaattaatgatatgtaaatatccttgaatgggccgcatttgcatattaagagagatttgcggaatctgcggagtaatatattttaattaaggattaattaaaaataatgggaatttcatttcgcctggcagaatccgtttagattttagcacac

SEQ ID NO: 35224 - DNA, 148 bp, Homo sapiens; identical to SEQ ID NO: 17193
  chr1:16640899-16641047
  hypo

SEQ ID NO: 35225 - DNA, 54 bp, Homo sapiens
  chr1:17757502-17757556
  hypo
cgccgatgaaagttcccaaccatgccaataaaaatgtatttgttggccaggcgc

SEQ ID NO: 35226 - DNA, 640 bp, Homo sapiens; identical to SEQ ID NO: 17194
  chr1:181059009-181059649
  hyper

SEQ ID NO: 35227 - DNA, 307 bp, Homo sapiens; identical to SEQ ID NO: 17195
  chr1:19283560-19283867
  hyper

SEQ ID NO: 35228 - DNA, 523 bp, Homo sapiens
  chr1:1935038-1935561
  hyper
cgggaaaggcgtttcatatgggacggagttctgcctggggggcgggggtcaaacccttccagctcagccccagggtcaaacgcatccgcccccacacccacctctggctggcctgggtcccaggttctcgggctccggaggcacagacaccccgggctgctcaggcaggcggcggtccttggcgattgccctccgcggcgccggcggcgtggtttggggcgggcagctccatggcaacggaagactccatcgtggccggagggggagcctcgcccgttctgctccccggctggagcgggtggtttggtccgacccaccaccgaccgcgcgggccggggccggggcaaggaggtcgcgggccccgaggcgcggctgaagggccaggccacaggccgcggggcggggacgtctccggggtcccagacagccaggcctggcccagggccaaggcttggaggtgacagacagacttggggggcctggaggagctcagcaccggcgcgttggcccagaggaccggggc

SEQ ID NO: 35229 - DNA, 34 bp, Homo sapiens; identical to SEQ ID NO: 17196
  chr1:19518000-19518034
  hypo

SEQ ID NO: 35230 - DNA, 398 bp, Homo sapiens; identical to SEQ ID NO: 22986
  chr1:200009765-200010163
  hyper

SEQ ID NO: 35231 - DNA, 311 bp, Homo sapiens; identical to SEQ ID NO: 17197
  chr1:201228906-201229217
  hyper

SEQ ID NO: 35232 - DNA, 382 bp, Homo sapiens; identical to SEQ ID NO: 17198
  chr1:203595808-203596190
  hyper

SEQ ID NO: 35233 - DNA, 72 bp, Homo sapiens; identical to SEQ ID NO: 17199
  chr1:203690606-203690678
  hypo

SEQ ID NO: 35234 - DNA, 640 bp, Homo sapiens; identical to SEQ ID NO: 22988
  chr1:20512360-20513000
  hyper

SEQ ID NO: 35235 - DNA, 95 bp, Homo sapiens; identical to SEQ ID NO: 17201
  chr1:205631157-205631252
  hypo

SEQ ID NO: 35236 - DNA, 817 bp, Homo sapiens; identical to SEQ ID NO: 16205
  chr1:205631783-205632600
  hypo

SEQ ID NO: 35237 - DNA, 384 bp, Homo sapiens; identical to SEQ ID NO: 24800
  chr1:20618155-20618539
  hyper

SEQ ID NO: 35238 - DNA, 112 bp, Homo sapiens; identical to SEQ ID NO: 17203
  chr1:21690437-21690549
  hypo

SEQ ID NO: 35239 - DNA, 983 bp, Homo sapiens; identical to SEQ ID NO: 24813
  chr1:226411007-226411990
  binary

SEQ ID NO: 35240 - DNA, 996 bp, Homo sapiens
  chr1:228195275-228196271
  binary
cgagagagaattcgccggagactttcctcaaaaaccgtatcttacacacaaacacacacacacgttttaaaacaaagtcgatgagacaagactgaacagctcggagcagcgtggttacgtaaagaaagctgggacccggcggggagtggcgcagagccggcggcggggcgcactgggggccggccctgggccccgcgcgcctccccgccgcagtccgggcacgggggtttccaggggccctctctgcgagccctccgcatgggtccacctggcaatgaggggctgctgtagagagagttaagggtgagttaagcacggggtgtgaggggctccaggaccctcaatcagaaagcgctgtgctgcgccctccacaccagaaaaggcgcgttccgtgagaccctccccagcctggcgatggaagtgcagataaaccaaaggaagggtcccgaaaggtctctctcaggcctcccacctccactgcacatatcctgtgggagggggaacggtggccacactttcgccagggcttgtgatccctcagagccctcaccaagcaaggatcaccccagttccgaattaagggcgctctgagatgcccaagattgaggaacacaagtgggaggaatgtgggcgcgcagggccgggcgcagcgctggtaggacccacagttggagagaagcctccccacaagcatgcacactcccccccatccttctccgacggcagcctggaattataataattacgccgaggggaaggggggagacccagcgagccgaggtacatctaatccgataataatttttctcttcgagatggttcaggagcgggggctcccgcggtaggggcgccgggccaggagcagcggggaggggaaggggcagccctaggcagctgaagggcctggaagaggccacgaggccgcggggacgcgcttcggggacccccgcgcgcccctatttccgcgtgccccatttcccgtgcggcacctgctgc

SEQ ID NO: 35241 - DNA, 559 bp, Homo sapiens
  chr1:228225442-228226001
  hyper
cggccgactccccgccgcgtccggctgggagcacaatatcccagcgacggcgacaagattaagcacaaggggagagtgcaaatgcgcgggcggttcacacgcccttcgcggtgctgaattaaagcgtctgaatggggatttcccctcgcgccggacggcctggcgcgcggcgcatacttccaggttgctatgactggcctgcgctcgcctaatcaccgactagggggaaattcatataaaatatcgccggccattgtgggcctaactcggcgtgacagtggcgcacaaagccggattcaagcgccccagcgggtcagcacggcgcccggccgcgcgggccgcccggcggtgtcaggggccgtggccgcggtggggcgcgggccgcattccgctctcaggtggctccggggccttttgtgcaggccatgattaccaaatgccaccgcgacaccccctcccggccgcctggctcctcctggggccgcaggaatgagggaaggtgggcagcccccgaggggaggcgcccgggcgtcggctccggcgggctccggcggggacc

SEQ ID NO: 35242 - DNA, 160 bp, Homo sapiens; identical to SEQ ID NO: 17206
  chr1:23411446-23411606
  hypo

SEQ ID NO: 35243 - DNA, 46 bp, Homo sapiens; identical to SEQ ID NO: 17207
  chr1:244857971-244858017
  hypo

SEQ ID NO: 35244 - DNA, 727 bp, Homo sapiens; identical to SEQ ID NO: 30791
  chr1:244893329-244894056
  binary

SEQ ID NO: 35245 - DNA, 268 bp, Homo sapiens; identical to SEQ ID NO: 27432
  chr1:245772586-245772854
  hypo

SEQ ID NO: 35246 - DNA, 1819 bp, Homo sapiens; identical to SEQ ID NO: 32417
  chr1:2460612-2462431
  binary

SEQ ID NO: 35247 - DNA, 911 bp, Homo sapiens
  chr1:24648226-24649137
  hyper
cgggtgtaaggcggcacttcgaaggctggtctctgagaagcatggaggccccggcggtgtagttagaaaccagctggaggtggctggcgggtgctgagcgccgggcctttcatgtggtcgcagcgctctgggtgcctggagcccgcagccctgggcagccccgggctaccgcagggcgcaagggatcctgggctgcggccgagggcgccggaagtcgccgccgaccgcctgggtctcgcaggaaaacagccggcgcccgcgagctgcccagcgtcgggttttcctgaaggtgcgtcggggcccccggggagctggagccgcaggcgacctccccggtgacctgttgttcccctctggagggccggccggcgctccaggcaggccccgttgacagcccaggaagggagagtttcgccgcaaaggggcttggcacacagtaggtctaaggcaccgaggcaggagcgtcccccgcggcctcgctccctgctctctgggccccaccgctgccgcctggagtctcccctcagcctcgcagagacgcgactcggttgggggaaggggactagaaccgtcgcagtcctgaccgcggccgccgccgccgttctatctgatctccaggagcgccggctccagactgcctggagcgctgaaagagttaatcaggaacgcctccccgctgtggttttgtggtcgaaaccatgattgccaggagcaaatttttgtcgtgcacgaggtgtgttattaaaagtcggagctacgctgctgctgaatgaaaagttaaaagccctctttgagttcgggctgtaaaactggcggactgggccgagaggcttgagccaaccctaacggcggcggcccgggcggcgcgggggtcctgcggctccgccagctgctgggagcgggcaggctgc

SEQ ID NO: 35248 - DNA, 1269 bp, Homo sapiens
  chr1:25256085-25257354
  binary
cgacgggcagcgtcttgttgcagcgccagtgcgagggcagcacggagcagaggaagttggggctgtcggtgcgcacgagctcgcctgcgtggtccgccagcacgtccaccatcgagcgcacctcgggccgggcgcgccctccgggccccacggccgcctgcgcgctcagcgcgccgctgttctcgcccatcttgccgccgccgccgccgcaggggaaggccggggagggaggtgtgaagcggcggctggtgcttgggtctacgggaatacgcataacagcggccgtcagggcgccgggcaggcggagacggcgcggcttcccccgggggcggccggcgcgggcgcctcctcggccgccgctgccgcgagaagcgggaaagcagaagcggcggggcccgggcctcagggcgcagggggcggcgcccggccactactcgccagggcccgcccgctgcgaggcctcgctggcccgacggccgcccgcagcctgcccggctagtcccgcatcctcggcgcgcggccccgcgtgcggccgcccctcgtggctgtcccggctgcctgggccgcggcggggcccgcgcggggctgtgccgctgccgccgcctcccgccccgaagctcgcccgcggccgccccgactccgcggccgcagccccagaacaaatcctccagaatcaagtggcggggccgcggccgcccgcgcggggttagtacccccggggcccgcggggcggggctggcggagcgacgcgtcgcacagccaatcggcggagcccccatcgcgggcacctcggtggcgttcgcggggaggaacggggcctgccggaggccgcccaacggggaggggcggaaggcgccaccccgcggaggaggccccagtgccacagcccagggcccccgagagctctgggagcccggggcaaatgctagaaatttgcttagaacgtccgggtcccacggaaggcgcccttgccgccctctctcgggtcgtagctccctgacgctggggcgcaaccccttcgctcctcctccccgctggccgcggccgggcttccccagctcttgctgcttcgggcctgtgacttctgcaaccccgggctgggggccgcggggtctcagggccggtgacgccgcactgggagccgccccaaagaggttactcacctccctcgtcccgcacattattctgacccaagagcctccaccccacacgggattttgcgcgtcgtccacgcccggccggcggcctttgctgctcccagccctgcgc

SEQ ID NO: 35249 - DNA, 88 bp, Homo sapiens; identical to SEQ ID NO: 17212
  chr1:27058003-27058091
  hypo

SEQ ID NO: 35250 - DNA, 685 bp, Homo sapiens
  chr1:27113559-27114244
  hyper
cggcccctggcttcgtttggagggcagataactgaaaccacataaggctttggaatcctgagaaacaagaaatccaccaacggagaaggatttatcatctgtttcctttaaggagggtgcaaagttgttctaacagtttccgttacaagggtacaaactggccgctccccccaatagacggttttgttgagttcgcctctttttttttcttctttttttggccccacttcctatgagagaaactgcttgggtgagggaggtgaaaggagccctggagggtgttctctgaggttttcttcaccatcctcattagccacctgaggtggggctgaggactaaagtaggacagaaggtctctggtagatagaggaggggaaaatcagggggatcccccactttcttcacacccaggacgcagggtgccgctgccggccacagaaaccccaagaatgtttttctttggctattcagaggacatctattgtgtgtcaggccctgtgctgagctgttgttgcctgacagcaggaagagcgcggctctggtttctgtgaagaggctgcgggtcagcctccgactacaagagcctcggcccacaccgggaactcagtgaacgtcagcgggagctggggcaagagcactgactctgagacagcagcctccgctcactatttgaaggcggggtggc

SEQ ID NO: 35251 - DNA, 825 bp, Homo sapiens
  chr1:28198925-28199750
  hyper
cggggggcggggcttcggcggggcggggctgcagggctcccgcgggctggcggggcggcttcggcgtgcggggcggggcatcggcggggcggggctgcagggctcccggggaccgcccgcccgcccctcagtctgagcccagagagccgcggggaccatggagccggtgccgctgcaggacttcgtgcgcgccttggaccccgcctccctcccgcgcgtgctgcgggtctgctcgggggtctacttcgagggtgagcgggggctggaacccctccgagcactcccttggtgtggggcgggggcagagacccggagaagacgttagcaatccggggaaactgcccctgggttcaaatcccgacactgccactggccaagctgtgtgatttggggccgcactcaacctctttggacctcggcttttgctttcgtggaacggggaccgctgacctgccccgcagggtagtgatgaaaagtcagtgggttgaggcgcgggaggtggatgcagccgggccactcctaggtggccccgcggtgcgcatgggacagagctccgaccgcgccgggacgcagcattaggccgctggtggtcgtggctgcgtcttgattctgaagtgcagggtcagtcttcccgtctgtgtcctcccactcctcccccggccctcctctacactgccttccttcagtccctgcgtccaccttggccttctgtttgaccatgggcagtacttgatttgatcagctcttcagttctcagcttaaatggcgcttcctcccggaagccttcctggctctctgctccttgcacgcccccgtacatctgcc

SEQ ID NO: 35252 - DNA, 41 bp, Homo sapiens; identical to SEQ ID NO: 23721
  chr1:29061373-29061414
  hypo

SEQ ID NO: 35253 - DNA, 589 bp, Homo sapiens; identical to SEQ ID NO: 23726
  chr1:32410105-32410694
  hyper

SEQ ID NO: 35254 - DNA, 393 bp, Homo sapiens; identical to SEQ ID NO: 17217
  chr1:33937934-33938327
  hyper

SEQ ID NO: 35255 - DNA, 138 bp, Homo sapiens; identical to SEQ ID NO: 17218
  chr1:35650183-35650321
  hypo

SEQ ID NO: 35256 - DNA, 863 bp, Homo sapiens; identical to SEQ ID NO: 22998
  chr1:36042841-36043704
  hyper

SEQ ID NO: 35257 - DNA, 125 bp, Homo sapiens; identical to SEQ ID NO: 7722
  chr1:3697578-3697703
  hypo

SEQ ID NO: 35258 - DNA, 877 bp, Homo sapiens; identical to SEQ ID NO: 33216
  chr1:3700211-3701088
  hypo

SEQ ID NO: 35259 - DNA, 307 bp, Homo sapiens; identical to SEQ ID NO: 7723
  chr1:3705404-3705711
  hypo

SEQ ID NO: 35260 - DNA, 1095 bp, Homo sapiens
  chr1:40781107-40782202
  hyper
cggcgtccttgtggtgcgggccggcgccgcctattggcgacgaggggcactacatctccgggcaccccgaagtccccacccccaccacagcgctcacaaagttctcctttgtctgccgcctccctcccgccctggtctcaggttagagacttacgtcgatgccgtcggatccaggcactcccggcggtcccgggggacccggggggccccgctctcccggtggacctctctgaaaaacacacacggggtggggcagtcctcagacagtgcaggaagctgggcgtccccggggctgcaagcgaccctgggagcggggtcctaggggcgcagctcttccgcgaactcccacgtattgagaatcttctgtatagcaggcactgtgtgccattacatgcattcattatcttacagaatactcagaaccgggaggcgggcgctattacgggccccagtttgcagtcgaagaaactggctcagaacgtgaagggtccatggtcactgagagtgggcggcggcgccaggagtccgccctggatctgcccgactccttccactgtgccagtttgcccttgcgcggtcgcggtggggaatagatggagacgtggacagctcaaataaatcacagatggaatgtaaggttgtgcctagcaggctgccggccctcagtgagcggtggctcgggttgttgttcttacgtgaacgacaggcagagacagcgcctcctcctctccccatggtgcgggaaaacccgacgggaaagtgggggaggcgcagagaaaggaggtgtagggaggtgaagcgggtactatcttcccactcggagcgccccttcggcagcacagctgcccggtcctccctctgctaagccctgactgctgcaggggagcaggaggagccggcacctcccagaaagcagaccctctctctggatcccgtttgcctgcaattcaatgcccctgggtgggtgtgaggtttcagggaggtcacaagtcatatcaagatgaggcgagctcacagctggagagtctccatcctgctgcccatctctgaacagatcagagatcttaaaaggcggcccttttaagaggccagctc

SEQ ID NO: 35261 - DNA, 916 bp, Homo sapiens
  chr1:41326952-41327868
  binary
cgagggggagaggacacgatccaagaaccagagtccgaaagctgaagctggtccggtctctttcactttacggccgaggctggggtcagagaagtgaagccaaactgtcctcccgcaggaggcaaggcctggagggacgccagggtcccagtccggtgccgggccctgcgcacacagccgccgcctccaccctcgcggagggcgcgcgcggggcccagtcgctgggtgcagggtccggcgggcagtcgggccctttctcctctccggcacgccgggcgggcgccggccgccctcagcagctcacggagccggcgggcggcgcggaccccaagtccgagaagcagtcgaactcgctctggcccaggaagagctcgggcagctcgcgcacgcggtgcagcccgagctccagctccagcgacgtcagcgcctcctcgtcgatgagttcggcgtccatgccgcccagggcgtgcgcgggcggcggcggggctgcggcgcttggcgccggctgcgggcccggggggcctcccggagcgttggggggcgcggccgcgcggccggggtacggcgtcgccacaggctgcaggtgcgcgatgcccgcggccggcggaggcacggccggaaagggctggaaggaggacggcggcccgaaggccccgtacgccagggccccgggttggcggggcggcggcggccccagcggagccccccgcggcctcagcccactgtccaggcccgggcccgcgtacggcggcagagtccggagcgcatgagggccatgggcggccgcggcggacggcggcctctgcaccaggcggtagccctcggcgagcatcaggtggtcggccatggcggcaggccggctgcctgcggggacagcgcgcggtggtcagcgccggctcccccggcccgggccagc

SEQ ID NO: 35262 - DNA, 254 bp, Homo sapiens; identical to SEQ ID NO: 17227
  chr1:44170219-44170473
  hypo

SEQ ID NO: 35263 - DNA, 317 bp, Homo sapiens; identical to SEQ ID NO: 17228
  chr1:45284969-45285286
  hyper

SEQ ID NO: 35264 - DNA, 784 bp, Homo sapiens; identical to SEQ ID NO: 17229
  chr1:45285419-45286203
  hyper

SEQ ID NO: 35265 - DNA, 335 bp, Homo sapiens; identical to SEQ ID NO: 17230
  chr1:46908450-46908785
  hyper

SEQ ID NO: 35266 - DNA, 620 bp, Homo sapiens; identical to SEQ ID NO: 32429
  chr1:46954676-46955296
  hyper

SEQ ID NO: 35267 - DNA, 993 bp, Homo sapiens; identical to SEQ ID NO: 23743
  chr1:47696310-47697303
  hyper

SEQ ID NO: 35268 - DNA, 836 bp, Homo sapiens; identical to SEQ ID NO: 17233
  chr1:48937304-48938140
  hyper

SEQ ID NO: 35269 - DNA, 888 bp, Homo sapiens; identical to SEQ ID NO: 24861
  chr1:52194847-52195735
  binary

SEQ ID NO: 35270 - DNA, 767 bp, Homo sapiens
  chr1:53067880-53068647
  binary
cggggcaggggtgcgctgcctcaggacagacggtgaaactgaggtccagagccggacatccaccgcctgcggagggaacgagaacgcggcgcgtcctgccttgcgggccgagcggcgccagagccgcctcctcccgccccccgcgctagatccccccgccccgtctttgccctcgcgacgccgccacctccggaacaagccatggtggcggcgacggtggcagcggcgtggctgctcctgtgggctgcggcctgcgcgcagcaggagcaggacttctacgacttcaaggcggtcaacatccggggcaaactggtgtcgctggagaagtaccgcggatcggtgagtgcgcggggtctggcggcgccgctgggcccggcctcgccctggcggggcctgctggggacgccccgcagcccggtcccccgcgcggtgtggctccgaggacgctccagccgcgcggccgccaaaccccggcccccgccccgctcggccgtgacctctggcgcggcgcccccatcccgcgcccggcccggcccggcccgcggctacgtggcacggccttggcgcggaggaacccgaagcgctcgcagtcggcgcccacttcgctaccggcacctttgggcagcggggtccagaccttcgccgggaggccgggcaccactgcccagcctttgccattcacgggtgaaaaaagtaaccgtagcatcgtgcggcctttccctctcccgtcctcattttctgcatctggaacggggagtggctgattc

SEQ ID NO: 35271 - DNA, 506 bp, Homo sapiens
  chr1:59612305-59612811
  hyper
cggagaaacttcagagcggcaggtgccttcgtttcccgttacctgctgagtctagtcccttccagggcacacagtgggcgcttagtaactgtagaaagaagtcgaacgaaatcggaagggggagaggcagaggccacaatcaagacacggaaacgacagtcagtcgaggcagcagagagggtttcacgcgggccagcggaggcgcagggcagttgagaagggaacttgccacggggcggaggggccgcgctccccaccagcgcggcgcgggggcgctaggccagggaccgccgggccagggaccgccggctgcgagcagcgggaacggacctgccccgggtcgcagcggtttttcccgggcggggctgaggctgcagggaggcgggcgttccggcggagggtcacggcctcgccgccgggactttcctggggtggaggtgtgagcacgtaggagccctggcctttccaacttcccaggtcagactggggctgggaccaccctgcgc

SEQ ID NO: 35272 - DNA, 212 bp, Homo sapiens; identical to SEQ ID NO: 24864
  chr1:6046186-6046398
  hypo

SEQ ID NO: 35273 - DNA, 51 bp, Homo sapiens; identical to SEQ ID NO: 17239
  chr1:61716891-61716942
  hypo

SEQ ID NO: 35274 - DNA, 776 bp, Homo sapiens; identical to SEQ ID NO: 23006
  chr1:63795363-63796139
  hyper

SEQ ID NO: 35275 - DNA, 227 bp, Homo sapiens; identical to SEQ ID NO: 17240
  chr1:6474528-6474755
  hyper

SEQ ID NO: 35276 - DNA, 940 bp, Homo sapiens; identical to SEQ ID NO: 24869
  chr1:6479997-6480937
  hyper

SEQ ID NO: 35277 - DNA, 293 bp, Homo sapiens; identical to SEQ ID NO: 8915
  chr1:65431047-65431340
  hyper

SEQ ID NO: 35278 - DNA, 734 bp, Homo sapiens; identical to SEQ ID NO: 32440
  chr1:65468262-65468996
  hyper

SEQ ID NO: 35279 - DNA, 585 bp, Homo sapiens; identical to SEQ ID NO: 32443
  chr1:70035044-70035629
  hyper

SEQ ID NO: 35280 - DNA, 73 bp, Homo sapiens; identical to SEQ ID NO: 24873
  chr1:70710367-70710440
  hypo

SEQ ID NO: 35281 - DNA, 62 bp, Homo sapiens; identical to SEQ ID NO: 17248
  chr1:78463737-78463799
  hypo

SEQ ID NO: 35282 - DNA, 155 bp, Homo sapiens; identical to SEQ ID NO: 17249
  chr1:85743342-85743497
  hypo

SEQ ID NO: 35283 - DNA, 750 bp, Homo sapiens; identical to SEQ ID NO: 30857
  chr1:90308855-90309605
  binary

SEQ ID NO: 35284 - DNA, 1111 bp, Homo sapiens; identical to SEQ ID NO: 30872
  chr10:101290132-101291243
  hyper

SEQ ID NO: 35285 - DNA, 768 bp, Homo sapiens; identical to SEQ ID NO: 17252
  chr10:102791390-102792158
  hyper

SEQ ID NO: 35286 - DNA, 225 bp, Homo sapiens; identical to SEQ ID NO: 17253
  chr10:1053566-1053791
  hypo

SEQ ID NO: 35287 - DNA, 953 bp, Homo sapiens
  chr10:106097237-106098190
  binary
cggtggctttttttttctttttctttttctttttttaagagaaagcgttttggatggggagtcccgccccgggagtcttcaccaggcggccagaatggcaaagtcacagggatggggttgagggtggggttaggggtgaaggggcagagagttatttgcagcccaagagcaagtctgcacagcgtgaggtctggcccactaatagtcccgaaagaggaagcggcggggattttatccggcctgaagcagccccataacttcactaccatgaaccgagaaaaaaaaacttcacgcctattcctcccttacaggaagggagggaaggggaaggggaaaagggggcagcaaatgagcagggcgaaccggcttttctttcttcggtagcgctctgctcagatgtgagaagtaacgggtcacctggccactaggaacaaaaatgtggtcccgctctgggctccgaggctgcgcgcgcctcgaggaggagctgcccgcagccctggctggagcgagcgcccgggacgcatcccccgacgcggcgggaacaggatgcgggaccgcgaggagacaatacgcccgcctgggcacgcgcgctttaagggaagggggtctccaaagtcagcccccacccgggaggagcaggcgcccgcgctccccacaccctcctgcgccccctctgtcggcagccatctccgacacagctcctccgagctcgcgctctccatcgcgcccttcttccttcagcacactaggctgccctgggacttacgattggcttgggtccccggtcccggtccccgccgcgggaggacggctccagcacaggctttgcgcgcaggtcgagggccgaggcgccgctgcttgcaggcggctgcggtggagcttgcggcccggcacttagaggggcgcgggcggcgatgcccccgctggctcccaccttctggcctgcagcggcc

SEQ ID NO: 35288 - DNA, 737 bp, Homo sapiens; identical to SEQ ID NO: 7757
  chr10:111767130-111767867
  binary

SEQ ID NO: 35289 - DNA, 164 bp, Homo sapiens; identical to SEQ ID NO: 7758
  chr10:114200406-114200570
  hypo

SEQ ID NO: 35290 - DNA, 208 bp, Homo sapiens; identical to SEQ ID NO: 17258
  chr10:114591706-114591914
  hypo

SEQ ID NO: 35291 - DNA, 654 bp, Homo sapiens; identical to SEQ ID NO: 13204
  chr10:114708972-114709626
  hyper

SEQ ID NO: 35292 - DNA, 137 bp, Homo sapiens; identical to SEQ ID NO: 17260
  chr10:121702253-121702390
  hypo

SEQ ID NO: 35293 - DNA, 975 bp, Homo sapiens
  chr10:12390701-12391676
  binary
cgaggggactgcggggcagacgatcacttctttccactgagtctctgggaggagacagggagatgccagaaggggccaagcgtgagccagggcaaccaggccggccaggcccgccggccgctccagcccagcaccagggcgcccgcgcggctgccaaacacccccgggagttttgctcgcaaagggaccacgaggcagctgctggcgcgtcctgcgcgtacccgcccagaggctccccggcttgctcctcgcgggtctgtcccgaaactgacgtgaaaccgatttggtgcaatgcgaatgagctcccgcccgcctccgcctccatcccagccgccgccgccgcccgtcgccataacaaccggcccccaccccccccaccccacgccttgcccctcgggtcccccgggccacaggccacagcgcgggaaggcgccccgccctcggcgccccgcatccggccgccgcgcacccccgcccgcccggcgcttccgagccacgcagaggcgccccctcccgccggagacgggaaagccccggcgcccccagactgggctccgtttccagctcccggaggggctggggctctcccgcgtgcgccccgcacctgccgggggcccgtacccgccctcgccggggctccagggggcacgacggccgtggcccggcgctcttgggaggggagcgggacatccccgaaggcggcgcgctggaggcggggagcggccggggcgcacggagagggcggggagcccgcgggagggggaggagggggaggagggggaggaggcgcgaggtgggggggagcgcggcgggcggcagggagggagcgggagggaggcaagaaagtagcagaaagtgaggctggcaggcggcggcaaaggagccggcgcgcggcggcggcaggaagtctgtgcccgagaacagcagaaataagagccagggagggaccgcggccgcggcggcggcggcgagagc

SEQ ID NO: 35294 - DNA, 1349 bp, Homo sapiens
  chr10:125851161-125852510
  hyper
cggagccacacttcattcccgagaactcggtacaattaacttaaccaacgtgaacaaggcgaaggcgcccagctgtcacagcggctccgcgcacgcaggcagacgaagaagggcccccgcccccaggagctggtcccagcctccagcctggcagcctccttcgaagacttccctacactgggcgcggacctccagccgccagcagccggcaacccagccccagccttcctcctctatacccgccgtcccagccgcgccggccggccccgggcgcagggcgggcgggaacgtgggcacccggacagcgacggggaggtcaagcagctgtgcccaggacccgggcggctccgaagcctcaacacgcacacactcgcgcgcacgccggcccatcggttgcctggaggagtcgggaaggtgcttccacggctcttcattcattttcccaaaggcaaggttcccttcgccccggcgcctctatcctgccatcccagggggccaattgcgccacagcccgccacccagccacccacagccaccgcgtcctatctcccggcacacacaacccaacagactcgcattacatctccaccgccagcgtcgcctccgcgccccggccgctgccatccggctccccagcttcgccgccccgcagccccggctccccgcctctggcctcaccgcgcggctcagagctgcctcgctcggctcgccgcaccaaggccggccagagacgccgccaccgccgggaagcgccggcaactcccgagtcacgccgcctcccgagacgcggcggggcgcagggaggggacagcagtgggggcggggcggggaggaggaaggaggagggggcggggagcaaaagttcacaccgctcggggctcagccgctcccctatctcttcccaggcccgcccccgccatcccccttccctgaaccgggtcccacgggcttaggcgcgggagagctctggcctccccgcccggaaccgccgcaaggctagagccagggttctggaagcgcatccgagctcgcaaccggggagagagtggcggatgcccacttacctgccccgggccgcgcctggaaacttccccaaagtgcgataggggtgtgggggcggagcgcaaggctggggggaatccccgtcccctaccgccaaacgacgcgcgctcacaccgtgaaagcactggtctgtccgtcggtcggtcccccgcctgcggctcccagagctgggcggtgcaggggcgccccgattccgactactgggctccttctcccggacagcccgccggtgcgttccacgcggcttgcgccccccgccggcctccggctatccacggcgccaccac

SEQ ID NO: 35295 - DNA, 48 bp, Homo sapiens; identical to SEQ ID NO: 17264
  chr10:126190228-126190276
  hypo

SEQ ID NO: 35296 - DNA, 143 bp, Homo sapiens; identical to SEQ ID NO: 17265
  chr10:127415629-127415772
  hypo

SEQ ID NO: 35297 - DNA, 382 bp, Homo sapiens; identical to SEQ ID NO: 24905
  chr10:133783038-133783420
  hypo

SEQ ID NO: 35298 - DNA, 86 bp, Homo sapiens
  chr10:135170736-135170822
  hyper
cgggaagttcaagtccgcaagaactaaacagccgggaggacagcccgtgtcggcacctatccctgccctcggggtcggcgccgccc

SEQ ID NO: 35299 - DNA, 225 bp, Homo sapiens; identical to SEQ ID NO: 17267
  chr10:1651074-1651299
  hyper

SEQ ID NO: 35300 - DNA, 2263 bp, Homo sapiens
  chr10:17270086-17272349
  binary
cggacgtcgagtttcctctttcacccagaattttcagatcttgtttaaaaagttgggtgtggtttcatggggggagggggaagagcgagaggagaccagagggacgggggcggggactctgcaagaaaaaccttcccggtgcaatcgtgatctgggaggcccacgtatggcgcctctccaaaggctgcagaagtttcttgctaacaaaaagtccgcacattcgagcaaagacaggctttagcgagttattaaaaacttaggggcgctcttgtcccccacagggcccgaccgcacacagcaaggcgatggcccagctgtaagttggtagcactgagaactagcagcgcgcgcggagcccgctgagacttgaatcaatctggtctaacggtttcccctaaaccgctaggagccctcaatcggcgggacagcagggcgcggtgagtcaccgccggtgactaagcgaccccacccctctccctcgggctttcctctgccaccgccgtctcgcaactcccgccgtccgaagctggactgagcccgttaggtccctcgacagaacctcccctccccccaacatctctccgccaaggcaagtcgatggacagaggcgcgggccggagcagcccccctttccaagcgggcggcgcgcgaggctgcggcgaggcctgagccctgcgttcctgcgctgtgcgcgcccccaccccgcgttccaatctcaggcgctctttgtttctttctccgcgacttcagatctgagggattccttactctttcctcttcccgctcctttgcccgcgggtctccccgcctgaccgcagccccgagaccgccgcgcacctcctcccacgcccctttggcgtggtgccaccggacccctctggttcagtcccaggcggacccccccctcaccgcgcgaccccgcctttttcagcaccccagggtgagcccagctcagactatcatccggaaagcccccaaaagtcccagcccagcgctgaagtaacgggaccatgcccagtcccaggccccggagcaggaaggctcgagggcgcccccaccccacccgcccaccctccccgcttctcgctaggtccctattggctggcgcgctccgcggctgggatggcagtgggaggggaccctctttcctaacggggttataaaaacagcgccctcggcggggtccagtcctctgccactctcgctccgaggtccccgcgccagagacgcagccgcgctcccaccacccacacccaccgcgccctcgttcgcctcttctccgggagccagtccgcgccaccgccgccgcccaggccatcgccaccctccgcagccatgtccaccaggtccgtgtcctcgtcctcctaccgcaggatgttcggcggcccgggcaccgcgagccggccgagctccagccggagctacgtgactacgtccacccgcacctacagcctgggcagcgcgctgcgccccagcaccagccgcagcctctacgcctcgtccccgggcggcgtgtatgccacgcgctcctctgccgtgcgcctgcggagcagcgtgcccggggtgcggctcctgcaggactcggtggacttctcgctggccgacgccatcaacaccgagttcaagaacacccgcaccaacgagaaggtggagctgcaggagctgaatgaccgcttcgccaactacatcgacaaggtgcgcttcctggagcagcagaataagatcctgctggccgagctcgagcagctcaagggccaaggcaagtcgcgcctgggggacctctacgaggaggagatgcgggagctgcgccggcaggtggaccagctaaccaacgacaaagcccgcgtcgaggtggagcgcgacaacctggccgaggacatcatgcgcctccgggagaagtaaggctgcgcccatgcaagtagctgggcctcgggagggggctggagggagaggggaacgcccccccggcccccgcgagagctgccacgcccttggggatgtggccggggggaggcctgccagggagacagcggagagcggggctgtggctgtggtggcgcagccccgcccagaacccagaccttgcagttcgcatttcctcctctgtccccacacattgcccaaggacgctccgtttcaagttacagatttcttaaaactaccactttgtgtgcagttgaaggcccttgggcacaatgagagccagtcctccaaactttcagaaagtttcctgccccttctggcaggctgccaatcaccgggc

SEQ ID NO: 35301 - DNA, 1465 bp, Homo sapiens; identical to SEQ ID NO: 24911
  chr10:22541133-22542598
  binary

SEQ ID NO: 35302 - DNA, 87 bp, Homo sapiens; identical to SEQ ID NO: 17270
  chr10:22883126-22883213
  hypo

SEQ ID NO: 35303 - DNA, 54 bp, Homo sapiens; identical to SEQ ID NO: 7769
  chr10:27825982-27826036
  hypo

SEQ ID NO: 35304 - DNA, 584 bp, Homo sapiens
  chr10:31422647-31423231
  hyper
cggggagaagggcctcgtgggccagcgcagcttgctcctctgcagacccagaagcatttgtgcgtcccgggcgtggcaggcccggcgcccactccgccctcccgcccctcccccgcgccacgtcacccgggtcacgtgagtgaccaggctcctcaccccaacccccctccctactcccgccagactcagctgctctccccgggagctggggagccgggggcgggcagccgcgtctgtcctgcccctcctcgccccctcccccgcagcctgaggagggcgttaagcaaggggcttcggagaaattagaaccagcgttctaaattaaggggagcagatgtccttgttttgctcgcgaggcctgggtggcctgctgttcagacagaaatcgttgaggcgctgaccttccgggactgctgtcaatctccgcgtgcagatggccagcccggagcctcgccgctcccctgcattggaaatgcggcagccgggggtgccggcagcttgagagaaaagtctgcgtggagggggggtgggggggatgaggggaggcccggggagacagagggcaggagaaaaaggccggcccc

SEQ ID NO: 35305 - DNA, 121 bp, Homo sapiens
  chr10:35152237-35152358
  hypo
cgttatcaaataacaaatacttaatttcttttctttttttttttttgagacggagtcttgccaccatacctggcctatttacaggcatcctgtttaagagatgtttcaggccgggcgcggc

SEQ ID NO: 35306 - DNA, 738 bp, Homo sapiens; identical to SEQ ID NO: 34146
  chr10:52177724-52178462
  binary

SEQ ID NO: 35307 - DNA, 552 bp, Homo sapiens; identical to SEQ ID NO: 23777
  chr10:5874790-5875342
  hypo

SEQ ID NO: 35308 - DNA, 95 bp, Homo sapiens
  chr10:60026209-60026304
  hyper
cgtgacttcaggcacgtcattcttaaccagggttggccttagtcacctcgtctaaaaatgtcagtattagcaacctaaacccgaatcgttttacc

SEQ ID NO: 35309 - DNA, 139 bp, Homo sapiens; identical to SEQ ID NO: 17276
  chr10:70218986-70219125
  hypo

SEQ ID NO: 35310 - DNA, 755 bp, Homo sapiens; identical to SEQ ID NO: 24926
  chr10:73846836-73847591
  hyper

SEQ ID NO: 35311 - DNA, 377 bp, Homo sapiens; identical to SEQ ID NO: 17279
  chr10:74020611-74020988
  hyper

SEQ ID NO: 35312 - DNA, 650 bp, Homo sapiens; identical to SEQ ID NO: 32468
  chr10:74079281-74079931
  binary

SEQ ID NO: 35313 - DNA, 172 bp, Homo sapiens; identical to SEQ ID NO: 23781
  chr10:74451119-74451291
  hypo

SEQ ID NO: 35314 - DNA, 102 bp, Homo sapiens; identical to SEQ ID NO: 6754
  chr10:76287784-76287886
  hypo

SEQ ID NO: 35315 - DNA, 155 bp, Homo sapiens; identical to SEQ ID NO: 17284
  chr10:7871238-7871393
  hypo

SEQ ID NO: 35316 - DNA, 76 bp, Homo sapiens; identical to SEQ ID NO: 17285
  chr10:79770259-79770335
  hypo

SEQ ID NO: 35317 - DNA, 248 bp, Homo sapiens
  chr10:88731062-88731310
  hyper
cgctgccgcccggcggggtcccgccccgccactccccggggaggggcttcggggcacggggccgtgcacgtgagaacgaagcacggttgtggggggggcatgcacgtgcgcgctcgcgtgcgggagacccctcccttccacaccacttcctttcgggacaaaccggtaacctccggccctggaaggttttgtctagtgggttccggatggactggtgttcccagcacccccccggcacgtgtccacgc

SEQ ID NO: 35318 - DNA, 256 bp, Homo sapiens; identical to SEQ ID NO: 17288
  chr10:894796-895052
  hypo

SEQ ID NO: 35319 - DNA, 667 bp, Homo sapiens; identical to SEQ ID NO: 24936
  chr10:93647052-93647719
  binary

SEQ ID NO: 35320 - DNA, 967 bp, Homo sapiens
  chr10:94449938-94450905
  binary
cggaccccggtgtacgagcccacgccgatccatccagccttctcgcaccactccgccgccgcgctggccgctgcctacggacccggcggcttcgggggccctctgtaccccttcccgcggacggtgaacgactacacgcacgccctgctccgccacgaccccctgggtaaggcggccgggcgagggtgggggcgaggaagcgccacccggcaggtggcagcgcccgggaggccgagggggcgaagggggcaggcggtagacggctgtggcaaaagcgatggaaaagcagctgtcgggcacgcgcggggacgggaggcgcgcggccggggctgaccgcaccgtgactcagattggttttcctgcaccttgcaggcgtcggggcgcgcgggccggcggtagacctcgcggcgagggcagccgtggaccgcgcgtgttacccggggtggggctcccttagcgggagggacggggaaaggggcgtcgaggcgcccctggccggcccccgtggggcagggatcgcagccgggcccgggtggctacggggctggacctggttcaacaggcttgtgcagtgaaagagcctgaccctttccgttcatacaggaaatcttgagttctcgataggagtaaatctggtttcagaagctgttaagtgttttcctggctgcatgaagcagacccttcccccggagtagtgcacgctgctgattattttatcgacatcctcaatacagacaaattcaggaaacactcgacttctgatagccgggatccgtttttctgatattgttcatttcctctgtgtgggatgtgactttatggcagctaaaataaccagttgcttcctattttttttcgaggctgttttgcaccagtctgaagcctgacgcaagcaaaatctcgaaaaaacaatgctagctttcaaagcgttgaggtgcaggcctgcagacggacggacggaccgacc

SEQ ID NO: 35321 - DNA, 66 bp, Homo sapiens; identical to SEQ ID NO: 23453
  chr10:98292781-98292847
  hypo

SEQ ID NO: 35322 - DNA, 768 bp, Homo sapiens; identical to SEQ ID NO: 23792
  chr11:111169516-111170284
  hyper

SEQ ID NO: 35323 - DNA, 785 bp, Homo sapiens
  chr11:111411887-111412672
  binary
cgttcccagtccagagttatgggggtgggttggagaatgtaggagaggtggggcagtgggcaaacctgccccagtgggtgccccttcggcccgctcctttacacgcatcgaatcagtccttgggaccacccccgcggggcaggcttgccagctggcccccgcctaccgcccgctccgggaggcggccgcagagacagcggggtagggatgctggatccccggtgccgtgggaaccctgcctgttactcctcgtctcttctgcggggttggatggctgggtcgagcgcccggtatgagagcgcttagagatcgggaaagaactccagttagtgtgggacgagccccacctgactccggggaatgactctctgcttccttcctcctgttgtgtcactgcagcctcggatttggacctcagaggaggtaaagtgctctggcttctggcttctttcagttgttctgcatgtcggggggagaacatccgtgcccttttctcagatcctttttgcgggtgccaacagcttgaccaaacgggacagaggagactgggaacctcctctactctggcatcctggcttgcgaaactaatttaaagaatgtaaagttggtttcaggatgggggcggggcggcaaaagaggtgggaagctgaattgagctgcttgggttagggctgcgtgggctctgtccttggtcgcggggaacagaaggccctcccacccttcgccttcctgcaaatgagaagagaaggacacttcctgaaggcaggagaaccagataggcccgc

SEQ ID NO: 35324 - DNA, 326 bp, Homo sapiens; identical to SEQ ID NO: 7802
  chr11:121349234-121349560
  hypo

SEQ ID NO: 35325 - DNA, 413 bp, Homo sapiens
  chr11:125133196-125133609
  hyper
cgctcccttcccgtccctagcagtgggggaagccgcatgaggaggagcggcgtgggagcaaatggaggggatctgctggcgggcctagtttaggcaaacagcagggactgctggcgacggctccagcccccactcccgcggtaacagctgcagtccagctgctggcatccctgctgggggagcgtgctaaacctctccggggtcagcactgtggtatgtcggtttccatagcaaccagccaacgggccactttctcagaacaattcccctactcagccgggttctggacttagctcagcccaagggcatgtggctgaggagcagcgcgggagggggagagctgccgagggccagactgggccccacagaacgtggctatctcagtccggtcttcgcacggagggcgtggagcc

SEQ ID NO: 35326 - DNA, 999 bp, Homo sapiens; identical to SEQ ID NO: 26193
  chr11:128564211-128565210
  binary

SEQ ID NO: 35327 - DNA, 773 bp, Homo sapiens
  chr11:129243894-129244667
  hyper
cgacagagtgaggctcggtctcaaaaaaaaaagaaaaaatctattttctctaacagcctaatgattagtcctctgggcgtgtccctccctcctagtttaatcaccggcccaggcgccctcatttacttgcttccgcggccaccagggccccctgggcaagcagctccgcagagagcccgccggcactcgcggacgcttctaggctgggagcggggaggaaatgtcaccggccccaaactcggccctagggaaggccatccgcgtctatacttctcagtgtccctgtcgtgcgttttccttccaaccccatgcacactcattccaacataaagtcgtggaaacgggcgtgcactgggctgttcccgccgaacaccgggcgcgactcaggctgccggaggcttcccgggcgcggaggctcggcggggtcccctttacgcagcaattccaatgaacaactaaagtccgtacagattttgattggaacagaccctaagactaagagcctggaaagaaaaaggcaaatcacccaataaacgcctgtcttcgcgactctctaacccggtcgtatcgcgagggatccggatattgaaagcccctttgccggaagactcgggcgctgggagaagcccgcatgggacaggctgccccagtgcccgccggctccctagaatcgtgcagctctgaccctttccaacgaggaaaaaatgtttttataaacaatgttttaaaaaaaaccgcacacttttttaaaaagtcagaatctcgctcttgtc

SEQ ID NO: 35328 - DNA, 469 bp, Homo sapiens
  chr11:13300232-13300701
  binary
cgggcaggtgcgcgtcggcctggggatgtcgcccggagcccgggtgcgggccggccttggagtcccagagctccgcggagggcgcagcgagcctggctccagctccgggtttgacagatgtcagggaagaaaaggttcccgctcggctattgccgggcgttgacatcccagagagcttcccgtttgcttggaagaagacgaggaaggtagaggtgaacgtcgaccttgtggggcgcatgttagcctccccgaggggtcgcgagagccggcagcggggtgagctcaggtgcccgccggcaggagctggggagggaaggggagtgctggacaccggcgcctgctgtcaagttctcgccggccggtgagagacccgctgccgccgcgcaccccgcacctcctgacccctctcccctctccgcctcggccccttcccggtcacctagcgttgttttggcgctttggcgcttgc

SEQ ID NO: 35329 - DNA, 739 bp, Homo sapiens; identical to SEQ ID NO: 32483
  chr11:17373019-17373758
  hyper

SEQ ID NO: 35330 - DNA, 360 bp, Homo sapiens
  chr11:17497463-17497823
  hyper
cgcacgattgtcccggccgtggcgcccaactttgcaagcaagggcgccggggtcgctgcgtcggcgagtcggagctactttgcgcagagcctgagaagttgcgctctggagacacatgcccgggtggggtggcgggggaagggaatccaagtccctagctctcgcctctcctcgcccagggcgcgggcctgggactgtcagagatcacggaccactgcgcggctcagcccggtgaaagcataggggttagctgggcctccatcccagactccaaagcacaggcttccctcttccctaggcccagctgcggctgacagggaggctgccttgcgggaggggtgacccggctccctaagctgc

SEQ ID NO: 35331 - DNA, 200 bp, Homo sapiens; identical to SEQ ID NO: 17303
  chr11:19256446-19256646
  hypo

SEQ ID NO: 35332 - DNA, 929 bp, Homo sapiens; identical to SEQ ID NO: 17304
  chr11:32915113-32916042
  binary

SEQ ID NO: 35333 - DNA, 763 bp, Homo sapiens; identical to SEQ ID NO: 17305
  chr11:35160310-35161073
  hyper

SEQ ID NO: 35334 - DNA, 847 bp, Homo sapiens
  chr11:35639582-35640429
  hyper
cggagctcggaaagaggtggaaatctgtctgaagtttgcaggagacccgcgctgcctaggcaaagggacccggcgaccaagacacccccgcgagggcccagggcgcgtccctcccgccaggccccagactccggctctgcgccaccccctcctacgccccggcgcgggcgcagccagtccggcttcctccaggcccccaagtcccggaccgagtgtggggccgcctctccctctcggaaggagccatcgccgctttaagtggaagaggagaggaagggggcgggggagcggggggcggggagcggaggcggaggagggggagggggatccccctggctcccacgtggtccgggcgcctgtgaatcgcgcccaccggagggtctcacagcgaaatacaaaagcagctgggaagcggcggggactcgagttcccagcgccgggcggagcgccggacagagccccgcagcgccccgcggccgcgatggggccgaagcgcccgaagccccggagcccacaaactgccgggcccgcctcgccgccgggacccgggtgcctgggctcggcttgaagcggcggcggcgcaccggcacagccgcgggagcatgggcaggaggatgcggggcgccgccgccaccgcggggctctggctgctggcgctgggctcgctgctggcgctgtggggagggctcctgccgccgcggaccgagctgcccgcctcccggccgcccgaagaccgactcccacggcgcccggcccggagcggcggccccgcgcccgcgcctcgcttccctctgcccccgcccctggcgtgggacgcccgcggcggctccctgaaaactttccgggc

SEQ ID NO: 35335 - DNA, 132 bp, Homo sapiens
  chr11:3828816-3828948
  hypo
cgtgagctaccgcgcctggccctcacagggtttttatgaggattaaataaatgagataagaagtaagagtgcctgggatatactgggtgttcagaatgtgttattgctgtgaggatttaagtggaaaagtgc

SEQ ID NO: 35336 - DNA, 632 bp, Homo sapiens; identical to SEQ ID NO: 24960
  chr11:46938441-46939073
  binary

SEQ ID NO: 35337 - DNA, 771 bp, Homo sapiens; identical to SEQ ID NO: 23810
  chr11:47208495-47209266
  hyper

SEQ ID NO: 35338 - DNA, 203 bp, Homo sapiens; identical to SEQ ID NO: 17308
  chr11:48061631-48061834
  hypo

SEQ ID NO: 35339 - DNA, 1225 bp, Homo sapiens; identical to SEQ ID NO: 34197
  chr11:561903-563128
  hypo

SEQ ID NO: 35340 - DNA, 677 bp, Homo sapiens; identical to SEQ ID NO: 27524
  chr11:57194101-57194778
  hyper

SEQ ID NO: 35341 - DNA, 238 bp, Homo sapiens; identical to SEQ ID NO: 24962
  chr11:57235266-57235504
  hypo

SEQ ID NO: 35342 - DNA, 50 bp, Homo sapiens; identical to SEQ ID NO: 17313
  chr11:57334786-57334836
  hyper

SEQ ID NO: 35343 - DNA, 503 bp, Homo sapiens
  chr11:58940419-58940922
  hyper
cgattcactccgctgaatcctcgcaggatcctccctcccccttaaacatccatgcaaatagtatcagtgttgtggttttgcaaacccagcttcaacctagtcggtaacaatccactccccacccctttcatgcccccgcttttcagcagttggtggccctaagtctttctatgtagaaattctagggccgccccagactacaggcaatcccagcccttcgcaaaggcttcctgccctcatcccgtggcggccggcaccttggctgacctgaccctgttttgcttcaggcacgctggggcttgccacacgtcccctcacccccgatctcactgcctctgcgtctcctgtgtgggatgcctccccgcagctgggtcctgggtgtgggaactgggggaggaagaagggattccccggaggttctcgctacagtcgggtaagggaagcgccgggctccctgggaggagagactagggctggggtaccctggacgccgcggcattggc

SEQ ID NO: 35344 - DNA, 172 bp, Homo sapiens; identical to SEQ ID NO: 17316
  chr11:60648561-60648733
  hypo

SEQ ID NO: 35345 - DNA, 564 bp, Homo sapiens
  chr11:61334808-61335372
  hyper
cgccccgccccccagagctgtccaaggtgctgaaacagctgtcggccacgcggctccttgtccttggtgctgaaacagaactcagtcctggggctgcgccctcttccaggtcgccctttgcgcagctcccagcgagcaggatccgagagactgtgcatagtgattccgccttcctctgccaatgcctccctgatcaaccctcagctgaagctatggcagcacccagtgacctcaagagccccctttcctcgagttaggtcctcggatgctgaagaccccagtcctgactcaggacaaaaagggccgccccgcgaacgtggtaaataccacgccccattccctcccgggggcccgccgcactgcctcctggtggctggcgcgggcactgcaccccggcgggcgcacagacggtccccagcggcggcctgggccagcggcgaagcagcggcagacggttctccggcccccgccgccccctcaccgctcccggggcaatctggcgctcagagcttgcggcgttgcccgacacccgcacactccagcctgtctgactgcatcctggcc

SEQ ID NO: 35346 - DNA, 844 bp, Homo sapiens; identical to SEQ ID NO: 32499
  chr11:61595885-61596729
  binary

SEQ ID NO: 35347 - DNA, 199 bp, Homo sapiens; identical to SEQ ID NO: 17318
  chr11:63828227-63828426
  hyper

SEQ ID NO: 35348 - DNA, 525 bp, Homo sapiens; identical to SEQ ID NO: 30979
  chr11:63849170-63849695
  hypo

SEQ ID NO: 35349 - DNA, 1460 bp, Homo sapiens; identical to SEQ ID NO: 24969
  chr11:64512349-64513809
  binary

SEQ ID NO: 35350 - DNA, 921 bp, Homo sapiens; identical to SEQ ID NO: 24970
  chr11:64875426-64876347
  hypo

SEQ ID NO: 35351 - DNA, 88 bp, Homo sapiens; identical to SEQ ID NO: 17325
  chr11:65420289-65420377
  hyper

SEQ ID NO: 35352 - DNA, 902 bp, Homo sapiens
  chr11:66885239-66886141
  binary
cgggccccagagcaagagattggctggggaaatgcccggatcgcggctgggctgctcgcatggcactgctcgggtacctccggccgggctccgtcgacgttcggagcctgctggcccgtcgggcagctgtcgggccgcgggagtcggtccgtgggcagggccggcgcagctcgggcggctgctgccccgtcgctgacccccgcgcgaagctgcgcgcaccaacaggagacatcttcccggccgggcctcccgcgcccgccacggcccagggcggcagggtcgggccgggggccgggggcggcccgcgcacccctccgtggggggcgccccgactcgccgggggcggggtcacgtcccacccgggccgccgggggcaccggcgcggcggaaagctgagcgtggccgaggagcgggggcttcctgggccacctcgccgggcgcctccggccggcggtgggcgcgccggccgccaccgcccccgggccgtcgcggagaccgcttctgcgcctggtacctgtggacgcccttgttaagcgcctgcagcacccccggggagccgagcccaggacagacatgctactcctgtttcctgccccttcggagcgacgagcagtgggtgaggcggggccaggccgctgcaccgaggagcccccgggcccagggcagacgggccccgtggcggcggcgccggggcctgcccgggaatggcgggcaagccggcctcggcccaccggccggcacgcgaagggagggcagccggcggccatgcgccccttccctgcgccctctcgccctgggcaggcctgagccgggagcccaggtcccgcgggcccagcccggcggcttgaccccgggagaccctgctttgaggcgggtatcggttgccctggcccaggcctccc

SEQ ID NO: 35353 - DNA, 525 bp, Homo sapiens; identical to SEQ ID NO: 24977
  chr11:67350943-67351468
  hyper

SEQ ID NO: 35354 - DNA, 188 bp, Homo sapiens; identical to SEQ ID NO: 17327
  chr11:67850488-67850676
  hypo

SEQ ID NO: 35355 - DNA, 137 bp, Homo sapiens; identical to SEQ ID NO: 17328
  chr11:688396-688533
  hypo

SEQ ID NO: 35356 - DNA, 1387 bp, Homo sapiens
  chr11:69451967-69453354
  hyper
cgcggggatgcggggtcctccccgcagtcttccggaaagggcgggggagggcgcggcaagttccggagtggggcatgccgtgggagcccacgagggcctcagcgcggatcctccgccggaaaaccggctcccgcgagccgccgccgcaggtttcctaggccccgcgagtcccgcagcgaagccctgcgtctccgtccgacgcgggggtctgctcagcctcgggtgggccgcggccaggcctgactgcgggggagagggccgaacgtgacctccgaggtcacccccagccagctttctctcctgtggtcggaagtggttttcttctcgatctgggcgcctactccccaccacttggtctgagaggggctggggccggaaggccagggaatctctggtggatttgggggttcatattgctcagggtaccagccgatgcgttttgaggggcgggagtcgaggaattagaatcgcctttaaccctcaagagttgcgccttcagcctcgggatcccagatgcgtcgttggagccagggccgcccccctacctgttgggtttgcgttttaactccagcgcacaccttgccggcagccctcggagctaggggaggggtctcgtttccccgcagcccgccggacagacgactggggcacgggaggggcggtggcagggtggtctgtgtgtggctgaaactaattgatctggagcggaaacgcacgtctgcggttggggcgatggggggggcggtgcggctgtccatgtgccgagcgtgtggctgtctcgggtgggcactggggccggagttcgccccggcccacctcgcagttttggggcgcctgggatcggcgctacgtaagcgaagcagagctgccatagcacgtgggccgccacgcgcaccccaaaagcaagcagtgtggggggaaggggagctcgagcgccttcggagcccaggggccggctttcggaagcgttttcccgggcgacttaagggcttaacaatggaaaactcgcggagcctgagccaagtcctttcaagtcgccgccaggtatgcggctgcaggtgaccccacctgggtgcgcccgcccgccagccgccctggtggaaaagcgggtgcgggaggtcgctggcgaaaggtcgggactggtccctgcaccacccgcccccaacccaagccccgagccccgcggcgcgcagccgcgctgagtcccggggtctgcgtcgcggcgcgccggttcctgaatgaacgcgctcccttcccccgcctgaatgaaggttcccacagccagggacggtggcgaacacgcgcctgcagcggaattcgctttctcctgaccgaccatccgcccaggccgcggtcaccggggcgggggccagggggcgaggaaagc

SEQ ID NO: 35357 - DNA, 373 bp, Homo sapiens; identical to SEQ ID NO: 24986
  chr11:75852075-75852448
  hypo

SEQ ID NO: 35358 - DNA, 461 bp, Homo sapiens; identical to SEQ ID NO: 24987
  chr11:76032911-76033372
  hyper

SEQ ID NO: 35359 - DNA, 713 bp, Homo sapiens; identical to SEQ ID NO: 22776
  chr11:8615303-8616016
  binary

SEQ ID NO: 35360 - DNA, 311 bp, Homo sapiens; identical to SEQ ID NO: 6799
  chr11:9554670-9554981
  hypo

SEQ ID NO: 35361 - DNA, 100 bp, Homo sapiens; identical to SEQ ID NO: 17335
  chr11:980551-980651
  hypo

SEQ ID NO: 35362 - DNA, 324 bp, Homo sapiens; identical to SEQ ID NO: 17336
  chr12:102301906-102302230
  hypo

SEQ ID NO: 35363 - DNA, 556 bp, Homo sapiens
  chr12:103311040-103311596
  hyper
cgtggtgcatctccgcacagtaacgcccctcgtgggcgttgtcctgacgcaggaggccagggcagcctgccggatgctccaggtcacctgcccaggacgggccggaggggaggggctgagggagggtgtgggggacgcaggaggcaccacttcgctgcccgccctgggtaaagggaagaagccagggagcgacgggccacccaagccccgtcgattagacaggtttaggcacttccgggactctcagaagcctgggaagcgagttctctgcaattggactaagcctgcgaccgtctggtataacaattatatgaataatccgccccccttacccccagctgaaacagtcaggattctcatttagatttttgttgttgttgttttcccttctgttaacctctaagcacactgccttgctgtgcgctgacttcagaaaactacagctagagggcacgtgaacgctgagcacagcaggtaaagagcaaatgtaagagcgatctgggtttaaatccagcctggtgttctccagctattcgcacaactgctcctgaagctc

SEQ ID NO: 35364 - DNA, 807 bp, Homo sapiens; identical to SEQ ID NO: 23835
  chr12:104609351-104610158
  hyper

SEQ ID NO: 35365 - DNA, 1311 bp, Homo sapiens; identical to SEQ ID NO: 29766
  chr12:104851507-104852818
  binary

SEQ ID NO: 35366 - DNA, 674 bp, Homo sapiens; identical to SEQ ID NO: 23459
  chr12:110352780-110353454
  hypo

SEQ ID NO: 35367 - DNA, 259 bp, Homo sapiens
  chr12:111127127-111127386
  hyper
cggctgcctcccgccccgcagggtgggcctgtcctgggcctcccgcagttacaaaggtcccgcccgtgggagcgaatcgcggatcacaaaaatcctgccccgggccagcctaagggaagggtgggcgggggaaccacttccttcctccgccggctggagcggggcgaatccaccccgccaacccctttcggggagcttctgctccatcccaccgtctccgggccacccctgcctctgggtctcctgattccttggcctc

SEQ ID NO: 35368 - DNA, 499 bp, Homo sapiens; identical to SEQ ID NO: 24997
  chr12:111844290-111844789
  binary

SEQ ID NO: 35369 - DNA, 235 bp, Homo sapiens; identical to SEQ ID NO: 17343
  chr12:112743068-112743303
  hypo

SEQ ID NO: 35370 - DNA, 350 bp, Homo sapiens; identical to SEQ ID NO: 25010
  chr12:122192684-122193034
  hypo

SEQ ID NO: 35371 - DNA, 158 bp, Homo sapiens; identical to SEQ ID NO: 17347
  chr12:124171347-124171505
  hypo

SEQ ID NO: 35372 - DNA, 84 bp, Homo sapiens; identical to SEQ ID NO: 17348
  chr12:124832004-124832088
  hypo

SEQ ID NO: 35373 - DNA, 929 bp, Homo sapiens
  chr12:124832318-124833247
  hypo
cgtgactgtacacccgttgggggcaacgagggagcagggaacagggcagtaccttgtgtgatggacccgcggatgtggtgctgctctttgaggtggtgggggctgtgtcgctccggcgggatggcacggcccatgagacctgggtaggagagggtgaggccatcattccgtggctccctgagccgacactgggcagtgacaggggtcagtgtttacagccgccagtggtcatccccacgatgatggtggagtaggacccagcacgggaaggtccctgcgctacctccagatggagcctcagaaagcccagcctcggtttccccatctgtaaaacggggtcagccatccccccaccgcccaccagggggcaccgagagatgaagtctcctccctgctatcaccttcgatgctggctgaggagatggctctgcccacgcggccctccatcatgtcataggtgcgcttgggggcggccgtctcatgggggggtcctgagctgcttctgccgtcctccttggagcactgggtcacagacatgccacctggaaaccacacaaagcactcggtgaggagctgggcacgggcccaggaccacggtgggcaggcaggacaggcagagccggtaggcaggagccagcagtgcttccatgctggccccgtcacaaagcctcacagccgaggcctccagagggagctggcagcctgcaggccctgggggcctgccagcaggacccaggagcttttccagggggttgcacggtgggagatgcagggcacgctgcctgcaccctgtaccctagccctccagggtgctctgtctgcaagcaagggtgtgcctgtgaccacatgagcacgtgagtctgtgtccacacccacgggtgccgacatggggcgtgaacaagtgcacacacatgcacgtgagcaaggac

SEQ ID NO: 35374 - DNA, 463 bp, Homo sapiens; identical to SEQ ID NO: 27555
  chr12:132423564-132424027
  hypo

SEQ ID NO: 35375 - DNA, 776 bp, Homo sapiens; identical to SEQ ID NO: 17352
  chr12:133353796-133354572
  hypo

SEQ ID NO: 35376 - DNA, 131 bp, Homo sapiens
  chr12:1716732-1716863
  hypo
cgggaacaattcaggttgaacgcatctctcctccgacatgccgagcgtctttgagtctcctcacccaggcgcacactcaggattgcagtcatctgctattgttgcctttatttattttgagacggagtctc

SEQ ID NO: 35377 - DNA, 68 bp, Homo sapiens
  chr12:2088756-2088824
  hypo
cgtgagccaccgtgcccagcccatttctcttaagtaaataactacgaacggaacttgttggatcatac

SEQ ID NO: 35378 - DNA, 235 bp, Homo sapiens; identical to SEQ ID NO: 6834
  chr12:417402-417637
  hypo

SEQ ID NO: 35379 - DNA, 1877 bp, Homo sapiens; identical to SEQ ID NO: 23865
  chr12:4377809-4379686
  binary

SEQ ID NO: 35380 - DNA, 530 bp, Homo sapiens; identical to SEQ ID NO: 32528
  chr12:46766939-46767469
  hyper

SEQ ID NO: 35381 - DNA, 939 bp, Homo sapiens; identical to SEQ ID NO: 11060
  chr12:48591606-48592545
  hyper

SEQ ID NO: 35382 - DNA, 717 bp, Homo sapiens; identical to SEQ ID NO: 34253
  chr12:49363675-49364392
  binary

SEQ ID NO: 35383 - DNA, 2132 bp, Homo sapiens; identical to SEQ ID NO: 25033
  chr12:49390799-49392931
  hyper

SEQ ID NO: 35384 - DNA, 165 bp, Homo sapiens; identical to SEQ ID NO: 17361
  chr12:49416380-49416545
  hypo

SEQ ID NO: 35385 - DNA, 532 bp, Homo sapiens; identical to SEQ ID NO: 17362
  chr12:49658702-49659234
  hyper

SEQ ID NO: 35386 - DNA, 300 bp, Homo sapiens; identical to SEQ ID NO: 17363
  chr12:50339307-50339607
  hyper

SEQ ID NO: 35387 - DNA, 915 bp, Homo sapiens; identical to SEQ ID NO: 27574
  chr12:50354878-50355793
  hyper

SEQ ID NO: 35388 - DNA, 1389 bp, Homo sapiens; identical to SEQ ID NO: 23870
  chr12:52400270-52401659
  binary

SEQ ID NO: 35389 - DNA, 311 bp, Homo sapiens; identical to SEQ ID NO: 17365
  chr12:53267978-53268289
  hyper

SEQ ID NO: 35390 - DNA, 509 bp, Homo sapiens
  chr12:53719360-53719869
  binary
cgggggcgggagtggcgtcagggtggggagggggctcgtaacccgagcccccccaggatcgccggccccctcccacccgtagcagcccctcttgcgacccgtgcggtggacagtccgacgcggggcgcagctgggagtcgggcccaggccggggggagcggcctgtgagccccctcagcccagcggggtaaccttggggggcgggggccgcacaaagccctattgtggctcggggatgctgccacagagtggtttttgttcttcggctaactccgtggcgggcacgactgattgcagacccagggcagggggcgggttacgtgccaggcccagtctgcccgccgggagccgcaccaccgcccgactggggccgcgcaggagtccgcactgcaaccgcggtgcccgcgctcgggtcgcgtcactgccctgaccagggtcagttggtgcagtccagaaagggccagggtagaaaccagtgagtcttcccaactctgcagaaagcactgcac

SEQ ID NO: 35391 - DNA, 771 bp, Homo sapiens; identical to SEQ ID NO: 25042
  chr12:54088889-54089660
  hyper

SEQ ID NO: 35392 - DNA, 1176 bp, Homo sapiens; identical to SEQ ID NO: 25043
  chr12:54144782-54145958
  binary

SEQ ID NO: 35393 - DNA, 900 bp, Homo sapiens; identical to SEQ ID NO: 32539
  chr12:54389206-54390106
  hyper

SEQ ID NO: 35394 - DNA, 852 bp, Homo sapiens; identical to SEQ ID NO: 25049
  chr12:54520189-54521041
  hyper

SEQ ID NO: 35395 - DNA, 744 bp, Homo sapiens; identical to SEQ ID NO: 28526
  chr12:54811864-54812608
  binary

SEQ ID NO: 35396 - DNA, 773 bp, Homo sapiens
  chr12:5542237-5543010
  binary
cgaaagggttttttcagaaaagacctcgcgccccgggctcctcttggccagcgcccacccggtggccaccccaccctgggcctttgcgcagatgttggagctccgtacgcagcccgcacatctgggacccctccggggagcggcgggcacccgggcccggccatcccaggggatctccttgcggtatcgtccagcctgttctcggactttgagcggtggcgtgggaggccgggagacctgggcacccgcgcagccagccaggtcggagtttaaaggtcccacgacggaccgaactgtcccattgccccagagctttactcagtggtggatgctcctgatgaaatttgggacgcttgggagttgaaggttagggacaggaggggcgagggccgagggcatgggatgggggagtaggattctgcttgttgctctccgcgggagtgggtgcgcgtccaggaggcgctgcttctttgcgggagtttggctgctgcgttcattcgtcgtctgcgcttcagatgcacggcactgagacccttgcgtccgacggtgtcggggctgtggactagaaaggatcccttttgctggaatcgaggctggggtgggattgccggtgggggaaacaccgaaaagatcgtctggcctcggcctctggcggcgggcggcaggttctgagtccgaatggaggttgctcccgggagcgccgggctcagagctagagagctcgggagactgtgcgcctgtggacttgtttatgtgtgtgaagaggcgggggc

SEQ ID NO: 35397 - DNA, 74 bp, Homo sapiens; identical to SEQ ID NO: 17372
  chr12:56610588-56610662
  hypo

SEQ ID NO: 35398 - DNA, 852 bp, Homo sapiens; identical to SEQ ID NO: 23052
  chr12:63025588-63026440
  hyper

SEQ ID NO: 35399 - DNA, 196 bp, Homo sapiens; identical to SEQ ID NO: 31059
  chr12:6444937-6445133
  hyper

SEQ ID NO: 35400 - DNA, 1861 bp, Homo sapiens; identical to SEQ ID NO: 34264
  chr12:65218018-65219879
  hyper

SEQ ID NO: 35401 - DNA, 326 bp, Homo sapiens; identical to SEQ ID NO: 31061
  chr12:65220127-65220453
  hyper

SEQ ID NO: 35402 - DNA, 72 bp, Homo sapiens
  chr12:72165419-72165491
  hypo
cgcgttttgcatgaaaagacatagtttaagtattttattaagagaagattgaggccaggcacagtggctcac

SEQ ID NO: 35403 - DNA, 539 bp, Homo sapiens; identical to SEQ ID NO: 17376
  chr12:7260775-7261314
  hyper

SEQ ID NO: 35404 - DNA, 406 bp, Homo sapiens; identical to SEQ ID NO: 25055
  chr12:75728083-75728489
  hyper

SEQ ID NO: 35405 - DNA, 259 bp, Homo sapiens; identical to SEQ ID NO: 17377
  chr12:77216021-77216280
  hypo

SEQ ID NO: 35406 - DNA, 214 bp, Homo sapiens; identical to SEQ ID NO: 25056
  chr12:8088740-8088954
  hyper

SEQ ID NO: 35407 - DNA, 104 bp, Homo sapiens; identical to SEQ ID NO: 17378
  chr12:8113465-8113569
  hyper

SEQ ID NO: 35408 - DNA, 125 bp, Homo sapiens; identical to SEQ ID NO: 17379
  chr12:90025696-90025821
  hypo

SEQ ID NO: 35409 - DNA, 393 bp, Homo sapiens; identical to SEQ ID NO: 17380
  chr12:90101352-90101745
  hyper

SEQ ID NO: 35410 - DNA, 209 bp, Homo sapiens; identical to SEQ ID NO: 17381
  chr12:939108-939317
  hypo

SEQ ID NO: 35411 - DNA, 919 bp, Homo sapiens; identical to SEQ ID NO: 22787
  chr12:94543219-94544138
  binary

SEQ ID NO: 35412 - DNA, 119 bp, Homo sapiens; identical to SEQ ID NO: 27599
  chr13:111363839-111363958
  hypo

SEQ ID NO: 35413 - DNA, 677 bp, Homo sapiens; identical to SEQ ID NO: 7929
  chr13:114293940-114294617
  hypo

SEQ ID NO: 35414 - DNA, 39 bp, Homo sapiens; identical to SEQ ID NO: 17386
  chr13:114294965-114295004
  hypo

SEQ ID NO: 35415 - DNA, 131 bp, Homo sapiens; identical to SEQ ID NO: 17387
  chr13:114295766-114295897
  hypo

SEQ ID NO: 35416 - DNA, 554 bp, Homo sapiens
  chr13:114565969-114566523
  binary
cggggccagcaccgtcgggctcctgaaagcacccgctgcctccaggagagcacctggcagaacggggccgcggagccgccctcccctcccgcatgcggccccgctcgattcctggaatcttatttttggacctgctgccgcaagcagttcccgccctcggccctttcaattcctctttcgggaggggactgctctccacccctctcaggaggacgaggcgcggcccgggggttcctcacctccagcccagcagagggagggccgcggggaagcggtttgggttttaaccattgtgtttctctcgcactttggaaacggactcccggcttccccgcggggaggcgtctgacagcgagcgtttcccggacagccccgcagcgtctcaccggcctgcgcggggatcccggggtcgccgggggatgggcgtgggggacgcggggcgggccggggctcctgggaccctgaggccaggcctcgccgcgcggagctggggggcggcagcagcgctgcctctcgggagcggttggaggcgcgcgggcgccaggggttccccc

SEQ ID NO: 35417 - DNA, 182 bp, Homo sapiens
  chr13:115024128-115024310
  hypo
cgtctttaaatagaaacacacataaaacaaggttacgcattgatcaattagagaaaatgtgaccagagaattgcaggaatctaactgtatttcccctggcagccgcggttcaatatttgctaactcagtgtacacagtgactttatagaacataaatactgtggttgggtgcggtggctccc

SEQ ID NO: 35418 - DNA, 839 bp, Homo sapiens; identical to SEQ ID NO: 29832
  chr13:20735265-20736104
  binary

SEQ ID NO: 35419 - DNA, 144 bp, Homo sapiens; identical to SEQ ID NO: 17391
  chr13:21407292-21407436
  hypo

SEQ ID NO: 35420 - DNA, 775 bp, Homo sapiens; identical to SEQ ID NO: 23900
  chr13:22243231-22244006
  binary

SEQ ID NO: 35421 - DNA, 536 bp, Homo sapiens; identical to SEQ ID NO: 17393
  chr13:22244073-22244609
  binary

SEQ ID NO: 35422 - DNA, 1093 bp, Homo sapiens; identical to SEQ ID NO: 22791
  chr13:29292491-29293584
  binary

SEQ ID NO: 35423 - DNA, 541 bp, Homo sapiens; identical to SEQ ID NO: 32550
  chr13:33000891-33001432
  binary

SEQ ID NO: 35424 - DNA, 707 bp, Homo sapiens; identical to SEQ ID NO: 25072
  chr13:43565935-43566642
  binary

SEQ ID NO: 35425 - DNA, 1058 bp, Homo sapiens
  chr13:45491759-45492817
  hyper
cgggtgtatttcggcatgcgaccgcttggttcccccgctttccttcacctctgacctaatctctcacttcaaaaactgacttcaagctgttgccagatacgtcccttccgccgcctgccgcaggtggctagggtctgagcacacttgaacctcacacccgccccaggggtagctccttggttcccttcagccccgatgtgtccctcgtgctttgaaatggaattacagttttggttaaaaacatgccttttccgagttaggaagaatctaaatcgactgaacgccagtctaaaatttcggcgttcccacaccgggagtcgaacccgggccgcctgggtgaaaaccaggaatcctaaccgctagaccatgtgggagacggcaatagcgactccaagcctagacaaattgagtcttctcggtcggcttccgcccactccatcgcgttcatccgtaggcgtcaaacctgctcctgcgcctgcgcggagtctgcagcggtttaaaccgttcaggttcgcattctactgtttctctccttgcaggggcccttgaatctttcttcaatctactctcgcgtctttcgtgatctcatccagtctcctggtgctaggtaccatgtcgacaccaatgtagacactagattggatgagtcattgttcacaattcctcacaaaactcctgcaaagtccaaaagaactggggtttgaatgttagaggctggtgaagaagtgaggaccacggggcgtcataacaccgcgcagtggaggccacgctgcactggccggtgtccgccgacagggtgtgtgccacagacgcgcagtgccttgcccgaatctgtccctcccctcagcgctggtccaggctggccacaggcaccaccccgtccctgaaagtggatcttttcctctgaaaaaacaggaatgagaactgcccggaagcctggaacattccaggttctgatgactcagcggctgaaggcaggatttgtgtcaccgaaagcagccagagtggcggtctgtaaatgtagcttagaaaagtggagaaagtctcttactgcaggc

SEQ ID NO: 35426 - DNA, 126 bp, Homo sapiens; identical to SEQ ID NO: 17400
  chr13:50027697-50027823
  hypo

SEQ ID NO: 35427 - DNA, 97 bp, Homo sapiens; identical to SEQ ID NO: 17401
  chr13:50050867-50050964
  hypo

SEQ ID NO: 35428 - DNA, 54 bp, Homo sapiens; identical to SEQ ID NO: 17402
  chr13:73324122-73324176
  hypo

SEQ ID NO: 35429 - DNA, 1460 bp, Homo sapiens
  chr13:74707123-74708583
  binary
cggctctgcgggttcccggcccgggtggacgtacaaagttgccccttgtcaactccggccaggtcccccgtaattgaaaataacagccaccggccagcccctggctacttgcatggaccaggcactgtagcaagtgacagttacacatcattacgaccagagacaataatgaatgtagcaccaggagcactattcatgccagcagtgtcatctccgccttaaccccttcccctccactctctccagcgcgcacacacagcccacacggtcccggtgcggagctattcatccaccccgctcgaggccggggggccaactacttccacgagccccccctcccccccaagttcagccctggggttttatttcacatccttggcaactgtcaggcaaacactgcaaccaacaattccactaggggtagaaaaacacttgcttaattcacgttacttgataacttcttctggaaaaaaaaaattaggggaggtggggaagaaacctccttctttcttctccacgaatccgaccgacgctacttgctttgcaacagcatcgcccttccccggccccctcccgcttcccagcactttccccctttaagaacacagaccaaccaaaatgatttaacttgagcagatgacagaaggaaaataaaacacgttaagagaatacggtctgatttgggatggcaaaaaaaaaaaaaaaagaggagggggttgtttattttgataagaaacggaatcggcacagacctgaacagaagctgcagagcaggagaaattgttttctttccctcacacagagtccccctctctctctccctttctctctctcacacgcgcgcgcgcacacacacacacacactcgcacacacacggcgtcacccgcgcacacgcacacgcagagcctctcagcggctctctgcagttctcaggaaatgaatggggggcaacccggggaactgttgtacttgcaaatgacttacccggatcacatgatgcgctaaatgtagggtgggccggtgggtggaggctgccgagttgcgagccccggtctagtgtggggagcctcgccaggcccgcatcgaattaccccggggcccagccgagggggttgcaggacgccgcttctcctccctcgcagcccgcagctcaggaaaccggagaggcgcttggggtggggtggggtggggtgctgtgagggggggggccgaaaacaagaaacccccaaacaaaagagctccgggtcctcctccccagaaacaaagccccgccgctgccggcgagccccggggtggggccgagggcgggggcggcggcggggaggggctcgctcagcaggcgctaagtcgctttattgccataaaatggggcccccgagccgctccgcccgaggattaggaggcgggctctgagtgtgatggttgaaatcccctgtgggaaactaacccctccccgctc

SEQ ID NO: 35430 - DNA, 124 bp, Homo sapiens; identical to SEQ ID NO: 23915
  chr13:96409593-96409717
  hypo

SEQ ID NO: 35431 - DNA, 166 bp, Homo sapiens; identical to SEQ ID NO: 23916
  chr13:99851637-99851803
  hypo

SEQ ID NO: 35432 - DNA, 93 bp, Homo sapiens
  chr14:102335792-102335885
  hypo
cgctaggtgaatggtaagtgtgtgttgagctttctaaggaactgccaaaccgttttccaaagtggctgccccgtgtgattcccccaacagtgc

SEQ ID NO: 35433 - DNA, 774 bp, Homo sapiens; identical to SEQ ID NO: 25082
  chr14:103021331-103022105
  hyper

SEQ ID NO: 35434 - DNA, 142 bp, Homo sapiens; identical to SEQ ID NO: 17409
  chr14:103430237-103430379
  binary

SEQ ID NO: 35435 - DNA, 265 bp, Homo sapiens; identical to SEQ ID NO: 17410
  chr14:104164986-104165251
  hypo

SEQ ID NO: 35436 - DNA, 668 bp, Homo sapiens; identical to SEQ ID NO: 31119
  chr14:104194172-104194840
  hypo

SEQ ID NO: 35437 - DNA, 457 bp, Homo sapiens; identical to SEQ ID NO: 23925
  chr14:104202370-104202827
  hypo

SEQ ID NO: 35438 - DNA, 39 bp, Homo sapiens; identical to SEQ ID NO: 6895
  chr14:105214099-105214138
  hypo

SEQ ID NO: 35439 - DNA, 885 bp, Homo sapiens; identical to SEQ ID NO: 25087
  chr14:105240770-105241655
  hypo

SEQ ID NO: 35440 - DNA, 193 bp, Homo sapiens; identical to SEQ ID NO: 33408
  chr14:105268589-105268782
  hypo

SEQ ID NO: 35441 - DNA, 640 bp, Homo sapiens; identical to SEQ ID NO: 15574
  chr14:105687735-105688375
  hypo

SEQ ID NO: 35442 - DNA, 680 bp, Homo sapiens
  chr14:21539350-21540030
  hyper
cgctggacgctggagggtacgctaaggagaagcccacaccaacaggagtgaacactgccctgggaactttcactgcagagtactctgaagcaccgctgcgagagtgggcactgccagagagagcgcccactgcaaagagggcgggggcatggccaaggggccgctcgctgcagagtggaggagggggagaggccttgccagggggagctcaccgcagggagtggaggaggggcaggggcactactggggccgcccctctacggagggaagggcaccctctggcagggaggctggaggaaaaagaaagaggaactgggccagggagagctgactcagtctctctggtctcctctctggtccccgccggcaggaggctgggtctccgtgctcccgcccgccgcctccctccccagacccctcctcccctcctgccgcggccgtttcctgtggctgagactctcgctcagccatgagctcaccgcccctaatgggttgcagctgcctcgctgctcaagccctagctccgcactccctgccttggagcagacggccccactctgcctcacccccgcccatctccaccttccccccacccacgcgcactgcgtccgcctggtcccgggaacactgggggtctgtctgctcgcccacacaccttggggccgggtctgcgcgctgac

SEQ ID NO: 35443 - DNA, 127 bp, Homo sapiens; identical to SEQ ID NO: 17422
  chr14:21689073-21689200
  hypo

SEQ ID NO: 35444 - DNA, 83 bp, Homo sapiens
  chr14:21943025-21943108
  hypo
cgtatcccagatttgcagtttgatttgttttccatcaatgttgaccatacgagctccaaactccacacctgtcggtaaagacc

SEQ ID NO: 35445 - DNA, 860 bp, Homo sapiens
  chr14:23834532-23835392
  binary
cgggagctgcccgccctaggccgcgggggcgccccgggctcgcaggatccgaaaattcccttcccgggccggggcgggtgagcaggcgggcgctgggctgcgctcgacgcctctccaggccgctcaggagagcctcgagggctgggagaagccgccggggcggttgggctggacgagcgagtttaggggccaaccgtctccacccgccggccgcgctgcagagcggtgctcccagggctggggtctgcggcgaccccgctgggaggaagggagagcgagaactgagacgcttgccccaagttgcctggagccaaaggcccccgagagcgtggccgtggggctgggtcgctggagtggccgcttcggcccagacactcgcacccccggcggtgcggcggttttcacgcgcgcactcactcagcgcgcccgggggtctgaggtcgccgctacggcgcctcgccccgggcagcagcaaccagcacgcaggcacccctggaacaggcgggactgccttcccgacgcgcggcctgcgcccaggcggcggaggggcccagcccccttccagtcctcggctccagggcgcagggccacgagctcccgctcccaccctcggcccctggcacccggcgccggctccgccgccctctctcacacgcacccttggcagggccccgcggggcgccccaaagcttgggggcagctcccaggtgtctctgggaagggaaagaaaggccacaaagcaaaagaaggagcaaagagaaggcgagggaggagcaggggcccgggtcctgtggactcgcctgggctgggagtggggacactgagagggctgcgaaggctccgggggtcgcgcgtggccc

SEQ ID NO: 35446 - DNA, 1091 bp, Homo sapiens; identical to SEQ ID NO: 23940
  chr14:36974427-36975518
  hyper

SEQ ID NO: 35447 - DNA, 978 bp, Homo sapiens
  chr14:37116049-37117027
  hyper
cgggacaacttggagcctgcttctggggagccacacacgtcctctcccacttcttgctggagacttggggacgtgaagggggggttctgtgatcccggaaaaaaagtaacttctcttggtaggtgatactaggcagttgcgtcccggggagtccccgcctttctgcgcttcccctgacgggggcacaggggccggcgtgcgtgtgtgggtacgtagctcatcccggggagctgggatcctcttttccgcacttggggaagacgaatgccgaccattggctcagacaccataccacacaggcatttctggaggcatttcgcggcgttattatgggaagttgcgcggaccggggccttcgcgctacagccgaggagtctcagcgcctgccaggcgggagccgcacttccggcgaggtgtcttcgggagggggcgccacagcccgtggcagtgccggcctcccgccttaaccagcccgactcccgccgcgccagcaccgtggggagcgagtgggtcccgcccggccgcggcctggacctggcagccgggcttcgtgggcgctctgagccgtggcccgtggcgcggggtgatccttgtgcctggcgccggcctcagaaccccgtttacggctttccgcgcatacggaggttgctggggaccccgacacctgcgcgccctcgactggggcccgctccagcagtgaagacccaggcccttccctgggccgtggctgctcttggtgcctcatgggagcgcccggggtagggactcggctagtgacctgtaggacatgaggggcgagctgggagccgattcgcccacggcgtctccttcgccatggaggccccccacccattccactccggggttgcggccacgcaccataagagcaccttcaggtctgagctctttaggggtgggagtaggcagttcgtgagtccgggaaggcctgcggggtttcccgcctgctgcggacttagc

SEQ ID NO: 35448 - DNA, 868 bp, Homo sapiens; identical to SEQ ID NO: 28565
  chr14:37123878-37124746
  hyper

SEQ ID NO: 35449 - DNA, 920 bp, Homo sapiens; identical to SEQ ID NO: 25093
  chr14:37127458-37128378
  hyper

SEQ ID NO: 35450 - DNA, 770 bp, Homo sapiens; identical to SEQ ID NO: 25095
  chr14:38724944-38725714
  hyper

SEQ ID NO: 35451 - DNA, 788 bp, Homo sapiens
  chr14:52781114-52781902
  hyper
cgccgtcggcgcgctgggtgcgggaagggggctctggatttcggtccctcccctttttcctctgagtctcggaacgctccggctctcagaccctcttcctcccaggtaaaggccgggagaggagggcgcatctcttttccaggcaccccaccatgggcaatgcctccaatgactcccagtctgaggactgcgagacgcgacagtggcttcccccaggcgaaagcccagccatcagctccgtcatgttctcggccggggtgctggggaacctcatagcactggcgctgctggcgcgccgctggcggggggacgtggggtgcagcgccggccgcaggagctccctctccttgttccacgtgctggtgaccgagctggtgttcaccgacctgctcgggacctgcctcatcagcccagtggtactggcttcgtacgcgcggaaccagaccctggtggcactggcgcccgagagccgcgcgtgcacctacttcgctttcgccatgaccttcttcagcctggccacgatgctcatgctcttcgccatggccctggagcgctacctctcgatcgggcacccctacttctaccagcgccgcgtctcgcgctccgggggcctggccgtgctgcctgtcatctatgcagtctccctgctcttctgctcgctgccgctgctggactatgggcagtacgtccagtactgccccgggacctggtgcttcatccggcacgggcggaccgcttacctgcagctgtacgccaccctgctgctgcttctcattgtctcggtgctc

SEQ ID NO: 35452 - DNA, 780 bp, Homo sapiens; identical to SEQ ID NO: 29858
  chr14:55595810-55596590
  hyper

SEQ ID NO: 35453 - DNA, 196 bp, Homo sapiens; identical to SEQ ID NO: 10301
  chr14:62105869-62106065
  binary

SEQ ID NO: 35454 - DNA, 241 bp, Homo sapiens; identical to SEQ ID NO: 17432
  chr14:69666624-69666865
  hypo

SEQ ID NO: 35455 - DNA, 475 bp, Homo sapiens
  chr14:70236238-70236713
  hypo
cgttggccttatgacgaggagtgcctgtgggttatcctaatcgttgtcttggtcactcttggttgggcctggttgactttgccagtcagctcctacagtgatcagttggccacctctagatctgtgtttgccggtctagacgttatcggtgcacttccttgaagtgccaggttgcagcgatcccagagcgttgataacgtgatctgatccctaagttgagacctgtcttcctgtaacgcttccgaataagaggtccggtcgaaaagagttgaaagatacgaaattaggtggtcgttggaatcctgatcgcagtaaagtggtccttggtaactgctcgagtagaacatgtctgcatccgccaatagtccgctaatagggagggctgtgcgattaaaggcttccatcgattgggtagtgtccttcaagtgggtggcgaagagccagtcgggcatatgtcatgaaggtttctccgacc

SEQ ID NO: 35456 - DNA, 593 bp, Homo sapiens; identical to SEQ ID NO: 34329
  chr14:70653697-70654290
  hyper

SEQ ID NO: 35457 - DNA, 561 bp, Homo sapiens; identical to SEQ ID NO: 26358
  chr14:73318400-73318961
  hypo

SEQ ID NO: 35458 - DNA, 1055 bp, Homo sapiens
  chr14:73957523-73958578
  hyper
cgctgccgctacagcttgaagccaaacatttaatgaaagagagcgggaggggccgaatagaagaatgatgggcgtggccaaccccgaggtggctggaggccgcgcccccttcccagagtgcaccgcagccgctgcattcaggaaccgctttagcttcgcccccggccggccgggcggggaagactggtgtggtctggccatggatgggctccaggccagtgcagggccgttgaggcgcgggcggccgaagcgccggcgcaagccccagccacacagcgggtcggtcctggccctgcccttgaggtccaggaagatacgaaagcagctgcgaagtgttgtatcccgcatggcagcgctgaggacgcagacgctgcctagcgagaactcggaggaatcgagggtggagtcgacggccgacgacctgggggacgcgctacccggtggggcggcggtggcggcgtcccggacgcagcccggcgagagccatacggccacctggggcccgcagagctgctggaggcctcgcccgccgcgcgctccctgcagaccccgtcggcgcgcctggtgcccgcttccgcgccgcccgcgcgcctggtggaggtgcccgccgcgccggtccgggtggtggagacctcggccctgctgtgcaccgcgcaacacttagcggccgtccagtcgtccggggcccctgcgacggcgtcggggccgcaggtggataacacgggtggggagccggcctgggactccccgctgcggcgcgtcttggccgagctgaaccgcatccccagcagccggcggcgagcggcccgcctctttgagtggctcatcgcgcccatgccgccagatcacttttaccggcgcctatgggagcgcgaggcggtgctggtgcggcggcaggaccacacctactaccagggacttttctctaccgctgacctggattcgatgctgcgcaacgaggaggtgcagttcggccagcatttggacgccgctcgctacatcaacggacgacgcgagaccctgaacccacccggccgcgcgctgcccgccgccgc

SEQ ID NO: 35459 - DNA, 185 bp, Homo sapiens; identical to SEQ ID NO: 29865
  chr14:74208160-74208345
  hyper

SEQ ID NO: 35460 - DNA, 262 bp, Homo sapiens; identical to SEQ ID NO: 17437
  chr14:75567786-75568048
  hypo

SEQ ID NO: 35461 - DNA, 129 bp, Homo sapiens; identical to SEQ ID NO: 17438
  chr14:75894282-75894411
  hyper

SEQ ID NO: 35462 - DNA, 333 bp, Homo sapiens; identical to SEQ ID NO: 17439
  chr14:77428133-77428466
  hyper

SEQ ID NO: 35463 - DNA, 144 bp, Homo sapiens; identical to SEQ ID NO: 17440
  chr14:89786296-89786440
  hypo

SEQ ID NO: 35464 - DNA, 620 bp, Homo sapiens; identical to SEQ ID NO: 25105
  chr14:90084014-90084634
  hyper

SEQ ID NO: 35465 - DNA, 1142 bp, Homo sapiens; identical to SEQ ID NO: 23955
  chr14:90849401-90850543
  binary

SEQ ID NO: 35466 - DNA, 416 bp, Homo sapiens
  chr14:91580279-91580695
  hyper
cggggagagcaggttaactcttgcagggagaactgggcttgcagggtccagccagctgccagcagctctgcagctttaagaactggggcgggctagctgccgaggagaccacgctgctgcatgggccacgtgagctcaggctgtgggagcggatggagctgctacagtcagcgcttggggctggcctcagcttgtagacccgagccctgcagaacaaccccccgtggcgcaggagagcagaagaaagggggcctttatgcccttttgagggaagcacacattctgcaaggccgtggaaacaaagggaggaactgtttgtagccctcgtccagacgccccaaacaaacagtaagtcagaagggaacagagcacagcacagtccctccctccgccccaggcagtatccaccttgcccc

SEQ ID NO: 35467 - DNA, 479 bp, Homo sapiens; identical to SEQ ID NO: 17447
  chr14:91581063-91581542
  hyper

SEQ ID NO: 35468 - DNA, 259 bp, Homo sapiens; identical to SEQ ID NO: 6918
  chr14:91757493-91757752
  hypo

SEQ ID NO: 35469 - DNA, 915 bp, Homo sapiens
  chr14:92979605-92980520
  binary
cgggaagcatccaagaggaggcggcgtgcacatctgtcaggaatgtggaggaggcgccctggctctggtctgaggttgcccttgaacgatttcgaggctccctcgggcaaggctgtggctccgagtgggacgaactccccgccagctctgggcctccccacctgccggcccgcggtcggcgccggcacaggcggagggcgtcttccttcccctgcggccccaagccaagtggaagacttttctctaagtttccctctccgaagccccgcgggcctcccgcgccccagccccagccacagcctgtggaggcggcaccccgaggttgggcgcccgtgcggcgccttggccccagcaccccccgccccgaggcccggccccgggggcgcggccgcccgggcctccgtgtgccccagggggctccgggccgcgagccgctgccgaatggcttttgacaaaaaaacccttgaccaccaaggccagcctcttcctgaaagccccgctcgctccgatacaggaagtagaagggagcgagagccccagagcgcggcggcagcggcggcctggcccttccagagggccagagccagggacatgcgggcgcccgggactccgcgttccgcgcggcccggcgcctgagcgcctccgttccccgtcccggagctgccggcggcatgatccgacacgccggggcgcccgcgcgcggggaccccacggggtaagtccgggcggccgccccctcctccctcgcgatccccacggcccgcgtcctggccgccccactccacttcttgtcccagagagtccttcgggcgcgtgacctcggggttgtcgggctgatacgggacccccaccgtggccgaggccagaacctggttctgcggggcagggggcggccctggtgactccgctggaccc

SEQ ID NO: 35470 - DNA, 128 bp, Homo sapiens
  chr15:101785799-101785927
  hypo
cgtgaagctgccggtgcaatggaaacagtcacgcacaatccgctattgacagccacatctatccctggaatcaatccgctattgacagccacagccatccctggaaatccctggaatattgtttgagc

SEQ ID NO: 35471 - DNA, 247 bp, Homo sapiens; identical to SEQ ID NO: 6922
  chr15:101938625-101938872
  hypo

SEQ ID NO: 35472 - DNA, 1025 bp, Homo sapiens; identical to SEQ ID NO: 34340
  chr15:28341522-28342547
  hyper

SEQ ID NO: 35473 - DNA, 322 bp, Homo sapiens
  chr15:31620725-31621047
  binary
cggaaaggaatgccctggccgctgcccatcctccgtgctgccctctcgcctgcccacctctcacctgccctgggccggtgcggggcgggcggcacctgcaccagggcgggcgctgagcctccagcctggggatcaccgcccgcccccgccagcccagcggcaacagttcccacgcgcggcccgatactttgtagttgattcatctgtggcggttccctcccccctttttgtttcgtttttaacataaagatgaaaatattttaatggacggcaatccttccccattttggtgtaaagaattgtatgcttcctctgagctcac

SEQ ID NO: 35474 - DNA, 335 bp, Homo sapiens
  chr15:35014062-35014397
  hyper
cgcgcaactggagagggcccttctgcaggagagaagagggaatgtgctgaatgagttaaagtgccctttgtccaccccccccccccgccccagcactcggcgggcgcaggctgagctggtgacccgggcaggaccggagccaaaggattaatccatcacaatgagacgttctattctgggcaggcggcgcgagcagatgctgggcgccggcggaggcagcgtgcagggctggcgctcacgcaggccgccagcaccctgcgctccaccccaccctgctccctaatgagaagagaggagctgaacccagacagccgctccctgttgacgccttaggc

SEQ ID NO: 35475 - DNA, 134 bp, Homo sapiens; identical to SEQ ID NO: 25112
  chr15:40676552-40676686
  hypo

SEQ ID NO: 35476 - DNA, 1430 bp, Homo sapiens; identical to SEQ ID NO: 28593
  chr15:41786420-41787850
  hyper

SEQ ID NO: 35477 - DNA, 751 bp, Homo sapiens; identical to SEQ ID NO: 29880
  chr15:41805339-41806090
  hyper

SEQ ID NO: 35478 - DNA, 395 bp, Homo sapiens
  chr15:43415157-43415552
  hyper
cgtaaatccttccagtttttggcgcccgggtatttgacttgcgctcctttaatgtggtattctgcctctcgttttcctggccgcctccctgggacccagttccagctcaccagcatcggctcctcacactcagtgtttaggaggtatcatcatatcatgggctgacaggaatgacgggagagaaaccttaacgcagagtgagtccccatggaaaccgcgccaaccccgaccgggggcgtcgccagcgggaaggggtgggtcccctctcgaataccccgcccggctccgggaacgtcaccgacgctctggggcttttgctaagaagcgctcgcccaggaggaggcagggcaaattggtgaacagggcggcgtgtccttatacgggcacgaactcgc

SEQ ID NO: 35479 - DNA, 588 bp, Homo sapiens
  chr15:45406361-45406949
  hyper
cgccagtgtgagcatctggacctagggctcaccctcctgccgtggaggtggggcccttatttgcacaacctcttccagctcagaccagcccctgggctgggacacccgtgtggcacgtcgcccacgctgctataaaaggggtcccgcgcgacttccaaactcagcgccaacccgcagaaccaggaaagtaacggctacagacagtgagaaatagtttcgctcgccggctagaaaaactctgtcggtaccaaccccagagcgttgagagcagcccacctccacgcttccttaacggagaggtgcaggactcagacttcaccagcccactcggtcccagccttgtacgcaaagagacgccaaggacgcgctctcccgcgtccaggcagccccagcttgctggcttgcctgcccgcctgcgtgcagcactcggccggcgtgcagcatgaccctgtggaacggcgtactgcctttttacccccagccccggcatgccgcaggcttcagcgttccactgctcatcgttattctagtgtttttggctctagcagcaagcttcctgctcatcttgccggggatccgtggccactc

SEQ ID NO: 35480 - DNA, 800 bp, Homo sapiens
  chr15:45669920-45670720
  binary
cggagcgattccagtactagaagcatgggagggtctgctgccagggcagccgagggcggggagcgcagaaactctgcttacaggctgcactcgccccgactcctctccagacgtgggatcccatgttatacttggagtgaatctggtcgctcgctccccgtccccgattcccactttgcttgcctcttctccccatccatctaccccacacgcattttccagaaatctccccaactcgacgcccactcaggctactgaaccccaataacgccacccttttactaagaggagcctccgtcgtcccaaccccttgctccgagcgggaagcttggtgcagcgcaccaaggtccggtagaggggggcggcgccccctgcgccgtgggccagcaggccgcggacgcgcagacagcaagtggaccccaagggctggagccgcaacgcaagttccccctgactgggggacgccgcccagctcctggagcctgcgaaggctcttgaagctgagcttcccagggataccagaagggacactctcgtgcaattccggctagggaaagcgagggaaggtggcggctccgggcagggagcgagcgagtgctccacgccgcccgcaggatcgagtgagtcacgcggccgccagacgaggccggtggcgcacgcacccgagatccgatgtagtgcaccgcctcggcgccgcggctcccgccgcgcagacaccgcacccgcagcatcgccctggcccggctggtccacgcgcggaatgttcctggcctctgggccgcgtcggtccaagccttccc

SEQ ID NO: 35481 - DNA, 751 bp, Homo sapiens; identical to SEQ ID NO: 28596
  chr15:51385861-51386612
  hyper

SEQ ID NO: 35482 - DNA, 76 bp, Homo sapiens; identical to SEQ ID NO: 7979
  chr15:63695768-63695844
  hypo

SEQ ID NO: 35483 - DNA, 324 bp, Homo sapiens; identical to SEQ ID NO: 25116
  chr15:68260415-68260739
  hyper

SEQ ID NO: 35484 - DNA, 1197 bp, Homo sapiens
  chr15:68723471-68724668
  hyper
cggggagcccggtgtgggacggccggggccagggtaccctagggcggagagctcagggctggcttcccgctcccagccgcgcgcccctcgggccggaggttcctgccgcgccccgacacctggagtgcattaggcggcggcgcgcgtctaggcgacggcggctttccccagattattgaataattgcataattccgagcgcgggttgggaggcaatgccgggtccctaccccgggtgtcaggtaacgtttcgggggtcctgcgctgcgcgactgtgtcccgccgctgctggccgggcagacgagagctagcccccgcctaccggccatcgccccggggctttgctctgtctttggccggaggcactctgcgcagccctcacccccacccttcagccctccggggccgccgcgcccggctctccaaactttgagatgcttccccggagccaggcaggagggcagccagggcacactctcttggcgctgattcccttccccagccggggccgtgcgccctcggcgctcccgggacacccgagtgcccctggcagccgtgcgggaaccccggcatgggccttggaggcacctaaggcgcccaggagggccaccagatctgggagcttttcaactcaagcctcttcaactcttcccaaacacaccaaagagtcccggctttcaatagccttcgcacctccctctttagcgaaacttgactgaaccgctagactggggccagtccctgggggacccacgtccccaagagcagctgaggtctgaccctgggaggagggtcgcgtcccgatcctggccgctggatccaagccccgagggcccagggagggactccgagaggcaaggggaggcagagggtgggcacctacctggccacaggctgagcgcccaggccaccaccaggcccctgggcaggtccatggcccgcggcacggcggctgggtccggtgtgcagcggcggcggggggcggcaagccagagcggcagcctcctcggcgcggcgcctgcagcctgcactgcgcggggcgccgggctccctgacagctgcggctcattcagaggaagtgggagggctcgagcggaggggaggggcgccggacaccactccggctcgggctctgggccagtctcggccgctctgccacctgggcaggcggcgcgctgcctcgacgcgcctgtgcagc

SEQ ID NO: 35485 - DNA, 771 bp, Homo sapiens
  chr15:72564635-72565406
  binary
cgctctgggcccgatctatgccgcccggccgccgggcctgagtgaagcctgtccagcctaggaggggccctcagaacctcccggtccaagcctctcacttcgtccacccctgcggagacggggcgagccccgcacccttcccgtggcccggccgcaccgccctgtgcccgtggtggcggccacacaggccagcctggcgagtactcacggcgaccccgggccgcgcgcggccgcagccgacgggacgagcggcccgggacgccccgcgggggcggagcggcaggccaaggggcgggggccgggcctggcgggcgaggtcgcgcaccccacgcctcgtcgttccgtcacgggcgcgctcagccactctgcgcacgctcgcgcggtgacacgatggcacgtggcccgctcctgaccaacagcctgacggcctgctcctgggcgcgcctcagcagccgacgccagccttgagacgcctgcgcggcggtcgctagtcgggaaagggtgcggagtggggggtggcgcctgcgccgtgggtaggggaggcagtggagaaggaagagggactctgggggagtgcggggagccttccaaaggagaatacttgcatttagcgccccgagtggttgggaggaacaagcaggaagggcaacccaggttgcctgtaggccgggagggagtcccctcgccggaggttggggccggcaggtagagactgagggaagtcctgaggccttgctgactgcaggattctctggttcgacaatggaagtc

SEQ ID NO: 35486 - DNA, 331 bp, Homo sapiens; identical to SEQ ID NO: 17468
  chr15:72668400-72668731
  hyper

SEQ ID NO: 35487 - DNA, 460 bp, Homo sapiens; identical to SEQ ID NO: 32608
  chr15:75470758-75471218
  hyper

SEQ ID NO: 35488 - DNA, 1330 bp, Homo sapiens
  chr15:89437634-89438964
  hyper
cgcactgggccttccgtgagtacaagtcccccaggtaccagcaggaggcagcatcgcccgcgaggtctgcacgagcgctgctcccagcgagaaatttgacatccctgtccctgtttgcacaaggcttgatctccgcctttgaaacctgcagcccccaggagaatgaaaaccggaggtgtttcccaatccgctggcccgggcggcgtcgagggagagaagccagggcccctctcaatcgctgccccctactccagggagcacaggcactcccgcgggtcagcgctggacaccaaggtcccaacaggtttacaggctgcctgtggcctgtggctgccaacgagctggtggcaggactgggtccaagtgccgtgctgtttccatactggctgcgcacaagcctacgtttctccctgagggtcgccatctcccacccagggctctgccctccaccctccctacccttctggcctcgctgtccctggggcaagaaccccggtgagcgaggtctggaacccataggcatcagttgcctttgccccaggcgcccagagccggccagctgcggtccagaggcgcaggtccgccagccgcctcgcaggttgccctcagcccctcccaggactcccggggcccccggagcatccaacagatacccaggggcagggcctggggcgccgcggacggcactggaggcagccgaccctggacagacgacaggggagagagccaagcggaccctggcaggaagggggctggaggcggacggtggtctcggaggccacggggtccgctcgggctctgctccctcacggtgggcacgagggtccggcgcccgcatccccgcgccgctccctccccacttgtgccccgggcgcccctcgcccgcgatcacagcccatctcagcccgggcctccgcagtgcccggcccacgcctcctgccccttccccggaccctgcccgggaggtgtggggacccgcagggcacccaaagcggtaagggaggaacccggcccgcacacagccccagaagcccagcgacccctaagccacgtaccgtccccaggcagctcctcgacggctagagctctcgggggccgcgagctgtcccggtccaaggcagcagtctgatttcggggaaattaaaagggcagaaaggaagcggcagcagaaaaacccccgcgctcccgccagaccagccccttaaaggaacacgcgcacctttccctcccaagggctgggctcgaagggaggagctgctgcaggcttgagcggtctccagactcgctgggaaccaccgcaaagagggtgtgcaagagttgaggccctcac

SEQ ID NO: 35489 - DNA, 600 bp, Homo sapiens
  chr15:90039446-90040046
  hyper
cgcatgccctgcagaggccggcgagatgcggagtccgcggctgcagggtagatcccctcctctgcccagctctgggccgagcccttggccaggtggggaccggcgcggatatgcctccgctgggcctgcaggcggcgagacttacttgggtagcgatagtagaattcgttctccatgtcgctcaagttcttgtgcgtcctctctgaccaccagtgggcgtcggcctcgaagtcgtagcgcacgaacaccccgaagagaatcaccataatcacctgcaggagcaggcaggtgagcggcagccgccagcggaggttggtgttccaggccatgctgcaggggtgcctggccgggctggcagcgggcggttcggacgctcggaggccggcggggcttttgagacccgggcaggggggcggggcggccacgtggggcacggagcagctgactcgggcaccgcccgcgcgctcgcccaactggcaggggcccaacccaagccgagggccccaaaagattccccgcgtcgggctgggggacagcggcaggagcagaggctaaggcagtgggcaggaggatcagggtgccccaaattctgtgtgtccc

SEQ ID NO: 35490 - DNA, 889 bp, Homo sapiens
  chr15:99090794-99091683
  hyper
cgtcatattcagccctgtttaattcccactgtcttgggtctagaatttaggcttttgagaaatctttattgaattaatgaaaactcaaagaccacgattctgcattcccccaaatcctgaagtgcagtaggagcccatgcagggcttgggacgggctttttgcctcagcagccaggacagcctctgcatccgtgaccacctccccgcccccctcgcattcccccccatcccctggtgatatccttctagcgcaggctcgtgctctggaggcggggtggggccgggattctgcagctgtaaccaactcccccgctgggggcatggggctggtccctggggcgcacagagaagttgtgacagataattgacgtgatcgggaggggcgtccaggcagacctcatgtgacttctaaaaccaacccacaaatctgaagcgtggcttgcgtggtcagccgcctgcctggcacccggtgaacagtttctcccggactctctgcatctagccccaaagaatctaagattctttgtctagaaaagtgccctggtcttccctggcacccttcgcggtgggtttccttgactccgcataaactcccgttccagcccaaatcagaggcggtcgcagcagccgttcctcgtctccatcagcatccgcgttgccatttccccgtcctgagctgttgctcatatcaaatgtcactcggggatgactaagagccgatgttgatgaggagccttcagcgttacggtaaaggagctcgtgcaaacttagaccccagtcatctgacggtcacgtgggcgggcgtcgcggcccaggcccccgcctcctccgtcctccgcgattcggacatgacacggtcctccgcgaagggcaggcgttacataaaccc

SEQ ID NO: 35491 - DNA, 584 bp, Homo sapiens; identical to SEQ ID NO: 34371
  chr16:1030271-1030855
  hyper

SEQ ID NO: 35492 - DNA, 77 bp, Homo sapiens; identical to SEQ ID NO: 17475
  chr16:11974709-11974786
  hypo

SEQ ID NO: 35493 - DNA, 335 bp, Homo sapiens
  chr16:1417091-1417426
  hypo
cgccgtccaccgcctccaggtccaggcgcagctgactctgcagcgagtgcagcttcggcaggggaatggtgccgatgtccccacagccccgcagccccggcagtgtggaggctacgcccaggccctccagctcctcctgcagctgcttcacctgtgcctccacctcctccttcttctgcagcgccagctgccggtcgctatcggccacacgggcacgctccttggcctcctgcgcctctcgctgccaggcatcgcagacctgaaacccagggcccgtctcagcaccccccacctcacctgtgccacctgcagaccctcttgcctgtgtcaccagc

SEQ ID NO: 35494 - DNA, 402 bp, Homo sapiens; identical to SEQ ID NO: 25127
  chr16:1417690-1418092
  hypo

SEQ ID NO: 35495 - DNA, 349 bp, Homo sapiens; identical to SEQ ID NO: 17476
  chr16:14396725-14397074
  binary

SEQ ID NO: 35496 - DNA, 53 bp, Homo sapiens; identical to SEQ ID NO: 6945
  chr16:1472227-1472280
  hypo

SEQ ID NO: 35497 - DNA, 754 bp, Homo sapiens; identical to SEQ ID NO: 25134
  chr16:1730112-1730866
  hypo

SEQ ID NO: 35498 - DNA, 654 bp, Homo sapiens; identical to SEQ ID NO: 26421
  chr16:2028554-2029208
  hypo

SEQ ID NO: 35499 - DNA, 394 bp, Homo sapiens; identical to SEQ ID NO: 23996
  chr16:21831549-21831943
  binary

SEQ ID NO: 35500 - DNA, 460 bp, Homo sapiens; identical to SEQ ID NO: 23997
  chr16:2278311-2278771
  hypo

SEQ ID NO: 35501 - DNA, 156 bp, Homo sapiens; identical to SEQ ID NO: 17481
  chr16:23402123-23402279
  hypo

SEQ ID NO: 35502 - DNA, 1768 bp, Homo sapiens; identical to SEQ ID NO: 22807
  chr16:23846783-23848551
  binary

SEQ ID NO: 35503 - DNA, 750 bp, Homo sapiens
  chr16:25704061-25704811
  binary
cggggagccgcccgagcccccagagcagccagccgcccccgggaccgacggctgggggctgccgagcggcggcggaggcgcccaggacgcctggctccggaccccgctggcccccagcgagatgatcacggctcagagcgcgctgccggagagggaagcgcaggagtccagcaccaccgacgaggatctcgcaggccggagagcggccaacgggagcagcgagaggggcggcgccgtcagcacccccgactatggggagaagaagctgccacaggcgctcatcatcggggtcaagaaaggagggacccgcgcgctgctggaggcgatccgcgtgcacccggacgtgcgggcggtgggcgtagagccgcacttcttcgacaggaactacgaaaaggggttggagtggtacaggtaggaccctgggctccgcgggctggtggagacgcgtgggggagacgcggaggggaagccgcggctttccacgcccttcgagcatccaggcaccgtcccgagaggcccaagcccccgcgagggctctgcaaaccctggcggcgttgctcagggggatcggctgagagggctggactccagcgaaaggtcactttatttcagggcgaggggaggaggtgtcaccctgccctgcctcccgcgctcctcatccaaggaggtgctgtctgaatctgcccagctccaagcctgggaacccccagccctcctgcctgctgggtgtttccgaaaccaggctcttgc

SEQ ID NO: 35504 - DNA, 43 bp, Homo sapiens; identical to SEQ ID NO: 17483
  chr16:27539990-27540033
  hypo

SEQ ID NO: 35505 - DNA, 684 bp, Homo sapiens
  chr16:31213480-31214164
  hyper
cgactgaggaggggcctggatcccagctggcgcggctccagagcctggaaggatatgggccaagtgatccccttcccttcccttcccgccgtggggccggggtcccgttggtcggtaggccaagcgtggggagcctcctttccggtagagcagctttgtttaggggtaggaggaacagaaagcggaagagcccgcggggtaagcgctggtgtgggtggaggggaaagacggggtggaggggaacgggggcggctcaccctggtgcgtggccgcctgcagctgcccggccatctcctgcaggcccatgtcgcgcagcacgttagcggtgagctcggcgccgtaggtctccaggtagaagctgaccagcttgtcggtgaggtccaaggcgtccatggacagcagcgcgccccgcgggatgcgcccgtagccctcgcgcagcggcaccgacagcagcttcagcttgaacttcttgagctcctcggcggtcaggttctccagcgcatccaggatggcgtcgcgcgcgcgccccatggctccaggatccccggccgctgccgccgctcaccccgctgcagccgccgaccaggaggaagtcggctccggggcggaacctggactccccgccttcctcccactctggtctcccgactccccgccccggtccgttgccctccagcaaaaggc

SEQ ID NO: 35506 - DNA, 141 bp, Homo sapiens
  chr16:4092829-4092970
  hypo
cgtttggacgattccggttttggtctgctaacttatcaactgtatgatttgggcaagttcctaaacttctctgtgcttcgtttctcccctttgtaaaacaggactaaaaatattaaaactcggccgggcgcagtggctcac

SEQ ID NO: 35507 - DNA, 176 bp, Homo sapiens; identical to SEQ ID NO: 6963
  chr16:4478626-4478802
  hypo

SEQ ID NO: 35508 - DNA, 59 bp, Homo sapiens; identical to SEQ ID NO: 8031
  chr16:4719497-4719556
  hypo

SEQ ID NO: 35509 - DNA, 334 bp, Homo sapiens
  chr16:49766770-49767104
  hypo
cggggaacgttgcacgacacgccgcctggaactgcgcggaggcagtaaaaatcaatgtttccatttgtggcccatcaaaacatctctcttcttaccaattaagggatgtacagtttttaggttcttttattatcagaacgcgccaactcctggcaatacagaaatcccattaaaagtcaggcagcatatttatctcagggaatctgatctgccgctgcagtgagggtaagaaatagaaagcaaagaaatgagaaatatcatttggagccttcgatattgtaagtcatcatacaaccatggttacacagtcaagtgcccgtctccgaaattcctc

SEQ ID NO: 35510 - DNA, 163 bp, Homo sapiens; identical to SEQ ID NO: 17489
  chr16:53337696-53337859
  hypo

SEQ ID NO: 35511 - DNA, 107 bp, Homo sapiens; identical to SEQ ID NO: 17490
  chr16:56782274-56782381
  hypo

SEQ ID NO: 35512 - DNA, 287 bp, Homo sapiens; identical to SEQ ID NO: 17491
  chr16:57519818-57520105
  hyper

SEQ ID NO: 35513 - DNA, 72 bp, Homo sapiens; identical to SEQ ID NO: 17492
  chr16:58558309-58558381
  hypo

SEQ ID NO: 35514 - DNA, 855 bp, Homo sapiens; identical to SEQ ID NO: 31281
  chr16:666708-667563
  hypo

SEQ ID NO: 35515 - DNA, 783 bp, Homo sapiens; identical to SEQ ID NO: 8044
  chr16:67204024-67204807
  hyper

SEQ ID NO: 35516 - DNA, 319 bp, Homo sapiens
  chr16:67360550-67360869
  hyper
cggcccccattcgccgctttggtgcttttggcgcccccgccagagcgggctccgtaccatggtcgcggctccagcagcgggcgggcgggcttgtgacccggccaataacggttcccggggtcgcggcggcgcgcgcgcggggggcggggcagtgggcggggcctggcgtgcgccgggtggtctcgcgggcggtggcaggtgagcggcgggcggggatggcggagcaatgggagctggacgaggaaggcattcgccgcctgggggcgctgacgctggagcagccgggtagggtctggccgggagggtgtggactgggaac

SEQ ID NO: 35517 - DNA, 827 bp, Homo sapiens; identical to SEQ ID NO: 25180
  chr16:68118222-68119049
  binary

SEQ ID NO: 35518 - DNA, 111 bp, Homo sapiens; identical to SEQ ID NO: 17496
  chr16:69760293-69760404
  hyper

SEQ ID NO: 35519 - DNA, 310 bp, Homo sapiens; identical to SEQ ID NO: 17497
  chr16:70811523-70811833
  hypo

SEQ ID NO: 35520 - DNA, 284 bp, Homo sapiens; identical to SEQ ID NO: 17498
  chr16:77227386-77227670
  hypo

SEQ ID NO: 35521 - DNA, 346 bp, Homo sapiens; identical to SEQ ID NO: 17499
  chr16:84813536-84813882
  hypo

SEQ ID NO: 35522 - DNA, 337 bp, Homo sapiens; identical to SEQ ID NO: 23505
  chr16:85670994-85671331
  hypo

SEQ ID NO: 35523 - DNA, 546 bp, Homo sapiens; identical to SEQ ID NO: 25196
  chr16:87417704-87418250
  binary

SEQ ID NO: 35524 - DNA, 342 bp, Homo sapiens; identical to SEQ ID NO: 25199
  chr16:88106152-88106494
  hypo

SEQ ID NO: 35525 - DNA, 328 bp, Homo sapiens; identical to SEQ ID NO: 8069
  chr16:88111298-88111626
  hypo

SEQ ID NO: 35526 - DNA, 369 bp, Homo sapiens; identical to SEQ ID NO: 29939
  chr16:88700843-88701212
  binary

SEQ ID NO: 35527 - DNA, 148 bp, Homo sapiens; identical to SEQ ID NO: 27696
  chr16:89575936-89576084
  hypo

SEQ ID NO: 35528 - DNA, 414 bp, Homo sapiens; identical to SEQ ID NO: 17505
  chr16:8995963-8996377
  hypo

SEQ ID NO: 35529 - DNA, 170 bp, Homo sapiens; identical to SEQ ID NO: 25210
  chr16:9009875-9010045
  hypo

SEQ ID NO: 35530 - DNA, 119 bp, Homo sapiens; identical to SEQ ID NO: 17506
  chr17:12032523-12032642
  hypo

SEQ ID NO: 35531 - DNA, 155 bp, Homo sapiens; identical to SEQ ID NO: 17507
  chr17:1241096-1241251
  hypo

SEQ ID NO: 35532 - DNA, 270 bp, Homo sapiens; identical to SEQ ID NO: 17508
  chr17:1407895-1408165
  hypo

SEQ ID NO: 35533 - DNA, 210 bp, Homo sapiens; identical to SEQ ID NO: 17509
  chr17:17104713-17104923
  hypo

SEQ ID NO: 35534 - DNA, 226 bp, Homo sapiens; identical to SEQ ID NO: 17510
  chr17:17120248-17120474
  hypo

SEQ ID NO: 35535 - DNA, 112 bp, Homo sapiens; identical to SEQ ID NO: 7002
  chr17:19513145-19513257
  hypo

SEQ ID NO: 35536 - DNA, 705 bp, Homo sapiens; identical to SEQ ID NO: 25213
  chr17:1958915-1959620
  binary

SEQ ID NO: 35537 - DNA, 226 bp, Homo sapiens; identical to SEQ ID NO: 17512
  chr17:20903670-20903896
  hypo

SEQ ID NO: 35538 - DNA, 331 bp, Homo sapiens; identical to SEQ ID NO: 23511
  chr17:21104016-21104347
  hypo

SEQ ID NO: 35539 - DNA, 897 bp, Homo sapiens; identical to SEQ ID NO: 25217
  chr17:27038294-27039191
  hyper

SEQ ID NO: 35540 - DNA, 126 bp, Homo sapiens; identical to SEQ ID NO: 17515
  chr17:30804383-30804509
  hypo

SEQ ID NO: 35541 - DNA, 1615 bp, Homo sapiens; identical to SEQ ID NO: 27707
  chr17:33700165-33701780
  hyper

SEQ ID NO: 35542 - DNA, 130 bp, Homo sapiens; identical to SEQ ID NO: 8091
  chr17:35545278-35545408
  hypo

SEQ ID NO: 35543 - DNA, 379 bp, Homo sapiens; identical to SEQ ID NO: 29962
  chr17:38478466-38478845
  hyper

SEQ ID NO: 35544 - DNA, 322 bp, Homo sapiens; identical to SEQ ID NO: 17521
  chr17:4048756-4049078
  hypo

SEQ ID NO: 35545 - DNA, 671 bp, Homo sapiens
  chr17:40573763-40574434
  hyper
cgccagcctcctcccgccggctgcgctgctgcgcctggcccccgcccccgcaggcatgcggggtgattcacctcgcccagactgcgcccagaccgccggaccccgcaggggctgtccacccactccaccagcccctcttgcactcctgacgcccactcttccccgcccagccccgcccgcttccaggaggcccagggtgccagcgcgccgcgggtgagggtgtcctcaagggcctgaaaatgcctggtggccaggagcagagagcagcgaggggacaggggtgggccgccgaggccgatgtgggggcgcgggggcgcagggtctggggaggaggttggcggtcgcgttccccgcttggcacagcccccgctggtgcgtgcctgagccctgaatcacccgctatatcaggcccgcaggcgcagaggccccaggcccgggccccgcagccagtgtccgcttacagcggaccccaacgatcgcgagggacccctgactttcctagaaacttcccccaagtaggaagaagtttgacagagccaattagggagggagcggtctgcgaggggcagcgtcctcgagtccacccgctaattcggttctgctacaagtttgggacccgagggaaggatctgagtggggaggtgcgaggtgcagagcgcgcccctctacgc

SEQ ID NO: 35546 - DNA, 399 bp, Homo sapiens
  chr17:42402710-42403109
  binary
cgtgagccgccgcgccggccttaacagcgcattttcaccagccccgccccggccgcgcgcggcactggaaaccccagcgccttctggacggcgagggtgacgcactggccctcttcctcggtgtcctcaggtgcgtggcggcggcagtgagaatgagttcttcgagatcgccgggagaccacacaataacgacgaagttacttgccgggctacccgccgagacttgaaaacttcgcggcgacttctctcgccggccttagcatcgcccccatttttcaggttacaggacaggcctgcaactgcaaaacgctttgtaaaccacagggccccgcgcgggtgtgcgccactgggttagctgagctgcagcccgggccgggcgggctgggacgtgagcaagcc

SEQ ID NO: 35547 - DNA, 59 bp, Homo sapiens; identical to SEQ ID NO: 17525
  chr17:45689891-45689950
  hypo

SEQ ID NO: 35548 - DNA, 1263 bp, Homo sapiens; identical to SEQ ID NO: 25254
  chr17:46829437-46830700
  hyper

SEQ ID NO: 35549 - DNA, 1347 bp, Homo sapiens
  chr17:46831595-46832942
  hyper
cgtggcacatgaaaaattcaggatgaacgccctggctgaaagctcttcctgggtttgggacatcagaagaccttcccgggatgggctcttgtctctgcagtagctatgacctgcacataaacctgtttcctacactgtaaaattggcgtaaccaccattccctcccagtctttctctggagtcctaatgggaacagtgacggaatgaaagtgaccacgctggaacccgaagcgctgttcccctccgtggcttcacactgatctccacactagaattccgtgtctgcagttcaagttcaaactactgtggtcggggaagggctacagagatctcgcttggccgtggagtcaccggccccgtccagtcttgcttgggacacatactggtttacactctctcgggttcagtttcctcatctgtaaatggggctcgtatccccctcataaagtggtttgggggataataaagcttgtaaaagcgctttgccccagtgcttggcacataatacgcgctacgttaacaatgtcgcgtacacgcccgaaccggaggaaccccattccacgctccttctggaaccgaattcacctctgaggctttggggcttcagagccggagccgcttgggcaaaaccagcagaacagcgagagggaacgggctggtctagccctgccctgagcatttctactgagacccccggtcctgcttcttccagcctctgctggatttctctccgacccctctggagcgaagccctttggccctgcgttgcatgcggcacggtgcgggttcgggctctgcgctggagccgggatgccctccggcggagggtgcgcgtaggcggcgcctgggcgtgagccccgcctgcaaggctcagcgtcggggaagcacttttctcgtcgacccggggtctttttccgccaaggagctcggggctcaagaactcgggactgggctgtgggcggggcatggttttcctctctgggcgtcctaatctccaatttcaggcaaattcgctaggaagaaccttcccgagcgcgccttctccaacaggacctccaagccagcctcacgcacgcaggcctggctctctcctgcagaatccccacctgccctataactacccacttcagatatgggggaatggaggagatattccaatcacgccatctacctacagtttccacggccccttctgttgaatggtattttcctttagggtccctagaagcagagcaaatgaaaaggccagggggaaaaaaaaaaaaaaaagaaagaaccggtgaattggctctgagcccaataaacggttcctctttccttctccggtcctttcccttccaacagagc

SEQ ID NO: 35550 - DNA, 251 bp, Homo sapiens
  chr17:48503155-48503406
  hyper
cgcttcgcgcctgctcctttggcccccggctcgcaagtagcggggccagcacgtgacccgagggggcaggggatggatggatcttgaccttgccatctggcccctcacggatgtgctgctggctctccctctaggaaatcaacaaatttttgcgcttctaacatccaggcccctgaggatggtcgcgaggaagatctgtttcggactgcagctggggccttcggatccagaggaaaccagggctattcttc

SEQ ID NO: 35551 - DNA, 515 bp, Homo sapiens; identical to SEQ ID NO: 17531
  chr17:4853391-4853906
  binary

SEQ ID NO: 35552 - DNA, 534 bp, Homo sapiens
  chr17:49008620-49009154
  binary
cgcctggctcgctgcggccgcttatcagagccggctgtggcgccggttacgtaaccgggcggctaatgctgttttacttgtcgatgaaacccaaattaaaagaggaaattattgtcctgatgctcaactcgcctaatccccatctgtctcctctctggtcccccgcgctgccgagcgctcgcatctaaaggtcttgaacgcgttccaggtttctaatttcgtttgcttatgcaaccaaaaatattatggccgcgtttcctgggggtgatgaagtctatattctgggctacaggcacactaaaaacggcagcgccagggcccagcgccgctcgcgcgtgcaccacgcgccggctttttttggttcctccgaggcgcgggcagctctgcagccgcgggggccgcaggaggtgggggctggacccgcccggagctcgggagggcccgggatggccccggggagcgcaggtcccggcaggggccgagcgaacaagggccggcctggggcgcccagagacgcgggggaccgttctggtc

SEQ ID NO: 35553 - DNA, 134 bp, Homo sapiens; identical to SEQ ID NO: 17533
  chr17:49281042-49281176
  hypo

SEQ ID NO: 35554 - DNA, 1266 bp, Homo sapiens
  chr17:53342502-53343768
  binary
cgtcgacatttttttttctttctttttttcaattttgaacattttgcaaaacgaggggttcgaggcaggtgagagcatcctgcacgtcgccggggagcccgcgggcacttggcgcgctctcctgggaccgtctgcactggaaacccgaaagtttttttttaatatatatttttatgcagatgtatttataaagatataagtaatttttttcttcccttttctccaccgccttgagagcgagtacttttggcaaaggacggaggaaaagctcagcaacattttagggggcggttgtttctttcttatttctttttttaaggggaaaaaatttgagtgcatcgcgatggagaaaatgtcccgaccgctccccctgaatcccacctttatcccgcctccctacggcgtgctcaggtccctgctggagaacccgctgaagctcccccttcaccacgaagacggtgagcgctgccgcggccccgctccgggaagggacgacgctccgggggtccccctccgcggccgggcacgcccgctggagcatcccccaaccccgctcccgccctgtcccgcggcgccccggccccgcgctgatgaaattgaggagctcacccagcacccttcctccccttcctcctcctccatgaaaggggagggacccctcctgagctacatttaaaagagcttcgggcacccggcctccctgggtcccgctcctgcggcgcgggtgggaggtgtaacttgacaggtcaggatcgttccctagaacgaggcacacccgcacgcagagcgagcccgcctgcggagggcagagcctcccgggctggggaggagaaaccctggggcctggttctgtgcggggcagggggcgggggtcggcttgagggagggggtttcactgcgtagcctgggttttggggttgtgttacagcttctgttactggttagtatttggaactcacgaggtgtgagagaagactcgttttcttctggtgaagggtagctgagaaagcggggtgggggctggggccggtggggggagtggtctctcggcgggaagccgtgcacgcctccagcgttgacactttcccggtgcactttttctggtgggaggggagagcggagcaggctcacgtgtaaccgcgcaggagcctcctctggcttgagccctttcttggtaagtcccaaaccttcccaagacaaccttggccttagcagtagaggaggggtacgtgtgatgaggccccaaacccggctaagtgatgccac

SEQ ID NO: 35555 - DNA, 266 bp, Homo sapiens; identical to SEQ ID NO: 17535
  chr17:55917220-55917486
  hypo

SEQ ID NO: 35556 - DNA, 40 bp, Homo sapiens; identical to SEQ ID NO: 17536
  chr17:57948205-57948245
  hypo

SEQ ID NO: 35557 - DNA, 713 bp, Homo sapiens; identical to SEQ ID NO: 25258
  chr17:58498618-58499331
  hyper

SEQ ID NO: 35558 - DNA, 448 bp, Homo sapiens; identical to SEQ ID NO: 32665
  chr17:60885408-60885856
  binary

SEQ ID NO: 35559 - DNA, 582 bp, Homo sapiens
  chr17:61553834-61554416
  binary
cggccgccctgagcccctccagcacctcccggaggcgcctgcaagacacctaaggtccccgcctccctcctctcccccccgccacacccctacccccggcaggcgacgtccccgcccctcgaccatggcctggtgaagaagccggccaggcccgatcagccccatccccgccgcacgagcggcgcctgcggacagctcctggggccccggccttgtcactccggaggcgggaggctccggggggtcgggctgggaagatcgagccggaggccgctaggctcccaggccccggccgaggctgcgcggccgcacggtgggcaggctcgggtgttccggcaaactgccgggtccccatcttctaaagagaggaggccctttctccagcttcctctgcgggagcccgacccagccccatcccgccacccccgggctgcacctcggcccctccccggcccgcgcccctgcccggggcgggccaggaacctcggcccgcgccgctggggactctggagcggaggaggaagcgcggcggggcgggggcgggggtgtgtcgggttttataacccgcagggcggccgcggc

SEQ ID NO: 35560 - DNA, 738 bp, Homo sapiens; identical to SEQ ID NO: 24077
  chr17:61777761-61778499
  binary

SEQ ID NO: 35561 - DNA, 128 bp, Homo sapiens; identical to SEQ ID NO: 17544
  chr17:61817226-61817354
  hypo

SEQ ID NO: 35562 - DNA, 765 bp, Homo sapiens; identical to SEQ ID NO: 29984
  chr17:62777091-62777856
  hyper

SEQ ID NO: 35563 - DNA, 95 bp, Homo sapiens; identical to SEQ ID NO: 17545
  chr17:66426282-66426377
  hypo

SEQ ID NO: 35564 - DNA, 425 bp, Homo sapiens; identical to SEQ ID NO: 6477
  chr17:66440125-66440550
  hypo

SEQ ID NO: 35565 - DNA, 409 bp, Homo sapiens; identical to SEQ ID NO: 14742
  chr17:6939640-6940049
  hyper

SEQ ID NO: 35566 - DNA, 999 bp, Homo sapiens; identical to SEQ ID NO: 23108
  chr17:70215682-70216681
  hyper

SEQ ID NO: 35567 - DNA, 216 bp, Homo sapiens
  chr17:71201635-71201851
  hypo
cgctcacataccaagtcctctctcttcatgggtggggactgggaattcatttgcagaaagaaggtgcatttccagtcacccagaaccgggcgctgcagctgctttatgatctgcgttacctcaacattgttctgacagccaagggtgacgaggtgaagagtggccggagcaagccagactccaggtgtcgtatcctctagggagctatgtcaaggc

SEQ ID NO: 35568 - DNA, 497 bp, Homo sapiens; identical to SEQ ID NO: 17549
  chr17:72209877-72210374
  hyper

SEQ ID NO: 35569 - DNA, 1419 bp, Homo sapiens; identical to SEQ ID NO: 17550
  chr17:73029792-73031211
  hyper

SEQ ID NO: 35570 - DNA, 968 bp, Homo sapiens; identical to SEQ ID NO: 24081
  chr17:73584153-73585121
  binary

SEQ ID NO: 35571 - DNA, 600 bp, Homo sapiens; identical to SEQ ID NO: 25274
  chr17:74965156-74965756
  hyper

SEQ ID NO: 35572 - DNA, 160 bp, Homo sapiens
  chr17:76100954-76101114
  hypo
cgacccctcccgggacccctcccggctgggcggccccacagacccgctggaacccagcagcggccgcccttttgagtacctctgtccaggactgaagacgaaccttggccgcagtccttgcgaactgttcgcaaaacagtgcgggctgcggtgggtcagc

SEQ ID NO: 35573 - DNA, 192 bp, Homo sapiens; identical to SEQ ID NO: 17555
  chr17:76355660-76355852
  hyper

SEQ ID NO: 35574 - DNA, 360 bp, Homo sapiens; identical to SEQ ID NO: 17556
  chr17:76588327-76588687
  hyper

SEQ ID NO: 35575 - DNA, 1170 bp, Homo sapiens; identical to SEQ ID NO: 34487
  chr17:76992727-76993897
  hypo

SEQ ID NO: 35576 - DNA, 1428 bp, Homo sapiens
  chr17:76996197-76997625
  hypo
cgtcttagacatttcaagacacgagtcctgtgcagcttttccctcaagcctacttgctcctcgtctccccttgggaagggtagtggtgacgggtggccaccgtgtccacagtggtctggttcaagctctctcaggatcctgggagatgtgcttttctgtgtgaatatacacttcgataaaaacataaggcactgccaccacgaaaaacctgactggcctcatcctccgtcttccttcctcagcattgactccgtggacaggttctgtcctcttccatggcccttcctcaccatgccatgccggctgcctccctccacccctcctgcctctccgcccctgacactcccataccccccgccatgaagttgccctgccagctgccccccaccaacatcccctgacactccctcgccacctgccatgaagtagcatccatcagatggcacactcccagcttcagcggcttcctcaggtcctggggtgaacccactctgctcccgctcagccctcacactgtaccatctcctctgcctgccggctggctacatagacctccttctgtcccctgaccacactggccctggcagagcctgcagttccccctgcctggaacagtcgggcctgctcttcgcaccagcagctcggtctctcctacggggcatcagctccctgggaagacttgcccactcgccctccctcccatgccgctccggctctcccaccgtccctgcctggctaggtgattatttctgctcctggggcagggatctggccactgtcacagccccagcacctgacgcactgccaggcagggagcagacagtctgcacgcattggctgaagggaaagagatgccaggtgagccattagccacttcttcaacagcccctctgcactctaccgggggccccaccttaggcatattatgaacccacaacctggatcaagcaccccaaagatcgagctgctcagctgccacatctgagctgcaggcccgggaagacggtgcttgccagcacagaacaacggtgcctgcatagactgctgtcagacatcgtgaggtgtcgtcgtcaccagcccctggaacccccatgttcttccctgttcaactccctcagcactccggagagccactgtcctcaccttcaccattcctgtcaaatctccggcccacttctcccaggagaccactctgtggccaacttcagcagccgaggcccctgggtggggctcacacctgccactcaggtcagtccccccagccgccgggcacctgctcttctggttcctcccttccatccacaggctgccccaagtcgcccaccttgtcaccattttacctccagaccccacactcccacagacactcaactgctgctgaataaatggcgaatctgttaatgaaggaaaacccttccctgagtcccc

SEQ ID NO: 35577 - DNA, 261 bp, Homo sapiens; identical to SEQ ID NO: 16565
  chr17:76998502-76998763
  hypo

SEQ ID NO: 35578 - DNA, 344 bp, Homo sapiens
  chr17:77020165-77020509
  hyper
cgcggcgcggggcacacacggttaatcctccgcggctgctgtttggacgaaaagcgctgggggtgttggaggctcctcgctgctcacatctggctgggcttcgctccttgcgcgtctgtcccactttctccctctcttcctttactttcgagaaaccgcgcttccgcttctggtcgcagagacctcggagaccgcgccggggagacggaggtgctgtgggtgggggggacctgtggctgctcgtaccgccccccaccctcctcttctgcactgccgtcctccggaagaccttttcccctgctctgtttccttcaccgagtctgtgcatcgccccggacctggcc

SEQ ID NO: 35579 - DNA, 578 bp, Homo sapiens
  chr17:77786288-77786866
  hyper
cggccggcccggcccgctggggcctgggttcctttgggttggggaagtgggggtacgaacccacgcggctgtgccaaggggtcccaactccggagtccaaccccacccaccagtcctctgtgcgcacttttcgtttatttctcagcagtctcagtcctggagctcctggggcgatttcgtcccctgccctggtgcgcccccgggccctgccctgagcccatgccccaggccgggtgtccagttcaccctgagctccccttggcgcccggagaagggtgctcgggcccgggtgctggggagcggcggggtggccgccggcgcctcttcggcgcggatggctctcggcggggccgaggagggggtcgcagagcggctccccgccgagaggagggtgggcgctcggcacctgctgagctacggtggtggctgcggtttatggcgcccgaggatccacccggatcttctccgcggagttccgggcttggctcgtctgtagtcagcacgcacacagctttgttatttgttatttttttaatttttctgcggggagcatcggggctagcccgcccagctccaac

SEQ ID NO: 35580 - DNA, 604 bp, Homo sapiens; identical to SEQ ID NO: 25276
  chr17:77807474-77808078
  hypo

SEQ ID NO: 35581 - DNA, 582 bp, Homo sapiens; identical to SEQ ID NO: 34492
  chr17:78041114-78041696
  hypo

SEQ ID NO: 35582 - DNA, 101 bp, Homo sapiens; identical to SEQ ID NO: 17570
  chr17:7807194-7807295
  hypo

SEQ ID NO: 35583 - DNA, 677 bp, Homo sapiens; identical to SEQ ID NO: 25278
  chr17:78271713-78272390
  hypo

SEQ ID NO: 35584 - DNA, 764 bp, Homo sapiens; identical to SEQ ID NO: 17573
  chr17:80019114-80019878
  hypo

SEQ ID NO: 35585 - DNA, 863 bp, Homo sapiens; identical to SEQ ID NO: 17574
  chr17:80045799-80046662
  hypo

SEQ ID NO: 35586 - DNA, 161 bp, Homo sapiens; identical to SEQ ID NO: 17575
  chr17:80049199-80049360
  hypo

SEQ ID NO: 35587 - DNA, 940 bp, Homo sapiens; identical to SEQ ID NO: 17576
  chr17:80050751-80051691
  hypo

SEQ ID NO: 35588 - DNA, 357 bp, Homo sapiens; identical to SEQ ID NO: 25282
  chr17:80394871-80395228
  hypo

SEQ ID NO: 35589 - DNA, 223 bp, Homo sapiens; identical to SEQ ID NO: 17579
  chr17:80517124-80517347
  hypo

SEQ ID NO: 35590 - DNA, 806 bp, Homo sapiens; identical to SEQ ID NO: 29994
  chr17:81038567-81039373
  binary

SEQ ID NO: 35591 - DNA, 787 bp, Homo sapiens
  chr18:11947264-11948051
  hyper
cgcgtagactcaggccagccgctgggcctgggcctgtgtgtccctcaggcggcgacctttggcccacttcaggccggccgtatttaccagcttagaggcgccgcggcgttggcgagtcctttttcacccaccccttccctccgttctcaggcttgaacttgaacaggcactcatgactcagcaaacggtacttgatagggttctttacacgtcagtcaggctattttttaaaatcactcttcctggagatcttcaaaccagaagcaccgcgggccctccccaacgggcttctgcttacctccactacgtgatgcagtatggcccccgggaggccgcccccagattctagaggggcttaccccagacacacccgaaggaccacctcgtgacctcagaggaacagccctagacccaggagagactgccagacacccccgtggcagcccgccagggcccagctctacttgtcgcctggaggtgctgcctcccttccacgccgccccagggaatggccgcccctctggggctcctcccaatcccccttcccaggactgacaatggcccggcgccctgctttgggccaggatcggcctcgagccttcctcactagcggccaagagccggaaaccttgcgtctcagattccccgggtctgtgcacccccaccccaaccggtcttcccacccaggccccccctgatgccagctgcgggcctggacctagcccggggccctgcccctccgcccctctcgctggacagcccaggccggcgcccgagggataggctc

SEQ ID NO: 35592 - DNA, 942 bp, Homo sapiens
  chr18:12307159-12308101
  binary
cgtacaaacatgcacacacacaattaggaatttcccaaagttttcatctgtctaaaaagaaagtgccagtgcaaattacagaacatcgtcgcttcctcatgtgcggcgtttctacgggcctgggaggggacgcagaggctaccccggtggtcccagcctgcagcgttcacgtgaggaaacttccgcaaaagccctgatgcatgcacattctgactgcagaggccagagcatcccgcattttggaggctgaaaggctcccctaggataaccttttccgttaacagaggagtccgctgaagcgcagagctaactgaaaacagctagaattaaaatccaagtcacccggccggcatcagcagtcattcctttccaccacacaaaactggccaggaagacggactctggcgcgccctcccaggccgaagcgcatttcttcgctaacgcgcgaggagtaggctgcatagacccggcgcaggaggtgttcattttcggatccagccctgtagtcactttagctaaacccggttccaaaggggtgggagtcgtcggagaggaatggcctctgtatctccggagacggaaacaccaggacgaagaggccctaagaacgtgtgcccggggtgcgaccggggggtggggggcagggggcagagaccctgaaaagctccaccgccgaaccccagggcagtgtcccggcttggctggactgggcgcgggcggctgcaatgctcccgggcgcggcgctgggaccccgcgggccacgtcggctccgctgccccgacgccagggcccgactcgcgtctccctctggcggggcaccacaaggggcagcgaaacggtggtgggggcgggcgccgcgctccttcccgtctcctccccgccagctccgggcccgtccttttccgcccggctcccggcaagggtcccccgactggcgcccgc

SEQ ID NO: 35593 - DNA, 165 bp, Homo sapiens; identical to SEQ ID NO: 17583
  chr18:13033480-13033645
  hypo

SEQ ID NO: 35594 - DNA, 419 bp, Homo sapiens; identical to SEQ ID NO: 25293
  chr18:13826252-13826671
  hypo

SEQ ID NO: 35595 - DNA, 762 bp, Homo sapiens
  chr18:20716114-20716876
  binary
cggggttagccgctgggtccggcccctgcctcccacagccctcgtcgctgccgcccttgattcctggcggccatgcgaccgtgtccggccccggggtggcgcgggggttcgcgagtcccctgggcgccggccgggcgtcgggggagcagtggcagccgccccggccggcgcctctcgccgcctgtgcccaactgcagctgctcgacgggtccggggccgccgggcaggaggagttggaggaggacgatgcctttatcagcgtgcaggtgccggcggccgcctttttgggctccgggacccccgggagtgggagcggcagtcggggacgcctcaactcgttcactcagggaatcctgcccatcgccttctccaggccgacttcgcagaactactgctccctggagcagccaggccagggcggcagcaccagcgccttcgagcagctgcagaggtcccggtgagtatccgggatgcgacgcgcacccaaccctgcgtcccgcccggcgctcccagcctccccgcggtctctgggctacgggacacgggttgctcccattttcccgcgccctgccggatcctgtgctccgggcccgaatcccaaaccacgagggcacccaaaagagggggcgtccccagggagtgcggggttacacgtgtttgcacgagcccagcattcgcagaggagcaccgcgcttgtgcagtgggtcgggaattgggagttgcaggagcccagtagaaagcggcgtccgagcctccccacac

SEQ ID NO: 35596 - DNA, 284 bp, Homo sapiens; identical to SEQ ID NO: 5767
  chr18:46418923-46419207
  hypo

SEQ ID NO: 35597 - DNA, 800 bp, Homo sapiens; identical to SEQ ID NO: 23121
  chr18:47339411-47340211
  hyper

SEQ ID NO: 35598 - DNA, 264 bp, Homo sapiens; identical to SEQ ID NO: 25303
  chr18:55850838-55851102
  hypo

SEQ ID NO: 35599 - DNA, 1131 bp, Homo sapiens
  chr18:59560090-59561221
  hyper
cgtttaggaggcaagaggctgacaggcaggaaacacaattgagactgagctttcttcagcctgcagtgaaatacatgcaggaagggttagatacgcgccgcggagaaggaaatccaagcgccctcctgggcagacggggctggagcgggtgcactagggaggtggagcaaggcagatgaggtgtggagggctggcggccgagaagggggcgtcacggctcctaattgtctctacaggataaataaccacctcccccctcctccgcagtctcccccgcccacgagttcccctctggtggcagagcgcctactagcaacagtaagccctaggaaagaaagaaatcggagcaggtggggaataacatcttggggcaaagacacactggcaaaatctaccaggtaacccggtcatatgggaatgcggggcgcctagtcagccgcgcagacaggcacacagcgcggcaatcccgagcatctttctttcgtttgcccctgtccgccacctcatcaagtcaccgccacctcatcaagtcaccgtcacctcatcaagtcaccgtcactctgctttggcgatttctctactctctccagacccaggcagcgctccccaagccatgccccgaccccaggcgggattggggaccgccgcttcccgagcagcgccccacgagtccagctggctttgtcctgccgctgtccttccaggagcaagcgccccaggcgcgtgtgtctgcacaaaagacccccaacatctggcccttcacagcgctctctaatcccgggaggggccctggggcaacttctagggctggagaaggcgcgagacaaggggaccgggagaagatgagccggggtgtgtgcgggccgggggcgcaactggggcgggcgcgcgcgcacgtgcacacccaggggcgcgcgcggcgcgggcacgaggaaagctccctcggaccggagctccagggggcatccgaggactcggccgagcagccgacagcgccgctccccgccgcggccgcccgcccaactccgccagctctcaggagacacgcaactcccgggaccacctcccccgtgccccgccagaccccgcgctcccctccccgggaccctgcggccccgccaccccctccgc

SEQ ID NO: 35600 - DNA, 650 bp, Homo sapiens; identical to SEQ ID NO: 24119
  chr18:60985398-60986048
  hyper

SEQ ID NO: 35601 - DNA, 418 bp, Homo sapiens; identical to SEQ ID NO: 24120
  chr18:74113780-74114198
  hypo

SEQ ID NO: 35602 - DNA, 196 bp, Homo sapiens; identical to SEQ ID NO: 17598
  chr18:9569216-9569412
  hypo

SEQ ID NO: 35603 - DNA, 877 bp, Homo sapiens; identical to SEQ ID NO: 30037
  chr18:9708731-9709608
  binary

SEQ ID NO: 35604 - DNA, 362 bp, Homo sapiens; identical to SEQ ID NO: 25317
  chr19:10197461-10197823
  binary

SEQ ID NO: 35605 - DNA, 865 bp, Homo sapiens; identical to SEQ ID NO: 24127
  chr19:10397603-10398468
  hyper

SEQ ID NO: 35606 - DNA, 136 bp, Homo sapiens
  chr19:10762085-10762221
  binary
cgtgagccaccgcgcccggcgtctttggcacatttgacgtatcatgtgactatgctacctattaaaaatccacagtaaaatgtaaataaaatagaaaagcagagggtacagcatgcactcatttcttttttgagac

SEQ ID NO: 35607 - DNA, 175 bp, Homo sapiens; identical to SEQ ID NO: 25321
  chr19:11008216-11008391
  hypo

SEQ ID NO: 35608 - DNA, 666 bp, Homo sapiens; identical to SEQ ID NO: 31449
  chr19:11029968-11030634
  hypo

SEQ ID NO: 35609 - DNA, 125 bp, Homo sapiens; identical to SEQ ID NO: 17603
  chr19:11172767-11172892
  hypo

SEQ ID NO: 35610 - DNA, 916 bp, Homo sapiens; identical to SEQ ID NO: 25322
  chr19:11529251-11530167
  binary

SEQ ID NO: 35611 - DNA, 664 bp, Homo sapiens; identical to SEQ ID NO: 34537
  chr19:11531278-11531942
  hyper

SEQ ID NO: 35612 - DNA, 409 bp, Homo sapiens
  chr19:11689277-11689686
  hyper
cgcgcgtgaccacagacctctgaccctcatagtctcagcagctgtctgcaggccctccacgggaccgcagcctgggagggcaggaggccctgcacctgcggccggtctgacctgctcctcacctccctgcctgcctcctccgtgctgggcgccgccgcgacacgtcccgcggacattcaggagtcccttcagtccctgcgagcgcggacccgggagagagctctcattcaacgctgaggccactggctcacagatctccccgggtcaccctgcgaagtgcttggtcccccccattcccagccctgcagcagcaacaaacgggaaggaagtgggtgacgaggacaggcagagacccctcccacggggccgcccgcatctcacctgccgtcgcggggcgggcgttgcggcc

SEQ ID NO: 35613 - DNA, 610 bp, Homo sapiens; identical to SEQ ID NO: 17608
  chr19:12900128-12900738
  binary

SEQ ID NO: 35614 - DNA, 645 bp, Homo sapiens; identical to SEQ ID NO: 17609
  chr19:13108022-13108667
  hypo

SEQ ID NO: 35615 - DNA, 750 bp, Homo sapiens; identical to SEQ ID NO: 17610
  chr19:13109260-13110010
  hypo

SEQ ID NO: 35616 - DNA, 154 bp, Homo sapiens; identical to SEQ ID NO: 17611
  chr19:13110344-13110498
  hypo

SEQ ID NO: 35617 - DNA, 171 bp, Homo sapiens; identical to SEQ ID NO: 17612
  chr19:13110794-13110965
  hypo

SEQ ID NO: 35618 - DNA, 1257 bp, Homo sapiens; identical to SEQ ID NO: 17613
  chr19:13265772-13267029
  binary

SEQ ID NO: 35619 - DNA, 324 bp, Homo sapiens; identical to SEQ ID NO: 17614
  chr19:15235629-15235953
  binary

SEQ ID NO: 35620 - DNA, 1472 bp, Homo sapiens; identical to SEQ ID NO: 24134
  chr19:16186802-16188274
  binary

SEQ ID NO: 35621 - DNA, 172 bp, Homo sapiens; identical to SEQ ID NO: 17618
  chr19:16763531-16763703
  hypo

SEQ ID NO: 35622 - DNA, 706 bp, Homo sapiens; identical to SEQ ID NO: 25343
  chr19:17008145-17008851
  hyper

SEQ ID NO: 35623 - DNA, 376 bp, Homo sapiens; identical to SEQ ID NO: 7082
  chr19:17172577-17172953
  hypo

SEQ ID NO: 35624 - DNA, 618 bp, Homo sapiens; identical to SEQ ID NO: 25345
  chr19:17958343-17958961
  hyper

SEQ ID NO: 35625 - DNA, 215 bp, Homo sapiens; identical to SEQ ID NO: 24141
  chr19:18241264-18241479
  hypo

SEQ ID NO: 35626 - DNA, 617 bp, Homo sapiens; identical to SEQ ID NO: 24142
  chr19:1856948-1857565
  hyper

SEQ ID NO: 35627 - DNA, 237 bp, Homo sapiens; identical to SEQ ID NO: 17626
  chr19:19156738-19156975
  hypo

SEQ ID NO: 35628 - DNA, 1111 bp, Homo sapiens; identical to SEQ ID NO: 22826
  chr19:1978023-1979134
  binary

SEQ ID NO: 35629 - DNA, 693 bp, Homo sapiens
  chr19:2488431-2489124
  binary
cgtgaagagcgctgcgggccaagaccctcttgcgcatgtgacgagagcgcacgagtgtgggagcttcggcctgcgctcacaggcgtgtgcgtggggaagtgtttgggccgccgtgtacacagcaggcacgccataaacgcttcttggatggctccatgcgagggaagggagggagggcagagttcaggccctacagggaggaaaagggaggggcggaggcctggctttaggtttgaatctccgcggcttactagctccagcagctcagcaaaagcgtgactcagtttccctcgtccataaaagggaaagccgaatcgccctcccacgtgtcgaggtgaaactagacagtgcactaaggcacttagcaaaacgcgctgccttgagaacccttattacgccttccttccttccacctcaccccctggccagacactctgggggtggagaggggcgctgacccaggccccagacgcccctcccgtccgccctccctagcaggcaggagtcccggctttcccgttccttaaattggataattggagacagaggcgggtgctcgagacggagaaatccccaagtgggcgaaaggcaaggggcctgtcctagtttccctgcactgggggcccccaccctcgccagcgctccctccggtgcgccctgggcgcgcagtctgtgcgctcgggagcccccagc

SEQ ID NO: 35630 - DNA, 324 bp, Homo sapiens; identical to SEQ ID NO: 17630
  chr19:2795325-2795649
  hypo

SEQ ID NO: 35631 - DNA, 577 bp, Homo sapiens; identical to SEQ ID NO: 17631
  chr19:2796376-2796953
  hypo

SEQ ID NO: 35632 - DNA, 38 bp, Homo sapiens; identical to SEQ ID NO: 8230
  chr19:32849484-32849522
  hypo

SEQ ID NO: 35633 - DNA, 158 bp, Homo sapiens; identical to SEQ ID NO: 7101
  chr19:32850587-32850745
  hypo

SEQ ID NO: 35634 - DNA, 654 bp, Homo sapiens
  chr19:34310910-34311564
  hyper
cggttcagggcccccgaggaagctgcggtttggggcgagccgattgcaccagcagggccgggctgctgctcccggggctgacgcgggccacgccctcctggacgcggacacacccccatttccccgggcccacagagccacgcctggccctgcagccaaacagcgggaaggcagattggtacgagtaggtacaaggccctggaattctcgcccggttgccacacactgcacggagcataattgggggaggttgtgcaactgcccgggaagccggggctcgcaacgagggctctctccaagtccccatcacaggcctccggggagcctcgggacagagcctgacgccaccttcgggtgacatcgatggcctcgctctggcagaggagtagtgtggctctgccgagaactggggagcccgggtccccgcagggccaaggggagggagggctggcggaaggggccgcgcccacagccccaggtggcagcagcggcggtggcggtcccgactggcagagcctaacgagaacagggcctatccccaggggccccgggctggacgcagaccagatctcgcgggggtgggctgggaggcgcccgccagaggccggaggctgacagtgcctttcctatcctatgggtctattgtgggcccgc

SEQ ID NO: 35635 - DNA, 78 bp, Homo sapiens; identical to SEQ ID NO: 17636
  chr19:34949560-34949638
  hypo

SEQ ID NO: 35636 - DNA, 68 bp, Homo sapiens; identical to SEQ ID NO: 17637
  chr19:35169531-35169599
  binary

SEQ ID NO: 35637 - DNA, 1130 bp, Homo sapiens; identical to SEQ ID NO: 25363
  chr19:38701113-38702243
  hyper

SEQ ID NO: 35638 - DNA, 324 bp, Homo sapiens; identical to SEQ ID NO: 8236
  chr19:38781936-38782260
  hypo

SEQ ID NO: 35639 - DNA, 254 bp, Homo sapiens; identical to SEQ ID NO: 25374
  chr19:40829764-40830018
  hypo

SEQ ID NO: 35640 - DNA, 555 bp, Homo sapiens; identical to SEQ ID NO: 14798
  chr19:45579321-45579876
  hyper

SEQ ID NO: 35641 - DNA, 772 bp, Homo sapiens; identical to SEQ ID NO: 25382
  chr19:45655296-45656068
  hyper

SEQ ID NO: 35642 - DNA, 602 bp, Homo sapiens; identical to SEQ ID NO: 25385
  chr19:46379840-46380442
  hyper

SEQ ID NO: 35643 - DNA, 836 bp, Homo sapiens; identical to SEQ ID NO: 24175
  chr19:46519167-46520003
  binary

SEQ ID NO: 35644 - DNA, 112 bp, Homo sapiens; identical to SEQ ID NO: 8263
  chr19:47646754-47646866
  hypo

SEQ ID NO: 35645 - DNA, 993 bp, Homo sapiens
  chr19:47729538-47730531
  binary
cggccgcgggccacgggcgcgcagctccactcctcggcggcctagtccctggccctggccctggccctggctcgggctccggctatgccagccgcggcgcggagtccttgggcggctctgcgggcgcgcgattcccccccacccacttaccccccacctgcctgtccgcggagcgacccagccgcgcagggcagcagctgccgcacatctggcgggggccgcctgccgccccctcctccggcggaagtcccacctgccgtctaccccacccccagcactcacccgccgctcgtactgtgcgttgaggtcgtccgccatccgccgcagctgggccccgatctcccgggcccactgttcctcctccccgcggactcccggggccgcctgggtgggaccgcccgccagagcccccggggcgctgggcacgggcgactccaggtgctgctccgccagcgagagcgagggctgaggaccttggagaggcagaggggcgcggtcagcacccaccacccctccaggcctcgaggtgtctcggcctgctcccctctttcccagccactgctccccgcctcatttctagtgatcccatcgctagtgagtcaatttctcagcttctcctccacaggcaccagaaagcaagaagtacctggggacgccgctctggggtcacctgtctggccagctacgtccccacggcccttgtcagtgtggaaggtagacggccagagaggtgaccccgggggtggtcaggcttaacgacctctattttccaaaggggccacattttgccttttccatgtgacaggcagggaaactgaggcccgcccttagggagtatcccaaggtcacacagggatacagtgactgaccccacccagatcacaagcctcaggtctcctgccctctcgtgtccaaccacagggaagccacacctccggatgtggcagaggcctagagaccagaaggccagagactgtggcagcttcagagcgc

SEQ ID NO: 35646 - DNA, 287 bp, Homo sapiens; identical to SEQ ID NO: 17647
  chr19:47731303-47731590
  binary

SEQ ID NO: 35647 - DNA, 637 bp, Homo sapiens; identical to SEQ ID NO: 25392
  chr19:47742612-47743249
  binary

SEQ ID NO: 35648 - DNA, 202 bp, Homo sapiens; identical to SEQ ID NO: 8268
  chr19:48012665-48012867
  hypo

SEQ ID NO: 35649 - DNA, 480 bp, Homo sapiens; identical to SEQ ID NO: 14804
  chr19:49199703-49200183
  hyper

SEQ ID NO: 35650 - DNA, 122 bp, Homo sapiens; identical to SEQ ID NO: 17650
  chr19:4934661-4934783
  hypo

SEQ ID NO: 35651 - DNA, 550 bp, Homo sapiens; identical to SEQ ID NO: 8271
  chr19:49467064-49467614
  binary

SEQ ID NO: 35652 - DNA, 133 bp, Homo sapiens
  chr19:49703584-49703717
  hypo
cgcactgtcctctgcatcgacttcatggttttcacggtgcggctgcttcacatcttcacggtcaacaaacagctggggcccaagatcgtcatcgtgagcaagatggtgaggcaggggcggggccaaagtgggc

SEQ ID NO: 35653 - DNA, 133 bp, Homo sapiens; identical to SEQ ID NO: 17653
  chr19:49703923-49704056
  hypo

SEQ ID NO: 35654 - DNA, 181 bp, Homo sapiens; identical to SEQ ID NO: 24184
  chr19:50320022-50320203
  hypo

SEQ ID NO: 35655 - DNA, 441 bp, Homo sapiens; identical to SEQ ID NO: 25405
  chr19:50364788-50365229
  hypo

SEQ ID NO: 35656 - DNA, 676 bp, Homo sapiens; identical to SEQ ID NO: 17656
  chr19:51303021-51303697
  hypo

SEQ ID NO: 35657 - DNA, 186 bp, Homo sapiens; identical to SEQ ID NO: 17657
  chr19:51324279-51324465
  hyper

SEQ ID NO: 35658 - DNA, 339 bp, Homo sapiens; identical to SEQ ID NO: 17658
  chr19:51416002-51416341
  hyper

SEQ ID NO: 35659 - DNA, 1266 bp, Homo sapiens
  chr19:51521986-51523252
  hyper
cggtagtgtaaaatggagcggggccgggatggggcggcgtaagaggaggagaaagaacgcggcgaagagtccacggaagagcgaggatccgggtggcagaaatcggacagggcctgagtggggcgggtcacccaggggccgagccagaagaagggcccagctgacttgggggcgggccgtgctccggagcgctgggtgggtgctggggtctcgggggaggagaggtgcgcggggcttggtgacgggaacacattctcctcccgcccgtgcctcccaccggcgcctctccccgccccctgcccccgaccttaccccagagttgcgccatcagcagcggcagcagcttcgccagagcccgggcgccagaggcggcggagaggtggaggtgcggagctctcatggccaggatctgctggggtgtgtgcaggggcgggttaaaacagatgctccgttagagacccccacctcgccgcgctcatccgcccagcctgggccaccccagcccgcaagcacccttttgacctgcagccgataaccccaggggctggcagacgggagattcgggctggaacagcggtaatgggcacaattaccctaatgacgcccctcgcggcatcttcccgtcctccctgtgcccgagtggagcgctctccgcgccccagctaccctggctgcagccacgccgcgcccgaggtttccccctccttcacgcgcggggtggggatccgaggctcggagccagtgggagcctctttctcaacctcacagcggggggacttccgcgtcccgcaggtggagaaaccgaggctctaagccggctcctgcctgtggcccgggggtccccacccatcctctcgcaatccaccccaacccgggtggggtgcaggtagcttcacctgggagtcgccgataggaaggagggaggggacccagacgtgcctctgccctgcctgtggtctgccgctggtatcctctgcccagggacccctggcgggaccttcccttttaaccccaaggagtccggaagcttctccaccctcccctacccccacccccgggctccctccctttccctctgtctaattgtaccgtgggtgaggctggcactcctgggtcccagattcctgctctgggaggggccctggaatacaggcttctcccagtgcccgaaacgcccccttttcatcccttttggaactggcttccgtggggattctccgggtcccggtgccaagaaggcttcccaggcgcggggagagggttcac

SEQ ID NO: 35660 - DNA, 663 bp, Homo sapiens
  chr19:51568027-51568690
  hyper
cgcgggaggggctgctgcgagggtattttgggaggtgaagggtctggggtcggagggccaacctcagccgggaaaccaggtcacccagggacaagcaggaagagctctgagctgtccccactggacccggccccgagtgggcggggggcggagctcgcggctcccacgccccctccccctccggcctgacccctcctaccattgtcccgaatggccgccgcgcctccacccccgcgcattcttacctcctgacaaggccaaggtcagggaggcgatcactagggccaggggccacatggctccgggatcgggaggggagggcagggcgggcggggcctgaggagaaggtgaagggggtgttgagggcgtgcccggaacctccgcgtctgaaacctctctgctcctgaatgtctcctcgcctcattcactcttgacagccctgaccctggaatctgccccccgcctccaattccatccttggtgggggtgcagtggcgaggtgggaggaacagtgtgcaacctcctggggctccggcgtgcagcccctcaccccaggaagccgtccctcctcccctgccctctggcgagctgggtggtcggtgcactctcgcccttttcctccagagtctgccttccattctacccctctgggtctgtccacac

SEQ ID NO: 35661 - DNA, 136 bp, Homo sapiens; identical to SEQ ID NO: 17661
  chr19:52406169-52406305
  hypo

SEQ ID NO: 35662 - DNA, 415 bp, Homo sapiens; identical to SEQ ID NO: 17662
  chr19:5269156-5269571
  hypo

SEQ ID NO: 35663 - DNA, 717 bp, Homo sapiens
  chr19:5608081-5608798
  binary
cgccctggaggctctgcatacttcagtcaagtagctgagtggtgtcctgcccctctggccttcctacgtccttctgtttttgtccagagctgagccccacaggtaaggccaactctgtcactcacgcctcagctgaatgtcacttcttcagcgagctctgctgaagctgcctcccaaatctaaacacggcctccccaacacactgacggcgtgctctaatattccttaatacgctcatcacaacacatcatatgtgtttatttcttaaatggtctttttcccgccagactaaaaaatctgtgatgacagtgaccacgtatgtttacctctgcttaatcatcagtgtccgagtgaagtcaacaaagtaactgaataaacaggttattcatggctataagaatttcctaagcccttgctgaacacacagactgttcagagaaaaattgaacagcacgctttctccgggtcctgtccgcttcttaagcaatgaaacattaaccaacacctgatcgggtgacacagacctagacaaaggaacggcttctgtagccagaaaactgtgtcagacagggcccactctgcctggaatcagggcaccctccagacactaaatggtccgaaccttgtcccttggaagccactccccagaggcacccaggagaccagggcagtgccaattgcttaccagaagactcttggctaggcgcggtggctcac

SEQ ID NO: 35664 - DNA, 84 bp, Homo sapiens; identical to SEQ ID NO: 17665
  chr19:5630448-5630532
  hypo

SEQ ID NO: 35665 - DNA, 102 bp, Homo sapiens; identical to SEQ ID NO: 25416
  chr19:58874823-58874925
  hypo

SEQ ID NO: 35666 - DNA, 553 bp, Homo sapiens; identical to SEQ ID NO: 25419
  chr19:59049750-59050303
  hyper

SEQ ID NO: 35667 - DNA, 311 bp, Homo sapiens; identical to SEQ ID NO: 10471
  chr19:5938115-5938426
  hypo

SEQ ID NO: 35668 - DNA, 126 bp, Homo sapiens; identical to SEQ ID NO: 17668
  chr19:6020529-6020655
  hypo

SEQ ID NO: 35669 - DNA, 271 bp, Homo sapiens; identical to SEQ ID NO: 8295
  chr19:7685308-7685579
  hypo

SEQ ID NO: 35670 - DNA, 134 bp, Homo sapiens; identical to SEQ ID NO: 17670
  chr2:101696603-101696737
  hypo

SEQ ID NO: 35671 - DNA, 1127 bp, Homo sapiens; identical to SEQ ID NO: 24222
  chr2:111874622-111875749
  hyper

SEQ ID NO: 35672 - DNA, 823 bp, Homo sapiens; identical to SEQ ID NO: 34624
  chr2:121199964-121200787
  hyper

SEQ ID NO: 35673 - DNA, 722 bp, Homo sapiens; identical to SEQ ID NO: 27846
  chr2:12857960-12858682
  binary

SEQ ID NO: 35674 - DNA, 1051 bp, Homo sapiens; identical to SEQ ID NO: 25433
  chr2:145281217-145282268
  binary

SEQ ID NO: 35675 - DNA, 169 bp, Homo sapiens; identical to SEQ ID NO: 17678
  chr2:149525294-149525463
  hypo

SEQ ID NO: 35676 - DNA, 669 bp, Homo sapiens; identical to SEQ ID NO: 23186
  chr2:149645382-149646051
  hyper

SEQ ID NO: 35677 - DNA, 120 bp, Homo sapiens; identical to SEQ ID NO: 17681
  chr2:152681239-152681359
  hypo

SEQ ID NO: 35678 - DNA, 741 bp, Homo sapiens; identical to SEQ ID NO: 30125
  chr2:160760627-160761368
  binary

SEQ ID NO: 35679 - DNA, 619 bp, Homo sapiens
  chr2:170219926-170220545
  hyper
cgtgcttcttacaagtctgctcattttgaagcaaaattgaaaaagagcgaacgtcttctccatggttccggtacccttttataagaaggagaaacacgagaggttcagggaacccctagcctcccttctttggggccgctttggacaggctggcaaggggcccggaagccaaaagcacaagtggccttacacccgccctcagcgcacgtcctcagcctgtacgtgacatcagagcccacagggaggggtaaaaaaggagggttgatgcaagttatttcccggtggtgggaaccctgtgtgagaaggggctgtttgcgggcctgaggccatcccatcatctccagctccagcccctgaaccagcgcggcagctagtcccaggctccggatcctggtccaagaagtcaggagccctttccctccagcgaaggggccgtgacgcatggaggagacagccctgaacgcacgtggtcgctggacaggttcccgctgcctcccttccccaggggcgagaacctgccaattactgccagcccctttccccggggcacaggtcgtccggggctctgctgaccccaacagtccggatcgcgtagcttccgtgggctgcagtggtaggc

SEQ ID NO: 35680 - DNA, 140 bp, Homo sapiens; identical to SEQ ID NO: 24229
  chr2:170551744-170551884
  hypo

SEQ ID NO: 35681 - DNA, 1014 bp, Homo sapiens; identical to SEQ ID NO: 31577
  chr2:171567970-171568984
  hyper

SEQ ID NO: 35682 - DNA, 888 bp, Homo sapiens
  chr2:171569927-171570815
  hyper
cgttgggggagaagggggcgtgcgagtgcaggatgtgcgagggacccattgtatttgggtcgcaagcagcccacccgtcttgagtacgatattctcattccgcaggcgcgccctgggcgtgggagaaggtgggcccggaggcatcgcatccccgacccctgatggaagtgcggagggcatccttatacagtccagattccgagtccgttgtagttaggctaacctctgacgctgcatcgggagataggtcaccccgtccgtcccggtcgcagtgcggttcccgtgaggaagacgggcagagaggccgggcgcgaactgattaggggctcccccacggccggcggcctggagagtggagactgtgtccgacgggaggtgggtgggggagaggagtaggccgagctccggcggccactccgcagtgcgctctcgcgagccggggccgcgaggcctccaacgcggttccgcacccctaatgccccagggcggtgagcaccccgcggttccccgcccgcctcttcctccttccccgcccgcgcgcccgggagaggcgatccccgcgtccgcagtgccggggcaggacgcgccctgcgccctgggccaggaggaggcaggtggccctcctcggcaggaggtgagccgccagggagggatgggggtcacccaagcccctgcaagcgcgaccctgcccagagcaaagcacgccccgcgcctggtgaggaactttttctttccaaaggtggcaggaacaagtctgtactgacttttctcccgccttcgggatcctctctcgtatgatttgtggtttgtgggaccacaacaaccaggcttcctcgaccgcgccttttttccagtagctcctggtctgccaggcttgcgagagggcgc

SEQ ID NO: 35683 - DNA, 1300 bp, Homo sapiens
  chr2:172960833-172962133
  hyper
cgactttttgagaggggacggggcttcttgctcccggacattgttctcttgggcggaggggaccacttcagagcttctctttgcacccgcctcttctgcccctcgtcttctaccactgaactgtttgtaaacaaagttccagtcttcccccgctctctccgcctccaccaaaccggtatttctcccaaattcgctccatcagtctgggatcgttacacagggcggatattcacaattttcacaagtgatcctgaaagaaggcctaggggaagcctcctaaacggtcccacattgcagcagggctggtgaggcctgggatccattctctctcttttctgcccttcccatcccggagtctcggggccggcggcgggaattccgcgcagccggaggggggtctgcgcccagcggagcgccgtgctggggcgaggtggctgtgggcagagcgtgcaccggggttggggggagaaggggattgaaggggcggggggcgcgggagtacctgggcggcaggcagttggccctggagctcagtgcccgcgttctgcctgagttgggagagccctgccagagggtggagcggagagggccgtgcacccctcactcttcagcttccctccccctgcttcccagcgcttgtcatatcctgtctctggcctgatatttcacgcgagcaattggaaggagattacaatggagatttatgtgtgttctgagcactgctagtttcccagcgtagagagccgagatcgctgcttcccatttccatttttcattcgcgctttggggagctcagtagagcacggggggagcgtgtctgcgcggcggcgggctgatcacaggactccgcgtctccgggcgggccgggagactgtgagaaaggcttgccagcgcgtcgcccccggcggggctggagccggcccccgcctccaggagccaggctttgtttcctcccttgcctacccctccccctttccgccccctcatttctgggacctgggcgcgtccttgcaaccccttctctttgcccttctcgtggtctgcggaaacacccccttcctctggccccttcaccctcctgctctcggcttcgcaggctccctggggaaaggcacaccgtggcccggcccgaccctgtcgtcactgggtgccgggtaaggtgactccggcgagtctgtggggcctcagcccaccccggagctgggagctcccgccctcccgactcccaggcttggctcatgccaaggcctgttgcgtgattccaacttgggctgacattccctgccccgggctctccagc

SEQ ID NO: 35684 - DNA, 535 bp, Homo sapiens
  chr2:172963623-172964158
  hyper
cgcgcgctcgagcacggccccgtgtcgttggggtcggcttgcattccagagcagccagccatgcctcccgagggtgactcacagagctctcagttcagtcccgaagggcggtgggacaaacggaggggaaggttcaaagtagggttccgaccctcaggctgctgcagagctcaggtccctgacaggaggtcccccgcggcggctggggtgccgagcctggccatctaggcgggcgcgggggcggtggcgccggcgccggaggggcagggcaggcggaggctggagccgctccgcgctgagtgagtcaccccgccgccggccggagaatccctcgcggggactcgggagggggcggggcgtgaaacccccggtgcggccccacgcccagcgcgcctgtcctctccttgccgcacctcgcggtgtcgcagcctcggaaagatgtaaacgtagctctcggccggctggcttcccggcctgggcagcggcttgagctctgagcacgtgactgaccggaccctggcaccaagaaaaaagc

SEQ ID NO: 35685 - DNA, 1260 bp, Homo sapiens
  chr2:172964685-172965945
  hyper
cgctcctgggggagcgcggtgggggtaagataagggatgggggctccgagggctgggaactgcaggaaggaaagaagcggcggggccgcccgggtcaaggggccacgtgggggagggcgggcaggcgggaccgggaggtcaataactgcagcgtccgagctgagcccaggggagcgggcgaggagaaagaagcctcagagcgcccgggaagcctcgcgcgcctgggaggcttccatctcccgggacccagctctcagcccggggcgaggaaggcgccagacaggctcacccggaggggagggaaggcaagtccgaggcggggctcgaaacagccgagacccggggctcaggtcagaaatgcggccttttagggaggcctttgccaagctgctgtccggttcccccgagagaggggcccgtttggtggccccgggagtgagcagggcctgagacgggccactgcaggtcgcagcctgcaggagaggtgggtggcggcagcgggccgggaggagggaaccccggctcggggtaagcaatgaggataagtggtctctgctctcagtctctggcgagttctccctggggttagaaaatcgtccccgcgctcaccggggcgcccccgccgccgtgatggtggtggtggtgatgcggctgcggggtctgagtggggtgcagcagcggcgccgtggcctgcaggtgtgaggcggatcccgaggtctggtggtaccaggggtagttgcccagaaaagccgaggccgcgctgctcgggctggagcccgagctgccggcgccgctgccgccactgcccggaccaccgccgcccgccatccgctgcggcacaccaaagtcccaggaggccggcgctgagactggcggcgaagcacaaggtggagaagcgctggccccagggtgctgctccgaggggatctcaccacttttccacatcttcttgaacttggaccggcggttctggaaccagattttgacctttgaggaaaaagacctgagcattagtggaggaacctagtcttggggcagtaggggttcgaagaggagaaaaaagaaggcagagaaaaaccgctggctagcggtgggcagcgagcgccctggggagataagaggatcacgggcggcggccttcgaggctctgccggttcctgctccctggggaggtaattgccaaaaggccaggactgctggtgtacgtgcactgtgatgatggtgacagcgggagggtgaggagggccagttatttcaccc

SEQ ID NO: 35686 - DNA, 460 bp, Homo sapiens; identical to SEQ ID NO: 17688
  chr2:17699502-17699962
  hyper

SEQ ID NO: 35687 - DNA, 724 bp, Homo sapiens; identical to SEQ ID NO: 26765
  chr2:17719692-17720416
  binary

SEQ ID NO: 35688 - DNA, 794 bp, Homo sapiens; identical to SEQ ID NO: 17689
  chr2:178257227-178258021
  binary

SEQ ID NO: 35689 - DNA, 774 bp, Homo sapiens
  chr2:180725139-180725913
  hyper
cgcacataacagtggcgaaacagatggtcctccccctccccttctcctcgtcccttccgcagtcccacagtgtcctcccacccttccctgacaccttcaccagcgcttagtggccgaggccgcccgtcagggctcccaacaagtgcaaacttcggggaccttctctctgctcctctgcccccatctcatctgggttctgctgcagaactctcccacgaccccaagcttcgaccgctaccctcctcacacacctcggtcccctaactacccatttcccggtcattgagagaaagacaaaccccaaacttccagcccaggtgacgaggcgctgcggctaaacatagcggggcactctcctcgtcctttcccctctccatccgtccttgggaattggagcctaccctggggaacagaggagtatgctcctgtggcttccacgacctaatcctaactccagggactcgcaggagttaggattaggtcgtggaagccacaggcgcctgggcgccctcctctacaagtgggaccttgagacaaagtgcaaactctaccgggaggggggctcctggccattccctcgggcggcgcgcccaggtgcaggctcgctctgcggaggagggcgggggccgggcaagcagagggcgcccagtccgggggcgccggtctgggctgggcgcccagagcttacctcggcgcgcgggccgcgggcgcgtggggcagtggctcctccagccgggaagctgttgctcacgctccggtggttgctgcggtccc

SEQ ID NO: 35690 - DNA, 1368 bp, Homo sapiens; identical to SEQ ID NO: 31605
  chr2:182321761-182323129
  binary

SEQ ID NO: 35691 - DNA, 1030 bp, Homo sapiens
  chr2:191044988-191046018
  binary
cgcagaacccttagctgggaaggccgcggccaggctgcggggccccctgcaggcgggctcagtgccccggcccagcacctgttgtcccaaggcaggccccgcgggggagaggccttggagggcagcgccccctctcaccagggcggagctcaggagagttcgcagcccagggggccgagaccaggggcagggccagcgaaatgcctcgctggctcttactttcattgacctctgcgatgcctcgctggcttctgctttcattgacctttgcgggtctgttcccgctgcggcgccggcagctgcttggtagttgcggggggcgtgagggcggtggcccagaccaaccggctggcagcccagctccgctccgcccgcccctgcctcggaccctgcgcctgaggaagtatcgaggcaaccctctgccacccgaagttcgtgggtcgctcccagagggcgcgccctggagccgagcgcccttgggcggccatctggaggccaggtgcgggccgcgaacccgcgaggagcgcgcggcgggcgcggcggcgacggcaggaggaggggccgggagcccgggcgccgccgaaggacgccccgtcctccacatgctgccacttggctgagccgggcgccggcgagaaggcggcgccgctgccctggcagctggactgcactttgcccccgcccggcctcagctgccgcccgcccagacgccagcaagcccccctcccacgacagggctgctccgggagcttcggagacccgccccgggcctgagcgcaggctgcctccgggaccccacggctgtccggacgtgccatgggcgcgcagctgccgggcaacgtgttgtgtaagtgaacatctgggaggtgggtgactggtgaagggcgggtgtctgtcggtctttgcttgtcagctgtgccttttagatttttcaatggcagaaacccatgagttacaggaggctttaattaaacgagaccgttctcagccagctgccgtggatagagcctcacatctccgtcccctaatc

SEQ ID NO: 35692 - DNA, 171 bp, Homo sapiens; identical to SEQ ID NO: 17694
  chr2:191208170-191208341
  hyper

SEQ ID NO: 35693 - DNA, 361 bp, Homo sapiens; identical to SEQ ID NO: 17695
  chr2:191514839-191515200
  hyper

SEQ ID NO: 35694 - DNA, 86 bp, Homo sapiens; identical to SEQ ID NO: 17696
  chr2:198276053-198276139
  hypo

SEQ ID NO: 35695 - DNA, 467 bp, Homo sapiens
  chr2:20068485-20068952
  hyper
cggataaagccccgggcagcgcgtgacccgccccagcccagtagtggagtccccgccgcgggccccttgcttgcagggtaggtgtggcccggtcgtcccactctccgccccctcctgctcctcctcgccgtgcccaacccgcccgcttctcctgcctaggctcttctttctgctcctgtcgccatggccccggcctcggcgctcaagcgaccctctcgctccgcccaggtcagtgaaggatgggatgcaagtgcccgccaagccccccgtttcccacgtggagttcccacagggcagcagggaggggccgcgccttctctaactgacccgaaccgacccgggcttcacaggcttcgtggagagcagctgccccgccggcatcttccggatgaggctctctagacaacaaagccttctacgcggaagttactggtgacaggggaaggactcatgggtttttgcagccc

SEQ ID NO: 35696 - DNA, 845 bp, Homo sapiens; identical to SEQ ID NO: 22871
  chr2:21022197-21023042
  binary

SEQ ID NO: 35697 - DNA, 2248 bp, Homo sapiens
  chr2:219845565-219847813
  binary
cggaagggagtgaggtgagctggggtcgcctggcagggtgggtatgaggcaaggcggctccctcgggctgagcccaccatccaggcctctcgctgcctgcgggcggcgcccaagcccgcgccaccctccttctcgggacgttttccttggcagttctctgctcaggcccgagatgagcctctccctgctttcccctaaccacgggttctggcgcagcaaagaacagagagagaggaggcagcggagagctcaggagctttaatggggctgaaagggtcagaaacacaccgggagtttctcctgggagtgtggggacaggaggaagggggccgtgtgtcacggaggacggtggctttcaccaaacctgctcaggtcccaggaaggaggaccgtgagaggcctccacgtgctgaggtgggagcagttccttggggaagagcaaaagtgggaaaagatttggcactcgttaaagagtagtgatattgaatggggcttctaggagccaggcggaaatgcactggagtggtggggagacaagagaggtccacaaatcccctccgggacctggagacctagaagaaaaaaagtgaaagagggcgcacatcgccctcctcaggggactgcggggtgggacaggagcaaatctagtaccagacaaggattgagggagcttcggtcccgtccccctgctaagtgcggcaggtggagtaaactctggattagaggacggttgacggaggctcccgggccctccccgggatgccgatgggatcgggcgagactctaggcgtgcgggcgaggccgcaggcacccgaccgccccgtctagtggtaatggccccccaagtgcgaggctgcggccacggccccgaagggcccgggcgggggctgcaagctgggactggggtagagcgcggcggtggcggcggcagcggtggcggcggggcccgggcccggccagtaggagaagccggcgggcgcgaccccggccgaggcggccatgaggttgagtttggagaggccggggaagggcagcggggcgaggccggcgggcagcttgtagagcgcgccgtcctgggcggccgcggcggcggcagcagctgcggcggcggcatgagcgtgcgcgggcggcggctggcaggcctgcgccaggccctggaagtcgaagcggtaggcgtagcgcttgccatgcaccttgctcatgatgttcttgtcgtagtagtagcgcagggcgcggctcagcttgtcgtagttcatgttgggcttgctcttgcgctcgccccaccgccgcgccacctcgtccgggtccgtgagcttgaactcgccgtgaccgccctcccacgcgatgcagccggcgttcgcgcggtcagccagcagctccagcagaaactgccacagctggatctgtccgctgcctgtggggaggggggcggtcagccacaggcgggagcggggaggcgggaactggggaagagtgctggcgggaaactgacccaccccggcaggaaccggcactgggggaggaaaagtgcaagtcaaactgcagctgcgttcggcgggagaggccggccccggaggggctgatcagcagagtggtgtgtagccttaccgcgcttttgcacaatggaaatgcggcttccactgaagagcacgtagctttccagatgcacggttttgtggaacttgggggttggggggaaggggaagcattgcctccccccacgtgagcgcagcggcgcaccaaggcacttggctttccaaggcgagcaaggacagatatccgccgccactctccatctcagccgggcgcccttatttagggaaaagacgcacaaccgtacagggcggccttgggcagaatgatcggactgccccatcccagctggaccacatccagaggtgggaagggacaggcgtgcagcaggacgaccccaaccactgctggacaaggcccagctagtcccgagtccccaaagacgtagttggacaggctactcctgaggtggagtggtggctggctcccttgggacaccacatccgacaggagtaggaacgaacagtggccccctatacgtgacaggaggggcaagctctcatgggctcactatcctagccaccttcgggtgcgcaggcctctgcgctggccctgagaatttggcctcttattttcggaacaggcgggattccctgcctacgaaggtgccatagttctcggggcctgatgaacaactctgaggaggggaacggacc

SEQ ID NO: 35698 - DNA, 53 bp, Homo sapiens
  chr2:231191875-231191928
  hyper
cggccgacttcctgctccgggtcagggcagccacactgcacgcaggctgggcc

SEQ ID NO: 35699 - DNA, 131 bp, Homo sapiens; identical to SEQ ID NO: 8321
  chr2:231676894-231677025
  hypo

SEQ ID NO: 35700 - DNA, 250 bp, Homo sapiens
  chr2:232260775-232261025
  hyper
cggccccgcggccctggacaccgctccaggaccctggcggctgggaccccaggtcttgccggcagctgggtcccctctcccttccagacccctgagggccccctgcgtccgggccactctcctcctctcggggcttccttccgcgggacctcggaccgccgcccgcccggcccctctccgcccctcccgggctttccctacgaatggagcggacccggcaggtggagcgcccgcagcccagggcctcgcc

SEQ ID NO: 35701 - DNA, 500 bp, Homo sapiens; identical to SEQ ID NO: 31625
  chr2:232479181-232479681
  binary

SEQ ID NO: 35702 - DNA, 770 bp, Homo sapiens
  chr2:233498581-233499351
  binary
cgcccagctgagccggcggctggacatcaacgagggcgctgcgcggccccggcgctgcagggtcttcaacccctacacggagttcccggagttcagccgccgcctcatcaaggacctggagagcatgttcaaactgtgagctcccgctgcgcgcccttcgcccccgggaccagggagggagcgggagggctttctggtccgaagtcccgggccctgtttgtgtggggaggggtcccggggtgcaggtagcatttggcccaacgcagccagatcttgcgtgctcgggtctatctcggcgcggtgggggacggggccgaagaggggggacaccaggagcaggagctctccgggacggagcccaaaagttctcggcggctgccgggcccgagttccaggtcccccaaccccgaccactggtcccgccccctccgcccgccagtccggagatttgctccgaaagcaacttctaggaaagggagccgtcgccgcgcctcacctgccagctttcactgtatccccccaagggaaaaattagcccctgttggccttttatcttttaaaacaaaaggggaaagttaatccttggctgcagcgcggggtctgatgaatgagcggaggccgagaacggggagtttggtaaagtcgttgtaagagattcaggactttcctggagcaggcgcggcccgggagcctcctgggggcgcggggagggggggcggttgtgggaaccgaacttggccgctggcaccggtccggcgggggctcgttgc

SEQ ID NO: 35703 - DNA, 859 bp, Homo sapiens
  chr2:235404277-235405136
  hyper
cgcttttgtctttccgacaactgagccttccacctggggctgggagggcggacagcaggaccggctcttccactccccaccgcggccccccgacctggtcagtagctctggcgttcagacaaaaggtcccctgagctgggggtggggggcaggtcgagagtaggccggtaaatcagacttcgcagctccttaagtcaccagtcctgcatttgggtgcagagattccgttttaaaaattcgaagcatcgctttggttcgctctttgttcgcgggcgcgggttctcgctcatccatccatccatccatccaaccatccatccatccattcattctttcttgacgcactcgctcgctccccggtcgctccgggcgcattaccgcttcttcttctgcttgagggacttcctgcgtttcaggatcatctcatagagcttgtccatgccctcggtgaggccctcgccgatgatggcgcacgccggctggacgtgataggtggtggccgggataagctcgtgcagcgccagctgcttctcaatctctgccaccggcagcgacttgggcaggtcctgcttgttggcgatgaccagcagcggcgtgccctggttctcggcgaacttggtcaccttgtgcagctccgtcttggcctcctccagccggtccacgtccaccgagtccaccacgtagatgatgccgtccgtgcagcggctgtaggacttccacagcggccgcagcttctcctggccgcccacgtcccagaagtggcagctgatgcccttggccgtgccgttgctcagcttgatcttctcggtgttgaagccgatggtgggcaccgtgttcacgaactcgttgaacttgagcc

SEQ ID NO: 35704 - DNA, 147 bp, Homo sapiens; identical to SEQ ID NO: 17708
  chr2:239079151-239079298
  hypo

SEQ ID NO: 35705 - DNA, 811 bp, Homo sapiens; identical to SEQ ID NO: 17709
  chr2:239973912-239974723
  hypo

SEQ ID NO: 35706 - DNA, 134 bp, Homo sapiens; identical to SEQ ID NO: 17710
  chr2:242190662-242190796
  hypo

SEQ ID NO: 35707 - DNA, 82 bp, Homo sapiens; identical to SEQ ID NO: 9512
  chr2:242269474-242269556
  binary

SEQ ID NO: 35708 - DNA, 491 bp, Homo sapiens
  chr2:242549636-242550127
  hyper
cgcgccgcaagtcctgcctctgctcccgggcggccccctccagcctccgccggccccgccccggaagcgcagccccgcctcaggcgccgcatctccgccctctcttgcgcctgcgggaccgggagggccgcgctcgccccccagcgccagggtcacgccaccgcgccctgtttggggagcggcagaggagtcagggcggaggctgggcggcgctgggcggtggggcgcgctcactggctgccacctcacctagcaggcgtcacagggctcactcaagagctccagcaagagcagaggcgggagcctcgccagcccctccacagaccacagcgaccgcgcccctcggcccggaggccccgccctccccactcctgcttccccagccacggggtcttctcccggcccctcatctacttggcagacgcctctcaccggcagcctctgcctccccctggtctttccctcccaccacccaccgtggagtcctctcc

SEQ ID NO: 35709 - DNA, 181 bp, Homo sapiens
  chr2:242602207-242602388
  hypo
cgggccgggcgcggtggctcacgcctataatcccaacttcaaaaccaataaagtgggccgggcgcggtggctcacgcctataatcccaacttcaaaatcaataaagcgggccgggcatggtggctcacgcctataatcccaacttcaaaaccaataaagcgggccgggcgcggtggctcac

SEQ ID NO: 35710 - DNA, 691 bp, Homo sapiens; identical to SEQ ID NO: 25464
  chr2:242617764-242618455
  hypo

SEQ ID NO: 35711 - DNA, 570 bp, Homo sapiens; identical to SEQ ID NO: 25466
  chr2:25438799-25439369
  binary

SEQ ID NO: 35712 - DNA, 205 bp, Homo sapiens; identical to SEQ ID NO: 30168
  chr2:26395416-26395621
  binary

SEQ ID NO: 35713 - DNA, 725 bp, Homo sapiens; identical to SEQ ID NO: 31642
  chr2:26521776-26522501
  hyper

SEQ ID NO: 35714 - DNA, 771 bp, Homo sapiens; identical to SEQ ID NO: 27877
  chr2:27484883-27485654
  binary

SEQ ID NO: 35715 - DNA, 353 bp, Homo sapiens; identical to SEQ ID NO: 25472
  chr2:27938267-27938620
  binary

SEQ ID NO: 35716 - DNA, 840 bp, Homo sapiens; identical to SEQ ID NO: 25473
  chr2:29337909-29338749
  binary

SEQ ID NO: 35717 - DNA, 855 bp, Homo sapiens; identical to SEQ ID NO: 24259
  chr2:30453530-30454385
  binary

SEQ ID NO: 35718 - DNA, 250 bp, Homo sapiens; identical to SEQ ID NO: 17722
  chr2:39944194-39944444
  hypo

SEQ ID NO: 35719 - DNA, 1038 bp, Homo sapiens; identical to SEQ ID NO: 32775
  chr2:43019535-43020573
  hyper

SEQ ID NO: 35720 - DNA, 372 bp, Homo sapiens; identical to SEQ ID NO: 31649
  chr2:43448410-43448782
  hyper

SEQ ID NO: 35721 - DNA, 1874 bp, Homo sapiens; identical to SEQ ID NO: 31650
  chr2:43450964-43452838
  binary

SEQ ID NO: 35722 - DNA, 138 bp, Homo sapiens
  chr2:44126077-44126215
  hypo
cgaaactcgctgccccatacctacccccgcaccacccgccgctccccgctacctcaattctaaagacatttctagtttgatctggcatctttaaaaccagtaacctaaaatctaccatccagtccttgtcctgcaacc

SEQ ID NO: 35723 - DNA, 73 bp, Homo sapiens; identical to SEQ ID NO: 17727
  chr2:47656947-47657020
  binary

SEQ ID NO: 35724 - DNA, 61 bp, Homo sapiens; identical to SEQ ID NO: 17728
  chr2:55391637-55391698
  hypo

SEQ ID NO: 35725 - DNA, 1430 bp, Homo sapiens; identical to SEQ ID NO: 25483
  chr2:56149749-56151179
  hyper

SEQ ID NO: 35726 - DNA, 711 bp, Homo sapiens; identical to SEQ ID NO: 28992
  chr2:64836206-64836917
  binary

SEQ ID NO: 35727 - DNA, 354 bp, Homo sapiens; identical to SEQ ID NO: 13853
  chr2:64994400-64994754
  hyper

SEQ ID NO: 35728 - DNA, 205 bp, Homo sapiens; identical to SEQ ID NO: 17732
  chr2:70165952-70166157
  hypo

SEQ ID NO: 35729 - DNA, 78 bp, Homo sapiens
  chr2:72778903-72778981
  hypo
cgtgagccaccgcgcccggccattaaaatcttaatagcttataaaaactagcatacacacagtgatgagatacaatgc

SEQ ID NO: 35730 - DNA, 1235 bp, Homo sapiens; identical to SEQ ID NO: 25489
  chr2:74729488-74730723
  hyper

SEQ ID NO: 35731 - DNA, 788 bp, Homo sapiens; identical to SEQ ID NO: 22878
  chr2:74781700-74782488
  binary

SEQ ID NO: 35732 - DNA, 104 bp, Homo sapiens; identical to SEQ ID NO: 17738
  chr2:85776352-85776456
  hypo

SEQ ID NO: 35733 - DNA, 90 bp, Homo sapiens; identical to SEQ ID NO: 17739
  chr2:9135660-9135750
  hypo

SEQ ID NO: 35734 - DNA, 486 bp, Homo sapiens; identical to SEQ ID NO: 24290
  chr2:96990889-96991375
  hyper

SEQ ID NO: 35735 - DNA, 201 bp, Homo sapiens; identical to SEQ ID NO: 17741
  chr2:9720456-9720657
  hypo

SEQ ID NO: 35736 - DNA, 66 bp, Homo sapiens
  chr20:17972167-17972233
  hypo
cgacagagcgagactccgtttaaaaaaaaaaaaaaaaaaaagcctcctcactaagccctcagccac

SEQ ID NO: 35737 - DNA, 197 bp, Homo sapiens; identical to SEQ ID NO: 25504
  chr20:18489643-18489840
  hypo

SEQ ID NO: 35738 - DNA, 1359 bp, Homo sapiens; identical to SEQ ID NO: 32792
  chr20:21080357-21081716
  hyper

SEQ ID NO: 35739 - DNA, 897 bp, Homo sapiens; identical to SEQ ID NO: 23209
  chr20:2731109-2732006
  hyper

SEQ ID NO: 35740 - DNA, 909 bp, Homo sapiens; identical to SEQ ID NO: 25511
  chr20:30193272-30194181
  binary

SEQ ID NO: 35741 - DNA, 35 bp, Homo sapiens; identical to SEQ ID NO: 7236
  chr20:30996055-30996090
  hypo

SEQ ID NO: 35742 - DNA, 266 bp, Homo sapiens; identical to SEQ ID NO: 31702
  chr20:32677630-32677896
  hypo

SEQ ID NO: 35743 - DNA, 847 bp, Homo sapiens
  chr20:37435071-37435918
  binary
cgcccggcctctcccagggccccgtgcgccggcggctgggtcccccgcgccaggagcgctcccctctgggcgactccggctcatcgattccggcccagaggagcgcccccgggcgccgaggatgggcggagacgtgcagccgcccctgagaggtcgcccagaggggtctccccaaggtcacccggagtgcccaggctgagctgcccagaccgccccgggtggagagccgggaggcaggcgctcgctgccctcctccttcccccatgtagactcccttcctccgctcccccaccccggcccggcctccagcttcactggagatgctgatgatgcagctcccagcccttggaggataattgagcctgggagagctttgaatctggccctcctgagaccccagggctgcgccgctgccgcgcgccaggcctgggtcccggtgctcccgggcacctcaggagcggagggagagggatgtggcttcatcagcgcttctaggaaccgaaaaccgagctgcctgcgcgcccatgtgattgcatttcacataaagggcccctgttttcactgtcagaagagccccccagctctccgcggctctggacaccaggtgccgcctctgaatcaccctctgtggaggacccggggcccggaggtacaggcgccctttcccgcagggctctccctggaaagggcctgccgatggcggcctcagtccgcaggggtacttccctgtgtaccctgccatttcctgcggctggtgaagcaccggagaaaaaccgtccatctaggaggcctcctccaaggctggtaataaagcttcttagcccagccagcgactagctgtctactc

SEQ ID NO: 35744 - DNA, 1242 bp, Homo sapiens; identical to SEQ ID NO: 31708
  chr20:400915-402157
  hypo

SEQ ID NO: 35745 - DNA, 313 bp, Homo sapiens; identical to SEQ ID NO: 24305
  chr20:42088459-42088772
  hypo

SEQ ID NO: 35746 - DNA, 1462 bp, Homo sapiens
  chr20:42543560-42545022
  hyper
cgcggtgggcgcgcggcccggggccgagccggccggcctggcgcacctggactattaccacggcggcaaggtaggcgggggcgggcgggggtccccggcgggcggggccggagtcacctggcagctcgggactcaggcgctcccggggtcacacggggccgcgcacatcagccccgccgacgggcacgggcggctcacatcgatcccctcgcggccacgctcacgccctgagttgttgggatcgcgggcagaagtcatcccgacagccacccgtgcgacgacacagtggcccctcactcgcgtccccctgacagcctcgcagtcattcacaagccgtcacagtgacccacagccacacgcaggcggccaggcactgcttacacggtcccgccgtcccacgcaagtcaccctgacagtcacttatacacaacgacacgcaaccactcacccgcaaacagcctcaccgccacagacgagtcacccacagacgctccgatgccccacacaccgtgacatgcccccacccgctgtcacacccaggcacaacgggggacagtcacacaaagaagtcgcccgacagtcacactctcgcagccacaacgcctcacccaggcgcacgctgtcacacacagccacccccctggacggtgagcctcagacacagatcgtcctgacggccacacagtcacacgcggtcacacccagggacggccacacctcggtcatccacactcgcgcgtcgaggtttaacttctcagcgccgcagcacactaattgggcagtttactaattggccgtcactgcctggcggggcctcggattccgagtaggctgcggccaatcgaggcctgtgtcctcccgggagcggtgagccggcgtccctccaggctggggctgtagtgccggacaccctccctcctccatgtttccaggatctatccccccaccccagccaggtcccagctgcgctgcgccgggcgcattcccagtgatggaggcttgcgtgcctggaaccccgaacccgaggcgtcaggtcccactgccgggtctggcccagcctggatgggttgggtgcctctaagcagtccgcgtccccttcggtcgccggagagggaactttcaaacttagttaggaagccagactgtccgcgcgtccgccagtcggtgcgtcggtcccgggccggctggagccaagcgcgggttttcgtcactcggagcccggattgaacagcgcgcgtgggtttcccgcagccctggcgcagacgcgtgggctccgtggcgatgcggggtgagtgcgcgtccagtggctggatcggcgccccccagggtctctccccaacctcgcaggcttttcgtcaggcccctggtagtggggatgaggcaggagagaggcgtcccggcgcggatcccggggcctcccgggctgggcctccctgagtgcgccctcaggccccaggggagc

SEQ ID NO: 35747 - DNA, 52 bp, Homo sapiens
  chr20:42955382-42955434
  hyper
cgcgggccggtggcaaggcgcgggggcgcgggggcgggatggggggaggggc

SEQ ID NO: 35748 - DNA, 1362 bp, Homo sapiens
  chr20:44098343-44099705
  binary
cgccccctcccgcgcgcgcggttaaatccccgcacctgagcatcggctcacacctgcaccccgcccgggcatagcaccatgcctgcttgtcgcctaggcccgctagccgccgccctcctcctcagcctgctgctgttcggcttcaccctagtctcaggtgagtggggcggggagaggcccggcgcctagaggggccgagccacgagcgccaggatggagccaggcggaggcgtagcctctggaggctggggaagtgggaattccgggggcggaagtggcggggacccttggagcctagggtgtggggtccaatgtgctggaggtggagagaccactgatggctgcaatttgggaggattctgtgctgaacgcggacactccgtggctgcagtgggctgggggtgggggctgctctgcctcgacctcggaagctccgagacgctcagctgtgcggcgtcccctagggctgagatctgagggccccgacgccaagggttagggagctctcgtactcccaggggtcagggactcctggtctggaagaaggagtctctgggggctgtaaggggactcctagggccagagactgagaattccttggggttaaggtttggagcaggaggtgggcatcctctggggctggcgctacgccccaccctcgactgtcccgggcctcccctcccaggcacaggagcagagaagactggcgtgtgccccgagctccaggctgaccagaactgcacgcaagagtgcgtctcggacagcgaatgcgccgacaacctcaagtgctgcagcgcgggctgtgccaccttctgctctctgcccaatggtaaccccacggcggccgagcgggaacggggcggggccgcgctgggctgggaggaggtgggagggcccgggttccgggaacaggggcgcccccggacccggggacccccgggaaagtcaaggcggttgaaaccagatccgtcagtcctctccctcgcacggcccaggggtagacaaaggcgtcgttgaaacgcagccaagggggggtccccacccctagctgggattcgagtctctggtgcatgacgggcttccgggcacgcacagccgggacattgttccccgcggcctggggacccggggccgcagtttccttctcgaaccggccgaagcctgccctgcgggaaagcccggagcctggggcgctcacctctcctcttggagtccctccctgggggcctcccccagccctggggaaagactgggagagcctggcctggcaagattttccccaattcctctgtccaggcggaaaggaactttacagatttaggaaaatgccccgctcatcttaaagatgtgtaagggagcatc

SEQ ID NO: 35749 - DNA, 544 bp, Homo sapiens; identical to SEQ ID NO: 25524
  chr20:45279829-45280373
  hyper

SEQ ID NO: 35750 - DNA, 129 bp, Homo sapiens; identical to SEQ ID NO: 17753
  chr20:47688836-47688965
  hypo

SEQ ID NO: 35751 - DNA, 51 bp, Homo sapiens; identical to SEQ ID NO: 17754
  chr20:47713222-47713273
  hypo

SEQ ID NO: 35752 - DNA, 224 bp, Homo sapiens; identical to SEQ ID NO: 24313
  chr20:47905365-47905589
  hypo

SEQ ID NO: 35753 - DNA, 1409 bp, Homo sapiens; identical to SEQ ID NO: 27933
  chr20:4803013-4804422
  binary

SEQ ID NO: 35754 - DNA, 672 bp, Homo sapiens; identical to SEQ ID NO: 25527
  chr20:48524519-48525191
  hypo

SEQ ID NO: 35755 - DNA, 1327 bp, Homo sapiens; identical to SEQ ID NO: 27937
  chr20:50720375-50721702
  hyper

SEQ ID NO: 35756 - DNA, 174 bp, Homo sapiens; identical to SEQ ID NO: 7251
  chr20:52374073-52374247
  hypo

SEQ ID NO: 35757 - DNA, 1472 bp, Homo sapiens; identical to SEQ ID NO: 26844
  chr20:55199913-55201385
  hyper

SEQ ID NO: 35758 - DNA, 2979 bp, Homo sapiens
  chr20:55201412-55204391
  hyper
cggcgctcacgttgtcccgagaggcgggacaaacgtccggcgcgtggcgcggagtctgcgaaagcgctcgggggcctccatcttctgctcgggagtcccctccctggggcgggaagaggagtcgcagatctgcccgaatcttgctctacccgcctggccgccttcttccgtctggggtgggggcaggggtggcggatgactcaggcctggggccgggagccctgtttccaaaggcaccacctcgcgcctctttggaagtggcgcgctgttggggcgctcccgctgttgcagaggcctggtttgcggtttcataggggcgtgggtccagggcttccagggagtaagtgagtttaggctccctagggggcggtagaggggaacccccgacaaccttccatcctcttctccaggcggctgcgaggcctccggggttccagaggggtccccttctgccggtgccggctgtcttgagcgcggccacgcagtccgcgtcttcacgtgggcaaggggcggggacgttggagggaggctgtcttggatgctggagccttcggttcccggctctgctgagcagaaaagttgaagtcaaggaagggttgaggcttcctcacaagggcgcgcgcgtgcctgggtgccggcccagaagccgagaatgtgcgtattggggaagggtctcccgtgccgagaagacagaggatttgttctagctgccttccgtacagagggcgcggaggttgcgctccagttcgaacgcttacccattggaaagagggcagcgccggggtccagggaagctccttgggaatgaatggcctttgccaagcggttccggatcctctgggtcctttgggcccacggcacggtgctgcgcgagccctcagtgcccatcggctcccttcgcctcctgcgtagacgctcccaggcggggaggcatatcggttcctccgggcagctttggctagtgttgctgtgggaaaggagagccagggcctgggatgggggatgagcaccttcttgcccattccgggccccagcgtgcaggaggtaaacttgccagcacagacaagacagcttgttcaagctgcacctcaggccgggtcagagaataaaaccgagggctagaaggcccagaatgtcggacagcccagcggcacccgtcagggagtcccaggcgcccgaaagaggcgccgcacctctggcgagtctaggacccatcttcctggacctgtgctctggagtgcctgcgggcctgggtctaatttctgcttctggcaggtgtccccctcccccgccgctaataccaggagcgctgcttctgcggtaacttattttacccccagaagcctgttttgggaccgaagtgtcagggtcctgtgtgtctttttatgcactgttctccttagtgcaaagccctgcagatatgcttggccgaaaagtctcagtggtttcaacttccagattttgttcccgcgtccggtcggaaaatcacctgggatttggctgctgtctaaggccgggggaaagtttcccttggaggacgcctattattattattttcttttaggcccacctgggtctaaataaatgctaaagttcaaacgaacccgagaaggaacagcgaggcagtggatgccgccattccgtggatgggagagtcatgtctactgcaggtgcggacaccgtactgataggcattgattattgcaaaatcgtattcagtatcaaatagaaatagtcttgtcctctaatccccacagaatgtttaaatccagcccagggagccagttggggcgtcccaacaaatacgccctcgagaattagcgatgttccccttacaatgaaagtcaattgctgcataataactgggccaaagaatttcgttagtttaaattttaaaaattagtattgcactttgctttcaagtttgggtggcaagtaccgaaggggagagggaagcagcgtttgtgtggaaggaagtttcgttttctgtctaaacatgtgggacctgggtgtctacctctccagtcgagagctctctgcaggctctctcccaacttcctgcacctcctcaccctcaccttacccgtggcgctcgggttttattcctgcccggcgcttctttcccagggcgagtagaggcttctgagtgaccggcccgccagaggcagctgcagagccggcgttccgcagggcagggcagggccgggccgctgggctggtccagtgcgcgcgggttccccctggcctcagccagccgcgggagatgccacttcgggcgacagcggcgagacgccgctgtccgcaactcctgggcgggtaggaccgtctgctgcctctgcggcccttggggcagactccccaggagtcccttcctctctcctcccgcccgggggccgggaccgcgctgtgcccacggagggaactgggcgtctctggcgcactggggctccagctgcatgatcccagctcagaccttaagcctcagtggggtgtaggtgggatgggatgtgtttttaggagatgaggagaccccggttgttgagtcgctccccaaatgcgcagtttcttaactccaggtgacatccgtcttttggaggaacgagtgaaggccgtttaggcgaaagaggggtgggtttcagtatttggatcccttcccccagctctgccaatctcaggtgtgtttacggtggaggtgacagaaggaaggcgcgtcgggggacccaggcctcgcaggtcttcggctgtcaacgaggcaccgcccactgactccgcgcttcgtccctcacagcgtggggctcggcgctgcgccaggcccgggtgcggggcggagctaggctgggactggctgggggccgccccgcccggcgcctgggcctccgcgccggcccccggggaggagttatgataatttccttctcattaaggcgctcgggtcccccggctatcgccaggacacactgttcgggcgcggctttcccc

SEQ ID NO: 35759 - DNA, 764 bp, Homo sapiens
  chr20:62221291-62222055
  hypo
cgtgatttgttttggcgattcctctctttggttctgcagaccacgtgacccacctgcccgagccagccctgcggcctctgcccgctccctgctgccgcggctgagagacagccagccctgtccgtcccaggggcctcgccctcctgtcggctacttccgctcgtggtcctctgccatggcagccacctcaatggtggccgtgtgctcctcaggcccgggggcagcccctgcgggcactgtcacaattgtgctggagccaggcgaggcctgggccacgttctgcagggtggggcccaggccaggcaacgtgagcagctgtagcgggctgaccaccttgaacaccgtgctaccgtcctgcacggcggccgtgctcaggaccgtgaggctggacgcgtccgggtggatctccactgtgctggggtaggtggagccggaagaggccaagactgtgtatcccccgagcagcggggaggccggggagctggcggggggcgcctgaagggaacccttgcccaggacggtggacggcagggtggacaccactttaccaaggggcacgctggtcagctgggggacgggcacgcccgggccaagcgccagctgggcagactgggtgagcacctgcgaggccatggcggccggtcctgatgtggcacgtgcaagccggggccgcttcacaggcggtggcagggagaccggcgtcagcgtcatgagcacgttgctgaggtgctgggacttgtgcttcagctccttggctcggcgac

SEQ ID NO: 35760 - DNA, 357 bp, Homo sapiens; identical to SEQ ID NO: 17761
  chr20:62252093-62252450
  hypo

SEQ ID NO: 35761 - DNA, 655 bp, Homo sapiens; identical to SEQ ID NO: 30259
  chr20:62461248-62461903
  binary

SEQ ID NO: 35762 - DNA, 507 bp, Homo sapiens; identical to SEQ ID NO: 17764
  chr20:62550652-62551159
  hypo

SEQ ID NO: 35763 - DNA, 585 bp, Homo sapiens; identical to SEQ ID NO: 17765
  chr20:62551409-62551994
  hypo

SEQ ID NO: 35764 - DNA, 1158 bp, Homo sapiens; identical to SEQ ID NO: 17766
  chr20:62562220-62563378
  hypo

SEQ ID NO: 35765 - DNA, 292 bp, Homo sapiens; identical to SEQ ID NO: 17767
  chr21:18984005-18984297
  hyper

SEQ ID NO: 35766 - DNA, 161 bp, Homo sapiens; identical to SEQ ID NO: 17768
  chr21:30357072-30357233
  hypo

SEQ ID NO: 35767 - DNA, 165 bp, Homo sapiens; identical to SEQ ID NO: 25559
  chr21:37775049-37775214
  hypo

SEQ ID NO: 35768 - DNA, 442 bp, Homo sapiens; identical to SEQ ID NO: 27967
  chr21:44847478-44847920
  binary

SEQ ID NO: 35769 - DNA, 867 bp, Homo sapiens; identical to SEQ ID NO: 24342
  chr21:45148293-45149160
  hyper

SEQ ID NO: 35770 - DNA, 950 bp, Homo sapiens; identical to SEQ ID NO: 33748
  chr21:45400182-45401132
  hypo

SEQ ID NO: 35771 - DNA, 308 bp, Homo sapiens; identical to SEQ ID NO: 25571
  chr21:46359034-46359342
  hypo

SEQ ID NO: 35772 - DNA, 153 bp, Homo sapiens; identical to SEQ ID NO: 17774
  chr21:46645775-46645928
  hypo

SEQ ID NO: 35773 - DNA, 134 bp, Homo sapiens; identical to SEQ ID NO: 25572
  chr21:46934012-46934146
  hypo

SEQ ID NO: 35774 - DNA, 106 bp, Homo sapiens; identical to SEQ ID NO: 7301
  chr22:18084157-18084263
  hypo

SEQ ID NO: 35775 - DNA, 353 bp, Homo sapiens; identical to SEQ ID NO: 11566
  chr22:19899693-19900046
  hypo

SEQ ID NO: 35776 - DNA, 91 bp, Homo sapiens; identical to SEQ ID NO: 7303
  chr22:19924393-19924484
  hypo

SEQ ID NO: 35777 - DNA, 730 bp, Homo sapiens; identical to SEQ ID NO: 14935
  chr22:25959837-25960567
  hyper

SEQ ID NO: 35778 - DNA, 913 bp, Homo sapiens; identical to SEQ ID NO: 32830
  chr22:28838056-28838969
  hyper

SEQ ID NO: 35779 - DNA, 139 bp, Homo sapiens; identical to SEQ ID NO: 17784
  chr22:29686357-29686496
  hypo

SEQ ID NO: 35780 - DNA, 120 bp, Homo sapiens; identical to SEQ ID NO: 17785
  chr22:29758124-29758244
  hypo

SEQ ID NO: 35781 - DNA, 851 bp, Homo sapiens; identical to SEQ ID NO: 24378
  chr22:31480666-31481517
  hyper

SEQ ID NO: 35782 - DNA, 132 bp, Homo sapiens; identical to SEQ ID NO: 17786
  chr22:32804860-32804992
  hypo

SEQ ID NO: 35783 - DNA, 69 bp, Homo sapiens; identical to SEQ ID NO: 8457
  chr22:41658279-41658348
  hypo

SEQ ID NO: 35784 - DNA, 450 bp, Homo sapiens; identical to SEQ ID NO: 23217
  chr22:42353588-42354038
  hyper

SEQ ID NO: 35785 - DNA, 141 bp, Homo sapiens; identical to SEQ ID NO: 7312
  chr22:43351254-43351395
  hypo

SEQ ID NO: 35786 - DNA, 234 bp, Homo sapiens; identical to SEQ ID NO: 25605
  chr22:45120602-45120836
  hypo

SEQ ID NO: 35787 - DNA, 553 bp, Homo sapiens; identical to SEQ ID NO: 25607
  chr22:45603889-45604442
  hypo

SEQ ID NO: 35788 - DNA, 1268 bp, Homo sapiens; identical to SEQ ID NO: 17792
  chr22:46933492-46934760
  hyper

SEQ ID NO: 35789 - DNA, 72 bp, Homo sapiens; identical to SEQ ID NO: 17793
  chr22:47465521-47465593
  hypo

SEQ ID NO: 35790 - DNA, 119 bp, Homo sapiens; identical to SEQ ID NO: 17794
  chr22:47465782-47465901
  hypo

SEQ ID NO: 35791 - DNA, 89 bp, Homo sapiens; identical to SEQ ID NO: 17795
  chr22:47465973-47466062
  hypo

SEQ ID NO: 35792 - DNA, 351 bp, Homo sapiens; identical to SEQ ID NO: 25614
  chr22:50191356-50191707
  hypo

SEQ ID NO: 35793 - DNA, 114 bp, Homo sapiens; identical to SEQ ID NO: 17798
  chr22:50192076-50192190
  hypo

SEQ ID NO: 35794 - DNA, 58 bp, Homo sapiens; identical to SEQ ID NO: 8478
  chr3:10011425-10011483
  hypo

SEQ ID NO: 35795 - DNA, 686 bp, Homo sapiens
  chr3:115377294-115377980
  binary
cgttccctcggcggctctgcagtgtgatctcatctctttgtttctccccggctgccgtcagtcaccggctctctgcgcccccacccgcgcgggctcgcggccgtgctgcgggcgtggcctcagccgctgagaccctggggaccgcagggcgtggcgcggcctccgcccgctgcacggagagccccccagaggcagcgacacggcgcttggggtccgcggggctcctcctccaactccgcagacctccggggaggcctcttgctccccgaacacccgggagttcgctttcatttttaacgaatctccacaatctcttgtttgggagataattgcttctttcaggggcttggagaacaaaagcgtcagcccagggccccaggtctctccgcgggaggagggcacccaggggcgatgcgccgggctctctccttcgcccttcttggcccgctcgccttcagctcccacccgcagcagcaaccgcagcctgcttccggggactgagcagccctgggtcagccaaggttaagcagcgggtggggaagaggagagaaagctgggtcaattggaagtaaccttcttgtaccgcccactttttccttgcttggaggcggcaaaaagcactttagcattcttcgggctgtttgcgcctctttctctaacagggccaggggagtggaagagcggcc

SEQ ID NO: 35796 - DNA, 250 bp, Homo sapiens; identical to SEQ ID NO: 24393
  chr3:11581157-11581407
  hypo

SEQ ID NO: 35797 - DNA, 75 bp, Homo sapiens
  chr3:121563939-121564014
  hypo
cgaaagaacaaagagtttgtggaataagtgactttacgtagtaaatcatagtataatgaaaaatgggatgggcgc

SEQ ID NO: 35798 - DNA, 30 bp, Homo sapiens; identical to SEQ ID NO: 27985
  chr3:123667353-123667383
  hypo

SEQ ID NO: 35799 - DNA, 735 bp, Homo sapiens; identical to SEQ ID NO: 25620
  chr3:124773635-124774370
  binary

SEQ ID NO: 35800 - DNA, 174 bp, Homo sapiens; identical to SEQ ID NO: 17803
  chr3:127326124-127326298
  hypo

SEQ ID NO: 35801 - DNA, 880 bp, Homo sapiens
  chr3:129345777-129346657
  hyper
cgcctcgtcctcccgcggccagaggtgcgacctctgagcccctggccagctcccagccggcctaggggggcgggggcacggggcggaggtcccgcagcccgtgctcgtcccgcctcgcttggagggagcaagggctccgagccctgggcccaggtcctgtgcctccgcttccccggctgcgggtacacccccagcttcccgagccccccgggccctcgctgctccacccagaagttgcggtgactgcggccccagcaccccgttccctggccgggcatcacttgcgcagcatgctgcccccagaggacagggctacagttagtcgcccacacctcattcacccccttgggcccttgagcgtcttagaagccgcagatgccaaggaggggacgctgcctcgcggatggtcacttgggagcaaagctggggactaaaggaaccagggacagagattcctgctctcgccaaattggccgctctgggccaggcactgaggacacaccgcgaagccggatagccaggtcctgtcctcagggccctgtccggaagaggactgggcagcctcgagtccgcggcaatgaatgaatgttcaattgcacagatggggaggcgaaggagggagggagggagggagggcagtcgcttgggcggtcattggaggctctgggaggctatgcgccggcaagaagcagcggggtggaggcagccctgcgggagtcggcgagggccgcgtggatgtgctcggtggttttgaggccagtggctggaggggcgtgagagtgggagaccagacttgaggggagtggctggagttgagactcaaatccaagaaggaaacggtggggcttggaccacttgcctactgagaaaaatggaagtc

SEQ ID NO: 35802 - DNA, 216 bp, Homo sapiens; identical to SEQ ID NO: 7334
  chr3:130424529-130424745
  hypo

SEQ ID NO: 35803 - DNA, 1081 bp, Homo sapiens
  chr3:131753057-131754138
  hyper
cgattttgaaaaccgtaccccttcttccgccttcgggacttccctgacctatccctcacccgtgccatgctgtcccctcccctccgcggtctttctccccaactccattcgccccaccccacctgggcgagttgggtggatgtcagaaggcgagaggtaggggatggaagtcccttcagattaaagacgttgcttgctgctgctttttaaaacaacaacagcaatgacaaacgtgcaaaggtgagcgagaaccagtgcatctcaaaagttggtcttgctacgcagcagctccaacagactttgcaatcacagcgccccaggaacacaggaatgaagagttggcatttacttacctgggtgtgccaatctcgaagagtggagagagaattcagcccgggacgaggtctgtcccgcccccaggatgcaaaatccggctttgaagtggaggtggttggtgtggtagttttgtactgatgtaaggggcgtcgcacctccttcccctctcgtcctccgaggtcagtttagcaacagcggctgggaaaggtgctgagagcagagttcggtctctccggaaaccctgactccattctcggtgatgggggtgggggaagagggtgaaaatgttggagatgtcaggtcggctctcagttaactcggagagtaaagaggagggtactgagaaaagagggagggagtggagtggagcgagggaggaaggaaaggagggtggcagaaagagaaggggacgagcgggtggcggggagatggcagcttctcacagagagatttccaccttctgacgaatcccatgcacccagcaacccggcaagagactggttccgaaacctccgcgcgagcgccccctgggggttgctgacggagacgagcattgccccgggaacccgagctcaggccccgcccaggccttggcggcggcgctctccgtggtcctgccgcgcccgcagtctgggctttctgctcagctttgtcgctcaactgagctcctggggacacttgatttagatctccaagtgcttggtctccatctccactctagggtggagcggtcgtatcgcggcgc

SEQ ID NO: 35804 - DNA, 506 bp, Homo sapiens; identical to SEQ ID NO: 24405
  chr3:141174173-141174679
  hypo

SEQ ID NO: 35805 - DNA, 68 bp, Homo sapiens; identical to SEQ ID NO: 17809
  chr3:142103585-142103653
  hypo

SEQ ID NO: 35806 - DNA, 783 bp, Homo sapiens; identical to SEQ ID NO: 25639
  chr3:159480852-159481635
  hyper

SEQ ID NO: 35807 - DNA, 1895 bp, Homo sapiens; identical to SEQ ID NO: 26955
  chr3:16553609-16555504
  binary

SEQ ID NO: 35808 - DNA, 929 bp, Homo sapiens; identical to SEQ ID NO: 24413
  chr3:16925425-16926354
  binary

SEQ ID NO: 35809 - DNA, 340 bp, Homo sapiens; identical to SEQ ID NO: 8499
  chr3:16926663-16927003
  binary

SEQ ID NO: 35810 - DNA, 1376 bp, Homo sapiens; identical to SEQ ID NO: 26958
  chr3:169378540-169379916
  hyper

SEQ ID NO: 35811 - DNA, 47 bp, Homo sapiens
  chr3:170137437-170137484
  hyper
cgcccggcctcccccggggcgccgagccttcgcgttaggttccgccc

SEQ ID NO: 35812 - DNA, 114 bp, Homo sapiens; identical to SEQ ID NO: 17821
  chr3:182656917-182657031
  hypo

SEQ ID NO: 35813 - DNA, 727 bp, Homo sapiens; identical to SEQ ID NO: 30322
  chr3:183542795-183543522
  hyper

SEQ ID NO: 35814 - DNA, 195 bp, Homo sapiens; identical to SEQ ID NO: 17823
  chr3:183703570-183703765
  hypo

SEQ ID NO: 35815 - DNA, 107 bp, Homo sapiens; identical to SEQ ID NO: 17824
  chr3:183891953-183892060
  hypo

SEQ ID NO: 35816 - DNA, 1915 bp, Homo sapiens; identical to SEQ ID NO: 33786
  chr3:187455297-187457212
  binary

SEQ ID NO: 35817 - DNA, 134 bp, Homo sapiens; identical to SEQ ID NO: 17827
  chr3:193391768-193391902
  hypo

SEQ ID NO: 35818 - DNA, 482 bp, Homo sapiens; identical to SEQ ID NO: 25652
  chr3:193775965-193776447
  hyper

SEQ ID NO: 35819 - DNA, 473 bp, Homo sapiens; identical to SEQ ID NO: 9699
  chr3:195750601-195751074
  hypo

SEQ ID NO: 35820 - DNA, 521 bp, Homo sapiens
  chr3:196755864-196756385
  hyper
cggggcgggggtggcggtggcttcatcgtttgcattgatgagtgcgtcgcctgcggccacagcggtgccacgaactccatcccctcggcggtcgccgcccgcgatccccgcgagccgctccccgaggtcccgcctcccgtcccaccatcccgggccctgactccccggggcgccgacgcgaggggacccggcctccgtctccacctccatccctgcatgtgccagaaacccccgggcggactcccgcgcctgccggtcagtccctctgaatcttctcccgcgggggctcgggagaaagagctgctccgagcccccaaagtcttcctgagttcctgcgcccgtcgggaggggccgccctccgggagctcctctccacaccccgaggcctccccaccacgcctcagcccgcgcttctccttggagcgtcggaagcctcgggtgttcgaggccgcctcctccaagaagccttccagacttccccgtctgcgcttcagtgctagttccctccgccgtcctcactc

SEQ ID NO: 35821 - DNA, 636 bp, Homo sapiens; identical to SEQ ID NO: 28006
  chr3:25469368-25470004
  hyper

SEQ ID NO: 35822 - DNA, 125 bp, Homo sapiens; identical to SEQ ID NO: 17834
  chr3:33689123-33689248
  hypo

SEQ ID NO: 35823 - DNA, 175 bp, Homo sapiens; identical to SEQ ID NO: 17835
  chr3:33818922-33819097
  hypo

SEQ ID NO: 35824 - DNA, 916 bp, Homo sapiens; identical to SEQ ID NO: 30327
  chr3:37493509-37494425
  binary

SEQ ID NO: 35825 - DNA, 935 bp, Homo sapiens
  chr3:38070629-38071564
  hyper
cgttcttggatgctgtttccttccttcgccgcccctccgtgcgagcgggatcgtggagcccagactttcatgaccaggacaagggggtccgcgaggcggagggaagtctttagacccgtaccgcccgcccacccaccccccgggctagatctcggacaagcctggaaacgcccagggtcgtgcccggcagtcccacccagggagccgcgggctgagattttcccagtccggagaaggggcagagaggcgggcccggggtggtgtggaggcggccgaaggagctgggggctccctgtccagggcccggaacagctttccaggggtccacccctgcagggtctcccgctcgcgcgggccaggcactcaccgtgcagggtcaggaagtcccggcccgagtccatgcccgacgggcggcgcggcgggaggggcaccgcgggactcacttgagtagcgacagcaccggcggcctggggtccgagcggagtgcggtgcagggacctgaatggaccgcggtgggaggaggccgggggtggtcccgggacaccgccccgcccccgctgccctgcgcccccgccccctgagcccgccaaccctcgtctctccccgcccccttctggggacgcgagagggagggcagagctgggggcccggaggactggccaaccctggcccgggccagcgggcgcgccccgaccagaaatagccagattcctccagcttcctccgccgccgccacccacgggccgcgggccctgtcattaccgcgggcggccgggccccacgccctgttgtgggcgcctcgctggggtcggggtgatgctggaaagaatccggcgtcatcccggggaagggatcgtgtaaggtccgacgcccagccgggctgctgcgctagggagacgcggcgtccaggcttccagccgcagctcccagcgttc

SEQ ID NO: 35826 - DNA, 711 bp, Homo sapiens; identical to SEQ ID NO: 30329
  chr3:38080628-38081339
  binary

SEQ ID NO: 35827 - DNA, 140 bp, Homo sapiens; identical to SEQ ID NO: 34821
  chr3:42222621-42222761
  hypo

SEQ ID NO: 35828 - DNA, 840 bp, Homo sapiens; identical to SEQ ID NO: 25657
  chr3:42542869-42543709
  hyper

SEQ ID NO: 35829 - DNA, 114 bp, Homo sapiens; identical to SEQ ID NO: 17840
  chr3:45750569-45750683
  hypo

SEQ ID NO: 35830 - DNA, 521 bp, Homo sapiens
  chr3:5018754-5019275
  binary
cgtggttttgacgcagccgtgacagcccttcatccttattaaaatcacacaatgaagcaggtcgcccaagattgaaagcgcgtttccagggcggaccccggtccccgcctttggccagcaaaagtacattctggcagggagggatctctgagccccgaagtgaggtcatgccagttagcagttagaaaaggaggcatttctcacacttgctaaagagtttgacgcttgtgaaatataaacaggaagcgggagctctccaaggcgacctgaaggaaatacactgccagtttggtcaacttgtgaatgccagttctctaggtcgtcaagggcactgccagttaagactgatcccctaactgcacccgaggctactactcttcgcccagtctcggcagtgaccccatttttttttcaatccttcccacagccaggtcactcagcagtggggtgactgacccgaagcgcagtgggaagggcttacagtcatctctcaactccccgaacttgcagggcaggggagc

SEQ ID NO: 35831 - DNA, 938 bp, Homo sapiens; identical to SEQ ID NO: 32894
  chr3:50242718-50243656
  hyper

SEQ ID NO: 35832 - DNA, 277 bp, Homo sapiens; identical to SEQ ID NO: 24441
  chr3:50377892-50378169
  hyper

SEQ ID NO: 35833 - DNA, 356 bp, Homo sapiens; identical to SEQ ID NO: 25666
  chr3:56718095-56718451
  hypo

SEQ ID NO: 35834 - DNA, 765 bp, Homo sapiens
  chr3:57198384-57199149
  hyper
cgcgcccatcgcccagacagtgtcaaaggagcgctcggttccacgaagacggctcaatgcacacggcgaaagtctgggcacctctccagtctcgtctcaggcacctcacccagatgacacccacgcggccctttggcggaaaaatatccgcaactcgaagcagggaaggaggatatcagccgcgagaccttcacaagacgaagggctgaaccgggaggcgaagtttctcaggaggtcccggagtcagaggaggggtaggagtggggtgacggccccaggcgaggaggaacaaagctactagaagagcggggcgcatccctccccggtgctccaagtcccctctccggccgcccgggccttagcagggttgtggactgaaagtccgggagaatacccccttccctctccaaagcgcaacccggtccgggtggctcgggggatcccagcccgggacacgcagccctgggacgaaggaggtcccgggccaagaacaaagggtggggcgcccggcccagccccgccgcccctcacgcccgccctctgaatgggaccccggccggcggccgcacctcattagcaacacaaagccggggtcgggcagccgctttcatctcggccagggccggaggacacgcgtccggggagggaaaccaggaggatgcgcgggaggagtgagacccaggccggccgcggaccccgcgaagagcagacaggttggcgcgggctcgcctccccgcgagcacctgtgcgcgctgcgtcccccgc

SEQ ID NO: 35835 - DNA, 261 bp, Homo sapiens; identical to SEQ ID NO: 7373
  chr3:57679351-57679612
  hypo

SEQ ID NO: 35836 - DNA, 144 bp, Homo sapiens; identical to SEQ ID NO: 17851
  chr3:58136696-58136840
  hypo

SEQ ID NO: 35837 - DNA, 264 bp, Homo sapiens; identical to SEQ ID NO: 17852
  chr3:71036199-71036463
  hypo

SEQ ID NO: 35838 - DNA, 367 bp, Homo sapiens; identical to SEQ ID NO: 25669
  chr3:72149806-72150173
  hyper

SEQ ID NO: 35839 - DNA, 530 bp, Homo sapiens
  chr3:72787779-72788309
  hyper
cgggtgccttcccccaacgaaagccactgatgtcgcccctctcctcccagcagcttccagaccgcgaccttctgtagctctgctcagaacttcacctggaacagcttcttacaattcttaaacagcccctcagtcgactgtgattaagcatacactccagcctcagcaagcttggcgtctgcccctgccgctgggagaccctcctccaggcacctgccctgggccccgccccgcccggtccgcgcgcacgcgcagtggccccaccccgccccgccccgcgacgcccgaggacccgacggagctacacccgctagttcagccaggaggccctgcgcggctccggggagagctgggtggttatgccacctcattagacacattggtggacgatgccgcggattagcgggttggctctcagggcggggcgcaggctttctcactgatccgggagcgtgggagcaggggcaacgcggggccatccgggagctgcccgcctgcttcgcagttggctttccgggccctcgagcaac

SEQ ID NO: 35840 - DNA, 443 bp, Homo sapiens; identical to SEQ ID NO: 32907
  chr4:106067046-106067489
  binary

SEQ ID NO: 35841 - DNA, 501 bp, Homo sapiens; identical to SEQ ID NO: 17857
  chr4:110481822-110482323
  hyper

SEQ ID NO: 35842 - DNA, 493 bp, Homo sapiens; identical to SEQ ID NO: 17858
  chr4:1204224-1204717
  hypo

SEQ ID NO: 35843 - DNA, 305 bp, Homo sapiens; identical to SEQ ID NO: 17859
  chr4:120549993-120550298
  binary

SEQ ID NO: 35844 - DNA, 449 bp, Homo sapiens
  chr4:1205845-1206294
  hypo
cgcccacaggacggacgacgacaagcgacacgaggcccagcgctgccccctcccgcctcctgacagcccggaccagtctctgcagtgccagggccaccacacagatgcctcctccacacactctggtccgagggtttccgggccctctgcccaggcgccgaggctggagagctcctcccgggctacaactggtcactggcgtggtctctatccgcctcgggcttgacggtttggccaggagaaggggcgtggggcgggtgggccacagggggcaggccgtgggacagggacatggcgctggggacgataccttccacagcagctgggatgccagtgggggccacgcccaccacgcccggagggtacctgctgggagagggtccatccgtgaggcccacctgtaggcggcctggccaggccccacctgccctcctagcatcggcagcacc

SEQ ID NO: 35845 - DNA, 1262 bp, Homo sapiens
  chr4:123747655-123748917
  binary
cgtggtttgggtggtgcgggggttgggcgggggtgacttttgggggataaggggcggtggagcccagggaatgccaaagccctgccgcggcctccgacgcgcgccccccgcccctcgcctctcccccgcccccgactgaggccgggctccccgccggactgatgtcgcgcgcttgcgtgttgtggccgaaccgccgaactcagaggccggccccagaaaacccgagcgagtagggggcggcgcgcaggagggaggagaactgggggcgcgggaggctggtgggtgtggggggtggagatgtagaagatgtgacgccgcggcccggcgggtgccagattagcggacgcggtgcccgcggttgcaacgggatcccgggcgctgcagcttgggaggcggctctccccaggcggcgtccgcggagacacccatccgtgaaccccaggtcccgggccgccggctcgccgcgcaccaggggccggcggacagaagagcggccgagcggctcgaggctgggggaccgcgggcgcggccgcgcgctgccgggcgggaggctggggggccggggccggggccgtgccccggagcgggtcggaggccggggccggggccgggggacggcggctccccgcgcggctccagcggctcggggatcccggccgggccccgcagggaccatggcagccgggagcatcaccacgctgcccgccttgcccgaggatggcggcagcggcgccttcccgcccggccacttcaaggaccccaagcggctgtactgcaaaaacgggggcttcttcctgcgcatccaccccgacggccgagttgacggggtccgggagaagagcgaccctcacagtgagtgccgacccgctctctccgcctcatttccatttcgtgggttctcgcccgctctctcccctccagcctgcaccctcctcccggatcttcactgcgaccctagcgctccgtgtggtttctggccgcgcggccctcggcggtttcgggttcaccactcaccccctcctttccgggctgcggcgtaggcccgggtgtcccctgggctttggggtgtgccaatttgccctgtaaaccagtacccccggcccggagccgcggcgcgccggggcctcgcggactggctgtcttcccgcggacaacctgtcgcgtcggggatgcccgcggccccgccatgcagctctggccgcttctatctgctgcgtgctgtcccggggacaaagacaggaaggaccgcagcagaacgaaac

SEQ ID NO: 35846 - DNA, 189 bp, Homo sapiens; identical to SEQ ID NO: 17863
  chr4:141007383-141007572
  hypo

SEQ ID NO: 35847 - DNA, 692 bp, Homo sapiens; identical to SEQ ID NO: 28034
  chr4:154143770-154144462
  hyper

SEQ ID NO: 35848 - DNA, 111 bp, Homo sapiens; identical to SEQ ID NO: 7388
  chr4:154421947-154422058
  hypo

SEQ ID NO: 35849 - DNA, 1047 bp, Homo sapiens; identical to SEQ ID NO: 24465
  chr4:15780048-15781095
  hyper

SEQ ID NO: 35850 - DNA, 961 bp, Homo sapiens
  chr4:16084274-16085235
  hyper
cgcagccgcgcaggggagggggttgccggagtaacttggctgctctgagcgcgtcggcgccagttccccgccgcggcccctgttgggcaccgatcgggggcgatcttgccagagagaaggggttctggagctagttcctccctccgatccgactccctgcccctccagacacgggctttcggggaaactgatcccgagcctctgactttctacagccgtgaagctcctggtctgtccacgctcctctttgttgtccggtcggcgtgttctggcagggtgcgccttgagcaccccagttctccatctagcgatagccgcgggtccccgcgcatgcaagcagaagggccgtggagcgagaggctgggaaggtgcttcaagccaggggtgcatgctttctcccacggacgcggggagatggcctcgctttgtacccccatatccctactcccgctgtggtcggctgcacagtgttggcccatttccgcactcagccagggaagctcagcgcctcacgtccccggggccatccctagagtttcctttaccgcagactcgttcccaagaccctggcgagtctcacctcggtcaccgttctccccgagagcgagtccgaagtctctggggccccggtccagttcgcacactcacctccgactcccgctccggaaccacggccgccggctacccccacccccgcccccatccccagtggatggaaagaagacccaagcggggcgtcgcgggccaccactcagactaaaaagtttgggttggacgggcaccggcaccaccacgctctccccgcagttcctctggcccccagccgctgtccgggcccgcaccacctgctgaggggccagggaggcggcgcagatggctagggtaaggggggcgcagagcgaacccgtccactcctcactgtacacccccagtacagtggaaggagtgcgctcagccccgc

SEQ ID NO: 35851 - DNA, 212 bp, Homo sapiens; identical to SEQ ID NO: 17869
  chr4:1902464-1902676
  hypo

SEQ ID NO: 35852 - DNA, 74 bp, Homo sapiens; identical to SEQ ID NO: 17870
  chr4:2638078-2638152
  hypo

SEQ ID NO: 35853 - DNA, 211 bp, Homo sapiens; identical to SEQ ID NO: 17871
  chr4:2639936-2640147
  hypo

SEQ ID NO: 35854 - DNA, 124 bp, Homo sapiens; identical to SEQ ID NO: 17872
  chr4:26855445-26855569
  hypo

SEQ ID NO: 35855 - DNA, 184 bp, Homo sapiens; identical to SEQ ID NO: 17873
  chr4:37978665-37978849
  hyper

SEQ ID NO: 35856 - DNA, 284 bp, Homo sapiens; identical to SEQ ID NO: 31891
  chr4:39047105-39047389
  hyper

SEQ ID NO: 35857 - DNA, 43 bp, Homo sapiens; identical to SEQ ID NO: 17875
  chr4:40261237-40261280
  hypo

SEQ ID NO: 35858 - DNA, 145 bp, Homo sapiens; identical to SEQ ID NO: 17876
  chr4:48572780-48572925
  hypo

SEQ ID NO: 35859 - DNA, 855 bp, Homo sapiens
  chr4:54965627-54966482
  hyper
cgttggtctgagtggccccaggagggccccaagtacaaagacacttcagaccttgtcgaacatcagcatgaaaagcttgacggtttcttagctgggaggcctcacagttctgcgccggacagtcctgaactaaccacctgaatgacctctgccaagtccaaaagctgtggacaggggtaggtgtaaccgtggccagagctgcgctcagggactggacgactgccagtccgtcgcccgcacaatcctgctccaaaccgcaggcctcacacttcaccgcgccgcagccacccctaccacagaggagctggaaacactgagcattcctattaaataagcctccaagtccccacctggtacgctttgcggtggggcgtggggaagagttgggctgcggccagggtagcgagagggggtgggatggaggatgcagcgctgtgatttctcagtaaagcgtggagaaagagggggaggaggccggcctccccgggaaattaacaaaacctacactttgcaaagtctcccccatccccctcccccgagttcttccccgccgcgcgcccgcccctcctcgcggcttctgttgtgactcgggcagcctatcccgagggtgcggagctgccgaggagcctgagccgagcggtactccgcagcatcacgtgccagggtggggggctataaaatacccgagccggggcgccgggcgggggacgtgaggaccagccctctccggggacccctttgttcccagcccagacgccaacacctctgcgtccccaagggcttgactgcccgtgtctgcgcggctcccagggcagagcttagaacactagaggagaggggtcgccgcgaactgcc

SEQ ID NO: 35860 - DNA, 87 bp, Homo sapiens; identical to SEQ ID NO: 17878
  chr4:57093728-57093815
  hypo

SEQ ID NO: 35861 - DNA, 956 bp, Homo sapiens; identical to SEQ ID NO: 28045
  chr4:57521845-57522801
  binary

SEQ ID NO: 35862 - DNA, 85 bp, Homo sapiens; identical to SEQ ID NO: 17879
  chr4:57896316-57896401
  hypo

SEQ ID NO: 35863 - DNA, 659 bp, Homo sapiens
  chr4:83718790-83719449
  hyper
cgctctcgccatgggatcggtttgctcaccgagaaacttcaccgagaactgcaaatgggcatagaagattgcggagggggcagggacaggggccttggagaggcaagaggggaaccggtatcttccatctggtgcgcgtaaaccaagactctatcctgtgccgggtctctcctccccggtccaactcccttacttgtcctcatctctgtccccaaggtccgtgacccgcggaggtgatgggggggataggagagccccagggaccgcagaggtgacacaatcgcccgcccgtcctccctcgctgggagccgattcagcctgtgccgagcctctcccttcgcgcgcctctgcgcacagcggtggcaccgcaggactccgggtcccccccggctctccatcgggaagccggcaaatgcgcttcctcaggcagaccgcggcggggtgggggcggggggggggcggaagttgaaatactgggacagaaacacctgcccgtcccaagggacggaaaactggatgccaagggggccgcggcgcgcagcgggaggcgaggggagaccgggggtcgctgcgcaccgcccgcagccgaggggcgagcggcgacctcgcgcgccccagcgcggcctggccacggaggccggggcgcagggggcgccggc

SEQ ID NO: 35864 - DNA, 1059 bp, Homo sapiens; identical to SEQ ID NO: 27062
  chr5:101631442-101632501
  hyper

SEQ ID NO: 35865 - DNA, 1429 bp, Homo sapiens; identical to SEQ ID NO: 25707
  chr5:10564301-10565730
  binary

SEQ ID NO: 35866 - DNA, 1400 bp, Homo sapiens; identical to SEQ ID NO: 27066
  chr5:112629411-112630811
  hyper

SEQ ID NO: 35867 - DNA, 246 bp, Homo sapiens; identical to SEQ ID NO: 17887
  chr5:126213748-126213994
  hypo

SEQ ID NO: 35868 - DNA, 241 bp, Homo sapiens; identical to SEQ ID NO: 17888
  chr5:131831522-131831763
  binary

SEQ ID NO: 35869 - DNA, 805 bp, Homo sapiens; identical to SEQ ID NO: 17889
  chr5:132386973-132387778
  binary

SEQ ID NO: 35870 - DNA, 873 bp, Homo sapiens; identical to SEQ ID NO: 17890
  chr5:133862738-133863611
  binary

SEQ ID NO: 35871 - DNA, 541 bp, Homo sapiens; identical to SEQ ID NO: 24493
  chr5:134880146-134880687
  hyper

SEQ ID NO: 35872 - DNA, 469 bp, Homo sapiens; identical to SEQ ID NO: 17892
  chr5:139088846-139089315
  binary

SEQ ID NO: 35873 - DNA, 981 bp, Homo sapiens; identical to SEQ ID NO: 25711
  chr5:142781722-142782703
  binary

SEQ ID NO: 35874 - DNA, 201 bp, Homo sapiens; identical to SEQ ID NO: 17895
  chr5:145887336-145887537
  hypo

SEQ ID NO: 35875 - DNA, 112 bp, Homo sapiens; identical to SEQ ID NO: 17896
  chr5:14681608-14681720
  hypo

SEQ ID NO: 35876 - DNA, 66 bp, Homo sapiens; identical to SEQ ID NO: 17897
  chr5:149375694-149375760
  hypo

SEQ ID NO: 35877 - DNA, 341 bp, Homo sapiens
  chr5:150536722-150537063
  hyper
cgaccggacgttcagctctctgcacgcaggcagccctcccccgacaccacacacaagccattttataagcagctggagggtccaacgctcttgctctcagtcttgggcctcagccacacccttctctgcgggtcctttgactggcgtccagctgaccccaaccccggaccttcaaagtctcttgagcccccccaaattaaggccggcaggaccagcccctggctcagctccggcgcccaggaccctcaaccagaccctctgcagcaacgggactccctcccctccccctagccagggcgccctccgcccgcgcctctccgccccgaccccagatttgctcc

SEQ ID NO: 35878 - DNA, 331 bp, Homo sapiens; identical to SEQ ID NO: 25715
  chr5:151066267-151066598
  hyper

SEQ ID NO: 35879 - DNA, 795 bp, Homo sapiens; identical to SEQ ID NO: 22921
  chr5:169063996-169064791
  binary

SEQ ID NO: 35880 - DNA, 250 bp, Homo sapiens; identical to SEQ ID NO: 17900
  chr5:171471000-171471250
  hypo

SEQ ID NO: 35881 - DNA, 30 bp, Homo sapiens; identical to SEQ ID NO: 25726
  chr5:178987428-178987458
  hypo

SEQ ID NO: 35882 - DNA, 727 bp, Homo sapiens; identical to SEQ ID NO: 17901
  chr5:179245848-179246575
  binary

SEQ ID NO: 35883 - DNA, 108 bp, Homo sapiens; identical to SEQ ID NO: 17902
  chr5:179708846-179708954
  hypo

SEQ ID NO: 35884 - DNA, 1348 bp, Homo sapiens
  chr5:180017458-180018806
  binary
cgggcttctcccagggacagggcttggaggggcaggacgggaaacagccctgacgtagggccgggacacctctggtgcagttttgaggctggccgggaagggatgcccgcgcaggaagggcacccggggtgcccactttaccagcagggccttcagggccttcacggcccccacggcctggggacccagctcagccacacacttctgggagccctctatgaggtggttcacggggatgcccaggctgctcagcaggagcttcagcgggttgagggtgccgagggggttggccagggtcccggccccggcctccgccgccgactccagcgcagcgacaggctgggccacaggcttggccgagcccactaagaaagcagcagctgcaagcgaacagggaggggtcaccgcctgcgcgccggggtccccagaaggcaggtccaggacgcgcccccgcgggaggcgcccaggaaccgtcgcgccctgcccggctccccgaccgcccctccctcctgcgccgaggcctgccaggtgcgagcccccgggacacaggcgggtctggggaggcggccccgccaggagacgctgcagggtcaccggagtggcctgagggtggcggaaggaccggtgaactctgtgcagggtccgggacaggcccccaagggaggggacactcgcgctgcgccttgcaggatgaggagccggtctccagacggggggcagacgggtgtccccaggccaggggcggcctccatcccggcacgaggctggagacagccctgagagggggaggccgcgggctgcaggcgcggggccccggggtggcggagccctctgggcgccgggcgaggctggaaggacctgggatccacgatcggcgcaggcagcggcgggggcgcagcgggcgccgaggcctcaggccccaccgtgcgcgccaggagcccggggcgctcaccggagctgcaggacagggccacgcagagccccaggagggcggcgagcttcatggcgcgggggctcggggcgcgcggggaacctgcggctgcccgggcaaggccacgaggcttcttatacccggtcctcgcccctccagcgccggcctcgcccgcgctcctgagaaagccctgcccgctccgctcacggccgtgccctggccaacttcctgctgcggccggcgggccctgggaagcccgtgcccccttccctgcccgggcctcgaggacttcctcttggcaggcgctggggccctctgagagcaggcaggcccggcctttgtctccgcgaggcccaccccggcccgcaccttcgctttgcggtctgaccccacgcgcccccctgcagggctgggccc

SEQ ID NO: 35885 - DNA, 1850 bp, Homo sapiens
  chr5:1874606-1876456
  binary
cggtgagggactgggagaccgggatggggagagagagggaggccgggctgtctcgtcagcagcaggcgtgcccagggaaacgcaggtggcatacatcgcatgcataatctcaggagacggccactttaaatcttaattggttgccttttaaatatcatttaagggctggcttccctgcctctctctctagttaagaaggtgtcgtgtcaaactctattaccttgctggacgtctctcccttaagttaaaaaaaaaaaaaaaaaaagaaaagaaaaaagaaaaaaaaaatggaatcatcagccgcggtttgagaggtcgataaagcttttagatttggagacgttttccgggagcccatttcctgcggctaagagttgttaatggagcttaaggaattatcttaggccgggcggccgggagagccgtatatctcccgcgcctgttcccttgtcgagcctgaatatgctgctgtcagactcgcttaatgaaaagtaacgcaccgctgattacagttttatttgggctctatgtaaagagcgccgttaatttgcatcccctccttggtgtgtttgaattcgccacgcctgaataaccgagcgcgccggccctgccggcctcccggcgccttcccagcccttctctgacaatctccctgggagcccagtcgcccgccccgacccttccccgtcacgcccccgccccactgacatcgacctccctggcgcgtccactcagacacctaaaattcaccccctccgtgtcacctctttgcaaacgccccctccccaccccgctccgacttcggaattgtcctgcctgacacctccccaccccacaagatcagccagagggtgtttgggggcgcctaaggcaaaccggctggactgtgccccaagggaagggtgtgggggaagcgcccagcgaggggatgccatttcctgcgcgtccccttagaatgtggctgaatccgcctccccacccgacgtctttatttaacacaatctcgcagcttattcaaataagccagctttgtcagccagttccaccaagatccgggggctccagcgagatggaattcctatggccagggccacggggaggggctggggtcccgagggcagcaagcttggctggcggcaggagccctgggtcctccccaggagagggacccagagcccagaccaagtccaacccgccaacctgcgccacccatgcgcgcactgggggctgcagagccccgccaggctgcccgcggccgggagcgtaaggccggggtccacgcctcgattttcagtgtccgcagcccctaccccgcctatctgcgacgcaaggcgaaaccttgtttttgcggaaaatgcctggctttgtctagggctggggtgggggcgtctgggcagccaccctcggccacattaaaattcctggcgccccagcctcgggcctcaacgctgtcccccgagacgccactttcgctattactgtcaagtacccttgactctttatttttgcccttttatctattacaactaattcgagttcttttgcccttttcagtctaagacgtgggctttctgcaaagcctccccctgccagcgagctctcggagcgcggagcctttagaaattgaggggtttactgtcaaaatgaaaatttcacttcaaattaccttggctgatgctcgctcgccaggccgggggctcccgccgcagccttttgacaggcacatgagccgcgagcttccgaacctcgataatatcatctcgagcgcgaaagtcaatacggtgacagcgcgcggccggatacaatccaattacgctcggctgcccgggcgctcctggggctcggggtcc

SEQ ID NO: 35886 - DNA, 519 bp, Homo sapiens
  chr5:33892023-33892542
  hyper
cgctcgcctgtggcccagcaggaagatgcaggggtgcatggtcaggcgcgagaaggcagcgactgcaaagctgcccgcgatctccctgtgcttttttaagcagaaaggagctagacacctttttcccctccctcctcctaaaaggggagtgattcagctgacagtgtccgctttcggcggggtgtggaatgggccagagcgggagggcgcagcccaccccggtccccacccctccgcctcccgcatgccccgcggcctcgcagcccgcccgctcggtgcatcttcctcccggactcccacccccgcgctcctccggccccgccccgaacgccaggcccagctggccgagccggccaaataggggagacccgggagagccgccctgggaggcactggaggaagctgcgagtgagaggcccccaggccagccccccggcgtgcttaaatacaagctcaaaatgaggagaacagagttgaggcagaggggggccccactccctccatccttccgcgctcagc

SEQ ID NO: 35887 - DNA, 887 bp, Homo sapiens
  chr5:38257421-38258308
  hyper
cgcgctcccaaacataggctaactgtgaagagccaggacgcccaccgagtcctggcagcgttgcaaggtggggagggggcgggcgcggtcctgtcgctagtgactgcagatttcctctgcggggcacttcctacggcctttgatctttccccaggaactgccgagggccgcgtttgcctctaagtttattccctcttggtttatttattgtatctgctttctcttctcgctggtttggaggtcagaacgccagtatgcaacgggacttgtgtcccaggcagggtctcccctctccaggcactaccgcgaaatctggcaaaaggtacattttactgagtcctagggcagcaaattcagcggcggagaaagagtctttctccattcaggagacaacccaggaagcccgatcccgggatcagaggccaggaccccgccccggccccctgccccaggcccagctgggcgccgcccaggggcttttctcggtccgcctgggggctcgagctcgcgtccctccctaagacgccaggcttaacttggagtttcatctcctccccaggagggtctcaagttgccttcctctgccgggaagggcccccactcccccgctccaggccctaatctccacccggcgtcccagtctgagcggcctggcctcagctctccatctgcgagccttaaatcccatttatcttcttagcgcctcagacccggacggtcccgcctctcttcctctcacccccaccccacttgcaaatcacagacccccgtctacccctcgcatcccccaagtgcgctggaccaactacagcaacctttgaggtgttagaaaaagtcgcctagaggggcgcggcaggaggagggcccaggtggggtggagggggggc

SEQ ID NO: 35888 - DNA, 1567 bp, Homo sapiens; identical to SEQ ID NO: 25731
  chr5:40680513-40682080
  hyper

SEQ ID NO: 35889 - DNA, 137 bp, Homo sapiens; identical to SEQ ID NO: 24513
  chr5:40775162-40775299
  hypo

SEQ ID NO: 35890 - DNA, 1687 bp, Homo sapiens; identical to SEQ ID NO: 23300
  chr5:42950747-42952434
  hyper

SEQ ID NO: 35891 - DNA, 1260 bp, Homo sapiens; identical to SEQ ID NO: 25734
  chr5:42991800-42993060
  hyper

SEQ ID NO: 35892 - DNA, 229 bp, Homo sapiens; identical to SEQ ID NO: 25735
  chr5:42993305-42993534
  hyper

SEQ ID NO: 35893 - DNA, 215 bp, Homo sapiens; identical to SEQ ID NO: 17908
  chr5:43603571-43603786
  binary

SEQ ID NO: 35894 - DNA, 811 bp, Homo sapiens; identical to SEQ ID NO: 24516
  chr5:54516349-54517160
  hyper

SEQ ID NO: 35895 - DNA, 1069 bp, Homo sapiens; identical to SEQ ID NO: 24517
  chr5:54518558-54519627
  hyper

SEQ ID NO: 35896 - DNA, 138 bp, Homo sapiens
  chr5:55776604-55776742
  hyper
cggctcttacgcacggccggcagccccggctgggaatcacgggggtggcagccgtccccggaaaacggcggcattccgacacaggaaagcccgcggatcaactgatctgcagacaacgcttcttccttcctgggaagc

SEQ ID NO: 35897 - DNA, 1068 bp, Homo sapiens
  chr5:58334886-58335954
  hyper
cgccatgctcggatgcccggtgccggcacatgagggctgctccttcatattgcccagcccggcagtgcaacgggggcggaggctgtgctcgcggggcggccggcctcggggaggcacggtctctccagcttggcgtctcgggtcggcctccagggagggcgtgcaaagagcggcgagccaactttcacacagcgacgcgagcggaaaaaccactatgcgacttttcaactgtgcggcgggcccgagtcccagtccaggagcccggctctagcggatggcgagggggtggcgagcgcgcttgggtgcccgccccgcagaggagcgtctggtccacagccggatctcctcggtccccaacccggagccgcggccccacgcccgccccgcctgccgagccttctgcacggcacttgaagtgaatgaatcagccgcggccgggtgcgcggccaccacgtttcctgttttctttctcaactcctcgggcggcaggcgcagcgcggctccaacgccgcagctttccgggaacactccccctcacgcccctctcggccctcggcgctgcctggctcctcctcaacccccttacgaaaagattccgaattgcaaaagcctgtccctgtccgtgccacccgccgcgtccttcccctcgagctctgccccgggggccccgccacctcgcagtgccatccccccggcgcagccgggcgccactcgctttgaagtgcagacgaggaggcgcgggcgcgagcgtgtgtgtctgtggggctgctgtgggactgtctgtgctaggagagcggcggaaaacccggcgtggagcgcctgcagtccgccgtccggggtcgcgcccgccgcggggctcaggagggaccggcacgcaggcgcgcacggccgcgcacctgtctcgctagaaccccgcgcgccccgccgagccactgccctccaggttgcccagaccgctggagcctctgcgactccacgaccggctgcttcctgcgaagtttcacaaacaaggttatttaggaccctcaaggtttctgagggtttaagttttagggtttctgggggttc

SEQ ID NO: 35898 - DNA, 635 bp, Homo sapiens; identical to SEQ ID NO: 25745
  chr5:6583144-6583779
  hyper

SEQ ID NO: 35899 - DNA, 751 bp, Homo sapiens
  chr5:72416014-72416765
  hyper
cgctctctcgcgcccctatagaactgggcctcaggcctcgagggggagcgggcctcggcgggcggggcgcacagttccgccagccggcgggggcatctcaactcgccggccccgccaggtgtgcgggccaggcagccgtggaaggtgcccatttctcccagattcctcgcgcgcacggccacgagcgcggaggctgccaaacccgccagccctgggttccgaagccgcccctggctctccattccctcgcgggcgcgccccgggcccccagtggcggccagctcccaccggtcgctcctgcactgccctgccctgccctccccgggccgccgcgcccgcgcagcaccgcctccttctctaaatactgccgggtccgccctccgcaccaggacgcgcggtgggtagggtgcagggcggccggcgcagccgaggccgcgtgcggaggcggacgccgcgcccagccagtgcccacagcagcgcggtcagccaggcgccggacccagcttcaggtaagctgccccggcccgcgcgcctgcgccggcggcggcgggtcgggcgctgagctgtgcggccaggctgggcgcggggagccgcggcagcgcggaggcgctgggtatccgagcccaacctgcgtccctgcgagcccctccggctgttgcttgcgctcgggctccctaaaagccgcaaaccgatttcgcacagaaggcatttgcctctcgtttcgttccccaaacgcaccatagctttggac

SEQ ID NO: 35900 - DNA, 62 bp, Homo sapiens; identical to SEQ ID NO: 7438
  chr5:74753672-74753734
  hypo

SEQ ID NO: 35901 - DNA, 35 bp, Homo sapiens; identical to SEQ ID NO: 17916
  chr5:77425063-77425098
  hypo

SEQ ID NO: 35902 - DNA, 847 bp, Homo sapiens; identical to SEQ ID NO: 25749
  chr5:94955574-94956421
  binary

SEQ ID NO: 35903 - DNA, 109 bp, Homo sapiens; identical to SEQ ID NO: 24522
  chr5:94982109-94982218
  hypo

SEQ ID NO: 35904 - DNA, 169 bp, Homo sapiens; identical to SEQ ID NO: 25751
  chr5:96114516-96114685
  hypo

SEQ ID NO: 35905 - DNA, 896 bp, Homo sapiens; identical to SEQ ID NO: 24524
  chr6:10417173-10418069
  hyper

SEQ ID NO: 35906 - DNA, 948 bp, Homo sapiens; identical to SEQ ID NO: 29298
  chr6:10418940-10419888
  hyper

SEQ ID NO: 35907 - DNA, 1260 bp, Homo sapiens
  chr6:10425683-10426943
  hyper
cggcatagggtgtctctacatcttagaaatcaagacagcctctaggttagaataaagtttactctggactgggcataactccactccacctctgcgattcttcttctcgtttcccgtcttctgtcttttctttcctcccttcccaactcctagcgcgctactttaacgtctcagtctcgttcgctaagcccatgcgcctgggacttgttctttgaatctcaagtccgaaaagccaggaatcctcgatcatggacttcctcctgctaaattagagggagtgaaatttcgctctcctctccatcctacttccccatcccaaactcgctagattaagttcgctgaccaggcgcgcacccaatggcagcaccctctccaacattttccccaccagagaggcaagtgtcctacatttgtacgtaaaggtccctgagtggctaggtggagaggctcggatgtcttttcctggagcgggcctcggggagctgcagcagccccagcctcaggcaccacagccaagcgagcgcgccttgggctcgctgctctgcacgcagctggaggtctgggccgctgaccctctggccacgtagtcaacccgaggatgtgtgccccggggctcggccttgcctcgggtgagaaggctagtcaccattcagggtgcaggtgtcatggcctggaaatggcaatatctgagcaaacaggtgggcgtcgcttcccggcggtgcggtggccgctggctcgcagcgcgctccagctttcggcgccgccgccgcccctttgctctgcggactcagccagttcccgggtggcccagctgggtggctccgaggcctgcccccttgggctgcggcgggaggcggggactgcagtgccgagtgtagggcgccccagccgggctggcggttcacgctgcgctcgggcctctgccgggagggcgccctggcgccaaacccgggcgggcaggggggtggagagccgattgagtttattcccattcagaatttagaggctggtggagacagagagtctcctaaatggatgcaagtctcctgaaagtctgggccggaagcctcgaaactttctgccacgcaaagccccagctagtctccagggctcggtcctggttccctttgtgcaggcccggaagtgtccgcccggttttcccactgcctggaggggcccagggtcgcggatagactcggacaaggctccgtttactttcagtttgtcttagttgactaatggcgggactggttgtaatgc

SEQ ID NO: 35908 - DNA, 375 bp, Homo sapiens
  chr6:105750354-105750729
  hypo
cgggtacggccgctccttccgcggctgctgcttggtcttcaggttctcctcgtgcttgctgggccagtggcgcaggcgcatgttttctcaggccgcaggtccaggggcttgtacctcttgcccttgtagaatttcctgaggttttctttgtgtgagtctggttaattacggtgagaacacgggcaatggaattgtggatgacacggatcttagagagcttggagaccgcgccgcctgtcagtggcgatgcgcagctgggacagctccaccttcaggtcgtccagctgtttgagcagcaactctttctccttcccgtgaaggtcccgagacttgatcttagccattgctgcacaggccgcccccgccgcctgctcc

SEQ ID NO: 35909 - DNA, 1104 bp, Homo sapiens; identical to SEQ ID NO: 25756
  chr6:107809991-107811095
  binary

SEQ ID NO: 35910 - DNA, 1325 bp, Homo sapiens
  chr6:108439510-108440835
  hyper
cgaggcccccgtccataatcgcaggtgtcggcgtggaaaggagccacgcgtgcacactcatgggtctcaccgcgcgggcttccgcggcccggcaagccgctgcgcctgcctcgccggcggcccacggagcccgtccgcgcttgccctgcacacctgcgcccgcgcgaggacccagccgccgaggccgtgcgcccgccgggctgcgggggccgtgggcagggggcgcagggggcgcagggggcggccggcgcggcggctgaacccgggctgacgaggcccagccgcctgcggggcccggagcgggaggtaccggctaggggcgcgtttctttcgcatccacaccccgcccccacccctctctccagggattttttttttttttttttttgtatccaggcacagctgggggctccctcaccacccacccctggcctccccatacagaataaagtcagtctgtatttaatggttatggcggatgtgagggggatttggcagaggcagaagagaggcctttcgctctcaaatatcgtcccttacgtcgtgtgagtctaccaacccaccacgacctcatattcttgtgcgggtgtctgactcgaatgacaagcgagctgattttttcagtacatagctgggaaatgtagtgagtgataatagagatttctctttcattttttacgcttgacttggttattgttgcttttcttttcccgtgattccttctgaggattagctctgacttccccactattggcggtcaaagtggccccgactcgggatgacaattgacggggatcaagggattgcccattctgtgcctgtaagaaccgattcgtgccagagaaactcatcaagtggaggcggagaataaagaccgttcgggggtaaatgtattcattgagaagggttctcccaaattgcttctaagtttttttaatgaaaagtaacgattgcggcaatcagcggctttttggcggattacaaatctggagggagctgcggcgctgcattgaaaagtgcccccgccttcgcaccgggcagccggttcacaggagcagcgcgaggggcgggggtccgatagcgggacaaaggcggggagggggcgagcggaggagggcggctcggggcgcccgggcgcgcatcgggcaggagacgcggaggtgcccaccccagcgcaggcgtggcagggcgccccccaccgaggaaggcgtggggcagggtgcaggaaggggaccgagggaggtctaccgcagcaccaccagcactggggagattccgggcatctggagcgaggaaggtgtgctataggggttgagtccatcacc

SEQ ID NO: 35911 - DNA, 1803 bp, Homo sapiens; identical to SEQ ID NO: 24531
  chr6:108489327-108491130
  hyper

SEQ ID NO: 35912 - DNA, 806 bp, Homo sapiens
  chr6:111409052-111409858
  binary
cgggaccctcggacagccccgaggcggctgtcgagaaggtggaggtggagctggcggggccggcgaccgcggagccccatgagccccccgaaccccccgagggcggctggggctggctggtgatgctggcggccatgtggtgcaacgggtcggtgttcggcatccagaacgcttgcggggtgctcttcgtgtccatgctggaaaccttcggctccaaagacgatgacaagatggtctttaagacaggtgaggcgcggcgcccgccgaggccagcctgggcgacccgcgtggggcccccgagcgcatcccgcgtgtgggctgtgtctgcctccgagtgtgcatgtcggtgggtccctgtgccagagggtgcgagcaggggggtctttcgagttgcagacagagcctgccgcttctggggcctcggggtgcccgtctttatatggaatccagctgcagagctgtgtgtttgcaagcaggtcgcagaacttacttgccgagatcgtcctcctttcccctcagcagagcagacgctaacagtccacaggagcccttccttttattgtttgaaaacaaacagaaccccagaaccttcaaccccagtcatcgccctgtcatttttgtggtctctttcgtgactatgccagttatgtagttcttcacctgcctccctgggccgcagaggggtgtgcgtatgttggcggggcggggggtggagtttggaggaatgaaagagatttgtacgaaggtcactggagttccaaagggggccctgcaagagtcacggttccgtgcgttcccgtcccccc

SEQ ID NO: 35913 - DNA, 72 bp, Homo sapiens; identical to SEQ ID NO: 15121
  chr6:116691827-116691899
  hyper

SEQ ID NO: 35914 - DNA, 249 bp, Homo sapiens; identical to SEQ ID NO: 17928
  chr6:12338243-12338492
  hypo

SEQ ID NO: 35915 - DNA, 365 bp, Homo sapiens; identical to SEQ ID NO: 17929
  chr6:131383375-131383740
  binary

SEQ ID NO: 35916 - DNA, 157 bp, Homo sapiens
  chr6:131455795-131455952
  hypo
cgtgttagaattatttgaaaatcagagtaactagtttgccgacttctagtgtgcagcctttacgccagctgttgtggctgtgtaggggtcttcttttcttccatccctattctacgatgcattcaacataagcgaagtgttattattcacgaaaggc

SEQ ID NO: 35917 - DNA, 41 bp, Homo sapiens; identical to SEQ ID NO: 17931
  chr6:136552688-136552729
  hypo

SEQ ID NO: 35918 - DNA, 176 bp, Homo sapiens; identical to SEQ ID NO: 17932
  chr6:136682773-136682949
  hypo

SEQ ID NO: 35919 - DNA, 135 bp, Homo sapiens; identical to SEQ ID NO: 7454
  chr6:136901469-136901604
  hypo

SEQ ID NO: 35920 - DNA, 854 bp, Homo sapiens
  chr6:137241797-137242651
  hyper
cggtaaatcacgacttcagcactttggctgaagtgtcgcgttcagcacagaggtggaagtaagaggcagaaaacagaagaaccacgagagaaatggatcctgtctattaaggcaacgtgatgcagcgctaaaaggttaggaggttacgattcccggggctaagagaaataaactgctggtggtgaacgaaaggggtgctggagcgcagcgatctcgaacctttcccttatagccaaaccctggccaaggccacaaatttcaaatcgcctgaaaaccaaactgtctggcgcttaacggttacctcggctgagcgaaacccttggctgctgctgatttaactacaggtccgcgcgagttactttccagggaactgaattcagaacaaagagttaccgaagccttactccctctccaaaattagaattccctttttctcttagtcatataggaaacacacagttcacaagtcctgtggtgcaaaggtgtgaaccctggcccagggaggtggtgactctccccgccctccgcctgccggttgtcctgcttccgaaagcaacccacgacggtcccgcagggtgagggttccctgggatcagttccctgggatccggagaacgccacgcggagtctccctgcagggtgaggggccccgggttcccgccccctccccctctactctcccattctgcgagcgcagccagcctcccctcccacgcttcgggaagcgtcgcccccgagctcctcggttcctggtggtggctactcgtgttagtgacttcgtttctgcgcgtttgcttattttcatctttgcctcagttcgaatgtgtccccgccaccaggccccgctgctgggc

SEQ ID NO: 35921 - DNA, 498 bp, Homo sapiens; identical to SEQ ID NO: 25766
  chr6:137310868-137311366
  hyper

SEQ ID NO: 35922 - DNA, 249 bp, Homo sapiens; identical to SEQ ID NO: 17935
  chr6:138724531-138724780
  binary

SEQ ID NO: 35923 - DNA, 1003 bp, Homo sapiens; identical to SEQ ID NO: 25768
  chr6:143247656-143248659
  hyper

SEQ ID NO: 35924 - DNA, 370 bp, Homo sapiens; identical to SEQ ID NO: 17938
  chr6:143268770-143269140
  hyper

SEQ ID NO: 35925 - DNA, 761 bp, Homo sapiens; identical to SEQ ID NO: 17939
  chr6:146136035-146136796
  binary

SEQ ID NO: 35926 - DNA, 142 bp, Homo sapiens
  chr6:151346267-151346409
  hypo
cggttaccctcaccgcaccccaggtttgccgtagaaggatgagattccctacatgtaggcgtcttcagagtgaacctgttgctcagggcccgcgagcccacagggctccatgcccactgagcaggctcgtggacgtcggcac

SEQ ID NO: 35927 - DNA, 842 bp, Homo sapiens
  chr6:157556779-157557621
  hyper
cgcttggaacttgcgagctgatggcttttggtggagcccaggaggggcgctgtggggcacagacgtgtgcggggccggcagctgcggagagagcagcgcaccccagccttcaattccccgccgaagatgggactctgcccagagccgaggcccctggctgctgccccgctcccttgcggccgcagtgacactcagagccagattcctcagacaatcttcactcctccgtggtggctgccttgggaggcgttgcggggtgaaggaagtcgcagctggtcccaagcagtggggagggcaggacagggagtaagacaccgccttcctggggtgcacacggaggaggggcgctgcccaggagcggaggggaggggagcggagcgcggagaggagaccggtgccagacttcacccgcctagctctcggaacccccgggggccgcgctcggctccgcctgggggctaccggttctgggccaggagaagaagtggcatccgcggggcagggcgggcggtgacggccggctcaggtggcggccccaccccagcgcccttcagcaggcctgggtcggtcggcctcggaccccgtaggcgccggcggagctggcggcagggacccgacagctctgccgcggactccgcaggggacatcccccaccctggcggcccacccaggcggagcgcggcggggaccgtgcatctagcgcgccctggtgacctgcgggccgaggcgggctgtggggcttggccccgcgactcagccttccgggcccacagcggccctgacccgggaagtgcggaggtttggccgccttcaacagcacctgccaggccactgggagcagc

SEQ ID NO: 35928 - DNA, 56 bp, Homo sapiens; identical to SEQ ID NO: 7457
  chr6:158321417-158321473
  hypo

SEQ ID NO: 35929 - DNA, 120 bp, Homo sapiens; identical to SEQ ID NO: 9849
  chr6:16322061-16322181
  hypo

SEQ ID NO: 35930 - DNA, 65 bp, Homo sapiens; identical to SEQ ID NO: 17944
  chr6:166742989-166743054
  hypo

SEQ ID NO: 35931 - DNA, 316 bp, Homo sapiens; identical to SEQ ID NO: 17945
  chr6:170667214-170667530
  hypo

SEQ ID NO: 35932 - DNA, 148 bp, Homo sapiens; identical to SEQ ID NO: 17946
  chr6:170871281-170871429
  hypo

SEQ ID NO: 35933 - DNA, 1468 bp, Homo sapiens
  chr6:21665040-21666508
  hyper
cgagtgaagcgcggggcgggggaggcgaggacagaagctctcctcgcggcgtctttgttctgctctggaggagagaccttggcaaggagtcgccgggcgggtgcagggacctaccgccaccacattccggacccagcgggagccctcctcttaatgcccctccccccgcaagccaacccaggacatagcccccaggtccccaaggttccgtctacctcatccttctacccccaaacttcaccaacccgaaaggattccaagtctgggatggggagaaaggaaagagggtggaggcaaaggtgcgcgacgggctggataccaactggagggtgggtgttcgcattgaaatgtttttttcttttgccctagaaattgcttccccatgcgggcccctactctctcccatttcccccacctccctgctttctttttcttcaattctagtggatctagaaggaaaacgagtgctgctctgagtcactcagcgagctaatgctatggcccgaagttgggatcagggtcgaggggtgggggaccatgtggatggggtcccaattctggaggttgagaatgactggaagggacctggggaagggtcgggagctgttcctggtccgagacacctgatttgtcccggacaaggcagtgggggaggggaaggaaagaggggatgctcggctgggacgtgtcgcggcagggggtggaggatgaggaggcggcctgggaccccgagtcagatctttggggtgagcacgaggacgtggtgtagggaagaggacgagtgagcagcgcctggctgtagggtcagagggcgcctggtcatcctgagagccttgccttcgcagtttgagattaggggaagttcggggcctgagaaggtgggcgcgatgctggagctgggaattcttcctcggagcccctggaccgagttgcgctgcgcctgcagcaacaggtagccccgagggatgggcggaggccccggccgaacccggagctggcctttgtcctgccaattagagggctctccagagggacagcgtgggtgggggtaggtggggaagggcgggagaggagtttcctaacacttggagcccctttgagttgttctgtgtattgggtggaggagggtgaatccgagaggagggaggagggtgaatccgagaggaggaaggaggatgaagagcctagcctgcgccccacctctgattgtgtaagcgcctttatctagggttgaccccctaccctttgcattttgtctcttgggatgacgaaaaatggacagaaactcgacgcccaagtgaatgtttcacattgattggcagggaaagtgcaaacaaagaggtgcatctccgggaaacaatgattttggagatcccctgcccaccaccccagacttgtgcgcggtgcggagggggccagggctggcatctcccggggaaagtttcgagcctggcagtgggaggagacc

SEQ ID NO: 35934 - DNA, 94 bp, Homo sapiens; identical to SEQ ID NO: 10715
  chr6:24662806-24662900
  hypo

SEQ ID NO: 35935 - DNA, 654 bp, Homo sapiens
  chr6:26087606-26088260
  hyper
cgtttccccgccccccaaaagaagcggagatttaacggggacgtgcggccagagctggggaaatgggcccgcgagccaggccggcgcttctcctcctgatgcttttgcagaccgcggtcctgcaggggcgcttgctgcgtgagtccgagggctgcgggcgaactaggggcgcggcgggggtggaaaaatcgaaactagctttttctttgcgcttgggagtttgctaactttggaggacctgctcaaccctatccgcaagcccctctccctactttctgcgtccagaccccgtgagggagtgcctaccactgaactgcagataggggtccctcgccccaggacctgccccctcccccggctgtcccggctctgcggagtgacttttggaaccgcccactcccttcccccaactagaatgcttttaaataaatctcgtagttcctcacttgagctgagctaagcctggggctccttgaacctggaactcgggtttatttccaatgtcagctgtgcagttttttccccagtcatctccaaacaggaagttcttccctgagtgcttgccgagaaggctgagcaaacccacagcaggatccgcacggggtttccacctcagaacgaatgcgttgggcggtgggggcgcgaaagagtggc

SEQ ID NO: 35936 - DNA, 719 bp, Homo sapiens; identical to SEQ ID NO: 34970
  chr6:26188711-26189430
  binary

SEQ ID NO: 35937 - DNA, 993 bp, Homo sapiens
  chr6:26234163-26235156
  hyper
cgcgctttaacagaaatcggccggccaatcacacaccaccgcgggaatttgaagaaaaagtaggacctggtggctcaagtagccttagctatccggtgactgtggctgagactgagacggaaggatccttgcgcccaggctgctgggagctgttaataactgacccccaaccagcacgactaggatagaccgtggccgcacaacaccgcagcacccgcacccctctccaccccactcccccctccaaaaagcttcagctcttttgactgagacctgtgggtggctctgaaaagagccgtttaaaattttcaaaggggaacgtcccgccagtttcactttttcttcggagctgccttctttgcctttgtaaccttcggcttccccgacttaggcttggccgccttgggcttaggggctttggccttagctggactcttggcagctttttttggctgaggtgttttcacctttttcgcactcttggccactttcttggtcccagcagcggttgctggcttctttaccttcttaggagtctttttgatgcttttcttcggggtagcggcgccagccaccttcttgggcttcttggctgccccagcaggcttcctaggcttggctgcgccagcctttttggccttgggtttgccttccccggaagccgctttcttgttgagtttgaaggagccagaagcaccggtacctttggtctgcaccagagtacctttgctcaccaagctcttgaggccaagcttgatacggctgttgtttttttctacatcgtagccagcagccgcaagcgctttcttaagcgcggccagagaaacgccgctgcgctccttagaagctgccactgccttggtgataagctcagatactgggggtccggatgctttgcgtttcccagcagttgcgcctgccttcttcgcctttttcttcacaggtgttttttctgcgggtgcaggaatggtaggagcaagtggagcagtctcc

SEQ ID NO: 35938 - DNA, 1263 bp, Homo sapiens; identical to SEQ ID NO: 24548
  chr6:26271217-26272480
  hyper

SEQ ID NO: 35939 - DNA, 322 bp, Homo sapiens; identical to SEQ ID NO: 23321
  chr6:26322359-26322681
  hyper

SEQ ID NO: 35940 - DNA, 395 bp, Homo sapiens; identical to SEQ ID NO: 23326
  chr6:27059547-27059942
  hyper

SEQ ID NO: 35941 - DNA, 695 bp, Homo sapiens; identical to SEQ ID NO: 25784
  chr6:27064607-27065302
  hyper

SEQ ID NO: 35942 - DNA, 104 bp, Homo sapiens; identical to SEQ ID NO: 16039
  chr6:27428748-27428852
  hypo

SEQ ID NO: 35943 - DNA, 513 bp, Homo sapiens; identical to SEQ ID NO: 24558
  chr6:27858278-27858791
  hyper

SEQ ID NO: 35944 - DNA, 126 bp, Homo sapiens; identical to SEQ ID NO: 17958
  chr6:28327754-28327880
  hypo

SEQ ID NO: 35945 - DNA, 795 bp, Homo sapiens; identical to SEQ ID NO: 23336
  chr6:28367069-28367864
  hyper

SEQ ID NO: 35946 - DNA, 856 bp, Homo sapiens; identical to SEQ ID NO: 17959
  chr6:2841503-2842359
  hyper

SEQ ID NO: 35947 - DNA, 1357 bp, Homo sapiens; identical to SEQ ID NO: 24560
  chr6:28456978-28458335
  hyper

SEQ ID NO: 35948 - DNA, 683 bp, Homo sapiens; identical to SEQ ID NO: 23339
  chr6:2903030-2903713
  hyper

SEQ ID NO: 35949 - DNA, 735 bp, Homo sapiens; identical to SEQ ID NO: 25790
  chr6:3231595-3232330
  hyper

SEQ ID NO: 35950 - DNA, 77 bp, Homo sapiens
  chr6:34618522-34618599
  hypo
cgcctggccaggaatttaattttaaacagtgcgcaacgttcgccttcttcgggaaagctattgggacaactatatgc

SEQ ID NO: 35951 - DNA, 699 bp, Homo sapiens; identical to SEQ ID NO: 17966
  chr6:3750702-3751401
  binary

SEQ ID NO: 35952 - DNA, 49 bp, Homo sapiens; identical to SEQ ID NO: 7483
  chr6:38020529-38020578
  hypo

SEQ ID NO: 35953 - DNA, 126 bp, Homo sapiens; identical to SEQ ID NO: 17968
  chr6:4061573-4061699
  hypo

SEQ ID NO: 35954 - DNA, 1319 bp, Homo sapiens
  chr6:41339068-41340387
  binary
cgggacagcctcctctatgcactgcttcctcttccccagccctgctccctgcatccttccctctggtcctagtgtcctggtgtcttgaagatgctgggtagttagaccgacatccctctccctctctcaccctgggctctgggacgctggccctgcttccccagagagcgatcgccccggacttgtgcctgtgttccggcctagggcagccggaacctcccgatatccccagaggagtctcaggacagcgcacagggaagtactggcttggagctgcgtgttccttgggcggccggcggagggcgaagagcaggaagagcccgggggacgacggtagcagagtgttggggaggccacagacgcggactgcgtggagaaagcacgcacccgggccgcagtagccgggcagggggacggcggaaagcagccctctctggaacattttattctgatccccgcaggactcccccgcgagccccggcttgagcagtcgtgtaacaagtgtgcgattgcgcgtgcgactggtgtgtgcgcgtgggcacttacacgttcccggggaggctgggggcaggagcttcactgttcacacaaagagcgcttagaggaggaacatttaagtttgggggcaaagaaagaaaaaagagttaaaggtttaggagatgggggaggaggatggggcttaaggacgcggtgttgccgcggctcagccatcggggcgggaagctcggggagggagagcgcctgggcccgcttctcgcctattctacgcagaacttttctctcctccttcttccctcgctctgcctctctcggggcggtctccggggactgtctctcacatccattctcctctcctccttgatttatgctgcagagtggaacgaccttccctgacctcattttcatgtcggcgcgagcacacccggagccggctacgcacattccggaggaggcgcgcgctgacacgcacacacacacacacacacactcgagacactgcagggccctgcccatcctcgagttcacaccagccccgccactattatgggcactgccggggctgtggacgctcaaagaatagatcctcattagcatcttgctttgaatatcatttgcattttattcatttcatgtcaaaacgctcagaactctccccagcccgcaccttccccagagcttgggagtcatgggtttccagctcaagccccttctctgtgggccccacgcttgctggctacccccaccccacctaccctgcgccacagcccccacaaaatgaattgacgtctcctaagcacttggcaagttccatctcctgc

SEQ ID NO: 35955 - DNA, 457 bp, Homo sapiens
  chr6:41472031-41472488
  hyper
cgcataggaaaggagggtgctgccgaggtggctgcctgggggcgggccctacaggggtcatttggggcatcccctgcctctaggcaaatccccacggagccccatcccgcaccctcccgcagtgtccagggcgaacccctgtccccaagcccaggcttaggagtgaaatctcgacggctcaggttccttctctacgcagtcccccagccagactaggaatggatcaccgcgcgggtgggctcagttcccggcttcgcccgggtctaggaagaatgataaaaagtgagaatgtaaagggaggaggtactataaaacaaaaggggttagacacccatcaggcagctgcgacccggtggtaaacatgagcgtctcctgtgctcccaccgcctgcgttcttcccggccgcgtccacgttggtttccttctcgttgtcttggtctctcctgattctgttctc

SEQ ID NO: 35956 - DNA, 171 bp, Homo sapiens; identical to SEQ ID NO: 17972
  chr6:41827211-41827382
  hypo

SEQ ID NO: 35957 - DNA, 85 bp, Homo sapiens; identical to SEQ ID NO: 17973
  chr6:43814642-43814727
  hypo

SEQ ID NO: 35958 - DNA, 569 bp, Homo sapiens
  chr6:44187030-44187599
  hyper
cggggctttctgcctgccacacgccgtccctgctcactaccccatcggtttccttcgggagtcttcaaagccagtgcacgtgctcccaggtctcagggaggcgacccagggggaggggcagagagaagggggtccgagcccttgggcccctaaccccgtccctttccggagcctcgggtgcccaaaggcgccggccgccagtcccaggcccgaagggcccctcccactgagtcggctctggtctccccgcccctgagccgcgaggactggacgcagctggctgcggagctctgggcgggcgctggggtcgcctgttgcagcctctcttccgcccggcggcccacaccggtcaggcccggcgcgggctgcgctctccagctgtggctatggccccagccccgagatgaggagggagagaactaggggcccgcaggcctgggaatttccgtcccccaccaagtccggatgctcactccaaagtctcagcaggtgcgcggggcggggccggggggcctggcggggcggggtggggtgggggcgaggtctgcgccgttctcacgctgccgggc

SEQ ID NO: 35959 - DNA, 1135 bp, Homo sapiens
  chr6:49518143-49519278
  hyper
cgcctcagctccggagaaaaacgaaaggtgggtgggaaactaggatagaggtgaaaagtaagaggggactgaatcagcgaatgacaaagggagcagggctccggacaggggtaggaggaagaagaggagtgactggggcttgtgtcaagcttcttctgaatggctagacagccgccaggtgggagaggcggagggtgaagaggcgggttccgcacgcggttagcctggggctgatctagtcttcagctttcaccggctgggagtccggagctgcagcagaggccacacccagggcttggtggtcccgcgctttccggagctcagcaggcgcttgctgcttgaaccggtcaaagaaggaacgaatgaatgacccttttgccaggatggagacccgggggcctcagggagctgcgaatcccatggactcctcccgcagcctgggggacctcgggccttttccgcgggaggtagggcgcggggctccgctagctccgggcgcccggaatcccgcgacggcaggggcgagccgaagccagggcggcggccacgaggacagaacggcagatcgggccctcggacctcgggccggggaggaattggaccgtgagtcctgggtcagagagaaagtgctctttctcctgcacccagagaggtggttagggactcgaggggaccctgcacgggaagaggtggccggtgcagaggaccttcctcatgcgggtggagaggaccacggcgaggagcccaactacccttctgtctttcaacgacaaaagcgaatttctggcaggcgtgtagccccgccgcgggacgcagcagacccacccaaatacgtgcttgtgcgggtggaggattatcaggtaacacaagaagtgttgcagacctcctgggccaagggtcgcatgaccacgaggactgaggagcacttcgtgaccgcgctcacttttcgcagcagtagagagggacagcctggggaacgctggggccctgctgaatcccgggctctccaggcacgaacaggggcatcccgcgtccacgccgcggggaggagggtttcaccgtctccagggacttggctcgaggaaattaaactctaatgagtagctcgagaaatgttccgggatggtggatgagc

SEQ ID NO: 35960 - DNA, 159 bp, Homo sapiens; identical to SEQ ID NO: 25805
  chr6:50805695-50805854
  hyper

SEQ ID NO: 35961 - DNA, 123 bp, Homo sapiens; identical to SEQ ID NO: 17979
  chr6:5108225-5108348
  hypo

SEQ ID NO: 35962 - DNA, 908 bp, Homo sapiens; identical to SEQ ID NO: 25808
  chr6:52227115-52228023
  binary

SEQ ID NO: 35963 - DNA, 1223 bp, Homo sapiens; identical to SEQ ID NO: 35004
  chr6:56818408-56819631
  binary

SEQ ID NO: 35964 - DNA, 791 bp, Homo sapiens; identical to SEQ ID NO: 33033
  chr6:710660-711451
  binary

SEQ ID NO: 35965 - DNA, 980 bp, Homo sapiens
  chr6:73330635-73331615
  binary
cggccagtggcaccgtggcctctctctccgccaagggcgcataggctttgggccacccgggtgccaggggtggtggaagacccagtcagttgttccttgcaacaggtctctaagcttgtatgttacaacataaggtgggtggggtcggaaccccgaaaagccggcgtcctggacaccccatcctccaggtgttctttcccagacactgggtcctcgccgccgctgctgaacttctcaatcatatgactttctcggacttaaatggaaatttcttgacggagggaactgggtttgttctcccaggcttcgcgctgcagtcaggcagagccccggggcagctcgctcaccgcggaggagccactttggagttttacgccctttccacaccccacccatggactggaaaggatgttcagttactcgcgagcttgtctgatactgggatggaaagtcacagtccgcaggctggagtgaggcgcgggaagatgcctggtccttgcctcgcggacttggcagccgcgtcctgcgggtctgtccactgaactgctgaggactcgcccgtgtgcggggacccgagtgccacttcccggagcgttaccttgcgctccagcctccaggctagataatacctggaaggcagggcagggctgttcccgctctcaccccttgcggaaggatggcaggatccggcgcagcgacgtagcagcgggagggcacagcgacctgcatctccagtttctcctcaggacacaaggctgacttcaccttccggacagctgcaaagcccctgccagaaccaaaccgaactcgcgcctcggagaggggcttctggggccgtttcgctgcagggcgtggggagtggagagagggaaggggaagcctggggctgggtgtgcgcgcgtgggagcgcgcctcggagcgccccgcactcccccactctatccccgggggcagtttgggaaggagggagtggtagtcgc

SEQ ID NO: 35966 - DNA, 752 bp, Homo sapiens
  chr6:74161047-74161799
  binary
cggttggttgtctgatcgttggatgtgtagatgaataaacgaacggtttgtcgttttacttagactaggctaccgaaaaacatgcaaaagtctaagttacttccgaagggaagtgaggggcgcgacccggggaaggtagggactgcggattgcggaaggccgagcagcggggctcggcgggagggcgccaagcagctcaccttcacgtgctcatagtagctcccggtgttcagcagcccgacgcctctgaacgcggagtcgcacttcagtctgagcagcaggtggtccacaacccctttcaccatccccgccgccgtggagatatcatcgcggctgagcttcaacttctccaaaaccgcccggagcttcgaggccccaggcgccgcatccctccgtacgagaatgggggccgagaccggcaggccggggctgggcacgtcccagggcccgggcggaggtcttggcttcgtggagcagcgcgcgcccctctggcggcaagaaccagccctggaaagagccggctcccgagccgcaggaggctccagcccctctgccccaggggcgctggtggcgtcagacggctgcgtgtcctgggcgcgctgaggggcctttttggcgcgggccccagttgcgcggacgggcggcctctcctgggtgtccggggcgctctttttctgccgggatcccgacttcctggcggggccgaactttcccgccttaggcagggcggcctcgggggcagccggagactc

SEQ ID NO: 35967 - DNA, 66 bp, Homo sapiens; identical to SEQ ID NO: 17987
  chr6:75985974-75986040
  hypo

SEQ ID NO: 35968 - DNA, 984 bp, Homo sapiens; identical to SEQ ID NO: 30511
  chr6:88876226-88877210
  binary

SEQ ID NO: 35969 - DNA, 65 bp, Homo sapiens
  chr6:89857597-89857662
  hypo
cgaggcctcctcttaaaaaaaaaaagagcggcggcttcatgtcagagtttgagcactgtagaacc

SEQ ID NO: 35970 - DNA, 847 bp, Homo sapiens; identical to SEQ ID NO: 23347
  chr7:117119463-117120310
  hyper

SEQ ID NO: 35971 - DNA, 750 bp, Homo sapiens; identical to SEQ ID NO: 17988
  chr7:120496826-120497576
  binary

SEQ ID NO: 35972 - DNA, 459 bp, Homo sapiens; identical to SEQ ID NO: 25828
  chr7:127371042-127371501
  hypo

SEQ ID NO: 35973 - DNA, 658 bp, Homo sapiens; identical to SEQ ID NO: 35029
  chr7:127671335-127671993
  binary

SEQ ID NO: 35974 - DNA, 89 bp, Homo sapiens; identical to SEQ ID NO: 24583
  chr7:128097604-128097693
  hypo

SEQ ID NO: 35975 - DNA, 117 bp, Homo sapiens; identical to SEQ ID NO: 25830
  chr7:128337420-128337537
  hyper

SEQ ID NO: 35976 - DNA, 2298 bp, Homo sapiens
  chr7:129421203-129423501
  binary
cgttaacaccttgtcttgggctcgagcaaaagaagggggtgaggcagtggaagcggggcccgggaaatctatagtttccccacccccagctcctgccgagccgggaggggccaagggtgacggcaaggatacgaacccttcaatatgcccgactcccgggcagggcctgctgaagccgtagatgtcgcagccagatggatcgggaagcaagattcccaccccaggtggataactggacgagtctcagggcctcggggcccctctccccatgcagccagggatgggcacggtgagcgagaacccggacagcggagataatgagcacgtcacagagcccaacgggccaaaagggggtgatagctccacattaacccctccccgtcctactagcattcccccgcccatctaggtcgcctcgagcctccctggctgtctctgcacccgcgccctacctggtcctcagacccatgcgatgctgggcaacccgggccgggtgtgcccaggaccgcaaagcgggaagcgcaggccttgcggactgcgagtggcccccgcggcctgctgctcccctttataacgcgcgccccgccccccgcgctccgggcgccccgccctggcccattcacctgctgtcgagaaccagacaccgcgcagcagaaagctagccgctgggccgcgaggtccggccgtcggagcgggcggggctggggcgccgccgagacagatccgatttccaccttttcttaaatgcgctgctgaaagtcgagaaggccccggccggggagctcgcgtcgcttcctcccccctcagctcccctcgcaccctgagtcccccagccccactccgggaggggccgcgaaactgcacccgcaagggcctcatacatattttaaggagcaggccaggcaggtaaccggagctggactcggacggtgagggggcggcccccggggacctgataccctggatcccttacggctcagggctcaggcgggggaagaggtggctcaggacgacctggggtcctcactttgctggcctgtccagcgcatcctaagcccgcgtgtatcctaccccctccttctgcagatccaatgtccgtctggcaattgccccattccctctcgctggagagatcccttccgcctcgccacaggcgtcccacgctgcccggagtcgtgcgccccgggacgggtagttttgggttcctcgacgcttggccaggtttaggaaagacccgctgtcttccttgctgcccccacctaggagactcggcgccttgcgctccgtcctttttaatggtgtcgcggcttgtccctctggcttgctccctcctagtccctaccccacacggctcccttcgccagctccatgacaatcccactcgtgctgaagaccttgggcaaagaagtaaccatcggtcttcccctcccttcccattcctccggcggcaggactagggggaaaggtgcccgggatacaagcccctcacgcagacccactgatgcggccgtggttctgccattggcccctctccgaatggtgaggttctcctgctaaccctggccccatggcataactagtataaccccagtgagaggaacccagagttccagtcctcccctgctccagtccctctgtgatctcgatctcgagggattcacttcacctctctaagcctcagtttcccatttgcaaaatgggcagaatgactcgcacctctggggatgaagaaaatgcacatgtgagcacgtgggtacttggcgacccggagatctctgcaaactgcaggcccagcgagatggcctcagcacgccctgcaccctcgtccgcgcgactgccgccgggtgcccgccccagccgctgtgtccctggtgcttcctccgccagggccacgtgccggggaagccaaagcgggagtctttcgatcttggcccagcccttagccctcggtcctttgctctagcatctagattctcgtgggtcaacaaagtcactggaaacccaacgaacttcccgacatttttcgaaaaccgtatgcgtgtgcttctgtgcgtttttcctctgatcgaggtagggccctgtagggttctgtttggacgggaggctggagtggttccttcccggctgcggggtcggaggatgcagagattcgaaagaaggagaaacacagagactgtcaaatgaaaggagattctgtcttcggaatcgacccagctctttaaaagaatgaggaaaacatggggtctttatatatcctggaaagtcgcctaggcgttcagtgaaaaacgcaaaaggcac

SEQ ID NO: 35977 - DNA, 1554 bp, Homo sapiens; identical to SEQ ID NO: 25836
  chr7:129424378-129425932
  hyper

SEQ ID NO: 35978 - DNA, 141 bp, Homo sapiens; identical to SEQ ID NO: 17995
  chr7:133630779-133630920
  hypo

SEQ ID NO: 35979 - DNA, 1138 bp, Homo sapiens; identical to SEQ ID NO: 25842
  chr7:134142980-134144118
  binary

SEQ ID NO: 35980 - DNA, 854 bp, Homo sapiens; identical to SEQ ID NO: 30527
  chr7:139929854-139930708
  binary

SEQ ID NO: 35981 - DNA, 617 bp, Homo sapiens
  chr7:141211339-141211956
  hyper
cgacctgttctgctcatgatctgtctgctactagccagccggctggaaaatgtggccaagaaaaccgcagagaccaatgttcggaggagaaaaccagaaagaggggcctgcctggcccctttgatcctttatggccgattccgtggacattgctgctcctcacgccggcagccctctcttgagtacctcaattgcagtctccagaccctccaccccgccaggcattcctgggtcggtgtcccagtcggtcacagtcatcggatcctcctgcagagcagtagaaagtccgggaggggcccgtgcccatggctccaggaaaggagcggccaggtacctgccaggggagaccaggcacttccaggtgcgaccaggtacctcccaggtgcggccaggcgccgcctcatctctcggtgggcgagtgtatttattccaaacccagactgagaggtgacagcttcaagtctgctcgggaaggaaacacctcgcaggccaagcacaaaggggcttactcgtttcttttctgcagcggcagctttccccctccctcctgtttctccgctttccctcctttccctccaccattcctcgcccactcctgcccttcccgggtgggacac

SEQ ID NO: 35982 - DNA, 999 bp, Homo sapiens; identical to SEQ ID NO: 17999
  chr7:142985430-142986429
  binary

SEQ ID NO: 35983 - DNA, 202 bp, Homo sapiens; identical to SEQ ID NO: 24592
  chr7:148851195-148851397
  hypo

SEQ ID NO: 35984 - DNA, 351 bp, Homo sapiens; identical to SEQ ID NO: 8682
  chr7:150676178-150676529
  binary

SEQ ID NO: 35985 - DNA, 149 bp, Homo sapiens; identical to SEQ ID NO: 18002
  chr7:152152776-152152925
  hypo

SEQ ID NO: 35986 - DNA, 1464 bp, Homo sapiens
  chr7:155601495-155602959
  hyper
cgcctgagctcccgcctacctccctgatctgcgagccgcgccggcgagtgtcaccgccagcagccggtgggcttcccccagcgcgggggcgggggcgtcccagcttcaagacagccccagcccctaaacgcacctctctccactgtcctttcccccaagcttggtggaacagcccctccccaaccccatacctgagcgtctttcctggcggccccagagcgcacattaaatctatttagtgtagcggctcgggaccccactccaggcttcagatccggccctctggcctcctgccccttaggagccccctggccgccagcaccctcgcctggcacctaggcccgcgcggggagagcgtgtctgtctgcgctttcctctcccgggttaatattaaccggcagctcctgcgttccggaactgctccgaaagttccactggggacgatctcgccatggttgagggacttgggcggcagtcacattagagacccagagacagggagggagacagaagaagagggtcacgcacctggggcagagcctaggtggttatttaaaatgagggcggccgagcaggctccccaaacctcccgccggcctggggctcccctgccgcctcctgcaccccgcccctgccctcagcacccgagcctccgccttccccatcccttcctcccccacccttaactcctggaatcgggagaaggaaggtaggggagggatcaaccggggatacctcacagactgccagcccctacccccctcggttttaggggacctttgtggggtctgcctgataatcccggcctggctctcctcacccaacccccacttgggccgtccttccccctccttttgtgttgggaacgggaatagccactgcccaaggaaaaaagtatttgttttcgtttcgttcgtctgagggaagttgacagaaggtcagaagttcaaatgctgcctgtgcgcgcggcggcgagagtggccgggcgcggggccgctgggccctgcgtcccccggcagggcggacgggggtcggggggaggcccccgggctgggggctccggctgggacgcggaggcctagaggccaggcaggcggcggactggggatgggggcgcgtcccagggcaggccggcggagcccgcgatgcgccccggcccctgcgcgggcgcccccatctccgcgcccccgccgccggggacactacagcgagcccggcgctgctgttagctcctgcggtgcctgcgctcccgcgcgtggagcagcagagcccggcggctccagcccagcccctcgcgcactgaaaccctagccgcgggggatcgataacccgggagtaagtggggctgcaggcgtctgcctcgctgcgcggctctgtgcgcttgcagctttgcagcagggctgcaaggcccaagccctgggaaggtgtgcgagcccaggaccccttctgcggtattggcctccc

SEQ ID NO: 35987 - DNA, 103 bp, Homo sapiens; identical to SEQ ID NO: 18005
  chr7:156435920-156436023
  hypo

SEQ ID NO: 35988 - DNA, 131 bp, Homo sapiens; identical to SEQ ID NO: 18006
  chr7:156974878-156975009
  hypo

SEQ ID NO: 35989 - DNA, 458 bp, Homo sapiens; identical to SEQ ID NO: 18007
  chr7:157052694-157053152
  hypo

SEQ ID NO: 35990 - DNA, 177 bp, Homo sapiens; identical to SEQ ID NO: 18008
  chr7:158451052-158451229
  hypo

SEQ ID NO: 35991 - DNA, 505 bp, Homo sapiens
  chr7:17339346-17339851
  hyper
cggtcttaattctcattcttcgtagagtttggtaaggcgagatgttttaaagagctaaacacatgctgacttttacgaaggggctgagtgcctctaaaggtactttttggtccccaccaactggctttgtgttgcgctcatatttacttatttggcagcaattttgtagcgctcatcgtgaccatatcggtaaagtggatagaagtggtagcaggtgggagtggatgcaacggacaggatacggtggaggatttgtattcttcagacatctttttcggaagcttgcttatcacttttggggtggctttagggtctgtaaaataaaagatttagaactgcatttgagagaggttttcattcttaacatctacctctaattcttttccccttcaaagttttcttctagttgagtgagtacaaacttgcttttgtcgttgtcggttgattttggtggaatatttgtgtgagatggccaattttttgtgtgtgtcagaaaaaactatcc

SEQ ID NO: 35992 - DNA, 147 bp, Homo sapiens; identical to SEQ ID NO: 16076
  chr7:2068947-2069094
  hypo

SEQ ID NO: 35993 - DNA, 382 bp, Homo sapiens; identical to SEQ ID NO: 18012
  chr7:2113550-2113932
  hypo

SEQ ID NO: 35994 - DNA, 592 bp, Homo sapiens; identical to SEQ ID NO: 25860
  chr7:2232864-2233456
  hypo

SEQ ID NO: 35995 - DNA, 1371 bp, Homo sapiens
  chr7:23508462-23509833
  binary
cgcggcccaccctctcaccgccctggacacgctccacagggcagactcggggcagggggctcccctggctttcttcaggagggggcgccctggccctgccctctgcttcagcccagacccgccgggaacactcagcggtgggcttgaggaagacagggagtggcgagaaagggtcggggacggcaggggagaccacgaacgggagaactggcagaggcgcagctcggcacaggctgaaccaggcgcgaaggacggcgaggcgcccgcaccacgtctgaattgattaaaagggaagccgaaaggcacggggctcccatggggaccccaacgcagccttccccctgggcgtcctgctccgcccggcaccgtccctcgccctggcggagccatacccggaggccgcagccccgcgccagggcccggagagcggcgggcggccggtgcgtggcggcgactcccttccaggcgaccagccgcccccgcccacctgcccctatcgctcgtcggaccaggggaggtggaacggggaaaccgggcacacactctctcctcccacagggtggggaggaagcgcggggccgcctgtgcgaggcaccagcctcgcggtctcactcggcagcacggtcgaggccactttccgttctccacggccgggggtttcggggcgcagcacagacagcgccgtaaataacgaccgaggaaagcaggaaggaacgaggcacaggcgggcattctagctcggcccccgaggcccagcgtgccggggcctggagcacgcgcctgggcccgggcggggcgccgggggagcgcgcctcccccagccccgcgccccccttagccagcgccggggctttcttgacagcgcgttcgccctcacccagcaaaccccggccggggaagcagagccgcgggccggagtgggagccggagctgaggagagccccggcccccacgcgcgtgggtgtgggcgctcaggcctcacccccgctcccccagcgcgccgggcctggggcccgcggagccacccggtgggcctgggcgggcggtgcagggctggggcgagagcccgggtggggccaggcccgggcccacctgaaagcgcctcgatggccttgagggcccagctctcgtccgggcagtccacgaacgcgtagccagtcttcaccaggaagggtcccgacaccgggatcttggcgtccttgaagatactttctaggtccgagggggcggcgttctcgctgaggtttccgatatacagtttgttcattgtgaagagtggttgtttaaaaaaaaataacgagaaaaaacgaaaaattaaaaccacccacggtgatggatggatccagctggttttgttcccctcgtcttctc

SEQ ID NO: 35996 - DNA, 929 bp, Homo sapiens; identical to SEQ ID NO: 24621
  chr7:23510081-23511010
  binary

SEQ ID NO: 35997 - DNA, 1542 bp, Homo sapiens; identical to SEQ ID NO: 25865
  chr7:23513246-23514788
  binary

SEQ ID NO: 35998 - DNA, 487 bp, Homo sapiens
  chr7:2558412-2558899
  hyper
cgcttccggaggacgtggcgggcagggggctcacaccctgctcaggcgacccttggccacttccgggcccctcgcccctcaccctcggctgccggcgcgcattcctgccgcccccgctcgtgcgaggggcgggcccgggcccgtgggaagggccggggatgggggccgtgtgccggggaggcggggtggggagggcgcacagctgggccgcatctggcccgagcgcaaggagaccaaatgggacagaaggcggcctttcatccggcgagggaagtggcggccttcgtttctcctcgccatggggcgcctgaggatttcggggagccaaccctcccgacggagggccaggatcgaggaaatcagccagggaggaaggagtggaatttggttctggtgctttctcgttagaacctcgtgtccccacctgcggcacaggtggccaagctcttgctctgtacaaataacggctcccctgaaccgagcgctc

SEQ ID NO: 35999 - DNA, 444 bp, Homo sapiens; identical to SEQ ID NO: 25871
  chr7:26192423-26192867
  hyper

SEQ ID NO: 36000 - DNA, 928 bp, Homo sapiens
  chr7:27195932-27196860
  hyper
cgtaggcgtcggcgcccaggccgtagccggacgcaaaggggctctgataaagggggctgttgacattgtataagcccggaacggtcgaggcgaaggcgccggcgcccgccccgtagccgcttctctgtgagttgggagcaaaggagcaagaagtcggctcggcattttggaacagagaagcccccgccgtatatttgctaaaaagcgcgttcacataatacgaagaactcataattttgacctgtgatttgttgtccggcagctttcagtgtcggttttacgaggtagagtgatatatgataacattacacccccagatttacaccaaaccccattttcttttggacggagctcgccgcagcacgtgaccgcccacatgaccgcctccgccaatctcagcagtcctcacaggtggtctcgctccgcagggcccgcagccgcctagaatggaagggcaagaggctcaaatatgcggccaaagaatccgcccgcgcccggcgggcctggcgcgtcccgcggaaaaagacctggaggctccgcgggagcgcccagctggcggccaacctccgcactggggtctgcggacgccaggcggcccggccccacgcagcaccccccaccccgcccccccgccgactcctgctagtgagccctggaccaagcttgggatcctccccatccctctcctgtccgcctgcccagaccctggaagggtctctgtcccccgcaacagcctgccccgcggtggccttgtgggcaggactcagctatgagcagatcgactctgcccaagtcttctctcacccaggtccagtgggcgacaggccggacttagactcggatccagacggggaaggcgcagcatctcttgcagctgcagagagattgccaccgcaaactggagccatgtggttcgaataaagtcaac

SEQ ID NO: 36001 - DNA, 894 bp, Homo sapiens
  chr7:27282781-27283675
  hyper
cgtggttgcctgagccctcgggccgtccctccggccacccgggagcgcggcgggggaggcccggaggaggagccggtagatggactcgcaggcagcgcggcggggccgggcgccgagccccaggtagctggggcggccatgctcggcccaggacccccggccccctcagtcgacagcctctccggacaggggcaacccagtagctcggacaccgagtcggatttctatgaagaaatcgaggtgagctgcaccccggactgcgccaccgggaacgccgagtaccagcacagcaaaggtagccaccgtgcccctccgctccccgggcctcccactgcgcccacccttcacttcggcgcaggccaggaggaagacactcccttcccctagggcaggatggctggggggacccacctgagcaactctctctgctatctgcgttctggcgggggtctcctactgtgttctggcattggcgggactgagggtgacagcagtgccttgagtgcggggtgctgagggggcggatgcaagtcctggacttgggggattcgaagctcaccccaagcacccagtgtttcaactgctcggggaatgcttcaattgctcggggaagacactttccccaggcgagggcaagatcaaacgccgatccgggcagtttgtggctggcagggtgtaagaggcatggaggcgcggaagccaggagtccataaaggaccgtaaaattgcggcccacttgggcagcccgggtgctgcagccctccgaccagtttgcacgtcggtcagaggtccaaattaccttgtcacttcccgggcttcgcggcgccaggtcggaaatggtcccaatggtctaattgcctttggtctccggttgcatttgaaaaggcagagatc

SEQ ID NO: 36002 - DNA, 126 bp, Homo sapiens; identical to SEQ ID NO: 7538
  chr7:27831654-27831780
  hypo

SEQ ID NO: 36003 - DNA, 580 bp, Homo sapiens
  chr7:29185654-29186234
  binary
cgcgttgagggagtaagggaaagtgtcctgcacccgccaccctcccgcgctaagagcggcagaggaccccacagcttcgtacttccccggaggagctcctggagtaggagacggcttctagcctggaagaaccccgggtgcgacagttgtgccaggaaacttcaagagtattccctcggctgggcgcacgcagtacatccccaatgctccaatttgaactttgactcggccacgaccaccccactccagtctcactctacggtgctttctcccctgttggtgctgagggcttttgagactacctgccccgcgctccctaagtccgagggaccgaggcgaggacctgtcccgctgagctggcacgacccacgcagggcaggcggcacttacgcggcgcagtcggtgctcctccctgagccgcggcgcgcaaggaccccagccggttgtccttgcagcgcttcccaaatcaggcagaagtgaggcagccccacccagtcacgaggaccctgcagaactcgagcctttaagcgctcctctaggctcacatgacccagacccacagggcaaaaagtgcgtcgtc

SEQ ID NO: 36004 - DNA, 1183 bp, Homo sapiens
  chr7:32981774-32982957
  binary
cgggagcgcaaggcctcccaagtcagggcccgaattccgcgtggtgccaaacggcagctggctccctgaatgcccaccctgaaccctggtaaaaaataaaaaaaacaacaacaaaattccctccaacccggagaaaacaagtccgcctctgttctacctagcagcgccgtggccagtccccgccgcccattctctcttcttccgggcctcgccacaccaacactgcaggacccgtgtcctcgtcccttctccgtagcagaggatgaaaagaacggggtttctccatgtcgcagtggcccagggaactcagaggtggagcgcgggggcagcgtgctcggttgaacttgcctgttcggtccacaaatgccgagcaagcgccaataactcttggcttccccaaaagaggcgacgcccacaccaaagcgggggcgaggagcgcaagccgctgccgcctccccgggccgaggcccccgcccacccgcgccgcggcctccagggcccctccgtggccgggcgggcctcgctccccacccagtgaggactagaagtcccgtcgcaggcactaggttcctcacaggcccgcacccctgcctgggtcctgggggcttggaggacccagcccagcgcccaacacggcgccgggcgcccctgttcccagaaaacgggcggcgcgcggactgcggcccagacggctgctcgagactcacaaggactccaggcgcttgagctgctgcagctgctgggcgtcgtgccgccgccgcttctgctcccgggcccgctgcagttcctgatccagcggctcccgcggccaccacgcgcccccagccctcgcatcctcgcgccccggccaggacgacatcgcggcacctgcggcgcggctctggctgcggccaagagggcacttcctccgtgcggcgccccttcccgccgccgccccgcgactcgcccgggaggggccccgaagtcccggcctcggccgccagatgcccgcctgcccgcggccggccccaagtcagtgcgcagagccccagagcccagccgccggtgggcggggagcgcccgctggcggcggctggagccgaggcggggcggggccctggttgggagcctggggaagcttccaggagcttcagggttcccgccaggccacactcatctccctgcccctttgaggttcccgacc

SEQ ID NO: 36005 - DNA, 112 bp, Homo sapiens; identical to SEQ ID NO: 18025
  chr7:44611096-44611208
  hypo

SEQ ID NO: 36006 - DNA, 79 bp, Homo sapiens; identical to SEQ ID NO: 25888
  chr7:45046889-45046968
  hypo

SEQ ID NO: 36007 - DNA, 1629 bp, Homo sapiens; identical to SEQ ID NO: 24645
  chr7:50343211-50344840
  binary

SEQ ID NO: 36008 - DNA, 55 bp, Homo sapiens; identical to SEQ ID NO: 18027
  chr7:5240151-5240206
  hypo

SEQ ID NO: 36009 - DNA, 145 bp, Homo sapiens; identical to SEQ ID NO: 18028
  chr7:6058662-6058807
  hypo

SEQ ID NO: 36010 - DNA, 320 bp, Homo sapiens; identical to SEQ ID NO: 32216
  chr7:6060523-6060843
  hypo

SEQ ID NO: 36011 - DNA, 126 bp, Homo sapiens
  chr7:6068161-6068287
  hypo
cgtgagccactgcacccaaccctgtattgttatttaagactgcagaataagttgaatgaaagggcagaaagcaacaaatactaccttggcatcatactcagatccttccaactgttcgggtgaagc

SEQ ID NO: 36012 - DNA, 209 bp, Homo sapiens; identical to SEQ ID NO: 24647
  chr7:6442423-6442632
  hypo

SEQ ID NO: 36013 - DNA, 167 bp, Homo sapiens; identical to SEQ ID NO: 23643
  chr7:6443294-6443461
  hypo

SEQ ID NO: 36014 - DNA, 76 bp, Homo sapiens; identical to SEQ ID NO: 18032
  chr7:7612745-7612821
  hypo

SEQ ID NO: 36015 - DNA, 157 bp, Homo sapiens; identical to SEQ ID NO: 18033
  chr7:7613138-7613295
  hypo

SEQ ID NO: 36016 - DNA, 90 bp, Homo sapiens; identical to SEQ ID NO: 18034
  chr7:778947-779037
  hypo

SEQ ID NO: 36017 - DNA, 223 bp, Homo sapiens; identical to SEQ ID NO: 25904
  chr7:920933-921156
  hypo

SEQ ID NO: 36018 - DNA, 417 bp, Homo sapiens
  chr7:97925156-97925573
  hypo
cgcagcaagaagcaccgactcctgccaggaggactgaggaggaaaaagaacgcttaagatgacagctggaagccactcagtgttgggccaaccccgtgcacgcatgcctggggcccaacaatcctgctccctgtaggaacaagcagggcacacacccatgggcaccgagacactcgggcagccctggagaaacagcccagaccagaaacaccagacgcccgtcaatgggagagtcagaaccagcttctgtgcagacagcaggtcaccacacagcactgagcgactgtccctacggggccaccccagacagccatctctgtgccagggcttggggagtctggtgttggagaagggatggtcacggaggtgggccatgctgggtgatcgtgggggccgggaacgtcctgctgggtatac

SEQ ID NO: 36019 - DNA, 682 bp, Homo sapiens
  chr7:98971524-98972206
  binary
cgcgaccggccgaggtaaggttttcactggggtctcttccatctgcctggccgccaggccacgtatccactgaagaggcagagggtcaggatgggaagactccggggaccacctagcccaagacccgcaatcaggcggctctgcaaggctaaccgggtaacttaaagaagtgaagccgattgacgtaaaacagaaaggaaagaagttaactggccggccagcgtcagcaggggcggccagtgtcaccctgcccggggacagcacccctgtttcgtggcgaggacacggagggccaagggggcggggccgggctgccctggccacgcccggaccgcctgctccccgcccagggcctgcacagttggcgcccaccggcatcagcgtgaagggagctcctcgctggctgccgacggggctgcagggctcgctagccgctcacctgcgtgtgagcgcggagcccgcagtacccgccgtccgggctcagaggacgtgactccccgaccctgcgcccggcagtccccgggggccgtgcgcccggcccaggctcggaggtccagcccagcggcggctcaggctgcgcgcctggctcccagcctcagtttccccattggtaaagcattgacggtggttgcggacggcttctgcggacagagccttgggctccgacgtctgcgcgggtacc

SEQ ID NO: 36020 - DNA, 287 bp, Homo sapiens; identical to SEQ ID NO: 32238
  chr7:98991481-98991768
  hypo

SEQ ID NO: 36021 - DNA, 1387 bp, Homo sapiens; identical to SEQ ID NO: 25905
  chr7:99155672-99157059
  binary

SEQ ID NO: 36022 - DNA, 96 bp, Homo sapiens; identical to SEQ ID NO: 28210
  chr8:101717065-101717161
  hypo

SEQ ID NO: 36023 - DNA, 1947 bp, Homo sapiens
  chr8:107281820-107283767
  hyper
cgctccaagctgccttgggtccctttctaggctgtcagacttcgccttcctttcctccttgtttttcccagcaaccaaagcatctgaagaacatttttttcctccgtaaatctgaacaaatttccttgcagctttccttgcagaagcttttttatcgctttaacaaaactttcctctgcttctctagggagagcctagtattagagctgcccgacaggcgggaccccgaaatcggggcagctctggcttagtccaggctattcgagtgggcgcctgaactggaggcgccgtctccaccgggatggggatcctagtgcaggcagacgcctggcaggactcggcgagctggggtccccaccgcggtagccagagcagaaacccgaaccccagccagaggggccgcgcgcggggaggggtgcgcgctaagccagcgtggcttccgcaggagctatttttagcggtgcgtgcctccccccgcccccggcgtggtagcctccggctcgcggcgccccacggctcctctcagtctcccccgccgctgccggctcttggtagcttccacgcgggcaggtccggaaactgagcatgtctgcaagcgctcagcggcgccggcagcagcggggctagagctgggctgcgtcaggctgagcccattcacctcgcggccacaggagctcagcgccggcgccgcgccgcccagccccgccgagaggggcgcactcgccgccgcggggcccgccgccgctcaccgcagccccctcctggcgacccgcaagtaagtttgtgaggctgctgggcgttagggcgagggcttggcgcccgggggagtccaggagggatagcgagaggcgcggctggcgcccgggagagccggctggcctctgccccctgtgcctggcgcctctccgagccacttagccaatttgaaagcgggtggccattgggatgctcgagcggggacgacgggcagagcaggagggcagaactagctccagcgggggcccagagggcggacttgggaagaaggaaagaccgcgcggcgagggaggagaccgggcggcgagggaggagaccgggcggggaggctgggtttggggcgcgggagcccggccagggacagccgcagaaggaaagtgggggtgtcgccgggggatagagtgggagcagcgtgagagcagtgttgggggcgcagagtggagggcaagcgtgtcttgaacagaacggcaggaggatgggtggaaagtggggcgcgtggaaagcggatttggacgagagcaaaggacgccggtggaagggacagtgggctccggaggggcgagtggattcggataatttggggaatcagtaaaaggctagggggcacatcatgatggagtcagcctggaatctgtctcccgctagagtacccgaggccacatgttgggaactggctggggaaaggatggatgtagaaagtggcctggagggccgactggaaaatcgctgagggatttgggtgaagagggggggagctgtgcagtatcgggcggaggaactgggctgctggtagggcctgaaaggttcaggagagggttggaggcttccccgtgccgccccttgaatagtgatttagtactgttatctgaggttcactttcacccctggctcctcctccgtctactacccggcttggacgcacctcggctcgctgtaggcgagctttaggagatttaaatagacattaggcagtggggaaggtagtcgtttacggggggagctgctcgggcttccgttcagtggttcccggcacgctcagggtgcagtgtagggtctgaatgtgtgtattgcgggggtagggggagtggtgtcagttctaggccacaggaattcgtggtctggccccagaggtgcggtgtttttggccgggaagtcaggcagaagtctgcagcgtgcaactcgcagcggggc

SEQ ID NO: 36024 - DNA, 221 bp, Homo sapiens; identical to SEQ ID NO: 7561
  chr8:118531602-118531823
  hypo

SEQ ID NO: 36025 - DNA, 90 bp, Homo sapiens; identical to SEQ ID NO: 18046
  chr8:119057056-119057146
  hypo

SEQ ID NO: 36026 - DNA, 62 bp, Homo sapiens; identical to SEQ ID NO: 18047
  chr8:125498221-125498283
  hypo

SEQ ID NO: 36027 - DNA, 49 bp, Homo sapiens; identical to SEQ ID NO: 18048
  chr8:125498538-125498587
  hypo

SEQ ID NO: 36028 - DNA, 200 bp, Homo sapiens; identical to SEQ ID NO: 18049
  chr8:126061282-126061482
  hypo

SEQ ID NO: 36029 - DNA, 844 bp, Homo sapiens
  chr8:131455079-131455923
  binary
cgctctcagaaaacgcagcaggtcccaaaatggtacaagcagaaaacacaagccacttcacggtccgcccaggagccaaccccaagctccaagtaggactccccccacccccttccctttcgtttctcttcttttgctttaggcaagtggcctggggcctgccaagcagcgccgggtccgggtaggggccgggggccgcggggaactttcctcggctgcaccagagacaatgccgggagggcgccccatcggcggggtccgggccgccaagcacgtcgtcccgggccctcccccggagggggacgcgaaaccccccagggcgggccccgtccccggccccactgcaggggccccctctcccgagctggaggcgaggagacctcccccccccaccgggcggcctcgcccggccccgcagagcctggccgcgcgtcccgcacacgccccagcccagggccggcgccctccccgcggagaaggacaccccgctgcgagaggagccgggagcccgccccgcgccccgtcccggcgcccttcttcgcgcgagagactgggcagggggcgcccgcgactgtgggcgactccgcccggccccgccgagcgcgcccgagcgccccgcaactcaccgggacctggcgggccgctgggcattattccatcgcgggttcggccgggcgctcgcggctctcgggtgggaaagcgaactgcgaccgggaagcgccggctgggcgggaggcgcgggcccggggctgcccagcgcacagtgctcgcccgcggcagcggccaggccaggcgaggcgcgggagccgagcgcggcgcaggaaggggcgggcgaccatgtgcc

SEQ ID NO: 36030 - DNA, 123 bp, Homo sapiens; identical to SEQ ID NO: 18051
  chr8:134268431-134268554
  hypo

SEQ ID NO: 36031 - DNA, 66 bp, Homo sapiens; identical to SEQ ID NO: 18052
  chr8:135805728-135805794
  hypo

SEQ ID NO: 36032 - DNA, 231 bp, Homo sapiens; identical to SEQ ID NO: 18053
  chr8:144575951-144576182
  hypo

SEQ ID NO: 36033 - DNA, 394 bp, Homo sapiens; identical to SEQ ID NO: 18054
  chr8:144640377-144640771
  binary

SEQ ID NO: 36034 - DNA, 349 bp, Homo sapiens; identical to SEQ ID NO: 24675
  chr8:144668627-144668976
  hypo

SEQ ID NO: 36035 - DNA, 106 bp, Homo sapiens; identical to SEQ ID NO: 25929
  chr8:21842185-21842291
  hypo

SEQ ID NO: 36036 - DNA, 794 bp, Homo sapiens; identical to SEQ ID NO: 25930
  chr8:23020923-23021717
  binary

SEQ ID NO: 36037 - DNA, 334 bp, Homo sapiens; identical to SEQ ID NO: 23651
  chr8:23423722-23424056
  hypo

SEQ ID NO: 36038 - DNA, 1161 bp, Homo sapiens; identical to SEQ ID NO: 33122
  chr8:38323132-38324293
  hyper

SEQ ID NO: 36039 - DNA, 166 bp, Homo sapiens; identical to SEQ ID NO: 18057
  chr8:48801168-48801334
  hypo

SEQ ID NO: 36040 - DNA, 494 bp, Homo sapiens; identical to SEQ ID NO: 24686
  chr8:49468683-49469177
  binary

SEQ ID NO: 36041 - DNA, 1319 bp, Homo sapiens; identical to SEQ ID NO: 33127
  chr8:60030067-60031386
  binary

SEQ ID NO: 36042 - DNA, 768 bp, Homo sapiens; identical to SEQ ID NO: 30662
  chr8:61822259-61823027
  binary

SEQ ID NO: 36043 - DNA, 95 bp, Homo sapiens; identical to SEQ ID NO: 8772
  chr8:6633002-6633097
  hypo

SEQ ID NO: 36044 - DNA, 812 bp, Homo sapiens
  chr8:72756192-72757004
  binary
cgcttcctcttgcagccttccgcgctgccggctgtgcccagagcgcagcgctcctcctcgccgtcggggtcctcctcctctgccgacgagttgtcactgggcgaggcgtagctgcgctctacgccgcggaggggcggcctcttggaggcggggaccgggtactcccgctgcagcccccgaagctccatctcctccggatcactcaccgagcccgtggacatcccgttgtcccccttgcccacacgcgtcctctttcctcccccctggccagtctcgctgtctccgccttccgctccctggcggaggcggaggccagagagcgctccaaggaagactaaaaacccaggccgggaagcgcggggtgagaaagcgaggtgggtggcgagagcgtgagcgcccctctgctgaccccggggagcgtggactacgagttggcgcccaagtccagaatccgcgcgcaccgcggtaagctgcgccttttgaaaaggctatctgtactccttggaacaaaccaccccgggcaaagaagagggggttgtaaagggggccaagaggtggggcaggggcgtggaaggggtggggaccgcttttctgcatgccgaagagcggttggtggaggcgggggaaggggacgtctctgcagagccgagatttgggctctgaagcccgacggcccttcaacatgtctgcgcaggataagtgagctttcggggagtgaaggggcacatcttgttcctaccgacggtgcttctacccccaggtaatcttagcagtggcaaagattaccagacacttagaaacgacgggattcc

SEQ ID NO: 36045 - DNA, 992 bp, Homo sapiens
  chr8:73448692-73449684
  binary
cggacccggctttaccctcaaacccaggaaagccgggtcacttggggctagggacggcccccgagcgagcggggctgcaggtgccgcgaggaaagtcagatcttatctgcgctcctagttatctccgcagctctttctccaggaaaataatcctggcaccaccactcaggagccatctgtcttcgccccagttccccggggtcgagcagtcagcccagggtcagggtcctgctgtgggcgggcgggaggacagccctgcagttggaagcagaagggccgagggaatcccgcgaagccgccggagcgcgtcgcggcggggcctcccggggctttcccggccccgggtgcgcggcagccgcgggggctgcgtccctctagtccagtgcagccgggtgggagctgcagagcgaagcaggtgggtgtggagccaggcccggggcagcaggagtggctggcgcgcggaagctgagggaggcaccccgccgaggtgtgggcggtgcctgcccgcgccccagccgcgccctgggcaccagagcgctgtccccggccgagcgcacagctccggcgccgcgaggcagagccccggcgtccccggcggtgcgctgccggctcgcgcagcccagccatcccgccccgccgcccaccttgacagccgggagcgctgaggaggaagagggggagggggaggaggaagagaaggcggcggccgctccagcccgcgggtgcgcggagcgcgggaggaggcggagcgggaggctggggtggccgcagccctgtgtgcgcgccgggccggctagctgcggggcgggggagcggcgccccagagcgccccgcctagcctcccgcgcgcagcctctaccctgctccgccacagacacacacccaccaagcacccaccgccctccgccctccgccctccgcccccgcggccgccgccgccgctgcgcctcgggcagccccagcgagcggcaactcccgggctggcgcggctc

SEQ ID NO: 36046 - DNA, 812 bp, Homo sapiens; identical to SEQ ID NO: 28242
  chr8:80803343-80804155
  binary

SEQ ID NO: 36047 - DNA, 140 bp, Homo sapiens; identical to SEQ ID NO: 8779
  chr8:91014317-91014457
  hyper

SEQ ID NO: 36048 - DNA, 772 bp, Homo sapiens
  chr8:91996920-91997692
  binary
cgtagctttgactaaaacaccagcaatgaaaaccttgtgccaccgggtggagggggcaaatcgtcttgaaagcctcccaccgcctggcaccaggtgctggggcagagccaaggggagctgtgtacttagctccttttttggcgatggctttggtctcggccacttgcccctccgtcgggctcccctggccccctacactttctttcccctcatccgacgctctcgctcccatcccactcccattcagggtccacagggtactgaaggggccctgagagatttcccgacccacctcagagcttctcttcctcgcctcaactttcccggggtcgggcctgggagacggcgcccacccgcctcctccacaccacggggcccgacttccgtcccccagtgtcgctcatcctccctagccacttaccgactcaaaatccacggggatttcggggcagcagcgtcgccgcgctcagcccacacgcggaggccgagcgccctgctgcccgtcggggaacggctcctgccgctggtccgctggctgaccgcggtggcggcggcggggggcgaggggcggggggcgaggggcggggggcggggcgggaggcggctccgaggggcacgaggcgggcccagggcgggcgcggggcgtggcctcgggcgctgagcctcgagagcagccgcacccctgccggggtagaaccgttaaaagggtggcgcgcgctttcccgggcgagctgggcgcgtggggttggagcggcgccacccagagccggtc

SEQ ID NO: 36049 - DNA, 71 bp, Homo sapiens; identical to SEQ ID NO: 10824
  chr8:92120822-92120893
  hypo

SEQ ID NO: 36050 - DNA, 1049 bp, Homo sapiens
  chr8:94712366-94713415
  binary
cggacgcgtctggtacgagactacaagtcgcacaggcggagagggggcccccgggcctctggtttcacgtctccctcctggtccccggcggaccggcgtcttttctcccctgctcggagtagcctagcagcgctggaggctggctgtctggtaagcgcggctgttagagaggatggaggcgccgtagccccgcggtgcttctcacagccttcgccggcagggacgcgcgggacaaccgcgcaggcggctctgcaggggtgggcgcgccatcacccctctcggtccctgcctgcttggcgctttccgagccccagccgcgctcaggctgcctcgggcattgaccgcgggggcgcgcgccccgtttccatagaaacgcccggcctgccgcggcggcgcgaggggcgggctttcaggctcccggcggctgcttgcgccccagcgcgcgcccaggcgccttggaatccccgtccttgggcccccgcaaggtccccggccgtgcgcgaggcagcatgatgaggcgcaccctggaaaaccggtaacagcccgagcccagctgcccagggccgcccacactggagggctggggtgagggaagtggaagcctctgtccatggggcctctgcgccgaattccgaccctgagtgggaggctgcacggtccccgctgtgacctggggcctaattccttgggctgcagccaccgccggcggcgaagaggagcccggggcccggccggctgccacccacccacgccaccgggtctcgggtccccacactgccgcgggcagtgcggaagcctaggaggcagccgggcgcccaggccgcgctgcgcggagcagccggagcagccacctccccagttaaggccaggcccacccggcctgggccttttcctgtgcctacacagtccggatagtgaggtcaggaccccatggagagcagtccgcgccgggagacgctgggtcgttgatgggtttacgccttcaaagctgcagaatgcccggggaatgtttgcatgttaaattaacgtgaagccttctcatctctaac

SEQ ID NO: 36051 - DNA, 60 bp, Homo sapiens; identical to SEQ ID NO: 18074
  chr8:94747749-94747809
  hypo

SEQ ID NO: 36052 - DNA, 85 bp, Homo sapiens
  chr8:95816370-95816455
  hypo
cgttttcatttatagccactgttagtaatgaggaaagacagcagaaaagaaagctcagtcaaaaaattaaatgcgggccgggcgc

SEQ ID NO: 36053 - DNA, 335 bp, Homo sapiens
  chr8:97657762-97658097
  binary
cgctcattcgggggcgtgacgggaggacctggctggggagcggcgggttgggagcctgtggctgccccttcggtgacagtggagtcaccgagcctagaaatggggaagctgtgacgtgggggtggtggagggtgctgcgggacagcagcgagcacggccctcagccgtccttcccaacacggtttcacttcccctcagctccagggctcagccccaagccgcccccttcatcccccatctgcaaacaatcctggtccccctgagcctccaatatgccttatgcagttcttttggggttcctttcgcattttaccgtgtactttcgcttttgatgc

SEQ ID NO: 36054 - DNA, 1384 bp, Homo sapiens; identical to SEQ ID NO: 25959
  chr8:99951812-99953196
  hyper

SEQ ID NO: 36055 - DNA, 753 bp, Homo sapiens
  chr8:99954541-99955294
  binary
cggcctaggcgcggccgggccacgcggcatcccccaaagctggagctcgccgactcttccctaccttttcaagagaccgtagtcgtgcccagaacgccggcgtggcccagactccattttggaacttcgcaggctggcgtggacgaagtaaacacatttatggaaaaaccccggggttaggaggtttgcggaaagagggagcagctcgtggggttggaaattctgcctacccctcgggaaaaccaaacggttctgcacccaacgtacacatacttaagggcgggaaaggtgtgaagcccgctgctggggagttgcctcccctttgatgaaaaggaagtgcgaagcgtaggaacgctcttcaggtcaccaccccgtgagtgggaggcttggggagtctgaaggaagagaaagctccctccaaatctcccaaactgagaaaagctgcaggaggaatgaggcagttggagagagaggaccgcaggcatcccgcagctgaggctcaggactgagctctaaaatgaaagcacccctatgggacccaccaggcaaaacgttaaaaaaaaaaaaaatctgaatgcttaggcattctgctgcttccattctgtgtgtcaaatctactttgaagcagttaagtactgcaggatattaaacactcgaatctccgtttcaagctcactttttaatctttgcgaacttaaaattggaaagacagaaaaaaaatctgcgacccctgttatgttttaccaaaggaac

SEQ ID NO: 36056 - DNA, 991 bp, Homo sapiens
  chr8:99960385-99961376
  hyper
cgtcaccgctgatagatggggctgagggcagaggaaggaaaaagaaaacctccgaggtcagtgcggggcgaggtgagcccctcccagggccctctggcccaggaggatgaagcgcgccggcttcgctcttgcacgccggcttgccatccgggtaagcgcgggaaaggcggccacagggcgcggcggcagcgcagcgcgtgggatctcacgacccatccgttaacccaccgttcccaggagctccgaggcgcagcggcgacagaggttcgccccggcctgctagcattggcattgcggttgactgagcttcgcctaacaggcttggggagggtgggctgggctgggctgggctgggctgggtgctgcccggctgtccgcctttcgttttcctgggaccgaggagtcttccgctccgtatctgcctagagtctgaatccgactttctttcctttgggcacgcgctcgccagtggagcacttcttgttctggccccgggctgatctgcacgcggacttgagcaggtgccaaggtgccacgcagtcccctcacggctttcggggggtcttggagtcgggtggggagggagacttaggtgtggtaacctgcgcaggtgccaaagggcagaaggagcagccttggattatagtcacggtctctccctctcttccctgccatttttagggctttctctacgtgctgttgtctcactgggtttttgtcggagccccacgccctccggcctctgattcctggaagaaagggttggtcccctcagcacccccagcatcccggaaaatggggagcaaggctctgccagcgcccatcccgctccacccgtcgctgcagctcaccaattactccttcctgcaggccgtgaacaccttcccggccacggtggaccacctgcagggcctgtacggtctcagcgcggtacagaccatgcacatgaaccactggacgctggggtatcccaatgtgcacgagatcaccc

SEQ ID NO: 36057 - DNA, 648 bp, Homo sapiens; identical to SEQ ID NO: 24708
  chr9:100503340-100503988
  hyper

SEQ ID NO: 36058 - DNA, 241 bp, Homo sapiens
  chr9:100843158-100843399
  hypo
cgatatctgtggccgcagtggctctgggggccaaggtgttggaacgtcacataactttggacaagacctggaaggggagtgaccactcggcctcgctggagcctggagaactggccgagctggtgcggtcagtgcgtcttgtggagcgtgccctgggctccccaaccaagcagctgctgccctgtgagatggcctgcaatgagaaggtgtgtcctgccggactctactcggttctgctgcc

SEQ ID NO: 36059 - DNA, 1009 bp, Homo sapiens
  chr9:102586203-102587212
  hyper
cgcagaggagccccggtcacaatggtgcgtttcacggtttcctccacacacttcaccaccgggaggggaacacgggggtgttcctttcgtctgcccacgagaaagaaaggggctttgacagaggtagttatttcttcctaatttacaaccccaaggctctgtgctcccggccccggcggccgcaagcaggagcggcggaacgtgtttccaggcactgaggctttgcctaggtaaccggccgcttgtggggtggagagagcggcggggcgctgggctgggctggaggaaaggctgtgtgggtccctcccgcgaacgctgggcgctcgaggggaactccttcgttggggagaggcggtccccgcccacccgagttctgaggcctcctctcagagaacgactccgcttgaaaggccctcagggaatgcgggacgggaatgcgggcacccactgaaggggcgggtgggggattgctggagacccccattgaagatgcggggagacgggaagcacgtgctacagccgtgggaagatccgcttctacccgcgctacatcgagcgcaagctttccgtccgagcagctccagctggggctgggggtggcaagggaatcccccatttcctggtcgtcgagggtttcctggacctgggagccccgagtccctttctctcttcctgcaggcaagccccgggctcaggggcgccaggagatgaccctcgtggccccgcgcacctcggaggtttttggtttggtttgatttggggtttttcggtccctgttcccactcttcgagctgcgcccaccccgggcaaagggggcgctataggccggagtttgggcacccagttccttccctgaggcctgctgagctgcgctttcagctacaaagtttcgctgaggctgtgggctgagacgctggtcccggagctgcgctcggcgccctcaggaatgtgcccccgctaggccgctgggtggccaggagcctccaagccgcccaccctcgaagacacc

SEQ ID NO: 36060 - DNA, 299 bp, Homo sapiens; identical to SEQ ID NO: 14355
  chr9:110187439-110187738
  hyper

SEQ ID NO: 36061 - DNA, 957 bp, Homo sapiens; identical to SEQ ID NO: 18083
  chr9:116811431-116812388
  hypo

SEQ ID NO: 36062 - DNA, 430 bp, Homo sapiens
  chr9:116918462-116918892
  hyper
cgggcgagagttggcgaacgctgcccgccctgccgcgcctggcccggctgcccgatcccgttggggcgggggcagagccagcccgggggtcgggggtgggggtgggtggtggcgcctggagcggccggcggggtgcggaggggggctttttggatgcttgggggaggaggggggtctccgtttggggccgtctcggtgtgttccggtgtctcagtgtctgcaggtcccaagcctgtacgtctccgtttctatctgttcttgtgaaattgtccgcaagtttctaggtcaccaggtctcgggttctgctcctgtctccgtgtctgtgtggctctgcacgtccccgcgtttctggaaatctccgcgtgtttgtgttagtcggcctgggtctgtgtgtctgtgtttcctgcttctcggttcctgtccctttcac

SEQ ID NO: 36063 - DNA, 398 bp, Homo sapiens; identical to SEQ ID NO: 18085
  chr9:123210124-123210522
  hypo

SEQ ID NO: 36064 - DNA, 754 bp, Homo sapiens; identical to SEQ ID NO: 18086
  chr9:124132057-124132811
  binary

SEQ ID NO: 36065 - DNA, 179 bp, Homo sapiens; identical to SEQ ID NO: 18087
  chr9:126092355-126092534
  hypo

SEQ ID NO: 36066 - DNA, 188 bp, Homo sapiens; identical to SEQ ID NO: 32312
  chr9:126760274-126760462
  hyper

SEQ ID NO: 36067 - DNA, 139 bp, Homo sapiens; identical to SEQ ID NO: 18088
  chr9:128274083-128274222
  hypo

SEQ ID NO: 36068 - DNA, 116 bp, Homo sapiens; identical to SEQ ID NO: 18089
  chr9:129645183-129645299
  hypo

SEQ ID NO: 36069 - DNA, 394 bp, Homo sapiens
  chr9:135117797-135118191
  hyper
cggtgagccagagggtcgggagaaacgctgctcgccccacaccccgtcctgcctcccaccacacttacacacacgggactgtggccgacaccccctggcctgtgccaggctcacgggcggcggcggaccccgacctccagttgcctacaattccagtcgctgacttggtcctgttttctattctttatttttcctgcaacccaccagaccccaggcctcaccggaggcccggtgaccacggaactcaccgtctgggggaggaggagagaaggaaggggtggggggcctggaaacttcgttctgtagagaactatttttgtttgtattcactgtcccctgcaagggggacggggcgggagcactggtcaccgcgggggccgatggtggagaatcc

SEQ ID NO: 36070 - DNA, 329 bp, Homo sapiens; identical to SEQ ID NO: 18092
  chr9:135267105-135267434
  hypo

SEQ ID NO: 36071 - DNA, 231 bp, Homo sapiens; identical to SEQ ID NO: 18093
  chr9:135275329-135275560
  hypo

SEQ ID NO: 36072 - DNA, 1276 bp, Homo sapiens
  chr9:135461876-135463152
  binary
cgacctcaggagctgggcccccggtgtaattctgtcccgactgtggggtgtaaacacacgatgccacgcaggtgtagcaggagccatcgttagcgggcaatgtaatgacaacggaacgcagacctgggcaatgcgcgctgcgcccaaggggcaagcgagtggcagggtcgcttattctcccagtgctcggcgctcgcagacccggagccttccgcccagcgccctgtgtaggtagcgagtgtcgggagaaatcatcactacgaattcgtttccatataggggcaacgccaggcggggcacaatgatctgtccttgaggacaaagagtgattccggagagagcaggtttttgtccctccacgcaggtttctctccccagaccccagccttcggcttcctcccttcctgtcacggacgcagccggagaaactggggcccagacgcggagctcactccgccagaaaccctgggtcccttcccctacgctggcaggctgggtccggttccatcgtcgcggctccgtttatccctccagggagcgcgggcagagcgccgagcgcggcgcagggactggagttctcgccagcttcgggttctttctccccggagctgcccggggggtctcggcctcgggcgctcccgccgccgtcctgttcccctcagggttcatgtcctgttcccggggccccagaggtcccgtctgagagcggcccccgcgagcttgggtgtcgcggaaccaccgctgtcggaagccgaggttacacaaacgccacgggcaggagcgggagggcaccggcggcggctgcgaggccgggccctgacatgccgctgtgtccgcagtgaaggaggagggcgaccgcgagatctccagctccagggacagtcccccggtgcgcctgaaaaagccacgcaaggcgcgcacggccttcaccgaccatcagctggcgcagctggagcgcagcttcgagcggcagaagtacctgagcgtgcaggaccgcatggagctcgccgcctcgctcaacctcaccgacacgcaggtcaagacctggtaccagaaccgcaggtgaggcctggctgcgggggtagaggcagaaagggaacttcccctttcctcacagctcctggaggggaccaggagtctacaggttggtgctaagggagggccccagagcctcccccattctgtaaaagtgggaaactgagtccctaaggggacaaggccttgcccaaagtccccacagcgagggacagagatgagactagacttggtgtccagc

SEQ ID NO: 36073 - DNA, 141 bp, Homo sapiens; identical to SEQ ID NO: 10838
  chr9:135523845-135523986
  hypo

SEQ ID NO: 36074 - DNA, 196 bp, Homo sapiens
  chr9:136603465-136603661
  hyper
cggaactccaggcctcccccgccccccaccctcgctgccagccccatgtctccgcccaggatctgggcggagcgtaccgcccaccactgcggcttctaggccagcttagttggggcttctaggccagccctgtgggcagctccctctgagggcggcagagcagggttgtgaaccccatgccccattacccgtaggc

SEQ ID NO: 36075 - DNA, 185 bp, Homo sapiens; identical to SEQ ID NO: 18096
  chr9:138719269-138719454
  hypo

SEQ ID NO: 36076 - DNA, 736 bp, Homo sapiens; identical to SEQ ID NO: 25981
  chr9:139317510-139318246
  hypo

SEQ ID NO: 36077 - DNA, 233 bp, Homo sapiens; identical to SEQ ID NO: 8810
  chr9:139374838-139375071
  hypo

SEQ ID NO: 36078 - DNA, 821 bp, Homo sapiens; identical to SEQ ID NO: 23659
  chr9:139698453-139699274
  hypo

SEQ ID NO: 36079 - DNA, 932 bp, Homo sapiens
  chr9:140196486-140197418
  binary
cggcgtccccgggccccgcacgccgcctctgggcgctccgggcgctcggggccgggggtcgccgccgcggggaccccgccgcatccagccgcgcccgggtgggcgacgggggcgcgcgctcggctcgcgggggccgggcccggccggggacggcggcgccgcgcggtcccggtccctactcggttcggctgcggctcccacgcggtcccaaggcgcctccccacgcgccgcagcactagctcgcccgccgcgccggggcgccttttaccttctttatatttgcataacaatggcagcccgtgacgcgcgcgccggcggccccgggattgggccgcgcccacatgggggcggggcgtgggcggtgccgtgcgcaggggtccgggggcgggtcccggcggcggcgcgcttcgcggcagggggcgctggtcgccggcagcgcctgggcgggggaggccaggtggccgccgggggggtccagctccgtcgccgccgccgtccgcgcgccccccgggcgctccgcgtctctttgcggtcgtcccgccccttctccctccggccacccggggaattccaagctccctcagcagccagacccaggccttgcccggtacccgagcgcgaccgccaggtggccccgagggcggcctctcccgggcagggggttcgcgggcatctcaggcccgtggcgaaggagagacccctctgagcggagaggcgcgcggcgaccccggccagcccgcgcctccgggctcaccgtccacgcgggtggcaactccaggccctgacgtggggccttcagccacgcgggtccttcccgcgcgcgggcagcctcatggccgccggctcagcctatgtgtgccccaaccgtactgatgcgaggggcctccggccggccaccgcggcttctatcgcctggcggtgaagggggttcc

SEQ ID NO: 36080 - DNA, 430 bp, Homo sapiens; identical to SEQ ID NO: 23396
  chr9:19127135-19127565
  hyper

SEQ ID NO: 36081 - DNA, 1371 bp, Homo sapiens; identical to SEQ ID NO: 32340
  chr9:27528536-27529907
  binary

SEQ ID NO: 36082 - DNA, 862 bp, Homo sapiens; identical to SEQ ID NO: 32342
  chr9:37025300-37026162
  hyper

SEQ ID NO: 36083 - DNA, 1950 bp, Homo sapiens
  chr9:37035403-37037353
  binary
cgggggagcgctccgtaggaggactcctggcccgccggacaatggcagttttggagagtgaatcgtcctcagcaagagtgttgtttgttttttggagggggtggtcacgaggctgggtcgcaacctagggggaagagcctagagctcgaggaaaggggggcccccggcggcaactggacatcacatatccactgagcagatttcgccacaatcggaaatgtggctgtggattcccgggcggcccccccaccaagtggtctgcgcagttccccagcgccgcctcctccctgcagcctgcgggcccgtgtccctaccccgagatttgatttttggccatctccgagtgctcgactctttccctccgcagcccagccccagcccaggcttcccgccctcccgcctcgcccgcgccgggaggcagcgcctgggaggagcggcctgtccgcgcctggagatcaaaagccctcccggaattgacatttcaccccgggctgggggcggggggtgttggtgttttgttgttgttgttgtttccatttagagggcttgttttgtttttgtttgttttctgtgagttttcatttttccatgggatattcttttgtttcgggtgttttgcgtgttgttttttcgtgggattgattttagcgggttttgctctgtaagtcctggtctttggggtgagttttgattttgtgtaattttgtactttgtccttgtaggctgtctttttgtgtgtcgtttgtaaggcttttccttctccgcggtgtttagatgtgttttgatttggtgtgagtgggtgtcgtctgtgtgtgtgttgccttagggaatttcgtgttgtgtgtgttttgtttccttcgatttgaattttatttttttgaactgtacgttttggtgggggatcgggttatattttcatgtgttgtctttagtttttgtgtttgtgagatgcgctggtgagagtttgcgtgtgtattttggcttttgtggggctttgggattagggaggggacatcagccgctactccgttcctgcccgcacccatgaagggcagaggattaggccaagcatcacgaatcgtaggttcgccgtgctccgccgcttcgcgctctggacgctcgagaccagcgggaaacaaatgtggttcccgagggggcgcccgctggtcgtcaaaacctcgcgggcccggaggcgccgctgctgggtcagaatcgcagagcccccctcgcggggtaccgaggcccagccgccgtccccttgcccaccctctcccctgtgagtcggtctccccttgcgcctggccagcatgcttcggaccgtccggactcccgcagcgttggcccaaggggcggctcccctcggcggagcaggtgacgaaccacttcggaggacacggaattgacactgcggccctagagatacgggacaaggggccagaacgcggggagtctaggctcagatcggagtcgggatcccgggaaaatcccccatctcccttgcccgcagccctagaatcccagaaacccaactccgcgcagctttcggtttggagagcccgccctggtttgcaagcacagatacatgtgcccacacccgaacacacgcagacaccgccagagagcgagacagcgagcgggcgcctccgtagcagcggcctgcggggcggaaccggagctggcgccgcctcaaggggaaaccgaactgtagtgaccggaaatgtccccaggacagaataagccattccttctgtccacgttgccaggacttctccagctcaacacaccttggtttgtttaatgttacacgagggagaagatttagaggcagagacacatgctggctcaatcggcgaggaaatacgagcagagtctaaacagaaagaaatatggaacggggggagactagactgtggggaaggcaaattggaggcccagaaaaggggctggtgc

SEQ ID NO: 36084 - DNA, 375 bp, Homo sapiens; identical to SEQ ID NO: 18107
  chr9:4297365-4297740
  hyper

SEQ ID NO: 36085 - DNA, 878 bp, Homo sapiens; identical to SEQ ID NO: 13082
  chr9:503936-504814
  binary

SEQ ID NO: 36086 - DNA, 509 bp, Homo sapiens
  chr9:66458086-66458595
  hyper
cgcagttgggaagcacggagacaaaagggggaaagaaggagggagcgggaagccaaaagcctacggtaccgctattaccaggcggaatcccatccaagtactaaccagtcccgaccctgcttagcttcaacagatcagaggcgagccgggcgcgttcagggtggtgtggcctagacgccagcagcggcgcctggctgccccaagagcccggcccagccaagcccgcatgactccaggcgtcatcgccaccccggggccgcgggtctcggatccaggacccccagaggcgctcgcccgtgcccccgggcagctgtctccctctacacccgaggaccgccggcctcccagagagtcccgccgtctccggcggccaggcctggctcaggaccaatgtggcaccgccctgctgttgttggggggcgccgccggaggcctctgtcccctgcgcaggcttccggctctaggggcggcctcctttccgcccacgctccagtccttccgggagctcc

SEQ ID NO: 36087 - DNA, 512 bp, Homo sapiens; identical to SEQ ID NO: 23404
  chr9:79626891-79627403
  hyper

SEQ ID NO: 36088 - DNA, 96 bp, Homo sapiens; identical to SEQ ID NO: 10856
  chr9:80007524-80007620
  hypo

SEQ ID NO: 36089 - DNA, 561 bp, Homo sapiens; identical to SEQ ID NO: 23406
  chr9:88137539-88138100
  hyper

SEQ ID NO: 36090 - DNA, 92 bp, Homo sapiens; identical to SEQ ID NO: 18111
  chr9:88661274-88661366
  hypo

SEQ ID NO: 36091 - DNA, 1264 bp, Homo sapiens; identical to SEQ ID NO: 29536
  chr9:93955385-93956649
  binary

SEQ ID NO: 36092 - DNA, 142 bp, Homo sapiens; identical to SEQ ID NO: 24728
  chrX:44922889-44923031
  hypo

SEQ ID NO: 36093 - DNA, 338 bp, Homo sapiens; identical to SEQ ID NO: 29545
  chrY:14533316-14533654
  hyper

SEQ ID NO: 36094 - DNA, 431 bp, Homo sapiens; identical to SEQ ID NO: 18117
  chrY:14776368-14776799
  hypo

SEQ ID NO: 36095 - DNA, 461 bp, Homo sapiens; identical to SEQ ID NO: 18118
  chrY:15863654-15864115
  hyper

SEQ ID NO: 36096 - DNA, 1398 bp, Homo sapiens; identical to SEQ ID NO: 24730
  chrY:16635744-16637142
  binary

SEQ ID NO: 36097 - DNA, 451 bp, Homo sapiens
  chrY:21204870-21205321
  hypo
cgtgtttgcgtctccgggtgcacagagctatcacttctcactccctcctcactgggaagtccctcccattgtctagcctcagtacctcttgatactctcacagcgccccgctgccatccacagcgcctcccagcccgcggctctgggacgctaccctcgggaccccagctgcactcacctaggtcgggccggcacttgcccttgtccttttgcagctacagctcggcgcgtaaatcaccgacatcctcgcagcctccactggaacaatagtttcccttgttgaggctgctaccctggaagcgaggagaggcggggacgaaggaggagccgagtgtccatcttgcgcatctggcctcccgcatctaggcacatgtttaagatgcttacacagcaggtgccatgctaactgctggcagaaggaatcccgccttcttgcatgcaggcactcgcc

SEQ ID NO: 36098 - DNA, 326 bp, Homo sapiens; identical to SEQ ID NO: 18122
  chrY:21208492-21208818
  hypo

SEQ ID NO: 36099 - DNA, 281 bp, Homo sapiens; identical to SEQ ID NO: 32364
  chrY:22918423-22918704
  hypo

SEQ ID NO: 36100 - DNA, 715 bp, Homo sapiens; identical to SEQ ID NO: 24731
  chrY:2655227-2655942
  hyper

SEQ ID NO: 36101 - DNA, 167 bp, Homo sapiens; identical to SEQ ID NO: 29548
  chrY:4869596-4869763
  hyper

SEQ ID NO: 36102 - DNA, 181 bp, Homo sapiens
  chrY:6778839-6779020
  hyper
cgcgacctttccgggactccgcggcggcggggcagaggcggcccaggggcggcacgcggctgctccggtgcgccgggctcttttcggccgccgcacggccgggcctcacaggctgccctcctgagagaggctcagaacacggccaggtacgcgccgccgccacagttgcgctgctagcgac

SEQ ID NO: 36103 - DNA, 246 bp, Homo sapiens; identical to SEQ ID NO: 12003
  chrY:7140850-7141096
  hyper

SEQ ID NO: 36104 - DNA, 584 bp, Homo sapiens; identical to SEQ ID NO: 14413
  AC211344.3_7702-13588:3943-4527
  hyper

SEQ ID NO: 36105 - DNA, 603 bp, Homo sapiens; identical to SEQ ID NO: 24737
  chr1:101774910-101775513
  hyper

SEQ ID NO: 36106 - DNA, 1389 bp, Homo sapiens; identical to SEQ ID NO: 35210
  chr1:108506290-108507679
  binary

SEQ ID NO: 36107 - DNA, 741 bp, Homo sapiens; identical to SEQ ID NO: 29556
  chr1:109203593-109204334
  binary

SEQ ID NO: 36108 - DNA, 1087 bp, Homo sapiens; identical to SEQ ID NO: 29557
  chr1:109656099-109657186
  hyper

SEQ ID NO: 36109 - DNA, 229 bp, Homo sapiens; identical to SEQ ID NO: 18136
  chr1:110170726-110170955
  hypo

SEQ ID NO: 36110 - DNA, 1278 bp, Homo sapiens; identical to SEQ ID NO: 30715
  chr1:110626374-110627652
  binary

SEQ ID NO: 36111 - DNA, 915 bp, Homo sapiens; identical to SEQ ID NO: 29560
  chr1:111217139-111218054
  binary

SEQ ID NO: 36112 - DNA, 1245 bp, Homo sapiens
  chr1:114695957-114697202
  binary
cgtcctgggagcctggctgtctgcggggtcccccgcattccgcagtagtaatacaggagggccgggggcttctaccccaacctccgctccccttcgggtctctcctggctgtgcaagcgatgggccagagggctggacgaggctggctcccaatccagaatcccgagctggggagttctctctaggttctggggctcctgggaccggggctttggggaagggagatcgcaggacggatatccaggaagggagggggccctgggtctcccgttacctgcgcctgccgcgctgggactccgctctgggggctgcagctcgaagctccgacaagtctccacgtccagcccgagagggggcggccgggcccggcacagcgaggcgaggaccgcgagcgcctcctggcaccgaggcccgccggccccccacactccgctcatgccctagacacccaggcttgccgagcagcagctcgaacccgcgccccggccgcactggggcggggcacgacggccccaagaagaccctccctgcagcggccccctgcggctccgctctgcttttaatcacttccccgcagggtccccgcccctcacgtggcatcccgcggcagctggcgagtctggcgcctcgcggccgccccctctacactcagggactggcctgagtccggggggtgggggtttcgaggcgggaagccgggctgtcccgaatctcggagggtgcaaggccaggaaagagtccgggttcccactccgcattcactgcctggtgtgaccttgggcgtctctgagcctcaattttcctctccgtaaaggaggtgtaatgattttaagtacttcacggactccctggggatagaaagatcgtgtttgtgaaaacactgggtaaactgccacatgccacacgaatgacagagaaatagataaccccgtaacagaaagagcgacggtcaggcagggtctgggaggaccttggccgaggttcctgacgggagcagttagactggcccccgagtcccagcttcggaggtagaagaccccaagacaggcgggcgatgcgaactgcaagactttccgagctccgcaatcctgcggtccgcggtacccgcatgttgctatggcgacgggaggcagcggccgtctctctccatggcaacgggagggaaaagtttctggcaaacaggaatggggggtcatttcaagagggcgcagggcgctcagttccgccgacccacctccttgcttc

SEQ ID NO: 36113 - DNA, 144 bp, Homo sapiens; identical to SEQ ID NO: 18137
  chr1:117918966-117919110
  hypo

SEQ ID NO: 36114 - DNA, 189 bp, Homo sapiens; identical to SEQ ID NO: 18138
  chr1:1200473-1200662
  hypo

SEQ ID NO: 36115 - DNA, 877 bp, Homo sapiens; identical to SEQ ID NO: 22738
  chr1:12123137-12124014
  binary

SEQ ID NO: 36116 - DNA, 1035 bp, Homo sapiens; identical to SEQ ID NO: 24751
  chr1:12226892-12227927
  binary

SEQ ID NO: 36117 - DNA, 718 bp, Homo sapiens; identical to SEQ ID NO: 29563
  chr1:14026481-14027199
  binary

SEQ ID NO: 36118 - DNA, 167 bp, Homo sapiens; identical to SEQ ID NO: 18142
  chr1:15178306-15178473
  hypo

SEQ ID NO: 36119 - DNA, 868 bp, Homo sapiens
  chr1:154474305-154475173
  binary
cgcaatttgccgccgccgcccccgggcttggcccgctccgacacggtcttcaggttcagggggaactccttgaaccacttggccgccatgagggggccccggccggctcggcccaggagcgtcggggccgtggagcaggcgagcgaggaagcccagcccagacacgcagaggcgccaggggtcggggaccactgcattccccgtgactggggcgctggaggccgcggcgaggccccgcgacggctgctccgtgcgcccccggccggccgtcgcccacgcccggcagggtggggttctcacggctcggggcgccgagcgggcgggcgctagcctctgctccggacacggcaggcgacaggcacgacgcgcggggggccccgcccgggctcgtcttcaacgcctgcccggcccgaggacaccgtggctctcggaggcggcgggcgccgggggcttccccctgctctttcctcctgcggtgggagaggccaggcccacggaagccccctgcggcccagcccacgctcccagggaccagagaggaccgagcggaggcggcgggagtatccccggcgcagcgacagacggtggacggacggcgagcggcccatcaactccgcgcgcccctcccctccgcggctggcgcctcccagccccgccacctcctgcccagagctgggggcggcggggtgagcgccatggcagaggcgggtcgggctgcgagctctggagaaaggggcggcggccgcacgtgcggatcggccgcgccccactgagcagagagcccccttctgccgccgacagcccgcgtctgcaccgagccggtctcggccgggcgctgccttcacacgcgcccaggagtgtcacgtgc

SEQ ID NO: 36120 - DNA, 760 bp, Homo sapiens; identical to SEQ ID NO: 35218
  chr1:154971620-154972380
  hyper

SEQ ID NO: 36121 - DNA, 1249 bp, Homo sapiens
  chr1:156390331-156391580
  binary
cgagtggagttgagggggagggtgaagagagaaatgaagtccgagacaaaacaacaacaaaaacctcagacacggagatacagacacgacagagaccgaaaaaggcgtggaaaggacgcgatgacccgtggcgtcgaagtcggggagttgaccccgatccagacccaaaaagtttctggtgccccatttcccgctctcccattcgggccaggagcaggagttccgctggtcccaggtggaagggacgcgcgggcttttcgtgccacccgggaagaccgcagcgacccaggcagaggcctccccagcctcgccgggtctccactgcccttctctggaagatcgagggcgcatccgacagccagagccctgccttcggcggagcccgagcctggcgcgggatggaaatggggagccgcggtgccggcccggccacgtcgccaactcagaaaggcgttggaagcgaagcggagcccttgtgggggaaagagccggattcaagaggccgactaaaaggggaaatgggcagccaaaccccggaggtaaaaaccccagagatgtcctaataggaagcagggaaatcccggcgacccaaagagagaggaaaggctgtggggggcgggtgggggcgacccagagactcccaagcgagtctctcaaggagagaaggaaacagcagagaccccacccgggaagagatccgggagagtacccatgagaggggcggaggggaggaaagcagagggcgacagggcaggtgaccagagtcccaggccctgcagagccccggataaacggctttgttcaaagaggaccagagatcacccagggttgtgaaaatggccgggggttcgaggcgagcggtgctctaggggtgggaaaggggtgcgatcaggaacgggaaaccgcagccccgaagagggtgggggctcggccggcccctcgtggcggacgcgcgggcacgccggattccgaggcgctcgcccacctcgtgctccacgctggccaggccacttacatcgagcccagggtgcccatccgtgctctcccgcgcggtcctcccggccagttcccgcccctggagcgccagggccctgagttccagatgccggggctcagcgggcgccgggcagaggaggctgccctgctcttagcctccgccgagcctaggcgagcagggtggagcgggtctcacctcctagctccctcctctgcctctgccgcggctctggccccggcgcgctccggctcc

SEQ ID NO: 36122 - DNA, 73 bp, Homo sapiens; identical to SEQ ID NO: 18145
  chr1:165711421-165711494
  hypo

SEQ ID NO: 36123 - DNA, 39 bp, Homo sapiens; identical to SEQ ID NO: 18146
  chr1:169096476-169096515
  hypo

SEQ ID NO: 36124 - DNA, 181 bp, Homo sapiens; identical to SEQ ID NO: 15336
  chr1:171570080-171570261
  hypo

SEQ ID NO: 36125 - DNA, 384 bp, Homo sapiens; identical to SEQ ID NO: 23691
  chr1:175375048-175375432
  hypo

SEQ ID NO: 36126 - DNA, 111 bp, Homo sapiens; identical to SEQ ID NO: 18149
  chr1:175957595-175957706
  hypo

SEQ ID NO: 36127 - DNA, 1034 bp, Homo sapiens; identical to SEQ ID NO: 28319
  chr1:181451311-181452345
  hyper

SEQ ID NO: 36128 - DNA, 132 bp, Homo sapiens; identical to SEQ ID NO: 18150
  chr1:19436878-19437010
  hypo

SEQ ID NO: 36129 - DNA, 110 bp, Homo sapiens; identical to SEQ ID NO: 18151
  chr1:19767182-19767292
  hypo

SEQ ID NO: 36130 - DNA, 560 bp, Homo sapiens
  chr1:199998214-199998774
  hyper
cgcatctttttcgtcgggcagaaccgccgcggtgcgcaggcaaggagtccttcccggcagctccgcgcagctccggttccgcgtccggggccgcagctagagcgcgctcgggccggagacgcggactgcgcgcgcacgggggacgcgcgctcgggggctcgcgcccgcgcgggcggtcttgggctcctgctgcgcgcagccccagctggccgctgccaaaatagagttgagctgggtcgggagaccacgcacgccgatccctcacagtctcccccacaccccatgggtgaattaaagagggtaaggtaggggaaagagacgctgttgcacttttctctgcaaccctggaagaactgtgtttccagctaccgcacgcgcaactcacatcgcaagggaccgaggcggtacactctgagcgtaaacagagaacacctgcagctctggaatcggtcccaccgcagagggctgggaaccggaggactgtcggtccagcccataaggggctgctggggactaaacctcaagaaaagtaccgaagaaggctctcccctggcctcagc

SEQ ID NO: 36131 - DNA, 748 bp, Homo sapiens
  chr1:200008298-200009046
  hyper
cggagaggaggggagagagaagggaggcgagagaaagaggagagagacccctgccgatcctgagccagagggcggtggagggaggggaaggagtcgcccgagccgtccgggagcagtggcagcggcacagccggggcggcaatagcagccccgcggtcgcctccgctgcccgccgggagctcggcggttcacggctccgcgccccgggcagctgcgtcctcgccaccgccgccgcctgcgcccttgcggagccgaaccagagggccgggacgctgtcttcctcgcctccttttttaaccctgacctcctcctcgcagcttgggggcggctccggagctgcgagaccggacagggctcagaggtcctgcccggcagccccgaggaggcggaggcacgctccggcgaggcgagagggttgggttagcaggcatcccggtcgccccttccttcttttcgccggagttgaatctgtgctgcccgtgtccaggtgctgggcttccggaccgacacggatcccccatccccgcccgcggtcgccttgtcatgctgcccaaagtggagacggaagccctgggactggctcgatcgcatggggaacagggccagatgccggaaaacatgcaaggtaaggaggcgccgcgcggcgctccggctcccgctgcttccccacccccgggctcgccctgcaggcttcagcctcccgccccgcgcgggcgcgggagtagccccgctgggcgctcgcagccgc

SEQ ID NO: 36132 - DNA, 504 bp, Homo sapiens
  chr1:201368376-201368880
  hyper
cggctccctccggcgctcacctggacagcgcggaccagtccttcctgctgacagccatgctgcaggagccccgcgtggccgcccgcgccccgccggccgccgcctcacctggcgcccctccccttccagcccaggtgggatcacatggccgcttatctcacccccgcgcgccccggccgcgctccgatttgccgacccgggaatggcctctgggatgtgggcgtcccagacaaagccgcattgattgcagcccaggccggcccggccgcgaggccgcaagcactgggtggaccgtcggacggatcgcgggaccgaacgacggacgcccggggccggcgtggggctggtcggctgcccggggcgagggcgggagacttcctgctcagaaccagtccgaccagcttggcgctgggacgcctccccgcgctgtgccgcggcccggggtgccgaggagctgggctgggggcggggacccctgccgggaacccgacttagcccggagac

SEQ ID NO: 36133 - DNA, 44 bp, Homo sapiens; identical to SEQ ID NO: 18157
  chr1:202009839-202009883
  hypo

SEQ ID NO: 36134 - DNA, 549 bp, Homo sapiens; identical to SEQ ID NO: 18158
  chr1:2025644-2026193
  hypo

SEQ ID NO: 36135 - DNA, 708 bp, Homo sapiens; identical to SEQ ID NO: 27413
  chr1:208084004-208084712
  binary

SEQ ID NO: 36136 - DNA, 456 bp, Homo sapiens; identical to SEQ ID NO: 18159
  chr1:213030005-213030461
  hypo

SEQ ID NO: 36137 - DNA, 987 bp, Homo sapiens
  chr1:218337838-218338825
  hyper
cgagaagactgggtgggaggtctggccggtccgaaatagggaagaggtgcgggctcatcaccgaggcggtagggctcggcttatggtctagagccttgaggcgctcccgcgtgagccccgctgcttccagtccgccctcgcctggcccggcgcgggtcgctccctcctccccgtcctgttccgcactttacccagcaggggtcccaggtcgagcagggccaaccctgctcgcgcagcgccggacccctccccgctgcccggggtgcggcggcttccctccgcccaaacggggggtgtctcctccatcacccctgccgcggcttcccagtcggagtcgcgctgcggggcgagggaggctcgctcctccgcggccggggcctgggggtgccagtgcgcccccgagtgagcgggtagggaagccgaagagccgccgacccgctgcgcgccctccagtcccgggcggcgccgggacccagagcggccccagcccgcgccccagcggggacgcgaacggcgtctcgggacggcacctcgccggggccttgccctgtcccgccgcgtcgcggcctctccgcaccccacgtcccgggagccgaccgggagactctcacggcggagttccacagacctcgttaggttaaaggaacctcgccttgccccccactaatcggctagagagggaggccggcgaaacaaaagccgtagaggaaaattaagcgacttccccctcggcggggaacttggaggtgggggagcggggagcggcgcggggcgcaaggagaaggaagtgctgagctgggttgccgacgaaccccgggcagggggaggtggggggctgcggcagaagaaagacaaacatctggggatcggaccatatgccggagctttgtcttgtccttcaaagttcggctgcccttgaagtgatttgtcaggcggcccacgggtgacagggaggatgtgcagcggggagcgggggcgggacatgcc

SEQ ID NO: 36138 - DNA, 320 bp, Homo sapiens; identical to SEQ ID NO: 24805
  chr1:220700617-220700937
  hyper

SEQ ID NO: 36139 - DNA, 234 bp, Homo sapiens; identical to SEQ ID NO: 18161
  chr1:224345162-224345396
  hypo

SEQ ID NO: 36140 - DNA, 380 bp, Homo sapiens; identical to SEQ ID NO: 18162
  chr1:225597858-225598238
  hypo

SEQ ID NO: 36141 - DNA, 983 bp, Homo sapiens; identical to SEQ ID NO: 24813
  chr1:226411007-226411990
  binary

SEQ ID NO: 36142 - DNA, 939 bp, Homo sapiens
  chr1:226925637-226926576
  binary
cgtctcgcggaccggcgagaagcgaggtccaagtccttggctcctaagtatgctgtgtgcggggcgcggctgactcagctctcccgggctgaggacaccccagccaccgtctccgggtctccccagcctgagcaaacattggctatccagggcaacccggcagccctcgccctgggcttcagggtctccctgctccaccctctcggggcatcagagaccgaccggctcggagggaacctaagcgggacctgccttgcccgagccgctgccagcgcccggatctgggagggcgcccgcgtgcccgccgtttaccttcctgaccctagccttggggctgtgtctctcggcctacgaaggcctgggcgggcagcggggccgcagccgaagcatttttcagggctagccttgtcgcctatccctagacaagtgttttgtgagtgtgggcgcaccgaggttctacacgttctctttaccggaaccagtacttgctgcccccctgccgtcgtcccctatgggggggtgtctgtgagtgtgtgtgtatacacgcgtgtgtgtatacgccgcacgcgcgcggagcgagtccgctctcagcgcgccctgttgccgaggacgcgactgcccctgcgggctcccggacccgcgcccactcggaggaacttaggggcgtgcatggctgcagccgggcagcagccctaggtgcacagagcctctagctctgcaaacctcccaggagccggcgctctaacaccccagggcagcgccgcggagcgcagggcttctccgcatcccgggcagcctcgcccggcgccagcagagccgccccgagaccccagcctggggactcctggagcgcgctgagggaggcggcgcggagtgagcggcccggaaggcgggtaggagaaatgcggagacctcgtctctccctattttctccccacc

SEQ ID NO: 36143 - DNA, 757 bp, Homo sapiens
  chr1:228644877-228645634
  binary
cgagggttccctgttgttaacagaacacgttgcccacctcgcaagtatgcagcccaatcagtccccagggtctcggttcccgttgcgcccttccccatggccactgcgctcattcatgagcctagggtgatcaggcctccggcctataaagaactgcaggatcagtgcggctcttttctcgagatagtaggtggctctgaaaagagcctttatgtccatcaaaggggccccgggggcggcgggcggcctcacttgcccttggccttgtggtggctctccgtcttcttgggcagcagtacggcctggatgttgggcaggacgccaccctgcgcgatggtcacgcggcccagcagcttgttgagctcctcgtcgttgcggatggccagctgcaggtggcgcgggatgatgcgcgtcttcttgttgtcgcgcgccgcgttgccggcaagctccaggatctcggcagtcaagtactcgagcaccgcggccagatagaccggggcgccggcgcccacgcgctccgaatagttgcccttgcggagcaaccggtgcacgcggcccacggggaactgcagccccgcgcgcgacgagcgcgacttagccttggcgcgcgccttgccaccctgcttaccacgaccggacatttccgagtcaaggaaaaaagacaacggcaaccgaaaagcgagactaaaaacaagagggcagtgaaggccagcgagcccttatgtatggtacagaggtaggctagaccgcggcgttc

SEQ ID NO: 36144 - DNA, 321 bp, Homo sapiens
  chr1:228646213-228646534
  hyper
cgttcctcggcgtcctgaacccaaaggctcttttcagagccacccacacgatcaagaaagggtttcgaacacggtgaagggttatgtaacctaatgtgtctccatgcaccctagcggttgccgggtgcggccgaatctgagccgtgtgtgtgtgtgtgtgtgtgtgtgtgtgcgcgcgcgcgccggcacagaacgagaaaaactgctcgttacagaaatcggggtagaaactgctcaggtgatgtagctcagtaatgttgggaggcgatcaaggaccccctctccatcccctccctccgcgcagagctattaactcacgac

SEQ ID NO: 36145 - DNA, 273 bp, Homo sapiens; identical to SEQ ID NO: 15353
  chr1:230256241-230256514
  hypo

SEQ ID NO: 36146 - DNA, 262 bp, Homo sapiens; identical to SEQ ID NO: 15354
  chr1:230266303-230266565
  hypo

SEQ ID NO: 36147 - DNA, 1339 bp, Homo sapiens; identical to SEQ ID NO: 24821
  chr1:231175062-231176401
  binary

SEQ ID NO: 36148 - DNA, 110 bp, Homo sapiens
  chr1:235872480-235872590
  hypo
cgacacgtagtcagactctagagcctgccgatggatgaggataaaaagacgaggatcattacgcgcccaagggggaaggttgacgtgattaacccgttcaccattctgac

SEQ ID NO: 36149 - DNA, 240 bp, Homo sapiens
  chr1:24434944-24435184
  hypo
cggggaccctgtggctcccacctgctgcggaaggtccgcctccgcacagaggagcccatgcgcaggctgtgctgccgctcctccttctgctcctcctcctgccggtgctccagcctgtgaacctccatggcctgggggggccgggggtcccccgcacctcccaagctgtgcggcagagtcatggttacgagagcaacaacctgtgaaggccaaggtccacggtcattccaccaggtgccc

SEQ ID NO: 36150 - DNA, 390 bp, Homo sapiens
  chr1:2472146-2472536
  hyper
cgcggggattaggggccgtccgggcccacgtggccgcacgccccgccccgccggtgtccccccaccccccgtgcgccccggggcagggccgggtcgccgtcccaagctggttaaaaaccccgcggtgtcagagagcagctcgttcccaacctctgaaaggcagacaagccctttattgctctattataacgcggagccagatggtcttttgggagttgcccccccgcgccccccgccgccgccctcattcattcagactcagaccccggcactaatgccgcgggggggcccaggcacgcttccctcgccgcccgcccgcgcagtgtgggaaccgccggcgagcgcgaacccacagccgggcggagggaggggcttggaaacccgcgcatc

SEQ ID NO: 36151 - DNA, 209 bp, Homo sapiens; identical to SEQ ID NO: 18171
  chr1:247348636-247348845
  hypo

SEQ ID NO: 36152 - DNA, 1775 bp, Homo sapiens; identical to SEQ ID NO: 23718
  chr1:25255579-25257354
  binary

SEQ ID NO: 36153 - DNA, 211 bp, Homo sapiens; identical to SEQ ID NO: 18173
  chr1:26087011-26087222
  hypo

SEQ ID NO: 36154 - DNA, 261 bp, Homo sapiens; identical to SEQ ID NO: 18174
  chr1:27875550-27875811
  hypo

SEQ ID NO: 36155 - DNA, 592 bp, Homo sapiens; identical to SEQ ID NO: 34073
  chr1:27875852-27876444
  hypo

SEQ ID NO: 36156 - DNA, 825 bp, Homo sapiens; identical to SEQ ID NO: 35251
  chr1:28198925-28199750
  hyper

SEQ ID NO: 36157 - DNA, 764 bp, Homo sapiens; identical to SEQ ID NO: 29628
  chr1:32930144-32930908
  hyper

SEQ ID NO: 36158 - DNA, 550 bp, Homo sapiens
  chr1:39043982-39044532
  binary
cggagatggaaggagccgaagggaccagagagagcgtggacgggaggaagacagacacgaagaacttaagaggggagcgcgcccaggatgggagcgagccagagaggagggggcggcggcggcgagagcgggcgggggacacggggaccgggagacgcgatccggagagcggtgggaagtattcgcctccgttcctcaaacacaggatgcgagcgccctttggagaagtcgcgctcggcggaaacgctaactccccggccaagtgcaaatgtaaagaggccctgagagcactttgtgcaaatatcaggccgggaagtgctgcgcccgcggagctgccgggcacctcggcgcccccgcgccctcggctgcgcgctaattcactttgccgtcacctctcgggcggggtcgggcgggcgcgggcagccggagcgcgcagagggcgcagagcgcctcgcagggccaggggccgcggccctgcctaatggagcaaaagacagatcagcagaagcaaggcaggtggggcgggagcgggagcgtggacatccggcac

SEQ ID NO: 36159 - DNA, 109 bp, Homo sapiens; identical to SEQ ID NO: 30821
  chr1:40905044-40905153
  hypo

SEQ ID NO: 36160 - DNA, 418 bp, Homo sapiens; identical to SEQ ID NO: 24852
  chr1:41267865-41268283
  hyper

SEQ ID NO: 36161 - DNA, 166 bp, Homo sapiens; identical to SEQ ID NO: 18183
  chr1:43310153-43310319
  hypo

SEQ ID NO: 36162 - DNA, 337 bp, Homo sapiens
  chr1:46632621-46632958
  binary
cgcacttctagctgcgttcaaccaggctcaggaggtccttcaagatcttggcttccttttcctgactccgcgcccggcgcggttaattatagccccaccccgcgactacctgcttcgctcccacccgcgcgcccaggaccctagctgcgggactctagcggggaaggcacccccaattctgggccctggcgaccttgggtcagggccaggaaaggcacttccagccaagcgctggcgccgggtgcgcctcgctttacggaaagaacgccccgcgaataaatccggagcggatttgcatcacagcagccgcgagaaggctagctgctgccaaagctcc

SEQ ID NO: 36163 - DNA, 1865 bp, Homo sapiens; identical to SEQ ID NO: 15385
  chr1:46767970-46769835
  hyper

SEQ ID NO: 36164 - DNA, 854 bp, Homo sapiens; identical to SEQ ID NO: 24856
  chr1:46913674-46914528
  binary

SEQ ID NO: 36165 - DNA, 340 bp, Homo sapiens
  chr1:46998908-46999248
  hyper
cgcggccgccgagcgcccacggggcgcgaggccccggcggctacacacgcagcaggccgcgaagaagccgagcgccagcaccagcagcgccagccccacgacgagcagcgcgttgtgctcgggcaagaaggaggcgaaggcgcctgccagcgtcacgttcacgcccgccagcagcgcgcacagaccgcaggcgcagcacagcgccggcgacggcaggccgggcacccggccccgggcgcgttccgcgggcgccgggaccggtggcccctcgctcttttctgccggcggcatcggcctgcgcacgccaggcacgcatcaagctccctcctgccgccggccc

SEQ ID NO: 36166 - DNA, 428 bp, Homo sapiens; identical to SEQ ID NO: 18185
  chr1:48459812-48460240
  hypo

SEQ ID NO: 36167 - DNA, 32 bp, Homo sapiens; identical to SEQ ID NO: 18186
  chr1:54694462-54694494
  hypo

SEQ ID NO: 36168 - DNA, 148 bp, Homo sapiens; identical to SEQ ID NO: 15389
  chr1:55066953-55067101
  hypo

SEQ ID NO: 36169 - DNA, 342 bp, Homo sapiens
  chr1:6284796-6285138
  hypo
cgagtcctggttatcctttacttacactctggcctcgggggcagtggcgtgtggcctcggtcctccccaggtaactctggagggcgctgtggaatattgctgtgatttgccccttactcgtctttcacccatgttccgccttgattcggcataaggacagactgctccagtggggccttgggtcctcaggccttctgaccgcttggtcttgagtgacattccagaagagtgactaatgacataaaacgattaagaaaatccatgtggcagcggccaaccggaaacagttttgtcccaggctgcacagggtcggaggccccaaggtcaccggggccactgccc

SEQ ID NO: 36170 - DNA, 362 bp, Homo sapiens; identical to SEQ ID NO: 16233
  chr1:6333795-6334157
  hypo

SEQ ID NO: 36171 - DNA, 304 bp, Homo sapiens; identical to SEQ ID NO: 15392
  chr1:6345513-6345817
  hypo

SEQ ID NO: 36172 - DNA, 776 bp, Homo sapiens; identical to SEQ ID NO: 23006
  chr1:63795363-63796139
  hyper

SEQ ID NO: 36173 - DNA, 940 bp, Homo sapiens; identical to SEQ ID NO: 24869
  chr1:6479997-6480937
  hyper

SEQ ID NO: 36174 - DNA, 2074 bp, Homo sapiens; identical to SEQ ID NO: 24871
  chr1:6507073-6509147
  binary

SEQ ID NO: 36175 - DNA, 318 bp, Homo sapiens; identical to SEQ ID NO: 18194
  chr1:6711983-6712301
  hypo

SEQ ID NO: 36176 - DNA, 556 bp, Homo sapiens; identical to SEQ ID NO: 33229
  chr1:6713808-6714364
  hypo

SEQ ID NO: 36177 - DNA, 105 bp, Homo sapiens; identical to SEQ ID NO: 18197
  chr1:6738127-6738232
  hypo

SEQ ID NO: 36178 - DNA, 115 bp, Homo sapiens; identical to SEQ ID NO: 18198
  chr1:6750362-6750477
  hypo

SEQ ID NO: 36179 - DNA, 436 bp, Homo sapiens
  chr1:8002301-8002737
  hyper
cggctgctccaggctgtagatgaacctgcccatcattgagcagctggagaacctcaggaaaaccaggggaactgtggctggggcaggcgtgggctggggaaggacatcgagagtagcttgggccgtcctcctgccccgcggttcccagcacgagctctcccgacagaagaggaaaacgcggcgcgactcggttgggggacagcgctgagatgcggacagatgcggacgttctgccgccgcctgcaggcagagggactcggagatcaggccgcagaagcagaagaaggcagacgggaaggaggaggaaggaaaggagccttgtggcttcgtgtccgaccctcccgcccttggcccgcgtgcctggagccagccccaccgcgcccgcgtttcctcccgcgggacttcccttggccctgggtctgcagcgggtcctgcc

SEQ ID NO: 36180 - DNA, 759 bp, Homo sapiens
  chr1:85462747-85463506
  binary
cgtggagtgcggcgggcagttctcgggcggctgaaaggcggctctgtgtgcaccctgcaggatgcggcgcgtggccaggcgctcccgccccgcccccaaggggctgccccgccccgccccgccccgccgcctcctaccggggaccggagcttccccagttggggtcctaggggacttattccacgcttcagcggaccagcctccccgcgctcccggagaagggggtcggcgacgcggaggcggggtgggggccgtaggggatggaaccgaggcgcgcgcgagaagagccgaggaagtaagcagtcccaaaagggggcggcggtggggcccccagggaggcgtggggcacgccaagggcgccgtggggcactgacctgtggtgcggcccccaggacaggcccgaggcgcggttgcacaccggcaggtccagcacctccatgcctcgaggcatggcgcggccagggagcggcaggaggacacctagcgtgggacggctacacctgtctgggcgcaggcccgccgcccttgcactctccacccaagtgcccaacgctgcggtacggcccgctttggctcggggtgtctgccggagaagcgccttacagagggacccgggcggtgggccctgcggcaaagtggcccacgcaccctccacaccgctcccgggcggccgcacctggcactcccggccctctggggttcctgcctttttcgggggggtggtggtgagaccgggtctcactctgtcgcctgacctgc

SEQ ID NO: 36181 - DNA, 1325 bp, Homo sapiens; identical to SEQ ID NO: 24879
  chr1:91184657-91185982
  hyper

SEQ ID NO: 36182 - DNA, 3973 bp, Homo sapiens; identical to SEQ ID NO: 29659
  chr1:92948154-92952127
  binary

SEQ ID NO: 36183 - DNA, 1351 bp, Homo sapiens; identical to SEQ ID NO: 26139
  chr1:9711649-9713000
  binary

SEQ ID NO: 36184 - DNA, 768 bp, Homo sapiens; identical to SEQ ID NO: 34106
  chr10:102475189-102475957
  hyper

SEQ ID NO: 36185 - DNA, 844 bp, Homo sapiens
  chr10:102501611-102502455
  hyper
cgcgctgtggggagcatttcctggggagatgcatttaatttcggaatttctaatcccctccctcagaccccggtcctagctcccctagccgctccccgggaagtggaaggaggaaggcaggtcccggccacgggggaggggcgcggctgggatgctcccgcggccccctccgtctcaccaaggctcagccgccttcccaagctactggaggccgggcgcctgggccccgggtcagggccctgcaggaggaggagaggcaaccacgcttctgccttttctcgcctgggcagaaaacgctgggccagggaactggaaaccggaaaacaggagaaagggtttctggaaggcagcgggagcgggtggcagcggggcagcgggcagtggactaggtctacaccggcacttcacttttgcacaacatgcccagaaacgcatttgagagccctggagtcgcgcttggcttggcttggggcgccggtgcgtgggtacactcgaggtgcggggtgcctatccgccaccccgacacctacacccagacagagcaggcgcggcccagccagaaaaccaggccggcagtagctcggcctggagggcggaggcaaggttgggggccgccaggcgcctgggcaagcctggcagggaagggagccgagaaggcaaaggagccgagatccacaaggaagatttattgggcagatcagatgcacagaggcggctaatgaagcaaatcccgagatgggtatcagagcaactccccaaaagtttatttgcctttaaatttccgcagggaggcgggctccttgtttgaagtgtaaatgcccctaggttggggggtggaagggcc

SEQ ID NO: 36186 - DNA, 867 bp, Homo sapiens
  chr10:102508767-102509634
  hyper
cgcagcagaccccgggcccctgcctcatccgccttccttgctctacttcagatactaaggaggtgaaagagagatacggtccccctacagataaataacattagaaaaacttcccatcaaaaacaaacaacacaggaaagaggtagaaaaattccgattacaatttaatactttttaaagaagaggcagagagcaaaggggggtgtgtgtgtcaggcacttatcccctgtctgtgctaggagctcggataaacagtcagccgagcctcgacgcccccaaatcgtccgcctccaagccccgcacgcgcggacagctcccgggttgcctgcggcgcaggcgggatgctgcttcgcactagtccagtcctctgccaggcccttcctctcctcgctttcttacgccctttccgctggcatgaattcccctttggcattttctcccctctcccctcttttctgtcatctggtttctctccagtcccccctttgctttctaccttgcgtcgcaaggcctgagtcgccctctcgcccagcccccagtcttcagcccagcgtctgtgcttccagtccccactcctccgcgtggtcgtggaggtccaccacctttcttctcaagctcgggaacatgcccttccgccctgcctgcttccttcgcccgtcccgggccgcggaccctgactaatggccggtccctgctgtgtgtggggtgttgtgtttttttcttgtctctccccagcagggcacgggggtgtgaaccagctcgggggggtgtttgtgaacggccggcccctacccgacgtggtgaggcagcgcatcgtggagctggcccaccagggtgtgcggccctgtgacatctcccggcagctgc

SEQ ID NO: 36187 - DNA, 4680 bp, Homo sapiens
  chr10:102585763-102590443
  binary
cgcagagagctcgtggtgtcgaggggggagtcgttaaacagaatctagtgctgatgaggaaattacacttgtttcattagcgatggggaaggagatagctcagttcctcttggtcacagttgagctcagaagctcattatcctgctgcacgcatgctttccctcctcgtcaataaacaggctttccagtggctgcatcccccacccccaccccagctccctctcagagaggggccccttctcctctacttaacccgcggttagggatcactgtaaacagtctggggtcatcacacaggagaaagggcgagggggaaacctggaggcctggcctttctcccgcagagggagggaggtagcttccgacgacggctcccaacccacgggccctccgctcaccgctagcggaccagcgggcagtccacctgcgccgcctccatcccctgccgcgtagcccacgcatccaacctcttgagggaaaggcgggagggcggtgtctcccaaaagagctcccacctcttgtgttggcactgcacattgatgccattcttaggactttctgggagaaaaatgtcccgaaggcctttcttcgccaccgccccccactcccatttccacccattaggggccatgcctcctagaaccggagtggcatctataaaggccctggcccccagcgcgacagggtggacgcgccccaatacaaacccttcgtgggtggccgcgagcgcctccgctgggaagccctgggcgggcaccggcccacaggtcccgcccgtgggtgtgcgagcgcgtcggtgcctcccgcctccccgggctctctccacgcggacgcggtgatcgccccacctccgcccggcccgcccgccacggccattaccctgcccgcgacacctgcgcctgagacccggcgggaggagcgggcggagaagccaccggccggactcgtggggtccgccctggcttgcaggcgtctgatccccactccccgaccctcccgcagggagcgagttctccggcaacccgtacagccacccccagtacacggcctacaacgaggcttggagattcagcaaccccgccttactaagtgagtacgccacctggctggccggcggctcagcgcggccgcgcggcttctgggcacggtcccactcccggcgacccgacctctggggacccggccgggccagggggacaggcttgttagtgcagcactgaggcccggggacccctcgaggacgcccgcacctcctgccctcccgtgccctccctggtcgctcgaaggctctgcgccgccctcgccctcggatcccctggagggtgcgcagccgggcgtcaccagatcgggtccctctcatgccccgtgaacgcaactattctccggggcaactggctccactgcccagccaaggtctcccagtccggatcccgctggaccccagccaggggaggtcttttctgtgcttttctttccttttttgttctcctgtttgtcctctcacccagcccattcttctcctgtgttaacttccaggttccccttattattatagtgccgccccccggggctccgcccctgccgctgctgccgctgcctatgaccgccactagttaccgcggggaccacatcaagcttcaggccgacagcttcggcctccacatcgtccccgtctgaccccaccccggagggagggaggaccgacgcgacgcgatgcctcccggccaccgccccagcctcaccccatcccacgacccccgcaacccttcacatcacccccctcgaaggtcggacaggacgggtggagccgtgggcgggaccctcaggcccgggcccgccgcccccagccccgcctgccgcccctccccgcctgcctggactgcgcggcgccgtgagggggattcggcccagctcgtcccggcctccaccaagccagccccgaagcccgccagccaccctgccggactcgggcgcgacctgctggcgcgcgccggatgtttctgtgacacacaatcagcgcggaccgcagcgcggcccagccccgggcacccgcctcggacgctcgggcgccaggaggcttcgctggaggggctgggccaaggagattaagaagaaaacgactttctgcaggaggaagagcccgctgccgaatccctgggaaaaattcttttcccccagtgccagccggactgccctcgccttccgggtgtgccctgtcccagaagatggaatgggggtgtgggggtccggctctaggaacgggctttgggggcgtcaggtctttccaaggttgggacccaaggatcggggggcccagcagcccgcaccgatcgagccggactctcggctcttcactgctcctcctggcctgcctagttccccagggcccggcacctcctgctgcgagacccggctctcagccctgccttgcccctacctcagcgtctcttccacctgctggcctcccagtttcccctcctgccagtccttcgcctgtcccttgacgccctgcatcctcctccctgactcgcagccccatcggacgctctcccgggaccgccgcaggaccagtttccatagactgcggactggggtcttcctccagcagttacttgatgccccctcccccgacacagactctcaatctgccggtggtaagaaccggttctgagctggcgtctgagctgctgcggggtggaagtggggggctgcccactccactcctcccatcccctcccagcctcctcctccggcaggaactgaacagaaccacaaaaagtctacatttatttaatatgatggtctttgcaaaaaggaacaaaacaacacaaaagcccaccaggctgctgctttgtggaaagacggtgtgtgtcgtgtgaaggcgaaacccggtgtacataacccctccccctccgccccgccccgcccggccccgtagagtccctgtcgcccgccggccctgcctgtagatacgccccgctgtctgtgctgtgagagtcgccgctcgctgggggggaagggggggacacagctacacgcccattaaagcacagcacgtcctgggggaggggggcattttttatgttacaaaaaaaaattacgaaagaaaagaaatctctatgcaaaatgacgaacatggtcctgtggactcctctggcctgttttgttggctctttctctgtaattccgtgttttcgctttttcctccctgcccctctctccctctgcccctctctcctctccgcttctctccccctctgtctctgtctctctccgtctctgtcgctcttgtctgtctgtctctgctctttcctcggcctctctccccagacctggcccggccgccctgtctccgcaggctagatccgaggtggcagctccagcccccgggctcgccccctcgcgggcgtgccccgcgcgccccgggcggccgaaggccgggccgccccgtcccgccccgtagttgctctttcggtagtggcgatgcgccctgcatgtctcctcacccgtggatcgtgacgactcgaaataacagaaacaaagtcaataaagtgaaaataaataaaaatccttgaacaaatccgaaaaggcttggagtcctcgcccagatctctctcccctgcgagccctttttatttgagaaggaaaaagagaaaagagaatcgtttaagggaacccggcgcccagccaggctccagtggcccgaacggggcggcgagggcggcgagggcgccgaggtccggcccatcccagtcctgtggggctggccgggcagagaccccggacccaggcccaggcctaacctgctaaatgtccccggacggttctggtctcctcggccactttcagtgcgtcggttcgttttgattctttttcttttgtgcacataagaaataaataataataataaataaagaataaaattttgtatgtcactccccatggctccaagtttgtctctccctgtctctgagatgggcctcccctccattggtcgatccccaaaagccccttcaatgatcctcccaactacactcccgctgccacctccaactcctttgccgagacccccttggcggcagctgaaccacggcgaaggccgagactagcctgccctttagtagccaccctcccccacgcaccccggccctggggacaggaagttcttactctccgaaacttcagaataactcctagttaggcgcctatactaggccaactctgtggtcctaccagtacacccgcacccagatttagggtgctggctctcagaacccgaagtctgaggccttctccacgtgggtggaggggtggtcgtctgtcctatctcctccctccgttccctatccagtgcagttgcgcgtgggcgcagcagcaattttatccccgaagtctgcaatgaaacgcgaagaccgcagacgcttgccgcaagtttcctcgctctgcgtttacttctgggcccgaagaatgccccgcagaggccctaggagctggttcatgggacttcacgcgcctccagtgtcttgcggagccccagccccagcaagcagcggctgaaattggtgcgccttgtgctgtggtctgggtgtgtcccggagagggcgcgcaggcgcctatgtctgtcgcggggcggtcggcgggttcctgcataggtatggctttctgttcatctatgtgttc

SEQ ID NO: 36188 - DNA, 749 bp, Homo sapiens; identical to SEQ ID NO: 29666
  chr10:102899933-102900682
  hyper

SEQ ID NO: 36189 - DNA, 773 bp, Homo sapiens; identical to SEQ ID NO: 26144
  chr10:102996797-102997570
  hyper

SEQ ID NO: 36190 - DNA, 141 bp, Homo sapiens; identical to SEQ ID NO: 18212
  chr10:103372842-103372983
  hypo

SEQ ID NO: 36191 - DNA, 990 bp, Homo sapiens
  chr10:104000828-104001818
  hyper
cgcgaagcccctatcctggtttcaagtctccggcttcgttccggatcctctgagtctcccccttccctatcccctggttcttaccctgagtttcccttttcccaagtcctggccccaggtctgcagtccgccctcccattctcgacctgttcccaaggcaccggagttcagctgccccaggtctcgttttagggattccaaggtccagcaatagctcctcggccccatgagcccctgtccttagaatggtcaaacactcacagtgcgtcctgcaacaggcagactcccagtagcggcggctgcggcggcgatctagagggcaggcaggggccaggggccgggcacccggccggagtgggggccgcccccctgctcccgggccgcctctccgctcgggcgctcctggactctcggagggagtgagcctcaccgcgtactgccacccccagccggcgcccattcactttatggcagaccagggcgcccccagcccgccgcggcgagccgcgcgcgtcaggccccgcccctttccagctgccctgctggggctccgccctttccagctgtggatctccaggccccgcctttgagggaggggtctggccggcgagacgccaagaaccccgccctctggccaatcagaagcgctcttcagcaactcggccgcgcccctccccacgtggcagagaccgcgctccggctaggacgcttaggcagagccaagtgggcgagagtagagtggtcccggtagccacgggtaaaagggatcggctggcagcgaagtgggttgggccgctaccccgaggaaagtggatcggcgccaggtgggaaggcgcacggggccgccgggtctcagcgctcagacttctctgccactcaagtttcgccgattttctccacttgtcgctgtccgtctctcctcccttttgtctctgttccaatcctcccacgtctcgcctttctttcctcttctttctcctcagccgcttc

SEQ ID NO: 36192 - DNA, 1177 bp, Homo sapiens
  chr10:105253250-105254427
  hyper
cgcatccggggagctcggcgttctcgcggccctgctccccttgttttcaagtgcaagttccatgtttccgtgctgggaataaggccagccccgggtgccaccatactcgcctgatgtcttaccccgacccgcgccgccgagagcttgcggctacgggaacgcggcgcgccccggggccacatctggcctagcgggcgcgcgcgtgtcactaagacgctcattcaccggcgcagctgtcaccataacaaccggagcgagggaatcctggagactgccggggcggggggcgggggcggcggtcgcaggagggacccggcgcgggcgggaccgcggcggtcgggggacaccagctgcgtcggagcgcccagaacgccccgcgctccgccgagccccgctccacgcagacccgcgggcgggagggagccacgcacatcgccgccgcggccgtctccgcggggcggtaaccgagcctgcctcggagccgccgaacgcccacgccagcgaccctgactctatggccccgggggagcgcgccggagccgccgcgccgcccacccccagccggaaccctagcgtcccggggagcaagcggggagccccgggcgtccccggccccggcccagggccctgcttgtggcccccgctcccgccacggggcatgggaggcaggtagcccagcctgcgccaggacacccgtggcgggcggaacccgccaaggaccgcgaagtccagagaaaggaagctgaggagctgcccgcccgcccccggctgcagccccagcagggccctcccccggtggcgcgcacccgcgcgcgcacactcgcacaccgcacctcagcgcctgcccggcctcgcccccacccgcgagcgccgaacctcctggggccggatgccatgggtaacaacttctccagtatcccctcgctgccccgaggaaacccgagccgcgcgccgcggggccacccccagaacctcaaaggtaggctccccggccgagcgctgctggaggactggggcgcaggtggagggccagggaggtgtggttggggagggcgggcagacgccacctgttgtgcgtgtctggaggccggagatgcacctctggccgtggagtgggctgggggtggagggcagccggcgatgatggtgatggaggatggcgtcccgcggggtctgc

SEQ ID NO: 36193 - DNA, 974 bp, Homo sapiens; identical to SEQ ID NO: 29671
  chr10:11059337-11060311
  binary

SEQ ID NO: 36194 - DNA, 1260 bp, Homo sapiens; identical to SEQ ID NO: 24898
  chr10:118890928-118892188
  hyper

SEQ ID NO: 36195 - DNA, 736 bp, Homo sapiens; identical to SEQ ID NO: 33240
  chr10:119494306-119495042
  hyper

SEQ ID NO: 36196 - DNA, 261 bp, Homo sapiens; identical to SEQ ID NO: 18218
  chr10:126767714-126767975
  hypo

SEQ ID NO: 36197 - DNA, 549 bp, Homo sapiens; identical to SEQ ID NO: 18219
  chr10:126771776-126772325
  hypo

SEQ ID NO: 36198 - DNA, 514 bp, Homo sapiens; identical to SEQ ID NO: 18220
  chr10:135120335-135120849
  hypo

SEQ ID NO: 36199 - DNA, 60 bp, Homo sapiens; identical to SEQ ID NO: 18221
  chr10:13711305-13711365
  hypo

SEQ ID NO: 36200 - DNA, 411 bp, Homo sapiens; identical to SEQ ID NO: 18222
  chr10:14816098-14816509
  hypo

SEQ ID NO: 36201 - DNA, 1974 bp, Homo sapiens
  chr10:16562056-16564030
  hyper
cgcccattccggactcccccaggcctctccactccccagaaagcccgtaagctaccctctgttgcggaggatcccacggccaggggtcgcttcccgcgccgggactccccagcgcacgagctgtccccgggacccagctcccggcttcccgcccctcgagggtcgcgctcgcaggggcgcgcaccgatcgagggtcccagactccggaactgccctctccaggccgcggggcgccctcctgcgcgcacgacccccgcctctccagggtgggacggcgtccccccttgccgtcgctccagggagcccggccgccgcgcccttcctccgcgggctcccacccccatttccggggtctcctccctctcgcccgcaccttcccgcgctccctccccgccctccccgccgcccgcccgcgctcacctggttgtttttgcagagatcagcccacatgctggtgccgtcccctccgcgcatcaggacgtggtaggtgaagaagtagatgcccgggatggagcaggtgaacttgccggtggtggggtcgtagtggtttccgaggttggtgaccacgtcgtcgaacttgagcacctcgtagccttcatgctgccgcttgaggccggcgtagaaggcgatcttgggcaccgtgctgtaggtggcggcgctgatggccccggccgcgttcaggccgggcgccccgggcgggcccggcaggccttggcggcccggctcgcccttctcgcccgggggccccatggggccgggtggcccgggctctccggggggcccgcgcggacccgccttcccgggcctgccggcctcgcctttggggccctggatgaaggtgggcagggactgcatgaggccgcggtcgggcgtggcagcggtgctgggcgccttggtgcccccgtaggggtcgcagaccatgcggcaggtgcccagcatctcgtagtgcgccgacgtgccggccgagctcaccagcaccgggatgaggatcaccagcagcagcaccatcaccacccccagcgccccggcggcgatcaggcgcctcctgctgcccaccagccggctcagcgcggggcgatcctcttgtctgcttttggacagaattttgaaggttgggcggggacctcttcagagccgaaaacaaccccctgcgaaccccaactcccctgggcgtgcgtgcgccggccgctgctgccgactcctgctccccccgcggaggctgcggctggggagggagcgcgggcgcccagtgacttgagccgaagtcccgagcccggggtgggggccgggggaggggtgcgcggggcgccctcgccccccgcgagctccttcgcacctgtggctgcagccggcgccggcgcggccaccgggagggcagagccagccgccgcctcctgagctcgcccgggcagctcacacttttatgccgccgccgcctgcgatcgacttttccgtttttgcagactgcgcctgttcgcaccaactttccgtctgaagttgcctttttctgcctcctcctcctcttctttcgctcgctcagttcgcccgtccgctgccttttttttttattgcctcctttctctcttcctcctttgccaccaccacaactcgaatagacgcgcaccccaaagccccgcgtgggcccgggcgtcccccgggtgcgcccagcggcggcggcggcgggcacggtcggcacggcgaggctcagagctggggcggaggagcgagcgagcagcggcgagcgcctcacggccgggagcggagcgagagagagactgaaggcagaattctgcctgggtaccacctgccaggagaagaggaggctgacaaacgcgcgccggagcaatttataggcacccaaggcacagaggaaggggagccgctttggcatctcattgcagcatctgctctgctcatcccactcagagagagtttggcattactctgacaatgtgggatttttttttttttttc

SEQ ID NO: 36202 - DNA, 1368 bp, Homo sapiens; identical to SEQ ID NO: 23771
  chr10:22764575-22765943
  hyper

SEQ ID NO: 36203 - DNA, 623 bp, Homo sapiens
  chr10:26500525-26501148
  hyper
cgtatctaaacaccattaccaggctccaccagcccctctgctcctcagcttagaggagtttttaaaacctgttgagaattatcgcagatacgtttggccattatccagtcgtttcgattgtgcctttcctaaatgtccgcggttggcagaacgtgggaggaagaggacccgcctaactcggggtaggtggggacgcgctgctcactgtggtgaggttgacacttgggccctgggtttcacttgcaggtgctgggcggcggagagccccgagaaggaggaggagagagagccagcagccaacccctacgacttcaggaggctcctgcgcaaaacctcccagcgccggcgcctcgtccagcagtcctaaccgttcaacgaggcagtcaccgccgtcggaaggcgctggagcctgcggggcagcaggggccaagcaggcactctggggctggcaccagcaggcactgaagctgcggccctgatctccgcagaggctgcctgctgcgctcggccctcaagtgcccgggccggccttcgtgctccgaaacaagagacctgggagccctcgggaaacctcccccgacgctctctctcggaactcccgcaccctcctttctcaccagccc

SEQ ID NO: 36204 - DNA, 105 bp, Homo sapiens; identical to SEQ ID NO: 18223
  chr10:31134746-31134851
  hypo

SEQ ID NO: 36205 - DNA, 469 bp, Homo sapiens; identical to SEQ ID NO: 27485
  chr10:3160827-3161296
  hypo

SEQ ID NO: 36206 - DNA, 68 bp, Homo sapiens; identical to SEQ ID NO: 18226
  chr10:35043989-35044057
  hypo

SEQ ID NO: 36207 - DNA, 479 bp, Homo sapiens; identical to SEQ ID NO: 18227
  chr10:425893-426372
  hypo

SEQ ID NO: 36208 - DNA, 217 bp, Homo sapiens; identical to SEQ ID NO: 15448
  chr10:44163386-44163603
  hypo

SEQ ID NO: 36209 - DNA, 74 bp, Homo sapiens; identical to SEQ ID NO: 18229
  chr10:44163716-44163790
  hypo

SEQ ID NO: 36210 - DNA, 898 bp, Homo sapiens
  chr10:73156639-73157537
  hyper
cgggggccgagcggggcgggggaagcaagggaaagttgatcgcggacttgagcggcggcggcggctcgggagagagggacgcgggctgcaggcgcgatgcttggctagaggacgcgtccgacggcggccggacgctgaggtggtcggggctagtcagcccggcctgggcatggagcgcggggtggcagagcctctggacgtttggggcgcgcccagtccgagcccccggcgcgcctgaagttgcgagcggcgagcggcgagcggcgagcggcccgcggagacccaggagctgccggcacgccgcggatgagccttcgcgccggcgggaagacgcggcggtggccagggccagagcaggcggcccgcgggggccgatccggcggagagcagagcccgaggcgaggcgaggcgcggcgccgctgcacacacgcacacggtacccggagccacgcaccgcctcttccctcctcgcttccctctccttcccctcgccgttcgcccgccgcgcggcggggaagttggtggtgaccgcggctgccgaaccacttgttcccagcgcggccatcgcccgtggcgggcgctcgcggcatccttcggtcccaggcccctggccctagcctcgcgccccgctccgagctccccgacgcgcggcaactttgattcctgggaactcgaattccattcgcgttggccttgggaggacaggcatcccatcccccatccccggtcctgggaccgcgaacatttgggggctttgctctcggcgctacggagagggtccaggtctggggtggagagattttcgagagtggagcgcgttgggatccaatcccctccccttctgagccctgggtccccatttggacagtggggatggggtggggcgcacccctactgc

SEQ ID NO: 36211 - DNA, 238 bp, Homo sapiens; identical to SEQ ID NO: 15453
  chr10:73514960-73515198
  hypo

SEQ ID NO: 36212 - DNA, 499 bp, Homo sapiens; identical to SEQ ID NO: 18231
  chr10:79601557-79602056
  hypo

SEQ ID NO: 36213 - DNA, 667 bp, Homo sapiens; identical to SEQ ID NO: 24936
  chr10:93647052-93647719
  binary

SEQ ID NO: 36214 - DNA, 1794 bp, Homo sapiens; identical to SEQ ID NO: 27495
  chr10:94449625-94451419
  binary

SEQ ID NO: 36215 - DNA, 1068 bp, Homo sapiens; identical to SEQ ID NO: 29725
  chr10:98272415-98273483
  hyper

SEQ ID NO: 36216 - DNA, 70 bp, Homo sapiens; identical to SEQ ID NO: 18236
  chr11:107931221-107931291
  hypo

SEQ ID NO: 36217 - DNA, 121 bp, Homo sapiens; identical to SEQ ID NO: 18237
  chr11:116821500-116821621
  hypo

SEQ ID NO: 36218 - DNA, 257 bp, Homo sapiens; identical to SEQ ID NO: 18238
  chr11:119290824-119291081
  hypo

SEQ ID NO: 36219 - DNA, 916 bp, Homo sapiens
  chr11:119293218-119294134
  hyper
cggcgggcctcatccttaatccatttccgtattccaatcctctcctttcccaaatgagtcccccttccccctctctcatccttttccagctctcccctcccccgtccgcccgccttccacccagtccccgcctgcggcactgcggcttccttctcctccggtgccccgcacccagcccgccgcgaggtcacccggcagattccctctagctcgccatcctccatcctctccccgcagtttcatccgtcctcctccccgcctctgcgagctgggtttggggacgtctgggtggaatgtagacccacaggctgtccttggtgcccttcctccctgttctccagcgccccagccccagacaccagtcccccagcgggcgaaagcccgggagcgccttccccgaaagacatcagggtgccacgcggcccctgccctgcagaagcatccccctcccgcccctgcctggaaagcaggcccctccctaagctctgcgcccttcttccctgggcgccctcggaccgtggcccgaagcctagtgttgggaagtcttgcatgggcgcctgacggcggtccccgagccccaggtcccaccggctccagttcccacctggactggggtcttccgctgctgcagcctcctccagacgcgccgccgcctccggttgctgcacccagctcggagcccgcagttttcaccggggatggaggagagggggagcggggagccgggggctcagccaatcagaggcggagattgggggagaaaggacggcagggtggggtggggggtggggaaggaagagaaggcggtcccgcattggtgtgagagtggcaggttgcggcggaagggggccctcaccctgtggctggcaggcctggccagggacgggagggttcgggaccccggggatcagggtgc

SEQ ID NO: 36220 - DNA, 939 bp, Homo sapiens; identical to SEQ ID NO: 22768
  chr11:123228638-123229577
  binary

SEQ ID NO: 36221 - DNA, 1291 bp, Homo sapiens; identical to SEQ ID NO: 22769
  chr11:123300826-123302117
  binary

SEQ ID NO: 36222 - DNA, 1308 bp, Homo sapiens; identical to SEQ ID NO: 22770
  chr11:128564211-128565519
  binary

SEQ ID NO: 36223 - DNA, 836 bp, Homo sapiens; identical to SEQ ID NO: 34180
  chr11:1535842-1536678
  hypo

SEQ ID NO: 36224 - DNA, 47 bp, Homo sapiens; identical to SEQ ID NO: 18243
  chr11:1919487-1919534
  hypo

SEQ ID NO: 36225 - DNA, 828 bp, Homo sapiens; identical to SEQ ID NO: 29738
  chr11:2466019-2466847
  hyper

SEQ ID NO: 36226 - DNA, 130 bp, Homo sapiens; identical to SEQ ID NO: 18246
  chr11:3035029-3035159
  hypo

SEQ ID NO: 36227 - DNA, 302 bp, Homo sapiens; identical to SEQ ID NO: 15470
  chr11:30445742-30446044
  hypo

SEQ ID NO: 36228 - DNA, 805 bp, Homo sapiens; identical to SEQ ID NO: 18248
  chr11:33397688-33398493
  binary

SEQ ID NO: 36229 - DNA, 761 bp, Homo sapiens
  chr11:33890196-33890957
  binary
cgagactctactccccagaataattcacctatacacaaaatggtgcattaactttcgaggttcacatgtccccatcggtggaccccgaggaggggtacacctactcagatttactccggatttcgctgctctagaaatccctggaggcccagagccagctccgaggtggacggtcggacccctcacccgcccgttatccgcaaggctggcagcggctccacctgcggaccgggaaggcggccgttggggaccccggaggccgccacttggaatgttcccctttccaagaccaaatggacaaagagaaaggaccgagaaggagagggaagaagggagcagagtcaagcccagaacgctctccggactgcacctgcgcgcctccaggctctcctcgtgcctgctcccgtgcaaactttctggcccgtggtggctttggggagcgtcccagtagcctggagtggcccgcagaggcgccgggccgacccctgtccctgccgcccgccgcccagtccctctcccagagcccccggaatcacccgggaggaaggaggagcccagcgctcggcacagggggccaagggcacgccgcgagcgcgcacctggagccccctcgcgggccgcccgggtccccccgacgctccgggacgcgaggccgtggacaccgggggtggcaggggcaggggggccgcacttactctgaagggtccaggctcttcctttcgatggccgaggacattggggagggaggcggggtgccgggc

SEQ ID NO: 36230 - DNA, 537 bp, Homo sapiens; identical to SEQ ID NO: 26212
  chr11:33891709-33892246
  hyper

SEQ ID NO: 36231 - DNA, 118 bp, Homo sapiens; identical to SEQ ID NO: 18252
  chr11:36245106-36245224
  hypo

SEQ ID NO: 36232 - DNA, 578 bp, Homo sapiens; identical to SEQ ID NO: 29751
  chr11:46354343-46354921
  hyper

SEQ ID NO: 36233 - DNA, 115 bp, Homo sapiens
  chr11:567195-567310
  hypo
cgggcagagggcagagccaggctgtatcgaggggcggcgctgggaccctcctcgcccagagttcctactcatccccagcacagaagtgctctgtagggccagctgaggacacccc

SEQ ID NO: 36234 - DNA, 992 bp, Homo sapiens; identical to SEQ ID NO: 29755
  chr11:61276083-61277075
  binary

SEQ ID NO: 36235 - DNA, 374 bp, Homo sapiens; identical to SEQ ID NO: 18256
  chr11:63908860-63909234
  hypo

SEQ ID NO: 36236 - DNA, 373 bp, Homo sapiens
  chr11:65684966-65685339
  hypo
cgggagccacgggcactacccccaagctggaaacggctctcatagagagtggggcagaggtgccagcgattggcccggtagatgcccaggtaggtgtagacatcaggcttgtaggtgagcaggcacttaatgcccgctgcacggatggctgaatccgcctccagtacacccaagcggtccgtgaagtcgtccgtgtaaacacagatgacctggcgcccaccctccttggcacgtgggctcaccttggccacctgaagctggccttcaaccacggcccgggcaatgccagcccaggcgtggtccagcttgaagcccggtgccagatgcataagccacttgcccgagagcacgtggtgggtgatggcgagctggc

SEQ ID NO: 36237 - DNA, 1101 bp, Homo sapiens; identical to SEQ ID NO: 7830
  chr11:66079395-66080496
  binary

SEQ ID NO: 36238 - DNA, 33 bp, Homo sapiens; identical to SEQ ID NO: 18259
  chr11:66658557-66658590
  hypo

SEQ ID NO: 36239 - DNA, 260 bp, Homo sapiens; identical to SEQ ID NO: 18260
  chr11:68822128-68822388
  hypo

SEQ ID NO: 36240 - DNA, 255 bp, Homo sapiens; identical to SEQ ID NO: 18261
  chr11:70054500-70054755
  hypo

SEQ ID NO: 36241 - DNA, 130 bp, Homo sapiens; identical to SEQ ID NO: 18262
  chr11:70189848-70189978
  hypo

SEQ ID NO: 36242 - DNA, 897 bp, Homo sapiens
  chr11:75378416-75379313
  hyper
cgctaggcctgcgctggggatcctgggccccgggcagcccgcggggagggtctgcgtggtgactcccccgcgctagcagcggccgcgtctcacctgtaggagctgctcactgcactcgccacctcctcgcggatttgccggttgagggcgtccgccgcggcgcgccccctgccagcctcggggccggtggcctggacctgggcctgggccgcgggcagcggcgtctgctcgtgccccaggccctcggcgcggcgcacaatccaggcaggcccggccttcctgcgcgtgtcgcgctcgtccgccccggacgcctttccggccgccaggccacccgctccgccgggggccgcctcctgctcccgggcctcagcggcggcctgcactggccagcgctcctggctctgcggccggcgcttgggcgccccgagaatgggcgccgacgcctgggaggccgcagagatctgcacgggcttggggatccacgggtggtccccgcggcgcggcagcggccaggcgcggaagtccttctggtactgggtctcgcgctcgaagggagcgtcggagggctggtattcgctgcgcggccggcagctgggctcgggccgctgcaccttccaggctcggtaatcctgccgcatcaccgagtccgcggggccggaggtggagccggagcccaggcccgggcccggcccgctccggccggggcccgccgccggctcgcgctcgccggtaggcccaggcgctggccccgttgcccgggcaactgcatccaactcgccctgggctggctgcgtctctatggcaaccgcgcgcgccgaggggggcgcgagcgccggctgcgcctgctgctgcggcggcggtggctgcggcggggcgcccgggtgctcggtggcctcc

SEQ ID NO: 36243 - DNA, 880 bp, Homo sapiens
  chr11:75379333-75380213
  binary
cggcacagcgatgtccgctttgtccaactggttccagaagcgggcgatgcagcaggccctcgtgatgcacggccacgccatgatgctagctgaaaagccggcctcctctttcttcttgtggttctaaagcaagtctctataatcttccttcagcctccgatcctgaccggccaatgtggttcccaccgttttctacccccgatcagccggagctagttcgccctcctccctcagcgagcacccggggagagctgtcctaggagagtctgtagagtccctcgattaccggtcgcaaacgcctttgggagcgcagtctgctgcgagcgccgaagggtgagacgcacggcgttcccgagtccccggcgagggtgtctgggacgcgcccctccctgcggctgcggcggcgcacagacctcggtcgagcgaggcgacgtgaggagaggtggctacaggcttaagccatggcgcagaggaggggccgggcggtgtggccgcagggtccgcggaccgggctcgagtctccttcctgccggcgtcctagtgcagccggccacctagcagggctgggaggccatcacctccagcggagaccgagcattgctgcctccgccgctgcccgcgaggatgccgcagccgccgccgccaccgcctcttctcctgggaagcgaccccacccttttctgcagctctcggtctccgccgctgcccgcgaatgatgctgcagccgctgccgccgccgcctctgcctctgctgcagggaagcggccccacccttttatgctgctcagcagtgagaaaaaaatccaggaacgatgctgactgaaagagtgctgcagaaaaaaacaaaacaaaacaaaaacacctgctgtcgtcagcttgc

SEQ ID NO: 36244 - DNA, 40 bp, Homo sapiens; identical to SEQ ID NO: 10217
  chr11:76164370-76164410
  hypo

SEQ ID NO: 36245 - DNA, 782 bp, Homo sapiens; identical to SEQ ID NO: 22775
  chr11:76381512-76382294
  binary

SEQ ID NO: 36246 - DNA, 1381 bp, Homo sapiens; identical to SEQ ID NO: 26231
  chr11:79149245-79150626
  hyper

SEQ ID NO: 36247 - DNA, 364 bp, Homo sapiens; identical to SEQ ID NO: 18267
  chr11:799220-799584
  hypo

SEQ ID NO: 36248 - DNA, 305 bp, Homo sapiens; identical to SEQ ID NO: 18268
  chr11:799826-800131
  hypo

SEQ ID NO: 36249 - DNA, 126 bp, Homo sapiens; identical to SEQ ID NO: 18269
  chr11:8255472-8255598
  hypo

SEQ ID NO: 36250 - DNA, 713 bp, Homo sapiens; identical to SEQ ID NO: 22776
  chr11:8615303-8616016
  binary

SEQ ID NO: 36251 - DNA, 472 bp, Homo sapiens; identical to SEQ ID NO: 23830
  chr11:862613-863085
  hypo

SEQ ID NO: 36252 - DNA, 51 bp, Homo sapiens; identical to SEQ ID NO: 18271
  chr11:93425646-93425697
  hypo

SEQ ID NO: 36253 - DNA, 386 bp, Homo sapiens
  chr11:93476562-93476948
  hypo
cgtgggtcttgcggctgcggtgcctcacttacttagcccacggctctcaactcctcgcgggagggggggcgcgagtgaatgaggcgggaactggagtgctggaagccacgaactccagtcacccaggcctgctgcgctccaccctttatgggagggtgcgtgggggtgagcagatgctggagccggagcgagcgcttttggtcgccggtaggagcgaactccatgcaggccctgcggctgtgtctaggggatgcccgcgacccctgaagacccacagcctgtcttacaacctgtcatggttgtgaaaagttttgagagaacgtctgcacagtgtctaacggtgtctggtatatagtgtgcactcaaatggtaaccagtttagttgc

SEQ ID NO: 36254 - DNA, 1311 bp, Homo sapiens; identical to SEQ ID NO: 29766
  chr12:104851507-104852818
  binary

SEQ ID NO: 36255 - DNA, 72 bp, Homo sapiens; identical to SEQ ID NO: 18275
  chr12:110389844-110389916
  hypo

SEQ ID NO: 36256 - DNA, 259 bp, Homo sapiens; identical to SEQ ID NO: 35367
  chr12:111127127-111127386
  hyper

SEQ ID NO: 36257 - DNA, 504 bp, Homo sapiens; identical to SEQ ID NO: 28488
  chr12:114337479-114337983
  hypo

SEQ ID NO: 36258 - DNA, 463 bp, Homo sapiens
  chr12:117155351-117155814
  hypo
cgtgagcccggcctccggtttcatctttcccgaatgggactggctggaggggccaagctgctttacagaagagttccatctggtaagcccgggtggtgagcgaagccaaagatgacaacacgagaaggggtcaaagccaaggtttcctcacgctgcctttgtcttcttcctgcagcctggcccgatggctgaagctgggtcccaggaggcgagttcttcagcggggcctcctcacccaggctggagcaagtccgctgcacccgtcaagcggggaagagctcgggcgggctttctccatagcaatactttgctatggggtcccggtaggtgttctcatgctgcacgctctgttggcaaaaggaaaataagagcgcagtgagagcgagcacagcttcacacacctccctctcggaagagtgagagtggatcgggactgtcagactctccctgcagggggctggcc

SEQ ID NO: 36259 - DNA, 180 bp, Homo sapiens; identical to SEQ ID NO: 29768
  chr12:117316485-117316665
  hyper

SEQ ID NO: 36260 - DNA, 71 bp, Homo sapiens; identical to SEQ ID NO: 18281
  chr12:117316909-117316980
  binary

SEQ ID NO: 36261 - DNA, 545 bp, Homo sapiens
  chr12:117317225-117317770
  binary
cgctttgggcttcgcgtctgtcgctcaacttcctttttctgcaccccgcgatccatccaaaatgttcttcctgtccctgggattgggcagcctcagcctggcccctttcagtcgcgggagcccctggcctctccaacaggagagagagaaggtagggagaagtggatgggacccccggcgcccgggagccgggcagagagcgccccgaagcgcgcatttctcttcgccagcgcccgggctgcgcgggcccacgcgacatctgtcgcctgcggtcccggctcacaccccgcgcacccccgcagctccctgggcgctgccaccccccacgctccggctgccgcctttccccgcgggcgcagacgctcgggcctcgccttcaggcgccgctccaacttcccagggtgtctgcggcgcgcggcggggctcgggggcggggacctaagggcggctggctatgtcaccttcgagcttcaccttccggccctagacccatctatggtgggctcagcctgattctctctccctcattctctgcagcgctcctc

SEQ ID NO: 36262 - DNA, 1351 bp, Homo sapiens; identical to SEQ ID NO: 31013
  chr12:120147746-120149097
  hypo

SEQ ID NO: 36263 - DNA, 276 bp, Homo sapiens; identical to SEQ ID NO: 18286
  chr12:120186357-120186633
  hypo

SEQ ID NO: 36264 - DNA, 65 bp, Homo sapiens; identical to SEQ ID NO: 18287
  chr12:120189911-120189976
  hypo

SEQ ID NO: 36265 - DNA, 723 bp, Homo sapiens; identical to SEQ ID NO: 18288
  chr12:120524652-120525375
  hyper

SEQ ID NO: 36266 - DNA, 304 bp, Homo sapiens; identical to SEQ ID NO: 18289
  chr12:122212948-122213252
  hypo

SEQ ID NO: 36267 - DNA, 178 bp, Homo sapiens; identical to SEQ ID NO: 33339
  chr12:122213623-122213801
  hypo

SEQ ID NO: 36268 - DNA, 407 bp, Homo sapiens; identical to SEQ ID NO: 15514
  chr12:122480960-122481367
  hypo

SEQ ID NO: 36269 - DNA, 376 bp, Homo sapiens; identical to SEQ ID NO: 18292
  chr12:122481628-122482004
  hypo

SEQ ID NO: 36270 - DNA, 266 bp, Homo sapiens; identical to SEQ ID NO: 29769
  chr12:122667648-122667914
  hyper

SEQ ID NO: 36271 - DNA, 123 bp, Homo sapiens; identical to SEQ ID NO: 18294
  chr12:122970391-122970514
  hypo

SEQ ID NO: 36272 - DNA, 429 bp, Homo sapiens
  chr12:124893329-124893758
  hypo
cgaaggttacaagcactccaagggcattgcttcctgatcatctggctacatggagctacgaagtcatccgtgccgtggaggtgacttccgccaactccatgcacagggtgagaacaggataagacagcctggtgctaggggcatctttccccagttccaagtcagcggcagcacgttgtcacgtggcactgggcacggtgagaggatttatttacaccatggcaaccggcacatgctacaaacgcagcttccccctacagaaagctggttgttaaacatttaccagcactctacggcagaaagatgcgtgtcgacagaacgtgagcaacatttaacacgcacatggaagcctgttccgcctgtacagatgtgtgctgtgccagccgaggctctgttgtaaatcctaattcagatcccgacccgcaactc

SEQ ID NO: 36273 - DNA, 976 bp, Homo sapiens
  chr12:132312929-132313905
  hyper
cggggctcagtccggcgggggcgccgcggagagcggagggcgccgggctgcggaacgcgaagcggagggcgcgggaccctgcacgccgcccgcgggcccatgtgagcgccatgcggcgccgcgcagcccggggacccggcccgccgcccccagggcccggactctcgcggctgccgctgccgctgctgctgctgctggcgctggggacccgcgggggctgcgccgcgcccgcacccgcgccgcgcgccgaggacctcagcctgggagtggtgagcgcgcgggcgggacgggcgcggagctcctgggccggagccgggggtctccgcgggccgggtggcggggaccgggaagaccccagcagtgcacgtcggcgtcgcgcgggagccctggcgccctggacccatttcctgggtggggagactgaggcagggacgcgggctgagcgaccgggcgagcgcacgcgagtcctggggaggcgccggctgccgtcccggctccgtgcgctgggagcgcgccgcagccgcaggagcccgtggagttgtgagggggtcgcccacccggagcccgggtcgccggcttgcagcagccccggagcagccgggctgggcgagagcaggcatcgcggccgccccgagctctgcgcgctgcgtgcgttccgggtgggagtggcgggggcaggagcacgcacccacaaagcgaggaagggcaggggctacggagtgggggcaccccgaaagccttgagcccccgagtttgctcggttgagggtgttgggggcacagggatgctggcccccagctccccactggacaaggacctggccctcagcctccttcccctccaccccaggtcggccaggctggccctgccttgccctggtacagtgctgagccgggggcgcggggagagccttcctcactccacacccagtagctgtccccagctcagcttagaaaccctgcctgggggcagcgac

SEQ ID NO: 36274 - DNA, 1253 bp, Homo sapiens
  chr12:133100771-133102024
  hypo
cgggcagcctggccagggcctgtgagggctactgtgcagctgagcaggtcactagcccaccaccctgcccccggctcccgcccagtaaggctcagactcctcggggctgcatccctgcccggccagggcctcctccagtgtgggtgcctgctactgtgcggcttgatggacctcatgggccgggggcatttgacctcaggggcctgggtgacatcccttaattcgcactggcaccgtctgccttgtgtgcaccctgtcagccacccagggaggcctgttgctgcaggaggtgcacagagcgggcctctggctgagccgaaggtcggcagggagccaggctcatggctgcagcgagccacaccagccagtcctgggacgggtttccccgggctggggcgtgctcctgacttggatgactcaaagtaaagaacctcaccaggggccctggcatgcgaggcctgggggcccagatgtgctggggcgtgtcactacaaggtgcagaattgttccagatccaagttggccagagagggagaccgctgggcttccacgtgagtctgggcgctggctgtgcaggggcgtccctgctgggcgctggccagcaggagctctggcctctcacttccctcagctttgtgcaggtttgaaattatttccaagtaaaaaaagtaaatacatgcagggctcggggtctggtccctgcatggtcacttaacctgtctgcgcctctgttttctcatccgtgaaatgtaaaggaaaatagtttctactcggggccaccgtgtgagcaaatgtgtgagtgtgtgcaaagcgcccgggccaggccctggcacgcatcggcgcccatgttggctggtgtcaggggtggtggcggtgggcgtggggcgtgggggtggggtgaagggagtatgggtgctcccttcagcaggtgatgaaactgaggcacggggaggccgagcagtggcccaagggcccatggccagggtcaggcaggtcccaccaccacctcgctgcttgctctggcatggagccgaccgaaggaggtgctgtgggcacagccaggggacagtgggtggcactgaggctcgacctggaggtcatagccctgtacagccagatggggtggtgcgaaccagccagggtgtgggtggaggccctgcctgtggtccctagcacccccaggatgccttcaaagtcagcggcttgtggaaggggcggctccaagcacgtggcggttctcgtgtcactgagcc

SEQ ID NO: 36275 - DNA, 413 bp, Homo sapiens; identical to SEQ ID NO: 18300
  chr12:133111693-133112106
  hypo

SEQ ID NO: 36276 - DNA, 500 bp, Homo sapiens; identical to SEQ ID NO: 16344
  chr12:133121644-133122144
  hypo

SEQ ID NO: 36277 - DNA, 258 bp, Homo sapiens; identical to SEQ ID NO: 28503
  chr12:133481383-133481641
  binary

SEQ ID NO: 36278 - DNA, 784 bp, Homo sapiens; identical to SEQ ID NO: 23859
  chr12:1739048-1739832
  hyper

SEQ ID NO: 36279 - DNA, 801 bp, Homo sapiens; identical to SEQ ID NO: 25022
  chr12:22093660-22094461
  hyper

SEQ ID NO: 36280 - DNA, 46 bp, Homo sapiens; identical to SEQ ID NO: 18304
  chr12:25344059-25344105
  hypo

SEQ ID NO: 36281 - DNA, 72 bp, Homo sapiens; identical to SEQ ID NO: 18305
  chr12:2995019-2995091
  hypo

SEQ ID NO: 36282 - DNA, 600 bp, Homo sapiens; identical to SEQ ID NO: 28513
  chr12:30975325-30975925
  hyper

SEQ ID NO: 36283 - DNA, 891 bp, Homo sapiens
  chr12:4377809-4378700
  binary
cgtgggctcactctgcagctgcagttttcagcccttgcagtttagaagattctgcatgagcacggatgccacgagggtatccagcgagtgggaagggagtcgccctacatgttttcacatcgatttgtaaaactgttttgaaagggtatttctagatccatttgttccaaatgcagcaaaattcatccgatatcgctcacaatgcatgcacgggttatcttacatgtaatagccatcgtattaaccaacccagctgatactgagatggtgaatggggcgggggagcagggaggaatatgtcgcgcatgaaaaactccgggtgtaaaagtcaatgcagaactcactccccgaggaaccgaaaaagacattcacgactctcaagtggagagaggatagaaagtcaagtggcgggggtcgcgaccagtgatcgggatttcagtctgatctcagtacccagcggaacaggaccataacctaaagaaatgagctttttccggagcaaagagcggccccgatttcaaagtagaaaaaataaactgcttgggggtggaagatggcgaggggcggggggcggggagggaggcgggtcgcggcgctggctccggggtccgcggcacggcctcctctgccgcgctgcccagggcccggaccctgcccggcgctgcgcccaccgcgagggtgccagacccgccgcgccgccgccgcgctctcccagccgcggccccctcccccgccgcttcctcttgctctcccagccccttcccccacgtgtggatgacgtcaaaattccgcgaaaaagccgcgtggtggctccccgagcggaggcgcgattccgccgcccagcggccccctcccgggggcgcctggagggggagaagggcggaggcggcc

SEQ ID NO: 36284 - DNA, 1984 bp, Homo sapiens
  chr12:4378715-4380699
  binary
cgggaggcaggaccccccgacgccgaccgccggacgccccccgccccaaagcttattggaaaattcacttttgtaaagcaaatgtatttccagagctattttcggccgcgtgaggcgtgtcctaagctgaatcagacaggaagagggggaagttcgggtcttttaattttttttttttccgaagggaggggagtgagatgctaggtgggtgacagacggcaggcgctcgccttcttaactcacgcctgtcgcatctgccgcctcagtaatccagccccgtccaagccgaaattcgccgaagggagtgcggatgcacaggcctggcggactctgcccccctccagaacgcagcggcccagcgccccggcgggcgcggctgcgaccagagggtcccggaagcgagtgaacacctgcaatcgcactgcccgtccccacccaccctgctcccccgtgctctccgcttcccgacgttttcctcttctccttgtccgcatttttctactttgcctgcactccctccttcctcttgatgtgcctcctatgtgtcccctcggatttatgtgtcccctcgcattttgccagtcgggttttcggttttgattgaccgtccatccctccacggagaaacacaaacacagctccactctttgggggagccgaggggaaggcagtggctcccatttctgagcctgaactcagtcactacccgctccccacctggcctaggcgcccctgcgcggagaaggcgggactcgaactcgcgctgctcccgggccttgagccgaccgcggaatcacctggctgggaggcatcctccaggtaagcttgggagtatgtgtgcttagtgctgcaggctcctgcagaaaagtgcctataaacacccaacaccctgctgcaccctccacctccaggctttgtacactttccaaccgaaactccaaaacgctagcgtagagggtggggagccggccggaaaaagaataaaagtccaataaaactggcgttcgctaaagtttatcaccagtcctacatgggatatatatatatgtatttttttttccgtgaagggtgaaaaggagataaggaagaaccaacaatctaccccctcccgccgccccccacccccgcgccacggtgatcagtttggacttcaaagccagagcacaggctcttgcgctttttcttgaaaccgaagtctacactgaaagaaagtgtgcacttttgcctagaaggcaacatgcgttttcccgcgtgctaggtggagtgcattttaacaagacattagggttttaacacatggctggagtggcgaccaaaagggaaaactcagtttccagtccaagcctcctagagacattcctgccaacctccgcaccctctcacgccccaccccacgtgtgagagtctgcaaaaccaccggggattggattcgatggcgagcttcacgctcgggaacagtcagtaatcggaaggggaagtggacaggggaacttcaagaggcgagcctgccacgcgggaagcgcccgaacttgcgggtctccatgaatgcagagggcgccgggaagggggggcatccggccgcgaccctctctgcccctcccattcgctgcccccctccccgctggaatttctctgtaaagcaagacggagtagggggagggggagagggaaggggcgagagggccctcggctcactcccgagacgtgaggactcgccacccaggcattctcctcggggtgggctgggccccgggacgaccacccgcttcttcctcgcccccgctgcccccacttcgggagacccagagctctggatgcctttccccggagaagggggggtgtgcggagtcggggtggaagagaccttgctcgcagagctatatcaagtgatgtccagaggctgggagccccggcggcctctgtcccttgcctgtcgggttagatttatactttaaaaatacctcccgccctccctccttctctc

SEQ ID NO: 36285 - DNA, 990 bp, Homo sapiens
  chr12:4380708-4381698
  binary
cgctgcaactttctttgatccgctcaaaggtggcttaggtgaaattggagtaattcccttatgggggtcttaaaatgtaagtgaatgtccttatccggggtgactcaaaagcttaagtcgggaagcccaacgtgactaaaaccaataggtgattgttcggggccgactgtgtgcgggtgtacacggtattcggcccgggtgtcatccgcggcgctggactgtttcattttgagtttgcaacttgggtttttcagcgagctttttttcttcctgaaagctaatggcttccacagcaattagacattttcctcgcccgccccttccctcccctttctttacatataggagatgggatactcattcccgctgctattgataaggtcggaggcggccgggcctctccccagctttcgcccgccccagcgcccgctctccctccgccctcccttggcttccttttgatgtagtggggaacgcgtcctactaaaaaaaaaaaaaaaaaaaaaaaaaaaaagtaatctgcccggtaacaatcagcgcgcagtagcaggagccccagagctattggctatgcaaatagagggaggggagacggcgccccaaactcttcctcacccttttaaagcgatatcccctcctttcccccccaccaccccttccgccccaccctcgtttaaagaggctggctccggggcctgagttaatcgcttgcacctctagtttattcgctcccctcctccgccttgcagggaacctagtgtacggctcacccagcccgcgccccaccccgccttgctggctctccgcgcccctgcccgggccccctctctcggtgagggaggcactcagtcggcctcggtgtgcccagagagctcgagccacgccatgcccgctgcacgtgccagcttggccagcacatcagggcgctggtctctccccttcctcctggagtgaaatacaccaaagggcgcggtgggggtggggggtgac

SEQ ID NO: 36286 - DNA, 945 bp, Homo sapiens
  chr12:4383269-4384214
  hyper
cgagacgaccgcgtcctgcagaacctgctcaccatcgaggagcgctaccttccgcagtgctcctacttcaagtgcgtgcagaaggacatccaaccctacatgcgcagaatggtggccacctggatgctggaggtaggtcggggggtggcgctcgccaggagccaggacccctccggatgctcgggtccccggccggagccctaaacctgggagagggcaatccccgcgccggcctcccggctcctgtgcgggagtttaccgcgcgccttctggcgagacgcgtggctttatttctgttcctctccagataaactggggaggcagaggggggaggaaaatctgggagaagcgaggctgtcctgggcgggggtaggggagcatcccgcgcgcgtgttcctgcatgtggctgcctcttcttcccacccccctcgcgacctgtcttttgcgaagccgccgcggctgcttgcgctgcggccaggaagagagtcggggcctgaaatcgggaccccgagtagaaaggcaaccccccccaaaaggccagagcaaattcgtcttggcctcaggtccccgcctgtggtcgcgactccgcgctggcacttcaccggggaggtggagggaggagggagaaggagagaaacggggaattcgggagccccggaagtcccattgaagaaacgcgtgtttcaggggaacccaaaagaaccgcttcttgcccctcactccaagtctttgcccagcgagccgtgtgcccacgtatgcacagctctggacctgccgtggtttcgccatgttgctttgcaaactccctttggaaaggctgggaaacgtcgcccgcttaccctcgcaccccattatcccggccaccccacttctaatcgtgccctctcccccaccccccacctcacgaagattacttacagtttggttttccagcttcctcggtgc

SEQ ID NO: 36287 - DNA, 182 bp, Homo sapiens; identical to SEQ ID NO: 18313
  chr12:4672181-4672363
  hypo

SEQ ID NO: 36288 - DNA, 1513 bp, Homo sapiens
  chr12:48576803-48578316
  binary
cgtaggagcggtagggtctcataaaggagggagtcccatccttcccccgctccggtgatttctatagctagagggctgatttactgcagaaacctccgtagcgccctcctcctgcctctgcaccgtcaggcccggtgggtccggctccagagcgccaccgtgccccagctcaactctgggatcattagcaacagcctctctaccctctccgctttcctgcgcatcgctggaggacagggaggcaggactcgactttagcgccatcctctgagaaaggaatgcgggctggaaaaatctttccagggcagtctcgctgggtctcataccccggctaggggagggacgatctctcccggacttggaggtttctgcagcagacggctctctcatacttccctattaaacattgcgaccacacgctctttccagccttggccgaagccactgtagcgtcccctctcctccccccaccccgctagtccagactccagagccccactgcagcttccagccatcctccctttttcttcgccacttcctggttaccatggagacacacgtcatttacgtgccgtgcgtcgccttggaaacagaggagcatccgcgacacccccgggagacccaccccagctgctgctgccacactcgcgggcgctgcccggtaatggcctgggggagtcccgagtccgacgcgccgctggcctcagcctggacgcggacccctccgcgagcgcgtctgtgacccacggaaccggcaggcgctctctgcttgtggcgcccagagggcggcgctgacacgggcgcgatccgggaggcgaggcagggcagggcactttcgtcccggggcgatcccaagagacgccggctctgggaccctcgccgggtcctcgtcccgcagcctcttctcggcctcccgcgatcctgcctgcgccctctgcccaggactcgtctctcacgtcggctccccgccagtctcgggagcctccgcttccctcggctcccgctagcccctcccgggacctctccccctccaccccctcccccaccccggaggccgggctggacgcgacccagagcctccgccacccgcttctgccactcaatggaggacggtctgctggagatcatgaccaaggacggcggcgacatgccggcgcccctggaggtgtccaccgtgccggcagtgggggacgtgatctccggggagtacaacggcggcatgaaggaactgatggagcacctgaaagcccagctgcaagccctgtttgaggacgtgagggccatgaggggggccctggacgagcaggcctcgcacatccaggtgctctcggacgacgtgtgcgccaaccagcgagccatcgtctccatgtgccagattatgaccactgcgccccgccagggcggcttgggcgtggtcggcggcaaggggagcttccagagcgacccccaagagccggagactccttcgcctgggatcggggacagcggcttgctgggtcgcgatcccgaggac

SEQ ID NO: 36289 - DNA, 1393 bp, Homo sapiens; identical to SEQ ID NO: 18315
  chr12:49739246-49740639
  hyper

SEQ ID NO: 36290 - DNA, 419 bp, Homo sapiens; identical to SEQ ID NO: 18316
  chr12:49931623-49932042
  binary

SEQ ID NO: 36291 - DNA, 660 bp, Homo sapiens; identical to SEQ ID NO: 14589
  chr12:51785160-51785820
  hyper

SEQ ID NO: 36292 - DNA, 1176 bp, Homo sapiens; identical to SEQ ID NO: 25043
  chr12:54144782-54145958
  binary

SEQ ID NO: 36293 - DNA, 929 bp, Homo sapiens; identical to SEQ ID NO: 26277
  chr12:54398724-54399653
  binary

SEQ ID NO: 36294 - DNA, 803 bp, Homo sapiens; identical to SEQ ID NO: 25048
  chr12:54422126-54422929
  hyper

SEQ ID NO: 36295 - DNA, 2091 bp, Homo sapiens
  chr12:54426536-54428627
  binary
cgctgtgggcttgttgtcccggctacccccaattccaagaacctttttttttttttccctcccccttccctctttctctctctcactccctctcccccttggttgggctttgccaacatatcgagatgcttttcgccggcttccatcactaacctcccggaggtcatcaagccaaatttatgagtggccgctcgagtcacgtgactctatttaaggctcccttatttgggaagagcgcataggataaagaaagagatatctccacctataaattgtccactttggagaacaaaaaacccctcaacttcaaagagtcacaaatcacccttaatcaaaaagggtgcagaaatttttttgggccctccccgccatgagctcctacgtagccaattcattctataagcagagccccaatatccctgcctataacatgcaaacttgtgggaactatggatcggcctcagaggtgcaggcatccaggtactgctacggcggattggacttaagcatcactttcccaccgcctgcgccttccaactctctccacggggtagacatggctgccaacccccgggctcaccccgaccgccccgcctgcagcgccgcggccgctccgggacacgctccgggcagagacgaagcggctcctctgaaccccgggatgtacagtcagaaggcggctcgcccggcgctggaggagcgagctaagagcagtggggagatcaaagaggagcaggcgcagacagggcagcccgccggactgagccagccaccggccccgccacagatttacccgtggatgaccaaactgcacatgagccacggtaaactttaggacttcattttgcgctctcgggtccgcctgggttttataggccatgcggggcaaataaagaaaaaaaacctgcggccataaattttacgatccaggcatcaatggctcgtaaaactgtccactaaaaggcttagaggctgtgtgcgcccaaatttacgacgacataattggatcataggaacaaaacgtgtataaaaggcaatattcaatttttgggggagagggagggagttaaaaaaatagagggatctgaagggtgaggagcgcggggctccagagcggggatccccccgcggctccctccctccctcccctgcggagccggctccgccggcgcttgcggctccggaggattccagcgactcgggaggggcgggaggggggtccccggtgctcggatctcgagggtgcttattgttcggtccgagcctgggtctccctcttccccccaaccccccctcagcccctccggctgcagagtgaaggctgcggtggaaagtttcctgcctgggcggaggcgcctctcccggggctgggctgggctggcccgcctgcggcccgcgtggcctgtcttgcggctctcgcctcctctccctccggccgcgggtgggggcctgggctggggtggggacgggggaacgctgcaagctattcaccccttcctggcttggggtggggtttatgttccagagacggacggcaagcggtcccgaaccagttacacgcgctaccagactctggaactcgagaaagaattccactttaaccgctacctcactcgccgcaggcgcatagagatcgccaacaacttgtgtctcaatgagagacagatcaagatctggttccagaaccgcaggatgaagtggaagaaagattccaaaatgaaaagcaaagaggctctttagaggcagcgggggaggcccgcagagcgcgcccctagccggttcctgtccctgcgcctttccttttcgcctttcctctctatatttcgggtcgggggcaggtgctggagcactgggctcccgggccccacagacaaaagcgcttttccttggcattccgcatccctaccgacccagggttcccgcggggctgtcggcgctgccccatctcccctcagctcggctcagctcggtacccggggcccagggcaagctccgcaggacttccccggagggctgcggcgtacaggctggcgcagaacgaaccttggcctgggccgtatctccggctcccagcctcagcgcggccctccc

SEQ ID NO: 36296 - DNA, 940 bp, Homo sapiens
  chr12:54446894-54447834
  hyper
cgagacttctgaactctgcttttgccaaccacttcctgtctctcttcagcgggggctcaacccccagacctccagaaatgacgtcagaatcatttgcatcccgctgcctctacctgcctggtccagctgggaccctgcctcgccggccgcatggccagagggttgggtgagtgtgtatggggaagaggggctggactctggtatccttggatggggggcactccaggctctccagcctcctcggctcagcctgggcccctccccatccaacatccactccagtcctcattcaacttcctcttcctgcgaaagaggggcgctgccccgtgacctacacagactgagacacgatcgccatgaatggagacctctggaaaagctcaggagccgaggcccacggggcccagcagaggcctgaggggagaccctgggcgggggctgaatcactgcctcccgacagtcccccaatgcccgggctttggaggggagccgggagcttcccatctccttttgcaggggagggttgtcagtctggcgggatgtgcactgggggcactccaacctctgctagctaaccccacatcaccacccacccccgcctcccagcaccaccaccaccacacacacaaaaaaattggatacattttgaataaagcgattcggttccttatccggggactgggttgctccgtgtgattggccggaggagtcacatggtgaaagtaactttacagggtcgctagctagtaggagggctttatggagcagaaaaacgacaaagcgagaaaaattattttccactccagaaattaatgatcatgagctcgtatttgatggactctaactacatcgatccgaaatttcctccatgcgaagaatattcgcaaaatagctacatccctgaacacagtccggaatattacggccggaccagggaatc

SEQ ID NO: 36297 - DNA, 852 bp, Homo sapiens; identical to SEQ ID NO: 25049
  chr12:54520189-54521041
  hyper

SEQ ID NO: 36298 - DNA, 428 bp, Homo sapiens; identical to SEQ ID NO: 33364
  chr12:56558022-56558450
  hypo

SEQ ID NO: 36299 - DNA, 172 bp, Homo sapiens; identical to SEQ ID NO: 18330
  chr12:57625988-57626160
  hypo

SEQ ID NO: 36300 - DNA, 419 bp, Homo sapiens; identical to SEQ ID NO: 25051
  chr12:57943755-57944174
  hyper

SEQ ID NO: 36301 - DNA, 929 bp, Homo sapiens
  chr12:65218018-65218947
  hyper
cgcgcctctctaatctgccaggaaataattcaacgcaattcgggctgaagcgtgtgcctcgccgcctgcggttgggtcatggccccttctgagactgctcggaagtgggagaggatgcttgcccttacgggtgttctgcccctgagactggcgccccttggtgctccctctgttccctcccagatcttgggagaagcacggacatctctgtttctgcttttggtccccgaacgcagttacgcgcccactggctccctgtctctggcgcttctgggcacgggggagctggggcggccccgcctgcgcacggcggtgccgggattgggggcgggcacgccgcctccgtctcccacgcgctcgctcgctcgctcgctcccgccctccccgcctcgagcgatctcctgcctcagccttgcaggctccgcactgcagatgcctgctggcttccctgcgctcggcggctcccgcggtgccccgtaagtccccgtgaccctccagcaccagccggctgtgcgctccctgctcccacgggccggtcagccgcagacactcacccagctccgcgagctcagccgctcagcgagtggggtagcggggaccgagacggacggtagccgtgccagagcccggggcgctctcggatgcggcaggacaagctgaccgggtctctgaggcgcggggggagatgcctgaagcggcagggcggcggcgtgggcaccatcctgagcaatgtgctcaagaagcgcagctgcatttcccggaccgcgccccggctgctgtgcaccctggagccgggtgaggaccccagggctgcagatggggcgctgtaaagtagcgccggggctgcccgcgcttctgccttagcctgactccgtctaggccggggagctctggggaaagtccgcgtgccacctggtgcggggcaccgc

SEQ ID NO: 36302 - DNA, 712 bp, Homo sapiens; identical to SEQ ID NO: 27584
  chr12:66582719-66583431
  binary

SEQ ID NO: 36303 - DNA, 398 bp, Homo sapiens; identical to SEQ ID NO: 29817
  chr12:66629005-66629403
  binary

SEQ ID NO: 36304 - DNA, 72 bp, Homo sapiens; identical to SEQ ID NO: 35402
  chr12:72165419-72165491
  hypo

SEQ ID NO: 36305 - DNA, 91 bp, Homo sapiens; identical to SEQ ID NO: 18332
  chr12:76878986-76879077
  hypo

SEQ ID NO: 36306 - DNA, 32 bp, Homo sapiens; identical to SEQ ID NO: 18333
  chr12:76879282-76879314
  hypo

SEQ ID NO: 36307 - DNA, 474 bp, Homo sapiens; identical to SEQ ID NO: 29819
  chr12:81102174-81102648
  hyper

SEQ ID NO: 36308 - DNA, 563 bp, Homo sapiens; identical to SEQ ID NO: 22786
  chr12:8171309-8171872
  binary

SEQ ID NO: 36309 - DNA, 2345 bp, Homo sapiens; identical to SEQ ID NO: 26291
  chr12:94541793-94544138
  binary

SEQ ID NO: 36310 - DNA, 2061 bp, Homo sapiens
  chr12:99287438-99289499
  binary
cgtgtctctaatctactgatccaacgtgcccggcgcacataagcagcaccgcgactgaatttcaagtcttctcaaactcacacctcagttgctcagagaggagaaatgcagcgaggactcgccttcctggccagtctctgaaaacgcgaaaccttcctgagctgtccatttgttttaggggctgtttataaacggctggttttcttggaggaaaaataaacaaataaatacggggcgatggcagcatcctgataaacacaggaccttgtttggcttttggcaagttgtaacctggagtaaaatcacatccaagttacaagcacgcaaattggaatttcgctggaaacactgacccgaccttcaccgaagcagcaaatcgcagtctctgctgctctgctcctgctctccaaggcttaacattggaaagtccatgcccacgtccccctctaattaatcaatgtagaaagaaatacgagggaagagagagggagcacactccacaccaaccttgccagcttctattcttcctgctattccttaaaggcgatgcacagcgcacctggaaattacgtggacttggcatggctttttaatattaaagacaaacgacctttggaaaatatacactgttaaagtcaaaccatttggagagacacccagcaatttacctcctcaaactcctcggaaccccaagaatgaggaaaggaaatggaaaatgcgcttaacccgggggtggtgggggaatcgataaccagaacaggtttgaaaaaaaaagcccccctcccgccccctccgtagagaccgctagctgaggctgcaacacctgccccggcaaagcgtctccgcagccttcccggcttgcccgactcggcttcctccgcctctgccccggctgcggcaccacttcttggagccacgtctcggcgagcgggggccgcggagcgagggggccgctgtgccgctactcacccgagccgctcgggctggccgcgagccgggatccgcgagggctggcgggctctggcccccgaggacgcagacatgtggcttgaacctccgctcccctagccgttgcctctgtgcatctttctgggcgcccccagcgaatgcgagcggcgaggcgagggcgagcgcgccgaggaagggcgggagaggcgcggagcttggccgcgccgcgctgcgccgagcgccgggctctccccgcgagctccccgggcccgcgcgcgcgccccccactgcccccgccccccgcgcggcgcgtgccccccaccccccgccgcgcgccctcgcacccgcccggctccacgcggcgcgcgcctgccctggcggcagcggcggcggcggcggcgcgtcctcccccgaacgccgtctccagggctgctggctgcgctctccattgttccgcggctgctgcccggggtgggcggcgaggcgggggggaggtgtcggcttggccgccggggagggcttaccgctcgggcggaccctcactgcgagagcgatgcgggcccaggcgcggcgcgcgggggctgcagggcgcctagcactgggggttgccggcgcgcgggggcctcctcctggctcccaggcactcgctgctgctgggcgcccctcgcatcctcggttactatggatatctcgctcctccgccgccccctccgcgcactccgggaggccgccggggcggtagcagcggcgcggctccgcgggtgcccaggtgaccggctcggcagcggcagagcagtggcagcagccgccactgccgctgttactgcggtcgccgccgctggagagaggaggacgaggagggcaaggggcagaagcaggtcctgctctgtctgccccagaggccacctcgggtttcttctcactaaccaagcgacttcgtgtttacctcgcaggagacgcctcggcagtcctcaacttgtgtgcgccggtggccctctcctgtgggacttgcgttccagctgttctcagagcgggtatgatcggcctccagtagacttggagggtcacgggtgagattttgataaggttcaaatactcctcactcctgcctcc

SEQ ID NO: 36311 - DNA, 519 bp, Homo sapiens; identical to SEQ ID NO: 34276
  chr13:111330283-111330802
  hypo

SEQ ID NO: 36312 - DNA, 687 bp, Homo sapiens; identical to SEQ ID NO: 18342
  chr13:111880810-111881497
  hypo

SEQ ID NO: 36313 - DNA, 91 bp, Homo sapiens; identical to SEQ ID NO: 18343
  chr13:113413685-113413776
  hypo

SEQ ID NO: 36314 - DNA, 306 bp, Homo sapiens; identical to SEQ ID NO: 18344
  chr13:113477621-113477927
  hypo

SEQ ID NO: 36315 - DNA, 535 bp, Homo sapiens; identical to SEQ ID NO: 18345
  chr13:113497181-113497716
  hypo

SEQ ID NO: 36316 - DNA, 1101 bp, Homo sapiens
  chr13:113622881-113623982
  hyper
cggccagccacggacccacgcatggacccagcgacccacggacctgcttacctgggcgcggcgcgggtggcatgcggccacacggaaggggcgcgctgggctgctgcggcctctgcagcttctacacctgccacggggcggccggaggtaaagggaggcggcggccaggcgcggccccgcggaggcagctgcactcgctcggtccactcgcggcttcgcggctgcccgcaaaccaggagggcgtggagacccggaaccggggggaagggcgggggcacttgtgcggcacccgcggggctcccaggggacctcggcggtgacacgaatttctaggtgaccttggcggtgacacgaatttctaggtgacctgtgtgatacactaggtgacctagtgacacaggtgacacttccaggtgaccgcggcggtgacccgcggggctcccaggtgacctcgttggtgagccccggggctccccgacgaccgcggcggtgacacgcggggctcccaggtgaccccggcggtgcactcacaggactcccaggtgacccgcggtggtgacacaccggggcgggcgcgcgccgcttccgcttccgccgagccgccccccgccccccgcggcgcagcgcgcgcccccctcccggtggcgcggaaccaatcctgggcagggaggcggcggctggaggctgaaagcgctgccgtggccccctccccgcctccgccgcgccccctccgcactcgcacggccccacccgcaggcgccccccgtgcggaggaagcggatctgccaggatcatttttgttgtgtcggaggatgaggttttggctgaggactgaagagatggccttggaagaaatggtgcagagattaaatgcggtttccaagcacacgggtaggaggagctgctggccgtcagtgatctgtgcttaagcttgacatcatgggctgaaatgtggggaaatgcgtctgatttttgtaagccgccctcgtgttcctttctagccgtggtagctgtgacatggggggcactggttggcagctggtgtgttttcagaggctgtcggcgatcgtatgctgcccgggatagtcaaaatgactgcac

SEQ ID NO: 36317 - DNA, 323 bp, Homo sapiens
  chr13:113825842-113826165
  hypo
cgtttgagcattatgtccccttgaaaatcagactgtaaagaactgacgattgttcatgatttcagattttaacagaacgagccaagacccgctgatgatcaagataacgcacgtccatgtgcacatgcggtatgacgcggacgcgggggagaatgacctgtcactgctggagctggagtggcccatccagtgcccaggtgcggggctccccgtgtgcacccctgagaaagacttcgctgagcacctcctcatcccacgcaccaggggcctcctcagcggctgggcacgcaatggcactgacctgggcaactcgctgaccacgc

SEQ ID NO: 36318 - DNA, 222 bp, Homo sapiens; identical to SEQ ID NO: 33385
  chr13:114502726-114502948
  hypo

SEQ ID NO: 36319 - DNA, 839 bp, Homo sapiens; identical to SEQ ID NO: 29832
  chr13:20735265-20736104
  binary

SEQ ID NO: 36320 - DNA, 190 bp, Homo sapiens; identical to SEQ ID NO: 18352
  chr13:25026495-25026685
  hypo

SEQ ID NO: 36321 - DNA, 126 bp, Homo sapiens; identical to SEQ ID NO: 15558
  chr13:28745545-28745671
  hypo

SEQ ID NO: 36322 - DNA, 243 bp, Homo sapiens; identical to SEQ ID NO: 10291
  chr13:28745848-28746091
  hypo

SEQ ID NO: 36323 - DNA, 907 bp, Homo sapiens; identical to SEQ ID NO: 22792
  chr13:29394053-29394960
  binary

SEQ ID NO: 36324 - DNA, 541 bp, Homo sapiens; identical to SEQ ID NO: 32550
  chr13:33000891-33001432
  binary

SEQ ID NO: 36325 - DNA, 741 bp, Homo sapiens; identical to SEQ ID NO: 32552
  chr13:42032017-42032758
  binary

SEQ ID NO: 36326 - DNA, 915 bp, Homo sapiens; identical to SEQ ID NO: 31099
  chr13:50704210-50705125
  hyper

SEQ ID NO: 36327 - DNA, 141 bp, Homo sapiens; identical to SEQ ID NO: 18361
  chr13:52335934-52336075
  hypo

SEQ ID NO: 36328 - DNA, 438 bp, Homo sapiens; identical to SEQ ID NO: 18362
  chr13:96085837-96086275
  hypo

SEQ ID NO: 36329 - DNA, 782 bp, Homo sapiens
  chr13:96204691-96205473
  hyper
cgctccaacaagcgagcccttctccgcggccctttggctcaggggagcgcaggccggccttcctcccgcacgcgggcgcgggccagctgcagatggagaacccggggggcgaccgcgagccctctgaggcccctcaagggacagggcatgggtgtgaggggtcgcgtgcgccccctggcgccgggtccgctgggcggggtggtgggcggggacggtgggcggaggcggaggcgggaggcggagccccggggttgggagtgcgggggtcgcggcgcagagtgggagccggagagcgagcgcggctgcagccggcggcatggctagcacggcttcggagatcatcgccttcatggtctccatctcaggctgggtactggtgtcctccacgctgcccaccgactactggaaggtgtctaccatcgacggcacggtcatcacaaccgccacctattgggccaacctgtggaaggcgtgcgttaccgactccacgggcgtctccaactgcaaggacttcccctccatgctggcgctggacggtctgcatccccgcggcccccgccctcagccctccttccttgatggccagcccgctaggcgccctctcgcccccaatacccccagcgggacccctagactggactcctctgaggcccgacccgtctctcccaacagggccttagggagccagggacgctcctggtgcccgccctctcctgatggctgtctcgcggggcgcctgttcgagcctgggaccccgggaggggggacacgcagacaggccc

SEQ ID NO: 36330 - DNA, 234 bp, Homo sapiens; identical to SEQ ID NO: 18364
  chr13:99034903-99035137
  hypo

SEQ ID NO: 36331 - DNA, 664 bp, Homo sapiens
  chr14:102247600-102248264
  hyper
cgtatttcccgggaccctggcttctgtcctcagggaccccttcagaccttccccaccctccgaagcctcaacccgccctgcgcctcccggtggcacagcgaccttggcggctttggcccctgagccgctaggctgccaaggcgcgctgtgcgcgtggggccaggctcgacctcactcctgttgtcgctgcagacccgcgtgggctcccgccgggccctcctgccgccccccagcctccccgcccctgcccttgccagcctgcgccttcctgggcgcctgacgcacccctctgccccaaccacgttttctcaagagtgttgtctgtcccggccttccaaggagacccttagctcccgccggccgcctccggagcctccggcatgggccccaggccggggtcccgcctttgccccggcctccgctgcctcgccccggagcccggaggaggggagccggccacccggggaagaagcggaggacgccgatctggcctcctgcgttgcgcgctccaaccctctgcttggccgcccgcgaaccgcgctctcccgtttcctttccgtcccgtctcgggggcttcatcctccagccgtggccgtggccgtggccaggtgtaccggagcggcacccaggagcccgccctagcacccgctcccgctcccacctc

SEQ ID NO: 36332 - DNA, 119 bp, Homo sapiens; identical to SEQ ID NO: 15563
  chr14:102691860-102691979
  hypo

SEQ ID NO: 36333 - DNA, 257 bp, Homo sapiens; identical to SEQ ID NO: 18368
  chr14:102968257-102968514
  hypo

SEQ ID NO: 36334 - DNA, 492 bp, Homo sapiens; identical to SEQ ID NO: 23934
  chr14:105511981-105512473
  binary

SEQ ID NO: 36335 - DNA, 423 bp, Homo sapiens; identical to SEQ ID NO: 13401
  chr14:105689521-105689944
  hypo

SEQ ID NO: 36336 - DNA, 312 bp, Homo sapiens; identical to SEQ ID NO: 29851
  chr14:24808635-24808947
  hyper

SEQ ID NO: 36337 - DNA, 1327 bp, Homo sapiens
  chr14:36002437-36003764
  binary
cgccggcatttctcactcaatctactccatgctaaacaggccggttaggaattaagtcatactctgggtagtacaagtggaaagtgtgaacagagaaaccactttatgcgaggacagtggaaaatgagatcctcctttcctctccctactcctgctcctatcgagaagcacttaagagcgcagacgcccaggacccagccgcgctcgggcgtcccgactcggaggctggcggcgggcaggcacgctctcccgcgctgagagcccttctgcggagatgaactctcgagtgtcgccgccgcgcgcgggcccgatcgataccggcgggcggacgtgctcccgccgccgacagcagccacagggcggtgcagtcagctgtccggccgctcggtcgcacttctcatcagctcaatacccgcagaggacgtgcaccggttccctcccggacacccaccccgtggtctccgccgcaccttctgcccaccgccccttccgctcggccgtccggcgcagagcgggagcttttcagccagacgccctcgcgttgggggcagccgggtcccggcccgagcggagggcgtcgtgaggtggccttttcgcccggctccccagtgggacgctccgcggaggcagccaaggcggggagtgtcgagctccctcacactctggaccttaccttctggcgtcttcgcccgggaggctgcagggggaggcggacccagccggccacaggggcaggttcgcggcgctgtgaggcggggctgggcgtgcgccgccgccgccgccagattcgtctactccagtgaatcggcacgggagaaagccccgcccccggcgcccgctcccactcctgattggccgggccagcccggggaggcccggcgggaccccggcccgcgtctcagctataaagatagccccggcatgacagccgcggcgaagctcttctagttcatctgctggccggctctcagtccccgtggcgccccctttcctcttgtcccagagcgctctcgactccaccatgccaaggggattcctggtgaagcgaactaaacggacaggcggcttgtaccgagttcgccttgcggagcgtgtcttccctctgctggggccccagggggcgccgcccttcttggaggaggctcccagcgcctccttgcccggcgcggagcgggcgacaccccccacccgagaggaaccaggaaaggggttgacggcggaggcggcccgggaacagtcggggtcgccatgtcgggcggctggggtgagcccggggacgggcgggcgggaaggcgcggagtggcgggcgggtggcagggaaggtccc

SEQ ID NO: 36338 - DNA, 102 bp, Homo sapiens
  chr14:50287112-50287214
  hypo
cgcgttgtcctctggtcactgcatgacttcgctgaagttccttaccctctccgtttcagattctgaaagtattgtatcaagagctaataatcggctgggcgc

SEQ ID NO: 36339 - DNA, 50 bp, Homo sapiens; identical to SEQ ID NO: 18376
  chr14:50574258-50574308
  hypo

SEQ ID NO: 36340 - DNA, 260 bp, Homo sapiens; identical to SEQ ID NO: 7958
  chr14:52327346-52327606
  hyper

SEQ ID NO: 36341 - DNA, 126 bp, Homo sapiens; identical to SEQ ID NO: 18378
  chr14:55522633-55522759
  hypo

SEQ ID NO: 36342 - DNA, 454 bp, Homo sapiens; identical to SEQ ID NO: 25100
  chr14:60794412-60794866
  hyper

SEQ ID NO: 36343 - DNA, 417 bp, Homo sapiens; identical to SEQ ID NO: 32572
  chr14:65016491-65016908
  hyper

SEQ ID NO: 36344 - DNA, 126 bp, Homo sapiens; identical to SEQ ID NO: 31164
  chr14:69245863-69245989
  hypo

SEQ ID NO: 36345 - DNA, 869 bp, Homo sapiens
  chr14:70655247-70656116
  binary
cgccgccgccgccctcccgccggggttcgtgggctcgcagctgtcagggagctgcggggcagcgcatctggagcgcggggtctgggagggagggtgtctggggccagggcgaggggccccgggaggggtccttccgcacggatttcagaaagagggaaaccccgacccagagcggtgactggaatctacgcccgggagaggcccggagtcccggccgcgggcggcgggggattcctgcaggaaggggcaggaaggcaagcagcccggcgcgccctggcggctccgagggacctgggctcgggcttgcggtcgcgtcgcctgggctttccctgggctgggagcgcgccgggtctccgccttgcacgctgtcaccgcgggagacgtctcggcctcgccgcgcgcagaggggacgcgcggagaggctggtttctgggcgagcggagagctttgcccattaagctgccggaagaagccaaatcaaaaagccaatctccaagcctccaaacggaacgtcaccctatcagctgggagacagcgccgcactgactgacaagccgcgcatatttatcctcgcgcgcggaggggagactctcagaacgctcctcgaccagcagcgaggaagtcgagcccgcatcccgcatcccgcatcccgcatccagagcccccgagggacgaattcagatccaacccctgccccgcggccacccaccctagtcgttggagcctggcgcccgcgcctcccggccggcagcacgtcaaaacggcggcgcgtcctgacctggattccgccgagttgggagctccaggcagcaggcgggcgcgcggcaccggctttccccttgtcctcaggagacgctgcctgcaattcc

SEQ ID NO: 36346 - DNA, 978 bp, Homo sapiens
  chr14:72398613-72399591
  hyper
cgtgtggtgtgcatgttgaatacataaaaatgacgaggttaggaacaatatcgctgacggtcgcggtgtcccgttttaatttagagggcgccagcaacacgtcagtgagggagattcagaagccgccgggcacctcaccccgggccgggaatccctaagagaaccttgacgccgctgaagtttccggaccgggccagtttggaattgacgaaagcagcctccgcccggtcgagccagtctctcggttttctcggcggcttcttgaggatgaggcatttctaggttttctcctcctcgagcaaatcacggtctgcgccttccgcggctctgggaacaggtgagccgtgcggcggcgcccgcgggacgcgctcaggtgccggtccccgcccgccggcccctccctgcagcacgcggtccgggcccaggtgccggggcccaggtgccggcgcccaggtgcgcggggcacggggctgcagctccgctcggcatccgacagcgggcgccgctgcagcagctcgcgggccgcggagctgaacggcttcgcgagttggggcagctcctcgcgctcggccctgctcggcggcgagagctccgcctgggcgccgcgttcctacagccgccggagccgccaggcgccgagggaacggacagacctccgcgcacccttgccgaccggggcgggcagaggcgggcaagcggcgaacgcctgggagcgcggagagccaggccagcccggagcgcgccggggacaccctgtgcgccccgagtcccggcaccatgcgacccgccgcgcgtcctcgcgggcccggggcttcgctcttcgctcgctgagcccctgcgctcgccaccacggaaactcggaaagaggaggcgaggctgtggggagcggcgcggagacggactagacttcccctccgcccccaagaggctgccggtccccggttccctgggcttctccagctttatcatgaacctggc

SEQ ID NO: 36347 - DNA, 274 bp, Homo sapiens; identical to SEQ ID NO: 18383
  chr14:81879122-81879396
  hypo

SEQ ID NO: 36348 - DNA, 438 bp, Homo sapiens; identical to SEQ ID NO: 18384
  chr14:89627945-89628383
  hypo

SEQ ID NO: 36349 - DNA, 246 bp, Homo sapiens; identical to SEQ ID NO: 23078
  chr14:89817855-89818101
  hyper

SEQ ID NO: 36350 - DNA, 620 bp, Homo sapiens; identical to SEQ ID NO: 25105
  chr14:90084014-90084634
  hyper

SEQ ID NO: 36351 - DNA, 136 bp, Homo sapiens; identical to SEQ ID NO: 13440
  chr14:90871545-90871681
  hypo

SEQ ID NO: 36352 - DNA, 267 bp, Homo sapiens; identical to SEQ ID NO: 18387
  chr14:91755357-91755624
  binary

SEQ ID NO: 36353 - DNA, 414 bp, Homo sapiens; identical to SEQ ID NO: 33423
  chr15:28516961-28517375
  hypo

SEQ ID NO: 36354 - DNA, 103 bp, Homo sapiens; identical to SEQ ID NO: 12325
  chr15:31188921-31189024
  hypo

SEQ ID NO: 36355 - DNA, 218 bp, Homo sapiens; identical to SEQ ID NO: 10308
  chr15:31668823-31669041
  hypo

SEQ ID NO: 36356 - DNA, 752 bp, Homo sapiens
  chr15:34806433-34807185
  hyper
cgtgagccactgcgcccagccaaaataccgaaaatcttaaaggtctttccccttccccgcctgggctcaaaaaacgccggagccgccctgcaccgccctgtcgcggtctccggagcaggctggccgactgagggcgaccatgggtcccaagaaggctccggcagtcgcgggctcccacctcggggcgcggcgacgggggcctagaggggccaacagcccccaagcttacgccacgcgaggagtcggagagacgcgccctcccctctcctcccacccaagcctccggcagtcccgggccggggctgggccagttgcgggagaaaggggcggggaactggggcctctctggggaaggctcccctttgtcctgggactccgggcgccccctctctgccctcgccctgccccgcgaggccgccgccgggcgcctcacagtcatgttgcagtggagcgtgagcgggggctgcggctcctggttcttgtggaagatagtcccagaaacttccctttggccttgaaccctgacacggacatcttccactcatctacggcgggaggggcgcggaaggggagcctgtccggagccgctgtcacggccgcgactacccagcggggccgcccagccgagctttcgcgactctgcctctgcctgccgcctggacccttgtgggagcgcggctggaaaatggcaagggcacggaggccttggcgggagctgtgtggcggcctggggggctgctccctttgtaacc

SEQ ID NO: 36357 - DNA, 77 bp, Homo sapiens; identical to SEQ ID NO: 18393
  chr15:41769434-41769511
  hypo

SEQ ID NO: 36358 - DNA, 751 bp, Homo sapiens; identical to SEQ ID NO: 29880
  chr15:41805339-41806090
  hyper

SEQ ID NO: 36359 - DNA, 1101 bp, Homo sapiens; identical to SEQ ID NO: 29881
  chr15:41952208-41953309
  hyper

SEQ ID NO: 36360 - DNA, 113 bp, Homo sapiens; identical to SEQ ID NO: 18396
  chr15:58839542-58839655
  hypo

SEQ ID NO: 36361 - DNA, 153 bp, Homo sapiens; identical to SEQ ID NO: 15594
  chr15:63066085-63066238
  hypo

SEQ ID NO: 36362 - DNA, 1024 bp, Homo sapiens; identical to SEQ ID NO: 18398
  chr15:63132478-63133502
  hypo

SEQ ID NO: 36363 - DNA, 206 bp, Homo sapiens; identical to SEQ ID NO: 18399
  chr15:63597968-63598174
  hypo

SEQ ID NO: 36364 - DNA, 68 bp, Homo sapiens; identical to SEQ ID NO: 18400
  chr15:64683087-64683155
  hypo

SEQ ID NO: 36365 - DNA, 410 bp, Homo sapiens; identical to SEQ ID NO: 18401
  chr15:70352928-70353338
  hypo

SEQ ID NO: 36366 - DNA, 242 bp, Homo sapiens; identical to SEQ ID NO: 18402
  chr15:70354323-70354565
  hypo

SEQ ID NO: 36367 - DNA, 57 bp, Homo sapiens; identical to SEQ ID NO: 18403
  chr15:70355607-70355664
  hypo

SEQ ID NO: 36368 - DNA, 536 bp, Homo sapiens; identical to SEQ ID NO: 29890
  chr15:75248554-75249090
  binary

SEQ ID NO: 36369 - DNA, 460 bp, Homo sapiens; identical to SEQ ID NO: 32608
  chr15:75470758-75471218
  hyper

SEQ ID NO: 36370 - DNA, 93 bp, Homo sapiens
  chr15:76005164-76005257
  hyper
cgagcgcggctctgctcctgggcgcgggccggctccgggtgtccgcgcacttaactccgggggcggggcaggcgcagacccgcgcgcccgctc

SEQ ID NO: 36371 - DNA, 864 bp, Homo sapiens; identical to SEQ ID NO: 23092
  chr15:76628342-76629206
  hyper

SEQ ID NO: 36372 - DNA, 188 bp, Homo sapiens; identical to SEQ ID NO: 18406
  chr15:80471858-80472046
  hypo

SEQ ID NO: 36373 - DNA, 305 bp, Homo sapiens; identical to SEQ ID NO: 18407
  chr15:86306299-86306604
  hypo

SEQ ID NO: 36374 - DNA, 915 bp, Homo sapiens; identical to SEQ ID NO: 32613
  chr15:89437634-89438549
  hyper

SEQ ID NO: 36375 - DNA, 478 bp, Homo sapiens
  chr15:89876331-89876809
  hypo
cgagggggatatggccaccgccaatgtggggcaagttccctctgccaagcagacctccacgtcgaacaccagggcccgctcctcggggatggccacgggtacggcctccccctcggggccgtaccgggtccagccctccgcccaggcccaagccgggggcttcgggggcagctgggcctgcaacagcaagttggccgcctccaggtagggcaggctctgcttctgggccaggaggcggaagtgctggtccaggttgtccccgtagaggggcggcaggcgcagctccacgtcgggcaagggcacggctggctgcccccagagcccgtgcttctgcaggtgctcgacgctgcggcgcaccgcggcctcgccaggcatctcccctccttgcccgaagatttgctcgtgcagccctctcgagagcatctggatgtccaatgggttgtgccgcagctgcccgccctccgaggatagcacttgc

SEQ ID NO: 36376 - DNA, 696 bp, Homo sapiens; identical to SEQ ID NO: 29899
  chr15:91427360-91428056
  binary

SEQ ID NO: 36377 - DNA, 865 bp, Homo sapiens; identical to SEQ ID NO: 26410
  chr15:91642951-91643816
  hyper

SEQ ID NO: 36378 - DNA, 67 bp, Homo sapiens; identical to SEQ ID NO: 18413
  chr15:93504252-93504319
  hypo

SEQ ID NO: 36379 - DNA, 584 bp, Homo sapiens; identical to SEQ ID NO: 34371
  chr16:1030271-1030855
  hyper

SEQ ID NO: 36380 - DNA, 310 bp, Homo sapiens; identical to SEQ ID NO: 18414
  chr16:11192863-11193173
  hypo

SEQ ID NO: 36381 - DNA, 199 bp, Homo sapiens; identical to SEQ ID NO: 18415
  chr16:12084484-12084683
  hypo

SEQ ID NO: 36382 - DNA, 243 bp, Homo sapiens; identical to SEQ ID NO: 18416
  chr16:12609457-12609700
  hypo

SEQ ID NO: 36383 - DNA, 160 bp, Homo sapiens; identical to SEQ ID NO: 18417
  chr16:16103307-16103467
  hypo

SEQ ID NO: 36384 - DNA, 183 bp, Homo sapiens; identical to SEQ ID NO: 18418
  chr16:16227979-16228162
  hypo

SEQ ID NO: 36385 - DNA, 754 bp, Homo sapiens; identical to SEQ ID NO: 25134
  chr16:1730112-1730866
  hypo

SEQ ID NO: 36386 - DNA, 759 bp, Homo sapiens; identical to SEQ ID NO: 25135
  chr16:1737575-1738334
  hypo

SEQ ID NO: 36387 - DNA, 357 bp, Homo sapiens; identical to SEQ ID NO: 26416
  chr16:1741741-1742098
  hypo

SEQ ID NO: 36388 - DNA, 346 bp, Homo sapiens; identical to SEQ ID NO: 15612
  chr16:1812272-1812618
  hypo

SEQ ID NO: 36389 - DNA, 53 bp, Homo sapiens; identical to SEQ ID NO: 15613
  chr16:1812929-1812982
  hypo

SEQ ID NO: 36390 - DNA, 1490 bp, Homo sapiens; identical to SEQ ID NO: 34382
  chr16:2041061-2042551
  binary

SEQ ID NO: 36391 - DNA, 41 bp, Homo sapiens; identical to SEQ ID NO: 15620
  chr16:21515452-21515493
  hypo

SEQ ID NO: 36392 - DNA, 394 bp, Homo sapiens; identical to SEQ ID NO: 23996
  chr16:21831549-21831943
  binary

SEQ ID NO: 36393 - DNA, 184 bp, Homo sapiens; identical to SEQ ID NO: 12359
  chr16:23193716-23193900
  binary

SEQ ID NO: 36394 - DNA, 239 bp, Homo sapiens; identical to SEQ ID NO: 18427
  chr16:23539152-23539391
  hypo

SEQ ID NO: 36395 - DNA, 1768 bp, Homo sapiens; identical to SEQ ID NO: 22807
  chr16:23846783-23848551
  binary

SEQ ID NO: 36396 - DNA, 290 bp, Homo sapiens; identical to SEQ ID NO: 31245
  chr16:2497839-2498129
  hypo

SEQ ID NO: 36397 - DNA, 62 bp, Homo sapiens
  chr16:2589059-2589121
  hypo
cgtgtcttccaggatgcggcttttttttttttttttttttgatggagtctccctctcgacgc

SEQ ID NO: 36398 - DNA, 241 bp, Homo sapiens; identical to SEQ ID NO: 33458
  chr16:27523030-27523271
  hypo

SEQ ID NO: 36399 - DNA, 358 bp, Homo sapiens; identical to SEQ ID NO: 18430
  chr16:311205-311563
  hypo

SEQ ID NO: 36400 - DNA, 367 bp, Homo sapiens; identical to SEQ ID NO: 18431
  chr16:350669-351036
  hypo

SEQ ID NO: 36401 - DNA, 362 bp, Homo sapiens; identical to SEQ ID NO: 18432
  chr16:3741902-3742264
  hypo

SEQ ID NO: 36402 - DNA, 831 bp, Homo sapiens; identical to SEQ ID NO: 33468
  chr16:4430998-4431829
  hypo

SEQ ID NO: 36403 - DNA, 143 bp, Homo sapiens
  chr16:4644993-4645136
  hypo
cgcgggagcgaggatctgctgttcccgagatcaacagctgaccagagagagggccgtggccacaggaccatggcctgtgacgaaggacgatgagctaggaaaggtgctgggctggtgccaagggacgccagtccacggaggac

SEQ ID NO: 36404 - DNA, 308 bp, Homo sapiens; identical to SEQ ID NO: 18437
  chr16:4779967-4780275
  hypo

SEQ ID NO: 36405 - DNA, 320 bp, Homo sapiens
  chr16:521819-522139
  hypo
cgtggcgtctcctgtgtctcctgtcactgtgggtcccttgttctcaacatagctggggagagggtcttcgagcacagccgtggtcgacagagcgtaaccatgtccgccggtctggagggttagattccaggagagccacgtggctgcagcagaaaatgcatgaagttgaacttgagcccttgggggccgccgggaaggtggaggtggcagccgccagtcctggtcagcctgctgccgagcaagggtaccagaagtggggctgagctgctggccggtagggcctgggcttctcatgtcagtcctctgagccctgactcctc

SEQ ID NO: 36406 - DNA, 309 bp, Homo sapiens; identical to SEQ ID NO: 18439
  chr16:524299-524608
  hypo

SEQ ID NO: 36407 - DNA, 128 bp, Homo sapiens; identical to SEQ ID NO: 18440
  chr16:533135-533263
  hypo

SEQ ID NO: 36408 - DNA, 345 bp, Homo sapiens; identical to SEQ ID NO: 18441
  chr16:56398009-56398354
  hypo

SEQ ID NO: 36409 - DNA, 246 bp, Homo sapiens; identical to SEQ ID NO: 15641
  chr16:57559728-57559974
  hypo

SEQ ID NO: 36410 - DNA, 759 bp, Homo sapiens
  chr16:58497229-58497988
  binary
cggcagcgccgtcccctcccccgggaacccgacgccgcgcggccacagggggcctggaggggcgggcagggcctcgcagcgcacccagcacagtccgcgcggcggagcgggtgagaagtcggcgggggcgcggatcgaccggggtgtcccccaggctccgcgtcgcggtccccgctcgccctcccgcccgcccaccgggcaccccagccgcgcagaaggcggaagccacgcgcgagggaccgcggtccgtccgggactagccccaggcccggcaccgccccgcgggccgagcgcccacacccgccaaacccacgcgggcacgcccccgcggcgcaccgcccccagcccggcctccgcccctgcagccgcgggcacgcggaggggctcctggctgcccgcacctgcacccgcgcgtcggcggcgccgaagccccgctccccgcctgcgcgtctgtctcgtccgcatctccgcggtgagtcggcggcgccctcgcccctgagcccagggccagcttctctcgccgccgcggctgctgcgcgcgtccccgcccagcccagcccagccccgagcacgaccccagccccacgcacgaccctagccccgcgagtcccgcaccgactcgctcccgccccatttcgcctccgcgggggcggcgccccctcctccccgcggctcccgctctccttcctcgccttcccggccgcgctggggacccccagccgccgtccgcgaccccccaccgcgacgcccggaggcggc

SEQ ID NO: 36411 - DNA, 109 bp, Homo sapiens; identical to SEQ ID NO: 9203
  chr16:67175573-67175682
  hypo

SEQ ID NO: 36412 - DNA, 120 bp, Homo sapiens; identical to SEQ ID NO: 31286
  chr16:677367-677487
  hypo

SEQ ID NO: 36413 - DNA, 387 bp, Homo sapiens; identical to SEQ ID NO: 31287
  chr16:677803-678190
  hypo

SEQ ID NO: 36414 - DNA, 374 bp, Homo sapiens; identical to SEQ ID NO: 33476
  chr16:68504020-68504394
  hyper

SEQ ID NO: 36415 - DNA, 978 bp, Homo sapiens
  chr16:68678997-68679975
  hyper
cgagacagaggctgagtccctgtaaagaacagctccagaaaagccaggagagcgcaggagggcatccgggaggccaggaggggttcgctggggcctcaaccgcacccacatcggtcccacctgcgagggggcgggacctcgtggcgctggaccaatcagcacccacctgcgctcacctggcctcctcccgctggctcccgggggctgcggtgctcaaaggggcaagagctgagcggaacaccggcccgccgtcgcggcagctgcttcacccctctctctgcagccatggggctccctcgtggacctctcgcgtctctcctccttctccaggtactccacagcctcgccgtggccccgaccgggaccgctccctggggggcgggcggggtccgcatggggcagtggcgtcggggagagcgcggggctgcgctccctggggccaagggagtcccggaaggcccgtgaggaccctgcggtgtggggagtgcagggccgggcacgcctggacccagcctccttcactctctgccctcgggcgcaggtttgctggctgcagtgcgcggcctccgagccgtgccgggcggtcttcagggaggctgaagtgaccttggaggcgggaggcgcggagcaggagcccggccaggcgctggggaaaggtaagatcctcagggtggaaccgcagggtaggggccgcacgtgaccattttggtgtggaccgcgcgaggggtgttcgggccggggcaagggactcctggcgccacctcagttcccggggaggcgcagaacgcgcctcgggggctgggattgggggtggtggctgacggagaaggctgggcagcagagcgcctatgacatccagccccttgtccggtagccactgcttaccttgaccccctcctccgagatgccggatggctgagcccctcacccagtctcgacgtgggaagttctcccccgctggccccagcagaggaatgc

SEQ ID NO: 36416 - DNA, 144 bp, Homo sapiens; identical to SEQ ID NO: 18451
  chr16:69383506-69383650
  hypo

SEQ ID NO: 36417 - DNA, 166 bp, Homo sapiens; identical to SEQ ID NO: 18452
  chr16:69921972-69922138
  hypo

SEQ ID NO: 36418 - DNA, 111 bp, Homo sapiens; identical to SEQ ID NO: 18453
  chr16:69922460-69922571
  hypo

SEQ ID NO: 36419 - DNA, 112 bp, Homo sapiens
  chr16:70794507-70794619
  hypo
cgtgccccaaaaccctgacaacatttggcacttcagcaaatcgagtttccacagccacagcctgaacagcgctgtttaatggactgcatctccgcctgctccctttcaatgc

SEQ ID NO: 36420 - DNA, 352 bp, Homo sapiens; identical to SEQ ID NO: 18454
  chr16:70808012-70808364
  hypo

SEQ ID NO: 36421 - DNA, 116 bp, Homo sapiens
  chr16:72038658-72038774
  hypo
cgcaggcagatgaattaacgctgctgctggtgaagtagaacaccatgatgctggcgggggtgcggtgactccaccgtggagcagcagcgttcaactgtggcggttgcctggtcccc

SEQ ID NO: 36422 - DNA, 174 bp, Homo sapiens; identical to SEQ ID NO: 18455
  chr16:74659437-74659611
  binary

SEQ ID NO: 36423 - DNA, 86 bp, Homo sapiens; identical to SEQ ID NO: 15647
  chr16:74984568-74984654
  hypo

SEQ ID NO: 36424 - DNA, 371 bp, Homo sapiens; identical to SEQ ID NO: 26449
  chr16:77247397-77247768
  binary

SEQ ID NO: 36425 - DNA, 315 bp, Homo sapiens; identical to SEQ ID NO: 18458
  chr16:78322882-78323197
  binary

SEQ ID NO: 36426 - DNA, 606 bp, Homo sapiens; identical to SEQ ID NO: 18459
  chr16:81565589-81566195
  hypo

SEQ ID NO: 36427 - DNA, 140 bp, Homo sapiens; identical to SEQ ID NO: 18460
  chr16:81580491-81580631
  hypo

SEQ ID NO: 36428 - DNA, 189 bp, Homo sapiens; identical to SEQ ID NO: 18461
  chr16:83934496-83934685
  hypo

SEQ ID NO: 36429 - DNA, 548 bp, Homo sapiens
  chr16:85007504-85008052
  hypo
cgcccggctcaggtgtgcgcctccgtgttcgagtctccttctcatttccgcgtgtctggaatgccaccaggagccccaaggcacagcacgtgcgaggcagggctgcggcacacactgaccatctggcctctgaaaggtaagcgaggcagggctgcggcacacactgaccatctggcctctggaaggtaagtgggcattttggttccctcagtgcaaatgttagacaaatttgttgaatgaattaaaatcaaattgtaggtacttgagattctgaactgtggagattttgaaacattgtttttatttcaacgtgcactaaaaaaaggactaagtaaaacgatgggagtcgaattaaacattcaacaagcaacagtactcactgggcaacatttgtgagtcgcgcttgagtgcccaggtcacttgtcatgggcacaaaagcatttagagtttctggaaactgtttgggagtgaccttaacagcctggggctgggcccacgaagcacggaaaggcaccccctgaaaacaccaccatccaggaagaacgggc

SEQ ID NO: 36430 - DNA, 87 bp, Homo sapiens; identical to SEQ ID NO: 18463
  chr16:85453282-85453369
  hypo

SEQ ID NO: 36431 - DNA, 654 bp, Homo sapiens
  chr16:85683926-85684580
  hypo
cgactcaaacagctgaggctccttgcgccccactggtggggcctggctgctggtgccagcgcccgcagctcatgggaggccacttccctgccccagcctggaccaggagcttctaccagccaggaccctgcacccagccactgccttgaccccgaccagagctcctggcctagacccaggacgcctcgaggggattccagcgccttttccggcgactcctccgctctgagctggtccctcctcggagggtccttaccgcctcgggaacattgagctaccccagagcagagcaggggcgcgacaggcccgccccagcagtgtaccaccgcggcgcttaatggaacacggtgccgccagggaaggcgcggggccggcagctggattagcaggtgatgtacggctcctcgctcgggcacagaggctcagcggggcatttaatcctctcggagtggggaggcagagagaggattcccctcccacccggcccaaagctgtggccatgagtctccgaggctgcggacgtgggtggcagttgccgggccggaggcttctcggccccttctcggggtcacccctctctcccaggtgtagtgggagctgcgagaggagaaatgagatgaaaaagcctgttttaaagctaacagggcatgtccc

SEQ ID NO: 36432 - DNA, 105 bp, Homo sapiens; identical to SEQ ID NO: 15656
  chr16:87471750-87471855
  hypo

SEQ ID NO: 36433 - DNA, 1765 bp, Homo sapiens; identical to SEQ ID NO: 29941
  chr16:89006834-89008599
  binary

SEQ ID NO: 36434 - DNA, 542 bp, Homo sapiens; identical to SEQ ID NO: 10347
  chr16:89169538-89170080
  hypo

SEQ ID NO: 36435 - DNA, 58 bp, Homo sapiens; identical to SEQ ID NO: 18470
  chr16:89446081-89446139
  hypo

SEQ ID NO: 36436 - DNA, 570 bp, Homo sapiens; identical to SEQ ID NO: 25207
  chr16:89641257-89641827
  hyper

SEQ ID NO: 36437 - DNA, 98 bp, Homo sapiens; identical to SEQ ID NO: 18473
  chr16:89647563-89647661
  hypo

SEQ ID NO: 36438 - DNA, 906 bp, Homo sapiens; identical to SEQ ID NO: 31323
  chr16:981471-982377
  hypo

SEQ ID NO: 36439 - DNA, 232 bp, Homo sapiens
  chr17:16256915-16257147
  binary
cggcccgcccggccgctgggacgcacctgcctgttcagtcccgcaggcagaggggctgcgcctgggcctacgctcgcgatacccagaatccactcgcacctgcgaaggcgcccctgccctgtgtgaatccagcgggctcttcgtaccttcccgacctggaggggcctgggttgggcctgaattcgcaggctcatccgagcgggcagcctggggtaacttcgtctccaaaaac

SEQ ID NO: 36440 - DNA, 1795 bp, Homo sapiens; identical to SEQ ID NO: 32639
  chr17:17685627-17687422
  hyper

SEQ ID NO: 36441 - DNA, 602 bp, Homo sapiens; identical to SEQ ID NO: 18480
  chr17:18854647-18855249
  hypo

SEQ ID NO: 36442 - DNA, 64 bp, Homo sapiens; identical to SEQ ID NO: 18481
  chr17:18855505-18855569
  hypo

SEQ ID NO: 36443 - DNA, 811 bp, Homo sapiens; identical to SEQ ID NO: 18482
  chr17:18907431-18908242
  hyper

SEQ ID NO: 36444 - DNA, 705 bp, Homo sapiens; identical to SEQ ID NO: 25213
  chr17:1958915-1959620
  binary

SEQ ID NO: 36445 - DNA, 110 bp, Homo sapiens; identical to SEQ ID NO: 18483
  chr17:2289839-2289949
  hypo

SEQ ID NO: 36446 - DNA, 200 bp, Homo sapiens; identical to SEQ ID NO: 18484
  chr17:25934818-25935018
  hypo

SEQ ID NO: 36447 - DNA, 317 bp, Homo sapiens; identical to SEQ ID NO: 18485
  chr17:25936178-25936495
  hypo

SEQ ID NO: 36448 - DNA, 110 bp, Homo sapiens; identical to SEQ ID NO: 18486
  chr17:26594091-26594201
  hypo

SEQ ID NO: 36449 - DNA, 897 bp, Homo sapiens; identical to SEQ ID NO: 25217
  chr17:27038294-27039191
  hyper

SEQ ID NO: 36450 - DNA, 847 bp, Homo sapiens; identical to SEQ ID NO: 25220
  chr17:27949429-27950276
  hyper

SEQ ID NO: 36451 - DNA, 33 bp, Homo sapiens; identical to SEQ ID NO: 18488
  chr17:31099662-31099695
  hypo

SEQ ID NO: 36452 - DNA, 531 bp, Homo sapiens; identical to SEQ ID NO: 25224
  chr17:35078547-35079078
  hyper

SEQ ID NO: 36453 - DNA, 329 bp, Homo sapiens
  chr17:35285452-35285781
  hyper
cgcggaaggagcagcgggggggctggccctctcagccccgagagcagagagcggcagaagctgttaattcttgaggctaatgttcacatctccaacttatctctccgaggggaagtgtccatttgaccacatgatcctccctcccctaccctcccccaaggggaaatcaaatcttgaagtgagaccggaagagctgctgcggaacgtgagcacgggagagctggtgggggtagaaggcggtgaggggccgaaaggctcctcaaacccagtttctttccatgctaaggctggggaaataacctcatggcaactacactttccgataaccc

SEQ ID NO: 36454 - DNA, 413 bp, Homo sapiens
  chr17:35289274-35289687
  hyper
cggcagtgaccgccgccattaggtaaggggagagagtcaattagtgagaggattaattactgtgaggcacgagccccgtttgtcttccttactgggtgttcagacagaggaacacgggcacgcacccaaatacacattgttgtcacgccgtcttagacgttttatttatttgttggattcctgcccagagccgcttttccacgggcgcagagtctcccaccaaacacgctgcctctttctctcagcacgcactcgcctgtcccaaagccgcacacccccagacccgcgggacgccccctccgtgcctgcagggccctcggctccgcgcccgtccccgcggccttcttcgtggcagggtctctctctgggtctaatttctgtttcttttcctccacttctccccgcatttcccc

SEQ ID NO: 36455 - DNA, 989 bp, Homo sapiens
  chr17:35290220-35291209
  hyper
cggacaagcctcctaacttgggcctcctggccgggaaagtggagatagtacccttctcttccaccccccaccaccctcttgctatacggttcaggggagaccgtgatacaagctgtgaagtactgcacacgagtagatcatttccatgagagagtgatgggtgagattaaggcaatttgagtccggagagaactagacgggaaggagaggcgggagaccttggcgctcagatccgagcgaccttatccacgcagttccctgcgtggcattactgcggcctcaccgagtctgggcggagtttgcgtggcctctgggaccggcagagtccaggggtgctccgggctggctatttcctccctcctccgggatgggtgtagcagggtgtgtactccgcatggggtaacctcctagagccggctacgccccaggcgcctcctttcacggccttgtcactcttttctgctccttgggctgttctggaaccgaagagagaggagggaaatggctaggggcggccatcatcctcgggatcaatagcagccgagagtgactgggcaggctctgtccatgggccgagcgtcattctggaacctggagggggcgggggcgggggaaggaagggaagtggaagtttgagaggggcaccttcaggctccccaaactgcatggcagctggagagggctgacagaaccctctccaacccgggttctgaccagggtccctctggggctgatcgtcaaggagcttctcaagaaaagaaacctggactgtgaaagtcacctcctaggccctctggggccgtatccgggggtgcctgggaggagggtggaaaggattctgcagtcaccgagctatgggcgaaaatgatccccgcggaccctggtccagaatgtacaggtcctgggcggtgtaagtggctgtgggtctgtggaggacattgggtaggaaaacgcttgcgtagttgaggatgcagacaataaatgtggcc

SEQ ID NO: 36456 - DNA, 830 bp, Homo sapiens
  chr17:35297369-35298199
  hyper
cgcgctctctctcctgctgcctcctcacctgcttaaccggaattctgcctctctttatctctctcttcccttctttctgtgctccattcctcctctcctacttcctccactttttacatcttccctctttctcgctgtcatctttctctccgcctgtctccccttgcccctggctgacccatccccgcccccgccccccacccccacccccccgcaggtgtttcggtaccaaatgcgcaggctgcgctcagggcatctcccctagcgacctggtgcggagagcgcggagcaaagtgtttcacctgaactgcttcacctgcatgatgtgtaacaagcagctctccactggcgaggaactctacatcatcgacgagaataagttcgtctgcaaagaggattacctaagtaacagcagtgttgccaaagagaacagccttcactcgggtgaggccccaattcctggctggctaggtgcaagcgggtcctgggggaggaaggctcgccaaggccccggctcatctgtcctttccctcttagccaccacgggcagtgaccccagtttgtctccggattcccaagacccgtcgcaggacgacgccaaggactcggagagcgccaacgtgtcggacaaggaagcgggtagcaacgagaatgacgaccagaacctgggcgccaagcggcggggaccgcgcaccaccatcaaagccaagcagctggagacgctgaaggccgccttcgctgctacacccaagcccacccgccacatccgcgagcagctggcgcaggagaccggcctcaacatgcgcgtcattcaggtcaggccccggcgc

SEQ ID NO: 36457 - DNA, 1974 bp, Homo sapiens
  chr17:35299167-35301141
  hyper
cgtagtctctatgtgtgtacagccccagagaagcggtaactgtgatagtgtgactgttagaaaaactccagctataccacaactctccccctccagacacggcggcctgtccaggtcctcctgtgggattcctgctcaccattggctcagggtccgccctgagtggtcctagtcagagatcgcaccgtcaccactaccctacacacacacacaagcgcgcgcgcgcggtgtcggctagccaggcggtgaaggggtgctggctaggcccggagcaccccggggtcgggggtggagtctcggtggcctcaccccgccgccatgtgctgcaggtctggttccagaaccggcgctccaaggagcggaggatgaagcagctgagcgccctgggcgcccggcgccacgccttcttccgcagtccgcgccggatgcggccgctggtggaccgcctggagccgggcgagctcatccccaatggtcccttctccttctacggaggtgggtgcgcgccgaatggcggggcacggccaggtcggggcgggcttcgttggaagcgggtggcagcgcgggggggcacgcctcgctctctgtaagccactggagagttggggcgagtagggagaaggctgggagtaaatcaaggggaggcggcgagaccgaggacccaattcacggccctgaataacgggggtagctggtaaggggcagctcccgggcttgcgcccagcctcctccctgcacccaggcccgcgagggctccccgcgatccgcgagttccccgcgtggccttcctcagcccgccgaggtcgcgtcttccctccctttcggtcccgccggcccccggccgggccctgacgtcctgcgccctccccgccgctccgcagattaccagagcgagtactacgggcccgggggcaactacgacttcttcccgcaaggccccccgtcctcgcaggcccagacaccagtggacctacccttcgtgccgtcatctgggccgtccgggacgcccctgggtggcctggagcacccgctgccgggccaccacccgtcgagcgaggcgcagcggtttaccgacatcctggcgcacccacccggggactcgcccagccccgagcccagcctgcccgggcctctgcactccatgtcggccgaggtcttcggacccagcccgcccttctcgtcgctgtcggtcaacggtggggcgagctacggaaaccacctgtcccacccccccgaaatgaacgaggcggccgtgtggtagcggggtctcgcacggtctgcggagttcgtggttgtacagaaatgaacctttatttaagaaaaatagaaaaaaaaaaaaacataaaaagcaagtccccacccccttcctccagcctcgagaaccattctccttctggggagaccggatggaaaagggggacacgaaataggatccaaatcggcctcgaggtgggactgggatccgcgcactggctgtcgacgtgcagaactggggctccccaaaggaaacgcagacctctccccaactcccacctggacccggatccgtagacagaccccgcgggcgtgtgcgcctggcaggcgggcggcgaaaagacgtccagggcagccgcgggtgcgcacagccgttggcgatgccaggagccgtggggagggaggccgtgagcacagccgggtgaaggaagtgaagcggcccagggcgctcccgggccagccaggagggttctagctctgggatatcccttattagtgttgtctcagagttcaacaacagcgacaaaaaactcttatagcttcagaaacgccgacctgccgtgcatcaggtgggactatatatatattttttgtctatctggatttttggtttttgtttttgccaaaattgcaaaattctaaatgtaaagccctccgtatcaactcttctaccttcgcaaaactacacatacacacatacacacgtacacggacacactc

SEQ ID NO: 36458 - DNA, 563 bp, Homo sapiens; identical to SEQ ID NO: 31336
  chr17:35303090-35303653
  hyper

SEQ ID NO: 36459 - DNA, 643 bp, Homo sapiens; identical to SEQ ID NO: 26472
  chr17:3599052-3599695
  binary

SEQ ID NO: 36460 - DNA, 536 bp, Homo sapiens; identical to SEQ ID NO: 32648
  chr17:36829818-36830354
  hyper

SEQ ID NO: 36461 - DNA, 336 bp, Homo sapiens
  chr17:37755367-37755703
  hyper
cgccgcgccccagcctcggcctgggagcccggccgagcgcgagttcgctgcaagcgggatccgctctgagcccggccggccggcagcctccgcggtattcccggcgcgggcccctccaggggctcccctgcggctcctgggggcaggggtaccctgctgccctccaagactgaggctggatgtggcatctgattgggaagtgggagagatgaagggaagagagaaagccccagtgccctcactcccattctcgggctgttcccaagggagaaggaaaaaactatgtgagtccgttgtgccctcctgcctccgcctgcggtcaagaaagggggcacc

SEQ ID NO: 36462 - DNA, 897 bp, Homo sapiens; identical to SEQ ID NO: 29961
  chr17:37761159-37762056
  binary

SEQ ID NO: 36463 - DNA, 671 bp, Homo sapiens; identical to SEQ ID NO: 29963
  chr17:3866998-3867669
  binary

SEQ ID NO: 36464 - DNA, 201 bp, Homo sapiens; identical to SEQ ID NO: 12397
  chr17:3867893-3868094
  binary

SEQ ID NO: 36465 - DNA, 442 bp, Homo sapiens; identical to SEQ ID NO: 25235
  chr17:40332770-40333212
  binary

SEQ ID NO: 36466 - DNA, 644 bp, Homo sapiens
  chr17:41790849-41791493
  hyper
cgcaatttgtcaccaggggttttgactttccttattgcctcgtgggaggtggcagaggcagcacatctcagaccgagcctcggttcctccccctacctcccaccgctgcgcttgaagaaagatgctgcagcctccccagtccccatgccagcgctcccacttttctctgagctttcggtggcagacagcgccttgggcactttttcatgctcataattcgaattacctgtttaagtcggtcaaatgaaaaaataccagctccgcccccacgcgggctggccggggcgcctggagcgccagggcggctgcagcgcgctctccgcggccgtcggccctgagctcatttcctggggcgcgcgcgccgggctatttcagcctggcgctgtgcaaacaggacaatttactgcggccaaaagggacccaaattacaatcgtatcacagacaaatatccgccacgccaggtctccaggggccaggaggggcctctctcccggcgcggggggcgggcgcggggtcaggcaggtccgcggggctcggctcggcctcgccgtgccctgatcggcgtttgccaccgagctgtgcctgctctctgcaacaggaaggggcccagctcccccgggcgaccgttcctatctgagttctc

SEQ ID NO: 36467 - DNA, 960 bp, Homo sapiens; identical to SEQ ID NO: 25236
  chr17:41984320-41985280
  hyper

SEQ ID NO: 36468 - DNA, 336 bp, Homo sapiens; identical to SEQ ID NO: 15678
  chr17:4392128-4392464
  hypo

SEQ ID NO: 36469 - DNA, 895 bp, Homo sapiens
  chr17:45055681-45056576
  hyper
cgcgagcgaccgcagtcccaaattgcatctccatacccactcccaccctgccccgaacgtcttaaaaaacaaacaaacaaaaaaaactggtaagaaccctcaccccacattctcccaccccgcaacgctgcagcgcacacaggacagagccgggcgtccaagtcccttcccgcgcccccgccgacagtctcgccgcgtccccgcccgggcgccccaggcacgtagctgcccgcccggaggcggcggcagagcgcagagagcggggcgagggtccgggtctccggggtccttcttgcagcagcgctggcgagggcggacccagatggcgctcagtacagccccaggatggctgcgcccacgtccttggagggccggcgctcctgcaccagaaagttgatcatgctctcggacttgatgagcaggttgcagcccaggaagaagacgccgaagaccacggtaagcgacagcacgcagagcacggcgatctgcgccacccgcgacacccacaggctgcgctcgtcgggcgccagccccgcggggaccccgtcgctggcggccagcggtgcgccccctggacagcagcccagccacgtgcccagcccgtgggtgcggtttcccagggcggccccggcgccgccgcccacgccgtccacctcctccaagccgctgtggttcaggaaggtcgcgttcatcgccgcgcggcgccgggggtctcggcgcgcagtcccgggtgcactgggctgctcgccggggtccgcgctctcagggacgctccggacccctcggaccggctcctgcggtacggggaggggacgaaggcgggaggctggctgcctgcgcgctctcgggccgcctacccctgggcaccgggcgggaagcgaccgcccggaggagc

SEQ ID NO: 36470 - DNA, 1077 bp, Homo sapiens; identical to SEQ ID NO: 26484
  chr17:45810409-45811486
  binary

SEQ ID NO: 36471 - DNA, 871 bp, Homo sapiens; identical to SEQ ID NO: 32656
  chr17:46089217-46090088
  binary

SEQ ID NO: 36472 - DNA, 31 bp, Homo sapiens; identical to SEQ ID NO: 18508
  chr17:46152418-46152449
  hypo

SEQ ID NO: 36473 - DNA, 1140 bp, Homo sapiens; identical to SEQ ID NO: 28703
  chr17:46800174-46801314
  hyper

SEQ ID NO: 36474 - DNA, 637 bp, Homo sapiens; identical to SEQ ID NO: 25249
  chr17:46806440-46807077
  hyper

SEQ ID NO: 36475 - DNA, 276 bp, Homo sapiens; identical to SEQ ID NO: 29979
  chr17:46811369-46811645
  hyper

SEQ ID NO: 36476 - DNA, 1263 bp, Homo sapiens; identical to SEQ ID NO: 25254
  chr17:46829437-46830700
  hyper

SEQ ID NO: 36477 - DNA, 984 bp, Homo sapiens
  chr17:46831595-46832579
  hyper
cgtggcacatgaaaaattcaggatgaacgccctggctgaaagctcttcctgggtttgggacatcagaagaccttcccgggatgggctcttgtctctgcagtagctatgacctgcacataaacctgtttcctacactgtaaaattggcgtaaccaccattccctcccagtctttctctggagtcctaatgggaacagtgacggaatgaaagtgaccacgctggaacccgaagcgctgttcccctccgtggcttcacactgatctccacactagaattccgtgtctgcagttcaagttcaaactactgtggtcggggaagggctacagagatctcgcttggccgtggagtcaccggccccgtccagtcttgcttgggacacatactggtttacactctctcgggttcagtttcctcatctgtaaatggggctcgtatccccctcataaagtggtttgggggataataaagcttgtaaaagcgctttgccccagtgcttggcacataatacgcgctacgttaacaatgtcgcgtacacgcccgaaccggaggaaccccattccacgctccttctggaaccgaattcacctctgaggctttggggcttcagagccggagccgcttgggcaaaaccagcagaacagcgagagggaacgggctggtctagccctgccctgagcatttctactgagacccccggtcctgcttcttccagcctctgctggatttctctccgacccctctggagcgaagccctttggccctgcgttgcatgcggcacggtgcgggttcgggctctgcgctggagccgggatgccctccggcggagggtgcgcgtaggcggcgcctgggcgtgagccccgcctgcaaggctcagcgtcggggaagcacttttctcgtcgacccggggtctttttccgccaaggagctcggggctcaagaactcgggactgggctgtgggcggggcatggttttcctctctgggc

SEQ ID NO: 36478 - DNA, 958 bp, Homo sapiens
  chr17:47573483-47574441
  binary
cgacggcgagggcggcagagagatggaagcagaaggaaaggagacagagcggggcgcggaccctgaagtggtcggggtcccgcctgcccgctgagggacagtgagacgagaagagagagcagaggcttggacatttccagcgcctgtccccgcgctcctgctcgcggcctctcccagtcccggaattggggctgcggatctaaggctgggaggggagtgcccacttcgccggggcgaacccgctcccggggttcccccacggccggcgggctcctccgacgcgcgtgttctcacggcttgaagcagcgcagcggatcgcgagggacggagcgggtgtgcccctacccgggctggcggtggctacgtctcggggtgcagagcgccggggcgcactaggcggggacccttcctggccgcgcgcagctctggctacgcaggcgggaggcggcaggcagggggcgctgcggggcgaggcaagtgcagtccgccgctgcctgcctgcgagtctggggctgcgcgccgctccccacctagctgcgcgacccgagcgccgcgcccaccgcgctccgtgggctcccgcgcctcgaagggtcgggatccggtctgagcctctcctggctctcggtgcaagccgctgggcacctaacgagacgggggcgcccggacgcctcggattctgtagcgcggtatcccgggccaccgactcggcaaaggtcggcgggtcctccgggtggtccgacgagattgtcagatgtggcctgctttatggccatgaaccgaatgccctggaaggtctggcaacggaggaggcgtcttcactctccccgccagcatctttcatcagagcactgcgccccaaattccggctttacagatacggagactgaggctctgagagtttaaacgacttggccaagatctcacagcaagttgggccagagtcgtggctagactcccc

SEQ ID NO: 36479 - DNA, 507 bp, Homo sapiens; identical to SEQ ID NO: 15681
  chr17:4795549-4796056
  hypo

SEQ ID NO: 36480 - DNA, 534 bp, Homo sapiens; identical to SEQ ID NO: 35552
  chr17:49008620-49009154
  binary

SEQ ID NO: 36481 - DNA, 543 bp, Homo sapiens; identical to SEQ ID NO: 23106
  chr17:49021800-49022343
  hyper

SEQ ID NO: 36482 - DNA, 417 bp, Homo sapiens
  chr17:54755964-54756381
  hyper
cgctccacgtgctgctggtgcgagcgccggcgcggcgcactaaatcatcgctggcgtccacatttcaaagcggagccggaggagtgccggtgatttctgggtgccacaccgatcactcccaagctctgatctatggattgttttgatttcctcctttgaactcttcctatcccgctccagcggcagacagagatactgaattaagcgacagacaagttggagacaatgagcgccgggggccccctccctcccccggctcccctcccccctcctccccgaaatttgcagacatctgctagctggagcccagcgttggagtcataaagaagagctggcaggagagtgatgtacagccctgggccctcccgagtgactggcgttaacctccaacggagagacgctcaccccgtttacgac

SEQ ID NO: 36483 - DNA, 907 bp, Homo sapiens; identical to SEQ ID NO: 32659
  chr17:54911482-54912389
  binary

SEQ ID NO: 36484 - DNA, 950 bp, Homo sapiens
  chr17:56833417-56834367
  binary
cgagtttcgcggaccgtgcggcggcggcgagccggagccggaacccgaacccgaacccgaacccgaacccgagtccgagcccgagcccgaacctgaactggtagaagctgaggcggccgaggcttcggtagaggaacccggggaggaggcggccacggtagccgcgacggaggagggggaccaggagcaagacccggagcccgaggaggaggcggcggttgagggtgaggaggaggaggagggcgcggcgacggcggcggcagccccggggcactcggccgtgccgccgccgccgccccagctgccgcctttgcccccgctcccgcgaccgctgtcagagcgcatcacccgcgaggaggtggagggcgaaagcctggacctgtgcctgcagcagctctacaaatagttaagtagctgggcttggctggtggtgggcccgcggtccccaccgcgccggcctcggacgcggctccctcggcccctcaaactgctctcttttctgctcctctcccccgcacccgcgcctgccgccgctgaaagcgcccccgctgctcggacccgggcggtcggctgagagctgcccacgcccgcctcggcccccacgcccgcctcggcccccacgcctcctacccggccttgaagccgctctcctgagccccggcgccctcccgccgggcccgggcccctcatcccctttcacctcggcccccagcttctagctccacttcacgcaacctttccctttcctgcctggaaaggtccttcctcccaggcttgagctccctcttcttcccagatcccttctttctccgggaggtttcctcccaccccagtctgtcttttcccgggctgagtgccttgttgtttggcggcagagacgcgactcctttctagactgagctgcgaggtgcctcctgcgtaactgcaacaatgatggttataccggcccc

SEQ ID NO: 36485 - DNA, 235 bp, Homo sapiens; identical to SEQ ID NO: 15684
  chr17:59239030-59239265
  hypo

SEQ ID NO: 36486 - DNA, 499 bp, Homo sapiens; identical to SEQ ID NO: 25261
  chr17:60766832-60767331
  hypo

SEQ ID NO: 36487 - DNA, 738 bp, Homo sapiens; identical to SEQ ID NO: 24077
  chr17:61777761-61778499
  binary

SEQ ID NO: 36488 - DNA, 523 bp, Homo sapiens; identical to SEQ ID NO: 24078
  chr17:61926187-61926710
  hyper

SEQ ID NO: 36489 - DNA, 765 bp, Homo sapiens; identical to SEQ ID NO: 29984
  chr17:62777091-62777856
  hyper

SEQ ID NO: 36490 - DNA, 982 bp, Homo sapiens
  chr17:64961242-64962224
  hyper
cgaaggtacggccagccccgacccctcgccgccccacacacacacacacacacacacacatatacacacgcgcgcgcgcgcgcgcgcacacacacacacgcgcacacactgcccggcgcgcgggccggggagagggtgggcgcggcgctggctccgcgcgagacacaaaggagccggagctggcgggcgggtcccttcgcggccagctgtacatcagctctggtccctctcggctggggacctccccagcacaccgatcccacaaactctccacgcgcacaccccctcgcccacagacacaatgaaacacaccgaaactcaagcacgcgcgcgtagcccgggacccgagcgatccccaggggccgcgccggcacccccgggggaggtggaggctggcgagggggcgggaggaggctggggttggggggagcggacgggagggggggaggggttgcttggcaaccggtgtctgtgctattgctatgggaactggccatcctggggcggggccggccgggggcggggcgcgtcggtgccgctgggcgctttctacaggctcgggctgaggggtgggggcagaagtaggggcagaagtaggggcgggggcgcggtcggagccggggtaggggctgagttcctagcggatctagggtagctgggtaggcccagcccgacgcccgcctcgtctcccacggagtcaccggcccgctcctcgctgtgcggtggggtggtaaggggagcgacaccgagtctcccccaacggagacagcgacctcggtcgcggcccctcagcagggaggctgcggagacctcagtaggaaactagggtgtgcaggaccgatctgcggaccgggaacagactgggaggggcgtggtcatctcgtcggagctgggcgctgcgacccccaaatgcgactggaggctgagtagtaggtgtcatgaggctggaatgctaggggaccaggatttcagccccgggacc

SEQ ID NO: 36491 - DNA, 999 bp, Homo sapiens; identical to SEQ ID NO: 23108
  chr17:70215682-70216681
  hyper

SEQ ID NO: 36492 - DNA, 133 bp, Homo sapiens; identical to SEQ ID NO: 18527
  chr17:70220156-70220289
  hypo

SEQ ID NO: 36493 - DNA, 525 bp, Homo sapiens
  chr17:71897934-71898459
  hyper
cgagtggagggaatgaggagggcctttcaagggaggcgggattgcattcgcacctgattacgctgcgcggacacaacagaggcgcccggacccgcagccctgccttcgccgcctttgctgggctgtttgcgcttcgtttccttctcgccgccccatggcgcgctttctctcttctttatttcgccggttctccccgctcctaacctgcttaacaacttacctcgctctcccgcttgctctccccccgccccccatctccactggttcccgagcttctcttcatgtccctaatggcgtggctgcgccagcatttaataaaagctgctgaccgggaaatccgagctaactgaattacttcctcattaaagaggcgggcagattcttgggccccgcgtgcagccaccctcgctgcctccctccccgccccgctccgccctgctggtcccgcctgccgtccgcaattaggcggcagatgcttgccgcccggtggtggcctgggttctgcagggactgagggggctcgtc

SEQ ID NO: 36494 - DNA, 569 bp, Homo sapiens; identical to SEQ ID NO: 18529
  chr17:7224752-7225321
  hypo

SEQ ID NO: 36495 - DNA, 149 bp, Homo sapiens; identical to SEQ ID NO: 18530
  chr17:73635145-73635294
  hypo

SEQ ID NO: 36496 - DNA, 185 bp, Homo sapiens; identical to SEQ ID NO: 6483
  chr17:74042063-74042248
  hypo

SEQ ID NO: 36497 - DNA, 149 bp, Homo sapiens
  chr17:74047812-74047961
  hypo
cgaactggggctcattcatgctataaatctagtaaagcaaacacggccaccattcactcctggaaccaccagagcagcaccatccaatagaactctctgccacgggcaatgtcctctacgtgcaccgtccaatgaacacctgagcactc

SEQ ID NO: 36498 - DNA, 82 bp, Homo sapiens; identical to SEQ ID NO: 18532
  chr17:74388687-74388769
  hypo

SEQ ID NO: 36499 - DNA, 396 bp, Homo sapiens; identical to SEQ ID NO: 31388
  chr17:74390245-74390641
  hypo

SEQ ID NO: 36500 - DNA, 127 bp, Homo sapiens; identical to SEQ ID NO: 18535
  chr17:74435202-74435329
  hypo

SEQ ID NO: 36501 - DNA, 343 bp, Homo sapiens; identical to SEQ ID NO: 24087
  chr17:75447477-75447820
  hyper

SEQ ID NO: 36502 - DNA, 417 bp, Homo sapiens; identical to SEQ ID NO: 33530
  chr17:76187077-76187494
  hypo

SEQ ID NO: 36503 - DNA, 228 bp, Homo sapiens; identical to SEQ ID NO: 31394
  chr17:76254688-76254916
  hyper

SEQ ID NO: 36504 - DNA, 138 bp, Homo sapiens; identical to SEQ ID NO: 18540
  chr17:78338197-78338335
  hypo

SEQ ID NO: 36505 - DNA, 522 bp, Homo sapiens; identical to SEQ ID NO: 18541
  chr17:78775515-78776037
  hypo

SEQ ID NO: 36506 - DNA, 521 bp, Homo sapiens
  chr17:78872481-78873002
  hypo
cgccgccccgactccccccgccccggctccccccgcacctgctcacccaacccctgctcaccccgcccctgctcaccccgccgtctccgtctagtgagttttgatgatgggcttttcacttgtgttcagcttcaagctttctttctacttccattgtggttcctggggatggcggtccagccacaatgacagcagcgcatgacaggagcccaaagacccgaaacagacgcagggcatccgccaaggcagttcccaccgggcaaccctgtgggtgtgctcccagccttggccagctgctgccttgagcacctctggatagaacgagtccagagcttgcaccatgccctccagggtatggagaactgaaaggttcactacacaacaacccagacacgccagcttagcccagacacgccaacttgttaattttcattgagaaataacgttgcagctttgtgcatttggctgtccactaaaatatgccaagtgcccagaaagcgcagagttgactccgtatattc

SEQ ID NO: 36507 - DNA, 253 bp, Homo sapiens; identical to SEQ ID NO: 18544
  chr17:79648960-79649213
  hypo

SEQ ID NO: 36508 - DNA, 73 bp, Homo sapiens; identical to SEQ ID NO: 18545
  chr17:79803018-79803091
  hypo

SEQ ID NO: 36509 - DNA, 287 bp, Homo sapiens
  chr17:79826882-79827169
  hypo
cgggggtcaggaactcgtactcctcggcccggggcccatagctgcctaccatgtagtcagtcttgtcaactgcggcacaaggaagagggcggtcagcggccccgcttccccgcctggcagcacgcacccaagcggccccctctgccctgcccggggccccactcactcttgacgcctttcctgtacgtatgctggatgtacttcatgccggacactatctctcggttaacctgcaggacccgaagcgaggatcagggaaggtcggtccggaccccagccccagcccc

SEQ ID NO: 36510 - DNA, 483 bp, Homo sapiens; identical to SEQ ID NO: 33538
  chr17:79887422-79887905
  hypo

SEQ ID NO: 36511 - DNA, 635 bp, Homo sapiens
  chr17:80201427-80202062
  hypo
cgcgcccaacagaaggtcacagcgcagactctactttctggccgtgaaggttctgggtccggttgggagagtcacctgctccttggcacctcagggtgggtccttctggcctgccggcttttctgagctagtcttggcacgtggcaaggacagccccgctcctggttttaagcacaggcattcatacagacggagtgccaatccgcacaggagcattgagtgctgagaaaatggactgagtgcaaaggcagcaaggcaacaaacactacagtaaccacctctcggttcacagtcctctcccaagggaccagaaacgcatcttccaccttgaatcctgggactcccaattgtcctgctagggtctcaaagcctctgcttccaagctctcagctgcctgcccacctcctggggaagaagcgcgcagtgctttgcctggtaacacccactgcacccctgccccgcggcagcctgcggtccctaactgctctccgagggcctcaagagttcctgacagcaggcatgtcaattacgggaggagggagggtgagacgccaaaatcaggttgaagaggtcccaccacacacgggcacacacacacaccacggacttttgatgagaaatctcctctccaaagc

SEQ ID NO: 36512 - DNA, 121 bp, Homo sapiens; identical to SEQ ID NO: 15708
  chr17:80749629-80749750
  hypo

SEQ ID NO: 36513 - DNA, 870 bp, Homo sapiens; identical to SEQ ID NO: 22816
  chr17:8868587-8869457
  binary

SEQ ID NO: 36514 - DNA, 192 bp, Homo sapiens; identical to SEQ ID NO: 18553
  chr18:11992166-11992358
  hypo

SEQ ID NO: 36515 - DNA, 160 bp, Homo sapiens; identical to SEQ ID NO: 18554
  chr18:11992771-11992931
  hypo

SEQ ID NO: 36516 - DNA, 115 bp, Homo sapiens; identical to SEQ ID NO: 15712
  chr18:12375778-12375893
  hypo

SEQ ID NO: 36517 - DNA, 92 bp, Homo sapiens; identical to SEQ ID NO: 28745
  chr18:13036746-13036838
  hypo

SEQ ID NO: 36518 - DNA, 907 bp, Homo sapiens; identical to SEQ ID NO: 30003
  chr18:24130266-24131173
  hyper

SEQ ID NO: 36519 - DNA, 1466 bp, Homo sapiens; identical to SEQ ID NO: 25295
  chr18:2846938-2848404
  binary

SEQ ID NO: 36520 - DNA, 86 bp, Homo sapiens; identical to SEQ ID NO: 18559
  chr18:44701012-44701098
  hypo

SEQ ID NO: 36521 - DNA, 142 bp, Homo sapiens; identical to SEQ ID NO: 18560
  chr18:59728812-59728954
  hypo

SEQ ID NO: 36522 - DNA, 226 bp, Homo sapiens
  chr18:74195379-74195605
  hypo
cgcctccctgcccactcctgtgggaagctccctctcggcatctgtccgtcatcagcatctgtccgtcatcggcatctgtctgtcacgggtcatctgccgcaccacactgagaacccatgagtgccaaatgtcccccgtcagctggcccacccgcatttcatcttcctggcttaagaaggtgagtctcagggcccagccgtctatcagaactgacctggtcttctcc

SEQ ID NO: 36523 - DNA, 441 bp, Homo sapiens; identical to SEQ ID NO: 12451
  chr18:76151089-76151530
  hypo

SEQ ID NO: 36524 - DNA, 271 bp, Homo sapiens; identical to SEQ ID NO: 18563
  chr18:76999776-77000047
  hypo

SEQ ID NO: 36525 - DNA, 143 bp, Homo sapiens; identical to SEQ ID NO: 18564
  chr18:77198679-77198822
  hypo

SEQ ID NO: 36526 - DNA, 620 bp, Homo sapiens; identical to SEQ ID NO: 33560
  chr18:77627972-77628592
  hypo

SEQ ID NO: 36527 - DNA, 533 bp, Homo sapiens; identical to SEQ ID NO: 18567
  chr18:8799980-8800513
  hypo

SEQ ID NO: 36528 - DNA, 118 bp, Homo sapiens; identical to SEQ ID NO: 18568
  chr18:8800570-8800688
  hypo

SEQ ID NO: 36529 - DNA, 392 bp, Homo sapiens; identical to SEQ ID NO: 18569
  chr18:9417386-9417778
  hypo

SEQ ID NO: 36530 - DNA, 169 bp, Homo sapiens; identical to SEQ ID NO: 16604
  chr19:10207022-10207191
  hyper

SEQ ID NO: 36531 - DNA, 201 bp, Homo sapiens
  chr19:10207239-10207440
  hyper
cgcggcggacctgcaggcagaggaggaacggaaggaagacggggtgctggggcccagcgagacccctccgcttccacgcggggatgcgcgcgtctacacccgcgatgtcccgggcccataatttcagtccccatctcattccccccacggctggagggccccagggtgatcccactctggcttcaacaccgagctcttggc

SEQ ID NO: 36532 - DNA, 952 bp, Homo sapiens
  chr19:10401659-10402611
  hyper
cgccctctgagaacccttgactcgacataggggcgctaagatgtcagggagttggctccccaggctcagcccgcgtttccctgggcagcggtctcgcaggagcccttctgggcggacctgcagcctcgcgtggcgttcgtggagcgcgggggctcgctgtggctgaattgcagcaccaactgccctcggccggagcgcggtggcctggagacctcgctgcgccgaaacgggacccagaggggtttgcgttggttggcgcggcagctggtggacattcgcgagccggagactcagcccgtctgcttcttccgctgcgcgcggcgcacactacaggcgcgtgggctcattcgcactttccgtgagttctgggtggccacgcgcgtactccactactctccctccctcccaggccccgccccctgggtcccagggtcctccccttcaggccccaccttctgttccaagtcccggtgttcaaagagctgcggactcttcccccttgcagagcgaccagatcgcgtagagctgatgccgctgcctccctggcagccggtgggcgagaacttcaccctgagctgtagggtccccggcgccgggccccgtgcgagcctcacgctgaccctgctgcggggcgcccaggagctgatccgccgcagcttcgccggtgaaccaccccgagcgcggggcgcggtgctcacagccacggtactggctcggagggaggaccatggagccaatttctcgtgtcgcgccgagctggacctgcggccgcacggactgggactgtttgaaaacagctcggcccccagagagctccgaaccttctgtgagtgggtgtggggaggagatggggacccagtggggtcggtcggtgtttaggaggtttagaggtagatacatctgaatgctgaccccgacttcaaccctcgccggctgagctgtttccccctcc

SEQ ID NO: 36533 - DNA, 97 bp, Homo sapiens; identical to SEQ ID NO: 18571
  chr19:10464756-10464853
  hypo

SEQ ID NO: 36534 - DNA, 56 bp, Homo sapiens; identical to SEQ ID NO: 18572
  chr19:10687570-10687626
  hypo

SEQ ID NO: 36535 - DNA, 74 bp, Homo sapiens; identical to SEQ ID NO: 15734
  chr19:10687853-10687927
  hypo

SEQ ID NO: 36536 - DNA, 183 bp, Homo sapiens; identical to SEQ ID NO: 27761
  chr19:10872413-10872596
  hypo

SEQ ID NO: 36537 - DNA, 372 bp, Homo sapiens; identical to SEQ ID NO: 18575
  chr19:10874575-10874947
  hypo

SEQ ID NO: 36538 - DNA, 83 bp, Homo sapiens; identical to SEQ ID NO: 18576
  chr19:10875524-10875607
  hypo

SEQ ID NO: 36539 - DNA, 134 bp, Homo sapiens
  chr19:10875959-10876093
  hypo
cgccagcacacgagaacaggcatgcagatcggctctgcccagcacagggcctggcgccgagcaggtgctccgcatgcacggccgagtgaacgagctcaaagggctggtgctgtgccccttcttgcctactgggc

SEQ ID NO: 36540 - DNA, 177 bp, Homo sapiens; identical to SEQ ID NO: 14780
  chr19:11199850-11200027
  binary

SEQ ID NO: 36541 - DNA, 903 bp, Homo sapiens; identical to SEQ ID NO: 30041
  chr19:11532739-11533642
  hyper

SEQ ID NO: 36542 - DNA, 595 bp, Homo sapiens
  chr19:1156143-1156738
  hypo
cgcctgtgtccgagtcccctaggccagcacggtgctcctggcagctcctccctccctacggtctctgagccccccacgtctgtggacgccccttccaggcggcaaccccaggaggctcaggggaccgggttcttcaaggggagggcttcacacatggcatgtgacctggagtccatgccttggggacctggcagggtgtggagacctggaccgggaggggatgggggcaggagaacaatgcggacaccaggcacaaccaaccaagagtcagggcccaaaaccaggaggcggaggcggaggcggatcctcacacacggctgcttggcagtctgggattcctcaagaggctaacgctggagtcaccacaccaccgagcaattccacaccacacagaaacgtggccatgcacgtccacagcagcaccactcacaacagccacccgaggaagcagcccagtgtccacggataggcgagtggaccagcatgtggcgtggcccatccacgtgccagaacacgacacagccatgaacagcagcgaggccgacctaggccacagcgcagacgcaccttgaggacgtcacgctctgtgagagac

SEQ ID NO: 36543 - DNA, 409 bp, Homo sapiens; identical to SEQ ID NO: 35612
  chr19:11689277-11689686
  hyper

SEQ ID NO: 36544 - DNA, 68 bp, Homo sapiens; identical to SEQ ID NO: 18583
  chr19:1179335-1179403
  hypo

SEQ ID NO: 36545 - DNA, 1052 bp, Homo sapiens; identical to SEQ ID NO: 24130
  chr19:12995814-12996866
  binary

SEQ ID NO: 36546 - DNA, 526 bp, Homo sapiens; identical to SEQ ID NO: 25324
  chr19:13209965-13210491
  hyper

SEQ ID NO: 36547 - DNA, 519 bp, Homo sapiens; identical to SEQ ID NO: 25325
  chr19:13213427-13213946
  binary

SEQ ID NO: 36548 - DNA, 717 bp, Homo sapiens; identical to SEQ ID NO: 18587
  chr19:1370777-1371494
  hypo

SEQ ID NO: 36549 - DNA, 203 bp, Homo sapiens; identical to SEQ ID NO: 18588
  chr19:13879644-13879847
  hypo

SEQ ID NO: 36550 - DNA, 255 bp, Homo sapiens; identical to SEQ ID NO: 18589
  chr19:1423978-1424233
  hypo

SEQ ID NO: 36551 - DNA, 524 bp, Homo sapiens
  chr19:1455104-1455628
  hyper
cggcgccgccctctgagcccgcccccgctgacttgctccccaggtgtttcctgctgaatgagattgagaaggaggagaaggagaagctctggtactactctcagctgcagggcctgtccaagcgcctggacgagctgccgcacgtggagacggtgagccggccggggagccagggggcagcgcgcccgccccactcagggtgcgggaagcggcgtgggggaggaacggggcctggcccgggcgcccctcaccgtggcccgcccgcctgcctttgccagcagttctcgatgcagatggacctgatccggcagcagcttgagttcgaggcccagcacatccgctcgctgatggaggagcgcttcggcacctcggacgagatggtgcagcgggcacaggtgcggcggtgggcggggtggcgcggcggtaggcggggccctgcgccagtgggcaaatcagagtgcagatattatgggcggggtctggggtaatgggaggagtcttatgcctcctgggttggggggcgc

SEQ ID NO: 36552 - DNA, 941 bp, Homo sapiens; identical to SEQ ID NO: 31458
  chr19:1577427-1578368
  hypo

SEQ ID NO: 36553 - DNA, 1006 bp, Homo sapiens; identical to SEQ ID NO: 30049
  chr19:17716524-17717530
  binary

SEQ ID NO: 36554 - DNA, 106 bp, Homo sapiens; identical to SEQ ID NO: 18594
  chr19:18059933-18060039
  hyper

SEQ ID NO: 36555 - DNA, 956 bp, Homo sapiens
  chr19:18722000-18722956
  binary
cgttttaagcaatgcccaaaggtcacctcccatcattggcagggctctgccggcttttctttgcttctctccctgtcacctggacagaaccactttgcagtctgagcatcagtttcctcacccatataaaagggcaacgctaccggtacctgtcttatacggttgttgcaagaaaaagtgtttcgttggaatgaatgaaagacagtaattgtggaggggttaggcgcgcgcgggcctctggaattagcatgtgtgggcttgaatcctgactttgccaacgcgtcccggagcctaagtttcccacctgtgaaatgggggacagtattggtcataacgcacagggctgtttcccaaggtgcgggcctggcgcgcgggtgggttagaagcggaattctcctgctggattctggcgcaaactgcgggctggaggccctcgccgccgggtcgcagcggcctagcatgggaggggaggggaggggcggggcggggcgggggaggggccgcaccgggatccagatgttcggggtccgccaggcacagccgcgcctgattaagccacgtgggggccggccgggggccgctgagatgaaagcgcggccgcaggccagagtagggggtgcgccgggcccccacccgggacaccctcttcccaggccgaaacctgagccgccctctaacccgcagaccctgcgaggctgccgccccgtctgcgggggcggagcgtaggtgggggacctgcgggctgctgcgcggcgctgcaggcacctgcgccaggcatgccagcgaaagcgggggcatctttgcagaggatccgggtttagaggggcgtccccactcccttatctggcggagaggaagctgggggtaccctctaaccgagattcggctcctggggctacagtccatcgccctggggtgtgatggttatggaagtcagaagtgtcgctatttgcccc

SEQ ID NO: 36556 - DNA, 531 bp, Homo sapiens; identical to SEQ ID NO: 25351
  chr19:19391401-19391932
  hypo

SEQ ID NO: 36557 - DNA, 713 bp, Homo sapiens; identical to SEQ ID NO: 18600
  chr19:1960909-1961622
  hypo

SEQ ID NO: 36558 - DNA, 116 bp, Homo sapiens; identical to SEQ ID NO: 18601
  chr19:19974498-19974614
  hypo

SEQ ID NO: 36559 - DNA, 767 bp, Homo sapiens
  chr19:2244081-2244848
  hypo
cgcccggctgccccagcttagggcctgcagatgggcgggtctttgggtcttcagtgtagcccatttgcttttcttgtgcctgtgtctgccttgtgcctactgctggcgtggtggcgtgggcagtggacggctccctgcctcgggagtgaccggcggtgctgtcctggctgtgcctccctctgactcagaaccaccaggaaggtggtgtcgggggctccctgggaacccccactgctcgaagcctggcccacagccccaggtggtgacacccgtgctcacgaaggcctcccgctggatcccccgttttcagaaatgcttgaccactgtcagcggtagccatgcctctacagaaggggggttctgcctccatgcctctacagaaaggggatcccgcctctgagggccttgacggcagcaggccgcgatcttctgtctaacgggcccctgttcttcccctccaggacccgtacttcatgaagaaccacctgggctcctatgaatgcaaactctgcctgacacttcacaacaatgaggtgcggcctctgcctggctccgggcggctcgcggcgggctgagtggctgacgtcagggggacctgcctgtgtctgtccgcccggcctcgagtcatgcgtgtttcctttccactccaggggagctacctggcacatacgcaggggaagaagcaccagaccaacctgtgagtacctcatgtccctttgatgcctggtgctccagcagccgttggctcaagtctctgtgagcctcgc

SEQ ID NO: 36560 - DNA, 930 bp, Homo sapiens; identical to SEQ ID NO: 30058
  chr19:2289696-2290626
  binary

SEQ ID NO: 36561 - DNA, 558 bp, Homo sapiens; identical to SEQ ID NO: 25355
  chr19:23598378-23598936
  hyper

SEQ ID NO: 36562 - DNA, 522 bp, Homo sapiens; identical to SEQ ID NO: 30059
  chr19:267137-267659
  hyper

SEQ ID NO: 36563 - DNA, 38 bp, Homo sapiens; identical to SEQ ID NO: 8230
  chr19:32849484-32849522
  hypo

SEQ ID NO: 36564 - DNA, 74 bp, Homo sapiens; identical to SEQ ID NO: 18607
  chr19:33585141-33585215
  hypo

SEQ ID NO: 36565 - DNA, 966 bp, Homo sapiens
  chr19:33791861-33792827
  binary
cgggaaggaggcaggaaacctccaaataaaatgacaaggcacgatttgctccccctactcagtaggcattggagcggtgagtttgcatttccaaggcacaaggttatcctaaatactagagttgccgggctcccagctcagccccaagaattctcccctcctcgcagggagaagccaccgcctggccccctcatcttagacgcaccaagtccggcgcagaggaagggaggggacacgcggagcaggccaggctttcaggaggcaccggaatctcctagtcctggctcgcacggctcgggcaagcctcgagatccggcgaccccaaaccactccctgggtccccgccggaggctggcccagggcggtcccacagccgcgcgcctcacgcgcagttgcccatggccttgaccaaggagctctctggcagctggcggaagatgccccgcagcgtgtccagttcgcggctcagctgttccacccgcttgcgcaggcggtcattgtcactggtcagctccagcaccttctgctgcgtctccacgttgcgctgcttggccttgtcgcggctcttgcgcaccgcgatgttgttgcgctcgcgccgcacccggtactcgttgctgttcttgtccaccgacttcttggccttgcccgcgccgctgccgccactcgcgcggaggtcggggtgcgcggcgcccagccccttgagcgcgctgccagggcccggcaggccggcggcaccgagcgcgggcgcggggtgcgggctgggcacgggcgtgggcggcggcgtggggtgaccgggctgcaggtgcatggtggtctggccgcagtgcgcgatctggaactgcaggtgcggggcggccaggtgcgcgggcggcgggtgcgggtgcgggtgcgagggcggcggcggcggcggcggctggtaagggaagaggccggccagcgccagctgcttggcttcatcctcctcgc

SEQ ID NO: 36566 - DNA, 654 bp, Homo sapiens; identical to SEQ ID NO: 35634
  chr19:34310910-34311564
  hyper

SEQ ID NO: 36567 - DNA, 420 bp, Homo sapiens
  chr19:36347680-36348100
  binary
cgggggatcccgccctgcgtcccccattcatccgcgtctcagccgcgggagtttctcaacgggaagagggcggagctcccggggggcggacccgggcggggcgagcgggatcgggccctcttggggtctcccagagacccaggccgcggaactggcaggcgtttcagagcgtcagaggctgcggatgagcagacttggaggactccaggccagagactaggctgggcgaagagtcgagcgtgaagggggctccgggccagggtgacaggaggcgtgcttgagaggaagaagttgacgggaaggccagtgcgacggcaaatctcgtgaaccttgggggacgaatgctcaggatgcgggtccccgccctcctcgtcctcctcttctgcttcagagggagagcaggtaccgcacgaggggagc

SEQ ID NO: 36568 - DNA, 237 bp, Homo sapiens; identical to SEQ ID NO: 30065
  chr19:36478129-36478366
  binary

SEQ ID NO: 36569 - DNA, 762 bp, Homo sapiens
  chr19:37263645-37264407
  binary
cgctcggggccagcctagccaagttcctcaggactccaaggcgcggcggcagctaaatcggcacagcaaacggtcccgccacctggctaagaggaagccaaaatctcgcgagacgtggcgtcggcctgcgggatcctctgggaaatgtagtccagagcccgactgcgggcttccctatgcctctcatttccaagcctggcttgtttccttttaccgctcctctccaacgaggatcgcagagccctcatgccgagcggctcgctatggggccggctcgcccgctagagtggtcaggcctgattatccctggcagctctgttatctggggtaagacacaggaaaacgtgcttccggttctcggcggaagtagccccgaacggtagaaccgatgggaaatgtagtccagggcagaaaagcggtcaacccagccacgatgcgagccaaaggattcttggctccaagcctggtcctggctgttagtttggaactcatgcacccagatgctaactcgccctcagaatgcagaggggatgaaacactgaccggacaattcaatctgtatatgggtgagtccagggctcagtctgcattgcgcggaaaatgaaggtgaaggtggaggtgggacctgatggtctcgtcccggatagggttgaagaagtgggagaaaaggaatcaaaatcgtggatgggataagattgtgcgcgaatgctctctgggagcggatcgtggccgacgagggcccgaagatgctgccttgtgatc

SEQ ID NO: 36570 - DNA, 792 bp, Homo sapiens; identical to SEQ ID NO: 26640
  chr19:38719834-38720626
  binary

SEQ ID NO: 36571 - DNA, 698 bp, Homo sapiens; identical to SEQ ID NO: 30071
  chr19:38852786-38853484
  binary

SEQ ID NO: 36572 - DNA, 375 bp, Homo sapiens; identical to SEQ ID NO: 34577
  chr19:39993380-39993755
  binary

SEQ ID NO: 36573 - DNA, 441 bp, Homo sapiens; identical to SEQ ID NO: 22838
  chr19:42028298-42028739
  binary

SEQ ID NO: 36574 - DNA, 288 bp, Homo sapiens; identical to SEQ ID NO: 30075
  chr19:4304429-4304717
  binary

SEQ ID NO: 36575 - DNA, 463 bp, Homo sapiens
  chr19:44455276-44455739
  hyper
cgtttactccttgggcattctgggaagtgtcccaacggtcggtggggttgcgggcacttccggtcaggcaggcggatccggggaattctgggaaatgtagtccagacgctctgtggagtcgcgggagctacggctgcgggagttaccctttattctgtgatattttgagctgttctgcgtctcgcaggcccttctgaatttcctggacctactctcggaaccctcaacgagctagcgatagatttagaggaaaggaagcaccgtcggaaagcaaaggtttggaagggtgagggcggcggtttgcgatccccgcggcagagccttcttgcgtttagggctgtcctagcatcccgagggactcggtcctgtcacgtttcgccctatttgggggtttctggggctctcagctcgcccaatccgcatccctccactactggcgcggggccgattcccccggtacaac

SEQ ID NO: 36576 - DNA, 499 bp, Homo sapiens; identical to SEQ ID NO: 24171
  chr19:45603745-45604244
  hypo

SEQ ID NO: 36577 - DNA, 602 bp, Homo sapiens; identical to SEQ ID NO: 25385
  chr19:46379840-46380442
  hyper

SEQ ID NO: 36578 - DNA, 83 bp, Homo sapiens; identical to SEQ ID NO: 8264
  chr19:47676020-47676103
  binary

SEQ ID NO: 36579 - DNA, 632 bp, Homo sapiens; identical to SEQ ID NO: 30083
  chr19:48901504-48902136
  binary

SEQ ID NO: 36580 - DNA, 461 bp, Homo sapiens
  chr19:4986363-4986824
  hypo
cgatggcggagtaaacgggtgatggccactgagcgctggccgtggggactcttggtcctggctgccaagtagaagcttcaggggtgctcttcacagtcagctgactctgctgtccctgatagcagaagacagcgaaggcacctgccccctgccatggcaggtcggcgggcacagaggagggctcgggaggctgtgtcctccagcgtctccatgtttactgtgccaggccaggtgctgaggggccggcgaggaagacgtgaggactggagagagcctggattagggccctcgaggggcggcgctgctttagccgggggaacagggagggcctctcccagcaggtgacattcagtcagagacctctgagcgactcacacctgcccacctttgcaggatttgggacaagagtgctccaaagaagtgcaggcagcacgtgcggaggccccaaggcggaacgaggc

SEQ ID NO: 36581 - DNA, 57 bp, Homo sapiens; identical to SEQ ID NO: 18629
  chr19:50130742-50130799
  hypo

SEQ ID NO: 36582 - DNA, 253 bp, Homo sapiens; identical to SEQ ID NO: 8275
  chr19:50306223-50306476
  hypo

SEQ ID NO: 36583 - DNA, 886 bp, Homo sapiens
  chr19:50836203-50837089
  hyper
cggttccattcggagccttggtctctggacaccaaaggtgaaaatgtgaggactctctgcctacgatccttcgtcccctaaaaccctccaagtaccttggccccgaaagctcagagtcgaggggaatctccccgctataatctttgggtccctggatcccaagtcccccgtctccaaaactaggattcgggctgtcttaccgcccccggaccctgagccttcgccccctcccccgtactcaccccaagtcgaggcgaggtggggatgggggaatccggggctcgagatggggggaggggtgacccagccccggcagctctgggcagcaagaggctgcagaggggggagtgacatcaccgccggaggaggggcagcaccgctcccccaacccaggggcttcaagctccgcctttatggcggaccccggggtcctggaatgccaaggcagagaggagaaacaggagacgaggtccgagggaacggtatccccgccccttagaacaggaactggtaaacccttaccaattacagccacccccgactgccacctgtggctgccgtcgcgacctgtcgcctcccacgcatgttgtggctgcgcccgcccccgtcagggcgtgaccacggcgtggactacaacgaccgtgatgctccacggagccaggagcctttgacgaaaggcagcgtaggcgagggccttcatgggactcgtagtacaaggcccatcacaagggtgcgccgtggagaaaaggggtgatacccttcgcctccctctcttcctcaactccgtgggtccatgcacaaagctttctcttcaaaaagtacgctctgaaaagaagcaacctaggcaggttcgttcaatggaaatattggatttttactgagtagc

SEQ ID NO: 36584 - DNA, 1265 bp, Homo sapiens; identical to SEQ ID NO: 30087
  chr19:51227617-51228882
  binary

SEQ ID NO: 36585 - DNA, 772 bp, Homo sapiens
  chr19:53970802-53971574
  hyper
cggtctcgactccaaaaccctaaaacaggcgctggagcgagggtgacggactcacaggtcccaccccggccccgccctctgcgccttccaaagggcaaagtctctccgcctctcgccccgcccctgcttcgtcaggccccgcccacctcccaggtcccgcccaggcctggcttctgtcctgcgcgcagattcgcgaaaacccggaagcggatcgcgtggagtgacggtcccacggcagcgcgtgagtttggctctgtgttgtattaggtctgcacttcccaggtccctggcgcttctgtacctggggcgtggggtccccacaaacctggaaattctcagccgtcttccttcacccagagcaaattgagacgaccccgtgagagtccgggggtcgcttccttttgtgtttaaggtcgccctgaggctggtcccgtcccgggtctttctgctatagggcaatgtatacactttctatcgcgcatttttcctgctctaaacctttctctgactcctcccaccccgcgctttttgaagtcctcacccaaggggtggattctcgcccacttcggccggtggagcgcagaaccgcggccccagtcccgggaaggccgcgtcctctgtctggtcccgggatcctgcagaccccacccttgtcttaaggcgccctcgcgcccccccccccccacctccctcctcctgccgggccctgctgcttcctaggtctcccctccgcagtcacggcttcccctgagcccacgttggggaggtgccc

SEQ ID NO: 36586 - DNA, 123 bp, Homo sapiens
  chr19:55685223-55685346
  hyper
cgaggaggaggctctggcgcctttcttcctgcgcagccaggtttctaaggaaatgaaccctcaggactcggttgcggagcgggtgtgttcggcgcctcctgggggagcagcctcctaagagcc

SEQ ID NO: 36587 - DNA, 802 bp, Homo sapiens
  chr19:55690206-55691008
  hyper
cgacccgggatcccagccggattttccagcccgcctgcccgagtacacccgtccgaatcccgcccctcggaatcctggccaggctttctctctgctcggccccccacccccgggtcttgctcacctgggccgtggctgatgcgactggagtcgggaggcgtgtcgggcgatggaggccccggggttgggggctccgggaacatggtggcggggtcctggagtcttttctgcagagacactcaagcaccctagtcccccattcccaccccagacgtcctttgagccccacgcacaacaaagaactccaactcccatgaggcctttgcgcgaacagccgcgcagaaaccggacagccaccgcgagtcatgctgggagttgtagtatcagcctccccgcacttgagagggggtgtccaggacctagttccatcctaaagggataccctcttcctccacggccccacaggcatcccgctgacttctgcctcgtcctcgcccctccgcagggtctgaaccggaagcgggcgaaggcagacgtgggaaccagcagaccgcgttgcccagagcaacagccgggctcctctcaagcggggtgagagcaaagctggttgcccgggcaacgggttgttgccaggacaacgggcggggctgacgcacagacgcggagtcccggcggggcaggctcgctccggggcccaccggtgcctgggaaccccccaatagcccgactgggatcctgaggtcccgcgaggtggggagcgggcagcctgtggtccgagcgcccacagccgactgctccctcc

SEQ ID NO: 36588 - DNA, 486 bp, Homo sapiens; identical to SEQ ID NO: 18634
  chr19:55986223-55986709
  hypo

SEQ ID NO: 36589 - DNA, 717 bp, Homo sapiens; identical to SEQ ID NO: 35663
  chr19:5608081-5608798
  binary

SEQ ID NO: 36590 - DNA, 116 bp, Homo sapiens
  chr19:56181799-56181915
  hypo
cgtgcaccctgctgtcccgtgcaccctgctgtcccgtgcaccctgctgtccgtgcaccctgctgtccgtgcaccctgctgtcccgtgcaccctgctgtccctgcaccctgctgtcc

SEQ ID NO: 36591 - DNA, 430 bp, Homo sapiens; identical to SEQ ID NO: 33610
  chr19:56201494-56201924
  hypo

SEQ ID NO: 36592 - DNA, 806 bp, Homo sapiens; identical to SEQ ID NO: 22848
  chr19:56915147-56915953
  binary

SEQ ID NO: 36593 - DNA, 465 bp, Homo sapiens; identical to SEQ ID NO: 23174
  chr19:58011085-58011550
  hyper

SEQ ID NO: 36594 - DNA, 834 bp, Homo sapiens; identical to SEQ ID NO: 18638
  chr19:581325-582159
  hypo

SEQ ID NO: 36595 - DNA, 553 bp, Homo sapiens; identical to SEQ ID NO: 25419
  chr19:59049750-59050303
  hyper

SEQ ID NO: 36596 - DNA, 352 bp, Homo sapiens; identical to SEQ ID NO: 18640
  chr19:6744359-6744711
  hypo

SEQ ID NO: 36597 - DNA, 743 bp, Homo sapiens; identical to SEQ ID NO: 15791
  chr19:941824-942567
  binary

SEQ ID NO: 36598 - DNA, 405 bp, Homo sapiens; identical to SEQ ID NO: 18642
  chr19:9545915-9546320
  hyper

SEQ ID NO: 36599 - DNA, 400 bp, Homo sapiens; identical to SEQ ID NO: 24209
  chr19:9903614-9904014
  hyper

SEQ ID NO: 36600 - DNA, 850 bp, Homo sapiens
  chr2:102090370-102091220
  hyper
cgggtccccgcggggcagaccggatggctttccgcgggaagggtgacaacggggaagtcacagatgggaagcccggccccatcgccgattcgggcccggggcttttacgcgtgtgcgtgcatggcaggtccctccgcgctgcggcgggcgagcatcagaaagcgctgggcctggggccgctcctcacacccggctttgacccggcgtcccgagggcagccgtagcgggaaccacgcttcccctccccggccccacctcctccatcccagcgtcccaggcgcctggcggctcaccactggatgacgccgctgtgcgggccccggctaccctcgccgctcgacggcgaggccggcaccccctcggccatggctcggccccgggcctgcagcaccgaggcaggcagcgagcggcggccgtgggcggcgctgggttgcaccggtcctgctaccgccgctcctcggtgtttactttagaaaggagcgcgcggggggcgcgcggggcgcggggcgggagcccagtcctccaggcccgagcccgggggcgcggaaggcgcgcggcgagtacgggaggccacagctccccaacccccgcgccccgccgaggatgcgcggaccccgccctgcatcctgcggtgtgggctggagctgcctcccgctctcacccagcgcccttcccaccggcgtagcaaccagtcaaacagggacgcgaacaacaagcaccaacttacaccttttccaatctggtcgcggtgttgagtccgtgggtgtccttgacttgcttgagcgttggagttattcaggcagttttcaaaaatattgataccccggctgccgctccccatcccagcccc

SEQ ID NO: 36601 - DNA, 614 bp, Homo sapiens; identical to SEQ ID NO: 15795
  chr2:10334473-10335087
  hypo

SEQ ID NO: 36602 - DNA, 203 bp, Homo sapiens; identical to SEQ ID NO: 18644
  chr2:10517952-10518155
  hypo

SEQ ID NO: 36603 - DNA, 290 bp, Homo sapiens
  chr2:106730126-106730416
  hypo
cgtatctaatgtttgatccactgcagaacaaacgtgcactttctgggcacctgagggcagggagcctggggcgtgaggacctgggctctgcttctcactgcgcccatgtgtccgccgttcccgctccaccgctcactgcccaggcctgccactgactcggtcgcagcaagactgggaaagaagcagtactcacctgaccgcctcagtgttctaagactgaagcacaggcccagtggctgtatttggtgccagttatcactaccagctgaaacagttcttttttcaatttc

SEQ ID NO: 36604 - DNA, 955 bp, Homo sapiens
  chr2:118981553-118982508
  hyper
cgtttcctttcagctaaactacagagcgaatcttcatttcctgtttcactgcttcccccgaaagaaacttttctttttctttttctttttctttttttttcttttctttctctcccccagcagagagtccgagagaaaagtgctgggcacagagctccccacgaggtccccggaaagcagacttagctcctgatcgttgtcaatctttgggcaacccggggcctcgcaacggctcgggtttagtgtgatctggggaggctgcagcccagttccggctaccgtgggcgcctgagcagagccggggcgagttgtaaacctcagagaaaggcacttgtccccagcaaaacgcttggagaggaccgtgcacgctgtgctgcccccgccccgagacgcgccgggccgccgggtcaccggttttccgaaagggacccggcagagacaaagtgccttcgccgctgcgataggttggttttactttgcaataaacagcccctaatgggaccgggcgccgggcggagagctcggcccggggcgcggcctttgccgcctggctctgcgggccgccccgccgggcgccaggttttggggggtggcccggccccgcgtccgccactgcaggccgctctcctccttcccgcgcacacagcggagaaaaaaggacgcaaacagcattttacacttttcccactttagcgggaatcggaggagccgggcgagaaagcccgaaaagggaggcggttatttacgaccggcgggttggagtctggcaccagatggtgggggtctgtcaggcccggccgccccgcccagcgccccgcaaacagcgcccggttggcagcgtcgcctgagcagcccccatcttcgcttccagcccctcccgtatattttctcccgtccaagtcgatcaaagacggactttaaaaattactcgcaattagacccaaaaaagtcattc

SEQ ID NO: 36605 - DNA, 268 bp, Homo sapiens; identical to SEQ ID NO: 18647
  chr2:127895375-127895643
  hypo

SEQ ID NO: 36606 - DNA, 802 bp, Homo sapiens
  chr2:134023956-134024758
  hyper
cggaagcatacagtctgcggggacaaggactgaacggggtagtgggagccaggtgccgaagggctggggctagggtggcggcgcgcagggggcgcgcctgggcggggagtgggctggcgtctccttacctggccttcggtggagcatgctgctgcgggctgggggcggggtgggcgctgcgtccccaggggttgactccgcagcgccttcacttcgggggcagcaaggcgcgcgctgcagagccgggagttgccaaacttgccatgtccagagcgcggaggcagcctgggccacgcgctcaccgcagcccgggcacctcgcgctcctccgctttgttgtgttccgccgccagtccccctgcgcctgcctgccagtgtccccgagccctctcctgccgcgggacgtttcactggcgctcagggaggcccctcgggtgggcagtgccactttcctcctggaggcgcgcgttaaagatctgcctgggagcgcccggcgggcggctcggcttgcgctctgatgaggaggctggggcccatcgattcccaccccctacccactccccctcccctcccctccgccgggcccccccatcagaagctgcttaggatcggcgctgtcaaatccagcccatctgctgcaatcataatcagtctcaaccgaacggttctgacaaatctccgcctggagctggagttggagaagctggagagtgaggggcggggaagggaggtgggggtgaggggacgatggggaccgggcgccctgagagggggcctggagccttctattgtctgcccctaac

SEQ ID NO: 36607 - DNA, 793 bp, Homo sapiens; identical to SEQ ID NO: 22864
  chr2:149632592-149633385
  binary

SEQ ID NO: 36608 - DNA, 101 bp, Homo sapiens; identical to SEQ ID NO: 15808
  chr2:15783084-15783185
  hypo

SEQ ID NO: 36609 - DNA, 741 bp, Homo sapiens; identical to SEQ ID NO: 30125
  chr2:160760627-160761368
  binary

SEQ ID NO: 36610 - DNA, 133 bp, Homo sapiens; identical to SEQ ID NO: 15812
  chr2:171730981-171731114
  hypo

SEQ ID NO: 36611 - DNA, 704 bp, Homo sapiens
  chr2:171822495-171823199
  hypo
cgctgcctcctcactcactgtggatgtgacgccccccactgccaaggcccccaccaccgttgaggacagagtcggcgactccaccccagtcagcgagaagcctgtttctgcggctgtggatgccaatgcttctgagtcaccttaactttgaaccattctttggaattggcgtggtatatttaaccacgggagcgtgtctggaaacgcaaactatcattaatttcatactagtttgtaccgtatctgtaggcatcctgtaaataattccaaggggaaaactaaacgaggacgtgggttgtatcctgccaggttgagtggggctcacacgctagggtgagatgtcagaaagcgcttgtattttaaacaaccaaaaagaattgtaagggtggcttgctgccaggcttgcactgccgttcctgggggtgtgcatcttcgggaaaggtggtggcggggcgtccactaggtttcctgtcccctgctgctccttccgtaagaaaatgaaatattctatgcctaatactcacacgcaacatttcttgtactttgtaagtcgtttgcgagaatgcagaccacctcactaaactgtaaacggtaaagagatttttacttttggtctccgtgagtcgcatctctactaaggtttacacaggaattccacctgaagacttgtgttaaagttctacagcgcgcactgttaactgaac

SEQ ID NO: 36612 - DNA, 834 bp, Homo sapiens; identical to SEQ ID NO: 18654
  chr2:174219533-174220367
  hyper

SEQ ID NO: 36613 - DNA, 856 bp, Homo sapiens
  chr2:175201841-175202697
  hyper
cgggaagacgtcgcacctgaaggcgcacctgcgctggcacacgggcgagcggcccttcgtgtgcaactggctcttctgcggcaagcgcttcacgcgctcggacgagctgcagcggcatctgcggactcacacgggcgagaagcgcttcgcctgtccggtgtgcaacaagcgcttcatgcgcagcgaccacctgagcaaacacattaagacgcacaacgggggcggcgggggcaaaaagggcagcgacagtgacacggacgccagcaacctggagacgccccgttccgaatcccccgacctcatcctgcatgactccggcgtcagtgccgcccgggcggcggcagcggcggcggcggcagcggcggcggcggcggcggcggcctccgcgggaggcaaggaagcagcgtctggccccaacgactcttagaggccgggcgagaggcgcgagcacacaagcgagtagagacaccgagaacgaacgagaggttcggagggcgagcgagcgggaggcgggagggcaggggcttcagtgacgcccccagggcccgggctgggcgcgaggtggagccgctcagggctcccgggctgcggttcgcccgctgtgcgaggagctcccctctgccttccgcgcccggataagaatcgaacgcgtggtccggaaacaaaagcgaaccatcctccgacacaaacactttaaaaactgtactcccagacgtacacatacaccggagacctacaaccacaagcacgcacactcgcgcgcgcacacacataccactcgcccaaacttctcgagcgaagagcaatacatagaaaggctccctctttgcccactctccacctccctccaacaccc

SEQ ID NO: 36614 - DNA, 1776 bp, Homo sapiens; identical to SEQ ID NO: 22868
  chr2:182321353-182323129
  binary

SEQ ID NO: 36615 - DNA, 204 bp, Homo sapiens; identical to SEQ ID NO: 18656
  chr2:191796737-191796941
  hypo

SEQ ID NO: 36616 - DNA, 818 bp, Homo sapiens; identical to SEQ ID NO: 31608
  chr2:19551135-19551953
  hyper

SEQ ID NO: 36617 - DNA, 856 bp, Homo sapiens
  chr2:200326720-200327576
  hyper
cgggcgcgggacttcggctctcgcctgggccatcccgggctctgagggcccggcatccatccccaaggtccatggctttcaagttcggtcacccaggcagagagaccctgccttttaaagagccctggaaagttgcgccgcgttttccctcaaccctggaacacgcagggaaaactatgggaatcgcccgcgtcaaaagctttcgacggcttctaggaacccaagcgggcctgcctcttcccctggagcttgccctcctgggggcgggaggagggcgggagggaatcatttctttcaaatgaagcccacgccagctctgaagccaatttccgccgcggactgtccgtggagagttggcgaccaacactttctcggacggcataaccgcgaggggcttagactggaaatcagatgcgccaagaggacaagagccaggggccagaataccccagtgggggacgcgccttggaggacggttcgcccagggtgggcttcagccctttcccagagtgctccgggcgtctggggactgaccggagcgcagggcgggggacacttacttcgttatccgcacgccttcctcgttggcatcagagccggacaaatcccaacccgcgccaggcaaagataaatgactcctggctcccccggcagctcagggggtctgggcgggggcggagagggaaggaagccgtcggccgccggaggtagagactgtggaggtcctcctcccggccccaagcgaatgagcccctgcggcccgagcagagagatacgcctcagagggacgactgatggggaaggatggtgggcaacgagtctgcgctaggcggtgagcctagcaccccagaggccc

SEQ ID NO: 36618 - DNA, 859 bp, Homo sapiens; identical to SEQ ID NO: 28960
  chr2:200329083-200329942
  hyper

SEQ ID NO: 36619 - DNA, 467 bp, Homo sapiens; identical to SEQ ID NO: 35695
  chr2:20068485-20068952
  hyper

SEQ ID NO: 36620 - DNA, 108 bp, Homo sapiens
  chr2:20456213-20456321
  hypo
cgtagtgatgctgaacttgctgtatttaaactgtcttcactgtgtaaatcatccgctaatatttatcgggcggtaactaacatgactaattcagaattacacacttcc

SEQ ID NO: 36621 - DNA, 885 bp, Homo sapiens
  chr2:207139040-207139925
  binary
cggaaacgactagctctcttagccccgttttcttttctacattcatacgttgctttgaattggcaagcagtttttatttggaccctcaaacgctaaaaccttggtctctacttcgcgtcccaactgtgcttatgagtctagtcatttttgttggaacgcgatagatttcccaagctccggagtggggccctgaccagggaggaagtgtccgctttaagagcttctggaggggaggaaggggctcctccgcccgggtgggagagtgagtgagtgggtgggcgggcagggggcggtcccgccgctcctgcgtcagaaggggtctggttttcgcaccttccctgacgtcaaacctccatcagggttgcaacgccacgttgccttggatgcctgcgtgagtggagtcgcgactcggggcccgcgtcctgagagacgcgctcccgcgccgcttctcgcctccggaccgcaggggccgaagtcgcctatttctggctccgcgggcagcggggccgtggcgctcggacggtctgggattcgggcgccgccgcggaaccggaataagaagggagagcgcccggctcggtcctcggtctccaccgcggcccggaaggaatccgggcagcctccgcggaggtgagtgccgcggcgggggcggggcgcggccggggcgacgcccgcgggcggggcctgctcgccgggcgcccggggcgccttcttcccgagggacgccaggaccgctcgctgggctcccgcggccgcctcgcaggtcctcggcttccccccaccccgcgtccctttctgcccctgctgcgtgagaggtgtcggcggctccgggccgggatcgaggtggcggggcgagggaaggaggtggggcgcaggctgcattgc

SEQ ID NO: 36622 - DNA, 433 bp, Homo sapiens; identical to SEQ ID NO: 18662
  chr2:219748345-219748778
  binary

SEQ ID NO: 36623 - DNA, 860 bp, Homo sapiens
  chr2:219857682-219858542
  binary
cggtggaacccagcgcccctcaacccagcccagccgcggccaggcaatcactcacacgccgttttccaccttgaccgagcgcaccctgggcaggcctccgcgctcgcagacgttcgcacagtcgcttagcagccgacagcgacggccctggaagtcctcctcgtcccagagcgtgaggctggcgggcgccgggcccggcgcgggggcgctgctcatgccgctgcggacaggaagggtggcaccacgcgctcagcgtctcaagagccccgtttcgagccacacacagcctgcccaacctgggtagcggatgaagaacccgggggctggacccggcctagctctggacccggctgccaggggctcgcagtcttcccgcgctcccctcccttccccaccccagcagagggcattcaccgggtgggtgagcgcggcacgcgagggaaatggaccggctgcgaggctgcgcgcggccgggcgggccgagctttatacctgggccttgtccccctgtccgcaccctttccctcgggggtggggtcgctgagtcagcaggcaggctgcggtcggctctggtctccgctggggagccgaggcctctcccgcagccgccgctgtggccccagcccgcgggaaagacaacagaaagtgctgaggcgcgcaccccgcgcccgccgcagcccaggctgactccgcgctttctttctttccagcctgagccaggcagggcacgccaggcctcggggcagaacgcgccctccctgtcccggccctcggggacgaagggacctggcctcccctgggcctcgggctaagaccgcgctgctgactcgctgagcggaagttcttcccagagtctaatc

SEQ ID NO: 36624 - DNA, 211 bp, Homo sapiens; identical to SEQ ID NO: 18665
  chr2:236949342-236949553
  hypo

SEQ ID NO: 36625 - DNA, 34 bp, Homo sapiens; identical to SEQ ID NO: 18666
  chr2:238934785-238934819
  hypo

SEQ ID NO: 36626 - DNA, 460 bp, Homo sapiens; identical to SEQ ID NO: 33652
  chr2:240167455-240167915
  hypo

SEQ ID NO: 36627 - DNA, 383 bp, Homo sapiens; identical to SEQ ID NO: 31629
  chr2:240168801-240169184
  hypo

SEQ ID NO: 36628 - DNA, 540 bp, Homo sapiens; identical to SEQ ID NO: 25461
  chr2:241771598-241772138
  hyper

SEQ ID NO: 36629 - DNA, 755 bp, Homo sapiens; identical to SEQ ID NO: 24252
  chr2:242004407-242005162
  hypo

SEQ ID NO: 36630 - DNA, 339 bp, Homo sapiens; identical to SEQ ID NO: 15827
  chr2:242169887-242170226
  hypo

SEQ ID NO: 36631 - DNA, 276 bp, Homo sapiens; identical to SEQ ID NO: 18673
  chr2:242566832-242567108
  hypo

SEQ ID NO: 36632 - DNA, 570 bp, Homo sapiens; identical to SEQ ID NO: 25466
  chr2:25438799-25439369
  binary

SEQ ID NO: 36633 - DNA, 725 bp, Homo sapiens; identical to SEQ ID NO: 31642
  chr2:26521776-26522501
  hyper

SEQ ID NO: 36634 - DNA, 353 bp, Homo sapiens; identical to SEQ ID NO: 25472
  chr2:27938267-27938620
  binary

SEQ ID NO: 36635 - DNA, 855 bp, Homo sapiens; identical to SEQ ID NO: 24259
  chr2:30453530-30454385
  binary

SEQ ID NO: 36636 - DNA, 851 bp, Homo sapiens; identical to SEQ ID NO: 25475
  chr2:30454942-30455793
  hyper

SEQ ID NO: 36637 - DNA, 488 bp, Homo sapiens; identical to SEQ ID NO: 18679
  chr2:3418350-3418838
  hypo

SEQ ID NO: 36638 - DNA, 686 bp, Homo sapiens; identical to SEQ ID NO: 18680
  chr2:44553759-44554445
  hypo

SEQ ID NO: 36639 - DNA, 200 bp, Homo sapiens
  chr2:54952231-54952431
  hyper
cggctggagtgggtgtacgggtaccggggtcaccagtgccgcaacaacctgtactacacggcaggcaaggaggtggtctactttgtggctggggtcggggtggtttacaacacccgcgagcacagccaaaaattcttcctgggacacaacgacgacattatcaggtaagggggtggccaggggcggcggggaggggttgc

SEQ ID NO: 36640 - DNA, 291 bp, Homo sapiens
  chr2:60962765-60963056
  hyper
cggtgcgccacaggaactctccggtggtcgggttgtagatgaagagcttccactcggcgaggctctggttgagggactccttcttcatcgtgtgcgcgcggacgacgaggggagcggcggccgcggggacggaggcggcgagggcagcggggacgggggcggcgagggcagcggggacggaggaggcgagggcagcggaggcgcgtcccggctccggcggcgcagcccggcgacggcaggggagggtgggacgaccgagaacacctcctcgttactgggagtactcgagcc

SEQ ID NO: 36641 - DNA, 1230 bp, Homo sapiens; identical to SEQ ID NO: 24279
  chr2:73147029-73148259
  hyper

SEQ ID NO: 36642 - DNA, 1314 bp, Homo sapiens
  chr2:73150996-73152310
  hyper
cgaccagttaactgaaagcaaatcgttggggctggcggccagggcagcgcccctgggaaagggcggagaaagagcgccatggacttttcttccccaccccttggcctcttccgctgccccaggcattgtgaatgtgggtccacgcctcgtccggcctgccccatctcttggcttaacagagggatctggagagctgttattccccgcgttcccccgcggagtggctctcgagtgcggggaggtgttgcggaggggagtggacttagggaaggggcggcaaaagggcaaagggagaaatggcgtgtgtgtgcgtgtcaaggaatggagagggcagggcgcttgggagcagggcgcgaggccaggctctgttgggccccggctcacggcgccccttctctctgtctgtacctgcgtgtgttgccgtcggcggcggggccgcagccagcgacgtgccccaggacgggctgcttctgcacggccccttcgcacgcaagcccaagcggatccgcacggccttctcgccctcgcagctgctgcggctggagcgcgccttcgagaagaaccactacgtggtgggcgccgagcggaagcagctggccggcagtctcagcctctccgagacgcaggtaatcacccccggtcgcggcctgccctgcgcccggagcccgggtggaggtgagggtgcgcgggtgcaggagaggccctgagcccgccccagcccagccctgctgggttccaaaaggcccccattccccgcggcgctgcggtcaagcccgtctttagagcctcttcctcgagactgcgtgcagcctgctgagcccgcaggacttttgtcaagcgctaaagacctagcaggaggcagagtaaatgcaaactgtatcccgagcccggctcccaaagctcctcacggggggaccaggttccctggaggaagcgggtcgcctcgggagcgggcagcgcaggcagcaccgaggccactggagctggctccagccctggcattcctgcagcccttttcccgccactgtgtcggggcgctcatagtcctgcggggagccggtccgcactggctttgctgctgttcctgggcaaaactggcggggccttggctgcccaccagccaggagcgtctggggagaaagcccaggtgtcctcagactaccaacagaggggcttaaccagggaggggccagcccctgcttggggcccgagggttgctctgatccggcccaggccggctgatagggctgtggaagccacggtgtgcgcgcgcagagcatctgagtggcctgggcctggtgggaaatagacccc

SEQ ID NO: 36643 - DNA, 364 bp, Homo sapiens
  chr2:73152639-73153003
  hyper
cgtgccggccggctcccagagttgcgagaggccggctccgcggtctcccagctacctcccggctgacttttcaccttccgctcccctttcctcctagtctcgaccctactacaccaccgtcccctcccaagtcccgggcagtgagaagatgcccggcatggggggcagccggagcctccctttagcagccagagtaggaagggggcttagtgagggagcccagacccaaacttcatccgcagctttcttcggcggaccttaccctctcctccttcagtggcattttggcatctattgtcgtcatatctgtctgctgccccacttaatctacaaatcgctcacgggtcggaggcaggacccgtgc

SEQ ID NO: 36644 - DNA, 998 bp, Homo sapiens; identical to SEQ ID NO: 30197
  chr2:74425444-74426442
  binary

SEQ ID NO: 36645 - DNA, 198 bp, Homo sapiens; identical to SEQ ID NO: 18689
  chr2:85871996-85872194
  hypo

SEQ ID NO: 36646 - DNA, 95 bp, Homo sapiens; identical to SEQ ID NO: 18690
  chr2:85878703-85878798
  hypo

SEQ ID NO: 36647 - DNA, 727 bp, Homo sapiens; identical to SEQ ID NO: 32786
  chr2:87034584-87035311
  hyper

SEQ ID NO: 36648 - DNA, 1736 bp, Homo sapiens
  chr2:88751286-88753022
  binary
cgctcccacccgcagcctggacaagaagactcctggcagatcttccagccgcacaccgacccctgcgccggcccttgcgacccgcgtccgccctccccggctgggaagcacctgccagcggccctcacctgggtcgtcctcgtcgcggggcaccttcttgaagcagtcgttgagcgacaggttgtggcggatggagttctgccagccggccttgctgcgctggtagaaggggaagctatcggcgacgaactggtagatgtggctgagagtgagtttgcgctcgggcgcgctctgaatggccatggcgatgagcgccgaatacgagtagggcggccgcaccatcttcatcaggtcctcgcggctggccatggacagccagcccagctccccgggccccgcgggcgcggcgggcgaggcgggcgcggcgggcgcgggctgcgcgaagggccgctgagagcagccgaagtgccggcggcaggcggtggctgcagaaagggcccggccgcggccccggggggcggcggcggcggcggagcgcccaggtacgcggcggcggctgcggcggcggcggagggcgggcctcccacgccgggcccgttgagccacaggtaggggttggcggcggcggccggcggcgcggcgtagtcggccagcccgtaaggcgccctggctgccgggggggcgcccggggcggcggcggtggcggcgggcgggggcaggccgggctgcgaatacactccgaagttgtcgccgcagtagagggccatgtcggcggccgtgggcggctgcggcgcggccgcggcgaggggcgagcggggctggtctcgccgctcgggcgagagcatccctttgggggccaaccctgcggctccgccttcacccgcgctgggcgcccggtgctccgggccggggtcgggcgggtgctagcggagcgcctgctagccggcctcttataaccgagcccggcgcggctcctcctgggccggcccggagcggggcggtggccgcgggcctgggctctccacgcccccgccacgccccacctgcccgcgcgcccaaacccggagcccgcccgccccgcccctaccgcccctctgcccgggcccgggagcgtctgggaggccggcgcctccaggtttcgggcaaaaagcagcaccccattcctagcccacgtttcttaacatcataataagtaaagccacgaatattaaagagaagataacccgaacagtacgaatgatttctaaaaagttaacttggggtggccgctcgggccacctgcctagtcatccttttggcttttctacctctttcctcctaaccttttgtgatcgagtcgcggaattcacgtccagtctcaaccgatcggcttccagtcgaaaataatcgatgtgatttacaacgctttggggtatacggtagaggttattaacaggcccgcttggcgtgtccccttctcctcggggattctgtgattggaggaacggaaatcagtgttgagtttttctaaccaaactgtaggttcgctcacattcgggaagcatttattcgttttctgtgcggtttgtacgggctttcgttgtgatttgttatcttcaaaaacataaaggtgaatgttttcaaagacatttaaataagtaccttcggaattagcattttaaacccgaaagtttcaaagttttaagtaatttaaactgtgcaagaagcgctcatttacaaaaacagcctcatctaac

SEQ ID NO: 36649 - DNA, 563 bp, Homo sapiens; identical to SEQ ID NO: 27898
  chr2:96192254-96192817
  hyper

SEQ ID NO: 36650 - DNA, 486 bp, Homo sapiens; identical to SEQ ID NO: 24290
  chr2:96990889-96991375
  hyper

SEQ ID NO: 36651 - DNA, 608 bp, Homo sapiens; identical to SEQ ID NO: 25497
  chr2:97193030-97193638
  hyper

SEQ ID NO: 36652 - DNA, 250 bp, Homo sapiens; identical to SEQ ID NO: 30209
  chr2:97203334-97203584
  binary

SEQ ID NO: 36653 - DNA, 791 bp, Homo sapiens; identical to SEQ ID NO: 30210
  chr2:98703022-98703813
  hyper

SEQ ID NO: 36654 - DNA, 83 bp, Homo sapiens; identical to SEQ ID NO: 33681
  chr2:99798661-99798744
  hypo

SEQ ID NO: 36655 - DNA, 127 bp, Homo sapiens; identical to SEQ ID NO: 18702
  chr20:13417399-13417526
  hypo

SEQ ID NO: 36656 - DNA, 1211 bp, Homo sapiens; identical to SEQ ID NO: 24292
  chr20:1783336-1784547
  binary

SEQ ID NO: 36657 - DNA, 2777 bp, Homo sapiens
  chr20:20348052-20350829
  binary
cggggaacccttttgcttggcctcttgggtccagcggcccatccgtccaaggtccgggcggaggccgtccggaccctgctgctctctcggattcttgtttatttcccaaacaccacgcggagccactgcgcctccgcaacgatctcccccgcaccgccccggcgcgcccccgcccccacccaatcagcgcgcacaacttccccctcggctccggctcgcggattgaaccctcctgacatatttggggccattcttctcctttgttgctattttgctagcgacccgcgggtaatccccgcgcgggaggggggcgtgcattgtcgcgctgatggacgggcccatttggcggctccgcgccccccggaggagagacacaaagcccaggcacgtgcgcctccccatagagaagcagcagaccgtgaagggaggcggggccgggcgtgtgcctggaccgggcggggcggcggcgccgggcggggcgaccaggggcgcgcgcgggggccccgcgccctcaggtacatctgccgcacctaccgggcgacccccgagtcccggcccccttttggccgccccatcgccctcccaccctgccaggctgaggagctgcggacgcgctgattggctccaggggaagcgggaggcgagaacaatggccccctccccccgttaaaagggagcggctgccgggcccggggacagggacgcgcgtgcagggcgcagagctgggccgagccgtcgccggcgccacgcgagtcccgcagccgccgcgcccgggcaatgggccgggggcactgagggccgccggggccgagcgcggaggggggaccgagccagtgccgtgccctcgggccgcgccaacatgccccgcggcttcctggtgaagcgcagcaagaagtccacgcccgtttcctaccgggtccgcggcggcgaggacggcgaccgcgcactgctgctctcgcccagctgcgggggcgcccgcgccgagcccccggcgccgagcccggtccccgggccgctgccgccgccgccgcccgcggagcgcgcccatgcagcgctcgccgccgcgcttgcctgcgcgcctgggccgcagccacccccgcagggcccgcgggccgcgcacttcggcaaccccgaggctgcgcaccccgcgccgctctacagtcccacgcggcccgtgagccgcgagcacgagaagcacaagtacttcgaacgcagcttcaacctgggctcgccggtctcggccgagtccttccccacgcccgccgcgctgctcggagggggcggcggcggcggcgcgagcggagctggcggaggcggcacctgcggcggcgacccgctgctcttcgcgcccgccgagctcaagatgggcacggcgttctcggctggcgccgaggcggcccgcggcccgggccccggccccccactgccccctgccgccgccctgcggcccccgggaaagcggcccccgccccctaccgccgcggagccgcccgccaaggcagtcaaggccccgggcgccaagaagcccaaggccatccgcaagctgcacttcgaggacgaggtgaccacgtcgcccgtgctggggctcaagatcaaggagggcccggtggaggcgccgcggggccgcgcggggggcgcggcgcggccgctgggcgagttcatctgccagctgtgcaaggaggagtacgccgacccgttcgcgctggcgcagcacaaatgctcgcgcatcgtgcgtgtggagtaccgctgtcccgagtgcgccaaggtcttcagctgcccggccaacctggcctcgcaccgccgctggcacaaaccgcggcccgcgcccgccgccgcccgcgcgccggagccagaagcagcagccagggctgaggcgcgggaggcacccggcggcggcagcgaccgggacacgccgagccccggcggcgtgtccgagtcgggctccgaggacgggctctacgagtgccatcactgcgccaagaagttccgccgccaggcctacctacgcaagcacctgctggcgcaccaccaggcgctgcaggccaagggcgcgccgctagcgcccccggccgaggacctactggccttgtaccccgggcccgacgagaaggcgccccaggaggcggccggcgacggcgagggggccggcgtgctgggcctgagtgcgtccgccgagtgccacctgtgcccagtgtgcggagagtcgttcgccagcaagggcgctcaggagcgccacctgcgcctgctgcacgccgcccaggtgttcccctgcaagtactgcccggccaccttctacagctcgcccggccttacgcggcacatcaacaagtgccacccatccgaaaacagacaggtgatcctcctgcaggtgcccgtgcgcccggcctgctagagcgcgccctccaccccggcccccgaactgtgccttcgcttggagacccacaaagagagtgcgccctgcactccccgaacccgagtccgcgctgggggagcctcgcccccgcccccaccgggtgaaagtgtcgtctccgcttctctcggtgtggcgtgacggtaaccccatactctccttttgactccttttggaacccccacttttacgttgtgtccctccgcctcccccatggcgcaacaggagtcagtctctttctgtacaagggagaaaagctgtacgcgtttgtctcgtggttggaagcctccccttggcggggagaagctttttttcttgctagtattcgctgtgttcatggtctagaaatgcggtctggtctcgcctc

SEQ ID NO: 36658 - DNA, 1359 bp, Homo sapiens; identical to SEQ ID NO: 32792
  chr20:21080357-21081716
  hyper

SEQ ID NO: 36659 - DNA, 253 bp, Homo sapiens
  chr20:25320332-25320585
  hypo
cgtatcaggaaagagcggcctcctcaggcctcccgatccgtcttctgtgagacaactgcaggcaggcgtaggttacttattagctcctggtaggaagcacgtagaccaaggacatcaacagaacctgcctgaccaggtcctcagagagcaggaggctaagaactggcacggtgtgtccttgcatttacgcgtgggcgagcccctctgtacccacccaacagaggacccttttccaggcccgtcaagccaggtc

SEQ ID NO: 36660 - DNA, 113 bp, Homo sapiens; identical to SEQ ID NO: 15850
  chr20:30139516-30139629
  hypo

SEQ ID NO: 36661 - DNA, 833 bp, Homo sapiens; identical to SEQ ID NO: 22882
  chr20:30639044-30639877
  binary

SEQ ID NO: 36662 - DNA, 138 bp, Homo sapiens; identical to SEQ ID NO: 18709
  chr20:33183813-33183951
  hypo

SEQ ID NO: 36663 - DNA, 793 bp, Homo sapiens
  chr20:34188561-34189354
  hyper
cgtccaagtgctgcggaaccgcctttggggtctgatcccttctggctttctttttcttctttcgggtgagccgggacaacgtggacccctgctgggcctggggaggctcaggttcagctctcccttccaacacctgcatggacacagccagcagaaggcggccgcggaaccaaatgccttggccaacgccttcgttgagaccttgaagactatcccggagccccgcgccggggggcgagccatagaggggcacccaggccgggccgaaggtagggttaaaccccgctgtggggaacaagagaagcgtgttggaggggagcgtggggagggcgagtgctggtaaatctctgcacctcaccctgatctcctccaagtattcgggggtgagggcaggggaggggggctaagccgctctgaaacggaagaagttggccagcagctgcggacgcgccgctgtggaacacgacctggggcgcctccaaaacagctcagcgccccaaggagctggaaatcgcgggagcccggcctcgggggacgcagcctgagccctgggggcggggtcgggattggggcggagctacgggcgatcggccaggcctgggggtcggggaaaggagtggaccggcagtgtcagcgtgtgcacagctgtagaagggtgggactgggctggttactggacaggcggttgtggtcagaattttgccaacggagccaaaccgatggtggggttcacagtctgggggcggcttgaagcagtttgttttgcgggcggaccagccctcctaggcggagc

SEQ ID NO: 36664 - DNA, 846 bp, Homo sapiens; identical to SEQ ID NO: 33692
  chr20:35443740-35444586
  hypo

SEQ ID NO: 36665 - DNA, 236 bp, Homo sapiens; identical to SEQ ID NO: 18712
  chr20:371973-372209
  hypo

SEQ ID NO: 36666 - DNA, 790 bp, Homo sapiens; identical to SEQ ID NO: 22883
  chr20:37302417-37303207
  binary

SEQ ID NO: 36667 - DNA, 914 bp, Homo sapiens; identical to SEQ ID NO: 27919
  chr20:37357365-37358279
  hyper

SEQ ID NO: 36668 - DNA, 1347 bp, Homo sapiens; identical to SEQ ID NO: 32796
  chr20:37433723-37435070
  binary

SEQ ID NO: 36669 - DNA, 1242 bp, Homo sapiens; identical to SEQ ID NO: 31708
  chr20:400915-402157
  hypo

SEQ ID NO: 36670 - DNA, 1442 bp, Homo sapiens; identical to SEQ ID NO: 34732
  chr20:42543097-42544539
  hyper

SEQ ID NO: 36671 - DNA, 748 bp, Homo sapiens
  chr20:47443693-47444441
  binary
cgcccctcctctgagcttcaggttttatcctactccatcaacgcgcagggacgttgggctctggggctcctacggtatgtcctagatgagtggtgcaccgggcgcgtagttattcctgggaaaaagacgcaggagcgccagctcccggcgccgccggggtccccaagcccctgcatcgcggatgtaactaattttaaaactatttgaaaggcggggacggggaagaaaagacaaaagggcagcgcgcgccgcggggaagtggagtgcgggagagccccggtcggagcaggaccgtgcgccggccagggagggaggcgacgcgacagctctggaggagctcggatcccccccgctttccgcgcgccctgcggggcgcccccgaggcaattctccacccacggggaccacggccacaggttgtggggaccgcagcggggcgagcggctggagggaaagctgtccccaagctcccgagcgacactcaccgactgcaagaagcgcaaggtgcccacgtagtccctctcggtgcccaagatctcgttgaggacgcagaggcggaggcgcagctggcgctcggactcccgggcggccgcgcacgggccggggccggagctgggcgccgcggcgccaggggcccgggggtccgggtgggcgcagtccccggccccgtcgccgccgggctcgctgccgctgggcgcctccattctagcgcggccgcgcggcgccggctccttccgtcgcgccgagc

SEQ ID NO: 36672 - DNA, 50 bp, Homo sapiens; identical to SEQ ID NO: 15865
  chr20:47766299-47766349
  hypo

SEQ ID NO: 36673 - DNA, 70 bp, Homo sapiens; identical to SEQ ID NO: 18717
  chr20:49284107-49284177
  hypo

SEQ ID NO: 36674 - DNA, 155 bp, Homo sapiens; identical to SEQ ID NO: 25529
  chr20:49286725-49286880
  hypo

SEQ ID NO: 36675 - DNA, 483 bp, Homo sapiens; identical to SEQ ID NO: 32807
  chr20:55839319-55839802
  hyper

SEQ ID NO: 36676 - DNA, 982 bp, Homo sapiens; identical to SEQ ID NO: 25536
  chr20:57224597-57225579
  binary

SEQ ID NO: 36677 - DNA, 119 bp, Homo sapiens; identical to SEQ ID NO: 8397
  chr20:57240808-57240927
  hypo

SEQ ID NO: 36678 - DNA, 433 bp, Homo sapiens; identical to SEQ ID NO: 18721
  chr20:57571504-57571937
  hypo

SEQ ID NO: 36679 - DNA, 805 bp, Homo sapiens; identical to SEQ ID NO: 25546
  chr20:61585229-61586034
  hyper

SEQ ID NO: 36680 - DNA, 193 bp, Homo sapiens
  chr20:61664461-61664654
  hyper
cgcggcttttcctttcagtccttcgtacccaacagcaactgagagggcgtcccggcagggtatgaatggccagcaggacgctgaggctgcgtggcgtttccaccgtgctgcaggaacaagatgcacatcgtgcaggagccgcagagcacgcgtgcagaggtttcggtggctttgccccgcagctaacgtgtgc

SEQ ID NO: 36681 - DNA, 247 bp, Homo sapiens; identical to SEQ ID NO: 25547
  chr20:61838301-61838548
  hypo

SEQ ID NO: 36682 - DNA, 495 bp, Homo sapiens; identical to SEQ ID NO: 15885
  chr20:62248627-62249122
  hypo

SEQ ID NO: 36683 - DNA, 668 bp, Homo sapiens
  chr21:15588309-15588977
  binary
cgcccagccctacgccaggcgagggagcagtgcggtgggcggtaccccaagtccgctgggggcgtggccctggagccatgcctcgcccccagcgcgcgctcccggcgccggccccgccccctcacccaggcggcgccgtaaagccggagaaggggcggggtctcagctcctacttcattctacggccgagaccggaggatgttccctgctcaggaggaggccgacaggaccgtgtttgttgggaatttagaggcccgagttcgggaagagattctgtacgagctgttccttcaggtaccgtctctgggaaggggcggcggaggggcggagcacgtcgggccggaaacatagcgcgcacctggaccacccggagcccggcccccttccgtcccatcctgagcaggggttttaatttcgtttcctcttggcgcacctgtctccaggtgagcggctggggagtgaaatgagggcgcgttccccatccccatccgcgctgcagagtcctggggttgggcagggacgtggttccttcaacccccgtttctgattaagggcttcccagaggctgcctgggcctcgggtgtgcgcgggcagaaccgaaaacagcctggtcactgttctccgtcaagtagtaagcacgcctgacatcccccaaaaggagaggggtc

SEQ ID NO: 36684 - DNA, 896 bp, Homo sapiens
  chr21:34392428-34393324
  binary
cggtggagcgccctatccaggtgcgccgccgcaccatggatcaccgcgcccggtcccgcagtcccgccatggcctggggaggcccgaagcccggggacagtggccggcccatctccggctccgcggacccccggctcaggcgggagggcaggcgggtccctgcaggcccccagggagcccgggagcctctctctggcgtcattcagtcccggggcaacctgaagcgcggtagatattggagagggggcgtctgttggggggacctggcgtcattactgatggctagcagggaggagggaacgggttgtcacctcggcctcataaggccgtgagtgagtagtccagggcctcttcaggcatttttgaaactggattaactaggggggaaattgtagcactgaagccaccgtgactgtcttttgcgctgtgtggaaactccggtaaaactctttgggcaacagtcttatcaccagctcttcaacgtgtgcagcccttctggtcctgtccctgttctgggccccaggaatgcaaagcaggtccaggcactgtgaagaccctggcggtggaggaagaggcttcccggctgtggaggaagccagacccttacaacacaagacgagaaccagacctgcgtgggggagctctggatgctacaggggctcaaggaggggtggaggggccttcccaggccaacccctgaacggcttggacaagatgctcagatggacgggaggaacggcgtgtgggatgggggagctggaggcgggtgggtgggggggggaggatggggaaagcgctggcccacccagtgtgggaggggtagaggaaaagcccgcaggggccaggttgggaccccgtaggccgggttagagggcttggacttgatcctgacaggc

SEQ ID NO: 36685 - DNA, 982 bp, Homo sapiens
  chr21:34395383-34396365
  hyper
cgacacgcacccggtcttttgtgggagagaaacacaaagaagagggaaaaacacggaggaggccaacagcaccaggacgcgggggccaaccaggaactcccggagccggggcccattagcctctgcaaatgagcactccattccccaggaaggggccccagctgcgcgcgctggtgggaaccgcagtgcctgggacccgcccaggtcgcccaccccgggcgccgggcgcaggacccggacaagtcctggggacgcctccaggacgcaccagggcaagcttgggcaccgggatctaatttctagttattcctgggacggggtggggaggcataggagacacaccgagaggtactcagcatccgattggcaccagggccaagggagcccaggggcgacacagacctccccgacctcccaagctactccggcgacgggaggatgttgagggaagcctgccaggtgaagaaggggccagcagcagcacagagcttccgactttgccttccaggctctagactcgcgccatgccaagacgggcccctcgactttcacccctgactcccaactccagccactggaccgagcgcgcaaagaacctgagaccgcttgctctcaccgccgcaagtcggtcgcaggacagacaccagtgggcagcaacaaaaaaagaaaccgggttccgggacacgtgccggcggctggactaacctcagcggctgcaaccaaggagcgcgcacgttgcgcctgctggtgtttattagctacactggcaggcgcacaactccgcgccccgactggtggccccacagcgcgcaccacacatggcctcgctgctgttggcggggtaggcccgaaggaggcatctacaaatgcccgagccctttctgatccccacccccccgctccctgcgtcgtccgagtgacagattctactaattgaacggttatgggtcatccttgtaaccgttggacgacataacaccac

SEQ ID NO: 36686 - DNA, 255 bp, Homo sapiens; identical to SEQ ID NO: 18728
  chr21:35258647-35258902
  hypo

SEQ ID NO: 36687 - DNA, 299 bp, Homo sapiens; identical to SEQ ID NO: 18729
  chr21:37617467-37617766
  hypo

SEQ ID NO: 36688 - DNA, 113 bp, Homo sapiens; identical to SEQ ID NO: 31749
  chr21:38935395-38935508
  hypo

SEQ ID NO: 36689 - DNA, 671 bp, Homo sapiens; identical to SEQ ID NO: 32820
  chr21:42688559-42689230
  hyper

SEQ ID NO: 36690 - DNA, 396 bp, Homo sapiens; identical to SEQ ID NO: 15904
  chr21:43547667-43548063
  hypo

SEQ ID NO: 36691 - DNA, 966 bp, Homo sapiens
  chr21:44495091-44496057
  binary
cgcgccagcactcccggaggggcctggggaaggccacgcgcacggagagcgggaaactcctctaggtttccaggtgggagatccagaccctactgagacccggaaaccgccggccactccgcctccggaagcgacactttgggacaaagctggggacaagtaagcccagaagatcctcgggaagccgagaatttcgcgctccgctctcccacccacgctccgcctcccgcttgcatcctacagctcagctgcggtctcgcctggggctcagggaagtgaggtcccaggaaaacctccatcccccgaacgcaacctgggcagagccccgcgtccctcccccagcgggcacccacctcgcgtgccgcccgcgcaacgacagcgtttaccgccaccccacacggtccgccaaaaagggcgatttgcaaacagccatttcccatccacaatgcagcgaactcaatgctgggcaccgaaacgtgcatctcccccggattcccaccccgcgtccctgctccacgctccaggactcgccgccagtggggtccactccgccggcgcgggggctggggtgggagcccggggccacgtgcacggccagcccccatcttctgggcggtcaagaccgcaggcgtgggcgccggtggggcgggggtcttgggagaccctgtctcgccgcctttcggtgcagatgatgcaactctgggcggaggcgcggagagggaaaccgggacccagttgagatcctctgtccagagaggggagcgagtctcggtggggccggatctcacctggacggatacatggaaaagaggggcgagcggctgccccgactgcggcgaggcggagacggcgaccccggggtggcggcctcgcggggacccacggcgaggggagcaggcgggcggtgattggcggagaggcgggggcggaggccggcgccggccaatgtctcgtggcagagcaccc

SEQ ID NO: 36692 - DNA, 703 bp, Homo sapiens; identical to SEQ ID NO: 18732
  chr21:45345807-45346510
  hypo

SEQ ID NO: 36693 - DNA, 173 bp, Homo sapiens; identical to SEQ ID NO: 18733
  chr21:46270497-46270670
  hypo

SEQ ID NO: 36694 - DNA, 160 bp, Homo sapiens
  chr21:46848031-46848191
  hypo
cgagtgtgcatcttgagtgctgtgcaggttggggtccggcgctcctgcaggcaggcggcgtctgggcctgggggctctcagagtttgaggagcgtgtggtgagggtggcctcgggcctcaaagacgcagcgctgtgggaaccgggagactggctgagccc

SEQ ID NO: 36695 - DNA, 258 bp, Homo sapiens
  chr21:47689571-47689829
  hypo
cgctgtggccactacgggcttgtggcaaggaatcctggcagcctccttggagccgctgccagaatgggcagcagagtgtgtgcgaggtgaggtggcgctctgtgcggtgggccgcggtcctggtcacattgcactgaacggaatcatgcagggcctagaacagcaggtgctacaggggctgctctgtcctcatccccaagttccgtggaagtggaacaaaataaccgactggaaaccccaagacacagtttactctgc

SEQ ID NO: 36696 - DNA, 221 bp, Homo sapiens; identical to SEQ ID NO: 18736
  chr21:47872870-47873091
  hypo

SEQ ID NO: 36697 - DNA, 825 bp, Homo sapiens
  chr21:48087109-48087934
  binary
cgtgatgcaggtgagcaatgatgcagagggctctgtgcgcctggcgggctctgtttgcctgctgggctctgtgcgcctgctgggctctgtgcgcccgggaaggtgcggccaccctcacgcggaaggcggccagcggatcccggtgcgcgcagctcccagcgctggggttccagcgccccgcctcttcctatagcaaccagcgggacctgccgtcccccggggcaccccgaggggtctgcgcccgcttctttccgaaacgggaaggcgctgggggctcggcagccagagggacgggttcagggagcgtccggtgagcctaagacgcgcctttgccggggttgccgggtgtctgcctctcacttaggtattaggaaccgtggcacaaatctgtaggttttcctctgggggtgggcggaggctccaaaccggacggttttctcctggaggactgtgttcagacagatactggtttccttatccgcaggtgtgcgcggcgctcgcaagtggtcagcataacgccgggcgaattcggaaagcccgtgcgtccgtggacgacccacttggaaggagttgggagaagtccttgttcccacgcgcggacgcttccctccgtgtgtccttcgagccacaaaaagcccagaccctaacccgctcctttctcccgccgcgtccatgcagaactccgccgttcctgggaggggaagcccgcgaggcgtcgggagaggcacgtcctccgtgagcaaagagctcctccgagcgcgcggcggggacgctgggccgacaggggaccgcgggggcagggcggagaggacccgccctcgagtc

SEQ ID NO: 36698 - DNA, 542 bp, Homo sapiens; identical to SEQ ID NO: 18738
  chr22:18443260-18443802
  hypo

SEQ ID NO: 36699 - DNA, 557 bp, Homo sapiens; identical to SEQ ID NO: 26875
  chr22:21368234-21368791
  hyper

SEQ ID NO: 36700 - DNA, 66 bp, Homo sapiens; identical to SEQ ID NO: 18741
  chr22:22029114-22029180
  hypo

SEQ ID NO: 36701 - DNA, 170 bp, Homo sapiens; identical to SEQ ID NO: 18742
  chr22:22037104-22037274
  hypo

SEQ ID NO: 36702 - DNA, 821 bp, Homo sapiens; identical to SEQ ID NO: 22889
  chr22:22862472-22863293
  binary

SEQ ID NO: 36703 - DNA, 1452 bp, Homo sapiens
  chr22:24551659-24553111
  binary
cgccattcacataggcaccgcctgcagaggggggatataaccctcacacacagttggccaatgccatcccggcctgccgcactcctggccacccctacaccatgctctctggggccccacagcttcctgcagtgagagctgcacccactttgcccggcagcggtccacagcccgccaccagcggccagtccagggaaccggagaggattggccggcaaaagtcagttgcgctcctgggcccgcttccagtagagtgccggcgccccgtccggccgcgcctgccccgccccggcccgccgcgagcgagagagcgaacgagcctccgcggccatggcccggcgctcgccctagctccactgcacagatgccacggcggagccggcgggtaggaacttggcgggggcgggggccgggactggggccgggactggggccggggctggggctgcgcaaccgcttcgcctccgctgcccgtctgggtctccactttgctggcgcttttgctcaatcgtcccctggtgggctctggcggccgccccccgcctcggcgcaccaggcgcagcaggaagcccgtgggctgtggtttccccggcgcccccgcggaggaaatcggccggcggcggggtgctgcgcccccatgcccagggcgggctggcacccggttcagcgtcaggtgggcggccaagccggcttgggcggcggcgcgcgggggcggcaggcgctggtgaagcccgcacacgcgccagcgcatccagccctaccaagccccgggctgggagctggctcgtgggggcgtgcgctgcgcgaaagcgaaagccgcccgccagagcaactttgcggcggaaggcgccgacgaggagctgtgccgtgccgctcttggggatggtgagctggccgcccggccgggtgggcagcgcgtccgggcgcggtgcttcgctagctataaataggtgctgtgcggggacaggaagatggttccagccctttacaagcaccggcccgttatgtgcgctgggctaggaccttgccccgcagcggagtgggaggagtgaggttaggggtaacggttgcatgggatggggggtgggcacatagagcctacagcagagttggcggcggggctctcccatgcacttggttgtttgtcgtttctgcttttcccgggagggggaagggaggaacagcccggcagttctggggaccttagcgctccacgtcttatttggcaggagaggctggaaacgagcgggcgccagctgcaggcaaattgcaggctttcccagcccttgtctgcagagagaatcattacctgtggatggcgcggggaatcccttgccctcagtagccccgcctggagagacaggaccgcgttgtggggggtggggtgtaggagtgggcggaggccagggcgcccctggtggcctgtgtacaaccctgcggccagagaggccc

SEQ ID NO: 36704 - DNA, 1160 bp, Homo sapiens; identical to SEQ ID NO: 30273
  chr22:27053098-27054258
  hyper

SEQ ID NO: 36705 - DNA, 112 bp, Homo sapiens; identical to SEQ ID NO: 6562
  chr22:36907702-36907814
  hypo

SEQ ID NO: 36706 - DNA, 841 bp, Homo sapiens
  chr22:37730472-37731313
  hyper
cgcggctcgggaaggtagctcctgccggaatggagcagaaacgtctcggctgggaatcgaacccagggtcagtcagtagcggccgcgttttaggacccggcggtgcaccgaagacccggcggaacggcgcgcaccccgggcccagagctcattagccgggcgccgcgggggccttcattaaagctcagcgacgcggaggctgcccgcggcggccccgcctgggcgctccgggctggcccggacctgcggcgtcggcccaggagcatctggaaagggggcgcgggcggggatcggtaggaccgcctatgctcagggactgtcacccaccccctcccccaagccaaggagtagcggggaaggggggcgagtgcacccaggtattggggggagcatcaaatcggagtggagggggccggtgtcaccgagctatccccaaacctcgaacggccaaggccgagtcacccccgccccacccccacacactatgcacccatttcacagatggcaggtcctagctcagagggttagggcaggcccagaaccgcatcgccatcgcccgttcgcaggcctgattgagaggctggaaacgaggatgggcagggagtgaggacctgtaggctctgccggagaacttgggcgtgggcggagcggggcatccaggaagaagcccccaccccagccttggatagggtagtatacgatagggggcgtaaagaagggtcatgggctccggtggtcgcaggtcccaccggcaaccgccagggcgggggcagcaggagcaggaacctgctcgcctccgcatctcgtcggctcccctctcccgccagactcctgtctctgc

SEQ ID NO: 36707 - DNA, 190 bp, Homo sapiens; identical to SEQ ID NO: 18750
  chr22:41536192-41536382
  hypo

SEQ ID NO: 36708 - DNA, 105 bp, Homo sapiens; identical to SEQ ID NO: 26896
  chr22:41839279-41839384
  hypo

SEQ ID NO: 36709 - DNA, 550 bp, Homo sapiens; identical to SEQ ID NO: 18751
  chr22:41970751-41971301
  hypo

SEQ ID NO: 36710 - DNA, 137 bp, Homo sapiens; identical to SEQ ID NO: 16834
  chr22:41973298-41973435
  hypo

SEQ ID NO: 36711 - DNA, 145 bp, Homo sapiens
  chr22:44500148-44500293
  hypo
cgtctcaaagcaggctggcagacattttccactcttgatcaatcattttccaaaataagcatagacacagcaacccggagagcagcttcggtttggctgtcggtggcgtgttagttactgtagtggtggcacagaggcgatatac

SEQ ID NO: 36712 - DNA, 32 bp, Homo sapiens; identical to SEQ ID NO: 18754
  chr22:46585892-46585924
  hypo

SEQ ID NO: 36713 - DNA, 110 bp, Homo sapiens; identical to SEQ ID NO: 16840
  chr3:10131952-10132062
  hypo

SEQ ID NO: 36714 - DNA, 485 bp, Homo sapiens
  chr3:10183473-10183958
  hyper
cgcgtccgacccgcggatcccgcggcgtccggcccgggtggtctggatcgcggagggaatgccccggagggcggagaactgggacgaggccgaggtaggcgcggaggaggcaggcgtcgaagagtacggccctgaagaagacggcggggaggagtcgggcgccgaggagtccggcccggaagagtccggcccggaggaactgggcgccgaggaggagatggaggccgggcggccgcggcccgtgctgcgctcggtgaactcgcgcgagccctcccaggtcatcttctgcaatcgcagtccgcgcgtcgtgctgcccgtatggctcaacttcgacggcgagccgcagccctacccaacgctgccgcctggcacgggccgccgcatccacagctaccgaggtacgggcccggcgcttaggcccgacccagcagggacgatagcacggtctgaagcccctctaccgccccggggtccattttgcagac

SEQ ID NO: 36715 - DNA, 92 bp, Homo sapiens; identical to SEQ ID NO: 18758
  chr3:107530307-107530399
  hypo

SEQ ID NO: 36716 - DNA, 1176 bp, Homo sapiens; identical to SEQ ID NO: 14967
  chr3:113251180-113252356
  binary

SEQ ID NO: 36717 - DNA, 84 bp, Homo sapiens; identical to SEQ ID NO: 18760
  chr3:121500635-121500719
  hypo

SEQ ID NO: 36718 - DNA, 869 bp, Homo sapiens; identical to SEQ ID NO: 30302
  chr3:128720432-128721301
  binary

SEQ ID NO: 36719 - DNA, 415 bp, Homo sapiens; identical to SEQ ID NO: 25630
  chr3:138679163-138679578
  binary

SEQ ID NO: 36720 - DNA, 35 bp, Homo sapiens; identical to SEQ ID NO: 18761
  chr3:141120999-141121034
  hyper

SEQ ID NO: 36721 - DNA, 191 bp, Homo sapiens
  chr3:14514245-14514436
  hypo
cgattcggagaagggacccacatttctgtgtgagctgatcattgtctgggccatcgtaataagttgcaagtgcccaggagaagcctacgccacactcaggattctgtgctccctggagcgtgcgaggggctgggcattggctccctcccgtgctttatacaccgcacaggccgggagcctcgctcaaaccc

SEQ ID NO: 36722 - DNA, 911 bp, Homo sapiens; identical to SEQ ID NO: 26948
  chr3:150802802-150803713
  binary

SEQ ID NO: 36723 - DNA, 191 bp, Homo sapiens; identical to SEQ ID NO: 6584
  chr3:171362739-171362930
  hypo

SEQ ID NO: 36724 - DNA, 83 bp, Homo sapiens; identical to SEQ ID NO: 18765
  chr3:171976039-171976122
  hypo

SEQ ID NO: 36725 - DNA, 1102 bp, Homo sapiens; identical to SEQ ID NO: 27999
  chr3:179168676-179169778
  binary

SEQ ID NO: 36726 - DNA, 1243 bp, Homo sapiens
  chr3:186079038-186080281
  binary
cgaagaaaatctcagactaggcaaggggaggtggaccggtggagtctgcgaaagcaccacaggtgactccgggtacgcactcctcaggacacaagcacacacacggacacatcttgtgactctgagactacacagatcaacctcagattcgacccttccctcctttattctctgaggtgtccgtgttcgcttcagcttccctttaagtcgccctgcgcaggggctttgtggagtgcccccaaagtcctagaaccccgcgggacggtcggaggctttggcggccagacattaggaaaagcatctcctgcttctcggactgcctggagcgcgaactggatatcaaggagccaaggttaagtccagaagaagaaggaaatccgaccagttgctttagcaaactgcctggagcaaggccgcctcccacccgcacagctttgaggcttgagggggcctctcagtcgcagagagagccgagccccaccctgtgcgttccccaagcctgcacccctcgagcggggcatcccttcctgcagggctttgtggcaggtggaactgtcggggtgggcgccgtggctttggctgcagccccttccctggccgcgggaccggctcccgctttgccctcctttaccaagttgctgcaccgggtgctccctgagccggggaccccctccgccgcgccggccgccgtcttacctcaccaggcaacacttggttgcgcggtggcccggggcgctccttcttcgcggtttattcccttacttgggaggaaagaggaaccgagagacagaagggggaccgaagctggcctctgggcgtcttcccgcctgcgcagccctctcgggggagggggatgcagccccagtgggtgccgcggagaccaggctgccaggctgtggttggtagcgccggggtcttcaccctgtgctcggagttcagcagctccaaagctgtctatctccgtggcccgctactacggcactgcggctctgtgccctgcccctcgcagcctggcaagtccagctgccactctcactgcggagccctgcccccgggcgcagagcccgcccccgccacacacaccggcgcgcgcgcgtacacacacggcacacacagacacgcgcttccacacatgcacacgcgtgcgcacacacgaatgtggatccgctcgatgggaacctgaccccctttggtgcaactagggcgcgggcatcattaggacgctttttactgacagggcttc

SEQ ID NO: 36727 - DNA, 506 bp, Homo sapiens; identical to SEQ ID NO: 31836
  chr3:194048766-194049272
  hypo

SEQ ID NO: 36728 - DNA, 891 bp, Homo sapiens; identical to SEQ ID NO: 28003
  chr3:194407289-194408180
  hyper

SEQ ID NO: 36729 - DNA, 903 bp, Homo sapiens
  chr3:195600509-195601412
  hypo
cgtgaagaagggctcctctgaaacccagccaggccggggagagaggacggaggaggtggcgacgcctgggcacccagacccacagccttgtaaggtgacgaggcctggctggagcggggtgactccggaacagcccatcccagagaccaaagtcaaacccgagagcaccacggtcggcggggaggcggggggcgcggggcgcggggagacggggctgtgctccccctgcccagcctcctcatacacagggccactggcctggccccaccacacacagccaccctgtgattcccaccctgcctgcagggagggaaggaaggagagaggacagtaccccgagacgagacgagtcccatctgaaaaatagcagggccactcgaaggagcagagccccggctccccagcacgcacacagcctcccacggcggcccgtagaggaggaaccccggcaccggctgggctgcggctctcccgctacacccacgggctccccggtggctgccgcgggccagacgccggactctgctctccacacctcttcagaggcgctcagtaactgggtgagaatgccgctgaggccgagaccttgctcagagcagcgtgactcgtgcccaaggcaggtcactccgtctggcctctcccttccgccaacactgcccagctccaggcacagaagcctcctttgggacccacttctgagagggaaaggagacatcaagcccacctcccttagtgcaggtatggccgaggcaagagcccccatggctgctgggagtcctgacaccactcgagaaaacatgcttgctcctgggggaaggagagtaagagtgcggaggacgtgtgcaagaagctcccctcgggatggcgcccacgcacactccgaggcacaagaaactccccctc

SEQ ID NO: 36730 - DNA, 550 bp, Homo sapiens
  chr3:196366368-196366918
  hyper
cgcccccagccctgccaaggcaccaacgcaagaaagccgggggagcctcggtcgcattgctggaagatcgtctaaacatccccgctgctcggccgctaggccggcaggtgttcgggccccgctcccccggcccgccccacccccgcgcccgcgccgcgcttccctctaagaggccgggtctgagtgagcctgtgctgagtcgccgagcagcccgctctccatgtgacttcagtttccgtccgttccttccgctggtgctaaaataatctgatgccccacagcaaggaggtagcccagccccgcgttcggctgctctcgaggaggccggagcccccggagacgatgcgccccgcgcagccgcctgcgcctgcgggagccgtgagtatttcccgcgtgggggcgtccccggggcacagccggggcccttctccaggtgggcgagctcgagcgaggttgggtggtaggaggtcagcgtccgcggcccgcagctcagggctcacgaggaagctgtggcttgctgcgtccaagcgccgccgcttttgtgctgggc

SEQ ID NO: 36731 - DNA, 711 bp, Homo sapiens; identical to SEQ ID NO: 30329
  chr3:38080628-38081339
  binary

SEQ ID NO: 36732 - DNA, 502 bp, Homo sapiens; identical to SEQ ID NO: 32888
  chr3:43935666-43936168
  hyper

SEQ ID NO: 36733 - DNA, 987 bp, Homo sapiens
  chr3:44038670-44039657
  hyper
cgccgcctcccttgtgcactcggagggactacatcctcctcctctcccagcccctagtccaaacgggagtaggtaatggcggggaaagggggaggtgacgagagcggggagaaggaagtacatattttttaattgtgaaattgtctgtctgcgtgctgtgctctgggattctcttgtctcaatcaacttcaattttaacgtggccgtaacgttaagattaagacctagaaatgaaaacgtacccacctttcttattacaaaggtcgtttgttgttgttgtttttttaaaacaccaagtaaccccccccccccccccccacggacttatactttgtttatgagatttctccaaccttggtggtttggagaaatgaggtgggggaggggaggaccaagggcagcaagacgtccactacgaaaataagatacttactaatttaatagggccgttcctttttacataagatgctcccccaccccccaccaatttacaataggtaaactttgagcttcctcaaagtttcgctatctagcgtttatgcccgaagctttacgaataaactccctttccaggtaaacctgcccaacccttgtcctatgcccagcgaagcccaggtacgatgggtcaaggacccctggcttccacattgtctgagtcacgttccagttggaaaggccatcttgggcgagggacgtgttgcccgactggtctaaataaggaaagaaagtggagtaccaaagaatcaagggcctctgttcctccccatcccgccaccaccaccaccggtccccgggctctgctgagcgctgcggcggtcttggctgaaaactgcgtccccgcccaaatcgagcgcaaaactcccttggacagaagtttgaaagaatccagtgtagaaacagacttctccgtccaatttggttttaatcagtaatcatataagtatacccacataaccacctaagtggagagcagacgcccagattcac

SEQ ID NO: 36734 - DNA, 990 bp, Homo sapiens; identical to SEQ ID NO: 26997
  chr3:44039665-44040655
  hyper

SEQ ID NO: 36735 - DNA, 557 bp, Homo sapiens; identical to SEQ ID NO: 15958
  chr3:49720262-49720819
  hypo

SEQ ID NO: 36736 - DNA, 691 bp, Homo sapiens; identical to SEQ ID NO: 22908
  chr3:49906737-49907428
  binary

SEQ ID NO: 36737 - DNA, 277 bp, Homo sapiens; identical to SEQ ID NO: 24441
  chr3:50377892-50378169
  hyper

SEQ ID NO: 36738 - DNA, 168 bp, Homo sapiens; identical to SEQ ID NO: 15962
  chr4:103421142-103421310
  hypo

SEQ ID NO: 36739 - DNA, 976 bp, Homo sapiens
  chr4:103997179-103998155
  binary
cgccaacaccttacaacagtaaacagacacgcgcccgtcaccgggtgtacaaacagaaaaggctgggcccctcgctcgcgtctccggtccagcaggcctacagggtacccgccgctggcgctgggtttatttttacccttagtgtctctggggcctctcacctggcagtctccggcgaagtcgaccaggctccgtctgaacgattaggaaaggggctgtgggggaggcggcggagcccggtctagccaccgcgctctggggttcccgattcgcgcatcttcccaggctgagccgggaggctgcgttgactgcagataaacggtctcagggcgcggcaccgcgtgtagtcggccccgcctttcgcacgaacccgctgggcgacaccgcgcagggaggtccgacccgtcggcgccggtacaggctccggagtaagcatgggttggtccggggcccgcagcggcagccccgtgtgccctccgccgggtttcaggtccggcggcgcgggtgcagagccgcgtgcgatgcctggtgcgcgtggcttcccccggaaaggtggcgccaggccgaccatgggcccacgtcccggggcctcggagcggcaccgcgcggtctttcagctgcttatcctccctgggcgggtccgcaggcttctggggccaggaccagcgagctcccgggaaagcttcccggaaagcttacccagagagcgcggacccaggcgccgagtcttcccggagatgacgagacaccgcgagaggagcacagcgcaggctcctcgggactccgcggcgcaggccgggcagcccgttacttgttttatcgttcccgaaaccaacctctaagttgtctatcagtcctccaccttttagctgtacctcttagaagtgtcttctcagctgcggtgggaagataggattctttcttaaggtgaccaattaaatggccggataaaagacttgttctgcccccctttatc

SEQ ID NO: 36740 - DNA, 760 bp, Homo sapiens
  chr4:10458592-10459352
  binary
cgagtccgcggggtcgcggcgcacaaaggcgagctgggggcgccgggccggaccccgaccctaggccaggcccgcgtacctgctcaacgcgcgccaagccgcggcccgggcccccaccccagccggtgccccacgcccaccagccggagcccgcgttcggcctacccggtgccacttgccacgacgccagccctcagcgcgggcacgcggggccgcggccgctcgacccgccccggcctggccccgtcaggcccccgccccgcgcgcccccacgacccggccgcagctggcgcttcggtcacgtacacgcggatccgggggccctcgccctcccgctcagctacttacccggcaggccggattcgggtgccaggtcccggcgaaggggcgtctacaccgccggccgcagaccgccggcgccgcgcccgctgtaggtccctacccggggggcggagcccgcgccagccccgcgcgtgcgcaatgtgaagcggcggcgcggctccagcgaggccggcgcctgaggtctctaaggctgcgcccgcccccgccgggcttctaagctgtccagagcggggagcctcagacccagccgagccccacttctgggcttagagcttgacccaacacgttcgcaccgtagcgagcgaggtccacatttagccatgccgcaggcaaaagaaggattcggcttcggtcctggcccagtctgccatcccggggcgcctgccttgtaccgggtcccgcggagggcggccttggc

SEQ ID NO: 36741 - DNA, 733 bp, Homo sapiens; identical to SEQ ID NO: 24451
  chr4:10462790-10463523
  hyper

SEQ ID NO: 36742 - DNA, 183 bp, Homo sapiens
  chr4:113154868-113155051
  hypo
cgtagagtacggcattaaaattgtaggttctactccctcagctcgtgagcttggcagcacagggaggtggcaggaggaaatccatgaatcagcgtgagtgttaattgtctgtagatatgccataaaaacataagcaggtggagtatttctttctttttttttgagacggagtctcgctctgtc

SEQ ID NO: 36743 - DNA, 667 bp, Homo sapiens; identical to SEQ ID NO: 18783
  chr4:1317011-1317678
  hypo

SEQ ID NO: 36744 - DNA, 129 bp, Homo sapiens; identical to SEQ ID NO: 16893
  chr4:1326104-1326233
  hypo

SEQ ID NO: 36745 - DNA, 167 bp, Homo sapiens; identical to SEQ ID NO: 7385
  chr4:1326509-1326676
  hypo

SEQ ID NO: 36746 - DNA, 936 bp, Homo sapiens; identical to SEQ ID NO: 23259
  chr4:13548957-13549893
  hyper

SEQ ID NO: 36747 - DNA, 481 bp, Homo sapiens; identical to SEQ ID NO: 30349
  chr4:153600941-153601422
  hyper

SEQ ID NO: 36748 - DNA, 144 bp, Homo sapiens; identical to SEQ ID NO: 18788
  chr4:170043204-170043348
  hypo

SEQ ID NO: 36749 - DNA, 365 bp, Homo sapiens; identical to SEQ ID NO: 18789
  chr4:185747631-185747996
  binary

SEQ ID NO: 36750 - DNA, 873 bp, Homo sapiens; identical to SEQ ID NO: 25686
  chr4:1993659-1994532
  hypo

SEQ ID NO: 36751 - DNA, 180 bp, Homo sapiens; identical to SEQ ID NO: 18792
  chr4:40485408-40485588
  hypo

SEQ ID NO: 36752 - DNA, 976 bp, Homo sapiens
  chr4:42153164-42154140
  binary
cgacagcgtgagagtgcatcaaagaggtggcgaagaaagcactagaaggcaaaggagaagtggagagaagaagaaacaaatggaggaagaaggagaaagggaaaaagcagacggaaaaagtgaagtagtacgagggcgtcccagcggggcggcccgagaagctccagcttcttcccgagcggccgccgctatcccccgggggggcgtctggccccactccggaccacgcccgagcgatcctggtcgccgactgccacagccgtgcttcccggcgcgggatccaagccgcggagccacctgttaggcgcgcgccgtcggaagcccaggcgcggcggcgctggagaatcctctcgaagtttccgggtgcgcggggaggccccaggtgcgccccgacatcccgacacggcccagcacgggtaagtgtcggcggccccccgcttctccttcctgggtcccctcccgctgcccccggccgtggcgggaaggaaagttgtgcggagagttggtacctgcgctgagctccaggctggcgctgtcgctacccgtgccgccggtgccggcggccgccgccgcgcctgggccatacctgacgacagcggcgaacgaagacgacgaggaggcggcgggggacgcgggcggcggctgcgccggagtcctcaagtggccctgggatgtggcgggcgtgcaggacggcgacgacgacgaagcggcggcggcggcccggccgggcccgggggggtaggagctctgcgcctggaactgctgcggcggcggctcgctgctgctgatggagacggcggcgtgcggcgcgaagggcggcgggggcggcgggggcgcccgcacgtgcggcagctccaccagggtgggtcgctcgtagcgcttggccagcgccggtctcttgctggggaacgtcttgaggacgctgtaggggctgcgctgcttgtagattttggggacgctgggcccctcctctgcc

SEQ ID NO: 36753 - DNA, 1425 bp, Homo sapiens; identical to SEQ ID NO: 24481
  chr4:57521376-57522801
  binary

SEQ ID NO: 36754 - DNA, 444 bp, Homo sapiens; identical to SEQ ID NO: 25702
  chr4:759725-760169
  hypo

SEQ ID NO: 36755 - DNA, 789 bp, Homo sapiens
  chr4:788789-789578
  hyper
cgccaaaggcttctggaaggcccacctctaaggagccgaggattcgtgctccccgcaggctgcaaagccactaggctcagagggacccgccgcgaacctggggagcgtcacagatgccgcccacgcccccccgcttttcggcccgggtactgcagggaggcgcctccagaaccacttccaaaagctgggaattgggcgcagccaggagcgcaacagaaactgcgggaagcttgttcctggcacagaaacccaaagtgccatttgctctcccggcacagacgccggagcggcgagaccggcgcagaacgggcggccccgagcactgctgcgaccccgccggcctcgacctcgacaccccgcgaccccgccggaccctggaagcatgagctgcatcccgcatccgcaggagggcggcgctgcgacccacccccgcccccgtttccagaggaggccgctgcggcgcggggcggtcccacgtggtgcctgaggctgggacaccccgactctgattgcaggggggtcggatccgaggctgggggtcccgcagtctggctggggtccgctactggcctcgacgtacaggggccgaccccacccctacctcgttctctgagcctcagcttccccccgtgagaggtggaggcggtgggggggcgcaccgggcacgaccccgcggcaatgacggggctggcaacgccccccacagcggcacaggcggataaaccctctggggagggagttcagtcccagcgggaggggcccttcccacccgggagctcgccccaaacc

SEQ ID NO: 36756 - DNA, 642 bp, Homo sapiens; identical to SEQ ID NO: 18794
  chr4:82391851-82392493
  hyper

SEQ ID NO: 36757 - DNA, 56 bp, Homo sapiens; identical to SEQ ID NO: 18795
  chr4:87946924-87946980
  hypo

SEQ ID NO: 36758 - DNA, 90 bp, Homo sapiens; identical to SEQ ID NO: 18796
  chr4:87993079-87993169
  hypo

SEQ ID NO: 36759 - DNA, 73 bp, Homo sapiens; identical to SEQ ID NO: 18797
  chr5:10702280-10702353
  hypo

SEQ ID NO: 36760 - DNA, 309 bp, Homo sapiens; identical to SEQ ID NO: 18798
  chr5:107703589-107703898
  hypo

SEQ ID NO: 36761 - DNA, 958 bp, Homo sapiens; identical to SEQ ID NO: 23285
  chr5:114515360-114516318
  hyper

SEQ ID NO: 36762 - DNA, 497 bp, Homo sapiens; identical to SEQ ID NO: 18802
  chr5:115783187-115783684
  hypo

SEQ ID NO: 36763 - DNA, 1474 bp, Homo sapiens
  chr5:128795982-128797456
  binary
cgccgcccggcctcctagcgctccggggaggccgctgcgccccggagtggatcgcgctggaggcgtgcgccgggcgagaagccgcggccgcgggagcgcagtatggggaagaaccgcgagatgcgcctgactcacatctgctgctgctgcctcctttaccagctggggttcctgtcgaatgggatcgtttcaggtaagttcttccgtgactttctcgcttcctttccagccatcccagcggagaccgcgaacgtacgggtcggcagggctggtgcaaccggtgcgtggagagcagggctcagtgggtagcaataaaaatgagcttgaggtgcaggttaaggggtcaagttcggaaatgaagcacacttctgccggcctcgttttaaccgtatgtggaatagtttccttctaattagagcaataatatttgcaaaggtacgtttacagcacctggaggaaaattagaacgtacctaagttgatagcaacgctctgctctagcatacacttcagaaatcgtttactcgtgctggagtctttgcatcggttttcttttcaacaatgaagtgcggtcaccaaactttgattccccctcccccgcccctaatataatcgtacttttactctgaaaatgctggggtctgtaatctgatcgcaaggcttctggggttgcagagtttcagggtctagacgggtggtctccattgcattcaacgcgagcgccctgtatctatggactgtgagcttggaaatgtttgtgctactggaaccgcggcactttaagccccgcacttctgtctgccccgcccgcagagctgcagttcgcccccgaccgcgaggagtgggaagtcgtgtttcctgcgctctggcgccgggagccggtggacccggctggcggcagcgggggcagcgcggacccgggctgggtgcgcggcgttgggggcggcggaagcgcccgggcgcaggctgccggcagctcacgcgaggtgcgctctgtggctccggtgcctttggaggagcccgtggagggccgatcagagtcccggctccggcccccgccgccgtcggagggtgaggaggacgaggagctcgagtcgcaggagctgccgcggggatccagcggggctgccgccttgtccccgggcgccccggcctcgtggcagccgccgcctcccccgcagccgcccccgtccccgcccccggcccagcatgccgagccggatggcgacgaagtgttgctgcggatcccggccttctctcgggacctgtacctgctgctccggagagacggccgcttcctggcgccgcgcttcgcagtggaacagcggccaaatcccggccccggccccacgggggcagcatccgccccgcaacctcccgcgccaccagacgcaggctgcttctacaccggagctgtgctgcggcaccctggctcgctggcttctttcagcacctgtggaggtggcctggtaagc

SEQ ID NO: 36764 - DNA, 818 bp, Homo sapiens; identical to SEQ ID NO: 30380
  chr5:1294558-1295376
  binary

SEQ ID NO: 36765 - DNA, 160 bp, Homo sapiens; identical to SEQ ID NO: 18803
  chr5:131037398-131037558
  hypo

SEQ ID NO: 36766 - DNA, 434 bp, Homo sapiens
  chr5:131593084-131593518
  hyper
cgacagctgggtttgggtccgcggcctgcagatccaaggcccgagcaggatccaggccgtcggggccgtccgaacgcggggatctctgagagctgagtgggggtgccgggttgccggcagccggggctgagggcgggtcctcagagccccccgaagtgggagggtcgggctggccgcggggccaatccaggcgcacagggagcgggggcgggggctgggccgagtggggacaggggcgggcgggccgggggcgggcgcggcgtccaggcggcggcggcggctgcggcggcggcggctcctcctcagagtccggctcaggctccggctgcggctccagcccgcgatgccccattccgtgaccctgcgcgggccttcgccctggggcttccgcctggtgggcggccgggacttcagcgcgcccctcaccatctcac

SEQ ID NO: 36767 - DNA, 455 bp, Homo sapiens
  chr5:131607799-131608254
  hypo
cgtggttacttctttctggacgagcggctctactgtgagagccacgccaaggcgcgcgtgaagccgcccgagggctacgacgtggtggcggtgtaccccaatgccaaggtggaactcgtctgagctgggaccctgctcccacgcctgcttcttaaggtccctgctcggccggtgtaaatatgtttcaccctgtccctctaataaagctcctctgctccaccttgaacctgtcacctggcctgccaccctcctgcgcaggccatgcatggctcccgagtacagtagtatctgcttaggtgccaggcatgtcctaggctctgggtgcagtagtgagcaggacgggtaccatgctgccctgaagggggccacagcctgggtggaaggcagacctgaatcacaacgggccagctctagtaatacgaaggtgaggtctgggatgctgcgtgcggcgcgac

SEQ ID NO: 36768 - DNA, 168 bp, Homo sapiens
  chr5:133406837-133407005
  hyper
cgaggggatcctcggcccagccttcctgggggatgaatttacaaagagttcccagcgggtgccaccctccccttcccttggaaggcgctcagccactgccaaggtgcggacgcagcgggggcggcgccgtgcgggagggggcagccagcgcggccacttcaaagcgcc

SEQ ID NO: 36769 - DNA, 63 bp, Homo sapiens; identical to SEQ ID NO: 18805
  chr5:134273891-134273954
  hypo

SEQ ID NO: 36770 - DNA, 128 bp, Homo sapiens; identical to SEQ ID NO: 18806
  chr5:134278947-134279075
  hypo

SEQ ID NO: 36771 - DNA, 265 bp, Homo sapiens
  chr5:134370281-134370546
  binary
cgcctagaatcaactcccgtctcggccgcctcgaagtccccagccctggcgagaacagcccaggatgagtgaatgtttgccgaacaggatcgcaccgagcgggcgccttcgagccagcgccggggcgggggcagagcccggggcccgttccggcagctcccagcggtgtcctcgtcgaggggccgcctgcccctccttctccagcctcttctcccgggaactcagcccggctgagtgacagcagcctgcgctctaatgggccccc

SEQ ID NO: 36772 - DNA, 541 bp, Homo sapiens; identical to SEQ ID NO: 24493
  chr5:134880146-134880687
  hyper

SEQ ID NO: 36773 - DNA, 335 bp, Homo sapiens; identical to SEQ ID NO: 15070
  chr5:139135589-139135924
  hyper

SEQ ID NO: 36774 - DNA, 127 bp, Homo sapiens; identical to SEQ ID NO: 18811
  chr5:140905588-140905715
  hypo

SEQ ID NO: 36775 - DNA, 316 bp, Homo sapiens
  chr5:141293732-141294048
  hyper
cgctgctttccccctcaaggctggagggaacgtgatgcaggcagtggagctgcgggctcggccccgggatcgtggggagagagagccccctgccgagcgcggaggggcgccctccctcccaggccccgggccaccgtctggggtcggttccctccagatttcacagccgcggcagcagcaggagcgcgcacacgcccgcgcccactgcactgcggcggtgctccgcagctcagcctcggggccatcacgtgggtgcggcctgaccccgggcgattctggggccgtctccgcaggcagttgagcctgccgctggggc

SEQ ID NO: 36776 - DNA, 1041 bp, Homo sapiens
  chr5:149681827-149682868
  hyper
cgccagcctccccgggcccgtcggccacgaagctcggcttggcccagtcccaggacaggtagccgaagctgagcaggctgaccagggagaagccagtgagggtgtgcatcgccaagccggcccgcgcgtcccggcgcgccgggctcctggggcctcaccacctcgcgcgcccagggcgcaccaccggcccgccggctcggatgctgcgagggagttcagcgccccccggggacggtccagtgtctggtccgggactggctgccggacggctgggccggatctgctcggccgcagcggggcgctctggggaggtcaggcccgcgccgagctgcctcccgctgcctaagcgcaggccctgcgccgcctttgctccctcttccccagctcagcccggccagcctgagacgcggcgtggcagcttccaaaaagtgctctctaccatcctctgactcccctcttccttcttgccctggatttctcccgcctcctaatttctctctcctctgctttcccggcctctcgccccacccggagtccttaaaacagcccagctccctgcagggaggtgggcaggaccccagaggggaaggggagggaggcacaagttgggcgggtcgaggggacacggcgggagagaattcgaaaaagttgtaacatctgccgggccgggccgagccccaggtggaggggcgggacgcagagcagcggctccacctcccgggcgggaagccccggccctctcggcctgctggctccagcgcccgcccctgaccgggatggggaaaggagggagtggggctgcttggaattcgatggaacagctccagaatggctgggtcagacattcctcgatcatggagtcttagcctctctgagtgccagccctggaaggaaagcccatcatttcctagtccaaccgggtcattctacagatggagaaactgaggcccggagatgagcctcaacgcgtctaagtcacagaacaagtcagtggctatgtctctaaggctcaccgtggctgttggagtggcggctcccttc

SEQ ID NO: 36777 - DNA, 79 bp, Homo sapiens; identical to SEQ ID NO: 18814
  chr5:156485569-156485648
  hypo

SEQ ID NO: 36778 - DNA, 707 bp, Homo sapiens; identical to SEQ ID NO: 30391
  chr5:157098032-157098739
  hyper

SEQ ID NO: 36779 - DNA, 58 bp, Homo sapiens; identical to SEQ ID NO: 18816
  chr5:159659095-159659153
  hypo

SEQ ID NO: 36780 - DNA, 795 bp, Homo sapiens; identical to SEQ ID NO: 22921
  chr5:169063996-169064791
  binary

SEQ ID NO: 36781 - DNA, 139 bp, Homo sapiens
  chr5:175971717-175971856
  hypo
cgtgagctaccgcgcccagccccgagttctttctagggtgggaggctgtgagtctgtgacatcacggggatattcttgggctggttccttgtctgtaagagcaacgaagggactttgtaccctgcaaagtgcaacttcc

SEQ ID NO: 36782 - DNA, 274 bp, Homo sapiens; identical to SEQ ID NO: 33847
  chr5:176225713-176225987
  hypo

SEQ ID NO: 36783 - DNA, 50 bp, Homo sapiens; identical to SEQ ID NO: 18818
  chr5:176663899-176663949
  hypo

SEQ ID NO: 36784 - DNA, 409 bp, Homo sapiens; identical to SEQ ID NO: 31954
  chr5:178957523-178957932
  hyper

SEQ ID NO: 36785 - DNA, 1302 bp, Homo sapiens
  chr5:31854462-31855764
  binary
cgggagaaggtataaaggaaatgcttcagtcgtgcagtcaccggcgattgtaattcagcggtgttaactttggttactccagccgaaaggctctgaccggggatttctggaaagttccctgacatcctgccccatacgatggttgtgattttagctgggggctccacccctgtaagaactcaggctgccgcggattatgaaacggagtggtcatgaagtgaattgatgtgggaaggtggagcttcttgcaatggctcggagggagaacttttggtgcaaacgagggtctagggtagggcgctttttcctctaacctgctccaggtttgccccaggaagctcctgagccctcggtgtaaacaaaggtgtctggatgagaagccccaaactccctgaaatcctccccagggcggtttccttttcccggcgaggggagtgaccggggaggggatcttggaatgccgtggggttttgacaagtgagcaggggagtggcgagccgagtttaggattgcattacaggcttttcctaacctcctccaccgcggcgcggagggaggaggggggggtcctcccacagacctggagccggcggagagcagccttcgggaagtcctgcaggagccgcgttccaggagggcagctggcagccgccccaggcccccgggccgcctgcaggtgattaggctaatgagctgccccgggggcgcggagaccggcctggcgagcggattacccggcgcccagctgctgccggcggagactcccaggagctccggagaggaaccctccgaaggtgacttcagaactggaggtaggaaatcggcttctcaggcgaaagcctcaggttttctgatctgatccaggtcgggtgcagactggggctgaatccacaaatgtggagatttagccacagcctcggaggcgcggagcggccacctaagcgtctgcccttctcgtctcccggatcactggggtgtgttgtttttaaagtgggggatttgcgtgttgagagacggtttgtgttcctcgggaggagtaagtgacttggagctggtttgtcaatggctggacggaaggaggcgccccggctgtgtgtgacgggcagggaaggggtgcccagaggggacaggtaatagggggttccggagccacggcggtttcagaaccttggggcctgtgccgttgaagccccggtaggggcggggggcatggcagcagcccgggaaatctgtcatactgtcccccatccctcgctagcagcagaatgactgagacggagcaaagctgctttctctacccgc

SEQ ID NO: 36786 - DNA, 1567 bp, Homo sapiens; identical to SEQ ID NO: 25731
  chr5:40680513-40682080
  hyper

SEQ ID NO: 36787 - DNA, 1687 bp, Homo sapiens; identical to SEQ ID NO: 23300
  chr5:42950747-42952434
  hyper

SEQ ID NO: 36788 - DNA, 1260 bp, Homo sapiens; identical to SEQ ID NO: 25734
  chr5:42991800-42993060
  hyper

SEQ ID NO: 36789 - DNA, 186 bp, Homo sapiens; identical to SEQ ID NO: 25738
  chr5:43008736-43008922
  hyper

SEQ ID NO: 36790 - DNA, 1396 bp, Homo sapiens; identical to SEQ ID NO: 25739
  chr5:43017299-43018695
  hyper

SEQ ID NO: 36791 - DNA, 1660 bp, Homo sapiens; identical to SEQ ID NO: 15085
  chr5:472600-474260
  binary

SEQ ID NO: 36792 - DNA, 742 bp, Homo sapiens; identical to SEQ ID NO: 27105
  chr5:49736607-49737349
  binary

SEQ ID NO: 36793 - DNA, 1068 bp, Homo sapiens; identical to SEQ ID NO: 35897
  chr5:58334886-58335954
  hyper

SEQ ID NO: 36794 - DNA, 1043 bp, Homo sapiens; identical to SEQ ID NO: 18828
  chr5:66299591-66300634
  hyper

SEQ ID NO: 36795 - DNA, 150 bp, Homo sapiens; identical to SEQ ID NO: 33858
  chr5:66511687-66511837
  hyper

SEQ ID NO: 36796 - DNA, 143 bp, Homo sapiens; identical to SEQ ID NO: 18830
  chr5:71714802-71714945
  hypo

SEQ ID NO: 36797 - DNA, 998 bp, Homo sapiens; identical to SEQ ID NO: 31990
  chr5:75698192-75699190
  binary

SEQ ID NO: 36798 - DNA, 80 bp, Homo sapiens; identical to SEQ ID NO: 18833
  chr5:76327297-76327377
  hypo

SEQ ID NO: 36799 - DNA, 815 bp, Homo sapiens
  chr5:77268647-77269462
  binary
cgccccatccccctgtctctcgccgcgcaggtttcccaccgacgcccgctcggaaggcgagagcccccacgtggcccggcgcggcgcggcccccggggaccgcgagcaacaaaagcccggcccgcagcccctgctcctcgccttccttttcaattctcccctgatctcaggtggaattaggaggattaaagcagcaagtaaatgaggcgagtgtgcaaaatgactcctttctgaaccaaacggcatgctccgtgctggggaaatgagatgcacatttaaatctcatccatccaccgcctgcggccaccgccatgtacctgcctacttagcccaagggttaattaattgaggcttcaatgcactattgcaagagcattattgcatttgatactctacatctgtgatttaaaactctttcagtcccttgtcagcaagggagggtttttaactaggaaattagcattcagataagggaacgctctatttgcttctgaaaggaaggaaatattaaggatgctggtgcacaaaccgggctgtcatatcctgtcccatcctggagggagcgcgagggcccggctcctctgggagtggcggcgacagggcgtcgtgcaatggacgccagcaccaggggcgggctggagggggaccggcgatcagggaaaccttactcctcgcaggcttcaacctgctggggcgtgtttacgtccgcaaagtccgataatatattttgtccccacttcttaggagctgattcttcttaaaatgcattgccacgttatctctaacgttggctttctgacttccccgcggggctc

SEQ ID NO: 36800 - DNA, 219 bp, Homo sapiens
  chr5:78105396-78105615
  hypo
cggcacttcttgccttcagctgaagctgggagacccatcctacggtcaggctgagggccgccagagcctgcggccaggcctaacactaggcagagacgactctgcagctgtctgctcacactcactgccagtcacgcttcactccactttcctgctctgaaaatcacgtcctggcaacctgcccatcggacctggagccagccttgccctctccactgc

SEQ ID NO: 36801 - DNA, 1266 bp, Homo sapiens; identical to SEQ ID NO: 18836
  chr5:78531956-78533222
  hyper

SEQ ID NO: 36802 - DNA, 102 bp, Homo sapiens; identical to SEQ ID NO: 18837
  chr5:90670755-90670857
  hypo

SEQ ID NO: 36803 - DNA, 52 bp, Homo sapiens; identical to SEQ ID NO: 18838
  chr5:90672526-90672578
  hypo

SEQ ID NO: 36804 - DNA, 460 bp, Homo sapiens; identical to SEQ ID NO: 29295
  chr5:92906252-92906712
  hyper

SEQ ID NO: 36805 - DNA, 72 bp, Homo sapiens; identical to SEQ ID NO: 18839
  chr5:96362713-96362785
  hypo

SEQ ID NO: 36806 - DNA, 929 bp, Homo sapiens; identical to SEQ ID NO: 32011
  chr6:100914838-100915767
  hyper

SEQ ID NO: 36807 - DNA, 1262 bp, Homo sapiens
  chr6:105584358-105585620
  binary
cgacaccgcgcgcccggctgcacgcaggctctgcgcggctcgaggcggccctacagggggcgaggaggaaccccggagactcggcggagagagcagagacggagctcaccaaggggcttgccgccgcagagcgcgggagccggcactcggtggggccgagggcccggggacgctggggctgcctgacctgagcggcggccgctgaccgttgagggtctctgtggccgcagcgcccagacccggggagaagggcggcctccaagggccgggagcccctcgagggcgcggccagcgaggagggacagagggcggcgcccccggctgcccgggcgcgtagaacaagcagctgccgccagggccgacaaagttgctccccgaggggctgagatccaactttcgcttcccgatttagccaggggagcgcgaggccgcacacaacccggcgcggggggaaagccggctgcagctgcgcctcccatccttacccggctggtccctggcggggagcctgggcagcgccgaccaaagttcggagcggcagcttcggggcgcgggacgcggggcacacgggctcagctgctcgacgggagcccgacgcgcgctcctcggcgggtcggcgggtccggaagctccgctgcccgggccgggtccccaagcccgcagccgctttgactaaaataggcatcgcgacggcggcggcaggcggcggcagccagggctggggccgcaccgcgcacgcgcatgcgcccgccgccccgcgccccccggcgggcggagcccggcgccgcggccaggatttcccacctcgctcccgcgactccgctgcgggtctgcacacccgaggactcggtttgaaacgcccgcttatttattttcttgtcgcctcgctacaagattctatccttgtttgggcatgagtggggggcggcagtctcgtgggaccggcggcattcgtcgttcctccttacggggataattcgagaagtgcggtccgggtagggagagaaatcaggagagaaaatgagaaagagaatcctcgtttcccctcaaagttggacgacccactcgtatatctcctttttgggagattcgcccataactcagcacaaacagggaatagcccggaaagcgcgcgagttcccgtccgattgtggcgggggaggctgaacgtttggtccacacgggtgcaggacgcgggggtcaggcctcctgctgcggaggaagagggggaagaggccgcgcgggagggacttctgacacgc

SEQ ID NO: 36808 - DNA, 902 bp, Homo sapiens
  chr6:106442279-106443181
  hyper
cgacgcttccgctggaagacgagcggggacgcgtgacagcgcggggatagcttttctattacgtttcttgttctccgagctcgagcccccttttaaaaagtcgctcaccaaaaacggggtgggggatggaggtggggacgagaagtttccgaatgctgagttcatttggacgaggtgaggagaactagggtcctaacagcaggtccagaggactctcgagataggtttagagcccgtccttttgtctggagtgtcgcgggactccagaagtgggttgtgcaagacaaacttccagataaatctttgcccggatcctcctgcggtcaaagcatcagtcctgcccgtaacttcctaacgacatcttcttggagcagattccgcggcggggatggctgggtgtgcaaaccgaaaacagtttgtcagccctccagtcccgccgcgtcgggaatgcgagcccggccacgcggtccgaccgggtccggggacggcgcgcttgtcgcgggagcctcccggcttgcggagggcttgagttttttggcggagacagaggaaagcctctggtcgagaggattagagcgcgcgttttctccgccgagcacgctgcccgacgccgtcgcagccgcgcacttcccggttttgaaagccagagagatgagtcaagcgcaaaagctccggagtgacaatgcgagcttttggccagcctcatcctcctccccattcccttgccttcttttaggtcttcggttcgtgacaagtgcataggttaggcttgcacggaagagggtcggggcaggtgccagctcagggcacctacccggcgttgtcacgttccctttgggatcaatgatctttcataactaggctgggcatgttcgtgcagccctctgggcactctgggggac

SEQ ID NO: 36809 - DNA, 838 bp, Homo sapiens
  chr6:108435964-108436802
  hyper
cggtttagtcatcattcctaataacaaggatgttgctaagaacagaaattttacatgattttcatacattcagcccttccccccacgtgtcattaaaaaaaaaaaaaaggcttagcctgcctgcgatttccaacttctctttccacggatcgaccgcggccttggcaaggacttgagtctgcgttccagccccttccgctcccagcgcgcacgcagcctctcgcctttgcgtcggcgggttgctggttgccggtacccgctcagcagctaggagccttggggaaccctagctcttagcttccccgtctggcgaggccagagggccaagttgctcactgggctgtgctgagggataaggggagaaaagaacggaaatcgcagctacgagggctagagggacggcgcggctgcttgaggacgggtcgcctagcggtgggcgagtagggctgtgcgtaaaaggatctagacagacagtcgtgcgcccgcagggttgcaggacaggggcaggccgagttgtggcgcgtgtgtgtttgtgtgtgctcgcctccgggttgcgcgctttcagggctttggatgccggggattttgaggacccattcaaagctccgagggggcggaggctcaagcaagccagggaaaaggtcccctaagcctcagagcctgggctgcgccccagacaaagtgcctaatgcagagtaggctcttaataggtttgcattggatctaaacgaaagctagtgaaattcgtacatgattctaatgagagatgacggccaggtgttctcagcagcccctggccctcacggggcgacctgaaagttcccactctacccgagac

SEQ ID NO: 36810 - DNA, 354 bp, Homo sapiens; identical to SEQ ID NO: 32026
  chr6:108484828-108485182
  hyper

SEQ ID NO: 36811 - DNA, 991 bp, Homo sapiens; identical to SEQ ID NO: 30466
  chr6:108490139-108491130
  hyper

SEQ ID NO: 36812 - DNA, 120 bp, Homo sapiens; identical to SEQ ID NO: 18843
  chr6:109647757-109647877
  hypo

SEQ ID NO: 36813 - DNA, 135 bp, Homo sapiens; identical to SEQ ID NO: 10696
  chr6:111766152-111766287
  hypo

SEQ ID NO: 36814 - DNA, 230 bp, Homo sapiens; identical to SEQ ID NO: 18845
  chr6:13318572-13318802
  hypo

SEQ ID NO: 36815 - DNA, 455 bp, Homo sapiens; identical to SEQ ID NO: 18846
  chr6:149915200-149915655
  hypo

SEQ ID NO: 36816 - DNA, 620 bp, Homo sapiens; identical to SEQ ID NO: 25769
  chr6:150311768-150312388
  hyper

SEQ ID NO: 36817 - DNA, 1304 bp, Homo sapiens; identical to SEQ ID NO: 24540
  chr6:155316022-155317326
  binary

SEQ ID NO: 36818 - DNA, 210 bp, Homo sapiens; identical to SEQ ID NO: 18848
  chr6:157351875-157352085
  hypo

SEQ ID NO: 36819 - DNA, 172 bp, Homo sapiens; identical to SEQ ID NO: 18849
  chr6:158651816-158651988
  hypo

SEQ ID NO: 36820 - DNA, 200 bp, Homo sapiens; identical to SEQ ID NO: 18850
  chr6:159206098-159206298
  hypo

SEQ ID NO: 36821 - DNA, 447 bp, Homo sapiens; identical to SEQ ID NO: 8618
  chr6:160679377-160679824
  hypo

SEQ ID NO: 36822 - DNA, 415 bp, Homo sapiens; identical to SEQ ID NO: 28114
  chr6:167834910-167835325
  hypo

SEQ ID NO: 36823 - DNA, 1449 bp, Homo sapiens; identical to SEQ ID NO: 32054
  chr6:26204318-26205767
  hyper

SEQ ID NO: 36824 - DNA, 1085 bp, Homo sapiens; identical to SEQ ID NO: 23319
  chr6:26216805-26217890
  hyper

SEQ ID NO: 36825 - DNA, 987 bp, Homo sapiens; identical to SEQ ID NO: 30481
  chr6:26250181-26251168
  hyper

SEQ ID NO: 36826 - DNA, 95 bp, Homo sapiens; identical to SEQ ID NO: 30483
  chr6:26252081-26252176
  hyper

SEQ ID NO: 36827 - DNA, 1263 bp, Homo sapiens; identical to SEQ ID NO: 24548
  chr6:26271217-26272480
  hyper

SEQ ID NO: 36828 - DNA, 730 bp, Homo sapiens; identical to SEQ ID NO: 23325
  chr6:26577146-26577876
  hyper

SEQ ID NO: 36829 - DNA, 315 bp, Homo sapiens
  chr6:27099585-27099900
  hyper
cgctctatccaacgaaaactaattagaaataaatctccttcccgaaagcgataaaatactaaagaatgagaaactgacagtttactgagtttgtaaggaaggccaaataaaggcggggtttggattcctttggcgcacccaagccgaccgtggacttcctggatacaacaaccaatcaggatgcagaggaagggcgggcgttgcccgggcaaattcaaactgacaaccgctgcaacttggcactgttccaaatcactaaccgacgggggaccgacgagtattttaattggtttctaacgtattttaattggtttc

SEQ ID NO: 36830 - DNA, 1003 bp, Homo sapiens; identical to SEQ ID NO: 30490
  chr6:27100290-27101293
  hyper

SEQ ID NO: 36831 - DNA, 104 bp, Homo sapiens; identical to SEQ ID NO: 16039
  chr6:27428748-27428852
  hypo

SEQ ID NO: 36832 - DNA, 444 bp, Homo sapiens
  chr6:27775595-27776039
  hyper
cgcttcttgccatccttcttctgggccttggtcaccgccttcttggagcccttcttcggggcgggagcagacttggccagctcgggcataatgaaacaatagtggcaaaaccaaaacaagaagtcggtctcctctttttatataatagtttatgcggccgaggtagtgggaaggtctctgctgattggtaattatccgtggatgacgacagatgccagttttgcccaatcaaaataggtatcctgcataatcgagtcctattggtctaaataaaaataaaacgtaagccaatcgcacagcttccttttcgcgcccagtagaggctataaaatgtacgtttttctagtttcacttcagtctttcttgaccgtatagataataggccttttgccatgtctgggcgtggcaagcagggaggcaaagctcgcgccaaggccaagaccc

SEQ ID NO: 36833 - DNA, 910 bp, Homo sapiens; identical to SEQ ID NO: 24555
  chr6:27777648-27778558
  hyper

SEQ ID NO: 36834 - DNA, 1354 bp, Homo sapiens
  chr6:27834106-27835460
  hyper
cggtcatatcaaattggcatgtaatagagaccccatcttgaaacttgctactatattgtcttgtgcgttgatagcatattatattaatgccgaacacattagtgacgccgaagtagctggtgcctaaatggcttaaacgcggaaaaaccacatacagatgatggaacaaaaactggccaatcagattatagagcgggctttttaaaatataagaagcttctttgtagctaggcgtctgacaaaaagcttgacaccaacttaacaaaaaccaacggctggaattcatactctaataacagactgcatgggtaaactacgtggggagtccaaccaacaccctggactcttgcttgccttgcgttactcgattagggttgagggagaactgcccgagatttttcgaatgcaaggaatcttgctgcctgatctaacatgttgtgcacagccattttttagaggtctctgggtggctctgaaaagagcctttggggctttgttgcggttttcacacgccagcttcctacttctttttggcagccgccttcttggcctttgcagctttaggttttgctgctttgggcttagcggctttgggctttgccgccttcggcttaactgccttgggcttggcaggactcttggttgcctttttcggtttggcagcggccttggccttcttagggctcttcgccacctttttgacgccagccgccgcgggcttcttcgccttcttcggagtcttcttcactgcctttttcgcccctgcagccttcttggccttcttaggcgtggcccccgcgggcttcttagctttagcggcgcctgccttcttggctttgggcttggcttccccggaggccgccttcttgttgagtttaaaggagccagaagcaccagtgcccttggtctgcaccagggtgcccttgctcaccaagctcttgaggcccagcttaatgcggctgttattcttctccacgtcgtagccaccggccgctaaggccttcttaagggctgccaaagaaaggccattgcgctccttagaagcagccacagccttggtgatcagctctgagactgggggccccgtcgctttgcgcttagcagcgccggcgccggcagccttcttagttgccttcttcttagccggggatttctccaccggcgctggggtggctgtctcggcaggagcggtttccgacatggtggcaagaaactgctagaagagaataagctcgaaatctaaagagcaggttttgcgttgctgctatgctcgggccccgggcttatataagccggcgctgccctgtgattggtggagcgtccaatccaccgccctctggccgccgccgctcgc

SEQ ID NO: 36835 - DNA, 1332 bp, Homo sapiens
  chr6:27839698-27841030
  hyper
cggatgcggcgcgcaagctggatgtctttaggcataatagtgacgcgtttggcgtgaatggcgcacaggttggtatcctcaaatagccccaccaggtaggcctcgcaagcctcctgcagcgccatcaccgccgagctctggaagcgcagatcggtcttaaagtcctgtgcgatctcccgtaccaagcgctgaaaaggtagcttccggattagcagctcggtcgacttctggtagcggcggatctcgcgcagggccacggtgccggggcggtagcggtggggcttcttgacgccaccggtggccggagcgctcttgcgagccgccttggtggccagctgcttgcgcggcgctttgccgccggtggacttgcgagctgtttgctttgttcgtgccatggctaagtagacgtacctactcaacacaaatgagagaaaaaaactgatcatcccggtatttatagctgccctcgcgttctgattggacagtagactgtgccatgccacgtctcacacacggaattggctcccagtttaatctgctagtgaaagggagacattccgcctctgttttgggtcaagaaacgtaaaatggttttgctagctaaagaaaaacaaaaacggaaacaaaaaaaaatcccccaaaagtctaggatttttcatgcatcaaaatcctgtttaaatataagcttgataaatctaaacttgccttgcactattttaattacgaggtgtcattactgatttgacaaaaagttaaagaacgtaaaggaaaagtgaaactagagtaaatttgtaaatggaggcattgaaggggatatgaaattcgagcgttgtggtatgccagtatttctcaaatttaaacgtacttaatgttttagaagttggccgactttttctgtaaagggcgatattaaaacattttgggcgttgcggaccacagtgtcatagttacacagccctcgcattggtagcggtaaagtaatcgatacaagataaatgagaccggctgtttcattatgacttttgcaaaaaccagagaggcgttatagatttggccgtgtatcagagaagccggcacttttaaccactaagtaatgctgaaaggggcaccgaacctcaaacttcagcgactgcttatgtggaatcgctaatttgccaaaactgccatacgtttaagtgttcttaagaaattaactatctttagtctacagctctttcacagacttcatgggtggccctgagaagggcctttgaggaaccgtgtaagtaagtaaaacactcagccgccaaagccatacagggtgcggccctggcgcttgagcgcgtaaaccac

SEQ ID NO: 36836 - DNA, 644 bp, Homo sapiens; identical to SEQ ID NO: 33022
  chr6:34433449-34434093
  hyper

SEQ ID NO: 36837 - DNA, 456 bp, Homo sapiens; identical to SEQ ID NO: 30494
  chr6:35744187-35744643
  hyper

SEQ ID NO: 36838 - DNA, 340 bp, Homo sapiens
  chr6:36252881-36253221
  hyper
cgttggggtagggtattcaagatatacccacaggaaaatgcagattacaattcagtctgcaattagggaccagatagcagccaactctcaggtgatccatgcagggattctgagcattcgtcggcgcctccccaggggctgctgcgccccctgcttcccgcgcgcccaccacgcacgctgctctgggagcagggccggcggcgccgccgcctcgcagcgattggttgaaccggaggttgttgctaggctaccagtgcgccctgagcctggggccccgcagtcccatcctctgtggcagatccatccctcactgcagacctaattccggtaccctgtgaac

SEQ ID NO: 36839 - DNA, 609 bp, Homo sapiens; identical to SEQ ID NO: 33026
  chr6:37666475-37667084
  binary

SEQ ID NO: 36840 - DNA, 1350 bp, Homo sapiens; identical to SEQ ID NO: 25796
  chr6:391113-392463
  binary

SEQ ID NO: 36841 - DNA, 155 bp, Homo sapiens; identical to SEQ ID NO: 18876
  chr6:42947097-42947252
  hyper

SEQ ID NO: 36842 - DNA, 278 bp, Homo sapiens; identical to SEQ ID NO: 18877
  chr6:43745076-43745354
  hypo

SEQ ID NO: 36843 - DNA, 312 bp, Homo sapiens; identical to SEQ ID NO: 25802
  chr6:43748290-43748602
  hypo

SEQ ID NO: 36844 - DNA, 126 bp, Homo sapiens; identical to SEQ ID NO: 18879
  chr6:43752469-43752595
  hypo

SEQ ID NO: 36845 - DNA, 198 bp, Homo sapiens; identical to SEQ ID NO: 18880
  chr6:52141070-52141268
  hypo

SEQ ID NO: 36846 - DNA, 587 bp, Homo sapiens; identical to SEQ ID NO: 25814
  chr6:73329621-73330208
  hyper

SEQ ID NO: 36847 - DNA, 348 bp, Homo sapiens; identical to SEQ ID NO: 18883
  chr6:7882630-7882978
  hypo

SEQ ID NO: 36848 - DNA, 53 bp, Homo sapiens; identical to SEQ ID NO: 18884
  chr6:86325389-86325442
  hypo

SEQ ID NO: 36849 - DNA, 280 bp, Homo sapiens; identical to SEQ ID NO: 18885
  chr6:88678327-88678607
  hyper

SEQ ID NO: 36850 - DNA, 813 bp, Homo sapiens; identical to SEQ ID NO: 24581
  chr6:88876714-88877527
  binary

SEQ ID NO: 36851 - DNA, 800 bp, Homo sapiens
  chr6:91004776-91005576
  binary
cgaaggtgaaaaccaggaacgccgcgtctcgccgcccgcgggcccgccgggagactgcgggtccgtctcgcgggtggggcgccccggtccctctcgtttcctggaggccacaggtcacggcgacggcggtgaccgggagagcaggctgcgaggcgcgcctcatcgggccacagacaaaccaccccggcagcggccgcgccggaacttccctcaagttaccaaactcgcctacgcgcgggagagtgctggggatgccccatgcgcccgcgaccccagaagccaggagtgtgccaccccttcacacactcactcccggccctgcacgcttcccctcacggtccgagttcctgcaaatgcttggccagaccgaggtcgccgagatgctcgctccagtctctcccctcgtgggcacctagggtagcccgtgagcgccgcccgccgccgtctccagcggcgccgggctcccgaacacccgccgggtgagcgaagcacagcggggccacggagcgcctcgacgcggggacggggagggcagtgtccccttcataaaccagtctcctgggtgaagcttctggggcttggagactggagtgtagggtgtgtgtgtgtgtgtgtgtgtgtgtgtgttgcaccttgacttcatggaggatctgtgggagaggaggtgcaaggtttccctctcagaagcctggcgcccttaggtcttagctacgcgggacgctttccgacaacccgatctttcgctaggagagattcgatccaggtctgcgccgcgaggcccccagctcgcctcttcctgc

SEQ ID NO: 36852 - DNA, 1037 bp, Homo sapiens; identical to SEQ ID NO: 28143
  chr6:91320244-91321281
  binary

SEQ ID NO: 36853 - DNA, 236 bp, Homo sapiens; identical to SEQ ID NO: 16049
  chr7:100064586-100064822
  hypo

SEQ ID NO: 36854 - DNA, 1063 bp, Homo sapiens; identical to SEQ ID NO: 25821
  chr7:100167136-100168199
  hyper

SEQ ID NO: 36855 - DNA, 201 bp, Homo sapiens; identical to SEQ ID NO: 18891
  chr7:100849441-100849642
  hypo

SEQ ID NO: 36856 - DNA, 132 bp, Homo sapiens; identical to SEQ ID NO: 18892
  chr7:101536683-101536815
  hypo

SEQ ID NO: 36857 - DNA, 332 bp, Homo sapiens; identical to SEQ ID NO: 18893
  chr7:101566736-101567068
  hypo

SEQ ID NO: 36858 - DNA, 429 bp, Homo sapiens; identical to SEQ ID NO: 18894
  chr7:101649223-101649652
  hypo

SEQ ID NO: 36859 - DNA, 823 bp, Homo sapiens
  chr7:103086087-103086910
  binary
cgggcaagcccagcccggcacaggaggaggcagggcccgtctccggaaagagggccagaggcagaactgagggcctggttttgtgtaattcgatttggatacaaacaggccagacccaaactggaaacggcgaagggctggattagcaccgaagggattcgaggaggcaaacgggaagtaaaaatgctgtgtggagctgcagagggcaaggggacaggggttgcaaaggaaagagcttcgtgagactttctccttcccggcgtagggaccagcagagtgcgggcaggtcagccctgtcaccggttcgtttagggaaaaagcgcgacatggggcctgggagacaggggcagaggcggtgacagcgagggcccctgctcgggtgggcccgcgggcctcagctcagtcccctcccgagggaccgcgacccccggccccgcggccgcccgcgcgcactcaccagcccgggctgccctgggcggagccgccccgccgcgctccacagccgctgcctcttcgacgcgcgcgctgcctccaggtgcggctctaggaggaggcgccgcgggcagtgccggccgcgccccgcgactcccggtaacccgagcccgccccgccccgctagggccaggccccgccgccaccctccgcgctgggacgccggggcgcgggcatccctgccgcctacggatctcttcccaagcacctagaactttccaaagcgtgcttggaatttaacaccttggtcgtcgatccccgcaaatatactctgatgagaccggctttcttcccataccgcccaggagtttctccaggtggcattcctgtc

SEQ ID NO: 36860 - DNA, 67 bp, Homo sapiens; identical to SEQ ID NO: 9898
  chr7:104917801-104917868
  hypo

SEQ ID NO: 36861 - DNA, 752 bp, Homo sapiens
  chr7:107300997-107301749
  hyper
cgcccctgacctcgcaacccttgagattagtaacgggatgagtgaggatccgggtggcccctgcgtggcagccagtaagagtctcagccttcccggttcgggaaaggggaagaatgcaggaggggtaggatttctttcctgataggatcggttgggaaagaccgcagcctgtgtgtgtctttcccttcgaccaaggtgtctgttgctccgtaaataaaacgtcccactgccttctgagagcgctataaaggcagcggaagggtagtccgcggggcattccgggcggggcgcgagcagagacaggtgagttcgccctgaagatgcccacaccgcccggcccgggctccactcccggggaggcctcgagggttgcggatgggactcttaagtggtcacggatcaggtgggcagggggcagtacagctttctttctgagacgccgagagcgaacaggctgctcggaaaacaggacgaggggagagacttgctcaataagctgaaagttctgcccccgagagggctgcgacagctgctggaatgtgcctgcagcgtccgcctcttggggacccgcggagcgcgccctgacggttccacgcctggcccgggggtctgcacctctcctccagtgcgcacctggagctgcgtcccgggtcaggtgcggggagggagggaatctcagtgtccccttccagccttgcaagcgcctttggcccctgccccagcccctcggtttgggggagatttcagaacgc

SEQ ID NO: 36862 - DNA, 420 bp, Homo sapiens; identical to SEQ ID NO: 18897
  chr7:1202650-1203070
  hypo

SEQ ID NO: 36863 - DNA, 975 bp, Homo sapiens
  chr7:120969785-120970760
  hyper
cgagagatggaactgcatgatcaccgccgccgccactaccgccccgatgggcgccagccccctctttggctacgagctgagcagcggtgagtcctgggtccttaggggttggtgggggacggaaggcgacaactcctccaccggttcctgcaaataaagtaaatagtgctacgtggtcctgtagctctctaagttccagaagaagccctttagtgcacggggattgagagctacaaaggccagacctggggagcaggtgcgagcctggagggaggtgactccccagttccagagcggagctctaggggctggagctcttcctctttcctgcggtgccccgccagagttggaaaaaaaactctaattctcctaccccgccgaccccctcggaccccgtagcgcccccctacgtgggtgaccagctggagaaacatgatgtcggcagcggggaatgcggctgccgcatctgctttgatttaaccaactccgctgcgcaccaaaccccggacaagtggctaattgcagcgaagccccacctttattggctcctaggagcaccgagttgacagaataatggtgacttttaaagcgactgtccgcgaccacccaacgtgcggctaacctgagcaggaccacttgtgcgcttctcgtttctttggcttttctatctttccctcctcggcgcactcccgcggcgcgggaagctgcaggaaaacaaagttccacttccacgtgcgtagtgacttggtaaggataaaggtacagggagccaggattgttcctggaatatcaacagatccaaagaatgttaggactggggcgctgaaggatgcgctgtcgtttttcatgttcatttccgttccccctccgcctttgacccttgtccacgcagtccctgcgcgcacccccgccgagccgcgcacctcccccgcggcgttctggccggcacgcccttccgaaggagccctggtcccc

SEQ ID NO: 36864 - DNA, 624 bp, Homo sapiens; identical to SEQ ID NO: 28155
  chr7:127744072-127744696
  binary

SEQ ID NO: 36865 - DNA, 89 bp, Homo sapiens; identical to SEQ ID NO: 24583
  chr7:128097604-128097693
  hypo

SEQ ID NO: 36866 - DNA, 263 bp, Homo sapiens; identical to SEQ ID NO: 28158
  chr7:1333595-1333858
  hypo

SEQ ID NO: 36867 - DNA, 854 bp, Homo sapiens; identical to SEQ ID NO: 30527
  chr7:139929854-139930708
  binary

SEQ ID NO: 36868 - DNA, 171 bp, Homo sapiens; identical to SEQ ID NO: 28160
  chr7:140156493-140156664
  hypo

SEQ ID NO: 36869 - DNA, 88 bp, Homo sapiens; identical to SEQ ID NO: 18902
  chr7:140156968-140157056
  hypo

SEQ ID NO: 36870 - DNA, 908 bp, Homo sapiens
  chr7:149119398-149120306
  hyper
cggggctgcggccgggcggctcccgcactgcgactaagggccagccggctggcaggcggggctggggctcggatgtcgggactagcgggtctctggcgcgaggcggccgccaccaccgagaaggccgcgcgcattcctagagcggccgccagcggccaggtgagggcgccgcggcctccggggcctcctcgcctctggccggcagggggcagcgcgcggccccgcgcggcccgacgtggcgctggcccgggaggcagcccgtgggccgccggcgcgccctgccgggcacccagcagcgcgctcccgttctcatcagacgggagaaaaaacgcccaggcagaggaacgtctaaaagtcaagtcatcaaaattaatgtaatcgagaaaatgtgcatatttaaaatatggatagagacgcataaatacatctttaaaataaaaatataatcgtttgtgttaagtccttgctccattggctctcagctgcactcacagcaccagtgagaccgacacggttgtgccccatcccacaggcgccaaatggagggcgcagggttttaggagctcgcgtagggcctctcgggcggcagcaatggagccgcgaggccggcggggagaccgaggacgggacccgctgagctctgggtgagctggggggactcgaggggacctggatgggccagaggcctggcttggggaagggccccttcccggttccccaaggtcccggtgtgccgctgccgtagggaagcaggaaggcacggccgcgccaggcgacctgaacgagaggaagcccggggtcgccgcccgcgggcgcggctggtgttcatacccagccaggaagggcgggcgggcctcgggtgccacgcggcgtgcccggcgctttccccgcagtcccgcttgctgccc

SEQ ID NO: 36871 - DNA, 135 bp, Homo sapiens; identical to SEQ ID NO: 18906
  chr7:149418013-149418148
  hypo

SEQ ID NO: 36872 - DNA, 32 bp, Homo sapiens
  chr7:150101974-150102006
  hyper
cgcccagggccgctccgccgccgggctccggc

SEQ ID NO: 36873 - DNA, 137 bp, Homo sapiens; identical to SEQ ID NO: 18907
  chr7:151506379-151506516
  hypo

SEQ ID NO: 36874 - DNA, 195 bp, Homo sapiens; identical to SEQ ID NO: 18908
  chr7:151791364-151791559
  hypo

SEQ ID NO: 36875 - DNA, 967 bp, Homo sapiens; identical to SEQ ID NO: 23352
  chr7:155165412-155166379
  hyper

SEQ ID NO: 36876 - DNA, 172 bp, Homo sapiens; identical to SEQ ID NO: 30532
  chr7:155256233-155256405
  hyper

SEQ ID NO: 36877 - DNA, 139 bp, Homo sapiens; identical to SEQ ID NO: 18909
  chr7:155502704-155502843
  hypo

SEQ ID NO: 36878 - DNA, 777 bp, Homo sapiens; identical to SEQ ID NO: 23633
  chr7:155581242-155582019
  hypo

SEQ ID NO: 36879 - DNA, 53 bp, Homo sapiens; identical to SEQ ID NO: 18911
  chr7:157128236-157128289
  hypo

SEQ ID NO: 36880 - DNA, 760 bp, Homo sapiens
  chr7:1607246-1608006
  hypo
cggggagggaggtgagacttgagtccctgagtgggtgtctgggtgttcacgtgtcctgctgagcagcgcggggcggctgcctccaggtcaccacacctggcacacccggatcacctccctcagcgccttcagcccctccatgcttttgtccttcacggccacggcgaggaggactgctctgtttccagcttcttgagacacaaacgctaccaggttctttgcaaagacatggatgagaggctggtaaaggaaggagaagaaaccattttaactgcaagaaacctggttttttcctcaatgctttcatgaagtatcccttaggaacccaggcaggcttcccacaccaccattaaccgccacataagtccatgcaactgtgactcagagttctggcagcactcagaacactccagtcacgggcacactgctaaagaccatcactccattcattttcccagcgccttccgcagccccgcctcttctggctctctctcatctaaaagaacccaggaaagagaagcctgcagaagcgagtgctgtcgaatctcacgtgtgatctccacagagcacagcacagccagccgcctgctcacgtaatgtaccatggcaggggaggcggctcgaatgacaaaactgctgcttctgcttgtctgctggataaaatgcctgcgggctggacaaagcatccactgagggcaagcagggcgccttgagacccacaaatgcccggaaaatgctatcgctgtaggggtatttgtcc

SEQ ID NO: 36881 - DNA, 866 bp, Homo sapiens; identical to SEQ ID NO: 30578
  chr7:19155978-19156844
  binary

SEQ ID NO: 36882 - DNA, 253 bp, Homo sapiens; identical to SEQ ID NO: 16079
  chr7:2071776-2072029
  hypo

SEQ ID NO: 36883 - DNA, 324 bp, Homo sapiens; identical to SEQ ID NO: 18914
  chr7:212456-212780
  hypo

SEQ ID NO: 36884 - DNA, 591 bp, Homo sapiens; identical to SEQ ID NO: 23637
  chr7:2208344-2208935
  hypo

SEQ ID NO: 36885 - DNA, 619 bp, Homo sapiens; identical to SEQ ID NO: 33927
  chr7:2264982-2265601
  hypo

SEQ ID NO: 36886 - DNA, 929 bp, Homo sapiens; identical to SEQ ID NO: 24621
  chr7:23510081-23511010
  binary

SEQ ID NO: 36887 - DNA, 327 bp, Homo sapiens; identical to SEQ ID NO: 18919
  chr7:2679783-2680110
  hypo

SEQ ID NO: 36888 - DNA, 941 bp, Homo sapiens; identical to SEQ ID NO: 24627
  chr7:27232216-27233157
  hyper

SEQ ID NO: 36889 - DNA, 895 bp, Homo sapiens; identical to SEQ ID NO: 25876
  chr7:27281871-27282766
  hyper

SEQ ID NO: 36890 - DNA, 125 bp, Homo sapiens; identical to SEQ ID NO: 24631
  chr7:27686735-27686860
  hypo

SEQ ID NO: 36891 - DNA, 501 bp, Homo sapiens
  chr7:27907637-27908138
  hypo
cgcttggtgactcaggcaagacattcaattccatttgccattttcttctcttgctacagagcccacttcagaggattcaatgagtgaatacgacaacggtgcttggatcagtgcctgccatactgtcagcactagtcgttactattttcactggttgaacagacacgtgagttcacacatgacaccatctattgggatgagtcacgttgcttgctcaacaactttaaggcctaggatcagtgacagaactccaggagcagcggggttaacacgggtgaccaatttctcctgcccactgtcactcacatggcccatgcctgctcctgcagatgccgttccccggtcctcaccgcaactccctgtggggttgactgccgcttgcttctcccgctcccatccccctctccagattcctccgcccctgcatgggccgcctcacgggggtttctcaccatccactctgaacaaggcgtggagttgcttgctccagcctggctggtc

SEQ ID NO: 36892 - DNA, 120 bp, Homo sapiens; identical to SEQ ID NO: 18926
  chr7:27914823-27914943
  hypo

SEQ ID NO: 36893 - DNA, 89 bp, Homo sapiens; identical to SEQ ID NO: 18927
  chr7:32609681-32609770
  hypo

SEQ ID NO: 36894 - DNA, 254 bp, Homo sapiens; identical to SEQ ID NO: 16089
  chr7:36124398-36124652
  hypo

SEQ ID NO: 36895 - DNA, 888 bp, Homo sapiens
  chr7:37487365-37488253
  binary
cgctcgcggcacagcaccgacttcccaaccccaaacacacgcgcgcacccccgggacagctgagttctgtatttcctcttcctcaaagcgactccggcgatcgcagtcgccactctccgctccgattcccgggccccctggcatgccgccgcccccttctctgaaggcgcgcccggtgcgtcccctctccgaagccgagatttccacgaagctccacaaagctccccgccgcctctctcggtctcggcggagaccccggtgtgtccccgggaggagagtatttactaaccagaacctcaggggctcccggctgcccagaccgccctctccggccctcctggcccccattcctctggcccatcaccgccccctcccacgagcgcgctcgccgggggattccctcccatccccgagtgcaggagaagacgccgagtctgagccgcagccgcttctctagctctataggaatcttgactccaagatcccagccccacatcccccgtccccagtaaccccgcgccagcgtcgcaaccctcccgcgccccccctcccgcagaccctggtcgaaatgtctcggcgggctcccgggccccgggccctgcgcttcatccgcgggcgccgcacctccagcgccccctccctccgctcccactcccactcccgccatccccggagctcagacttccccaactgcagagcgccccgacgcgcccgcagccctcaccctgccgagcgcggcggccacccccgcccgagccgcggcgcccccagggaggaaacaaaagtgtctccgcggcgcccggagtcccccggagcaggacgcctcctcccggccccagtcccggccccctcccctgccgcgccgaggtcagcgagtcggggcgcggc

SEQ ID NO: 36896 - DNA, 66 bp, Homo sapiens; identical to SEQ ID NO: 33934
  chr7:44740657-44740723
  hypo

SEQ ID NO: 36897 - DNA, 984 bp, Homo sapiens
  chr7:45613811-45614795
  binary
cggcgggcgggaacgcaggacgcggagttggggcgcgggctgtgcgcgcccaggttcgcggctcccggggctcggctgtcgcagcgcggtcgccgccgaggaccacggtcggggcgcgggcgggctccagtgcgcaggcgcggcgggcgggaggggacgcgctccgggcgcgcgcgcggggcagccggcgccccaactccgcccgccccgcgccccgcgccccggcgcctcgccgcccgccgcccgcccgccccggcgccgccgcccgcgccccggcgccccgggccggcgaggggcgcgcccgcggccgcggccgctgcatggcgctgagatggcgggggcgccgcgcggcggaggcggcggcggaggcggcgcgggcgagcccgggggcgccgagcgggcggccgggacaagccgccggcgcgggctccgggcgtgcgacgaggagttcgcttgcccagagctggaggcgctgttccgcggctacacgctgcggctggagcaggcggccacgctgaaggcgctggccgttctcagcctgctggcgggcgcgctggcgctggccgagctgctgggcgcgccggggcccgcgcccggcctggccaagggctcacacccggtgcactgcgtcctcttcctggcgctgctcgtggtaaccaacgtccggtccctgcaggtgccccagctgcagcaggtcggccagctggcgctgctcttcagcctcaccttcgcgctgctctgctgtcctttcgcgctgggcggccccgcccggggttccgccggggccgctggggggccagcgaccgccgaacaaggggtttggcagctccttttggtcaccttcgtgtcctatgccttgctgcccgtgcgcagcctgctggccataggctttgggctcgtggtggctgcgtcgcacttgctggtcacagccaccttggtccccgccaagcgcccacgtctctggaggacggtaagtgcagccgc

SEQ ID NO: 36898 - DNA, 438 bp, Homo sapiens; identical to SEQ ID NO: 18930
  chr7:47605259-47605697
  hypo

SEQ ID NO: 36899 - DNA, 1629 bp, Homo sapiens; identical to SEQ ID NO: 24645
  chr7:50343211-50344840
  binary

SEQ ID NO: 36900 - DNA, 989 bp, Homo sapiens
  chr7:51383730-51384719
  hyper
cgggcaatccgaacaccttccgagaacgcggggcccgggcggctgcgaagccggggagccctcccctccacgctgccgggagagccgatcctggggctgccgccgaggccgggagagggaagacttgatgggaaccggccaggggcaagcccgcagggaagaggccggagtcaaaggccgggcgtcccctcgctccccgctccacccctacggcaaacacttggggggcctgaggaaagctcggagctgagtgggggctgtgctggcggggacccccataaggacgcctgcatacaaaccaccccgcgcgaaaagtgcgctccggccccggcccgacacggttacctgggcaacgacccgggtgcccaaagtacacagcacgcaccaccacccaacaccagcacccaacaccagcaccgcaccacctgctccaccactaccaccagcacccgctggggcggcagagagggcgccctgcccgggagcgcgcggtgcggacgcgggcgtccgagcccagggaagccccctctccaccccgcccgaccgcggggccgcttacccggtcgggggcttggccgccgaggcgcgcggcgcgtccatggtgccgggggccgggacgcgggcggtgctccgggcccgccgagtcaggcgctggctaccgccgccaccgctgccgccctcattcactttttccgcgctgacccatcgtcctcccacgcgggccggcggaggacagcggcggagcgcggcggacggaaggggctggaatcgtctctagcgggcgggggcgccgggagcgcagggaggggctggcggcggcgcggggcgggggcgccgggagcaaggtgcgccgcgcccccgccccggctgctctgccgcgcccaccggagcgccgcccccgccccgccccgccccgcctgctcagagtcccgacccggcccgcggcgagcgtccggggaaggaatcctccggcacctgggccctgcacc

SEQ ID NO: 36901 - DNA, 237 bp, Homo sapiens; identical to SEQ ID NO: 16096
  chr7:5230941-5231178
  hypo

SEQ ID NO: 36902 - DNA, 454 bp, Homo sapiens; identical to SEQ ID NO: 30616
  chr7:6543023-6543477
  hyper

SEQ ID NO: 36903 - DNA, 802 bp, Homo sapiens; identical to SEQ ID NO: 30617
  chr7:6570393-6571195
  binary

SEQ ID NO: 36904 - DNA, 838 bp, Homo sapiens; identical to SEQ ID NO: 35108
  chr7:808392-809230
  hypo

SEQ ID NO: 36905 - DNA, 336 bp, Homo sapiens; identical to SEQ ID NO: 18939
  chr7:98598608-98598944
  hypo

SEQ ID NO: 36906 - DNA, 170 bp, Homo sapiens; identical to SEQ ID NO: 18940
  chr7:98599246-98599416
  hypo

SEQ ID NO: 36907 - DNA, 1702 bp, Homo sapiens
  chr8:107669381-107671083
  binary
cgcaaactaaatccctcaataacgttgcctaaacaggactgggatcatagaatgtccaacactaacatgagttcataatggcacaacgaacttaaaatgttactattcatgttttaattatgattgcagtcttacgttgaaggtatctccgccgtccttaaacataaaaaaaaaaaaaggaaatacaagctgcaaaagttttatgtaatgcactccaccctcttttttccccaagccaacacacacccttcaaactttttgacagttattttcagacccctcctaggctcccgaactccatgcaactccagcagtctcccctgggccatttttagcctctgctctgacctggcgggaggctgggtgtccaccctttcccctgcagtcctgaaagtccggtccgagcgcggacggggcggggaggggctgggcgggccaggccagctccattggcgccaggcgggtgggggaatgcgctgagaggacccgtccagcttgcttaaaagccatcagttttctgaccccgcatcggttccaggaagaatacacctatgtgacaagctaagttctgcctcattttgcatttagaagccacaagaaaaacttttcgaaaacttttgtccgtcttttgctcccccgacgcgtggtttcctgatggtccgtccccgggcagagagagggacgccccctcctcctccccgcctcttgtgaggcgcgcggagccgcctcccctgggtcaggtctgatgggccggtgggcgcgctagtggtggccgccaccgccgaaaccgtcgacctcctgggccccagttccgcgtccagccccgcggcagcatggactacctgacgacgttcaccgagaagagtgggcgccttctgcggggcacggccaaccgcctgttggggttcgggggcggcggcgaagcccggcaggtgcgcttcgaagattacctgagggagccagcccagggggacctcgggtgcgggtccccgccccaccggcccccggcgccgtccagcccggagggacctggtgagcccacctttctttcgcctcccgcgcggccgacctgggctgagggctgtggggaggcggcggtcgtggcgccgggcgggggtcgctgcccggctctggcaggtgtgcctgggccggggcgggcaacgtggccggggtggcggccgccgggggcgaggaaggaaggactcgttcggctctggggagggaagactttcagctgcgtgccagctcttcctgctctgctcttcctgctttcctcacctagacttgattttctttccccgccaagtatttcaaggggacgatccattctctctttccctcccactgggaggtgaagactgaaccagttatgacgtccgtgttttcagtcttggattcttgaagagcgctgtgcctgctttggttttggtttgggtcagtctttccttaatatttctcagttgttaggattcacttcctaaccgaaaaataaaaagccagatacttctttgtaaaataaaacacttcattaacattggaagctagttgacattttgcgtcgtgtactttttgaacggctgcacgttgtcttgtggtggcagaacctagaaactttctcagttcctgtttattttgtgttgtgttggccgatttttttcaccacagtggctttgtaccattctttaaaacagtcatttgtagc

SEQ ID NO: 36908 - DNA, 467 bp, Homo sapiens; identical to SEQ ID NO: 30632
  chr8:1132651-1133118
  hypo

SEQ ID NO: 36909 - DNA, 123 bp, Homo sapiens; identical to SEQ ID NO: 18945
  chr8:120846246-120846369
  hypo

SEQ ID NO: 36910 - DNA, 236 bp, Homo sapiens
  chr8:125573965-125574201
  hypo
cgaccctttgccctctctgcttgtgagcagcacatatggtttagtgaagcacacagcggggaagaggagctccttacagaccaagccaagcaccccaggtgggacacgcactctcaagcactctcaaactatagccgtggctcttggctctgagtgcgtttaaaattgagtgtgtatccaaggaaggcagacagaggccacagtccccaggatggctgaaaaatgctaatgggagc

SEQ ID NO: 36911 - DNA, 132 bp, Homo sapiens; identical to SEQ ID NO: 9961
  chr8:126042734-126042866
  hypo

SEQ ID NO: 36912 - DNA, 340 bp, Homo sapiens; identical to SEQ ID NO: 23645
  chr8:126044399-126044739
  hypo

SEQ ID NO: 36913 - DNA, 62 bp, Homo sapiens; identical to SEQ ID NO: 25913
  chr8:128745557-128745619
  hypo

SEQ ID NO: 36914 - DNA, 354 bp, Homo sapiens; identical to SEQ ID NO: 18950
  chr8:128867892-128868246
  hypo

SEQ ID NO: 36915 - DNA, 997 bp, Homo sapiens; identical to SEQ ID NO: 24662
  chr8:128871653-128872650
  hypo

SEQ ID NO: 36916 - DNA, 617 bp, Homo sapiens; identical to SEQ ID NO: 25915
  chr8:128888848-128889465
  hypo

SEQ ID NO: 36917 - DNA, 440 bp, Homo sapiens; identical to SEQ ID NO: 16107
  chr8:128893135-128893575
  hypo

SEQ ID NO: 36918 - DNA, 101 bp, Homo sapiens; identical to SEQ ID NO: 18956
  chr8:134254220-134254321
  hypo

SEQ ID NO: 36919 - DNA, 322 bp, Homo sapiens; identical to SEQ ID NO: 18957
  chr8:140799730-140800052
  hypo

SEQ ID NO: 36920 - DNA, 392 bp, Homo sapiens; identical to SEQ ID NO: 18958
  chr8:141147354-141147746
  hypo

SEQ ID NO: 36921 - DNA, 455 bp, Homo sapiens; identical to SEQ ID NO: 25918
  chr8:141599879-141600334
  hypo

SEQ ID NO: 36922 - DNA, 420 bp, Homo sapiens; identical to SEQ ID NO: 28220
  chr8:142243860-142244280
  hypo

SEQ ID NO: 36923 - DNA, 63 bp, Homo sapiens; identical to SEQ ID NO: 18963
  chr8:146105109-146105172
  hypo

SEQ ID NO: 36924 - DNA, 128 bp, Homo sapiens; identical to SEQ ID NO: 18964
  chr8:28207473-28207601
  hypo

SEQ ID NO: 36925 - DNA, 89 bp, Homo sapiens; identical to SEQ ID NO: 18965
  chr8:28207908-28207997
  hypo

SEQ ID NO: 36926 - DNA, 92 bp, Homo sapiens; identical to SEQ ID NO: 18966
  chr8:28237888-28237980
  hypo

SEQ ID NO: 36927 - DNA, 130 bp, Homo sapiens; identical to SEQ ID NO: 18967
  chr8:2970523-2970653
  hyper

SEQ ID NO: 36928 - DNA, 402 bp, Homo sapiens; identical to SEQ ID NO: 18968
  chr8:37702286-37702688
  hypo

SEQ ID NO: 36929 - DNA, 85 bp, Homo sapiens; identical to SEQ ID NO: 18969
  chr8:38697075-38697160
  hypo

SEQ ID NO: 36930 - DNA, 722 bp, Homo sapiens
  chr8:49292881-49293603
  hyper
cggggctgggctccggcatgggcgcaaaaacaccagtgcggaggagttctcgggaccccccggggctgcggggccttgcggggacagccccaggcccggagctgcagaaacacccagaccccgcgcctcccggaaccacgcgtctctgtgcacagacattcctgggggcaggctcctgtcctttaacacagtctcaaaggagtcttcaaaaacaaaaagtttacaagcactgatagggaaaacagaaggatgataacaccaagagggactttcccgggagaggacggcttccagggactgagaaaggatgggcaagtgggcggggcccggcgccgtgcgggcagggctggcgccgggagtccccagactcccccgcagtgggaagcacctctcccattcacgccgggcaggacacctggccgggcgggggaggcagcgcaagggccggccggggagtacgggactcgagccggggacctgaggcaggagccaagcatcgtcgcagggcaaccagcagaacggagagggaggcgcgggggcgaaggctggcgggagccgcgctgagggcaggagcccggagccccctagggcagcgccgatccgcccgccccgtcccgccgagctgggcctccgtctgtggcctgcgcagccagggtcgccaagccgcctggaatggctcaggcttccaaaaggagcaggcgccaaaaagagctttgcccgcc

SEQ ID NO: 36931 - DNA, 494 bp, Homo sapiens; identical to SEQ ID NO: 24686
  chr8:49468683-49469177
  binary

SEQ ID NO: 36932 - DNA, 858 bp, Homo sapiens
  chr8:54789983-54790841
  hyper
cgcttggcggcagctgagcctccaccccaagccccagccggaggggcgcgtcccctgtcctcctcccgagcgagacgaacgctcagcagctcgttccctgggcgccaagaccgatttccaagtcgcccactttccccctcgagggagctgttggcgcttctccagaagcctcctcggctcccagctccagcccctaaaataaaagcaccttgccagagagcgggggaggggagcagctgaacgaggagaatgaaaatactgggagaacgaccccattctccaggaaaaggtaatgaggggaagtgaaacagtgtgaacttactcggaaatgcaaaccgagttcaactcacccaggagcaaacaaacgacagcaagacaaatcagccaccgcactcgcggcttcccagaaagggcctcatgaatgagaatgggttgctaggtttccttccctctctcctgacaatcgcttcccacaagacttccaccgccgaaagaatacaggccgggcctggtgactgcggagtgagggaaccgcgccaggcccacgaggccgctcgcgaccgctcccgccttcaggaccctggagagcggccgccgcgcccctgggacccacgcccaacccagaacacccgcgctcgcctcccgcgcctcaccaccccagcactttattcgctgcttcccgcctccaccttcattttttttggcaaccaccgctcttgtttttcacagacagattaaattgttttttgtttggcatgagggggtgtttggattggccgagctacattccggtttgtaactacactaaacgttagtgtaccaagaaactaagagcgtctcaaagatgacagtctgaac

SEQ ID NO: 36933 - DNA, 423 bp, Homo sapiens
  chr8:591520-591943
  hypo
cgtaatgtatttcctcaaaggtgtctctcattccacatcgaaagaccttttcacacagattattcaaattatagcttaatatttcttgattaattgtactgggaggaggtagtgtgtctgagcgtgatctaatcagtggagaacgcagcggccgtcacgcctgggtacgctggcagcggagctcctcccggaggacccctccccctccccgccgattcctctcctgtctgcgttttccaggctcatctcagatgccgccttgtctatgaagctctctttggttcctgcccagacctcatcagaatcaacgccccggctctgtgctggccaaaaccccacggtgcctctggccgtatgcagtcctttcttctgaccccatctcgtcctccagtctccactggtctcaggtcaatagctttttcc

SEQ ID NO: 36934 - DNA, 1018 bp, Homo sapiens; identical to SEQ ID NO: 22962
  chr8:61193218-61194236
  binary

SEQ ID NO: 36935 - DNA, 768 bp, Homo sapiens; identical to SEQ ID NO: 30662
  chr8:61822259-61823027
  binary

SEQ ID NO: 36936 - DNA, 506 bp, Homo sapiens; identical to SEQ ID NO: 25949
  chr8:81213177-81213683
  hypo

SEQ ID NO: 36937 - DNA, 75 bp, Homo sapiens; identical to SEQ ID NO: 24703
  chr8:86544713-86544788
  hypo

SEQ ID NO: 36938 - DNA, 78 bp, Homo sapiens; identical to SEQ ID NO: 18976
  chr8:95848311-95848389
  hypo

SEQ ID NO: 36939 - DNA, 1210 bp, Homo sapiens
  chr8:9760527-9761737
  binary
cggaggaaggtgttgacccacatacaatgagtcctgagcccagagaaaaatctgcacacacaagcactccgcaatgcgctcccaggcgaccccctccccacgcacaccgcatctgtgctgcacagatctgcttctgtcacagaatcagcttctgtttctctccctgagtctgtttgcatctctaagcccctgtctgtcacaggctgcacacctccccaccccacgggctccggtgcgggacaggcagccggagggagctccagacccctcccctcgcgcccgcggccgctgcgcggaggtctgcggagggcgcctggctcggtcggtcgctccttccttggcgggccctcgccgacccacggtgctcagccagccccattcttggcattcaccgcgtgccttaattgtatggacatttaaatcaaggtccgctgtgaacacggagagagaggcctttctcctgaggaaggaaaggaggaaggaaggaaggaaaggtgaaagaaaggaagaggggtgggtagaagatggaataagaaaaccaggaaaaagaaataaaaagcggcgcgtgtgcgtgcgcactgacagcggggagagggatgggggtggggaacgccggaggaagggaccacagcatcctccccgccgcagctcccccaatcacacagacaatgagataacagcgacgtcttccaaaggctctttgttctcccccatcctttcgcatccaggctttttcctgcaaagcggagggggtggagggatgggggtgtgggtggaagtgggagacggaggggtgcctcccccgtgttaattaccccggctcccctcgcccctttccccgcgcctcgcctcccctgcagctccagacaatgaaaaaacaacatcgaccccacctcgccccagcgcagcaacccacccacccatgtcgccctctgcttcgcccaggaaactgaaggggactaggaggaggaagaagagagcgaaggacaaggagagcagcggggactcggcagcggcagccggggcagggcgcgcggccgccgcctctttacctccatcgctgagtgggggcgcagccgggccgggcgtgccgcaggggcgagttgccgcggtccggggctgggacctggggattcagccttccggaactcgcctgctgcagtcctctcgctcaggtcccaagtggtggaggggggaaaggaagagagac

SEQ ID NO: 36940 - DNA, 893 bp, Homo sapiens; identical to SEQ ID NO: 32298
  chr8:99956867-99957760
  binary

SEQ ID NO: 36941 - DNA, 965 bp, Homo sapiens
  chr9:100610353-100611318
  hyper
cgtgccaccgcccacctcatgctttgggcgccaagcagccaagcaaccgggttgcgttgtagggggaggcaatcagccctgttacccctcctcaggcggccggactgagctgcgggatgggatccctacagagactggcctgggtaaggggaaaaaatcactgcctcttcctgtgcctctagtggttgaactagaatcctggctagctcatctcgcttttgaagggggaaggggagtaatcatcggctcttttgagattgtcttgcaaaccatggactctctccccagaaatgaacacccacaatctagtgtgtaaatttcaggtttccaagtgttccaaagccgcgcacaaatttcggaaccagaccaagaatcctggactctagacgttgcctgggggccgatcctgcgcccagggtcccagaatctaactgaaatgcgcctgcgggccgccaccttcgccccgggccacggctttgccaggaatgcccgccgccacagctgaactcccgcccgcccgcctgggtcggatcagacgcgggtagtggcttgcgcttcgtggtcctcgggtccggaacgcagggaaagcgcgtggagccaacctagagcgggagcagggtctggcttgactctgtccccgattcgttgtgcgcagtgggacaagtccgcgccgtccggagccgacttccccttctcgttgtggccgtaaagctgctggacctccaagccggctcctgcgctccccgctgctctgagaacactgagtgtcccgggcccgcgcagactgggttgggagagggctctgtgggagggcttgcggggagcggggtaagaaaggctaggtgcttcttacctacgtaagaaacgttggtggcgggatctaagcaaacggggaggtgggaagcagaaggttccccttcctgggccccagttcctccatcctgtcccctgggtgacagtgattc

SEQ ID NO: 36942 - DNA, 733 bp, Homo sapiens
  chr9:102586203-102586936
  hyper
cgcagaggagccccggtcacaatggtgcgtttcacggtttcctccacacacttcaccaccgggaggggaacacgggggtgttcctttcgtctgcccacgagaaagaaaggggctttgacagaggtagttatttcttcctaatttacaaccccaaggctctgtgctcccggccccggcggccgcaagcaggagcggcggaacgtgtttccaggcactgaggctttgcctaggtaaccggccgcttgtggggtggagagagcggcggggcgctgggctgggctggaggaaaggctgtgtgggtccctcccgcgaacgctgggcgctcgaggggaactccttcgttggggagaggcggtccccgcccacccgagttctgaggcctcctctcagagaacgactccgcttgaaaggccctcagggaatgcgggacgggaatgcgggcacccactgaaggggcgggtgggggattgctggagacccccattgaagatgcggggagacgggaagcacgtgctacagccgtgggaagatccgcttctacccgcgctacatcgagcgcaagctttccgtccgagcagctccagctggggctgggggtggcaagggaatcccccatttcctggtcgtcgagggtttcctggacctgggagccccgagtccctttctctcttcctgcaggcaagccccgggctcaggggcgccaggagatgaccctcgtggccccgcgcacctc

SEQ ID NO: 36943 - DNA, 529 bp, Homo sapiens
  chr9:116065600-116066129
  hypo
cgctcatccttgcaggcctctgttctgggtccgattgatctcctgccatcccctcggattccactgtcctctgtgcgctgacctgcctcgactcctggcttctgccgagatggatccttccctatgctgagtccctgtaaccaaaatacagatagctcttgcaaaatactgacaaaagcggccactaatacagcagaaaaatagtcgggagacggttgagcgtctgcctgaagagccagggttctcaagcaaggcacacttctaggtcagagttcagccctcactgagaatccaaactccgtttaactaccgatggagacttgagcaaattaattaacttctgccagcctcagtttcctcacctgaaaatggccataataacctacctacttgatctgtagattaaatgaggtaatacgtgtcgagatcgcgtaataacacagggcctggcagacagtaactcgctaaatgttaaccagaactattattgttataaccggtctgttcacgtggcccatcttttgttccc

SEQ ID NO: 36944 - DNA, 646 bp, Homo sapiens; identical to SEQ ID NO: 33980
  chr9:116800647-116801293
  hypo

SEQ ID NO: 36945 - DNA, 217 bp, Homo sapiens
  chr9:124751388-124751605
  hypo
cgatcactcatcctacacgaagccagagagccctcttgaggccggtcaaggctggaaacgcaggctgggaactggcaatggttacctggaagcacgtggggcccggcctccccgtggggatgtctgactggtagaagactttgagctctggagtcagcgcgatgaccgtcttaatcaccacggagatgatgtcagaccagaccttcttgatgtcaac

SEQ ID NO: 36946 - DNA, 484 bp, Homo sapiens; identical to SEQ ID NO: 30681
  chr9:128651916-128652400
  binary

SEQ ID NO: 36947 - DNA, 280 bp, Homo sapiens; identical to SEQ ID NO: 15303
  chr9:132145475-132145755
  binary

SEQ ID NO: 36948 - DNA, 478 bp, Homo sapiens; identical to SEQ ID NO: 33988
  chr9:132881052-132881530
  hypo

SEQ ID NO: 36949 - DNA, 144 bp, Homo sapiens; identical to SEQ ID NO: 18991
  chr9:133592887-133593031
  hypo

SEQ ID NO: 36950 - DNA, 724 bp, Homo sapiens; identical to SEQ ID NO: 30683
  chr9:134151944-134152668
  binary

SEQ ID NO: 36951 - DNA, 932 bp, Homo sapiens; identical to SEQ ID NO: 36079
  chr9:140196486-140197418
  binary

SEQ ID NO: 36952 - DNA, 232 bp, Homo sapiens; identical to SEQ ID NO: 16157
  chr9:140645189-140645421
  hypo

SEQ ID NO: 36953 - DNA, 65 bp, Homo sapiens; identical to SEQ ID NO: 18995
  chr9:173878-173943
  hypo

SEQ ID NO: 36954 - DNA, 71 bp, Homo sapiens
  chr9:19374763-19374834
  hypo
cgcagtgcacacctgtagttcccaggcggtcaaggctgcagtgagccataccactgctcgccatccggggc

SEQ ID NO: 36955 - DNA, 982 bp, Homo sapiens
  chr9:37035890-37036872
  binary
cgggctgggggcggggggtgttggtgttttgttgttgttgttgtttccatttagagggcttgttttgtttttgtttgttttctgtgagttttcatttttccatgggatattcttttgtttcgggtgttttgcgtgttgttttttcgtgggattgattttagcgggttttgctctgtaagtcctggtctttggggtgagttttgattttgtgtaattttgtactttgtccttgtaggctgtctttttgtgtgtcgtttgtaaggcttttccttctccgcggtgtttagatgtgttttgatttggtgtgagtgggtgtcgtctgtgtgtgtgttgccttagggaatttcgtgttgtgtgtgttttgtttccttcgatttgaattttatttttttgaactgtacgttttggtgggggatcgggttatattttcatgtgttgtctttagtttttgtgtttgtgagatgcgctggtgagagtttgcgtgtgtattttggcttttgtggggctttgggattagggaggggacatcagccgctactccgttcctgcccgcacccatgaagggcagaggattaggccaagcatcacgaatcgtaggttcgccgtgctccgccgcttcgcgctctggacgctcgagaccagcgggaaacaaatgtggttcccgagggggcgcccgctggtcgtcaaaacctcgcgggcccggaggcgccgctgctgggtcagaatcgcagagcccccctcgcggggtaccgaggcccagccgccgtccccttgcccaccctctcccctgtgagtcggtctccccttgcgcctggccagcatgcttcggaccgtccggactcccgcagcgttggcccaaggggcggctcccctcggcggagcaggtgacgaaccacttcggaggacacggaattgacactgcggccctagagatacgggacaaggggccagaacgcggggagtctaggctcagatcggagtc

SEQ ID NO: 36956 - DNA, 183 bp, Homo sapiens; identical to SEQ ID NO: 28284
  chr9:66494093-66494276
  binary

SEQ ID NO: 36957 - DNA, 231 bp, Homo sapiens; identical to SEQ ID NO: 18998
  chr9:7028696-7028927
  hypo

SEQ ID NO: 36958 - DNA, 349 bp, Homo sapiens; identical to SEQ ID NO: 10025
  chr9:71320587-71320936
  hyper

SEQ ID NO: 36959 - DNA, 334 bp, Homo sapiens; identical to SEQ ID NO: 23405
  chr9:79636205-79636539
  hyper

SEQ ID NO: 36960 - DNA, 38 bp, Homo sapiens
  chr9:90386494-90386532
  hypo
cgggacgggggccaccccggtgcccggcgagtacctcc

SEQ ID NO: 36961 - DNA, 280 bp, Homo sapiens; identical to SEQ ID NO: 16169
  chr9:96348822-96349102
  hypo

SEQ ID NO: 36962 - DNA, 417 bp, Homo sapiens
  chrX:41331620-41332037
  hypo
cggtggctccaaagtgggtggccacacgcacaccctcgtgcaatgtgaagctcacctgatgactcaccatggccagcaggccgcggaggtaacgatcccgaagggcggctcgggcccgctgcttctgggattccaaggattcttgagctatggaacactcctggatttcaagaacctctgactacaggggggctctgcgtccatcaggggcaaagccacggctgagaccatcagggcctcggggcagccggagcacaggcacaggaaaggtcactggagcctgcattgtcttggcgaggtccgtggctactgtgcgcgcccccacttccgccggcaccccgcagtagaggccagggcaggccccgagccgcggagcctgggttccgcctgcgccaccgccaccaacccacgtgtcac

SEQ ID NO: 36963 - DNA, 461 bp, Homo sapiens; identical to SEQ ID NO: 18118
  chrY:15863654-15864115
  hyper

SEQ ID NO: 36964 - DNA, 1398 bp, Homo sapiens; identical to SEQ ID NO: 24730
  chrY:16635744-16637142
  binary

SEQ ID NO: 36965 - DNA, 451 bp, Homo sapiens; identical to SEQ ID NO: 36097
  chrY:21204870-21205321
  hypo

SEQ ID NO: 36966 - DNA, 281 bp, Homo sapiens; identical to SEQ ID NO: 32364
  chrY:22918423-22918704
  hypo

SEQ ID NO: 36967 - DNA, 715 bp, Homo sapiens; identical to SEQ ID NO: 24731
  chrY:2655227-2655942
  hyper

SEQ ID NO: 36968 - DNA, 200 bp, Homo sapiens; identical to SEQ ID NO: 24732
  JH636052.4:5118715-5118915
  hyper

SEQ ID NO: 36969 - DNA, 59 bp, Homo sapiens; identical to SEQ ID NO: 29553
  chr1:101703569-101703628
  hyper

SEQ ID NO: 36970 - DNA, 603 bp, Homo sapiens; identical to SEQ ID NO: 24737
  chr1:101774910-101775513
  hyper

SEQ ID NO: 36971 - DNA, 71 bp, Homo sapiens; identical to SEQ ID NO: 19011
  chr1:10692421-10692492
  hypo

SEQ ID NO: 36972 - DNA, 182 bp, Homo sapiens; identical to SEQ ID NO: 19012
  chr1:10692798-10692980
  hypo

SEQ ID NO: 36973 - DNA, 208 bp, Homo sapiens; identical to SEQ ID NO: 32377
  chr1:110186004-110186212
  hyper

SEQ ID NO: 36974 - DNA, 1303 bp, Homo sapiens; identical to SEQ ID NO: 24743
  chr1:110610350-110611653
  hyper

SEQ ID NO: 36975 - DNA, 988 bp, Homo sapiens
  chr1:110612169-110613157
  hyper
cggcccgtgagcccgcggcgccagggggttaggctgcccagggctgctcctgactgcccagcggtgatgatccagcgcggggaagccaagactgccagaagggcggctatcatagtgcataacggcagggaggccagcttagtatgagaaataagaatacagttattccgtcttgaggacagccctggcattgcacgaccagtcgcggccagactgtgccagtctgccgcacaggcagcacccttcctgtgaaggctaggcccggggaggagagacgggccaagaccaggccgcagtccccagccgaccccgatttgaccactctaggttgaggcccagcctcagggccctcaaagggcgccagacacaaaagccgcgcttcttcgtcaggtctcagtgtggctccacagccctcggccgggtctgggcttcagggtaggtggcagttccagtccaacttcggcagagcatgctctctccttcccaggtccaactgctttcgggccccgactggactccgggccgtcgccactgcaccttccctcgacctcccgccttccattcccgccgccgaggaacggtggttcaccctcccgccccacactggcctttgcctggcccgggccagcgccaacccggcttccgtggaagccgtggcgaaaggcgagaggggcaaaaagttgagaaataggcgagcgggagagataagcaggaaggcccgggtgggcccgggtaaggaagaagaagagagggtcgggctgcgcgctacgccccgcgccgcgcgttaccttccgcggggccctcgtagaagtggccgccgttgagggccgggccgggcccgaggtcctgcaggtacttggcgggcggcttggccggctctgggaggtagggctccaggggcccgcaggccggaaagcgggtcagccgcgggccgcggggcggcgcggggtgcaggtgaggcgcagcggcgggggttccctgcgggccc

SEQ ID NO: 36976 - DNA, 330 bp, Homo sapiens; identical to SEQ ID NO: 19015
  chr1:114522986-114523316
  hypo

SEQ ID NO: 36977 - DNA, 1333 bp, Homo sapiens; identical to SEQ ID NO: 34024
  chr1:11538713-11540046
  binary

SEQ ID NO: 36978 - DNA, 758 bp, Homo sapiens
  chr1:119543781-119544539
  hyper
cgagggtgattctgttagcctcgcaggcccttctcccacccgtcatttgaagtcatcgaccccggggcagccccaacagttctgtgcgggcctgcgcgcaccgccctcaccttgcgcgccaggcatctcacctcagccgggcaggtgcagaggtgacaggcgcggcagccgcggttcgtccggccgaggggcaggaggaggctggccgccgccttctgctgcccgcaggctgagggggcaggggagggggaacagggctgggaaactgccgtcagcgggtcccggccccgcctcccgaacgcaacgtccaggaaacctcagaactttctattgtctgagaagcttcactgaacaaattgtccctaaaactttagagctgcgaagagcggatcagggcaggttctagtgtggccctgtgccccggagcctgcctgccataaagtgtgaccggaagcccccccccccccgcccactgtcagaaccactgaggagagaagagcgcggcgccttagtgccgccctgcgtcgtggtcgggaagccgagcaagcggtgtggacgccccaggagcagggggatccaggcctaaactcatgggttccgaatgggcaagggagcagaatcaagcatcggtgggcgcttatagaaagcgcgtctgtcttggaacacccttaccagggtacccaaccccagcgccaggtttcctggccttgcaaggagaggttgaatttgtcaggattccccactctagaaggtggctc

SEQ ID NO: 36979 - DNA, 84 bp, Homo sapiens; identical to SEQ ID NO: 7651
  chr1:150586185-150586269
  hyper

SEQ ID NO: 36980 - DNA, 154 bp, Homo sapiens; identical to SEQ ID NO: 14436
  chr1:151566699-151566853
  hyper

SEQ ID NO: 36981 - DNA, 196 bp, Homo sapiens
  chr1:155055094-155055290
  hyper
cggcattcgcctttctgcaagagaggcgagaggctataggggatgaagtggagcaagaagagagaacagtacgaaggggcagggcacaacccggtccccaggtcccagcccacccccacccttccgcaggaggcgcggccctagaggcggggttagctgcggagcttcgcgtgggcccagcggcacctctctctcc

SEQ ID NO: 36982 - DNA, 35 bp, Homo sapiens; identical to SEQ ID NO: 19019
  chr1:156036276-156036311
  hyper

SEQ ID NO: 36983 - DNA, 229 bp, Homo sapiens; identical to SEQ ID NO: 14437
  chr1:156326789-156327018
  hyper

SEQ ID NO: 36984 - DNA, 811 bp, Homo sapiens
  chr1:156593638-156594449
  binary
cgaggtcattcactctcatcgtggggccacggccacgctgccctgcgtcctgggcaccacgcctcccagctacaaggtgcgctggagcaaggtggagcctggggagctccgggaaacgctgatcctcatcaccaacggactgcacgcccgggggtatgggcccctgggagggcgcgccaggatgcggagggggcatcgactagacgcctccctggtcatcgcgggcgtgcgcctggaggacgagggccggtaccgctgcgagctcatcaacggcatcgaggacgagagcgtggcgctgaccttgagcttggagggtgaggcccttccgctcccgccccattcctgtgtagcagcgggtccgcctcgcctgggtctcccagggctccttcccagtatctcctccgcacccctggggaccccagctccctctcccaggccgcgccgcccttcctccccctccgctcccatccgctggccctccccaggatccccgccaccccctaggtgtggtgtttccgtaccaacccagccggggccggtaccagttcaattactacgaggcgaagcaggcgtgcgaggagcaggacggacgcctggccacctactcccagctctaccagggtgagcggccgaacccagcacttcccaagccccgcggagctgtctcaggggcccgagagagggcgccaggcgagctcagtctggctcctgcctatgacgcctcttatccccgacctccgccgtctcccgccagcttggaccgagggtctggactggtgtaacgcgggctggctgctcgagggctccgtgc

SEQ ID NO: 36985 - DNA, 175 bp, Homo sapiens; identical to SEQ ID NO: 19023
  chr1:156662232-156662407
  hyper

SEQ ID NO: 36986 - DNA, 977 bp, Homo sapiens; identical to SEQ ID NO: 26028
  chr1:156814769-156815746
  hyper

SEQ ID NO: 36987 - DNA, 721 bp, Homo sapiens; identical to SEQ ID NO: 24769
  chr1:156862989-156863710
  hyper

SEQ ID NO: 36988 - DNA, 274 bp, Homo sapiens; identical to SEQ ID NO: 19024
  chr1:15735867-15736141
  hyper

SEQ ID NO: 36989 - DNA, 396 bp, Homo sapiens; identical to SEQ ID NO: 19025
  chr1:160983499-160983895
  hyper

SEQ ID NO: 36990 - DNA, 935 bp, Homo sapiens; identical to SEQ ID NO: 19026
  chr1:160990384-160991319
  hyper

SEQ ID NO: 36991 - DNA, 331 bp, Homo sapiens
  chr1:165086756-165087087
  hyper
cgccggccgttctctccgcaggtgcccggcccctgcctccgagtgcgcctcgcggagcgcaaagcgctgtcacgactcggtggccgaggtgattaattagcggcgtggccgtgcgggggacgcgtgctggcctccacatctgccccgtgccagcaggggtcaatatgcggtgtcactgctttccctctcactccctccaaagcctaattggctgtgacacgcgggccagctgttgtgagaggtggagcgcggcgggcgttttccaggacggaggctgagggcaggttgacgggcctgtggagaatgtgtgctgcttcctgcaggcgaccac

SEQ ID NO: 36992 - DNA, 328 bp, Homo sapiens; identical to SEQ ID NO: 19029
  chr1:169074766-169075094
  hyper

SEQ ID NO: 36993 - DNA, 311 bp, Homo sapiens
  chr1:170629359-170629670
  hyper
cgcagcccaccctgcctcgaaactccctgcggtgatgtcggggctagaggaatccagggcttggtccctgcagctgaggcctacgggatatcccaggaaagagcagcctctccgtagtggtgaagagtctctcaagccttagcgctctggtgacctccgcgggattctgagaaaagcactgcggaacggcgggagcgggccctgctgcttgcttcgcgccccccacccgcccggggaccgcgactaagtccccgacgcagctcttcccttttcctgaataccctgggactctgctcccgagttccagctcc

SEQ ID NO: 36994 - DNA, 557 bp, Homo sapiens; identical to SEQ ID NO: 28312
  chr1:170640136-170640693
  hyper

SEQ ID NO: 36995 - DNA, 227 bp, Homo sapiens; identical to SEQ ID NO: 14443
  chr1:175161560-175161787
  hyper

SEQ ID NO: 36996 - DNA, 115 bp, Homo sapiens; identical to SEQ ID NO: 30758
  chr1:182911469-182911584
  hyper

SEQ ID NO: 36997 - DNA, 151 bp, Homo sapiens; identical to SEQ ID NO: 19034
  chr1:184722819-184722970
  binary

SEQ ID NO: 36998 - DNA, 101 bp, Homo sapiens
  chr1:18956226-18956327
  hyper
cgtggggccagagacgctctttcccccgggagacaaaaggcctgcagttgtggcgtcctgccccgctgggagggcgtttcgcccccaggactcggtgtccc

SEQ ID NO: 36999 - DNA, 307 bp, Homo sapiens; identical to SEQ ID NO: 17195
  chr1:19283560-19283867
  hyper

SEQ ID NO: 37000 - DNA, 467 bp, Homo sapiens
  chr1:197881313-197881780
  hyper
cgccgcctcccgccgagaaccgagttctagttggggaaacgtctgacatctggacatcaaggtaagaccctgatggagatattttagtcggagcagttttctgccctcggagtgcgcccggacgcccgggagtttcagggacttcttgggagcctaccggaggaaggcccggctttgctccaagccgcgtccctacctgaggtctccacgggaggagcggtttggacgcgccccaccggatgggaggaggtgcttggggaagccgggccgtaccgccggtctgactcccggcttttctctgccagtgcaaccaccattacggcgtgatccactccttttcctctaagaatgctgaacggtaccactctagaggcaggtgagttatgtgccaggttccttctgatgttctctgccccttgggccagtgcgtataccatgtgagtgtgtgtgcgtgtgtgtgcgccttc

SEQ ID NO: 37001 - DNA, 888 bp, Homo sapiens; identical to SEQ ID NO: 29595
  chr1:197887902-197888790
  hyper

SEQ ID NO: 37002 - DNA, 1442 bp, Homo sapiens
  chr1:1981183-1982625
  binary
cgattgtccagatcaagcccctcgagtaaggcccgagaggctgtggcttcagaaatgaaggtcatgggcgactcgggccaatgccgcgtccttgacctgggcgaagtgagcggttgcactcacgagtgtggacggcccttccctacaggggaccttggattcgctgggggcggagtgggggctggggcccagagaacccgagtccggacgctcccgtccgtgaccctggccgggttctccgctcctcgcagcttcagtccgcaagtgtgagatgtcaggggacccctggacggcggggccctcgggctggcagcgcgcgccgcaggagtttcgattcggagggtctgggcgaaggccgagaactcgcgtttccagcgagttcccgggggcgccgctccgtcccagaggccggggcccctccggttgccgggcagagccgcgccgcgcgcggtcccattggcgcaggtgcgccgcgccccgcccaacaggtagccccgcccgacaggtagccccgcccgcgcctcgccattgggccgcggccgggtgtcccccgaggattggcccaggtggcggccccgcctcgccctcattggccgcaggtgccaccgcccgccccgggaccgcccgccccgcggattggccgctggctccacctcggtccgccatgttcggacaccgccccccgcccccgccggacggtcccgccccgcgcgccccccgctcccgccccgcgcgccgccggagttccgcggagttgaccgggtcggcgccgtcggtcctgagcgctgccttccgcgttccgccgcggccccacctggagcccccgccccgcgccatggccggagctcccggggcgcagcgctgacggcggcggggggagcgcgccatgcccagcaggaccggccccaagatggaagggagcggcggccgcgtccgcctcaaggcgcattacggggggtgagcggcggagagggcggggagcggcgcgggtgaggcagggagggcggggagggctcagccgtcggggctcctgcgcgagagggagagagggaaggggcggcgaggtcgctgcgggcccggggctgtcgcgggaggtcctcggtccccgcccgtgagcgtcacccgcggacacgtcgtggacagcgcgggctccttccccgggaccgggtttccctggggtcggccccgcgccgcgagctcctcggcccggtcattgtggtagacgttttcgctggaaagttgggcggggacgttccggccgcaaacctgtaaggactgaaagttttcatcaagttgtgaaaactcctggcgggtttcttaaaatcagcgtttcctaaacgttctccacgtttacccggtcgggggtctcgctttagccaaaatccggagacccggggcgcgggcgctgtggctccaatgcagcccccggcagggctcggggc

SEQ ID NO: 37003 - DNA, 255 bp, Homo sapiens; identical to SEQ ID NO: 19040
  chr1:200379717-200379972
  binary

SEQ ID NO: 37004 - DNA, 656 bp, Homo sapiens
  chr1:201449645-201450301
  hyper
cgttcagaggcagccccagctgcggggcggggcggggcggggcggggcggggcggggcgcggagctgttggcagctaagtggttgaggttgagcggccgggtggaggccggcacctactaggaggctgggctggtccgcaggttctcaagcccggctgagcccgggcaagcgtcagagaatcaccagagcagcttgtcgaatacagattcccaggccccacccaggccaaccgaatcagaatctctaggggtggggctgggaatccatttttaaaggcttccccaatgattctcagaataaaggttgggcttggaggcggggccggggctgggcgtggcacggaggcgaggcgcggggagggccggaccttccagttgttaatccctgtgttcctcactccgccacactcacctccactgatctaagtcgggggatcgttcctcgctgggtgcccccctcacttgatcttagccaaaaggtcgagaagcgattgggagcccctctcgaataatttctgtggcccttgattcagggatcactcccacacttaatagcagctctaacgccccccaacccccgctacccaagatctctatcctcaccctccagtcggcctcgtggtcttcctgtccctccccagcctctcaggtgaccc

SEQ ID NO: 37005 - DNA, 160 bp, Homo sapiens; identical to SEQ ID NO: 13135
  chr1:202112280-202112440
  hyper

SEQ ID NO: 37006 - DNA, 213 bp, Homo sapiens
  chr1:202531802-202532015
  hypo
cgaaatacttcttagaaaaggcgcaaactacccctgagcattaccttctccccactactttgttctcaaaaccaatttttatctttaatattatctcccacaggttggaatcgggaggtagtaatcctacaaccagtgattcttacggtgaccgggcttcagcaagagcccgtcgggaggcccgggaggcccgcctagccaccctgaccagcc

SEQ ID NO: 37007 - DNA, 192 bp, Homo sapiens
  chr1:202613433-202613625
  hyper
cggacccgacacctcccacctccacaactctgctttctcccacttgggaaaagcgaggctgacacccacggtgagcaccaggaggggcagggaggaccgagagcctgggcagcactcctgtgcctcagtgtcacccttgggcctcaccctcaacccccaacctcacccgataagacctcggggccacagctc

SEQ ID NO: 37008 - DNA, 966 bp, Homo sapiens
  chr1:20810336-20811302
  hyper
cgcggtgaaacagctccatcctccgtccctgccaggggtcccttccctgctttcctctgaaccacccaccaccctctatcctccagcctgcgtcccagctccattctgagaaaaggaaacagagggcgccaacccagccgctcctgctgcagccagggcgcgcactggcccgcgtcctccccgcaccaggcgcactaatttagacagaaatgtctggagctgggataggagagggagccaaagtctttgggtctcgggaccccaggtaagtcccgagcgcagctccggtgggcaaggctaggtgcggagatgagcggaaccaggaggggacgccaaaaccggttcccacgacgcgcagcgggtgggggttagggcctggcctgggcgggcgccccctcctgcgcgccctctcccagccgctggccgactgactcggccgccccgcgctccccgctgccgcagaggtcagagcctcccttcgctgcctgccagggacacatgccgtaacctcggcctctcttaccgtctcgacttagcctcgcctttctcagtccctccatcgtccctcggcgcgacggccggcagccgatcgaggtctctgtctctccctgtctaaggtgtcggtcgcccttattgtttcggcggcttctgcgtcctccccaaacgcgcgtcctcggctctgtctctcccgcttcagctcccctctcgggagctttgtctcggtctctgccaccctcggtctcccgcgtaccccctcccctccatccctgcgtctcagtctctctctgcagccgtcggtccccctcattgtccccgcgtctctggagctcctctcggagcctctctgcgtctccgcctctctggggcttttccagctctcgcgcggatcgcccaggcctggcaaaccccctcccaagccaagtaacaatgaaaagcccgtgcgacccgaacaccctagccttcccc

SEQ ID NO: 37009 - DNA, 259 bp, Homo sapiens
  chr1:209979376-209979635
  hyper
cgtcttagccaaggggcgcctggctctacccaagtagggactgcaggttcctctccccgtcccgcaccagcccttacctgcccagcccaggtgcgccgagctcacgtcagcgcctcgccccaggacgccgcagccttcgcatccgcccggccacgcctcccaggtgtggccacgccccccggcgttcgggattggcgagttgcaagaaatatgacactccgcgtttctgggctgcccggcccagcggcgtccgtccagc

SEQ ID NO: 37010 - DNA, 279 bp, Homo sapiens; identical to SEQ ID NO: 19049
  chr1:214453844-214454123
  binary

SEQ ID NO: 37011 - DNA, 42 bp, Homo sapiens; identical to SEQ ID NO: 19050
  chr1:220950193-220950235
  hyper

SEQ ID NO: 37012 - DNA, 653 bp, Homo sapiens; identical to SEQ ID NO: 22745
  chr1:223936543-223937196
  binary

SEQ ID NO: 37013 - DNA, 118 bp, Homo sapiens; identical to SEQ ID NO: 19052
  chr1:231046066-231046184
  hypo

SEQ ID NO: 37014 - DNA, 44 bp, Homo sapiens; identical to SEQ ID NO: 19053
  chr1:231053141-231053185
  hyper

SEQ ID NO: 37015 - DNA, 916 bp, Homo sapiens
  chr1:231175062-231175978
  binary
cgcggggctgagggacccggccgcctccctcgcccggggtgcgcgtctgctttcgcagccatctgtgcgccggggccatcccgcggtaatcggatcacggacgcgcggcctggggcgccggaaagggggccgggctgttccaatctgctgtctacactggcggcggacaaaagttgtcctcttcgtggtaggaaaacgcaatcgcgttaatccgttgggccgctgtgaaagcctttcccccaccgggaaggtctgtttcactcggggagaggtgacaaggccgcccccgcccccaggccaggcacgaaccccgcacagcgcttccgggcgcccaggtttccgagccagcggggccggactgagggcgccgggcataagaaagccgccctctgcgcgcggggctctcccgcgggggttccaatcgtgggcacggagcacgcgagaaaaatgggggtcgttgggaggacggcgccggcgcctggggcggaggagcccgaaagggcgggtgggcgcggggacttccggacagagcgcggtccccgcgaactttcccgggacggcgagcccggccgggaagagccccagctcgcggagccccactcaccatctctttgcggagcagcgccagagcggcgtccaggttgggaggcttggcgggcagcgctgccgcccgggccccgccgccgcccgggcccccgcggctcagctcgtcctggatgcgcgacttctgcgcgtacagccgctccaggtgccgccagcccccagacgcgccgccgcccgacgccgagtgcagcagcccgctcaagctctttggcagcgggggcagcccgtccacccgcagcccccggaccgcgccgttgcccgcggccccgggcgccgcccgggccccactcatcgcgccgcggcccggccacgc

SEQ ID NO: 37016 - DNA, 53 bp, Homo sapiens; identical to SEQ ID NO: 19056
  chr1:233799555-233799608
  hypo

SEQ ID NO: 37017 - DNA, 190 bp, Homo sapiens; identical to SEQ ID NO: 30787
  chr1:234736252-234736442
  binary

SEQ ID NO: 37018 - DNA, 911 bp, Homo sapiens; identical to SEQ ID NO: 35247
  chr1:24648226-24649137
  hyper

SEQ ID NO: 37019 - DNA, 40 bp, Homo sapiens; identical to SEQ ID NO: 19059
  chr1:24739857-24739897
  hyper

SEQ ID NO: 37020 - DNA, 234 bp, Homo sapiens; identical to SEQ ID NO: 14471
  chr1:24742017-24742251
  hyper

SEQ ID NO: 37021 - DNA, 747 bp, Homo sapiens
  chr1:248020330-248021077
  binary
cgggggcggggaaccacaacgttaattttatccccgacatagggagcgcctgagtggtggcttttcaccgggtgtggctcgtctgagctcttgaactgaagccagcggacaccacccgtcggcgcctgctttcctggggcgtgggctcctccccctgtgcagaccgcgaggggagacggtgcgggcggccgggagcgcagccctccgggaggcgggtcatggcctgggcgccgcccggggagcggctgcgcgaggatgcgcggtgcccggtgtgcctggatttcctgcaggagccggtcagcgtggactgcggccacagcttctgcctcaggtgcatctccgagttctgcgagaagtcggacggcgcgcagggcggcgtctacgcctgtccgcagtgccggggccccttccggccctcgggctttcgccccaaccggcagctggcgggcctggtggagagcgtgcggcggctggggttgggcgcggggcccggggcgcggcgatgcgcgcggcacggcgaggacctgagccgcttctgcgaggaggacgaggcggcgctgtgctgggtgtgcgacgccggccccgagcacaggacgcaccgcacggcgccgctgcaggaggccgccggcagctaccaggtgaggcgccccccggcgggggctgcgggcgctgcggtgaccgggaagcgggcgacagtccggagcggagccgccgaggccacccgtctcctgagcggctcccacggcc

SEQ ID NO: 37022 - DNA, 211 bp, Homo sapiens
  chr1:29462398-29462609
  hypo
cgaaaccccctgcctgaagtgcttgttcaacatgcttctgcaacatcacttggtcctcgaaaatttctggtttgggagaactgccaacgatgcccctagagacctttcaaacctctttgctaattcctcttgccaagagatgcttgagaggaaaaattaacatgaataaaagatcattgaaagaatctacaggccgggcgcggtggctgac

SEQ ID NO: 37023 - DNA, 539 bp, Homo sapiens
  chr1:31157913-31158452
  hyper
cggtgggcgcctcccgggcccagcagcctcttggctgggaaagagacagacgggggcccccttccccgggaactgactttccagtgggaacaaggacgaccgtcgaggaacccgacaaatgaattaaaccagcaccagcgtgatgagcaaagcggagaaggaaagagggcgctgtgaggagagcgaggctcctccgggaaagctccttctgctccaggtgacagcggagagagatgccaccgcgcggcgaccggcagggccgcgtcccctctgcgtcctagcacagcgacgccccgcccgccacccgccctacgtcacccacagcccccgacaccgccccctcccccggccctgggcttccagtccctgacagtccctgggacgccgccccacaacgcccgccctctctggaccctaggacggccccgggcacctgcatatgatgtgtggccacgcccccgccacagctaattggaccggggtggacacctgaacccagtcggaccaatcaactcctgggttgccccgagacccggacc

SEQ ID NO: 37024 - DNA, 698 bp, Homo sapiens
  chr1:40157617-40158315
  hyper
cgtcccccctccccacgcatccactcccctcacgccgtggggcagagaggagggtgctggttgcgcgcggagagcgcggtatgggtggcgaagtcccagcctctacctagccccgcgctagtcgtgggttccctccagccacccctctggcccttcattccggtccctccccagacgggccctcctcctttctcatggacccccaagaggcctctcgcgttctcccccgaaggacccctatgcctagccatggatcctccattccccaccctcccgttttcccgtcccgcagacggagccggtccccagccgccgccagtctccggcctcggatgttgacacaaacccgaggcggtttacactgagcgggtctggaagctttcagggccccggcaacacctcctccccgcacttgggggtctccccacagcccgggccggccgcctgggctgcactggcgtctgagagctcctgacacaaggctgtgggaaggaacccttttaagccaaactgggggcaaaaggggagccagacatccccgggctgggccacgtgcggggcagggacttctaaggatctgtcgaaagtcggggcggacggctggggattggcctaatcggagcgcggacgctgaagagcagcggtgagaggcggggcttctgtccgcgcggcgaaggtagaggtgggctgggcggggc

SEQ ID NO: 37025 - DNA, 637 bp, Homo sapiens; identical to SEQ ID NO: 32426
  chr1:40782323-40782960
  hyper

SEQ ID NO: 37026 - DNA, 738 bp, Homo sapiens; identical to SEQ ID NO: 24853
  chr1:41284015-41284753
  hyper

SEQ ID NO: 37027 - DNA, 221 bp, Homo sapiens; identical to SEQ ID NO: 19066
  chr1:45112018-45112239
  hypo

SEQ ID NO: 37028 - DNA, 620 bp, Homo sapiens; identical to SEQ ID NO: 32429
  chr1:46954676-46955296
  hyper

SEQ ID NO: 37029 - DNA, 1448 bp, Homo sapiens; identical to SEQ ID NO: 26108
  chr1:46955978-46957426
  hyper

SEQ ID NO: 37030 - DNA, 326 bp, Homo sapiens; identical to SEQ ID NO: 34088
  chr1:4712686-4713012
  hyper

SEQ ID NO: 37031 - DNA, 764 bp, Homo sapiens; identical to SEQ ID NO: 30834
  chr1:47694808-47695572
  hyper

SEQ ID NO: 37032 - DNA, 884 bp, Homo sapiens
  chr1:47695911-47696795
  hyper
cgacactactttcaaggatgtagcaggattgagcttgcttttattttttcctagtggattttgtttaatttgttttgcctaaatcgtcaggcttatgatcacacatcgaagtcttggattaactgcgaaggcctccttctatttgccgcggctttggtggacatataggaataattcttccctggattgcaatacaatgcggaagattttctttctcctcttctaatccaaaagaggggaggggaggaaagaagaggggaatccatccattcccggcgtgttcgcggggggttaatgttgcgtgttcgctgggggttaatgtttgccttatgaccaagtctctgtgtccgtgcctctctccattttctcttcctacctcaaacccagcaacttagaaaacggctgtagcggaaaaaaacccgctgctttgttctcccgccaaaggagccaaaagggacaaactgctgcgctctgggatgattattttaattaaaatagatgttaatgatgacgattgtgatggtgatggcattagcaattacaataattgacaaaacaaaattctttcaacccgagctagggccccactaacccggtccctcccagagcccggattcggcctcggtctcggatgcgacgggtatcagacccaagcggcaacgtcgctcacccgaagagggggcgggaaaatcttcccaggaggtgatcccgaatgtccccacccgaggctcgaggcctggtgaatgtgcccattgtcctttcggggcctctcccttggagcccggcggccgcacccacgaaactgaccagaaatggatgaagccggagtgcagcgggaaccgaagcccgcagctaccggctcgaaggcgccggcctcggcgagc

SEQ ID NO: 37033 - DNA, 135 bp, Homo sapiens; identical to SEQ ID NO: 19071
  chr1:48559554-48559689
  hyper

SEQ ID NO: 37034 - DNA, 268 bp, Homo sapiens; identical to SEQ ID NO: 19072
  chr1:51439584-51439852
  hypo

SEQ ID NO: 37035 - DNA, 1279 bp, Homo sapiens
  chr1:52194847-52196126
  binary
cgatgtctcaccggattaataaaaatataggcgctcacgcttttgtttaccgatatagtatctcctcctcccctcactccatcaacccccacgcgacacaactttccggaagtaagcaaaatccgttatcaaggtgaaactccggggaccaggctccacagctgccataaactggatggcacgttagaagccggtgggtgtaggtgaggcacgctggcgcccgcgggcccttctccagccgctacccagtgggaatccgcggggctgaagccccgaaaccaggctgagcgtcccagagcgcaacctccctttcccccagcagcgccggcgccgcagaagccgcgtgtccccaggcgcactcccccaaggtgaacccccgccccccacggaggcggctgggtcgcgggtctgggcggggcgctccggacgccctcccgccgctgcgcacccctcccgcgagctgccagctccctcggcctctccacccaaaactggcccaaccgccaatcgtctgcctctcacctcctacagcaggtgacccatggccaatcgccaggggtctctttgccaggagccgccagggccagccaatcggggcgacccctccgccggggaggggacgggaaaggggtggggggtgaagggggtgaagggggtgtcccgggggacgggctgaacctcagtcaggaccgcctgcaccgcagtccggggatcgggtcgaggggagaagaaaaaggggtgctcgggagcagcccccggctacctcccctggaggcacagagggcgggggccttggcgaatggctttcttgctggccacttgcggagtgagtagaccccgagggtctgggagaggggccggcccctacccctgagtccccggggtcccggccgccaggccggagcgcgaatgtcgtgctcaccctgcctccttcccgccgccccctggggtgagtaggacgacgtggctgcccgggcccctcttccttgggagttctcagttcctcagcctagatggggtggaggctgaggtcagggcctccagttccaccgagagggcattcgcccccaaatgagactttggaggaggtctctttttttctattcatttttgtggaactctgttttccttttgaaagctgtctcagaatatgattttaagcagaaaagttaagctttctcttatgtgaaagcttaattttgaccagttgcccattaatagaatctccagttgcaggccaagtgttttttggtggtggtttatttttggcacggtgttc

SEQ ID NO: 37036 - DNA, 949 bp, Homo sapiens; identical to SEQ ID NO: 19076
  chr1:53017742-53018691
  hyper

SEQ ID NO: 37037 - DNA, 490 bp, Homo sapiens; identical to SEQ ID NO: 23004
  chr1:53168691-53169181
  hyper

SEQ ID NO: 37038 - DNA, 435 bp, Homo sapiens; identical to SEQ ID NO: 19078
  chr1:59281487-59281922
  hyper

SEQ ID NO: 37039 - DNA, 266 bp, Homo sapiens; identical to SEQ ID NO: 24865
  chr1:60539349-60539615
  hyper

SEQ ID NO: 37040 - DNA, 155 bp, Homo sapiens
  chr1:6086224-6086379
  hyper
cgctgctcatccaggaaggtcggagatgtcgggccctcccacctgggtcacgcgctaggcatgcctgagagcaaaggccacgccccgacaccccacggggccctggcgcgccaggcttctcagccctgcggcggcagtgcatagctctggcacgc

SEQ ID NO: 37041 - DNA, 913 bp, Homo sapiens; identical to SEQ ID NO: 32435
  chr1:6309178-6310091
  hyper

SEQ ID NO: 37042 - DNA, 938 bp, Homo sapiens; identical to SEQ ID NO: 23747
  chr1:63785002-63785940
  hyper

SEQ ID NO: 37043 - DNA, 1393 bp, Homo sapiens; identical to SEQ ID NO: 30846
  chr1:63786671-63788064
  hyper

SEQ ID NO: 37044 - DNA, 1067 bp, Homo sapiens
  chr1:63792564-63793631
  hyper
cgctcatatttccgcgcatagcagcaataccggccgagcctgcgccagcagcgtgacactcagccacaagccaccgccggagactcgcagggctttttccagcgctacattcattaggcggcggggtgaacgggagagacctgccggcaactttccttccagccagttcttacccttgaacgacggcctaaagatggtccccttcctttatgtcgtggaaggcaggaaactctcggacccagaccctcaagctgccagcggttgtttaaagtcctggcagatgtcaggaagatgggcccggccgtcgcaccctcaaaagctctttttcgtttaagctttttaaacctcgaagatttagcacaaaatgggaaatgcaaatatcatagacaatgatcgcaagcacttagtggtggggctgggggaagcctgaaacccttgtttgatgttatggaacgcaggcacctgcgacaaacggcactggaaacagctctctcgttgagatttaaagtcaacactactgatatccactttttattccacttaagaaaaaaaaactaaaggaaggggggcagatttatttgcaataaaagaagaaagcgggttgatttttatggggaagattttagctttcggctacacacgcatttagacgtttctactttctctagcactcattcctagaaaaatcaatccagccctgaggcctgtggcccctagagcgttctcaggaccaaggtctgagttgggaccgcccgtatctagttcctcggaggggtggatctggatgtccggggaaaggcgaatgaagagtagagcaaaacatgtgccggctgttgagggctgtcgatgcgatggcagatgtggcctgtagggggcgacgagcagacggaaaacttcgcggtttgtctggaatggtccagccccagccccggacgcctctccttccctcccaggctctgagcctcctgacatccttgcttattctcaggccccggaagcctaggtcgaatctcgagaagctgatttcctcctttcccccgcctgtgtcctgggaggaacagagtccc

SEQ ID NO: 37045 - DNA, 227 bp, Homo sapiens; identical to SEQ ID NO: 17240
  chr1:6474528-6474755
  hyper

SEQ ID NO: 37046 - DNA, 916 bp, Homo sapiens; identical to SEQ ID NO: 28379
  chr1:6545237-6546153
  hyper

SEQ ID NO: 37047 - DNA, 344 bp, Homo sapiens; identical to SEQ ID NO: 10937
  chr1:6546495-6546839
  hyper

SEQ ID NO: 37048 - DNA, 718 bp, Homo sapiens; identical to SEQ ID NO: 29654
  chr1:67773109-67773827
  binary

SEQ ID NO: 37049 - DNA, 135 bp, Homo sapiens; identical to SEQ ID NO: 19089
  chr1:999594-999729
  hyper

SEQ ID NO: 37050 - DNA, 887 bp, Homo sapiens; identical to SEQ ID NO: 24887
  chr10:102490242-102491129
  hyper

SEQ ID NO: 37051 - DNA, 761 bp, Homo sapiens
  chr10:102985111-102985872
  hyper
cggagaaagagagcccagcggcccggaggcgggaccccactccggtgacagcggctactcgccagcccagcgacaacaaaagcccggagagaaacccgctctgtccaggaaagtgaaagcggcctcagcccccgccccagccggccttggggcgccgcagacccgagagagtccttgcaagatccatacctctgcccccagcggtgtgccggggtgtggaggcagaattggttaatgttgccagaaattcacaccagctcccagacgcttgggcttacagttccaggtgcccacattgaaattcagcctggccttgatgcctttagcctttggcccccgactccccaaggatgaggccctcggggctagaatcgaaacttgggaacccaaggctccaccccgcgtctgactgagtgatacctgcagcgctcccggggctcagccctgttttcggggagtgcagggagaatgcccttgggtctggggtgggatgcaggaaatgcagggcaagaccccctcccaccctttgttcaacacaaattaatgttgtactgtggtgtgcccccacatacacaggcattttctcccagcatttcacggctcgttttttaccccgacctggcgaagcccgcttctctcccgatttagcagctgcctcaggtttatgggcaagaggcgcctcctcctgctgcttccccctcgcccttcactcttaagcctgtcctgaaaatcccccccaaatctccaaggctagggcgacc

SEQ ID NO: 37052 - DNA, 795 bp, Homo sapiens; identical to SEQ ID NO: 24890
  chr10:102989488-102990283
  binary

SEQ ID NO: 37053 - DNA, 773 bp, Homo sapiens; identical to SEQ ID NO: 26144
  chr10:102996797-102997570
  hyper

SEQ ID NO: 37054 - DNA, 261 bp, Homo sapiens; identical to SEQ ID NO: 19092
  chr10:104221426-104221687
  hyper

SEQ ID NO: 37055 - DNA, 1291 bp, Homo sapiens; identical to SEQ ID NO: 30885
  chr10:112402953-112404244
  binary

SEQ ID NO: 37056 - DNA, 654 bp, Homo sapiens; identical to SEQ ID NO: 13204
  chr10:114708972-114709626
  hyper

SEQ ID NO: 37057 - DNA, 542 bp, Homo sapiens; identical to SEQ ID NO: 19095
  chr10:119293016-119293558
  hyper

SEQ ID NO: 37058 - DNA, 832 bp, Homo sapiens
  chr10:124899352-124900184
  hyper
cgtcagctggttaacttcggtgggctctggttggagggaagaagggagtgagttcagagtttagctgcagccgtaggccgattgccaagtcaggctaggaaaggctgggccacaagaggacaaccccagggacagccagctcttgggacagcggctcccactaccaggagaggggaacttcctcaggtcttgcagagctgagattcccggggcgactcgagcatgggcgcggtcctgatgtgctaagtgtgagggaacagaggctacctagctgctgcagctgcaacagagaagaccttgtctcttccgtgccaggctcttctctttcccctggcgcccaacacctcctgggcggcatctctagatccccgaccctgtcctggcagacgccgagaagcgtagcgctcaccacacccgcgcgctactgggttccaggccgccgcgctcttagtgagcagcctgcggaggcacagcgcgccggaaccgcctggaagggtgggtccgcccgacagaagcaggtgcctgggcgacactcgctggccgggtgtggccgcctgcctttaagctgggggtctgcacgtacaattcctggcggggcacctttgaagctggggagccgaaagggggagatgaggaacccagagggtgaaaaagattccagagagcagccatagggcgcgaccgctggggagcgcctgcacgcctctctttcctctcgcagtgcgttgctaggctcctcaaattcaatcgacacaattgattctactgtggctgaaacgtccagtatagttttctgttaatggaaaactgccctccgaataaaccgacatgc

SEQ ID NO: 37059 - DNA, 998 bp, Homo sapiens; identical to SEQ ID NO: 30895
  chr10:124910216-124911214
  hyper

SEQ ID NO: 37060 - DNA, 291 bp, Homo sapiens
  chr10:134209485-134209776
  binary
cgaggtcgacaggcgccagcgacccgacggtccccagtggcaccaggggcggtggtcctcaattcccaggctgggaggagccctgcccggcggcgctgggtcgccaggacaactacgcggtcccccgccccgcctccaggcctcgtcaggcgctgcaagtccggctcagaagcccggcccggggccaaggtcaccgcagcaggccgggcccctgcgttctgagccgggtgcggacgtgctggtgctcggggaagtcgggggctttgacgcctgaaggcgcgggagccgggc

SEQ ID NO: 37061 - DNA, 157 bp, Homo sapiens; identical to SEQ ID NO: 19099
  chr10:15828305-15828462
  hypo

SEQ ID NO: 37062 - DNA, 1465 bp, Homo sapiens; identical to SEQ ID NO: 24911
  chr10:22541133-22542598
  binary

SEQ ID NO: 37063 - DNA, 140 bp, Homo sapiens
  chr10:30509077-30509217
  hyper
cgctcttcccgggcagccccatgttccagggagccaaagcttgcagcgtgagagggtctctttttggaacaaaggtcggtgagtgaagtcaagtccaggcttggttttgagagatcacatgtcagttgcacaaacaggac

SEQ ID NO: 37064 - DNA, 157 bp, Homo sapiens; identical to SEQ ID NO: 14509
  chr10:31607149-31607306
  hyper

SEQ ID NO: 37065 - DNA, 1067 bp, Homo sapiens; identical to SEQ ID NO: 33275
  chr10:43892074-43893141
  hyper

SEQ ID NO: 37066 - DNA, 95 bp, Homo sapiens; identical to SEQ ID NO: 35308
  chr10:60026209-60026304
  hyper

SEQ ID NO: 37067 - DNA, 256 bp, Homo sapiens; identical to SEQ ID NO: 14512
  chr10:62492589-62492845
  hyper

SEQ ID NO: 37068 - DNA, 939 bp, Homo sapiens; identical to SEQ ID NO: 24924
  chr10:6621854-6622793
  binary

SEQ ID NO: 37069 - DNA, 145 bp, Homo sapiens
  chr10:71267698-71267843
  hyper
cggagttgcccacaggtccacctaccgcgctccctgcagccctcagtgtgcctaatggctgccgcgcaacgcatgcagagcgtggtgtcggtcgacccctgctggagatgccgggacttgcgtgcgtcagtccactcaaaccttc

SEQ ID NO: 37070 - DNA, 70 bp, Homo sapiens
  chr10:80909900-80909970
  hyper
cgaaacccaaccctggcctggccccgggccgcagccgtgcaggtcactaggcctcggcgagtggccaccc

SEQ ID NO: 37071 - DNA, 137 bp, Homo sapiens; identical to SEQ ID NO: 19110
  chr10:81142199-81142336
  hypo

SEQ ID NO: 37072 - DNA, 1496 bp, Homo sapiens; identical to SEQ ID NO: 32470
  chr10:89621342-89622838
  hyper

SEQ ID NO: 37073 - DNA, 151 bp, Homo sapiens; identical to SEQ ID NO: 19113
  chr11:10519332-10519483
  hypo

SEQ ID NO: 37074 - DNA, 320 bp, Homo sapiens; identical to SEQ ID NO: 19114
  chr11:117073762-117074082
  hypo

SEQ ID NO: 37075 - DNA, 126 bp, Homo sapiens; identical to SEQ ID NO: 19115
  chr11:117075032-117075158
  hypo

SEQ ID NO: 37076 - DNA, 206 bp, Homo sapiens; identical to SEQ ID NO: 19116
  chr11:117076092-117076298
  hypo

SEQ ID NO: 37077 - DNA, 191 bp, Homo sapiens; identical to SEQ ID NO: 19117
  chr11:124616924-124617115
  hyper

SEQ ID NO: 37078 - DNA, 480 bp, Homo sapiens
  chr11:124631501-124631981
  hyper
cgctggggaattgacacgaagtgcgtgtgtcaagcctggggaccaggggtatttccccgggggatcttcctcatcagcttgtatgtggggtcggggatgagagggggctagagttaagtccttaagctctttagccagtgtctcatctagcggctcagctcatccggctctgctgggtggggggtggggagtggacagggtgaggaatggttccgataactcaccccagaggtatccaggtcttccgagagatgcccttacctccccccgccatccgcccccacacccaaactgggggctgtccccgacaaagcgagaagtcagcgccagccagtgatgccctggagtgggattaggaggtcaggggaggagggcgagtcgtgggacccagttccgcagcagtggccaaagttctccctcagggtcgaactcaccccatcccgcatcccaagtcccctccaggtccgggtttcactcacc

SEQ ID NO: 37079 - DNA, 317 bp, Homo sapiens; identical to SEQ ID NO: 19119
  chr11:12849699-12850016
  hyper

SEQ ID NO: 37080 - DNA, 245 bp, Homo sapiens; identical to SEQ ID NO: 19120
  chr11:130183478-130183723
  hyper

SEQ ID NO: 37081 - DNA, 469 bp, Homo sapiens; identical to SEQ ID NO: 35328
  chr11:13300232-13300701
  binary

SEQ ID NO: 37082 - DNA, 156 bp, Homo sapiens; identical to SEQ ID NO: 19122
  chr11:13334715-13334871
  hypo

SEQ ID NO: 37083 - DNA, 836 bp, Homo sapiens; identical to SEQ ID NO: 34180
  chr11:1535842-1536678
  hypo

SEQ ID NO: 37084 - DNA, 251 bp, Homo sapiens; identical to SEQ ID NO: 30956
  chr11:20230312-20230563
  hyper

SEQ ID NO: 37085 - DNA, 682 bp, Homo sapiens; identical to SEQ ID NO: 32488
  chr11:20385084-20385766
  hyper

SEQ ID NO: 37086 - DNA, 2426 bp, Homo sapiens
  chr11:31818829-31821255
  binary
cgaagaaccccgccgatagcatgctctgctctcatttgcctctttgacattttcttaattttaaaacatggagattcacattcttatccatgttctgtctcacacaaacatacacacgggtttacacaggcagcacgcgatcgccgccaggccctgtgctgcctccagaactgacacttaagagagaaaagtcagcagggacagtagagctcaattttaaatctggaaaaaaaaaaaaaaaaaaaaaagatgggaagcggggattggaattccacagcaaaaagaaacctgtcgctgcaggatcccttctctaccccgcggggagagcggcacggagacagttcattactttagaagtggcaactgtttgcagccaggcggtgacctagcggctgctcttacataaaatgggtacatttccccccactttagtggatttgccttccactcttaaagcttttaacaaaataaaactagaagttggatctcgactcccccacccccacgataaacctaagtggtggacaattaagatatcttcttcaaaaggcgccccctcggagccgcgcaaagcaggggccttcagtgggtgccgttcaccttccagcctaatccgtgagaaagcgagtgaaagcgcctcccattatcccagccccaggaccatctgacgatgggaataggatttgtttcctggaaggaggtgagagagagagagagagagagagacagagagagagttgctgggaaataaaatcattccttagtttcttagtgtcttaatcagtgaggcggaaaacaagcaagaaaagatagcaacccggttgcggcaccttttcagctctggagcgcggatcaaaacattgtagcatctgttgaaagagaggctgactaaatcctatagagggcttgggtattatggggggtgggggtggggtgaggggaggagataagaaaaagtgtctccgtgatccctaaaaccaccaaatcgccggagaattggggctggatagagttgtctcttgttgttgtcagcccacgtcgtcgcgattttattcaccgccgcatggcgttgatcagatggaaaccatatttgtctccctctgagacctaacccccgccttatgcttttggagtatggactctttaaaacccaagaaaggcttcctgggctgggaaagggggctagggagggagggggaccctcttagcaccaaaaagtctgaggattccccgggaacgtgaagcgaagctcaccaccggtgcccgctacccccacgccggcaactctgtgcttcgtttggcccacgtgtcctccccacgcaactaggggcgacggtcctgtgcctgaggtgacaatcaccccccaaaaacctcacttgcgggtgggggggtggtgattgccagttgacccagaattttctagcaactaggcgcgttaaagtgaaaagcccctggactagctccacctccggccccaaccatcacaggcggaccctagctgatttgactctcacttcccgccctcagactgccggcgacgaaaatccgcccgaatcgggcgccacctctggtggaagctgctgtcctcggcttctgcccaactccaagaagcggaaggggggtgtatcctgcgccccaagctcatgggagcccacgcaccggggagagcccggagtggaggctctgggctcagccctcccaggcctaggccaccgtgccctgagtccctccccaagacttctcggactaagtgggccagactcttgtcaggggagggatcaccaggacctcagattgctgggggcggaggggtggacgctcgtgagtgcgaagttcgggtgtcacttgggtgtgtccagtgtctacaagtgggaatcctacggtttcaaaagtcaggcagggatggggttgcctacactcggtggggtcaatcgctagtctcaccagaggcgggagcgggcctgggggccctctgagctcgcggaggcggcgggttcggggcccgtgcgggcggggtcgcccaggggagcccgggccccgcgcgtcaggaggcctccgccggccgagcggccgcgctgggaaacaagaagcgagcgctttgctccctatcttcccagtgtccgtcctatattgttttctgctcttaaaactgacatgtctaattggcaattggtgccgaatcgtgtccagaggtctcttgtggaacatttctacagctgtctccttcaactagacgcttattcatgtcgccttaatgagaaacaaaacgttctctaatgagcaattacagagcgacaggattgttcccataacaaattcttgcgagtgacagaagcatcctttgtaccagatatttcgcatactgttaccgattttcccttccctcgcccgactccatggaggcgccgggcatccggagccggtcc

SEQ ID NO: 37087 - DNA, 931 bp, Homo sapiens; identical to SEQ ID NO: 30959
  chr11:31821763-31822694
  hyper

SEQ ID NO: 37088 - DNA, 160 bp, Homo sapiens
  chr11:31823122-31823282
  hyper
cgttggtacagaccccctcggacagtaatctgtctcggatttcccaagcaaagatggacgggcactcccgcttatactgggctattttgcttacaacttctggagtcgctactctcggtttactaccaccgattgccctgggtctgatggagccagtctc

SEQ ID NO: 37089 - DNA, 1097 bp, Homo sapiens
  chr11:31824169-31825266
  hyper
cgtttacagtaagaaatgaagagagggcgttgagagtggagggccgcgggggcggcgagtggggcggcgccgggaggatcacctgcagaattcgggaaatgtcgcacggccgggccccgctgtgagctagctctacaatcttctgccgggtggagtccggcagtggccgcccgttgacaaagacaccaccgagctgattcactccgctgtgacctgaggaaagggagaggagaggaaaggggaaaagaagagaagagagcagagtgaagaggaagaagagggagaagaaggaagaggaagatgagggagaacaagaacagaaaggagaggaggaaggggaagaggaagaaggagaggaggaggagacaaccacaatgcatcctcatccccctgccaacctgtgccaacctcggcggtcagttccctgctatcgatcaaataaaggacaacaggaccaccagccatgccagacatcgggcagcccagtccaagcaaccgtgcccctgcccactgtactgcagcagcaacacagagtcagacacatgccaaggaacaagtacacatggacctcactacagccataaccccagcagtgtccccagcccactgcccctcttcataaacactgcagccagcctctgaacccacaaagcgctaagaaccggctctataaatctcccaaagatcccctctgagtgtcaccgcaaaccatgggttctacagatcccacactgaaccttcaaggtctctgcagtgttgggacagtgatagcaaaccttacagcccttgagtgctcccttagacgctaaaatccagaaatgtttccatcaccgtccaaactggccaaggcctggcacaagcatcgagttgggttttgtttggttagaatagaagaaggaagaggagagaacaaccagagcagccagtatgtggctggtgaaccccagtccaggtttccgcacctccagtgcagacgtgagagtcagagcccgggctcggcttcagccacagacaagtccggccaccgcaagtaaggcttagagccgggagtcggttcgcaccagccactgctcgctttatttccgccgctgaactcc

SEQ ID NO: 37090 - DNA, 960 bp, Homo sapiens; identical to SEQ ID NO: 23037
  chr11:31825604-31826564
  hyper

SEQ ID NO: 37091 - DNA, 1467 bp, Homo sapiens; identical to SEQ ID NO: 29743
  chr11:31826573-31828040
  hyper

SEQ ID NO: 37092 - DNA, 451 bp, Homo sapiens
  chr11:31829131-31829582
  hyper
cgtttagatcttcacccctttaactgtactgtgacacaccctgtctacctcgcctcactgctttaaaaagtacgaacaggagggggtgagcgtggtcgacaaagccgacagacggcaaacaatggcttctattctccagctttcctcgaacccaaggagcaaaaccgagtctccctaaccagcaacacagcttccaaccaaatgtaccaacaacccaccaactcacaaagggaacagagggacgcttctagcttcataagccctgacccagtgcaggggtccccgaggctgctcccgtacgaacacctccctacctttcccaaaggaaaaaaaaaaaaagtcttttgggtgagtggagaaaatagaaaagtaatttcttgttgtaaatatctggaggtaattgtgttactggtgtgagttgttaggggctgtaaaaagatacaacggcacc

SEQ ID NO: 37093 - DNA, 540 bp, Homo sapiens; identical to SEQ ID NO: 30963
  chr11:31840426-31840966
  hyper

SEQ ID NO: 37094 - DNA, 1035 bp, Homo sapiens; identical to SEQ ID NO: 30964
  chr11:31841341-31842376
  hyper

SEQ ID NO: 37095 - DNA, 384 bp, Homo sapiens; identical to SEQ ID NO: 14542
  chr11:32851566-32851950
  binary

SEQ ID NO: 37096 - DNA, 59 bp, Homo sapiens; identical to SEQ ID NO: 19134
  chr11:45392759-45392818
  hyper

SEQ ID NO: 37097 - DNA, 817 bp, Homo sapiens
  chr11:57243645-57244462
  binary
cgcggacctggccaacctgagccacctcttcctccacgggaaccgcctgcggctgctcacagagcacgtgtttcgcggcctgggcagcctggaccggctgctgctgcacgggaaccggctgcagggcgtgcaccgcgcggccttccgcggcctcagccgcctcaccatcctctacctgttcaacaacagcctggcctcgctgcccggcgaggcgctcgccgacctgccctcgctcgagttcctgcggctcaacgctaacccctgggcgtgcgactgccgcgcgcggccgctctgggcctggttccagcgcgcgcgcgtgtccagctccgacgtgacctgcgccacccccccggagcgccagggccgagacctgcgcgcgctccgcgaggccgacttccaggcgtgtccgcccgcggcacccacgcggccgggcagccgcgcccgcggcaacagctcctccaaccacctgtacggggtggccgaggccggggcgcccccagccgatccctccaccctctaccgagatctgcctgccgaagactcgcgggggcgccagggcggggacgcgcctactgaggacgactactgggggggctacgggggtgaggaccagcgaggggagcagatgtgccccggcgctgcctgccaggcgcccccggactcccgaggccctgcgctctcggccgggctccccagccctctgctttgcctcctgctcctggtgccccaccacctctgactgcggtgctgagatcgaagaggccagtgtccgatccccgcttcccgtccacccggggctgcggctccggccccagtc

SEQ ID NO: 37098 - DNA, 200 bp, Homo sapiens; identical to SEQ ID NO: 24963
  chr11:58668344-58668544
  hyper

SEQ ID NO: 37099 - DNA, 345 bp, Homo sapiens
  chr11:59323829-59324174
  hyper
cgcgaagggaaagaatgcggccacgtggcctattttcctgtggatagactaagcaaacgcttttcttcaggggcccggatagctcagtcggtagagcatcagacttttaatctgagggtccggggttcaagtccctgttcgggcggatgctgttttagtttccaataaaatggatttgggcgaggctgagagaaaggaacgttatgtgaaacccgcttggggtgcctcctccttgagggaaaccagaacttgctagtgggttcttaccggaagaagtgaaacgtgtggaaaatgccaagaaactttatcttccaatagcaggcttttcttttccaacctttatac

SEQ ID NO: 37100 - DNA, 686 bp, Homo sapiens; identical to SEQ ID NO: 32497
  chr11:61062458-61063144
  binary

SEQ ID NO: 37101 - DNA, 176 bp, Homo sapiens; identical to SEQ ID NO: 19140
  chr11:61659371-61659547
  binary

SEQ ID NO: 37102 - DNA, 231 bp, Homo sapiens; identical to SEQ ID NO: 19141
  chr11:63705659-63705890
  hyper

SEQ ID NO: 37103 - DNA, 374 bp, Homo sapiens; identical to SEQ ID NO: 18256
  chr11:63908860-63909234
  hypo

SEQ ID NO: 37104 - DNA, 492 bp, Homo sapiens
  chr11:64064539-64065031
  hyper
cggaggggtcccaggtggcccctagacttcctgcatcgcccctctgcccaggctatggcaatgtggccctgcgcacagatgccgggcgcctcttctgcatcttttatgcgctggtggggattccgctgtttgggatcctactggcaggggtcggggaccggctgggctcctccctgcgccatggcatcggtcacattgaagccatcttcttggtgagctgctccatgccctgcctgcccttgtgctgggctccggctacccttccccatgtccctggcacatgagcgcgcccccaaagaccataagcctctcccacaggctcctgggggcgggagtggggagtatgggagtggggattgttggtgtctcctgggtcctgcctactgccccatcccgcagaagtggcacgtgccaccggagctagtaagagtgctgtcggcgatgcttttcctgctgatcggctgcctgctctttgtcctcacgcccacgttc

SEQ ID NO: 37105 - DNA, 1330 bp, Homo sapiens
  chr11:64067396-64068726
  hyper
cgctgccccgggcgggtgtatccctcacagcacctcacgactgtgcctcaaagcctgcatcaataaatgaaaacggtctgcaccgctgcgggcgtgacgctcccggacgcgagtgggtgtggaattgctttcctcgggccaccgtgggggcacctctggcctcccgtgacccccaggccgagggtccccgggcacccaggtcggtcaagtctcggccctctcaggcccgcgtctctgcctggaggagactgtgtagggtccggcgtggggatcagccaggatgggctgcgcgtctccagcctctgcacacacattggcgggtggggtgcagggagggagaggcaggggagagagaatggcatctcgcgtggagggctgtcgtttgaactctcccagcgcgagagaccctgccccgcccccttcctggagcgttgactcccttctcgtctcgaggcctgtggcgtctgggtccgttggggcagaaccatggaggaaaagccttcgaaagtaagacgtctccctaggccccttaccctgtccgctccaacccacccttggtccgactcgggcccctggcgctatttcttactcagccttggctgcccgcagcccccacccaaccccacgttctacgggatccccaacccggcccggctcagttccccagcccgctcttccttcccgctccagccatccgcgacccttggctccctccttgtatgtggcccacaggtgtcgctcaagtcttccgaccgccaaggctcggacgaggagagcgtgcatagcgacactcgggacctgtggaccacgaccacgctgtcccaggcacagctgaacatgccgctgtccgaggtctgcgagggcttcgacgaggagggccgcaacattagcaagacccgcgggtggcacagcccggggcggggctcgttggacgaggggtacaaggccagccacaagccggaggaactggacgagcacgcgctggtggagctggagttgcaccgcggcagctccatggaaatcaatctgggggagaaggacactgcatcccagatcgaggccggtcagtgtggcctcgccaggccgtgggcacccgcagggcaataagctggccagggactcaatttctggagctgtaaaatggggggaagctgatgggatccaagtttctaggattctctgggagaggcgcccgcgccaatctttcgccctttaaatccgccaggcattcttggagcgccccctcccgggcaggcgttgtaacaggcctttcggtcgtgacgcgcagagtccggggaaggacgcaccaaataaattgcgcaaagacccc

SEQ ID NO: 37106 - DNA, 627 bp, Homo sapiens
  chr11:64509676-64510303
  hyper
cgggtgcacgctcgaccccgcccacctcctgcttgcccaggactccgagagcaggaggcaaattagagaggaaaggtgtggtgggcgagagataggcacgccctgaggactggaggaggggagcgcccgagccgcccatcgtccggaggggaaccagctggggcggaaggagcctgggttccccggggtcaagaatccagaggtcatttcctgagcgcttggggggaaggggcaccccttcaccagataagccgccccccattagccggaaacagctcccaggccggagatagcgagttcctccggattccccgggagacagataatgcccctcaagtgtcagagtccgggacccggccctcccttcgccgccgctggggaaggctagagaagggaaacctcatctgtctgaagggcgtgcatctctctgccctgcgttgcggaggaggctttcgttaaagagactgcacgctgcggagcagggtgggtccgggtcagggctgtgccctggactgtgcctgggaggcagggacccgggctcagactcggggctaggctcaggctccgtgtgccctcccgagccactcaccgaaggcttcgatgcacccgcggagcagctcctccacc

SEQ ID NO: 37107 - DNA, 1936 bp, Homo sapiens
  chr11:66187375-66189311
  hyper
cggcgctgccccttcgcttctcagctgctcccccatcttgcccgcctaggcagggcggggagccctccggagcggtgcggaggcagccaggccccgcccgccgcagccgcggcagccgccggaggattcctgtcctaatatggagctgggattcccccggccccgcccccgcccccggcccgcggggagacagaggctggcagcagggcggggggaagcgctcgcttgggggccggcaacggggggaagggatgcctaagtgcagacccaggtcctcgccgtgcccccacgtccctgcctcagtttccccttcagtaaggttaattagctgagagggaaaccacgaatcactgcagactacagcgctgatgttggtttctattcttggctgtgggaaaacaggatcaacgccaaattcagctggtccctttcccaccggactccctttccacccatcctcgggacttagacccccatgaacaccccctgataagccgccaaggcccgatttgggaagcgggggcgggaatttgttctctaaaaatggccaagggaatcccaggttaaatagtccccagagaggaaccccagcagtgacctgtcccacggaggccaaggaaagtcctccttccctgcatgtgaacgtgaccttgtctgtcaagtaacgagggggatttgtagacaaccctgttcttccccattccctcaactcctcagaaaaattagtgtcagtgccggcccctctctgccctctgcggactcctgccgcgggcttcaggccgccctaaacctggccctgtcgcttccctcaactgaacgcattcagacgccagggtccccacactccattcaagctttcctaacgcagcgccttcctctccgctcagctcccgccaggcttggccccctccgcagcctcctgctcccccctcgcccgcctccctccctctctcattctacgtcatgagatgacgtcggaagccgggcgggaggaggagcccccctccccagtcagcggctcccgctgcagcttgcttagcccagcctcccgctctcccgcccccccggctctaaaacgagccccccacgcctggcaggagctatataaggcggcgtgaggcaggcgaggggggcagcgcagccgagcggagcccaggagagcagagagcgagcctgagcgagagacggggaagcacggaggaggaagccgccggtgcgtcgggacgggagcgcaggtgctcgggcacccgagctggagctccgcagccgccggtcatgtaccgctccaccaagggcgcctccaaggcgcgccgggaccagatcaacgccgagatccggaacctcaaggagctgctgccgctggccgaagcggacaaggtccggctgtcctacctgcacatcatgagcctcgcctgcatctacactcgcaagggcgtcttcttcgctggtggtgagcatgctggggctaccgcagatccgagctgccaggcgccggagaccctggagctgagggaacccgctggggctgtcgcatgtctagggcagcgtgctggcgagctggggagattcgggactcgggagattcgggactttctacttttcctcctgagctccctccagacctcaccttagttctgaatgagagttagagagcctggacggtgtccctaacaccagattatgagaggataagagccaggacagagcggcctcggtgcccgccagtgcagaagcgctccgggagccggggagggaagcccgggaagttgcagggatggagctgcctgagcctaggggaacatagctactgtccgcggtgctgaaagggatctcctgtcgccttcggggcgctgcccatggtgctgacggctgcgccggccgtgtatggctctgtccatggttctgaacccacagtcggcttcggagctctgtccgc

SEQ ID NO: 37108 - DNA, 515 bp, Homo sapiens; identical to SEQ ID NO: 24976
  chr11:67232076-67232591
  hyper

SEQ ID NO: 37109 - DNA, 311 bp, Homo sapiens; identical to SEQ ID NO: 30988
  chr11:68095765-68096076
  hyper

SEQ ID NO: 37110 - DNA, 156 bp, Homo sapiens; identical to SEQ ID NO: 19155
  chr11:68611259-68611415
  hyper

SEQ ID NO: 37111 - DNA, 751 bp, Homo sapiens; identical to SEQ ID NO: 19156
  chr11:71724337-71725088
  hypo

SEQ ID NO: 37112 - DNA, 731 bp, Homo sapiens; identical to SEQ ID NO: 15492
  chr11:71725587-71726318
  hypo

SEQ ID NO: 37113 - DNA, 929 bp, Homo sapiens
  chr11:71951598-71952527
  hyper
cgtggagagcagtttagggcgccagtaaaccttttgtctagggcatccagtcaaggcgggccaactgaacatctgtacacggagttgtacaaatagacaacagtctgctctagcccggctctcttcggccctgtgcctgccacaaactcagcctcccgggctccgggttttcaaagctgcagcgccggggtagggaaccccaggggtgctgactggcctgccccctctcctcctcagctcggccctgaggtcccctgggtctccccctctagcccctcggcctccctcctggcttctcaagcatcactcggaactttctgccctaagagggagacagagcggaggtagcctggagctaaacagatcgggtctcccaagggcctccaagtccgggccctgctgcctcccgtagctgcccaagcaccctgggaccgcgccctgccttcgggctgcatctgcctgtattcccctacccccaggtgttagacattaagctcccacacctccttccatgcgcactctcgtacacacacgtgcatacacgcacctgcacgcgagcctcagtgaggtcgatcttgagcgccagctcctcacgcgtgtaaatgtcggggtagtgggtctcagcgaaaacgcgctccagctccttgagctgcgcgctggtgaacgtggtgcggatgcgccgctgcttgcgcttctcgtgcaggccggatggctctgggaagaacttgtagggcactgcgggtgtgtgcaggggggccggggggggggcaaaaaggatgggggagtgagaagcagagttcaacccgttgtgtccagctccgggggaatcacacgcctcccccgtccctggcctgatccctcgtcttggtcccggcagcctggggccgagcgtcctccctattactcaatggagccggcgggataaaggc

SEQ ID NO: 37114 - DNA, 373 bp, Homo sapiens; identical to SEQ ID NO: 24986
  chr11:75852075-75852448
  hypo

SEQ ID NO: 37115 - DNA, 782 bp, Homo sapiens; identical to SEQ ID NO: 22775
  chr11:76381512-76382294
  binary

SEQ ID NO: 37116 - DNA, 118 bp, Homo sapiens; identical to SEQ ID NO: 10218
  chr11:77383112-77383230
  hypo

SEQ ID NO: 37117 - DNA, 501 bp, Homo sapiens; identical to SEQ ID NO: 19162
  chr11:84148462-84148963
  hyper

SEQ ID NO: 37118 - DNA, 659 bp, Homo sapiens; identical to SEQ ID NO: 28478
  chr11:858985-859644
  hypo

SEQ ID NO: 37119 - DNA, 110 bp, Homo sapiens; identical to SEQ ID NO: 19164
  chr12:102878329-102878439
  hyper

SEQ ID NO: 37120 - DNA, 456 bp, Homo sapiens; identical to SEQ ID NO: 19165
  chr12:104235228-104235684
  hyper

SEQ ID NO: 37121 - DNA, 265 bp, Homo sapiens
  chr12:109162554-109162819
  hyper
cggtacacgacggggcgtcgcgcctccagggctaggccgggcggatggagggggtccccggagcccgggggaagtggcgcagtgggcgtctgcatcggcccgaaggcacttgcgcagaggtccggcaggcagcagagcaccttgtgggcgtggtcgctggaggcagcgcctggcacccccatctggcacagagcgtccctgccctgccccctggggctgcggaggccacctccacgcccatttgccatccctgagccgcttctgc

SEQ ID NO: 37122 - DNA, 326 bp, Homo sapiens
  chr12:110258649-110258975
  hypo
cgtaatagggtcgttgtgagaggtatataccttgagtcaagtgcctggcataaagaaagcctcaataaacagcagattgcacaacagatggcttctctctgagaatcccggattcaaaggcggtggaggtctctggctccgtccccatgccccaacttgcggagggtggaaaaaggggcccatcctcggggttacccgcggctttgcctgatctcatggaaaccctggcaaacatttgtcaaatcccatcctcctgattacgtgaccaaggaaagctgcttaaatctgggggcaagtttgggcatgcaaacctgctccgccccagc

SEQ ID NO: 37123 - DNA, 123 bp, Homo sapiens
  chr12:114282458-114282581
  hypo
cgtcccgctcctaccgtgaaagtgagcggccgtcttccgccgcagggcctgcagggtcacctcggagtcggcccactccagcaccagcctccgcccgtacaagtgggtgctgtgacacagggc

SEQ ID NO: 37124 - DNA, 463 bp, Homo sapiens; identical to SEQ ID NO: 36258
  chr12:117155351-117155814
  hypo

SEQ ID NO: 37125 - DNA, 124 bp, Homo sapiens; identical to SEQ ID NO: 19172
  chr12:122179060-122179184
  hypo

SEQ ID NO: 37126 - DNA, 94 bp, Homo sapiens; identical to SEQ ID NO: 19173
  chr12:122206347-122206441
  hypo

SEQ ID NO: 37127 - DNA, 185 bp, Homo sapiens; identical to SEQ ID NO: 19174
  chr12:122214111-122214296
  binary

SEQ ID NO: 37128 - DNA, 551 bp, Homo sapiens; identical to SEQ ID NO: 14563
  chr12:123258823-123259374
  binary

SEQ ID NO: 37129 - DNA, 173 bp, Homo sapiens; identical to SEQ ID NO: 19176
  chr12:125093646-125093819
  hyper

SEQ ID NO: 37130 - DNA, 133 bp, Homo sapiens; identical to SEQ ID NO: 14567
  chr12:125477548-125477681
  hyper

SEQ ID NO: 37131 - DNA, 200 bp, Homo sapiens; identical to SEQ ID NO: 7878
  chr12:132250682-132250882
  hypo

SEQ ID NO: 37132 - DNA, 233 bp, Homo sapiens; identical to SEQ ID NO: 19179
  chr12:22778949-22779182
  hyper

SEQ ID NO: 37133 - DNA, 254 bp, Homo sapiens; identical to SEQ ID NO: 9023
  chr12:2692239-2692493
  hyper

SEQ ID NO: 37134 - DNA, 819 bp, Homo sapiens
  chr12:2800445-2801264
  hyper
cgtgacctggagttaaccggaacagcgtcttcattcatttctgttgggaccagacgcggagcctgggtgcgcgagccgccctccgggaggaaggcgcccggctgcgtctgcagaggcggggagaggaggcggcgagggtcccggggcgcgaggaaggcgcctgccctctcccagctcgcaggccccgggcccggccgcgcctccgcggggagagcaccccggcttcccgcgcgccctcaccaaaaggaccctacagcaaacgggtgtctttcgactctgcttgtagaaaccatttgcacatattctgtacgagcctcgctgtctccctagagccagggccctgcggatttggagaagggagcggggcaggacttccaggaggaccccaacccggcccggagagggaggaggaggcctccaggggcgcggagctctggggatgggcgtcgggccggcagtggtgcggctcactccgtccctgcccacctgcgacgggatcccccgaccggcacgggccacgccgagctcccggccagccgccggcccgcaggcagcgcgagggaggagctgcgccgccggctccgcccaaccaggtggtgctgagcttccgctgagcgctcttttgttttgtggtttgacacttttcttgacagcatgttgcagtttcttttcggttttggttttttttaaatgttttattttgctttcccagcgggaggggaggaagaagagtgtttacaaagtcctgtagccccctcacctttctgttttcacttttgccaatgtacatcgggtttggttttcttgtattatttaaac

SEQ ID NO: 37135 - DNA, 142 bp, Homo sapiens; identical to SEQ ID NO: 19183
  chr12:3053936-3054078
  hyper

SEQ ID NO: 37136 - DNA, 47 bp, Homo sapiens; identical to SEQ ID NO: 19184
  chr12:46663360-46663407
  hyper

SEQ ID NO: 37137 - DNA, 530 bp, Homo sapiens; identical to SEQ ID NO: 32528
  chr12:46766939-46767469
  hyper

SEQ ID NO: 37138 - DNA, 197 bp, Homo sapiens; identical to SEQ ID NO: 19186
  chr12:47497161-47497358
  hypo

SEQ ID NO: 37139 - DNA, 149 bp, Homo sapiens
  chr12:49366389-49366538
  hyper
cgaacgggttaggcgccaccgtgctcccgcctgactcaccctcgaagctctaaccactgtgggctatttttgccagagaggggccccaggctttccagccgccccccgcccctgccagaccgcagcccaaggcacggctggccccacgc

SEQ ID NO: 37140 - DNA, 2132 bp, Homo sapiens; identical to SEQ ID NO: 25033
  chr12:49390799-49392931
  hyper

SEQ ID NO: 37141 - DNA, 703 bp, Homo sapiens
  chr12:49485561-49486264
  hyper
cgccccaggcaccggctcccctccctccgcctgattcatcttttgtttcattgccttccctggcaccgggcatcgcttccttccttccttcctcctcctcctttgggcccttagcattaaccccttcgtgctctgggtgccccccagagaggtgcccaagaggagctgtgcgggatcaaggctgctggaaaaaggattggggtggcgggggttgcgcgaagtacaatggccattatccgggatgacttaaccgagcgagaatcctgagcccaggccgggaacgcgctgggagaagcggactcagcagctccggccacaaaggcgcttttcagccgccccggctcagggagaggaaagggcagaaagccgcgcccccaatccctgctccgtccgggtaggtcccctccccccgcgcgtccagtcttcccagttccagctaaggctctgccagtccggagagcccctatctctcccatctctgctctagatgcagcccagaagggcgtgggagtagcacctgagaataacggtctccttgtgcggatctggggagccccctgcagggtgagagcggagaagaggaaaagaagctgcggctggaagcctgcacctgggggagtgagaccacagttatcttggccgctccagcctgggagcgggagaccttggcgcgcaccatagcagggacaccgcgggaggaggc

SEQ ID NO: 37142 - DNA, 300 bp, Homo sapiens; identical to SEQ ID NO: 17363
  chr12:50339307-50339607
  hyper

SEQ ID NO: 37143 - DNA, 172 bp, Homo sapiens; identical to SEQ ID NO: 19192
  chr12:53474309-53474481
  hypo

SEQ ID NO: 37144 - DNA, 771 bp, Homo sapiens; identical to SEQ ID NO: 25042
  chr12:54088889-54089660
  hyper

SEQ ID NO: 37145 - DNA, 314 bp, Homo sapiens
  chr12:54132254-54132568
  hyper
cgaggaggaaagacgcagaggctgcgcactttccttcctctcccccagacccgcgcaaggcgctgagggggtcctccctccggcaaaggcggagggacggcctgacaggaacagtgtgcacttgcctctgtcctcccccgagggacagtggcctggggtgaccgagaaacctggccctcccaaggtccccgggctgccaaggaggacccttcggccttagggcggagcctcccccgccgctcaggggaggtggagctcgttgtggtgggcggggctttctccaggtgggacccatcgcctaggcaggtttcccc

SEQ ID NO: 37146 - DNA, 194 bp, Homo sapiens; identical to SEQ ID NO: 9044
  chr12:54150983-54151177
  hyper

SEQ ID NO: 37147 - DNA, 378 bp, Homo sapiens
  chr12:54330298-54330676
  hyper
cgccgttctggttcccactcccgccattctggttcctactcccaaaggctggggacgtgtctttgagtcctggcccgcggaaaacgggtccggcgttgggcctgaccggggagggagccccaagaatggggtgggcgtttcaggccctttgtttctcctggcagccctgcagaaccctgtccacagcgccccactacttccacctgggagcagcacttcacagaaggggaggccaggatctgggttccacttctactacccgcggctggaaaaaggcaggcgtctccacccacccacccccaccagccaggccttaggcaagggggccaacgtcatacaacccagtctagacttggccaggccctgtttgctctcctc

SEQ ID NO: 37148 - DNA, 342 bp, Homo sapiens; identical to SEQ ID NO: 25046
  chr12:54343505-54343847
  hyper

SEQ ID NO: 37149 - DNA, 333 bp, Homo sapiens; identical to SEQ ID NO: 19198
  chr12:54371976-54372309
  hyper

SEQ ID NO: 37150 - DNA, 900 bp, Homo sapiens; identical to SEQ ID NO: 32539
  chr12:54389206-54390106
  hyper

SEQ ID NO: 37151 - DNA, 538 bp, Homo sapiens
  chr12:54391212-54391750
  hyper
cgagcaagtctcctgggaggggcaggagaggagccctcttccgcctttgtgtccagacagaagtggccgccgcgcccggagccggtcccgcggcaaaggcccggcaagccagcgggctgcacaatgccacggctgctccgccagctcgcccctgccccgtcctgcctgcctacggccgcccttcctccgcctccctctctgcacgcctgcctttcccggctctcctatctcttttcatcttgccttccttcttttaattctcccccttttttccctttattctaatgctccgcttccttctttcctctcttgggcctgactccatgtttcagttggtctgtcccaggctgtctcgggttcagtctctctcaggctctgtcccctgatgtcctcttggtctcagtctggccccgggccccgctgagggctaaacgtctctgctcatcgctgccagcagccgcccaagtgccgggcccggtcctcagccgccctgggctgggggaggtgctggctgtactggggatttggagaaagcctc

SEQ ID NO: 37152 - DNA, 929 bp, Homo sapiens; identical to SEQ ID NO: 26277
  chr12:54398724-54399653
  binary

SEQ ID NO: 37153 - DNA, 432 bp, Homo sapiens; identical to SEQ ID NO: 9046
  chr12:54400009-54400441
  binary

SEQ ID NO: 37154 - DNA, 244 bp, Homo sapiens
  chr12:54404841-54405085
  hyper
cgtaaccagactggggttttcttctgtccagctccggggaggcgcagtggacggcaaacttacagccggtatcagaccttggaactagaaaaggagtttctctttaatccttatttgacacgaaaacgtcggattgaagtctctcatgccctgggactgaccgagagacaagtgaagatctggttccagaaccgaaggatgaagtggaaaaaggagaacaacaaggataaactgccgggagccc

SEQ ID NO: 37155 - DNA, 622 bp, Homo sapiens
  chr12:54440858-54441480
  hyper
cgcccgccagcgcagggcccaggtgtttgaggcgaaggggctctagctccccgcaagcctggagccaggcgtcgcgcttcctccgggcttaatccagacctttcaacacacacctcattcgggggaggagaaaagcacaggaccgcggagagcccagctttgaggccaggcctgaagggataacccacacagggaacgttttcctatcagagaataatggagcacaaaataattcagaaagcgaatgggcaggaccacagcctgagagtcccgcgccgcggggccgctgcagagccggtctcccgagcaccgcggcaggaccatttcgttggaatgtagggcgaggccgaagcccgccccggacccaggccgcgaggtgcgcgccggccgccgaggggccgcctgtaaattacagcccgccgggaggactcggaaatacacaaaaggagccgaaagatttaaacagtcggaggcagaggcgtcccgaggcggccaaagcggaaatcaatcacgtaattaaaacagggaggggacgaagcccaaggctgggggtcccgggttcggaggaggcggccaaggtgcaggccgaggctggcgagcggcttagggacgtggctcgccc

SEQ ID NO: 37156 - DNA, 223 bp, Homo sapiens
  chr12:57635256-57635479
  hyper
cgcgcgcgcgcgcgctgagtagagtgggcagtggaggaggttggggtgccggttgtcttgtaccccagtaccggcccttcctcggatctgttttcaattcagtctgctccttggcccagacttatgacctttgcagcatgcggcagtatcatccatcacccaggcgccgtttagggggatggagggcgctgggagctcacatagggtcgctgtcacgcctgcc

SEQ ID NO: 37157 - DNA, 1029 bp, Homo sapiens; identical to SEQ ID NO: 26280
  chr12:58014708-58015737
  hyper

SEQ ID NO: 37158 - DNA, 700 bp, Homo sapiens
  chr12:58021294-58021994
  hyper
cgctggcggctgggcgcgggtgcagcctaggaggagaggcgcgtgaccgtgcgccagctccccgtggggctcctgccagggtcgaccgggagggggtgccactcacccagatgagccacgcggctgaggcgggggtcgaaaccgacctcgcgcaccttgtcagtccgcgccaggaagaagttaaccacgccgtcggtgaccacgcagcctgggaagccgacgagctcgtggtggaagccgcgcctttgccggaggcagttcccgaggcctggggcgccgggctccacgctcagcagctgccgataagtggtggcaaagccggagatctcgcgcaccgcgccccccacctgcagggagagggaggttgcctccaggcgggcctgggataggggacccgaaggggtcaaggtctgcgctccggtgccttcgggggtacccctgccccatcctcttccgcttcacccctgcaggacccagacagttcccaggccccacttcgtggttctctctttgtcctagggctggccgttcctggccgcagcgcccccgctgtggccttagcctgttcaaggcccttctccacccccacatcctgcagcccctgccctaccaggtccagcggcgtccgctccagcacgtccacaagcctctccagccgcgtccgcgccgtgaagacgaagtcgtcgtccacccacagcac

SEQ ID NO: 37159 - DNA, 146 bp, Homo sapiens; identical to SEQ ID NO: 19206
  chr12:58262601-58262747
  hypo

SEQ ID NO: 37160 - DNA, 171 bp, Homo sapiens; identical to SEQ ID NO: 19207
  chr12:58263143-58263314
  hypo

SEQ ID NO: 37161 - DNA, 690 bp, Homo sapiens
  chr12:6472476-6473166
  hyper
cgcgagcccacgaggccccgcgtggtgtcactgggctgcgcgggcgggtcaggaaaggagcggagcccatgggtgggcggggccaggggccggcgaggggcggggcgggcccctcggcgctgcgggcctcaccagctggaagccgatcttccagtccttccagtccacctgggggttgttgtcccgcaagctggaggccacgctacgggctcgacgggccccgtgaggcgggggcgggaccctcaggcgctgcaaggggtgcggcagagtcccccgcaggtcgcgacggctgcgggagccggccacgagagtggtgaaggagctgtatttgtacaggtcaaagagcgtctgctctgtgatgcggtccagctcctccagctcctctttaatttccgggtacctgaaggggcgaggggaagagggtcaggccaggggccctggagcgagtgtctggcccctccggggtcagggtcctcatctgtgccccgggaggccggtccatcccggagaagcctgggcggggctggggtcgtcgtggcgcctcctggccgtccggcggtgaagggtaaacaggtgtgtccgccgggaaggcggaggccacggcgagcccagccgggacactgtggactgtttattgaaggagagaggcaggaggcgcctgtcgtctgtggggcgctctccccctcgccc

SEQ ID NO: 37162 - DNA, 499 bp, Homo sapiens; identical to SEQ ID NO: 19210
  chr12:68041644-68042143
  hyper

SEQ ID NO: 37163 - DNA, 463 bp, Homo sapiens; identical to SEQ ID NO: 26284
  chr12:68758776-68759239
  hyper

SEQ ID NO: 37164 - DNA, 90 bp, Homo sapiens; identical to SEQ ID NO: 19213
  chr12:70759026-70759116
  hyper

SEQ ID NO: 37165 - DNA, 775 bp, Homo sapiens
  chr12:71834301-71835076
  hyper
cgggaaagcgctgctgcgccgcagcttcccagtccagcgctagaaacatcgcagggcgaattcctgcaaatgcaggcatttgcgtgcggagtggacatttgtgacccagagcctggtacccaaaggcaggctgccatctggtccccgccccaaccgcctctctgcgtctagtcgcattccacgaaaagatggtctgtagaaagtttccccaaaggagaaacaacttgcccagctccaaagggtttttagtctgcatcccttgcactgtgacgtgatgtaacctttttggggttttttcctcttttcctcccttccttcctcccttcttccttccttccctccctcctttctttttattttctttcttttttaacggcgtgattaaaatgtggcaaccacaaaccccgattagagctgccagaacgttatctttacctttggctgcccgcgccgccctttgaagtgcccgcggccgctgtgtaatctttaaccatctcttcccccggggaggaaaggggaagtgggctgaaggctgttgggctggtaaacagcggcaccgacacccaaagggagacctgaagctctctatcatccctgggggattctcccaccccttctctccccactgcaacttccaaagccctgaggcggcggctcattgcgtaattttttctgtggaaaacccaggcccgaaggtaacaggtagttgggtgaacgcggtgacccaggaggaaccctattctcggagaccaaggcgactactctctccaccccc

SEQ ID NO: 37166 - DNA, 539 bp, Homo sapiens; identical to SEQ ID NO: 17376
  chr12:7260775-7261314
  hyper

SEQ ID NO: 37167 - DNA, 393 bp, Homo sapiens; identical to SEQ ID NO: 17380
  chr12:90101352-90101745
  hyper

SEQ ID NO: 37168 - DNA, 379 bp, Homo sapiens; identical to SEQ ID NO: 32545
  chr12:96184964-96185343
  binary

SEQ ID NO: 37169 - DNA, 746 bp, Homo sapiens
  chr12:99287438-99288184
  hyper
cgtgtctctaatctactgatccaacgtgcccggcgcacataagcagcaccgcgactgaatttcaagtcttctcaaactcacacctcagttgctcagagaggagaaatgcagcgaggactcgccttcctggccagtctctgaaaacgcgaaaccttcctgagctgtccatttgttttaggggctgtttataaacggctggttttcttggaggaaaaataaacaaataaatacggggcgatggcagcatcctgataaacacaggaccttgtttggcttttggcaagttgtaacctggagtaaaatcacatccaagttacaagcacgcaaattggaatttcgctggaaacactgacccgaccttcaccgaagcagcaaatcgcagtctctgctgctctgctcctgctctccaaggcttaacattggaaagtccatgcccacgtccccctctaattaatcaatgtagaaagaaatacgagggaagagagagggagcacactccacaccaaccttgccagcttctattcttcctgctattccttaaaggcgatgcacagcgcacctggaaattacgtggacttggcatggctttttaatattaaagacaaacgacctttggaaaatatacactgttaaagtcaaaccatttggagagacacccagcaatttacctcctcaaactcctcggaaccccaagaatgaggaaaggaaatggaaaatgcgcttaacccgggggtggtgggggaatc

SEQ ID NO: 37170 - DNA, 535 bp, Homo sapiens; identical to SEQ ID NO: 18345
  chr13:113497181-113497716
  hypo

SEQ ID NO: 37171 - DNA, 281 bp, Homo sapiens; identical to SEQ ID NO: 25060
  chr13:113547097-113547378
  hyper

SEQ ID NO: 37172 - DNA, 137 bp, Homo sapiens; identical to SEQ ID NO: 19222
  chr13:114799639-114799776
  hypo

SEQ ID NO: 37173 - DNA, 839 bp, Homo sapiens; identical to SEQ ID NO: 29832
  chr13:20735265-20736104
  binary

SEQ ID NO: 37174 - DNA, 541 bp, Homo sapiens; identical to SEQ ID NO: 32550
  chr13:33000891-33001432
  binary

SEQ ID NO: 37175 - DNA, 73 bp, Homo sapiens; identical to SEQ ID NO: 19226
  chr13:39610527-39610600
  hyper

SEQ ID NO: 37176 - DNA, 334 bp, Homo sapiens; identical to SEQ ID NO: 19227
  chr13:39610814-39611148
  hyper

SEQ ID NO: 37177 - DNA, 57 bp, Homo sapiens
  chr13:41241692-41241749
  hyper
cgggaatctcccgctccgtccactaagtccagggccggcagcgaagggctcaggagc

SEQ ID NO: 37178 - DNA, 409 bp, Homo sapiens
  chr13:99104169-99104578
  hypo
cggcaaccgctacagcaatcgcacagatcagcaacctccaactgcatcatctcggtgagcaagtgcgcaagcagtccagggcgctgacctgggcactcggcagctccaggcctggggacttctccctggagtcttccaaagtgtctcatcacacacacacagccacgagtacacacgcacggccacacatacacagcaggtgccctgtcctctgaagagtcacatttcaaggagtatgcaaaataagcgtgttataaaatttatttgtgtaagcattcagacatttttaggtgggaaagatgatatgcagaatccactacaaggtgcaacagaaaatcgtattggaaaggacggtacatctggcgcagaccagcagtggcacgattccaaacaaatgtcagacgagagc

SEQ ID NO: 37179 - DNA, 460 bp, Homo sapiens
  chr14:100125671-100126131
  hyper
cggtcagccggcgccccagcacctgccccgcggagcccgtgagccctggctcagggcgaccccgagccgcgccctctcccaccccgcccgcaggtcggcgctgctgggcaaggtgctgcgcatcgacgtggaccgtaaggagcgcggcctgccctacggcatcccgcccgacaacccgttcgtgggcgaccccgcggcgcagcccgaggtctacgccctgggcgtgcgcaacatgtggcgctgctccttcgaccgtggcgacccctcctcgggcactggccgcgggcgcctcttctgcggcgacgtgggccagaacaagttcgaggaggtggacgtggtggagcgcggcggcaactatggctggcgcgcgcgcgaagggttcgagtgctacgaccgcagcctgtgcgccaacacctctctcagtgagtgcccgcgccccggggaccccggccccgaatcc

SEQ ID NO: 37180 - DNA, 940 bp, Homo sapiens; identical to SEQ ID NO: 31114
  chr14:101923536-101924476
  hyper

SEQ ID NO: 37181 - DNA, 800 bp, Homo sapiens; identical to SEQ ID NO: 19229
  chr14:102516079-102516879
  hypo

SEQ ID NO: 37182 - DNA, 147 bp, Homo sapiens; identical to SEQ ID NO: 19230
  chr14:103986352-103986499
  hypo

SEQ ID NO: 37183 - DNA, 138 bp, Homo sapiens; identical to SEQ ID NO: 19231
  chr14:104000003-104000141
  hypo

SEQ ID NO: 37184 - DNA, 734 bp, Homo sapiens; identical to SEQ ID NO: 19232
  chr14:104000403-104001137
  hypo

SEQ ID NO: 37185 - DNA, 223 bp, Homo sapiens
  chr14:105189935-105190158
  binary
cgctacagccaggcccgagccacagcgcgcccgggcgggacgcggggcccctgccgtggggcagaagtgcgggcagttgcggggacacaaagtcctcggagaggacgcgctgcgcggctcttcgcggccgccagggggcgcgcccgcgcccagggcactcggggttccacggggggcaggtgcgctcctcgagagtgcggaccctctaggtggggtgcaggac

SEQ ID NO: 37186 - DNA, 667 bp, Homo sapiens; identical to SEQ ID NO: 19234
  chr14:105293560-105294227
  hyper

SEQ ID NO: 37187 - DNA, 959 bp, Homo sapiens; identical to SEQ ID NO: 32562
  chr14:105330476-105331435
  binary

SEQ ID NO: 37188 - DNA, 108 bp, Homo sapiens; identical to SEQ ID NO: 19237
  chr14:24550913-24551021
  binary

SEQ ID NO: 37189 - DNA, 207 bp, Homo sapiens; identical to SEQ ID NO: 19238
  chr14:25148242-25148449
  hyper

SEQ ID NO: 37190 - DNA, 771 bp, Homo sapiens; identical to SEQ ID NO: 31133
  chr14:36974427-36975198
  hyper

SEQ ID NO: 37191 - DNA, 163 bp, Homo sapiens
  chr14:36979694-36979857
  hyper
cgaggttcgctttacacataggcatatccagttccttagacattgactgggtctcctgggttgcggcagagcgtgcagtcagctcagaggaactagctctcggtcctcttagtgtcattatggtaattcacaggtttacttctgcgcgcgcgcactcagcccc

SEQ ID NO: 37192 - DNA, 1363 bp, Homo sapiens
  chr14:36983236-36984599
  hyper
cgttggggcctagggatgggtagggtactttggcggaggcaaagcttcgcggtgatctcggggtgaaccgtacttgctcccaaacctcggaagcttccaagcacctcagcgccaggggcatcctcagaatgctgatttctccgagaggggaggccagaaattgggcacgagttgatgcaggagattcccagaaaggaggactgtcggctttccagaagccgacggtgctgtaggggcggagggtgtccccaggttgcggaaccctcttgcactgctcccagcgcgcacctatttccctaatgaaacgcttcagattgcgttctaggtctcttcccgcagctgcgacaattcccccagccgggagcgggagcggatggagccagcgtaattgatggcaagaaagaggctgaggtcctgtttgtctcggtccgcaaacccgattgagttcacctttccccgggacaagtaaacagacttcaaactatgccgactgtagacggcgaggagaagaatgtatttgatggaaactccatccaatgcaaagatgataaggccgagggtgccacagcctactaaaattgtgactcccaaaggcttcctcccagctagaatggggtgcggggcagccgccagaaccacagccgggcaccgccagccaggtccccgcccgggcttgggctaggctggggcaggttaagcgaagctccaattccgtgggatccggacctagagccaaacagcagctgcagtatccatgtcccctgcccggccggcctgagctgggtgccttagccacctacactcccggtcccggaaccacagctgaccattccaacgcaagtggtcaaatttgtttgttttccaaaacgtgagacctgttaaaatctcccttccccgccttccaacaagcactctcactagacccaaccatcctcttgggaatcttcgagtccctctggctgttggaaactgtgtctcagcagtgaggcccaggtttctgagggagaaagcccggcctagcccacagtcttaaggcaccacgccagaggaggctccaggaagttaacaaagaggactgctgggcccggagcgaggactccggccagtctgctttcctcacaagctcttggtgggggagcgggagagagggattgggaagagatgcagacgaataacgaaatgagagaggggaagagaggaagaaaaagaaagttgaaaacctgggcgagaagtgagtacatgccaaataagaatcaattgcccataatccaatacttccaggcctagaggaaagtgctgggaggggcgtctgcccgcagctggctcagctgcctttcgaccggagatttggcaagggtgaccc

SEQ ID NO: 37193 - DNA, 968 bp, Homo sapiens; identical to SEQ ID NO: 34320
  chr14:38057019-38057987
  hyper

SEQ ID NO: 37194 - DNA, 770 bp, Homo sapiens; identical to SEQ ID NO: 25095
  chr14:38724944-38725714
  hyper

SEQ ID NO: 37195 - DNA, 1076 bp, Homo sapiens; identical to SEQ ID NO: 23072
  chr14:52781114-52782190
  hyper

SEQ ID NO: 37196 - DNA, 166 bp, Homo sapiens; identical to SEQ ID NO: 19247
  chr14:55982010-55982176
  hypo

SEQ ID NO: 37197 - DNA, 214 bp, Homo sapiens; identical to SEQ ID NO: 19248
  chr14:58862962-58863176
  binary

SEQ ID NO: 37198 - DNA, 523 bp, Homo sapiens; identical to SEQ ID NO: 26350
  chr14:60043257-60043780
  hyper

SEQ ID NO: 37199 - DNA, 60 bp, Homo sapiens; identical to SEQ ID NO: 23075
  chr14:60798413-60798473
  hyper

SEQ ID NO: 37200 - DNA, 986 bp, Homo sapiens; identical to SEQ ID NO: 26354
  chr14:60977289-60978275
  hyper

SEQ ID NO: 37201 - DNA, 978 bp, Homo sapiens
  chr14:60982155-60983133
  hyper
cgagccactcctactgttgggctgcgtgactcagcggctcgaggagagaaacctctcaaaaccgggggaccgagacggggttcaatttaaacctaggtgggagaatgagcccacaagcgcgcgcccctgcagctgcggaggcgcgcgcccgcccaccctcgggcgcctgaagtcgcagcggttgcagagcctcgagcccgtggatgcggcgcgcgccgcggtctgggcctgcgcgagaggctgccgcccgcgtcgggcctgggcctacgcgtgtctggcctgggcctgccggtgcaacagcagttgtcgccaccggtcctaggccgcgccgagcgagtcgccgagaggggcgggaagaggggagaggtccgagaccagggagcgggacctaaagggggctttccgcgcccgacaggtccgccggggttagccttcgaggcggggagagggagcggggtccttcaaggaccgcatgttcgcgatagcacatttgagccctggcaggccacctgggccgccttctttcggaaaccttgcggggtttccaagcaaggtttacaatgggaaactttatttcccattgtaagctcttacaaatctcctctggctagatccttccttgcagctctctttgctaggatttatattcccaaacttcttcagacgtgccctaccgcgagggaacgaactggttttcttcccgttttcacctccttgtctggagacaaaggggtgtgagggcgatcccagagctgaacaagcagtttcacgcctccctgcccgctcatgctgtttccgcttgccctgtggtttgctctgcctggaacgccgccccctacctcaactgctaccctgtcattccacaaagcctaccccacctccactaagttttccgtgagccagtgagctccacacagataatgtgccaccaccttttttaatgctcccaccgcaccttatctaaacgtctgttttagc

SEQ ID NO: 37202 - DNA, 876 bp, Homo sapiens; identical to SEQ ID NO: 23944
  chr14:61104155-61105031
  hyper

SEQ ID NO: 37203 - DNA, 478 bp, Homo sapiens; identical to SEQ ID NO: 28578
  chr14:61116736-61117214
  hyper

SEQ ID NO: 37204 - DNA, 955 bp, Homo sapiens; identical to SEQ ID NO: 32570
  chr14:61123186-61124141
  binary

SEQ ID NO: 37205 - DNA, 417 bp, Homo sapiens; identical to SEQ ID NO: 32572
  chr14:65016491-65016908
  hyper

SEQ ID NO: 37206 - DNA, 93 bp, Homo sapiens; identical to SEQ ID NO: 19258
  chr14:66869973-66870066
  hyper

SEQ ID NO: 37207 - DNA, 593 bp, Homo sapiens; identical to SEQ ID NO: 34329
  chr14:70653697-70654290
  hyper

SEQ ID NO: 37208 - DNA, 185 bp, Homo sapiens; identical to SEQ ID NO: 29865
  chr14:74208160-74208345
  hyper

SEQ ID NO: 37209 - DNA, 98 bp, Homo sapiens; identical to SEQ ID NO: 19260
  chr14:74238704-74238802
  hyper

SEQ ID NO: 37210 - DNA, 95 bp, Homo sapiens; identical to SEQ ID NO: 19261
  chr14:76446078-76446173
  hypo

SEQ ID NO: 37211 - DNA, 245 bp, Homo sapiens
  chr14:76597648-76597893
  hyper
cgcttgcccgtcggtgggctgggcgggagcgctgaccctggcgcctcggaggagggagggggcgggctggggagggggaagacagcgtgactgcggtctgatctacagtgacgagtaccaatgttaactgtcacctctcatctccaaactaaatcacacctggaattggaggagccgaggagctgatagagtcagcctcgcagaggcgacaagtcaatcagcgcggagatgcccgcggagacacc

SEQ ID NO: 37212 - DNA, 123 bp, Homo sapiens; identical to SEQ ID NO: 19263
  chr14:76603110-76603233
  hyper

SEQ ID NO: 37213 - DNA, 181 bp, Homo sapiens; identical to SEQ ID NO: 31179
  chr14:89895069-89895250
  hypo

SEQ ID NO: 37214 - DNA, 870 bp, Homo sapiens; identical to SEQ ID NO: 19265
  chr14:91805132-91806002
  hypo

SEQ ID NO: 37215 - DNA, 203 bp, Homo sapiens; identical to SEQ ID NO: 19266
  chr14:91808058-91808261
  hypo

SEQ ID NO: 37216 - DNA, 551 bp, Homo sapiens; identical to SEQ ID NO: 19267
  chr14:92302201-92302752
  hyper

SEQ ID NO: 37217 - DNA, 957 bp, Homo sapiens
  chr14:94254404-94255361
  hyper
cgccccattaacccccatacaactcactctcactgtgagcacacttcaaacccggcgggcactactcacctgcgcgcacaaccacagaaacagccgtgcacacacactgatccccgtgcacacccaccgactcctgcctgcaccctcgctgaccctgcatgcacggccccaagaaatctcacgctgcctgcacccacactgcccagccggcctcattgcgcacactgcaacataggcacctccgtgcgctgcccctttgcacgcctccgcccagccccgatctcccgctcccgggcgtgggttcccccacgcctccatctccgcccgcacccttccaacgcctcacgctaccttgcctggcggcggccccagccgaccctgggctcggggaaaagaggtccgcgttccccccgcggcagctctgtttcccagcagccggacagcccccatttaaagccagccgcctccccagtcccccgccctctaggcggggcctccgtcctcaccttggcggctgcgcgggcgcccgggggcttcacatgccggggaggagcgcccggcgctggagcaaaagtttgcgcgccggttgggcctcccgggccgctgagcagaggaccaggagcggcgtcctcgcacggggcgcagggcgcggtggctccggactgcgcctagccgcgcgcggggcgggaggggcggcaccccgctcccagggccagggctggccgccgaggcggaggcagagggcggggaaagtctcctccacgccgcctggagccggccgcgcgagccctccccgggcccgcgttggctccccgcctttcctggtggcgccgcgcggctgcccggggcactggggtgcccgagctctctactaccctcacgctggcccgcgagaggcagcggcgggaggcgccggcagggagctcccgctggggcagcaaagccgtgggtggaggc

SEQ ID NO: 37218 - DNA, 578 bp, Homo sapiens
  chr14:94405641-94406219
  binary
cggtggggtgcgtggcgatataggcgtcgatgttcgcgccgtggtccagcagcagctgcattgtgcgcaggcagccgtggcggatggccacgagcaaggggctgatgacgtcgcggttggggtcggcgccgtgttgcagcagcagctcggtggcgtacacgttgttgttgaccaccgcgaagtacagcgcggagctgcgccggtcttcgtagaggcgcgcgcgctcgggggccagcggcgtgttcacgtcgaagcgcgcgctcagcagcgcctccagcacctcgtcgtggttgcgctcggccgccaggtgcagcggactgacgccgctacggcgtatgcgcgtgcggctggtcaccggcagcagcatctgcacgatcctgccgggtcgaggggcgggcgcgggtgaggggagggtcggggtgtggacgggtagggccggccccgccagcaggagagctcgggcgccaggctcggctggtcgccctgaccgcgggctgcgacgcggatcccaccggcagggggcgccgcgggtcaaccattctcaccccactgggcagggtgggtcggctgccgtctcc

SEQ ID NO: 37219 - DNA, 978 bp, Homo sapiens
  chr14:95239349-95240327
  hyper
cggagctctaggggagctcacccctgcgcggcgggacctcccccatcgggttgccccttcaatctgcagccgcgcggaggcaggccccgggaaaggcagtcggcgctcggtgctcgcactgcgcctcggcgggcggaaactcacaagtgtcctcaacgtgctaaacaaaccatcagggccccgcatcgcctggcgcaattggaataacaaatgcgacgcacgcaaattgtccacctcgtgttgctaagcgattgtttgtcggccccgcacgcacagctcagcatgggaggaccgcgagcgtccagaggcagccggcgagcgcttaggtcggaaatgcagtaaacatgccgctgattttccctattatcacccaaacacgatttcacacaaagcaatcaccacgcagaagtctatgaaaatgtgtttgttgaggagtcactcgccccagtaatagtcctcatttttaagatattaaagaatagctcagcggattccacatgcataaggtctatttgccgttcggcatctgtcacggcgcttttgcactgcggtcatcactaaattgattcatagagtgtagattaaattgcttctctgatttaaaacagtgtccaactttggagtatgcgtgtgagtatcttctcccgccccaaggtatttttgtcagggagaaaactgtcgccccactatccttacaccccattccgcataactgtaaaaaaataatgcatcttcgaccccaacttcttacggttcgtttcaggaactttcttaattctctccgtctcctgcccggccacagagcagagttcacaatcggatgcgtttaagtcggatttttcgtgtcatgtgcaaaaagccggtgtgtccttttcaaggtacggagccctcatcggagggcgcattagcggggtcagaggaattaggagcaatgcgcagagccccctgcagcccgcgtgctgcgccgagacctcagcc

SEQ ID NO: 37220 - DNA, 120 bp, Homo sapiens; identical to SEQ ID NO: 19270
  chr14:95240610-95240730
  hyper

SEQ ID NO: 37221 - DNA, 339 bp, Homo sapiens; identical to SEQ ID NO: 19271
  chr15:31621317-31621656
  hyper

SEQ ID NO: 37222 - DNA, 30 bp, Homo sapiens
  chr15:33165562-33165592
  hypo
cgcttgctggacgccgttagtggtattaac

SEQ ID NO: 37223 - DNA, 592 bp, Homo sapiens
  chr15:37174944-37175536
  hyper
cgttccgcggtgtagattgacactcgttatgtgggggtctggttgcggttggaagacttatccgagtcagggctgcattgccagcgcctttcccaagagtggaggttggcggtgcaggcggtgcggctgccagcctgagattgttccggctctcgttacctgtgcgccctcgcgttacatggtgctcataaatcccgcggcagattaactgggaaaccaagaaaatgcctctatgcaccgaaccgttgaaaaagaaccaaaattctctcaaatagtagcagtctcacaccttgcattggacgtgaaacactatagtaagatcaaatgtcaaagacatcggttattttggtgcacttcagctaccttttccgtttccagcaaaattgagaagtacgaccccaaaaagaatagacacacccatggaaaagacgtgtgtgtgtgtgtgtgtgtgtgtgtgtgtgtgtgtgtgtgtgtagctatggtgacaacttttaaacactttttctgcttaaaaaaaaagattcggacagggtctggtattgctttgcgttgcaggaaagggtcattctggacaaggaaccgtctgaattcc

SEQ ID NO: 37224 - DNA, 111 bp, Homo sapiens; identical to SEQ ID NO: 14648
  chr15:38857279-38857390
  binary

SEQ ID NO: 37225 - DNA, 750 bp, Homo sapiens
  chr15:40544678-40545428
  hyper
cgacacttggcaacttctcccgcgctctgggttcgccgccgcgtcctacctgaggccacaccctgaaatcaaaatcgcggtcaggtgaagccggcgctgcaccaacgtgtaagcgcggcccctcctcggcgttcccgcgccgaggtccctcccgcggagggcgggcccggctcccacgacctcttcgagcgttcctgggcttcccgctccgcaggtgggttccccggctgccccggaggttcgcggcgagaggacgggcctcccaacacgcgcagcccccttcctgggtgcccatgccccgaagttcgggaccagccggcgccaggcgaggggccttgggcgcaggcatctggagctccgcgtccctggagcgggacctccctccgcgggcgcccgcccggcgcggggcattcgcgtccccgagagggcgcagcagtggggcctgcgagctggggccgggtggccgcgccgggtcggagtgtggctggagaggggccgccccggaagcggtgctgcgcccaacgtccccttctccccgtaagccccgcaaggagcctgccgcctcttgcacctgagccaggagttcagtcgggaggcgggcgcggagcggttcccagcgcctggacgtcagccagtcgcaacacccgcgggaacacttgctacatttgccataatgcatttctgatctgtttccgcgcaggcctgcggaggactggcccagcaaggtcccaggtcttccctctcctcagc

SEQ ID NO: 37226 - DNA, 455 bp, Homo sapiens; identical to SEQ ID NO: 29879
  chr15:40575352-40575807
  binary

SEQ ID NO: 37227 - DNA, 490 bp, Homo sapiens; identical to SEQ ID NO: 32583
  chr15:41136701-41137191
  binary

SEQ ID NO: 37228 - DNA, 1865 bp, Homo sapiens; identical to SEQ ID NO: 31195
  chr15:41786420-41788285
  hyper

SEQ ID NO: 37229 - DNA, 447 bp, Homo sapiens; identical to SEQ ID NO: 14654
  chr15:42873450-42873897
  hyper

SEQ ID NO: 37230 - DNA, 455 bp, Homo sapiens
  chr15:43803503-43803958
  hyper
cgtctgcatctccatccctagtgtgcacttcctgagatctgcgcccttgtcacctgcatcttccatgccatgtgtccgtatcctctcgctctactaacatctcgcttgcccatccttactgcacactccatggcgttccgcagtctccctgaggcagcggagctctatgcagcccctggggcccctctggtcacaccctccaccgcagtgttttggaccaggtgtcctgaaagtcctcaccatccctggagaatccacgtccctatcttgctgtatcttctttatggtccctgaaccagcacggggagctttctgaacgccccgtacaaatctcaaatctctgaatgccagtagccaaccactaagtgaccttcgtggctaccagctcctaagtcctcacctccttccccagtgctgtgcctgtggctgtggtgcagtgctgcggagccacctgc

SEQ ID NO: 37231 - DNA, 379 bp, Homo sapiens; identical to SEQ ID NO: 19283
  chr15:57598802-57599181
  binary

SEQ ID NO: 37232 - DNA, 791 bp, Homo sapiens
  chr15:60297728-60298519
  hyper
cgccatgcagccggtgcccgctgcctacccgctccccaaccagttgactaccatgggcagctcgctgggcaccggctggccacacgtgtatggctccgccggcatgatcgactcggccacccccatctccatggcgagtggcgactacagcgcctacggcgtgccgttgaagccgctgtgccacgcggcgggccaaacgctgcccgccatccccgtgcccattaagcccacgccggccgccgtgcccgcgctgcctgcgctgccagcgcccatccccaccttgctctcgaactcgccgccctcgctcagccccacgtcctcgcaaacagccaccagccaaagcagccccgccacccccagcgaaacgctcaccagcccggcctccgccttgcactcggtggcggtgcactgacccgcaggagcccacgccccctctcgttctcctccccaccacctcactcgccttccctggctcccagtcctgccggcccccacctgggaccgccaccctaacttgttcatttcaccttcggccaacccgccttgccccaagagaactttgttttggacccaggagaccaaacacaaacttgcagatgggccgagaggcgcgtgggagttgtcctcgcccccacatcaaggaaggccggggccacctgagccgaaccatcccctccctgaggccccgaaaccccctcctatttgaccggcgggggaaaccctgtcaccccctcttcgccgagaaaagcgcgtcttccctccgcccagatcggcggagccccgaactctgc

SEQ ID NO: 37233 - DNA, 782 bp, Homo sapiens; identical to SEQ ID NO: 19285
  chr15:60884567-60885349
  binary

SEQ ID NO: 37234 - DNA, 479 bp, Homo sapiens; identical to SEQ ID NO: 14665
  chr15:62359006-62359485
  hyper

SEQ ID NO: 37235 - DNA, 101 bp, Homo sapiens
  chr15:63779658-63779759
  hyper
cggactcacgcagcaccacctgtgtcccctagggggcgagctggggagagaccggagtccctgggagagctctgcgcggaaggcccgagagaattggtccc

SEQ ID NO: 37236 - DNA, 218 bp, Homo sapiens; identical to SEQ ID NO: 19288
  chr15:63889834-63890052
  hypo

SEQ ID NO: 37237 - DNA, 394 bp, Homo sapiens
  chr15:67357339-67357733
  hyper
cgcacacgttcccgaggctctcggccggtgtgatctcaccgactagagaataaaaacagcccaggggcgccggcgccggccaagggccttgacggggatcagcaagcgcgaggccaagtgcgggccccaacttcctgggcccgggccttccgcgcgccccctctcgggctcgggtcctctccagggtgcactcgcgtccggacgacgcttacttgctgcgagtccaaccctctccggcccgcaactccaaccgagccgcccgagtgtggactccgagagcggacgccacgggccgcgctcagccctcccgcccgaggcccctctcgccgtgtttcccaggacttcctccccgcgcccgcccgacttcaggtcggggccgcgcagggtcccgcgc

SEQ ID NO: 37238 - DNA, 939 bp, Homo sapiens; identical to SEQ ID NO: 31213
  chr15:68125183-68126122
  hyper

SEQ ID NO: 37239 - DNA, 287 bp, Homo sapiens; identical to SEQ ID NO: 14672
  chr15:68347714-68348001
  hyper

SEQ ID NO: 37240 - DNA, 202 bp, Homo sapiens; identical to SEQ ID NO: 19293
  chr15:68821338-68821540
  hyper

SEQ ID NO: 37241 - DNA, 263 bp, Homo sapiens; identical to SEQ ID NO: 19294
  chr15:69114222-69114485
  hyper

SEQ ID NO: 37242 - DNA, 242 bp, Homo sapiens; identical to SEQ ID NO: 18402
  chr15:70354323-70354565
  hypo

SEQ ID NO: 37243 - DNA, 457 bp, Homo sapiens; identical to SEQ ID NO: 13467
  chr15:75075794-75076251
  hyper

SEQ ID NO: 37244 - DNA, 191 bp, Homo sapiens; identical to SEQ ID NO: 14675
  chr15:75976190-75976381
  binary

SEQ ID NO: 37245 - DNA, 60 bp, Homo sapiens; identical to SEQ ID NO: 6933
  chr15:79208280-79208340
  hypo

SEQ ID NO: 37246 - DNA, 128 bp, Homo sapiens; identical to SEQ ID NO: 19299
  chr15:80352864-80352992
  hyper

SEQ ID NO: 37247 - DNA, 530 bp, Homo sapiens; identical to SEQ ID NO: 29895
  chr15:82339684-82340214
  binary

SEQ ID NO: 37248 - DNA, 752 bp, Homo sapiens; identical to SEQ ID NO: 28604
  chr15:89913195-89913947
  hyper

SEQ ID NO: 37249 - DNA, 963 bp, Homo sapiens; identical to SEQ ID NO: 26404
  chr15:89949775-89950738
  hyper

SEQ ID NO: 37250 - DNA, 969 bp, Homo sapiens; identical to SEQ ID NO: 26406
  chr15:89954212-89955181
  hyper

SEQ ID NO: 37251 - DNA, 387 bp, Homo sapiens; identical to SEQ ID NO: 19303
  chr15:91503650-91504037
  hypo

SEQ ID NO: 37252 - DNA, 894 bp, Homo sapiens
  chr15:96959320-96960214
  hyper
cgaccagccctgacagtaaaacggagtgagcatgtggcggccccggggcaagaggggcctttcctcttgtcgctctcgctttattacattagcgcgggcttccccgcgccggcgtgggctcagaagccgaggcgccgggtcacccatgacaaatgtccccgtgtctcgccaacaggccccgcctggccctgccactccatctgcccaacaggaccccggagagtgcttgcgggtgtcagtttcaggtaaagagctctcgaaagcgcaaagtctccaaaaaggttacaagggttccagcgcctccccaagtcacggaagcctgggccgccgctgcagcaggaagggttcgtacccggggggaggggaccaccccaagcgcgtgtgttaacgaaccccaagcgaatttcggggcttgaaagcgctaccggggcagccagattactacctcccactctcacctccatccctccccgccccttgcccgtcccacgggcctcagatttgggcgtagggctgggtagggcgcctgggaggagccagagggggcggatcaggccgggatttggcgccaggtacccccacccgcccgcgtcccggggtcgccagctgactccatgtgagcccacttggcaccggccccccgagggatcctgcgacgcgaggggtgcccatttgcagtgatccgcggactctcgaaccctaaaccccggggcccagctctgccccggcgtggatcttcgggaaaccggagcggaggctcgtggagacctgggaggagctgcgctgactggggcaggggacgcccagattggatcggttccgagctctcgtcgcccccgaggagggcacgacgcgctgacaaacgtggccgtcaacacctcgagctgccccggc

SEQ ID NO: 37253 - DNA, 820 bp, Homo sapiens
  chr15:99193738-99194558
  hyper
cgggccgggggatggaggggtactagggccgcatccgagtgtgcgttggtgggtgtgtggtcggagccgacgtgcattccgacacacgtgctcgcagcgcggggtgtagtcgccgcctcacggggacacctagacgcccgtccctggcgagaggtgtcgtacgctgtggtttcagcgccagggtctgcggcggcgcggggagggtgttgtgttttgcgagcgcggagccctggccttggttttgttgtggtcggcgtcgtgtcgccctctcttctgccgccccgcacttcctttgtacgtagttaataagcagtgtcgctccacattcgctgtcttttgcaatctgatagcttttgttttggtggtgtcgggtgggggttagtagggaagcgcggggatgcggggagcgagaactccccccggtgtctacggccggaggaggtgggggttttattcttctgaaaaagttgaaagtgtggcttactggtacattcaagatggtagggtaatttgaacacgattaaaagtttaaatgtcgcagaactgggactgggaacggtgagggcgtgttggtgagtaatggttgccgagggtatgcaggtggtgccgattaactttgaaaaaatcacgactgagccttcacgagtgaggcggggaaggaggaggcagcggaggttgtatggccccatcaccggggcaattcagaaaggctgtttctataaacaaatccttaaacgtctggtaagaaatgagtccgcgacggaacgagagcagatcgtggttcgcgtgtttactgccgagtgggacgcggactggggcc

SEQ ID NO: 37254 - DNA, 284 bp, Homo sapiens; identical to SEQ ID NO: 29912
  chr15:99497074-99497358
  hypo

SEQ ID NO: 37255 - DNA, 667 bp, Homo sapiens; identical to SEQ ID NO: 27662
  chr16:10479686-10480353
  hyper

SEQ ID NO: 37256 - DNA, 779 bp, Homo sapiens
  chr16:11178526-11179305
  hypo
cgccggctatatgagtcatctccactgtggagggaggcaattttaaactggaaaggtcaatcgacatgtcagaatatctagtaaatcattcgcgttccacctggtgccccttccattcccctgaaaaagcctgcccttgttcagcgcctctcgaagacactgtggagaaagaggtagccggggctgggtggtgatttacctcgaggaaaattaatatggtgccatcaattctgaaggcagaaagggcccatggccagaaggctgcacgcaggctggaataactcacggcccatgagggccctgagtttggggaggcctctccttggccctggatataaatcagcagcccttttgcagagagagagtcggagttttgtcaggcctgggggaagggagccagcaccagaagcccctcttccccaggagcctgtcgttgtctgaagggttgaaaggcacctctgtgccacccttctcggccagcaccaagcactggactcatttacagacgaggccatgaagcccccaccctgggttccaggaggatcacgggaagggggctttcagcctggctgtcagagaagaatgtgacaggcccattttcactccacaggccttaattggatggtcagagggcacatctgtggcttataagaaacagatggcgggatgggttagtgaaggagaaagcacgcttgcttcaggttgagtgcccgtggaggtgctggggcagcacgctggcaagcaggcagactcggccaagacccagctttgtcacgtgc

SEQ ID NO: 37257 - DNA, 523 bp, Homo sapiens; identical to SEQ ID NO: 22806
  chr16:12897365-12897888
  binary

SEQ ID NO: 37258 - DNA, 37 bp, Homo sapiens; identical to SEQ ID NO: 19311
  chr16:14164836-14164873
  hyper

SEQ ID NO: 37259 - DNA, 877 bp, Homo sapiens
  chr16:23847674-23848551
  binary
cgcgcgcgcgcagggcaccttcccgggcccccgagggcagcgccgcgccagggaccccctctccgcgccctctgcgccctccgcgccctccgcaccctgggaccccgcgtctccggactcccggctccggaccctgctgcccgggactcccggatggacagtcctgccgttgccctgtccccaccctggtcccagacgggccgccgcggggcgcctcctgccctctcctgctctcaggcgcctctagagcgcccaggggcggcgtcgcgggagcctttgctccacctgactaggagcgcgcggggtctgtgcctgccctggagggcagcgcctcgggtgctctccgacccggggttccctatctctccgcctgcttccgggcgcgaggagccctcgccccccaccccttgtttccggggggggcggcgccctgggtgtccttctctatctccctgcgggcatgggacatcctttctcactcctctgtgcctccgggcagcgccctgtgttatctcccattgcccctccccgagggcctgggttcccctttccactcctcggtcacatcactgcgggcccctttcttccccagtccctccagtagtggggcatcctttcctccttcccagtccccctcccagaggacaccaccgccgcggggtcactctcgccctccctctgaatgcgtctttatctcttctcttttcccgagggtgctcggggcatctatgggtacatctgtcgcctgccttcagcccctaccccgacggaaacgctccccactatcccgccacctggtggtcgcagcctcctctcttctgcaggagtgaaggcagatgggggttacagccgagctcccacctacccccacaaaggc

SEQ ID NO: 37260 - DNA, 211 bp, Homo sapiens; identical to SEQ ID NO: 19312
  chr16:27791003-27791214
  hypo

SEQ ID NO: 37261 - DNA, 177 bp, Homo sapiens
  chr16:28887668-28887845
  hypo
cgactccctcgaagctgcccatctctccgtctgcccctctccatgtttgggcattcccactgctgtaagacagtagcccctgtcactcctccaggtgccggtggggagacgccggccagcgccaaaagccttggcgggtgtgagcctgagtccagcggagacggtgggtgctgggcc

SEQ ID NO: 37262 - DNA, 420 bp, Homo sapiens; identical to SEQ ID NO: 24002
  chr16:29169952-29170372
  hypo

SEQ ID NO: 37263 - DNA, 575 bp, Homo sapiens; identical to SEQ ID NO: 25155
  chr16:3078144-3078719
  hyper

SEQ ID NO: 37264 - DNA, 397 bp, Homo sapiens; identical to SEQ ID NO: 19317
  chr16:31712178-31712575
  binary

SEQ ID NO: 37265 - DNA, 543 bp, Homo sapiens; identical to SEQ ID NO: 19318
  chr16:4233245-4233788
  binary

SEQ ID NO: 37266 - DNA, 366 bp, Homo sapiens; identical to SEQ ID NO: 23098
  chr16:4363872-4364238
  hyper

SEQ ID NO: 37267 - DNA, 77 bp, Homo sapiens; identical to SEQ ID NO: 19321
  chr16:4438405-4438482
  hypo

SEQ ID NO: 37268 - DNA, 507 bp, Homo sapiens; identical to SEQ ID NO: 15638
  chr16:46683305-46683812
  hypo

SEQ ID NO: 37269 - DNA, 890 bp, Homo sapiens; identical to SEQ ID NO: 14689
  chr16:4986642-4987532
  hyper

SEQ ID NO: 37270 - DNA, 771 bp, Homo sapiens; identical to SEQ ID NO: 28648
  chr16:54966651-54967422
  hyper

SEQ ID NO: 37271 - DNA, 218 bp, Homo sapiens; identical to SEQ ID NO: 19325
  chr16:56691542-56691760
  hyper

SEQ ID NO: 37272 - DNA, 1917 bp, Homo sapiens
  chr16:67197713-67199630
  hyper
cgtggcgtgattgggcgacttctctcccccgtccccgtggacgtaagcgctctgagagggaacggggggggtgtccaggcgcgccccgagtgctagtgccttcttttgggattgttgccccccgggtctttaccgagttgggaactgtgatggcatcgggaccagtcctgggcgccctgagaccactcgctgctctcaccctctgcagacgccccacccgctcggtcctggacacactgcccccctctcttgcctccacccctctgcggactctgcagctccgcggccccggcgcagggagagggagggcacgggcgcgggccgggcctcaagggtgagtgtgaaataaacaaatcctgcagtgtttctgcgtcctattaaaggcggggtcggatctgaaagggaaggacagggaacgcgcggggtaccggaggagccatcccggcagaggttgggtttcctcaagagcctctggacgacacagctgcggggggtcagggtcggggcactcacacccttggaatgactacgtcccggggttcggcgggagggggcgtgcttccctgcccccccttcctatctgcttgccctgcctggggcttcactgtgcctctggccattaccttctaggacttgcccagcccacaccaggtcgcgcaccggcgatttctcctgtagaacaaagaaggaaatagagggaccgagaggggtgggactcgaacccaagtctcccactcatctcaccccaccccaccccactccaccccaccccacccctccactccactccactccacacatcccatccagccagccttttctgcctgctggtgcctcggccgctgtccgagccccgccccgcgggcttgcacgtggcccccgcctgacccggcgccccggggcggagtagggcggagcgggcggcaaacgcagcactttccgcggctttgacgagcccgcagcggccgggcccgagcgcagagccgggccgagactgcaccatgcaggaagcgccagctgcgctgcccacggagccaggccccagccccgtgcctgccttcctcggcaagctatgggcgctggtgggggacccaggcacagaccacctgatccgctggagcccggtgagggccggggcccctcgattccccctgtggtcccggggtccctccacgtcagtgaacacccatgcccgcccaaccccctcctgagactgggccgtggatccccggatttggccattcagagaagttcaccttggagggggtgtgcgagaggggggtttcctctgcggccgaagaagggttaggagcctgccttctgaagacctagagtccgagggaccttcgaggccatttagttcccaccctaccccatccgacagatgggaaaacagaggccgggagatgggaagggctggtctagctcagggtcacattgcggggctgggaaccccgtcagcctctcctttctgagaactgagtatggagtcagggtctggctgggggtagggactcactgtggtcgctccaggctaggcctcggagcccgttctggcctggcctcgacccatatccccgtaagcggcaggcctggacccaagagtgagcatgagtgtgtgcgcgcgctggagcgcaggactggccgtgagcgggcaccgctcaccctcctggtctccgcccgcacggtgggcgggcggcgttcttggtagagcgggaccagtttcctcgtaagcgaccagagccgtttcgccaaggaagtgctgccccagtatttcaagcatagcaacatggcgagcttcgtgcgccaactcaacatgtgtgagtccctacggccgggcggggagcggggatgggggactcggtgccggggatggggcgacccacgcccccacgccccactccccagacggttttc

SEQ ID NO: 37273 - DNA, 420 bp, Homo sapiens; identical to SEQ ID NO: 25179
  chr16:67678724-67679144
  binary

SEQ ID NO: 37274 - DNA, 749 bp, Homo sapiens; identical to SEQ ID NO: 31290
  chr16:73099891-73100640
  hyper

SEQ ID NO: 37275 - DNA, 729 bp, Homo sapiens; identical to SEQ ID NO: 19330
  chr16:77756212-77756941
  hyper

SEQ ID NO: 37276 - DNA, 142 bp, Homo sapiens; identical to SEQ ID NO: 19331
  chr16:834381-834523
  hypo

SEQ ID NO: 37277 - DNA, 1117 bp, Homo sapiens
  chr16:86530886-86532003
  hyper
cggccacctacttcgtcgggaaagacagtccagcgcccaccggcccgtgctcgcccgcctgccgagccccgagtcccggcaacgcgccccgggtgctccggtccactcggcacacgccgcgcgcggggctcggccgaggtggcttcgggtggctctgaagcctcggtcttcccggctcccaggacgccccccccgcccccgcccctccattcagcctgtcatctcggccctccgccgcctccggagccccgacggaggtgctgagttgtcaacgcaaattcctagttaagccacttgttgataaaccctctaggcaaattggttccgtctttacctgcccgccccgcccccgcccccggccccagccggcgcgcccctaattgctggaggagctcgacgccggcggcggcctctgcagcgagctaattgagttggaacccgagcggtcttcgttaagccggacgcaaggcggggacgggggaagggggcgggaggtgagacgcagcctgggacctccggcctggggttggaggcccacgcttgctggggtgggcttttggtggaggaagagcaatcatgcggagggctctgccgccgggttaagtggacgcagcgactatctggcggttctcgggggtctgcgttccctggttcacaaccaccccacccccacgcgcctgtgcacatgtccctcccgccgcgcagggtctccgcgggcgcgccccgccccaaatagagcttactacagtaacccgggagtctcacatctgcgcgtcccccacccgcccacccccgcaccgcctgtaccccaatttcggcccgcacccgaccaaattttaaaaattgggagggttttggggactgcaatggaaaatcagctggccccggccccagactccgtctacactggcacagacaggtggagtacaaagccggcttcctggatgattcaggccccaaatcgtaggtagaaatgtgcaagtaatggaccttcgatctgctttccctcccttagcacataatccgtagtattcgctgtttcccgttgcccctatagacacgccccaaccaatctcgcactgtaagtgcatttcttgggttttccggggaaaagcac

SEQ ID NO: 37278 - DNA, 497 bp, Homo sapiens
  chr16:86539118-86539615
  hyper
cgcgctcctccggcagccgtgaagtttcgtttcccccggccgggtcctccttccctcccttccgaagccccgaggacaggccgcttccctcccgcccagctcccgcgtcgggtcctggctggccgccctaccttgaggcgtcgtttgaacctcgcctcgcggggggttggagggagcgggggcgggcgaggagggcgcgggcccggcgttaatgcggagcgggggcggcggcggccggcggggcggctgccctcgcggtgggtggtcggcggccccctgccccgcccgcgcggccggcctgggctccctcggagcgggatctggttccccgctcgggttacggcgcgctctcggcccgggcggcttcgcttaagcaattagctagtaaaaataccttgggcctggggagtgggagacgttgcagtcgtgtccgtttttacacacccacccccgccctgctcggccagtttcaggattcctggggccagagatggggc

SEQ ID NO: 37279 - DNA, 332 bp, Homo sapiens
  chr16:88096563-88096895
  hypo
cgtgacctcatttttgctgcttcacgtttaagatctgactgctgagttgtcctcatcaccaatttcaaatcaagcccaaatccacaaactatatctcagcctcctgtgtgttttaagaggctgcgccgtgcatggaggtgccctcagcctgcagcagcgcagccaagcggagggcgcaccgcggccttctgtgtgactgttctcagagcacgctgtgccttcatttctgcgtgtttcacggcgttgcccttgtggtatctgctgaccccggttcccttatttctaggcccagtgcctcggctttcgcctctcagccctcccctcccctcccc

SEQ ID NO: 37280 - DNA, 83 bp, Homo sapiens; identical to SEQ ID NO: 19334
  chr16:88292860-88292943
  hyper

SEQ ID NO: 37281 - DNA, 500 bp, Homo sapiens
  chr16:88496873-88497373
  binary
cgcaggcccccgggagccgcgcagaccccgcgccccgggtcccgagagccgccgccctccccgaggagacccgcagctcccggcgccgccggctgccccccaggaaggaccccaggaagaggaaggctcggggcggcgcctggggcaaggagctcattctgaagatcgtgcagcagaagaacaggcgccaccggcggctggggcggcgggcgggcaggtgcggctccctggcggcggggaggccccggcccggagctgaggaccgcaggctccgcgagtacgacttcgcctcggagtccgaggaggacgagcagcctccgccgcggggccccggcttcagaggccggcggggccgaggcgagaagaggaaggaagtggagctgacccagggtcccagagaggatgagccacagaaaccccggaaggcggcgaggcaggaagccggcggggacggagcccccgcgaaccccgaggagccgggcgggtctcgcccgggcccc

SEQ ID NO: 37282 - DNA, 62 bp, Homo sapiens
  chr16:89985115-89985177
  hyper
cgtaaaggagatccgcggtgtgagggaccccctgggtcctgcacgccgcctggtggcaggcc

SEQ ID NO: 37283 - DNA, 173 bp, Homo sapiens; identical to SEQ ID NO: 19336
  chr16:9056313-9056486
  hyper

SEQ ID NO: 37284 - DNA, 944 bp, Homo sapiens
  chr17:15244306-15245250
  hyper
cgaaagctttgcagccaagctaaacagaaacgactttgggcggtgagagaacagctttgatctgaatttaaggagctcggtctacaagaccaggtgattgaactctcctccccgtggctgcagatctgaaggctcggctattgaagcagagggggacgaggaacagcgtgcggggcggccagcaccgcagtggaaaggcacagcgctgctaacgggtaattattagaattaagaaattaaacgaattagcacagtgtcgggggttcggatgccccttccctgggcatcccttgaaaacccttgaaaagcatcagaaaggtaaattacgaggaaaccaacgtctgggtgggaggtgcctgtggatttgtacggtttttatttggaaggaaaagtgaagatcgcggggaggaattgcagggtgtccgcgacctcccgcgatcctgaggcgagaagttggagtcctggttggcgaagggggatcctttggggtagtcctagaggcaggctagagtcagcgagaccactcacctgtcggcggatgcccggcgaggggcgggaaggggctgtgggaggaaggggtcgcagcctaccacctgcagccctcgactggggcccagaccagtctggccctggccccgcctttcctatctgtgacgatagcagcgcctgagggccactcagcggccgccccggccggctcgccggagctgactggccagttataggagaggcgggagctgtcaggccaggagggaaacccgtcgggcggcggttactatggacgcgctcacgcttagtaaccgaggctccccgccctccgggagacctccttggtttgggaggtgaaaggggtgaagagtagcccaagggagaggcctcggtgatttcccgacctctcctgtgaagcctgattcggaactcttccagctgcgaagaacttggcc

SEQ ID NO: 37285 - DNA, 139 bp, Homo sapiens
  chr17:1546311-1546450
  hypo
cgttcctctgctttgtatgttttttgagaggagcaccgcgaagccctgacccctcctcccggcgccccgccgcggccacctgtctccgctccgccccgcccgctcacaggtctccgcgcagcctcgctcacctgtgtcc

SEQ ID NO: 37286 - DNA, 1225 bp, Homo sapiens; identical to SEQ ID NO: 33499
  chr17:16283879-16285104
  binary

SEQ ID NO: 37287 - DNA, 811 bp, Homo sapiens; identical to SEQ ID NO: 18482
  chr17:18907431-18908242
  hyper

SEQ ID NO: 37288 - DNA, 735 bp, Homo sapiens; identical to SEQ ID NO: 28684
  chr17:1901335-1902070
  hyper

SEQ ID NO: 37289 - DNA, 328 bp, Homo sapiens; identical to SEQ ID NO: 19344
  chr17:1954658-1954986
  binary

SEQ ID NO: 37290 - DNA, 429 bp, Homo sapiens
  chr17:26903726-26904155
  hyper
cggagtcccaggtagcaggacgaggatggcaggggaagagccaaggaaatgaagcggagatgttgagtggctcccgccttgcctggccttacctgtgcgcagccagttagcagccgcagccacaagcacagctcgggttctgatccgcaaacagatgaggctgcagccctggctccctctggtaaatgaggctgcggatgtcgcagagctacgtgactcctccgggggcgtggcctgcatgccccgccctgaccacaccccctccccaggactggtgtccggggcaagaccacgccctcagaggcggggcggcgaggtggagtgagcgccccgccaggcatccgtggctgttagggactgccctcccacctcggggagcctggccatgaccttgcgttcatttctgccacaatccctttaccacgtgcc

SEQ ID NO: 37291 - DNA, 897 bp, Homo sapiens; identical to SEQ ID NO: 25217
  chr17:27038294-27039191
  hyper

SEQ ID NO: 37292 - DNA, 807 bp, Homo sapiens; identical to SEQ ID NO: 24058
  chr17:27940157-27940964
  hyper

SEQ ID NO: 37293 - DNA, 176 bp, Homo sapiens; identical to SEQ ID NO: 32645
  chr17:29020880-29021056
  hyper

SEQ ID NO: 37294 - DNA, 165 bp, Homo sapiens; identical to SEQ ID NO: 19349
  chr17:31264142-31264307
  hyper

SEQ ID NO: 37295 - DNA, 754 bp, Homo sapiens
  chr17:37757116-37757870
  hyper
cgtggagcttccagagtatcagggttttcctgccactgatcctcctgggggtcggtgtcccgcagtgatttatcgggctgtctccccgagtcacaaaatcagggctgggggttcactgggggtccatagctcactgtccgagtcatggctggaacgcagctcaacaatgaagggacaggaatggagctcaacagtgaagggacagggagtaactgctttccttccctttcccgccagatgggcaaatggcctggactcggagatacctctttttctctgtcatcttccaaatgctggacttggaatggggtctggaaaatcaagaggaagatgtcctcctgattgaacttggatccagccgtcgggttcagcggcccaggggttgagctgagccggctggtggacgcttggagagcctgccgctgaggctagggcaagaagggcgtcctctctgtgccttctccccaggccaggcacagcgctggcccctttcctcctccctcccctgcttctgttcttggagcatctctgggtgtgtgtgcgcaggcgggagagcaagcaagagaaagagacctgcgaggggacgtttggggccgcttgtccgcgcacatcttcttctcctgctcatcacaccatctcgccagggaagttgagcactggggaggagggtgatgagaggctagagccagccagagtgcagggaatgtggggggaagggtcagaaatcgggaaaggggcgactggtgtggatgcc

SEQ ID NO: 37296 - DNA, 797 bp, Homo sapiens; identical to SEQ ID NO: 25231
  chr17:37760007-37760804
  hyper

SEQ ID NO: 37297 - DNA, 297 bp, Homo sapiens; identical to SEQ ID NO: 14722
  chr17:38020387-38020684
  hyper

SEQ ID NO: 37298 - DNA, 796 bp, Homo sapiens
  chr17:39683530-39684326
  binary
cgaatgggccccagggcgggagagtgggaggaggccaaagcctgagagggatgaacactagacccttccggccagagaaacggaatgcaggaggccctacgctgcggtggcagagggggcaagactggccccgggtggaccagatcaccaaagccaaactctcgcatcttcctgcggcagcgcggcccctggcctagacctctgggcactctacagccgggtcccatctcctcccactcttcaggcctcgctgacccgcgtcccttcttcgtcccggggctccaaccttgcccccgccacctccagaggccccacccacttatctgccctgcccagttctcctcccctttccaccaccccggcctctgcatccagccccgaggtcctgccccgcacgtctcctgtccccctttactcggccccacctgtggaccttcccacgtcctaacgggctcctgcccgccgccccgcctggaacctcgcccggcccgcggggctgggtttccgcggcaggtgcactgcacttcccgcggccgggcctccgcccaccttgtcccgcaggtcctggatggtcgtgtagtagtggctgtagtcgcgggagggcccaggcccctgcttctggtaccagtcgcggatcttcacctctagctcgccgttggccgcctccagggcgcgcaccttgtccaggtaggaggccaggcggtcgttgaggttctgcatggttagcttctcgttgcccgccagcagcccgtcggacgcggtcaggacgccgccgtagccgccgccgtaggccccc

SEQ ID NO: 37299 - DNA, 190 bp, Homo sapiens; identical to SEQ ID NO: 26478
  chr17:40558083-40558273
  hyper

SEQ ID NO: 37300 - DNA, 123 bp, Homo sapiens; identical to SEQ ID NO: 19357
  chr17:4137086-4137209
  hypo

SEQ ID NO: 37301 - DNA, 227 bp, Homo sapiens
  chr17:44849684-44849911
  hyper
cggtggtgacttaaaacgttcaacgcggagtgaatgggtagcgctcccagagccgctttcccctggctcttggccggagacgggaagagcgatcagaggtgactcgcttttggggagcgcgtctagacgcagggttgtttgattcagcgctacctggcccgaggaggggcaccggaaagcgctgagaccaacacaccgacaagaacgagtttgaaatgcaaaccgcc

SEQ ID NO: 37302 - DNA, 1283 bp, Homo sapiens
  chr17:46655260-46656543
  hyper
cgacgggctctttgcacgcggagtgggacgggctggggtgcagggggttctgggcgcagggaggcggcggggggctgctgctgaccgcctcgcagcgctggccgggctccgggaggagggccccggcgggtggcggcgcaggagcccgaggggacagaccgggcggtggcgggggcggcgggggtggtggcggaggcggcgggggcccagggtcccggcaggccgcgtagcgctgcacggtgcacgccgcgcgccgcccgaagcccgcctccggctggaagctgctctctcgcctctggccgccggcgtagtacccgggcgagtggtcgctgggtaggtaatcgctctgtgaatattcctcgcatggagggaacttggggtcgacatagtttgagttgatcaaaaaagaactcatagccattaatttctgggaattgcccacaaaatatactaaaatttattccgacccctgactcgttttcctgtttccgaaagccctcctacttactgtcaagtgaacaaagttaggcgcccacgtgatcctccgagccaatggccgccccgcctgcgattcccggataaggaaatctgctcacccggaccccactccagccaaagaggtttatttccccttcttcccttccccctccccacccacccacccaacaccaggatttacatagggctcctgcggggcgaccccctccttgcctcgctctctccgggatcagagagagagcgagagagagagcgcgcgcaggttgcgactggagggcctgttggggcgctaggcagagcgcaaaccctagatcccttaagaagttggggctcccggtgtagccctcctgttctgcctcacctctgcccagcattctgtaccttccaaaggccccagtctcctcccctcggcgggagggagcgctagcaccctgcgtctctatggggagttaggttactggcgggttgggggctccgtctcgaaaggggaacccatacgggggccagagcacagagcttggggcttttctctgcagctggatggggaagggtaggggtgagagaggaggcgtccagagctagagggcgggtgcgcagagggacttgtcagagatgaatggaaccgcgggcggatcgataggaaattcatgcactaattcggggagacttcgccttccaaatctcatttagctgcacggttagctagactgtgtccgtcagtccgtctgtcccccttctcctatccactcctccctttaacccacacggcccaagcctggagaaac

SEQ ID NO: 37303 - DNA, 909 bp, Homo sapiens; identical to SEQ ID NO: 31350
  chr17:46674937-46675846
  hyper

SEQ ID NO: 37304 - DNA, 819 bp, Homo sapiens; identical to SEQ ID NO: 24071
  chr17:46810263-46811082
  hyper

SEQ ID NO: 37305 - DNA, 371 bp, Homo sapiens; identical to SEQ ID NO: 19361
  chr17:47439801-47440172
  hyper

SEQ ID NO: 37306 - DNA, 626 bp, Homo sapiens
  chr17:48639236-48639862
  hyper
cgcgagcaggtctcgtcggtaacccgggcttaccccacctgcgtacacacacctcagtcttcctgggttgggggggtggggatccaggccaggagaagagagctgtgccccgctggctcgcagctggacgccctccagatgtggtcaggggagggtcgtcatcctccagatgtgggaagcttcgggagcctgggagctgtactctgcccgcgccggttagcgagctgggtttggtttccgagtttggtggggggtgggtgggggcggtggggaggaagctgcggggacggaggaggggggaccgcaatctcctgggtttccctccttcccccgccccaaagtttgcggcggattctagggtctgatcccccaacctggtccttgaggctgaggtttttactgacctagaaggagatgttggggggcggggaccaggtcctggcccacctcaccccccacctcgcgggttggaggcacaacaaggagattccggcggcggctgatgtcaggggcgcagaatgagaacaagatgtggtggaggggagctgtctgcccccggagctgggagtggagcccctttccgctagagcccagtgccgcgggtgcctcctacccgatctccattc

SEQ ID NO: 37307 - DNA, 301 bp, Homo sapiens
  chr17:56405993-56406294
  hyper
cgcttgctgggtggctgggctggtcctaaggaggcctgggtcgatgggctgcttgcctcatagtctcagcccctgctggcctctgctctggggactgcaggggtcccttacagtccaggagcctcgagatggtgggctccgaggagggctgagcctcagaattgggtgggggggtgagccgggaagagccagccctcccctcctcctcctcctcctcccctcccacccaccaataggaagtcggctgctggtttccatggtgatggcgctggactggtgggctgaaccggctgacagggtc

SEQ ID NO: 37308 - DNA, 80 bp, Homo sapiens; identical to SEQ ID NO: 19364
  chr17:56439864-56439944
  hypo

SEQ ID NO: 37309 - DNA, 706 bp, Homo sapiens; identical to SEQ ID NO: 26501
  chr17:58212602-58213308
  hyper

SEQ ID NO: 37310 - DNA, 421 bp, Homo sapiens; identical to SEQ ID NO: 31369
  chr17:58228061-58228482
  hyper

SEQ ID NO: 37311 - DNA, 946 bp, Homo sapiens
  chr17:59475272-59476218
  binary
cgcgcgcgcgcgactttgcgaatgtattcacggattcctaggccggtacctgggttcccggctaaggaaagctgccctggttattatctggtcacctcaccggctgcgcaaacgtgtccacaacgggtccctccccgagaggccacatctcgcctaaggtggagccagcaggtatttgcctgtggaaaactgcagtggatcctgccccgtctgcgtagactgcgcagctcggagtcaaagattcgttctggccagagaggaggtactaagagaggtgcgacctagccaagaacgaggtcgtggagaaaaccctgtgggggcggcgctcacatatgcggtgatgaggagttgtgagggccctggggtcggccccgaaaagtagggataacggtcgcagaggccatactgcttccgccggtcccgaatccgcactgccaggagagatccggccttcaaacgctgctcccaacgttcaacaacgaagtgccctgcgaccggtgtgcgcagtgggcgggcgcctgcatgggtcaatgttggatgtacgcgcccaccacgcggttgtacgggtgggaatgtcacccgtggctagtgcatgctctgtcttttccttcagaaaacgaccttcaggaatcagcctgagtgttcgcgcccgagcccgattggaagcaggtgcgtggtcgcttcactctccccgtgcacaccttgagttatagctctcgctgcgcacagagggcaccacacggggcccgacacacacacacacacacacacacacacacacacacacacacacaccatcacttcatgggggggaaactgaggctgccggaagacagaaaacgaagactgatcacagaagagggggcttcaatcacaggtgctcgcagacaccccaactccctcacgcgttactcagcactccttaacttaggagacgtgcgcttcc

SEQ ID NO: 37312 - DNA, 910 bp, Homo sapiens; identical to SEQ ID NO: 25260
  chr17:59531682-59532592
  hyper

SEQ ID NO: 37313 - DNA, 897 bp, Homo sapiens
  chr17:59533751-59534648
  hyper
cgccccgcacgaagtcccggaatcggctggagagggccaggggtcctctggcgagtgtggacctgggcgagtgactcgttgtgtgctgtgcccgcaggagatgctgcaggataagggcctgtccgagagcgaggaggccttccgggccccgggcccagcgctcggagaggccagcgcagccaacgcccccgagcccgcgctggcagcgccgggcctcagcggagccgcgctaggcagccccccgggacccggggccgacgtcgtcgccgccgccgccgcggagcaggtagggctgcgccagccgtcgggtagaagtcgggcgtcggtctgtctgcggggccgcctgtgtccgtctttccgtccgattgtcggcaggactcgctttcaggaggacctggctgcattcaggacggtctgcccgttcgttctccactggacatggctcgctttctctgccttttgggtccttctccactttgagccctcggggctactctgggacaagcaagagctagagctagagatagaggagagggcggtaagagagagggagacccccgtagcatctgagcgagcctggaccaagtgtccagctccaacaacccgtagagggcctgggacccaacggcgagggggcaggaggaggccaccccgccggtgcgcacgggagccgctgcggggatccgaggcctctgggacgtcgccgagggcttcacagtgataatcggacgatcacagcgcacgggatgccgcctggggatctgtgtgcactatctgcaggcgcgcgcctggccgagggtgcgtgcgcctctccctgtctgtgtctgccccgggagcctgtggcgatggcccgccacagaaatgttcatgagtgagcaggagtgtcgtctaacctgc

SEQ ID NO: 37314 - DNA, 448 bp, Homo sapiens; identical to SEQ ID NO: 32665
  chr17:60885408-60885856
  binary

SEQ ID NO: 37315 - DNA, 765 bp, Homo sapiens; identical to SEQ ID NO: 29984
  chr17:62777091-62777856
  hyper

SEQ ID NO: 37316 - DNA, 406 bp, Homo sapiens; identical to SEQ ID NO: 19370
  chr17:65822956-65823362
  hyper

SEQ ID NO: 37317 - DNA, 110 bp, Homo sapiens; identical to SEQ ID NO: 31379
  chr17:66434339-66434449
  binary

SEQ ID NO: 37318 - DNA, 409 bp, Homo sapiens; identical to SEQ ID NO: 14742
  chr17:6939640-6940049
  hyper

SEQ ID NO: 37319 - DNA, 70 bp, Homo sapiens; identical to SEQ ID NO: 14745
  chr17:7198346-7198416
  hyper

SEQ ID NO: 37320 - DNA, 338 bp, Homo sapiens
  chr17:72270173-72270511
  binary
cgtaggcttggataagcgccttggcaacgcccctacaaatattcatgatcattattagtatgttaccaacctattggttaattcttctcctaactcaggagacctccaaaaagaagagggatggcctgcgcttccgacgtggcaggaaaggagtcacgtgctccggggtccttccgcgtcgccccgcgcgtccggagccaggccggggttgccaagcaaccggtaaacgccgccgtttgaggagcaccggagccgcgaccgtggattgaacgcttccccagagacccagaagcagaaggagcggacccagggtaaggggcgggcgccaggaggacgtc

SEQ ID NO: 37321 - DNA, 427 bp, Homo sapiens
  chr17:76123746-76124173
  hyper
cgagtcctgccggcctctgccctggactcctcctgcgctcaccctcaggaactcagggctcaaagtcggccgggttgaagggcgctttcctcggacaggcaaagcccgggggcgccccgacagagcagctccttgcaggggtgccagtcacaggaccggacggcgccctccctcagtgtcctgggtgccatcttcgggcccaggccccacaccaccccctccctccagcaggagcaaagacgtgggaaaaccagcccagagctgggtccgaggcggccccacccagcctaacacgggacagctgccgaaagaggggctgaggacgccccacccagtccctagagctggaatcccttcctccagacaggcccttctaagctcagggaacccggggactcgggcacccagcgccccagcactccgcccc

SEQ ID NO: 37322 - DNA, 409 bp, Homo sapiens
  chr17:77216290-77216699
  hyper
cggctccacagcaggctcccggggaggaggggaggagacccaatcagggaagcggccgctggcggcaggttggtgggggtaggggcttggtcccccaacgctggcactcagtttagctgtcacttgcagctgtcttaggaagtgcggctctcctctctgcctcccgctcgctcctgctcactccaggtcctctctccctctccctgtgtctctgcctctcgctttatttccccaggttgctcagctccgtgcctgctctccgctcgcccatcgatggggtcctgcccggcactgccctgtcgcagtcactcctgctgcctggatctctgttcagagttgaactacagcgtcctgattccagcgctcatcaagcaggggacccaggggagggtgtgtgtgtgtgtgtgtc

SEQ ID NO: 37323 - DNA, 987 bp, Homo sapiens
  chr17:77776818-77777805
  binary
cggtccagagttgggccggacaaccgcaacctggaaggagtccgggagtccttgggtctgggcgctcagttctcacggtctggggagaaggggctcagacgggacggactaggcacagccaggggcggggactgcgagaggcgaggggaggccggcagggtgtggcggcagagcagcccgggacaagtgagcggcctagagatcaaggccttggagtcccgtccgagagcaggacgttatcagaaacctccagccccaacccctgcctggagatgcccggggcgcgctgactctgttctcgcatcaccccgggccctggctcaacgcgtgagcagcctgtggttccagataccccgagtggagagtttgaccccagattctgcctgcactgacaggcttggcctggcggttacgagccacggttgatgagcgcccctcctcccgtgacccagctcatgagaaaggcggggagcaccaaccctcccacgggaaaacacggggagaggctgggcgagtcaaggaatggtggcaccagagcctgggcgcagagaggcagctggacctcctgggctcccttgagccggagctccgccagggtgggcacttctgcctccagcgatgctgggtgccacagtcctcccgcctcctcctggaccacacgcggctctccagagtcccagggaagctccagggactcctcggactccgcctggcgcttcccgttttttcatttcctaccccacccccatgcagaaggaattgaagtgacttttttgctgggacgtcgggacctcaagtcagttccaaagtgggagtctctcagccggtgccgttcccttgcgagattgttaacgccaagagccacagtccagcttccccttttagagatcagaaaatcctaagtgcagggcctgccgggtcattcgagaaggcacaagctgcggaggccagtctggggcctctcgcagaacctcggggaacagaggc

SEQ ID NO: 37324 - DNA, 749 bp, Homo sapiens; identical to SEQ ID NO: 32675
  chr17:77778310-77779059
  binary

SEQ ID NO: 37325 - DNA, 931 bp, Homo sapiens
  chr17:77788305-77789236
  binary
cgatcgtatttcctggggacagctcgacccccaggggagcacgtggccaccagctctgccgccttcctcctcctgagaccgaccctaggagtcctcgtgccccagtctacctagactcccaggagcgtccggccggaagagacagtgggagatgaggaaactgagattgggagggggacgtgatggggtaaggccattcctaaggcttgtggcagagctgcctcttcaccccacccccatttctttcagatgcggagatcaaagcccaggctcactggtgggtcgggagctcactcctccaagtacacttggccaacctcggggagcccggcggcggcgggaggggcgcgggcacctgggggatgggggtggggagcggccagtctgctggtccacacctgaaaacggggtttccccgaccggatgcctgccgtccccccgcctccactctgcggggtcgcctgctagggtcgggaaaggaccctccaccgccaccctcggggttcggtcctcccccaccaacgtctgccagtccgcgtggattccgagcccggctccggaaaccagtctgaccacttcgcccatttcccaagcctccccgggcggcggccggccagcttccatggtgcggtgagccaggctcggccgccgcctcggccgccctgcgatgaatggctctgcccagaaggccggcgtccaagcgacgctcccgcccgcgcgcccggggcctccaggccgctccccgccccgtgtccccacattgcgaaacggacggtcggatgctccgctccagggccggggtcgcctgtcccctgccgacctggcgcagagccgccttctgcacccggccccgtgccgccctggggttgcttacagccgggctgtgccaccgagctgagcccggaatcgaatggcgggccgcggaaaaggc

SEQ ID NO: 37326 - DNA, 446 bp, Homo sapiens; identical to SEQ ID NO: 19379
  chr17:78935167-78935613
  hypo

SEQ ID NO: 37327 - DNA, 1019 bp, Homo sapiens; identical to SEQ ID NO: 19380
  chr17:79007528-79008547
  binary

SEQ ID NO: 37328 - DNA, 800 bp, Homo sapiens; identical to SEQ ID NO: 25281
  chr17:80186335-80187135
  binary

SEQ ID NO: 37329 - DNA, 107 bp, Homo sapiens; identical to SEQ ID NO: 6000
  chr17:8901441-8901548
  hyper

SEQ ID NO: 37330 - DNA, 187 bp, Homo sapiens
  chr18:12277197-12277384
  hypo
cgggtgctggatgacaaggaagagcggccatccctccggtcacaagccaagggcaggttcacgtgtggatagggatgcaggctgtcgccggctcttgagccaaacactgtgtttcgtttggctcaatgacgaatgttgaagatgcttttatgttctgagccacatgcacttggaggccgctggtcac

SEQ ID NO: 37331 - DNA, 435 bp, Homo sapiens; identical to SEQ ID NO: 19386
  chr18:12658128-12658563
  hyper

SEQ ID NO: 37332 - DNA, 48 bp, Homo sapiens; identical to SEQ ID NO: 19387
  chr18:19577719-19577767
  hyper

SEQ ID NO: 37333 - DNA, 525 bp, Homo sapiens; identical to SEQ ID NO: 24110
  chr18:24127669-24128194
  binary

SEQ ID NO: 37334 - DNA, 142 bp, Homo sapiens; identical to SEQ ID NO: 19388
  chr18:29598295-29598437
  binary

SEQ ID NO: 37335 - DNA, 180 bp, Homo sapiens
  chr18:29599675-29599855
  hyper
cgttagccgccaagcccctgaatgtactccttcaaaacccagccacaacgtaacaggaggtggcaggctacctgctttacgcacggtctctccaaaccggcggaaattacagagtaaaataactttctcaaaaccgcatagtacttagctaaaactcacagttggtgcaaagccgtggtc

SEQ ID NO: 37336 - DNA, 788 bp, Homo sapiens; identical to SEQ ID NO: 19390
  chr18:3246866-3247654
  hyper

SEQ ID NO: 37337 - DNA, 556 bp, Homo sapiens; identical to SEQ ID NO: 19391
  chr18:46502500-46503056
  binary

SEQ ID NO: 37338 - DNA, 202 bp, Homo sapiens; identical to SEQ ID NO: 28758
  chr18:57365422-57365624
  hyper

SEQ ID NO: 37339 - DNA, 125 bp, Homo sapiens; identical to SEQ ID NO: 19393
  chr18:60987974-60988099
  hyper

SEQ ID NO: 37340 - DNA, 460 bp, Homo sapiens; identical to SEQ ID NO: 19394
  chr18:74159178-74159638
  hypo

SEQ ID NO: 37341 - DNA, 510 bp, Homo sapiens
  chr18:74171117-74171627
  hypo
cgctgcagcagtaacggggcgccgggcccacctgctgcccctctcctgtgcatagggcgctctctccctgccccgagcttcggcttctcctccatgcacggtcactgctggaggcacactggacccagtgccagctcgggaaatcctgggccggtgacagccctgacccgtggccaccatccactcaacatcattgagccctcccacaggcacccaagctctctgaggacagccgtcctagcttccttcgtgggagaaaactctggccctccactgccggccagggaggcctcgcgtgccaagctggccctgagctcagcccaggatttgtgccattcaggacgtggcggccgtgtgcaccccatcgggcaccgcgtcgcctccctcggaatgtattccagcactgtctgccatgatgccaacagcaacacttctcaacaccaagcctttaaatgtccagcagctccacagcccgagtcagagtggcccagcctcccctggacctgatgc

SEQ ID NO: 37342 - DNA, 641 bp, Homo sapiens; identical to SEQ ID NO: 19397
  chr18:74323522-74324163
  hypo

SEQ ID NO: 37343 - DNA, 428 bp, Homo sapiens; identical to SEQ ID NO: 19398
  chr18:74770092-74770520
  hypo

SEQ ID NO: 37344 - DNA, 817 bp, Homo sapiens; identical to SEQ ID NO: 19399
  chr18:74844285-74845102
  binary

SEQ ID NO: 37345 - DNA, 904 bp, Homo sapiens; identical to SEQ ID NO: 30030
  chr18:77159824-77160728
  binary

SEQ ID NO: 37346 - DNA, 411 bp, Homo sapiens; identical to SEQ ID NO: 14779
  chr18:77497998-77498409
  hypo

SEQ ID NO: 37347 - DNA, 75 bp, Homo sapiens; identical to SEQ ID NO: 19403
  chr18:77724415-77724490
  hyper

SEQ ID NO: 37348 - DNA, 224 bp, Homo sapiens; identical to SEQ ID NO: 25315
  chr18:9912782-9913006
  hypo

SEQ ID NO: 37349 - DNA, 992 bp, Homo sapiens; identical to SEQ ID NO: 19404
  chr19:10381056-10382048
  binary

SEQ ID NO: 37350 - DNA, 457 bp, Homo sapiens; identical to SEQ ID NO: 28774
  chr19:10405940-10406397
  hyper

SEQ ID NO: 37351 - DNA, 298 bp, Homo sapiens; identical to SEQ ID NO: 22823
  chr19:10616220-10616518
  binary

SEQ ID NO: 37352 - DNA, 1137 bp, Homo sapiens; identical to SEQ ID NO: 24128
  chr19:10624638-10625775
  binary

SEQ ID NO: 37353 - DNA, 444 bp, Homo sapiens; identical to SEQ ID NO: 15741
  chr19:11004773-11005217
  hypo

SEQ ID NO: 37354 - DNA, 98 bp, Homo sapiens; identical to SEQ ID NO: 19407
  chr19:11172428-11172526
  hypo

SEQ ID NO: 37355 - DNA, 1111 bp, Homo sapiens; identical to SEQ ID NO: 19408
  chr19:11303560-11304671
  hypo

SEQ ID NO: 37356 - DNA, 903 bp, Homo sapiens; identical to SEQ ID NO: 30041
  chr19:11532739-11533642
  hyper

SEQ ID NO: 37357 - DNA, 433 bp, Homo sapiens; identical to SEQ ID NO: 19410
  chr19:11662248-11662681
  hypo

SEQ ID NO: 37358 - DNA, 409 bp, Homo sapiens; identical to SEQ ID NO: 35612
  chr19:11689277-11689686
  hyper

SEQ ID NO: 37359 - DNA, 935 bp, Homo sapiens; identical to SEQ ID NO: 26556
  chr19:11998456-11999391
  hyper

SEQ ID NO: 37360 - DNA, 268 bp, Homo sapiens; identical to SEQ ID NO: 19413
  chr19:1223581-1223849
  hypo

SEQ ID NO: 37361 - DNA, 482 bp, Homo sapiens
  chr19:12946904-12947386
  hyper
cgaatgccctgtctgcagtgtcaactattaatcctgtgcgggagaagcggaatccacttggccgagcggctctgcagctgagattggaggtggcgtctgtttacactgacgccaaagacccgaacttccgccgctccagtttgaccctttcttcgtccctagaatgtttgggggcgctagcgggtggggctgggttccaggtcttcttcgggtggtgcttaaaagccctccaggggcttaccctccaaggccggttacccggatctggacaccctgggctctgtggccagaaaatccaggtcttgatttcgcttgggccattgcagacacgcagccaggtcgactggtcctcattcactccggtcatgcaaagacagagggaaaacctggtttggattatcggtcacccgtggctcgggagggcagggctgccctttggccccgcctatatgtttgtccgttgtacaacggggtgggaggac

SEQ ID NO: 37362 - DNA, 645 bp, Homo sapiens; identical to SEQ ID NO: 17609
  chr19:13108022-13108667
  hypo

SEQ ID NO: 37363 - DNA, 360 bp, Homo sapiens
  chr19:13112089-13112449
  hypo
cgtgtgtctgcccgggtccctctccatgcctctccatgtctcccagcgtccatcactgggtgctacctgcatgtgactccacggatcatcgcacgccctgtctcttgtgtatttggtagtgggggtcggggagcgtgccaccatgcgtgtcagtgtgccggatgtagtctctgtgtcacggtggcgctgcgcacgtcaacgggtattggtgtaccggtcaccatctttgtatctgcgctttgtatctggggtgacagtgtcccagcgacatgcgtcacatctacagcagtgtttttctgggtgtctgtgcgtcacggcaaagagtgtatccgtgtgtctcacacacgtgttggcctgtcc

SEQ ID NO: 37364 - DNA, 182 bp, Homo sapiens; identical to SEQ ID NO: 19419
  chr19:13114040-13114222
  hypo

SEQ ID NO: 37365 - DNA, 1364 bp, Homo sapiens
  chr19:13208370-13209734
  hyper
cggctggactgctccggccgcgggtctccccgggcgcccctccctggggcccagcacccctcctcgccccatccccgtccgggtacgggggcgcggcaggggtccccggcccctcccccgcagaggtcaatgccaacgaacaaacgtcccctccctccctccctctccgccccgagcgcccttctttgagccagacgccaacttgaccctcaccagcattatcaggagcgcgctcagcaagttggtagtttcctcccccctttcccggcgcccctcccgcccccattcaacatctctcatcctatccccgaccccctccggggaacaccgggaaggctcgacgctccaggacaggaccagccacgcagacaggtcgatttgcccaggcccgcgcccgcacgcacgcacgcacacggccccgcacacagccccgccccaccccgcaaccagccctgtcgactgccttatacacccgcccccgcgctggccggccgacctagtgccttgttctcacccccgtgctggcggagcggacgccgcgctctgggtcccagaggggccgggtggctcagacgacccaccactcccccaccctgaccgtgctgaacagacccccccacacgagagaaaataaaggagcaataaagtcacgagaactttcgtcccccaatcgagagcccgaggggcaccccagccccgcctctgctcccccccaccccacccaccctcggggcgcccccctccccccgcaagccagcctgggccagccccgcttcggcccctcccgggagatccgtgcgcccgaccagcaccagcatcgcggaccgcaaaggccgcccgtcccgtcaaacaagtttcttcttaggctaagaaacgcagtatatacgagtatctctatatatagtactaatggatttggtgtgcttcccccttagcgtccccctccctctgctcctcctccttcagcctggtctccccctcttctctgccctccacccccgtctctgcactgagatacataagaaacaagggtagtttactgtctgttttgttttctgggttttcagtgtcctagcggaatgcaagtaggcagccagcccgtctgttccctctccgccccgccccgccccgcccccgtcactgcgcttctgttataccatctttgcctgactctctccggcttctccattgaatggctaatgtgtatgtgaaataaagaaataaagaaaaacaaacgcgagagcgcctgacccttcgctaacgcgaccgtgcgggactgggtcggggtcggtagggtgcgtccccgacttggattctgcgcctctgtccaagcgccgggagcgcagcagacgccgtcgacgagc

SEQ ID NO: 37366 - DNA, 526 bp, Homo sapiens; identical to SEQ ID NO: 25324
  chr19:13209965-13210491
  hyper

SEQ ID NO: 37367 - DNA, 1257 bp, Homo sapiens; identical to SEQ ID NO: 17613
  chr19:13265772-13267029
  binary

SEQ ID NO: 37368 - DNA, 150 bp, Homo sapiens; identical to SEQ ID NO: 19425
  chr19:14073146-14073296
  hypo

SEQ ID NO: 37369 - DNA, 1302 bp, Homo sapiens; identical to SEQ ID NO: 19426
  chr19:14073521-14074823
  binary

SEQ ID NO: 37370 - DNA, 214 bp, Homo sapiens
  chr19:1444961-1445175
  hyper
cggcgcttctcacatccccgcggcctcccccctggacggcagtttacactgaactcggcgccctcccctgacttctgaaggaggagtcctgggtggccccgaagcctccccggcagccgcacggctccgtccccgctccagggttcagctgaggcacctgctggaggcggcctgtccccgccgccctgctaaagcggcgcccctttctccggcc

SEQ ID NO: 37371 - DNA, 743 bp, Homo sapiens; identical to SEQ ID NO: 25329
  chr19:14584140-14584883
  hyper

SEQ ID NO: 37372 - DNA, 474 bp, Homo sapiens; identical to SEQ ID NO: 28797
  chr19:15343944-15344418
  hyper

SEQ ID NO: 37373 - DNA, 737 bp, Homo sapiens
  chr19:17716793-17717530
  binary
cgcaagccccgtccctccccgcccagcgccctccgcgcaggcgcagtgccgctcggccgaccgcccgcgctaaggcgcaggcgcggcaccgccctcctcggcggagcgcgtgtccgacttgagcttcacgaactccttggccacctcgtcgttgctgcgctgcgagaggattcgcagcaccgtgaggcccgtgtcgtccatgtggatgcggcggccgagcggcagccagcaggcggcgctcccgcgctgggccagctcacgcagctgcagcacggccagccccaccgtgcggtcctcgcgcgcgaagcagtagtccttgacgcacacctgcagctcatagcactcgggacccgcgtcggcgctcagcgtgctgcgtggggaggggcggaacgtgagacaggccacacctactgtgatgccccgcccacggccccgtccccaccgcatttgcgggccacgcccacaccggggtgcccacacctgtcacctcccacgctacgctagccccgcccctgccccgttacttgacctacaaccctgtgcttggccgcgcccacagcagctgaccccgagctgggccacgcccacgcctgttcttcccatttttccacccaccgaaaaatgaccgcatagttttacatccagctcccgcccctcagacaccgccctgcaaggccatgctcccaccctgagatacccgcgcctgtgccctctgccggctgaactgctgcccgcac

SEQ ID NO: 37374 - DNA, 618 bp, Homo sapiens; identical to SEQ ID NO: 25345
  chr19:17958343-17958961
  hyper

SEQ ID NO: 37375 - DNA, 636 bp, Homo sapiens
  chr19:18336722-18337358
  hyper
cgcacagcctgcctgccccaggccggcgagggtcaggaggagacgtgagcctcagcccgtcccactctgggcctcacagctggaaggagacagacggctggtcccctgggcctatatccaggcggcgggtggagacagacggagacagagagagacagagtcaccaactgcgagacaaaagtagggtaaggtagggtagagggagagagatacagagaaagcgagggagaggcagagcgtccaagcccggactccggccccggccccagctgtccctggccttgtccctgtccctgcccttcccacctccacaccgggcgtcccggtgaccccgccaggccctctgtccagcctcaccacagcggatgggccaccgtgaagcgccgctgcaggcggatgctctgattcaccaaaagcttcctgaagagcccgggggagccgcgcggggatccccgaggggagccgggcccggggaccggggcgggcgcgggggggccctgcatcgccaggactgcgtggaggctggaccgagcgccggctgcgcgggaccttttctggacagctgcgggggcggggcccagcggggagggggcaaagggcgcatcggccccgcctcgaggccggcggctccctgac

SEQ ID NO: 37376 - DNA, 318 bp, Homo sapiens; identical to SEQ ID NO: 19431
  chr19:1853369-1853687
  hyper

SEQ ID NO: 37377 - DNA, 617 bp, Homo sapiens; identical to SEQ ID NO: 24142
  chr19:1856948-1857565
  hyper

SEQ ID NO: 37378 - DNA, 343 bp, Homo sapiens; identical to SEQ ID NO: 19433
  chr19:1862256-1862599
  hyper

SEQ ID NO: 37379 - DNA, 838 bp, Homo sapiens
  chr19:18714365-18715203
  hyper
cggctggaagaagggactgcaggaggcaggggcagcccagcttcgcagagatggcagccaaggacagggtgatcctggcccccagggaggccccctgaatgccagcgctgccctgcacttgccctcactgccccagatgggcgaggtggggtggacacggttcttgggccggccctgatgattttccggggcaaacttggctcgagggctctgtctcgctggagcctggaatcgcagttgcgcttggggcttggcccagggctcgccggaggtctccgcgtccgtgcgaaggagccggctgagcgggccagagccgaggaggcgggggcggccgaggggggcggggggctgggggccaggggaccgccctggaggtcccaggcagccagccgcccgctaattcggaattccttttgcatgaactcgggtgtgccagcgtctctgccccggcccacccaccgcttcctgcctgggcccccccaacagagtgggaggcacggccaggcctgcccagaccccaggcccctctcagcccttctagagtgggtctcactcctcctgcccccaccacccgccagcttggcctgggcaggaaggggctctctggggggtcctggctggggggcgctgcccctctgccacacccgcctggcctgggccggcgtggctcacttgccagcagctgcagctgccctcccggggctgggcgggggacaccgggcggcgacgggttgtagggggaaggcaaggccaggcgggcctggacagaccaatctcccacccccttagccccagccggtaaggtcagaaggacactttctcctcccgggatatgggc

SEQ ID NO: 37380 - DNA, 1410 bp, Homo sapiens
  chr19:18715787-18717197
  hyper
cgggggtccccatctcccgtcccgctggtacctgcagacactttacgacccacccgcctgctggtcaggtgctaagacacaccgtaagtagaaacatattgccgaggtgtgagaatcttttatttaatttcttccccccttaaaggaaaaaacacacttacagtgcccccccaccccctacaccttcgcctgctgctctactggctgaaaacaaagcttggcgctcacagtggcactcacaggcgctgcccaccgcctggcagagccgtcaggggccctgggagggcccgaggtagcccctcacctgaaagccaggggagagccaggctttcagcaagtgcccctagaagatgcccggaccctgccccttcccggaggagccctacaggcagcccgcaaacagcccagcacagggtggatgagcctgggagcagtgtgtgcccggcgacccccggggtggcccgtgcgcctggatggggtgcgtggagtgactgaacatctggggcgagtggtgcctgcctctgtgcccctgggtcgcctcccctgtgggatgtgtgtgaccgtgaatgtgtgtgtcggggatggaatgtgtgtgcgtccgcgatggtgcgcgaatgtgcacctgggatgcagtgtgcgcgagtttgagggcgagggtgacgggccacaagccagtgtgattctttgtgtgtctctgggtgtgtcccagagcgggtctgcatacggagacgtatccttgcgggggtgttccttggatggggggccccagagtgcctgaggccagaagtccctccagggcaggggtcttggcccgtagggcagcgggttcccagtgggccccctcaaagtttgggcccgctggtgcccggactcactggctcccgctccctctccctctcacccactcgctcacaaagattcctctcgctggaggctctccgcccgacgcagcctggctgaaaacggttctaagcgccgccggtggcggggactccgcggacccccgtgcgccgggtcccgcagggggagggcggtggcgccggcccgtggagacacaagtcccccgggaccccgggctgcgcgccaggcggccagagcggcccccctgcagccccgccctccccgtggggctcatccctccgcctgggggggcccgctgggggcccgcacccagcgcgccaaccgcgtgcgcccccgcctgggagcggtgccctgcagtcccaggggcccagagtccaccgaagcagacgcgtgcgcccgccacgtcctggcatgcagagggtctcaggccgcgatccccccagcccccgggggcctggcctggcgccctcggcccagctgcccaggtaacagggcctcgggcgcggaagcaggactctctggacagtggactgcggcgccgtgtgcccc

SEQ ID NO: 37381 - DNA, 374 bp, Homo sapiens
  chr19:18782968-18783342
  hypo
cggtcagatgcaggcccgcaagagggaggccaagtgcgacttctggggcctctcagcaagtgagggccaagggggcctctggggagccgtgtgaggtgggaatccgccccggacctggccagcttggaaacctgcccctggctctgtctccgaggaagcagctccagctcgtccgttctcacgggccctggagattcactttgcacggtgcagcctcggaccctgctcttcctcggggcgcctgaccgtggatctcagcggcctggcgcctaacacagagcctggcaccgacggagcatagctcgaatgtttgctgcacaaaggagaggtgctggggcgggaaggtgagggcagccttcttcacactagtggcc

SEQ ID NO: 37382 - DNA, 301 bp, Homo sapiens; identical to SEQ ID NO: 19442
  chr19:18836823-18837124
  hypo

SEQ ID NO: 37383 - DNA, 800 bp, Homo sapiens
  chr19:19738875-19739675
  binary
cgcctcccgtccgtgcaggcctcacctgggcctccagtcacgccgcagacaaggcgggctcgcgggggttcggggcgggctcgaggcccatggcccggcgactgcggcgggagcggtagagcgtccgggtgcgccctgtgcgggttgctgagagggcgcgggaggcggggtctccccggcgccccgcccccaccacctgggggagccctgccccgccccgccacctgggggagccccgcctccacggccgcgtcgggggcggtgtcgcccggaaccgcagcccccctgtttcctccccgcctcgcggcccctcagtcgcccctatttccggcgcgggacccccaccccggtacctgcacacctcatgcgcccgcagtttcgagcctgcggggctgagtcactcggcgacccgaaaattcccgccgtgaccccgcgctgcccgggcggagctccaggtggtcttgggtccgcgcccccgctccggacccccaaccctcccagccccaccccgctctcttcttcgtgtccaatcggccgccgagttacaagccactccctgatccgacttggctcccaccgcccggacccccgcccagcttcggctttgccagctcgcagtatcagcgagccgcggcctcctgtgcgaggcccacctctgcggccccagctgatcatcgggcgcacgctagggttttgcaatcccgcccccgtacccctcaccctgggacagcgctgccccctgcaaagcccggccctgccctgccctgccctgtggcttcctccctcggcctccctgcggc

SEQ ID NO: 37384 - DNA, 757 bp, Homo sapiens
  chr19:30865459-30866216
  hyper
cgccctgaagaaaggcgccttggcaccgcctcggtgcccaccagaaggtgcccggattgcctcttttgcgcaaagacaaagggggtaattttttggcaagaaaacaaacccaaggaaaacacaacaaactgagtgttgtttttttttctttccctcctgcaacttctcggaccgtctctgccctctctcctccagagagggcgagtttcatcctggagggaggccgggggagctgcgaggccacccccagccggcgcccgggcggattgcgagcccccgcgggtccggccgggggagcggagactggccccccgcccgggctggggcgcctgccgcccgcgagccggaagagcgccccattcacgagcaggcagccctggcagagggttaattgaggatcattgttgttggttccaggaggagcgaagcgcctggagatcgggcgcgcgggcgcggctctgggagcgggggaaggtgaggggaaatgggacatgatggcattaataatcgttaccaaagacggtgggagtaacaaaggaatgcgtctccgagacgccgcccagccccggggtgttttctggcgcggtcgcggtgcaggaacgcgagccccgccgccgagcctcccgccgcctgcgttcgttggcgcggcgcccggcggtagtgccaccccgaggccgagcgctgcccccgccggcccgcggctgccagccggccctgcccgcgcccgggccccgcgagcggccgcacttcaccttac

SEQ ID NO: 37385 - DNA, 336 bp, Homo sapiens
  chr19:31847946-31848282
  hyper
cgctgtctcggccaccaatcgggcgccgctttcctgcgcgggcgatggctcctctctggcgcggagggcacccacatttgcatgataaattgaccagactggcggcagccaatgaaatattcaaattaggctgggtggcggtagtaggggtggagtccctggggctgccccttggcgcggcggcgggagcgggcgctaccacctctccgtcagcgccctctggaggcgggacagcgcgggcggccgctctggcccaaaagacgagatggggggttgggggtttgggatgcaagggggtttgggaggggtgatggtggggtctgggtggtgcttcgc

SEQ ID NO: 37386 - DNA, 139 bp, Homo sapiens
  chr19:35589864-35590003
  hypo
cgccctgcgctgcgcgttgcctgcccgcgtggcgagccagcctgggatgcagttacgtgctccttccctttcaccgcccccagctccaacgatggcctccccacttggctagctaggatgcctccttcgccggtggatc

SEQ ID NO: 37387 - DNA, 205 bp, Homo sapiens; identical to SEQ ID NO: 19446
  chr19:3669713-3669918
  hypo

SEQ ID NO: 37388 - DNA, 286 bp, Homo sapiens; identical to SEQ ID NO: 31488
  chr19:3747832-3748118
  hypo

SEQ ID NO: 37389 - DNA, 636 bp, Homo sapiens; identical to SEQ ID NO: 30070
  chr19:38754883-38755519
  binary

SEQ ID NO: 37390 - DNA, 1050 bp, Homo sapiens
  chr19:40323996-40325046
  hyper
cggcgctgaaaaggcgaccgcctgtctctggcccggccggccccgcggcggggagggcaagcgggacaggaggcccggtgggtgacaacagcagccgccactgccaccgggggcggggagaggaggggacaagggtcagcccagggcacgcgggggaagagtagagcaggtggacgggggaggggcgacacgccccaccctgagtgaccaccagcccctagggacccggcgtcccgccccccacccaggaggccctcctgggcctgctgagaccggaaggcggggcccgactgagcttggcaatcggcacctgccatggcaacaactgtaccattggtcgctggtgccaagagctcagccaatcacagcctagggcagctgttgctaggcgacgaagaagcggcccgcggagctgagcccaaacaaagggcgggagtggggcccggctaccccctcccagcctccctcctgcaactgcttcctcgggcttggccggttccaggaattcaactatgaatagccaggcagggcccgcacctgcctgccacccccctcctctcctcccttggcctcgtgctaagtctcacggcgacgggagcagggcggatcccgtcctgcccacctccctgcgaccgcttgccgccccacccgtccccgcgccgttacctgaaggagcgggcaaggggactcaaactgctcggggagcccgagctcagacctgcccactggctgagggtatccggcggacgcggcaagccagggccccgattacccagtaatgcaaccagcaaaatggcgaccacaacaaaccggcccccccacgccctggactccgcccccatccctccctctccgctcccctcacgtgacccacactgacactccgcctgcgcgagatggccgcttacctgcacgcatgcgcagcgagctaccaatcccacccaagaaccgaaatccaggctgccgctgcgcaaaggcagctagaaacggagcatgcgctctgtgaccgagtgagaatttacccaaccccgcaaaattgaccaagggtgc

SEQ ID NO: 37391 - DNA, 345 bp, Homo sapiens
  chr19:41055104-41055449
  hyper
cgcaggtggaggagtggtaccgcgaggtgggagagctgcaggcgcagacggcggcgctgccgctggagccggcgagcaaggagctggtgggtgagcggcagaacgcggtgggcgagcgcctggtgcgcctgctcgagccgttgcaggagcgccgccgcttgctgctggcttccaaggagttgcaccaggtggcgcacgacctggacgacgagctggtgaggccagcgcaggggcctggggcggggcggggcggggcggtggggcggagaaggtgggcatggggcggggctgaagatggagacggctgagaccctcccactcatacgctgaaagacgcattcagcc

SEQ ID NO: 37392 - DNA, 601 bp, Homo sapiens
  chr19:41059924-41060525
  hyper
cgtggttagcgagctgggggtgcttgttaattgccccgtgggccgtgccagtagcagaggagcgtgtggtcttgcagggcctcggaacgccccctctccacccacatccccttacctcctgcccccagggcctgcggcgggagatccaggcgcatgggccgcgcctggaggaggtgctggagcgcgcgggcgcgctggcgtcgctgcgcagcccggaggcagaggcagtgcgccggggcctggagcagctgcagagcgcctgggccggactgcgggaggctgccgagcgacggcagcaggtgctggacgccgccttccaggtggagcagtactacttcgacgtggctgaggtggaggcgtggctgggcgagcaggagctgctcatgatgagtgaggacaagggcaaggtgcgcccgagctgggggtgcggagggcctgggggcgctggagccgggggccgccgctgccgcctcatcgtgggcgctttgtgcccccaggacgaacagagcaccctgcagctgctcaagaaacacctgcagctggagcaaggcgtggagaactacgaggaaagcatcgcgcagctgtcgcgccagtgccgggc

SEQ ID NO: 37393 - DNA, 568 bp, Homo sapiens
  chr19:41105938-41106506
  hyper
cggtgacagcagcttttccgtcctctcccacccaggctccaggaggccagagctctactgaagcggcggcggccccgggggccagggggccggggactactgagaaggaggcccccacagcgtgcccccgctggcaaggccccgggtaagcacatccgcctttcctccgcctggggcgaggggggttccgggccagataaagccgtctggttcccacggtccagccgccgcctacccgccccccgttgtagctcagcacccacccccaggacgaggccccctctagggaccccagcgtccggccgtgcgaggtgagcccgggacaggaccagacacaggccagaggcactgacccgcgggggtggggccgggaagccaggcgtccgggctccccgcggccgaagagggagggcgctggcccgttagaaagctccgccgaaccagcccagacaacaaaagcgattgtgcgggttggcgcctgcctgggcaccaaatgctcaagattgtggggcggctgggggccaaaggcctcctcctgtttcccgaatcttccccctgccctcctccc

SEQ ID NO: 37394 - DNA, 678 bp, Homo sapiens; identical to SEQ ID NO: 19455
  chr19:41111116-41111794
  hyper

SEQ ID NO: 37395 - DNA, 375 bp, Homo sapiens
  chr19:41115505-41115880
  hyper
cggctacacctgcgcttgcgactctggcttccggctcagcccccagggcacccgatgcattggtgagcaagacggagggcgcggaaggaggcggggcggggggctttgcctggtcaccttgtcaccagccccctccgtgtcctcagatgtggacgaatgtcgccgcgtgcccccgccctgtgctcccgggcgctgcgagaactcaccaggcagcttccgctgcgtgtgcggcccgggcttccgagccggcccacgggctgcggaatgcctgggtgagaaatttgccccacccggctccaggcccaccccagggtctcgctcctgctctcactccagagcctctccagccctcccacgcttcccctctcgggtccc

SEQ ID NO: 37396 - DNA, 272 bp, Homo sapiens; identical to SEQ ID NO: 19457
  chr19:45195351-45195623
  hyper

SEQ ID NO: 37397 - DNA, 967 bp, Homo sapiens
  chr19:46144663-46145630
  hyper
cgtccagcttctaaaaactctggccacgcccctcaatattgactccgccctcccagaccttccactgttaccgtgccacctcaagattggtccctccaaggctctggcaccgtccccgcttttgaactagctggccccactctaggttacgacctcgtggcctggggcatgactacatttctcgaccatttcctccctatctctttctgcggcttgacgccgccccagtccttacccttcctttttggcgctacagttgctgctggaggatgtggtccggctgcgggggtcctcacggcgcaccgaggcgaggcgctctggtgacaagtagcggcggacactgctaaaagagagcacacaggtgggggcagagccttctaggccagcaggcgagtgccgtgagcaagcgagattctccctgcaccctctgctgctggagctcaggcaaacaaaccacctctgtctcccacgaggtcttggaagaggctgggggtcccggccttgtgccttacctgcgcccggaggtcgcctccttcttgggagaggatggggacgtggcatagccacccacgcgccgcgggggtcccgagccattaaggggcgtcctggtgggaaggcctttcaagagctgacacactggagggatggggttaggggacagaagagggtgagtataaggaccaggccccggtcctccccatcccacccctccagtctaacggggatacccgaggcagtggtgcctaagcgcggaggcgcccggcccttgggggtgccccgcgcgcgtagcgccgctccctgttcttcgcatgcccgcaggcgacgcagagcatccgccagcgccgcctttaggaccgccagctcgtcttcctgtaactgcagccgctgctccagcgccgacacgcggtcgtccacttccataccgctcgtgcccgacaaattgtcatctggaagacgggggagtgcc

SEQ ID NO: 37398 - DNA, 181 bp, Homo sapiens
  chr19:4679454-4679635
  hypo
cgccttaggaaggagcctgctagggccttcagcactcagcggtttcttctacgcaatttctcagtttcaaataaagcccgtctgcggggcaatttcggtaagggttcctccctccattaggcccggagcaggggtgggtgtggcagcccccgatcccgtgcttccagcaccgaaggcaggc

SEQ ID NO: 37399 - DNA, 990 bp, Homo sapiens; identical to SEQ ID NO: 25386
  chr19:46907118-46908108
  hyper

SEQ ID NO: 37400 - DNA, 575 bp, Homo sapiens; identical to SEQ ID NO: 25387
  chr19:46916506-46917081
  hyper

SEQ ID NO: 37401 - DNA, 68 bp, Homo sapiens; identical to SEQ ID NO: 19463
  chr19:47040909-47040977
  hyper

SEQ ID NO: 37402 - DNA, 586 bp, Homo sapiens; identical to SEQ ID NO: 19464
  chr19:47137785-47138371
  hyper

SEQ ID NO: 37403 - DNA, 485 bp, Homo sapiens
  chr19:47921355-47921840
  hyper
cgattgcgcacccaagagaaacaccattatggggtaggacgaccgcgtcctgtcgtcacagaaccatgcacctgggaagccaggggcaccttcctctcatcaggtcaaatcccttcctcagtgatgaagacacggaggctcaaagaggcagcaggactcgcacgggaagaggctagaacgttcctgcctcggaccctcgcctggctgggcaccctggttctgtgtgtcccactctttccctctccctcttctcctaacttctcctgtgccctgaagttgaatccaactgctccccgctgctcaaggcactctcaccaaaagcggtcctcacagcctacccggaacccccaaaacgggcgcgcgcctcctcccctgtcttctatccccgttcccatccccagggagacaggctccgtggggccagcagcctggtgagaccacctctcccacccctgtcccactcctagccctggagaggcaggggc

SEQ ID NO: 37404 - DNA, 531 bp, Homo sapiens
  chr19:47922898-47923429
  hyper
cggtgggagtcggggaggggcaggctgtggggggaggagaggaagagaccgcggccctggtgcccccaggcccctcctctcctacccagggctggggttcctgctccgggtttctcagtctccctctttcccagtctctctctccttgtctctctctgtctccgcttctcccgtcctttctctcctctggctctctgttctccgagccccctggacacaccacggaccccctccctggccatctccaggggtcacgtgggaatctggagtctggtcccaccgtaggctctcccctctctgaggctcgattccccctctgcaggatgggcagtgcgctgggggcggcgggggtgggctgtggataacggagaaacagttaagctagagggtgccaggactcagggtcttggctgagtctgggggtccccatgccggcgggctctgcccccgtggctgtcctgcggtgaggctggccgtttaaggcagtccgaggggaagggtctggaggccttgcctttcctcaaggccggc

SEQ ID NO: 37405 - DNA, 611 bp, Homo sapiens
  chr19:47933215-47933826
  hyper
cggagaagggaggccgagtcccaggagaggaggccgagtctggggggaaaaggagaccagggtccaagagcaggtgcagccgagtccctagccccgggcgggcggtggggacgagtctctgcgcgaggccctagaagccccggatgtggcagtacgcctccaggctggcgaagaggatgtacaggagccagaggcccaggaagagcgcggtggtggcgagcttgggtccgcgcgggccgcccagctcgccgccgatgtgcggccggcgccggtacagcagcacggcaatgcccacgaaggcgaagacggtgaagagcgtgacggagaaggccagcgtgccagtgcgcacctcgaaggggcggccctgcaccgcccagtacacggcggccacagaccaggcgacgcccaggccaaggaacacgttcaccgcgttggagccggtcacgttgccgatggacgcgtcggcgcactggtcctgcagcgccgccaccttgctggcgaacgtgtctgcgaggcagagacatacaggtcggaggggctttgcgccgccacccacaggggcgggcatccgcctgccccctcccagcctttcccggtcgcctgctttctgc

SEQ ID NO: 37406 - DNA, 224 bp, Homo sapiens
  chr19:48918115-48918339
  hyper
cgcagccctccaccggatgccccccgcccggaaaagcgctgctgcaagggtttctgcatcgacattctgaagcggctggcgcataccatcggcttcagctacgacctctacctggtcaccaatggcaagcacggaaagaagatcgatggcgtctggaacggcatgatcggggaggtgagggggcggacgggaggcggggaatcttcggggcggagtcgagaggc

SEQ ID NO: 37407 - DNA, 499 bp, Homo sapiens; identical to SEQ ID NO: 25398
  chr19:49127280-49127779
  hyper

SEQ ID NO: 37408 - DNA, 564 bp, Homo sapiens
  chr19:49217005-49217569
  hyper
cgatgccccggttaggaagcaactgcggatggagaaatttggcgtgaactcgggactgcgacctggacctgactggagaaccctagccggattcaacccacaccctcttacctgcgccctccggatcgcttcctgcagctcctcctccagagtcagagccgctgagcccggccctgaggaaggggtcagggctggagctgcagcaggagccggagtgggagttggagccggagccgtccccggggtatccgcggcacgtggaagaggtggcctgtgagatgctgcgctgggcttgacctagagcagccaagagggcgagcgcccataagccatgcccacagggcgcaaccccacccactcgcaacgtgtggctccaccccttgatcctctcgcgacccctcgctcatcaacccctttggcctcgccccctattctttcattggctcctcttctctaaagatccgccccctgttagtctgaaccacgtcccctcgccttcaaggcttcctaccgctggtcctcgcccccacacttcattggctagttttttcgacaccccgcccc

SEQ ID NO: 37409 - DNA, 675 bp, Homo sapiens; identical to SEQ ID NO: 32717
  chr19:49255778-49256453
  hyper

SEQ ID NO: 37410 - DNA, 187 bp, Homo sapiens
  chr19:50353790-50353977
  binary
cgaatgagcgaatccacggaaggccggggagcgacgtgagtggcgagaagcttggagtcgccagggacggcgggcggagcctgggcgccggggctaatgggcggagcctccagggacagctggccccgcccaggccgcgcggggcccgctgggagttggagtcccttgcccacctcgccacgtcacc

SEQ ID NO: 37411 - DNA, 330 bp, Homo sapiens; identical to SEQ ID NO: 19472
  chr19:50828897-50829227
  binary

SEQ ID NO: 37412 - DNA, 1274 bp, Homo sapiens
  chr19:50836203-50837477
  hyper
cggttccattcggagccttggtctctggacaccaaaggtgaaaatgtgaggactctctgcctacgatccttcgtcccctaaaaccctccaagtaccttggccccgaaagctcagagtcgaggggaatctccccgctataatctttgggtccctggatcccaagtcccccgtctccaaaactaggattcgggctgtcttaccgcccccggaccctgagccttcgccccctcccccgtactcaccccaagtcgaggcgaggtggggatgggggaatccggggctcgagatggggggaggggtgacccagccccggcagctctgggcagcaagaggctgcagaggggggagtgacatcaccgccggaggaggggcagcaccgctcccccaacccaggggcttcaagctccgcctttatggcggaccccggggtcctggaatgccaaggcagagaggagaaacaggagacgaggtccgagggaacggtatccccgccccttagaacaggaactggtaaacccttaccaattacagccacccccgactgccacctgtggctgccgtcgcgacctgtcgcctcccacgcatgttgtggctgcgcccgcccccgtcagggcgtgaccacggcgtggactacaacgaccgtgatgctccacggagccaggagcctttgacgaaaggcagcgtaggcgagggccttcatgggactcgtagtacaaggcccatcacaagggtgcgccgtggagaaaaggggtgatacccttcgcctccctctcttcctcaactccgtgggtccatgcacaaagctttctcttcaaaaagtacgctctgaaaagaagcaacctaggcaggttcgttcaatggaaatattggatttttactgagtagcgctagctctgctacccggtgcgcatgcgcatcacctgggcggcacccgcggtactgcgcctgcgcggtctcgcgccttcccaggtccgctccgcgagggcgagcgcgcgccagtcccactcgtgcgccgctcttcatgtccccgcggtcgaagacggtcacatacgcccccaagaaaacgtcgccgaggatccacacaggtactggaggcgaagcgatgtccaaggcccggaagccggacaagcagaggcggacgtcaccctgagcaaactgcaaggcgacaaggcggcaactgggtgtccaggccgcaggaaccaccatttccctgggagtccgtgctctctccgcccccaaccccggggacaagaaatgtttctgtggccccttcc

SEQ ID NO: 37413 - DNA, 244 bp, Homo sapiens; identical to SEQ ID NO: 26663
  chr19:51925116-51925360
  hyper

SEQ ID NO: 37414 - DNA, 407 bp, Homo sapiens; identical to SEQ ID NO: 19477
  chr19:5686667-5687074
  hyper

SEQ ID NO: 37415 - DNA, 553 bp, Homo sapiens
  chr19:5961947-5962500
  hyper
cgcgtggttccccttgttttccatggccagtgcttactcctgcacagacaccatctccttcaggaagctcccactgtgagaggcgtgcctgccctgctgcactccctcccgagcaggccttatatcctgccacggggcacgcggagaccacggccacagcagctgaaacagcctatcacccagcgtacaccgcatcaacaccctgcaatgagtgtttgaactaggccctctctctgtcattcatctacacaacaccagctgctacgtactcacaaatatttactaagccctcattctgtgcagggcgccacaggaagagtggagaacaggaagctgagggcagacgcttcaggagaaaacatctgactgaaagggaggggcgtgtttgcacttggtgaccaggcactgtggagccctggcactcccagaggggtgtgtggtgacagcatctacccctagatgtaagttctagaaagtggggcctcgtctgttccgtttctctctgtattctcagtgccaaacacagagcctcacacttaacaggcactcaacc

SEQ ID NO: 37416 - DNA, 634 bp, Homo sapiens
  chr19:6530758-6531392
  hyper
cgggaaagagcggcagagagggagaaccagggcgatggagagacagcagggagaaaggaacctggagccgagcttggaaggccggaaacggaaaggagagcgaaaagcggagagagatccgagtggagaaaattccgcagagtcacggggacgaggggaaaggctctgggctgggaaggggcgtggccgcgggcggaggggcgtggccgcgggcggaggggcgtggcctccttttgtagccaagcagctataaaaagcggcgcgctgtgtcttcccgcagtctctcgtcatggaatacgcctctgacgcttcactggaccccgaagccccgtggcctcccgcgccccgcgctcgcgcctgccgcgtactgccttgggccctggtcgcggggctgctgctgctgctgctgctcgctgccgcctgcgccgtcttcctcgcctgcccctgggccgtgtccggggctcgcgcctcgcccggctccgcggccagcccgagactccgcgagggtcccgagctttcgcccgacgatcccgccggcctcttggacctgcggcaggtgagacgtgccccgaccctcggtagctggtctcgcgggagacccctaccgcccctctgggactcccttctccctccc

SEQ ID NO: 37417 - DNA, 269 bp, Homo sapiens; identical to SEQ ID NO: 31534
  chr19:660994-661263
  hyper

SEQ ID NO: 37418 - DNA, 585 bp, Homo sapiens; identical to SEQ ID NO: 31535
  chr19:661431-662016
  hyper

SEQ ID NO: 37419 - DNA, 352 bp, Homo sapiens; identical to SEQ ID NO: 18640
  chr19:6744359-6744711
  hypo

SEQ ID NO: 37420 - DNA, 150 bp, Homo sapiens; identical to SEQ ID NO: 14812
  chr19:6768009-6768159
  hyper

SEQ ID NO: 37421 - DNA, 188 bp, Homo sapiens
  chr19:7543278-7543466
  hypo
cgagggaggatgccccggcggggagcaggagggttagctccacaacgctggccccggacatacagtctgggacaggtgctgcatctcggataaacggcctgccctctccctgcccccacagtcccacaccctcctggctgtgcctcatgctcccggggactcatctctaacacggccccgtcccaccc

SEQ ID NO: 37422 - DNA, 112 bp, Homo sapiens; identical to SEQ ID NO: 19488
  chr19:7701796-7701908
  hyper

SEQ ID NO: 37423 - DNA, 117 bp, Homo sapiens; identical to SEQ ID NO: 19489
  chr19:7992986-7993103
  hypo

SEQ ID NO: 37424 - DNA, 122 bp, Homo sapiens; identical to SEQ ID NO: 19490
  chr19:7997652-7997774
  hypo

SEQ ID NO: 37425 - DNA, 58 bp, Homo sapiens; identical to SEQ ID NO: 19491
  chr2:102972750-102972808
  hyper

SEQ ID NO: 37426 - DNA, 639 bp, Homo sapiens; identical to SEQ ID NO: 30109
  chr2:111876426-111877065
  hyper

SEQ ID NO: 37427 - DNA, 699 bp, Homo sapiens; identical to SEQ ID NO: 19492
  chr2:111877567-111878266
  hyper

SEQ ID NO: 37428 - DNA, 955 bp, Homo sapiens; identical to SEQ ID NO: 36604
  chr2:118981553-118982508
  hyper

SEQ ID NO: 37429 - DNA, 154 bp, Homo sapiens; identical to SEQ ID NO: 19493
  chr2:121834588-121834742
  hyper

SEQ ID NO: 37430 - DNA, 550 bp, Homo sapiens; identical to SEQ ID NO: 19494
  chr2:128173501-128174051
  hyper

SEQ ID NO: 37431 - DNA, 338 bp, Homo sapiens
  chr2:128421756-128422094
  hyper
cgacgccggggcagagcccacggcgtcggagggccccggtcgggtttccgagggaaggcctgccctgccgccgcagctttccggccattgtccccgccacccgccccgcccctggccacctaccccgtggctggcggcgggctctgccggtgctggcgccgccggtacagccccgacgcggccagcgcacccagccgggccgccatggcgcggggcagccgccttgaggtcgcgggcgcgggccgcctggtgcaggggctatgggaccacctcggaggggaggcgcggccgcctggggccagacaccaagacgggacgggcgtgtgggcgcctccccc

SEQ ID NO: 37432 - DNA, 987 bp, Homo sapiens; identical to SEQ ID NO: 27845
  chr2:12856411-12857398
  hyper

SEQ ID NO: 37433 - DNA, 890 bp, Homo sapiens
  chr2:166649931-166650821
  binary
cgaaacagagagagaggggtgtccgcgtcccggccacagagccctttccaaaccactcggaaaccatttaaatggctcggcggccgcggtttgcagcctagaactgtttggggtccccggctaggaaagttgcctggcaaagccatgtctttcgctgtcgcgggatgtcctctcgggcagagaggctggaggagacaggcaacctgctagccggagtggaagcgcgcccgcctcccgccgggccctccctctcagggtccccacgctgcgaccctcccaagggcaagtccggggccaccaggtctttggtctccgtccagctcctcaggggccgccccatagggactggcgggggcaccgtgggcgagagggtgtgaccgggctcccccccgaggcgccacctgccccttggcccagggcgcccctttcgggatctctccaggggcaaccgacacactgctctcgagaccgtctccaaccggccacctggaccgtagccctgtccccaacacgtgaacccctgcggccgtcctcccgcctgctctaacgcagcccaggggtaccgcgtctccctccgcctgccgccggcttacctggcgggtgggcagggcagggtggcgggaagcggcggccgggcaggcgctggacgtgggctaggcgccaggtgcaggtggcggcggctgcgactccggttgctgtcgccacagttgcggctcagtagagctcctcctccgccgccgcctcctgccttcccgctgggcctcccgcgttgcctggagaggcagaaccgaggctcggcttccacttggagtctcccaggtgagctccagcctgcgacgtcggcaggggcgaggccccacttccgcgcctgcgcgccagcctcccgcccc

SEQ ID NO: 37434 - DNA, 359 bp, Homo sapiens; identical to SEQ ID NO: 19501
  chr2:16790115-16790474
  hyper

SEQ ID NO: 37435 - DNA, 1014 bp, Homo sapiens; identical to SEQ ID NO: 31577
  chr2:171567970-171568984
  hyper

SEQ ID NO: 37436 - DNA, 1278 bp, Homo sapiens
  chr2:172951266-172952544
  hyper
cgttctctccctggtgctgcctccgccacccttcggtagccactcgctctcggctgttcgcactaaaggcggcccctcgtattaacaacgggccctacttctgctgtccctccaggggcggactcggagaagagcacggtggtggaaggcggtgaagtgcgcttcaatggcaagggaaaaaagatccgtaaacccaggacgatttattccagtttgcagttgcaggctttgaaccggaggttccagcaaactcagtacctagctctgccggagagggcggagctcgcggcctctttgggactcacacagactcaggtacctcgccgctgccgctccgttctgccacgcaggctttccgcggccggcctgcgcccgggtcttcatttgttgctcgctgggactcagggtcggggtgtcactgtgtgtatgtgtttgtgtccacccctggctctcagcgtgtctccttcctccctcattccctctgccctagctctgtcactgctctcggtatcccgagctgcctgccgtccggccctctgtccctggacaatctgattagggcgcaggaaggatttccccagacgatttgtttgggaactcagaggtcacacgtgcctaaacaactggaacaatagactccgggcttaatccctcctttgcctttaaattgtgtgactaatcactcggggcctgggtccgcgcctcagcctccctcctcctcctccttcttaccggttgggggtggggggagatcctttcctccgccctctcacctctcaagtcccagaccttagagaagaaacgggaccttccttcccggctttctgtaagactccggggagcccgtgagcgttcctgacggcggcgggcgcgggtttccgacgtccggtccgggatttggagcagagctggagaaagcaaacagacactagtgcaagaatggttttgaatccaaagagaagttcagcaaaaccttgaggcctccttagtccgtcccaactcaagggcagaaaagatggcgcatagaaaagttgggtcgcgttgcaaataaatttcctccactccttcctaggttttcgattctttttattgatgttgatattggaattgctggctcggtgttatgcaggcgctgtatcttccgcaggcggtagccacggtcggactgagcccctggcaggctaaggcctggatcccggttctcccctcatcacaactcctccctggctctctgagagctgcccccgtgggctgacggcggcgggaggttcggccttc

SEQ ID NO: 37437 - DNA, 343 bp, Homo sapiens
  chr2:172952791-172953134
  hyper
cggctctggagggtagtgcgttggccaacggtcgggccctgtctgctggctccccacccgtgccgcccggctggaaccctaactcttcatccgggaagggctcaggaggaaacgcgggctcctatatccccagctacacatcgtggtacccttcagcgcaccaagaagctatgcagcaaccccaacttatgtgaggttgcccgcccgtctccttcttgtctccccggcccaggtccctcccgcctccaggtccatccatcccgtccggaaaagaaggacccagagggaagaaggaacagtggaggcgggacgccctccatctcctcggagccccgcgaggtcc

SEQ ID NO: 37438 - DNA, 689 bp, Homo sapiens
  chr2:172955255-172955944
  hyper
cgcttgctcagattagtttcctccagaggaacacgggcttcaagggactagaaccagattggttcccttctcgtggccctgcgtcccagcccagccccaacccccaccccagatctcgcagccgagccgaggcagtcccggagagctgcgggcccagacaggctgccaagcgctgttcctacttctcccgcactcgccttccagcgctgctgcccgcgggagctggccctccacctttggggggtcttttcaggcgcgcggtggggagcagagcccggaaggcagtgatctgtgttgtgacaagcacccatttttcaattggtgctggtgaaagatcagatgcgccaggctcttccgacgccctttgggaaggggaggaggaagtggtggggctgctgggggtggggggaggcggtgtgatggaagcagggaaagtagtcgggggtgggggaatgatgccggggacctccaagccccttccaggcctgagattgggacttctccgcagcacctagaagaaccagcgctgatgggagagatcagacctcagaaaccaggatgtgggcagtcagatgggcctcaaagctgaggaaagaatgaatttcccagctcccgcgcggggtagggggtcttcctaggttcaatttcccctaggagatgtgactttgctagtgcgaagatttctgtcc

SEQ ID NO: 37439 - DNA, 1465 bp, Homo sapiens
  chr2:172965462-172966927
  hyper
cgagctgccggcgccgctgccgccactgcccggaccaccgccgcccgccatccgctgcggcacaccaaagtcccaggaggccggcgctgagactggcggcgaagcacaaggtggagaagcgctggccccagggtgctgctccgaggggatctcaccacttttccacatcttcttgaacttggaccggcggttctggaaccagattttgacctttgaggaaaaagacctgagcattagtggaggaacctagtcttggggcagtaggggttcgaagaggagaaaaaagaaggcagagaaaaaccgctggctagcggtgggcagcgagcgccctggggagataagaggatcacgggcggcggccttcgaggctctgccggttcctgctccctggggaggtaattgccaaaaggccaggactgctggtgtacgtgcactgtgatgatggtgacagcgggagggtgaggagggccagttatttcacccgcttaatcagtagcgagaggtacgggatttctgtccacccggtccctttccttccctcccacggcggccccttgggggtttccagctttgggcctagaagcttacttagggccgctcgaggcgcaggcctggaaatccttaaaagtacttaaaatgaactttaaaaagcattgtcctaaacccgcctgcttcccagccatctcaggcccgcgctctcctcgcccctgcagggcgcgagccccacctgagtctgggtgaggcccagagaggccgccagctcggctcgctccggcaaggccaagtattgagtcttttggaaacgccgctgaagagccgccagctggaaactggagtagatggtgcggggtttccggactttctttggcttcccgttcactatccgaatttcaggctcaaggtcctccttctctgcaacgataaagaatcgtaagaacagcgcaacccaggggtcctggagttcccgccctcctagagggcccggcgggggggacttggcttgagcaaagaggtgggtgcactgaactgtggcgccacgggcaggcgcaacttcgcagcgtgcgatcggagccgccaccgaccccgggagctgtaccctccagggaagggggagacaagtgcacacccaagagaaagaagctggtggcaaggagatgcccttatgaggcaggcagagcacgcccacttggctcttgaggccaccaggtcctaccaaaggagagagggacgtaaccggcgacctgcggcagattggaggctggggagggtaaagggcacaagcgggcggtgagcaggcagcgtgaaaatccagagctttcgaaggccccccgccccaaacacgtttacccatccatcccattaactagaccgactcggcactcttgacttcagcgttatgcataccaggctcgttgttggctggggacgaactggttccatagggagcgtaggaggtgtaggcggc

SEQ ID NO: 37440 - DNA, 844 bp, Homo sapiens; identical to SEQ ID NO: 26756
  chr2:175193104-175193948
  hyper

SEQ ID NO: 37441 - DNA, 1858 bp, Homo sapiens
  chr2:175196982-175198840
  hyper
cgaaaaaaatctggacttcctccgaaagatttccttggggccccaccttagagttgaagtggcccgggtgtttgcctgcgttcgtttggaagatttccctaacttttattgtgatgcagacgcgtgtatctaaaggaatatgcgagtgcccacgtctagagtctgacagctggaactacggggaaaacggcgggagggggaggggaggggatccgaggggaggaggagaagaggaaggcgagcagggcgccggagcccgaggtgtctgcgagaactgttttaaatggttggcttgaaaatgtcactagtgctaagtggcttttcggattgtcttatttattactttgtcaggtttccttaaggagagggtgtgttgggggtgggggaggaggtggactggggaaacctctgcgtttctcctcctcggctgcacagggtgagtaggaaacgcctcgctgccacttaacaatccctctattagtaaatctacgcggagactctatgggaagccgagaaccagtgtcttcttccagggcagaagtcacctgttgggaacggcccccgggtccccctgctgggctttccggctcttctaggcggcctgatttctcctcagccctccacccagcgtccctcagggacttttcacacctccccacccccatttccactacagtctcccagggcacagcacttcattgacagccacacgagccttctcgttctcttctcctctgttccttctctttctcttctcctctgttccttctctttctctgtcataatttccttggtgctttcgccaccttaaacaaaaaagagaaaaaaataaaataaaaaaaacccattctgagccaaagtattttaagatgaatccaagaaagcgacccacatagccctccccacccacggagtgcgccaagacgcacccaggctccatcacagggccgagagcagcgccactctggtcgtacttttgggtcaagagatcttgcaaaagaggagagaaaacacgggaggcacagttccacatccttgtcacttgcaccggctccgcgacaactcgtcgtttgcacccgagggtttggggttggtagtttaattttttttttttcctaagaagcagggtgtgggtttagtggggagtgtgctatattaaaaccagtgcccaggtctgcccgagggcgctggtatttctggttcaaaaacagcttctggctaccctggagaagaaagagaaagcggggcccagaaagagaaaaacaagcaggtcagcggttgctgggggactcgaagacgcaccctggtctgcttgaggacgcctcttttcacactgacaaggtccagggaggacttcaggatgcttccagcctgcaaaatgtggaagcgcccacgtgtggcctggtcctccgccctcccgggtgaaagtcctggagagatttctcgggcgcgtccgtgaaagcagggcactaatggggagcctacctcttaaaacagcgcacttgccctacggacgagcctctaggccctggtggtctggaatgggagtgggttggagctgggacaagaaaactccactccaggatgaaacgcgacatgcaaatcttcaccgggttaaacaaacagccgagcaagctgcagcttcagcggaggtggaggtgggggcggacgccgctcgcgccggtctctgtttccaaagttgttacagtgagaaaataagcggcttcgtgcagcgtgttgtatgggctgatgcctcccacccccatgccagcccacagcaaaacccggcagataatcagcacatcccactgtttagtcatatttgacaactgggttaacctggtatctaagcgctggc

SEQ ID NO: 37442 - DNA, 993 bp, Homo sapiens; identical to SEQ ID NO: 24234
  chr2:175198845-175199838
  hyper

SEQ ID NO: 37443 - DNA, 236 bp, Homo sapiens; identical to SEQ ID NO: 30137
  chr2:175204013-175204249
  hyper

SEQ ID NO: 37444 - DNA, 947 bp, Homo sapiens
  chr2:175204500-175205447
  hyper
cgcaattcgaaaaaaatgttaatttagaaaataaagtacatatttacagaataaaaatatttctaaaagatttcccacacaagaggaaatacaagcgaagtcagcaccaacatattttttttttccatttttgattactgtccgccttgggaatttgagcgaagattttgatttttaggaaagaaaaaataaattcttgttattaacaatcagcaaaatgttttctcggaaactgttctgaaacaccaagtcgcaaagtagcgataaaacagaacgaaggtccccagcagggagtttgcagcgtgacattcaatggcttcttccttctccttcttgagctccccgcggccaggctgccccgctcttcttactcgagtttttcttcactttggccattttctctccccgatcaagctgttcataaccgggagccccccactccctaagcgcctctggtcgggggatggtcttccggagagccggctggcagggacgcgttttccggaggggcttcgggccggggcactggaggcccagagggtgcctggcgcgtttgggggccgcgggctggcggcgcggagtagagggtgtggtgggtctccccaggaacgcgggcgcccgggcgtcgggcccagggagctttgtttctcgttgataataaaggcagatcaaagggcccggtcgtgcaggtcccgctggccgcgcggctccctccgcaggccagtgatcaaggcctgtgtgcgctgcctctgccccgcgggtcagcggacgtccatcacccaggctcccgggagcggcgggcggcggccccggaccgagcgtccagccgggagacagcagtccgcggaacctgagcccagaggcagcggggccccggggccccggccgaagccaacaggcgaaaacagggcctaggccccctgcccggcctcccccaagccctaggc

SEQ ID NO: 37445 - DNA, 543 bp, Homo sapiens; identical to SEQ ID NO: 19511
  chr2:176937692-176938235
  hyper

SEQ ID NO: 37446 - DNA, 865 bp, Homo sapiens
  chr2:176956345-176957210
  hyper
cgtttctctgggctgctcctatcacaaaatccgaatttgcttggaacaagcgccctcttaatttgcccctctcagttctctgcagttgacagcttggaaaaggaagcgaaacaaaggtccctgggaaagtgaagttttcaattaatttggtgtgagaaacgggcgggagtgggtggtgactgcaaaatgcgaggccggtcggctgctggagagacacagaagtttcacggtgggaggctgagtggctttctcccccggcgccgttctcagggtctttctgcgggtcgaagaaggacccgcgggagctgagaggcccaggtcggaagcactcccggctggcccaagagtagaggcgaagagcgttgagtaggcatccatggacttttctttctgggacagattgtcaggctcactgcgccgatgcctgtctttcatctgtttaagtctctgccgccagccccaagggcgcttcatgggcattttccgaacggacagcgtgtgtgtataggaagggtctgctccaatgcctcttacctgtgtgaaatgcctttgccgggtaccagtgcacaaggtagggcaaattagctcactcggatttggggtctagaagtcgactaactgagggattcagcaacaggataaaaaaatgggcctgttttcacatcattctgatcatctctgtccttcgtcttcattttgctgtgcaactcggggagccgaggagaggtggcaaaaacagcggttgccgagacaaggcgcaggccttggcgcccgcctcagtcgcagacagggcctgggatgggccgtcgcgcaatcaactcgtgggggtggctgcagcgcgtacgcctgggtcgggggggagggc

SEQ ID NO: 37447 - DNA, 381 bp, Homo sapiens; identical to SEQ ID NO: 23190
  chr2:176975945-176976326
  hyper

SEQ ID NO: 37448 - DNA, 245 bp, Homo sapiens
  chr2:176983768-176984013
  hyper
cgctggaattagaaaaagagttcttgttcaatatgtacctcacccgcgagcgccgcctagagatcagtaagagcgttaacctcaccgacaggcaggtcaagatttggtttcaaaaccgccgaatgaaactcaagaagatgagccgagagaaccggatccgagaactgaccgccaacctcacgttttcttaggtctgaggccggtctgaggccggtcagaggccaggattggagagggggcaccgc

SEQ ID NO: 37449 - DNA, 486 bp, Homo sapiens; identical to SEQ ID NO: 19514
  chr2:179343487-179343973
  hyper

SEQ ID NO: 37450 - DNA, 774 bp, Homo sapiens; identical to SEQ ID NO: 35689
  chr2:180725139-180725913
  hyper

SEQ ID NO: 37451 - DNA, 376 bp, Homo sapiens; identical to SEQ ID NO: 23192
  chr2:182818959-182819335
  hyper

SEQ ID NO: 37452 - DNA, 182 bp, Homo sapiens; identical to SEQ ID NO: 23193
  chr2:188418970-188419152
  hyper

SEQ ID NO: 37453 - DNA, 818 bp, Homo sapiens; identical to SEQ ID NO: 31608
  chr2:19551135-19551953
  hyper

SEQ ID NO: 37454 - DNA, 330 bp, Homo sapiens
  chr2:19563170-19563500
  hyper
cgtccttgctctcagatggatgagggcttttgtttgtttgtttgtttgtttttaaataatccgaaattcctagcaactatctgccgccgttcgcttctggtcctgggaagacgatgagcaaagatctactgggaccccatcctgcatttgcaagctcggtccgcgtgcccctcccggcacacccggaggtgagaagtgccctccggtgcctccgtccgcagcccctcgtaggtctgcacgtcctgcttcggatcccaaatcctggctttctgaagaagcgcgggaagaagagagagagtctgtttccgtgaatcgatttccctgaaacac

SEQ ID NO: 37455 - DNA, 897 bp, Homo sapiens; identical to SEQ ID NO: 14845
  chr2:200320451-200321348
  binary

SEQ ID NO: 37456 - DNA, 431 bp, Homo sapiens; identical to SEQ ID NO: 19521
  chr2:20425309-20425740
  hyper

SEQ ID NO: 37457 - DNA, 173 bp, Homo sapiens; identical to SEQ ID NO: 13812
  chr2:206750391-206750564
  hyper

SEQ ID NO: 37458 - DNA, 229 bp, Homo sapiens; identical to SEQ ID NO: 19523
  chr2:206948646-206948875
  hyper

SEQ ID NO: 37459 - DNA, 670 bp, Homo sapiens; identical to SEQ ID NO: 22872
  chr2:219232221-219232891
  binary

SEQ ID NO: 37460 - DNA, 113 bp, Homo sapiens; identical to SEQ ID NO: 19526
  chr2:220316370-220316483
  hypo

SEQ ID NO: 37461 - DNA, 1192 bp, Homo sapiens; identical to SEQ ID NO: 25451
  chr2:220348591-220349783
  binary

SEQ ID NO: 37462 - DNA, 1188 bp, Homo sapiens
  chr2:220361418-220362606
  hyper
cgtttaggggtctggccggtccagggggcaggtaggagatggtgcgctcgcggtaagggctgtggccgggcctgtcttaggaactctgggccctgactcggcccgcgggtaggtcccggaaggagctgcgcgagaaggggccgccgcgggtgctggagccgctgaaggacgtggtgctgatcgaaggcagcgcggccaagctcacttgccgcatttcggctttcccggacccattcatccgctggagtaaggacggcaaggagctacgtgacggtcccaagtaccgctacgtcttcgaggaccctgacgtggtggcactggtggtgcgcgacggcgagctggcagacctgggccagtacagcatcaacgtcaccaaccccttcggccagtgctccgactcggcgcgcatcctcgtggaaggtacgcgcgccccgggcgcagcgccagggcgcagaccagcaccactcagccagagcccgcagcccggtccagctgcgcgtgtttacctctgggcctagctacagggtccccgccagcccagctctgggcacggcctggggcgcatcgccgcgccagccaagtgcgtccttccctacctcgggatccagctccacccgggctgagcagtcagctgtggacttccatcacgcggctccgggtccccaaggtcacacagcaagccagaggcagagccagggttggacccgggtcttctggctcccaactctggcaatttccactacccggagcggtctctgaggcaccgcgagatgtgtgaacattcaggggctttcgcccgccttatctctcttgatcctctattcgaccccgagaagtaggagaggcagggataagtccctttaacagccaaggagatgaaaccagagaggctaatgatttgctcaacgtcacactgcgagtttaaatgcatctgtatttagtgccgggtattagccggtgaggtgatgccctgcctcatctccgggtccttcacggggtttcgctcccctttccttccgctagtcccgacgaagattcaaaagggacccgacaacactaaggcgcgcaaaggcaccaccgtgacgctgactgcggagatcctgggagagcctgcgcccgacgtaggctggaccaaggacggggaggacatcgaggaggatgacaggcgagggccgggacctgcggcac

SEQ ID NO: 37463 - DNA, 249 bp, Homo sapiens; identical to SEQ ID NO: 19531
  chr2:220377743-220377992
  hyper

SEQ ID NO: 37464 - DNA, 330 bp, Homo sapiens
  chr2:220378995-220379325
  binary
cgcccgtgctgccggtgaaacgctgttgacatgtcctgaattattaagcgtggggagggctccggagcacatgctgagcggagcggctggggctgcgcggcgtggcggagcagcgctcgctccctcgctcactcgctcgctcgcagggacacacgcaggggctgacagctgtgctggtgctgataagggaagccacaaggagacgatcgaggagagagacaagcggcagcagaggcagcagcggcagaggcagcaccagggctgcggagctgctgggagtgggagtgactcccccacctcgggcccccaccctgtccctgtcctcttccc

SEQ ID NO: 37465 - DNA, 974 bp, Homo sapiens
  chr2:220416321-220417295
  hyper
cgaacgtcatggatgaccaggctgtgggtggggccgtggctgcgcatctcatacttatctcccgggcacagctcggccccctcccgcagccagcacacgtggccccccgagcgggacacagtcacctccagcaccgcccggcggcccaccagaacggtcttctcgcgaggggggtggcggcacatctggagaggcaatgctgggggtagggggcgggggcttaagttaatagggacacgcatggcccccaggaggagagatgcatcttccctccctgaagtctccactcctggccttagccctctatgccaccagtccgttcccttgcacctcagacccaaagtctcctcttgccggggaaacgcgctgccctctgtgacccggcccaggagagcccctcggggggaagggaagagagaggcagcgttcttggggccagccccaagtccgtcagtcccatggcaggagagacaggatgtacactctctgtcgctcccaccccaggtgcttaccctccacttccagtagagccagggactgggcgggccccgcctggaagcggacttcaccggcgtcctcggcgcgcagctcgctaagcaccagaatgtgtttcttccctgggggtgagggggtcgctagcgaggccggagccacctctgaggagcgttggggacgaaggtgggggcccagcaggcccctgggtcggttcggacgccgttagtgtatgctagggtgggcggaacagggatgcggagcgggaagcctagaggtccgggactaggggctgggggcgggggaaagaacagggacgaggctcacagggccgtggggcggggcccgtcggagccaggggcggggcttgtcccggtggggcgggatctgttcgagcctgggcggggcagcgaggggcccgaaagggtaaccaggcgggcagaccttcctgtcggatgcggacgcgggctccgggtctcagc

SEQ ID NO: 37466 - DNA, 894 bp, Homo sapiens
  chr2:223171463-223172357
  hyper
cgcagcctccgggtcgcaagtgggaaagttgactggagattgcggttagagggggtgggtgcaaactcagggtatttccgggtagccccgcagcagtcttgtccgctgaaggcaggttaccctgggctttcaagggaaaacgccttggggcggggtgtcctgtgcgaccacctctctcagcaaagcagggtttgacctcttggcctgaccttgctccctagtcccaccctatactagtaggtcctaacctttctgcgctttgagcctggaccatcgtcccttcaagagattctactggataaaaaaaaattataaaagctggatcaagcttggcgtcggaggtctggccctcagctggttcccaccctaaaggactggcctgcccaccctcacgtcctcgggcgcccttggctcgagggcctttcggagcctccgcgggaagcagaaagtcgcacctcacactgagcctttccttcgagcgctctgccgggagctactgagccccagcacgcagccttgggcacccggtggcgggcgaaggaacctgccccattgtgctgctgggctgcactagcggagacgagagtgcgtgtgggagtggcccactagcaccacccgccagggtttagcagcgcctggagcacctccctcttccctgctgtttccttaatgctggagctgggcacactccgatgtcccgcattctcacattcaatcattcattctccctctgaaagttctcaggctcctttgctcacgggtcgtctctggacctgagacacctgcgaaccttgcggatcaccagattgttttattgttcctctcttcccccactgaatcgtcggccgggctagtcttccagtttcgcctggagtcgattgcactctggcgcac

SEQ ID NO: 37467 - DNA, 913 bp, Homo sapiens; identical to SEQ ID NO: 19534
  chr2:223289375-223290288
  hyper

SEQ ID NO: 37468 - DNA, 163 bp, Homo sapiens; identical to SEQ ID NO: 14865
  chr2:224702626-224702789
  hyper

SEQ ID NO: 37469 - DNA, 859 bp, Homo sapiens; identical to SEQ ID NO: 35703
  chr2:235404277-235405136
  hyper

SEQ ID NO: 37470 - DNA, 314 bp, Homo sapiens; identical to SEQ ID NO: 19537
  chr2:239949585-239949899
  hypo

SEQ ID NO: 37471 - DNA, 744 bp, Homo sapiens
  chr2:240270283-240271027
  hypo
cgtgggctttccgtccacactcccggtttcatgccagggactctggcttcaaggcagaggctctgtgtcctgacaaacgcatcctgccctgccacagcgcatcccctcagggagggtgtggagggctggccgggcaaggggcgtaaggctccagggcctcctttcaaaggagagcccttccaggctaagtcaatccaggttcttccctcaggccgctcacatcattagaaatcgttctttagagcaataaaatcccaacagttaagcagctttgacgtcagagaaccagggcctggctctggcaaagttcagcgggaacagcaataaaaccgtaacacaaaactcacccagcagcagaggactttcacagaacacaggagaggaaagccacacacactgcactagaagggcacttcatcagcagggcaaagccaagtcacatgacaaatgtgagagggggcccatgggcggctggactcccccagcccggcctgcccagggagtgagggcggcacgggcacccacaccaggccacacaggagcagggcccccatgccagatgggcaggcaagggtgagccaggcaggcaagagtgagccgggtgggcagggcgaaggacagggccagctagcagaggacggcacgagagacacacggagggaggggaggtgcagccaggtaggccccgaacaccacgttgccaggactcggctcctcggctcaaggaaaagggacagcggttcc

SEQ ID NO: 37472 - DNA, 296 bp, Homo sapiens; identical to SEQ ID NO: 19540
  chr2:240906462-240906758
  hypo

SEQ ID NO: 37473 - DNA, 213 bp, Homo sapiens; identical to SEQ ID NO: 19541
  chr2:240930596-240930809
  hypo

SEQ ID NO: 37474 - DNA, 447 bp, Homo sapiens
  chr2:241393134-241393581
  binary
cgtgtccagacccctgcgcacccgctccggctgcgcggtttgccgtcttcgtccctggccgcggcggctggcgactggcatcggggcgcccgggacccccagggcggcgacgctgccgccggtgccgccgagcctttgttccgccgccggggccggtttcacgcctgtcgccctcgcaagcagccgcgggtgacaggagccttagccggcctggggcgcggaccctcccacccggggcagaggtgtccctacgacgcccctcggtttcgggtcgcagtgcgcggcggaggttctgcggcggcggaggggctccttggcgacgctgtcatttgggtgaaatggtggcgggggggcttcgggcagacggcaggggtgtggggaggggagggaagcacgatggggtgagtctgggggccgtggatgccgttgacgaggagctgagatgcc

SEQ ID NO: 37475 - DNA, 206 bp, Homo sapiens; identical to SEQ ID NO: 19543
  chr2:27303557-27303763
  hypo

SEQ ID NO: 37476 - DNA, 278 bp, Homo sapiens; identical to SEQ ID NO: 25471
  chr2:27473102-27473380
  hyper

SEQ ID NO: 37477 - DNA, 134 bp, Homo sapiens; identical to SEQ ID NO: 19545
  chr2:38342446-38342580
  hyper

SEQ ID NO: 37478 - DNA, 824 bp, Homo sapiens
  chr2:45156991-45157815
  hyper
cggggaggggccgcgagggctcccaagtggacggaagtaggcgaccaacttcgccgcgactcctgcttcctagagaagggccttggctgaggaggcggcgggaggggactgttgcaaacagctgttcctcatacatatttcattacacaatcagataatgcgtcccaccaccttctcaattattcacagataaacattttcaagacgttttgacatctgtcttagtgcctgctattaatttagtaatcactgtagttaaaaatgtatgggatttttgccgtcggagcacctcgtatccggcgcgcgggcccagtgtgggactgcggctgggagcccgggccctccgggagtgaagatacctttggaggtgagacggcctctctagcgcgttgacactgttgatggaagggattaaaggggtatcaggttattttaatttattgttgaagatgatgactgccccctccccgatccgcataccgtcctcactttcccaccccaaccctagacccgacaacaccgttcagccctttgccccgggcagcggaaatggttagcttcctctaggagtttctgctgaggaaggcgcaggcaaccctagtcggcttagagagagacaaccgcacgcgatcaccgagcacgatttctcccaacaaaaaaactaacaataatagcgatccacacactcaagaggtctcaaacctccgaagttttgccccgagtcttgtggccctggcagaggtgacaagggcatttgggaaagacagagaaaaataaattcgctccagtgactgtacacggggcatttgaggctgtgagaaaac

SEQ ID NO: 37479 - DNA, 999 bp, Homo sapiens; identical to SEQ ID NO: 30182
  chr2:45159503-45160502
  hyper

SEQ ID NO: 37480 - DNA, 1466 bp, Homo sapiens
  chr2:45164561-45166027
  hyper
cggcggggctcattaggcagagcagggtgccgagaggtgcgcgtcgccggcccctgaggccgcctttgagccgtcggggcggcttcattaagctgcgctaacaaggcgtacaaatgccgagcccagcagctttcttgcaatgcccggccttagcagggcgccggactaatgagggtcactcaaaggggctgatcaaatattcaaatttccccgcacgccaggaacttttatgcatggagaaagttgaggcaactgagctgtgtttactgtccggggcgacaattgcttggagcgccagtccccggaggctaaggcggggggcgggggtgcggggagggagcagttgttgttgttgtttttcaaaggaaagtaatcggggtccttgaagggcttcgcggcctccccgcctgcgtgctgcgctcccctgcgccctccctggccgcccgcgccaagcgcctcagtttgcagcttgcggggaggcccagactacgggccacccggccagcctccgcctcccgacatcctgggagccggaaggggcgttgcccccacagggcaaaccttcccccggcctcctggtcggctgtttagagctgagcaaggccaagtgggtgcagctgccccaaccctccggatcctcgtctcccggaggcctgcagacccgttggctttccctgtaacccaaaacaaggagagagtgggaggtctctcgggcgttctccagatgtggttgagactttcccagtgctggggtggcgggtgacatttgtaaataaatgccagttggtccgggtacaaggagaacactatttaaaccccaaagacatcttttctccctgccccacctgaaggcgatattttagatcgccggggccaggattgaagcggggatgatggcagcaaatttgttctgcacaggtgacccggcctgtacgggcgccaagtcccagatcccgcaatcagagcggccagagagcagagaagagacctagaggatctgcaagctgacctatccacccgagactctccgctctgagcgaccccagggtgcaggcgccctccacgcgccacctcctctagcggtcccccagggtcccttcccagtcctcgcactgccctagggcttgcttggttcccagaccagcgtggaaggccgctgggccccggaacccaaggtccctctgcttctgctccactccccagtgcccagcgcctgggaatttgggaggggaagctctggcgctccacagccctgcttcccacccaaacacgcactcagaacccctcgactgagatcctatggagcctgcgcccccagcccggcggggagccagtccggccctccgctctgggaccagccgccccgcctccctgccctgctctccggactctcaacttacccgctccaggaggcgggagtactgcttcaggccagagccgaaaggcgctggcggcggctggaccgc

SEQ ID NO: 37481 - DNA, 913 bp, Homo sapiens; identical to SEQ ID NO: 30183
  chr2:45169299-45170212
  hyper

SEQ ID NO: 37482 - DNA, 649 bp, Homo sapiens; identical to SEQ ID NO: 31656
  chr2:45171261-45171910
  hyper

SEQ ID NO: 37483 - DNA, 655 bp, Homo sapiens; identical to SEQ ID NO: 25482
  chr2:45176608-45177263
  hyper

SEQ ID NO: 37484 - DNA, 967 bp, Homo sapiens; identical to SEQ ID NO: 28982
  chr2:45181466-45182433
  hyper

SEQ ID NO: 37485 - DNA, 144 bp, Homo sapiens; identical to SEQ ID NO: 19549
  chr2:46689161-46689305
  hyper

SEQ ID NO: 37486 - DNA, 462 bp, Homo sapiens; identical to SEQ ID NO: 6110
  chr2:47499350-47499812
  hyper

SEQ ID NO: 37487 - DNA, 391 bp, Homo sapiens
  chr2:48982534-48982925
  hyper
cgtttttctccaagcttccagggaaagggggccaaaggagtagggagggaaggtggcatagagcgatggagggtcctgcatcaagggcgccgcgacgggagcgctgtgtactcacagtcgagtgagaccggccgtggggccggggcagcgcagggcgccgtcgggcacgcagttgcagggctcagggcagagcgcctcgcgcagcgctcgtggcagcggcggctgcagcagcagcagcagcttcagcagctgcagcgccgagaaccgctgcttcatggccggcgaactgggcttctgcggcttgccagtgtcttggacggcctctgagtgcggcccgcacccctctccccgccccttggctgcccttccacacacccttccctgccggccc

SEQ ID NO: 37488 - DNA, 1286 bp, Homo sapiens; identical to SEQ ID NO: 32776
  chr2:54784837-54786123
  hyper

SEQ ID NO: 37489 - DNA, 1430 bp, Homo sapiens; identical to SEQ ID NO: 25483
  chr2:56149749-56151179
  hyper

SEQ ID NO: 37490 - DNA, 362 bp, Homo sapiens; identical to SEQ ID NO: 19554
  chr2:61109154-61109516
  hyper

SEQ ID NO: 37491 - DNA, 109 bp, Homo sapiens; identical to SEQ ID NO: 19555
  chr2:61110127-61110236
  hyper

SEQ ID NO: 37492 - DNA, 970 bp, Homo sapiens; identical to SEQ ID NO: 34687
  chr2:63275508-63276478
  hyper

SEQ ID NO: 37493 - DNA, 993 bp, Homo sapiens; identical to SEQ ID NO: 30188
  chr2:63278430-63279423
  hyper

SEQ ID NO: 37494 - DNA, 670 bp, Homo sapiens; identical to SEQ ID NO: 24273
  chr2:63280967-63281637
  hyper

SEQ ID NO: 37495 - DNA, 92 bp, Homo sapiens; identical to SEQ ID NO: 9525
  chr2:64538788-64538880
  hypo

SEQ ID NO: 37496 - DNA, 964 bp, Homo sapiens
  chr2:66653253-66654217
  hyper
cgcttctcccaggacgtctgatcccattagcgcacctgaaatcacaaccttggccacaaatgcgcgcttgttgcgacccctccgagtgggccgccgtgccgcaggagccactctggggccggggtccccaacctctcccccctgcaagtcctaaaaggaatcgtagagcaattgatctcggaggagatgagcgcaccccggggctcattgctgcccctgaggaagagccgtccaggaacggaggcgagaagcttccagaattaggccaagaggcaggtggcggggtgatccggcgtccccgagtccagctggggagaaaggcgccctcggatgctcagccccaaagcagcagaagacagaagccggtgcgccatcgtcgctgcgccccagtccgcgggtcctcgcgctcctgctccggctcccgggctgccacccaccgctgcccaagcctgaccaactcccaactccctccggcacaggctgaggcgacccccaaagagaaaaataggatcgcagtcaaaactggcggggatggggcacactggtgggagaggggaccttttcaccttttgctcttcccaggggacacagtcccccaaacctacgtccctgcgccaaaccaggtgcgagcaaactccgcggaccccgcagctggaagtgcatcctgccgggacccccacccgacccagggagtcagcgcgccccagggtgcaggcaggcccagggctctgggtggctcagggcacggggaccggatcgcgctgcagaacaccgccgggacccggcacccggacgcgcaagggcgacagggcagccctgctgtaaggactgtgccatgagaggttctcattcggtaaacagtggccctcccagaagtggccgccgacctgccagtcaatgaagttatcctccgggagctgggaagaaggggcgcctcgcggggctgtgggctcggttgcgaacc

SEQ ID NO: 37497 - DNA, 228 bp, Homo sapiens; identical to SEQ ID NO: 19560
  chr2:74211299-74211527
  binary

SEQ ID NO: 37498 - DNA, 1235 bp, Homo sapiens; identical to SEQ ID NO: 25489
  chr2:74729488-74730723
  hyper

SEQ ID NO: 37499 - DNA, 607 bp, Homo sapiens; identical to SEQ ID NO: 34697
  chr2:7571105-7571712
  binary

SEQ ID NO: 37500 - DNA, 727 bp, Homo sapiens; identical to SEQ ID NO: 32786
  chr2:87034584-87035311
  hyper

SEQ ID NO: 37501 - DNA, 895 bp, Homo sapiens; identical to SEQ ID NO: 14895
  chr2:88315911-88316806
  hyper

SEQ ID NO: 37502 - DNA, 187 bp, Homo sapiens; identical to SEQ ID NO: 19567
  chr2:97073215-97073402
  hyper

SEQ ID NO: 37503 - DNA, 163 bp, Homo sapiens; identical to SEQ ID NO: 8364
  chr2:99097200-99097363
  hypo

SEQ ID NO: 37504 - DNA, 389 bp, Homo sapiens
  chr2:99346429-99346818
  hyper
cgttttcgggtttacacgtgtgggttaaagaaatctatgtcaagataacctgttcatcaaactgttttttaaacattcagaaaaagaaacataaaccacaaaacgcatatttttattctaaatttacagtctacgttccaacgaacgactgtcattatcttttatcaaataatctgtccaacagcaaaagcacaacagcaaaatacgtggaaagcattcaaagcatacattgtgcctgcttctattttccaatgcggaatgtaggcaatgaaaccgctccagagaaacacactgttgcgaggaataaaggcgggtgtgcaagtggctcgactgccagctcagaaaagctcgcctccgagatgtcacctggcacacttggtggagtcacc

SEQ ID NO: 37505 - DNA, 736 bp, Homo sapiens; identical to SEQ ID NO: 19571
  chr20:10415352-10416088
  hyper

SEQ ID NO: 37506 - DNA, 119 bp, Homo sapiens
  chr20:17919844-17919963
  hyper
cgcccctgccgcctacaggcagaaagcggatggtgcaaggtttccttccaaacggaaatcgcccttcacagagctgagcctgggaattaccacaaagaaacctcacaaagaaaaggtgc

SEQ ID NO: 37507 - DNA, 130 bp, Homo sapiens
  chr20:19186752-19186882
  hyper
cgctgccaccagggggcgcaccgccacagcgatcctaggaagagcatctggacccaatcattctgcagttctggggctggaaacctgggcgatgaactgagatgaggagatggacacagcactgtataac

SEQ ID NO: 37508 - DNA, 78 bp, Homo sapiens; identical to SEQ ID NO: 19574
  chr20:19673407-19673485
  hyper

SEQ ID NO: 37509 - DNA, 148 bp, Homo sapiens; identical to SEQ ID NO: 11506
  chr20:20343543-20343691
  hyper

SEQ ID NO: 37510 - DNA, 790 bp, Homo sapiens
  chr20:20350039-20350829
  binary
cgccgccaggcctacctacgcaagcacctgctggcgcaccaccaggcgctgcaggccaagggcgcgccgctagcgcccccggccgaggacctactggccttgtaccccgggcccgacgagaaggcgccccaggaggcggccggcgacggcgagggggccggcgtgctgggcctgagtgcgtccgccgagtgccacctgtgcccagtgtgcggagagtcgttcgccagcaagggcgctcaggagcgccacctgcgcctgctgcacgccgcccaggtgttcccctgcaagtactgcccggccaccttctacagctcgcccggccttacgcggcacatcaacaagtgccacccatccgaaaacagacaggtgatcctcctgcaggtgcccgtgcgcccggcctgctagagcgcgccctccaccccggcccccgaactgtgccttcgcttggagacccacaaagagagtgcgccctgcactccccgaacccgagtccgcgctgggggagcctcgcccccgcccccaccgggtgaaagtgtcgtctccgcttctctcggtgtggcgtgacggtaaccccatactctccttttgactccttttggaacccccacttttacgttgtgtccctccgcctcccccatggcgcaacaggagtcagtctctttctgtacaagggagaaaagctgtacgcgtttgtctcgtggttggaagcctccccttggcggggagaagctttttttcttgctagtattcgctgtgttcatggtctagaaatgcggtctggtctcgcctc

SEQ ID NO: 37511 - DNA, 859 bp, Homo sapiens; identical to SEQ ID NO: 23203
  chr20:21080357-21081216
  hyper

SEQ ID NO: 37512 - DNA, 854 bp, Homo sapiens; identical to SEQ ID NO: 26818
  chr20:21485932-21486786
  hyper

SEQ ID NO: 37513 - DNA, 160 bp, Homo sapiens; identical to SEQ ID NO: 25508
  chr20:2668754-2668914
  hyper

SEQ ID NO: 37514 - DNA, 1310 bp, Homo sapiens
  chr20:2731109-2732419
  hyper
cgagcagtgaacacacgtggagaggcagtgtagaaccccccagcctggctctatttggccgctggccgagtcttctccatttccatcctcccgccccgccccagctgagccacccacttctcctctccaccccaccgcagtccccaccatcgcgcagccccccgcaccgatgctcatcgagcccttcgagggacactcggtagtgaccctacttagcctccccggagctccagtctaacgcggaaaggctgagcagagaaccgcatggggtgggtggggtcacgcggtcaaggggctgacaatcaaggaaaacctttggtagggagtgcctgctgagcccggctcaaccgaaacccgagggctgagtggggaggttgacctggggaaggaagggtggttgcagaaggaatgataaggaccgatccccagaagtgagtgctttctctttgccgggaaactaaaggaaatccactaagtcaggatcagaggtgaaggtagggctctgagactggtggattaggtcggggccaggctatctgaaaagggcggtgcggggatcaggaaaaggggaaggaggaggagaagggcgtggggagctgggtcagacgcgcatacacacacacaccccttgcacaacgccagggtaagcagtgaacacaacacacgtggagatgcaatgtagaatctggccgctggccggatcttctctacttccatcctcccgccccagcccaagccacccacttctccagttgcttccctggggtgcatgcaaacctctagccttcagatgctgcagagagtccacttgagccgtgataaatggagattgttaagttttttcttttttataataaactcctgatttgaccagatgaaaagagaaaactctccatcgagtcctgcccttaggactataactcatatgtgtatacggtttcccttttttctaatcacaaatgggtgcatgtgtgttcataccaagcgcctagggccgaggacagaggctggctcagtaaatatttgttgagtaaacaaacgaaagaactgaaacttccctgaatctcgctgccgggggtgcctggagttttccgggggacttgggctgggcctggtggagggggctgcagcgaggctctcggactgggcgctggcctgcttttggcgccctgcgtctcaccctgggagtggggggctgcgggggagacgtcctccaaacgccgcccccttccccagctctgaacgagcccaccattgactacggattccagaggctacagaaagtcattcccagacaccccggagacccc

SEQ ID NO: 37515 - DNA, 909 bp, Homo sapiens; identical to SEQ ID NO: 25511
  chr20:30193272-30194181
  binary

SEQ ID NO: 37516 - DNA, 262 bp, Homo sapiens; identical to SEQ ID NO: 19583
  chr20:30196349-30196611
  hyper

SEQ ID NO: 37517 - DNA, 517 bp, Homo sapiens; identical to SEQ ID NO: 32795
  chr20:32899337-32899854
  hyper

SEQ ID NO: 37518 - DNA, 534 bp, Homo sapiens; identical to SEQ ID NO: 19586
  chr20:34652354-34652888
  binary

SEQ ID NO: 37519 - DNA, 431 bp, Homo sapiens; identical to SEQ ID NO: 19587
  chr20:35155295-35155726
  hypo

SEQ ID NO: 37520 - DNA, 444 bp, Homo sapiens; identical to SEQ ID NO: 31704
  chr20:35201323-35201767
  hyper

SEQ ID NO: 37521 - DNA, 770 bp, Homo sapiens
  chr20:3653212-3653982
  hyper
cgcactgggcccccgggcgcagcgagcagttgtgagcaaagcagcagaggtcgcggcactcctgggaccagaaaggcaagaagggcccaggtgagggcgcagcgccccagacctgagcggagagggcaagtgggggccgggcgagccgacttaacctggccagggccgcagtcacactcctcgcccgcttccacgaagccgttcccgcagagcgccggcggcaccgggagtccggggtccggggcattggagaggcaagcgccgccccccttgcggaagaaggcgcgcagctggcggcggctgcaggcgctgaacacgcgcggaaacgggtgcctaccggcacggggagggcattgggcatggagggacagtcccccaacccccgcgcttctctgatccccacccctgggcttggctacagccgccagacgcgcagagcccagagaggggaagtaacccgcgcaaagtcacacaacaagcgggacaggggacgatgcggccccaatagtgagcagcccgggacccaaggtggaatcgcgacccgacggtgctcctcccggtgtaggagtaacctcgccaggttactcggaaaataatcttcataccgttgagaatccactttgcctgagcttcttccctttaagcctcataaaccaccctgaagcggacactatgatcattatccccattttacagaagaggaaactgagggacgaccaaagaaacgcagcggaggaagtccccaggactagccgccccgccgcagcccc

SEQ ID NO: 37522 - DNA, 847 bp, Homo sapiens; identical to SEQ ID NO: 35743
  chr20:37435071-37435918
  binary

SEQ ID NO: 37523 - DNA, 106 bp, Homo sapiens; identical to SEQ ID NO: 19592
  chr20:37596775-37596881
  hypo

SEQ ID NO: 37524 - DNA, 866 bp, Homo sapiens
  chr20:39318786-39319652
  hyper
cgccgcggagaggctcaaacaggcataaagtgcgaccccaagtggccactgtgcgcaaaggcgccgcgaccgcccggcccacggccggaaggcttggacggcgcctcgtacccagccaggtctcccctacctggcccaacccaagccagcccagaacgcatactatgtgtgcaccagagcccaggacaggttcccctcgagcgatgtacaggtcctcgggtcccgtcttcgtactcagccgcgagcctcgagccgcgagctccgctctggtcgccccgttgaaattccgtgccccagcgttcgggggtgcccgtcggctgctccctgggccggaaggtcctgggcggaggaaggccggtagccaaaagtggaagcgccacagtgaagcggcccagggccaccgggtgagaaacctccccggagggcagacggggagaccgaagcacaccgcactaggcatccagactgggcttgggagccgcgcaccctccctacccagatccaggatggctagaattaacgggttctttctgagacctcggctcaggcgccgaaaccggatagatcgcgaattcgctggacccggagacccgacccgcctcccgcgtcaccttcttctttctagctttgggcgcgcgcagcgaaaggcaggagaggcgcgcactgggtgagtgagtcccggccgctgtctgcgctggaccagcccgactgacctcgcgcgtaggggtcgcgtgagccacaccggtgcagacgcgcctagattatttttaaatgttagaaggtaaaatatttgcctccaattaatctgaaaactctctattctcttgcgccctcggagaggctggggtacggcgtggtattgggcc

SEQ ID NO: 37525 - DNA, 141 bp, Homo sapiens
  chr20:42587850-42587991
  hyper
cgagaggggtaagatccctgcccactgccatgcagcagcttagtgcagagcctggacttgaacctagatctgcctgcttccagagctgtgctgcaccagtgttctcgcagctcccagtccaaaggccgacgttgagacagc

SEQ ID NO: 37526 - DNA, 184 bp, Homo sapiens; identical to SEQ ID NO: 19594
  chr20:42804035-42804219
  hypo

SEQ ID NO: 37527 - DNA, 760 bp, Homo sapiens
  chr20:43438025-43438785
  binary
cgctctggctgaggttgtgcgcaggcctgggaggaggaggttcaagccgctggctggtggccggcttcagcccaccaagaaaggcgactccagggacaagagcacctgaggtcaggggcacacaccagcgggcggacaagtgtagagttggcgccgccctacacctctctccgggaagagaggggaggaaaggccgtcacctggccggttcccctccgtctgccccaggcgtataagaagcaggagtctggagccccagcccatgagggaaggagaggagagataaatgggggcgctcaaggcctggggcgccgggcaggggtcttgggcagggatcctctggatgtggccaagacaaagatggagaggtaaggtctgcgcgccacctccaatggcggggggcgcgtcggagccccaggggtgggacggccaaagcccagggcttgaagagtgggcacattcaggagactcagggagggtggcaggtcggctccagggacgaggcaaggggcctccaataggcgcgggtgaggagggagatgggtcctggcgacccaaagggcccacctgcgggaaaggtgaatgcagacaatctcggggtccctgggggagaaggccagaaggtagcgcatcctggagaccctggggtcccgtgggtgcggaaggagaccctgggggcgccttcccaggggattgggggtggggaggagggcgcacgggtcggggagggggctaccggacctggatcccgggacacccc

SEQ ID NO: 37528 - DNA, 491 bp, Homo sapiens; identical to SEQ ID NO: 31711
  chr20:44452643-44453134
  hyper

SEQ ID NO: 37529 - DNA, 940 bp, Homo sapiens; identical to SEQ ID NO: 26840
  chr20:4803013-4803953
  binary

SEQ ID NO: 37530 - DNA, 908 bp, Homo sapiens
  chr20:48098999-48099907
  hyper
cgtcatgcccgccggcatcgctgatccggccgcccccgccccccctgcccccccaggccgctgtcactcgacggcaaggcccgctgctgcgggggaggggggcagggagcgctgtgggctgctgggggtgcagggggccccgcgggcgcgcgtcacggccgtcttctcacctccatcccgacggctgcgaggcagaaagcgaaagcggacgcgggtcagcaaacggggagctgggcatgctgtccccccgccccccacctctccaccaggctcccagccggccttgaccttcccccgcgcttaagcggctcagtggggtaggacggatggtcgctgtccctcccgccggtgctgaagtccgccgcaccccatggatggagggaggggccgcccctcggggcggggagagggccccaagagatgcccctggagcccgggaggccccaccctgggcttctgcggcccaggcgcgacccagccgcccggggcgctgtccgccccttagagtgctgaaactctcttcattatgggtctcccgatcgagtcccgaacctggccccgccatggggagagagggggagctgcatgaaaactttctttctttatctttttctttctttcttcttcttctttccttcttttttttttttttaacgagttctcttcttttccttccccttctcgagataatcaagattttgggggtgggggaatggcagcgggcttttttccaaatcttaaaagatttgggggaattccgggggttccaggtgcccacctgtccgaggtcacaacagacggggtgtgcacaacagcccctctgtcctggagcgacccctcttcccaaacactggagcatctcctgagattgctccagcgacaaggtgagccgcgaggaggaaaagccc

SEQ ID NO: 37531 - DNA, 982 bp, Homo sapiens; identical to SEQ ID NO: 19598
  chr20:48598700-48599682
  binary

SEQ ID NO: 37532 - DNA, 175 bp, Homo sapiens; identical to SEQ ID NO: 19599
  chr20:49197887-49198062
  hypo

SEQ ID NO: 37533 - DNA, 117 bp, Homo sapiens; identical to SEQ ID NO: 31721
  chr20:49836905-49837022
  hyper

SEQ ID NO: 37534 - DNA, 952 bp, Homo sapiens; identical to SEQ ID NO: 14910
  chr20:50158723-50159675
  hyper

SEQ ID NO: 37535 - DNA, 810 bp, Homo sapiens
  chr20:50383675-50384485
  binary
cgccgcgtctcctgttccgagcaactgacgctgcaataagcggccgccaccgggaaatgcccagagaggaccagacgcccgaggaagggcggagcagagcggccgcaggccccgcccaacaccgcgctcagcctcccgcgggctccagcctcacctgcgcggcctgtggagctgcacatctccaggccccgccccccagaactctgattggcgggtctaggcgggggccgggaaatctgcatttgcaccagcgcccacccccgtccttcccacccccgcccctcacgcccaggtaagtctatggcaggcgatacgagagccccgcaaacctcaacgcgtcacgctgccatcctccgaacaggaagacggcgaggcgcaaaataccaacccgtcccctcttcccaaatgcagaaaaacccttgcctgttccgcgcctaagctgccctcggggtctcctactgcgggaagggcacagcaggtggcagcccctgtcccagccgtgggattccttccccgaaattgtggggggagaacacaaggggtagtgtcaccaagcggccagtaggagaccctcccaccctcctgcgactgctggttcgggtccaccccgggcggagggggaaggggccaccggagcgcaggtggtctcggcgcagcctcctggggctgggacccaggggcgctgatggggtaccccgaggcgtaggccgcgcccccctaaaagctgagcatatctgggctcccgagtaatgctccaagcgcagagctcggtgtgacactgaccaaattgttacctcagatattaattac

SEQ ID NO: 37536 - DNA, 372 bp, Homo sapiens; identical to SEQ ID NO: 19603
  chr20:52259577-52259949
  hyper

SEQ ID NO: 37537 - DNA, 200 bp, Homo sapiens
  chr20:56725857-56726057
  hyper
cggacccaagcgacgcggcgaaagcacagcgaccccaccctcgccaggtgcagagccatttccgcctccgagtcctgcgttgcctggcaaccggtctcccaggagacgcgagacgctgagcccagggccagagcttgcggggcgcacagagcccccaggcctcatggcgcagaaacctctcagcaccgcggcggctgaac

SEQ ID NO: 37538 - DNA, 982 bp, Homo sapiens; identical to SEQ ID NO: 25536
  chr20:57224597-57225579
  binary

SEQ ID NO: 37539 - DNA, 304 bp, Homo sapiens; identical to SEQ ID NO: 19606
  chr20:57227604-57227908
  hyper

SEQ ID NO: 37540 - DNA, 218 bp, Homo sapiens; identical to SEQ ID NO: 19607
  chr20:62127516-62127734
  hyper

SEQ ID NO: 37541 - DNA, 390 bp, Homo sapiens; identical to SEQ ID NO: 19608
  chr20:62273399-62273789
  binary

SEQ ID NO: 37542 - DNA, 622 bp, Homo sapiens
  chr20:62368779-62369401
  hyper
cgggagacgcaggagccccgcagccgcgggaggtgcagatttggggctgccaggtggcgccaggtccccttggccagcccccagcgcccctttcttctgtccccagggcctcggcttcacaggatggggctgccagtgtcctgggcccctcctgccctctgggttctagggtgctgcgccctgctcctctcgctgtgggcgctgtgcacagcctgccgcaggtaggtccctcagccgcgttctgtctggggcctcgctgcggctgccattcacagcccagcgcgggaaggggctggaggcaggtccgcgcacccagctcggcacgcgcgcctgcaccgggccttggacccgaggctgacgaccccgccccccgccccccacctctacccccaaggcccgaggacgctgtagcccccaggaagagggcgcggaggcagcgggcgaggctgcagggcagtgcgacggcggcggaagcggtgagtgccaggctgtcccggggaccagggtggggtccgcagggcaccgaccagccttcctcgcccccagtccctactgaggcggacccacctctgctccctcagcaagtcggacaccagactgcacgagctgcaccggggcccgc

SEQ ID NO: 37543 - DNA, 408 bp, Homo sapiens
  chr20:62463400-62463808
  hyper
cggcggccgcgcgtgggtccctcccgtcgtgttgtctgcgggggacgaatggctccgggagggggcgggaaccagcggcccgggcctcgccccagcccgtgtgcagccccgatccgaacggcctgggacgcgtctccaccactcggcgcccggactctgcgcgtcgcttctcgcctccgccgtcctcagccctcgggcgggtagagtgggaagcgcggccccgcattcctggccggcctgcgcaggggtaaaggccacctcgcttcctctccccgggcgcggcgggaagggaggtgagcctgtggccggcagccgcgcgagggagtcgagcccggcccggccaaccaatggggaggcgcccgggccgtccagcctgcctccctgcgggcccagcgcagcggattcctc

SEQ ID NO: 37544 - DNA, 345 bp, Homo sapiens; identical to SEQ ID NO: 19610
  chr20:62495236-62495581
  binary

SEQ ID NO: 37545 - DNA, 888 bp, Homo sapiens
  chr20:9487111-9487999
  binary
cgtggcacggggttggcccttggcttcgcagtgcccggaggttcggagcgagcactggaccagagcccaagttcccaagttcccattccacggggagatgcggactttaggtggacccggaatggaaggagggtttttgctgcccgcatgcccccagggctctttccgggaaatagaagggcgagtcctttgcttccgcagcgtccggtgggaaaagatgccacgtggcgcggtgcgggcggactcagaggccccaggcgcccccgggaactgccacttactcagggcccgcggtccctggcgaaaacgggcgtggcgccagtgctcagaccgtgaagtggaaaaacggatcataacctcgcgttaaggggaaattcaggtttttttctctgagaaatgtatccttccctaaccaaaatccagcacctagggccacccatccctcggtccctgagcccaccctctccctgcaggcacagctatcccaggttccggcccatcaagttgggaaatgagacgatccatcagtgccaggctcccgggagctgcagctggctccaagtgcgtggccggaggcgtcccccatctgcacgagtccccagagtcacccgggaataactgcgccgccgccgcctccgccgcctgggctcccgacctccgcgcgacccgcgttagctcgcgttgcctgctgtggctttgctgctctgggctacaaggccgggccggcttgggttgagactcccgaggctgcaggcgaggcggtgggtacaaacttccgtagatcctgctgtttctctgaagaagaagaaaaacattggccccggagaattagataatcctggggaagaaatagatttgggcctggggcctgcgggggtaggtgcccac

SEQ ID NO: 37546 - DNA, 1204 bp, Homo sapiens
  chr20:9488578-9489782
  hyper
cgccctgaggcgttggaggtaggaggaggtgtgaatttcattcccgcctctctgggcatggagcttagcttagcgaatagggaccctacagagggaacaccaatgaatgagtccaccttctctcctggtcctagggcccgaacccacttgtctccagggctggcgccagccccgcgcacaaacaccgcttcctctgggtaaccgcctggactgcctgcgcgccctcggagcccgcctggttggcagtctctgcttcgatctcctctaagcagaatctattttctgtttggaaaatctcttacaggtcctggggttgtcccaggaccaaactgcagcgaggccgcgcgcccctggccctggaacgcagcatcctccccattttacctggaggctagatcgttggggctcttcgggggaatttccctgggcacggatactgtgctggcggtttagaaaagaaaaagaaaaagaagcgaagcctctgtaacctggtctcctccctctcctcggtttaataccctgcctcccctactagtctccaggcttttctctggacaggggagggacccgagaagcccgcggccagtgatcgccagggtctgtctcgtcgcccatcctccccgccccagagcaaggtcggcagaggcttcccggggcataagaacttcaaagaaagtctcagaggagccacgctaccaggaactttcgtcgccctttaaaattgtcagatagacaagtaaaaacagtaactaactaagggaacaatggactcttgtgacatgtgtaactcttccaggtaccccaacactaaagaccccgtggttcctgtcgccatggcctgaacgtactcaactccagccccggggctgacctctctccctgagctttggagcgggtttggacctagccgttgcaagtaggcatgacttttatcacccatcgctatacccagagcagctgctcgaatgtgccaaggagcccaactcgggtgcaaagcgccgacgtctttcccaggttgaggacatcgcgagccagaggtgcaggcagcgaggcgcccaacagtagaatgcatcttccttcccgcgggcagaagccgtcaagtctggagtccgcagcgggcgcgcgggccagcccagggatactgagccatgagcaaccaggcccacctaccgccgcgccatccaaaggtaacaccacagaccac

SEQ ID NO: 37547 - DNA, 235 bp, Homo sapiens; identical to SEQ ID NO: 19613
  chr21:30670777-30671012
  binary

SEQ ID NO: 37548 - DNA, 938 bp, Homo sapiens
  chr21:34602438-34603376
  hyper
cgcgagcgtcgggtcccagagccgggcgcggctggggcccgaggctagcatctctcgggagccgcaaggcgagagctgcaaaggtaacgcagcgtggcggggtcgcgggagcggagcgcgtggccagctgactggagggaaaacgccgcctccctgcagcggttcccggaatcccctccggttccctctcgctctccccgactcctcctcctcctcctgccctccctctgcgtcttgagtatgcggctagtgcgcccttcctctctcccggggccgcacctgcgaccccaggacccctcccgggccctgtcctgcgccctccacgcgtcgcccctgctgggagtccgctttcgttgcacccctccgcgtcccaccccaccccaccaaggatgcccaggataccgggcatttgccactgcaagatgtgagtcgttgctaagtttgagggtcacattcctccaggtccaccccgccttgcaaaaccggctcaccagctgggtgctcaggttcgggatctccagcccgcccccttgaggtcccctgggattagcccccctcgacctgcgtcagggtcacagactgcagccggggctggagcggcctacacccctccggatccgctgcgtggaggcaggagggggaaggggcgaggggacgtggccgcggagacagaagggtgcaccctcccagggtcggagaggggagatactgggaagatactccgcgaatatggagaggcgatcggcacttgcatttcaaccctgagcaaatcaatccgttacacgcagtagcgagttgactccatcagcccgtttatttggttagcgatggttatattgactctgagtattcccacctcctttcttttaacatttttttttttatttccttgttttgtttagcaagaagtcttagaaacgaatatagcatgcttgggc

SEQ ID NO: 37549 - DNA, 293 bp, Homo sapiens; identical to SEQ ID NO: 19616
  chr21:38382182-38382475
  hyper

SEQ ID NO: 37550 - DNA, 508 bp, Homo sapiens
  chr21:40105869-40106377
  hyper
cgaaaatatctgtcatcgtcactttacagaaaatggaaaaggatgaggattgcacaaaaactagaaattccatcccgggtgtttttcctcctcagcaacgggcacaggtcgttccagttttggccaggcggtggcgctcgaggcaaacggtgtcatgaaacggtcactggatgcactgaccctgaagatgctctcaaagcacgagtccgttcatcagagagtggacttgacacccatcagaaacattcccggagtgcgttggtgtgaaggtgcgaggagagtcggggaagcatcccgaagccctgctaggcgaatgggtactgctgagattacagggtcagcacaaagcagaatacaggacccgaaaataacagctgcaccggaagaatacttgaccactgtttaagaaggaatttgacgaagagcagtcaccgagtgcagccctgggccggctaaaggaaaagaaaaaaaatcactcaactgccgctcggcggcgggaatgccaggc

SEQ ID NO: 37551 - DNA, 603 bp, Homo sapiens; identical to SEQ ID NO: 14930
  chr21:43188777-43189380
  hyper

SEQ ID NO: 37552 - DNA, 209 bp, Homo sapiens; identical to SEQ ID NO: 15908
  chr21:44444714-44444923
  hypo

SEQ ID NO: 37553 - DNA, 931 bp, Homo sapiens
  chr21:44840677-44841608
  hypo
cggggacggcaggcgcaaggcacaagcctgtgcagcaagggcacccgtccaccctcgaaatagggcactgagaaggcatccatgggctgggtttctcccgcagcccacagtaacctgggcctgattcccagactcaacaaggactcagaagccagccacgaaggggctgcaggagacacaggcccctgcccaggcgagaccacacgactcaccttgagacatgaagaaggggatgcggaagcggccctccagcacccgctgtctcagcgtcggcaggttaggcccatcgaaggggagagaaccgcagaccaggacgtacagcaccacgcccaggctctgttgaggaccacagagccacatcagcgccagggcggtgcccccgggaacacggcgccctcggggaacgcggcctcgggaagggggtctgcgcgcacagggctcctacccagatgtccagctgggggccttcatactccttcccctcaaagacttccggggcggcatacggggggctcccacaccacgtggacagaggctctcctgacttgtagaaattcccaaatccaaaatctgagcggcaaagaaacagatggatgaggttaaacggcaaatggcaaggggctgcggtttcggcacaggggctgtggtttcggcacatgccgggaagctggggctgcttgcgggcacactcccaccccggggcctccgtgcctgccagcttgatgtccctgctcccaccccggaccctccgtgcctgccagcttgatgtccctgctcccaccccagaccctccgtgcctgccagcttgatgtccctgctcccaccccggaccctccgtgcctgccagcttgatgtccatgttgccatccagcaggaggttctcggtcttgaggtcccggtggacgatgtgatggtcgtgacagtactccac

SEQ ID NO: 37554 - DNA, 307 bp, Homo sapiens; identical to SEQ ID NO: 19623
  chr21:47475683-47475990
  hypo

SEQ ID NO: 37555 - DNA, 273 bp, Homo sapiens; identical to SEQ ID NO: 19624
  chr21:47649460-47649733
  binary

SEQ ID NO: 37556 - DNA, 946 bp, Homo sapiens; identical to SEQ ID NO: 25575
  chr22:19711088-19712034
  hyper

SEQ ID NO: 37557 - DNA, 716 bp, Homo sapiens
  chr22:27299034-27299750
  hyper
cggcccttgctcctttcctgagcggctattttgagagcgatggaggggagagggtattagattcctgaccttgaggtcggggaggggagggtgatgctagtggtggacgaaagacttgaagataatgagaaattgcatcaactttacccaggctgtttctgggtctagaagcaagcaaaaataaggcgggagcgggtggggggaagaaaaagaggcatttattttggagccgtatcggaagcacaagtgtcatgggctgaaaggccgccttctcctgcgggctaagggtgtgggcgacagctcgcacattcaaataagggagcgattacacggcgcttgcttctgaagacggatttcctggtagggggagcgggcgggggggctgggccggtgtaaaggggacggcaacattaggctttggcaagttaattagggttcaggagtccagcgagcgagcagggggagaggctggatttgcataaatccatttacataatgttcttcacaaattgtgcagccagaaggcagggagggggtggggagggaaagggctggggagggggaggtggttagacgcccgaggcagccgccgccaaagggggaagggcgaggcccgagatgggacccgctcctccttcgccgcttcacctctcccctgctcttgtctgcaccagggccacccctgcctatctcggccgtcacctccattctgggcc

SEQ ID NO: 37558 - DNA, 571 bp, Homo sapiens
  chr22:29426301-29426872
  hyper
cgccgcgacccggccgcggactccagcctctaaagtcgggtacctttaattaggagaaattaagtggggctgctacatattttgagaataagtaacactatttaaacttaggcagccttaaccactaacttaaccgctgaattctcgctgctacatgtctcctaaatagatcagcataatcttaactaggacttaaaatgcatcatcttcgttccggaactcagaacctgcagccgacgggagcctttggaggcttaatgactttaattatggcgagaaatatcttctcccggtggggaggggcgcggccggtggcgaggagggcactttcccgggtcggagaaggccggatggcagcccgccccgaaagtcccggcccgctggattgggggttcgggggtggggggaacatagagaagcagggctggtggaggggaggagggaccctgcagggcggtacacgacgggtgggagtggggaggaggagggctcctggcgcggggaggagccgcgggaggggggatgttggccgcagggcctcggagttctgagctgtgtttgtggcttcagc

SEQ ID NO: 37559 - DNA, 851 bp, Homo sapiens; identical to SEQ ID NO: 24378
  chr22:31480666-31481517
  hyper

SEQ ID NO: 37560 - DNA, 410 bp, Homo sapiens; identical to SEQ ID NO: 19629
  chr22:31483882-31484292
  hypo

SEQ ID NO: 37561 - DNA, 212 bp, Homo sapiens; identical to SEQ ID NO: 19630
  chr22:31486794-31487006
  hypo

SEQ ID NO: 37562 - DNA, 425 bp, Homo sapiens; identical to SEQ ID NO: 19631
  chr22:31487263-31487688
  hypo

SEQ ID NO: 37563 - DNA, 345 bp, Homo sapiens; identical to SEQ ID NO: 19632
  chr22:31489493-31489838
  hypo

SEQ ID NO: 37564 - DNA, 96 bp, Homo sapiens; identical to SEQ ID NO: 19633
  chr22:31495078-31495174
  hypo

SEQ ID NO: 37565 - DNA, 365 bp, Homo sapiens; identical to SEQ ID NO: 19634
  chr22:32078028-32078393
  hypo

SEQ ID NO: 37566 - DNA, 246 bp, Homo sapiens; identical to SEQ ID NO: 32843
  chr22:38965923-38966169
  binary

SEQ ID NO: 37567 - DNA, 332 bp, Homo sapiens; identical to SEQ ID NO: 19636
  chr22:41418641-41418973
  hyper

SEQ ID NO: 37568 - DNA, 450 bp, Homo sapiens; identical to SEQ ID NO: 23217
  chr22:42353588-42354038
  hyper

SEQ ID NO: 37569 - DNA, 794 bp, Homo sapiens; identical to SEQ ID NO: 23218
  chr22:42679388-42680182
  hyper

SEQ ID NO: 37570 - DNA, 858 bp, Homo sapiens
  chr22:45097777-45098635
  binary
cgtgtgggcgcgaccgcagtgctgggcggggggcgggcgcttgggcttgggccctgcgtcctgtgcgtgttggtttcctgtgggcacgtggggccctcggaagaggggaggagggtgagcacgtcctcagagggcagacccagcgaggcgtcgtggcagctgcggccgcggagacgccggctccgcctcttgcacacgccccctcgcctgaggccccgccccgcccgcgatgcccccgcccccttccccgccccgccccccggggcgccgagacccgcccctgggcccgcccccgggtccgcccccggcctccgtttgcgccgggtctgtgctggccgcgcgcctggcgctccacgctgagcctctccgtgcaatgattaacccggcggggcggccggcgcgggacccgagacggaggcgcggggccggggcgggaccccgcaggaccgctcggcttcctgctctcgccggagtttccgcgtagagggcgcatcgccggcccggggcccttggtgcggcgtggcgcagggcgcggcgtggggcgcgcgtgggcgcggcgcaggcggcccgggtcaccatgaggactctccgcaggttgaagttcatgagttcgcccagcctcagtgacctgggcaagagagagccggccgccgccgcggacgagcggggcacgcagcagcgccgggcctgcgccaacgccacctggaacaggtaaggccgcgccctcccggccacccggaggccctggagccgggggaggggacccctgagccgtccgcgggctaggggccgccccgagccaggaacgctgccgaaggcggcgcggcgcttcacagtttgcaaagaacttgccccgcc

SEQ ID NO: 37571 - DNA, 342 bp, Homo sapiens; identical to SEQ ID NO: 19639
  chr22:45607771-45608113
  hypo

SEQ ID NO: 37572 - DNA, 189 bp, Homo sapiens; identical to SEQ ID NO: 32849
  chr22:45680605-45680794
  hyper

SEQ ID NO: 37573 - DNA, 33 bp, Homo sapiens
  chr22:46512632-46512665
  hyper
cgcttcccgctctcctggcgtgtgtgtgtttgc

SEQ ID NO: 37574 - DNA, 209 bp, Homo sapiens; identical to SEQ ID NO: 19640
  chr22:47075172-47075381
  hypo

SEQ ID NO: 37575 - DNA, 224 bp, Homo sapiens
  chr22:47199296-47199520
  hyper
cggcggttttctctcctgtgggccttgttggagatctcgcttctgctgtgggagctggggcccggcccccaggagctgaggcggggagggcggttggttcttgcgacccggccgtcagcgttcagcgtcgccctctagtggccaggtgctgtctttgcagcctgggcttcatgaccacagcagggcacgttggccttgtgggtggggggtgcttacacttgcgc

SEQ ID NO: 37576 - DNA, 314 bp, Homo sapiens
  chr22:49943122-49943436
  hypo
cgcataggcagaggtggcttcacagcagcgggcaagtgggggaccctgcctgatgcagagtcgggggcggcttcctgcagaccgggcttccttggcccattccccctctccctttttcaaatctcagaactccagagcggtgctctcctccaaaaagagggctgctccccttaaggcactcgctctgactttgccatcctccagctgacctgagtgagctcagcagccggagttcgtgtggctctgtcaccagccagcatgtctgaaatcactgcagagatgctgctgagggaacacggacagcgttctgagcc

SEQ ID NO: 37577 - DNA, 275 bp, Homo sapiens; identical to SEQ ID NO: 19644
  chr22:50690042-50690317
  hyper

SEQ ID NO: 37578 - DNA, 832 bp, Homo sapiens; identical to SEQ ID NO: 19645
  chr3:113251180-113252012
  binary

SEQ ID NO: 37579 - DNA, 343 bp, Homo sapiens; identical to SEQ ID NO: 19646
  chr3:123049661-123050004
  hypo

SEQ ID NO: 37580 - DNA, 245 bp, Homo sapiens
  chr3:124606483-124606728
  hyper
cgctcccgttgcttagccgcccgtcgccacgggaaaggggcggggcacgctgtattaggcgagccgagattacttgggccaaaggcggttgctagactgcgagagggagagcaggtacgggggtcgtgccggtaccgcctcatcctcccaaagcctcactgccggcggcctgagatgggacgtagacgcccgcgcgtggaaccgcaaagcgacttctggatgagcaagggagggcgtggtggggc

SEQ ID NO: 37581 - DNA, 154 bp, Homo sapiens; identical to SEQ ID NO: 19648
  chr3:127505560-127505714
  hypo

SEQ ID NO: 37582 - DNA, 318 bp, Homo sapiens
  chr3:13009355-13009673
  hyper
cgtggccacacggcgccgcggaagaagcacagggggcggggggtcaggggcggggcgtcaggggcggggctacgcgcaggggcggggccgagccgaggcgcggggtgcagagcgcaagggcggagtcccagacactgcatccaggtcccagcgcgcgaagcctctgttctggaaggaggactttgcgcagcccctccaacactggcgcctcccgggagccatgtcttcctctccagcgtgtaaccacaacaaatgcacagcgccaaacccccaaccagagcctactccgctgatgcctactcaacatctgcctatccc

SEQ ID NO: 37583 - DNA, 240 bp, Homo sapiens
  chr3:13367336-13367576
  hypo
cgtcacggatcccacggcccgggccacagccacacccgtcttggggtcgatgtggaggatgctgttggccgaggagctccaggttcctgagaggcctggagaggaagcacaggtgtcagccccctttccatagctggacactccagtcaaagcccagctcacctggatgacaggccagcttcctcgctggctgccgctacccccatgggggctcactcagcagcctcaggagacagccac

SEQ ID NO: 37584 - DNA, 896 bp, Homo sapiens; identical to SEQ ID NO: 19653
  chr3:13461404-13462300
  hyper

SEQ ID NO: 37585 - DNA, 977 bp, Homo sapiens; identical to SEQ ID NO: 29114
  chr3:138658129-138659106
  hyper

SEQ ID NO: 37586 - DNA, 332 bp, Homo sapiens
  chr3:138662102-138662434
  hyper
cgcctgaccactggagggctgaagtgagaggcctgcaggctcattcccgtggcgcaaaaccgctcctggcccaccagccggcctggacctgccgccacattgctggccaggccccgagatagacggggggggggcagtgagggctgggtgcggggtctagtctcagctgagcagcagcccgcaagaaccggcggatctatcctatcagaagtcggaagtcatctatcccatcagaagagtgaaagccgaccaccccctaatccgcctgggagaaccagactgcaaccaggtcaaacgcctgtgtgcctgcgcggaagcatggatcttaattc

SEQ ID NO: 37587 - DNA, 931 bp, Homo sapiens
  chr3:138665572-138666503
  hyper
cggcgcgccgcggccgggccgcctctgctctccgctccaggcgctggcgcggcaaagagttggggcgcacgagtccgcttacggccaagtctcaaacttctggagactgcggatgccgcccgcgcttgcttgctggaggcctgtcgctgctctcccctctccttccccttcccctagggagcggccggcgggagtggagctcagcctctggccatggggagtccgcccaacagagaggggctccggcctcgccgcccctccccgctcaggccagtccccgccttggtgggttttcttttctgcgctcttcccctccccccgccccccggtttcccgaagcacgacccgcgtctctggcggagctgcctcctggagtccctagtgcgccaggagcctcgctctgttctgattcgtatgggctccaccgagttccgcttgcgtcaggcgccttcgcccctatagcggggcggccagccgcgcacgggcgagttcatctccaagtcactttttgtaaacgccccgcacagcctggaccggcctgcccccgcccagcgagcctcaggggcccagccgacagccaggctcacgcgcccttgaaatctgccggtactcgctctgcgggctgggctgggagatgacgaggaccccggtggggtctgcccgcacccggccaaagcccaggaagctcgggccccagcgaggaaaggcgctccaagcctcctcgcggctttcaggtgaaagaaaacgactcctttgctctgccgtttgctgccgtcttgaggctgaacttctagctcggggctggggaggggcgagacggcgagggggctggacggggtagggtggggagagctgctctgaggctttgggaaagtcagcccagaaacgggtgtgactgtacgaagaagcctcggcctggcctgtccctcgc

SEQ ID NO: 37588 - DNA, 79 bp, Homo sapiens; identical to SEQ ID NO: 19654
  chr3:139352994-139353073
  hypo

SEQ ID NO: 37589 - DNA, 965 bp, Homo sapiens
  chr3:142837817-142838782
  binary
cgggacaagtatttttctgcaaattagaacggggcgttcccctcccccatcaccccaattccagaggacgtcaatcacagtggacgcagcaccgcgagcggaaatgcggagagcatcggggctccgcatgtggggcacaatgaaacaagagcagccccggccagaggtccagtaaagcggaaagacggtcccgcccgcacacccctccggaaaactgaagcgtctcctctgacccccaaggtcagaaagatttattacttccttcgagagggcgcagccacagacccactagagagggcgggcagggtgtcggaagccagagaacggcgctccgcgtcctcccaccgctccagggcgcagaggtgtcctcagtgcccggagaggttggcagtgtcggccccgagggaagcgtggagcggacggccgacaggggatttctgcccaaacttcatcaccaactctttctgagagcaaaaacatggggccgagtccggcagctgcacgcagaatccaactctctggcagctctcggcaccgacgagctccagatcccgcgttcgcatcccggcgctttgcgcgcagagctaagccttcggacccgtggactgcagcccccgcgcgtcgcggtaaagcgggtcgcgtctccagcccccgaggcgcagcgacggtgggagccggctcggcgttgggggcgggggcggggccggcgaagggggagggctgcgcggcggaggggaggagccgcggcgacagacggcggcgcgcaccaaccgggcgccggctggcaggagccgcgcagaggctggtccgagcgcgttgcgggcgcccggcgtaaggggagtcgggtagcagcatcctcctgggcgccgctttcgcgcggcggcggcggctgcggcggggtctttctttgcttaaatacctcgttggccagaagcgctggtaccgggggcgggttgggtcgggtc

SEQ ID NO: 37590 - DNA, 497 bp, Homo sapiens
  chr3:147088256-147088753
  hyper
cgcgcgcgcgcgtgtgcggatgtgggcagttagttgcttttaaaaagacatcgttgtccttcagagtaataaaagtgtagcccccatctttgggtgtggggattttacatgcacttctcatttcagttaacttttttcgagctgagaaaagctgctagcttactttcgggagactttgctcgttattcatctgtttagtcgcctcagaggcacaaaagcggatctgcggcgttatgaaaaatggcctgggcgcggagaatgtcacagtggtcggcgtattattttagcccttcttaaaaaaaaaaaaaaaaaaaaaaaaaaaaaaaaaaaaaaactcagggaaagtttgcttttgatgaattcaataaaagcaaagctgcaacggaagagattttcagctaaaattatacagcatggggcagagtttaaaacagccagatggccaaaggtagagggaccctctcggtttcaaaccccagatatagaattccaccggc

SEQ ID NO: 37591 - DNA, 1268 bp, Homo sapiens
  chr3:147108619-147109887
  hyper
cggaggcggcggcggcagcagcagggccaggtggtagctcggggctgaggatcgcggcgggggcagccgctatggggcccaagccctgacacacgtaccattcgctcaagtcggcggtacgcgccgccaccgccgccgaggaggccacctgggacttgtggccgcagtccgacgagggcgacacgagggcagacggtgtagccgaatcgtagccagagctgggcggcggcgagcgcccgtgcaccttcatgtgcttacgcagcgagctggggtgcgtgtagcacttgtcgcagccccgcaccttgcacgtgtatggcttgtcgctagtgtgcacgtgcgaatgcttcttacggtcgctgctgttggcgaagcgccgctcgcagccctcgaactcgcatctgaagggcttctcgcctggcggaggcaacgcagagacattagtgcttgtgggtcgtgttcccgtcaggtgcttgccaccctcccccattcgtctctcattttctggaaaagaactacaaaatattttcagaaatccctttccacggcgcctcaggtcgagcacccctttccctcgtgcagagagcgcccccggtgccctctcttgaacgcctccatccctcccgccttcctcctctgggctcatggggagggtatggaggaggagcgacagtgactccatcttagtcgagtttccatcctcgaaaatcctgatccactcgggttgtttcctccaaattttctccacttggaaccagaagcacctctgctcggaaatacattaacggaggagctcacaatatagttaacggggaagctcacatctgctcgatttaaagttgctgtttcagactaacttctctgccgctaccccgcccagccgttcatcccccccacccacccccatcctggcccaaattgtttcctaaagtaggttttgcgcaaacgccaaagcgatgaaataatttaaggatgcgcagccgatgcacattgtgtgtgcataaagtggattcgtgctgcagggagaggtattctgagcaatgattcacttcagaagagatttttacaggaatggagccccctccctctttccttctaccccctgagggcaaacatttagcagcattcttcaaatcttgcctaaaccttccgggatccctccagatacgctcgccagtaataatatttcattacgctgctccagaggcttcctggagaccgtgctgtgggcagctggccctcccagtccgcactgacttgcgatgtcgacc

SEQ ID NO: 37592 - DNA, 1141 bp, Homo sapiens
  chr3:147138422-147139563
  hyper
cgagtctccgagctcaataacgcaaggatggctgaagagcgtctgctccatgtctctttgccggactcaacgaccctcacccactgccaccgagtgctaggcccacagaggcctggcagaagccactcacccctcactactcatgactaggaagaaagtggccggggcatgagggttcgagttctgtcctaggtcccggaagccagggctcccagcgtctagtcaggggcgcagaaaccctcgttcctccaaacccccgccacagggaccactccagaagaaacccattcgtgatttgggtccctttgtgtttgagtattgtggggagtgggctatctagactctaaggactccaagctaacgatgacctgtgtgggccttgctctgaacagaaaactcaaactcagcgtgggttcccgcgtcttccccaaaaggccaaggcccaaagaacccttttcatttggcgaggggcttgaggaagggaggggctggggcgggagagggtcggggtctgcaagccagcggcccggcgcagcggacttgtccggctgctcagcttggcagctagcgtccgtgccggcaacgctgttaccctctcctgggctggagagtggggacatcccttccccgcccctaggcgtccctggggtcggcgccagagcccgggagcgccggaggctctggctggatggcggcgaggagggctctgagtcctctcccggccaggccgagcttagtatgtggaggcggcggcgggagtgcgggcatggaccaagggaagggggacacccaaaccgcattggtgccttcctttccctccactcgcgccgtagacctccccaaattgcccgtctccggtatgactgaatctgtctgctggcctctcagctaccaactctgcccgaaatctagatcccagacctggtaagtcgcgttcctcccctaccccgccccgccaccttactagcggactctgcccgcgacagcgtgcgcgcgcgtggcctgaggcgcgcgctgagaagttgggctgatttggaactgctgcgctagttcggcctctgccgctggggtgtatacgtttatacgccgtacgctccagggtagtcaggaatgtcgcggggctccccagtgaggcgggagc

SEQ ID NO: 37593 - DNA, 483 bp, Homo sapiens
  chr3:147140819-147141302
  hyper
cgctcagcggctgaaactgcagcgtttcggcctcacagatggggctggagttggagacgtcgctgcggccaggactgggaggccacttgcttggcgggtgaggcggctcacgcggtatttattgactggctcgggaaacgtgttcttttacttacttgtcattaaagttctaagttttaaaagcgcattcccagaaaatgcttttattctctttcccccagtaacagagcccgctaactgctttcaactggagaaggggagaaattcactcctgcacgagttcccagctactctctggtgaaagcgggagggcgaagcgaaattgtgttctagctctgagctccgcagccctccaatggctgacttccttcagctgctgtcctggggtgccgatcgctgcggcagacgcaattttccgcacctgcgtgttgttttttgccgccgggttttggcggagccatgcaggcgcggttcctgggaccc

SEQ ID NO: 37594 - DNA, 209 bp, Homo sapiens
  chr3:147142181-147142390
  hyper
cgacaggactttcgagcgagtgcgaggaaagcccctttcgacagttctgaggttttatccgaccctgcccgggactccctccctgcatgcccccggagctccagtccgggccacccgggggctgctggggacctgacgcaggcagctccgccactgacgtcaggggctgctggcggctggaacccgagtccaggccacaggcgcccggc

SEQ ID NO: 37595 - DNA, 598 bp, Homo sapiens; identical to SEQ ID NO: 32864
  chr3:157217126-157217724
  hyper

SEQ ID NO: 37596 - DNA, 1092 bp, Homo sapiens; identical to SEQ ID NO: 32865
  chr3:157815399-157816491
  hyper

SEQ ID NO: 37597 - DNA, 914 bp, Homo sapiens
  chr3:157820783-157821697
  hyper
cgcaaaaaagaatagagaatccttccccctcgtggaatcctggtccggcttctcaacccacccggaggaagaatatcccggagaagcgcaaaggtcaagtctgagcggccgcctggggcaaggtgggcagtcatccaccacctccttcacaaacgtacctcgactcaccgcctcactattcaccccccagtcaccggccttccccagcaaacaccaaatggtttccactcactttcgcactcacttgctccgcagcactcacagaaatcaaaggcgcagcgccaggcctctcacagagcaaagtctggacataagggcgcggcaaggccacccactggcctctcacaccggccattcccagaaggctggctcgttctcaggccagctctcaccaccgctggctctctgcctaccgcaaacttgctggtctaatttaggaacaattgggccgaaaggtatcagcgagagcaacagaccccggtgttgtgccgcacagggagccgcatccgcagacgcccctcgctgcccctgggctcgggccaaaccctgcataaggtcccctggacagccaggtaatctccgtcccgcctgcccgaccggggtcgcacgagcacaggcgcccacgccatgttggctgcccaaagggctcgccgcccaagccgggccagaaggcaggaggcggaaaaccagcctccggtggcgggcgaaagcaaccgctctttctgttctctcttcgccctccctcgtggaaacgcagactcgaccctaaacgcttaacccacagagatcaacaggttcaagcggaatattcgcgatcctcggtttctattggttgctcaaagccttttcatgcaaccagcagctcggatgtttaataaaatatgaatttttctgctctgggtttgcacacatcc

SEQ ID NO: 37598 - DNA, 201 bp, Homo sapiens; identical to SEQ ID NO: 19663
  chr3:161089246-161089447
  hyper

SEQ ID NO: 37599 - DNA, 42 bp, Homo sapiens
  chr3:169480937-169480979
  hyper
cgcccttgcaaaagggatcttagtccccgcacggtggctcac

SEQ ID NO: 37600 - DNA, 596 bp, Homo sapiens; identical to SEQ ID NO: 23240
  chr3:181419943-181420539
  hyper

SEQ ID NO: 37601 - DNA, 124 bp, Homo sapiens; identical to SEQ ID NO: 19664
  chr3:184057066-184057190
  hypo

SEQ ID NO: 37602 - DNA, 801 bp, Homo sapiens; identical to SEQ ID NO: 26975
  chr3:184321783-184322584
  binary

SEQ ID NO: 37603 - DNA, 43 bp, Homo sapiens; identical to SEQ ID NO: 19666
  chr3:185977478-185977521
  hyper

SEQ ID NO: 37604 - DNA, 59 bp, Homo sapiens; identical to SEQ ID NO: 19667
  chr3:190231330-190231389
  hyper

SEQ ID NO: 37605 - DNA, 620 bp, Homo sapiens
  chr3:193858590-193859210
  binary
cggcctcgggcacaccagcagcccctctcgccggcccccagcagtgctgatcgctcggggagataaggcacgactccaaactgcgtccggatgcgggccgcgggccccggctgccgcgcgcattagcctctcaatggagcccttccggggccccggccccccgccgtctccagcagcatccggagcgggaaaggcgccgaactggaagggggtgggggtgctcttcggtcaacacgagagccctctccaagcgcagaagcgcgactccggaggctcgcccctcctcgcgccccgtcccaccccacgcgtttctggaatggggaccctggggtttcgttggaccccctcgtcgtcaccaccgtcccgggaaacctgtcattaaagtcaattaacttttcccacacccgttggccggtaacaacccgctcctagcttcctccccggctcctaagtgcaaccagatgggcggacgggctgcccccgccgcgcgcccgccggggcggcccgggggttccagggaggccgcccggggccctccgcccgggcgggagccggccagggcggccacgccgggccagccctggcggccctgcggccaaggtggttcgcttagcaggccc

SEQ ID NO: 37606 - DNA, 643 bp, Homo sapiens; identical to SEQ ID NO: 15005
  chr3:197025639-197026282
  hyper

SEQ ID NO: 37607 - DNA, 269 bp, Homo sapiens; identical to SEQ ID NO: 19671
  chr3:23957838-23958107
  binary

SEQ ID NO: 37608 - DNA, 989 bp, Homo sapiens; identical to SEQ ID NO: 15006
  chr3:24536360-24537349
  binary

SEQ ID NO: 37609 - DNA, 736 bp, Homo sapiens
  chr3:26665223-26665959
  hyper
cggccacccctgaagcttcgtccagcgcgatgggagtcagtccatccttgcacacgccacccccaactcggcaatgaaacctttggagtggcttgcggctgtgcgccgtgggaactgcaagtgcagatatgggtgggtgaagtaagtggctcagggagggaaaggctgctcgtgcggtggaggaggaagctgagggtcgggtagatctgcccacggttgagggaaatgaaaaggtactgctaatgtgggcgagcggccagccctgagaggccatctgacgaagaggaaaagggatttgagtccggagggcgctggcctgggtatgtaaatacagatgggggaggggctgggtacctgggggcgcgtggagacaaggaatggagccccggaatgccgggcccttgggtacttgggaaggcaggctgctgagtgcctgggatggggcgatcttcctccccagaagcaaacaaacctccccgcgagaatctgaatgcgttggcatcttgggtggtgactgaatggtcagatcgtggactagggatgcttctccaagctctaagaggaccatagtctgctctcttctctggcacccgcttgcttctacgctccttcacctctgcagccaggtcggtagacccacgcccaccttccctgccaggcactcaggagtcaaggatgtttccacagccgcagtgtaggaaggggactcctgcctcccagggggagacgtgtgtgc

SEQ ID NO: 37610 - DNA, 749 bp, Homo sapiens
  chr3:27410391-27411140
  hyper
cgtcggagcagattggaagagacacattcaggctccatttaaccagaataattccgttatcaaaatggaagcgccaagaagcatcgttgatggcgctttcccaccatccatccgtccaacacaaacccacctgctttgaaaagactgcctcacgcagtgactcacttacccaccacagccgcattctctacctctgcctcttgtctagtgaagctggctcccgaggcttcggggccgctccacagggacctgaggacgtctccccggagaccctgactcaagctgctcgccggcacagccgagcaccggctcccgcctactcaccgcgcgggagggacggtccctccttcaggccaatctccttatcattgtccctgctgctgtcacctgctgctgcagaccgggggtcccgtccagtctcagcccgtcccgtcctccccccagcctattcccggtcccctcaacctcagggacaccgcggccagctgcaccgttggttttccaatcaaatcctcctccaggccaccaaccagcgctggccaggccaatgccgacaattcttcctccgccacctggggcgcctcagccaatcgggagcagccatgctgcgcagtgcagaacgccatagcgacggatgacgcctgccggggaatcgccgtagcaaccagagacgcgctagatccaccaccaagcttgcaagcagaagaggcagcaagtgatgctgaaggctgtgctgcagccacttcacc

SEQ ID NO: 37611 - DNA, 711 bp, Homo sapiens; identical to SEQ ID NO: 30329
  chr3:38080628-38081339
  binary

SEQ ID NO: 37612 - DNA, 167 bp, Homo sapiens; identical to SEQ ID NO: 19676
  chr3:41240162-41240329
  binary

SEQ ID NO: 37613 - DNA, 837 bp, Homo sapiens
  chr3:45187311-45188148
  binary
cggcaaagaccctggggcgcacggcgcgccaccttggacatgtcgcctgggatcggctaccgggagctccttttcccgccttctcggccagcaccgggctcatcctcccggaccgggaggctccccgatcggggacactctcacgtgccgagggcaaggttgactccaggagggcaaggcccacgcgcccgacgcggcgcgcgcaggaaccgaacagtccgggggtcccggagccacccgcgcattttgactacgccgtccccgccctctctccgcaccctccgcaccctccgcaccctgcgtccctcggccgcatctccgccgggcgtccgctggctggctagctcaccactccacgccatccgcctccaaagcccggcactcacctgccccgcgcggcaggcgcgccgcacccagcagcagaacccctagcagtgcgatagagaccccgcagttcaggccggccatgactccgggacgcctcggcctcggtggggaaaacgacggtggggagcggcggccccaggcgcccaagcccggcgcagctgcgctccgccctggctcactcacctgcgcgcgggcggaccggcccgagccccgccctgcgcagcaggatcgcgagctgacccggtgcgtccctcctctctctcctcctcctcttcctgcctcagcgaccgcctctccctcccagggtgcagggctcccggcaccgggttgctgggtccctactactccccattgcggcgttggagcggacttgtccccacctttccgggcttagtcttccttcccaagtctgagaatgatgaggtctttttctccagagtcgcgaaggtc

SEQ ID NO: 37614 - DNA, 972 bp, Homo sapiens; identical to SEQ ID NO: 24439
  chr3:48693261-48694233
  binary

SEQ ID NO: 37615 - DNA, 521 bp, Homo sapiens; identical to SEQ ID NO: 35830
  chr3:5018754-5019275
  binary

SEQ ID NO: 37616 - DNA, 362 bp, Homo sapiens
  chr3:50375191-50375553
  binary
cgcgcagaattagcctctctgtgccgccgggaaatcggcaattagaacgctccttgcgcgcggcacccaggcagccctcgagaatgcctgcactgtggcctgcccatcctcgcccttcccatacgccctcggccccgcgctcaccacgttcgtgtcccgctccaccgcgggttcccagcccaggtcccggggcccgcaacagtccaggcagacgagcgcgcggcagcggtagtggcaggtgaacttgcaatctgcagagaggcctggcggtgaggcggaggagctccaggtcggggaaatgtcccggagattgaagggaagccccagggagagggccgctgctcgccaggctccgcaggccc

SEQ ID NO: 37617 - DNA, 786 bp, Homo sapiens; identical to SEQ ID NO: 19679
  chr3:67048291-67049077
  binary

SEQ ID NO: 37618 - DNA, 264 bp, Homo sapiens; identical to SEQ ID NO: 17852
  chr3:71036199-71036463
  hypo

SEQ ID NO: 37619 - DNA, 367 bp, Homo sapiens; identical to SEQ ID NO: 25669
  chr3:72149806-72150173
  hyper

SEQ ID NO: 37620 - DNA, 478 bp, Homo sapiens; identical to SEQ ID NO: 25670
  chr3:9904234-9904712
  hyper

SEQ ID NO: 37621 - DNA, 198 bp, Homo sapiens; identical to SEQ ID NO: 27013
  chr4:100729543-100729741
  hyper

SEQ ID NO: 37622 - DNA, 342 bp, Homo sapiens; identical to SEQ ID NO: 19684
  chr4:10087759-10088101
  hypo

SEQ ID NO: 37623 - DNA, 918 bp, Homo sapiens; identical to SEQ ID NO: 31861
  chr4:113431738-113432656
  hyper

SEQ ID NO: 37624 - DNA, 941 bp, Homo sapiens
  chr4:113435438-113436379
  binary
cgaactgcaccaagtccttcggcgttaaagagaaaggggaggagcgtcagtccgctctgcaaactctttagatatgccaccatcatctcttcccagggtctttttcgtctcaagaagcgcccccaaaacgccacccttggctttgacaataagctccatcacaccttcagtaaatcagagcccgtctgaatgaaggatacccaaagccaagaaatgcaagaaacaaccgaggaatcagaaaggctacacctgccctgtgaagtgagatggtttccagggcgtggaaaggaggggcaggggaagggaggagggctcgactggggacaggaaagggaacccactaaggcctggcgtgggtagcagaaatggcagctctagatacaatccctggctatggggaggtgaggtgcatagcggtgcttgtcgggaggtgggggctgccaatagtccatgtctgacccggccgggctggcgggcgataaagtgcagctgtagggggaggtggaattggaggacacggaggaggacggcgcggggctgttggtgcaactccacgtggaggcgggcgaggggctgtctccgctgctgctcagggcggcgctggctcctcccgggctcagcaacactgcctcggagaagagcgcccccggcaggcccccgccgccgcccccgcagtgatccgccaggcgcagggtctcggtgagtgcccagatgtagttgtgggcgaagcgcagggtctcgatcttggtgagcttggcgtcctcggggaacgtggggagcacctcgcgcagcgcgtccagtgccgcgttgaggttgtgcatgcggtttcgctcgcggttgttggccttcagtctacgggtcttcttgatgcgctgcaccgtctcggccgtcttggcgcctcgggagacggcccgcgcccgggaagggcgccgtttgcaatc

SEQ ID NO: 37625 - DNA, 449 bp, Homo sapiens; identical to SEQ ID NO: 35844
  chr4:1205845-1206294
  hypo

SEQ ID NO: 37626 - DNA, 1233 bp, Homo sapiens; identical to SEQ ID NO: 19689
  chr4:124317751-124318984
  binary

SEQ ID NO: 37627 - DNA, 149 bp, Homo sapiens; identical to SEQ ID NO: 19690
  chr4:129210000-129210149
  hyper

SEQ ID NO: 37628 - DNA, 875 bp, Homo sapiens
  chr4:13543524-13544399
  hyper
cggggcgccccgtgcaggctacagcctacagctgtcagcgccggtccggagccggagcgcgggaatcactcgctgcctcagcccaagcgggttcactgggtgcctgcggcagctgcgcaggtggagagcgcccagcctgggaggcagtagtacgggtaatagtaggagggctgcagtggcagaagcgagggtggccgcagcacttcgccgggcaggtattgtctctggtcgtcgcgcaccagcacctttacggccaccttcttggcggcgggcgccgaggccagcaggtcggctgccatctgccggcgctttgtcttgtagcgacggttctggaaccagattttcacctgcgtctcggtgagcttcagcgacgcggccaggtctgcgcgctcgggcccggacaggtagcgctggtggttaaagcggcgctccagctcgaagacctgcgcgtgggagaaagcggcccgcgagcgcttcttgcgtggcttgggcgccgccggctcctcctcctcctccgcgacgcctgccggcccgctgccgcccccgccgccggccccgctgcacagcgcggacacgtgtgcacctctggggccaacaccgtcgtcctcggtccttgggctgcggtcgcctgcggaccccggtgggaacagaaacaagagactgtcagcgccacagacgaggtgaggccgggcctcaactgcaggggtcacgggagtggggcggaaatacactttgatcccactcaagcggagcggaggtctgggaggccctgggcccgggagaccagtcttagactcttgccccactgggtatcccatctaggcctcttctggggagggcggcagactcagccgctgtgtcaacgctgtgttgtc

SEQ ID NO: 37629 - DNA, 931 bp, Homo sapiens; identical to SEQ ID NO: 32911
  chr4:13548517-13549448
  hyper

SEQ ID NO: 37630 - DNA, 824 bp, Homo sapiens; identical to SEQ ID NO: 15036
  chr4:142557243-142558067
  binary

SEQ ID NO: 37631 - DNA, 865 bp, Homo sapiens; identical to SEQ ID NO: 32914
  chr4:143767745-143768610
  hyper

SEQ ID NO: 37632 - DNA, 194 bp, Homo sapiens; identical to SEQ ID NO: 19693
  chr4:146098925-146099119
  hyper

SEQ ID NO: 37633 - DNA, 260 bp, Homo sapiens; identical to SEQ ID NO: 19694
  chr4:149362760-149363020
  hyper

SEQ ID NO: 37634 - DNA, 177 bp, Homo sapiens; identical to SEQ ID NO: 15038
  chr4:153856957-153857134
  hyper

SEQ ID NO: 37635 - DNA, 687 bp, Homo sapiens
  chr4:154712018-154712705
  hyper
cgtgagctctgagagatgctacgacttgggcctgggagtgggataagggccctctcgctttcacgcccccccaaccccccgccggccccggccaacccctaaatccccaacgccctccgctggggtcgcctcctccccgcagagccccttgttgggagttcaaggagcccgaagctggtctggctggtttgagccccgcgctgccgcacgcccggaagtggctggcggcccccgcgctccgcgcgccggctgcattgttttgggagccctcgctgcccggcttgccgccaggaggtgctgggagtcgcgcctgagtctccatccctgccgtgcgcagtgtccacctctggccagcttgtttgcccggcccgcggcgtcccctgcggcccatcgctgctcctcccggaacccacgccacttagtctggtcccgaccctgcactcgctgctgctgcctttcccacctcaagtcgctctccccactcccttctgcttttgggctaagaccggtccaattgatcactggggaacagggcaataacctcccgcggaggctgggacgcgggcacggagctctgcccatatgagcagcgcagggatgggacactgggtgcccatcccagcgcgcctccccagactggtccctgggatgctcacacgtggcgcggcaccgcggcggcgccttcac

SEQ ID NO: 37636 - DNA, 721 bp, Homo sapiens
  chr4:154713481-154714202
  binary
cgttacatgtgcctcggtgaggtgaagtgactaccgggctagccttggggacctgtcgcgacttgtcgggtgtctccaaccgcgttgccgcctggctttcagccgtgcgctggccagccgggcgggtgacgtcacctctccccgggtccgtgcacccaggccttccctgctccgggtgagtattttttcatgggattcagccatctgggggcgccatttcccaaaacagagattgtccctttgaggttgcaagtcaggttcctttacgctgagatcccttacatttttacttttaggaaggttttttcgaggggtggggggatgacctcattccttcgcctttggccctccctctacccggccccacaacgaggacgcccctgcagctggctgggccgcttcctcttgccacgcggggggacctgtgcccgcggccgtgcacctccgtgtacgcttctgctcctcggaccccatcggttcagacgcggatttccgagaacgagaccagagtctgcgtctggagagcctttgcccctcatcttaggaagagtctagtctgagaacaaacagtttgccaactcctaccccgagctcttgcgcgtatctccttaaatatttcaagggtctgggccccagatgggtgctcggaaagcaaacgaagggtccagggaggccgaggccaacgcggagctcagcgcccccttcttgcctgaaggggcgc

SEQ ID NO: 37637 - DNA, 500 bp, Homo sapiens
  chr4:16228975-16229475
  binary
cgtgtgaccccgcaacgagcgtggtgtcgagaccaccaccagctggggcggtgggagcgaaggtgccccaggctcggggaaggtggaaaccttttccccgctccccaagtgattgttgcgcgctccggtgaggggacagtggtacctcgatttcccgtgtgccagcttcgggactcagctgtgcttttgtgtctctttgattagcaaaagcaaaacgaattcctccccgaacactaagcttcctggaaacttccctagacctaaacttgagaaccgcatataaatgggccttgagggttctgtcgtcagtagcgggttacgtgattgcaaacgagcaagtttaaaacggagtgggctttgggctgcagagccgcctggcattctgacagctgagcaggaggcagaggtgagagtccaagatggactaaaaatgtcccagcagctgggagcccaacctcggcccaacctcgttgaaaggaggaacattcggtgcagccgtc

SEQ ID NO: 37638 - DNA, 679 bp, Homo sapiens
  chr4:174437914-174438593
  hyper
cgcgcgctgacgttacgcagaggcgcaccgggttccgactccaccgcggcgccgagggggccagaggctcccagttcttccccgcatagttcgacaaagccctactttgcttccctgggtctgggatctcaacgtgaagggggccgagagagcggtgataaggtgctagaaaggaaacggcaagaggaaactaaaaaagtggagagaaattttgtgcgccgtagtgcttagcaagctggggaaacgaggagaaaacgagcaaagtctacaggggagggagagagggaggaggcagggaaggagaggaccacgaggctcccggcgcccaggccgccacttgggaggtcccggccccaaagcaggccgggccaaccgtccccccgggaggctcggggctcgggcggggtcacaattacacctcggctccaggcgaggacttaaaaaccaagtggtggggactgcagtctggaagcaaggccctgcggtcatcggaggggggccaggcccgtgcacaggaaccttttacaaggcatgtgggtacaagaaaaaaaatcaaaataaaccactttcatccagcatgggcagtgaaaagaaaagctgccttccagagggggcgagcgggagttttgaaattcattgtgtgttttgcctttatataaggagttttgcgttttttacc

SEQ ID NO: 37639 - DNA, 991 bp, Homo sapiens; identical to SEQ ID NO: 31876
  chr4:174439755-174440746
  hyper

SEQ ID NO: 37640 - DNA, 868 bp, Homo sapiens
  chr4:174448150-174449018
  hyper
cgggatcccttaccacacgggagtgtcctcttcgtattaaaatatggaatgcttttcttcaaatatccactttttttttggagggggagacggggagcagatgcctcaaagggggtcaaagagaggggaaggaaattgcacataaataaaccggatgattccaaatgcaaggagtcctcagagcggagcgcggacggcttttccggagtcctgggtctgcatctggcgccttggcccctgctcactcgcgctctcctcctcctccttctcctcctcctcactgcttgagctccagggcccagacgtgctgcggccagcccgtccggcctttggttttcttgtcgttgctgctcactgtgcttttcaagatttcgttctggacagaggaaaggcgagggcgagaaaagtggaaagagaaattcagagaggatacctggttccacaccaacccggagcttcctgcgccggaggagacagtgaaccagagaggaaaggatacgatgggggagtcccagcccctgcagagaagctaccaaggttagcgctaccctagccggcggggaggcctcggcgctgcagcgctcaacaaccggatccacaagtttataaacaaccgcccgttttcgagtcgtttatggaggagcggggggccttttctcttactccagatgtaggggcgggagctggagtcggcgctaagtctggtttctctgttttcattagcaatcctagatccacatctaggaaaaatagggcgaaggagcctctgtttcggcctgggcctctcggccagaggctctcggcctccagctcagcagtgcctctcctccaaggcttctgaaatctctggttattcgggaggtcactc

SEQ ID NO: 37641 - DNA, 1260 bp, Homo sapiens
  chr4:174458996-174460256
  hyper
cgactctaggcaccccacgattagctgagtgatctagggcaaggacctaggcgtctctaagtcttagtttccccatctgaacaatgtggataatgacacgtacctggggtgggcaggctagagtaaatgggaaaatcaaagcgccagccagagcgggtcgcactgttagttcctgtattttctcctcctgcctctggtttcttccgttccgttctagctgcctgaagacccagcccgacagcgatgcctgtcagcccgcgtcgcccaccagggcagctgctctcccaactcgcatggggggcaccaccccgcctcggtgccctagagctgagcgcagccgcggctccacggggatcgccagggcctcagccctcgcggccggcggcgcgggagtgttgcggggcagggaccagagcgcgatcagagcggccacccccgatttaggtcgccagctttccagtcactgcgatggccactggggcgccccttccatcctggttaaattctcattgtgatccccagccctcttctcggttccccacacccaggaggccggttctccgccgctcaggctgggagaggtcaccgctccgggcagggtggacccccagctccgtctcggaggacctttcgccggaggcgagcaggaaggggttaaccatgagcctcccaccctcacctcccagaccctggtgccgggctaaggcctccgcttccctcctgaggtctcattaggaaaccctcaccgctattttcaacatttcctcaatcaagtgcctttaaatagagctgcacaaacagattggcggcaaaagcgtagatcttgtcacgattgagaccaatccagtatttcagccttgtttgctttgcaattacgggttggcttgtggctacggtgccaccggggcaaatctgcagccgctcgctttctcctctgcgctccgggcgggtggaggaagcgacccgcggagtcactgcagggaggagagggggacgcgcgcggggggaggcggcggagggcggaggagactcgcttgcaccccagggccgcgggcacgcagagctgtgttgaaggacatacttttcaggttcctgacagtcactgagctatacgcaataataaagtgcgtgattcgcgtgtggaaaccagtgtcgtgtccttaccagcttccttttctgtccaccttccctctctcttctacctccgtttcgcttttcttcagtgcatgttagcggtttgctggatttcccttctccctc

SEQ ID NO: 37642 - DNA, 437 bp, Homo sapiens
  chr4:175132750-175133187
  hyper
cgttctgggtccccagctcagtaggcaccacctctcagggaagtgaccaccactacgctctcagctccgcaagtcgctggacagtcaatagcgctcacacggtgtctaccggatctggcacggtcaagacacaggaacagccgtactttcctgcgggtaagaggcttttcttttgtgcatcacgtgcagaagaagccactccgaagtgcaaacacctttctaaagttttcagtgcttcctaaaatgcagacatcgacgccttgctgagttatccgatcctttgatgatcaaataaaattaaggccagctccctgctgtttgatctgtggctcagtttctctaagggctgccgcgggttccgcaaagactcactccagaatccccagctccctcgcgtcagcgaatgtcccgctggtccaggcagccttttcctgcgc

SEQ ID NO: 37643 - DNA, 112 bp, Homo sapiens; identical to SEQ ID NO: 19705
  chr4:25235368-25235480
  hyper

SEQ ID NO: 37644 - DNA, 965 bp, Homo sapiens
  chr4:36245423-36246388
  binary
cggggcagcacagacacccgggcaaattcatgatctctaccgagtaaataacttggtgcctgaaactcactacagcttcttcttatttaaaggtaggggagaggaatggagggagtgtccagctgtctatccggatcctcaccctcccgggtcaaatcccagaagtggagttcttggatcacttaccggcttctggtttcctttcagacgcccacacgcgggagcgaaatccaaggggcggacaccagagccgagcactttgcgctgaggaaatttacccggtgaagtgtcgaaaagccccagcccctccagacagggtcctcccacccccgcgtgggccatcccggcccagccttcccgaggccccgggtactcgccttgcgctcgggtcgcggagttcgaaaagcgaggtgaggcggcgctgggaagctcagcgccggcgtctctcccagccttgggcgctcggtcctcgcccctctgccggaggcgccaggcctcctctttcccggtccccgccggctgtccgcagtcgcctctgctgcctggcggcggccgcgcgggcggcgctgttagtggggccggcgtgtcgcggccgccgcacctggaggcggggagcgcgggccgcggacccgcgctcagctccggaaacgccgagcccggcgcccgcgccttgctcaggtgctcccgcgcctcgcctcggccgccgcttcctctccgcccgcgggggcggggagcaggcgccccgcgcgggggaagccggagctcaacggcgggggcggcccagccggcctccctggttccgcagcatagttgggtgactgactcagaccgccgcgacttggccgcgcctggcaccctcgccacctggcgcacctcggcccggaggcgtcagaccccgctggggaagctgcgggggcgcgccctggagcccagagcgacaggggcattacccaccttcccgggac

SEQ ID NO: 37645 - DNA, 339 bp, Homo sapiens
  chr4:40632148-40632487
  hyper
cggccttgatggcagagattgggggacttgaccagacggacttctctccccgccccaaaagtcacatgcctttcagacacccagaagtggcacctgctccacctgggggcatctgtccgagtcagacgctcggcccccttcgggctgctccgagaaacccagccagaaccacgttggagaaattaggaacctgctgctgaatttcaagccgatcggaaccgccccgctccccttcttccccccataaacaagtcgctggacgaggtgggatctctgcgacccccgcgtgcccggggagagctcccggggcgagctcccggggcgtccttacctggggcc

SEQ ID NO: 37646 - DNA, 880 bp, Homo sapiens; identical to SEQ ID NO: 25696
  chr4:42398819-42399699
  binary

SEQ ID NO: 37647 - DNA, 866 bp, Homo sapiens; identical to SEQ ID NO: 24478
  chr4:42400216-42401082
  binary

SEQ ID NO: 37648 - DNA, 451 bp, Homo sapiens; identical to SEQ ID NO: 19709
  chr4:48271822-48272273
  hyper

SEQ ID NO: 37649 - DNA, 1255 bp, Homo sapiens
  chr4:4868273-4869528
  hyper
cgcaaaggactgcagctcagagaggtgacatggttttcccaaggttacacagttaatgaaggacatagcaggaattccaacacggattccactcgaggatccggtttttcccgcattgcccatctccatctggttgagggtcacctggtgcctgagcagctctcctgcgaagtgcgcgtcgcgctggaaaacggagcgcagaatccgggaactagttctgaatttaactccttgcgctctaaccacgaacaggcactgtcccttgaggaatgataggggcgtctcaccggccctgcacgctgtgaaagcgttttcgttttgttggggaggagacggaagcctcattttgcaaattcagcttctgaccacgcagtcaagaccaaagcagtccgtggcgtggaagcggggcagaaatgaggttacctggcggcaagggacctggggcgcctcgagctttgagcataggtccgcagggccggggcggttggggaccgggaggctggggtggggctgaagacctcgcgctaagagcgccttactttaaggttagtttctcggatcgctgaacccggggctgaaggaccagattgagcaggaggcccagtgaggacagttactggtgaggcaggggccccgagtgcgaatcctaccgctgcgccctccttagtgacccaaggccgggaggtgagcccagccgggtccaggcctgcgccccgcctagagccctcgggggcgcaataggaagcggcgaggagaggccgcggccgcctttcaactctgcggctggcgccggcctggccgggcccccgaggccgcgcggcctccaaggttccgtcccgccctcccagacgctcagctcgcatcgccccacagtggaacagtcccccggccccgacgccggactccctgggaagcccccgacccccaagtgccaccaccaagtgcccactctccagagcactcccaggcccccactccagacttgcggaatttgttccgctccactcaacagctcccacgcctgccgcgcactccgcccccttcccaggcccagggggaccctgcctccaccccgcctgcctcccccacagcgccctcccgcggccctcagctcacagccagctctcccagcgcctgctcactgtagttccggtgctggacgctggccttggctccctgcgttacaagtagatcctcaagtgcgcacacgcacacgaccaacacacgtcatccacacgacataccaacacacacc

SEQ ID NO: 37650 - DNA, 160 bp, Homo sapiens
  chr4:4870060-4870220
  hyper
cgtgagagcgctgggtgctctgctgtgctgacaccagagggtaagcgcggattctggctccacgcacgtggggtcaatccccggacacagaccttttactggaaggcctggagaatcgcctgagggaacgctgggagttcccccccccacccgcccccgc

SEQ ID NO: 37651 - DNA, 794 bp, Homo sapiens
  chr4:4870855-4871649
  hyper
cgcaccagcggggtgcaataaagatcggcctttgtgtgtgtgtggtgggggggaggagtggggggtaggtagttaaaagcgaattcaaaagcccgccctcaatttggggcctgattaggggcagatggaaggaagggtccccgaccctacgtggcagcctttgttgcacattttacaggcgaggagacagtggtgggatccaagcccgctgctgtgggacctcaggagttgctttctccttcaccagctgggtgcagattttgatgatgcacagggcgcggcctgacagtgcgtgtgtgcgcccaccgggcgctgctgccagagtttgcggggttcagggagcgggaggagggtctgagagaccccaaagcctcccctttgcgagaccactccttgcttcccccgcctggcgctttccataaccctctgcggcgccctgcctctttgttgccccttagatgagctgccccaagggcgggctggactctagtgctttgagtcgctgtttctctgacgatgctgcttttaaaaagaaaaccccgttccctctctgatgactctcgtggcacccgggtggcagcaggggcttctccaccggagaaacagccacatcgactaaaagggaatgtgtgaggcaggctgagaccttgggtggggccccccacctctcgagttttccaagactcaggttccatctctgttaaatggacacaatcctgacccctggcaggtcctgaaagagtagaagggaaggggttctccacgggctgtaccatcacttgcgtccccagttc

SEQ ID NO: 37652 - DNA, 978 bp, Homo sapiens; identical to SEQ ID NO: 19714
  chr4:4873696-4874674
  hyper

SEQ ID NO: 37653 - DNA, 855 bp, Homo sapiens; identical to SEQ ID NO: 35859
  chr4:54965627-54966482
  hyper

SEQ ID NO: 37654 - DNA, 956 bp, Homo sapiens; identical to SEQ ID NO: 28045
  chr4:57521845-57522801
  binary

SEQ ID NO: 37655 - DNA, 547 bp, Homo sapiens; identical to SEQ ID NO: 27048
  chr4:57687545-57688092
  binary

SEQ ID NO: 37656 - DNA, 648 bp, Homo sapiens
  chr4:75230472-75231120
  hyper
cgcacagctctccaaaggcatgtatggggaacgccagccttggctaaaagactgattcaagttatgtccgtcaccctgagcaaccaaaaccacccactacagggcaggtgaccccacaaagcaaaccaagccatctggtccacgctccccacctcccggagggagatggaaaagtttcgggagtagtccccggccaatcggaaagacattttttcattcctcaaccactactctcaggtgctccagggagggaggatgacttcctgacggtcctcctgccgctcctccctcgggccaattatgaaactctgggcactcttgacctcaccccgttagggcccgggaggggctccctagtataaagttcgcagcaccagacagttgagctcacttgcctgatatttccagtgtcagagggacacagccaacgtggggtcccttctaggctgacagccgctctccagccactgccgcgagcccgtctgctcccgccctgcccgtgcactctccgcagccgccctccgccaagccccagcgcccgctcccatcgccgatgaccgcggggaggaggatggagatgctctgtgccggcagggtccctgcgctgctgctctgcctgggtaagttctccccctctggcttccggcc

SEQ ID NO: 37657 - DNA, 692 bp, Homo sapiens; identical to SEQ ID NO: 23277
  chr4:76555346-76556038
  hyper

SEQ ID NO: 37658 - DNA, 830 bp, Homo sapiens
  chr4:77818885-77819715
  hyper
cgcgtcggggtctcggagaaagctcttgaagtggctcagcaaggcagcgttggtcacgcggcccccagcctggcacagaaagtccagtagtgcctcctggctcagctctcgggccatcgctgccttgtcctccgccccagaggtgtctgagtctcgccctcccggggctctccccagccagaggaaaccctggccgggcgagtgtcacctgcgcccggggcggcactagccgcccccatcagccgcggaggccagcgctgcccgcagcccgtgagcgcgccaggagggccgtgggtcccctccgggtggccccaaggctgagtccccgcggcagtctgcgtgagagagggcggctccgaggccgcccctgcgcgactctagcctctcgcaacgagtcctcacagcgaaagttcccgggatagggccgagtcggtttcacctgcgccctggcggcacctcctccctgcctctgggggaagggtcaggcccgcctcctcgtgtccctccgccccctgaggtctcccccaccccctgccacccatcccagaagagtcaggccggagagccagccggtaggtgaggttggcggcgaaccgagccggcagcgaactgctctgcggccggggaagtggaaggcaggtaggcgaccggccgttcctctaagtctccgccacgcaggaaacaaaagcgatagaaggtccgttcctgtcctccggtgctttgatgagttcaggctgaagccgatgggggaggaggagaagctgcaagttaacaggcaatctgagttatctttctttattaacgctgtagaggagtacttcagatttctc

SEQ ID NO: 37659 - DNA, 571 bp, Homo sapiens; identical to SEQ ID NO: 31908
  chr4:81189434-81190005
  hyper

SEQ ID NO: 37660 - DNA, 883 bp, Homo sapiens; identical to SEQ ID NO: 31909
  chr4:8200632-8201515
  hyper

SEQ ID NO: 37661 - DNA, 972 bp, Homo sapiens
  chr4:8868715-8869687
  hyper
cggcacccagcgcagcttgagctgtctctgccctcgtgatcacaaagcagtgaaactgtccagaaaatgtccctttttattccatacgcaaataagtagattcatttaaaaaaacaacaacccggaggctgcgacgtctgcagagagccccagcctgcctgctcctggaacggacgatgggacccacaggtccagggtcctttctccaccagcacccgcgagaggggtagcacagccctccgggccggcctgctgtctgggtcccaggaaagggacgtttagtgttgggggcagtctgtggggacagtcaccgctcagccttggacagccggttcgtagttttcctttgttgcgctgggcttggcctgagggcagctgccccgggtggccatggccgaccgctcctcgctgaggccggggggtggccgtggcgccgggggctgcgcagcccagagtctctgcatggccccctgttcgagtggggatccagcctggcaaatgggtggggcgtcccattacattctagaggcgctccccacagaagctgaggcccgcccggccgcggcctgcgctcccgaggtatctaggaggccgcaggagcgaccatcccttccctaacgccccctgagccctgcgcctgccgctgaatcgcgcgtccacacaggtccacagggtcgtggggagagggcccggcaggcggggctcacaccaggccaggcatctgcgcccgcagaaagggcacggaggcggcggccgggaaggcggccagcgggtaggcgagggccccggagaagccgagcagcggtgggggcggcgcgggcgcggcgggcgccagcgggaagggcagggtggccgggggcccagcggcggctgcggccggggggctttcgtggtagagcaccggcacgcggaccaggcgctgcgctcccggcggggacaggctggccgcctccagctcggctgccagctgcc

SEQ ID NO: 37662 - DNA, 778 bp, Homo sapiens
  chr5:101631442-101632220
  hyper
cggtaggttgaccttggtgagagcgcaagcaagttccaaacccggggccaccttgcagggcgcgtccaccgtcccacggaccccgcgcacctgccctctcccccggctggctcgccgtgcccacctcgctctccactggcccgagcctcaagcgggcgctggactttaccttgcgtgacggccaagaggcagtagtgaagcagaaagcctccaggtgtgttgcagcgctggagacattgaggatggaagttcctccagccgtaagacccctcctcaaactcggacagcgacagtgaccggagcttctcttcggagacattgggaggggctgaaggcagagatggctctggtgacttctggggctcctggggcttctgaagctcctgtggctgagaattctctctttgggggtcagaggacaaggcagagacttcgatttgggagggcgacgcagacaagcggcgcaggatgtctgggctggaggggacaaaagccaagttctcaatacctttggcgctcttcatgtctggatgggttctcccgactccggtgcttcagagcagcagagccaggtccctctctggctcctcccacaggcaggtgacagcgcccccgtgcgggaagcttcccgcctcctggccctccagcctccagcgcactctccgccaccgcctgaaccttcctactccagctcgcagctgtctggagcgcagagcgctgagcgggggcgttagcgccccagcctgtggctttggcgctcagctgtgcctcacccgtc

SEQ ID NO: 37663 - DNA, 468 bp, Homo sapiens; identical to SEQ ID NO: 19727
  chr5:10354870-10355338
  hyper

SEQ ID NO: 37664 - DNA, 208 bp, Homo sapiens
  chr5:10563418-10563626
  hyper
cgcccatccccggcgccaggactgacggggagagggcaaggccgggccagaggggctgtgggcctggactgcggctgtcgcccgcggccctgctcttttgggcagccagacgtggggtcagcgcccagtcgcagcctccgggggtgagtccgcagatccccgcacgtgacacaggccaggcatggggacggggagttcctcgtcgtcc

SEQ ID NO: 37665 - DNA, 281 bp, Homo sapiens; identical to SEQ ID NO: 19729
  chr5:109024730-109025011
  binary

SEQ ID NO: 37666 - DNA, 929 bp, Homo sapiens
  chr5:122423762-122424691
  hyper
cggtatggccagaaccccggcgatgggaaagtacctcctgagtcggtcaatttcacacaccctgcctgtgccctctaccatctactaccgaaaatgccaggaagagctggggggcaagtgcctccttcgtgggtgcgagactgcatcgaagggctgccctggcacaaagtctggggagaggacatggtggaggtggggctgcactcccaccctgcccctctaacaccaggttttgggtagagaaacctatgcgtgacctcctgcggcagccgcaggcagctgaccgcaaacagcctcgcccgtgtcccggagcagttgtgccaccagacgtaacactggatacttgtctccgggccccaagaaggagagggaaagagccctccagaagacaacccgagaaggggtcagcagagcgctgggtggagtgcagactccattgcagccgcctcccagccccacggccaagcttgagtccctccaggaccagctgctctcggtctcaggaccctcggtcctacgcctccctgcaccgacaagcctccctcctgggctgcagacagagggtttcactgcagcgcgcaacccgtcccgctccgcccccaacttttctccccggaggatttatgttagaggttgcgtggcgggcgagtggactctggcacccagaagcacttcaggaaaaactgagccgggcaaaagcgcaaacccggtcctggcggcgcgggcttgctccagcgcggacaccacagcgtgtgcggagatgcattcccgttgccgcatttccactgctttcaagatcagggcactgagctgggacccagaaaagacatatcatgggcagaaagagacaacaggctagcggcagacgtcacgccaaaaaaacaggggatgggagggcggaggagtttgtgcgggaaaggcgctctggc

SEQ ID NO: 37667 - DNA, 1016 bp, Homo sapiens
  chr5:122430417-122431433
  hyper
cgcttcgatctcctctcgcggctcctattcatcatctccgcattgtatatggcagcctcgcaggggcaggggccggcgaggtttatctctgcgcaatattctctcaccctcacaaactggcgctcccatttaatttattaatacagtcatcggaagacaaataagacccacattttctccctcccaccttcttgctctcttctttttgtctctccctcttggtcccagggtcaagcccgcagccaggcagggcagagaacgcccagagcttttgcgattcgcggggagctttaaactcgcgtagagggagagttcctgagagaattcccaggagctgggccgccccgcagggtcgagactgaaatcaattggctccccttccggcggccaggcaaacctgcctcgcctctggatctgcttctagacccgctcccggggcttggaagacccctgccgggtagaggaggagggccgggtgggtggcggggtgcagtggggacgtcggatcgtgggtggtgtcggcggccacgcctcatgtcagaagagagcctttcgtgggcaggagcggggtgggaccttcaaaactcagccttcggcgctgaggcctgggcgccccaccccgcccatcgctccctttcagccatcccatctagcctatagctcgagaaggcagtggggggaccgcaggctggagccccgggggcgtgaaccccacgcgagaagttcgggcccggatgctctgcctgcccgccctctgcccggctccccagcccccacgcccctccccgcctagggcgcacgcggcactgccagcaggcggcactcccgggtcctagtcgccgggctgggatcgatgggcgccggcccctcgggtctcggcctgcgagactgagggccgcgaccttggcggcggtaggggaggatttacagccggggtggatagtggcgcccaggcggggaagcaggcttttcacctactccttgctttcctatatgcagggcgggtgagagccaac

SEQ ID NO: 37668 - DNA, 764 bp, Homo sapiens
  chr5:122434876-122435640
  hyper
cgggctttttttcgcaatacaaggataaacacatcctgaaactccagatagaaacctcaggaatgggcgagagggtcagaaggaacgagagacagtagggaagagagagagagagacagagacagagggagagatgcagagagactgaaacgggaggaagaagcctggaactgtcggttccgtggagagcggacatgctatctgcgcccagatccgaaggctttttggggagcctagagtcctggcccggtaccaggcagatctgggtgcggcgaattccaagggagcggcgcgggttctcttctcctcctcctctgagttgcttcggtgcccccaaggcatcaccttcctcgaaggtggcttacccaggcgggcggtgatgctgttgtctcgggagtttactcaaagatgggccgctcggggcggccggattaacccgctcccttcccttcctccttcttgtctcccgcaggttgcgacatgtgcgcggacaaccgcaacggcgagtgccctatgcatgggccactgcactcgctgcgccggcttgtgggcaccagcagcgctgcggccgccgcgcccccgccggagctgccggagtggctgcgggacctgcctcgcgaggtgtgcctctgcaccagtactgtgcccggcctggcctacggcatctgcgcggcgcagaggatccagcaaggcacctggattggacctttccaaggcgtgcttctgcccccagagaaggtgcaggcaggcgccgtgaggaacac

SEQ ID NO: 37669 - DNA, 230 bp, Homo sapiens
  chr5:131800317-131800547
  hyper
cgggggtggtttcctctctaggaaaagctaatgtcatgcttatgctgaaaaactcttttcagaggtactttaggaggggcctggctctcgattaatctgggccatttcataccggctgtgctcacccaggcacaaacactgaaagcaacagctggcaaagccatcgcttggtagcagcttggaagacaccaccaaagaagctctcatggaagcggcagatttcctgaagc

SEQ ID NO: 37670 - DNA, 896 bp, Homo sapiens; identical to SEQ ID NO: 30383
  chr5:134366533-134367429
  hyper

SEQ ID NO: 37671 - DNA, 265 bp, Homo sapiens; identical to SEQ ID NO: 36771
  chr5:134370281-134370546
  binary

SEQ ID NO: 37672 - DNA, 772 bp, Homo sapiens; identical to SEQ ID NO: 31933
  chr5:134375163-134375935
  hyper

SEQ ID NO: 37673 - DNA, 257 bp, Homo sapiens; identical to SEQ ID NO: 19740
  chr5:134579620-134579877
  hypo

SEQ ID NO: 37674 - DNA, 944 bp, Homo sapiens
  chr5:134825551-134826495
  hyper
cggggccgtttccccaagcgcaaacagatgcaaatgtctctgcaaacattgcacaaagctattcagagagaggcagcctctcgcggcctcaatagccctttaaacctagtccaattgcccccaagtagaggtaaagagtccacatgcattttttcactttggctggaagaggggcggaggaggcgagggccttggggagcaaggtatgagggctgctctggttcagcggttcgtgccatcgacccgagctgcagcgtgcggaagaccggcaggagagtgcggtggctcgggggactacgcgcttcgggccgggcggggattgaggtgcagccgaagctggtgccgcgggaatgcgcggaccggagaggcccccgggacctttcaggcccacaaacgccgcgctaaatagccacgcgcacaatagcatgaaagggctcactcggaccttactgcaacacagtagattcacacccctccgaggggactaataagctcgtaactaacgcgcaacgctcagcggtgagagcgggcttgcgccctgctggcccctcgcagtacgcagactcagtctttcagcgtcactcggaggcccaagggcagccgctgcacggagggccaggcatttccttctaacctcgccagtagaggagcctggggcctgccggtgcagtccttaatgcaccccaaactcacgtggggctggcgaccccggaggctcggcatttcctggcccttcagaagacgatgtcgggacctctagactccaggctgagcgaggaagaagctccagtaaaagatgccagcgtaggcgcggtcttagccagctgtggccaagccgcctccacctccagttcagggccggggcctttcccgtcgccgcacgcagcaggtgctctggacgcgatgggcggcctagccagagcaggcacgtgcgctgagggccc

SEQ ID NO: 37675 - DNA, 392 bp, Homo sapiens; identical to SEQ ID NO: 29235
  chr5:134827217-134827609
  hyper

SEQ ID NO: 37676 - DNA, 541 bp, Homo sapiens; identical to SEQ ID NO: 24493
  chr5:134880146-134880687
  hyper

SEQ ID NO: 37677 - DNA, 335 bp, Homo sapiens; identical to SEQ ID NO: 15070
  chr5:139135589-139135924
  hyper

SEQ ID NO: 37678 - DNA, 307 bp, Homo sapiens; identical to SEQ ID NO: 19744
  chr5:139175997-139176304
  hyper

SEQ ID NO: 37679 - DNA, 601 bp, Homo sapiens; identical to SEQ ID NO: 19745
  chr5:139487921-139488522
  hyper

SEQ ID NO: 37680 - DNA, 276 bp, Homo sapiens; identical to SEQ ID NO: 19746
  chr5:139554306-139554582
  binary

SEQ ID NO: 37681 - DNA, 981 bp, Homo sapiens; identical to SEQ ID NO: 25711
  chr5:142781722-142782703
  binary

SEQ ID NO: 37682 - DNA, 299 bp, Homo sapiens; identical to SEQ ID NO: 19749
  chr5:149381214-149381513
  hyper

SEQ ID NO: 37683 - DNA, 1487 bp, Homo sapiens
  chr5:153854949-153856436
  hyper
cggcgtcggggcggatcatatggagggacaagagagaaagagccagatagggaaatggagatagggctgaggttctaaattcgctccaaaagggtggaagagtgcgtctttgagcccttgggttcgacagtccctccttcttgcatgttgccgccaagggccgccctcggttgggctgggggtggatatatatatatttctctttctcttaatgtattaaaaaaaatcaaaggacattgcacgtgcgatccaagtgtgtggttgcagccgacgacctgccggcgctcagcagaagctccgcgggatgcgtagcaccagtcgccggagcccagagcctggcgttcgccgctgccttcctctcctcccggggcttcaggagtggctggcctggccaggtcctcggcgcgggcctcggctcactggtttaactccagcgcccagacttgctgcggccagccggtgcgtcctttaatcctcttctcgactgggcccagggcaggaggaaaaccttcgtgctgctgctgccaaaggacacacagaagaaaagaggcgggagagacaggttttaatttttctgctccgatcgcccggcatggggtaagatgaggaggaggggaaggtgtcgggagcagtaactgggagtctttaaataagtgacggatttctgtttgcgaaataggcaaacaggctcgtaaatttgcctttatgcgcggagttcctgggacccgggatgggctgggcagcttcgggaggtttggtaaggaaaatgttctgcgtctggtgaaactgacgcgcgttgatttggctttaggacacctaagggagatcccaggatattggaagggaggggtggaaatccacggttctcccgctctcgctgcaccccacacacttccgccagcctcccaacctggtttaaacatcagggcttggatgcaggcttggggccccctaagccggagctgggagcctcagatacggaggtaaaagagcggggagtcgagctggcctagcgtcctccttcccgctctttcagcaggaaccaagcggtgctacttgaaggaggcggcgacgcgtgggggccgggatccgcccaataacaacttctttcgaggcgccgcacctcgaaagaagccggcctgcaccatccccagtccggggcagccgtttagagactcgatgcctatttatctttccctcgtccctggatgagctttcgtcagtttaccacaggcccccgcaggttggataaaccaggtggggcgcttcagctggctccactccgctacggccttaagccccccaacctagagaaactgattggccagcctgaaaacccagcgctcagaagcccccagccccggacagccagaccgagtgccaggaagtgtcaccctaaccggagaggatcaagaaggccaagacgagactgcgctctccaaagctaaaagaagtggctcttatttacatgcaaagccactgaagtc

SEQ ID NO: 37684 - DNA, 198 bp, Homo sapiens
  chr5:153900641-153900839
  hyper
cgagggcgctgagctcccggtatcctctaggtggcgcacaattctctggggaaaaggagaattccaggtgaactaattccacgggaagaagggttggtttgggaggggctaagccctgcctacgggctcctgtaggggaatcagctccccatccccctgctccctccagagcagcgcccagcattcaatcattcgctc

SEQ ID NO: 37685 - DNA, 116 bp, Homo sapiens; identical to SEQ ID NO: 19752
  chr5:156811500-156811616
  hypo

SEQ ID NO: 37686 - DNA, 325 bp, Homo sapiens
  chr5:16934300-16934625
  hyper
cgctgtagcgcgttatcctgatgttccccccacttgcactagggggcagagttctccccaagggggagccacggacccctgtggtgctcagacaggctacaggaggagtgagatccgtgcaaactgaatacaaatttctatattttcatcagattttctaagggacccagaacacaaaaacaacaaagttaagaatcattgccctaggggcagggcctccgttttcttacagatgcaagcaattaaacaccggaactcactgtagcccgagggtcctttaccactggacaacgtgcaactcttgcagaaagttctggtgcctttc

SEQ ID NO: 37687 - DNA, 772 bp, Homo sapiens; identical to SEQ ID NO: 19755
  chr5:172198713-172199485
  hyper

SEQ ID NO: 37688 - DNA, 251 bp, Homo sapiens; identical to SEQ ID NO: 19756
  chr5:172234246-172234497
  hyper

SEQ ID NO: 37689 - DNA, 873 bp, Homo sapiens
  chr5:172655840-172656713
  hyper
cggcgtagaagcgctgggcctgagctcggaatgcttcccggaggatgcgaggggcgggcgctgcggggaagacggtgctactcccgcgcgggaccgcgtgatgtttccgagtcagcggtgaaacctgcggcttccgcgcgtcctttaaaaatacaggtatttagatacacaccgtggcgtcgacttaaggtgaaatctaaacaaaatgaaaggacgggagctattctgatttggccgaacctgtgcctgcgggctgggaatgacccaaggaaacgaagggacggcggagccagtgcggcgggggccgggtgggaggcggtggcctcgtgctggggacccccagccccggctcgcctttgccgggaaccaccaagctaatttttttccctttcttttttaaataaacctaccttccttcccccattttttccttttaatatcgctgtttatctccattttttttaactgcggcgtgttcttgttcgattttaaaaaatactaaaaataaaatgagtcccctaggtgcctccctggcgccctaggcatggagagctcatgcctgcgccaccctcatctccgctggctttgccacctcggaggcgccccacacttctcctttgttttgcttttctctgagccggttgagttttcttaccctgaatgcgtcgtttatacaattagcaactgaacacagaacaaatatcaccgatataattggggtgggggtcgccatgtaaacacggggtgttgttactttaggatacttctgaccctgtcccggcctgagtcctcgctccctgactcagcatccacgcaggaaagcctcgccccagccaggcaagggcagtccctgccggctccttgagttctgcc

SEQ ID NO: 37690 - DNA, 1047 bp, Homo sapiens
  chr5:172659388-172660435
  binary
cgccacaaactctcccgtgcgcaagaacaaacgcgcgtgggacagaaaaagttcctaggtctccgcaggagtgaatgcaaaatccaggggactcagggtcatgttgggagccccttctccccccgagagtcagggagctgttgaggtgggatcggtcagggtcgcgccacgcgggtcccttccctaccaggctcggataccatgcagcgtggacactcccgagttgctctgcggaatcccggggctctgaaccgcattcaagtccccgacgccgaagttcacgaagttgttgttggcggcggcagtggccggctgcgctggggaaggcccggcggggtaagcggcagtgcagctgtagccagggctgcaggccgcgccgccgtaacccggataggcggggtaggcgttataaccgtagggattgaggcccacgccgtaggcaggcgcgtagggcgccgagtcccctaggcatggcttgccatcgcgcaccagcactggcaccgcgatcctgcgggcaggcggcggcggcggcgggggcagccccaccagctccagagtctggtcctgccgctgccgcttgcacttgtagcgccggttctggaaccagatcttgacctgcgtggacgtgagtttcagcacgctggccagctggtcgcgttcgggggccgacaggtaccgctgctgcttgaagcgccgctccagctcatagacctgcgcctgcgagaagagcacgcgcggcttcctccgccgtcgcgcccggggccgctccgcgttgtccgcctctgtcttctccagctccaccgccttctgcagcgcgcacagctctgagggggaacagagaggcagagagacgcttggtaagagcggcttgacctacggagcgcggccgcacagtaatggtaagggatcctcgtggaggccactgtgtcctgcctggagcgcccagctggctgcggctcactctgccaagtgcactgggagccaccgacacgtctcactcagcatttgtagaaagtcaggctggctcaaggcgctggagaacaaaac

SEQ ID NO: 37691 - DNA, 730 bp, Homo sapiens
  chr5:172663853-172664583
  hyper
cgacagtgtgccgtctgagacgccgacgcaagtgaagtcaagcattggcctgatgttgggacttttcctgtccctcatcaaagccacactcccaggacctggggcctccatgctggggagagaggtgagccccgcagggcagcccaggaggcgcgcaacgccctgaccccggcttctaggcgccagccgtcagtaacaggcctgggctgccacgccgaaatcacgcctcgagtttctgagccagggactactgggggtctggaattgttagtctagtctgtggaggatgccttttcttaaatgtggggcgttcaaggcccaggaaacctcgtccccccacctcttcacctcccaacccaaattctccttggacggagctgcatgtcagcggccttgcggcccttcctcgcctggacttttggccacgttaccgttatggctgtaaattaacctagcttgggggcccgccttgcctttgaagattgttttcgagcgcgggcgggggggggtgtcgttggagaggatgcctatcgccgaggcggtgacgtctggcaaacgagccacatccgattcaattaaatgtctcgctgaaaagagctcggaacgagggtcctgggagcgctgttaagtgaatctgctggccaggcggctcgcgatgacagtttgaaagattagtgtgagcggacgcctgaaatattaccgtttaatgggggacatcgaggctacatcc

SEQ ID NO: 37692 - DNA, 940 bp, Homo sapiens; identical to SEQ ID NO: 31950
  chr5:172665306-172666246
  binary

SEQ ID NO: 37693 - DNA, 993 bp, Homo sapiens
  chr5:172756215-172757208
  hyper
cgccgcggagcatcgcgtgcccggaggccagagcttgaaaggcaactttacgcgtctccaaacacactcctgcattttctcaaagcgctgctcgccaccccgctccgggttcccttttactctccagtcatccgatggaagtggtgagaacaaaaacaaagacaaaaaagctaaatccggggaagttatctccatctcctcccttttcttgttcggccccctccccaagaaccgccgggtcgggatagcccccggctactttctcacccggcccgtggagggaaggagaaagttgggcgccgcttggagcgcctcttcccctgctgtgtgtgtacgtgtgcacgctcacgtctcccccgcgccggggccggggacaggaactgctctcggtcccgtcaccccacggcgcagctcggggggctcgcagggctgggggagggcggggacacgagcgccgcgcccaagcgccccagggcacgcacccggcgttggcgcgcactcgcccctccccccgtccccaccctcctcctggagaacaggtgagccccggtaccagctctcgatcccccacccccgccccgcgccccgcccgcgccctctgcggtaatgcgcctgggaagtttcatcacccactgcccaggcgacgcggccctgggtctccgcggcggggcgcactgcccgcctggttggggccgccatgtgacacggctgggggagggggcgaggagacacgcgggcaggtcatcttttggccggcgcttgacttccaaagctttcctttcccgtgtcccggctgcacgcgggagtggggaaggcggaggcggggggccaggatggccacggctggccgcagctatccggcgtgtcgagctctcctgagtcggaaggaaggagaggagggggtggggagggcgtcttcagagtgggcttcccctgcgctggagcgccagggagcatccataaattgtcactttgaaggtccgaacctgcggc

SEQ ID NO: 37694 - DNA, 795 bp, Homo sapiens
  chr5:174158680-174159475
  hyper
cggtgactcggaacagaggcagaaaggatgcgaggacttcttgctgcgtaaacagcgcggcgggcagattggcacctggcacctaccaggactggcgcttcgtcccgcgtttccattgtgcccgcacgcactttgaaagtgggcgccggaaactccgtttttcttatggggccggggtcgggcaacgtggttcagaggtttcacaagctccagcacagaagtgatccaaaccgaggggtcggctcgaagtcggaggctgattttgtcttgctcagtcgctccgccggagctgagccgctggaacgacccaaacctacctgaaagcgcgtctctgcagtcccgctggacttctccggctcgaactcctaatctcagcccggaatccagccatattcatttaaggattgcgttttccaaaggccaaagcctttcccggtttcgtcatcagccgccaggttgggtccctaattagcctgtccaccgagcttccttcccggcgccgcttggaccccgcagccccgggcgatctcagcccgggtggggaatccggagacgccggctccgggttaagactctgctcgtccccaggaggacggggtcgcgatccagagtgcgatccggagaaaagggctgcatcttgcgtggctggcgggttagactggaatccgtctggggaactgcgcaccatccccatcgctccagacgccgaaacaaaacctgaggctcggagaggggaaaaagagttgttcaggctcgaacatacgcatcccagcctcataggtggatggggttacc

SEQ ID NO: 37695 - DNA, 159 bp, Homo sapiens; identical to SEQ ID NO: 19763
  chr5:176239899-176240058
  hyper

SEQ ID NO: 37696 - DNA, 176 bp, Homo sapiens
  chr5:176911117-176911293
  hypo
cggatgggcgtcttgcaggcagcacaggtaaagcagtgcacgtgccaggtcatcttcagggcgtgcatgatctcctggaaggaggtcccagtcactcggcaggctcaggcccctcctgccctgccctgggtcacgggaacacaggagggctggccgcaagccctgttccttctcgc

SEQ ID NO: 37697 - DNA, 842 bp, Homo sapiens; identical to SEQ ID NO: 16941
  chr5:176918897-176919739
  hypo

SEQ ID NO: 37698 - DNA, 59 bp, Homo sapiens; identical to SEQ ID NO: 19766
  chr5:176922905-176922964
  hypo

SEQ ID NO: 37699 - DNA, 673 bp, Homo sapiens; identical to SEQ ID NO: 25728
  chr5:180632796-180633469
  hyper

SEQ ID NO: 37700 - DNA, 292 bp, Homo sapiens
  chr5:2007541-2007833
  hypo
cgaggaatgacaatgaatgttggagagcctctcccgcagatgggtggcacggcctcagcctgagggaaacgtgttcccatcccgctccgggggcaagtccccgccggctcggaccccagggaggtggaggcaggcaccgtccccttgtccgggtgaccctgtgtggcctccctgctaagcccgcagcctgggctggcaacagcctcgatcgggggccgggggaagcggccgagatgtggctcggaggtggcagctggcaggcggggtcctccagtgacagctgatgtgtcgc

SEQ ID NO: 37701 - DNA, 1205 bp, Homo sapiens; identical to SEQ ID NO: 33852
  chr5:40680875-40682080
  hyper

SEQ ID NO: 37702 - DNA, 1260 bp, Homo sapiens; identical to SEQ ID NO: 25734
  chr5:42991800-42993060
  hyper

SEQ ID NO: 37703 - DNA, 229 bp, Homo sapiens; identical to SEQ ID NO: 25735
  chr5:42993305-42993534
  hyper

SEQ ID NO: 37704 - DNA, 186 bp, Homo sapiens; identical to SEQ ID NO: 25738
  chr5:43008736-43008922
  hyper

SEQ ID NO: 37705 - DNA, 1638 bp, Homo sapiens
  chr5:43019005-43020643
  hyper
cgcgaatgcgattttttttaggtttaccgatgatcagtttagcagtgcctgggagctcttataccaagtttgttttcgcaatattgagtcccaccttagctaagcttgtgtgtattttaaactcccatggaagtcaggaaatgtccgcaaacgcgatttctggttaccaagctccgtttggcaatagcaagtcctgccgaacgcgactttttcctcttgtggaccaagtctgaatagaccagctactgcgatttttaagtcgtagtaaaaaaggtttaaccgtgactgcttttttttgttggtgttgtttgtttttgtttttgttttcgtaggaaatgtagacttaggtgtaacatgtaccggtttagatctgacagagatatcacaattgtaggattgcatcttttagcaaggtttgtaatttcttctttctaggattggttctctgtaatttttgcttatttttaaattctctctttgtcttttgctctgagaacgatgttaccgatgtgtttgctttccatgtttacttgcattttagcctttatttttttaattttgattttatttaaatgttatgtattttttttctactaattttgagcgtctcagcttcctgcttctttacttacattctctcaggatccggggagccgagctcggtctcagtctccctgctgtcaggtgccaggttgtgtctggtggctctccttcgtatgcggagctgatggttttgcatcagcgcttttgccagtagagccgactagcgttttctcagttacggcaccgttcttagcgcccagtgtgacgtttcccattcgccaggtccttatgttctctgtgctgtcactttcttggttctcgcaccgctagtatctgctaaagaacttcctaaaccatgttttactgtgcagaacggtgattgcacggagccgctgtacgcactagtaatttcatagcaccgttagctggcgctttttctgtcacaacacattaaaacgggttaaaatactgcaagcggattaaacacattaagaggattaaaacattaaaatgtctcaacacatttttctgacacaacacatttaaacggagtgggttcattcctccgaagaggatgtttaggcgtggaagcaccgctgtttcccaagagcacggtttctctctggcagcaccacttatggcaccaaaacaggtattttttggcaacaccagcactattcgctaggtgccggcgcttgctgagtcccagcgccgccagtttctctttcggtcgttaagtagctcagagccctagcggacagttttcaggtggcagtaatgctcatttcctggaacagatggttcgtggcccttgaagcgctgcgatctgtaaagctagttctctgcaaggtttgcttagtgtctgttttatttcggtttcttttcttgctatgtttatctgtcggaattacagtttgttttggttctatgtaatctctaaaatgttatcgtttttcttttgactactaatttttgtgcattcattactattgagtttcataatacctggcttgcctccgcccacggcctccggaaagcataaatgtccaggctaatgggagtgctgaaggctctgcctcgttgatcagcacaaac

SEQ ID NO: 37706 - DNA, 328 bp, Homo sapiens; identical to SEQ ID NO: 19775
  chr5:43557434-43557762
  binary

SEQ ID NO: 37707 - DNA, 811 bp, Homo sapiens; identical to SEQ ID NO: 24516
  chr5:54516349-54517160
  hyper

SEQ ID NO: 37708 - DNA, 1069 bp, Homo sapiens; identical to SEQ ID NO: 24517
  chr5:54518558-54519627
  hyper

SEQ ID NO: 37709 - DNA, 887 bp, Homo sapiens; identical to SEQ ID NO: 29274
  chr5:54526958-54527845
  hyper

SEQ ID NO: 37710 - DNA, 308 bp, Homo sapiens; identical to SEQ ID NO: 15089
  chr5:56110226-56110534
  hyper

SEQ ID NO: 37711 - DNA, 552 bp, Homo sapiens; identical to SEQ ID NO: 19779
  chr5:56112644-56113196
  binary

SEQ ID NO: 37712 - DNA, 150 bp, Homo sapiens; identical to SEQ ID NO: 33858
  chr5:66511687-66511837
  hyper

SEQ ID NO: 37713 - DNA, 394 bp, Homo sapiens; identical to SEQ ID NO: 31984
  chr5:72497779-72498173
  hyper

SEQ ID NO: 37714 - DNA, 886 bp, Homo sapiens
  chr5:72598958-72599844
  hyper
cgccgccggtactcaaggagccacccgcgcgcaatgtggaagggcggcgagtcgccctcggggcccacagcgccgtcgggcaaagaaccagaggcgtggagcgaatgcagcgcccgggagtcagggctgttagtggcgtggcccgccgggcattgagctgtttcctccaacgcccggtcccccgcggcctaggcccagtgtttgcttttgcagatacgtcagagggaacattcaggaggggcgggctcccaggctcccaggagaccgcccggagcctccggagcgcgacgaggcgcggggcctcggagatctggcctgccagattgagggggaggggagggggcctggcccagcagctggacaggcgcgcagtgcccgcagcccgcgagtgggcgcccagctggcttcgcacgggtgaggggctcagcctgcacttccctcctccaccccgaccgccgaacgcgtcccggctggcttcagagtgcgcttctcgtggacgtgctgcgcgcaccctagggagatgcgcggcgtccgcgcgggtcagcgccccagtaccactccccagtgtactccccaggtacacgcttcccttgcgcggcgagtttcaactcaggtcagaacggagctgagcggtgggcggagtggagaaaggtcccggaaattggccaagagggggcggtttcgaggtagtgccttcgaagtgttgtccagaccagcagggagggtcgcctccacctgcggggcctcctccagctccacaaggtagccccgtagggacttgcagatctgccagacctagcagtgagaccactgctcccactgaatggcgccgcctgcgggctggcccaagctctatgcaccggctttatctcattttctcctcacc

SEQ ID NO: 37715 - DNA, 988 bp, Homo sapiens
  chr5:72746989-72747977
  hyper
cgcagtcgcgaaattccccgagcgcggaaactcaagcgattcacgtcttgcgcgacccccttgtctcccccatcgtcccctaccccgggcctccttctctacagcgctcccagctttcggccccagctggtaactctcccccggctccccgcccccaagctggtacaagggaccaaaacctttcccagaggcgagccggggaagcgacgcgaagacccccgtccggcgcaacccgctcgcgtggacgcggaaagtggcgggcggcgggtcccggtggtgcctgcgtagggcagagttgccccctggcggcggtgcgacgacctgcgggccctcgcgcccgggccggcaactccctgggagctcggcccgcgcggggaactcgcccagcagcctgtgtttctcgagtgtgggcagccggctcccgggcgtccctcccaccggctgcgggggcccgggactgggcggtagtggaggcaggtccttggactgcaggctgaggctttttccccccacgagcggtttgggccctccaggagcccctgcgcgggggtcacgtggattacgctaggtgagagccggagaggctgcgccaccgtcgggaggctccctgcctccgccctttgtcctttgcccctgaccatgagcgccccaagcccagggacctccttagggggatgaaggctggaagagacctgggggctcagacttacggggaaggaacctaggctattccttgtgcatcccaggattttacccatgaacgtgaacatgaacgtgttttcaaccccagcggttcccctggcgcctcgaccctcctttgaagagtcattctagaaggctgtattgcgatagtgtttgtacctgtcactgtgagccctgaaaagagacagaagaaaacgcgagtgcctggcctgagggtgctccgtcccgtgggtagccaggtaggtagttattctgcccgatgatgaggtcctcctgacgcccccgc

SEQ ID NO: 37716 - DNA, 998 bp, Homo sapiens; identical to SEQ ID NO: 31990
  chr5:75698192-75699190
  binary

SEQ ID NO: 37717 - DNA, 173 bp, Homo sapiens; identical to SEQ ID NO: 19786
  chr5:77291967-77292140
  hypo

SEQ ID NO: 37718 - DNA, 219 bp, Homo sapiens; identical to SEQ ID NO: 36800
  chr5:78105396-78105615
  hypo

SEQ ID NO: 37719 - DNA, 460 bp, Homo sapiens; identical to SEQ ID NO: 29295
  chr5:92906252-92906712
  hyper

SEQ ID NO: 37720 - DNA, 546 bp, Homo sapiens; identical to SEQ ID NO: 19789
  chr5:92943283-92943829
  hyper

SEQ ID NO: 37721 - DNA, 925 bp, Homo sapiens; identical to SEQ ID NO: 30464
  chr6:106441828-106442753
  hyper

SEQ ID NO: 37722 - DNA, 690 bp, Homo sapiens
  chr6:106808607-106809297
  hyper
cgctgggtgctggttctgcaacccgcggccgtccccccgcatccgcgacgagggggcggggtcccacggcgcgctgagaaaggcgggcgagctggcgctcaggtgtgttcttccatagggcccgggcggcagagaggaccgcgtcccggcagtcggagcgggaggaggacaagacgatgccgctgtccccgccagcccagggcgaccccggggagcccagcccgtgcaggccccctaagaagcacaccaccttccacctctggcgctccaaaaagaagcagcagccggcgccgcctgactgtggggtgttcgttccgcacccgctcccggcgcctgccggagaggccaggtgagctcctcgcccgagccctccagtcccacctcctcctcctcctccttctcctgctgcgctagcccttggactcctgaccccacttggaggaggggaaagccccggggtctgtttcagtccgcaggagggtacccgggtccggaggggagcgatcgtagccgctggggttgacgaggttcctcgcggcttttggttcagaccaagcaccggcgagaggaacttgtgcccacgcatgtggcctttagtatgactgcaaagttttcatgcaggagcctcccgcatcagcctgctaaccagagcggcggggagtgagggttgttaccgtcctaaatgatggc

SEQ ID NO: 37723 - DNA, 605 bp, Homo sapiens; identical to SEQ ID NO: 24526
  chr6:106958136-106958741
  hyper

SEQ ID NO: 37724 - DNA, 994 bp, Homo sapiens
  chr6:108439841-108440835
  hyper
cgcatccacaccccgcccccacccctctctccagggattttttttttttttttttttgtatccaggcacagctgggggctccctcaccacccacccctggcctccccatacagaataaagtcagtctgtatttaatggttatggcggatgtgagggggatttggcagaggcagaagagaggcctttcgctctcaaatatcgtcccttacgtcgtgtgagtctaccaacccaccacgacctcatattcttgtgcgggtgtctgactcgaatgacaagcgagctgattttttcagtacatagctgggaaatgtagtgagtgataatagagatttctctttcattttttacgcttgacttggttattgttgcttttcttttcccgtgattccttctgaggattagctctgacttccccactattggcggtcaaagtggccccgactcgggatgacaattgacggggatcaagggattgcccattctgtgcctgtaagaaccgattcgtgccagagaaactcatcaagtggaggcggagaataaagaccgttcgggggtaaatgtattcattgagaagggttctcccaaattgcttctaagtttttttaatgaaaagtaacgattgcggcaatcagcggctttttggcggattacaaatctggagggagctgcggcgctgcattgaaaagtgcccccgccttcgcaccgggcagccggttcacaggagcagcgcgaggggcgggggtccgatagcgggacaaaggcggggagggggcgagcggaggagggcggctcggggcgcccgggcgcgcatcgggcaggagacgcggaggtgcccaccccagcgcaggcgtggcagggcgccccccaccgaggaaggcgtggggcagggtgcaggaaggggaccgagggaggtctaccgcagcaccaccagcactggggagattccgggcatctggagcgaggaaggtgtgctataggggttgagtccatcacc

SEQ ID NO: 37725 - DNA, 354 bp, Homo sapiens; identical to SEQ ID NO: 32026
  chr6:108484828-108485182
  hyper

SEQ ID NO: 37726 - DNA, 1495 bp, Homo sapiens; identical to SEQ ID NO: 32027
  chr6:108489635-108491130
  hyper

SEQ ID NO: 37727 - DNA, 451 bp, Homo sapiens
  chr6:109330991-109331442
  hyper
cgcgaggtgagcgtgcactgtcaggaaggtgcagcacgagtcttcgggcttcagggacaggggaatctgccccctacacccctgctcggccatttacctagaaccaaacagcagccaacctcgagactgattctgacagcaccaggagtaatgaagttctctaaattcgataaactattgaaatttcccttcttcctttcccataatgcccaaacgacgctgaatcggcagcagaatgcaggactttggcctataatcaatgcaaaattcattttgctaagctacgtaaaagctataaatatcactcccctacacagataataaaccttggtagcctatctctgaatcgtcttttttcctctcaagtatattcgaaggctttacaatttctaatattccttcataagcgccctccctgggttataaagacagaatttcaatctctgaaatc

SEQ ID NO: 37728 - DNA, 806 bp, Homo sapiens; identical to SEQ ID NO: 35912
  chr6:111409052-111409858
  binary

SEQ ID NO: 37729 - DNA, 1150 bp, Homo sapiens; identical to SEQ ID NO: 32030
  chr6:134210203-134211353
  hyper

SEQ ID NO: 37730 - DNA, 471 bp, Homo sapiens; identical to SEQ ID NO: 27134
  chr6:134213931-134214402
  hyper

SEQ ID NO: 37731 - DNA, 866 bp, Homo sapiens
  chr6:142622583-142623449
  binary
cgggagcgtggcggggggacccgcgcggggactcgggtaggctgcaaacgctggggagatgccacaggagcgcctgccttcccagcttctcctttctctcgccgagggtctctggggttcagcgctcccggcgtttcggcgacctccgggtccgccctgtcccctcccagctggggagctgagcccggctctgcgcccatcgccgaccccggccactctcccttcgctgctcgctccaaaagcgcctgtcccgccccgcggggcgacttctccctttcggccctggggttgaagatcctgtgtggggcagctgcgccttcgggacagccccagccgcggagcgcccagaccagggcagccggagtcgggtcatacgccgcacgccgccggggccgccgcacctgagcccagctccagtcacgccggaagcgcgggcggagcgcacgggtccggggagagtcgcctgcgcccgcgagggggacccaagtacctagggtggtggccgagtcccgcctcccgccagcgggggcgaggacctgcgacgcgcacccctgcctggcccggtctcctcagcaccagccccacgcacaccctacttcctcagcttctcgccctcaccctgccaacttccctgcgaggagggacctgccgccagcctgcttcctcgtccgcaggccctgcgctgaacgctgccgcgcccagggttcaccttgcgccgtcgggaaagcccatgaactctccagaaacggcgtaaaggagggtcccgccgcggcgcagggctggggcgcctgggttccccctgggtggagcagcggcagcagagcgggaaagtggtggaggatgatcttgcggccaaaggggacctc

SEQ ID NO: 37732 - DNA, 751 bp, Homo sapiens; identical to SEQ ID NO: 23317
  chr6:143247656-143248407
  hyper

SEQ ID NO: 37733 - DNA, 370 bp, Homo sapiens; identical to SEQ ID NO: 17938
  chr6:143268770-143269140
  hyper

SEQ ID NO: 37734 - DNA, 767 bp, Homo sapiens; identical to SEQ ID NO: 32999
  chr6:150284566-150285333
  hyper

SEQ ID NO: 37735 - DNA, 520 bp, Homo sapiens; identical to SEQ ID NO: 8616
  chr6:158402113-158402633
  binary

SEQ ID NO: 37736 - DNA, 682 bp, Homo sapiens
  chr6:159654657-159655339
  hyper
cgggcggccccgccccacgtcgcagggccgctcccactcctcctcggacccttacacggcgagctccagagggatgctccccacggccctccagaaccaggacgaggatgcccagggcagctacgacgacgacagcacagaagtcgaggcccaggatgtgcgggcccccgcgcacgccgcgcgcgccaaggaggcagctgcgtcccttcccaagcaccagcaggtggagtctcccacaggcgcaggggcaggtggcgaccacaggtcccagcgcggacatgcggcctcccccgccaggcccagccgacccggcggcccccagtcccgcgcccgggtacccagcagggcagcgccggggaagtcggagcctccttccaagcggcccctgtcctccaagtcccagcagtcggtctcagccgaggacgacgaggaggaggacgcgggattttttaaaggcgggaaagaagaccttctgtcttcctctgtgccaaagtggccctcttcctccactcccaggggcggcaaagacgccgatgggagcctcgccaaggaagagagggagcctgccatcgcgcttgcccctcgcggagggagcctggctcctgtgaagcgacctctccccccacctccaggcagctcccccagggcctcccacgtcccttcccgactgccgcctcgcagc

SEQ ID NO: 37737 - DNA, 728 bp, Homo sapiens; identical to SEQ ID NO: 32045
  chr6:166267509-166268237
  hyper

SEQ ID NO: 37738 - DNA, 955 bp, Homo sapiens
  chr6:167039793-167040748
  hyper
cgaatctgtatcagcctcggcgctgcgaggatattgcatcaggctctttactcctgaacgccgttttagacgcctaagcagattgtgctgctgcctgttcttccccgttctgtgaattctacactgacttcaagtgcacgaatgagctacaagataaggtggaacctgccggccgggcacggcagacagcacctgatcagcgcctcggagggcggagctggggggcttctccactcgggactttgagggacccccgcggagcgctccgcgccactcggcggtctagctgcagagaaagcccctcctcacccggggctccctgtggcccacaggggaccatcccacaccccgtgcagccagcggcggagaaaccagctggaaatgcagtgggggtggagttgcccccgcgaggacccacggaccgcccaattactacggagtcccagcgataacgtttggagccgtttggttcgattttcggaaccggaccagctttccagtaacttgaactccctgacgggtctcggggtccacccaggggtggcgaggcgggctcgggcgaccacggcccgctcagtgcccggcacctgcgcgccccgagggcggccgcattacctcgagccggctcaggctggagctcttggagcgcgacttcctgcgcaggtacacagagaagaacctgcgcacggcgaacttcttcatgctcaggtccatcgccccgcgcccagcccggagcagccgcagggccgggggacgcgcatccccggcatcccaggcgcggggctcaggtccgcgggcgggcacgcgtggccagggagcccggcacggcggccatgggcgcggggcgtggggcgcgagctgcggtcacaaagggcaggccgcgccggccaccgcggccggggccacaatcgctccctccgcctccttctccgcctcccctgcgagtaccagcgcc

SEQ ID NO: 37739 - DNA, 506 bp, Homo sapiens; identical to SEQ ID NO: 19811
  chr6:170124879-170125385
  binary

SEQ ID NO: 37740 - DNA, 594 bp, Homo sapiens
  chr6:170339178-170339772
  hypo
cggggcctcccagcccttcacgcagcgctgacggggcctctgcccaccggccaccctggtctcaagacggagcccacgtctcctgcttgggctggatgagtgacccttccctgcggccatgaacagggagctttaaacgtgttgaggttggaccctgcccagcccggctgaaccccactctgtaggaggcgcaggcatcagacgccggggacgtcatggtggaggagactacccgtgagcccggtgacgtcacggtggagaccacccgcgaggctggtgacgtcacagtgcaggagaccaccgcgaacctggtgacgtcacggtgggggagaccaccccgagccctgtgacgtcacggtggaggagaccaccctgagcctggtgacgtcacgggtggaggagaccgccccgagccctgtgacttcacggtggaggagaccaccctgagcccggtgacgtcacgggtggaggagaccgccccgagccctgtgacttcacggtggaggagtccaccccgagcctggtgacatcatggtggaggagaccgcccctgagcccgggtgcccctgatcccaggcactggatgggatcccc

SEQ ID NO: 37741 - DNA, 925 bp, Homo sapiens
  chr6:170598179-170599104
  hyper
cgagggcccttgtcatttttcttgggggatgggcacgctccgggtggtagcggtcgcgctgcgcgggtaatcgcgccaccaacgcgtctaggagtcgggaaaccagaaccttcccacgtgaaggggcgcctctgactggagacctggcacagaggccggatacggaaatctcccgggcgcgctcggcctctcctcctcgccccagcgcggtcccctcctgcaggccgcggggccccggggcgaggtgtccgcgctgctgggctggagtcctggggccgccgctaggcagatcgcagcgcccacctgcgcctcgcggggtccccgaggtcccgccaccgagcgcccaaggcgggatcccagcgcgtcctgcagcccgcccagcttcagggccggcccggcgcgcgcaggtgcggcactcaccggccaggtgaagccgaaggggaagcggatggggttgctgaacgcggagtcggcgcccccgccgtcgggcagactgaaggagtcgacgcccagcacgggggtgacggcgctgccgtaggtgcagggcggctcgggggacacgctggcctggtagtgcttgaggcacacgcggaagaaggtccggcaggcgcacggcggtggccccgcgcccccgcggcagcagttgcggttccccagcagccccttcttgttgacgaactcctgcagcttcagttcgaacaccccagagctccagacctgcacgggggagggcgggggcgtgaggacgcgggtcccgcccgagctagggggcgtgaggcctgggtggggggtgtgcggagagcctggaagggctcaggggccgagcgcgctcgctgcacggccggcgctggggtcgtcgcccccgggattcatcttccgggccgtggctggcgcggcccgtgccgctgtccgcccctccccgcgc

SEQ ID NO: 37742 - DNA, 711 bp, Homo sapiens; identical to SEQ ID NO: 33001
  chr6:17101827-17102538
  hyper

SEQ ID NO: 37743 - DNA, 194 bp, Homo sapiens; identical to SEQ ID NO: 25781
  chr6:24494664-24494858
  hyper

SEQ ID NO: 37744 - DNA, 201 bp, Homo sapiens; identical to SEQ ID NO: 19817
  chr6:26025540-26025741
  hypo

SEQ ID NO: 37745 - DNA, 1042 bp, Homo sapiens; identical to SEQ ID NO: 32053
  chr6:26198838-26199880
  binary

SEQ ID NO: 37746 - DNA, 147 bp, Homo sapiens; identical to SEQ ID NO: 23322
  chr6:26327821-26327968
  hyper

SEQ ID NO: 37747 - DNA, 134 bp, Homo sapiens; identical to SEQ ID NO: 23323
  chr6:26328309-26328443
  hyper

SEQ ID NO: 37748 - DNA, 124 bp, Homo sapiens; identical to SEQ ID NO: 11792
  chr6:26330521-26330645
  hyper

SEQ ID NO: 37749 - DNA, 893 bp, Homo sapiens; identical to SEQ ID NO: 23324
  chr6:26331633-26332526
  hyper

SEQ ID NO: 37750 - DNA, 836 bp, Homo sapiens; identical to SEQ ID NO: 33017
  chr6:27218591-27219427
  hyper

SEQ ID NO: 37751 - DNA, 1116 bp, Homo sapiens
  chr6:3228121-3229237
  hyper
cgtgcgcattgtctggggctgtggtgggggtctgggtatggggatatgggggaacagtgaagaaaaggagggtgagagggcggcgaggcgagggccaccagcgcgtcctgaccggggtgggggcagagctggcaccggatgggaacgatggaggactggagcatgtggagaagccgtcaggtgctccagtgccggcaggtgggagggctgaggtggcacaggctgctccgccacctcggactgcggctcctactcggccactggccagagtccctccagccaactgcccctggtgagaccaccgtctttttcctcaaccctggaggccagcgactgcccaggcggcgctccgtctcacagaggcctgggggaggacaggtggccccagaaggaagtcgtgcttgatggcaaccgggacacctgcggcccatgaacaccagcgcggcctccgcccccgccccagcgtgggcctgctttctcctttgtctgtcttgggctggtagctcctctcactgcgccgcagcatctaggggtgaagcgacctcggagcccctcagccctgcccgaccctctccgggagtgcataacgcccctgctggtacccaggagccctctgccccgggggttgacttttgttgctcgctagtgatggagtgggagtggccggtggcgctgcactgaccgtccggagggcagaaagagggtggggtcccgggggcggggctgtcggcggaacaaagggctctcagaaacgtgggatacgctgtgtaacccagtatttaaaaccacacgacaggcgccccacccccccaccccgccctcggattcagttcatctattgtcaagtaagagggtgggttccaagggtggcccaagcccgagtaacaaactttcttatcttccatcgcggcgacctggaggtccgaggcttcgtgctgcggttgaagggtggggaatacgactaaaaactgcagcccagcgcgcgcgagacgacccaagacccacgcgcactcgcacgagcgcgtgcacagacttggagcacagaccctcccttcagatccgcagtctctaggtactgaggcaggaactggtctctttgttacttttcgcgcgcgc

SEQ ID NO: 37752 - DNA, 895 bp, Homo sapiens; identical to SEQ ID NO: 33021
  chr6:3229296-3230191
  hyper

SEQ ID NO: 37753 - DNA, 684 bp, Homo sapiens; identical to SEQ ID NO: 19828
  chr6:3457545-3458229
  binary

SEQ ID NO: 37754 - DNA, 1014 bp, Homo sapiens; identical to SEQ ID NO: 33024
  chr6:36354750-36355764
  hyper

SEQ ID NO: 37755 - DNA, 609 bp, Homo sapiens; identical to SEQ ID NO: 33026
  chr6:37666475-37667084
  binary

SEQ ID NO: 37756 - DNA, 1014 bp, Homo sapiens
  chr6:43243254-43244268
  hyper
cggctaagcctccaggctcggagggccctgtcgccccacccctgactcccgttacctcactgcccgtcgggctgccccccaccccgccccaataattggccttgcaattggatgccaaagagcccagagttgagggggagcagagctttgagcccaggtctctcagagcaacccaacagccccctttttgcccacgccccaatccgcgtcccctgccccaccccaccactgagggccctgggggtcaccaaacatgcccccccatttccagctcttcccacacccccacccccgaaaataaaactcagggaccaacatctgcttcctttgcacttgctccgtcgaccccgctccccgctcggaggggcttccgtgggggagggggcggggctccgggccctcagagttctcagtgtcgagcgaggagaggggctggcccctgcccccggagaagcgggactggtaggagagagaaactcagcaccggggcccagctgagccccttcctgcgtaaggagacgccttctaattgcggggtgggggcggagtaggggagggataggaaggggattagcgagaggaccctcgcggaggtcctgagtcccagtcggtttattcctgagccttcccctcccatcgtaagtccttccctcgaccccccattttgtactgcaataatactgtattatacgcttgcactatttcccgaccctggccagcggaagcatgcacgaaaaactcaaaaccacacacacgctcacacgcacacacacgcacacgaagatgggacgctttttttcttcctctctctctccggggtgcgtcctccttagtgtacatagcggcgtcggggggtggccccaggcccgggtagaaaagcatgcactgagccccctgcccctagactgcgagtactgtacaaatccaacacttgaaaccgacacgcacacgcgcggcgccgccacgggggtgggacacggacacgcacccacgcgcacacggccgcgcacgggc

SEQ ID NO: 37757 - DNA, 293 bp, Homo sapiens; identical to SEQ ID NO: 19835
  chr6:43641288-43641581
  hypo

SEQ ID NO: 37758 - DNA, 814 bp, Homo sapiens; identical to SEQ ID NO: 27172
  chr6:4775131-4775945
  binary

SEQ ID NO: 37759 - DNA, 78 bp, Homo sapiens; identical to SEQ ID NO: 19837
  chr6:57085548-57085626
  hypo

SEQ ID NO: 37760 - DNA, 753 bp, Homo sapiens
  chr6:5997308-5998061
  hyper
cgactcactgggtttgatttatgaactgttacactagcaattgtttacacattgcatttcagagcccgggcccaccctccccgcagcgggcggcgggcttcgtgcgggaacctgctgcagcccccttggtctctctccatcctcctcccttcccccgtcccccccccccggggcccccgcagcttcctcccacagccaccttctccaagaaatcagatttcgatttctctgaacccagagacctgcatgcagttctttctcccccgcctactccaggcctgcagtccccggacccgggtcgcctctgcccatttactccggaatgtttacttctctttaaggccatgcggggcctataaataggagaggtggaatcagccccactgccagatcaatagggcccgtctcctcgccatttcagctgagctgtcttattaattatgaaaggattcacctgatccctgccagggaacacagcctctcggcccctctgctggagcccttaatggcggttccttcgcaagctgcctctggccaccgcacaggaagaggcgaatcgtggttaggccgagcctgcgaggatcgtggttagggctccggcccgcctgaggcgggggcagacggccggccactggcattgtctgcctgtgcgagcaagcccagttcctctaaatctcaaacagaaagaatctctgctttgtaattaatttaaaaacaactttcattttctcttttttaaggaagcacggtttc

SEQ ID NO: 37761 - DNA, 127 bp, Homo sapiens; identical to SEQ ID NO: 19841
  chr6:7891513-7891640
  hypo

SEQ ID NO: 37762 - DNA, 94 bp, Homo sapiens; identical to SEQ ID NO: 19842
  chr6:7891873-7891967
  hypo

SEQ ID NO: 37763 - DNA, 585 bp, Homo sapiens
  chr6:85478295-85478880
  hyper
cgtgaacatcagcctacgctgagtcaccaggcagcgccgcacaaatgggctagggcttcccctttccgcgattcctgtccctactctttcccactctctttcttctctttgcacatacttttcttctcgcctctccttcggatctgcgttaatgaaaatattttatcttgtacaagtttataaagcctacggtagtaaattcaggcgtcccagggctcaaggactgcactcttgcggatttctctgccgggtctggtgctgcagatgcaaacccaggccccgtgaacaaagcgatccggagctgcaattcctccctgctcactcctgtggctgacttgcacgcacagacatcgcctccccacttgttggcgactgttttccattcttcccccaacaattcgtccttctcaattccgattagctgagactgaagccctctacaaaggacctgtgcagcccacggaacaactccgcagttctcaggtagaagaatcagaatcaggtctgagcccgcggagtatctctttaagcgctgattttttaaaatcaatgatcgtttctcattggggctccagggaggtgctc

SEQ ID NO: 37764 - DNA, 1301 bp, Homo sapiens
  chr6:88876226-88877527
  binary
cgggggacccgccgcggcgccagccctggggccagaggggacaagcctcttcggcccgcgtcacctacttctcctcttcctcctcctcctccgccgccgcgctcccggaggcccccgctgccatgacctcgctgtgctcccggataccctcacaccctgaccaggccaagaaggggctggtgcatgcgccgcccacgacctcggggccattaatcacacgctcccgggcagcgcgcatcgccaacaccttccgcgggggtcacgtctggggcagcgggctgagccggaaggggaaggggagcgggagcccagaggccgaggcgcgccgggcccgggggtgcggtctcgcgccccctccctccgcgcaaggccgctcccgtggcaggcggcagcgagctgggcccggggccgggctgagctttgggaccgcgctgcgcagcccccgagccgttcgctacctggctgcggtcgcgcggccacctgtcctccgccctcggggcgccgcccagcttcgcgccaggcgccttctccagcgcccgccgccctttcccggcgagaccactcgggcgcgccccgcccgccggtccccgatgcaaacagttgggctccgtaggcggctggctccgcgcctcccggcccggcgcgccccctccccggccacccggggccccgctcctcgcaccttttcgctggaggaggacgccccactccagggccggactgggggctctgggactcgggggcggcagcggcgggcgcctggggagccgcggtgtgctcagcagccgcggcaggaattaggggacatgctcgttaattgtttccactatcagccgccgtctgcctcctgtgtgcacggatcaaaccttaattggtctttacatttatcatggtgaattgcgaacctccaaacaagcctgggccgccgcttctgccgaggaggcgctcccctcccctccgcccccggggccctgcagggtgtgcggcggcggtcgtggttatttagacatctttatctctcgtgagttggatcgggagaggatcgcacggtttccacctgacggagccacgtcacgtcggccacaagggccccgtgctgggcgctgggttcggttcccggccgtcctcttgtggccgccttggcgttcattttatgacaccttgccggtgttcccagacatcatcccgcaccgctccgttttaccgacctccaggtcttcccgcccctgatcagaccccaacagcaaccgtactatatctggaccctatatttgaactacgtggtgagaatctgtgaaagc

SEQ ID NO: 37765 - DNA, 1109 bp, Homo sapiens
  chr6:99276279-99277388
  hyper
cgaactgagctccgtgcctattcattattctctccctctgacctagggcgttaatatgatcaggcctatgactcggccgtgttctgttttcctattttgcatttaatgctgggacccggctgccctagattaccatcgaaaactctcagaaaagacaagaggagccaggaggtctccctgctccaatctgcctaaggcttcctcttcctgcctcctcttccggccaacgtctgcccctatgttcccaggacccaaattctggaaacctgtctttaaaaatacaatcatctctaactttatgatgtccaaaagctgtctagaatgacagattcgaaactctgagacctagcagaagattttggcccacagttattacgactgtggttaactgctctccagaaaagcatctctcccgcccgtgcaccacctgctcccctccccgcccacccccccatccccccccaaccgccgtcctcccggacactaacgacacaattgttaagtgcacttgtacacttcagaaggatttgcattcgtgctgtgtgcaggcagaataagagaactgaagtccaacttcaaccaaatacgcctgtttatcccagggctggagcaacagccctagcccttgaaaatggcttcagtgaaatagctgagtacaccctcctcccacttccccagtccgcctctgtgcgcaggtgtatgttagtgcactcgtccctagcttgccttcctcttcgaaaattgctccagaggatgagagaagccaggagctctagcaagagcttcatcccagtacatttccaaatgctttagagctaaggaggtttctgttgaaatcactttaatttatcaaagagttgtcatcccctactggtggccagccatccacctgctttaaggctagggggagaaaatgcgagcgtgcctgtgtgtgcgtgtgcgcgcacacacacgcgcgcgcacacacacacacagacacctttaggctccattgttaagaggtcatttaactgttagtcctttgaaagtgaaattgcgggaagcaaactggaagccaccaattgtctcctgttctgtttctgagatttttgttctgtttctgagatttc

SEQ ID NO: 37766 - DNA, 487 bp, Homo sapiens; identical to SEQ ID NO: 32112
  chr6:99292143-99292630
  hyper

SEQ ID NO: 37767 - DNA, 455 bp, Homo sapiens; identical to SEQ ID NO: 25820
  chr7:100091142-100091597
  hyper

SEQ ID NO: 37768 - DNA, 754 bp, Homo sapiens; identical to SEQ ID NO: 19850
  chr7:100202089-100202843
  hyper

SEQ ID NO: 37769 - DNA, 497 bp, Homo sapiens
  chr7:100203058-100203555
  hyper
cgcgggcctgtcacttgtgagtgcgccaggacttgaccttgccaaccacgacgaccgacacccctgcagggtcccatgggtgtgtgtggtcctccgtgctgtggtgtgaacgccttcaggaggggggcccagaggacgcgggaggtgggagtgggagctgctgcaggcacccagtaggagatgaggtgcaggcgcccaggggtgtcccgccgcgcagtccccgcctccgcccgccgccaggtcatcgcgctgaccttcgagaagtttgacctggagccggacacctactgccgctatgactcggtcagcgtgttcaacggagccgtgagcgacgactcccggaggctggggaagttctgcggcgacgcagtcccggggtgaggggcgggacctgggcgagtccgggagagagtcggcggaccgcacgcacgcggctgtttggaggggcggggttcagctaaagggacgggatctgaaccccagggctccaaaccggc

SEQ ID NO: 37770 - DNA, 831 bp, Homo sapiens; identical to SEQ ID NO: 19854
  chr7:100402457-100403288
  hypo

SEQ ID NO: 37771 - DNA, 487 bp, Homo sapiens; identical to SEQ ID NO: 15192
  chr7:101460542-101461029
  binary

SEQ ID NO: 37772 - DNA, 332 bp, Homo sapiens; identical to SEQ ID NO: 18893
  chr7:101566736-101567068
  hypo

SEQ ID NO: 37773 - DNA, 468 bp, Homo sapiens; identical to SEQ ID NO: 28146
  chr7:101627660-101628128
  hypo

SEQ ID NO: 37774 - DNA, 90 bp, Homo sapiens; identical to SEQ ID NO: 19859
  chr7:116759594-116759684
  hyper

SEQ ID NO: 37775 - DNA, 972 bp, Homo sapiens
  chr7:120969275-120970247
  hyper
cggcccgaagggcctctggggagggggtgcaaaagaggagcggctgggctgggggactccatgcgggggcgatggacagggcggcgctcctgggactggcccgcttgtgcgcgctgtgggcagccctgctcgtgctgttcccctacggagcccaaggaaactggatgtgagtatggaggtggcagggaagcatcgggtaggtggcaaaaggggtgcccaatcctagggaactttcaactgaggctgggggagaagggcggggacccttagacgagtgacctaatttttcggaaaacatctggaattggggagcggcttaacgctacgggcggccgtgtcttacaggtggttgggcattgcctccttcggggttccagagaagctgggctgcgccaatttgccgctgaacagccgccagaaggagctgtgcaagaggaaaccgtacctgctgccgagcatccgagagggcgcccggctgggcattcaggagtgcgggagccagttcagacacgagagatggaactgcatgatcaccgccgccgccactaccgccccgatgggcgccagccccctctttggctacgagctgagcagcggtgagtcctgggtccttaggggttggtgggggacggaaggcgacaactcctccaccggttcctgcaaataaagtaaatagtgctacgtggtcctgtagctctctaagttccagaagaagccctttagtgcacggggattgagagctacaaaggccagacctggggagcaggtgcgagcctggagggaggtgactccccagttccagagcggagctctaggggctggagctcttcctctttcctgcggtgccccgccagagttggaaaaaaaactctaattctcctaccccgccgaccccctcggaccccgtagcgcccccctacgtgggtgaccagctggagaaacatgatgtcggcagcggggaatgcggctgcc

SEQ ID NO: 37776 - DNA, 1392 bp, Homo sapiens; identical to SEQ ID NO: 29361
  chr7:121946043-121947435
  hyper

SEQ ID NO: 37777 - DNA, 764 bp, Homo sapiens
  chr7:121950291-121951055
  hyper
cgctggccttggccgtctcagccttcattatcgccacggccttggcgccccctgcccccggctgcccaggggaaccaagttcccgctgctggagttggggcagaggagccccgcctcattcaggattcggtggccagcgcagagccatttgaatagaagaagcccgaagtgaaacagaaaagctgaaaactccccggctgggctctccacttctcggttcttgctcacgagttccaaacagttaaagtgacgttggcaaggccgagggccaccgagctctgtgagactcccttggaggggtcaggaaacttagctcgagaagcttggaggcggctgggagttggggcgcaacttcagtgaccgggcgccgctgccgggctggggctcccaagcgtccggctcccggggtggtcgacgcggcgctgccttcgatcaggtcccgccgacctcgggcctctggaccaccaccgccccagctggtctggcaacccatcccgggcgcaatcgcgctcctccccttctcctctgcattcccgcaggtcctggggcggctccatccccccaaggctgagagatggcgagggaggctccaaagagtttcgggagggggcgccggatctggtttaagagaccgcggaacagatggtggagagctcctggatgaaagtttttgaacaggcactcgctaatagacttgctttgacgactcagggtgtaattgaagggtcatttaatctagacgcaaggtgaaagaaaacaggccc

SEQ ID NO: 37778 - DNA, 277 bp, Homo sapiens; identical to SEQ ID NO: 19862
  chr7:127291492-127291769
  hyper

SEQ ID NO: 37779 - DNA, 194 bp, Homo sapiens; identical to SEQ ID NO: 16053
  chr7:129470923-129471117
  hypo

SEQ ID NO: 37780 - DNA, 158 bp, Homo sapiens; identical to SEQ ID NO: 19864
  chr7:130741985-130742143
  hyper

SEQ ID NO: 37781 - DNA, 101 bp, Homo sapiens; identical to SEQ ID NO: 19865
  chr7:131240439-131240540
  hyper

SEQ ID NO: 37782 - DNA, 260 bp, Homo sapiens; identical to SEQ ID NO: 25841
  chr7:131514717-131514977
  hyper

SEQ ID NO: 37783 - DNA, 854 bp, Homo sapiens; identical to SEQ ID NO: 30527
  chr7:139929854-139930708
  binary

SEQ ID NO: 37784 - DNA, 209 bp, Homo sapiens; identical to SEQ ID NO: 15200
  chr7:140103670-140103879
  hyper

SEQ ID NO: 37785 - DNA, 564 bp, Homo sapiens
  chr7:143105734-143106298
  hyper
cggcttctgcaggggggtgctggccgggccccgggaaggggcggggcgcgggggttgggggcgcgggggcgggggtcggtaccttccttggcgcgcgcccccgggggcagcggggcgcagagcagcagcaccagccctagccccaggggccagcgccgctccatagctccgggccgggacctgggacagtggcccggatggcagcgccaggttgcaagggactaggagagccgggcgggccgggcgggggcggggggcggggccagcgccgggggcggagtcccggcctcacctggttcacctccttaaagggacagtagggcaggaaagaaacttgctagactggtaatcaaattcaagaaccggaggcgtcttgacccgaatgagactgcgggcgccgcctagtaggtgggattaagaattgacgaaccttttcccaattctaatcctaaactcaacccaatcttgatccagcttttaacctaattctacctctgacttgaattacactcctatattcctctttctgtctttgtgcaggccccagagctgggtaatagggcc

SEQ ID NO: 37786 - DNA, 298 bp, Homo sapiens; identical to SEQ ID NO: 19871
  chr7:148394984-148395282
  hyper

SEQ ID NO: 37787 - DNA, 437 bp, Homo sapiens; identical to SEQ ID NO: 19872
  chr7:150075217-150075654
  hyper

SEQ ID NO: 37788 - DNA, 390 bp, Homo sapiens; identical to SEQ ID NO: 32142
  chr7:150655182-150655572
  hyper

SEQ ID NO: 37789 - DNA, 846 bp, Homo sapiens; identical to SEQ ID NO: 9912
  chr7:150671471-150672317
  binary

SEQ ID NO: 37790 - DNA, 301 bp, Homo sapiens
  chr7:151136933-151137234
  hyper
cgaaggcggagccccactcggtttccttggggttgagggacgcactcaccttccccgagcgctgcgccatggtgcgccccgccccttccgcgggtccccgtttacaccgggcagcgccctgctggctcagcgccgccccggacaaaagatttgctgggccggccccggagcgttagtgctgtcgggcgtgctaagcccgaggggccaccaggcggttgggacccgccgcggccaccctgtgccaccgcgagtgcagcccgccctgcccggggtctccctgtgctctccgcgtttagctccc

SEQ ID NO: 37791 - DNA, 772 bp, Homo sapiens; identical to SEQ ID NO: 19876
  chr7:156433208-156433980
  hyper

SEQ ID NO: 37792 - DNA, 650 bp, Homo sapiens; identical to SEQ ID NO: 9915
  chr7:157202474-157203124
  hypo

SEQ ID NO: 37793 - DNA, 1126 bp, Homo sapiens; identical to SEQ ID NO: 29382
  chr7:158066162-158067288
  hypo

SEQ ID NO: 37794 - DNA, 615 bp, Homo sapiens
  chr7:158277387-158278002
  hypo
cgtgacttttgtgactcggtttcttcctctgagcacggcgattcccaggttcctccgcgtcagtgtgccggtgcttcctgcctccctttccacggccggacagcactccaccatcacagacgtcctcggttcctggtggttttctgccctcttcagtggagaaagggcttggaatagaagaagctgcagttggagacgtgaaggctgtggctgtgacgccgccacggggagtcggctgcaggaggagcctccccaccatcagcgtggccggcggagtgagccacgagcgcaagggcacccctcccagccgctgttgctgtggccccggccgccagcgtcccgggagggcacctgcggagggaaggcagacaccctgcaacggcccgcaggcccgtgtcacctgggccaccgagcgcagggcttgtgggtcgtcacagcataattcagccttgagccacgagacacggagccgacaggtgtgtagctgagccatcctcccccacctgtcagtcaccattcttccacctccctccaaacggagagcgcgacttgctcctcttgccctcctggacgtccgggatttccgcccctgggctccagcgctatggtgtggtc

SEQ ID NO: 37795 - DNA, 491 bp, Homo sapiens
  chr7:16793071-16793562
  binary
cgtcatctgccagggccaagaatccagaggtgctgtcatatttctccttgccagcgtggatctcctccgagccccgccctccctcctcacctgctcctggggaaactacaccaaggccgccgctctggcctggggctccctcccacacggccttggccctctccccctcgccccgggaccgctccgcccctcccggatcccggtcggcggagcgcatttatttgcatatttctacctttgttccctgccagcggccaatcagcgcgcggggcgagacgaaggggctgggcggggctcgggctcctgctccggctcagctgcggcggccgcaggttccaaagcgggtccgagccgccgccgcgcgcgcgccgcgcactgcagccccaggccccggccccccacccacgtctgcgttgctgccccgcctgggccaggccccaaaggcaaggacaaagcagctgtcagggaacctccgccggagtcgaatttac

SEQ ID NO: 37796 - DNA, 800 bp, Homo sapiens
  chr7:1708913-1709713
  binary
cggcgagcggagagcgtgccgggggtactgaggccgggaaccagaggcgggcgggggacaggaagcggggagggggcgccggcggggacgcgcgggctgcgcggggactggagagggtccccaggcgccggccgttctgcgaacgcgggcttgtccaggcaccgccggggcctgcccggcccgagcgtggagtcccgaggctcctgccgggggtccaggctgcccctggggctctgccttcgacgcgctgtgtagggccagattctgggcctctcttgactcagtttcccttcctgtaacatgcggacgggggcttccgcacaggcaggttgtcagggtgaaactgagccgaagagtgctccagaaccccctgaagtcctcacagaggttggggtgaatgaaggaaggaagcggggccagggctgggcagaggaggcccggcctgcgccctgcgttctccgcccctaggtccctgccctcccggataaggggcggaccgacgggaggacctgagaacgccttggctttgcttgaggtggtgggagtcgcgggtagcttgttcagccaacagctgtcgcccccactccccccacccacccacccaccccctccaccttttagatgtgggcggggagggccggggacggaccgcgaggacgccccctgcgctttctaggacctcccctccttccccagcccctgcgcgtcgccgggagagggaaggagcgggttgccgcggggagccgaggagagcagggggctcgggaggccagggagagaaggggagggccagaggctcc

SEQ ID NO: 37797 - DNA, 505 bp, Homo sapiens; identical to SEQ ID NO: 35991
  chr7:17339346-17339851
  hyper

SEQ ID NO: 37798 - DNA, 282 bp, Homo sapiens
  chr7:19152064-19152346
  hyper
cggaaattcgaggttgggcctttgcctgaatctgttgctattgctccccttgctaccgctgacacttggcaccgccgcctcctagcagcggccagacgcggggctgggggccttccacgcaaaccgaaggagatacggacatcgtcattctccccaccgcgcgagccgggcccgccacccacgcaggggagaccgtgcccgtgcccctctcccgcgcctgccgcaggtgagaccctcgctccccacggagttctgtttgggtttccgtggcgtttgttcccc

SEQ ID NO: 37799 - DNA, 970 bp, Homo sapiens
  chr7:19183520-19184490
  hyper
cggtggctggtggcgaagctgcagggcgcccaaggccccctgcggcccaggagtgacccgagtgcactcgccccttactctggcctggggcctgaagaaggcactggaacacggaagctgatgctgcactttagatgcaaagcgtagatttgcactctggctaaggcactgaatgaacaccactgtggccctgggacaaggagctgtggtccgtctgggatcaactaggtggcgaaggggagggagaaaggaagagagagggcttgcgcgcgggagagaggaagggacgggagggagagggaatggaagacaggaagggtgtcccttctcagaggtcgcactttgtcagcagttcctctcgactgctctgccttccatttttcctttcctcagttcctggacaagcctcggaggaccaggcagaaccctctggctagcagaaaagctcgcacccccgcacccttgcggcgtctgcttcagaccctccacgcaggcgcccgctggagcgcctgctggggatggcgtaccaccgacccttcaggctttttaaaaacgtaagaatttctactttattatctctatgaaaaaaaaaatgtaaagaagagaggttagattttatagaagctccaaagtctgccatttgcgaggagggttcacttcccacccacccagcccacggaagctcttaggagcagcctgaacggccccgactcagcctcacgctctctgacttccccgctcgcccctgaccccgacttcacttagggcggtcgcgtagatatgaactctacagcagccactctgctcagcgcatgtggggatcttacaatctcgaccccgacctccagaagaccagacgttctgtcttggggcctccctcccggccctttagcctcacccagtgcccggtcctgacacaccccagcactaccagacgaggaagggcagactctccacaccaggctcagcc

SEQ ID NO: 37800 - DNA, 212 bp, Homo sapiens; identical to SEQ ID NO: 35063
  chr7:1970797-1971009
  hypo

SEQ ID NO: 37801 - DNA, 276 bp, Homo sapiens; identical to SEQ ID NO: 19891
  chr7:20369119-20369395
  hyper

SEQ ID NO: 37802 - DNA, 255 bp, Homo sapiens; identical to SEQ ID NO: 19892
  chr7:21293835-21294090
  hyper

SEQ ID NO: 37803 - DNA, 197 bp, Homo sapiens; identical to SEQ ID NO: 19893
  chr7:229498-229695
  hypo

SEQ ID NO: 37804 - DNA, 1363 bp, Homo sapiens; identical to SEQ ID NO: 33070
  chr7:23507580-23508943
  binary

SEQ ID NO: 37805 - DNA, 290 bp, Homo sapiens; identical to SEQ ID NO: 6277
  chr7:2517249-2517539
  hyper

SEQ ID NO: 37806 - DNA, 695 bp, Homo sapiens; identical to SEQ ID NO: 29387
  chr7:25891919-25892614
  binary

SEQ ID NO: 37807 - DNA, 338 bp, Homo sapiens; identical to SEQ ID NO: 19897
  chr7:25894678-25895016
  hyper

SEQ ID NO: 37808 - DNA, 444 bp, Homo sapiens; identical to SEQ ID NO: 25871
  chr7:26192423-26192867
  hyper

SEQ ID NO: 37809 - DNA, 867 bp, Homo sapiens
  chr7:27135176-27136043
  binary
cgtctgcttcctgatttaacgcgtaggggctgtaaggcgcactgaagttctgtgagccatagcttggaccacaacttgagtgggagtaggacacccccaggttcccggaagtctggtaggtagccggctgggggtggcgatggtggtggtggtggtggtggtggggcgaaccgatctgcacccccctgcccactaggaagcggtcgtcgccgccgcaactgttggcgctgaccgcgcacgactggaaagttgtaatcctatggtccgaggggtaggctcgggctgagcaggtccccgagtcgccactgctaagtatggggtattccaggaaggagttcattcttgcattgtccatctgtcactgagtgacctggtcctgcgaagcccggcgtgactgtgccaactttctcacttcctccatggggccggagaagaaaaatgatatgaatgtacagtgcgcaagagggggggcgggagggcggaggacgctggaggaggggcacgtgacggtgtcagccaatggctgagcctcctgcaaaagtttgccggcttccgcagtgatggatcaccgttttagtggcatttaaatccccggcgctccgccgtctaggtgacgcgcagtcgcccccccaggcagcctaggcggcggcagctgctgcggcgactgcaaaggccgatttggagtgctggagcgaagaagagcaaaagctgcgttctgcgcgcgcccgactccgctgcccgccccgccaggcctccgggaggtgggggctgggaggcgtcccccgctcccgccccctccccaccgttcaatgaaagatgaactggcgagaggtgagaagggaagagggctcccggctctctcggggc

SEQ ID NO: 37810 - DNA, 984 bp, Homo sapiens; identical to SEQ ID NO: 30593
  chr7:27264586-27265570
  hyper

SEQ ID NO: 37811 - DNA, 856 bp, Homo sapiens; identical to SEQ ID NO: 25877
  chr7:27290961-27291817
  hyper

SEQ ID NO: 37812 - DNA, 415 bp, Homo sapiens; identical to SEQ ID NO: 32206
  chr7:42267546-42267961
  hyper

SEQ ID NO: 37813 - DNA, 848 bp, Homo sapiens; identical to SEQ ID NO: 23361
  chr7:42927739-42928587
  hyper

SEQ ID NO: 37814 - DNA, 618 bp, Homo sapiens; identical to SEQ ID NO: 28190
  chr7:44143892-44144510
  hyper

SEQ ID NO: 37815 - DNA, 219 bp, Homo sapiens; identical to SEQ ID NO: 19905
  chr7:47621704-47621923
  binary

SEQ ID NO: 37816 - DNA, 490 bp, Homo sapiens
  chr7:560928-561418
  hyper
cgcagccccacaccacgacccccgcggtcaagcatgccctctgggtggtcaggaccaagcgggaccgggacagaaccaggggagccttggaaacgtggaggagccccttaaagccaggccttgtccctccagggggaacttgcggcttgggaggggacacccactgcatggcttctggaaagagccggactcgcagggccaggacgcaggccggaccccggcctcattcttcggccagttatcccggagtggcgcgcatcctgtcttcctgggcctcggactgctcgcgcgcagagggggcccgaggacacctctgtggggttagaggactcggtaagacggtgtggaaggcaaggaggaaggtcgcgttgtattggggatggggtacccgtccctcccagcttgagggatcctgggggtcctcgccgcctctgagggcctagatggctgcttccctcggctcccctgcccggcctggagctacgggtgc

SEQ ID NO: 37817 - DNA, 76 bp, Homo sapiens
  chr7:65446036-65446112
  hyper
cgatccccgggcccagctctgtgcagtgcatgccgctgtggccagagtgtgtgggtggctcatgccagtaatcagc

SEQ ID NO: 37818 - DNA, 838 bp, Homo sapiens; identical to SEQ ID NO: 35108
  chr7:808392-809230
  hypo

SEQ ID NO: 37819 - DNA, 400 bp, Homo sapiens; identical to SEQ ID NO: 33102
  chr7:87936014-87936414
  hyper

SEQ ID NO: 37820 - DNA, 410 bp, Homo sapiens; identical to SEQ ID NO: 25903
  chr7:907671-908081
  hypo

SEQ ID NO: 37821 - DNA, 605 bp, Homo sapiens; identical to SEQ ID NO: 29428
  chr7:96621730-96622335
  hyper

SEQ ID NO: 37822 - DNA, 362 bp, Homo sapiens
  chr7:96632634-96632996
  hyper
cgatttgtaaacgtgtagatcgtgttactggttcgcgtgttaaagtgcacctcttgttaaaaggtggggaacagggcacgccacttaaaaatgaattcagagttactgaaccggctccccagactcaagaacttaagcgcaacgggctgggaaaaggagggggagaggagcgcaaacgccgctgacctgggaactcggaggaaactcgcgggcagcgagcttcaggtcttctgatacattgaaggaaagaaagaaagacagaaaaagaaaaaaacaaactgtcctggagatagctagacatccagggctgggagctgggaaaatcaattggcataagccgctgccggcgggcttcgcgcaac

SEQ ID NO: 37823 - DNA, 85 bp, Homo sapiens
  chr7:96642028-96642113
  hyper
cggattcccgagggagggattggtaggaggggcgtgggcgaaaggcatcgcccagtggtggtgcctacgacgcctccccacgttc

SEQ ID NO: 37824 - DNA, 235 bp, Homo sapiens; identical to SEQ ID NO: 19915
  chr7:98030416-98030651
  binary

SEQ ID NO: 37825 - DNA, 424 bp, Homo sapiens
  chr7:99595206-99595630
  hyper
cgtcgtagggtacacgccctgggaatcgggggtcttccagtatagggaaccaccgagatgcgggccctccgaagtcctagagagggcgcctcggccgccggcacccgccacacttccggcctttgtgggccgcagcgacggcggtctgcggctgtcggttctgtttgttgctgtcactgctgtttgttcttgccagcggctaggtgtgtagttgcttggggctcctagcacgaggcctctgtccccaggcacgcagcgccagtctccggctgttgcgccctgggcgccgcctctctccggcccccctttgtttcctgagccagctgggaagactaaaagggtgggtcctgggagcggcccatggttcgacccttcttttcaggcatccttggagcatgcaggctgcagatttcaggccgacccc

SEQ ID NO: 37826 - DNA, 154 bp, Homo sapiens; identical to SEQ ID NO: 15258
  chr7:99680237-99680391
  hyper

SEQ ID NO: 37827 - DNA, 457 bp, Homo sapiens; identical to SEQ ID NO: 33107
  chr8:101661596-101662053
  hyper

SEQ ID NO: 37828 - DNA, 586 bp, Homo sapiens
  chr8:102504317-102504903
  hyper
cgctcgacccacaatccctagtgtttgcaggtgttgcattcccccaacccctttcttctcttcaaccagtagcctccaccttcccatccctgctttggagaaggaggaaaacgcagcttgagatctactcgaagaactgaccctcagctctcacaggctgccgccgagctgcaagcatgccgccgctccactcgggtaaacttcggagtgagttacctgcactcggagaagggccttacctgagcgcgcctctgccaatggcagctcacctgagggagctccccagccaatcatcgcgcagctcgtccctcgggcttgtaccctttagtgaaagaattcagctccttgcgagaaagttacctgtggccgcccaagtccgccactttctgctctgtgtctgcccattgccacgatccaggaggactccgcgccgcccggccgcctccgagctcgggccccatgtgaggggcccccccttatcccacctttccggctaggtgagggcgcgagcgggcgagcgagcgagagtggtgaggggggacggaaaagcagaattacctgtagctcttgttctgccatctcgggc

SEQ ID NO: 37829 - DNA, 884 bp, Homo sapiens
  chr8:102505545-102506429
  binary
cgtgagtgcgcgcccgcgtgtggccccgatgggaggcgaggcgctgggaggccggggggcgcgggggcggccggcgccgtcccccactccctcgacatcccgccttcctcccccctcccccgcctccctcccccgggtccgcccccgcattgtttggccaccttcctcaggtgcccggggggaaaggacggttcgcgaactgggggaactcatgtgaggcctcgagttagggcctcggcggggcgcgaaggggcgcctgccactgagcgattcacccgcgcccccgacggcgtctgcacgcccctcgagctcgcggccctccacgcagttggccgccacctcggacgcggcaggcgggactgcgtggggcgcgccgagccttctcggggtgctctcgccgtcaaggccgagggctcggggcggcgggaacgctgggctcgcgtccttcccgtcccggacaggcactccagacgcgtcggggagccacagcctgcgcggccggagccgcccgcgggtcactgggcccggtccggccgcgtcctgacggcctcccccctggccggcccccgccctcggaaggctttgtgcgagccgggggaggtggggcctgggcgggcgcgggagggagccggaggtgggtcccgcggcctttctcgggattcggcggggacactcccttccccctcctctcgggcgcgtccgggcctgggaactggctgcgtcctattggaagtgcgcggggccgcccttttgctttccccggtaactttgccgtggcgttgcggccaccccgaggggaccttcctgaaggtgtctcgccggagagggccggtgccccaaggccgcgggccgctgggcctgtcatggagaagtggcggggaccc

SEQ ID NO: 37830 - DNA, 490 bp, Homo sapiens
  chr8:121824202-121824692
  binary
cggcacgcgggactccgctccgggagttcgcagacgcactcggcgggagttggcagctgcactcaggctggttccccctcgcctgatcctgaccggggtggagcaacctaaaagaagaaggagagaccgagacaggggaggggaaaaaagccagcagccagttgcaaaaccccaaagcaaggggagccgcggagcagctcagcgctggagagagtccgtgggaggaggcacgctggcggtgaagggcggggacccacaacccagcggccgctcacctgttccagccgccgcagcctcggcggtcacacgccacccgcccgcccagacctcccctcctctgtccccagagcgcacgacgccgcggggacagcttcccgagcgccttccccgtcccgcttctctccagcccaccgcagccccctttcttcccagctcccccactccgtgggcgcccacactgcaccttcgccgggtgcgtgcgtcccgcctc

SEQ ID NO: 37831 - DNA, 233 bp, Homo sapiens; identical to SEQ ID NO: 19923
  chr8:123830706-123830939
  hypo

SEQ ID NO: 37832 - DNA, 79 bp, Homo sapiens; identical to SEQ ID NO: 19924
  chr8:124778505-124778584
  hyper

SEQ ID NO: 37833 - DNA, 114 bp, Homo sapiens
  chr8:141559645-141559759
  hypo
cggctaacttgccaccgtaacacagcagcctttaaaccgcgctcacgctgcctcgcggctgtggcggccccagggcagtgatgcgatgctgtccccgtaaagctgctgagcagc

SEQ ID NO: 37834 - DNA, 172 bp, Homo sapiens; identical to SEQ ID NO: 19927
  chr8:141613224-141613396
  hypo

SEQ ID NO: 37835 - DNA, 813 bp, Homo sapiens; identical to SEQ ID NO: 19928
  chr8:142139026-142139839
  binary

SEQ ID NO: 37836 - DNA, 69 bp, Homo sapiens; identical to SEQ ID NO: 19929
  chr8:143483659-143483728
  hyper

SEQ ID NO: 37837 - DNA, 585 bp, Homo sapiens
  chr8:143509044-143509629
  hypo
cggttcttcccacgtgggatattctggctgtacgcgcgtgaccgtgactgtggggactggcccagggcttgactgtggggactggcccagggcttttcagggttggagctgggattggagcccgccctgcctcggggaagatcctcgctccctttctccacggcacctctgtgattctcgtcacctgccaacaccagcaccagggctgcccctcctgacggccccctcgccgtctttctgggcacactccatcggcacagcgtcttcactgtcctcctgacaaacctcgtgccacccccatcagcttcagcaccacctccacagcagccgtggccagcaccgacgtccttttccgtcaccgtcaagcctcaaaactgggaccgtgggtaatggcgtcaccccatccgccgtctctctctagctgccaacggcgccttcaccagacacgcccggcaccaccttccaggtcagcagtcccagccctgcgtatcggaggcctgctctcccacagcgtccacagtcactgggccaggctcgcacctgtgaggggccaggacccataccggagcccggcgaggctccctc

SEQ ID NO: 37838 - DNA, 296 bp, Homo sapiens; identical to SEQ ID NO: 19931
  chr8:143556722-143557018
  binary

SEQ ID NO: 37839 - DNA, 942 bp, Homo sapiens; identical to SEQ ID NO: 24672
  chr8:144359694-144360636
  hypo

SEQ ID NO: 37840 - DNA, 538 bp, Homo sapiens; identical to SEQ ID NO: 19934
  chr8:144461002-144461540
  hypo

SEQ ID NO: 37841 - DNA, 93 bp, Homo sapiens; identical to SEQ ID NO: 19935
  chr8:145692498-145692591
  hyper

SEQ ID NO: 37842 - DNA, 945 bp, Homo sapiens; identical to SEQ ID NO: 24676
  chr8:145697806-145698751
  binary

SEQ ID NO: 37843 - DNA, 429 bp, Homo sapiens; identical to SEQ ID NO: 19937
  chr8:145733644-145734073
  binary

SEQ ID NO: 37844 - DNA, 287 bp, Homo sapiens; identical to SEQ ID NO: 19938
  chr8:17940762-17941049
  hyper

SEQ ID NO: 37845 - DNA, 414 bp, Homo sapiens; identical to SEQ ID NO: 19939
  chr8:22299385-22299799
  hyper

SEQ ID NO: 37846 - DNA, 935 bp, Homo sapiens
  chr8:22436798-22437733
  binary
cgcgcccctgtcggcgcggaaccctggcctcgtccgcggcccagctccctggagcctcgcatcagcgggggcgcccccgcgagctgcgctctccccggccggagcgctcctcctccagcccccagcccgcagggtactttgccctcggagcgaaggaggctccagaactggtagagccgggccatcgggctgggcacctccccgcggcgcccgcagcgcggagtccactgaccggctcaaaggtctgggaatctcggggcggccgcgagccggcctcggggactggggtgggggcggtgctgggaacagaggctaggcctgggcccaaggggaaggcagccggggatggagcggacagaccgctggtgctcttgatagattctcgcagcacttgcgtccccagggcagccccaggatgggtgctgggcagggtggtgcccagcctggcaccgcggcttcctgcctggattggctcctggctccagagctagaggctcaggaaatcccacaggggtctgtctgcaagggcacttccttgcccagcggaggggctgtggatgggaggcctgtcaccccggctgtctgtcgggcagcatcaggaatctgggggtgggtgtgtccagcttgacagatgaaccctggcctccttgccctggcagccggcccctgggggaggtggggagcccggtcttgcccgtgtgatccactttgccaagaacgaggtgggcagctaggaggcccatgtgaagactcggcctcaccccaccagtccttcacctggccagtgacttacacagtctgtactggtgccagcctgttccttgacccgtcactcctgcttcctgagccctgctctccctaggccactcaccagccctcccccagagtggagaggaagtaccgtgtgctgtgggttttggggacaggaagcaagc

SEQ ID NO: 37847 - DNA, 271 bp, Homo sapiens; identical to SEQ ID NO: 33119
  chr8:22722238-22722509
  hyper

SEQ ID NO: 37848 - DNA, 794 bp, Homo sapiens; identical to SEQ ID NO: 25930
  chr8:23020923-23021717
  binary

SEQ ID NO: 37849 - DNA, 330 bp, Homo sapiens; identical to SEQ ID NO: 33121
  chr8:23082568-23082898
  hyper

SEQ ID NO: 37850 - DNA, 259 bp, Homo sapiens
  chr8:24770308-24770567
  hyper
cgggtggctgcacctcccactcgccgacctgggcgctgtccttggtgctgccggcgccatagcgagcacaagcgccttaccttctgcccctgcggaagctgcggacgtcccccaaacgttaaaaacgccatatcccactttttatacaaataactaccccggcctgttctctttgtccccttcccgaagccttcaggcagaccgttccgcaaagtctttttttttgttttgttttgtcttctagacccagctcctcggc

SEQ ID NO: 37851 - DNA, 380 bp, Homo sapiens
  chr8:24816325-24816705
  hyper
cgttttttttctttctttctttctttttttttttttttttttttctttttttccgcggctcctccctgaagcctttgactgcagaggaggctgcccagaaaggagaggggcggcgggtgctgcagagggatgcttcagagagaagaaaccattggggcacctgctgcctgccgtcccctgggtagctggaaaaaagaggaacacaggagcaaagggtgagaatgggaccctttcctgtgctgaacccggcccacagagtgggggaaggggcagatccacagcgtttaggcttatcgatctctggtctttttaaatatctcctggcctggccacctcatactccacgacagccttgctttgcaggactcccgaatccagcc

SEQ ID NO: 37852 - DNA, 903 bp, Homo sapiens
  chr8:25907865-25908768
  hyper
cgctcactcggccccgcacgcaagcagcgccccgcgcgcccggggccctcctcggataagggaggggtgacaaaagtctcccgctcactgctgcctacccacccccaacccggctgccttttcctccaggcccccacaaacacccttggctttcagatccaactttcttcctcataatatactagtcaccgcgactcccgcctcccggatttgaggatgggggagactttggcggcgggggtcagctgcaaatatggcaccatctagaatttcattccatttagcactaggcaacctcctcctccaacacacacacgcactcgcacaccatcacgatcacctccacctacactggcacacctcactcaggtggcaagagagaaaatccaggaaagtcacttgcatagagtgcacggatttcaagaagtctttgacggtgcaaactggacttctaatcatgggatctctccaaacacagcccaaggcctagaaattccatttctggctcacggaaccttccacccccaccccctcacctgccgcgagccgggcaatcatttcggggcgccagtgggtccagggcgcacgggacatggcacccacggaaaacctcagagccagctgggaaaacagagatcgctctcctggccgggcagctccataccaccctcgaagggggacacaacttccacttactcttttctcccaaaggagagcagatgggggtcacagggcttgggggtcactgcgttcagacagtcaccccgcgcggtaagtgcttagagcaacgtttatagggcaatgctggcctcgccgcgtaggggtcgctggactaaatgcccagaaaccctcacaacccgtgatgtccactttccgtggatctgaacccgggcaagttcggtc

SEQ ID NO: 37853 - DNA, 41 bp, Homo sapiens; identical to SEQ ID NO: 19949
  chr8:25910878-25910919
  hyper

SEQ ID NO: 37854 - DNA, 311 bp, Homo sapiens; identical to SEQ ID NO: 19950
  chr8:26148757-26149068
  binary

SEQ ID NO: 37855 - DNA, 837 bp, Homo sapiens; identical to SEQ ID NO: 19951
  chr8:29205985-29206822
  binary

SEQ ID NO: 37856 - DNA, 402 bp, Homo sapiens; identical to SEQ ID NO: 18968
  chr8:37702286-37702688
  hypo

SEQ ID NO: 37857 - DNA, 980 bp, Homo sapiens
  chr8:37756358-37757338
  hyper
cgccccagatacggccccttcttccaagaagacccaaagctggcagagctgggcgggacagccgcagaaggggaagccaggtgagaacaccagcaccggccgagggctccgtcccgaaaggccttccccgctgctgcccggcttactctcgaagggtccagcgcccagaccgccctgccggaggggtccgcgcccccaggccgggccctcccctccccgcccgcactcactgcgtcttcctgcggccctggtcgcggtgcagatcccgcaggtccacctcggcgcggcccaggaacttgtcgaggccgagcagcgcgcggtgcagcacggtgagctgcagggtggcggcggccgcgggtccggaggacagcagcgatggcagctcgaaggtggcctcctcgcgccacacgggcgcgcccaggctgcgctccgacacggaggtggcgtacttctccttgcccacctggatcaccgcgtacgcgtcgctcgtgcccccggggcccttggcccgcaggccccgcgcctgcagcaccgtcacctgcacgtgggttggggaccacacggcccccaggccccggccagccgagaccattagggacatggtgacgataacactccagaagcgaggagaagatcgccgcgactggcggcctccacggcccgccccggcgaccaggccactttaaggcttccggccacacccccgccaggccacgcccctcatggccaaggccacgcccctgcccgagccgcctgctccacctgctgcgccgcgccccgccccgccccgccccgccccgccggcctcagcagcgcgggcagctccgggcacccgggcgccggaggcggggctggcgcggccaggcaggcaggggatcacgtgcgcaggggcgggcgcatcgagaatctaatctgagaggtggtaggtgacggatggggtccccagctgccaaaggtcgcacggcgggaaggagctggcc

SEQ ID NO: 37858 - DNA, 234 bp, Homo sapiens; identical to SEQ ID NO: 19955
  chr8:41168659-41168893
  hyper

SEQ ID NO: 37859 - DNA, 838 bp, Homo sapiens
  chr8:41685769-41686607
  hyper
cgctccgccccgctccgcccgtgctgggctgtggcctccacaccaagcagccgccctgggccgccttccttcgtctgtgcgtgcagcgccgcctccttcagcttaggcccgacactccatgaactctcattttccaccttctccgtctccagcttccaagctgcacagggccaggccgaggtacgtgatggcgggcactgaattacagatcccgtctgtggccgccagcctctgtgtcctgccacctcctccgagaggacatcaccgccaccaggtggagcgagtctcctcctcggcgctccaaccacgtgctgtttattactctgtggggattcccataccgaggcctcttcagttcctggaacagtagcactaaaaggctcctgagtgcctctgttaatttgattgttctggttcgcactacaatgaccgggctggagagggggcgctcgtaatgaaacaggaactgctcctcgcgcccgctccagagtcctttacatctttggggagagggcatacggggagctacatttcattttcctgaagattttccacgcgaaagtgctggggagagagttgggcctgggaggctgcgccttcttcccgcgaatcccgaaaactgcgcggcaaaggcgggttccgcagaagtcgcgcgtgacccggggcgccgccctcctcggggcccattcggatctgccgcccgtcctctccagagcgccccctggcgccctctaggccatcttgattccaccgccgcagttgaaagaattaataaataaatcctagtctcgcgtctagaccggtccgtgagggtcccctgctcaccggacaccctgcc

SEQ ID NO: 37860 - DNA, 632 bp, Homo sapiens
  chr8:49309329-49309961
  hyper
cggggcacgtccccggcacaccatcccctctcttgggtgagagtctccgggtgactccccgcagctccccctgctctcacctccaccggcctccccccgccgtggttcccgcggtgcgccctccccaagtcccttcctcccactgccctgggtcccagagcacatccgccggcggcccccacatccctctgcctggagtcccggtccccgcgcacccccgcccccgccctgccttcacctgccgcaggccgcccgccagccccgctgaccgccgcccccgcgcttcgctggcgccagcctctcgatgggtcttgcactttgattatttgtgttagcagttaatttagcaccgtggccacgtgtgccaaagctgcctccacttcctccgggctcccaacaaacggcacttttatgagatcctttcaaagcggctcccaggctgtctcccgcctcctggtccccgcctctcggtgcagactccatttctctgccctccgccctccaccggggcgccccctctgcacaggccttatggcagctgcgatctttcctgccgttgcaggaaaggagctatttctggcaactctgtccctccacccagggcactcagcctgatctaatggagatttacc

SEQ ID NO: 37861 - DNA, 997 bp, Homo sapiens
  chr8:56013912-56014909
  binary
cgcacctgcctgagctcaggcacccccgcccgccggagaagccgggagccctcggaatgccggctgcctccaccgagggcgctggctcggggctcccagcggacccgcccgccctcagctgccggcgcggcaccaggctccgcgctccgagccccgtacgcctttctctcccctgcactctctggcaaggccgggcacgcccactgccgctgctggcctccgagcccgggcgcccgagttacacccattctccccaccatcgtcggccagagccgcgctcccagcccttctccaggtgctggcggctccgaccggaatacaaagaggcctgctcctccctggcccttgctgccgccacacccgtccgtgcccactctccgccgtcctccgcgagggctgcacgcagggacccctcctctcagcgcgctcctccccctcccccagtgtcgctcaaatccacccagcgttccgaaatcccgggagtgggggccttcgactgtcaccctcaggcccccttggccgctcctcccggcccttgggacccgccagggcagtcccccaacccccgcccgccgctcctctcggtcccggcccctcctccgggtccctcctcctccctcgcccctcccgagccagggtgggagcgacggcagctggaagagaagggatgaggtcatcctctccctcggagtcagctggtggaggagaggaagcgggaggagggagcgcgcgcgaggggaggagaggaatgtgcaggtccgaggagcgccgcggcggccgctgctgctcctgctgctggcggcggcggcggctcgggcggcagcagcgaagccgggacggcgaggagcgcgggcggcgggcaggggcgcgcgcggggcgccgcgagcagcttggctccgcgcaggcagccaggcggcgctcctgccggccccaggcgcgccgctagcccggcccagcgcccagcccggcgggcggcgggcggcggcggacggcaggc

SEQ ID NO: 37862 - DNA, 872 bp, Homo sapiens
  chr8:56014913-56015785
  binary
cgacgcaggagcaggaggagggggagccgcaccgcctgggagggaagccggggcgaggcgaggaggtggcgggaggaggagacagcggggaaaggtgtcagataaaggagggctctcctccggtgtggaggcatcatggccgctaaatcagacgggaggctgaaaatgaagaaaagcagcgacgtggcgttcaccccgctgcagaactcggaccactcgggctcggtgcagggattggctccaggcttgccgtcggggtcgggagccgaggacgaggaggcggccgggggcggctgctgcccggacggcggcggctgctcgcgctgctgctgctgctgcgccgggagtggcggctccgcgggctcgggcggctccggcggcgtcgccggcccgggcggcggcggggcgggctcggctgcgctgtgcctgcgcctgggcagggagcagcggcgctactcactgtgggactgcctctggatcctggccgccgtggccgtgtacttcgcggacgtgggcacagacgtctggctcgccgtggactactacctgcgcggccagcgctggtggttcgggctcacgctcttcttcgtggtgctcggctctctgtcggtgcaagtgttcagcttccgctggtttgtgcacgatttcagcaccgaggacagcgccacggccgctgctgcctccagctgcccgcagcctggagccgattgcaagacggtggtcggcggtgggtctgcagccggggaaggcgaggctcgtccttccacgccgcaaaggcaagcatctaacgccagcaagagcaacatcgccgcggccaacagcggcagcaacagcagcggggctacccgggccagtggcaagcacaggtctgc

SEQ ID NO: 37863 - DNA, 1319 bp, Homo sapiens; identical to SEQ ID NO: 33127
  chr8:60030067-60031386
  binary

SEQ ID NO: 37864 - DNA, 438 bp, Homo sapiens; identical to SEQ ID NO: 29478
  chr8:65499649-65500087
  hyper

SEQ ID NO: 37865 - DNA, 108 bp, Homo sapiens; identical to SEQ ID NO: 19963
  chr8:6673921-6674029
  hyper

SEQ ID NO: 37866 - DNA, 841 bp, Homo sapiens; identical to SEQ ID NO: 22964
  chr8:69242761-69243602
  binary

SEQ ID NO: 37867 - DNA, 311 bp, Homo sapiens; identical to SEQ ID NO: 19966
  chr8:71316520-71316831
  binary

SEQ ID NO: 37868 - DNA, 942 bp, Homo sapiens; identical to SEQ ID NO: 30666
  chr8:72754306-72755248
  hyper

SEQ ID NO: 37869 - DNA, 506 bp, Homo sapiens; identical to SEQ ID NO: 25949
  chr8:81213177-81213683
  hypo

SEQ ID NO: 37870 - DNA, 1231 bp, Homo sapiens
  chr8:97156910-97158141
  hyper
cggggtggagccggggtccatggagttcatcagcgtctggatgatggcgtggttggtgggctccaggtgcgagcgcagcgggaagtcgcatacaccctcgcagtgataggcctcgtactccaggggcgcgataatccagtcgtcccagcccagctccttgaagttcacgtgcaggggcttcttgctgcagcgtagcctggacttcttgccgtgccgcttgccatggcgactggcgaaggccgtgcgccgccgccggcggccgggcgagggcagccaaggcctggcatccggggcgcccgacggcggcggccacgacccctcggcgcccgcgcccgggcccgcagcctcggccgagcccagctgctcgcgcatctctgcgaacaggttcttgcgctgggatctggtgaataccaccagcagggcccgctcctggggaggccgcaccctccggccgaagcccagactccgcaggtccgggggcggcggttgctggggtccccgcgcgcgcgcctcggcctccccggcgtccagctcgccccatgcggcccgcagctccaagcacagctgcttccagggctggtggcgcaggccctgccacacgtcgaagacttcccagccggccggcggcgccccctgcgggtccagggtccgcgcgtccagcagtaggggcgaaaggcaagggaagagctgcacgtggagcggcccggctggtggcccccagggcgctgagggcgcctggcgaaagagccgcagctccgcgcccaccagctcttctttgtctgagagcatggacacatcaaacaaatacttctgtctccggagaggagtgtgcgagagatcgtctgcgagataaaaaataattacagtcagtttcacttaagggggagatcagcccggtgctcttcggccgccccgggaggaaaagggcggggagtgggggcaggtcggccgggcagtccagcttgcccggcccagggcctgaccaccccggctccccatctggctggtgcatggcgcggggaagggggcgcgccaggacgggccccctccttcgcgtcagctccggactctcagggcggaagtcggtggctgctggcgaggcggcggcggcggcctaccgggttttccccccaaaaggcttcgtaaccactaatgtgccctttgtggtctcaagcctgggccgcgtttcccctagacctcctctgggctgggctggctcgttctcgttgac

SEQ ID NO: 37871 - DNA, 117 bp, Homo sapiens
  chr8:97166422-97166539
  hyper
cgcccctggcctctttcacgcccactctcgggtccctaaaccatgccccgcccccaggcgccggggccactagcgccgccgcgcgcgcttccctaggaacgttgtccagcgccgccc

SEQ ID NO: 37872 - DNA, 641 bp, Homo sapiens
  chr8:97166796-97167437
  hyper
cggcattccacacctcgagggctcggctcgattcagtcccctggtccaaagagtgtcgtttgacccgggttattcaatacccgaggggttatcgaactaatggctttccttttacttaaaagcccccagggattactgttgatttgctctaagacctttggtgcacgcagtagtcctagcaggaaacaaaagttctcgttctgccctgtttctatcataccatcttcctccccacagtctccacctcattcccttcttccttctccgccaccgccccagaaagacgtcaccactttcgaggaggtgtgtaagaacctcaaggactccagctaagaaaaacatgtggtgttagggcctccgatgcagtgccctgcgttccccgcgggtccaggtgacacgcatcctctccggtcggaaagaggagctttcaagtcctgattcaattggggggtggggagggtggagaagagggattcgccaggcctgtcgtgatctgtggtctgagtgacttttttcttttaatgcgcagaaaccacaaggatgtttgagcacgtttttagatcccctcccccatcggcaactccaccgcgcgaactcccagaggcccgagagcctcccgcgttgaggaaaacgctatgtcc

SEQ ID NO: 37873 - DNA, 816 bp, Homo sapiens; identical to SEQ ID NO: 29488
  chr8:99985860-99986676
  hyper

SEQ ID NO: 37874 - DNA, 99 bp, Homo sapiens; identical to SEQ ID NO: 15295
  chr9:100263437-100263536
  hyper

SEQ ID NO: 37875 - DNA, 750 bp, Homo sapiens
  chr9:102586462-102587212
  hyper
cggcggggcgctgggctgggctggaggaaaggctgtgtgggtccctcccgcgaacgctgggcgctcgaggggaactccttcgttggggagaggcggtccccgcccacccgagttctgaggcctcctctcagagaacgactccgcttgaaaggccctcagggaatgcgggacgggaatgcgggcacccactgaaggggcgggtgggggattgctggagacccccattgaagatgcggggagacgggaagcacgtgctacagccgtgggaagatccgcttctacccgcgctacatcgagcgcaagctttccgtccgagcagctccagctggggctgggggtggcaagggaatcccccatttcctggtcgtcgagggtttcctggacctgggagccccgagtccctttctctcttcctgcaggcaagccccgggctcaggggcgccaggagatgaccctcgtggccccgcgcacctcggaggtttttggtttggtttgatttggggtttttcggtccctgttcccactcttcgagctgcgcccaccccgggcaaagggggcgctataggccggagtttgggcacccagttccttccctgaggcctgctgagctgcgctttcagctacaaagtttcgctgaggctgtgggctgagacgctggtcccggagctgcgctcggcgccctcaggaatgtgcccccgctaggccgctgggtggccaggagcctccaagccgcccaccctcgaagacacc

SEQ ID NO: 37876 - DNA, 950 bp, Homo sapiens
  chr9:110249882-110250832
  hyper
cgccaccaccaccgggtggctgccgtcagggctgcctttgctgacgctgatgaccgacgggctgccgtactcgctgccaggggcgctcagcgacgccttcagcacgaacttgcccatcagcccgccacctggcggctgcggctgctgcggcggaatgtacaccgggtccaattctggccgcaggagctcggccacgaagccgcccgaggggctcacgtcgttgatgtccgccaggttgaagggagccgtcggagggggagcggactccctgccatagaggaggcctccgcccgtgccgcccggcgccacgcccgggtcgttcccggcccggatcggataggtgaagctgcaggtggagggcgcgctggcagggccgctgctcgacggcgacgacgaagaggaggctgacgctgacgaggacacggtggcggccactgactccggaggatgggtcagcgaattggagagaataaagtccaggtccaggagatcgttgaactcctcggtctctctccgaggtaggggcgccaggttgctaccgccgcaagccgcaccggctccgccgctctccaggtctgtggccacggtcgccgccgccaggtcataggggcggccgggaagcactgggggaagtcgcttcatgtgggagagctcctcccgccagcgctgcggggacagggcgggagagacctgtcagtggtggtcccctgttgccacccgacatactgacgtgctggcgggccacgcgcgactgcaccgcccagacatggggactggtcaggcaggaagcacccgggaacccagggcgccagcgctgcaatctcggcccactcccgggtcgaagaagaggtgatgcgtctgtattgcgggtgttatgtcctgtctgcccaattgcgtgtgagcgagcgccgcggctggtccctccccctccaggtcccgtggacgtcccc

SEQ ID NO: 37877 - DNA, 1359 bp, Homo sapiens
  chr9:112081274-112082633
  binary
cgggaaggcctatatacttccttggaagtccgggtatgttatttcttcccttgacatcctcgagatgatctgtaacattcatctaaagctcaattaccgctgtgtcctcagtcacacccagaaattcccgaaggcaccgtctgccgcagcgccgggtgcacagtgggcgcccgattaatgtgtggtttgatttgatctgatctggccccttcagccaggaagactcactggtaactggacgccctgcagcggaccgcagcgccggcccagctctcagctggcgcggggcgggggtgcaaccacctgtgggcgggtgcccgggacgcaggcccaggcgccgccgccctgaggtgccccgccgaccccacgcacggtgcccaagggagaaagtcaggcgcgcctggccccccgggcaccccggggtcgactcccagcgccccagcaaagggctctgccggtgcaaggcaggcaggtctgagacagccgactctagagttagctcccaagtcaccctacccgctgcgaggaggctgcggggcagatggggctcagggaatgggaatggggtgtatccagaagggatcagcagagagcagaaatggtctaacccccgcctcccaaacttggggcgcctgccgagcagcaagcgaggggatctcctctctgctgtctcatcaaggcctgatggcgagtttgaggggggacaagctggacaccccaggacggcctcacattgatttgagattttctacccaataacccagtatcaggaagacccctgctggaagctagggacggaaggggagcgccggccacccacaccagggggggcggggtctcgggacttggggaccgtgtgtactggggagggggcgaggccccaaggactaggtgggcgccagagaaatcgcaaccccgcggcgcaatgtgccaaggagggggcacgggccaaaggtggggccccggaagagaccgggacggggtggcccaagaagaaaaagggttgaggagtgctcggagaagaggatgggggaggggatccccagggaggtgcaagggaagcgcccccgatgcaagcactgggggagggggagctgcctccaggggcgcgaggtgccagtgccccagactggccccgtcactcaccggcaggtccacgctcacttcggtcccgtcgagcaggaagacgcggcagtagagggtggccttggcggcgccggcggcggagatgtgcacggccgcgccgccggtgagcaggggcccgccgcccgccgggaacacgctgcccccgggcgcggcgggcagcgccgaggaggaggcggcggcggccgggcccccccgtggccccccatcgcgctc

SEQ ID NO: 37878 - DNA, 178 bp, Homo sapiens; identical to SEQ ID NO: 19982
  chr9:113017465-113017643
  binary

SEQ ID NO: 37879 - DNA, 106 bp, Homo sapiens; identical to SEQ ID NO: 19983
  chr9:116299412-116299518
  hypo

SEQ ID NO: 37880 - DNA, 430 bp, Homo sapiens; identical to SEQ ID NO: 36062
  chr9:116918462-116918892
  hyper

SEQ ID NO: 37881 - DNA, 268 bp, Homo sapiens; identical to SEQ ID NO: 19985
  chr9:124857529-124857797
  hyper

SEQ ID NO: 37882 - DNA, 188 bp, Homo sapiens; identical to SEQ ID NO: 32312
  chr9:126760274-126760462
  hyper

SEQ ID NO: 37883 - DNA, 968 bp, Homo sapiens; identical to SEQ ID NO: 35179
  chr9:126771200-126772168
  binary

SEQ ID NO: 37884 - DNA, 242 bp, Homo sapiens
  chr9:126782430-126782672
  hyper
cgttagtttccacatctctaaaatgggaatagtcatagccacctctctgagaggtaatgatgtacagtgacatttgtaaagccaaacacacaccataggtgtctactacatgtttatttctgcctcggacttccttccccgtccactctgccgctctctgtggactgccgcagatctctgaacttccccgagcctaatttgctccacttgttcacggagaaacaatcatcttacagggtagc

SEQ ID NO: 37885 - DNA, 262 bp, Homo sapiens
  chr9:126783310-126783572
  hyper
cgagtgtggatttggcatggggggcgggtcaggaagttcacccaccggctctgtgtctcctccctagcgctaagctgcaacgaaaacgacgcagagcacctggaccgtgaccagccatacccgagcagccagaagaccaagcgcatgcgcacgtccttcaagcaccaccagcttcggaccatgaagtcttactttgccattaaccacaaccccgacgccaaggacttgaagcagctcgcgcaaaagacgggcctcaccaagc

SEQ ID NO: 37886 - DNA, 198 bp, Homo sapiens
  chr9:129381068-129381266
  hyper
cggaaggggggagggtcggtgggagagtccaaaaatctgtcacaaaatggagtctaatcgcttgtaagacagctcccaggtttggcgacccgagacccgctggggtgcaagcgggcgcctttgtgcacggcgagacgcggggttccggcccgggccgcgctcctacctcggcggcggggccgcggcgtccttccgccc

SEQ ID NO: 37887 - DNA, 836 bp, Homo sapiens; identical to SEQ ID NO: 33142
  chr9:130689378-130690214
  hyper

SEQ ID NO: 37888 - DNA, 498 bp, Homo sapiens; identical to SEQ ID NO: 33986
  chr9:132402759-132403257
  hypo

SEQ ID NO: 37889 - DNA, 644 bp, Homo sapiens; identical to SEQ ID NO: 19991
  chr9:132647794-132648438
  hyper

SEQ ID NO: 37890 - DNA, 644 bp, Homo sapiens
  chr9:133308607-133309251
  binary
cgggagaaggacgggcagcgcgtgggcggaactgcaggggctggcagggaggtctgagttacgcggatgggccacgctccgaccgcacccccgagtccgcctgtccgtgtgtctgtgccgcccgcaggacgtgcttccggcgctgctcgcaggactgcggcacgggcggcccctctacgctgcagtaccggctgctgccgctgcccctgggcgtgcgcgcccaccacgacgtggcccgcctcaccgccttctccgaggtcggcgtccccgccaaccgcaccgagctcagcatgctggagcccgacccccgcagccccttcgcgctgcgtccgctgcgcgcgggccttggcgcggtctacacccgtcgcgcgctcacccgcgccggcctctaccggctcaccgtgcgtgctgcggcaccgcgccaccaaagcgtcttcgtcttgctcatcgccgtgtccccctacccctactaaacgggagagggcattggcggccgccctggcgtgacccccgaggaaggggtcgaggagaagcttggtccacgccacctgctgtggcaagcggagcgtcatcgtctcccgccccgtgcgtcagcgagaccttgggtcaacacgaccctgcgcacagccttgacccccgacagc

SEQ ID NO: 37891 - DNA, 1334 bp, Homo sapiens
  chr9:133541074-133542408
  hyper
cgaatggagccgaatgaatgcgatcactttaacagcgtgacaaattgcccgccgcgccgcaatggacaccgtttaacccccccctttcagccggcccgctcgccgggtattttcccaggtagcttagaggggaaccttgtaagacatggaggccgcccttgtgcgcctcgccgcttccagccctgccgcagatgcccgacaggggaaccctcggggagctgggggccgccgcggctcctccccgcccagagagatgacatcggggtttgtctgagcccgggcgccgccctccctggcaccccagggcctgggagcagagagggactcgggcgcgcccggggtcacacagcgagcgcagagcctggccagctgctgccggtgcttctttggcacctccaacacctgccagcccgaggtctgtccccagcgctgatcacggcccggctcctctgccagtgcccagagcctggacacacagtgggctcccggaagccgactaggcgaaagagtctccggttggccttcacctccttgcaggacctggcctcagtttccctgtgcataaaaccgctcgctgccgttggctcattaattcttaaacttatccggggcagaggatggaagaagttgcgaatgctttgagaattcgcggagagactaaaaacccacttctaaaaatgatccccaacgcaccactcgctttccagggcacggagggtctccaggttgcaaacagaggagaggtcgttgagcctccgcacatccgacttcctccacacccgggtggcttctctggatttggggccgacttgggtttggctggtctgggcaggaccgaagccggggtcccggcggggaaggaagggccgggcctcggctgcctcgggctctgaccggttttcctggccccgccgccgcagaagtgcagaagctgtccagcctggtgctgcctgcggaggtgatcatcgctcagagctccatccctggcgagggcctcggcatcttctccaagacgtggatcaaggcgggaaccgagatgggccccttcaccggccgcgtgatcgccccggagcacgtggacatctgcaagaacaacaacctcatgtgggaggtacgcgcgggctggggcagaggggcgcaagggccggcgaggggcgctggtcgcgggtaggactcgggcgtccggccgtcgccgcttccacccgggctgagagcggcggacactcctggcctggacgccccctgagccgggactctaagccgcccgagcctggagctcaccccgcctctaggctcctcccaacccgtgccgaaaatccgaccctccttccccc

SEQ ID NO: 37892 - DNA, 458 bp, Homo sapiens; identical to SEQ ID NO: 19995
  chr9:133760420-133760878
  hypo

SEQ ID NO: 37893 - DNA, 747 bp, Homo sapiens
  chr9:135286207-135286954
  binary
cgcacacgcccagtctaagtcgtggctgccagccctcccagggtaaaggccgcctctccggttccgctgcacgcctggggtacgtctatgcagcggtggctccgtgtctgtcctggaagcatcacgtcgaatgttcatttccgttcgatcatactaatttcttacccaaattacaaccctaagagaaaaaaagcataatctttggcctaggaggctccgcagacaagaatgagggagctgcggtttcgggctggatcactttcccttccattacacttccctcctccccacctttagcctcgcttcccgctgatgggaaaccaacactgctgtggcggccacaccttcccgggggccactggagaagtcaggctgaggcttgggggtcagggagcaagcctcgaggcgaatttatcttgcgccgctggagggcagtgcgcctttaaaaatgcgccccgcgtcccaggtgcgggagtggaaggcgcaggtggtaaccgtggattcaacaacaattatttgtgtgaccgccaggcgctgagtagagcccagaggtggtggtggcggtttgtttttgttttggggaaaagggaacccgtgctagaattaactgagttaattggctcctggcaaaacattgactccctcctcttgccttccctaaactcggtcctgagaggaggaaggatactgcctaggcgcaggctgcacctgggggaggctggcttcccacactcgtgcctttccatc

SEQ ID NO: 37894 - DNA, 246 bp, Homo sapiens; identical to SEQ ID NO: 24717
  chr9:139000411-139000657
  hypo

SEQ ID NO: 37895 - DNA, 133 bp, Homo sapiens; identical to SEQ ID NO: 19997
  chr9:139703274-139703407
  hyper

SEQ ID NO: 37896 - DNA, 520 bp, Homo sapiens; identical to SEQ ID NO: 15307
  chr9:139948370-139948890
  binary

SEQ ID NO: 37897 - DNA, 1517 bp, Homo sapiens
  chr9:140107124-140108641
  hypo
cgagaccagcttccagggtcggcccctgcgcgcctcagggccctcgcagtggtactggcttctccacaacgctccctggtgggcaccccaggcttcacgctgcggggagggcacagaggggagcaggcagggtggcaaagggctgggctccagccacgctgacgtcacacaggcctacctggcgccggtccccacttttacaaaaaggcgtgctgtgaagtgttgacgactttgagcctggaggaggaccccgtatgctcctgccaccccagaggccacctctgccttttctcctgggcattttcacagtgctcctctgcaccctaagcaaggagtggcatgttcagtgtgcaaatggcatctttagaccccacaacggtgaaaaccccgactgtccacgtagggcccaggtccgctgagcaccgagcatcaaaagccgtttgcatagccaggtgtcagtcatttcagatgaaaaagaacgggaagatcggagacagctccccccggttctgccgggaggttttgttccgtgcgtgacgtaggtccgtgcatgacgttgtttcctgcgtgacgttgttctgtgtgggacacagtgttcgttcaagagagggagggaggccgctgccgacagcgttcccagggaggagcgtgacccagagccagtcatgcctcggaaccagagtgagaagagaaactgacccccgggaagatgcctggctctctccccagcacagagtttctcagctgaggagtgacccacatcttggctgggggcctggaggcctcagctgcctcaagtccctgcccagggatgagggcccatcagtgggacgaggccgcctgctcccacccacacaggctcattctctgcgagcagaggacctgctgcttggcaccctggcagctgccctggtctcggcagcccctggcgtgtggaggccctgccccctcctagggtgcggccagcgtggagtgtgttttccacccgagggaggccctccccaggctccactcttcgcccgggctccactctcccgggttccactctgcctgggcaccactctccgcccgggctccagcccaggaccagcctcactgtctccacaggttcaacttcgtggccaagaagctgcaccgacggctactgcagcttgggggcagcgccctcctgcccgtgtgcctgggcgatgaccagcatgagctggggtgagtctgcgggcgtggtacccgcctccacagtctggtctggccacacgcagggtccgctcaggccagcgcacgtgctccctcccaggcccgacgctgctgtggacccctggctgcgagacttgtgggacagggttctggggctgtacccgccgcctccgggcctcactgagatccctcccggagtcccgtgagtgtgggccccgggtcacccacaggcgcagcagacccaacctggcctggggacctcgccctgggtccctcccgtgtgggtgggcggcccctggggagtgggtcctggtctgaccagc

SEQ ID NO: 37898 - DNA, 799 bp, Homo sapiens
  chr9:140332500-140333299
  hypo
cgtgtgggaggagcccgcatcaaacacgatcccaaactggggagacagtgggatgagtgggaggcaacacctgtggacccggcccggcctcccctgccggcggggacgcaccttgatgtctgtgggcaggagcacgctggtggcctccaccaggaggagaatgagtgccgtgaggcctgagacccccgaggcccccagcagggccaagaagacctgctccttccgggacagccccatggtgcaggtggtactggttcctgtggggggacggccgtgggcacccaggctgcacttggtgtccccatcccgccctccagaggcagaggcttcgctccccgtctccctggagacgcacccctggacagccacttgccttagaggcatctccggggctcagacgcctcccgtggccatagaggcatccccggggctcagacggtctcccgtggccttagaggcatctccggggctcaggcggcctcccgtggccatagaggcatctccggggctcagacggcctcccgtggccatagaggcatccccggggctcagacggcctcccgtggccatagaggcatccccggggctcagacggtctcccgtggccatagaggcatccccggggctcagacgcctcccgtggccaaggaccactccccaggagccacgcctgccaggggtgccatgggcatcagagggccctgtgggaggggggcggggggcagcagaggcctcgtctggggacacagccccagcaggatccaagtagccccctcggaccccctcggatgggactcgc

SEQ ID NO: 37899 - DNA, 224 bp, Homo sapiens; identical to SEQ ID NO: 6320
  chr9:16133902-16134126
  hyper

SEQ ID NO: 37900 - DNA, 155 bp, Homo sapiens; identical to SEQ ID NO: 29522
  chr9:16154671-16154826
  hyper

SEQ ID NO: 37901 - DNA, 553 bp, Homo sapiens; identical to SEQ ID NO: 30691
  chr9:21968174-21968727
  hyper

SEQ ID NO: 37902 - DNA, 194 bp, Homo sapiens; identical to SEQ ID NO: 20004
  chr9:34379701-34379895
  hyper

SEQ ID NO: 37903 - DNA, 496 bp, Homo sapiens
  chr9:34591191-34591687
  binary
cggccagctaggacttcaggacacacagcaaactagctgcgccccgctgagggtcagcgcacagccgcccacacaaggtgtcctctccccgggctctctgggccgccggcctcctgcttcccgtgccgcagaccgggattagactgtggacgcggggaaggaagggggcgttgcgacgggatcttgaggggagcaggacttgcccctgcccctgcggcgaagctctaggccctggcaaggttcggtacaccgggggccgctcctccccagggggctgaccggcctcggcgctctaatccggccggggaggggcggacggggtgaaaattggcgagtggtttggggaacggacttgacctccagatgccctggtgtccctggctcagcctctttctgccaggttgggagcagtcgggaattctgtcccggtccaacgtccccctcggcccccggggacgcagaggctgctgtcggcagagcagcagtccacggctgc

SEQ ID NO: 37904 - DNA, 894 bp, Homo sapiens; identical to SEQ ID NO: 6325
  chr9:35756575-35757469
  hyper

SEQ ID NO: 37905 - DNA, 551 bp, Homo sapiens
  chr9:71735700-71736251
  hyper
cgccctcacctattgtccgggtggaggaaccggtatttccggatgggggcctcagacccagtgatcccggctaagggtgaggctggcgggggaggggaacggaagcgggtcgtaaaagttaactttacactaaaatcattaacttttctcacaccccccaataaaagcagtcacctcccccccccaagagccccccacgcacccacagtggcccacaaccatgcttcccgggggctttgaagggtagaggagctgacatcctccttgcccagaccctggaaaggattaggaagcggacctgggcacgaatagagaaagaagcccagcaaattcctcttgcaccagctctgggaggaagctcagctgcagttctacgtagaagaaaagaggcggcaaagtaggcgcgcgggctccagtgacaaaggtctcccaggcagccgcggcccctgccccaccgctgagtggcgtgcgtgcaggcccaccctctccgcctttcccgacaccccaaagtagcgctgcgagcagctgcgtctccctcccggggctcgcgc

SEQ ID NO: 37906 - DNA, 247 bp, Homo sapiens; identical to SEQ ID NO: 20010
  chr9:79319779-79320026
  hyper

SEQ ID NO: 37907 - DNA, 512 bp, Homo sapiens; identical to SEQ ID NO: 23404
  chr9:79626891-79627403
  hyper

SEQ ID NO: 37908 - DNA, 1428 bp, Homo sapiens
  chr9:79630544-79631972
  binary
cgcagaagccgtgggaaggcctggcctagatccagcccaaggagcgcgtgagaccctccaggggctgggggcatggaggagaaagaatgaataaataaccgctcctaaagttccacatctttttttactcccctccatagagccaattaaacgcaataaaagcttgcatggaacccctcttcctagcatagcgtcgccaacaattgcctaaggggtaaaccaaatacgcctgagataattacactaagcccggggcaatgatttgcctgccagcgtcctgagcgccagccaatatttggatagtgcagtagttgtttaaaaacaacaaaaaaaaattactcgcggaaacttgaaaccgactggttggtgccagggtggttacacgatctgtttttcttgagagggggtctgcaggcagctggagcgcgcgcgttccggcccccgccggtgccactgagcgcctgcaaaacttgtcggaattaacctccggggaagtaggggaagaggagagcgcgcccccctccccaccgcggccccagctctgcaccccggcccagtgccgcgcttggaatcccccaggatcctccgcggcggccgcagcccgccactctccaaaacagacacgcgacccgagctccctgtctgcgctctaggcagcaattgcggcctgggccgccgcgtccggctgtggcctaggtggtgggaagtactttctaccctcgccaagcacaacctgaatgcggaagcgtgaggctcggggcgcttcgctcagcctccgagactgttttgtcccaggttgcgtggaacctggctcgccgaggccgaagacactggccaagcccctggcgtcccctggcgctgaacctgaggttgtggcggcgggtctgcgggctgtagcgagctcacccagtgagggcctggctcattttttgtgctcagggttcgcgttatgcgcccaagatttgtcccgggagtccctgaagggcccctcccctcgatcggttcccaggagccgcaagtgcccaacgggcacggtcccagagctgctccccaaaaggagactctgctgttccagcaacccgcggaagggatgctatccgaggtatcaacaaaagatccctttgctcgagctgcgtgtggggtcgaagtccggagagcccttaagtgtgcggcacgcagagctcctcagcagcggcctgacagcggtgcaggagaccccagcttcctgggctgggacagggctgttgtctcacggtcttgttccaaggaaaaggagccacctggctccagcaggctcttgtcaaactgtgagcgtccttggaattctgtggcttcccgaggccaagaggctgtccgctgctcggctctctcaagtgtctcagcggacaaaaatcgcgcagaaactcctatggcaggaggaaagcttcc

SEQ ID NO: 37909 - DNA, 334 bp, Homo sapiens; identical to SEQ ID NO: 23405
  chr9:79636205-79636539
  hyper

SEQ ID NO: 37910 - DNA, 600 bp, Homo sapiens; identical to SEQ ID NO: 27350
  chr9:79637630-79638230
  hyper

SEQ ID NO: 37911 - DNA, 218 bp, Homo sapiens; identical to SEQ ID NO: 20012
  chr9:88355794-88356012
  binary

SEQ ID NO: 37912 - DNA, 515 bp, Homo sapiens
  chr9:89517563-89518078
  hyper
cgtgaatgcggcccttccccaccacacacaggctctctcccaccccctgccagctatccctgctctgacctccccgggcctccctaaggggacgatgccccttcctccgcaagtggcagtcctgcagcccgggccctctttcctcttcccccggcctctgcgggggcgcgcgggctgggaaagggacgaaatggaaaaaccgtcccctccagcaccctcacctccaccgccaccctcacctccaccgccgccgagcccggggtcaaagctgccccatctcacagggccttcccagcgcgcggcaccaagacccccatttctatgcaccctggaaagggtgattaatttaaagtgagtggagtctgtttctttaagacaagctcataaatcgtgaaagatcaccacttcttttcaaaagcctctccacggtctgagtctcccttctgggtcagtaaagtcattgaagctttaacggcatgccatggcagattacacgatacagctgtcccggcacc

SEQ ID NO: 37913 - DNA, 875 bp, Homo sapiens; identical to SEQ ID NO: 22976
  chr9:93955774-93956649
  binary

SEQ ID NO: 37914 - DNA, 895 bp, Homo sapiens
  chr9:98784033-98784928
  hyper
cgtgggaaaccgagggcgggagggcgggagggcggaggcgccggcagggtcggcgggactggggctcggacggaggacaggggcgaggaggaggcaggaaggacgccgggtactgcggggcgcctagggggttccgagcgcagcggctgcggggccgacccgcccaggatggaatcagggccccggcgcccccacgccgctcctccaggccgaacccctgcggccccaatcccccggcctcacgcccaccccgcaggtcggccctgcagctgccttcccttcctccacctccctcccgcctccgaagccggcgcccccggccaagtggccgctctcaacctgttaccaagtcctagagagaatttctccaaaatatttcctggatccccctgccaagggccctgtcccgcccttccagctcccaactggatgcctgcagacctctccccgggttccgaggctctggcctcctccctccctaatccattttccacaccgcttccccgggagcccgttaaaatacaccgggaccgcggcgggtgcaagcctcctgtatctccacatagcaggctaaggggaattgggtagggaataaaggctgcaggggacatcggctggcaggtatgaagcccgtattgtgtgtcgtttgttaaacacttccagtggattttctcgtttaatctgcccaacaacgcttctgggccggtattcgtattgttttatagagggagaaactgaggcacagaggggcactcggcttgtaagcaacggagtaattcagagcccgtcagccccacgccgagtttattcaccctggcaggggcttccgcgggagccatgacccttcctaactggggtggaaggacccgcagcgccagccgggtccgggccagac

SEQ ID NO: 37915 - DNA, 178 bp, Homo sapiens; identical to SEQ ID NO: 15315
  chr9:99637706-99637884
  hyper

SEQ ID NO: 37916 - DNA, 316 bp, Homo sapiens; identical to SEQ ID NO: 15316
  chr9:99638097-99638413
  hyper

SEQ ID NO: 37917 - DNA, 678 bp, Homo sapiens; identical to SEQ ID NO: 25998
  chrX:15755988-15756666
  hyper

SEQ ID NO: 37918 - DNA, 622 bp, Homo sapiens; identical to SEQ ID NO: 15317
  chrX:2815904-2816526
  hyper

SEQ ID NO: 37919 - DNA, 281 bp, Homo sapiens; identical to SEQ ID NO: 20023
  chrX:40033593-40033874
  hyper

SEQ ID NO: 37920 - DNA, 81 bp, Homo sapiens; identical to SEQ ID NO: 20024
  chr1:10591549-10591630
  hypo

SEQ ID NO: 37921 - DNA, 350 bp, Homo sapiens; identical to SEQ ID NO: 20025
  chr1:10676484-10676834
  hypo

SEQ ID NO: 37922 - DNA, 378 bp, Homo sapiens; identical to SEQ ID NO: 20026
  chr1:10680904-10681282
  hypo

SEQ ID NO: 37923 - DNA, 1313 bp, Homo sapiens; identical to SEQ ID NO: 20027
  chr1:10719300-10720613
  hypo

SEQ ID NO: 37924 - DNA, 815 bp, Homo sapiens
  chr1:10854232-10855047
  binary
cgtgtgtgtgtgtgtgtgtgtgtgcgcgcgcgcgcgcgtcgtgggttgggcggggggacaccaagattatccggcgatctgttttccagtcccctcgtgcgctctcaccgcgcgcctgtaccagctcggagacgtcctaaatttactaactttgccccgcgactaccagggccttttccccctcgccaccccctgagtgtaccgggtgtcggcgggacaactacgcacaatgagggccgcacccccacactccactcggtcagaaacgcacactccgccccgtggcccagtgatccaggtttgggggagctccatactcaggagaggcgctactgccgcttttccggtgggcacgcacccgcacccgcaccgtagccagcgtggctggaaggaggtcctcgccgcgcccagagccggctttccaagctgaagctggggcagaggaacttgtgtggaggaagagggggtcccctgcctccctcagcgctccactagcctcccccaactccggacccgggtcggggatgacttggaagaagaatctgcgcccaccccttagagaaaaatctattattattatcttaatctacgcccccaaagtgtccctccagccgtgattgacggcgcatacacctgttcccttcgcggaggagcttccagcgccggggacagacattcgcccaaacgctccgcagcggcccagcaaccgcccgcccgcccgcgcccggccagcccccgccagcggccccagcgcgcctctgcccgcacctcgccaccccggcggccgccccctccccttccagacccggctgccc

SEQ ID NO: 37925 - DNA, 115 bp, Homo sapiens; identical to SEQ ID NO: 20030
  chr1:110305380-110305495
  hypo

SEQ ID NO: 37926 - DNA, 200 bp, Homo sapiens; identical to SEQ ID NO: 20031
  chr1:117630364-117630564
  hypo

SEQ ID NO: 37927 - DNA, 217 bp, Homo sapiens; identical to SEQ ID NO: 20032
  chr1:11856166-11856383
  hypo

SEQ ID NO: 37928 - DNA, 174 bp, Homo sapiens; identical to SEQ ID NO: 33167
  chr1:12460147-12460321
  hypo

SEQ ID NO: 37929 - DNA, 174 bp, Homo sapiens; identical to SEQ ID NO: 20034
  chr1:12573235-12573409
  hypo

SEQ ID NO: 37930 - DNA, 183 bp, Homo sapiens; identical to SEQ ID NO: 20035
  chr1:1491949-1492132
  hypo

SEQ ID NO: 37931 - DNA, 140 bp, Homo sapiens; identical to SEQ ID NO: 20036
  chr1:1492373-1492513
  hypo

SEQ ID NO: 37932 - DNA, 49 bp, Homo sapiens; identical to SEQ ID NO: 20037
  chr1:150935078-150935127
  hypo

SEQ ID NO: 37933 - DNA, 71 bp, Homo sapiens; identical to SEQ ID NO: 24763
  chr1:153937085-153937156
  hypo

SEQ ID NO: 37934 - DNA, 223 bp, Homo sapiens; identical to SEQ ID NO: 20038
  chr1:154931252-154931475
  hypo

SEQ ID NO: 37935 - DNA, 145 bp, Homo sapiens; identical to SEQ ID NO: 20039
  chr1:157678824-157678969
  hypo

SEQ ID NO: 37936 - DNA, 187 bp, Homo sapiens
  chr1:16058899-16059086
  hypo
cggatgaccgcctctttacgtgccatgaggattgccagaccagcttcttccgctctttgggcacagccaagctgggcgacatcagcgccgtctccaccgagccgggcaaggagtactgcgtcttggtgagctttgagtgggggcggggctgcaaggcctgcagaaggaaagctctggctgctcaccc

SEQ ID NO: 37937 - DNA, 200 bp, Homo sapiens; identical to SEQ ID NO: 20041
  chr1:167486836-167487036
  hypo

SEQ ID NO: 37938 - DNA, 80 bp, Homo sapiens; identical to SEQ ID NO: 20042
  chr1:1717283-1717363
  hypo

SEQ ID NO: 37939 - DNA, 781 bp, Homo sapiens
  chr1:171810997-171811778
  binary
cgaccccgctgcgggccgttggaacgtggacgggcagcgggagccagagggtggatggaccaggcgctgcggtggaatggggggcagagtggaatggggggcagagtggcggtgtccgtggggcgggcggggtcctccagctctgggcatcctccgtcccctgccaccccccgcctggtggccctcctgcctgcctttcatcgtgcgatacaaagccatttcctccctgtcctccagtcggggagtcgggggaggggtccgccccgggctcgacccccaccccctcggtgcgcgccagccccgggcagcctccctgcgtagcgcgccgaaagcttcccagtgcccctctcctgttttcccagctcaacacccccctccttttcctgtcgccctccgtgaggctccctgtgaggctgtggggctttatcccccgagccccctcccttaggtggagatgctttccttctcgccagggttctcgttcctctcagctgtctactgttgcctgcctctagctggggaggcggggtgcgaggagaaagacgtcgtttgttgtggtgaagctttatccagagacgcttccccaccattctcctcccggagagtcgaagaataaaaggtggtgtgtttgcgtgtgcacctattcacagcttcaggcaattgtgagagagcccgaggcacagacttggcagggggtggacgtggacttatgttgtccaggtgccatgtcattcctgcatcatctcggaactgaccagcatctttctcgcactctctctgc

SEQ ID NO: 37940 - DNA, 108 bp, Homo sapiens; identical to SEQ ID NO: 20044
  chr1:173683937-173684045
  hyper

SEQ ID NO: 37941 - DNA, 75 bp, Homo sapiens; identical to SEQ ID NO: 20045
  chr1:180892057-180892132
  hypo

SEQ ID NO: 37942 - DNA, 388 bp, Homo sapiens; identical to SEQ ID NO: 15342
  chr1:193149436-193149824
  hypo

SEQ ID NO: 37943 - DNA, 120 bp, Homo sapiens; identical to SEQ ID NO: 20047
  chr1:19720405-19720525
  hypo

SEQ ID NO: 37944 - DNA, 311 bp, Homo sapiens; identical to SEQ ID NO: 33189
  chr1:214637813-214638124
  hypo

SEQ ID NO: 37945 - DNA, 989 bp, Homo sapiens
  chr1:221052155-221053144
  binary
cgcttcccggaggatctcctgggaggcacgaggcggacgcggtgctgagttgggccgggactcagggcggcaacatttgggcaagggcccaggaaagatgaggggctttgccgaggacacggactcctggaataaaagcagaatgaggtcaagagaagggaagcaaaggggccaaagcgcgctccgctctccaccgggaggcgggctttgcagagccctaaagagtgagattaccgtcccttccccacgcccccaactcgccccgggtgacaagcgcttcaggaaagctcctgtgatcaaccctccttgccccgtggcggttcggagctgcagaagttagaagagagtcagagccctccggagcggctgcctggcccctacgcagagtagcaagaagcactgcgatgtgcgctactaagcccacgcggccgcagcaaaaactttggcgtggccggggcgtggctagggtccggccaggcccccttgttcctaattcccctccactccccgctcccattggtcacgaggatgaccaatgagcgctcggatcgaggtcctaccccgggcctgactcgaaagctcctgccaaaactttgggagtttttagagacgagtttttttttttttctattacttttccccccccctaactaacggactattattgttgttgttttaaatttagctcttagggcttagctatttgggttttcttgcggtgtccggctcccgtctccctggctcccccgcccgccctgcggccccagcgcccctcgctctcatccagcccgcgaggagtgcgggcgccgcgccgcctttaaagcgaggccagggagcgaggcggtgaccggccgagatccggccctcgcctcctccctcggtggcgctagggctcccggcctctcttcctcagtgcgggcggagaagcgaaagcggatcgtcctcggctgccgccgccttctccgggactcgcgcgcccctccccgcgc

SEQ ID NO: 37946 - DNA, 175 bp, Homo sapiens
  chr1:225632716-225632891
  hyper
cgttgcagaccaggcacgtgagcaggaagtgggcagggcttaaaacacagagaagtcataacctctgcggtttggttcatgttgtaatatgaaaaccaggaagcttatcttgcaggaggctgatgtgtaaaagttcagaatggagtggagccctccctcttggcaccctatgcgc

SEQ ID NO: 37947 - DNA, 282 bp, Homo sapiens
  chr1:226077130-226077412
  hypo
cgttctctgcaagaggctcagttcccccagctgctggtaagtggacctagagtcttgttccttgctgcaaccaaacaactgacaggaaccagaatggctcaggcaacgccagggctctaagggccaatccagtctgcagggatgagcatccgggcccgtgctcagagggtcccggggcctcatgagatcctgagctggtggtccccagttgtgaaaccagatttcccactgttctggggggaccttcctaggcaagggagcctaggagcatttagttccaac

SEQ ID NO: 37948 - DNA, 203 bp, Homo sapiens; identical to SEQ ID NO: 7694
  chr1:228361379-228361582
  hypo

SEQ ID NO: 37949 - DNA, 262 bp, Homo sapiens; identical to SEQ ID NO: 15354
  chr1:230266303-230266565
  hypo

SEQ ID NO: 37950 - DNA, 85 bp, Homo sapiens; identical to SEQ ID NO: 20053
  chr1:230272610-230272695
  hypo

SEQ ID NO: 37951 - DNA, 190 bp, Homo sapiens; identical to SEQ ID NO: 20054
  chr1:230529556-230529746
  hypo

SEQ ID NO: 37952 - DNA, 184 bp, Homo sapiens; identical to SEQ ID NO: 20055
  chr1:231037680-231037864
  hypo

SEQ ID NO: 37953 - DNA, 304 bp, Homo sapiens; identical to SEQ ID NO: 28340
  chr1:2331316-2331620
  hypo

SEQ ID NO: 37954 - DNA, 520 bp, Homo sapiens
  chr1:234844970-234845490
  hypo
cgttgggacgtgaactggtgacgtgcctggagctaagatggctctggccctgtgtggagaatgggttgaaggaacacagacgcagcagcagaaccggtgagttttgcctcagggaaattcacattcaaggggacaatcatctcagtctgaagggtacccgggagtttgacaggtgaagagacctctttcaggcagagggaacaaaataagccacagtaagtatgcttggacctgcatagaagtagaaggaagatgaggggtgactgaaaggaagagcagtcaaagatgaggcggggaagcaagccgactgggtgtcaggagcaggctcagggacttgggcttggccggtgagcagtcaaggtgcacagagctgttcctgggtagcgcctctcatggtgccgctgactccaccggggtgaccgctgtgcccggggctgctggtcaggatgcaaaagcactttagagtgaaggtcacctcaggcaacaggcaaaacagacggggctgaagtgagcgcctttc

SEQ ID NO: 37955 - DNA, 120 bp, Homo sapiens; identical to SEQ ID NO: 20059
  chr1:243479828-243479948
  hypo

SEQ ID NO: 37956 - DNA, 650 bp, Homo sapiens; identical to SEQ ID NO: 20060
  chr1:243637544-243638194
  hypo

SEQ ID NO: 37957 - DNA, 764 bp, Homo sapiens; identical to SEQ ID NO: 20061
  chr1:246310723-246311487
  hypo

SEQ ID NO: 37958 - DNA, 214 bp, Homo sapiens
  chr1:2537671-2537885
  hypo
cggcgcggctcgtacgtagatgatgtgccggctggagttctggtcgtcgttccagatgaagaggtcgatgaggacgcgcctgttgaactgtgagttcatcagcgccagctgccgctccagctcccactcgagtcctggggagacagtgccccgcactggagactggcgggccctggggccccagcccggccccttgtcggtgaatctggcctcc

SEQ ID NO: 37959 - DNA, 211 bp, Homo sapiens; identical to SEQ ID NO: 37022
  chr1:29462398-29462609
  hypo

SEQ ID NO: 37960 - DNA, 473 bp, Homo sapiens; identical to SEQ ID NO: 15373
  chr1:3195292-3195765
  hypo

SEQ ID NO: 37961 - DNA, 223 bp, Homo sapiens; identical to SEQ ID NO: 29627
  chr1:3277485-3277708
  hypo

SEQ ID NO: 37962 - DNA, 93 bp, Homo sapiens; identical to SEQ ID NO: 20064
  chr1:40030094-40030187
  hypo

SEQ ID NO: 37963 - DNA, 306 bp, Homo sapiens; identical to SEQ ID NO: 30823
  chr1:41485949-41486255
  hypo

SEQ ID NO: 37964 - DNA, 160 bp, Homo sapiens; identical to SEQ ID NO: 30825
  chr1:43842627-43842787
  hypo

SEQ ID NO: 37965 - DNA, 267 bp, Homo sapiens; identical to SEQ ID NO: 20068
  chr1:46500322-46500589
  hypo

SEQ ID NO: 37966 - DNA, 1370 bp, Homo sapiens
  chr1:50888222-50889592
  hyper
cgcagtctggagtagtagtcggggcggaagacgtatcctgcgaaaagttaggcatttcgggagggggatctttctcgaagaccacctcacactgccctcccctcccctccgggtttagggacagagtcgtcagacacgccctccccgtcttggggtcccaggggacccctctcgagcgcaggctcctgcgttctgatctcagagttggggtcctaggacacggatggcccagcaggccgcaccaagccaggggagtcgccttcgcaactggccataaacggacaccagagtccctcccacgccgcagccccataaggcccaagcaggcccagctccccgcttctgccgcggtctcctctgcttcccgcgttccccgtccctgccagagcccgcgacagagtccttgtgtctccgtccgagagtcccagacctcctctctatgagcgttgcctcctctcccagacccttcgggcgtccctaaggcccacggggcccaggcctcctcaacaggggccgcagaccaggtctccacccactgctctccctgcggccctcaactacctgccttgggctccgggatcctcctcctccgctggcgctgcacgcgcctcccggctccactggcgacgctggagctcttggccgcttccctttgcccccggccccttatctgaccacgtcaccctccttcagtcaccatgtccgaacttccggacccctcagaacgcagcgcagtccaaccctcccttcagaaatccgggtcggaggctcgtctgcgggccgcgtggttggaacccgcgacctgactctcgccgtgccgggtcccctcgcggtgcgcgccggacgctgcgcgcagccggggcccagttgcccggcgctgccagactctcaatgagccgctcgcccgctctattgttggtccttagggctccattagacagaattggacaacaatgtggcgcctgccattggccaggggaggcagacggcgctctgattggccgggcccgcgcccggggagccccgcattctgcagtgtccgaaagattcgaaactccaaaagctccactgcgtgcctctgggaggggagggggcgcgccaggaaaggagtggaaaaaagtgggcgaggaggagcgttgaaaatttcctgacaagtagtttccgtgcgcccgagagcgtgtgaattgctcctaattaccgtgtccggtgcgcctctctgcgtagacttgtgtaacctctcggcttctggggcgccggctcggctgcaccgctcttactggcctggggcgcttggcaaagccgagcttcccaagtggctctggagccctgaggcgggatggggggcaggtgacaattcaattactgcggtc

SEQ ID NO: 37967 - DNA, 206 bp, Homo sapiens; identical to SEQ ID NO: 20069
  chr1:54474577-54474783
  hypo

SEQ ID NO: 37968 - DNA, 122 bp, Homo sapiens; identical to SEQ ID NO: 20070
  chr1:54694091-54694213
  hypo

SEQ ID NO: 37969 - DNA, 212 bp, Homo sapiens; identical to SEQ ID NO: 24864
  chr1:6046186-6046398
  hypo

SEQ ID NO: 37970 - DNA, 35 bp, Homo sapiens; identical to SEQ ID NO: 20072
  chr1:6707164-6707199
  hypo

SEQ ID NO: 37971 - DNA, 750 bp, Homo sapiens; identical to SEQ ID NO: 30857
  chr1:90308855-90309605
  binary

SEQ ID NO: 37972 - DNA, 134 bp, Homo sapiens; identical to SEQ ID NO: 20075
  chr1:90400255-90400389
  hypo

SEQ ID NO: 37973 - DNA, 37 bp, Homo sapiens; identical to SEQ ID NO: 20076
  chr1:94354617-94354654
  hypo

SEQ ID NO: 37974 - DNA, 953 bp, Homo sapiens; identical to SEQ ID NO: 35287
  chr10:106097237-106098190
  binary

SEQ ID NO: 37975 - DNA, 236 bp, Homo sapiens; identical to SEQ ID NO: 30884
  chr10:1120729-1120965
  hypo

SEQ ID NO: 37976 - DNA, 457 bp, Homo sapiens; identical to SEQ ID NO: 14499
  chr10:114135846-114136303
  hyper

SEQ ID NO: 37977 - DNA, 79 bp, Homo sapiens; identical to SEQ ID NO: 20081
  chr10:120601836-120601915
  hypo

SEQ ID NO: 37978 - DNA, 92 bp, Homo sapiens; identical to SEQ ID NO: 20082
  chr10:126775448-126775540
  hypo

SEQ ID NO: 37979 - DNA, 541 bp, Homo sapiens
  chr10:133920829-133921370
  hypo
cgccccgagggacacacgctccttgatggtcaacaggccaggcttgcgggctccccaggtgccggcaaggttccagggccggcgtctgagggctgcaacccagacccgctgggcaccctgcggggcatgtttagttgtacctggaggagaggatgtgctctcttggcacaacgtgcagaaggcaccggaggaaaggaatggagaagaagcctgtttgcctcagagctcctcatcctggacgccctcgccagagggttcatgttatggtttcctgcataagcgatctgagccctgcctcctcaagcgtaactgacagcatgctggatgcacaggcagcaactcccttttgccaagtgatcacagcgcctcttggagtcagttccacgtggaacagtgcagctggcacaagctcgtccatgttattcacatgccccaccgtggtgggcctgtcgacggcatccaggctgattcgattctcggctgatactgcagccctgtacctgggtcttggactacatgcaaaagaactcctgcaggagac

SEQ ID NO: 37980 - DNA, 230 bp, Homo sapiens; identical to SEQ ID NO: 30904
  chr10:134793882-134794112
  hypo

SEQ ID NO: 37981 - DNA, 66 bp, Homo sapiens; identical to SEQ ID NO: 20087
  chr10:134878532-134878598
  hypo

SEQ ID NO: 37982 - DNA, 193 bp, Homo sapiens; identical to SEQ ID NO: 20088
  chr10:15254646-15254839
  hypo

SEQ ID NO: 37983 - DNA, 80 bp, Homo sapiens; identical to SEQ ID NO: 20089
  chr10:16806491-16806571
  hypo

SEQ ID NO: 37984 - DNA, 273 bp, Homo sapiens; identical to SEQ ID NO: 20090
  chr10:28968999-28969272
  hyper

SEQ ID NO: 37985 - DNA, 111 bp, Homo sapiens; identical to SEQ ID NO: 20091
  chr10:29581547-29581658
  hypo

SEQ ID NO: 37986 - DNA, 188 bp, Homo sapiens; identical to SEQ ID NO: 20092
  chr10:3954899-3955087
  hypo

SEQ ID NO: 37987 - DNA, 168 bp, Homo sapiens; identical to SEQ ID NO: 20093
  chr10:422180-422348
  hypo

SEQ ID NO: 37988 - DNA, 269 bp, Homo sapiens; identical to SEQ ID NO: 20094
  chr10:44874128-44874397
  hypo

SEQ ID NO: 37989 - DNA, 153 bp, Homo sapiens; identical to SEQ ID NO: 20095
  chr10:69834338-69834491
  hyper

SEQ ID NO: 37990 - DNA, 238 bp, Homo sapiens; identical to SEQ ID NO: 15453
  chr10:73514960-73515198
  hypo

SEQ ID NO: 37991 - DNA, 73 bp, Homo sapiens; identical to SEQ ID NO: 20097
  chr10:76966489-76966562
  hypo

SEQ ID NO: 37992 - DNA, 499 bp, Homo sapiens; identical to SEQ ID NO: 18231
  chr10:79601557-79602056
  hypo

SEQ ID NO: 37993 - DNA, 120 bp, Homo sapiens; identical to SEQ ID NO: 20099
  chr10:88857177-88857297
  hypo

SEQ ID NO: 37994 - DNA, 239 bp, Homo sapiens; identical to SEQ ID NO: 20100
  chr10:91403644-91403883
  hyper

SEQ ID NO: 37995 - DNA, 314 bp, Homo sapiens; identical to SEQ ID NO: 20101
  chr10:94607767-94608081
  hyper

SEQ ID NO: 37996 - DNA, 32 bp, Homo sapiens; identical to SEQ ID NO: 20102
  chr10:98983004-98983036
  hypo

SEQ ID NO: 37997 - DNA, 158 bp, Homo sapiens; identical to SEQ ID NO: 20103
  chr11:108031546-108031704
  hypo

SEQ ID NO: 37998 - DNA, 275 bp, Homo sapiens
  chr11:1095394-1095669
  hypo
cgcagcatgtccgggcagctgaggccccaggcaccacttcctgctggtcgtctgagggccgaggcctccagcaacccttgggtgcagggtctgccgagccctccacattttcaccgtgccccgctgtgcctggcgaggtggctggctgcagtgaggtccgtggaagccacttcggcctccagcctcccggctcagcacccgcccctcctgagcgcagaccaccccatcctgtgccggtccccctgacgtcccttgcctcccgtccccaggagaac

SEQ ID NO: 37999 - DNA, 894 bp, Homo sapiens
  chr11:113345433-113346327
  hyper
cgagattgtggggagcggcctccctcccgccctccgatgccgcggctccgccgtgctgccctgggcgccccgcggggaggctgccccagctgcgcccgctcgtgctcggggagaggattcccttctaagtggcgaggaggctactgagaaggagggagaggggatagcagccgcgggctccagacgccctctgcccccgcccgacggggagcccatgcagagccggatcccaggcgggcgctcccgagcaggcggccaggagtggccgcacaaacttctggtcctggcctcgctccccttggaggtccctcctcctctccccgtgacactgagtcgcccgccgctccatccggccggtgcttaccttcaagccatagggcgcccgggggcagagacggcgccggctgcttgaggcttccagctcccgccgcatccacgcgcggccgcccctccggcagccgtccggggccgccactctcctcggccggtccctggctcccggccccgccgcgccgttcagagccccggcgggcagcagctcggccggctctggcccgcggggagcagtggacgggccgcggcggggcggggcggggcggggccgggcgcggggcgggcgggcaggagggagcgcggggacggggcggaggcggcgcggtgcgcgcgtgaggctgccggttcggcactgaagctggacagctctgcggcgcccgagcgcggggagcgcgggagggaggtgccccggtccccgcccctgagacaggccccgcccccgccccccaccaaaggagctgtacctcctcggcgatccccggcctgaacgggtaggaggggttgggggattccgccatcccttgttttgaggcgggaacgcaaccctcgaccgcccactgc

SEQ ID NO: 38000 - DNA, 506 bp, Homo sapiens
  chr11:113929613-113930119
  hyper
cgaccttggcctccagcaatcgcgacagctaaaaacgggtgtctcgcttcgacaatagatccccgcggaccttctggcacctggttcactagcgcccgcgaactctgcctcgggagacttattgaaatccggatgctcaagccgggaggcgcgcagtaaccaggaggatgagagggccgggtttgggctaggaaagcggccttttaaaacagatgtcagggggactgcagccccgagccatgagaaaaaagttaaaggcgagatgacacgcactgaattggggcaaacattggaagaggagacaaaactgcgtgcttgagcaccggggtgcggggagggggggacaaaacccgtatccagtgcaaattaaaatcttgggagtaggtgggggctgctgcgcgcccttcaccctcagttcccctattaaggattctgagtccccatgcactcctgtcctctggctccttccttcctctccgctcggccggtgagaggcggccgccggc

SEQ ID NO: 38001 - DNA, 66 bp, Homo sapiens; identical to SEQ ID NO: 20106
  chr11:119145611-119145677
  binary

SEQ ID NO: 38002 - DNA, 367 bp, Homo sapiens
  chr11:119598945-119599312
  binary
cggagaaagtgctttcatgctacatagagacgtgcatctgactgcttccctgcagggcaggcggttcggcttctcaacctctttctccgccgtgccacctcccaccccctttacccaagccgtgacccaacttttctggctcctttcactccccacaatccagtcgtgcccgccatccggctcccagccccggggaggcattggatgggggtggggacagcagaggtgagcgctcttacctgggaggaagaatgcggtcaagccgagagcgagtccccaccagcgtccagcggcgcccgcaagccccatccgagccatcgggggccgggggtccggcgagaggggcggcgagggcagcgctcctcgc

SEQ ID NO: 38003 - DNA, 763 bp, Homo sapiens; identical to SEQ ID NO: 20108
  chr11:128760451-128761214
  hyper

SEQ ID NO: 38004 - DNA, 125 bp, Homo sapiens; identical to SEQ ID NO: 20109
  chr11:129803851-129803976
  hypo

SEQ ID NO: 38005 - DNA, 39 bp, Homo sapiens; identical to SEQ ID NO: 20110
  chr11:130083134-130083173
  binary

SEQ ID NO: 38006 - DNA, 836 bp, Homo sapiens; identical to SEQ ID NO: 34180
  chr11:1535842-1536678
  hypo

SEQ ID NO: 38007 - DNA, 167 bp, Homo sapiens; identical to SEQ ID NO: 20113
  chr11:1552182-1552349
  hypo

SEQ ID NO: 38008 - DNA, 62 bp, Homo sapiens; identical to SEQ ID NO: 20114
  chr11:2225626-2225688
  hypo

SEQ ID NO: 38009 - DNA, 155 bp, Homo sapiens
  chr11:2236833-2236988
  hypo
cgggggaccgggacgggtgctggagggtacatgagggaggactgggacaggcgctgcgggggtaggtgagaggggacccggaaggccgctggggagtaggtgaaggggactgggacgggtgctgggggggtaggtgaggggggaccgggacgggc

SEQ ID NO: 38010 - DNA, 55 bp, Homo sapiens; identical to SEQ ID NO: 20115
  chr11:2987095-2987150
  hypo

SEQ ID NO: 38011 - DNA, 97 bp, Homo sapiens; identical to SEQ ID NO: 20116
  chr11:3181650-3181747
  hyper

SEQ ID NO: 38012 - DNA, 563 bp, Homo sapiens; identical to SEQ ID NO: 20117
  chr11:34516985-34517548
  hypo

SEQ ID NO: 38013 - DNA, 174 bp, Homo sapiens; identical to SEQ ID NO: 20118
  chr11:44087366-44087540
  hyper

SEQ ID NO: 38014 - DNA, 606 bp, Homo sapiens; identical to SEQ ID NO: 20119
  chr11:46391523-46392129
  hypo

SEQ ID NO: 38015 - DNA, 346 bp, Homo sapiens; identical to SEQ ID NO: 20120
  chr11:46867730-46868076
  hyper

SEQ ID NO: 38016 - DNA, 919 bp, Homo sapiens
  chr11:487587-488506
  hypo
cgcactgcagccacccagaggttcgagaagccgtggggctcccggacctcccagaagccctgatcctggtcgggtccccgctccgtcctcagggtcggggcggtggaaagaggcggcagggcaggaagtcccgcccctgcctgggcttgggcactgccccatcccacttctgagggaccctgtgctacctatggggctaagagcagtgcctgcttgaccctgcagcccaccctggcagagtttggtgtcaggccccgggcacggggatgctgccttgtttgctgacagtcgtacatcgaggctgctggaggggcagccacccaccccacgctcaccctgagacctcactgggggccctgccagtgctgtcgactccaagaatgctgccagccggggtgggggctgcacgcacccgtgggcagggccgggcgtggcctgcgtcccatactctggctgccagccgggtgggggctgcacgcacccgtgggcagggccgggcgtggccggcgtcccatactctggctgccagccggggtgggggctgcacgcacccgtgggcagggccgggtgtggccggcgtcccatactctggctgaccctggcgcccacagaccctgatgatccgagactggtggatgtgcatgatcatcagcgtgatgttcgagttcctggagtacagcctggagcaccagctgcccaacttcagcgagtgctggtgggatcacgtaggtgccagcacagcccccggggcagtcggtgcaggctgaggggcattctcggaacccctgtgcccagcgcggcccctggaccccctcattctccccggggggcagtgggtgcaggctgaggggcattctcggttcccctgtgctcttccggggtcctcctcggggggctcgttacccctcacccctgcaac

SEQ ID NO: 38017 - DNA, 817 bp, Homo sapiens; identical to SEQ ID NO: 37097
  chr11:57243645-57244462
  binary

SEQ ID NO: 38018 - DNA, 139 bp, Homo sapiens; identical to SEQ ID NO: 20124
  chr11:61662946-61663085
  hypo

SEQ ID NO: 38019 - DNA, 147 bp, Homo sapiens
  chr11:61793177-61793324
  hyper
cgtacgggatgtgggaggtttgttttgaccacacccctgtcaatagttacaagataagccaaagcaagaagcacagacaccatgcctggcagaaaagcggccgtttgcggaactattttatgtaacacaaaaccacgttttcggtcc

SEQ ID NO: 38020 - DNA, 184 bp, Homo sapiens; identical to SEQ ID NO: 20125
  chr11:63562755-63562939
  hypo

SEQ ID NO: 38021 - DNA, 329 bp, Homo sapiens; identical to SEQ ID NO: 20126
  chr11:63676319-63676648
  hypo

SEQ ID NO: 38022 - DNA, 180 bp, Homo sapiens
  chr11:64105874-64106054
  hypo
cgtgatgtctgtgtctgcctgccacctccttctctgagtccttgagagttctacggagagcagtactgctccaaacattccataaaacagccaggcgctcttaagccagctttacaattgtgcagatgaagtggagccgagttttcactctgctctaggagtgtcactgacaggccgggc

SEQ ID NO: 38023 - DNA, 142 bp, Homo sapiens; identical to SEQ ID NO: 20127
  chr11:64774064-64774206
  hypo

SEQ ID NO: 38024 - DNA, 160 bp, Homo sapiens; identical to SEQ ID NO: 20128
  chr11:64950885-64951045
  hypo

SEQ ID NO: 38025 - DNA, 373 bp, Homo sapiens; identical to SEQ ID NO: 36236
  chr11:65684966-65685339
  hypo

SEQ ID NO: 38026 - DNA, 33 bp, Homo sapiens; identical to SEQ ID NO: 18259
  chr11:66658557-66658590
  hypo

SEQ ID NO: 38027 - DNA, 902 bp, Homo sapiens; identical to SEQ ID NO: 35352
  chr11:66885239-66886141
  binary

SEQ ID NO: 38028 - DNA, 179 bp, Homo sapiens; identical to SEQ ID NO: 20132
  chr11:68080751-68080930
  binary

SEQ ID NO: 38029 - DNA, 98 bp, Homo sapiens; identical to SEQ ID NO: 20133
  chr11:68216755-68216853
  hypo

SEQ ID NO: 38030 - DNA, 499 bp, Homo sapiens; identical to SEQ ID NO: 33317
  chr11:69206214-69206713
  hypo

SEQ ID NO: 38031 - DNA, 940 bp, Homo sapiens
  chr11:69451967-69452907
  hyper
cgcggggatgcggggtcctccccgcagtcttccggaaagggcgggggagggcgcggcaagttccggagtggggcatgccgtgggagcccacgagggcctcagcgcggatcctccgccggaaaaccggctcccgcgagccgccgccgcaggtttcctaggccccgcgagtcccgcagcgaagccctgcgtctccgtccgacgcgggggtctgctcagcctcgggtgggccgcggccaggcctgactgcgggggagagggccgaacgtgacctccgaggtcacccccagccagctttctctcctgtggtcggaagtggttttcttctcgatctgggcgcctactccccaccacttggtctgagaggggctggggccggaaggccagggaatctctggtggatttgggggttcatattgctcagggtaccagccgatgcgttttgaggggcgggagtcgaggaattagaatcgcctttaaccctcaagagttgcgccttcagcctcgggatcccagatgcgtcgttggagccagggccgcccccctacctgttgggtttgcgttttaactccagcgcacaccttgccggcagccctcggagctaggggaggggtctcgtttccccgcagcccgccggacagacgactggggcacgggaggggcggtggcagggtggtctgtgtgtggctgaaactaattgatctggagcggaaacgcacgtctgcggttggggcgatggggggggcggtgcggctgtccatgtgccgagcgtgtggctgtctcgggtgggcactggggccggagttcgccccggcccacctcgcagttttggggcgcctgggatcggcgctacgtaagcgaagcagagctgccatagcacgtgggccgccacgcgcaccccaaaagcaagcagtgtggggggaaggggagctcgagcgccttc

SEQ ID NO: 38032 - DNA, 141 bp, Homo sapiens; identical to SEQ ID NO: 20138
  chr11:70164164-70164305
  hypo

SEQ ID NO: 38033 - DNA, 373 bp, Homo sapiens; identical to SEQ ID NO: 24986
  chr11:75852075-75852448
  hypo

SEQ ID NO: 38034 - DNA, 366 bp, Homo sapiens; identical to SEQ ID NO: 13284
  chr11:78534109-78534475
  hypo

SEQ ID NO: 38035 - DNA, 103 bp, Homo sapiens
  chr11:94895718-94895821
  hypo
cgagactccgtctcaaaaaaaaaaaaaaaaaataggcatcccccaactctgggccacagctggagacctaagtgctgctgcactctggccaggttggacagcc

SEQ ID NO: 38036 - DNA, 336 bp, Homo sapiens; identical to SEQ ID NO: 20142
  chr12:104359142-104359478
  hyper

SEQ ID NO: 38037 - DNA, 686 bp, Homo sapiens; identical to SEQ ID NO: 6800
  chr12:104682348-104683034
  hyper

SEQ ID NO: 38038 - DNA, 838 bp, Homo sapiens; identical to SEQ ID NO: 24994
  chr12:104851980-104852818
  hyper

SEQ ID NO: 38039 - DNA, 294 bp, Homo sapiens; identical to SEQ ID NO: 30999
  chr12:105392597-105392891
  hypo

SEQ ID NO: 38040 - DNA, 178 bp, Homo sapiens; identical to SEQ ID NO: 20146
  chr12:109050967-109051145
  hypo

SEQ ID NO: 38041 - DNA, 174 bp, Homo sapiens; identical to SEQ ID NO: 31000
  chr12:109488367-109488541
  hypo

SEQ ID NO: 38042 - DNA, 88 bp, Homo sapiens; identical to SEQ ID NO: 20148
  chr12:110518057-110518145
  hypo

SEQ ID NO: 38043 - DNA, 175 bp, Homo sapiens; identical to SEQ ID NO: 20149
  chr12:112681200-112681375
  hypo

SEQ ID NO: 38044 - DNA, 73 bp, Homo sapiens; identical to SEQ ID NO: 20150
  chr12:112684738-112684811
  hypo

SEQ ID NO: 38045 - DNA, 788 bp, Homo sapiens; identical to SEQ ID NO: 20151
  chr12:113685206-113685994
  hypo

SEQ ID NO: 38046 - DNA, 140 bp, Homo sapiens; identical to SEQ ID NO: 20152
  chr12:117392984-117393124
  hypo

SEQ ID NO: 38047 - DNA, 79 bp, Homo sapiens; identical to SEQ ID NO: 20153
  chr12:118461377-118461456
  hypo

SEQ ID NO: 38048 - DNA, 925 bp, Homo sapiens; identical to SEQ ID NO: 34221
  chr12:120148172-120149097
  hypo

SEQ ID NO: 38049 - DNA, 281 bp, Homo sapiens
  chr12:120172992-120173273
  hypo
cgttccgtgatctcccggcggagatggtccacttcacttcgcagttgtacaatctcgtcgttggcgccagaagcctcatcgagttgtttggacaagtagaagttttggttgttgagttcagcgttgtcctcggtcagctggtttagctgctcctccaggtctgtgattacctaaaagaggaaaggaatccagttacacgccaagcacattcatttcaaataagaaattgcttctagggctatggatttctgaacccacgtgacactggcaatcaacgtgcc

SEQ ID NO: 38050 - DNA, 143 bp, Homo sapiens; identical to SEQ ID NO: 20157
  chr12:120613510-120613653
  hypo

SEQ ID NO: 38051 - DNA, 97 bp, Homo sapiens; identical to SEQ ID NO: 20158
  chr12:121200066-121200163
  hypo

SEQ ID NO: 38052 - DNA, 200 bp, Homo sapiens; identical to SEQ ID NO: 7867
  chr12:121205162-121205362
  hypo

SEQ ID NO: 38053 - DNA, 124 bp, Homo sapiens; identical to SEQ ID NO: 20160
  chr12:121756071-121756195
  hypo

SEQ ID NO: 38054 - DNA, 263 bp, Homo sapiens
  chr12:122623827-122624090
  hypo
cggtcctcgaagccacagggagggtgagtgccacccctgctgtgacaggcggaaaccaggactccctccactgagtggtagagcccaatttgaagcctaatggagcatgtccacctctaggggctctcgtgccaaggccaccttgcactcagccttccaggtggcagcacggctctcacggggagtggttcccgcctggtcactccccaccctgccaccgctctgcctctgagtaaacggtcggcacatgtgttgggttgacc

SEQ ID NO: 38055 - DNA, 280 bp, Homo sapiens
  chr12:123997867-123998147
  hypo
cgacatgccctgtcctggggcgccaggacccactcactcatttactccttgctggggctgccttggctccccgagaggtgggcgggaggcgagcatgaggagagaggggcggctgggtctatgtggaagcccagcagcctcatcaccttcctgggcggcagccgtaggagctatgagaccgaggcagaagcctggcgcctgactcctatcccagcttcggcctcttagttgctttcccttcaggcctcggtgctctcgagaggcctgtgcacgcttcatc

SEQ ID NO: 38056 - DNA, 150 bp, Homo sapiens; identical to SEQ ID NO: 14568
  chr12:125500633-125500783
  hypo

SEQ ID NO: 38057 - DNA, 46 bp, Homo sapiens; identical to SEQ ID NO: 20164
  chr12:128489355-128489401
  hypo

SEQ ID NO: 38058 - DNA, 742 bp, Homo sapiens; identical to SEQ ID NO: 23854
  chr12:132221511-132222253
  hypo

SEQ ID NO: 38059 - DNA, 176 bp, Homo sapiens; identical to SEQ ID NO: 20166
  chr12:132504709-132504885
  hypo

SEQ ID NO: 38060 - DNA, 816 bp, Homo sapiens; identical to SEQ ID NO: 20167
  chr12:132536813-132537629
  hypo

SEQ ID NO: 38061 - DNA, 136 bp, Homo sapiens; identical to SEQ ID NO: 20168
  chr12:133097814-133097950
  hypo

SEQ ID NO: 38062 - DNA, 246 bp, Homo sapiens; identical to SEQ ID NO: 20169
  chr12:133393414-133393660
  hypo

SEQ ID NO: 38063 - DNA, 863 bp, Homo sapiens
  chr12:19283146-19284009
  binary
cgcgccgcgggccccgggaggcggcgaggcggggcggaggccgggcgggagcggccgcaggtagaggggccacggggactccgccgccgggagttctctccagtctcggggcgcctctttctcctcagcctttcatcagcacttggagacggcgccctcttcctgcgccttctccccccatcccagcctagacgaccctcgcgaccctagagtggcgacgctcccctccctgaaacctggagtcctgagtttttcctccgcggccgctactcactccccggtgacccccagctgccgtcttgccccccagcaatcttcaggcagtccttacccactcccctccctgcagccccggaccccgatcgcccgccgggataacgtaaccacatcctccccctcctcccaggagcgctgcctcctgccgtgcagcttcctcctcctaggtgggacttgtgggtaggtggctgatgaaggaggaggaggaggaggagaggagttcgggggtgctgcgatcctctctgtgacagggaacggctcgggaaacgcttggcgcgttccctcctgccacgggaggagcagccggagccggaggaggcgttcgcagcctcagttgctggcgatccggatctaaagtccccgccagccgcacggaggttgcacagactgccaggaggcggtgggcgtgcgagggggtgtcccgtatgggggcacccgggccctgtttggagggagtccgtggggaagcggctctctcgggtggctttgggagcttgtttgaatgctaagtgtgagtggagctggaaaaggctcctcgtagtttctgtactggtctgggtttcttttatcattctttgtttacattc

SEQ ID NO: 38064 - DNA, 138 bp, Homo sapiens; identical to SEQ ID NO: 20173
  chr12:26398950-26399088
  hypo

SEQ ID NO: 38065 - DNA, 194 bp, Homo sapiens; identical to SEQ ID NO: 20174
  chr12:2972300-2972494
  hypo

SEQ ID NO: 38066 - DNA, 120 bp, Homo sapiens; identical to SEQ ID NO: 20175
  chr12:3030601-3030721
  hypo

SEQ ID NO: 38067 - DNA, 48 bp, Homo sapiens; identical to SEQ ID NO: 20176
  chr12:32142934-32142982
  hypo

SEQ ID NO: 38068 - DNA, 970 bp, Homo sapiens
  chr12:39298923-39299893
  hyper
cgggtttggggcggaaaaccggcttgtaaagtgggcggcggccggtgttcccacagctgagtcacagcccagccaacttttacagcgtttcccagaaagaaaatacaaagtctcagtcccggagcccaccgcttctaattcccgctcccctgtgtcacctgacccggggtaactccagccccactactgagatatttcccactcatggcgcaacttcttgcctgcgcaaagcctcgtggtaccccgagcgctctccaagtgctaccaaccccacagatgagagggcaggagagaggggaagggctgcgtcctcacctgcaggacacggacacctccacccgcgtggccgggatggcagcgctcagctggttcaagtccccgatgcccgcagtgctgttgtagcggctgtccatattgggaggaggcgccttggacttgtccggcgcccacaaccacagctcgggcggactgagggctagctcccgtcaggcggggatgggggttgagggtggaggcagaagaaggaggcggaggcagcgcgcgggatgggggagggaagggaggaggcggacctccgcgcagagccacgagggaaccgctagccagtcctgggtgaaactgacgctgccaggcaagtggcgcgcggggatcccggtttcccagcccccttccggcaggcagcagcccgggcgggggacacactccgtgatcccctcctggctggaggggtcaggcttggtggacccagcaagcagcctgatggagaaggtggcaccagacgcagacccctaccgtccaggaccgcaagccctcgccggctctgcgtgcttttaggttttgtctccacctctgcacacccacactcgcctcctgggccgcgacagcttccttctgtcaatcaggtgtggacgggaaggtctcgaagtttcctcgcctgagttgaaagctggaggtgggggcacctctgccc

SEQ ID NO: 38069 - DNA, 530 bp, Homo sapiens; identical to SEQ ID NO: 32528
  chr12:46766939-46767469
  hyper

SEQ ID NO: 38070 - DNA, 71 bp, Homo sapiens; identical to SEQ ID NO: 20178
  chr12:50322856-50322927
  hypo

SEQ ID NO: 38071 - DNA, 194 bp, Homo sapiens
  chr12:54070813-54071007
  hyper
cgtgcttgaacgcagcacgagaaagacgggaaaagctcaccaaaccccataaaaaataaaaaataaaaagaaagccgcggctgtaaataaaggcaaatccgccactctctgaggggccgtttgtcctcccctccttggccccgtccttcccgccgccccctcccggctcccgggccccgcggcgccccggcccc

SEQ ID NO: 38072 - DNA, 98 bp, Homo sapiens; identical to SEQ ID NO: 20180
  chr12:54651346-54651444
  hypo

SEQ ID NO: 38073 - DNA, 672 bp, Homo sapiens
  chr12:6492947-6493619
  binary
cggccttgcagtccccgcgccctgccctctccatgactgcccgtcctgggcccctcgctttccagatcccgcacccagctgtcccttgcgctctctggaactccctctgctctccctgcgaggcttgtccaagggctgaccccgggcccgccgcccttccctcggctgggccagggctgtccgcagtccgctctcccgatcgggcttccgaagaagggaggaggccggttccggccccgcggccctcacgtgctttcccggccgcccctcccgccccgcatcgaggcagacaagcctgttcctcttccctgggctgcgattgcgacaggccggcctggctcccagcgctccctgtccccgccccgcggccagctcgctccactcccacttcctgagctccgccatgggagccctggaggcccggcctggccgctcccggccctggggtgcacatcggccctgagtcccgtcccaggctctgggctcgggcagccgccgccaccgctgcccaggacgtcgggcctcctgccttcctcccaggcccccacgttgctggccgcctggccgagtggccgccatgctcctgccttgggccacctctgcccccggcctggcctgggggcctctggtgctgggcctcttcgggctcctggcagcatcgcagccccaggc

SEQ ID NO: 38074 - DNA, 99 bp, Homo sapiens; identical to SEQ ID NO: 20184
  chr12:6686943-6687042
  hypo

SEQ ID NO: 38075 - DNA, 42 bp, Homo sapiens
  chr12:77085836-77085878
  hypo
cgaccactgggtgaggcagaaaaagtgtactgagtgtgtaac

SEQ ID NO: 38076 - DNA, 294 bp, Homo sapiens; identical to SEQ ID NO: 20185
  chr12:9216950-9217244
  binary

SEQ ID NO: 38077 - DNA, 124 bp, Homo sapiens; identical to SEQ ID NO: 20186
  chr12:95602750-95602874
  hypo

SEQ ID NO: 38078 - DNA, 133 bp, Homo sapiens; identical to SEQ ID NO: 20187
  chr12:96566303-96566436
  hypo

SEQ ID NO: 38079 - DNA, 105 bp, Homo sapiens; identical to SEQ ID NO: 20188
  chr13:100068654-100068759
  hypo

SEQ ID NO: 38080 - DNA, 990 bp, Homo sapiens
  chr13:100623230-100624220
  hyper
cggggccgggtgctggggggagccggtgccggaccgctgctcccctccgagcggggccccgtgcatggccgccgcgggggccgtggcggaaaggtccctccggaggacgaagtccctgctgtggcctttgccgctgctgccgccgccgccactgttggtggtggtgtagcccgagagggcaggaggaggaggaggcgggggagggggagggggtgaaggggtgggaggaagaggaggggctgggggcgggggcgcggagggctgcgcgccactgctgcccccgccgcaggggtagctgcccgcgccggggtgcgcgaccaaggctgcagcacgggcggcggctgccggagcctccgggtgtgccgggaacgcctgggagggagggctgaggcccagcgtgctcgcctgggccatgtgctcgggtccgagcggagtggtggccacgccggggtcagcgcccaggtcccgcaggcggaggtgcgcgacggcggcccggagttgggagtgggcgggcgggccggccagcgccgggaagcctgtcatattctgaagcggctggacctgagccgttgccaaatccgctaatctcagcgctggcgggttcctcttgctcaaagggggctccatcagaactacacaatcaggcccatagaccctcactggggggactttattccctctgcccgccttcaaaaacatgtatgtattgggcgctctttaacttcttttgtcctggcctcttaactctgcttattcctgttcccactctatcctccagcgattggcagagtgaacaccacatttgagctgcacagtgggaccgagattttggaaatggcacgggtgggattggagggagccgcgtgattggcagtagcctcggctgctcgattggctcccgttcaggccctcgacccagcggggattcgcccccgtgcttgcggccgcctgcgctttcgcttcgcgccccctcctccgctggagccacac

SEQ ID NO: 38081 - DNA, 195 bp, Homo sapiens; identical to SEQ ID NO: 20190
  chr13:112022971-112023166
  hypo

SEQ ID NO: 38082 - DNA, 319 bp, Homo sapiens; identical to SEQ ID NO: 15544
  chr13:113627865-113628184
  hypo

SEQ ID NO: 38083 - DNA, 267 bp, Homo sapiens; identical to SEQ ID NO: 31081
  chr13:114302291-114302558
  hypo

SEQ ID NO: 38084 - DNA, 541 bp, Homo sapiens; identical to SEQ ID NO: 23891
  chr13:114304580-114305121
  hypo

SEQ ID NO: 38085 - DNA, 209 bp, Homo sapiens; identical to SEQ ID NO: 33388
  chr13:114766173-114766382
  hypo

SEQ ID NO: 38086 - DNA, 219 bp, Homo sapiens; identical to SEQ ID NO: 20195
  chr13:115052309-115052528
  hypo

SEQ ID NO: 38087 - DNA, 366 bp, Homo sapiens; identical to SEQ ID NO: 23898
  chr13:20392340-20392706
  hypo

SEQ ID NO: 38088 - DNA, 506 bp, Homo sapiens; identical to SEQ ID NO: 6408
  chr13:20979799-20980305
  hypo

SEQ ID NO: 38089 - DNA, 594 bp, Homo sapiens
  chr13:24477426-24478020
  hyper
cggtttccccagatgccgcggtgcaccgagcaggagcagaggccacgcgggagccgggtgtgcgggtgggtaccggccgcgcccctgctcggaggcggcgactccctcccccgccttactcacaccgtgcctcagtttccccgtcagtgcagcggacaagacaatgccgaggtcccaggcgggcggcaggatccaattagtccgtgtaaaatgagaggcatctggcttctcccgggcaccccgcagcctgccccgcctcttagtggctaaaggcagggagcccctgagtcccagcgcggctgggggctctcagcagttctggccgagctccctcccgcccgcgtcgcctggcctcgaaccgctgcaccgcgggcggccccgacgggttcccgacctcccgctggggacacctgtcccgccgcccggcccttccccgcctcccgcgcctccgccccaggggagctccgggacaggcccacctaggcagcctgccggcgcagacccagcgagggaaggccagtctcgggcctccaaccggacacgcgctccccattccgggctctcccacgtctgcacactccagcccagccacgc

SEQ ID NO: 38090 - DNA, 126 bp, Homo sapiens; identical to SEQ ID NO: 15558
  chr13:28745545-28745671
  hypo

SEQ ID NO: 38091 - DNA, 206 bp, Homo sapiens
  chr13:29933419-29933625
  hypo
cggcagctcgaaatgggtttccgcccaagccggacccgcaggcccgtgaggctgagcggcagctggtgctgcggctgaaggagcggtgtgagcagcagaccagacagctgggcgttgcgcaaggggagctgaagagggccatctgcggctttgatgccctcgccgtggccacgcagcatttctttagaaaggtgaggccccatttc

SEQ ID NO: 38092 - DNA, 116 bp, Homo sapiens; identical to SEQ ID NO: 13380
  chr13:32983242-32983358
  hypo

SEQ ID NO: 38093 - DNA, 199 bp, Homo sapiens; identical to SEQ ID NO: 20200
  chr13:41364049-41364248
  binary

SEQ ID NO: 38094 - DNA, 91 bp, Homo sapiens; identical to SEQ ID NO: 20201
  chr13:41453098-41453189
  hypo

SEQ ID NO: 38095 - DNA, 284 bp, Homo sapiens; identical to SEQ ID NO: 20202
  chr13:44544261-44544545
  binary

SEQ ID NO: 38096 - DNA, 141 bp, Homo sapiens; identical to SEQ ID NO: 18361
  chr13:52335934-52336075
  hypo

SEQ ID NO: 38097 - DNA, 131 bp, Homo sapiens; identical to SEQ ID NO: 20204
  chr13:76352658-76352789
  hypo

SEQ ID NO: 38098 - DNA, 35 bp, Homo sapiens
  chr13:95775604-95775639
  hypo
cgctctggagtgttttttgtttttttgcgggggac

SEQ ID NO: 38099 - DNA, 601 bp, Homo sapiens; identical to SEQ ID NO: 20205
  chr13:96705328-96705929
  binary

SEQ ID NO: 38100 - DNA, 619 bp, Homo sapiens
  chr13:98869699-98870318
  hypo
cgtctacgaccgtcgtcgcaggaaatgatccttgtaactttctcgtgttgctgtcttgtcactgctgtactcgagcttttgtagctcctgagacttaagtagcattcatcctttgcctgaggatcaagtgtgggcttcgtagctcggggagcctgggagagagcaatgagcctccatggaggggccctgtacaccgggaggtgcctgggcaactcccatggctcatctcaaccacagtcctcggcggtttgttttctgcattagcttctcatgccagaacaccctcttatttgtttacctgcttagtgttggcctcttgcaggtagagtggccactccttggagggcaaggcctcttgttcttgttcgtcatcatatcctacgccgcagcggtgcctgtgcatgaaactgactggtgacagttctgctcggtcgtttaactatacgagagttggtgctgtcctagcataacaagggaaagagcaagtgggaagagcttctgagtcccttcctcgtgttttcacagcgtgaaggtggggctgggattggagtccggcccgccagaccctcaacttacccatcttctgggcactaagagccgcctcctttgtgagattcgc

SEQ ID NO: 38101 - DNA, 82 bp, Homo sapiens; identical to SEQ ID NO: 15562
  chr13:99115936-99116018
  hypo

SEQ ID NO: 38102 - DNA, 609 bp, Homo sapiens
  chr13:99404493-99405102
  hyper
cggtgtttctgccgcccctgccgtcacccgctgggtcccgtcccgctccaagcgcactcccggcccgcagggtgggaatacgaggattacagtgccccacgggcgggcgggccaggatcgcaacctcggcggagtcggcgcctctgggcacctctggcttccgcgccccggccgcacggtgaccacccgggaggggatcccgggcgccccgcaacctcccggcccccgtgggccttcgggtcgccccgcttcccgccgccgcgtacccttcgcgcctcccggccctcggtgccggcccccgccccgcgtagctccgagtctttagcccggccggccccccacccgccgagcgtacccatggcggcggctcccagggctcctgcgacctgccggcgggacgtgctcctggcaggtgctactcctccgacctgacgtccaggcccggccccgttgccccaggtacagccccagctctgcgaggcggggccgccggctccacccggggggcggtgctgcggggagcagaggtccgtgctcccgagccgtcgcgcgtggacaccagccccggcccaggtgcgggtgggccccgacgggagcgcgtggcaggcc

SEQ ID NO: 38103 - DNA, 283 bp, Homo sapiens
  chr14:100747027-100747310
  hypo
cgcaatacctgtccgtgtttccaagcagagttcaagttcatgtcttcacaagtagatgagagtcacttccagtcgggggaagcccgcctgagcagtgttttgagagtgcgtacattggaggactgccccacgtccgtttgcactctgccttgcaaaacttactgtggagacgtgtcccagactggtctcagaccagagtttgtggcacaggaaaacctggccccctaaaaagaagttttggaattggaagcctgataatttcgggaggctgaggcaggagaac

SEQ ID NO: 38104 - DNA, 208 bp, Homo sapiens; identical to SEQ ID NO: 20211
  chr14:100748335-100748543
  hypo

SEQ ID NO: 38105 - DNA, 247 bp, Homo sapiens; identical to SEQ ID NO: 20212
  chr14:102230139-102230386
  hypo

SEQ ID NO: 38106 - DNA, 72 bp, Homo sapiens; identical to SEQ ID NO: 20213
  chr14:102331847-102331919
  hypo

SEQ ID NO: 38107 - DNA, 42 bp, Homo sapiens
  chr14:102529487-102529529
  hypo
cgttagggagtagcaaagcaactctgaccagccctcggttcc

SEQ ID NO: 38108 - DNA, 182 bp, Homo sapiens; identical to SEQ ID NO: 31116
  chr14:102682061-102682243
  hypo

SEQ ID NO: 38109 - DNA, 119 bp, Homo sapiens; identical to SEQ ID NO: 15563
  chr14:102691860-102691979
  hypo

SEQ ID NO: 38110 - DNA, 367 bp, Homo sapiens; identical to SEQ ID NO: 20215
  chr14:103369461-103369828
  hypo

SEQ ID NO: 38111 - DNA, 279 bp, Homo sapiens; identical to SEQ ID NO: 20216
  chr14:103423623-103423902
  hypo

SEQ ID NO: 38112 - DNA, 344 bp, Homo sapiens; identical to SEQ ID NO: 20217
  chr14:103977202-103977546
  hypo

SEQ ID NO: 38113 - DNA, 155 bp, Homo sapiens; identical to SEQ ID NO: 31118
  chr14:103977769-103977924
  hypo

SEQ ID NO: 38114 - DNA, 76 bp, Homo sapiens; identical to SEQ ID NO: 20220
  chr14:105155749-105155825
  hyper

SEQ ID NO: 38115 - DNA, 885 bp, Homo sapiens; identical to SEQ ID NO: 25087
  chr14:105240770-105241655
  hypo

SEQ ID NO: 38116 - DNA, 127 bp, Homo sapiens; identical to SEQ ID NO: 20224
  chr14:105244222-105244349
  hypo

SEQ ID NO: 38117 - DNA, 423 bp, Homo sapiens; identical to SEQ ID NO: 13401
  chr14:105689521-105689944
  hypo

SEQ ID NO: 38118 - DNA, 396 bp, Homo sapiens; identical to SEQ ID NO: 20226
  chr14:105728110-105728506
  hypo

SEQ ID NO: 38119 - DNA, 528 bp, Homo sapiens; identical to SEQ ID NO: 20227
  chr14:21560027-21560555
  hypo

SEQ ID NO: 38120 - DNA, 91 bp, Homo sapiens; identical to SEQ ID NO: 20228
  chr14:21969884-21969975
  hypo

SEQ ID NO: 38121 - DNA, 77 bp, Homo sapiens; identical to SEQ ID NO: 11102
  chr14:50511831-50511908
  hyper

SEQ ID NO: 38122 - DNA, 459 bp, Homo sapiens; identical to SEQ ID NO: 20230
  chr14:51171654-51172113
  hypo

SEQ ID NO: 38123 - DNA, 940 bp, Homo sapiens
  chr14:53417108-53418048
  hyper
cgcggctgggatgctactcaccgagtttctccaccagcttaagcatcacgcctccaatgtgcacctcgccggtcactctcagggtgacatcgcggttcaggtccgtcacatggacactcagttcccacgtcccgtccgcgtagcagccatctggcatccttatcccgtccagagccatggctccttcctgcgagcgcggaggaaatggctctcgtaagcgtcactcccccaaagaaaggcgaatcccaccgaattcgcagcgccggccacgggctgggaggtggtggaggacccggggctttcggcagaaactcgggagggcggcggcggccggggctgcgggaggaccctacgccccgctcgccccgcagcgttcctcggtcccggcgccgcccgccccacaccgtccccgcctagcggaccgcggagggcttcacctgccggccggccccgagacacagcgcgggctgactccccgttcccctccccgccgcgccccctcgggtcccggcggggtcccgctccctcaccgcgcgctcctagcgctccgggcccgggactcgcgcggcaacaggcgaggggctggaggctcgcggggcggcggtgtccgcgtccggttcctcggctggcgaagcgctgcctgtggccggagcggctaatggagtcccgtcgtcgcggcccctcgcctggctccccgcgctccaccctctccccgccccctctgtccgagcctggctgggctgggcgcgctggctccctccttcgccgcccgcagagctgccctgagcgggtccggccggcctcgcctctgcccccgccctcccggcgccgcgctcgggggagggggctgcgggtcccgggcggggcggggcggcgtggggcggggcggcgcgggggtggcggggggcgcggcggggcggcaatctcggccccgcggagc

SEQ ID NO: 38124 - DNA, 839 bp, Homo sapiens; identical to SEQ ID NO: 25098
  chr14:55765300-55766139
  hypo

SEQ ID NO: 38125 - DNA, 193 bp, Homo sapiens; identical to SEQ ID NO: 20234
  chr14:55817984-55818177
  hypo

SEQ ID NO: 38126 - DNA, 823 bp, Homo sapiens
  chr14:58332249-58333072
  hyper
cggttcagcaccgaggacagcggacatacttttctccccggggggtccccgccgccaggaaggcggtgttgacagcgtccgcagggctgcaggtgtccgtaccgcgcgcccgcccgtccgcatccccgcggcacccctgcgcgcccacctcccttccccgcctcgcgcagggcagccgcgcggcgtcttacttttctggctggagtaacctggataatagccatagtagccggtgatccgcaggatccggtcctcgatagtggccaccccgttgggggccgccttgacatccatagagagcgcggggcgacggccccgagtgcggcggggcggagagcgcagcgcggggcccgggagctggtgcaggtgccggagccgctggtgctgatcttgcagctcctgctcccgcgcccgggctctgactccaccgcccggcgcagcaccggctccgcatcacagcggcggcggcggcggcggcggcggagcggcccccactcgggccggcctctccgtcagcctggcagctctcccgcgcgccacccggagcactgctgcccgaatagcgccccctcacctccgacgcccaccgtggccgggggcgggtgtgggcgccccacctggtcgccagctttcatcattaacccttgcgcgatccttcccgaaaactagacaccccaaccccacctgatgaaagggatgtttggtcagtggggcgcgagaggagaaggcgacggtggccaggggctcagagaagggtgttgggagtgggagaaacccaagagggactcatagctgttaatgcgaggcattaactctgtcgctc

SEQ ID NO: 38127 - DNA, 76 bp, Homo sapiens; identical to SEQ ID NO: 20238
  chr14:62161828-62161904
  binary

SEQ ID NO: 38128 - DNA, 101 bp, Homo sapiens; identical to SEQ ID NO: 20239
  chr14:63857003-63857104
  hypo

SEQ ID NO: 38129 - DNA, 230 bp, Homo sapiens; identical to SEQ ID NO: 20240
  chr14:69278049-69278279
  hypo

SEQ ID NO: 38130 - DNA, 148 bp, Homo sapiens; identical to SEQ ID NO: 20241
  chr14:69345646-69345794
  hypo

SEQ ID NO: 38131 - DNA, 246 bp, Homo sapiens; identical to SEQ ID NO: 23078
  chr14:89817855-89818101
  hyper

SEQ ID NO: 38132 - DNA, 132 bp, Homo sapiens; identical to SEQ ID NO: 20243
  chr14:99902515-99902647
  hypo

SEQ ID NO: 38133 - DNA, 162 bp, Homo sapiens; identical to SEQ ID NO: 20244
  chr15:28360064-28360226
  hypo

SEQ ID NO: 38134 - DNA, 414 bp, Homo sapiens; identical to SEQ ID NO: 33423
  chr15:28516961-28517375
  hypo

SEQ ID NO: 38135 - DNA, 250 bp, Homo sapiens; identical to SEQ ID NO: 10306
  chr15:31561317-31561567
  hypo

SEQ ID NO: 38136 - DNA, 225 bp, Homo sapiens; identical to SEQ ID NO: 20248
  chr15:34873206-34873431
  hypo

SEQ ID NO: 38137 - DNA, 625 bp, Homo sapiens
  chr15:45403592-45404217
  hyper
cggggcccgttctgcccggtggcggggtcgggcgccgcccacatgagcagggggttctgcgagtctcgggggaaagcggggtcgggccccgacgccagctgtccccccgagaagctccgcagcgcgtcgctccaggagtgcgaggagccatagatggcgctgccgtccagccagcccgtcacctggttggcctgcggggcacgcggcgggtgagcccgggtcgagaggcggcggcgggccagggaaggccggggcccggcgggtgtccgcggctggggagtgggcgcctctcccctccaggccctgccaggcccgaagcccaggccccacctggctggggtgcggtcccttcccgccgccttccccgcctcaccaggtcccgggggttgctgggactccgtccggtctcggggtcccagcggctcctctggaagggcagcaccacgtccccgcgctggtcggggtcgaacacggggtctccaggtgggatgcggatgttgaggaactcggcggggcaaccgggcgtttccacgctcaccacgtcggaaagaacatggtagcctgcgggcatggggcgccaatacgtgacaaaccgtccgtattgcgccctccccacggccagggc

SEQ ID NO: 38138 - DNA, 78 bp, Homo sapiens; identical to SEQ ID NO: 6926
  chr15:54191760-54191838
  hypo

SEQ ID NO: 38139 - DNA, 35 bp, Homo sapiens
  chr15:55806635-55806670
  hypo
cgtaggccttttcggttcgtgttggggaagactcc

SEQ ID NO: 38140 - DNA, 113 bp, Homo sapiens; identical to SEQ ID NO: 23967
  chr15:55806773-55806886
  hypo

SEQ ID NO: 38141 - DNA, 86 bp, Homo sapiens; identical to SEQ ID NO: 20250
  chr15:55965701-55965787
  hypo

SEQ ID NO: 38142 - DNA, 832 bp, Homo sapiens; identical to SEQ ID NO: 22805
  chr15:63795400-63796232
  binary

SEQ ID NO: 38143 - DNA, 82 bp, Homo sapiens; identical to SEQ ID NO: 20254
  chr15:65242083-65242165
  hypo

SEQ ID NO: 38144 - DNA, 968 bp, Homo sapiens
  chr15:78912246-78913214
  binary
cggttgagagcgtatggcgttctgagtagtgcaggcctcggcaccgagggcggaaagcgctctgagctcacagccgcacgacagaccgccggcctgggccctccaggaattccctgcagccttgcccggtccccgactctcgctacccaccagccctcccaggcacccaagagcctcccagcggcgggccagggccggcttcccccagcaggctcctctggagagcgggaggaagacaggaggcgctctcccggtggagggtccctcagcgacgcagccaggagcgctaggaggctacaaccggaggagaggctggcgctccagctccagccccagtcccgaagcgactcccctcttcccgaggtggccttggccaagtcttcagccatctccgtcaaatgaggaggtgggcgggatgcagacggtggagcgggaggcttgggcgcgccagtttgggagccagtgcgcggggcagggcgacgggcagcgcggggacgcgaatccccaactcctgcgcccaagacgaaggacccggtctcgacctccccatcacccggcgcgtaccagcgcccgctcagtgactcccaggtttggtggtggctaggggtgggaggtgagccgaaagggaaaaagccaccccacccaagtcgccgccgggctggagccagtctgcgcgggttccgagtccccggcgacggcgccagccctctccgctcgcccgcgcggtgttctcgccggcagcccctccggaccccgcgccccttctcgggcgcccgtccctccggagccctaacgcctgtgcgcgtacctggcagcagagacagcagcagcagcagcagcagccgcggcggcgacagcgccaggggcagcgagagcgggccagagcccatggctggtggccgggctggccgcggacccggacggtcgggagcgggcgcggcggtcgcagagacggcctctccccgcgc

SEQ ID NO: 38145 - DNA, 505 bp, Homo sapiens; identical to SEQ ID NO: 20255
  chr15:90611268-90611773
  hypo

SEQ ID NO: 38146 - DNA, 364 bp, Homo sapiens; identical to SEQ ID NO: 20256
  chr15:90903993-90904357
  hypo

SEQ ID NO: 38147 - DNA, 268 bp, Homo sapiens; identical to SEQ ID NO: 20257
  chr15:99482494-99482762
  hypo

SEQ ID NO: 38148 - DNA, 42 bp, Homo sapiens; identical to SEQ ID NO: 15604
  chr16:11037121-11037163
  hypo

SEQ ID NO: 38149 - DNA, 322 bp, Homo sapiens; identical to SEQ ID NO: 31233
  chr16:142447-142769
  hypo

SEQ ID NO: 38150 - DNA, 53 bp, Homo sapiens; identical to SEQ ID NO: 6945
  chr16:1472227-1472280
  hypo

SEQ ID NO: 38151 - DNA, 66 bp, Homo sapiens; identical to SEQ ID NO: 20261
  chr16:16188327-16188393
  hypo

SEQ ID NO: 38152 - DNA, 135 bp, Homo sapiens; identical to SEQ ID NO: 20262
  chr16:1651481-1651616
  hypo

SEQ ID NO: 38153 - DNA, 301 bp, Homo sapiens; identical to SEQ ID NO: 7994
  chr16:1652282-1652583
  hypo

SEQ ID NO: 38154 - DNA, 90 bp, Homo sapiens; identical to SEQ ID NO: 20264
  chr16:1677046-1677136
  hypo

SEQ ID NO: 38155 - DNA, 754 bp, Homo sapiens; identical to SEQ ID NO: 25134
  chr16:1730112-1730866
  hypo

SEQ ID NO: 38156 - DNA, 346 bp, Homo sapiens; identical to SEQ ID NO: 15612
  chr16:1812272-1812618
  hypo

SEQ ID NO: 38157 - DNA, 828 bp, Homo sapiens
  chr16:1813299-1814127
  hypo
cgtttcaggcgtctgtccagcagggagtcgctggtcatgcctgtgccccggcggcactccaggtcccggtctgtggaaccctcagtgactgtggcagcagagcagcctctgggtcgagcaggggccagctgtggcctccaagcccaggggcatagccggtgccaggaaagccacccttcccagctgggcacccagtgccgggaaagccacccttcccagctgggcacccggtggccgggaaaaggcgaggatgggcccaggcgggcctccctgccgtgacctcccccaggacaagcctggggcactgtgggggccgctcaccctggacagagacatcacccatcattcttccactcagcgactgcacgtcctccgcccgtcgagagcagaagcgcgagcagtaccgccaggtgcgtgagcacgtgcgtaacgacgacggccgtctgcaggcctgcggctggagcctgcccgccaagtacaagcaggtgcgggcgggcgctgcggggaccgggcggggccccgcagaggcggggcgggggtaaggggcggggcgctgtggggcggggagagggcggggcagtgctagggggtgggagaggacggcgggtggggcggggcctggcaggttcctagtgagcctcctgggcaggggtctggagggtcggagaaggagccccgcggctcccacgcccccacctgcctccagtcttgaagtggctgtgccgccagaagctggcagccctacctgtctcagatttctggagggatgggtaggagccagggttcgtgcccacggcgcctccctgctccctgcagctgagtcccaac

SEQ ID NO: 38158 - DNA, 56 bp, Homo sapiens; identical to SEQ ID NO: 20270
  chr16:21964488-21964544
  hyper

SEQ ID NO: 38159 - DNA, 948 bp, Homo sapiens; identical to SEQ ID NO: 23492
  chr16:2280815-2281763
  hypo

SEQ ID NO: 38160 - DNA, 862 bp, Homo sapiens
  chr16:2282274-2283136
  hypo
cgcaggggagggtgagcaggcccaggtgaagctactggtgaacaaggatggccgctatgtgtgtgcgctgtgccacaagaccttcaagacggtgagccggcgtgcggggagccagtgtgtgggtggcaggccccctcctgttcccccaggagggccctgagctgccacgccctcccccacagggcagcatcctcaaggcccacatggtcactcacagcagccgcaaggaccacgagtgcaagctctgtggggcctccttccgcaccaagggctcactcatccggcaccaccggcggcacacgggtgagctggccgcacctcgggctggagcccggtagcaccccgatggttggccctggggtgccccagcctcgcattccccagctttgggggatgaggcgggggcccctgcctgccttcgccttgtcaccttgtcgccagcctgctggggctgcccggggctgactaggttctctctgcagatgagcgcccctacaagtgctccaagtgtggaaagagcttccgggagtcgggtgcactgacccggcacctcaagtctctcaccccctgcacagagaaaatccgcttcagtgtgagcaaggacgtggttgtcagcaaagaggacgcacgtgcaggtcagcatggtgcgggcagctgcctggtcctgggggctggctgtggacgcagccgccactggggtgtgtgagggatcttcactccctcactccaccttgaaggttctggagctggagctgccggcttggggacagccacatcatcggtgacaggcgagcctatagagacttcacccgtgattcacctggtgacagatgccaagggcaccgtcatccacgaagtccac

SEQ ID NO: 38161 - DNA, 512 bp, Homo sapiens; identical to SEQ ID NO: 20275
  chr16:2358246-2358758
  hypo

SEQ ID NO: 38162 - DNA, 150 bp, Homo sapiens; identical to SEQ ID NO: 6952
  chr16:24739345-24739495
  hypo

SEQ ID NO: 38163 - DNA, 559 bp, Homo sapiens; identical to SEQ ID NO: 31247
  chr16:2540434-2540993
  hypo

SEQ ID NO: 38164 - DNA, 64 bp, Homo sapiens; identical to SEQ ID NO: 20279
  chr16:28183893-28183957
  hypo

SEQ ID NO: 38165 - DNA, 358 bp, Homo sapiens; identical to SEQ ID NO: 18430
  chr16:311205-311563
  hypo

SEQ ID NO: 38166 - DNA, 284 bp, Homo sapiens; identical to SEQ ID NO: 20281
  chr16:31131573-31131857
  hypo

SEQ ID NO: 38167 - DNA, 384 bp, Homo sapiens; identical to SEQ ID NO: 25156
  chr16:31138407-31138791
  hypo

SEQ ID NO: 38168 - DNA, 875 bp, Homo sapiens; identical to SEQ ID NO: 29927
  chr16:3238154-3239029
  hyper

SEQ ID NO: 38169 - DNA, 494 bp, Homo sapiens
  chr16:325107-325601
  binary
cggggccgcggaagcgggcgagggcgggacgagccgggcctcctctcccctatgtgctccccacccttgcacagcgcgctcagcagggctctgagaactgccagactccaggaaaacccaggcctaggccaccagcccagtgaccccagggcccagtgggaggcagggcgctcaccctcctccgagacgcagaacttctgggccaaccactgcacgacgtcgctgcctgcacgggagagacagaggtggagggaggccgaggcgcgcacgcacccccgccccggcgcgcctcacctgtcaccgcgtggggaatgacggtgaccagcaggcgctggctccgcatcttcacgccctggtcggggtcctgcatgctcacgaccacccgctccatctgggcggagggagtcgtcagggggtgtctggccgccccgcaaccctgattccctggcaccggccgggatgccccggatccgggagcgcggagattaacgcgc

SEQ ID NO: 38170 - DNA, 147 bp, Homo sapiens; identical to SEQ ID NO: 20285
  chr16:3900217-3900364
  hypo

SEQ ID NO: 38171 - DNA, 116 bp, Homo sapiens; identical to SEQ ID NO: 20286
  chr16:4557910-4558026
  hypo

SEQ ID NO: 38172 - DNA, 568 bp, Homo sapiens; identical to SEQ ID NO: 20287
  chr16:4802468-4803036
  hypo

SEQ ID NO: 38173 - DNA, 1300 bp, Homo sapiens; identical to SEQ ID NO: 13525
  chr16:58030214-58031514
  hypo

SEQ ID NO: 38174 - DNA, 161 bp, Homo sapiens; identical to SEQ ID NO: 20289
  chr16:67006210-67006371
  hypo

SEQ ID NO: 38175 - DNA, 80 bp, Homo sapiens; identical to SEQ ID NO: 20290
  chr16:672467-672547
  hypo

SEQ ID NO: 38176 - DNA, 374 bp, Homo sapiens; identical to SEQ ID NO: 33476
  chr16:68504020-68504394
  hyper

SEQ ID NO: 38177 - DNA, 37 bp, Homo sapiens; identical to SEQ ID NO: 20292
  chr16:69334756-69334793
  hypo

SEQ ID NO: 38178 - DNA, 96 bp, Homo sapiens; identical to SEQ ID NO: 20293
  chr16:69906932-69907028
  hypo

SEQ ID NO: 38179 - DNA, 364 bp, Homo sapiens; identical to SEQ ID NO: 13539
  chr16:70754664-70755028
  hypo

SEQ ID NO: 38180 - DNA, 116 bp, Homo sapiens; identical to SEQ ID NO: 20295
  chr16:71754757-71754873
  hypo

SEQ ID NO: 38181 - DNA, 477 bp, Homo sapiens; identical to SEQ ID NO: 20296
  chr16:72991953-72992430
  hypo

SEQ ID NO: 38182 - DNA, 234 bp, Homo sapiens; identical to SEQ ID NO: 13541
  chr16:74908874-74909108
  hypo

SEQ ID NO: 38183 - DNA, 110 bp, Homo sapiens; identical to SEQ ID NO: 20298
  chr16:81700929-81701039
  hypo

SEQ ID NO: 38184 - DNA, 543 bp, Homo sapiens; identical to SEQ ID NO: 20299
  chr16:84132267-84132810
  hypo

SEQ ID NO: 38185 - DNA, 109 bp, Homo sapiens; identical to SEQ ID NO: 15651
  chr16:84170884-84170993
  hypo

SEQ ID NO: 38186 - DNA, 548 bp, Homo sapiens; identical to SEQ ID NO: 36429
  chr16:85007504-85008052
  hypo

SEQ ID NO: 38187 - DNA, 428 bp, Homo sapiens
  chr16:85671747-85672175
  hypo
cgccatctgactgcgattgcctccgcgtctctcctctcattgtgtctcaagggtgtagtttaaaaattcaattcagacgaagctgtggcatgcgctgccctgggagaaaggctgggaaggagaggaagaggaggccctcgctgggatttatttttctggaggcgctgagacgtcttctcttcttcaaagctcagtcacccgcccaccagcgcgggccagacacccttccccagggccagcctgaccctttaacctactcacctactcactgccgaggctggggcgctttgggcaagggcagacgcttgcgaatcgccgatgcatgccccagcactttccttccttgctgtgtgatccgggcaggccgctttgcctctctgagcttccactttttcttgggtgaggagcaggtctctacctcatgaatc

SEQ ID NO: 38188 - DNA, 760 bp, Homo sapiens
  chr16:86532210-86532970
  hyper
cggcgggagacgcgcggggcctgggtttccagaaggtgcctccccaagggggcgggccccgggtgcaccccggtgccccgaggccccccagcctgaaggcaggccgaatccgcccttgaccaagtcgaggccaagcgagtgcgaaaaaggcgtgtatgaggggccccaagaccttttcccagcctgaaaagttttcggcgttgcagctctggcgttcctggaccccgggcgctcaggcgcgcacccctcccctgggctggtgaaggtataataaacacggcgttcacgccggcaggacccatcattagcccaaaccgcggtggaaaggagcgctcggttgcagagctagaacagcagttaccagccggggctgcctggcaccctcccgccgccgccggcgccttcctggccgccgagctgcctcgcagccaggtcccaatgccgaccccaaggcgtgccgcccctggaacccgcgggggtcccaggtccacgccaaaagaaacgcgctctgcttctcccgggcgtcagatgcaccgcctcggccggacgccagccctggacaaatttttccgggaaggcgacgtaaagaatgtcagacttgcaaaaccagagtgcgcctcggttgcttaaaatggagagagagagagagagagagaagtcaggggcaggtgggcagcggtggaggggcggctgccctggagtcacggacttcagcagaggcggcttagcaaaaaacgcagaaaaacgtgggggcggcagc

SEQ ID NO: 38189 - DNA, 728 bp, Homo sapiens; identical to SEQ ID NO: 20305
  chr16:87739334-87740062
  hypo

SEQ ID NO: 38190 - DNA, 426 bp, Homo sapiens; identical to SEQ ID NO: 20306
  chr16:87744572-87744998
  hypo

SEQ ID NO: 38191 - DNA, 214 bp, Homo sapiens
  chr16:87864425-87864639
  hypo
cgtgccgtcgagaggccgccggctccctgtatccttgaggcatgtccacgtcccagagcaggaggttggaacagaacggcatcccgaggacccctagccgaggcgggaaggtaagaggctgacgtcgtgcgtgggccccgccggccccagtgggaagcagtggtgcgtgcctccagggagcacttctcctggacccggggccgtggctgcctac

SEQ ID NO: 38192 - DNA, 353 bp, Homo sapiens; identical to SEQ ID NO: 20308
  chr16:88037900-88038253
  hypo

SEQ ID NO: 38193 - DNA, 595 bp, Homo sapiens; identical to SEQ ID NO: 33490
  chr16:88952189-88952784
  hypo

SEQ ID NO: 38194 - DNA, 254 bp, Homo sapiens; identical to SEQ ID NO: 20309
  chr16:89445385-89445639
  hypo

SEQ ID NO: 38195 - DNA, 58 bp, Homo sapiens; identical to SEQ ID NO: 18470
  chr16:89446081-89446139
  hypo

SEQ ID NO: 38196 - DNA, 64 bp, Homo sapiens; identical to SEQ ID NO: 20311
  chr16:89577046-89577110
  hypo

SEQ ID NO: 38197 - DNA, 312 bp, Homo sapiens; identical to SEQ ID NO: 20312
  chr16:89871397-89871709
  hypo

SEQ ID NO: 38198 - DNA, 426 bp, Homo sapiens; identical to SEQ ID NO: 25208
  chr16:89883921-89884347
  hypo

SEQ ID NO: 38199 - DNA, 862 bp, Homo sapiens
  chr16:89899939-89900801
  hypo
cgccctgctgggctcaggggcaggttcagctcaggcctacggcctgctgggcttgagaagcttcgcctttgtgcctcggtttccttctccgtgaaatgggaggtgcagcgtggtgctaacgtctgtgcagccctgggcacgcctggctccggaagcactggccagtggaggtggcagcaagggatctgcacctgtgcactcgctggacctgccttggggagcagcacgtgtgggtccaggctgcgaatcccgaccggattctcagggaggggttctgcaaggtgcacccggtgggggctgggagctcctccggggcgtgtttccctgtgacgtaaaatgacctctatccctgagccctcccatgtagaaagcgggaaggaggctggccgctgtgtgtgggtgtgggtgtgagctgggtgtgtctctgtgtgagctggggtttgtttgtagatggcattcccgatatagtctcacctctgagcaagggttacctcacaggaaggcagtcctgcagcaagactcttctctttacggagacatctgtgaacctgcctgcgctcgcggttggccgtcgtagaagcatggataagcatagcccgtgtgaatctgtgaacctgcctgcgctcgcggttggccgtcgtagaagcctggataagcatagcccgtgtgaatctgtgaacctgcctgtgctcacggttggccgtcgtagaagcatggataagcatagcccgtgtgaatctgtgaacctgcccgcgctcgcggttggccgtcgtagaaggccccataagcatagcccgtgtgaatctgtgaacctgcctgtgctcacggttggccgtcgtagaagcctggataagcatagccc

SEQ ID NO: 38200 - DNA, 209 bp, Homo sapiens; identical to SEQ ID NO: 6999
  chr17:16923475-16923684
  hypo

SEQ ID NO: 38201 - DNA, 203 bp, Homo sapiens; identical to SEQ ID NO: 13580
  chr17:17031200-17031403
  hypo

SEQ ID NO: 38202 - DNA, 98 bp, Homo sapiens
  chr17:17287170-17287268
  binary
cgacgcggggcgcggggcgatgcggcgcgccttggcttgccgggccttacgtctgcggatcttccgggccggctggttgaaccacgtggccacgcgcc

SEQ ID NO: 38203 - DNA, 410 bp, Homo sapiens; identical to SEQ ID NO: 20316
  chr17:19282076-19282486
  binary

SEQ ID NO: 38204 - DNA, 64 bp, Homo sapiens; identical to SEQ ID NO: 20317
  chr17:19842333-19842397
  hypo

SEQ ID NO: 38205 - DNA, 261 bp, Homo sapiens; identical to SEQ ID NO: 20318
  chr17:33344328-33344589
  hypo

SEQ ID NO: 38206 - DNA, 876 bp, Homo sapiens; identical to SEQ ID NO: 31338
  chr17:36104854-36105730
  hyper

SEQ ID NO: 38207 - DNA, 219 bp, Homo sapiens
  chr17:37183478-37183697
  hyper
cggggcggggcgcgcggttgtcaggggcgcaagcgtctcggggctgccagaatggctccggctcagggcgcggcgccagcgcctgtcatgtcccagctgcgcctctgggtcccacggcacctcctcaggttggcaactactgtggctactagtccaggaggctcagcctctggagtgggtccaggaccggctccagccgacttccgaccctctggggcc

SEQ ID NO: 38208 - DNA, 138 bp, Homo sapiens; identical to SEQ ID NO: 20320
  chr17:3860438-3860576
  hypo

SEQ ID NO: 38209 - DNA, 841 bp, Homo sapiens; identical to SEQ ID NO: 20321
  chr17:41245464-41246305
  binary

SEQ ID NO: 38210 - DNA, 230 bp, Homo sapiens; identical to SEQ ID NO: 15677
  chr17:43180339-43180569
  hypo

SEQ ID NO: 38211 - DNA, 31 bp, Homo sapiens; identical to SEQ ID NO: 18508
  chr17:46152418-46152449
  hypo

SEQ ID NO: 38212 - DNA, 307 bp, Homo sapiens; identical to SEQ ID NO: 20324
  chr17:523549-523856
  binary

SEQ ID NO: 38213 - DNA, 487 bp, Homo sapiens; identical to SEQ ID NO: 20325
  chr17:576348-576835
  binary

SEQ ID NO: 38214 - DNA, 235 bp, Homo sapiens; identical to SEQ ID NO: 15684
  chr17:59239030-59239265
  hypo

SEQ ID NO: 38215 - DNA, 848 bp, Homo sapiens; identical to SEQ ID NO: 20327
  chr17:63555681-63556529
  binary

SEQ ID NO: 38216 - DNA, 675 bp, Homo sapiens; identical to SEQ ID NO: 20328
  chr17:64298985-64299660
  binary

SEQ ID NO: 38217 - DNA, 319 bp, Homo sapiens; identical to SEQ ID NO: 31378
  chr17:66420425-66420744
  hypo

SEQ ID NO: 38218 - DNA, 509 bp, Homo sapiens; identical to SEQ ID NO: 20330
  chr17:71281749-71282258
  hypo

SEQ ID NO: 38219 - DNA, 61 bp, Homo sapiens; identical to SEQ ID NO: 20331
  chr17:7187868-7187929
  hypo

SEQ ID NO: 38220 - DNA, 207 bp, Homo sapiens; identical to SEQ ID NO: 20332
  chr17:72811689-72811896
  hypo

SEQ ID NO: 38221 - DNA, 79 bp, Homo sapiens; identical to SEQ ID NO: 20333
  chr17:72823386-72823465
  hypo

SEQ ID NO: 38222 - DNA, 508 bp, Homo sapiens; identical to SEQ ID NO: 20334
  chr17:72824032-72824540
  hypo

SEQ ID NO: 38223 - DNA, 141 bp, Homo sapiens; identical to SEQ ID NO: 8132
  chr17:73242514-73242655
  hypo

SEQ ID NO: 38224 - DNA, 149 bp, Homo sapiens; identical to SEQ ID NO: 18530
  chr17:73635145-73635294
  hypo

SEQ ID NO: 38225 - DNA, 383 bp, Homo sapiens; identical to SEQ ID NO: 24083
  chr17:73635994-73636377
  hypo

SEQ ID NO: 38226 - DNA, 220 bp, Homo sapiens; identical to SEQ ID NO: 20337
  chr17:73821496-73821716
  hypo

SEQ ID NO: 38227 - DNA, 264 bp, Homo sapiens; identical to SEQ ID NO: 20338
  chr17:74387398-74387662
  hypo

SEQ ID NO: 38228 - DNA, 82 bp, Homo sapiens; identical to SEQ ID NO: 18532
  chr17:74388687-74388769
  hypo

SEQ ID NO: 38229 - DNA, 396 bp, Homo sapiens; identical to SEQ ID NO: 31388
  chr17:74390245-74390641
  hypo

SEQ ID NO: 38230 - DNA, 417 bp, Homo sapiens; identical to SEQ ID NO: 33530
  chr17:76187077-76187494
  hypo

SEQ ID NO: 38231 - DNA, 360 bp, Homo sapiens; identical to SEQ ID NO: 17556
  chr17:76588327-76588687
  hyper

SEQ ID NO: 38232 - DNA, 178 bp, Homo sapiens; identical to SEQ ID NO: 20344
  chr17:7806544-7806722
  hypo

SEQ ID NO: 38233 - DNA, 162 bp, Homo sapiens; identical to SEQ ID NO: 8142
  chr17:78590602-78590764
  hypo

SEQ ID NO: 38234 - DNA, 423 bp, Homo sapiens; identical to SEQ ID NO: 20346
  chr17:79542405-79542828
  hypo

SEQ ID NO: 38235 - DNA, 524 bp, Homo sapiens; identical to SEQ ID NO: 20347
  chr17:80445750-80446274
  hypo

SEQ ID NO: 38236 - DNA, 478 bp, Homo sapiens; identical to SEQ ID NO: 20348
  chr17:80554494-80554972
  hypo

SEQ ID NO: 38237 - DNA, 295 bp, Homo sapiens; identical to SEQ ID NO: 20349
  chr17:80563218-80563513
  hypo

SEQ ID NO: 38238 - DNA, 96 bp, Homo sapiens; identical to SEQ ID NO: 20350
  chr17:80762951-80763047
  hypo

SEQ ID NO: 38239 - DNA, 169 bp, Homo sapiens; identical to SEQ ID NO: 20351
  chr17:80968060-80968229
  hypo

SEQ ID NO: 38240 - DNA, 32 bp, Homo sapiens; identical to SEQ ID NO: 20352
  chr17:9154702-9154734
  hypo

SEQ ID NO: 38241 - DNA, 766 bp, Homo sapiens
  chr18:12253867-12254633
  binary
cggcagcttccgcatccctgcagggaaccagcggctcgctgagcctggggctgggctctgggggactccagagctggaggcaagtggcgctcacatccgtctcctcacctgccccacccgtggcctgggtttaaaatccacatacccgtctttccgcggccaaagtgatgctgccaggattggttatgaccccaactgccccgacccccagaagtgcaaaacgaacaggctggcaagtgaccaaaagagacccggggagcatctgggcttccaaggtcctcggtacggcccaaggcagcgaaggacgcgcggctccaggctgcgggagccaggacgaccgggggctcccagagcgcgaagtcgcgatcctcggcggtggagagctcgtgccaaaacgtcctcccctgcgccagtcaggccttcgcggggctggcaggcgggcgggggcggggccgccgcactttaagaggctgtgcaggcagacagacctccaggcccgctaggggatccgcgccatggaggccgcccgggactatgcaggagccctcatcaggcgagtgccccgcgtccccctgattgccgtgcgcttccaatcgccttgcgttcggtggcctcatattcccctgtgcgcctctagtaccgtaccccgctcccttcagccccctgctccccgcattctcttgcgctccgcgaccccgcgcacacacccatccgccccactggtgcccaagccgtccagccgcgcccgcgggcagagcccaatccc

SEQ ID NO: 38242 - DNA, 180 bp, Homo sapiens
  chr18:13233060-13233240
  hypo
cgatggcagaggatctgcttgtcgccacacacagtgcgttagggatggagcttgccaccagtggcgccacctctttgcaggcgcctgtcctgaaggacgtgagcgggcgaagtgctcttgggtctgcttggacacgggtcactggccgctaagaaggcaaatgccatgccgttcagatac

SEQ ID NO: 38243 - DNA, 646 bp, Homo sapiens; identical to SEQ ID NO: 26527
  chr18:20911034-20911680
  hypo

SEQ ID NO: 38244 - DNA, 995 bp, Homo sapiens; identical to SEQ ID NO: 7060
  chr18:3879130-3880125
  binary

SEQ ID NO: 38245 - DNA, 61 bp, Homo sapiens; identical to SEQ ID NO: 20358
  chr18:45353804-45353865
  hypo

SEQ ID NO: 38246 - DNA, 607 bp, Homo sapiens
  chr18:45534410-45535017
  hyper
cggccgggagtcgggtctctgccagcccagcgctcggaatggagctttgtggggctggggaagcaacctttgccaatgggaagggggtgtcacagcgcctcattccctcccagcttgcgctcctcggaataatctccaacagcgtgcctagaagcacagctgcttttgtttcgggcgtcggtgcttcccagaatcccggtgcccggacccagccgccgaaccgaccccgccccgccgcgggctttgttccctgcgctgcgcactgcgagcggcggccacgcgggggcgctgggccgggggcgggggccagggctgggggtggggcgcgcccccgggccacctcccccgcccctcccggctcctccccgctcctcctcccatgccccggcccccgcctcgcagctgggctcggactcaggcttagccgcagtctgtgagcctcctccccgcacctggccggccaggccagcccagcctacttgtctcgctgcgcccggctgctgcctccgctccaggggtcggcgccgggacctcctcctccgccgccggcccgcccgcgtctacaccgcacacccgtggcgcgccctccaggggcggtttttctccc

SEQ ID NO: 38247 - DNA, 530 bp, Homo sapiens
  chr18:52495540-52496070
  hyper
cgagaggagtgtgtttctcactgcagcagttgagtcaccagcaagacttgcctgaggtgagctccgcacatccgcgttgggacttgcagacacgccttcttctcacacaaaccttacccagccccgccgccgcggcggactccgagggtggtgccaccagccctgccactcgcagtcctgacgggcaggggctgcggaccgcccggccttggacccatccggagccacaggttggaggagataagtagctgtccccgtgctcatcgccctgtggagcagatcctgtctccttgctgacggtggagcccgggagttccagggcttgggaaggggaaggaaacctctctgaaatctgacacctgctctcccggcaaggaaacttcgcaggctggtgagttgggaaggcgggctgctgctgctggaacgcgttcccacccacccgggtgctgcagcgccggcctgcgccgtgggaagtgaggcctctgtgtgtgtgtgtgtgcatgtgtgagtgcgtgtgcaccttcgatcgc

SEQ ID NO: 38248 - DNA, 66 bp, Homo sapiens; identical to SEQ ID NO: 20364
  chr18:60229150-60229216
  hypo

SEQ ID NO: 38249 - DNA, 744 bp, Homo sapiens
  chr18:70210281-70211025
  hyper
cgaaggaccgattccaacgacggaatcccaggcttgggttattctccagctctggtttccagaccacggggattctctctttctcagcggggcggcagcccctgcaggtttctgcgaacttacgcgcccgtctgcacttttgccccgtccccgctcctcccaggaaagcagacaggccatttcaataccagcccagagacacgcagagaagccgccccctcgccgcccacagcctcccattaactcttccagtattctttctaagaacagagaagttggctcttgataaatatccgctgtccgcagccccgatcctacatgatttcccttctctctctccacctcctccacccctcgatctggaccagggagagtcttcgttaaaatccacgcagaaggcgcttgcatgcggaggggagggcaggtcgggggtggttacctggaacatccatgctgggcgagctccgctgtccgcgaagttgctctgcttagagaaaatgaggcgagtgggagctgtcgggaggaggacacggagcgcgaccctgctcccagcgcgtggccaataaccgcgccgccccgccctgccgctttcccgcgccagcctgcgccgcttcaggggtgcaccacgccccgcgcgcccgcttaggcgccgcgcccgggaccgggaaccccgcgtctcgcccggctcagcgccccgcgctgtgcgcccaggtgcctccaacccctgggcttcgcgcccgcacc

SEQ ID NO: 38250 - DNA, 985 bp, Homo sapiens
  chr18:70534260-70535245
  hyper
cgcactgaaagaccgttctccggcaggttttgggatccggcgacggctgaccgcgcgccgcccccacgcccggttccacgatgctgcaatacagaaagtttacgtcggccccgacccgcgcgggactgcagggtccgccggagcgcggcgcagaggcttttcctgcgcgttcggccccgggaaaggggcgggagggctggctccgggagcgcacgggcgcggcggggagggtactcactgtgaagcacgctgcgcccatggatcatgtctgtgcgttacaccagaggctccgggctccactaattccatttagagacgggaagacttccagtggcggggggaggacagggtcgagaggtgttaaagacgcaaagcaagaaggaaataaaggggggccgagagggagaccgagaggaagggggagctccgagcccacgctgcagccagatccggatgagtccgtcctccgccccgggcgggctctcgctctcgctggccctcagcgccgcgcagccagcagcatccccaccgtgacgctcgcatcacacccgggcgccggccgccaccatccgcgccgccgccgtcaggaccctcctcccgggcatcgtcgccgccgcggggtcgggaggacgcggcgcgcgggaggcggcggtcgcagggcgagccccgggacgccccgagccggggccggggccggggagagggcgcagcgaggtgggggccagtccagaccgacggcagcgacggagcgggcggcggcggcggcgccggcggcggcggggtggctcagtccccagtctcagacgcgccgcgcagcaggtcggagcagcctccccgggaggatgtccagcggcagcgctcctcgctccagcccttggggatcttccgctgaggcattgaaggcaggaagaaggggtccgtcatcggctcgccgggctgcgcgccacctctgctatcttgcggaaagaggagcgggtgggtgggc

SEQ ID NO: 38251 - DNA, 211 bp, Homo sapiens; identical to SEQ ID NO: 20367
  chr18:72226558-72226769
  hypo

SEQ ID NO: 38252 - DNA, 183 bp, Homo sapiens; identical to SEQ ID NO: 20368
  chr18:72670022-72670205
  hypo

SEQ ID NO: 38253 - DNA, 227 bp, Homo sapiens; identical to SEQ ID NO: 20369
  chr18:72764607-72764834
  hypo

SEQ ID NO: 38254 - DNA, 176 bp, Homo sapiens; identical to SEQ ID NO: 20370
  chr18:74426512-74426688
  hypo

SEQ ID NO: 38255 - DNA, 770 bp, Homo sapiens; identical to SEQ ID NO: 20371
  chr18:77358223-77358993
  hypo

SEQ ID NO: 38256 - DNA, 814 bp, Homo sapiens; identical to SEQ ID NO: 31434
  chr18:8659272-8660086
  hypo

SEQ ID NO: 38257 - DNA, 991 bp, Homo sapiens
  chr18:907197-908188
  hyper
cgcacgccccacgcatcctctcctttgctttctgggcctccccattcgggtcttcgcgtgggtcagcgcccggtctcccagggcctttctcgtccccgcccgttgctgctttggggaggctcgggagccaggcggggaggggggcggtccttttccgtagacaggtgtgcgcgatcggcggagacgcctcggtttcccagcgcttgttgaggccgtggcccgcaggacgaccctttacccgcgaagggggggtgggcgggccgcccggcggggtaggagtggttgggtgtcgttgcctcctccttacctctgctcccacccccagtcctgggagaagagacaattctcagcggaggacttttatcacctgtgaaaatccgcgcgagccccttactttggatcctcgccgagctggggaggaacttgcactgaccacaccttctgtccccggccaccccgcaggccagaggaagaggcgtacggcgaggacggaaacccgctgccagacttcgatggctcggagccgccgggcgcagggagccccgcctccgcgccgcgcgccgccgccgcctggtaccgcccggccgggagaaggtgagattcgcgcggcctcgcgcacacccgcggctgggagctcgggactgcggtgacgggaggggcagtgtggtgacccacccaggatttttttttttttcccgtgaaagtcctcaagcctgtcctctccctggcccgatcctattgcagcgacagaaaatcagcagcgggcgggtctgtgtggacctgagggccgcgtggggaccgaggggggctgtggcccaaagagtggcagtgagtggcgtcaaggaacccacactccgcatctgccactcctagagccgggactagctcccgatcctagcagttgctctcgagatcatcccgggagttattggcgagttctgggcctctggaggtttccctgtcagcctccccggccgccgagggggcgcgc

SEQ ID NO: 38258 - DNA, 113 bp, Homo sapiens; identical to SEQ ID NO: 9297
  chr18:9196896-9197009
  hypo

SEQ ID NO: 38259 - DNA, 413 bp, Homo sapiens; identical to SEQ ID NO: 28772
  chr19:10370250-10370663
  hypo

SEQ ID NO: 38260 - DNA, 74 bp, Homo sapiens; identical to SEQ ID NO: 15734
  chr19:10687853-10687927
  hypo

SEQ ID NO: 38261 - DNA, 52 bp, Homo sapiens; identical to SEQ ID NO: 20378
  chr19:10941853-10941905
  hypo

SEQ ID NO: 38262 - DNA, 68 bp, Homo sapiens; identical to SEQ ID NO: 18583
  chr19:1179335-1179403
  hypo

SEQ ID NO: 38263 - DNA, 689 bp, Homo sapiens; identical to SEQ ID NO: 26560
  chr19:12175460-12176149
  hyper

SEQ ID NO: 38264 - DNA, 461 bp, Homo sapiens; identical to SEQ ID NO: 20380
  chr19:14263414-14263875
  hypo

SEQ ID NO: 38265 - DNA, 345 bp, Homo sapiens; identical to SEQ ID NO: 20381
  chr19:15073023-15073368
  hypo

SEQ ID NO: 38266 - DNA, 168 bp, Homo sapiens; identical to SEQ ID NO: 20382
  chr19:16661967-16662135
  hypo

SEQ ID NO: 38267 - DNA, 1277 bp, Homo sapiens; identical to SEQ ID NO: 34551
  chr19:1775741-1777018
  hyper

SEQ ID NO: 38268 - DNA, 537 bp, Homo sapiens; identical to SEQ ID NO: 31466
  chr19:1799819-1800356
  hypo

SEQ ID NO: 38269 - DNA, 793 bp, Homo sapiens; identical to SEQ ID NO: 26573
  chr19:18054252-18055045
  hypo

SEQ ID NO: 38270 - DNA, 341 bp, Homo sapiens; identical to SEQ ID NO: 20385
  chr19:1874698-1875039
  hyper

SEQ ID NO: 38271 - DNA, 207 bp, Homo sapiens; identical to SEQ ID NO: 20386
  chr19:18757941-18758148
  hypo

SEQ ID NO: 38272 - DNA, 301 bp, Homo sapiens; identical to SEQ ID NO: 19442
  chr19:18836823-18837124
  hypo

SEQ ID NO: 38273 - DNA, 165 bp, Homo sapiens; identical to SEQ ID NO: 6511
  chr19:18963604-18963769
  hypo

SEQ ID NO: 38274 - DNA, 270 bp, Homo sapiens; identical to SEQ ID NO: 15755
  chr19:19576172-19576442
  hypo

SEQ ID NO: 38275 - DNA, 274 bp, Homo sapiens
  chr19:19636892-19637166
  hypo
cgccagtgtcccctgattgcagagtgggcagcgcctggagctgtggaggagggtgtctgggggcgggctggcccgctgagcagcgcctctcttcacaggctacagcatgctggccatagggattggaaccctgatctacgggcactggagcataatgaagtggaaccgtgagcgcaggtagggcccctggtgggcgttgtctgaaagtgcccccccggcgagttgtcggggtcctgtagcattccgctgttgtctgtgctggcgaggggtgaac

SEQ ID NO: 38276 - DNA, 149 bp, Homo sapiens; identical to SEQ ID NO: 15756
  chr19:19719325-19719474
  hypo

SEQ ID NO: 38277 - DNA, 343 bp, Homo sapiens; identical to SEQ ID NO: 20392
  chr19:2000558-2000901
  hypo

SEQ ID NO: 38278 - DNA, 151 bp, Homo sapiens; identical to SEQ ID NO: 20393
  chr19:2041016-2041167
  hypo

SEQ ID NO: 38279 - DNA, 174 bp, Homo sapiens; identical to SEQ ID NO: 20394
  chr19:2236297-2236471
  hyper

SEQ ID NO: 38280 - DNA, 62 bp, Homo sapiens; identical to SEQ ID NO: 20395
  chr19:30502063-30502125
  hypo

SEQ ID NO: 38281 - DNA, 783 bp, Homo sapiens; identical to SEQ ID NO: 20396
  chr19:3105574-3106357
  hypo

SEQ ID NO: 38282 - DNA, 1485 bp, Homo sapiens
  chr19:31839941-31841426
  binary
cgcacccaaacaggagagcggcgcccggagttactcagtgcgggcagaagagcggggcgaggagcggggtcgcgcccgctggaggcgcggggcgagcggaggaagaggaggaggagagcagaaggaaggggaagcggctcgtacctgctgcgcgccggggcgcctgctgcttcctcctcggcatgatgcttctccggcgactgccactgccgccgccgccgccgctgccgggctgaggacagggagggagggggcggcgggcccgcgggggggcgaggcgggcctgctctcagcctcccccccggagagcggccgcccgcaggatgctgctgcgcccaggctctccgcgtcccccccgcgccgcgctccgccgcgaaccccgaacgtgcggagggaagaaggagggcgggcgagggaggctcggggagggaggagcacgggggggaggaggaggcagaggaggaggaggtggaggaggaggaggaggaccgcgctgccggcggaatgggaagtttgacaaatcgctccagaggccagaggaggagggggcggggaggagcggcggccctgcccccccccgccccgtccccagacgaggtgcgcggggttcggggctggggggcggggagagggcgggcagagcggtgggaggaggagcgcgggagcggcccggaccggtactgccccggcccccgcccctaggccgggggtcacggcatccggggggacgcgcagccgccgccgcggcccggggctcggcggtccagtcttctgcccgtggcgcggctggagcggcggcgtcggcaacaggcaagcttaaaggaaaaggagatgatcgtgtcaatcgcccgcccgcgggggcgccgcgcccccgcccccggccccaggcccgcgtgggacccccgccccgccagcgaaaggggtgccgcccctccgcctccgccccgtgcgcacacgcgggggcgcggcgccagccccgccgagcccgtcccggggcgctcgttaccccccacccctattcccacccagcgttcgtccccagccaccccccagctgccccacccggctcgcactcctctccacccgccgactccggagcccccagcgtggtccccgggccggggctggcgtcccccggggaagccagagcccacgggcaggccccctccagggaggaggcgggcgcgggccggggcgggtgggggcagccctcagaccccgcgccacccagctcctcccccaggacccgccgtagccacttcccccaattttttttccccggacaaactttcctgggcccgtcccgggggtcggtgtgggagggggttccttcaagtttcctctcctgactttgggatgatcagggtccctccaccccgcccctcgcccccgggagccgggccgcgccccccatccacggcgcgggccgatcctagggcgggacgggggcgggagaaggaaaccgggctcccctgcccatccccc

SEQ ID NO: 38283 - DNA, 38 bp, Homo sapiens; identical to SEQ ID NO: 8230
  chr19:32849484-32849522
  hypo

SEQ ID NO: 38284 - DNA, 478 bp, Homo sapiens; identical to SEQ ID NO: 20399
  chr19:36042055-36042533
  hypo

SEQ ID NO: 38285 - DNA, 529 bp, Homo sapiens; identical to SEQ ID NO: 23150
  chr19:37329089-37329618
  hyper

SEQ ID NO: 38286 - DNA, 952 bp, Homo sapiens
  chr19:38145965-38146917
  hyper
cgttttgcaggggaccttcatcctggggcgttcacctctgacttccctcttgggccttttcgctacggccgagcctaagtggctgaagcgcggacgaggatgcgcggggcctcggtctccaactgcaccacaggccgcacccacgaacctggtccggcacagttactaccgcccgggcctccaggcctcagggctgcagaagctcagtcccgggaaaaaaagcacaccggcctgaggctccacaggaaccttttctccaccttggcccggcctgcaaaacctggcccactccgcgctcttttccctcagaaaagcagcggccacagtggcgcccggctcccagccccagcctcacccgactcagaggatagcccagccctgggagtcagcggcgccagaatacgggagagcgcctgtctccgtcgcgaatgcgctagcgcgcgggggggcggaggcaagtcccgcagctgctccgggccgggaggggcgcgtggggccgggtctcggcggggatagtcgggccggggagacggagccagaggggccgcagtgtccctcgcctcaggcctctacctgtaatggccgccccgtgactgaccagtgccattaaagataatccaggcctgctcccctgtggacactgcggtccaaaatttaaaaaaacaatattccgcctttttatttttcatttggttctcggctcggagacaggcggaggctgcgagccccgccccgcccccagcgacgcctcaccggaacctttggaaatcggcttctgcctcgagtgcgcaagcgcgcggggggcgaacgctggggcccttcagggagcaagggagaagtgtggggccgcacctgccgaggggtcgggaggtttggaggagggtggaggttggctacaggatcccgatggggatggagtgttcaaatctaggcctgtagccgtgaccctggc

SEQ ID NO: 38287 - DNA, 485 bp, Homo sapiens; identical to SEQ ID NO: 27788
  chr19:39151314-39151799
  hypo

SEQ ID NO: 38288 - DNA, 301 bp, Homo sapiens; identical to SEQ ID NO: 20404
  chr19:40753417-40753718
  hypo

SEQ ID NO: 38289 - DNA, 1117 bp, Homo sapiens; identical to SEQ ID NO: 20405
  chr19:45647694-45648811
  binary

SEQ ID NO: 38290 - DNA, 579 bp, Homo sapiens
  chr19:46307556-46308135
  hypo
cgaccagctccagcacggggatgccctcgaagtccgggttctcctcgtaggagtcgcgcccagcaccaccttcctcctcctcgtcgccctcctcctcactaaactggtagaagcccagcgggctgacctgcgtggcggccgagatgcgggctatctgggcccgcaggtagttggcctcgttgcccgggaagggtgggtagctgacgactggcgtgtccaggtagcctgtgaagaacttcttgatctttcgggcgttcacgatctgggctggagtgacgtggggcagccgcgtccatggcaggcccggctcgttgcacacaaagtacaggtacttgttggcgcctgagcggctctcctccttggggatcacgggcggcggcttccatacggacttagggacgatgtccacggccttctcctcgtcctcctcgccctcctcctcgccgtgcgcctccatgacctcgccaccttccgtcatctcctccacctcctcctcctctgcctcctcctcgccctcccggaattccacctcggccaccaggtagctgcgtttgattcccaggatcttgccccagaagc

SEQ ID NO: 38291 - DNA, 130 bp, Homo sapiens; identical to SEQ ID NO: 20408
  chr19:4675518-4675648
  hypo

SEQ ID NO: 38292 - DNA, 642 bp, Homo sapiens; identical to SEQ ID NO: 20409
  chr19:4676075-4676717
  hypo

SEQ ID NO: 38293 - DNA, 68 bp, Homo sapiens; identical to SEQ ID NO: 19463
  chr19:47040909-47040977
  hyper

SEQ ID NO: 38294 - DNA, 112 bp, Homo sapiens; identical to SEQ ID NO: 8263
  chr19:47646754-47646866
  hypo

SEQ ID NO: 38295 - DNA, 83 bp, Homo sapiens; identical to SEQ ID NO: 8264
  chr19:47676020-47676103
  binary

SEQ ID NO: 38296 - DNA, 280 bp, Homo sapiens; identical to SEQ ID NO: 27804
  chr19:491326-491606
  hypo

SEQ ID NO: 38297 - DNA, 461 bp, Homo sapiens; identical to SEQ ID NO: 36580
  chr19:4986363-4986824
  hypo

SEQ ID NO: 38298 - DNA, 210 bp, Homo sapiens; identical to SEQ ID NO: 31514
  chr19:50129561-50129771
  hypo

SEQ ID NO: 38299 - DNA, 57 bp, Homo sapiens; identical to SEQ ID NO: 18629
  chr19:50130742-50130799
  hypo

SEQ ID NO: 38300 - DNA, 648 bp, Homo sapiens; identical to SEQ ID NO: 25402
  chr19:5023047-5023695
  hypo

SEQ ID NO: 38301 - DNA, 517 bp, Homo sapiens
  chr19:5064018-5064535
  hypo
cggcttgctctccttcccggcctgtgccagccacagggcagtgcgccagagccatcttgctgggtcacaggccggggccaccatagggctttgttgcgagggtggcggtcaccatggcttttccgttctgtttgcaacttggggtcccgggggcgccactggcgtttggatctgccgtggccctcctgggcttgcgtgggtggctcactctgccaggtggcctctgtccaacctgacacctggtctcgggtacttccagcgtgacgtgcacgggctctgcctccctcattctgtgtctgcgatgatagcgcattaaatggcgaaggcccgtctgcccaggcctgtgcagacactgtgaaattaactttctcaccctccagcacgcattgggctgtgccgacatctctgaagggctcttggtcggacctctgctcttggcacacattcctcggcggcgggggtggggggtagggaggagagcgttttcatccctggcacctaattgccgagagcttcc

SEQ ID NO: 38302 - DNA, 378 bp, Homo sapiens; identical to SEQ ID NO: 14808
  chr19:50708476-50708854
  hyper

SEQ ID NO: 38303 - DNA, 1262 bp, Homo sapiens; identical to SEQ ID NO: 20423
  chr19:51020756-51022018
  hypo

SEQ ID NO: 38304 - DNA, 298 bp, Homo sapiens
  chr19:5102582-5102880
  hypo
cggggccggggtggcatctggggccactcccggtctcttgctgttggcgttgggagggatctcgcaccacagcagggaatcgaggccccggctcccctcaggctctcccttcaccggcaatgggcggcgggcgacgggtgacgggtgacgggtgatgggtgcagcacccgccccgcccataggagagccctggtccactgtggcctgtggatgccgcccctgacgtcagcatctctctctggcctccctgggagcagtctcagagcagtgaagagctcttcacgtccggtgctgtggc

SEQ ID NO: 38305 - DNA, 303 bp, Homo sapiens; identical to SEQ ID NO: 20426
  chr19:5132575-5132878
  hypo

SEQ ID NO: 38306 - DNA, 610 bp, Homo sapiens
  chr19:52956621-52957231
  hyper
cgatagggtctttcctcaaaaacctggagaacagacgcgcccagagacaggccgaaggcagcgcagaccccgcccctcaccgccccaccctctcttctctcgggtctcgcccatccctggcctcagctgcgcgcggtttcctggaaacccggaagtgaatcatggggcgtgaactcgcaagcgcagtttcctgaagacccggaagccgatcgcgtggggagccggtcttggagcagcgggtgagtttccctttgtctagattagatccgcttccagcgcttctgtacctggtgttggcggaggggttcttacggatcttaaaatcctcccgccgttccctccatcctaggtatattaatacgtcgccaagaaattcggaggttaaaatcgcttggaggctgctggtcctttccctgagctctctgccttcgggccacgtagacgcttttcgtcccgtttacctgcttaaaaccctttactgaccactccttcggtcccgcgtcatgtaaaagccctcacccatgaggtgtattcacgcccagtgggtcctccaagcctcgcccttctggcctcttggagctcggtcccgcagtctcgatgcatcagcgcc

SEQ ID NO: 38307 - DNA, 711 bp, Homo sapiens
  chr19:53104083-53104794
  hyper
cgctcctccctggcctgagcactccgtcccgcatcccaggcggtggccctagggaagtctctgaagctgagcacagggtggactctgcccccaccgccgacccgccctccccgaccccgagtgaatggagaatagaaagggagaggatttctgttctgtcctgtgggccctcagtatgaaatcgtagttctgcccaggcaggactttgcatttcacattctagtttgcatccccgttccagacaattccagggcttttgactcatgcctcagccttcccggccagtctcccttccaaaacccgaaaaacggaggcgctgggctcaagactgactctgtcccgccccggccccgccctctgccggttctaaagggcaaagtctctccgcctcgcgccccgcttccgcctgcccaggccccgcccacctcctcctggaccccgcccaggcctggcttctgtcctgcgcgagcagatcagcgcgaacctggaagcggagagcgtggagtgaaggtcccacggcagcgcgtgagtttctctctgttttatattaagtctgtgcgtcccaggtccccggcgcgtctgtacctgggacgtggggtccccacagacctggaaattctcgcccgtcttcacccagagcaaattgagacttccctttgagagtccggggttcacttccttttgggtttaaaatcgccttgaagctggtgc

SEQ ID NO: 38308 - DNA, 386 bp, Homo sapiens; identical to SEQ ID NO: 15778
  chr19:55990556-55990942
  hypo

SEQ ID NO: 38309 - DNA, 70 bp, Homo sapiens; identical to SEQ ID NO: 20430
  chr19:56104277-56104347
  hypo

SEQ ID NO: 38310 - DNA, 202 bp, Homo sapiens; identical to SEQ ID NO: 20431
  chr19:6226077-6226279
  hypo

SEQ ID NO: 38311 - DNA, 87 bp, Homo sapiens; identical to SEQ ID NO: 20432
  chr19:8004774-8004861
  hypo

SEQ ID NO: 38312 - DNA, 71 bp, Homo sapiens; identical to SEQ ID NO: 20433
  chr19:8463144-8463215
  hypo

SEQ ID NO: 38313 - DNA, 798 bp, Homo sapiens; identical to SEQ ID NO: 28923
  chr19:8576026-8576824
  hypo

SEQ ID NO: 38314 - DNA, 1431 bp, Homo sapiens; identical to SEQ ID NO: 24205
  chr19:883424-884855
  hypo

SEQ ID NO: 38315 - DNA, 614 bp, Homo sapiens; identical to SEQ ID NO: 15795
  chr2:10334473-10335087
  hypo

SEQ ID NO: 38316 - DNA, 56 bp, Homo sapiens; identical to SEQ ID NO: 20438
  chr2:118736298-118736354
  hypo

SEQ ID NO: 38317 - DNA, 223 bp, Homo sapiens; identical to SEQ ID NO: 20439
  chr2:121108610-121108833
  hypo

SEQ ID NO: 38318 - DNA, 248 bp, Homo sapiens; identical to SEQ ID NO: 20440
  chr2:122094622-122094870
  hypo

SEQ ID NO: 38319 - DNA, 155 bp, Homo sapiens; identical to SEQ ID NO: 20441
  chr2:128284482-128284637
  hyper

SEQ ID NO: 38320 - DNA, 174 bp, Homo sapiens; identical to SEQ ID NO: 15805
  chr2:132269055-132269229
  hypo

SEQ ID NO: 38321 - DNA, 268 bp, Homo sapiens; identical to SEQ ID NO: 20443
  chr2:132270135-132270403
  hypo

SEQ ID NO: 38322 - DNA, 125 bp, Homo sapiens; identical to SEQ ID NO: 20444
  chr2:159528162-159528287
  hypo

SEQ ID NO: 38323 - DNA, 133 bp, Homo sapiens; identical to SEQ ID NO: 15812
  chr2:171730981-171731114
  hypo

SEQ ID NO: 38324 - DNA, 32 bp, Homo sapiens
  chr2:175196529-175196561
  hyper
cgctgctcagtcagatttgtttatgcagaatc

SEQ ID NO: 38325 - DNA, 81 bp, Homo sapiens; identical to SEQ ID NO: 20446
  chr2:175431799-175431880
  hypo

SEQ ID NO: 38326 - DNA, 353 bp, Homo sapiens; identical to SEQ ID NO: 20447
  chr2:178483339-178483692
  hyper

SEQ ID NO: 38327 - DNA, 193 bp, Homo sapiens; identical to SEQ ID NO: 20448
  chr2:182756176-182756369
  hyper

SEQ ID NO: 38328 - DNA, 182 bp, Homo sapiens; identical to SEQ ID NO: 23193
  chr2:188418970-188419152
  hyper

SEQ ID NO: 38329 - DNA, 302 bp, Homo sapiens; identical to SEQ ID NO: 20449
  chr2:219145053-219145355
  hypo

SEQ ID NO: 38330 - DNA, 372 bp, Homo sapiens; identical to SEQ ID NO: 20450
  chr2:224808923-224809295
  binary

SEQ ID NO: 38331 - DNA, 54 bp, Homo sapiens; identical to SEQ ID NO: 20451
  chr2:231977489-231977543
  hypo

SEQ ID NO: 38332 - DNA, 168 bp, Homo sapiens; identical to SEQ ID NO: 20452
  chr2:236603384-236603552
  hypo

SEQ ID NO: 38333 - DNA, 924 bp, Homo sapiens
  chr2:237072775-237073699
  hyper
cgtggggaggtgacggcctgtaagtagtaaaaattaagtcaatattagtactaacccatggcgggccgcgcttccccttcttcggctgagaacctcgccgagggccgagcgccgctgcatcgcagcggctcaccggcctcccctccttcccccactcgaaaggctgaggctggcgaagccccggcttctctcgcgcttcgggctgctggcttggtggcaccacgctcacactcgctggcccgctgaacgcccctgggcctgtccgccgcagtatctggcggcgcgcttcggggtccggcagcgagcggacagggctctgagcgcagggccggggttgggacaggagtgggcttggggaccaggcacgccccaccgagatggggaggcgcgcagctccccgtcccttgcagaccgactcccagctcccctgcgtagcctctcccgttttccccctttgtggtgcggactaccggggcgtccttggggtggggcggtgcccgggtcccgccccctcgaccccgcccggagggggaggtgccggggccgggggcgctccagccagcctccgcctccgactgagggctgccgggaagccggctgggctcgctgggtttttgctcctgtcgccagataacgcccggagcctgatttatggaccctccactctgccggcaggcgagcaccgcttcttttcgggccggagatatttgtaaaggaaagacgtttcctccctggctgtagtcgatttggagcatcaggagtttgtgcaaagccaccaatacccgcactcgcttgcctcctccgggcacccacctcctcctctgccgaagtttgccggcctactaggtatcgattaggctgtgcaaaagggggagatagatttctaaggtgagaattaggttttcttaaattcgtaatcctatc

SEQ ID NO: 38334 - DNA, 34 bp, Homo sapiens; identical to SEQ ID NO: 18666
  chr2:238934785-238934819
  hypo

SEQ ID NO: 38335 - DNA, 270 bp, Homo sapiens; identical to SEQ ID NO: 20454
  chr2:239074309-239074579
  hypo

SEQ ID NO: 38336 - DNA, 67 bp, Homo sapiens; identical to SEQ ID NO: 15818
  chr2:239082208-239082275
  hypo

SEQ ID NO: 38337 - DNA, 98 bp, Homo sapiens
  chr2:239083093-239083191
  hypo
cgtgtgagagagcactccgcaaatgccacggctgcgcatgggcgtttaagatcaccacggggctcccaaatcatggaccaagcaagttcaggagatgc

SEQ ID NO: 38338 - DNA, 244 bp, Homo sapiens; identical to SEQ ID NO: 20457
  chr2:241286564-241286808
  hypo

SEQ ID NO: 38339 - DNA, 755 bp, Homo sapiens; identical to SEQ ID NO: 24252
  chr2:242004407-242005162
  hypo

SEQ ID NO: 38340 - DNA, 471 bp, Homo sapiens
  chr2:242009173-242009644
  hypo
cgtgccagcccacaccccgcctcggcactgtaccattctccataataaagaatctggcttccagcaaggctgcggcagcccatgtccggttctcaaaccgtgttcttgccagaagaccctgtgggcaccccctcacctctccctgctcctgcctcatccagggcccctgcctccagcaaacctgaccgccgcccgagtcactgccacctctgcccacgtggtctgggatgccccgactccaggcagcttgctggaggcttatgtcatcaatgtgaccaccagccagagcaccaagagccgctatgtccccaacgggaagctggcgtcctacacggtgcgcgacctgctgccgggacggcggtaccagctctctgtgatagcagtgcagagcacggagctcgggccgcagcacagcgagcccgcccacctctacatcatcacctgtgagtgccgtgggccctgcgcgtgggc

SEQ ID NO: 38341 - DNA, 339 bp, Homo sapiens; identical to SEQ ID NO: 15827
  chr2:242169887-242170226
  hypo

SEQ ID NO: 38342 - DNA, 326 bp, Homo sapiens; identical to SEQ ID NO: 20461
  chr2:242440848-242441174
  hypo

SEQ ID NO: 38343 - DNA, 243 bp, Homo sapiens; identical to SEQ ID NO: 20462
  chr2:24714924-24715167
  binary

SEQ ID NO: 38344 - DNA, 252 bp, Homo sapiens; identical to SEQ ID NO: 20463
  chr2:25075413-25075665
  hypo

SEQ ID NO: 38345 - DNA, 35 bp, Homo sapiens; identical to SEQ ID NO: 20464
  chr2:26688538-26688573
  hypo

SEQ ID NO: 38346 - DNA, 446 bp, Homo sapiens; identical to SEQ ID NO: 20465
  chr2:26986225-26986671
  hypo

SEQ ID NO: 38347 - DNA, 94 bp, Homo sapiens; identical to SEQ ID NO: 20466
  chr2:3294552-3294646
  hypo

SEQ ID NO: 38348 - DNA, 530 bp, Homo sapiens
  chr2:3352473-3353003
  hypo
cgatgcaggtaccgggcattttccagggaatcaacgactgaaaggagcgaggacctgaggcaacaccaggagctattaacccttcccagccaccactccccaggagagctggagctccagagtgagggatggcggcttccgactgtgcaggaggagaccagactccgttgtcacagaaggcaggggcagggctgcagtccacagccagtggagccttcccggcgtctctcctggtctgtgcacatgcgcacaggcgggctgctcgcagccggaaccatggggcccaggctgttcaggatggagctgtcctgattttcaggacatctcaccccagagacacggcatggcaacagcacgggtgcaccctttccacgtgtgtctgtacaaaagtgtacacttcaggtgcaagagcatacccatggcacatgcctcagagctgaactgcaaattcaaaggagagggaagcgagcagagagaggcagacatgcaggtttcagtcccgattctgccacgcaccagctccacactgc

SEQ ID NO: 38349 - DNA, 488 bp, Homo sapiens; identical to SEQ ID NO: 18679
  chr2:3418350-3418838
  hypo

SEQ ID NO: 38350 - DNA, 289 bp, Homo sapiens; identical to SEQ ID NO: 20470
  chr2:3469110-3469399
  hypo

SEQ ID NO: 38351 - DNA, 204 bp, Homo sapiens; identical to SEQ ID NO: 20471
  chr2:38742658-38742862
  hypo

SEQ ID NO: 38352 - DNA, 199 bp, Homo sapiens; identical to SEQ ID NO: 20472
  chr2:39663585-39663784
  binary

SEQ ID NO: 38353 - DNA, 70 bp, Homo sapiens; identical to SEQ ID NO: 27887
  chr2:43413645-43413715
  hypo

SEQ ID NO: 38354 - DNA, 686 bp, Homo sapiens; identical to SEQ ID NO: 18680
  chr2:44553759-44554445
  hypo

SEQ ID NO: 38355 - DNA, 537 bp, Homo sapiens; identical to SEQ ID NO: 20474
  chr2:47142873-47143410
  hyper

SEQ ID NO: 38356 - DNA, 854 bp, Homo sapiens
  chr2:5833353-5834207
  hyper
cggcaagctcaaggcccccgcggccgcgggcgccaaggcgggcgcgggcaaggcggcccagtccggggactacgggggcgcgggcgacgactacgtgctgggcagcctgcgcgtgagcggctcgggcggcggcggcgcgggcaagacggtcaagtgcgtgtttctggatgaggacgacgacgacgacgacgacgacgacgagctgcagctgcagatcaaacaggagccggacgaggaggacgaggaaccaccgcaccagcagctcctgcagccgccggggcagcagccgtcgcagctgctgagacgctacaacgtcgccaaagtgcccgccagccctacgctgagcagctcggcggagtcccccgagggagcgagcctctacgacgaggtgcgggccggcgcgacctcgggcgccgggggcggcagccgcctctactacagcttcaagaacatcaccaagcagcacccgccgccgctcgcgcagcccgcgctgtcgcccgcgtcctcgcgctcggtgtccacctcctcgtccagcagcagcggcagcagcagcggcagcagcggcgaggacgccgacgacctgatgttcgacctgagcttgaatttctctcaaagcgcgcacagcgccagcgagcagcagctggggggcggcgcggcggccgggaacctgtccctgtcgctggtggataaggatttggattcgttcagcgagggcagcctgggctcccacttcgagttccccgactactgcacgccggagctgagcgagatgatcgcgggggactggctggaggcgaacttctccgacctggtgttcacatattgaaaggcgcccgctgctcgctctttctctc

SEQ ID NO: 38357 - DNA, 203 bp, Homo sapiens; identical to SEQ ID NO: 20476
  chr2:62081268-62081471
  hyper

SEQ ID NO: 38358 - DNA, 953 bp, Homo sapiens; identical to SEQ ID NO: 27889
  chr2:66652787-66653740
  hyper

SEQ ID NO: 38359 - DNA, 218 bp, Homo sapiens; identical to SEQ ID NO: 20479
  chr2:74327579-74327797
  hypo

SEQ ID NO: 38360 - DNA, 104 bp, Homo sapiens; identical to SEQ ID NO: 20480
  chr2:85356682-85356786
  hypo

SEQ ID NO: 38361 - DNA, 572 bp, Homo sapiens; identical to SEQ ID NO: 20481
  chr2:98408820-98409392
  hypo

SEQ ID NO: 38362 - DNA, 196 bp, Homo sapiens
  chr20:23969236-23969432
  hypo
cgcgggtacctggctgcgcttattaatccgttaagctcactctgtcaccggcgccattaagtgctcacgcgcccactccctcaggtttaaaaggcgcgttgcccggcagcagaagaaactgctggcttcgcctttggccgagttggcggctggacgaggacgcagagcccagctctcgagagttcaagcaaccgac

SEQ ID NO: 38363 - DNA, 1310 bp, Homo sapiens; identical to SEQ ID NO: 37514
  chr20:2731109-2732419
  hyper

SEQ ID NO: 38364 - DNA, 237 bp, Homo sapiens; identical to SEQ ID NO: 20486
  chr20:32436267-32436504
  hypo

SEQ ID NO: 38365 - DNA, 266 bp, Homo sapiens; identical to SEQ ID NO: 31702
  chr20:32677630-32677896
  hypo

SEQ ID NO: 38366 - DNA, 138 bp, Homo sapiens; identical to SEQ ID NO: 18709
  chr20:33183813-33183951
  hypo

SEQ ID NO: 38367 - DNA, 86 bp, Homo sapiens; identical to SEQ ID NO: 20490
  chr20:33876250-33876336
  hypo

SEQ ID NO: 38368 - DNA, 846 bp, Homo sapiens; identical to SEQ ID NO: 33692
  chr20:35443740-35444586
  hypo

SEQ ID NO: 38369 - DNA, 249 bp, Homo sapiens; identical to SEQ ID NO: 29021
  chr20:40020340-40020589
  hypo

SEQ ID NO: 38370 - DNA, 141 bp, Homo sapiens; identical to SEQ ID NO: 37525
  chr20:42587850-42587991
  hyper

SEQ ID NO: 38371 - DNA, 57 bp, Homo sapiens; identical to SEQ ID NO: 20494
  chr20:43374349-43374406
  hyper

SEQ ID NO: 38372 - DNA, 67 bp, Homo sapiens; identical to SEQ ID NO: 20495
  chr20:47765244-47765311
  hypo

SEQ ID NO: 38373 - DNA, 50 bp, Homo sapiens; identical to SEQ ID NO: 15865
  chr20:47766299-47766349
  hypo

SEQ ID NO: 38374 - DNA, 224 bp, Homo sapiens; identical to SEQ ID NO: 24313
  chr20:47905365-47905589
  hypo

SEQ ID NO: 38375 - DNA, 75 bp, Homo sapiens; identical to SEQ ID NO: 20497
  chr20:48350342-48350417
  hypo

SEQ ID NO: 38376 - DNA, 522 bp, Homo sapiens; identical to SEQ ID NO: 20498
  chr20:48498752-48499274
  hypo

SEQ ID NO: 38377 - DNA, 242 bp, Homo sapiens; identical to SEQ ID NO: 13892
  chr20:49206898-49207140
  hypo

SEQ ID NO: 38378 - DNA, 155 bp, Homo sapiens; identical to SEQ ID NO: 25529
  chr20:49286725-49286880
  hypo

SEQ ID NO: 38379 - DNA, 909 bp, Homo sapiens
  chr20:55203944-55204853
  hyper
cggttgttgagtcgctccccaaatgcgcagtttcttaactccaggtgacatccgtcttttggaggaacgagtgaaggccgtttaggcgaaagaggggtgggtttcagtatttggatcccttcccccagctctgccaatctcaggtgtgtttacggtggaggtgacagaaggaaggcgcgtcgggggacccaggcctcgcaggtcttcggctgtcaacgaggcaccgcccactgactccgcgcttcgtccctcacagcgtggggctcggcgctgcgccaggcccgggtgcggggcggagctaggctgggactggctgggggccgccccgcccggcgcctgggcctccgcgccggcccccggggaggagttatgataatttccttctcattaaggcgctcgggtcccccggctatcgccaggacacactgttcgggcgcggctttccccgtccgcggagcggtcttgacactcgcggcggcagcatctacgctcgcagagccgccgatgcgtgtccagtgacccggacagcaaggcccgcgcgcggcgggggcggcggcagacgcctggtcaccgtgaccccgattttggatttaccgcttgggggctggggggatcctggatttaactggcgactgttttgggggacgccggacgccatgttgtggaaaataaccgataatgtcaagtacgaagaggactgcgaggtgagctggggctccggggtgcagccccgccccgccgaggacagtccgggaggcaggggccactggaccgaggtcggggacgagggcataggagccctggcctctcggtgggacgggatccacttctccggacaccccttagtccatttctgcggggcccctttcctgtatagggccttttcctaaatagcctcccctcgggaac

SEQ ID NO: 38380 - DNA, 64 bp, Homo sapiens; identical to SEQ ID NO: 20501
  chr20:56999390-56999454
  hypo

SEQ ID NO: 38381 - DNA, 305 bp, Homo sapiens; identical to SEQ ID NO: 20502
  chr20:57415535-57415840
  binary

SEQ ID NO: 38382 - DNA, 152 bp, Homo sapiens; identical to SEQ ID NO: 31728
  chr20:60756194-60756346
  hypo

SEQ ID NO: 38383 - DNA, 227 bp, Homo sapiens; identical to SEQ ID NO: 20504
  chr20:62242319-62242546
  hypo

SEQ ID NO: 38384 - DNA, 357 bp, Homo sapiens; identical to SEQ ID NO: 17761
  chr20:62252093-62252450
  hypo

SEQ ID NO: 38385 - DNA, 144 bp, Homo sapiens; identical to SEQ ID NO: 20506
  chr20:62371942-62372086
  hyper

SEQ ID NO: 38386 - DNA, 765 bp, Homo sapiens; identical to SEQ ID NO: 24333
  chr20:62383436-62384201
  binary

SEQ ID NO: 38387 - DNA, 73 bp, Homo sapiens; identical to SEQ ID NO: 20507
  chr20:62639433-62639506
  hypo

SEQ ID NO: 38388 - DNA, 1103 bp, Homo sapiens
  chr21:22369907-22371010
  hyper
cgtaaggtgccgctcccaacagcaatgggtcgagatgtagaggaaacactctgtacgttatttttccgcccaccctttagcgcctgaggagacagacagtgtagactttagggtacaattgcttcccctctgtcgcggcggggtggggagcgtgggaaggggacagccgcgcaaggggccagcctgctccaggtttgagcgagagagggagaaggaggtccacggagagacaagaatctccctcctcccacgcccaaaaggaataagctgcggggcacaccgcccgcctccagatcccccattcacgttgagccggggcgcgctcggggcggtcgcctgcagtatcagtatcagcatcagcatcagcatcagcatctgcatgagcatcagctcagctcagctcagctcagcatcagctcagctgtcctgaggcagccggcggctgtgaaggagctccaggctgcccccatccccacgcccttctcggctcagggcgtgcatgaacctgcggatggccggcgggcgagtggcgccttcgcgatcgcggccgcccctctaggcggaggcaccggggaccgaacccgtgacttcgagctccactgcggacgaatcccgggaccgcgcgcctcgcggaagagcggccgccgtgcagcgcggagggatacgcctcggccgcacctcccctcgccgcgcccccgcccccgccgccctccccgcccggctctgctgccgccgcggcggccgctgctgctgctgcttctgccgccgctgccgccgccgctgcctggatatagtgcggcaagagcggagcttgcagtcactttgcgaggaggagcgcgcgggctgcgggcggctggggcaccgcgggagcggcggcggcggctctagcagaggcggccggggcagcgaaaggttctctctccagggctggacttaataactttgaaactgtccaccggtgtcacgtcctgaacatgagcctcctcctctccttctacctgctggggttgcttgtcagtagcgggcaaggtaggagtgtggcgctttattgcatttactttccctcccccttccacccggccaagagaggcaaagagggaggc

SEQ ID NO: 38389 - DNA, 53 bp, Homo sapiens; identical to SEQ ID NO: 8419
  chr21:34033597-34033650
  hypo

SEQ ID NO: 38390 - DNA, 157 bp, Homo sapiens; identical to SEQ ID NO: 20510
  chr21:34350777-34350934
  hypo

SEQ ID NO: 38391 - DNA, 749 bp, Homo sapiens; identical to SEQ ID NO: 9589
  chr21:40316188-40316937
  hypo

SEQ ID NO: 38392 - DNA, 51 bp, Homo sapiens; identical to SEQ ID NO: 20512
  chr21:40580603-40580654
  hypo

SEQ ID NO: 38393 - DNA, 165 bp, Homo sapiens; identical to SEQ ID NO: 20513
  chr21:42780066-42780231
  hypo

SEQ ID NO: 38394 - DNA, 648 bp, Homo sapiens; identical to SEQ ID NO: 33741
  chr21:43239707-43240355
  hypo

SEQ ID NO: 38395 - DNA, 93 bp, Homo sapiens; identical to SEQ ID NO: 20516
  chr21:43430373-43430466
  hyper

SEQ ID NO: 38396 - DNA, 265 bp, Homo sapiens; identical to SEQ ID NO: 20517
  chr21:44441284-44441549
  hypo

SEQ ID NO: 38397 - DNA, 330 bp, Homo sapiens; identical to SEQ ID NO: 20518
  chr21:44448081-44448411
  hypo

SEQ ID NO: 38398 - DNA, 128 bp, Homo sapiens; identical to SEQ ID NO: 20519
  chr21:44451419-44451547
  hypo

SEQ ID NO: 38399 - DNA, 703 bp, Homo sapiens; identical to SEQ ID NO: 18732
  chr21:45345807-45346510
  hypo

SEQ ID NO: 38400 - DNA, 105 bp, Homo sapiens; identical to SEQ ID NO: 13921
  chr21:45499846-45499951
  hypo

SEQ ID NO: 38401 - DNA, 326 bp, Homo sapiens; identical to SEQ ID NO: 20522
  chr21:45518831-45519157
  hypo

SEQ ID NO: 38402 - DNA, 663 bp, Homo sapiens; identical to SEQ ID NO: 7280
  chr21:46323288-46323951
  hypo

SEQ ID NO: 38403 - DNA, 210 bp, Homo sapiens; identical to SEQ ID NO: 20524
  chr21:47856005-47856215
  hypo

SEQ ID NO: 38404 - DNA, 293 bp, Homo sapiens; identical to SEQ ID NO: 29060
  chr22:18328049-18328342
  hypo

SEQ ID NO: 38405 - DNA, 568 bp, Homo sapiens; identical to SEQ ID NO: 23587
  chr22:18340837-18341405
  hypo

SEQ ID NO: 38406 - DNA, 388 bp, Homo sapiens; identical to SEQ ID NO: 20527
  chr22:19968748-19969136
  hypo

SEQ ID NO: 38407 - DNA, 997 bp, Homo sapiens
  chr22:20791329-20792326
  binary
cggctcctcgacgctcgcctgggtcaccaccctcccacccgcgcccgctctaagacgcgaatctgtctttccaagtctggcttgctccaggacctccccggctagcaccgctcctcctcccctgaccttcctcctcactcccactcccggctccagtcggactagtgcggggctttagcacatgcagttcctttggcttgaatgcccttccccagcttttccccgtggacttcacaactcggtcaagggtccctttttccaggtctttcctgatatcccggacaacgcgtgtcatcccctgggtgcccacggcactccatcctcccctcaggtgacttctcgtccagggttccctgggatgcactgtcgtggcccatggccgaggctgggcctggaacggagccgcgctggctagggagccgaaggggcccacacttggcgtaggaaggttccggtagccccctcccaatgcccggcgccgccacaccactgcccagagcgtccctctcgccccctcccccagccaggccggctcctacccgggagcacggcacacgttgcggccgcgagggttcagttcctgaggcgccacggtgtccggcagcatccagagcagcagcagcagcagcagcgacggcagcagcggtgacggcggccccccggctccccggcgccgcgccggcccggccccccggggccctgcgccctccatgaggcgcggggcaggcgcggggcgggcacgggcgcgggtgcggccgcagcgagagcggccggaagcggagtgcgaggccgggcggggggcggcaggaggggcgccgagccgggcaggaaattccacatcggctccctgatcccgggccagccgcggccggccaggcggcagcgcccgccccgcgctccagaccccaccctccggcctagccaccgcccctccgcgcagcccccgcccccatttggccgctcgcaaacttgggggcgaacttggaggaggcccgcc

SEQ ID NO: 38408 - DNA, 261 bp, Homo sapiens; identical to SEQ ID NO: 25580
  chr22:22036124-22036385
  hypo

SEQ ID NO: 38409 - DNA, 416 bp, Homo sapiens; identical to SEQ ID NO: 31772
  chr22:22057979-22058395
  hypo

SEQ ID NO: 38410 - DNA, 730 bp, Homo sapiens; identical to SEQ ID NO: 14935
  chr22:25959837-25960567
  hyper

SEQ ID NO: 38411 - DNA, 164 bp, Homo sapiens; identical to SEQ ID NO: 33758
  chr22:27019127-27019291
  hypo

SEQ ID NO: 38412 - DNA, 67 bp, Homo sapiens; identical to SEQ ID NO: 20532
  chr22:29076607-29076674
  hypo

SEQ ID NO: 38413 - DNA, 229 bp, Homo sapiens; identical to SEQ ID NO: 24376
  chr22:30084279-30084508
  hypo

SEQ ID NO: 38414 - DNA, 567 bp, Homo sapiens; identical to SEQ ID NO: 20535
  chr22:31522433-31523000
  hypo

SEQ ID NO: 38415 - DNA, 600 bp, Homo sapiens; identical to SEQ ID NO: 31783
  chr22:35848339-35848939
  hypo

SEQ ID NO: 38416 - DNA, 228 bp, Homo sapiens; identical to SEQ ID NO: 20537
  chr22:38528855-38529083
  hypo

SEQ ID NO: 38417 - DNA, 52 bp, Homo sapiens
  chr22:40991413-40991465
  hypo
cgcgcccggccgagaaatgccttttaaataaacataggcaatctctaccacc

SEQ ID NO: 38418 - DNA, 190 bp, Homo sapiens; identical to SEQ ID NO: 18750
  chr22:41536192-41536382
  hypo

SEQ ID NO: 38419 - DNA, 172 bp, Homo sapiens; identical to SEQ ID NO: 20539
  chr22:41593094-41593266
  hyper

SEQ ID NO: 38420 - DNA, 794 bp, Homo sapiens; identical to SEQ ID NO: 23218
  chr22:42679388-42680182
  hyper

SEQ ID NO: 38421 - DNA, 601 bp, Homo sapiens
  chr22:43659511-43660112
  hyper
cggctcggggagcggcagtgaaggctgcagacggcgaacacgcacagggcaacctccttcccccgggacacaccggcctcttgttccaagggaggactggctcaatcctgaccccgtccactttaaatacgggtatgcagcaacacagaatagatttaagaacacaaacaccctgctagttgtaataaagacaaaaacgtctaaagttaaaaatcaaacaaacaaatggaaatgaggaagcctgcattttgcccggcactgtaactcctggtttcacctgattttgcgactcatatttcctcaccttgattttctcactaatcaatcaaattgttggaatgacgcagagtctaactaagcaacgagttagcacggaaagcgctttcatgctgctgccctgcacagaagctgcaagttcacacggaaagaccctttccgctggctcgattccaaaacagcatcagcgcctgagtcacacagatagtggcgtgcggtcaacgcttaacagccggcaggggtggaggctgatttgcagtatttaccaatttacgtgggataaatacgccagccacggctaatttcaaggtaccagggagatgtc

SEQ ID NO: 38422 - DNA, 976 bp, Homo sapiens
  chr22:47298509-47299485
  hypo
cgctgtgtccgctaaaccagcccttccactgagctgactcttcgcctccactcagagtcccgttcaagtgggcacgttgttttcacctttcctgcgataactgcaagcaacacacctgcatttttgacacacaaagttgtaatggttgtgattcccgaagaacaccagcagacagacacccggtgggcacgtggggacacgaagactcagatgtctctgtcctcagcagcgcacagttgaagtgagggatgaagacagatgtgcgtgaaacccagagagatcatatacagttgtcaatgaaaccacagtttgtatcctgccgactgcattccagggtggctgaaagaattggagaagacagcccgaggaggggcagcgtatggggcagtccactctggagggtcatgcccaattgctggggccgcctcacgtctctgctctgtgatttcttctatttcctggcccggttgggccgtggatctctccctggtgcacctggagtctctgtggatctctttcctcaggggactctgcaacccagcctcacgccctgcagggggtcacagacctcagcctggtgggcgttcgggaccgagggctgagggccgagggttgaggtgaagtgcagtggcacagccatcccaggctgcaggcgaaggggctccccttcgagaacccacaggatggtagcagagcgaagttcagcctgcgggggcgtctgtactcggggaagctgtggaccaggcatggagccagcctgtttgccctccccgccctgatggctgctccggctggctaggcctcttctctgagattcttggcttagtacctctggcttttgccgcttgaatttggggacctgtcggctcttcctgtttcgcttcagtggacttccaccctagctctcgcctctggttgctgctctgagcgtgagtctagagggaccagcaaggtcctgagggagttgcgaggaatc

SEQ ID NO: 38423 - DNA, 398 bp, Homo sapiens; identical to SEQ ID NO: 20542
  chr22:47534595-47534993
  hypo

SEQ ID NO: 38424 - DNA, 778 bp, Homo sapiens; identical to SEQ ID NO: 20543
  chr22:50894573-50895351
  hypo

SEQ ID NO: 38425 - DNA, 674 bp, Homo sapiens
  chr22:51111880-51112554
  binary
cgcagtgcaggacagttccgagaggccgctcagggctggggggcctggtgcaccccgatggggcggcggtgcctgagctcgtttctttactgagctcccccctcctccgcccactcatcaccccctcccgcgttgccacgacaacgcgtaaaactaaaattcacttcccagtcgcaggtggagactagtagcgccccctcccctaggcccttccccgtaggtcgcgcccccatcccgccgtcgctaaggtgacggggagggggcgacaggcgttggatccggaccggccaggggtccttggggggaagtccggagcaaactccccaaactaggctggcgtgggggagccgcgccgaacacgccagggcgcggtcgaaagggttaattcggagggcctctcgccgaggcggtgggaagggccccgggccctccccggtctggaggtccccgtggtccgacccccaggcctggggcgggggggggtccccgccatctcctccaggcccgaagctgggggtcggtggagtgggggggagaagccgccacctccggaaattaattgtttttctttccccttctcgccctaccttggtcttcgtgccccgacgcggcccccaccccagctccgggaccccttcctccgccgcacccgccccggtggtccgcggatgccc

SEQ ID NO: 38426 - DNA, 546 bp, Homo sapiens; identical to SEQ ID NO: 20545
  chr3:11655438-11655984
  hypo

SEQ ID NO: 38427 - DNA, 84 bp, Homo sapiens; identical to SEQ ID NO: 18760
  chr3:121500635-121500719
  hypo

SEQ ID NO: 38428 - DNA, 435 bp, Homo sapiens; identical to SEQ ID NO: 20547
  chr3:124716572-124717007
  hypo

SEQ ID NO: 38429 - DNA, 79 bp, Homo sapiens; identical to SEQ ID NO: 20548
  chr3:12605281-12605360
  hypo

SEQ ID NO: 38430 - DNA, 175 bp, Homo sapiens; identical to SEQ ID NO: 20549
  chr3:128340992-128341167
  hypo

SEQ ID NO: 38431 - DNA, 92 bp, Homo sapiens; identical to SEQ ID NO: 20550
  chr3:130460761-130460853
  hypo

SEQ ID NO: 38432 - DNA, 506 bp, Homo sapiens; identical to SEQ ID NO: 25628
  chr3:131080684-131081190
  hyper

SEQ ID NO: 38433 - DNA, 53 bp, Homo sapiens; identical to SEQ ID NO: 20552
  chr3:15079942-15079995
  hypo

SEQ ID NO: 38434 - DNA, 264 bp, Homo sapiens; identical to SEQ ID NO: 31816
  chr3:15123770-15124034
  hypo

SEQ ID NO: 38435 - DNA, 104 bp, Homo sapiens; identical to SEQ ID NO: 20555
  chr3:170588570-170588674
  hypo

SEQ ID NO: 38436 - DNA, 51 bp, Homo sapiens
  chr3:182800469-182800520
  hypo
cgagagaacgagtgtggccagggcggtggctcacgtcggtaacgccaacac

SEQ ID NO: 38437 - DNA, 52 bp, Homo sapiens; identical to SEQ ID NO: 20556
  chr3:184042674-184042726
  hypo

SEQ ID NO: 38438 - DNA, 90 bp, Homo sapiens; identical to SEQ ID NO: 20557
  chr3:186442824-186442914
  hypo

SEQ ID NO: 38439 - DNA, 352 bp, Homo sapiens; identical to SEQ ID NO: 20558
  chr3:193852659-193853011
  binary

SEQ ID NO: 38440 - DNA, 296 bp, Homo sapiens; identical to SEQ ID NO: 20559
  chr3:193969977-193970273
  hypo

SEQ ID NO: 38441 - DNA, 526 bp, Homo sapiens; identical to SEQ ID NO: 31839
  chr3:195536308-195536834
  hypo

SEQ ID NO: 38442 - DNA, 2308 bp, Homo sapiens; identical to SEQ ID NO: 33790
  chr3:195599104-195601412
  binary

SEQ ID NO: 38443 - DNA, 32 bp, Homo sapiens; identical to SEQ ID NO: 20564
  chr3:195709683-195709715
  hypo

SEQ ID NO: 38444 - DNA, 79 bp, Homo sapiens; identical to SEQ ID NO: 20565
  chr3:197612493-197612572
  hypo

SEQ ID NO: 38445 - DNA, 328 bp, Homo sapiens; identical to SEQ ID NO: 20566
  chr3:33216338-33216666
  hypo

SEQ ID NO: 38446 - DNA, 92 bp, Homo sapiens; identical to SEQ ID NO: 20567
  chr3:33437677-33437769
  hypo

SEQ ID NO: 38447 - DNA, 1985 bp, Homo sapiens
  chr3:44038670-44040655
  hyper
cgccgcctcccttgtgcactcggagggactacatcctcctcctctcccagcccctagtccaaacgggagtaggtaatggcggggaaagggggaggtgacgagagcggggagaaggaagtacatattttttaattgtgaaattgtctgtctgcgtgctgtgctctgggattctcttgtctcaatcaacttcaattttaacgtggccgtaacgttaagattaagacctagaaatgaaaacgtacccacctttcttattacaaaggtcgtttgttgttgttgtttttttaaaacaccaagtaaccccccccccccccccccacggacttatactttgtttatgagatttctccaaccttggtggtttggagaaatgaggtgggggaggggaggaccaagggcagcaagacgtccactacgaaaataagatacttactaatttaatagggccgttcctttttacataagatgctcccccaccccccaccaatttacaataggtaaactttgagcttcctcaaagtttcgctatctagcgtttatgcccgaagctttacgaataaactccctttccaggtaaacctgcccaacccttgtcctatgcccagcgaagcccaggtacgatgggtcaaggacccctggcttccacattgtctgagtcacgttccagttggaaaggccatcttgggcgagggacgtgttgcccgactggtctaaataaggaaagaaagtggagtaccaaagaatcaagggcctctgttcctccccatcccgccaccaccaccaccggtccccgggctctgctgagcgctgcggcggtcttggctgaaaactgcgtccccgcccaaatcgagcgcaaaactcccttggacagaagtttgaaagaatccagtgtagaaacagacttctccgtccaatttggttttaatcagtaatcatataagtatacccacataaccacctaagtggagagcagacgcccagattcacggtccccacgtgttgctggagttggcgcagacgcgtgtgcgggcatagcggcggacgtgacaccgcattttctccgaattcctgccatctagggtggtgccgccccaagagggggccgtggggaggtggggtaataggctgcgcaatccacttgctctgggggagcttagggttcagagcagagcgcaactccggggggctgtcgcacagccccattctcccacaccagaagagcaatgctccttatggatgattaatagccgggcttctcctgaccatgcggcgcgtccctgccggcaccacttagttgttttaatttgacctttattagcaacgtgctcccagaggctgcgagttggattcgcaccacgataacggccctctccccttccacccggccggcttcctgggaaggatcggggactgcagctcccgcgacgcctcctcctcctgcgcagggagcaggcctgagttcctccacgtaatgacctgggagacctcaggcatcccggggcctggtcggagggtcttcgggccctggagctgggcggtgtctgcagtgcaccgccgtgagtttctctcgggtacaatgtgctggtgtgcagagaggaggaaaggaaaaaaaaaaaacccaacaccactcttaagtggcactggcatctatgaagtggcagtggtctacactgagcgtgcccttgcctggaggtgtagggggcggttactgcagccgaggggagggtactgcggccaagggcagggcgagaggacagtcaaggccggctggccgcgtgggagcctttcctctccgggttcagcggccggaatcaccagcactgcggctaaaggggctggtaggctctcctgcaccccgcgtgctcctccgccttctctgtgtcccccggcttttccaggaggaagatggggtgcccatcgcgaatggggcgcgccgggccgcctggccgggcggtcacgtgtcccccctcccccgccactgcggc

SEQ ID NO: 38448 - DNA, 857 bp, Homo sapiens; identical to SEQ ID NO: 31847
  chr3:44063232-44064089
  hyper

SEQ ID NO: 38449 - DNA, 255 bp, Homo sapiens; identical to SEQ ID NO: 8514
  chr3:45719334-45719589
  hypo

SEQ ID NO: 38450 - DNA, 798 bp, Homo sapiens
  chr3:4909962-4910760
  binary
cgcggcctttgaggggaaagggccagggcctagacgttcccctcccgcgtggttttcccgtcagcagctttcgtctgcaagggaaagcggcggccccacccgcagacagctgcgaggcaccgcgccaagcgtatgcgcctgttcccaggcactccctcctccgccttcacccttttgccacctccgccctccacccagccccgccgtgcgcctgcgcgccccggcccgtgggccagcgggcagtctactcacgtgggcctccgcatggcccagcgccgccaagggcaaggcggagcctcgcgatcgccccgccccctccgtgccccgcctcctgtagggagcgcgggaccctcggctggcgcgggcacttcccagcccagcccggggcgccggcttcgccgcgtgcgcgtgcgcatggtggggtttggctggctgcgggatgcggtcgaggccgccgaggccgcaaactccagtgggaaggcggcgtgccgcggccggcttcggtggaggagggggcgtttccccggaaaaggaaggaagtgggtgtcacgggcctcaatacggcccctttgacgtcttgagtgggaaatcacaagatactgctccagattttcccattttatggctaaatccaaatgactcggaccccctgccccatcacatcaggaacttcagcagttccttccaccaaagctcaactattgctgcaagcgctttggtaatcacgagcattatctatgaagctactgctgtggtcagggccccagtcgtcctgctgagtagcagactttgaaagac

SEQ ID NO: 38451 - DNA, 97 bp, Homo sapiens; identical to SEQ ID NO: 20573
  chr3:49662414-49662511
  hypo

SEQ ID NO: 38452 - DNA, 557 bp, Homo sapiens; identical to SEQ ID NO: 15958
  chr3:49720262-49720819
  hypo

SEQ ID NO: 38453 - DNA, 387 bp, Homo sapiens; identical to SEQ ID NO: 20575
  chr3:49893744-49894131
  hyper

SEQ ID NO: 38454 - DNA, 143 bp, Homo sapiens; identical to SEQ ID NO: 20576
  chr3:50144939-50145082
  hypo

SEQ ID NO: 38455 - DNA, 62 bp, Homo sapiens; identical to SEQ ID NO: 20577
  chr3:51623983-51624045
  hypo

SEQ ID NO: 38456 - DNA, 111 bp, Homo sapiens; identical to SEQ ID NO: 20578
  chr3:57679987-57680098
  hypo

SEQ ID NO: 38457 - DNA, 902 bp, Homo sapiens
  chr3:64671307-64672209
  hyper
cgggggtcgacagagagtcggggaaccaacgtggattccctgctaaatgctatttggcagcgcaagaaggcggcctccccgccctgcctcagtccctagggaaacgtgcgccgcaggctccctctctccactccctggaacccgtgagtagtagaaaccccagaggaaccgaaatcacgtccggacagcctctccaggctgtctcccactatcccgtttctcccggccaccccgccagtagggtgcagagttggactgcgctgcacccccactctcggttccaccccaattcaaagcgtccggggtaggctccgccttctcccccgcccccagagccctcggcccacccttccgttcctgggacgggacctgctccctgtcaatccagttcagcctcagggttcctggcgcgtgaataaaggccctgagagaaagcggggactctagattacgcaccgccctccacaacacacactgaaggaactcccagtgccttgggcaggggatcctcagccccacatccccgatgcaaggcgcaccaataaggagtctggtccgccctgcgctcagcggctccgctcccgggtggccaagtttgctgcagggaaccgcaactccagtaactttctccgagtttggaaactgacttccaggccgcctcgcagcgttgggcaacgcgccgctgaaccgagtccaaactccagaaagctctgaaacatccagaagcccctgggggcgggtgtgtgcgctccacgccagtgtactcgcacgcacagagctagctacccaaaccatacgagtttctagctgatatttaacgccggagaggagcggagcctcgccacagtgagggtctctaggcttagaggacaattaagtcttctagaagcgggcgaggaggc

SEQ ID NO: 38458 - DNA, 69 bp, Homo sapiens; identical to SEQ ID NO: 20581
  chr3:87297469-87297538
  hypo

SEQ ID NO: 38459 - DNA, 342 bp, Homo sapiens; identical to SEQ ID NO: 19684
  chr4:10087759-10088101
  hypo

SEQ ID NO: 38460 - DNA, 413 bp, Homo sapiens; identical to SEQ ID NO: 20583
  chr4:10120458-10120871
  hypo

SEQ ID NO: 38461 - DNA, 58 bp, Homo sapiens; identical to SEQ ID NO: 20584
  chr4:10128984-10129042
  hypo

SEQ ID NO: 38462 - DNA, 168 bp, Homo sapiens; identical to SEQ ID NO: 15962
  chr4:103421142-103421310
  hypo

SEQ ID NO: 38463 - DNA, 358 bp, Homo sapiens; identical to SEQ ID NO: 20586
  chr4:13600978-13601336
  hypo

SEQ ID NO: 38464 - DNA, 378 bp, Homo sapiens; identical to SEQ ID NO: 32912
  chr4:140970253-140970631
  hyper

SEQ ID NO: 38465 - DNA, 194 bp, Homo sapiens; identical to SEQ ID NO: 19693
  chr4:146098925-146099119
  hyper

SEQ ID NO: 38466 - DNA, 388 bp, Homo sapiens; identical to SEQ ID NO: 31871
  chr4:153943319-153943707
  hypo

SEQ ID NO: 38467 - DNA, 227 bp, Homo sapiens; identical to SEQ ID NO: 20591
  chr4:154387493-154387720
  binary

SEQ ID NO: 38468 - DNA, 287 bp, Homo sapiens
  chr4:166795984-166796271
  hyper
cgcctctggcgccgctgccagcctctcgcgcgcgcggggcggcgcttccctctcgccgcctaaggtcggaggcgcacgtgcccggggccgctaccacgtgagcgcagcgcctgagggcgcccagcactggccgcggctcgtgtccgggcttcgggagctcctggttccttgctctattgggctgtggctgaggtgatccgcgctcagtgtggacgcacaagtaacttcgtaaaggttgcatggtggttggggctaacctagcagagcggtttgtaagcggaaggcac

SEQ ID NO: 38469 - DNA, 329 bp, Homo sapiens; identical to SEQ ID NO: 20592
  chr4:1738699-1739028
  hypo

SEQ ID NO: 38470 - DNA, 132 bp, Homo sapiens; identical to SEQ ID NO: 15970
  chr4:183808118-183808250
  hypo

SEQ ID NO: 38471 - DNA, 166 bp, Homo sapiens; identical to SEQ ID NO: 20594
  chr4:183809411-183809577
  hypo

SEQ ID NO: 38472 - DNA, 290 bp, Homo sapiens; identical to SEQ ID NO: 20595
  chr4:183815970-183816260
  hypo

SEQ ID NO: 38473 - DNA, 262 bp, Homo sapiens; identical to SEQ ID NO: 31881
  chr4:1960102-1960364
  hypo

SEQ ID NO: 38474 - DNA, 211 bp, Homo sapiens; identical to SEQ ID NO: 17871
  chr4:2639936-2640147
  hypo

SEQ ID NO: 38475 - DNA, 118 bp, Homo sapiens; identical to SEQ ID NO: 20597
  chr4:2640614-2640732
  hypo

SEQ ID NO: 38476 - DNA, 409 bp, Homo sapiens; identical to SEQ ID NO: 20598
  chr4:2688489-2688898
  hypo

SEQ ID NO: 38477 - DNA, 781 bp, Homo sapiens; identical to SEQ ID NO: 33825
  chr4:3252217-3252998
  hypo

SEQ ID NO: 38478 - DNA, 748 bp, Homo sapiens; identical to SEQ ID NO: 23274
  chr4:47034214-47034962
  hyper

SEQ ID NO: 38479 - DNA, 70 bp, Homo sapiens; identical to SEQ ID NO: 20601
  chr4:48887296-48887366
  hypo

SEQ ID NO: 38480 - DNA, 398 bp, Homo sapiens; identical to SEQ ID NO: 33827
  chr4:619513-619911
  hypo

SEQ ID NO: 38481 - DNA, 127 bp, Homo sapiens; identical to SEQ ID NO: 20603
  chr4:6717788-6717915
  binary

SEQ ID NO: 38482 - DNA, 108 bp, Homo sapiens; identical to SEQ ID NO: 11694
  chr4:71857989-71858097
  hypo

SEQ ID NO: 38483 - DNA, 309 bp, Homo sapiens; identical to SEQ ID NO: 31910
  chr4:83323427-83323736
  hypo

SEQ ID NO: 38484 - DNA, 798 bp, Homo sapiens
  chr4:87813027-87813825
  hyper
cgctgcgccaaaatgtgtctgatcgtggcagtgctgagcgaccaaaggctctgcctgcacaggaaccacccgccccggcccgggcactttgagcagagcaatccttcccaggttttccctcattcaaaacactcagcaccactcccgcgtccccgcccttgcacgccgattcggggcgagtcccctacccttccccggacggacgcgcagggcccgggaggaactggttcccgggacgggtgggggcctcggccgcccacagagcccgcggagaagggaacggcctcagcctcggctccttcccacacctgggccccaccctgcctccgactcgccaggaatgcgctgtgtgcgcggggcttccagggtggcgggtccccgcgagccggcgccggcggcctggttacccgggctccaggggctcggagggtcgcggccggggtactgaggtaagagcgcgctgcgctaagcgcacatggccgcgcacacgcctcggggccgcgccgcaggcacacgcctccttcccgctcgccgcgggcgccgagtctggggctcctcgcgtcacacgggagcctcaacaaagggctttgtggggccctccccacccgccagggaggggacgccgggcccgggagacgcgccccgcggggtccgctctctggtaaccgggccggggcaggccgcgctctcggaatccagccaaccagccagagagggctgtaagccagacctttcctgggaaggacgctttccaatgtagggggctgcatccaagcgatctggacttcgtttgcgggc

SEQ ID NO: 38485 - DNA, 69 bp, Homo sapiens; identical to SEQ ID NO: 20607
  chr4:9602020-9602089
  hypo

SEQ ID NO: 38486 - DNA, 57 bp, Homo sapiens; identical to SEQ ID NO: 20608
  chr4:99936215-99936272
  hypo

SEQ ID NO: 38487 - DNA, 87 bp, Homo sapiens
  chr5:10248604-10248691
  hypo
cgcgtaagtatgccaagcatgaagagttaacagatcaccaaccatcccatgacagtcagtcctccctgtttttagagacagaatctc

SEQ ID NO: 38488 - DNA, 468 bp, Homo sapiens; identical to SEQ ID NO: 19727
  chr5:10354870-10355338
  hyper

SEQ ID NO: 38489 - DNA, 309 bp, Homo sapiens; identical to SEQ ID NO: 18798
  chr5:107703589-107703898
  hypo

SEQ ID NO: 38490 - DNA, 603 bp, Homo sapiens
  chr5:112823700-112824303
  hyper
cgcctagacaaagacagcgctgggaaaagttggaccaactggcacccccgcaaggcgaacagagcagtcccctcggccttcgtggccgagccggctacgcgctctcggagtcgcggccaacttttcccgcgagcttctgagcaacttgccgcaagttggggcgagggggcagagcaggggtcaagggcgcgcggagggactgatctcgctcctgtcggtttcctcgtacctccccgcgtacctgctgatgtatccgtccccgtcgccgtcgcacgtctggaagaggcgccgcatcctctcctcctcgccggtgctggacgtgtcgctgctgctgctgctgctgccgctgccgccgccgccgccgccgctgctggagctccccgcagccgctgccgccgcggccgccatcatgcgcccgctccctacttgggaggaggagtacgcgcgaccgcagctggaatccgcgcggcgcgcaagctgcctgcagccccgaacttgcctgacaacggagcatgcccagtggccgccggggcgctccgggcgagggattccacctctccgggttttgcccggactgggaagatgggcgctctggaatcgccc

SEQ ID NO: 38491 - DNA, 280 bp, Homo sapiens
  chr5:121648762-121649042
  hyper
cgctactgcttgcagcgaagaaagtcttaggaaacaaaaaggcaacagcattgttgctcattttcaatggacggctaggaggggggaaacgtgttgttttttcctgtgggaacgttgctttccttgggaaagttaattaaggaagcattactgtcggtgccccttttcacttgctggaggcaggatcggattcctcttggctgttactgacaagtgcccatcaaagagcccggaggacgggagaactgctgcaggacagtctcgccacacaccacgtgcc

SEQ ID NO: 38492 - DNA, 269 bp, Homo sapiens; identical to SEQ ID NO: 20612
  chr5:126250520-126250789
  hypo

SEQ ID NO: 38493 - DNA, 362 bp, Homo sapiens; identical to SEQ ID NO: 20613
  chr5:131892939-131893301
  hyper

SEQ ID NO: 38494 - DNA, 94 bp, Homo sapiens; identical to SEQ ID NO: 20614
  chr5:134240165-134240259
  hyper

SEQ ID NO: 38495 - DNA, 192 bp, Homo sapiens; identical to SEQ ID NO: 20615
  chr5:134524773-134524965
  hypo

SEQ ID NO: 38496 - DNA, 102 bp, Homo sapiens; identical to SEQ ID NO: 20616
  chr5:136983271-136983373
  hypo

SEQ ID NO: 38497 - DNA, 196 bp, Homo sapiens; identical to SEQ ID NO: 20617
  chr5:137895663-137895859
  hypo

SEQ ID NO: 38498 - DNA, 125 bp, Homo sapiens; identical to SEQ ID NO: 20618
  chr5:14205146-14205271
  hyper

SEQ ID NO: 38499 - DNA, 981 bp, Homo sapiens; identical to SEQ ID NO: 25711
  chr5:142781722-142782703
  binary

SEQ ID NO: 38500 - DNA, 225 bp, Homo sapiens; identical to SEQ ID NO: 20621
  chr5:156895577-156895802
  hypo

SEQ ID NO: 38501 - DNA, 398 bp, Homo sapiens; identical to SEQ ID NO: 10672
  chr5:159707402-159707800
  hypo

SEQ ID NO: 38502 - DNA, 30 bp, Homo sapiens
  chr5:171682602-171682632
  hypo
cgcatgcagcaggcgctctccctgcgttcc

SEQ ID NO: 38503 - DNA, 108 bp, Homo sapiens; identical to SEQ ID NO: 20623
  chr5:172191069-172191177
  hypo

SEQ ID NO: 38504 - DNA, 291 bp, Homo sapiens; identical to SEQ ID NO: 20624
  chr5:172461494-172461785
  hypo

SEQ ID NO: 38505 - DNA, 93 bp, Homo sapiens; identical to SEQ ID NO: 20625
  chr5:175578331-175578424
  hypo

SEQ ID NO: 38506 - DNA, 211 bp, Homo sapiens; identical to SEQ ID NO: 20626
  chr5:175777496-175777707
  hypo

SEQ ID NO: 38507 - DNA, 59 bp, Homo sapiens; identical to SEQ ID NO: 20627
  chr5:176596473-176596532
  hypo

SEQ ID NO: 38508 - DNA, 93 bp, Homo sapiens; identical to SEQ ID NO: 20628
  chr5:177543589-177543682
  hyper

SEQ ID NO: 38509 - DNA, 294 bp, Homo sapiens; identical to SEQ ID NO: 20629
  chr5:177650761-177651055
  hypo

SEQ ID NO: 38510 - DNA, 1046 bp, Homo sapiens
  chr5:465064-466110
  hypo
cgctcctcctctgcggtgagatgccagagccgtggcggagcgaggaggagtgggctcagagcctccggggagccaccgggagccccagcctgggtttcaatgagggtgctcctggccgccagagccgtggagcctgccgctgaccgcgcgtgtctccccagaggatgacggccgaggcgcaccggcgcgtggtggtggagtacctgcgggcggtcatgcagaagcgcatttccttccggagcccggaggagcgcaaggagggtgccgagaagatggttagggaggcagagcagctgcgcttcctgttccggaagctggcgtccgtgagtgtcgcgcaggtccgggctggagaaggcctgtcgctccgcggccctgttcagcctccaccccgggactcgggccagtagatgggagtgtgtcgtgtgtttgtcaggcggggggagcctgggtccaggtcctgcctgaccttgtggttggacacgaatgtccacagaggtagacgcgccggccccgccggcttcccgaggccgcccacagctccctgacggacgcttcccagtctgtcctgcgctgcgaggtgctggctgcctcccacggtctcgccctcaccccagacccctggccctgtcactgagctttcagagtagatcctgaggagtcaggtgaagagggaggttcccagtcaggaaggggctcagccagaatccagctgctcccagcgccgcgggacagccgagggcggctcctcacattgctgctgccttccagggtttcggggaagacgtggacggatactgcgacaccatcgtggctgtggccgaagtgatcaagctgacagacccttctctgctctacctggaggtctccactctggtcagcaagtatccagacatcaggtaagggatgcacgtcttagaatcctgccttagaatcctggagtggagcggcaggtccctccttctgtctggggcgggtggggctcctggttcgcaagttcagccctgcagcacggcaagggttcaggtgcggcacagcggggcccaggc

SEQ ID NO: 38511 - DNA, 1069 bp, Homo sapiens; identical to SEQ ID NO: 24517
  chr5:54518558-54519627
  hyper

SEQ ID NO: 38512 - DNA, 54 bp, Homo sapiens; identical to SEQ ID NO: 20633
  chr5:667302-667356
  hypo

SEQ ID NO: 38513 - DNA, 330 bp, Homo sapiens
  chr5:67590957-67591287
  hypo
cgtttcttttgcctgcaggattatgcataattatgataagttgaagtctcgaatcagtgaaattattgacagtagaagaagattggaagaagacttgaagaagcaggcagctgagtatcgagaaattgacaaacgtatgaacagcattaaaccagaccttatccagctgagaaagacgagagaccaatacttgatgtaagtatttgaaatggaatcctatacatgaataattggtgattgctacaattcaggatgagttaatgcgttctcttttcaaaactgtttttcaggtggttgactcaaaaaggtgttcggcaaaagaagttgaac

SEQ ID NO: 38514 - DNA, 96 bp, Homo sapiens; identical to SEQ ID NO: 20636
  chr5:67717809-67717905
  hypo

SEQ ID NO: 38515 - DNA, 980 bp, Homo sapiens
  chr5:75698708-75699688
  binary
cgaagaagaagaacaaaagtcaacgtgaaatctccccagaggaaaaggaaccgcgctgtttgtccctcagtaactgagcaacaccccggacacgaagggctccctgtgacttctgcggtttttcttgcacttctccgcgttggttcacttccaccctcgaaactctccagaagcgagaaataaggcggggtggccgccacccccaggccaccagctgtgcgggggccccagctgcagggggtcccggcccagcgtccctctcggccccttccctctcccccgggggagaaggggcgggtccacgcggcctgggcgctgcgcccgacacgcggtaggggtcgctgcgtctcggcgcgcgctcccaccgcggtgaataacggggcctggctggaggagaaaggaaacctgctgcgggaggcggcggcgaccggccagggagcgagggaggagagttcacttttacttcagtgtcagcgcgcggcggccgtggctggctctggcgagagagcaccgagggagtgggtcgcagatcttcgggcggctaggggaaatcggcgagaggcgggatccgagcgcgccggcggggcgcagagcccgcgagcctggccagcgagggtagccgcggggggcgcgccccgggcgggcccccggagacgcgcaggatgccacacgaagagctgccgtcgctgcagagaccccgctatggctgtaagtgcgccgggcgcgcggggttcctgctggccttggggagctccctccccgaggacggcgttggagaagccgagggagccggttgcgcggcgcagaggaaattggaaggcagcaactgcgcggctggcaaagttgggagctggagttgcaaagggcagtgaatcgcgtccccccgctcctcccgccccccaattcctaatatccagctggcaacccagaccctccactccgcatacccaaacggggtgcgcgggcagtgcggggattgc

SEQ ID NO: 38516 - DNA, 142 bp, Homo sapiens
  chr5:79598641-79598783
  hypo
cgagagcagtgatatcgtcatgcatggtgagctggcagcaggtgtggatgggcggcggagtggagagggcgaggctctgtgctcgtggggaggatgcagtcttggcttcttttgttttgtttgttttttgagatggagtttc

SEQ ID NO: 38517 - DNA, 830 bp, Homo sapiens
  chr5:88179191-88180021
  binary
cggccggtcggattaaaagtaaccagactcgtccagaaaactgcgtccaggaaggaagtgacagaagacgaatgggaaaaggagaacagctcacagcgtttgaaacatcgcgtaaaaaagactgggggtggtgggggcgggggggattgaaggatactgggaggggaggcgggggtggtagggaagacggagcacgaatggttggggttctaagcagcacgtccgatgaaatgtcttttgcctccttttttccccctttatttaattttgtccttgcctttgcttcgcgctgcctttttctctccgtctctctctcccccacaatcccaaaccgttgactctttcctcgcgagctggagaaatcatcagtttcactcttgcaaaaggggggcgggactagacctcggagcattttaataaaacaaacatacagcagctccctcctcacccctccagtctcaactagattgataaattactccactacactactttaattatgtatatggtatgcagaataaatcactgaacatcagtacctcaatcaagcacttttaaatgataattgcatcttggtgaatcaatctttccattcctgacattttgctaattttagttttacggtggggtaatagcacatgccatacgcaaacctaatgacaattctttattgcacgaaatgaagacaacacggcgagctgcggctccctgctcctctcgcggcgcctctgcggaggacgctcggagagaacctagtctcccgctgcggcgcgctcgcttgctctccggggacgctgcgagccagccagcaggaaagtccttctaaagtc

SEQ ID NO: 38518 - DNA, 849 bp, Homo sapiens
  chr6:108487794-108488643
  hyper
cgaattctgagcgcccagggagcagcgcagcgcgcgactgacacccacctgtcccgcccaggagccttgcaggctggagggcagctggagagcggcggcgcccggcggcgaggcgggcgctgccggccgggactcgggcagcgcccaccaaccgctccgccccgggacagccagcatgagcaagccagccggatcaacaagtgggtacctctcgggccgccgtggggcctaggcgcgcagcctggggcgagcgagcggggaggctgggggaggtcctgcctggagcgctgcgaatctgagcccctgagagggattccagcgggcgtgtgcgttcggcccagacctgtagaccgtgagttggagcatttcgtggagaggggagagccgtttcgttgcctctggattgcttgatcccccctgtctggtgcggtgagaaggttacgacccgcgcagcccaccagtcggatgagttgtctccatttagccgccaggtgctggatgggggggccatgggggcgggaactgggccgcagctccaggcggtagcacaataacacactcgctcaaaactccgagctccagcgcgcaaaagcaactctgtgcaaagcggattttgaatggaatgctttgcaccccgtttctagctatttcaaataatcctgcaaactgggaagcagaaacaatttaaaagtcacattttccttaatcctaaatccgcgtaggtcataactggggaatttaaagtatggcgaaccactctagcaaagagaggaccaaatccctaatcccaaggacttttcgagccggagcccagcagaggcaggagtgcgcggcctgctccctccgtgc

SEQ ID NO: 38519 - DNA, 66 bp, Homo sapiens; identical to SEQ ID NO: 20640
  chr6:112021634-112021700
  hypo

SEQ ID NO: 38520 - DNA, 97 bp, Homo sapiens; identical to SEQ ID NO: 20641
  chr6:136980882-136980979
  hypo

SEQ ID NO: 38521 - DNA, 120 bp, Homo sapiens; identical to SEQ ID NO: 20642
  chr6:138132663-138132783
  hyper

SEQ ID NO: 38522 - DNA, 42 bp, Homo sapiens; identical to SEQ ID NO: 14133
  chr6:150962790-150962832
  hyper

SEQ ID NO: 38523 - DNA, 776 bp, Homo sapiens; identical to SEQ ID NO: 32036
  chr6:152622733-152623509
  binary

SEQ ID NO: 38524 - DNA, 150 bp, Homo sapiens
  chr6:157103458-157103608
  hyper
cgtaattgggacaaaacgtgtatatattataggagaagggtctttttaaaaagtgaaataagccatttgacgattcagtttattactagatttttgtaagatgagtattcagatggagcagtctcaaaaggaatattgaggtctactcac

SEQ ID NO: 38525 - DNA, 63 bp, Homo sapiens; identical to SEQ ID NO: 20645
  chr6:157159632-157159695
  hypo

SEQ ID NO: 38526 - DNA, 62 bp, Homo sapiens; identical to SEQ ID NO: 16031
  chr6:158057907-158057969
  hypo

SEQ ID NO: 38527 - DNA, 433 bp, Homo sapiens; identical to SEQ ID NO: 20647
  chr6:159045072-159045505
  hypo

SEQ ID NO: 38528 - DNA, 301 bp, Homo sapiens; identical to SEQ ID NO: 33877
  chr6:1708438-1708739
  hypo

SEQ ID NO: 38529 - DNA, 201 bp, Homo sapiens; identical to SEQ ID NO: 19817
  chr6:26025540-26025741
  hypo

SEQ ID NO: 38530 - DNA, 395 bp, Homo sapiens; identical to SEQ ID NO: 23326
  chr6:27059547-27059942
  hyper

SEQ ID NO: 38531 - DNA, 371 bp, Homo sapiens
  chr6:27300812-27301183
  hyper
cgcttccgctgcgccactctgctaagcggtttctgaagaccactgatcttaatttcaatcatcaaaatcacctttcagtaccgacaaaattttcattgtctaattatttcattttgtatctgatcgtttacactgtccctatctctgccaagcaagtcgaagattcgctacccgataatcagatggcctcaggtcataacctccagatctgtgcttttccaacctgccaaagatcgtctgagcctcttagcaagcactcgtttatcatagcgagcctaggaggagggcgccaagcaaaacactaggtgtagtcttctcgagtagaatccaggcagtcgtggagcgaacgcagctgccaccggagaggaatc

SEQ ID NO: 38532 - DNA, 149 bp, Homo sapiens; identical to SEQ ID NO: 20654
  chr6:33914107-33914256
  hypo

SEQ ID NO: 38533 - DNA, 97 bp, Homo sapiens; identical to SEQ ID NO: 20655
  chr6:36939067-36939164
  hypo

SEQ ID NO: 38534 - DNA, 158 bp, Homo sapiens; identical to SEQ ID NO: 20656
  chr6:37450665-37450823
  hypo

SEQ ID NO: 38535 - DNA, 99 bp, Homo sapiens; identical to SEQ ID NO: 20657
  chr6:47382546-47382645
  hyper

SEQ ID NO: 38536 - DNA, 105 bp, Homo sapiens; identical to SEQ ID NO: 32090
  chr6:4910879-4910984
  hypo

SEQ ID NO: 38537 - DNA, 95 bp, Homo sapiens; identical to SEQ ID NO: 20659
  chr6:6780570-6780665
  hypo

SEQ ID NO: 38538 - DNA, 587 bp, Homo sapiens; identical to SEQ ID NO: 25814
  chr6:73329621-73330208
  hyper

SEQ ID NO: 38539 - DNA, 980 bp, Homo sapiens; identical to SEQ ID NO: 35965
  chr6:73330635-73331615
  binary

SEQ ID NO: 38540 - DNA, 236 bp, Homo sapiens; identical to SEQ ID NO: 16049
  chr7:100064586-100064822
  hypo

SEQ ID NO: 38541 - DNA, 70 bp, Homo sapiens
  chr7:106802883-106802953
  hypo
cgagactccgtccataaaacaaacaagcttaaaaattcttcaagtgaaacggcatgaagcaagagacttc

SEQ ID NO: 38542 - DNA, 271 bp, Homo sapiens
  chr7:111844200-111844471
  hyper
cggtttgccattccaggaaatcccagagtggtttttaagcctctgcccaccgcttgtaaagaaaggcaagagaggaactaatcgataccagcaccccagctgtgacctggcacatgaagaaatcaagaaaataaatcccatccataatctgtataatttaacacttggaagaaagcaacatctgggatcgactccaagcaggacagttttgcctggatggatctgagcttcctgcactgagtgttaaagccgcttaggaggcgatgccctc

SEQ ID NO: 38543 - DNA, 658 bp, Homo sapiens; identical to SEQ ID NO: 35029
  chr7:127671335-127671993
  binary

SEQ ID NO: 38544 - DNA, 67 bp, Homo sapiens; identical to SEQ ID NO: 20665
  chr7:127673475-127673542
  hypo

SEQ ID NO: 38545 - DNA, 661 bp, Homo sapiens
  chr7:129782272-129782933
  hypo
cgcccctcctgggggccgaggactgtcaccatgtcactacggcactctccagctgctgaccaaagccctcgctaaccgcagccctgccatactctgggtctttcctctggagcaaggtgaagagactgcagcgaggcgtggaattgggaagctcttctggttttattaaaaactcgttccaccacaggagtcagcctggccactcaggtgtggggcgggtctctcctcatttagctttcacctgcgtgcccagggataggagaaaaacggcacagagggaggttgtagggagtaagcatcctgccctggcaaagctgagtgaacgtgggtagcttcagcccagtgaagcagcagcagggacgcctgtggaaacctgggtggaggtgccttctgaccttggtttgtctgggccagggggcgaatgcttctggcagtggagcttccaggcccggaaaacccaggcctcttctcctcacgtgggccctcaggtgcttgtggactgcccggagacagaacagaactgagggtgggagggcctgcttttgcctgcagaacaccctgaaatgtcccatttacccagctctctccagggcccgcacagtccaaacttctctggcctcaactcctaccactgtgcctttgctcactctcgaccagccac

SEQ ID NO: 38546 - DNA, 58 bp, Homo sapiens; identical to SEQ ID NO: 20668
  chr7:132527738-132527796
  hypo

SEQ ID NO: 38547 - DNA, 163 bp, Homo sapiens; identical to SEQ ID NO: 20669
  chr7:134613459-134613622
  hypo

SEQ ID NO: 38548 - DNA, 456 bp, Homo sapiens
  chr7:134832843-134833299
  hyper
cgactgcgaaggcaagggggcaccagctcaggactgcatctgcctgccatttcccttccactcctcctttctggagtctgacattagaaagccagcgagaaggaagattcaaacaaccaaccctgatttcctgcttctccttttcatgagtgttcctgtggtctctgcacctcctttctgtaagtaccgatcctgcaagcatcacagcttacccagacgtctactaccttgtaagacaattttgttttcttctcagatatttcatgttctggcaatccacataggggaactcactggttgttcagtatctgtgaccctccctcgctcatgtctgtataatctacataatctaccccctttactctctgctctccttccttccactcttcggcatcaacatgtgtagctctggcctcaaagatgatgaaagtaaggccagtataactggttagaaac

SEQ ID NO: 38549 - DNA, 171 bp, Homo sapiens; identical to SEQ ID NO: 28160
  chr7:140156493-140156664
  hypo

SEQ ID NO: 38550 - DNA, 202 bp, Homo sapiens; identical to SEQ ID NO: 20672
  chr7:148079472-148079674
  hypo

SEQ ID NO: 38551 - DNA, 931 bp, Homo sapiens
  chr7:150069512-150070443
  hypo
cggcagcacaccggggagcggcccttcacctgcgccgagtgcgggaagaacttcggcaagaagacgcacctggtggcgcactcgcgcgtgcactccggcgagcggcccttcgcctgcgaggagtgcggccgccgcttctcccagggcagccatctggcggcgcatcggcgcgaccacgcccccgatcggcccttcgtgtgtcccgactgcggcaaggccttccgccacaaaccctacctggcggcgcaccggcgcatccacaccggcgagaagccctacgtctgccccgactgcggcaaagccttcagccagaagtccaacctggtgtcgcaccggcgcatccacacgggcgagcggccctacgcctgtcccgactgcgaccgcagcttcagccagaagtccaacctcatcacccaccgcaagagccacatccgggacggcgccttctgctgtgccatctgtggccagaccttcgacgacgaggagagactcctggcccaccagaagaagcacgatgtctgagacggtgggcggggccgtgttggctgagagagggctggggtccttcgtggtgggagtcgcagtgggctgggggtgcctgcctagtgctggagtaggggacaatgggaatcctagaggggatggaagacgcggggagtgagctgggtgggccctgctagcgagagaggtcaaccccggtggccagggaacccacttccaagcgcagggacgccggcctccagctggtgtgtgctaaggctccgtcctgactgccctgtgccctggaaaagcagcaatagcatccgccccttagagccctctggctagaggagccaccagtggaaaggaagaccctccatcctctggtattaacgccttaatgcccctgtcttttactgtaagttacttaagatcatttttggaagcaggc

SEQ ID NO: 38552 - DNA, 958 bp, Homo sapiens
  chr7:150714968-150715926
  binary
cgtggcgcttcacatccataagggcaaaggaacagatgtccccaaccccagccacatccacagtgaagtgatgaaaaaagtcgataatctccagggcacgagggcggaaccagaaaagcagaaacagcggggtgaggagcggggacaggagctcctccaggagggagacctggggaagcagcggtgaggctgagcaggggtcgctgaggggcccacgcgcgttatcaggaccaagcagtccccagcgaccctcgccagggcaagaagcctccccacccagtcactccctagactcctggtatagtccgtttgtctcatgccctctcccagacagaccctccgcgcagacagaccctccgcgcagacagaccccacaacttcctcctcagcccgccgtcgcgcccaccctcaccgctcggtactgcagcagctgcgccatctgccggtaggcgcggtccctgccgccggggccgggctcctccgggaggtagtgcatgtgggccagggctgtctgcagcaggagctgcggcgcacgaccctggcactgctcttccggaatgaaagacctgaaaggcgggatccgtggggggaaggggcctgcgattaggaggacgcgcggtgggatgtagggctagagggccccagtggtgggagaggtaaggattcggggggaacctcacatggccccagatcagagaaaccaacacacaccaccaccccgggcatctgccgtcgcacctggcgacggtggcggtgaccccgagcgcggtcatggcggtgagcacgtgctccacggctagcacgtcctcgtcgtagacggtgagcacaagcagcgcggcgaagagtgcacccgcgaagaaaacgagctggcgggccagcagcgtgcgcaggggcgcggggggcgcagcggtgcgcaggaaggcggcggcggggcggtaggcgcgggccaggcgcgcgc

SEQ ID NO: 38553 - DNA, 593 bp, Homo sapiens; identical to SEQ ID NO: 32144
  chr7:150758626-150759219
  hypo

SEQ ID NO: 38554 - DNA, 139 bp, Homo sapiens; identical to SEQ ID NO: 20678
  chr7:1556123-1556262
  hypo

SEQ ID NO: 38555 - DNA, 233 bp, Homo sapiens; identical to SEQ ID NO: 20679
  chr7:1563405-1563638
  hypo

SEQ ID NO: 38556 - DNA, 33 bp, Homo sapiens; identical to SEQ ID NO: 20680
  chr7:158713060-158713093
  hypo

SEQ ID NO: 38557 - DNA, 913 bp, Homo sapiens
  chr7:1784384-1785297
  hypo
cgaggccatcccacagcagatcaacagcaccatcgtggacctgcggctcaacgagaaccgtatccgcagcgtgcagtacgcctcgctcagccgctttggcaacctcacgtacctcaacctcaccaagaacgagatcggctacatcgaggacggcgccttctcgggccagttcaacctgcaggtgctgcagctgggctacaaccggctgcgcaacctcacggagggcatgctgcgcggcctgggcaagctggagtacctgtacctgcaggccaacctcatcgaggtggtcatggccagcagcttctgggagtgtcccaacatcgtcaacatcgacctgtccatgaaccgcatccagcagctcaacagcggcaccttcgccggcctggccaagctgtcggtgtgcgagctctacagcaaccccttctactgctcctgcgagctgctgggcttcctgcgctggctggccgccttcaccaacgccacacagacgtacgaccgcatgcagtgcgagtcgccgcccgtctactccggctactacctcctgggccagggccgccgcggccaccgcagcatcctcagcaaactgcagtcagtctgcaccgaggactcgtacgcggctgaggtggtcgggcccccacgtccagcatccgggcgctcacagccgggccgctccccgccgcccccgcctccgccggagcccagtgacatgccctgtgccgatgatgagtgcttctccggggacggcaccacgccactggtggccctgcccacgctggccacgcaggccgaggcccgccccctcatcaaggtcaagcagctcactcagaactcggccaccatcaccgtccagctgcccagcccgttccaccggatgtacaccctggagcatttcaacaacagcaaggcctccacc

SEQ ID NO: 38558 - DNA, 989 bp, Homo sapiens
  chr7:192753-193742
  binary
cgcccggcgcctggagaggagcgcgctgaggatcgggacgcctgcggccgccgccaccgcccaggcccgtcgcgccccggccgggatggacccacacgcccgatgagccccgcgccggcggctgcgagcgccgagcctccccctgctgcggccccagccgccccccgcgcgcccggctccgcggaccaggacccctgggctccccggctgagggcgcggccgctccggagaggccgagcggggacgggcccgagatggcgcggggacccagcgctccggcggcgggcgccctgcacgcggcccgggcccggggacagccccggagctggtagccgcccggcaccgatggaccttgacccgcgaggcggcgccgcgctcgtgcccagctgcagctagaggggcgcgcgggcagaacgcgctccaggcccgggccggcccgcgcggccatgaagatgatgctggtgcgccggttccgcgtgctcatcctgatggtgttcctggtggcctgcgcgctgcacatcgccctggacctgctgcccaggctggagcgacgcggcgcgcggccctcgggggagcccggctgttcgtgcgcgcagcccgccgccgaggtggccgcgcccggctgggcccaggttcggggccgccccggggagcccccggccgcctcctccgccgccggcgacgcgggctggcccaacaagcacacgctccgcatcctgcaggacttcagctccgacccctcctccaacctctcgtcccactcgctggagaaactgccgcccgcggccgagccggccgagcgcgccttgcgggggcgggatcccggcgccctaagaccccacgaccccgcgcaccggccgctgctgcgagaccccggcccgcgtcggtccgagtcgccccccggccccggcggagacgcctccctcctggccaggctgttcgagcacccgctttaccgggtggcggttccgccgctcacggaggaggac

SEQ ID NO: 38559 - DNA, 156 bp, Homo sapiens; identical to SEQ ID NO: 20686
  chr7:2236075-2236231
  hypo

SEQ ID NO: 38560 - DNA, 114 bp, Homo sapiens; identical to SEQ ID NO: 20687
  chr7:2237109-2237223
  hypo

SEQ ID NO: 38561 - DNA, 311 bp, Homo sapiens; identical to SEQ ID NO: 32181
  chr7:2237982-2238293
  hypo

SEQ ID NO: 38562 - DNA, 261 bp, Homo sapiens; identical to SEQ ID NO: 20689
  chr7:2255762-2256023
  hypo

SEQ ID NO: 38563 - DNA, 870 bp, Homo sapiens
  chr7:22893437-22894307
  binary
cgggagccagtcttctgctacgtaattagacgagtcttgaaagaagcacccaggggcgtggctgaagactttaagaaacaccaggcaagggaggggagtgggtaccagagacacctaacattatttgagtggcaggagcttcctctgaccttcaacgaggtaaagagacatcacagccagcgagagtttggggcagactccccagactcggaggccggggcaaagtgggagccggggccaagtgggagccggggccgtgtggggtgggggggggggcccaaggcggggaaggcccgggccgccgacagggggcgcgcgagggcctccgggccccgcgggcggggcgggtgctggacccggaggggccttccggcaactttttggttggtgccgccccgcccaggccccttttaaacttgatctccgcagtgccctcccttttcggccgcggcgcgtgactgggtaagtgggctcggaccttctggacgcaggagccgaccacgtggctccggggctaccccgtgcgcttcctaggcgcgcctctcgctgcccccacgccgaggcctcggctcggcgccgcggggaagcctccgttagggcccctcgggggtgggggcgtcctcgtggcgcttgggcccttcgtcccgggttaggacggcccgtgtccttgtgcgcttgaaggggccgccccctttcctcgaggatcccacccccactcagcagaagccgccaggcgcccgtcacctcccgtgcctgagtccctgccgtccacgcattcggcctacaggcagcttttagtcctttttcaattaaatgattgcattttgaggatcaaattccaaccgcaggcggaggcgccgagccccggac

SEQ ID NO: 38564 - DNA, 962 bp, Homo sapiens
  chr7:23507981-23508943
  binary
cggaacaccacgccacacggcagggggtaagcaccagaggacaagaagttctcagctgagtctctccacccaataacggagtgagaacagaatcggggcaaacagaagcagcagctcacctttgcctttttgggaccgagtgctcaacttctatgggtttcccgtgcagttctattttacctgcggacacacaagaagtgagacggtcggccgagttcagcggctctccctgcccgaagacccgcacagcccaagcggcgacacaaatggcctcctgaggccctcgaagggcccccgaggcccggacgcggctccaggcggagggagaagccgaccccctcgagcggcgtgggcatttaactcgcagatggttggggagcagggtccgctggcgggcccactacttgggtatcagtccagtctccaagcctcccccacccacccctgggggccaccaacaccacgaggcccgcaagagggacgcggcccaccctctcaccgccctggacacgctccacagggcagactcggggcagggggctcccctggctttcttcaggagggggcgccctggccctgccctctgcttcagcccagacccgccgggaacactcagcggtgggcttgaggaagacagggagtggcgagaaagggtcggggacggcaggggagaccacgaacgggagaactggcagaggcgcagctcggcacaggctgaaccaggcgcgaaggacggcgaggcgcccgcaccacgtctgaattgattaaaagggaagccgaaaggcacggggctcccatggggaccccaacgcagccttccccctgggcgtcctgctccgcccggcaccgtccctcgccctggcggagccatacccggaggccgcagccccgcgccagggcccggagagcggcgggcggccggtgcgtggcggcgactcccttccaggcgaccagccgccccc

SEQ ID NO: 38565 - DNA, 338 bp, Homo sapiens; identical to SEQ ID NO: 19897
  chr7:25894678-25895016
  hyper

SEQ ID NO: 38566 - DNA, 440 bp, Homo sapiens; identical to SEQ ID NO: 20694
  chr7:2643038-2643478
  hypo

SEQ ID NO: 38567 - DNA, 108 bp, Homo sapiens; identical to SEQ ID NO: 20695
  chr7:26667960-26668068
  hypo

SEQ ID NO: 38568 - DNA, 145 bp, Homo sapiens; identical to SEQ ID NO: 20696
  chr7:2804422-2804567
  hypo

SEQ ID NO: 38569 - DNA, 490 bp, Homo sapiens; identical to SEQ ID NO: 20697
  chr7:36338992-36339482
  hypo

SEQ ID NO: 38570 - DNA, 173 bp, Homo sapiens; identical to SEQ ID NO: 20698
  chr7:43116313-43116486
  hypo

SEQ ID NO: 38571 - DNA, 66 bp, Homo sapiens; identical to SEQ ID NO: 33934
  chr7:44740657-44740723
  hypo

SEQ ID NO: 38572 - DNA, 475 bp, Homo sapiens
  chr7:44746549-44747024
  hypo
cgaagtctgagccaagctgttttgaaggctagcctggtgttacttgatacccagagctggccatgtctgctgtgtatttgttacacgtaacgtgcttttcaaagtgtgcctggtctgagcaaatacagggcatcagaggctggtgaaggggaagcatctctaacccttgaaagctgcgtctcctggcagcagtccctggcacagccctgggcccaggagagctctcagccacatacctgagagaaccagcctagccatgggaactctcttgtaggaacccacttccagcgggtgatcccagaagatggccctgcagctcagaacccagaaaatgtcaaaaggcttctcttctgcaccggcaaagtgtattatgacctcacccgggagcgcaaagcacgcgacatggtggggcaggtggccatcacaaggattgagcaggtgagggcaggtggtgccatcagggtgtccccccagc

SEQ ID NO: 38573 - DNA, 150 bp, Homo sapiens; identical to SEQ ID NO: 20702
  chr7:45091549-45091699
  hypo

SEQ ID NO: 38574 - DNA, 674 bp, Homo sapiens; identical to SEQ ID NO: 33100
  chr7:65508919-65509593
  hyper

SEQ ID NO: 38575 - DNA, 145 bp, Homo sapiens; identical to SEQ ID NO: 20705
  chr7:6682673-6682818
  hypo

SEQ ID NO: 38576 - DNA, 40 bp, Homo sapiens; identical to SEQ ID NO: 20706
  chr7:711727-711767
  hypo

SEQ ID NO: 38577 - DNA, 828 bp, Homo sapiens
  chr7:80548021-80548849
  binary
cgcgtgtgttcttaagaaaatgtccaggcttgagcataccaatgtatgaaaaatcaatatacaggccaaaaaagttatactttgctaaatctgtaatgcggaaaatgaccaatttagcttaccgaggttgaaagaaatcagcacggaaaagtcatcagtttgctaccggggttggatgcgcttgtgtctccagtccttttcccagacgaccttattttctagcacgtcgcaaaggtgaaattctttcttcccggtcctctgagtttctttgtaaaggaatctcagcgctgcagtgccgcggcacccggagctcttctccgcgtcgctcaatcaagcacctcggagtgaatggaaagtggccggaggccgggggcgagcgctcttggtgtccgattacagcgccgcggcgcgcggctccggctgccccggcgcgccgccctgcaggctcgcatcaccaccgcgcagccccggccgcatctccgccagccgcgaggccccaccccgagcgcgcccgcgagagcctggcagggagccgcgggggcggaccgggcggggccgacccttagagctcgcggctggccagacgcaagaatgcgcggccgcaggctggagccctagctccgcaaccctgctcctttcgcagtccgcggcggagtgagcaacttgctgggtgcgctccacggtttttgttgccggcggctctcgaagacttacacaggctttgcctggccgtaaatatcaaagtgcaaagcagttgtggttttttatttttgccagggaaggatcactgcagccttttaaggcaaagagatgcgtttttaaaaggac

SEQ ID NO: 38578 - DNA, 477 bp, Homo sapiens
  chr7:819359-819836
  hypo
cgcagcagggcctgggccgcctccactctgttggctggggttcaggggtcccaggtcgccaggagcaccttgcatgtggctcgggatgcacggagtctcccgtgaggtgtgggtttcttaggaccccagggcaggtgtcccatgggagtatgaactaaatgcctttgtggacgtttagacgtgaaatgtctgctctagactcacacacctgtctcgctccctccttccagaactcttaaaacgcctagatgacgtgtccaacgatgtgaggatggcagccgcctccaccttggtcacctggctgcagtgtgtcaagggtgccaacgcaaaatcctactatcagagcagtgtccagtacctgtaccgagagttgctggttcaccttgacgatccagagagggccatccaggatgcaattttaggtgagactccgacggcttggccttcgttccgatgcctgctttcggcgcctgccac

SEQ ID NO: 38579 - DNA, 235 bp, Homo sapiens
  chr7:852605-852840
  hyper
cggcaagttcctttcaccactccccacagtctcacacactgaaaccacagcaggggccgccctcactcaccgcaggggacaaccacccaccaaaaaccatttcctctgcggatgcttcccgcccaaagaaggaaccagaagcaggcaggatggggaagcagctggtggagaagccaaattgtttccttaagagaaagggatttacgggaggtggaggttgcagtgagccaagatc

SEQ ID NO: 38580 - DNA, 76 bp, Homo sapiens; identical to SEQ ID NO: 20712
  chr8:100851164-100851240
  hypo

SEQ ID NO: 38581 - DNA, 160 bp, Homo sapiens; identical to SEQ ID NO: 20713
  chr8:102190390-102190550
  hypo

SEQ ID NO: 38582 - DNA, 335 bp, Homo sapiens; identical to SEQ ID NO: 20714
  chr8:125985496-125985831
  binary

SEQ ID NO: 38583 - DNA, 617 bp, Homo sapiens; identical to SEQ ID NO: 25915
  chr8:128888848-128889465
  hypo

SEQ ID NO: 38584 - DNA, 159 bp, Homo sapiens; identical to SEQ ID NO: 20717
  chr8:131064030-131064189
  hypo

SEQ ID NO: 38585 - DNA, 482 bp, Homo sapiens; identical to SEQ ID NO: 20718
  chr8:140815079-140815561
  hypo

SEQ ID NO: 38586 - DNA, 48 bp, Homo sapiens; identical to SEQ ID NO: 20719
  chr8:141525521-141525569
  hypo

SEQ ID NO: 38587 - DNA, 107 bp, Homo sapiens; identical to SEQ ID NO: 20720
  chr8:141534525-141534632
  hypo

SEQ ID NO: 38588 - DNA, 114 bp, Homo sapiens; identical to SEQ ID NO: 37833
  chr8:141559645-141559759
  hypo

SEQ ID NO: 38589 - DNA, 62 bp, Homo sapiens; identical to SEQ ID NO: 20723
  chr8:141623736-141623798
  hypo

SEQ ID NO: 38590 - DNA, 104 bp, Homo sapiens; identical to SEQ ID NO: 20724
  chr8:144417159-144417263
  hyper

SEQ ID NO: 38591 - DNA, 97 bp, Homo sapiens; identical to SEQ ID NO: 33966
  chr8:145223917-145224014
  hypo

SEQ ID NO: 38592 - DNA, 270 bp, Homo sapiens; identical to SEQ ID NO: 20725
  chr8:145226085-145226355
  hypo

SEQ ID NO: 38593 - DNA, 104 bp, Homo sapiens; identical to SEQ ID NO: 20726
  chr8:1724066-1724170
  hypo

SEQ ID NO: 38594 - DNA, 287 bp, Homo sapiens; identical to SEQ ID NO: 20727
  chr8:22256736-22257023
  hypo

SEQ ID NO: 38595 - DNA, 794 bp, Homo sapiens; identical to SEQ ID NO: 25930
  chr8:23020923-23021717
  binary

SEQ ID NO: 38596 - DNA, 180 bp, Homo sapiens
  chr8:37595183-37595363
  hyper
cggctgtatccggagccagtgcttcctcagtgcggtgggggctctaattttacagttaaagaaaggggaacgttgactgagaacgaggaggaagcgagttgtagatctagccttgtgttcacacgacaccaggctggatatgagtcactcgcagggagctcagcttggtgaggtcctctc

SEQ ID NO: 38597 - DNA, 198 bp, Homo sapiens; identical to SEQ ID NO: 20730
  chr8:48396539-48396737
  hypo

SEQ ID NO: 38598 - DNA, 553 bp, Homo sapiens; identical to SEQ ID NO: 20731
  chr8:48744128-48744681
  hypo

SEQ ID NO: 38599 - DNA, 202 bp, Homo sapiens; identical to SEQ ID NO: 32292
  chr8:8639884-8640086
  binary

SEQ ID NO: 38600 - DNA, 143 bp, Homo sapiens; identical to SEQ ID NO: 20733
  chr8:8780059-8780202
  hypo

SEQ ID NO: 38601 - DNA, 78 bp, Homo sapiens; identical to SEQ ID NO: 18976
  chr8:95848311-95848389
  hypo

SEQ ID NO: 38602 - DNA, 648 bp, Homo sapiens; identical to SEQ ID NO: 24708
  chr9:100503340-100503988
  hyper

SEQ ID NO: 38603 - DNA, 150 bp, Homo sapiens; identical to SEQ ID NO: 10003
  chr9:100849678-100849828
  hypo

SEQ ID NO: 38604 - DNA, 151 bp, Homo sapiens; identical to SEQ ID NO: 20737
  chr9:103493427-103493578
  hypo

SEQ ID NO: 38605 - DNA, 254 bp, Homo sapiens
  chr9:126152970-126153224
  hypo
cgtggccaagaagtggagaacagggactgcagcccggatggtccacccccaggggcctcaccctctcctgtgagcggggctcggagtagatgcacacgaggggacaccagccccggctcgggccaaatggagggaggctctccagtcgccctcacgtccaccttggttgcctttccgacacctatccaagcacgggcccccacctctggctctgacaagagagcacagatcacagcttgacacgttggtgcaac

SEQ ID NO: 38606 - DNA, 256 bp, Homo sapiens; identical to SEQ ID NO: 33983
  chr9:126158025-126158281
  hypo

SEQ ID NO: 38607 - DNA, 109 bp, Homo sapiens; identical to SEQ ID NO: 20740
  chr9:126321044-126321153
  hypo

SEQ ID NO: 38608 - DNA, 90 bp, Homo sapiens; identical to SEQ ID NO: 20741
  chr9:127120340-127120430
  hypo

SEQ ID NO: 38609 - DNA, 445 bp, Homo sapiens; identical to SEQ ID NO: 20742
  chr9:128200066-128200511
  hypo

SEQ ID NO: 38610 - DNA, 368 bp, Homo sapiens
  chr9:130639769-130640137
  binary
cggatcacaaccacggatacacagccgcacagcccccagggagccccgcaccagcacgcccccgccctcccccggtgccgctgcccctccccgcagaggcgcccccccagacacgcgcgggcacgcactgacctggggaggggtgcgggtgggcgccggggccagtgcgtgccctgcccgtcctcgcggcggccggcaaaggcgactatttataaggctgtcagcgcgcggcatgccgggagccggcgttcccgaaggcagggagggcgggaaggagggagggagagcggaccagggaccgggaagcggggcgggaccgagcccgagcccgggtgcgcggcgacaccgcacccggcaccgtgtgcccc

SEQ ID NO: 38611 - DNA, 233 bp, Homo sapiens; identical to SEQ ID NO: 20745
  chr9:130907031-130907264
  hypo

SEQ ID NO: 38612 - DNA, 477 bp, Homo sapiens; identical to SEQ ID NO: 20746
  chr9:132874127-132874604
  hypo

SEQ ID NO: 38613 - DNA, 77 bp, Homo sapiens; identical to SEQ ID NO: 20747
  chr9:132874650-132874727
  hypo

SEQ ID NO: 38614 - DNA, 108 bp, Homo sapiens; identical to SEQ ID NO: 20748
  chr9:133484764-133484872
  hypo

SEQ ID NO: 38615 - DNA, 133 bp, Homo sapiens; identical to SEQ ID NO: 20749
  chr9:133641518-133641651
  hypo

SEQ ID NO: 38616 - DNA, 176 bp, Homo sapiens; identical to SEQ ID NO: 33989
  chr9:134131738-134131914
  hyper

SEQ ID NO: 38617 - DNA, 211 bp, Homo sapiens; identical to SEQ ID NO: 20751
  chr9:136667535-136667746
  hypo

SEQ ID NO: 38618 - DNA, 217 bp, Homo sapiens; identical to SEQ ID NO: 20752
  chr9:139440686-139440903
  binary

SEQ ID NO: 38619 - DNA, 216 bp, Homo sapiens; identical to SEQ ID NO: 16150
  chr9:139901954-139902170
  hypo

SEQ ID NO: 38620 - DNA, 233 bp, Homo sapiens; identical to SEQ ID NO: 20754
  chr9:140623363-140623596
  hypo

SEQ ID NO: 38621 - DNA, 232 bp, Homo sapiens; identical to SEQ ID NO: 16157
  chr9:140645189-140645421
  hypo

SEQ ID NO: 38622 - DNA, 947 bp, Homo sapiens; identical to SEQ ID NO: 23663
  chr9:140708213-140709160
  hypo

SEQ ID NO: 38623 - DNA, 748 bp, Homo sapiens
  chr9:21974933-21975681
  hyper
cggtgctggcggaagagccccctccgaccctgtccctcaaatcctctggagggaccgcggtatctttccaggcaaggggacgccgtgagcgagtgctcggaggaggtgctattaactccgagcacttagcgaatgtggcacccctgaagtcgccccaggttgggtctcccccgggggcaccagccggaagcagccctcgccagagccagcgttggcaaggaaggaggactgggctcctccccacctgccccccacaccgccctccggcctccctgctcccagccgcgctcccccgcctgccagcaaaggcgtgtttgagtgcgttcactctgttaaaaagaaatccgcccccgccccgtttccttcctccgcgatacaaccttcctaactgccaaattgaatcggggtgtttggtgtcatagggaaagtatggcttcttcttttaatcataagaaaaagcaaaactattctttcctagttgtgagagccccaccgagaatcgaaatcacctgtacgactagaaagtgtccccctaccccctcaacccttgattttcaggagcgcggggttcactaagtcagaaaccctagttcaaaggattccttttggagagtcggactgctctctccttcccctccccttcccctcctgcgtgtaaaacggctgtctggggcaagggtttctcagacgtgtacattgcctggtataagagcagactctgaaaagatgaggtttatttaatacggac

SEQ ID NO: 38624 - DNA, 119 bp, Homo sapiens
  chr9:23849766-23849885
  hyper
cgggtttctttttgttgttgtttaacgaccccctcctcccagcccccaaccctttgtgtgtgaggattccccttcaaaccacccacagaccgagcagacgagaagaaatggtaattttc

SEQ ID NO: 38625 - DNA, 234 bp, Homo sapiens
  chr9:37028485-37028719
  hyper
cgcaccagggcgcacctgggtggaggggctaaggctttgggccaggttgcccaagcagagtggctggccctctttcctgcctcagatcaggaactgccagaggctttgggagctggtgttgcgcttctgtccaccggagaaattccgcacccggctcaaggcttcttgagaaccgaatgagccaagtcgcgtccagggctaataagggtccctgaagcgggcgggtggacaggc

SEQ ID NO: 38626 - DNA, 203 bp, Homo sapiens; identical to SEQ ID NO: 20760
  chr9:7172217-7172420
  hypo

SEQ ID NO: 38627 - DNA, 830 bp, Homo sapiens
  chr9:8857862-8858692
  hyper
cgagtgagtccaaaaacccgaaatccagcatccaaggcagcgcgtccccccgccctccctccacccctacccccttttcctcctcctccgcctcctcctcctcttcccgggccgtcctcttggcccttctgagcccgcggcttccgcggcggtttctcctcctcccgctcctcctgctcgccctgcgcccgcttctctcgctgccgccgccgccgctgtttgtctcctccccctcctcctcctcctcctcttcctcctcctcccgctcctcgatgctccgccgctcgcggctggggggtccggggccgcgtctcctctcctccctccgcctctcctctttcctccttcctgctgcctcttcttttaaagcggattctttggccacaaatagcaactcggctgcccccctcggtgcctccctccccttctcttcttccccccaaaagtgaagcgcacgcgaggtaaccagaaactgaggctcgtggggggagaggggtgcgaggcgacgcctgggaaagggcccgagcagagtcgagggccgggaggtggggtggccggtgcagcccagtctttggacctggcttgaacctggtagttacggctgcagaagaggtggtttggggaggggggaaaattaaacgaaaaagcccaggaaagtcattggaaaggcttctctctttgtttccttgtgtgggtgatttctaaaatcctcgtaacgtgctggggatcccacggaattgctgtgctccagcgctgggggattgtgtgtgcgcgttgcctgcgcgtgagtgtgagtgtgggtgcgcccggacgcggggagagctgggccc

SEQ ID NO: 38628 - DNA, 38 bp, Homo sapiens; identical to SEQ ID NO: 36960
  chr9:90386494-90386532
  hypo

SEQ ID NO: 38629 - DNA, 314 bp, Homo sapiens
  chr9:91995951-91996265
  hypo
cgtcgaggagtcactcacccgggcacacagaagcatcgccgctcatctcctgaatcaaacccctgcaaaacaaccggcacgtgttattcacccacacacatgggggacatccccaggcagcgcatcccgccccatacctgctggggctctcggtctggtgcagagccacgcaggtcgctgtgggcgggctccaggcgcagtaggggtcccgcgccagcacacagtcctcgcaggtgccgtgcttcccacagaaggccagcggggcctggaccacgcccgagttagagccagcatagacaaacctgttgccctgc

SEQ ID NO: 38630 - DNA, 280 bp, Homo sapiens; identical to SEQ ID NO: 16169
  chr9:96348822-96349102
  hypo

SEQ ID NO: 38631 - DNA, 173 bp, Homo sapiens
  chr9:96435988-96436161
  hypo
cgctggctgcccatggtgcccggaagaatgggggtggcagtggcaagagtgcaggcaaacgactgctgaagagggctgccaagaacagtgtcgacctggacgactacgaggaagagcaggaccacctggatgcctgcttcaaggactcagactacggtgagtgtcactcctgc

SEQ ID NO: 38632 - DNA, 988 bp, Homo sapiens
  chr9:971867-972855
  hyper
cgcctgccctcgggagcgggtcgcctccactccaccacctgtttaagttcctccccctcggcgcccctccagtccccaccccggccccggtccaaaaaaccagcaaacggaacttttccacagttgaaagccgcggcccgcgaggccgggctgggaggggaaagcggggcgtgtctggggggcggggccccgagcactccggaagttgccccgcccaggaggctcctgggaaagtgaggagagggcccgggcctactttcgtcctggtgtggcgcccctcagcctcccctcctcccagttcccgcgcctccgcagggcgcctcggcctggcctccaggcaaagttcgcgccccctgttcctggggtgtcggccgcgcgggccgtttcccttcattactcccgggcccctgaatccgaacgctttcccagaagcgcgcaaatccgcttgctttccccgcggctgggctttgttcagggacagcaaaggaggaggcgggaggctggtgaggttttctggaaaaggggcttgtcccgaggaggaagtgccccagatccctgagagccaacgctctggggagaagaaactttccttctcccttgaatgttgctcagattacctaaaattattttttcagcccttgtgttctaaagtcgcagggtaaaggttatcttaagacttaacatcagcgctgctcatttgtacgttggtggagacgtgccttttttcctttgcacttaaggtggacagggtctgcgacgctcccttccaggacggtgtggggaagcggccgacgtccccagccggactcacgccctcctactactgggcgtcggctccgccgcgggcgctcccgacagggagctggagtcggacgagcggctgcccccagggcctccaggaaccgcggcccagcggggagcgccccaggctagcgcttttccagttcccttcgaaagcgcggggctgaggtcgcggcgctgggccctc

SEQ ID NO: 38633 - DNA, 329 bp, Homo sapiens; identical to SEQ ID NO: 27359
  chrX:123094093-123094422
  binary

SEQ ID NO: 38634 - DNA, 32 bp, Homo sapiens
  chrX:25021565-25021597
  hyper
cgctgtgacacgacccgggagagcccaggtgc

SEQ ID NO: 38635 - DNA, 754 bp, Homo sapiens
  chrX:39953610-39954364
  hyper
cggcccgcacggttcacggcggacagaacccggggagcgtgacggtgcctgcggggtgggggtagggggcccacaggcactggccgctccgagcgcaccacgggtcctctccagctccggccccccgcgctcccaccagcccggctgccggggcacagtcacagctccgcgcgctgggcagtcctatttttatcttgtctaatcctaaactgggcggggagcacaggcgtcgtgcttagagaacaagagataggcgcgggaggcggggaggagcagccaggcagcgacgcgagcgggagcgagttaaagacacagtggaggcgaccgcgggcaggaagaaagagcgggctgcgcgggcctcgaggcgccgcacgcaacgcgccgccccgcgaagttacactcgcttccccgccgtccctcgctaccggcccctccccacttcccagcggcgctccccgcagcctggacagcgaggccccggcctgtgtgggaggcggaggccaggacggccctgcaaagggctggagagaatcgctaatgagctgtgcagcccattgatccggagaacacttcctaattaactctcagtcacctactggtgacagcgcctcaaaggacagcgctggggccagccgagccccagccgcgacttgccggccgggcgcctgctgcccaaaacccgcgcgctcccctaaacaccccaaggcaattggtgtgcgtggcggtgtatacccgcacactgaaggccagcctc

SEQ ID NO: 38636 - DNA, 1296 bp, Homo sapiens
  chrX:40013994-40015290
  binary
cgcggcagaagagccaagggtccggatctttccctggcagcagcagggacgcagcgtgggtcacgctaacagggtacagtttacccattagggaaagtcggcggagacggccctgttattcctcttttgcagatggcagattaatccggcagcacccggcctcaaagggaccggctgctcggcaaagggttaacccgtcggccggtaatcgtggacacgcgcgcacacacacacacgcacgcgcgcgcgcgtcctctccgcctgcccgagcgcccgccgcggcccgcagtgcgcccggggctgggggagtagctgcgggaggggagggggtcgggggaggggcggggcgggcttaaccaggccgctcgactgagccggggccacctcgccgtctgtcacttaaatgattgtcctccgctccgctcagtgcggtcagtacgggctgttaacaggcagttgcaatcagtttccgaaaggtcagccaaggtcctccggctctcgcagacggaaggcattacgaaaccgcttttgtatctgcaggcactttagaaaaagaggcgagaaggggcgcaccgcagtgccgcggctgctgcgaccgggggagagggtcgggggctgcggagcagaggagtccgcacccccgcggccagggtcaggcggcgtggatatcacccgcggagtgacccagggcctccgggtttcggtggggaagcaggaagggggtggggagcaggcggcaagggaaggaggagtgggaggaagtgggagaggcgtcctggctcctctcctcacccagccaacagcccacacccggacccagacgggagcgggcggccttggacgcgaggagaccccactcggactctcaggccctcctggcgcctggaagtagggagggggtgtgggggggggaaagaccctcgccgagcgagcgagtcccagcgcggtgtctgaagacgctgctgccgccgccgctagaagtcgtccatcagcaaccagtccaacctgccagtgataatgtgcgatcaacaccaaatcacccccgccaggcgcgatccatcatcgcagcgcgccgcgggcccgcgtgaggctgactcgcggctggggtggggagggggggcgcgcggagcaggaggcggtcgcccagcacacccggactctccgcgcacctcgctgcccctcctggaggcctgcacccaggcgctcataactctccaagttccccagctacagagcgaaaacccagtggctccgagttctgggcacagctcacttaggaatccgcgcgtcctccgc

SEQ ID NO: 38637 - DNA, 898 bp, Homo sapiens; identical to SEQ ID NO: 23418
  chrX:71525281-71526179
  hyper

SEQ ID NO: 38638 - DNA, 62 bp, Homo sapiens; identical to SEQ ID NO: 20771
  NW_001839407.1_18933-24809:4240-4302
  hypo

SEQ ID NO: 38639 - DNA, 522 bp, Homo sapiens; identical to SEQ ID NO: 22980
  AC241851.2_88-34049:15074-15596
  hyper

SEQ ID NO: 38640 - DNA, 1358 bp, Homo sapiens
  chr1:101004471-101005829
  binary
cgcgctgccagaagccgacgctagcgagggaggtgtgaagagttggccagaatgaccaactcctcctccacatccacctcctccaccaccggtggctcgctgctgctgctctgcgaggaagaggagtcgtgggcgggccggcgcatcccggtgtcactcctgtattcgggcctggccatcgggggcacgctggccaacggcatggtcatctatctcgtgtcgtccttccgaaagctgcagaccaccagcaacgccttcatcgtgaacggctgcgccgccgacctcagcgtctgcgccctctggatgccgcaggaggcggtgctcgggctcctgcccaccggctctgcggagccccccgcagactgggacggcgctgggggcagctaccgcctgctacggggtgggctgctgggcctcggactcacggtgtccctcctctcccactgcctcgtggccctgaaccgctacctgctcatcacccgggcgcccgccacctaccaggcgctgtaccagaggcgccacacggcgggcatgctggcgctgtcctgggcgctcgccctgggcctcgtgctgctgctcccgccctgggcaccgcggcccggcgccgcgccaccgcgagtccactacccggcgctgctggccgccgcggcgctgctggcgcagacagctctgctgctgcactgctacctgggcatcgtgcgccgcgtgcgtgtcagcgtcaagcgggtcagcgtgctcaacttccacctgctgcaccagttgcccggctgcgccgccgccgccgccgccttcccgggcgcccagcacgcgccgggccccggtggcgccgcgcacccggcgcaggcccagcccctgccgcccgcgctgcacccgcggcgggcacagcggcgtctcagcggcctgtcggtgctgctgctctgctgcgtcttcctgctggccacgcagccactggtgtgggtgagcctggccagcggcttctcgctgccggtgccctggggagtgcaggcggccagctggctcctgtgctgcgccctgtccgcgctcaatccgctgctctacacgtggaggaacgaggagttccgccgctccgtgcgctcagtcctgccgggcgtcggcgacgcggcggccgctgccgttgccgccacagccgtgcccgcagtgtcccaggcgcaactgggcacccgcgccgcgggccagcactggtaacctagccggggcccgagggaagcggagatccccggcttccgacgtccttgggcaccgtcgcctccttccctcctagggcatcccctgcctgaacgaagacttccgccgcgaagcccgatagatcgggggaaaatggggccttcgaccccagc

SEQ ID NO: 38641 - DNA, 1247 bp, Homo sapiens; identical to SEQ ID NO: 22735
  chr1:101702006-101703253
  binary

SEQ ID NO: 38642 - DNA, 1194 bp, Homo sapiens
  chr1:107599205-107600399
  binary
cgcgccgccggccgggcgaccccgcaggaagtaggaaggacgagcgcgcactacaagtcccagaagcccccgtttcctggagcccgcgccgtgccgcgctacgcccgccgggagccgggcagagcggccaagatgtcgcagcccaagaaaagaaagcttgagtcggggggcggcggcgaaggaggggagggaactgaagaggaagatggcgcggagcgggaggcggccctggagcgaccccggaggactaagcgggaacgggaccagctgtactacgagtgctactcggacgtttcggtccacgaggagatgatcgcggaccgcgtccgcaccgatgcctaccgcctgggtatccttcggaactgggcagcactgcgaggcaagacggtactggacgtgggcgcgggcaccggcattctgagcatcttctgtgcccaggccggggcccggcgcgtgtacgcggtagaggccagcgccatctggcaacaggcccgggaggtggtgcggttcaacgggctggaggaccgggtgcacgtcctgccgggaccagtggagactgtagagttgccggaacaggtggatgccatcgtgagcgagtggatgggctacggactcctgcacgagtccatgctgagctccgtcctccacgcgcgaaccaagtggctgaaggagggcggtcttctcctgccggcctccgccgagctcttcatagcccccatcagcgaccagatgctggaatggcgcctgggcttctggagccaggtgaagcagcactatggtgtggacatgagctgcctggagggcttcgccacgcgctgtctcatgggccactcggagatcgttgtgcagggattgtccggcgaggacgtgctggcccggccgcagcgctttgctcagctagagctctcccgcgccggcttggagcaggagctggaggccggagtgggcgggcgcttccgctgcagctgctatggctcggcgcccatgcatggctttgccatctggttccaggtgaccttccctggaggggagtcggagaaacccctggtgctgtccacctcgccttttcacccggccactcactggaaacaggcgctcctctacctgaacgagccggtgcaagtggagcaagacacggacgtttcaggagagatcacgctgctgccctcccgggacaacccccgtcgcctgcgc

SEQ ID NO: 38643 - DNA, 1908 bp, Homo sapiens; identical to SEQ ID NO: 27392
  chr1:107682636-107684544
  binary

SEQ ID NO: 38644 - DNA, 2283 bp, Homo sapiens; identical to SEQ ID NO: 22736
  chr1:108506290-108508573
  binary

SEQ ID NO: 38645 - DNA, 1344 bp, Homo sapiens; identical to SEQ ID NO: 22737
  chr1:111216710-111218054
  binary

SEQ ID NO: 38646 - DNA, 1333 bp, Homo sapiens; identical to SEQ ID NO: 34024
  chr1:11538713-11540046
  binary

SEQ ID NO: 38647 - DNA, 877 bp, Homo sapiens; identical to SEQ ID NO: 22738
  chr1:12123137-12124014
  binary

SEQ ID NO: 38648 - DNA, 718 bp, Homo sapiens; identical to SEQ ID NO: 29563
  chr1:14026481-14027199
  binary

SEQ ID NO: 38649 - DNA, 936 bp, Homo sapiens; identical to SEQ ID NO: 26021
  chr1:154297543-154298479
  binary

SEQ ID NO: 38650 - DNA, 1256 bp, Homo sapiens; identical to SEQ ID NO: 24767
  chr1:156390054-156391310
  binary

SEQ ID NO: 38651 - DNA, 619 bp, Homo sapiens; identical to SEQ ID NO: 24770
  chr1:158083079-158083698
  hyper

SEQ ID NO: 38652 - DNA, 571 bp, Homo sapiens; identical to SEQ ID NO: 26029
  chr1:158150571-158151142
  binary

SEQ ID NO: 38653 - DNA, 266 bp, Homo sapiens; identical to SEQ ID NO: 35222
  chr1:161697064-161697330
  hyper

SEQ ID NO: 38654 - DNA, 740 bp, Homo sapiens; identical to SEQ ID NO: 26037
  chr1:167599123-167599863
  binary

SEQ ID NO: 38655 - DNA, 1563 bp, Homo sapiens; identical to SEQ ID NO: 23689
  chr1:171810215-171811778
  binary

SEQ ID NO: 38656 - DNA, 265 bp, Homo sapiens; identical to SEQ ID NO: 33179
  chr1:178994079-178994344
  hypo

SEQ ID NO: 38657 - DNA, 666 bp, Homo sapiens; identical to SEQ ID NO: 30757
  chr1:181451679-181452345
  hyper

SEQ ID NO: 38658 - DNA, 932 bp, Homo sapiens; identical to SEQ ID NO: 22741
  chr1:197887294-197888226
  binary

SEQ ID NO: 38659 - DNA, 829 bp, Homo sapiens; identical to SEQ ID NO: 22742
  chr1:207669273-207670102
  binary

SEQ ID NO: 38660 - DNA, 120 bp, Homo sapiens
  chr1:213189715-213189835
  hypo
cgcatcctctgggtgcccatggaactgaggtaccacagaattttgcaattaatgttgcggaagcacagccatagctctcactttaaaatgtacgtgtatgggccgggcgcggtggctcac

SEQ ID NO: 38661 - DNA, 1329 bp, Homo sapiens; identical to SEQ ID NO: 34055
  chr1:214155737-214157066
  hyper

SEQ ID NO: 38662 - DNA, 775 bp, Homo sapiens; identical to SEQ ID NO: 28329
  chr1:220101064-220101839
  binary

SEQ ID NO: 38663 - DNA, 948 bp, Homo sapiens; identical to SEQ ID NO: 34058
  chr1:220701523-220702471
  binary

SEQ ID NO: 38664 - DNA, 632 bp, Homo sapiens; identical to SEQ ID NO: 22992
  chr1:22140678-22141310
  hyper

SEQ ID NO: 38665 - DNA, 597 bp, Homo sapiens
  chr1:225117220-225117817
  binary
cgtcggtgtcacatcgggggccgccgcgtacccgcggtggaatctcgcaagagccagggcccctcctcacctgcccggcacccaggatcccttgcgccgcgttcgggaccccacccccattgtggcctcttcgccagggcgcaggcgtggctcttggtcaggcggttacggccaggaggcgtcggagcctggcgtggtagggctgtgctgcgcggtccttcccattcaccctagtctggcgctcgccggcgtgggcgggccggaccttcgccgcttccaggaagggccacaacggccgtcggaccacggcgcggcgggtaaggtcgtcagcgtcttcctgtcagcggtcggcagagcctcggcgggcgggcggcgcgtggggcagccggtgtcgcactgggagggctgcgtgggcgcggagggcctgggcgctccccacccagctgctgtgggagcgcctccgagtccccgcgcggaaccctcaccaggcagatgctggcgcatccaccaggcgccggcgccgccacgccggtagccccgaccgcaggagctctcaacgcgaggttcttcttagttgctctccctcaggcaggccgc

SEQ ID NO: 38666 - DNA, 1058 bp, Homo sapiens; identical to SEQ ID NO: 26072
  chr1:226736488-226737546
  binary

SEQ ID NO: 38667 - DNA, 862 bp, Homo sapiens; identical to SEQ ID NO: 34061
  chr1:226924738-226925600
  hyper

SEQ ID NO: 38668 - DNA, 999 bp, Homo sapiens; identical to SEQ ID NO: 23709
  chr1:228528433-228529432
  hypo

SEQ ID NO: 38669 - DNA, 248 bp, Homo sapiens; identical to SEQ ID NO: 16215
  chr1:230346868-230347116
  hypo

SEQ ID NO: 38670 - DNA, 1399 bp, Homo sapiens
  chr1:230561192-230562591
  hyper
cgatcaccgctcctgcagcctcatttgtttccggagagacacccacaagccagcccacggagagtctggactcgcccgccccagcacccacgcctcccccgcgcccggttccagcgccgcccccgacatccacccgcgggcagccccttaccgccggtatcctcgaagcgcgggggcgggcggtcccgcagcgctgcgctccagcccgcgccggcctcgtcctcctccggctcctgtgcgtccggggcgcggggcggtggcggggcggcccctgggggtcccgggggctcgcgctcgtcgtccgaggaggcggccgaggaggagcgcgaggcggccgaggtgctgtagaaggggttcccgccgctgtccgggccggactcgccgaacacgtcgtccgagatgtgcaggctctcgtagcgcgcgcgggcagcctcgagcagcgccggcgccctcctccgcgcgcccccgccgccctcggccatggccccggccgccgcccgcgcgcccgcccccacagtgcctcccagccgcacacgccgggccctgggcccgcgccgcggcccgccgccccccaccagcgcagcccgcagcacagcgcccgccgccccgtgcccggccggcccgccgtcttggccgcctcgggcccagcgcccggggaagcgccctcggagctcgggcgccgcaggctgcgggccgcggcgggaggcgagccgcgcgcggggctggcaggggcgacccagagcgggcgggacgcagaggctgcggccgagaccaggcgccgccgccgccaccgccgccaccaccgccaccaccgccgccgctgcgtctcctcggcgcccgccgcctccctgcccgccctctccacggcctccggcgctcggctgccgaccttcccgggcgcgagccgccagaggcgggccctgccgcccctcacctcccgcccgccggccaatggggagcccggcccggacagccgcgggggagctgggcgggcccggcgcggggaacgcccccaccctcctccgcggggcggggcggggcgcgcggccggggctggcggttagggggagggccgccggcggcagtgccggtctcctcctacagggacgcgcagcccgggaccgccacgcgcagcgcgggagggggagggcgggaccggggaacaggaggggagggggacccgggtgcttccagcggtccgggcccgcggacggagtgcgggccgatcccgctcactgtccccttccgcagtccgcgtgcagctccagggagctgtccgccccggtggttctgaaccaggcgccgccgaaacgctccaggtaggcggcgggcccgaggtcaccacacccgcggcggcggctgctgccgaggtttcctgggggtcactgccagctgcgcc

SEQ ID NO: 38671 - DNA, 923 bp, Homo sapiens; identical to SEQ ID NO: 26077
  chr1:234040687-234041610
  binary

SEQ ID NO: 38672 - DNA, 954 bp, Homo sapiens
  chr1:235812391-235813345
  binary
cgccatcaaggaggtgaggaaaaccaccctcagctgcggtggctccagcgtcaccccgagtgctcccgaggcggcgtctgggctgctggggagccaggagggcttcctcaggcactcgccagaaacatttccccaaagaaaacgcccaaccagccacgccatctcctgccactgaggtccttttccacgggggacgtccccgctgggaaaacagcaaacgctctgtgacctacaaatggaagaggggacccccgagcccccgcctgcctcatgccggagggaccgggcgcccccagccccggaagcccctggacgcgctccgagggggctgtccacacccgcgcgcgggcttccccggggcccggcgggaggtcccgggagaggaggccgagggaaccacaggtctttgtgtcgcgtgcagcagcagctggcggcgtgaggaccacaccggcgccagagccgtctccctaggtccggagactttcaccccgagtttcccttccgcgtctggctgcaccgggctgggctctccccgcggacacccggggctccggccgggcgcccacttacccggagcgggatcacgcgcgggcttcgtctgcagcgcggtgctcgcggggggcggccaggccgagcggcatcgctccgcatcggggcgcgggccgggctcgggtgcaaacgcgcgcctcgtgcccctcccgccgcccgcggggtctccgcgtcccgtcaccggccccgccccgcgccgcgcctcccgccctgcagggcccgaccacgcgggcctgggggcgcaggcggaccctcccccggccctggacgctgggggcttctgctcggccccctgtgccgtgggggcccagactggggaagggagagccggcgactctgcgaccctcgcccccgttccacgctggccgcgcccactccgccgcggggtctcgcccgggaaatccc

SEQ ID NO: 38673 - DNA, 580 bp, Homo sapiens
  chr1:235813621-235814201
  binary
cgggggggaaatcaccggaggggtctggggcggggccggggttgctggaggggtctggggacggggccgcggtcagcgcgggctccccgaagcctcaggtaccgccctcgctcggggtgagctccagcgcctgggccgttggggcgcgggccgcttcccaccctgcaccaagggacgcctcggaagcctccggccaaggcggggaacggcggagaaacgcggaatacctgtgcgaattcgcgcggccgcgtcgccactaacccggcgaaggctgacccgacgttgctgagtgacggggaccaggggccggcgaggcccccactccggggggagcgaggccgggagggcggagggcgcgtgctggaggcgggggtgcccttcgcgccccggttctaggagcgactgctctccaggcctcgtccctgtggcaccgcaggcttttgcgctggagattttaaaacactttagtgattacagccctcttcctttcagggaaaaaacagtttaagcgccgtccattttccgacttggtaaaataatacgaaaccttgggaatagagaagcaacgaaaacatttcac

SEQ ID NO: 38674 - DNA, 1370 bp, Homo sapiens
  chr1:236227467-236228837
  hyper
cggccagtcacggggaggatccagggagctgtaggtcatctggtcccgctcctcgtttggggcctccgtggtgacaatgcctggccacaggaaatgggatcactgggagccctgtgtttcccgctctggactctggactctgaaacgagcccaactggaaagcagcatcactgccaagacacatccggagtccacacacaaatacaggaggctgccggcgaaactctcccgcagccacaagagtcccggggcccgcgcgcagactgcgatccagctccggctcttgccctgcggaggctccgcgcgagaacctggctccacccgggaccggccaggtcctagccccgaagggactggacagccgagggacgcggactgacctccctgcggcgatgcagcccacagccgccggggaggaagctccgcggggtccatgggtgccggggtcacggcccggggcgcgcggagccacccagaccccgcgacccgctcttcggatagcagggaccgggtcgggaagaccttcgcggaccctgcagaggcgggagaccctgcgccgtgcccggtgccccggcggccagcgggtccgggtccccgcctgctacgcccaagtccgtccggctccacgggcgcccccggcccgccgcgccctgcagcccctcgcccgccctcccggggctcactcacgtagactgcgtcgatgtcggatctgtcgtagaagcggagcgccccactcagctccagggcaggagagacgaagtcatccccgtcctccagctccaggtccccctgtccggggccgaagggaaagagctcctggcggctcaggcagcccacaggccccgccagcagcagcggcagcagcagcgcccgcgtccacgcagcccggatccggctgctcgaggccaacatgttcccgaactgcggtcccgcaaacccggtcccgcggccaggacagaggaaggcggggatgtaaccggacgcccctggcagccccctctcctcccgcctcccggcgttcccaccccgggaaataggggaggggagcggaggggagagcggagggccccgccccgtccagcgggcgcgccgcggggcagcccaatggccgcgagggggagggcgaggggcgaagccgaacctcccgccttgggcgccggtgcctgcgattctcgaaaccagcccgactcccagcgaacggcgcctccgggagggggagcagagcgcgggacccgcaccgtggtcctctgattagggttgggtcgtggagagccggcgacgtggaaacgctccggattcaggaacggcgcccaccccattgccgctcggccgcgtccggggtccaattcgcttgaccctggtaggaagac

SEQ ID NO: 38675 - DNA, 1101 bp, Homo sapiens
  chr1:236558377-236559478
  binary
cgccggcgggcatctcagcccaggcctgtgtaaggggagttctggtgtctcagctgagggcgtgagtagggagccaggaaagcgacccgcgactgcagccgtttcttaaggccagtccttcgctcgcagtctgtcccgggcggcagtcgtgtcagccccccgctaggacccgcccagggggacgtgggtaccgggcaggacgcgcgctctgggcgctggggacgcccgggacactcggggccccgccttgcgtcccagccccgggtcgcggcaccccggctcccgccccgcgcctctggagggaggtaccgagggacgcgcagcgaaggggctttgctaattgccaaagcaggaagtgagctcgtggaagaagcgaaggaggagaagaagaagggaggggaaggcggaggagggcaggggcgcgcagagccacggtttgctccaggcgcgtcggaaccgcaggacttttcatccccgtggtcccacggtcctcccgcgccccggaggcctgccagccccgctcggacgctcgtttgcccctaacccgccgccatggcttcaccggacgaccctctgcgcgcaggtaaagggacacagcgccgcgcccgctcctggagcgagcaccgcggggcgggagctcgggaggcgctcgcagcagccgcagggctatcgaggccgggcctcggcgacccccgagggaggcccgggaaccacccccgacccaggcgccagacccggagtcgcacggggctcccagtccagccccgcgagcggctgctgaccgcccctcccgcgctcgccagggcccctgccccgcgtcagccaccgcgcgccttccccctgcccatgccgcagcccccgtggcttttgttctggactcgggatgccaggttgagacacgtcctgcaaacctctggcagaaatgggcgcaagggggtggatttcgttttcgcctcccgggctttttctttctccccgctcacatgccttctcattactcctcttcctctctcccattgcactttgatgaaatggttttgtctgtctaaacattggccctcggagctatttcatcagatagtatccgcagaatcgagaggc

SEQ ID NO: 38676 - DNA, 1272 bp, Homo sapiens; identical to SEQ ID NO: 22747
  chr1:237205449-237206721
  binary

SEQ ID NO: 38677 - DNA, 848 bp, Homo sapiens
  chr1:240254834-240255682
  binary
cgatggcacctctaaactggaattgggcttcagtttttctccgtgtaaaaatttcttcttttttatttaacttttctcttggcaggtccagcagctttgaagatcagagtgcatcttccagctgacgatctcttcggtcggggacaatgcattcgattcgcacggtggagattaaagtccccgagatagaggaaacgtttttcgcgcccaggttcagcgaggagccgcgcgggggcagagggggcggcggcggcgggcggggagccaggcccgagctgcgttctgcgcagccattggtgggcgccgcgctctgcactgagcatgttcgcgccccgccggcccctagccgcagccgcagccgcagcgacggcagccacgggagccgccgcgcattatgcaaagcggcggcagatgcgagcggggccagccgggcgcgcgtcggcctcccctcccagcggctccccccgccgccgcctgactctcccgggagactccctaggcccggacctggggccgaggagggccgggatggcctgagtgcccgcggcgcggcggcgcagcagcgggattgcaccatggggaaccaggatgggaagctgaagaggagcgcaggtgatgctttgcacgaaggcggcggtggcgccgaggatgcgctggggcccagggatgtggaagccacaaagaaggggagcgggggcaagaaggcgctaggcaagcacggcaaggggggagggggcggcggcggcggcggggagtcgggcaagaagaagagcaagtccgactccagagcctcggtgttttccaacctgcggatcaggaagaatctgtccaaggggaaaggcgccggc

SEQ ID NO: 38678 - DNA, 836 bp, Homo sapiens; identical to SEQ ID NO: 20797
  chr1:244012299-244013135
  binary

SEQ ID NO: 38679 - DNA, 963 bp, Homo sapiens; identical to SEQ ID NO: 29612
  chr1:244013722-244014685
  hyper

SEQ ID NO: 38680 - DNA, 1775 bp, Homo sapiens; identical to SEQ ID NO: 23718
  chr1:25255579-25257354
  binary

SEQ ID NO: 38681 - DNA, 1965 bp, Homo sapiens
  chr1:34628605-34630570
  binary
cgagcaaatggatctctatagggcaggattccagcaccgctgagcggtgcaagcgccggtgagtcggcctttttctctcccctaggggcaggatatgcccaaggggcagggacaaatctagccagaaaaacaattcagtccgatgccgagacattctccaatcagctaagccagagaccggcctcgcctcaacgtacgtccgggaggcctggcgggaggtagcagcgattcccccaccgcccatgtggcaagtctgggtgaccagcagcgtcggtatgcacagcctcccagtgggtgtgggtgtgcgagaggccagagctcccaggcgcgcgcaccgcgggcgcccctctctgggtgtcggtggctatgactcttagcagaacctaagaaagtcccgtcagctaggaatgagagagccagagctggctcggggcgccctccctgaccaagaaccccaacatgccgcggttaagcggtgggcgacacggtctgcgaggacagactcacaagacgctgaaggccagagtgggccagagagctcgccactcactgacctgccagaggagaggcgcactttcccaagaaggggaactggggtggtccaggccaagccttcagaggttcaatcggtggtttcaaaacaaaacaaaacaaaacaaaaacaaaaacaaaaaagaaaacacggctccaggtcgaaggtgccctaggtctaggcctggccagcaggtgtttcggtttctcccccagtgggtgtcagcctcgcgggctaaatgaaaatgcggttccaggcatcccggtttggacccgtctccacccgggcacacggaactttctagcttgtagctagaactgagcttcggaggggtgctgtgggtaaagcgggagggcaccagtcgcggccagtagcctccacaggggaccgggttccctcgaaggttcgcgtacctcccccgcgcgctgcaagctgcagccagacacccgcgaagttccgggactctccgcacccgctagatctgccccttcccggactcggtcgtcgggagctggtcccgccgcccgcgccgccgctgccgctgccgcagccgaggcgctcggctgcagcagggcgcgggaaagggcactttggcgcggagtgagcaccgaggggaatgtggcagcgcgaagcctggcggcggcactccctcccccgcctcgggctacaacccccaccccctccttcccatccctcaacaccctccagcccccacctgcaccctcctgcaaggaatgcgcgggacccccaccgtgggcacgcgtccacctgaaccccctcctagctccgagcgccgagggaggggtagcatttgaggagggggatggcggccgcagtctgcagtcggttccagagggggcaccggtttcaattggagaaaatgggcgggggcagggaagggcagaccttgcagacgcagaaatggggagggggcgcacggttcctctccagcccccaggaccagcgtgcctggcagaatcaggagccgggggagtagggctcccggaaagtttatcgggaaaaagcctagcaccgtgggggctgggaggctggagaaactgaagccacagaccaggtgccccgcaaccccgggcggggatgtctgtctcccaggcccccacaccggccgcatccgtccaagttgcggctggggttggggcagcagtgagggtgagggtggaggtgaggacgtggctgagggtggggtgggagacggaggcagggatgagaatgagagtaggcaactgggagggtgggagattcaggcagggatagaggcggggggagggactgggaccgggtcgaggatgggtgggctcggggctcgggtggggcgcgcggcggccgctggctcctcggcgcggctggactcacccgcggcggccgagacgctgagcaacccacagcccagcaacagcagcagaggcggcggc

SEQ ID NO: 38682 - DNA, 1656 bp, Homo sapiens; identical to SEQ ID NO: 27435
  chr1:35394588-35396244
  binary

SEQ ID NO: 38683 - DNA, 863 bp, Homo sapiens; identical to SEQ ID NO: 22998
  chr1:36042841-36043704
  hyper

SEQ ID NO: 38684 - DNA, 190 bp, Homo sapiens; identical to SEQ ID NO: 23734
  chr1:3659512-3659702
  hypo

SEQ ID NO: 38685 - DNA, 1454 bp, Homo sapiens; identical to SEQ ID NO: 27439
  chr1:38510073-38511527
  binary

SEQ ID NO: 38686 - DNA, 706 bp, Homo sapiens
  chr1:38512641-38513347
  binary
cgtcgctcccggggtcccgcgcgccggccgtgctgattggccgctggggcttcattcacggcccccctaccgtccgcgtacacactcacgccccgggggcgcggccgccacgtggggagtggcgcgggggtggccctgggaccgcaccccctctcgtcctggctgtgtgggccccgctttcccccagcgctggagactccgagcccggccggtcccacattccacgcgagctgaattcccgcccgcatcccgcccgggcagcagggattgccggctccgggaggcgctcgggctccgagaagcggctcagccccgcgcccctccctcctcagtaccgctgccggcggaccaggattcccgcgggtcctggcggctgcgagcgcgaggcggcgcggattcgcggctcggttccggcgcgactgctcaccgcgcccgcctcgcctcccgcggctgccagcgtgcactgggcgctcctcggcgcgtctgcccggcccgtctcggctttccttctccttcctctagtcccagcgtcacaactccgccgacctcctctgccctgagagcgcgtccggtgcgggcggagtcggacggactctggcttcacgcctcgcgcgggcacaccttctcccgggcactgaggcccaggtgagtaccgcgcgggcagctggggctgggacggcgggcggcagcggttctacagtcctac

SEQ ID NO: 38687 - DNA, 542 bp, Homo sapiens; identical to SEQ ID NO: 26104
  chr1:44726788-44727330
  hypo

SEQ ID NO: 38688 - DNA, 767 bp, Homo sapiens; identical to SEQ ID NO: 35270
  chr1:53067880-53068647
  binary

SEQ ID NO: 38689 - DNA, 678 bp, Homo sapiens; identical to SEQ ID NO: 27450
  chr1:53098674-53099352
  binary

SEQ ID NO: 38690 - DNA, 978 bp, Homo sapiens; identical to SEQ ID NO: 27451
  chr1:53308283-53309261
  binary

SEQ ID NO: 38691 - DNA, 983 bp, Homo sapiens
  chr1:57110528-57111511
  binary
cgctcccgacatgcgaggcccgtctcttcttccagtttgacttccaagtctttccattccctaggatcgggccccagtctcaccccctattttcacccccttcggttttcctcagaaagggcctcctgcctccctcggcaccctcgcctacccccctcgcagcacctgtcgcctccgcccctcactcggaccccgcgcatctggcgcagcccctcccgcactcccgcccagcgccccgcgtccccggcccccgctgtcgctgcttcgggttccgccgcaggagcctctcactcccgggagcgggcgcctcgcgctccctccctcggccccgccccgcccgccgctcgcccgttgcttcccacctgggcccgaagcgcccagcgccctctcccgggaccccgcgcccgccccgcgcccctcgcggctcggggtccgccccctcgcccgcagggcccgctgcactgtgggtaggcggcggcggcggcggctacgcggagcggcaggcggtggagcgaggccgcgcgcgccgaagatggctgagaagcagaagcacgacgggcgggtgaagatcggacactacgtgctgggcgacacgctgggcgtcggcaccttcggcaaagtgaagagttgagtacgcgctccggaccgctgtgcggggctgcctgacttgcgggaggccgaggggagaggcgggagccccgggcctccggcgggcgcggggctcggcggcaggtggagcggtcccgggtcgcgcggagctggggccccgggagggtggcgcgcaccgcctcgcctggcaccggcgcccgggccccacagggtccagggaagagggcgggggtgtgagctgaggatgggcgtcctgggttccaggttccgcgcccatctgcctttctggaggtcggagcaaggcacttctgtgttctctggacctcagtgtcctcctctgcaaaatcgggagaactggactcgttctgcgaggc

SEQ ID NO: 38692 - DNA, 922 bp, Homo sapiens
  chr1:84543146-84544068
  hyper
cgaggacaacgtggtgggctgagcgaatacctcaatgtgcgagagaacgaaaagctcgaaccacgaccgtgcctagggaccaggcttttcctgtggccgatgcggggcagatgcagacccagaggccacccttgcgcgcgatctccaacccgacggtgcggctcctctcggacctggagctgtggggagaaggcagccttttagtgaggagccgccgcgtggcgggacgcaaggaaaaccacccgagccgctgaacagtattccgcgactgcactccagggcaccgggaccgccagggtgaggagggactctgcgttctgcaaagctagcggttcccactccacctcccactatctcagcgatgggcacgcgagcgccagcccgggcgaccgcgggggaagaagcggtccacgccacctcaggcccccgccccaggctctgccagctgggggtccaccgcccgcccccggggtcccgggcctgcgcgtcacttccggcgcgcgcgcccgcctgcgaagatacagtcgggccagggcctggcctgggcgcgcggctgcccgggggcgcgcagagagggcggaccgcgcgaagggggagtgtctgcccgccgccgccactgctgctgccaccgccgtcgccgccgccgccgccgccgccgctgctgctgccggtgctaaggagttcgctggagccctttcctcagacccggcccggtcttcgcgcccggactcctggcgccagcgctaggcgcactcaccgctctgacgggtgcagacgcgggagttgtcccagactgtggagtggcgggcacggccccagccccccttcccttccctgaccccttcttgccatcgccccagacatggggaacgcggcgaccgccaagaaaggcagcgaggtggagagcggtgagttgaaggcc

SEQ ID NO: 38693 - DNA, 207 bp, Homo sapiens; identical to SEQ ID NO: 23750
  chr1:86860814-86861021
  hypo

SEQ ID NO: 38694 - DNA, 1167 bp, Homo sapiens; identical to SEQ ID NO: 23015
  chr1:91316222-91317389
  hyper

SEQ ID NO: 38695 - DNA, 4454 bp, Homo sapiens
  chr1:92948154-92952608
  binary
cgtcactggccagctccgcgcaaacgaatctaagcgacaagcagctagggtcctgccgcctgggatggaggcagcagccccagcgggcaagctgtccaagtcccagagaagccggatgcctccttcccctacgaatcagctcccttctcccggaaagactctccaactccccgttagcatttctacgcccaaggtcgcgccaattcccccccagcactgccgggtccctgcagctcccgcccaagaggttcccagtgggttcctacctggagacgcggagggtgacgggggcctccagaagtcctcaaactccgagctccgttcgcagacgctgccttcgcagctgtctggggatgcggaggctctgtctggggcttcggtcagctgcgattcgggggacaaacggtcccggggctccgccttcgccccgcctgcatttgaagtgctgtctgcaaagaggaggcaggtgaggggctcaggctgggaccggttgagtctgagggtgctgaaggctcccccaatcccccgaccagggcagccgagcgtcttcccctctccacccagaccccggccgggaaccctctcggatccgagggcaggcgcagagaggccatggcacctaggagacaaacccggaggaaccaggacagtaggaaacaaaaacagcagcaaaagggacgttggggcagcccctcccagctccggactaatggtgtgccgaggtgcagtaggcatccgggggagcagccccgcctggcccgcgcgcgcctcgcacctgctcggctaggcgccggtacattctctaaacggagggaatagtctggtcctggggagcgcggctggtggtagctgtgagccttcttgcttttgacgagaaatgagcgcggcatggtggtccggcactttccccactgcgccccaagagtccctggagccgctgtcacccacggtcactccgagggcttgctcagccccagcccggaggagacctgagagggaaagaaaaccaggtggagacgtgggtcagtactctccggtgcggcggactgggcacccaggcggagggagagcgcgggccagggaggcgcgcagagggcccacgggaggaggggcttgaccctgctgcgccgcgcttaccaggtggcacttggacaggtggcgcgaacccgccgtcgttgccgccgccgccactgacacagctcagcggtaaaacctgtcccggggccctgtctcaggcccctttcctcctccctgcccacgccccccagctcctcccctttcctagcgaagctcgctccggcaatcaaactccctggagagctgtagttcccatcgggtgggttaccccaactcagctactcatcgcctgcctggctgtgctttacggctggcgagggagggcggggacacgcggatcggtttaggggccggggatgcccagtggtcgaggacccggaaggggcaaggagccaagacctccaagagccagctaccaactggagtgaaaggaccggggggaggggggaacagaacacaagataaaactgtggggcggcgggaggacagcagcagagggattggggacagcagaggccagagaaaggaggtgggagagcaaagggacaggaaagtgaggggaacaacagacgaccaacccccgccccaggagaaactcgcatctgggtgatcccactcgcccctcactagtgccccacgtaggagaaactttgcccttggactcccggctgcggcgggcaccggtcgaggctgcggcgagccatcccagaccatggagacctaacctcgggaatcaggtcccgggaaaaaagcactttccgttctgctcaccaaaaaatcttgtcctagggaggtggagcccgatccacgaacgttgactgggaaatgctaggtgtcccgagtcggtagtgcaccgacaatttagcagacaaaaaagacaggacgccagagcgcgcaggctgcattagcagagagcgggggtcgggcccgggcccgggagggaactagctgcccggggcgtcgctctcattaacccccaatcagttcacctaataccaggtcgaaatctgagcgcagcgggagggcgtggctgcgcctgccgctaggctccagccggctccgggggcggtaccccacagtcgaggtggtctggagtaaacgaatctgccttcctcccggggtgaaggcgatggtgaccgggttcacacgtgagctgcagtacagcagttctccgtggcctcggctggttcagaaacgagggtgctgggaactctgggccggggcaggacctgcagtcctccggcttcgcgctgtttccactgccggactaggagcccctcggcttcctaggcaagatgcaggccacacagtctacgtctgtccgttggcgctctcagctcaaacgagtcctacaggccttggtccctgtagggtgcaggccccctgctccagatccccagccccattgtgtccccttctccggaggaatgggaatagacctgggagaaaagacgcctgggacgtgtcgcggggctcccgcgaagtttcccgctacccaagcgccagaatgcccctaggggtgagagtgccatccgcctccctccggggtggctcctagggctagagctttgtcgcttcctgcacttctcgtccgtacaattagacgccacaaaccccaaacccaattctttaaacagccacgaaactcggaagaaaagaaaaacggagtggcgttgtcccgagggtcccgctgcagcttggacccacgttggctgggagcgggacagatgggggcggggtaactgtcagcgccggagctgggtctgggctggcgccaccagagaccaggcggacgcggaggccgcctccccacccgggctgtaagcccacgcctctctcgcaccccggcccgctttgctggttcctgtggggagcgacagagtttggaggagataggggccccggggcctgggccgagcgcgtgggaaggcaaccccgcgctgcagctggcgcgggaggtggggcggcccctccgcgcgctcaggcctctcctcaccgtccgggcccaggaaggagggagccgagggcgctaagggggcgtcctcccgagcgcagctgccgccgcctccccaccagatgtttccttccctggtggatttggctcccctgccgaaccaccagaccgcctgctgcgcgcccccagctccagatttccagtcacactgcgcgggtcgcgccctaacccagctgccggagctctctgggctcccgcacggcggtccgcagcaggtgggaaaccgcccgcgccctctgatcgcccccgcagtgccagtgctctgcgagtccccgcggccgcccccaccagggcaggaggcgcagaacaggctcggcggacctacctgcggagtcacggcgcgggcaccgcgctaggagagttttcaaacggaatcttgctttcgggagagaccgctctatctctctgacttaaaaaaaaaaaaaattctccttccgagctcagcccccaaaaccacaagcttcacttcctgagcgttactgagtcgctcgcatagccctcccagacctgctcccaacccccgtcgggcggccgggcgcgctcctttgcgcaagtggccaggcggtggggggcctggcctttccagcccgtcccgcgcgccccttagtagtcctcccagttctctccctgtgggtcggcaggggatgggggaaattggaggtccggacacttaggcactagaaatgacttgaaagaaaatgaactattcttggctccagggagacttccgcagcgagagaagccacagattgaggacacagattgactggcgagagaggggtggggggcgccccgctccgaggaccctccccgcccctcaggcctcggtcacccgccccccccacccccgaccccgccgcctcctagggctgcaccacccccgggtcgggaccgtgaatcaccggcccgcggtgccgccggcctggagcccggcgagtggccacggcgtccgcagagcgaaacctgccccgcaggccccgaaatagcttgttgtggaaacacttggggataaatacgcccaacgaggctgaaaataccttgacacccaatccgagaggtttgctcatttcccttcggatttaggtaatggttaaatttggaagaggtgggcgagcgccgagcccccggcggagagggccctggcggcgcgtcccgcgggcgcccggcgggaccggtgggcgcaccctccctgcgcggagctcgccggctctcgaccgggtccgctcagccttcgactaatttccggtggtcggagctgcaaaattaaaggccgcgcgggggcagcgccggcggctgctaggctgactccgccctgccggggcaagccagggagagcgggacctcgcacgcgggctctgccacc

SEQ ID NO: 38696 - DNA, 1351 bp, Homo sapiens; identical to SEQ ID NO: 26139
  chr1:9711649-9713000
  binary

SEQ ID NO: 38697 - DNA, 761 bp, Homo sapiens
  chr1:98519262-98520023
  hyper
cggggcctcctctgggagagtaggagagcgaaaaaatcaaccaccaccttggatttcagatcgaggaaaggaagccaaagcaaaggtgtggttacacaggacatccatagacaaatcgttgcctctctaagtgggcctgagctttgcggctccagaagcgcgaggcgcggttggtgcggacgcgggggcgtgggagtcatcgctctccccgcagccctggccgagctctctgctgtcctcccgagtttgggccagagaccacggctcactccctaacgccctcgcaaggacggctgcccgtcgggccaagggcgccccgggctggaggccggagcaagacggccccgcgggactcgggagccttggtaaggcggaggctcagaccccgttcacgaaaacgcctggctcctccaggatttgtcaggtcttaagcagctccgagaaggctccgctggctcttggggaaccccgctgtgcggctcacccccgtttgtctctctcaagctctcgccctcctcccctggtcctcccttctccagatcccctgccctgcccgaggtccgggccgcgcgggctgagcccaatacgcccggagaagagcgccggagccccctgctggccggacgcggcaggcgcggcggcccgctcggtcccctccgccccgcgggctctgcccagcccggacccgcctccaccctccagtgccctggcgctgggggcgtgctaaaagcaacagaaaacaaaacaaaaacaaacaaagc

SEQ ID NO: 38698 - DNA, 913 bp, Homo sapiens; identical to SEQ ID NO: 28391
  chr10:100993468-100994381
  hyper

SEQ ID NO: 38699 - DNA, 1215 bp, Homo sapiens
  chr10:101294530-101295745
  binary
cgaaacgcgcctccgcctgctaagggcgttctttgggtactggggctgtctcagggtcccacagcgccaggagccacaaacgttcccaaaagtccagccatttactaccgcacgctctgcgcagccaccaaaaagggtcacggtgctccaggacaggagccgcggtgcggccgggaacagctaaggacgctgttgtttgcttcttccgcagaaagctgccagctgaagaagtctctagagacggccggagactgcaaggcggcggaggagagcgagaggccgaagccacgcagccgccggaagccccgggtcctcttctcgcaagcccaggtcttcgagctggaacgcaggttcaagcagcagcggtacctgtcggcacccgagcgcgagcacctcgccagcagcctgaagctcacatccactcaggtgaaaatctggttccagaatcgcaggtacaagtgcaagagacagcggcaggacaagtctctggagcttggcgcacacgcgcccccgccgccgccgcgccgcgtggctgtcccggtgctggtgcgggacggcaagccgtgcgtcacgcccagcgcgcaggcctacggcgcgccctacagcgtgggcgccagcgcctactcctacaacagcttccccgcctacggctatgggaactcggccgcggccgccgccgccgccgccgccgccgccgcagcagcggcggcctacagcagcagctatggctgtgcgtacccggcgggcggcggcggcggcggcggcgggacctccgcggcgaccactgccatgcagcccgcctgcagcgcggccggaggcggcccctttgtgaacgtgagcaacctaggaggcttcggcagcggcggcagcgcacagccgttgcaccagggtactgcagccggggccgcgtgcgctcagggcaccttgcagggcatccgggcctggtagggacggggcgggtcacgcggcgggcaccccagcgcagcctggcgccgcgggactgaagctcgagaagggcctgacctaaaggtcaggtcccctcgttaaaaaaatatgtacgtctagctcctcagggcttcggatcgcagctcactcgaggcctggggaaggggactcaggggcgaggaggatgactgggtccggtcgccaggactgtctctgaggcagaaacgccggctgggcgccggggaggacgatggccccgaccctggcagc

SEQ ID NO: 38700 - DNA, 835 bp, Homo sapiens; identical to SEQ ID NO: 27460
  chr10:102894440-102895275
  hyper

SEQ ID NO: 38701 - DNA, 749 bp, Homo sapiens; identical to SEQ ID NO: 29666
  chr10:102899933-102900682
  hyper

SEQ ID NO: 38702 - DNA, 806 bp, Homo sapiens
  chr10:105037277-105038083
  binary
cgcttcgccgtgttcatcgagaaggtgcatcagctggagacgcagaaccgcgcgttggaggccgagctggccgcgctgcgacagcgccacgctgagccgtcgcgcgtcggcgagctcttccagcgcgagctgcgcgacctgcgcgcgcagctggaggaggccagctcggctcgctcgcaggccctgctggagcgcgacgggctggcggaggaggtgcagcggctgcgggcgcgctgcgaggaggagagccgcggacgcgaaggcgccgagcgcgccctgaaggcgcagcagcgcgacgtggacggcgccacgctggcccgcctggacctggagaagaaggtggagtcgctgctggacgagctggccttcgtacgccaggtgcacgacgaggaggtagccgagctgctggccacgctgcaggcgtcgtcgcaggccgcggccgaggtggacgtgactgtggctaaaccagacctgacctcggctctgagggagatccgcgcccagtatgagtccctggccgctaagaacctgcagtccgcggaagaatggtacaagtccaagtttgccaacctgaacgagcaggcggcgcgcagcaccgaggccatccgggccagccgcgaggagatccacgagtatcggcgccagctgcaggcgcgcaccatcgagatcgagggcctgcgcggggccaacgagtccttggagaggcagatcctggagctggaggagcggcacagtgccgaggtagctggctaccaggtaagggccggggctgggcgtggggaggggtgccctgccctcttccgcgc

SEQ ID NO: 38703 - DNA, 1451 bp, Homo sapiens; identical to SEQ ID NO: 34115
  chr10:11059337-11060788
  binary

SEQ ID NO: 38704 - DNA, 1429 bp, Homo sapiens
  chr10:112257163-112258592
  hyper
cgaggcaaatctccgacgtcctctccttacacgcgcagacctcggtagcgacgggaatccgttccggactcctctggggccctggccggctccctcggccctgctcagcgcggcgcgggcgggttctcagcccacgtccgtgaagctgaaggccggatcgtgcggcgccgccccgccccccacggcgcttcctcctcggtccgcaccgcgagggtcaccgcggccccggagcgcctgggacactcgaccggcagccgcgggtgatgcgcgagtgagtccctcagcgaagcgcggaagagagaacgaagaggcgccttccacttcctctcgctctaacgccggcacccgccccgcgcgtccctcgcccccgctgccccgccccctgcagggcgtggccacggcccgaggggcggggaaacacccatatttggccttatatgggcagccgcgtcacggacggcactcattcacataaaacgctgcgcggccggcggaatccccggcttctagggcggcgagcggccgggctggctatcgagcgagcggggcgggaacgcggagttgcgccgccgctcgggcgccgggctccgtcgcggccgcagccccgcgggtcgccctcccgtgcctcgcccgcggacaccctggccgtggacaccctggccgtgggcacccgcggggcgcgcggcgcggggccgctggccggcggcggcggcggcatgaaggtcacgtcgctcgacgggcgccagctgcgcaagatgctccgcaaggaggcggcggcgcgctgcgtggtgctcgactgccggccctatctggccttcgctgcctcgaacgtgcgcggctcgctcaacgtcaacctcaactcggtggtgctgcggcgggcccggggcggcgcggtgtcggcgcgctacgtgctgcccgacgaggcggcgcgcgcgcggctcctgcaggagggcggcggcggcgtcgcggccgtggtggtgctggaccagggcagccgccactggcagaagctgcgagaggagagcgccgcgcgtgtcgtcctcacctcgctactcgcttgcctacccgccggcccgcgggtctacttcctcaaaggtgagcgctcggggtccctgccacgctcgcccctccggcgcccccgggtcccctccctgcgccggggcgccctcctacaccctgggaccgggagagtcaccacctgcaggagtctgcaccctgtggcttgttgtgcgcttgggagggcactgcaaatgtcagcactcagagctccccctcttccccacccgcgttcctcgaaagcgcccggcagcgggtctgcccggtggtctgggtggagttggttatgctgcgggggctgctgctgtttagcagtttgggggccgtcggctcgtgccgggcacgagccccctttccagacgcgagcttcgcc

SEQ ID NO: 38705 - DNA, 883 bp, Homo sapiens
  chr10:118608472-118609355
  hyper
cggctcggctcagagcaggtagttaataaacatgagccgaatgaaagaattcctgagatcgccaccgctcagtaaggatgccctgagcccctacatccctcccccaacagagtgggcctgcctggcacgggcggccttagcaacccggaggagctcactaacagcagagagcaagggggcgcgtggggagggcggggtggcccaagacgctgggccactgggacccgagcgcgcgaccccagccggaattcggagctaaggctgccgcgctccggcaaaacgcgcttgatgaggtcgttaaagatttccccctctggaaaatcgccagggaaaagtggtgaaaaacgaagccgggagggccctagtctcgggagtctaggaggagcccaacccccggacctaatgccgcagggagaaaagacagagcagcgagcgcaaataccatcctagctccaataaaagggaacgacttttaccgcaggaagaacctaggcctggaagccacgcgagatctgggggtcgggatcacgttgcgttgcctagcgacagcagggacgctcgtgggaccccaggctaaaccccgctgtagccttaaatctcctaccatggaggaagaaggcggcggccgcagctgtgggaccactagggagctgcagaagctgaagcagcaggcgatggagtactaccgggagaacgacgttccgcgcaggctggaagagctgctcaactccaccttctacctccagcctgccgacgtctacgggcacctggtagggacctgggacaagcgctctcctcccgccaacccctctccccccgccccgcgctgcggcaacgccttgcgcctgcgcctgcgcctcagaatctcgcatgccagccgccc

SEQ ID NO: 38706 - DNA, 975 bp, Homo sapiens; identical to SEQ ID NO: 23756
  chr10:118891213-118892188
  hyper

SEQ ID NO: 38707 - DNA, 767 bp, Homo sapiens; identical to SEQ ID NO: 29673
  chr10:118893719-118894486
  hyper

SEQ ID NO: 38708 - DNA, 388 bp, Homo sapiens; identical to SEQ ID NO: 24900
  chr10:122708510-122708898
  hyper

SEQ ID NO: 38709 - DNA, 1474 bp, Homo sapiens
  chr10:12391177-12392651
  binary
cgcccggcgcttccgagccacgcagaggcgccccctcccgccggagacgggaaagccccggcgcccccagactgggctccgtttccagctcccggaggggctggggctctcccgcgtgcgccccgcacctgccgggggcccgtacccgccctcgccggggctccagggggcacgacggccgtggcccggcgctcttgggaggggagcgggacatccccgaaggcggcgcgctggaggcggggagcggccggggcgcacggagagggcggggagcccgcgggagggggaggagggggaggagggggaggaggcgcgaggtgggggggagcgcggcgggcggcagggagggagcgggagggaggcaagaaagtagcagaaagtgaggctggcaggcggcggcaaaggagccggcgcgcggcggcggcaggaagtctgtgcccgagaacagcagaaataagagccagggagggaccgcggccgcggcggcggcggcgagagcgaaagaggaaactgcagaggaggaagctgcgccgcagcccgagccgcccggcatccccgccgcctctgcgcccgcgccgcgcccccggcgccccctccccagcgcgcccccggccgctcctccgcgccgcgctcgtcggccatggcccgggagaacggcgagagcagctcctcctggaaaaagcaagctgaagacatcaagaagatcttcgagttcaaagagaccctcggaacgtaagtggggaccggggaggcgagggtggaggtggccgcggcaggggctgcacgggcagctccagctgccgccgccgccactaccgcggcagaaacccagcctgtcaccgcgtcctcattgtcccgttctcggcgctgcggagcccccccgagcgcgcccgacgcgtgggcctgcgacccccgggtgggcgccgttcccgggagggggagggggcagcgccgggctgtcagggagcagcccacgcgggcgcgcgacttcccacttctcctgccaccgccgccctctccgctgccttctccccacgcgtgactgtgggctgagcatggtggggatggctgtttaccggctgtgtgcgtttactcgccgtgtgcatgggcgcaccgcgttggcgagacgtggtcacgagaagatcagcctccagtcgttcccatttctgtccttacatcatgtatttctatggaattggcatctgcacgtacgaggtgtaggcaagactttgggtggccacgcgaggatggaagggaagggcttcgcagtgctcagggtcacacgtgggcagagcctcaccggagggtctgtgcatttcacgcgggctcggccgcacgcgccggggagcgcgtctccaagggagggtctgtgcgcgtcgctgcgcgggcggtgctctctccgggctgcatcgagtcccatgctgatggctgtgtctcaagaaagcagaaataatccgaagtcgatggcaggaac

SEQ ID NO: 38710 - DNA, 933 bp, Homo sapiens
  chr10:124907174-124908107
  hyper
cgcagggcgccacggtcccaggagtgccggctttgcccgcccactggggctagaaggggtggagggctgggggaggatggtggagcagcctgtacaagcccctgggaggcgcggagacccgtcgcctgcggaggcgtcgagccactccagctccgagtcccgcaccgcccctgcctctggagagaagggtccaaggggtccaaggagtcggagttgccgcagccgccaggaacccgggctagaatctgcagctgctttcagccctggctgcccctggttagacgccgctgatgcccgccaggccctcggcgcgctctgggggcgcaccggtgctgtgtgcctggccggagcgttttgaaattttccggggccgctcggcggcgctgcgattggccgcgttcgggtaacctctatgcaaatgaggccgcgccgcctccgcgccgccggagacccggcgagttggcgggcgaggaaggggcatttgcaccggggctgggcgggcgcacccagagccaggcgggcaggaacccctgcgcagccatccggtgcctgcatgtccctggcgcggaagggacgcctcaccagcctcggcgccccctccccctagatttcctccccgcccctccccactgcctgcctgctgcaccaccttccacccagatcacccagatcgtctctaaagggagttcttggtttccttcgatttcttatgaacccaggatgggcagcaaagaagatgcgggcaaggggtgtccggcggccggtggcgtctccagcttcaccatccagtccatcctgggcgggggcccctcggaggcaccgcgggagcccgtcggctggccagccaggaagcgcagcctgtccgtgtcctcggaggaggaggagccggacgacggctggaaggcgcccgcctgcttctgcccagaccagcac

SEQ ID NO: 38711 - DNA, 869 bp, Homo sapiens
  chr10:13043117-13043986
  hyper
cggcctggctctaggtaacggcgacctcgggaggtggcgcagagagagagagaggtggcggcggcgccgccgggctcacctgaggaagaagaaataggagtagtcctggaccacggtgtgggagtggcacgagaagtagcccaggccggtgaggttgagcctggagccggcgggcacctccagcatgctgccccacgcctggtcgcacagcatctcgacctcggccgagtagaagaggcccccctggccggcgtggtactgccagggcaggtggttgtagaggccgggcgcctcggggtgcagcgccagcaccctggcgtacacgatggtctcggccagctcggcgcggcagccctcgctcaggggcctccactcggagggcagctggcaggcgcgcgcgggcgctgggggacccgccaggcagagcgcggcgagcagcagctggcgcagcatgccgggccctcccggggcgcacggggcggcggcggggagcccggggagcccgccggcccgggaagggcagccctgggcgctcggctgctcgggccgctcccgggagctgagcgcaccgctgtctccgccacggggctcggcatgcccggccctggcgcgccacgctttaaaagggtcccggggactggacgcgccgggcgcccgcctcccgccctgccccctgcggctggggcgtgggcgggggaggggcggggagtcgggcgggtcccggcgccggctggggcggggaccagggactcggagaacgcggggacgccgggacccagccctgaattggggacagtggcccagcaatctcctggcgccccacgatggacgtggtccgagcttgccaggcgtaaagcctgtttgcaaac

SEQ ID NO: 38712 - DNA, 1302 bp, Homo sapiens
  chr10:131769014-131770316
  binary
cgctcttggacagaaatgtgtcaagctctcctcccttccagcctgcataaaccctttcgcgcacattcgcgcgacttctaagggatccaagccagcggactgggtccagcagcgcgcggcggcgggacgcacccctcctctccccccaggaaggcgggtgcacgccggggctggaagggggagggtgcacctctggctacaaattcggccgcgaagagattctttaccaactctaagggtttgctgaatgtacagaccagaatgagtcccgttaaaaggaagctattcccacattaaacatgtgtgttttccatactaatggagtcacttaaagctgttgctaatttaactttttaaaaaggccacactgtggaaatttgcattttctttaggacattgaaatgaagagaaaactgctgggcggcaaggcggcccagggcatagctaggggccatgtagaaataaaaacagataaagaaaagaagaaagaaagaaaccggcttctcttctagactattaataagcaatttgtcccgctgaaatttacattgcaaagcggagggcgccggcagccgtggcggcgggcctggcgcgggctccgggggtgcgtcggcgcgggggcggggggggtcctccggccatccgggccgccctcgggggcgatccaccggcggctttgaactcggtgtccttgccgccgtgccgccgaccctcgcccgcacacgcgcgcatctgcacgccagggccccgcctgggctgcgcacccggaggccgggactggcgctgcgctagcgccacccgggctgagctgcagccttttgtggggggggcgggaatccctccgctcccagtgacgccttggactcgcggacccccatccgccccaaacgactgcccaggccttaaattaaaaatggcaacaataagcttaatttttttttcctccttagccgcgccgccccggtccaagtctaccgcaagcgtggagccccgagcgccgcgcccccgccggctctcccgcccgcgcgccgcccgacggagccgcggatcccgggcctagcgtggggccagggcgccatctacgggcgccgcgcggctccgggcggccgccgcctcctccctctcagcgtccagagcccgctcctcctcccgccgccgccgccctcgccccgcgccgcctgccacttatcacaattacccgacgctcccgtgccattttgcttatgaaacactgattgctagttatgcggacttttaagcactatattaaaactttcgaaatgaaggcgctctcctgcctgc

SEQ ID NO: 38713 - DNA, 1559 bp, Homo sapiens; identical to SEQ ID NO: 34128
  chr10:133794742-133796301
  binary

SEQ ID NO: 38714 - DNA, 527 bp, Homo sapiens; identical to SEQ ID NO: 23760
  chr10:133951484-133952011
  hypo

SEQ ID NO: 38715 - DNA, 163 bp, Homo sapiens; identical to SEQ ID NO: 23761
  chr10:13405100-13405263
  hypo

SEQ ID NO: 38716 - DNA, 1457 bp, Homo sapiens; identical to SEQ ID NO: 23762
  chr10:134732799-134734256
  hypo

SEQ ID NO: 38717 - DNA, 1476 bp, Homo sapiens; identical to SEQ ID NO: 27474
  chr10:16562056-16563532
  hyper

SEQ ID NO: 38718 - DNA, 2263 bp, Homo sapiens; identical to SEQ ID NO: 35300
  chr10:17270086-17272349
  binary

SEQ ID NO: 38719 - DNA, 1697 bp, Homo sapiens; identical to SEQ ID NO: 29695
  chr10:17495133-17496830
  binary

SEQ ID NO: 38720 - DNA, 779 bp, Homo sapiens; identical to SEQ ID NO: 23766
  chr10:1779373-1780152
  hyper

SEQ ID NO: 38721 - DNA, 1263 bp, Homo sapiens; identical to SEQ ID NO: 22757
  chr10:18429033-18430296
  binary

SEQ ID NO: 38722 - DNA, 950 bp, Homo sapiens
  chr10:20105154-20106104
  hyper
cgcgggggagcgtggcgacggcagcgcctcctccgccaccaaactcctggggctccgcgggggcttggggccacctcctcctgagcccggaggaaccctctcccgataggttccagcgtgactccctcccactccacccttttcctttcttcttcctcttttttttttttttttttaaacacatttttttcctggcttcggacctcagactgctgcagccctaaccttcccagggctcagctctttggagctgcccattcctccggctgcgagaaaggacgcgcgccctgcgtcgggcgaagaaaagaagcaaaacttgtcgggagggtttcgtcatcaacctccttcccgcaaacctaaacctcctgccggggccatccctagacagaggaaagttcctgcagagccgaccagccctagtggatctggggcaggcagcggcgctggctgtggaattagatctgttttgaacccagtggagcgcatcgctggggctcggaagtcaccgtccgcgggcaccgggttggcgctgcccgagtggaaccgacagtttgcgagcctcggctgcaagtggcctctcctccccgcggttgttgttcagtgtcgggtgagggctgcgagtgtggcaagttgcaaagagagcctcagaggtccgaagagcgctgcgctcctactcgcgttcgcttcttcctcttctcggttccctactgtgaaatcgcagcgacatttacaaaggcctccgggtcctaccgagaccgatccgcagcgtttggcccggtcgtgcctattgcatcgggagcccccgagcaccggcgaaggactggcgggtggggtagggaggtggcggcggcggcatggcgaggttcccgaaggccgacctggccgctgcaggagttatgttactttgccacttcttcacggaccagtttcagttcgccgatgggaaaccc

SEQ ID NO: 38723 - DNA, 2098 bp, Homo sapiens
  chr10:22624037-22626135
  hyper
cgcggcgggaatctcaagatctgggcaaaggctcgcgtctcgggacgcgaagtcgacgccaaaatgggtccccggacaaggcgaccctgggagtgccggcgcccccggccgggcagaggagcgggtgggccgaggctgggacatcgcctccgaaagctgccgggacgcggcggcttcctgcagagcctgcgcctgccggatccccagaacacagaagcttctcggacatgggagctccccgtgcgccctaaaaccaggagaggaagggacgacttgggaaaagggactggggaaacagcggagaagtgaaagcggcctaaaatgggcgacggcgggcgagtcctctttatcagtgcagcaggctgccggagccgccatttggtggcggatctcggtagttcagtagcacgttgtgctgaacgtcacaactggcttgtctacgtggcatcgtcatttcttaaccgcggttttacgaaatgcaaatttccccctggccttcctcctccgcggccgtcgacccccctcggcgctccgggtggacggctccggggcgcggctcgtccctcgggtggtgcagcccccgcggcccgagacccggggagggccgggggtactttctgcgaggcgccttccccgcggcttctgcccgcgccaaagcctggtggaatccagcgcagacctaaagcacgcttgacaccccgatttttcgagactaggacgactctctgagccagcagctttcctctccctctcggggagaatctcatttccttggggtggtgagggtgacgggcactgtcttttggccccgcgtgtccgttccccggtctcccgcctcacccctctgcgaggtgaggaggggaaacggcgagcttaggcctggcgggaaggagcctacccgacgagagggctccgcggggagggtcggttggaatcccgccctagcgcctcctgctctgcccggtccccaccggggacggggaatgccagtcatttctgttgagtgctagcagggccggtgtcaccacctcgggtggccgaggcttcgaggttttcatgaaaagcccccgaagcgtgaggcgcccgcccagtggagaacaaagggccgagggccgaaggcgaggcgaggcagcgcgcgcggctcccttggctcgacctagctgggagtcgggggcgcgggcagggctcactcccggcctagaaactggagcccgccacccccgccccgcaggcgaccgcagggatcccattcttggagcccgagctgccatgttgccttcgcggaggccgccagtcacttgacgcttccgagacagcgaagcccccaacctgagagcccttcggccgtctttgccgcacagctgcagtcaaggcccggagggactgcgggacgcgggcgggagcgagagccctgtgggctgccaagccggcgcggccgcgccgcggcagccgcttcccttgccaccttcgttccaggggctgcggggctgcgcgctcggcagaggctcggttgccagtagcaaccacacgacggcgatttgcagccagggccgccgccgcagccgctggtacctctgcctcctcctacacctcgggctcgagcatttgaaaccctgggggttgccttcggtgacatctcccgcccccacctccagtcctcagtctccaaaatcctcagctctgctcaaaagccagcgcccccggctgggccctgcccccaccgcagacaataggagcggctgggagcgcacagggcggcgcgcgccgcgagcagcgggcacctgagcccccaaatccgggcgcgtcgctgagtctcagccccaggtgccctcttcgcggagttgatcagcaattctttttcagtggccaattagaaagcttttcttgacatcagaaataagggtggtgccaaagaaagaagtcaaacgcccactccctttctaataacatcgacacaaagaagagctcatggttgcgtctgcgcttggtaacagtggctttcctctgggttagagccacaggcacaagcacccgctgctatctttcttcttcgcctaccatgaatattttgcatgaaatccagaatgtaaccatttgc

SEQ ID NO: 38724 - DNA, 908 bp, Homo sapiens; identical to SEQ ID NO: 24913
  chr10:22764575-22765483
  hyper

SEQ ID NO: 38725 - DNA, 1457 bp, Homo sapiens; identical to SEQ ID NO: 22759
  chr10:23461640-23463097
  binary

SEQ ID NO: 38726 - DNA, 818 bp, Homo sapiens; identical to SEQ ID NO: 34141
  chr10:26223265-26224083
  hyper

SEQ ID NO: 38727 - DNA, 1953 bp, Homo sapiens
  chr10:28030907-28032860
  hyper
cgccgactggacatagggaataaagcaaaggagcattgccgccccggctctctttaagctatttcctttgatcttttaggaaaagggggaaactttctaaaggagttggtggtttgtggaggaaagctgcagaacccaaaaacaccgtcgggccgtttcccgactaagggagggttaaaagtacggcaagctctgtcccatcatgtaaggtaaaaagacctcaggaaaagcacattcaaagggggaggaggcagaggcagccaggagcctggagcgtggcctggggcgctgcgctccctcacgggtccgggaggtgtcgcgcgcggccgccagcgagcccagccgctccccgaggcttgcgcgcctgcgccggagcctcctgggtttctgcctctttaaacactttgaaatgcaattccacccgaaacgactggtagtaacattttgacgaaaccgaatctctgttttactaagcagcgacgccgcagaacaagcagctgatgcaatcgttcaggtggaggcggctaggacggccgcccctccccggcggggcgcccggggagccgccggatcgggccaggcagagcctgccctccactcaccggcagtctgagcagctggcccacccgcaagctaccgccccccccagcatacccctcaccccgctaaactcaaacccggccccgcaggcccggggcctccccctccgggttcgccgcgggcccagccgagccgcgctcacgcccgggactccctggcgggaggcgaccttcccgactccttgggccaggcgagccgcggggctctggcgaggggctcgagtgaccgaagagaagtccgcggagcctgagcctggactccccgactgctcggcttcgcctgtttctctgcaccgagctcagtcctttttcctcgccctcagccgcgcaccggcacccacagtccggagaggggcaaataacccccaactccgaggtccaggcagcggagggccgaggggcagctcctggcgcccttagtctccaccaagctctttggagctgccccgacgaattgatccctcatgttttaagataggagccccttaacatgagaatgcgcgagccctggaggggcagacctgcactcccagggaactccgggccctttcccgtccacccgcccgcgttgccacgggaccccgtcacagctcaccacccccacccctccgggccgcaggcgggcagggcccccaggggagtgcgcatacccggtcctccggtgtctcaggccgaggttgtccttgaggggcgggccgtcgggaatgcccacctcggggcgggcgtgaggactgtccaggacaccgctgtagggccggccaccccgctcccgctccgaggcgcctccgtcctcaaacagcaccgcaccgctgagcttgttgaagacgatggtgttcatggtgtcggttggtagggacgcgcggcgcggccgcagagcctcggggctgggccgccgggagctccgcagcggggctcggcttctaggagaggaaggtgcatctcgttacttactggctgagagtgctcagacccctgcaggttcagggccttgaacttggccgggtcgccgggctgcggagccgaggggaggagcggcgccgccgcaactggcagggaccctgcggctctccccagttggctacacgcccccgcccctgcaggttccccggacaggtacctgccctcttccttgcctgggcgatcgatccccccaatcccttcactccccagaactacaaccgggaatcattcacccgcagaggcaaaggaaacgaattcccaaacgagcctctgggtttcagtttgaatctgggagaggcatactccggactgcggagcgcgaccggcgtgaggccgcgcgtggttcttcaatcacagcagaagactaaagcctctaggaaccccaactcggggc

SEQ ID NO: 38728 - DNA, 2139 bp, Homo sapiens; identical to SEQ ID NO: 27484
  chr10:31607954-31610093
  binary

SEQ ID NO: 38729 - DNA, 938 bp, Homo sapiens
  chr10:44879650-44880588
  hyper
cgtgtgaggctcggagggtccctgggcctctctcaggtgaacccgagaagagacaggaagacagcggctggacgcgcgcccaggtccgcgtcgctgcggaccgcggagctgtgcagaagcgcggcctggcgggtggcacaagcccgacagctgcgccgcgcagcccgcccgcgcctggccaagagccccgcgagggtgtggggagaggatcggcttcgcagggagcggaggctgcgcggctgcatcggacctcacagcctcaagtcgcggcatgaggcgaactttgcaaagcgcgctctcgccatgcaccgcccgacctccagcactgtgcgcagcaggacctcggagcccattcgcctgtggaaaccgagcccgcagcgggaaggcagtgggtggagggtgggcaggcaggggtctggggtccgcggctccccaccctcgcgccttcccgcgccagtcccgaacgctctcttggggcgttcctgcccagttgtcccggctgacctcgctctgcagccagcttgaggtcaggcggtcgctctctgcaggtcacaaaccctcggcgcaaaagtagggctttgaacgcgacaccgcaccagagcgcccagctaagcgagctgcctccacccccactgtgtcgggcggcgcaaactgcgggcgcaggcagaggagccgcggctctgcgccgggcgggagccgaagcccagagcctcgccagggcctccccgccgagcgcacttaccgtcgctgaggcagagcgcggtcagcacgaggaccagcacgaccacgaccttggcgttcatggcgcgggcgggcgggcgggcgggcggacgagcgcgggtcgggggccggacgccgagcgggcaatgcggctgacggagagtgaaagtgcggcggtgggaggcgcgcgccgggcgctttagaggggagagccaggc

SEQ ID NO: 38730 - DNA, 849 bp, Homo sapiens; identical to SEQ ID NO: 27487
  chr10:49731746-49732595
  hyper

SEQ ID NO: 38731 - DNA, 669 bp, Homo sapiens; identical to SEQ ID NO: 27488
  chr10:50323163-50323832
  hyper

SEQ ID NO: 38732 - DNA, 843 bp, Homo sapiens; identical to SEQ ID NO: 26166
  chr10:50606013-50606856
  binary

SEQ ID NO: 38733 - DNA, 1247 bp, Homo sapiens; identical to SEQ ID NO: 23026
  chr10:60272362-60273609
  hyper

SEQ ID NO: 38734 - DNA, 1262 bp, Homo sapiens; identical to SEQ ID NO: 34149
  chr10:60935827-60937089
  hyper

SEQ ID NO: 38735 - DNA, 1284 bp, Homo sapiens; identical to SEQ ID NO: 29709
  chr10:64574564-64575848
  binary

SEQ ID NO: 38736 - DNA, 470 bp, Homo sapiens; identical to SEQ ID NO: 27491
  chr10:64578291-64578761
  hyper

SEQ ID NO: 38737 - DNA, 939 bp, Homo sapiens; identical to SEQ ID NO: 24924
  chr10:6621854-6622793
  binary

SEQ ID NO: 38738 - DNA, 964 bp, Homo sapiens
  chr10:71812611-71813575
  hyper
cgcttgccgccattgacacgcacagatagaacccaaagaaaggcaaagagtcctgcccggcaccggcgccgcgtgggccaaacctgcgcccgtggaggggcgcgcagagggcaccgggcgccgggagcaggcggcgcagcaccaggtgagcccgccatggcgatggcattattgtttagggtgctccggggtctggaaacaaaacgcgccgccggggcagtgcaggggccggagagaaccacctctgcctctcccccgagcccctgcgggcgcaccctcgatagccgacccaccctctgcaaaaacaaattcttaaatccagctgcccaacttgcttccttgggcgataaagggggggctgctaaagaagtggtcaaattcctgcggccagcgaggggccgggggcgtcgagggtactgagaggggaaggaggagggatgcgaggttcagcagcgggccccaggcgaggctggacccggaggaagcggaggtctcctgggaatgcggagtttcgggcgcaggagcgggaggacggaggcgcccggccgccgatgggcacggggcgatgggtggggggctgcgcagggcccgagggagcccggggagggccgctcgggggcctctgaaggtgcccgggcagggcgccggcggctccaggctgacaatggagggggcgcggagcagccgggcggaggttagggacccgagtccgggggcgggccgcgccggggaaggtcaggtcggggacgccgggtggcggggcgagggctgggggttgctgcgcggacacccgggcgccgcgggcgggcgtgcgccccggggccggcgcggaagagggcgcgaggccgggcactccccttcggttccctttccggggcgcccggtgccgacgcgcgctgcgctttcaccgggaaatggcggcccggccgtggctcgcctgggcagtctggctcccgctttgcgc

SEQ ID NO: 38739 - DNA, 4167 bp, Homo sapiens; identical to SEQ ID NO: 28428
  chr10:7449896-7454063
  binary

SEQ ID NO: 38740 - DNA, 2095 bp, Homo sapiens
  chr10:79396547-79398642
  binary
cgaactcatctccccaacaggttcctaaagtatgggcggatgtgctccctctcgcccaccgccaggagccgagccccggcaggtgagcggtgcaaaacacgcacccagctgcccccagcttcctccgtccccgctgagttggctgtccccaccccgcaccacggcacccgagcctgtgagtccccgaccccggccccagccgcagccgccaacaaccctacaataaacaagaggacaggattgagcgtccgcgtcccggagcgcactggctgggggcaactcctcacccccggcgcgccgcccgctgccccgatccgagagcaccgggagagccgagggaagggaaggcggcgaggggaaggcaggcggggatggagggaggcacggcgcggcgcggagcgaggaggtgggctgcaggggacgccgagaagcggtggggctggcgcagagggcgggcgcccggggcgcgcgttaccttcgtcttgcccccgcagtggcagcacacggtccacaggtacttgagcgtccgccagagcaagatgatgaagaggcccccgaagaaagtcaccatggaggaggccaggaaagcccaccacatgcgttggccccggctgtcgcacggcacctccatggtcaccgggatgatgagcgcatccatcttgggctcgtggaccgaggacgaggaggaagaggaggaggaagaagaagaagaggaagaggaggaggaggaggaggaggacgcgtctaggctgagatggttcgcgtggatattgctactcattctaagactgctgcctccgccgccgccgccgccgccgctgctgccgccgccgccgccgccaccatttgccatagctagcaacgggcagccggcgcaggggctcgggggagctcctcccgccgccagcgccaccccaaacacccatcaacagccatattgctgctactgctgccgccgccgccgccgccgcggagcgcgggaggggggcggggaggcgcctgggctcggggcgctgtgcgcgacctggcggggtgcgccgagatatatacagcgagccgccgccgcccgcccgggggggagggggatggagtgcgcgggcagctccccctccccggcccgcgccccgctcgccccgggctgcgctggccccgagcgccgagagccagggggcgccgcgggccgcccgcgcccggggtctgcgccgcccccgggcccgccccggctccgcgcgcggtcccgggtgtcctcggcgccgcgccgcccgccgtgcgccacgggtgtgcgctgcgctcggccggtgacccccttccccgagcgcctcccgcgcggctaacgagccgctctccgcttattaggtggtaactcgttaataatggataatcggccccctccgcccgggcgcccctgcgccagccctcctcccccggctgcgctcggctccggctcgccgcgccagtgcgcgcccggccgcggcaggttcaccgcgtccggccgccggcccgtggccgcctgctagcccatgttctcgggaccccctagtcctgtcgccacgccgctgagcccctcggcctccgctcgctcttcctccttgccgcctccgactcctcctcgtccccgtcctcgccgcccaagcctcttcggcgcgcgccccgcgctccccgcagccgccagcagcagcagctgcagcaactggagcgggcgcggactcaggacgacccaggcgggaggggaggaggctcgccgcgctggctcgcctgggctccgggctgggcaggggtgggcagggcccctcggcagcggcccggcaagcgcccctgacccccagggcgcaaggtagagcgcccccagcccaggcgcggggccaggcgcctctctccaaggtgctgcgcccccagccgagagcggtggggtacactgggaggacggcggggcgccccggtcaggccgtttttttccccaaagagcccccagtggggaggggaggagtggccagctgtcaactggattccacaggctgagctccccaggaccctcgggcttcgggagtgaggaggaccccacgccaggatacacacagctacccacccctacttc

SEQ ID NO: 38741 - DNA, 597 bp, Homo sapiens; identical to SEQ ID NO: 34156
  chr10:82116595-82117192
  hyper

SEQ ID NO: 38742 - DNA, 882 bp, Homo sapiens; identical to SEQ ID NO: 23029
  chr10:83633664-83634546
  hyper

SEQ ID NO: 38743 - DNA, 910 bp, Homo sapiens; identical to SEQ ID NO: 34157
  chr10:85954199-85955109
  hyper

SEQ ID NO: 38744 - DNA, 994 bp, Homo sapiens
  chr10:88126045-88127039
  hyper
cggcccggcctccagccgcgcttaccgatgtggatgatggagtcggcccgcaccgacacgcactggcatatccaggggagaagccacagcgtcagcgcttccatgtcccccgggcgcgcggctcatccacccgggcccggggcgaggccgagggcagcgcgaagcggggaggcgctggtcccggtgcagtcccgggccgctccccgggagagccgagcccgcccgtgcgtcttcccccgcgcgcccgcccctgcgccctgcgcccgccccagcccagcccagcccagcccagcgcggtcgggctcccgctccggctccggtggcggctgcggcggtgctggcagcttgagcccaggccggcgcggcgggggcggcccgcggctgtggcagcggcgcttcccgcggctagagcggcttcgggggaggctgaggcggtggcggcggcggccgggccggcgtggcggctctgggctggctgtgtgtctgagccccggcgaggagcgaactgcggaggacgccccctcccctccccctccccctcagctccgctccccctcccctccctgcccgcctccctcccctccgcccgcctctctaccacgtgactgcggagcctcagcctcgccgcgcggctctcgcccgctcgcggctcggagggggcgccgggtgctccacgctcccggctcgggggacgctcggagaccggcacagcggcggggaccggcctgggctgcggcgcgccgagctctgacggttcgggcctccttctccggttcgccaggggcgggagaatggaggagggccggccgctaactgccctcgaggggctcccgaagcgccctggcgacctcagcagccgcgcgtctcgggtcatgtccccggccgaaacagaccgttcctcgtggagtgggacctggggagcaagaagagagaccggggcggggcgccgggccaggccccaggacagctggggagccagagggggccggccgcc

SEQ ID NO: 38745 - DNA, 643 bp, Homo sapiens
  chr10:90342577-90343220
  hyper
cgcggggtactcctgccgggcccccaccctcgcccccaccctcgccccttcttgggccttttcccgggcggcggaagtccccgatcacgtgacgaggcgcgccactcggcgcatgggccgcgctacacggccgctcagggagctgagggtatagcgttttcgccttagactttcttgggtgcaggcccacaccacctcagcagcctgcccggcagtcctcttttcccaggttttggcgtttagacaacccacctgagtcctcagccttgtcccacacagcaaggtacaagggaccggacgtctgcctcctcagcagcgcagcgcacaagcttcctgtcatcccggcgcccacgatcagcacctgcgccatggcgagagggagcagcgatccgcgctgagtctctgcggcggggccgttcggcccgggctttctggaaaggcggccgaaccggcgctagcgctctttggttccgtgctccctgggccgacctgggccctgagctttcctccggccggcctgcagggggcggaaaggaggcggccggagctgagaggcccctccgtccttgaggagcaaacctggggctgcggagaaccggggctgtctgtcttctcgctttgggggccgggcgccctgcccctc

SEQ ID NO: 38746 - DNA, 1305 bp, Homo sapiens; identical to SEQ ID NO: 34158
  chr10:90966883-90968188
  hyper

SEQ ID NO: 38747 - DNA, 822 bp, Homo sapiens; identical to SEQ ID NO: 27494
  chr10:92616995-92617817
  binary

SEQ ID NO: 38748 - DNA, 1992 bp, Homo sapiens
  chr10:94833041-94835033
  binary
cgcccgatgccccgaggctctctcttggactctggccctgagttcttctgcgcgatccttcggagacgtctggaggcctgctttatgcatctctcttggacctcagtttccccacacgtgggaggaggcagctggacgattcctgaaaggactttcccttgcttcctcatcacgtggaagagagcccacccggcacctggaaatggaaagccagtgaaggctgctttgggccggggcagcgggtgggaccgggcgggagggattccaaagagaccgccgggaaggctagagcttggaattccggctcctcggagtcctggccctcccccaccgccgcctcggagctcagcacaccttggatgggggaggcgggcagctcctagccccgcaccccaggaggcgcgctcggagggaagccgccaccgcgccgcctctgcctcggcgcggaacaaacggttaaagattttgggcagcgcctcgcggggggaggagccaggggcccaatccgcaattaaagatgaactttgggtgaactaattgtctgaccaaggtaacgtgggcagcaacctgggccgcctataaagcggcagcgccgtggggtttgaagcgctggcggcggcggcaggtggcgcgggaggtcgcggcgcgccatggggctcccggcgctgctggccagtgcgctctgcaccttcgtgctgccgctgctgctcttcctggctgcgatcaagctctgggacctgtactgcgtgagcggccgcgaccgcagttgtgccctcccattgccccccgggactatgggcttccccttctttggggaaaccttgcagatggtactgcaggtaagggagggtggggcgggacaggctgcttccccggagcccggcgcggctctgggcttctgctgaagtcggggtaggcgcccccgggaggcatgctattgcggctaggagcagggctggcgggagcgcggcgctccccggcgccccctcatgcccacttctctcctccgccttcctcccacagcggaggaagttcctgcagatgaagcgcaggaaatacggcttcatctacaagacgcatctgttcgggcggcccaccgtacgggtgatgggcgcggacaatgtgcggcgcatcttgctcggagagcaccggctggtgtcggtccactggccagcgtcggtgcgcaccattctgggatctggctgcctctctaacctgcacgactcctcgcacaagcagcgcaagaaggtgggggcaggaggcgacggctggacagggagggggaccccatttatgagcggaattccggctgatggatgctaggcgcgggctagcagcttgaggtgggctaggaccctctgccagctccaggttagctttcccagctcggagagtgccatgtgtctggcaggactgggggtgtctggaaggggacggcggtagacgagaggggcggatggaggcttttaacgctgtcccctcctcgggactcaggtgattatgcgggccttcagccgcgaggcactcgaatgctacgtgccggtgatcaccgaggaagtgggcagcagcctggagcagtggctgagctgcggcgagcgcggcctcctggtctaccccgaggtgaagcgcctcatgttccgaatcgccatgcgcatcctactgggctgcgaaccccaactggcgggcgacggggactccgagcagcagcttgtggaggccttcgaggaaatgacccgcaatctcttctcgctgcccatcgacgtgcccttcagcgggctgtaccgggtaagggcggcaaacgggctgcggactaggggcgcgggacctgggcgtctgctcaccgccgcgcgctctctgcgctcagggcatgaaggcgcggaacctcattcacgcgcgcatcgagcagaacattcgcgccaagatctgcgggctgcgggcatccgaggcgggccagggctgcaaagacgcgctgcagctgttgatcgagcactc

SEQ ID NO: 38749 - DNA, 1144 bp, Homo sapiens
  chr10:99530903-99532047
  binary
cgggggataattccggggacgctgggctgagctaggacagcgtgtgtgtgtgtgtgtgggcggagggggggagctgcacctcttggggggttcgcagagctgtgctaggggagctgcagggccgtcggagcgcgcggggacggcggcggcggcgctacctggaggcgcggtggcgggcaggtgcccgaactgcacggcgatgcagaggtcgttgtccagggggaacttgtggcagtgcagcatctcaggccaggggaagccgtaggcctccatgagcggcgcgcagccggcgcgcacggcctcgcacagcgagcggcacgggtagatgggccggtcgagacagacgggcgcaaagagcgagcacaggaagacctgcgtatccgagtggcagcgcttggccagcagcggcagccagctgctcgcctgctgcttcacttcggccaggctctcgtgctccagcaggttgggcagccgcatgcgcttgtagcccaccgtgtggcagagcggcaggtcggcagggatgtcaaggcactgcggcggcttggagtaggagcggccgtgcagcggctcggcctgccagccatagtagtcgtactcctcgcagcgcgccggcgcccagtgcagcgcccccagcagcagcgccagcgcggccgtccgcacgcccccccccgccgccgccgcccgcatggctgcgccctctccaggtgcgcgccgcgcagccccccgacgctcggtgcccggcggcccaggtgttccggcgtgcgcccccggccctgactctacccagccgccgccgccgccgccgcggaggtcgcccaggtgggtggcagcctgcgctgcgggcgccccgactgatcctggcgcctcccacctcggggctccagcccgggcctcgccgtgcgccccagccaatctccggccgcctggccccagctccaaggcggggaggcagtgggggcggccctcagcccctcccgcaccctgcccgagcgtcccgcccagcgccaggtcttgcgcccctctcccggctcggctcccctgccgcagccctggcctcgcccagcgtttctccccagggctccctgcctccctgggcattttcctcgaccctcgccttctccatccttcctccttatctctctcc

SEQ ID NO: 38750 - DNA, 962 bp, Homo sapiens
  chr10:99789907-99790869
  binary
cgcccccaacactttctctgccagctgctggctgtcgcccccacacatcagctcccacctctccgccacctccaacccggccgccgcctcacccccagcccgcgggggaggctccgcgcgccaatcgagtccagcgcctcccagcaagttaggagcgaagccgccgccttcgcgatcccagtcttcccgggttcccgggcggcgtccccgccacccttgcgggcggatccgggggggcgcgcagagctggagaaactttctccgccttagggtggggggcaccggtgcagatactcacgccggggtcagcgctcggagccatcctcccgctctcggccccgccgcctaggggcgtgggaagcgggcgctcgctgccgcctctgccgccggcgccgccgcctgcttgctcccagccccggtcccgggctggcctcgagcctcccgccccgacgccgcgcgctcgctttatacaactccactcgagcgcgcccggtcttatgtaaaggctggcggaggcccgcagccaatggcgcggcagctggagccgggggcccggggtggggggcgccggcgcggccaatcgcggccccgagagcccggagagccgggcgtggggagggagcgcctccccgcgctgatttaggagccgggattgcggtggcagcagccggcagccaggctggcccggcgcggcgcggcggccactggggtgggcggcggcgaaggcggcggcgagggcgggcgccccccgcgccccgccactgcgtcgcgtaaccttcaggcggcagcgaggcctggcgaggaggggagagggcgcctggctgggcgctgggggccccaggccggagggaagcgagggtccctcgggaggcagcgcagggaaggaacgcgaagggggaggggagggcggcgagccccaggaccccgcggccacccctgcgcgcaggaccgagggtggaggc

SEQ ID NO: 38751 - DNA, 1147 bp, Homo sapiens; identical to SEQ ID NO: 22765
  chr11:104034057-104035204
  binary

SEQ ID NO: 38752 - DNA, 1408 bp, Homo sapiens; identical to SEQ ID NO: 29727
  chr11:106888298-106889706
  binary

SEQ ID NO: 38753 - DNA, 1502 bp, Homo sapiens
  chr11:107461401-107462903
  hyper
cgggggctgccggttggggtgagggatagggttctgcagtcccgggaaggcaggtgaagggtggggatcaggattggaagagtcactgggtgctcggtgagacgagggaggttggagctgaactaaaacaaagtttgacttctggacaattatccagggagagggcggggaacacaccttgcccggactgtctgggaatcccattgacaggtcatctcaggttcaccatcttcctgtcgtgggctcctccagggaggccacccgggagcaattaaactgggccacaccagccacctcccacagcagcggggtccgcagatttaaccctttccccccagattccggcactgggtgccgcgctctctcccccagcaccgcgcccgcgcccccggctcccggactgggcatgctcagtagccgcccgcttcgtgctcccagggaagcctctgcacgccctcccccgctgctctcggtcgcctcctcgccgccagccgccccgggtgcatcccggcttgctccgctccacgcgacccagattcctgccccgcccccgccccttccgcgcccgcagccagtgcggcagccgcggccgcccctgtccagcctcggcgcccgggaccgagcgcgtcgctcgccgccgcggagcgcgtagccggagcgcctggggaaggcggagatgaagaccacgccgccgcgcgccgggagctgctgagcctaccgccgccagagtccaggtgattggcgaccccagaggagcctagggagtaggggcgaatgcccttggggaggagagaggtgcggcgaggacgcgaggcatcacgcaagctgcgctgtgcctgggaggcagcagaaatgctaagcatcgggggcagagagggaacgggaatgaaagtgcactctgccttggtgcaggggctccggggtcacccaggacagtgatttccccttctatcctgtcctcccaattaacacccgagaggctgcaggtcggcgcgagaggctgtttgcatctcggcccgggcgtaggtcgcctagcgacctaacgccgagggctcggggaagggatcccagacagagccaaaatggaaggcgggacaagggcggcctggctggggcgaggggctggtctgggtccctgggaaccccttgccttgtgggcttcggtctccagggaggagctaggcagccgggctgcggggccgccggactgtggggtcctccgcgcagcgagctgggaggagcggtcggctgggctgttgagctgcgcctcctccaactgctgggaaactccgcacttcaatattggagcatctctttcccgggcaggtagaattggacagccgagtggggagtgacagctgacagctgacggggctgttaaaagcagagcagtggagtgtggtggtggggtgagctgttgtgggtgcttttttttgttttccaagtgtgggtacgggctgttctgactcagtgtttatgctcaacctctaagcggcgagttc

SEQ ID NO: 38754 - DNA, 1221 bp, Homo sapiens; identical to SEQ ID NO: 26186
  chr11:107798868-107800089
  binary

SEQ ID NO: 38755 - DNA, 1257 bp, Homo sapiens
  chr11:110166501-110167758
  hyper
cggcctcaagggcccgagaaagttacagggctccgagagctgcaacagcagcaggtagagctgcggccgggaaccgcggccctggcctggcgggtgcgagcggcgggagcgactggcgccccaaagcctgtcatgcaacatcccctttgccactggggcggaacgcacgctctctagtaatttaacacccctcctttcaaactggaggccggggaacaagttctaataaatgtaaaatcgaattctacctacgctgaatatctggattttcaaacaacccttgggaccatgccagcccgggcccggggcccagtccaggcagcgggagcccaccgtccccagggcgctgggggtccgacaccggcgctgaaggcagactccgcgccccgaggaaaggagaatcccgcggcggcgaaggtcgactttggcccggccaggcacgttcgggccgcggctcagccacgactcgggcagggcctcgcggcccctaccagccccgggaggagcctggccggccgggccgttaccacagtggcgcctcggccagctgggcgcgagcggaggcgcgccaagccctggcggcggcgccacggccgggcagcacgggccccgcaacttcgcgccgccaccttagcgtctccggaggaaccgggagcggggagtgggggaagggagggcgccgcgccttacccggagagcgggcggcttctgcccgccggcgtgtggctggggcgctgcgcggcggcgcggctgcgacagggagggagaagcggtggtgcgagcgctggcccgcgggagacgagaggcgccgccgccaccgcagacagctccgcaatatggccgctcggcgcctccgcgggaaaaggcggggctgcccggcgcccccccgcctccccctgccggccggccgtcctcgcgccgcggactgagcgccaacgccgccgctgggggccgcccccgccccgcccctcccgcaggctcgcagccgcaggcctggctccgggcgtggccgggggtcgcggtctggggccggccaacgcgaggtgggtggctgcgggctcgggagcgcccagggaaatagggcgaatgcgccggagggtcgagcccttccagagagcgctgggctccagctaaacctgcggtcgagggaagcggagccgcccagcccaaagctcggagtgtgcccgccgcctccccaacgagtggaaacttgaaactcccgctggtgccagcaaactcactgagggcgttgccgtc

SEQ ID NO: 38756 - DNA, 942 bp, Homo sapiens; identical to SEQ ID NO: 32479
  chr11:110583219-110584161
  binary

SEQ ID NO: 38757 - DNA, 855 bp, Homo sapiens; identical to SEQ ID NO: 22767
  chr11:115375340-115376195
  binary

SEQ ID NO: 38758 - DNA, 350 bp, Homo sapiens; identical to SEQ ID NO: 20870
  chr11:11833053-11833403
  hypo

SEQ ID NO: 38759 - DNA, 932 bp, Homo sapiens; identical to SEQ ID NO: 26190
  chr11:120435049-120435981
  hyper

SEQ ID NO: 38760 - DNA, 477 bp, Homo sapiens
  chr11:120894634-120895111
  hyper
cgagaaagagcagatgaggtgtttgtggtaaagcctaagccagtgcagccatccccgtcgccatggcaaccccagcgcggttggggaggacccgctcctccggcgccccctcccattcacgcagcggacgtgacacgtgcggcggggtcacgtgttgttgttgggccgggaaagctgcttccgggtcaatgcaggacactgggctccggcggccagagtgggggactaggtgaagcggcgccgggccggggctggccgggaccaggcccgaggctgagcggcggcgacagcggtggccgggaggggggaggagaggcgcagccagaggagccgccgcagtagctcccccgcctcccgggctgaggggtgagtggagccgggcccgctggctctgccgggctctcgaggcccgaggcgttcccctctggagccgaggcgcggagggtcgctcctgcagggtgctgggataggacactc

SEQ ID NO: 38761 - DNA, 939 bp, Homo sapiens; identical to SEQ ID NO: 22768
  chr11:123228638-123229577
  binary

SEQ ID NO: 38762 - DNA, 1291 bp, Homo sapiens; identical to SEQ ID NO: 22769
  chr11:123300826-123302117
  binary

SEQ ID NO: 38763 - DNA, 355 bp, Homo sapiens; identical to SEQ ID NO: 30941
  chr11:124790854-124791209
  hyper

SEQ ID NO: 38764 - DNA, 1201 bp, Homo sapiens; identical to SEQ ID NO: 27504
  chr11:128562635-128563836
  binary

SEQ ID NO: 38765 - DNA, 1617 bp, Homo sapiens; identical to SEQ ID NO: 23804
  chr11:128563902-128565519
  binary

SEQ ID NO: 38766 - DNA, 842 bp, Homo sapiens; identical to SEQ ID NO: 22771
  chr11:133938756-133939598
  binary

SEQ ID NO: 38767 - DNA, 785 bp, Homo sapiens
  chr11:17756064-17756849
  hyper
cgggcccagacgtctctcggagcccccgcccctggagtggcgttccccgagggcggaccgtgggcgggtcccccgggagcagcaggagccgcgcggggcgggcgcccccagcgccgaggttgagggaggccgggctcggtgcggggctgggaggggggcgcggaatcagggctttttaggacccagcgcggcgccttcctccgggggcgagtgcggctgcgcgcgccgtgtgcccgtgtccggagagcggcgggctggacgcggaccgcgcgaacgagcaggcgacgggcgagcagcaagcggagcagcagcccgggcggcagcagcgtcgcggcggcggcggcagcggccgctccgcgcctcgcctcaccggcctcgctggcctcacctcgccgcgcccggacccgccacccccgcctccccgcccgacctccgcagcccccgtctcggccggcagcgcccaccgcctgcccgaagcgaggagcggagtgcggggcgcagaggcaccggagccagtgcccgccggccccgcaaatcaaacccagccaggagaacccccgcctggccccgtgcagctccgcgaccgccgggagctgtcccttcagcaccgccgcgggagcccaagtccgagcgcagcccagcggaaccccagctcgagcccgggctcacggagagcagcgctcggcgttagccgcacgagcaacaccccgggtgcccctgcccagggggcccgccatctcctccaggaggcggggagaaggaacgaggagggcgggcgggcaggc

SEQ ID NO: 38768 - DNA, 960 bp, Homo sapiens; identical to SEQ ID NO: 23037
  chr11:31825604-31826564
  hyper

SEQ ID NO: 38769 - DNA, 112 bp, Homo sapiens; identical to SEQ ID NO: 27514
  chr11:33202694-33202806
  hypo

SEQ ID NO: 38770 - DNA, 1303 bp, Homo sapiens; identical to SEQ ID NO: 29747
  chr11:43600280-43601583
  binary

SEQ ID NO: 38771 - DNA, 1734 bp, Homo sapiens
  chr11:43963626-43965360
  binary
cgcgcgcgcgcctgcggaggggggtggcaaggatccagaaggggagcccaccccttcttccgagctcagctctggggagccgggcgctcaggctcgccaggctgcaaagagagctgagagctgcctcgcgccccgcgcagaaccggcggtggaataaccagcgcctcaagtgtgtgcatctgggaccagggggcgggggagggggacctgcggccccgcggccaacccggttggtgcagacttggggatcccagaagggacagtgcccgcccagtcgcggcgattgagggtccctgtccgggcgcagctcgggccagccgcgtgctccggggccgcggcttctcccggaacccccgcgggcggggcctgccttccggagccggttggcggggggcgggcggcgccggggaaggggccgttactttcccagagcggcggggcgacgtcaggcggaagggcgcggggcgcgcacgctttaaatggcattcgctgtcatccgagctcagagccgtgtgggcagccgcgggctatataagccgcgagcctggccgccgcggggcagacggcgacagcagcggcggcgagcgcctcggagcgcggcggaacagcgccccccgagccccgtgccccccgacgggtccgcccgcccgcccgccctcccgaggagcgccggcccgggcccgcgagggccgccgccaccccgcagcagatttggatcccccgcccggcgagcccccggctgctgcctcccggggggccccggcgcagcggccgccctcggagagccccggcgccccgccgcccggccccgcagacgccggaggcgccatggccgccaagcccggcgagctgatgggcatctgctccagttaccaggcggtgatgccgcacttcgtgtgcctggccgacgagttcccgcagcccgtgcggcccgccaagctgcccaagggccggggccggctgcggcggccgcgccagtctcgcttcaagacgcagccggtgaccttcgacgagatccaggaggtggaggaggagggggtgtcccccatggaggaggagaaggccaagaagtcgttcctgcagagcctggagtgcctgcgccgcagcacgcagagcctgtcgctgcagcgggagcagctcagcagctgcaaactgaggaacagcctggactccagcgactccgactcggccctgtaaggggcgccgcccgcgggggggacgcgcgcgtccgcggtccgcgcggggaccggcgtgtgaaccccgagagtgcccgcgccctgctcccgggggacccgcaaggacccgggaccgccgctcctcgcgcgctcggactcccgccccgctgcgaaccggtcggtgcgcccctcgccgcgctcgccctggcccgggagcgccgggagcggggccgctttcctcgtccttgtaaatgtttattttttaactcttcccagtgcgaactctgctgtgagtgtgtgcggggaggcgcgcccgcgctgagtcggcggcgggtagccactccatgcccttgtccgatggtttgcaactccgattttgcacaccgctccaccgtgccccccagcgcacacccattcacactcacgccaacactctcgctgaacacttttataattgttaggcgtggccgttgggactttgggcgcagcgcggctgctactgcgtctggaggattgatatttatttttgcattgcgatggctgaaggcatttatttaac

SEQ ID NO: 38772 - DNA, 739 bp, Homo sapiens; identical to SEQ ID NO: 26217
  chr11:43965463-43966202
  binary

SEQ ID NO: 38773 - DNA, 351 bp, Homo sapiens; identical to SEQ ID NO: 23038
  chr11:45376873-45377224
  hyper

SEQ ID NO: 38774 - DNA, 881 bp, Homo sapiens; identical to SEQ ID NO: 27520
  chr11:46316833-46317714
  hyper

SEQ ID NO: 38775 - DNA, 433 bp, Homo sapiens; identical to SEQ ID NO: 23455
  chr11:47358910-47359343
  hypo

SEQ ID NO: 38776 - DNA, 1503 bp, Homo sapiens; identical to SEQ ID NO: 34200
  chr11:61275825-61277328
  binary

SEQ ID NO: 38777 - DNA, 233 bp, Homo sapiens; identical to SEQ ID NO: 24974
  chr11:66513554-66513787
  hypo

SEQ ID NO: 38778 - DNA, 1816 bp, Homo sapiens; identical to SEQ ID NO: 24975
  chr11:66625105-66626921
  hypo

SEQ ID NO: 38779 - DNA, 243 bp, Homo sapiens
  chr11:67764077-67764320
  hypo
cgataccagtgcaggcaaagagcacctcgaagccgctgtagataaagaaaggcacgaggtggcgcaggcggtagtcacgcacgtgcttgaagggcagctggaagatgttgccccagcccacgctgcgcagatcgatctcctccgtgggccggtaagcggctccgcacaaacccagcacctgcgaacccattacttgaaggggcggccagccaggcccaggcctggcctccaggcttcagcccc

SEQ ID NO: 38780 - DNA, 810 bp, Homo sapiens; identical to SEQ ID NO: 23824
  chr11:73072922-73073732
  hypo

SEQ ID NO: 38781 - DNA, 1397 bp, Homo sapiens
  chr11:75378416-75379813
  binary
cgctaggcctgcgctggggatcctgggccccgggcagcccgcggggagggtctgcgtggtgactcccccgcgctagcagcggccgcgtctcacctgtaggagctgctcactgcactcgccacctcctcgcggatttgccggttgagggcgtccgccgcggcgcgccccctgccagcctcggggccggtggcctggacctgggcctgggccgcgggcagcggcgtctgctcgtgccccaggccctcggcgcggcgcacaatccaggcaggcccggccttcctgcgcgtgtcgcgctcgtccgccccggacgcctttccggccgccaggccacccgctccgccgggggccgcctcctgctcccgggcctcagcggcggcctgcactggccagcgctcctggctctgcggccggcgcttgggcgccccgagaatgggcgccgacgcctgggaggccgcagagatctgcacgggcttggggatccacgggtggtccccgcggcgcggcagcggccaggcgcggaagtccttctggtactgggtctcgcgctcgaagggagcgtcggagggctggtattcgctgcgcggccggcagctgggctcgggccgctgcaccttccaggctcggtaatcctgccgcatcaccgagtccgcggggccggaggtggagccggagcccaggcccgggcccggcccgctccggccggggcccgccgccggctcgcgctcgccggtaggcccaggcgctggccccgttgcccgggcaactgcatccaactcgccctgggctggctgcgtctctatggcaaccgcgcgcgccgaggggggcgcgagcgccggctgcgcctgctgctgcggcggcggtggctgcggcggggcgcccgggtgctcggtggcctccgagtacttggtgaaaaccagcggcacagcgatgtccgctttgtccaactggttccagaagcgggcgatgcagcaggccctcgtgatgcacggccacgccatgatgctagctgaaaagccggcctcctctttcttcttgtggttctaaagcaagtctctataatcttccttcagcctccgatcctgaccggccaatgtggttcccaccgttttctacccccgatcagccggagctagttcgccctcctccctcagcgagcacccggggagagctgtcctaggagagtctgtagagtccctcgattaccggtcgcaaacgcctttgggagcgcagtctgctgcgagcgccgaagggtgagacgcacggcgttcccgagtccccggcgagggtgtctgggacgcgcccctccctgcggctgcggcggcgcacagacctcggtcgagcgaggcgacgtgaggagaggtggctacaggcttaagccatggcgcagaggaggggcc

SEQ ID NO: 38782 - DNA, 1311 bp, Homo sapiens
  chr11:8040276-8041587
  binary
cggtggtttcaagacttccaccctggggaagaagggacggggagacggcgggaatctaggaaattgggggatggctatttccattcctgagaaggggggaacttgattgtgggaggttggctgaagactcccacgccggaaaggagggcgcctctgcggaagggccccgagtggcgacagcggatccgggactcccaagcaagcaggagccggagcagcctcttagcaacccctgtcccgggaaggtttgaaagcagcggtgccctagtgacgccggaaaagatggagcggttgtcatggcgacgcggagcacacctcggaaataaataaataagcgcccaggctgccgcagccgcgcccccgcgggacccgagcgagggggagggggcctcacgggcccgggtccccgcagtcgcgcgtccccgccattggcagagccggagggggtcaccccccggggggcgaatggtacagtcctccgcccgcgcctcggccgggcccgcagcctgcgagccagccccaagcccagcgccgccgccgcccgcggagccccgagcggagccggaggcggcgatggagggagtcagcagccaccggaccctgtcttacagccgctggagctatgacaggtagggcgcccgaagggtggccctgcgtgagcgcctgctgaccctcgatctcctgcgggagaagcgggcctccgggggctaggactggcgcgagcgcccgacccccagggtgggcttgggcacccggaccctcgggcatccgggacccagagcctcgggtacggcgcagcggagctccagcgagggtagtgtccccacacccacggggcagagctgtcggaggagggcacgcggccactgggactagcgagctggcacctctgcccccaccccagctgccccgccagggtcgctccgccgggggaccccgagaaagggcgcggagggggcgccgggaggggcggggcaggggccggggtgggcccctggcgggcggggcgaggagggggcgccttcggctctgggatgcgcccgccggcgtctgcgccccgccggccctccgcagggaccgaggctggccccgggcggagtgtcccgctggctgccggggacccgcgagtcgctgcctgttccgcggggcgagatggcagcctgggccggctgtctgggcgcaggagcggcgctctcgagttgccaggctccgcgcccgccccgcggggatggcgagcggctgccggcgtgggcggtttggagctgcgctccccacgcactcgtcctggaggaaggagtcatcctcccaggc

SEQ ID NO: 38783 - DNA, 1021 bp, Homo sapiens; identical to SEQ ID NO: 27542
  chr11:9112461-9113482
  binary

SEQ ID NO: 38784 - DNA, 1319 bp, Homo sapiens
  chr12:103351149-103352468
  binary
cgccccgagcgcgccgcctgtttattcagccgggagtccggcacgcgccaggcgcacgcactgcaacaacaaacccagctgaatggagagtttgcaaggagcgggagaaaggaacgggagggggggagaggagaggaggagggggagtttagggagtgggtgggaggaagaggtaagaggaggggggggagtgggggctgcagccgctcgctgcagcagcggggagtggggggcgaggcggggccagggctgcgcgtggggctgggtgtcccattgaaaaggcggacgcactccggcagcccagcactctctcacttctggccagggaacgtggaaggcgcaccgacagggatccggccagggagggcgagtgaaagaaggaaatcagaaaggaagggagttaacaaaataataaaaacagcctgagccacggctggagagaccgagacccggcgcaagagagcgcagccttagtaggagaggaacgcgagacgcggcagagcgcgttcagcactgacttttgctgctgcttctgcttttttttttcttagaaacaagaaggcgccagcggcagcctcacacgcgagcgccacgcgaggctcccgaagccaacccgcgaagggaggaggggagggaggaggaggcggcgtgcagggaggagaaaaagcattttcactttttttgctcccactctaagaagtctcccggggattttgtatatattttttaacttccgtcagggctcccgcttcatatttccttttctttccctctctgttcctgcacccaagttctctctgtgtccccctcgcgggccccgcacctcgcgtcccggatcgctctgattccgcgactccttggccgccgctgcgcatggaaagctctgccaagatggagagcggcggcgccggccagcagccccagccgcagccccagcagcccttcctgccgcccgcagcctgtttctttgccacggccgcagccgcggcggccgcagccgccgcagcggcagcgcagagcgcgcagcagcagcagcagcagcagcagcagcagcagcaggcgccgcagctgagaccggcggccgacggccagccctcagggggcggtcacaagtcagcgcccaagcaagtcaagcgacagcgctcgtcttcgcccgaactgatgcgctgcaaacgccggctcaacttcagcggctttggctacagcctgccgcagcagcagccggccgccgtggcgcgccgcaacgagcgcgagcgcaaccgcgtcaagttggtcaacctgggctttgccacccttcgggagcacgtccccaacggcgc

SEQ ID NO: 38785 - DNA, 1338 bp, Homo sapiens
  chr12:104850139-104851477
  binary
cgggaaagctcagctgtcgcctgacccgagggtcgtgcagtttccttaaccctgactttaagtcagccctctttaaccccgactcccaagctgggctgtcctttgaaagaaaaacgaaaccgcccagttctgagcgtcggaaaatgggcactcgctccctgggggtttggggcaacttccccgctacgtcgcccagggattttaaataattgccagccaccagaaaccccctaacccttaattcttccctccgagacccagcccgctgcttgccacttccctctccaaacgctggcgggggtgggtggcagcaccgaggcgattttcttcgtctttttttcctccgggttttgtcatggaaacgctgacacaacctccagacggcggccgagcccggccggggactgagggcttttgggaccctgcgggagcgcggcgcgcacaccgcactccccgggcaacagctggacgcgaccatatcccgggtaggggcggggggagcgcgacgctccgccccggcgctagggtccctccctcctcccggctctccgcaggcgccctcccctcgccgggggccgcgagttgcatttggtaaaacccagccccggaatatatagatcgttggagcgcaatgaagtagcctttggagagaagggagagggcccgtcggacagccacagcggccagcgcagcggcagcggcggcggcaccaccatcaccgctcgcaccccagccgcccggcccgcgaccaggcagcggcggccgccggcgggatcggaggaggcggcggagcggcgaggaggaggagcaggagcgcgcagccagcgggtccacgcatctcagcacttccagaccaactccggcaccttccacacccctgcccgggctgggggctccgagagcggccgcgaagcgactccgatcctccctctgagccttgctcagctctgccccgcgcctcccgggctccggtccgcgcggcggggtccctgctcctgcgccccgggcgcgcttcccggacaccccggtccccgcagccaggacaaagccatgaagccagcgctgctggaagtgatgaggatgaacagaatctgccggatggtgctggccacttgcttgggatcctttatcctggtcatcttctatttccaaagtatgttgcacccaggtagggggcgcgttagcgtggttttgttggatattttcttctctctcgcgctctagctcgctccgcctgatttctgcctcttccaaccctacctctccgccttcggcctcttcggggctcctggctgcccagagctcctggctgcccagatctacccgggtcaccgcgtc

SEQ ID NO: 38786 - DNA, 1311 bp, Homo sapiens; identical to SEQ ID NO: 29766
  chr12:104851507-104852818
  binary

SEQ ID NO: 38787 - DNA, 168 bp, Homo sapiens; identical to SEQ ID NO: 27549
  chr12:111725459-111725627
  hypo

SEQ ID NO: 38788 - DNA, 889 bp, Homo sapiens; identical to SEQ ID NO: 27550
  chr12:113494321-113495210
  binary

SEQ ID NO: 38789 - DNA, 623 bp, Homo sapiens; identical to SEQ ID NO: 29770
  chr12:122688584-122689207
  binary

SEQ ID NO: 38790 - DNA, 184 bp, Homo sapiens
  chr12:123128961-123129145
  hypo
cgggcggcttcttcgcagcccgggctctcctccgactgcccaggccaaactccgcctcattcccccagtcaatggcctgatggcctgtaggcatgccagtgtctgactatgtgctcttccgccagcgtgctaccctcgatgtcctctcgatgtccagccacctgtgtctgcctgctagggtctc

SEQ ID NO: 38791 - DNA, 784 bp, Homo sapiens
  chr12:129337804-129338588
  binary
cgatggtcctggtccccgtggaagggactgtggtcaccgctggtcctggtccaggtggaaacagaccgcggctaccctggtgatggaccccacggggcacacccgcgccaccccgcacccagggctcgcgccgcccgaggcccccggttcctgtccccctccccgcctggcgccggaacctgcgagctggggcgcggcctcggggaggggcgggcgggacagacccagccgccccggctcccccgccgtccgcgtctgcgccggccccggggcctggtcggcggcggcggggccggtcgatggcccgggcggcggcggcggcatgcggctcctgttcctggcggtgctgcggccacacaccggcaacgcggtcacggcccagcgcgttcggtaggtgcagggcgccggggcctacgaagcctgggccgggggccggggggcggggacgcgggacccggggacgcggggcgctcagccaggccccctccagccgcgccggggccgtcccgagccgcgcgcacaaacggatgggccggtgccgcctgccgggcgcgcgggggtcggtgccttctgcgtggcgcgcgtgtccccgggtctccgtgcggccggcgcattggcctcgcgctctccggaggggactgagcaggtgaacaggcccggagcctgtcgtggaggggcccgggaaggcctcgctgcagaagcaggatgggagcaggatccgcagggatgcgcagcggggtccgcggagctcccggcgggggcgcgtttccaggccggggaccgc

SEQ ID NO: 38792 - DNA, 272 bp, Homo sapiens; identical to SEQ ID NO: 27554
  chr12:130821386-130821658
  hypo

SEQ ID NO: 38793 - DNA, 463 bp, Homo sapiens; identical to SEQ ID NO: 27555
  chr12:132423564-132424027
  hypo

SEQ ID NO: 38794 - DNA, 334 bp, Homo sapiens
  chr12:133428098-133428432
  hypo
cggcatccttacttcacaggttaccctaaggccaacaccgctttgaaacctgacccctgaaggacagataggaacccgcctgcgtgcggtggcgcgggcactcacactgctgaggggcgacacgcgggtcctgctcgcgctccgctctccggtcgggcatgggctggaagcagcaggtgcacagggcgtggcttccttgcagagggcacacgtaatcctggactgctgaagcacacgcacattcagccggagcacgtgggacccagggcagaaagacagcaggttagagaggccgccgggaagcacagcgaggagaggtgcacctgagacagcc

SEQ ID NO: 38795 - DNA, 1333 bp, Homo sapiens
  chr12:133463588-133464921
  binary
cgaaggctaaatgatgtgcgtgaatcatgcgcaagaatcggtgggcagaacaccgaataaataccagttcttacatgacatttcactccacggaaaaatctggagcgcacactgcaccgccgcccgtgtggcctgcccgcaacccggtggctctgcccggccccggcccccggccccggcctcagccccgcacctcgtctccgcccgatggtccactcccgcttcctcaggaggacgtgcggctcgccctcctccgcgcccagacgcaggagccgtccccagggctgcggcggcggcgactgcttgccttcctcgggccgctccatcgggattcacatctgcggagaccccggaaacgcccatggagactcccgaccccagaggccgagactcggcgcccgccccaccccgcgggccccggcccggccgcccgcgcccacgcagccccgcagcccggcctggacgccggcgggcgccccctcccacggccgcaaccaggtcccccttcgccgcccgccgcagccccctcgccagccgcgcttacccccgccccgcgccgaacccggaaccggctgcgccgccgccgctgtcaagagacattgcggctccctcagctgatccgcggggcggggccagaggcctctgcgccccgcgattggctggcggcggcgctcaccaagagcggcagctaaagcggagccgggagtggcccgcgagagtaggcgcgtggagggcgctcggccatctttgatcctgaccaggcgacttcgtcgcctgcggatcacggaagtggctgcggtcggcgccatgttatgttggggcagaagggacggggaacttccggattggaagccccaaggattctgagagccccgctaatctggggatgactcctaggagtagaagacggtccatcttagttgtcacgaggtagtgcacgtggggaccctttcgggtacagttgcacacagtggatcacacagatccgaagtctgaggcacagggcgcggtccgcgagtgggagcggctgcttgtgggcagggtggacgcggggccacgtcttggccggcgttttgcggggtcttcctgttctgaacgcgcgtaacttttgcctcagtatctcacttcttggaatccggcggcgttcacgtgtgtgctccagagaagggcgccagagggtattccctgaaagtgaaaggtcggcgaaagaggagtaaagacggcgagacgcgtccacgcagggggagtctgtgcggtttggaggaacgcgccaatgtctgcactcatgaggagcccccaagggcggttttaagagggtgaagcaggaccgggc

SEQ ID NO: 38796 - DNA, 1272 bp, Homo sapiens; identical to SEQ ID NO: 28504
  chr12:133484584-133485856
  binary

SEQ ID NO: 38797 - DNA, 857 bp, Homo sapiens; identical to SEQ ID NO: 27559
  chr12:1639033-1639890
  binary

SEQ ID NO: 38798 - DNA, 1846 bp, Homo sapiens
  chr12:2161370-2163216
  binary
cgtgctcggctgcctccaaggaattattaaacctgggtctaggaatctgttcagacatctgggcaccgctgcctcgcctaccaggctccgcctcgctgcccctcccgcttcccctcccctcctctatctgtcacttctacaaccgctctgattataattgatcaaacagaatcacggaatcacggctcatcttgccgttttgttcagtggcccgatccgaaacgagactctggtagtcgggcaaattgtattcctcctccttggaattccgctcacagaggccttcccggcgtggccggcccagcagggacgcgccgccgcagcggaggagagaacgcgggcggggggctgcaggccggcgcggggggcgcgacgccgccggcggggcgcgagggggtgtgtccgcgccgcggccaccgcggccaccgcggctggcgcccgggtgcgccgcgcgccccggcctccccgggggctcctcacgccgcccctcgcccgccggcggccggggcccgctccctttgacgtcatgcgggcggagggctcgctcgggcggcgctgccgcgggcgccgggagggggcccgacttcgggctccagtccgccgccgtgcgccccgcgccgtgcgcccggctccctgcgcgccgccgcagccacatctggaagcgttcagcgcgtctgcctccggcgcgccgggcgggcgggcgggcggcgcgggcaggggcgggcgcgggcgcggcggggctgggccggggggagtgagcgcggcgctctcgcgcgcccggtgtctccctctcgctgcctctgcagaaacagctcctgccagagcggcgctcggcgcggcgcggcgggcccggagcggcggcggcggctcttcctgcctccgcgcccaggagttgccggctccctttgacagcagagagccgggcaggggcctcaggaggactcgctgggagtgggcagaggcgcctcggcccctgccggcccaggcgggccccgcgcgccccccgcccctcctctccgcctcttctcgccctgcctctcccgatttattttttcaaatggtgtagccgccggaggtgcggtgctcagttcttggaaggggcccggatgtactgaggatgcgttacagtttcactcgaggaggcagtagtggaaaggagcagtttttggggtttgatgccataatgggaatcaggtaatcgtcggcggggaagaagaaacgctgcagaccacggcttcctcgaatcttgcgcgaaagccgccggcctcggaggagggattaatccagacccgccggggggtgttttcacatttcttcctcttcgtggctgctcctcctattaaaaccatttttggtccatggtcaatgagaatacgaggatgtacattccagaggaaaaccaccaaggtaaggctggaccccgccgcctcgccggggctccctgccttttccaccgggttcctgccctacccgcgctccccgcggccccggggccggtccctgcggagtggcccggggccgcgtccgcgaggggcgcctccgcctcgtcggagcgcccgggagcccggcgggaccggggcccgaaccgccgcgcgagacggagcggaaaattcccgcccctccccctccgggccccagcttctccagagcatgtgtttcctgtgaaattccaggcgaggggggaaaagttccccaagtggctgccgccgcctcgctttctcgcgtccgcctggagagcccggctgcctggccagccgcgcggggggcagagggcgccggcgccgcggagcccagaggcccggggtccctcgcccggctcggggcgcggctgggagcgcgcgcgcgc

SEQ ID NO: 38799 - DNA, 758 bp, Homo sapiens; identical to SEQ ID NO: 22781
  chr12:21680379-21681137
  binary

SEQ ID NO: 38800 - DNA, 801 bp, Homo sapiens
  chr12:21927189-21927990
  hyper
cgaaagaagtatgagttgcatctaaaaagagttaaaaaggttcctgtggaaatcataatattataaattgaaaacttttttttttttttttttttacaacgaaggaatcaaatatacaaggtgcgggggggaaaaaacccaagacaacagcctgcgggttgcagtagggagtgtgccccgaaaagtccatccatcactgcaagcctctgcggtgttttgcattttaaatcatttacgggaacacggacagcctcccccctccgctcccccggagcagctttgaaacttacagactccgggtagcgggcgcggcggctggacctccttgcacacgccggcgggccgcgggcaggtccctcgctctcccatgctggcgcgcgggaccaggggccgcccaggccggagggacaaattgggggctgcgtgtcctaaggagaagagttaaaataataaaaggtgcaactgaatctaaacgcagggagggctagaggaagggggatgggtgtagatcttcccctccccctgctcagctcaactcccttggccacttcagtggaaggaggagggactgggggggcgggggcgggggggcgatgctccacaaatcagcctcccagttagggctttgacgcacgccagacctcggaagccgacgttgtcgcggagtagggggcgggcggggagggggcgagcgcaagtccccgggaggtagggagcaggccagagggagggacgacccgggggagggcgggacctgcagagccagctcctttccagtagccgcgaccccctgccgccagc

SEQ ID NO: 38801 - DNA, 974 bp, Homo sapiens; identical to SEQ ID NO: 26255
  chr12:22487294-22488268
  binary

SEQ ID NO: 38802 - DNA, 502 bp, Homo sapiens; identical to SEQ ID NO: 26256
  chr12:22488321-22488823
  binary

SEQ ID NO: 38803 - DNA, 1913 bp, Homo sapiens; identical to SEQ ID NO: 27560
  chr12:24714490-24716403
  binary

SEQ ID NO: 38804 - DNA, 921 bp, Homo sapiens; identical to SEQ ID NO: 22782
  chr12:25101390-25102311
  binary

SEQ ID NO: 38805 - DNA, 456 bp, Homo sapiens
  chr12:28122170-28122626
  hyper
cgggctcaggccccggcaggtatccgggatggtccctctccctaacccgggcaaggagcatcggtgaccgctgcaagccctcggcagcatcccagcttggcagcccctccccctggcctccccaacccggcgccctggggaggatggggcacttacaggcggcggctgagaccctccaccgagcgcccgcaggagggcaccgcgtagctcagcaggaacaccgcgacgctccactgctgaaccagtctccgctgcatcgtctccgctcgcgctcgggacctgcaacagaagggaatgggacccgagtgtcagtctggactctccatctccccgcactactccgctccccctttttagcccgctctcaaaaagcctcttcaacatcaagggcatctcccaagttgaaaagaaaaaaaatttctctggagcctctcagcacttacttatttagcaacc

SEQ ID NO: 38806 - DNA, 869 bp, Homo sapiens
  chr12:28122886-28123755
  binary
cgaaccaggccctttcgttccagagccacttgtagcgaaacccacatatatatacatagctgtctgtctacctcctctggtgggctggttgcttccggaaagttgattccacacaccctgagaacaagtttcaagtgcgtgtgtcgtcgatcaggagggccaggtggcggcgagggcgggtcgttagtggcagccggagcggcagggaggcggcagccccgcttcacgggcggggagacatgctggccgggcggcgcaggttggaggcgagttgaaaaccgagcggaggaatgttcacacgctccgaggcaaacctgccggagaagtgagctagtcgcaaagaggtggcgccctaggaacgcgcgcggggcgagcgagggcgcaggcgggctggcgggcgggcgcgcggggggcgggggcggcgacgggcggcccgaacgggccccgcgccgcccgagcgagtggaggggagccccgagccgggaatgagcggcgagcggcggagctcccccctcccgcgctgccgaccccggagctgtcaggagctctgccgagccccaccccggagcccgggccctgtcgcgccatccccgtgccgggggcgtgggcgcatccgcttgctccctccaggcccggccggctcctgccggcgcggcggatccgggagccgagatccccgagggcgtgcggactgccccgggcagccggcggtccccggcgcgccgagctggacgagcgggcgccaagaccaccaggggcggaccgacgaggaggaggccaaggagctgggccggggaccgcgggcaaccgggagcctgcgcggagaggacgcgggctgttggcctgtgaatttaaggagcccgaagctc

SEQ ID NO: 38807 - DNA, 274 bp, Homo sapiens; identical to SEQ ID NO: 23863
  chr12:32831303-32831577
  hypo

SEQ ID NO: 38808 - DNA, 819 bp, Homo sapiens; identical to SEQ ID NO: 22784
  chr12:40618264-40619083
  binary

SEQ ID NO: 38809 - DNA, 766 bp, Homo sapiens; identical to SEQ ID NO: 27569
  chr12:41086129-41086895
  hyper

SEQ ID NO: 38810 - DNA, 744 bp, Homo sapiens; identical to SEQ ID NO: 34249
  chr12:4273746-4274490
  hyper

SEQ ID NO: 38811 - DNA, 2373 bp, Homo sapiens; identical to SEQ ID NO: 29795
  chr12:4377809-4380182
  binary

SEQ ID NO: 38812 - DNA, 1374 bp, Homo sapiens; identical to SEQ ID NO: 31039
  chr12:4381232-4382606
  binary

SEQ ID NO: 38813 - DNA, 1697 bp, Homo sapiens; identical to SEQ ID NO: 26262
  chr12:4382915-4384612
  hyper

SEQ ID NO: 38814 - DNA, 1481 bp, Homo sapiens; identical to SEQ ID NO: 26263
  chr12:45269418-45270899
  hyper

SEQ ID NO: 38815 - DNA, 958 bp, Homo sapiens; identical to SEQ ID NO: 34252
  chr12:48577061-48578019
  binary

SEQ ID NO: 38816 - DNA, 598 bp, Homo sapiens; identical to SEQ ID NO: 25035
  chr12:50297476-50298074
  hyper

SEQ ID NO: 38817 - DNA, 1389 bp, Homo sapiens; identical to SEQ ID NO: 23870
  chr12:52400270-52401659
  binary

SEQ ID NO: 38818 - DNA, 211 bp, Homo sapiens; identical to SEQ ID NO: 23468
  chr12:53662999-53663210
  hypo

SEQ ID NO: 38819 - DNA, 929 bp, Homo sapiens; identical to SEQ ID NO: 26277
  chr12:54398724-54399653
  binary

SEQ ID NO: 38820 - DNA, 1011 bp, Homo sapiens; identical to SEQ ID NO: 25047
  chr12:54402667-54403678
  hyper

SEQ ID NO: 38821 - DNA, 917 bp, Homo sapiens; identical to SEQ ID NO: 26283
  chr12:64062220-64063137
  hyper

SEQ ID NO: 38822 - DNA, 1384 bp, Homo sapiens
  chr12:65218018-65219402
  hyper
cgcgcctctctaatctgccaggaaataattcaacgcaattcgggctgaagcgtgtgcctcgccgcctgcggttgggtcatggccccttctgagactgctcggaagtgggagaggatgcttgcccttacgggtgttctgcccctgagactggcgccccttggtgctccctctgttccctcccagatcttgggagaagcacggacatctctgtttctgcttttggtccccgaacgcagttacgcgcccactggctccctgtctctggcgcttctgggcacgggggagctggggcggccccgcctgcgcacggcggtgccgggattgggggcgggcacgccgcctccgtctcccacgcgctcgctcgctcgctcgctcccgccctccccgcctcgagcgatctcctgcctcagccttgcaggctccgcactgcagatgcctgctggcttccctgcgctcggcggctcccgcggtgccccgtaagtccccgtgaccctccagcaccagccggctgtgcgctccctgctcccacgggccggtcagccgcagacactcacccagctccgcgagctcagccgctcagcgagtggggtagcggggaccgagacggacggtagccgtgccagagcccggggcgctctcggatgcggcaggacaagctgaccgggtctctgaggcgcggggggagatgcctgaagcggcagggcggcggcgtgggcaccatcctgagcaatgtgctcaagaagcgcagctgcatttcccggaccgcgccccggctgctgtgcaccctggagccgggtgaggaccccagggctgcagatggggcgctgtaaagtagcgccggggctgcccgcgcttctgccttagcctgactccgtctaggccggggagctctggggaaagtccgcgtgccacctggtgcggggcaccgcgttggcacctgcagggagcgattggtctggaagggtagagggcagacgggggcctgggtggggcagcggccaccccaggcgcggagaacccgctgcttccaccctctccccgcggacccccaccctgcggcctgtgtgctcggctttctccgcgtggcggggaagtgcgggtggctgcccgggccctcagaggccgcaccacctattgtgttccaggctcgcaggaagccagaccttgcgagaggtgtgtgggggcggagagtggcacaggtttgacactgcaggtcggaggaggaagacagtggctgcaaaggcaaaatcgggtgttattttcccaagagtcccttcagcgtgagtgccggggtcagctcgaactggagcctgtaatttgtgagtgcgagtggggagcagcaggagatccttttcataggtgaggtccaggaacgagcctggtc

SEQ ID NO: 38823 - DNA, 1311 bp, Homo sapiens
  chr12:81330233-81331544
  binary
cgttcagtttaatcctctagaaagaaaatttttagaggtacatcggactaaatcattttcttctgagtacaccatttccaaatggccgcccagggtcctaaatccggcggctgcggagagggactagagggtgtcctcctctgcagagccgtaggactcgagcgccttcatcactggacgctggagccaggaaggaaacccacacactcagggacaggtataaccccacaggggtgcaccagtgaggccccgatcgcagcggaggactccatccctgagcttgtgagggcgtcctggggaggaagcgaacactttccccgttcaagtcagagagcaggactcactgggtggcaggtcagaagttgaattttaacccgacctgcgctttgtccccgcgccttccgcagcctgggcgccgcggtggcaccgagctgggagaggacacgagaggctggcgcgggagaagccgagagttgctatcgaccgggagctgccggcggcgggagcagacgcgaccctcgccgctttcgatctcgaagccgcggagagccgatctcggctgctggggctcggctccccgcgctctgccttgccctttcggcagagggcagctccctgcctgctgcagccccgccactgtgcgcccggcagcccaggggtgcgcccagcccgccccccgagtggccgccgggactccagcagttggaccgaccctcgccctccggcgcctggacaaacttccttcctcccgggcccctgcgccaagcaagctgacaggcggctccctcgccggtctcctctgggctctggccgggcgagcttgctctctgcccctctccaaccccgagcccctggcgcctatagccgtccccgcgcagcggctccaacaaagccagaggaccggagacgacccggcgaggggctgggagtggcagcggggaccccagagccagaaggaggcgtcccctcggcggggcgagtacagtgggaaggggcagcgggaacgtagcggggagagaaaggggaagaaagtgttctgttctcggcgcgaacgccttcctggctcgtcctcgttccccttctcctcctgcctgagcgcgtcccatgtcccgttgggaattggcaggcggggaagggaggaggggagaggggacgcggtggcctggcgagcgagccgctcccttacctctgtccagggtgagcggctggaccactgtcaatgtcgccatgtctgccgtgggagccgaagtgacgctcggcttcagcatcagcaaccgctcgtagtgagaaaaaaaggaggagattgggggc

SEQ ID NO: 38824 - DNA, 1638 bp, Homo sapiens; identical to SEQ ID NO: 29822
  chr12:8849750-8851388
  hyper

SEQ ID NO: 38825 - DNA, 1900 bp, Homo sapiens
  chr12:94542238-94544138
  binary
cgaatcaagaggggaggggagatgggcgtggagggagggcgggcgggcgggcaggaggcggagggcggaggaggaagagaggatgaggaagggggccagttgcatcccactttcacaatgggaaagtgaaacgcacaagcgcacccaacctctccagccctccccgcccgcctcgctcctctccgcccgtcccctcccttcccctccgcgcctccccgcgagcgccagcgctgcacacaggaactctccggcgaaggagggcgaggaggaaacggtgccggagcgcgcagggcttgctgccgccaccgccgctgcacaggctgccggagcgagcctgccgcgcgccgccctccccgctctccttcctgggcgagctgcggggatggggcggccgcgggagcccgagcgcgcgcaggaaccgccgccgccgccgcccgcgtctccgttgccgcgcgcctgagccgccgtcgccgccgcgcgccctgcccgggggcggcccccccagccccatggaggtctcccggaggaaggcgccgccgcgccccccgcgccccgcagcgccactgcccctgctcgcctatctgctggcactggcggctcccggccggggcgcggacgagcccgtgtggcggtcggagcaagccatcggagccatcgcggcgagccaggaggacggcgtgtttgtggcgagcggcagctgcctggaccagctggactacagcctggagcacagcctctcgcgcctgtaccgggaccaagcgggcaactgcacagagccggtctcgctggcgccccccgcgcggccccggcccgggagcagcttcagcaagctgctgctgccctaccgcgagggggcggccggcctcggggggctgctgctcaccggctggaccttcgaccggggcgcctgcgaggtgcggcccctgggcaacctgagccgcaactccctgcgcaacggcaccgaggtggtgtcgtgccacccgcagggctcgacggccggcgtggtgtaccgcgcgggccggaacaaccgctggtacctggcggtggccgccacctacgtgctgcctgagccggagacggcgagccgctgcaaccccgcggcatccgaccacgacacggccatcgcgctcaaggacacggaggggcgcagcctggccacgcaggagctggggcgcctcaagctgtgcgagggcgcgggcagcctgcacttcgtggacgcctttctctggaacggcagcatctacttcccctactacccctacaactacacgagcggcgctgccaccggctggcccagcatggcgcgcatcgcgcagagcaccgaggtgctgttccagggccaggcatccctcgactgcggccacggccaccccgacggccgccgcctgctcctctcctccagcctagtggaggccctggacgtctgggcgggagtgttcagcgcggccgctggagagggccaggagcggcgctcccccaccaccacggcgctctgcctcttcagaatgagtgagatccaggcgcgcgccaagagggtcagctgggacttcaagacggccgagagccactgcgtaagtcctgcccccggggcgccgcggagagcgctgctgccggggagccgccgccgccgccgaggcagaacgagctgggggcgagcggcggggcgggggtacagccgggtgacatttaccaggtctcaggttcacaccgcgggcggccgtccgaaggctcctctcggacggtccccgagacctggagcacggcctgaggtccccaaagggagagtgtaaaaaggggggcggggagggttggagttagactcaaaactctagtggctgcatcccattgccatccttccctgtccaaacggggacgcttgtttggggctgagtctcctcgc

SEQ ID NO: 38826 - DNA, 1174 bp, Homo sapiens
  chr12:95266832-95268006
  hyper
cgcgggctccctggcacctgccggtaaagcagcagccgcagcccccgagggcgccccaggccaggagctgcgcgccgtcggcgggccgtgcctggaggaggctcgcgccttccaaatgccggagtgcaggcatccttcctctccccaaccccagccccggcctcgacctgtcgcccacctggcccggacctggggctggctccgtctctggggtgtgcgccaagggagccccaccgacgcccagcagagctgcccgggctcccaaagaaggaccggggctttgggcagaattctggcagccaggcgggcgtcaggggagccggagaaggggctcgccagcaggcgtggggcggagtgccgggcgcagcccacctcgcaagcgcgggcccagggctccgacgtgccagcgcagccccgaagagtgcgggcccggggtccccgcggcgccccttcccctcctcagtcccccgggggcgaccgcgctccccgccgaggtccgtccccgccgcaccctcactattcccgctgggaggaccccggcgcacgcccccgcccccgcaccccggggcgacggcgcactcaccctccgcatggtgtctgggccgtccgggcggggctcggcgacttgggcgcgagaagggctgggccggcggcgacgctcggccggccgggagctccgcgctgccccctcctgcacacgcctgcgccgcggccgccaagccggcgggggcggggcggggtagcgctggccgcggggtccccggggctctcccgggctgcggcggaggcgcggagccggccaagggcgcactgagctcgcggagctccggggccccggggcctttctgccgccgtcgcagcgtccccgcctcctcgggccgcttcgcccctctcctcttcctcgagttctggccccaccaggagcggagcgagtctccgatgcctgccccgcggcccccagaactgagctggagaagctttggggtgaaagctgggcccaccctacagggaccccaagtttgcggagcaagagtggattggcggagagcgcagatggcaattctcacccgccttaaaagtaccaccttaaaattctccccatgggatgggaaggtggcccgctaatgtccgttcctactcttcgttttctttttaatttttcagacagggtctc

SEQ ID NO: 38827 - DNA, 1120 bp, Homo sapiens; identical to SEQ ID NO: 27589
  chr12:95941858-95942978
  hyper

SEQ ID NO: 38828 - DNA, 738 bp, Homo sapiens; identical to SEQ ID NO: 27590
  chr12:96883072-96883810
  hyper

SEQ ID NO: 38829 - DNA, 958 bp, Homo sapiens
  chr12:99287760-99288718
  binary
cgcaaattggaatttcgctggaaacactgacccgaccttcaccgaagcagcaaatcgcagtctctgctgctctgctcctgctctccaaggcttaacattggaaagtccatgcccacgtccccctctaattaatcaatgtagaaagaaatacgagggaagagagagggagcacactccacaccaaccttgccagcttctattcttcctgctattccttaaaggcgatgcacagcgcacctggaaattacgtggacttggcatggctttttaatattaaagacaaacgacctttggaaaatatacactgttaaagtcaaaccatttggagagacacccagcaatttacctcctcaaactcctcggaaccccaagaatgaggaaaggaaatggaaaatgcgcttaacccgggggtggtgggggaatcgataaccagaacaggtttgaaaaaaaaagcccccctcccgccccctccgtagagaccgctagctgaggctgcaacacctgccccggcaaagcgtctccgcagccttcccggcttgcccgactcggcttcctccgcctctgccccggctgcggcaccacttcttggagccacgtctcggcgagcgggggccgcggagcgagggggccgctgtgccgctactcacccgagccgctcgggctggccgcgagccgggatccgcgagggctggcgggctctggcccccgaggacgcagacatgtggcttgaacctccgctcccctagccgttgcctctgtgcatctttctgggcgcccccagcgaatgcgagcggcgaggcgagggcgagcgcgccgaggaagggcgggagaggcgcggagcttggccgcgccgcgctgcgccgagcgccgggctctccccgcgagctccccgggcccgcgcgcgcgccccccactgcccccgccccccgcgcggcgcgtgccccccaccccccgccgc

SEQ ID NO: 38830 - DNA, 775 bp, Homo sapiens; identical to SEQ ID NO: 27591
  chr13:102068457-102069232
  binary

SEQ ID NO: 38831 - DNA, 790 bp, Homo sapiens; identical to SEQ ID NO: 27593
  chr13:103046539-103047329
  binary

SEQ ID NO: 38832 - DNA, 984 bp, Homo sapiens
  chr13:110959202-110960186
  binary
cggacgggtccaggcgcggacaaaggggcctctcggggcgcccaagctcggggcgggacgccgggagcggagctggccgggaactcaccttcgcagcggcccggctgtgctcctcgtggagcagaagggcggcgggcagcagcagcagccagacgctgagccggggccccatggtggcgcgcccgaggcggcgagggacggctgcccggcgtgcgggggccgcggcggacagctagctctcggaaggccggacttccagcgctacgcaccgtcccgggtgcggcggctccaagcggagacctgagcgcggcgggccgagctccccaatttgttggcgctgccccctcccccccggcggtgcgcgggcggcgcctcaaaggggaggaccctgcggcgcgggtaagaggcggcgggagcgcgcggcccgggagtgtggctgcagtgcgccgggacaccagggctccgcgctccgcactcaagaggctcccgcgtcccaacccctcgcgcccgcgcgttcgcggatccaggccgaggaccgaaaggggccgcccgagcccccggggccggcgcccagagagcccagcaaggccggccgccctgccggtgtgccgccggcgggtgcttctggaagggccaatgcgttcgggcagcagcccctgaagccgagcccgaggtgagagcgacccccgagcggcgcccagaccctggcccgagagcaccgacttggagcgccttgtgcaggctagggctgcacgctctcctgcttgggagtagaaagggggagggtgggagagcgaagaccgagctcctcggccaaggagcacccacaggggcctaacgggaggctctccttctttccgggtcgtgggggggacggccctccggtcacccctgcatgcgggccgcgcaccgcgctgtccccgcgtctcgcggaccgagaccggcggtgaggatgggctgcctccctcatcctgcgctaaactc

SEQ ID NO: 38833 - DNA, 715 bp, Homo sapiens; identical to SEQ ID NO: 23889
  chr13:114074589-114075304
  hypo

SEQ ID NO: 38834 - DNA, 531 bp, Homo sapiens; identical to SEQ ID NO: 23469
  chr13:114497796-114498327
  hypo

SEQ ID NO: 38835 - DNA, 248 bp, Homo sapiens; identical to SEQ ID NO: 23897
  chr13:114776788-114777036
  binary

SEQ ID NO: 38836 - DNA, 439 bp, Homo sapiens
  chr13:25592172-25592611
  hyper
cgcctcccgcctctcagcagaaacgcccaacagaaccgttagaaccagcgagcacgcgcaccttagccggccccgcccaacaggcccgaggcagagaaaccgccttagcagctctcgcggcgcccagtacaggcggcggttgctgcgcaggtgccgcgggctggcagggctccctggagccgcaaggcgcgccctgccccagggcctgtttgactgtggcccgcgccctcttctcctcttccaacggctcccgatgctcagagacccccgcgctgggccctctgcagcccagggatggggttgagtggtgcttctccacctggtgccgccgctgggcccacagcccgacttcgccactgcgtcgcccccggggtccgcgctgatgggcgcgaggcggaaggacgggatccggggttgccaccgctgcagtcagcccacc

SEQ ID NO: 38837 - DNA, 890 bp, Homo sapiens; identical to SEQ ID NO: 26306
  chr13:27131483-27132373
  hyper

SEQ ID NO: 38838 - DNA, 705 bp, Homo sapiens; identical to SEQ ID NO: 26311
  chr13:28544184-28544889
  hyper

SEQ ID NO: 38839 - DNA, 1224 bp, Homo sapiens
  chr13:28551935-28553159
  binary
cgctttggaatccacaaaggccggtggtgtcgggggccgcaaagggagtgaagaattgaagcagtgagctggataaatccggggcaaagcactaaacaatatggatattttggcaacgcgtgcgcgtgtgggtgggcggacaaaaggactcattactcgtatgattgcctcaattctccacttcctttgtgcacgtgtgtggacgctgttccaggcccgagtccgcctcccgcccaggacgcacagctccgggccgtggcccccgcgcgtccggttgtgcgtcccgggtccctggcccgcgcggcagctacagcttggcggggtctgcgcggaggaggtcggccaggcgcaggctgccgatcttcttcacctcgcccagagcagtgcgcagctcctgcgcggacgggcagagcagccggcgcgccagctcgcgcggcaccgccgtccggtcgctgaagcgcgcggcgagcacgaaggggaaaccgaagcgcgcgcggtactgcgcgttgagctcggccagccgcagccgctcgtccgcgcccaggctcctcaggcctgcgccgctctgttcccgctgcgactcggccgtgagcgtgccccgctgcagctcgctgcccgccaggtccgggtggcagcgcaggatgccctcctggcctgcggagaagcacagacaccggcgggagcgcgtcaaccgcgcccgtcccgcaccgcgcactcgagggggcgcgtaggccgcgcccggcccccctgccccgccccgccccgcccggccccaaagaaggctgcgggagggtgaagtagagtacccaggcggtgatgtcctggcggaacaggggcgcccttggcgcgcccctctaacaagtcctggaccttgcgcttctcggtccccactacattcggtcgggaccaggatccaggggcggggcgggaagtgacacgtttgtcttttgagaccttgggtcaagaagagcggaggagagagagggcggccgctgaggctcggaatttacgactaggtcgggagggagcagagacgcgataaggatcctgagcttttcctatctttcaaagtcctttgctctcagggggggctttgatgtctaaaggggccggacgcaagggcctgaagacttcctgcaaaagctctggaatgggtttcgttctgctccaaaggagaacggacaggggcggggtgcatccatagggataacatccatggggctc

SEQ ID NO: 38840 - DNA, 1254 bp, Homo sapiens; identical to SEQ ID NO: 23903
  chr13:28673915-28675169
  binary

SEQ ID NO: 38841 - DNA, 802 bp, Homo sapiens
  chr13:29067770-29068572
  binary
cgatgcttaaaagaaaggcgctccgaaatctggctctctgcgcccaggggaacgaggcacaaatctccgccactcagccccactgagcagagactgcgagtccgaaccctcaagttcctcggggctttgacccctcaatggcggcggtctaactgctggtaaaacccccggcccctgactgttccaccgcccgtctcccaaacgcccagcgaaggctgacttaggtggcgggcggacctcatcgattcctcaaaccacatcgtttggtcaaaatcgcccgccctctcttcgctcggattttaaaggctaggcttgtaagtcagtaagttaacggtatttgggccctgggctgcccttgtgggtcagggtcactgatgtccgcgacacggactggaccgcgcaccacgcctgctcccggcagaggccccacccgggtggctgagcgcagcgcactggggccccgcggtccgagagcggcggggaggagcgggcgctcgccgagcgttccccgggacagtccggcttggggactcaagcgggtcatgggatgccggcgctggccctctcctgagatcctcctgctcccccgcaggcacgagtcccctccaaatcggctcccctcctacactctcgtgacgcgaggtcgcggccagtgcccaatatcaccaaagtcccggcctcagcccagccccgggcagcctggcaggctttcaggagcctctgctcccggctccgggggaccctgcgtacctgccccaggtcctctgggaatgggctctgggtgccaggcaggtcccggtgc

SEQ ID NO: 38842 - DNA, 886 bp, Homo sapiens; identical to SEQ ID NO: 34290
  chr13:30707193-30708079
  hypo

SEQ ID NO: 38843 - DNA, 900 bp, Homo sapiens
  chr13:36919871-36920771
  hyper
cgcgcaatccatcccaatataaccgcagttgttcgtgggccttcttgcagagaaaggctgcccaaccttgacggggccatgggcgctgcgggagggcaaaagaccacagagatctgcgaagccaaagtaaacaacggggttggggcggcgagaatgatcaatagcgatgctccgaaaggactccgcgataggaatcgagcgggaaggattccctccatcctaacagtccatgggttaagaggccgaagcttccctaaataccacactcccgcgagagaagggactgagaacaacttctcaaactattctctctcgaaatcgctcccttcctcgaaaattccatctctgagactcggatgaggtccccaccccctccacccttgtcccgtgaccgtcgcccgctcagcctcccagccgagtccgcggggcctggggcgcccaccccgcccacccaagggaccgcgcaggggtgaactcccccgcgccccacctgcgccttccagacctcgggcgccccggcgttgcctcgagagctccctgcgcggccgccgcggcacggaccagctcccactcccttacactgggcgccgctgcgctcgccgggggccggtcccgaggttcccaaggcctcgcgcgcgcgcttgccgtggcaaccaagacgttccacgacgcgcgctctcgaacgcttcgcgtcacgcggccgcgcggccccgcccgtcggcctcgctcccgccacagagcccgcagcacgccgccgccgcagcctaggtcacgtgagtacccacgcgcgcgtcttgccagcggattcatcaccggcctgctcagactaggttctgcccactctgaccttctaaatggtacgtgggaggacgtccgtccccttcggacccaagagtcacc

SEQ ID NO: 38844 - DNA, 1420 bp, Homo sapiens; identical to SEQ ID NO: 22793
  chr13:37005451-37006871
  binary

SEQ ID NO: 38845 - DNA, 1393 bp, Homo sapiens
  chr13:44360247-44361640
  hyper
cgcagactaggcggggaggaaagtttccggcccgcagcagagcggagtccgccaaggctggaggaaaagggatgcagagcgggagggtgaaaacctgaaagaagagggcagcgggaacactgtgtgggcaggaacgggtcccgggggcgacgcccgcagggggagacgggtgcggggtgcgctgtccaaggtgcaggggaggtgactggcgcgcggcgggcgcggagcccggagctgacactggctggcgggcggaggggagagcggggaacagctgtctggggcgctgggcacccccgggcgcgtaaaagtgagggagcttgagacggggcacggcggggaagggcgtgggggctgcaccgaagcccccacgcgtccacgcacccctcctcaccagcctcacctctagctccactcccctcccccctcgcccactcccctctcagtctagatccaggtgccgtggcgggggtgagaccagaggaccccggctcggagcccggacgccccagggaggctgcgggccccggagctgcttacctggggccgccgtatggggagcggaggcaacccgctgcgcggagtggggcgccgggcgcggcgcggctcctcctagcctcggcgtcctcctcctcctttgcttctcccggactctgtcccgggcacggagctgggagacgcggccgggctgcagtcgccgttccctctgctgccgccgccgctgcagcagacagaggacgccccgtggcggctggaagcctgtgtgagtagcggcgcccgggagagcggggatctgctgaggggcgctggagactccgcggctggaggcgcgcgggcgtgcgcacgcgcgcctgcgagtgtgagtgtatgggtgcgcgcgcgcccacggggtgggggagtcgcgaggggagggggagagaggccgagagatgctcgtagggaccgaggcaaaattctacgaccccggaaatccgtaaacgcggggaaggaggatcgaacgcgtgtctcgcttggagaagctgcccacggggcggcagcagaggaggaggggaagtcagcgaggcgcgctagggctccggatcccagcccggcagagccgagcggagcgcgcagccaccgatgcagcagaggcggcgcccgcagcccacggtcgcgctgccccctctcgggaggggccgaggccgctcgctcccgccaccgccgccgcggtcgggactgctctactgggagcgggggaaccgagagagggaccgcacggttgctacggcgaccttggaggggccgggcccgctgaagggccaagagaagaacccgggcgcacgtggccgactccaggctggagcgggcgtgttacaggattgtgggcttggggtagacggtggaattgggccgc

SEQ ID NO: 38846 - DNA, 155 bp, Homo sapiens; identical to SEQ ID NO: 23907
  chr13:46661291-46661446
  hypo

SEQ ID NO: 38847 - DNA, 866 bp, Homo sapiens; identical to SEQ ID NO: 23058
  chr13:46960952-46961818
  hyper

SEQ ID NO: 38848 - DNA, 905 bp, Homo sapiens
  chr13:67804729-67805634
  hyper
cggcgtgggagggacgcgctggcgctccccaggcccgggcggaagcggcgctcgcaggcgctgaaagcgagcgaccctctgagcccgggtggtccggcgggcaagggcggcgcgggagacccgcagggcgcgggcgcggatccggggaaccagggccaccgctgcgggcggatgggggtcaccgaggcggctcgtctccaggcgcacacttcgcacatctctttgctaagtgaaggggccaaaatgcacagatgggggagtctacccaggaacagaggcgcgagacgtatagccacccctgggttgggagcacgagccagcagatccccggagcgcgttaaacggacaacatgcccggtgctgcaaatagaggcttttgctggcagggacattggaaagaagggcggagagggagtacagcgaaaggtggggaccgcagaatttggaatctctgcggagaccggaaagaaaattaatcggagcacttcctacatgcagagccacggaaactgccttggaaagagaaagtggcagcgtctgggtcccctcggtcagcccgggccagtcggctgcgcgtgcgaagtctcctctagcggagcgggaccggccgcggcggtggatcgtggcggtccctgcacttctgctccagccgcgcctggaaacctgagcccggactcgcggctgctgcaaaacccgcttccagcccacctcactgcgaactttgcttccgaggggctggaaggagtcccaggcagctgtttcccaagctgtggaacacttcctttcccctaggcactttctgctgattccaactttctttcctgtgattttcgtcttttcccgtgcatttcatttctccgactccagctctgtactaaatcctcacaagtttctcgttttcatac

SEQ ID NO: 38849 - DNA, 1293 bp, Homo sapiens; identical to SEQ ID NO: 29842
  chr13:79175610-79176903
  binary

SEQ ID NO: 38850 - DNA, 1301 bp, Homo sapiens
  chr13:88323357-88324658
  binary
cgagacagcagcattctgaatggcaggaggaaggcaggcgatcagcacagggctggaatcatctgttcctgaccaccagcaagcctggcactgccggggttatttccactcctccctttcccaatccgagaattgcacagtcccacgctcgaattacacacatggtccaagacttctctctcttcctacgaatgtgacatccaagggggccccggttgcgccgccctagcccagggacgccttcgccctcggctgccatctatcggccaccgagcgcccgcttcgccccgggcccatcatgtctgctgcagcttggctcgcaccagaggcgcgacaataaacaagtgcactggactgggccctgcacccgctccggagcagctgtctcagagacccggtgttgcttaccgcgttgccacctcctcggcgcccgggaggaagacgcaactttctcggagttttttttagagccaccgggctgccaggacaagccacaggcatagaacgacgcggttgctgcccgccccccccttcccccagaaaccccaaaggatgtcggtgatagagagttccaactaatgacgattgtgcgccgcatctggggaagggatacagaaaaaaaccctgcaaacaccgtgaggatgaaactgccaaagggatgcaagagcctctcaaatactaattaggggccgcggcggcggcgggctcggcgcggagacagcgtcggcgggatcccagcgcggtggtcgccgctgcgctggggggcggaggacagcgcaggagctgcagccgccgccttcgctggagcagccgaggggccggtgccacctttgctcgccccctcactaccatgtacagtgtgcgctgcaagaagaaggcgggagatgcatgcacacccccgcgacccgctccctctggctcgtcccccggcgtgcgccactgaccaggggggaatgtggtgaagacggcgaggaggagagccgaggggggaggggagggccggccggcgcgaacccaggccggagggtgcgaggagccagaggaggctggagggggcggcggccacagctgggtcggagaaagttgccccctatgcagatggcaactgtgagtacccctgtgggggggagggtgcagcgaaggctgccagggaccccgcgatcgcgccttaacacgtattggagcgagtgtgcgagtgatcatgagtgtgagcgggtgcgagcgctcggcggggctgaccgtcacgttggcggggccggcggggccaggcagtcttctccgcgtccccctcctcccgctcc

SEQ ID NO: 38851 - DNA, 782 bp, Homo sapiens; identical to SEQ ID NO: 36329
  chr13:96204691-96205473
  hyper

SEQ ID NO: 38852 - DNA, 991 bp, Homo sapiens; identical to SEQ ID NO: 27624
  chr13:96296233-96297224
  hyper

SEQ ID NO: 38853 - DNA, 937 bp, Homo sapiens
  chr14:100259349-100260286
  hyper
cgcgcccgctctctcccggccttggtctttgtccccgcgcccccgcaagggccgcccgccgcgccccgcagcccctgagcccccgtgcgcggaggcggggcctggccaaggggacagcgggcggcagacgcgcccctgcggctcccaggccgcccgggccgcgctccccgcggggaaagaggccgcaggcgcggggaggctcggccccgccccgccacgtccccctcccggcccgggccccgcggccgccgaggccgccccctcgcgggcggagcgggcgctgggctcgcgcggctgcggcggcggcggcgggcccggggttgccatggtaaccggcagcagcagccgccacagcagggccggccccagcgccagcgccggtcgcggtcgggctcagctcagtgtgtggtgagcggcggcggcgcggccgggccggggagcgggcgcggcccggcggcctcagcatggaggacggcttctccagctacagcagcctgtacgacacgtcctcgctgctccagttctgcaacggtgaggggcggccgcgcggggccggggcggcgagcggctggtggcgggcggcggcgacggcgacggcggggaccaagccgaggggccgaggcccggcggccgcgggcgaggccgcgcaaagttgttgcggaggggcgcgcggtccccgttcccgccgccggcgcattgtgttggagccgcggggccgcgcctcgctccgggccgccccgggctccccgccgccaccccggctcccggcactggcgcgcggaccccgccggctccagcacccgcggagcgcgcccgggcggaggcgcgtggggcacagggcggcggggaggcccgggcagcctccgcgttccggggaacgtgttgcttttttgcttcccgacccacatctgtttggaaatgactggatgaagaactc

SEQ ID NO: 38854 - DNA, 1275 bp, Homo sapiens
  chr14:100437737-100439012
  binary
cgccccgcccctcgcagcctcaagctcagcgctcccggaggcgcggacggtggggccccgcgccttttgtgtcgggctttgaccgccgcgcgcgctcattcacctcagcggccgcgggcggaggggcgcacgcgcgcgcagtcccctcggagggcggtggggcgaacagcaacgcgcgtaccctagctcttggctgctgtgctgagactagcccgcgcgcccgcgcgcctctccctcgaggactcggagccgcccgcgcactcgccaggggccgccgccccgagtctcaggcggacgcgcacgcgttcccgccgcccggaccccagccggctcgccccccgcccccccatcccccggcggcggcccccaggcacgcgcccgcgcacacgccggcccgggcacgcgcccgccaagatggcaggggccggggcccagctgtcagtcgccgccgccgcggcccttccccgcagctagcggccccgacgcccacccggagaagatgagcccccgctgccccccgcagcccagtcagacgcggagccgccgcgcccggggccggctcccccgctagcgcccgcgtcccgcgccccgccgccgccgccgccgccgccgggtcgcccctggcccggcgcgcccgtccccggcagcgacaatgaggtgagtcggggccggcgcctcgtgggaggtggcagcggccagcgtcggaggggctgggctgggggcccgcggtgcccccgagggcgggaggggggctccacgggcgcgggggcttccagagaaccgcgggggctctgcagagattcgggggcattcagagcgcgggaatggcttcgcgagagccgtgggggcgtctggagagccgggagggtctgcagggcttgtggggggcagtgttctgcaaggggcaggcggcgctggctttggctgcttgtggggtcctcttaggctccggggggcctgcggcggcctgggaggcagacccccgcgggcaggtgtggccgtgtcccgaccgcgcgaggaccgaagttggcggaagcccctgtgcggtgccttccagcccggaggaggctggcctgaagcccccaggcgttgccgaagcctccccctgccagcgcccagagccgcgtttgggcttttacaggtgtagtttcccctcgacttggagcccgtcaaccccttcgtctcctaattctcaaccccccttttttttcttcttgcacgccagtaaagtgcaaggcccccaaatgtaccgctcgttgatgtatcacccagctc

SEQ ID NO: 38855 - DNA, 85 bp, Homo sapiens; identical to SEQ ID NO: 6896
  chr14:105472075-105472160
  hypo

SEQ ID NO: 38856 - DNA, 1497 bp, Homo sapiens; identical to SEQ ID NO: 29852
  chr14:36002777-36004274
  binary

SEQ ID NO: 38857 - DNA, 1091 bp, Homo sapiens; identical to SEQ ID NO: 23940
  chr14:36974427-36975518
  hyper

SEQ ID NO: 38858 - DNA, 815 bp, Homo sapiens
  chr14:36989187-36990002
  hyper
cggtcggggttccccgggcacggacaggtctttaggaggagggggctgagggacagggtgggggtttcacctgagcctgccggggctgctcctccctcccgccgcggcctcccagccccgcgccttcccactgcctccggaccacatcgggcttcgctgcgctgagccccagtcgccaacaaatgagcgagcgagtctggggacgaaccctggggccgcactgttggtctacgtgtctgtcagtctgtctgcctctcttctgccgccgtcagagggacacctctgctccccgccccctttccccctaccggagagaatccgagcgggcggagggggcgctgagtaggggatcgactgcctcccggaggctgtcccggatccccgagccacaacccgcccccgcagctcaggggtttttcagtgggccacccccgctaacacgcctcccccaaggtcttccccccccccccccacccccggccgagcaaacacagcactggcccccagagctgggaggatgggaaggggtctcacgggagggtccgtcactgaagttgccccacctcgaacaaacctggtgtccctgaccctcgcccatctcccagacacgcggggatctggggctggagctgactttccgaggacatcacagccccagcacccgagcccagagccacgctgttttcccctctgatgcttcagggagcgcgcgagcagggagcggcgtgagtgcccgtctgtctgttgccgggcggaactgagcctgaaccccggcggctggagcgctggccaggagggggcgaatgccgaggtgc

SEQ ID NO: 38859 - DNA, 971 bp, Homo sapiens; identical to SEQ ID NO: 34322
  chr14:42075958-42076929
  binary

SEQ ID NO: 38860 - DNA, 2358 bp, Homo sapiens
  chr14:51560302-51562660
  binary
cgggctcatcagtattccgcctgcggcgtctccccgaccctccgccgtgcctcaccaggtccgcctatccagcagcgacagactcccgccgtccgcgcgaccccaccgcccccatcccagtccctccccgagggttcgcagcccgccctgccctcgagcgtgcctagcggccctgggcactggcgcggctctacccagctatgcagtgctttcccacacactggccgcggccactggctgcagacccgccgcggaaagggggcgccctgagtcccgctcgcaggcagcgcgccccgagagacccgctctaaggcatccccgcaacaactctgtgggggcattcaactcccccgtgcgccggttaagattcccccatgcctcctgcaatgcaccagaccagggaggtaaacatcgaaggcacctgcattgcgcccccactgggatgcgctgtgcgcaagagacggggaccgtctgctgcaaaaccggatgatcggagacgcagggagttaggagtgggttttcttaggactcaccttatgtagtttccacatggcccccagagccttgacttcgtggctggagtgtttgccctcctccaagcactggtagcacacgggcatcttgcattgcacgcagtacatgctgtggttctccagctcgtggtctgtgcaggtggagaccttgcgtgggctcagcctccggctcacacgaccctgggccgggggcaccaggcggtgcttggctaggggcccccggggcgggtggcagcgcaggcggcacggatcgcagtagaagacatcgcactgttcgcacatgacggtggcttccttgggcgccttctcgcagagctggcacttgagggccgcggctttgctctgctggtagcggtcaattaccccttccagtacgcgattcttggggaagccgcggagcccccggtcatccaggatgaggctgcggtgacactgggggcaggtgatacaggagttgcggggcaccggggccagggccggtgacaagtgggtggccggtggcggcatagccgggggaaacacgcggacgccgttgggggacttctggcacggggtagtgggggcgctggcgaaccccccgtaggagccatagccgctgtccgcctcgctgtataggctcatcttgtccaggtccagatagtcatagtcggagaccccggagcccgcggcccgatggctctggggggattcagactctggggtctgcaccaggatgttgcgggcgcacgcctgacacaaattgtgagagcagggcaggatgatgggctcccgatagaaggagccgcacacggggcatttcaactcctcttccatctcctccatggggaccggtctgggaggagacagcgacggctgcagcgggtgcctgagctggcgaggtggccgacgggcccgtcttgtccagcaccctggccagcggcggcggctgtggtggtggtgccttcccgcgcagcactggcacggacacccagagaggcgctagctctgtgagccgcagccgcgtagccgccgcgccgcgcgccagcccggaccgcccctacctgccctcctagtcccgccccggcccatgagcagcggcccattgggcggggggcaagagatcgaagctctcattggccaccagacccgtccgtctcctcgtctccgcaggccacagggggttcggtagagtctgaggatagggcagtcttcgctcgcggctgcaagatctctgaagggggccggcgtgcggaggctaggggaccgggaaggaggagttaggcgggatgattcatcctcgcccggcttacttccgacctccggtgcagtctcccaggagctgggggcgtgagaaacccctccccgcagcgagtgggctgccggagggggctggggcttctcgccagcgtttgcgtttggctcccagctctgagctccgcgcccacctaccgcgggcgagtgctgcgcagcacggaggacgccccttctcttccgctgctggcagccttcgcaggcgtctcacccgggcctaggcttctgcacggcagtggggcttttctccttctccgtgaatccgctgacgccgtgccctggagctcccccatcccgggagtctgacggcgctggcgcaagccctggcgacactcttggcttctttcatcctgcgtccctcgtttcctaaagagcatgtataaagtcgatttcctagtgtcgacatgagattcaactgggtaaccgatggaaatggtcagcattagtcagaatctatgaccccttcgtttcatgctttaaattatagctcggcccagaggcctcagtgccgtggtgtgaacgtgcttccttccac

SEQ ID NO: 38861 - DNA, 781 bp, Homo sapiens; identical to SEQ ID NO: 23071
  chr14:52534581-52535362
  hyper

SEQ ID NO: 38862 - DNA, 1512 bp, Homo sapiens
  chr14:53416817-53418329
  hyper
cgttctgtcagtaaatgttaagaattaacgagttccccggcacacatcccccgtcccgcgtaactacgcaattaaggttataattgggaggctcgaatcattacatatgaaaattcagagaatagcaaaacaaaataagacgcaaaggggaacaggtctatctgcttaaatactgaaagattttacatctccaaaaagcatttgcgagatgccaagatttctcaaatgggcccctcccccgtcgtgagcctctttcctccccctaccaattctgggaagtcattagttggacgcggctgggatgctactcaccgagtttctccaccagcttaagcatcacgcctccaatgtgcacctcgccggtcactctcagggtgacatcgcggttcaggtccgtcacatggacactcagttcccacgtcccgtccgcgtagcagccatctggcatccttatcccgtccagagccatggctccttcctgcgagcgcggaggaaatggctctcgtaagcgtcactcccccaaagaaaggcgaatcccaccgaattcgcagcgccggccacgggctgggaggtggtggaggacccggggctttcggcagaaactcgggagggcggcggcggccggggctgcgggaggaccctacgccccgctcgccccgcagcgttcctcggtcccggcgccgcccgccccacaccgtccccgcctagcggaccgcggagggcttcacctgccggccggccccgagacacagcgcgggctgactccccgttcccctccccgccgcgccccctcgggtcccggcggggtcccgctccctcaccgcgcgctcctagcgctccgggcccgggactcgcgcggcaacaggcgaggggctggaggctcgcggggcggcggtgtccgcgtccggttcctcggctggcgaagcgctgcctgtggccggagcggctaatggagtcccgtcgtcgcggcccctcgcctggctccccgcgctccaccctctccccgccccctctgtccgagcctggctgggctgggcgcgctggctccctccttcgccgcccgcagagctgccctgagcgggtccggccggcctcgcctctgcccccgccctcccggcgccgcgctcgggggagggggctgcgggtcccgggcggggcggggcggcgtggggcggggcggcgcgggggtggcggggggcgcggcggggcggcaatctcggccccgcggagcgctgcccttttatggaaatgaaggacccggctcaggaattgaatccaacatccgggctctaggcggcgggccctgaggagggggagcgggggagcgcgggcggcctttcccggggcgctggtggccggcggggcgtctagagctcaggctggactggggcccccgcggcgtgtgtccgcgctggcagcagggagagggggcttgtccgtgagaaacggccccaggaaattcccagggcaaggtcgttttcggagaacaaagtcctctcgccccctccccac

SEQ ID NO: 38863 - DNA, 567 bp, Homo sapiens; identical to SEQ ID NO: 23946
  chr14:65239277-65239844
  hypo

SEQ ID NO: 38864 - DNA, 583 bp, Homo sapiens; identical to SEQ ID NO: 34328
  chr14:70345943-70346526
  binary

SEQ ID NO: 38865 - DNA, 1758 bp, Homo sapiens; identical to SEQ ID NO: 26357
  chr14:70654358-70656116
  binary

SEQ ID NO: 38866 - DNA, 143 bp, Homo sapiens; identical to SEQ ID NO: 23951
  chr14:73602342-73602485
  hypo

SEQ ID NO: 38867 - DNA, 778 bp, Homo sapiens
  chr14:90528355-90529133
  binary
cgccacaggagctaccgaggcggcggccgggggagcctcgcggcctgcgggagagcccggcggtcatgggcgagccggcggtggggcgcccgggagctggctgagcgccggggcccttatttcccgggggtgtgggcgagactccgccgacgcccggtgccgtgggcctgggggctgcccccgggggcccggccatggctggccggggtttcagctggggcccgggccacctgaacgaggacaacgcgcgctttctgctgctggccgcgctcatcgtgctctacctgctgggcggcgccgccgtcttctccgcgctggagctggcgcacgagcgccaggccaagcagcgctgggaggagcgcctggccaacttcagccgcggccacaacctgagccgcgacgagctgcgcggcttcctccgccactacgaggaggccactcgggccggcatccgcgtggacaacgtccgcccgcgctgggacttcaccggcgccttctacttcgtgggcaccgtcgtttccaccataggtaagtgtgctggccggactcgctgacaacctccgggcggcctccacttcctccggggggcaggaccgaccctctcatcctttcattcatccatctgggcgcccagccagactccactgacatgagctgtcgcctgatcaacaggtggtattgcctccccgctgctctaatgtggtccaggcaccggcagcttcagcgtcacctggcagcttgttagaaatgcagtctcagtcccctctgcagacctgcc

SEQ ID NO: 38868 - DNA, 932 bp, Homo sapiens
  chr14:92980037-92980969
  binary
cgctgccgaatggcttttgacaaaaaaacccttgaccaccaaggccagcctcttcctgaaagccccgctcgctccgatacaggaagtagaagggagcgagagccccagagcgcggcggcagcggcggcctggcccttccagagggccagagccagggacatgcgggcgcccgggactccgcgttccgcgcggcccggcgcctgagcgcctccgttccccgtcccggagctgccggcggcatgatccgacacgccggggcgcccgcgcgcggggaccccacggggtaagtccgggcggccgccccctcctccctcgcgatccccacggcccgcgtcctggccgccccactccacttcttgtcccagagagtccttcgggcgcgtgacctcggggttgtcgggctgatacgggacccccaccgtggccgaggccagaacctggttctgcggggcagggggcggccctggtgactccgctggacccgatgttggctaaactttcaaggccaggcatttcactgggaacccagtgcacactttaggctgctggtggacggattacgagggagtgcgtcgctacctgtcagcgccggggctgcccgcgtggacgcggccccctccctggcgtctgccccgcctgaactttgcaaacaaaactcgcggtcccagccccgccagcctgctgcacccgctgctctgcgagtcgcagcgcgcgccctcgggtactagagccccgctgggcgtggggtcggagacccggacccccgcaactttgggtgcccgcggcccaacagctgaccggccctcctggaccgagggtccactgggcccttttcccgccgcccctctgccctggccgtagacggtgaccttcggaccggccctggtcgagcctagtgcttgggtagggtccagggcgcacgggctgcgcgc

SEQ ID NO: 38869 - DNA, 1195 bp, Homo sapiens
  chr14:96505311-96506506
  binary
cggactctgggaggagcgttggcgtggaaagccaggtcactccgatcttggtcctcaggctcgggataacgtgtcagccccaagagagcgctgcccacagccccgggtgggttgggttcaactgcacggggcggggcgccaacagctcaggacttgggttgcaggctggttcttgcaccaaccagcggggcggcctcgggcctcagtttccccatcccgcccacgaagggaggcgattgcgagcgcttggggtttctgacggaccccgccccgggggtggggcggggagtggtcacgtggaggggcgccccgtccgccgagccccgccccaccccgccccgcccgcccccgcgctcggggccctccgcctagtagagatctggagccagaagcccagagacagccgagtgcgccgtgcggtctccggacgctcgctgctcagcccgatccccgccaactgtgcaggcggctgacccgcagcggcagcggcagcagcgaggactcgagcgctggctgcagcgacaccatggatctctcctttatggccgcgcaggtaacggggcgtcccccccacgcgccccgggccgccaagtttggggaggttcggggccacggtctcgccctccacgctggggctgggcagtggcgcccgcccgcgatccgcgtcccggtcctttgtcccgagccggacacccccacttggtgcacgcgtcgggggcggcgatcgcggctctcccggggtggggcgggctgcgcgccccgcacccccgcggctcgagctgttcccgcccgggcccctctcgttggcaggaaggctgcgaggagcctgggcagcccgagtcgcccccttctgcccatcccccactgctgtcccccttctggggtcccggagccctccaaggccgggccagctcagacccgcgcgaacgtggatgggcacacagtctcgcccttccccactctgttttcccgaggcgccagtaatctgtctcttgccggtgacctcgggcgccccctttgccgccgcctgaggaaggctctgagacccgctttgtgaccgtgacccgccaagcgtcgacgcgccgcggtcgtttgtcctgttttgctttgtgtagagtctgatggagccaccagtgcccagcgcggccagaacccccccacccccctccccgacacaaacaggctcccagtggcc

SEQ ID NO: 38870 - DNA, 932 bp, Homo sapiens
  chr15:28351681-28352613
  hyper
cgttgtccccaagggtctctccaccctccgggccccggcctccggccccgcctggcatgaggagcggggagcgcacagcagggtgggggcaccgggcgcacgcggggaatttccccacgaccacggccacgccaaatgcctgaacctccacggctgccggcaacagcgagcgcagggagggggctgtgcgcgcgggggccctggtggcggagcaggcatcaccccgagagcgccgaggtttgtggtcgcaaccccgggagcaccgctgcgggaggagcggcgtggccgggcagaggcgacttcctcgcaggcagtaccgggccccgcggccgcctccgggcctgtcctggtgccccgggcttccacccggcgggctggcgtgcgggggctggtcttcgccgagatcctgctgggagcgggctctggccccacggtgagcccggccccagcctcggtgatgcgcttcgctgccgcgcggggagggagagtccggcagggtcacgaggcgccggccccggggccgcttgaaacccgaagagaccccgctcgctcgcgcgcccgccggacgaatcctcgcggaggtcccggggcgcagccggcgtgagggtggggtctcatcgcaggggcgccgggagcctccccgctccgctagctcaaccaaggaccgctcagaggggctctcaccctgaacctcggcttttctaaaggaagggcagaccccagatttcccccttctcttctcgaacgtgctttgggtgtttttctgctttcttttttggcaagtcaggacagcgcacagtgcacggagctccgaagctctctcagctactcccggatttctggttaaacctgagggtgagcccgaaagaccgctgccgccggcggccaccccagcgcgggtccgctgagaatggaaacagcaagtgcgcgcc

SEQ ID NO: 38871 - DNA, 865 bp, Homo sapiens
  chr15:29131028-29131893
  binary
cgcaggacctcgcgcacgcccggcacggacgcatctttgtcttccctctcttcacggcgcgcgatctagccgggaatcgttttccggccccagtgtgcccggcgcgggtgaggcggaagcggccggggcgggggcgcaggcccggcagccgcaggccggtgcgggatgcgccccgcagccgcgccgcgtgcgcccggcagaggcggccctgcgtgccgtacgctgcgtccggggcgcgcccgccgctattcgggaagctattcagcttcccgggctcattagcagtcgcggtgtgcggctcggcgcgggctcacaaagagctcggcctcgcggactgagccggcggcagcggggcggggacggcggcgtacccgggcagcccagcgccctggccaggtaagctggggaacctgggctgcctgacttgccggcggcggcagcctggggccgcccggggcgccgcgaggacccggacgcgtggggggcggcgcggaggttgcggcccgagcgctccagagcgctgccctcccgactcagcgtggctgcggggcggccgccgctgggatatgggggtacagcccggcggccccactcctctctgaccggccgcttccccctcccacgacgggtgggcgggcggggcggggaccaggcggcggctctcgcatcccgcgcggggggcaccgcggcaaggggccacccggcgcggacaagaggcgctgtgtggcggggctgtccgctcgactcctgccgggctggccgggctgcttggcaccggcatcaagtccccgtgccgggcggcaactactgagtttggggtcgcctctgggttcgctgcccccagagaacccaagcccagatcttc

SEQ ID NO: 38872 - DNA, 1176 bp, Homo sapiens; identical to SEQ ID NO: 26378
  chr15:29561185-29562361
  hyper

SEQ ID NO: 38873 - DNA, 1766 bp, Homo sapiens
  chr15:33009589-33011355
  binary
cgacaggctcctgctggcggccagcgagcccgccaggttaacgggggcgccggggtcagcgccctcgaagttgggggcctcgggcggggccgccggggagccacgacggccgctcgaccagagcatcccgcagtcccgttccctccagaggggaagaatggccgaatctggcacgatcccacggagatctcgctcttcccagcgcagtctccgctactgagcgcgggaccaacgcaggcgatgccgggcggccgacagggaaagcccagacctggggcagagaaggaatgaggggccgccagccggggggatttcctcccgctcttccctctccaacgggagcggaaaatgtgatttgctgtgcattccaggcgcggttccctggggtgacctctcccagccggcccgggcggggggagcagacaaagaggcgaggcgggcggagaggggaccccgcggggaagcaggaggggtgcggggggcgggggcagtaccgggaaagggggcggatagcgggtctggcggcggcggcggcgcctggccaatggagaggcgcggccccgggcgccgcgctctgccgccggcatttaaacgggagacggcgcgatgcctggcactcggtgcgccttccgcggaccgggcgacccagtgcacggccgccgcgtcactctcggtcccgctgaccccgcgccgagccccggcggctctggccgcggccgcactcagcgccacgcgtcgaaagcgcaggccccgaggacccgccgcactgacaggtgagcgcggacgcacccggcagggatgtgagtgggcggagggaagagggccgcaaaccaacccaggacccgctcagttccacgcgcggcagccctccgtgcgcgcaggctcgggtgcgttgttcgcgggggtgaattgtgaagaaccatcgcggggtccttcctgctgaggccgcggacaccgtgacctcgctgctctgggtctgcagggaaacgtaggaaaaaaagttgtcaggagcgggcaggatgacccccacatcccgtttccacctcccggaggcccccgaacacgctcctggtgctggtggcagcagcgcctggcagacgcgcccgcttagcgagggcgcgaagtccaggccgccagagcgcaggagcatccggacctgctagtcggccgctgactgcgcggcgagttgccttgagagggtcccatgtgcttggggcgccgcgctgggtctgggggcgtcttggggcgcccattggagtccgcgggttggagcatccggagaatccatgatgtgtgcatttgccgatccccgaggtgagatggagactggcaagggcagagccgctgtgttcagccacagcggaaaaccgaacggtgggtaatccgacagctgcggtgcggggcgcggccctggccgcggggtccagcgaacccgcagtgctcacaaggcagacaccacacgcgctcgcggaccggccacgcactcgcgggcgctcgcttctctactccagcctcttccccgccccgcgcacgcccgggctgaatggtagacgttctggcgccgggcagcggccaccggctggttcccacttccgcgcgcaccccttaaactgtgttctagaggccccagcctcgccttgcagcgcctcactagctcctgaggactagggactggcggctgaggcgggttggcggctgcaacgagctgggcgtctttcgttctctctcgctgcctggctggctccgctggcccctccacagcttgc

SEQ ID NO: 38874 - DNA, 1367 bp, Homo sapiens
  chr15:48009738-48011105
  hyper
cgagtttcaggattctatcaaggaagccaagacctaaggagacagagggatatctatttttacaatatttttctttattttctttcttccttgcgcgtggcaagcttttttttttctttttcttttttcttaccagcctccccccaatgaggtaagaccgttttcaacaatttgctaatgctcttgtggcgcccggtgggggtcggaacctgagatcccgaatcgctgtgtgtgtgtgtgtgtgtgtgtgtgtgcgcgcggtgggggtcggaacctgagatcccgaatcgctgtgtgtgtgtgtgtgtgtgtgtgtgtgtgtgtgtgtgtgtgtgtgttgccactggacagttgatttattttccaagctgctctctctgcctgccgtgcaagggacgcgcaaagggctagagaggtttggcggacgcgtcaaaactggcaaagctggcggcttagggggaggggcaagtggacttggaggccctcctccactgtgcacccccttggaaaaaaagcggagggggcatcaagtaaaagtttcttgccaggcagagccagctcggcgtcccccgcacatagctggggttagcaggggttgcttctctgccgggcacagcgtctccaggagccagccggggagagctgagccaaggccgaaggagccgcctgcgggcttagccgccccctcccgcccgttggccccagagcggacgctgggacgcccggggtctggcagctctgcgcccggctaggagcgggcgggcgagcattagcctgcgtcctggagaaggggcgcagcgccgcagttgaggccggagcagcccctcgcgggcgtaggatacctgtcagtgagcgcccggattgcacggcccccgggtagtgcctgccggcgaggggcgggagctcgggtgacttggccatccccatccccggcccaggcccggagggcggccgcttcccaccgtccctctccccttactggcagagcgcgctgcgggcggactcccgggcccggagcagcccaccggccaccccaccgcccacccggctcccggtgtctcctcccggccgctctacccagcaactttccgtgctttgttccccgactggaaatgctttacggaagcgtcttggacagggtctccgccaggcgacaagagctcggtgctgagatgtgttacgttctcatctccccatcaattatggatggaaacaaataaggaagagtcaattttgctgagccccttctccggcaacgagaggcgttctgcagccgggagggagccgccgctcgcgccggcagccgctggcaggggcatggtgaggaggaaggtagggaaacttttatttcccgtcttgacagcggc

SEQ ID NO: 38875 - DNA, 681 bp, Homo sapiens; identical to SEQ ID NO: 23085
  chr15:48469946-48470627
  hyper

SEQ ID NO: 38876 - DNA, 1927 bp, Homo sapiens; identical to SEQ ID NO: 27648
  chr15:48936649-48938576
  binary

SEQ ID NO: 38877 - DNA, 1417 bp, Homo sapiens
  chr15:53076805-53078222
  hyper
cgttacacagagagaactacacagggggaactatggtcctacaccctcgaggggacagacaccggccgtgagacaggcaccacgcagagccttctggtgactgtccgcaggagcgagaccttttttggttttgcagtcggctaggtgtgtgtgtgtgagggtccccagttgactaccgggatgcactgccacttttcggcctggcgggctctgggactccttggtctccgtaggaggccatcctaggccttcggaggaggcgctcccagctggcggcgcccctcgccccgggctcagaggcggacacggtcggtcgcgccctgctggccctttgttcgcgccgcagcgggctgggagcagctgcgcgacaccagacccacagcgccaagacgcgaagcgcgaggaaaccgctgcgcttgactccttctcccccaactcttggacccaggaacgcttccagctcctgcgtcccacacgcccagtcctggcttctctcccggcccagaagtcttcaaggattgaagggctctgcctagggccccgcactcctgcctgactcccatggcccagaaaagcagggggacatttgaaatgtcaccccgggataaatattaacaaaaaagcaaatggacttgtgcaggggccagttatcaatcaaccaggccgcaaggccactcagggcaaacacagcccaggttgggctgggcgagactttctcatggccgccccccgaccgaacccctccccccttggctcaggtccttcttaggtcgttctggggcaaacaccggacgggaagggggcgccgccaactcccccgcggggtttggaggtttcctcgcctccaagtcccgcagggcagggtcggagtgcccaacacccacccccgcccgaacctcgggcctgcgcgccgccttcccctgggtccgcggtgctgcgcttgctgttgggtgtgtgtcgctgtctctttccgagccggcagctcctgctgtgtggccgaagccctctggaatctttaattggaaactaatcttggtcttgatagacgcccacgtcagaggcgcgccacccacccacaccccccgcctcatcccggaggagacgcggcgagaaccctgtcgctctgctctttaatggggcagcagcaagtagtacatggagggaacatatattgatttttaaaaggtagttaatttggtgggaatttcctcctgtcgcccttcttccaccagccgctgttatttcgtgaccggaaggcgcctccccaaacacagcgccacgtgcaagagggttttgaccctctgcaacaggctgccggcaactggaggacagaggggcgtggagaagccaccactctcccgctgcggagcgaaggaaccgagctcagtgagccctgacctcgcaaggtggttggaac

SEQ ID NO: 38878 - DNA, 941 bp, Homo sapiens; identical to SEQ ID NO: 26388
  chr15:53078748-53079689
  hyper

SEQ ID NO: 38879 - DNA, 2934 bp, Homo sapiens
  chr15:53080201-53083135
  hyper
cgaaaatcgcgaagaggaataataaaacaaaatgcaaagtcctcagggagtcggcagcggagtcggtcccaggacatggctattgctttgcagctctcactgggaccttgggacggtcagcctccctctcctttccacagccaattccatgcgcagagagcgtcctaacccttacaactcgtctgtgctacacacccaccgcccaatggctctgaaactttttgcccatactcttagattgaggtcaccccagccagcgccaaaagaatgagcgcgggagggggtcacagcagccagttcggccaaacatcgacgctgctccggcacgctccagcccagcgcctgggatgtgtcagaggtacctgcgaggaacatttgcgtgcgattccacgcacgcgttgcatccctcttcccaaacccggatcgctgaactgagaggtggcgcagagtgtctcaccaggtgcggggatttctctccgcctcaggccgtacgagcttccctcgctgtccctgagcgcaaatgagcctcttcagtcgccgaggcccggccgcttagctctcggagccttccacagcccaacaccctgagccctggagtaggcaatttgctcccacagccctgtgctggcccttccaggcacagggagtcccccttctaggggtaggggcgggcgggatgaagcgcacccagccctctctcctacccttcctcctttggtcccttcggctttcgtgtaccttatctcccgcgcgcccagctccttggccggctcacctgctaagcggagcgcggacatgcgctggaactccggctcctgcagccacttccacatcctccggaaggtctcccggccggatttgagtttgctccagggtttggggttgcgcagcaggtccgagagggtcccctgggagcggcagagcaccctctgcgcgaagatggcctgtgggatgctgtagcgcttgagctcggtggtgatacgctgcgccacctctttggtattgatctcttccatctgccctgaattacttccattgctgacctgcgcgccggtcaccgaagggttgggctcccgggctgtgcccaggagttgcccgtggccctgggcgttcaggtgggcgtggggatggtgcggaggaaggccgttgatgggcaccatgccggccgaggtgggcgtgaggtgctgctccccgtggcggccgagcatggccgggtggtgggcttcgaagccgttgggggtgagcatcttgtcggtgggcatggcggcccccgggtgggcatagtgggggagcccttgctgggagttgtggatgctgcccagaccggagctggagaggggcgagaggctctggcccatgccggccacgtccttgtggtagggggtatagaggttattcatggaggccagcccgcgctcatcccgcatgagcgtgaagctaccgctcacgttgcccgccaggcgctggtggtggtgcgggtggtggtggtgatggtggtggtggtgatggtgggggaacttgtccgagactgtggagatgggaggcagcggctgcagaggggtcaaggtggtgtaggtggtgggcatgctcatacctgggggagtctcgcaggccatggtcatggtgggatgcagggggccggccaggctgtgctcaggggcccggtggtggtggtggtaatctccgccgccgctgccgccgtccagcagggacgccatgcccatggagcgcgggtgcgcggggggcaggtggctgccgcggtgcgccacggagctgcgcgcgtgggggctgccgcccagcaggtcggcaggggcgggcaccggctcatggctcaccccgtgcagctcgccgatcgcttccatggtcagctgcgcgttcatcgtgatccgggcgagcaggcggcggacacaacatcgatgtggccaggcagaggcggcgaggggcgcacggagtccggtcttcacatcggctgctggcgactgttgccttccttcctctcactgtggggctctgtctctctctctctctctctccgtgtgtgtgtgtccgtgtgtgcgtgtgcgtgtgtgtgtgtgtgtgtgtctcgccttccctcttaccccccaccttcccctctgcgtcctcggcttttttttttttaatattaatttccaaagaggatccgcgccgttgggagagcgcagtgccccagcccgcccgcctcggccacctctcgcccctctctttcttaaaattctgaggtctccggctcccctgccgcggcccgcgcgcctgccgcgtctgctgcctgcccgccccgctggccagcttgagccatggctctgttactgttacagactctgtggccgcggttcggtagccgccgccgccgccgccgcagcggcccgccctcacgcccgccaggcgcagcgcgcatgcgcgaggcccgcccccgccccctaggtcgcggcgcgccaggcccttggcgtcccggtacaaatgaaggagggggcccagcgccttccctgcggcgctggatggccagggagctgcgggcacgtgcgaaagattggcgcagagcgcgacctggggccgccgctgcaatcccaggagactcgcgcctggctcgctcgcctcccttgcttgagtgggctctgtcctcccagcccggggacgctcgtgtcgggcttctagcggctggagtgctgtgcttggagacatcgcccctctctctccagttgctgcttcccggtgcagcttgcccggggagctggggactgtgtcatcaccccttcggctctagcccactaagctttatttcccggggggctgctgggagtgcgctttcccacccttgaattcacggcctattgggggatgggggttggggtggggtggggtgcagattgcttaaagggctgggtccgtttggcggccgttgacccggcacccttc

SEQ ID NO: 38880 - DNA, 1270 bp, Homo sapiens; identical to SEQ ID NO: 20974
  chr15:60883782-60885052
  binary

SEQ ID NO: 38881 - DNA, 803 bp, Homo sapiens
  chr15:61520369-61521172
  hyper
cgagagggaaggattcccagagcagaaataagtttcggtgcttgcttttgtagacgctccctccggatgcgcgtggagcgccccacaggaccgccgccctctgcgcgttggcgcgcacacgccccccgccagcctgggcgccgggctccgaacccccggtctgcaaacttgcgcatctcccctcgccgcgcccgccagacaacttggcgaacagctcgcccgcccgcaccccgcttccttcggcccttccttcaaatcccaaacgcaccgccgtgctccaaagaaggtgtccacgtcgcccccagaccccggagcgccccctctccacccccgggacttcccaggtcgctcactcctcccgccccccgcccagatctgagagggaccgaaaacacacccccgactcgggcagccagggccgaaactgtcaagaggagaaaaggtaaagcggaaggagggtggccataaacagatttttttgccccttcttaaaaggacactgccgctttaaaagtttctttcccgggcccccactccccgcatctccgtattttgggggagcgtatttaattgaggcaacgcagctttcctccagtgtttgcagaaaaatcaaagccaggggggtgagcccgccggctgtcaaccttcccgccgcctcccccgccccactctgctcccgcaagccgagaacgggctgcaaaagtttgcaacatttctggggggcggaggggggaggggaggggggtcctccgggctcggggcgccgccgcaggctcgcgcgcggccgccggaccccgcgcccc

SEQ ID NO: 38882 - DNA, 801 bp, Homo sapiens
  chr15:61521175-61521976
  hyper
cgcccgctcccggccgccccccgctccgcgcccgggctcccgccgccccctccccagcccctctccagcctcctacctctgctggtgctggaatagctctgtctgcgcaccggggcaggcggctcgctcttgcgggcggattcctggttcagcggggtctccctggagccggcggccgcgtccgcgccgctgctgcctggctcgctggcggcggggtcgggggctgccggagctgactccatgttttttcccaatgtagagatcgctggagatggcgagctccgagactccctctatcttctgttttcagagcaactctatggtaccaaaaaaaaaaaaaaaaaaaaaaaaaaaaaaaaaaaaaaaaaaagaaggagaaggcgaccggcgaaagcaggagggaaaaagcaggcggcggcgggcgggcaagcaaaagcgcgagggagcgcgcggagtgtctgggtggacgtgtgtgtgcgcccgaaaggggacaagaggcgggtctggccacaggcagcgctagcgagagcttctccagccggcccccacacccacattccccaccctccagaccccagaccgagagccacagactggctgccaattttgggaggtggggaaaagaggggaggaggagaacagagcctcccgcgccccaatcctcccctctccccagcccagggacagaaattaaaatcggtgagatgattccgtgcctacttctgagactctctcgggaacagaactcgtccccatccgctgccagcttgggtagagacaaatccgattgtccacgtccac

SEQ ID NO: 38883 - DNA, 221 bp, Homo sapiens; identical to SEQ ID NO: 27652
  chr15:72412074-72412295
  hypo

SEQ ID NO: 38884 - DNA, 1095 bp, Homo sapiens
  chr15:74725128-74726223
  binary
cgaatcggactgggggcggggaggcatttgtgtgcaatgcaggggaggggagatcagttcctcgcggcagaaagcctcaaacccccgcctaaccggctttctgtcccatagtacagggtctaaactgaggtgccctgggggagactccagtcccccaggttcttattatctaccctggcctaaaggctgcacccccgccctagatccaccgcctgggggtcccaacggccgtgccccacccaacgggcactgccccccaacgctggagccgatttctggtgacaactgccacgtgcgggcaaggggggagcggccggtcccggcattgctgaggcagcgccctggtaccccaagccgccgcaccgcaccatgtcccgccgctcgctgcaggatgcccacccccttgcctggcccgagctccgggccggggcgggggcgggggcaggcggcggggtctttgttcccgctgccgaagcgcggcggcggcggcaaggggtccgcgccccccttgccggcccagcctgcgccccgcgcgccagcagagcccgcagctcaaaaggagggtacccgggttggggtcccaggcggggaaaggtcctccgccgaagcccccgagccagaggacccagagtggctcggggccgagagaggggcccgccccctcccctggcgcccgggcgttgcggctcctggctgccagggacttggtgcgacttagccggggctccggcccccgccgctcgctcgccgcagcgttacagccggctctggtgtgccagcgtgtacactcacacacactcacccaaacccacacgctccacgcggggacagcgcggggacagcccgggacccgcagagctgcgcgcacgcactccctccgggtgcagcacactccgcacccgccccgcgcagcgtctgatcccgcgcctgaccggccgcgcggcgccgcctacctttccagacggcgaagatgcggggtccgctccttaggtggccctgggcggaggcggcggccgcccagagcagcagcagcagccgcagccgcagcggaagccccaaccgagccggcgggccagggacgcgggcgcgcggtgc

SEQ ID NO: 38885 - DNA, 1470 bp, Homo sapiens; identical to SEQ ID NO: 28601
  chr15:79382738-79384208
  binary

SEQ ID NO: 38886 - DNA, 1083 bp, Homo sapiens; identical to SEQ ID NO: 34362
  chr15:83315990-83317073
  binary

SEQ ID NO: 38887 - DNA, 864 bp, Homo sapiens
  chr15:83348863-83349727
  hyper
cgcctccagtgcccgcagaagcggccctcggacagcgaggacagcccgccgtcgcaggctcacccggcgcttgatggacatggtggccacgttctggagcacaacgtactgcacctcactgcggagaggacgggtcagagcaccccgggcccctcggttggggcaagggtcagcggatgaggggaaaaggtggggcaagtcgttgcggggagaggaccagtgcggagggcaggactacggtcagtgtggagcgggtgggcagaggtggaagcggctggtgggcgtgagggggcggagccgggcagcccgtggggcggggcaggaggcgagggagggggcggggctgggggcggagcgcacctgtggctgcgcagcaggcgcaccagcgccttggcgatgacgcccacttccgccttgggcgccaggtggaagtagagctgcgccaccgccatcaccaccgcggcgctgcggctctgcagcaggggtttggtgttgcgcagcagcagccggtggtcggggtccatgacatagggctttcgggagggggcggccgcggcggccgtctcctcagaccccgcgcccttggcctcgtcctcctctgagccgtagaaggctttttccgcgttctcctctagtagggattcctggacggggagaccgacgggtctgtgggcgcctccccgggacacacttcggcccgctctgcctgggctgggcccacttacgttctgggtggggctcaggaactgcgtgcgggcgtagcgggtgagcatgctgatgatgaccacctggccccactcctccacgtcgatcagcaggttacagagtttccggtagtttttgtgaatcaggtcgatgcgctcc

SEQ ID NO: 38888 - DNA, 800 bp, Homo sapiens
  chr15:83377928-83378728
  binary
cgccttcctgaagaggccccaggctcaagctcaagttcgctgactcagacccctcccccacatttttgggaagccaacccgcctagcacgaaaaaggaagggaacccctaacgcaacgccgcaaaccggagaaacacctggaaccggagggtttctcctctcgaaactgagctggcccatcccccgccagcccctatctgcccccctccgcgtcctaggccggcccctggagccggggtgccagcgctgcccgcgctgggccggggctccaggccgcaggagggggccgggcgggcttccggtcggcgcggccggggcggggccggcgctggggccgggcgctgtccatggtgcccgcgcgcctcgcccggtccccggccccaaccctcccgcgagcttcctggcgggctccctcaccgcttgtagtcggaggagaagatgccgccgctcgcggggtcgtggccgtactcgggctccccggggccagcggagccgcccttgtcttcgctgtaggcgggggcggccgacatggggcggccagggagacttcgccgaggaggaggttgcggggccggaggccggctggagcggaggaagggaaggcgggccggtccggtccgggctggcgaaggcggcggcgcggcaggggttcagcagaggctgcagtgtgcagcggcggaggctgcgcgcggatttctcaatcagggccgcgcgctgaggtcttaaaggcaccggcgccagccgagcggagggcgtgtccgcgaggaggcgacaggggcggtgcgtcagggcctggcccc

SEQ ID NO: 38889 - DNA, 826 bp, Homo sapiens
  chr15:83620900-83621726
  hyper
cgtggagaacgacaaactgcttagactcacacaggccctggagttgactgcgcccaggggcgaagagaccgcggaatggccgaggcaggaggccggccagggcaccggtccccgtcaggtgcccccgtgcccgggctgtatgggaggggaagggccacgggctccgcgcccaggccagggtgcccctgctgggtgtccgcgtgccccggcggagggcgcgggtcaggtggccccagactcccgggcgcagagtgtgcgctcgctccggcttggggaggcgggggccggcccgccgggaggctccgagcccggttacgccagccgcggccccgcagtccctccggaggggcgcgcggagagcgcgcggcgcgggctcactcaccccatctccggcgctgctccggcggccgctccgacggggcctctcgcgctcgctctccgcccgctcggcagccgctccccgcgcggcacatgcggcggcccgtgcgcgcccggctcagccccggcgccgctccattccgcggggctgcgcggctgccactgctgccactgccgccaccgccgccaggcgcgggcgggcgggggctgggcggccgcgctggggcggtgcccgccccgccctccccagccgctacccccgcccggctccttacgtaacctcgtggcccccgggccgcggcagcgagccaagaggcggggggcgcagcactgtgtgcaccgtcccccgcgcagccgcgcagtcgccgcttttctcccgggccacccagtcctcggtgccggccccgcgttggcgcgcccccgccccacgccgacccggggccctggc

SEQ ID NO: 38890 - DNA, 1105 bp, Homo sapiens; identical to SEQ ID NO: 27657
  chr15:83775836-83776941
  binary

SEQ ID NO: 38891 - DNA, 1688 bp, Homo sapiens
  chr15:83875521-83877209
  hyper
cggggcaccgggaatcgcgctcagggaaaactcaacaagtctagaaggcaaagagatggatgaatgactgccaagaggctcccgctggcctctggatgaccactaccactttccaggatttactgcccgccggcactcgccggctcgcggacagccgctcaccccgctgccgtacctgccccgacgttcgcccgggacccagggtatccaccaatgaccctgcccggagccgaagcctccgtcgcaggcccgctgcccggcggcgtggcttcccggtcggcaccggctttccaggaggaaggcagcgtcgggcctgcgggggccggacccgccttcgaaagtgggcggaaggatggccgccctggcggagtgcgggcgaggccgggagcccttgcctcagccccggcccggtcttcttcgtgccgcgccgccctcagccctcaccacagccggccgcgagctgcgggctcggggctgaggcgatggggaaagggggcgggcgcgccatcatgaaggggaaaatggtgggcgggcgggcccgcgcgcggccgcggtactcacccgggccggccagtgcgggtagcccttcatcttggcgaagaccaggtcgcccgctttgtactcgcggggccgcggacgcgccatcccagccgctccccttcctggtagtccttggtcgccgcgaagatgccgggaggccgcccccccgcgggccgacgaattgcgccgcgctccccgcgggcctcaagccgggcggacgagcggccgctccgacgaggggaagcggcgaggcggcggctgaggcaaggggtgggcggggggcgcagcaggcccggcaaatcacggcccggcagcgggggaggggagcccccggccgttcggcgctcgcccgcgtccggccgcgccaaggtccccgccgccgccgccgccgccgccgcgcgcgctgctcaccagcgccgcgtcgcctgcctcatgccgccgctgccggtctccctcccgggctcccgggcgcggcgcgagcgccgggcctcgcgtctgctccgaattccttctcgggcagcgaccgcaaacacgatcttattattgttctcgcgcgcgctcagcatcccccccccgccccgcttcccgcttcccgctcccctccccttccctcccgcgcgggccggttaattcctaggtacacggccggctttcgcggagaaaccgagcgcgccagcccggcttctcggctggcgggcgggcggtgggcgcgtcctcccccagcaccgaagcccgcgccgggcgggcgggagtgcctactccggaggacgcccgccgcctgctctcttttgttcttggcccggagctgcctgccgcagcccagccaatcaccacccggccgcccccttcccctcccgtccgtgccactctgggggttctccccactcgcgccccccgctcccacgcccacctcccgctgactcgaccctctcctggctacccccagccagccacttccgcggctgctctctggtgagtgggggacaaaggcgctccaggcctgggggacggcggcgcgaggggaccctctgctgggcaccaagctgccggaaagagcaccgctccggagtcagcgaccttattggattcttgccccaggtctgcccttaacaatgcagtgtgacccacctagggcgagctatttaatc

SEQ ID NO: 38892 - DNA, 1889 bp, Homo sapiens; identical to SEQ ID NO: 27658
  chr15:83951722-83953611
  binary

SEQ ID NO: 38893 - DNA, 1494 bp, Homo sapiens; identical to SEQ ID NO: 27659
  chr15:88798893-88800387
  binary

SEQ ID NO: 38894 - DNA, 878 bp, Homo sapiens; identical to SEQ ID NO: 26403
  chr15:89942592-89943470
  hyper

SEQ ID NO: 38895 - DNA, 918 bp, Homo sapiens; identical to SEQ ID NO: 29901
  chr15:93631396-93632314
  hyper

SEQ ID NO: 38896 - DNA, 873 bp, Homo sapiens; identical to SEQ ID NO: 34370
  chr15:96960242-96961115
  hyper

SEQ ID NO: 38897 - DNA, 922 bp, Homo sapiens; identical to SEQ ID NO: 27666
  chr16:19566591-19567513
  hyper

SEQ ID NO: 38898 - DNA, 1768 bp, Homo sapiens; identical to SEQ ID NO: 22807
  chr16:23846783-23848551
  binary

SEQ ID NO: 38899 - DNA, 400 bp, Homo sapiens; identical to SEQ ID NO: 20996
  chr16:25078047-25078447
  hyper

SEQ ID NO: 38900 - DNA, 750 bp, Homo sapiens; identical to SEQ ID NO: 35503
  chr16:25704061-25704811
  binary

SEQ ID NO: 38901 - DNA, 912 bp, Homo sapiens
  chr16:28074461-28075373
  binary
cggtcgtcgccggtctcccagctgtagagcgcgccgccaggggggccgttccccgaggcggtggcggcggcggcggcggcggcgggggcggcggtgccgttggccgtggcgttggcgcccgagttggggcagttggcgcgcccgccctggccgcagcccggcttggggacccgctgcgtgccctggcaccagtgcgtggtgaggaaagcggtggtggcgaacagcagcgccagcaggttcagggccacggccaggagcgctcggccgcggcggctagtcttcatgccgcccgcgccgccgggacgggactgcaccgccggggagctccgcgcgcgaagttggcagctggcgccccgcgtcagcggccgctgcccgccgcgccccggggctcgggtgcctgagatcggcggcggcggacgcggcgcgggcccatgccccccccaaccccggggtgggggcgcggcgcggggggcgtgcggggcgggctggcggggcgggcggcggtggaggagcggctacggcgcgcccggagcccggagcgcgagtgcacctcggctaggagccgctggcgcctggcagcggccacggcgcagggacgcgcgcccctccgtggggagacacctgcaggcggccggcgacactgttccggagcccgcccgcacggggagagggggccgccacgccgggcgcgggcgggggcctgggagtggagggacgcccccgaaagaaatccgagccagggtgagggtctgagacgcaaggagaatcccaggcaaggcgctcctgagaaaagatccccacggcggacgtggggcaacaaaacccgccgggagcgggcatctcatgagacccagagaggccctgccccaggagacaagggcagagcctgctggggctccccaagagggacac

SEQ ID NO: 38902 - DNA, 214 bp, Homo sapiens; identical to SEQ ID NO: 24004
  chr16:30826349-30826563
  hypo

SEQ ID NO: 38903 - DNA, 875 bp, Homo sapiens; identical to SEQ ID NO: 29927
  chr16:3238154-3239029
  hyper

SEQ ID NO: 38904 - DNA, 1995 bp, Homo sapiens
  chr16:49315005-49317000
  binary
cgtccccgcgcctccgcagagcccttggagaggaccgggcatcggtcttccatccatccctccttcaccagcccaatctgcacgccgcgggaggaaggaacactcacctggtcgaagtagatgatcatggtgcgattactcatctcggacggctcgtggttggtgctcctgatggcagagaaagccaccttggcgctgccagagcgcacagagatgcccagggcagtgcccgtggggtcggacgtggggttggagtcgcacaccaccaggcacttgccctccagcacgatgggctccgtctcattctgcccgcgggccgggcccgccagccacgcagcccccagcagcagcagctccaggacgcccagcatcgcgccgccggcgcccaccccgccccccacccccagggctgctcgcgccagccgccccccccgtcccagtcccgctccgaagccccctcctcagctccgtgcgcagctccgccgccgccgctctggacactacacctcttcctcgcactccgggactagcgtcccctccgcgactagcgtcccctccgcgctgtgttcccggagcccctcccgggcctcaggggtgccgcggctgcccagccgcacttggatgcatagccgctgctgctcggtcccgctgctgccgccgcctcctgcccgcacccgccgctgccgccgccgccgccgctctgaattattgatgcagccggcgctgcagccggagcgggcggagagcgcgcgccgggcacaaaggcgcggacctcggcctggccccgcccccgccgcctcccggcccgcctccctccgaggccctgcccccgccccggccgaggccacgccccccagccaatcctgacgcgccgcgctccccaccgagccaatggcggcgctgtccgcgctcggccacctgaccccgggcgccgttgttattaggcgcggcgaggcgggtggcgcgcggcagcagggttgggctctcgccgtgagtcgacgaagggagcgcgggcgcgcgcccgcgtccgcgcactgagagtcgcctcggccgctcgctttctcgactcccgcctcgcgcctcgatcctgttccgcctccctcggccctcctgcccgcccccactcgtcggccctcaggtaggaggcggcgcgccccggggtcgggagtggaatcgctggaggctgcgagtcgcctgcccgcctgtgggcgcgcccgttgggaggggagcgccccccagcgggcgcgggcgcgagggcagccggcgcgctgggcgagcctggctcagggtcccggcggccggggtgcagggcgcgtgcgcgcgcggcggggcggggcctgcgcggctctggcgggcgcacgtggtgcccgggagctgctgggcgggcactcaccgcggggactcggtgcggagccggggcgccgagtgtctccgtgtccctctgccccagccggcggccgcgatggtggagcttggcctctcgctctctcccgcctctccagcgactgctctgccggccgcggaggtcggatcgagcggtcattcattcatttgttaattcgttcacttattcaggggagatcattgaacccctacggagtaccgggtactgggccgggcgctgaggacgcggggctgagcaaaagcagccgaggcccaccttcgtgccccttaaaacccagcgtgcggggcggcaacgagtactgcttttctgttttgcacttaaaatttacattttgcatccgtactttttatttactgtgcacccttacggcatgctttacgcacccgtacctgcacctcctagccttgagtgtagacaccagatcctgagatgggcgatttttcgagaataatttttaccctaagtggattttcgtgccacgcatggacttggaactacacacacgtagtccaaaacgtgaaagtcaaaatgcagctttgccaagtggcagggagaaaggagagctgagaagatgaggagaggaagggcgc

SEQ ID NO: 38905 - DNA, 1499 bp, Homo sapiens
  chr16:51185587-51187086
  binary
cgggcccggcgccccggcaggcgccccccgctctctccctctcccctccctcttccctccctccttcgcccccccccacaatcccgggctgggccgacccaaattagcatgccctccccggaattgagccgccccgggtggggggtggggccgggcggcgagggctggggacccgggctgccggcgcgctgcgaacttcccaactcgggggcgaggcgcgccggcccgcggggggagggagtcccgcggcgggatcaggggggagggcgtcccgtttcgtgagtgtttcttcgtttctttaagagctaccagaaagcagcccacccccacccccattaaaaaaaaaaataagcgagtggggaagagccagccccacgccggtccgcctcccgcccacggctcggcctccctcccgcctggctcggcgctcctccgccccgagttctccatcccctggatcccgggctcgcgggggcgcggagaagaggatccaggaaaggtttgggaacctgatgggtttgtggctggggggaggggcagttctcccgccaccccatcccctccccgccaggggcactgatcctccagcttcttgcttgctccctcgctccctttctctacctcggacattcccaggacaattagggctgaagttttcgggagaagcagccccgagcccgtgggataagggggcggcccggctccgcccaggacccctcccggacctcccccccggctgccccggttggctgcagggcgcgtcactccgcggggaggcggcggcagcggtggcgccgcagagccccgggcgggcggagagcggggaccggcctgggctccgagttcagctccggccggggggaggggaggggctgcggctcacactgagcgcagcagcgagcaccggcctagggagacacagcccgggcggacccggcactggactgggccagtccctgggacccctgggcaccccgccctggggagggggccgcgccccagccttccgggacgaggtggcggcgcagagccggaaagcggggtggggggagggcggtggggaggtgttctgtccgaggctgcctggcggcgccgaagctcgcctccactttttgggcacttgccgagcgcggcgcccgaacttttcgctctatcaccatctccctcaagctgagatgcaacctccctaccctcgccccagagcccagagccaggagcccgatccctctgccgggctcaggcgcccgcgaacctgagactcggtacgcggctcagcctagctctttcccctcgcgcctcggggtctcctcgctccaaggttctcgaagtcttgcgcccgaaggactaaactaaactaaacttcggctgagtaatgggggaggaggggggtgcagatacacaatccctgccctatctcacgatcaggaaaggagagggctcataaggacgccccaattcgcgagcgcccttgagtctggccggtgccacggtcggttcgc

SEQ ID NO: 38906 - DNA, 1484 bp, Homo sapiens
  chr16:56224379-56225863
  binary
cgtttcgaagggggaggacaggagaatttagtgcaaagacggcctccaccaaacgaaaccgtccaacatttgcaaaagcttttaaaataaactgctcagggatcaggggtttgctggaaactcccggtcgcttgaagccctgtccctccactccgggcaccctggcctccccagggtgggcacccctcctgcacggagagcggcggctgggatctcggagcagggtcggctatggccctggaggcagcggctcacagagaaaaagctctggcttttctccgcccgctgcgttcctcttcttacagcctcgggtgtcacatattaggtgctcaataaatgtggacataggaaacgaaaagtccgaatctgtccttacgcccccaaggcgaattctggggcgcgcgggtttattccgacccactaccacatcgcgtttcctgaggtaacccggcctcggctctgcggccccagcggctggagagccacggagaaggcgggctacgggcgacaagatggagagccggcccgagagggacagaggccgcgctggcagcgagctggggggcccacctgaccgtcctgcgggcagcccggccccgcgctcccattgacaaggaggtccgcgccgccggcgcgtggggcgggggcggaggcggggtggggcgccccggcgcgcgcccggccccactccccgcccccgccagtcccgcaagcacccaccccgggggagccgcgggccgggagggcgctggggggaggggcaggccgctccgcgagcgcgtgtgcgcgccgccgccggctgacgcgaactccggcgcgcgcctcccccgccccgcgccctccccgtcccgggggcccggcgcgcggccctgctgacgtcagctggcggcccgcggagccgggtgcgcagagccgctggcgcactcgcgcgctgcgctggcctcctccccgccccgggcccaggcgcgcgcgcgcttgttcgctctcccattttttttttcccctccctccctgcctctctctctctccctctccctcgagctcccggctggctgcggctccctggcgctctccctctctctccggtaggctcaccgagcgatgcgagctctgggagacagcgacgccgcctcccgctagagacctgcccctcggcccggccccctgcccaaccctgcccagcgcgcgggggtcggcgaaggcgccgcggacgcaccgacggctgaagagcggcgatgcacatgcactagcagcaccccctaactcactccctccacatcccgcgccgccgccgccgcctcctccacctcctcctccgccgccgccgcctcctcctcctccggcagccgcggcagcaggacccaccctgccccccaccccaccctctgtcggctccggctgcggctccagcctcgactattattttatttattttgggtcgtgcacaagcctcagtgcctgcagtccgcgcctcctcggcccgc

SEQ ID NO: 38907 - DNA, 1525 bp, Homo sapiens; identical to SEQ ID NO: 27683
  chr16:58497229-58498754
  binary

SEQ ID NO: 38908 - DNA, 314 bp, Homo sapiens; identical to SEQ ID NO: 23500
  chr16:67313759-67314073
  hypo

SEQ ID NO: 38909 - DNA, 231 bp, Homo sapiens; identical to SEQ ID NO: 27687
  chr16:71715666-71715897
  hypo

SEQ ID NO: 38910 - DNA, 1204 bp, Homo sapiens; identical to SEQ ID NO: 23502
  chr16:734744-735948
  hypo

SEQ ID NO: 38911 - DNA, 1038 bp, Homo sapiens; identical to SEQ ID NO: 34413
  chr16:77245974-77247012
  binary

SEQ ID NO: 38912 - DNA, 729 bp, Homo sapiens; identical to SEQ ID NO: 19330
  chr16:77756212-77756941
  hyper

SEQ ID NO: 38913 - DNA, 862 bp, Homo sapiens; identical to SEQ ID NO: 24023
  chr16:77822069-77822931
  binary

SEQ ID NO: 38914 - DNA, 583 bp, Homo sapiens; identical to SEQ ID NO: 26452
  chr16:80574541-80575124
  hyper

SEQ ID NO: 38915 - DNA, 1631 bp, Homo sapiens
  chr16:80837324-80838955
  binary
cgcagcgccccctttcgcccccagggagcacgacacccgcaagggccacccccacgcccgagcccggagggcgtccgagctggtgcgggggcagcaggtggggggtgagggaggtggcccggggaccccggggagcggtttggcggttgtccccccgaacccccacccagcctcccccttcgcagccccccgggaccccgcctcgccccggccaggctccgctccgatcgcccgcccccctcctcccccgcgcccccggcccagccgggccgcgcaacccccgccccacacccccgccggccgcggcgcgcccccccgcattcccagcacgtccggcgccgacttttacctgtactttctgtactcgaggcggctcgtcgggcgagaaacacctccccgggaccgctacctcccccgccccggctccgcccggcttcctccttcccctccaaggccgcaaagtagatggagtaagagagtgtgtgtgcgagagaaagagaaagagggagcgggcgcgggcgccgcgggaggcggcgggcggcgggcggcgggcgggaggcgcgcccggcccccgccaccctccggccgccgccgccgccgccgcgggctcggcaactccggattgcgcccggccccggccccggcccggtccccgccgcccgccgccgccgcccgccgccgcccgctgactggggccggcccgcgcccccgcgtccccgtacctcgtaaaggtccccagaagccatgccaggctgcggaacttggctcgccggtgtgcgcgtctgctcgctcgcgccctccgtgcgtgtgcgcgcggggtccggtgtgcgcgtgtgtgtgcgcgcgtgtgtgtgcgagtgtgtgtggtgtgttgagtaaactgtgtttttgcagaatgacaggcttgggggctgcctatgcgcagaatcagagcgggcggcggcggggctggcgtaaccggcagcagcggcggcggcggcggcggcggcacgagcgcgggcagcagcgacggccgcgcagcgcgcccgggaggcacggacgcggcccgagcgccgcggcccccgcgacccggcgacccggcggcggtggctgcagccggcaacggctcgccccggcgccgcctgcaggaagccgcccggcgcccgccgccggcccggacgctgctgccactgggcgagtccccgccccccgggagcccggcccggcccccggggcggggaggcgggggctgctgcccggccgcgccccgggggaccggtcccagagtcgactagcgctcgggcccgccccgccaccccgggccggcttcgggagcagctggcggggcccccggggggcggcgggccaggtgcccgccgggtgcgcccgatctggggccgcgaaggggcggccggggagccaggtagagggctgcggctgcagacctcagggaaggggccccagccgagccccgccggcccggggtccccacctacctcctccaccctcgaggggagtggacgccgcctgggagacctggcccctcggggctgcgcggcccctccctccaggctgggttgtaagatgtggaggccacagggaggaaggatgaaatggcccatccagaggcaccatggggatccaggacaggc

SEQ ID NO: 38916 - DNA, 883 bp, Homo sapiens
  chr16:86543378-86544261
  binary
cgcgtcggggaaggccccggcccagggagcgtttcccgccgcgccgcccgggcggggaaggcggggtccagcgcgcaccggggctgaaccgcgggcggagggcgcattaacacttgctcgccaggttggtggaggcggggcggattctgctggcggccgcggggcggcgagagtgggggctctttaagcgcccaccaacgcgggggcccgaggggggcagggacggagggagggaactccgggagggtcttaggccgacccgcgagacgcagccgagcggagatggagtgaaggctgcctcgcccggaatctcggagccgagcgccgcgggcggcggggactcagggctgctcccggctggggcgcacggccgtaagacctggaggtggtgcctccccccaaaaaataccggcgggggtagcttcctcacggccttcgcccgggctgccctcggcctcagctcggctcctttccttgtgggagggcgagaaagaaagagggaggagagaggtgggggaggcgggagttggagagagaggggctctgagccaaccgccggcggatccagcagctcctcggggagggcgggcgggagcgcgggggcgggcgcgccgcggctcgctcgggagaagtggccgccgatgacggcagaggtgcagccagccccgcgcgcgcagccccctccccttcgccctcctcccccccgtcgtcctcttcctcctcctcctcctcctcctcccggcccgtccgcggcgcagagcagcggcggcagcggcggcggcggcagcagccacccgatgtcttcggcgcccgagaagcagcagccaccgcacggcggcggcggcggcggcggcgggggaggcggcgcggccatggaccccgc

SEQ ID NO: 38917 - DNA, 198 bp, Homo sapiens
  chr16:87594891-87595089
  hypo
cgccttcatctttcgtcaacatctgtccaaatagtacctttaaaaatcattgccaaagcgtttgctcctaaggattggaaacgaccatcggcaggggacgggttaaaccgattaaggtgactgacaccgcgcagtgatgcgcagccagtgtaacggccctgtggaggacatctaggtgcatcgtctggtagaaggtac

SEQ ID NO: 38918 - DNA, 1765 bp, Homo sapiens; identical to SEQ ID NO: 29941
  chr16:89006834-89008599
  binary

SEQ ID NO: 38919 - DNA, 426 bp, Homo sapiens; identical to SEQ ID NO: 25208
  chr16:89883921-89884347
  hypo

SEQ ID NO: 38920 - DNA, 1365 bp, Homo sapiens; identical to SEQ ID NO: 25209
  chr16:89899939-89901304
  hypo

SEQ ID NO: 38921 - DNA, 132 bp, Homo sapiens; identical to SEQ ID NO: 34439
  chr16:9062089-9062221
  hypo

SEQ ID NO: 38922 - DNA, 1251 bp, Homo sapiens
  chr17:14203859-14205110
  binary
cgaatgagtccccggcgtgggttggggggggggttccagtgcctagtgcatctcctaccctgctctccctcctccaaccgcctccctactctgcaacacgtaagcatcacgaaacctcctgcgaaacatctggatggggactggtgtcccaacatctgggcaactaccgccaaggctggcttctagggaacgagtgcggaaatgcgtgcgggtgtgggagcgcaccactcagtagggtaggacctctcccagcgctaggtcactgcagcattcttcccaccatctgctcctgtcaccagcccctaactccgcccctttgggcccgccccttgttccgaagccaatagcaacccctgaccgccctacaccgcccagaagcctttccacaccccctcgtcctgggagcgggttggctgctgagctctcggagaagcgcctgtatttgcatggcgttcggggtttttggtaggtagagcagcccgtcactctggaaggccgggaccgcccactccacctcggtccacagctctcttcctgcgcagttcgcctctgcagcctctgcggggaagtgccggggctgctcgaggctcagttcttaggactgcaaggaggcagccccggcgtgcggcggtgcgcacagtctagagtggccagggcgcgagagtgcaacgtcctcctggccccgagcgcgtcgtcgcgccccgggagcagaccctcgcccagcagttaccgccgtcccgactttccgttccagttgcagctcctgccgggcaacatgtcaagagccgccgccgctacagctgccgccgccacctggggaagagcagcagcagcagcggcggccgcgggcacacgggggcaataaaccgagccacccgggcgtccagcgtgccggggaaccctctctgcgctcactgcccggcgggacccacgccatgtgctgagccatgtccctggccgcgcccgcgggcagcgcatggggcagcgcctgagtggcggcagatcttgcctcgatgtccccggccggctcctaccgcagccgccgccgcccccgccgccggtgaggaggaagctcgcgctgctcttcgccatgctctgcgtctggctctatatgttcctgtactcgtgcgccggctcctgcgccgccgcgccggggctgctgctcctgggctctgggtcccgcgccgcacacgacccgccagccctggccacagctccggacgggacgccccccaggctgccgttccgggc

SEQ ID NO: 38923 - DNA, 101 bp, Homo sapiens; identical to SEQ ID NO: 25215
  chr17:2207862-2207963
  hypo

SEQ ID NO: 38924 - DNA, 411 bp, Homo sapiens; identical to SEQ ID NO: 29953
  chr17:29718115-29718526
  binary

SEQ ID NO: 38925 - DNA, 544 bp, Homo sapiens; identical to SEQ ID NO: 29954
  chr17:29718746-29719290
  binary

SEQ ID NO: 38926 - DNA, 2127 bp, Homo sapiens
  chr17:31618306-31620433
  binary
cgtggagtggtaacactgcaagaggcctggggacagccccgagggggcggaacaccaggcctcctgactgccggggagtggggcgcagagggagcgggttcgcgcggagggcaactcacggaggagaagttgtgcggcccgcagagctcgccgcggtacttgcaggagagcagcatgtcctccagctggtggcccaggcggtccatgaaggcggcgctgattccctcgaagtggcgcggaggcaggaagaggcggaagtccgccagcttgcggaaccactggcggcgcggctcgtcgccccgcagcagctcgctgacaagcgggcgcgcggtgcggttgggcagcagcagcccgagccagtggccggcatagtagaggtcccccttggagaggcgcgggaagcgcagcgggttgttgttgcacacagtgacggcggggaagggtaactggcggctccactcgcggtgcacccgcgtgtgtgacgggaagctgagccagtagagcaagcggttcgaggaccaggacagcagcaagccgaaggatgtacagaaggccagcacccacagcgcccgccgctggaaggagcccccagccgccgtgcgcccggcacacatgtgccgcagcccgtgcagtttagcgcggctcagcgatggccgccccctgcgggcgacccctggcccctgcagcgcccgctcgccgcctctgccgcccccgggctgcccggcagccgccaacgccgcgggcgccggctcctcgcgggccatgcggaagcgtcccgggccggtgagcgcggctgcgggcagcccggctccgccaatccggctcattcattcagcccgcggctggcggcagcggcggcggccccggccgggcggagccgccatgggagtccgcagcagcagtggaagcagcagcagcggcagccgcgcgcagcccgcgccagggaagcgtgcgcccgaaaggagctccggtggcgcggcatgcccgcccggcgccgccgctgccgcctccgcgggcgcccgcccggggctgagcgccgcctcagcccgcagcccctggcagtggcctctcccgagcgcctcccaggctttcccggcccctggtcttcctggaggatgcccggcgcccggcactacttctggaggggtcccactgggagccgcctctccagtccctgggtgctgcgcccgccttccctcgtcctggacctcgggggaccctgagccgagtcccccctgccccgcctaaccccagcttttacgctggtcctgggagaagggccactcggccaccatgcctgatctggacatccccagggaccccaccagcccggcccgtagcccagcggtgctgggacacgggagagaaggcgccaaggaacgagcgcccccagaggcgcaccgcggctcctggctgggcgggcggggtgggtgtgtacgggggtgagtggtcgccttgccggctgccgccttctttcccttcccctccaggacccttccttgttactgctccctgggctgcgctcggcagagacctgcttaggcttccccaagtcctgcgcctaagtcctgccaggcgcccgctctcgcctggggctgagagcttctcagggcgtcctgcgggaggctgttcgccgccggggtccttcaaggatgctagccgcagggaagtgtcgcttctcgcctcggctctcccaggtgcctcgcgtctccagaaaagcccagccttgctgtctctcgcgtcttctctctgcccccgcggcgacaagagctggggactgcggggacccgccaacacctcccgggggtgacccggactcgctgctccgcgcgcccttctcctctcgagactccgagctcgcggtggccgtgacgccggctaagctccttccccggttgcccgggagaaccctctttgggccccaggcgaacttgggcagcggccgcgcgacgctggcgcggctgggctccgagcacctgctcctcagctcgctggccccgcggctccgggcgggcggggcggcggcggccgtgagcgccgtgcgctcctggagacgcggtgctgacgcgcccggctcctcctcgctgcattttaattcctggccactgtggccgctgcacaccgagc

SEQ ID NO: 38927 - DNA, 1336 bp, Homo sapiens
  chr17:42906810-42908146
  binary
cgagttaatcaggaggcgatgagcccagtccttccgccccgctttcccgcttccagccctcgaacgaaccctcctctaacccccgggaggcaggagttccagcggggagatgcgggaagcctcagacgagcccgcacgccgccggagacgcagggatcgaggtcggggagacaaagagcagcccgcgaagagcccgggcggcgaggggcggcccggctccgccctgcgcccctaaccgcccgggtagttgtcggcaccgccggggcgccgccgagtgcgcgccgcttctgtccgggctccccgaccgtcgcccgacacctccgcggcccaggacacccccgagccgtttccctcccgatttgggagccgcgcgcctggggacaaagagggagggtgcgccggggacagtggcaggacgcgggccggcgacgcccctccggactcggcgggaacccctcggcggcgcccccctccttctcccgctctggccgcgctcctccccggacctccggaggttctcctcggcccctccccgggctccccaagagttctcccgcctccccctgggaccccgcccctggcccgcttctcctcagccggccctgcggccgcccctcacccggcggcgggttcccccggagccgcctcctccgccgggcctcggcccgtcccgccggtcgcggcctcatgtgccccgcgtcgccatcgccttcaccctcgcctctcctccacctcctccgccgctgccgccttcgcctcagtctccagccgaggcagaagccgctcccgccgctgccgccgccgccgccgcctcccgctcccgccgccgcgacccgcgggaaggcgcctgcgcactgcgcgctgcggtgggggcgggggcgtcccgccgcggcccgggagcggggggcgcgcggcacgtggcgctcgagtgggaggggggcgccccagaacgcgcgggaagcgacgcgagcgccaactttccgcggtcgagtcctcgccgctctctcggatagtccgggacgcggcggaggcgcggcgcgcgtgggagtcacccgcgtggagtctggaccccgggtgggcgcagacttcgctccggacagttcattcttccaagctgattttcgggcgagagtcccccgccagccgcgcctcagtttgagcgggccgctaacggcgccgtgggttctcgccttacctgggtatcctgggttggtttagcgggcccagagttgtcttctgcgcgctccgccgaggccttggtccattgtagcacgggatgctaatgtctcctcccaggttctgctctacaattcctcgaggatctggcgggccctgc

SEQ ID NO: 38928 - DNA, 522 bp, Homo sapiens; identical to SEQ ID NO: 27715
  chr17:43047449-43047971
  hyper

SEQ ID NO: 38929 - DNA, 814 bp, Homo sapiens; identical to SEQ ID NO: 26483
  chr17:45330951-45331765
  hyper

SEQ ID NO: 38930 - DNA, 1077 bp, Homo sapiens; identical to SEQ ID NO: 26484
  chr17:45810409-45811486
  binary

SEQ ID NO: 38931 - DNA, 784 bp, Homo sapiens; identical to SEQ ID NO: 25243
  chr17:46654966-46655750
  hyper

SEQ ID NO: 38932 - DNA, 555 bp, Homo sapiens; identical to SEQ ID NO: 24068
  chr17:46710955-46711510
  hyper

SEQ ID NO: 38933 - DNA, 1190 bp, Homo sapiens; identical to SEQ ID NO: 24069
  chr17:46795376-46796566
  hyper

SEQ ID NO: 38934 - DNA, 951 bp, Homo sapiens; identical to SEQ ID NO: 24070
  chr17:46802321-46803272
  hyper

SEQ ID NO: 38935 - DNA, 2329 bp, Homo sapiens
  chr17:47572986-47575315
  binary
cgggaccacgaaggagggtctagggttcccggagcgcagaggcgactctccagggtggagatgagggcaagaccggagcacggatgccggtcctcaggtaccgcagggggcggtgggggagctgggaggggtctttcaagagggggcatggggctctccgatgcccaggttcttcggaagaggacactcgaatgccgggatcccgaagggactttcccctcagcatctcggtctctggagagtcgtgggacagaaccaaggcgagagaaggagggggaactggacggggactagagatgagaggggcgagctgggctggggcggggagcccgggacgacgggatggaacaatggaggaggtcggagggactggaggcagaggggacccggcaaggacaatggggaccggccagacaatgggggggaggggcgtcggagggagaggttggggagcgggagagaggttgagaagtgggttagggagggcagaagaggggcgacggcgagggcggcagagagatggaagcagaaggaaaggagacagagcggggcgcggaccctgaagtggtcggggtcccgcctgcccgctgagggacagtgagacgagaagagagagcagaggcttggacatttccagcgcctgtccccgcgctcctgctcgcggcctctcccagtcccggaattggggctgcggatctaaggctgggaggggagtgcccacttcgccggggcgaacccgctcccggggttcccccacggccggcgggctcctccgacgcgcgtgttctcacggcttgaagcagcgcagcggatcgcgagggacggagcgggtgtgcccctacccgggctggcggtggctacgtctcggggtgcagagcgccggggcgcactaggcggggacccttcctggccgcgcgcagctctggctacgcaggcgggaggcggcaggcagggggcgctgcggggcgaggcaagtgcagtccgccgctgcctgcctgcgagtctggggctgcgcgccgctccccacctagctgcgcgacccgagcgccgcgcccaccgcgctccgtgggctcccgcgcctcgaagggtcgggatccggtctgagcctctcctggctctcggtgcaagccgctgggcacctaacgagacgggggcgcccggacgcctcggattctgtagcgcggtatcccgggccaccgactcggcaaaggtcggcgggtcctccgggtggtccgacgagattgtcagatgtggcctgctttatggccatgaaccgaatgccctggaaggtctggcaacggaggaggcgtcttcactctccccgccagcatctttcatcagagcactgcgccccaaattccggctttacagatacggagactgaggctctgagagtttaaacgacttggccaagatctcacagcaagttgggccagagtcgtggctagactccccgacctgattcccagctcggtactcccccaccttttcagggggcagccgctgtcccagctcggggtcacggctgcgtttcccagcagggcggggggggttgacactgtccccagagtccgtcggcggtagagcctgcgggtgaggtgggcagagattctgtccgggtgcgggccccagcccgaaagctcagccccagttccctggagctgtcaggacctgtggctgcgtccggggatttgggagcgaccgcgggcacgtctgctgactaacgccgctggttagagacgctgctcagacgcgggtgggcgagcgtagaccaggagagcggggaggagggaccggatcccagaggggcaacgacttgggctccgggtctgggcaagagcgagggtccccgcgcgaagacccaaggaaggaggggagctgggcgtggaggacctgggcgcttgggaaggtgtaccccgacaggaacctgccgtctgcagcccctgcggctcccgcctccgcctcggcgcgcggctgctcggtctgggatggctgtgcgcggtccgagtttcttcctgggccgcggtgagagagagagggctgaaaccagagcgcgtcccggcgggtcggctggcgggccgcgccggtaatggaggcactttgtcattcagacgtctgtaaccagagccgccgggctggctaatgcgcctaatagggatggaacgagggcagcaaatgggcgtgcgtgagcggccgggctgagctgggtggatggtggatggggaggcagctccgcgggggacgggcccctaccgcactgttccagcccagtctggctcaagcgcctcgcttcttccctgggggaccgcgtggggaggcgggaataatc

SEQ ID NO: 38936 - DNA, 104 bp, Homo sapiens; identical to SEQ ID NO: 24074
  chr17:49229457-49229561
  hypo

SEQ ID NO: 38937 - DNA, 465 bp, Homo sapiens; identical to SEQ ID NO: 26496
  chr17:56326822-56327287
  binary

SEQ ID NO: 38938 - DNA, 1406 bp, Homo sapiens; identical to SEQ ID NO: 26498
  chr17:56832961-56834367
  binary

SEQ ID NO: 38939 - DNA, 144 bp, Homo sapiens; identical to SEQ ID NO: 24075
  chr17:57297033-57297177
  hypo

SEQ ID NO: 38940 - DNA, 146 bp, Homo sapiens; identical to SEQ ID NO: 9258
  chr17:57787150-57787296
  hypo

SEQ ID NO: 38941 - DNA, 738 bp, Homo sapiens; identical to SEQ ID NO: 24077
  chr17:61777761-61778499
  binary

SEQ ID NO: 38942 - DNA, 800 bp, Homo sapiens; identical to SEQ ID NO: 34480
  chr17:73613151-73613951
  hypo

SEQ ID NO: 38943 - DNA, 160 bp, Homo sapiens; identical to SEQ ID NO: 35572
  chr17:76100954-76101114
  hypo

SEQ ID NO: 38944 - DNA, 834 bp, Homo sapiens; identical to SEQ ID NO: 27741
  chr17:76992727-76993561
  hypo

SEQ ID NO: 38945 - DNA, 261 bp, Homo sapiens; identical to SEQ ID NO: 16565
  chr17:76998502-76998763
  hypo

SEQ ID NO: 38946 - DNA, 1225 bp, Homo sapiens
  chr17:8533707-8534932
  hyper
cgctcctccgggagtctctccatctccacccactgaggtcccagtgcccccagcccaggaccctgctcaaactaacctaaggtccccgcagcacaaaccctacagctcagaagcccctctgtcttccccagctcccgcttcggtcccccgttcctgtcctccagagccgcccgggacccctcagcccaggagccattcctccctccacaaactgtcccccagccctgggccgtgcactcggacccgggtagccgcacctctcaccttcagccgaagatggtggcgcgggcgcacgtccccagccgcgaccacagatccagcgcctcagtcccaaacccaccgctgcctccgccgggctcctttagcactgctgctcggggctgccccacccacccctaccctcattgggccagctccacgcccatcaccgccgcccccagacccactggttggtttgcgcgcccatctccaagggaagacgttagcaacccgaacgaagctaccttcccgagtccggctccctccacccacctggaatgacgctcattggctcccgctcccagcccaggccacagaggccccaatctcatgggctggctcttacgcccgtcataggctccgggaggtgcggccggggcagtggcgcgggattggctggctcgtgcgtagatggacagctgaggctggctgaacgcccggcgatcccgcgaggctgcgggtgcgggccccgcggcggccggcgcgctgcgctgacattggctgtgcgggccgcggggcaggtgggccgcggcaggaggctggcgctctgactgcagactcctcgtcctagcgtcaggcagccgccgcagccgcagcacattcgagcgcccggtcgccccctgtgcttgcggcagccggcatgtaccgcagcgggacggggttccaccgcggagtcgcgggccctcagcgttgcctgcaggggcggggcggagcgcggtccagagtcctgacgtcacccccggggctgcgcggggttggggccgcggcgctgcgactcacctgcagtgggggaaggaacgcgggggagggcgctgctccgcccatgcgcacagggtttggcccgggacccggctgcgctccacgctgcggccactgtcccgaccccggccccaggcggactctgccgggatcggccgagcgccaggcgcaggacacggtcctccaaggtcgcagttttggtgttagc

SEQ ID NO: 38947 - DNA, 928 bp, Homo sapiens; identical to SEQ ID NO: 21041
  chr18:13217150-13218078
  binary

SEQ ID NO: 38948 - DNA, 982 bp, Homo sapiens; identical to SEQ ID NO: 23112
  chr18:18822154-18823136
  hyper

SEQ ID NO: 38949 - DNA, 989 bp, Homo sapiens
  chr18:22929412-22930401
  binary
cgaactaaaacttctgcgctttaggaaaaaagcaagcgttccaatctgcgaggccctcccccaccccgtcccttcccaggagaagaaagaaagggctttgtgtgtgcggtgagggctccgttcatcgagttcaaaaatgcacagcggccgggggccgggaggcgtggggcgccgggccctgcccaccccttttccccgggccggcggcgagtcgggaagctggtgcgggaaccggggccacggggcgccgcggcccggcagccaggaggaagaggatgctgcgccgccggggaccagagggcggggccgggccgcgcggacctcggcgggacccagcgggcccgggcgggcgcaccagccgccctttgtcctccgcctccgggtcgcgggggccgcggccgcctccagcgctggccccctggccctcgccccggttccccgtcctgcccgcgcgcccctcctccggccctcgcgctccgccgcccgccctccccgctctccgcctcggagcgccggacctcgcggctcccctcggccgcccgcccccgatttcctcggaaggaggctcgcgaaggtggaggaggcggccgaggaggaggaggaggccgccacgtgactctcctcgccacattccaacacagccatcagatcgataacttcagggacccccgcccccgccgcagccagctagtgcgcccccaaaatcccgcacgcacgccccgcaacttccctctccaacagggacgacggagagctggaccccaccgcgaaacgcaaaggactccaggggcggcggggagaagtaggggcgaggggcggtcaacttctgggaatggccaagaggggtgctctgaggcccgagccggggtccggtgcccgcggccggcggccggggtctgtttactccggcgacgtgcggagaggacccaagcaggacgcgggcgggcgggaggcggcggccgggaccccgggccacgtttgtcacgagc

SEQ ID NO: 38950 - DNA, 920 bp, Homo sapiens; identical to SEQ ID NO: 24109
  chr18:22930420-22931340
  binary

SEQ ID NO: 38951 - DNA, 907 bp, Homo sapiens; identical to SEQ ID NO: 30003
  chr18:24130266-24131173
  hyper

SEQ ID NO: 38952 - DNA, 750 bp, Homo sapiens
  chr18:24764503-24765253
  hyper
cgatcgcacctggcctcccggtccccctaacttccctcccacctctcccgcagcctgcgcctgagcctgagccaggtcgcggagtttgagactgacgcaaaggaggcacccccgcagcagagatgctcgtctttctgccacacaccctggaggacccgacagactggcagcagaaactaaagactgttcctgccgtcctctttccaacctctgcatgccccaagaggggtctgaccccggaatcctggagtccagggtgccccgccggggcgcaggaaggaaactcaggtagctgacaagttcaggcggccgtccttctccagcgccccctcaaagtcaggatcccctcctgctcccgccccccacctcccgccatgcgtccactgaagtgaagggaagtgggttggaatactggaggtaggggagatagaaaaaggaagaagcctcccgcatctccagcggcgaagcacctggaaaggtgagggcgcacgtccccgcccaccagagcccgctcccggcgcgggtacccagcagcgcgccatcatctctgcccctccagtgccccccagccccaaccccagccccagcgcggttacctcgcgggccgctgccgggcgcttgcaggtgctgctgttccaggagcgcagcttcggaggaaacttccccgcgctccggggcaaactcccgcgcactcctggcagccgtgaggtggctgagagcggagcgccgcgccgggagcggggacagctc

SEQ ID NO: 38953 - DNA, 2849 bp, Homo sapiens
  chr18:25755624-25758473
  binary
cgtgaagaccacggagcggggtaatccacaccacctgtctccacccccggagcaggcacttccgagctgcgtccgcacttttcggggctgccagctggcagtagagcacctctccccttgccccgagggcgacaggcagggggaccctccgtggattttcctgccccgcggcgagggtgggcacgcccctttcccgcaaccttcgagggaccccacggcaggcggagaccgacttgggaccagggcactgcacccgcccagctagagggtcccggccgaggctgtgtgaagtggcctccaggcctgggctggctggtcgggaggagcctgggggcatcctcgggttggaggcggcggaaagttgggctgcccccgggctgggaacccgcagcgtgcagtggcgagggaacctgcgcccggactggagcaggtgcttcctgccgcggaggagcctcttagtagagattaaatgaaaaggctcgctggctctctcccgagggtatgaaaagtacggaaggctccaggcaaaggcgcccccggggcgcatatagggcacaggcagccggacagagaaaggagcagccgcgtaacggaacttctcgcccgggggagatactaggcgtgagaggccagactcgttctacaggcaggcgctgaccggcagagactcctccgggcaagagggccagattttctttccaggtgggacgaacacagaatattgtgagggcaagagaagaagaaaaggaggcaactccagactgggataaagacaataggacagtagagcccttgagcaccgggaggcgcacgggtgcagggtggggtaaggtggaggcaagtcccgtaactaagacaccagagtgagaattcctactgtaaactcgcgacccatccctgcagaaataaacaaaaaaattggagcaaagtactatgcgaggggcgaaaggcacagaaaactgcaaaacctgggagttatcctgcctcaccctcctgctgcctggggacaccccccgcgagcttgctcggccccgaagaaggagcagaggggacccgcaatccagcccctagagccccgccaggaaaggcgcgagagacctactggccccggcaaccctgccccggcgcccggacggagcccgatgcctgcgcagctaccggccgcgcggcgcggcgcggcgcggcgtggcacctcccttcccgggtgcgcagcccggccccgcagcggcgcggggaacaaagggacccggcgccgcccgccccaccccgcccgtggcccggcccgcggggaccgccgcgtacctgaagcagggccgccagcagcggcagcagggtccgcagcgctcccgctatccggcacatggaggcggagaggggccgagcgaagagccggaggaggcggcggcggcggcggcggcggcggaggaggaggaggcagcggcagcaccaacagcggcgcggagaaacggctccaggcagtttccacccccttcccttcccctcccctccccacccccttcttcgctgctctccgctccccgccaatggagagcgagctgatgacaaatagcgggccgcggagtccgcgggactcgcaccaggagtaataaaacagacccagagatcaaggagctggggagggggcgggggaacagggagggagagcgtgtgagcgtctgcgagtgtgtggaggcggctgctgtggcagcgcaggcggctcggctccggcccggagcgcagcggaagccgcgagggatgcagcggcggggaccttggccggtggaggatgtggaggtggaagtggagcggatggcgctccccaagagctccgccacgcgaggtttcgggctcgtggttttgcttcctccgggtccccgctccagggccgctcggcgcgacgaagacgccggggacagcgccgcggggagggcgctccgggtcgtgcgtgctgcacccacaaagagcagcagtcccgccactccgcgcctccgctgcgtgggggccgaggggcgcttctcggctcctctttccggtcccccggcgagttggagactgttctccggcctcggccgcaagggggtgaggcgaggggccggcgcggtctctcccgccgcggctccgtcccgcgcagctgctgccgcagccgcccctgctgcccgcgcaccggcacccgcccgccggtcctcgccctgcgccgctcactcgcgcgcgccgccctccgtcgccgaccgcgcaccccgctcggcctccgctgcgcgacctgggcgagccgccgccgctctccccgcgctcgccccacgcgctgcctggctgcgcggcccgctcccctctcctattcctcccgccgccgccgccgccctcgcccccgcctccctcctccgccgagcctccccgcccgcgtcgtggccaatcggaggccaccaagctgcggctgtagccggccggatccgcggcagccgcccgcccccgccccgccgaagcgccccgtattttgctgcagcccgcggggggtcgccggagggaagcctagagtgcgccgagcaccgccccggcaggtggaggggctgcgggaaataaaataacttgggcaggaacttgattggtagcaggttcatctttggtccgcggtagggaatctaatggagatgaagaatggtggggaagggggggcggtgtctccttgggagcctaacgtacgcttctttattttgtcattctttggagatgggtaatctttcctggcaggggcagacacagcaaactaaggacgcaggccaagctcatcctagctattgttgtctgaggcgctcgccgggagccacctgcgggcgggggagggcggaggccgc

SEQ ID NO: 38954 - DNA, 1466 bp, Homo sapiens; identical to SEQ ID NO: 25295
  chr18:2846938-2848404
  binary

SEQ ID NO: 38955 - DNA, 2264 bp, Homo sapiens
  chr18:42258983-42261247
  binary
cgcccagtttcgagagcctatcacagctcacgtctgggcgcgcagtacccccccgacactgctcctgttgtgtcagatagtggcagtgttgagcccaggaatacgcgcggagcccgcggcgatccccgcggccgctcagtcttcgcggcggactccggcgcgcaggagccactgggccgcaagggcgccggggagcgggaggggcgctgggggcggcaaggggtcccagatcccaggccacgaactgttttccttttccccgggcaagagccccgctcccttcaactgacagaaattcactggggcaggggggcgagtggggagagaggtcgctcagggctcgctactggctgcgcctcccccggctctggtctgggaagcggctctgggccctccgggcgagcagcttgggcgccggcgccccctgcgaggaagatcgcggggtgacggtcggtacccgttcggctgggccgcgctgccgctccgatccacctcccttccgcgcccgcgccctcccccttcctttcactaggagtccgggattcggagagggcgcgggaggcaggcacacgggcccgaccccactccagcgctcaccggggacgcgggcgggcggcgacgggacgcggcgggggcgcggggcgggcgcggccatggagcagcagcggcggcggcggcggcggcggcggcaacactagcgaccgcgggcggacgagcgggcgggcagggccgccgggctcagcggaccgaactgcacagctcagcaaaagcgccctcgccctccgcgcgccgcctcctgcgagcccaaacccaccaacattttttaacgctccaacccatcctttgaagaaaagcaaaaaaaaaaaaaaaaaaaaaaaaaaaagcaaaaaaagaaaaagcattgatcggagagacggggatatatatatatatatatatatatatatatatataaaattttttttggctcctgctaaaattagcagggctcgccgcgcgcctgtgtgccagtgtgtgcgagtgtgtgtgcgtgcgggcgtgtgtgtgtgaatgtgattactccaggactcctcgggctccggagacgccattttcccccttgatatctctctccataaatcggtggcgcggcggaggcggcagagtcgggcgggaagcgcggggccggccggggcgcccgccgctcgccgccgcctccgcgcgcccgggggccccggcgccccccgagctagggcggccagctcgcggctcgccgtttgacagatgctcatcgccatggagttgccgcagcagcacctttgggggctcgggcgagcgacgggagccgggatctgagcgagcgccggggccagcggagccggagccgccgggacatgggtgagcacgcgcggcgaccttggcccgggagcccgggcgcccagcctccctccgcgccgcgggcccccgcactcccggaaccgggggcgacgtgtgtgccctgcatgcaaaagttcacgtcgccttgctgggtctttgactttgcacccggcgggaagggggagaccgggccgagggggcgggatgccggtccgggcgaggttgcaggagatgggcgcgattccggcgggccggcgggtgggcggcgatgctggctcaattggagtggctcgttggtggcggcgatggtggaagctttgggctggagggctgggagcttattgagtttcgcctaatctgatctaccccccctccgccccccgccttttgcaccctccctcggtcctgcagccggctggcggggctggcgggtttggcgttggtggagtggactcgggagggggagggggtaaggaaaggggtgggaaggcaggattttttttttctctctttgtaacttgcaggttaagtggagctagagagctacattgtaacctagttggatttttttggggggggaatgtatcagaatctaacgtgtcgttaatagaaagaagaacaggcaagaagtggtccagccggcgaaggttggtgtgtgcttgtgttgtgcctgtgtgttagtctttttcttaaaaatcttaatcaatggatttgagtctctttcttgtgctctctggttttgggactctgaaaagataggaattcccttaaaagcagacgaatgcctttttgaaagcacgcattgtgtgcgtttctagaggagccgtgggcttgggaatgaacggcaggcttccccgttcggtggtttccagtgggaaatcactccggaaagggaacccttcggtatc

SEQ ID NO: 38956 - DNA, 960 bp, Homo sapiens
  chr18:43913838-43914798
  binary
cgcgccccgcagcgggccgcagcgattggccgccggcccccttccagccgtcacccctccctccctccgccacccgcgcgcccgcggtccccgctgtcccccgcggttccggcgaggccgcgccgcgctgcgctccgctcccattggctgcgcgcgcctttgtgtggcggcagctgcggccccagcgcctttgaatgtcgagaggggccgggaagggagcctttccatgggccatctgtctccccgccagccgccgccccaccgccgcccgcgccccgcgctccgcctcccgccccggcggctcccgcagccccgccgccgcccgcgcccgcgccccggagccgcgccacaaagggcccgcgcgcagccgccgccgccgccgccgcgcgaggagccaggatggtcctggtccacgtcggctatctcgtgcttccagtgtttggctctgtgcgaaacagaggtatcgctttttcctttcggggtctgcttcggagcgtggatcgccgcaggcaccggggcgggggcgggcgccgcgggcggccgggggctcagggcacacccgcgaggacgcagggcgagcggtggcttccccccaccccattttagggggacccccgagggtgggggcggccgccctcgtgggagcttttgtagtgaagttagggtttggcgaatttgggtcccttcctccccagccccattttttattttttgcggcggacgtggttcccccaaatcacagccccttcccctaatacctagccctgtatgatcgaaaggagaaagatacatgaccgtgtgtgtgtgtgtgtgtgtgtgtgtgtgtgtgtgtgtgtgtgtgagagagagagagagcgcgcgcgcgagagcatgcttggttttctgtggtttgctttttttgaggtatatgtgtgttttgtgttatgtgtgttttgtattcattttttgttcattagtacc

SEQ ID NO: 38957 - DNA, 1197 bp, Homo sapiens; identical to SEQ ID NO: 22822
  chr18:44335955-44337152
  binary

SEQ ID NO: 38958 - DNA, 1837 bp, Homo sapiens; identical to SEQ ID NO: 34517
  chr18:53254628-53256465
  binary

SEQ ID NO: 38959 - DNA, 418 bp, Homo sapiens; identical to SEQ ID NO: 25300
  chr18:53256957-53257375
  binary

SEQ ID NO: 38960 - DNA, 1113 bp, Homo sapiens; identical to SEQ ID NO: 25301
  chr18:53446783-53447896
  hyper

SEQ ID NO: 38961 - DNA, 991 bp, Homo sapiens
  chr18:5628946-5629937
  binary
cgccggccaggagctccccggcttctgagcaggacgcgccaaagggagttgggaggctcagcagcccccagcgtcgccttctcgggtgacgtgacgctctctctggagcgcgggcccgcctccgccaagcctccaccgcaggtccttacagccgagccacgggaagatgcaacgccgggcgaggggcgcctcccggattttgaaaaacagcctcattcgcctcgggaacgcctcgatcccccacccgcaccctttggccagatgattttaatcctgggattccgcgttggtcgtgggggtaccgggagctggagctggaggagaggagccggcagcgcggagttgccggggtgcagctgcgcgcagctggcggcgaggggaggcggtccctgcggctccgccgggctgggggaactggctcctgcgcctctgcctcccggaggatcgcactcgctcatccttacacaccacacacacacacacacacacacacacacacacactgccgctagcgccccccacgccacaagccggaatgcggaggtcagagccactgtccacttgaaagcaggaaagcaggggctgaaacgctgagatggaggcggaggctctggcctcatctgcgaggttcgcaccttcccggaaggcccccccctcccccgcgtttccccagggcgagcaaggtctagcttctgagactccgctctctgggctagcggttcgagctgcaggggggcggggacggattcggagggagcactagagagagagcccgcgctcactcctgccctcctcgcaaagaactggccagccccactcgcgtccagcccacaactaggctgccgggaccggggagccagaccccaggtcgctccaactccggcgagggcggggaggggagtgacagcagcaactagcgcgcgctggcaaaagcacagagtctcggaataggctaaacggccggcgcggaggggtggaggcaagagggggc

SEQ ID NO: 38962 - DNA, 812 bp, Homo sapiens
  chr18:5890386-5891198
  hyper
cgcgtttgaccagctactgcgtccaagaccgactcggtggaggtgccggcctcccgcaggggtgtgtagcccttattgctgctggatgggtcatccgactgggagctcccggagtcccgcctggtggggggcgagccctccagccgcaggggtggcgagggggaggcggccttggccagagggctggagtccgggtccgcactccccggggagggcgggggctcgggggacggcggcgcccggtagtccgggagcccgctggtgctgcggcgccgcaaggccgcgtacctgccggtcctgggcaggcggccgccctgccccctggcggcgcgcgccgctaccgcgccctcgggctcctccggctcccggcgcgccccgcgcatgctgccctctgcgccgcggaggttggtcatgctcaggtcgagctcgcccctcgggatctcctgggagccgcgttcccccggaggcctctgccagctgcagctcgcgccctccgcgtccccgcccctatcgcggcccccttgcaagggcagcagcgcgaaggcgctcagcgaggagtccacgaaggagctggccgtgctctggcgcccccagctctcgggtgggctgcagggcgccggactgctgcagctgctagcggctgcggcggcggtggcagcggcggcccggcgactgcctgccacgcccgagcgctcgcggtagacgctgtacacggcctcggccaggctcgggggctcccgcggacagcgcggggaagaggccaggtccggcggggacgcggcgccccgagggcggccgccgctcggcgccgc

SEQ ID NO: 38963 - DNA, 1584 bp, Homo sapiens
  chr18:5894664-5896248
  binary
cgctgtgctgtgcccggtacccaacccaggtcctcgaccccggcccctcactggcagggcggcgaccccctggcccctggctttggtctgcttattgatgttagctggagtcacatgagtgcagcagctgggagtccgcctctggaaagaagacaggcaggagccaagtgagggcaatcctgaactagctttttctgggcagcgcatcccgtgtagccagcccgggaaaaagcctctcaccgaacaccagcccggggcgcggggactcggggacccgaggggcggggaggggcccccaagggctggggactggcagaattgctcaaaatggcagcactctccgcacgcaagatcgctcacttacccagggagaccgagggaggtcggggccggcgaacgggcgctcgggcgacacaaaggaaccatggagaaactttttcagcccgagccgacggcggagcgcagggacagcgccccggggccccgcatccgagcgcgactcagcagccccgcgggggcgagcgcccgccccaggctcgcagtccccgccggcgctgtggcgggagccatttccaagagtttccaagaagtgtcaggtcctccgcatcccgcatcccgcatcccgcctcggagccctcctctccgccgctcatcctccagctcccggcgtcccctagcgcggcgctcccgggcgggcccctgcggccgcgccgccggccctcgcgcctcttttgtgtggctgcggcgcgccgggctccgccgggtggagttgagcccgcggcggcggctcggggcggccggactggcggctgttgctaagagaccggagccatgacacagggaaattgcggcagggtggcggtcggggcccgcccggctcggcggagtcggggggcgcccccgcccccgccccccgccccaccccctcctccggcgcccccccccacgccgccggccttccccgctcccccgcgtcctccgccgcccgccgcccgtcccttcggaagcgccgattcctcggggaggaggaggcgtgaggggaggcggcggaggcagccggcacggggcgctcgggccgcggggcagggggcgcggggtgcctcctcggcctcggctctccccgccccggggcgccccgagaccgccgcctgcctccgcgggcagctttgttcttctttcctccaactacctgtctgagccgcgggccccagaggccccaaagagaggcccggagggtctccccagcagcatccgaggggcgctctcggggagctaggggccagagtccgcggtccctccgtgcctgcctccctcccctcgtgcctcggtcttttgttgcctctactcctcggcacggcgcagcctgggctctcttccccctcccgcttgggagtttgcagtgtggacgctcggcaagcacagtaagttgtcccccagcgaactcgggcccgggcggagtggagccgcccccgccgggacgggcgcaccgcgggacgcttggaagcctctgccagatgcgctcgcgctccagccccgccgggctttgtgaccagcctgaccgggacccggcagctggggctcctc

SEQ ID NO: 38964 - DNA, 650 bp, Homo sapiens; identical to SEQ ID NO: 24119
  chr18:60985398-60986048
  hyper

SEQ ID NO: 38965 - DNA, 790 bp, Homo sapiens
  chr18:61603403-61604193
  hyper
cgagcgcaatgcagcgcgcgttcctcctcctgggcgcccatcctcggctgctgcctcttcctttcgggccccgggacctgaccttccttccgggtccgcacagaaggcctgagcgcgtcgcctctaacactggtccagggcgggggaacgcggtgtgcctcggctgccacctcctggtgactaattctagtggacgtggagagcgaaccacagcctcaacaacacctaattctaattacagctggtgatcggtgaggtgacggaaataaacggggcgctatggcgggaactaatagatggtctccttagggtgtatgaggtgtcccttgacccttctctccccgaagtggacatcaaggtgatcctccccccatgacctcctacccgtggcatcctgcgacccccacccccgctgccagcccagtcctcccaggagccctcgaggggagcacggggttggctgaggggatgggggagcttccgcggacacagtccagccccgcagaatgcaagcggcgcagaatccttgaaagagcttccgagtgaaacccacgcccgcccgtggggcggagccctagcaggggcgggcgagttcccgcaaggccagcgcggaagggaagaacacggtgtggggaggcaggggctcaggagggcgccatcagctggtgctcagagcccggaggaaggaactccccccggagttggggggggtggccctagggatgcctcaccggccccatctctccacggagctacgggtagcatcgcccatcgctcctacaccccacgc

SEQ ID NO: 38966 - DNA, 970 bp, Homo sapiens
  chr18:6729229-6730199
  hyper
cgctagcaggagccccaaaggatcccggccggtttccagtttcctagaagcggggatcacacctccccgcgcactcccgacacatgcgcgcgcacgcacacacaggcgcacacacacagacacacaggcgcgcgcacacaggcacacacatggacacacgggcgcgcacacacaggcacaaacacaggcgcacacataggcgcacacacacacaggcgtgcacacgtacacaggcacacaaacaggcacacacaggtacacacgcacacacagacaggcacagacgcacgcacacacacaggcacacaaacaggcactcacacaggagcgcgcgcgcgcgcgcgcacacacacacacacacacgcactatgcccgcccccactccagcccgtgggcgtggttcccagcgtctgcgaattcgcgcgcccggggcggggcgggcctgcccgggggcccctgacagccgcgggagagagcggctggtcgcacctcgggccgcgccgcccagctgctgacagcctcccggcgcgccggtccatgctggtcccggtctttgttctggggccggcgccgagacatgcgcggctgacgatggaggtggaggactcgggcggcgtggtgctgaccgcctaccactcgtacgcgcgcgcccagccccccaacgccgagtcgcgctgcgcgccccgcgccgcagccagccacccgctcagcaggtacccggagccgctcccaccagggcggcgcagtcgcgctgggcttggggggttcgccgtgcagctgcgccttgtgcctgagcgcacgaccgccgtcactggatgttgtttcaagttttggtggactagatgagtgagcctggggttctttgcattgtctttgactggaggtgggaaacgctcgaaggctccaccagcctgggctgaagtcgttggctagcagagattagcaagcagcaggattgcattcttgatac

SEQ ID NO: 38967 - DNA, 748 bp, Homo sapiens
  chr18:70211041-70211789
  hyper
cgagctcccgcgctcagcgcgtccgcagcgcggctccctcgcgggtcccctcggccccgcagccccgccagtctccagagggcatagccgagcgctgccgcctccctaggactcggaaccttccctgctcccaagcccgccgcaccctccaacgccccggtcctgctcacccaaacgcccagagcaaaatactcccagacgtctcttttgaaaattagacacccttaaaagcaccggtcgcttctcttcttttagattctttcttttctttccccaattccctccaagtcttaatattgaatggcgtgaccactttcataatgacaggagcgaaaaaaacaataagttaaaaaaaaaaaaaagaagaagaagactgggatggctgggacgaagagagggaaaaaaaaagcttgagaatttgatgatttaggagctgtggttccagagtcccagttggggaactgtccggttcccgcagggctagaagaggggcctccggcccgggtctgtgtgtctgctcctctggacctcggactggtggagcggctggcgcttgcgcttatttattaaattgcggtgtccgcgctcgctcaaaggacccggggagacgcgctgggtttcccagctgcgcctggagctcggctgagggcgcaaacacggacgtggggcgccacctgcgggtgcccgggcctccctgccgcaggctgcggaccggcggactccgacagaagacgggggagtcctggcc

SEQ ID NO: 38968 - DNA, 283 bp, Homo sapiens; identical to SEQ ID NO: 23126
  chr18:75362799-75363082
  hyper

SEQ ID NO: 38969 - DNA, 1903 bp, Homo sapiens
  chr18:7566988-7568891
  binary
cgcggctcgtgacccgggacaaacttctggcggcggcgcagcctcttccacagtcaccctccccagagccagctaccaaaatagaagacgcggccggggcgaggaggtgggcggggggagcccggtggccgctcctccccgcgcggctgacgcccgcttcggcggcggtagtggctgtggccgcggggccgcccccagccgagctcccggaggcgctcgggcgcgggccggcggggcacgggcgctcacgccctctagcgggccgcggcggcgccgggcggccgtgacgtgagcgctcccttcagccggcctgcggggcaccgccagtcagtcggggagcaagagccccgcgcgcagccggcgcgggctcggtcatcggcgcgccgccgcccggggctgggcttggggctgcctgtggagaggcggcgggcggaacgcgcgcggccacggccacggccaccgccacggccacggccggcagctcgggtcccgggtcccgggcaggggaaggggagaggcggcgagctcagcaaccggaaccgagggaagattttggctccgcgggctcgccctccgctccctctgccagcggcgccagacgccgagtggggccagggacaggggaggaggacccaggaccctgtgcccgcgcccctggagccgctggagttcggacttctgcaactgttggcactttgggggcttggcttagcgctctgctgtttacccgtctctcctcgctgcctcggaaccaaagctcccggccccctccgccctcgcgcgcccacccaccgccgccggggagcggcccggcccgcactcagcaccatgaggggacttgggacttgcctggcgactttggccggacttttgctaactgcggcgggcgagacgttctcaggtaagcgggaccgcctctgccgcccccgaggcgcgcgggccggcgcgggacgcccgggacgccgacagctccctggtggtagagccctaaggctggcgtcggggccgggcggggggcgcggcgggccggacaccgcttctgcctgtgagccgggcgctgggcgaggggccgtggggctggcaggcacccagtcctcgggcgggcggagcggacggaccccgagggcgagctccccagccgggactgccagctcggccgccgtccttccgcggcctgggctagtgctcaaggttgggcggcttgcactcttgagtccctggccggctgcaaaaggaacagcagaaaactttgcttgaagttcccagttgcagccgccgggccgcctggcgtaggcgctgcgcggtccccgccgaccccgagcagcggccgggcccaggccgctggtgttcggctgcgcccgcagcgatcgccgggaactggcggccgctccggcggcggcgatctcccggtgccctgccctccctgtcgccccctgcccggcgcggctggcgaccccgggaggtccccgcggtcgtgcagcgtctgcggagaggctggggggagttcctcgccggtcccagcggtagggcttggcggccgcggagggaagcgggcaggtccccaggccctggccacggccctgcgccccgctgggctccccctccccaccctcgtccccctagcggagcgccgcggccagctgcaacttgttcatccagcccggctgcccgggggtcccaggtgggaaggagaggcactggcggtgtgcgagcaagcgtgtgagtgtgtgcgcgtgtgtgcctgcacgcgcgcgcgggggcgttctaagcccagaggaacccctcacggagaggatctgtggatcggagtcgggggtccggcgtgggggcgaacccggcacgctgtcacaggggtttacaaccaggatgacctttattacctgggtgacacaggtggatagac

SEQ ID NO: 38970 - DNA, 196 bp, Homo sapiens; identical to SEQ ID NO: 24122
  chr18:9333421-9333617
  hypo

SEQ ID NO: 38971 - DNA, 1173 bp, Homo sapiens; identical to SEQ ID NO: 25316
  chr19:1004547-1005720
  hypo

SEQ ID NO: 38972 - DNA, 988 bp, Homo sapiens; identical to SEQ ID NO: 30039
  chr19:10529649-10530637
  binary

SEQ ID NO: 38973 - DNA, 1478 bp, Homo sapiens; identical to SEQ ID NO: 26548
  chr19:10530654-10532132
  binary

SEQ ID NO: 38974 - DNA, 763 bp, Homo sapiens; identical to SEQ ID NO: 27762
  chr19:11592879-11593642
  binary

SEQ ID NO: 38975 - DNA, 988 bp, Homo sapiens; identical to SEQ ID NO: 23131
  chr19:12163025-12164013
  hyper

SEQ ID NO: 38976 - DNA, 689 bp, Homo sapiens; identical to SEQ ID NO: 26560
  chr19:12175460-12176149
  hyper

SEQ ID NO: 38977 - DNA, 644 bp, Homo sapiens; identical to SEQ ID NO: 23132
  chr19:12203028-12203672
  hyper

SEQ ID NO: 38978 - DNA, 905 bp, Homo sapiens; identical to SEQ ID NO: 27764
  chr19:12266891-12267796
  binary

SEQ ID NO: 38979 - DNA, 719 bp, Homo sapiens; identical to SEQ ID NO: 27768
  chr19:17392397-17393116
  binary

SEQ ID NO: 38980 - DNA, 1111 bp, Homo sapiens; identical to SEQ ID NO: 22826
  chr19:1978023-1979134
  binary

SEQ ID NO: 38981 - DNA, 618 bp, Homo sapiens
  chr19:1992849-1993467
  hypo
cgtgagcaaccacgcccggcccaaaacacattttactaccaggcaggagcctgctgcctcccgggcccgcccccggccccgcctccgcctccagcctcggtccgccccaccccggccccgcctccagccaggcctggccccgcccccgcctcgtaccggccccgcccacctgcgtgagcagcatgaaggcgttgtcggctcgcaggttcttcttcaggaactccacgcaatgggcctcgagcgctggcaccgcgtacttcttggcggtgtatagcgtggtcatcaccgtctccgggccaatctgcacctcgtccgagtagagaaacctgcagaagcaacgcgggtggccgtgaggtgggaccgccatgcccgcccccaggggagagcgtcaggggaccactcagaccgttagactcggccaccggcccttgagctggcaggacccaaacacccacatcaggttccccgaggaaccttccagaattagcccctgtccgttgccctctgacatagggacacgacttggcaaggtggtcacccatgaaaacgagcaagaggctgaacccatctacacagcacacacccggaagcgtctatatggcctgtcttgttctgccc

SEQ ID NO: 38982 - DNA, 118 bp, Homo sapiens; identical to SEQ ID NO: 6029
  chr19:20011652-20011770
  hyper

SEQ ID NO: 38983 - DNA, 291 bp, Homo sapiens; identical to SEQ ID NO: 23137
  chr19:20011910-20012201
  hyper

SEQ ID NO: 38984 - DNA, 845 bp, Homo sapiens; identical to SEQ ID NO: 26585
  chr19:20149660-20150505
  hyper

SEQ ID NO: 38985 - DNA, 293 bp, Homo sapiens; identical to SEQ ID NO: 23138
  chr19:22018435-22018728
  hyper

SEQ ID NO: 38986 - DNA, 272 bp, Homo sapiens; identical to SEQ ID NO: 23139
  chr19:22018891-22019163
  hyper

SEQ ID NO: 38987 - DNA, 630 bp, Homo sapiens; identical to SEQ ID NO: 26596
  chr19:22034394-22035024
  hyper

SEQ ID NO: 38988 - DNA, 930 bp, Homo sapiens; identical to SEQ ID NO: 30058
  chr19:2289696-2290626
  binary

SEQ ID NO: 38989 - DNA, 102 bp, Homo sapiens; identical to SEQ ID NO: 9349
  chr19:23432614-23432716
  hyper

SEQ ID NO: 38990 - DNA, 581 bp, Homo sapiens; identical to SEQ ID NO: 23140
  chr19:23432833-23433414
  hyper

SEQ ID NO: 38991 - DNA, 587 bp, Homo sapiens; identical to SEQ ID NO: 23141
  chr19:23456510-23457097
  hyper

SEQ ID NO: 38992 - DNA, 702 bp, Homo sapiens; identical to SEQ ID NO: 6038
  chr19:24216103-24216805
  hyper

SEQ ID NO: 38993 - DNA, 990 bp, Homo sapiens; identical to SEQ ID NO: 28838
  chr19:30015920-30016910
  binary

SEQ ID NO: 38994 - DNA, 1319 bp, Homo sapiens; identical to SEQ ID NO: 28839
  chr19:30017414-30018733
  binary

SEQ ID NO: 38995 - DNA, 874 bp, Homo sapiens; identical to SEQ ID NO: 22830
  chr19:30019101-30019975
  binary

SEQ ID NO: 38996 - DNA, 1483 bp, Homo sapiens
  chr19:30718122-30719605
  binary
cggagtgaactccggcagggctttctttggggacaggtggaaagttaagtcccccccttttcacttctgtattgtgagtggttcctactgtgtgcctgttggagaacatgtccaccgttcccgagttaggtggaggattggaatgttggggggcggggagcgttggagttgaggacgcagtggccaggggctgggggccgagaaagagcagggcggggtctcagccccgcgtgcgggtggcagcggcggccgggttttgtttgccagatattgttatgtctaacgggtgcctcgccggagacgtgatttgtcagccgccttcgttttcactttagcagaaaatacggcagctgcgaggtgtcccggcctgcggggctcgggcacccggtgcgtcctgggggctgggtcgtgtgcgcgggtgggagccggcggccggcggggccggggcgaggggcgagcgggaggggcggagtgagcgagcgcgcggtacggccctccggttcctcctgcgccttctcccggcagccgccgccgccgccgccgccgctgtgcaatttagcagaaatccgacaggggccgcgtttgctgagcgcatccggcggccgggcagcccgagcgggccgccgggcctggtcggccggtgtagaggcgcggagggggccggcggaggggaccggcggggatgggcgcgggaagcacgcctgaccagagcacgcgccgttccccaaccctggtgtccccggcgagttgggcagccccgcgcgccctgaccttgacgccccagtctccagccagggcttaggtgaacttggggtggggtgtgcgtgcgtgcgtgtgtatgtgcgtgcgtgtgtgtgtgtggaaggggtggtgagactgggaacgcgctgttttctttcccagtttgatactagcaactggatttttactttaagaccggctttgctctctgctggggttgggagggggggcgatcttttcccatcactcacatctttgttcattgttcactgagtggaaggcaggcgacttaaagagacgaaagagaggaaaaaggggtgagagacggagagaggaaaaagaggggggcggccagaagagggaaggagaggcgtggggacagggcccccgcccccgccggggtcgggtttgatggtgaaatagtaaacccacgcacggagggtcgccaggaaagtggacattaccgctttaattaacttcgagatgctccggcggcgggacctggcgtagccgtgacgcgcccccataaatctgcccggcccggggctgctccgagaactcgtacagtagcggcgtcagatccatcccgcgcctcccagtccggagtccatttgcataattggattttttttttttgcctccttctttctccctgaaacttgtttgaaaacccaagtgaaaaccgcgacgatctgcacactcaaaagcaagtgccaagtaagtgccctgcggtggcctcggc

SEQ ID NO: 38997 - DNA, 856 bp, Homo sapiens; identical to SEQ ID NO: 22832
  chr19:36909065-36909921
  binary

SEQ ID NO: 38998 - DNA, 742 bp, Homo sapiens; identical to SEQ ID NO: 23148
  chr19:37095957-37096699
  hyper

SEQ ID NO: 38999 - DNA, 877 bp, Homo sapiens; identical to SEQ ID NO: 26626
  chr19:37157317-37158194
  hyper

SEQ ID NO: 39000 - DNA, 1071 bp, Homo sapiens; identical to SEQ ID NO: 26627
  chr19:37263336-37264407
  binary

SEQ ID NO: 39001 - DNA, 604 bp, Homo sapiens; identical to SEQ ID NO: 23149
  chr19:37288206-37288810
  hyper

SEQ ID NO: 39002 - DNA, 190 bp, Homo sapiens; identical to SEQ ID NO: 26629
  chr19:37328817-37329007
  hyper

SEQ ID NO: 39003 - DNA, 529 bp, Homo sapiens; identical to SEQ ID NO: 23150
  chr19:37329089-37329618
  hyper

SEQ ID NO: 39004 - DNA, 523 bp, Homo sapiens; identical to SEQ ID NO: 23151
  chr19:37340738-37341261
  hyper

SEQ ID NO: 39005 - DNA, 847 bp, Homo sapiens; identical to SEQ ID NO: 23152
  chr19:37341484-37342331
  hyper

SEQ ID NO: 39006 - DNA, 1029 bp, Homo sapiens; identical to SEQ ID NO: 26632
  chr19:37406731-37407760
  hyper

SEQ ID NO: 39007 - DNA, 799 bp, Homo sapiens; identical to SEQ ID NO: 23153
  chr19:37463952-37464751
  hyper

SEQ ID NO: 39008 - DNA, 1004 bp, Homo sapiens; identical to SEQ ID NO: 26635
  chr19:37957588-37958592
  hyper

SEQ ID NO: 39009 - DNA, 1035 bp, Homo sapiens; identical to SEQ ID NO: 26636
  chr19:37959780-37960815
  binary

SEQ ID NO: 39010 - DNA, 1067 bp, Homo sapiens
  chr19:37997104-37998171
  hyper
cgttcccatcgctcccgtctcacttctccatcccccacctaccaaataaactgcttgcactcattctttcctcaggtcggcttctcgggcaagcctccttaggtaaaaaccttgctttcaacatttcctttccattatgcgctaagaactctgatctcttcccgctgcggcagccccgccctttccttgcggctccgccctttccgtgaagtcacgcccgtccttaggctgtctctgtctccctaagagcgagtctcttcgctgctctctaactcctagagctggctcagaaagagtttcacattgccataggggagctcctaggagaggctgcacccattgcacgtaagaagcggtaaaaatgtacgcggccatcttaccaggctgccggagacaaagaaagctcagctttgatgtctgggcgccaccatgttggccacaggaggttttggcatctgagatgctgagttaagagcagagacgacatctctgtttagggatccagggacacttccttctccttgtcctaaaatagccttatcttttggtctagcaaagggcttaatcatccgttttacggcacagttttaaacatggccgccccaggtaggagtcaagtgggcgtcgccatcatacctccaattacagctttgagaaacccagaatcctgttcactggaaggttgccgggtggcggctgacagcctcaaagtcgcaattgagtctgcgcaccggccattcaggatgggacgaccttataccgcggtgaggcggcgtggcaggacgaccaatttcagattcagggcgcggatgcagcataaatgggaaggcacggtttgagaaacggtcaaacctgggactagtggaggatagtgagctgccgactacggtggccgactgggtcagctatgggtgcccgtgagggtcaatgacaagggaactgaagggttaagagattcggcgtctgagcctcgcggggcctcagtggtggcggacagaggtttgcgggagtcagtggcacggtctctgaagaagatggattgggagtgtgtgggaatcaataaatgc

SEQ ID NO: 39011 - DNA, 1749 bp, Homo sapiens
  chr19:38145560-38147309
  hyper
cggaaggaactcgaatgcatttcacagaaacaaagcagcagcacgaactcacagggaaccggcttttagaagagcagcagcgattcgtttctccttctcaagcgccttctctggaaactggcagggctggggaagcaggcagagttcaggacaccccaggcttttcttgactcgattggaacccaccctccacgcttccctggccccaactaaccgccacctgcatgcacaaatggaaacgacagggcagagggtcagcagtcacccgcgtctgggttcgcagctccgggtacgctgtagttccgcacccggttgcccacgcccgggaccacccactgtgtcttttcggaactgtccagcgtgtcctcctagaccccagacacccaccccaaatctaggtcccagcgttttgcaggggaccttcatcctggggcgttcacctctgacttccctcttgggccttttcgctacggccgagcctaagtggctgaagcgcggacgaggatgcgcggggcctcggtctccaactgcaccacaggccgcacccacgaacctggtccggcacagttactaccgcccgggcctccaggcctcagggctgcagaagctcagtcccgggaaaaaaagcacaccggcctgaggctccacaggaaccttttctccaccttggcccggcctgcaaaacctggcccactccgcgctcttttccctcagaaaagcagcggccacagtggcgcccggctcccagccccagcctcacccgactcagaggatagcccagccctgggagtcagcggcgccagaatacgggagagcgcctgtctccgtcgcgaatgcgctagcgcgcgggggggcggaggcaagtcccgcagctgctccgggccgggaggggcgcgtggggccgggtctcggcggggatagtcgggccggggagacggagccagaggggccgcagtgtccctcgcctcaggcctctacctgtaatggccgccccgtgactgaccagtgccattaaagataatccaggcctgctcccctgtggacactgcggtccaaaatttaaaaaaacaatattccgcctttttatttttcatttggttctcggctcggagacaggcggaggctgcgagccccgccccgcccccagcgacgcctcaccggaacctttggaaatcggcttctgcctcgagtgcgcaagcgcgcggggggcgaacgctggggcccttcagggagcaagggagaagtgtggggccgcacctgccgaggggtcgggaggtttggaggagggtggaggttggctacaggatcccgatggggatggagtgttcaaatctaggcctgtagccgtgaccctggcgtgagttggatggaggaaaccccagtatcgcgagcctggaccaaggcgcggcgcgtgctgcctgtggtgtttgctgagtgacggccgccgcgcccccgcgtacctggaccgagtgcctggccgctggcggagtagtgtttccgtgcacggggctgctgcgtgcgcgtgtgccgttctctagcgggggattaggatggtgccgcagagaaggctgcgcggtggtgcctgactctgacgctggctgtagcgggtctctggggtctttgcggtttgtgtctgcgtttgtgacgtacctgacatcggatctgtgactgtggctctgcctcatccagcgttatttccagaatccttctgatagggcagcgcttctggttctggttttccatggagac

SEQ ID NO: 39012 - DNA, 740 bp, Homo sapiens; identical to SEQ ID NO: 22835
  chr19:38182720-38183460
  binary

SEQ ID NO: 39013 - DNA, 516 bp, Homo sapiens; identical to SEQ ID NO: 34578
  chr19:39997621-39998137
  binary

SEQ ID NO: 39014 - DNA, 125 bp, Homo sapiens; identical to SEQ ID NO: 24165
  chr19:41881461-41881586
  hypo

SEQ ID NO: 39015 - DNA, 441 bp, Homo sapiens; identical to SEQ ID NO: 22838
  chr19:42028298-42028739
  binary

SEQ ID NO: 39016 - DNA, 283 bp, Homo sapiens; identical to SEQ ID NO: 26650
  chr19:4555911-4556194
  hypo

SEQ ID NO: 39017 - DNA, 1283 bp, Homo sapiens; identical to SEQ ID NO: 27799
  chr19:45655296-45656579
  hyper

SEQ ID NO: 39018 - DNA, 247 bp, Homo sapiens; identical to SEQ ID NO: 23160
  chr19:46929939-46930186
  hyper

SEQ ID NO: 39019 - DNA, 843 bp, Homo sapiens; identical to SEQ ID NO: 27806
  chr19:50316211-50317054
  hyper

SEQ ID NO: 39020 - DNA, 712 bp, Homo sapiens; identical to SEQ ID NO: 22840
  chr19:50553779-50554491
  binary

SEQ ID NO: 39021 - DNA, 839 bp, Homo sapiens
  chr19:50815289-50816128
  hyper
cggcagcttctgcattgggcggttcatgcacccagggtgggcgtgggggaggcttggggaaggggccacgccgacccctccctccctgccctgcgggtgggctgagaagacccgccattagcaccagagttggacgatttgcagacctcccctccccacactgtctccgaaccccgcccccatccctgagagcgccccctcaccactccccccaccagcgacaggctaggcccgccccgcccacatttgagtgagagaaacttattgctctgtgtgtgtgtgtgtgtgtgttggggagggtgagccgcggagctcaggaagaccccccgccattcattcctccccaatcgccccgccccctggcccgtgtccgtgcgttcccggagcgcaggaggggtgcgacatgcgtgtggggggcgcgtcatgcagcgcatgcgtgtaggtgcaggcaccctggcggccggggggaaaagggggagccggacttggaaagagtccctttagctcgctctctccctccccgaatcccacactattgacttgggggatggggtgggaggggaggagaatcacgttttgtagaagtttatcatgattgtggttattttgaaaagctgaactcaaaagctgggtacgtgtggcggactggcgagcagggggagacgttgggaagaggtcagtaccctttggaaaagaccctcaccccctttccccgcctccttcggctttcgtgaaggtcaggggaaacgggggggcttgttaaagaagttgaaccctttggcaatataatcagtccccaccccgtaccctggtgtctggagcccctagccctttgcccc

SEQ ID NO: 39022 - DNA, 716 bp, Homo sapiens; identical to SEQ ID NO: 34596
  chr19:51142491-51143207
  hyper

SEQ ID NO: 39023 - DNA, 1380 bp, Homo sapiens; identical to SEQ ID NO: 27809
  chr19:51161615-51162995
  hyper

SEQ ID NO: 39024 - DNA, 1265 bp, Homo sapiens; identical to SEQ ID NO: 30087
  chr19:51227617-51228882
  binary

SEQ ID NO: 39025 - DNA, 445 bp, Homo sapiens
  chr19:52074292-52074737
  hyper
cggaataaaagccctttgacgatggcggcctccaatatcataatccgtatgggtgcggccatgccgtcctccctaccaagtttctgaagttgaatgaaccgcggaataaaggtacgccgttatacgccatgataactgttggcggagcgtagcttcaaaagtgttagtgggcatgcgcgcggttcaacagcgcctacggaaatcctaacgggaatgtaacccaaaccggaagtggcctagagcgaccatttagcttctgttgttaagtggatctaagcctatgtcgcttactggacgctgaagtgattgggaatattagcagtgggggttctgtagggtcaggaaggggcggctggctttgggggagtgatgaggggcttgttgggggtgggggtgcgtgataaagggatttctcggctgaagacgaggctgtgaggtgagtgac

SEQ ID NO: 39026 - DNA, 692 bp, Homo sapiens
  chr19:52207100-52207792
  binary
cgtaagggtttaaggagtgaggggaaggggtgcgtttagggcaggggagcgagaaggctcgggggcgggctcaaggctcagggccaggactccagggggcgtggtctggctcggggggcggggcttgtaggttactcagtggcaagccggagttgaggcgtttaaacccgcgtgtcccgcagctccggactcaggacttgtcctatttccgagatatgccgcgggccgaaggatacctggcgcggatccggccggctcagctcacgcaccgcgggacgttctcctgcgtgatcaagcaagaccagcgccccctggcccggctctacttctttcttaacggtggggcggggcgcggccgcgtgagtgagcggggtcgggagaggggtggggctcgtgcctggctgacgtgcgcgcccccgcagtgacgggcccgcccccgcgggcggagacagagttgcaggcctcgttccgggaagtgctgcgctgggcgccgcgggatgccgagctgatcgagccctggaggcccagcctgggcgagctgctggccaggcccgaggctctgacgcccagcaatctgttcctgcttgcagtcctcggggccctcgcatcagcgagtgcgacagtgttggcgtggtgagttctggggactccggagccccagcatctagctccccgctgtctcagatcccacc

SEQ ID NO: 39027 - DNA, 675 bp, Homo sapiens; identical to SEQ ID NO: 23162
  chr19:52839404-52840079
  hyper

SEQ ID NO: 39028 - DNA, 854 bp, Homo sapiens; identical to SEQ ID NO: 30092
  chr19:53193139-53193993
  hyper

SEQ ID NO: 39029 - DNA, 850 bp, Homo sapiens
  chr19:5339897-5340747
  hyper
cgtgcgcgtctgcctgccagagcccctggggctgggggctgaggctcgcccctgggtggggaggctggaagggggcgccgaggccgcagaagggtggggcaatgcccgagtgccggaggggcgacctcccataaggcaacgacagggcccggagtgttccaggggagacggcgtagactagggggtctccaggggagggagacccggagagggaaggcggcgggcgcagcagccctggagccaccccgcctggagccacccgtcccggctcctctccgctccggggcgcccgcatgccccccatcccccggcacagcgccccctgcctccaggacccgcccggggacccgggccgggcgccgccggggccggcaccggctccgcacacacgcgcgcccccctccgcgcctctgccccgcccgcagcccggggtggtgcagccggcggcgctgggcagcttccaatgccgcgctctgggcgcttccagcccagccccctcccacgccgcggacgaagcccccccagcaccccctgccgagcgcccccagcgcggccccggccctgtccctcggggcattgtccgggcgcagctaccggggcgcagcggctgggcgtgcaactggctgcagccgagcatcctccgagcacaatggccgtgcaggcttccccggcacaaagccggcgcgctgcccactcggctgcctccgagaccccccttggagcgcctgcatttttttttcctctaatccatgattttatttttttttttggctttacctggaggctggctgggctgggctcccccggctctgccccgcttcacatcgtggctgttgcatgggatccgagc

SEQ ID NO: 39030 - DNA, 1149 bp, Homo sapiens; identical to SEQ ID NO: 22844
  chr19:53606073-53607222
  binary

SEQ ID NO: 39031 - DNA, 458 bp, Homo sapiens; identical to SEQ ID NO: 23168
  chr19:53661430-53661888
  hyper

SEQ ID NO: 39032 - DNA, 500 bp, Homo sapiens
  chr19:53662189-53662689
  hyper
cgagcccgggaactggctgcggaaacggggcacggcggttcgcaagtttaatccatactgagggacactcacgctcggcggcgtcacccgcacccaacacgatccgcttccggaactgcagaaaactgcgcgtgcgcggaaaagagcccgggcactctgggggcggggcctggggagaggcggggtctgcggacgaaacgctggggcggagctggggcggggtctgcgcttccctcagcctgcctagcccgcagtctcatttttcccggtttagaaacgctggagtgttcactatgtccccgggagcaccgttccaatttgaagcagttttaaggtgaaagaatagacttacgtggaccacttatgatagaaaccaaaatgatttcctcttaccaagttgaaaacggtttatgttaaaattgtttgccggcgggttggacccagtcctgctagggagtctgctgcagctcaggaacggggatctgggaatcggggatctc

SEQ ID NO: 39033 - DNA, 716 bp, Homo sapiens; identical to SEQ ID NO: 26672
  chr19:53696029-53696745
  binary

SEQ ID NO: 39034 - DNA, 1120 bp, Homo sapiens
  chr19:53970454-53971574
  hyper
cgctgcttcctgagtagctgggacctcaggctcctgcccccgcgcgcgcatccctcccaccccggcgccccatccagcaggtggtcacctcactcctccctggcctgagcactccgtcccgcatccatggcggtggctttagggaaatctctgaagttgagcacggggtggacttgccctcctgagtgaatggagaatagaaagggggaggatttctattttgttttgtgggccgtcagcatgaaatcgtaccttccgcccaggcagggctttgcatttcacattctagtttgcatccccgttccagacaattccagggcttttgaatagtgcctcaaccttactggccggtctcgactccaaaaccctaaaacaggcgctggagcgagggtgacggactcacaggtcccaccccggccccgccctctgcgccttccaaagggcaaagtctctccgcctctcgccccgcccctgcttcgtcaggccccgcccacctcccaggtcccgcccaggcctggcttctgtcctgcgcgcagattcgcgaaaacccggaagcggatcgcgtggagtgacggtcccacggcagcgcgtgagtttggctctgtgttgtattaggtctgcacttcccaggtccctggcgcttctgtacctggggcgtggggtccccacaaacctggaaattctcagccgtcttccttcacccagagcaaattgagacgaccccgtgagagtccgggggtcgcttccttttgtgtttaaggtcgccctgaggctggtcccgtcccgggtctttctgctatagggcaatgtatacactttctatcgcgcatttttcctgctctaaacctttctctgactcctcccaccccgcgctttttgaagtcctcacccaaggggtggattctcgcccacttcggccggtggagcgcagaaccgcggccccagtcccgggaaggccgcgtcctctgtctggtcccgggatcctgcagaccccacccttgtcttaaggcgccctcgcgcccccccccccccacctccctcctcctgccgggccctgctgcttcctaggtctcccctccgcagtcacggcttcccctgagcccacgttggggaggtgccc

SEQ ID NO: 39035 - DNA, 691 bp, Homo sapiens
  chr19:54023868-54024559
  hyper
cgacgaaaagcattctgacggccgcgcttccagcgctaaggattcccgcgtagtgagcatttcccagaggtctctggggcatggctccattagggccgtgtgcagttgcctgcagggaaacactgatgggcgcccttccagatacgtcgattcccgggttatgagctacatttcccagaagccctcaaggcaggacgcccttagggtcgcgtagagttgcatgctgggaaatcctgacagccgcttccaactctgtggatttccgggttatggactacatttcccagaggcctctgggtcacggctccatttgcgccgtgtagagttgcatgctgggaaacactgacgggcgcccttccagctgcgtcgaagcttctctggtttcgcattacatttcccagagggccttggggcacagtccaatgaggagcgagccgggtggccggctgaggggcgtgcttcatgctcgcgggatttttaaaaatggtttctcctggatcttatcccaactgcgcctgagaccttgtttcacctcctgatgtgctgggtgtggttaggcctcgagccgggagctatttgcctcccaggaggaagccagggcagggttccgcggggaatggcggtgagggagccactcgggacgcggaggccctaaaatgaagaagcttcggcctgaggcttcgggagcggc

SEQ ID NO: 39036 - DNA, 761 bp, Homo sapiens
  chr19:56159257-56160018
  binary
cgccacccaatccggggacccccggagactcgccagctctccaggatgggaatttcgtgatgttccctgcctgagcttcggggagggcgggggagtgctgtaaggggctatcgcgcaagtgcagaccctctgcttctgccgcaaacggcgggcctcacctggacccggggactcttcaacgaggggcgctagcctggcccgactgggcgagtccccgcgtccctgcccgttccgtcgctcagttccacgacacgctcccctgccgccccgcctgttcgcgggtgggtgggcgcttccctcggctccccgtgacactttgcagacgctccccggcgccgggcatgggcgccgccgccgtcggtccccgagccggattccgcgagcgggtgggtgagcgcggggggcctcggcccctcggaccccgggcacccgcgggcgggggatggtggccgcgtttgcacccccgccctagtgcatgttcccgctggaatcgttccacgaccgctccccctcccacccgcgggacaaagggcgggggcggggggggcgcacccccacgcgtgacctttccccgtactgcgcacgcgcccagcccccaccaccgggggacggtccgcccgcccacgcgagtgcgggggaggggtgtgggggccccgaaggtagaggaggcagcgcgcacgggctggacctcctcctaccctgggaagttggggcagtttccccctgcacctgcctcttccttaggcctggcagtggcccgc

SEQ ID NO: 39037 - DNA, 746 bp, Homo sapiens; identical to SEQ ID NO: 27812
  chr19:56199006-56199752
  hypo

SEQ ID NO: 39038 - DNA, 225 bp, Homo sapiens; identical to SEQ ID NO: 27814
  chr19:56727708-56727933
  hypo

SEQ ID NO: 39039 - DNA, 641 bp, Homo sapiens; identical to SEQ ID NO: 27815
  chr19:56728484-56729125
  binary

SEQ ID NO: 39040 - DNA, 600 bp, Homo sapiens; identical to SEQ ID NO: 22846
  chr19:56879394-56879994
  binary

SEQ ID NO: 39041 - DNA, 828 bp, Homo sapiens; identical to SEQ ID NO: 22847
  chr19:56904526-56905354
  binary

SEQ ID NO: 39042 - DNA, 806 bp, Homo sapiens; identical to SEQ ID NO: 22848
  chr19:56915147-56915953
  binary

SEQ ID NO: 39043 - DNA, 935 bp, Homo sapiens; identical to SEQ ID NO: 26686
  chr19:57078365-57079300
  hyper

SEQ ID NO: 39044 - DNA, 506 bp, Homo sapiens
  chr19:57106480-57106986
  hyper
cgccccagcctccttggccgcggagtcctctgtgagatggaggagctcagttggctccgctcggctccactcggctgggctcggctgaaaaaagccggggggaggtggcgcgcgcgggtttctgggaagcgtagtccggcgcagtccgcgcaggcgcactgccgtcgggcgggcctagcgggcgcggtcattgtcctggcagagcggcgagccggtgagtgtggctgcggggtcgcgcccaccctctacctgtgccgggggccggaacctggccccggggagggcgcggcctcggggagacggcgtgcaggcccaggtacggggagtgcagggctgggtgctggtccagggcgtgcgggcgcaggagagggcgtgcaggccgggaccgaggtgcgcctggagaggctgagcggccgaggagaggctgaggggaagctgaggggctaaggagaggctgactggaggctgaggggctgaggagaggccggggccagggagggagaggc

SEQ ID NO: 39045 - DNA, 790 bp, Homo sapiens; identical to SEQ ID NO: 22851
  chr19:58125385-58126175
  binary

SEQ ID NO: 39046 - DNA, 881 bp, Homo sapiens; identical to SEQ ID NO: 22852
  chr19:58238341-58239222
  binary

SEQ ID NO: 39047 - DNA, 987 bp, Homo sapiens
  chr19:58665973-58666960
  binary
cgacacactcataagcagccccttcctcgtcctttttttccttctgagctcgggaacgtctgctgggggtgagggggactcgcagaccacccccccccccgccccaggcggaggtcgggggccgtcacctggccaggtgtccggggaacggctcgggcggctgacaccgcagtccgcgagaggcgaggaggatccttggactgtgggcaggatcgcaggcagcggaggccctgcccggaaggcgggatctggggacgatccccattcctcccagccgcagacgcggagcccacaggagtccccgcagccctagcccgtgcacccacggcggagccgaggccgcgactccgggcctgttggctggaacccgcagccgtgtctcgggccgccccggtagcggccacccctgagagcactcggccccgttctatcccgcagtggtttggggagtgcaggtcatcactcccacccgccaaggcggacgccggaccctccattgcgcatgagcgcccactgcggcgccgttgctgcgcatgagtgtgcttccaccgcctacatctcccagaaaaccccgcggcgcggcgctccaccgcttccgccctcgggttgcgttagccgcgacgatggcgccccccagtggcagcagggaggctgtgggggtgctgggcgttgcggtgtgcaggttttctgggaggatacctggcgccgaccttgaagggaccccaacgtgagagggaaagacgcccgtgatgccaaggcttgggcagcggacagccaaaatcctgaaaccccgcggtgctccctgtgattcactttccagaggcccctcagtgccccgacgctggcccggagggcggtcgctgactgtcttgagactgaagctcactttcggatcctgggcgttcttgccaggttttttttattaatacagagaaaaccagtggctttgtgacagttagttttgaaactccctgaggagggccgagc

SEQ ID NO: 39048 - DNA, 1067 bp, Homo sapiens; identical to SEQ ID NO: 26705
  chr19:58694209-58695276
  binary

SEQ ID NO: 39049 - DNA, 944 bp, Homo sapiens; identical to SEQ ID NO: 27829
  chr19:6590260-6591204
  binary

SEQ ID NO: 39050 - DNA, 746 bp, Homo sapiens; identical to SEQ ID NO: 24202
  chr19:813406-814152
  binary

SEQ ID NO: 39051 - DNA, 685 bp, Homo sapiens; identical to SEQ ID NO: 10475
  chr19:8274278-8274963
  binary

SEQ ID NO: 39052 - DNA, 850 bp, Homo sapiens; identical to SEQ ID NO: 26714
  chr2:101033445-101034295
  binary

SEQ ID NO: 39053 - DNA, 125 bp, Homo sapiens; identical to SEQ ID NO: 24211
  chr2:10151899-10152024
  binary

SEQ ID NO: 39054 - DNA, 530 bp, Homo sapiens; identical to SEQ ID NO: 24213
  chr2:10152958-10153488
  hypo

SEQ ID NO: 39055 - DNA, 146 bp, Homo sapiens; identical to SEQ ID NO: 24215
  chr2:10154879-10155025
  hypo

SEQ ID NO: 39056 - DNA, 228 bp, Homo sapiens; identical to SEQ ID NO: 24216
  chr2:10155172-10155400
  hypo

SEQ ID NO: 39057 - DNA, 166 bp, Homo sapiens; identical to SEQ ID NO: 10478
  chr2:10155780-10155946
  hypo

SEQ ID NO: 39058 - DNA, 384 bp, Homo sapiens; identical to SEQ ID NO: 24217
  chr2:10156251-10156635
  hypo

SEQ ID NO: 39059 - DNA, 1466 bp, Homo sapiens; identical to SEQ ID NO: 26724
  chr2:105469747-105471213
  binary

SEQ ID NO: 39060 - DNA, 888 bp, Homo sapiens; identical to SEQ ID NO: 34620
  chr2:105760109-105760997
  binary

SEQ ID NO: 39061 - DNA, 973 bp, Homo sapiens
  chr2:109744585-109745558
  hyper
cgacgggaacgcaaagcggccacgagggggcagcgcacggcagggaatcttcgccgccgaccccagcccaccgccaaacttccctgctgctctcggtcctcctgtacgtacttccgttgctctgacgctcccagaagccggggcgtcgggaaggagagcgcgaattcaccctcctctgcgcctccgtaggaaaaaattggagcgggggttcacgagactgcgccgcggcgggcgctagagcccctcgcacagcgtcgccaagggtgcggcgtggagccgggcgcctggcgccagggtgctggtcggcgggcagcggcgccagcctccgacccgcgactccggcgagccaaggctgcgccgggaggagtcggcgcgggccccggggtgcccccttcaactggagcgccttcccctcctgccttgcggcgcatccccacacctacaccggaacgaagctccggggctgtcacttctgcgcgcttctcggaaaggagtctgaactgggagcgctccggggggtcgtcggggaggatgcccgggcgtcggctgtgtccccaagctgctcgccggcgctggcgaggaaggcagtcgggataacgccgcccaaactttccttcgcagcagcgttggcaggaaacgtccctctctgaggctcacgaaaagccgaaaaagactcggacgcttggaggaggcagggccaagcctgcgcaggagaggttccccggagccctggagatgtcctaggggaccaggctaatcgccggcttgcgcccaagcgaagggaagtcctgcaggcacggcgcctccttccctgagccccgcagtgaccgtgacctccgcgcgcacccccgcgcacgtgctcgcggccgaggaagaggaacggtcctgctgaatcctctggaggacagcgactagcgagcaggccaggggcgcatggaggtgccgcgggggcggtgcggctcgccagctgcgc

SEQ ID NO: 39062 - DNA, 1446 bp, Homo sapiens; identical to SEQ ID NO: 23182
  chr2:118981062-118982508
  hyper

SEQ ID NO: 39063 - DNA, 702 bp, Homo sapiens; identical to SEQ ID NO: 27842
  chr2:120281422-120282124
  hyper

SEQ ID NO: 39064 - DNA, 78 bp, Homo sapiens
  chr2:120973463-120973541
  hypo
cgcgcccggccctttcaactctttatcggatgagaaggcgtaggaatcatgtctttctaactggctgatgatatggcc

SEQ ID NO: 39065 - DNA, 650 bp, Homo sapiens
  chr2:120973785-120974435
  hypo
cggccctgctccactccagcactgtagttgtagcagttttcctactcatccgtttctactctttaatagaaaataacctattcatccaaacctttacattatgtctaggggctattaccaccctacttacagcaatctgcccttcagcgccaggggaatgcccgacagctaccttctcccccgtgaccgccgggctccgtatcctgggcgagccgcccggctccggatagcaggaaactggggagggctccggcctcgcctcgtcagccccggagccttcaccaatcccgggcccggaaagaccacgcccactgctggccccgcctagcacctgcgcaggtgcagtctccacctcaagccagctgggccttatgatagtcaaaattggtattaatcagccacacctagcattccttcacatctgcatccacgccttttaaaaagctatattatttatatgttcaggctccattatccataacctcaatgatgaacaagatatccgtaaaataggaggactattcaagactttacccttcacttcctcttcccttattattggcagccttgcacctacagatatgcctttcctcacaggcttttactctaaagaccttatcatcgaaaccgcaaatacatcatacaccaac

SEQ ID NO: 39066 - DNA, 590 bp, Homo sapiens; identical to SEQ ID NO: 23568
  chr2:120979888-120980478
  hypo

SEQ ID NO: 39067 - DNA, 776 bp, Homo sapiens; identical to SEQ ID NO: 26734
  chr2:127534409-127535185
  binary

SEQ ID NO: 39068 - DNA, 572 bp, Homo sapiens; identical to SEQ ID NO: 23183
  chr2:127782995-127783567
  hyper

SEQ ID NO: 39069 - DNA, 747 bp, Homo sapiens
  chr2:144694564-144695311
  binary
cgtgccggtgtgtgtgcgtgacagcgcgcgcgtggcagggagttcgcgcgccagggtgcgcgtgccagcgcgggtgtgcgagggagtgcgcgcgggtgggagcgccaggggctggcggggcccgcgccctgggacgagcccctcgtgctccggctctgcgctcccgcagcgcccacgcagccgagaggagtgggtgatgacttcgtgacctcaacgtcctcccccgtccctcgacatgttcccgcgcctgaaaggtgcagaaaactccccccaccgctctggacgagactgagctaggcgtcgagggcgggcgccgccgcagaccggagctcgggctcgctggccgctcaggcgcagcggtgtggagggaacggacgcgcggcaaggcgacccgctctgggcaacgcgggcgcagctgccccgacgcaaggcactagctggtcgggggctcgggcgagccggggccggcgtgccggggcgtgcgctctctcggcaggcgagcgccgggctccgcggaggtccctgcgcccactgcctgcttctccgcccggcgacccggagtccccaggctgcggtgcgccaggccagacctgaccgagggcggaagacccgagcggcagggaggcagaaagaaaagaggtagcaagccccagacaagggatccttaattacagataaaaggcaaacaaaaccgtacaccacattttccacgtgtcagctgacggccgcgacaaaaggaaacagaac

SEQ ID NO: 39070 - DNA, 2594 bp, Homo sapiens; identical to SEQ ID NO: 22862
  chr2:145273332-145275926
  binary

SEQ ID NO: 39071 - DNA, 1051 bp, Homo sapiens; identical to SEQ ID NO: 25433
  chr2:145281217-145282268
  binary

SEQ ID NO: 39072 - DNA, 1792 bp, Homo sapiens; identical to SEQ ID NO: 27851
  chr2:149632592-149634384
  binary

SEQ ID NO: 39073 - DNA, 967 bp, Homo sapiens; identical to SEQ ID NO: 23187
  chr2:154334805-154335772
  hyper

SEQ ID NO: 39074 - DNA, 946 bp, Homo sapiens; identical to SEQ ID NO: 28940
  chr2:157176852-157177798
  hyper

SEQ ID NO: 39075 - DNA, 1836 bp, Homo sapiens
  chr2:168148871-168150707
  binary
cgtttatttggagggaagacggggaaggtccactctgcctacaactccgacatttctccgtgtgcctctttgctagctggggacacttcgtggctgattactatgaggagtggttcgaagcctaagaagtagtactcttttcagctgccaaagggagaaggacgggggcgctgtctggtgactgttcgcgtgattccttcaaggcggcgaccacctcctgggattcgctctccagccgcgccgttcgtactcgggtcccgcgacccctccccgctcccccctcgccccagcgatgccaagacgctgaaccgcagggacgaggctctggggacaaagtcaccccgcggcgccctttcctgccaagccgcgggctcctggcggtcagaaagcgccccaggcccacccctgcgggcccggctttccctcctcacctaaggctccggggccacgagtcccccatcctgcgcccctcccgcgcctcccccatcccaaaccccagcagcgtcgctgcctctcccggaaacaagcccgctgagcaaaggcggaggaaaaccttgggccttccgctctgattggtctccccccgccgagcggggcgaggcagcgattggctgccgggcgttgtcagtcgccgaggccagagccatcgccggggaagcgcagccgggctcgggtgcttcggctgccgccgcggctgctcggctagtgcagctgggcgagctcgcgcgggcgccgccgccgcctctgctgctgcccaccccgccgcgccgccggcgctgccggtcttgcaggcggccgccggggaggggcggccgagagagcggagcacgaggaggcgggggcggcagagaagtgatgctggcgccggggatcggggcagcggcagcggagcagcagcatcttcgggaccctggctgcagcgtccctgtggcccgcgcgccagcccagcggccggagaccacgcgccccgcgggtaaggttctgtccggcagcgcccgcgacgcccccgggacggctggcgtggtctttgggggttacgaggcgcgtggtggccggggcatcccgacgaaggtgttgggacccggactgcgtgtcccgacgctgggctgtgctactgcccgcgcccgtgcggctccagctggtgcgttctcccttccgcgctcacagactttgacagcgcggggatggcattgtgtgagtgtggatgtggatgcgtgtgtgcgcgcgcgcggcttggggcactttgcagcgagaacagtgggtcccctctgcgtggcccgacgtccttcaaggacccaagctgggctggagtgagtaggatgctgttggctcggcgggaggtagaacgcacggagcgcacgggaaagtccaccgtggctcgtaaagagccgagcaaattgaactttattgcggtgattaaaaggagctgtggacctggcgcgccaggggagaggcgcgttccacgaggctccccaaagtcccactttgccccggggacttcggaggggaagggaagagagggaaaagtaactgttggtccacattgctgaagaaaaggaggaaagagaagttgggggtgggggtgggggtggaggttactcttgggggagtggcgacttttaggtgtctgaagccccgcgtgggaggcttgctacacttttctggagcgcagacttgaggatggagagtcccactctgaggtactggtagcggctcctcctgcctggtggcggcgtagggcgcagcgggacagcttggtggaggcagagcggggctccgacgcccgacggcccggcgtccaggtggggccactgcctccccaggccgctttggccc

SEQ ID NO: 39076 - DNA, 181 bp, Homo sapiens; identical to SEQ ID NO: 24230
  chr2:170681727-170681908
  hypo

SEQ ID NO: 39077 - DNA, 855 bp, Homo sapiens; identical to SEQ ID NO: 24233
  chr2:175190730-175191585
  hyper

SEQ ID NO: 39078 - DNA, 1856 bp, Homo sapiens; identical to SEQ ID NO: 30136
  chr2:175200841-175202697
  binary

SEQ ID NO: 39079 - DNA, 1341 bp, Homo sapiens; identical to SEQ ID NO: 27856
  chr2:175546713-175548054
  binary

SEQ ID NO: 39080 - DNA, 1997 bp, Homo sapiens; identical to SEQ ID NO: 34647
  chr2:176944127-176946124
  binary

SEQ ID NO: 39081 - DNA, 1871 bp, Homo sapiens
  chr2:176956760-176958631
  binary
cgccgatgcctgtctttcatctgtttaagtctctgccgccagccccaagggcgcttcatgggcattttccgaacggacagcgtgtgtgtataggaagggtctgctccaatgcctcttacctgtgtgaaatgcctttgccgggtaccagtgcacaaggtagggcaaattagctcactcggatttggggtctagaagtcgactaactgagggattcagcaacaggataaaaaaatgggcctgttttcacatcattctgatcatctctgtccttcgtcttcattttgctgtgcaactcggggagccgaggagaggtggcaaaaacagcggttgccgagacaaggcgcaggccttggcgcccgcctcagtcgcagacagggcctgggatgggccgtcgcgcaatcaactcgtgggggtggctgcagcgcgtacgcctgggtcgggggggagggcgggaatgggaggtggaccctgcaaggggcaggagaggggtgggggccggagtgggtgggtccagccaggcctgggccgggagccaggctcccccgcgttcctacccccacgtggccgcgcgcagccaatggcacgcccccggcgggggccctcggggcgggaggcggccccccgaccggcccaggccccctcccaacctgaacttcgtttttataaacgtcccgcgatgagctaacctgttggagggcaggcgggccggaggcgggaggctcacagagggagagagggctagaggaagagggcgggagcgagcgaaccagagagaaaggagaggagggaggaggcgcgccgcgccatggtgtcctgcgcggggccagggccagggccggggccgggccaggccgggccatgagccgcgccgggagctgggacatggacgggctgcgggcagacggcgggggcgccggtggcgccccggcctcttcctcctcctcatcggtggcggcggcggcggcgtcaggccagtgccgcggctttctctccgcgcctgtgttcgccgggacgcattcggggcgggcggcggcggcggcagcggcggctgcggcggcggcggcggcagcctccggctttgcgtaccccgggacctctgagcgcacgggctcttcctcgtcgtcgtcctcttctgccgttgtagcggcgcgcccggaggctcccccagccaaagagtgcccagcacccacgcctgcagcggccgctgcagcgcccccgagcgctccagcgctgggctacggctaccacttcggcaacggctactacagctgccgtatgtcgcacggcgtgggcttacagcagaatgcgctcaagtcatcgccgcacgcctcgctgggaggctttcccgtggagaagtacatggacgtgtcaggcctggcgagcagcagcgtaccggccaacgaggtgccagcgcgagccaaggaggtatccttctaccagggctatacgagcccttaccagcacgtgcccggctatatcgacatggtgtccactttcggctccggggagcctcggcacgaggcctacatctccatggaggggtaccagtcctggacgctggctaacgggtggaacagccaggtgtactgcaccaaggaccagccacaggggtcccacttttggaaatcttcctttccaggtaggggcgatggagaaaagggaccgacacgagggagggggagagagaaggagaaaagaaaggactaagagtatgcgcccctacttgggagtgggagttgtgcctgtgctccacacgtgaccagggttaacccagtggaaatttgtccagttcgtgtgaaatctgtaaattcctcctctgatttcaactgcctccgtcactgccctttctttcctgtgtgcagcgcagacac

SEQ ID NO: 39082 - DNA, 2250 bp, Homo sapiens; identical to SEQ ID NO: 34650
  chr2:176993479-176995729
  hyper

SEQ ID NO: 39083 - DNA, 953 bp, Homo sapiens; identical to SEQ ID NO: 25441
  chr2:177001081-177002034
  hyper

SEQ ID NO: 39084 - DNA, 722 bp, Homo sapiens; identical to SEQ ID NO: 28956
  chr2:177004997-177005719
  hyper

SEQ ID NO: 39085 - DNA, 1050 bp, Homo sapiens; identical to SEQ ID NO: 30143
  chr2:177042492-177043542
  binary

SEQ ID NO: 39086 - DNA, 870 bp, Homo sapiens
  chr2:177052607-177053477
  binary
cggaggggaaaatctgctaaaccaccccacaaggcagaaactttatcaaaatctggcactacaacactggccctcatcacgccgccacaaattgcgagggatagaagaaagctgcaaagtcacgttaaaaggaagcctagtcaaaaagtgaaaattttgtcccgccctaggcacacagcactcacagcataagatgtagttccatgagtcctaggaaagggggaagaaaggaaaaaaccaaacatctgctctaggtttagaagagggataacatcagcgccaagcaaaccgaaagcgcagaggactcagaagaggggaagaggaataactttatctgtcctggaggtgggcgaagagcagtctccaccggccgcgcgtcacgctcccatttaaccttttccatgccgcgacgcccacactccgccctcgagggactagccccccccacgatccagagcagaagcggctcgccccgctgcatccacgggccctcacccaagcgtccagtcctgcctttctccccccacctcgcccaatacctgtccgagagcaggcgttctgccctctcgccccgcccttgcccaggcagcccccggtcgcgacggctctcctcggggctcgggggcgctgggcggcggccctgggctgctttggctaacttggctgcggggcaggcgcgaggagcggcgcgccgaccgggccgagcggagaggccgcccattggccggccagcgccacgtggccgcccccgccggtatattaggccactatttacctccggctcactcgccatgggttggagagggcagctcgggtagagagggctggcggagcggcgcagacggcggcagtcctgctcagcctctgccc

SEQ ID NO: 39087 - DNA, 867 bp, Homo sapiens
  chr2:177053482-177054349
  binary
cgtactccggccccggcctgcgccctcagaaaggtggggcccgaaccatgagctcctacctggagtacgtgtcatgcagcagcagcggcggggtcggcggcgacgtgctcagcttggcacccaagttctgccgctccgacgcccggcccgtggctctgcagcccgccttccctctgggcaacggcgacggcgccttcgtcagctgtctgcccctggccgccgcccgaccctcgccttcgcccccggccgcccccgcgcggccgtccgtaccgcctccggccgcgccccagtacgcgcagtgcaccctggagggggcctacgaacctggtgccgcacctgccgcggcagctgggggcgcggactacggcttcctggggtccgggccggcgtacgacttcccgggcgtgctggggcgggcggccgacgacggcgggtctcacgtccactacgccacctcggccgtcttctcgggcggcggctctttcctcctcagcggccaggtggattacgcggccttcggcgaacccggcccttttccggcttgtctcaaagcgtcagccgacggccaccctggtgctttccagaccgcatccccggccccaggcacctaccccaagtccgtctctcccgcctccggcctccctgccgccttcagcacgttcgagtggatgaaagtgaagaggaatgcctctaagaaaggtaagtccgcgggccttggatggggccacctggggttggggacggagcctcccccgcggaaatgcgctgggagcgtggtgtcgctgcctttccagacagcggtttgggttttgtggaggagacgcgttcccgggcgaattccatggagtctgcctcgagtacagattc

SEQ ID NO: 39088 - DNA, 995 bp, Homo sapiens
  chr2:177502170-177503165
  binary
cgcacccctctttacaaacctgagcggggctttcggggtaaggggaggcaagactttggtgggagctgctcgtcttcagcaaagcgagggccggctgcaaaggcgcaggctggcagttcgggtcatttcctgccgattccccattcccctcggagcagcttggagaggaagtcggacttcttttccaggcggagcctccacgatgggcgtgggcgcctcgtgcgtgggccgggggcctcgtgcgtgggcggggatcggggcctgggaaaaacgggaacccggtacccgcccgcgccctcgcgcgtcggccaggaacctcggccccatgcgggcgggccagcgcggccaggagggccgggaagaggggtccccggggccccggatgcgctgaactccggggaggggatgggcaggagagagagcacactcctggagccgcgacgtccaaacccggacgcacttgaacccgcagcgaggcccgtggctcgcggccttcggagagcacccgcgccccgcgcagaccggacgccggccttgcccgatcctcggcatccttcggcggggcggccagtcccagggcgctcgctgagggccacaccctggccccagagtttagcaccgccgcgggcagggcgctccgctcccggaccccgaatctgaaagcggagaccaagggctgcctgcggcaaagctcgacatacacttgattttcttccgatttggagaaaatgtcacgggcgagagcaaaaaaaaaaaaaaaaaaaaaaaaaaaaaccctaactgtaaatattatttggaggtgggcgagggcgcggcgtgcgcgcggcggcgggtggcgggcggcgcgggcgcccttgcggggattcccggtctctcagcgcgccctagtggacgccctgcctttcgctggctccccgtgctcgttacaatctgcaatatattatttcttccgaagtattgacaatgtgtgagactccagtaaccccggagctctc

SEQ ID NO: 39089 - DNA, 771 bp, Homo sapiens
  chr2:180725926-180726697
  hyper
cggggcttcgcgcagacgttctcccgcgatctgctgcagcccaggcggtggcggtggcggtagcagcggcggcggtggaggtggcgcgggcgacagctcggcccggcgcggcccctgaactgtccaactcttgcccgcgccgggcttaagcgcccggccgctgcccccgcgctgagcgcctgcgcaccgggcctcgcccaggtgaggggcgtgtgcccggagcccgctgggcgcgcccggcccggcccggccccgccgcacgcccgcccccctggcctggccgaggaccccggggtttggacgtgccaacgccactctcgcgcgccgaagctgtgacggtttactaagcagagacttgcgaggcacacagagagggaatgaggcggaaccgttcgggggctcgttgacactgcagagcctcccgcagcatcgctgccttaaatcccgcctttccaggcgtgcgcgcacagcgagccagaggaggctccgtcccgacctggggtcccccgcggtcctcagcccgggggctcgggtccccgaagagatccttggcaatggcagaggtcccaaagcctagatgccaagccccgcgatggggcggatgcttccaatattagtcaacccagagtgaaactctcttcttggagatcgtcagaccaactatttgtttttcctctttgaccacccctgggctagcagagcacagctagcagcttcggcatatttggcggagccgggaaggcccggagcgcaagaaggcatcgcagcctc

SEQ ID NO: 39090 - DNA, 1776 bp, Homo sapiens; identical to SEQ ID NO: 22868
  chr2:182321353-182323129
  binary

SEQ ID NO: 39091 - DNA, 1173 bp, Homo sapiens; identical to SEQ ID NO: 34657
  chr2:185462630-185463803
  binary

SEQ ID NO: 39092 - DNA, 1461 bp, Homo sapiens
  chr2:193058995-193060456
  binary
cgcgctagggtaggctggtctgtgctggatacgcgtgttcttctgcggagttaaagggtcggggacgggggttctggacttaccagagcaattccagccggtgggcgtttggcagtcacttaaggaggtagggaaagcagcgagcttcaccgggcgggctacgatgagtagcatgacgggcagcagcagcagccagcaaaagccctcgcaaagtgtccagctgctgcactgccgcggggactcccacagcaccatgactagttcgtgcaactctgcagcagcaaacggcttccgaggaacacaggatcgcgggggccgggcagcgggctactgagcatcccgcggacggcggcagcagaggcggcggcggtggcagtggcacccggcggggaagcagcagccaaacccgcgcatgatctcgagagtttcagcaacatccagggactgggctcagccccggagcgagagggtcgtccgctgagaagctgcgccggagacgcgggaagctgctgccataaggagggagctctgggaagccggaggacaggaggagacgggagtccaggggcagacgagtggagcccgaggaggcagggtggagggagagtcaaggcgccccgcagcccggcagccgcctctcgagctctgccgcccgcatccctctggcgtttgggaagcagcaggtcctcagcccgcccggggtcacgtgggaagaggcagtcgggctctgattggtggagcaggatgcaggtcccgggagggaggggtcgacgaggaggtgcaaggatgcaaggaggaggcggccgcggaagccacagatgggctcgctcgccaggcgctggcccgagtggggctaggcggggatggctcaaatgagaagctcgggcttcagggtgggctacccgcacactcatataccattcgcctcactctccgctccaggacgccccctaccgaaggcggggtccggactagcgcccctcttccgcgcgtgaccccgggccgcgagtgcgggccgcggctgggtggcgtctctccgagctggagatggtgggggcggaggtgtcagaggagcagcagcagcagggcagagaggggcgagtcggcgcgggagagggcgtcctgctggcgaccggcgctccagcgtgcgggagcgcgccgcctaggctgtagggggatgcaggctgggaatgtcgcggcggagaggccagggacgtttctctagggatttacaggaaagagggtgagaggcgatggtgttagaaccgctcttgccgacctggaagcaacagcagcatctcccacaagagcgtgcaaccccaaggctgctcgccgaggcagctcagccatcccggcaggcgctctccttccttctctcttctcccctctctcctcccaggccccccgcagctccgacccagcccaagcgttcgcaggtttgaatccctctcctcatcaccc

SEQ ID NO: 39093 - DNA, 862 bp, Homo sapiens; identical to SEQ ID NO: 23194
  chr2:19550023-19550885
  hyper

SEQ ID NO: 39094 - DNA, 1350 bp, Homo sapiens
  chr2:197457198-197458548
  binary
cgcgtcctcggaaacgtctacgtctaaatctgcagccccagtttgctccaggccccaagctccagcagaggatgttcacggcacattcccaaccaaaaaggaaatgaagcgtcctctccctcaactgatgctcaaatagaccccaaagtcccagtttccctggagaaccaaaccatccaacacatcctgggcagcggaaaccgaaatggcaaatgaatgaccgcgccggggcgcaagggaggaaaaacaaagccacctcccgccgtccgctacctgcggcgagggccgcgcgctcacctgggctttgcgcccgtcgccacaagctgcgggtggggacccggccgcggggcgggagggcgcccccaaagtcgcccggacccgcggccccggcgccctgcggccggtccgtgcgcgccgaggagaaagcaggcggccgggggcgccgccgcgcgttgcatgcagctcacggctgctgcggccgctgccacggagccgagagtctctgcgctgcagtccccgaccccgagaccgcgagaagcgcccggagagacgcggcgcaggggcagagcgcgctcggcgcgcccctcagcggctcttcccgccgccctccgcagcgggctgggtctcggctcgcctttgtgctggcatcttcctagctcccagcgacacccagagctctcgaggcggctccgcgccgccacccacccccgggttacgccacggcccccgcgcgacccgccgattgtgtcgagtcagcagcggcagcggggacgcgcgaagccatggctcccgcccgcgctcgggagggcgccgggggtcctgcgcctccgggaggtttgtggccgagcgcggcgcggccccgagcggccccgcagcgcccggctccccgccgctcgctctccaggcgccgacccgcctgcgtcgccaccctctcgccgctccctgccgccaccttcctcccgcccgggtgccgggcgtccgctccagccgcggtgccccggtccgcggagagcgaagagtccggcctcctcacctccagccgcgccggcgcccttcccgctagacgcttcggcggcatctgcccgcaccgccctgcgggacgctgggctgggagctggcggcacgtcggggaccggtggaagggaggcgggggcagaggacaggagggacagccagaccttggccagcgggacctccctgaggaaggtgcggaagaacggggcgggtgcggctgggcggaggacgagtcccgaggctgcggcggagcctgagttgctctccttctgcgaagtcgaaggacaggaggattcctagaggtgtcgcggagggtggaggagaccctctgaggtc

SEQ ID NO: 39095 - DNA, 688 bp, Homo sapiens
  chr2:198174658-198175346
  hyper
cgtagcccaccgcctgtgagtggaggctccgagccgacttcacctcctcctcagagggaccggcccgatccgaaagggcggtctccaggggtccccatcccgcaccacgcacacagcctggcgcaactaaagaggaagtcggatgtcacatccaacggataaataaagacagcccggccacacaagagccgcattctgggcaggactcctgctaggtttggggaggggtcccagtctgcgatcctttctccctcttcgtgcagcgtcctcctccccggggcccgggccggcggcgcccacgcaacgcggcgcggtgcgagtcccgagagcacctcgagcccccggccccctccccagccccgccgggcccgcggccgccgcactcccgcacgccggctgcccagcgcccacgggccctgccccagactcgggcgcgcagttccgacggcccagggcggggacggcgcggcggaggggagctgccgccgcgggctctcggaggcaccggcggccgcacacagtcctccccttcgccgcgagtaaacagctcgcgggcgcgctccagccgcgcccccatccccccgccgggctccgcgccgccccgcgcccgcgcgtcccgcccgccggcgccgccgcccgctacctggtcggtgagtttgagcactgccattcttccgctccttcgcgc

SEQ ID NO: 39096 - DNA, 1281 bp, Homo sapiens; identical to SEQ ID NO: 24240
  chr2:207139040-207140321
  binary

SEQ ID NO: 39097 - DNA, 1829 bp, Homo sapiens
  chr2:207307406-207309235
  binary
cgtggttgacaaacaacggatttcccaagatagctgccacacacttggtttctaatctctgtattgcttccccgccagaatgtcgaagtccttcccgaatatgcccagtcatactttctgaacttttgagcaaacaccgtccggcttcttgtgctttcctcaaagaccccaggcaccggcagggaggacacaggccggggcagagcgcccctgcgcgggggattcctgccactccgcgccagcctgcggcgcaaacgctcttctcagccgcagtcccacccgctgctggcaatctgaatgaggagccgcgctatttttacctccccggctgcaatcctttatatttacatgcaggaagcaaatatataagggattaagaaggagatgcgtggccttagtttatccagagcaggaagaggttggaataggagagggtatgtgaagtctggggtggtggaaaaggcaggtggacttcggctggttgttttctcccgatcatccctgtctctggcctggaaacccccgtactctctttcttctggcttatccgtgactgccggctccccctccaccgcccccatcttttgaggtaccacccgtcacctccgatgctgcttgggctgctgcatcactctgctgctttacccccttccccgccccccaacaaagcatgcgcagtgcgttccgggccaggcaacagcagcagcacagcatccagcaacagcatcagcacccgaagccccgctcgggcgcgctctcggggggcggggcgcacgcccgctccgcgcgtccccgcgccgctcgctcccgcgcgtccccgcgccgctcgctcccgcgcgccgcctcagcatcctcaggcccggcggcagcccccgcagtcgctgaagcggccgcgcccgccgggggagggagtagccgctggggaggctccaagttggcggagcggcgaggacccctggactcctctgcgtcccgccccgggagtggctgcgaggctaggcgagccgggaaagggggcgccgcccagccccgagccccgcgccccgtgccccgagcccggagccccctgcccgccgcggcaccatgcgcgccgagccggcgtgaccggctccgcccgcggccgccccgcagctagcccggcgctctcgccggccacacggagcggcgcccgggagctatgagccatgaagccgcccggcagcagctcgcggcagccgcccctggcgggctgcagccttgccggcgcttcctgcggcccccaacgcggccccgccggctcggtgcctgccagcgccccggcccgcacgccgccctgccgcctgcttctcgtccttctcctgctgcctccgctcgccgcctcgtcccggccccgcgcctggggggctgctgcgcccagcggtgggtatggccccgtgccctttgcgttggctttcccgcggggccctgcagaggaaagcgaagggcgcgcgggtccgtgtgctccgggcttgtccccggctcggcctttccttccctccctgcctgtctttccacccttctcgttcccaaacccccattcatcccagttcacttttggaagtccatttctgttgcattcgcgaaaaacccattccaattcttgttggttccactgggaggtgtttagtggatcctgggtccctcagcgatctctgtgcaacttgcggaggggcaaccagtggatgggaaatacagcgagggagcaagttgctacttgcgtggtggaaccttaatgtgaatgcggggaggatgtagtgataatagtggtaatgggctgtttcctcaaatttcgtatccggcgcattcagtgc

SEQ ID NO: 39098 - DNA, 517 bp, Homo sapiens; identical to SEQ ID NO: 26771
  chr2:208029816-208030333
  hyper

SEQ ID NO: 39099 - DNA, 1330 bp, Homo sapiens
  chr2:208030665-208031995
  hyper
cgctgttcgctcctaatgcaatctttgctctttattttgggaggttgcatttttttctctcgcgatcgcttctcttccccccccttcccttccctccccaccccccaccccatccttgctagtttgtagtcttccccctcccttttctcctcctcctgctcttccccctccccaaactccctccctccgttcggttctccgcgcagccgtgggatctcgaggagggcgtccattaggccgcgtgtgaccatgtaaggtaaacagggggctcatgaagtcactgaggaccaatggggagcccggagcagagcctggggcggggcttggccctggcggcgggcgcggattggcacgctgcggatctccctgctgccttacaaggcggtgcgaggcgagctatttttagagggctatataagggggctgaggcggccgcccggcggccgggcagcgcgagcgcaagggacagggagggtcgtggcgacactcgcgccagctcccgggacggctgggctcgggctggtcgccgacctccgaccctccactagatgcctggcagagcccggcgcgtccggagcccgcgcccctcagagggaaggggtcgcgcgtcgccgcggcggccctgaggctgacggtcgggaggtgaaaggccggagtgcggggtcaggacgcctcctggagggggcgcggcgcagggggccgcggggaagccgccgagggcgcggagcgggaaggaaggacagtggccaccccgcctccgcctgggcacggggcagggacccgcgcgaggcggtgccggggaggtcctcacgtactcaaaaacaagcagaaaaggcatccagggccccttcccgaactccccacgggctgccagggtgcagagaagaagcgcctgaggaggaagtgccacacaatgggagagaacaaaggggagcggagcgagaccgcggcctgcgcccgccccccgcttgcgcacagtccccgccccgccccgcgggcgccgccgccgccgccctccctcccgcgcctccttctgaccccgagcgagagacctggtcgggagtccggcggctagagttgattgcaaggggcctgttgctcgactgtgcgttaaagaggctagagggagcctaggtagacgtggggcgcaagctggagccggcagcttgcgagggggcctttacgtgatgaggctcaccatggggtctccagcgaggtgtctgcagagcttcgatggtgagaggaggaactcgatttctcgttttctggagttgggatgtagacatagagagatctgttacatctgagatgaaaaccctgcacaattcac

SEQ ID NO: 39100 - DNA, 747 bp, Homo sapiens
  chr2:20866721-20867468
  hyper
cgcttggcgagggtgggggcgtagcgctgcggtgggaggaggcggctccggccctggtctccactctaggccggggtggggggcgcatagcggccgccggagctttcagcagggggcgctgctccgggcgttgggcgggggtggggtgggccaggagggggggccgcgggctggccgcgcacacttcccccattattaaacactatgttcaaaaggcgccgggggacttcccggagccacggagcccgcgccgcccgcccgcccggcccacggagcccatggacctgagcgccgccgccgcgctgtgcctttggctgctgagcgcctgccgcccccgcgacgggctggaagcggccgccgtgctgcgagcggcgggggctgggccggtccggagcccagggggcggcggcggcggcggcggcggcgggcggactcttgcccaggctgcgggcgccgcggctgtcccggccgccgcggttccccgggcccgcgccgcgcgccgcgccgcgggctccggcttcaggaacggctcggtggtgccgcaccacttcatgatgtcgctttaccggagcctggccgggagggctccggccggggcagccgctgtctccgcctcgggccatggtcgcgcggacacgatcaccggcttcacagaccaggcgacccaaggtacttacgcctcttctgtgcccgcccatcccgtcaggtcctgggctgagaccagccccggagccgtgccgcagctcc

SEQ ID NO: 39101 - DNA, 323 bp, Homo sapiens; identical to SEQ ID NO: 21169
  chr2:208696085-208696408
  hypo

SEQ ID NO: 39102 - DNA, 1600 bp, Homo sapiens; identical to SEQ ID NO: 27862
  chr2:225906006-225907606
  binary

SEQ ID NO: 39103 - DNA, 888 bp, Homo sapiens
  chr2:230932495-230933383
  hyper
cgaaatggccgtccccggtctctcaccccatttcagcctctcttgaggagcctcaatcggaagcgctaagggggcccagcctctgcgcgccctgggtgcgggatcgtgcccgcggggtccggcctcgcgccccacccttcgagcgcccgcccccacccgcgctcggtgctcccgctcccttggcaccccgagaccacatccccacttcgggcaccccgcatccctcggcgcgttcggaagccagcagcccaccggggaagctgggccggctgcagcaccacagcctgtgcagagaggcatccgcaccccgcgaagtccctaggcgcagccccgggtcccccgctctgcgcctcatcactgtccagttcgagtcccaaacgggcctagagagcagccgggcagcgaggctgggctccgggcagaacgcgcttctccagccggacgggggtgcccaggatgacgctcgcggggccccggccagcttgagcagcaaggcgcgcgtccccaagctccgcctggcggtctgccctgaaccgccggttaccctgcccgcccgcagctcccaagcccccgcggcggccttggcactaccacctgccccggcacagtctcgccctccaccgcccgggcagcctttcccgagcctgccttgggctggggctgccccttcccgggggtccctgggggtgcagcggccatctgaaacctaggctccgatgcccccggcgtcgctccattccccaggcccgcggcgcgcgcggcctcggatactcaccgcccgaggcccgctgggctgcggcctcactcggctccacgcccggatcctcgaacttgctgctctgcttggagccccctgagctgctgggtgtagagatttgttgcaatgtc

SEQ ID NO: 39104 - DNA, 1262 bp, Homo sapiens; identical to SEQ ID NO: 32764
  chr2:232790830-232792092
  hyper

SEQ ID NO: 39105 - DNA, 224 bp, Homo sapiens; identical to SEQ ID NO: 27870
  chr2:241157285-241157509
  hypo

SEQ ID NO: 39106 - DNA, 642 bp, Homo sapiens; identical to SEQ ID NO: 27873
  chr2:241864772-241865414
  hypo

SEQ ID NO: 39107 - DNA, 373 bp, Homo sapiens; identical to SEQ ID NO: 27874
  chr2:242436371-242436744
  hypo

SEQ ID NO: 39108 - DNA, 644 bp, Homo sapiens; identical to SEQ ID NO: 31634
  chr2:242523762-242524406
  hypo

SEQ ID NO: 39109 - DNA, 747 bp, Homo sapiens; identical to SEQ ID NO: 30165
  chr2:25391009-25391756
  binary

SEQ ID NO: 39110 - DNA, 771 bp, Homo sapiens; identical to SEQ ID NO: 27877
  chr2:27484883-27485654
  binary

SEQ ID NO: 39111 - DNA, 1182 bp, Homo sapiens; identical to SEQ ID NO: 27879
  chr2:29337909-29339091
  binary

SEQ ID NO: 39112 - DNA, 1550 bp, Homo sapiens; identical to SEQ ID NO: 27881
  chr2:31360210-31361760
  binary

SEQ ID NO: 39113 - DNA, 835 bp, Homo sapiens; identical to SEQ ID NO: 27882
  chr2:31456697-31457532
  hyper

SEQ ID NO: 39114 - DNA, 914 bp, Homo sapiens; identical to SEQ ID NO: 24265
  chr2:42720186-42721100
  binary

SEQ ID NO: 39115 - DNA, 974 bp, Homo sapiens; identical to SEQ ID NO: 27888
  chr2:47796765-47797739
  binary

SEQ ID NO: 39116 - DNA, 1479 bp, Homo sapiens; identical to SEQ ID NO: 34684
  chr2:47797745-47799224
  binary

SEQ ID NO: 39117 - DNA, 914 bp, Homo sapiens
  chr2:56410764-56411678
  hyper
cgatccctccaaatacgaagcacctcgcatttgggtcagcagctgtttcccctgcctggtgacaaggccggtgtgcagagggcagaggagggagcttcttccgccacacggtggcgcgcgcgagcctcccaaagaccgggcggccacagctcctcaccttctccccattccagccccacccgcccgggcgcagaaagagccgcgcccccagccctcccgggcaggacagccgggagcgcacctcgagggcccgggcagcggtcgagtggcagctgcgtccagcccatgcgggagctgctgcgggttacgggtggccccagctccaggctcctcctccagccggtcccccaccctccaccccttctcgactccgctctgcaaatcgaaggctttccggagcagcctaggagcggccgcgggcgcagcgaaggcggcaggaggagcgcagcagccttcgggcagccgcggcggcgtcgctagagcagccggggaggcgccgcggtgcccggcgcgccctccaagctaggagaggggagaagccgggggctgcagctgggcaagggggaggaaagtgcgtgtgcgtgcacgcctgtgtgcagggcagagagtgcggggggcgacagtctcggcttagggcggaggagagggcaggggaacggcggtgcagctcccccgctgtccccgaggatttcccgcggcagccccgggctccccagtgcccctcaccatggacttgcgcggagttgggacgggcctcggcagcagcaagcggctggctgccgggccctgggggagcgcgggcgcgcgcgcggggatggcgaggtaggatggccacccagcgcgacccccgccgccccaacccagcggcccctgggcggtgccgctgactcgccggagcgcacaggggtgtgggc

SEQ ID NO: 39118 - DNA, 1473 bp, Homo sapiens; identical to SEQ ID NO: 34689
  chr2:63285949-63287422
  hyper

SEQ ID NO: 39119 - DNA, 953 bp, Homo sapiens; identical to SEQ ID NO: 27889
  chr2:66652787-66653740
  hyper

SEQ ID NO: 39120 - DNA, 126 bp, Homo sapiens; identical to SEQ ID NO: 24274
  chr2:67626117-67626243
  hypo

SEQ ID NO: 39121 - DNA, 1118 bp, Homo sapiens; identical to SEQ ID NO: 27891
  chr2:68546231-68547349
  binary

SEQ ID NO: 39122 - DNA, 1109 bp, Homo sapiens; identical to SEQ ID NO: 34692
  chr2:71453505-71454614
  hyper

SEQ ID NO: 39123 - DNA, 889 bp, Homo sapiens
  chr2:71503428-71504317
  binary
cgaagaaattattagtcttaaaaaggacagaaagactcccgcaaaagcagcagcgcgtgccgaacaccttaggcctcacagaccttctatttgaggaatgtgctcccccaatcccagaccgctcctggtggggcgggcgcgagcgcaggaccgcggagcctgctgcgttgctcggctgcaggggaggagctgggccccgcccccggcttcccgcgctccgcgtccattggctggcctcgggggtgggcgggtcccgccgcacggagtcctgcgccttgaggctcaagcggcggcgtgcaaggcgtgtgaggcgcgtagagagccgcgcgcgccgtctgcgatgccccgggacggcgttcctgccgggaataccaccccggcggcagcccaggctgccgcgcagagcccggattccgcgactgccggggcaccgcaggttttggactcgctgaagcggtgagctctgcctttgccctatatgccgcgctctcgcccgtgctctggggcagttggcagtgggtgggcaggaaggggcgggccggcagggcgtcgcacgttggcgtccccgcgtcgcgggaatggggttcggattccccccgtgaatgtcattccccaggctaccggtctttagcgctaagttgcatgggctggtgtgccagtcggtcagcgaatagcggcagaacgcctggccgggccggcgttttccgggacactcgtttcggcctcgcagtggcagcgcctcctgcgagcctagaccggctcagtggacgcgccgcgctgtgcacgcgggtctggggagacggcggttcttgaatgatccctcacactgcagggtatctgggagcggtggattgagggggcacaacgtggcttctgtgtcggtgaaatc

SEQ ID NO: 39124 - DNA, 814 bp, Homo sapiens; identical to SEQ ID NO: 26803
  chr2:73518220-73519034
  hyper

SEQ ID NO: 39125 - DNA, 973 bp, Homo sapiens
  chr2:74741301-74742274
  binary
cggaggcagcccaaaggcggaggccgcccaaaggcggaggccagcaaggatggaggcgcggtgagcatctccgctgactcagcggcccatgctcgggcccctcccgcgctgagcctggctcctaacaccctggccccctgtccccctccccgcacatctccgccagccagccttccccctgcgcttggcgcaaacaggcgtcccttcccctttaactgctgggccccgcccctgccctacccccagcccccactacccacccgggccgatccgtcagtcactgccccagccggagctggccaaccctctccacccgggacttgggcagcggcgccggcagcccagcgtctatttgcgcttaagagccagcaaggaagctccaggggccccagctggccgtgctcccccgggatgcaagtccctgcgctgacgcccggcagcggctggcacgggcgcggctgctccgggtgcacagggatgctgctgtttcggggaccccggcgccctgccttggccagccccgcgggcccctgaggccactctccggagcgcgccgccgctgggcttctggcgctgcctgaggcatcctccccaaccaccgaacctccggcggttctcctcggcccagaccgatggagccggggatgctgggtccacacaacctcccacaccacgagccaatcagcttcggcatcgatcagatcctgagcggccccgaaaccccagggggcggtctaggcctgggtcgcgggggccagggtcatggggagaatggggcgttctcgggtggataccacggagcctcgggctacggtcccgccggctcacttgccccgctgcccggcagctccggagtgggcccaggcggcgtgatccgcgtccctgcgcaccgcccgctgcctgtgccgccgcccgctgggggggcgcctgcagtgcctgggccctcgggtttgggcggcgccggaggcctagc

SEQ ID NO: 39126 - DNA, 955 bp, Homo sapiens; identical to SEQ ID NO: 24283
  chr2:74742812-74743767
  hyper

SEQ ID NO: 39127 - DNA, 769 bp, Homo sapiens
  chr2:87017790-87018559
  binary
cggcctggcggcgtctgcaggcggcaagcagcgaggctgagcccgcagtcccgcgccccccgccccccgcccgccccatcccctgccttcccgggcgtctcaaactcacggagcagcaaggccagcggcaggagcaaggcggtcactggtaaggccatgacgcgctccccaggacgctgcttggctcgaagctcgggcgcgaggggaggcgcgcgggagccggtggggcgccgaggggggaaagttgcgcccttcggccggcccggagcctgatttcgcatttggaggatgtgatgtcacccgaagcccccgccgaggagagtcaccctccttttcgcggttgtcgccttccagcccggcgaggaggctggggcccgtgaatagggccgtcgaggcagcctggccaggcaactgggggcagctgaaaactgcgggtttggggatgaggaaaagggcttggaaatagtccttggaaatggttgtcttgtgagagtgacagagtgggtgaagggagaccaaagatttcaagaagtgagggcgagagtaggcagcaaaggaggggagtgtcccttcctttgccttcactaaaggcgtctcttgtactgtcaccttgggactttttattggcaaaatgggcactgagggctgaaaaggaagaggaactagcgacctgcccgcttctgaggaactcgctagagcagccccagttttcaccgaggaaggaccctctcccttcccccaggagatttccatgagagcggcagcagcc

SEQ ID NO: 39128 - DNA, 1736 bp, Homo sapiens; identical to SEQ ID NO: 36648
  chr2:88751286-88753022
  binary

SEQ ID NO: 39129 - DNA, 1211 bp, Homo sapiens; identical to SEQ ID NO: 24292
  chr20:1783336-1784547
  binary

SEQ ID NO: 39130 - DNA, 1233 bp, Homo sapiens
  chr20:1874963-1876196
  hyper
cggggagcagccgcgcggccggagtccggaggcgaggggaggtcggccgcaacttccccggtccaccttaagaggacgatgtagccagctcgcagcgctgaccttagaaaaacaagtttgcgcaaagtggagcggggacccggcctctgggcagccccggcggcgcttccagtgccttccagccctcgcgggcggcgcaggtccgggcccggcagggacggggaggggcagagcgggaccggtcggggctggggaccagccgcgcgggcttctgaacgggcacgctgtcggagccggaggctcgtctagtcccgagccccagcgggccgcggcggctcgcggggccgccttcccgggacagcagccggggcccgggcgccggcgcgggggaggacgctgccctccccggccgggcgcgcagctcgcagccctcgctccctcccccggggcgcgcaggcgggcgctcgctcgcagagaaggtgccggcggggccggagccccgaagcctccccgggcggcgggaagacgggaggaggggaaagggaaggagggagggggtcgggctgccgggagggcgggggcagcggccgggactgcgggccgggagcgagcccagccgcccgcgccgtgtggagcccgggcggggcaggtgggcagcggcgggggcggctccgcgcggccgggctcggccgtgctgcccctcgcccctgctcgcgcggtcctctctcccgcgcggtctgtcggtctgcgcgccgcctcgctcctcgctcctcgctctccccctctttctccccctctcgcctctccgtgtctctggctctctgcctggctcccttgggtctgtttctctctcctgccgcctctctctggccgcccctggctttatttctcgcgcgcttggggtctctcccagtctccgtctctccatttctcctggggggcggggagggggggtctccaaaaaccgcggcggcggcggcggccgctccaggcgcccgttccggagtcggggggaggcccagccgggaggggggaagggggggagccttagtcatttccccgctccagcctgctcccgcccgagcgcgcactcacggccgctctccctcctcgctccgcagccgcggcccatggagcccgccggcccggcccccggccgcctcgggccgctgctctgcctgctgctcgccgcgtcctgcgcctggtcaggtaagcacccccccgctccccacc

SEQ ID NO: 39131 - DNA, 1486 bp, Homo sapiens; identical to SEQ ID NO: 31684
  chr20:20348541-20350027
  binary

SEQ ID NO: 39132 - DNA, 794 bp, Homo sapiens; identical to SEQ ID NO: 27902
  chr20:21086501-21087295
  binary

SEQ ID NO: 39133 - DNA, 766 bp, Homo sapiens; identical to SEQ ID NO: 30221
  chr20:2780877-2781643
  hyper

SEQ ID NO: 39134 - DNA, 975 bp, Homo sapiens; identical to SEQ ID NO: 34724
  chr20:30639425-30640400
  binary

SEQ ID NO: 39135 - DNA, 1585 bp, Homo sapiens; identical to SEQ ID NO: 24301
  chr20:34188561-34190146
  hyper

SEQ ID NO: 39136 - DNA, 488 bp, Homo sapiens; identical to SEQ ID NO: 27916
  chr20:36531527-36532015
  hyper

SEQ ID NO: 39137 - DNA, 790 bp, Homo sapiens; identical to SEQ ID NO: 22883
  chr20:37302417-37303207
  binary

SEQ ID NO: 39138 - DNA, 2195 bp, Homo sapiens; identical to SEQ ID NO: 25521
  chr20:37433723-37435918
  binary

SEQ ID NO: 39139 - DNA, 1992 bp, Homo sapiens
  chr20:39316787-39318779
  binary
cgtccttggtgaagccccgcaggtggcggttcagctcgcgcacggacatggacacgagctggtcgtcggagaagcggtcctccacgctgccgttgccgcccgccgccgtcgccgaggccgtcgcgtgcggcccgggcccggggtggctagtgggcagctgttgcgccgggctagcggcgctggacggcggcggcgacgcttggtgatgatggtgatggtgcgggtgagcgtgcgggcccagctcgtcgtgggccacgccggcgcccgggtacgcgtggtgcgggtgagggtggtggtgatggtggtggtggtgagcgccgcgaaagctgtcgaagctttgcagcggctgtggcactgggtgcgagccgatgagcgcttccaccgcgtcctcgggcgtcaggttgagcgcctcggggttcatctgctggtagttgctcgccatccagtacagatcctcgaggtgtgtcttctgttcggtcgggctgaagctgggcgacgagggcacggagctacacggagtgctgagcggtgtggaggacaccgagccggctggctgcaggcgtgtgcagggcctgcccggacgctccgcgcgccccagtggctccttcttcacgtcgaacttgagcaggtcgaagtcgttgacatactccatggccagcgggctggtgggcagctctggccccatgctcagctccgcggccatcgctgaagcgaggcgcagccgccgctgccgcccgggaaactttgcggccggccggagcgcgccgagccaagcgcgggggggaagagcggagaagagctggggaggcggggagcgagggcgcagcgggccggggccgccggccaagcctttgtctggggacgcggcggcgcgccggagagtcccgaggctgcctgcaccgccccagagctctgggctgtgcccgcgcagggaccgggccgggtagagtcgggcggggtggagaggcaagcggagcgcgcggtggggctgaggggaggcgtggggcgagtgcccgttgctcgctctctagctctcttgctcttacgctctctcgctcgcagccgctcgcagctcggcggtgcagctgtgctggatccggcggcgccgcagccttttatcgcctcctgatgtcactggggtgcgggggcccgggcggcccggtgcgcgggccaatagctgcacggcctccgcggcccagcggcgcagggcggggcgcgcctgacagctcccccgccccccgcgtcagctgactggcggcccgagcggccccggagcggcggaggcctggcggagcgctggagcggagtgggacggccagcctgggcccacccccgtaccctgcaggtcccggcccacgcacgctcgcctggagtgcgcgccccacctctaggccaaatcaccgctttcccctcctcgcgcactctcctccctcagttccctttgcaccccacccccatcccgtgtcacccccaaggaggctcagaatgagcgccgggacaacgcctcctgggccctttgttcccaagcggcccccgcccagtgggcgacgctctgtgtgtcctcgcggcttctggccgtgtgtgtcgtgcgttcctgtttctggagatctgcgcgtatttgtatgttggggagggcgggctcgaggctccgagagttgtgttcagacccaactcttaacctcaggggacctttctcaggccaagcgagggcccctcctggcgggtgcagtcgcagagccctgaggttcgactccactggccccgccgctccccgcgttcaccccaccgcacaatgttcacagtgaaggcgacgggaaaagcagcagcccaaaggctctgaattcctcttccccgccacacgcacggaatcctgagcccccggagcctcggggccgaggccggcccgggacggtgctccgagtagctctccactgctggggagccggccctgtttttgtttgaacgttttgtaacgattaagcagatcccggc

SEQ ID NO: 39140 - DNA, 897 bp, Homo sapiens
  chr20:39994949-39995846
  binary
cgcctgggcaggggctcggccccgggcgccgccccctctgtgcagcggcctcggggtgcccggggcctcgacgccccccgcgggtgcgggcaggtgggagcggcgacgcgcgcgggcccatccctccctcttcccgcccgccgcccgcccgcgcttacttgtgcggccccgggcgcagccgcgggcgccatcccgtcgtgtagagactgtagcgggaggcaccgggcggcgcaggccgcgccaggagcggggtgcccctggcctgcgcccccgagagcagcgccgcgacggcgcacagccagacgagcaggcggcggcggcccatagcggcccccgcgcctctgcccggccccgcgcggtgccccccgccgggtgtccgcctgcagcgccgcgccgcccccgccgctggtcggcccgggtcccgccccgagggtcccggggtccccttcggcccccgagctcgctggcccggccgcctggcgcttcgcggcggctgcgtcccgcggagtggccggcgctgctagcggctggggccgcggaggggaggcgggaggcgggctctttgcggattagcataaacttggggccgcgccgctcgccgccgccagcccctcgccccagctccgagcggacggccgaggagccgcctgcgaacaggaggttccaaagggagcagccccaggtggcaggggcgcaggccgccgcgccctgggaggccccccgagcacaccagccactctgtcgcctgcgggcacggggcgagacgcagagaagcggacccctgaggccagcctgggcgtggactttccaggagtcgtccaccctcaggatacgcttgtcttcagagtccgtgtgaacccgggaactgctctccagggctctggagccgagatggcc

SEQ ID NO: 39141 - DNA, 1242 bp, Homo sapiens; identical to SEQ ID NO: 31708
  chr20:400915-402157
  hypo

SEQ ID NO: 39142 - DNA, 957 bp, Homo sapiens; identical to SEQ ID NO: 26833
  chr20:42543097-42544054
  hyper

SEQ ID NO: 39143 - DNA, 321 bp, Homo sapiens; identical to SEQ ID NO: 26837
  chr20:44650187-44650508
  hyper

SEQ ID NO: 39144 - DNA, 387 bp, Homo sapiens; identical to SEQ ID NO: 24308
  chr20:45337620-45338007
  hypo

SEQ ID NO: 39145 - DNA, 1508 bp, Homo sapiens; identical to SEQ ID NO: 27931
  chr20:47443693-47445201
  binary

SEQ ID NO: 39146 - DNA, 1409 bp, Homo sapiens; identical to SEQ ID NO: 27933
  chr20:4803013-4804422
  binary

SEQ ID NO: 39147 - DNA, 391 bp, Homo sapiens; identical to SEQ ID NO: 27935
  chr20:49218479-49218870
  hypo

SEQ ID NO: 39148 - DNA, 880 bp, Homo sapiens
  chr20:49638966-49639846
  binary
cggtgggggtgaaggggggctccatactgtgcctaaggatacagtgaatgagcaagtgacacacactcccccaccccaatccctaactctccttcctcccaggatcgggggagaaacctcggcccacagccgggatgcgcccccgccggggtcaccgcggcggcgaacgtcccggacttcgcatcccggtgaccccttgggatgaaccgaagccggacccgcaccttggccgtaacaagcgcgctccacgccgccacgcaccagcggtgactcccgagtcctctgtcgccctggcctccccgcaggcgggtttcgaggcccccgcagggagttcagggccacggccacgtgcagccgcccccgagcccgagtttgcaggctcggggtccggttcgcgctttggtggcgcccggcgaggctgcagcgcgcaaagttcccacctcaagttcccgtcgcggcgtccccgcctcggagttggcccggccgcggcttccgttccccccggctgcccacgggtccggggcgaggacgcgagaggggcctggaagtcgcccggggagcccgctctgcctcccggagccgccgccaaacttcggtcccggggcccggctcagctcccgccctcggagccacggccgccccgtctctgcctcccggtccccgccgggctccgagtgcgccgggagcgcggcgcagcagccgccgagggagggagcgaggcaggaggcgggacggagggaggggactgagcgcggggcggggagaaggggcgggcagccgaaagcgcagcgcctggcctcgcctcgcttcgggacagtggcagcggcgccaccgtcacggggcgtccaggcgcccaatcgggaccccgcaccttggatcc

SEQ ID NO: 39149 - DNA, 976 bp, Homo sapiens
  chr20:55205893-55206869
  binary
cgccccgggctctggctccttcgccccgggctccggccacggacttttctggcccaagacccagggttcggacttggcgcctccaagcgcctcgggcttgggagcagcgcctagaccttcgccgccgggctttgagaactcgttcccccaggtctttcaccagactctcctccctccccgcactctttgcttacaacgaaatcctcggggcgcattgcccccgggtaccttccgaccctgggcaagccccgccgggcggggtgcggttggtcccccggggccctctgcgtagcccggcgatgccggccagttcgcagtagcggggtttcgcactaacggggtctcctgtttttttttttccctccaggatcgccacgacgggagcagcaatgggaatccgcgggtcccccacctctcctccgccgggcagcacctctacagccccgcgccacccctctcccacactggagtcgccgaatatcagccgccaccctactttccccctccctaccagcagctggcctactcccagtcggccgacccctactcgcatctgggggaagcgtacgccgccgccatcaaccccctgcaccagccggcgcccacaggcagccagcagcaggcctggcccggccgccagagccaggagggagcggggctgccctcgcaccacgggcgcccggccggcctactgccccacctctccgggctggaggcgggcgcggtgagcgcccgcagggatgcctaccgccgctccgacctgctgctgccccacgcacacgccctggatgccgcgggcctggccgagaacctggggctccacgacatgcctcaccagatggacgaggtgcaggtgagcggcgctgcggctcctgaccggacctgttcaccctacggccttctgcccccaccccgcactcctctaggctcccccgaacttaagggaattttgtcctctctcccccagaatgtcgac

SEQ ID NO: 39150 - DNA, 244 bp, Homo sapiens; identical to SEQ ID NO: 27946
  chr20:60477321-60477565
  hypo

SEQ ID NO: 39151 - DNA, 496 bp, Homo sapiens; identical to SEQ ID NO: 24322
  chr20:60502550-60503046
  hypo

SEQ ID NO: 39152 - DNA, 691 bp, Homo sapiens; identical to SEQ ID NO: 31732
  chr20:61505866-61506557
  hypo

SEQ ID NO: 39153 - DNA, 988 bp, Homo sapiens; identical to SEQ ID NO: 30257
  chr20:61809599-61810587
  binary

SEQ ID NO: 39154 - DNA, 1018 bp, Homo sapiens; identical to SEQ ID NO: 27957
  chr20:62694227-62695245
  binary

SEQ ID NO: 39155 - DNA, 925 bp, Homo sapiens; identical to SEQ ID NO: 26861
  chr20:62733396-62734321
  binary

SEQ ID NO: 39156 - DNA, 1443 bp, Homo sapiens; identical to SEQ ID NO: 26865
  chr21:27011435-27012878
  binary

SEQ ID NO: 39157 - DNA, 1802 bp, Homo sapiens
  chr21:33244741-33246543
  hyper
cgaagagaggcgagcgccggtccacctcctgcaatcacaggcatcatttcaatggaaggcaaagaaggtgtaagctacaagcagaggcagcaaacgccctggttcctacattgctgctgctactattactgctgtggctgcgcctcctccaacacagccaaccaggctgcgtgcgagcccgggcagacgcctggccgcctccccaccctttcttccagccatccatctatccttccacccccggtccagggggccctactgtgtggcggactcagggccgggcacgcaacccgactcacagtccacggagttcgagagccttcccccttccccccgccccgggtgggtgcggccagtgggggatttcaccgccgaaaggtccagaaaacccaagcccagaatccgggcaagaggcgcagccggaggcggcccgacctgggcggcccgggagcgcgcgcctccgaggccgcgcaggttctccctgtctggcgctcaggtggcttctccgtccactccgccgctcccctccccgggccctcccctctccagcgagggtcgagtttgactgtggcgcgcggggaaggaggggctactagggatttgaaagtgcacgggctgcggagtggagctcgcatctgttcccgccgcccgcgagcggattaaatttctgcaaattcaaactgaatggggctttcttctgctgccttccagagggcgccggcagcccgccgcgcgcttctctccggcgggagcggccgcccagcgcacggctaggagcgatcgcgggagcccgacccaagcccgtgcgggccagacggcggcggcgaggcggaggctgcggaggcacccgggctcccggacccaggcacccggaccccgggacccaggcgccgccggaccgcgccccaccccgcgcgcccgagcagggcgactgtcattagcttcctggacgggacccggggcgggatcctggtgtcctgaaaggggcccgggcgaccctaagaggaagaacttttgggggcggggtccccggtcccgcgtcccctgggcagccgctattgtctacgcgcctcgctgggcggcgcggggggcgtgatcgcggcggccccgggctctgggtgcggagacccaggcggggctgggcccagggcggcggcgggagaagccggggaagccgaagagcctggggaggaggagctgcgagcgcgggagacgagcaggagccgcgcgggccgcggcgagcgcgatgccggcggcggcgggggacgggctcctgggggagccggcggcgcctgggggcggcggcggcgcggaggacgcggccaggcccgcggcggcctgcgagggaagtttcctgcctgcctgggtgagcggcgtgccccgcgagcggctccgcgacttccagcaccacaagcgcgtgggcaactacctcatcggcagcaggaagctgggcgagggctcctttgccaaggtgcgcgaggggctgcacgtgctgaccggggagaaggtgagtctcccgggcgccgtggggctggggcacaggggcgggagtcggcggccaggaccccgcggggagcactgcactgggagtcccagtgtgcagtcccgggccaagcgccttccccctccgcccggctttcctgttgggttaaaacgcgcgctcagcatctcgcagcctttcccgaaggcggcctgcggtccgctgcccgggggttgggggcttgggaggggacggccttgccccgggaagcgtcccgcgcggccgttctgctcgtggaagggcgccgcctggcgacactagc

SEQ ID NO: 39158 - DNA, 990 bp, Homo sapiens; identical to SEQ ID NO: 29047
  chr21:38119724-38120714
  hyper

SEQ ID NO: 39159 - DNA, 1433 bp, Homo sapiens
  chr21:44494624-44496057
  binary
cgccgccgtgagcggagcagcaccttcctccgcgggtcgcgggagtcacctacgggaagggactctccgtctggcacaggccctgtctggcctggggcgcgcatgctccgccgccgaatcttccagaaagccgtggacccgaggccccggcagacgcaggcggcccagcgccttgcttttggcccctcgcctcgccctggagccctctctcgcaaggtaagggactgccgggaacgcagatcgcaagccgtcggggctctgtagaactcagaggcgctcggcggaaagctcgccaggcgacccagacccgaacccgcgggctccccaagacaacagcgccgggcggccggatgcacgtgcgtcccgggaaggcgggttcagctggcatcgcctggccggttccgttcgctccttaaaccacaagacccccttggggtcacgacgttcccggggcacccctgcactcgcgcgccagcactcccggaggggcctggggaaggccacgcgcacggagagcgggaaactcctctaggtttccaggtgggagatccagaccctactgagacccggaaaccgccggccactccgcctccggaagcgacactttgggacaaagctggggacaagtaagcccagaagatcctcgggaagccgagaatttcgcgctccgctctcccacccacgctccgcctcccgcttgcatcctacagctcagctgcggtctcgcctggggctcagggaagtgaggtcccaggaaaacctccatcccccgaacgcaacctgggcagagccccgcgtccctcccccagcgggcacccacctcgcgtgccgcccgcgcaacgacagcgtttaccgccaccccacacggtccgccaaaaagggcgatttgcaaacagccatttcccatccacaatgcagcgaactcaatgctgggcaccgaaacgtgcatctcccccggattcccaccccgcgtccctgctccacgctccaggactcgccgccagtggggtccactccgccggcgcgggggctggggtgggagcccggggccacgtgcacggccagcccccatcttctgggcggtcaagaccgcaggcgtgggcgccggtggggcgggggtcttgggagaccctgtctcgccgcctttcggtgcagatgatgcaactctgggcggaggcgcggagagggaaaccgggacccagttgagatcctctgtccagagaggggagcgagtctcggtggggccggatctcacctggacggatacatggaaaagaggggcgagcggctgccccgactgcggcgaggcggagacggcgaccccggggtggcggcctcgcggggacccacggcgaggggagcaggcgggcggtgattggcggagaggcgggggcggaggccggcgccggccaatgtctcgtggcagagcaccc

SEQ ID NO: 39160 - DNA, 526 bp, Homo sapiens; identical to SEQ ID NO: 24367
  chr21:47565081-47565607
  hypo

SEQ ID NO: 39161 - DNA, 648 bp, Homo sapiens; identical to SEQ ID NO: 24368
  chr21:47602441-47603089
  hypo

SEQ ID NO: 39162 - DNA, 271 bp, Homo sapiens; identical to SEQ ID NO: 24369
  chr21:47746193-47746464
  hypo

SEQ ID NO: 39163 - DNA, 1305 bp, Homo sapiens
  chr22:17849427-17850732
  binary
cgcgctacagcagttagcatttctaaagcacacactccaacacccttcggccgtagcacattcaatccctccgccggggcgtgggggtctcctcccctccgagcacagtccccggcttcccgatttcctctgccccatccccccgccttccaagcacattgtgctcactcttccaggcagctctttcagcggccgggcagtagcagggttccgagcccgtcttctccggggcggtcacacgtgtccattccctggggttggggatcgctcttcccgcttggctgctgattggtgcctccccctaccccacccttcccgccgctctccagcctccatcctacttcgttccagctcaatcagccccaccgccttcttccctcggagaaaaaagccacttcagagctccttgggcgccgttctcggctggaataaaagcgttaagaaacaggtggaaagcacttcacttctctaggcttcatatttctagggtggacagcccgctcctgctccggctctgccctcggcatcaataataactgaactcccacacgtgcacgtttctgtctctagcccgaccgaaaggaccaccccgcgggccctttaaaaggacgcgaccactcaggccaagtgggggtgggagagctcctggccgtcctcccttgggaaagtgcttcaactccccagtcccaaagtcctggagggcggagggcgcctcgtgagagttctcgggggtgcggcccgcgccccctgggtcctgcggatctgggcccgggggcgcgcgccccgcccctccccctccctggcggtgcagctgtccgggcgggggtggggcgggggccggggcccgcgtgggattaactaggaccggggcgggagtcgaccgcggccggcggggagggctagccccgctctggcgggcgggcgcgtggcaggggctcccggaggccccgagctcccgggaggcgctccggccaacttcgggccggtggggaccgggcctgggcgcggggctctgaaggtgtggaaggaaagtttgggactccgttattcttccacagcgtccttcctcccgtaatatccagcctctttatcgcggggctcgggagcccttggagttgatctcgccaccattatccccccgggcgagcgcggaggacgggctggccattctggccaggccggaggtgttttccagcccggggctttgtgataactgggccgaaacccgagggtcctggagcgcggcgggtggcgggagcttgcggagcgcggcgcactcggcggccaggcatcggccagcccagc

SEQ ID NO: 39164 - DNA, 1452 bp, Homo sapiens; identical to SEQ ID NO: 36703
  chr22:24551659-24553111
  binary

SEQ ID NO: 39165 - DNA, 1221 bp, Homo sapiens
  chr22:25960137-25961358
  hyper
cggggagccgtcaccccactttgttctgcttagcctaagacacgcaactttttccagcttttactcttcgctgaattctcacggtggggttggggggatgttcaggctcaggagcgaggttgggggcccggcccgctgggcgctgttcaccggtagcccggaccagagcaggagtttcatcattacctgctgggataggtgggacacatgtatttccggggccaccccagacctcccggaggatgctgattgacactgtccagtttgagaactactgtgtccagggagcagaggcctccccataaccccttgggttgtggacgtctggcccagggcttctctgggtgagcggggcgggcatcagagcgcgtggaacctggggcgggaggtcggggcagtgaaggaggaggagaaggaggaggcggagaccgagggggagggaggggaggaggaagaggaggaggagtccctcgtggccaccccgaggggagggcgaccgtagagacttggtcgggaggcgccggcccagcgaggccgctgggactgtgcactgaggggcgctgaccgttggacgcgcgctccccgcagaccctcgctgaaggagcagggggcggcgcgcgtgcgcggggcgccgggcggcgcgcgagggggcggagcggggaggcgtgctgcgaccccggccggctacagcctgcggcgcgcgcagagcgctagtggggcgcgcggcgcgcgcgcggggcgggggcgcgcggaggggggggctgccccggggcggcccccccaggtcggggcgcggcgggcggcggcggcgggcgcgcgtcccgtccaggtccggagtaaccgccgccgccgccgccaaagctcgccaacatggcggacctggaggctgtgctggccgatgtcagttacctgatggccatggagaagagcaaggcgaccccggccgcccgcgccagcaagaggatcgtcctgccggagcccaggtaccagctgccccggccggcgccggccccaagccgccgccccctgcggccgccagctaccccctgcttcctggagggtcgggcgctgagcctccgctgccccggggcgggtgacacagcggagcgggcgatgcggggccggcctcgtcgttccagtctctgaaatggggcatcggagggccggtggggggcaccccgggagagagcgctccaaagtgcccggcgcggcgccctgcgc

SEQ ID NO: 39166 - DNA, 782 bp, Homo sapiens; identical to SEQ ID NO: 25585
  chr22:27053098-27053880
  hyper

SEQ ID NO: 39167 - DNA, 617 bp, Homo sapiens
  chr22:27068622-27069239
  binary
cgaggggggcgtatcccacgaggaaggcaggagggggcgtgcccctcaccggaaattagcagaggggcgtgtcccacaccggaagtcagaaagcggagcctttcttacaccggaagtcaatgaagcgggtctttcctacgctaaaaaccactgagtggagtatttagtacacaggaagtcggccagagaaacatttctcatatttgaaggccggaaagagggacatttctgacaccggaagtcagtgagaggactctttcccacacaggaagtcagctagagagccgtctcccctctctggagccgagagaggccggtttcccccaccgtaagtagacgtggggccgtgaccggaagtccttgggaaagatccgtcccattcccggaagctagagggcgttagttgtcgggttgaaaaggggtgtggggaggggaagcagctttaccccgggctcggagtttgcaggagagagaagtggggagcaagaagtgaacctcaggggctcacagggttcccgcagatgctcaggccggccaggaatgcatctctggctctctgttcccacggacgtcactgcctcagccagcctcccccagagcccgccagccgctaagcc

SEQ ID NO: 39168 - DNA, 905 bp, Homo sapiens
  chr22:29075313-29076218
  binary
cgctgggcgcattaggcgctgactgtataccgacaccccccaccccggtgtgcgcaggccaacacccatacacaccctcacacacccacacacatccacacacactctcgcggaaactgagccaggcaggcggcggaccaggtcccgccgcctcacggctcgcggctgggatcgaacccggactgcgagacgccttccgcctcgcaggcgctcctctgccgctgaggcccggcccggctcccaccgccggagtttcacaaagaaagtctcccggcccgagcccctcacgcactcaccggcgccgacgccggcggcgactctggctcccgccgccttcggctccttgcgggggtcggcccttgggtcggctcgggcgccggcggcggcgactgctccatccccacggggcccgggccgcgtccgcctcgagctaacggtcccgccagctaggcgcgcgcgccggttccgcgcgccatgttcccgccgtgctgcgcgccgccgcggcgcccctcactgcccccaaaccgcgcgcgcgcccccgcgggcccacacatgcaccgcgcacgcgcgcgttcgccgcgccccctccccgcgcgccccgcctcgcgccctctggagctggccgctgttcccagtgtctcgcccacccccgccgggcccgtcggactcggcgggtgagcgcgcggttcccggctccgcaccgccgcctgcctctctgcagaccaccccggacccgacccctcggccatttccccacactgccgctttcgcttcccccacgacgcggggcctgggacgacggtctgggccaagaggaacttccccgcaagaagtgtcgagttaaggacgctactaagggggcgggatcgccatcgtggaggtgtgcaagcacgtgcctgcgtccc

SEQ ID NO: 39169 - DNA, 612 bp, Homo sapiens; identical to SEQ ID NO: 26888
  chr22:33453892-33454504
  binary

SEQ ID NO: 39170 - DNA, 542 bp, Homo sapiens
  chr22:39549067-39549609
  binary
cgaggcgcagcccctcgagttgcaggagagccgggacccaaaaggcttcccaccgtgtccggacgtcgcagggccgaggtctccctaatccggccttctccgcggcgcagtttggccagtgtctccacgtccgtccacccacccctccatccgcccttccatttgtccatccacccgaccctcggtggtcggtgcccagacgcacgggtcagacgcgggcgctgcctcgagggctcccgggccgggccctcgttcgcggcaggagcggccgcggtggagctgaggtcccccggggacggattttgccgccgcgctgccccagccttccccaaacccgcgtgtactgggcgctaggtgcttagtgggggctcaaccatttgtggcacgagacgaactcttgattccccaccccccttcctttttcgctaacgcgcctccattcctcactgggagcccggcgtcgtccctgctccttcctgtactgaccccaacttctgtcgctccggcatcccctcggggactcgggtctgcctgccctcacc

SEQ ID NO: 39171 - DNA, 1121 bp, Homo sapiens; identical to SEQ ID NO: 27978
  chr22:39852943-39854064
  binary

SEQ ID NO: 39172 - DNA, 281 bp, Homo sapiens; identical to SEQ ID NO: 23595
  chr22:42667137-42667418
  hypo

SEQ ID NO: 39173 - DNA, 1378 bp, Homo sapiens
  chr22:45405185-45406563
  binary
cgccaggggcaggcggaggggagcccagaagggggtccgcgcgtgtgctcactccctcgccccccgcccccgggcaggctccagcctggaagacccagagacccggaagagaggatgctgggctcgggtcccccgaccccctcaccccgcaacacactccccggccccgggcccggcccccggccacctacctggtggcgcgcgagttccacggcgagcgcctcgggccggctctgcagctccatcccggcaacttgggcagcactttgcgctcactttggcccgggctcccgggaagttgcgcggctccgcgggggccagagcgggcgcgggcggacgcggcctccgggctgggttgggggggacacgagccccctcccccacggccgaaagggaagggggctggcgaaggggaagacaggcttccgggcgccgcggcgccgagccctcggctgccccaactcctcaggctgcccggcaagttgcgccgggtccccgggctgccggcgcggcccggagcatggcccccccggcgccgggagccccgcgcagccccgcgcgcgcccgcccagccgccgccgccgccgcctcctcccgcgcgagcctcccgcgggcagggactatatttcctccggcgcgcgcgcctggatctcgttgggcctcggcaaagttgtgcctcggcacgatgctaattcggcagtgcccggatggagcgggccggggcggcggggggcggtgccgggaccctcagcccgccgcgccccgcccccgccccgcccgcgcctgcgcactgccgccccgccgcggcccggcaccccgagcggagaacaaaagtggcggtggacggggacgcacggtcgccggctccggggactgctcgggccgggcgctcggagaggacgactgcggagtcatcctctccgtccccgggccaacccggggaacgcggcgcccccaccccctgcgccgtgtaacgccgggatcaggacactttccgctgggaggctgcgagtccgtgtttccatttctcctcaccctggtcctcggctccctcctttcccccctcctccgcctccctctgatattttatttaaattcttccgtcccctcctgtccataccagcgccgcgacttgggggattaaattagtcgcgtcgccacattcccccgccgcctgatggcctccgtgttgtttaaacagcaagaaaattgatctcttggctcttcctttaatgatttttttttacacgattaaactctcaacagatgtcactggacattttaagactcttgttaagagtcgtaaacaggcccggtcaatgcgacctaaaacaattataattacagctgcggaggtcgcgtttcagaacccccagcc

SEQ ID NO: 39174 - DNA, 871 bp, Homo sapiens; identical to SEQ ID NO: 23222
  chr3:117715822-117716693
  hyper

SEQ ID NO: 39175 - DNA, 1275 bp, Homo sapiens; identical to SEQ ID NO: 26926
  chr3:120626737-120628012
  binary

SEQ ID NO: 39176 - DNA, 970 bp, Homo sapiens; identical to SEQ ID NO: 27984
  chr3:121902674-121903644
  hyper

SEQ ID NO: 39177 - DNA, 816 bp, Homo sapiens
  chr3:123168265-123169081
  binary
cggcccggagagctgtcgcgcccgcttcgcaagccccaagctcctcgtcgccggctgcgggcccaccgcggccggcgcggaacgactaggcggaggacggaatccggcgcagcgctgccgcggttctgccccgacgcaggcaggcttctcccggggagtaaggcatccagagatccagcgccggggctcagaagcagccggcccagaggggcccgcctgagagccgcggcgcccgagaggcgctccgggggggcccgcgggagcccggctcagggcgcgccatgcacgcttcgggccctgcgccgctccggccgctcgcgccgctcctcccttctcgcccgctcgccgccgccggagagccctccgcatcccctcctcccgctgcctccccgccccccgcgccgcccgggcctcggctcacagccgcgcgaggccgcctccgcccccggcctggccatggccccagcctcggcgccccgcgggcatcctcaggcctggccgcgggcaccccagttccccttcctcacctaaaattctcgctgcgcccctccctccctgggactaggagccgcatccagcctgcggtcccgtcaccagacctgggtggagcgcggtcttcccccgcccccggccagggctccagcgcccccagtcctagctcccctcttttgtatccccctttaatccccctccccccatttaacccaacttcagccccggcgctgcgccccccttccctggcccggctcgattggccgcttccggagctgtcagactacagtccggcgctcttattgggcgattctctggcccggc

SEQ ID NO: 39178 - DNA, 890 bp, Homo sapiens
  chr3:125898662-125899552
  hyper
cgcggggcctgagctctcgatagcggggccccaggagccacgttgtggggtctgctatccggcctccctctgcacgcgcgaccgtccacttgagcgcagtggctggagctgggactccagcgcagcccctgagcgctcacgtcgacccctccaatcacaagaggccctcgtgccaggcccccagatttggccaatcagggaagacctttccctgtcacagaatggggtcgaggggcccaggaaacaggtagtccccagtcacaaatcatcgcgtcgccttcgctggtccctttctcttatcgagcctcagttttctcttccataagccgggccagcagtgcccaccccacaggttggcgccagctccgtaagggccctaccaccgcggccggccagatcctcggcgggccagtcctggcgctgcggtcatttagcctgatgacccctggccaggttcagcctcaattgctccaaagaactccggacccgtaccccgagcccggcgtcccagcggcgaagttgatgggccccgcaggagcccttgcggtgagaaccgagtcctggagcccctggagcccccggagcccccggagctgcagccggggcagcctcctttccgccgggagtccagcgctctcgagagcccagaaactcaccgcgcgcaggagttggtgcgggcgtcccgggcaggttagacttctgtgagccgcagccccgaaactgaggttggtgcagacccgtcctgggagccaggaggtgggacctgtccccgccagtccgcgagctctggttaaggccagagcccgtgaggggaggggcgcggggcgggcggagagtcagccgagtgggggcggcgctcaccggtggtgggactatggcgggagcgcagc

SEQ ID NO: 39179 - DNA, 152 bp, Homo sapiens
  chr3:12596394-12596546
  hypo
cgggaactaaattgacaggagactgagacttttcactttacgcttttaaaatatttgaacataataacgttcagatcgtgaatgtattccataaagaatgagataagctgaattttaaaaataagtggcatgggctgggcgcggtggctctc

SEQ ID NO: 39180 - DNA, 601 bp, Homo sapiens; identical to SEQ ID NO: 21251
  chr3:128336511-128337112
  hyper

SEQ ID NO: 39181 - DNA, 1269 bp, Homo sapiens; identical to SEQ ID NO: 22894
  chr3:129693123-129694392
  binary

SEQ ID NO: 39182 - DNA, 797 bp, Homo sapiens
  chr3:13324131-13324928
  binary
cgccaagccccgagggaagccgcggaccccaagaagttcccacgtccccgacacgcccgccgccccgggccccgcttacttgtcgcggcggccgccgagctccgggatggcgccgagcggctgcgggccggggccggggcccgggtcggggcggcgggcgcacgcggccaggtgtcgccggtgtcgctccagcaggccggcgttctcccggctcagccgcgccacttggcgctccagctcctcgatgcgccgtcgccggcgcgccagcagctcctgctgcgcggcgacgatccgggtcagctcctgcaggtactcggccgcctggccggggggctcggcggcgctggccatggccccccgcccggaggccggccgcgcctcaggcgagcgggcggcggggcggcggcggcgcggccatggctgcgcggcggggacggcggctcggcgcggcgcggggctgccgcggccccgcctcggctcccgcctccgccggcgccgcccccggggcccccgcgcctcctgctccccgcgccgccgcgctccgccgcccgctgccccgcggacgcgccggggcggcagggcgcggagctgcggccgcagcgggcaggcgaggagttttgcaaagtgccggccgcggcgcgggaagagggcggggagggcgccgcctgctgggaccgcccctgggtcccgcgcccccgcaccaggcgtcgggggacagctccatccttctccggccgcctcgggcgccttaaatcggaagcgattccgtgaaatacatctcgaatccatcagcggac

SEQ ID NO: 39183 - DNA, 902 bp, Homo sapiens; identical to SEQ ID NO: 21253
  chr3:13460995-13461897
  hyper

SEQ ID NO: 39184 - DNA, 623 bp, Homo sapiens; identical to SEQ ID NO: 34788
  chr3:13590414-13591037
  binary

SEQ ID NO: 39185 - DNA, 764 bp, Homo sapiens
  chr3:137487804-137488568
  hyper
cgtggccctgcaggaggaggttctgcagatccctctgcgttaggcacgcgtccggtagccagggagccccagacttctctcgcttagcaacctgggcctccttcgagcggggttggcagggagggcccggacctctcgcctgaggctcccattgcttccccgggacccttctccccgccaaaagtgacccaaatacatgccgcgttcagcgccgtcgctcctctgctgggtgttccctaggacagcagagacctgaacagcatgctgctggggtggcagccatctgcgccggcgcggcaggagcagagttgtttgggttttacctaggtttgctttcttaaaccttggctgccatctggctcaggggtacactggctacatcttcagagagatgtggaattcttgacccctttccgcctctggcctccctcattccgagaactccgtcagcctttcatgcacttctcggttttggatctgactccaaaaatctttgattcccttccagtttccgagtttttctatttaaatattaatttccttaggcccgatgactttaaagacggaaaagaccagctactttgagtaaattacgctgaggtgtgagtgactgacatctgagaccccctgaacgtttgcattttggaactggagcgagctaacctgtaggaatctccggtgaaccaaagcgggatgatgtttccgtctgagtagggccaaggtactttcaatacagctcaccatttagggaagtgtgtcccgcc

SEQ ID NO: 39186 - DNA, 464 bp, Homo sapiens; identical to SEQ ID NO: 34789
  chr3:137717579-137718043
  hypo

SEQ ID NO: 39187 - DNA, 787 bp, Homo sapiens; identical to SEQ ID NO: 27990
  chr3:139258152-139258939
  binary

SEQ ID NO: 39188 - DNA, 1750 bp, Homo sapiens
  chr3:139653430-139655180
  binary
cgcggctgcccctgcttctcggagatgacgcggagccctgccattgccatccaggtccaaggctatctactctgcccgacaacccctagcaccactaggcgctgctctagtgtgcgcctggcgccctccccagaccagtcgacgcagaacgcccagagacccagccaagggcaagacccttagcgacgcccgtcagtcctctccgcccagatatcagttcaaagggcatggcaggtcagggtccctcgcgccaccccagatgaccctcaggcctcgggtggccactttctgggggagccctccatcccttgcggcagcttttccgagagtcggagtggaggcgcggggctggagggctctccggagccgcccaccagggtcctctgggggcccggtcccgactgggcagggggacctggacagggccccggagcgtggagacggctgaggaaagttgggggtcggggccttggggcggggagcgcggaacccggcgccgatgcccgcgttcatgaatatgcacgagccacctccctccctccgtgacgtcacgggccgtcccggggtgagcgcctgagccgctccgggtccgcgccagtgagcgcggctgctgccggcgagctagcggcgcagcggcgggaacccgaggccgagcgccgcggcggcagcgctagaagcgcacccatcgggcacggcgaggcggcccacggtgcggcaggcaccgggaggcgagagccggcgcggacagtaggcggcggctgcagctcgttggcggctgctgcgaggatgctgcctgggcggctgtgctgggtgccgctcctgctggcgctgggcgtggggagcggcagcggcggtggcggggacagccggcagcgccgcctcctcgcggctaaaggtgggtgctggggaagtttgctcttctcccaggagggaggcagggcaggcttgagggtgaaagcggcaaggacctaggctcaagctggatttgcccaccctcccttgccgcagcttctttggcctctgtgcgccctggattcccgaagtcagttccctgcgcagcggaccagagaggtccacccgcggacgtcaactcaacccctgggcggggtccgggggctgagcagaaggcgaggtctggggagtacggacaactttgagggctgtctgtgccggggtgggagcgcagtgggtgagtttcgagctctggcccagggacggctagagcagggcgctggcgcgccgtggggacaagcaggtgtctgctcctgcctgggggaaggatcagcggcggtgctttcaaggagggagccgagctgtgacttgtctcccagctcggggatggagtggaaacttgtaggctccagggaaggccccgctgacactcctcaagctcccccagggcgtctctgactccccggggaacgtgtaccctccgggtaggcggcggggtccggaagaagcgcgggatgtgaggctccccgctgcctttcctactccgctctgactaccgaggaccgaggagcctaacctggcaccactcccctgcccaccctgttcctttgaagagcttgacctccccgcgcctcccgcccggaaggaagctagatccaagcgaacgcctggctctgtcaggcgagcctggaagccggcgaaccccggactttgacagctgcctgggagcgtcgggagctctggggtggggggccgggtctgaaacaggaggtcacgtgcttgcagggggtggggaggc

SEQ ID NO: 39189 - DNA, 506 bp, Homo sapiens; identical to SEQ ID NO: 24405
  chr3:141174173-141174679
  hypo

SEQ ID NO: 39190 - DNA, 1412 bp, Homo sapiens
  chr3:142681815-142683227
  binary
cggtagcagccacgggtggtggaagggcacgtcgccgccgctcaggaagaacagacggcagaacttgctcaggaacagcagcagcgggatgaagtgcgtccagaagttgagcgtctcgttggtaggcttcagcaccgaggctaggcactcctgggccgtgcacggcagacgccggtagcccgacaggatgaagcactccacgaagtcgtcgggcacctcgtcccagcgcagcagcggcttggcagacgctggggggtcccgggaggcggcagagtgggagttccgggcggcccccgaagctgccggggccggggccggagggccttttgtgcccgcgccccggggctgcaggcgccgcggcatggtgcccggggctcggctagggcgcgcgcaggcgacctctggcgccggctcccgggcgctgggcagcccccgccggccgccgtcggagcctttgtgcccacgccgggggcgtcgctgcaggtttaggagaagacccgtgcctccgagcagccgctcctaaaaattaaataaatcaataagagaatcaattaataggcagcgctgcgaccgccaggagcgcggagcgcgcgaggctcagcggcttcctcgccaagcccctgctaccggcgcgcggccgcccgcgctgcggcagcggcggcggcgcggctgactgcggcggcagcgcggcagcggtgactgggcatcgcgcggtgcgggtgcctccgccgccgccgcccccggagcgggaggtggggatgtgcgagccgaggcgcggagggagggacgggcgcaccgaggaagggcgggggcctcccaggctagggtttcgcggccgcttcgggggatagagttgtcccctgtctcgagttccgtaccatccccctcctcgggccgccgcagcccgggccgccccgttaatgattgatgcgggggccgcaggctggtcggcgacgcggcggcgcgcgcgccgagtactagagtcggccctggggttcgaaacccgacagccacgcgggcgttctggaggacactggggagccgcgttcgcggggggcggggagctgcggctgcggggggaggggagggcgccggagccgggcagggcggagagatgcgccagcggtaatctccggaggtcgccggggaggggggcactccggaagtcggggggctttaagcccgcgtccggatcggggccgtgtcattgtcagctacctggggatgcgcctctcgctccctcactgtctttgcgtgtgtgttagtgtgtgtgtgtgtgtgtgtgtgtgtgtgtcggcctgtctacgcactacacgaaggcttagttggtcttctttcgtctagtgggcgcactcaggtgcgtcaccattctgccgtttccctcgcccttgtcctgtccgaaagaaccgtcc

SEQ ID NO: 39191 - DNA, 2468 bp, Homo sapiens; identical to SEQ ID NO: 25634
  chr3:142837817-142840285
  binary

SEQ ID NO: 39192 - DNA, 739 bp, Homo sapiens; identical to SEQ ID NO: 23230
  chr3:148415317-148416056
  hyper

SEQ ID NO: 39193 - DNA, 2365 bp, Homo sapiens
  chr3:150802802-150805167
  binary
cgtgggttcaaattccgactcgtttcgtggctttcggcaagtgagtggtcctctctgagctggctcaatttctccatccataaaaagggtacagtaagaccgtggaaggttgtaaggaccagagattctgactatcaagatcctggcacgtagcgaaggctccataaatggcagccatcattcttggccaagtgcgggcgcattctcccgggcacgcctcccgcggggtccctcaggacaggccgagcccgcctccgcggctccggtctcgcagagctcgcgccaggtggcccagcatcttggtgcccgcgccccgaagcgaggagcgagggcgggttggatgaccaaggtctgccctggaggatcaccccccccgccccttccacgctcccggcgcaggtgaggttttcggcccaggccacggggaccgcgacctctggggaggtcgaggcggagggtgcagcggggggcttggagcagggctccagagggcgctccctccctcgcccaggttcaccccagggccagcctcggcgccggggcccgcgggctgcgcgctctgcggctgcgaaaacccggagaggcggattggagcgcgctcaccgcgctctcagccaactcctccgcggtccggccgccgagctgggcatgctcagtgcggacgccgcgccgccgtccgccaactcggaagctcgcgctcccgggccgtgggggcgagaacgccggcggcgagccggcgtcgctcgccgcccccagacagtggcaaacttcgcggcgttcccggagctcgtccgggcgaggcagataccgcacaaataaaatcaaatccaagtcccccatcccaacccgaatgatggaggctgcggcggccggagtgaccccgccgccgccagccccagcccgctagccgcggaccaacaggtaaagtgttgggggttgggggcggaagggaagaggagctggggccgtggggaggcggcgggctggaggagcccgagacgcctgcgggctggctgcccccgtcggcgctcacagccatcgctcctcacccccttccccagcccctggagggactgtaaagggttaagtcggccccacgccaccgtgagcacggccccctccagccgccgcgaccgccagcagcgcgcctcggcgcctgcccggagccgccgaggggaccgtagctgcggatgcgccactggaacctggcgggcgtctaggaggcaccggccgcttcccaccggccgcatccctgcgtctcgcgccccctccagacctgcctctgcctgcactggcccggtccgtgtccaggtggcggggtctgcggggcgcgtggcggcgggggaagggtccctgccggggaagagaggcgggggcggtccgctccacagcttcttcccgggaggggagggccaccctcgccttgggcgagcacttcagccaccagcctaggcgccaagaaaagtttttttttttttttttccagtgccccacccccacccccatcctgcgcccagctggggtgggtttgggtccattggtgaaaaaagtcacacgttcccatcagctgctcctccccctggagacaaggtaggggggagcagaggaggcaggcgccgcggaggaccctggccgacctctagtccctccgccgccgccaccggagcggtgcgtcccggggctcgagcgcagccgagtacccgccgaaggctgtccccatcagtgcgtgtctgctgccgggcagcggcagcatccaacctgctttattcctcctgcctgcagcgccacagcgagcgagcgagcgaggagggggagagagggagtctgtctgcaaagtgctgctccctggtgctcagaggcggctgctccagctccaactctcattcatttcgccggttaacatgagagatcatggccgccttcgggcttctcagctatgagcagagaccgctgaagcgcccccggctcgggccgcccgacgtctacccacaggaccccaagcagaaggaggtaagggcgccggcggcctccccggcaaccggggccgcgctctgcagcactgacccggggccaagttggcccagcgggcatcgccggcgctgcggtggaagaggtcggggagggggattagaggcgggggccaggctgggggtgctgggcgaccccccggcggcggagaccgagcggctgtcagtccccgcgctccactggggcgctcgctttccatgtgccggtcgctttcccgttgccgggccttgcacggcgccgccgggcgcttctcgggcttcttccctgccgaaaccttgctcgctctcacccgtttctgcctgctttatttttcttcttgccgcttcggtaaatcgtc

SEQ ID NO: 39194 - DNA, 1420 bp, Homo sapiens; identical to SEQ ID NO: 26949
  chr3:152552403-152553823
  hyper

SEQ ID NO: 39195 - DNA, 1056 bp, Homo sapiens; identical to SEQ ID NO: 23233
  chr3:154797121-154798177
  hyper

SEQ ID NO: 39196 - DNA, 1895 bp, Homo sapiens; identical to SEQ ID NO: 26955
  chr3:16553609-16555504
  binary

SEQ ID NO: 39197 - DNA, 852 bp, Homo sapiens
  chr3:167967629-167968481
  hyper
cgacaagcccaacttctgcgccgggttcggacttgcggagccggaacggcgcaccgcgcgcagcccgggcggcggccagggcggatcagcctcgccgagatgtcctcgcgactgtggctctggtgcttctgcctgggcggttgccggctggccgccaggaagcgccctacagctccggctgggcatgtaagtggcgcccgcgcgctccggaacgcttggagagagcagacaacagtatgccccgccccacctcggacctggtgcggacaccgcggcccgagcccgggaagggatggggggcaggaggtggggacagacacctgcgggggctgcgggctgtcccgggcggagcgcggcggaacgcagtccccagctagtccttggggagcgccagcccgggagcggagaccgcgaccggggcgggtgtgctctccacccggtacttcctcagcgcctgacagatttttgtcccccgcccccaggtttgggtgtgtgcgcgcgtggtatgtgtgtgttttcgttatttttctgttttaagagtaattggctaatgactaccactttgtgacagggttgtgaatgaaatcctgtcgaacaccgagtttgacatttttttctttgtagagaccaatgagttcgtgcacatgtattctttctttttttgggggaagtatcgccgagtcggacggagtggtttattccacaggtttgaccagaggcaaatcctggctcgtctgccgaagtgaggagctggggagatgagtatatgaaggattgagtgctcggccacttagctgctagtccccttattagagaactgaagagttagtaggaaggtgactcaaacgcatc

SEQ ID NO: 39198 - DNA, 820 bp, Homo sapiens; identical to SEQ ID NO: 24414
  chr3:169539913-169540733
  hypo

SEQ ID NO: 39199 - DNA, 1102 bp, Homo sapiens; identical to SEQ ID NO: 27999
  chr3:179168676-179169778
  binary

SEQ ID NO: 39200 - DNA, 1571 bp, Homo sapiens; identical to SEQ ID NO: 22901
  chr3:186078710-186080281
  binary

SEQ ID NO: 39201 - DNA, 1949 bp, Homo sapiens; identical to SEQ ID NO: 22902
  chr3:192126247-192128196
  binary

SEQ ID NO: 39202 - DNA, 296 bp, Homo sapiens; identical to SEQ ID NO: 7361
  chr3:194786359-194786655
  hypo

SEQ ID NO: 39203 - DNA, 988 bp, Homo sapiens
  chr3:238470-239458
  hyper
cgagagccagcctccggcaggagggcgtagaccccggtgccagccagaacggctccagccttcccgcggccagagagccagcggcgggaggggacgggcgggacctccgcggacagccccgggtgcggaccagcgggcagcggccggcgagaccctccctggatccgcccagagcttaccggaccctgcgcgcccccgtcccggctcccggccggctcgggggagaaggcgcccgaggggaggcgccggacagatcgcgtttcggaggcggcgcaggtgtgtcaggggtgggggtccgctggcatctctcgtgccggcgctgggggggtctcccgtggaggaagggctgaaggtgctccgggaggggtccactcgttatggaaaggaagcggggcgcggtcagggtccctcgtccgcagtgggggtggtccgggcccctcagcctgcacccgggaggagacgcccccttttcacgccccgcccccggtggccgaggccggattcggacagctcggggtcagtcgacggagcacaccgggcgcccgaatccgccgggtcccactcacgcccgccggccgccggtaggttggccctcccgcttccagcctccgccaccccatccctcgctgctctctgaggaggattccagacccccccgtagatctccgccctctctcgggtggggctccgaggtctagctggtctgggggtcagtcccggcctctgtctcccaccgcgcccctcgctcccctggacaccgcctggtgtgtggggctcagacccccccagtccactgcccctgtgtggctcctcctctcaggagaggattctagatcccagcccggggggggttccgaaaatgccgccagcctggagcggggaatccatggaccgtggggttgtggggttggggagcacgaaaacccagagaggggctagagctccacctccccagaccgccgaggggcgagagggcgcgccgggggcc

SEQ ID NO: 39204 - DNA, 981 bp, Homo sapiens
  chr3:27762756-27763737
  binary
cggtgtctacggagatttattgcgcgcggtgaaacactctaagcaccgcgcggaacaactgggttcagctccctcatcccggaccttccccaggaccacacgtcaccctttatccccgaacccaggggcccctccacgctgcgctcacctgccctgtttcgtaatgatcatctcagtttggtggcggtggaatttgagccacagaggccggttgcacaggtagacgtgggcacggaagccagaacctggaacccccaggccccccagtcctccgcaagatcccgccgctgcggctccagggtacggcccgtagagcggagccccctggctgtactgataggtgcccgggccgccgcccccgccgctgctaccgcccgcgccactgcccgcaccggctcctgggccgaactgcgccctcccgggtgggcacacagccgcggggaagccgccggggggcagcatggagccgtaggggtagcgcgccccgttaggagccgggtacacaggtccgtggggcgccccagccgccgcctggtacgggaagagtgagcagggcgcagccagctccgacccctgaggaccgggggactggaggtagtaccgctcggagctcaggctgtccatggagtagcgcgcagtggccgcagccgcggcggcggcggcggcggcggctgcagcggcggagggcagctcctcctccccgcagggggagcccttgcggccgtccgggggccccggcttggccactgccgcagcgctggcaaatgcgtccccggcgtcggtgtcactaagcatggccgcgggggcccctgcgctggcggctgcgggctccccgctcaccgcctcgcaggagagactgccggaaaacttcttggacgctttgtctaagtccaacttctgaggagagggggccgcgctggggaggtggccagcgctcccgccgctgccgcctcgcgcactctccagcgggtagaagtgcgc

SEQ ID NO: 39205 - DNA, 983 bp, Homo sapiens; identical to SEQ ID NO: 34818
  chr3:32858067-32859050
  hyper

SEQ ID NO: 39206 - DNA, 1071 bp, Homo sapiens; identical to SEQ ID NO: 26992
  chr3:33259711-33260782
  binary

SEQ ID NO: 39207 - DNA, 1135 bp, Homo sapiens
  chr3:36985571-36986706
  binary
cgcaacgcgcctcccaggcaacagactccgagctccggttcggaaacgctccgaggcagaagcaagggcttctaagggctccgcttcccagccttgggtccctactactaccttccccctagactcggtgagcccaggctgatggaccgtgcagtccagtttgagccagcccagcagccctcaatcgggcgggcagggaagaaggcctcctactgccgggaagaggccagcgcgctccaagttccccgcaaattccgcccttcccgcctggcacggttcccttgcaccgctgtgctccgctcccaggtttctgcccgccaagaatgcttgccccgggggcgcgctcgctggtcaggaacctgtcggcagcccccgggaacccctgaggatgcggaggtgggcccgagagctgcggcttcgatgccggggtgggagctaggcaggccgcgcgccgccgcagtcctgtcgcagcgcgtgccctggtccctccggaccgaaaaggccgaagccgtcccccgcgaccgaccccgcgcaactggctcgggtctgcacctagatggctgtgggccccacagggatggccgggcgggcccgttcggccgctacctcagggtcgccagtccccgcgcgcggccgcctcccgccaggaagggtggcgggcccggaaggccagagatgccccagtgcttcccgcgccgctacgcacctagctgcccgcgggtcccacatggctgcggccggagggtccgcaccaggaccgccgccgcctggggaagcgcttccctgtgggcagggcgcggcgggcagtgcggaagcccgaaagctaccggagcccggggcaggggcggcgcgatgcagaggcggcgttcgggggcccccagctgcctgcggctcggctacccagccgcgatcagagggggcgggggacgcaggaaccccggcgtccgggcggtgtgcagccgcagacctattccaagtttccacgtagttgcgagagcccaaaaactgtcacgtgcacgtcgctgctgagtgggaggaggtgtttgtcatcgcgttcaaaaggggcgtttcggtgtctcccgtcatgcaagcaaatggtatggctctcggccgcctttgaataaacgagtgcttc

SEQ ID NO: 39208 - DNA, 1452 bp, Homo sapiens
  chr3:3840349-3841801
  binary
cgcaggttcacgcgcagtttccgaagacctattccgtccccaccctcctccccttcctcggagacacctccacttaacactgccttctcagtccctcgccgcctgtttaaacacaacttccacccctcacaaatcagaaagctgtaatttcaaagtttcagaaacgttttcggaaagcctcctccaatgggaagcgacttcgccgctgagttaagcgtccgaatcctccttcccgcggcagggacaccggcccgggccaggtctgcggaggacgcccccgggcgcgcacacacagcccgaggacgcgccctgtattttaagacgcagggtcggatttcaccccgaaacttggctcccacagccccaggccgaactgtgtctggttctcagcccccgagcccgagttctacgccgcaaagagatggggccccattgtgcctagctggcctcctagcacggacgtgtattttcttttggtctgtcttttgctaaaaaccggcagtgcgcttcgcctccctgcccagccgcagcctgccgtcccctagacaaaaagcggcgaccgcggcccggccacccgagccccgccgcgctgcgcctttgttgggcggtccacagatggtgcccagcacggggccgcgccgagggcgggggcgggaggccgcgaagagggtcgggcgggaggggaggagacggcggagcagccaatccgcgcgcggcccatcagctgaccgcctttgcttacaccaggtgcacgccggctgcggggagcacaaagcggggcgcaccgcgggcgccggcaacgagccggtgaacgaggcgaggcccgtgcgcccgcggctgcaagcgcccgcctggcggggagaggggccgacggcgtcagcccgggcggcggcatccctaggcgcctggggcgccttcctccggacctggccgctcgctgccccgccctctgcaccccacttctccgaccctccttcccagtcctgcctccccctgccctggcctctgagagccgactgagcccagccccgtgcagcagcggttgcctgtgtcgccgcctagtctccggtcttggtgctctcccgggggtgccccaaggagccagtgcgcgctgcgggctgggaaggaggcgccgctcagctagtcctcctcctcctcctcgtctttctcctcctcctgctgctgctgccgccgccgccgccgtgggtgccgggtccgcgcgcaccccaacacccccaccagctgggcctcggggtaagtccctggccggccgcgccgcggcaggaggtgtgggaggcagcgaggggaagtcgaggcaaacttggtggcgtgggagaccctacggggtctggggaacctcagggtaagatcgcgggcctgagggggacgagggggcgcggctcacggagctggggaaaatgacgaagtcgggaaacgagaatatagtgcccc

SEQ ID NO: 39209 - DNA, 502 bp, Homo sapiens; identical to SEQ ID NO: 32888
  chr3:43935666-43936168
  hyper

SEQ ID NO: 39210 - DNA, 1465 bp, Homo sapiens; identical to SEQ ID NO: 30330
  chr3:44036183-44037648
  binary

SEQ ID NO: 39211 - DNA, 1399 bp, Homo sapiens; identical to SEQ ID NO: 34823
  chr3:44037719-44039118
  binary

SEQ ID NO: 39212 - DNA, 1471 bp, Homo sapiens
  chr3:44039665-44041136
  hyper
cgtgttgctggagttggcgcagacgcgtgtgcgggcatagcggcggacgtgacaccgcattttctccgaattcctgccatctagggtggtgccgccccaagagggggccgtggggaggtggggtaataggctgcgcaatccacttgctctgggggagcttagggttcagagcagagcgcaactccggggggctgtcgcacagccccattctcccacaccagaagagcaatgctccttatggatgattaatagccgggcttctcctgaccatgcggcgcgtccctgccggcaccacttagttgttttaatttgacctttattagcaacgtgctcccagaggctgcgagttggattcgcaccacgataacggccctctccccttccacccggccggcttcctgggaaggatcggggactgcagctcccgcgacgcctcctcctcctgcgcagggagcaggcctgagttcctccacgtaatgacctgggagacctcaggcatcccggggcctggtcggagggtcttcgggccctggagctgggcggtgtctgcagtgcaccgccgtgagtttctctcgggtacaatgtgctggtgtgcagagaggaggaaaggaaaaaaaaaaaacccaacaccactcttaagtggcactggcatctatgaagtggcagtggtctacactgagcgtgcccttgcctggaggtgtagggggcggttactgcagccgaggggagggtactgcggccaagggcagggcgagaggacagtcaaggccggctggccgcgtgggagcctttcctctccgggttcagcggccggaatcaccagcactgcggctaaaggggctggtaggctctcctgcaccccgcgtgctcctccgccttctctgtgtcccccggcttttccaggaggaagatggggtgcccatcgcgaatggggcgcgccgggccgcctggccgggcggtcacgtgtcccccctcccccgccactgcggcgggagttccaatcagagcgcgccagggggctcctcccgggcaggaaccacccggctcggcggcggagggtgggccgccgtcacctgaccgcccgcccccgccccccgcgagtaaggggcggtggtagcgtctgctcggttacaaatggcccctcccgcccggctcgcccgctcgctcgggctcggcgcggacccgcctgggcgtgctcctcccgccggctccaggcgtcccaccgccctgcccggcgccagcccgcggtcccagccactcctgagggcgcgccgggcacccagcgcgtaggctcgcccacggaggtcgacacggaagtctggaccgccgaggcgtgtggctcgtctaccggcaggtgagcgtgcaccgcgggcgtgggatgctgtggggacagtgcgggggacgtgtggggtcttcggatgcgaacgcgagtccgtgcgatgcccaggtcaagtttgcagagagagtctgc

SEQ ID NO: 39213 - DNA, 623 bp, Homo sapiens
  chr3:44596479-44597102
  hyper
cgcgtctggatcccccgactatggcctgagagcgggatgtgagtggcctgggccctcgcgagaccccgaccccgcccgcggcaggtggccgggcacagccgagaagtaagccctgccagctctcccgggtgcggggacgcgcgcgcccaccttcgcaaacgagacttccgggatcccggagggggcggaagtcgaggcctctctcgcttccggctcggccattgtttttggtctaacgggcagtagagtgtccggcttcggtgccgagtgccaccgcgagtgggccgagacgcggagggaggcgcggccggagctcgggtcgccgacgctggccaggaccgcgcttcttcccggcggcaggcggcgcggtccccgtgactctcagaagccgcccgatgtagagccgcttctttgtctcatacccctgaccattcgtgcgtggcacggagccgggtatctgcgggtacagcgatgaacagggcagacgtggccaggtgagcggcgctgctgaagcctggtttaacacgaaaggtagatcgctgttttcccagctcttgcagtaggaaactgtatgaactgtcatatttgggtcagacccaggctcagaatcgcaaacgtggagc

SEQ ID NO: 39214 - DNA, 972 bp, Homo sapiens; identical to SEQ ID NO: 24439
  chr3:48693261-48694233
  binary

SEQ ID NO: 39215 - DNA, 922 bp, Homo sapiens; identical to SEQ ID NO: 34825
  chr3:48698806-48699728
  binary

SEQ ID NO: 39216 - DNA, 1220 bp, Homo sapiens; identical to SEQ ID NO: 24443
  chr3:53032401-53033621
  hypo

SEQ ID NO: 39217 - DNA, 1821 bp, Homo sapiens; identical to SEQ ID NO: 27002
  chr3:54155239-54157060
  hyper

SEQ ID NO: 39218 - DNA, 2003 bp, Homo sapiens; identical to SEQ ID NO: 27003
  chr3:55520340-55522343
  hyper

SEQ ID NO: 39219 - DNA, 716 bp, Homo sapiens
  chr3:55522560-55523276
  hyper
cgcatgcgtggtgaggccggcctatgacaaactctgcaggattttaaagccgtactacgggctggggtgccgggaggcggggtacactctccttgtctccccttctctaagttccccatcccccgcggcatctgctgaaagagagaggtccactccgcagccgctgcctgcctgccgcctggttgtctgcgctccttccagagccaccgaccggcgggaggctgaaccccaacttccccgcctggaccccttggctcgcccgcgtatcccagaccgctcccactggggctccacggagactgctgccttgacatggaacctcatgggggacctcctcattcttacctctgggggaggatacttaagcactggggctgatggatagggttaggcgctcacctcctgcaaagtccccagagtagtagggacttgggtagtgggatgcatgattgctcatctggctccggcccagagcatgaggcgcgatgcgtggtcctgccacggagatcttggcgggtgccctcaggtgaggagattgcgaagtttggcaaaaccgggttccgggcaccggaatttctagacgcttccagatgcccgtggttttggggactccggaggggcagggttggtggatttgtgtccgctacctccagcacgccgagggccccaccccacaaacagtgcctcacactggagcgtaatagttattttccgcc

SEQ ID NO: 39220 - DNA, 888 bp, Homo sapiens
  chr3:69590903-69591791
  binary
cgaaacccttagtgtcctctgctaactccagggatttcccccccctcttttcgctgccttttagaagtatctctgggggccagatctgggcttcatcagcttttctcccgacctcccacgaacgcgcggcaaccgaagcacgcggtccccggcggcgcgtttgcaaaccccaccaacgccaacgcctcgaaaccgccaaacttcctgtctccataccaccaaagcgaccaaagcgccgtgccaagtgccccagggactccagcggaggctgcactagacctcgagccccagggcggggttttccgctctcccaaactcctgggacccgcacctccgctgggggtctccaaacgtgcgcgctgcgcccggggcgcaccgggcgcgcccgtggccgcgtcttgcggcctcgccctggcagcacgcttggggagcccggggcggtcgcccacctacctgctccgccacctcctccctgcggcgctccggggctgtagacggctactttattgtctcggctgcgcaccgcgcgggacctggggacccggctctgcgccagtcctgcaagtccactctgcgctgtgccttccccggcggcggctgccttcctcttcttcctcttcctctctgtccaagctccagctcagcacgtgagctacgcagcccgactcccgggctctctgggcagccagcgcctgccgcatcccccggcccgggtctgcaggtcgcccccgccaccgccgctcgccgtgcgtcctcgctttgctccacacttacagctgtgccccgggccgcctttctcgcgtccttccgtcctgcctgcctcctctcgctgtcagccggggctttcggctccctctctccccagcagcccccgcccgccgcctctcc

SEQ ID NO: 39221 - DNA, 664 bp, Homo sapiens; identical to SEQ ID NO: 27011
  chr3:8810773-8811437
  hyper

SEQ ID NO: 39222 - DNA, 913 bp, Homo sapiens
  chr3:96531754-96532667
  hyper
cgctcccctgacctcttgtcactgtgccatttccctcctgtgctttctgcccacttggaaaatatcgtatatcctttacaagaccgctactttctctcctctgttcacatttctccattaccatccacattttctcaaaacattccgacgggttttgaagtggggttttcaacctccctcgactgtgatagccgaagtcccttcaagaaagaaaaatgatgttggaaatactagtaacaaataaagtatcacggaaatccccacccaagcgatacggtttccttgacgcgcccttaaccaaggcgttaagtttagcctgacagcatccctccctcctttcggttcctggcctgatgagccgcctccacctgcgagcggtgcaggcatttttgttgtcgactaaccccctctagcgccgaactggcggcatccgagccgcggctgccaggccgggagaaggctgggcttggccgggctctgcagcgctccgggctccgtccctgccctgggcgcccgcctccgccgcggggcgaggtggtggagaccgcggacgccgagggtcctcccagtcagcacgccgcgttgccccggccctggggcgggggccgcggagtcccaccaagtggcccgcgcctcggcttccgggagacccgagcgcggggagggagtgggtgccgcgagggggcggctcgcgcggggagagccgtcagcccacggcgcccctgcgctgctgtggatgtggccacgcgccactcggcccttggactgctaggagagcgcggcccgacgccaccacgccgtggacgctcggggacccctgaatcccagcgtcaaggctgcgacgatgctcgtgacctccaccgcgaagtcacctccgcaaggcgacgcaaggacctcggcgatcccgggcgcc

SEQ ID NO: 39223 - DNA, 985 bp, Homo sapiens
  chr3:96532674-96533659
  hyper
cgccactttccagcctcatgtaaccccccctctgctgcttcctcccggcgctttgcttttctacaactggaagccgcgaaggcggctactgcgctgagccgctcgctctgctggtcaagtttgggcgacccgcgcggaggagggtcgggctgactgccgccgctgagctgtccccggacgggagcgcctgtccacggcactcaccccctccagcggtggaaatgtggagaagtaagtgggaggcggtgtcgggaactgactcctcttaaaacggtcggcgccgctgctctgaaatgggcggctaagtgcttgtgggactaagggcggcctcagagatgcccggaaaatcgctgccacggccagagtgcggcgcagacgcggcagagttggaggtgtccgcggtgcaggctgctgcccacgccgctcaggccaggtgctgagggctcagcccgcgcctcggccgaaccactctcagccccgttgagccacctcgtccgcccggctttcatcgcaccggccagaggaaagttcccgcggcccccacgcctcttcacagctgcagcgcctcccctgcttttggctccgcaagtgcccacttgagtcgggagaggtcctcgggccgccccaactgcccgccccacctggcagtccgtccccgcccccgtcctcgcggtgaggcgctccccgccccctcgctcccctcccccaaaccacagcccgagctcgctcttgcgcgcgcgcgctctctccggcccaagtgaatagtcctcgcgcaagcgggacactgtggtggatgcaattcccctcgcctccagccgcgaggagctccccggcgccgcaggcagcgtcctcctccgaagcagctgcacctgcaactgggcagcctggaccctcgtgccctgttcccgggacctcgcgcagggggcgccccgggacaccccctgcgggccgggtggaggaggaagaggaggaggaggaagaagac

SEQ ID NO: 39224 - DNA, 1410 bp, Homo sapiens
  chr3:98619774-98621184
  binary
cgcgccaacttgggggacagacgggcaagaccttgcctttgcaactcaaccccgtgagtacccagccaggtccggccacgcacgaaagcgcaccgcgcctccctgcagcgtctgcagatttgttcaggggccaagagacccgcagccccgacggaggttcccccgccgctcactcccctgggaccactcaccttgctgggctccagcgtcctcgagcagcaggagcaggacaagtaagagcaggaggaacagaggcatggagaaggaggaggagttggagcagggagggagggagcgggagagggggagcgcggcccaggcgggggcggcggccgcggcccggacttggggacactgcgggcagcgcctggctctcaccaccgcccggctcgccatcgcggcggccggcagtctgcctgcatagtgcgggtgcctcggcagccccgcgcgcctctggccgcggcacccgaccaggagacggcggcagcggcgggagaacaagaggcagccctcgcctcaccccgcgccgggacccttccgcccctcaccccgctttcacctactcctccttcgtcccttccctccgctccccgcgccgagaccccaggccggagcgcaggggaggggagggaaggaagcggagtcctcgagccgcggaggacggccgcggcggagctaaggaacgtgcctcccgcgccgcgctcctcaccagggtcgccgctcgccgcgctcacccgcggctccggctagctggcaggcaggcccgcagccagctccctcgcgctccctctcgcgcgcgccggccacgccccctaggcaccgcggccaatcctcggccagctctggtccgtctccttccgcgaaacccaatcagcatgctcgctcctcgctcgacccgctagttctccggcccattcctcgagctccaccgccccttacctccctcttccaatccccttcggcctttggaggcgtcccacccgcctcctccaatccaggtcccgccctccagcttcggatccccgcggcccccgcccggcccgggcgcctgttattgttgggccctcagcccaaactgatcccgcagaggcggcagccagctcgtcagtgacttccgggacgtcccccatcccgcgctccctgctcctcaggcccagcttgctccttgctcctttctcctcgctcctccgacgcacatcagaccactggaagggggtgggaaacctggatcctgggttgttttagctgggagctgagtctaagggactttttttttttttttaatggcagagcgtggcttgttttgttaaaactgccgccagttgttgcaacagctccgagttagaataatagatgcagtgttcagtttttaatatatgtgttccctgttttctctgctctttttatggc

SEQ ID NO: 39225 - DNA, 1023 bp, Homo sapiens; identical to SEQ ID NO: 28027
  chr4:10458329-10459352
  binary

SEQ ID NO: 39226 - DNA, 733 bp, Homo sapiens; identical to SEQ ID NO: 24451
  chr4:10462790-10463523
  hyper

SEQ ID NO: 39227 - DNA, 1752 bp, Homo sapiens
  chr4:109088005-109089757
  hyper
cggtacagccagggtgtacccttgcggtgggtcggctcggcgcacccacagctcccagctgctagcccaggcgctggggccgcagggactgaaccccgcaccgcccccgcagcccgggtgcgcgccccatcggccggcctgctccccgcggcccggctcaccggtggtagggacggccccgcctgccccagcccacgcccgcctccccttcctcccgcctgtggctctgctcgtctccacctaagcctttggtggtttaacgcacttttgcagagacatctaccaagagatagcgtgtgcactttgttttccgtcccacggaagaatttatcagtagcgttattcagccctactcgctttaaagcacggcacccctcagcccaacaaaaagaccgaaggcgaaacattgtgggttcctgcccgcgaaccaaccgttcagccaccgaaccccctaaactgatccatttggaataagttaccctgcccctctacctcccatcctacacacacacacacacacacacacacacacacacacacacacactgcggaccgggggcccagctacgcacacaccccaaaacaaacgagggatctactcgggaccctcagccgggcggccgggcgccttcgttcccttcctccctctctgagtttcccagggacccgccacgcctctcggaactggggcagcggcccgctcacctcgtgtccgttgctggccgggatgatttcagactcgttcaccaaggaagacttgatgtcagctaaatcgccttcctcttcgggatgactgatctcggcgaagatcttttccttctgaggatcgccctcgtccttgaaggggatcatctcgtccgtggcgcagagttccgggtcccccccgccgccgccacctcctccggagagttggggcatcccggcggctctgtaatctccgctccgctgtgggagcacccgcgcaacagcaggaaagacagaggggtaactcaagggtgggggaggaaaggagagttggaagggttcgtgcagcaggacagcgggcggaagcggggcgggcgagcgcggggccgccggccggcagccggagcagctgccgcggcgcccgaatcccggcggccgccgcgctttcccgcttcgcggagaccgacgcaggcgcccgcccccgaggccgaagggcactgggcggcgagggctgcggtagctggcgactccgggggcgtctgcgcggcgcgcgctagacgaggctgccccggcggccaccccgcgaccccgcgtcgccgggatttgcgcgcggagaacgccggttctggagggagcacgcctccccaaagtgcagaggagggtccggcggcgcgtctccgcggaaaccctctccactgtagttaccccggatgccgacttagtagtttgttttccgagaaaagagaggggatctgggcagaagggccccgtttgccccaaaagaaggtgcaaggatcagaagataacgaaacgtccacttcctgaagggtgggaaaaaaagaaaaagaaaaaggagccacccacgctggagatgtccgttttagatcttcttattttcttccctttcgcttcggtttttcttctcgaggctcatttaatctgctagagaaggaggaggagcagaagatgggggccgaggaggaggggaagagaaagagaagtttgccaagaataaagtttttgccggcaagcgcggggactccgcagtggagggcactgcggagtctc

SEQ ID NO: 39228 - DNA, 1806 bp, Homo sapiens; identical to SEQ ID NO: 34834
  chr4:111542887-111544693
  binary

SEQ ID NO: 39229 - DNA, 1902 bp, Homo sapiens; identical to SEQ ID NO: 30338
  chr4:113435438-113437340
  binary

SEQ ID NO: 39230 - DNA, 1053 bp, Homo sapiens; identical to SEQ ID NO: 34838
  chr4:113437637-113438690
  binary

SEQ ID NO: 39231 - DNA, 978 bp, Homo sapiens; identical to SEQ ID NO: 24456
  chr4:122871204-122872182
  binary

SEQ ID NO: 39232 - DNA, 1563 bp, Homo sapiens; identical to SEQ ID NO: 27024
  chr4:123747655-123749218
  binary

SEQ ID NO: 39233 - DNA, 550 bp, Homo sapiens; identical to SEQ ID NO: 28031
  chr4:1299071-1299621
  hypo

SEQ ID NO: 39234 - DNA, 936 bp, Homo sapiens; identical to SEQ ID NO: 23259
  chr4:13548957-13549893
  hyper

SEQ ID NO: 39235 - DNA, 878 bp, Homo sapiens; identical to SEQ ID NO: 24461
  chr4:140655885-140656763
  hyper

SEQ ID NO: 39236 - DNA, 1363 bp, Homo sapiens; identical to SEQ ID NO: 27027
  chr4:141293964-141295327
  hyper

SEQ ID NO: 39237 - DNA, 837 bp, Homo sapiens; identical to SEQ ID NO: 28032
  chr4:142054075-142054912
  binary

SEQ ID NO: 39238 - DNA, 1455 bp, Homo sapiens
  chr4:150999250-151000705
  hyper
cgcggttacgtttcccaggcggaggagcgcgcgtcgcggctgcgcccattaacgcgcggcgccgggcaggagccgtcaggcgggcggggctgcccgggacccgcaggagctgctcctcccgcgccggcgctcggccccctcctccgccccctcctccgccccctcctccccttctccgcggtttggcatccccggggccgggaagcctcctccagcgctgacagcctgtcggcggcggagggaggccagagcgcggatgcttgccagtgggccgggcctgaccgctgcgtgggaggcgggctgcattatttcccgctagggccgcgctccagggaaggaaggggccagacacggccctctcagccccgaacggcgcgcgctgcccggcgggcgggatccgggcgcggccgaggcggcggcgctgcaccccgggcctgggcccgcgcgactcccccgggggcctctcccacgctccgcgccccgccccacccttccttccttcctcccctcggcgctcccgggagcgctcggcagacgcccgagctttgtgggcgcccgcgggcccagcgcgagcctcgggcggcccaactttgcctctcccggtcggctcccgagcgggacttgtgaggcgtggccgggtggaggaggcgcttgcgggggcgtggggctccccggcaggcgggaggcacggagcaagtcgcactggacaatgacctgggcagctcggcgctgcggacacttttagctgagggcgcgggcgggtcggctcctccgcggctcctcggccccacctgcgcggagagggcgggatgccagagccaggtgtcccggcgcgttaagggccctcgcagtcagacgtccctgcaccggcgctcgcacccttagtcggcccggaacgtctttttgcggacgccctcggagcagccgcgatggccagcaccaggagtatcgagctggagcactttgaggaacgggacaaaaggccgcggccggggtcgcggagaggggcccccagctcctccgggggcagcagcagctcgggccccaaggggaacgggctcatccccagtccggcgcacagtgcccactgcagcttctaccgcacgcggaccctgcaggccctcagctcggagaagaaggccaagaaggcgcgcttctaccggaacggggaccgctacttcaagggcctggtgtttgccatctccagcgaccgcttccggtccttcgatgcgctcctcatagagctcacccgctccctgtcggacaacgtgaacctgccccagggtgtccgcactatctacaccatcgacggcagccggaaggtcaccagcctggacgagctgctggaaggtaggaggggagggcgccgcacggcaggtgcggcggagcgccggcaggtgcagtgggcgtgagccggcgcagcggggagcccgcggggtgctttccaagccgcac

SEQ ID NO: 39239 - DNA, 755 bp, Homo sapiens
  chr4:166299933-166300688
  hyper
cgcagtgacgtgggtgggtcatgggtgtctcaatgacagtaacgttcccgaaccccggaccttagctgtcatttcacctgcgtcgtcccggacgccatttggctgttgacgtggttccgagccagcaaataacgccagcagccctcccagatccacgccggcccgtctctccgccggccccctcctcgcagtggtttctcctgcagctcccctgggctccgcggccagtagtgcagcccgtggagccgcggctttgcccgtctcctctgggtggccccagtgcgcgggctgacactcattcagccggggaaggtgaggcgagtagaggctggtgcggaacttgccgcccccagcagcgccggcgggctaagcccagggccgggcagacaaaagaggccgcccgcgtaggaaggcacggccggcggcggcggagcgcagcgatggccgggcgagggggcagcgcgctgctggctctgtgcggggcactggctgcctgcgggtggctcctgggcgccgaagcccaggagcccggggcgcccgcggcgggcatgaggcggcgccggcggctgcagcaagaggacggcatctccttcgagtaccaccgctaccccgagctgcgcgaggcgctcgtgtccgtgtggctgcagtgcaccgccatcagcaggatttacacggtggggcgcagcttcgagggccgggagctcctggtcatcgagctgtccgacaaccctggcgtccatgagcctggtaagggc

SEQ ID NO: 39240 - DNA, 987 bp, Homo sapiens; identical to SEQ ID NO: 30351
  chr4:174450407-174451394
  binary

SEQ ID NO: 39241 - DNA, 995 bp, Homo sapiens
  chr4:20253524-20254519
  hyper
cggacttggtgttatttatttgggaagcgcccggacggcggagcttggcggcggcggtggtggtggctgccgcagactgtggttaaaaaaaagaaggcggcggcggcggcggcggcggaggcggaggcagctgcgaggcatgggagcgccgaagcgcccaggcgcaggccgaagctgccgcgctttctgggcacggcgggagtgctgagcagaaaggggagcgccgggggcccgcagccggctccggaggcgcgggccgggtttttgtttggctacgctgagcgccagtcagccccagcgaacaactccagttacgacaacaacccaccttccttccagacaagcgagacttgggctgctgcgtccgtcctattgtttagacacttgccaggggctccggagtcggcagagccaccgagtccccgctctgagtcgtcgccctccctctccccgacctcgctccctggagcgggaggccaggaaagcagcgggagaggggaaggggctagaaggagaaggactacccgggactgcggccgccgcgtcaggtgcagcgccaggagccgggcggcgtcgccacgccggcaggggtaccgccactgtggccttgggggacggaattcaaagcctgggaaaagttgctgcactttgagaaggacgaaccactagtgggagaccgccgggggccggccgtggctctgcgccctccggaacccggctcttgtttcttctacctttgccatcaggtgtctgccgcggagctgcggcttatctgggagacgagcggggttgacacgcgcgcacacactactgccattcagctgccgcctggctctgcctggagtagtggatcccacccgcccacctgccaccgagccattctccagtacgccccagcaggacgctgacacctccaaccttggcctttgcctttccactccttccggtctgcctggtttttaagtccgcccccagtcagtccccactcagtcttc

SEQ ID NO: 39242 - DNA, 1983 bp, Homo sapiens
  chr4:330305-332288
  hyper
cgcgcccggagcggatgggcctggcccggctccaccccgcggggctccgcggctcaacgggtcgcccaggggcgcgggcccggcttcgtcctcgacggtgtccgccccggccctggctaggccgacggcagccgggtccgggtggggctcgggctcggggcgcgcccctcccatctctccagggtccgcgtcctcgctgccgccaggtcccgccgagatccccggtggccccggctccagcggctgcagcgtcgccatcgccgggcagaccccggccgacctcaaagcgaccgcgcggtggggccggcggggactggggctgcgcagcgcggcctggggtgggggcggcggggcccccaggagctcctgggaaccgagggtcctggggcggtcccgccccgcacagctccgggtgagcttggggagggagacacactctcagcccacctcgccccgcccgacagcgctccgagtcctgagtcccctcacccccattctacagacacgaaggtgaagccaaagacgggacgctcacttcctgagaatttgctgcctgctgcgtggacaccaccgacctattgtttacagcggtcagggacccgccccccagacccccaggaccgcgcttccgggggaggagggtgtcctcagcaacggtgacccgcaccaaagccctcctcaccggggtcaccgccacagccggtgcgaggcccgcagggcgctggggatgcgcgaccgactcccgtgaacctgctcctcgcgcgtcagggagagctgtgcacccaactaggctctgtgaggacggactgaggtcggcctgcaggctgcggccccgaaggcaggatttgtggagagatgattcgcgagccttggaggaaggatgggctgtgcgtgcgtgggtgcgtgcgtgtgtgtgtgtgtgtgtctgtgacttttgtatgtttatgtgagactgcgtacgtgcgcgcgtctgtgtgtgcgcgcgcgcgtatatgtctgtgtgtgtgcgtgcgtgtataatttctaaatggacgtcaccttacacatcacaaggttaaaaaatgacccctgggctgtgccaggccaagcacgaagagaaagccccgcctgaaactgcctggaggccccccggctgtcactctcgccacattccgtggagtatgtggttgcaacttctgtcactcaaggtctgatggcggggagattggagccgtatccaatcagcgcactggagtgaaaactgcccaatcaggcacgcagccagagaggaggcggtggcttccgggatgtggcgcgggtctttgcgtctggctactaccagaccgcgggttaggggcttcatctctctgcgttctcagttgtgggaggccttggtgattcggccacagctcagcctccgtcgctctgtgacctgcgggtattggatgattggtagctaagactcccgaatacttcagaagtggggaaatggtgagtgtgcggggcagggcgtcccaaggctgaggaggtctcatcggagctggcgggaaatggcggcgggaccgagtctgcgaacggagtccccgctgccgccgctcagccctggggcctcagtaccctccggtgagggacctgggctcctgtcggtccccgcacagcggctctggcccagcctgcagccctccttgtgcagctctgcgcccgcagccccgcaccttccccaggctgtggggtgaggagtagcttatctggaagccgcccgcgcggcgtgcgcgatgccggcgtgggaggagctgtgggagaagctgtggtctggggatcccgtccctgctttaccctgttcggaatgagatcgaggccccatcaaaacagagttcatgtgagcaaatggggactcattaatgggacagcgccggccgtggctcgtggtttgggggctgccagcgggtcttgaaggaaaagcttttgtgaggtgtgtgaggaagcgaagcaaatcacccgccc

SEQ ID NO: 39243 - DNA, 1135 bp, Homo sapiens; identical to SEQ ID NO: 34862
  chr4:41258731-41259866
  binary

SEQ ID NO: 39244 - DNA, 2383 bp, Homo sapiens; identical to SEQ ID NO: 27041
  chr4:42152717-42155100
  binary

SEQ ID NO: 39245 - DNA, 866 bp, Homo sapiens; identical to SEQ ID NO: 24478
  chr4:42400216-42401082
  binary

SEQ ID NO: 39246 - DNA, 1480 bp, Homo sapiens; identical to SEQ ID NO: 28043
  chr4:54965998-54967478
  hyper

SEQ ID NO: 39247 - DNA, 1425 bp, Homo sapiens; identical to SEQ ID NO: 24481
  chr4:57521376-57522801
  binary

SEQ ID NO: 39248 - DNA, 547 bp, Homo sapiens; identical to SEQ ID NO: 27048
  chr4:57687545-57688092
  binary

SEQ ID NO: 39249 - DNA, 761 bp, Homo sapiens; identical to SEQ ID NO: 27049
  chr4:58029764-58030525
  hyper

SEQ ID NO: 39250 - DNA, 1435 bp, Homo sapiens; identical to SEQ ID NO: 34870
  chr4:6201288-6202723
  hyper

SEQ ID NO: 39251 - DNA, 875 bp, Homo sapiens
  chr4:7194127-7195002
  hyper
cgcgctcgggtacgccgggcttcccacgagcgcctgggcggcgggccggccggcaggtggcggtgcgcgctcggcgtcgcgggtggcgccggggccgccgagtcccctcctcccgccgctccctcccctcgccggctcctttctctgcgctctcgctcgcgctccccagcgccctcctgctctcccggccgcggtcccctcgtccgcgccgccccgccgccggctccgctgccgcccctggcgaccatggcgcaccgggggccctcgcgcgcctcgaagggccccggccccaccgcccgagccccgagccccggggctccgccgccgccgcgctcgccgcgctcgcggccgctcctgctgctgctgctgctgctgggcgcctgcggggcggcggggcgctcccctgagcccgggcgcctgggtcctcacgcccaactgacccgggtgccgcggagccctcccgcggggcgcgcggagcccggtggcggcgaggaccggcaggcgcgcggcacggagccaggcgccccgggtccgagtcccggtcccgctcctggtcccggcgaggacggcgcccccgccgcgggctaccggcgctgggagcgggcggcgccgctggccggagtggcttcgcgggcgcaggtctcgctcatcagcacgtcgttcgtgctcaagggggacgcgacgcacaaccaggcgatggtgcactggacgggcgagaacagcagcgtaagtgacctccacgcgctcgccgcggcccctacccgggacaccgcgggacacccgggcgggaccgccacggcccccaccccagatccccactatggtcatcaggggcgggttcttggcgacttgggcacttgggtcacctcggccgc

SEQ ID NO: 39252 - DNA, 1344 bp, Homo sapiens
  chr4:75858228-75859572
  hyper
cgccgcggggcccgggtgggaggggtttggcagcggcaggcgcggcggcggcggcggaggcggaggcggccccgggctcgggcggctgggatggagcagaagagcgcggagcaccggagggcacgcagctgacggagctgcgctgcgttcgcctcgtttgcctcgcgccctccactggagctgttcgcgcctcccggctcccaccgcagcccacccggcagaggagtcgctaccagcgcccagtgcgctctgtcagtccgcaaactccttgccgcccgccccgggctgggcaccaaataccaggctaccatggtctacaagactctcttcgctctttgcatcttaactgcaggtaattggcgccatcctcccggaagggcaggtcgcggggtgggccccagtagctagcgcgtggtcggggctgaagctaggagatccggcagtgagtcgccgcgcgcctccgggtgagtgcgcaggtgtgtgcgcacttagatttggggtgacgtgcacctttggcggtcccgaaccgtactgagggaggggacgatggggtccttcctgccgcagcccgcgcccgcacaaactccagctttgtagaacaggtggctgtcttagctgcgtgttcgaacccagagtgggcaacacggactgcgcctcaaggcttctctttcttcaccagggtttcggagcgcactctgccaaagtacgggaccagacttcttgttgccgttgggccctggaagggatgaaaaagccggggaagtgggggtgggaggttcgcatctgggaaggcttcagcagcggctgcgcgcctggcggggctggtttgctttctcgagtcttggcggtctctgatctccggcgtcccttcctagttatgcttaggatgatgtggcactaacagcagcggcccggccttggtcaggctcgcaatcgtcactgggggtagcaaggctaccttctgccccagaactccccaaaaacgtatcccatagaagaaactattaacttggctaaactagcatcctctcccctccccctgcaccacctctgaaaggcttcgtaggagccactctcgggtttcgggaccacagacggcgacgacctctggcagcggggatggggaagaggggagccagatgactgagctcggcttggcggggaccggggagagattcagaaagacgctttgaatctagagttcaggtacctattttttccagaaaacgtctcccgaaaagggacaactggctgtggatatggtgctgctgggaaaagtagcccgactgcgcggccactggcattttcagtttaaatgtgacccaaagtcacatagcgcaaacc

SEQ ID NO: 39253 - DNA, 997 bp, Homo sapiens; identical to SEQ ID NO: 34876
  chr4:81951925-81952922
  hyper

SEQ ID NO: 39254 - DNA, 1262 bp, Homo sapiens
  chr4:82135701-82136963
  binary
cgacgaagcaaagccgggagcgcaagccctgacagcaccgccaagcccctagctcggagcaacagcctccaccgcttctcctcgctaaacctagagaaccctgaggactccccactggggctgagcccctcccgccctcaacagaacctctaaacacaagtagcctttccctgcctccaggagctcacgaaacgctgccacaccgagcgaatgcaacgcgtacacacgtccacactcgaacagcacaagcaagagaccggctgggtgtggaatagaggcgcacatcgcgcaacgcattcacagcatgcacacgcgcgcaccccgaccccgtccctccccgcgcgccctcacaccccggcgcccaagacccccggcccacgaacctcaccagacagccgggtaactttccaggtgcgcagcttgtcacctcggcgcggccgcccctgcgtctcagcgtcctctcccacgccgccctccccagccgcctgcggcgccggagcccagcgcaggtcagctcagccagccccgccgtgcacacggtgcgcagcgtgggcccggggctgccggctcagtcgctccggctacgtgtgagccgggggcgcgggttagcgcgatgcgggcaggagctgcggcggcgtcggtgctgccgcctggctccgcggcgggggccggtgcagaggagacacgcagggagggagggaagagaggagggaaggaggagggagggggtcagccggggctactgcctggatagttgggcgccggcttccctaaaggtggggtcacccgcgcccgcacgcacactagcccgaacctttactcccgacacagccgcagtctgcactttataccccataccctccatagtgaggcaacttaagtagggcgataacatcgtggttgtaagcatttttgttcatgttattatttctatttcaagtgtgtgggacgaggggagaggaaagttcagggaggtgttcattttttccttcccctccctttcctccatccttccagtctgttttcactgcaggctctctccacttcgccttccctcccagagctcaaacaggcgcacgtaccctggacatgccctcctctgtcacaccaatgcctttctacgaagacatgtgaccccgaagcagctcgtcgacgcgcccctcccggactctggggccataacttacatctagtttgccagttcacgtgatgctgggggcaggggttgaatcgagtttcgagggacagagattataccttcc

SEQ ID NO: 39255 - DNA, 1186 bp, Homo sapiens
  chr4:87515033-87516219
  hyper
cgaagagtaagggaggagccagcacttacgcatttttcactctcctcctcactccctagggtcatagttttgattctgaagttagaagtgtgggggtcgtcggctgcattttcaacttggcctaaaagttggagttcaccacactgcaggcgctaggaactctgccgctcggtcaccaacctgagcctctggctagtccgaagaacgcgaaaagccaggcccaaggcactggttgtcatggcaaccggggcgctggtctccctggcgacctcgtccctagggaggaggtggagctggatgccaggcgggccaatgaggtcgaggggagctcggggtgggagatctgcggtcctcccagtgccggggaatggttgagtgacaggaccgggggggcggagccggcgcggctgcccgaggtggagccccagtggtgcgagtagctccagcggccacgctgaggcgagggtgacacaccatgctcacggcccctggagaccgtcgtgctggcgagccgtgctccgtagctccccggtccgcctcggcagcggtcagagtcgcctacaggagttgagccgcccgcgccagaaggttttggcgaagctcttggagaggcgtcgagcacagtagggcggcgggggtgcgttgagcgctcgggggtcaggcagtcggccgggatcgccgctggggagcgtttccgaggcgaggaggaggaggaggagatgctgctcctcttctccccctccccaggctccttctacagctccttcagcccacgcccgcagccgcttgtgggagaagtggtggtggctctcggcgcccgcggcggctgccggcggcccgccccgacgccgcgtccctgcagccctcgcccggcgctccagtagcaggacccggtctcgggaccagccggtaaggacgagagccgccctgggctctgcgctgcatgtgcagaagtgcaaaacaaagtacattgcgctcgttctcttcctcctctctctgctttcgctccagtccctaaacccaactcctcggttgccctggtagaaggaacttttctttggttttggtggtgggtgtttttgtacgttagagtgggggtggggtgactggagtggggaagaatgagatgaaactccattgctaattaggtagatccatctcctctgcggaagaaagccggattctc

SEQ ID NO: 39256 - DNA, 1830 bp, Homo sapiens; identical to SEQ ID NO: 23281
  chr5:100236036-100237866
  hyper

SEQ ID NO: 39257 - DNA, 1887 bp, Homo sapiens; identical to SEQ ID NO: 22915
  chr5:100238197-100240084
  binary

SEQ ID NO: 39258 - DNA, 1429 bp, Homo sapiens; identical to SEQ ID NO: 25707
  chr5:10564301-10565730
  binary

SEQ ID NO: 39259 - DNA, 1094 bp, Homo sapiens; identical to SEQ ID NO: 27065
  chr5:110559569-110560663
  binary

SEQ ID NO: 39260 - DNA, 2342 bp, Homo sapiens
  chr5:113696433-113698775
  hyper
cgaactccaacaaaactccagcactgtccgtgggcagcgactattcagcccaagctatcattcttaatttccctgccaggctgcgactaccggggtgaatcagcccgcgccaggcccctttcccacccgccgctgcagttaggacttggcaaagatgctcgatatttgcgtatttgtgaccggtctttgctttgtgtctgcgctgcaggtgaggaggaggaagagaagcagaagagcagctggaggccggcggtggctgagcagcccccacacctttgagcgagccgcctgcctctccaccggcaaggaagccctgggacctccggattcgggctgccggagggcctgagcgccagagcccaggacccggcggccgggggcgccatcccctcatgttctggagaaggcgcaaatgtgagctggcggtagcggggaaagccctccgcccccgccaggggggacccgggaagcccggccggctctgtcggcagactgcggggatcccctcctccggccccgcccccacccacccccggccggggtgccgaggcggttaaccctacccgcgccgcagcgcacttgggctagagcgccgcgcacccaatccagattccagagcctgccggctgggaaagatccggtctcggggtcggctatgatcccgcagcggccaaggcagggctcaggccccgggattctccccacacgctgctgcactggcgcagccggtcgccaaactttttctccccaaagccagtgcccccgcagttacttggcgggcagccggcagcccactctcggcgggatgatctgggagaagcgggcgtgggacgagggggctgctgttttgcagccctgcgaggcgtgcagtcggagaagtggtcggggttccacaccgtccctgagcctgcccccggccaaggtggcccgacgtgctgcagtggctggcgcaggtgatccgggcagcgcgtccggcactagtcaagggggcagcggcacgggagggaggggcgcctttctcttttctcctccccctgcagcccagctgcactgcgtgggggctctccatctccacgcaatcagcaggcggaatccctgccctggagcgccctggctctggactgcacccccctagggtttgtcctgcagattcccctccccatctttctctgccacacacgcttccctaagccgcgcgcgccgcaaactcagtctcggtccccgcaggtgatgtcatgcccattgttttggtgcgcccaaccaatcggactcgccgcctggattctaccggagccggcatgggcccttcctcgcaccagcagcaggagtccccgctcccgaccataacgcattgcgcagggtgcaccaccgcttggtctccctgcagctttaacagccctgacatggaaaccccattgcagttccagcgcggcttcttcccagagcagccgccgccgccgccgcgctcctcacacctgcattgccagcagcagcaacagagccaggacaagccgtgcccgcccttcgcgcccctcccgcaccctcaccaccacccgcacctcgcgcaccagcagccggccagcggcggcagcagcccatgcctccggtgcaacagctgcgcctcctccggtgccccggcggcgggggcgggagataacctgtccctgctgctccgcacctcctcgcccggcggcgccttccggacccgcacctcctcgccgctgtcgggctcgtcctgctgctgctgctgctgctcgtcgcgccggggcagccagctcaatgtgagcgagctgacgccgtccagccatgccagtgcgctccggcagcagtacgcgcagcagtccgcgcagcagtcggcgtccgcctcccagtaccaccagtgccacagcctgcagcccgccgccagccccacgggcagcctcggcagtctgggctccgggcccccgctctcgcaccaccaccaccacccgcacccggcgcaccaccagcaccaccagccccaggcgcgccgcgagagcaaccccttcaccgaaatagccatgagcagctgcaggtacaacgggggcgtcatgcggccgctcagcaacttgagcgcgtcccgccggaacctgcacgagatggactcagaggcgcagcccctgcagccccccgcgtctgtcggaggaggtggcggcgcgtcctccccgtctgcagccgctgccgccgccgccgctgtttcgtcctcagcccccgagatcgtggtgtctaagcccgagcacaacaactccaacaacctggcgctctatggaaccggcggcggaggcagcactggaggaggcggcggcggtggcgggagcgggcac

SEQ ID NO: 39261 - DNA, 997 bp, Homo sapiens; identical to SEQ ID NO: 27068
  chr5:115151516-115152513
  hyper

SEQ ID NO: 39262 - DNA, 1930 bp, Homo sapiens
  chr5:122424905-122426835
  binary
cgtaaaacccacgtgtccagccgggaagctgccagagcgtggaaccaaggagccaggacgcggcagcggccaagcgcagcagcccacggcggttgagtcgggcgcccaggtccgtccgcactctcgcgccctccgcgggcctcccaattttctcgcttgcaggtcgggaggtttccgggcggcacaatctctaggactctcctcccgcgctgctcaggggcatgtagcgcacgcagggcgcacactctcgcgcacccgcacgctcaccgagacacccgcacgcacccaccggcagcaccgagttttcaggtaaggtgaggctggtctgggacttaagagtctagggcttggtagataggaaggttggtggtcctaggttgggggcgggcggcgagactgttctgcctcctggcgcctgaggccaacgcggctcgggcgctgcgccacgccggctcgggtcggctccgggcgctggctgagggcgggggctgcgtcctgcagccgagttctacggggcagcgccctcctgtcgggccccagcattgctggatgggagctggacgctgcgatcggggaggcagagcagggtgcacacagctccctctgtgcggcgccgcagcttcggagtaaactttgcgcccaagcggagttgggaagagggagccgcggaaccgggcggccgccggctgaaccaccggctcgggcactttctccagggtcccagtggccctcttcccggcccctttcgcccagctcacgcgccccctcttccctgccctctgcccccagttcgaggcgccggacatgctgaagcccggagaccccggcggttcggccttcctcaaagtggacccagcctacctgcagcactggcagcaactcttccctcacggaggcgcaggcccgctcaagggcagcggcgccgcgggtctcctgagcgcgccgcagcctcttcagccgccgccgccgcccccgcccccggagcgcgctgagcctccgccggacagcctgcgcccgcggcccgcctctctctcctccgcctcgtccacgccggcttcctcttccacctccgcctcctccgcctcctcctgcgctgctgcggccgctgccgccgcgctggctggtctctcggccctgccggtgtcgcagctgccggtgttcgcgcctctagccgccgctgccgtcgccgccgagccgctgccccccaaggaactgtgcctcggcgccacctccggccccgggcccgtcaagtgcggtggtggtggcggcggcggcggggagggtcgcggcgccccgcgcttccgctgcagcgcagaggagctggactattacctgtatggccagcagcgcatggagatcatcccgctcaaccagcacaccagcgaccccaacaaccgtacgtagccgcagcccgcgcgctctctcccggggcgccggcgccggcgccggcgggcgcgggtgcctgtcagggaggcgggtcggataggagtgacacggggccgggtgggtggggagcacctggtcctggccgctggcccgcgcctccccgatctctgtgacaaaagttttctggcgttggagaaggaaagagaacggatgggacggccggtggcactttggggttccctctccctccctctcctcacctgcttcacagtcccaagtgtttggggccggagtctaccgtggacccggcctaacagacctctgccctcccgccggacagtgcccggggccaggcgggtactggcagcgtgtgacagggggtgtctgggtcaggccctgcctggccttagccgggacgagggagggaccctcagcgtctctggggagcacgcagaccagggcttgtttttgctactctccaccccacctctggaggggtcattttcgggccgcggggttgtgggggaaccggcgggagctgttc

SEQ ID NO: 39263 - DNA, 136 bp, Homo sapiens
  chr5:126339372-126339508
  binary
cggagcttgcagtgagccgagatcgtgccagaggagtatacaaccttggtagatgaggagtgaagagaaaaacttacaaaaagtggatagtgaattatgtgtcatgagaggatcccacaaaaacgttacatttgtc

SEQ ID NO: 39264 - DNA, 1446 bp, Homo sapiens; identical to SEQ ID NO: 27075
  chr5:127872759-127874205
  binary

SEQ ID NO: 39265 - DNA, 947 bp, Homo sapiens; identical to SEQ ID NO: 28057
  chr5:127874216-127875163
  hyper

SEQ ID NO: 39266 - DNA, 1393 bp, Homo sapiens
  chr5:132947122-132948515
  hyper
cgaggcgacaggcgccgaaagcagagtgctgtgcctgcctcgtccaggtccctcctgaaactcagaactcgtctttgttttgcgggcgcaaagagggcggagatcatccacagtgcaagctctcttaggaccaagcccccagcccgaacgctgaacgcccccaacacactgctccctagacacgttcaagcgggtaccccgggccgctcactctggaccgcggccggctacgcacaagcagcgccgcaggctgcctggagtcgggtcgtgccctgattccttcctccccagcctcacatgcggcggaccccggggaagccagggccaggcgaagcgcagcgggccctttgggctgcagcgaggagacgcaagtttccccgcaaagccgcggggaggaggtgctgagaatgcctgcccggcgccccaacccggagccaagggcaccgggcccgggccgaggggccgcgctcgcctggctccgccggggccgctcggggtcctgaacccaagaacggcgcctgcaggatttcggagccgggcgcgagctgcgggctcggcccgagcgcttctgcgtggcgccccgcgtgccaaccgggtcactccggtccccaccgtagaccccggccacgagcctcggcgtcccagcctctcctcgagtcctggccttggccggggtagccctgccgagccctggcccagcggtcccttccccgcgggcaaacttggctttcccggcgcgggcagtaaggacaagcaagcgcccgcgccgggccctgcagcaagatgcggggccgcgggcgccaggaccccagtggggtgcagcgggaccggctggtggcggcgccagcgacatggcaccctccccgcgcccgctgggagctgcgcccgcgtacctgagacggccggggccgaggggaagaccaggtggccggacttgggcgggagggagggagcaccccgtggcggcggcggcgaccccgccccgcgtccttcggctggtttctcgggctgtcggcgggtcccgggctcgctggaggctgttgaggctccagctccctgagccgccgctgcccgctgctgtgccaccgccgccgcggctgccctatttctgccgccgggaccggagcccgtgacgtcaccctctgggccccgcctgcccaatcgccgccacctgtgcgcgccgcccgcccgccagccggtcagacccgcgcggcggccacggcaggtgcgcggagcaggcgggcgcgcacgcggggcgcgatgactccggagcgctggggccatctagggcccggagggaggagggccagcgtagcgctcctgcctctggctagcgtggagctcggcaagtgacagcccctcttcacctctgctctcctccaggctcctttcc

SEQ ID NO: 39267 - DNA, 391 bp, Homo sapiens; identical to SEQ ID NO: 7416
  chr5:135091190-135091581
  hypo

SEQ ID NO: 39268 - DNA, 823 bp, Homo sapiens; identical to SEQ ID NO: 27077
  chr5:136834322-136835145
  binary

SEQ ID NO: 39269 - DNA, 1290 bp, Homo sapiens; identical to SEQ ID NO: 23296
  chr5:140855386-140856676
  hyper

SEQ ID NO: 39270 - DNA, 399 bp, Homo sapiens; identical to SEQ ID NO: 24497
  chr5:141931151-141931550
  hyper

SEQ ID NO: 39271 - DNA, 987 bp, Homo sapiens
  chr5:142782217-142783204
  binary
cggccgcagtctccaagttgcgggctgtcagccccccgcgtgtgcaccctcacgcgccccgcacgccctcctcaagccaggcgccgccggggcctccccggagcccgggctcgcgctcgggcgcgccggggtggcgtgcaaatattcgggcgagtaaaattcagacgcggcttagcgttcaccacgaaaacgggtgtcgggcgacccccttggagggaaaggggacactagggggagaaaagaggccaggattcccgcgaggaatgagaggctcgaagcccccggcagttcgacagggctccgctcgccgtccgaggtcaggttcctccccctcggcccggccaggggacgcctgcggagggagaggaagaggccagcgctgtcacccgcgcgctgccctttcgtcaccgtcgcccggcccttgccagccccccacccccactccccgaggctaataaaagtttgtaggctcccgcggcggcccccgagttgtctccggtcccagcggcacctcgggggagcgagcgcgccccggccccctcccgcctcgcttcttacctctggcagaggagccgctcgcccgccaccgtccgcagttcccgccgcagccgagataaacaacttagcttgtgaacgcagaaggagcaggagggaaatatattttttttttctaaaaaaaggaagtaaacagccgcccctttctccatgggtggggggagagcccctatttaagaaagtctcccattgcccagctgacaagccagccctccgccccgcgccgggctccgcgggtcgaggttccgggcgcgcgtgccccgtcccggtcccagctgcttcggccgctccggctgcggcgtctccttccacccacagaatccgtccccgacgggcaggcggtgactcgggctcccgtcacagacacgagctcgcaaaatggaggaggcggcggcggagggaagagagcgcggacacgcgaaagggcagccc

SEQ ID NO: 39272 - DNA, 1346 bp, Homo sapiens; identical to SEQ ID NO: 24498
  chr5:142783958-142785304
  binary

SEQ ID NO: 39273 - DNA, 851 bp, Homo sapiens
  chr5:148651322-148652173
  binary
cgtgctcgggtctattccgggagcggctctgaggggcgggcgcgggcgcgggcggggcgggggctgccggcgagcatcctgtctgggggaggggaccgcagagagcgccggccgctgggctggcctgagagcgcagcgcgccggccgctaccagccgcgccggagcccctgcgccctgcggcccgctccccggggaccgggccggcgccatggaccgaggccagggtaagaggggccgcgacgcccgcacttgttgcggcgccgggcgggaaagggagactggacgatctgaagccggagaggaggagggagagaggcgggcggtggggcgggggctgaggaacgctcggaggggactgggagacgcggcgcttatgcaaaggtgccttcggctgccgggacaacccggtgcgtgtcaacgcccgtgtcctggggccaactcgcctctcgtgtgtgaaatcagagttttcataggctaacgatttgtaacttcataaaagatccccctctagtttccggaggacagcgagctcctcccacctcattccactctaaaggggaaaacaaggtgtacaggttcaactcccgaaacacccgctgtgggcagcccctagggagaagctctaggggaccgaagtttgcagctgcctagggcattgcgagaaggaggagcgccgtgagcaggcgcgcgtgtgcatgcatgtgtgcgccagggagggaggaggcgggggtggttctatcccgcaccagctgtgtcctcggcccagcccttctctctggaccagcgacaaagttggactagatggtctccaaggcaccttgccgacccttttccagtgtatttggtagac

SEQ ID NO: 39274 - DNA, 1366 bp, Homo sapiens
  chr5:157001741-157003107
  binary
cgagggatggagccggggaggggattggtgtctgggaaactagtcctgagaaacacggacatcacccggcatcttagctggaaacatcgagtcagaccccttcgcttcacagaaggggaaactgaggaccaaagaaggcggccgtcgggttggcgtggaaagagagccctggtttccagtgccaccgcggacctcaacccgtggcgtggccttgggcaagtcctttcccttttgtgggcctcggtttccccatctgtgaaatgggtgcgtttgacttggccttcagtagggctcctgccagctcggggatccgaagtgtgtggctgcagatacccagcgagccatcccctagccaaggctaccacagtctgccgcgggcattttatgtcctaccccaccagtgtggcaggcaccgagcctggtcccaggaagccgctcccaggccacacgggcagggcgctcgggatgctcggcgttggcgagtgcagcgggcggtagagagaaagacagagagagaggcggagcggacacgagggaccgtgagaaaacggaggaggataagccccgagaacggcggaaagagaagccaaaagcagaaaaacagaggaaggagaaggcgagaagggaaggctagccagtgagcggaccggctgttttctggctgcgccgggtttccccgacctctgccacctcccagggcgcagaacgtgggaacaaagcccgggctcccaggctggggacggcgggggcgcaggccccgcggagttgcgggaggcgcaggggtcgcggtcccagcgctccggacccgcaaggctactcccaggtctccgggccacccagcctccatccccccgcgcctggccacttacttgtccatccaggctcccgcgccgcccgcggccggaggggctgcagggcaaacgccagcaagcagagccgggcggcgcctgcgccccctggcatggtggcggcggcccttagcgctcggcgctcacacgccctcagccatacctgcccactgcccggcggtggaggcgcgtctggaaccccccggctcgccccgcgcctccccacccggctcccagccctctgccgagacgctccgcctccagccccgcgggcctccgccaggggatggaggaggggaggctccagcccggagggggctggagggaggggccggggaggagctggcgagactcgggggagcggggctggctcaggtgagggagaccgcggggaagggagaatccgagccccccaggaggagggatttgtggtggacgcggcctgtagagggtcggggactcgggcttctaggagttaaactggacccctctccgcacagcggcccgtttactgtccc

SEQ ID NO: 39275 - DNA, 781 bp, Homo sapiens; identical to SEQ ID NO: 30398
  chr5:17216361-17217142
  hyper

SEQ ID NO: 39276 - DNA, 1284 bp, Homo sapiens; identical to SEQ ID NO: 34906
  chr5:17217629-17218913
  binary

SEQ ID NO: 39277 - DNA, 892 bp, Homo sapiens; identical to SEQ ID NO: 27092
  chr5:176056921-176057813
  binary

SEQ ID NO: 39278 - DNA, 503 bp, Homo sapiens; identical to SEQ ID NO: 28073
  chr5:177031080-177031583
  hypo

SEQ ID NO: 39279 - DNA, 1494 bp, Homo sapiens; identical to SEQ ID NO: 30402
  chr5:178016455-178017949
  hyper

SEQ ID NO: 39280 - DNA, 235 bp, Homo sapiens; identical to SEQ ID NO: 25727
  chr5:179448856-179449091
  hypo

SEQ ID NO: 39281 - DNA, 912 bp, Homo sapiens
  chr5:179498011-179498923
  binary
cggcacgtttttatattagaaaagggccgcatccttccagatctagcgcagccttaagtccgtgatttgaggaacctgccgcttccaaaatacaggctgagacgtcctccccatgaagtagttttgcgctcttgcaccacctcctttgtctacgctgtccctgcaaactcctagctcaatgccctccagcaaacgagctgcctgaacgcaaagatgaccgttccaagtcttttttaaaagaagggaaaaacccagtcacgctcctggagcctggttcccacgggagcaggccgggctgtccacgacggaagcctcgaccctggctggggctgtcggccgggcagcgcgggagagccagggccagagccggggccgggaaccctagtcccgccgcctacgcgggatgcagcgaccaccgcccgccgcccccgggccggcactcacctccgtggaggggcagcggcgccagcacctggccgcggacctcggccttgggggagtcaagcccgtagcgcccgcggtcgatgcgaaacgtgagcggggcgccgcggccgggctcctgcaccgtcacgttgatgagcgccgtgtagtactcctggctcgcgttgtctgcccgtgccggccacaggctgcaggtcagcagggcgagcgcggcgagccgggcagggcccgcccgccccgcgcagctcatcgtccctccggcagccgccgctgctcgcggaccgggctccggggccggcgcctagaggcggggcgggcgcggcccgggcggcggcgggagcgcgcgcgcgcggcctgcgcggggccgagcccgagcgcggccctcctggacgccgcggccccgccgctcgccgccctcacgtccactgcccgcctgtggggacgcgcccatgggccctcggcgagggcggc

SEQ ID NO: 39282 - DNA, 973 bp, Homo sapiens; identical to SEQ ID NO: 34915
  chr5:179779452-179780425
  binary

SEQ ID NO: 39283 - DNA, 841 bp, Homo sapiens; identical to SEQ ID NO: 27098
  chr5:1931173-1932014
  binary

SEQ ID NO: 39284 - DNA, 550 bp, Homo sapiens; identical to SEQ ID NO: 22922
  chr5:2038439-2038989
  binary

SEQ ID NO: 39285 - DNA, 984 bp, Homo sapiens; identical to SEQ ID NO: 28082
  chr5:32711331-32712315
  binary

SEQ ID NO: 39286 - DNA, 450 bp, Homo sapiens
  chr5:36690207-36690657
  hyper
cgggcctggaggaagcgtggcgggaaggctggatccccgccgcaggggctgcggggctgtggctgcctgcgggctgggcagggccgggcgcacgccctccttccgggtggccgcgggccccgaccccaggctgccgtcagtcgagcggcctccgcagcggccgcgcttccccttctcccacccgggtggtcccagaactggagcaacaatggccggctctgtgtggccgcgtcctggggccaaagcagtcgggacgtgtcacgccgagggagggctccgaatgaatacgctgacaataagaaggaagggagagcgagggaggtgatgggcagcgtcctagagggaaagcgggagatgagaaatctacgagatccgcgaggcggcgtccggggagcgagcctcatagtggccaccagggggaatgcggagctcaccttgggccgcttccgc

SEQ ID NO: 39287 - DNA, 786 bp, Homo sapiens; identical to SEQ ID NO: 21345
  chr5:37248996-37249782
  hyper

SEQ ID NO: 39288 - DNA, 1488 bp, Homo sapiens; identical to SEQ ID NO: 23299
  chr5:37836968-37838456
  hyper

SEQ ID NO: 39289 - DNA, 955 bp, Homo sapiens
  chr5:37839492-37840447
  binary
cgtttgctctggggtccagacgcacccctctgactagggcgcccttcagccggccgcacccacccgcgacgcaggcaccacccgctccctgctccccggcccgctccctcacttacctcggatcgggtctccgcagaccctaggttggacattaactccaggtgccccaagtcccagccaggagacccatccgggctgatggctggagcgcggagccccgcccaacaggtcaggggcaagagttcgcaatcctggggtcgcgcggggcagcaagggcgcgctggaggcggcggccaagactcccgccgccgccgccgccaacagggcgagggctgccggcaactctcccgccgggcccccgcacccccagaagccgaggtccgagcagccgccgctgctttgggtggggggctgacagggctgcgcgcgtcgcgctcttggctggggctgcgcgggcccggggcgctgcgggcggctcagcggcagctgccgcgctctgcgcctcctctgggcgcactgcctgggagcacgagactggtttgtctgatgctgctgccggagctgaggtcttgcctggagatccgaacgagacaccacgtcaaccggcgcggggagtcccgtgaagacatgagggcgccaggagcgcaggctggtcttctagagcccgggctgggggtccggggtccggggtgggggaggggaggcgcggggccccgggagggaggggtcgggaggcgtcggctgggcctggcggtgggggaggagaggagagcagcgaggaggccctggagttcccgaggcggggggccggggtgcgagtgggcgacgcgaggcgcccctccctgggctgcagggagagcgctgagagcgcggagacgccgcggggctagcgccttctcctctccgggtggatcaaaaatcgagaggaatgtgcggcgctctgcgcgggccagcc

SEQ ID NO: 39290 - DNA, 807 bp, Homo sapiens
  chr5:42424338-42425145
  binary
cggcagggagttgcgggcgacagacgaaccatcacactctggcgtctgctctggcccgcgagtagtgtacgtggaggggtttactccggagacagttttgttaaagtcataaaagttttgctagtgtgtttctgtttgccatcatctgcctggctgcggcaggaactgccgaggctgctgctgttgcgcggggaagaatccccggcagcgcgactggagagactggggaggtcgagctgtgcgcgtggacacagcgcgcagagcgcgcggtcttttgcgcgtttgtgcgggccgcagccgcacgttggcaccgatggaactggggtcagtagagtgacagccaccagtccgcatgaactggggtaagtggaaattgtggcgagccgacctcccccagcttttgacacactagtggttgtaaaatcaaccaggcttaaagttttgacagaactgccagaggctgcgggtcaatggggtggccgcgtgtctagggagagggcgctggcggcgcagagggtgcggggcagggcacttgcgagtgcgtggggaagtctatttggggcgagtgctttatatatagcccgaggggatgcctgctgagaccgagctgcgggggctctcggtctggcgcggactgtgtgtcctgaatgagtgtacgtgtgcgctgtgtgtgcgcgcgcgagtgtgcgcctggggaggcgtgtcggcgcctgagccagtagggtgtgcagggtggaagaggccacagaggtgccgcctgtctgtttgtgccgccaggagaccttggaagggacagagaaaggtaac

SEQ ID NO: 39291 - DNA, 1687 bp, Homo sapiens; identical to SEQ ID NO: 23300
  chr5:42950747-42952434
  hyper

SEQ ID NO: 39292 - DNA, 1260 bp, Homo sapiens; identical to SEQ ID NO: 25734
  chr5:42991800-42993060
  hyper

SEQ ID NO: 39293 - DNA, 1396 bp, Homo sapiens; identical to SEQ ID NO: 25739
  chr5:43017299-43018695
  hyper

SEQ ID NO: 39294 - DNA, 1660 bp, Homo sapiens; identical to SEQ ID NO: 15085
  chr5:472600-474260
  binary

SEQ ID NO: 39295 - DNA, 508 bp, Homo sapiens; identical to SEQ ID NO: 33857
  chr5:600977-601485
  hypo

SEQ ID NO: 39296 - DNA, 875 bp, Homo sapiens; identical to SEQ ID NO: 34938
  chr5:6448753-6449628
  binary

SEQ ID NO: 39297 - DNA, 1269 bp, Homo sapiens; identical to SEQ ID NO: 28089
  chr5:76506029-76507298
  binary

SEQ ID NO: 39298 - DNA, 763 bp, Homo sapiens; identical to SEQ ID NO: 30449
  chr5:76940861-76941624
  hyper

SEQ ID NO: 39299 - DNA, 1172 bp, Homo sapiens; identical to SEQ ID NO: 27111
  chr5:77147514-77148686
  hyper

SEQ ID NO: 39300 - DNA, 1132 bp, Homo sapiens; identical to SEQ ID NO: 25748
  chr5:77268330-77269462
  binary

SEQ ID NO: 39301 - DNA, 1326 bp, Homo sapiens
  chr5:79864842-79866168
  binary
cgtctccacggtccccgccgacccctggaaccaggcgcgtttcctcagtttttcctgagagcaggaggaagcgagctcaaggcgctgtcggagaagggcaaaggaaggtgactggggcgacagctccagggcaccgatgggggcggggtgcgcgtttcgtcgcctcatctctgagccagggcaggcagctggcgggctaaggcgatcaccatccatgaaaacgggttctgcccacagccgctgcggagcggtccctgcgccgctcgcccgccggccggacgcggccctcccttgggaaatggtgcgtctgaggggcgcagccactgcccccatcccggagcaggcgcacctctgcacccggctctctgctaagggggtccggtatcctggtgccaaggctgtgcgcacctgagaagggcgggaaccggctgcccgcccctgtgtggctcctggaagcaggagctcctggaagctgcaaagggctccgcagtccccagcccgcccccagcgcccagccggcacctcctgctgcccagctgccgaggcacctgcggagacgcgcccaagtcagcccctccggagacgcgcccaagtcagcccctccgacccgcgcgctcttgcggcccagcgcgcgccgctcccgctgctgcgccgaccttcgcccatcaggccccccgccccgcatcctcctcgacaccccgcggccgggcagccctcgccggttcccgccgctcggcgaggctgagaaggaggcggaacccgcatccccgcggagtccaagccccagcggccgcaaaactggaaccgagaaccagtgggaaaggcaggaggcgcgagggtgagctcgcgtggagcgcgccccggggtggcggggcagagtctctcgggaggcccctgcagcccggcggccctcggctggccctgggtctctcatcctgctcggggcactgcaatgtcagggtgagcgggaggtgcgggcttcaggggcttgcgcgcaccgggcagggagcactgaggccgtgcgggccgctgggttccacgctgcgccctcgatgtcctcctcccggcagccgccactgcaagccaaagtttcccaagtgcagccggcagggacggcgcctcacactgacctgggacgcgctgtcgagttggcggcggcgctttcaaacctctctccggcactgcccgaccctctgtgcggccctagggcgccgtctgagctgagctgtggtcttcggctcctcggcgcctcgaatcgcagatctcggtagatgccgcccagtccccgccctgcttgcggaaagaggcgggcgactgccgcgaagc

SEQ ID NO: 39302 - DNA, 1239 bp, Homo sapiens
  chr5:80255766-80257005
  hyper
cgcgtgtgtttttgtgcatatgtgcgcgcattgtgtttgtgtgcatttgtgagtgtatttttgtgcgtctgagtgtgtgcattgtggatctgggtgaatgtactggtctgcgtgtgtgtgggtgtgcgtgtgtgtgtgcgcgcgttgtgcgcgagtgtgcgagcgcgtgtgagcgggtgtgtggtgcggccgggcgcctccacctccctgatccgccccatcccggcgggcgcccgagcagaggcagcggcccgggccggggcgggcgagggagggacgcgagccggggcaagcgggctgcgccaccgccggcgccgcgccgactttgccctttaaatcggtctccaagccgattacagctgagctcccacgtgacgttttaccttctgtctcccggagcgcgttgcccgaggacagtccttccccggctgccgccccagcccgccgcgggggctcggctcccgcaactttgggcgaagcggcggccggctcgggcgccctcgcggggccgcgctccacgcgggcgttgggggcttggggggctccgggggctcggccgggagggtggtggttagggcggagagcgtgcctcggccccagcccgcgcccctgccaccgcgcgccgcggcctcccgaaagcgggcggggtgccctgcgcgcggcgtggggaaagggggcgcccttcgccggccgggacctgagcggtcgcgccctcgagggagccagctgggccatggccgcgaggcaggggtgagaccggcggccacccgtgagccctccgcacccgcaccatgcagaagagcgtgcgctacaacgaggggcacgccctgtacctggcctttctggcgcgcaaggagggcaccaagcgcggcttcctgagtaagaagacggccgaggcgagccgctggcacgagaagtggttcgccctctaccagaatgtgctcttctacttcgagggcgagcagagctgccgcccggcgggcatgtacctcctggagggctgcagctgcgaacgaacgcccgcgccacccagggccggcgccgggcagggaggcgtccgagacgcgctggacaagcaggtaccgcgcgccttctctccgcggtctcccagccttgatcgccgcactcccttgccgtcctaatccggggatcaggggtcgggggtcgtgaaagagtgcggggactatgctccgaaatccccccgcgtcaccagtggcgggacatctccacgctccttcc

SEQ ID NO: 39303 - DNA, 2405 bp, Homo sapiens; identical to SEQ ID NO: 27113
  chr5:82768232-82770637
  hyper

SEQ ID NO: 39304 - DNA, 1107 bp, Homo sapiens; identical to SEQ ID NO: 23309
  chr5:87956173-87957280
  hyper

SEQ ID NO: 39305 - DNA, 1866 bp, Homo sapiens; identical to SEQ ID NO: 24521
  chr5:87969885-87971751
  hyper

SEQ ID NO: 39306 - DNA, 1197 bp, Homo sapiens; identical to SEQ ID NO: 22927
  chr5:88179191-88180388
  binary

SEQ ID NO: 39307 - DNA, 1125 bp, Homo sapiens; identical to SEQ ID NO: 27121
  chr5:88184868-88185993
  hyper

SEQ ID NO: 39308 - DNA, 742 bp, Homo sapiens; identical to SEQ ID NO: 23314
  chr5:89854237-89854979
  hyper

SEQ ID NO: 39309 - DNA, 1483 bp, Homo sapiens
  chr6:100061279-100062762
  binary
cgtgccctggacatgagcggagccgcccgaggacaagggcacttcctcggcatcgtgggcggctcctcggcgggggtcggcagcctggctttctaccccggcgtgcgctcagctttcaagcccgccggcctagcgagggcggcggcggccgctcacggcgacccctaccgggaggagagcagcagcaagcaaggagccggcctcgctttgggcaggctgctgggcgggggccgggcgtgcgggcgccccgggagcggggagaactcggcggcgggcggcgcgggtcaccaccatcaccaccacgcgcaccaccaccaccatcccaagtgcctgctcgctggggacccgccgccgccgccgccgcctggcctgccctgctctggggccctgcgcggcttccctctgctctccgtccccccggaagaggcgtccgccttcaagcacgtggagcgcgccccgcccgcagccgccgcgctgccaggagcgcgttatgcgcagctgccccctgcgccggggttgcccctcgagcgctgcgcgctgccgcccctcgacccgggcggtctcaaagcctatccgggtggtgagtgcagccacctgcccgccgtcatgccggcctttacagtctacaacggggagctgctctacggctcaccggccaccaccgcttattacccgctcaaattgcacttcggcgggctgctgaagtatccggagtccatctcctacttcagcgggcctgcagcggccgccctaagccccgccgagctggggtcgctggccagcatcgaccgagagatcgccatgcacaatcagcagctgtccgagatggctgccgggaagggtcgcggacgcctggactcggggacgttgccaccggccgtcgcggcggcgggaggcaccgggggcggcggcagcggaggcagcggcgcaggtaagcccaagaccggccacctgtgcctctactgtggcaagctgtactcgcgcaagtatgggctcaagatccacatgcggacgcacacgggctacaagccactcaagtgcaaagtctgtctgcggcccttcggcgaccccagcaatctcaacaagcacatccggctgcacgccgagggcaatacgccctaccgctgcgagttctgcggcaaggtacttgtgcgccgccgggacctggagcgacatgtcaagtcccgccaccctggccagagtctgctcgccaaagcgggcgacggcccgggtgccgagcccggctatcccccggagcctggggatcccaagagcgacgacagtgacgtggacgtctgcttcacagacgaccagagcgaccccgaggttgggggcggcggggagcgcgacttgtaacgagtcttcccgggaaggggcggggtgaggacagagaggagtcgagggtttattctcgcagtagaggaactcctggtggtgggaagagggacccaatggacaaaaccgtttttgtttttgagagggc

SEQ ID NO: 39310 - DNA, 993 bp, Homo sapiens
  chr6:105584358-105585351
  binary
cgacaccgcgcgcccggctgcacgcaggctctgcgcggctcgaggcggccctacagggggcgaggaggaaccccggagactcggcggagagagcagagacggagctcaccaaggggcttgccgccgcagagcgcgggagccggcactcggtggggccgagggcccggggacgctggggctgcctgacctgagcggcggccgctgaccgttgagggtctctgtggccgcagcgcccagacccggggagaagggcggcctccaagggccgggagcccctcgagggcgcggccagcgaggagggacagagggcggcgcccccggctgcccgggcgcgtagaacaagcagctgccgccagggccgacaaagttgctccccgaggggctgagatccaactttcgcttcccgatttagccaggggagcgcgaggccgcacacaacccggcgcggggggaaagccggctgcagctgcgcctcccatccttacccggctggtccctggcggggagcctgggcagcgccgaccaaagttcggagcggcagcttcggggcgcgggacgcggggcacacgggctcagctgctcgacgggagcccgacgcgcgctcctcggcgggtcggcgggtccggaagctccgctgcccgggccgggtccccaagcccgcagccgctttgactaaaataggcatcgcgacggcggcggcaggcggcggcagccagggctggggccgcaccgcgcacgcgcatgcgcccgccgccccgcgccccccggcgggcggagcccggcgccgcggccaggatttcccacctcgctcccgcgactccgctgcgggtctgcacacccgaggactcggtttgaaacgcccgcttatttattttcttgtcgcctcgctacaagattctatccttgtttgggcatgagtggggggcggcagtctcgtgggaccggcggcattcgtcgttcctccttacggggataattcgagaagtgcggtcc

SEQ ID NO: 39311 - DNA, 994 bp, Homo sapiens; identical to SEQ ID NO: 37724
  chr6:108439841-108440835
  hyper

SEQ ID NO: 39312 - DNA, 1304 bp, Homo sapiens; identical to SEQ ID NO: 28095
  chr6:11043624-11044928
  binary

SEQ ID NO: 39313 - DNA, 917 bp, Homo sapiens
  chr6:124124391-124125308
  binary
cgagcgcgcgcgcacacacacactcggttcgctcccgcggagtggctctgggagcacgaccgacttcagctcagcaaaccgcggtcatgccgcccagactcctcgccccgaggccccggtccccgccgccgccgctttcgcgccgctcctttccgcctagacaccgccgcctgcggccgcctgggcggcagcccctgcggtcctcaaagttggccccctgggagggggcggcagggagcaggatgaaggatttgttgtaggaggaggattcacacatctgggcgaagggaggggcagcgccgctgctgggacgcggcgcggacccgcatcattgcgcgcagcagccgctgcagcagccgccggggaccgcggagccgggacgcccccgctcggcccgcgccccgctccccgccccacccccgcccgccgggcccagcaacgcagggtgcctaggagccgcgggctgcgcagggaggcgggcagcggccctcgcgcgcttctgccgcccccggagccggcgcgcggcgagcgcagggcgagcgcgcgtcgggcggcggccgcgctggggggcgtgaggcgagcggcgcggagagcggcaggggcgaaacttcgcgggccagatgcccgagggcgcggcggcgctgccaggctgccgctgctgcccctgcgggccccgagcgcgcctccgcaggcggcactgcccgcggcgcggcgtgtgcaccgagcgagtgaaggtatgtgtggcgggcgcggctggagctgccgccgccgccgccgccgcgccagcaggtcctaatgcctgtcacttcccaggacgctggcagcagcagcagcccggagcccccgagccctcggcaggtttgcgtgtccttccccgcgatctgattggataaagtgggggctcgacggtggccgac

SEQ ID NO: 39314 - DNA, 1375 bp, Homo sapiens
  chr6:126068722-126070097
  hyper
cgtttggacgcgcccgctaattgcccgtgtggcaaacatgagttgcacctgcaggcatttgaattcagaaaaacgtgcagccctcacggaaagttgtgacggtcgagcttgagcctggcgggccgcggagcgttcacctgcggccgggaggtactggcccagggcgctcggggcgggaggtggcaggcgaccggcgcgcgtcaggctcgtcacccgctggattgcggggccggagcggggacggggtctgggtcctggcccgccctcgtgcagccgatcggaggccccgaaccccgcgccgacccagccatccgccctgaggccgacaggggagctggggttcaccgacccccgcggccccgccgtcgggcgcggaccccatccagccccacctggccccgccgagtgtgtgctttgcctggggttaagtttcagaagccaagatggaacgattcgggtttctattcacaaggttattgaaggcatggcggtggggaccgcgcaaaagagatgagagtgtggggggaaaggggtttctgttctaataagggcttagcacgctggccgcaggtcctccgcgccgaccgggctccttcccgctctcccccgggccaaaccccgccagggtcccgtctttcccagtcgcgtcctttcctcttctccccgccccgcgccgggcttgtgtggacagagaacggagtgtcaaagggacgccctgggccgatccccaggaagctatgaatccctccgtgacggaggggtctggggatcgatagacggccctttctcagaggctctctccactactgaccaagcggccctgccaacgtgtggtttccggctggaccccaacccagccgccgccagtctcccggcgcccctggctgggtctcgctcagtccctgccctcgcagacgcacagcggggtggccagttcaaaagtcctacataacttggagagaaccagcagctagaaaacctgttttaaacacacagcttgagttttatacaacccacgttgtccaaggcacgaactgttggacacgaattcatactttagaaaccaaatctaatttccaagcgccaatcttcacctcccggactctaactctgcggctgcgagtgcatacaccagggggactggaggagactggaggcaattatctggataatccaagcccgaaaaactcgaacttgaaaatatacgattatgtcctgaaatgcccgcgtcattgatctagtctttcctaccatcagagctgacacagctccagtccacgggcttctccgcggggtctaggatccacagtccctgggggctgaagacccaatggaagtaactgatggatcgcaaattggaaatcgtaacgtggcc

SEQ ID NO: 39315 - DNA, 1961 bp, Homo sapiens; identical to SEQ ID NO: 28097
  chr6:127439798-127441759
  binary

SEQ ID NO: 39316 - DNA, 1766 bp, Homo sapiens; identical to SEQ ID NO: 22930
  chr6:127836014-127837780
  binary

SEQ ID NO: 39317 - DNA, 1262 bp, Homo sapiens
  chr6:130686655-130687917
  binary
cgtccgaggggcgtggagccagggtcctgcggtgcctgctccgggaatactgcgagtcggctggagctccccagccgctccggagaactgggggagccgggtccctggctcggtaaccggtggtcccgcggtagctagaggcgggccccacgggtgggtgtgtccgtttccgcacgccagccttccagcccgggaagagcgcctgcaagcgggtactttgttcccaaagatgggttttgtctgcgggtgatttgggctctcgaagtgcaactttgtggccgggacgcggatcggccggcctgggctcctgcagagcagatcctgtctgcgtcctccaggaggagtgggtggcaggactggggtttcccacaggttttggggcggcggcgagattggcacggtccggggtcgcaggcgcgcagccacgcccctggaagtccgccccggcccccgcccccaacccgcctcttcggggctttatggcgtgaggtttggggctgggatccatctggagccgagcagaaaacttttcccctcccgttcccggtcccttttgtctttcttggacgcggtggcggcgccgcctgagcggcgactccctctcccctgcccggcttgctgcgcccggtgccctccgagggcaggcgcgcctggactctgcgcccggatggcggcggccctctgtgagcaccggcagcggcgcatcccctgccccgaggcctccggtgcccccccggcgcgggcataggggcgcccccaccctccgtccgcttgcaccccttgccacccgccccctcgcctgactcatccgcccgcggtggccgcccgagccctgggatggggagggagaccgcggctgcccgcggcggccgagattcccgctgacgcccccgaccctgccgccttcttcgtccgcctccagaggcgcccgacgtcccgacagctcctggagtgagaccaggactgagaacagggagaggcgacccgacccccagggcccggtgctcaggacaggtgaggggaaggaaagggtgctgacgggagtggggaggtgggtgggcggccaccgcagccgaaaccgggcacttcttcagccctctgccctcccctcccctccgctacagcctccagagttaggtaaacgctgtctctcctaaagtttgggaaataaaccaagtccgccatcaggtccagactccccagtcccgggagcgcgagagaagccgtgcggggcagcctccaagaacccggagtactggagc

SEQ ID NO: 39318 - DNA, 1482 bp, Homo sapiens; identical to SEQ ID NO: 28099
  chr6:133561947-133563429
  binary

SEQ ID NO: 39319 - DNA, 1460 bp, Homo sapiens; identical to SEQ ID NO: 25767
  chr6:137809033-137810493
  hyper

SEQ ID NO: 39320 - DNA, 670 bp, Homo sapiens
  chr6:13924905-13925575
  hyper
cgaataccacttggccctgggctcgctccgctttagccttcccctctcgctggggagaaacaggcggtttgtgagggagactgagagaggggcgtgtttgtggtggtggcggcccatcgggggtccttgtcctctccgaatacccggactgctgaggggaagggccgggggggccccggcggttgccatggtgacgcagggtcggcggctcagcgccgtagagacaaagccgcccgcccgccagcccgctagctcctcgcgcgagctcctcctccacgggaacctccctcccctcccaggcgccgccgcagccggagcggctcccgggccctgggccgccgccggccaggtaaggcgatcgcgcccgcggccggggaggggtcggcgggacgccgggcctccccaacgctggggcagcagccagccccgcagtcctggacggcgccgggccgcccaagcgcgccgaggagagggggcggcaaacttcgggccgagcggcgccggggcccgcgcgcggagtctccctccgggcaccacgggggccgccgtcctggcaccaacttgaggggctgtgcggcggagggcggctgcggagcgcccgcgcgggctgcacctgctcagggagctgcccctctgttgttgttgttattttccttcttggcgtgccatc

SEQ ID NO: 39321 - DNA, 1432 bp, Homo sapiens
  chr6:150284908-150286340
  hyper
cggaaggaacggcgtcctggcccgctcggggcccgcgcacgccgccaccaagccgcgggggcgggtcggaggggagagttgcgtcagccaggccgctgtcagatgacgagcccggggcgtgacggggtggagcatccccaaaaaagtgcatgcctaggatcccgcccagtgtatccctgcgcgcggcgggccgggctgggcagctttataaacagccgtggtgtgagcctcgaagggaaccatcagcgcctcctgtccacggagctccaggtctacaatggcagcggccgccagccccgcgttccttctgtgcctcccgcttctgcacctgctgtctggctggtcccgggcaggatgggtcggtgagttcggggatgtagcctaagcagggcgggggccaaacctgggaggttgtggactgcagcgggtttcagaggaggggaggcttctggaaggaccggcgcgatctccctgaacgaacatcgcggtctccccgaacgtcgcggtccctccgaacgtcgcggtctccccgaacatcgcggtgcccccgaacatcgctgtctccccgaacatcgcgatctccccgaacatcgtgatctccccagacatgcccagctgaaggcactcagttcccctcggtggctcctttccgccgggtccgcttcctgcggctgctgcttgcccctcaggccaggaggtttctggaaggaccggtgctgtctccccgaacatcgtggtctccccgaacatcgcggcctctccgaacatcgccctctctccgagcaacgcgatctccccgaacatcgcggtctccccgaaaatcgcgatctccccgaacattgccatctcaccgaacatcgcgatctcgccgaacatgcccggctgaaggcactcagttcccctccgcggctcctttccgccgggtctgattcctgcggctgctgcttgccccgcaggccaggaggcttctggtagcaccggcgcgatgcccccgaacatcgcgttctaccccaacatcgcgatccctccgaacatcgtgatcccccccgaacatcgccgtccccccgagtaacgcggtctccccgaacatcgcggtccccccgaacatcgcggtacccccgaacatcgccgtctccccgtacattgcgatcccccgaaacattgcgatctccccgaacatcgcgatctcgccgaacatgcccggctgaaggcactcagttcccctccgcggctcctttcctccgggtccgcttcctgcggctgctgcttgccccataggccaggaggcttctgggtggaccagcgcgatctccccgaatatcgcggtctacccgaacatcgcggcctccccgaacatcgcggtctccccgaacatcgcgatcccccagaacatcgcggcctccccgaacatcgcggtctccccgaacatcgc

SEQ ID NO: 39322 - DNA, 1698 bp, Homo sapiens; identical to SEQ ID NO: 28104
  chr6:151560967-151562665
  binary

SEQ ID NO: 39323 - DNA, 776 bp, Homo sapiens; identical to SEQ ID NO: 32036
  chr6:152622733-152623509
  binary

SEQ ID NO: 39324 - DNA, 1187 bp, Homo sapiens
  chr6:153451682-153452869
  hyper
cgcaacctcttcttcgaacaccttccccacctgagcagtgcattttcccaaaggtaaagagagataagggaggaaacacagcacccaaggtgatcagtcgattggacactgttgatggcacattctcctcgttcccaaccaaccgcacaaaacccgcaacacctcgcgtccccgcggggtctcccgcgcccctggcccggccctcccggccgcccccagcaggcgccccgctctccgcgggaactctgggacctggccgagcgttccccggcgggcaggacactcgcccggttccctgcagcagctgagggcggcgagcggaccgcgtccaggcagcgacgcgggattcaacttcccggacccgcggcgcggcccccgctcccgctcagggcgccgcggccacagctgagaccccagcgccgcgcagccgcccccgccggggcatgggcggtcgcgctctccgccccctccttccttcacctcccccctaccttgaaaaaaatccatccattggtgcaaagcagacattttgatgtcatttacttagcaccgcttgttttggaggcagcgtcttacccggtcgcctggaggtgtgggcagcgcgccgatgggtccgggggagcggggctgggcggctcggtcctctagcggagccggtttgctgccatccgcccaacttcagcacccagcgggcgaggagagagggagagcggcgaggatgcagaggagggggagggggaggagggagcggtgggcggggagggagcgagagccgctcggcagcgcgcatgcgcctcgcgggccggcgcagcccctcgcccggcgcggccggaggggcagcttcccagcccctgcgcgcggccgcgagagtcccggccccgccccctccccgggcggcccccggccccgcccgacctcgcgcgctcgcctgggcgcggcgcccaccgtgcggaggggctcggccgggactctcggcttcggtgacgcccgtccggagcttcgcgggaggcccggagtcccgagagcttccctgggtgacagcggctctccgcccgggcccctgcaactccactcgcccgtagcccgcgcgctgctgtcctgggctgcgcgggagccttgcacccaggagccggcctgccaggcacagcagcctgcctgctccgggtcccggaggaagcattccctgc

SEQ ID NO: 39325 - DNA, 1636 bp, Homo sapiens; identical to SEQ ID NO: 28107
  chr6:159589682-159591318
  binary

SEQ ID NO: 39326 - DNA, 1048 bp, Homo sapiens; identical to SEQ ID NO: 30476
  chr6:1624708-1625756
  hyper

SEQ ID NO: 39327 - DNA, 3637 bp, Homo sapiens; identical to SEQ ID NO: 28112
  chr6:163834157-163837794
  binary

SEQ ID NO: 39328 - DNA, 415 bp, Homo sapiens; identical to SEQ ID NO: 28114
  chr6:167834910-167835325
  hypo

SEQ ID NO: 39329 - DNA, 460 bp, Homo sapiens; identical to SEQ ID NO: 33874
  chr6:167836474-167836934
  hypo

SEQ ID NO: 39330 - DNA, 795 bp, Homo sapiens; identical to SEQ ID NO: 23336
  chr6:28367069-28367864
  hyper

SEQ ID NO: 39331 - DNA, 169 bp, Homo sapiens
  chr6:34170817-34170986
  hypo
cgatccgcagccacagtttgggtggctgtagccccgcccaagagggcggggcttctgtcggctccatggagccggaggcccgggtctgcctccgtttggtttgggtggccatggtttgggtggctgcagcggcaccccagggcgctcctgcccccaactcagaaggggc

SEQ ID NO: 39332 - DNA, 853 bp, Homo sapiens
  chr6:37664850-37665703
  binary
cgccccgacccgaggagcccggccgccgagccgccccgggtacccagggccgtccgcgcgggatgctaggcgccggggacctctcggcggcggaggcggcgcttcgatccaacaggccacggacgactgacaaacttgtcgtttccccgcactggggccgcccctcagcggagcggagtcggggaggccggggctccgctcgagttaatcaatctgctgtttccagtcctgcggccgctgccgtgggctcagcggcccgactccagggggccgggctgaaagcactcgcggcggcgaagcagccccgggcccggccctcctgatccggggagcagcgcgggctgggttcggccgagggacgagcgccgcgggtccccgggtccgtgaagttagccgagccgccgataaacccgggggaagaatagcagcccggcgccccgcgggaatctggagagcaattccaggcaagaagggccccagaaaacggggaaaggaggaaagtttgagtcttttgaaaaatattcgcgctctcgcccaggccggggctgcggcgcgggcgccgctcgccgcctccgctcgccgcgctcctctcccgccgtctggccgcggccgtagccctcccgggctccgagctctcgggagagcggggctacgccgcgccccaagttggtcgtccccgcccccgcccggcggccttggcctgcgggggcccagagcgggcggggccgggccgggctccggggcgcggcggccgctcggctccgggccgcgggagcgctccgctcgctcagcaacttgggctttgctgtgctgctttttcgcccctccgagcttttcattccgcgctcctccc

SEQ ID NO: 39333 - DNA, 2706 bp, Homo sapiens; identical to SEQ ID NO: 22934
  chr6:391113-393819
  binary

SEQ ID NO: 39334 - DNA, 698 bp, Homo sapiens; identical to SEQ ID NO: 23340
  chr6:46138265-46138963
  hyper

SEQ ID NO: 39335 - DNA, 375 bp, Homo sapiens; identical to SEQ ID NO: 25806
  chr6:50808438-50808813
  hyper

SEQ ID NO: 39336 - DNA, 1848 bp, Homo sapiens
  chr6:5084683-5086531
  binary
cgtgccgcgtgggcgccggccccacggggccccctctccgccctccctgcgggatcccggggcgcggactcgcgggcgcgtcgggcgggacagggggaggggcgggacgtgctcccgggcctggcgcgaatggcctccggccgctctcggctgcgggccatggccgctccccggcgcgtccccacacggtccccgccccagtctggccgcagcccaccccgcgccgccactgggcagatgggggcggcggctcctgcctcccggctttcggaagagcagagcggagcgcgcctgaccgagtcaggcttccgagtgggattggaacccggggcgccctgaagtttggggaaagcaggagcagaagggaagggatgcgctccccgctctccggcggcgcggaatgggcctccttccagcctctgcgtaggcaagatttccccagttgcgcgctgcaccggggactccccagcccgtgaggcagccaagaggagagcgctcagtgaccctctgggggcagagccgtcaggccaagttcatgggcaggaagactttgtgcacgtgggggtctctgaaggttgagcgcgagctctgcacccccacttcgaggcactcaagaagcggaacagacgcgagccccgccgggggtgcgggtgagggctgcagggagcccgcgaacgacagaaagtcgccccccgcattccaccggagcactcgggaacacggcttccaggtgtcccagcggccgcgcctccccgcccccggccctcccccgtcgcgggcaggttcaaccgggaggcggcgtggccccggagccggccccaggcccgcatcctcctcccacttcgccctgggcagccgcagctaaaagccggaggctccaaagtggaactacgttgtcttgtcgagcctggggcgactcgcctcggggagggcgagcctgaactgcagccctgcgctccttccacggcccgaggagttagttaagtctccagaggggcccggttcggcccgagcaagtccaggggcgaacggcgtcatggagcccataggggcgcggctaagtttggaggcgccgggaccagcgcccttccgagaggccccgccggccgaggagctgcccgccccggtggtcccctgtgtgcagggtggcggcgacggcggtggcgcttcggagaccccgagtcctgacgctcagctaggggataggcccctgtccccgaaggaagaggccgccccccaggagcaggaggagctgctggaatgccgccgccgctgccgcgcgcgctccttttccttgcccgccgaccccatcttgcaggcggccaagttcctgcagcagcagcagcaacaggcggtggcactgggcggcgagggggcggaggacgcacagctcggcccgggcggctgctgcgccaagtgcaagaagcgggtgcagttcgcggacacgctggggctaagcctggccagcgtgaagcacttcagcgaggcggaggagccgcaggtgccgcccgccgtgctctcgcgcctgcgaagcttccctatgcgtgccgaggacctggagcagctcggggggctgctggccgcggcggcagtggccgcgcccctttcagcgccgccttcccggctccggccgctcttccagctcccggggccgagcgccgcggccgagcgtctgcagcggcagcgcgtgtgcctggagcgcgtgcagtgctcgacggcctcgggcgctgaggtgaagggctccggccgggtgctcagctgccctgggcccagggccgtgaccgtgcgctacacctttaccgagtggcgctccttcctggacgtgccggctgagctgcagcccgagcc

SEQ ID NO: 39337 - DNA, 1839 bp, Homo sapiens
  chr6:53212372-53214211
  binary
cgtacaattctatgaagcacttcctgccacgggtcccgctatttaaaacaaattaggctgctcgctccccacaaatcccatctagcacctctcggttcctcagtctagctaataaaccatgcactggattcttccgaaagagaccccccgcccccgaccccgccacctccgccactttgcataactggccaaatgcattctccaaatttgcaatcaaggagcttaattcacaattgtggatggggcggggggaaccgccaagtgcaagaacacggaacggttgcaagacgcagttcagcaagaacaactcttgctctaggcattgctccgtcgacccgaggtggtggggtgggagagtcttaccggcgtggaaacagtaaaaaggcacttttccttacaactcgcaagacaacacacactctagctcccccggcgcagagcacaaccgcccccccgccgcgcgcctccctcgcagccaaccgctcccgcctctccagggatcaggctcccagaaagggccgccccggtcgcccccgagtccccgccctctcgctttcccaccagcctcatccctccctgagtaccaagggctgccgttgtctggtttcaataaaaactgaagcggtcccgagctagcaggcttccctccgaggggcggacggaaggtccgcagggttaacggaagcggagagaacaggacaaaaaggaaaggccggagagtccccccagcggcgcccggtgcccgcagaccctcgcacaggctcttcgaactcacccgggtttcgccgactccaaagaaagcgcgctccctccgagagcgctcccccggctctcccgccgcgcgctccggcccgcagggcgggaggacccaggcggacagatccatccctccgcgtctggtgtgggcacggtgtcgtgccccgcggcgcctgtcagcgcgcacaggtgggaccgcagcacagagaacgctcccgagcgccctgcctcagcctcggcgtggggcgagccgcccgcgcccgcacccgcacccctttccccgcgcccgaggagccgggctgtaccccggagccggcggagctggaggccgcgggcggagcgcgggttgccccggcagctctttctcggcaccaggtccgagacctaacggcagttctctctgaccgcttcccggccgcgcgctcgcgcgggtgtcatggccgagcggcggcccccgacgaagtttcccggagctgacggctttaccttttagcccaaggggcggcagcagctttgagcagcagcaaggcggcggcggcggagggagcgcgggtggcagccggcgcagaggcggatgtagaaggagacaccggtggctaggacccgcgcgatgggaagaggaaggcgccggctatctacaatcagaacgtgggctgaccgtgacgtcacaatggcgcggccagccaatcgggacccgaaggatgaatcaagcgctatgatgtcatgcggcccgggagccaatcgcgggacaatagaactttcgtgatcgtaaattccagaatccgatgcggtggagagcctaggccggggttggcccctcggttccacgtgtctctgggaaatttttttcccctttcttcctaataagcctgcgtggaacgcagagcctgcgcaatagccccggtgaagttgtcgatgccctgaactctggtttttttactgccaggcgtggcaggagtctgtggccgcatttgggtggcagaagcccaccctcgttacggtctcctctatgagttatgtcatgctgaaggggatccacttcatcgttaaagctgaaagggttaaatgcccacggagaccgcc

SEQ ID NO: 39338 - DNA, 1223 bp, Homo sapiens; identical to SEQ ID NO: 35004
  chr6:56818408-56819631
  binary

SEQ ID NO: 39339 - DNA, 911 bp, Homo sapiens
  chr6:6546401-6547312
  binary
cgggtccttaacagctcccgccccagaagctgccttcggatgaacagccgggtgaatcgccatgaaaaattaatcagcctccgcctgtccgcggcctagatgggcgcaaagcagatgacctggcaggaaccagccgcagtgaagccaccgcaaccgcagccgcagccgcggaggggaggccgtgcacccgcccgccgggagagccgcgcgcctgagccgggcgcacgtgggaagtgggccacgagactggagtccaccgagatggaggccccggcactcgggctcaggcctttgtgcttagcacgtactgttggaatccagcacgccctgctccggcgggcgcctccgatcctgaagcgcgcacctgggaactcacgcaccgcccagccgcgaggggcttggcctggctgaaagccacattattctcgaaaacaaccgtgggaagcacacgctgagctcccggggcccctagagtatgcaaagaggccggccctgcgagactaaataagtctctccccctaggacctagtcccttgccaccggctcccgcggccaccgcgcagccagagtgcaccgtccctagggctttggcggtggccagagccagcaagtgcggcggcctggagctggggtggtgagggcggatggcaggttggagaaatgcagccgagccgcaggtttctagaggcctctacagcccctgccatctgggcactgcacagacagacgctgcgtgagacctggagctcgccacctccatgcggcgctgccagccactccgctgcgggtgcaggagcgttccatgtcggggactgagggaccagcgccggctccccagtttctctgcattgtgaagtcattttcttaaactcgggctttaaataaccaccgatgacttgcctacgggccac

SEQ ID NO: 39340 - DNA, 1998 bp, Homo sapiens; identical to SEQ ID NO: 22939
  chr6:69344116-69346114
  binary

SEQ ID NO: 39341 - DNA, 1240 bp, Homo sapiens
  chr6:70576385-70577625
  hyper
cgcggagtgggagggtcacactgggagagactaataagggcagagatgcgtcccccttccccactcgcagggagctcactcctcggcggtgccgcagccctgtccggactccactgcgcctctgaggggctcaaatacgaattcaaggtaagctgcgcggctttgcgaccggctctgcacttgccctctcacacatgcccgggctatgtcatctgctcgtgttcctagttatctgtgtgcatctgcttttcaagaaaatgtaaaaactgtgctacacatggaaatatgtttaggtggataaataatgcacacctgcatacgtttccataggggccttaaggatgggaccaaaaacgtttggcaggagacggccactctcatgtggtacataccatgtagttcgtgttcctatgttcacatgatgcaggcttcatgcgttacacctaagttctaggtggtttttctggctatgtgtgtctgtgaagcggaactatggagcactgctgatgcgggtagggacagacatcaaatacattacaaaaaaaatggggggttaaaggagtaaaacaaactcactatcaattcatgccgttagagcgctttttttttttttttttgacggtgttagccctggaagcgaggcagccagttaagcggcgtaagctaagagacgcggggttccggtgcggtgccctccggcccggggttacctactccacatgtgggtgtttttcccaagtgcggcttctggggggcggcgcgggcgcgggcggggattcccggactccagccccaccacgttccggagcgtccggccctgttccttaattaccctgcagcatgcgcagcgcggtcggccacagcgccgccgccgtccccgcagtcctccctgcagccaccgccgccgccgccggaacgtcccagtcgcggcgcgaggaagacgcggccccagcctctgccgcctccgctgtcagagtcccgaggccaccgccgagagcgcgccggcgccgcagccacagcggccgagaaccaggaggcggcgccgggcggcccagctagggcgctgcagggtcgcgaggaagtttgttggcccggaaccaagcacgccgtcgggcacgctagctccccgagagcaggcgggcgcgtaagcgaacccccttagaggttacggagggagcgggaagccggcaagagggtgggcagaggagctgggggacaggcgggtgccacaggagccccc

SEQ ID NO: 39342 - DNA, 832 bp, Homo sapiens; identical to SEQ ID NO: 28131
  chr6:71665452-71666284
  binary

SEQ ID NO: 39343 - DNA, 759 bp, Homo sapiens; identical to SEQ ID NO: 27178
  chr6:72596036-72596795
  hyper

SEQ ID NO: 39344 - DNA, 2473 bp, Homo sapiens; identical to SEQ ID NO: 28135
  chr6:73330635-73333108
  binary

SEQ ID NO: 39345 - DNA, 2483 bp, Homo sapiens
  chr6:7726341-7728824
  binary
cgttggccgctgcggggagcgcggcgtggagaggcgggagaccgaattccggcgccgccgccgcggccgctgctcggtgcactagcccccttccttcccatcctttctgcgagcgggtttgctgggcagccgggcgaccgccgaacggaaagcaagatcctcgccgcctccgcttgaggaggcgtgcggcgcgcggagattttgagtgggagcgacggtgcccgagagctcaggggcgcggagttcgtgagcgagaaggaagttaaacctcgcggaatagactggcatttcgggacgccttgtcgccgcagcctgggccctgcaacggggtaaacttcatggtggccctgcgatctggggaggggcgtgcgccacggtgatgccgggcatctcccgcagctcgtgagcggccccgctccccgctgccccgggtcccactcagtcgccagggagagcgcggggcagcgcacgtgtgcggccagcgaggcccagagtgaccgcgccgcgactcgcaggagccagggcgcaggctgcagtgcagcccggactcagacgcacctggcctggaccgcgcgcctctagagacctgcgcgaggctgtgaggctccccttcctcccctccaagcggttctcctggtgatcgccccttcgccacctctctagcctgggcaactgggggcgccccggacgaccatgagagataaggactgagggccaggaaggggaagcgagcccgccgagaggtggcggggactgctcacgccaagggccacagcggccgcgctccggcctcgctccgccgctccacgcctcgcgggatccgcgggggcagcccggccgggcggggatgccggggctggggcggagggcgcagtggctgtgctggtggtgggggctgctgtgcagctgctgcgggcccccgccgctgcggccgcccttgcccgctgccgcggccgccgccgccggggggcagctgctgggggacggcgggagccccggccgcacggagcagccgccgccgtcgccgcagtcctcctcgggcttcctgtaccggcggctcaagacgcaggagaagcgggagatgcagaaggagatcttgtcggtgctggggctcccgcaccggccccggcccctgcacggcctccaacagccgcagcccccggcgctccggcagcaggaggagcagcagcagcagcagcagctgcctcgcggagagccccctcccgggcgactgaagtccgcgcccctcttcatgctggatctgtacaacgccctgtccgccgacaacgacgaggacggggcgtcggagggggagaggcagcagtcctggccccacgaagcagccagctcgtcccagcgtcggcagccgcccccgggcgccgcgcacccgctcaaccgcaagagccttctggcccccggatctggcagcggcggcgcgtccccactgaccagcgcgcaggacagcgccttcctcaacgacgcggacatggtcatgagctttgtgaacctgggtaaggatttggggtaacgtaatgacgagaacatttcccccttttcagtgtcccgggcccaggggatggagtgagggggtggaggagctcccggcgcgcgggtcccgcctggtgcgccagagaacgcggggacaggcaggctgtgctcccgccacctgcgcggcggtgggcggcacatgcgctcccccgcgccgcgggcagggctgcgcgccgaggcccccagaggcggctggccggccgggccgcggggctccgggagcgctgtccccagcgggcgtgtatttgcggactccctgagcacgttccgcgctttttttcacttctgcccagctctggccaggttaactcaactgcagcaggagagtccagcccgagtgtggccatcctgggaagagggctcttcagtacgattttcccctctaaactgccgccttttgccccctaacttggagtgcagttttcccaccgagacttttagggaatccgacagcggctgggaactttgaaaacttggcatgagtatgtttagaggtatccacggcactaggggaggttgcagagggaagtcccaaaaggaccgcggaaggcgctcggatcccggccgggcggggctcgcttctgtttggggcgggatgaaagctcaactggggtaatccatcctgtgccccggctcacatgcccttggccattgtccccaaaggctgaacctttgatcaatgcagcccaagctgcacgggcagagaaagggtgcggggtaggggccggggttgggcgctgagctcctctgaaccggttgccaggcaacagaatggaaattcacgggcggctaaatggagctccgccacaaatgttctgtggcaaacccggacccagtcacatcgccctttctcccccctcccaccccactgagttttctcatctgtaaatgagaagggtgcagagaagactcttttcttcggagtcagtgcctcc

SEQ ID NO: 39346 - DNA, 1146 bp, Homo sapiens; identical to SEQ ID NO: 27182
  chr6:80656537-80657683
  binary

SEQ ID NO: 39347 - DNA, 2130 bp, Homo sapiens; identical to SEQ ID NO: 35014
  chr6:88875397-88877527
  binary

SEQ ID NO: 39348 - DNA, 1623 bp, Homo sapiens
  chr6:90120874-90122497
  binary
cgccgcgcgctcactcccgggcaggcactgccatgtccaggtggtgataccgagagcagataaggtgtcctgacaacggtgtttgcgtggatcccgggaaatctgcggcctctcggagactcccacaacagcttggcgagcatccccccgccgccccgcgggtctccccagccactacctgggtgggcccctcccgcggcgacgcggggcgagactgacacccgcagctgccgacgaccctgccagtcacgccgccgccggctgcctttttttagccacgacatctgaccctggcttcaacagcaccgttctgggagagaggtcccagggcgcgcccgcggtcccctcccctccccaaccgccagacgctgcggagagcttggggtgaggggcgcgggaggcaccggctctgaaaggggcagaagcgcgcgctcctccagcccagacgcttactccctccttccccttttccaccgatcctggttgcccctccgccaccagcaccgcgctccctcatttggcagctcgaggtcgggcttttggcgtccctccccaccccaaaccctcaactggacccgctcccctggaccccctccaagtcggtggctcgcgcacggccgggctgggggcgggaaggcgccaaggggaggaaaggggcgcgagccgaggacgcgggggccgggcgctcacctccctcctctgtgccgctgtccggatcggcgtcggaggagtcgggcccgtctccgtagtccgctagccccaccagctcatcctcctcctcctcctcctccgcgtcgtcctcgtcctgcggctgcggcttccccagcacctggctcatcgtgcccaccggccggccggcccggggacggcgggggtcccggggtgggggccaagcctcctagccggccgcccgcagcctatttctgaagcggaggtttgtctagagctcagcggggcccggcggaagcgggggccgcgcgtcccccggcgggcggcgcccaggtccgggtcccgcggttcccagcgcgcccgaagccccctcccccgccccgcccgccggcggaggagtcagccggagcgcggcagttcctcccggaggagggagagagagagagactgcgtgacccgagtcacctgacacacactgtcacatactcacatacacaccccgcacgggcgcgcgcgcgctcgcccggccgcgggcaccactcggcggggcgctgggccgaggacacacatgcacacgcacacgcacacgcacgaggagaccggggaggcgcggggcccctgcaccctcccagactcacaccgacacacgccccgtacacggggcccccgggacgccggccgtcacccaccgcggctgcgcgccaggggcccccacgcgcctctccttcacgtggtccccgcacaggcaggggagggggcgccgcacaccctcaatgtcccccccgccgtcccactcccacacgcccgcagagcgtctaccgtgggcggatgcctcctgcttacagtcctgagctagggtcccaagcgggtggcctcccaacactgtggcgcccagatcccccaccccagagcagcgtgcccaggacaccctgtggacgctcaagagccccaggc

SEQ ID NO: 39349 - DNA, 1067 bp, Homo sapiens; identical to SEQ ID NO: 28141
  chr6:90142647-90143714
  binary

SEQ ID NO: 39350 - DNA, 2100 bp, Homo sapiens
  chr6:91004776-91006876
  binary
cgaaggtgaaaaccaggaacgccgcgtctcgccgcccgcgggcccgccgggagactgcgggtccgtctcgcgggtggggcgccccggtccctctcgtttcctggaggccacaggtcacggcgacggcggtgaccgggagagcaggctgcgaggcgcgcctcatcgggccacagacaaaccaccccggcagcggccgcgccggaacttccctcaagttaccaaactcgcctacgcgcgggagagtgctggggatgccccatgcgcccgcgaccccagaagccaggagtgtgccaccccttcacacactcactcccggccctgcacgcttcccctcacggtccgagttcctgcaaatgcttggccagaccgaggtcgccgagatgctcgctccagtctctcccctcgtgggcacctagggtagcccgtgagcgccgcccgccgccgtctccagcggcgccgggctcccgaacacccgccgggtgagcgaagcacagcggggccacggagcgcctcgacgcggggacggggagggcagtgtccccttcataaaccagtctcctgggtgaagcttctggggcttggagactggagtgtagggtgtgtgtgtgtgtgtgtgtgtgtgtgtgttgcaccttgacttcatggaggatctgtgggagaggaggtgcaaggtttccctctcagaagcctggcgcccttaggtcttagctacgcgggacgctttccgacaacccgatctttcgctaggagagattcgatccaggtctgcgccgcgaggcccccagctcgcctcttcctgcgaccctaaacttgggctttgattccccgccggtcgcggtggtccgggccacccggcggcggctgacagctgagcgcaaaggcgccgcggccaaggtcctcgcggagcagcccgggatgcgcacgccgagggttaaggaggaggccgcccggcctggagctgggatcgcaggctgggggccgggacacccgggcctcgccgggccgggggcagggccgcgggtctgacagctgctgcggctcgcgcggacgcgcgcctcctgcagcccgccctccccatgcctgacttattactctctgctcctcctccctctgctgttccaaaacacccttcgacgccagcaaaatacaatgcgcctcggccgccgtaaacagccgggagggagagcacacattcggcgcggcgcggccgccggctcggctcccacccccttcccgttcctagaaaatgccataaaagcgggcagggcgcggggagggcggctgcgcgcccggcggccggggctcccttcccgcgccgtttccccacgcctccccgcccgccccgcgcgcccgctccccccgcaaacttgccccgccaccccgcccagcggcggggcccggggcccggggcccgggactcacctcgccggagaactttgcgtccttttccgcctcctcttccccgcgtcttcccggctcgcagccccctcccggcagccggcgaggtgggcagttcgtgggtcaccgaaagctcgcggaggggacgcgcatcacatggcagctcgttcccagccccccgagtgcgccgggaagggggaggggaaggggcgaggggaggccggggggaaagcgagagcggggcggcggcgggagtgggcaggcggggtggcgagggcggcggccgctcacgttagcgctgtgcgaccgcagcccgggcgtgcacggccgctgctgccgctgctgctgctgctgctgctgctgaggcggcggcggctcggcgctgtttgctccgcgccgcgcggcttgcgctctccccggaacgcccacactctcaatcgctacattgttgacattcggcgctgacgtcacccgctccccattcacaataactttacgggagccgggcagcgcacctccccggccgctggggcgcggtacgcccggcgactagcgtaagccgctccgcgaatggcgctccgggggctggggcggggggcgggggacgggggcgggcgcgcgcgctccgctggctcgcgggagggggcgcgcctcatgccgccgcagcagcagatctccccgctttgtgcggccgcgcggccc

SEQ ID NO: 39351 - DNA, 1037 bp, Homo sapiens; identical to SEQ ID NO: 28143
  chr6:91320244-91321281
  binary

SEQ ID NO: 39352 - DNA, 1328 bp, Homo sapiens; identical to SEQ ID NO: 30517
  chr7:106684813-106686141
  binary

SEQ ID NO: 39353 - DNA, 981 bp, Homo sapiens
  chr7:108096224-108097205
  binary
cgccccgccggcactgtggcgtgacgccccgcgcctccgtgtccaagcccgggaagccgccgtgccgggcccgcaggctctccatgcccaactgcccacgagcaagagctctgggcagggcttcccggaaagcgtggggtgcgggcgcggagcagaagttggccacaggctggagggggtggtgggtgccggcgctgctggatttcagctgtgccttcacccaagcgcaggtccccctgctccctctcggcgcccgcgggagtgtcgggggcctgcaggggagaagggagttggagatctgctttgcccctcctgcagcgctgccagcccggtgagcgctcggctgaaccccgcggcggtgtccaagtgacaacgcagcagcctcgcgcgtcctcctccgctccagccgtcacccccgagcaggacccagtgtcaccgccagacgcgcaaggagctacttacgttctcgcgccgcgccctccgctcagctctggcgcgactgcccaggaccctggaccgccggtgtcctccgttctcgacgaagctatcccctctggctgctccagccaggcggcccctgcgccgtcccccgcgcccgcgcgtctgaggctcggactgcggcgcgcgtccgccagcgaccctggcgaagcgaggctggccccgcgccggcgcgcgcccccgccgctcccgccctctccgctccccctccccgcgccgtgcttttgcccctcccggctctccttagcgtcctcccgtccccctcccccgcactccctgcgggcgtcctccgcctcctcccctcctggccaaccccctcttgccctgctgctgcgacggcagcgaatgggctccagccgccggcgcctcgagggactgggtggcccctcacctgagcggccgccccaccgccaacctccgtcagcctgcgagcgcgtgtggcggcgggggtgggggtgcggggacggagggcgggagtgttcc

SEQ ID NO: 39354 - DNA, 2279 bp, Homo sapiens
  chr7:113724594-113726873
  hyper
cggtgtgtttaccgacgtgggtgccagggctgcttcctccctgggagagccgcgggttctgaaggaaagggttggtgccaagtgtgtgtgtgagctcgcgactgccctttagagaaagggcgcgctgctctttcaggaaaggaaagattcaaaggcacaagttagtgcggttcgcccgtctccccaaccaccaccacccctccctcttctgccaccggaggggttcaagttggccgttctttccccagggaggagggccgggaagcagccgggggccaggctctgttcaccacggcctattggccgcagctatttggaggaaagtttcagcgcctctcggaacgccacgctttgcgactgacttgcgagcaaagcagcgggctcagtctgcggcgcgcggaaaaggcggccggcgaagagtcgcccggcccgcgggcaggggagggaccggagggagacggcggggagggagcgctggcccccctctgggctggggctccggaggaagcccctcgccaagattccggtcgtgcgtcccctccggggcccgctctctcctccctcggcctttcccctgtcaccgccctgggtcccaagcaggccgcccagccgggtcacacccggtggatagaagccgggacccagggctggcggctgggcccgtgcatcccccacgcgggcgcctcggctttgaagtgcgcgcggagcaggctctgaccgtttcttctttcctttctttccggttacttttgctcccctcagtcactgataggacccttcccgaaaacctcagactctctaagtcccagcttggcggccccttccttccaagccgcgccccggtgacctgggctgcgcgaccacgaggaagcccgagaactccttggcccaagtgagacaggaaccagggcaacaatgaagagaaagacactcggcctctctccaccccaggccgcagaggcgcacaccgtgaaaagaaaggccaatcagcgctttaacgcacgctcgggtctccctttccgactaccatgtacttttaactccctgccaccgagggctttggatcccttcgaggctttctgcacttcaagtggaatcccctgtttcatttgccagcagctccgtctgctgagaggacgtactttggggactgccaagaagcagcagacacaactcggctttgccaatacagcatacggttttgttctcgcctccctccccacccccttccctgactcgccgtctggggcgagctggagaaggcggagcaggaggtggggagaagggtgggggtgggggaaggtctggcgtagcacaaacaagttctccagcgggttgtttacatagcaggtggacctgacgtcagccaggaggctccgctgcaaatccgaacaatattcttccccgcgtttccccctccttaaagaagttagggaacggggggagataggtggacgggggagaaaggcatcctaaccagctggttccaaacctatcaacaacaacaacgacaataacaacgcaaagtaaaacaaaacaaacaagtggtccggcggtacttcagaatcctctgcggcgtcctgtcccccaccccgcccctccgaggagaggcagccccgcgagcagtgtgtgtacagttcgcattgccaacaacacgcgcgcgcggccgggtgcgcgcgcctgccagcgcacattcacacacacagacacacagacacacacacacacacacacacacacacagatccgggtggggggagcggctgcgcgagacagcgcgagcctccgagaaagcgcgagacacgccggcgcgtgcagctccgcggccgccgcttcgccctagctctagccccgcgccacccgcagcccgcccgcgaacgcccgccccggttatttatgcggcggccgcgtccgctggctgcggcttcctcggccccccccctccccgggcgcgccccccactcgcggcagcagctgcccggactcgcgcgtgggtgtgttgtttgggggcttctgcctcgccgccgcgggtgccacctcccgggacgctgcccacggcgtccccggtcgcggtaagtttcttggccctcactctggcgcgctacacctccgcaccccaccctgtcccagccacctccacgctgggccgagctgcgactttactctgctccgcgctcctcccgcggtggcgacaaagtttcgccccaaaggcagcgccctgcttgccggggcgagtgtgacatgtgtcaaatttgggctcggcgttggggtcgcattcc

SEQ ID NO: 39355 - DNA, 832 bp, Homo sapiens; identical to SEQ ID NO: 35025
  chr7:113726962-113727794
  binary

SEQ ID NO: 39356 - DNA, 1330 bp, Homo sapiens; identical to SEQ ID NO: 27197
  chr7:114562170-114563500
  hyper

SEQ ID NO: 39357 - DNA, 896 bp, Homo sapiens
  chr7:124404307-124405203
  hyper
cgtgctgtttccccggcggggacccccaggctcatggattccttcacccaaggatccattctgggccagcgcccggcccgggagtgcaattgtccacccttcgtgccccgccagtccattggccgtcttggacaggggcttgtggtgggaaccctggagtttcccggctctccttggccagtaaaaaagatcgctggctccggggactgtcttcacactctgctcctggctacgcccggaaatgccagcgcctctgggacccttctcttcctcctctgagatctgaaggaagagctggagggccgtggggttccctctccccaaagtttcagaaggctcctgaccccgagcacctttccacctccaggggccaggtggcctggttggaggtcccgggggtccggctgccgacgcctccgcccctctgcctgcagccgggtcacggcccggggccgccggcaggtcccaggagggtcccgcaagaaacgctgccccctgctcctccctgggtgctcgggctcgcagaacgtctcttgcagaatttcccggtccccaggcgtccctgccgcggcgctggatcactgtaggtgcacagctctcccccagacaagtttcgtttctggacgcaggggcgaccccgagggcagaagaggcagacaccttgagcagtagcagaagcagtagccgcgacatgcgggcgagaagcgcgcccggggctcgcatggcttggtgagggcacacccggcagccgcagctcctgcttagttaggatcgacacctgctgccgaagttgctgctgagagttaggcacatgtcacatactcacccccgcccgggtagcggggaaccggagattagggtgatagcggaagatcggtcttgggggtcacacacac

SEQ ID NO: 39358 - DNA, 3107 bp, Homo sapiens
  chr7:126891155-126894262
  binary
cggggtgggacttgcttaggggacttaagggtttctgcaaccggcgagggggtctgttttcacccccgctatcttgggtgcgcagacactctctgacaccaggcttcacagtttgggccacgggggaagtaattccccagggaaccgcgggggtgcggttttgcgcaactgggtgactcgcgtgtccctccgcatttcatttgcaccaagggagcgcgtgtcagacgaagggaatttttttttcttttttggtgattctgttattttttcaccaactgtacgaagctcaagggatatccgagctttctggctgggcggatgggcttcgcgcttggcatggctgagcggtccatctctacctctccgtttctatctctaccataacagcgaccactcagcccgccaggagcccctgtttcccagcgcaggttcctttttcttctcagttccttgggctgttgaagccgggttctgggtagatagagactggggccgtggggagagcgccaggctgcttttgcctttcccgcgccccggggcattccggcgcgctggggatgcagcctccgcccccgccgcacctggccgcccgagcgcccgcgcccacgccccgcgcggggccgcccgaaactggggccgcgccagccgcgggagctaccgaggagctgttggggtgcgtttgcctttgctttttaaacaagatccccgagaccttttctccatccccccaacccccagcaggacacggaactccggcgtttctcgaaagccacaaaagaggggcacggaaatcccaagctcgccgtgctaactcggagaacgcaaactcgaggcagagcgtgcgccgtgcggggatgtgggtgtcgaggaccccgaagcgcccggcttcccccgcgacccccatcctccctagatcctggttagacatccatccagcccacgctcagagggcgggggttaccccgactcatcccggaagccgctaacttcagaaatccctcctgttaggttcgcgaaacgaaggtacctcgtcatctcggcggggcaagtccggattccaccagggcaggtccgggaggtcacccagggcagacgatccgaggcagagcgctttaaaatcctgccgccgcacgcccagtcagagcgccgagcgcgcctgcccccttcccgtcacccttcagtctcccattcgccgactaaacttttgggggatcacatctccaagccttgggagttccgggtaaagtctccctcttttctgaacctctttactgtaatgtaatcatgggcagacaagaggggtggctgccttgttctttgcaacgtaaaatcaacagacacccaatcaagctccaatgcccggccagcccctcgccccctggtgcccactctccttctccccccattcccgtcacctccgcccgctatttctctcacagactacggacatgcagggccatctacttgtgctcaggaaaaacaaatcactagagtgatatgagaaggaatggtgcacctggctgtccgctgaaaggttttagagaagaaaacggaaaggggaataaaacggggggattctccttttccaacaagcagggcgttttggggaagtttgggggccaggggctttttgtcccgtggttcggcacttgctttcctcggagccgctttctgctgccgggcggcgagtcttaccctgctccccgcagagggcgcggtgaggaagcccgccgggggcccgcagctccatgtcagcgccgccgccgccgccgccgccgccgcgtgaggcgagcacagcggccgcacttgtggctgatctctgggctgagggggctgagctggcctagcaggcgccaagtctcttccatgtgaataacaaatactcccaccggcggccgcgattggtctgcgcccggcgcctcccgatcctccgcccgcggccattcacccggcgcggcgcggggagccgcggccaggatcgcgcccgggatcgccaatcgcttcgcgccaaccagtcacctcgggaagcgggaggaggaacccccgaggggcgggagcctctggatttcggtgtcacccagcggccctggcgcgggcagggagggggaccctcggcccgcggatccccctccgctcttcagcctgaagcgacgaggagaccagaaatgtcaatagttctgatttttaaaaatcatccccccttccccgcccccaagaaaaaggggaggacccaactacagagtgagagggtgggaagaagcgggagcggtagaagaaggaatatggttgtggaggagcccagcggctccggctgcctggcgagcccgggaccggcgcggggaggcgcgacgcccgcccgagcacagcgggcagcacccgcgagcccgggtccccggtgaacacagctccagaaagcgtcaccgagaataacacatggtagatgacaagtgtcccgccacatgctttcttttcgggaatgcttaaagtagagccggcaagccgcgcggttcccttgcaaagtttgcctggcgccgcgcggcggttccgccatttgtcccgccccgcggctctggcgattgtctccccactccccgcccccgagggtctgagggacgcgtgcaacagagtccccagggctcgaggtaccacacagcgcggtccgctgcgggcactgcgcaggaaggggcatgggtggctaccgggacggtcattttattgagatgattcaaggagccgcagacgcggggcaggaaactccgggggagccgtgctcgggttctgcagggaaacctcgggattcccttcgcatgccgcatgcggaaacctgccgggctcgacgtgcacagtccagcgctcctccccactagttactgcccaggccccccgatcctgcacccgccggaatgagagaaagtagcccctcgccgcccagctcccgggtagctgctccggccgggccttgcgttggtgagaaagttccatctagaggcggccgcgcgcaactgcaggcggcgccctaggcccgggcgagccagggagagcggggcgcggggggagagggggcagcccaggagataaggaggatggagaaggacgggagagacccc

SEQ ID NO: 39359 - DNA, 624 bp, Homo sapiens; identical to SEQ ID NO: 28155
  chr7:127744072-127744696
  binary

SEQ ID NO: 39360 - DNA, 876 bp, Homo sapiens
  chr7:128828489-128829365
  binary
cgagctagagcaacaaaggagccgggtcgccggcggggagagttcggggggctgcggcgcgctggggcgaaggtggctgctgggccgcgggctggcgcgggggcggagccggagctgcactcgcacccccggcccgcgtctggcctccctcgcggggcggggaggtggctttaatggtgggagagggaatggggctggggattgggggcccaggggtctcctagggctgaagacaacttggattgcgaggctagggcttggggagtcgtgcatcccgttccgggcctccgcagcccaacatgggccccgggttccaaagtttgcgaagttgggcgccgaggggccggggcgcgcggagcgtccgggggggcccgggcccggattctctgggcgcacaggtcgcctgagccgcctccgcggccgccgaggtcgtgcgtgtggccggggggctccgaggagcaggcgggggcgccggggcttttgctgagttggcggggttggccatggccgctgcccgcccagcgcgggggccggagctcccgctcctggggctgctgctgctgctgctgctgggggacccgggccggggggcggcctcgagcgggaacgcgaccgggcctgggcctcggagcgcgggcgggagcgcgaggaggagcgcggcggtgactggccctccgccgccgctgagccactgcggccgggctgccccctgcgagccgctgcgctacaacgtgtgcctgggctcggtgctgccctacggggccacctccacactgctggccggagactcggactcccaggaggaagcgcacggcaagctcgtgctctggtcgggtaagtgcggcggagccgggtctggggggcgggaggtgccgc

SEQ ID NO: 39361 - DNA, 966 bp, Homo sapiens; identical to SEQ ID NO: 27206
  chr7:140772296-140773262
  binary

SEQ ID NO: 39362 - DNA, 744 bp, Homo sapiens
  chr7:149411651-149412395
  binary
cgcgctgagtggtggctgcgggaatgaatgagtgataagcggcgcgtacccgcgggcttgcacgcccacagccgccccggctggtctcggcgcgcaacctctacccgcagctgggggcggggacgaggggagggggcggggacgaggcccgagccaggtccgccccgccctgtctccgccccccgcttccgagccggcgccgcggcgccttctgggaagtgtagtccgcgtctgcgccggccggccgggccgccgaagccgggggctccgggcggaaacggcaccacccaccaagggatgcgaggcgctcggggcgggctcaacgaggccgggggcgggcccgggcgcgcccacccccgcccctccccctcggcccaggcccccggccccgccttctcctgcgcggacctgggccgccgccgacgagggtcgcgtgcgcccgcgccagggcccgcgccggaaaccgaggagtggcggggaggctgagcccggggatggcgcgccaggtaaggcaggcggacgcgcggacccctcggcgcagtgcggccccgaaggcggtagggcgagaaagagctgggacccccccgcaacttcgggatcggctgggtgaggctgggcaggcctgatgctcaggggttcgtgccgggaagttcaggtcctcggacaacctctctccagctctccgccgccggtacccacggcccagtctccacctggggaaacccccttggcgtggcttgtttc

SEQ ID NO: 39363 - DNA, 1063 bp, Homo sapiens
  chr7:149570366-149571429
  hyper
cgctgcagatggatgtccgcgaggacgccagccctccgcctcccgccgggtccctgaacgccggcccggccggtccaacctcattccgcttcccgccatcgaaacgcgaagcccccgccttcccccaaacgtctcagcgccgctggggcctttctggctgcgccgcctccgaccccaggccccggtccgcgcccgccgctcgctagtcctgggagtgaggagaacgcgtgctgaggacccggccagagggacagcggggaccgccctcccgctgcgtctctgaaagcgaggccgttcctcccgcgtccgacccccgcggggccgtcaggttcggggcggcccaggctgcgggtccgcagggcgcttcgggccgagccggcgcggcgcgtgaagggcaggggacgccccgaaagaccgctggggtgggaccccaagctccaggggtctttggaaataagaatgcggcgtgacgttggctgtgcgggcgcggggctgacgcggaccctataacccatcgccgaaaccgggcggccgcgcccctattcctcggcatttctctctgtccgcggccctgctcagccaatcagcgagtgggctcctaggcaggtcctgagtgacagcgcggcgggctggatcaggagatgcgcgtgcgcggcccggcccggctgatcgcttcgggtgctcgactcctgttgcgcatgctcagcgcgctgcccggctggggacccgcgcacctgcagcgcccgctgctcggccctgcatcctgcctgggcatcctgcgcccggccatgacggcgcactcattcgccctcccggtcatcatcttcaccacgttctggggcctcgtcggcatcgccgggccctggttcgtgccgaagggacccaaccgcgggtaaggaaagcgcgcaggccctgcagacctctccaccccggccccctggcccggctcgcccctccgccccggggcggcggcttcctgctctgcagcgagcgtccgcaggagggacgccaggaccccggacgccacctctgaggtctctctgcacctgggtctctgacagcc

SEQ ID NO: 39364 - DNA, 171 bp, Homo sapiens
  chr7:149745487-149745658
  hyper
cggagagggcacggggtcgcacaaaaagggtgcgagggtgcgtgaagagggtggaggggcggggaccacgcgggtcgtgggtgcgggggcggtgggggagtcccgggagctgagggttctgcggccccgccgaaggtagtgctgcgcgtgccccgcagcacgcgagcggac

SEQ ID NO: 39365 - DNA, 1464 bp, Homo sapiens
  chr7:155164915-155166379
  hyper
cgcccggctttgggcttggccgagagtttagggcaggagcgccggcggggagctccccgggtgctggagaatgcgtgtccggaaagaagtagggcgcgcttcgtggatgcaaccagggccgtctcgcgcactttcttcctaccctgggacagcgcctgaactggagctgggcgcacacactttacggagccagctcgggttcttacgccctggctcacccccgcccgccgccccaggatgcaggtgctgcggcgctccctggtagcctcccgcgctccctgggggcgcgctttcctccatttcagggaagtccccggacaggtgcccacgttttacgctgtccggtagaagcccgcgggctcaggccgacttgcgcggccgcttctccccagggagagaagctggagcttcccccacgcggccctaaggcggggccggctgggccggagtgggcgcggccagggtgtcccagcgcgccccctgccgaccgcgcgctgcggggggcaactccacctcccctggggaggcctcgtccccgctgcagggagactaaagcgtgggtccgcgaccagccggtttaggaacgaaaactctggaactaaaaacaaaaaataaaactggtgagtgcgcagcgtggtcagtgtttccctctgggtaatgcttggccaagggggaagatcgagtactcccgcccacatccgcctcccccaggagggaggattccctctctgctcacccaccctgacccacgcctcccgccaggtccactgctcagacaaatctgtaggtttctgagtatccgtatctcgaaaagcttcaatgcacaaacgaggttttaagcccatcgcggcttcgcaaggggaaggggctgcttccctaaaaacaaaacacaacaaaaaaggcaagggggtactcttgcagatggactggaattagtaatttagccagggtctcttccaaactcactgcaaaattcgccagcgtctcattcttcacacacggggcaccacacgagaatcaccccctccccagaattttgcaaagcacgtttgctgagttttctcgcctttccttccgacaagctcgaactggaaccagcgctctcccctctagacctgcctccgcgccccacccttcttcccccacacagtccctccgcagggagaattcaggtgctaaaaatgctcgggcctcgcagcttcctccctcctcctcggttcctcgaatgacccaagctgcctctttccgggcccttggaagacggtgcgaattccgcggcggcccgctctcgccagcgccacagccctgactcccacccggaggcctgagttcaaccgctttcgcttccttgcgggccgttcaaccctctgaatacgcagattcatttatttatgttttttaatgtagtaagtgggcagctaaatgaattgcaatttgtcatttttatggttaatttgaaatctc

SEQ ID NO: 39366 - DNA, 1470 bp, Homo sapiens; identical to SEQ ID NO: 32148
  chr7:155166425-155167895
  binary

SEQ ID NO: 39367 - DNA, 777 bp, Homo sapiens; identical to SEQ ID NO: 23633
  chr7:155581242-155582019
  hypo

SEQ ID NO: 39368 - DNA, 1370 bp, Homo sapiens
  chr7:156810052-156811422
  hyper
cgccctctgcctcaccgaggggcaaaccggctgaggacccaggcacgaagagtgtcaccagctctgaccacaagccccgtagaccagggctgcgtccataatcggggttgatggcattagttattatattataacctccttgttgcgtgattctagtaatttattttcccacttggcctttgactgggctgggctcctcccagtggaacaacagggggtgtcgtgtttgcagcagaaacgcacactgggatcctttcttgcaacagctgggccggctgggtcttttctcttgtcttctgtacacaggcccctctccgctgtttctgcagagaccgaggtgggagggagaaagaccctccagccctctgctcccaccctccccgcagtctccggggccctgtgctgcaggcaagataatttggctaatgaactcgttaaagggcccctggtgacccgccccggcttcccctcggcccatctgggaaattccattgaaaggctggagaaggttcctcagccccgccgccttctgtcgctgctagaggcgcgaacccggtgactctgggccccttacattaaaataattacccggcggaacaggtggcccactcccggcgcctgggtgcatctgggcccccggagccgcagcccgggaggaggggagcggcacgcccaggggagggaaggtcaggcccgctgagccgggagccgggagggtagagaggggctttcctagggacagacggtcccggggcacccaggcctccgcggccgagcgggctgaggcctaagcagggaggccgtcgccttcaggcacaggtaagcgcagcccgcgcaccgcttgggacgcacctggccacctgcgctgccacccaagcttggggtatgcgggtgcccgagcagaaccccgaactcgcaccgggctccgaggttggagcaactcctaacactgggctcggagctaggggcttgctggaggggcgcttgccgcgccggccctcggggctcacagccgggcacgccggactgcggcgagcgcgtgggcgagcgtgtcaggagcgtgcgccctgggtgcgcgcgtgcgagagcgcacgtgtagggtggcttccagtcctcccttcccgcctgagaagcgtccacgcggagttccaggccgggcgctggggaaggaggtcccggggacgctgctgaaaagagagcggccagcccaggcgcggggccaagcctattgccaaaaacatattaccctgcgacattctgtaaatgagataatgatccataaacccggatgatagatgtggcgtgcctgcgatgtcttctctaaatgagctgctcgcatcgactgctaataatggtgagtttatggaagc

SEQ ID NO: 39369 - DNA, 1200 bp, Homo sapiens; identical to SEQ ID NO: 24608
  chr7:157262486-157263686
  hypo

SEQ ID NO: 39370 - DNA, 2892 bp, Homo sapiens
  chr7:1703861-1706753
  binary
cgggctcggcccgctctgtctccctgttccctggaggtctgggcgcccccgcgcagggactaagggctggacagccgcaggcaggggctccgtccttggcctccacccttcgtgtccagcaatcccgggagcaggcggcggcacttcctccatgccccggcctcaatcacggtctcagtccccccaaccccgtcctgcaggaacaagtgtggtagaggctcggggtcggagggcgggcggccgtcccgcgggctggacggagtttctgggctgcggagaggccgttggacccacgtccggacaggagccccgcgcgcccatccccggcccggccatcctcggggcgcgctgtctgcggcctcccgcgccacccccacccctgtcccgggacctcctccgggaaagacacccggggagcagccccctcccctccagtagtcccctcccctcccctctccctgccctcttgacggtgtggggctccccggccggaggggcgcggcgctggcagcggggtccagagtgtcgcgcccagcgcgcgctgggggtcccgggctccgcagctccgcacgcggccggtttgtgaagcggcgcgcgggggcttagccgggcgagggcgctcttgagcctggtttggaatttttagcccacacgaaagccgcaggctggggaaggggcgggtgggagcgggagacgccctgggaagccgtgagaccgctcggcgagggctcgggaccaccagggagcgacgggggacccctcggctcagagcccgagggcgcgatttcggatccgctgggattccggaggcacatgaagggagagggaaatccgctaaaccgaaccttccgggaatcggaaggcgccgggccgctcccacgcctccccctcctcccggccgaaaggcggggggcgacgcgcaacggggagggaagggagggaggggtcggcgaccttaggggagggcgagtctctggggacgcggggccgccaggggcccgacgaccctctcgctccacctccccgcccccaagtgccccgctctccccccgccccgcaaacgcgcgtcctgcgggctgtgctttggccctcgcggacgcgcgcgctcacagagggtctgacttggggtcaacttccacgaggttgccgggcgcctgtgagcacagccgtgtccccacccaggggcccacctcccagcgccaccagggtcccgacccccagaccttcggacgcttctcttccaaaccgaagcctgggagcctctgggtggcctggggcgggggcagggggcgagcggggcgggccaggaggagggggcgaggccgccactcggcttcccacgccgcccccgcggctggctccaacttcccctccggagcccccctccggccaccccccagcccaccgacgtgcgggcagcgaccccgccccccgcccctccggtcgcccccgccgcggcccccgccccctccccatccctccccgcgcgctctcccacatgaaaccttccatcacgctcagaaagaatgtgctacaacctcggcgctgccgcggccgccaccactgcgcccgcgcccgagcccgagtcggagccggagccgccgctcccccgcctgcccggccagccccgggctccgagcgcgcggtccccgccgccgccgccccgcgctcgccccgcgcttgacgcagtgagcgccgcagcctggctcccgccggctccgctgggctccgggtcgcaggccgagtccagccgggcgggctccgggaggggccggcagggcgggagggggaggagggctgtctggagccagcgagcccggaggaggaagaggaggaggaaggaggggaagccgccgccgccgccgccgcgctcggggaaccggggtgcgcgcgctctgctcgcccgcgacagtgcctccagcccggggcccgcaccccggcccaggtaagaaggggcctgaggggcagggggctgtccggggccgggggacccctctgtcgccgctgcgggatcggagggtccccgcccctaggggaggcagggaagaggatgctctctggggggggcggcggggggcagcgcagggtccccagcggctctcgcagcccgggccaccccatccctggtgccctgacctcggcgtccgcgccagggccgagtctccccgcccgcggggctctggatgcggcgctcggggcccgcggctcccgggcgtccccatccacccacccaggttcggaggcgggcgcacccgaagttagcggccgccgagcctgggccggacaaacttccctccccgacgccgcggctggaagggccaggactccggacccctagggctagggaggcgccgcggggaccccgaaactttccggagcgcgctgagagcaaaaagccggctgggcagaaagagggggagggggctgggcgcgccttcgagtgcgctggggtagccgcggcgccccaagttgaaccacagacgaacccctcttcatctgaaacctggtctcggagtcggaggtggggagggagtgggctgtgggtgcctcgacttcgcaaagccggcgtgggggggcgcagcgccccgccccgcgccgcttgaacctccggagggggtgttacgggacccccgcccccaccccagccggtggctgggctctgccgaccgctgcggagctcccgggaaggacccgctcgcggctattaataggcgtcggtgaccctagcctctcccggtccgggaagctggcgcggcggggctgggctgggctgggctgccgagtggggcgggaccccggggcccagagcggacccccagctctcctggtccctcttccgccgctcttccctccctgccgcctgctttcctcccattttccctcttcgatctc

SEQ ID NO: 39371 - DNA, 1036 bp, Homo sapiens; identical to SEQ ID NO: 27226
  chr7:19146849-19147885
  hyper

SEQ ID NO: 39372 - DNA, 2232 bp, Homo sapiens; identical to SEQ ID NO: 28176
  chr7:19155978-19158210
  binary

SEQ ID NO: 39373 - DNA, 986 bp, Homo sapiens
  chr7:20817295-20818281
  binary
cgctgcactttgacgtcgctggggagaggaggcgggtgcgagtgaacacaaagcagtttggccaagaaaagagcacaggaggtgaagaaaggcaggcagtcgtgggccaggacagagagaaagctgaacaagttcaggaagaagaatctgagtctgtccacgccgcagcagcctccggtggcacgggcagaaagatcaagcgcggcaccccgtgacaggatgggacagattccccgggctccgaggccctaggatggcgcagggcagcgggctggtgcgggaaaactacagagcaagcgagggagggaagcgaaggcaggggaatccctcaccccgtccggcccgagtgtcttttgagagcccacaggcgagcggggcggggggaggctccccgcgcattcccaccgtgggtttgcccaaggtcagaggcccgggactggcggggcgggtctggccggcattgcccgcgctgagcgcgctgcagaacgggagcagggcacagggtggcgctcgctgtccgtgcagcgggcggaggcggccgcggtgcctttgtgtgcggtgggcgcggcgatgggctgctccggcccgcagcccgaggggagcggcgggcccgggccggggccagggctcgcggggagaccccagaccaccacctcactcttcgctgctacgtgcaagcggaccgtgcggatcgccagttcggaaccctccccgggagggccccggggtctttctcaatgtactgggcacttcgaggagctgggaagaggaaagcggagggtagcgtttagaaagggagggaaatcctcccaggctcaaaacctctcgcagaattcattcgaaaagagaacgaagggaactttgggcaggccggacctcggctcagcgccctgcgagagaagcagaggtcgctgccagcgtttcctcccgcgcagcaagaaattggtgcctgagaagcaaagttgaggaatgggctttttaaaagc

SEQ ID NO: 39374 - DNA, 824 bp, Homo sapiens; identical to SEQ ID NO: 32176
  chr7:20823201-20824025
  hyper

SEQ ID NO: 39375 - DNA, 1482 bp, Homo sapiens
  chr7:20824537-20826019
  hyper
cgtccatgaggtgctgcccggcggggctgagcaggtgcgaggaggcgccgctgctgaaggccgagtgactcaggcccgagtaatccgagttgtagcctccgagcggcgagtgcagcgaggtttggagccccccggcggcagggtgcagcgagccgggcagcgcagccgcgctgttcgggttctgcacgtcgatccagccggcccccacgtcccaccagctggaggcgccggccgagcccacctcgcccgcagcacccaggcccgggtgcgagggcttaaaccacgactcgtacgggtgcgccatgcccacccgcgggtagatgccctgcagcccgtccacagaggtgtgcaccttggagatgaacaccggctggtgggagccgtcctgcgagtgcgcggaggagccgccgccgccgcccccgccgccgccgccgctgcccccggaaactccgggggcctggaaaacagagtagtcgttggcgaagggcgagctggaggcggcggctgcggcggcggcggcggcggctgcggcgctgctggaggtgagggagaaggcgctggagccaggcgagccgccgcagctgaacgagtcggacaccagggccgcggcagccgcggctgctgccgcggccgccgcagccgccgaggacgagccgccgttcctggaggccccggacacgccgaagcttgagagactggaacccactacgttgcagctggcggaagaagaggacgaggagcgtttccaggggtggaagcctttgccgaaggaagaagagctgtccgagagggaggagggagacgggctggggctgcctatcttattacaggtagcggcaagcatggccagaggagtcgatcccaacctcggttcttcctgcgaggaggagaggagaaggagtgggggaggggaggtgggcaaagggccggtgggggaggaaaggaagaaatgtgcatcagtccttcggtagcctccaaagcgccccactgcaccccatctctcgctgcggcgcgccgccaccaactcacctggcacccccaacagccccggcgcccggccgcttcctactctacaggaggggacaagtttggctgccggcgtctgattcgggagcaagcaccacgctaaagaagagtttgacaagtattctcacctaaaacaacactctcttgcacacaaagccccagacacttcgtaacaaacaagcaaaaagtccagattggagaggaaggaagttttctttgccgagaagcctgggggaaaaccattggattgcttttaagagcgcttccctgtaatccggagagctttgaaaaacctgttcgggtccccagaaacccatcctgggttgtttctcccaggccaaaagaaatcaaactgtagggctcactctttcttcctgcttttctttctttctttttttaaaagcatatctacagtagtaaaaacgagacgagttcaacgtacctgcgagacaaggc

SEQ ID NO: 39376 - DNA, 806 bp, Homo sapiens; identical to SEQ ID NO: 32177
  chr7:20830567-20831373
  hyper

SEQ ID NO: 39377 - DNA, 1157 bp, Homo sapiens; identical to SEQ ID NO: 28177
  chr7:21582471-21583628
  hyper

SEQ ID NO: 39378 - DNA, 1247 bp, Homo sapiens; identical to SEQ ID NO: 25862
  chr7:23052818-23054065
  binary

SEQ ID NO: 39379 - DNA, 540 bp, Homo sapiens; identical to SEQ ID NO: 30580
  chr7:23287221-23287761
  hyper

SEQ ID NO: 39380 - DNA, 620 bp, Homo sapiens
  chr7:23749573-23750193
  hypo
cgtgaacagattaggaaagaccacgaaatcctacgtcacctctaaagtcacagcttgaagccttgcgaaaggaactggccctagaccccaccccggcctataaatcaccagggcgcagcctcagtgcctgggggtcggcagcagccagcgtcaggcggctcccgcacgcttcttcctaggcggcaggccgtggctgccacgtgactcccgctaacaccggatgatggcgcagcgctgtgcacgcaggcgcagtgtggggcccttgcggtcgaagctcacgcggtaagccgctgcacgtgtgctacggcgggcggagggccgaaagtccagtatgtgggtccagggtcactcttctagagcttccgcaacggaaagtgtgaggtcagtagtagtttttgtggtacgtgcagtggtggccgcttcaaggactattttcgtcgctgcttgcgttttaagtctccaatcctgggacgaggcccatttcagggttttctgtcaccttctagccgcccgccaccccagaggggtgccagatgccccagtttttgagtgcatgcaggcaggcgaaagtggctcgaaaagacctccggcctgaatgatctccatgaagacgcggtcac

SEQ ID NO: 39381 - DNA, 868 bp, Homo sapiens; identical to SEQ ID NO: 21452
  chr7:24613119-24613987
  hyper

SEQ ID NO: 39382 - DNA, 1260 bp, Homo sapiens; identical to SEQ ID NO: 28179
  chr7:24796336-24797596
  binary

SEQ ID NO: 39383 - DNA, 352 bp, Homo sapiens; identical to SEQ ID NO: 25869
  chr7:25896245-25896597
  hyper

SEQ ID NO: 39384 - DNA, 684 bp, Homo sapiens; identical to SEQ ID NO: 25870
  chr7:25896671-25897355
  hyper

SEQ ID NO: 39385 - DNA, 496 bp, Homo sapiens
  chr7:2686463-2686959
  hypo
cgccgcttcctgcctgccctcaggccctgctgctcctgggggccgccgccctggcctgcctcgccctggacctcctcttcctgctcttctactccttctggctgtgctgccggcggcgcaagagcgaggagcacctggacgccgactgctgctgcacggcctggtgtgtcatcatcgccacgctggtgtgcaggtgagcgcggtggggcggggacggagggcggggccagagggggcggcccgagggggcggggctggagtggggtgtgtgtgggtgggcggggctacatctcacgggcccgccctctccagcgccggcatcgcagtgggattctacggcaacggggagaccagtgatggcatccatagggccacctactcgctccgccacgccaaccgcacggtggccggggtccaggaccgcgtgagtggccgcggagttggggccaggagcactcttgctgctccggagccccacgtctgcgcgaggacgggc

SEQ ID NO: 39386 - DNA, 1383 bp, Homo sapiens; identical to SEQ ID NO: 29389
  chr7:27195477-27196860
  hyper

SEQ ID NO: 39387 - DNA, 985 bp, Homo sapiens; identical to SEQ ID NO: 24624
  chr7:27204281-27205266
  hyper

SEQ ID NO: 39388 - DNA, 833 bp, Homo sapiens; identical to SEQ ID NO: 24625
  chr7:27205279-27206112
  hyper

SEQ ID NO: 39389 - DNA, 895 bp, Homo sapiens; identical to SEQ ID NO: 25876
  chr7:27281871-27282766
  hyper

SEQ ID NO: 39390 - DNA, 1980 bp, Homo sapiens; identical to SEQ ID NO: 28182
  chr7:28448716-28450696
  hyper

SEQ ID NO: 39391 - DNA, 838 bp, Homo sapiens
  chr7:30721217-30722055
  binary
cgggaacctacaatgagggaaggaggtttacactccaagaggaggaagtatttccttctcccctttttgggctgtcaccgcatggagcacgggaattgtgggcaaatcactggcttactgagattagacgctgtattgggggtagaagcagaaggcgcgcccccaacactgtaaggggtccttaacgcccgcggtccgcggtaccgcggccgtcagcagctttgtaccgctgggtccggaatcctctttactccctaaaccgccttctcaggaggccggtgtagagcaggcagcgagggccgggggcactcacgggtcgtgttgtacttgacgccgttgaagtactcggggcacggcctctccacgagggctccggcagcgctgcggggccagcacgttccgatctggtccaaggtcgtgttgcagtaggagtagggacctggcggcgggagagagcgcagtagggctcagaggggcccgcagggacgcggggctctcggagcgcggggtcaggggcgcacccagcgcgcgagagaaggagcccgcgcagcctccgaccgctcgcctcccgcctaccctcggggtccaggggtggcccccagccgtccaagagcagctcttcagccagcgccaggctgcagttggcctccagcaggctgtggagcagtgccgcgtccatcgcgtcccgcagccgcgtgcggagagggagtgggagtgcgcgcccggcgtgactgcgagggagtggacgcgagagtgagcggccgagagggcgcggggtcctggcccccgccagcccagccccgatctcccgggcagcctttgggcgccacctccggtc

SEQ ID NO: 39392 - DNA, 1809 bp, Homo sapiens; identical to SEQ ID NO: 22945
  chr7:37487365-37489174
  binary

SEQ ID NO: 39393 - DNA, 947 bp, Homo sapiens; identical to SEQ ID NO: 22946
  chr7:37960179-37961126
  binary

SEQ ID NO: 39394 - DNA, 1846 bp, Homo sapiens
  chr7:42276003-42277849
  binary
cgacgaaggcgcgcctctctccatccgctcacaccacacccccgccctccgaagcatagcccgggctggagaagccccagcggcggcggcccccgcggcggaggtccccgcgcgcacccaccatgcctcccgcctccttccgcccatcccgagcgccgtgcgcgcccgaagcccgagccgtagagcgccaccgcgcaaaggaaggagccaggcgcgtgcggggctcgcggagttcttctgaaccctttggatgggggcggaggcgaggggcgccgccaccactgcggcaaacttcgtcccccctccgggaggtgaaattctccaatccgtctccggccggtccgcgggtcggactcttcggaaaggaccttccaggaggagggagcgaatgcaagccttgctcggacgcctcaccggcggctctctaaatctgggcgccttttgacagccattttcactccatcccgtccccacgctggggaccacctctggccccggaggcgcgggcgcggccgcaggagcgggctgcggggtccgcgaaacaaagaacttcgagcgggacgtacctgcggcggcagcggctgtcaagtccccgaacttcccatagacccgcggacggggcgcaggctggcggctccccgctccgcgcggccgcgggcggctacggctaccgcgagcggccgggctgggcgcggggtgcgcccgccgcgggcatggtgcggcgcgggcggccgcggggcgcgcggggaaggcgggagagcggcgcgggtgagtgggagcggcgggtgtgcgcgagtgcgagtgtgcgagcgcgccggtggcgctgcccctgcccgctccctcccgctcgtgcagctccggcatcagtttcggggatcgtgtaatccgatcccttctgactcacaagccctgagtgacagttctgatttggttcaaccgcgggagggaggggaaagagaaagaaagaaacccccagccgtacgcctctcctggcatccaatcgactttctggaaaaaggtcccatcccggcctggtgccccgtgctgggtggagaagccccccgccccgacctggcaccgcctgcactactcacggggtggaaaagttgtccctcggctccgcgctcccctcccgcgcgctccctccttcccttctctcctcctcttcctcctcctccccgcgctcctcctcccccaagttttaacagatgttgccggactctcctcgctccctcgcactctctcttcctccgccccggcccccgcccagtcccttttctttcagccactctcgggctcggaggggacgcgctgagcagcaggacgcctgccgccgcagggggcgaagttgggaaaacttggagtgctgctcgccttacttttgctttctcgctccttccaggccgcgccgggagcccccgcttctcccgcccgccgggtccccaagcccggagtgggtcccagctgcgaggcgggcggcggcggctgggaggcggcgcgtcgcgggccggggtcgggggctgggggggagcccgggcgccgcgagccacgcgcgcgctccctccccgccctccgccgccgccgccgccgccgccgccgcctcctcctcctcctcctccttctcctcctcctcctcctcctccgcccctccccggtcttcacacagacacattcatgcctgctcctcctcttccccctacttgaccccgcgccctcccggcgcgccgaagccccacccacccggcgaggggaagggggcccgggcgtgatgtcacccgcgccctctctcttctctctccacaccgccaggacaccccccaaatgcgcgccctggcactcgtgctgc

SEQ ID NO: 39395 - DNA, 1180 bp, Homo sapiens; identical to SEQ ID NO: 28191
  chr7:44364447-44365627
  binary

SEQ ID NO: 39396 - DNA, 1373 bp, Homo sapiens; identical to SEQ ID NO: 30604
  chr7:45613422-45614795
  binary

SEQ ID NO: 39397 - DNA, 2768 bp, Homo sapiens
  chr7:49812706-49815474
  binary
cggggagagattggcagagattcagaaagttcgcgcttgagatttttacgtttcttactcgtaaacgtctatttctctgggtttctgaatgcaaagacgagaaagtctcaacagtctgctaaactaacacggccttcgaatcccaatctgaacacagtagctgaaacaagctgtccacaaagaggaaagccagagggggccaattaggaaggaagaaattaaagaaaagagaaaagccaagatgaaaggtccagcgcaaagtgaatgactcgactggagaatggcagccctggcagggtctgcggccggctgcggaggtggggacgcggccgcgcggacgagtgacaggttggtccggcgcagcaaagggagcgggtgcggcggtagggcctctccgggggcagcgcgagggcctcccccggggcagcgcgggccaaggcggggcctccagagcgggggcagcagaggagggagcggaacgggagccgggcggaggcggctgcggcagggggaggcgggaggcgggcgcgctagctcccatgctggcctcggtgccactcgcgcgccggccgcgctccgggcttctcttttccctccgacgcgccacggctgcccagacattccggctgccgggtctggagagctccccgaacccctccgcggagaggagcgaggcggcgccagggtggcccccggggcgcgcttggtctcggagaagcggggacgaggccggaggatgagcgactgagggcgacgcgggcactgacgcgagttggggccgcgactaccggcagctgacagcgcgatgagcgactccccagagacgccctagcccggtgtgcgcgccaggcggagcgcgcaggtggggctgggctgttagtggtccgccccacgcgggtcgccggccggcccaggatgggcgctggcaacccgggcccgcgcccgccgctgctacccctgcgcccgctgcgagcccggcgtccggcccgcgccctgcgctcatgtatgtaggtttggcgccggtcttcagggctgagggtgcatgctgggtgtccccgcgcggccggacgcgctccagctgggttcagccgctcagctgctccggaggaaccccctcccccgcccaagtttgtgaatatgggcgcttcgcccagtgttgaggtcggcagggaccgggcagggggtcagcagggccgggcacgtccggagccctcagggaggagggctgagggggaggggacagacgcaccggagtgcgcagagtgggggcgttcggggagtgaggcggagagaggctggattgccggtgtcctgcggcgtctcgggctctcccagcccctttgggcggcagaaactttggaatccagaaaggctggccgggatccagcgagtaggagggtctcgcgcccactctgcgccctggggccccagcctcccgcactgcacaccttggtgctgcccgggcgcttctgctccgcagccaggacactacaagactgagcgctgcggccggcgacctggctcccaaggctcggaggggcgggccggcagaggagctgaagccccgggaatccccgacccggccctctggcaaggggccgagggcatcctttcatgcagcggggcttagagagcggggagggggcgtctgctcccgagacgggagtcttttaagaagttgttagaaatgaatcgtggagtcctaggagaagctttgtttaacctccccgcattttcccagcacaaccccctaaagcaaatgaggaagagtttccctcttatcttcctgtacattcgtccgtctctaactccactgctgaattctccatttaataaccttcgggaaatgtggccaggacctagggagggacaccctgggtgcctgaattacgtggttcaaggcagagctttgcaggggggcgcgggcctggctcgctgcgttccctgggctccgcaagccgcccttggccatctccaacactaatcacgactacatcagaaacacgccggccggtgtcgttcttggatttcgcttccaatgtatcgctccacagtttgtgatgtctaagaaccccggccgtgcaccgacgctgggcatgctgcccccgcccccgtcgcccagctcgttaatctagagctatgccggagcccgggtgggggccgcggcgggccggggcgcgcgcgggccgcggggctcagttgtgctgctgttctctccgcagggacggcggctcccggctggcggcggcgcgcccccgggctgtgaatgcgactcgcccctcggccgcgctccccgcccgcccgcccgccgggacgtggtaggggatgcccagctccactgcgatggcagttggcgcgctctccagttccctcctggtcacctgctgcctgatggtggctctgtgcagtccgagcatcccgctggagaagctggcccaggcaccagagcagccgggccaggagaagcgtgagcacgcctctcgggacggcccggggcgggtgaacgagctcgggcgcccggcgagggacgagggcggcagcggccgggactggaagagcaagagcggccgtgggctcgccggccgtgagccgtggagcaagctgaagcaggcctgggtctcccagggcgggggcgccaaggccggggatctgcaggtccggccccgcggggacaccccgcaggcggaagccctggccgcagccgcccaggacgcgattggcccggaactcgcgcccacgcccgagccacccgaggagtacgtgtaccc

SEQ ID NO: 39398 - DNA, 1629 bp, Homo sapiens; identical to SEQ ID NO: 24645
  chr7:50343211-50344840
  binary

SEQ ID NO: 39399 - DNA, 382 bp, Homo sapiens; identical to SEQ ID NO: 25892
  chr7:50560501-50560883
  hypo

SEQ ID NO: 39400 - DNA, 777 bp, Homo sapiens; identical to SEQ ID NO: 28197
  chr7:55145822-55146599
  hypo

SEQ ID NO: 39401 - DNA, 65 bp, Homo sapiens; identical to SEQ ID NO: 6282
  chr7:63767198-63767263
  hyper

SEQ ID NO: 39402 - DNA, 484 bp, Homo sapiens; identical to SEQ ID NO: 22948
  chr7:63767582-63768066
  binary

SEQ ID NO: 39403 - DNA, 793 bp, Homo sapiens
  chr7:64712213-64713006
  hyper
cgctgtccctgtcacccgtgttcccgtggctctgggcccctgccacgccaggcgtgctcttctgtttctggctgtcccaccggcgatgctgcgcttccacaccacccggcgcacaggcgttggtagatgtggaaggtaccaagagcggcaggaggaaggggcgcgcggacacccagccccttcccgcgcacccagagcaggaagagcagcgcgcacccggtcagcgacgcggcgggctccactgtggcgcgcgcactccgagcacggagggctgcaggctcacgccacctggctccgcgcccatcccaatccgcacccgccgcccaggaaccggggctcaccctccgcctgacaattgtctcggggtgccgagggtccgtggcccgttgcccgggaggtgaccactgaggagtcgcgctgggtatcggaccaggaactcactgctttcattggctgcggaggtcagaccgtcccaccctcttctccccgccgccgcggcaaggccagggcgaaagggacaagtgcgctgctggggtcctctgcgctgtgcgggtccgggactcagggttcccggctgctaacaaggctgcgtagcttccccctcccctcctccttaggtggcaacttgtggacacacccattaagcggtcaggcgtcaggtttcctcccgagaggtgggaggcgccctggccttgattcatcgtgaagctaggcaggagatttcccagccacggagggtggaaagcttgccttgacctcagcaggtcatgtcactccgtgtgcacaaggcctc

SEQ ID NO: 39404 - DNA, 729 bp, Homo sapiens; identical to SEQ ID NO: 27252
  chr7:64974264-64974993
  binary

SEQ ID NO: 39405 - DNA, 170 bp, Homo sapiens; identical to SEQ ID NO: 24650
  chr7:6524924-6525094
  hypo

SEQ ID NO: 39406 - DNA, 385 bp, Homo sapiens
  chr7:6654776-6655161
  binary
cgctcgggccgggcccggatggcgcctactccctctccgagtgccatcgaattgtgtgctaattagccacaatttgcaccgcggcaggggcgccccgaggccacgcctgccctctagggggtggcagggatcgggttgggtaccccccacccagacacccaggcagtgacagtcgccaaccccgtggcgcgaggacacgcgcagcagggatgcggcacagcgcgcgctgcgctcggcaccggccagcccgggacgccccaggggccgccgcatcgtgtcccccgggccgggtgagtggccgggccgggaatggttaagcccaccgagctgcggctgcctagagcggcggcggcgacggcggcggcggcggcgggggccggggcgc

SEQ ID NO: 39407 - DNA, 651 bp, Homo sapiens
  chr7:6655356-6656007
  binary
cggcccaggccgcccgcaggctccgggcacctgtagcccccgaggacccgcgtcgcctggccgccgccgaccccaggcggggccaccccgtggtgccgaccccgggcgccggcctggatcccgctgcccgcgatggtcccggggggccggccctgagccccgcgcgggattcggggccctgcctcccgccccagcccccgccggagagtctccaccaacttctgctcggccgctcctctcagccccttcccttggcccagggcgacctcggcagcccagagggcgtggaccctccggagtgcccagaaagcccccggggtggccctgcgcctcctggctctttctggatggaggcgcctccggaaggagccggctgcacgccgtggccttcacctcgcagcctctgctgaccacacctccctagcgcagaggctgcccgggagcaggaaatgctccaccaggtgaggcccagggggtcgttggcgctgggcaaccggggacgcgtcccttgagagagtttggactggatggcacgagtcggcctgtttaggggagaggggccagctctgcacgggccagggtggactctcaggagcgcctgggcacagggccaggccgtgggtgacagtgctctggacacctgccttgccc

SEQ ID NO: 39408 - DNA, 3158 bp, Homo sapiens
  chr7:69062203-69065361
  binary
cgcacagctattttacccagagaggctggtcgcttttgttgatcgattctcggctgcagtcagctctttaatacaactttttatgagcatcagccacattgcggcgggaggaggggctgtggtggaaaaagcagggaaaccgccccccactcccaaaaagtaaaggaagcccgcggggcagggactgcggtttgccggtctaacgggtcctcgagctggggcggcggtcccggccccttcggccccgcccctcgcccgcggccgcctccgaggttcaagttcggcccccggctgttaggcctcgcgctcccggatctgaagccgcccgtgcgtccctaggtcccccgctggaagacgaggcgggaatcccaggggtcatccgggcgcggggtcgctcgtccacgcactgtggtgccacgtggaggaaaagtttccaactctgccagttggtgctcccactgcgcccaggcggagcaaaggcccgcgctttggcacccgctccccgttctgtctcctccagtcgcgccccctcccagggacgccccccttgtaccccttctctgaattcccttctctcctcgcagcgcaggtagccaagggaaaacacccttgggggctggtggggcttcccgagaaggcggcctcgggccggccaggggtagaggatccagggacaagtgtcccgaggaggatgtggggggcgcgcgcgcgaagtggcctgggagcaggggcccacacgcgtccccgctgcgacaggcgggatcctccggcggcttccacgccctggcgcgccaactctgcccggccgcggccgaccccacgcgggcgccccctccacgcccccgcccccgcccccctcacagctccccaccgcccccagtgcgcaggcccggccgccccagcgcgcatgccctgggctcgcgagcgcggccagcccccagccttttgctttctacacactctacaactggggagggggcgggggaggagggagcccagccgtccacgtgatcccgccggccggggccgcgggggcgggagcgcgcgccgagagaggcgcggggagggcgggtgcgcgggagcgcgcgcactcgagcgagcgagcgaaagcacgaacgagcgagcgagcgagcgagcgagcgggcgggcgcggggttgggctgaggcgggcggcggcggcggcggcggcggtgggctggccgcggagggggaggagcgggagctgcgcgaggcaggcgggcgggcggaggatggggcagtgcccgggctcccgctgcagccgcccggggacacgccgtgcaccctccggctcggggctttctcggcggcggcggcggcagcagcagcagcgttagcggcggcggcgagagcagcgttcccggctgcgcttctccctcaggcggggcggcgagagaagcggcggcggcggcggcggcacaccggtgtctctcccgctggagatttctttctgctttcctcatcgactgactgactcaccccctcccttttttgaggaagggtgacctcttctctgggactggaaaaaatatttttgtgaggaggggggcgggtggcagcgacagggtttgcttcttctcttctttcatctccctctcctcccccctcgaagaccgaaaagcaaaccccacaactgctccagcagcatcctccttcccttcctccgcctcccttctcctccgccgctcgcagtttcgccctctcttccgctaatgattgcattattatgctcccctctctggggggtctcgcccctcttgggtcgctccggagccccggcctcccctggctgcatttcttaaaaatttgggagcctgggagtgagttttctccgaggcgtgtgtgagaggcggcgggggtgttttcctgcgcgaggggcgggtgaagttcattgcccccacttttcccgcgacctttttcggacccgattttggatcgagttgaggggggcgcgggcgttttcggggggcggggggcgcggcggagaatggccgcggggagggctccccggagcctcccagtctcttgatcaaagcattccgctattctgatttattgcttgcttggtgagttatttttttttcctctaaaggagacctgtgtgttcagccattactttgctcggcgctgctcccaggcatctccgaccctcggtgctgtggggagccccacacttgggctcctcgcctctcgccctcgctccccgtccctcctcccctctctccgccccttcccccttttctttctcctctctttcttcccctctctcccttctttcggccgccgtctcccccgcgccctcctcggggcggagggaagccgtgaagggggagggagggctcggtgtcaatttttttttgtgtggctgcggccgtagcctgtggcgggcaagcggggagaccccggcgcagcagaaccatggatggcccgacgcggggccatggactccgcaaaaagcggcggtcgcggtcgcagcgagaccgggagaggcgctcccggggcgggctgggggccggcgcggccggcggcggcggggctggccggacccgggcgctctcactcgcctcgtcgtcgggctccgacaaggaagacaatgggaagcccccgtcctccgccccgtcccggcccagacccccgcggaggaagcggagagagtccacctcggcagaagaggacatcattgatggatttgccatgaccagctttgtcacttttgaagcgctggaggtaagggggaccccccttcccccgggttccctttatgcacgaccccactcggctgcgcccggctctcctgcctccctcgccgcgctccgggctgtctgtctgtctgtctgtctgtctgtctgtctaggctgaggtcttattgttggtggggggagctgggggcgcgggcagacaggcagcaggagggagtcgcaaagccgtgcctggtctcgtttcctcgctcgcctttcccctgcgccccctccctgcaccccctccacagcagatgggcagaaagaaaggggttcgggcatcacaacaatgcgccccctctccacagagagctctgcccccactccttcctcctctccctccccaatcatggcttcttggctggtggaagtctctttgctgggtttggggcgcctgtggac

SEQ ID NO: 39409 - DNA, 253 bp, Homo sapiens; identical to SEQ ID NO: 25900
  chr7:7605160-7605413
  hypo

SEQ ID NO: 39410 - DNA, 207 bp, Homo sapiens; identical to SEQ ID NO: 30619
  chr7:77324199-77324406
  hypo

SEQ ID NO: 39411 - DNA, 945 bp, Homo sapiens; identical to SEQ ID NO: 28203
  chr7:834245-835190
  hypo

SEQ ID NO: 39412 - DNA, 1117 bp, Homo sapiens; identical to SEQ ID NO: 23367
  chr7:87229392-87230509
  hyper

SEQ ID NO: 39413 - DNA, 969 bp, Homo sapiens; identical to SEQ ID NO: 22951
  chr7:87256927-87257896
  binary

SEQ ID NO: 39414 - DNA, 484 bp, Homo sapiens; identical to SEQ ID NO: 35112
  chr7:87257959-87258443
  binary

SEQ ID NO: 39415 - DNA, 863 bp, Homo sapiens
  chr7:87563203-87564066
  binary
cgatgcagatgaatactggctgctgtaacggcccagttggtgcatctcggatgccaggaggcggtccagtgctgatctctttcttttgcccttccctcccgcccttccagtctgtgggatatagaggacctcacagtcacgaggtcgcgacggtccgtgccgtcgtggagacaagcgggacacggagagagaactacatttcccagctgactctcctgcgcgcgcccttgcctgcgcgcggggggcgagtgcaccgggcgctcgctccctgccgagctcttgtcgcccgcccgagcctttgccaggggatgaggtgggaggcgctagaaaccacttagctacagccaaccgcccaatgcagcactcgctcgctccccccgccagcggaagcgtccgcgaagcacaatgcagcactgagccgcggtggaggttgcagcgccacggccgccgcagcaccggccggggctgggtggaggtggccgcggggaccccgggggcgcggagcgagggaaacggactcggcggcgccggcatgaggagctgagcgtctcgggcgaggcgggctgacggcagcaccatgcaggcggcagtggctgtgtccgtgcccttcttgctgctctgtgtcctggggacctgccctccggcgcgctgcggccaggcaggtaagttagccgtcctctgtgcctttgggccataccatttcccgggaatctttggagccctcaggcgtattgaaaagggggcatccccatttcccgagtgcgcggggagattttttttttttttttttttaattcgggagggtggtgagaagtggagcaaaaatatatgtgtggaggcgcgcagatgcactggaagccttc

SEQ ID NO: 39416 - DNA, 1623 bp, Homo sapiens
  chr7:90225109-90226732
  binary
cgtggaaggagaaaaccgctcaaacaactggactcggcccgtttcctttcggtaacctccccacagcccaacacgctgtccccagacgctgcccgctcccaccccggtcccttcgtgatcctcccgcgcgcgggcggggcgggggaggagcgcgggggcggccgggaggggcgcggccgggagggggcgccgccggggcgcgagccagacacagagggccgcggaggacgcgggaggcgagcggggagccgaggtcgtgctaggatcccgcgcccaggggccttcgtcgagggaggggcgtggcggcggcagcaggagggcagcaggagctgtcaggctggcggttccgcgccgcggctccttctgcgctgcgcccgcaactctgggctgagaacttctcccgccggcccactcgccctcgccccgcgcactcggcgccaggcgactcccgcaccttgtacccggcccgccccgcctcctccttcggccgcaccactccccctgccggccgcgcttctctccgttacaaaggagggaaaatgagccgggcggcggcggcgcggcgcggggccaccacggcggcggcgagcgcggccgcccccggcaccacgtaaaccgcccccgcccgcccagctgcggcccaggccggagcggagcctgccgtcctccgcctgcctgctgctcgcctccctagacctgcgcgtcgcttcccggcccgccgaggaggtggtggaggaggaggcgccgctttccccgcggcgcgcgccctcgccgttgtctgagctgtgcctggaccagtttggggaagttgtcggggctccgcgtcgcccagatgtgtgacctcattgagccgcagccggccgagaagatcggcaagatgaagaagttgcggagaactttgtcggagagtttcagtcgcattggtgagtagcgcgctgcccccggcccccccagcgcccgctcccctcggcctgcgcccccgccgcgttcctggcaccagccatgcagctgccagcggggctggcgtggggtgcgttgtaggcggggatcgagggcacagtgctagggacccgggggagggcaaggacgtaaaggaaagagacccctcttcctcaggatctgggggttcatttgtagattctctcaagcctacaatatgggttctcccctcctccgccactagtgctcgccctttcgcgcgcgtgggggacgggcgaggggacccctcggcccccaccgcgcaaggggctgcgcggctgcttgggccacttgttattttttgcgcacaggcttggatattgggcgtttagtcagtaatttagctttggaaattggtgaaacgttagactgtgccctggtattgtttaacgtatccaacctaaagggaagtgggacagttaccttgggacctattgttcggtacttcgggtcctggaaagcgagatttgggtgttcagtctcgaggtctctgaatcttcccgctgctggagagaaatgcgcgctgtggagttgtctggacatttaggaatgtctctcgaacttgttccatttaatagagctcaggggctgttgtctttaaaccaaacaacaaaccaactgaccaacagtgtttaggacagtgac

SEQ ID NO: 39417 - DNA, 1233 bp, Homo sapiens; identical to SEQ ID NO: 28206
  chr7:93519219-93520452
  hyper

SEQ ID NO: 39418 - DNA, 513 bp, Homo sapiens; identical to SEQ ID NO: 33943
  chr7:95025593-95026106
  hyper

SEQ ID NO: 39419 - DNA, 1387 bp, Homo sapiens; identical to SEQ ID NO: 25905
  chr7:99155672-99157059
  binary

SEQ ID NO: 39420 - DNA, 144 bp, Homo sapiens; identical to SEQ ID NO: 30627
  chr8:101821988-101822132
  hyper

SEQ ID NO: 39421 - DNA, 966 bp, Homo sapiens
  chr8:104152726-104153692
  hyper
cggtaatgccggccagacgggtccgagcgcctcgggagccccagccctcctccggctgcggggccgctgctcctgctcccgggccgtcacggagccctgagggagggggcgggcgagcgggggccttggggcggccagggcgctgggagggaggactgggcggtggggaccggaggggagggagggccttggaggcggagaggagggacgggctgggagagggcccggactaggggcggcgggcaccgcaggagctccgcgcggctgcagcgcgggcgggagcggggacgcgatgtcgccgccgccgcctccttgcgggccggggctgcgcctccggggctgagccgccgccagagccgacagccgagcagccgctgggcgctcccgcggcgcaggaggatgggctgcggcgggagccgggcggatgccatcgagccccgctactacgagagctggacccgggagacagaatccacctggctcacctacaccgactcggacgcgccgcccagcgccgccgccccggacagcggccccgaagcgggcggcctgcactcgggtaagtggccgggcccctgcagaccctcgcccgcccgctaccccgggcgccttggcccgggcactgagagaggagccggttccctgaggaattgatggcgcggcgggggtggctgggaggaagcagaggcaggacctgcccactgatcagtggacagatgcaagcccagggagtggggtcgaccagagccccttaccgaaggctgcgccgatgccccagcttccagcagcccaatgctctttggccttgtccaaagcttgctcgctggtcgggagaccggtgggtgggaggacagcccacctcctccgcacacatatccctcagccacccaccccctgatccgcccagggccgcctccgccccgctttggcccatctgccatcccctggccacctgcgtacccagcc

SEQ ID NO: 39422 - DNA, 2917 bp, Homo sapiens; identical to SEQ ID NO: 30630
  chr8:104510995-104513912
  binary

SEQ ID NO: 39423 - DNA, 1346 bp, Homo sapiens
  chr8:105600489-105601835
  hyper
cgcccggattcggcagagcccttgcccccgaggtggagtggggagaagtcagcgggaagccttttcagggaatcgagtaggacaagggctggcgcggtgggaatctcgccggtgagagaacttcctaaccccgggttgagggggcggggggaaggaccgtcccggcagcggcgggggcgagctcctctgctttctcacagtcaagcatctttgtgtgtggattgtgccaggctacgggtcctggagcaactggccgcgggggccctcgaacccaggtcgggaagtccgcccgccaccccctcgctccgccggggccctcccggccgggccccccagcccctctccaccacccgagggtctggaggtggacgagtggagaaaagcatctccgtgtggggacacccgttccgccacatccaccccctcaccggtctttgtcccgccggtagccagggtctccgcgggagtctccaggggaacccccgtcctggaggcctcggggcccgggtcgcctcagctttgttcggtcagcggggcgcggggacgcggacacttaccgtacaccccagcgaggaaaagcaagagcaacgcagacctccaccgcggagactcttttgtgctccagcgacaggccataaccacagcagatggagagagagaggaggagacggaggaggagggaggagaagctggaggtagacgacgccgacgccgccgccgccgccgccgccgccgccgagccaccggctgctccctgcgctctccgcggctgcgggagggggaagggaggggccgccgccgcccgcgcgcgctccctcctccctcctccctccggctcgcctgctcccaccccgggcggtgcgagagccccacgcggggcggccctcctgggggcaagggcaaggagctcgcgcgccagcgcgagacgagagggtggcggacgccggactccggcctcgcgccgctcgggctagccggcgccgccactcgccagactgagcgcgcgcccatccgtgcgatcggcaatcccctggcccgcctgcctcggttccctccccgcgctccgctggactttccaagtttcgggccgatttccacgcgacgggagcccaaggagcaaggcagcgccaatcgatgacagagcgtgcgaacgccggctgctggatgcccaggggctggagcgcggggtgtgtggaggagcacggtcgctgtccgagggctgggctctggcccagcgggtggggggagggggggtgggataccagctgggaggctgaaggtggttccgtgttgggggaggcgtggatggtctgaagctgacaacttgggagttccttcctctatcc

SEQ ID NO: 39424 - DNA, 1187 bp, Homo sapiens
  chr8:10873138-10874325
  binary
cggggctggctgcgttcgggacccagcgccccccaggccctccaaagactggttgagctcagaaccagaaggagcgagggagcagagaaagccgggggcgggctcggggtaagacaggaagggagtgagattaaggtgagaagtgggaggggaaggagggaaaccgagaggaattgagggtgggctcggcgtatctagagcagtccgcggaggacgctgaggctcgccggggaagtgctgtgcccgaggcgccccaaaggtgggcggcggtgccagctcagacccacgcctctgtccaagtcccgactcctgcggactcggctgcaggcgggctccatgagggcgggcagcagggctcagacgatccggctcggtttggtcagcagacccccggtaacgccccgcaccgtcggcgatccctgcccccttccactgcgcccccacaagccccgagctcgccagtccttccccgcggcgctccgctctgtggccccctcgcatcccaccgtgggggtgcagctcccctggcacagcccgacggtgggagagggcggccagctggactaaaagccccgtccccgggcgggaccttcctccccgcaccctgacgcggaggttggccgggggcctctgcgtccctctgccccgcgccctggatggggagggtctgggctccgcgccgcgaggcagcgcgacggctgcgggcgacttggcgtgcggtgctgaggaccctgggggagtgtgcgccgcggggacgccggggactcggggtcctagtgccaccggacgcagcgggagtagcgcaggtctgggggcggggtctctcgaggcgcagacaacaagctagatcctgagccctctgcttcaaagcgggtagcgccttcgcccacgccttccctcccaccatccctgcctggctgccacccggaagtccccgtccgcgccccgacagcgccgccctccggctggctgcagcgcgggccctcggtagggggcgttccaaggccccgcctcctcgtcactgccacggatgacgacgccccaggcccccggccccgcctccgcctctgcctccgcggccagcactggggagcgtcctggcctgcgcttgctccccaacccctccttgccccgctctgagccggcgcgtccttgctcccccaccactcttctctctcgggccagcc

SEQ ID NO: 39425 - DNA, 756 bp, Homo sapiens; identical to SEQ ID NO: 35121
  chr8:109799189-109799945
  binary

SEQ ID NO: 39426 - DNA, 865 bp, Homo sapiens
  chr8:11058503-11059368
  binary
cggccgcgcggccgagggcgtcgggggttggcggccggcgccgggggccgcgggaggctgcagcggctggtcccccccgtcggcggcggcgctgcggcgcggcttcctgcccaggagggagcgcaggcaggcggagcggcagccccagtagcacgaggaggtgttgcagcagtggcagatgtgcatcgagctgctctcgccgggctcgctgccgtcgccgccgccgccgcagccgcctcccccgggctccccgtcctcctcgccgccgctgcccaccgcctcgtccaggttgtgcagctgagcgaagcccacccccacgccaccgccatcggatttcgccgccatcttgactctcttcccagctccggaggttgggggggagggacggcggggggggggggaagaaggcagggaacggggagggggggaaacgaatggagaggaaggggggcggggaggaagcgggggagcaaacgaacgaggggggagtgggccagggaaccccctccgcttccgggtagttggcgtcacttccgggcgagccccccaatcgcacggcgcccgcagctccccagccctaccctcccggccaagatggccgccctcctgtgcctcagctgctgggcgggggaccggggggttctccccgccagggctccccttcccctcttccgttgaccccgaaacccatcaggttgacccctcggcgtttcagaatccggctggcccgagtgaggcggtccaaagtgatccctggagggggcagtgccagacgttttggggtccccttcctcagcgtcgcagctcacagctttcctcctggagaaacgccccctaacaccctcccggctgctggtggaggggc

SEQ ID NO: 39427 - DNA, 1283 bp, Homo sapiens; identical to SEQ ID NO: 23371
  chr8:110986113-110987396
  hyper

SEQ ID NO: 39428 - DNA, 221 bp, Homo sapiens; identical to SEQ ID NO: 7561
  chr8:118531602-118531823
  hypo

SEQ ID NO: 39429 - DNA, 596 bp, Homo sapiens; identical to SEQ ID NO: 24658
  chr8:121823361-121823957
  binary

SEQ ID NO: 39430 - DNA, 1205 bp, Homo sapiens
  chr8:131455079-131456284
  binary
cgctctcagaaaacgcagcaggtcccaaaatggtacaagcagaaaacacaagccacttcacggtccgcccaggagccaaccccaagctccaagtaggactccccccacccccttccctttcgtttctcttcttttgctttaggcaagtggcctggggcctgccaagcagcgccgggtccgggtaggggccgggggccgcggggaactttcctcggctgcaccagagacaatgccgggagggcgccccatcggcggggtccgggccgccaagcacgtcgtcccgggccctcccccggagggggacgcgaaaccccccagggcgggccccgtccccggccccactgcaggggccccctctcccgagctggaggcgaggagacctcccccccccaccgggcggcctcgcccggccccgcagagcctggccgcgcgtcccgcacacgccccagcccagggccggcgccctccccgcggagaaggacaccccgctgcgagaggagccgggagcccgccccgcgccccgtcccggcgcccttcttcgcgcgagagactgggcagggggcgcccgcgactgtgggcgactccgcccggccccgccgagcgcgcccgagcgccccgcaactcaccgggacctggcgggccgctgggcattattccatcgcgggttcggccgggcgctcgcggctctcgggtgggaaagcgaactgcgaccgggaagcgccggctgggcgggaggcgcgggcccggggctgcccagcgcacagtgctcgcccgcggcagcggccaggccaggcgaggcgcgggagccgagcgcggcgcaggaaggggcgggcgaccatgtgccgagggggaggaggccgcggcgacgcgagcggctcgcacgatcccgctcggcggcggagggcgcgggtttcaggaaatccaaacacttcgacaggaaatcggaatcctgactaagcattcccggccccgagccgctccgcgccgggggctcccgcctcgcttaacccttggcccgccggcagccacgaggggggcgtgggaggggccccagacctcggccggggtcgggcgtccttcgccttccgccccatgccccggccggccggcctcctccccgcctgaggtggaaggggtgggatttatccacagaaaaccctggacgcggaaggtgcctttctaaggccgggacagcggcaaaggac

SEQ ID NO: 39431 - DNA, 980 bp, Homo sapiens; identical to SEQ ID NO: 22954
  chr8:132052356-132053336
  binary

SEQ ID NO: 39432 - DNA, 269 bp, Homo sapiens
  chr8:133491923-133492192
  binary
cgcacccctcccatccccaactaaactcagtggcgatcccaacagaagggatccacccgaaacagaaacacagagctcacgggaggacccgctttatcctcttcaaccctcacattaattggaaaaacccacataattattttaagcttccaaaccaacacccctagaagatgtcataaatgtgcacccgcgcgcgcacacatccgcccaaatcagcaggggaaccacgcttcgttttttaagcccctagtgtggaacacccggagagc

SEQ ID NO: 39433 - DNA, 1534 bp, Homo sapiens
  chr8:133492249-133493783
  binary
cgcgtgctgaggacgggctggtctccccttcagcgggaaagcatccatgggtcttaaagccccagagacttctcagctccagccccgaccccaagtccccaagcgcgccgccgccgagggcgccccgagcggccgggtactcacaccaacgcgtggtaaagcagcgcccagccccgcggtctctccagggcgtcgtagatcaaagtttggatgcgccggtacttggcgttgtttctcttgactgggcggctcagcggggtcttggccaggagcccgatgccctgcggggtcctccgctgcccctcgtcgcggccgccgccctccagcagcagggtcccgtctttgtcggctccggccccgagcgccaaggtgacttgctccacgtcgccgggcgccagccccactttccgctcctcgtcgccggccgccgccgcgtcccctccggctgggttagccgccccgccgcctccgccgcccccgtcgccgccgccgccagccgcccccgccgccctgcgcgccttgagccccatctgcctcgcccccgccggccgcttcgccttctccgctgctgctctgggaagaaggggcgctcggggtgcgtgaacgaggcggcggcggcggctgcaagcccgggaactccaatgccatgatccgcgcgcccctccccacccccccccaaaagcaggcaaaggcgggccccctggggggcaggggaggccaggcagggggtcagggggtcacatcccgcgcgggtcagccgcaggaccccgagggtcgcgggccgggggctgcggagaagctgggagggcgcgcgaggctggcgcggaggcgctagggcgcgcggcggcgggagcctggaaccggcgctccggggcggcggcggcggcggcggcacccaggccggcgagcccaagacagcatcgcagtttatttacaagcccggtgccagccgccctcccgcccgccagccacacgcgccgccgccgccgcctcctccctcctccgcgctcccacccgcgcccctccccgcccgttccagcctcagcctgtcagcagcagcagcagcgagcgcgccgcgggccgagagcacgccgcgtccctccctccctccttccccggggtggggccccattgtcccgccccgtcgcggcgggaggcccgggcggcggcgccccgcctcttcccgccgacccccaccgctgattgtctggggacccaggatcgcctgggctaccgccgcccccgttgcaaccaggcagtgcgccaggcggctgcagagcccggctcctggagctcccgtgggcgttggggcttcccctggatggggcgtgacggcgggcagttgggggaagaagaggaagggaggagggactggggggttgtcgcccaccaaacattggctctgtggttgcagctttgtgaatttccctcaccccctacccctgctcctcggcttcagaggtaaaagccaagttgtcgggttggtcaaggccgggcgcaccgcgaacgcacctgctctgtggtagcgaagctc

SEQ ID NO: 39434 - DNA, 1983 bp, Homo sapiens; identical to SEQ ID NO: 28218
  chr8:134582236-134584219
  binary

SEQ ID NO: 39435 - DNA, 1444 bp, Homo sapiens; identical to SEQ ID NO: 28219
  chr8:140714896-140716340
  binary

SEQ ID NO: 39436 - DNA, 975 bp, Homo sapiens; identical to SEQ ID NO: 28221
  chr8:143530860-143531835
  binary

SEQ ID NO: 39437 - DNA, 2386 bp, Homo sapiens
  chr8:143532357-143534743
  binary
cgccgcgctagcttggagccgcgcggagctgcctcgaggaacgagcacggcccccgccccctcctggggaggctgggagctctggacccggccaggagccctctccctaggtccccgcggccccctgggcgaggtagagagctcctccggcctcgggagggggcggcggagctgagaatcaccgcgaagcgatgcgaccgggagggcttgacggaggctgcggctccgagcccgcgtccctcctcctggccgcggcggctcctgcttggccactccccggcagcctgaagagaacgcctaatctggcaccccagccccaggccgctgggcaccttacccctttccacttttattttgggcttctaagtttcttggagcgcaggcgcctaggctgggacccgaagagccctaagccagccctctttcagcacccgtccccgccgcgacctccccgttcttcctccgggtctggggcgcagattcctgggctgcaactccggagtagttgaaaggcaggaaggcgtgtgggcgggtagggggcctgcactcccgccccagaggagccgcttgtcgtttgtgttggggagggagctgggaggtctgctctcccgctccatcctgggaacccacggagaccctcggtactctccccacagacacaaacacacgccccctcggagcgagagccgccgcgggggaacagcagaggccgcgcgggcggaggcgggggaaaggggagctgggtcccttttctatctgggagggaggtggtatacggtgtgtggggtctggggaggcgactgtcacgtctcctagaaccctcatgccttccactcgtctgcgaccccggctgccgaggaggcaacgagggaggtcgagccgctccctcccgtgggcggcagcgaaactctgcgcccgcacgccggggtgccgccgagtccggctttgagtacccagcaaggtcaagcaggcgaaggagggggcgggggttcctgggcgcgcccccgtccgcgcacagtcggggccttggaagggggtgtgcgcagcccgccgagtcagtcccgctcgcctgccgcccgcgcccggtccccggaggcggacgttgcgcgcgttcggggatcccggagcgcccggcgccccacgccctcccttcggctcgctagctgctccttggcgctgctttcagacttgttgcgcctcgatctggggggcagaaggctggcccgggagacccggcggctgagggccgagccgcgaagcccagggatgcgccagagaggcgcgcggctccgcgggtgggcgctgcgctggggggctcgagcctggggtttgccgcctccgatcccagggacgggcgcttgttcctgccggggtcccgcgcaggggcggatagagggcgattcgtcgcctcggcctcaggcagcactcatccggatcccgggctagggagggggcgcagccaagttgtggagccctcggaggcccttccctctcccgcaggctccggcccctctcggacctcggtggccgcgtccgtgaaatggggacgcgggctctgctctcggatcccttccagcccccgaccctccgcacttgtcccgagatccaacgtgcccggtccgcagcgtgctgggtctgcggcgtcagggtggcccgagtcccgagaccatctgcgcttgcggacacagccgcggggcctggcatgaagggccccagggagggcctagcaagcgcccggggtccgagcagcctcctgcggcgtcctccgcccccggtcggcccgaccccgcctccgggagtgggtcgtggggcgcggagcccgtcctccggggacgccgcggggctccaggcccaggcggccggcgcggggccgcagtggcggaaggcggagggccggcgcgctgccgctgactgccgggagagggcgcccgcaccgcgcccgcgcggccctgcccgccccttccgtctcctccgcgcctggcccgcggctccggccccatcttgggcagccccggccgccacctccctcccgcccgcccgcccgcccgctcgctcgctcgctcgccgtccgctcccgccgccgggtcccgtgacgcgcctcgcgtctcggccggagcccccctcgccggcccggcccggtccccgtgtgcggtgcgctggcgtgagcgcgcgtttgcgtgctggtgtccatgtgtggcgcgcatgcacgtgcgtgcccgtccgggaggctgggggcacgtgtgtgcaggcatgcagacttgcacatgtgtgtgcgtgacgggggcgggtctcgcgccggtgtggccccggatggcaggatttagtcaaaccccgttttaccgtcggctctggctctgggctgcccccgggtctgctctgtgtgcac

SEQ ID NO: 39438 - DNA, 1161 bp, Homo sapiens; identical to SEQ ID NO: 33122
  chr8:38323132-38324293
  hyper

SEQ ID NO: 39439 - DNA, 1972 bp, Homo sapiens
  chr8:38324508-38326480
  binary
cgcaaacatgggtcgtagcctcacttttctcccaaccccaaacataacggtaggggaagcgaggtgcagaggggtctgggccagagaagcatacgcatcgctgccgagtgaaccacaccggacaaaaaccctcatcccttcccccacctctaggaaccagattgggaccgaacggtccttccgcccccatcccacacctcggcttaacgaccgtgggttgtcctcccgttccccaaacttccgaccctttcagagaccgtccaagtcataagatcaccccttctggaaaggggagtcgtttttcgctctcagctcaagcagattcagccatttggtgacgacacctccttaaaacctattccaagagaagctaacctagccctccacgtcctccgcagttcatctcccaccccatccgaccccaacccgcaccccaggctttcccgggggtggaaaaggacttaggaatgccccggatttttagcgttgagcccaaagctacctgctgaattgggggtgaatccccaaaaggggaccaaaaagacatggagtggaatgcaacacacacacataacacacacaacgcatcccacctcgccgcccactcccgccctcctccccagtccaggaaaccgcgggcctcgccgccttcgccccgggcctgtccctcccgggactcactgaggagccgccgccgcctcgccagctcccgagcgcgagttggaggaaaagttgggcggcgggaagagcggcgggacgagcgcagggagggggcgcaggagacgcggacggagggaagggaggggagacccaaggggcgcggatcgcccgggagggagccaggaggtgaaaggggcgggcggcgagcggagggaggcgccggccccggctgggctgcggcgggcaaagcgcgcagccgggaggctccggcgccgggggccgctcgggacgccaagcccgccccagatccgggggcgccgcggctcttacctcgctcggcgtggaggttccgcctcgggagagtccgccgtggcttgtgcgagcgggcgtgtgcccgcgtccccggctccggcccgccgcccccgggctctgttcgggtcctggcggggtcgcaagagctccgcggccggcgctcgactcccggcggcgctcggtgctcggcgcctccagcccgggcgggaacaatggagccggagctggtgccccggaggcggggcggggggagggctcccgtccgccacccggggtctccagaccttgtgcccccctcctccagaacgcagcggcggcgcctcactttccttgcagaccgggctccatcgccctgcggaggccccggcgccgcggcgtgcccgactgcagcacgggtaccgtgcgccctgcggggcgccccgagctcggaccggagaaaagtccttgggttccgcggcttttcaagcagcggcgcgctcgcggccggggaaggcgaggtcgccgcaatgcgctacgaggggtctcggtcccgtccggacgtggccgcccagctcccggcacacccgggttcctccgcgcgctgcggctgcaccggcgtcccggctcccgctagctgccgcccgccgccgaggacgccgcgcctgtggccgcaagagcgctccgagcgctatgcgccggcggggcgcgagggctcgctctctcactcccacccgcgctggtccctcctccgcctccgccccctgcagctgcctgctgggccttgtagttccccagccgcggccccaaaggacggggagcgggccgagctgtccggcgctctgcccttctcttcctacagcctggtctcctttggcgtttgcgcccctgcatctgagcacgtcccagagggcgccggaatgtcaggccctagacatagcagcggtttgggggctagggggcaggtgaagagacgccgcagccttgaggttgtacctggtagcgtgggctttggagtctgtgc

SEQ ID NO: 39440 - DNA, 838 bp, Homo sapiens; identical to SEQ ID NO: 37859
  chr8:41685769-41686607
  hyper

SEQ ID NO: 39441 - DNA, 1465 bp, Homo sapiens
  chr8:41753753-41755218
  binary
cgccaactccgccgcaccgggcgccgcgccccaccgcgtcccgggccgcccgacccctgcccccagcagccacttgcaggtgccgcggtcgctgggctttcaccgccgccccctcctaccttcttctttcggtcacgggagcggtttctccgcttcctgttggattcctccttctccttctgctcctggagggcctgcgcctcgatgtctttgattttcttcagctgtttggccgcttgagccatggcgggtcacggcgctcccgtccccgcctcctggacccctagcgctcagcgatccccgaggcgacaccccctaagaaggggaagggggtctctgctccacagaggggacagcgttcgtggcgccccgagggccggctgctgcggggtcgcgggaaggcgaaggcagttccggacgcggagggcgaggggcggctgcccgcggcccgggatggcgctgccgccgcggccggagctcgcttgccggcgcccgggacgggctctgggcagggcccgccgcctccctccctccgcctccctccctctcctgcggcggcggcggcggcgaagcgggggggcgggggcggggaggcggctcgtactgcggcggcggcgggcggtgagcggccgcggaaggggcggattcgggcgctcagcgcgggaaggcccgggggcccggccggcgcggcgaggctgggcgcactgggcgtccgcacggggtcatggcgagcgccgagcttccgcctttgcagagccccgcgccgtcgggcggcgggaacaaagcggccgctctaccccggaccccgctgcgggccgcagggccaagccgggggaagaggggaggctgcggcgggcggcgcgccccgcgcccgggcgacccggcggaccagcgcgcctggcggcggcgagcgcggcgacatcgcgggagcggaggctcggcctagagggcgggcggcagagggcaaggaccgggcttggggagcccccgggcggtggccgctgagggcccggacgcgctactcccgagcccggggtgcggttcctccccgggcgccctcggcgtggggcgcgcgcctccggggctccctggggaagagccggttccccgcgccgcacgctgggagcttgatttgcccctttcagaccatgtgggcctttcatttgcatatttccgaattatagatgaaaacgtatccaggatcaagtgaattgttttcctttgagtcctcttgggacagaaaaggaagtaggtccccgctccagccccgcccgtcccccatccccggcgctcccgcgcacgcctccctggggacgccgcctgcgcccgtgccccgcggggaagagctgcacttgggtccgcagcgccagcccagcctgcggcaggcggagggggcctagggctcagccaaccaccccgtcacgccgcacaggagccagccggggtccccggctcgggagctgcc

SEQ ID NO: 39442 - DNA, 494 bp, Homo sapiens; identical to SEQ ID NO: 24686
  chr8:49468683-49469177
  binary

SEQ ID NO: 39443 - DNA, 538 bp, Homo sapiens; identical to SEQ ID NO: 35147
  chr8:495481-496019
  binary

SEQ ID NO: 39444 - DNA, 494 bp, Homo sapiens; identical to SEQ ID NO: 27295
  chr8:49834207-49834701
  hyper

SEQ ID NO: 39445 - DNA, 785 bp, Homo sapiens
  chr8:53853387-53854172
  binary
cgccttcctggacgccagcttccgcaggaacctccgccagctgataacttgccgcgcggcagcctgactcccccagcgtccggctccgcaactgcccgccactcctggccagcgagggaggagccggcgccagagtgcgggaccagacaggccgcctaggcctcctggggaaaccgactcgcgccccatacccgacctagcagatcggaagcgctgcgactgtgcccgcaggttgaccttgccaagccctccaggtgatgcgcggccatgccgggtgaggagaactgaggctgagatcgccacactgagggctccctaaagccgaggtggaggaagaggagggtagaggaggagggcggtattgctgggaaccgccccctccctgccctgctccctgctgccccacccgagccctggcagtctggaacctggctggagtcggaactctccgcgccttcgaagggaggcccgaggacgctgccggcgcccccaggcgtcggctccgcgcggcccctgctgtagctggcgcacagccccggcgggtccccttgtcctccgcgcgctctgggaagacggtcaggcgcgcgcgtttggcgcccacccctgtgagacccgcttggcctggcgccgcgggcggggaccgctgccgaggccgccagcgcctcttcaactggggaaaacacaacaactcgggatgccccatcggagtgtgtatacacctgtgtgtgtgtgtgtgtggtgtgcgcgcgtttgcggaggcatgaaatgcggggaaagaggctggc

SEQ ID NO: 39446 - DNA, 989 bp, Homo sapiens
  chr8:54792065-54793054
  binary
cggccgaccctcggggggtcgtccgctgaggcccccccatccggtagccaagcccagggaagaagacgccaccgctgggcagagctcgcctatgccggtgagtaccgtggtctccactacgccccacacccagcctccccaggacaccagcctctcccgattcttcctaaccccaactgacccgctccgctggggctagcagtagggagggtggcaaggtcgggaaggccgggacgtggctgggcaagtcctaggacgggacattggcggctcccgggacaccgcccctccccgcgggaagacactccaagctactttttcctgggccatttcctttccatggtccaagaaaacgggagggagccctcgctcttccccgaggctgcctttcaaactctcagcgtgtcgctctcctccgcctactccgagcctcccccaaacgcgcctccgcctgctcccagcgctcgctctcccactcccctgccctctcggcaggcaagggaggaaatgacgtgatgttatttttgtgtcaggtcagtttccagcttcagcttagccctccgggctccagggaactaaccccgcggccccaccgggtcccactcccgaagggacgctgcgggctacggggacacgcggtgctgcgagtccggagagctgggcggctgggttccccctcccgctgccccctggtctactcctttccccggactccggagtccctggagaaggggacgcggagggcgactgccgagggtctcagcgggatctggagtcaggggttagttcccccccttatcccccgctcggttgctgggtggggcctccgcgctctggctagctgggagggggcgagggccgctttccagggcgggaagaccggaggcctaggctgcgccggggtggggcggggacagagctcagagaggcgccccgggccggggagaaggtagggggctgccctccagagacgcgcagtccacagacgc

SEQ ID NO: 39447 - DNA, 1980 bp, Homo sapiens
  chr8:54793072-54795052
  binary
cgccccctccatgcctgccgcccacccccgctccttcctcccgctcccttcattcacgaggtccgagcacgcagtccagcacactctagtctcgctcggccccgcgcgccgaggggaggcgatgacacagagggcttcgcggacgccctctacgcgcgcctggcttcgcatccacactcttgggacttgctaatgcggggctggagcagtggggctgcggccggggtggaggtcgcgccccgcgtggggcctcgggggtacccctagcacccgcggcggtggagtgcgccgccgctggagggaggcgagacgtgggattgcccggccgggtaaaaggagtgagggggcggggaggaggcagagcaaggggaggaagaggccgggagaagagggctagagcaaagaccgagagccggagaaaggcgaaaggcgcggtgagcaatcgccgacgtagagagggcagccctccgcgctgcaatattgagaaggcacccgcgggacgcatgcgcacggcggacggaggcgagccggccggggcttcctccccggccggcagggtggacggtgggctcgtgagtatcccagttcctcgaactctctttcttcgtctcgggctcgccctgaggcttcgtgctggaaagtggccgaggctgggaggggcgcgccgctcgtccggacctcagggtgtcgccgttgctgcggggcgggagccggtgcgagtcgggggttccttcccgcagtgcgagtttgggggagtggggctgcgagtgcgtccgcgtgcgaagaggggcatcgcgccaccaggatcaatatgtcccgggcctgccagggcgtccgcgattccacctctgcggcttcgcgtcggtgtcttggtggggaacgcgggagtctagtctttagaccctagaaatcgcattgaccacccgaagcgtatttcggaaagaccaggcgggtggaagcgtcggctttctcacgggatagggagaggacaaggaaggggttgggcgcccggggctggtggtttgagcgccgctgggaagggtaaggagacagagcctcctggaatcgtagcgcctccttttaggagaagtgcaaccagggcaggggcaccgaggggcagggtgaggaagtggacgccccacgcgtggaccctagaagaccgactaggtatgggcgttcactcggagcctctgttcacgctcttgaaaaccgaatgaacagagaagtgccctccacccttcgcctgcgccagggcagttaacgtgcaggcgccgccgggattttcctggaacaaacccgggcacttgatcttccgcaccctcggagctgccctgggaagtcgaaacaagtctgggcgcccggactgcggagactggaaagcagggggcggagggcgggagactgggggcgggaagtggaggtgcaggctgcagctggggaccgcggtgggcgttggaggggagggtctgtgtgcgcggctgtcctccagcgctgggggagcggacgggccaggggcctctagggaagcggcgctccgggaccggggtggctttcccgtctctgtgtgcgcggcgatccccacacccagctcgggcggaggagccctgagagaagcggctagctgagagtggggtgggcgttttggggaaaggtttgcgtgcgctgcggccctaccgctgctagagaagtggaagagagagagtgggcgccgggagggggtctataggcgccgcgacctaccccatctccctccacgcttgtgggggagtgagtggggaaggggctttgggagaggcggcgcgcgggcactgaggtgcatcgtgagcttcccggacttgacagcatcaaaggaaaatcctggcgagcagccagggccagcgagcgaccccagcagcagggacgcggccgtgcgagagctcgcggacaggcgagggggatcccaggggagcagctgctgcccacgggccacgggcgatgcac

SEQ ID NO: 39448 - DNA, 674 bp, Homo sapiens; identical to SEQ ID NO: 25941
  chr8:57069543-57070217
  hyper

SEQ ID NO: 39449 - DNA, 353 bp, Homo sapiens; identical to SEQ ID NO: 22960
  chr8:57360555-57360908
  binary

SEQ ID NO: 39450 - DNA, 2224 bp, Homo sapiens; identical to SEQ ID NO: 35156
  chr8:65492354-65494578
  binary

SEQ ID NO: 39451 - DNA, 1530 bp, Homo sapiens
  chr8:6691849-6693379
  hyper
cgcggggtccgggctcaggcagcccttagcgcccaggctgggtccggctgtcaccaccccgagcgtcctgcggcagcctcccttgcacgaaaagccttcggtgctgcagggctggggaatgctgacacccagtccgtgcccagctggagggcaagggaggacacctggggtgggtgccgacccccgcaggtcctgtctcagcccttccagtccggggcgcggagccagggcgcttgcgcgtcctccgtgtgcgtcctgctcggcgcgcctcggaagcagcgggacctgcggggacgcccgcgaactcagggaaaagtcccaaggcggcgttcccagggtaccccctcttccaccccagggactctgcccgggaaaaagcttccgcagggagcccggcggaagtgggcggagacgctcctcccggcactgaaggagttacgcgttcaaaccagaagggcgcgaaaaatggggccatcttgctccgccgcggctggcgggctctgggttccccctgcgacggaggtggcctcgaagggccgcgtcccgccccgtcctaaaccccgaagcggagtcgccgtcctacagggccgcgtggatgcggagccctgtccccctccccccgccaccccttctgcgagcggcctccaagtcgcagggtccccctggacggccgggggtcgggggagagcccgggcgcccccagacttgcgctcagcacatcttggcatcgcagcactttgcaaagcttgtgatggaaggaagggcggatacatctcccctgcttctgcgaggggatcttgcatgcgtggggcggggggatcgtgcatgggcgggaggaagtcaagcaccagtcgggaggggggggaaccgagcatgggtggaggaaaatcatgcatccttggggggatggtgcatgcgtgggcatctactaaggacgggaggacgtgctctgcaggtgggatggccaccaccgtgcgtcaccggcgcgcagtgctgggcgcaggctggggcagtgcccgcccgggcataggcagcctgtgcggctcccggcgccggggtggggttaggggctgcaggggtgagcacagcctcgggctgccgcactcacgcgcgctctgctcggccgcctgcagcagggccgagagccccaggagcctcgcgtgcatcttccgtgccgaccccgcagcctgcgcccgccccttcccctgcacgcggccccgcgtcggggaggtttccggcccggggcccgactgcgggtggcatttctggctaagccgttaggcgcgaattgtatgtctggtttattcgtagtggccagcaggggagggagggaggatgcttggggtttctggcttccagggtgggtggggacgaggtggtggagtccagctcaggtccgggctcctgataagggcagaagcgggttctgcgctgcccccaaccctgtaaccgccaggaaagcgcttggtgagcgtcgggactgcgcaggttcctcgggaggtggctaaactggccaccgcctctggggcc

SEQ ID NO: 39452 - DNA, 2326 bp, Homo sapiens
  chr8:67873342-67875668
  binary
cggaggcatcctgtaagaggcttgcgagactcttaccaagccaccccggctttaaacgcctctccagccacctgtgaaccgcgaaggagccggctttcgcggcggggaccttgccaccagtaccctcgcgggccgaggtcgttctcccggtcggcttcccgcctcacccgaaaaggaattagagcatctacccaagacggtgactggcagggcagatcaaggtgtcctggtctcggccccagccccgcggtgcgccccgcccgcttaccttgaccgggtgcaggtagccatcgccgcgcagggcgcccaacccggcgtccgccggcgcctcggcgtcgtcctgcaggctgcgggtgagatgcgcgatgtaggtggtggccagcagcagcacgtccagcttggacagcttggtgtcgggcggcacggacggcagcgtgcgctgcagctccaggaaagcgtgccgcagggtctgcacccggctgcgctcccgcgccgcattcgccgccgccggccgcccgctcccggaacgcgagccgcccccagggcccgccggccccggcccggtccgcccgggacgcgagtcgcggatggcggcggccaggggcgcgggctcggcgctggcgctgagggggctgcccgctgggcggccgcggtccatggcagcttcccgcgccgcgcgcgctgcaaaggaccgaaggtgcggtgaggccggggggcggtcgggcttaacccgagaggcgcagccccctggttctccccgtgcgcccaccagcagcccaacggggctaagggcgctctcaagcgagctcgttttgcctgggacgcgatttgcttccggacgtctggggagagttgcggaactccggagttcttgggcttcctagaaggataagaagaggcgcagtgccggctttgcttttcaggggcaaattaagcaaaaggtctactctacccgggaagaaagatctcggaagcacagctcaggatcagcactcgttcgcgcttgggtgactttatccaacccggcacgcacgagaggtggcgcggctccttctcgccgacgccgcggaaaaccacggctcaccagccgccctcggcctttcacgccaggggggatttctgcccgaggagcgggggacccttagcctcacctcggggtacggcacccgccaccgttccgagcccgagagctgcgcagtacgcgtctgacgggcccctcacctttcctggagcggctgagtggagctccgctccgtcgtgagggcgggcgaggggcgtggagcagggcctgtgtggccagggccgcgctggtcactccatcctcgtccggccgatgcccaagtcgacggctgtttccaacctccgctggctgtgacttttatgcgggcgccccgcggccaggcgtgtgtgctccgaccggctaaggcaggtcgggcggaggacctggcccaccggagaggctacgccgggggctgaggcggcttagagggtcattaatcaaaccctccggcggggcgggctcgggggcggggcgtcctcctggccccgcccctcggctcactgcctcacgctgctttccccgaggcgcctcgctgagggcggcgtgtggagagtttggggtgtctgccgccggctgcggtggggccgggctggaggccgcgggtgaggcctgtggttaacctcgcgctgccgaggtcttacctcctcgagtccagtctgattccaggccgcttccaggccggtgcccagctgaggcgggaacgctgcagtttggttgagcgtgacttttaggctctgtgaggaaaagtcgagcgcgccacatcgaggcgctagccgtttattctaccacaaggtaaaagattcatgctgtcctagttaccctaaagctgggagatacactgcacttcctaccagaccccgaatgctctcagtgtctgtaattctttaagaagttcctagagcagacagcccttggatcgtgggcacttctccccggggacggggaccctgctgaccgcctccgctgcccccgcgggggccaccgctctttaattatttgggcgaaacattcttttctggttttgcacttgtggactcacgggaagcgtgacttgcagcgaggcaggacccgatcccaggcttctttagaaagcggacgctgcgccccaaggcctgttcagagccgccccaggaagccgtgggtccccgaccgccccaaaccgcagcggtttctgcaggtcctggacccgtcgccttcgtaggtgaaatctaagtacttttcagcaacataattagaacacactcgaaacaatgcctgcagttctcc

SEQ ID NO: 39453 - DNA, 986 bp, Homo sapiens
  chr8:687561-688547
  binary
cgcgccggccgccccccagtgcgccggtgcctccctgggcgccgagtgcgcaggcgccggccgtgaagaccgaccgtgcgccgggctcgagcgcggtctgagcgcgcggcgcctgcggcggcgaacggacggacggaccgcggacggacgtactgaccccaacccgcgagccccgggagccgtcggtctgaggaggggccgcttcgccatgtcgccccgcacctgctgagcccggagcgtccgaggatgtccgcgctgaggaaggtgcgagccgccgggggctgccgggagccgggcgcggggctccgagagccgtcgaggcggggagggcgcggtgtgtcggacccgcggggacgccccgagggcgtcagggttgggggcgggggcgagcgggggtcgtgccgcccgccggggccggagcgctggggaccccagggacagcctgtgctcgggggtcgcgcgttgcgctcctcgccgggctccgcgcatccctggccgcgctcgggggtgccgggaccctgggctccgggggtgcgggagcgcacggggccgcggaggtgtgaaattctccgctctgcctgcccggggtggagggggcaaagcctggggggtgccggcgcgccaggggctacgcgcctagctccggtggggcagctgcgagcgagtgggggcggcgggcagcagactgcatccccctccccccaagcccgggtggaaacgccgacggggactgggaatgaatgaagggtgccgggctgggctgcgcgcacgggggctcgcgggggcgggggcgaccaggatggggcccttgtgccgggcagcagcggctgccgagaccaggcggagtggagggtgcgcgcagcgagggggtggccgccgcccggctctccaagtgcgagcgaggagctcggggtcttttttaggggtggttgctaagcgaggcgctacccagcgcagggttttgtaactaagcctcccccggcagc

SEQ ID NO: 39454 - DNA, 1631 bp, Homo sapiens; identical to SEQ ID NO: 22967
  chr8:72755373-72757004
  binary

SEQ ID NO: 39455 - DNA, 943 bp, Homo sapiens; identical to SEQ ID NO: 22968
  chr8:75896528-75897471
  binary

SEQ ID NO: 39456 - DNA, 730 bp, Homo sapiens; identical to SEQ ID NO: 25948
  chr8:79428304-79429034
  hyper

SEQ ID NO: 39457 - DNA, 2265 bp, Homo sapiens
  chr8:81397833-81400098
  binary
cggggcggtgcattttctgtgaaatgactactgtccggggcccgaggtgctgcctcgcacaatgcatcaaaggaggttgtgtccgtggtcgtaacctcttcgcgtgaaaggcaccgcctggtccagtctttgtgaaggaacaaaataagttcacttccttgggcaccgccacccaccctcagcaaatgacaaggctggagcgcagctcccaccgcacagttatttgcaaagtcccaggtgaactcgtggcgagagaaggaaaatgcgcgtcccgggcgcgggtaggtgcgtgtgggcagcggggaggcggccagaccctgacactcgccagctgtttgtcctccgcgtagcccggccccggccgcacacgcccgccccctccctgagacccccagcccgccgcccggccttttgtccccaacccctcggccgacttccttccccgcggccgcacccccgcccccaggccggaggcgcagcccagcccctttcccggtcccctggcgcccccaccccaccccagcccagccccaagcccagcccccctcccccagcccggcccccaccctttccccctccagcggttactgctaccccggtgcattgtgggcgcacggtccgttgttcatttgccattcgacctccgccagggcctggtcggacggaaacgctccgccggctttattgtcgcttcgttatgtggcggagccgagcagtttagcgtgcctctcaccctcagcgcctgcgaagccggcggcggcgtcgggactcctcggcgcgcggaggaaggatatctgtgtggaggatcggtgtgtgcgcgcgcggctttaaagagggggcagcggagggtctccccgcactccgctgctcaacttcgaaggcctcgctcgctgcaggctcgctcctcacctctccgccgcccgcccccttctccgcgcgggacgctgcccggagcgcggcggggcgggggtggaggacgagagagcggtcggaggcgtcggcccggcagcggcagcggcagcggacgcgtgcagcagacccgggagcgagcgcgagccgggctgccgggcgagagggcgaggccgagccccgcgagaccggaacgccgggggcgggggcgagacagagggggagccgcggggagcgcgcgggacgcggcccgaggccgtgcgcgagccggggcaccgggcggcggcggcggcggcgcgcgccatgtcgttcagtgaaatgaaccgcaggacgctggcgttccgaggaggcgggttggtcaccgctagcggcggcggctccacgaacaataacgctggcggggaggcctcagcttggcctccgcagccccagccgagacagcccccgccgccagcgccgcccgcgcttcagccgcctaatgggcggggggccgacgaggaagtggaattggagggcctggagccccaagacctggaggcctccgccgggccggccgccggcgccgccgaggaagccaaggagttgctgctcccccaagacgcgggcggccccacctcgcttggcggtggcgcggggggccccctgctagcggaaaggaaccgtcggactctggccttccgaggcggcggcggcgggggtctcggcaacaatggcagtagccgcggccgccccgagacctcggtgtggcccttgaggcatttcaatgggcgagggccggcgactgtggatctggagctggacgcgctggaggggaaggagttgatgcaggacggcgcgtccctgagcgacagcaccgaggacgaggaggagggggcgagcctgggcgacggcagcggggcggaaggcggcagctgcagcagcagcaggcggtcgggcggcgatggcggggacgaagtggagggcagcggtgtgggagctggcgaaggagagactgtccagcacttcccgctcgcgcggcccaagtctctaatgcagaagctccaatgctccttccagacctcctggctcaaggactttccctggctgcgctattccaaggatactggtcttatgtcttgcggctggtgccaaaagacccctgcagatgggggaagcgtggaccttcccccagtggggcatgatgagctttcgcgagggacccgcaactacaagaaaaccctcctcctgaggcaccacgtctctaccgagcacaaactccacgaagccaacgcccaggtacagtatatcctgctcctacttttttgagatcttttagggaaaggtttatcagcactcccttcacccccacccaccccc

SEQ ID NO: 39458 - DNA, 388 bp, Homo sapiens; identical to SEQ ID NO: 35169
  chr8:8560686-8561074
  hypo

SEQ ID NO: 39459 - DNA, 202 bp, Homo sapiens; identical to SEQ ID NO: 32292
  chr8:8639884-8640086
  binary

SEQ ID NO: 39460 - DNA, 1072 bp, Homo sapiens; identical to SEQ ID NO: 25956
  chr8:91996920-91997992
  binary

SEQ ID NO: 39461 - DNA, 846 bp, Homo sapiens
  chr8:97156910-97157756
  hyper
cggggtggagccggggtccatggagttcatcagcgtctggatgatggcgtggttggtgggctccaggtgcgagcgcagcgggaagtcgcatacaccctcgcagtgataggcctcgtactccaggggcgcgataatccagtcgtcccagcccagctccttgaagttcacgtgcaggggcttcttgctgcagcgtagcctggacttcttgccgtgccgcttgccatggcgactggcgaaggccgtgcgccgccgccggcggccgggcgagggcagccaaggcctggcatccggggcgcccgacggcggcggccacgacccctcggcgcccgcgcccgggcccgcagcctcggccgagcccagctgctcgcgcatctctgcgaacaggttcttgcgctgggatctggtgaataccaccagcagggcccgctcctggggaggccgcaccctccggccgaagcccagactccgcaggtccgggggcggcggttgctggggtccccgcgcgcgcgcctcggcctccccggcgtccagctcgccccatgcggcccgcagctccaagcacagctgcttccagggctggtggcgcaggccctgccacacgtcgaagacttcccagccggccggcggcgccccctgcgggtccagggtccgcgcgtccagcagtaggggcgaaaggcaagggaagagctgcacgtggagcggcccggctggtggcccccagggcgctgagggcgcctggcgaaagagccgcagctccgcgcccaccagctcttctttgtctgagagcatggacacatcaaacaaatacttctgtctccggagaggagtgtgcgagagatcgtctgc

SEQ ID NO: 39462 - DNA, 990 bp, Homo sapiens; identical to SEQ ID NO: 28246
  chr8:97172008-97172998
  binary

SEQ ID NO: 39463 - DNA, 2216 bp, Homo sapiens; identical to SEQ ID NO: 28247
  chr8:97505592-97507808
  hyper

SEQ ID NO: 39464 - DNA, 1914 bp, Homo sapiens; identical to SEQ ID NO: 27314
  chr8:9763158-9765072
  binary

SEQ ID NO: 39465 - DNA, 1384 bp, Homo sapiens; identical to SEQ ID NO: 25959
  chr8:99951812-99953196
  hyper

SEQ ID NO: 39466 - DNA, 728 bp, Homo sapiens
  chr9:100000383-100001111
  hyper
cgcccttaaccgctaagctcctgaggggtaacggtatgctacaaaagtgcttctgagctactactcctggaggcttggtccgagtgaccgcagcagtgggcgcggtggaagagaaggagaacgtgttggcccgggcctccataaccatggctgctaggggcggggactgggagcgcgggtcccgggactgggagcgcgggtcccaggccagggtgcgggctgggaagactcggtcctccactgccccagcaggccacgcgcccgcgcgtagcctcccgccccgctagcagcacgctgcgtggctgctcgttggctacttacgacggaagctcggttggggtttctgcagaagtttcccccttgggcggtggcggagctgataagcgcgctagtagcagctctggcagaagcaacggtggcttcgagggatggcggcggctgcaacaggacctgcagcatcccagaggtgcgtgtttttccttccctttgctatttattttatcccctttccttggctagtgggtcctgctgaagtcgttgttttcctgagaggttttttccagagcttctcagatgctctaatccactgcggcgttagaggtgagagagccttttctgcttcctccacccctggctgacgcgcctcctcccagcagcacctgattgggacccagggtcctgtggttactgcgtgtccgccccagtattgagattctcagtctcctcgc

SEQ ID NO: 39467 - DNA, 2472 bp, Homo sapiens
  chr9:100615135-100617607
  binary
cgccctctcggccaattctcaccctctcaggacaaaaaagtgagatgagcccgtcctttcacctgcgagtccaagcccttggcagaggcctgaaaagtccgaaaactccgagttcgggcgctgaggtctcccgagccggttcctgaactctccgggcctcagtcgatcggggtgcggagggggccgacccgggggatctccaagcgccctccccgccctgacgctgtggggctcctaccgcgccgccacagctgctcctacctggggaggtgcgcccgggccccggggggcgggcagtcggggggcgggcagggaaccggtgccgccccacgcttcgtggcccctttaaggaggggaagccggcggagggaggagccggtccggtgtgtgcaggggagcgcctcgccagcggtccgcagggctggagacccacgccgtggagaggaccagcctcaggtcgccccgcctgggcccgcgccccgacctcgctgcccccgcctcgcctctctgcccgtggcgcttacggccaccttggcctcgggggcagggcatgggcggcccccgccagatcgcccagcgccagtactaactgccctcgctctggccttcgagcccgaagcctcttctgcgcgcacaacctaggcagtaatcctaaactagcgggcaccacagaccagctgcagccaccccaacccagggatcacttccggacccctcgaccgcccggcaccagcgcgcaagggacccttcagccggagaccagagtccagtcccggtcacgaggccaccgccgctgcccgcctcgagaagcaccacgcgggctgagccgtcggctagcgggtcactcccgagcctctgtctgcaccgcgccagccccagaccacggacgctgagcctccagcgcgtgccagcctgggccgctgggctctcggggccagcccgcgacgatcccctgagctctccgcagaagggccgagcgtccgttccggggacgccaggcccgcccccgccccccgacagccgcggggatccagagcccgggggtgcgggacgcccgcgccatgactgccgagagcgggccgccgccgccgcagccggaggtgctggctaccgtgaaggaagagcgcggcgagacggcagcaggggccggggtcccaggggaggccacgggccgcggggcgggcgggcggcgccgcaagcgccccctgcagcgcgggaagccgccctacagctacatcgcgctcatcgccatggccatcgcgcacgcgcccgagcgccgcctcacgctgggcggcatctacaagttcatcaccgagcgcttccccttctaccgcgacaaccccaaaaagtggcagaacagcatccgccacaacctcacactcaacgactgcttcctcaagatcccgcgcgaggccggccgcccgggtaagggcaactactgggcgcttgaccccaacgcggaggacatgttcgagagcggcagcttcctgcgccgccgcaagcgcttcaagcgctcggacctctccacctacccggcttacatgcacgacgcggcggctgccgcagccgccgccgccgccgccgccgccgccgccgccatcttcccaggcgcggtgcccgccgcgcgccccccctacccgggcgccgtctatgcaggctacgcgccgccgtcgctggccgcgccgcctccagtctactaccccgcggcgtcgcccggcccttgccgcgtcttcggcctggttcctgagcggccgctcagcccagagctggggcccgcaccgtcggggcccggcggctcttgcgcctttgcctccgccggcgcccccgctaccaccaccggctaccagcccgcaggctgcaccggggcccggccggccaacccctccgcctatgcggctgcctacgcgggccccgacggcgcgtacccgcagggcgccggcagtgcgatctttgccgctgctggccgcctggcgggacccgcttcgcccccagcgggcggcagcagtggcggcgtggagaccacggtggacttctacgggcgcacgtcgcccggccagttcggagcgctgggagcctgctacaaccctggcgggcagctcggaggggccagtgcaggcgcctaccatgctcgccatgctgccgcttatcccggtgggatagatcggttcgtgtccgccatgtgagccagcgtagggacgaaaactcatagacacatcggctgttcacacgttccccgcaatctgagaacgaacaggaatggagagaggactcaactgggacccacgtggaaaagaccgagcaggccacagaggctcggtctccccgcgcacagcgtaggcacccggtgtactctgtaaacgggaggaggtggggcgaggcagccagagcccttggactggcacagggaccctcgatggagcgaagccctcaaacgggatgctttctggtattctatcggggagggtccttggc

SEQ ID NO: 39468 - DNA, 985 bp, Homo sapiens
  chr9:101470603-101471588
  hyper
cggggatctgaccaaaggccggaggttgcctgtgtccaaaccacccaccccaatgccccccgaagccccgacggcaggggcagccggacactcacctccgtgtcatagagccgcaggtcgaggaagtaggggcgcaggagtgactcgttgcggatctgctcgatggccagttccacggcggggagcacaccgcgcccgatgctgcccttggccacctccttggtgagcggcatgaggcccatgatggagagcggcgggctgctgggcggcggccggggggcgccccgcgcccagccccaggccccgggcgccagaggcagcagcagcggcagcagcagtagcagtagcaggcgcgcgggcggcggtggcggcggcggcggcggcccgggctgcccggagctccgcggggaagccatgccgcgccgcgggctgcgggcgccggctcactcggcccgcatggcctggcccggcccgccgccccgcgccaaggtcttcccgcggcgcccgcgcaatggcgccggcccgggccccggctccgtctcgggctagggttccggctcggctcagaacggccgcggcggcggcggcggcagcggcggcgcccgtgacggatcaatcacgccgggaaggggtgggagcgagcggagtgcgggaggcggggagcaagcgagcaaacgcggagaggggggccggcgtctccgcgcgcgcctctctccagcgcggccgccccgcaccgggccgcctccgcccgcccccgtgcgcgctctgaaccgctctcccgccgggagctgctaggcggcagcccctggagctcggccgggggagggcggacggcaggaaacgcgggaggcgaaggcgaggctgctcaggggcggctcgggccgcctccagggacggggacgagccgtgcgcgccgggggagggggaggcgctggcgctgcggcggccgcggggagggccaccttcccagcacacgcacacacgc

SEQ ID NO: 39469 - DNA, 776 bp, Homo sapiens; identical to SEQ ID NO: 29491
  chr9:1051528-1052304
  hyper

SEQ ID NO: 39470 - DNA, 715 bp, Homo sapiens
  chr9:108418403-108419118
  binary
cggaagccagggcgcggagagtggggaggaaacggtgggagtccccgtcgggaaggggcccccgggccccgcgagacaaagggcggtgtcctataaaggcggcggcggcggcggcgcggtgtccaggcgagggcgcacacggccggcgagggcgacggctacggcgacgacgcgggctctttgcgaggaggtgcgtggactccggggggacatgggcgcaaccagggccgggctcgtgggcctgcgggtctctcgctgagccatactcacccgggagagcaggaatgcggcggagacttggtagcggccaccgagccaattcggtgggaagaccgggggactttccgcggggcaggggcggtggctcagctccgggggtgctaggccgactctctagcgtgttggcgggcccgcgtcgcttttatgcgtgatgccggggacccccttgtaccgctctcggcggcgcatctcccagagcccttcaaggagctcgcgcgtccccgagcgactcccggacacctggcagattcgaaacttcagccactagatgctttcctggactccctaaatacttaatcattaggcaaggcaatggtttgcaagggggagcaaaagttataaaaagaaaaagggaaaggcctggaagcgaagcgggcaagggaagaagcttgggcagagtattcgagatgcgtccaggctgcacggtgcaggggtc

SEQ ID NO: 39471 - DNA, 1033 bp, Homo sapiens
  chr9:112402440-112403473
  hyper
cgggaacacgcagaatttggagtgaaacggaaaggggcatggggtcgccaaggtggtgaaacgccgcattaaggcgcttcaagatagctggagttttgcttgggaaactcagagggatctcgcccggccggcacaatggcgtttctgaacccatgcccagcccactgggggcagtccttgctgcttgcagaggccagacgcttcttgcaacttctaagcggcgagagctgccaccttgccaatgactcaaccgtttgcctatgccctctgggctgtgccaccagccgcagccgccctgctcccccacccacccttctccccaggctccgcgccgcgccgccagtcccaggggagccgccggcgcacctggcgcctagggcgcacggcactgcgcgctggtgggcacctcacccgacgccagctgccagcgcgctccctccccgaaaccctgaagtggggtgtcttgtctagcgcccagcgaacaacattatccaattgcttcccgttttattcgcaggctgggagctgagagagcctgagcattcactttcaaccctccaggggaggagggggtgcgggtggggaggggagacggctcccagctccacctcgcgcgcggcgcggccagtgcactcggctccgggagaggcgagcagcgccggtgagccccgcagcagcgcacccggccgcggagccccgcgatggagtgagtatccccgagccgcgccgccagctgctctcctctcggcatgttgccatggtgaccgcggcggcaggcagatcccgctcgggtccgcgtccaggatgggtgtttaatttcagccccgtgtgtacgcctggtgtttctatagcagccgccgcggcggcaggaggcaaggggtgggagccccgggtggcgtggtttttgcggctgccccttggctagcagggcctggggggcgagtgaggggagtagatgatgttgctaaggacggaggcatattctaggctttcctatctctgccccaagcttccgcttatcggggagttggcc

SEQ ID NO: 39472 - DNA, 1474 bp, Homo sapiens
  chr9:126773180-126774654
  hyper
cgaaccctggcctttctgagttcctaaagccatgctcgcccccactcttccaggctggggagagaccgggaagagcgagaagctacacgctgggctgcagattgggccctagcgggcttggagcgtggatatgctggctggcccccctccccgggagtcacagctctcgccggtctcgccactcaggctctgccgggtacccaggaggcttgcacggccgcctgcagcccgctgtgcagagcccgggccgaaggcggagctcgatgggaaacggccggccgaaggctcttgcaactctgccacaggcctgccttcccgggcctcccaggcgggtgcctgaggccgcggctccaggccgaggggagaccgcagtgagacgagcatccccttgctgcgccttcttaggatagagggtttaattttcctttctgaagatatcgcaggaagctgttcgtatcttaaaaactccaaaccccgcgctctccctcctccctgcctcccccccacccccgccctccagcctcgcccaccagctcccaccatctcgactctcctctgctcctcttgcctctcccctccctcttgggtctcccgccttcccggagcacgcgctgccagggcctggggcgccgagcggccaatggcacggcggcaggacgtgatgtcaggcgcggctgtagaaaaggcgcggaggcttgcgctggcgcggactgcagagccggggctgggctaggcgcgcgcttggagagcattgcgcgcggctgggcccgcggccggcggctcctcctcccactctgctcctcctcttttttctcctcctccacctcctcctccgcctcctcctcctcctcttcctcctcctcttcaattctcccggtggctcgactcggctcgcaggcttcggagaaacccctactccagtcgccgactcagcgcccaagagggtcgccttgggctgggggcgcaccccagggaggggaggggtccaggcagctgggccgccgcggacacctagcggcttcagggtgaaccccgaccgcagccgtcgccgcctcgggcagagtttgcgcccttgctttgcgccccgggcgctgaagccgggcgggcgatgcccgcggcgtgaaagcgcccgcggcgggcgccgacctctgtcctagtctcctgctccccccgccccgcttgtcccgtgcccttgtgaccctggctttggcgccgtcgcccaggcgccccgcaatgtagctgcccctgcgcctcggcgggaggcgtcctgccccgcgagcgcccggggcccggagcccggcctgggggctcagccgagctcgggcggggccggggccgcggtggcgatgcaccgggcccgttagcgccaggagcgccaggcagctgaggcggggggcaagccctccctcggaggagccgcgcccccggccccgccggtcccgccgcgatgctgttccacagtctgtcgggcccc

SEQ ID NO: 39473 - DNA, 814 bp, Homo sapiens; identical to SEQ ID NO: 28262
  chr9:132382203-132383017
  binary

SEQ ID NO: 39474 - DNA, 1655 bp, Homo sapiens
  chr9:132804293-132805948
  binary
cgggccgccgcactgcccatcccctgcccagtgatttccccaggaatccggggacggcaggaaaagagctccatccacagccagcccctcgcctttccggggacggccctcagccctgagggctgcccgtttaccgtgcgcatcccccggccaagcatccccgcaaggcgcccctcaccgccaactttccccactggaaactattctccgagcaaccgttaaagatcattgaccccgcgaacgcctcttcctgaggtagatcacgtaagatctctccctaactcccactttcccctccagaccagacgtcgcagtgcccacatcccactcaggattgagctaccccgaaagaacaagtgcgcccggagccgccacgggccagaagtcctcgcctccagagcgaagaccgcactctcgccccagcaccccaaaacccgacccccggcgctcgccccggccgccccgctcccggggaagtgcccgatccgccagcgcctccgcggagccaggacagaactcgcggccggggcgccccgagacccaacgcagcgccgcgcagccggggcctccacgcccccacgcccggtcccggccctccccgggcatccgcggctcgccccgggggattagggctcggcccgacacacacggcccgctccggggcgccggggacagggaggcccgcccgcgccgttcctcaggccgccggggacccgcaccaactcccctcgcctccgaaggacaagccggcccgcacctcctgctcgggccaaggcggacgaggggcattggaaccccgcctcctccccaggccgcgaggaccccgaccagcgcgccctcgcctccgcccagcagcgcggcccgcgccccctccccaggccgcggggaaacgcagcgcgcgccccgcatctgcccgcgggcccagcccctcactcacccagagctcggtgccccagctcatggtgcaggggacgcgaaggggcgctccgcgcggcgggcgcggctctctggtccccctccccggcgatccctttgccccccgagatccccgcgacggcggaaagcccggagtccgcgcggcctcctccggctcgcagctcctcgcccggggtctcctcggcggctcctcctccccgccgctccacagcaaaatggcccgaggaagcagcagccgcggccgccgcagcgcccgcccgccctacacccggagagcgggggaggggcgggaggggaggggcggggccggtctgacagctcgcgcacgcgcgcccgccccaccccggcccggccccctcccccgggctcccccggccgggtccgcgtcgccctggggtccggaaggacgcggagggaggtgtgagggacggcgggacccggatccctaggactccccctgccaatctggtaatgacttcttagtgaccactgtctgctcgcagtactagcgcttgccttggaacgcggcaggccctgggatcaccgatgctccgccgcggtctgagatcgctcccctgcgcgtatcgccgctctggatttaaggacaatactttcccctggcagccatgcgcgccgagcagagtcagcccgggaggctcttttcccaccgcccgagggaagcccgagagtcccgcaggctggcgcggtgggagtggggc

SEQ ID NO: 39475 - DNA, 900 bp, Homo sapiens
  chr9:133814846-133815746
  binary
cgccggaccccgacgcgtgagcctggccggtgggcgtcccagtccgcgtccgcagacccgtgccctcgcgcccgcggtcggaaagcccacacgacgcccccttgcccgggcggcccgtgggcgaaatgggggtccccaccactgccacagccgccggcgctgtggtcgcgagtaccagccgctccgcgctcggccgcgctcccggccgatcgcccgcgctccccggcgcgccccgcgtggtcccagcccccgccttctcctccgccgggaggggatttgtgccaggagggggcttcttagttgccccttcccaccagcagcacttttaaaagcatttaatccgcccggagcggccttcggaggtaattgacaaagtccttaatctgcgcggcgaacgagctgctattgtggcttctgaccgggaggcgcccacactgcccgacgccgcgctcccctcccgccgccccgccgagcccgccggccgcccctcctccgcccctttctgcgtccccatctttttctgctcccccagctccagacagacccccgttccccgcccccgcttctccccaaagctgttttccggctcccggggcgccttggccgccgcgctgttccctggcaccgtctccgtctctcccccactggctgccagtctgtcgccccatcttcgtccctctcccgatccctctacgcgtccggcactggcggggcagactggttgggggtgggggccgcgtccagcctgggctggggcactccctggaccccggagcgggggaccctgtggcccggtgccatccgaggagactgccacccgccaggcgctgggttcacaaaccaccggctgtttgtccccagccgccttttccttccaggacaaccgctggcctcacctac

SEQ ID NO: 39476 - DNA, 724 bp, Homo sapiens; identical to SEQ ID NO: 30683
  chr9:134151944-134152668
  binary

SEQ ID NO: 39477 - DNA, 397 bp, Homo sapiens; identical to SEQ ID NO: 28272
  chr9:139506149-139506546
  hypo

SEQ ID NO: 39478 - DNA, 252 bp, Homo sapiens; identical to SEQ ID NO: 7615
  chr9:139611146-139611398
  hypo

SEQ ID NO: 39479 - DNA, 958 bp, Homo sapiens
  chr9:214559-215517
  binary
cgacttgcctacattccctggcagcctcgcagcttcgggcagatggagcttccggcctgcgcgcagtggtcgcctgtcgtccgcccgcgctcccttcggccggaggtcggcggccccgggcagagcgcgccgtctgccccagtatcgggaggccagttccgcgctgggcccacgccctcctcgcccgccgctgcctgcgcgccaggccgggtggcggagccggccgtcgctgctccgagctcggaccctcccccggggtgatttcggcttagaaggtggaaatgcggaagtttccagcgccgaccgacagacgaggtttgcgcttggctgggcatgttccgcggctactctgcggcgcgccaggcccccgctttccgcaccccgcgaccctagaagccaccgaaccgccggcgggccatggccactctgccgagcgcagagcgccgcgcgttcgcgctcaagatcaacaggtaagacgccccccgcggcgcgcaggttgcggccggacagcccagcgctggtgtgaagcggagcttcgctgcaggggccgaggccggacgagtccattcgcgtccgcggcggggcgcgcctgagacctggggcgcccggttcccgaggctgcggcggtggagccgctggacgcgcggcggctcctgcgctgggcccggcgaggtcctccccaagaatctcggtgctcctggatgtcctcagccgccggggatcccttccccgaacaacctcgcccgctccgccctccaggttcttacaggtggccgggtcccagaagggtgataggcgcctgggtaaccgtgttgggcgcgccacggagtgtctcataaacggctccttcctttgaggcaagtctgagcgcggggggaagaagtgaagtggctgaaattagagttgcgtttgaggcaggctgcaagccttctgtcgtcctgagcaaggctccgtcctc

SEQ ID NO: 39480 - DNA, 857 bp, Homo sapiens; identical to SEQ ID NO: 23401
  chr9:36036762-36037619
  hyper

SEQ ID NO: 39481 - DNA, 1853 bp, Homo sapiens
  chr9:37026222-37028075
  binary
cggagccctctacgggtccaagccagggttctccgaaagagctgaaatgtcgccgccggagccttgaaaggctgcagctcgctgcccaagctacgcgttgccggaggcgggattcccaggtgcctcagcccgggcggccaagtgcgttgtttcaggtcccctgcctgggatccctgcactttgcaaagttagctgcgcggctgcagaggtccgagatccttccggccttagtacctgacccacggtccggcacccccaacccggtcccggcgggagagtgagagaagcgagctcgccgcctacttactatgcatggatgcaaacgggtcgtgcttacagtgtatttccatcggggcgctccagactgcaggccggcccacgccgccgcctcccggcgccaaggggctgcccagggcggatagggagcctcgccaccaggccaggcactgtgcgagctgggctcagaaaacactgctggagcttcggggtctctctcagagcctccctgctggagaccgcccggagctgcgcggagaggcgggaaatggtgctagcgcacccgggctaggagcgggtgcccaactccggctggcttccctccctggctggctcaagcagcagctccgggcccagcccggggtagctgcggccaaggcgcccgcggcttcgggggcatagcgtaggggcccgcctccgggacagccagcagcccccggccccaggaaggagcagctttgaggaggccgccggaacaatcggcccttgacttcactcagggggcggagagacccgggggctgccaggctggttccgcggcctcgatgcttctgaggtccctcctcgacccctcggtctccgccagatcctttctttctctgcttctccgagtctctggggctcggacttgccccctccgcctctctccaactggctctccgacgtctcggacgaagttgcaaagaacttcctctccggcagcgcggggtcctggcgggtttggagatgcttccgcccctgacgctggggccgcgactccggagtccccgggagcgtgcagccctccaacactgagacccgctgccttcaaagttcccgcggcccccgctgctcgcccatcgctgggaccaggaacggggacaccagcgacggactcttcctcgccggggtgtctacctcgtgccaaccaactcttcgagccccgccgccctccctcgtgggtctgattccactgtctttccgctgcctcttccgggacggccgccgtgcctgccccaggcgtggagtgaggaacagaggagagagcagagggtcccagccaccaaggccgccggggctgccggggctgagatggagccgcagtcggctctgactgcctgcgttgccgccgccgccgccgtcgctagccctccgcctgctcggcgcgcacagtgcgccaccgcgccgccccggagccgctttcaggacccgctgcgtgtggacagcgccgcccggggctcagctccctccgggcgggggcggggcgggggctaacctgccaatcacgctccaccaagccaatcagagtggcgtcagccggccctggcccgaaacaccgccccattggctaagcagcccacaggctccgcctgattagcggacacctgggcaatgggagagaatggggggcggggcccaggcggcggcgccacgttcattgacaaacgcgctggactaaggcctagtggatcgcggctgtggggaggggaaaggggcccacgcagtgcctggagagtcccgctgcgggtcccacgcgggctggacctccccacagcgatgctgggatcctgggacgctctcaaggcttgagagcagtc

SEQ ID NO: 39482 - DNA, 798 bp, Homo sapiens; identical to SEQ ID NO: 25994
  chr9:37034135-37034933
  hyper

SEQ ID NO: 39483 - DNA, 1404 bp, Homo sapiens; identical to SEQ ID NO: 28283
  chr9:6644756-6646160
  hyper

SEQ ID NO: 39484 - DNA, 183 bp, Homo sapiens; identical to SEQ ID NO: 28284
  chr9:66494093-66494276
  binary

SEQ ID NO: 39485 - DNA, 583 bp, Homo sapiens
  chr9:74061513-74062096
  binary
cgcgtgcgaagggagaaaagaaagcaaagactggggctctcccccggccactcaccggcgtctgctgcgacgggagtcccgagcgtttggtggacccctgcttggaacttaaccttttccacgactcggcaaacctgccccggctggcgctccggctgcgtctgcggctctccgcgttgtcctcgcggtcggagcagccccgctccatttccgccgcatccctccacttcttccccatgagaagttcgcctccctcggccgggaaacagcccagcgccgagcgctctcgctggctcctcgccgcgggtctccctccagcctgcgcgcggctctcggttggcgctgcctttgcctccgccggctcctgccagagccccgcgctccgttaccgccgccgccaccaggctgcgcttgcgcccgcgattggctcaactgtgggctggggctgcgagcgccacctgcgcccgagccagctttcttttgcgtccccaaattgctctccacccggcagccgccgccttctctggagagtgcagggcccacgcctgaggctgttgatgcgccgcagggtagcgctcccagc

SEQ ID NO: 39486 - DNA, 716 bp, Homo sapiens; identical to SEQ ID NO: 27347
  chr9:77111662-77112378
  hyper

SEQ ID NO: 39487 - DNA, 870 bp, Homo sapiens
  chr9:77112712-77113582
  binary
cggcggcggcggcaaacgtcaccctgcagccacggcgtccgcctaaagggatggttttctcggcagagcagctcttcgccgaccaccttcttcactcgtgctgagcgggatttttgggctctccggggttcgggctgggagcagcttcatgactacgcggagcgggagagcggccacaccatgcgaggtaagcgagtctgcgggcaccgaggctccccgagtccggccaactccagccagacggggagatgggggaggggagggcacccagcagaaagggaaagaggttgcccaggcgcagttccccgaattcgctctcgcaggtggggctgcaaatggcctgggcgtagaaagttgcgggaaggtgttgatgtctttcgggagttctggagggacgcgggagggcgcttttttggagaggggagacaggctagttggttcttaccagtccttgagttgcactgaatcttttttgcttgtcgctctcgggtgcggaagcggacgcgggatggagaaagccgaaagagggatgcctctggacaggagcagtttggaagcgcccggcgcgcagtggtcgccggccgggtttgggcgcgcggggcgcaccggccgggggcagggtggacacgcgcgggcacacactcgccaggttacgaggcccactaagcgtcctggccagcaggcatgtcccttcgctggagtagcaagcagaagagcagtgctgcgaggctggacgcggctgaggaaacagttagttccccggcacgcggctgaggaaacagttctgcggcgcgcgccttcgtgccggcgctgcgccctggccaggtcctcgtgcccgagcccgcgcggcccagggagtagtgcgacccc

SEQ ID NO: 39488 - DNA, 512 bp, Homo sapiens; identical to SEQ ID NO: 23404
  chr9:79626891-79627403
  hyper

SEQ ID NO: 39489 - DNA, 877 bp, Homo sapiens; identical to SEQ ID NO: 28289
  chr9:841339-842216
  binary

SEQ ID NO: 39490 - DNA, 1338 bp, Homo sapiens
  chr9:8857354-8858692
  hyper
cgcacaaatacacatacccggacacccccattctctagagtcgcctctctcccgggtctgaggtttcaggcgagaagtgaacccagcaggagaggacctctgcccgaggaggtccagaggagcaaactgtgcgctccggtgcccgggcgccgggctcgcggaaacgcgagcgtgtcgctctggctcgggaggcgccggcagccggagccgggcgcagggcgattccggagcagcaagaggggaagacaccgcggggcggacggggtcagttccagggactcacctggtcatgttggccccgggcagccgccgccaccgcctcccgcgccgccgccaacactttcctccagcgccttcgcgccccgccacggccgcgccgccgcctccgggcggccaatttaatcccgcggagcagcggccgccgccgccgaagcccccctggtcgccgccgccgcccagccctcgtgcggccagcccagtccagagcgaggaagtggaagagagtcagcgagtgagtccaaaaacccgaaatccagcatccaaggcagcgcgtccccccgccctccctccacccctacccccttttcctcctcctccgcctcctcctcctcttcccgggccgtcctcttggcccttctgagcccgcggcttccgcggcggtttctcctcctcccgctcctcctgctcgccctgcgcccgcttctctcgctgccgccgccgccgctgtttgtctcctccccctcctcctcctcctcctcttcctcctcctcccgctcctcgatgctccgccgctcgcggctggggggtccggggccgcgtctcctctcctccctccgcctctcctctttcctccttcctgctgcctcttcttttaaagcggattctttggccacaaatagcaactcggctgcccccctcggtgcctccctccccttctcttcttccccccaaaagtgaagcgcacgcgaggtaaccagaaactgaggctcgtggggggagaggggtgcgaggcgacgcctgggaaagggcccgagcagagtcgagggccgggaggtggggtggccggtgcagcccagtctttggacctggcttgaacctggtagttacggctgcagaagaggtggtttggggaggggggaaaattaaacgaaaaagcccaggaaagtcattggaaaggcttctctctttgtttccttgtgtgggtgatttctaaaatcctcgtaacgtgctggggatcccacggaattgctgtgctccagcgctgggggattgtgtgtgcgcgttgcctgcgcgtgagtgtgagtgtgggtgcgcccggacgcggggagagctgggccc

SEQ ID NO: 39491 - DNA, 380 bp, Homo sapiens; identical to SEQ ID NO: 27356
  chr9:99983768-99984148
  binary

SEQ ID NO: 39492 - DNA, 949 bp, Homo sapiens; identical to SEQ ID NO: 17175
  chrY:16636193-16637142
  binary

SEQ ID NO: 39493 - DNA, 993 bp, Homo sapiens; identical to SEQ ID NO: 22981
  chr1:103573419-103574412
  hyper

SEQ ID NO: 39494 - DNA, 367 bp, Homo sapiens; identical to SEQ ID NO: 21566
  chr1:10495109-10495476
  hypo

SEQ ID NO: 39495 - DNA, 741 bp, Homo sapiens; identical to SEQ ID NO: 29556
  chr1:109203593-109204334
  binary

SEQ ID NO: 39496 - DNA, 139 bp, Homo sapiens; identical to SEQ ID NO: 33162
  chr1:110726624-110726763
  hypo

SEQ ID NO: 39497 - DNA, 906 bp, Homo sapiens; identical to SEQ ID NO: 29559
  chr1:110753530-110754436
  binary

SEQ ID NO: 39498 - DNA, 1344 bp, Homo sapiens; identical to SEQ ID NO: 22737
  chr1:111216710-111218054
  binary

SEQ ID NO: 39499 - DNA, 1060 bp, Homo sapiens; identical to SEQ ID NO: 22982
  chr1:111505946-111507006
  hyper

SEQ ID NO: 39500 - DNA, 118 bp, Homo sapiens; identical to SEQ ID NO: 13098
  chr1:116219361-116219479
  hypo

SEQ ID NO: 39501 - DNA, 1356 bp, Homo sapiens
  chr1:119548592-119549948
  hyper
cggcgactttgaatccaggccaagaaaagagaggtacaccaatattgggattctgtattttgggggtctaattggtgagtacagaacaaaggagtggagaggaaggcaaaataacctaagtaatagaaaatccagccatagactgcagtggaaattaatggcacgagaagccttgggggcaaaggtaaggggtcgcagttgaatgccacccgaactcatccagatgccgctgcgttcaagctctcccagcacccgcggccgaagtaaataacaattctcttaatgctaaggcagcaaggagagggcactgcgaactgcagacttttcttctaaggatgaagaggacattataaaactgcacactacctccctaatggcccattcgtcctagctctgtctagtgaagtagagagcagaaaaaaacatctagctctatcaagttgaaaacattttcacattcaccttaaactggtgaagcaaacgggttttccctttactaacatcgctcttgtttttccatttagtctttgggaacgtagcctcaatcttaaccgcgtatgatcgtttccactgcacctgtgcgggagagacaggcgcatatccccgtggcgtcggatctctaaattatctaatctggcggctgcgtacgactcagggaaagccctggccgcgagctttttcaccaggcttgagctcagcagccgggcccgcagtgttgccgccagtggggaggcagggaggctgtcggcgcgccggagccaggcgggaaagggactacagccgcccgccgttgtagcgcaggaagcgggcggtgccaacacacacctcgcagctctgcacgttcttcgtgtcttggaggagagtagagcctccgtgtgaagctccgtccgcacctgacgaagaggagggcgtcttgcgccactccagcgactctgcgatgttaagacgcagacccgctgctgcgcctgcctttgtcggggcgggcgggcagccgccgctcggagcaaggtggggctgcggggagggagagccgcggggcagatccctggccaaggtcctctagaaagcccgctctgcgcccaaacgcgccgctcggtccgtgggccacttcggacctgacgctgccggtgaattcacgcgctccgggacgcgcggggacctttgacgaggtttttgaactggggatcgtcccctgtaacctggccgcgttacctccccaggtgagccggactcgcgggtgggttcggcagccggcgatgtggcaaaaaggcaacctcgccttatttctaggggcttggagatgaagagcggctgagtgtccccgtctaccccaacccgggtattaccctcttttcc

SEQ ID NO: 39502 - DNA, 858 bp, Homo sapiens
  chr1:119550461-119551319
  hyper
cgaagccccgacgcccagagggcgcttgggcccagcacacccgcgcacagcccaggaaacgggaaaggccactgtctgcttccctttcgcagattctatccgctggcacgcgaaggtcacacgggctctcaatgctaatttggaatgggaagcaccacgaagggttgaggtagcctggtggccctgactgcgcagggtgcggacagtgagcccgtatccagcttcgctgccacgcgcctagcagcccggcggccccggcccggcccaaggaggaggcaggccgcctgggtcggcttccgtggcctgggggtaagctctgattcaccccaaggtgaggtccccggggatgcccagattcgggccgggaaacgcaccgggagagaaccaccaagcgctcttggttatgaaccagagcttataactgtggccgcagctagacctaggggaggcctgagcgccgaagcctccgtttcctcgaccggaattcgtgagctattaaacatgggccctagcggggcccacgccctgtcttcctttgctgacaaggctccgcggggtagtgggcgggagacaagggtctcagaacagaggggctggcccggcgcggcgggccaggaactcccgggcgtgtgtgtgcagtggtgcggggtgggggtggaggtgaggtctcctttagttcctgggatctgggaatcccggcttctcgatctcatccggcgcggagatcttaagggtcggtggaccagttagtgtgtacggcctcacccctccgcctccagctttcgaggctctccgcttcagagctccaaaggaaaacttctgcgacttcaagaacgtcctgcgcattcacatggggtc

SEQ ID NO: 39503 - DNA, 1035 bp, Homo sapiens; identical to SEQ ID NO: 24751
  chr1:12226892-12227927
  binary

SEQ ID NO: 39504 - DNA, 717 bp, Homo sapiens; identical to SEQ ID NO: 30726
  chr1:12251334-12252051
  hypo

SEQ ID NO: 39505 - DNA, 174 bp, Homo sapiens; identical to SEQ ID NO: 33167
  chr1:12460147-12460321
  hypo

SEQ ID NO: 39506 - DNA, 121 bp, Homo sapiens; identical to SEQ ID NO: 21577
  chr1:14114676-14114797
  hypo

SEQ ID NO: 39507 - DNA, 184 bp, Homo sapiens; identical to SEQ ID NO: 23675
  chr1:14125492-14125676
  hypo

SEQ ID NO: 39508 - DNA, 84 bp, Homo sapiens; identical to SEQ ID NO: 7651
  chr1:150586185-150586269
  hyper

SEQ ID NO: 39509 - DNA, 446 bp, Homo sapiens
  chr1:152487804-152488250
  hyper
cggctcgcctttgaaaggctgcctttcttccaggtttgtcgtgaggagctccgcgatgtcctctcaacagagcgccgtttccgccaaaggcttttccaaggggtcgtcccagggccccgctccgtgtcccgccccggcgcccaccccggcgcccgcctcctcctcctcctgctgcggctccggcaggggctgctgcggcgactcaggctgctgcggctccagctccaccagttgctgctgcttcccaaggagacgccgccgacagcggagtagtggttgctgctgctgcgggggcggcagccagaggtcccagcgctccaacaaccggagctcaggatgctgctccggctgctgagaggcccgcaacccccagcgctgcgctagagaaacccgcccagcccagagcgggcccgccccgctgcggctcccacgcggggctgggcctc

SEQ ID NO: 39510 - DNA, 1256 bp, Homo sapiens; identical to SEQ ID NO: 24767
  chr1:156390054-156391310
  binary

SEQ ID NO: 39511 - DNA, 287 bp, Homo sapiens; identical to SEQ ID NO: 15335
  chr1:160953524-160953811
  hypo

SEQ ID NO: 39512 - DNA, 367 bp, Homo sapiens; identical to SEQ ID NO: 21583
  chr1:161195526-161195893
  hyper

SEQ ID NO: 39513 - DNA, 187 bp, Homo sapiens; identical to SEQ ID NO: 21584
  chr1:161196150-161196337
  hyper

SEQ ID NO: 39514 - DNA, 746 bp, Homo sapiens; identical to SEQ ID NO: 24775
  chr1:161275470-161276216
  hyper

SEQ ID NO: 39515 - DNA, 334 bp, Homo sapiens; identical to SEQ ID NO: 23682
  chr1:161367769-161368103
  hypo

SEQ ID NO: 39516 - DNA, 805 bp, Homo sapiens; identical to SEQ ID NO: 21586
  chr1:165737832-165738637
  hyper

SEQ ID NO: 39517 - DNA, 1264 bp, Homo sapiens; identical to SEQ ID NO: 22739
  chr1:166134181-166135445
  binary

SEQ ID NO: 39518 - DNA, 608 bp, Homo sapiens; identical to SEQ ID NO: 24778
  chr1:169396301-169396909
  hyper

SEQ ID NO: 39519 - DNA, 181 bp, Homo sapiens; identical to SEQ ID NO: 15336
  chr1:171570080-171570261
  hypo

SEQ ID NO: 39520 - DNA, 772 bp, Homo sapiens; identical to SEQ ID NO: 22740
  chr1:171810215-171810987
  binary

SEQ ID NO: 39521 - DNA, 426 bp, Homo sapiens; identical to SEQ ID NO: 21588
  chr1:172357766-172358192
  hypo

SEQ ID NO: 39522 - DNA, 384 bp, Homo sapiens; identical to SEQ ID NO: 23691
  chr1:175375048-175375432
  hypo

SEQ ID NO: 39523 - DNA, 399 bp, Homo sapiens; identical to SEQ ID NO: 33180
  chr1:180235527-180235926
  hypo

SEQ ID NO: 39524 - DNA, 192 bp, Homo sapiens; identical to SEQ ID NO: 21591
  chr1:180945775-180945967
  hypo

SEQ ID NO: 39525 - DNA, 748 bp, Homo sapiens; identical to SEQ ID NO: 26044
  chr1:18434105-18434853
  binary

SEQ ID NO: 39526 - DNA, 261 bp, Homo sapiens; identical to SEQ ID NO: 33182
  chr1:184633170-184633431
  hyper

SEQ ID NO: 39527 - DNA, 388 bp, Homo sapiens; identical to SEQ ID NO: 15342
  chr1:193149436-193149824
  hypo

SEQ ID NO: 39528 - DNA, 858 bp, Homo sapiens; identical to SEQ ID NO: 26048
  chr1:196577278-196578136
  hyper

SEQ ID NO: 39529 - DNA, 368 bp, Homo sapiens; identical to SEQ ID NO: 21599
  chr1:205038784-205039152
  hypo

SEQ ID NO: 39530 - DNA, 92 bp, Homo sapiens; identical to SEQ ID NO: 10111
  chr1:207240948-207241040
  hypo

SEQ ID NO: 39531 - DNA, 564 bp, Homo sapiens; identical to SEQ ID NO: 33191
  chr1:219347007-219347571
  binary

SEQ ID NO: 39532 - DNA, 262 bp, Homo sapiens; identical to SEQ ID NO: 15354
  chr1:230266303-230266565
  hypo

SEQ ID NO: 39533 - DNA, 175 bp, Homo sapiens; identical to SEQ ID NO: 15357
  chr1:233085208-233085383
  hypo

SEQ ID NO: 39534 - DNA, 304 bp, Homo sapiens; identical to SEQ ID NO: 28340
  chr1:2331316-2331620
  hypo

SEQ ID NO: 39535 - DNA, 694 bp, Homo sapiens; identical to SEQ ID NO: 21607
  chr1:236444211-236444905
  binary

SEQ ID NO: 39536 - DNA, 792 bp, Homo sapiens
  chr1:236558686-236559478
  binary
cgagggacgcgcagcgaaggggctttgctaattgccaaagcaggaagtgagctcgtggaagaagcgaaggaggagaagaagaagggaggggaaggcggaggagggcaggggcgcgcagagccacggtttgctccaggcgcgtcggaaccgcaggacttttcatccccgtggtcccacggtcctcccgcgccccggaggcctgccagccccgctcggacgctcgtttgcccctaacccgccgccatggcttcaccggacgaccctctgcgcgcaggtaaagggacacagcgccgcgcccgctcctggagcgagcaccgcggggcgggagctcgggaggcgctcgcagcagccgcagggctatcgaggccgggcctcggcgacccccgagggaggcccgggaaccacccccgacccaggcgccagacccggagtcgcacggggctcccagtccagccccgcgagcggctgctgaccgcccctcccgcgctcgccagggcccctgccccgcgtcagccaccgcgcgccttccccctgcccatgccgcagcccccgtggcttttgttctggactcgggatgccaggttgagacacgtcctgcaaacctctggcagaaatgggcgcaagggggtggatttcgttttcgcctcccgggctttttctttctccccgctcacatgccttctcattactcctcttcctctctcccattgcactttgatgaaatggttttgtctgtctaaacattggccctcggagctatttcatcagatagtatccgcagaatcgagaggc

SEQ ID NO: 39537 - DNA, 1565 bp, Homo sapiens; identical to SEQ ID NO: 34067
  chr1:237205156-237206721
  binary

SEQ ID NO: 39538 - DNA, 313 bp, Homo sapiens
  chr1:23748877-23749190
  hyper
cgtaggcacttggttgcatgtttgaagttgcttctgttagtgcatgctcagaggatgtgacaaagccttaagtggctgagacttcagcaaccggcagtaaaccccgggcctgagctgcaacgtggaggatccgtcttattacaggaagtatgtcctcctctgcctaaccactgctgggcgggtccactttcactcccagagcaggccccacctttctcggccagacgcccagagctccatgcccacccagacactgccgagagcccaggcgcagacgtggctgtaaactggctccatgctgcagggaccctgc

SEQ ID NO: 39539 - DNA, 205 bp, Homo sapiens; identical to SEQ ID NO: 21609
  chr1:2377210-2377415
  hypo

SEQ ID NO: 39540 - DNA, 354 bp, Homo sapiens
  chr1:2428114-2428468
  hypo
cgtggccacccacgacatagagatggagggtgagtggctcggggacctggggccacgggcggaggcctccctgtcccccatccctgctatgctgctgggcgccgggcgaggtcgaggactggcagtctgatgcccggtcaccggcgccacagcggcgtccagctggcaggtgtcgtccttcagcgagaccaaggcccaccagattctgcagcagaagccggcgcagtacctacgcttcaaccagcagcagctctcccgcatctacccctcctcctaccgtgtggactccagcaactacaacccgcagcccttctggaacgccggctgccaaatgggtgggtgcgggcatggtgc

SEQ ID NO: 39541 - DNA, 705 bp, Homo sapiens
  chr1:244080446-244081151
  binary
cgagcaagaacaggtgggaagaaaaacagcagcctgatccgtcttgcttttcccttttctccatgcagccagcacttttccttctcactctccccgcacgcccacgcccacccgcttctgcaccgagaacctcgaggcgcgcacgcacgtggaggtgacgccaagcccagcggcgaggtcggggctgggggtggggggagccggcgtcccgcgggcccccgaggccggggagctccgccagcgcattgtgcgagcgagctgaatgcagccgaggggcgagcgcgcgggctcgcacggattagccgtgctttcccatgagccacaaaagaatgcccgaatctgggacatctgtcatcaaggggcaggctgctcaggatgcaaggtaaccagagctttcctcggactgcttcagtctttggggacgtggggtcaccctaatccttcctgtttatattgtgaacgcgtaggcagcgagacttaagctctgcgtcggtcaataagcatcacgacgcaggcattcctgagcggctacgtcctccggttgctttctcggttttttggaagaggcagcgttgcctcccatttattcagtcccctcacagcagcgcggctgtagcgcgccgcagaagagcgccccaacgctgccggcccctgttttgtttcttctttctgcattcatccactttgtcctcccattatggcgac

SEQ ID NO: 39542 - DNA, 105 bp, Homo sapiens; identical to SEQ ID NO: 15364
  chr1:246160284-246160389
  hypo

SEQ ID NO: 39543 - DNA, 216 bp, Homo sapiens; identical to SEQ ID NO: 21612
  chr1:246310269-246310485
  hypo

SEQ ID NO: 39544 - DNA, 777 bp, Homo sapiens; identical to SEQ ID NO: 30802
  chr1:25256577-25257354
  binary

SEQ ID NO: 39545 - DNA, 252 bp, Homo sapiens; identical to SEQ ID NO: 33206
  chr1:25919205-25919457
  hypo

SEQ ID NO: 39546 - DNA, 589 bp, Homo sapiens; identical to SEQ ID NO: 23726
  chr1:32410105-32410694
  hyper

SEQ ID NO: 39547 - DNA, 62 bp, Homo sapiens; identical to SEQ ID NO: 21616
  chr1:33016544-33016606
  hypo

SEQ ID NO: 39548 - DNA, 1246 bp, Homo sapiens; identical to SEQ ID NO: 24846
  chr1:36042458-36043704
  hyper

SEQ ID NO: 39549 - DNA, 738 bp, Homo sapiens; identical to SEQ ID NO: 24853
  chr1:41284015-41284753
  hyper

SEQ ID NO: 39550 - DNA, 370 bp, Homo sapiens; identical to SEQ ID NO: 27443
  chr1:44717932-44718302
  hypo

SEQ ID NO: 39551 - DNA, 361 bp, Homo sapiens; identical to SEQ ID NO: 21619
  chr1:44971165-44971526
  hypo

SEQ ID NO: 39552 - DNA, 93 bp, Homo sapiens; identical to SEQ ID NO: 21620
  chr1:46111798-46111891
  hypo

SEQ ID NO: 39553 - DNA, 1865 bp, Homo sapiens; identical to SEQ ID NO: 15385
  chr1:46767970-46769835
  hyper

SEQ ID NO: 39554 - DNA, 138 bp, Homo sapiens
  chr1:46921731-46921869
  hypo
cgcagccaggcccccgagtgtgcgccgtgtaaagtgacacatattcatcaccagctcgtggcgccggcgccgacgctgatacaatattagtgttgccccccctttcggagcccgctccgcccggctccccgatggcac

SEQ ID NO: 39555 - DNA, 209 bp, Homo sapiens; identical to SEQ ID NO: 15386
  chr1:46963465-46963674
  hypo

SEQ ID NO: 39556 - DNA, 299 bp, Homo sapiens
  chr1:47041011-47041310
  hypo
cgactggaagcaattgcggctaataacactgaatactaggtgtgtgtcctggaggcaagcagcaaataattacttgccctccctcttgcccataaatcacggggcagtatttacattgcctggagaaaatggaaacatctgtcaaatggacttggggcctaacatgggcaccgctagaccctaactgctaagcgctgcttaatgaaacggccgcgttcctggccactgtagcacttgtggccttccccggtgagcactctctgtctgcccgagtatttcagtgctctgccaacaaggtc

SEQ ID NO: 39557 - DNA, 866 bp, Homo sapiens
  chr1:4715838-4716704
  binary
cggcgcgcctcctccccggggcccggggcgaggcgccggccgctgggcgcggcgggcgcgggggccggggctgccggggaaagctaaagctccgggctcccagcgagagcttcgcaggcggagttggaggaaaccacagccaaacagccactccgctcccccttctcctttctcggggccccggggctgagcaggggcctcccaggctcccagctgccgacccagctgtttgcgggtgacctccgggcccgacgggcgctcacagctggcgggcagctggggcgggagagctggggttcttggggagctccggcggccaccccgctgtaaacacacacgcacatacgcccgccggcgcgcccggggcttgtctgtgtctgggactccagggccagatggaagagggggttcgagcctagagcccgtggtgggggtgtccagaaagacccttctcggcaaactttgccagcccgccggggttctcgggcttctctggcttctgcctggggtggcccagggcccaccagagcacagctgtcgtttttgctgggcaggctgcctctgagccctcgccctcctgccggggcattcaccgagctcgtgcatttgggtcccgggttggaaccgcgagcggggaggacagaggtggaggcggagagcagcgtgcggttctcgagtttgtccactgggatgcactgcgctcccgcgttggggacgaaaaggccagtagttgttagcccgctgcttgagccgcccccactcagggatgaagctgcggggggagtgaggcgaagggagggaggatctagtgcgtgtcctgattttgagaaatcggaaggggactgggacgccaagtgttttctagc

SEQ ID NO: 39558 - DNA, 1336 bp, Homo sapiens
  chr1:50880863-50882199
  hyper
cgctgctgctgctgttgtgcaggaggggtggggcggggaagctccccaccagtcggagctacccgcggcggcccgggttcgcatcctcccactgctcagaccgagtcggctccagcttgctttgggaagcattcaggaataaacgtggacagtagcggtcaggaaggagattcccgtttccccttctcccaggaggaaaagaggtaacgctgccgccactgccctctctttccagggtgggaacgccgcccgagaccggggtaccccacactcctccctagcgctgatcccagcggagctcaggccgcagtcccctcctgccggctgcggaagctcccagaagcggagactcaatcgcccccctgcccctgctaccaggccagagtctggagtacagatactggctccctggggcctgggtgtgcgaccccaggccggtcattgcaggtctctgcgcctccctgttcctgactgtgcaatgggcagcgggtcaggggcgcaccgtgggcgcagtacgttcccaggcgccaagggctgtgactgaccgacctgggcttccaccgcggggcctgggccatggagacgctccgggcccaggaacgggggacctcgggtgccccactacctcactcctagaacgcccaccgctcacgaagccttcctgagctctacccgaaggtgctgacagcctggagctgaggccaaggcgcttgggggcacgctgcttctccctgggcctcctatgttcacggaaggagagtttccgcaaacctctcactctcggccagcagaccccgcttcatgagaggaggagacccactaggggcggtggagaggcgaagtgatccagggtcccggaaagttggacaattccctggaccagatggctctcagtttcctcctctgtaaaatggggccggtaataagcaactctctggattcaccccggtttgctgcgaggatgaactaatataatagtctttaagtctgtgacgctccagatgttcttgggaatgagtaacgcgggtccacaggccgccccctcgggtccggccagagcatcggcaggaaccgaggagcctcgggggacccagcgtaggtccttcccgaaaccaacaccttgggtgcggtggggcagaggacggggatgaggcggccggaaccgccctacgaggagaggctgggaggctccgaaaacctggggtagggggagcgcaccggggctttagagggcgcagcggccaagggcaagaaagtttacactcccagaagcttccgcacgctttctcccgcctgcctcttttctttctaactcttccctctcctgtctcctctc

SEQ ID NO: 39559 - DNA, 911 bp, Homo sapiens; identical to SEQ ID NO: 23001
  chr1:50885965-50886876
  hyper

SEQ ID NO: 39560 - DNA, 978 bp, Homo sapiens; identical to SEQ ID NO: 27451
  chr1:53308283-53309261
  binary

SEQ ID NO: 39561 - DNA, 391 bp, Homo sapiens; identical to SEQ ID NO: 21626
  chr1:61913163-61913554
  hypo

SEQ ID NO: 39562 - DNA, 261 bp, Homo sapiens; identical to SEQ ID NO: 33227
  chr1:6391374-6391635
  hypo

SEQ ID NO: 39563 - DNA, 904 bp, Homo sapiens; identical to SEQ ID NO: 24872
  chr1:66998805-66999709
  hyper

SEQ ID NO: 39564 - DNA, 556 bp, Homo sapiens; identical to SEQ ID NO: 33229
  chr1:6713808-6714364
  hypo

SEQ ID NO: 39565 - DNA, 349 bp, Homo sapiens; identical to SEQ ID NO: 23007
  chr1:67217980-67218329
  hyper

SEQ ID NO: 39566 - DNA, 622 bp, Homo sapiens; identical to SEQ ID NO: 24874
  chr1:75595748-75596370
  hyper

SEQ ID NO: 39567 - DNA, 248 bp, Homo sapiens; identical to SEQ ID NO: 21633
  chr1:8014160-8014408
  hyper

SEQ ID NO: 39568 - DNA, 77 bp, Homo sapiens; identical to SEQ ID NO: 21634
  chr1:86277780-86277857
  hypo

SEQ ID NO: 39569 - DNA, 207 bp, Homo sapiens; identical to SEQ ID NO: 23750
  chr1:86860814-86861021
  hypo

SEQ ID NO: 39570 - DNA, 750 bp, Homo sapiens; identical to SEQ ID NO: 30857
  chr1:90308855-90309605
  binary

SEQ ID NO: 39571 - DNA, 993 bp, Homo sapiens; identical to SEQ ID NO: 34099
  chr1:91182654-91183647
  binary

SEQ ID NO: 39572 - DNA, 1325 bp, Homo sapiens; identical to SEQ ID NO: 24879
  chr1:91184657-91185982
  hyper

SEQ ID NO: 39573 - DNA, 1351 bp, Homo sapiens; identical to SEQ ID NO: 23016
  chr10:100993468-100994819
  hyper

SEQ ID NO: 39574 - DNA, 955 bp, Homo sapiens
  chr10:101088916-101089871
  hyper
cgaagtgtgtacccgctacgcacagtgcggtgatgcctggccacctccagcctccagcggggacctcctgcccaggtggagtctgaatgcccaccgccaccagcccacgcgcgcagtgggcgtacacgtggtgacctgcctgcggctgggttcccagctccggctcctcctccctccagctctcgctcggcttcctgcagtatcacgtgcagctgcgctgggtgcaggatggcggcggccgcggcggcggcagcagcggtgggtgtcaggctccgggactgctgcagccgaggcgctgtgctcctgctcttcttttccctgtctcctcggcccccggccgccgccgcctggctgctgggcctgcggcccgaggacactgctggaggccgcgtgtccctggaggggggcaccctgcgcgccgccgaaggcaccagcttcctcctgcgtgtctatttccagccaggaccgccggccaccgccgcaccggtgccctcaccgaccctcaactcgggggagaatggcaccggcgactgggctccgcggctcgtgttcatcgaggagcccccgggcggtggcggcgtggcccccagcgcggtccccactcgccccccgggaccgcagcgctgcagggagcagagcgactgggcatcggacgtggaagtcctggggcccttgcgtcccgggggcgtggcaggctcggccctggtccaggtgcgagtgcgggagctgcgcaagggcgaagcggagcggggcggcgcgggcggtggcgggaagctcttttcactctgcgcctgggatgggcgcgcgtggcaccaccacggcgccgccggcggcttcctgctgcgcgttcgcccgcggttgtacggcccaggcggggacctgctgccccctgcgtggctgcgggcgctcggggcgctcctgctgctagccttgtcggccctgttcagcggcctgc

SEQ ID NO: 39575 - DNA, 1911 bp, Homo sapiens
  chr10:102586603-102588514
  binary
cgccccacctccgcccggcccgcccgccacggccattaccctgcccgcgacacctgcgcctgagacccggcgggaggagcgggcggagaagccaccggccggactcgtggggtccgccctggcttgcaggcgtctgatccccactccccgaccctcccgcagggagcgagttctccggcaacccgtacagccacccccagtacacggcctacaacgaggcttggagattcagcaaccccgccttactaagtgagtacgccacctggctggccggcggctcagcgcggccgcgcggcttctgggcacggtcccactcccggcgacccgacctctggggacccggccgggccagggggacaggcttgttagtgcagcactgaggcccggggacccctcgaggacgcccgcacctcctgccctcccgtgccctccctggtcgctcgaaggctctgcgccgccctcgccctcggatcccctggagggtgcgcagccgggcgtcaccagatcgggtccctctcatgccccgtgaacgcaactattctccggggcaactggctccactgcccagccaaggtctcccagtccggatcccgctggaccccagccaggggaggtcttttctgtgcttttctttccttttttgttctcctgtttgtcctctcacccagcccattcttctcctgtgttaacttccaggttccccttattattatagtgccgccccccggggctccgcccctgccgctgctgccgctgcctatgaccgccactagttaccgcggggaccacatcaagcttcaggccgacagcttcggcctccacatcgtccccgtctgaccccaccccggagggagggaggaccgacgcgacgcgatgcctcccggccaccgccccagcctcaccccatcccacgacccccgcaacccttcacatcacccccctcgaaggtcggacaggacgggtggagccgtgggcgggaccctcaggcccgggcccgccgcccccagccccgcctgccgcccctccccgcctgcctggactgcgcggcgccgtgagggggattcggcccagctcgtcccggcctccaccaagccagccccgaagcccgccagccaccctgccggactcgggcgcgacctgctggcgcgcgccggatgtttctgtgacacacaatcagcgcggaccgcagcgcggcccagccccgggcacccgcctcggacgctcgggcgccaggaggcttcgctggaggggctgggccaaggagattaagaagaaaacgactttctgcaggaggaagagcccgctgccgaatccctgggaaaaattcttttcccccagtgccagccggactgccctcgccttccgggtgtgccctgtcccagaagatggaatgggggtgtgggggtccggctctaggaacgggctttgggggcgtcaggtctttccaaggttgggacccaaggatcggggggcccagcagcccgcaccgatcgagccggactctcggctcttcactgctcctcctggcctgcctagttccccagggcccggcacctcctgctgcgagacccggctctcagccctgccttgcccctacctcagcgtctcttccacctgctggcctcccagtttcccctcctgccagtccttcgcctgtcccttgacgccctgcatcctcctccctgactcgcagccccatcggacgctctcccgggaccgccgcaggaccagtttccatagactgcggactggggtcttcctccagcagttacttgatgccccctcccccgacacagactctcaatctgccggtggtaagaaccggttctgagctggcgtctgagctgctgcggggtggaagtggggggctgcccactccactcctcccatcccctcccagcctcctcctcc

SEQ ID NO: 39576 - DNA, 1327 bp, Homo sapiens
  chr10:102893948-102895275
  hyper
cggacgccccccaagaagaagaagccgcgcacgtccttcacacgcctgcagatctgcgagctggagaagcgcttccaccgccagaagtacctggcctcggccgagcgcgccgccctggccaaggcgctcaaaatgaccgatgcgcaggtcaaaacctggttccagaaccggcggacaaagtggaggtgagcaagcggggcgggccggccgcccgcgagcggcgcggtctcaggcagctctcggttcattggcctctcgtggggcgcacatactttttccgctcgcggtttctgatcctttcggaggagcgagctcccgctaggcttgcggggagctggaagcaaccgaggccgatagctgggatggggctgaagagccctggctctgttttaccggaggcttcagggctttctggttggcacactctctgccggtgtagacgcggcaggtctattccgccgcttgggcaaacaggcgggttagtgcactccacgcagtccaggctccagggatctgtgagtcctggggagctttttgtttgcgcaaactcttgcttatggaatcctgctctgtcctggagactggatgcagaacagcccgcaccttgttgcagcgctccagccgggctcccggcagagggtctgtggccccagaccgcggccctgctgacggtctcctcccccagacacccggcctttgcgcagccggtccctaccctggaaggagaaaatcaatccgcgccggctgcggcggggtttcgcgggtcccactggaaggggaatcaattaggagcagatgggtgtgtgtgagaaagagaattttccttctcccatagccacaactctagttactacgcaatgggctttttgttttgttttgttttttcacatttacgctcacggacgtgaagcgtccccaacactctcgagcagcctccctctccgcgcgcactgacgctttctccggctgcaccctctggcacgctgcaccctctggcacgctgcaccctcccgcacatctggcccttgcccgccggagtttctcccctagctcaggccccatggggtagcgcgggagagtctgggcgaagtcggcggcgccgagacgggcgggccttggggcaggaggaaggaattggagtttcctctttttctgaacgaaggcgaggaatctgcctgggattccgcctacggggccacaaaggaagccatggccccacgattctaccacaacatttctgacgctgggaaaggagtgggggatgcggcctcagaccttggaacgctaaagagggagccagggctagctcgggggttggggggactcc

SEQ ID NO: 39577 - DNA, 749 bp, Homo sapiens; identical to SEQ ID NO: 29666
  chr10:102899933-102900682
  hyper

SEQ ID NO: 39578 - DNA, 168 bp, Homo sapiens; identical to SEQ ID NO: 21644
  chr10:103817648-103817816
  hypo

SEQ ID NO: 39579 - DNA, 708 bp, Homo sapiens; identical to SEQ ID NO: 23019
  chr10:106398567-106399275
  hyper

SEQ ID NO: 39580 - DNA, 2493 bp, Homo sapiens
  chr10:106399321-106401814
  binary
cgaaggggaggagcagggctggaggctgtctctctctccctaagcctcctccctcctgcctcctcctttcttaatagctcctcctctagctcctctagtctcagacttttcaacccctagaatcccaggggcttctcggaggcggcgagctacaccacatgtcctggggcctgtaaaccgcagctcgaggtcgtctgtgggtttagctcatttcccttcagcccacctgaagtctccttcttcctacggtcacgaaggatctcagctgcaccaagcgcgcaggctacactcctgcagtagcggattggggaccagataagcccacgcggctcccgcctgagtaccctcttaactggcggccgacactttgaaacaattgagtccgttcagaaacggactggggagagtgagggcacgacctcaaaatcctaggcagcaaaatgaggtctggatcctccctggaagaacagacatctcgactactctctcgccccacctctggccgggaggtcggggcaaggagaatccctcaaccgagaagatctggcaagtccccgatcccaccggggccttccgcctcttttccctcatcccctaggaggctttatcaggttctaaccgcttgtagtgggggccgtgggtgctcggggcgccaagaggagggggctgccgagagcggcctgcctagttctcagcattgcctctttgaccactcgcaggctcctggaaatgcaaacacagcccgtgcgtgatccgcacgcgaccaaaagccgagcgcacacctcccgcccccgccccacttgccatcgctcacactaacgtgcacacatgctcgtgcaaacgcgcacgcacggaaccgcgcgccccctcacacccagccgcgctcccggcccggctcagccaggtgcccccacgcggcagcgcccggtctgcccgccggccccctgcgaacccctcgcctcacgcccgcctgcctgcgcgcacgcacgcgcacgcacgcattccccacgcccccgcgcgggggcgcaggccttgggtggcggggtttggccgggagccggccgggccagggagcggcgagcagagtccagggtgcatcccgcgcttggcttccgtgcgcagcctccccgcgcggaggcacctggctccctctcggctctagaacgcgaacagttggcgttgagcacacaactcctcctccttctcccccgagacccctgtaccctccccgcgcgccatctcccgcccctcataacaggcccgaagagtaaacccccaaacgcgtccagaagcggctcccaactcttcgccgggagcacgttggaggctggatttcggagagactcgggattggggtctattgccggcccctcctggatccggcttgattttcatattttaagaagattttcttattacctttgattactcctttttaccaaatttctggaggagctcagtggggaggattggggggaatctgattttaagaaagaaagcaccgaaggggcaattattaattttcctcgggtttggaatcaccctctggacaagagaacgggcgagcgggagctaggagggaagagtggagaggaccggcgaggcgcgccagccggagccacctccttcccggccgccccctccccactccccctacacacacacgctcgctcgctcgccggcgcgcgcacaccccccgcgccggacccgcacctcggcgggcgccacacactcggcagcccgagccgcggtagccgcagcgggatggaggcggcgcgcacggagcgccccgcaggcaggccgggggcgccgcttgtccggacggggctcctactcttgtcgacgtgggtcctggccggcgccgagatcacttgggacgcgacaggcggtcccggacgcccggcggccccggcttcgcggccaccggcgttgtctccactctcgccgcgggcagtggccagccagtggccggaggagctggcgtcggcgcggagagccgccgtgctggggcgccgggccggaccagagctgctgccccagcagggcggcggcagaggcggtgagatgcaggtggaagccggagggacatcaccggcaggcgagcggcggggccggggcatcccagctcctgccaagcttggcggcgcgaggaggagtcgccgggcgcagcccccaatcacccaggaacgcggggacgcctgggccactgctccggccgatggttccagaggaagccgtccccttgctaagggttcccgggaggaggtgaaggcgccgcgggctggggggtcggcggctgaagacctccggctgcccagcacctccttcgcgctgaccggggactcggcccacaaccaagccatggtgcactggtcgggacacaacagcagcgtgagtacccacccggcggcgggtccgcctgtttcctgacaccgaaggggaatgggggggtgggtgggagcgagggacagatagttgctcgggggtcgaggc

SEQ ID NO: 39581 - DNA, 991 bp, Homo sapiens; identical to SEQ ID NO: 23020
  chr10:106401820-106402811
  hyper

SEQ ID NO: 39582 - DNA, 832 bp, Homo sapiens
  chr10:108924131-108924963
  hyper
cgaggccgagcgtggagcggagctggggtgcggcgaggggcagcaggagccgccgccgcagacgcccggggcgcagaggatcaagagccccgcgccggcgaggagcgcgctcagccgggcttgggagccgccgccggcgccaacttttcccatcgcgggagcgaagagcagcggagagaggggtcccagaacgaaggtggcggcacgagctctgcgctggcggctgtggggggccggcgctcaggaccccaactccatccaagttgcgccgcggtgggggcgggcggaggcggcgccgggcaggtggcggccgcttgcccgggctgggcttgtgccgagcgcgggtccggacggagcgagccgccgccgcgcgggggtggagctgagctgaagtcactggcggagcgggcgcgggcgctggcgggcgacgcgggagggagggcaggcgctgccgggactccgggcgccgcgtcccgcggccgagctgcgctgcgcaccgggtctccgggcgctggaggcgccgccggcgacctcccctcggcctcgcaggcgctgccgccgcctctccccgccgcccactctgcgcccccgcggccgcgggtcccggcgctgagtccgcgcaccctgcccgcgggggcggtcgaccccgggctcccggagcagtcgatgtgtcgggagcttcctattcctgctttattgtttctatgagtctatgttgctgtttccttttttctccgtctttctggtcttttctagttgaggagatagggatgggtgggcttctgctccttccctctcttatgcttcctgagttggcatcttgaccttaccc

SEQ ID NO: 39583 - DNA, 811 bp, Homo sapiens; identical to SEQ ID NO: 34116
  chr10:110671608-110672419
  hyper

SEQ ID NO: 39584 - DNA, 861 bp, Homo sapiens
  chr10:111216360-111217221
  hyper
cgcctgtcggagcaaatgtgacgctgattggcttcagctccccagctgcaaatgggtagctttgccggggtttctctcttgagctccaggcactctcaaggatccggttcatgtcttcgccctggcccgcttggtatagggggcgcacaggaagaggccaagaagtggaaagaacctcatctcgatgtcccaagtgacaaagcccccggggctcggggctttggtacagaggagcagcagaagccgccgccgcagacgcccggatgcggaggacccagagcgctgcgcagctgaggagcacctggggagccaccgccggcgccaacttttgccatcccgggagccatagcggcagagagggggtcccggacccgaggtggcagcgaggggctctgctttggcagctgtcggggctggagctcaggaccccaactccagccaagtcgggccgcggcggggcaggcgtaggctgcgcaggcaggggtggccgcgggtgctgagccagtcgccgccgcgcaggcgggcgctggagtctcagctacctggcgcgaccgccagcagcacccagcgcggggccgggagctgctgggggcccaggctccgctctccccaccgctctgcaccgctgccggctgcggacagacccgatgcgccaccaccaccgcagttgccacgacccccatggaatcgctggcgcctccgctccggttctctaacccggcgcactctgggatcccaaagcttgccgtgggttggaggcttcctactctttgtgcgttgaggctttgacctgacccagagcgcagcttatgccctggcttgggcagaaaataatattaattactgatcctttgtgctccc

SEQ ID NO: 39585 - DNA, 45 bp, Homo sapiens; identical to SEQ ID NO: 21648
  chr10:114343145-114343190
  hypo

SEQ ID NO: 39586 - DNA, 1473 bp, Homo sapiens
  chr10:118030891-118032364
  hyper
cgctgcccaccgcgcacgtcggccctccgccccggggcatcctggcctgagcaacgacccgggctcccgggccacccccggctccagccacccgctccgcccggctgaaactcaggcgctttccgaggagaagtgcggcggcggactgggcaccgggcgcgcgctgggcgcggggcaggccagccatggtcagcggtccgccgggcggagagtgcccagaagctactcgggaaaaacttttctcttccaagtttgctctcccggccccaatgctccccaactccacctgcccgccgcggctccgcgagctcccagagactctctgggggtgcagggccctgggctggagggcttcttagtcccccgccaagttgggtcattaaaaaccacaggaaatcaaaaccaagcccgaaaagcttcaggcagcgccgcgccgccaccgcctccctaacccggggattcgcgatcccattccccaaaaagacacttcttccttccacatccaccacacccgcgccccaattttggtgcggagggcggggtgggctgctgcaagcgaccctaggaaagactcagagggtaagaaagcccgcggcgggcctcgacttacccaagagcggcagcgcgaagtacagggtcgccaggaacatggtgccggcgcggggctggtccccgcccccccaaaaaaatcccgagccgccgctgggtcttgccgagggagctcagcgtgcagcgatccccggacagctgtgctgctctggccgcccaaagttcagctccatccagtgaaagaggaaactccgggtctggcagcagccaccgccgccggcgactcagctccgggatggcgagggcgggaggcggttccgcttttaggggttcaggtccgacccaacctggaagggagggcgcgctttgagatgagagcggagagcgccggagactccccccacagaaccctctcccctcccccgttcccgcctttggggaatttccaacaccggggtgaggacccacccccacccaggtcggggtgcatgtgcgtgttttccaggggccgctgacacggggatggaggtgagggctggagaggtctgaagagggttcctaaagtccaagggggtgtctgttgggttcaacccgagacgctgaacgcaagcaaataaataaataaacggtactttccgagcgtcgcgagcggagcctgcagctgcctggagtccgagccctcggtggcggcggcggcagctccctagccagccctggcgccgaaagagccccttctcccgggaagttggcctccccctcctcgcgtcagccagcgagctcgctcagccgccggccctccccactccgatcgccaatccctagccccagtcgccgccctccttctccccgggactcgtctccctccagaggccgccaagccagggggaaccgatgtcccgactggggctgaaacccggttcctgc

SEQ ID NO: 39587 - DNA, 757 bp, Homo sapiens
  chr10:118032380-118033137
  hyper
cgccgcgcgtcctcggctccctcctgggcgtccgctcctctcacactctcgcccggtgcccaggactcgggcgcttccgcaccccagcccagggcgagcgcgccggcccgcagtcccggcgtgccccggcaggtgcagcccggcgccacgagcgccccccgggccctaaagttgggagacgccagcaaaaagaaaggggtggccggaggaggggggaagaaggagtggggaagagggacgggaagcggcaatgggttcccaaacagaacgaaaaaaactccaaatgccaccaacctggactcaaccgaccgcgtccagctgcggcgaggagccagtttgtttatttacttatttattctttcagggcaatggtgtccccgccccctccttccctttccgggctcactttatctgcgctaggaaaagaaaaaaaagaaaaaaaaatagatgcggtaatcttcgagagctcgaagggccgagttgggccaggacgatttccgagcagagccctcggctcggatgctcgttagggatgttagtggttattggaagcggcgcggagaatggcgtgttccgaggccagatttcttctggccagaggaccctcggcctgctcctgttcccgccgctccgcagctccagctccctcctaagctcgcccgccaggcagccgcagctgcacacgcccgcttgcggtgggacccgcggccggacccgtactcgcgcacaggacacgcagtgttctgcagccggccgc

SEQ ID NO: 39588 - DNA, 1260 bp, Homo sapiens; identical to SEQ ID NO: 24898
  chr10:118890928-118892188
  hyper

SEQ ID NO: 39589 - DNA, 1232 bp, Homo sapiens
  chr10:119294170-119295402
  hyper
cgcgccgctgcgatgccaccctttgttgcgcacgccgcccccggcaagctgctggcggccggggctaagcggagggcggccgcggtcgggcctctccgggtccacgccaggggtgggaggacacttcgggcccagcgtagaggaggcctccgaggcccaagcgggcttcggctgctgcgagtccccagaggctccctcgggcctcactcgcggtgtctcctccagacgccaggggcaggccacgaagccgagggctccgcgtggccgtgggagaagcggggtgcacggagccttcccgcgcccagacgccgaggggatgcaaacaggggagccgggcctggtatggccaacctccaggatcgaggggccccagaatgtgcgtgtggccgggggcgggggcagctgcgggggccagaactagagtattccttcgctctcccctgggggccgggcccccacgagttgcagcagagcccgtctgtaattagggcctcctggtccggcaaagctgcggctgctcccagagagagttggggtcttctcagggcccgcgatgggggagtggtcgtggtcagacccccgtgagccccttcggaaggtcccagtccctgtccattcttctgtcccgcagctctctccgcgcaggcggggcagagccggggaagaagacgctggacgaggggtcttggggccgcctcgctggctgcggttggaagcacccgttttcccgcccgcccgcgcaggcgctgctctgtggccaccagcagaggtttcccggccgctgtgagtcgcccacgcgagcgacgtggggatacggggcgcacggagtctcagctgccgccacgcagcgcttgccctgcccgagcttcggctcactggcagcggcgaggccaccgaccaccctccgccttccagtcctaaactcggggctggagaccgcaggagctaaaccaggaagaagaaagagggcagggcctgaggccgggaagagcggcccgggggtcaacggtgagcgggtgcatacgaggcaagagccagagtgacattaagtggggccgcccgggcaaaccttgcgcgtgcaccccggcccacctgcagggcattctcccctgccttttctccttggcttgagtgcgggcggctgactcctgtgggcggggaggagagggtggtcttcccagggctccaagtggagtgatcactgcacccatggccaggaggtgggggtgcgc

SEQ ID NO: 39590 - DNA, 1465 bp, Homo sapiens
  chr10:119296209-119297674
  hyper
cggtcctaggctttcatttgaaggcagctgagggagaaagaaactgcaaacccctttggttctgtttccttgctttcaataatgaatcgagacagcgtgtgtgtggtgagggagtgacgagtttcaacgtgatgaaggagataaaacccgacggtggggtcctgccagtggctccatgcgtcactgaaacattgggtctcaaaacggatagatctccggagacgcagaggttcgcgcggatgtccagaggaggacagcgcccctgcagccacccgcggagcccagggccagggtcaaaaccctgccgcaagggctcggagctccaagcagttatgctgagggcgccggtcccaggccgccttgctatgacacgggtttccagtgaagcccaagcggattccacggccccacatcaccggaggagccaggctgccccgggatggatggggtccgcgcgctccgagaggaatgggctagtcaatgtgcgctgctaggagtgtgtggtaatcaatcgccacccctgccaaaaccaaggaccccctgtgtcgggcgtcttcagccagccgcgagggggcgcggatctgagagagtcgcaccccgggaccccagctcttcctactccaccccaggcagggcccgcgcaggccgtccaaggcctgttctctgaaccacctgggttgggccgcgaaatatgggacctcaggcatggaattgtggctgcacaggtgatcacggcttcctagtccttcttagagcagaacctgtcccactccagcccacctctgcgcccccttcggaaggaagcctactggagctggaattccagcgtgggtggcgaactctcaagccaagagctggagctgatggaggcaggagggacgcacttccaagccatccgggctcctccgtagccagtgagcctcctttaacccctccactggcctggatgacggcctaggcgagactttggcagtgtggcgcgaccccagcgctcccccgccctcgggctcgggggcgcggtgggtaccgcgcccgcgcccggccctcgccactaggcgccgctgcgctcacgccgatcggggccccgggtcgccgcgcccgcctggcgagaggcctctggggaagacgccagaaagggatttgtcgtaataatttttaaaaaatgtttttagggcattaattatacttttcgttttctcaccgccaccctgcgcgttcggagaggccggcgtgactggggatctcagtgggttggaggaattcttaacgcccccgaggcctttccaactcgggacaccattctcgcgcctcgggccgggaaagggctcgcccttcacgggcgtcggtgcggtccgcggcgagccgcgggagcacagggcgggctcagcattctggttcaacgtgaggaccagaacctcggcgatcagggaccaggacgtggcagagtgcagcgggtagcttcgac

SEQ ID NO: 39591 - DNA, 736 bp, Homo sapiens; identical to SEQ ID NO: 33240
  chr10:119494306-119495042
  hyper

SEQ ID NO: 39592 - DNA, 388 bp, Homo sapiens; identical to SEQ ID NO: 24900
  chr10:122708510-122708898
  hyper

SEQ ID NO: 39593 - DNA, 625 bp, Homo sapiens
  chr10:124639064-124639689
  hyper
cgtcgaaaaaccgccgtggtgcccgcgcacagtgcaccgcgcctgcgcatggtctccaaaggctgagcgagggcctgccagtgcgcatgctccgctctttagcgcttcctgagcaaagtttgaacgcctctcgagtccagttggcttatgcgcatgcgtttctctggtgcaggttctcaccaaatccagaagcggcgggcatttgaaatgatgtaagccgggagtcgctctgcctgcccgtttctgcgctgcactggccgacacttaagcactggaagagaggcctggcaggaggcggcgcagtggacacgcggtccgaggacgggggcctcacccgccgccccacgcttgcctcttcctgggatgccgcaggcggggccctaactcacagcctcctcacccgggctcgtgtctgcgcccgcgacttcgactgggaggagcttctggcgccacctgcgccacggtgcgccgggccgccggcgaccgggtcgctgcgctcggcgactgccgcgctcctcggggaacgtgagggtctgagtccgggatccaggagagcagttggtgtcgggtctctgcgggggagcggggctgcgaggtggaggcgaggaccggggtgggcggaggc

SEQ ID NO: 39594 - DNA, 134 bp, Homo sapiens; identical to SEQ ID NO: 21659
  chr10:125017540-125017674
  hypo

SEQ ID NO: 39595 - DNA, 358 bp, Homo sapiens; identical to SEQ ID NO: 21660
  chr10:126296075-126296433
  hypo

SEQ ID NO: 39596 - DNA, 499 bp, Homo sapiens; identical to SEQ ID NO: 33242
  chr10:131647424-131647923
  hypo

SEQ ID NO: 39597 - DNA, 857 bp, Homo sapiens
  chr10:131844365-131845222
  hypo
cggggcgtgggacggggcgtggcgtggggcacaggaaggggcagggcacgaggagtggggcgagaggtgctaagtggggcctgagtggggcgcggggcgtggcgcggagtggggtggagcgggtggggcgaggctcggcgtgggacacgagggacgggacgcgggggcacggcaatgggtggcgcagggcgcactctcgggctccctgcaggtgggcagccccacctgtgcacgccgctcccccgcccagcgcctcccccgggacctgctccagaagcgccagttgcgggaccccacacggaaggcagtcttcggtggttctcactgcaattcctcttaattatgtgtgacataaaaagaccacctacagacgagacaatgctgccgtaagagtctcggggttactgcagggaattcttcataaccgaagtgtgttttccccgaggagttatgctaccatttgatttaatttttaatttttacattttaatcaaaaatagatcaaatggtggtggtctctccggggaaacacacttcagataggaagccggccatgctcctttaaatatggaaactgccgtctccgcgctgcgggctgggcgtgtcctttctgggaggggccttgggccatgcacctgaggccaccagctcgcccacgccgcccgctcacctgcacgcggaggttcatttaatccgtgcgtctatgcagcgcctaggcctaactctcccaggaggcgccagtcacgttccccagggggagctccctgacctttctgggggtgacagagtggggaagtgggcagtgtgagcccacccctgaggcgtgtgtgtgtaagcgtgcacacttgctttttaac

SEQ ID NO: 39598 - DNA, 199 bp, Homo sapiens; identical to SEQ ID NO: 15413
  chr10:134477298-134477497
  hypo

SEQ ID NO: 39599 - DNA, 342 bp, Homo sapiens
  chr10:134481140-134481482
  hypo
cgagcattaacaggcttaattactttaaaattgtcattttaatttacactgatatagtattgatcatacaagcagagattaagctgttcagtggagcagatgatggggaattaaacattaaagggtcctcagggggccgtgtgcgctgcccggcgcgagccggaagagggatgatatttctcggtaatgaactggcggcatgcggggacatgaatcttgggctcttggaaaaggggaaataatggggtttgggaggcatttgcaggttattcattcgccgccatgcaccaattctccagtgattcatccgcctcaccaacatttatttatccagcaaattcc

SEQ ID NO: 39600 - DNA, 345 bp, Homo sapiens; identical to SEQ ID NO: 33248
  chr10:134491036-134491381
  hypo

SEQ ID NO: 39601 - DNA, 834 bp, Homo sapiens
  chr10:134527015-134527849
  hypo
cgggtatatggccttggctctcctctgcatctggcccttgctgagggccctgaggcgtggccccttatcccctctgaccgcccctgacctccgtctccagagtgatggagccctggtcccctgccactagcctggtcccggggagggtggcaactgcgaggcctgggtgctgctgtgctcgtggccacacactgaggccggccctcagccctgtgcacggccacaccctctgcaggggacctgtccggcctcccggatatctctggagctggcactgacaccgaggcagggatcggtctgagcctggggactgtgctctcaactgcccaccgtagggaagcagcacaggtgggggatgggggcctggggctttgtcagcgacaaagtgactgatgaccgcctgtgccctgggcgccctccctggacagcatgtcagtcgcccagggagaagggcctcacccacaggagcggcgcggttcttcctgcctgatcagccctcggcttgcaggcaccaagcgtctcggggacctcccacggagcccaggagcagggagggccctgccgtgtctgctgttgggtcttggtgacagcggttaggttgtcagcatggcatggcattaaaatgtgtcattgcccctcgctgccatggctccgcggcctcaagaaagcagcctttgggcttttgggccacttttctgcgtctctgcattcccatgaatggctcctgcggcgcgctcagccagccgcagatccggacctccgcggcgtggggcgggccgcgcaacacaaagggcggctctgtcggagtctggaacaatgggtcgccctttcacc

SEQ ID NO: 39602 - DNA, 529 bp, Homo sapiens; identical to SEQ ID NO: 21666
  chr10:134529092-134529621
  hypo

SEQ ID NO: 39603 - DNA, 638 bp, Homo sapiens; identical to SEQ ID NO: 33250
  chr10:134592912-134593550
  hypo

SEQ ID NO: 39604 - DNA, 413 bp, Homo sapiens; identical to SEQ ID NO: 33252
  chr10:134610534-134610947
  hypo

SEQ ID NO: 39605 - DNA, 732 bp, Homo sapiens; identical to SEQ ID NO: 30901
  chr10:134699327-134700059
  hypo

SEQ ID NO: 39606 - DNA, 1457 bp, Homo sapiens; identical to SEQ ID NO: 23762
  chr10:134732799-134734256
  hypo

SEQ ID NO: 39607 - DNA, 294 bp, Homo sapiens; identical to SEQ ID NO: 33256
  chr10:134795881-134796175
  hypo

SEQ ID NO: 39608 - DNA, 978 bp, Homo sapiens
  chr10:134942147-134943125
  hypo
cggggcgctggcggtgtcacagggccacttcctggacatggtcttcagctgcctgtacggcgccttctgcgtgaccctgggactcttcgtgctcatccaccactgcgccaagcgtgaggacgtgtggcagtgctggtgggcatgctgcccgccccgcaaggacgcccaccccgcacttgacgccaacggggccgcgctgggccgcgccgcctgcctgcactcgccgggactgggccagccacggggcttcgcgcacccaccgggcccctgcaagatgaccaacctgcaggccgcgcagggccacgccagttgcctgtcaccggccaccccgtgctgcgccaagatgcactgcgagccactgacggcggacgaggcgcacgtgcacctgcaggaggagggcgccttcgggcacgacccccacctgcacgggtgccttcagggcagaactaagccgccctactttagccggcacccagcagaggagcccgagtacgcctaccacatcccatccagcctggatggcagcccccgcagctcgcgcacagacagcccccccagctctctggatggcccggcggggacacacacgctggcctgctgcacccagggcgaccccttccccatggtcacccagcccgagggcagtgatgggagccctgccctctacagctgccccacgcagccgggcagggaggcagcgctcgggcccggccacttggagatgctgcggaggacacagtccctgccctttggtggccccagccagaacgggctgcccaagggtaaattgctagaaggcctgccgtttggcaccgacgggaccggcaacatccgaacgggaccctggaaaaacgaaactactgtgtagatgggggcagaggacacggtgttcctggaggagcttcagagcagagtggggggcccatctgccacatgaggtcactgggggtaccgaagtgaccccgcctttcagaagcc

SEQ ID NO: 39609 - DNA, 739 bp, Homo sapiens
  chr10:135014662-135015401
  hypo
cgtgagggggcagagggacacagtcctgatagcagagccagcgaggacagggcccggccccaccccggggcgagtacgagtttggaagcagtgagggcgcagagtggggctccatctggggagaggcctctctctgtcacccggccccgtgcggcagttcagggtcccagcatctcccctgcactgggaggcggcagccgtgcccggggggcgcccgtggtgggcgggtgcaagagagaagggcgtcgggtgtgcaagcaccaccggcctcccattaacagcctgcccgggctccgcccacaggagccactgtccacgtaacctgcgtctctttctttcaaggaaaagagaagccagccatggccaggaccagcagcagggccccctgctcacccacctcggtgtcggatgtggactcggacgcactgtcacggggaaacttcgaggtggggtttcggcctcagaggtccgtaaaagccgagagagcgcagcagcctgaggctggcgaggacagacggccagctggcggggcctcagacgtggaggcagtgacccgactggccaggtccaaaggggtcggcccagccttgtcccccggcccagccggattccagagctgcagccccggctggtgcagcgccttctacgaggccgactgcttcggggccgacgtccacaactacgtgaaggacctggggcggcagcaggcggacggggccctgcccgacgcccagagccc

SEQ ID NO: 39610 - DNA, 978 bp, Homo sapiens
  chr10:135016995-135017973
  hypo
cgcacacggtgcagcgagggccgttctctggggcggctggagcagccggtgggcatttcctcccttcagcgctgacccccacctactggtgccggccgtgtgtgctgggctcagcactgcgggtgccctggggctgtggagctggcatccgcgtctcctgctgttaaaacaagcgtggctcccagagtcagcgtggacagcactggtgtgggttcctcccccgtctgtctgcaccggtgaagcctggcctcgtgtttccctcctcactgccccacatgtggtgtggattttagttaccgtggatttattaaaatcagtcaagaccgtcctcctcatggagtccgcctgtggttcccgcgtgaggagcgcccccgacggacatcgagtctgactgtgaacggaggccgtggaggtgccggccagagaggagtctgcgtgagctgcactccagccaggcgggcatcgggctcgcaggcacccgcctccaggttcctggatgcgtcagggtacacagacctttcccaggagattttctcgacatcagcacctctgcaaatggatgggggtgagagggctggatggagcctggcgccggtgacctccgggggccggacgagggccccatggtgcaggccatgggggaacgtggccaccaccatcctcagaagccaggaccaggtgccccggcagcagaacacagctccatggggacacctgcgtttaccaacctcaacctgcccagcccggtaggtccttccttgatgatggaatgttctagacgctgtccaccgggtagccaacagccacgtgtggctactgagctctggaaacatggcccacgtgactgaggacctgatgttttaatttcactgcactttaggcagccacggcagcctgcagctcagtgtgggaggcagggtcgcacttggctgggtggcagcggggtccggagggcttggggaacctggcttagtggcc

SEQ ID NO: 39611 - DNA, 649 bp, Homo sapiens
  chr10:135022978-135023627
  hypo
cgcgtgtgtggtgtgcgcgtctggttgtggagttctgtgtggctttgtgcatgtgtgtggtgtgcgcgtctggttgtcgagttctgtgtggctttgtccacgtgtgtggcgtgcgtgtctgtggttgtacagtttgtggcttgcatggcgtgagtgtgagtgctgtgcttccatggaaggagcgtctcctggccgtgatgtggtcacgaggggcttccccgctctgtggacctggtgggcgtcacctttgcagggcagcctggggctggggctgtggccacctgtgtcctcggaccccaggtgagtgggtgaccaggccccttgttccagggccacgccatctcctgcctgagactcctccagggtgggaggaggccttgccaggcctccgcttcctgaccgtggccgtcgggctcccaggacagtcccagacctgcaggcggggccctggtcagtgtctcctgagggtggcgcggtttcacccagtgaagacccagaacctttgagcgtgcagcattgcgcccggtcccgaggcaccagctccctcagcttcccgagctaacgggtcctgcgagtggagacgtcacaaagccctgcatagggctgcgttcagaaaggccctggtgttcagcagggcacggtggctcac

SEQ ID NO: 39612 - DNA, 313 bp, Homo sapiens; identical to SEQ ID NO: 33261
  chr10:135153722-135154035
  hypo

SEQ ID NO: 39613 - DNA, 154 bp, Homo sapiens; identical to SEQ ID NO: 21679
  chr10:135192037-135192191
  hyper

SEQ ID NO: 39614 - DNA, 95 bp, Homo sapiens; identical to SEQ ID NO: 23764
  chr10:14966103-14966198
  hypo

SEQ ID NO: 39615 - DNA, 317 bp, Homo sapiens
  chr10:15484072-15484389
  hypo
cgtctcaaaaataaaacgaaacaaaacaaaattctggcttgggaactttccagctcggcctctacttacctttctagcgtcatggctccacactgcgtttccttatctgggaatcccagccttactgaactttcagcttctgcagccagccacgctctttctggcctccggctttgctgtgtgctgtttctccagcctggcgatttgctctgtccccagcccctgcactcctttacctgatctgctccgattgatcctgcagtcctccgcggctgagtcacttccttctgcagggaagccgtcctgggttctcctcc

SEQ ID NO: 39616 - DNA, 1974 bp, Homo sapiens; identical to SEQ ID NO: 36201
  chr10:16562056-16564030
  hyper

SEQ ID NO: 39617 - DNA, 1569 bp, Homo sapiens; identical to SEQ ID NO: 26159
  chr10:1778583-1780152
  hyper

SEQ ID NO: 39618 - DNA, 458 bp, Homo sapiens; identical to SEQ ID NO: 21683
  chr10:21797632-21798090
  hypo

SEQ ID NO: 39619 - DNA, 1465 bp, Homo sapiens; identical to SEQ ID NO: 24911
  chr10:22541133-22542598
  binary

SEQ ID NO: 39620 - DNA, 73 bp, Homo sapiens; identical to SEQ ID NO: 33267
  chr10:22567321-22567394
  hypo

SEQ ID NO: 39621 - DNA, 1289 bp, Homo sapiens; identical to SEQ ID NO: 30915
  chr10:22624037-22625326
  hyper

SEQ ID NO: 39622 - DNA, 773 bp, Homo sapiens; identical to SEQ ID NO: 22758
  chr10:22634000-22634773
  binary

SEQ ID NO: 39623 - DNA, 87 bp, Homo sapiens; identical to SEQ ID NO: 17270
  chr10:22883126-22883213
  hypo

SEQ ID NO: 39624 - DNA, 987 bp, Homo sapiens
  chr10:23488658-23489645
  hyper
cggcacctgttccaaacaacctgttgcgctgacatcgctttggagaggcgccggcgctttgctggtggaggcgggttgtgtggaggccccaagccttcaggaaatagtttagggttccgttgtggtgagaggcaccccctccccgcttcctgtggcatgtggggtgtttcacctctgcctgtgtcccaggaacccaaggcgtcctgggcacctctgcacctcgcccactctagggacttctcatgtagagctcggcagtttgggtggattagacaaagatgaggattagagacacaccgccggctaattaaatgggctcttctcctctcctcgtcccctccccgcaacccgcagccagataggactcttcggttccctacccccactcctaggccctatgtaagtgcggatggagaaagctagttacattagcccttctgtcttagaggtaccggcacctcggggcattctcgctcttaaagatgcgttttctgaattatttctagttttacaatttctcttcggtgactgcacaggatcccttctagctcttttcctgttggagtcgctggacgtctcccaaacagctagttagtcgcctatctctggagcgcaggccttcggaattggattcagggtatgagtctagctaggggatgtttctagaagttttataaaatccatttgggcaagcgttggcattcggattttaaaaatatagacgtgcactggcattgggcaactcaaaaaaaaatgtgtctcctggcgcttgtcagtgacatgctaattacaaattttaaaacaagccacttctaagcgaaggacgcctggctgcaaccccacaactcacaccggtgcatataataaaatattagggttcaacagttggcatatgtggcaatagcaaatgtgacacctcgaagcgattatctggaagtttttccgtacttttgaaaatacacttgccgcctcatttctctgatggcc

SEQ ID NO: 39625 - DNA, 223 bp, Homo sapiens; identical to SEQ ID NO: 6743
  chr10:24863037-24863260
  hypo

SEQ ID NO: 39626 - DNA, 1137 bp, Homo sapiens
  chr10:26222946-26224083
  hyper
cggccggagtcccgggaagcccctcggcagccagccaagggccctgcgaggatgtggatggcgcggatggcgcggcctccacctgcgggcagtggagagagcggcgagaggaagaatattccccgcgagccgggataaggggccccttcggctcggttgacccaggtcagatcctcccgccgaccttcggcccgccctctacaggcggcccagttcttcccctgctcggctgcccctgcccgcccctcgagggagcgcccgtagccagcgcccccgtaaagaaataaggaggcgcccggcttcccgcccaggtacgtgtcgggacagcgcaggggactggcttggggcggcggtgggtagcggcgcccgcgcggcgctggaaacggccccgcttccttggaccccggggcttgcagggcgggcccggggctctctgagcgcgaggctgccgcgaccgcccgcccgcccaggtcagatccggaggacctgtgtgtttgtcggggcctggggtgagagaggggactcgaggggagaagtagagcgggaaaccaagagggggaatgtgaggcttgaacgagctggatgggagagctcgaggggaggagagggatgaacttgagggggaaacgggggcgggggtgaactcgagggggagccaggaggagggaacgggaagggtgaacctgaggggtggacttgagggaagatcttgtgggtgaacccgaggagggaacgcgaggggatagtgaggggggatctcgaggagggaacgtgaggaatgaacttgaggagggaacgggaggggtgaacgtgaagtggaaacaggaggagggaacgggaagggtggcgtaaggggtgaaggaagatctttaggggtgaacttgggaaggaaacgtaaggggaggacctcgaagagtaacgaggggcgagaactgagggggccctgcagggagactggagggaggaggcgccgagtctggcgggtgtcgcctcggagacctgtggcgcgcgcgggctttgcggcgccgcccacaggtggcgctgggtcggcccgtccctgagggaactgcgttccgggtgatttctcagaacaagcaggtcggtggagctgggctccctgcaaccccaaatgcatcc

SEQ ID NO: 39627 - DNA, 896 bp, Homo sapiens
  chr10:26503630-26504526
  hyper
cggagttgttattgtggtgacctagagtgtcagagccaggagagcaagaaagaggagccaaactgagccctgagttttcgaccacccgggctcccacagcctggaacagacttcacctagcacgctcagtgccagccttcggcaggacgctatcaacgcccgactggtttcctgctctcatcctggcgcctgggcccagttgccatagtgtggatcccatgactcctcagggaacccctggactcaggcacgcgagaagaagacagcgctttgtggagagaattgaccagggacagttatgctcgagcacacaggacttgggcctgtatgcgtccagcatgggccccaggatgtcccttctaagcgagggtcgaggggtgctcgcccagacgggatccccgggtctctgctttgttagcagctttggtggctggttcaggaggtcagagaaataaaacgacttgtgaacacaatggaaatgacaggcgctctggccaggcgcggggaaggcagccgcctcgggaagccgacctcagccctttcctctctctccctccctccgtctcccccagagccccggagctccgaggtgcacttgaagttcatctccactgccaggagaacgcagcgcaaactgtcaaagggctcccaatccttagggcgtcctccctgtctgcaatagctttttgtagaaaggaaatcatcagaacgattctgactttctcctcctttctttattagaaaaagagaaaccgcctcctaatacgcctcagagagaaccaatctcgcgcttccgggtcacccgctaccgcgaagattctctgggggcgagggggggcattggtttgaagccccttaaaacgagggccctgcaggcgatgccttctttcctactc

SEQ ID NO: 39628 - DNA, 1489 bp, Homo sapiens
  chr10:26504539-26506028
  binary
cgagattgcttagttggaaaccctgttctcccctcccaggcgcacacagatcccccttacacgcaagcagcgggcgcttccacgcctccgcgggccaaggtcaccaaatgccctgattccatcccccacccgccatcaatcctgccgactctggccgctctgcctcattctcttccaagaagtttccattcgttttatttttttttccccagcccgaggtcctcagtagactccagcgtggattttaattgcctcaatcagcagtcattctccccagccgtcactcagagcctggacggtgggtcccgcgatctagcccttggctacgcaggaacggtgcgcccccgggtacggcgcggttcagcaggcaggcgtcaggttctaccaaggcgctgaaatgagcccatcagcgggtaggagcccttcccccgccgtcccctccccaggctcgtgaacggcgcctgatgcccgcccggggcgcgagctctcgaggtcgcagtgacctcagcacctgcttggaggaaaacggcgcgggaaccccgcttccttcccctcagctggagccagacctcaaacaaaaccccaatcgatgcacacagaaaactcctctgggccacgcttcccgcctcgccgaggtctccccagtctgcccctcgctgacgctggcgcgcagcggctgtggcagcacccgggacagcggccgcccgcacttcccgcctctggctcgcccgaggacgcgctggcacgcctcccaccccctcactctgactccagctggcgtgcatggtctgcctcgcatcctcacgactcagctccctccctctctcgtgtttttttcctccgccgccccctcattcatccccactgggctccctttccctcaaatgctctggggctctccgcgctttcctgagtccgggctccgaggacccttaggtagtcccggtctcttttaaagctccccggcttccaaagggttgccacgtccctaaaccctgtctccagctcgcatacacacacgcacagacacgcacgttttctgttcctgcgtgacacccgccctcgccgctcggccccgccggtccccgcgcggtgccctcctcccgccacacgggcacgcacgcgcgcgcagggccaagcccgaggcagctcgcccgcagctcgcactcgcaggcgacctgctccagtctccaaagccgatggcatctccgggctctggcttttggtctttcgggtcggaagatggctctggggattccgagaatcccggcacaggtaggaaggagaacgggggcctgcggcgggcgagttttgcggtggtctggggtttgcggaactacggagaagacgaaggaggtttttccacctgcaacaggaaacttcttcgggcgcttctccctgcttttgggctaagtccttgacggcccaagagctcaagacctctacagcctcttgtaccctgggaagacgcccaaatagtctcaggccc

SEQ ID NO: 39629 - DNA, 970 bp, Homo sapiens
  chr10:26506062-26507032
  hyper
cgcggtgtctcggggacatggaattccgtggtcctggggcgctgctaagatccgggtgtctggaccctggggtgggacggagtgaccgtgaagatagaaaaaaaaaatgggaaaggtgagagatttctttatctagaaagacagtctgcgaaaaaatggatagcttcagtgtttaggaaaactcgtccaaggtaggcagggagaggaatttgcctgagccgattggcacctggaagggcagcggtgtgggcttctcctcgggaaacagataaaggaaatgagggctggcccgggccgccagcctcccgcttgccttctgcacctgccggcctcaccgagtcctgagcggcccccaggaggaaggcggcccctcctaggaccccggactgattgattttcacatagaacgaaatttcacacgtccgtctgttgttctctttctgcctcgctgtctgcctgcctattcttccttgcagcgcgagcctggtgccaagtggctcagaagttcacgggcggcatcggaaacaaactgtgcggtgagtgcccagggaccggggcggccaaggtcggcccgcggggtccaagcagtcttctcacctccgcatcccagtcagcggagtcggggtttcctggctgcgggtaggcgggagcgagggagccgggcccggcggaggattgacgaggcccgcgttcggtgtccttacccagccctgctctacggagacgccgagaagccggcggagagcggcgggagccaacccccgcgggccgccgcccggaaggccgcctgcgcctgcgaccagaagccctgcagctgctccaaagtggatgtcaactacgcgtttctccatgcaacaggtaaagactcagcggggagccccggggcgcccctgcccctctctctgccccgcccaccgcggccggtgcgggtccggcgctgagagccggacaggggcgtcgaggtggcagc

SEQ ID NO: 39630 - DNA, 840 bp, Homo sapiens
  chr10:26726986-26727826
  binary
cggccaactgagcgtggttaaacgtggggagggaggagggtgaggttaccaacctgatggttgagaaagggcctccgcccagcgcgcccttcctccacccccacccgagagacagctgaactccggccgggacgcgcgtgttgccagtccagccctgcaccgcgtcccctgagggcgggctgcaggcggccgggaagccttgcacaaccggcccaaaagaggaagcccagaaagtgctgaagtaaacactttgggagaccgttgcaacataaagcggcctctcagtctttggtggaaccatcactaggccccaatcccttagtccctcttgcgtcgaggctgcaaaatggttccattcgccaggagacgctcctgagagaagggcgcgcgcggcacaggtagggggaggcgcaacgtttcccagaattaaaataaaataaaataaaataaaataaaaatcccttcaaggtggttgtgtagtaggggtgggatgggggagagaaaatcaggcgcagactcgatgagttggagaaagcagcccctaactcggagtcctttacgcatatgtttgtctgtcccactgtctctaaccaggggccttccttgcacctcggagcaaagcagctcggatagcgccacacgtctgcgcgctgcgtgggaagggcagggctgacagcacttcctccccggggcagcgacctggagcccgggtgcggcagtctgcaccgcgcgtcgctttcccggccggagtctcgccgccttcccgcgccccgcagcgccccgcagagcagtcgaggtaagtggcgctcccagtcccgggagccctgggagcgccagcac

SEQ ID NO: 39631 - DNA, 171 bp, Homo sapiens; identical to SEQ ID NO: 21689
  chr10:373939-374110
  hypo

SEQ ID NO: 39632 - DNA, 590 bp, Homo sapiens; identical to SEQ ID NO: 24918
  chr10:43697752-43698342
  hyper

SEQ ID NO: 39633 - DNA, 764 bp, Homo sapiens; identical to SEQ ID NO: 23774
  chr10:43892377-43893141
  hyper

SEQ ID NO: 39634 - DNA, 425 bp, Homo sapiens; identical to SEQ ID NO: 23024
  chr10:44806356-44806781
  hyper

SEQ ID NO: 39635 - DNA, 1366 bp, Homo sapiens
  chr10:44879650-44881016
  hyper
cgtgtgaggctcggagggtccctgggcctctctcaggtgaacccgagaagagacaggaagacagcggctggacgcgcgcccaggtccgcgtcgctgcggaccgcggagctgtgcagaagcgcggcctggcgggtggcacaagcccgacagctgcgccgcgcagcccgcccgcgcctggccaagagccccgcgagggtgtggggagaggatcggcttcgcagggagcggaggctgcgcggctgcatcggacctcacagcctcaagtcgcggcatgaggcgaactttgcaaagcgcgctctcgccatgcaccgcccgacctccagcactgtgcgcagcaggacctcggagcccattcgcctgtggaaaccgagcccgcagcgggaaggcagtgggtggagggtgggcaggcaggggtctggggtccgcggctccccaccctcgcgccttcccgcgccagtcccgaacgctctcttggggcgttcctgcccagttgtcccggctgacctcgctctgcagccagcttgaggtcaggcggtcgctctctgcaggtcacaaaccctcggcgcaaaagtagggctttgaacgcgacaccgcaccagagcgcccagctaagcgagctgcctccacccccactgtgtcgggcggcgcaaactgcgggcgcaggcagaggagccgcggctctgcgccgggcgggagccgaagcccagagcctcgccagggcctccccgccgagcgcacttaccgtcgctgaggcagagcgcggtcagcacgaggaccagcacgaccacgaccttggcgttcatggcgcgggcgggcgggcgggcgggcggacgagcgcgggtcgggggccggacgccgagcgggcaatgcggctgacggagagtgaaagtgcggcggtgggaggcgcgcgccgggcgctttagaggggagagccaggcggggcggggcggggcgcgcggtgaggggcgggcccggagccgagtgctggccgtggccggggtctctgacgcgcgactccctcggcggcaccccccacccatccccttcgcccctcctccgctccctctgtgctcccgaggcgcagtgcgctccggcctttgaccttctcaggctccgctgggccccgcaccgctggcccggtctgcagtgaggtccgcagcctgagcgacgccggctggagggccgcttattgtccctgtgacagggccccactggagagactgaggaccttaggcgtaaagtggggcgcgcgtggaaagctgcgggacggggcctttcgatggcgggaactgaatgagaaccaatgaaaagcaaacaagttagtcccgggcggagggcctgctggcggtggcggcccaaggcagcc

SEQ ID NO: 39636 - DNA, 290 bp, Homo sapiens; identical to SEQ ID NO: 23025
  chr10:44882100-44882390
  hyper

SEQ ID NO: 39637 - DNA, 416 bp, Homo sapiens
  chr10:482039-482455
  hypo
cgaattcagttcagaccgggcgcacttcatgtactcagccaccacgtgtggtgagtgacagagatcatcttgcatgtgtgtccacattttactgcctttttcttgaccacagattctacctccggtttctctgtgtatgcagtgattgtttgcttaatattgcacattgtgggtaacgtgttgagcacgctcaggatcccataagcttcttcggaagctttccagctcttgttttagcaggcagcgcaggcactgctgggtcatcgtgaccatgggcaggcttggattgatttgctgctggtgtggatgggtggagagctccagtcctgcacccactccgatctccgcctcctggacttggcagggtggcatgctccgcccacaccagagctctctccgagctccgcctcctggac

SEQ ID NO: 39638 - DNA, 136 bp, Homo sapiens; identical to SEQ ID NO: 21699
  chr10:5898121-5898257
  hypo

SEQ ID NO: 39639 - DNA, 130 bp, Homo sapiens; identical to SEQ ID NO: 6750
  chr10:6023448-6023578
  hypo

SEQ ID NO: 39640 - DNA, 1284 bp, Homo sapiens; identical to SEQ ID NO: 29709
  chr10:64574564-64575848
  binary

SEQ ID NO: 39641 - DNA, 891 bp, Homo sapiens; identical to SEQ ID NO: 26176
  chr10:71332340-71333231
  binary

SEQ ID NO: 39642 - DNA, 162 bp, Homo sapiens; identical to SEQ ID NO: 21702
  chr10:73445891-73446053
  hypo

SEQ ID NO: 39643 - DNA, 238 bp, Homo sapiens; identical to SEQ ID NO: 15453
  chr10:73514960-73515198
  hypo

SEQ ID NO: 39644 - DNA, 1251 bp, Homo sapiens; identical to SEQ ID NO: 32467
  chr10:73846836-73848087
  binary

SEQ ID NO: 39645 - DNA, 4760 bp, Homo sapiens; identical to SEQ ID NO: 27492
  chr10:7449896-7454656
  binary

SEQ ID NO: 39646 - DNA, 157 bp, Homo sapiens; identical to SEQ ID NO: 33283
  chr10:75384244-75384401
  hypo

SEQ ID NO: 39647 - DNA, 423 bp, Homo sapiens
  chr10:75407371-75407794
  hyper
cgaggctcagagcatcttcttcaggaccagattctgcacccccggcccgaggcttttcatccaggttctgtaccagcgatagcagctcggggttgggcgagttcttcgtctcctcctttcccggccggaacatctgcttccgggtcccccggcgccgggcctcctgcaggatacccgtgcgggcagctggcacagagatgcgctgctcgcgagcgctggggggctcaggagcccctgggcctggggcaggcgcctctgggcgcgcagagggtcgcaaaggcgcagataggaagatagaagcggtggaggtcatggcagctgcgctaggaggagcggggggctctggagctccacctggggtgacaggccgactaggggctgggatgtacagggagctggtggctgtcacagggcccgaggagc

SEQ ID NO: 39648 - DNA, 168 bp, Homo sapiens; identical to SEQ ID NO: 21709
  chr10:76524062-76524230
  hypo

SEQ ID NO: 39649 - DNA, 983 bp, Homo sapiens; identical to SEQ ID NO: 30931
  chr10:8096629-8097612
  binary

SEQ ID NO: 39650 - DNA, 1388 bp, Homo sapiens
  chr10:83635064-83636452
  hyper
cgggggggcgaaggtgaagaccggctcctaggatgagtgaaggggcggccgctgcctcgccacctggtgccgcttcggcagccgccgcctcggccgaggagggcaccgcggcggctgcggcggcggcagcggcgggcgggggcccggacggcggcggcgaaggggcggccgagcccccccgggagttacgctgtagcgactgcatcgtgtggaaccggcagcagacgtggctgtgcgtggtacctctgttcatcggcttcatcggcctggggctcagcctcatgcttctcaaatggatcgtggtgggctccgtcaaggagtacgtgcccaccgacctagtggactccaaggggatgggccaggaccccttcttcctctccaagcccagctctttccccaaggccatggagaccaccaccactaccacttccaccacgtcccccgccaccccctccgccgggggtgccgcctcctccaggacgcccaaccggattagcactcgcctgaccaccatcacgcgggcgcccactcgcttccccgggcaccgggtgcccatccgggccagcccgcgctccaccacagcacggaacactgcggcccctgcgacggtcccgtccaccacggccccgttcttcagtagcagcacgctgggctcccgacccccggtgccaggaactccaagtacccaggcaatgccctcctggcctactgcggcatacgctacctcctcctaccttcacgattctactccctcctggaccctgtctccctttcaggatgctgcctcctcttcttcctcttcttcctcctccgctaccaccaccacaccagaaactagcaccagccccaaatttcgtaagtaaacactgtgtctcaactatgatttactactgagtttcccttctgccctcctgctgtctttttccctcgccgcctgttttctagcaagccccctcccccatcccaggtttggggcagagtgagagctgattaaaactggccaccagcggggaagaaggtgccagcctgctctggttctgggggggtgggggcgtgtaggaacgggagggagattgtcaggctccactggccccactttagcgggtcccaagtgagaacagatctcccaactcccttcaaagggttaacgcgagtgcgatccctcctcactgcagacctgctggcgagctgccggatcccgctccagtagagggccagggagggagagagggccttcccgaaggcactgagccccttctccgcccgccggtaggaaggaaagaaagcaaagcacatgcaaattgaccgacgataaaccacaaaaggaagttatgtccttgtgtggggtgacgagttgatggagataatggtagaatgttgctgaggac

SEQ ID NO: 39651 - DNA, 258 bp, Homo sapiens; identical to SEQ ID NO: 15458
  chr10:851928-852186
  hypo

SEQ ID NO: 39652 - DNA, 643 bp, Homo sapiens; identical to SEQ ID NO: 38745
  chr10:90342577-90343220
  hyper

SEQ ID NO: 39653 - DNA, 66 bp, Homo sapiens; identical to SEQ ID NO: 23453
  chr10:98292781-98292847
  hypo

SEQ ID NO: 39654 - DNA, 853 bp, Homo sapiens; identical to SEQ ID NO: 24939
  chr11:107799236-107800089
  binary

SEQ ID NO: 39655 - DNA, 1051 bp, Homo sapiens; identical to SEQ ID NO: 32478
  chr11:1103476-1104527
  hypo

SEQ ID NO: 39656 - DNA, 1470 bp, Homo sapiens
  chr11:110582246-110583716
  binary
cggaatcatccaggaccctggtgtggggggcagtactccccatatctgccccccgaaaactgctatggagcagccgcgcctcggcgggcaggtgagggggccgagcccaccagcgccgcagccccgctgcctaccttcttcagcgccggctgccgctcccgggcagacatcgccggccctgactttggggctgacaccgccaaagggcagtcagtgctcgcccaggccacttcgggaggcccaggggcacggcgaggggtcggggaaaggcgatcgcccactacagcccgcgcgcctagactgagggaggagccgggctgcagaaccggcggcggatggagacgggagggaggctgcgaggtcgctcgaggagagactaaggctctagaaacggagaagcgggcgctctgcgggaggcggcggcgctgccgctggccgtcaagggcgggaagtgttctgggactctcattaggggccgcgagcctcgagcgtcaaattcccgcggcgtccgcctagcgcgctgctgtggcgggcgcggagggcgcgcgccggcagtgggggctgcggcggcggagggcacgggcccccgctcagcgtcctcaccttcttggtgcagctgcctcccgcgagccgagacactcctgtcagggaagaggagcgccccggctgtccccctagagtctcctgctggggggacatcgcttccatgaagaaaatcttcaaacaaatcccagcccaggaggaggctacacgatcatgtccgcgggctgccggccggaggggcgaggacgcgcgggcggaggcgcggctgccgtgctcaggcagggagccgagctccgggtgctcgccgcgcgcctcccgtcggggccatgtacctccgcctgcgctcgacaccgcgggctggaggcgagtgcagcggcgacagcccgtcagcgccgcggcccgccccgcctcgggcccgccccctccgctccgggcgccctgcgccggggcccgcccccgcagccctcctcagccctcctccagcctgggccctcctagcctcgtcccagcctgcggcgcgcctggcgggcgtctctctatatatgttagcacaccggccaccggctgaccttttcggtctgtgactccgcgtgggtgcagcccgcaggagctcatcggcctgtgtcacgcacgggggcctctagtgcacggacacgcgcctctcccgccacctgcccactcccaccagaccccatcccttcccgcgccgtgcccgcggcggaaggcgcccctgcagcgcgtgcatccgcggagcggtggcgacctcagcctgagcagaggagttgcagtgattcctgcctcgctttcagcggactgcggagggaatcccccaccccaccccactggggatagggtggcacgtcgcagagtgtcgcagctgtacaaatttggaagcccacagcatcgcctgacctcttgtgcaatccc

SEQ ID NO: 39657 - DNA, 45 bp, Homo sapiens; identical to SEQ ID NO: 21718
  chr11:112108650-112108695
  hypo

SEQ ID NO: 39658 - DNA, 249 bp, Homo sapiens; identical to SEQ ID NO: 32481
  chr11:114115480-114115729
  hypo
